United States Patent Application Publication US 2013/0332133 A1 - sequence listing, part 17

SEQ ID NO: 176434 - protein, 237 aa, Unknown
  Bacterial polypetide isolated from the Sargasso Sea
FQVVLSQRFEAKLTKSPLEIYKKLRVTNPSPFMFFFNFNDFQIIGASPEILVRLRDNKITVRPIAGTRPRGKNVSQDKFYEKDLLKDKKELSEHLMLLDLGRNDAGKVSKINSVKITESFVIEKYSHVMHIVSNVVGEYNNKFSKFKSLLAGFPAGTVSGAPKIRAMEIIDELEKTKRKVYAGGIGYFSANGEFDTCIALRTAVAKKDKFYVQAGAGIVADSKPLKEYEETVNKAKA

SEQ ID NO: 176435 - protein, 255 aa, Unknown
  Bacterial polypetide isolated from the Sargasso Sea
RKAKKYIKIGDIFQVVLSQRFETKLTQNPIEIYKKLRVKNPSPFMYFFNFKDFQIIGASPEILVRLRNKKITVRPIAGTRPRGKNLKEDKFYEKDLLKDKKELSEHLMLLDLGRNDTGKVSKINTVKVTEEFVIEKYSHVMHIVSNVTGEFNKKYSKFDTLLSGFPAGTVSGAPKIRAMEIIDELENTKRKVYAGGIGYFSANGDFDTCIALRTAVSKNNKFYVQAGAGIVADSKPINEYKETVNKAKALLKSLE

SEQ ID NO: 176436 - protein, 270 aa, Unknown
  Bacterial polypetide isolated from the Sargasso Sea
MAGSFFGYLSYENIHNIEMIKKFKKINKLKTPDLILFVPKNLIIFDNLDNSLYFIRHFLGENNETIKYENLIRDVNKIQNKIINNIKLDPINFDKGIKTKVKSNMTKTKFIKNIKKAKNYIKNGDIFQVVPSQRFEVDFDAKGSTLYRVLRETNPSPFMYYFNLPDFQIVGSSPEILVRLRKNTVTVRPIAGTRPRGVNKKQDKKFEIDLMSDKKELAEHLMLLDLGRNDVGKVSRKSSVSVTAKFIVEKYSHVMHIVSNVIGKLKKDIS

SEQ ID NO: 176437 - protein, 195 aa, Unknown
  Bacterial polypetide isolated from the Sargasso Sea
EILVRLRDNKITVRPIAGTRPRGKSLKEDIYYEKDLLKDKKELSEHLMLLDLGRNDAGKVSKVNSVKVTESFIIERYSHVMHIVSNVIGDYNKKFSKFKSLLAGFPAGTVSGAPKIRAMEIIDELETTRRKVYAGGIGYFSANGEFDTCIALRTAVAKNKKFYVQAGAGIVADSKPINEYEETINKAKALINALR

SEQ ID NO: 176438 - protein, 265 aa, Unknown
  Bacterial polypetide isolated from the Sargasso Sea
MVAKAKDYILAGDIFQVVLSQRFKIPFKLPPFALYRSLRRTNPSPFLYYLNFENFSVVGSSPEILVRMRDGKVTIRPLAGTRKRGATQAEDQKLEKELLGDQKELAEHLMLLDLGRNDVGRVAKIGTVKVTEKMMIERYSHVMHISSNVQGEIDPKRGAMEALTAGFPAGTVSGAPKIRAMEIIDELEVEKRGIYAGTVGYFSANGSMDTCILLRTAILKDGNMYVQAGAGVVSDSVAEAEYQECQNKAEALIRSAEEAHKYINE

SEQ ID NO: 176439 - protein, 168 aa, Unknown
  Bacterial polypetide isolated from the Sargasso Sea
EDRFYEKDLLKDKKELAEHLMLLDLGRNDAGKVSKINSVRVTESFIIEKYSHVMHIVSNVVGKYNRKFSKFKSLLAGFPAGTVSGAPKIRAMEIIDELESTKRKVYAGGIGYFSANGEFDTCIALRTAVAKKDKFYVQAGAGIVADSKPLKEYEETVNKAKALINALK

SEQ ID NO: 176440 - protein, 292 aa, Unknown
  Bacterial polypetide isolated from the Sargasso Sea
VFDQVRRQVTAVAYADHSQNDDPIAARAAAERRLDALESQLQQPLPAGLTPLAWREQDAQSLKVVSNTSQSAFEDAVRQARNHIGAGDVFQLVLSQRLEAEVSHDPFDLYRSLRMVNPSPYMGFFSFNGWHLIGSSPEVMVKADPQDDGRVVASLRPIAGTRRRGSTAAEDQALEAELLADPKERAEHVMLVDLGRNDLGRVCQPGSVEVKELMLIERYSHVMHIVSQVEGDLQPQHDVWDLLRASFPAGTVSGAPKIRAMQLIHELEPDARGPYSGVYGSMDLSGALNTAI

SEQ ID NO: 176441 - protein, 203 aa, Unknown
  Bacterial polypetide isolated from the Sargasso Sea
FQIIGASPEILVRLRDNNITIRPIAGTRPREKNKSEDKFFEKDLLNDKKELSEHLMLLDLGRNDTGKVSKINSVKVTERFAVEKYSHVMHIVSNVVGKFNQKYSKFDTLLSGFPAGTVSGAPKIRAMEIIDELESTKRKVYAGGIGYFSANGDFDTCIALRTAVTKKNKFYVQAGAGIVADSKPLNEYKETINKAKALLKSLE

SEQ ID NO: 176442 - protein, 113 aa, Unknown
  Bacterial polypetide isolated from the Sargasso Sea
IVSNVIGEHDKRFSKFKSLLAGFPAGTVSGAPKIRAMEIIDELETTKRKVYAGGIGYFSANGEFDTCIALRTAVAKKNKFYVQAGAGIVADSKPLKEYEETVNKAKALINALK

SEQ ID NO: 176443 - protein, 204 aa, Unknown
  Bacterial polypetide isolated from the Sargasso Sea
SPEALVRLSGDKASLLPIAGTRPRGKDASEDLSHEQSLLADEKEIAEHVMLVDLARNDLGRVAKHSTIEVKPYQSIEHYSHVMHIVSGVEGTLEDDKDAFDLFAAAFPAGTLVGAPKVRAMELIDEIEPNLRGVYGGTVGYFAKNGDMDQAIAIRTIVFSDGQYCFQAGAGIVADSVPENEFNEVMAKSEILRTALKMVKEGSL

SEQ ID NO: 176444 - protein, 223 aa, Unknown
  Bacterial polypetide isolated from the Sargasso Sea
YKKLRVTNPSPFMYFFNFHDFQIIGASPEILVRLRDNKITVRPIAGTRPRGKNIAQDKFYEKDLLKDKKELSEHLMLLDLGRNDAGKVSKINTVKVTESFVIEKYSHVMHIVSNVVGEYNKKFSKFKSLLAGFPAGTVSGAPKIRAMEIIDELETTKRKVYAGGIGYFSANGEFDTCIALRTAIAKNNKFYVQAGAGIVADSKPIKEYEETVNKAKALINALK

SEQ ID NO: 176445 - protein, 196 aa, Unknown
  Bacterial polypetide isolated from the Sargasso Sea
PEILVRLRDNKITIRPIAGTRPRGKNKKQDKFFEKDLLKDKKELSEHLMLLDLGRNDTGKVSKINSVKVTESFKIERYSHVMHIVSNVEGSFNNKFSKFETLLSGFPAGTVSGAPKIRAMEIIDELENTRRKVYAGGIGYFSANGDFDTCIALRTAVSKNNKFYVQSGAGIVADSKPISEFKETENKAKALLKALE

SEQ ID NO: 176446 - protein, 201 aa, Unknown
  Bacterial polypetide isolated from the Sargasso Sea
VLGSSPEILVRLRKGEVTIRPIAGTRPRGKNNKEDKKYEIDLLRDKKELAEHLMLLDLGRNDVGKVAKTNSVKVTEKFKVEKYSHVMHIVSNVVGKFNNKFTLFETLLSGFPAGTVSGAPKIRAMEIIDELEKNKRKLYAGGIGYFTPNNEFDTCITLRTALIKDKKFYVQAGAGVVADSIPEKEYAETVNKAKALMRAVD

SEQ ID NO: 176447 - protein, 278 aa, Unknown
  Bacterial polypetide isolated from the Sargasso Sea
LRIFKKESFKKIKTNKNKIFSNITKKKFKKNVLQAKKYIKRGDIFQVVLSQRFETKLTKKPIEIYKKLRLTNPSPFMYFFNFKDFQIIGSSPEILVRLRNNRLTIRPIAGTIPRGNNVKKDNFNKNKLLNDKKELAEHLMLLDLGRNDIGKVSKINTVKVTEKFIIEKYSHVMHIVSNVEGIFNKKYSILDTMLAGFPAGTVSGAPKIRAMEIIDELEKSKRKMYAGAIGYFSANKNFDTCIALRTALIKNNKFYIQSGAGVVADSKPEKEYQETVNK

SEQ ID NO: 176448 - protein, 244 aa, Unknown
  Bacterial polypetide isolated from the Sargasso Sea
NNNPFNLYRSLRMVNPSPYMSFFDFGSWYLIGSSPEVMVKAEKNKNSQIVASLRPIAGTRPRGINNQQDLELEKELLKDPKEIAEHVMLIDLGRNDLGRVCEIGTVKVKDLMVIEKYSHVMHIVSQVEGILKNNADVWDLLKASFPAGTVTGAPKIRAMQLIKDFEKDARGPYAGVYGSIDINGALNTAITIRTMIVKPSRDGKYDVSVQAGAGIVADSFPENEYQETINKAKGILKALACLDK

SEQ ID NO: 176449 - protein, 177 aa, Unknown
  Bacterial polypetide isolated from the Sargasso Sea
KRLNEIEDEENAKDLLSDPKELAEHLMLIDLGRNDVGKISKMGTVKVSEKMVIEKYSHVMHIVSNVEGTKKENLSFIDVLKSALPAGTLSGAPKIRAMEIINELEPSSRGIYGGAIGHISWDGDIDTAIAIRTAVIKDNKIHVGAGAGVVADSIPENEWNECLQKAHVFLDAIEMIK

SEQ ID NO: 176450 - protein, 296 aa, Unknown
  Bacterial polypetide isolated from the Sargasso Sea
IFFVQNIFKEENIINYELKYQAIKDTFSELQHFGNIKLPENFHKSNKKIKIKSNISKSKFKKIVLKAKNYIKKGDIFQVVLSQRFEASIDKPPLEIYNTLRILNPSPFMFYFNYDDFQILGSSPEILVRLLNNEITIRPIAGTRPRGRNKKEDKKLTTELLKDPKELAEHLMLLDLGRNDVGKVSKTNSVKVTERFKVEKYSHVMHIVSNVTGKLKKDFSLFETFLSGFPAGTVSGAPKIRAMEIIDELENTKRNLYAGGIGYFTANQDFDTCIALRTALIKNKKIYVQAGAGIVA

SEQ ID NO: 176451 - protein, 125 aa, Unknown
  Bacterial polypetide isolated from the Sargasso Sea
SFKVEKYSHVMHIVSNVVGKFNKQVSTFEALLAGFPAGTVSGAPKIRAMEIIDELEKNRRNLYAGGIGYFTPNNEFDTCIALRTALIKNNKFFVQAGAGIVADSKPEKEFTETVNKAKALMRAVD

SEQ ID NO: 176452 - protein, 94 aa, Unknown
  Bacterial polypetide isolated from the Sargasso Sea
LSGFPAGTVSGAPKIRAMEIIDELEKNKRKLYAGGIGYFTPDNEFDTCIALRTALIKKDKFYVQAGAGIVADSKPEKEYLETVNKAKALMKAVD

SEQ ID NO: 176453 - protein, 258 aa, Unknown
  Bacterial polypetide isolated from the Sargasso Sea
AGDIFQVVPSQRWTQNFSQPPFALYRSLRRTNPSPFMFYFNFGGFQVIGASPEILVRVFGKEVTIRPIAGTRPRGATPEQDRALEADLLADKKELAEHLMLLDLGRNDTGRVSKIGTVHPTEKFTIERYSHVMHIVSNVVGELADDQDALSALLAGLPAGTVSGAPKVRAMEIIDELEPEKRGVYGGGVGYFSGNGDMDICIALRTAIVKDQKLYIQAGGGVVYDSDPEAEYQETVHKSNAIRRAAADAARFTGNGNG

SEQ ID NO: 176454 - protein, 194 aa, Unknown
  Bacterial polypetide isolated from the Sargasso Sea
IVQNDKAEIHPIAGTFRRTGNDEKDAKAAGALTRDPKENSEHVMLVDLARNDLSRNGSKVVVEKNREIQFYSHVIHLVSKVSCIMKKSTKTFRVVADTFPAGTLSGAPKHMALRLIDRYETTKRNFYGGAIGYMDFRGNFNHAIIIRSFLSKDHKLHYQAGAGIVADSVPKNELQEVYNKLGALDKALSLAEKV

SEQ ID NO: 176455 - protein, 270 aa, Unknown
  Bacterial polypetide isolated from the Sargasso Sea
NKNSNKELPKKVKIKSNTSKKKFLEIVNKAKKYIKKGDIFQVVLSQRFETSLSKNPLEIYKKLRITNPSPFMYFFNFEDFQIIGASPEILVRLRNGKITIRPIAGTRPRGKNKKQDDFYIKDLLKDKKELSEHLMLLDLGRNDAGKVSKINTVKVTERFKIEKYSHVMHIVSNVTGHFNHKYSKFNSLLAGFPAGTVSGAPKIRAMEIIDELEKSKRKVYAGGIGYFSSNGDFDTCIALRTALAKKNKFYVQAGAGIVADSKPLNEYKET

SEQ ID NO: 176456 - protein, 230 aa, Unknown
  Bacterial polypetide isolated from the Sargasso Sea
PFDLYQALRFLNPSPYMYFLNFGICQVVGASPEILVRLQGDQITLRPIAGTRRRGSNEIEDEENAKDLLSDPKELAEHLMLIDLGRNDVGKISKMGTVKVSEKMVIEKYSHVMHIVSNVEGSKKENLSFIDVLKSALPAGTLSGAPKIRAMEIINELEPSSRGIYGGAIGHISWDGDIDTAIAIRTAVIKNNKIHVGAGAGVVADSIPENEWNECLQKAHVFLDAIEMIK

SEQ ID NO: 176457 - protein, 262 aa, Unknown
  Bacterial polypetide isolated from the Sargasso Sea
MLIQSSIKNVDSKIPLKSKNIKVKSNTSKNRFLQMINKAKKYIKLGDIFQVVLSQRFEAKLTKKPIDIYKKLRVTNPSPFMFFFNFNDFQIIGASPEILVRLRDNKITVRPIAGTRPRGKTLKEDLFYEKDLLNDKKELSEHLMLLDLGRNDAGKVSKINTVKVTESFIIERYSHVMHIVSNVVGEYNKKFSKFKSLLAGFPAGTVSGAPKIRAMEIIDELETTKRKVYAGGIGYFSANGEFDTCIALRTAVAKKNKFYVQA

SEQ ID NO: 176458 - protein, 309 aa, Unknown
  Bacterial polypetide isolated from the Sargasso Sea
PFAVFLGGVIGYDMVACVEQLPEVPSAENQCPDYVFYLAETLLVVDHQRQQSRIVGNVFCGEQAPANCFAIGKRLEQLKQLLQTPAAEPESVTAIDTDVQVDISDADFMAQVEKLKQHIVAGDVFQVVPSRCFTLPCPNPLAAYQRLKQQNPSPYMFYLKDASFSLFGASPESALKFDAKSRQVEIYPIAGTRRRGFKSDGSIDRDLDSRIELELRQDEKEKAEHLMLVDLARNDVARISVPGSRYVKELLKVDRYSYVMHLVSRVVGTLKPELDALHAYQACMNMGTLVGAPKVKAAELIRGVRVSAA

SEQ ID NO: 176459 - protein, 323 aa, Unknown
  Bacterial polypetide isolated from the Sargasso Sea
VFDNLKNKCTLIILVNSDEEKTEAENRLDDLESRLQSPLSFESFTTPERSITESDFISGFGETDFKKAVEKAKKYIEDGDIMQVVCSQRMSLPFTADPIALYRSIRQLNPSPYMYYLNLDEFYIVGSSPEILARLEDDKVTVRPIAGTRRRGKDDEDDVAMEKDMVNDPKEIAEHLMLIDLGRNDVGRIAEPGSVVVTEQFGVEKYSHVMHMVSNVEAEIRKDFSAIDVFKATFPAGTVSGAPKIRAMEIIDEFEPVKRGIYGGAIGYLSWQGNMDMAIAIRTAVIKDDVLYIQAGGGWVADSVPDLEWKESLNKGRAILRLP

SEQ ID NO: 176460 - protein, 298 aa, Unknown
  Bacterial polypetide isolated from the Sargasso Sea
MFIPNNLLIYDNFSNSLFIIKHYLSNAKVKDFHKQIIDINGIENYIKKMKGYRDINFNKKKKITVKSNMTKTTFKTNIKKAKQYIKNGDIFQVVPSQRFETYYNQKSSFLYEVLRKTNPSPFMYYFNLPKFEIVGSSPEILVRLRSNEITIRPIAGTRPRGRNKIEDKKYETELMNDKKEIAEHLMLLDLGRNDVGKVSKKSSVKVTSKFKIERYSHVMHIVSNVTGKLKTDTSSISALMAGFPAGTVSGAPKIRAMQIIDELETTKRGIYSGGIGYISSNGDMDTCIVLRTRDNYKK

SEQ ID NO: 176461 - protein, 209 aa, Unknown
  Bacterial polypetide isolated from the Sargasso Sea
YFNFGDFQILGSSPEILVRLINGDVTIRPIAGTRPRGVNKIQDKKFTSELLKDPKELAEHLMLLDLGRNDVGKVSKKNTVKVTEKFKVEKYSHVMHIVSNVIGKIRNNLSLFETFLSGFPAGTVSGAPKIRAMEIIDELENSKRKLYAGGIGYFTANQEFDTCIALRTALIKNKKIYVQSGAGIVADSSPKNEYEETVNKAKALLKAIN

SEQ ID NO: 176462 - protein, 286 aa, Unknown
  Bacterial polypetide isolated from the Sargasso Sea
DVKSNSSQERFEAAVNTAREHIAAGDVFQLVISQRLETVVPQQPLELYRSLRMVNPSPYMAFFDFGDWQLIGSSPEVMVQADPAPEGIRASLRPIAGTRPRGTTAHEDRDLELDLLADPKERAEHVMLVDLGRNDLGRVCQPGSVAVKDLMVIERYSHVMHIVSQVEGRLAPKHDVWDLLMASFPAGTVSGAPKIRAMQLIHELEPDARGPYSGVYGSVDLAGALNTAITIRTMVVQPHPAGGCRVKVQAGAGVVADSNPTAEYQETLNKARGMLTALACLNPEMP

SEQ ID NO: 176463 - protein, 388 aa, Unknown
  Bacterial polypetide isolated from the Sargasso Sea
GQLYGVWGYELIQWIEPSVPVHPRQESDPPDGIWMLMDSILIFDQVKRQITAVAFADLSQGQSEDAAWDGAMARIAALRRGMEAPLPLVDPLPWDAQAKQLPDVKSNCSQERFEAAVDTAREHIAAGDVFQLVISQRLETFVPQQPLELYRSLRMVNPSPYMAFFDFGDWQLIGSSPEVMVQADPAPEGIRASLRPIAGTRPRGTTAHEDRDLELDLLADPKERAEHVMLVDLGRNDLGRVCQPGSVAVKDLMVIERYSHVMHIVSQVEGRLAPQHDVWDLLMASFPAGTVSGAPKIRAMQLIHELEPDARGPYSGVYGSVDLAGALNTAITIRTMVVQPDPSGGCRVKVQAGAGVVADSKPTAEYQETLNKARGMLTALACLNPERP

SEQ ID NO: 176464 - protein, 527 aa, Unknown
  Bacterial polypetide isolated from the Sargasso Sea
MNLQQITTTTGQVASFSQTLSIQPDPLQSFRALTSQGQMALLLESAEIDSKNSLKSLMLIDAALRIECNGLQVQVEALTDNGKTLLPYLASLLQGKAELDLSSNQLRVQFAKADPLLDEESRLLLPNSLTVLRLLQQQLQNNSDEPLAIFLGGVIGYDLVAMVEDLPQVPTAENQCPDYLFYLAETLLVVDHQAGNSRLIGNVFCGAAAQQQYFVIGQRLSELQQLLQQAAETTTQAAETAAKAEVKVDISDADFVAQVEALKQNIVAGDVFQVVPSRCFSLPCPDPQAAYAKLKQQNPSPYMFYLQDRNFSLFGASPESALKYEAKTAQVEIYPIAGTRRRGFAANGTIDRDLDSRIELELRQDEKEKAEHLMLVDLARNDVARISVPGSRYVKELLKVDRYSYVMHLVSRVVGTLKPELDALHAYQACMNMGTLVGAPKVRAAELIRGVEKKRRGSYGGAVGYLAGNGDFDSCIVIRSAYVQQGTAYIQAGAGVVYDSVAQAEADETRSKAQAVINAIQSAGAAV

SEQ ID NO: 176465 - protein, 395 aa, Unknown
  Bacterial polypetide isolated from the Sargasso Sea
ARYKVPTIAGLPRFNGGLVGYFAYDSVRYVESRLAAGVNPDALGTPDILLNVSDAVVVFDNLAGKMHAIVLVDPAEADAFERGQAQLQEILHKLRQPFTPRLGVDLNKPAGEEPVFRSSFSREDYERSVSAIKDYILAGDCMQVVISQRMSIPFKAAPIDLYRALRCINPTPYMYFFNFGDFHVVGSSPEVLVRVEDNLVTVRPIAGTRPRGATEEADLALEEDLLADAKEVAEHLMLIDLGRNDTGRVSEIGSVKLTEKMVIERYSNVMHIVSNVTGELKKGLTSMDALRAILPAGTLSGAPKIRAMEIIDELEPVKRGVYGGAVGYYAWNGNMDTAIAIRTAVIKDGELHVQAGAGIVADSVPALEWEETLNKRRAMFRAVALAEQTAVQAQE

SEQ ID NO: 176466 - protein, 155 aa, Unknown
  Bacterial polypetide isolated from the Sargasso Sea
VDLARNDLARICTPGSRYVADLTKVDRYSFVMHLVSRVVGELRNDLDVLHAYRACMNMGTLSGAPKVRAMQLIAEAEGRRRGSYGGAVGYFTAHGDLDTCIVIRSALVEDGIATVQAGAGIVLDSVPQSEADETRNKARAVLRAIATAHHAQETF

SEQ ID NO: 176467 - protein, 216 aa, Unknown
  Bacterial polypetide isolated from the Sargasso Sea
YLIGSSPEVMVKAEKNKTNQIVASLRPIAGTRPRGQDAEQDLKFEKDLLKDPKEISEHVMLIDLGRNDLGRVCETGTVEVKDLMIIEKYSHVMHIVSEVEGILKSNTGVWDLLKACFPAGTVTGAPKIRAMQLIKDFEKDARGPYAGVYGSIDINGALNTAITIRTMIVQPSNDGEYIVSVQAGAGIVADSSPANEYQETINKAKGILMALACLDR

SEQ ID NO: 176468 - protein, 400 aa, Unknown
  Bacterial polypetide isolated from the Sargasso Sea
QVKHDLKNYHQFGQLYGSWGYELINRIEPSVPINEIPENNIPHGSWMFFDQLVVFDQIKRCITAVVYADTTSSKESSIEELYLNSISKIQETRNLMRIPLKENEFLDWNENENLNLDLESNWKKKDFEDAVISAKEYIRKGDIFQIVISQRFQTQVNNDPFSLYRSLRMVNPSPYMSFFDFGSWYLIGSSPEVMVKAEKNKNSQIVASLRPIAGTRPRGIDNQQDLELEKELLKDPKEIAEHVMLIDLGRNDLGRVCEIGTVKVKDLMVIEKYSHVMHIVSQVEGILKNNADVWDLLKASFPAGTVTGAPKIRAMQLIKHFEKDARGPYAGVYGSVDINGALNTAITIRTMIVKPSRDGKYDVSVQAGAGIVADSFPENEYQETINKAKGILKALACLDK

SEQ ID NO: 176469 - protein, 389 aa, Unknown
  Bacterial polypetide isolated from the Sargasso Sea
IIIEKIIEDFKFKIPSYLPPISSIISGYFSYDIIRYIEKIPDRCLDDLKMPDARIIRPKTLIIHDNLKKKIYFIENCFSDEKIKNYENKFKDIKQEIEKLIFLANYKNNFITKENKKKIIVKSNISKNKFINNVIKAKKYIKIGDIFQVVLSQRFEAKLTKKPLDIYKKLRIKNPSPFMYFFNFEDFQIIGASPEILVRLRNNKITIRPIAGTRPRGSNSREDKFYEKDLLKDKKELSEHLMLLDLGRNDAGKVSKINSVKVTEKFVIEKYSHVMHIVSNVIGDFNKKFSKFDTLLSGFPAGTVSGAPKIRAMEIIDELENSKRKVYAGGIGYFSANGDFDTCIALRTAVSKNNKFYVQAGAGIVADSKPINEYKETINKAKALLKSLE

SEQ ID NO: 176470 - protein, 192 aa, Unknown
  Bacterial polypetide isolated from the Sargasso Sea
VRLRDNKITVRPIAGTRPRGKTVKEDTFFEKDLLKDKKELSEHLMLLDLGRNDAGKVSKINSVKVTESFIIERYSHVMHIVSNVIGEYNKKFSKFKSLLAGFPAGTVSGAPKIRAMEIIDELEKTKRKVYAGGIGYFSANGEFDTCIALRTAVAKNNKFYVQAGAGIVADSKPINEYEETVNKAKALINALR

SEQ ID NO: 176471 - protein, 464 aa, Unknown
  Bacterial polypetide isolated from the Sargasso Sea
MNKYFDIELNDETPASVFMKLRDISPTFLLESIERGVDQSRHSFLGIGASQSLQVRDGTYILNGEEISKPSSHNEMMNLFRKTLKEIPDLKPSIDDIPFSGGMVGFSSFDMIRHFEKLPVPEGKDGILSPSDCSYIAPTSLLIFDHLENKMALLHCGNEEERINLRDEILSLLSKEITQSQKKKTYSEPIANIKKETFYDAVEKAKHHIFEGDIFQIVLSIAFSGSYDLDPFDVYRAMRLINPSPYMFYCESDGLKIAGSSPEALVKLGGNKASLRPIAGTRPRGKDSEEDQSYRESLLADEKEIAEHIMLVDLARNDLGRVAKHGSIEVKPYQSIEYYSHVMHIVSGVQGHLEEEKDAFDLFAAAFPAGTLVGAPKVRAMELIDEIEPQLRGIYGGTVGYFSKNGGMDQAIAIRTIVFSDQTYCFQAGAGIVADSLPENEYKEVLAKSQILRTALKMVKEGEL

SEQ ID NO: 176472 - protein, 483 aa, Unknown
  Bacterial polypetide isolated from the Sargasso Sea
MLNKTISEFKRSHINKKNQILFHTIKSNGIRETENLINNFLIEKNSFIFESVEKGKIKGRYTILGRNPDYIWEFQGNKCKKIINNKIKILKNSPKNVIDKIIENFKFDTPKELPNICSIISGYFSYDIIRYIEKIPNKCKDDLNIPDVRIIRPKSLIILDNFKKKIHFIRNFFKEEKVKNYFQAYESAKSDIENLILLANNKNYFENEKKLKVKIKSNISKQKFLNNVIKAKKYIKKGDIFQVVLSQRFEAKLQKDPLEVYKKLRVTNPSPFMYFFNFKDFQIIGASPEILVRLRDDQITIRPIAGTRPRGKNKKQDIFYAKDLLRDKKELAEHLMLLDLGRNDTGRVSQINTVKVTEKFKIERYSHVMHIVSNVVGKFNNGYSKFDTLLSGFPAGTVSGAPKIRAMEIIDELETTKRKVYAGGIGYFTAAGEFDTCIALRTAVVKDGFLYAQAGAGIVADSKPIKEYIETENKAKALIKAME

SEQ ID NO: 176473 - protein, 207 aa, Unknown
  Bacterial polypetide isolated from the Sargasso Sea
MSVSGWILTRNIVRLEDSNITLRPIAGTRKRGANEEEDKNNEKDLLNDPKELAEHLMLIDLGRNDVGRVSEIGSVKLTEKMVIERYSHVMHIVSNVVGKLSRGLNFTDALKATLPAGTLSGAPKIRAMEIINELEPSSRGIYGGAIGYISWNGNIDTAIAIRTAVIRNNKIHVGAGAGIVADSDPEKEWEECVQKSKVFLDAMEMIS

SEQ ID NO: 176474 - protein, 486 aa, Unknown
  Bacterial polypetide isolated from the Sargasso Sea
MNINRSFKDFKFRHRSNKNQIIYTSKKIQEDEEILNLIDNFLSEKNSFIFESVEKGKIKGRYTIFGKNPDKIWEFKNKISYLIQNEKKIKLKDKPENLIEKIIEEFKFETPKNLPKLCSLISGYFSYDSIRYIEKIPNNCKDDLNIPDVRLLRPRTLIIHDNLKKEIFYIRNIYKDEKIRDYQKKFDEVKSDLFRLLIQSSIKNIDNRTPLKSKNIKVKSNTSKNRFLQMINTAKKYIKLGDIFQVVLSQRFEAKLTKKPIDIYKKLRVTNPSPFMFFFNFNDFQIIGASPEILVRLRDNKITVRPIAGTRPRGKTLKEDRFYEKDLLNDKKELSEHLMLLDLGRNDAGKVSKINTVKVTESFIIERYSHVMHIVSNVIGEYNKKFSKFKSLLAGFPAGTVSGAPKIRAMEIIDELETTKRKVYAGGIGYFSANGEFDTCIALRTAVAKNNKFYVQAGAGIVADSKPLREYEETVNKAKALINALK

SEQ ID NO: 176475 - protein, 286 aa, Unknown
  Bacterial polypetide isolated from the Sargasso Sea
MNLEIKSNWKKKDFEDAVLSAKEYIRKGDIFQIVISQRFNTHVNNDPFNLYRSLRMVNPSPYMSFFDFGSWYLIGSSPEVMVKAEKNKNSQIVASLRPIAGTRPRGNDPQEDLELEKDLLKDPKEIAEHVMLIDLGRNDLGRVCEIGTVGVKDLMVIEKYSHVMHIVSEVEGILKNNTDVWDLLKACFPAGTVTGAPKIRAMQLIKHFEKDARGPYAGVYGSIDINGALNTAITIRTMIVKPLKDGKYNVSVQAGAGIVADSSPENEYQETMNKAKGILKAIACLD

SEQ ID NO: 176476 - protein, 495 aa, Unknown
  Bacterial polypetide isolated from the Sargasso Sea
MIFSHITTTPGEVTSITQTRDYISSPLALYAALDKPNSLLLESAEIDSKDSVKSLILVDCALRIVCQGKTVTITAQSNNGHQLLSYLQAHVKNCNAELNDTTLTLNYLSTSNDIDEASKLVADNAFSALRTCINSIKSTTDNPFSLFLGGVFAYDMVANFEQLSDVPDGENSCPDYVFYLAETLVVIDHQKQTTELIGNVFNGPDVHANCFEVGKQLEQLNSLCDNAAQYSAPLNKGECEVNVDISDSTYCQQVVKLKKNIVDGDIFQVVPSRTFSLPCPNALHAYSQLKQQNPSPYMFYMRDEDFALFGASPESALKYDINNQQVEVYPIAGTRPRGKFANGQINPDLDSRIELELRNDQKERAEHLMLVDLARNDVARISVAGTRHAKELLKVDRYSQVMHLVSRVVGTLKPELDALHAYQACMNMGTLVGAPKVRAAELVRQTEGKRRGSYGGAVGYLTGDGAMDSCIVIRSAFVKNNMAYVQAGAGVVFDS

SEQ ID NO: 176477 - protein, 369 aa, Unknown
  Bacterial polypetide isolated from the Sargasso Sea
MGSMLVGYFSYDIIRYIEKIPNKCKDDLKIPDVRLCRPKNLIIYDNLKKKIHYIENVYADVKIKNYKETYDSILKRFELYKSFENIKLPDQFTFKPNKNLVKSNTTKNKFKLLVKKAKNYIKKGDIFQVVLSQRFERKINKRPIEIYNHLRKSNPSPFMFYFNYEDFNVLGSSPEILVRLRKGEVTIRPIAGTRPRGKNIKEDKKYMIDLLRDGKELAEHLMLLDLGRNDVGKVSEVNTVKVTEKFKVEKYSHVMHIVSYVVGKFNNKLSIFETLLSGFPAGTVSGAPKIRAMEIIDELEKNRRKLYAGGIGYFTPNNEFDTCIALRTALIKNDKFYVQAGAGIVADSKPEKEYTETVNKAKALMKAVD

SEQ ID NO: 176478 - protein, 366 aa, Unknown
  Bacterial polypetide isolated from the Sargasso Sea
MLVGYFSYDIIRLIEKIPNKCKNDINIPDIRLMRPRNLVIYDNVKKKIFFIQNIFKEESIVNYELKYQSIKNTFAELQHFGKIRLPENFHKSNKKIKFKSNISRSKFKKNVLKAKDYIKKGDVFQVVLSQRFEAPIDKPPLEIYNTLRILNPSPFMFYFNYDDFQILGSSPEILVRLLNNEVTIRPIAGTRPRGKNKKQDKKLTVELLKDPKELAEHLMLLDLGRNDVGKVSKTNSVKVTERFKVEKYSHVMHIVSNVTGKLRKNFSLFETFLSGFPAGTVSGAPKIRAMEIIDELEDSKRKLYAGGIGYFTANQDFDTCIALRTALIKNKKIYVQAGAGIVADSNPKNEYKETVNKAKALLKAIN

SEQ ID NO: 176479 - protein, 459 aa, Unknown
  Bacterial polypetide isolated from the Sargasso Sea
MITKEEFNTLQDRGFNVIPIVKEISLTNASPLSVFNTFLRTKNSFLLESVEGGNKWAQYSIIGLDCHDYFKISGNEVISFENNQQTSFHSESPLDLIKEKIEKYNCAKFDDLPRFFGGYVGFFAYESSKYAEKRIESLKEKPSKFDENMPDIFLVKAKKLVVFDNFSNKIKIIINTFLDTGSYDQSIEEIVHIEDELKKENNFEPKDFSLKASEEAFDSNFSKEDFLKAVSVAKDYIVDGDVMQVVLAQDFSKEFTHEPFDLYQALRFLNPSPYMYFLNFGICQVVGASPEILVRLQGDQITLRPIAGTRRRGSNEIEDEENAKDLLSDPKELAEHLMLIDLGRNDVGKISKTGTVKVSEKMVIEKYSHVMHIVSNVEGSKKENLSFIDVLKSALPAGTLSGAPKIRAMEIINELEPSSRGIYGGAIGHISWDGDIDTAIAIRTAVIKNNKIHVELGQG

SEQ ID NO: 176480 - protein, 450 aa, Unknown
  Bacterial polypetide isolated from the Sargasso Sea
NKYSFLYESVEKGSEKGRYSICGYDSLRTIQLTNDTLTLENNKVIKKIKYRGSPLKKIDAIIKNLKFIKSKGLPPMSGAFFGYLAYENINKVEKISSKRKKDDLKTPDIIMFIPNNLLIYDNFSASLFIIKHYLSSAKARYFHKQIIDINEIENYIKKVKGYRDINFNKKKKISIKSNMTKTTFKTNIKKAKQYIKNGDVFQVVPSQRFETNFNQKSSFLYEVLRKTNPSPFMYYFNLPKFEIVGSSPEILVRLRSNEITIRPIAGTRPRGKNKIEDKKFESELMNDKKEIAEHLMLLDLGRNDVGKVSKKSTVKVTSKFKIERYSHVMHIVSNVTGKLKPDTSSISALMAGFPAGTVSGAPKIRAMQIIDELETTKRGIYSGGIGYISSNGDMDTCIVLRTGIIIKNKLYVQAGGGVVFDSDSEKEFNETINKAKAVLNAAEIVMGNVQ

SEQ ID NO: 176481 - protein, 480 aa, Unknown
  Bacterial polypetide isolated from the Sargasso Sea
MEPIRYKGTVLYCNIYLEFKYRISLACIWVNTFGKHSISKIPLVYTETQPFDVYNKISRNYTHSFLFESLEGPDELAETSIMGFDPEIIVKGYFDKITIQSRDGKTETIQTDTPLEEIKKLIKKTDDMSYRYLGGAVGNIDYDAIRLFENIPGKKDLEKPIMEFGIYNDGILYDNKKKQFFYFYYDEDRKDKIKKTDEDVGTFEMSDIDINLNKEQFEQIVNKAKEYVHSGDVFQVVLSRRFSFEAKGDYLRVYEKLRELNPSPYMFHLKMDENVIIGSSPEMLLRVTGRDVETFPIAGTRKITEDEEKNEKLKNELLNDEKELAEHTMLVDLGRNDIGRVCDYGTVKVKELMEIKRFSHVQHIVTHVVGKLNEKNDMYDAFEAVFPAGTVSGAPKVRAMEIIQELEPIQRETYAGAVGYFSFNGCCDFAIAIRSIFANKERGFVQAGAGIVFDSIAENELKETEHKANAMITALKEASK

SEQ ID NO: 176482 - protein, 488 aa, Unknown
  Bacterial polypetide isolated from the Sargasso Sea
MISKEEYIEFAENGFNIVPLIKSIEKNLDSPIKVFSRIKNKKNTFLLESIEGGEKWAQYSIIGLDCKDSIKVSDNKIEIKTALGTNLIECKEPLNELNKLIGEYKTPILDDMPRFYGGYVGFFAYESAKYAENKINALQRKDSKFDVDMPDIYLVKSEKIIVYDNFNNSIQAIYNANPQKTSYEDALVIIDEIQNSIDHSGEFKETSYSNTTGQLEFKSNFTKNEYISSVNKIKEYIKEGDVMQVVLAQDFYKSFNGDSFELYAALRQINPSPYMYYLNLDECEVVGSSPEILVRLEDSNITLRPIAGTRKRGANKEEDKNNEKDLLNDPKELAEHLMLIDLGRNDVGRVSEIGSVKLTEKMVIERYSHVMHIVSNVVGKLSKGLNFTDALKATLPAGTLSGAPKIRAMEIINELEPSSRGIYGGAIGYISWNGNIDTAIAIRTAVIRDNKIHVGAGAGIVADSDPEKEWEECVQKSKVFLDAMEMIS

SEQ ID NO: 176483 - protein, 454 aa, Unknown
  Bacterial polypetide isolated from the Sargasso Sea
ISEDHENSFLFESLKDGDLSGRYSVIGIKPDKILKIRKKVSKIYNGKKIAETVNKEPIEAIRYFVNNSLIKISEDIPSIASGIFGYIGYDFVANIEELPEEKIDEFNIPDCILLRPSITVVFDKKLDEILICKAVWYDDNTNADTAFNLAESELSQIKEKIKSDQIIKLKSNQKELGSIQSNFTKEQYFENVRKAREFIKAGDIFQVVPSQRLSIEFNAHPFLLYETLRRINPSPYMYYIKFGDFFIVGSSPETLVKVEKNKVTIKPIAGTRLKEKGKEEEIKEDLLSDPKELAEHLMLLDLGRNDVGRVSKVGSINVKESFQIQETSHLYHIYSTVEGDLNPEEDRVSALCAGFPAGTVTGAPKIRAMEIINEIEDRKRSIYSGAIGYFSSSGDMDTAIALRTAVIKDNKMYVQAGGGVVYDSDEEYEFNETLNKAQALFSAAKEVFTKQEMK

SEQ ID NO: 176484 - protein, 208 aa, Unknown
  Bacterial polypetide isolated from the Sargasso Sea
DECQVVGSSPEILVRLEDSNITLRPIAGTRKRGANEEEDKNNEKDLLNDPKELAEHLMLIDLGRNDVGRVSEIGSVKLTEKMVIERYSHVMHIVSNVVGKLSKGLNFTDALKATLPAGTLSGAPKIRAMEIINELEPSSRGIYGGAIGYISWNGNIDTAIAIRTAVIRDNKIHVGAGAGIVADSDPEKEWDECVQKSKVFLDAMEMIS

SEQ ID NO: 176485 - protein, 488 aa, Unknown
  Bacterial polypetide isolated from the Sargasso Sea
MISKEEYIDYAGKGFNLVPIIKELEIDSDSPITLYSKIKNKSNTFLLESIEGGIKWAQYSIIGLDCTDSIKISDNFIEISENGEINSYECADPLTEINRIISNYKTPEIEDLPRFYGGYVGFFAYESSKYAEKKIENLEKKESKFKEHMPDIYLVKAEKLIVFDNFNQKKFAIYNANPSSSSYEEAINSVSEISDSIDQAFEKVGQDFKKVKGELEFQSNFSKKEFITAVNSVKNYIAEGDVMQVVLAQDFKMPFHGDSFHLYAALRELNPSPYMYYLNLNECKVVGASPEILIRLEGSQVTLRPIAGTRKRGANEEEDKINEKDLLSDPKELAEHLMLIDLGRNDVGKVSKIGSVKVTEKMIVEKYSHVMHIVSNVVGQISEGLQAMDVLKATLPAGTLSGAPKIRAMEIINEIEPSSRGIYGGAIGYISWNGDIDTAIAIRTAVIKDQLMHVGAGAGIVADSDPEKEWLECIQKSQVFIDAMEMIS

SEQ ID NO: 176486 - protein, 296 aa, Unknown
  Bacterial polypetide isolated from the Sargasso Sea
MKKFELYKNFENIKLPDQFTFKPNKNLIKSNTSKNKFKSLIKKAKSYIKRGDIFQVVLSQRFERKINKTPIEIYNHLRKSNPSPFMFYFNYEDFKVLGSSPEILVRLRKGEVTIRPIAGTRPRGRTKKEDKRFETDLLKDQKELAEHLMLLDLGRNDIGKVAKINTVKVTEKFKVEKYSHVMHIVSNVIGKFNNQTSIFETLLSGFPAGTVSGAPKIRAMEIIDELEKNKRKLYAGGIGYFTPNNEFDTCIALRTALIKNGKFYVQAGAGIVADSKPEKEYLETINKAKALMKAVD

SEQ ID NO: 176487 - protein, 225 aa, Unknown
  Bacterial polypetide isolated from the Sargasso Sea
DIYKKLRVTNPSPFMFFFNFKDFQIIGASPEILVRLRNNNITVRPIAGTRPRGKTLKEDRYYEKDLLKDKKELSEHLMLLDLGRNDAGKVSKINSVKVTESFIIERYSHVMHIVSNVVGKYNKKFSKFKSLLAGFPAGTVSGAPKIRAMEIIDELETSKRKVYAGGIGYFSANGEFDTCIALRTAVAKNKKFYVQAGAGIVADSKPKNEYEETVNKAKALINALQ

SEQ ID NO: 176488 - protein, 485 aa, Unknown
  Bacterial polypetide isolated from the Sargasso Sea
MLNIGLKLFKKNHLKSKNQVLYYSFKSNGLKEIDNLINNFLNVRNSFIFESVEKGFIKGRYTIFGKNPDKIWEFNNNNCVLNYENKKKKLKGKPKNNIEKIIENFKFEIPKELPPISSIISGYFSYDIIRYIERIPNSTKNDLQIPDARILRPRNLIVFDNAEKKIFFIVNCFSDEKIKNYEAKYYQIQKEIEEMIFLSNYNLKIKSSNANISKPKIKSNISKKKFLGNVIKAKNYIKIGDIFQVVLSQRFETDLNKEPIDIYKKLRITNPSPFMYFFNFEDFQIIGASPEILVRLRDNKITIRPIAGTRPRGKNKKEDKFYENDLLKDKKELSEHLMLLDLGRNDTGKVSKINSVKVTESFKIERYSHVMHIVSNVEGIFNKKFGKFDTLLAGFPAGTVSGAPKIRAMEIIDELETTRRKVYAGGIGYFSANGDFDTCIALRTAISKNKKFYVQSGAGIVADSKPINEFNETVNKAKALIKALE

SEQ ID NO: 176489 - protein, 162 aa, Unknown
  Bacterial polypetide isolated from the Sargasso Sea
KDLLKDKKEIAEHLMLLDLGRNDAGKVSKINSIKVTENFKIEKYSHVMHIVSNVQGDFNNKYSKFDTLLSGFPAGTVSGAPKIRAMEIIDELETTKRKVYAGGIGYFSANGDFDTCIALRTAITKKNKFYVQAGAGIVADSKPINEYNETINKAKALLKSLE

SEQ ID NO: 176490 - protein, 174 aa, Unknown
  Bacterial polypetide isolated from the Sargasso Sea
KRRRGINNEEDLLHDPKELAEHLMLIDLGRNDVGRVSEIGSVKLTEKMVIERYSHVMHIVSNVVGKLSKGLSFTDALKATLPAGTLSGAPKIRAMEIINELEPSSRGIYGGAIGYISWNGNIDTAIAIRTAVIRDNKIHVGAGAGIVADSDPEKEWEECVQKSKVFLDAMEMIS

SEQ ID NO: 176491 - protein, 151 aa, Unknown
  Bacterial polypetide isolated from the Sargasso Sea
EHLMLLDLGRNDAGKVSKINSVKVTESFIIERYSHVMHIVSNVIGEYNKKFSKFKSLLAGFPAGTVSGAPKIRAMEIIDELETTKRKVYAGGIGYFSANGEFDTCIALRTAVVKNKKFYVQAGAGIVADSRPKNEYEETVNKAKALINALR

SEQ ID NO: 176492 - protein, 409 aa, Unknown
  Bacterial polypetide isolated from the Sargasso Sea
NNKIIIDDFKKKKIIKKNVLSFLNNLLNDFKVKSSVNLPRMSSMLVGYFSYDIIRLIEKIPNKCKNDINIPDIRLMRPRNLIIYDNLKKKIFFIQNIFTEEIIKDYKFEYERIKNTFKEFQHYGSIILPSLFHKNKKKINVKSNISKSKFKSIVLKAKNYIKKGDIFQVVLSQRFEATIDKPPLEIYNTLRILNPSPFMFYFNYKDFQVLGSSPEILVRLHDGEVTIRPIAGTRPRGRNNKQDKKLTSDLLKDPKELAEHLMLLDLGRNDVGKVSKINSVRVTEKFKVEKYSHVMHIVSNVTGKLRKNFSIFETFLSGFPAGTVSGAPKIRAMEIIDELEKSKRKLYAGGIGYFTANQEFDTCIALRTALIKDKKIYVQAGAGIVADSNPKKEYNETLNKAKALLKAIN

SEQ ID NO: 176493 - protein, 299 aa, Unknown
  Bacterial polypetide isolated from the Sargasso Sea
EKLLKFSNNNLYKKDNKFKKTTSPIKSNFTKSNFMSAVKKIKSYVKKGDVIQTVVSQRWETKYEDDPINLYRSLRKLNPSPYMFYLKMEKSLIVGASPEVLVRLENNKVESRPIAGTRPRGIDTEEDLKMEKDLLSDPKELAEHVMLVDLARNDISRVCKNSTVNVTEMMSIERYSHVMHIVSHVEGLIDKKKDAFDLLKSTFPAGTLSGAPKIRAMQIINELEPNQRGPYGGSVGYFGFSGNMDMSIVIRSFYIKNKTLYFQAGAGIVADSIPKNEYDETKNKSKAMLNAIRKSLNNE

SEQ ID NO: 176494 - protein, 563 aa, Unknown
  Bacterial polypetide isolated from the Sargasso Sea
MTLKTFNQVTQADGGNFPSPPQTFARSHTIKATLAYHSDPLRLYQHITQDAPHTMLLESAEINSKENLKSMVMTHAALMIRCDGYCLRFSALSDNGASLLAPIEQFFSARSSQTQCQRDGHNLVVTLQKDTELKDEDARLKSTSPLDGLRLFVKHIDCGQTPAFEDLFLGGVLSYDLIDTVEPLPKAPNGANDCPDYLFYLAETLILIDHKQKQAEIITHNFSEGSAKLVEVTQALAKRASHISADCQTLANDIEPAPALVGITATEQVNISDEAFKQTVIDLKEHIIAGDIFQVVPSRSFSLPCPNTLGAYRALRLTNPSPYMFYFRGHDFTLFGASPESALKYEASNNQVEVYPIAGTRKRGKTASGEIDFDLDSRIELELRLDKKELSEHLMLVDLARNDIARISQSGSRKVAELLKVDRYSHVMHLVSRVTGQLRQDLDALHAYQACMNMGTLVGAPKVRASQLVRQAEKTRRGSYGGAVGYLNALGDMDTCIVIRSAFVKNGVAHIQAGAGVVFDSDPQSEADETRQKAQAVISAIKMGAGLGESHQATATTTTEQPR

SEQ ID NO: 176495 - protein, 488 aa, Unknown
  Bacterial polypetide isolated from the Sargasso Sea
MITKEEYDQYAIDGFNIIPLIKKIDVVLDSPIKIYSKIKNKENTFLLESIEGGEKWAQYSIIGLDCKDTIKVSENKIEIKTDTNINLIESDDPLKELNKLISNHKSPDLRDMPRFYGGYVGFFAYESAQYAEEKIKSLPKKDPKFNEHMPDIYLVKSEKLIVYDNFNKTIQAIYNANPSKTSYKEAVKILNKIEDSIDQSEEYADLSFAKVSGELKFESNFTKSQFISSVNRIKDYIEEGDVMQVVLAQDFYRRFDGDSFKLYSALRELNPSPYMYYLNLDGCEVVGSSPEILVRVEDDDITLRPIAGTRKRGENEEEDKHNEQNLLNDPKELAEHLMLIDLGRNDVGRIANIGSVKLTEKMVIERYSHVMHIVSNVVGKLSKEYNFIDALKATLPAGTLSGAPKIRAMEIINELEPSSRGIYGGAIGYISWNGNIDTAIAIRTAVIKDNLIHVGAGAGIVADSDPESEWKECIQKSKVFLDAVEMIS

SEQ ID NO: 176496 - protein, 532 aa, Unknown
  Bacterial polypetide isolated from the Sargasso Sea
DTLTLNAPYVADPLALYSELCQGRPNNLLLESVEIDSKAGKQSLLLVDACLRIECRGRTVRVRSLNDNGAQLQSLLAERLPVVVARSLVDGELQLDFPASDREQDEDSRLKGISVLDVLRTLQRELDCQLGKEALFIAGSFAYDLIASFEDLPDVPQGSNDCPDYCFYVAETLITIDHIARSTALLACIFGGDSDESRVEDRYNRLSERLAQFKHACQQAPAQAPATPTLAGGMSVDKSDKQFCAEVEKLKGFIRRGDIFQVVPSRCFSLPCPSPVAAYRRLKQTNPSPYMFYVQDEGFTLFGASPESAVKFCATSRDVEMYPIAGTRRRGFNPDGSINRDLDGRIELELRQDEKEVAEHLMLVDLGRNDIARISEPGTRYVKELLKVDRYSHVMHLVSKVVGTLRADLDALHAYQACMNMGTLTGAPKIRASELIRMVEGKRRGSYGGAVGYINGAGEMDTCIVIRSAFVKEGVAHVQAGAGVVYDSKPQAEADETRAKAAAVLAAIAASHGTSLQALSAQQEQHKDVSHD

SEQ ID NO: 176497 - protein, 506 aa, Unknown
  Bacterial polypetide isolated from the Sargasso Sea
MISSQKDSFLKAHKEGKNFIPITQTWPADLETPLSTWLKLSSQNSHGVFLESVEGGESLGRWSIVATKPLWEAVCYGDEIVKTWNNGKTEIHKGDPFNILRTWTKEYKSNSLDDLPSVGQLYGSWGYELINQIESSVPINEIEENNIPNGSWMFFDQLVVFDQIKRCITAVVYADITSLQGSSIEEIYLNSISKIQKTRELMKVPLKENEFLKWNENENLNLDIKSNWKKKDFEDAVLSAKEYIRKGDIFQIVISQRFHTEVNNDPFNLYRSLRMVNPSPYMSFFDFGSWYLIGSSPEVMVKAEKNCNSQIVASLRPIAGTRPRGNDLQQDLELEKDLLKDPKEIAEHVMLIDLGRNDLGRVCEIGTVEVKDLMVIEKYSHVMHIVSEVEGILKKNTDVWDLLKACFPAGTVTGAPKIRAMQLIKDFETDPRGPYAGVYGSIDINGALNTAITIRTMIVKPSKDGKYDVYVQAGAGIVADSSPENEYQETINKAKGILKALACLDK

SEQ ID NO: 176498 - protein, 168 aa, Unknown
  Bacterial polypetide isolated from the Sargasso Sea
QDDLLKKELLNDKKELSEHLMLLDLGRNDAGKVSKINSVKVTEQFKIEKYSHVMHIVSNVTGKFNNKFTSYETLMSGFPAGTVSGAPKIRAMEIIDELENSKRKIYAGGIGYFSSNGDFDTCIALRTAITKKNKFFIQAGAGIVADSIPEREFNETLNKAKALLKSVE

SEQ ID NO: 176499 - protein, 238 aa, Unknown
  Bacterial polypetide isolated from the Sargasso Sea
YNLKAVNLYRSLRRLNPSPYLVNLNFDKIGLVASSPELMVQLRNKKVTIRPIAGTRKRGKNASEDLYLSNDLLNDKKELAEHLMLLDLGRNDVGRVAKKGTVNVTEKMIIEYYSHVMHIVSNVEGKIDNNLDALDALMAGFPAGTVSGAPKIRAMEIIEELENLNRSFYAGCMGYFDSNGDMDTCISLRTGLVKDSKLYIQAGAGIVYDSVPKNEHQEILNKAGALMAAAEDSYKFDI

SEQ ID NO: 176500 - protein, 110 aa, Unknown
  Bacterial polypetide isolated from the Sargasso Sea
MSIGVYNKKFSKFKSLLAGFPAGTVSGAPKIRAMEIIDELETTKRKVYAGGIGYFSANGEFDTCIALRTAVAKNNKFYVQAGAGIVADSKPLREYEETINKAKALINALK

SEQ ID NO: 176501 - protein, 419 aa, Unknown
  Bacterial polypetide isolated from the Sargasso Sea
TQIKFWEFNNNDSYTVDKYNKRKKINGKPKKIIEKIIENFKFKTPKSLPPICSLISGYFSYDTIRYLENIPNKCKNDLSLPDVRILRPKTLIIHDNYKNKIFFIINVFKDEKINDYKIKYNQIKNELAMLNLLSLNRTNNSKKIKTNKLTVKSNTSKKRFLTIVNRAKKYIKVGDIFQVVLSQRFETKLSKRPIDIYKKLRITNPSPFMYFFNFPDFQIIGASPEILVRLRNNKITIRPIAGTRPRGTNKKQDNFYSKDLLKDKKEISEHLMLLDLGRNDVGKVSKINTVKVTEKFKIEKYSHVMHIVSNVEGIFNNKYSKFKSLLSGFPAGTVSGAPKIRAMEIIDELEKSKRKVYAGGIGYFSANGEFDTCIALRTAIAKNNKFYVQAGAGIVADSIPAKEYEETVNKAKALINALR

SEQ ID NO: 176502 - protein, 419 aa, Unknown
  Bacterial polypetide isolated from the Sargasso Sea
NPDKIWEFNNQKSYLITENKKIILKDKPEELIEKIIENFKFDTPKNLPKICSLISGYFSYDSIRYIEKIPNSCKNDLNLPDVRLMRPRTLVIHDNLKKEIYYIRNVFNDEKIKDYQKKYDSIKTDLFKLLIQSSIKNINKNRVLKEKKIKVKSNTPKNKFLAMVNKAKKYIKLGDIFQVVLSQRFEAKLTKKPLEIYKKLRVTNPSPFMFYFNFNDFQIIGASPEILVRLRDKKITVRPIAGTRPRGKNKKEDVFYEKDLLKDKKELSEHLMLLDLGRNDAGKVSKINTVKVTESFIIERYSHVMHIVSNVVGEYNKKFSKFKSLLAGFPAGTVSGAPKIRAMEIIDELETSKRKVYAGGIGYFSANGEFDTCIALRTAVAKNKKFYVQAGAGIVADSKPINEYDETVNKAKALINALR

SEQ ID NO: 176503 - protein, 485 aa, Unknown
  Bacterial polypetide isolated from the Sargasso Sea
MLNISLKQFKINHKKKINQILYLSLDSDGSKEIINLINNFFTEKNAFVFESVEKGFIKGRYTIFGKNPDKIWEFNNNVSKIYFDNKVKILKGTAKKNIENVIESFKFKIPRELPSISSIISGYFSYDIIRYLENIPNKNRDDLKLPDARIIRPRELIIHDNIKKKLYFIINVFCDEKINNYKIRYEKIINQIENLIFLSNYNNSYLDKINKKIKTKVKSNISKQKFLSNVKKAKKYIKIGDIFQVVLSQRFETKLSKNPIEIYKKLRKTNPSPFMYFFNFKDFQIIGASPEILVRLRNNKVTIRPIAGTRPRGKNKKQDLFFEKDLLNDKKELSEHLMLLDLGRNDTGKVSKINTVKVTESFSIERYSHVMHIVSNVEGVFNNKYSKFQTMLSGFPAGTVSGAPKIRAMEIIDELETTKRKVYAGGIGYFSANGEFDTCIALRTAVAKNKKFYVQSGAGIVADSKPQNEYLETVNKAKALLKAIE

SEQ ID NO: 176504 - protein, 478 aa, Unknown
  Bacterial polypetide isolated from the Sargasso Sea
MKINRSFKEFKFRHRNNENQIIYTSKKVKTDEEIINLIDNFLIEKNSFIFESVEKGKIRGRYTIFGKNPDKIWEFNNNNSYLIKKNKKIKLRDKPKYLIEKIIEDFKFKTPNKLPKICSLISGYFSYDAIRYIEKIPNNCKDDLKLPDVRLLRPRTLIIHDNLKKEIFFINNIFKDEKITNYKSKYKDIQSELFTLSLQSSVKKIDNVINRKSQKIIINSNTSKNKFLSIVNKAKKYIKLGDIFQVVLSQRFETKLTKKPIDIYKKLRITNPSPFMFFFNFTDFQIIGASPEILVRLREGEITVRPIAGTRPRGKTTKEDRFYEKDLIRDKKELSEHLMLLDLGRNDAGKVSKTNSIKVTESFIIERYSHVMHIVSNVIGKHDKRFSKFKSLLAGFPAGTVSGAPKIRAMEIIDELESTKRKVYAGGIGYFAANGEFDTCIALRTAVAKNNRFYVQAGAGIVADSKPLKEYEETVNKA

SEQ ID NO: 176505 - protein, 135 aa, Unknown
  Bacterial polypetide isolated from the Sargasso Sea
MTEKMIVERYSHVMHIVSNVTGKLKKGMNAIDVLRSTFPAGTVSGAPKIRAMEIIDELEPVKRGVYSGAVGYISWNGNMDTAIAIRTAVIKDKILHIQAGAGIVADSVPKNEWDETMNKGRAIFKAVSLAEKGLE

SEQ ID NO: 176506 - protein, 480 aa, Unknown
  Bacterial polypetide isolated from the Sargasso Sea
MDLIRYKGTVLYCNIYLEFKYRISLACIWVNTFGKHSISKIPLVYTETQPFDVYNKISRNYTHSFLFESLEGPDELAETSIMGFDPELIVKGYFDKITIQNRDGNIETIQTDSPLEEIKKLIKKTDDMSYRYLGGAVGNIDYDAIRLFEKIPGKRDLEKPIMEFGIYNDGILYDNKKRQFFYFYYDEDRKDKIKKTDEDVGMFEMSDINPNLNKEEFEKIVSKAKEYVHSGDVFQVVLSRRFSFEGKGDYLRVYEKLRELNPSPYMFHLKMNENVIIGSSPEMLLRVTGRDVETFPIAGTRKITNDEEKNEKLKEELLNDEKELAEHTMLVDLGRNDIGRVCDYGTVRVKELMEIKRFSHVQHIVTHVVGKLNEKHDMYDAFEAVFPAGTVSGAPKVRAMEIIQELEPTQRETYAGAVGYFSFNGCCDFAIAIRSIFAKKDKGFVQAGAGIVFDSIAENELKETEHKANAMITALKEASK

SEQ ID NO: 176507 - protein, 417 aa, Unknown
  Bacterial polypetide isolated from the Sargasso Sea
NPDKLWEFNDNKCKLIYKNRSINLKGSPKQNIEKIIENFNFDIPKELPPISSILSGYFSYDIIRYIEKIPNSTKNDLKIPDSRIIRPKNIIIHDNVDKKLYFIVNVFKDEKINNFKKRFSEINNQIEEMVFLANYNSIKITQTNKLTKIKSNISKKRFIDNVKKAKKYIKIGDIFQVVLSQRFECKLTKKPIEIYKKLRKTNPSPFMYFFNFKDFQIIGASPEILVRLRNNKITIRPIAGTRPRGKNKKQDQFFEKDLLKDKKELSEHLMLLDLGRNDTGKVSNVNSVKVTESFKIERYSHVMHIVSNVEGTFNNKYSKFDTLLSGFPAGTVSGAPKIRAMEIIDELENTRRKVYAGGIGYFSANGDFDTCIALRTAISKNNKFYIQSGAGIVADSKPLNEFNETVNKAKALIKALE

SEQ ID NO: 176508 - protein, 152 aa, Unknown
  Bacterial polypetide isolated from the Sargasso Sea
MLVDLGRNDIGRVCDYGTVKVKELMEIKRFSHVQHIVTHVVGKLNDKHDMYDAFQAVFPAGTVSGAPKVRAMEIIEELEPIQRETYAGAVGYFSFNGCCDFAIAIRSIFADAERGFVQAGAGIVFDSIAENELKETEHKANAMITALKEASK

SEQ ID NO: 176509 - protein, 486 aa, Unknown
  Bacterial polypetide isolated from the Sargasso Sea
MLNYNLKQFKSLHKKKKNIVLFYSEKSKGVDEVNNLINNLLNQKNSFIFESVEKGIIKGRYTIFGSDPDKIWEFNKNNSFIIKKNVKRKIKNGNPKKIIESIINNFKFKIPKTLPPISSLLSGYFSYDIIRYIENIPDNCKDDLKIPDARILRPKTLIIHDNFKKKIFYIINCFADEKIINYKSEYHNIENKINNLILKSKYNFNFSNENYFKKKINVKSNISKKQFINIVKKAKKYIKKGDIFQVVLSQRFVTNLNKNPLEIYKKLRITNPSPFMYFFNFDDFQIIGASPEILVRLRNNEITIRPIAGTRPRGKNKKLDNRYKKELLNDKKELSEHLMLLDLGRNDTGKVSKINSVKVTDKFKIEKYSHVMHIVSNVTGKFNNKFTKFETLLSGFPAGTVSGAPKIRAMEIIDELEKSKRKVYAGGIGYFSANGDFDTCIALRTAISKNNKFYVQAGAGIVADSKPLNEFNETVNKAKALIKAIE

SEQ ID NO: 176510 - protein, 563 aa, Unknown
  Bacterial polypetide isolated from the Sargasso Sea
MTLKTFNQVTQVDGAHFAPSQQTFARSHTLKATLAYHSDPLRLYQHITQDVPHTMLLESAEIDSKENLKSMVMTHAALMIRCDGYRLRFSALSDNGVSLLAPIEQFFIARSSQTQCQRDGHNLVVTLQKDTELKDEDARLKSTSPLDGLRLFVKHIDCGQTPAFEDLFLGGVLSYDLIDTVEPLPEAPNGANDCPDYLFYLAETLILIDHKQKQAEIITHNFSEGSAKQVEVTQALAERAENIRAQCEALVKSAMPAPALIGITAKEQVNVSDEDFKQTVIDLKEHIIAGDIFQVVPSRNFSLPCPNTLGAYRALRLTNPSPYMFYFRGHDFTLFGASPESALKYEASNNQVEVYPIAGTRKRGKTASGEIDFDLDSRIELELRLDKKELSEHLMLVDLARNDIARISQSGSRKVAELLKVDRYSHVMHLVSRVTGQLRQDLDALHAYQACMNMGTLVGAPKVRASQLVRQAEKTRRGSYGGAVGYLNALGDMDTCIVIRSAFVKNGVAHIQAGAGVVFDSDPQSEADETRQKAQAVISAIKMGAGLDDSHQATTTTTTEQQR

SEQ ID NO: 176511 - protein, 485 aa, Unknown
  Bacterial polypetide isolated from the Sargasso Sea
MKLNVGLYEFKKAYHQKKNQVLYCKIKSKSSFEVENLINNFLEDRNSFIFESVEKGKIKGRYTIFGKGPDKIWEFNQKKISSIILGKKKIIKGDPKIILSKIIDNFRFKIPSSLPPMCSMIAGYFSYDTIRYIEKIKNSCKNDLKLPDIRLIRPTTLIIHDNVKKEIFFVKNFFSDIKINNLEKKYFEVQDEINSLLISSRVSKFQKDNTKKKFSVKSNISKKRFFQIVNKAKQYIKKGDIFQVVLSQRFETKLTKKPIEIYKKLRVTNPSPFMFFFNFNDFQIIGASPEILVRLRNNVITVRPIAGTRPRGRNNKEDNLLKKDLINDKKELSEHLMLLDLGRNDAGKVSKINTIKVTEKFKIEKYSHVMHIVSNVTGIYDKKFSKFEALMAGFPAGTVSGAPKIRAMEIIDELEKNSRKIYAGGIGYFSANGDFDTCIALRTAITKNNKFYVQAGAGIVADSKPINEYNETINKAKALIKSLEK

SEQ ID NO: 176512 - protein, 348 aa, Unknown
  Bacterial polypetide isolated from the Sargasso Sea
NSTKNDLNIPDCRILRPREIIIHDNYDKKIYFIINIFKDEKINNFKKKFSEINRQIEEMVFLSNYNTPSLEQNFKNLTKIKSNINKKKFIQNVKKAKKYIKIGDIFQVVLSQRFECKLIKKPIEIYKKLRKTNPSPFMYFFNFSDFQIIGASPEILVRLRNNKITIRPIAGTRPRGKNKKQDQFFEKDLLKDKKELSEHLMLLDLGRNDAGKVSKINSVKVTESFKIERYSHVMHIVSNVEGTFNKKFSKFDTLLSGFPAGTVSGAPKIRAMEIIDELENTRRKVYAGGIGYFSANGDFDTCIALRTAVSKNNKFFVQSGAGIVADSKPINEFNETVNKAKALIKALE

SEQ ID NO: 176513 - protein, 376 aa, Unknown
  Bacterial polypetide isolated from the Sargasso Sea
FSNTSWYLGYPMIQHIENIKLKNKDNIKIPDAILIRPKIVAVFDNIKDVISLMSVTYPSEKISAENAYKKNISLIEKTIKKLEKSVLKPAQNKNIKSKLKFKSNFKKEHFYKIVKKAKEYIKNGDIFQVVPSQRFETKYNLKAVNLYRSLRRLNPSPYLVNLNFDKIGLVASSPELMVQLRNKKVTIRPIAGTRKRGKNASEDMFLSNDLLNDKKELAEHLMLLDLGRNDVGRVSKKGTVNVTEKMIIEYYSHVMHIVSNVEGKIDENLDALDALMAGFPAGTVSGAPKIRAMEIIEELENLNRSFYAGCMGYFDSNGDMDTCISLRTGLVKDNKLYIQAGAGIVYDSVPKNEHQEIMNKAGALMAAAEDSYKFDL

SEQ ID NO: 176514 - protein, 287 aa, Unknown
  Bacterial polypetide isolated from the Sargasso Sea
FCNHVLDLKQHILAGDIFQVVPSRTFSLPCPSPLLAYAKLKESNPSPYMFYMQDVTFSIFGASPESALKYERESNQVEIYPIAGTRPRGKRPDGSIDRDLDSRIELNLREDTKEKSEHIMLVDLARNDVAKVSRPGTRYVKDLLKVDRYSHVMHLVSRVVGQLRDDLDPLHAYQACMNMGTLVGAPKVSAATLIREVEKKRRGSYGGAVGYLNGQGDMDTCIVIRSAFVKNGTAYIQAGAGVVYDSVPQAEADETRAKAQAVIGAVKAALQEEAESINVALNEGGNA

SEQ ID NO: 176515 - protein, 340 aa, Unknown
  Bacterial polypetide isolated from the Sargasso Sea
MPDIYLVKAEKLIVFDNFNQKKFAIYNANPSSSSYEEAINSVSEISDSIDQAFEKVGQDFKKVKGELEFQSNFSKKEFIAAVNSVKNYIAEGDVMQVVLAQDFKMPFHGDSFHLYTALRELNPSPYMYYLNLNECKVVGASPEILIRLEGSQVTLRPIAGTRKRGANEEEDKINEKDLLSDPKELAEHLMLIDLGRNDVGKVSKIGSVKVTEKMIVEKYSHVMHIVSNVVGQISEGLKAMDVLKATLPAGTLSGAPKIRAMEIINEIEPSSRGIYGGAIGYISWNGDIDTAIAIRTAVIKDQLMHVGAGAGIVADSDPEKEWLECIQKSQVFIDAMEMIS

SEQ ID NO: 176516 - protein, 526 aa, Unknown
  Bacterial polypetide isolated from the Sargasso Sea
MNLQQITTTTGQVASFSQTLSIQPDPLQSFRALTSQGQMALLLESAEIDSKNSLKSLMLIDAALRIECNSLAVKVEALTDNGKTLLPYLASLLQGKAELELSPTLLQVQFAKADPLLDEESRLLLPNSLTVLRLLQQQLQNNSDEHLAIFLGGVIGYDLVAMVEDLPQVPTAENQCPDYLFYLAETLLVVDHQAGNSRLIGNVFCGAQAQQQYFVIGQRLSELQQLLQQAAEPTAATEPAAKAEVKVDISDADFVAQVEMLKQNIVAGDVFQVVPSRCFSLPCPDPQAAYAKLKQQNPSPYMFYLQDRNFSLFGASPESALKYEAHTAQVEIYPIAGTRRRGFAANGGVDRDLDSRIELELRQDEKEKAEHLMLVDLARNDVARISVPGSRYVKELLKVDRYSYVMHLVSRVVGTLKPELDALHAYQACMNMGTLVGAPKVRAAELIRGVEKKRRGSYGGAVGYLAGNGDFDSCIVIRSAYVQNGTAYIQAGAGVVYDSVAQAEADETRSKAQAVINAIQSAGAAV

SEQ ID NO: 176517 - protein, 485 aa, Unknown
  Bacterial polypetide isolated from the Sargasso Sea
MKLNTSFKKFKQLHKKKYNQAIHFSFKCNNYAFVENLYKFILVQKNSFIFESVEKGKIRGRYTIIGFNPDKILNIKKNVIVEDDLKKKKIIKKNILKYLNNLFKNFKVKSSKELPRMSSMLVGYFSYDIIRLIEKIPNKCKDDLNIPDIRLMRPKNLIIYDNVKRKIFYIENIYNDQKIYDYQSEYEKIKNTLNELHNYGNIPLPENFHISNKKINIKSNISKSKFKNIVRKAKTYIKKGDIFQVVLSQRFSAEIKKPPLEIYNTLRKSNPSPFMFYFNYDDFQVLGSSPEILVRLVKGEVTIRPIAGTRPRGKNTKEDKKLTDELLNDPKELSEHLMLLDLGRNDVGKVSKANSVKVTEKFKVEKYSHVMHIVSNVIGKLRKNFSLFETFLSGFPAGTVSGAPKIRAMEIIDELEVSKRKLYAGGIGYFTSNQEFDTCIALRTALIKNKKIYVQAGAGVVADSKPESEYKETINKAKALMQAIY

SEQ ID NO: 176518 - protein, 464 aa, Unknown
  Bacterial polypetide isolated from the Sargasso Sea
MSTYFDIELQDETPASVFMKLRELTPTFLLESIERGVDQSRYSFLGIGAAQSIQVRDGNFILNGEKVSKPSSQSEVMNLFRKTLKETPDLKPAIEDIPFSGGMVGFSSFDMIRHFEKLSVPKGKKGILSPPDCSYLSPTSLLVFDHEANKMALLHSGNEEERINLRSEILTMLNKEITQTHKNKTYSEPIGNINEENFYDAVETAKHHIFEGDIFQIVLSIAFSGSYDLDPFDVYRAMRLINPSPYMFYCESDGFKIAGSSPEALVRLGGNKASLRPIAGTRPRGKDSEEDNLNKESLLADEKEIAEHIMLVDLARNDLGRVAKHGSIEVEPYQSIEYYSHVMHIVSGVQGNLEDDKDAFDLFAAAFPAGTLVGAPKVRAMELIDEIEPELRGVYGGTVGYFSKNGDMDQAIAIRTIVFSDEKYCFQAGAGIVADSLPENEYKEVLAKSQILRTALKMVKEGEL

SEQ ID NO: 176519 - protein, 338 aa, Unknown
  Bacterial polypetide isolated from the Sargasso Sea
ARILRPKNLIVFDNVEKKLFFIVNCFSDEKINNYQAKYDQIQKEIEEMIFLANYSYKINQTKTKIFKPKVKSNISKKKFLINVSKAKNYIKIGDIFQVVLSQRFETDLNKEPLDIYKKLRITNPSPFMYFFNFEDFQIIGASPEILVRLRDNKITIRPIAGTRPRGKNKKEDKFYEKDLLKDKKELSEHLMLLDLGRNDTGKVSKINSVKVTESFKIERYSHVMHIVSNVEGDFNKKFGKFDTLLAGFPAGTVSGAPKIRAMEIIDELETTRRKVYAGGIGYFSANGDFDTCIALRTAISKNKKFYVQSGAGIVADSKPINEFNETVNKAKALIKALE

SEQ ID NO: 176520 - protein, 496 aa, Unknown
  Bacterial polypetide isolated from the Sargasso Sea
MEKKISIDYKDFKKNYNSKEPQLIILKFSSDFVDPVNSFMKISDDMENSFLFESLKDGDLSGRYSVIGIKPDKILKITNKTSKIYIDNNNIEEVINDNPIEAIRYFINSSLIKKNDDIPSIASGIFGYIGYDFVANIEDLPKEKIDEFDVPDSILLRPSITVVFDKELKEILICKAVWYVDGVDADNAYNFALDEINKIKDKIQSDKIIELKKEQKNLGESRSNFTKEQYFENVRKAREYIKAGDIFQVVPSQRLSVKFKAHPFLLYESLRRINPSPYMYYIKFKDFYIVGSSPETLVKVEKNKVIIKPIAGTRLKEKGKENEIKESLLSDPKELAEHLMLLDLGRNDVGRVSKIGSINVRESFQIQETSHLYHIYSTVEGELNPKEDRVTALCAGFPAGTVTGAPKIRAMEIINEIEDRKRGIYSGAVGYFSSFGDMDTAIALRTAIIKDNKMYVQAGGGVVYDSDEEYEFNETLNKAQALFTAARDVFNEKSKK

SEQ ID NO: 176521 - protein, 319 aa, Unknown
  Bacterial polypetide isolated from the Sargasso Sea
QKYHDALAEANTSIDFVLDLLKKPFDETYIPTNQKKINISSNTTKDDYLKMVEKAKNYIYEGDIFQVVLSQRFESNFELPPFELYRSLRRINPSPFLFYLNFDEFAVIGSSPEILIRLFSDEITVRPIAGTRPRGKDQAEDDNNKNSLLSDPKELAEHLMLLDLGRNDVGKVSQLGSVKVTDKFFVELYSHVMHIVSNVIGKLDSKFNMIDVLKAGFPAGTVSGAPKIRAMQIIEELEKERRSIYAGCVGYFSAAGDMDTCITLRTAIIKGNSMYVQAGAGIVADSNPESEYQECKSKASALFNAAQDALDMNSSRAEK

SEQ ID NO: 176522 - protein, 348 aa, Unknown
  Bacterial polypetide isolated from the Sargasso Sea
MGGAVGNIDYDAIRLFENIPGKKDLEKPIMEFGIYNDGILYDNKKKQFFYFYYDEDRKDKIKKTDEDVGTFEMSDIDINLNKEQFERIVNKAKEYVHSGDVFQVVLSRRFSFEAKGDYLRVYEKLRELNPSPYMFHLKMDENVIIGSSPEMLLRVTGRDVETFPIAGTRKITEDEEKNEKLKNELLNDEKELAEHTMLVDLGRNDIGRVCDYGTVKVKELMEIKRFSHVQHIVTHVVGKLNEKNDMYDAFEAVFPAGTVSGAPKVRAMEIIQELEPTQRETYAGAVGYFSFNGCCDFAIAIRSIFANKERGFVQAGAGIVFDSIAENELKETEHKANAMITALKEASK

SEQ ID NO: 176523 - protein, 271 aa, Unknown
  Bacterial polypetide isolated from the Sargasso Sea
YSKKKYFQIVDKAKDYITKGDIFQVVPSQRFKSNYNLSAQTLYRSLRRLNPSPFLVNLNFNNFGLVASSPEILVRLRKNNITIRPIAGTRKRGKTINEDIILSKDLLNDEKEIAEHLMLLDLGRNDVGKVAKIGSVNVTEKMIIEYYSHVMHIVSNVEGKLDPKFDAIDALISGFPAGTVSGAPKIRAMEIIEELENVSRSFYGGAMGYFDSNGDMDTCISLRTGLVKDKKLYIQAGGGIVYDSDPEKEYQETINKANALVAAAEDSYKYE

SEQ ID NO: 176524 - protein, 271 aa, Unknown
  Bacterial polypetide isolated from the Sargasso Sea
MSNFTKDEYISSVKRIKEYIKDGDAMQVVLAQDFYSTFDGDSFKLYCALRKINPSPYMYYLNLDECEVVGSSPEILVRLEEDDITLRPIAGTRKRGQTKEEDKNNELDLLSDPKELAEHLMLIDLGRNDVGRISEIGSVKLTEKMVIERYSHVMHIVSNVEGKLSKGLTFIDALKATLPAGTLSGAPKIRAMEIINELEPSSRGIYGGAIGYISWNGNIDTAIAIRTAVIKDKKIHVGAGAGIVADSDPEKEWQECVQKSKAFLDAMEMIS

SEQ ID NO: 176525 - protein, 476 aa, Unknown
  Bacterial polypetide isolated from the Sargasso Sea
MSKKIHKKIPVIREALADLDTPLSVYLKLANEPFTYLLESAQVGSEDGGKWDRYSIIGMRCPTRIRVVGTQIDVFNDDQIVESLCTSNPLSFIEEFQSRYQVADCDQDIRFIGGLVGYFGYDTVRYVEPKLLSSCPKDNLNTPDIFLMVSEDIIVFDNLKGRMKLVSLANQDDPDSIARTSTILDTRVEKLEKTSTPDLKTGENKPLSESDFSSEYGEKAFKEDVEKIKEYTRTGDIMQVVLSQRMSVPFDCPPINLYRSLRNLNPSPYMYFMDMGDFQIVSSSPEILARLEKGKITNRPLAGTRRRGHDPDEDIRLEVELKNDPKELAEHLMLIDLGRNDVGKVSTAGSVCVTEKFVIERYSHVMHLSSNIEGDILPEKNALDLLRATLPVGTLSGAPKVRAMEIIDELEPTKRGIYGGAVGYISWNGNMDTAIAIRTAVIKDKTLYIQSGGGIVHDSVPELEWKESLNKGRANS

SEQ ID NO: 176526 - protein, 497 aa, Unknown
  Bacterial polypetide isolated from the Sargasso Sea
MTELEFQSLANEGYNRIPLIAEALADLETPLSLYLKLAQPERSGANSFLLESVVGGERFGRYSFIGLPARTLVRTRNGVSEVVRDGQVVETHDGDPFQFIESFQARFKVAQRPGLPRFCGGLAGYFGYDAVRYIEKKLANTAPRDDLGLPDIQLLLTEEVAVIDNLAGKLYLIIYADPSQAEAYTKAKQRLRELKQRLRTTVQPPVTSASVRTETFREFKKDDYLAAVRQAKEYIAAGELMQIQVGQRLTKPYRDNPLSLYRALRSLNPSPYMYYYNFGDFHVVGASPEILVRQEKRGEDQIVTIRPLAGTRPRGNTPERDAELATELLNDPKEIAEHVMLIDLARNDVGRIAEIGSVHVTDQMVIEKYSHVQHIVSSVEGKLKPGMTNYDVLRATFPAGTLSGAPKVRAMELIDELEPVKRGLYGGAVGYLSFSGEMDLAIAIRTGLIHNGNLYVQAAAGVVADSVPESEWQETENKARAVLRAAEQVQDGLDSDF

SEQ ID NO: 176527 - protein, 409 aa, Unknown
  Bacterial polypetide isolated from the Sargasso Sea
PLEIVKDEIKCFKVPELEELPVFTGGAVGYLSYETISYFENTVSKKDNSNLEVPESIFLLTDSLVVFDHVKQTIFIIHYARINPDDELEKIFLESQKKINEIYEKIKKPIPNEFNNISNISNSNNKSNGELVEEYEKNMSKDEYKAAIEKCIENIYSGEIIQVVFSQRLTKKTKASAIEIYRCLRTINPSPYMFLLNLDEFQILGASPELLVKSSNKQLSVHPIAGTRPRGVDSEEDEKIANELINDEKELAEHLMLLDLGRNDVGRVSMPGSVNVNQKMEIEKYSHIMHIVSNVTGTLKDELDEFDALRAAFPAGTVSGAPKVRAMQLISELEPEKRGPYSGGVGYFSYNGNMDTCIAIRTLVLKDETVYIQAGGGIVADSKVENEYEETLNKMMALIRSVDEAERNL

SEQ ID NO: 176528 - protein, 493 aa, Unknown
  Bacterial polypetide isolated from the Sargasso Sea
MKNKLTKKEFNLLAKDGRKVVPFFKRIMADTITPIAAWANLSMHSDYGFILESVEKAKKNGRYSYVGINPSRIFEYDQRTLFEVINGKRKKIDANFFDFLKNLNDSHKSQKLDQLPHFTGGIVGYFGYEMIDFFENVPVKKTKYLQIPDSKFMLFEDIIVFDHLNGDAIVVSNINLEKSEDLNELFDEANSRVDSIGNLLHSNHEFRTPLVTKSFPTISNFEKSEFEKIVNKAKKYVKSGDIFQVVLSQRFERKTLSEPLNVYRALRSINPSPYMFHLKIDSFDVIGASPELMIKVQEGEVEIRPIAGTRLRGKNSTEDERNAQDLLNDKKELAEHLMLLDLGRNDVGRVSEFDSVKIKEKMNIEMYSHVMHIVSDVRGKLMKDKNIFDALKSGFPAGTVSGAPKIRAMEIINELENDSRGIFSGAIGFIDFNGNLNTCISIRTMILKNEIAYFQAGAGIVYDSIPSKEYDETVNKAKVMNAAIDLAENGLIK

SEQ ID NO: 176529 - protein, 196 aa, Unknown
  Bacterial polypetide isolated from the Sargasso Sea
LVRLEKDEITLRPIAGTRKRGKNEQEDKLNEQDLLNDPKELAEHLMLIDLGRNDVGRVADIGSVKVTEKMIIERYSHVMHIVSNVVGKLSSELSFIDALKATLPAGTLSGAPKIRAMEIINELEPSSRGIYGGAIGYISWNGNIDTAIAIRTAIIKDNLIHVGAGAGIVADSNPESEWEECLQKSRVFLDAMEMIS

SEQ ID NO: 176530 - protein, 273 aa, Unknown
  Bacterial polypetide isolated from the Sargasso Sea
IMPNLDKNAFEDIVKKAKEYVHSGDVFQVVLSRRFSYEGKGDYLKVYSKLRELNPSPYMFHLKMKDNVIIGSSPEMLLRVTGKSVETFPIAGTRKITDDEEKNQKLKNELLNDEKELAEHTMLVDLGRNDIGRVCDYGTVKVKELMEIKRFSHVQHIVTHVVGKLSDKHDMYDAFQAVFPAGTVSGAPKVRAMEIIQELEPIQRETYAGAVGYFSFNGCCDFAIAIRSIFADSKKGFVQAGAGIVFDSIAENELKETEHKANAMITALKEASK

SEQ ID NO: 176531 - protein, 273 aa, Unknown
  Bacterial polypetide isolated from the Sargasso Sea
KDIKVKSNTPKNKFLKMVNKAKEYIKLGDIFQVVLSQRFEAKLTKKPLDIYKKLRITNPSPFMFFFNFNDFQIIGASPEILVRLRDNKITVRPIAGTRPRGKTTKEDIYYEKDLLKDKKELSEHLMLLDLGRNDAGKVSKINSVKVTESFIVERYSHVMHIVSNVMGEYNKKFSKFKSLLAGFPAGTVSGAPKIRAMEIIDELETSKRKVYAGGIGYFSANGEFDTCIALRTAIAKNKKFYVQAGAGIVADSKPINEFKETVNKAKALINALK

SEQ ID NO: 176532 - protein, 485 aa, Unknown
  Bacterial polypetide isolated from the Sargasso Sea
MLNIDLKLFKKNHKKSKNQVLYHAIKSNGLKEIENLINNFLNVRNSFVFESVEKGFIKGRYTIFGKNPDKIWEFNNNNCVLKYENKRKKLRGTPKDNIEKIIENFNFKIPSELPPISSIISGYFSYDTIRYIEKIPNTTKNDLKIPDARILRPKNLIVFDNVKKKLFFIVNCFFDEKIKNYQDKYDQIQREIEEMIFLANYNYKINQSKTKVSKPKVKSNISKKKFLSNVSKAKNYIKIGDIFQVVLSQRFETDLNKEPLDIYKKLRITNPSPFMYFFNFKDFQIIGASPEILVRLRDNKITIRPIAGTRPRGKNKKEDKFYEKDLLKDKKELSEHLMLLDLGRNDTGKVSKINTVKVTESFKIERYSHVMHIVSNVEGVFNKKYGKFDTLLAGFPAGTVSGAPKIRAMEIIDELETTRRKVYAGGIGYFSANGDFDTCIALRTAISKNKKFYVQSGAGIVADSKPINEFNETVNKAKALIKALE

SEQ ID NO: 176533 - protein, 496 aa, Unknown
  Bacterial polypetide isolated from the Sargasso Sea
MEKNISIDHKDFKKNYNLKEHQLIILKFNSDFVDPVNSFMKISDDMENSFLFESLKDGDLSGRYSVIGIKPDKILKITNKTSKIYIDNNNIEEVINDNPIEAIRYFINSSLIKKNDDIPSIASGIFGYIGYDFVANIEDLPKEKIDEFDIPDSILLRPSITVVFDKELKKILICRAVWYDDSIDADNAYNFAIDEINQIKDKIESDKIIKLEKEQKNLGESKSNFTKEQYFENVRKAREYIKAGDIFQVVPSQRLSVEFKAHPFLLYESLRRINPSPYMYYIKFRDFYIVGSSPETLVKVEKNKVIIKPIAGTRLKEKGKENEIKESLLSDPKELAEHLMLLDLGRNDVGRVSKIGSINVRESFQIQETSHLYHIYSTVEGELNPKEDRVTALCAGFPAGTVTGAPKIRAMEIINEIEDRKRGIYSGAVGYFSSFGDMDTAIALRTAIIKDNKMYVQAGGGVVYDSDEEYEFNETLNKAQALFSAARDVFSEKSKK

SEQ ID NO: 176534 - protein, 354 aa, Unknown
  Bacterial polypetide isolated from the Sargasso Sea
IEKIPNNCKNDLNLPDVRLLRPRTLVIHDNLKKEIFFISNVFKDEKILNYENKFNEIKSELFKLEIQSLIKNVEKKVIQKLNNIKVKSNTPKNKYLKMVDKAKKYIKIGDIFQVVLSQRFEAKLTKKPLEIYKKLRVTNPSPFMFFFNFDDFQIIGASPEILVRLRDNKITIRPIAGTRPRGKTKKEDLFFERDLLKDKKELSEHLMLLDLGRNDAGKVSKINSVKVNESFIVERYSHVMHIVSNVVGEYNKKFSRFKSLLAGFPAGTVSGAPKIRAMEIIDELETSKRKVYAGGIGYFAANGEFDTCIALRTAIVKNKKFFVQAGAGIVADSKPKKEYEETVNKAKALINALR

SEQ ID NO: 176535 - protein, 186 aa, Unknown
  Bacterial polypetide isolated from the Sargasso Sea
GHTAAEDQALEAELLADPKERAEHVMLVDLGRNDLGRVCQPGSVAVKELMLIERYSHVMHIVSQVEGELQPHHDVWDLLRASFPAGTVSGAPKIRAMQLIHELEPDARGPYSGVYGSMDLCGALNTAITIRTMVVQPGQNGCWRVQVQAGAGVVADSQPTAEHEETLNKARGMLKALACLQAAQQP

SEQ ID NO: 176536 - protein, 494 aa, Unknown
  Bacterial polypetide isolated from the Sargasso Sea
MSITPNFSSFKKEYEAGQNQVIFAKLTSDLDTPVSIMLKLAGAKKNSFILESVTGGETRGRYSIIGMEPDLIWKCEGDQSFLSSGNNEFKHVEGNPLNIFRNLLKQSAINLPEDLPQASAGLFGYFGYDMVRHVEDLPNVNPDKIGLPDAMFIRPSIIAVLDGVKGEVILVSPVFYNKNTSIKQAFEKAIEKIEDAVFKLKKQIVTNRNLGKSGEIEEPSSNFTKEAYKSAVKKAKAYINQGDIFQVVPSQRWTQKFPYSPFSLYRSLRRTNPSPFMFFFNFGSFQVIGASPEILVRVFGNEVTVRPIAGTRPRGNTSEEDKALEEELLADQKELAEHLMLLDLGRNDVGRVAKIGTVKPTEKFIIERYSHVMHIVSNVVGELSDEHDAVSAFFAGMPAGTVSGAPKVRAMEIIDELEPEKRGVYGGGVGYFSSGGDMDMCIALRTAVLKDDTLFIQAGGGVVFDSDPEAEYMETVHKSNAIRKAAADAAMFEN

SEQ ID NO: 176537 - protein, 411 aa, Unknown
  Bacterial polypetide isolated from the Sargasso Sea
NLINNFLNVKNSFIFESVEKGFIKGRYTIFGRNPDKIWEFNNNKCVLNYENKKKILKGTPKKNIEKIIENFKFKIPSELPPISSIISGYFSYDIIRYIEKIPNSTENDLDMPDARILRPRNLIVFDNAEKKLFFIVNCFSDEKINNYDDKYEQIQNEIENLIFLANFNFKIKSNKNKIHKPKIKSNITKNKFLSNVNKAKNYIKLGDIFQVVLSQRFETDLVKDPLDIYKKLRVTNPSPFMYFFNFEDFQIIGASPEILVRLRDNKITIRPIAGTRPRGKNKKEDKFYEKDLLNDKKELSEHLMLLDLGRNDTGKVSKINTVKVTESFKIERYSHVMHIVSNVKGEFNKKFGKFDTLLAGFPAGTVSGAPKIRAMEIIDELETTRRKVYAGGIGYFSSNGDFDTCIALRTA

SEQ ID NO: 176538 - protein, 488 aa, Unknown
  Bacterial polypetide isolated from the Sargasso Sea
MITKEEYNKYAEDGFNVIPLIKNINLVSHSPVEIYSKIKDKKNSFLLESVEGGENWAQYSIVGIDCRNTIKISGKNIEIKTDEDLNLFESEDPLNELNKIISKYKSPNIKNMPRFYGGYVGFFAYESAQYAEKKIQSLPKKESKFEEHMPEIYLVKSEKLIVYDNFSKSIQIIYNSDPSKTSYDEAIHKLKKIEDSIEKSSPYINPSYKKVLGQLEFESNFTKSEFISSVNIIKNYIKEGDVMQVVLAQDFHRPFDGDSFKLYSALRELNPSPYMYYLNLEECEVVGSSPEILVRVENNDITLRPIAGTRKRGKTEEEDIQNEYDLLNDPKELAEHLMLIDLGRNDVGRISDIGSVRLTEKMVIERYSHVMHIVSNVNGKLSKEYNFIDALKATLPAGTLSGAPKIRAMEIINELEPSSRGIYGGAIGYISWNGNIDTAIAIRTAVIKNNLIHVGAGAGIVADSDPESEWQECIQKSKVFLDTMEMIS

SEQ ID NO: 176539 - protein, 242 aa, Unknown
  Bacterial polypetide isolated from the Sargasso Sea
SLPFTADPIALYRSIRQLNPSPYMYYLNLDEFYIVGSSPEILARLEDDKVTVRPIAGTRRRGKDDEDDVAMEKDMVNDPKEIAEHLMLIDLGRNDVGRIAEPGSVVVTEQFGVEKYSHVMHMVSNVEAEIRKDFSAIDVFKATFPAGTVSGAPKIRAMEIIDEFEPVKRGIYGGAIGYLSWQGNMDMAIAIRTAVIKDDVLYIQAGGGWVADSVPDLEWKESLNKGRAIFKAAEMVQEKLEG

SEQ ID NO: 176540 - protein, 343 aa, Unknown
  Bacterial polypetide isolated from the Sargasso Sea
FNIPDVRLLRPRTLVIHDNLKKEIFYISNIFKDEKIKNYQSKFNEIKSDLFKLFIQSSIKNLNKPLKEKIKNIKVKSNTSKSKFLKMVNKAKKYIKLGDIFQVVLSQRFEAKLSKNPIDIYKKLRVTNPSPFMFFFNFNDFQIIGASPEILVRLRDNKITVRPIAGTRPRGKTLKEDLYYEKDLLKDKKELSEHLMLLDLGRNDAGKVSKINSVKVTESFIIEKYSHVMHIVSNVIGDYNKKFSKFKSLLSGFPAGTVSGAPKIRAMEIIDELETTRRKVYAGGIGYFSANGEFDTCIALRTAVAKNKKFYVQAGAGIVADSKPINEYEETVNKAKALINALR

SEQ ID NO: 176541 - protein, 263 aa, Unknown
  Bacterial polypetide isolated from the Sargasso Sea
MARNLKGVMPALLTPFDNQQKLDIESLRRLVRFNIGQGIDGLYVGGSTGEAFVQNRAEREQVLEIVAEEAKGKVTLIAHVGTVSTEESQQLASAAHRYGFDAVSAVTPFYYPFSFEEHCDHYRAIIDSAGGLPMVVYNIPALSGVKLTLDQINTLVTLPGVGALKQTSGDLYQMEQIRRAHPDLVLYNGYDEIFASGLLAGADGGIGSTYNIMGWRYQGIVKALKEGDIRTAQKLQTECNKVIDLLIKVGVFRGLKTVLHYMD

SEQ ID NO: 176542 - protein, 259 aa, Unknown
  Bacterial polypetide isolated from the Sargasso Sea
MAVNLRGVMAALLTPFDGEQKLDKESLRRLVRFNLSQGIDGLYVGGSTGEAFVQSSAERQQVLEIVAEEAKGKMTLIAHVGCVSTLESQRLAEAAESYGYDAVSAVTPFYYPFSFEEHCAHYQAIIDSANGLPMVVYNIPALSGVKLSLDQINTLVRLPGVGALKQTSGDLYQMEQIRRAHPDLVLYNGYDEIFASGLLAGADGGIGSTYNIMGWRYQGIVKALRAGDIAEAQRLQCECNKAIDLLIKTGVFRGLKTVL

SEQ ID NO: 176543 - protein, 303 aa, Unknown
  Bacterial polypetide isolated from the Sargasso Sea
MPGSSRSGSTNNKKRSVMIEAMTEAELYAPVEWRDCSAGYEDILYHKSDDGIAKITINRPQVRNAFRPRTVKEMLQALADARYDDQVGTIILTGFGEKAFCAGGDQKIRGDYGGYRDDEGTHHLNVLDFQRDIRTCPKPVVAMVAGYAVGGGHVLHMMCDLTIAADNAQFGQTGPKVGSFDGGWGASYMARIVGQKKAREIWFLCRMYDAKQALDMGLVNTVVPLAELERETVRWCREMLQNSPMALRCLKAALNADCDGQAGLQELAGNATMLFYMTEEGQEGRNAFNEKRRPDFSKYKRNP

SEQ ID NO: 176544 - protein, 176 aa, Unknown
  Bacterial polypetide isolated from the Sargasso Sea
DFQRQIRTCPKPIVAMVAGYSIGGGHVLHMMCDLTIAAENAIFGQTGPKVGSFDGGWGASYMARIVGQKKAREIWFLCRQYDAQQALDMGLVNTVVPLADLEKETVRWCREMLQNSPMALRCLKAALNADCDGQAGLQELAGNATMLFYMTEEGQEGRNAFNQKRQPDFSKFKRNP

SEQ ID NO: 176545 - protein, 459 aa, Unknown
  Bacterial polypetide isolated from the Sargasso Sea
MKFKTIIEPFKIKSVESLPITTPEERKSFLEREYWNVFGLKSQEVTVDLLTDSGTGSMSSEQWAAIMRGDEAYAGSHSWQRFHDVVSELTGYKNIIPTHQGRASEKILATVMVKEGDIIPSNSHFDTTRANFEFVKAEPLDLLCKEGLDLLSPAPFKGNIDLEKLEDILSKKSEKIPFVLMTITNNTGGGQPVSMENLKNTKKLCEKYNKMLLLDACRFAENAWFVSQREEDYKDVEIREITKEAFRLADGCTISLKKDGFGNIGGVLAFNDDELAEASRNLLILTEGFPTYGGLAGRDLDALAQGLKEITDKNYLEYRARSISYLGEKALSYGIPIVQPAGGHALYIDAKTFVPHIPSHQYPGHSVACEIYLIGGVRAVELGTLAFGVAGENGEPDKPATHELVRLAAPRRTYTQSHFDYVAEVLEKLAESKEKLKGYEIIEQPQQLRHFTAKLRPLT

SEQ ID NO: 176546 - protein, 461 aa, Unknown
  Bacterial polypetide isolated from the Sargasso Sea
MRRIPEPFRIKMVEPIKQTTGAERRAALEAAGWNPFLLLAEDVYIDLLTDSGTGAMSDRQWAGIMMGDEAYAGSRNFVELERAVREIFGYQHVMPTHQGRGAEQILFPELVKRCQGKAPVFISNYHFDTTKAHVELAGARAINLLTPKALDTTAPYAWKGDFDLSRLSDTIETLGADNVAGIIITVTCNSAGGQPVSMANMQAVSELARCHHIPVVIDAARFAENAWFIKERDPAYAKRSIKDIVRQMFALGDIFTMSAKKDGLVNIGGLCCFKEDLELFRAVQVRCVAMEGFVTYGGLAGRDMAALAIGLREGMDEEYLTYRISQVAYLGERLAEAGIPIQTPTGGHAVFVDAKKLLPHIPSEQFPAHALACALYLEGGVRGVEIGSLLLGRDPTTGKQEAADFELLRLTIPRRVYTRDHMDYVADCLIAVKARASDIRGLTFDYEPPLLRHFTARLKPV

SEQ ID NO: 176547 - protein, 478 aa, Unknown
  Bacterial polypetide isolated from the Sargasso Sea
MYFNHKDNDIVIKVSYNLCMKFKTIIEPFKIKSVESLPITTPEERKSFLEREHWNVFGLKSQEVTVDLLTDSGTGSMSSEQWAAIMRGDEAYAGSHSWQRFHDVVSDLTGYKHIIPTHQGRASEKILATVTVKEGDIIPSNSHFDTTRANFEFVKAEPIDLLCKEGLDLLSPAPFKGNIDLEKLEDILSKKGEKIPFVLMTITNNTGGGQPVSMENLKSTKKLCEKYNKMLLLDACRFAENAWFVSQREEDYKGVEIRDITKEAFRLADGCTISLKKDGFGNIGGILAFNDDQLAEASRNLLILTEGFPTYGGLAGRDLDALAQGLKEITDKNYLEYRARSISYLGEKALSYGIPIVQPAGGHALYIDAKTFVPHIPPHQYPGHSVACEIYLIGGVRAVELGTLAFGVAGANGEPDKPATHELVRLAAPRRTYTQSHFDYVAEVLEKLAESKEKLKGYEIIEQPKQLRHFTAKLRPLT

SEQ ID NO: 176548 - protein, 145 aa, Unknown
  Bacterial polypetide isolated from the Sargasso Sea
MNNILLINGPNLNLLGNREPEIYGSKSLDDIEKDLSIIADESGYQLLSFQSNSESEIVDWIHENADSGLFLIINPGAFTHTSISIRDAILGTNISFIEVHISNIFSREEFRKDSYFSDIAEGVISGLGFEGYELALKAVLEIIKK

SEQ ID NO: 176549 - protein, 146 aa, Unknown
  Bacterial polypetide isolated from the Sargasso Sea
MNILLINGPNLNLLGTREPEIYGNKTLSDIEKDLTKVAKEKSINLEFFQSNHEGEIVDKIQESVKSIQGILINAGAFTHTSISIRDALIGSKIPFVELHISNIFSREDFRKESFLTDKAIGIISGFGISSYSLALEGIIGYLSSED

SEQ ID NO: 176550 - protein, 146 aa, Unknown
  Bacterial polypetide isolated from the Sargasso Sea
MNILLINGPNLNLLGTREPEIYGNKTLSDIEKDLIKVAKEKSINLECFQSNHEGEIVDKIQESVESIQGILINAGAFTHTSISIRDALIGSKIPFVELHISNIFSREDFRKESFLTDKAIGIISGFGISSYFLALEGIIGYLSIKD

SEQ ID NO: 176551 - protein, 130 aa, Unknown
  Bacterial polypetide isolated from the Sargasso Sea
MNILLINGPNLNLLGTREPEIYGNKTLSDIEKDLIKVAKEKSISLECFQSNHEGEIVDKIQESLKSIQGILINAGAFTHTSISIRDALIGSKIPFVELHISNIFSREDFRKESFLTDKAIGIISGFGISS

SEQ ID NO: 176552 - protein, 146 aa, Unknown
  Bacterial polypetide isolated from the Sargasso Sea
MKILVIHGPNLNLLGIREPEVYGSTTMEEINQGLLDKASSNNIEIEAFQSNAEHEIVTKLQDSINLIDYIIINPGALTHTSIAIRDCLLGIGVPFYEVHISNIFAREEFRHKSFFSDIANGVICGLGTQGYDLALSHIIKIYQDKQ

SEQ ID NO: 176553 - protein, 147 aa, Unknown
  Bacterial polypetide isolated from the Sargasso Sea
MHSILVLNGPNLNLLGTRQPEVYGSTTLANIEDMCRNHAESSGFSVAFLQSNHEGQLVDALHDARGTHDGVVLNAGAYTHTSVALMDAISSVQLPVIELHLSNIHARESFRHTSFIAPVALGQICGFGARGYTLALDALIGHLEAKS

SEQ ID NO: 176554 - protein, 143 aa, Unknown
  Bacterial polypetide isolated from the Sargasso Sea
MEILLINGPNLNLLGSRENSIYGNDTLDDIEENLSVICKENGISFASFQSNAEHEIVEKIHAAKENNVSKILMNPGAFTHTSISIRDALIGVGIPFYEIHISNIFAREEFRHKSYFSDIAEGVVCGMGTKGYEFALEKAINSN

SEQ ID NO: 176555 - protein, 73 aa, Unknown
  Bacterial polypetide isolated from the Sargasso Sea
MKKVLIVNGPNLNLLGKREPEVYGNTTLKELEKLCTHESKKLDFEVSFFQSNSEAEIINKIQECNYCDGLIIN

SEQ ID NO: 176556 - protein, 145 aa, Unknown
  Bacterial polypetide isolated from the Sargasso Sea
MSKFMLLNGPNLNLLGSREPEIYGSTTLDEVEKELCSKASISGHQLLCYQSNAEHDLVEQIHLAKEENIKCIIFNPGAFTHSSIAIRDALSGVGIPFIEVHISNIYSREDFRQKSFLSDIAEGVVSGLGVEGYALALESGIKKFS

SEQ ID NO: 176557 - protein, 83 aa, Unknown
  Bacterial polypetide isolated from the Sargasso Sea
MKLIVINGPNLNLLGEREPEIYGSESLNQINEWIQNHESCKNLEFEFFQSNSEGEIIDFLHSKRGKVDYCILNAGALTHYSYA

SEQ ID NO: 176558 - protein, 148 aa, Unknown
  Bacterial polypetide isolated from the Sargasso Sea
MPPIVLVLNGPNLNLLGTREPATYGHETLADIAALCGRSADKLGLKIEFRQTNHEGELLDWIHGARNRCAGIVINPAAWTHTSVAIRDALVASEVPVIEVHLSNVHAREAFRHHSFVSPIAQAVLAGFGSHGYHLALEHFSLTLKGRT

SEQ ID NO: 176559 - protein, 99 aa, Unknown
  Bacterial polypetide isolated from the Sargasso Sea
MNILVLNGPNLNLLGTREPEVYGTDTLKDIEENLKVISKNHNVNVSFYQSNSENELINELHTAKQENIDAIIINPGAFTHTSIALRDAFLGVNIPFIEV

SEQ ID NO: 176560 - protein, 145 aa, Unknown
  Bacterial polypetide isolated from the Sargasso Sea
MSNILLINGPNLNLLGNREPEIYGSKSLDDIEKELSIISTEMGHKLISFQSNSESEIVDWIHSNADDAKFLLINPGAFTHTSISIRDAILGTNISFIEIHISNIFSREEFRKESYFSDIAEGVISGLGFKGYELALRAALEMLKK

SEQ ID NO: 176561 - protein, 146 aa, Unknown
  Bacterial polypetide isolated from the Sargasso Sea
MNILLINGPNLNLLGTREPEIYGNKTLSDIEKDLTKVAKEKSINLECFQSNHEGEIVDKIQESVKSTQGILINAGAFTHTSISIRDALIGSKIPFVELHISNIFSREDFRKESFLTDKAIGIISGFGISSYFLALEGIIGYLSIKD

SEQ ID NO: 176562 - protein, 145 aa, Unknown
  Bacterial polypetide isolated from the Sargasso Sea
MKNILLINGPNLNLLGNREPEIYGSKSLDDIEKDLSVIAGESGYQLLSFQSNSESEIVEWIHENADSALFLIINPGAFTHTSISIRDAILGTNISFIEVHISNIFSREEFRKESYFSDIAEGVISGLGFEGYELALKAVLEIIKK

SEQ ID NO: 176563 - protein, 146 aa, Unknown
  Bacterial polypetide isolated from the Sargasso Sea
MNILLINGPNLNLLGTREPEIYGNKTLSDIEKDLTKVAKEKSINLECFQSNHEGEIVDKIQDSVKSIQGILINAGAFTHTSISIRDALIGSKIPFVELHISNIFSREDFRKESFLTDKAIGIISGFGISSYSLALEGIIGYLSIKN

SEQ ID NO: 176564 - protein, 109 aa, Unknown
  Bacterial polypetide isolated from the Sargasso Sea
MSKASKIYVLNGPNLNLLGDREPDIYGNVSLKDIEKSLSNYGKENNSEIYFKQSNHEGELIEFVHEASKKANAIIINPAGYSHTSVALLDALLTVKIPIIEVHISNIFK

SEQ ID NO: 176565 - protein, 136 aa, Unknown
  Bacterial polypetide isolated from the Sargasso Sea
MKKIKIIDGPNLNLLGKREPEIYGLETLNDIQALVKSYIIQRKYELEASFFQSNSEGEIVDCIQNSNQSSDGIIINAAGFSHTSVAVLDALLAIQIPKIEVHLTNLFKREDFRHHSFISKGVNGVICGFGSSSYLL

SEQ ID NO: 176566 - protein, 109 aa, Unknown
  Bacterial polypetide isolated from the Sargasso Sea
MKLIVINGPNLNLLGEREPEIYGSESLNQINEWIQNHESCKNLEFEFFQSNSEGEIIDFLHSKRGKVDYCILNAGALTHYSYALRDAIVGAQIPTVEVHLSNIHKRENL

SEQ ID NO: 176567 - protein, 144 aa, Unknown
  Bacterial polypetide isolated from the Sargasso Sea
MKNILLINGPNLNLLGSREPEIYGSKSLDDIENDLSIISNERGYKLLSFQSNSESEIVDWIHEYADSALFLIINPGAFTHTSISIRDAILGTNISFIEVHISNIFSREEFRKESYFSDIAEGVISGLGFKGYELALKAILEMIK

SEQ ID NO: 176568 - protein, 147 aa, Unknown
  Bacterial polypetide isolated from the Sargasso Sea
MHLLLLNGPNLNLLGRREPEIYGLSTLKSIEAELKLEAESHGCDLECFQSNFEGGLVERIHAAMGNTQGILINAGAYTHTSVALRDALAGVAIPYVELHLSNTHAREEFRHHSFLAAGAIGVICGFGVKSYALALHGLIHHLHQDTP

SEQ ID NO: 176569 - protein, 146 aa, Unknown
  Bacterial polypetide isolated from the Sargasso Sea
MNILLINGPNLNLLGTREPEIYGNKTLSDIEQDLTKVAQEKSINLECFQSNHEGEIVDKIQDSVKSIQGILINAGAFTHTSISIRDALIGSKIPFVELHISNIFSREDFRKESFLTDKAIGIISGFGISSYSLALEGIIGYLSIKD

SEQ ID NO: 176570 - protein, 90 aa, Unknown
  Bacterial polypetide isolated from the Sargasso Sea
MKILVLNGPNLNLLGTREPEVYGTESLEDIEKNLQSISSGKSISINFYQSNSENELIERLHQAKKDSVDYIIINPGAFTHTSIALRDAFL

SEQ ID NO: 176571 - protein, 146 aa, Unknown
  Bacterial polypetide isolated from the Sargasso Sea
MNILLINGPNLNLLGTREPEIYGNKTLSDIEKDLTKVALEKSINLECFQSNHEGEIVDKIQDSVKNIQGILINAGAFTHTSISIRDALIGSKIPFVELHISNIFSREDFRKESFLTDKAIGIISGFGISSYALALEGIIGYLSSKN

SEQ ID NO: 176572 - protein, 150 aa, Unknown
  Bacterial polypetide isolated from the Sargasso Sea
MAAKLKILVINGPNLNMLGKREPDKYGSHSLEHIMSELNSAANSLGVALTHFQSNSEQALIERIHDAWQAVDYIIINPAAFTHTSVALRDALLSVDIPFYEVHLSNVHAREAFRHHSYFSDVAQGVICGLGAMGYHAALNAAVNRSQNAI

SEQ ID NO: 176573 - protein, 147 aa, Unknown
  Bacterial polypetide isolated from the Sargasso Sea
MSKILLLNGPNLNLLGSREEDIYGKKSLKEIEESLIQHANNLNEELICFQSNAEHELVDRIQAAKNEKIKIILFNPGAFTHTSVALRDAVLGVDIPMIEIHISNIFGREKFREKSFFSDIALGVISGLGEESYMSALNFAIKKIGDL

SEQ ID NO: 176574 - protein, 87 aa, Unknown
  Bacterial polypetide isolated from the Sargasso Sea
MKFLVLNGPNLNLLGEREPEVYGTTTLAEIDNRLVGLAKAEGHELSCFQSNAEHELVDKIHEAKKSGVDFILINPGAFTHTSIALRD

SEQ ID NO: 176575 - protein, 147 aa, Unknown
  Bacterial polypetide isolated from the Sargasso Sea
MLNILLINGPNLNLLGTREPEIYGNKTLNDIENNLTKVAKEKSINLECFQSNHEGEIVDKIQGSIKNIQGILINAGALTHTSISIRDALIGSNIPFVELHISNIFSREDFRKESFLTDKAIGIISGFGISSYSLALEGIIGYLSSKN

SEQ ID NO: 176576 - protein, 168 aa, Unknown
  Bacterial polypetide isolated from the Sargasso Sea
MPFILIFIFFIFFMLYKFLMSNNILIINGPNLNLLGEREQSQYGSSTFEQIKKICIEKSKELGINLEFTQSNIEGEIVTIIQKARNNFDGIIINAAGFTHTSVAIRDALSIFKKPSIELHISNIYKREEFRHKSMLSAVVTGVICGLGTDGYILAINAMQELLKNGNR

SEQ ID NO: 176577 - protein, 139 aa, Unknown
  Bacterial polypetide isolated from the Sargasso Sea
MKLIIINGPNLNLLGVREKKIYGNKSFESLFDELQKKYNDISLEQYQSNHEGEIIEKIQEVGFSYDGIIINAGGFTHTSIAIRDAISSVTTPCLEVHISNILSREEFRQNSYLSEVSVGIISGLGMKGYELAIQYFKSK

SEQ ID NO: 176578 - protein, 141 aa, Unknown
  Bacterial polypetide isolated from the Sargasso Sea
MNGPNLNMLGVREPNIYGYETLGDIKELCNQRAISHGLKVNFKQSNFEGEIIADIQSARGVAAGIIINGAGYTHTSIAILDALKISELPVIELHLSNIHAREAFRHHSYIAKAATGIICGFGAHSYVLAIDAMARLIECAD

SEQ ID NO: 176579 - protein, 148 aa, Unknown
  Bacterial polypetide isolated from the Sargasso Sea
MHNVLIINGPNLNLLGEREKDKYGKISLDEIKKNCASFSKNNNINLTFFQSNIEGEIIDEIQNSRKKQDCLIINAGGYTHTSVAIHDALKVLKIPIIELHITNIYKREEFRHKSLISKIASGVICGLGSEGYTLALKASINLLENENR

SEQ ID NO: 176580 - protein, 146 aa, Unknown
  Bacterial polypetide isolated from the Sargasso Sea
MNILLLNGPNLNMLGQREPDKYGTQTLQDIVDDLQAQAASSNVTLTHFQSNAEFELIDRVHAAMGTVDAIIINPAAFTHTSVALRDALLSVNIPFIEVHLSNVHAREPFRHHSYFSDVAAGVIVGLGAMGYSLALTAAINLPKSHK

SEQ ID NO: 176581 - protein, 147 aa, Unknown
  Bacterial polypetide isolated from the Sargasso Sea
MSRKKIIIINGPNLNLLGEREPEVYGTETLKDLERLTKDHIQSSNLNIDLVFFQSNSEGDIVNSIQDAGKSLNGVIINAGGLSHTSVSILDALLAIKIPKIEVHISNLFTREEFRHSSYISKGVSGVVCGFGLNGYLLAIDGIKKLI

SEQ ID NO: 176582 - protein, 145 aa, Unknown
  Bacterial polypetide isolated from the Sargasso Sea
MSNILLINGPNLNLLGSREPEIYGSKNLNDIEKELTIIADEMGHKLLPFQSNSESEIVEWIHDNADDAKFLIINPGAFTHTSISIRDAILGTNISFIEIHISNIFSREEFRKESYFSDIAEGVISGLGFKGYELALRAALEMLKK

SEQ ID NO: 176583 - protein, 146 aa, Unknown
  Bacterial polypetide isolated from the Sargasso Sea
MNNKIIIINGPNLNLLGEREQSQYGSITFNELKEICLNKSKELGLVAEFSQSNIEGEIVNVIQDSIKNFDGIIINAAAFTHTSVAIRDALSVFKKPIIELHISNIYKREEFRQKSLISDIATGGIFGLGADGYILAIISMQKLLKK

SEQ ID NO: 176584 - protein, 146 aa, Unknown
  Bacterial polypetide isolated from the Sargasso Sea
MNILLINGPNLNLLGTREPEIYGNKTLSDIEKDLTKVAQEKSINLECFQSNHEGEIVDKIQDSVKSIHGILINAGAFTHTSISIRDALIGSKIPFVELHISNIFSREDFRKESFLTDKAIGIISGFGISSYSLALDGIIEYLNNKD

SEQ ID NO: 176585 - protein, 96 aa, Unknown
  Bacterial polypetide isolated from the Sargasso Sea
MSNILLINGPNLNLLGSREPEIYGSKNLDDIQKELAIIADEMGHKLLSFQSNSESEIVEWIHGNADDAKFLIINPGAFTHTSIFYRDAILGTNISF

SEQ ID NO: 176586 - protein, 147 aa, Unknown
  Bacterial polypetide isolated from the Sargasso Sea
MKKILIINGPNLNLLGNREKNFYGDTSLERIKSICEKKCFENQMEMEFYQSNHEGELLEKIHSVQNDYEGIIINPAAYTHTSIALLDALRATTKPKIEVHISNIYAREDYRRKSITSESVNGVICGFGENGYLLAIEAMKKLIYKDQ

SEQ ID NO: 176587 - protein, 83 aa, Unknown
  Bacterial polypetide isolated from the Sargasso Sea
MNILLINGPNLNLLGTREPEIYGNKTLNYIEQDLTKAAESKKTLLECFQSNHEGEIVDKIHDSVNRIQGILINAGAFTHTSIS

SEQ ID NO: 176588 - protein, 144 aa, Unknown
  Bacterial polypetide isolated from the Sargasso Sea
MPKVLLLNGPNLNLLGSREPEIYGSTTLEEIEEKVAAVLCGHEIECETFQSNSEGDIIDWLHKHRGADFLLLNPGALAHTSVGLRDAVLGVEIPFIEIHLSNVNKREEFRHHSYFSDIAIGALAGLGVKGYLLAAEFAVDYIEQ

SEQ ID NO: 176589 - protein, 136 aa, Unknown
  Bacterial polypetide isolated from the Sargasso Sea
MKILVLNGPNLNLLGIREENIYGSESLQDVEHKLKEIADEVNAQISFYQSNAEHDLINAIHDAYESGVELIIFNPAAYTHTSVALRDALLAVSIPFYEVHISDIETREEFRQKSYFSDIAIKVFSGHGTNGYSLAL

SEQ ID NO: 176590 - protein, 105 aa, Unknown
  Bacterial polypetide isolated from the Sargasso Sea
MSRILLLQGPNLNLLGTREPHIYGSTTLADIEQTLGPIAKAAGHELEQLQSNAEHILIDRIHAARDDDTCFILINPGAFTHTSVAIRDALAGVAIPFIEVHISNV

SEQ ID NO: 176591 - protein, 141 aa, Unknown
  Bacterial polypetide isolated from the Sargasso Sea
MLLNGPNLNLLGTREPDLYGSETLEDIEAHLVEISKDKKCNLICHQSNAEHELVDLIHSAKDNQVKCIIINPGALTHSSIALRDALTGVNIPFIEVHISNIYAREDFRQKSYLSDIAEGVISGLGVEGYELALVKAMKKFN

SEQ ID NO: 176592 - protein, 150 aa, Unknown
  Bacterial polypetide isolated from the Sargasso Sea
MPKVLLLNGPNLNLLGSREPKIYGSTTLKEIEEKVGSILSRNEIECESFQSNSEGEIIDWLHKNRDAVFMLLNPGALAHTSVGLRDAVLGVEIPFIEIHLSNVYKREEFRHHSYFSDIAIGALAGLGVKGYLLATEFAVDYIVQKRELQL

SEQ ID NO: 176593 - protein, 152 aa, Unknown
  Bacterial polypetide isolated from the Sargasso Sea
MPKVLLLNGPNLNLLGSREPEIYGSTTLKEIEDRVASIMICHEIQFESFQSNSEGEIIDWLHKFSSADFLLLNPGALTHTSVGLRDAVLGVGIPFIEIHLSNVHKREEFRHHSYFSDIAIGALAGLGVKGYLLAAEFAVEYIKQKGNINSLI

SEQ ID NO: 176594 - protein, 74 aa, Unknown
  Bacterial polypetide isolated from the Sargasso Sea
MNILLINGPNLNLLGTREPEIYGNKTLSDIEKDLTKVAKEKSINLECFQSNHEGEIVDKIQESVKSTQGILINA

SEQ ID NO: 176595 - protein, 149 aa, Unknown
  Bacterial polypetide isolated from the Sargasso Sea
MAKTIKICVINGPNLNMLGMREPEIYGSVTLADIETKCRELATRHKMGMDWFQSNSESELIQQIHHCVGKANWIIINAAGYTHTSVAIRDALSLFPGGVIEVHISNTHTREAFRHKSLISGIARGVIAGFGPSSYYMAVDAVPNLTSEA

SEQ ID NO: 176596 - protein, 143 aa, Unknown
  Bacterial polypetide isolated from the Sargasso Sea
MEILLINGPNLNLLGNRENSIYGNDTLEDIEKNLSEICKENGVSFTSFQSNAEHEIVEKIHASKEDNVSKILINPGAFTHTSISIRDALIGVGIPFYEIHISNIFAREEFRHKSYFSDIAEGVVCGMGTKGYEFALEKAINSN

SEQ ID NO: 176597 - protein, 146 aa, Unknown
  Bacterial polypetide isolated from the Sargasso Sea
MNILLINGPNLNLLGTREPEIYGNKTLSDIEKDLIKVAKEKSINLECFQSNHEGEIVDKIQESVKSIQGILINAGAFTHTSISIRDALIGSKIPFVELHISNIFSREDFRKESFLTDKAIGIISGFGISSYSLALEGIIGYLSIKD

SEQ ID NO: 176598 - protein, 143 aa, Unknown
  Bacterial polypetide isolated from the Sargasso Sea
MEILLINGPNLNLLGNRENSIYGNDTLEDIEKNLSEICKENGVSFASFQSNAEHEIVEKIHASKEGNVSKILINPGAFTHTSISIRDALIGVGIPFYEIHISNIFAREEFRHKSYFSDIAEGVVCGMGTKGYEFALEKAINSN

SEQ ID NO: 176599 - protein, 143 aa, Unknown
  Bacterial polypetide isolated from the Sargasso Sea
MKILVINGPNLNLLGKRESSIYGNESLDDIISSLENICGKKNACLLTFQSNAEHEIVEKIHSCQNKKVDWMIINPGAFTHTSIAIRDALIGVGVPFYEVHISNIFAREEFRHKSYFSDIAQGVICGFGTSGYESALLKILDKN

SEQ ID NO: 176600 - protein, 146 aa, Unknown
  Bacterial polypetide isolated from the Sargasso Sea
MKILVIHGPNLNLLGIREPDVYGSTTMVEINQGLLDKASSNDIEIEAFQSNAEHEIVTKLQESINQIDYIIINPGALTHTSIAIRDCLLGIGVPFYEVHISNIFAREEFRHKSFFSDIASGVICGLGTQGYELALSHIIKSNQDKK

SEQ ID NO: 176601 - protein, 143 aa, Unknown
  Bacterial polypetide isolated from the Sargasso Sea
MRILVINGPNLNMLGIRQPEIYGNQSLDDINDDLKKYAEKHSIMIECFQSNHEGEIIDMIQQADKDYNGLIINPGALSHYSIAIRDAISSIHNNVVEVHISNIFKREKFRHHSVISEVCSSSVIGFGTEGYKLALNKFITFTE

SEQ ID NO: 176602 - protein, 148 aa, Unknown
  Bacterial polypetide isolated from the Sargasso Sea
MNNKIIIINGPNLNLLGEREQSEYGSITFENLKENCKKKSDELGMEINFVQSNVEGELVNIIQDSRKKFDGIIINAAAFTHTSIAIRDALNIFKKPIIEVHISNIYKREEFRQKSLISDIVTGGIFGLGADGYILAIISMHKLLKNEN

SEQ ID NO: 176603 - protein, 134 aa, Unknown
  Bacterial polypetide isolated from the Sargasso Sea
MADRVKILVVNGPNLNMLGMREPEIYGTLKLEAIREKCLAICTKLGFTMEWMQSNSEAILIDTIQAACNKFDWIIVNGAGLTHTSVALRDALALFTGGVIEVHLSNIHAREGFRHTSLITAIAKGAIIGFGASS

SEQ ID NO: 176604 - protein, 152 aa, Unknown
  Bacterial polypetide isolated from the Sargasso Sea
MPKVLLINGPNLNLLGSREPEIYGSTTLMEIEKKVASTLREHEIDCESFQSNSEGEIIDWLHNNRKADFLLLNPGALSHTSVGLRDAVLGVEIPFIEIHLSNVHKREEFRQHSYFSDIAIGALSGLGVKGYLLAAEFAVDYIEQKGKINSGI

SEQ ID NO: 176605 - protein, 145 aa, Unknown
  Bacterial polypetide isolated from the Sargasso Sea
MSHKIIIINGPNLNLLGTREPEIYGNESLEDLKSIVNSHIEKNFPGMSVDFYQSNTEGDIVNKIQESVSLNGIIINAGGLSHSSVSILDALLSTKIPKIEVHISNLFSREEFRQNSYVSKGVDGFVCGFGINGYLLAIDGISKLI

SEQ ID NO: 176606 - protein, 149 aa, Unknown
  Bacterial polypetide isolated from the Sargasso Sea
MPKILILNGPNLNLLGTREPELYGNNTLSEIEQICKNKAQSIGLEVKFQQSNSEGELVDCIQLAVNTTKGLLINPAAYTHTSVAILDALKQYQEPIIEIHLSNIYSREPFRQHSYVSPVANGVICGFGAHGYLLAIDAIYRLISDKKEV

SEQ ID NO: 176607 - protein, 145 aa, Unknown
  Bacterial polypetide isolated from the Sargasso Sea
MSKFMLLNGPNLNLLGTREPEIYGSVTLEEIEKKLDSKASESGQELICYQSNAEHDLVEQIHFARKEDVKCIIFNPGAFTHSSIAIRDALSGVGIPFIEVHISNIYSREDFRQKSFLSDIAEGVISGLGVEGYELALDSGIKKYS

SEQ ID NO: 176608 - protein, 149 aa, Unknown
  Bacterial polypetide isolated from the Sargasso Sea
MNNNITIINGPNLNLLGEREQSQYGSITFDDLKKICLEQAKKLNINLDFLQSNVEGEIVNIVQNARNKCDGIIINAAGFTHTSVAIRDALDIFKKPIIELHISNIYKREEFRHKSMISGVVTGVICGLGANGYILAINAMQELLENGNR

SEQ ID NO: 176609 - protein, 149 aa, Unknown
  Bacterial polypetide isolated from the Sargasso Sea
MPKILILNGPNLNLLGTREPEIYGRDTLSDIERKCRVHGQAIGHEIDFRQSNSEGEIVDWIQLAQQESDGIIINPAAYTHTSVAILDALKQFNKPIIEIHISNIFSREPFRHHSYISPVANGVICGFGANGYSIALDAISQLVSNKEEK

SEQ ID NO: 176610 - protein, 87 aa, Unknown
  Bacterial polypetide isolated from the Sargasso Sea
MNILLINGPNLNLLGIREPEIYGNKTLNDIEKDLIKVAKGKSINLECFQSNHEGEIVDKIQSSVSTIHGILINAGAFTHTSISIRDA

SEQ ID NO: 176611 - protein, 146 aa, Unknown
  Bacterial polypetide isolated from the Sargasso Sea
MNILLINGPNLNLLGTREPEIYGNKTLSDIEQDLTKVAQEKSINLECFQSNHEGEIVDKIQDSVKSIQGILINAGAFTHTSISIRDALIGSKIPFVELHISNIFSREDFRKESFLTDKAIGIISGFGISSYSLALEGIIGYLSSKN

SEQ ID NO: 176612 - protein, 93 aa, Unknown
  Bacterial polypetide isolated from the Sargasso Sea
HHEGVLIDKIHEWGDAGFSGLILNPGGLTHTSVALRDAVVASGLKTVEVHLSNIHAREDFRHKSLISGISAAVVAGMNHHGYLSALRYLSEEA

SEQ ID NO: 176613 - protein, 144 aa, Unknown
  Bacterial polypetide isolated from the Sargasso Sea
MVLHGPNLNLLGSREPGVYGRDTLAEIDAELRQQAERLGAQLDCFQSNHEGALVDRIHQSVGQVQGILINAGAYTHTSIALRDALLGVALPYVELHLSNVHARERFRHRSFLADQAVGVICGFGPISYYLALEGMVAHLRSQEL

SEQ ID NO: 176614 - protein, 145 aa, Unknown
  Bacterial polypetide isolated from the Sargasso Sea
MSNILLINGPNLNLLGSREPEIYGSKNLDDIQKELTIIANEMGHKLLHFQSNSESEIVEWIHGNADDAKFLIINPGAFTHTSISIRDAILGTNISFIEIHISNIFSREEFRKESYFSDIAEGVISGLGYTGYELALRAALEMLKK

SEQ ID NO: 176615 - protein, 150 aa, Unknown
  Bacterial polypetide isolated from the Sargasso Sea
MTRLLVLHGPNLNLLGTREPEVYGRVTLAQIDQALAARAREAGAELSSFQSNHEGALVDRIQAAREEQTDFILINPAAYTHTSVAIRDAIAGVGIPFVEVHLSNVHRREAFRHHSYFSDQAEGVICGLGWKGYLYALEHALDKLQGTSRG

SEQ ID NO: 176616 - protein, 146 aa, Unknown
  Bacterial polypetide isolated from the Sargasso Sea
MHLLLLNGPNLNLLGQREPGLYGSGTLASIEEKLQAEAQAADVTLDCFQSNFEGALVEKVHQAMGRSQGILINAGAYTHTSIALRDALLGVAIPYVELHLSNTHAREPFRHRSLLADRAVGVVMGFGAGSYSLALQGLLHHLRSSS

SEQ ID NO: 176617 - protein, 143 aa, Unknown
  Bacterial polypetide isolated from the Sargasso Sea
MNILVLNGPNLNLLGSREPEVYGTDTLKDIEENLKSISKNHNVNIRFYQSNSENELINELHTAKQENVDAIIINPGAFTHTSIALRDAFLGVDIPFIEVHISNIYRREEFRKKSFLSDISEGLITGLGVSGYEFALLSIIKRG

SEQ ID NO: 176618 - protein, 145 aa, Unknown
  Bacterial polypetide isolated from the Sargasso Sea
MKISIINGPNLNLLGKREPDVYGSTSFEDFFEKMILSFPDIDFDYYQSNIEGELINQIQDMGDSSDGIILNAAAFTHTSVGIADAVKSIKSRVIEVHISNTFSRESFRHKSFLSPVVDGIIVGFGLDSYRLAVESLIKDNKIKGV

SEQ ID NO: 176619 - protein, 144 aa, Unknown
  Bacterial polypetide isolated from the Sargasso Sea
MNHKVLLINGPNLNLLGRREPSVYGHQTLADIVALLSEQAQAAGVELEHIQSNAEFELINAIHATDAQMIIINPAAFTHTSVALRDALLGVDIPFFEVHLSNVHAREPFRHHSYLSDKAIGVICGFGAQGYEFALAAAIKRLKA

SEQ ID NO: 176620 - protein, 145 aa, Unknown
  Bacterial polypetide isolated from the Sargasso Sea
MSKFMLLNGPNLNLLGSREPEIYGSATLEDIENKLDAIASESGHELICFQSNAEHDLVDRIHLAKKEDVKCIIFNPGAFTHSSIALRDALSGVEIPFIEVHISNIYSREDFRQNSFLSDIAEGVISGLGVEGYKLALKSGIEKYS

SEQ ID NO: 176621 - protein, 145 aa, Unknown
  Bacterial polypetide isolated from the Sargasso Sea
MHLLLLNGPNLNLLGQREPGIYGSGTLASIEDRLRQEATAGGAELECFQSNFEGALVERIHQAMGTSQGILINAGAYTHTSIALRDALLGVALPYVELHLSNTHARESFRHRSLLADKAIGVVCGFGPMSYSLALQGLIQHLRQG

SEQ ID NO: 176622 - protein, 141 aa, Unknown
  Bacterial polypetide isolated from the Sargasso Sea
MLLNGPNLNLLGTREPDLYGSETLEDIEAHLVEISKDKECNLICHQSNAEHELVDLIHSAKDNQVKCIIINPGALTHSSIALRDALTGVNIPFIEVHISNIYAREDFRQKSYLSDIAEGVISGLGVEGYELALVKAMKKFN

SEQ ID NO: 176623 - protein, 143 aa, Unknown
  Bacterial polypetide isolated from the Sargasso Sea
MKILVLNGPNLNLLGIREEDIYGSESLEEIELKLKKIAEESECELNFFQSNAEHELIEAIHNAYKSNTNRIIFNPAGYTHTSVALRDALLAVKIPFFEVHISDIESREDFRQKSYFSDIAKKVFSGHGTDGYTLALKEAIKDK

SEQ ID NO: 176624 - protein, 141 aa, Unknown
  Bacterial polypetide isolated from the Sargasso Sea
MLLNGPNLNLLGTREPDLYGSETLEDIEANLVEISKDKKCNLICHQSNAEHELVDLIHSAKDNQVKCIIINPGALTHSSIALRDALTGVNIPFIEVHISNIYAREDFRQKSYLSDIAEGVISGLGVEGYELALVKAMKKFN

SEQ ID NO: 176625 - protein, 145 aa, Unknown
  Bacterial polypetide isolated from the Sargasso Sea
MSNILLINGPNLNLLGNREPEIYGSKNLDDIQKELSIIADEMGHKLIPFQSNSESEIVEWIHDNADDAKFLIINPGAFTHTSISIRDAILGTKIAFIEIHISNIFSREEFRKESYFSDIAEGVISGLGYTGYELALRAALEILKK

SEQ ID NO: 176626 - protein, 143 aa, Unknown
  Bacterial polypetide isolated from the Sargasso Sea
MEILLINGPNLNLLGNRENSIYGNDTLEDIEKNLSEICKENGVSFVSFQSNAEHEIVEKIHASKEDNVSKILMNPGAFTHTSISIRDALIGVGIPFYEIHISNIFAREEFRHKSYFSDIAEGVVCGMGTKGYQFALEKAINSN

SEQ ID NO: 176627 - protein, 145 aa, Unknown
  Bacterial polypetide isolated from the Sargasso Sea
MSNILLINGPNLNLLGSREPEIYGSKNLDDIQKELAIIADEMGHKLLSFQSNSESEIVEWIHGNADDAKFLIINPGAFTHTSISIRDAILGTNISFIEIHISNIFSREEFRKESYFSDIAEGVISGLGYRGYELALRAALEMLKK

SEQ ID NO: 176628 - protein, 148 aa, Unknown
  Bacterial polypetide isolated from the Sargasso Sea
MATLLVLHGPNLNLLGTREPDKYGATTLAEINQDLEQRAREAGHHLLYLQSNAEYELIDRIHAAKGEGVDFILINPAAFTHTSVALRDALLAVSIPFIEVHLSNVHKREPFRHHSYFSDVAVGVICGLGASGYRLALEAALEQLTGRA

SEQ ID NO: 176629 - protein, 142 aa, Unknown
  Bacterial polypetide isolated from the Sargasso Sea
MKLIIINGPNLNLLGEREPEIYGSETLEQVNEWIENHELCKNLELVFFQSNSEGKLIDFLHSKRKSVDYCILNAGALTHYSYALRDAIVGTQIPTVEVHLSNIYKRENFRKTSVIKNVCIAQFYGEGKQSYINGIKYILEKK

SEQ ID NO: 176630 - protein, 141 aa, Unknown; identical to SEQ ID NO: 176591
  Bacterial polypetide isolated from the Sargasso Sea

SEQ ID NO: 176631 - protein, 149 aa, Unknown
  Bacterial polypetide isolated from the Sargasso Sea
MSQKHRILLLNGPNLNLLGKREPGIYGSKTLDEIVADLTHNAGELGVTLEHLQSNAEHELVGRIHQAMGQVDFIIINPAAFTHTSVAIRDALLGVAIPFIEVHLSNVHAREPFRHHSYLSDVAKGVICGLGADGYQFALTAAVHQLRAA

SEQ ID NO: 176632 - protein, 145 aa, Unknown
  Bacterial polypetide isolated from the Sargasso Sea
MSNILLINGPNLNLLGSREPEIYGSKNLDDIEKELTIIADEMGHKLLPFQSNSESEIVEWIHDNADDAKFLIINPGAFTHTSISIRDAILGTSISFIEIHISNIFSREEFRKESYFSDIAEGVISGLGFKGYELALRAALEMLKK

SEQ ID NO: 176633 - protein, 137 aa, Unknown
  Bacterial polypetide isolated from the Sargasso Sea
MRKILIINGPNLNLLGKREPDTYGNTTFDDYFKELIKDFPDLELHTFQSNVEGEIINELHEKGFSFDGIVLNAGGYTHTSVAIADAVAAIDSPVIEVHISNVHAREEFRHQSMMAKNCKGIIAGFGLDSYRLALASF

SEQ ID NO: 176634 - protein, 145 aa, Unknown
  Bacterial polypetide isolated from the Sargasso Sea
MATFLLLNGPNLNLLGTREPEVYGDVTLEEIQNKLEEMCKKSGTDLVSFQSNAEHELVDRIQEAQSEGIKCIIFNPGAFTHSSIALRDALNGTGQKFIEVHISNIYGREDFRQKSFLSDIADGVISGLGTKGYELALEVAIERYS

SEQ ID NO: 176635 - protein, 152 aa, Unknown
  Bacterial polypetide isolated from the Sargasso Sea
MSTNLRILLLNGPNLNMLGKREPQIYGAATLPQIVDGLTAHAKELNATLTHLQSNAEHELINAIQQSLGQQDFIIINPGAYTHTSVAIRDALLAVAIPFIEVHLSNVHAREEFRRHSYLSDIAKGVICGLGAKGYHYALESAVSSLSTIPSN

SEQ ID NO: 176636 - protein, 146 aa, Unknown
  Bacterial polypetide isolated from the Sargasso Sea
MNILLINGPNLNLLGTREPEIYGKKTLRDIEQDLTKVAESKRVFLECFQSNHEGEIVDKIHDSVNRIQGILINAGAFTHTSISIRDALIGSKIPFVELHISNIFNREDFRKESFLTDKAIGIISGFGISSYSLALEGIIGYLRSKS

SEQ ID NO: 176637 - protein, 143 aa, Unknown
  Bacterial polypetide isolated from the Sargasso Sea
MEILLINGPNLNLLGSRENSIYGNDTLEDIEKNLSVICKENGISFGSFQSNAEHEIVEKIHAAKEGNVSKILMNPGAFTHTSISIRDALIGVGIPFYEIHISNIFAREEFRHKSYFSDIAEGVVCGMGTKGYEFALEKAINSN

SEQ ID NO: 176638 - protein, 146 aa, Unknown
  Bacterial polypetide isolated from the Sargasso Sea
MNILLINGPNLNLLGTREPEIYGNKTLSDIEKDLTKVAKEKSINLECFQSNHEGEIVDKIQESVKSIQGILINAGAFTHTSISIRDALIGSKIPFVELHISNIFSREDFRKESFLTDKAIGIISGFGISSYSLALEGIIGYLSIKD

SEQ ID NO: 176639 - protein, 145 aa, Unknown
  Bacterial polypetide isolated from the Sargasso Sea
MKKILIINGPNLNLLGNREIGVYGKESLSDIENKCLEKCKSLEINCEFVQNNNEGEIINLIQSVEKNFDGLIINPAAYTHTSVAILDALRSVTKPKIEIHLSNIYTREEYRKKSITSEAVNGLICGFGAYSYILAIEAIKNMIYN

SEQ ID NO: 176640 - protein, 146 aa, Unknown
  Bacterial polypetide isolated from the Sargasso Sea
MNILLINGPNLNLLGTREPEIYGNKTLSDIQKDLTKVAQEKSINLECFQSNHEGEIVDKIQESVKSIQGILINAGAFTHTSISIRDALIGSKIPFVELHISNIFSREEFRKESFLTDKAIGIISGFGISSYSLALEGIIGYLSSKD

SEQ ID NO: 176641 - protein, 147 aa, Unknown
  Bacterial polypetide isolated from the Sargasso Sea
MSTVKKIYVLNGPNLNLLGEREPDIYGNLSLKDIEKTLIDYAKDYDVEIYFKQSNHEGELIELVQEASKKANAIIINPAGYSHTSVALLDALLASKIPVLEVHISNIFKREDFRHNSYVSKSAIGVISGLGIDGYLYSLKFLLDYLK

SEQ ID NO: 176642 - protein, 148 aa, Unknown
  Bacterial polypetide isolated from the Sargasso Sea
MKNILIINGPNLNLLGEREQSQYGSITFDQLKKNCLEKANELNISLDFVQSNVEGEIVTLIQEARKNYEGLIINAAGFTHTSVAIRDALDIFKKPSIELHISNIYKREEFRHKSMISAVVKGVICGLGANGYILAINAMHELLKDGNK

SEQ ID NO: 176643 - protein, 51 aa, Unknown
  Bacterial polypetide isolated from the Sargasso Sea
MKILVLNGPNLNLLGKREPEIYGYETLDDIAKSLDNIANQHEISLFHDQKN

SEQ ID NO: 176644 - protein, 152 aa, Unknown
  Bacterial polypetide isolated from the Sargasso Sea
MPKVLLINGPNLNLLGSREPEIYGSTTLMEIEKKVTSTLRGHEIDCESFQSNSEGEIIDWLHNNSRADFLLLNPGALTHTSVGLRDAVLGVEIPFIEIHLTNVHKREEFRHHSYFSDIAIGALSGLGVQGYLLAAEFAVDYIEQKAKVNSGI

SEQ ID NO: 176645 - protein, 149 aa, Unknown
  Bacterial polypetide isolated from the Sargasso Sea
MNQEIKILIINGPNLNMLGKREPEVYGSRTLEEINNDLNKFSKDININLEFYQSNHEGEILDFMHSKNNDIDGCVINAGALTHSSTALHDAIKSVKFPCVEVHMSNIYSRPEIWRQKSLIAPAVIGTVQGFGETSYKSAIELLALSIRS

SEQ ID NO: 176646 - protein, 104 aa, Unknown
  Bacterial polypetide isolated from the Sargasso Sea
HVLKIEFRQTNHEGELLDWIHAARGRCAGILINPAAWTHTSVAIRDALVASELPIIEVHLSNVHKREPFRHHSFVSPIAVGVICGLGSQGYRLGLQYFAQSLKG

SEQ ID NO: 176647 - protein, 144 aa, Unknown
  Bacterial polypetide isolated from the Sargasso Sea
MNHKVLLINGPNLNLLGRREPSVYGHQTLADIVAILSEQAQAAGVELEHIQSNAEFELINAIHATDAQMIIINPAAFTHTSVALRDALLGVDIPFFEVHLSNVHAREPFRHHSYLSDKAIGVICGFGAQGYEFALAAAIKRLKA

SEQ ID NO: 176648 - protein, 143 aa, Unknown
  Bacterial polypetide isolated from the Sargasso Sea
MKILVLNGPNLNLLGIREEDIYGSETLEEIELKLKKIVEESECELNFFQSNAEHELIEAIHDAYKSNTNKIIFNPAGYTHTSVALRDALLAVKIPFFEVHISDIESREDFRQKSYFSDIAKKVFSGHGTDGYTLALKEAIKDK

SEQ ID NO: 176649 - protein, 179 aa, Unknown
  Bacterial polypetide isolated from the Sargasso Sea
MRAHCATRCRAAACAVARFMPYFAGVPVMSFASVLVLNGPNLNLLGTREPTIYGSETLDDVARLCRDAGERLDLSIDFCQSNAEHQLIDWLHAARTKVDGIVINPAAYTHTSVAIADALSAIEKPVIEVHISNVHRREAFRHHSYVSALAEAIIVGCGTQGYVLALERMAVILKNRAAK

SEQ ID NO: 176650 - protein, 143 aa, Unknown
  Bacterial polypetide isolated from the Sargasso Sea
MKILVLNGPNLNLLGIREENIYGSESLQDVEHKLKEIADEVNAQISFYQSNAEHDLINAIHDAYESGVELIIFNPAAYTHTSVALRDALLAVSIPFYEVHISDIETREEFRQKSYFSDIAIKVFSGHGTNGYSLALKEALKKS

SEQ ID NO: 176651 - protein, 151 aa, Unknown
  Bacterial polypetide isolated from the Sargasso Sea
MSKHKVLVLNGPNLNLLGTREPHIYGAETLADVEQRCRTAGEALGLEIEFRQSNAEHQLIDWLHAARHDTHGIVINPAAYTHTSVALADALSAIAKPVIEVHISNVHRREAFRHHSYVSALAEAVICGCGTEGYVFALQRLATLFAQGAAR

SEQ ID NO: 176652 - protein, 156 aa, Unknown
  Bacterial polypetide isolated from the Sargasso Sea
MLQSQFAQTPRLALADTVIDLKARKNLSWQDLTDGTGLSLAFVTAALLGQHPLPKEAADIVCGKLGLDEDASRLLQSVPLRGSFPSGVPTDPTMYRFYEMLQVYGSTLKALVHEQFGDGIISAINFKLDIKKVEDPDGGSRAVITLDGKYLPTKPF

SEQ ID NO: 176653 - protein, 180 aa, Unknown
  Bacterial polypetide isolated from the Sargasso Sea
MDNSTIYKIIAREILDSRGNPTIEVDVTLSDGSLGRAAVPSGASTGEHEAVELRDNDTLRYLGKGVKKAVKIVNTTIANEIIGLDALNQKNIDEAMISLDGTSNKSKLGANSILGVSIAVAKSASNSKKMPFYEYINQNKTYTMPIPMMNIINGGSHADNNVDFQEFMVFPIGARSFSNA

SEQ ID NO: 176654 - protein, 237 aa, Unknown
  Bacterial polypetide isolated from the Sargasso Sea
KSLLIKKGLSTAVGDEGGFAPNLSSSEEAGDLLLEAIQKAGFKPGEQVSLALDAASTEFYSDGIYKYEGKSLNSSEMISYLSKLVTNYPIVSIEDGLAEDDWEGWSELNRELGNKVQLVGDDLFVTNTERLRKGIMEKSANSILIKVNQIGTLTETLEAIELAKMSGFTSVISHRSGETEDTTIADLSVATRSGQIKTGSLSRSERIAKYNRLLKIEEELGNQARFAGALGLGPKNI

SEQ ID NO: 176655 - protein, 231 aa, Unknown
  Bacterial polypetide isolated from the Sargasso Sea
MSKIKKIKGRQIFDSRGNPTIEVDITLEDGSFGRASVPSGASTGAYEAYELRDGEQTLSGKTVLKAVEGINTEICNVLCGMEASAQEEIDNKMIELDSTNNKSRLGANAILGVSLASSRAQANSEGKHLFEYLNSSDSYILPVPMMNLINGGAHSNNSLFIQEFMIMPVSAETFNHAIITGSEIFHSLKNLLENDGFSTNVGDEGGVAPDLKTSEDALSYLCKAIEKAGYR

SEQ ID NO: 176656 - protein, 146 aa, Unknown
  Bacterial polypetide isolated from the Sargasso Sea
MIKKYKIKSIEDPFAENDWSAWNKLMKSISKVQIVGDDLYVTNLERLKKGFLNISSNAILIKLNQIGTVTETIEVIKFAQIIGFKTIISHRSGDSEDTFIADLAVGTNSNQIKTGSLARSERVAKYNQLIRIEEELGKKARMNKIH

SEQ ID NO: 176657 - protein, 230 aa, Unknown
  Bacterial polypetide isolated from the Sargasso Sea
MAKINKIKSRQVFDSRGIPTIETEIYLSNGIKNSAIVPSGASTGSHEAFELRDVENKKYLGKSVSIAVEKINNEISKNLTGFSINDQEKIDKTLIELDGTKQKKRLGANAILSVSLASSKASASSKNISLFKNLGNGTILPLPLMNIINGGSHANNSLRIQEFMIRPDKAKSFKEALNICFLVIQNLKTILKKNDYSTNLGDEGGFAPSLSNNEEAIEFILTSIEKSGYK

SEQ ID NO: 176658 - protein, 282 aa, Unknown
  Bacterial polypetide isolated from the Sargasso Sea
MPTPMLNIINGGAHANNNLSFQEFMIIPVNCKTFTESIKKASEVFHTLKQILEKKNISTAVGDEGGFAPNLKNEDQACGLIKEAITKTGYKLGKDFFLSLDVAASEFYVNKKYKIISEEKSYSSSQFSDYLIKLCKKYSIISLEDPFAEDDWKAWQNFNHDYGTEIQIVGDDIFTTNINLISKGIKMKAANAVLIKVNQIGTLTETMKAIELAQMNGLEIVISHRSGETENTFIADLSVATNSGQIKTGSMSRSDRISKFNQLLRIEEYFDSKKSLKINKFY

SEQ ID NO: 176659 - protein, 156 aa, Unknown
  Bacterial polypetide isolated from the Sargasso Sea
LKKPFSVENYLELIKKYPIKSIEDPFKEDDWPSWKKLSTNSQIQIVGDDLFATNKTRLKKGIEEKSANAILIKPNQIGTVSETLEVIDLAHNNGFKTIISHRSGDSEDTFIADLAVATNSSQIKSGSLARSERVAKYNRLLRIEEELGNSAKMAKI

SEQ ID NO: 176660 - protein, 104 aa, Unknown
  Bacterial polypetide isolated from the Sargasso Sea
MEKIKNIHAREILDSRGNPTVECDVELFDGSFGRAAVPSGASTGIHEALELRDGDKNRYFGKGVKNAVQNINELIKKDVINRIFDSYKAFDKNLLFLDGTENKS

SEQ ID NO: 176661 - protein, 129 aa, Unknown
  Bacterial polypetide isolated from the Sargasso Sea
HNLQIVGDDLYVTSSEKLKNGIVRKAGNAILIKLNQVGTFTETLNAINIAKESNFNTIISHRSGETEDTFISDLSVGINSGQIKTGSVSRSDRVAKYNRLLRIEEEIGDKSEYLGKKILKKINNGEIID

SEQ ID NO: 176662 - protein, 277 aa, Unknown
  Bacterial polypetide isolated from the Sargasso Sea
KLPLFKYLEVSQAKQIPLPLMNIINGGTHANNSLEIQEFMIRPDSAKSFKQCMQMSFLIIQNLKKELEKMKISTSVGDEGGFAPSLKSDDEAIELIIKSIKSNGFEPGKDISICLDVAANELKKPKSIDYYLKLIKKYPIKSIEDPFSEDDWESHKKLTEKSNIQIVGDDLFVTNKTRLNKGIKNKSANAILIKPNQIGTVSETLKTISLAHKNGFKTIISHRSGDSEDTFIADLAVATNSSQIKTGSLARSERVSKYNRLIRIEEELGNSSKMAKI

SEQ ID NO: 176663 - protein, 294 aa, Unknown
  Bacterial polypetide isolated from the Sargasso Sea
NSILAVSLATARASANALDIPLYRYLGDPLSNLLPVPLMNVINGGAHAPNSLDFQEFMLVPHGVNNFSESLRMGTEIFHSLKSLLDQKGLSTAVGDEGGFAPNLSSSEEAGDLLLEAIQKAGFKPGEQVSLALDAASTEFYSDGIYKYEGKSLNSSEMISYLSRLVSNYPIVSIEDGLAEDDWEGWSELNKELGNKVQLVGDDLFVTNTERLRKGIIEKSANSILIKVNQIGTLTETLEAIELAKMSGFTSVISHRSGETEDTTIADLSVATRSGQIKTGSLSRSERIAKYNRL

SEQ ID NO: 176664 - protein, 165 aa, Unknown
  Bacterial polypetide isolated from the Sargasso Sea
IHSKKYISVNNSINKYLNLIKKYQIKSIEDPFGEDDWKAWTKFLNKSKNKTQIVGDDLFVTNLERLKVGFLNLSANSILIKLNQIGTVTETLEVIKFAQLIGFKTIISHRSGDTEDTFIADLTVGTNSNQIKTGSLARSERIAKYNQLIRIEEDLGRSAKMNKID

SEQ ID NO: 176665 - protein, 299 aa, Unknown
  Bacterial polypetide isolated from the Sargasso Sea
STGTYEAYEKRDIKNKRYLGKSVLSAVNLINTKISKKLKGNSIHNQERIDTLMINLDGTKHKSNLGANTILAVSMAVKKLSAKLKKIPLYKSFLIKKNFKLPYPLMNIINGGAHANNGLRIQEFMIRPDKANSFSDAIRICFLVIKNLSIILKNKGLSTSVGDEGGFAPMISNNNQALDLIVLAIKKSGFVNGRDVSICLDIAANELFKENKYSIHSKSFISVKKSILEYKKMIKKYKIKSIEDPFAENDWYAWNKLMRSIDKVQIVGDDLYVTNLERLKKGFLNISSNAILIKLNQME

SEQ ID NO: 176666 - protein, 302 aa, Unknown
  Bacterial polypetide isolated from the Sargasso Sea
MPKITNIKARQIIDSRGNPTVECDIEFENSIFGRAAVPSGASTGVHEALELRDNDKSKYKGKGVLKAIGNINETISNELVGKSFEDISSFDDFLLELDGTENKSNLGANATLAASLAFAKCLASSEGHELYSFLGKENTMNLPVPMMNIINGGSHADNDVDIQEFMVAPIGANNFSEALQHGCEIFHSLKSLLKSKGLNTNVGDEGGFAPNINSSSEVIETVLKSVEDAGFKPGKDIYLSLDVASTEFYKNNKYDLQGEKIVLSSDEMIKYLEKLVNAYPIYSIEDGMSEDDWDGWSNLTST

SEQ ID NO: 176667 - protein, 285 aa, Unknown
  Bacterial polypetide isolated from the Sargasso Sea
MYKTFFLKNNFQLPYPLMNIINGGAHANNGLRIQEFMIRPDRAKSFSEAMRICFVVIKNLSDLIKNKGYSTSVGDEGGFAPMISSNNQALDLIISAIKKSGFVNGKDVSICLDVAANELFKKNKYSIHSKSFISVEKSIKEYQKIIKKYKIKSIEDPFAENDWLAWNKLMRSIKNVQIVGDDLYVTNLERLKKGFLNISSNSILIKLNQIGTVSETLDVIKFAQTIGYKTIISHRSGDSEDTFIADLAVGTNSNQIKTGSLARSERVAKYNQLIRIEEELEIRQE

SEQ ID NO: 176668 - protein, 273 aa, Unknown
  Bacterial polypetide isolated from the Sargasso Sea
GEHADNNVDIQEFMVQPVGASSFAEALRMGAEIFHHLKAVLKARGLNTAVGDEGGFAPNLASNEDALAAIAEAVANAGYKLGDDVTLALDCASSEFYKDGQYDLAGEGKVFSGEGFADYLAGLTERYPIISIEDGMDESDWASWKVLTDKIGAKVQLVGDDLFVTNTKILKRGIDEKIGNSILIKFNQIGSLTETLEAIQMAKAAGFTAVISHRSGETEDSTIADLAVGTAAGQIKTGSLCRSDRVSKYNQLLRIEEQLGAKAPYKGRAEFRG

SEQ ID NO: 176669 - protein, 171 aa, Unknown
  Bacterial polypetide isolated from the Sargasso Sea
MAKIINVIGREIMDSRGNPTVEAEVHLEGGFIGMAAAPSGASTGSREALELRDGDKSRYLGKGVLTAVANVNGLIRAALIGKDATAQAELDQIMIDLDGTENKDKLGANAILAVSLAAAKAAAAFKGMPLYAHIAELNGTPGQYAMPVPMMNILNGGEHPDNNVDIQEFMV

SEQ ID NO: 176670 - protein, 217 aa, Unknown
  Bacterial polypetide isolated from the Sargasso Sea
MSKIKRVVARQVYDSRGNPTIEAEVFSNNISASSICPSGASTGTYEAYEKRDKNNKKYLGKSVLKPVETVNKLISKKLKNQNIHDQEKIDSILIKLDGTKQKTRLGANTLLAVSMAVKKLSAKLKKIPLYKNFIIKKNFKLPFPLMNIINGGAHADNGLRIQEFMIRPDKAKSFSEAVRMCFLVNNNLKSLLKNNGHSINVGDEGGFAPMISNNESA

SEQ ID NO: 176671 - protein, 287 aa, Unknown
  Bacterial polypetide isolated from the Sargasso Sea
INQTFGSNTFVSTSMAFAHACANLQNEPLWKYLSIKDELQLPLPEIQIFGGGAHASKAIDIQDFMIIPIGAKNYLESLEMTSLVYHAAGKILDGKGLRTGIADEGGYWPNFKSNEEGFELLLQSIELAGFRPYDDIGISVDIAASEFYENKKYNLKKDNQNLNSEEYFEIIKNWIQKYPIVSIEDPFDESDKSSFSRLHQMFGKKIQIVGDDLLVTNANFIYEAKKLNLCNAVLIKPNQIGTISETYKAVKAAKESNIDQIISARSGETEDTTIMHIAVAWGIDQIK

SEQ ID NO: 176672 - protein, 265 aa, Unknown
  Bacterial polypetide isolated from the Sargasso Sea
MEALELRDNNADNYDGKSVLNAISNINLEISSKIDPNYEFTQESFDHFLIDLDGTPNKERLGANAILAASIAFAKATALSRNIPLYQSLTDESSYMLPIPMMNIINGGCHANNRLDFQEFMILPIGFDLISSSIKAGAEIFHSLRKSLDKLKMSTAVGDEGGFAPDLDGNREALELILESISKAGYKPGEDIFLALDVASSEFYHNGHYELASENLSLTSSEFIKYLTDLRADYPIISIEDGIAEDDWDGWFDLTKELGMNTQLV

SEQ ID NO: 176673 - protein, 201 aa, Unknown
  Bacterial polypetide isolated from the Sargasso Sea
AVISTGLKMNEDIMLSLDVAATEFYIDHKYNLNGENKIFNSDQMIDYLKKLSSDYPIYSIEDGLSENDWEGWKNLTNEIGKKIQLVGDDLFVTNINRLQEGIDKGSANSILVKLNQIGTLTETLNAINLAKKNNYTSIISHRSGETEDTTISDLSVATSVGQIKTGSLSRTDRTAKYNQLLRIEEILEDKCSYAGRNILIN

SEQ ID NO: 176674 - protein, 279 aa, Unknown
  Bacterial polypetide isolated from the Sargasso Sea
MSKIKKIKGRQIFDSRGNPTIEVDITLEDGSFGRASVPSGASTGAYEAYELRDGEPTLSGKTVLKAVEGINTEISNVLCGMEASAQEEIDNKMIELDSTNNKSRLGANAILGVSLASSRAQANSEGKHLFEYLNSSDSYILPVPMMNLINGGAHSNNSLFIQEFMIMPVSAETFNHAIITGSEIFHSLKSLLENDGFSTNVGDEGGVAPDLKTSEDALSYLCKAIEKAGYRLEEDIVFALDIAASELYNDGQYFLSNDNASSSDDLIDMWEDLTKKYPI

SEQ ID NO: 176675 - protein, 299 aa, Unknown
  Bacterial polypetide isolated from the Sargasso Sea
SAKIKKIPLYKSFIVRKHFKLPYPLMNIINGGAHANNGLRIQEFMIRPDKAKNFADGVRMCFLVINSLRSLIKKMGHSTSVGDEGGFAPMISDNESALKLIVQAIHKAGFANGKDVSICLDVAANELIKKDKYSIHSKKYVSVDKSIQKYLNLIKKYKIKSIEDPFGENDWSAWTKFVSKTKNKVQVVGDDLFVTNLERLKVGFLNLSANSILIKLNQIGTVTETLEVIKFAKLIGYKTIISHRSGDSEDTFIADLAVGTDSNQIKTGSLARSERVSKYNQLIRIEEQLGKSSKMNKVN

SEQ ID NO: 176676 - protein, 77 aa, Unknown
  Bacterial polypetide isolated from the Sargasso Sea
QIGTISETLETISIALNNDYQNIISHRSGETEDSSISDLAVGTGAGQIKTGAPCRSERVAKYNRLYWIDKKNSFSYG

SEQ ID NO: 176677 - protein, 295 aa, Unknown
  Bacterial polypetide isolated from the Sargasso Sea
MKDRIISIEAMEILDSRGNPTIRTRVSLENGVFGTASVPSGASTGENEALELRDDDKSRYGGKGVLKAVENVNREIAPELLGMTPDRQAEIDRMMLKLDGTSAKSKLGANAILSVSMATAATAAKSHNVPLYAYLGGVSGFRLPVPMMNIINGGEHADNSVDLQEFMVIPSGAPSFREALRYGAETFHALKKILQSKGYATSVGDEGGFAPNLKSNEEACEVIIEAIQAAGYEAGKDIFLALDAAASSFCNQGSYVFQKSGSGTKNSTEMLGFYGSMVEKYPIVSIEDPMDEHDW

SEQ ID NO: 176678 - protein, 94 aa, Unknown
  Bacterial polypetide isolated from the Sargasso Sea
LNVSANSILIKLNQIGTVTETLEVIKFAQLIGYKTIISHRSGESEDTFIADLAVGTNSNQIKTGSLARSERVAKYNQLIRIEEKLGKYSKMNKI

SEQ ID NO: 176679 - protein, 122 aa, Unknown
  Bacterial polypetide isolated from the Sargasso Sea
QLVGDDLFVTNTKRLQQGIDNSTANSILIKVNQIGSLTETLQAIDLAGRSGYTSVISHRSGETEDTTIADLSVATRAGQIKTGSLSRSERVAKYNQLLRIEDELGSQAVYAGAVGQGPRGNA

SEQ ID NO: 176680 - protein, 221 aa, Unknown
  Bacterial polypetide isolated from the Sargasso Sea
STSVGDEGGFAPMISSNNQALDLVVTAIKKSGFINGRDVSICLDVAANELFNKNKYSIHSKYYISVEQSIKEYQKIIKKYKIKSIEDPFAENDWLAWNKLMRSINKVQIVGDDLYVTNLERLKKGFLNISSNSILIKLNQIGTVSETLDVIKFAQTIGYKTIISHRSGDSEDTFIADLAVGTNSNQIKTGSLARSERVAKYNQLIRIEEELGKKVRMNKIN

SEQ ID NO: 176681 - protein, 285 aa, Unknown
  Bacterial polypetide isolated from the Sargasso Sea
MSKIKKIKGRQIFDSRGNPTIEVDITLEDGSFGRASVPSGASTGAYEAYELRDGEKTLSGKTVLKAVEGINTEISNVLCGMEASAQEEIDNKMIELDSTNNKSRLGANAILGVSLASSRAQANSEGKHLYEYLNSSDSYILPVPMMNLINGGAHSNNSLFIQEFMIMPVSAETFNHAIITGSEIFHSLKSLLENDGFSTNVGDEGGVAPDLKTSEDALSYLCKAIEKAGYRLGEDIVFALDIAASELYNDGQYFLSNDNASSSDDLIDMWEELTKKYPIFSIEDP

SEQ ID NO: 176682 - protein, 127 aa, Unknown
  Bacterial polypetide isolated from the Sargasso Sea
TELVGDKVQLVGDDLFVTNVERLSKGIANNTANSILIKVNQIGTLSETIAAVNMAHNAGYTSVMSHRSGETEDNTIADLAVALNCGQIKTGSASRSDRMAKYNQLLRIEEELADVAYFPGMRAFKQK

SEQ ID NO: 176683 - protein, 274 aa, Unknown
  Bacterial polypetide isolated from the Sargasso Sea
PISFQEFMIVPIGAKSFTNALQIGNEVFHNLKSILKSRGLSTAVGDEGGFAPELKGTEDAINTIIEAVNKAGYEMKKDVMLALDCASSEFYKDGYYDYSIFEKDNLTKLNSNEQVDFLVDLCEKYPIISIEDGMDENDWEGWKLLTEKIGDKVQLVGDDLFVTDIKRLSKGINENIGNSILIKFNQVGSLSETISSINLAAKNNFTSVISHRSGETEDSTIADLCVAFNTGQIKTGSMSRSDRMSKYNQLLRIEEELGDNAKFLGKDAFNVNLS

SEQ ID NO: 176684 - protein, 276 aa, Unknown
  Bacterial polypetide isolated from the Sargasso Sea
EHANNDLDIQEFMIMPVSARNFHEACQMGCEIYHVLKETLQSRGFSTAVGDEGGFAPNLSSTYQTFDLLMSAISKTGLKPGNDIYLSIDCASTEYFNGQHYKLEGDDLSLTAPENTDFLTQLINSYPIISIEDGMSEDDWYGWELLSEKIGNRCHLVGDDLFVTNKERLQKGIDNKVANSILIKPNQIGTLTETINTVKLAKSNGYSTIMSHRSGETEDTTISDLAVGLNCGQIKTGSVSRSDRVSKYNQLIRIEEELGSQSKYYGEKILNSFKYS

SEQ ID NO: 176685 - protein, 31 aa, Unknown
  Bacterial polypetide isolated from the Sargasso Sea
DRVAKYNQLLRIEEALGDAATYKGRSEIKGQ

SEQ ID NO: 176686 - protein, 316 aa, Unknown
  Bacterial polypetide isolated from the Sargasso Sea
LELRDGDLKRYFGKGVKKAVKNINKLIGDNVINKEFDNYRAFDDHILSLDGTENKSTIGANATLAASLAFAKSLSNQASQDFFSYIAESNEFILPVPMMNIINGGVHADNDVDIQEFMIAPAGAPNFSEALRYGVEVFHSLKSILKSKNLNTNVGDEGGFAPNIKSSSEVIEIILSAVDKTGLKINSDIILSLDVASTEFYKNKKYELRGEGKSLSSDEMVNYLENLSINYPIYSIEDGMSEDDWDGWVKLTEKIGDKIQLVGDDLFVTNIKRLKTGIEKKAANAILVKLNQIGTLSETIDTIKLGKDHNYSSIIS

SEQ ID NO: 176687 - protein, 254 aa, Unknown
  Bacterial polypetide isolated from the Sargasso Sea
MEKIKNIHAREILDSRGNPTVECDVELQSGSFGRAAVPSGASTGIHEALELRDDDQNRYLGKGVKKAVHNINKLIKQDVVGKSFDNYKAFDKTILSLDGTENKSNIGANATLAASLAFAKSLADLNSTTFYEHIAENNNFLLPVPMMNIINGGSHADNDVDIQEFMIAPIGATTFSESIRYGCEIFHSLKSILKSKNLNTNVGDEGGFAPNVNSSAEVIEIILTAVEKAGLKINDDILLSLDVASTEFYKNDKY

SEQ ID NO: 176688 - protein, 122 aa, Unknown
  Bacterial polypetide isolated from the Sargasso Sea
MAKIKKIKGRQVFDSRGNPTVEAEVFSQDGHYASAIVPSGASTGTHEAFELRDKNNKDYLGKSVFKAVENINGPITKALKNIDIGNQKKIDKTLIDLDNTEQKKKLGANAILAVSIASCKLA

SEQ ID NO: 176689 - protein, 303 aa, Unknown
  Bacterial polypetide isolated from the Sargasso Sea
EVDVFLEDGNYGRAAVPSGASTGEHEAVELRDNDNNRYNGKGVLKAVANVNEKISKALIGANINDQLNIDETMIDLDGTKNKSRIGANAILGVSLAAIRAASKANNVPLYKYLGNKKDLKMPMPMMNILNGGSHANNTVDIQEFMIFPFGASTFSNALQIGTEIFHKLKYELHQKGLNTAVGDEGGFAPNLNSNEEAIEIILKSIEKAGYKPGEEVFIALDVAASEIFDNGKYNLKSENKAFSSNEMVDYLELLSNKYPIISIEDGLDENDWSGWSNLNESLGKTVQIVGDDLTVTNIEKLQK

SEQ ID NO: 176690 - protein, 285 aa, Unknown
  Bacterial polypetide isolated from the Sargasso Sea
KLKGQSIHNQERIDALLINLDGTRQKTNLGANAMLAVSMAVKKLSAKAKKLPLYKTFSQKNNFQLPYPLMNIINGGAHANNGLRIQEFMIRPDRAKSFSEAMRICFVVIKNLSKLIKDKGLSTSVGDEGGFAPMISSNNQALDLIVSAIKKSGFINGKDVSICLDVAANELFKKNKYSIHSKSYISVDKSIKEYQKIIKKYKIKSIEDPFAENDWFAWNKLMKSIKKVQIVGDDLYVTNLERLKKGFLNISSNSILIKLNQIGTVSETLDVIKFAQTIGYKTNHI

SEQ ID NO: 176691 - protein, 78 aa, Unknown
  Bacterial polypetide isolated from the Sargasso Sea
AVQLAKNVGFGAIISHRSGETEDTIISDFSVAMGMGQIKTGSLSRSDRVAKYNQLIRIEEQLGDKAKYATMDFLGMAR

SEQ ID NO: 176692 - protein, 268 aa, Unknown
  Bacterial polypetide isolated from the Sargasso Sea
DNEVDFQEFMILPIGFKSLTEALSSTHSVITNIKKELKSRSLNTNLGDEGGFAPNLKSHLDVLDLICDSISKAGYKLNDHFKISLDAASSEFYSNGKYNFEGNSYSTDEMISVYENICDKYPIFSIEDALNEEDYEGWVKITSKLGPKIRLVGDDLFVTNIQKLKTGIDDKQANSILIKLNQIGTVTETLEAIKLATENNFASIMSHRSGETEDSFISDLAVASRCPLIKTGSLARSDRVAKYNQLLRISENDKIQGYAGELSEVFKS

SEQ ID NO: 176693 - protein, 137 aa, Unknown
  Bacterial polypetide isolated from the Sargasso Sea
MEKIKNIHAREILDSRGNPTVECDLELQDGSFGRAAVPSGASTGIHEALELRDGDQNRYLGKGVKKAVQNINEMLKKEVVGKNFDNYRVFDKTLLNLDGTENKSNFGANATLAASLAFAKSLANHFSTPFYQHIAEN

SEQ ID NO: 176694 - protein, 243 aa, Unknown
  Bacterial polypetide isolated from the Sargasso Sea
AFEKRDKNNKRYLGKSVLVAINLVNTKISKKLKGHNVHNQERIDSLMINLDGTKQKNKLGANSILAVSIAVKKLSAKLKKIPLYKSFLIKNNFQLPYPLMNIINGGAHANNGLRIQEFMIRPDKAKNFSEAMRICYLVIKNLSKIIKNKNLSTSVGDEGGFAPMISSNNQALDLIVSAIKKSGFVNGKDVSICLDVAANELFKKNKYSIHSKKYLSVNKSIQEYKKLINRYKIKSIEDPFAEN

SEQ ID NO: 176695 - protein, 273 aa, Unknown
  Bacterial polypetide isolated from the Sargasso Sea
MSEIIGMQARQILDSRGNPTLEVDVMLESGAMGRAAVPSGASTGSREAVELRDGNAKVFMGKGVQKAVKNVNSKIAAEIIGIEVTEQVLIDRLMIEMDGSSNKSKLGANATLGVSLAVAQAASSDLDLPLFQYIGGSNAKELPVPMMNVLNGGMHADNNVDIQEFMIVPVGAKSFSAALQMGAEIFHHLKGVLKKGGFNTSVGDEGGFAPDLQSNEQAIEILIKAVKSAGYAIGKDILIALDVAASELYSKNKYTLAAENNAKLSSSQMIDYL

SEQ ID NO: 176696 - protein, 121 aa, Unknown
  Bacterial polypetide isolated from the Sargasso Sea
MKQKTKTQIIGDDLFVTNLERLKIGFLNLSANSILIKLNQIGTVTETLEVIKFAQLIGFKTIISHRSGDTEDTFIADLAVGTNSNQIKTGSLARSERIAKYNQLIRIEEDLGRLAKMNKID

SEQ ID NO: 176697 - protein, 290 aa, Unknown
  Bacterial polypetide isolated from the Sargasso Sea
MDLDGTENKSNIGANATLAASLAFAKSLADHTSTTLYQHIAEDDNFLLPVPMMNIINGGSHADNDVDIQEFMIAPVGASSFSESLRFGCEIFHSLKSILKSKSLNTNVGDEGGFAPNVNSSAEVIEIILSAVEKAGLKINDDILLSLDVASTEFYQNNKYELKGEGQTLSSDEMVSYIENLANNFPIYSIEDGMSEDDWDGWIDLTNRIGNKVQLVGDDLFVTNIKRLKTGIEKNAGNAILVKLNQIGTLSETIDAINLGKRNNFNSIISHRSGETEDTTIADLSVAVSA

SEQ ID NO: 176698 - protein, 108 aa, Unknown
  Bacterial polypetide isolated from the Sargasso Sea
KILKQGIEKGVGNSILIKFNQIGSLSETLDAIKMAQDAGYTAVISHRSGETEDTTIADLAVATCAGQIKTGSLCRSDRVAKYNQLLRIEEALEGKAPYRGLSEIKGQG

SEQ ID NO: 176699 - protein, 273 aa, Unknown
  Bacterial polypetide isolated from the Sargasso Sea
MTLIKSIHARQVFDSRGNPTVEVDTILDNGIMGRAAVPSGASTGEHEAVELRDNKNSYMGKSVFTAVNNVNKIISPEFIGKNPNNYQDLDLALINLDGTDNKSNLGANALLGVSMSIVQAASKLNKLPLYDYLHDGSEYILPVPMMNIINGGSHADNNVDIQEFMIYPNGADSFAQSMQMGSEIFHNLKKILRDKNLNTAVGDEGGFAPDLKSNEEAIEIIINAIDKSNYKIGEDISIALDVAASELYNPETKKYELKSENLELSSYDMIQYY

SEQ ID NO: 176700 - protein, 126 aa, Unknown
  Bacterial polypetide isolated from the Sargasso Sea
MPKIKKVKAREIIDSRGNPTVECDIYLSDEVFGRAAVPSGASTGMHEAIELRDQDQKRYGGKGVLKALSNITENISPKILNKEFKNIENFDEFLISTDGTKNKSKLGANATLALSLAFAKSLAVYE

SEQ ID NO: 176701 - protein, 186 aa, Unknown
  Bacterial polypetide isolated from the Sargasso Sea
DVAASELYENGEYSLMSENKAFSSSEMISYLEALAKKYPIISIEDGLDEDDWDGWGNLTESLGQNVQIVGDDLTVTNITRLQKAIDNKSMNSILIKLNQIGTLTETIQAVELAKKVNYGAVISHRSGETEDTFIADLSVAMGMGQIKTGSISRSDRIAKYNQLLRIEEHLGSKASIASIDILGKNV

SEQ ID NO: 176702 - protein, 69 aa, Unknown
  Bacterial polypetide isolated from the Sargasso Sea
SVISHRSGETEDTTIADLAVATGAGQIKTGSLSRSERIAKYNQLLRIEDELGSQAVYAGTQGRGPRGRR

SEQ ID NO: 176703 - protein, 211 aa, Unknown
  Bacterial polypetide isolated from the Sargasso Sea
MSKITKVIARQVYDSRGNPTIEAEVFANNMKARAICPSGASTGSHEAYEKRDLSNKRYLGKSVLKPVKLINQVISKKLKNQNIHNQEKIDYILIKIDGTKQKKKFGANALLAVSMAVKKLSARIRKIPLYKTFLIKNNFKLPYPLMNVINGGVHANNGLRIQEFMIRPDRAKSITEAMRMCFLVINNLKNLIKKKGESTSVGDEGGFAPND

SEQ ID NO: 176704 - protein, 83 aa, Unknown
  Bacterial polypetide isolated from the Sargasso Sea
SETIQTVKLAKKVGFGAIISHRSGETEDTIISDLSVAMGMGQIKTGSLSRSDRVAKYNQLIRIEEQLGDKAKYATIDFLGKSL

SEQ ID NO: 176705 - protein, 313 aa, Unknown
  Bacterial polypetide isolated from the Sargasso Sea
PTIEAEVFANNMRARAISPSGASTGTYEAYEKRDFSNKRFLGRSVLKPVKLINKIISKKLKNQNIHDQEKIDYILIKLDGTKQKKKFGANSLLAVSMAVKKLSARIKKIPLYKTFLIKKNFKLPYPLMNVINGGAHANNGLRIQEFMIRPDKAKSISESIRMCFLVINNLKNIIKQKGESTAVGDEGGYAPMINNNEDALKLIVKAIQKSGFKNGVDISICLDVAANELYKNKKYSIHSKKFVSTEKTIKTYLKLIKKYKIKSIEDPFSEDDWLSWNKFMKKKPKNIQIVGDDLYVTNLERLKIGFLNKSSNS

SEQ ID NO: 176706 - protein, 137 aa, Unknown
  Bacterial polypetide isolated from the Sargasso Sea
MPKIKKIQAREIIDSRGNPTVECDISFEGSFGRASVPSGASTGIHEALELRDNDKSRYKGKGVIKAVENINKKISKNVLGKDFSDIRSFDDILLKIDGTENKSNLGANATLATSLAFAKCMASHNKKEFYNFLGESN

SEQ ID NO: 176707 - protein, 64 aa, Unknown
  Bacterial polypetide isolated from the Sargasso Sea
IISHRSGETEDTTIADLSVAVSAGQIKTGSLSRTDRTAKYNQLLRIEEKLGKDAKYAGKSILKH

SEQ ID NO: 176708 - protein, 271 aa, Unknown
  Bacterial polypetide isolated from the Sargasso Sea
ANSTLAASLAFAKSIADHSSKTFYSYISTNDNFLLPVPMMNIVNGGSHADNSVDIQEFMIAPIGASSFSEALRFGCEIFHSLRSILKSKSLNTNVGDEGGFAPNINNSAEVIETVLSAVEKTGLKINTDILLSLDVASTEFFTQNNYELKGENKKLSSYEMVDYLENLSKNYPIYSIEDGMSEDDWDGWIELTKRIGNKIQLVGDDLFVTNIKRLKKGIEKKAGNAILVKLNQIGTLSETIDAINLGKENNFCSIISHRSGETEDTTIADL

SEQ ID NO: 176709 - protein, 320 aa, Unknown
  Bacterial polypetide isolated from the Sargasso Sea
DGGEAFHGKGVKKAIDNINGRIKSSLIGENPLDQDHIDQILKDLDGTSDKSSLGANAILSVSIASAKASSKSENLDLHNYFNILLGNKMGKTIDQVIPIPMLNILNGGEHADNNIDIQEFMIIPKGAVNFSQAMQWSSEIYWNLKFILKEKGLSTAVGDEGGFAPNLNTNREALELIASAVDKTALKLGSDICISLDCAASEFYENGIYHLKGEDRELTSLEFAKYLEGLANDFPITSIEDGMDENDLEGWKLLTKQIGGKCQLVGDDLFVTNPDVLKKGISNEIANSVLIKYNQIGTLSETLETISIALNNDYKNIISH

SEQ ID NO: 176710 - protein, 304 aa, Unknown
  Bacterial polypetide isolated from the Sargasso Sea
VIGREILDSRGNPTVEVEVVTEEGAIGRAAVPSGASTGSREALELRDHDPGRYSGKGVTKAVAFVDGEITGAISARKISSQKELDQILLDLDGTENKERLGANSLLAVSLAVAKATAATKAVPFFLYLNELAGGPQMKMPVPMMNIINGGAHADNNIDIQEFMIQPVSARSFSEALRCGAEIFQSLKKILTDCGLSTAVGDEGGFAPNIDSSERALEIIGQAVESAGYSMAEDITLALDCAATEFYKEGKYSLSGEGKLLDSLGMIDYLSDLVSRHQIVSIEDGLDESDWNGWKELTERVGQTV

SEQ ID NO: 176711 - protein, 200 aa, Unknown
  Bacterial polypetide isolated from the Sargasso Sea
DLIVSAIKKSGFRNGIDVSICLDVAANELLKNNKYSIHSKKYISVDKSIKEYKKIIQKYKIKSIEDPFAEDDWKSWSKLMKSVNKVQIVGDDLYVTNLERLKKGFLNISSNSILIKLNQIGTVSETLDVIRFAQTIGYKTIISHRSGDSEDTFIADLAVGTNSNQIKTGSLARSERVAKYNQLIRIEEELGNKARMNKIN

SEQ ID NO: 176712 - protein, 309 aa, Unknown
  Bacterial polypetide isolated from the Sargasso Sea
DKKNKKYLGKSVLSAVSLINKKISKKLKGQNVHDQERIDTLMINLDGTRQKSKLGANAILAVSMAIKKLSAIEKKIPLYKNFFVKNNFKLPYPLMNIINGGAHANNGLRIQEFMIRPDRARSFSEAMRMSFIVIKNLSKLIKQKKLSTSVGDEGGFAPMINNNNQALDLIVHAIKKSGFVNGKDISICLDVAANELYKKNRYSIHSNKYVSVDKSIQQYKKMVEKYKIKSIEDPFAENDWSSWNKLMKSLKRVQIVGDDLYVTNLERLKKGFLNISSNAILIKLNQIGTVSETIEVIKFAQIIGFKTII

SEQ ID NO: 176713 - protein, 284 aa, Unknown
  Bacterial polypetide isolated from the Sargasso Sea
SATAICPSGASTGTYEAFEKRDKNNKRYLGKSVLNAVNLVNTKISNKLKGQSVHNQERIDTLLINLDGTRQKTNLGANAMLAVSMAAKKLSAKVKKLPLYKTFFIKKNFQLPYPLMNIINGGAHANNGLRIQEFMIRPDRAKSFSEAMRICFIVIKNLSKLIKDKGLSTSVGDEGGFAPMISSNNHALDLVVTAIKKSGFINGRDVSICLDVAANELFKKNKYSIHSKSYISVEKSIKEYQKIINKYKIKSIEDPFAENDWLAWNKLMRSINKVQIVGDDLYVT

SEQ ID NO: 176714 - protein, 272 aa, Unknown
  Bacterial polypetide isolated from the Sargasso Sea
DEMMLKLDGTSAKSNLGANAILSVSMAMAATAAKSQNIPLYDYLGGASEFRLPVPMMNIINGGEHADNSVDLQEFMVIPSGAPSFREALRYGAETFHALKKILQSKGYATSVGDEGGFAPNLKSNEEACEIIIEAIQAAGYEAGKDIFLALDAAASSFCNQGSYVFRKSGLGTKNSTEMLGFYGSMVEKYPIVSIEDPMDEHDWDGFSAVTKKLGDKIQIVGDDLFVTNTDFVRKGISKKAANAVLIKLNQIGTVSETLATIQLCQKSGWNY

SEQ ID NO: 176715 - protein, 134 aa, Unknown
  Bacterial polypetide isolated from the Sargasso Sea
MSNQISGLNARMILDSRGNPTVEVDCYVDGILTGRAAVPSGASTGAYEALEMRDGDSSKYLGKGVSQAVENITQRIEEALVGLPVDEQKIIDEVMIELDGTPNKSSLGANAMLGVSLACLHAGAAVHELPLWKY

SEQ ID NO: 176716 - protein, 278 aa, Unknown
  Bacterial polypetide isolated from the Sargasso Sea
FLPYPMMNIINGGAHANNKLRIQEFMIRPDGAKNFSEAVRMCFLVIQCLKKIISNRGMSISVGDEGGFAPMISSNEEALKLIVKSIKKAGFENGKHISICLDVAANELYKNKKYSIHSSQYINVEQTINKYQRLIKKFKIKSIEDPFSENDWLAWSKFNKVAKKLQIVGDDLYVTNLERLKKGFLYESSNSILIKLNQIGTVSETLDVIRFANSIGYNTVISHRSGDSEDTFIADLAVGTNSNQIKTGSLSRSERVAKYNQLIRIEEDLGYNAKMSRL

SEQ ID NO: 176717 - protein, 246 aa, Unknown
  Bacterial polypetide isolated from the Sargasso Sea
SSSKSCSYSKKIPLYRYIGGVSACVLPTPMMNIINGGAHADNDLDFQEFMIMPVLADSFADSVRTGAQIFHALKSLLKKKGHSTNVGDEGGFAPNLRNTKEALDLVLEASEAAGFSAGTEILIALDAASSEFYKSGSYHLIGEGKKFNASEMIEFYKRLCAEYPIISIEDALAEDDWDGFVSLTKELGGKIQIVGDDLFVTNTQRLKKGIEMEAANSILIKFNQIGTLTETLDAISVSQRAGYSTV

SEQ ID NO: 176718 - protein, 290 aa, Unknown
  Bacterial polypetide isolated from the Sargasso Sea
YEAFEKRDFKNKSYLGKSVFNPIKKINNQIAKKLKNLNVHNQERLDHTLIKIDGTKQKKNLGANSILAISMATKKLSAKLKKKPLYKTFLLKNNYKLPYPLMNVINGGAHANNGLRIQEFMIRPDKAKSFAEALNICFLVINNLKKLIKKSGHSTSVGDEGGFAPMISNNEDALKLITKAINTSGFQNGKDVTICLDVAANELFKKGKYSVHSKKYLSSTETINKYLKLIKKYKINSIEDPFGENDWRSWTNLMNKIPKKMQIVGDDLYVTNLERLKIGFLNSSSNSILI

SEQ ID NO: 176719 - protein, 209 aa, Unknown
  Bacterial polypetide isolated from the Sargasso Sea
MNEERVVSEIVDVRAFEVLDSRGNPTVMAEVTLDDDSVGSACAPSGASTGTREALELRDGDASRYLGKGVLTAVGHANGSIRELLVGHDAFDQAGVDQRMIEADGTDNKAQFGANAILAVSLATAKAAALSARKPLYQHIAELSGCTAMSLPVPMMNILNGGEHADNNVDIQEFMIQPVSAGSFAEALRVGAEIFHHLKKVLSGRGLAT

SEQ ID NO: 176720 - protein, 99 aa, Unknown
  Bacterial polypetide isolated from the Sargasso Sea
GIVNSILIKFNQIGSLTETLAAIKMAKDAGYTAVISHRSGETEDATIADLAVGTAAGQIKTGSMSRSDRVAKYNQLIRIEEALGEKAPYNGRKEIKGQA

SEQ ID NO: 176721 - protein, 210 aa, Unknown
  Bacterial polypetide isolated from the Sargasso Sea
EKINISTSVGDEGGFAPSLKSDEEAIEFIIKSIENAGFDPGKDISICLDVAANELKKPKQVNYFVDLIAKYPIKSIEDPFGEDDWKSSSDLNSKTNIQLVGDDLFATNIKRLKKGISEKSANAILIKPNQIGTVTETLDAIKVAHENKFETVISHRSGDSEDTFIADLAVATKSSQIKTGSLARSERVSKYNRLIRIEEELGNSAKIAKI

SEQ ID NO: 176722 - protein, 262 aa, Unknown
  Bacterial polypetide isolated from the Sargasso Sea
PSGASTGAFEAHELRDEDKNKFLGKSVNMAVENINSKISSKLIGLDTDHQEIIDKTLLDLDGSENKTNLGANATLAVSLANAKCSAVTNNKSLFKNLGKSYSLPIPLMNIINGGAHADNDLNIQEFMIRPDSAKNFMDAIEKCFLVIQNLKKLLQSKKMLTNVGDEGGFAPSINTNEEALELIVQAIEKSKLKAGHDVVICLDVAANELMNDKGEYSIESKNFTSVDNVIKYYEKLTSNYPIKSIEDPFAEEDWDSWKKITN

SEQ ID NO: 176723 - protein, 274 aa, Unknown
  Bacterial polypetide isolated from the Sargasso Sea
AISIAVKKLSAKIKKKPLFKTFLIKNNYKLPFPMMNIINGGAHANNKLRIQEFMIRPDSASSFSEAMRMCFIVINNLKNLLKKQGHSTNVGDEGGFAPMIQKNEDALKLIIKAIKISGFKNGKNISICLDVAANELYKKKKYSIHSNKFISANNTLSKYSSLLKKYKIKSVEDPFHENDWAAWSKLTNRLGSSIQIVGDDLYVTNLERLKIGFLQNSSNAILIKLNQIGTVTETLEVIKFAQLIGYNTIVSHRSGDSEDTFISDLAVGTNSNQI

SEQ ID NO: 176724 - protein, 268 aa, Unknown
  Bacterial polypetide isolated from the Sargasso Sea
VKIKNIKGRQVFDSRGNPTVEAEIFSDNGSALAIVPSGASTGTHEAYELRDNQNKDYLGKSVFKAISNINGPISKALKNIDVNKQSEIDRILIDLDSTDQKKKLGANAILAVSIASCKLSAIENKVSLFKNIGDTDNYQLPVPMLNIINGGVHAKNNLEIQEFMIRPENTGSFSEAMRRSFLVIQNLKNMIDNTNVGDEGGFSPNLKGTEEAIEIIKKAIVKSGFKPAQDISICLDVAANELSKPISLDYFTKLINKHSIKSIEDPFP

SEQ ID NO: 176725 - protein, 137 aa, Unknown
  Bacterial polypetide isolated from the Sargasso Sea
EDDWDGWKVLSQALGHKVELVGDDIFVTNVKYIQRGIEEKLANAALIKLNQIGTLSETIQAVQLCQDHDWGAFISHRSGETVDSFIADMTVGLRAGHLKTGAPSRGERIEKYNQLMRIEEELGEAAVFAGKSAFRKQ

SEQ ID NO: 176726 - protein, 131 aa, Unknown
  Bacterial polypetide isolated from the Sargasso Sea
GFAALTARIGDRFQVVGDDLFVTNPVRLSRGIKAGSANAILVKVNQIGTLSETLQAVEMAQKAGFGVVISHRSGETEDNFIADLSVGTNAGQIKTGSLSRSDRLAKYNQLLRIDEELDASGLYAGGNILRD

SEQ ID NO: 176727 - protein, 175 aa, Unknown
  Bacterial polypetide isolated from the Sargasso Sea
KYSLMSEDKAFSSSEMISYLEELVKKYPIISIEDGLDENDWDGWGILTENLGQNVQIVGDDLTVTNITRLQKAIDNKSMNSILIKLNQIGTLSETIQAVELAKKVNYGAVISHRSGETEDTFIADLSVAMGMGQIKTGSISRSDRVAKYNQLLRIEEYLGSQASIASIDVLGKNV

SEQ ID NO: 176728 - protein, 300 aa, Unknown
  Bacterial polypetide isolated from the Sargasso Sea
RYLGKSVLNAVNLVNSKISKKLKGQSIHNQERIDALLINLDGTRQKTNLGANAMLAVSMAVKKLSAKAKNLPLYKTFSQKNNFQLPYPLMNIINGGAHANNGLRIQEFMIRPDRAKSFSEAMRICFVVIKNLSKLIKDKGLSTSVGDEGGFAPMISSNNQALDLIVSAIKKSGFINGKDVSICLDVAANELYKKNKYSIHSKKYISVVKSIKEYQKIIKKYKIKSIEDPFAENDWLAWNKLMKSIKKVQIVGDDLYVTNLERLKKGFLNISSNSILIKLNQIGTVSETLDVIKFAQTIGY

SEQ ID NO: 176729 - protein, 120 aa, Unknown
  Bacterial polypetide isolated from the Sargasso Sea
MSEIESIFAREVMDSRGNPTIEADVVLRDGSKGSASVPSGASTGSREALELRDKDEHRYGGKGVLKAVRNVNTQIREALVGESVLKQASLDQLMLELDGTDNKSNLGANAILSVSLAVCK

SEQ ID NO: 176730 - protein, 250 aa, Unknown
  Bacterial polypetide isolated from the Sargasso Sea
PSGASTGTHEAVELRDGGGDWMGKGVQDAVNNVNGPIRDRIVGMDPSNQSKIDKAMIELDGTPNKGNLGANSILGVSLACLRAASGRQLWKHLSRDGEISIPVPMMNILNGGAHADTNVDVQEFMVIPHGFESFPEALQAGVETYHSLKKLLQDEQLLGGVGDEGGFAPSLPRNEEGLRLVLEAIKGAGYSPGEQISIALDVAAQEFFDGEKYQLDGMALSGSELGRLYSTWIDNYPIVSIEDPFGEDDW

SEQ ID NO: 176731 - protein, 92 aa, Unknown
  Bacterial polypetide isolated from the Sargasso Sea
LKPNQIGSMSETLQALTLARGNDWTTVMSHRSGETEDSTIADLAVGWAAGQIKTGAPARSDRVAKYNRLLQIEHELGDDAMFDGMKVFSDFG

SEQ ID NO: 176732 - protein, 182 aa, Unknown
  Bacterial polypetide isolated from the Sargasso Sea
MKIVHIFAREVLDSRGNPTVEVDVKLQDGALGRAIVPSGASTGEHEAVELRDGDRDRYLGMGVKNAVKNVNTIILKNLKGLDVDDQQSLDNKMIELDGSINKNNLGANAILGVSMAIASACAKSKGVPLYKYLGGEEANLLPIPMMNILNGGSHADNNVDIQEFMIFPIGAKSFSAALQMGT

SEQ ID NO: 176733 - protein, 83 aa, Unknown
  Bacterial polypetide isolated from the Sargasso Sea
TETIQAIEMAEKANLGVIISHRSGETEDTTIADLAVGMGMGQIKTGSISRTDRTCKYNQLLRIEEKLGKTAKIANLSYLGIPR

SEQ ID NO: 176734 - protein, 183 aa, Unknown
  Bacterial polypetide isolated from the Sargasso Sea
AKSLANHHSTTFYEHIAENENFLLPVPMMNIINGGSHADNDVDIQEFMIAPVGASSFSESIRYGCEIFHSLKSILKSKNLNTNVGDEGGFAPNLKSSAEVIEIILSAVEKAGLKINDDILLSLDVASTEFYKNKKYELKGEGKSFSSDEMVSYIQNLANNFPIYSIEDGMSEDDWDGWIELTK

SEQ ID NO: 176735 - protein, 200 aa, Unknown
  Bacterial polypetide isolated from the Sargasso Sea
MKEDFAPNLKNNEEAIQLIIKAIEKSGFKPGEDISICLDVAANELDKEKTIEHYLELVKKYPIKSIEDPFKEDDWESWKKLTKNTNIQIVGDDLFATNIKRLEKGIKDKSANAILVKLNQIGTLSETLDAINLAHKNGFKTIISHRSGDSEDTFIADLAVATNSSQIKTGSLARSERVSKYNRLLRIEEELGNSSKMAKI

SEQ ID NO: 176736 - protein, 173 aa, Unknown
  Bacterial polypetide isolated from the Sargasso Sea
EFYKDGKYDLSGEGKVFDSNGFSDFLKSLTEQYPIVSIEDGLDESDWDGWAYQTKIMGDKIQLVGDDLFVTNTKILTRGIENGIANSILIKFNQIGSLTETLAAIRMAKAAGYTAVISHRSGETEDATIADLAVGTAAGQIKTGSLCRSDRVAKYNQLLRIEEQLGEKAPYRG

SEQ ID NO: 176737 - protein, 243 aa, Unknown
  Bacterial polypetide isolated from the Sargasso Sea
QKFSTRSNRNYLQLGLSTAVGDEGGFAPAINSSDEALDHIAKSIEAAGYKPGEDVVIALDAAASEFCHDGVYQLAGERRALSSDEMNSMWQDLVGRYPIISIEDPLHEDDWDGFTRLTNMIGDRVQIVGDDLFVTNPERLRRGIEDAAGNAILIKVNQIGTLSETLQAIDIAKNNGFGVIISHRSGETEDHFIADLAVATNAGQIKTGSLSRSDRLAKYNQLLRIEEELDRNGRYAGTSILRR

SEQ ID NO: 176738 - protein, 279 aa, Unknown
  Bacterial polypetide isolated from the Sargasso Sea
TITVSFDDIINGGAHATNGLRIQEFMIRPDGAKSFSESLRMCFLVINNLRKIIKKKGLSTSVGDEGGFAPMINSNEEALKLILKSISVSGFINGKDISICLDVAANELYKNKKYSIHSKKLLSTEQTIKKYVQLIKKFKIKSIEDPFSENDWSSWSDFMNKIDSKIQIVGDDLYVTNLERLNKGFLNNSSNSILIKLNQIGTVTETLEVIKFAHLAGFKTIISHRSGDTEDTFISDMAVGTNSNQIKSGSLSRSERVAKYNQLLRIEEELGNKSKMNKL

SEQ ID NO: 176739 - protein, 267 aa, Unknown
  Bacterial polypetide isolated from the Sargasso Sea
LNGGMHADQGSDLQEIMLCPHGAKNFKHSLQMGSEVFHCLKRELKKQGLGTTVGDEGGFAPALKSNDHAIELLLNSIEKAGFNIGNDISLALDVAASSFYKDHKYHLKVDGSVLDTDGMIGFYDDLIQKYPIVSIEDGLDENDWEGWNKMNQALGSKIQIVGDDLTVTNPKKLQRAIEQNSMNSILIKLNQIGTVSETIEAIDLAKSNNMNYIISHRSGETEDTFISDLSVAMGGGQIKTGSVCRSDRTAEYNRLLRIEEQIENSKL

SEQ ID NO: 176740 - protein, 183 aa, Unknown
  Bacterial polypetide isolated from the Sargasso Sea
MSRIKKILAREVIDSRGNPTIEAEVHLESGIKGRAISPSGASTGTREALELRDERADRYNGKGVQQAVDFACEEINDLLTGKDVHDQLEIDTAMIELDGTPDKSRMGANSILAVSLASCKASAEADGIPLFQKINNLSGSPGMIMPTPMMNIINGGEHADNNLDIQEFMIQPVSMNSFKEALR

SEQ ID NO: 176741 - protein, 187 aa, Unknown
  Bacterial polypetide isolated from the Sargasso Sea
MSKIKKIKGRQIFDSRGNPTIEVDITLEDGSFGRASVPSGASTGAYEAYELRDGEQTLSGKTVLKAVEGINTEICNVLCGMEASAQEEIDNKMIELDSTNNKSRLGANAILGVSLASSRAQANSEGKHLYEYLNSSDSYILPVPMMNLINGGAHSNNSLFIQEFMIMPVSAETFNHAIITGSEIFHS

SEQ ID NO: 176742 - protein, 138 aa, Unknown
  Bacterial polypetide isolated from the Sargasso Sea
MGAAISDIFAREILDSRGNPTVEVECYVDGILRGRAAVPSGASTGTHEAVELRDGGSNWMGMGVQNAIQNVNGEIRSALVGKDPSKQETIDLALIQLDGTTNKARLGANATLGASLACLRSATDGALWSYISSGGKVA

SEQ ID NO: 176743 - protein, 121 aa, Unknown
  Bacterial polypetide isolated from the Sargasso Sea
MRSINKVQIVGDDLYVTNLERLKKGFLNISSNSILIKLNQIGTVSETLDVIKFAQTIGYKTIISHRSGDSEDTFIADLAVGTNSNQIKTGSLARSERVAKYNQLIRIEEELGKKVRMNKIN

SEQ ID NO: 176744 - protein, 245 aa, Unknown
  Bacterial polypetide isolated from the Sargasso Sea
MFKNLGKSYSLPIPLMNIINGGAHADNDLNIQEFMIRPDSAKNFMDAIEKCFLVIQNLKRLLQSKKMLTNVGDEGGFAPSINTNEEALELIVQAIEKSKLKAGQDVAICLDVAANELMNDKGEYSIESKNFTSVDNVIKYYEKLTSKYPIKSIEDPFAEEDWNSWNKITNAIGKNVQLVGDDLFVTNTKRLDKGIKEKSANSILVKPNQIGTLTETLEVISMAKKANFNTIISHRSGDTEDTFIA

SEQ ID NO: 176745 - protein, 186 aa, Unknown
  Bacterial polypetide isolated from the Sargasso Sea
MNSIIEKIYAREILDSRGNPTIEVDVITKSGVMGRAAVPSGASTGGHEALELRDGDNSRYLGKGVRNAINNVNTIISVTLKGCDVTQQSENDNLMIALDGTENKSRLGANAILGVSMAIAHTGAKVKNQPLYSYLGKDNNHVLPVPMMNILNGGSHADNLVDIQEFMIMPFGADSFSEALQMGTEI

SEQ ID NO: 176746 - protein, 111 aa, Unknown
  Bacterial polypetide isolated from the Sargasso Sea
MKSQIKNIHSREILDSRGNPTVEVDLVLESDIVGRAAVPSGASTGDFEAMELRDNDKNRYVGKGVLNAVNNVNNEIKDALIGIDINNQENIDNILIELDGTENKSRLGANA

SEQ ID NO: 176747 - protein, 181 aa, Unknown
  Bacterial polypetide isolated from the Sargasso Sea
CLDVAANELINEKGEYSIQSKNYSSVEDNISYYKRLTSSYPIKSIEDPFAEEDWESWKKITNEIGKSVQIVGDDLFVTNVKRLSKGIKEKSANCILVKPNQIGTLTETLEVISMAKAANFNTIISHRSGDTEDTFIADLASATMSSQIKTGSLARSERVAKYNRLLRIEEELGNQAKMARI

SEQ ID NO: 176748 - protein, 221 aa, Unknown
  Bacterial polypetide isolated from the Sargasso Sea
TSVGDEGGFAPMINDNESALKLIVKAINLSGFKNGKDIVICLDVAANELLRNKKYSIHSKNYISVDESIDNYLRLVQKYKIMSIEDPFGENDWSAWTKLLNKTKNKLQIVGDDLFVTNLERLKIGFLNISANSILIKLNQIGTVTETLEVIKFAKLIGYKTIISHRSGDSEDTFIADFAVGTDSNQIKTGSLARSERVSKYNQLLRIEQELGKKSKMHSVN

SEQ ID NO: 176749 - protein, 175 aa, Unknown
  Bacterial polypetide isolated from the Sargasso Sea
MSKISKVIARQVYDSRGNPTIEAEVFANNMKARAICPSGASTGSYEAYERRDVSNKKYLGKSVLKAVKLINTIISKKLKNQNIHNQEKIDYILIKLDGTKQKKKFGANSLLAVSMAIKKLSARIKKIPLYKTFLVKKNFKLPYPLMNVINGGVHANNGLRIQEFMIRPDKSKINY

SEQ ID NO: 176750 - protein, 265 aa, Unknown
  Bacterial polypetide isolated from the Sargasso Sea
MSKIKSVKGRQVFDSRGNPTVEAEIILQDETIGTSIVPSGASTGRYEAHELRDKNNNYLNKSVFDAVKNINNKISKVLENKDSINQSEIDKILINLDGTENKSNLGANSILAVSIANLKAAAKYSKKEIYEYIKTESKPLCIPYPLMNIINGGAHANNSLEIQEFMIRPDGAKNFKECMQMSFMVIQNLKKSLESKKISTSVGDEGGFAPSLGSDEEAIEIILNSITSSGFKPGEDVSICLDVAANELKVPKNVQYFLDLVKKYP

SEQ ID NO: 176751 - protein, 120 aa, Unknown
  Bacterial polypetide isolated from the Sargasso Sea
MEKIKNIHAREILDSRGNPTVECDLELQDGSFGRAAVPSGASTGMHEALELRDGDQNRYLGKGVKQAVQNINNQIKKEVVGKNFDNYKLFDKAVLSLDGTENKSNFGANATLAVSLAFAK

SEQ ID NO: 176752 - protein, 212 aa, Unknown
  Bacterial polypetide isolated from the Sargasso Sea
MHFIKNINSRQIFDSRGNPTVETDVHLPNGIIGRAAVPSGASTGKNEAFELRDKKKSYHGKSVLKAVENVNTLIFDTLSGYDVLDQEIIDNTLIELDGTPNKKKLGANAILSVSLACADAASKYLNMPLFKYLGGIKTFKMPTPMLNIINGGAHANNNLSFQEFMIVPIKCRTFTESIKKASEVFHSLKNILEKNNISTAVGDEGGFAPNLK

SEQ ID NO: 176753 - protein, 117 aa, Unknown
  Bacterial polypetide isolated from the Sargasso Sea
MVAREILDSRGNPTVEVDLTTEGGLNVRAAVPSGASTGIHEACELRDGDKARYLGKGVTKAVEAVNTTLNQELKGMSVLEQAALDKKMCEIDGTPHKSKLGANAILGVSMAACQAAA

SEQ ID NO: 176754 - protein, 207 aa, Unknown
  Bacterial polypetide isolated from the Sargasso Sea
MAKIKKIKGRQVFDSRGNPTVEAEVFSDNGSATAIVPSGASTGTHEAFELRDKENKNYLGKSVFKAVENINGKIAKALNNIDSNDQVKIDKTLIDLDGSDQKKKLGANAILAVSIASCKLTASENKISLYKYLGKSNNFQLPIPLLNVINGGVHANNNLDIQEFMIRPEKNNSFSEAIRKSFLVIQNLKKIIDNTNVGDEGGFAPKY

SEQ ID NO: 176755 - protein, 163 aa, Unknown
  Bacterial polypetide isolated from the Sargasso Sea
MSKITKIVARQVFDSRGNPTIEAEVFTKKVSSKAICPSGASTGSYEAYEKRDTNNKSYLGKSVFKAINLINNKISKKLVNINIHDQERIDYILIKLDGTKQKRKLGANAILSISMAAKKLSAKVKKKPLFTTFLLNKNYKLPYPLMNIINGGAHANNKLRIQE

SEQ ID NO: 176756 - protein, 314 aa, Unknown
  Bacterial polypetide isolated from the Sargasso Sea
KIIKVKARQVFDSRGNPTIEAEVYIKNNSASAICPSGASTGTFEAFEKRDKNNKRYLGKSVLNAVNLVNTKISKKLKGQNIHNQERIDALLINLDGTRQKTNLGANAMLAVSMAVKKMSAKVKKLPLYKTFFLKNNFQLPYPLMNIINGGAHANNGLRIQEFMIRPDRAKSFSEAMRICFLVIKNLSKLIKNKGLSTSVGDEGGFAPMISSNNQALDLIVSAIKKSGFINGKDVSICLDVAANELYKKNKYSIHSKSYISVDKSIKEYQKIIKKYKIKSIEDPFAENDWISWNKLMKSIKKVQIVGDDLYVTNL

SEQ ID NO: 176757 - protein, 261 aa, Unknown
  Bacterial polypetide isolated from the Sargasso Sea
QVFDSRGNPTVEAEVFSENGNSASAIVPSGASTGTHEAFELRDKDNKEYLGKSVLKAVENINVQINKALEKTNINEQKKIDQTLINLDGSEQKKILGANAILAVSIASCKLASTENKVSLYEHIGQSKNYQLPVPLLNIINGGMHAKNDLDIQEFMIRPENTDTFAEAMRRSFLVIQNLKTMVDSTNVGDEGGFAPNLKKNEEAINLIIKAIEKSGFKPGDDISICLDVAANELNTPKTVEYYSELIKKYPIKSIEDPLEK

SEQ ID NO: 176758 - protein, 122 aa, Unknown
  Bacterial polypetide isolated from the Sargasso Sea
LKNFGDKMVLVGDDLFVTNKKILKEGIEKKQANAILVKVNQIGTLTETFQTMDLAYKNNFKAIISHRSGETGDSFIADLAVATGAGHIKTGSASRSDRMEKYNQLLRIEEILGEKAIYRPVK

SEQ ID NO: 176759 - protein, 283 aa, Unknown
  Bacterial polypetide isolated from the Sargasso Sea
ITKVIARQVYDSRGNPTIEAEVFANNMKARAICPSGASTGSHEAYEKRDTSNKKYLGKSVLKPVSLINKIISKKLKNQNIHDQEKIDYLLINLDGTKQKKKFGANALLAVSMAVKKLSARIKKTPLYKTFLIKNQFMLPYPLMNVINGGAHANNGLRIQEFMIRPDKANSIKEAIRMCFLVINNLKILLKQKGESTSVGDEGGFAPMINDNEKALKLIVNAIRKAGFKNGKDISICLDVAANELFKKKKYSIHSKKFINVDKTINGYLKLIKKYKIKSIEDPF

SEQ ID NO: 176760 - protein, 203 aa, Unknown
  Bacterial polypetide isolated from the Sargasso Sea
ELIIQAIQNNGLTEGKDIGIALDCAASEFYNEGIYNLASESNQLNSNEFTNYLKELTQKYPIFSIEDGMDENDFEGWKNLTKALGDKCQLVGDDLFVTNSIELQRGIDDSLANSILIKFNQIGTITETMKTIHLGNMNGFKSIISHRSGETEDSTIADLCVGLGTGQIKTGAPCRSDRVAKYNRLLWIEVEQSDLPFAKNVIS

SEQ ID NO: 176761 - protein, 320 aa, Unknown
  Bacterial polypetide isolated from the Sargasso Sea
MRFKGKGVLSNVKFIETIINDALIGVNSNNQEEIDKILIDLDSTENKSKLGANTLLAVSLANAKSSANNNSNSLYKNINLLDQYIMPVPMMNIINGGSHANNSVDIQEFMIMPVGANSLKEAVRYGVEIFHTLGKILESKKYITTVGDEGGYAPNLSSNKEALDVIMIAIEKAGYKPGEDIMLALDVASSEFYKEEKYFLTSENKQYSSQEFIELIDSWTQIYPIISIEDALDENDWHGWKELTNLLGKKVQLVGDDLFVTNPKIFKEGIDKNIANAILIKLNQIGTLTETVEAIKLAKRNNYNAVVSHRSGETEDTFIA

SEQ ID NO: 176762 - protein, 220 aa, Unknown
  Bacterial polypetide isolated from the Sargasso Sea
FAPDLRSNEEAIDVILESISKAGLSTGKDIMLALDVAASELFENNIYHLYSESKKLESTEMVNYLNDLVKKYPIISIEDGLHEDDWEGWKQLTKSLGQQVQIVGDDLTVTNISRLEHAIDEHSINAILIKLNQIGTVTETIQAIEMARKANLGVIISHRSGETEDTTIADLSVGMGMGQIKTGSISRTDRTCKYNQLLRIEEELGKAAKIANLSYLGIPR

SEQ ID NO: 176763 - protein, 291 aa, Unknown
  Bacterial polypetide isolated from the Sargasso Sea
SGSKLLPIPLMNILNGGSHADNSIDIQEFMICPLDAGSFSNALKIGAEIFHMLKSLLKKKSFITSVGDEGGFAPNLRSNEEAIEIILESIIKSGLKPGQEVSLALDIAASELYEKEYYNLYSEKKKLSTNEMIEYLTNLVKDYPIISIEDGLDENDWNGWAQLTKKLGNKVQIVGDDLTVTNIEKLKKAIDKNCINAILIKLNQIGTLTETMNTVSMAKNAGFGVIISHRSGETEDTTIADLAVAVGMGQIKTGSLSRTDRICKYNQLLRIEEELGVGAKLAEVNVFGNYQ

SEQ ID NO: 176764 - protein, 216 aa, Unknown
  Bacterial polypetide isolated from the Sargasso Sea
MPKITNVKARQIIDSRGNPTVECDIEFENSIFGRAAVPSGASTGVHEALELRDNDKFKYKGKGVLRAVGNINDTIFNELVGKSFEDISSFDDYLLELDGTENKSNLGANATLAASLAFAKCLASSEGHELYSFLGKEHKMSLPVPMMNIINGGSHADNDVDIQEFMVAPIGANNFSEALQYGCEIFHSLKSLLKSKGLNTNVGDEGGFAPNINSSS

SEQ ID NO: 176765 - protein, 235 aa, Unknown
  Bacterial polypetide isolated from the Sargasso Sea
MHFIKNIEARQIFDSRGNPTIETDVYISNGLFGRSSVPSGASTGKSEAFELRDNKKSYHGKSVLRAVENVNTIILDTISGYDVLEQEYIDNTLIELDGTTNKKRLGANAILSVSLACADAASKYLNLPLYKYLGGSKAFRMPTPMLNIINGGAHANNNLSFQEFMIIPINCISFTEAIKKASEVFHTLKNILEKKNISTAVGDEGGFAPNLKNEDHACSLIKEAISKSGYKLGKD

SEQ ID NO: 176766 - protein, 293 aa, Unknown
  Bacterial polypetide isolated from the Sargasso Sea
MGDPLSNLLPVPLMNVINGGAHAPNSLDFQEFMLVPHGVNNFSESLRMGTEIFHSLKSLLDQKGLSTAVGDEGGFAPNLSSSEEAGDLLLEAIQKAGFKPGEQVSLALDAASTEFYSDGIYKYEGKSLNSSEMISYLSRLVSNYPIVSIEDGLAEDDWEGWSELNKELGNKVQLVGDDLFVTNSERLRKGIMEKSANSILIKVNQIGTLTETLEAIELAKMSGLTSVISHRSGETEDTTIADLSVATRSGQIKTGSLSRSERIAKYNRLLKIEEELGNQARFAGALGLGPKNI

SEQ ID NO: 176767 - protein, 156 aa, Unknown
  Bacterial polypetide isolated from the Sargasso Sea
MAKITNVKGRQVFDSRGNPTVEAEVFLDNDISASAISPSGASTGAFEAHELRDQDKNNFLGKSVNKAIDNINNKIRSSLKGLDPADQSKIDKVLLDLDGTENKKNLGANATLAVSLANFKSSALSAKKPLYKKLGKSFSLPNPLMNIINGGAHADN

SEQ ID NO: 176768 - protein, 115 aa, Unknown
  Bacterial polypetide isolated from the Sargasso Sea
MSAIINIQAREILDSRGNPTVEVDVYLEDGSFGRAAVPSGASTGNHEAAEMRDGVANRYGGKGVLKAVQTVNTVIFESLNGSDSFDQVGLDQRLIQLDGTPNKSRLGANAILGVS

SEQ ID NO: 176769 - protein, 160 aa, Unknown
  Bacterial polypetide isolated from the Sargasso Sea
MPKIKKVKAREIIDSRGNPTVECDIYLSDEVFGRASVPSGASTGMHEAIELRDQDKNRYGGKGVLKALSNITEIISPKILNKEFKNIKDFDEFLIATDGTKNKSNLGANATLALSLAFAKSLASYEKKNLFHYLSNSDKYIMPVPMMNIINGGSHADNKV

SEQ ID NO: 176770 - protein, 244 aa, Unknown
  Bacterial polypetide isolated from the Sargasso Sea
MGSEVFHCLKKELEKQGLGTTVGDEGGFAPALKSNDHAIELLLNSIEKAGFNSGNDISLALDVAASSFYKNHKYHLKVDGSILDTDGMIGFYEDLIKKYPIVSIEDGLDENDWEGWANMNKALGSKIQIVGDDLTVTNPKKLEKAIEQSSMNSILIKLNQIGTVSETIEAIEMAKKNNMNYIISHRSGETEDTFISDLSVAMNGGQIKTGSVCRSDRTAKYNRLLRIEEELQNSRLCNSLNFIK

SEQ ID NO: 176771 - protein, 308 aa, Unknown
  Bacterial polypetide isolated from the Sargasso Sea
FSKTKSASAICPSCASTGSYEAFEKRDTKNVRYLGKGVFGSVKIVNTLLSKKLKNLNVHDQEYIDSILLRLDGTKQKTKLGANTILATSMAIKKLSAKLKKIALYKTFLVKKNFKLPYPLMNVINGGAHANNGLQIQEFMIRPDKANSFTEAIRICFIVINNLRKLIQKKNLSTSVGDEGGFAPMIGSNEMALNLILKSIRMSGFKNGSDVSICLDVAANELYKKKKYSVHSKKFISVEKTIHKYLKMIKKYKIKSIEDPFAENDWKSWSKLVYKDKNKTQIVGDDLYVTNLERLKIGFLKHHLIQFL

SEQ ID NO: 176772 - protein, 136 aa, Unknown
  Bacterial polypetide isolated from the Sargasso Sea
VDPFSENDWSSWNKLTKSSKKTQIVGDDLYVTNLERLKMGFLNNSSNSILVKLNQIGTVTETLEVIKFAKIIGFSTIISHRSGDSEDTFIADLAVGTDSNQIKTGSLSRSERVAKYNQLIRIEENLGKKAKMNKIH

SEQ ID NO: 176773 - protein, 171 aa, Unknown
  Bacterial polypetide isolated from the Sargasso Sea
MSEIISVKAIQVLDSRGNPTVEAEVTLKDGTTGLASVPSGASTGSREAVELRDGDKDIYLGKGVSAAVKNINSEIQSALKNQDIYDQKKIDQIMIDLDGTENKSRLGANAILAVSLACIKAAAASKGMRLFKHLSPGPYSFPVPMMNIINGGEHANNNIDIQEVYDSACKF

SEQ ID NO: 176774 - protein, 268 aa, Unknown
  Bacterial polypetide isolated from the Sargasso Sea
LNGGAHADNPIDFQEFMIQPIGFDSFQETLRAGVEIFHTLKNILKSKGLSTSVGDEGGFAPNLESPEEALDLIMVAVEKAGYKPGDQVSLCLDIAATEFYSNSIYNLEGMGQTLNSSEMTEYIKELCKNYPISSVEDGLDEDDWTGWSDMTKSLGSKIQLVGDDLFVTNTKRIKQGIEEGSANSVLVKVNQIGTLMETFEAIETAVQNNYTTVISHRSGETEDTFIADLAVGVASGQIKTGAPSRSDRVAKYNRLLMIEAESGICIAQ

SEQ ID NO: 176775 - protein, 177 aa, Unknown
  Bacterial polypetide isolated from the Sargasso Sea
MSKIKKIKGRQIFDSRGNPTIEVDITLEDGSFGRASVPSGASTGAYEAYELRDGEKTLSGKTVLKAVEGINTEISNVLCGMEASAQEKIDNKMIELDSTNNKSRLGANAILGVSLASSRAQANSEGKHLYEYLNSSDSYILPVPMMNLINGGAHSNNSLFIQEFMIMPVSAETFNHA

SEQ ID NO: 176776 - protein, 70 aa, Unknown
  Bacterial polypetide isolated from the Sargasso Sea
AHSNNIETIISHRSGETEDTFIADLAVATNSGQIKTGSISRSDRVSKYNQLIRIEEMLNSKKTIKNNRFY

SEQ ID NO: 176777 - protein, 247 aa, Unknown
  Bacterial polypetide isolated from the Sargasso Sea
VFQCLKSLLSKRNMSTTVGDEGGFAPNLEGNKAALDLILHSIEHAGFKPGRQVGLALDCASTEFYKNKKYVLAAEKKEFSPVAFSAYLKELVNQYPIISIEDGMAEDDFVGWKLLTDELGSQIQLVGDDLFVTNTKMLDKGIQMGIANAILIKINQIGTLTETYAAIEMAKRAGYGTVISHRSGETEDNFIADLAVASNALQIKAGSLSRTDRLAKYNQLIRIEEELGDCSSFAGGQAFNLNGYNEE

SEQ ID NO: 176778 - protein, 272 aa, Unknown
  Bacterial polypetide isolated from the Sargasso Sea
FKKRSFQVAVKNINTELQKLIGSDVNDQNELDNQMIDIDGTNNKSNIGANSILAVSIASCKAGALNNKLNLFEYIDKKNNEYSLPYPMLNIINGGAHANNTLKIQEFMIRPDGAKNFTECLQISFLIIQKLKELLVKKNLSSSVGDEGGFAPSLDTDESAIELILSAIHNAGFKAGEDVIICLDVASNELYEKNKYKILDDKLLSCDEMIDFYYDITKKYPILSIEDPIFEDDWDTWSKLNKKLGNKIQIVGDDLFVTNINRLKKGVEKKSA

SEQ ID NO: 176779 - protein, 201 aa, Unknown
  Bacterial polypetide isolated from the Sargasso Sea
MTKITNVKGRQVFDSRGNPTVEAEVILQDGSFGSSIVPSGASTGRYEAHELRDKNKDYLNKSVFNAVKNINNKISKALINQNSINQREIDKILINLDGTENKSNIGANAILAVSIANLKAAAKFSKKEIYKYISFGTNKSVFFTPYPLMNIINGGAHANNSLEIQEFMIRPDGAKSFKECMQMSFLVIQNLKKKLEDKKIS

SEQ ID NO: 176780 - protein, 206 aa, Unknown
  Bacterial polypetide isolated from the Sargasso Sea
DNTNVGDEGGFAPNLKSTEEAIKLICKAIEKSGFKPGDDISICLDVAANELKKPITLNDYSELIKKYPIKSIEDPFKEDEWDSWKKLTNDTNIQIVGDDLFATNHKRLKKGIEEKSANAVLVKLNQIGTVTETLDVIELAHKNGLKTIISHRSGDSEDTFIADLAVATKSSQIKSGSLARSERVAKYNRLLRIEEELGNSSKMAKI

SEQ ID NO: 176781 - protein, 252 aa, Unknown
  Bacterial polypetide isolated from the Sargasso Sea
KTILGANSMLAVSMAVKKLSAKVKKLPLYKTFFIKKNFQLPYPLMNIINGGAHANNGLRIQEFMIRPDRAKSFSEAMRICFIVIKNLSKLIKNKGLSTSVGDEGGFAPMISSNNQALDLIVSAIKKSGFINGRDVSICLDVAANELFKKNKYSIHSKTYISVEKSIKEYQKIIKKYKIKSIEDPFAENDWLAWNKLMRSINKVQIVGDDLYVTNLERLKKGFLNISSNSILIKLNQIGTVSETLDVIKFAQT

SEQ ID NO: 176782 - protein, 172 aa, Unknown
  Bacterial polypetide isolated from the Sargasso Sea
MAKIKSIKGRQVFDSRGNPTVEAEVLLENDISATAISPSGASTGAFEAHELRDQIQDKFLGKSVNIAVENINKKISSKLKGLDADDQKNIDKVLLEIDGSENKKNLGANAILAVSLANSKCSAISNKKSLFKNLGSSFSIPIPLMNIINGGAHADNDLNIQEFMIRPDSAKN

SEQ ID NO: 176783 - protein, 84 aa, Unknown
  Bacterial polypetide isolated from the Sargasso Sea
LNQIGTVSETIDVIKFAQTIGFKTIISHRSGDSEDTFIADLAVGTNSNQIKTGSLSRSERVAKYNQLIRIEEELGKKARMNKIR

SEQ ID NO: 176784 - protein, 210 aa, Unknown
  Bacterial polypetide isolated from the Sargasso Sea
MNSSIEKIFAREILDSRGNPTVEVDVMTSDGLMGRAAVPSGASTGIHEALELRDGDKNRYLGKGVRTAVNNINNIIAPSLKGCKATEQSENDSQLLALDGTENKSNLGANAILGVSMAIAHAGAKIEKKSLYRYLGKNNAHILPMPMMNILNGGSHADNLVDIQEFMIMPFGAKRFSEALQMGTEVFHHLKSVLKSKSLSTAVGDEGGFA

SEQ ID NO: 176785 - protein, 282 aa, Unknown
  Bacterial polypetide isolated from the Sargasso Sea
PVPMMNIINGGEHADNPIDFQEFMIMPVDSSSCADGIRMGSEIFQTLKKGLQDAGHNTNVGDEGGFAPNIGSTIEALDFIMNAIERAGYKPGSEVMLALDAASTEFYKDGQYVLTGEDKILDAAGMVDYYADLISRYPILSIEDGLAEDDWDGWKALTDAIGDRVQLVGDDLFVTNPKRLADGIKKGAGNSILVKVNQIGTLSETLEAIEMAHKANYTAVISHRSGETEDTTISDIAVATNAGQIKTGSLSRSDRLAKYNQLIRIEELLGPAAAYAGQTVVP

SEQ ID NO: 176786 - protein, 109 aa, Unknown
  Bacterial polypetide isolated from the Sargasso Sea
MGKITSIHSIQILDSRGNPTVEATVELENGAIGRASVPSGASTGSREAMELRDGDQDKYLGKGVQKAVKNINTEIQSTLLGQSIEDQKRIDQLMIELDGTENKSRLGAN

SEQ ID NO: 176787 - protein, 258 aa, Unknown
  Bacterial polypetide isolated from the Sargasso Sea
ANSYKVPLFKYLGGAKQFKMPTPMLNVINGGAHANNSLRFQEFMIIPIGIATFNEAILRSSEVFHSLKSILDINKFSTAVGDEGGFAPNLKSEDEALKLICDAVIKSGYKLEKDFLLAIDVGASEFYKNRKYDMPTSKKKLTSKEFSKLLNKLCNKYPIISLEDPFDENDWDSWTNYTKNKGDKLQIVGDDLYTTNVSRLKTGIEKSASNAILIKLNQIGTLTETLEAIEMAQSNNIETIISHRSGETEDTFISDLAV

SEQ ID NO: 176788 - protein, 156 aa, Unknown
  Bacterial polypetide isolated from the Sargasso Sea
EKSIKKYLQLIKKYKIKSIEDPFGENDWKAWSKFVKATNGNIQIVGDDLFVTNLERLKIGFLNLSGNSILVKLNQIGTVTETLEVIKFAQLIGFKTIISHRSGDTEDTFIADLAVGTNSNQIKTGSLARSERIAKYNQLIRIEEGLGKSAKMNKID

SEQ ID NO: 176789 - protein, 59 aa, Unknown
  Bacterial polypetide isolated from the Sargasso Sea
IISHRSGDSEDTFIADLASATMSSQIKTGSLARSERVAKYNRLLRIDEELGNQAKMASI

SEQ ID NO: 176790 - protein, 34 aa, Unknown
  Bacterial polypetide isolated from the Sargasso Sea
KTGSLARSERVAKYNQLLRIEEELGKKARMNKIH

SEQ ID NO: 176791 - protein, 67 aa, Unknown
  Bacterial polypetide isolated from the Sargasso Sea
AIISHRSGETEDTIISDFSIAMGMGQIKTGSLSRSDRVAKYNQLIRIEEQLGEKAKYATIDFLGTAR

SEQ ID NO: 176792 - protein, 283 aa, Unknown
  Bacterial polypetide isolated from the Sargasso Sea
VVGRAAVPSGASTGVHEAVELRDGDPKRYLGKGVSKAVVNTNSRLAKAVVGLDPSDQIAIDDRMREADGTKNKGKLGANGMLGVSLAVAKAAANAFGLPLYRYIGGASACQLPVPMMNILNGGAHADSSVDLQEFMVMPVHAKTFKQALQAGAEIFHALRSVLQKAGYSTGVGDEGGFAPSLGSNEQALEVIAEAIKKSGYTLGRDILLALDPATSEFYSGGKYVFKKSDGSKRSSAQMVDFWKDWATRYPIVSIEDGLDEDDWKGWEKLTAEIGDRVQLVGD

SEQ ID NO: 176793 - protein, 208 aa, Unknown
  Bacterial polypetide isolated from the Sargasso Sea
MGKIKSIVAREILDSRGNPTVGVNITLDNNISAFSSVPSGASTGSREALELRDNDPKRYKGKGVLKAVENINSIIAKALISKDVSGQNEIDAIMIEIDGTEKKENLGANAILGVSLAALIASSKSEKINLYERISNITESKKKFTLPVPMLNIMNGGAHAVNSTDFQEFMIIPAGFDSFNQAIRAGSEIYSTLGKILEKRWSFNKCWL

SEQ ID NO: 176794 - protein, 290 aa, Unknown
  Bacterial polypetide isolated from the Sargasso Sea
ILACSLSFIKCLANNSNKSLYEFLLTDQEYILPCPLMNIINGGAHANNGLDIQEFMIIPAGFKSFSDSLQAGVETFLKLKELLNKKSYSTAVGDEGGFAPDLKTNEEALNLILDSITLAGYEPGKNIFLALDVASSELYNQGKYSYDNELLSSSELIGVYKDLTSKFPIISIEDPLDEDDWESWKSITKSLGNSIQLVGDDLFVTNKSKLQMGIDTNAANSILVKINQIGSISETLDTINMAKNNNYSYIISHRSGETEDSSIADIAVGTKSGQIKTGSCSRSDRTAKYN

SEQ ID NO: 176795 - protein, 299 aa, Unknown
  Bacterial polypetide isolated from the Sargasso Sea
ANAILAVSMAAKKLSAKIKKIPLYKSFLVKKNFQLPYPLMNIINGGAHANNGLRIQEFMIRPDKAKSFSEAMRICYIVIKNLSKLIKNKGLSTSVGDEGGFAPMISSNKQALELITSAIKKSGFVNGKDVSICLDVAANELLKKNKYSIHSKSYISVKKSIIEYNNIIKRYKIKSIEDPFAENDWSAWNMMMRSIKNVQIVGDDLYVTNLERLKKGFLNVSSNAILIKLNQIGTVSETIDVIKFAQTIGFKTIISHRSGDSEDTFIADLAVGTNSNQIKTGSLARSERVAKYNQLIRIE

SEQ ID NO: 176796 - protein, 274 aa, Unknown
  Bacterial polypetide isolated from the Sargasso Sea
NSASAICPSGASTGTFEAFEKRDKNNKRYLGKSVLNAVNLVNSKISKKLKGQSIHNQERIDAILINLDGTRQKTNLGANAMLAVSMAVKKLSAKVKKLPLYKTFSQKNNFQLPYPLMNIINGGAHANNGLRIQEFMIRPDRAKSFSEAMRICFVVIKNLSKLIKDKGLSTSVGDEGGFAPMISSNNQALDLIVSAIKKSGFINGKDVSICLDVAANELYKKNKYSIHSKSYISVDKSIKEYQKIIKKYKIKSIEDPFAENDWLAWNKLMKSIKK

SEQ ID NO: 176797 - protein, 78 aa, Unknown
  Bacterial polypetide isolated from the Sargasso Sea
KLSSLATENSFASIMSHRSGETEDSFISDLAVASRCPLIKTGSLARSDRVAKYNQLLRISENDKIKGYAGELSEVFKS

SEQ ID NO: 176798 - protein, 148 aa, Unknown
  Bacterial polypetide isolated from the Sargasso Sea
TIEHYLKLIKKYKIKSIEDPFAEDDWLSWSRFMKKISKSTQIVGDDLYVTNLERLKIGFLNKSSNSILIKLNQIGTVSETLEVIKFAQLIGFNTIISHRSGESEDTFISDLAVGTNSNQIKTGSLARSERVAKYNQLIRIEEKLGKSS

SEQ ID NO: 176799 - protein, 88 aa, Unknown
  Bacterial polypetide isolated from the Sargasso Sea
IGTLTETFSAINMAREAGYTSVISHRSGETEDTTIADLAVGTSAGQIKTGSLCRSDRVAKYNRLLKIEEMLGDASIFNGISEFPVVND

SEQ ID NO: 176800 - protein, 104 aa, Unknown
  Bacterial polypetide isolated from the Sargasso Sea
MTKIKDIKARQIFDSRGNPTVEVDVITYDNIIGRAAVPSGASTGEHEAVELRDGGNDYMGKGVSMAVSNVNSIIRENLLGKSVFEQKELDSLMIDLDGTENKCI

SEQ ID NO: 176801 - protein, 214 aa, Unknown
  Bacterial polypetide isolated from the Sargasso Sea
NNSSEVIETILKAIEVSGFKPGKDIYLSLDVASTEFYKNNIYYLSGENLELGSDEMIVYLEKLVNSFPIYSIEDGMSEDDWTGWSNLTNTLGNKVQLVGDDLFVTNKKRLQRGIDENAANSILVKLNQIGTLNETLESIVLAKNNNFTTVISHRSGETEDTTIADLAVGVAAGQIKTGSLSRTDRTAKYNQLLRIEEKLGDDASYAGKSILKNI

SEQ ID NO: 176802 - protein, 177 aa, Unknown
  Bacterial polypetide isolated from the Sargasso Sea
NNIYNLYSENKKLESTEMVNYLNDLVKKYPIISIEDGLHEDDWGGWKELTKALGQQVQIVGDDLTVTNISRLKYAIEEDSINAILIKLNQIGTVTETIQAIEMAKKANLGVIISHRSGETEDTTIADLAVGMGMGQIKTGSISRTDRTCKYNQLLRIEEELGKTAKIANLSYLGIPR

SEQ ID NO: 176803 - protein, 222 aa, Unknown
  Bacterial polypetide isolated from the Sargasso Sea
ATSVGDEGGFAPNLKSNEEACEVIIEAIQVAGYEPGKDIFLALDAAASSFCNQGSYVFQKSGSGTKNLTEMLGFYVSMVEKYPIVSIEDPMDENDWDGFSAITKKLGDKIQIVGDDLFVTNTDFVRKGIRKKAANAVLIKLNQIGTLSETLATIQLCQKSGWNYIISHRSGETEDTFIADFAVAMAGGQIKTGSASRSERIAKYNRLLEIEAELGESAIFGS

SEQ ID NO: 176804 - protein, 74 aa, Unknown
  Bacterial polypetide isolated from the Sargasso Sea
MPEIKSIKAREIIDSRGNPTVECDVFFENSFGRAAVPSGASTGVHEALELRDKDKSRYKGKGVSKAVDNINKIV

SEQ ID NO: 176805 - protein, 268 aa, Unknown
  Bacterial polypetide isolated from the Sargasso Sea
GNPTIEVDVILENGSVGRAAVPSGASTGAYEAVELRDNDKSSYNGKGVLKAVHAVNHEIFDSLSGTDALDQRSIDTDLIELDGTENKSRLGANAILGVSLAVSRAAADSVELPLWQYLGGVNAHLLPTPMMNILNGGAHADNKLDVQEFMIMPIGANRFSDGLQMGAEIFQALKSGLMQKGLATSVGDEGGFAPALNSTDEALEFVSKAIETAGYSIGEDIVIALDAAASEIYLDGKYHLAGEGKSLTTKEMNKMWADLTASHPIISM

SEQ ID NO: 176806 - protein, 100 aa, Unknown
  Bacterial polypetide isolated from the Sargasso Sea
RKGIRKKAANAVLIKLNQIGTVSETLATIQLCQKSGWNYIISHRSGETEDTFMADFAVAMAGGQIKTGSASRSERIAKYNRLLEIEAELGESAIFGSWWS

SEQ ID NO: 176807 - protein, 130 aa, Unknown
  Bacterial polypetide isolated from the Sargasso Sea
KLTDQLGDRLQIVGDDLFVTNKNRLQRGIKQGIGNSLLVKLNQIGTLTETLGAISIAQRAGYSTVVSHRSGETEDTTIADLAVAVNAGQIKTGSLSRSDRIAKYNQLIRIEEELGSTAKYAGWADLPKIT

SEQ ID NO: 176808 - protein, 250 aa, Unknown
  Bacterial polypetide isolated from the Sargasso Sea
MSKIKKVVARQVFDSRGNPTIEAEVFASNTSCSAICPSGASTGTYEAFEKRDFKNKKYLGKSVLGPINTINKIVSKKLKNLNIHNQERIDYTLINLDGTKQKKKLGANSILAISMAAKKLSSKITKKPLYSTFLLKKNFKMPYPLMNIINGGAHANNGLRIQEFMIRPDKAKSFKEAIRICFLIINNLKKLIKKYGHSTSVGDEGGFAPMIQKNEEALDMIVKAIKLSGFENGKDVCICLDVAANELLNK

SEQ ID NO: 176809 - protein, 144 aa, Unknown
  Bacterial polypetide isolated from the Sargasso Sea
MVAKYPIKSIEDPFNEEDWKSHRELSSKTNIQIVGDDLFATNIKRLKKGISEKSANAILIKPNQIGTVSETLNAIKLAHENNFETVISHRSGDSEDTFIADLAVATKSSQIKTGSLARSERVSKYNRLIRIEEELGNSAKIAKI

SEQ ID NO: 176810 - protein, 215 aa, Unknown
  Bacterial polypetide isolated from the Sargasso Sea
MAKIKIIKGRQVFDSRGNPTVEAEVFSEKGNSTTAIVPSGASTGTHEAFELRDKENKNYLGKSVLKAVENINGPITKALKNINFNDQKNIDKILIDLDGTEQKKKLGANAILAVSIASCKLAAKEKNTSLFKYLGKTKNYKLPVPLLNIINGGVHAKNNLDIQEFMIRPDKASSFSEAMRKSFLVIQNLKGMVDSTNVGDEGGFAPKLTKNRRSN

SEQ ID NO: 176811 - protein, 249 aa, Unknown
  Bacterial polypetide isolated from the Sargasso Sea
MEKIKNIHAREILDSRGNPTVECDLELQDGSFGRAAVPSGASTGIHEALELRDGDQDRYLGKGVKKAVQNINELIKKEVLGKNYDNYRVFDKTLLTLDGTENKSNFGANATLAASLAFAKSLASHSSTPFYQHIAENENFILPVPMMNIINGGSHADNDVDIQEFMIAPVGATSFSEALRYGCEIFHSLKSILKSKNLNTNVGDEGGFAPNVNSSDEVIEIIITSVEKAGFKINDDILLSLDVASTVIL

SEQ ID NO: 176812 - protein, 301 aa, Unknown
  Bacterial polypetide isolated from the Sargasso Sea
MEQKIKTIWGANAILGVSMAAFKANAHLQKKQPFELFPNIYNSPSLPVPFMNILNGGAHADNSVDIQEFMIVPFGFDTFDRSLRAGVEIYHVLKKRLKENKLATNVGDEGGFAPNFKSSTEILDEIMLSISEAGYAPGKNVSLALDVASSEFYQSNYYNIEGEKLTNIEMSDYLINLTQNYPILSIEDGLGEDDWEGWKYLTEKLGEKIQLVGDDLFVTQEKILQKGIDNGCANSILVKVNQVGSVTETLETMKLAEKNNYSSLVSHRSGETEDTFISHLCVGTSSGQIKTGAPARSERTA

SEQ ID NO: 176813 - protein, 62 aa, Unknown
  Bacterial polypetide isolated from the Sargasso Sea
SHRSGETEDSFIADLAVATNAGQIKTGSLSRSDRMAKYNQLLRIEEELDRAGLFAGRTILRG

SEQ ID NO: 176814 - protein, 168 aa, Unknown
  Bacterial polypetide isolated from the Sargasso Sea
NKYSIHSKSYISVERSIQEYKKIINKYKIKSIEDPFAENDWISWNKLMKSLKKVQIVGDDLYVTNLERLKKGFLNLSSNAILIKLNQIGTVSETLDVIRFAQTIGFQTIISHRSGDSEDTFIADLAVGTNSNQIKTGSLARSERVAKYNQLLRVEEELGKKAKMNKIH

SEQ ID NO: 176815 - protein, 180 aa, Unknown
  Bacterial polypetide isolated from the Sargasso Sea
MPYPLMNIINGGAHANNSLEIQEFMIRPDGAKNFKECMQMSFLVIQNLKKYLESKKISTSVGDEGGFAPSLGSDEEAIEIIINSISTSGFKPGKDVSICLDVAANELKVPKNVQYFLDLEKKYPIKSIEDPFPEDDWHNWKNLTQKTKTQIVGDDLFVTNKKRLEKGIKEKCANTILIKP

SEQ ID NO: 176816 - protein, 182 aa, Unknown
  Bacterial polypetide isolated from the Sargasso Sea
MKTKITKIIGRQIIDSRGNPTVEADVYLNEKFFGRAAVPSGASTGSREALELRDKDQSIFNGKSVYKAVQYINNDINNFLVGKDAANQKDIDSLLIDLDGTSNKNKLGANTTLAVSLAVSKAVSKAQGLNLYQHLNTKKNEFSMPVPMMNIINGGSHANNNVDIQEFMIMPVGASNIFDAIR

SEQ ID NO: 176817 - protein, 226 aa, Unknown
  Bacterial polypetide isolated from the Sargasso Sea
NSILAVSLATARASANALDIPLYRYLGDPLSNLLPVPLMNVINGGAHAPNSLDFQEFMLVPHGVQNFSESLRMSTEIFHSLKSLLDKKGLSTAVGDEGGFAPDLSSSEEAGDLLLEAIQKAGFIPGEQVSLALDAASTEFYNNGIYQYEGKNLNSSEMISYLSRLVSNYPIVSIEDGLAEDDWEGWSELNKELGNKVQLVGDDLFVTNTERLRKGIMEKSANSILI

SEQ ID NO: 176818 - protein, 82 aa, Unknown
  Bacterial polypetide isolated from the Sargasso Sea
MKTNIKNIIAREILDSRGNPTVEVDVFLEDGHYGRAAVPSGASTGEFEAVELRDNDKNRYNGKGVLKAVSNVNEKISKVLIG

SEQ ID NO: 176819 - protein, 282 aa, Unknown
  Bacterial polypetide isolated from the Sargasso Sea
LPVPMMNIVNGGEHASNNLDIQEFMIIPVGVRSFREAIRCGSEIFHSLKQLLQSRSLITAVGDEGGFAPSLDNNEAALELIMKAIKKAGYKPGEDVYLGLDAASTEFYKNKRYVFKAENKKYSYEEFVAKFEQWVNKYPILSIEDGCSEDDHKGWQHMTEQLGDSVQLVGDDLFVTNPALLREGIAEHEANAILIKPNQIGTLTETLQTVCVAQNSDYGVVISHRSGETEDTTIADLAVATSAGQIKTGSLSRSDRIAKYNRLLQIEHELGRSARYAGKKAF

SEQ ID NO: 176820 - protein, 231 aa, Unknown
  Bacterial polypetide isolated from the Sargasso Sea
KKILQSKGYAISVGDEGGFAPNLKSNEEACEVIIEAIQVAGYQPGKDIFLALDAAASSFCNQGSYVFQKSESGEKNSTEMLEFYGSMVENYPIVSIEDPMDENDWEGFSAITKKLGDKIQIVGDDLFVTNTDFVRKGIRKKAANAVLIKLNQIGTVSETLATIQLCQKSGWNYIISHRSGETEDTFMADFAVAMGGGQIKTGSASRSERIAKYNRLLEIEAELGELAIFGS

SEQ ID NO: 176821 - protein, 280 aa, Unknown
  Bacterial polypetide isolated from the Sargasso Sea
MSKITKVVARQVFDSRGNPTIEAEVYSKNLSASSICPSGASTGTYEAYEKRDKSNRKYLGKSVLKPVSFINNKLSKKLKNQNVHNQERIDHILIKLDGTKQKSKIGANAILAISMAVKKLSAKIRKIPLYKSFTVKNNFKLPYPLMNIINGGAHANNGLRIQEFMIRPDKAKTFSDGVRICFLVINSLRTLIKKMGHSTSVGDEGGFAPMISDNENALKLIVKAIKKAGFTNGKDVSICLDVAANELIKKNKYSIHSKQYISVEQSIQKYLKLIKKYKIK

SEQ ID NO: 176822 - protein, 283 aa, Unknown
  Bacterial polypetide isolated from the Sargasso Sea
SILIKLDGTKQKTKLGANTILAVSMATKKLSAKVKKIPLYKNFIVKKNFKLPFPLMNIINGGAHADNGLRIQEFMIRPDKAKSFNDAVRMCFLVINNLKVLLKKAGHSINVGDEGGFAPMISDNESALKLIVQAIKKSGFKNGKDISICLDVAANELIKKGKYSIHSKNYISVDQSIKKYLQLIKKYQIKSIEDPFGEDDWKAWSKFVNETKNKTQIIGDDLFVTNLERLKIGFLNLSANSILIKLNQIGTVTETLEVIKFAQLIGFKTIISHRSGDTEDTFM

SEQ ID NO: 176823 - protein, 216 aa, Unknown
  Bacterial polypetide isolated from the Sargasso Sea
ISNNRECLDMIIKSVDESNYKIGKDIFLGLDVASTEFYENNKYILKGENLSLSSEELIRYYEDLLKNYPILSIEDGLSENDWNGWSNLTDHLGNKCQLVGDDLFVTNPERFRNGIKKNCGNSILIKLNQIGTLTETLETISIAKQNNFNTIISHRSGETEDTFIADLSIGCCAGQIKTGSLSRSERIAKYNQLIRIEEENEPKINYSSFEPFKRFL

SEQ ID NO: 176824 - protein, 180 aa, Unknown
  Bacterial polypetide isolated from the Sargasso Sea
NGNTFCDGKYHLSGEGKVLGSKDNAAYLADLVADYPIISIEDGMAEDDWEGWEILTNELGDKIQLVGDDLFVTNPTRLKKGIERSCANSMLVKVNQIGTLTETLEAVDLAHRANYTNVMSHRSGETEDTTIADLAVATNCGQIKTGSLARSDRLAKYNQLIRIEEELGGFAKYAGRSILK

SEQ ID NO: 176825 - protein, 283 aa, Unknown
  Bacterial polypetide isolated from the Sargasso Sea
VTLDNGICATSMVPSGASTGSREALELRDGDSTYMGKGVSKALANIHEIIAPALVGMDVTNQQDIDEKMLALDGTSSKSKLGANAILGVSLAVLNAGSKTLNLSLYQYINQVFANINGEKPRMQMPTPMLNIINGGEHADNNIDIQEFMIMPVGANNFSQAMQWATEIYSDLKNILNAKGLSTSVGDEGGFAPNLQSNQEAIELIIQAIRNNNLTEGKDVGIALDCAASEFYSNGIYNLQGESRKLNSCEFTNYLEKLTRQYPIFSIEDGMDESDFEGWKNLT

SEQ ID NO: 176826 - protein, 68 aa, Unknown
  Bacterial polypetide isolated from the Sargasso Sea
IEMCRKAGWNYVISHRSGETEDTFMADFAVAMGGGQIKTGSACRSERIAKYNRLLEIEAELGGLAIYG

SEQ ID NO: 176827 - protein, 287 aa, Unknown
  Bacterial polypetide isolated from the Sargasso Sea
INKLLSKKLKNLNVHNQERLDHTLIKFDGTKQKKNLGANSILAISMAVKKLSAKLKKKKLYETFIIKKNYKLPYPLMNIINGGAHANNGLRIQEFMIRPDKAKSFTEALRICYLVINNLKKLIKRMGHSTSVGDEGGFAPMISNNEKALQLIVKAIKISGFQNGKDISICLDVAANELLKKGKYSVHSKKHISPAKTINEYLKLIKKYKISSIEDPFGENDWKSWSNLMTKIPKKLQIVGDDLYVTNLERLKIGFLNSSSNSILIKLNQIGTVTETLEVIKFAHLIG

SEQ ID NO: 176828 - protein, 61 aa, Unknown
  Bacterial polypetide isolated from the Sargasso Sea
MAIITNIHARQVLDSRGNPTVEAEVSLDNGVMASACVPSGASTGSKEALELRDGDKSNYLG

SEQ ID NO: 176829 - protein, 282 aa, Unknown
  Bacterial polypetide isolated from the Sargasso Sea
LAVSIAAIKNAALERKVSLFKHIGGNSVNKLPIPMMNIINGGAHANNSLEIQEFMIRPDGANSFKECMRMSYLVIQKLKKNLEKINILTSVGDEGGFAPSLKSDEEAIEFIIKSIENAGFDPGKDISICLDVAANELKKPKQVNYFVDLIAKYPIKSIEDPFGEDDWKSSSDLNSKTNIQIVGDDLFATNIKRLKKGISQKSANAILIKPNQIGTVTETLDAIKLAHENKFETVISHRSGDSEDTFIADLAVATKSSQIKTGSLARSERVSKYNRLIRMKRN

SEQ ID NO: 176830 - protein, 274 aa, Unknown
  Bacterial polypetide isolated from the Sargasso Sea
LGKGVKNVVNNINTTIASALKGFDVTKQEEADSLLIALDGTENKSNLGANAILGTSMAIAYAGAQASEEKLFQYLSSKKSPVLPVPMMNILNGGSHADNSVDIQEFMVMPFGANNFSEALRMGTEIFHHLKEVLTSQNMTTAVGDEGGFAPDLRSNEEAIELILEATEKAGLKPESDVYIALDVAASELFQDDKYNLFSENKRLDSEGMVEYLGDLINKYPIVSIEDGLDENDWSGWTHFTKNFGEKVQIVGDDLTVTNIKRLDRSINEKSHEC

SEQ ID NO: 176831 - protein, 205 aa, Unknown
  Bacterial polypetide isolated from the Sargasso Sea
MSFILEKVTAREILDSRGNPTVEVDAFTSDGMMARASVPSGASTGSREATERRDGDATRFGGKGVRDAVKAVDTEICDTVRGTDVREQRRLDNLMRELDGTENKSRLGANAILGVSLAVARLAAQVTRQPLYRYLGGLNASLLPVPCMNIINGGVHARGQGADFQEFMIAPHGAPTLAEAVRQGSEVYQALRQILLSRNLSAAVG

SEQ ID NO: 176832 - protein, 236 aa, Unknown
  Bacterial polypetide isolated from the Sargasso Sea
MVIQNLKKLIKDKNFSTAVGDEGGFAPMISKNEDALNLIIKSIKKSGYVNGRDVSICLDVAANELYKKGNYSIHSKKHISVKKSLEGYMKIIRKFKIKSIEDPFAENDWKAWSKLKKREKGIQIVGDDLYVTNLQRLKKGFISQSSNSILIKLNQIGTVTETLEVIKFAKKIGYQTIISHRSGDSEDTFISDLAVGTNSSQIKTGSLCRSERVAKYNQLLRIEQEINSKNNMVRLK

SEQ ID NO: 176833 - protein, 280 aa, Unknown
  Bacterial polypetide isolated from the Sargasso Sea
PNCSAEVILQDGSIGTAIVPSGASTGRHEAHELRDKNKDYLNKSVFDAVNNINNKISKVLINKVSTNQNEIDKILINLDGTENKSIIGANAILAVSIANLKAAAKFSKREIYKYINNGVKNNMPYPLMNIINGGAHANNSLEIQEFMIRPDGAKNFKECMQMSFLVIQNLKKKFEDKKISTSVGDEGGFAPSLGSDEEAIEVIMKSISSAGFQPGKDISICLDVAANELEKPKDVEYFLKLTKEYPIKSIEDPFSEDDWDNWKKLTQKVNTQIVGDDLFV

SEQ ID NO: 176834 - protein, 252 aa, Unknown
  Bacterial polypetide isolated from the Sargasso Sea
FGEALRCGVEIFHQLRAELTAQGLQTAVGDEGGFAPDFPSNEAALQAVLQAVERSGYMASEDVFLGLDLASSEFFSGGQYCLQSEEHSYTTGEFINLISELTDRIPILSLEDPLDEDDWEGWVTLTKKLGQTVQLTGDDLFVTNPGILEKGIDLQAANSILIKVNQIGTLSETLDAVRLAQSNGYTVTVSHRSGETEDTTIADLAVGVGADQIKTGSLCRSERTAKYNRLLRIEEALGDRAVYAGRQAFAQL

SEQ ID NO: 176835 - protein, 311 aa, Unknown
  Bacterial polypetide isolated from the Sargasso Sea
MNNKIKTIKARHILDSRANPTIEVEIYLNDEIFGRAAVPSGASTGALEAHELRDNDDAYSGKGVNQAIKNIETIIAKELIGLDITDQEAIDKKLIQLDGTENKNNLGANAILGVSMAAFKANANLQKKQPFELFPNIYNSPSLPVPYMNILNGGAHADNSVDIQEFMIVPFGFDTFDRSLRAGVEIYHVLKKRLKENKLATNVGDEGGFAPNFKSSREILDEIMFSISEAGYAPGKNVSLALDVASSEFYENNVYNIEGEKFNNIEMSDYLINLTQNYPILSIEDGLGEDDWGRLEISNRETWRKNSLVGD

SEQ ID NO: 176836 - protein, 188 aa, Unknown
  Bacterial polypetide isolated from the Sargasso Sea
MNSSIEKIFAREILDSRGNPTVEVDVMTSDGLMGRAAVPSGASTGIHEALELRDGDKNRYLGKGVRTAVNNINNIIAPSLKGCEATEQSENDSQLLALDGTENKSNLGANAILGVSMAIAHAGAKIEKKSLYQYLGKNNAHILPMPMMNILNGGSHADNLVDIQEFMIMPFGAKRFSEALQMGTEVFH

SEQ ID NO: 176837 - protein, 107 aa, Unknown
  Bacterial polypetide isolated from the Sargasso Sea
IERLQKGIDQKSANSILIKLNQIGTISETLAAIDLAKKNNYSSIISHRSGETEDTTIADLSVSSLSKQIKTGSVSRTDRTCKYNQLLRIEEILGKKAKYAGKTILIS

SEQ ID NO: 176838 - protein, 185 aa, Unknown
  Bacterial polypetide isolated from the Sargasso Sea
LSGKTVLKAVEGINTEICNVLCGMEASAQEEIDNKMIELDSTNNKSRLGANAILGVSLASSRAQANSEGKHLYEYLNSSDSYILPVPMMNLINGGAHSNNSLFIQEFMIMPVSAETFNHAIITGSEIFHSLKNLLENDGFSTNVGDEGGVAPDLKTSEDALSYLCKAIEKAGYRLEEDIVFALDI

SEQ ID NO: 176839 - protein, 252 aa, Unknown
  Bacterial polypetide isolated from the Sargasso Sea
FQEFMLVPHGVDNFSESLRMGTEIFHSLKSLLDQKGLSTAVGDEGGFAPNLSSSEEAGDLLLEAIQKAGFKAGEQVSLALDAASTEFYNDGIYQYEGKSLNSSEMISYLSRLVSNYPIVSIEDGLAEDDWEGWSELNKELGNKVQLVGDDLFVTNTERLRKGIMEKSANSILIKVNQIGTLTETLEAIELAKMSGFTSVISHRSGETEDTTIADLSVATRSGQIKTGSLSRSERIAKYNRILKIEEELGNQA

SEQ ID NO: 176840 - protein, 55 aa, Unknown
  Bacterial polypetide isolated from the Sargasso Sea
MNSSIKKIYAREILDSRGNPTVEVDVYTKSGHLGRAAVPSGASTGEYEAIELRDM

SEQ ID NO: 176841 - protein, 294 aa, Unknown
  Bacterial polypetide isolated from the Sargasso Sea
ENINKKIGSSLKGLDPADQSKIDKVLLDLDGSENKKNLGANSTLAVSLANSKSAALSVNKPLYKNLGKSFSLPNPLMNIINGGAHADNDLKIQEFMIRPDSAKNFMDAVEKCFLVIQNLKSLLKSKKMLTNVGDEGGFAPSINTNEEALELIVNSIEKSKLTPGKDVVICLDVAANELINKEGQYTIQSSNFSLVDDVVSYYKKLTSNYPIKSIEDPFAEEDWESWKKITAEIGKNVQIVGDDLFVTNSKRLKKGIDNKSANSILVKPNQIGTLSETLEVVTMAKKANFNTIIS

SEQ ID NO: 176842 - protein, 192 aa, Unknown
  Bacterial polypetide isolated from the Sargasso Sea
MNKKIKSISARHILDSRANPTIEVEVTTSDNIKGRAAVPSGASTGAFEAHELRDNDPSFNGMGVNKAIENVKTIISDTLIGVDVTDQSNIDNKLIELDGTDNKNNLGANAILAVSMASMRASANQQNKQLFELFPNIYGPPSLPVPFMNILNGGAHADNSVDIQEFMIVPFGFETFDTSLRAGVEIYHVLKK

SEQ ID NO: 176843 - protein, 262 aa, Unknown
  Bacterial polypetide isolated from the Sargasso Sea
SKISKVIARQVYDSRGNPTVEAEVFSKNISASAICPSGASTGTYEAYEKRDTNNKKFLGKSVFKPVNLINSKISNKLKNKNIHKQELIDSILIKLDGTKQKNYLGANAILAVSMAVKKLSAKLKKIPLYKTFLVKKNFKIPYPLMNIINGGAHADNGLRIQEFMIRPDKAKTFSEAMRISFLVIQNLKSLIKQKKLSTSVGDEGGFAPMISSNEQALNLIVSAIKKSGFKNGKDVSICLDVAANELFKKNKYSIHSKKFISV

SEQ ID NO: 176844 - protein, 269 aa, Unknown
  Bacterial polypetide isolated from the Sargasso Sea
NEGAHANNGLKIQEFMIRPDKAKTFSEAMNICFLVIQSLKKILIRKNLSTSVGDEGGFAPMISKNEEALKLISNAIKKAGFVNGKDVSICLDVAANELFKNNKYAIDSKKYISNKDTISFYSKIIKRFKIKSIEDPFAENDWKSWSDLHKKEKKIQIVGDDLYVTNLQRLKKGFLYQSSNSILIKLNQIGTVSETLEVIRFAQNIGYTTIISHRSGDSEDTFISDLAVGTNSNQIKTGSLCRSERVAKFNQLLRIEADLIKSKNMANLK

SEQ ID NO: 176845 - protein, 113 aa, Unknown
  Bacterial polypetide isolated from the Sargasso Sea
MPKIKKIIAREIIDSRGNPTIECDVSLEDNSFGRASVPSGASTGKHEALELRDGDINRYLGKGVKKAIKNINQLIKENIKNKEFGSYREFDKFILNLDGSENKSNLGANATLA

SEQ ID NO: 176846 - protein, 259 aa, Unknown
  Bacterial polypetide isolated from the Sargasso Sea
ISKKLKGQSIHNQERIDALLINLDGTRQKTNLGANAMLAVSMAVKKLSAKAKKLPLYKTFFQKNYFQLPYPLMNIINGGAHANNGLRIQEFMIRPDRAKSFSEAMRICFVVIKNLSKLIKEKGLSTSVGDEGGFAPMISSNNQALDLIVSAIKKSGFINGRDVSICLDVAANELYKKNKYSIHSKSYISVNKSIKEYQKIIKKYKIKSIEDPFAENDWLAWNKLMKSIKKVQIVGDDLYVTNLERLKKGFLNISSNSIL

SEQ ID NO: 176847 - protein, 255 aa, Unknown
  Bacterial polypetide isolated from the Sargasso Sea
MSKITKVVARQVFDSRGNPTIEAEVFANNMKARAICPSGASTGSYEAYEKRDYLNKRYLGKSVLKPVKLINEIISKKLINQNIHDQEKIDYILIKLDGTKQKKKFGANSLLAVSMAVKKLSARIKKIPLYKTFLVKNNFKLPYPLMNVINGGAHANNGLRIQEFMIRPDKAKSMTEALRICFLVVNKLKKIIKNRGYSTSVGDEGGFAPMINNNEDALKLIVSAIQKSGFKNGRDVSICLDVAANELFINNKYSI

SEQ ID NO: 176848 - protein, 60 aa, Unknown
  Bacterial polypetide isolated from the Sargasso Sea
NFESIISHRSGETEDTTIADLAVGLGIGQIKTGAPCRSDRVAKYNRLLWIEEESNNILLK

SEQ ID NO: 176849 - protein, 303 aa, Unknown
  Bacterial polypetide isolated from the Sargasso Sea
FEKRDINNKKYLGKSVLSAIKLVNSKIFKKLKGENIHNQERIDSLMINLDGTRQKAKLGANSILAVSMAVKKLSAKVKKLPLYKTFSVKNNFQLPYPLMNIINGGAHANNDLRIQEFMIRPDKAKSFSEAMRMCFLVINNLKKLFKNNGLSTSVGDEGGFAPMISSNNKALDLIVSAIKKSGFKNGKDISICLDVAANELYKKNKYSIHSKKYVSVDKSIKEYKKIIKKYKIKSIEDPFAENDWISWNKLMKSTPKVQIVGDDLYVTNLERLKKGFLNISSNAILIKVNQIGTVSETLEVIKL

SEQ ID NO: 176850 - protein, 265 aa, Unknown
  Bacterial polypetide isolated from the Sargasso Sea
SAKVKKIPLYKNFIVKKNFKLPFPLMNIINGGAHADNGLRIQEFMIRPDKAKSFNDAVRMCFLVINNLKVLLKKAGHSINVGDEGGFAPMISDNESALKLIVQAIKKSGFKNGKDISICLDVAANELIKKGKYSIHSKNYISVDQSIKKYLQLIKKYQIKSIEDPFGEDDWKAWSKFVNETKNKTQIIGDDLFVTNLERLKIGFLNLSANSILIKLNQIGTVTETLEVIKFSQLIGFKTIISHRSGDTEDTFIADLAVGTDSNQI

SEQ ID NO: 176851 - protein, 195 aa, Unknown
  Bacterial polypetide isolated from the Sargasso Sea
KPGEQVSLALDAASTEFYSDGIYKYEGKSLNSSEMISYLSRLVSNYPIVSIEDGLAEDDWEGWSELNKELGNKVQLVGDDLFVTNTERLRKGIMEKSANSILIKVNQIGTLTETLEAIELAKLSGFTSVISHRSGETEDTTIADLSVATRSGQIKTGSLSRSERIAKYNRLLKIEEELGSQARFAGALGLGPKNI

SEQ ID NO: 176852 - protein, 184 aa, Unknown
  Bacterial polypetide isolated from the Sargasso Sea
MSKISNIKALQVFDSRGNPTIECEISLEDGNKALAVVPSGASTGTHEAFELRDIEDKKYLGKSVLKAIEKINGEISKELIGFDAKDQKKIDQTLIKLDGTKQKKRLGANAILSVSLAACKVAANSKKIPLFKNLGNEKTLPLPLMNIINGGAHANNLLRIQEFMIRPDKAKSFKEALNICFLVI

SEQ ID NO: 176853 - protein, 164 aa, Unknown
  Bacterial polypetide isolated from the Sargasso Sea
EAFELRDIDNKEYLGKSVLKAIEKVNVEISKALLGQSSEDQSKVDEMMIDLDGTEKKKRLGANAILSVSLAINKANAVSKNIPLYKNIGNGKTLPMPLMNIINGGVHANNSLRIQEFMIRPDKAENFKEALNICFLVIQKLKIFINSKNLSTTVGDEGGFAPTL

SEQ ID NO: 176854 - protein, 249 aa, Unknown
  Bacterial polypetide isolated from the Sargasso Sea
MHKITKVVGRQVFDSRGNPTVEAEVFSNNISSIAISPSGASTGTFEAFEKRDIYNKKYLGKSVFKSVEIINKKISKKIKNQFVHNQEKIDHILIKLDGTKQKSKIGANTTLAVSMAVKKLSAKLRKIPLYKSFLLRNNYKLPYPLMNIINGGAHANNGLRIQEFMIRPDGAKSFSESLRMCFLVINNLRKIIKKKGLSTSVGDEGGFAPMINSNEEALKLILKSISVSGFINGKDISICLDVAANELYK

SEQ ID NO: 176855 - protein, 77 aa, Unknown
  Bacterial polypetide isolated from the Sargasso Sea
GTVSETVATIEMCRNAGWNYVISHRSGETEDTFMADFAVAMGGGQIKTGSACRSERIAKYNRLLEIEAELDGLAIYG

SEQ ID NO: 176856 - protein, 166 aa, Unknown
  Bacterial polypetide isolated from the Sargasso Sea
IEGNALSNTEMSDYLIELSNLYPIVSIEDGLAEDDWEGWKYLTSKIGENVQLVGDDLFVTQEKILQKGINEGCANSILIKVNQVGSVTETIEAMKLANKNNYTSMVSHRSGETEDSFISHLVVGTSSGQIKTGAPARGERTAKYNELLRIAEHVGFENFNNKKWEL

SEQ ID NO: 176857 - protein, 305 aa, Unknown
  Bacterial polypetide isolated from the Sargasso Sea
MKIKDVKGRQILDSRGNPTVEVDIKLDDDSEGRGISPSGASTGSLEALELRDDNKEMYNGKSVLKAVANVNENIKNAIKGKSFNSQEDFDNFLIDLDGSENKSVLGANAILSSSLAYAHASSLSKNIPLYKSFINNNYTLPVPMMNILNGGAHANNELNFQEFMILPIKFTSFSESLRAGAEIFHELKKLLISKNLSSAVGDEGGFAPNLSSNEDALDIILDAISSAGYTPGEDIFLGLDAASTEFYKQDKYILNDKNTLDSSSFCDYLVKLCDNYPIISIEDGMSEDDWNGWHEITERLGTRFS

SEQ ID NO: 176858 - protein, 172 aa, Unknown
  Bacterial polypetide isolated from the Sargasso Sea
MSRILKVIARQVYDSRGNPTVEAEVFSKNTSACAICPSGASTGTYEAYEKRDTNNKKYLGKSVFKPVNLINSKISKKLKNKNIHNQELIDSILIRLDGTKQKNYLGANAILAVSIAVKKLSAKLKKKPLYKTFLVKKNFKLPYPLMNIINGGAHANNGLRIQEFMIRPDKAK

SEQ ID NO: 176859 - protein, 65 aa, Unknown
  Bacterial polypetide isolated from the Sargasso Sea
IGYKTIISHRSGDSEDTFIADLAVGTNSNQIKTGSLARSERVAKYNQLIRIEEELGKKVRMNKIN

SEQ ID NO: 176860 - protein, 273 aa, Unknown
  Bacterial polypetide isolated from the Sargasso Sea
MPKIENLTSIQVLDSRGLPTISTEILLNDGTRSVAMVPSGASTGEKEALELRDGGQAFLGKGVTKAIDNINDGIKNSLVGENPLDQDHIDQILNNLDGTSDKSNLGANAILSVSIASAKASSKSENLDLHNYFNILLSNKMGKTIDQVIPIPMLNILNGGEHADNNIDIQEFMIIPKGAVNFSQAMQWSSEIYWNLKSILKEKGLSTAVGDEGGFAPNLNTNREALELIARAVDKTDLKLGSDICISLDCAASEFYENGTYHLKGEDRELTSS

SEQ ID NO: 176861 - protein, 95 aa, Unknown
  Bacterial polypetide isolated from the Sargasso Sea
MTAIVAIHAREILDSRGNPTVEVDSFLETGASGRAAVPSGASTGIHEAVELRDGDQGRYNGKGVLKAVNAVNNEISDALVGMDAEDQVEIDNLMK

SEQ ID NO: 176862 - protein, 254 aa, Unknown
  Bacterial polypetide isolated from the Sargasso Sea
MNPRIINIQALEILDSRGNPTVRTRVRLENGISGVASVPSGASTGINEALELRDGDKKRFGGKGVLKAVENVNKQIAPELVGMYAEDQSKIDQVMLELDGTKSKEKLGANAILGVSMAAADAAAKNAGLSLYSYLGGVGSTRLPVPMMNILNGGEHADNSVDIQEFMIMPIGLPNFREALRCGSEIFQALKKILLAKNYSTGVGDEGGFAPNLESNQEACELILEAVEKAGYKAGKEIFLALDSAASSFFKDGK

SEQ ID NO: 176863 - protein, 318 aa, Unknown
  Bacterial polypetide isolated from the Sargasso Sea
IAREIMDSRGNPTVEADVFLASGAMGRGCAPSGASTGTREALELRDGDKSRYLGKGVRTAVANIDGPIKAALIGKNAYKQAEIDQIMIDLDGTESKSKLGANAILAVSLAVARAAAADKKIPLYQHIADLNGTPGVYSMPVPMMNIINGGEHADNNVDIQEFMVQPVGAKTFAEALRMGAEIFHQLKKELHSQGLNTAVGDEGGFAPDLKSNEEALTVISKAVAAAGYELNKDITLALDCAASEFYVDGKYKLSGEGKEFTSYEFNDFLAGLATRFPIVSIEDGLDESDWDGWKDMTNKMGNKIQLVGDDLFVTNTKI

SEQ ID NO: 176864 - protein, 298 aa, Unknown
  Bacterial polypetide isolated from the Sargasso Sea
VINLISKKLKNQNIHDQERIDSILIKLDGTKQKTKLGANTILAVSMAVKKLSAKVKKIPLYKNFIVKKNFKLPFPLMNIINGGAHADNGLRIQEFMIRPDKAKSFNDAVRMCFLVINNLKVLLKKAGHSINVGDEGGFAPMISDNESALKLIVQAIKKSGFKNGKDISICLDVAANELIKKSKYSIHSKNYISVDQSIKKYLQLIKKYQIKSIEDPFGEDDWKAWSKFVNETKNKTQIIGDDLFVTNLERLKKGFLNLSANSILIKLNQIGTVTETLEVIKFAQIIGFKTIILPIDLV

SEQ ID NO: 176865 - protein, 72 aa, Unknown
  Bacterial polypetide isolated from the Sargasso Sea
LSTIQLCQKSGWNYIISHRSGETEDTFMADFAVAMAGGQIKTGSASRSERIAKYNRLLEIETELGGSAIFGS

SEQ ID NO: 176866 - protein, 184 aa, Unknown
  Bacterial polypetide isolated from the Sargasso Sea
MSKIKKIKGRQIFDSRGNPTIEVDITLEDGSFGRASVPSGASTGAYEAYELRDGEKTLSGKTVLKAVEGINTEISNVLCGMEASAQEEIDNKMIELDSTNNKSRLGANAILGVSLASSRAQANSEGKHLFEYLNSSDSYILPVPMMNLINGGAHSNNSLFIQEFMIMPVSAETFNHAIITGSEI

SEQ ID NO: 176867 - protein, 185 aa, Unknown
  Bacterial polypetide isolated from the Sargasso Sea
DVASSEFYKNERYIMSDGNTYNSDDFCEYLKNLCDNYPIISIEDGMAENDWNGWSVLTDNLSNKIQLVGDDVFVTNKKIFEKGINKEVANAILIKFNQIGTITETLETIDLARKNNYNYIISHRSGETEDVTIADMSVGTSSGQIKTGSLSRSDRVAKYNQLLRIEEQLGKKFFNKDNVFGRWLK

SEQ ID NO: 176868 - protein, 208 aa, Unknown
  Bacterial polypetide isolated from the Sargasso Sea
MIDSTNVSDEGGFAPNLQKTEEAVEIIINAIEKSGFIPGKDISICLDVAANELNKGKTIDYYSELIKKYPIRSIEDPFAEDDWESWKKLTNVANIQIVGDDLFATNIKRLKKGIKEKSANAILVKLNQIGTVTETLDAINLAQKNNFETIISHRSGDTEDTFIADLAVATNSSQIKTGSLARSERVAKYNRLLRIEEELGNSAKMAKV

SEQ ID NO: 176869 - protein, 275 aa, Unknown
  Bacterial polypetide isolated from the Sargasso Sea
MPMPMFNILNGGEHSNNNIDIQEFMIIPSGAKTFEEVMQWSVEIYQNLKKILSSKNHSIAVGDEGGFAPNLKSNEEAIKLIIEAIKNSNLDLKKDINIALDCAASEFFDGSNYFMKGENQKLTSVELVNYLESLVEKYPITSIEDGMDENDDDGWKLLTSQLANKCQLVGDDLFVTNKQLLKEGVQENIANSILIKLNQIGSLTETIETIHLAKESNYEPIISHRSGETEDTTIADLAVGLGVKQIKAGAPCRSDRIAKYNRLLWIEKESSDILL

SEQ ID NO: 176870 - protein, 233 aa, Unknown
  Bacterial polypetide isolated from the Sargasso Sea
KAILNFNCEDQIKIDETLISLDGTEQKKKIGANAILAVSMASCKLAAIEKKISLFRHIGNSKKYQLPVPLLNIINGGVHANNNLDIQEFMIRPEKTISFSEAMRKSYLVIQNLKKMVDNTNVGDEGGFAPNLKSAEEAIKLIIRAIEKSGLKPESDISICLDVAANELKKPMSIDSFLELAKKYPIKSIEDPFKEDEWESWKKLTSNTNIQIVGDDLFATNSKRLKKGIKEKS

SEQ ID NO: 176871 - protein, 264 aa, Unknown
  Bacterial polypetide isolated from the Sargasso Sea
MAKIKNVKGRQVFDSRGNPTVEAEVFLDNGISAVAISPSGASTGAFEAHELRDQDNNFFLGKSVKKAIENINLKIAPSLKGLDPVDQSKIDKALINLDNSDNKKNLGANATLAVSLANSKSAALSLKKPLYKSLGKSFSLPNPLMNIINGGAHADNDLRIQEFMIRPDSAKNFMSAIEKCFLVIQNLKSLLKSKKMLTNVGDEGGFAPSIDTNEQALELIVDAVQKSRLIPGKDIVICLDVAANELINKEGKYSIQSNNHILSN

SEQ ID NO: 176872 - protein, 200 aa, Unknown
  Bacterial polypetide isolated from the Sargasso Sea
MSKIKKIKGRQIFDSRGNPTIEVDITLEDGSFGRASVPSGASTGAYEAYELRDGEPTLSGKTVLKAVEGINTEISNVLCGMEASAQEEIDNKMIELDSTNNKSRLGANAILGVSLASSRAQANSEGKHLFEYLNSSDSYILPVPMMNLINGGAHSNNSLFIQEFMIMPVSAETFNHAIITGSEIFHSLKSLLENDGFSTN

SEQ ID NO: 176873 - protein, 129 aa, Unknown
  Bacterial polypetide isolated from the Sargasso Sea
MNYIIEKIYAREILDSRGNPTIEVDVITKSGVMGRAAVPSGASTGGHEALELRDGDNSRYLGKGVRNAINNVNTIISVTLEGCDVTQQSENDNLMIALDGTENKSRLGANAILGVSMAIAHAGAKVKNQ

SEQ ID NO: 176874 - protein, 156 aa, Unknown
  Bacterial polypetide isolated from the Sargasso Sea
MPKIKKIRGRQVFDSRGNPTVEAEVILDDGSHASAIVPSGASTGTHEAFELRDIENKKYLGKSVFKAIEKINGEIFNALTGINSSDQKKIDNVLIELDGTKQKKRLGANATLPVSLAYNKACANFKKIPLFENLGKSKTLPLPLMNIINGGAHANN

SEQ ID NO: 176875 - protein, 121 aa, Unknown
  Bacterial polypetide isolated from the Sargasso Sea
MKSLKKVQIVGDDLYVTNLERLKKGFLNLSSNAILIKLNQIGTVSETLDVIRFAQAIGFQTIISHRSGDSEDTFIADLAVGTNSNQIKTGSLARSERVAKYNQLLRIEEELGKKARMNKIH

SEQ ID NO: 176876 - protein, 112 aa, Unknown
  Bacterial polypetide isolated from the Sargasso Sea
MKSHIKNIYSREILDSRGNPTVEVDLVLENDIIARAAVPSGASTGDFEAMELRDNDKKRYMGKGVLNAVNNVNSEIRNALIGIDINNQKNIDNILIELDGTENKSRLGANAI

SEQ ID NO: 176877 - protein, 42 aa, Unknown
  Bacterial polypetide isolated from the Sargasso Sea
TAAGQIKTGSLCRSDRVAKYNRLLRIEDHSSAIYKGLAEFNR

SEQ ID NO: 176878 - protein, 263 aa, Unknown
  Bacterial polypetide isolated from the Sargasso Sea
MGLRIQEFMIRPDKAKSFSEAVRMCFLVINNLRNIIKKRGYSTSVGDEGGFAPMINNNENALKLIVESINKSGFKNGKDISICLDVAANELHNKSKYSIHSIKLISANKSIDKYLQLIKKYKLKSIEDPFAENDWSSWANIIKKTKNKIQIVGDDLFVTNLERLKVGFLNNSANSILIKLNQIGTVTETLEVIKFANLIGFKTIISHRSGDSEDTFISDLAVGTNSNQIKTGSLSRSERVSKYNQLLRIEEKLGKLSKMNSIK

SEQ ID NO: 176879 - protein, 66 aa, Unknown
  Bacterial polypetide isolated from the Sargasso Sea
KKANFNTIISHRSGDTEDTFIADLAVGTESSQIKTGSLARSERVAKYNRLLRIEEELGNHVKMAKI

SEQ ID NO: 176880 - protein, 275 aa, Unknown
  Bacterial polypetide isolated from the Sargasso Sea
KRDGGERFQGKGVLDAIDNINNEIFNVLSGIDSTDQRLIDETLIDLDGTENKSRLGANAILGVSLANAKASSEYLDVPLYRYIGGISSNRLPIPMMNILNGGMHADNKLDIQEFMIVPIGSKNFSDSLRAVSDITKSLKSRLISKGLNTNVGDEGGFAPALNSTRETLDHLIESIIKAGYKPDQDVSIALDVAANEIYKDNSYNFYGEGIKKNSDEMIDFLVSLVDNYPISSIEDGMAEDDWDGWINLTKALGNKINLVGDDLFVTNVNRLKKRY

SEQ ID NO: 176881 - protein, 173 aa, Unknown
  Bacterial polypetide isolated from the Sargasso Sea
EIYKKNKYSIHSKSYISVDKSIKEYQKIIKKYKIKSIEDPFAENDWLAWNKLMKSIKKVQIVGDDLYVTNLERLKKGFLNISSNSILIKLNQIGTVSETLDVIKFAQTIGYKTIISHRSGDSEDTFIADLAVGTNSNQIKTGSLARSERVAKYNQLIRIEEELGKKARMNKIN

SEQ ID NO: 176882 - protein, 297 aa, Unknown
  Bacterial polypetide isolated from the Sargasso Sea
LDGTENKCILGANAILGVSLAISQAAAKSKNLPLYQYIGGNSAITLPVPMMNIINGGSHSDAPIAFQEFMIVPVNAESFSHAMKIGTEIFHNLKGILSVRGLSTSVGDEGGFAPKLEGTEDALETIIKSISSAGFKPGEDVMIALDCASSEFFEDNHYDYRIFEGNNGKVFDSEQQADYLSDLVSKYPIISIEDGMDENDWSGWVHSTQILGNKVQLVGDDLFVTNTNILQKGIDQKAANSILIKVNQIGTLTETINAINLAKENGFSTVISHRSGETEDNIIADLAVALNAGQIKT

SEQ ID NO: 176883 - protein, 296 aa, Unknown
  Bacterial polypetide isolated from the Sargasso Sea
DQSLIDRDGTNDKSKLGANSILAISIAVCRVAASLKGISLHEHFSDLYKDMTGEKPQQTLPMPMLNILNGGEHADNNIDIQEFMIIPSGAESFTQAMQWSSEVYINLKEILQSMKLSTSVGDEGGFAPNLNSNEDAIKLIEESIIKSDLKPGIDINIALDCAASEFFKNGKYILGREGKELSSDEFSDYLKNLISKYPIISIEDGMDENDIDGWKLLTKKIGNKCQLVGDDLFVTNKEILSKGIKEEIANAILIKFNQVGSLTETIRAIECATSAAYKSIISHRSGETEDTTIADL

SEQ ID NO: 176884 - protein, 202 aa, Unknown
  Bacterial polypetide isolated from the Sargasso Sea
MAVKKLSAKLKKIPLYKTFLVKKNFKLPYPLMNIINGGAHADNGLRIQEFMIRPDKAKTFSEAMRISFLVIQNLKSLIKQKKLSTSVGDEGGFAPMISSNEQALNLIVSAIKKSGYKNGKDVSICLDVAANELFKKNKYSIHSKKFISVDQSIKAYLKIIKKYHIKSIEDPFAENDWISWNKMMRSVNNVQIVGDDLYVTNL

SEQ ID NO: 176885 - protein, 172 aa, Unknown
  Bacterial polypetide isolated from the Sargasso Sea
LESEEKTYSSEEMINYLNNLTKKYPIISIEDGLDQSDWNGWKKLNQELGNNIQIVGDDLTVTNIKRLNRAIDEKSMNSILIKLNQIGTITETVQAVKLAKKVGFGAIISHRSGETEDTIISDFSVAMGMGQIKTGSLSRSDRVAKYNQLIRIEEQLGHKAKYATMDFLGMAR

SEQ ID NO: 176886 - protein, 213 aa, Unknown
  Bacterial polypetide isolated from the Sargasso Sea
GFAPDLKSNEEAFTVILAAIESAGYRAGKDIVFALDVAATEFYEDGIYHLKGEGVKKTREEMIAMYVDLADKYPLFSIEDGLAESDWEGWKLLTDRLGSKLQLVGDDLFVTNTKILGEGIEKAVGNSILIKVNQIGTVTETLAAIDMAHRANYSAVISHRSGESEDTFIADLAVATNSGQIKTGSASRTDRIAKYNQLLRIEEDLTPNAQYYF

SEQ ID NO: 176887 - protein, 239 aa, Unknown
  Bacterial polypetide isolated from the Sargasso Sea
DIQEFMIRPDKAKSFSEAMRVSFLVIQKLKSLLDVTNVGDEGGFAPNLQSDEEAIQIIIKAIEKSGFKPGEDVSICLDVAANELKTPKTIDYYSELINKYPIKSIEDPFTEDDWDSWKQLTKKTKIQIVGDDLFATNVKRLKKGIDEKSANAILIKLNQIGTVSETLDAIRLAQKSDFKTIISHRSGDTEDTFIADLAVATNSSQIKTGSLARSERVAKYNRLLRIEDELGNSAKIAKV

SEQ ID NO: 176888 - protein, 115 aa, Unknown
  Bacterial polypetide isolated from the Sargasso Sea
MSQIVDIRAREILDSRGNPTIEADVILESGVVGRACAPSGASTGSREALELRDGDKSRYLGKGVRTAVQNVNSSIHELLVGQNVFEQKLLDDKMIALDGTENKEKLGANATLAVS

SEQ ID NO: 176889 - protein, 240 aa, Unknown
  Bacterial polypetide isolated from the Sargasso Sea
MSKITKVLARQVFDSRGNPTIEAEVYSKNLSATSICPSGASTGTYEAYEKRDKSNKKYLGKSVLKPVAYVNKIISKKLRNQNVHNQERIDHILIKLDGTKQKNKIGANAILAISMAVKKLSAKIRKIPLYKNFIVKKNFQLPYPLMNIINGGAHANNGLRIQEFMIRPDKAKSFADGVRICFLVINSLRSLIKKMGHSTSVGDEGGFAPMISDNEGALKLIVQAIKNAGFTNGKDVSICL

SEQ ID NO: 176890 - protein, 152 aa, Unknown
  Bacterial polypetide isolated from the Sargasso Sea
IKEYQKIIKKYKIKSIEDPFAENDWLAWNKLMRSINKVQIVGDDLYVTNLERLKKGFLNISSNSILIKLNQIGTVSETLDVIKFAQTIGYKTIISHRSGDSEDTFIADLAVGTNSNQIKTGSLARSERVAKYNQLIRIEEELGKKVRMNKIN

SEQ ID NO: 176891 - protein, 154 aa, Unknown
  Bacterial polypetide isolated from the Sargasso Sea
MIVINNIFGREILDSRGNPTIEVDVILSDGTLGRSCVPSGASKGKYEALELRDNDTDRYNGLGVKDAVNNINTEILDVLSGRSPFDQNEIDRSIIELDGTPNKERLGANAILGVSLAVCNAAAKSAKTPLWKYIGGINSTSLPVPMMNIVNGGS

SEQ ID NO: 176892 - protein, 273 aa, Unknown
  Bacterial polypetide isolated from the Sargasso Sea
TKNNSATAICPSGASTGTYEAFEKRDVKSKRYLGKSVLSAVNLVNSKISKKLKGLNVHNQEKVDALMINLDGTRQKTKLGANSILAVSMAVKKVSAKEKKIPLYKNFLIKNNFKLPYPLMNIINGGVHANNGLRIQEFMIRPDRAKNFSDAIRICFLVIKNLSKLIKDKGLSTSVGDEGGFAPMIRNNNQALDLIVTAINKSGFINGKDVSICLDVAANELFKKNKYSIHSNKYVSVEKSIKEYEKIIKKYKIKSIEDPFAENDWNSWNNLMK

SEQ ID NO: 176893 - protein, 84 aa, Unknown
  Bacterial polypetide isolated from the Sargasso Sea
TVTETLEAINLATENNFASIMSHRSGETEDSFISDLAVASNCPLIKTGSLARSDRVAKYNQLLRISENENIKGYAGELSEVFKS

SEQ ID NO: 176894 - protein, 302 aa, Unknown
  Bacterial polypetide isolated from the Sargasso Sea
SVFKPIEIINKIISKRLSNINIHNQEEIDNTLIRLDGTKQKKKLGANTILAVSMAAKKLSAKIQKKPLYKTFFIKKNFKLPYPLMNILNGGAHANNNLQIQEFMIRPDRAKTFSEAVRMCFLVINNLKNLIKKKGLSTSVGDEGGFAPMINKNELALDLILKAINLSGFKNGLDISICLDVAANELYKNNKYCIHSKNYISTNESIKRYLKLIKKYKIKSIEDPFAENDWLAWSKFMSLNKNNIQVIGDDLYVTNLERLKIGFLRQSSNAILIKPNQIGTVSETLEVIKFAHLIGFKTYYFP

SEQ ID NO: 176895 - protein, 63 aa, Unknown
  Bacterial polypetide isolated from the Sargasso Sea
ALNNDYKNIISHRSGETEDSSISDLAVGTGAGQIKTGAPCRSERVAKYNRLYWIDKKNSFSFG

SEQ ID NO: 176896 - protein, 189 aa, Unknown
  Bacterial polypetide isolated from the Sargasso Sea
KPGKDIVICLDVAANELVNGKGEYSIQSKSFSSADANIDYYKKLISNYPIQSIEDPFAEEDWESWKKITNEIGKNVQIVGDDLFVTNVKRLNKGIKEKSANSILVKPNQIGTLTETLEVISMAKAAGFNTIISHRSGDTEDTFIADLASATMSSQIKTGSLARSERVAKYNRLLRIEEELGNDAKMASI

SEQ ID NO: 176897 - protein, 266 aa, Unknown
  Bacterial polypetide isolated from the Sargasso Sea
IVFSKNYNSSSICPSGASTGTYEAFEKRDKSNKKYLGKSVLKAVYIINNKISKKLKNQNVHNQEKIDSILINLDGTKQKTKIGANAILAVSMAVKKLSAKIKKIPLYKNFIIKKDFKLPYPMMNVINGGAHANNGLRIQEFMIRPDSAKSFSEAIRMCFLVIQNLKKIISNKGMSISVGDEGGFAPNIYKNEDALKLIIQAIKKAGFVNGKHISICLDVAANELFKKNKYSVHSKKLVTAKDTNKKYLKLIKKYKIKSIEDPYEEN

SEQ ID NO: 176898 - protein, 227 aa, Unknown
  Bacterial polypetide isolated from the Sargasso Sea
NSFSEAIRRSFLVIQNLKKMLDNTNVGDEGGFAPNFKSNDEAIEIIIKSIEKSGFRPDKDVSICLDVAANELKQPKNIEYYLNLIDKYPIKSIEDPFAEDEWDSWNNLTKNTNIQIVGDDLFATNKKRLNRGINEKSANAILVKLNQIGTVSETLDVIDHAQKNDFKTIISHRSGDSEDTFIADLCVATKSSQIKSGSLARSERVSKYNRLLRIEDALGNSIKMAKI

SEQ ID NO: 176899 - protein, 267 aa, Unknown
  Bacterial polypetide isolated from the Sargasso Sea
GAHANNVLRIQEFMIRPDRANNFSEAMRICFIVIKNLSKLIKNKGLSTSVGDEGGFAPMISSNKQALDLIVTAIKKSGFVNGRDVSICLDVAANELLKKNKYSIHSKNYISVEKSIKEYQKIIKKYKIKSIEDPFAENDWLAWNKLMRSINKVQIVGDDLYVTNLERLKRGFLNISSNSILIKLNQIGTVSETLDVIKFAQTIGYKTIISHRSGDSEDTFIADLAVGTNSSQIKTGSLARSERVAKYNQLIRIEEELGKKVRMNKIN

SEQ ID NO: 176900 - protein, 234 aa, Unknown
  Bacterial polypetide isolated from the Sargasso Sea
MSKIKSVKGRQVFDSRGNPTVEAEVILHDETIGTSIVPSGASTGRYEAHELRDKNNDYLNKSVFDAVKNINDKIFKALQNKDSTNQSEIDKILISLDGTENKSNLGANSILAVSIANLKAAAKFSRKEIYEYINNENKTLCMPYPLMNIINGGAHANNSLEIQEFMIRPDGAKNFKECMQMSFLVIQNLKKNLERKKISTSVGDEGGFAPSLGSDEEAIEVIMSSISASGSNQA

SEQ ID NO: 176901 - protein, 184 aa, Unknown
  Bacterial polypetide isolated from the Sargasso Sea
MSKITRVKARQVFDSRGNPTIEAEVFSNEKSSSAICPSGASTGSYEAHEKRDQKNKKYLGKSVFGPIKYINSKISKKLFNKNVHNQELIDSILINLDGTKHKTKIGANAILAVSMAVKKLSSKLKKIPLYKNFIIKKNFKLPYPMMNIINGGAHANNKLRIQEFMIRPDGAKNFSEAVRMCFLV

SEQ ID NO: 176902 - protein, 211 aa, Unknown
  Bacterial polypetide isolated from the Sargasso Sea
MKIKDIKAYEILDSRGNPTVGAEVILSDGSIGVSCVPSGASTGKYEAMEKRDSDSDRYLGKGVLNAVNSIHNEILPILRKKDASDLFGNDFLMLEADGSDSKENFGANAILAVSMACAKAASISMKINLHEYLANKASELNDKNIEQKLPIPMLNILNGGAHADNPIDFQEFMIRPFKFNSFSESLRCGVEIFHTLKKTLEEKNLNTSVGD

SEQ ID NO: 176903 - protein, 43 aa, Unknown
  Bacterial polypetide isolated from the Sargasso Sea
AGQIKTGSLSRTDRTAKYNQLLRIEEELGDNAVYAGSSILKNI

SEQ ID NO: 176904 - protein, 227 aa, Unknown
  Bacterial polypetide isolated from the Sargasso Sea
DEGGFAPQIGSCTEALEVILTAIGNAGYQPGSQIAIALDVAATELYDEDAGTYSIEGKSLDSAGMAAFLTDLAGKYPIMSIEDGFSEDDWEGWKIISDKIGDKVQLVGDDLFVTNSERLGRGIAEGIANSILVKVNQIGTLTETTAAVMLAHRSGYTSIASHRSGETEDATIADLAVGLSTGQIKTGSASRSDRVAKYNQLLRIQESLGDGALYAGRDVRLRWPGMC

SEQ ID NO: 176905 - protein, 196 aa, Unknown
  Bacterial polypetide isolated from the Sargasso Sea
MSKITKVIARQVYDSRGNPTIEAEVFANNMKARAICPSGASTGSHEAYEKRDVSNKKYLGKSVLKPVQLINKIISKKLKNQNIHNQEKIDHILIKLDGTKQKKKYGANSLLAVSMATKKLSARIKKIPLYKTFLVKNNYKLPFPLMNVINGGAHANNGLRIQEFMIRPDRAKSINEAIRMCFLVINNLKIYLKKEG

SEQ ID NO: 176906 - protein, 180 aa, Unknown
  Bacterial polypetide isolated from the Sargasso Sea
MAKISRIIGREILDSRGNPTVEADVYLESGVMGRAAAPSGASTGSREALELRDGDKSRYLGKGVTKAVAAVNDTIAPALIGKDALAQADIDGIMIDLDGTENKETLGANAILAVSLAVAKAAAAEKGVALYEHIADLNGTSGQFSMPVPMMNIINGGEHADNNVDISEFMVQPVGAKSFK

SEQ ID NO: 176907 - protein, 84 aa, Unknown
  Bacterial polypetide isolated from the Sargasso Sea
MKKRTSSAITKVVGRQIFDSRGNPTVEADVYTHKGMFRAMVPSGASTGIYEAVELRDGGKEYMGKGVAQAVKNLNEIIAPALVG

SEQ ID NO: 176908 - protein, 316 aa, Unknown
  Bacterial polypetide isolated from the Sargasso Sea
TVEAEVYSDSGLQASAIVPSGASTGTHEAFELRDKENKKYLGKSVFKAIENVNGPIAKSLINIDIGDQIKIDETLIDLDGTEQKKKLGSNAILAVSIAACKIAAIEKNVSLFKYLGNSKKSQLPIPLLNIINGGVHAKNNLDIQEFMIRPDKAKSFTEAMRISFLVIQNLKSMLDVTNVGDEGGFAPNLQSDEEAIKIIINSIEKSGFKPGEDISICLDVAANELKEPKTIDYYTQLISKYPIKSIEDPFAEDDWDSWKKLTKNTKIQIVGDDLFATNVKRLKKGIEEKSANAILIKLNQIGTVSETLNTINLAQK

SEQ ID NO: 176909 - protein, 291 aa, Unknown
  Bacterial polypetide isolated from the Sargasso Sea
KDPCHQYEIDNILISCDGTADKSKMGANAILVVSLAVALAASKLKQIPLYEHFAQIYKDISGNVPKKTIPMPMFNILNGGEHADNNVDIQEFMIIPSKAKNFSQVMQWSSEIYQSLKSILIAKKYSSAVGDEGGFAPSLNSNEEALKLIIEAIKKSNLKPGIDINLALDCASSEFYNGNDYVLKGENKIFSSLEFANYLEYLVSRYPIISIEDGMDENDIEGWQILSELIGDRCQLVGDDLFVTNKKILEGGIEKGIANSILIKFNQVGTLSETIETILCANKHNYKTIIS

SEQ ID NO: 176910 - protein, 236 aa, Unknown
  Bacterial polypetide isolated from the Sargasso Sea
KTILKSKGLNTNVGDEGGFAPNINNSKEVIEIIIKAIDETGLKIKEDIVLSLDVASTEFYSNQVYNLKGEKKKFSSDQMINYLKDLCSSYPIYSIEDGMAEDDWEGWINLTAELGHSTQLVGDDLFVTNYNRLKLGIEKKAGNSILIKLNQIGTLSETLKAVNLAKQNNFSTIISHRSGETEDTSIADLSVAVSSGQIKTGSLSRTDRTAKYNQLIRIEEILGSKAKFASKDLIKY

SEQ ID NO: 176911 - protein, 275 aa, Unknown
  Bacterial polypetide isolated from the Sargasso Sea
ILAVSMAVKKLSAKQKKLPLYKTFLVKNNFKLPYPLMNIINGGVHADNNLRIQEFMIRPDRAKTFSDAMRICFLVIKNLSKIIKNKGLSISVGDEGGFAPMISSNNQALDLIVSAIKKSGFVNGKDVSICLDVAANELFKKNKYSIHSKKYVSVEKSIREYKKIIRKYNIKSIEDPFAENDWTSWSKLMKSINKVQVVGDDLYVTNLERLKKGFLNESSNAILIKLNQIGTVSETLDVIKFAQIIGFETIISHRSGDSEDTFIADLAVGTNSNQI

SEQ ID NO: 176912 - protein, 217 aa, Unknown
  Bacterial polypetide isolated from the Sargasso Sea
MQKISSINAIQVFDSRGVPTISCKVTLEDGTSASAMVPSGASTGSKEALELRDNDISYHGKSVIKAVTNINNILSSFVIGKDPNNQKEIDESLISFDDTKDKSKVGANAILAISLAVAHVAAKANKTTLYEHFSRVYKDITGENVIHCMPLPMFNILNGGEHADNNIDIQEFMIIPSGAKSFVEVMQWATEIYHNLKKILLKNKHTTAVGDEGGFAP

SEQ ID NO: 176913 - protein, 298 aa, Unknown
  Bacterial polypetide isolated from the Sargasso Sea
SSKIKKIPIYKNLLVNKNFKLPYPLMNIINGGAHANNGLRIQEFMIRPDKAKTFSEGLRMCFIVINKLRALIKKMGYSTSVGDEGGFAPMINDNESALKLIVKAINLSGFKNGKDIVICLDVAANELHKNKHYSIHSKKYTSVDESIKNYLRLVKKYKIMSIEDPFGENDWSAWTKLLNKTKNKIQIVGDDLFVTNLERLKIGFLNISANSILIKLNQIGTVTETLEVIKFAKLIGYKTIISHRSGDSEDTFIADFAVGTDSNQIKTGSLARSERVSKYNQLLRIEQALGKKSKMHSL

SEQ ID NO: 176914 - protein, 206 aa, Unknown
  Bacterial polypetide isolated from the Sargasso Sea
MEEAIELILTSIEKAGFKPGTEVSICLDVAANELYKEKKYAVSSSKFISSNKTIEYYLDLIKKYPIKSIEDPFSEDDWDAWVNLTKHVNGKNIQMVGDDLFVTNKERLFKGIELKAGNSILIKPNQIGTLTETLEVIKLAHKNNYQTIISHRSGDSEDTYIADLAVATNSTQIKTGSLARSERVAKYNRLLWIEDDLGKTSKIAKV

SEQ ID NO: 176915 - protein, 162 aa, Unknown
  Bacterial polypetide isolated from the Sargasso Sea
MAKITNVKGRQVFDSRGNPTVEAEVFLDNDISASAISPSGASTGAFEAHELRDQDKNFFLGKSVNKAIENINNKIRSSLKGLDPADQSKIDKVLLDLDGSENKKNLGANATLAVSLANSKTSALSAKKPLYKNLGKSFSLPNPLMNIINGGAHADNDLNIQE

SEQ ID NO: 176916 - protein, 203 aa, Unknown
  Bacterial polypetide isolated from the Sargasso Sea
MTKIKNIVARQIFDSRGNPTVETDVITSNGVLGRASVPSGASTGQHEAVELRDETKDFMGKSVFRAVKNVNESIFKELKNLSVFDQELIDSKMIELDNTANKSKLGANAILSVSLAVAKAAAIEKKISLFRYLGNDKSNVLPVPLMNIINGGSHSDSPISFQEFMIVPIGASNFSHALQIGNEVFHNLKLILKSRGLSTAVEM

SEQ ID NO: 176917 - protein, 265 aa, Unknown
  Bacterial polypetide isolated from the Sargasso Sea
MKDHIISIEAMEILDSRGNPTIRTRVRLENGVCGSASVPSGASTGENEALELRDGDKSRYGGKGVLKAVENVNKKIAPELLGIAPDKQAEIDSIMLKLDGTSTKSNLGANAILSVSMAAAATAAKLNNIPLYAYLGGVSDFRLPVPMMNIINGGEHADNSVDLQEFMVIPSGAPSFSEALRYGAETFHALKEILQSKGYVTNVGDEGGFAPNLKSNEEACEVIIEAILVAGYEPGKDIFMALDAAASSFCDQGSYAFNKSGLGIK

SEQ ID NO: 176918 - protein, 257 aa, Unknown
  Bacterial polypetide isolated from the Sargasso Sea
MPVPMFNVLNGGSHAFNSTDFQEYMIVPIGIHDDIENSMHCGFKIYNELKKILESKNLPTTVGDEGGFSITFGEKNPSNIYPLEILMEAIEKSNYVPGKDVMIALDVAASEMFEGKDTNGNYLYKFEGGKFSSNQMILYYEELTKKFPIYSIEDGLDENDWDGWKKLTTLIGDRVQLVGDDLFVTQRKLLKSGIKDKVANSILIKLNQIGTVTETLDTITEAQINNFSTIISHRSGETEDTFIADLAVAAHSTQIKS

SEQ ID NO: 176919 - protein, 237 aa, Unknown
  Bacterial polypetide isolated from the Sargasso Sea
ALKSNLKSKNLNTNVGDEGGFAPNLKSTKEALDYILEAINSVGLKTNDDILISLDVASTEFFANGKYNLKGENKLFSSEEMIQYLKNLVSLYPIYSIEDGLSEDDWDGWKNLTRQLGNKIQLVGDDLFVTNFERLNNGINNNIANSILIKLNQIGTLSETLEVMKLAKKNNYNCVVSHRSGETEDTTIADLSVGMCSGQIKTGSISRTDRTSKYNQLLRIEEELGSQVSYAGKSILR

SEQ ID NO: 176920 - protein, 265 aa, Unknown
  Bacterial polypetide isolated from the Sargasso Sea
MVRPTGEHEAVELRDGGNNYMGKSVNKAVQNVNKLIANEINGKSVFNQNEIDNLMIDLDGTENKSRLGANAILGVSLACIRAASIESKKPLYKHIGGEQATTLPVPMINIVNGGSHSSAPIAFQEFMIVPVGAHSFSNAMKMGTEIFHNLKQILVSKGLNTTVGDEGGFAPSFKGTEDALETIIKSVSAAGYILEKDIKIALDCAASEFYKNGNYDYTIFEKKQGKLISSSEQIDYLSSLASKYPIISIEDGMDENDWDGWKFLT

SEQ ID NO: 176921 - protein, 308 aa, Unknown
  Bacterial polypetide isolated from the Sargasso Sea
ILGVSMAVAHASANVSNHPLYKAFSDDDSFLLPIPMMNILNGGSHANNSVDIQEFMVLPISGNTFSETLQMGTEVFHELKSVLNSKGMNTAVGDEGGFAPNLSSNEEAIEIILESILNRGLNPGKDILLALDVAASELYENGLYNLASENKKLETNEMVTYLGKLVKDYPIISIEDGLHEDDWEGWRQLNSEIGTDVQIVGDDLTVTSIKRLQRSIDEKSMNAILIKLNQIGTVSETIQAVKVAKKAGFGVVISHRSGETEDTTIADLAVGLETGQIKTGSASRTDRVCKYNQLLRIEEELGSDAKLA

SEQ ID NO: 176922 - protein, 235 aa, Unknown
  Bacterial polypetide isolated from the Sargasso Sea
AVLKARGLNTAVGDEGGFAPNLASNEDALAAIAEAVANAGYKLGDDVTLALDCASSEFFKDGKYDLEGEGKVFDAAGFADYLAGLTQRYPIISIEDGMDESDWAGWKVLTDKIGAKVQLVGDDLFVTNTKILKRGIDEKIGNSILIKFNQIGSLTETLEAIQMAKAAGFTAVISHRSGETEDSTIADLAVGTAAGQIKTGSLCRSDRVSKYNQLLRIEEQLGGKAAYNGRAEFRG

SEQ ID NO: 176923 - protein, 172 aa, Unknown
  Bacterial polypetide isolated from the Sargasso Sea
MNSSIEKIFAREILDSRGNPTVEVDVMTCDGLMGRAAVPSGASTGIHEALELRDGDKNRYLGKGVRTAVNNINNIIAPSLKGSETTEQSENDSQLLALDGTENKSNLGANAILGVSMAIAHAGAKIEKKSLYQYLGKNNAHILPMPMMNILNGGSHADNLVDIQEFMIMPFG

SEQ ID NO: 176924 - protein, 264 aa, Unknown
  Bacterial polypetide isolated from the Sargasso Sea
MPVPMFNVLNGGSHAFNSTDYQEYMIVPIGIHDDIENSMHCGFKIYNELKKILESKNLPTTVGDEGGFSITFGEKNPSNIYPLEILMEAIEKSNYEPGKDVMIALDVAASEMFEGKDTNGNYLYKFEDGKISSDQMILYYEELTKKFPIYSIEDGLDENDWDGWKKLTTLIGDRVQLVGDDLFVTQRKLLKAGIKDKVANSILIKLNQIGTVTETLDTITEAQINNFSTIISHRSGETEDTFIADLAVAAHSTQIKSGAPARGE

SEQ ID NO: 176925 - protein, 273 aa, Unknown
  Bacterial polypetide isolated from the Sargasso Sea
MIEKISNIYSRQVLDSRGNPTIYSLVETSNGNTGFSFVPSGASTGSKEALELRDNNPKFFNGKGVLKAIDNITNEIGPNLIGIDINNLNEIDSKMLEMDGTEFKSRLGANSILSVSMACTRASAASKNVELFELIRSLYNSNKDNYKIPNPMFNVLNGGSHAFNSTDFQEYMIVPVGIEDFEISISAGFQIYDKLKKLLESKNYPTTLGDEGGFAPPGLTNEEPLNLLSDAVSRTEFELGKDIKFALDVAASEIYNSTNNIYDLKSENKKLLR

SEQ ID NO: 176926 - protein, 52 aa, Unknown
  Bacterial polypetide isolated from the Sargasso Sea
FIADLAVATNAGQIKTGSLSRSDRLAKYNQLLRIEEELDRTGLYSGKAILKR

SEQ ID NO: 176927 - protein, 261 aa, Unknown
  Bacterial polypetide isolated from the Sargasso Sea
KIIKNIIGKSVFSAVSLITFKIFKKLKGQNVHDQERIDTLMINLDGTRQKSKLGANTILAVSMAVKKLSAIEKKIPLYKNFLVKNNFKLPYPLMNIINGGVHANNGLRIQEFMIRPDLARSFSEAMRMSFIVIKNLSKLIKQKKLSTSVGDEGGFAPMINNNNHALDLIVNAIKKSGFVNGKDISICLDVAANELYKKNKYSIHSNKYISVDKSIQQYKQMIKKYKIKSIEDPFAENDWLSWNKLMKSLKKVQIVGDDLYV

SEQ ID NO: 176928 - protein, 214 aa, Unknown
  Bacterial polypetide isolated from the Sargasso Sea
GFAPMINDNEDALKLIVKAIEKSGFKNGRDISICLDVAANELFKNKKYSIHSKKLLSSEKTIEKYLKLIKKFKIKSIEDPFAEDDWLSWNKFMKKINKNTQVVGDDLYVTNLERLKIGFLNKSSNSILIKLNQIGTVSETLEVIKFAQLIGFSTIISHRSGESEDTFISDLAVGTNSNQIKTGSLARSERVAKYNQLIRIEEKLGKSSKMNRIN

SEQ ID NO: 176929 - protein, 209 aa, Unknown
  Bacterial polypetide isolated from the Sargasso Sea
MAKIKNIKGRQVFDSRGNPTVEAEIILKDGHHASAIVPSGASTGTHEAFELRDNKNKDYLGKSVFSAVKNIDSVIAKSLKNVDINNQAKIDKILIDLDGTENKKKLGANAILAVSIASCKLAAVEKNIPLYKHLSNSKSFQIPVPLLNIINGGAHAKNNLDIQEFMIRPEKAKSFTESMRQSFLVIQNLRGMVDNTNVGDEGGFAPKFR

SEQ ID NO: 176930 - protein, 205 aa, Unknown
  Bacterial polypetide isolated from the Sargasso Sea
MSEIESIFAREVIDSRGNPTIEADVILHDGSRGSACAPSGASTGSREALELRDKDPGRYGGKGVLTAVNNVNLNIRDALVGGSVIEQAVLDQRMLDLDGTDNKSNLGANAILAVSLAISKAAANHLGIPLYSHISNLSGNKRTPTLPVPMMNIINGGEHADNNIDIQEFMIQPTGASSFTEALRCGVEVFHALKSVLKKGGFNTA

SEQ ID NO: 176931 - protein, 309 aa, Unknown
  Bacterial polypetide isolated from the Sargasso Sea
GVLKAVKNVNSKIAPELLGMSPDRQTEIDSMMLKLDGTSTKSNLGANAILSVSMATAATAANSYNVPLYAYLGGDSDFRMPVPMMNIINGGEHADNSVDLQEFMVIPSGASSFREALRYGTETFHALKKILQSKGYATSVGDEGGFAPNLKSNEQACEVIIEAIQSAGYEPGKDIFLAIDAAASSFCNQGSYVFQKSGSGTKNSNEMLEFYESMAENFPIVSIEDPMDENDWSGFSAITKKLGEKIQIVGDDLFVTNKEFVRKGITEKAANAVLIKLNQIGTVSETLATIQLCQKVGWNYIISHRSGET

SEQ ID NO: 176932 - protein, 117 aa, Unknown
  Bacterial polypetide isolated from the Sargasso Sea
MDNSTIYKIIAREILDSRGNPTIEVDVTLSDGSLGRAAVPSGASTGEHEAVELRDNDALRYLGKGVKKAVKIVNTTIANEIIGLDALNQKNIDEAMISLDGTSNKSKLGANSILGIS

SEQ ID NO: 176933 - protein, 248 aa, Unknown
  Bacterial polypetide isolated from the Sargasso Sea
AFQEFMIIAWLKLKALVMTVKMGSEIFHHLKKILSERKLSTAVGDEGGFAPKLDGTEDALETIIRSISSAGYRAGDDVMIALDCASSEFYENGKYDYRIFEGEDAKVLNSEEQADYLSELVDKYPIISIEDGMDENDWDGWKYLTKISGDKVQLVGDDLFVTNEKILQKGISENAGNSILIKVNQIGTLTETINAVRLAQKNGYTTVMSHRSGETEDYTISDLSVALGTGQIKTGSMSRSDRISKYNQ

SEQ ID NO: 176934 - protein, 158 aa, Unknown
  Bacterial polypetide isolated from the Sargasso Sea
MIDFLDSLSSEYPIISIEDGLAEDDWEGWKSMTDQIGNNVQLVGDDLFVTNTDRLRRGVEEKIANSILIKFNQIGTLTETLNAISMAKKASYTSMISHRSGETEDHFIADLAVATNAGQIKTGSLSRSDRLSKYNQLLRIEEFLGKNALYNKEQNFYK

SEQ ID NO: 176935 - protein, 227 aa, Unknown
  Bacterial polypetide isolated from the Sargasso Sea
MSIIKQVKAREIIDSRGNPTLEVDVYLNSGDFGRASVPSGASTGKHEALELRDCNSKIFHGKGVTNAVNSVNNEINSLLVGKNVHEQELIDQSMIEIDGTSNKSNLGANAILGTSIAVAQASASFNKNPLYRNFFSVSQTKYKLPMPMMNILNGGMHANNDLDIQEFMIIPTSANSFFNAVRMGCEVFHTLKKILHKKNFSTAVGDEGGFAPQLSNTNVAIEMILMA

SEQ ID NO: 176936 - protein, 302 aa, Unknown
  Bacterial polypetide isolated from the Sargasso Sea
AMFPSGASTGAHEAHELRDGGSKYMGKGVLNAVNKIHETISPALCGLSALDQTVVDKLMIEIDGTLNKSNLGANSILAVSLATARASANALEIPLYRYLGDPLSNLLPVPLMNVINGGAHAPNSLDFQEFMLVPHGVNNFSDSLRMGTEIFHSLKSLLNQKGLSTAVGDEGGFAPNLSSSEEAGDLLLEAIQKAGFKPGEQVSLALDAASTEFYSDGIYKYEGKSLNSSEMISYLSKLVSNYPIVSIEDGLAEDDWDGWSELNKELGNKVQLVGDDLFVTNTERLKKGIMEKSANSILIKVN

SEQ ID NO: 176937 - protein, 120 aa, Unknown
  Bacterial polypetide isolated from the Sargasso Sea
SVLGNNVQIVGDDLFVTNSKRLEKGINENSANSILVKPNQIGTLTETLDVISMAKKANFSTIISHRSGDTEDTFIADLAVATMSSQIKTGSLARSERVAKYNRLLRVEEELGNHAKMAKI

SEQ ID NO: 176938 - protein, 185 aa, Unknown
  Bacterial polypetide isolated from the Sargasso Sea
ISFALDAASTEFFNDGKYIIEGNALSNTEMSDYLIGLSNLYPIVSIEDGLAEDDWEGWKYLTSKIGENVQLVGDDLFVTQEKILQKGINEECANSILIKVNQVGSVTETIETMKLANKNNYTSMVSHRSGETEDSFISHLVVGTSSGQIKTGAPARGERTAKYNELLRIAEQVGFENFNNKKWEL

SEQ ID NO: 176939 - protein, 258 aa, Unknown
  Bacterial polypetide isolated from the Sargasso Sea
TWFNAILAVSMAACKIAAIKKNVSLFKYLGNSKSSQLPVPLLNIINGGVHAKNNLDIQEFMIRPEKAKSFSEAMRLSFLVIQNLKLMLDNTNVGDEGGFAPNLKSNEEAIEIIIKAIEKSGFKPGEDLSICLDVAANELKESKTIDYYSELISKYPIKSIEDPFTEDDWESWKKLTKNTKIQIVGDDLFVTNVKRLKKGIEEKSANAILIKLNQIGTVSETLDAIDLAQKNNFKTIISHRSGDTEDTFIADLAVATNS

SEQ ID NO: 176940 - protein, 141 aa, Unknown
  Bacterial polypetide isolated from the Sargasso Sea
NKIYSRNPFAENDWKAWNNLMRLTKKVQIVGDDLYVTNLERLKKGFLNISSNAILIKPNQIGTVSETVDVIKFAQMIGFNTIISHRSGDSEDTFIADLAVGTNSNQIKTGSLARSERVAKYNQLIRIEENLGKKARMNKIH

SEQ ID NO: 176941 - protein, 62 aa, Unknown
  Bacterial polypetide isolated from the Sargasso Sea
EENNFKNIISHRSGETEDAFIADLSVGMGVGQIKTGAPSRSDRVAKYNRLLMIEKNSNICFG

SEQ ID NO: 176942 - protein, 219 aa, Unknown
  Bacterial polypetide isolated from the Sargasso Sea
MSKIKRVVARQVYDSRGNPTIEAEVFSNSLSASAICPSGASTGTFEAYEKRDKTNKKYLGKSVLIPVATVNKLISKKLKNQNIHDQERIDSILIKLDGTKQKTKLGANTILAVSMAVKKLSAKVKKIPLYKNFIVKKNFKLPFPLMNIINGGAHADNGLRIQEFMIRPDKARSFNDAVRMCFLVINNLKLLLKKAGHSINVGDEGGFAPNDSDHESALR

SEQ ID NO: 176943 - protein, 249 aa, Unknown
  Bacterial polypetide isolated from the Sargasso Sea
PHGAPSFREALRMGTEVFHTLKGLLKAKGMSTSVGDEGGFAPDLGNVEAGEILVEAITKAGYQPGEQISLALDVASTEFFENGRYAFDGGSYDSAEMVGQLEQLVEKFPIVSIEDGLAEDDWEGWKLLTERLGGKVQLVGDDLFVTNTKRLQQGIDSATANSILIKVNQIGSLTETLQAIDLAGRSGYTSVISHRSGETEDTTIADLSVATRAGQIKTGSLSRSERVAKYNQLLRIEDELAARLSMPEL

SEQ ID NO: 176944 - protein, 145 aa, Unknown
  Bacterial polypetide isolated from the Sargasso Sea
DDLIQNYPIVSIEDGMNENDKDGWKLLTERLGSKCQLVGDDLFVTNKKILKDGINEEMANSILIKFNQVGSITETIETIHFANQNNFESIISHRSGETEDTTIADLAVGLGIGQIKTGAPCRSDRVAKYNRLLWIEEESSNILLK

SEQ ID NO: 176945 - protein, 185 aa, Unknown
  Bacterial polypetide isolated from the Sargasso Sea
MHKITKVVGRQVFDSRGNPTVEAEVFSNNISSIAISPSGASTGTFEAFEKRDIYNKKYLGKSVFKSVEIINKKISKKIKNQFVHNQEKIDHILIKLDGTKQKSKIGANTTLAVSMAVKKLSAKLRKIPLYKSFLLRNNYKLPYPLMNIINGGAHANNGLRIQEFMIRPDGAKSFSESLRMCFLVI

SEQ ID NO: 176946 - protein, 81 aa, Unknown
  Bacterial polypetide isolated from the Sargasso Sea
AILIKLNQIGTLTETLSCIELAKQHNFGTIISHRSGETEDTFISDLAVATDTKQIKTGAPARSDRTAKYNRLLVINDELYP

SEQ ID NO: 176947 - protein, 174 aa, Unknown
  Bacterial polypetide isolated from the Sargasso Sea
MTAIIDITAREILDSRGNPTVEVDVMLEDGSIGRAAVPSGASTGVYEALELRDEDQNRYLGKGVLKAVEAVNGEIFDAVSGRDATDQNGLDHTLISLDGTPDKSRLGANAILGVSLALAKASAVSKKMPLYRYIGGVSACILPTPMMNIINGGAHADNGLDFQEFMIMPVLAGN

SEQ ID NO: 176948 - protein, 267 aa, Unknown
  Bacterial polypetide isolated from the Sargasso Sea
MKDRIISIEAMEILDSRGNPTIRTRVILENGVCGTASVPSGASTGENEALELRDGDENRYGGKGVLNAVENVNRKIAPELLGMNPDMQVEIDKTMLKLDGTSSKRKLGANAILSVSMATAKTAAKSQNVPLYAYLGGVSGFRLPVPMMNIINGGEHADNSVDLQEFMVIPSGAPSFREALRYGAETFHALKKILQSKGYATSVGDEGGFAPNLKSNEEACEVIIEAIQAAGYEAGKDIFLALDAAASSFCNQGSYVFQKSGSGTKNS

SEQ ID NO: 176949 - protein, 238 aa, Unknown
  Bacterial polypetide isolated from the Sargasso Sea
MALDKKPILGANAMLAVSMAVKKLSAKVKKLPLYKTFFVKNNFQLPYPLMNIINGGAHANNGLRIQEFMIRPDKAKSFSEAMRVCFVVIKNLSKLIKNKGLSTSVGDEGGFAPMISSNNQALDMIVSAIKKSGFKNGKDVSICLDVAANELFKKNKYSIHSKNYISVEKSINEYQKIIKKFKIKSIEDPFAENDWQAWNKLMRSVNKVQIVGDDLYVTNLERLKKGFLNISSNSILVK

SEQ ID NO: 176950 - protein, 308 aa, Unknown
  Bacterial polypetide isolated from the Sargasso Sea
MAKITNVKGRQVFDSRGNPTVEAEVFLDNDISASAISPSGASTGAFEAHELRDQDKNNFLGKSVNKAIDNINNKIRSSLKGLDPADQSKIDKVLLDLDGTENKKNLGANATLAVSLANFKSSALSAKKPLYKKLGKSFSLPNPLMNIINGGAHADNDLNIQEFMIRPDSAKTFMDALEKSFLVIQNLKILLKSKKMLTNVGDEGGFAPSIDTNEEALELIVNAIEKSKLIPGKDIVICLDVAANELKNKDGKYSIQSKNFTSADNVINYYKKLTSIYPIASIEDPFAEEDWNSWKKITTEMEKITNCW

SEQ ID NO: 176951 - protein, 271 aa, Unknown
  Bacterial polypetide isolated from the Sargasso Sea
GLDFQECMIMPIGFSSFTEALRAGVEIFYNLKKILSEKGLSVAVGDEGGFAPNIDNLEEALSYISEAVELSKYKLGEEIFISIDAAATELYKNNFYVLKGENKKLNSDQFIKYWEDICQKFPIVSIEDPFDENDWESFKELTKLLGHKVQIVGDDLFVTNKQRLLDGIKNNTANAILIKLNQIGTLSETLETIELAKNSNFGVIISHRSGETEDTFISDLSVGLNAGQIKTGSLSRSDRTAKYNQLLRIEETLGTNAHYYGKQFFNIISFS

SEQ ID NO: 176952 - protein, 56 aa, Unknown
  Bacterial polypetide isolated from the Sargasso Sea
DVFISDLSVALNTGQIKTGSLSRSDRTAKYNQLLRIEESLGDNAHYYGKDFFNLQI

SEQ ID NO: 176953 - protein, 69 aa, Unknown
  Bacterial polypetide isolated from the Sargasso Sea
FAQKIGYQTIISHRSGDSEDTFISDLAVGTNSSQIKTGSLCRSERVAKYNQLLRIEQEITSKNNMARLK

SEQ ID NO: 176954 - protein, 41 aa, Unknown
  Bacterial polypetide isolated from the Sargasso Sea
IKTGSLSRSDRTAKYNQLLRIEEELGDRCYYPGRSEFNKYI

SEQ ID NO: 176955 - protein, 184 aa, Unknown
  Bacterial polypetide isolated from the Sargasso Sea
MSEIISVKAIQVLDSRGNPTVEAEVTLEDGTTGLASVPSGASTGSREAVELRDGDKDIYLGKGVSAAVKNINSEIQSALKNQDIYDQSKIDQIMIDLDGTENKSRLGANAILAVSLACIKAAAASKDIRLFKHLSPGPYTFPVPMMNIINGGEHANNNIDIQEFMILPVNFDRFSDALRAGVEI

SEQ ID NO: 176956 - protein, 89 aa, Unknown
  Bacterial polypetide isolated from the Sargasso Sea
MTQITDIHAREVLDSRGNPTIEAEVTTESGFFGRAIVPSGASTGSREAVELRDSRKKRYQGKGVQKAVENVNNIIANELIGLDVQDQIA

SEQ ID NO: 176957 - protein, 235 aa, Unknown
  Bacterial polypetide isolated from the Sargasso Sea
MNSSIEKVYAREILDSRGNPTIEVDIYTKSGHLGRAAVPSGASTGEYEAIELRDMDSERYFGKGVKKAVNNINSIIFESIIGLDVTKQEEIDNMMIKLDGTENKSRLGANAILGVSLAIAHANAKVSNHPLYKTFSSDNKFLLPIPMMNILNGGSHANNSVDIQEFMVMPITGNTFSETLQMGTEVFHELKSVLNSKGMNTAVGDEGGFAPNLSSNEEAIEVILESIINRGLKPG

SEQ ID NO: 176958 - protein, 297 aa, Unknown
  Bacterial polypetide isolated from the Sargasso Sea
MLFGKTKISKKLKGQSIHNQERIDTLLINLDGTRQKTNLGANAMLAVSMAVKKLSAKVKKLPLYKTFFIKKNFQLPYPLMNIINGGAHANNGLRIQEFMIRPDRAKNFSEAMRICFIVIKSLSKLIKNKGLSTSVGDEGGFAPMISSNNQALDLIVSAIKKSGFVNGRDVSICLDVAANELFKKSKYSIHSKTYISVEKSIKEYQKIIKKYKIKSIEDPFAENDWLAWNKLMRSINKVQIVGDDLYVTNLERLKKGFLNISSNSILIKLNQIGTVSETLDVIKFAQTIGYKTIISHR

SEQ ID NO: 176959 - protein, 238 aa, Unknown
  Bacterial polypetide isolated from the Sargasso Sea
MPVPAFNIINGGSHAGNKLAMQEFMILPVGATTFSEVRRSSKQGKAPRLRPTRALRGAPNTAGDENGLGGVPQPQRRDQEEVWPGCVQRWRRGRLRAEHPGQHGRSRSRGRGDREGGLHRCRAAIPRHCVPVHDLPFARPFAGLPRGTMFCPTRHAGKVKIGMDVAASEFWKDEKKVYDLDFKTEMNDGTQCKTGEQLGELYASFCRDYPMVSIEDPFDQDDFESCARSPMHARPPQL

SEQ ID NO: 176960 - protein, 125 aa, Unknown
  Bacterial polypetide isolated from the Sargasso Sea
WSKLMKSLQKVQIVGDDLYVTNLERLKKGFLNLSSNAILIKLNQIGTVSETLDVIRFAQTIGFKTIISHRSGDSEDTFIADLAVGTNSNQIKTGSLARSERVAKYNQLLRIEEELGKKARMNKIH

SEQ ID NO: 176961 - protein, 295 aa, Unknown
  Bacterial polypetide isolated from the Sargasso Sea
MPKIENLTSIQVLDSRGLPTISTEILLDDGTRSVAMVPSGASTGKKEALELRDGGQAFLGKGVTKAIDNVNDRIKNSLIGENPLDQDHIDQILNNLDGTTDKSNLGANAILSVSIASAKASSKSENLDLHNYFNILLGNKMGKTIDQVIPIPMLNILNGGEHADNNIDIQEFMIIPKGAVNFSQAMQWSSEIYWNLKSILKEKGLSTAVGDEGGFAPNLKTNREALELMARAVDKTDLKLGSDICISLDCAASEFYENGTYHLKGEDRELTSSEFAEYLEGLANDFPIISIEDGD

SEQ ID NO: 176962 - protein, 238 aa, Unknown
  Bacterial polypetide isolated from the Sargasso Sea
ICPSGASTGTYEAYEKRDKSNRKYLGKSVLKPVSIINKIISKKLKNQNVHNQERIDHILIKLDGTKQKSKIGANAILAISMAVKKLSAKIRKIPLYKNFTIKKNFKLPYPMMNIINGGAHANNGLRIQEFMIRPDKAKTFAEGVRICFLVINSLRILIKKMGHSTSVGDEGGFAPMISDNENALKLIVQAIKNAGFTNGKEVSICLDVAANELIKKGKYSIHSKKYISVDQSIQKYLK

SEQ ID NO: 176963 - protein, 272 aa, Unknown
  Bacterial polypetide isolated from the Sargasso Sea
IEAEVYVKNKSAKAICPSGASTGTYEAYEKRDTNNKRYLGKSVFSAINLINYKISKALRNKNIHDQERIDEILINLDGTKQKTKLGANAILSVSMAAKKLSAKVKRIPLYKSFYVTKNFQLPYPLMNIINGGAHANNGLRIQEFMIRPDKAKSFSEAMRICYLVIKNLSKLIKTKGLSTSIGDEGGFAPMINNNYQALDLIVSSIKKSGFRNGKDVSICLDVAANELFKKGKYSIHSKKYVSVDKTIIEYKKMINKYKIKSIEDPFSENDGH

SEQ ID NO: 176964 - protein, 286 aa, Unknown
  Bacterial polypetide isolated from the Sargasso Sea
QSKIDKVLLDLDGSENKKNLGANATLAVSLANSKSSALSFKRPLYKSLGKSFSLPNPLMNIINGGAHADNDLKIQEFMIRPDSAKNFIDAVEKCFLVIQNLKILLKSKKMLINVGDEGGFAPSINTNEEALELIVHAIENANLKPGIDIVICLDVAANELMNKEGKYSIQSSNFNAVDDVIVYYKKLISSYPIKSIEDPFAEEDWNAWKKITSEIGKKVQIVGDDLFVTNSKRLKKGIDNKSANSILIKPNQIGTLTETLEVVTMAKKANFNTIISHRSGDTEDTF

SEQ ID NO: 176965 - protein, 285 aa, Unknown
  Bacterial polypetide isolated from the Sargasso Sea
FDKSVFDAVKNINNKISKALQNKDSTNQSEIDKILISLDGTENKSNLGANSILAVSIANLKAAAKFSRKEIYEYINNKNKHFCIPYPLMNIINGGAHANNSLEIQEFMIRPDGAKNFKECMQMSFLVIQNLKKDLEGKKISTSVGDEGGFAPSLGSDEEAIEVIINSISASGFKPGKDISICLDVAANELKVPKNVQYFLDLVKKYPIKSIEDPFSEDDWDNWKNLTEKIKAQIVGDDLFVTNKKRLEKGIKEKSANSILIKPNQIGTVSETLETIKLAKDNNFK

SEQ ID NO: 176966 - protein, 307 aa, Unknown
  Bacterial polypetide isolated from the Sargasso Sea
TYEAFEKRDKKNKKYLGKSVLSAVNVINNKISNKLKGLNIHNQERIDAIMINLDGTRQKTKIGANAILAVSMAVKKLSAKLKKIPLYKSFLIKKNFQLPYPLMNIINGGVHANNGLRIQEFMIRPDKAKSFSEAMRICFVVIKNLDKLIKNKGLSTSVGDEGGFAPMISSNNQALDLIVTAIKKSGLVNGKDISICLDVAANELFKKNKYSIHSKKYISVDKSIFKYKQMVNKYKIKSIEDPFAENDWTAWNKLMRSTKKIQIVGDDLYVTNLERLKKGFLNISSNAILIKLNQIGTVSETLDVISF

SEQ ID NO: 176967 - protein, 188 aa, Unknown
  Bacterial polypetide isolated from the Sargasso Sea
LFKTFLVKNNFKLPYPLMNIINGGAHANNGLRIQEFMIRPDRAKNFSDAMRICYVVIKNLSKIIKNRGLSTSVGDEGGFAPMISSNNQALDLIVSAIKKSGFVNGRDVSICLDVAANELYKKGKYSIHSKSFISVEKSIKEFNKIITKYKIKSIEDPFAENDWISWNKLMKNTSKVQIVGDDLYVTNL

SEQ ID NO: 176968 - protein, 232 aa, Unknown
  Bacterial polypetide isolated from the Sargasso Sea
MNTTIEKLIAREILDSRGNPTIEVDIITNLGSFARASVPSGASTGEYEAIELRDKDNTRYLGKGVKNVVNDINTKIASALKGFDVTKQEEADSLLIALDGTENKSNLGANAILGTSMAIAYAGAQASEEKLFQYLSSNKSTVLPVPMMNILNGGSHADNSVDIQEFMVMPFGANTFSEALRMGTEIFHHLKEVLKSQNMTTSVGDEGGFAPDLRSNEEAIEIILEATEKAGL

SEQ ID NO: 176969 - protein, 139 aa, Unknown
  Bacterial polypetide isolated from the Sargasso Sea
MKIQNIEGFEVIDSRGNPTVAARVNLETSISALAMVPSGASTGQHEANEKRDKDANRYLGKGVSGAVNAINTELSSLLKGKDIFDLLANDRLMIDTDGTCNKSNLGANAILAVSMASAKAASMASKIPLHTFLNNKYSE

SEQ ID NO: 176970 - protein, 283 aa, Unknown
  Bacterial polypetide isolated from the Sargasso Sea
PMMNILNGGAHADNPINIQEFMIIPANFNSFRESLRAGAEVFKYLKENLSSKSLSTSIGDEGGFAPNLASTKDAIEIIIKSISDAGYTSGKDIFLALDAASSEFFNDNKYQVEPQGEAETVEGMINFYEQLIKDYPIISIEDAMAEDDWDGWKKLTSSIGDKCQLVGDDLFVTNEQRFLKGINSDIANSILIKVNQIGTLTETLNAIAIAKNHDYSCVISHRSGETEDTTIADLSVATNAGQIKTGSLSRSDRTAKYNQLLRIEEELGDRCYYPGLSEFSKYI

SEQ ID NO: 176971 - protein, 200 aa, Unknown
  Bacterial polypetide isolated from the Sargasso Sea
MPLKSPGYKLKKDFCIALDVAASEFYKNGKYKLISENKPFSTDQFIKYLCNLINKYPIVSIEDPFDEDDWDSWSKLVELIGDKVQIVGDDLFTTNLERLKKGVKNNSANAILIKLNQIGTLTETIECINYAVASNFEVIISHRSGETEDTFIADLAVGTNAGQIKTGSMSRSDRTSKYNQLLRIEELISSKNTMKTNKFF

SEQ ID NO: 176972 - protein, 40 aa, Unknown
  Bacterial polypetide isolated from the Sargasso Sea
GQIKTGSLCRSDRTAKYNQLIRIEEELGEQAEYSKDFLKH

SEQ ID NO: 176973 - protein, 134 aa, Unknown
  Bacterial polypetide isolated from the Sargasso Sea
WKLLTERLGGKVQLVGDDLFVTNTKRLQQGIDNATANSILIKVNQIGSLTETLQAIDLAGRSGYTSVISHRSGETEDTTIADLSVATRAGQIKTGSLSRSERVAKYNQLLRIEDELGNQAVYAGAVGQGPRGKG

SEQ ID NO: 176974 - protein, 148 aa, Unknown
  Bacterial polypetide isolated from the Sargasso Sea
MAKIINVIGREIMDSRGNPTVEAEVHLEGGFIGMAAAPSGASTGSREALELRDGDKSRYLGKGVLTAVANVNGLIRAALIGKDATAQAELDQIMIDLDGTENKDKLGANAILAVSLAAAKAAAAFKGMPLYAHIGGLNGTPGQYAMPV

SEQ ID NO: 176975 - protein, 131 aa, Unknown
  Bacterial polypetide isolated from the Sargasso Sea
NDCSAGTKLLNKQKNKIQIVGDDLFVQNLERLKIGFLNISANSILIKLNQIGTLTETLEVIKFAKLIGYKTIISHRSGDSEDTFIADFAIGTDSNQIKTGSLARSERVSKYNQLLRIEHELGKKSKMHIID

SEQ ID NO: 176976 - protein, 246 aa, Unknown
  Bacterial polypetide isolated from the Sargasso Sea
LINKNYKLPFPLMNVINGGVHANNGLRIQEFMIRPDRAKSFSEAIRMCFLVINNLKKIIIKEGLSTSVGDEGGFAPMINNNEKALKLIVKAIKTSDYINGKDISICLDVAANELFKSNKYSIHSKKYINSNLTIKKYKSLIKKFKISSIEDPFAENDWPSWNKLMKNKNSNLQIVGDDLYVTNLERLKIGFLNNSSNSILIKLNQIGTVTETLEVIKFSHLIGFKTIISHRSGESEDTFIADLAVG

SEQ ID NO: 176977 - protein, 317 aa, Unknown
  Bacterial polypetide isolated from the Sargasso Sea
NILEKGVSKVVHSINSEINEYLKGFSPLNQKKLDQKLIELDGTENKSRLGANAILGVSLAAARVSSQIKSESLYKYLSEYNEYILPTPLMNVINGGAHANNALDFQEIMIMPVGAKTFSEALRWGAEIFHHLKLVLSENSFSTSVGDEGGFSPEINNVEEALELLSKAIKNAGRNLDSDINFALDAASSEFYKNNFYEMNNGQTKIDTNDMIKIWEKLVREYPIISLEDPLEENDFEGYKELTNLIGNKIQIVGDDLFATNMNRLTKGINSGAANSILIKLNQIGTLSETIETVNLAKKDNFGTIISHRSGKLRIHL

SEQ ID NO: 176978 - protein, 166 aa, Unknown
  Bacterial polypetide isolated from the Sargasso Sea
YSIHSKSFISVKKSIDEYINLIKKYKIKSIEDPFAEDDWVAWHRLMKSIKKVQIVGDDLYVTNLERLKKGFLNISSNAILIKLNQIGTVTETLDVIKFAQIIGFKTIISHRSGDSEDTFIADLAVGTNSNQIKTGSLARSERVAKYNQLIRIEEELGKKARMNKIY

SEQ ID NO: 176979 - protein, 98 aa, Unknown
  Bacterial polypetide isolated from the Sargasso Sea
KKGISEKSANAILIKPNQIGTVTETLDAIKVAHENKFETVISHRSGDSEDTFIADLAVATKSSQIKTGCLARSERVSKYNRLLRIEEELGNSAKIAKI

SEQ ID NO: 176980 - protein, 251 aa, Unknown
  Bacterial polypetide isolated from the Sargasso Sea
MNSSIEKVYAREILDSRGNPTVEVDIYTKSGHLGRAAVPSGASTGEYEAIELRDMDSERYLGKGVRKALNNINSIISEAIIGLDVTKQEEVDNMMIKLDGTENKSRLGANAILGVSLAIAHASAGVSNHPLYKIFSDDDKFLLPMPMMNILNGGSHANNSVDIQEFMIMPISGNTFSETLQMGTEVFHELKSVLNSKGMNTAVGDEGGFAPNLSSNEEAIEIILESIIKRGLKPGKDILLALDVAASELYE

SEQ ID NO: 176981 - protein, 233 aa, Unknown
  Bacterial polypetide isolated from the Sargasso Sea
KGFSTNVGDEGGFAPNLSSNEEAIEYVILAIEKAGFVPGDDVYIALDAAASEFYNSETNTYFFESTSQELTSEQLVDFWKEWSEKYPIISIEDGLAEDDWSAWKSLTDKIGDKVQLVGDDLFVTNTKRLQRGITEGIANSILIKVNQIGSLSETIDAVNLATENGYTSVMSHRSGETEDYTIADLAVALNTGQIKTGSASRSDRMSKYNQLLRIEEELGSKAVYPGKTLRFLK

SEQ ID NO: 176982 - protein, 159 aa, Unknown
  Bacterial polypetide isolated from the Sargasso Sea
YISVEKSVKEYQKIIKKYKIKSIEDPFAENDWLAWNKLMRSINKVQIVGDDLYVTNLERLKKGFLNISSNSILIKLNQIGTVSETLDVIKFAQTIGYKTIISHRSGDSEDTFIADLAVGTNSNQIKTGSLARSERVAKYNQLIRIEEELGKKVRMNKIN

SEQ ID NO: 176983 - protein, 293 aa, Unknown
  Bacterial polypetide isolated from the Sargasso Sea
MIVINNIIGRQILDSRGNPTVEVDVVLSDGTLGKSCVPSGASKGKYEALELRDKDTKQFHGLGVKKAINHINTEILDVLSGRSPFEQNEIDKSMIDLDGTPNKKRLGANAILGVSLAVCDAAAKSMNVPLWKYIGGINSTYLPVPMMNIINGGSHSNNNLDIQEFMIMPVGFDNFKDALRSGVEIFQSLRTLLSEKGLSTNVGDEGGFAPELNSANEALELISIAIEKTGYKVGEEIYFALDAASTEFYKNGKYYLSQGKDILSSSELMNYWLNLTSKFPILSIEDPFSEDDI

SEQ ID NO: 176984 - protein, 257 aa, Unknown
  Bacterial polypetide isolated from the Sargasso Sea
FCITIPLMNIINGGAHADNDLNIQEFMIRPDSATNFMNAIEKCFLVIQNLKELLKSKKMLTNVGDEGGFAPSINSNEEALELIVNSIEKSNLKPGKDIVICLDVAANELINEKGEYCIQSQNFITVDEVIKYYKKITSKYPIKSIEDPFAEEDWESWKKITNEIGNVVQIVGDDLFVTNSKRLNRGIKEKSANCILVKPNQIGTLTETLDVISMAKKGNFRTIISHRSGDTEDTFIADLAVASMSSQIKTGSLARSE

SEQ ID NO: 176985 - protein, 227 aa, Unknown
  Bacterial polypetide isolated from the Sargasso Sea
NISQRGMSISVGDEGGFAPMISNNEEALKLIVKSIEKAGFKNGKHISICLDVAANELYKKKKYSVHSNKYLNVDQTISKYLKLVKKFKIKSIEDPFAENDWMAWSKFNKFSKKLQIVGDDLYVTNLERLKKGFLFESSNSILIKLNQIGTVSETLDVIRFAKNIGYSTIISHRSGDSEDTFIADLAVGTNSNQIKTGSLSRSERVSKYNQLIRIEEELGSRARMNRI

SEQ ID NO: 176986 - protein, 135 aa, Unknown
  Bacterial polypetide isolated from the Sargasso Sea
MDENDLKGWKFLTKELGQKCQLVGDDLFVTNVNELKEGIQNNAANSILIKFNQVGTIKETFETFLLAKNNNIKTIISHRSGETEDTTISDISVGLCAEQIKTGAPARSDRTSKYNRLLFIESENLSLDYANKIFN

SEQ ID NO: 176987 - protein, 295 aa, Unknown
  Bacterial polypetide isolated from the Sargasso Sea
QSKKTTFCIKLFSQKNNFQLPYPLMNIINGGAHANNGLRIQEFMIRPDRAKSFSEAMRICFVVIKNLNKLIKARGLSTSVGDEGGFAPMISSNNQALDLIVNAIKKSGFINGKDVSICLDVAANELFKKNKYSIHSKNYISAEKSIKEYQKIIQKYKIKSIEDPFAENDWLAWNKLMKSIKKVQIVGDDLYVTNLERLKKGFLNISSNSILIKLNQIGTVSETLDVIKFAQTIGYKTIISHRSGDSEDTFIADLAVGTNSNQIKTGSLARSERVAKYNQLIRIEEELGKKARMNK

SEQ ID NO: 176988 - protein, 126 aa, Unknown
  Bacterial polypetide isolated from the Sargasso Sea
AWNKLMRSINKVQIVGDDLYVTNLERLKKGFLNISSNSILIKLNQIGTVSETLDVIKFAQNIGYKTIISHRSGDSEDTFIADLAVGTNSNQIKTGSLARSERVAKYNQLIRIEEELGKKVRMNKIN

SEQ ID NO: 176989 - protein, 204 aa, Unknown
  Bacterial polypetide isolated from the Sargasso Sea
MAKIKSIKGRQVFDSRGNPTVEAEVLLENNISATAISPSGASTGAFEAHELRDKDENKFLGKSVNIAVENINKKISNELKGLDSDDQKNVDKILLDLDGSENKTNLGANATLAVSLANCKCSALSNKKSLFKNLGNSFSLPIPLMNIINGGAHADNDLNIQEFMIRPDSAKNFMDAIEKCYLVIQNLKKILKSNKMLTNVATKA

SEQ ID NO: 176990 - protein, 81 aa, Unknown
  Bacterial polypetide isolated from the Sargasso Sea
MKDHIISIEAMEILDSRGNPTIRTRVILDNGVCGTASVPSGASTGENEALELRDGDKSRYGGKGVLKAVENVNKKIAPELT

SEQ ID NO: 176991 - protein, 180 aa, Unknown
  Bacterial polypetide isolated from the Sargasso Sea
MNEERVVSEIVDVRAFEVLDSRGNPTVMAEVTLDDDSVGSACAPSGASTGTREALELRDGDASRYLGKGVLTAVGHANGSIRELLVGHDALDQAGVDQRMIEADGTDNKAQFGANAILAVSLATAKAAALSVRKPLYQHIAELSGCTAMSLPVPMMNILNGGEHADNNVDIQEFMIQPVS

SEQ ID NO: 176992 - protein, 244 aa, Unknown
  Bacterial polypetide isolated from the Sargasso Sea
MSIIIKILARQILDSRGNPTVEVDVYTESGIFGRAAVPSGASTGEHEAVELRDGGNSFMGKGVMTAVNNINDVLSEEIIGLSVFDQNKIDKLMIDLDGTKNKSKYGANALLGISLAISKAAANELGIPLYRYIGGISANTLPVPMMNIINGGSHSDAPIAFQEFMIIPLMAKSFSHSMQMGTEIFHNLKKVLNKKALSTAVGDEGGFAPKLKGTEDALETILESIKNAGYKPGEEVMIALDCAS

SEQ ID NO: 176993 - protein, 256 aa, Unknown
  Bacterial polypetide isolated from the Sargasso Sea
TGEFEALELRDGDSKRFNGKGVLKAVDNVINSFGPALVGKDASNQKEIDDLLINIDGTTNKSALGANASLGISMACSVVSAAFYNKPLYNYLNPNSIVMPVPMINVLNGGMHADQGSDMQEIMLFPHGAKNFKHSLQMGSEIFHCLKKELKKQGMETTVGDEGGFAPALHSNDHAIELLLNSIEKAGFNIGRDVSLALDVAASSFYKDHKYHLKVDGSVLDNDGMINFYEDLIKKYPIVSIEDGLDENDWEGWNKL

SEQ ID NO: 176994 - protein, 209 aa, Unknown
  Bacterial polypetide isolated from the Sargasso Sea
MVKITNVKGRQVFDSRGNPTVEAEVFLDNDISATAISPSGASTGAFEAYELRDQDKNNFLGKGVKKAIENINKDIASGLKGEDPANQTKVDKILLDLDGSENKRNLGANATLAVSLANSKSAALSAKKPLYKNLGKTFSLPNPLMNIINGGAHADNDLNIQEFMIRPDSAINFIDAIEKCFLCIQKLKSLLKSKKMLTNVGDEGGFAPS

SEQ ID NO: 176995 - protein, 234 aa, Unknown
  Bacterial polypetide isolated from the Sargasso Sea
FTAVGDEGGFAPNLAKAEDALELIAKATESAGYSLGEQVFIALDPATSEMVGEAKKQGKEGYCFFKSDPSRVASTDEMIDLWAGWCERWPIRSIEDGLDENDWDGWRKLTERLGDQVQLVGDDLFVTNPNFLGRGIEEGCANAILVKVNQIGTLTETLQAVAMGARHGYAAVLSHRSGETEDSVIADLAVATNCGQIKTGAPCRSDRTAKYNQLLRIAEQLGDDAEYGNVTWTR

SEQ ID NO: 176996 - protein, 245 aa, Unknown
  Bacterial polypetide isolated from the Sargasso Sea
ARQVYDSRGNPTIEAEVFVNNLSASAICPSGASTGTFEAYEKRDKGNKKYLGKSVLIPVKTVNKLISKKLKNQNIHDQERIDSILIKLDGTKQKTKLGANTILAVSMAIKKLSAKVKKIPLYKNFIVKKNFKLPFPLMNIINGGAHADNGLRIQEFMIRPDRAKSFNDAVRMCFLVINNLKGLLKKAGHSINVGDEGGFAPMISDNENALKLIVQAIKKSGFKNGKDISICLDVAANELIKKGKY

SEQ ID NO: 176997 - protein, 304 aa, Unknown
  Bacterial polypetide isolated from the Sargasso Sea
NPTIEAEVFTKNKSASAICPSGASTGTYEAFEKRDKNNKRYLGKSVLNAVNLINTKISKKLKGQIVHNQERIDTLLINLDGTRQKTKLGANAILAVSMAAKKLSAKVKNLPLYKTFLVKNNFKLPYPLMNIINGGAHANNGLRIQEFMIRPDRAKSFSDAMRISFLVIKNLSKLLKKKKLSTSVGDEGGFAPMISKNYQALDLIVSAIKKSGFTNGKDISICLDVAANELYKKKKYSIHSKSYISVDKSINEYKKIVKKYKIKSIEDPFAENDWISWNKLMKNFNKVQIVGDDLYVTNLERLKK

SEQ ID NO: 176998 - protein, 267 aa, Unknown
  Bacterial polypetide isolated from the Sargasso Sea
IHNQERIDALMINLDGTKQKKKLGANSILAVSMAVKKLSAKIRKIPLYKTFLIKNNFKLPYPLMNIINGGVHANNGLRVQEFMIRPDGARSFSDAMRICFLVIKSLSKIIKIKGLSTSVGDEGGFAPMINNNNQALDLIVSAIRKAGFVNGKDVSICLDVAANELYKKNKYSIHSKTYVSVEKCIDEYKKMINRYKIKSIEDPFAENDWISWNKLMKSIKKVQIVGDDLYVTNLERLKKGFLNLSSNAILIKLNQIGTVSETLDVIR

SEQ ID NO: 176999 - protein, 225 aa, Unknown
  Bacterial polypetide isolated from the Sargasso Sea
KHLSTAVGDEGGFAPMINNNEDALRLIISAINKSGFINGKDISICLDVAANELYKNKKYSINSKKSISVKKTIIYYNKLIKRYKIKSIEDPFSENDWYSWKQFKIATDRSIQVIGDDLFVTNLERLKIGFLNNSANSILIKLNQIGTVTETLEVIKFAHLIGFSTVISHRSGDSEDTFISDLAVGTNSNQIKTGSLARSERVAKYNQLLRIEEQLGKSSKMNKIQ

SEQ ID NO: 177000 - protein, 315 aa, Unknown
  Bacterial polypetide isolated from the Sargasso Sea
RDNKNKDYLGKSVFSAVKNIDSIITKSLKNVEINDQAKIDNILIDLDGTENKKKLGANAILAVSIASCKLAAVEKNIPLYKHLSNSKSFQIPVPLLNIINGGAHAKNNLDIQEFMIRPEKAKSFTESMRQSFLVIQNLKGMVDSTNVGDEGGFAPNLDNNEEAIEIIVKAIEKSGLKPGEEISICLDVAANELKKAKTIEYYEDLVKKFPIKSIEDPFSEDDWSSWKMINKNIDIQIVGDDLFATNIKRLKKGIEEKSANAILIKLNQIGTVSETLKVIELAKKSGLKTIVSHRSGDSEDTFIADFAVATKFVAN

SEQ ID NO: 177001 - protein, 277 aa, Unknown
  Bacterial polypetide isolated from the Sargasso Sea
MPMPMMNILNGGVHANNNLDIQEFMIIPTSANSFFNAVRMGCEVFHTLKNILHKKNFSTAVGDEGGFAPQLSNTDLAIEMILMAIEKSGYMPGKDFLLALDCASSEYFKDGYYYMDGEKLKLTSKEKVNFLKNLVEKYPIISIEDGMSEDDWEGWQEISLQLGNKCQLVGDDLFATNPRRLEKGIKEKAGNAILIKYNQIGTISETLKVILMAKSNNFLNIFSHRSGETEDVSISDLSVATGVGQIKTGSLSRTDRIAKYNQLIRIEQELGAKLLYF

SEQ ID NO: 177002 - protein, 226 aa, Unknown
  Bacterial polypetide isolated from the Sargasso Sea
FDSRGMPTIETEIFCGKVSSKAICPSGASTGSYEAFEKRDVTNKKYLGKSVFSAVSNVNKIISKKILNKNVHNQELIDSILIKLDGTKQKNKLGANAILSVSIAVKKLSAKLKKIPLYKNFLIKENFKLPFPLMNIINGGAHANNGLKIQEFMIRPDKAKTFSEAMNICFLVIQSLKKLLISKNLSTSVGDEGGFAPMISKNEEALKLISNAIKKAGFVNGKDVSI

SEQ ID NO: 177003 - protein, 196 aa, Unknown
  Bacterial polypetide isolated from the Sargasso Sea
AIEKSKLTPGKDVVIFLDVAANELIDKEGQYSIQSSNFTSVNDVVGYYKKLTSSYPIKSIEDPFAEEDWESWKKITAEIGKNVQIVGDDLFVTNSKRLKKGIDDKSANSILVKPNQIGTLSETLEVVTMAKKANFNTIISHRSGDTEDTFIADLAVATESSQIKTGSLARSERVAKYNRLLRIEEELGNQVKMAKI

SEQ ID NO: 177004 - protein, 252 aa, Unknown
  Bacterial polypetide isolated from the Sargasso Sea
MAFIKDIKARQIFDSRGNPTVEVDVITSTNHIGNAAVPSGASTGEKEAVELRDGGVDYMGKGVLKAVSNVNDIIGKNLIGMDVEDQIGIDSLMIELDGTKNKSNLGANSILGVSLACAKASSNVQKKYLYEYLSKDNVHNLPVPMINIINGGSHSDAPIAFQEFMIMPVGANTFSHSLKIASEIFHNLKKVLSSRKLSTAVGDEGGFAPKLSGTEDAIETILHSIELSGYKPGIDVFLALDCASSEFYKNGI

SEQ ID NO: 177005 - protein, 156 aa, Unknown
  Bacterial polypetide isolated from the Sargasso Sea
WDETISKYLKLIDRYKILSIEDPFGENDWSSWSKLTSKLKKKVQIVGDDLYVTNLERLKVGFLKQSSNAILIKLNQIGTVTETLEVIKFAQIIGFSTIISHRSGESEDTFIADLCVGTNSNQIKTGSLARSERVSKYNQLLRIEESLKNNSKMNSL

SEQ ID NO: 177006 - protein, 199 aa, Unknown
  Bacterial polypetide isolated from the Sargasso Sea
ALDLIMIAIEKAGYSPGEQVGLCLDIAATEFYSDSVYSLAGMNKDFSSADMVGYIQDLCKKYPISSVEDGLDEDDWDGWTKLTELLGSQIQLVGDDLFVTNPERIKKGIKNNSANSVLVKVNQIGTLLETFESVKTSIDNNFTTVISHRSGETEDTFIADLAVAVASGQIKTGAPSRSDRVAKYNRLLMIESDSKIYIR

SEQ ID NO: 177007 - protein, 232 aa, Unknown
  Bacterial polypetide isolated from the Sargasso Sea
LKKLLKNAGHSINVGDEGGFAPMISDNESALKLIVQAIKKSGFKNGQDITICLDVAANELIKKGKYSIHSKSHISVDQSIKKYLQLINKYQIKSIEDPFGEDDWKAWSKFVNETKNKTQIIGDDLFVTNLERLKVGFLNLSANSILIKLNQIGTVTETLEVIKFAQLIGFKTIISHRSGDTEDTFIADLAVGTNSNQIKTGSLARSERIAKYNQLIRIEENLGASAKMNKIN

SEQ ID NO: 177008 - protein, 147 aa, Unknown
  Bacterial polypetide isolated from the Sargasso Sea
MIDYYVKLIKKFDIKSIEDPLHEDDWDGWIKLTKELNGVQIVGDDIFVTQRELLKKGIDSHAGNAILIKPNQVGTLTESLESIQLAKENEFNTIISHRSGETEDPFIADLAVGVNAKQIKTGAPSRSDRNSKYNRLLIIENELYPKK

SEQ ID NO: 177009 - protein, 229 aa, Unknown
  Bacterial polypetide isolated from the Sargasso Sea
MQENNFSTSVGDEGGFAPDISDTKKALDFICSAVEKSGYKMGEEIFIAMDCAASEIFINGEYLFEGKNHDNSGLIQIYEELIKRYPIKSIEDPLDEDDWDGWKAITKQIGDEVSIVGDDLFVTNKKILEKGINNGSANSILIKVNQIGTVSETLETISLANQNNINTVISHRSGETEDTFISDLAVGIGAGQIKTGAPSRSDRTAKYNRLLMISSDNNFSFEGMNGIKQ

SEQ ID NO: 177010 - protein, 166 aa, Unknown
  Bacterial polypetide isolated from the Sargasso Sea
MPKIENLTSIQVLDSRGLPTISTEILLDDGTRSVAMVPSGASTGEKEALELRDGGQAFHGKGVTKAIDNVNDRIKNSLIGQNPLDQGHIDQILNNLDDTSDKSNLGANAILSVSIASAKASSKSENLELHNYFNILLGNKMGKTIDQVIPIPMLNILNGGEHADNN

SEQ ID NO: 177011 - protein, 202 aa, Unknown
  Bacterial polypetide isolated from the Sargasso Sea
MSAITDIIGREILDSRGKPTIEVDVILESGASGRASVPSGASTGAYEASEKRDNQNRFGGMGVRQAVDSVNNEIFDVLSGLESLEQKLIDNTMIEIDGTKNKSNLGANSILGVSLAVAKASATELGLPLYRYIGGPMVNSLPIPMMNILNGGAHADNPIDIQEFMIIPKSANSFIDTLNMGYNVIQSLKNNLIKLGLNTNIG

SEQ ID NO: 177012 - protein, 278 aa, Unknown
  Bacterial polypetide isolated from the Sargasso Sea
ILAVSMAVKKLSAKVKKIPLFKNFIVKKNFKLPFPLMNIINGGAHADNGLRIQEFMIRPDKAKSFNDAVRMCFLVINNLKVLLKKAGHSINVGDEGGFAPMISNNESALKLIVQAIKKSGFKNGKDISICLDVAANELIKKGKYSIHSKNYISVDQSINKYLQLIKKYQIKSIEDPFGEDDWKAWSKFVNETKNKTQIIGDDLFVTNLERLKIGFLNLSANSILIKLNQIGTVTETLEVIKFAQLIGFKTIISHRSGDTEDTFIADLAVGTNFNQIKT

SEQ ID NO: 177013 - protein, 108 aa, Unknown
  Bacterial polypetide isolated from the Sargasso Sea
MGVSMAASRAGAKTNNIPLYEYLSIDSDYVRPIPMMNILNGGSHAENTVDIQEFMKVPMGANSFSNALRVGTEIFHQLKSELLQKSLSTAVGDEGGFAPNLSSTKQQL

SEQ ID NO: 177014 - protein, 277 aa, Unknown
  Bacterial polypetide isolated from the Sargasso Sea
KILKVKARQVFDSRGNPTVEAEVYTKNNSVTAICPSGASTGTYEAFEKRDKNNKRYLGKSVLNAVNLVNNKISKKLKGQSIHNQERIDTLLINLDGTRQKTNLGANAMLAVSMAVKKLSAKEKKLPLYKTFFIKKNFQLPYPLMNIINGGAHANNGLRIQEFMIRPDRAKSFSEAMRICFIVIKNLSNLIKDKGLSTSVGDEGGFAPMISSNNQALDLIVTAIKKSGFINGRDVSICLDVAANELFKKNKYSIHSKTYISVEKSIKEYQKIIKKYKI

SEQ ID NO: 177015 - protein, 313 aa, Unknown
  Bacterial polypetide isolated from the Sargasso Sea
ACEISLDNGICASAMVPSGASTGSKEALELRDSDSNYHGKGVLNAISNINNKLGPLLIGKESENQIDIDRILIDYDGTDDKSSMGANAILAISLASSHVAAKNKKVNLYEHFSSIYKDITGKANKYSIPMPMFNILNGGEHADNNVDIQEFMIVPSGAKDFTQIMKWSMEIYHNLKEILLTKNYSTALGDEGGFAPNLNSNEEAIELIIESIKASKLNPGEDVNIALDCAASEFFDGNNYFLKGENKKYTSAEFTNYLDNLTTQYPISSIEDAMDENDKEGWKLVTDKLGKKCQLVGNDLFVTNKKIFLEGIK

SEQ ID NO: 177016 - protein, 241 aa, Unknown
  Bacterial polypetide isolated from the Sargasso Sea
QEFMIRPDGAKSFKECMHMAFLVIKKLKKFLEDKNISTSVGDEGGFAPSLASDEEAIEVLMSAITQAGFKPGKDISICLDVAANELKVPKSVEYFLDLTKKYPIKSIEDPFSEDDWNNWKTITQKIDSQIVGDDLFVTNAKRLEKGIKEKSANSILIKPNQIGTISETLDTIRLAQKHNFKTIISHRSGDSEDTFISDLAVATNSSQIKTGSLARSERVAKYNRLLRIEESLGKQSKMAKI

SEQ ID NO: 177017 - protein, 269 aa, Unknown
  Bacterial polypetide isolated from the Sargasso Sea
MSKISKVIARQVFDSRGNPTIETEVFVKDISASAICPSGASTGTYEAFEKRDINNKKYLGKSVLKPVEFINKVISKKLKNFNIHQQEKIDNLLIRLDGTKQKKKVGANTILSVSIAVKKLSSKIKKIPIYKNLLINNNFKLPYPLMNIINGGAHANNGLRIQEFMIRPDKAKSFSDGVRMCFIVINKLRDLIKKMGHSTSVGDEGGFAPMISNNEDALKLIVKAIKLSGFKNGKDIVICLDVAANELIKNKKYSIHSKKYTSVDKSIKN

SEQ ID NO: 177018 - protein, 219 aa, Unknown
  Bacterial polypetide isolated from the Sargasso Sea
FAPNLKSNEEAIELILEAINQSPFSIEKDLFIALDVAASELFENNKYHLKSDDSHFTTEEMVRYLKSLVDQYPIISIEDGLDENDWQGWRLLTKEIGGECQIVGDDLTVTNITRLKKAIENKAMNAILIKLNQIGTITETISTIELAKKHDFSTIISHRSGETEDVTIADFAVAMGSGQIKTGSTCRTDRVAKYNQLLRIEESLGAKAKFPGIEVLGNK

SEQ ID NO: 177019 - protein, 241 aa, Unknown
  Bacterial polypetide isolated from the Sargasso Sea
MNSSIEKIFAREILDSRGNPTVEVDVMTSDGLMGRAAVPSGASTGIHEALELRDGDKNRYLGKGVRTAVNNINNIIAPSLKGCEATEQSENDSQLLALDGTENKSNLGANAILGVSMAIAHAGAKIEKKSLYQYLGKNNAHILPMPMMNILNGGSHADNLVDIQEFMIMPFGAKRFSEALQMGTEVFHHLKSVLKSKTLSTAVGDEGGFAPNLKSNEEAIEIILESVLQARVKTGFRYIFD

SEQ ID NO: 177020 - protein, 247 aa, Unknown
  Bacterial polypetide isolated from the Sargasso Sea
MRMGAEIFHHLKAVLKARGLNTAVGDEGGFAPNLASNEDALAAIAEAVANAGYKLGDDVTLALDCASSEFYKDGQYDLAGEGKVFSGEGFADYLAGLTERYPIISIEDGMDESDWASWKVLTDKIGAKVQLVGDDLFVTNTKILKRGIDEQIGNSILIKFNQIGSLTETLEAIQMAKAAGFTAVISHRSGETEDSTIADLAVGTAAGQIKTGSLCRSDRVSKYNQLLRIEEQLGGKAPYKGRAEFRG

SEQ ID NO: 177021 - protein, 208 aa, Unknown
  Bacterial polypetide isolated from the Sargasso Sea
MVDNTNVGDEGGFAPNLQNTEEAIKLIIKAIEKSGFKPGEDISICLDVAANELKKQITHNKYAELIKKYPIKSIEDPFKEDDWDSWKRLTNDTNIQIVGDDLFATNLERLKRGIKEKSANAVLVKLNQIGTVSETLDVIELAHKNGFKTIVSHRSGDSEDTFIADLAVATNSSQIKTGSLARSERVSKYNRLLRIEEELGNSAKMAKI

SEQ ID NO: 177022 - protein, 68 aa, Unknown
  Bacterial polypetide isolated from the Sargasso Sea
IEMCAKAGWNYVISHRSGETEDTFMADFAVAMGGGQIKTGSACRSERIAKYNRLLEIEAELGGLAIYG

SEQ ID NO: 177023 - protein, 179 aa, Unknown
  Bacterial polypetide isolated from the Sargasso Sea
FKDNFYRLNGENKKLNTDQLIIFWENICKKFPIISIEDPFDENDWNGFKELSKSIGNKVQIVGDDLFVTNKERLSKGIKSRSANSILIKLNQIGTLSETIDTIELAKNSKFGVVVSHRSGETEDVFISDLAVALNAGQIKTGSLSRSDRTAKYNQLIRIEENLGDDSIYFGRDFFNNFN

SEQ ID NO: 177024 - protein, 176 aa, Unknown
  Bacterial polypetide isolated from the Sargasso Sea
VAANELIKKSKYSIHSKKFISVNESIKKYLKLVHKYKIKSIEDPFSENDWKAWHELMKSVKKVQIVGDDLYVTNLERLKIGFLNNSSNSVLIKLNQIGTVSETLEVIKFAQIIGYKTIISHRSGDSEDTFIADLAVGTNSNQIKTGSLARSERVAKYNQLLRIEENLGTKAKMHKI

SEQ ID NO: 177025 - protein, 146 aa, Unknown
  Bacterial polypetide isolated from the Sargasso Sea
YPIVSVEDGLDENDWDGWTTMNKILGSKIQIVGDDLTVTNSQKLQKAIDNQSMNAILIKLNQIGTVSETIKAIKLAKSNGMNYIISHRSGETEDTFISDLSVAMGGGQIKTGSVCRSDRTAKYNRLLRIEEQIKNVRLKDNLNFIK

SEQ ID NO: 177026 - protein, 152 aa, Unknown
  Bacterial polypetide isolated from the Sargasso Sea
LCDNYPIISIEDGMSENDWNGWSEITERLGNRIQLVGDDIFVTNKNILQKGIDSIAANSILIKLNQIGTLTETLQTIDLAKKNHYTCVISHRSGETEDTTIADLSVGVDAGQIKTGSLSRSDRVAKYNRLLRIEEELGNNKYSNNVFNRWLS

SEQ ID NO: 177027 - protein, 219 aa, Unknown
  Bacterial polypetide isolated from the Sargasso Sea
MSEIESIFAREVIDSRGNPTIEADVILKDGSQGSACAPSGASTGSREALELRDKDPGRYGGKGVLTAVNNVNLNIRNALVGGSVIEQAVLDQRMLDLDGTDNKSNLGANAILAVSLAISKAAANHLGIPLYSHISNLSGNERTLTLPVPMMNIINGGEHADNNIDIQEFMIQPTGASSFTEALRYGAEVFHALRSVLKKDGFSTAVGDEGGFAPDLPSN

SEQ ID NO: 177028 - protein, 281 aa, Unknown
  Bacterial polypetide isolated from the Sargasso Sea
GVSWQLRMLGAKVKNQPLYSYLGKDNDHILPVPMMNILNGGSHADNLVDIQEFMIMPFGADSFSEALQMGTEIFHHLKSVLKSKEMTTAVGDEGGFAPDLKSNEEAIDVILESISKAGLSTGKDIMLALDVAASELFENNIYNLYSENKKLESTEMVNYLNDLVKKYPIISIEDGLHEDDWEGWKQLTKALGQQVQIVGDDLTVTNISRLKHAIEEHSINAILIKLNQIGTVTETIQAIEMAKKANLGAIISHRSGETEDTTIADLAVGMGMGQIKTGSIS

SEQ ID NO: 177029 - protein, 188 aa, Unknown
  Bacterial polypetide isolated from the Sargasso Sea
MAKIKKILARQIFDSRGNPTVEVDVITNDNNLGRAAVPSGASTGENEAVELRDGGDAYMGKGVLMAVNNVNTVIADHLIGKSVFNQEEIDNSMIELDGTENKCILGANAILGVSLAVSQAAAKCKGIPLYKYIGGELAVTLPVPMMNIINGGSHSDAPIAFQEFMIVPFNAKNFSEAMKVEQRFFIIE

SEQ ID NO: 177030 - protein, 303 aa, Unknown
  Bacterial polypetide isolated from the Sargasso Sea
KNKSKLGANAILAVSMANMVAYAKSSKKYVYELIPNIYGSPSLPVPFMNILNGGAHADNSVDIQEFMIVPHGFTRFDDGLKAGVEVYHTLKKRLKDKGLGTNVGDEGGFAPNFKSSKEVLDEIMLSIEEAGYKPSDQISLALDAAASEFYKDGVYMIDGNSLTNTEMSDYLIDLTGSYPIVSIEDGLAEDDWEGWKYLTSKINNSTQLVGDDLFVTQEDVLQKGIDENCGNAILIKVNQVGTINETFNTMELASSHAYSSMVSHRSGETEDSFISHLVVGTSSGQIKTGAPARSERTVKYNEL

SEQ ID NO: 177031 - protein, 192 aa, Unknown
  Bacterial polypetide isolated from the Sargasso Sea
GTHEAYELRDKENKDYLGKSVFKAIENVNGPIFKSLKNIDTKDQSKIDKILKDLDGTEQKKKLGANAILAVSIAAIKNAALERKVSLFKHIGGNSVSKLPIPMMNIINGGAHANNSLEIQEFMIRPDGANSFKECMRMSYLVIQKLKKNLEKINISTSVGDEGGFAPSLKSDEEAIEFIIKSIENAGFNPGR

SEQ ID NO: 177032 - protein, 230 aa, Unknown
  Bacterial polypetide isolated from the Sargasso Sea
KKNIKNKGLSTSVGDEGGFAPMISNNYQALELIVSAIKKSGFVNGKDVSICLDIAANELYKKNKYSIHSRKYISVKKSILEYKKIIKKYKIKSIEDPFAENDWTSWGKLMKSTKRIQIVGDDLYVTNLERLKKGFLYLSSNAILIKLNQIGTVSETIDVIKFAQIIGFKTIISHRSGDTEDTFIADLAVGTNSNQIKTGSLARSERVAKYNQLLRIEEALGKKARMNKIH

SEQ ID NO: 177033 - protein, 267 aa, Unknown
  Bacterial polypetide isolated from the Sargasso Sea
EKIDKILVELDGSENKNNLGANATLAVSLAYAKCTAIVNKQSLYKSLGKSYSIPIPLMNIINGGAHADNDLNIQEFMIRPDSANNFTDAIEKCFLVIQNLKKLLQSKKMLTNVGDEGGFAPSINSNEEALDLIVQAIEKSKLKPGNDVVICLDVAANELMNEKGEYSVQSSNFLSVDDVVKYYKKLTSNYPIKSIEDPFSEEDWQSWKKITSAVGNNVQIVGDDLFVTNSKRLEKGIKEKSANSILVKPNQIGTLTETLEVISMAKK

SEQ ID NO: 177034 - protein, 257 aa, Unknown
  Bacterial polypetide isolated from the Sargasso Sea
IPVGAETFSEALRWGSEIFQELKKILSDNGYSTSVGDEGGFSPEIKDVYDALSLLSKAIKNASRNLEDEVKLAIDAASSEFFKNGNYIIDSGDKKLDTSEMIKYWETLVNDYPIISIEDPLDENDYEGYGQITDLLGKRIQIVGDDLFATNSQRLKKGIDNGAANSILIKLNQIGTLTETIDTINLAKNNNYGTIISHRSGETEDTFIADLSVALCSGQIKTGSLSRSERLCKYNQLLRIEQDLGSKAIFNGSNILK

SEQ ID NO: 177035 - protein, 259 aa, Unknown
  Bacterial polypetide isolated from the Sargasso Sea
MLAVSLAAARAAAKFHNVPLFSYIGGINNSLPTPMMNIVNGGCHANNNLDFQEFMIIPCGFETFREALRAGCEIFNSLKKLLTKNNYSVSVGDEGGFAPDFNSNKECLDYIINAIEISGYKPGDDVFIALDVASSEFFEKKKYILKGESKSLITSQLIEYYQELISKYPIISIEDALHEDDWNGWAELSKKIGNKCQLVGDDLFVTSVERLKKGINNSCANSILIKLNQIGTLSETIDTVTLAKKNNFSTIISHRSGET

SEQ ID NO: 177036 - protein, 64 aa, Unknown
  Bacterial polypetide isolated from the Sargasso Sea
GYQTIISHRSGDSEDTFISDLAVGTNSSQIKTGSLCRSERVAKYNQLLRIENDLSNKNNMARLK

SEQ ID NO: 177037 - protein, 247 aa, Unknown
  Bacterial polypetide isolated from the Sargasso Sea
MNIITRVKARQVFDSRGNPTIEAEVFCKEKSSKAICPSGASTGSFEAHEKRDKKNKKYLGKSVFGPIKLINSKISKKLSNKNVHNQELIDSILINLDGTKHKTKIGANAILAVSMAVKKLSSKIKKVPLYKNFLVKKNFLLPYPMMNIINGGAHANNKLRIQEFMIRPDGAKNFSEAVRMCFLVIQCLKKIISKRGMSISVGDEGGFAPMISSNEEALKLIVKSIEKAGFKNGKHISICLDVAANEL

SEQ ID NO: 177038 - protein, 60 aa, Unknown
  Bacterial polypetide isolated from the Sargasso Sea
SGETEDTIISDFAVSMGSGQIKTGSLSRTDRVAKYNQLLRIEEELGSSSIFPSYDMLGLK

SEQ ID NO: 177039 - protein, 90 aa, Unknown
  Bacterial polypetide isolated from the Sargasso Sea
AANAVLIKLNQIGTVSETLATIQLCQKSGWNYIISHRSGETEDTFLADFAVAMAGGQIKTGSASRSERIAKYNRLLEIESELGKSAIFES

SEQ ID NO: 177040 - protein, 167 aa, Unknown
  Bacterial polypetide isolated from the Sargasso Sea
KYAVNSAKFISAEKTIEYYLDLIRKYPIKSIEDPFFEDDWDSWLNFTKEINKDIQVVGDDLFVTNKERLKKGINLKAANTILIKPNQIGTLTETLDVINLAQKNNYKTIISHRSGDSEDTFIADLAVATNSSQIKTGSLARSERVAKYNRLLRIEEELGNSAKMAKV

SEQ ID NO: 177041 - protein, 274 aa, Unknown
  Bacterial polypetide isolated from the Sargasso Sea
KNISIFKYLGNSKNFQLPVPLLNIINGGVHARNNLDIQEFMIRPDKAKSFSEAIRMSFLVIQNLKLMLDNTNVGDEGGFAPNLQNNEEAIKLIIKAIEKSGFKAGEDISICLDVAANELDKQKTIEYYSELTKKYPIKSIEDPFNEDDWESWKKLTINTKIQIVGDDLFATNIKRLEKGIKEKSANAILIKLNQIGTVTETLNVINHAHKNGFKTIISHRSGDSEDTFIADLAVATNSTQIKAGSLARSERVAKYNRLLRIEDELGNSAKIAKV

SEQ ID NO: 177042 - protein, 138 aa, Unknown
  Bacterial polypetide isolated from the Sargasso Sea
MNSSIEKIFAREILDSRGNPTVEVDVMTGDGLMGRAAVPSGASTGIHEALELRDGNKNRYLGKGVRTAVNNINTIIAPSLKGCEATKQSENDGQLLALDGTENKSNLGANAILGVSMAIAHAGAKIEKKSLYQYLGKD

SEQ ID NO: 177043 - protein, 278 aa, Unknown
  Bacterial polypetide isolated from the Sargasso Sea
VIARQVYDSRGNPTIEAEVFANNMKARAICPSGASTGSHEAFEKRDILNKKYLGKSVLKAVRLINTKISKKLKNQNIHNQEKIDFILIKLDGTKQKKKFGANSILAVSMAVKKLSARIKKIPLYKTFLTKKNYKLPYPLMNVINGGAHANNDLRIQEFMIRPDKAKSFTEAIRMCFLVINNLRKIIKQRGESTSVGDEGGFAPMISKNEEALKLIVKSIEKSGFKNGKDISICLDVAANELFKKKKYSIHSKKFVSVQKSINQYKKIINKFKIKSIED

SEQ ID NO: 177044 - protein, 224 aa, Unknown
  Bacterial polypetide isolated from the Sargasso Sea
TGTHEAFELRDIENKKYLGKSVLKAIEKVNGEIASKLVGYSVEDQKKIDKTLIELDGTKQKKRLGANAILSVSIASNKAAALAKNLPLYKNIGNSKTLPIPLMNVINGGVHANNSLRIQEFMIRPDSAKTFKEALNICFLVIQKLKSIISSKNFSTNLGDEGGFAPMLTNNEEAIEYILTAIEDSGFKAGKDISVCLDVAANELYKDKKYAVNSNRYISPDKTI

SEQ ID NO: 177045 - protein, 235 aa, Unknown
  Bacterial polypetide isolated from the Sargasso Sea
MKIKNVIGREVLDSRGNPTIEVEIHIDGNKSGRAIVPSGASTGTKEALELRDNDRARYRGKGVLKAVKNINKIIKKEIVGLSIEDQKQIDDKLLEIDGTVNKENLGANAILGVSLATAHCRAVAKNIPLFEDFNNSKDLKYNLPIPFMNILNGGSHANNNVDIQEFMIVPIGAKSFSHAIQMGSEIFHSLKEILQVQGHVTAVGDEGGFAPNLKSNIEAIELILSAIEKTNYKPF

SEQ ID NO: 177046 - protein, 149 aa, Unknown
  Bacterial polypetide isolated from the Sargasso Sea
MIDYLKTLKSSYPIYSIEDGLDEDDWQGWKVLTEELGSKTQLVGDDLFVTNAARIKRGIEECSANSVLIKVNQIGSLSETFQAIKLSEENNFKNIISHRSGETEDAFIADLSVGMGVGQIKTGAPSRSDRVAKYNRLLMIEKNSSICFG

SEQ ID NO: 177047 - protein, 369 aa, Unknown
  Bacterial polypetide isolated from the Sargasso Sea
RQVFDSRGNPTLEAEVFSENGSAFSIVPSGASTGTHEAFELRDKDNKDYLGKSVFVAISNINHLISKALKNVEITDQLKIDKILIELDGTEQKKKLGANAILGVSMACCKLAAIEKKIPLFKYLSKNNDYLLPIPLLNIINGGVHAKNNLDIQEFMIRPEKTNSFSEAVRRSFIVIQNLKEMLVNTNVGDEGGFAPNLKSNEEAIQIIIKSIEKSGFKPGDDISICLDVAANELKKPKTIKYYSNLIKEYPIKSIEDPFSEDEWESWNKLTKSTNIQIVGDDLFATNKKRLQKGIDENSANAILVKLNQIGTVSETLEVINLAQKNGFKTIISHRSGDSEDTFIADLCVATKSSQIKSGSLARSERVSK

SEQ ID NO: 177048 - protein, 110 aa, Unknown
  Bacterial polypetide isolated from the Sargasso Sea
MAKIVDIKGREVLDSRGNPTVEADVILEGGIVGSACAPSGASTGSREALELRDGDKSRYLGKGVLKAVANINGPIRDLLLGKDATDQQALDRAMIELDGTENKGKLGAHA

SEQ ID NO: 177049 - protein, 128 aa, Unknown
  Bacterial polypetide isolated from the Sargasso Sea
MGEKVQLVGDDLFVTNSERLGRGIAEGIANSILVKVNQIGTLTETTAAVMLAHRSGYTSIASHRSGETEDATIADLAVGLSTGQIKTGSASRSDRVAKYNQLLRIQESLGDGALYAGRDVRLRWPGMC

SEQ ID NO: 177050 - protein, 271 aa, Unknown
  Bacterial polypetide isolated from the Sargasso Sea
MAKIVDIKGREVLDSRGNPTVEADVLLDNGIIGSACAPSGASTGSREALELRDGDKSRYLGKGVLKAVANINGPIRDLLLGKDPLDQKALDHAMIKLDGTENKGSLGANAILAVSLAAAKAAAQDQDLPLYAHIANLNGTPGVYSMPVPMMNIINGGEHADNNVDIQEFMVQPVGAESFSEGLRMGTEIFHHLKAVLKARGLSTAVGDEGGFAPNLASNEDALKVISEAVANAGYTLGTDVTLALDCAASEFYEDGKYNLSGEGQVFDSEG

SEQ ID NO: 177051 - protein, 294 aa, Unknown
  Bacterial polypetide isolated from the Sargasso Sea
MEKIKNIHAREILDSRGNPTVECDLELQDGSFGRAAVPSGASTGIHEALELRDGDQNRYLGKGVKNAVQNINELIKKVVIGKDFENYKVFDKVLLTLDGTENKSNFGANATLAASLAFAKCLANHSSSPFYQYIAENKNFLLPVPMMNIINGGSHADNDVDIQEFMIAPVGATSFSEALRYGCEIFHSLKSILKSKNLNTNVGDEGGFAPNVNSSAEVIEIIIKSVEKAGFKMNDDILLSLDVASTEFYKNNKYDLRGERQTLSSNEMVKYIENLSNNFPIYSIEDGMSEDDWD

SEQ ID NO: 177052 - protein, 212 aa, Unknown
  Bacterial polypetide isolated from the Sargasso Sea
MSKIKNVVARQIFDSRGNPTVETDVYLQDGTMGRASVPSGASTGKYEAFELRDSKKSYHGRSVFKAVENINVTIFDTISGLDSLDQNKIDRTMIELDGSKNKSKLGANALLSVSLAVADAAAKSLNLPLYKYLGGSKTFKMPVPMLNVINGGAHANNNLTFQEFMIIPINEQTFGNCLKKSSEVFHTLKQILEKKGLSTAVGDEGGFSPNLK

SEQ ID NO: 177053 - protein, 429 aa, Unknown
  Bacterial polypetide isolated from the Sargasso Sea
MSIISSIQAIQVIDSRGTPTVSCKVELDNGLNAISMVPSGASTGSREALELRDGAKSFMGKGVLKAVTNIQEIIAPALIGIDVRNQQEIDEKMIMLDGTSSKSKLGANAILGVSLAVLNLGAKTLGLPLFHYINQVFNNINGENLEMQMPMPMLNIINGGQHADNNVDIQEFMIMPIGASSFSQAMQWSTEIYANLKKLLQTKGLSTSVGDEGGFAPNLSSNIEAIELIITAIRNNNLVEGKDVGIALDCAASEFYDNGIYNLKGESKKLNSIEFTQYLEDLTNKYPILSIEDGMDENDFKGWNHLTDVLGKKCQLVGDDLFVTNAFELQRGIEESLANSILIKFNQIGTITETMKTIHLGNQHGFKSIISHRSGETEDSTIADLCVGLGSGQIKTGAPCRSDRVAKYNRLLWIEAQQSDLNFAKNVIG

SEQ ID NO: 177054 - protein, 347 aa, Unknown
  Bacterial polypetide isolated from the Sargasso Sea
PKILDKSFADFREFDQYLIDLDGTENKSNYGANAILSLSLAYYKAWSYANFGAIFLSQGLDNLIIPVPMLNVINGGQHADNDVDFQEFMILPIGFKSLTEALSSTHSVITNIKKELKSRSLNTNLGDEGGFAPNLKSHLDVLDLICNSISKAGFKLNDHFKISLDAASSEFYSDGKYNFEGNSYSTEEMISVYENICKNYPIFSIEDALNEEDYEGWVKITNKLGSKIRLVGDDLFVTNIQKLQTGIDEKQANSILIKLNQIGTVTETLEAIKLATENSFASIMSHRSGETEDSFISDLAVASRCPLIKTGSLARSDRVAKYNQLLRISENDNIKGYAGELSEVFKS

SEQ ID NO: 177055 - protein, 387 aa, Unknown
  Bacterial polypetide isolated from the Sargasso Sea
SGASTGMHEAIELRDNDKNRYGGKGVLTAISNITEIISPKILNKEFKNIKDFDEFLISTDGTKNKSNLGANATLALSLAFAKSLASFDKKNLFHYLNNSDQYIMPVPMMNIINGGSHADNKVDIQEFMIAPVGASSFKESIRYGAEIFHSLKSKLKEKGLNTNVGDEGGFAPNINSSNDVIEIIIQAVISTGLKMHEDIMISLDVAATEFYFDHKYNLNGENKILNSDQMIDYLKKLSSDYPIYSIEDGLSENDWEGWKNLTNEIGKKIQLVGDDLFVTNINRLQEGINNGSANSILVKLNQIGTLTETLNAIDLAKQNNYTSIISHRSGETEDTTISDLSVATSVGQIKTGSLSRTDRTSKYNQLLRIEEILEDKCYYAGRNILNN

SEQ ID NO: 177056 - protein, 218 aa, Unknown
  Bacterial polypetide isolated from the Sargasso Sea
MQSNNPSQIKSVTGREVLDSRGNPTVEVDVALQGGFKGRAAVPSGASTGQFEAVELRDGGERYKGKGVLQAVENVNNEIASAIIGMDSLDQRAVDQKLILLDGTNDKSNLGANAMLGVSLAAAKASANHLGQPLYRYLGGATAHVLPVPMMNVLNGGEHADNNVDLQEFMIMPVGAVSFSEALQWGAECYHTLKEVLKARGLSTAVEMKAVCSGSRIK

SEQ ID NO: 177057 - protein, 428 aa, Unknown
  Bacterial polypetide isolated from the Sargasso Sea
MKSHIKNIYSREILDSRGNPTVEVDLVLENDIVAHAAVPSGASTGVFEAMELRDNNKKRYMGKGVLTAVNNVNSEIRNALIGVDINNQENIDNILIELDGTENKSRLGANAILGASMAACRAGAKANNIPLYDYLSISSDYVMPIPMMNILNGGSHAENTVDIQEFMISPIGANSFSDALRIGTEIFHQLKSELSQKGMNTAVGDEGGFAPNLGSNELAIEIILTAITNAGYTPGEEVFISLDVAASEFFKNDLYTLESEEKTYSSEEMINYLSDLSKKYPIISIEDGLDQSDWDGWKKLNLAIGKNIQIVGDDLTVTNIKRLNRAIDEESMNSILIKLNQIGTITETVQAVKLAKKVGFGAIISHRSGETEDTIISDFSVAMGMGQIKTGSLSRSDRVAKYNQLIRIEEQLGDKAKYATMDFLGMTK

SEQ ID NO: 177058 - protein, 210 aa, Unknown
  Bacterial polypetide isolated from the Sargasso Sea
MAKITYLRGRQILDSRGTPTVEVDMVLDDGEICRGSVPSGASTGSHEAIELRDGNKNEFNGKSVKNAIENINEIVKKNIEGKNFDSYEKFDDFLLNLDGTDNKSKLGANTILACSMTFLKCLAKNNGQEIYQFLNKNEEFMLPAPLMNIINGGAHANNGLDIQEFMIVPAGFDSFSESLRAGVEIFHNLKDLLNKNSHSTAVGDEGGFAP

SEQ ID NO: 177059 - protein, 280 aa, Unknown
  Bacterial polypetide isolated from the Sargasso Sea
MMNIVNGGSHADNNVDIQEFMISPLGAPNFNESIRYGCEVFHSLKSILKNKGLNTNVGDEGGFAPDINSSEAVIEIILEAIKFTGLKLGEDIMLSLDVASSEFFKNGKYYLNGEKKILSSEQMVDYLKKLSSNYPIYSIEDGMSEDDWHGWKILTDEIGQKVQLVGDDLFVTNIERLQKGINNKVANSILIKLNQIGTLSETLEAINLAKKNSYNCVISHRSGETEDTVISDLSVATSVGQIKTGSLSRTDRTAKYNQLLRIQELLGDKAKFAGKTILQD

SEQ ID NO: 177060 - protein, 333 aa, Unknown
  Bacterial polypetide isolated from the Sargasso Sea
MNKKITHIFARYILDSRANPTVEVEVTLDDGSWGRAAVPSGASTGSLEAHELRDQSKDFNGKGVNKAVDNINTLIADTLIGSYAGDQSKVDQVLLELDGTKNKSKLGANAILAVSMANMVAYAKSSKKYVYELIPNIYGAPSLPVPFMNILNGGAHADNSVDIQEFMIVPHGFTRFDDGLKAGVEVYHTLKKRLKDKGLATNVGDEGGFAPNFTSSKEVLDEIMLSIAEAGYKPSDQISLALDAAASEFYKDGAYMIEGNSLTNTEMADYLVDLSDSYPIVSIEDGLSEDDWEGWKYLTSKINDSTQLVGDDLFVTQEEVLQKGIDENCGNAI

SEQ ID NO: 177061 - protein, 210 aa, Unknown
  Bacterial polypetide isolated from the Sargasso Sea
MINENEDALKLIVNAIEKSGFKNGKDVSICLDVAANELFKKQKYSVHSKKLISANKTIDQYLKLIKKYKIKSIEDPFAEDDWLSWNNFMKKINKDTQVVGDDLYVTNLERLKIGFLNKSSNSILIKLNQIGTVSETLEVIKFAQLIGFSTIISHRSGESEDTFISDLAVGTNSNQIKTGSLARSERVAKYNQLIRIEEKLGNLAKMNKIN

SEQ ID NO: 177062 - protein, 153 aa, Unknown
  Bacterial polypetide isolated from the Sargasso Sea
SINEYQKIIKKYKIKSIEDPFAENDWLAWNKLMKSIKKVQIVGDDLYVTNLERLKKGFLNISSNSILIKLNQIGTVSETLDVIKFAQTIGYKTIISHRSGDSEDTFIADLAVGTNSNQIKTGSLARSERVAKYNQLIRIEEELGKKGRMNKIN

SEQ ID NO: 177063 - protein, 423 aa, Unknown
  Bacterial polypetide isolated from the Sargasso Sea
MKIQNIEGFEVIDSRGNPTVAARVNLEGSISALAMVPSGASTGQHEANEKRDKDANRYQGKGVLGAVNAINTEISSLLKGKDIFDLLANDKLMIDADGTSNKSNLGANAILAVSMASAKAASIANKIPLYTFLNNKYSEFCNTDISPSLPIPMMNILNGGAHADNPIDFQEFMIQPRGFNSFSETLRAGVEIFHTLKNILSSKGLNTSVGDEGGFAPNIKSPEEALDLIMMAIEKAGYVPGEQVALCLDIAATEFYSDSVYSLVGMNKDFSSADMIGYIQELCKKYPISSVEDGLDEDDWDGWTKLTELLGSQIQLVGDDLFVTNPERIKKGIKSNSANSVLVKVNQIGTLLETFESVKTSLDNNFTTVISHRSGETEDTFIADLAVAVASGQIKTGAPSRSDRVAKYNRLLMIESDSKIYIR

SEQ ID NO: 177064 - protein, 403 aa, Unknown
  Bacterial polypetide isolated from the Sargasso Sea
RGNPTVEAEVFLENDISATAISPSGASTGAFEAHELRDQDKNSFLGKSVNKAIENINNRISKKLKGLDSSDQKTIDKALLDLDGSENKKNLGANATLAVSLANSKCSALSNKKSLFKNLGNSFSLPIPLMNIINGGAHADNDLNIQEFMIRPDSAKNFMDAIEKCYVVIQNLKKLLKSKNMLTNIGDEGGFAPSINTNEQALELIVSSIEKSNLKPGEDIVICLDVAANELINKKGEYSIQSKNYTSVEDNIIYYKKLTSNYPIKSIEDPFAEEDWDSWKKITNEIGNNVQIVGDDLFVTNSKRLSKGIKEKSANSILVKPNQIGTLTETLDVISMAKTANFKTIISHRSGDTEDTFIADLASATMSSQIKTGSLARSERVAKYNRLLRIEEELGKQAKMAKI

SEQ ID NO: 177065 - protein, 241 aa, Unknown
  Bacterial polypetide isolated from the Sargasso Sea
RYGAETFHALKEILQSKGYVTSVGDEGGFAPNLKSNEEALEVIMDAILVAGYEPGKDIFMALDAAASSFCDQGSYVFKKSGSGIKNSNEMLGFYKSMVEKYPIVSIEDPMDEHDWDGFSAITKKLGDKIQIVGDDLFVTDKNFVRKGIKKKAANAVLIKLNQIGTVSETLATIQLCQKSGWNYIISHRSGETEDTFLADFAVAMAGGQIKTGSASRSERIAKYNRLLEIETELGESAIFGS

SEQ ID NO: 177066 - protein, 252 aa, Unknown
  Bacterial polypetide isolated from the Sargasso Sea
MNNKIKTIKARHILDSRANPTIEVEIYLNDEIFGRAAVPSGASTGALEAHELRDNDDAYNGKGVNQAIKNVETIIAKELIGLDITDQEAIDKKLIQLDGTENKNNLGANAILGASMAAFKANANLQKKQPFELFPNIYNSPSLPIPFMNILNGGAHADNSVDIQEFMIVPYGFDTFDRSLRAGVETYHVLKKRLKEKKLATNVGDEGGFAPDFKSSIEILDEIMLSISEAGYVPGENISLALDVASSEFYEK

SEQ ID NO: 177067 - protein, 426 aa, Unknown
  Bacterial polypetide isolated from the Sargasso Sea
MPKITNIKARQIIDSRGNPTVECDIEFENSIFGRAAVPSGASTGVHEALELRDNNKSIYKGKGVLKAVGNINDKISNELVGKSFEDISSFDDFLLELDGTENKSNLGANATLAVSLAFAKCLASSEGHELYSFLGKEYTMSLPVPMMNIINGGSHADNDVDIQEFMVAPIGANNFSDALQYGCEIFHSLKSLLKSKGLNTNVGDEGGFAPNINSSSEVIETVLKSVEDAGFKPGKDIYLSLDVASTEFYKNNKYHLKGEKIVLSSDEMIKYLEKLVNAYPIYSIEDGMSEDDWDGWSNLTSTIGKKVQLVGDDLFVTNKTRLQKGISEGAGNSILVKVNQIGTLKETLESIKLAKENNFTTIISHRSGETEDTTIADLSVGVSAGQIKTGSLSRTDRTAKYNQLLRIEEALQGKANYAGSSILNNK

SEQ ID NO: 177068 - protein, 429 aa, Unknown
  Bacterial polypetide isolated from the Sargasso Sea
MNTIHEGVPVNPRIINIQALEILDSRGNPTVRTWVRLENGISGVASVPSGASTGINEALELRDGDKKRFGGKGVLKAVENVNKQIAPELVGMHAEDQSKIDQVMLELDGTKSKEKLGANAILGVSMAAADAAAKNAGLSLYSYLGGVGSTCLPVPMMNILNGGEHADNSVDIQEFMIMPIGLPNFREALRCGSEIFQALKKILLAKNYSTGVGDEGGFAPNLGSNQEACELILEAVEKVGYKAGKEIFLALDSAASSFFKDGKYEFRKSGGGVKNSSEMLSFYQDLCGKYPICSIEDPMDENDWEGFASVTKSLGEQVQIVGDDLFVTNTEFVKRGIKESSANAVLIKLNQIGTVSETVATIEMCRKAGWNYVISHRSGETEDTFMADFAVAMGGGQIKTGSSCRSERIAKYNRLLEIEAELGGLAIYV

SEQ ID NO: 177069 - protein, 431 aa, Unknown
  Bacterial polypetide isolated from the Sargasso Sea
MAKIINVIGREIMDSRGNPTVEAEVHLEGGFIGMAAAPSGASTGSREALELRDGDKSRYLGKGVLTAVANVNGLIRAALIGKDATAQAELDQIMIDLDGTENKDKLGANAILAVSLAAAKAAAAFKGMPLYAHIAELNGTPGQYAMPVPMMNILNGGEHADNNVDIQEFMVQPVGAKNFREALRMGAEIFHTLKKVLHGKGLSTSVGDEGGFAPNLSSNANALAVIKEAVELAGYKLGTDVTLALDCAASEFYKDGKYDLSGEGKVFDSNGFSDFLKSLTEQYPIVSIEDGLDESDWDGWAYQTKIMGDKIQLVGDDLFVTNTKILTRGIENGIANSILIKFNQIGSLTETLAAIRMAKAAGYTAVISHRSGETEDATIADLAVGTAAGQIKTGSLCRSDRVAKYNQLLRIEEQLGEKAPYRGLKEIKGQA

SEQ ID NO: 177070 - protein, 418 aa, Unknown
  Bacterial polypetide isolated from the Sargasso Sea
MKIKQIEAVEVLDSRGKPTISTTVYLEDGSSGTAIVPSGASAGSFEAYELRDGDNSRYFGFGTLKAVEQVKGLSSHLTGIESDDQNKIDTLLLDIDGTKNKEKVGANSILSVSLACARASANSLNISLYEYINILFNNLTSRENKFSIPRPMLNILNGGVHANNNIDIQEFMIIPSDKFSFKDGLRKATEVYMHLKTNLDQNKLSTTVGDEGGFAPNFESNQIVIEKIIKSIEETGMKYGEDIFLGLDCASSELHKDKTYCLDGEGTKFSSDEMIDYLIDLVNKYQIISIEDPLDESDWSAWKKFSEKTNNLQIVGDDIFVTNKKLLEKGIAENVANSILIKPNQIGTLTETFQAIDLAKANNYGTIISHRSGETEDTFISDLAVGVDARQIKAGAPARSDRTAKYNRLLIIENELYP

SEQ ID NO: 177071 - protein, 422 aa, Unknown
  Bacterial polypetide isolated from the Sargasso Sea
MNTNINKIHARYILDSRANPTVEVDITLEDGSFGRAAVPSGASTGKLEAHELRDGDKSYLGKGVSKAVNNINTLINDHLSGQDAGNQENIDKLMIALDGSDNKGKLGANAILAVSLANLKAFSKSSGKHIYEIIPNVYGAPSLPVPFMNILNGGAHADNKVDIQEFMIVPYGFERFDSSLQAGVEIYHTLKELLKEKGLSTNVGDEGGFAPNLNSSSEVIETILEAVKKSGYNPEEEVAIALDAAASELHKDGKYLIEDEELSSNEMVDYLVNLANQYPIISIEDGLSEDDWEGWTLLTEKLGDNIQLVGDDLFVTQEKILQKGIDQNAANSILIKINQVGSITETLETMTLGKKNNYTSMVSHRSGETEDTFISHLVTGTSSGQIKTGAPARSERAAKYNELLRIGEKVGFETFNNKKWKN

SEQ ID NO: 177072 - protein, 426 aa, Unknown
  Bacterial polypetide isolated from the Sargasso Sea
MSEIISVKSIQVLDSRGNPTVEAEVTLKDGTSGRASVPSGASTGSREAVELRDGNNEIYLGKGVLAAVENINSEIQTALIGHDIYDQSSIDQIMIDLDGTENKSRLGANAILAVSLACIKAASASKKTDLFRYLSDGPYSFPVPMMNIINGGEHANNNIDIQEFMILPVNFERFSDALRAGVEIFHSLKDVLDKQGMSTAVGDEGGFAPNLKNNVAAIETIIEAIESRGYEAGNDILIGLDVASTEFYRDGKYHLSSEDKSFDSAQFVDYLTQMVDQYPIITIEDGMAEDDWGGWKLLSDAIGEKVQLVGDDLFVTNPSILKQGIDQGIANSILIKPNQIGTLTETLEAVSLANRNGYTSVISHRSGETSDYTIADISMNPKISQIKTGSLCRSDRIEKYNQLLRIESIVGDQAEYPGKKAFNQLK

SEQ ID NO: 177073 - protein, 263 aa, Unknown
  Bacterial polypetide isolated from the Sargasso Sea
MGEKLKPIIERVHAREILDSRGFPTVEVEITASGRTSISAVPSGASTGEFEALELRDNDNNRYLGKGVLKAVNNVINIFGPKLIGMDASSQKEIDDMLINLDGTVNKSSFGANASLGISMACSVVSAAFYNKPLFSYLNPNSDIMPIPMINVLNGGMHADQGSDIQEIMLFPHGAKNFTNAIQMASEIFHSLKSELKKQGMSTTVGDEGGFAPSLNSNGQAIEILLNSIEKAGYNVGSDVSLALDVAASSFFKDGKYHLKIDG

SEQ ID NO: 177074 - protein, 413 aa, Unknown
  Bacterial polypetide isolated from the Sargasso Sea
MSKISKVRAIQVFDSRGVPTISCKVNLDDGTSAIAMVPSGASTGSKEALELRDGNKAYHGKGVLNAVSNVNKKLSSLVIGKDPGDQNEIDKILIEFDGTSDKSAIGANAILAVSLATAKAASIMQRIPLYKHFSNIYKNITGDSANPAMPMPMFNILNGGEHSNNNIDIQEFMIIPSGAKTFEEVMQWSVEIYQNLKKILSSNNHSIAVGDEGGFAPNLKSNEEAIKLIIEAIKNSNLDLKKDINIALDCAASEFFDGSKYFMKGENQNLTSEELVNYLESLVKKYPITSIEDGMDENDENGWKLLTSQLGDKCQLVGDDLFVTNKKILKEGVQENIANSILIKLNQIGSLTETIETIHLAKESNYKPIISHRSGETEDTIIADLAVGLGVKQIKLVHLAGQIELQNIIDCFG

SEQ ID NO: 177075 - protein, 430 aa, Unknown
  Bacterial polypetide isolated from the Sargasso Sea
MKEQEIISKVSGYEILDSRGNPTVAAEITLNDGRSSMAFVPSGASTGKYEAHEKRDEEERRYLGKGVKKAISSIDGEINELLSGRSPHDQIDIDKRLCELDGTLEKNKLGANAILAVSLAVARSSSSVKGQPLYQTINQTFKEISGEESKHILPIPMMNILNGGEHADNKIDFQEFMIQPVEFDSFSKALQCGVEVFHTLKKVLKEKNLSTSVGDEGGFAPQLFSAEEALDLIMDSIEIAGYKAGKEVFICLDCASSEFYKDNLYKLTGMKKDFDSQGLTEYLVGLTEKYPITSIEDGLDEDDWVGWSTLNKNLGSKVQLVGDDLFVTNKSRLQRGIKENSANSILIKVNQIGSLTEALETIHIARKNGFKNVISHRSGETEDAFIADLSVGVGAKQIKTGAPSRSDRVSKYNRLLLLEAKTDIKFAGLK

SEQ ID NO: 177076 - protein, 292 aa, Unknown
  Bacterial polypetide isolated from the Sargasso Sea
KNNAHILPMPMMNILNGGSHADNLVDIQEFMIMPFGAKRFSEALQMGTEVFHHLKSVLKSKALSTAVGDEGGFAPNLKSNEEAIEIILESVLQAGLKPGSDIYLTLDVAASELFEDSVYNLFSENKKLDSIEMVEYLSGLVEKYPIVSIEDGLHEDDWEGWKQLTNKLGNKIQIVGDDLTVTNISRLERSIEESSMNAILIKLNQIGTVTETIQTINHAKNANFGAIISHRSGETEDTTIADLAVAMGMGQIKTGSASRTDRTCKYNQLLRIEEELGHNGTIANIGYLGIPN

SEQ ID NO: 177077 - protein, 231 aa, Unknown
  Bacterial polypetide isolated from the Sargasso Sea
SKNYSTAVGDEGGFAPDLKSNEEALDLICEAIEKAGYKIGKDIFLALDVAATELFSENKYSYNSKKLATDELIEVYEKLVNEYPIISIEDPLDEDDWDAWSLLTSKIGSKVQLVGDDLFVTNIERLEKGIEKKAGNSILVKINQIGTISETIDAINLAKKNHFSYIISHRSGETEDSFIADLAVATGSGQIKTGSCSRTDRTSKYNQLLRIEDLLGSGSKFAGLSTFKIKT

SEQ ID NO: 177078 - protein, 424 aa, Unknown
  Bacterial polypetide isolated from the Sargasso Sea
MQKISSVNAIQVFDSRGVPTISCKITLEDGISASAMVPSGASTGSKEAVELRDNEITYHGKSVIKAVNNINNILSSLVIGKNPNNQKEIDESLILFDDTKDKSNVGANAILAISLAVAHVAAKANNISLYEHFSRVYKDITGENVNHSMPLPMFNILNGGEHADNNIDIQEFMIIPSGAKDFVEVMQWATEIYHNLKKILLINNHSTAVGDEGGFAPSLESNDEALKLIVDAIKETELVPGKDVNIALDCAASEFFDGKEYILTGESKKLSSSAFTDYLDDLTKKYPIVSIEDGMDENDIEGWKLLTEKLGSTCQLVGDDLFVTNKKILKDGINKEMANSILIKFNQVGSITETIETIHFANQNNFKSIISHRSGETEDTTIADLAVGLGIGQIKTGAPCRSDRVAKYNRLLWIEEESSNILLK

SEQ ID NO: 177079 - protein, 230 aa, Unknown
  Bacterial polypetide isolated from the Sargasso Sea
MSKIKKIHGRQIFDSRGNPTIEVDITLEDGSFGRASVPSGASTGAYEAYELRDGAKALSGKTVLKAVNGINTEINDLLSGMEAYEQEAIDNRMIDLDSTKNKSRLGANAILGVSLALSRAQANSEGKPLYEYLNSSDSYILPVPMMNLINGGAHSNNSLFIQEFMIMPISSETFNQAIITGSEIFHSLKNLLENDGFSTNVGDEGGVAPDLKTSEEALSYLCKAIEKSRL

SEQ ID NO: 177080 - protein, 418 aa, Unknown
  Bacterial polypetide isolated from the Sargasso Sea
MSKITKVVSRQVFDSRGIPTIETEIFCGKVSSKAICPSGASTGSYEAFEKRDVTNKKYLGKSVFSAVSKVNKIISKKILNKNVHNQELIDSILIRLDGTKQKNKLGANAILSVSIAVKKLSAKLKKIPLYKNFLIKKNFKLPFPLMNIINGGAHANNSLKIQEFMIRPDKAKNFSEAMNICFLVIQNLKKLLISKNLSTSVGDEGGFAPMISKNEEALKLISNAIKKAGFVNGKDVSICLDVAANELFKNNKYAIDSKKYISYKDTISFYSKIIKKFKIKSIEDPFAENDWKSWSDLHKKEKKIQIVGDDLYVTNLQRLKKGFLYQSSNSILIKLNQIGTVSETLEVIKFAQNIGYTTIISHRSGDSEDTFISDLAVGTNSNQIKTGSLCRSERVAKFNQLLRIEADLLKSKNMAKLK

SEQ ID NO: 177081 - protein, 428 aa, Unknown
  Bacterial polypetide isolated from the Sargasso Sea
MKSHIKNIFSREILDSRGNPTVEVDLVLENEIVARAAVPSGASTGDFEAVELRDNDKNRYMGKGVLSAVNNVNSEIRNALIGIDINNQENIDNILIELDGTENKSRLGANAILGVSMAACRAGAKANDIPLYDYLSIKSDYVMPIPMMNILNGGSHAENTIDIQEFMIFPIGANSFSNALQMGTEIFHQLKSELSQKGLNTAVGDEGGFAPDLTSNEQAIEIILAAITNAGYKSGEEVFIALDVAASEFFKNDLYALASEEKTYSSGEMINYLSDLVKKYPIISIEDGLDQSDWDGWRKLNLEIGANIQIVGDDLTVTNLNRLNRAVDEKSMNSILIKLNQIGTITETVQAVQLAKKVGFGAIISHRSGETEDTIISDFSVAMGMGQIKTGSLSRSDRVAKYNQLIRIEEELGNKAKYATMDFIGMSR

SEQ ID NO: 177082 - protein, 424 aa, Unknown
  Bacterial polypetide isolated from the Sargasso Sea
MNKKIKSINARHILDSRANPTIEVEVTTSDNIKGRAAVPSGASTGALEAHELRDNDPSYNGMGVNKAIENVKTIISDTLIGEDVTDQSNIDDKLIELDGTDNKNNLGANAILAVSMASMRASANQQNKQLFELFPNIYGPPSLPVPFMNILNGGAHADNSVDIQEFMIVPFGFETFDTSLRAGVEIYHVLKKRLKSNKLSTNVGDEGGFAPNFNTSTEILDEIMQSISEAGYEPGRNVSLALDVAASEFFTDDFYRIEGNELNSQEMSDYLINLTSNYPIISIEDGLAEDDWDGWKYLTEKIGDTIQLVGDDLFVTQEKILEKGVTDSCANSILVKVNQVGSVSETINTMTLAKDSNYSSIVSHRSGETEDTFISHLCVGTSSGQIKTGAPARSERTAKYNELLRIGEKIGFDQFNIQELGYSK

SEQ ID NO: 177083 - protein, 426 aa, Unknown
  Bacterial polypetide isolated from the Sargasso Sea
MSEIISVKAIQVLDSRGNPTVEAEVTLEDGTTGLASVPSGASTGSREAVELRDGDKDIYLGKGVSAAVKNINSEIQSALKNQDIYDQSKIDQIMIDLDGTENKSRLGANAILAVSLACIKAAAASKDIRLFKHLSPGPYTFPVPMMNIINGGEHANNNIDIQEFMILPVNFDRFSDALRAGVEIFHSLKDVLHEKGMSTAVGDEGGFAPNLENNKAAIEIIIEAIESRGYQAGSDIFIGLDVASTEFYRDGEYHLSSEGQAFDSSDFVNYLSQMVDEYPIITIEDGMAEDDWDGWKLLSDAIAKKVQLVGDDLFVTNPSILKEGIDRGIANSILIKPNQIGTLSETLEAVSLANKNGYTSVISHRSGETSDSTIADISMNPQISQIKTGSLCRSDRIEKYNQLLRIESIVGDEAEYLGKKAFNQII

SEQ ID NO: 177084 - protein, 414 aa, Unknown
  Bacterial polypetide isolated from the Sargasso Sea
MGAAISDIFARAIIDSRGNPTVEVDCYVDGVLRGRAAVPSGASTGTHEAVELRDGGTQWMGKGVQEAVDNVNGPIREALIGMNPSEQESIDSLLIKLDGSENKGSLGANAILGASLACLRASSDGELWKHICHGDEISLPVPMMNILNGGAHAESNVDVQEFMVVPHGFQSFSEALRAGVEIYHSLKTTLKQEGLLGGVGDEGGFAPNLSRNEEGLRLVREAIEVAGYAPGKEVSIALDVAAQEFFDGSNYLIDGELISGTNLGRKYSDWLDEYPIVSIEDPFGEDDWDSWKEFTSREGHRVQIVGDDLYVTNPKRLEKGISIQASNAILIKLNQIGTFTETMEVIRKSREAGFGTIISHRSGETSDDIISDLAVGTNSMQIKTGAPARSDRTSKYNQLIRISEEVGNYSQLFQ

SEQ ID NO: 177085 - protein, 105 aa, Unknown
  Bacterial polypetide isolated from the Sargasso Sea
MAKIINVIGREIMDSRGNPTVEAEVHLEGGFIGMAAAPSGASTGSREALELRDGDKSRYLGKGVLTAVANVNGPIRAALIGKDATAQAELDQIMIDLDGTENKDK

SEQ ID NO: 177086 - protein, 431 aa, Unknown
  Bacterial polypetide isolated from the Sargasso Sea
MAKIINVIGREIMDSRGNPTVEAEVHLEGGFIGMAAAPSGASTGSREALELRDGDKGRYLGKGVLTAVANVNGPIRAALIGKDATAQAELDQIMIDLDGTENKDKLGANAILAVSLAAAKAAAAFKGMPLYAHIAELNGTPGQYAMPVPMMNILNGGEHADNNVDIQEFMVQPVGAKNFREALRMGAEIFHTLKKVLHGKGLSTSVGDEGGFAPNLSSNADALAVIKEAVELAGYKLGTDVTLALDCAASEFYKDGKYNLSGEGKVFDSNGFSDFLKSLTEQYPIVSIEDGLDESDWDGWAYQTKIMGDKIQLVGDDLFVTNTKILTRGIENGIANSILIKFNQIGSLTETLAAIRMAKAAGYTAVISHRSGETEDATIADLAVGTAAGQIKTGSLCRSDRVAKYNQLLRIEEQLGEKAPYRGLKEIKGQA

SEQ ID NO: 177087 - protein, 140 aa, Unknown
  Bacterial polypetide isolated from the Sargasso Sea
MDENDWDGWKLLTEKIGDKVQLVGDDLFVTDISRLSKGINEKIGNSILIKFNQVGSLTETISSINLATENNFTSVISHRSGETEDSTISDLCVAFNTGQIKTGSMSRSDRMSKYNQLIRIEEELGESAVYLGKKAFKLNF

SEQ ID NO: 177088 - protein, 173 aa, Unknown
  Bacterial polypetide isolated from the Sargasso Sea
MKNNYYNIEGEKLTNIEMADYLVNLTENYPILSIEDGLGEDDWEGWKYLTDKLGQNIQLVGDDLFVTQEKILQRGIDDGCANSILVKVNQVGSVTETIETMKLAEKNNYNSLVSHRSGETEDTFISHLCVGTSSGQIKTGAPARSERTSKYNELLRIGEVVGFDSFNISNWGK

SEQ ID NO: 177089 - protein, 174 aa, Unknown
  Bacterial polypetide isolated from the Sargasso Sea
MSKITKIIARQIFDSRGNPTIEVEVFSNKISASAICPSGASTGSFEAYEKRDQNNKKYLGKSVFKAVDTVNKIISKKIKNQNIHDQVKIDNILIRLDGTKQKKKLGANTILAVSMAIKKLSAKVKNIPLYKTFLISKNFKLPYPLMNIINGGAHANNGLQIQEFMIRPDKAKNF

SEQ ID NO: 177090 - protein, 352 aa, Unknown
  Bacterial polypetide isolated from the Sargasso Sea
MVGMEVSDQKALDQAMLDADGTGNKGNLGANAILAVSLAAAKAAAVDQGKPLYEYISDLQDDDNEYSLPVPMMNIINGGEHADNNVDIQEFMIQPVGAPTVAEAIRYGAEIFHALKGVLKKRGLNTAVGDEGGFAPNLPSNEAALEAIMEAIEIAGYKAGDDVTLALDCAASEFYKDGKYVLAGEDRSMNSEEFADYLAELCDRYPIISIEDGMDESDWDGWKILTEKLGKKVQLVGDDLFVTNTRILQRGIDEKVANSILIKFNQIGSLTETLDAIKMAKDAGYTAVISHRSGETADTTIADLAVATAAGQIKTGSLCRSDRVAKYNRLIRIEQELGRAAYHGRKEFKLLG

SEQ ID NO: 177091 - protein, 335 aa, Unknown
  Bacterial polypetide isolated from the Sargasso Sea
MSKISKVIARQVFDSRGNPTIEAEVFSKNTSSSAICPSGASTGSYEAFEKRDKNNKKYLGKSVLNSVKLVNKIISKKLKNQNVHNQEKIDSLLINLDGTKQKTKFGANAILSVSMAVKKLSAKLKRIPLYKSFLVKKDFKLPYPLMNIINGGAHANNGLRIQEFMIRPDKAKSFSEAIRICFLVIYNLRSLIKKKSLSTSVGDEGGFAPMISKNEEALNLIVKAINRSGFKNGKDVSICLDVAANELFKKNLYSIHSKKFENVEKSIKNYIKIINKYKIKSIEDPFSENDWSSWGKLMGLVKKTQIVGDDLYVTNLERLKKGFLNSSSNAILIKL

SEQ ID NO: 177092 - protein, 419 aa, Unknown
  Bacterial polypetide isolated from the Sargasso Sea
MSKITKVIARQVFDSRGNPTIEAEVYCKNLSASSICPSGASTGTYEAYEKRDKTNKRYLGKSVLKPVSYVNKVVSKRLKNQNVHNQEKIDHILIKLDGTKQKTKIGANAILAISMAVKKLSAKIKKIPLYKSFIVKKNFKLPYPLMNIINGGAHANNGLRIQEFMIRPDKAKSFVDGVRICFLVINSLRTLIKKMGHSTSVGDEGGFAPMISDNENALKLIVQAIKQAGFTNGKEVSICLDVAANELIKKQKYSIHSKKFISVDQSIQKYLKLIKKYKIKSIEDPFGENDWNAWTKFVNKTKNKVQIVGDDLFVTNLERLKVGFLNLSANSILIKLNQIGTVTETLEVIKFAHLIGYKTIISHRSGDSEDTFIADLAVGTDSNQIKTGSLARSERVSKYNQLIRIEEELGKSSKMNKVN

SEQ ID NO: 177093 - protein, 354 aa, Unknown
  Bacterial polypetide isolated from the Sargasso Sea
NTEISNVLCGMEASAQEEIDNKMIELDSTNNKSRLGANAILGVSLASSRAQANSEGKHLFEYLNSSDSYILPVPMMNLINGGAHSNNSLFIQEFMIMPVSAETFNHAIITGSEIFHSLKSLLENDGFSTNVGDEGGVAPDLKTSEDALSYLCKAIEKAGYRLEEDIVFALDIAASELYNDGQYFLSNDNASSSDDLIDMWEDLTKKYPIFSIEDPLHEDDWDGWVNLNERIGKKTQIVGDDLFVTNPERLKMGIEKNAANSILIKVNQIGTITETLETINIAKNNKYSCVISHRSGETEDTFIADLSVSTNSGQIKTGSMTRSDRVAKYNQLIRIESDLKNNSRYAGKSILKKN

SEQ ID NO: 177094 - protein, 413 aa, Unknown
  Bacterial polypetide isolated from the Sargasso Sea
MKEQEIISKVSGYEILDSRGNPTVAAEITLNDGRSSMAFVPSGASTGKYEAHERRDEEEGRYLGKGVKKAISSIDGEINELLTGRSPHDQIDIDKRLCELDGTSEKNKIGANAILAVSLAVARSSSTVKGQPLYQTINQTFKEISGEEPKHILPIPMMNILNGGEHADNKIDFQEFMIQPVEFDTFSKALQCGVEVFHTLKKVLKEKNLSTSVGDEGGFSPQLFSAEEALDLIMDSIEIAGYKAGKEVFICLDCASSEFYQDNLYKLTGMKKEFDSQSLTEYLVGLAEKYPIISIEDGLDEDDWEGWSVLNERLGSKVQLVGDDLFVTNKNRLQRGIKENSANSVLIKVNQIGSLTEALETIYLARKNGFKNVISHRSGETEDAFLADLSVGVGARQIKTGAPSRSDRVSKYN

SEQ ID NO: 177095 - protein, 424 aa, Unknown
  Bacterial polypetide isolated from the Sargasso Sea
MSKIKKIKGRQIFDSRGNPTIEVDITLEDGSFGRASVPSGASTGAYEAYELRDGEKTLSGKTVLKAVEGINTEISNVLCGMEASAQEEIDNKMIELDSTNNKSRLGANAILGVSLASSRAQANSEGKHLYEYLNSSDSYILPVPMMNLINGGAHSNNSLFIQEFMIMPVSAETFNHAIITGSEIFHSLKSLLENDGFSTNVGDEGGVAPDLKTSEDALSYLCKAIEKAGYRLGEDIVFALDIAASELYNDGQYFLSNDNASSSDDLIDMWEDLTKKYPIFSIEDPLHEDDWDGWVNLNERIGKKTQIVGDDLFVTNSERLKIGIEKNAANSILIKVNQIGTITETLETINIAKNNKYSCVISHRSGETEDTFIADLSVSTNSGQIKTGSMTRSDRVAKYNQLIRIESDLKNNSRYAGKSILKKN

SEQ ID NO: 177096 - protein, 312 aa, Unknown
  Bacterial polypetide isolated from the Sargasso Sea
NTILAVSMAAKKLSAKVKKIPLYKNFIVKKNFRLPFPLMNIINGGAHADNGLRIQEFMIRPDKARSFNDAVRMCFLVINNLKKLLKKAGHSINVGDEGGFAPIISDNENALKLIVKAIKKSGFKNGKDISICLDVAANELVKKGKYSIHSKKYISVDSSINKYLNLIKKYQIKSIEDPFGEDDWKAWTKFLNKSKNKTQIVGDDLFVTNLERLKVGFLNLSANSILIKLNQIGTVTETLEVIKFAQLIGFKTIISHRSGDTEDTFIADLAVGTNSNQIKTGSLARSERIAKYNQLLRIEEGLGRSAKMNKIN

SEQ ID NO: 177097 - protein, 149 aa, Unknown
  Bacterial polypetide isolated from the Sargasso Sea
MKLKNITAREIFDSRGNPTVECELIFENIPFPFRGMVPSGASTGKFEALELRDLDSNRMSGKGVLKAVSNVNELIKPIILEKSFNGFKDFDKFLIDLDGTENKSKFGANAILSLSLAYYKAWSYSNFGAIFLSQGTEKLTIPVPMLNVI

SEQ ID NO: 177098 - protein, 427 aa, Unknown
  Bacterial polypetide isolated from the Sargasso Sea
MSAIVDIIGREILDSRGNPTVECDVLLESGTMGRAAVPSGASTGSREAIELRDGEAGRYNGKGVLKAVEHINTEISEAIMGLDASEQAFLDKTLLELDGTDNKSRLGANAMLAVSMAVAKAAAEEAGLPLYRYFGGSGAMQLPVPMMNIVNGGAHANNSLDIQEFMIVPVSQPTFREALRCGAEVFHALKKILSDRGMSTAVGDEGGFAPNFGSNDECLSTILQAIEKAGYRAGEDVLLALDCAASEFYHDGKYQLAGEGLQLSSAEFTDYLATLADKFPIVSIEDGMHESDWEGWKLLTDRLGKKVQLVGDDLFVTNTRILKEGIEKGIANSILIKINQIGTLTETFAAIEMAKRAGYTAVISHRSGETEDSTIADIAVGLNAGQIKTGSLSRSDRISKYNQLLRIEEDLGDIASYPGKSAFYNLR

SEQ ID NO: 177099 - protein, 430 aa, Unknown
  Bacterial polypetide isolated from the Sargasso Sea
MDNSTIYKIIAREILDSRGNPTIEVDVTLSDGSLGRAAVPSGASTGEHEAVELRDNDTLRYLGKGVKKAVKIVNTTIANEIIGLDALNQKNIDEAMISLDGTSNKSKLGANSILGVSIAVAKSASNSKKMPFYEYINQNKTYTMPIPMMNIINGGSHADNNVDFQEFMVFPIGARSFSNALQMGTEIFHQLKKVLKNKNLSTSVGDEGGFAPNLKSNHEAIEVILKAIDNAGYKAGKDVYIALDVAASELFDKDKYIIKSENRSLSSDQMISYYQNIIETYPIISIEDGLDENDWGGWSLMNETLGDKVQIVGDDLTVTNINRLQKAIDLKAMNAILIKLNQIGTLTETLDAIALAKKADFGAIISHRSGETEDTTIADLAVASGVGQIKTGSASRTDRICKYNQLLRIEQNLSNKSNYPGAEVLGHNEK

SEQ ID NO: 177100 - protein, 417 aa, Unknown
  Bacterial polypetide isolated from the Sargasso Sea
MSKITKVVARQVFDSRGNPTVEAEIFVKNLSSSSICPSGASTGTYEAFEKRDKANKKYLGKSVFIPIKYINSVISKKLKNQNIHNQERIDHILIKLDGTKQKKKIGANAILAVSMAAKKLSAKIKKIPLYKNFLVKSNYKLPYPLMNIINGGAHANNGLRVQEFMIRPDRAKSFSEAVRMCFIVINNLKKLIKQMGHSTSVGDEGGFAPMINDNESALKLIVKAINLSGFKNGKDISICLDVAANELIKNKKYSIHSKKFISVDKSIQNYLKLIKKYKIKSIEDPFGENDWNAWTKFLSKTQKVQIVGDDLFVTNLERLKVGFLNISANSILIKLNQIGTVTETLEVIKFAQLIGYKTIISHRSGDSEDSFIADLAVGTNSNQIKTGSLARSERVAKYNQLIRIEEKLGKHSKMNTI

SEQ ID NO: 177101 - protein, 349 aa, Unknown
  Bacterial polypetide isolated from the Sargasso Sea
GGGREQNKICFCRQILDSRRNPTVEVEVSLDSGASGWAMVPSGASTGQFEAVELRDGEETWSGKGVKKAVSHVNNEIADAVLGLDATDQRVLDQTMIDLDGTDDKSRLGANAILGVSLAVARSAAKDAGIPLFKYIGGANAHLLPVPMFNVINGGMHADNNIDFQEFMVMPVGAASYREALQWGAEIYHSLKSVLKDRKMSTTVGDEGGFAPNLSSNEEALQILIDAIEKSNLTPGDDISLALDVASTEFFQKESYRIEAENLSLNSDEMVSYLAALCDKYPICSIEDGMAEEDWEGWSKLTKELGHKIQLVGDDLFVTNSLRLERGISSGIANSILVKVNQIGTLTET

SEQ ID NO: 177102 - protein, 87 aa, Unknown
  Bacterial polypetide isolated from the Sargasso Sea
IGTVTETIEAIEMARKANLGVIISHRSGETEDTTIADLAVGMGMGQIKTGSISRTDRTCKYNQLLRIEEELGKAAKIANLSYLGIPR

SEQ ID NO: 177103 - protein, 170 aa, Unknown
  Bacterial polypetide isolated from the Sargasso Sea
SENKKLDSIEMVEYLSGLVEKYPIVSIEDGLHEDDWEGWKQLTNKLGNKIQIVGDDLTVTNISRLERSIEESSMNAILIKLNQIGTVTETIQTINHAKNANFGAIISHRSGETEDTTIADLAVAMGMGQIKTGSVSRTDRTCKYNQLLRIEEELGHNGSIANIGYLGIPN

SEQ ID NO: 177104 - protein, 314 aa, Unknown
  Bacterial polypetide isolated from the Sargasso Sea
LGANAMLAVSMAVKKLSAKVKKLPLYKTFSKKNNFQLPYPLMNIINGGAHANNGLRIQEFMIRPDRAKTFTEAMRICFVVIKNLSKLIKDKGLSTSVGDEGGFAPMISSNNQALDLIVSSIKKSGFINGKDVSICLDVAANELYKKNKYSIHSKSYISVDKSIKEYQKIIKKYKIKSIEDPFAENDWLAWNKLMKSIKKVQIVGDDLYVTNLERLKKGFLNISSNSILIKLNQIGTVSETLDVIKFAQTIGYKTIISHRSGDSEDTFIADLAVGTNSNQIKTGSLARSERVAKYNQLIRIEEELGKKARMNKIN

SEQ ID NO: 177105 - protein, 251 aa, Unknown
  Bacterial polypetide isolated from the Sargasso Sea
SNSLRAGVEIFHNLKASLNKLSLSTSVGDEGGFAPNLTSNAEALDIILDSIKKSGYKSGEEVYLGLDVASSEFYKNEKYIMSDGHTYNSDEFCGYLENLCDNYPIISIEDGMAENDWDGWSKLTNNLNKKIQLVGDDVFVTNKRIFKKGIDKEVANAILIKFNQIGTITETLETIDLARENNYNYIISHRSGETEDVTIADMSVGTSSGQIKTGSLSRSDRVAKYNQLLRIEEQLGKEYFNKDNVFDRWLK

SEQ ID NO: 177106 - protein, 319 aa, Unknown
  Bacterial polypetide isolated from the Sargasso Sea
MNKIFRVKARQVFDSRGNPTIEAEVFSNNLSASAICPSGASTGTYEAFEKRDKFNKRYLGKSVLKAVELINKKISKKIINQNIHNQEKIDSILINLDGTKQKKKLGANSILAVSMAVKKLSSKIKKKPLYQCFLEKKIFKLPYPLMNIINGGAHANNGLRIQEFMIRPDGAKNFTEAVRMCFVVIQNLKKIIHRKGFSVSVGDEGGFAPMISNNEVALKLIVQAIKKSGFINGKHISICLDIAANELIKKNKYSIHSKNFISVNESIKKYLKLFKKYKIKSIEDPFSENDWKAWYSLMKSVKKVQIVGDDLYVTKFRKI

SEQ ID NO: 177107 - protein, 185 aa, Unknown
  Bacterial polypetide isolated from the Sargasso Sea
MPKIKKIKAREIIDSRGNPTVECDIYLSDEIFGRAAVPSGASTGMHEAIELRDHDKNRYGGKGVLKALSNITEIISPKILNKEFKNIKDFDEFLIATDGTKNKSNLGANATLALSLAFAKSLASYEKKNLFHYLSNSDQYIMPVPMMNIINGGSHADNKVDIQEFMIAPVGASSFRESIRYEQKF

SEQ ID NO: 177108 - protein, 425 aa, Unknown
  Bacterial polypetide isolated from the Sargasso Sea
MSKISNVNAIQVFDSRGIPTIACEIKLDNGICASAMVPSGASTGSKEALELRDSDSNYHGKGVLNAISNINNQLGPLLIGKESENQIEIDRILIDYDGTVDKSSMGANAILAISLASSHVAAKNKKVNLYEHFSSIYKDITGKANKYSIPMPMFNILNGGEHADNNVDIQEFMIVPSGAKDFTQIMKWSTEIYHNLKEILLSKNYSTAVGDEGGFAPNLNSNEEAIELIIESIKASKLNPGDDVSIALDCAASEFFDGNNYFLKGENKKYTYAEFTNYLDNLITQYPISSIEDAMDENDVEGWKLVTDKLGKKCQLVGDDLFVTNKKIFLEGINHKLANSILIKFNQVGTITETIGTIDCARENGYKCIISHRSGETEDTTISDLAVGLGASQIKTGAPCRSDRIAKYNRLLWIENKSNDILLNE

SEQ ID NO: 177109 - protein, 93 aa, Unknown
  Bacterial polypetide isolated from the Sargasso Sea
MLVKVNQIGTLSETLSAVEMAHRANFTNVMSHRSGETEDATIADLAVATNCGQIKTGSLARSDRLAKYNQLIRIEEELGDTAVYAGHSILKSK

SEQ ID NO: 177110 - protein, 126 aa, Unknown
  Bacterial polypetide isolated from the Sargasso Sea
SWRKFMTSMNKKIQIVGDDLYVTNLERLKIGFLNQTSNAILIKLNQIGTVTETLEVIKFAHNIGFNTIISHRSGESEDTFIADLSVGTNSNQLKSGSLCRSERVAKYNQILRIEETLGKKAKMNSL

SEQ ID NO: 177111 - protein, 239 aa, Unknown
  Bacterial polypetide isolated from the Sargasso Sea
MQWSSEVYINLKEILHSMKLSTSVGDEGGFAPNLNSNEEAIKLIEESIIKSDLKPGIDINIALDCAASEFFKNGKYILSGEGKELSSDEFSDYLKNLISKYPITSIEDGMDENDIDGWKVLTKKIGNKCQLVGDDLFVTNKEILSKGIKKEIANAILIKFNQVGSLTETIRAIECATSAAYKSIISHRSGETEDTTIADLAVGLGVGQIKTGAPCRSDRVSKYNRLLWIEEENNKILLK

SEQ ID NO: 177112 - protein, 424 aa, Unknown
  Bacterial polypetide isolated from the Sargasso Sea
MNKKIKSINARHILDSRANPTIEVEVTTSDNIKGRAAVPSGASTGALEAHELRDNDSSFNGMGVNKAIENVKTIISDTLVGEDVTDQSNIDNKLIELDGTDNKNNLGANAILAVSMASMRASASQQNKQLFELFPNIYGPPSLPVPFMNILNGGAHADNSVDIQEFMIVPFGFETFDTSLRAGVEIYHVLKKRLKSNKLSTNVGDEGGFAPNFNTSTEILDEIMQSISEAGYEPGGNVSLALDVAASEFFTDDFYRIEGNELNSQEMSDYLINLSSNYPIISIEDGLAEDDWDGWKYLTEKIGDTIQLVGDDLFVTQEKILEKGVADSCANSILVKVNQVGSVSETINTMTLAKESNYSSIVSHRSGETEDTFISHLCVGTSSGQIKTGAPARSERTAKYNELLRIGEKIGFEQFNIQELGYSK

SEQ ID NO: 177113 - protein, 420 aa, Unknown
  Bacterial polypetide isolated from the Sargasso Sea
RHIVGREILDSRGNPTVEVDVTLNSGAFGRAAVPSGASTGAHEAAERRDGDPARYGGKGVLGAVEVVNTEIYEALAGLDADEQEHIDRLMCDLDGTENKGRLGANAILGVSMAVGKAAAEDARLPLYRYVGGSHARTLPVPMMNILNGGAHADNPIDIQEFMIMPVGAASIADAVRVGSEIFQTLKKQLLDAGHGTNVGDEGGFAPNLKSADEALGFISKSIEAAGYKPGDDVVLALDAASTEFYVDGKYALAGEGKLFDSGAMVEYLVDLCARYPIISIEDGMAEDDWGGWVALTEAVGDRVQLVGDDLFVTNPVRLRDGIAKGAANSILIKVNQIGTLSETLDAVETAHKASYTSVMSHRSGETEDATIADLAVATNCGQIKTGSLSRSDRLAKYNQLIRIEEALGPAATYAGRSILR

SEQ ID NO: 177114 - protein, 428 aa, Unknown
  Bacterial polypetide isolated from the Sargasso Sea
MYKIKSVVGREILDSRGNPTVGVEIELDGGIIGSASVPSGASTGSREALELRDSDPNRFNGKGVLKAVENINKKIEKILIDKDSRNQKEIDELMIDLDGSEEKKNLGANAILGVSLAVLSASSRAEGLEIYEKIAELSEEKKPSLLPVPMLNIMNGGAHAINSTDFQEFMIAPMGFDSFGESIRAGSEIYFTLGKILENEGLSTNVGYEGGYAPSNLSNKQVLDFIITATEKAGYIPGDDIFISLDPASSEFGNKSEYLLSKENIKLSSEEMVEYYSNLIEEYPIYSIEDGLSEDDWNGWNIFTSKHGKKTQIVGDDLFVTQKKYLEKGINEKSANAILIKFNQVGTISETLETIQLASNNNFKSVISHRSGETEDTTIADLAVGTNSGQIKTGAPARSDRVAKYNRLLRIEEKLKDKATFAGKSILL

SEQ ID NO: 177115 - protein, 427 aa, Unknown
  Bacterial polypetide isolated from the Sargasso Sea
VEKTLKPIIEKIHAREILDSRGFPTVEVEVTASGHTGLSAVPSGASTGEFEALELRDVDSSRFNGKGVLSAVNNVINHFGPALIGKDASDQKSIDELLINLDGSPNKSTYGANASLGISMACAVVSASFFNKPLYEYLNPQSSIMPIPMINVLNGGMHADQGSDLQEIMLFPHGAESFSKSIQMGSEVFHCLKNELKSRGLNTTVGDEGGFAPALKSNDHAIEMLLNSIEKAGFVVGKDISLALDVAASSFYKDGKYHLKVDGSILGTDEMISFYENLISQYPIVSIEDGLDENDWRGWTSLNKVLGDKIQIVGDDLTVTNPKKLQKAIDEKSINSILIKLNQIGTVSETIESIEIAKSNDYNYIISHRSGETEDTFISDLSVAMGGGQIKTGSVCRSDRTAKYNRLLRIEEMLESPTFCNSLSFIK

SEQ ID NO: 177116 - protein, 287 aa, Unknown
  Bacterial polypetide isolated from the Sargasso Sea
MMNIINGGAHANNNIDIQEFMIIPVSAPNFKESLRYGAEVFHCLKKVLNQKQLNTAVGDEGGFAPDLNTNEEALDTILEAIMNVGLKEGKDIVLALDVASSEFYKDGYYHLESENRKFNSEEFSSYLGHLVNSYPIISIEDGMDESDWNGWKILSEELGHKIQLVGDDLFVTNKKILQDGVDKEIANSILIKPNQIGTITETIEAIDLAIKSNYTAIVSHRSGETSDTTISDIAVGTRASQIKTGSLSRSDRVAKYNQLLRIEESLGNRATFDVKNAFAVPFLNNDT

SEQ ID NO: 177117 - protein, 423 aa, Unknown
  Bacterial polypetide isolated from the Sargasso Sea
MKIKDVKGRQILDSRGNPTVEVDIKLDDDSEGRGISPSGASTGSLEALELRDDNKEMYNGKSVLKAVANVNENIKNAIKGKSFNSQEDFDNFLIDLDGSENKNVLGANAILSSSLAYAHASSLSKNIPLYKSFINNNYTLPVPMMNILNGGAHANNELNFQEFMILPIKFTSFSESLRAGTEIFHELKKLLISKNLSSAVGDEGGFAPNLSSNEDALNIILDAINSAGYTPGEDIFLGLDVASTEFYKQDKYILNDKNTLDSSSFCDYLVKLCDNYPIISIEDGMSEDDWNGWHEITERLGNKIQLVGDDIFVTNKNILQKGIDSIAANSILIKLNQIGTLTETLQTIDLAKKNNYTCIISHRSGETEDTTIADLSVGVDAGQIKTGSLSRSDRVAKYNRLLRIEEELGNNKYSNNVFNRWLS

SEQ ID NO: 177118 - protein, 295 aa, Unknown
  Bacterial polypetide isolated from the Sargasso Sea
IANKQSLYKSLGKSYSLPIPLMNIINGGAHADNDLNIQEFMIRPDSAKNFTDAMEKCFLVIQNLKKLLQSKKMLTNVGDEGGFAPSINSNEEALDLIVQAIEKSKLKPGNDVVICLDVAANELKNEKGEYSVQSSNFLPVADVVSYYKKLTSNYPIKSIEDPFAEEDWQSWKKITSAIGNNVQIVGDDLFVTNSKRLEKGIKEKSANSILVKPNQIGTLTETLEVISMAKKANFSTIISHRSGDTEDTFIADLAVATMSSQIKTGSLARSERVAKYNRLLRVEEELGNQAKMARI

SEQ ID NO: 177119 - protein, 94 aa, Unknown
  Bacterial polypetide isolated from the Sargasso Sea
NAILVKLNQIGTLSETIEAINLGKKNNFNSIISHRSGETEDTTIADLSVAVSAGQIKTGSLSRTDRTAKYNQLLRIEEMLGSGAKYAGKSILKH

SEQ ID NO: 177120 - protein, 225 aa, Unknown
  Bacterial polypetide isolated from the Sargasso Sea
MAKIKKIIGRQVFDSRGNPTVEAELFSEIGSTLAIVPSGASTGTHESYELRDNENNEYLGKSVFKAVENINGPIFKAINNIDTKDQKKIDKILIELDGTEQKKRLGANAILAVSIAAIKNAALEKKTPLFKFMGGNAVNKLPIPMMNIINGGAHANNSLEIQEFMIRPDGAESFKECMRMSYLVIQKLKKNLENMNISTSVGDEGGFAPSLKSDEQAIEFIIQSI

SEQ ID NO: 177121 - protein, 422 aa, Unknown
  Bacterial polypetide isolated from the Sargasso Sea
MNTNINKIHARYILDSRANPTVEVDITLEDGSFGRAAVPSGASTGKLEAHELRDGDASFLGKGVSKAVDNINTLINDELVGQDSGNQENIDKLMIALDGSDNKGKLGANAILAVSLANLKAFSQSSGKHVYEIIPNIYGAPSLPVPFMNILNGGAHADNKVDIQEFMIVPYGFERFDYSLQAGVEIYHTLKELLKEKGLSTNVGDEGGFAPNLNSSSEVIETILEAIKKSGYNPEEEVAIALDAAASEFHKDGKYLIEDQELSSNEMVDYLVKLANQYPIISIEDGLSEDDWEGWTLLTEKLGENVQLVGDDLFVTQEKILQKGIDQNAANSILIKINQVGSITETLETMNLGKKNNYTSMVSHRSGETEDTFISHLVTGTSSGQIKTGAPARSERAAKYNELLRIGEKVGYETFNNKKWKN

SEQ ID NO: 177122 - protein, 354 aa, Unknown
  Bacterial polypetide isolated from the Sargasso Sea
NIAIDNINKKISNKLIGLECDDQNNIDNILIDLDGSENKANLGANATLAVSLANSKCAALSNKKSLFKNLGNNFSLPFPLMNIINGGAHADNDLNIQEFMIRPDSAKNFMDAIEKCFIVIQNLKKLLKSNKMLTNVGDEGGFAPSINTNEQALELIVNAIEKSKFKPGKDIVICLDVAANELINGKGEYSIQSKNFSSADANIDYYKKLISNYPIKSIEDPFAEEDWESWKKVTNEIGKNVQIVGDDLFVTNVKRLSKGIKEKSANSILVKPNQIGTLTETLEVISMAKAAGFNTIISHRSGDTEDTFIADLASATMSSQIKTGSLARSERVAKYNRLLRIEEELGNNSKMARI

SEQ ID NO: 177123 - protein, 271 aa, Unknown
  Bacterial polypetide isolated from the Sargasso Sea
PIAFQEFMIVPLNAESFSHAMKIGTEIFHNLKSILSGRGLSISVGDEGGFAPKLKGTEDALETIIKSISSAGFKPGEDVMIALDCASSEFFEDNHYDYRIFEGKNGKVFDSVQQADYLSDLVSKYPIISIEDGMDENDWSGWIHSTNVLGNKVQLVGDDLFVTNTNILQKGIDQKAANSILIKVNQIGTLTETINAINLAKEHGFSTVISHRSGETEDNIIADLAVALNAGQIKTGSLSRSDRMSKYNQLLRIEEQLGSKAFYPKREAFTF

SEQ ID NO: 177124 - protein, 361 aa, Unknown
  Bacterial polypetide isolated from the Sargasso Sea
KFLGKSVNIAVENINNKISNKLKGYDSDDQKKIDKALLDLDGSENKTNLGANATLAVSLANSKCSALSNKKSLFKYLGSTFSLPIPLMNIINGGAHADNDLNIQEFMIRPDSAKNFMDAIEKCYVVIQNLKKLLKSNKMLTNVGDEGGFAPSINTNEQALDLIVNAIEKSNLKPGKDIVICLDVAANELINEKGEYSIQSKNYTSVEDNINYYKKLTSNYPIKSIEDPFAEEDWESWKKITNEIGKSVQIVGDDLFVTNVKRLSKGIKEKSANCILVKPNQIGTLTETLEVISMAKAADFNTIISHRSGDTEDTFIADLASATMSSQIKTGSLARSERVAKYNRLLRIEEELGNQAKMASI

SEQ ID NO: 177125 - protein, 121 aa, Unknown
  Bacterial polypetide isolated from the Sargasso Sea
QLVGDDLFVTNTERLRKGILEKSANSILIKVNQIGTLTETLEAMDLAKSAGFTSVISHRSGETEDTTIADLSVATRAGQIKTGSLSRSERIAKYNRLLRIEEELGDQARFAGDLGLGPKNI

SEQ ID NO: 177126 - protein, 387 aa, Unknown
  Bacterial polypetide isolated from the Sargasso Sea
GASTGVHEALELRDNDRSKYKGKGVLKAVGNINDKISNELVGKSFEDISSFDDFLLQLDGTENKSNLGANATLAASLAFAKCLASFEGHELYSFLGKEHTMSLPVPMMNIINGGSHADNDVDIQEFMVAPIGANNFSEALQYGCEIFHSLKSLLKSKGLNTNVGDEGGFAPNINSSSEVIETVLKSVENAGFKPGKDIYLSLDVASTEFYKNNKYDLQGEKIVLSSDEMIKYLEKLVKAYPIYSIEDGMSEDDWDGWSNLTSTIGKKVQLVGDDLFVTNKKRLQKGISEGAGNSILVKVNQIGTLKEALESIKLAKANNFTTIISHRSGETEDTTIADLSVGVSAGQIKTGSLSRTDRTAKYNQLLRIEEALKSKAKYAGSSILNNN

SEQ ID NO: 177127 - protein, 161 aa, Unknown
  Bacterial polypetide isolated from the Sargasso Sea
IYLTPWFSKYPIITVEDGMAEDDWDGWKLLTEAHGKNVQLVGDDLFVTNTSILKEGIEKGVANSILIKVNQIGTLTETLNAISMAKEAGYTAVISHRSGETEDTTISDLAVATSAGQIKTGSLSRSDRVAKYNRLIKIEDELETNSSYLGKDVFSNILNEI

SEQ ID NO: 177128 - protein, 212 aa, Unknown
  Bacterial polypetide isolated from the Sargasso Sea
MSKITKVIARQVFDSRGNPTIEAEVFANNMKARAISPSGASTGSHEAYEKRDKSNKRYLGKSVFKAVKLINTIISKKLKNQNIHNQEKIDYILIKLDGTKQKKKFGANALLAVSMAVKKLSARIRKIPLYKTFFIKKDFKLPYPLMNVINGGAHANNGLRIQEFMIRPDKAKSITEALRICFLVINNLKILIKKRGESTSVGDEGGFAPNDK

SEQ ID NO: 177129 - protein, 92 aa, Unknown
  Bacterial polypetide isolated from the Sargasso Sea
MQNSILIKLNQIGTVTETLEVIKFAQLIGFKTIISHRSGDTEDTFIADLAVGTNSNQIKTGSLARSERIAKYNQLIRIEEDLGRSAKMNKID

SEQ ID NO: 177130 - protein, 428 aa, Unknown
  Bacterial polypetide isolated from the Sargasso Sea
MNSIIEKIYAREILDSRGNPTIEVDVITKSGVMGRAAVPSGASTGGHEALELRDGDNSRYLGKGVRNAINNVNTIISVTLEGCDVTQQSKNDNLMIALDGTENKSRLGANAILGVSMAIAHAGAKVKNQPLYSYLGKDNDHILPVPMMNILNGGSHADNLVDIQEFMIMPFGADSFSEALQMGTEIFHHLKSVLKSKGMSTSVGDEGGFAPDLRSNEEAIDVILESISKAGMSTGKDIMLALDVAASELFENNIYHLHSENKKLESTEMVNYLNGLVKKYPIISIEDGLHEDDWEGWKQLTKTLGHRVQIVGDDLTVTNISRLKHAIEEHSINAILIKLNQIGTVTETIQAIEMAKKTNLGVIISHRSGETEDTTIADLAVGMGMGQIKTGSISRTDRTCKYNQLLRIEEELGKTAKIANLSYLGIPR

SEQ ID NO: 177131 - protein, 335 aa, Unknown
  Bacterial polypetide isolated from the Sargasso Sea
STGEHEAVELRDGKKKFMGKSVDKAVNNVNELIANELNGQSIFDQEKIDDLMIKLDGTENKSRLGANAILGVSLACIRAASIESKKPLYKYIGGKEARTLPVPMINIVNGGSHSSAPIAFQEFMIVPLGANSFSHAMQMGTEIFHNLKQILVSKGLNTTVGDEGGFAPSFSGTEDALETIIKSVKAAGYRLEKDIKIALDCAASEFYVNGNYDYTIFEKSQGKVINSLEQIDYLSSLTKKYPIISIEDGMDENDWKGWKLLTDKIGERVQLVGDDLFVTNVEKLSKGIANKTANSILIKVNQIGTLTETISAVRMAQRAGYTAVISHRSGETEDT

SEQ ID NO: 177132 - protein, 65 aa, Unknown
  Bacterial polypetide isolated from the Sargasso Sea
MVFKTIISHRSGDTEDTFIADLAVGTKSNQIKTGSLARSERIAKYNQLIRIEEDLGRSAKMNKID

SEQ ID NO: 177133 - protein, 273 aa, Unknown
  Bacterial polypetide isolated from the Sargasso Sea
MNIINGGAHADNGLRIQEFMIRPDKAKSFSEAVRISFLVIQNLKGLIKNKGLSTSVGDEGGFAPMISKNEDALDLIVRAINKAGFRNGRDVSICLDVAANELFKKNLYSIHSKKFESVEKSIKNYVKIINKYKIKSIEDPFSENDWSSWSKLMNSVKKTQIVGDDLYVTNLERLKKGFLNNSSNAILIKLNQIGTVSETLEVIKFAQIIGYETIISHRSGESEDTFIADLAVGTNSSQIKTGSLSRSERVAKYNQLLRIEEELGKKAKMNKIH

SEQ ID NO: 177134 - protein, 423 aa, Unknown
  Bacterial polypetide isolated from the Sargasso Sea
MPKIENLTSIQVLDSRGLPTISTEILLDDGTRSVSMVPSGASTGEKEALELRDGGEAFLGKGVTKAIVNVNDRIKNSLIGENPLDQDHIDQILNNLDGTADKSNLGANAILSVSIASAKASSKSENLDLHNYFNILLGNKMGKTIDQVIPIPMLNILNGGEHADNNIDIQEFMIIPKGAVNFSQAMQWSSEIYWNLKSILKEKGLSTAVGDEGGFAPNLNTNREALELIARAVDKTDLKLGSDICISLDCAASEFYENGTYHLKGEDRELTSSEFVEYLEGLANDFPIISIEDGMDENDLEGWKLLTKQIGGKCQLVGDDLFVTNPEVLKKGISDEIANSVLIKYNQIGTISETLETISIALNNDYQNIISHRSGETEDSSISDLAVGTGAGQIKTGAPCRSERVAKYNRLYWIDKKNSFSYG

SEQ ID NO: 177135 - protein, 419 aa, Unknown
  Bacterial polypetide isolated from the Sargasso Sea
MSKITRVIGRQVYDSRGNPTIEAEVFANNMKARAICPSGASTGSHEAYEKRDLSNKKYLGKSVLKPVELINKVISKKLKNQNIHNQEKIDSILIKLDGTKQKKKFGANSLLAVSMATKKLSARIKKTPLYKTFLTKNNYKLPYPLMNVINGGAHANNGLRIQEFMIRPDRAKSIKEAMRMCFLVINNLRAIIKKSGESTSVGDEGGFAPMINDNEDALRLIVKAIKKSGFKNGKDISICLDVAANELIKKKNYSVHSKKFINTDKTIEKYLKLIKKYKIKSIEDPFAEDDWLSWNKFMKKIAKKTQIVGDDLYVTNLERLKIGFLNKSSNSILIKLNQIGTVTETLEVIKFAHLIGFSTIISHRSGDSEDTFISDLAVGTNSNQIKTGSLARSERVAKYNQLLRIEEKLGKAAKMNKIN

SEQ ID NO: 177136 - protein, 74 aa, Unknown
  Bacterial polypetide isolated from the Sargasso Sea
LEVIKFAKLIGFKTIISHRSGESEDTFIADLAVGTDSNQIKTGSLARSERVAKYNQLIRIEESLGSKAKMNKIH

SEQ ID NO: 177137 - protein, 223 aa, Unknown
  Bacterial polypetide isolated from the Sargasso Sea
MSKILKVHGLQVFDSRGIPTVSCKITLENGLSATSMAPSGASTGSKEALELRDSEESYAGKGVFKAIENINNVLGPLIVGKDPCHQNDIDNILISCDGTADKSKMGANAILAVSLAVATVASKLKKKPLYEHFAEIYKDISGNVPKKTIPMPMFNILNGGEHADNNVDIQEFMIIPSKAKNFSQVMQWSSEIYQSLKSILISKKYSSAVGDEGGFAPSLNSNE

SEQ ID NO: 177138 - protein, 275 aa, Unknown
  Bacterial polypetide isolated from the Sargasso Sea
MPMLNILNGGEHANNNIDIQEFMIIPKAAKNFREAMQWSSEIYWNLKKILKKNGHSTAVGDEGGFAPNLKSNEDAIKLIVESISASKLKPGEDVFLSLDCASSEFYKNKKYHLKGEQKILDSKEFTDYLSNLIDSYPIISIEDGMDEDDHEGWNILTKKIGSHCQLVGDDLFVTNKDILLDGINKNLANSILIKFNQIGSITETIQTIDLAIKHEYKSIISHRSGETEDTTISDLAVGLGVGQIKTGAPCRSDRVAKYNRLLWIEEENSKLSFSK

SEQ ID NO: 177139 - protein, 428 aa, Unknown
  Bacterial polypetide isolated from the Sargasso Sea
MKSHIKNIYSREILDSRGNPTVEVDLVLENDIVARAAVPSGASTGDFEAMELRDQNKNRYKGKGVLSAVNNVNSEIRTALIGTDINNQENIDNILIELDGTENKSRLGANAILGVSMAACRAGAKDNDIPLYDYLSINNDYVMPIPMMNILNGGSHAENTVDIQEFMISPVGANSFSNALRIGTEIFHQLKSELSQMGLGTAVGDEGGFAPDLGSNEQAIEIILTAITNAGYSPGKEVFIALDVAASEFFKNDLYTLKSENKTFSSEEMINYLSDLTKKYPIISIEDGLDQNDWDGWKKLNLEIGANIQIVGDDLTVTNINRLNRAIDEGSMNSILIKLNQIGTITETIQAVKLAKKVGFGAIISHRSGETEDTIISDFSVAMGMGQIKTGSLSRSDRVAKYNQLIRIEEQLGDKAEYATIDFLGLAR

SEQ ID NO: 177140 - protein, 221 aa, Unknown
  Bacterial polypetide isolated from the Sargasso Sea
MPKIENLTSIQVLDSRGLPTISTEILLDDGTRSVAMVPSGASTGEKEALELRDGGQAFLGKGVTKAIDNVNDRIKNSLIGENPLDQDHIDQILNNLDGTSDKSNLGANAILSVSIASAKASSKSENLDLHNYFNILLGNKMGKTIDQVIPIPMLNILNGGEHADNNIDIQEFMIIPKGAVNFSQAMQWSSEIYWNLKSILKEKGLSTAVGDEGGFAPKSQY

SEQ ID NO: 177141 - protein, 307 aa, Unknown
  Bacterial polypetide isolated from the Sargasso Sea
MSKIKKVIARQVYDSRGNPTIEAEVFANNMKARAICPSGASTGTHEAFEKRDVLNKRYLGKSVLKPVESINKIISKKLKNQNIHNQEKIDSILIKLDGTNQKKKFGANALLAVSMAVKKLSARIKKTPLYKTFLVKNNFKLPYPLMNVINGGAHANNGLRMQEFMIRPDRAKSIVEGIRMCFLVINNLKSIIKKSGDSTSVGDEGGFAPMIHDNEDALKLILKAIKKSGFKNGKDISICLDVAANELFKNNKYSIHSKKFISPNNTIDRYLKLIKKYKIKSIEDPFAEDDWLSWNKFMKKITKNTQI

SEQ ID NO: 177142 - protein, 181 aa, Unknown
  Bacterial polypetide isolated from the Sargasso Sea
MSKIKKVVARQVYDSRGNPTIEAEVFSNNLSASAICPSGASTGTFEAYEKRDKSNKKYLGKSVLIPVATVNKLISKKLKNQNIHDQERIDSILIKLDGTKQKTKLGANTILAVSMAVKKLSAKVKKIPLYKNFIVKKNFKLPFPLMNIINGGAHADNGLRIQEFMIRPDKAKSFNDAVRMC

SEQ ID NO: 177143 - protein, 349 aa, Unknown
  Bacterial polypetide isolated from the Sargasso Sea
MAKITKVIGRQVFDSRGNPTIEAEVFYKNISATAICPSGASTGSFEAYEMRDKKNNKYLGKSVLKSVKSINTIISKKLKNQNLHNQEKIDYILINLDGTKQKKKYGANTILAVSMAVKKLSAKIKKIPLFKTFLAKNNYKLPYPLMNVINGGAHANNGLRIQEFMIRPDRAKSIQESIRICFIVINNLKKLIKSRGESTSVGDEGGFAPMIDSNEEALKLIVKAIKISGFKNGKDISICLDVAANELFKKGKYSIHNKKFESPDETIRKYLNLIKKYKIKSIEDPFEENDWISWNKFMRKIKFTQIVGDDLYVTNLERLKIGFLNKSSNSILIKLNQIGTVTETLEVIK

SEQ ID NO: 177144 - protein, 190 aa, Unknown
  Bacterial polypetide isolated from the Sargasso Sea
MPKIENLTSIQVLDSRGLPTISTEILLDDGTSAVAMVPSGASTGEKEALELRDGGQAFLGKGVTKAIDNVNDRIKNSLIGENPLDQDHIDQILNNLDGTSDKSNLGANAILSVSIASAKASSKSENLDLHNYFNILLGNKMGKTIDQVIPIPMLNILNGGEHADNNVDIQEFMIIPKGAVNFSQAMQWSS

SEQ ID NO: 177145 - protein, 418 aa, Unknown
  Bacterial polypetide isolated from the Sargasso Sea
MKIKQIDSLEVLDSRGKPTLCTTVYLEDGSRGTALVPSGASAGSFEAHELRDGDKSRYFGFGTLNAVKQVKDISNHLIGLESNDQNKIDNLLIDIDGTKNKEKIGANSILSISLACTRASANSLNISLYEYINILFNNSASKKTRFSMPRPMLNILNGGAHANNNIDIQEFMVIPSDKFSFKDGLRKATEVYMHLKENLAKKNLSTTVGDEGGFAPNFESNQFVIEEIIKSIEGIGMKYGDDIFLGLDCASSELYKKETYQMKSEGNEFNSDEMIEYLINLVNKYQILSIEDPLDESDWNGWKKFSEKANDLQIVGDDIFVTKKELLEKGITEKVANSILIKPNQVGTLTETLQTIDLAKSNDYGTIISHRSGETEDTFISDLAVGVDAKQIKTGAPARSDRTAKYNRLLMIENELYP

SEQ ID NO: 177146 - protein, 212 aa, Unknown
  Bacterial polypetide isolated from the Sargasso Sea
MSKISKVIARQVFDSRGNPTIETEVFVKDISASAICPSGASTGTYEAFEKRDIKNKKYLGKSVLKPVEYINKVISKKLKNFNIHQQDKIDNLLIRLDGTKQKKRVGANTILSVSIAVKKLSSKIKKIPIYKNLLINKNFKLPYPLMNIINGGAHANNGLRIQEFMIRPDKAKTFSEGLRMCFIVINKLRNLIKKMGYSTSVGDEGGFAPMDK

SEQ ID NO: 177147 - protein, 183 aa, Unknown
  Bacterial polypetide isolated from the Sargasso Sea
EFFEDNHYDYRIFEGKNGKVFDSVQQADYLSDLVSKYPIISIEDGMDENDWSGWIHSTNVLGNKVQLVGDDLFVTNTNILKKGIDQKAANSILIKVNQIGTLTETINAINLAKEHGFSTVISHRSGETEDNIIADLAVALNAGQIKTGSLSRSDRMSKYNQLLRIEEQLGSKAFYPKREAFTF

SEQ ID NO: 177148 - protein, 419 aa, Unknown
  Bacterial polypetide isolated from the Sargasso Sea
MSKISKIIARQVFDSRGNPTIETEVFVKDISASAICPSGASTGTYEAFEKRDINNKKYLGKSVLKPVEFINKVISKKLKNFNIHQQEKIDNLLIRLDGTKQKKKVGANAILSVSIAVKKLSSKIKKIPIYKNLLVNKNFKLPYPMMNIINGGAHANNGLRIQEFMIRPDKAKSFSEGVRICFIVINKLRDLIKKMGHSTSVGDEGGFAPMINDNESALKLIVKAINLSGFKNGKDIVICLDVAANELIKNKHYSIHSKKYVNVDKTISEYLKLIRKYKIKSIEDPFGENDWSAWTKLLTQTKDKVQIVGDDLFVTNLERLKIGFLNVSANSILIKLNQIGTVTETLEVIKFAKLIGYKTIISHRSGDSEDTFIADFAVGTDSNQIKTGSLSRSERVSKYNQLLRIEHNLGKKSKMHNIN

SEQ ID NO: 177149 - protein, 280 aa, Unknown
  Bacterial polypetide isolated from the Sargasso Sea
KLPFPLMNIINGGAHADNGLRIQEFMIRPDKAKSFNDAVRMCFLVINNLKVLLKKAGHSINVGDEGGFAPMISDNESALKLIVQAIKKSGFKNGKDVSICLDVAANELIKKSKYSIHSKNYISVDQSIKKYLELIKKYQIKSIEDPFGEDDWKAWSKFVNRTKNKTQIIGDDLFVTNLERLKIGFLNLSANSILIKLNQIGTVTETLEVIKFAQLIGFKTIISHRSGDTEDTFIADLAVGTKSNQIKTGSLARSERIAKYNQLIRIEEDLGRSAKMNKID

SEQ ID NO: 177150 - protein, 426 aa, Unknown
  Bacterial polypetide isolated from the Sargasso Sea
MPKITNLKARQIIDSRGNPTVECDIEFENSTYGRAAVPSGASTGVHEALELRDNDKSKYKGKGVLKAVGNINDTISTELVGKSFEDISSFDDFLLQLDGTENKSNLGANATLAASLAFAKCLASSEGHELYSFLGKEHTMSLPVPMMNIINGGSHADNDVDIQEFMVAPIGANSFSEALQYGCEIFHSLKSLLKSKGLNTNVGDEGGFAPNINSSSEVIETVLKSVEDAGFKPGKDIYLSLDVASTEFYKNNKYDLQGEKIVLSSDEMIKYLEKLVNAYPIYSIEDGMSEDDWDGWSNLTSTIGKKVQLVGDDLFVTNKKRLQKGISESAGNSILVKVNQIGTLKETLESIKLAKENNFTTIISHRSGETEDTTIADLSVGVSAGQIKTGSLSRTDRTAKYNQLLRIEEALQGKAKFAGSSILNNN

SEQ ID NO: 177151 - protein, 282 aa, Unknown
  Bacterial polypetide isolated from the Sargasso Sea
MAKIKSVKGRQVFDSRGNPTVEAEIFLDNGSSATAISPSGASTGAFEAHELRDKDQNKFLGKSVINAVQNINSKISNKLKNLDLSHQEKIDKILIELDGSENKTNLGANATLAVSLAYAKCTAIANKQSLYKSLGKSYSIPIPLMNIINGGAHADNDLNIQEFMIRPDSAKNFTDAVEKCFLVIQNLKKLLQSKKMLTNVGDEGGFAPSINSNEEALDLIVQAIEKSKLKPGNDVVICLDVAANELMNEKGEYSVQSSNFLSVDDVVNYYKKLTSSYPIKSI

SEQ ID NO: 177152 - protein, 69 aa, Unknown
  Bacterial polypetide isolated from the Sargasso Sea
LAQKNNFSTIISHRSGDSEDTFIADLAVKTNSSQIKTGSLARSERVAKYNRLLKIEEELGKRSKMNKIQ

SEQ ID NO: 177153 - protein, 424 aa, Unknown
  Bacterial polypetide isolated from the Sargasso Sea
MSKIVQVKAIQIFDSRGTPTISCKVILDNGMQGIAMVPSGASTGSKEALELRDSEIKYHGKGVLNAVDNINNILGPLVVGNDPIQQEKIDQSLIDRDGTNDKSQLGANSILAISIAVSRVAASLKGISLHEHFSDLYKDMTGEKPQQSLPMPMLNILNGGEHADNNIDIQEFMIIPSGAESFTQAMQWSSEVYINLKEILHSMKLSTSVGDEGGFAPNLNSNEDAIKLIEESIIKSDLKPGIDINIALDCAASEFFKNGKYILSGEDKELSSDEFSDYLKNLISKYPITSIEDGMDENDIDGWKLLTKKIGNKCQLVGDDLFVTNKEILSKGIKEEIANAILIKFNQVGSLTETIRAIECATSAAYKSIISHRSGETEDTTIADLAVGLGVGQIKTGAPCRSDRVSKYNRLLWIEEENNKILLK

SEQ ID NO: 177154 - protein, 433 aa, Unknown
  Bacterial polypetide isolated from the Sargasso Sea
MSKIVKVIGREIIDSRGNPTVEAEVHLEGGFVGMAAAPSGASTGSREALELRDGDKSRFLGKGVLKALEAVNGPIAQALLGKDAKDQATVDQIMIDLDGTENKSKFGANAILAVSLANAKAAAAAKGMPLYAHIAELNGTPGVYSMPLPMMNIINGGEHADNNVDIQEFMIQPVGAKTLKEAVRMGAEVFHNLAKVLKSKGYNTAVGDEGGFAPNLKSNAEALEVIAEAVAAAGYKLGTDITLAMDCAASEFYDAEKKEYNLKGEGRVFTSNGFSDFLADLTTKFPIVSIEDGLDESDWDGFAYQTAELGKKIQIVGDDLFVTNTKILKRGIDNGIANSILIKFNQIGSLTETLAAIKMAKDAGYTAVISHRSGETEDATIADLAVGTAAGQIKTGSMSRSDRVAKYNQLIRIEEALGAKAPFRGLKEVKNQA

SEQ ID NO: 177155 - protein, 425 aa, Unknown
  Bacterial polypetide isolated from the Sargasso Sea
MEKIKNIHAREILDSRGNPTVECDVELDDGSFGRAAVPSGASTGVHEALELRDGDTNRYLGKGVKKAVQNINNMIKNEVVGKIYSNYQAFDKTVLDLDGTENKSNIGANATLAASLAFAKSLADHTSTTLYQHIAEDDNFLLPVPMMNIINGGSHADNDVDIQEFMIAPVGASSFSESLRFGCEIFHSLKSILKSKSLNTNVGDEGGFAPNVNNSAEVIEIILSAVEKAGLKINDDILLSLDVASTEFYQNNKYELKGEGQTLSSDEMVSYIENLANNFPIYSIEDGMSEDDWDGWIELTKRIGNKVQLVGDDLFVTNIKRLKTGIEKNAGNAILVKLNQIGTLSETIDAINLGKSNNFNSIISHRSGETEDTTIADLSVAVSAGQIKTGSLSRTDRTAKYNQLLRIEEMLGSSAKYAGKTILKH

SEQ ID NO: 177156 - protein, 182 aa, Unknown
  Bacterial polypetide isolated from the Sargasso Sea
VCICLDVAANELYKNNKYSIHSKKHETVDKSIKEYKKIIKKYKIKSIEDPFAENDWMSWSKLIKSINKVQIVGDDLYVTNLERLKKGFLNNSSNAILIKLNQIGTVSETLDVIKFAQIIGYKTIISHRSGDSEDTFIADLAVGTNSNQIKTGSLARSERVSKYNQLIRIEEELGRTAKMHKI

SEQ ID NO: 177157 - protein, 422 aa, Unknown
  Bacterial polypetide isolated from the Sargasso Sea
MKIKDIKAYEILDSRGHPTVGAKVILSDGNTGISLVPSGASTGKYEAVEKRDNNNDRFLGQGVTNAVNNIHNHILPILRDRDASDLFTNDLLMLEADGTDSKENLGANAILAVSMACAKAASISLKISLHDYIANKTSELYGREITQKLPVPMLNILNGGAHADNPIDFQEFMIRPFKFNTFSDSLRCGVEIFHTLKKTLEKKNLNTSVGDEGGFAPNLSTPESALDLIMESIEEAGYKPGEEVNLCLDVAATEFYSNSFYKMQGQPDLNSNEMIDCLKTLKNSYPIYSIEDGLDEDDWLGWKNLTQELGSKTQLVGDDLFVTNTKRIEKGIEESSANAVLIKMNQIGTLSETLQAIKITDENNFNNVISHRSGETEDTFIADLSVGTGAGQIKTGAPSRSDRVAKYNRLLLIEKNSDICFG

SEQ ID NO: 177158 - protein, 163 aa, Unknown
  Bacterial polypetide isolated from the Sargasso Sea
SKKFINTDKTIQKYQKLINKYKIKSIEDPFAEDDWLSWNKFCKKIDSKIQVVGDDLYVTNLERLKIGYLNRSSNAILIKLNQIGTVTETIEVIKFAQLIGFNTIISHRSGESEDTFISDLAVGTNSNQIKAGSLARSERVAKYNQLIRIEEKLGKSAKMNKIN

SEQ ID NO: 177159 - protein, 420 aa, Unknown
  Bacterial polypetide isolated from the Sargasso Sea
MHIKSIDAIEILDSRGVPSIHTSVVLNSGHKGEAMVPSGASTGKKEAFELRDNDERFDGKGTKKAIENIKSLIQPALLGKPIEEQKELDQIMINLDGTRQKKKIGANSILSVSLACTRAAANAMNLPLYDYIRILFNSKSGKGSTLSMPKPMLNIFNGGSHSNNRIDIQEFMIMPSDDVSFSEGLKNCVQVYTSLKRLLSSKGWSTNVGDEGGFAPNLESNEEVIEYLIKAIQSANFSYGKDIFISLDCAASEFFDGKNYILNATDETFSSDGLVDYYVKLIKKFDIKSIEDPLHEDDWDGWIKLTRELNGVQIVGDDIFVTQRELLKKGIDSHAGNAILIKPNQVGTLTESLESIQLAKENKFNTIISHRSGETEDPFIADLAVGVDAKQIKTGAPSRSDRNSKYNRLLIIENELYPKK

SEQ ID NO: 177160 - protein, 424 aa, Unknown
  Bacterial polypetide isolated from the Sargasso Sea
MTIISKIKGREIIDSRGNPTLEVDVFLSDNIMGRASVPSGASTGAYEVIEKRDNDNRYLGKGVKKAVELVNNEINKALIGQNAIEQNIIDDILINLDGTSNKMNLGGNSILGVSLACSRAVAHSKNIPLFKHIGDDSSLTLPIPFMNIINGGAHANNSLDFQELMIVPFGFTRFSDALRCGAEVFQSLKKLLLNNDYSIAVGDEGGFAPNFSSHKEALDYIILAIENAGYMPGKNVSIALDVASTEFYSNNEYNLKGENKKLDSQGLIDFLDSLTSEYPIISIEDGLAEDDWEGWKSMTDQIGNNVQLVGDDLFVTNTDRLRRGVEEKIANSILIKFNQIGTLTETLNAISMAKKASYTSMISHRSGETEDHFIADLAVATNAGQIKTGSLSRSDRLSKYNQLLRIEELLGEDALYNKNQNFYK

SEQ ID NO: 177161 - protein, 387 aa, Unknown
  Bacterial polypetide isolated from the Sargasso Sea
ASTGSREAIELRDGEAGRYGGKGVLKAVEHINTEISEAIMGLDASEQAFLDKTLLELDGTDNKSRLGANAMLAVSMAVAKAAAEEAGLPLYRYFGGSGAMQLPVPMMNIVNGGAHANNSLDIQEFMIVPVSQPTFREALRCGAEVFHALKKILSDRGMSTAVGDEGGFAPNFGSNDECLSTILQAIEKAGYRAGEDVLLALDCAASEFYHDGKYQLAGEGLQLSSTEFADYLANLADKFPIVSIEDGMHESDWAGWKTLTDKLGKKVQLVGDDLFVTNTRILKEGIEKGIANSILIKINQIGTLTETFAAIEMAKRAGYTAVISHRSGETEDSTIADIAVGLNAGQIKTGSLSRSDRISKYNQLLRIEEDLGDIASYPGKSAFYNLR

SEQ ID NO: 177162 - protein, 417 aa, Unknown
  Bacterial polypetide isolated from the Sargasso Sea
MSKITRVIARQVFDSRGNPTIEAEVFSYEKSSSAICPSGASTGSYEAHEKRDKKNKKYFGKSVFGPVKYINSKISKKLLNKNVHNQELIDSILINLDGTKHKTKIGANAILAVSMAVKKLSSKIKKIPLYKNFIIKKNFKLPFPMMNIINGGAHANNKLRIQEFMIRPDGAKNFSEAVRMCFLVIQCLKKIISDRGMSISVGDEGGFAPMISSNEEALRLIVKSIEKAGFKNGKQISICLDVAANELYKNKKYSIHSKKYLNVEQTINKYIKLIKQFKIKSIEDPFFENDWLAWSRFKKATKKIQIVGDDLYVTNLERLKKGFLYESSNSILIKLNQIGTVSETLDVIRFANNIGYKTVISHRSGDSEDTFIADLAVGTNSNQIKTGSLSRSERVSKYNQLIRIEEDLGSNARMNYL

SEQ ID NO: 177163 - protein, 167 aa, Unknown
  Bacterial polypetide isolated from the Sargasso Sea
ESKIKPFTSDEFSKFLINLCKKYSIISLEDPFSEDDWNSWAKFTKLFGDSIQIVGDDLFATNLNLINKGIERGAANAVLIKPNQIGTLTETMDAIELAQSNGYETVISHRSGETENTFISDLAVATNSGQIKTGSMSRSERIAKFNQLLRIEENFDLKKSIKNNKFY

SEQ ID NO: 177164 - protein, 127 aa, Unknown
  Bacterial polypetide isolated from the Sargasso Sea
MSEIISVKAIQVLDSRGNPTVEAEVTLEDGMTGLASVPSGASTGSREAVELRDGDKDIYLGRGVSAAVKNINSEIQSALKNQDIYDQSKIDQIMIDLDGTENKSRLGANAILAVSLACIKAAAASKD

SEQ ID NO: 177165 - protein, 65 aa, Unknown
  Bacterial polypetide isolated from the Sargasso Sea
MNSSIEKIFAREILDSRGNPTVEVDVMTSDGLMGRAAVPSGASTGIHEALELRDGDKNRYLGKGV

SEQ ID NO: 177166 - protein, 219 aa, Unknown
  Bacterial polypetide isolated from the Sargasso Sea
SVGDEGGFAPMISSNNQALDLIVSAIKKSGFVNGKDVSICLDVAANELYKKNKYSIHSKSYISVNKSIKEYQKIIKKYKIKSIEDPFAENDWLAWNKLMKSIKKVQIVGDDLYVTNLERLKKGFLNISSNSILIKLNQIGTVSETLDVIKFAQTIGYKTIISHRSGDSEDTFIADLAVGTNSNQIKTGSLARSERVAKYNQLIRIEEELGKKARMNKIN

SEQ ID NO: 177167 - protein, 281 aa, Unknown
  Bacterial polypetide isolated from the Sargasso Sea
INNGGMNNINYGATKTVFNMPYPLMNIINGGAHANNSLEIQEFMIRPDGAKSFKDCMQMSFLVIQNLKKNLEDKKISTSVGDEGGFAPSLGSDEEAIEIIIKSISAAGFKPGKDISICLDVAANELENPKDVEYFLKLTKKYPIKSIEDPFPEDDWDNWKKLTQEVNTQIVGDDLFVTNKKRLERGVKEKSANSILIKPNQIGTVSETLETIKLAQDNNFKTIISHRSGDSEDTFIADLAVATNSTQIKTGSLARSERVAKYNRLLRIEEELGNQAKMAKI

SEQ ID NO: 177168 - protein, 399 aa, Unknown
  Bacterial polypetide isolated from the Sargasso Sea
MPKIKKVKGRQVFDSRGNPTVEAEVFSENGSALAIVPSGASTGTHEAYELRDKDNKNYFGKSVFKAVENINGPIANVLKNIDINEQEKIDNILIDLDGTEQKKKIGANSILAVSMASCKLSSLEKKIPLYKNLSKSESYQLPVPLLNIINGGVHARNNLDIQEFMIRPDNTKSFAEAIRHSFLVIQNLKKMLNTNNVGDEGGFAPDLKDNEEAINLIIKAIEKSGLKPGIDISICLDVAANELDKPKSIEYYSDLIKKYPIKSIEDPFGEDEWGLWKKLTKSTKIQIVGDDLFATNIKRLEKGIDEKSCNTILVKLNQIGTVTETLKVIDLAKKNNFKTIISHRSGDSEDTFIADLAVATNSSQIKTGSLARSERVSKYNRLIRIEEELGNLAKMAKIK

SEQ ID NO: 177169 - protein, 426 aa, Unknown
  Bacterial polypetide isolated from the Sargasso Sea
MKVDQLKFYEVIDSRGNPTIACKIFSGKFSSISMVPSGASTGSKEAQEIRDNDKKRFLGKGLKEVIKKTEHQIFDVISQKNLLDQQEIDNGLIELDGSKNKSNIGANIILATSMAVSKLASHSENMELFKYINQIAKAYEIDCDYSLPLPMMNILNGGAHANNPLEFQEFMIQPAGFENFNESLRSGIEIFHNLKKELQENNFSTSVGDEGGFAPDISDTKKALDFICSAVEKSGYKMGEEIFIAMDCAASEIFINGEYLFEGKNHDNSGLIQIYEELIKSYPIKSIEDPLDEDDWDGWKAITKQIGDEVSIVGDDLFVTNKKILEKGINNGSANSILIKVNQIGTVSETLETISLANQNNINTVISHRSGETEDTFISDLAVGIGAGQIKTGAPSRSDRTAKYNRLLMISSDNNFSFEGMNGIKQ

SEQ ID NO: 177170 - protein, 425 aa, Unknown
  Bacterial polypetide isolated from the Sargasso Sea
MKIINLHARELLDSRGNPTLEVELTLDNNMPSCAIVPSGASTGENEAIELRDGDKSRFQGKGVLRAVDNVNTAIFKNIKNKVFYSQAELDSYLIDLDGTQNKGSLGANAILGVSMAFARAIARYSKIPLYKSFDDSFKFLMPAPMINIINGGSHANNNIDFQEFMIYPLGARSFSQTLKMGSEIFCQLKFLLEEKGFSTAVGDEGGFAPNLRSNQEAIEIILEAIERSPYSAGDEIFLSLDVAASELFDSEEYHIQSENKKLSSDKMIEYIISLVNQYPIISIEDGLDQNDWTGWTELNGSIGNKCQIVGDDLTVTNKEFLAKSVEYKAMNAILIKLNQIGTVTETIETINLAKKHHYGTIISHRSGETEDTIISDFSVSMGTGQIKTGSLSRTDRIAKYNQLLRIEESLGSEAVFLGEKSLGFN

SEQ ID NO: 177171 - protein, 211 aa, Unknown
  Bacterial polypetide isolated from the Sargasso Sea
MSTIIDIHAREILDSRGNPTVEVDVTLEDGTLGRASVPSGASTGAHEAVEKRDADKKRYNGKGVLNAVAAVNGELADALVGYDVSEQASIDASMIEIDGTPNKSRLGANAILGVSLACAKAAADFCNLSLYRYVGGPTAKTLPVPMMNIINGGEHADNPIDIQEFMIMPVAAENIKDAVRIGSEIFHTLKNEKKTQAYQLELATRVVCSKH

SEQ ID NO: 177172 - protein, 431 aa, Unknown
  Bacterial polypetide isolated from the Sargasso Sea
MSEIVNIIAREIMDSRGNPTVEADVFLASGAMGRGCAPSGASTGTREALELRDGDKSRYLGKGVRTAVANIDGPIKAALVGKSAYKQAEVDQIMIDLDGTESKSKLGANAILAVSLAVARAAAADKKIPLYQHIADLNGTPGVYSMPVPMMNIINGGEHADNNVDIQEFMVQPVGAKTFAEALRMGAEIFHQLKKELHSQGLNTAVGDEGGFAPDLKSNEEALTVISKAVAAAGYELNKDITLALDCAASEFYVDGKYKLSGEGKEFTSYEFNDFLAGLASRFPIVSIEDGLDESDWDGWKDMTNKMGNKIQLVGDDLFVTNTKILTRGIEQGIGNSILIKFNQIGSLTETLAAIKMAKDAGFTAVISHRSGETEDSFIADLAVGTAAGQIKTGSLCRSDRVSKYNQLLRIEQELGAKAPYRGRVEIKGQA

SEQ ID NO: 177173 - protein, 195 aa, Unknown
  Bacterial polypetide isolated from the Sargasso Sea
KSIKNAGFVNGKHISICLDVAANELFKNKKYSIHSNKYINVDRTIYQYLKLIKKFKIKSIEDPFSENDWSAWSKFNKVTKKLQLVGDDLYVTNLERLKKGFLYESSNSILIKLNQIGTVSETLEVIKFANNIGYKTIISHRSGDSEDTFIADLAVGTNSNQIKTGSLSRSERVSKYNQLIRIEEDLSSKAKMNKL

SEQ ID NO: 177174 - protein, 181 aa, Unknown
  Bacterial polypetide isolated from the Sargasso Sea
ASELYKDGQYFLSNDNASSSEDLIDMWEELTNKYPIFSIEDPLHEDDWSGWINLNERIGKKTQIVGDDLFVTNPERLKMGIEKNAANSILIKVNQIGTITETLETIDIAKNNKYSCVISHRSGETEDTFIADLSVATNSGQIKTGSMTRSDRVAKYNQLIRIESNLQNNSSYAGKSILKKN

SEQ ID NO: 177175 - protein, 317 aa, Unknown
  Bacterial polypetide isolated from the Sargasso Sea
GANAILSVSLACADAASKYLGIPLYKYLGGSKAFRMPTPMLNIINGGAHANNNLSFQEFMIIPVKCKTFTESIRKASEVFHTLKQILEKKNISTAVGDEGGFAPNLKNEDQACALIKEAITKTGYNLGKDFFLSLDVAASEFYNNKKYKILSEKRAFSSDQFSDYLIKLCKKYSIISLEDPFAEDDWKAWQKFNHNYGSKIQVVGDDIFTTNIDLISKGIKMKAANAVLIKVNQIGTLTETMKAIELAQMNGLETIISHRSGETENTFISDLSVATNSGQIKTGSMSRSDRIAKFNQLIRIEEFFNSKKSLKINKFY

SEQ ID NO: 177176 - protein, 185 aa, Unknown
  Bacterial polypetide isolated from the Sargasso Sea
GIDVNLALDCASSEFYNGNEYVLDGENKIFSSQEFANYLEDLVSRYPIISIEDGMDENDIEGWRILSELIGDRCQLVGDDLFVTNKKILEGGIEKGIANSILIKFNQVGTLSETIETIMCANKNNYKTIISHRSGETEDTTISDLAVGLGSGQIKTGAPCRSDRVAKYNRLLWIEEESIDILLHE

SEQ ID NO: 177177 - protein, 361 aa, Unknown
  Bacterial polypetide isolated from the Sargasso Sea
VTKAIDNINDRIKNSLIGENPLDQDHIDQILNNLDGTSDKSNLGANAILSVSIASAKASSKSENLDLHNYFNILLSNKMGKTIDQLIPIPMLNILNGGEHADNNIDIQEFMIIPKGAVNFSQAMQWSSEIYWNLKSILKEKGLSTAVGDEGGFAPNLNTNREALELIARAVDKTDLKLGSDICISLDCAASEFYENGAYHLKGEDRELTSSEFAEYLEGLANDFPIISIEDGMDENDLEGWKLLTKQIGGKCQLVGDDLFVTNPEVLKKGISDEIANSVLIKYNQIGTISETLETISIALNNDYQNIISHRSGETEDSSISDLAVGTGAGQIKTGAPCRSERVAKYNRLYWIDKKNSFSYG

SEQ ID NO: 177178 - protein, 299 aa, Unknown
  Bacterial polypetide isolated from the Sargasso Sea
NYLGDKNNPCILPVPQINILNAGSHSDSPIAFQEFMIVPVGAKSFSNALQIANEVFHNLKQNLKSKNLSTSVGDEGGFAPKLNGTEDALNIIIDSVNDAGYKVNDDIMIALDCAASEFYSNGVYDYSIFEGKNARKLNSDEQVEYLISLCEKFPIISIEDGMDEDDWDGWKKLTEKIGNKVQLVGDDLFVTNIKRLQRGITEKTGNSILIKLNQIGTLTETIQSIKLATKNNFSTVISHRSGETEDSTIADLSVAFNTGQIKTGSMSRSDRMAKYNQLLRIEEELGENAKYLGINAFKF

SEQ ID NO: 177179 - protein, 349 aa, Unknown
  Bacterial polypetide isolated from the Sargasso Sea
EKSVFDKQELDNLMIDLDGTENKCILGANAILGVSLAISQAAAKSKNLPLYQYIGGNSAITLPVPMMNIINGGSHSDAPIAFQEFMIVPVNAESFSHAMKIGTEIFHNLKSILSKRGLSTSVGDEGGFAPKLKGTEDALETIIKSISSAGFKPGHDVMIALDCASSEFFEDNHYDYRIFEGNNGKVFDSEQQADYLSDLVSKYPIISIEDGMDENDWSGWVHSTQILGNKVQLVGDDLFVTNTNILQKGIDQKAANSILIKVNQIGTLTETINAINLAKENGFSTVISHRSGETEDNIIADLAVALNAGQIKTGSLSRSDRMSKYNQLLRIEEQLGSKAFYPKKEAFTF

SEQ ID NO: 177180 - protein, 226 aa, Unknown
  Bacterial polypetide isolated from the Sargasso Sea
LISKKYSSAVGDEGGFAPSLNSNEEALQLIIEAIKKSNLRPGIDVNLALDCASSEFYNGNEYILDGENKIFSSQEFANYLEDLVSKYPIISIEDGMDENDIEGWKILSELIGDRCQLVGDDLFVTNKKILEKGIEKGIANSILIKFNQVGTLSETIETIMYADKNNYKTIISHRSGETEDTTISDLAVGLGSGQIKTGAPCRSDRVAKYNRLLWIEEESIDILLHE

SEQ ID NO: 177181 - protein, 196 aa, Unknown
  Bacterial polypetide isolated from the Sargasso Sea
MKKRQAKIERKTNETDITVEINVDGIGESSLSTGMPFFEHMLEQVAKHGGVDLKIDAKGDLSVDAHHTVEDVGICLGQAIQKALGDKKGINRYGHAYVPLDEALSRVVIDFSGRPGLEFAAKFPRQNINNFDVDLIHEFFQGFCNHAMATLHIDNIKGSNGHHIAETIFKAFGRAIMTAKEVKNYSAQMPSTKGVL

SEQ ID NO: 177182 - protein, 152 aa, Unknown
  Bacterial polypetide isolated from the Sargasso Sea
AKHGCFDIDLKATGDLEVDAHHTVEDIGITMGEAFNQALGDKKGITRYGHAYAPLDEALSRVVIDFSGRPGLLWDVNFTKQTINDFDLQLLREFFQGFTNKSLATIHIDNLKGENAHHQAETIFKAFALALKQSCSIDEQKLDQIPSTKGSL

SEQ ID NO: 177183 - protein, 195 aa, Unknown
  Bacterial polypetide isolated from the Sargasso Sea
MRKASINRNTKETSIKVNINLDGTGKASVTTGIGFLDHMMEQIAKHSLIDIDLKAKGDLHIDLHHTTEDSGIAFGEALKKALGDKKGIKRYASATIPMDETLSRVSLDLSNRPYLVWNVKLTVEKLGEMDTELFKEWFHAFSQSAGITLHVENIYGDNSHHKIESCYKGLARALREAVQVDQRAKNIIPSTKGTI

SEQ ID NO: 177184 - protein, 178 aa, Unknown
  Bacterial polypetide isolated from the Sargasso Sea
MSSLRQSEIKRKTNETDISVFINLDGNGISEIDTGIPFLDHMLHQISSHGLFDLKIKAIGDTHIDDHHTNEDVGIALGKAFSKALGERKGISRFGHFFAPLDEALVQVTLDCSGRPHLSYDLQLKAPRIGNYDTELVREFFIAFVNNSGITLHINQIRGSNSHHIVEACFKAFSRAMR

SEQ ID NO: 177185 - protein, 199 aa, Unknown
  Bacterial polypetide isolated from the Sargasso Sea
MTESNRTASIERDTSETQIRLKLDLDGTGVSKIETGIPFFEHMLTQISKHGMLDLEIVAQGDIEVDAHHTVEDVGIVFGQALAKAAGDKSGIFRYGHAYVPLDEALSRVVVDLSGRPGLFYEVEYVRSRVGDFDLDLLREFFQGLVNHGMLTLHLDNLKGANAHHQAETLFKGFGRALRMALSVDEKNRGHIPSTKGTL

SEQ ID NO: 177186 - protein, 173 aa, Unknown
  Bacterial polypetide isolated from the Sargasso Sea
DGSGKNKIDTGIAFFDHMLQQISTHSLIDLELNCDGDLKVDMHHTVEDVGIALGESIKNALGDKKGITRFAHSYVSFDETLTRTVIDLCNRPYFIWNVKTSLEKVGEMDQELFSEFFKSIVTESRMNCHIETLYGQNNHHIIESCFKSFAISLKKAISIDPKKKDIPSSKGKL

SEQ ID NO: 177187 - protein, 194 aa, Unknown
  Bacterial polypetide isolated from the Sargasso Sea
MRQFTFNRDTKETRISIKINLDGSGKNKIETGIAFFDHMLQQISTHSLIDLELRCDGDLKVDMHHTVEDVGIALGESIKNALGDKKGITRFAHSYVSFDETLTRSVIDLCNRPYFIWNVKTSLEKVGEMDQELFSEFFKSIVTESRMNCHIETLYGENNHHIIESCFKSFAISLKKAISIDPKKKDIPSSKGKL

SEQ ID NO: 177188 - protein, 195 aa, Unknown
  Bacterial polypetide isolated from the Sargasso Sea
MRQAKINRETSETQITIDLNLDGSGKTEFDTGLPFLEHMLDQIGRHGMIDLSVKAKGDLHIDDHHTIEDIGITLGEAFNKAVGDKKGIRRYGHSYIPLDEALSRVVLDFSGRPGLFMKVDFVKEEVGGIDVNMFEHFFQSFCNHAFITLHIENFSGENTHHQIETIFKAFGRALRMALEVDSKQENVIPSTKGAL

SEQ ID NO: 177189 - protein, 143 aa, Unknown
  Bacterial polypetide isolated from the Sargasso Sea
MRKIDLERNTKETQISLSLNLDGSGESKHKIDLPFFSHMLEQVSKHGDFDISLSASGDLEVDAHHTVEDVGICMGDAFNKALGEKKGIKRFGSAYAPLDEALSRVVVDFSGRPGLSWNVEFTKESINDFDLQLLREFFQRFYK

SEQ ID NO: 177190 - protein, 187 aa, Unknown
  Bacterial polypetide isolated from the Sargasso Sea
MSSLRQSEIKRKTNETDISVFINLDGNGISEIDTEIPFLDHMLHQISSHGLFDLKIKAIGDTHIDDHHTNEDVGIALGKAFSKALGERKGISRFGHFFAPLDEALVQVTLDCSGRPHLSYDLQLNAPRIGNYDTELVKEFFIAFVNNSGITLHINQIRGSNSHHIVEACFKAFSRAMRMATEIDPRR

SEQ ID NO: 177191 - protein, 203 aa, Unknown
  Bacterial polypetide isolated from the Sargasso Sea
MGRQGNIHRVTGETEVRVAIGLDGSGQCEVSTGVPFLDHMLHQLASHGLFDLTISATGDTHIDDHHTNEDVGIALGQALGQALADRRGIHRFGHFVAPLDEALVQVALDCSGRPHVSYSLKIPAQKIGSYDTELVKEFFVAVANNAGLTLHIRQLDGVNSHHIVEACFKAFARSLRMATEIDPRRASAIPSSKGVLEQAGTTG

SEQ ID NO: 177192 - protein, 201 aa, Unknown
  Bacterial polypetide isolated from the Sargasso Sea
MSSLRQSEIKRKTNETDISVFINLDGNGISEIDTGIPFLDHMLHQISSHGLFDLKIKAIGDTHIDDHHTNEDVGIALGKAFSKALGERKGISRFGHFFAPLDEALVQVTLDCSGRPHLSYDLQLKAPRIGNYDTELVREFFIAFVNNSGITLHINQIRGSNSHHIVEACFKAFSRAMRMATEIDPRRSDSIPSSKGMLEKQ

SEQ ID NO: 177193 - protein, 197 aa, Unknown
  Bacterial polypetide isolated from the Sargasso Sea
MREAKVARKTKETDIAVSVNLDGTGKYDVETGIGFLDHMMEQLSRHSLMDLTVRAKGDLHIDYHHTTEDSGIAIGEAVNQALGDRRGIVRFATATVPMDETLSRVSIDISDRPYLIWMVEFSKPKLGEMDTELFKEWFQAFAQNARVTLHVENLYGENNHHIVESCFKALARALRAASDTDPRAADSVPSTKGTLGG

SEQ ID NO: 177194 - protein, 195 aa, Unknown
  Bacterial polypetide isolated from the Sargasso Sea
MRNASIERNTKETQISISLELDGSGKSSQDVKLPFFAHMLDQVAKHGCFDIDLKATGDLEVDAHHTVEDIGITMGEAFSQALGDKKGITRYGHAYAPLDEALSRVVIDFSGRPGLLWDVNFTKQTINDFDLQLLREFFQGFTNKSLATIHIDNLKGENAHHQAETIFKAFALALKQSCSIDEQKSDQIPSTKGSL

SEQ ID NO: 177195 - protein, 201 aa, Unknown; identical to SEQ ID NO: 177192
  Bacterial polypetide isolated from the Sargasso Sea

SEQ ID NO: 177196 - protein, 182 aa, Unknown
  Bacterial polypetide isolated from the Sargasso Sea
TKISIKINLDGSGVNKIDTGIAFFDHMIQQISTHSLIDLELKCDGDLKVDMHHTVEDVGIALGESIKNALGDKKGITRFAHSYVSFDETLTRSVIDFCNRPYFIWNVKTSLEKVGEMDQELFSEFFKSIVTESRMNCHIETLYGKNNHHIIESCFKSFALSLKKAISVDPRKTSIPSSKGKL

SEQ ID NO: 177197 - protein, 170 aa, Unknown
  Bacterial polypetide isolated from the Sargasso Sea
KTDLSTGLPFLEHMLDQIGRHGMIDLKVKAKGDLHIDDHHTIEDIGITLGEALNKAVGDKKGIKRYGHSYVPLDEALSRVVLDFSGRPGLHMKVDFVKDTVGGIDVNMFEHFFQSLCNHAFLTLHIENFTGDNTHHQIETIFKAFGRALRMALEIDSRQGNEIPSTKGSL

SEQ ID NO: 177198 - protein, 157 aa, Unknown
  Bacterial polypetide isolated from the Sargasso Sea
MLDQIARHGLIDLDIECKGDLHIDDHHTVEDVGITLGQAFTKAIGDKKGMTRYGHSYVPLDEALSRVVIDFSGRPGLQMHVPFTRAVVGNFDVDLFQEFFQGFVNHALVSLHIDNLRGHNTHHQIETVFKAFGRALRMAVELDPRMAGQMPSTKGCL

SEQ ID NO: 177199 - protein, 197 aa, Unknown
  Bacterial polypetide isolated from the Sargasso Sea
MNRKAEVERVTNETNIKISVDLDGNGKLTANTGLPFLEHMLEQVAKHGCIDLSVKAEGDLEIDAHHTVEDLGITLGQAVNEAVGRKTSIRRYGHSYVPLDEALSRVVIDLSGRPGLSYNVSFPRSHVVGDFDVDLFFEFFQGFVNHLQCTLHIDCLRGHNSHHIIETIFKSLGRSLRMAIELDPRMKDQLPSTKGTL

SEQ ID NO: 177200 - protein, 201 aa, Unknown; identical to SEQ ID NO: 177192
  Bacterial polypetide isolated from the Sargasso Sea

SEQ ID NO: 177201 - protein, 195 aa, Unknown
  Bacterial polypetide isolated from the Sargasso Sea
MSSLRQSEIKRKTNETDISVFINLDGNGISEIDTGIPFLDHMLHQISSHGLFDLKIKAIGDTHIDDHHTNEDVGIALGKAFSKALGERKGISRFGHFFAPLDEALVQVTLDCSGRPHLSYDLQLNAPRIGNYDTELVKEFFIAFVNNSGITLHINQIRGSNSHHIVEACFKAFSRAMRMATEIDLRRSDSIPSSK

SEQ ID NO: 177202 - protein, 146 aa, Unknown
  Bacterial polypetide isolated from the Sargasso Sea
MRSGTVHRVTGETNVKVRLDLDGSGSCQASTGVPFLDHMLHQISSHGLLDLEIQAVGDTHIDDHHTNEDVGIAVGQALAQALGDRRGIHRFGHFVAPLDEALVQVALDCSGRPHLSYSLEIPSQKIGTYDTELVKEFFVAVVKTAA

SEQ ID NO: 177203 - protein, 201 aa, Unknown; identical to SEQ ID NO: 177192
  Bacterial polypetide isolated from the Sargasso Sea

SEQ ID NO: 177204 - protein, 195 aa, Unknown
  Bacterial polypetide isolated from the Sargasso Sea
MRKIQESRKTKETDITLSLNLDGSGNSNLSANLPFLEHMLDQTTRYSSIDLDLNAKGDLEIDAHHTVEDIGITLGAAFDKALGDKKGIHRFGYAYIPLDEALSRVVIDFSGRPGLIYNATYPRARVGEFDVELLSEFFHGFSNHAKATIHIDNIRGKNAHHIAETIFKAFGKALKMAISFDKKNINKIPSTKEFL

SEQ ID NO: 177205 - protein, 202 aa, Unknown
  Bacterial polypetide isolated from the Sargasso Sea
MTEISSVDSRSTRVERNTKETQIEIFLNLDGSGKLDSQTSLPFLDHMLDQIARHGLMDIAIKAKGDLEIDAHHTVEDIGITLGQAFNSALDKTGIRRYGHAYVPLDEALSRVVLDCSGRPGLEYKVDFVKGTVGDFDVDLFHEFFQGFVNHALVTLHIDNIRGKNAHHQIETIFKAFGRALRMAVELDPRAKNVVPSTKGSL

SEQ ID NO: 177206 - protein, 199 aa, Unknown
  Bacterial polypetide isolated from the Sargasso Sea
MSKRTAKIQRDTKETQISCEVNIDGIGESEIETGIGFLDHMLDSFSRHSLIDLKLNAKGDLHVDQHHTVEDTGIVIGLAIADALGDFSGIRRFGNIHMPMDETLTRVSIDVSKRPHLEWSVKFSKPLLGEMDTELFHEWFAAFAQNLGATIHVENIYGENNHHIAESCFKGLARCIREALSIDPREGDRIPSSKGSLGN

SEQ ID NO: 177207 - protein, 195 aa, Unknown
  Bacterial polypetide isolated from the Sargasso Sea
MRKVVVNRDTSETQIAIELNLDGTGKTEFDTGLPFLEHMLDQIGRHGMIDLSIKAKGDLHIDDHHTIEDIGISLGEAFNKAIGDKKGIRRYGQSYIPLDEALSRVVLDFSGRPGLFMKVDFVKEEVGGIDVNMFEHFFQSLSNHAFMTLHIENFYGENTHHQIETIFKAFGRALRMALEIDSKQADIIPSTKGAL

SEQ ID NO: 177208 - protein, 157 aa, Unknown
  Bacterial polypetide isolated from the Sargasso Sea
MLDQIGRHGMVDLTVNAKGDLHIDDHHTIEDIGITLGEALNKAVGDKKGIKRYGHSYVPLDEALSRVVLDFSGRPGLHMKVDFVKDTVGGIDVNMFEHFFQSLCNHAFLTLHIENFSGDNTHHQIETIFKAFGRALRMALEIDPRQDNEIPSTKGSL

SEQ ID NO: 177209 - protein, 195 aa, Unknown
  Bacterial polypetide isolated from the Sargasso Sea
MRKVTINRDTSETQISIDLNLDGTGQTEFDTGLPFLEHMLDQIGRHGMIDLVIKAKGDLHIDDHHTIEDIGISLGEAFNKAVGDKKGIKRYGHSYVPLDEALSRVVLDFSGRPGLHMKVDFVKEEVGGIDVNMFEHFFQSFCNHAFITLHIENFSGENTHHQIETIFKAFGRALRMALEIDTKQENIIPSTKGAL

SEQ ID NO: 177210 - protein, 199 aa, Unknown
  Bacterial polypetide isolated from the Sargasso Sea
MRKAKVQRNTKETKISATVNLDGTGRSKIETGIGFLDHMVEQISRHGLIDLDLKAKGDLHIDDHHTTEDSGYVLGDAIAKALGERKGISRYGNAHIPMDETLTRVVIDLSGRPYLVWKVAFTQKRLGEMDTELFKEWFQAFSQALGANIHVENLYGTNNHHIIESCYKGLARSLRDAVELVPRISGKVPSTKGVLRKDG

SEQ ID NO: 177211 - protein, 199 aa, Unknown
  Bacterial polypetide isolated from the Sargasso Sea
MSKRTAKIQRDTKETQISCEVNIDGIGESEIETGIGFLDHMLDSFSRHSLIDLKLNAKGDLHVDQHHTVEDTGIVIGLAIADALGDFSGIKRFGNIHMPMDETLTRVSIDVSKRPHLEWSVKFSKPLLGEMDTELFHEWFAAFAQNLGATLHVENIYGENNHHIAESCFKGLARCIREALSIDPREGDRVPSSKGSLGN

SEQ ID NO: 177212 - protein, 197 aa, Unknown
  Bacterial polypetide isolated from the Sargasso Sea
MSQSRTASIERKTRETLVRVKLNLDGEGTSETNTGIGFLDHMLDQLAFHGHMDLAVSCEGDLHIDSHHTIEDIGIALGQALKEALGDKKGIRRYGHAYIPMDEALLRAVLDCSGRPDFVFNGEFGRYNLGDLDTQMIPHFFKSLAFNCGLTLHLSVLYGSNDHHKCEGLFKAFARALSDAVTLDPRRMGVSSTKGTL

SEQ ID NO: 177213 - protein, 148 aa, Unknown
  Bacterial polypetide isolated from the Sargasso Sea
MARQGDIHRVTGETDVKVRLDLDGSGQCQASTGVPFLDHMLHQISSHGLIDLEINAVGDTHIDDHHTNEDVGIAVGQALSQALGDRRGIHRFGHFVAPLDEALVQVALDCSGRPHLSYSLSIPSQKIGSYDTELVKEFFVAVVNNSGL

SEQ ID NO: 177214 - protein, 119 aa, Unknown
  Bacterial polypetide isolated from the Sargasso Sea
SLYKAIGDKKGIRRYGQSYIPLDEALSRVVLDFSGRPGLFMKVDFVKEEVGGIDVNMFEHFFQSLSNHAFMTLHIENFYGENTHHQIETIFKAFGRALRMALEIDSKQADIIPSTKGAL

SEQ ID NO: 177215 - protein, 197 aa, Unknown
  Bacterial polypetide isolated from the Sargasso Sea
MKNRTAKVKRETKETQIILNIDLDGQGKSSIDAGLPFLEHMLEQVARHGMFDIVLNAKGDLHIDAHHTVEDIGIVLGQAIDNALGDKLGISRFGSAYVPLDESLSRVVLDFSGRPGLTYNVSYPRSRVGDFDIDLLQEFFQGFVNHAKATLHIDNIRGGNSHHIAETIFKAFAKALRSSVSVDVRNSKQIPSTKEKI

SEQ ID NO: 177216 - protein, 201 aa, Unknown
  Bacterial polypetide isolated from the Sargasso Sea
MSSLRQSEIKRKTNETDISVFINLDGNGISEIETGIPFLDHMLHQISSHGLFDLKIKAIGDTHIDDHHTNEDVGIALGKAFSRALGERKGISRFGHFFAPLDEALVQVTLDCSGRPHLSYDLQLKAPRIGNYDTELVKEFFIAFVNNSGITLHINQIRGSNSHHIVEACFKAFSRAMRMATEIDQRRSDSIPSSKGMLENQ

SEQ ID NO: 177217 - protein, 158 aa, Unknown
  Bacterial polypetide isolated from the Sargasso Sea
MLDQIARHGLIDLDIVGKGDLHIDDHHMVEDVGITLGQAFAKAIGDKKGIRRYGHAYVPLDEALSRVVIDFSGRPGLQMHVPYTRANVGRGFDVDLFQEFFQGFVNHALVSLHIDNLRGTNTHHQIETVFKAFGRALRMAVEVDERMGGQMPSTKGVL

SEQ ID NO: 177218 - protein, 176 aa, Unknown
  Bacterial polypetide isolated from the Sargasso Sea
CLDGTGQCTLDTGLPFLEHMLDQIARHGQVDLDITAKGDLHIDAHHTVEDIGITLGQAFSQAIGDKKGIVRYGHAYVPLDEALSRVVIDCSGRPGLEFHVPFTRAKVGEFDVDLVVEFFQGFVNHADVTLHIDNLRGHNAHHQAETVFKAFGRALRMAVAPDAAMAGTSPSTKGVL

SEQ ID NO: 177219 - protein, 195 aa, Unknown
  Bacterial polypetide isolated from the Sargasso Sea
MRNSKVIRKTKETNITCEINLDGLGVSEISTGIGFFDHMLELLSHHSLIDIKISVEGDTHVDFHHTVEDTGYALASAIQEALGDKKGIKRYGFFYVPMDECLSRCVLDFSGRPELIWHIELGLKKIGEMDTELFQEFFKAFTNESKCNLHLENLYGKNNHHIIESCFKAFAKSLRISIEIDEKIKNIIPSSKGTL

SEQ ID NO: 177220 - protein, 195 aa, Unknown
  Bacterial polypetide isolated from the Sargasso Sea
MRVAEVVRNTSETQIRVKLNLDGTGQQKLATGVSFLDHMLDQIARHGLVDLEVEAHGDTHIDDHHTVEDVGITLGQAVAKAIGDRKGIRRYGHSYVPLDEALSRVVIDFSGRPGLEFHVPFTRARIGTFDVDLSIEFFRGFVNHAGVTLHIDNLRGINAHHQLETVFKAFGRALRAAVELDERAAGQIPSTKGSL

SEQ ID NO: 177221 - protein, 119 aa, Unknown
  Bacterial polypetide isolated from the Sargasso Sea
AITIGGSQGNFELNVFKPMMIHNLLHSAKLLADSMRAFTSKCITGLKANEDVINNHLENSLMLVTALNNHIGYDKAAKIAKNAHEKGMTLRESALELGMVTDEEFDLWVRPEQMTGHEN

SEQ ID NO: 177222 - protein, 206 aa, Unknown
  Bacterial polypetide isolated from the Sargasso Sea
MSDKKFRIEKDSMGELNVPADSKWGPQTQRAVDNFQISDYKMPTGFIRSLALLKWGLANANKDLNLLSKEKASAIADSAMEIYQGDHMKEFPVDVFQTGSGTSTNMNMNEVISHLASSESNAIHPNDDVNMGQSSNDVIPSAINVDSSLSVKNNLIPSMKHLKNAIDEKAKLIGDIPKNGRTHLMDAMPVTFSQEMSAWSAQIQDA

SEQ ID NO: 177223 - protein, 255 aa, Unknown
  Bacterial polypetide isolated from the Sargasso Sea
IVKKAAAIVNARNGDLDKKISRYIVRASEEIIKGKLDDHFPLKVWQTGSGTQTNMNVNEVIANRAIQMMGGKMGTKKPVHPNDHVNKSQSTNDVFPTAMHIAIATKAKNKLLPSLKLLEKELNTKTKQFNKIVKLGRTHLQDATPLTLGQEFSGYHSQLKKCITRIERALGEILYLAQGGTAVGTGLNTKRGFDKKIVREIKKITKIPFKPATNKFAALASHDPIVNFSGTMNTTAVCLMKIANDIRFLGSGPRA

SEQ ID NO: 177224 - protein, 227 aa, Unknown
  Bacterial polypetide isolated from the Sargasso Sea
NQKKNFDKKIVKEIAKFTKIKFKPATNKFAELAAHDAIVSFSGSLNTCAVALMKISNDIRFLGSGPRAGYGELILPENEPGSSIMPGKVNPTQCEAVTMVCVKVIGNHNGITMAGSHGHFELNVFKPLIAHNILQSIDLIADSTKNFALYCVKGIKANKKKIKEHLDNSLMLITALAPHIGYDNAAKIAKTALKNNTTLKHETLKTGLIDEKNYNKIVNPRKMIYPE

SEQ ID NO: 177225 - protein, 257 aa, Unknown
  Bacterial polypetide isolated from the Sargasso Sea
QLEDCILRIKNALKEIYSLAQGGTAVGTGINSKKGFDKKIIKEIRKITKLPFKPTKNKFAALAAHDEIVNFSGTLNTAAVCLMKIANDIRFLGSGPRAGYGEIILPANEPGSSIMPGKVNPTQSEAVTMVCVKVIGNHNGITMAGSHGHFELNVFKPLIAHNILQSIDLLADSTKNFSLYCIKGLKADKIKIKEYLDNSLMLVTSLAPHIGYDNAAKIAKTALKNKTTLKSEALRSGLIDEKKYDKIVNPKKMIKPL

SEQ ID NO: 177226 - protein, 351 aa, Unknown
  Bacterial polypetide isolated from the Sargasso Sea
IGDFLVRPILIQSIGIVKKSAAIVNARNRDLDKKISKYIIKAADEVIKGKLNEHFPLKVWQTGSGTQTNMNVNEVISNRAIQMMGGKMGTKKPVHPNDHVNKSQSTNDVFPTAMHIAIALKTKKKLLPALKLLEKELSKKVTQFNKIVKLGRTHLQDATPLTLGQEFSGYHSQLKKCIERIEKSLDEIYYLAQGGTAVGTGLNTKKNFDKKIILEIKKITKLPFKPAKNKFAALAAHDAIVNFSGTMNTAAVCLMKIANDIRFLGSGPRAGYGELILPENEPGSSIMPGKINPTQCEAVTMVCVKVIGNHNGITMAGSHGHFELNVFKPLIIHNILQSINIMSDSASGFAK

SEQ ID NO: 177227 - protein, 343 aa, Unknown
  Bacterial polypetide isolated from the Sargasso Sea
KKGSKKPVHPNDHVYKSQSTNDVFPTAMHISVAKETLSKLLPNLKILEKELNRKSKEFKNIVKIGRTHLQDATPLSLGQEFSGYHTQVKKSIERIEYALKEIFFLAQGGTAVGTGINSKKNFDKKIVKEIAKYTKIKFKPAPNKFAELAAHDAIVNFSGTLNTCAVALMKISNDIRFLGSGPRAGYGELILPENEPGSSIMPGKVNPTQCEAVTMVCVKVIGNHNGITMAGSHGHFELNVFKPLIAHNILQSIDLIADSTKNFAIYCVKGIKANKKKIQEHLDNSLMLVTALAPHIGYDNAAKIAKTALKNNTTLKHETLKTGLISEKDYNKIVDPKKMIYPA

SEQ ID NO: 177228 - protein, 275 aa, Unknown
  Bacterial polypetide isolated from the Sargasso Sea
KTNKFESKIAKAIIKASNEIIQGKLDDHFPLKVWQTGSGTQTNMNVNEVISNRAIEILKGKKGTKKPVHPNDHVNKSQSTNDVIPTAMHIAIAIETRKKLLPSLLILNSELKKKKNKFKKIVKIGRTHLQDATPITLGQEFSGYQSQLENCIKRIKNALNEIYFLAQGGTAVGTGINTMKNFDKKIIKEIKTITKIPFKPTKNKFAALAAHDSIVNFSGTLNTTAVCLMKIANDIRFLGSGPRAGYGELILPSNEPGSSNYAQEKVNPTQSEAVT

SEQ ID NO: 177229 - protein, 292 aa, Unknown
  Bacterial polypetide isolated from the Sargasso Sea
KKNPMNLKNIVKIGRTHLQDATPLSLGQEFSGYHFQVKKSIERIEYALKEILFLAQGGTAVGTGINSKKNFDKKIVKEIAKFTKIKFKPAPNKFAELAAHDAIVNFSGTLNTCAVALMKISNDIRFLGSGPRAGYGELILPENEPGSSIMPGKVNPTQCEAVTMVCVKVIGNHNGITMAGSHGHFELNVFKPLIAHNILQSIDIIADSTRNFALYCVKGIKANKKRIKEHLDNSLMLVTALAPHIGYDNAAKIAKNALKNNTTLKYETLKTGLIKEKDYTKIVNPKKMIYPE

SEQ ID NO: 177230 - protein, 294 aa, Unknown
  Bacterial polypetide isolated from the Sargasso Sea
IVKIGRTHLQDATPLSLGQEFSGYHFQVKKSIERIEYALKEILFLAQGGTAVGTGINSKKNFDKKIVKEIAKITKISFKPAPNKFAELAAHDAIVNFSGALNTCAVALMKISNDIRFLGSGPRAGYGELILPENEPGSSIMPGKVNPTQCEAVTMVCVKVIGNHNGITMAGSHGHFELNVFKPLIAHNILQSIDLIADSTKNFALYCVNGIKANKKKIQEHLDNSLMLVTALAPHIGYDNAAKIAKTALKNNTTLKYETLKTGLINKKDYEKIVDPKKMIYPAITFNCIIQKNF

SEQ ID NO: 177231 - protein, 272 aa, Unknown
  Bacterial polypetide isolated from the Sargasso Sea
ATPLTLGQEFSGYYSQLSDCILRIETSLKEIFYLAQGGTAVGTGINSKKNFDVKICKEISKLTKIKFYPAKNKFAALAAHDAIVNFSGTLNTTAVCLMKIANDIRFLGSGPRAGYGELILPANEPGSSIMPGKVNPTQCEAVTMVCVKVIGNHTGITLAGSQGQFELNVFKPLIAHNILQSIDLLSDSSDNFSKFCIKGIKADLNKISEDLNNSLMLITALAPKIGYDNAAKIAKSALKNKTTLKFEAVKTGLISEKDFDKIVDPKKMTYPG

SEQ ID NO: 177232 - protein, 306 aa, Unknown
  Bacterial polypetide isolated from the Sargasso Sea
IPSLVLLNNELNKKVKKFKSIIKVGRTHLQDATPISLGQEFSGYQSQLEDCIERIKKGLNEIYNLAQGGTAVGTGINSKKNFDKKIIKEIKKITKLPFKPTKNKFAALAAHDEIVNFSGSLNTLAVCLMKIANDIRFLGSGPRAGYGELILPSNEPGSSIMPGKVNPTQSEAVTMVCVKVIGNHNGITMAGSHGHFELNVFKPLIAHNILQSIDLLSDSSKNFAIYCVRGLKADKKKIKEYLDNSLMTVTALAPHIGYDNAAKIAKKALKKNSTLKQEALASGLIDDKTFNLLIDPKKMIILHKIE

SEQ ID NO: 177233 - protein, 244 aa, Unknown
  Bacterial polypetide isolated from the Sargasso Sea
MKKRREHDSIGVINVPGDKYWGASTERSKKYFDIGEFLVRPVLIKSIAIIKKSAAVVHRKNKQIESKIANAIIKAANEVIQGKLDDHFPLKVWQTGSGTQTNMNLNEVIANRAIEILGGKKGSKKPVHPNDHVNKSQSTNDVFPTAMHIAIALETKKKLLPSLITLNKELKKKVSKFKNIIKVGRTHLQDATPISLGQEFSGYQSQLESCIKRIKNALNEIYFLAQGGTAVGTGINTRKNFDKK

SEQ ID NO: 177234 - protein, 295 aa, Unknown
  Bacterial polypetide isolated from the Sargasso Sea
QEQAQRHASLVKTGRTHMMDATPITFGQELSAFVAQLGHAEAAIRAALPAVCELAQGGTAVGTGLNAPAGFAEAMAAELAALSGMPLTSAPNKFAALAGHEPLVQLSGALKTLAVALMKLANDLRLLGSGPRAGLAEVRLPANEPGSSIMPGKVNPTQCEALSMLACQVLGNDSTISFAASQGHLQLNVFKPVIIHNLLQSIRLLADGCRNFQQHCVADLQPDAAQMAAHLENGLMLVTALNPHIGYDKAAEIAKKAYNEGSTLRQAALQLGYLNDEQFDQWVRPQDMLGAGWHE

SEQ ID NO: 177235 - protein, 132 aa, Unknown
  Bacterial polypetide isolated from the Sargasso Sea
MKLRKEFDSIGTINVPNDKYWGASTQRSKKYFDIGEFLVRPVLIKSIAIIKKAAAIVHRNEKQIVPKISNAIVKASNEVISGKLDEHFPLKVWQTGSGTQTNMNVNEVIANRAIEILGGKKVQKSQFIQMIM

SEQ ID NO: 177236 - protein, 205 aa, Unknown
  Bacterial polypetide isolated from the Sargasso Sea
MKFRKETDSMGTINVADDKYWGASTERSKKYFDIGKILVSKTLINAIAIIKLAAAKVHRKEKQIDLKICNAIQTAAKEIISGKLDGNFPLKVWQTGSGTQTNMNVNEVIANRAIQILGGKKGSKKPVHPNDHVNKSQSTNDVFPTAMHIAIALETKKKLLPSLKNLSKELKKKIKKFKNIVKVGRTHLQDATPLTLGQEFSGYHS

SEQ ID NO: 177237 - protein, 233 aa, Unknown
  Bacterial polypetide isolated from the Sargasso Sea
TGLNAPAGFAEAIAAELAALTGLPLTSAPNKFAALSGHEPLVHLSGALKTLAVALMKLANDLRLLGSGPRAGFAEVRLPANEPGSSIMPGKVNPTQCEALSMLACQVLGNDATISFAASQGHLQLNVFKPVIIHNLLQSIRLLADGCRNFQQHCVADLQPDATQMAAHLENGLMLVTALNPHIGYDKAAEIAKKAYAEGSTLRQAALQLGYLNEEEFDQWVRPQDMLGAGRHD

SEQ ID NO: 177238 - protein, 227 aa, Unknown
  Bacterial polypetide isolated from the Sargasso Sea
MKLRKEFDSIGTINVPNDKYWGASTQRSKKYFDIGEFLVRPVLIRSIAIIKKAAAIVHRKEKQIIPKISNAIVKASNEVISGKLDEHFPLKVWQTGSGTQTNMNVNEVIANRAIEILGGRKGTKKPVHPNDHVNKSQSTNDVFPTGMHIAIAMETKNKLLPSLELLNKELKKKVSQFKNIVKVGRTHLQDATPLSLGQEFSGYQSQLEDCIVRIKNALNEIYYLAQG

SEQ ID NO: 177239 - protein, 156 aa, Unknown
  Bacterial polypetide isolated from the Sargasso Sea
MLPENEPGSSIMPGKVNPTQCEAITQVCAQVMGNDAAVGIAGSQGHFELNVYKPMIAYNVLQSAQLMGDACNAFTDNLVEGLKADETRIDKLMRESLMLVTALAPKIGYDNATKVAKEAHKNGTTLKEEAIKLGFVDAETFEKIVRPEKMVGPSDA

SEQ ID NO: 177240 - protein, 254 aa, Unknown
  Bacterial polypetide isolated from the Sargasso Sea
MKNRKEYDSIGQINVPVDKYWGASTQRSSKYFDIGDFLVRPIVIKSIAIIKKAAATVNEKNGDLNKKISKTIIKAANEVISGKLINHFPLKVWQTGSGTQTNMNVNEVIANRAIEILGGKKGSKKPVHPNDHVNKSQSTNDVFPTAMHMAIAMEAREKLIPSLNLLNLQLKKKSKEFKKIVKIGRTHLQDATPLTLGQEFSGYHFQLTKCIERIKKSLEEIYFLAQGGTAVGTGLNTKKGFDKKIVSEIKKITK

SEQ ID NO: 177241 - protein, 332 aa, Unknown
  Bacterial polypetide isolated from the Sargasso Sea
PLKVWQTGSGTQTNMNVNEVISNRAIEILKGKKGTKKPVHPNDHVNKSQSTNDVFPTAMHIAIAMETKEKLLPSLELLNNELKKKVRKFSKIVKIGRTHLQDATPLSLGQEFSGYQSQLDECIKRIKVSLNEIYYLAQGGTAVGTGINTKKNFDKKIVNEIKKITKLPFKPAKNKFAALAAHDAIVNYSGTLNTTAVCLMKIANDIRFLGSGPRAGYGELILPENEPGSSIMPGKVNPTQCEAVTMVCVKVIGNHNGITMAGSHGHFELNVFKPLIIHNVLQSIKLLSDSTKSFGKYCISGLKADKNRIKELVDNSLMLVTALSPVIGYDNA

SEQ ID NO: 177242 - protein, 225 aa, Unknown
  Bacterial polypetide isolated from the Sargasso Sea
KRNFDKKIVNEIKKITKLPFKPAKNKFAALAAHDAIVNYSGTLNTTAVCLMKIANDIRFLGSGPRAGYGELILPENEPGSSIMPGKVNPTQCEAVTMVCVKVIGNHNGITMAGSHGHFELNVFKPLIIHNVLQSIQILSDSIISFAKYCVSGLKADKKRIKYLLDNSLMLVTALSPKIGYDNAAKIAKNALKNKTTLKTEAMKTGLITEKDYYKIVDPLKMIKPV

SEQ ID NO: 177243 - protein, 292 aa, Unknown
  Bacterial polypetide isolated from the Sargasso Sea
KKGDEFKDIIKMGRTQLQDAVPMTLGQEFHSFAATLEADLTFLERNVDQMYEVNLGGTAIGTSICADVSFAERAVSALSSLTNLPMRSPHDFIEASSSTSSFLLFSNILRRVAVKISKICNDLRLLSSGPRCGFNEINLPAVAPGSSIMPGKINPVIPEVMNQVCFQIMGTDASIAHASEAAQLQLNVFEPVIIYNLLNNMEMMERGLRTLREKCIDGITANPKVCKTSVENSIGIVTALLPLIGYKRSSAVAKEALETGRPVAEIAARYADIEEIRELLHPASMTQARKMN

SEQ ID NO: 177244 - protein, 222 aa, Unknown
  Bacterial polypetide isolated from the Sargasso Sea
FAKSFAEEVKKYTGLSFITAENKFEALAAHDGFVEMSGMLNTLATGLFKIANDIRLLGSGPRSGLGELSLPENEPGSSIMPGKVNPTQCEAMTMVCSQVMGNHTTITFSGSQGHMELNVFKPVLAYNLIQSIRLLTDVCISFADNCISGIEPNKKNITSLMERSLMLVTALTPKIGYDNATIVAKTAHKNGTTLKEEAIALGFVTEEEFNKIVRPEEMIKPK

SEQ ID NO: 177245 - protein, 168 aa, Unknown
  Bacterial polypetide isolated from the Sargasso Sea
MKNRKEYDSIGGINVPVDKYWGASTQRSSKYFDIGDFLVRPIVIKSIAIIKKAAAIVNAKNGDLDKKISKTIVKAANEVISGKLINHFPLKVWQTGSGTQTNMNVNEVIANRAIEILGGKKGSKKPVHPNDHVNKSQSTNDVFPTAMHMAIAIEAIEKLLPQLLICSI

SEQ ID NO: 177246 - protein, 192 aa, Unknown
  Bacterial polypetide isolated from the Sargasso Sea
DAIVNFSGTLNTCAVALMKISNDIRFLGSGPRAGYGELILPENEPGSSIMPGKVNPTQCEAVTMVCVKVIGNHNGITMAGSHGHFELNVFKPLIAHNILQSIDLIADSTKNFALYCVKGIKANKKKIQEHLDNSLMLVTALAPHIGYDNAAKIAKTALKNNTTLKHETLKTGLITEKDYNKIVDPKKMIYPA

SEQ ID NO: 177247 - protein, 123 aa, Unknown
  Bacterial polypetide isolated from the Sargasso Sea
MKYRTEFDSLGKIKVPGDKYWGASTQRSNKYFDIGDFLVRPILIESIAIVKKAAAIVNVKNKDLDKRIGKYIVMAANEIISGKLKENFPLKVWQTGSGTQTNMNVNEVIANRAIQMMGGKMGT

SEQ ID NO: 177248 - protein, 163 aa, Unknown
  Bacterial polypetide isolated from the Sargasso Sea
MKYRTEIDSIGKIKVPEDKYWGASTQRSNKYFDIGDFLVRPILIQSIAIVKKAAAIVNTRNGDLNKKISKYIIKASDEVIKGKLDKHFPLKVWQTGSGTQTNMNVNEVIANRAIQMMGGKMGSKKPVHPNDHVNKSQSTNDVFPTAMHIAIAIKTKKKLLPSP

SEQ ID NO: 177249 - protein, 159 aa, Unknown
  Bacterial polypetide isolated from the Sargasso Sea
MKLRKEFDSIGSVNVPNDKLWGASTQRSNKYFNIGKILVNISIIKSIAVIKRSAAIVHAKDKLIDNKISKAIIKASDEVIKGKLDDNFPLKVWQTGSGTQTNMNVNEVIANRAIEIMGGKKGSKKPVHPNDHVNKSQSTNDVFPTAMHISLAKETLSKL

SEQ ID NO: 177250 - protein, 247 aa, Unknown
  Bacterial polypetide isolated from the Sargasso Sea
KKTNQFKKIVKIGRTHLQDATPLTLGQEFSGYYSQLDDSIKRIVHALDEINFLAQGGTAVGTGINTKKNFDKKIIKEIRKITKISFKPAKNKFAALASHDPIVNFSGTLNTTAVALMKIANDIRFLGSGPRAGYGELILPANEPGSSIMPGKVNPTQSEAVTMVCVKVIGNHNGITMAGSHGHFELNVFKPLIAHNILQSIDLLSDSAKNFALYCVKGIKANKIKIKEHLDNSLMLVTALAPHIGYD

SEQ ID NO: 177251 - protein, 115 aa, Unknown
  Bacterial polypetide isolated from the Sargasso Sea
MAGSHGHFELNVFKPLIAHNILQSIDLLADSSKNFALYCIKGLKADKDKIKYYLENSLMLVTALAPKIGYDNAAKIAKSALKNKTTLKTEALKTGLISEKDYDKIVDPKKMIYPA

SEQ ID NO: 177252 - protein, 273 aa, Unknown
  Bacterial polypetide isolated from the Sargasso Sea
HVNKSQSTNDVFPTAMHIAVANKTITELIPSLELLNKNLKKKVIEFNKIIKVGRTHLQDATPISLGQEFSGYQSQLSDCIKRIKICLKEIFYLAQGGTAVGTGINTKKNFDKKIVKEISKITKLPFKNAKNKFAALASHDPIVNFSGSLNTTAVCLMKIANDIRFLGSGPRAGYSELILPENEAGSSIMPGKVNPTQCEAITMVCTKVIGNHSGITIAGSHGHFELNVFKPLMAHNIIQSISLLSDSTNNFAKYCIKDIKANKKKIEKQLNNS

SEQ ID NO: 177253 - protein, 156 aa, Unknown
  Bacterial polypetide isolated from the Sargasso Sea
MDIRIERDSLGQVEVPSDRYYGAQTQRSFDNFKISSESFPREFIRAYGIVKKAAATVNYNLGNIEKSILNAIHTASDEVIEGKLDKHFPLVVWQTGSGTQTNMNFNEVIANRAIELMGGELGSKEPVHPNDHVNMSQSTNDTFPTAINIAAVESVT

SEQ ID NO: 177254 - protein, 307 aa, Unknown
  Bacterial polypetide isolated from the Sargasso Sea
SKLPIHPNDHVNLSQSSNDTFPTVMHIAANELTDQKLIPAIKNLIRELNIKTKSYSKIIKIGRTHTQDATPLTMGDEFSGYLHQIQNNYERIVIAKKELNYLAQGGTAVGSGINAPKNFDKIFCKYLNKITKNKYKPAINKFEAIANHDTLVNFSNSINSLAISLFKILNDLRFLSSGPRAGLGEINIPANEPGSSIMPGKVNPTQIEALSMVCCQVMGNNLAVSQGGAQGHFELNAFKPLIIFNIINSINLLSDGVNSFNKHCLKNLSINKDNIKKHLNNSLMLVTALNKHIGYDNAALIAKRAFK

SEQ ID NO: 177255 - protein, 262 aa, Unknown
  Bacterial polypetide isolated from the Sargasso Sea
SKRQEKDSMGHIDVPENKYYGAQTQRSLQNFEIGGETFQREFIRAYGILKKAAATVNFSKGRLEKDVADAILQSTDQVINGALDDHFPLVVWQTGSGTQSNMNFNEVIANRAIEILGGELGSKSPVHPNDHVNMSQSTNDTFPTAINIAACELTTNELIPSLKKLYKSLEQKSKEFDLIIKLGRTHLQDATPLSLGQEFSGFSSAIKHSIERVEGSLQHCFHLPMGGTAVGTGINSFEGFAELAAENIASITKLPFVTAPNK

SEQ ID NO: 177256 - protein, 174 aa, Unknown
  Bacterial polypetide isolated from the Sargasso Sea
MKYRIEFDSIGKIKVPGDKYWGASTERSNKYFNIGDFLVRPLVIHSIAIIKKAAAIVNSKNKDLDPKLSKYIIKASEEVIKGKLDKHFPLKVWQTGSGTQTNMNVNEVIANRAIEMMGGKVGSKKPIHPNDHVNKSQSTNDVFPTAMHIAIALKTREKLLPSLKLLEKELAKKT

SEQ ID NO: 177257 - protein, 167 aa, Unknown
  Bacterial polypetide isolated from the Sargasso Sea
MKKRKEKDSLGIINVPGDKYWGASTERSKKFFDIGEAKVRPILIKSIAIIKKAAAIVHKKDKTINKKIANSIIKASQEIISGKLEENFPLKVWQTGSGTQTNMNVNEVISNRAIEILGGKKGSKNPVHPNDHVNKSQSTNDVFPTAMHIAITVETRKKLLPSLIDLE

SEQ ID NO: 177258 - protein, 325 aa, Unknown
  Bacterial polypetide isolated from the Sargasso Sea
SAAVANMKTKAINRKQGTAIVKACDKILAGKFVDQFLVDMINSGAGTAFNMNSNEVITNVALRVLGKKQGQYEFLHPNDHVNMSQSSNDTYPTAMHMSILFSFKEMLPAIDKLIKSLNRKAKQFSKYKKIGRTHLMDALPVTVGSEFTAYVTSLTNARNEIIVSQKELAQVALGGTAVGTGANTPKGYRKAVITELARVSKLPLKPQKDMQYSLQSKFPVANASSALKNFAIELGKVSNDIRLMASGPVAGLSELGIPAVHAGSSIMPGKVNPSLAECMNMICFSVIGNDTTVSFGAQAGQFELNVMLPEMLKAILDSTDMLTNF

SEQ ID NO: 177259 - protein, 122 aa, Unknown
  Bacterial polypetide isolated from the Sargasso Sea
GNHNGITMAGSHGHFELNVFKPLIIHNILQSIHIMSDSAKSFGKYCVSGLKADKKRIKELLDNSLMLVTALAPHVGYDNAAKIAKNALKNKTKLKEEALKSGLITEKEYDKIVDPKKMTSPS

SEQ ID NO: 177260 - protein, 162 aa, Unknown
  Bacterial polypetide isolated from the Sargasso Sea
PRAGYGEIILPANEPGSSIMPGKVNPTQSEAVTMVCVKVIGNHNGITMAGSHGHFELNVFKPLIAHNILQSIDLLADSTKNFSLYCVKGIKADKIKIKKFLDNSLMLVTALAPHIGYDNAAKIAKTALRKGTTLKTEAIKTGLINEKDYHKIVNPKKMISPN

SEQ ID NO: 177261 - protein, 270 aa, Unknown
  Bacterial polypetide isolated from the Sargasso Sea
LLPALELLNKELKKKVSEFKNIIKVGRTHLQDATPLSLGQEFSGYHSQLEDCISRIKNALNEIYSLAQGGTAVGTGINSKKGFDKKIINEIKKITKLPFKPTKNKFAALAAHDEIVNFSGTLNTTAVCLMKIANDIRFLGSGPRAGYGELILPANEPGSSIMPGKVNPTQSEAVTMVCVKVIGNHNGITMAGSHGHFELNVFKPLIAHNILQSIDLLADSSKNFGLYCIRGLKADKNIIKNYLDNSLMLVTALAPKIGYDNAAKIAKSAL

SEQ ID NO: 177262 - protein, 305 aa, Unknown
  Bacterial polypetide isolated from the Sargasso Sea
KKPVHPNDHVNKSQSTNDVFPTAMHMAVAIRTKGKLLPSLKLLNKELKKKSKQFNKIVKVGRTHLQDATPITLGQEFSGYNSQLSKCIKRIEYALQEIYFLAQGGTAVGTGLNTRKGFDKKIVHELKKMTKLPFKPSENKFAALAAHDAVVNFSGTMNTTAVCLMKIANDIRFLGSGPRAGYGELILPENEPGSSIMPGKINPTQCEAVTMVCVKVIGNHNGITMAGSHGHFELNVFKPLIIHNILQSIHLMADSSQSFANYCIKGLKADKQKIKKFLDNSLMLVTALSPRVGYDNAAKIAKKAQ

SEQ ID NO: 177263 - protein, 165 aa, Unknown
  Bacterial polypetide isolated from the Sargasso Sea
GSGPRCGIGELILPANEPGSSIMPGKVNPTQSEAMTMVCAQVMGNDATIGFAGSQGNFELNVFKPVMIYNLIQSIYLITDSTHSFTTHCLEGLEVNHTQVAAYLDNSLMLVTALNPVIGYDKASEIAKKAYHENTSLKEACLALGYLGEAEFEQAIDPKKMTEPT

SEQ ID NO: 177264 - protein, 221 aa, Unknown
  Bacterial polypetide isolated from the Sargasso Sea
MKFRKEFDSLGSISVPSDKYWGASTQRSKKYFDIGDFLVRPVLIKSIAIIKKAAAIINYKNKDIDKKIAGAIVKASNEIIQGKMDDNFPLKVWQTGSGTQTNMNVNEVIANRAIEILGGKKGTKKPVHPNDHVNRSQSTNDVFPTAMHIAIALQTKDRLIPSLNLLNNELKKKVRQFNKIVKIGRTHLQDATPLSLGQEFSGYQSQLEKSIDRIKYALNEI

SEQ ID NO: 177265 - protein, 113 aa, Unknown
  Bacterial polypetide isolated from the Sargasso Sea
ITWGHFELNVFKPLIIHNVLQSIQILSDSTRSFAKYCISGLKADKNRIKHLVDNSLMLVTALSPKIGYDNAAKIAKNALKNKTTLKAEALKTGLINEKEYNKIVDPNKMIKPD

SEQ ID NO: 177266 - protein, 321 aa, Unknown
  Bacterial polypetide isolated from the Sargasso Sea
NETRIETDSMGEIEVPANRYYGAQTARSLIHFNIGAETMPRELIRGMGILKKASALVNAELGLMPENIKNLISKAADEVIEGKLDDHFPLRVWQTGSGTQSNMNSNEVIANRGIEMAGGVIGSKDPVHPNDHVNMGQSSNDTFPTAMHIAAVERIEEALIPSLITLADSFKKKTTEFKDIIKIGRTHLMDATPLTLGQEFSGYTTQLEYALDRINGCMPRMHQIALGGTAVGTGLNSHRDFPIKVAKKIAEITGFPFVTAPNKFESLAAHDAIVETSGVLKTIACSLMKIANDIRWLGSGPRCGIGEVILPANEPGSSIMP

SEQ ID NO: 177267 - protein, 201 aa, Unknown
  Bacterial polypetide isolated from the Sargasso Sea
MHTIVDWDRHSQMGQPMRQEHDSIGAVDVPAAAFWGAQTQRSLNNFAIGHQKIPAELIHALARIKQCCAAVNGRHGLLNDQQVALIERAGQAIHTGQHDDHFPLSVWQTGSGTQTNMNVNEVISNLAAQHSGESLGSHRPLHPNDHINRSQSTNDVFPAAIHVAAALQLQQDLLPELKRLIASLDAKADAWQDIIKIGRTH

SEQ ID NO: 177268 - protein, 245 aa, Unknown
  Bacterial polypetide isolated from the Sargasso Sea
MKLRKEFDSIGKINVPDDKYWGASTQRSKKYFDIGEFLVRPILIKSIAIIKKAAAIVHGREKQILPNISKAIIKASNEVISGKLNEHFPLKVWQTGSGTQTNMNVNEVIANRAIEILGGKKGSKKPVHPNDHVNKSQSTNDVFPTAMHIAIAIETKVKLLPALELLNKELKKKVSKFKNIVKVGRTHLQDATPLSLGQEFSGYQSQLEDCIKRIKSALSEIYLLAQGGTAVGTGINSKKGFDRKI

SEQ ID NO: 177269 - protein, 213 aa, Unknown
  Bacterial polypetide isolated from the Sargasso Sea
MTGLPFKTAPNKFETLAGQDSIVELSGSLKTLAVSLFKIANDIRWLASGPRSGIGEIIIPSNEPGSSIMPGKVNPTQCEAMTMVCTQVMGNDLTISIAGASGNFELNVYRPVIAYNIIQSIRLLADASDSFRENCVDGITPNEEKIKTNLYNSLMLVTALNPHIGYDKAAEVAKKAHENNTSLREAIIDLGYMSGEDFDELVDPQKMIKPSKK

SEQ ID NO: 177270 - protein, 101 aa, Unknown
  Bacterial polypetide isolated from the Sargasso Sea
FPLKVWQTGSGTQTNMNVNEVISNIAALKTNSELGSHQPIYPNDDVNKSQSTNDTFPGAIQISVVNEIIKNLVPTIRELTKILDKKSEQWKDFIKIGRTHF

SEQ ID NO: 177271 - protein, 174 aa, Unknown
  Bacterial polypetide isolated from the Sargasso Sea
MKFRVESDSLGKVKVPSDRYWGASTERSNKYFDIGDFLVRPIVIKSIAMIKKSAAIVNAKNGDIDKKISKAIIKAANEIIAGKHKDHFPLKVWQTGSGTQTNMNVNEVISNRAIEILGGKVGSKKPVHPNDHVNKSQSTNDVFPTAMHIAVAIRANGKLLPSLKLLNVELKKKI

SEQ ID NO: 177272 - protein, 140 aa, Unknown
  Bacterial polypetide isolated from the Sargasso Sea
KVNPTQCEAVTMVCVKVIGNHNGITMAGSHGHFELNVFKPLIIHNILQSIHIMSDSSKSFAKYCVSGLKADKKRIKDLLDNSLMLVTALAPHVGYDNAAKIAKKALKNKTKLKDEALKSGLISEKEYDKIVDPKKMIKPN

SEQ ID NO: 177273 - protein, 271 aa, Unknown
  Bacterial polypetide isolated from the Sargasso Sea
NVNEVIANLANKKLTGKLGTNSPVHPNDHVNKSQSTNDSFPSAINIATAVLVKDSLIPSMKRIQTTLKGQSKKWNKIIKVGRTHLQDATPLSLGQEFSGYEAMISSNIKRVEQSFGSLLNLAQGGTAVGSGLNTKRNFDKLVVNEISKIAKIKFKPAINKFQALAAHDAIVEMSGSLNVLTTDLFKIANDIRLLGSGPRSGLGELNLPENEPGSSIMPGKVNPTQCEALTMVCVQAMGMHNTISLAGSQGHFELNAYKPVIGHNIIELIHL

SEQ ID NO: 177274 - protein, 332 aa, Unknown
  Bacterial polypetide isolated from the Sargasso Sea
LEDSLKDAIHKAAEEVIEGKLDEHFPLVVWQTGSGTQTNMNFNEVISNRAIEILGGELGSKDPVHPNDHVNMSQSTNDTFPTAINIAAVESVTNSLIPTLEILKEALDKKSKKFEDIIKVGRTHLQDATPLSLGQEFSGYVSAIDHGINRLRKALDHCLELAAGGTAVGTGINTVEGFDKDIAEEIKKITGQNFRTADNKFEALGGQDCIVELSGVLKVIASSLFKIANDIRWLASGPRSGIGEIKLPANEPGSSIMPGKVNPTQCEAMTMVCTQVMGNDVSITFAGASGNFELNVYRPVMAYNILESIKLLSDASESFTKNTVVGIEPNLD

SEQ ID NO: 177275 - protein, 268 aa, Unknown
  Bacterial polypetide isolated from the Sargasso Sea
EVISNRAIEILGGKKGSKKPVHPNDHVNKSQSTNDVFPTAMHMAIAIRAIDKLIPSLTLLNLQLNKKAKQFKNIVKVGRTHLQDATPLTLGQEFSGYHSQLTKCIERIERALEEIYFLAQGGTAVGTGLNTKKGFDKQIVKEIKKITKLPFKPSTNKFASLAAHDAIVNFSGTMNTTAVCLMKIANDIRFLGSGPRAGYGELILPENEPGSSIMPGKINPTQCEAVTMVCVKVIGNHNGITMAGSHGHFELNVFKPLIIHNILQSIHI

SEQ ID NO: 177276 - protein, 147 aa, Unknown
  Bacterial polypetide isolated from the Sargasso Sea
MKKRREYDSMGKIDVPVDKYWGASTQRSKKYFDIGEFLVRPILIKSIAIIKKSAAIVHRKDRLLSSRIANAIIKASNEVIGGKLEEHFPLKVWQTGSGTQTNMNVNEVIANRAIEILGGKKGSKNPVHPNDHVNKSQSTNDVFPTAM

SEQ ID NO: 177277 - protein, 168 aa, Unknown
  Bacterial polypetide isolated from the Sargasso Sea
MTSEYRIEIDSMGEVKVPKKSLYGAQTQRALNNFPISGICISRPIIKALGVIKQGSAKINSQLGNIPKDVGHAIQLAAQEVIDGKLDSHFPIDIYQTGSGTSSNMNVNEVIANRASELVPELSENIHPNDHINFGQSSNDTFPTAIRIAGYIESKNSLIPALKFLRET

SEQ ID NO: 177278 - protein, 284 aa, Unknown
  Bacterial polypetide isolated from the Sargasso Sea
SVIKVGRTHLQDATPLSLGQEFSGYQSQLEDCISRIKNALKEIYFLAQGGTAVGTGINSKKGFDVKVISEIKKITKLPFKPTKNKFAALAAHDEIVNFSGTLNTTAVSLMKIANDIRFLGSGPRAGYGEIILPTNEPGSSIMPGKVNPTQSEAVTMVCVKVIGNHNGITMAGSHGHFELNVFKPLIAHNILQSIDLLADSTKNFALYCVKGIKADKIKIKKLLDNSLMLVTALAPQIGYDNAAKIAKSALKNGTTLKEEALKTKLINEKDFNRIVDPKKMIYPK

SEQ ID NO: 177279 - protein, 134 aa, Unknown
  Bacterial polypetide isolated from the Sargasso Sea
MKTRKEFDSIGGINVPSDKYWGASTQRSKKFFNIGKIHVPESIIRSIAIIKRSAAIVHEKDGLIASKISKAIIKASNEVISGKMKENFPLKVWQTGSGTQTNMNVNEVIANRAIEILKGKKGSKNPVHPNGSCK

SEQ ID NO: 177280 - protein, 140 aa, Unknown
  Bacterial polypetide isolated from the Sargasso Sea
MKTRKEFDSIGSINVPADKYWGASTQRSNKYFDIGDFLVRPIVIKSIAMIKKAAAIVHQRNGSIDKKISKAIIKAANEVISGKLIEHFPLKVWQTGSGTQTNMNVNEVIANRAIEILGGKKGTKKPVHPNDHVNKSQSTN

SEQ ID NO: 177281 - protein, 133 aa, Unknown
  Bacterial polypetide isolated from the Sargasso Sea
EAVTMVCVKVFGNHNGITMAGSHGHFELNVFKPLIAHNILQSIDLIADSTKNFALYCVKGIKANKKKIQEHLDNSLMLVTALAPHIGYDNAAKIAKTALKNNTTLKYETLKTGLINEKNYNKIVDPKKMIYPA

SEQ ID NO: 177282 - protein, 139 aa, Unknown
  Bacterial polypetide isolated from the Sargasso Sea
VNPTQCEAVTMVCVKVIGNHNGITMAGSHGHFELNVFKPLIIHNVLQSIKILSDSTKSFAKYCISGLKADKNRIKYLVDNSLMLVTALSPIIGYDNAAKIAKNALKNKTTLKIEAMRTGLISERDYDIIVNPYKMIKPI

SEQ ID NO: 177283 - protein, 251 aa, Unknown
  Bacterial polypetide isolated from the Sargasso Sea
IGRTHFQDAVPLSFGQEISGWSEQLKDAENAIIISLNELYFLPLGGTAVGTGINCPKGFCEESIKSISDDTNLMFSKSKNNFSIMASHDRLAQVMSQIKILAGALFKISNDIKILSSGPRSGIYELIIPQNEPGSSIMPGKVNPTQCEALSMVCTQIMGLEYAVSMANSSGTLQMNEYKPLIGFNILTSLKLLKNVLENFRIKLVDGMEPNQKKMKLNLENSLMLVTAIVPKVGYEKAAEIANLAFKESLN

SEQ ID NO: 177284 - protein, 162 aa, Unknown
  Bacterial polypetide isolated from the Sargasso Sea
SRAGYGELILPSNEPGSSIMPGKVNPTQSEAVTMVCAKVMGNHCGITIAGSNGHFELNVFKPLIAENVLQSIDLLADSIKNFSYYCIKGLEADRKKIKYYLDNSLMLVTALAPKIGYDNAAMIAKKALKNNSKLKEEALKSGLISEKDYDIIVDPLKLVKPN

SEQ ID NO: 177285 - protein, 282 aa, Unknown
  Bacterial polypetide isolated from the Sargasso Sea
FQRELIRAYGIVKKAAAKVNSDAGRLDVKIADAIASASDEVIDGKLDEHFPLVIWQTGSGTQSNMNFNEVISNRAIEMMGGKLGSKDPVHPNDHVNMSQSTNDTFPTAINIAAVESTTHKLIPELEELRYSLDSKSKEFDSIIKLGRTHLQDATPLSLGQEFSGYTSAIEHGIERVKNALKSCYELAIGGTAVGTGINSFEGYAEAAANEISSITSLPFKTAQNKFEALGGQDCIVDLSAALKTLSGSLFKIANDIRWLASGPRSGIGEILIPSNEPGSSIM

SEQ ID NO: 177286 - protein, 313 aa, Unknown
  Bacterial polypetide isolated from the Sargasso Sea
LKGKLGSKTPVHPNDHVNLSQSSNDTFPTVMHIAINELVDVKLLPSINNLIKELEKKQNKFSNIIKIGRTHLQDATPLTLGQEFSGYSAQIKNNLKRILHAKLELNYIAQGGTAVGTGINAPKNFDIIFCKFLNKLTLNKYKPNKNKFEAIAAHDSIVNFSASLNTLAVSILKIINDIRLLASGPRSSLGELNLPENEPGSSIMPGKINPTQIEALSMVCAQVIGNNTSISFAGSQGNFELNTFKPLIAFNTLQSINLLSDGINSFNNNCLKGIKPNLHNIKNHLNNSLMLVTALNKDIGYDQAAKIAKKATK

SEQ ID NO: 177287 - protein, 179 aa, Unknown
  Bacterial polypetide isolated from the Sargasso Sea
MKLRKEFDSIGSINVPDDKYWGASTQRSNKYFNIGKILVNISIIKSIAIIKRAAAIVHAKDKLIDSKISKAIIKASDEVVKGKLDKNFPLKVWQTGSGTQTNMNVNEVIANRAIEILGGKKGTKKPVHPNDHVNKSQSTNDVFPTAMHISIAKETINKMLPSLKILEKELKRKSNQLKT

SEQ ID NO: 177288 - protein, 208 aa, Unknown
  Bacterial polypetide isolated from the Sargasso Sea
QDIIKIGRTHLQDAVPLRLSDEVSAWRERLSDGVHWLTTAHQDLLALPLGGTAVGSGLNTPDRFAHEVCAELASRTGSDFQPADNLFAVMAGHDALVQTMAQLRRLAVTLLTIANDIRLLACGPRAGLGELLLPANEPGSSIMPGKVNPTQCEAMAMVCTQVIGMDAAVAAAGAGGHLQMNVYKPLIGFNLIEGIRLLQDACRCFRLN

SEQ ID NO: 177289 - protein, 287 aa, Unknown
  Bacterial polypetide isolated from the Sargasso Sea
MNVNEVIANRAIQMMGGKLGSKKPIHPNDHVNKSQSTNDVFPTAMHIAIAIKAREKLLPSLKLLEKELAKKSKEFKNIVKVGRTHLQDATPITLGQEFSGYHSQLKKCVSRIEAALKEVYYLAQGGTAVGTGLNTRKNFDKKIIKQISKITKIPFKPATNKFAALAAHDEIVNFSGTLNTTAVCLMKIANDIRFLGSGPRAGYGELILPSNEPGSSIMPGKVNPTQSEAVTMVCVKVIGNHNGITMAGSHGHFEINVFKPLIIHNILQSIEIMSDSARTFSLYCVKG

SEQ ID NO: 177290 - protein, 335 aa, Unknown
  Bacterial polypetide isolated from the Sargasso Sea
SKMKYRLEFDSIGKIKVPGDKYWGASTERSNKYFNIGDFLVRPLVIHAIAIVKKAAAVVNAKNKDLEPRLSRYIIRASEEVISGKHDKHFPLKVWQTGSGTQTNMNVNEVIANRAIQMMGGKMGTKKPIHPNDHVNKSQSTNDVFPTAMHIAIALKSKEKLLPSLKLLERELAKKSKEFAKIVKVGRTHLQDATPLTLGQEFSGYHAQLKKCILRIESALKEIYYLAQGGTAVGTGLNTRKNFDKKIVKEISKITKLPFKPSTNKFASLAAHDEIVNFSGTLNTTAVCLMKIANDIRFLGSGPRAGYGELILPTNEPGSSIMPGKINPTQSEAVP

SEQ ID NO: 177291 - protein, 193 aa, Unknown
  Bacterial polypetide isolated from the Sargasso Sea
HDAIVNFSGTMNTTAVCLMKIANDIRFLGSGPRAGYGELILPENEPGSSIMPGKVNPTQCEAVTMVCVKVIGNHNGITMAGSHGHFELNVFKPLIIHNILQSIHIMSDSAKSFAKYCISGLKADKKRIKELLDNSLMLVTALTPRIGYDNAAKIAKRALKNKTTLKVEAIKSGLINEKEYNKLVDPKKMVYPT

SEQ ID NO: 177292 - protein, 212 aa, Unknown
  Bacterial polypetide isolated from the Sargasso Sea
MVSKKRIEFDSLGSKKIDKNKLWGAQTQRSLENFIIGNEKIPSELIVALGQQKKAAAEANMELGVINKKLGSLISKACDDIINLKLIEEFPLSVWQTGSGTQTNMNANEVISNYIIKKLKGRIGSKKPIHPNDHVNLSQSSNDTFPTIMHVAINELSIKDLIPNLKDLIKEFQKKKKIFQNIIKIGRTHTQDATPITLGDEFSAFCTQLQAC

SEQ ID NO: 177293 - protein, 209 aa, Unknown
  Bacterial polypetide isolated from the Sargasso Sea
MNYRVEKDSIGEINVPSDKYWGAQTQRSLENFKIGEQKMPKEIIKAFAVLKKAAALTNADCGVLSAEKASLISSVCDELMNGDLDDQFPLVVWQTGSGTQSNMNVNEVVANRGHVKQGGSLSDENKFLHPNDDINKSQSSNDTFPTAMHIASYKMIVETTIPKIKKLRDTLDLKAKAFMSVVKIGRTHFMDATPLTLGQEISGYVSQLD

SEQ ID NO: 177294 - protein, 294 aa, Unknown
  Bacterial polypetide isolated from the Sargasso Sea
GKQKKACALANNHFGLINKKLTNAITKACDKIINLDLIDEFPLSVWQTGSGTQTNMNANEVISNYAIKTLKGRVGSKFPIHPNDHVNLSQSSNDTFPTIMHIAANELIDNKLIPALKKLIDELYYKSNKYSKTIKIGRTHTQDATPLTVGDEFSGYLHQIKNNYDRIKLAKKELSYLAQGGTAVGSGLNAPKNFDKIFCKYLNKFTKNNYRPAKNKFEAIASHDSLVNFSNCLSTLAVSLLKILNDLRFLSSGPRSGLGEINIPANEPGSSIMPGKINPTQIEALSMICCQVMG

SEQ ID NO: 177295 - protein, 177 aa, Unknown
  Bacterial polypetide isolated from the Sargasso Sea
MKYRTEFDSIGKIKVPGDKYWGASTERSNKYFNIGDFLVRPLVIHSIAIIKKAAAIVNKNNKDLDPKLSKFIVKAAEEVIKGKLDRHFPLKVWQTGSGTQTNMNVNEVIANRAIEMMGGKLGSKKPVHPNDHVNKSQSTNDVFPTAMHISIALKAKEKLLPSLKLLENEFKKEIKRI

SEQ ID NO: 177296 - protein, 254 aa, Unknown
  Bacterial polypetide isolated from the Sargasso Sea
CIERIEKALSEIYFLAQGGTAVGTGINTRKGFDKKIVKEIKKITKLPFKPSKNKFASLASHDPIVNFSGTMNTTAVCLMKIANDIRLLGSGPRAGYGELILPENEPGSSIMPGKVNPTQCEAVNMVCVKVIGNHNGITMAGSHGHFELNVFKPLIAHNILQSINIMSDSSRTFAKYCIQDIKADKKRINSLLENSLMLVTALSPKIGYDNAAKIAKRAHKNGTTLKEEAVKYGLITEKEFLKFVNPKKMTKLNF

SEQ ID NO: 177297 - protein, 297 aa, Unknown
  Bacterial polypetide isolated from the Sargasso Sea
AKNLGESDKTLSPNDDVNLSQSSNDSFPTAINIAAMKIISDNTLVNLKILRDSLNKKSKEFNKIVKIGRTHLMDATPITLGQEFSGYVAQIDNGIKSINNAMDHLSELPIGGTAVGTELNTPKGYSKKVIEYISKYSGFKFKESPNKFEGIASHDCIVEMHGALKTVATSIYKISNDIRLMGSGPRSGLGELILPANEPGSSIMPGKVNPTQCEAISMVCAQIIGNDMAVSFAGANGHFELNVFKPLFAYNIIESSKILGDACLSFSKNCIDGLKPNKKKIERFLKDSLMLCTALNS

SEQ ID NO: 177298 - protein, 239 aa, Unknown
  Bacterial polypetide isolated from the Sargasso Sea
MKTRKEYDSIGSINVPVDKYWGASTQRSSKYFNIGEFLVSPIVIKSIAIIKKAAAIVNTKNGDLDKKIGKVIVKAANEVISGKLKDHFPLKVWQTGSGTQTNMNVNEVIANRAIEVLRGKKGTKKPVHPNDHVNKSQSTNDVFPTAMHMAIAMKAKEELIPSLELLNLKLKKKSKEFNKIVKVGRTHLQDATPITLGQEFSGYNSQLTKSIERIKRALEEIYFLAQGGTAVGTGLNTKK

SEQ ID NO: 177299 - protein, 211 aa, Unknown
  Bacterial polypetide isolated from the Sargasso Sea
MKYRIEIDSIGKIKVPGDKYWGASTERSNKYFNIGDFLVRPLVIHSIAIIKKAAAIVNAKNKDLDTKLSKYIIKASEEVIKGKHDKHFPLKVWQTGSGTQTNMNVNEVIANRAIQMMGGKMGSKKPIHPNDHVNKSQSTNDVFPTAMHIAIALKSREKLLPSLKLLNKELEKKSKEFSKIVKVGRTHLQDATPLTLGQEFSGYHSQLNKCI

SEQ ID NO: 177300 - protein, 289 aa, Unknown
  Bacterial polypetide isolated from the Sargasso Sea
KKGTKKPIHPNDHVNKSQSTNDVFPTAMHMSIAIRATGKLIPSLTMLNLQLKKKAKEFNKIVKVGRTHLQDATPLTLGQEFSGYHSQLSKCIERIKGALEEIYFLAQGGTAVGTGLNTKKGFDKKVVAEIKKITKLPFKPSTNKFASLAAHDAIVNFSGTMNTTAVCLMKIANDIRFLGSGPRAGYGELILPENEPGSSIMPGKVNPTQCEAVTMVCVKVIGNHNGITMAGSHGHFELNVFKPLIIHNILQSIHIMSDSSKSFAKYCVAGLKADKKRIQELLDNSLMLV

SEQ ID NO: 177301 - protein, 146 aa, Unknown
  Bacterial polypetide isolated from the Sargasso Sea
MKKRKEFDSIGYIDVPSDKYWGASTQRSKKYFDIGEILVKPILIQSIGIIKKSAAIVHRKDKQIPVKIANAIIKASNEVINGKLINHFPLKVWQTGSGTQTNMNVNEVIANRAIEILKGKKGSKKPVHPNDHVNKSQSTNDVFQLQ

SEQ ID NO: 177302 - protein, 119 aa, Unknown
  Bacterial polypetide isolated from the Sargasso Sea
MKKRKEYDSIGVINVPGDKYWGASTQRSKKYFDIGEFLVRPVLIKSLGIIKKSAAIVHKNDGQLESKISNAIIKSSNEVIKGKLNDHFPLKVWQTGSGTQTNMNVNEVIANRAMKLWVK

SEQ ID NO: 177303 - protein, 112 aa, Unknown
  Bacterial polypetide isolated from the Sargasso Sea
HGHFELNVFKPLIIHNILQSINIMSDSSKAFAKYCIKGLKADKKRIKYLLNNSLMLVTALSPKIGYDNAAKIAKLAHQKGTTLKEEAVKSGLISEKEFSKIVNPIKMIKPNK

SEQ ID NO: 177304 - protein, 209 aa, Unknown
  Bacterial polypetide isolated from the Sargasso Sea
NSVPYRSNKFEALATHDALVNFSSSIRGMAASIFKISNDIRFLASGPRCGFGELSLPENEPGSSIMPGKVNPTQIEALTMVCSQIIGNDVAVGFAGSQGHFELNVFKPLIAYNVLQSLQLLGDATSSFTIRCLKNILPNERKISNLMWGSLMLVTALTPKIGYDAATKIAKSAHLNGTTLEVEAIKSGLIDKETFTEIVRPEKMINPSD

SEQ ID NO: 177305 - protein, 323 aa, Unknown
  Bacterial polypetide isolated from the Sargasso Sea
RKEFDSIGAINVPADKYWGASTERSNKFFDIGKILVNSSIINSIAIIKRSAAIVHKKDGLIPRNISNAIVKASNEIIAGKLKNNFPLKVWQTGSGTQTNMNVNEVIANRAIEILKGKKGSKKPVHPNDHVNKSQSTNDVFPTAMHISVAIETLNKLLPNLKLLESSLKKKSNEFKKIVKIGRTHLQDATPLTLGQEFSGYYEQLKKSIERINFSLKDILFLAQGGTAVGTGLNSNKNFDKKITREISKYCKIHFKPAPNKFSELAAHDAIVSFSGSLNACAVALMKISNDIRFLGSGPRAGYGELVLPENEPGSSIMPGKVNP

SEQ ID NO: 177306 - protein, 203 aa, Unknown
  Bacterial polypetide isolated from the Sargasso Sea
MKNKKRIEFDSLGSKKIDKEKLWGAQTQRSLENFKIGSEKIPDELIVALGQQKKAAAQANIELGVLNKKLGKSIISACNDIINLKLIEEFPLVVWQTGSGTQTNMNANEVVSNYIIKKLGGNIGSKEPIHPNDHVNLSQSSNDTFPTIMHIAINELSMINLIPNLKNLIKEFQKKKKIFQNIIKIERTHTQDATPITLGDEFS

SEQ ID NO: 177307 - protein, 144 aa, Unknown
  Bacterial polypetide isolated from the Sargasso Sea
MKNIRIETDSFGKLEVSNEKYWGAQTQRSLKNFNIGEEKQKLSIIYGLVAIKQAAAIVNIDEGKLDKKIGNAIVKACKKIRSGKFDDNFPLSVWQTGSGTQTNMNVNEVIANVAIKDLNGKIGSKNPVHPHDHVNMSQSSNDTY

SEQ ID NO: 177308 - protein, 249 aa, Unknown
  Bacterial polypetide isolated from the Sargasso Sea
IKNALNEIYFLAQGGTAVGTGINTRKNFDKKIVNEIRKITKLPFKPAKNKFAALAAHDAIVNFSGTLNTTAVCLMKIANDIRFLGSGPRAGYGELILPENEPGSSIMPGKVNPTQCEAVTMVCVKVIGNHNGITMAGSHGHFELNVFKPLIIHNILQSIKILSDSTNSFAKYCISGLKADKNRIKQLLDNSLMLVTALSPKIGYDNAAKIAKKALKNKTTLKIEALKSGLINEKDYDKIVDPKKMINPN

SEQ ID NO: 177309 - protein, 281 aa, Unknown
  Bacterial polypetide isolated from the Sargasso Sea
KKDLIVEACTEILDGLHDSQFPLKVWQTGSGTQTNMNVNEVISNIAALKTNSELGSHQPIHPNDDVNKSQSTNDTFPAAIQISVVNEIIKNLVPTIRELIKVLDKKSEEWKDLIKIGRTHFQDAVPLTFGQEISGWSEQLKDAENAIIMSLNELYFLPLGGTAVGTGINCPKGFCEESIKSISDDTNLMFYKSKNNFSIMASHDRLAQVMSQIKILAGALFKISNDIKILSSGPRSGIYELIIPQNEPGSSIMPGKVNPTQCEALSMVCTQIMGLEYAVSM

SEQ ID NO: 177310 - protein, 127 aa, Unknown
  Bacterial polypetide isolated from the Sargasso Sea
CVKVIGNHNGITMAGSHGHFELNVFKPLIIHNILQSIHIMSDSSKSFAKYCVSGLKADKKRIKQLLDNSLMLVTALAPHVGYDNAAKIAKKALKNKTKLKVEALKSGLISEKEYDKIVDPKKMVSPS

SEQ ID NO: 177311 - protein, 208 aa, Unknown
  Bacterial polypetide isolated from the Sargasso Sea
MKLRKEFDSIGSINVPNDMYWGASTQRSKKYFDIGEFLVRPILIKSIATIKKAAATVHGREKMILPKISKSIIKASNEVISGKLDKHFPLKVWQTGSGTQTNMNVNEVIANRAIEILGGKKGTKKPVHPNDHVNKSQSTNDVFPTAMHIAIAIETKKKLLPSLELLNKELKKKVSQFRNIIKVGRTHLQDATPLSLGQEFSGYQAQLE

SEQ ID NO: 177312 - protein, 149 aa, Unknown
  Bacterial polypetide isolated from the Sargasso Sea
MKQRKEFDSIGKISVPADKYWGASTERSKKYFDIGKILVKPVLIKSIAIIKKSAAIVHKKDKQIERKIANAIIKAANEIIQGKLNDHFPLKVWQTGSGTQTNMNVNEVIANRAIEILRGKKGTKKPVHPNDHVNKSQSTNDVFPTAMHI

SEQ ID NO: 177313 - protein, 144 aa, Unknown
  Bacterial polypetide isolated from the Sargasso Sea
MKNKKRIEFDSLGSKKIDKNKLWGAQTQRSLENFKIGSEKIPVELIVALGQQKKAAAEANIELGVLNRKLGKLIIKACNDIINLKLIEEFPLVVWQTGSGTQTNMNANEVISNYIIKKLGGKIGSKEPVHPNDHVNLSQSSNDT

SEQ ID NO: 177314 - protein, 240 aa, Unknown
  Bacterial polypetide isolated from the Sargasso Sea
NLAQGGTAVGTGLNTKKGFDKKIVKEISKITKIPFKPAKNKFAALAAHDEIVNFSGTLNTTAVCLMKIANDIRFLGSGPRAGYGELILPANEPGSSIMPGKVNPTQSEAVTMVCVKVIGNHNGITMAGSHGHFELNVFKPLIIHNILQSIEIMSDSSKTFALYCVKGIKADKKRIKYLLDNSLMLVTALAPKIGYDQAANIAKRAYKNGTTLKQEVIKTGLIKEGEYRKIMDPVKMTKPK

SEQ ID NO: 177315 - protein, 164 aa, Unknown
  Bacterial polypetide isolated from the Sargasso Sea
GPRCGLGELNLPENEPGSSIMPGKVNPTQIEALTMVCAQIMGNDSAVGFAGSQGHFELNVFKPMIAYNVLQSLQLLGDSADSFTKRCLKGLTPNESRISDLMWGSLMLVTALAPKIGYDNAAKIAKEAHKNGTTLEQEAIKTGMVDKETFLKIVKPETMIMPSK

SEQ ID NO: 177316 - protein, 296 aa, Unknown
  Bacterial polypetide isolated from the Sargasso Sea
GSINVPVDKYWGASTQRSKKYFDIGDVLVRPKLIKSIAIIKKAAAITNYKNKDINSKIYKSIIRASSEVINGKLDSHFPLKVWQTGSGTQTNMNVNEVISNRAIEILKGKKGTKKPVHPNDHVNKSQSTNDVFPTAMHIAIAMETREKLLPSLELLNKELKKKVREFNKIVKIGRTHLQDATPLSLGQEFSGYQSQLQDCIKRIEISLNEIYYLAQGGTAVGTGINTKKNFDKKIVNEIKKITKLPFKPATNKFAALAAHDAIVNYSGTLNTTAVCLMKIANDIRFLGSGPRAGYG

SEQ ID NO: 177317 - protein, 266 aa, Unknown
  Bacterial polypetide isolated from the Sargasso Sea
IKKACAIVNEKNKLLEKDMAKAIVESAQQVIDGKHDQDFVLDIFQTGSGTSTNMNANEVIARLASDKSGNEIHPNDHVNMSQSSNDVIPTATNIAAVLDVTEGLLPELKGLITLLEEKGKAWAKVYKNGRTHLMDATPVTLGQEFTGYASLVSERMEDVENSLVNVRKLAIGGTAVGTGINAPDGFGSNVAKELEKSLNTSFEEVEDHFTRQGSRDEIVQLSGSLKSLAVSLFKIANDIRWMGSGPISGLNELKIPALQPGSSIMP

SEQ ID NO: 177318 - protein, 141 aa, Unknown
  Bacterial polypetide isolated from the Sargasso Sea
MEFDSLGKVKVPADKYWGASTQRSNKYFDIGDFLVRPIVIKSIAMIKKAAAIVNAKNGDIDKRISKAIIRAANEVISGKHMNHFPLKVWQTGSGTQTNMNVNEVISNRSIELLGGKIGSKKPVHPNDHVNKSQSTNDVFQQ

SEQ ID NO: 177319 - protein, 231 aa, Unknown
  Bacterial polypetide isolated from the Sargasso Sea
MKNRKEYDSIGEINVPVDKYWGASTQRSSKYFDIGDFLVRPIVIKSIAIIKKAAAIVNAKNGDLDKKISKTIVKASNEVISGKLMNHFPLKVWQTGSGTQTNMNVNEVIANRAIEILRGKKGSKKPVHPNDHVNKSQSTNDVFPTAMHMAIAISTTENLIPSLNLLNLQLKKKSKEFKKIIKIGRTHLQDATPLTLGQEFSGYHFQLTKCIERIKKALEEIYFLAPRWYCS

SEQ ID NO: 177320 - protein, 247 aa, Unknown
  Bacterial polypetide isolated from the Sargasso Sea
IALKEIYSLAQGGTAVGTGINSKKNFDRKIINEIKKITKLPFKPTKNKFAALAAHDEIVNFSGTLNTTAVSLMKIANDIRFLGSGPRAGYGELILPANEPGSSIMPGKVNPTQSEAVTMVCVKVIGNHNGITMAGSHGHFELNVFKPLIAHNILQSINLLSDSINNFSLYCIRGLKADKTKIKEYLDNSLMLVTALAPHIGYDNSAKIAKLALKNKTTLKHEALKSGLISEKDYNKIVDPKKMIYPA

SEQ ID NO: 177321 - protein, 222 aa, Unknown
  Bacterial polypetide isolated from the Sargasso Sea
AIVKACDELLALDDVMQHFPVDIFQTGSGTSTNMNANEVIARLASRYSSEEVHPNDHVNYGQSSNDVIPTTIHVSAAIALSNELIPAVERLVRTIEVKAKSVAQYCKTGRTHLMDAMPVGMDQSLLAWASQLKQQVKTLRAVQPAIQTLAQGGTAVGTGVNAHADFATTFSDALGELTDIAFKPAENFFALIGSQDTAVTLSGATKSLAVTLMKIANDLRWM

SEQ ID NO: 177322 - protein, 167 aa, Unknown
  Bacterial polypetide isolated from the Sargasso Sea
FLGSGPRAGYGELILPENEPGSSIMPGKVNPTQCEAVTMVCVKVIGNHNGITMAGSHGHFELNVFKPLIIHNILQSIHIMSDSAKSFAKYCVSGLKADKKRIKELLDNSLMLVTALAPHVGYDNAAKIAKNALKNKTKLKEEALKSGLITEKEYDKIVDPKKMINPS

SEQ ID NO: 177323 - protein, 236 aa, Unknown
  Bacterial polypetide isolated from the Sargasso Sea
GGTLGSKDPVHHNDHVNMGQSTNDTFPTAINISAVESVVHNLLPKLEALRDGLDSKAKAFSKIIKLGRTHLQDATPLSLGQEFSGYVTAIDYGCNRINNAIKSCYSLAMGGTAVGTGINTIDGFGKKAAEEIASITKLPFQTAENKFEALGAQDSIVELSGALKTISVSLFKIANDIRWLASGPRSGLGEIILPANEPGSSIMPGKVNPTQCEAMTMVCTQVMGNDTTISSAGASG

SEQ ID NO: 177324 - protein, 179 aa, Unknown
  Bacterial polypetide isolated from the Sargasso Sea
ASIYKISNDIRLMGSGPRSGLGELILPANEPGSSIMPGKVNPTQCEAISMVCAQIIGNDMAVSFAGANGHFELNVFKPLFAYNIIESSKILGDACLSFAKNCIDGLKPNKKKIERFLKDSLMLVTALNSKIGYYKAAEIANKAYKEDITLKEACIELNYLSSKEFDIYVNPERMTNNEG

SEQ ID NO: 177325 - protein, 260 aa, Unknown
  Bacterial polypetide isolated from the Sargasso Sea
MKLRKEFDSIGIVNVPNDKLWGASTQRSNKFFNIGKILVNISIIKSIAIIKRSAAIVHAKDKLIDNKISKAIIRASDEVIKGKLDDNFPLKVWQTGSGTQTNMNVNEVIANRAIEMMGGKKGSKKPVHPNDHVNKSQSTNDVFPTAMHISIAKETLSKLLPNLKILEKELNRKSKKFKNIVKIGRTHLQDATPLSLGQEFSGYHVQVRKSIERIEYALKEILFLAQGGTAVGTGINSRKNFDKKVVKEIAKFTKIKFKPA

SEQ ID NO: 177326 - protein, 130 aa, Unknown
  Bacterial polypetide isolated from the Sargasso Sea
MKFRKEYDSIGSINVPVDKYWGASTQRSKKYFDIGDVLVRPKLIKSIAIIKKAAAITNYKNKDINSKIYKSIIRASSEVINGKLDSHFPLKVWQTGSGTQTNMNVNEVISNRAIEILKGKKGTKKPVHPN

SEQ ID NO: 177327 - protein, 179 aa, Unknown
  Bacterial polypetide isolated from the Sargasso Sea
AVCLMKIANDIRFLGSGPRAGYGELILPSNEPGSSIMPGKVNPTQSEAVTMVCVKVIGNHNGITMAGSHGHFELNVFKPLIIHNILQSIEIMADSSKTFALYCIKGIKADKKRIKNLLDNSLMIVTALAPKIGYDNAAKIAKAAHKNGTTLKEEVLKTNLISEKEYDKIMDPIKMTKPK

SEQ ID NO: 177328 - protein, 265 aa, Unknown
  Bacterial polypetide isolated from the Sargasso Sea
MKFRKEFDSIGSIKVPSDKYWGASTQRSKKYFDIGDFLIRPVLIKSIAIIKKAAAITNFKNKDLDKKISNAIIKASNEVINGKLKDNFPLKVWQTGSGTQTNMNVNEVISNRAIEILGGKKGTKKPVHPNDHVNKSQSTNDVFPTAMHIAIALKTKEILIPSLNLLNHELKRKVTKFKSIIKIGRTHLQDATPLSLGQEFSGYQSQLEKCIERIDTSLNEIYFLAQGGTAVGTGINTRKNFDKKIVNEIRKISKLPFKPAKNKFA

SEQ ID NO: 177329 - protein, 327 aa, Unknown
  Bacterial polypetide isolated from the Sargasso Sea
VRASNEVMAGKLDNHFPLKVWQTGSGTQTNMNVNEVISNRAIEMLKGKMGTKKPVHPNDHVNKSQSTNDVFPTAMHIAIAIETREKLLPSLTLLNKELKKKVKEFKKIIKIGRTHLQDATPLSLGQEFSGYQSQLDECIKRIEVSLNEVYYLAQGGTAVGTGINTKKNFDKKIVNEIKKITKLPFKPAKNKFAALAAHDVIVNYSGTLNTTAVCLMKIANDIRFLGSGPRAGYGELILPENEPGSSIMPGKVNPTQCEAVTMVCVKVIGNHNGITMAGSHGHFELNVFKPFIIHNVLQSIQILSDSTKSFAKYCIAGLKADKNRIKH

SEQ ID NO: 177330 - protein, 147 aa, Unknown
  Bacterial polypetide isolated from the Sargasso Sea
MKFRKEFDSIGKINVPNDKYWGASTQRSKKYFDIGEFLVRPVLIKSIAIIKKAAAVVHVRKKQILPHISRAIIKASNEVISGKLDKHFPLKVWQTGSGTQSNMNVNEVIANRAIEILGGKKGTKKPVHPNDHVNKSQSTNDVFPTAM

SEQ ID NO: 177331 - protein, 139 aa, Unknown
  Bacterial polypetide isolated from the Sargasso Sea
MKYRTEFDSLGKIKVPGDKYWGASTQRSNKYFDIGDFLVRPILIQSIAIVKKAAAIVNVKNKDLDKKISKHIIKAADEIIKGKHKDHFPLKVWQTGSGTQTNMNVNEVIANRAIQMMGGKMGTKKPVHPNDHVNKSQST

SEQ ID NO: 177332 - protein, 170 aa, Unknown
  Bacterial polypetide isolated from the Sargasso Sea
MSNFRIEKDTLGKVKVPKEKFWGAQTQRSLENFNIGNDKMPKELIYSFAIQKKAAAISNIALGNLNSRLGKQIIKVCDEIISGKLDDQFPLSVWQTGSGTQTNMNLNEVIANKANKNLGKSLGLYDPIHPNDHCNLGQSSNDSFPTAMHISLVKVIKEILEPEVSKFIKS

SEQ ID NO: 177333 - protein, 293 aa, Unknown
  Bacterial polypetide isolated from the Sargasso Sea
VWQTGSGTQTNMNVNEVISNRAIELGGGEIGTKTPVHPNDHVNRSQSSNDVFPSAMHIATVDGLANQLKPSLKTLRSTLNGKANKFAEIIKIGRTHLQDATPITMQQEFSGYVAQLDEGLRRLDLALQPLYNIALGGTAVGTGLNTKAGFAERVASKIAELTNAPFVTAPNKFEALAAHDTLVEIHGHLKTIAVSLMHIANDIRWLASGPRCGIGEIRIPENEPGSSIMPGKVNPTQCEALTMVCVQVMGNDAAVGFAGSQGNFQLNVYKPVMIYNVMHSIRLLTDACTSFND

SEQ ID NO: 177334 - protein, 134 aa, Unknown
  Bacterial polypetide isolated from the Sargasso Sea
SEAMTMVAVQVIGNDTAINVGGSSGNFELNVFKPVMIYNLLQSIRLLADSCRSFNHHCVVGIEPNETQIKQHLNASLMLVTALNPHIGYDNAAKVAKKAYQENTTLKESAVALGLLTVDEFDEKVRPEEMTGPK

SEQ ID NO: 177335 - protein, 163 aa, Unknown
  Bacterial polypetide isolated from the Sargasso Sea
MASGPRSGLGELALPVNEPGSSIMPGKVNPTQIEALSMVCTQVVGNSATVDLAGSNGHFQLNAYKPVIAFNIIQSINLISDGMKSFNNNCLKGIKANKKMIDNHLNNSLMLVTALNKTIGYDNAAKIAKKAFDENLTLKEAALKLKLISEKDFNKIVDPKKMV

SEQ ID NO: 177336 - protein, 127 aa, Unknown
  Bacterial polypetide isolated from the Sargasso Sea
CVKVIGNHNGITMAGSHGHFELNVFKPLIAHNILQSIDLIADSTKNFAIYCVRGIKANKKKIQEHLDNSLMLVTSLAPHIGYDNAAKIAKTALKNNTTLKHETLKTGLITEKDYKKIVDPKKMIYPE

SEQ ID NO: 177337 - protein, 116 aa, Unknown
  Bacterial polypetide isolated from the Sargasso Sea
MKLRKEFDSIGSINVPNNKYWGASTQRSKKYFDIGEFLVRPILIKSISIIKKAAAKVHARDKQIPTNVSKAIIRAANEVITGKLNDHFPLKVWQTGSGTQTNMNVNEVIANRAMKF

SEQ ID NO: 177338 - protein, 199 aa, Unknown
  Bacterial polypetide isolated from the Sargasso Sea
MSKKNRIEQDSIGKIAVSNENFWGAQTQRSLKNFKIGNHIMPIEIIRALAIIKLSCAKVNSKQKILSNKLSAAIVGASKLVLSGKYDRHFPLSVWQTGSGTQTNMNVNEVIANLANKNLTGKLGTNSPVHPNDHVNKSQSTNDSFPSAINIATAMLVKDSLIPSMKRLQTTLKSHSKKWDKIIKVGRTHLQDATPLSLG

SEQ ID NO: 177339 - protein, 168 aa, Unknown
  Bacterial polypetide isolated from the Sargasso Sea
KILGSGPRAGYGEFILPANEPGSSIMPGKVNPTQSEAVTMVCVKVIGNHNGITIAGSQGQFELNVFKPLIAHNILQSIDLLADSSNNFSKFCVKGIKANLNKIKKDLDNSLMLVTALAPKIGYDQAAKIAKKALKNGTTLKYEAVKSGLIREKEYYKIVDPKKMINPR

SEQ ID NO: 177340 - protein, 308 aa, Unknown
  Bacterial polypetide isolated from the Sargasso Sea
KVNAELGNIPKDVGHAIQLAAQEVIDGRLDDHFPIDIYQTGSGTSSNMNANEVIATRAMQLVQELSVNVHPNDHINFGQSSNDTFPTAIRIAGYLEAKNDLIPSLKFLRETFLKKGADYSHVVKTGRTHLMDAMPLTFEQEFSGYARQIALGIKRIETTLANMAELPMGGTAVGTGINTHPKFPAKFAAVVSRLTGEAFCEAENHFEAQSSVDAPVELGAQLKTLAVSLLKIVNDLRWMNSGPNGGLGEIQLTALQPGSSIMPGKVNPVIEEIMAMVCAQVIGYDASISVGGLSGIFELNVMLPMVAH

SEQ ID NO: 177341 - protein, 155 aa, Unknown
  Bacterial polypetide isolated from the Sargasso Sea
LILPENEPGSSIMPGKVNPTQCEAVTMVCVKVIGNHNGITMAGSHGHFELNVFKPLIAHNILQSIDLIADSTKNFALYCVKGIKANKKKIQEHLDNSLMLVTALAPHIGYDKAAKIAKTALKNNTTLKHETLKTGLISESDYKRIVDPKKMIYPA

SEQ ID NO: 177342 - protein, 120 aa, Unknown
  Bacterial polypetide isolated from the Sargasso Sea
MKYRTEFDSIGKIKVPGDKYWGASTQRSNKYFDIGDFLVRPILIRSIAIVKKAAAIVNTKNKDLDKKLSKYIVRASDEIIKGKLDEHFPLKVWQTGSGTQTNMNVNEVISNRAIQLMGGK

SEQ ID NO: 177343 - protein, 212 aa, Unknown
  Bacterial polypetide isolated from the Sargasso Sea
GISKITRIDFKTASNKFEALAANDPIVEFSGSLKTAASSLFKIANDVRFLGSGPRCGLGELSLPENEPGSSIMPGKVNPTQAEATTMVCIQIMGNDAAIGFAGSQGHFELNVYKPLLSYNTLQSLQLLGDACYSFAKNCVKGLKANEVQIKKHLDNSLMLVTALAPKIGYDNATKIAKNAHKNNTTLRTEAIKSGLIDDKEFAKIVNPKNMI

SEQ ID NO: 177344 - protein, 212 aa, Unknown
  Bacterial polypetide isolated from the Sargasso Sea
KFTKIKFRPAVNKFAELAAHDSIVNFSGTLNTCAVALMKISNDIRFLGSGPRAGYGELILPENEPGSSIMPGKVNPTQCEAVTMVCVKVIGNHNGITIAGSHGHFELNVFKPLIAHNILQSIDLIADSTKNFAIYCVKGIKANRKKIQEHLDNSLMLVTALAPHIGYDNAAKIAKKALKNNTTLKNETLKTGLIKEKDYNRIVDPKKMIYPT

SEQ ID NO: 177345 - protein, 116 aa, Unknown
  Bacterial polypetide isolated from the Sargasso Sea
MKNRKEYDSIGEINVPVDKYWGASTQRSSKYFDIGDFLVRPIVIKSIAIIKKAAAIVNAKNGDLDKKISKIIIRAANEVISGKLITHFPLKVWQTGSGTQTNMNVNEVIANRAIEI

SEQ ID NO: 177346 - protein, 244 aa, Unknown
  Bacterial polypetide isolated from the Sargasso Sea
DEIYYLAQGGTSVGTGINTKKNFDKNIINEIKKITKLPFKPAKNKFAALAAHDAIVNFSGTLNTASVCLMKIANDIRFLGSGPRAGYGELLLPENEPGSSIMPGKVNPTQCEAVTMVCVKVIGNHNGITMAGSHGHFELNVFKPLIIHNILQSINILSDSTKSFARYCISGLKANKIKIKEHLDNSLMLVTALSPIIGYDKAASIAKKALKNKTTLKIETIKSGLIKEKEYDKIVDPKKMIKPF

SEQ ID NO: 177347 - protein, 161 aa, Unknown
  Bacterial polypetide isolated from the Sargasso Sea
RAGYGELILPENEPGSSIMPGKVNPTQCEAVTMVCVKVIGNHNGITMAGSHGHFELNVFKPLIIHNILQSIQIMSDSAKSFANYCVSGLKADKIRIKELLDNSLMLVTALAPKVGYDNAAKIAKKALKNKTTLKLEALKSGLISEKDYDRIVDPKKMIYPK

SEQ ID NO: 177348 - protein, 293 aa, Unknown
  Bacterial polypetide isolated from the Sargasso Sea
MKNRKEYDSIGGINVPVDKYWGASTQRSSKYFDIGDFLVRPIVIKSIAIIKKAAATVNAKNGDLDRKISKTIVRAANEVISGKLISHFPLKVWQTGSGTQTNMNVNEVIANRAIEILGGKKGSKKPVHPNDHVNKSQSTNDVFPTAMHMAIAIKATEELIPSLNLLNLQLNKKSKEFKKIVKVGRTHLQDATPLTLGQEFSGYNFQLTKCIERIKKALEEIYFLAQGGTAVGTGLNTRKGFDKKIVSEIKKITKLPFKPSPNKFASLAAHDAIVNFSGTMNTTAVCLMKIANG

SEQ ID NO: 177349 - protein, 227 aa, Unknown
  Bacterial polypetide isolated from the Sargasso Sea
TAMHIAIALETKKKLLPSLSLLNFELKKKVKKFKNIIKVGRTHLQDATPLSLGQEFSGYQSQLETCIKRINHALNEIYFLAQGGTAVGTGINTKKNFDKKIVREIRKITKIPFKPAKNKFAALAAHDAIVNFSGTLNTTAVCLMKIANDIRFLGSGPRAGYGELILPSNEPGSSIMPGKVNPTQSEAVTMVCVKVIGNHNGITMAGSHGHFELNDFKPLIAHNILQS

SEQ ID NO: 177350 - protein, 161 aa, Unknown
  Bacterial polypetide isolated from the Sargasso Sea
MKYRTEFDSIGKIKVPGDKYWGASTERSNKYFNIGDFLVRPLVIHSIAIIKKAAAIVNTKNKDLDPKISKYIIKAADEVIKGKHDNHFPLKVWQTGSGTQTNMNVNEVIANRAIQMMGGKLGTKKPVHPNDHVNKSQSTNDVFPTAMHIAIAIKAKEKLCL

SEQ ID NO: 177351 - protein, 314 aa, Unknown
  Bacterial polypetide isolated from the Sargasso Sea
WVISIGGASTQRSNKYFDIGDFLVRPILIQSIGVIKKAAAIVNTKNKDLNKKISKFIIKAADEVIKGKLDDHFPLKVWQTGSGTQTNMNVNEVISNRAIQLMGGKMGTKKPVHPNDHVNKSQSTNDVFPTAMHIAIAIKTKKKLLPSLKLLEKELGKKVNEFNKIVKLGRTHLQDATPLTLGQEFSGYHSQLKKCIERIEKALNEIYYLAQGGTAVGTGLNTRRNFDKKVIKEIKQITKLPFKPAKNKFAALAAHDAIVNFSGTMNTAAVCLMKIANDIRFLGSGPRAGYGELILPEKRTGSSIMPGKVKSNPV

SEQ ID NO: 177352 - protein, 223 aa, Unknown
  Bacterial polypetide isolated from the Sargasso Sea
MKYRIEFDSIGKIKVPGDKYWGASTERSNKYFNIGDFLVRPLVIQSIAIIKKAAAIVNVRNRDLDPKLGRYIIKAAEEVIKGKHNDHFPLKVWQTGSGTQTNMNVNEVISNRAIQMMGGKLGSKKPIHPNDHVNKSQSTNDVFPTAMHITIALKAKEKLLPSLKLLEKELFKKSKEFKNIVKVGRTHLQDATPLTLGQEFSGYHAQLKKCIERIENALKEIYY

SEQ ID NO: 177353 - protein, 291 aa, Unknown
  Bacterial polypetide isolated from the Sargasso Sea
MNVNEVIANRAIKMMGGKMGSKKPVHPNDHVNKSQSTNDVFPTAMHIAIAIKAREKLLPSLKILEKQLNKKVREFKKIVKIGRTHLQDATPLTLGQEFSGYHAQLKKCILRIELSLKEIYNLAQGGTAVGTGLNTRKNFDKKIVKEISKITRIPFKAASNKFAALAAHDEIVNFSGALNTTAVCLMKIANDIRFLGSGPRAGYAELILPSNEPGSSIMPGKVNPTQTEAVTMVCVKVIGNHNGITMAGSHGHFELNVFKPLIAHNILQSIEIMSDSAKTFALYCVKGIKAD

SEQ ID NO: 177354 - protein, 220 aa, Unknown
  Bacterial polypetide isolated from the Sargasso Sea
MSHRTERDSLGPVEVPSDKYYGAQTQRSLDNFKIGSQRFPREFIRAYGILKKSAASVNHRYGKLEDSIKDAIHRASDEVIEGKLDDHFPLVVWQTGSGTQTNMNLNEVISNRAIEILGGELGSKDPVHPNDHVNMSQSTNDTFPTAINIAAVESVTNSLIPNMEILKVALDKKSKKFEDIIKVGRTHLQDATPISLGQEFSGYVSAIDHGINRLKKALDH

SEQ ID NO: 177355 - protein, 298 aa, Unknown
  Bacterial polypetide isolated from the Sargasso Sea
MKIEKKFDSIGKIDVPVDKYWGASTQRSKKYFDIGEFLVERVLIKSIAIIKKSAAIVHKKDKQINQKIANAIIKASNEIIKGKLYEHFPLKVWQTGSGTQTNMNVNEVISNRAIEILRGKKGTKKPVHPNDDVNKSQSTNDVFPTAMHIAIALETKEKLLPSLIILNKELKKKTVKFKNIVKVGRTHLQDATPITLGQEFSGYQSQLESCINRIKNGLNEIYYLAQGGTAVGTGINTKKNFDKKIVKEIKNLTKIPFKPAKNKFAALAAHDAIVNFSGTLNTTAVSLMKIANDIRFLG

SEQ ID NO: 177356 - protein, 211 aa, Unknown
  Bacterial polypetide isolated from the Sargasso Sea
MSDKKFRIEKDSMGELNVPADSKWGPQTQRAVDNFQISDYKMPTGFIRSLALLKWGLANANKDLNLLSKEKASAIADSAMEIYRGDHMKEFPVDVFQTGSGTSTNMNMNEVISHLASSESNPIHPNDDVNMGQSSNDVIPSAINVDSSLSVKNTLIPSMKHLKNAIDEKAKSIGDIPKNGRTHLMDAMPLTFSQEMSAWSAQIQDAIEQYE

SEQ ID NO: 177357 - protein, 290 aa, Unknown
  Bacterial polypetide isolated from the Sargasso Sea
CVSTGSGTSSNMNANEVIANLATKYAKTKISANDDVNMSQSSNDVIPTAIKISASMDLTKKLYPALDKLIDEIEKKAKSVEGVIKTGRTHLMDAMPVDLSDELRAWTSQLSSSRDMLGVIEQRLLQLPQGGTAVGTGINAHKNFAKYFAQEMTKLSGSECKCVPSENFFHELSAQDCSVQLSGELKNLAVVLMKISNDLRWMNSGPLAGLSEIELQALQPGSSIMPGKVNPVIPEAVAMASADVIGNDVTITVAAQAGNFQLNVMLPVIAYNLLKSINLLAGAMNVLSSK

SEQ ID NO: 177358 - protein, 226 aa, Unknown
  Bacterial polypetide isolated from the Sargasso Sea
TRKNFDKKIIREISKITKISFKPASNKFAALAAHDEIVNFSGTLNTTAVCLMKIANDIRFLGSGPRAGYGELILPSNEPGSSIMPGKVNPTQTEAVTMVCVKVIGNHNGITMAGSHGHFELNVFKPLIIHNILQSIEIMSDSAKTFALYCVKGIKADKKRIKYLLDNSLMLVTSLAPKIGYDLAAQIAKKAHKNGTTLKQEVVKAGLIKEKEYDRVMNPIKMTKPK

SEQ ID NO: 177359 - protein, 312 aa, Unknown
  Bacterial polypetide isolated from the Sargasso Sea
KAIAMIKKAAAIVNMKNGDLDKKIGKVIIKASNEIISGKHKDNFPLKVWQTGSGTQTNMNVNEVISNRAIEILKGKMGSKKPVHPNDHVNKSQSTNDVFPTAMHIAIAIRAKDKLLPSLKLLNTELRIKSKKFNNIVKVGRTHLQDATPITLGQEFSGYHSQLSKCIKRIEHALKEIYFLAQGGTAVGTGLNTRKGFDKKIVSEIKKITKLPFKTSENKFAALAAHDSIVNFSGTMNTTAVCLMKIANDIRFLGSGPRAGYGELILPENEPGSSIMPGKVNPTQCEAVTMVCVKVIGNHNGITMAGSHGHFE

SEQ ID NO: 177360 - protein, 220 aa, Unknown
  Bacterial polypetide isolated from the Sargasso Sea
LVAKKIAALTNLPFVSAPNKFEALATHDALVNFSGSLRGMATSIYKISNDIRFLASGPRCGFGELNLPENEPGSSIMPGKVNPTQIEALTMVCSHIIGNDTAVGFAGSQGHFELNVFKPVIAYNVLQSLQLLGDATSSFTLRCLKNISPNEKKISDLMWGSLMLVTALTPKIGYDAATKIAKEAHLNGTTLEDEAIKSGLIDKKTFSDIVRPEKMINPTN

SEQ ID NO: 177361 - protein, 174 aa, Unknown
  Bacterial polypetide isolated from the Sargasso Sea
MKFRIEEDSLGKVRVPRNALWGAQTQRAIDNFPISGISMNFPFTNTFIAMLGFVKDAAARANKNLKLLEAKKQKVISRAAKEIWTNKHGKEFPIDVFQTGSGTSTNMNANEVIANLCYKTSKVKIHPNDDVNMSQSSNDVIPTVMNLAYYFDATKKLMPALNLLIETLEKKAES

SEQ ID NO: 177362 - protein, 262 aa, Unknown
  Bacterial polypetide isolated from the Sargasso Sea
PVHPNDHVNLSPSSNDTFPTVMHIAINELVDVKLLPSINNLIKELEKKQNKFSNIIKIGRTHLQDATPLTLGQEFSGYSAQIKNNLKRILQAKLELNYIAQGGTAVGTGINAPKNFDIIFCKFLNKLTLNKYKPNKNKFEAIAAHDSIVNFSGSLNTLAVSILKIINDIRLLASGPRSGLGELSLPENEPGSSIMPGKINPTQIEALSMVCAQVIGNNSSISFAGSHGNFELNTFKPLIAFNTLQSINLLSDSISSFNNNCL

SEQ ID NO: 177363 - protein, 261 aa, Unknown
  Bacterial polypetide isolated from the Sargasso Sea
IKLAAAEVNVDFCLLEPEIGDIIVQVCREVINGDFDDQFLVDIFQTGSGTSTNMNFNEVISNRAIQKLGGEIGSKTPVHPNDHVNLGQSSNDVIPSAIHISALIGIQNELIGVLENFRDELNNKAQDFMPIVKTGRTHLQDATPIRLGQEFEGYSGQIERRIDKLFEVVNQLSELAIGGTAVGTGVNTHPDFAMKVCNKLSESLGFPVNETTNHFQAQSTLDTIVECSGALKTLAVSLMKIANDIRWLGSGPRAGFGEVEL

SEQ ID NO: 177364 - protein, 199 aa, Unknown
  Bacterial polypetide isolated from the Sargasso Sea
SLAAHDALIEVSAAERGLAMALLKIANDIRWLASGARCGIGEIAVPENEPGSSIMPGKVNPTQCEALTMVCAQVFGNDATVAFAGSQGNFQLNVYKPVMIHNVLESADLLADGCDSMRVHCATGITPNLNRIEQHLNDSLMLVTALNTHIGYENSAKIAKKAHADGTSLKEAAVALGLVTPEQYEEWVVPVEMTRPLAV

SEQ ID NO: 177365 - protein, 175 aa, Unknown
  Bacterial polypetide isolated from the Sargasso Sea
MKIANDIRFLASGPRAGLGELILPENEPGSSIMPGKVNPTQCEAVTMVCVKIIGNHNGITMAGSHGHFELNVFKPLIIYNILQSIGIMSDSTKSFANYCVSGIKADKKKINKFLENSLMLVTALAPKIGYDNASMIAKKALKNNSTLKIEAIKSGLISEKEYNKIVDPKRMVYPK

SEQ ID NO: 177366 - protein, 317 aa, Unknown
  Bacterial polypetide isolated from the Sargasso Sea
MDENFPLKVWQTGSGTQTNMNVNEVIANRAIQILKGKKGSKKPVHPNDHVNKSQSTNDVFPTAIHISIAQETIRKLIPNLKILEKSLKKKSVEFKNIVKIGRTHLQDATPLTLGQEFSGYHQQIKKSLERIKYCLNDILFLAQGGTAVGTGINSKKNFDKKIVKEIGKLCKIKFKPAPNKFSELAAHDAVVNFSGALNTCAVALMKISNDIRFLGSGPRAGYGELILPENEPGSSIMPGKVNPTQCEAVTMVCAKVIGNHTGITVAGSHGHFELNVFKPLIAHNILQSIDIMADSVKTLACFVSMELGQTNQRLKNI

SEQ ID NO: 177367 - protein, 257 aa, Unknown
  Bacterial polypetide isolated from the Sargasso Sea
NINEVISNLASQASGTALGSHTPVHPNDHVNRSQSTNDVFPAAIHVAAAKHLMDGLLPALDALVQAFDAKAQAWMPIVKIGRTHLQDAVPLRLGDEVGAWRDQLKQAQAWLEDCLVSLGDLPLGGTAVGTGLNTPPGFRHAVAEELSRVAGVKVRPADNLFAVMAGHDALVQAMGQLRLLAVALLRIANDVRLLGCGPRAGLGELRLPANEPGSSIMPGKINPTQCEAMAMVCTQVIGLDGAVAAAGAGGHLQMNVY

SEQ ID NO: 177368 - protein, 193 aa, Unknown
  Bacterial polypetide isolated from the Sargasso Sea
GASTARATDNFPISNLRFSRVFIRSLGEIKKACAVVNEKNNLIDSKLSKAIVDSAQEVIDGKHDKDFVVDIFQTGSGTSTNMNINEVIATLASEKIDTEVHPNDHVNMSQSSNDVIPTATNLASLLSIKEDGGLLTYLNNMNETFNSKAKDWAEVYKNGRTHLMDATPVTLGQEFEGYANLIESRIRDIENSL

SEQ ID NO: 177369 - protein, 186 aa, Unknown
  Bacterial polypetide isolated from the Sargasso Sea
MKFRIEEDSLGKVRVPRNALWGAQTQRAIDNFPISGISMNFPFTNTFIAMLGYVKDASARANKNLKLLEAKKQKVISRAAKEVWTNKHGKEFPIDVFQTGSGTSTNMNANEVIANLCYKTSKVKIHPNDDVNMSQSSNDVIPTVMNLAYYFDSTKKLMPALNLLIDTLEKKAESVKGTTKTGRTHL

SEQ ID NO: 177370 - protein, 282 aa, Unknown
  Bacterial polypetide isolated from the Sargasso Sea
IIKAANDVISGKLKDNFPLKVWQTGSGTQTNMNVNEVISNRAIEILGGKKGSKKPVHPNDHVNKSQSTNDVFPTAMHMAIAIKAKENLLPSLSLLNHELGKKSKEFNKIVKVGRTHLQDATPLTLGQEFSGYHAQLSKCIERIKKALDEIYFLAQGGTAVGTGINTRKGFDKKIVAEIKKITKLPFKTSLNKFASLAAHDAIVNFSGTMNTTAVCLMKIANDIRFLGSGPRAGYGELILPENEPGSSIMPGKVNPTQCEAVTMVCVKVIGNHNGITMAGSHG

SEQ ID NO: 177371 - protein, 272 aa, Unknown
  Bacterial polypetide isolated from the Sargasso Sea
ATPLTLGQEFSGYFEQLKKSIERIKYSLKDILFLAQGGTAVGTGLNTKKNFDKKIIREINKYCKIPFKPAPNKFSELAAHDAVVGMSGSLNACAVALMKISNDIRFLGSGPRAGYGELILPENEPGSSIMPGKVNPTQCEAVTMVCVKVIGNHTGISIAGSHGHFELNVFKPLIAHNILQSIDLIADSVKNFSLYCVKGIKANKLKIKDHLDNSLMLVTALAPRIGYDNAANIAKKALKNNTKLKEEALKTGLISEKEYDKIVNPAKMIGPN

SEQ ID NO: 177372 - protein, 306 aa, Unknown
  Bacterial polypetide isolated from the Sargasso Sea
GASTQRSKKYFDIGDVLVRPKLIKSIAIIKKAAAITNYKSKDINSKIYKSIVRASNEVIAGKLDNHFPLKVWQTGSGTQTNMNVNEVISNRAIEILKGKKGTKKPVHPNDHVNKSQSTNDVFPTAMHIAIAMETREKLLPSLVLLNKELKKKVREFYKIVKIGRTHLQDATPLSLGQEFSGYQSQLEECIKRIKVSLNEIYYLAQGGTAVGTGINTKKNFDKKIVNEIKKITKLPFKPAKNKFAALAAHDAIVNYSGTLNTTAVCLMKIANDIRFLGSGPRAGYGELILPENEPGSSIMPGKVNPT

SEQ ID NO: 177373 - protein, 302 aa, Unknown
  Bacterial polypetide isolated from the Sargasso Sea
AVVHIKRCAAEANRELGELPSNKAVAIVGACNDLLAGHHGDQFPVDIFQTGSGTSTNMNVNEVIAHLCEEAGASIHPNDDVNLGQSSNDTIPTAIHVSAALAVTEHLIPALEQLIVELGLRAREHRETVKTGRTHLMDAMPVTVEQELQTWAMQLQDACGRVAGARDALLAVPQGGTAVGSGINAHPAFGETFASKLADETGLAFRALPHPFVAQSALDGPLALSAALRGIAVVLMKISNDLRWMNSGPTHGLGEIQLPATQPGSSIMPGKVNPVICESATMVATQVMGFGSGQCYCRPERQ

SEQ ID NO: 177374 - protein, 169 aa, Unknown
  Bacterial polypetide isolated from the Sargasso Sea
MMLFPTAMHISIAIRTKEKLLPSLKLLEKELKKKSKQFNKIVKVGRTHLQDATPLTLGQEFSGYHTQLKKCILRIESALKEIYFLAQGGTAVGTGLNTKKNFDKKVVKEISRITKLPFKPSSNKFAALAAHDEIVNFSGTLNTTAVCLMKIANDIRFLGSGPRAGYGEL

SEQ ID NO: 177375 - protein, 210 aa, Unknown
  Bacterial polypetide isolated from the Sargasso Sea
MKYRIEKDSLGEIKVPSRALWGAQTQRAVNNFPISGIKMDFPFTKSFVSSLGLIKDAAAKTNLRLKLLSSKKSKAISKAAKEVWQEKHHHEFPIDVFQTGSGTSSNMNANEVIANLATKYAKLDIKPNDDVNMSQSSNDVIPTAIKISAHMDLTKKLFPALDKLIAVIEKKAKSLRGIIKTGRTHLMDAMPIDFAEELYAWSSQLKSSKK

SEQ ID NO: 177376 - protein, 207 aa, Unknown
  Bacterial polypetide isolated from the Sargasso Sea
PFRSAKNKFASLAAHDEIVNFSGTLNTTAVCLMKIANDIRFLGSGPRAGYAELILPSNEPGSSIMPGKVNPTQTEAVTMVCVKVIGNHNGITMAGSHGHFELNVFKPLIAHNILQSIEIMSDSAKTFALYCVKGIKADKKKIKSYLDNSLMLVTALTPKIGYDKAASIAKLAHKNGTTLKEEVIKAGLLKEKEYDKIMDPMKMTKPK

SEQ ID NO: 177377 - protein, 169 aa, Unknown
  Bacterial polypetide isolated from the Sargasso Sea
MAWLRTKKCGLGELSLPANEPGSSIMPGKVNPTQSEAMTMVCCQVIGNHTALTIGGTQGNFELNVFKPMMIYNLLHSVRLLTDSCRSFREKCVDGLKANEEVIQDHLENSLMLVTALNNHIGYDKAAKIAKNAHEKGLTLRESGIELGYLTNTQFDKWIKPEKMIGPSR

SEQ ID NO: 177378 - protein, 185 aa, Unknown
  Bacterial polypetide isolated from the Sargasso Sea
MKFRKEFDSIGSINVPNDKYWGASTQRSKKYFDIGEFLVRPILIKSIAIIKKAAAIVHGKEKQILPRISKAIIKASNEVILGKLDEHFPLKVWQTGSGTQTNMNVNEVIANRAIEILGGKKGTKKPVHPNDHVNKSQSTNDVFPTAMHIAIAIETKKKLLPSLELLNKELKKKVSKFKNIVKVGR

SEQ ID NO: 177379 - protein, 248 aa, Unknown
  Bacterial polypetide isolated from the Sargasso Sea
MLGGELGSKTPVHPNDHVNMGQSSNDTFPTAMHIAAAMEINSELLPALEKLHAALEKKQNQFKDIIKIGRTHLQDATPLTLGQEFSGYVTQMKYAIARVKDTLPRLYQLAQGGTAVGTGLNSSKGFAEDFAAEVAKQTNLPFVTAENKFEALAAHDSIIETSGALNVIAASLMKIANDLRMLGSGPRSGLGELSLPANEPGSSIMPGKVNPTQCEALTMVATQIMGNHSTITIAGATGHFELNVFKPV

SEQ ID NO: 177380 - protein, 172 aa, Unknown
  Bacterial polypetide isolated from the Sargasso Sea
MKYRTEFDSIGKIKVPGDKYWGASTQRSNKYFDIGDFLVRPILIQSIAIIKKAAAMVNTRNGDLDKKISKYIIKAADEVIRGKLNNHFPLKVWQTGSGTQTNMNVNEVISNRAIQMMSGKMGTKKPVHPNDHVNKSQSTNDVFPTAMHVAIAIKTKNKLLPSLKLLEKELKK

SEQ ID NO: 177381 - protein, 257 aa, Unknown
  Bacterial polypetide isolated from the Sargasso Sea
MKLRKEFDSIGSVNVPNDKYWGASTQRSNKFFNIGKILVNISIIKSIAIIKRSAAIVHFKDRLISNKISKAIIKASDEVIKGKLDQNFPLKVWQTGSGTQTNMNVNEVIANRAIEFLGGKKGTKKPVHPNDHVNKSQSTNDVFPTAMHISVAQETINKLLPNLKLLEKELKRKSREFKNIVKIGRTHLQDATPLSLGQEFSGYYVQVRKSIKRIEVALKEIYDLAQGGTAVGTGINSKKNFDKKIVKEIAKFTKIPF

SEQ ID NO: 177382 - protein, 273 aa, Unknown
  Bacterial polypetide isolated from the Sargasso Sea
HVNKSQSTNDVFPTAMHMAIAITATEKLIPSLNLLNLQLKKKSKEFKTIVKVGRTHLQDATPLTLGQEFSGYHFQLTKCIERIKKALEEIHFLAQGGTAVGTGLNTRKGFDKKIVSEIKKITKLPFKPSPNKFASLAAHDAIVNFSGTMNTTAVCLMKIANDIRFLGSGPRAGYGELILPENEPGSSIMPGKVNPTQCEAVTMVCVKVIGNHNGITMAGSHGHFELNVFKPLIIHNILQSIHIMSDSAKSFAKYCVSGIKADKKRIKELLDNS

SEQ ID NO: 177383 - protein, 263 aa, Unknown
  Bacterial polypetide isolated from the Sargasso Sea
KVKKFKNIIKVGRTHLQDATPISLGQEFSGYQSQLETCIKRINYALNEIYNLAQGGTAVGTGINTKKNFDKKIVNQIKKLTKIAFKPAKNKFAALAAHDAIVNFSGTLNTTAVCLMKIANDIRFLGSGPRAGYGELILPTNEPGSSIMPGKVNPTQSEAVTMVCVKVIGNHNGITMAGSHGHFELNVFKPLIAHNILQSIDLLSDSSKNFASYCIKGIKADKNKIKEYLDNSLMLVTSLAPHIGYDNAAKIAKNALKNKTTLK

SEQ ID NO: 177384 - protein, 313 aa, Unknown
  Bacterial polypetide isolated from the Sargasso Sea
VGSIMSPNDKYWGASTQRSNKFFNIGKILVNISIIKSIAIIKRSASIVHAKDKLIDGKISKAIIKASDEVIKGKLNENFPLKVWQTGSGTQTNMNVNEVIANRAIEILGGKKGTKKPVHPNDHVNKSQSTNDVFPTAMHISIAQETISKMLPSLKILEKALKKKSNEFKNIVKIGRTHLQDATPISLGQEFSGYHFQIKKSIERIEYALREILYLAQGGTAVGTGINSKKNFDKKIVKEIAKFTKIKFKPAPNKFAELAAHDSIVNFSGALNTCAVALMKISNDIRFLGSGPRAGYGELILPENEPGSSIMPG

SEQ ID NO: 177385 - protein, 245 aa, Unknown
  Bacterial polypetide isolated from the Sargasso Sea
MVISIGGASTERSNKYFNIGDFLVRPLVIHSIAMIKKAAAIVNSKNKDLDPKMAKYIIKASEEVIKGKHDEHFPLKVWQTGSGTQTNMNVNEVIANRAIEMMGGKLGSKIPVHPNDHVNKSQSTNDVFPTAMHIAIALKAKEKLLPSLKLLEKELNKKSKEFKNIVKVGRTHLQDATPLTLGQEFSGYYSQLKKCILRIENALKEVYHLAQGGTAVGTGLNTKKNFDKKIIKEISRITKLPFKPA

SEQ ID NO: 177386 - protein, 315 aa, Unknown
  Bacterial polypetide isolated from the Sargasso Sea
KFFNIGKIYVPVSIIRSIAIIKRSAAIVHQKDGLISSKISNAIIKASNEVISGKMNENFPLKVWQTGSGTQTNMNVNEVIANRAIEILKGKKGSKKPVHPNDHVNKSQSTNDVFPTAMHISVATETLNKLLPNLNLLKSSLNIKSKEFNNIVKIGRTHLQDATPLSLGQEFSGYYEQVRKSIDRISYCLNDIYYLAQGGTAVGTGINSKKNFDKKIINEIKKFCKIKFKPAPNKFSELAAHDAIVNFSGSLNSCAVALMKISNDIRFLGSGPRAGYGELILPENEPGSSIMPGKVNPTQCEAVTMVCAKVIEIIQ

SEQ ID NO: 177387 - protein, 203 aa, Unknown
  Bacterial polypetide isolated from the Sargasso Sea
MKYRIEKDTLGEVKVPKNVYWGAQTERSRNNFKIGPSASMPMEIIYGFAYLKKSAAFTNHELGVLSIEKRDLIAKVCDEIINGDHDDQFPLVIWQTGSGTQSNMNINEVISNRAHVIKGNKLGRGDKFLNPNDDVNMSQSSNDTYPTAMHIAAYKKIMEVTIPGVLKLKDSLEKKVKKFKSIVKIGRTHLMDATPLTLGQEFS

SEQ ID NO: 177388 - protein, 279 aa, Unknown
  Bacterial polypetide isolated from the Sargasso Sea
RTHLMDATPITLGQEFSGYVAQIDNGIKSIKNALDHLSELPIGGTAVGTELNTPKGYSKKVVESISKNSGLKFKESPNKFEGIASHDCIVEMHGAIKTAAASIYKISNDIRLMGSGPRSGLGELILPANEPGSSIMPGKVNPTQCEAISMVCAQIIGNDVAVSFAGANGHFELNVFKPLFAYNIIESSKILGDACLSFSKNCIEGLKPNKKKIERFLNDSLMLVTALNSKIGYYKSAEIANKAYKEDITLKEACIQLNYLSEKEFDKYVNPQRMTNNEG

SEQ ID NO: 177389 - protein, 273 aa, Unknown
  Bacterial polypetide isolated from the Sargasso Sea
GGKKGSKKPVHPNDHVNKSQSTNDVFPTAMHIAIALKTKNKLLPSLYLLNKSLKKKVKEFSKIIKIGRTHLQDATPLSLGQEFSGYQTQVQESIYRIEHSLNEIYYLAQGGTAVGTGINTRKNFDKKIINEIKKITKLPFKPTKNKFAALAAHDAVVNFSGALNTSAVSLMKIANDIRFLGSGPRAGYGELMLPENEPGSSIMPGKVNPTQCEALTMVCVKVIGNHNGITIAGSHGHFELNVFKPLIIHNTLQSINLLSNSIKNFTNFCVVGI

SEQ ID NO: 177390 - protein, 159 aa, Unknown
  Bacterial polypetide isolated from the Sargasso Sea
MTKNFRIEKDSMGTIEVPIEALWGAQTQRSIINFSIGEELIPIELIYSLTLIKKAASIANFNLGLIDKRKKDLIVEACQEILDGLHDSQFPLKVWQTGSGTQTNMNVNEVISNIAALKTNSELGSHQPIHPNDDVNKSQSTNDTFPAAIQIAVVNEIIK

SEQ ID NO: 177391 - protein, 220 aa, Unknown
  Bacterial polypetide isolated from the Sargasso Sea
MSQKIRQEQDSLGKISLANSNLWGAQTQRSLKNFRIGNTRMPIEIIHALVIIKMSCAKANQKQKLISPKISNAIVNAAKQVLSGRYDDHFPLSVWQTGSGTQTNMNVNEVIANLANKKLSGKLGTNSPVHPNDHVNKSQSTNDSFPSALNIATSINIIQELLPALKNMEKTLRSQSQKWKSIIKIGRTHLQDATPLSLGQEFSGYQAQIISNIKRVESAL

SEQ ID NO: 177392 - protein, 195 aa, Unknown
  Bacterial polypetide isolated from the Sargasso Sea
MKYRIEFDSIGKIKVPGDKYWGASTERSRKYFNIGDFLVRPIVIRSIAIIKKAAAIVNAKNKDLDPKLSRYVIKAAEEVIKGKHNDHFPLKVWQTGSGTQTNMNVNEVIANRAIEMMGGRMGTKKPVHPNDHVNKSQSTNDVFPTAMHISIAIKTKEKLLPSLKLLEKELAKKAREFKSIVKVGRTHLQDATPLT

SEQ ID NO: 177393 - protein, 246 aa, Unknown
  Bacterial polypetide isolated from the Sargasso Sea
ALKEIYFLAQGGTAVGTGLNARKNFDKKIIKEICKITKLPFKPSSNKFASLAAHDEIVNFSGTLNTTAVCLMKIANDIRFLGSGPRAGYGELILPSNEPGSSIMPGKINPTQSEAVTMVCVKVIGNHNGITMAGSHGHFELNVFKPLIIHNILQSIEIMSDSAKTFALYCVRGIKANKKRIKSLLDNSLMLVTALAPKIGYDKAAKIAKSAHKNGTTLKHEVIKSGLIQENEYDKIMNPLHMTKPK

SEQ ID NO: 177394 - protein, 213 aa, Unknown
  Bacterial polypetide isolated from the Sargasso Sea
LTGLPFKTAPNKFETLAGQDSIVELSGSLKTLAVSLFKIANDIRWLASGPRSGIGEIIIPSNEPGSSIMPGKVNPTQCEAMTMVCTQVMGNDLTISIAGASGNFELNVYRPVIAYNIIQSIRLLTDACDSFRENCVDGITPNEEKIKTNLYNSLMLVTALNPHIGYDKAAEVAKKAHENNTSLREAIIDLGYMSGEDFDELVDPQKMIKPSKK

SEQ ID NO: 177395 - protein, 191 aa, Unknown
  Bacterial polypetide isolated from the Sargasso Sea
MKFRNEYDSLGKIKVPFDKYWGASTQRSNKYFDIGDFLVRPIVIKSIAMIKKAAAIVNAKNRSLDKKISRAIIKASNEVISGKLNDHFPLKVWQTGSGTQTNMNVNEVIANRAIEILGGKMGSKKPVHPNDHVNKSQSTNDVFPTAMHMAIAIRAKGKLLPSLKLLNSELKKKSKEFKKIVKVAELIYKMQ

SEQ ID NO: 177396 - protein, 252 aa, Unknown
  Bacterial polypetide isolated from the Sargasso Sea
IERIERALNEIYYLAQGGTAVGTGLNTKKNFDKKIIREIKKITKLPFKPTKNKFAALAAHDSIVNFSGTMNTTAVCLMKIANDIRFLGSGPRAGYGELILPENEPGSSIMPGKVNPTQCEAVTMVCVKVIGNHNGITMAGSHGHFELNVFKPLIIHNILQSINIMSDSSKAFANYCIKGLKADKKRIKSLLDNSLMLVTALSPKIGYDKAAKIAKLAHKNGTTLKEEALKSGFISEKDYIKIMNPMSMTKPK

SEQ ID NO: 177397 - protein, 243 aa, Unknown
  Bacterial polypetide isolated from the Sargasso Sea
MKTRKEHDSIGIVKVPVDKYWGASTQRSKKFFNIGDILINPIIIKSIAVIKKSAAIVHLKNKQIDRKIAKAIIKAADEIISGKLNDNFPLKVWQTGSGTQTNMNVNEVISNRAIEILKGKKGTKKPVHPNDHVNKSQSTNDVFPTAMHIAVANKTIKELIPSLELLNKSLKKKVNEFSKIIKIGRTHLQDATPISLGQEFSGYQSQLSDCIKRIKISLKEIFYLAQGGTAVGTGINTKKNFDK

SEQ ID NO: 177398 - protein, 211 aa, Unknown
  Bacterial polypetide isolated from the Sargasso Sea
TKLPFKPIKNKFAALAAHDSIVNFSGTLNTTAVCLMKIANDIRFLGSGPRAGYGELILPENEPGSSIMPGKVNPTQCEAVTMVCVKVIGNHNGITMAGSHGHFELNVFKPLIIHNILQSINIMADSSKGFANYCIKGIKADKKRIKSLLDNSLMLVTALSPKIGYDNAAKIAKLAHKNGTTLKEEAIKSGLINEKEFLKIVNPKRMVAPNR

SEQ ID NO: 177399 - protein, 196 aa, Unknown
  Bacterial polypetide isolated from the Sargasso Sea
MKYRTEFDSIGKIKVPGDKYWGASTQRSNKYFDIGDFLVRPILIQSIAIVKKAAAIVNSRNGDLDKKLSKYIVKAADEVIKGKLDKHFPLKVWQTGSGTQTNMNVNEVISNRAIQIMGGKMGTKKPIHPNDHVNKSQSTNDVFPTAMHIAIAMKAKNKLIPSLKLLEKELGKKVKEFSKIVKLGRTHLQDATPLTL

SEQ ID NO: 177400 - protein, 259 aa, Unknown
  Bacterial polypetide isolated from the Sargasso Sea
MIRALGTLKKSAALANKELGELPGDVADLIVQAADEVIAGKLDDEFPLVVFQTGSGTQSNMNTNEVISNRAIELAGGERGSKKPVHPNDHVNRGQSSNDTFPTAMHIAVVCALTERLYPAVQQLRDTLDEKAKKYDDVVMVGRTHLQDATPIRLGQVISGWVAQIDFALDGIRYADSRARELAIGGTAVGTGLNAHPNFGPTVAKHATEETGIEFKQADNLFAALSAHDALVQVSGSLRVLADALMKIANDVRWYASGP

SEQ ID NO: 177401 - protein, 268 aa, Unknown
  Bacterial polypetide isolated from the Sargasso Sea
FLLALKAKEKLLPSLKLLEKELAKKSKEFKNIVKVGRTHLQDATPLTLGQEFSGYHSQLKKCILRIENALKEIYYLAQGGTAVGTGLNTRKNFDKKIIKEIRKITKLPFKVSTNKFAALAAHDEIVNFSGTLNTTAVCLMKIANDIRFLGSGPRAGYGELILPSNEPGSSIMPGKVNPTQSEAVTMVCVKVIGNHNGITMAGSHGHFELNVFKPLIIHNILQSIEIMSDSAKTFALFCVKGIKADKKRIKKLLDNSLMTVTALAPQIG

SEQ ID NO: 177402 - protein, 132 aa, Unknown
  Bacterial polypetide isolated from the Sargasso Sea
MKNRKEYDSIGGINVPVDKYWGASTQRSSKYFDIGDFLVRPIVIKSIAIIKKAAAIVNAKNGDLDKKISKTIVKAANEVISGKLINHFPLKVWQTGSGTQTNMNVNEVIANRAIEILGGKKGSKKPYIQMIM

SEQ ID NO: 177403 - protein, 228 aa, Unknown
  Bacterial polypetide isolated from the Sargasso Sea
INTKKNFDKKILNEIKKITKLPFKPAINKFAALAAHDAIVNYSGTLNTTAVCLMKIANDIRFLGSGPRAGYGELILPENEPGSSIMPGKVNPTQCEAVTMVCVKVIGNHNGITMAGSHGHFELNVFKPLIIHNVLQSIQILSDSTKSFAKYCISGLKADKNRIKHLVDNSLMLVTALSPKIGYDNAAKIAKNALKNKTTLRTEALKSGLINEREYNKIVDPVKMIKPD

SEQ ID NO: 177404 - protein, 206 aa, Unknown
  Bacterial polypetide isolated from the Sargasso Sea
KGFDKKVINEIKKITKLPFKPTKNKFAALAAHDEIVNFSGTLNTTAVSLMKIANDIRFLGSGPRAGYGEIILPANEPGSSIMPGKVNPTQSEAVTMVCVKVIGNHNGITMAGSHGHFELNVFKPLIAHNILQSIDLLADSTKNFALYCVKGIKADKVKIKKFLDNSLMLVTALAPHIGYDNSAKIAKTALKKGTTLKEEALKNKIN

SEQ ID NO: 177405 - protein, 153 aa, Unknown
  Bacterial polypetide isolated from the Sargasso Sea
MPENEPGSSIMPGKVNPTQCEAVTMVCVKVIGNHNGITMAGSHGHFELNVFKPLIIHNILQSIHIMSDSTKSFAKYCVSGIKADKKRIKELLDNSLMLVTALAPEIGYDNAANIAKKALKNKTTLKVEAIKSGLISVKDYDRIVNPKKMTYPS

SEQ ID NO: 177406 - protein, 286 aa, Unknown
  Bacterial polypetide isolated from the Sargasso Sea
MNVKAKAFSKIIKLGRTHLQDATPLSLGQEFSGYVTAIDYGCQRIKNALESCYSLAMGGTAVGTGINTIEGFGEKAAEEIASLTNLPFRTAENKFEALAAQDCIVELSGALKTVAVSLFKISNDIRWLSSGPRSGIGELILPANEPGSSIMPGKINPTQCEAMTMVCTQVMGNDTSISFAGANGNFELNVYRPVIAHNILQSVRLLADACQSFLLNAVNGIEPNQKRIDDNLFNSLMLVTALNPHIGYDKAAKVAKKAYDENLSLRDAIQKLGYMTGDDFDKIVEA

SEQ ID NO: 177407 - protein, 315 aa, Unknown
  Bacterial polypetide isolated from the Sargasso Sea
NEVIANLCYKTSKVKIHPNDDVNMSQSSNDVIPTVMNLAYYFDSTKKLMPALNLLIETLEKKAESVKGITKTGRTHLMDAMPVDMSDELNAWNTQLKCSRESIVVVLEKLLFLPQGGTAVGSGINAHRRFSKEFAKELSKLTGFKTKPSKDFFRNLSAQDLSVQLSGELKNLATILLKISNDLRWMNSGPLSGISEIELQALQPGSSIMPGKVNPVIPEAVAMAAADVIGNDVSITVAAQSGNFQLNVMLPVIAYCNLKSVNILAGSMNVLAKKAIKTFKVNHKKIEESLSRNPILVTALNPVIGYQKAAEIAKR

SEQ ID NO: 177408 - protein, 292 aa, Unknown
  Bacterial polypetide isolated from the Sargasso Sea
INVPVDKYWGASTQRSKKYFDIGDVLVRPKLIKSIAIIKKAAAITNYKNKDISSKIYKSIIRAASEVINGKLDSHFPLKVWQTGSGTQTNMNVNEVISNRAIEILKGKKGTKKPVHPNDHVNKSQSTNDVFPTAMHIAIAMETRDKLLPSLVLLNKELKNKVKEFNKIVKIGRTHLQDATPLSLGQEFSGYQSQLEECIKRIETSLNEIYYLAQGGTAVGTGINTKKNFDKKIVNEIKKITKLPFKPAKNKFAALAAHDSIVNYSGTLNTTAVCLMKIAKDIRFLGSGPRAG

SEQ ID NO: 177409 - protein, 279 aa, Unknown
  Bacterial polypetide isolated from the Sargasso Sea
SHHPIHPNDDVNKSQSTNDTFPAAIQISVVNEIIKKLVPTLRELTKILDKKSDEWKDLIKIGRTHFQDAVPITLGQEISGWSEQLKDAENAIIMSLDELFFLPLGGTAVGTGINCPKGFCEESIKSISHDTNLIFYKSKNNFSIMASHDRLAQVMSQIKILAGALFKISNDIKILSSGPRSGIYELIIPQNEPGSSIMPGKVNPTQCEALSMVCTQIMGFEYAVTMANSSGTLQMNEYKPLIGFNILTSLKLLKNAIDNFKIKLVDGMEPNQQKIKLNL

SEQ ID NO: 177410 - protein, 270 aa, Unknown
  Bacterial polypetide isolated from the Sargasso Sea
ATLASTQQELVHPNDDVNMGQSSNDVVPTAIALSSALAVKQALLPALENLSQHLENKKSEVGAIVKTGRTHLMDAMPVTFEQTLNAWQSQVNNAASGIRHSLEPVCELAQGGTAVGTGINADPKFADLFCTNLTKNVGIRFSPSKNFFYNIGSQDAIVALSGQLKVLAVAQMKIANDLRWMNSGPLAGLGEIELEALQPGSSIMPGKVNPVIPEAAAMVSAQVIGNDATITVAGQSGNFELNVMLPVIAYNILQSIELLTNSAQAWQKKP

SEQ ID NO: 177411 - protein, 304 aa, Unknown
  Bacterial polypetide isolated from the Sargasso Sea
ISIGGASTQRSNKYFDIGDFLVRPILIQSIAIVKKAAAIINARNRDLDKKISKYIVRASDEVIKGKLDEHFPLKVWQTGSGTQTNMNVNEVIANRAIQMMGGKMGTKKPVHPNDHVNKSQSTNDVFPTAMHIAIAMKTKKKLLPSLKLLEKELGKKTKQFKKIVKLGRTHLQDATPLTLGQEFSGYHSQLKKCISRIEKALEEIYFLAQGGTAVGTGLNTKKGFDTKIIKEIKKITKIPFKPTNNKFAALASHDPIVNFSGTMNTTAVCLMKIANDIRFLGSGPRAGYGELILPENEPGSSIMP

SEQ ID NO: 177412 - protein, 288 aa, Unknown
  Bacterial polypetide isolated from the Sargasso Sea
IGWEKQPTNIIKAFGIIKKAAALVNIENGQLRKEIGKAIISASEDVISGKLNSHFPLAVWQTGSGTQTNMNANEVISNRAIELLKGTIGSKDPVHPNDHVNMSQSSNDTFPTAMHIAIILSAVEITFPGLKTLQAEFKRKVSNFNSIIKIGRTHTQDATPLTLGQEFGGYHTQITKGILRLETALKGIYPIAQGGTAVGTGLNTKKGFDKRIAKEIAKISGHPFVTAENKFEALAAHDALVELSGALKTIASSLFKIANDIRFLGSGPRCGLGELSLPENEPGSSIMQ

SEQ ID NO: 177413 - protein, 246 aa, Unknown
  Bacterial polypetide isolated from the Sargasso Sea
MKKSKNNYRIESDSMGKVKIPKNSLYGPQTQRAINNFDISDLLMPKEFIISTLLIKKAAAIANFKLGLIDKKVSTAITRSVEYLLSNYNQEHFPVDVFQTGSGTSTNMNVNEVISNIAKIKFKTKVHPNDHVNMSQSSNDVIPTAINHCAYYLAVTKLLPSLTVLSKDIGIKSKKLNNIVKTGRTHLMDAMPITFGQELSGWKAQIDDNIVSLKNCLSRLKRLPIGGTAVGTGINAHKQFTKEFLI

SEQ ID NO: 177414 - protein, 152 aa, Unknown
  Bacterial polypetide isolated from the Sargasso Sea
PVDKYWGASTQRSSKYFDIGDFLVRPIVIKSIAIIKKAAAIVNAKNGDLDKRISKTIIKAANEVISEKLINNFPLKVWQTGSGTQTNMNVNEVIANRAIEILGGKKGSKKPVHPNDHVNKSQSTNDVFPTAMHMAIAMEATGKLIPSLNLLN

SEQ ID NO: 177415 - protein, 243 aa, Unknown
  Bacterial polypetide isolated from the Sargasso Sea
RDIFLAQGGTAVGTGLNTKKGFDKKIVAELRKITKMPFKPAPNKFAALAAHDAIVNFSGSLNTTAVCLMKIANDIRFLGSGPRAGYGELILPENEPGSSIMPGKINPTQCEAVTMVCVKVIGNHNGITMAGSHGHFELNVFKPLIIHNILQSIHLMADSSKSFANYCVKGLKADKTKIKNYLDNSLMLVTALSPKIGYDNAAKIAKKALKNRTTLKEEAIKSGLINGKEYDKTVNPKKMLKPF

SEQ ID NO: 177416 - protein, 168 aa, Unknown
  Bacterial polypetide isolated from the Sargasso Sea
MDYRIEKDTLGDVKVPKNSLWGAQTERSRGNFKIGNSASMPIEIIHSYAIIKKSAAATNEELGVLSKEKSKLIQTVCDEIISNKHNDQFPLVIWQTGSGTQTNMNVNEVISNRAHIIEGKELGKSEKTLSPNDHVNLSQSSNDTFPTAINIAAMKIIKNNTLVNLKIL

SEQ ID NO: 177417 - protein, 238 aa, Unknown
  Bacterial polypetide isolated from the Sargasso Sea
NYLPQGGTAVGSGLNAPKNFDKIFCKYLNKSTKNNYKPSKNKFEAIANHDSLVNFSNSLNSLSISLFKILNDIRFLSSGPRSGLGELQIPANEPGSSIMPGKVNPTQIEALSMICCQVMGNNLAVAQGGSQGHFELNTFKPLIIFNIINSINLLADGINSFCKNCLKGIKINERNIDKHLNNSLMLVTALNKYIGYDNAAKIAKKAFKENITLKQSAIKLNLVTEKEFDRIVNPKKMI

SEQ ID NO: 177418 - protein, 167 aa, Unknown
  Bacterial polypetide isolated from the Sargasso Sea
MKLRKEFDSIGSINVPNDKYWGASTQRSNKFFNIGKILVNISIIKSIGIIKRSAAIVHAKDKLIDGKISKAIIKASDEVIKGKLDENFPLKVWQTGSGTQTNMNVNEVIANRAIEILVGKKGTKKPVHPNDHVNKSQSTNDVFPTAMHISIAQETINKMLPNLKILE

SEQ ID NO: 177419 - protein, 279 aa, Unknown
  Bacterial polypetide isolated from the Sargasso Sea
MADTYRIERDSLGEMKVPAEARYGPQTQRAVENFPISGQRFSRRFIQAMGLIKKSAAETNVELGNLDPVVAKAIIAAAGEVADGAWDDEFVLDIYQTGSGTSTNMNTNEVVAHRATELLEGTGSVHPNDHVNFGQSSNDTIPTAIHISTRIAIEEELIPALQHMHDAMAEKATEFDGVLKSGRTHLMDATPVRLGQEFSGYATQIRKGIERVRLVAAELEELALGGTATGTGINTHEDFSTHTIAKIASATGISFCEADDHFEAQGAKDAAVNCAGALN

SEQ ID NO: 177420 - protein, 282 aa, Unknown
  Bacterial polypetide isolated from the Sargasso Sea
HVNKSQSTNDVFPTAMHIAIALKTKNVLLPSLNLLNKELKIKVQKFKKIVKIGRTHLQDATPLSLGQEFSGYQSQLEKCIDRIENALEEIYYLAQGGTAVGTGINTTKNFDKKIVNEIKKITKLPFKPAKNKFAALAAHDSIVNFSGTLNTTAVCLMKIANDIRFLGSGPRAGYGELLLPENEPGSSIMPGKVNPTQCEAVTMVCVKVIGNHNGITMAGSHGHFELNVFKPLIIHNILQSIHILSDSTKSFAKYCIKGLKANKSKIKEHLDNSFMLVTALSP

SEQ ID NO: 177421 - protein, 241 aa, Unknown
  Bacterial polypetide isolated from the Sargasso Sea
MTKNFRIEKDSIGNVEVPIEALWGAQTQRSIINFSIGEELIPIELIYSITLIKKAASIANFNLGLIDKSKKDLIIEACTEILDGLHDSQFPLKVWQTGSGTQTNMNVNEVISNIAALKTNSDLGSHHPLHPNDDVNKSQSTNDTFPAAIQISVINEIIKRLVPTLRELTNILDKKSDEWKDLIKIGRTHFQDAVPITLGQEISGWSEQLKDAENAIIMSLDELYFLPLGGTAVGTGINCPK

SEQ ID NO: 177422 - protein, 264 aa, Unknown
  Bacterial polypetide isolated from the Sargasso Sea
EFSGYQSQLEDCINRIKNSVEEIYFLAQGGTAVGTGINTKKNFDTKICKEISKLTKIKFKPSKNKFASLAAHDSIVNFSGTLNTTAVCLLKIANDIRFLGSGPRAGYGELTLPANEPGSSIMPGKVNPTQSEAVTMVCVKVIGNHTGITIAGSQGQFELNVFKPLIAHNILQSIDLISDSSKNFAKYCVKGIKANVNKIQKDLDNSLMLVTALAPKIGYDEAANIAKKALKNNTTLKTEVLKSGLMNEKEYKKIVDPRKMIQPE

SEQ ID NO: 177423 - protein, 139 aa, Unknown
  Bacterial polypetide isolated from the Sargasso Sea
VNPTQCEAVTMVCVKVIGNHNGITMAGSHGHFELNVFKPLIIHNVLQSIQILSDSTKSFAKYCISGLKADKNRIKYLVDNSLMLVTALSPKIGYDNAAKIAKNALRNKTTLKSEALKSGLINEKEYNKIVDPNKMIKPD

SEQ ID NO: 177424 - protein, 208 aa, Unknown
  Bacterial polypetide isolated from the Sargasso Sea
MKLRKEFDSIGSVNVPNDKYWGASTQRSNKFFNIGKILVNISIIKSIAIIKRSAAIVHSKDKLINSKISKAIIKASDEVIKGKLDKNFPLKVWQTGSGTQTNMNVNEVIANRSIEILGGKKGTKKPVHPNDHVNKSQSTNDVFPTAMHISIAQETISKLLPNLKILEKELKRKSREFKDIVKIGRTHLQDATPLSLGQEFSGYHVQIQ

SEQ ID NO: 177425 - protein, 201 aa, Unknown
  Bacterial polypetide isolated from the Sargasso Sea
NKFAALAAHDEIVNFSGTLNTAAVCLMKIANDIRFLGSGPRAGYGELILPSNEPGSSIMPGKVNPTQSEAVTMVCVKVIGNHNGITMAGSHGHFELNVFKPLIIHNILQSIEIMSDSAKTFALFCVKGIKADKKRIKHLLDNSLMLVTALAPKIGYDKAASIAKTAYKNGTTLKFEVIKAGLVSEKEYDKIMDPIKMTKPK

SEQ ID NO: 177426 - protein, 261 aa, Unknown
  Bacterial polypetide isolated from the Sargasso Sea
MKFRIEEDSLGKVRVPRNALWGAQTQRAIDNFPISGISMNFPFTNTFISMLGYVKDAAARANKNLKLLEVKKQRVISRASKEVWKNKHGKEFPIDVFQTGSGTSTNMNANEVIANLCYKTSKVKIHPNDDVNMSQSSNDVIPTVMNLAYYFDSTKKLVPALDLLIETLEKKADSVKGVTKTGRTHLMDAMPVDMSDELNAWNTQLKCSRESISVVLEKLLFLPQGGTAVGTGINAHKRFSKEFSKELSKLTGFKTKPSKDF

SEQ ID NO: 177427 - protein, 120 aa, Unknown
  Bacterial polypetide isolated from the Sargasso Sea
HNGITMAGSHGHFELNVFKPLIAHNILQSVDLLADSSKNFALYCVRGLKADKTKIKQFLDNSLMLVTALAPHIGYDNAAKIAKSALKNNTTLKEETLKTKLITEKDYDKIVNPKKMTHPA

SEQ ID NO: 177428 - protein, 254 aa, Unknown
  Bacterial polypetide isolated from the Sargasso Sea
NANEVIAALASQELNKEIHPNDHVNMSQSSNDVIPTATNIAAVLEITENLIPAIDKLIVSFEEKGKLWEKVYKNGRTHLMDATPVSLGQEFSGFAALIKERKTDIENSLVNVSKLAIGGTAVGTGINAPENFGSDVCSEISKSLEISFQEIENHFTRQGSREEIVHLSGCLKAYAVSMFKIANDIRWMGSGPVSGLNELKLPALQPGSSIMPGKVNPVISEMMMQVSAQVIGNDNTITFSSANGNFELNTMLPV

SEQ ID NO: 177429 - protein, 135 aa, Unknown
  Bacterial polypetide isolated from the Sargasso Sea
MKFRYEFDSLGKIKVPNDKYWGASTQRSNKHFDIGDFLVRPIVIKSIAMIKKSAAIVNAKNGSIDKKISKAIIKAANEIIAGKLNDHFPLKVWQTGSGTQTNMNVNEVIANRANEMLGAKLGSKKPVHPNDHVNK

SEQ ID NO: 177430 - protein, 158 aa, Unknown
  Bacterial polypetide isolated from the Sargasso Sea
MGELILPANEPGSSIMPGKVNPTQSEAVTMVCVKVIGNHNGITMAGSHGHFELNVFKPLIAHNILQSIDLLSDSSKNFALYCIKGIKADKVKIKHYLENSLMLVTALAPKIGYDKAAKIAKSALKNGTTLKSEALKSGLINEKEYDKIVDPKKMIYPT

SEQ ID NO: 177431 - protein, 171 aa, Unknown
  Bacterial polypetide isolated from the Sargasso Sea
NDIRFLGSGPRAGYGELILPANEPGSSIMPGKVNPTQSEAVTMVCVKVIGNHNGITMAGSHGHFELNVFKPLIAHNILQSINLLADSIRNFSLYCVKGLKADKNKIKEYLDNSLMLVTALAPHIGYDNSAKIAKLALKNKTTLKHEALKSKLISEKEYNKIVDPKKMIYPA

SEQ ID NO: 177432 - protein, 276 aa, Unknown
  Bacterial polypetide isolated from the Sargasso Sea
HLQDATPITLGQEFSGYHSQLNKCIKRIELALKEIYFLAQGGTAVGTGLNTRKGFDKKIVAEIKKITKLPFKPSENKFAALAAHDSIVNFSGTMNTTAVCLMKIANDIRFLGSGPRAGYGELILPENEPGSSIMPGKVNPTQCEAVTMVCVKVIGNHNGITMAGSHGHFELNVFKPLIIHNILQSINIMADSSKSFANFCIKDLKADKKKIKKFLDNSLMLVTALSPKVGYDNAAKIAKKAHKHGTTLKEEAIKSGLITEPEYNKIVNPEKMIKPY

SEQ ID NO: 177433 - protein, 208 aa, Unknown
  Bacterial polypetide isolated from the Sargasso Sea
IKFKPAPNKFAELAAHDAIVSFSGMLNSCAVALMKISNDIRFLGSGPRAGYGELILPENEPGSSIMPGKVNPTQCEAVTMVCVKVIGNHNGITMAGSHGHFELNVFKPLIAHNILQSIDLIADSTKNFALYCVKGIKANKKKIQENLDNSLMLVTALAPHIGYDNAAKIAKTALKNNTTLKYETLKTGLIKEKDYKKIVDPKKMIYPA

SEQ ID NO: 177434 - protein, 174 aa, Unknown
  Bacterial polypetide isolated from the Sargasso Sea
MKFRKEYDSIGTINVPVDKYWGASTQRSKKYFDIGDVLVRPKLIKSIAIIKKAAAITNYKNKDINSKIYKSIIRASSEVINGKLDSHFPLKVWQTGSGTQTNMNVNEVISNRAIEILKGKKGTKKPVHPNDHVNKSQSTNDVFPTAMHIAIAMETREKLLPSLVLLNKELKKKV

SEQ ID NO: 177435 - protein, 273 aa, Unknown
  Bacterial polypetide isolated from the Sargasso Sea
MGYVKDAAARANKNLKLLEAKKQKVISRAAKEVWTNKHGKEFPIDVFQTGSGTSTNMNANEVIANLCYKTSKVKIHPNDDVNMSQSSNDVIPTVMNLAYYFDSTKKLMPALNLLIETLEKKAESVKGITKTGRTHLMDAMPVDMSDELNAWNTQLKCSRESIAVVLEKLLFLPQGGTAVGSGINAHRRFSKEFAKELSKLTGFKTKPSKDFFRNLSAQDLSVQLSGELKNLATILLKISNDLRWMNSGPLSGISEIELQALQPGSSIMPGKVN

SEQ ID NO: 177436 - protein, 172 aa, Unknown
  Bacterial polypetide isolated from the Sargasso Sea
SNDIRFLGSGPRAGYGELILPENEPGSSIMPGKVNPTQCEAVTMVCVKIIGNHNGITMAGSHGHFELNVFKPLIAHNILQSIDLMADSTNNFALYCVKGIKANKKKIQEHLDNSLMLVTALAPYIGYDNAAKIAKNALKNNTTLKHETLKTGLINEKEYHKIVNPKKMIYPV

SEQ ID NO: 177437 - protein, 118 aa, Unknown
  Bacterial polypetide isolated from the Sargasso Sea
MKLRKEFDSIGSVNVPNDKLWGASTQRSNKFFNIGKILVNISIIKSIAIIKRSAAIVHAKEKLIDNKISKAIIRASDEVIKGKLDDNFPLKVWQTGSGTQTNMNVNEVIANRAIEIMG

SEQ ID NO: 177438 - protein, 218 aa, Unknown
  Bacterial polypetide isolated from the Sargasso Sea
MKYRIEKDTMGEVKVPKDALWGAQTQRALENFKISGIKFVFPFGRSFIEALGIIKYAAASSNHKLKLLDARKAKAIKIAAKEVISGKHDNQFPLDVFQTGSGTSTNMNANEVIANLASKKARIKINPNDHVNMSQSSNDVIPTAICISALLDTHRLLQPSLNFLIKTIDKKALSLKGQIKTGRTHLMDAMPIDFSQRIIRMERSIKNLSGITQSFYKR

SEQ ID NO: 177439 - protein, 268 aa, Unknown
  Bacterial polypetide isolated from the Sargasso Sea
HLGKSFLGYQSQLQDCITRIKIAIKEIHYLAQGGTAVGTGINTKKNFDKKICREISKLTNLNFKPSNNKFAALAAHDSIVNFSGTLNTTAVCLLKIANDIRFLGSGPRAGYGELNLPANEPGSSIMPGKINPTQSEAVTMVCVKVIGNHTGITIAGSQGQFELNVFKPLIAHNILQSIDLIADSSKNFAKFCVSGIKANKNKIKKDLENSLMLVTALAPTIGYDKAANIAKKALKNNTTLKTEVIKSGLMNEKEYHKIVDPKKMIQPA

SEQ ID NO: 177440 - protein, 292 aa, Unknown
  Bacterial polypetide isolated from the Sargasso Sea
GKVGSKHPIHPNDHVNMSQSSNDTFPSAIHIAIATEFLEHTLPKMKFLHKCLKEKQNKFQKIIKIGRTHTQDATPLTLGQEFSGYTFQIEQAMKRLSHSLKDILFLAQGGTAVGTGINASKTFSRRVAQEISKITKINFKTAPNKFEALAANDAIVEFSGSLKTAASSLFKIANDIRFLGSGPRCGLGELSLPENEPGSSIMPGKVNPTQVEATTMVCIQIMGNDAAIGFAGSQGHFELNVYKPLLSYNTLQSLQLLGDACNSFAKNCVKGLKANEVEIKRHLDNSLMLVTA

SEQ ID NO: 177441 - protein, 292 aa, Unknown
  Bacterial polypetide isolated from the Sargasso Sea
GSKKPIHPNDHVNLSQSSNDTFPTIMHVAINELSIKNLIPNLKELIKQFQKKKKIFQNIIKIGRTHTQDATPITLGDEFSAFCTQLQACLKRIEISKSELRYLAQGGTAVGSGINAPKKFDKVFCKYLNKLTWDNYKPSQNKFESLASHDPLINFSNSLKTLSISLLKIINDIRFLASGPRSGLGELILPANEPGSSIMPGKVNPTQIEALSMVCVQVIGNSTTVDLAGSNGHFQLNTYKPVIALNILQSVNLLSDGIKSFNKNCLKGLQANKETIHNHLNNSLMLVTALNK

SEQ ID NO: 177442 - protein, 210 aa, Unknown
  Bacterial polypetide isolated from the Sargasso Sea
MAEKKFRIEKDSMGELKVPEESKWGPQTQRAIDNFQISDHKMPAGFIRSLALLKWGLANANKDLGLLPKEKASAIADTAIEIYEGSHSSEFPLDVFQTGSGTSTNMNMNEVISNLSSTDSNPVHPNDHVNMGQSSNDVIPSAINVDAVLTLTNNLIPSMRHLKNSIEEKAKSIGDLPKNGRTHLMDAMPVTFSLRNERLVCTNRGFHNTI

SEQ ID NO: 177443 - protein, 215 aa, Unknown
  Bacterial polypetide isolated from the Sargasso Sea
VNKSQSTNDVFPTAMHISVATETIDKLLPSLKLLEISLKKKSKEFKKIVKIGRTHLQDATPLSLGQEFSGYHEQVKKSINRIKFCLEDIYFLAQGGTAVGTGINSKKNFDKKIINEIRKFCKIKFKPAPNKFSELAAHDAIVNFSGSLNSCAVALIKISNDIRFLGSGPRAGYGELLLPENEPGSSIMPGKVNPTQCEAVTMVCAKVIGNHTGIT

SEQ ID NO: 177444 - protein, 167 aa, Unknown
  Bacterial polypetide isolated from the Sargasso Sea
MTIKKRIEFDSLGSKKIDKNKLWGAQTQRSLENFRIGSEKIPSELIIALGQQKKAAAEANIELGVIDKKLGSFISKACDDIINLKLIDEFPLSVWQTGSGTQTNMNANEVISNHIIKKLKGRIGSKKPIHPNDHVNLSQSSNDTFPTIMHVAINELSMKDFIPNLKD

SEQ ID NO: 177445 - protein, 147 aa, Unknown
  Bacterial polypetide isolated from the Sargasso Sea
KLPFKPAKNKFAALAAHDAIVNFSGTLNTTAVCLMKIANDIRFLGSGPRAGYGELILPENEPGSSIMPGKVNPTQCEALTMVCVKVIGNHNGITMAGSHGHFELNVFKPLIIHNILQSIQILSDSINSFAKYCVKDLKADKNKIKEH

SEQ ID NO: 177446 - protein, 270 aa, Unknown
  Bacterial polypetide isolated from the Sargasso Sea
LKVWQTGFGTQTNMNVNEVISNRAIEIIGGKKGSKKPVHPNDHVNKSQSTNDVFPTAMHIAIALETKNKLLPSLNLLNKELKKKVNKFRKIVKIGRTHLQDATPISLGQEFSGYQSQLEKCIDRIKKALDEIYYLAQGGTAVGTGINTKKNFDKKIINEIKKITKLPFKPAKNKFAALAAHDSIVNFSGTLNTASVCLMKIANDIRFLGSGPRAGYGELLLPENEPGSSIMPGKVNPTQCEAVTMVCVKVIGNHNGITMAGSHGHFELNV

SEQ ID NO: 177447 - protein, 227 aa, Unknown
  Bacterial polypetide isolated from the Sargasso Sea
MSQKTRQEQDSLGKIKVANTNLWGAQTQRSLKNFRIGNNKMPIEIIYALAIIKMSCAKANQKQKLLSPKLARAIIDAAKQVSLGKHDEHFPLSVWQTGSGTQTNMNVNEVIANIANRKISKKLGTNYPVHPNDHVNKSQSTNDSFPSAINIASKLKIISELLPALRSMEKVLKSQSQKWKDIIKIGRTHLQDATPLSLGQEFSGYQAQINSNIRRVEGALTNLSYLA

SEQ ID NO: 177448 - protein, 238 aa, Unknown
  Bacterial polypetide isolated from the Sargasso Sea
SKLAIGGTAVGTGINAPENFGKDVAVEISNSLGINFFEVENHFTRQGSREEIVQLSGSLKAFAVSMFKIANDIRWMGSGPVSGLNELIIPPLQPGSSIMPGKVNPVIPEMVMQVSAQVIGNDNTITFSSSNGNFELNTMLPVMAYNLLESIELLTTSTDVFEKKLINHLEANTEKLDENIQKNSILVTALVPVIGYDKSAEVAKEAMSQNKTIKEVLIDKNLISIEEIDELLDIEKLI

SEQ ID NO: 177449 - protein, 279 aa, Unknown
  Bacterial polypetide isolated from the Sargasso Sea
YFDIGDVLVRPKLIKSIAIIKKAAAVTNYKNKDISSKVYKSIVRASNEVMAGKLDNHFPLKVWQTGSGTQTNMNVNEVISNRAIEMLKGKMGTKKPVHPNDHVNKSQSTNDVFPTAMHIAIAIETREKLLPGLTLLNKELKKKVREFKKIIKIGRTHLQDATPLSLGQEFSGYQSQLEECIKRIKVSLNEVYYLAQGGTAVGTGINTKKNFDKKIVNEIKKITKLPFKPAKNKFAALAAHDVIVNYSGTLNTTAVCLMKIANDIRFLGSGPRAGYGELI

SEQ ID NO: 177450 - protein, 245 aa, Unknown
  Bacterial polypetide isolated from the Sargasso Sea
MKYRTEFDSIGKIKVPGDKYWGASTQRSNKYFNIGDFLVRPIVIESIAVIKKAAAIVNAKNKDLDKKICKFIIRASDEVIKGKLNDNFPLKVWQTGSGTQTNMNVNEVIANRAIQLMGGKMGSKTPVHPNDHVNKSQSTNDVFPTAMHIAIAIKTREKLLPSLKLLNKELQKKTRQFKNIVKIGRTHLQDATPITLGQEFSGYQSQLNKCIERIEHALKEIYFLAQGGTAVGTGLNTRKGFDKKV

SEQ ID NO: 177451 - protein, 291 aa, Unknown
  Bacterial polypetide isolated from the Sargasso Sea
KKSKSFNKIIKLGRTHLQDATPITLGQEFSGYHAQLDKCIKRIEIALQEIYFLAQGGTAVGTGLNTKKGFDKKIVSEIKKITKLPFKPSKNKFAALASHDSIVNFSGTMNTTAVCLMKIANDIRFLGSGPRAGYGELILPENEPGSSIMPGKVNPTQCEAVTMVCVKVIGNHNGITMAGSHGHFELNVFKPLIIHNILQSIHIMSDSAKSFAKYCVKGLKADKKKIKKFLDNSLMLVTALSPKIGYDNATMIAKNAHRNGTTLKEEALKSKLISEKDYNKIVDPKKMVSPH

SEQ ID NO: 177452 - protein, 267 aa, Unknown
  Bacterial polypetide isolated from the Sargasso Sea
KKGSKKPVHPNDHVNKSQSTNDVFPTAMHIAIAIESKDKLLPALELLNKELKKKVSKFKNIVKVGRTHLQDATPLSLGQEFSGYQSQLEDCIKRIKNALSEIYLLAQGGTAVGTGINSKKGFDRKIISEIKKITKLPFKPTKNKFAALAAHDEIVNFSGTLNTTAVCLMKIANDIRFLGSGPRAGYGELILPANEPGSSIMPGKVNPTQSEAVTMVCVKVIGNHNGITMAGSHGHFELNVFKPLIAHNILQSIDLLADSSKNFGLYC

SEQ ID NO: 177453 - protein, 308 aa, Unknown
  Bacterial polypetide isolated from the Sargasso Sea
NEVISNVAIKNLGGELGSRDPVHPNDHVNKGQSSNDVIPTAIHIAACIGISNSLIPSLKILKDSLNKKSKEFWSVIKTGRTHLQDATPIRLGQEFLGYAGQIEESIKRAESALSELSVLALGGTAVGTGIGMKKGFSEKVINKLSERFKIKFSESNNHFHSQSTIDSIVAGSGNLKSIAISLLKIGNDIRWLGSGPRAGIGEISLPEVQPGSSIMPGKVNPVIAESLTMACAQVIGNDQTINIAGQSGNFELNVMMPVAAYNILQSIDLLSSSSNNFAIQCIDGLKSTKKGPETVQNGLAICTALAPK

SEQ ID NO: 177454 - protein, 307 aa, Unknown
  Bacterial polypetide isolated from the Sargasso Sea
KSFVSSLDLIKDAAARANSKLKLLPANKARAISRASKEVWQEKHHHEFPIDVFQTGSGTSSNMNANEVIANLASKNSKLDIGANDDVNMSQSSNDVIPTAIKVSAHMDLTKKLYPALDKLINEIDKKAESVSGIAKTGRTHLMDAMPVDFSDELKAWSSQLNASRKMLGVIEERFLEMPQGGTAVGSGINAHKQFAKIFAQELTKLSGSNCKYVPSSNFFHELSAQDCSVQLSGELKNLAVILMKISNDLRWMNSGPLAGLSEIELQALQPGSSIMPGKVNPVIPEAVTMASADVIGNDVSITVALK

SEQ ID NO: 177455 - protein, 245 aa, Unknown
  Bacterial polypetide isolated from the Sargasso Sea
FPRLLALAQGGTAVGTGLNAKPKFAEVFAKEVKTYTGLPFVTAENKFEALAAHDAFVEMSGMLNTIAAGLYKIANDIRLLGSGPRSGLGELSLPENEPGSSIMPGKVNPTQCEAMTMVCAQVIGNHTTISFAGSQGHMELNVFKPVLAYNLIQSIRLLTDACISFADNCIQGIEPNRENITTLMERSLMLVTALAPKIGYDNATIVAKTAHKKGTTLKEEAVALGFVTETEFDEIVRPEQMIKPK

SEQ ID NO: 177456 - protein, 293 aa, Unknown
  Bacterial polypetide isolated from the Sargasso Sea
AIIKRSAAIVHKRDKFISNKIANAIIKASNEVIAGKLDENFPLKVWQTGSGTQTNMNVNEVIANRAIQILNGKKGSKKPVHPNDHVNKSQSTNDVFPSAMHISIAKETIGKLIPNLKILENSLRKKSVEFKKIVKIGRTHLQDATPLTLGQEFSGYHEQIKKCLDRIKYCLNDILFLAQGGTAVGTGINTKKNFDKKIVKEIGKFCKIKFKPAPNKFSELAAHDAIVNFSGALNTCAVALMKISNDIRFLASGPRAGYGELILPENEPGSSIMPGKVNPTQCEAVTMGCAKVI

SEQ ID NO: 177457 - protein, 307 aa, Unknown
  Bacterial polypetide isolated from the Sargasso Sea
RSKKYFDIGDVLVRPKLIKSIAIIKKAAAITNYKSKDINSKIYKSIVRASNEVIAGKLDNHFPLKVWQTGSGTQTNMNVNEVISNRAIEILKGKKGTKKPVHPNDHVNKSQSTNDVFPTAMHIAIAMETREKLLPSLILLNKELKKKVSEFNKIVKIGRTHLQDATPLSLGQEFSGYQSQLEECIKRIKVSLNEIYYLAQGGTAVGTGINTKKNFDKKIVNEIKKITKLPFKPAKNKFAALAAHDAIVNYSGTLNTTAVCLMKIANDVRFLGSGPRAGYGELILPENEPGSSIMPGKVNPTQCEAVT

SEQ ID NO: 177458 - protein, 196 aa, Unknown
  Bacterial polypetide isolated from the Sargasso Sea
MKTRKEYDSIGIIDVPVDKYWGASTQRSNKYFDIGEILVELTVIKSIAIIKKAIAKVNFKSGSLDKKISSAIIKASNEIISGKLNNNFPLKVWQTGSGTQTNMNVNEVIANRAIEILGGKKGSKKPVHPNDHVNKSQSTNDVFPTAMHMSIALTAKNKLIPSLTLLNKELKNKSKEFNKIIKVGRTHLQDATPLTL

SEQ ID NO: 177459 - protein, 83 aa, Unknown
  Bacterial polypetide isolated from the Sargasso Sea
DGIRSFNDQCAVGIEPNYSAIETNLQNSLMLVTALNPHIGYDNAAKIAKKAHADGSTLKEAALALKLLTESDFDQWVDPTKMI

SEQ ID NO: 177460 - protein, 230 aa, Unknown
  Bacterial polypetide isolated from the Sargasso Sea
MKYRTEFDSIGKISVPGDKYWGASTERSNKYFNIGDFLVRPLVIHSIAIIKKAAAIVNTKNKDLSPKIGKYIIKAAEEVIKGKHDNHFPLKVWQTGSGTQTNMNVNEVIANRAIQMMGGKLGSKKPVHPNDHVNKSQSTNDVFPTAMHIAIAIKTKEKLLPSLKLLEKELAKKSKEFRNIVKVGRTHLQDATPLTLGQEFSGYHTQLKKCIIRIESAIKEIHHLAQGGTA

SEQ ID NO: 177461 - protein, 221 aa, Unknown
  Bacterial polypetide isolated from the Sargasso Sea
MKLRKEFDSIGSVNVPNDKYWGASTQRSNKFFDIGKILVNISIIKSIAIVKRSAAIVHAKDKLIDIKISRAIIRASDEVIKGKLDENFPLKVWQTGSGTQTNMNVNEVIANRAIEILGGKKGTKKPVHPNDHVNKSQSTNDVFPTAMHISIAKETIDKLLPNLKILEKELKKKSNEFKSIVKIGRTHLQDATPISLGQEFSGYYVQIKKCIERIEYALKEK

SEQ ID NO: 177462 - protein, 287 aa, Unknown
  Bacterial polypetide isolated from the Sargasso Sea
MKYRIEKDTMGEVKVPKDALWGAQTQRALENFKISGIKFAFPFGRSFVEALGIIKYAAASSNQKLKLLDARKAKAIKIAAKEVILGKHDNQFQLDVFQTGSGTSTNMNANEVIANLASKKARIKINPNDHVNMSQSSNDVIPTAICISALLDTHRLLLPSLDFLTKTIDKKASSLKGQIKTGRTHLMDAMPIDFSQELSGWSAQLKICQASLKASIKEISSLPQGGTAIGTGVNAHRDFGKIFASEVNKISKLKVKTSSNYFQSLSAQDSAAQLSSSVKNLSLVLTK

SEQ ID NO: 177463 - protein, 210 aa, Unknown
  Bacterial polypetide isolated from the Sargasso Sea
SKITRIDFKTASNKFEALAANDPIVEFSGSLKTAASSLFKIANDIRFLGSGPRCGLGELSLPENEPGSSIMPGKVNPTQAEATTMVCIQIMGNDAAIGFAGSQGHFELNVYKPLLSYNTLQSLQLLGDACYSFAKNCVSGLKANEVQIKKHLDNSLMLVTALAPKIGYDNATKIAKNAHKNNTTLRTEAIKSGLIDDKEFTKIVNPKNMI

SEQ ID NO: 177464 - protein, 168 aa, Unknown
  Bacterial polypetide isolated from the Sargasso Sea
MIFRFLASGPRSGLGELTLPANEPGSSIMPGKVNPTQIEALSMVCVQVIGNSTTVDLAGSNGHFQLNAYKPVIAFNIIQSVNLLSDGIKSFNNNCLKGLKANKEIIDNHLNNSLMLVTALNKSLGYDNAAKIAKKAFTENTTLKEAALKLKLISEKDFDIIVDPKKMI

SEQ ID NO: 177465 - protein, 154 aa, Unknown
  Bacterial polypetide isolated from the Sargasso Sea
MSTKKRIEFDSLGPKKIDKNKLWGAQTQRSLENFKIGDEKIPNEIIIALGQQKKAAAHANIELGKLNKKIGYQIINACNHIINLNLVNEFPLSVWQTGSGTQTNMNANEVISNYVIKKLKGKIGTKYPIHPNDHVNLSQSSNDTFPTIMNIAIN

SEQ ID NO: 177466 - protein, 177 aa, Unknown
  Bacterial polypetide isolated from the Sargasso Sea
MKFRKETDSIGSINVADDKYWGASTERSIKYFDIGEILVSKTLIKAIAVIKLAAAKVHKNDKQINARICDAIVKASKEVILGKLDDNFPLKVWQTGSGTQTNMNVNEVIANRAIHILGGKKGSKKPVHPNDHVNKSQSTNDVFPTAMHIAIAIETKKKLLPSLKNLNKELKIKINKF

SEQ ID NO: 177467 - protein, 320 aa, Unknown
  Bacterial polypetide isolated from the Sargasso Sea
GNFNSHFPLKVWQTGSGTQTNMNVNEVISNRAIQMMGGKMGTKKPVHPNDHVNKSQSTNDVFPTAMHIAIVLKTKKKLLPSLKLLEKELRKKVNEFNKIVKLGRTHLQDATPLTLGQEFSGYHSQLKKCIERIEKALDEIYYLAQGGTAVGTGLNTKINFDKKIVNEIKKITKLPFKPAKNKFAALAAHDAIVNFSGTMNTTAVCLMKIANDIRFLGSGPRAGYGELILPENEPGSSIMPGKINPTQCEAVTMVCVKVIGNHNGITMAGSHGHFELNVFKPLIIHNILQSINIMADSSSSFAKYCVKGLRADKKRIKFLL

SEQ ID NO: 177468 - protein, 291 aa, Unknown
  Bacterial polypetide isolated from the Sargasso Sea
KIKKIHPNDDVNKSQSSNDTFPTAMNMAAYHLIESYTIPSVKELENTLAKKSRKFKDIVKIGRTHFMDATPLSLGMEFSGYATQLKNGIKELKQSLDHLSEIALGGTAVGTGLNTPKGYSKVVAKKISEITGYKFISAPNKFESLAANDAIVGASGALKKLAVALMKIGNDVRMLASGPRSGIGEILLPSNEPGSSIMPGKVNPTQCEALTMVCAQVIGNDVATTVGGMNGHFELNVYKPLMAYNILNSSRLIADACNSFNNNCAKGIEPNKKVIENHLNNSLMLVTALNN

SEQ ID NO: 177469 - protein, 324 aa, Unknown
  Bacterial polypetide isolated from the Sargasso Sea
PVHPNDHVNKSQSTNDVFPTAMHMSIAITATNKLIPSLTLLNKYLQKKAREFKKIVKVGRTHLQDATPLTLGQEFSGYHSQLSKCIERIKGALSEIYYLAQGGTAVGTGINTRKGFDKKIVAEIKKITKLPFKPAPNKFASLAAHDSIVNFSGTLNTTAVCLMKIANDIRFLGSGPRAGYGELILPENEPGSSIMPGKVNPTQCEAVTMVCVKVIGNHNGITMAGSHGHFELNVFKPLIIHNILQSIHIMSDSANSFGKYCVAGIKADKKRIKELLDNSLMLVTALAPHIGYDNAAKIAKRALKNKTRLKYEALKSGLINEKDY

SEQ ID NO: 177470 - protein, 191 aa, Unknown
  Bacterial polypetide isolated from the Sargasso Sea
MKYRIEFDSIGKIKVPGDKYWGASTERSNKYFDIGDFLVRPILIHSIAIIKKAAAIVNTKNKDLDQKLSKYIIKAADEIIKGKHDQHFPLKVWQTGSGTQTNMNVNEVIANRAIEMMGGKLGSKKPIHPNDHVNKSQSTNDVFPTAMHIAISLKTKEKLLPSLKLLENELGKKSKEFKKIVKVGRTHLQDA

SEQ ID NO: 177471 - protein, 305 aa, Unknown
  Bacterial polypetide isolated from the Sargasso Sea
IANRAIEIMKGKKGSKKPVHPNDHVNKSQSTNDVFPTAMHISIAVETINKLLPSLKLLENSLAKKSKEFKKIVKIGRTHLQDATPLSLGQEFSGYHEQVKKSIERINYCLNDIYYLAQGGTAVGTGINSSRNFDKKIIKEIKKFCKINFRPAPNKFSELAAHDAIVNFSGSLNSCAVALMKISNDIRFLGSGPRAGYGELLLPENEPGSSIMPGKINPTQCEAVTMVCAKVIGNHTGITVAGSHGHFELNVFKPLIAYNILQSIDILGDSVKNFSLYCVKGIKANKKKIKEHLDNSLMLVTALAQ

SEQ ID NO: 177472 - protein, 144 aa, Unknown
  Bacterial polypetide isolated from the Sargasso Sea
MKNRKEYDSIGEINVPVDKYWGASTQRSSKYFDIGDFLVRPIVIKSIAVIKKAAAIVNAKNGDLDKKLSKTIIKAANEVISGKLISHFPLKVWQTGSGTQTNMNVNEVIANRAIEILGGKKGSKKPVHPNDHVNKSQSTNDVFP

SEQ ID NO: 177473 - protein, 269 aa, Unknown
  Bacterial polypetide isolated from the Sargasso Sea
MKLRKEFDSIGGINVPSDKYWGASTERSKKFFNIGKILVNFSIIKSIAIIKKAAAIVHLKEKQIEKKKSQAIIKASEEVIKGKLNGNFPLKVWQTGSGTQTNMNVNEVISNRAIEILGGKKGTKKPIHPNDHVNKSQSTNDVFPTAMHIAIVEETKKKLLPNLKILEKELSIKVKKFNKIIKIGRTHLQDATPLSLGQEFSGYHAQLKKCIERIEQSLKEIYFLAQGGTAVGTGINSRKNFDKKVVKEISKLTKLPFKPAKNKFAELAA

SEQ ID NO: 177474 - protein, 289 aa, Unknown
  Bacterial polypetide isolated from the Sargasso Sea
KLKQKLYSKTIKIGRTHTQDATPLTMGDEFSGYLQQIENNYERLIIAKKELHYLAQGGTAVGSGINAPKNFDRIFCKFLNKLTINKYKPSKNKFEAIANHDSLVNFSNSLNTLAISLFKILNDLRFLSSGPRSGLGEINIPANEPGSSIMPGKVNPTQIEALSMVCCQVMGNCLAINQGGSQGHFELNTFKPLIVFNIINSINLLSDGINSFCNNCLKNITINKNNINKHLKNSLMLVTALNKYIGYDNAAKIAKKAFDENLTLKEAAVKLNLVSEKEFDKIVNPKKMI

SEQ ID NO: 177475 - protein, 212 aa, Unknown
  Bacterial polypetide isolated from the Sargasso Sea
KITKLPFKPTKNKFAALAAHDEIVNFSGTLNTTAVSLMKIANDIRFLGSGPRAGYGEIILPANEPGSSIMPGKVNPTQSEAVTMVCVKVIGNHNGITMAGSHGHFELNVFKPLIAHNILQSIDLLADSTKNFALYCVKGIKADKEKIKKFLDNSLMLVTALAPHIGYDNSAKIAKTALKKGTTLKEEAIKTKLISKKDFDRIVDPKKMIYPK

SEQ ID NO: 177476 - protein, 140 aa, Unknown
  Bacterial polypetide isolated from the Sargasso Sea
MKYRYESDSLGKIKVPNDKYWGASTQRSNKYFDIGDFLVRPIVIKSIAMIKKAAAVVNAKNGNINKKISKTIIKASNEIISGKLNDHFPLKVWQTGSGTQTNMNVNEVIANRANEMLGFKLGSKKPVHPNDHVNKSQSTN

SEQ ID NO: 177477 - protein, 218 aa, Unknown
  Bacterial polypetide isolated from the Sargasso Sea
IINEIRKITKIPFRPNKNKFAALAAHDEIVNFSGTLNTTAVCLMKIANDIRFLGSGPRAGYGELILPANEPGSSIMPGKVNPTQSEAVTMVCVKVIGNHNGITMAGSHGHFELNVFKPLIAHNILQSIDLLSDSSKNFALYCIRGLKADKKKIKQHLDNSLMMVTALAPYIGYDNAAKIAKNALKNNTNLKDEALKTKLLNSKEYDKIVDPKKMINPS

SEQ ID NO: 177478 - protein, 287 aa, Unknown
  Bacterial polypetide isolated from the Sargasso Sea
PSFIALNKELKKKVKKFKNIVKVGRTHLQDATPITLGQEFSGYQSQLEDCIKRIKNALNEIYFLAQGGTAVGTGINTKKNFDKKIIKEIRKICKVPFKPTKNKFAALAAHDAIVNFSGTLNTSAVCLMKIANDIRFLGSGPRAGYGELILPSNEPGSSIMPGKVNPTQSEAVTMVCVKVIGNHNGITMAGSHGHFELNVFKPLIAHNILQSIDLLSDSSKNFAIYCIKGIKADKNKIKNYLENSLMLVTALAPHIGYDNAAKIAKKAMNNNTKLKYEALKSGLINEK

SEQ ID NO: 177479 - protein, 212 aa, Unknown
  Bacterial polypetide isolated from the Sargasso Sea
MKNKKRIEFDSLGSKKIYKNRLWGAQTQRSLENFKIGNEKIPVELIIALGQQKKAAAEANIELGVLNKKLGTLIIKACNDIINLKLIEEFPLVVWQTGSGTQTNMNANEVISNYIIKKIGGKIGSKDPIHPNDHVNLSQSSNDTFPTIMHVAINELATKGLIPNLKILIKEFQKKKNIFQKIIKIGRTHIQDATPITLGDEFSAFCFHCILV

SEQ ID NO: 177480 - protein, 228 aa, Unknown
  Bacterial polypetide isolated from the Sargasso Sea
MNTRKNFDKKIIREICKITKLPFKPSKNKFAALAAHDEIVNFSGTLNTTAVCLMKIANDIRFLGSGPRAGYGELILPSNEPGSSIMPGKINPTQSEAVTMVCVKVIGNHNGITMAGSHGHFELNVFKPLIIHNILQSIEIMSDSARTFALYCVKGIKADKKRIKHLLDNSLMLVTALAPKIGYDKAAKIAKAAYKNGTTLKHEVIKSGLINQKEYDKIMSPIKMTKPK

SEQ ID NO: 177481 - protein, 290 aa, Unknown
  Bacterial polypetide isolated from the Sargasso Sea
ASDEVIRGKLDDHFPLKVWQTGSGTQTNMNVNEVISNRAIEMLGGKLGSKKPIHPNDHVNKSQSTNDVFPSAMHISVAIKTTKKLIPSLKILEKELFKKVKEFKKIVKVGRTHLQDATPITLGQEFSGYHSQLKKCINRIESALEEIYFLAQGGTAVGTGLNTRRKFDIKIIKEISKITKLPFKPAKNKFAALAAHDAIVNFSGTMNTTAVCLMKIANDIRFLGSGPRAGYGELILPSNEPGSSIMPGKVNPTQSEAVTMVCVKVIGNHNGITMAGSHGHFELNVFKPLI

SEQ ID NO: 177482 - protein, 244 aa, Unknown
  Bacterial polypetide isolated from the Sargasso Sea
MKFRKEYDSIGIINVPVDKYWGASTQRSKKYFNIGDVLVGPKLIKSIAIIKKAAAITNYKNKDINSKIYKSIIRAASEVINGKLDGHFPLKVWQTGSGTQTNMNVNEVISNRAIEILKGKKGTKKPVHPNDHVNKSQSTNDVFPTAMHIAIAMETREKLLPSLVLLNKELKKKVREFNKIVKIGRTHLQDATPLSLGQEFSGYQSQLQDCIKRIEVSLNEIYYLAQGGTAVGTGINTKKNFDKK

SEQ ID NO: 177483 - protein, 273 aa, Unknown
  Bacterial polypetide isolated from the Sargasso Sea
HIAIAMETKKKLLPSLKNLNKELKKKISKFKNIVKVGRTHLQDATPLTLGQEFSGYYSQLSDCILRIETSLKEIFYLAQGGTAVGTGINSKKNFDVKICKEISKLTKIKFYPAKNKFAALAAHDAIVNFSGTLNTTAVCLMKIANDIRFLGSGPRAGYGELILPANEPGSSIMPGKVNPTQCEAVTMVCVKVIGNHTGITLAGSQGQFELNVFKPLIAHNILQSIDLLSDSSNNFSQFCIKGIKADVNKISEDLNNSLMLVTALAPKIGYDNA

SEQ ID NO: 177484 - protein, 273 aa, Unknown
  Bacterial polypetide isolated from the Sargasso Sea
NELKKKVRKFKNIVKVGRTHLQDATPITLGQEFSGYQSQLESCIKRIKSALNEIYFLAQGGTAVGTGINTKKNFDKKIIKEIRKISKIPFKPTKNKFAALAAHDSIVNFSGTLNTTAVCLMKIANDIRFLGSGPRAGLGELILPSNEPGSSIMPGKVNPTQSEAVTMVCVKVIGNHNGITMAGSHGHFELNVFKPLIAHNILQSIDLLSDSSKNFAVYCIKGIKADKNKIKEYLDNSLMLVTALAPHIGYDNAAKIAKKALKNNTKLKYEALK

SEQ ID NO: 177485 - protein, 126 aa, Unknown
  Bacterial polypetide isolated from the Sargasso Sea
MKFRKEFDSIGQINVPVDKYWGASTQRSKKYFDIGEFLVRPILIKSIAIIKKAAAIVHNREKQISSTIYRAIIKASDEVISGKLDGHFPLKVWQTGSGTQTNMNVNEVIANRAIEILGGKKGFKKA

SEQ ID NO: 177486 - protein, 221 aa, Unknown
  Bacterial polypetide isolated from the Sargasso Sea
DTKIIKEISKITKLPFKPAKNKFAALAAHDAIVNFSGTMNTTAVCLMKIANDIRFLGSGPRAGYGELILPSNEPGSSIMPGKVNPTQSEAVTMVCVKVIGNHNGITMAGSHGHFELNVFKPLIIHNILQSIEIMADSSKTFALYCIKGIKADKKRIKNLLDNSLMIVTALAPQIGYDNAAKIAKEAHKNGTTLKEEILKTNLISEKEYEKIMDPIKMTKPK

SEQ ID NO: 177487 - protein, 234 aa, Unknown
  Bacterial polypetide isolated from the Sargasso Sea
MKFRKEFDSIGSINVPNDKYWGASTQRSKKYFDIGDFLVRPILIKSIAIIKKAAAIVHLKEKQLPPKISNAIIAASNEIIAGKLDEHFPLKVWQTGSGTQTNMNVNEVIANKAIEKLGGKKGSKRPVHPNDHVNKSQSTNDVFPTAMHIAIAIETKNKLLPSLKLLDQELKKKVSKFRNIIKVGRTHLQDATPLSLGQEFSGYQTQIKDCISRVSMALDEIYSLAQGGTAVGTG

SEQ ID NO: 177488 - protein, 275 aa, Unknown
  Bacterial polypetide isolated from the Sargasso Sea
EVIANKANQILGNKLGTYKPIHPNDHCNLGQSSNDSFPTVMHISIVMEVQKKLRPTVENFIHTINQKQKEFSSIIKVGRTHLQDATPITLGQEFNAFKTQIQNALKRIINCLDEIYFIAQGGTAVGTGLNSSKKFVSGFVKAIQVITGYPFKESENKFESLASHDSIVMLSGAINTLVIACYKVANDIRLLASGPRSGIGEINLPANEPGSSIMPGKVNPTQCEALAQVCLHLMGLHYSISLAGSQGNFQLNANKTMIIFSILRTIELISDSVDS

SEQ ID NO: 177489 - protein, 266 aa, Unknown
  Bacterial polypetide isolated from the Sargasso Sea
HFPLKVWQTGSGTQTNMNVNEVISNRAIEILKGKMGSKKPVHPNDHVNKSQSTNDVFPTAMHIAIAIRAGNKLLPSLKLLNIELGKKSKKFNKIVKVGRTHLQDATPITLGQEFSGYHSQLSKCIKRIEHALKEIYFLAQGGTAVGTGLNTRKGFDKKIVSEIRKITKLPFKTSENKFAALAAHDSIVNFSGTMNTTAVCLMKIANDIRFLGSGPRAGYGELILPENEPGSSIMPGKVNPTQCEAVTMVCVKVIGNHNGITMAGSH

SEQ ID NO: 177490 - protein, 153 aa, Unknown
  Bacterial polypetide isolated from the Sargasso Sea
MKLRKEFDSIGGINVPNDKYWGASTQRSNKFFNIGKILVNISIIKSIAIIKRSAAIVHAKDKLIDGRISKAIIKASDEVIKGKLDENFPLKVWQTGSGTQTNMNVNEVIANRAIEILGGKKGAKKPVHPNDHVNKSQSTNDVFPTAMHISVAK

SEQ ID NO: 177491 - protein, 199 aa, Unknown
  Bacterial polypetide isolated from the Sargasso Sea
FAALAAHDAIVNYSGTLNTTAVCLMKIANDIRFLGSGPRAGYGELVLPENEPGSSIMPGKVNPTQCEAVTMVCVKVIGNHNGITMAGSHGHFELNVFKPLIIHNVLQSIQILSDSTKSFAKYCISGLKADKNRIKHLLDNSLMLVTALSPKIGYDNAAKIAKNALKNKTTLKTEALKTGLINEKEYNKIVDPNKMIKPD

SEQ ID NO: 177492 - protein, 234 aa, Unknown
  Bacterial polypetide isolated from the Sargasso Sea
MKLRKEFDSIGSVNVPNDKYWGASTQRSNKFFNIGKILVNISIIKSIAIIKRSAAIVHSKDKLISSKISKAIIKASDEVIKGKLDENFPLKVWQTGSGTQTNMNVNEVIANRAIEILGGKKGTKKPVHPNDHVNKSQSTNDVFPTAMHISVAQETISKLLPNLKLLKKELKRKSREFKNIIKIGRTHLQDATPLSLGQEFSGYHVQVQKSIKRIEVALKEIIDLAQGGTAVEQE

SEQ ID NO: 177493 - protein, 274 aa, Unknown
  Bacterial polypetide isolated from the Sargasso Sea
DSIGEIDVPASAYWGAQTQRSIENFPFGETERMPIAIVHALALVKQAAARVNRKHGLDAKVADAIESAAQEVVSGKLDDQFPLVIWQTGSGTQSNMNVNEVIAGRANEILTGTRGGKSPVHPNDHVNMGQSSNDSFPTALHVAAARAANDKLYPALAQLHASLQAKSEAWKDIVKIGRTHLQDATPVTLGQEFSGYVQQLHLARGRIEPAVSGEVSALAQGGTAVGTGLNAVPGFDVDVAAELASLTGLPFRTAENKFEALASNDPLVHLSSTL

SEQ ID NO: 177494 - protein, 164 aa, Unknown
  Bacterial polypetide isolated from the Sargasso Sea
MTDEFRIEKDSMGEVKVPKDALYAAQTQRAVDNFPVSGIPIRRPLIAALGMIKSSAAKVNGTSGAIPEEVAALIQSAAQEVIEGKLDEHFPIDIYQTGSGTSSNMNANEVIANRASQLSAEKNLKVHPNDHVNCGQSSNDTFPTAIRIAAVMETQADLIPALKE

SEQ ID NO: 177495 - protein, 260 aa, Unknown
  Bacterial polypetide isolated from the Sargasso Sea
YRHQVQKGIDRIEKSLEDIYELAQGGTAVGTGLNTSVGWDTTVAKYIAEETKLPFVSAPNKFEALASHDAMVEMSGSLKTLAAGLFKIANDIRFLGSGPRCGLGELILPENEPGSSIMPGKVNPTQCEALTQVCAQVIGNDAAVGLAGSQGHFELNVFKPMISYNVIQSMQLLGDACSAFTDNLVKDLKADRHRIEKLMRESLMLVTALAPKIGYDNATTVAKTAHKNGTTLKEEAVKLGFVDDKTFDEIVKPENMVGPT

SEQ ID NO: 177496 - protein, 294 aa, Unknown
  Bacterial polypetide isolated from the Sargasso Sea
ELKKKVKEFNNIVKVGRTHLQDATPITLGQEFSGYHAQLSKCIERIEIALKEMYFLAQGGTAVGTGLNTRKGFDKKIVSELRKMTKLPFKPSANKFAALAAHDSIVNFSGTMNTTAVCLMKIANDIRFLGSGPRAGYGELILPENEPGSSIMPGKINPTQCEAVTMVCVKVIGNHNGITMAGSHGHFELNVFKPLIIHNILQSIHIMADSSKSFAKYCIKGLKADKQKIKKLLDNSLMLVTALSPKVGYDNAAKIAKKAHKNGTTLKEEAIKSNLITEKEYNKIVNPRKMIRPK

SEQ ID NO: 177497 - protein, 135 aa, Unknown
  Bacterial polypetide isolated from the Sargasso Sea
SCEAVTMVCVKVIGNHNGITMAGSHGHFELNVFKPLIAHNILQSIDLIADSTKNFAIYCVKGIKANKKKIQEHLDNSLMLVTALAPHIGYDNAAKIAKTALKNNTTLKYETLKTGLITEKDYIKIVDPKKMIYPE

SEQ ID NO: 177498 - protein, 185 aa, Unknown
  Bacterial polypetide isolated from the Sargasso Sea
MKTRKEFDSIGEINVPNDKYWGASTQRSKKFFNIGKIYVPESIIRSIAIIKRSAAIVHKKDGLITSKVSKAIIKASNEIISGKMGENFPLKVWQTGSGTQTNMNVNEVIANRAIEILKGRKGSKKPVHPNDHVNKSQSTNDVFPTAMHISVAIETINKLLPSLKLLENSLSKKIKEFKKIVKIGR

SEQ ID NO: 177499 - protein, 221 aa, Unknown
  Bacterial polypetide isolated from the Sargasso Sea
MKFRKEFDSIGKINVPNDKYWGASTQRSKKYFDIGEFLVRPVLIKSIAIIKKAAAIVHRKEKQILPQTSKAIIKASNEVISGKLNSHFPLKVWQTGSGTQTNMNVNEVIANRAIEILGGKKGAKKPVHPNDHVNKSQSTNDVFPTAMHIAISIETKNKLLPALELLNKELKKKVSKFRKVIKVGRTHLQDATPLSLGQEFSGYQSQLQDCIIRIKNALNEI

SEQ ID NO: 177500 - protein, 311 aa, Unknown
  Bacterial polypetide isolated from the Sargasso Sea
NLWGAQTQRVIKEFLELANDIMPIEIVHALAVIKMSCAKTNQKQKLLSPKIARAIIDAAKQVSLGKYDEHFPLSVWQTGSGTQTNMNVNEVIANIANRKILKKLGTNSPVHPNDHVNKSQSTNDSFPSAINIASKLKILSDLLPALKSMEKVLKSQSQKWKSIIKIGRTHLQDATPLSLGQEFSGYQAQINSNIRRVEGSLTNLSYLAQGGTAVGTGLNTKRGFDRLVVSEISKITKVQFKPAANKFQALASHDSLVELSGVLNVIASDLFKIGNDIRLLASGPRSGLGELSLPENEPGSYIMPGKVNPTQ

SEQ ID NO: 177501 - protein, 219 aa, Unknown
  Bacterial polypetide isolated from the Sargasso Sea
MKYRTEFDSIGKINVPGDKYWGASTERSNKYFNIGDFLVRPLVIHSIAIIKKASAIVNAKNKDLDPKISKYIIKAADEVIKGKHDSHFPLKVWQTGSGTQTNMNVNEVIANRAIQMMGGKLGSKKPVHPNDHVNKSQSTNDVFPTAMHIAIALKTKEKLLPSLKLLEKELFKKSKEFKNIVKVGRTHLQDATPLTLGQEFSGYHAQLKKCIIRIEAALK

SEQ ID NO: 177502 - protein, 241 aa, Unknown
  Bacterial polypetide isolated from the Sargasso Sea
GWGQQIQANIEHLRALQPSLQALAQGGTAVGTGVNAHPRFAEQFCRELGGLTGVNFTTAGNFFALIGSQDTAVAVSGQLKTTAVSLMKIANDLRWMNSGPLAGLAEIELEALQPGSSIMPGKVNPVIPEAAAMVAAQVIGNDAAIAIAGQSGNFELNVMLPLIADNLLYSMQLLSNVSHLLADRAIASFKVNQPKLREALERNPILVTALNPLIGYLKAADIAKQAYREGRPIIEVALEHT

SEQ ID NO: 177503 - protein, 135 aa, Unknown
  Bacterial polypetide isolated from the Sargasso Sea
MHTIGDWERHCPMGQTMRQEHDSIGTVDVPTAALWGAQTQRSLNNFAIGDQRIPAELIHALARIKQCCAVVNGRHGLLNDQQVALIERAGQAIQTGQHDDQFPLSVWQTGSGTQTNMNVNEVISNLAAQHSGESL

SEQ ID NO: 177504 - protein, 182 aa, Unknown
  Bacterial polypetide isolated from the Sargasso Sea
NTTAVCLMKVANDIRFLGSGPRAGYGELILPSNEPGSSIMPGKVNPTQSEAVTMVCVKVIGNHNGITMAGSHGHFELNVFKPLIIHNILQSINIMSDSAKTFALYCIKGIKADKKRIKYLLDNSLMLVTALAPKIGYDRAAAIAKKAHKNGTTLKHEVIKAGLINEKEYEKIMSPMRMTKPR

SEQ ID NO: 177505 - protein, 286 aa, Unknown
  Bacterial polypetide isolated from the Sargasso Sea
IEILGGKKGSKKPVHPNDHVNKSQSTNDVFPTAMHIAIAIETKTKLLPSLELLNKELKKKVSKFKNIVKVGRTHLQDATPLSLGQEFSGYQSQLEDCIVRIKNALNEIYSLAQGGTAVGTGINSKKGFDKKVINEIKKITKLPFKPTRNKFAALAAHDEIVNFSGTLNTTAVCLMKIANDIRFLGSGPRAGYGELILPANEPGSSIMPGKVNPTQSEAVTMVCVKVIGNHNGITMAGSHGHFELNVFKPLIAHNILQSIDLLADSSKNFGLYCIRGLKADKDIIKN

SEQ ID NO: 177506 - protein, 301 aa, Unknown
  Bacterial polypetide isolated from the Sargasso Sea
IYHDVFPTAMHISVATETISKLLPNLKLLEDSLKKKSIEFKKIVKIGRTHLQDATPLTLGQEFSGYYEQTKKSIERIKFSLKDILFLAQGGTAVGTGLNAKKNFDKKITREISKYCKIPFKPAPNKFSELAAHDAIVSFSGALNSCAVALMKISNDIRFLGSGPRAGYGELILPENEPGSSIMPGKVNPTQCEAVTMVCVKVIGNHTGISIAGTHGHFELNVFKPLIAHNILQSIDLLADSVKNFSLYCVRGIKANKLKIKEHLDNSLMLVTALAPKIGYDNAAKIAKKALKNNTKLKHET

SEQ ID NO: 177507 - protein, 265 aa, Unknown
  Bacterial polypetide isolated from the Sargasso Sea
GDFLVRPLVIHSIAIIKKAAAIVNAKNKDLDPKIAKYIIKASEEVIKGKLDNHFPLKVWQTGSGTQTNMNVNEVIANRAIEMMGGKLGSKKPVHPNDHVNKSQSTNDVFPTAMHIAIAIKAKEKLLPSLRLLEKELLKKSKEFKLIVKVGRTHLQDATPLTLGQEFSGYYSQLKDCIARIENALKEIYFLAQGGTAVGTGLNTKKNFDKRIIKEICKITKLPFRPARNKFAALAAHDEIVNFSGTLNTTAVCLMKIANDIRFLGS

SEQ ID NO: 177508 - protein, 308 aa, Unknown
  Bacterial polypetide isolated from the Sargasso Sea
PIHPNDHVNLSQSSNDTFPTIMHVAINELSIKQLIPNLNKLIKEFQKKTRVFQKIIKIGRTHTQDATPITLGNEFSAFCTQLQACLKRIEISQSELKYLAQGGTAVGSGINAPNKFDRVFCKYLNKLTKDNYKPAQNKFEALSSHDPLVNFSNTLKSLSISLLKIINDIRFLASGPRSGLGELILPANEPGSSIMPGKINPTQIEALSMVCTQVIGNSTTVDLAGSNGHFQLNTYKPVIAFNIIQSVNLLSDGIESFNNNCLKGLKANKEIIDNHLNNSLMLVTALNKSIGYDNAAKIAKKAFDENLT

SEQ ID NO: 177509 - protein, 303 aa, Unknown
  Bacterial polypetide isolated from the Sargasso Sea
MANWDLGTQTNMNANEVISNHAIKLLKGNIGTKIPVHPNEHVNLSQSSNDTFPTVMHIAINELTDQKLLPSLNLIIRELKLKIKKFNNIIKIGRTHTQDATPLTLGQEFSGYLTQIENCKKRIINTKKELSFLAQGGTAVGTGINAPKNFDKIFCKYISKLTKNNFKPAKNKFEAISTHDSLVNFSSSLNLLAVSLLKISNDIRFLASGPRSGLGELELPENEPGSSIMPGKINPTQIEALSMVCTQVMGNNLTVIISGSQGHFELNAYKPVIAYNIIQSVNLLGDAIESFCIKCLIGIKPNK

SEQ ID NO: 177510 - protein, 209 aa, Unknown
  Bacterial polypetide isolated from the Sargasso Sea
IPFKPTTNKFAALASHDPIVNFSGTMNTTAVCLMKIANDIRFLGSGPRAGYGELILPENEPGSSIMPGKVNPTQCEAVTMVCVKVIGNHNGITMAGSHGHFELNVFKPLIIHNILQSINIMADSSKAFANYCIKGLKADKERIKSLLDNSLMLVTALSPKLGYDNAAKIAKLAHKNGTTLKTEAIKSGLITEKEFLKLVDPKKMVKPKN

SEQ ID NO: 177511 - protein, 204 aa, Unknown
  Bacterial polypetide isolated from the Sargasso Sea
MRFEKDSMGELEVPSKAYYGGNTRRAELNFPISKLRLGRSFIKAIAQVKLSAAITNKELGTLENNIANAIIDAAKKVIDGYYDDQFVVDVFQTGSGTSTNMNANEVISNIAIESLGGLLGSRDPVHPNDHVNKGQSSNDVIPTTIHVAAAVSINEKLIPSLEILEKSLETKSKEFWNIVKTGRTHLQDATPIRLGQEFLGYAGQ

SEQ ID NO: 177512 - protein, 229 aa, Unknown
  Bacterial polypetide isolated from the Sargasso Sea
MAYKKRIEFDSLGSKKIDHNKLWGAQTQRSLENFEIGSEKIPSELIVALGQQKKAAAEANIKLGVIDKKLGSLISKACDDIINLKLIEEFPLSVWQTGSGTQTNMNANEVISNHIIKKLKGRIGSKKPIHPNDHVNLSQSSNDTFPTIMHVAINELSIKDLIPNLKDLIKEFQKKKKIFKNIIKIGRTHTQDATPITLGDEFSAFCTQLQACLKRIEVSKSELKYLAQG

SEQ ID NO: 177513 - protein, 291 aa, Unknown
  Bacterial polypetide isolated from the Sargasso Sea
VHPNDHCNMSQSSNDTYPTAMHIACASEILDTLLPALTSLANKFKKKSDEWAHVIKIGRTHTQDATPLTLGQEFSGYAQQINNGIDRIKDTLPKLMELAQGGTAVGTGLNAPKDFGTKIAQSISKLTGKKFTSAPNKFEALSAHDAMLMTHGAINTVAASLFKIANDIRFLGSGPRAGLGELALPENEPGSSIMPGKVNPTQCEALTQVCLHIFGNNTAISIAGSQGHFQLNVFNPMMAFNFLQSVKLMTDAAISFEKNCLDGLEARHENIKLNLERSLMLVTALAPKIGY

SEQ ID NO: 177514 - protein, 208 aa, Unknown
  Bacterial polypetide isolated from the Sargasso Sea
MKLRKEFDSIGSINVPNDKLWGASTQRSNKYFNIGKILVNISIIKSIAIIKRSAAIVHAKDKLINNKISKAIIKASDEIIKGKLDENFPLKVWQTGSGTQTNMNVNEVIANRAIEIMGGKKGSKKPVHPNDHVNKSQSTNDVFPTAMHISVVKESLNKLLPNLKILEKEINRKSREFKNIVKIGRTHLQDATPLSLGQEFSGYHVQVK

SEQ ID NO: 177515 - protein, 259 aa, Unknown
  Bacterial polypetide isolated from the Sargasso Sea
MKFFGAKLGSYPFVHPNDHVNMSQSTNDTFPTAILIGSVISSQDNLLPALSLLEKSLVVKSKEFHKIIKVGRTHLQDATPIRLGQEFSGYASMIKNDISRIKHALKGCSDLPVGGTAVGTGINTLNGFDELMCSFISEETGLSFNVCKNKFELLSSQNAISNLSAQIRICSGSLNKIANDIRWLACGPMAGIGELILPTNEPGSSIMPGKVNPTQCEAVNMVYAQILGNDTTINYAGTNGNFELNTYRPIIASSIHESI

SEQ ID NO: 177516 - protein, 210 aa, Unknown
  Bacterial polypetide isolated from the Sargasso Sea
TKIKFKPAPNKFAELAAHDAIVNFSGTLNTCAVALMKISNDIRFLGSGPRAGYGELVLPENEPGSSIMPGKVNPTQCEAVTMVCVKVIGNHNGITMAGSHGHFELNVFKPLIAHNILQSIDLIADSTKNFALYCVKGIKANKKKIQEHLDNSLMLVTALAPHIGYDNAAKIAKTALRKNTTLKYETLKTGLISEKDYKKIVDPKKMIYPA

SEQ ID NO: 177517 - protein, 181 aa, Unknown
  Bacterial polypetide isolated from the Sargasso Sea
MKYRLEFDSIGKIKVPGDKYWGASTERSNKYFNIGDFLVRPLVIHSIAIIKKAAAIVNSRNKDLDSRLSKYIIKAAEEVIKGKHDKHFPLKVWQTGSGTQTNMNVNEVIANRAIEMMGGKMGSKKPVHPNDHVNKSQSTNDVFPTAMLISIALKAREKLLPSLKLLEKELSKKSKEFKKIV

SEQ ID NO: 177518 - protein, 263 aa, Unknown
  Bacterial polypetide isolated from the Sargasso Sea
TKNKLLPSLKLLEKELDKKVKKFSKIVKLGRTHLQDATPLTLGQEFSGYHSQLKRCISRIEKALGEIYYLAQGGTAVGTGLNTKKNFDKKVVREIKKITKLPFKPAKNKFAALASHDPIVNFSGTMNTTAVCLMKIANDIRFLGSGPRAGYGELILPENEPGSSIMPGKVNPTQCEAVTMVCVKVIGNHNGITMAGSHGHFELNVFKPLIIHNILQSINIMADSSKAFASHCIRGLKADKKRIKSLLDNSLMIVTALSPKIGY

SEQ ID NO: 177519 - protein, 300 aa, Unknown
  Bacterial polypetide isolated from the Sargasso Sea
PNDHVNKSQSTNDVFPTAMHIAIAIETKKKLLPSLKDLSKELKIKVNKFKNIVKVGRTHLQDATPLTLGQEFSGYYSQLNDCILRIENSLKEIFFLAQGGTAVGTGINSKKDFDVKICREISKLTKIKFYPAKNKFAALAAHDAIVNFSGTLNTTAVCLMKIANDIRFLGSGPRAGYGELLLPANEPGSSIMPGKVNPTQCEAVTMVCVKVIGNHTGITLAGSQGQFELNVFKPLIAHNILQSIDLLSDSSKNFSQFCIKGIKADLKKINEDLSNSLMLVTALAPKLGYDNAAQIAKSAL

SEQ ID NO: 177520 - protein, 277 aa, Unknown
  Bacterial polypetide isolated from the Sargasso Sea
NETLSKLLPNLKILEKELNRKSKEFKNIVKIGRTHLQDATPLSLGQEFSGYHVQVKKSIERIEYALKEILFLAQGGTAVGTGINSKKNFDKKVVKEIAKFTKIKFKPAANKFAELAAHDAIVNFSGTLNTCAVALMKISNDIRFLGSGPRAGYGELILPENEPGSSIMPGKVNPTQCEAVTMVCVKVIGNHTGITMAGSHGHFELNVFKPLIAHNILQSIDLIADSTKNFAIYCVKGIKANKKKIQEHLDNSLMLVTALAPHIGYDNAAKIAKTALK

SEQ ID NO: 177521 - protein, 187 aa, Unknown
  Bacterial polypetide isolated from the Sargasso Sea
MSGVLNVIATDLFKIANDIRLLASGPRSGLGELSLPENEPGSSIMPGKVNPTQSEALTMVCLQVMGFHNTISMAGSQGHFELNAFKPLIGLNIINSVNLLSTGINNFNEKCLKGIKLNIKNIRQGVENSLMLVTALAPEIGYAKAAELAKVAHKKNISLIEANKNLKYLDNKKIKSLLDPKKMISSS

SEQ ID NO: 177522 - protein, 119 aa, Unknown
  Bacterial polypetide isolated from the Sargasso Sea
MVKFRIEKDSLGEIKVESSKLWGAQTQRSIENFQIGIGKFHFQNIFIEALALQKKSCALANSEFKLLSKNHTKIIGKVCDLIISGKLNNHFPLVVWQTGSGTQINMNLNEVIANKSNQL

SEQ ID NO: 177523 - protein, 171 aa, Unknown
  Bacterial polypetide isolated from the Sargasso Sea
NDIRFLGSGPRAGYGELILPENEPGSSIMPGKVNPTQCEAVTMVCVKVIGNHNGITMAGSHGHFELNVFKPLIAHNILQSIDLIADSTKNFAIYCVRGIKANKKKIQEHLDNSLMLVTSLAPHIGYDNAAKIAKTALKNNTTLKHETLKTGLISEKDYNKIVDPKKMIYPA

SEQ ID NO: 177524 - protein, 249 aa, Unknown
  Bacterial polypetide isolated from the Sargasso Sea
IQLSLKEIYNLAQGGTAVGTGLNTRKNFDKKIVKEISKITRIPFKAASNKFAALAAHDEIVNFSGALNTTAVCLMKIANDIRFLGSGPRAGYAELILPSNEPGSSIMPGKVNPTQTEAVTMVCVKVIGNHNGITMAGSHGHFELNVFKPLIAHNILQSIEIMSDSAKTFALYCVKGIKADKKRIKSLLDNSLMLVTALAPKIGYDQAANIAKLAHKNGTTLKEEVIKARLLKERDYDKIMDPMKMTKPK

SEQ ID NO: 177525 - protein, 240 aa, Unknown
  Bacterial polypetide isolated from the Sargasso Sea
KLIDSRISKAIIRASDEVIKGKLDDNFPLKVWQTGSGTQTNMNVNEVVANRAIEIMGGKKGSKKPVHPNDHVNKSQSTNDVFPTAMHISVAKETLSKLLPNLKILEKELNRKSREFKNIVKIGRTHLQDATPLSLGQEFSGYHVHVKKSIERIEYALKEILFLAQGGTAVGTGINSRKNFDKKVVKEIAKFTKIKFKPAPNKFAELAAHDAIVNFSGTLNTCAVALMKISNDIRFLGSGP

SEQ ID NO: 177526 - protein, 292 aa, Unknown
  Bacterial polypetide isolated from the Sargasso Sea
ISNRAIEILKGKKGTKKPVHPNDHVNKSQSTNDVFPTAMHIAIAMETREKLLPSLILLNKELKKKVSEFNKIVKIGRTHLQDATPLSLGQEFSGYQSQLEECIKRIKVSLNEIYYLAQGGTAVGTGINTKKNFDKKIVNEIKKITKLPFKPAKNKFAALAAHDAIVNYSGTLNTTAVCLMKIANDIRFLGSGPRAGYGELILPENEPGSSIMPGKVNPTQCEAVTMVCVKVIGNHNGITMAGSHGHFELNVFKPLIIHNVLQSIQILSDSTKSFAKYCITGLKADKNRIKHL

SEQ ID NO: 177527 - protein, 254 aa, Unknown
  Bacterial polypetide isolated from the Sargasso Sea
TTLKGQSKKWDKIIKVGRTHLQDATPLSLGQEFSGYEAMISSNIKRVEQSFGSLLNLAQGGTAVGSGLNTKRNFDKLVINEISKIAKIKFKPAINKFQALAAHDAIVEMSGSLNVLTTDLFKIANDIRLLGSGPRSGLGELNLPENEPGSSIMPGKVNPTQCEALTMVCVQAMGMHNTISLAGSQGHFELNAYKPVIGHNIIELIHLLSSGMDNFNDKCLKGIKPNLKNIKSGLDNSLMLVTALAPEIGYSKAA

SEQ ID NO: 177528 - protein, 183 aa, Unknown
  Bacterial polypetide isolated from the Sargasso Sea
VAGSLFKIANDIRWLASGPRSGIGELTLPANEPGSSIMPGKVNPTQCEAMTMLCTQVMGNDVTIGFAGASGNFELNVYRPVLAYNILQSIRLLSDGCRSFTKHAISGIEPNQERIDHNLYNSLMLVTALNPHIGYDKASEVAKKAFKDKSTLREAITELGYLTADRFDELVNPADMIKPKKKD

SEQ ID NO: 177529 - protein, 127 aa, Unknown
  Bacterial polypetide isolated from the Sargasso Sea
MKFRKEFDSIGKIKVPLDKYWGASTQRSKKFFDIGEIYVQKILIRSIAIIKKAAANVHKKEGQIQPKIANAIIKASNEIISGKLQENFPLKVWQTGSGTQTNMNVNEVISNRAIEILGGRLGSKIPV

SEQ ID NO: 177530 - protein, 287 aa, Unknown
  Bacterial polypetide isolated from the Sargasso Sea
NRAIEILGGRKGTKKPVHPNDHVNKSQSTNDVFPTAMHISIAKETITKLLPNLKILEKELKRKSKEFKNIVKIGRTHLQDATPLSLGQEFSGYHVQVKKCIERLEYALKEIFFLAQGGTAVGTGINSKKNFDKKIVKEIAKFTKINFKPAANKFAELAAHDSIVNFSGTLNTCAVALMKISNDIRFLGSGPRAGYGELILPENEPGSSIMPGKVNPTQCEAVTMVCVKVIGNHNGITIAGSHGHFELNVFKPLIAHNILQSIDLIADSTKNFAIYCVKRYKSQIRKK

SEQ ID NO: 177531 - protein, 234 aa, Unknown
  Bacterial polypetide isolated from the Sargasso Sea
TAVGTGINSKKGFDRKIINEIKKITKISFMPTKNKFAALAAHDEIVNFSGTLNTTAVSLMKIANDIRFLGSGPRAGYGELILPANEPGSSIMPGKVNPTQSEAVTMVCVKVIGNHNGITMAGSHGHFELNVFKPLIAHNILQSIDLLADSSKNFALYCVKGLKADKDKIKYYLDNSLMLVTALAPKIGYDNAAKIAKKALKNKTTLKKEAIKTGLINENDYDKTINPKKMIYPS

SEQ ID NO: 177532 - protein, 229 aa, Unknown
  Bacterial polypetide isolated from the Sargasso Sea
MKYRIEFDSIGKIKVPGDKYWGASTERSNKYFNIGDFLVRPIVIQSIAIIKKAAAITNYKNKDLDKNISRYIVKASEEVIKGKLDNHFPLKVWQTGSGTQTNMNVNEVIANRAIEMMGGKMGSKKPVHPNDHVNKSQSTNDVFPTAMHISIAIKANQKLLPSLKLLEKEIGKKVKEFKNIVKVGRTHLQDATPITLGQEFSGYQSQLKKCIERIERALDEIYYLAQGGT

SEQ ID NO: 177533 - protein, 324 aa, Unknown
  Bacterial polypetide isolated from the Sargasso Sea
MKFRKEYDSIGSVYVPVDKYWGASTQRSKKYFNIGDVLVGPKLIKSIAIIKKAAAITNYRNNDISSKICKSIIRAADEIISGKLDNHFPLKVWQTGSGTQTNMNVNEVISNRAIEILKGKKGSKKPVHPNDHVNKSQSTNDVFPTAMHIAIAMETKERLLPSLFLLNKELKKKVKEFNKIVKIGRTHLQDATPLSLGQEFSGYQSQLEDCIKRIQVSLNEIYYLAQGGTAVGTGINTKKNFDKKIVYEIKKITKLPFKPAKNKFAALAAHDAIVNYSGTLNTTAVSLMKIANDIRFLGSGPRAGYGELILSEDEPGSSIMPGKV

SEQ ID NO: 177534 - protein, 307 aa, Unknown
  Bacterial polypetide isolated from the Sargasso Sea
KFRKEFDSIGSIKVPNDKYWGASTQRSKKYFDIGEFLVRPRLIKSIAIIKKAAAKVHLKEKQILPKICRAIISASNEVISGKLDENFPLKVWQTGSGTQTNMNVNEVIANRAIEILGGKKGSKKPVHPNDHVNKSQSTNDVFPTAMHIAIAIETKNKLLPSLKLLNKVLKKKVSAFKNIIKVGRTHLQDATPLSLGQEFSGYQSQIEDSINRINKALNEIYSLAQGGTAVGTGINSKKNFDKKIINEIKKITKLPFKPTKNKFAALAAHDEIVNFSGTLNTTAVSLMKIANDIRFLGSGPRAGYGEL

SEQ ID NO: 177535 - protein, 130 aa, Unknown
  Bacterial polypetide isolated from the Sargasso Sea
MKFRKEYDSIGSINVPVDKYWGASTQRSKKYFDIGDVLVRPKLIKSIAIIKKAAAISNYKNKDIRSKVYKSIVRASNEVINGKLDNHFPLQVWQTGSGTQTNMNVNEVISNRAIEILKGKKGTKKPVHHQ

SEQ ID NO: 177536 - protein, 155 aa, Unknown
  Bacterial polypetide isolated from the Sargasso Sea
MKLRKEFDSIGSVNVPNDKYWGASTQRSNKFFNIGKILVNISIIKSIAIIKRSAAIVHSKDKLINSKISKAIIKASDEVIKGKLDKNFPLKVWQTGSGTQTNMNVNEVIANRSIEILGGKKGTKKPVHPNDHVNKSQSTNDVFPTAMHISIAQET

SEQ ID NO: 177537 - protein, 171 aa, Unknown
  Bacterial polypetide isolated from the Sargasso Sea
NDIRFLGSGPRAGYGELILPENEPGSSIMPGKVNPTQCEAVTMVCVKVIGNHNGITMAGSHGHFELNVFKPLIAHNILQSIDLIADSTKNFALYCVKGIKANKKKIQEHLDNSLMLVTALAPHIGYDNAAKIAKTALKNNTTLKHETLKTGLITEKDYNKIVDPKKMIYPA

SEQ ID NO: 177538 - protein, 285 aa, Unknown
  Bacterial polypetide isolated from the Sargasso Sea
MKYRYESDSLGKIKVPSDKYWGASTQRSNKHFNIGDFLVRPIVIKSIAMIKKAAAIVNAKNGDIDKKLSKAIIKASGEVISGKFNDHFPLKVWQTGSGTQTNMNVNEVIANRANEILGSKLGSKKPVHPNDHVNKSQSTNDVFPTAMHMAIAIRAKGKLLPFLKLLNKELEKKSKQFKNIIKVGRTHLQDATPITLGQEFSGYSSQLDKCIKRIEIALKEIYFLAQGGTAVGTGLNTKKGFDKKIIAELRKITNLPFKPASNKFAALAAHDAIVNFSGTNEYYCC

SEQ ID NO: 177539 - protein, 253 aa, Unknown
  Bacterial polypetide isolated from the Sargasso Sea
EGAQTQRSLENFKISNDKMPKEIIIALGMQKKAAVLANQNLGLINKNLSNAIVKACDQVINLNLLDEFPLSVWQTGSGTQTNMNANEVISNYAIKTLKGKIGSKSPIHPNDHVNLSQSSNDTFPTVMHIAANELTDKKLIPAIKNLIKEFKIKTKSYSKIIKIGRTHTQDATPLTMGDEFSGYLHQIQNNYKRIILTKKELNYLAQGGTAVGSGINAPKNFDKIFCKHLNKMTKNKYKPAINKFEVIANHDSL

SEQ ID NO: 177540 - protein, 223 aa, Unknown
  Bacterial polypetide isolated from the Sargasso Sea
PKLSKYIIRASEEVIKGKHDKHFPLKVWQTGSGTQTNMNVNEVIANRAIQIMGGKMGTKKPIHPNDHVNKSQSTNDVFPTAMHISIALKAKEKLLPSLKLLENELAKKSREFKKIVKVGRTHLQDATPLTLGQEFSGYHSQLKKCIIRVEAALKEIYFLAQGGTAVGTGLNTRKNFDKKIIKEISKITKLPFKPSSNKFAALAAHDEIVNFSDTLNTTAVCLM

SEQ ID NO: 177541 - protein, 180 aa, Unknown
  Bacterial polypetide isolated from the Sargasso Sea
CAVALMKISNDIRFLGSGPRAGYGELILPENEPGSSIMPGKVNPTQCEAVTMVCVKVIGNHNGITMAGSHGHFELNVFKPLIAHNILQSIDLIADSTKNFAIFCVRGIKANKKKIQEHLDNSLMLVTSLAPHIGYDNAAKIAKTALKNNTTLKHETLKTGLISEKDYNKIVDPKKMIYPA

SEQ ID NO: 177542 - protein, 112 aa, Unknown
  Bacterial polypetide isolated from the Sargasso Sea
MAFRIEKDSMGELQVPSNRYYGAQTQRSLNNFKINDEKFPREFIRAYGILKKSASIVNSRNNKIELKLSDAICSAANEVIEGKLDEHFPLVVWQTGSGTQTNMNFNEVISNR

SEQ ID NO: 177543 - protein, 275 aa, Unknown
  Bacterial polypetide isolated from the Sargasso Sea
LLNKELKKKVSQFKKIVKVGRTHLQDATPLSLGQEFSGYQSQLEDCIKRIENALSEIYLLAQGGTAVGTGINSKKGFDKKIINEIKKITKIPFKPTKNKFAALAAHDEIVNFSGTLNTTAVCLMKVANDIRFLGSGPRAGYGELILPANEPGSSIMPGKVNPTQSEAVTMVCVKVIGNHNGITMAGSHGHFELNVFKPLIAHNILQSIDLLADSSKNFALYCIKGLKADKEKINFYLENSLMLVTALAPKIGYDNAAKIAKSALKNKSTLKTEAL

SEQ ID NO: 177544 - protein, 241 aa, Unknown
  Bacterial polypetide isolated from the Sargasso Sea
MADTYRTERDSLGEMKVPAEARYGPQTQRAVENFPISGQRFSRRFIQAMGLIKKSAAETNVELGNLDPGVAKAIIAAAGEVADGEWDEEFVLDIYQTGSGTSTNMNTNEVVAHRATELLEGTGSVHPNDHVNFGQSSNDTIPTAIHISTRIAIEEELIPALQHMHDALAEKATEFDGVLKSGRTHLMDATPVRLGQEFSGYATQIRKGIERVRLVAAELEELALGGTATGTGINTHEDFQR

SEQ ID NO: 177545 - protein, 273 aa, Unknown
  Bacterial polypetide isolated from the Sargasso Sea
MDATPLTLGQEFSGYASQIKHGLKSLQNSLDHLSELAIGGTAVGTGLNCPDGFDKLTVKNISKDCNINFKVAENKFEAIASHDAIVETHSSIKQLAISIYKIANDIRLLGSGPRAGFSELILPANEPGSSIMPGKINPTQCEAICMVCAQIIGNDYTISFAGTQGHLELNVYKPLMASKIIESLKLLTDSVISFEKNCVKGLKANKKIIKEHLNNSLMLVTALNNKIGYYKAAEIANNAYRNGTTLKEEAIKLKYLTSSEFDQWVDPKKMTGK

SEQ ID NO: 177546 - protein, 169 aa, Unknown
  Bacterial polypetide isolated from the Sargasso Sea
IRFLGSGPRAGYGELLLPENEPGSSIMPGKVNPTQCEAVTMVCVKVIGNHNGITMAGSHGHFELNVFKPLIAHNVLQSIDLIADSTKNFALYCVKGIKANKKKIQEHLDNSLMLVTALVPHIGYDKAAKIAKRALKNNTTLKHETLKTGLISEKDYKRIVNPKKMIYPA

SEQ ID NO: 177547 - protein, 305 aa, Unknown
  Bacterial polypetide isolated from the Sargasso Sea
MSHVINIGGASTQRSNKFFNIGKILVNISIIKSIAIIKRSAAIVHAKDKLIENKISRAIIKASDEVISGKLDENFPLKVWQTGSGTQTNMNVNEVIANRAIEILGGKKGTKKPVHPNDHVNKSQSTNDVFPTAMHISVAKETISKMLPSLKLLEKELKKKSNEFKNIVKIGRTHLQDATPLSLGQEFSGYHFQVKKSIERIEHSLKEILFLAQGGTAVGTGLNSKKNFDKKIIKEIAKFAKIKFKPAPNKFAELAAHDAIVNFSGTLNTCAVALMKISNDIRFLGSGPRAGYGELFYLKMNLAHP

SEQ ID NO: 177548 - protein, 265 aa, Unknown
  Bacterial polypetide isolated from the Sargasso Sea
IHPNDHVNKSQSTNYVFPTAMHIAIALKTKNKLLPSLKLLEKELAKKTKEFKNIVKVGRTHLQDATPLTLGQEFSGYHSQLKQCINRVENALKEIHFLAQGGTAVGTGLNTKKNFDKKIVKEINKITKLKFKIAPNKFAALAAHDEIVNFSGALNTTAVCLMKIANDIRFLGSGPRAGYGELILPSNEPGSSIMPGKVNPTQSEAVTMVCVKVIGNHNGITMAGSHGHFELNVFKPLIIHNILQSINIMSDSTKAFAIYCIKGIK

SEQ ID NO: 177549 - protein, 133 aa, Unknown
  Bacterial polypetide isolated from the Sargasso Sea
MKDYRIEKDTLGEVKVPINSLWGAQTERSRNNFKIGNPSTMPIEIIHAYAILKKSAAQTNFNFGILSKDKCNLIESVCDEILENMHNDQFPLVIWQTGSGTQTNMNVNEVISNRAHLIQGKEIGKSEKLLSPK

SEQ ID NO: 177550 - protein, 222 aa, Unknown
  Bacterial polypetide isolated from the Sargasso Sea
MKYRTEFDSIGKIKVPGDKYWGASTQRSNKYFDIGDFLVRPILIQSIAIVKKAVALVNTRNGDLDKKISRYVVRAADEVIKGKLHNHFPLKVWQTGSGTQTNMNVNEVIANRAIQMMGGKMGTKKPVHPNDHVNKSQSTNDVFPTAMHIAIAMKTRDKLLPSLKLLEKELSIKTNKFGKIVKLGRTHLQDATPLTLGQEFSGYQTQLKNCIKRIEKALNEIY

SEQ ID NO: 177551 - protein, 236 aa, Unknown
  Bacterial polypetide isolated from the Sargasso Sea
SLKKKSIEFKKIVKIGRTHLQDATPLTLGQEFSGYYEQLKKSIERIQFSLKDILFLAQGGTAVGTGLNTKKNFDKKITREISKYCKISFRPAPNKFSEIAAHDAIVSFSGSLNSCAVALMKISNDIRFLGSGPRAGYGELILPENEPGSSIMPGKVNPTQCEAVTMVCVKVIGNHTGISIAGTHGHFELNVFKPLIAHNILQSIDLLGDSVKNFSLYCVKGIKPNKLKIKEHLDNS

SEQ ID NO: 177552 - protein, 224 aa, Unknown
  Bacterial polypetide isolated from the Sargasso Sea
MSQKTREEQDSLGSIKVINTNLWGAQTERSLKNFRIGNDIMPIEIIHALAVIKMSCAKANQKQKFLSPKLASAIIDAAKQVSLGKYDDHFPLSVWQTGSGTQTNMNVNEVIANIANRKISKKLGTNSPVHPNDHVNKSQSTNDSFPTAMNIASKLKIIRELVPALKSMEKVLKSQSQKWKSIIKIGRTHLQDATPLSLGQEFSGYQAQINSNIRRVERTLTNLS

SEQ ID NO: 177553 - protein, 118 aa, Unknown
  Bacterial polypetide isolated from the Sargasso Sea
MNVNEVISNRAIEIMGGKKGTKKPVHPNDHVNKSQSTNDVFPTAMHMAIAIRATGKLIPSLTLLNLQLKKKAKKFNKIVKVGRTHLQDATPLTLGQEFSGYHHQLTKCIERIKEALKE

SEQ ID NO: 177554 - protein, 166 aa, Unknown
  Bacterial polypetide isolated from the Sargasso Sea
MKKNKAFRIEQDSLGEIKVPKKALWGAQTQRAIENFPISGIKFRFPFGRSFIKALGAIKHSAAVANQDLGLLTAKKSNAIKSAAKMVMVGEVDDHFPLDVFQTGSGTSTNMNANEVIANIATKKLGADVHPNDDVNMSQSSNDTIPTAICLSTLYDMEEYLLPGLD

SEQ ID NO: 177555 - protein, 260 aa, Unknown
  Bacterial polypetide isolated from the Sargasso Sea
FSGYLEQIKNNLKRIKLAKKELHFVAQGGTAVGSGINAPKNFDKIFCKYLNTLTINNYKPAKNKYEAIACHDSLVNFSNSLSNLSVSLLKILNDLRFLASGPRSGLGEINLPANEPGSSIMPGKVNPTQIEALSMICCQVMGNNVSVNLAGSQGHFELNAYKPIIIFNIINSINLLSDGIESFVKNCLKGITINHENIDKHLTNSLMLVTALNEHIGYDNAAKIAKKAFNENISLKEAALKLKLISEKKFDKIVDPKKMI

SEQ ID NO: 177556 - protein, 128 aa, Unknown
  Bacterial polypetide isolated from the Sargasso Sea
MKLRKEFDSIGSINVPGDKYWGASTQRSKKYFDIGEFLVRPVLIRSIAIIKKAAAIVHGKEKQILPQISKAIIKASNEVISGKLDEHFPLKVWQTGSGTQTNMNVNEVIANRAIEILGGKKGSKKPVH

SEQ ID NO: 177557 - protein, 161 aa, Unknown
  Bacterial polypetide isolated from the Sargasso Sea
RAGYGEIILPANEPGSSIMPGKVNPTQSEAVTMVCVKVIGNHNGITMAGSHGHFELNVFKPLIAHNILQSIDLLADSTKNFSLYCIKGIKADKIKIKKFLDNSLMMVTALAPHIGYDNAAKIAKSALKNGTTLKTETLKSGLIDEKKYHKIINPKKMTYPN

SEQ ID NO: 177558 - protein, 193 aa, Unknown
  Bacterial polypetide isolated from the Sargasso Sea
HDEIVNFSGTLNTLAVCLMKIANDIRFLGSGPRAGYGELILPSNEPGSSIMPGKVNPTQSEAVTMVCVKVIGNHNGITMAGSHGHFELNVFKPLIAHNILQSIDLLSDSSKNFALYCIKGLKADKKKIKEYLDNSLMMVTALAPHIGYDNAAKIAKQALKNNSTLKKEALNSGLVNEKMYDLIVNPKKMIIPS

SEQ ID NO: 177559 - protein, 306 aa, Unknown
  Bacterial polypetide isolated from the Sargasso Sea
TNDVFPTAMHMAIAIRAKGKLLPSLKLLNLELAKKSKQFKKIIKVGRTHLQDATPITLGQEFSGYHSQLSKCIKRIEKALEEIYFLAQGGTAVGTGLNTKKGFDRKIVSELRKITKLPFKPAPNKFAALAAHDAIVNFSGTMNTTAVCLMKIANDIRFLGSGPRAGYGELILPENEPGSSIMPGKINPTQCEAVTMVCVKVIGNHNGITMAGSHGHFELNVFKPLIIHNILQSIHIMADSSKSFAKYCVKGLKADKKKIKKFLENSLMLVTALSPKVGYDNASKIAKRAHKNGTTLKEEAIKSGLI

SEQ ID NO: 177560 - protein, 247 aa, Unknown
  Bacterial polypetide isolated from the Sargasso Sea
NALNEIYSLAQGGTAVGTGINSKKGFDKKIINEIKKITKLPFKPTKNKFAALAAHDEIVNFSGTLNTTAVSLMKIANDIRFLGSGPRAGYGEIILPANEPGSSIMPGKVNPTQSEAVTMVCVKVIGNHNGITMAGSHGHFELNVFKPLIAHNILQSIDLLADSTNNFSLYCVKGIKADKIKIKKFLDNSLMLVTALAPHIGYDNAAKIAKSALKKGTTLKEEALKTNLISKKDFERIVDPKKMIYPK

SEQ ID NO: 177561 - protein, 121 aa, Unknown
  Bacterial polypetide isolated from the Sargasso Sea
MKKRKEFDSIGKIEVPNDKYWGASTQRSKKYFDIGEFYVRPILIKSIAIIKKSAAIVHKKNKQISPKIANAIIKASNEIISGKLKDHFPLKVWQTGSGTQTNMNVNEVISNRAIEIFRRQK

SEQ ID NO: 177562 - protein, 142 aa, Unknown
  Bacterial polypetide isolated from the Sargasso Sea
MKTRKEFDSIGGIKVPIDKYWGASTQRSKKFFNIGKIYVPESIIRSIAIIKRSAAIVHERDGLISRNISKAIIKASNEVIGGKMKENFPLKVWQTGSGTQTNMNVNEVIANRAIEIMKGKKGSKKPVHPNDHVNKSQSTNDV

SEQ ID NO: 177563 - protein, 272 aa, Unknown
  Bacterial polypetide isolated from the Sargasso Sea
MNINEVVANRASEILGGKLGSREPVHPNDHVNLGQSSNDVIPSAIHISVYMDIANKLLPSLTKLEKSLLDKKKQFDSIIKIGRTHLQDATPISLGQEFSGYVYQIKKSINRIQDTQKSLLDLALGGTAVGTGINTHAKFGLTIADEISKYTNCDFSESKNHFESQATQDSIVHLSGSLKTLSVSLHKIANDIRWLASGPRSGIGELTLPAVQPGSSIMPGKVNPVICESLIQVCAKVIGNDSAITLGGLGGFFELNVMLPLVAYSTLESIDL

SEQ ID NO: 177564 - protein, 268 aa, Unknown
  Bacterial polypetide isolated from the Sargasso Sea
MNVNEVIANRAIEILGGKKGSKKPVHPNDHVNKSQSTNDVFPTAMHIAIAMESRKKLLPSLEMLNKELKKKVSKFKNIVKVGRTHLQDATPLSLGQEFSGYQSQLEDCITRIKNALHEIYFLAQGGTAVGTGINSRKGFDKKVIKEIRKITKLPFKPTRNKFAALAAHDQIVNFSGTLNTTAVSLMKIANDIRFLGSGPRAGYGEIVLPSNEPGSSIMPGKVNPTQSEAVTMVCVKVIGNHNGITMAGSHGHFELNVFKPLHSAQYTS

SEQ ID NO: 177565 - protein, 258 aa, Unknown
  Bacterial polypetide isolated from the Sargasso Sea
MKFRTEYDSLGKIKVPSDKYWGASTQRSNKYFDIGDFLVRPIVIKSIAMIKKAAAIVNTKNGDLDNKISKMIVRVANEIISGKHKEHFPLKVWQTGSGTQTNMNVNEVIGNRAIQLFGGKLGTKKPVHPNDHVNMSQSTNDVFPTAMHIAIAIRANGKLLPSLKLLNNELKKKSKEFNKIIKVGRTHLQDATPITLGQEFSGYHSQLTKCIKRIEYALEEIYFLAQGGTAVGTGLNTRKGFDKKIVSELRKMTKLPFK

SEQ ID NO: 177566 - protein, 272 aa, Unknown
  Bacterial polypetide isolated from the Sargasso Sea
IKIGRTHTQDATPITLGDEFSGYLKQIENNFERIKLAKKELNYLAQGGTAVGTGINAPKNFDKIFCKFLNKFTKNKYKPAKNKFEAIANHDSLVNFSNSLNSLAISLLKILNDLRFLSSGPRSGLGEINIPANEPGSSIMPGKVNPTQIEALSMICCQIMGNNLAVSQAGSQGHFELNAFKPVIIFNVINSINLLSDGINSFCINCLQGITINKENITKHLNNSLMLVTVLNKHIGYDNAAKIAKKAYKDNLTLKEAAIKLKFISEKEFDKI

SEQ ID NO: 177567 - protein, 207 aa, Unknown
  Bacterial polypetide isolated from the Sargasso Sea
MKLRKEFDSIGSINVPNDKYWGASTQRSNKFFNIGKILVNISIIKSIAIIKRSAAIVHAKDKLISGKISKAIVKASDEVIKGKLDENFPLKVWQTGSGTQTNMNVNEVIANRAIEILGGRKGTKKPVHPNDHVNKSQSTNDVFPTAMHISISTETFSKMLPNLKILEKELKKKSIEFKKIVKIGRTHLQDATPLSLGQEFSGYHTQL

SEQ ID NO: 177568 - protein, 250 aa, Unknown
  Bacterial polypetide isolated from the Sargasso Sea
RIKKGLNEIYNLAQGGTAVGTGINSKKNFDKKIIKEIKKITKLPFKPTKNKFAALAAHDEIVNFSGTLNTLAVCLMKIANDIRFLGSGPRAGYGELILPSNEPGSSIMPGKVNPTQSEAVTMVCVKVIGNHNGITMAGSHGHFELNVFKPLIAHNILQSIDLLSDSSKNFALYCIKGLKADKKKIKEYLDNSLMMVTALAPHIGYDNAAKIAKRALKNNSTLKKEALNSGLVNEKMYDVIVDPKKMIIPS

SEQ ID NO: 177569 - protein, 273 aa, Unknown
  Bacterial polypetide isolated from the Sargasso Sea
IKKSAAIVHLKDKKIDKKIAAAIIKASNEVISGKLNDNFPLKVWQTGSGTQTNMNVNEVISNRAIEILKGKKGTKKPVHPNDHVNKSQSTNDVFPTAIHIAVASKTINKLIPSLELLNKTLKHKVKEFNKIIKIGRTHLQDATPISLGQEFSGYQSQLEDSIKRIKLSLNEIFFLAQGGTAVGTGINTSKNFDKKIVKEISKLTKLPFKITKNKFAALASHDPIVNFSGSLNTTAVCLMKIANDIRFLGSGPRAGYSELILPENEAGSSIMPG

SEQ ID NO: 177570 - protein, 159 aa, Unknown
  Bacterial polypetide isolated from the Sargasso Sea
GYGELLLPENEPGSSIMPGKVNPTQCEAVTMVCVKVIGNHNGITMAGSHGHFELNVFKPLIIHNVLQSIQILSDSTKNFSKYCISGLKANKVKIKEHLDNSLMLVTALSPIIGYDNAAIIAKRALKNKTTLKAEALKSGLIKENEYDKIVDPQKMIKPL

SEQ ID NO: 177571 - protein, 255 aa, Unknown
  Bacterial polypetide isolated from the Sargasso Sea
MVSKATEFMAITKTGRTHLMDATPLTLGQEFSGYAMQLQRGMEAMHDSLQRLREIALGGTAVGTGLNTPKGFDKKVAQKISELTGLPFVTSENKFEALSAHDAMVEISGSLKRVAVSLMHIGNNIRMLASGPRCSIGEISLPANEPGSSIMPGKVNPTQCEALTMVSAQVIGNDTAVAVSGSHGHFQLNVFKPVMAHNVLESAQLLADACRSFNDHCAVGIEPNIGRIEGLLSQSLMLVTALNNHIGYYKAAEIA

SEQ ID NO: 177572 - protein, 132 aa, Unknown
  Bacterial polypetide isolated from the Sargasso Sea
MKTRKEFDSIGSINVPVDKYWGASTQRSKKYFNIGKILVNPSIIRSIAIVKRSAAIVHLKDKLISKKISNAIVKASNEIINGKLKDNFPLKVWQTGSGTQTNMNVNEVIANRAIEILRGKKGTKKPVHPNDH

SEQ ID NO: 177573 - protein, 300 aa, Unknown
  Bacterial polypetide isolated from the Sargasso Sea
MKTRKEFDSIGSINVPVDKYWGASTQRSSKYFNIGDFLVRPILIKSIAIIKKAAAIVNAKNGDLDKRISRAIIKASNEIISGKLMDNFPLKVWQTGSGTQTNMNVNEVIANRAIEILGGKKGTKKPVHPNDHVNKSQSTNDVFPTAMHMAIAMKATKKLIPNLNLLNLQLKKKSKEFKKIVKVGRTHLQDATPLTLGQEFSGYHSQLTKCIERIKIALEEIYFLAQGGTAVGTGLNTKRGFDKKIVSEIKKITKLPFKPSSNKFASLAAHDAIVNFSGTMNTTAVCFMKIANDIRFLGSG

SEQ ID NO: 177574 - protein, 146 aa, Unknown
  Bacterial polypetide isolated from the Sargasso Sea
EPGSSIMPGKVNPTQIEALSMICVQVIGNSTTVDFAGSNGHFQLNTYKPVIAFNIIQSVNLLSDGIKSFNNNCLRGLKANKEIIDNHLNNSLMLVTALNKSIGYDNAAKIAKKAYIENLTLKKAALKLKLISEKDFDKIVDPKKMV

SEQ ID NO: 177575 - protein, 245 aa, Unknown
  Bacterial polypetide isolated from the Sargasso Sea
MKINFRGAQTQRSLENFKIGREKIPTELIIALGQQKKAAAEANIELGVLNRKLGTLIIKACNDIINLKLIEEFPLVVWQTGSGTQTNMNANEVISNYIIKKLEGKIGSKEPIHPNDHVNLSQSSNDTFPTIMHVAINELSIKKLIPNLKNLIKEFQKKKKVFQKIIKIGRTHTQDATPITLGDEFSAFYTQLQSCLSRIEISQSELKYLAQGGTAVGSGINAPNKFDKVFCKYLNKLTKDNYKPS

SEQ ID NO: 177576 - protein, 117 aa, Unknown
  Bacterial polypetide isolated from the Sargasso Sea
MKYRTEFDSTGKIKVPGDKYWGASTQRSNKYFNIGDFLVRPILIQSIAIVKKSAAIVNTKNGDLDKKISKYIVRAAEEIIKGKLNNHFPLKVWQTGSGTQTNMNVNEVIANRAIQMM

SEQ ID NO: 177577 - protein, 254 aa, Unknown
  Bacterial polypetide isolated from the Sargasso Sea
EFSGYQSQLKKCITRIEIALKEIFHLAQGGTAVGTGLNTRKNFDKKVIREISKITKLPFKPASNKFAALAAHDEIVNFSGTLNTTAVCLMKIANDIRFLGSGPRAGYGELILPSNEPGSSIMPGKVNPTQSEAVTMVCVKVIGNHNGITMAGSHGHFELNVFKPLIIHNILQSINIMSDSAKTFAMYCIKGIKADKKRIKYLLDNSLMLVTALAPKIGYDKAASIAKKSHKNGTTLKEEILKQGLISDKEYDKN

SEQ ID NO: 177578 - protein, 180 aa, Unknown
  Bacterial polypetide isolated from the Sargasso Sea
TAVCLMKIANDIRFLGSGPRAGYGEIILPANEPGSSIMPGKVNPTQSEAVTMVCVKVIGNHNGITMAGSHGHFELNVFKPLIAHNILQSIDLLADSSKNFSLYCVKGIKADKEKIKYYLNESLMLVTALAPHIGYDNAAKIAKKALKNKTTLKQEAIESGLINSEDYDKIVDPKKMIYPA

SEQ ID NO: 177579 - protein, 281 aa, Unknown
  Bacterial polypetide isolated from the Sargasso Sea
KKKAKEFNKIVKVGRTHLQDATPLTLGQEFSGYHSQLTKCIERINRALEEIYFLAQGGTAVGTGLNTKKGFDKKIVSELKKMTKLPFKTAPNKFASLAAHDAIVNFSGTMNTTAVCLMKIANDIRFLGSGPRAGFGELILPENEPGSSIMPGKINPTQCEAVTMVCVKVIGNHNGITMAGSHGHFELNVFKPLIIHNILQSIHIMSDSSNSFAKYCVSGIKADKKRIKELLDNSLMLVTALAPIIGYDNAAKIAKKALKNNTTIKYEAIKSGLISEKEYKK

SEQ ID NO: 177580 - protein, 243 aa, Unknown
  Bacterial polypetide isolated from the Sargasso Sea
MKTRKEHDSIGVIKVPVDKYWGASTQRSKKYFDIGEFKVRPILIKSIAIIKKSAAIIHKKQGQIDTRIANAIIKASESVINGKLNDHFPLKVWQTGSGTQTNMNVNEVIANKAIQILGGRLGSKKPVHPNDHVNKSQSTNDVFPSAMHIAIALETKDKLLPSLDLLNKELKKKVIKFKNIIKVGRTHLQDATPLTLGQEFSGYQSQLEDTIQRIKNALKEIYLLAQGGTAVGTGINTKKNFDK

SEQ ID NO: 177581 - protein, 163 aa, Unknown
  Bacterial polypetide isolated from the Sargasso Sea
MKTREEQDSLGSIDVPVGKYYGAQTQRSFENFKIGSEKFPREFIRSYAIIKKAAATVNFNFGNLDESIMKAIHNAADEVIVGKLDDHFPLVVWQTGSGTQTNMNFNEVIANRAIEMMGGTLGSKNPVHPNDHVNMSQSTNDTFPTAINIATVESVMNNLIPSL

SEQ ID NO: 177582 - protein, 307 aa, Unknown
  Bacterial polypetide isolated from the Sargasso Sea
GTQTNMNVNEVIANRAIEILGGKKGTKRPVHPNDHVNKSQSTNDVFPTAMHMSIALTAKKSLIPSLTLLNKELKNKSKEFNKIIKVGRTHLQDATPLTLGQEFSGYHSQLSDCISRIKIALKEIYFLAQGGTAVGTGMNTKKGFDIKVVKEIKKLTKLPFKPSTNKFASLASHDAVVNFSGALNTTAVCLMKIANDIRFLGSGPRAGYGELFLPINEPGSSIMPGKINPTQCEALTMVCIKVIGNHNGITMAGSHGHFELNVFKPLIIHNVLQSIDIMSDSSKNFSKYCVRGLKANKKRIKELLDNS

SEQ ID NO: 177583 - protein, 186 aa, Unknown
  Bacterial polypetide isolated from the Sargasso Sea
METRIETDSMGEIEVPANRYYGAQTARSLIHFDIGAETMPRELIRGMGILKKASALVNAELGLMPENIKQLISKAAEEVIEGKLDDHFPLRVWQTGSGTQSNMNSNEVIANRGIELAGGVIGSKDPVHPNDHVNMGQSSNDTFPTAMHIAAVERIRDALLPSLSTLANSFKKKTIEFKDIIKIGRT

SEQ ID NO: 177584 - protein, 175 aa, Unknown
  Bacterial polypetide isolated from the Sargasso Sea
MKIANDIRFLGSGPRAGYGELILPENEPGSSIMPGKINPTQCEAVTMVCVKVIGNHNGITMAGSHGHFELNVFKPLIIHNILQSIHIMADSSKSFANYCIKDLKANKKRIKELLDNSLMLVTALTPHIGYDNAAKIAKNAFKNNTTLKHEALKSKLIKEKDYNKIVDPKKMIHPK

SEQ ID NO: 177585 - protein, 139 aa, Unknown
  Bacterial polypetide isolated from the Sargasso Sea
MKLRKEFDSIGSINVPNDKYWGASTQRSNKFFNIGKILVNISIIKSIAIIKRSAAIVHSKDKLIDNKISKAIIKASDEVIKGKLDENFPLKVWQTGSGTQTNMNVNEVIANRAIEILGGKKGTKKPVHPNDHVNKSQST

SEQ ID NO: 177586 - protein, 222 aa, Unknown
  Bacterial polypetide isolated from the Sargasso Sea
MKYRTEFDSIGKIKVPGDKYWGASTQRSNKYFDIGDFLVRPILIKSIAIVKKAAAIVNSKNGDLDKKISRYVIKAAEEVIKGKLDDNFPLKVWQTGSGTQTNMNVNEVIANRAIKMMGGKMGTKKPVHPNDHVNKSQSTNDVFPTAMHIAIATKTKNKLLPSLILLEKEIGKKTKQFSKIVKLGRTHLQDATPLTLGQEFSGYHSQLKKCIRRIENALDEIY

SEQ ID NO: 177587 - protein, 278 aa, Unknown
  Bacterial polypetide isolated from the Sargasso Sea
MSSKTKIYKNIIKIGRTHTQDATPITLGQVFSGYLEQIKNNEKRILEAKKELQFVVQGGTAVGTGINAPKNFDKYFCKNLSKITKSIYKPALNKFEGIASHDSLVNLSSALNGLATSLFKISNDIRFLASGPRAGLGEITLPANEPGSSIMPGKVNPTQIEALSMVCLQVMGNNLTTTIAGSQGHFELNTFKPVIIYNIIQSLNLLSDSMNSFVEKCLKGLKPNKKNIKENLLNSLMLVTALNDFIGYDNAAKIAKKAFKENLTLKEAAIKLKLVDIK

SEQ ID NO: 177588 - protein, 463 aa, Unknown
  Bacterial polypetide isolated from the Sargasso Sea
MTQTRTETDSFGPLQVPNSKYWGAQTQRSLLNFPIGWEKQPAAIIRALGVIKKACALANVEAGKLNKPHGMAIVEAASEVIAGKLDDHFPLVVWQTGSGTQSNMNANEVIANRAIELLGGTIGSKDPIHPNDHCNMGQSSNDTFPTAMHIATASTAHNTLIPNLRKLVDAIDVKIVEFEGIIKIGRTHTQDATPLTLSQEFSGYRHQVQKGIDRIEKSLEDIYELAQGGTAVGTGLNTSVGWDTKVAKYIAEETKLPFVSAPNKFEALASHDAMVEMSGSLKTLAASLFKIANDIRFLGSGPRCGLGELILPENEPGSSIMPGKVNPTQCEALTQVCAQVIGNDAAVGLAGSQGHFELNVFKPMISYNVIQSMHLLGDACSAFTDNLMKDLKADKHRIEKLMRESLMLVTALAPKIGYDNATTVAKTAHKNGTTLKEEAVKLGFVDDKTFDEMVKPENMVGPT

SEQ ID NO: 177589 - protein, 422 aa, Unknown
  Bacterial polypetide isolated from the Sargasso Sea
PIVIKSIAIIKKAASIVNAKNRDIDKKISRAINKAADEIISGKLKDHFPLKVWQTGSGTQTNMNVNEVISNRAIQILGGKIGSKKPVHPNDHVNKCQSTNDVFPTAMHIAIAIRSTGKLLPSLKLLNNELKKKSKKFNKIIKVGRTHLQDATPITLGQEFSGYHAQLDKCIKRIEVALQEIYFLAQGGTAVGTGLNTKKGFDKKIVSEIKKITKLPFKPSKNKFAALASHDPIVNFSGTMNTTAVCLMKIANDIRFLGSGPRAGYGELILPENEPGSSIMPGKVNPTQCEAVTMVCVKVIGNHNGITMAGSHGHFELNVFKPLIIHNILQSIHIMSDSAKSFAKYCVKGLKADKNKIKKFLDNSLMLVTALSPKIGYDNATKIAKKAHKNGTTLKDEALKSKLITEKEYDKIVDPKKMVSPH

SEQ ID NO: 177590 - protein, 460 aa, Unknown
  Bacterial polypetide isolated from the Sargasso Sea
MERDTFGEIAVPNARLWGAQTQRSLQNFRISSEKQSPELITALAVIKRAAAEVNLGLGVLDESKAKAIMQAADEIIDGKHPEEFPLAVWQTGSGTQTNMNLNEVIANRASELLGGERGEARKVHPNDDVNRGQSSNDVFPTAMHVAAAYAIVKHLLPALKTLRDTLDSKAKSFADVVKIGRTHLQDATPLTLGQEFSGYVAQLDHGMRHVESALPHLYELAQGGTAVGTGLNAHPQFADKVAAAIGKLTGLPFVSAPNKFEVMAAADALVFAHGALKTVAASLNKIANDIRWLASGPRCGLGELSIPENEPGSSIMPGKVNPTQSEAVTMLCSQVFGNDVAVNIGGASGNFELNVFRPMIAHNVLQSIRLLADGAHSFNDNCAVGIEPNRERIDTLLNESLMLVTALNPHIGYDKAAQIAKKAHKEGTTLKAAALALGYVTGQQFDEWVRPKDMVGHSAK

SEQ ID NO: 177591 - protein, 279 aa, Unknown
  Bacterial polypetide isolated from the Sargasso Sea
GRTHLQDATPLSLGQEFSGYQSQLEDCILRIKHALKEIYGLAQGGTAVGTGINSKKGFDKKIIQEIKKITKLPFKPSKNKFASLAAHDEIVNFSGTLNTTAVSLMKIANDIRFLGSGPRAGYGELILPANEPGSSIMPGKVNPTQSEAVTMVCVKVIGNHNGITMAGSHGHFELNVFKPLIAHNILQSIDLLSDSTKNFALYCIKGIKADKIKIKQFLDNSLMLVTALAPHIGYDNSAKIAKTALKNNSTLKEEALKTGLISEKDYNKIVDPKKMIYPE

SEQ ID NO: 177592 - protein, 330 aa, Unknown
  Bacterial polypetide isolated from the Sargasso Sea
NRSQSTNDVSLAAIHVAAALQLKQTLLPELNQLIASLDAKADAWRDIIKIGRTHLQDAVPLRLGDEVSAWRDRIRDGAQWLSAAQDKLLALPLGGTAVGSGLNTPERFAHEVCAELANRTGSEFQPAENLFAVMAGHDALVQAMAQLRRLAVTLLTIANDIRLLACGPRAGLGELLLPANEPGSSIMPGKVNPTQCEAMAMVCTQVIGMDAAVAAAGAGGHLQMNVYKPLIGFNLIEGIRLLQDACRCFRLNLVSGMEPDRERIAFYLERSLMLVTALTPEIGYEKASAIAQHAHREGLTLREAALQSGAITAERFDQLIDPAAMASPHR

SEQ ID NO: 177593 - protein, 229 aa, Unknown
  Bacterial polypetide isolated from the Sargasso Sea
MKLRKEFDSIGSVNVPNDKLWGASTQRSNKFFNIGKILVNISIIKSIAIVKRSAAIVHANDKLIDSRISKAIIKASDEVIKGKLDDNFPLKVWQTGSGTQTNMNVNEVIANRAIEIMGGKKGSKKPVHPNDHVNKSQSTNDVFPTAMHISIAKETLSKLLPNLKRLEKELNRKSKEFKNIVKIGRTHLQDATPLSLGQEFSGYHVQIKKSIERIEYALKEILFLAQGGT

SEQ ID NO: 177594 - protein, 448 aa, Unknown
  Bacterial polypetide isolated from the Sargasso Sea
SWVISIGGASTQRSNKYFDIGDFLVRPILIQSIGVIKKAAAIVNTKNKDLDKKISKYIIKAAEEVIKGKLDDHFPLKVWQTGSGTQTNMNVNEVISNRAIQLMGGKMGTKKPVHPNDHVNKSQSTNDVFPTAMHIAIAIKSKKKLLPSLKLLEKELGKKVNEFNKIVKLGRTHLQDATPLTLGQEFSGYHSQLKKCIERIEKALNEIYYLAQGGTAVGTGLNTRRNFDKKVVKEIKQITKLPFKPAKNKFAALAAHDAIVNFSGTMNTTAVCLMKIANDIRFLGSGPRAGYGELILPENEPGSSIMPGKVNPTQCEAVTMVCVKVIGNHNGITMAGSHGHFELNVFKPLIIHNILQSINIMADSSNGFAKYCIKGLKADKKRIKSLLDNSLMLVTALSPKIGYDNAAKVAKRAHKNGTTLKEEALKTGLINEKEFMKIVDPKKMVKPS

SEQ ID NO: 177595 - protein, 384 aa, Unknown
  Bacterial polypetide isolated from the Sargasso Sea
MKYRTEFDSIGKIKVPGDKYWGASTQRSNKYFDIGDFLVRPILIQSIAIVKKAAAIVNSRNGDLEKRIAKFIIKASDEIIKGKLDNHFPLKVWQTGSGTQTNMNVNEVISNRAIQMMGGKMGTKKPVHPNDHVNKSQSTNDVFPTAMHIAIAMKAKKKLLPSLKLLEKELSIKVKQFNKIVKLGRTHLQDATPLTLGQEFSGYHSQLKKCIERIERALNEIYYLAQGGTAVGTGLNTRKNFDKKIIKEIKKITKLPFKPAKNKFAALAAHDSIVNFSGTMNTTAVCLMKIANDIRFLGSGPRAGYGELLLPENEPGSSIMPGKVNPTQCEAVTMVCVKVIGNHNGITMAGSHGHFELNVFKPLIIHNILQSINIMSDSSKKFCQ

SEQ ID NO: 177596 - protein, 263 aa, Unknown
  Bacterial polypetide isolated from the Sargasso Sea
MKFRKEKDSMGTINVADDKYWGASTERSKKYFDIGKILVSKTLINAIAVIKLAAAKVHKNDKQIDAKICDAIVKASKEIIAGKLDGNFPLKVWQTGSGTQTNMNVNEVIANRAIQILGGKKGSKKPVHPNDHVNKSQSTNDVFPTAMHVAVALETKKKLLPSLKNLNKELKTKISKFKNIVKVGRTHLQDATPLTLGQEFSGYHSQLSDCILRIETSLKEIFFLAQGGTAVGTGINSKKNFDIKICKEISKLTKIKFYPAKNK

SEQ ID NO: 177597 - protein, 371 aa, Unknown
  Bacterial polypetide isolated from the Sargasso Sea
MKYRTEFDSLGKIKVPGDKYWGASTQRSNKYFDIGDFLVRPILIQSIAIVKKAAAIVNVKNKDLDKKISKHIIKAADEIIKGKHKDHFPLKVWQTGSGTQTNMNVNEVIANRAIQMMGGKMGTKKPVHPNDHVNKSQSTNDVFPTGMHIAIALKANKKLLPSLKLLEKELKKKVKQFNKIVKVGRTHLQDATPLTLGQEFSGYHSQLKKCIERIEGALEEIYCLAQGGTAVGTGLNTKKNFDKKIVKEISKITKLPFKIAPNKFAALAAHDSIVNFSGTMNTTAVCLMKIANDIRFLGSGPRAGYGELILPENEPGSSIMPGKINPTQCEAVTMVCVKVIGNHNGITMAGSHGHFELNVFKPLIIHNILQI

SEQ ID NO: 177598 - protein, 435 aa, Unknown
  Bacterial polypetide isolated from the Sargasso Sea
MGTRTERDSIGSVEVPSEKYYGAQTQRSYENFKIGDERFPREFIRAYGIIKKAAASVNHDFNNLDSSILSAIHKAADEVIEGKLDDHFPLVVWQTGSGTQTNMNFNEVIANRAIEIMGGEIGSKHPVHPNDHVNMSQSTNDTFPTAINIAAAEAVHHQLIPSLVNFRDALADKANKFDSIIKLGRTHLQDATPLSLGQEFSGYVSAIDHGIRRLNRSLEDCYELAMGGTAVGTGINSTEGFAEAVAKEISELTNLNFRTADNKFEALGGQDSIVELSGSLKVVAGSLFKIANDLRWLASGPRSGIGEITLPANEPGSSIMPGKVNPTQCEAMTMLCTQVMGNDVTIGFSGASGNFELNVYRPVLAYNILQSIRLLSDGCNSFTEHAIAGIEPNEERIEHNLYNSLMLVTALNPHIGYDKSAEVAKKAYKDNITLR

SEQ ID NO: 177599 - protein, 464 aa, Unknown
  Bacterial polypetide isolated from the Sargasso Sea
MSQKTRQEQDSLGKIKVANSNLWGAQTQRSIKNFRIGNDIMPIEIIHALAIIKMSCAKTNQKQKLLSPKIASAIIDSAKQVYLGKYDEHFPLSVWQTGSGTQTNMNVNEVIANIANRKISKKLGTNSPVHPNDHVNKSQSTNDSFPSAINIASKLKILSDLLPALKGMEKVLKSQSQKWKTIIKIGRTHLQDATPLSLGQEFSGYQAQINSNIRRVEGSLTNLSYLAQGGTAVGTGLNTKRGFDRLVVSEISKITKVKFKPAANKFQALASHDSIVELSGVLNVIATDLFKIANDIRLLASGPRSGLGELSLPENEPGSSIMPGKVNPTQSEALTMVCLQVMGFHNVISMAGSQGHFELNAFKPLIGLNIINSINLLASAINNFNDKCLKGIKPNVKNIKQGVENSLMLVTALAPEIGYTKAAELAKLAHKKNISLVEANKILKYLETKKIKLLLSPSKMISSY

SEQ ID NO: 177600 - protein, 386 aa, Unknown
  Bacterial polypetide isolated from the Sargasso Sea
MRLLAGKLDEHFPLKVWQTGSGTQTNMNVNEVIANRAIEKLGGKKGSKKPVHPNDHVNKSQSTNDVFPTAMHIAIAIETKNKLLPSLILLNKELKKKISKFKNIIKVGRTHLQDATPLSLGQEFSGYQSQIEDCINRINNALKEIYSLAQGGTAVGTGINSKKNFDKKIINEIKKITKLPFKPTRNKFAALAAHDEIVNFSGTLNTTAVSLMKIANDIRFLGSGPRAGYGELILPANEPGSSIMPGKVNPTQSEAVTMVCVKVIGNHNGITMAGSHGHFELNVFKPLIAHNILQSINLLADSIKNFSLYCIKGLKADKLKIKEYLDNSLMLVTALAPHIGYDNSAKIAKLALKNKTTLKHEALKSKLINEKSYDRIVNPKKMIYPA

SEQ ID NO: 177601 - protein, 442 aa, Unknown
  Bacterial polypetide isolated from the Sargasso Sea
MKYRIEKDSLGEVKVPSKALWGAQTQRAVNNFPISGIKMDFPFTKSFVSSLGLIKDAAAKANLRLKLISSKKSKAISRASKEVWQEKHHHEFPIDVFQTGSGTSSNMNANEVIANLATKYAKVEVSPNDDVNMSQSSNDVIPTAIKISAHMDLTKKLFPALDGLIKSIDDKSESLKGTIKTGRTHLMDAMPIDFYEELKAWSSQLKSSKEMLNIFEKKLLELPQGGTAVGSGINAHKQFSKYFTQEMTKLLGSKSKFSTAKNFYHELSAQDCSVQLSGELKNLAIVLMKVSNDLRWMNSGPLAGISDIELKALQPGSSIMPGKVNPVIPEAVSMACADVIGNDVTITVAAQSGNFQLNVMLPVIAYNLLKSINLLSGSMNALSKKAIKTFKVNHKNLELSLSKNPILVTALNPIIGYEKAAAIAKKAYKENKPIIEVAAEET

SEQ ID NO: 177602 - protein, 327 aa, Unknown
  Bacterial polypetide isolated from the Sargasso Sea
MKLRKEFDSIGSINVPSDKYWGASTQRSKKYFDIGEFLVRPVLIRSIALIKKAAAIVHGKNKQILPQISKAIIKASNEVMSGKLNEHFPLKVWQTGSGTQTNMNVNEVIANRAIEIMGGKKGTKKPVHPNDHVNKSQSTNDVFPTAMHIAIAMETKNKLLPSLELLNKELKKKVSQFKNIVKVGRTHLQDATPLSLGQEFSGYQSQLEDCIFRIKNALKEIYYLAQGGTAVGTGINTEKGFDKKIINEIKKITKLPFKPTKNKFAALAAHDEIVNFSGTLNTTAVCLMKIANDIRFLGSGPRAGYGEIILPANEPGSSIMPGKVNPT

SEQ ID NO: 177603 - protein, 462 aa, Unknown
  Bacterial polypetide isolated from the Sargasso Sea
MKYRIEFDSIGKIKVPGDKYWGASTQRSNKYFNIGDFLVRPIVIQSIAIIKKAAAIVNTKNKDLNPKLSRYIIKAADEIIKGKHKDHFPLKVWQTGSGTQTNMNVNEVIANRAIEMMGGKKGSKKPIHPNDHVNKSQSTNDVFPTAMHIAIALKSKEKLLPSLKLLEKELAKKSREFKNIVKVGRTHLQDATPLTLGQEFSGYQSQLKKCISRIENALKEIYHLAQGGTAVGTGLNTKKNFDKKIIKEISKITKLPFKVATNKFAALAAHDEIVNFSGTLNTTAVCLMKIANDIRFLGSGPRAGYGELILPSNEPGSSIMPGKVNPTQSEAVTMVCVKVIGNHNGITMAGSHGHFELNVFKPLIIHNILQSINIMSDSAKTFGLFCIKGIKADKKRIKHLLDNSLMLVTALAPTIGYDRAAQIAKTAHRNGTTLKEEVVKAGLINNKEYDKIMNPMKMTKPK

SEQ ID NO: 177604 - protein, 315 aa, Unknown
  Bacterial polypetide isolated from the Sargasso Sea
AMNMSTYHLLKIYTIPTLEKLHLTIKDKSKEFKNIVKIGRTHFMDATPLTLGNEFSGYSSQLGNVIKNLKEALPHLSELALGGTAVGTGLNTPKGYSKLVAKKISEITGYKFTSASNKFEALAANDAMVKASGALKSVAVSLMKIANDIRMLSSGPRSGIGEISLPANEPGSSIMPGKVNPTQCEAVTMVCSQIIGNDVAVSIGGMNGHFELNVYKPMIVHNVLNSARLLGDVSNSFNKNCAIGIKPNKNAIKNQLENSLMLVTALNPHIGYDNAAKIAKKAHAENLTLKEAAIKLGLVSAKDFDKWVDPKKMIG

SEQ ID NO: 177605 - protein, 255 aa, Unknown
  Bacterial polypetide isolated from the Sargasso Sea
MKTRKEYDSIGSINVPVDKYWGASTQRSSKYFDIGDFLVRPIVIKSIAIIKKSAAIVNAKNGDLDKRISKAIIKASNEIISGKLKDNFPLKVWQTGSGTQTNMNVNEVISNRAIEILGGKKGTKKPVHPNDHVNKSQSTNDVFPTAMHMAIAIRATGKLIPSLALLNLELKKKAKEFSKIVKVGRTHLQDATPLTLGQEFSGYHHQLTKCIERINVALGEIYFLAQGGTAVGTGLNTKRGFDKKVVAEIKKITKL

SEQ ID NO: 177606 - protein, 267 aa, Unknown
  Bacterial polypetide isolated from the Sargasso Sea
LGQEFSGYQSQLEECIKRIKVSLNEIYYLAQGGTAVGTGINTKKNFDKKIVNEIKKITKLPFKPAKNKFAALAAHDAIVNYSGTLNTTAVCLMKIANDIRFLGSGPRAGYGELILPENEPGSSIMPGKVNPTQCEAVTMVCVKVIGNHNGITMAGSHGHFELNVFKPLIIHNVLQSIQILSDSTKSFAKYCISGLKADKNRIKYLVDNSLMLVTALSPKIGYDNAAKIAKNALKNKTTLKIEAMRSGLINEKEYNKIVDPNKMIKPD

SEQ ID NO: 177607 - protein, 261 aa, Unknown
  Bacterial polypetide isolated from the Sargasso Sea
YVSQLDHGIKSLQNSLDHLSELPIGGTAVGTQLNTPKGYSKKVVEHISKNSGLSFKESQNKFEGIASHDCIVEVHGALKTLAASIYKISNDIRLMGSGPRSGIGELILPANEPGSSIMPGKVNPTQCEAISMVCAQIFGNDVAVSFAGANGHFELNVFKPLFAFNIIESSKILGDASLSFAVNCINDLKPNNKRIKKFLDDSLMLVTALNSRIGYYKAADIANKAYNEDISLKEAALALNYLSEKEFDKYVNPNRMTSNES

SEQ ID NO: 177608 - protein, 328 aa, Unknown
  Bacterial polypetide isolated from the Sargasso Sea
KSQSTNDVFPTAMHIAIAIETKNKLLPSLELLNKELKKKVSQFKNIVKVGRTHLQDATPLSLGQEFSGYQSQIQDCITRIKNALNEIYFLAQGGTAVGTGINSKKGFDRKIINEIKKITRLPFKPTKNKFAALAAHDEIVNFSGTLNTTAVSLMKIANDIRFLGSGPRAGYGELILPANEPGSSIMPGKINPTQSEAVTMVCVKVIGNHNGITMAGSHGHFELNVFKPLIAHNILQSIDLLADSTKNFSLYCIKGIKADKIKIKKYLDNSLMLVTALAPHIGYDNAAKIAKAALKNNTTLKVETLKTGLINEKTYDKIVNPRKMIYPS

SEQ ID NO: 177609 - protein, 199 aa, Unknown
  Bacterial polypetide isolated from the Sargasso Sea
MKKNKAFRIEQDSLGEVKVPKKALWGAQTQRAIENFPISGIKFRFPFGRSFIKALGAIKHSAAVANQDLGLLTAKKSNAIKSAAKMVMVGEVDDHFPLDVFQTGSGTSTNMNANEVIANIATKKLGTDIHPNDDVNMSQSSNDTIPTAICLSTLYDMEEYLLPGLDLLIAEIDKKAKNLQGTIKTGRTHLMDAMPNRIS

SEQ ID NO: 177610 - protein, 455 aa, Unknown
  Bacterial polypetide isolated from the Sargasso Sea
MTKEFRTEKDSMGEFQVPIDAKYGASTARAVENFPISKLRFSRSFIKALGEIKKACAKVNLNNKLLDKNFANSIIDAAQQVIDGDHDKDFVVDIFQTGSGTSTNMNANEIISKIASESANANIHPNDHVNMSQSSNDVIPTATNVAAVTEIVERLIPAVESLIQSLDAKGKKWDKVYKNGRTHLMDATPVSLGQEFSGYSALLSERLEDIKSSLINTSKLAIGGTAVGTGINAPENFGKDVAAEISNSLGINFFEVDNHFTRQGSREEIVHLSGSLKAFAVSMFKIANDIRWMGGGPVSGLNELIIPPLQPGSSIMPGKVNPVIPEMVMQVSAQVIGNDNTITFSSSNGNFELNTMLPVMAYNLLESIELLTTSTDVFEKKLINHLEANTEKLDENIQKNSILVTALVPVIGYDKSAEVAKEAMSQNKTIKEVLIDKNLISIEEIDELLDIEKLI

SEQ ID NO: 177611 - protein, 214 aa, Unknown
  Bacterial polypetide isolated from the Sargasso Sea
MKKRKELDSIGFINVPADKYWGASTERSNKFFNIGNILVNSSIIRSIAIIKRSAAIVHRKERLIPKNISGAIVKASNEVISGKLKNNFPLKVWQTGSGTQTNMNVNEVIANRAIEILKGKKGTKKPVHPNDHVNKSQSTNDVFPTAMHISVATETINKLLPNLKLLEIELKKKSVEFKRIVKIGRTHLQDATPLTLGQEFSGYYEQLKKSIERI

SEQ ID NO: 177612 - protein, 183 aa, Unknown
  Bacterial polypetide isolated from the Sargasso Sea
MSEGYRIEKDSMGEVRVPANALYGAQTQRAVDNFPVSGICISRPLIHALGVIKQAAAIVNSELGNIPKDVAHAIQLAAQEVIDGKLDEHFPIDIYQTGSGTSSNMNTNEVIAKRSVQLVKELSGRVHPNDHINFGQSSNDTFPTAIRIAGYIEAKNYLVPSLKYLRETFLKKGLEYSHVVKTG

SEQ ID NO: 177613 - protein, 463 aa, Unknown
  Bacterial polypetide isolated from the Sargasso Sea
MKYRIEKDSLGEIKVPAKALWGAQTQRAVNNFPISGIKMDFPFTKSFVSSLGLIKDAAAKTNLRLKLISSKKAKAISKAAKEVWQEKHHHEFPIDVFQTGSGTSSNMNANEVIANLATKYAKVIVSPNDDVNMSQSSNDVIPTAIKISAHMDLTKKLIPALDELIKTIEKKADSVKGIIKTGRTHLMDAMPIDFSEELRAWSGQLNSSKEILNILEKKFLELPQGGTAVGSGINAHKQFSKYFAQEITKLTGNKCKYIPSKNFYHELSAQDCSVQLSGELKNLAVILTKISNDLRWMNSGPLAGLSEIELKALQPGSSIMPGKVNPVIPEAVAMASADVIGNDVSITVAAQSGNFQLNVMLPVIAYNLLKSINLLSGSMEALSKKAIKTFKVNKKNLDISLSRNPILVTALNPIIGYEKASEIAKKAYKENRSIVEVASEETNIPKPKLKKLLDPSKLAKGGI

SEQ ID NO: 177614 - protein, 463 aa, Unknown
  Bacterial polypetide isolated from the Sargasso Sea
MVKYRKESDSFGFINVPSNAYWGAQTQRSLKNFDIGNETIPLSIIKSLGVIKLAAAKVNFNQGKLDKKVSNAIVKAAKEVISGKLNDHFPLSVWQTGSGTQSNMNANEVISNRAIELLGGKKGSKTPVHPNDHCNMSQSSNDTFPTAMHIACALDTKEVLLPALKRLAEALKNKSEEFKEIVKIGRTHLQDATPVTLGQEFSGYFTQLEKGIERVNKSLEDVMYLAQGGTAVGTGINSKKGFDKKFARECSLFLKMNFKTAENKFEALATHDAIVEFSGSLNTLASSLFKIANDIRLLGSGPRAGLSEIMLPENEPGSSIMPGKVNPTQCEAMTMLCVQVMGNHSAITIGGSQGHFELNVYKPMIAYNILQSIKLLADGCNSFVKNCVSGIKLNKKMIDQHLNNSLMLVTALAPVIGYDKAAEIAKKAHKNGTTLKEEAVKLNYISEKEYDKIVRPEKMIKPS

SEQ ID NO: 177615 - protein, 463 aa, Unknown
  Bacterial polypetide isolated from the Sargasso Sea
MKFRIEEDSLGKVRVPRNALWGAQTQRAIDNFPISGISMNFPFTNTFISMLGYVKDAAARANKNLKLLETKKQRVISRAAKEVWTNKHGKEFPIDVFQTGSGTSTNMNANEVIANLCYKTSKVKIHPNDDVNMSQSSNDVIPTVMSLAYYFDSTKKLMPALDLLIETLEKKADSVKGVTKTGRTHLMDAMPVDMSDELNAWNTQLKCSRESISVVLEKLLFLPQGGTAVGSGINAHKRFSKEFSKELSKLTGFKTKPSKDFFRNLSAQDLSVQLSGELKNLATVLLKISNDLRWMNSGPLSGISEIELQALQPGSSIMPGKVNPVIPEAVAMAAADVIGNDVSITVAAQSGNFQLNVMLPVIAYCNLKSVNILAGSMNVLAKKAIRTFKVNHKKIEESLSRNPILVTALNPVIGYQKAAAIAKRAYKESRPVIDVAHEETGIPVSRLKKLLDPSKLTKGGIKS

SEQ ID NO: 177616 - protein, 373 aa, Unknown
  Bacterial polypetide isolated from the Sargasso Sea
MKDNKYRVEKDSLGDVKVPKKALYGAQTQRAIDNFKISWQRFDPIFIESLAALKASCAMANYSSKLLSQKVAKSIYSSALEIHKNIKDYYDEFPIDIYQTGSGTSTNMNMNEVLSNIVSKKIKKSIHPNDDINKSQSSNDVIPTTINICGVVLAEELCDAIDYMVISMIEKEWELRDVIKSGRTHLMDAVPLSLGYEIESWREQLVHAKEVVVFSKEELEFLPIGGTAIGTSLNAPKPFPKNVCSNLNKIYSSQNIKFKPNPNKSEMMSSQNHILSMNSALLRIASTYTKICNDLRWMNSGPISGLAEISLKPLQPGSSIMPGKINPVIPEAVLMAMTQVSGHHSSTISGCMSGNFQFKYNVTNNSTQSNRLF

SEQ ID NO: 177617 - protein, 304 aa, Unknown
  Bacterial polypetide isolated from the Sargasso Sea
MPKISYRIEKDSLGEVKVPRKALWGAQTQRAVDNFPISGIKMDFPFTNSFVDSLGLIKDAAAKANKSLGLLPARKASAISKAAKEVWQSKHNEHFPLDVFQTGSGTSSNMNANEVIANLASKYSGLDIDPNDDVNMSQSSNDVIPTAIKVSAHMDLTKKLYPALDKLIVNIDKKAQSLEGLVKTGRTHLMDAMPIDFSQELSGWSSQLKNSKETLIFLEKRLLELPLGGTAIGTGINAHPRFAKVFAKELSKLSGGSCKCVPSDNFFHELSAQDTAVQVSGELKNLAIILMKISNDLRWMNSGP

SEQ ID NO: 177618 - protein, 465 aa, Unknown
  Bacterial polypetide isolated from the Sargasso Sea
MKKNKAFRIEHDSLGEVKVPKKALWGAQTQRAIENFPISGIKFRFPFGRSFIKALGAIKHSAAVANQDLGILTIKKSNAIKSAAKMVMVGEVDDHFPLDVFQTGSGTSTNMNANEVIANIATKKLGADVHPNDDVNMSQSSNDTIPTAICLSTLYDMDEYLLPGLDLLISEIDKKAKSLQGTIKTGRTHLMDAMPIDFSQELSGWSAQLKSCKTSLLNANQRMLQLPQGGTAIGTGVNSHRNFPKAFCQALEKTSGFKVKPATNFFQGLSSQDNSAELSSALKNLALVLMKICNDLRWMNSGPLTGLSDIELEALQPGSSIMPGKVNPVMPEAVSMACADVIGNDLTVSIAVQSGSFQLNVMLPVIAYNVLKSINLLGNSMPLLAKKSIKSFKVNKKNVSENLDRNPILVTALNPIIGYKKAAEIAKKAYKEKRSIVDVAEEMTAIERKELESLLDPKNLTKPYF

SEQ ID NO: 177619 - protein, 345 aa, Unknown
  Bacterial polypetide isolated from the Sargasso Sea
MKKNKAFRIEQDSLGEVKVPKKALWGAQTQRAIENFPISGIKFRFPFGRSFIKALGAIKHSAAVANQDLGLLTAKKSNAIKSAAKMVMVGDVDDHFPLDVFQTGSGTSTNMNANEVIANIATNKLGADIHPNDDVNMSQSSNDTIPTAICLSTLYDMEEYLLPGLDLLIAEIDKKAKNLQGTIKTGRTHLMDAMPIEFSQELFGWSAQLKSCKTSLVNANQRMLQLPQGGTAIGTGVNSHKNFPKAFCQALEKTSGFKVKPTANFFQGLSSQDNSAELSSALKNLALVVMKISNDLRWMNSGPLTGLSDIELEALQPGSSIMPGKVNPVVPEAVSMACADVIGND

SEQ ID NO: 177620 - protein, 399 aa, Unknown
  Bacterial polypetide isolated from the Sargasso Sea
MSDAITKACDHIIDNPDKYLNEFPVPVFQTGSGTQTNMNVNEVVANKANEILGAKLGSYKFVHPNDHVNMSQSTNDTFPTAILVGCLISAEDNLMPSLAMLEKSLISKSKEFHKIIKVGRTHLQDATPIRLGQEFSGYASMIKNDISRIKSAVEECSDLPIGGTAVGTGINTVAGFDELMCSFISEETGLSFNVCKNKFELLSSQNAISNLSAQIRICAGSLNKIANDIRWLACGPMAGIGELILPSNEPGSSIMPGKVNPTQCEAVNMVYAQILGNDSTINYAGSNGNFELNTYRPIIASSIHESITLLSEVAESFTLNALDGLKANEKKIKENLDKSLMLVTALAPKIGYEKSAEIAKKALKENISLKHSAKALGYLSEQEFDKIVKPELMVTPKKA

SEQ ID NO: 177621 - protein, 468 aa, Unknown
  Bacterial polypetide isolated from the Sargasso Sea
MVINSIFIPECFRVDVKYRSDKDSLGPVKIPADAYYGPFTGRAIKQYNVTGRPSHHNLIKSFVMIKRSAAVANMKTKAINKKQGTAIVKACDKILSGKHIDQFVVDMVNSGAGTAFNMNTNEVITNVALKGLGKKQGQYQFLHPNDHVNMSQSSNDTYPTAMHMAILFSFKEMIPVIDKLIKSINKKAKQFSKYKKLGRTHLMDALPVTLGSEFAAYVTSLTNARNQIVASQKELEQVALGGTAVGTGANTPRGYRKAVIIELSKVSKLSLKPQKDMQYALQSKFPVANASSALKNFAIELGKVSNDVRLMASGPIAGLSELGIPAVHAGSSIMPGKVNPSLAECMNMICFSVIGNDTTVSFAAQAGQFELNVMLPGMLKAVLDSTDMLTNFLPIFSANLIDGLTANQAKLRENIENSPVIVTLLTPKIGYLKSADLFKESLKTGKTIRELVVSKKLMTNKEVSSLLG

SEQ ID NO: 177622 - protein, 424 aa, Unknown
  Bacterial polypetide isolated from the Sargasso Sea
MDMRLEKDSMGELEVPSKALYGGNTRRAQLNFPISNLRFGRSFIKSLGLIKQSAAETNLELGLIEKDIANAIISSAQEVIDGDHDESFVVDIFQTGSGTSTNMNVNEVISNLSILKLGGEIGSRNPVHPNDHVNKGQSSNDVIPTAIHIAAAISIKDDLIPSMKILESSLEKKSKEFWEIVKTGRTHLQDATPIRLGQEFKGYLGQVKNSINKIELALNELSILALGGTAVGTGIGMNPEFCGEVIKRIGDKTEIKFSETDNHFQSQSTIDGIVFASGIIRSYAVSLMKIANDIRWLGSGPRAGIGEISLPEVQPGSSIMPGKVNPVIAESITMICAQVMGNDQTVSIAGQSGNFELNVMMPVAAHNLLESIEILSTGSKNFSDQCIDGLEATTKGPQMVNQGLAICTALAPKIGYDKAADIAH

SEQ ID NO: 177623 - protein, 359 aa, Unknown
  Bacterial polypetide isolated from the Sargasso Sea
ANEVIANRAIEILGGKIGSKDPVHPNDHCNMGQSSNDTFPTAMHIATAQSTNNLLIPALENLKKLIDKKIKDFDGIIKIGRTHTQDATPLMLSQEFSGYSFQISMGIERIRKSLQNVYELAQGGTAVGTGLNTVKGWDKSVAKEISEITNLPFITASNKFEALASHDSLAEFSGSLKTLAVSIFKIANDIRFLGSGPRCGIGELILPENEPGSSIMPGKVNPTQCEAITQVCIQVMGNDAAIGFAGSQGHFELNVYKPMISYNILQSIQLLADACNSFSENLLKGLKANNERIEKLMQESLMLVTALAPKIGYDNATKVAKAAHANGTTLKEEAIRMGFVDNKTFEEVVRPEKMVGPSE

SEQ ID NO: 177624 - protein, 246 aa, Unknown
  Bacterial polypetide isolated from the Sargasso Sea
MKTRKEFDSIGSINVPDNMYWGASTQRSNKYFNIGSILVDLSIIKSIAIIKRSAAIVHKKDKLISSKVANAIIKASNEVIAGKLNENFPLKVWQTGSGTQTNMNVNEVVANRAIQILKGKKGSKKPVHPNDHVNKSQSTNDVFPTAMHISIAKETIGKLIPNLKILEKSLRKKSVEFKKIVKIGRTHLQDATPLTLGQEFSGYHEQIKKSLDRIKYCLNDILFLAQGGTAVGTGINTKKNFDKKNS

SEQ ID NO: 177625 - protein, 430 aa, Unknown
  Bacterial polypetide isolated from the Sargasso Sea
MIENSLSGAVINKPTSEEIESRKPNKTNLKVRVETDTMGEIEVPADRYYGAQTARSLINFDIGEDRMPRSVIRAFGILKQAAAETNVKLGVLEDDIGKLISETCEEVISGNLDSHFPLRIWQTGSGTQTNMNANEVVANRAIEISGGKLGSKSPVHPNDHVNRAQSSNDTFPTAMHIAAAEEIQHRLIPSVLKLRHSLAEKEEEFSDIVKIGRTHLMDAVPLTLGQEFGAYVSMLDADLIRIQTALNDLYELALGGTAVGTGLNTHPDFAETVADKISEKTGLPFISAENKFAQLAAHDAIVAASGALNTLSASLMKIANDVRWLGSGPRCGFGELSLPANEPGSSIMPGKVNPTQSEAMTMVCCQVMGNHVAISIGGSQGNFELNVFKPLMIHNLLHSTRLLSDSCVSFSENCILGLRANESKIAEHLE

SEQ ID NO: 177626 - protein, 464 aa, Unknown
  Bacterial polypetide isolated from the Sargasso Sea
MKSRIEHDSFGAIAVPADRLWGAQTQRSLQHFDISGERQPMALIHALARIKSACARVNHANGLLPARTAQAIMSAADEILCGQHDEEFPLRVWQTGSGTQTNMNLNEVLANRASELLGGLRGEGRLVHPNDEVNKSQSSNDVFPSAMNLAAVTAITQHLLPALTTLRTTLAGKAAAFDDIVKIGRTHLQDATPLTLGQEFSGWVAQLEQGERHIRAALPHLCELALGGTAVGTGLNTPPGFAEAVAATLAEQTGLPLVSAPNKFEALAASDALVHGHGALKTLAASLMKIANDVRWLASGPRSGLGELLIPENEPGSSIMPGKVNPTQCEALTMLCAQVMGNDVAINIGGASGNFELNVFRPMIAHNFLQSVRLLADGMQSFHDHCAVGITPNQPRIDELLARSLMLVTALNPHIGYDKAAEIAKRAHHEGLSLREAAIASGHLTAQQFDAWVVPADMVGRRGG

SEQ ID NO: 177627 - protein, 463 aa, Unknown
  Bacterial polypetide isolated from the Sargasso Sea
MKFRIEKDSVGNVKVPAKALWGAQTQRAVDNFPISGIKMDFPFTKSFVSSLGLIKDAAAKSNLKLKLISSKKSRAISKAAKEVWQEKHHHEFPIDVFQTGSGTSSNMNANEVIANLATKYSKVKISPNDDVNMSQSSNDVIPTAIKISAHMDLTSKLYPALDTLITAIENKAKTLEGTIKTGRTHLMDAMPIDFSEELKAWSSQLTSSKEMLNILEKKLLELPQGGTAVGSGINAHKQFAKCFAQEISKLFGNKYKFVPSKNFYHELSAQDCSVQLSGELKNLALILMKISNDLRWMNSGPLAGLAEIELKALQPGSSIMPGKVNPVIPEAVAMASADVIGNDVSITVASQSGSFQLNVMLPVIAYNLLKSINLLSGAMNVLSKKAISSFKVNHANLAVSISKNPILVTALNPIIGYEKAALIAKKAYKEKRPIIDVAAEETDIPKAKLKRLLDPAKLSKGGT

SEQ ID NO: 177628 - protein, 181 aa, Unknown
  Bacterial polypetide isolated from the Sargasso Sea
MTNKKRIETDSLGSKKIDKNKLWGAQTQRSLENFKIGNEKMPTELIVALGLQKKAAALANIELGVLSKKIGLNIVNACDEIINLNLIEEFPLLVWQTGSGTQTNMNANEVISNYIIRKLGGKIGSKKPIHPNDHVNLSQSSNDTFPTIMHVAINELATKKLKPNLINLIKEFQTKIKIFKK

SEQ ID NO: 177629 - protein, 456 aa, Unknown
  Bacterial polypetide isolated from the Sargasso Sea
MNKKETRIEKDSMGEFEVPIDAMYGASTARAIENFPISELKFSRSFIRALGEIKKACAVVNQNNKLLDKKIATAIIDGAEEVISGNHDKDFAVDIFQTGSGTSTNMNANEIIAKIASDKTGESIHPNDHVNMSQSSNDVIPTATNVAAVIDVTEGLIPELDNLISLLNEKAKQWEKVYKNGRTHLMDATPVSLGQEFSGYADLINERMGDIKASLDNVQKLAIGGTAVGTGINAPDNFGADVASELQSSIGIPFKEVENHFTRQGSREEVVHLSSALKALAVSLFKIANDIRWMGSGPVSGLGDLKIPALQPGSSIMPGKVNPVIPEMMMQVSAQVIGNDTTITFSSANGNFELNTMLPVMAHNLLESIALLTTGVNVFGEKLIKDLEANTEKLNEDTQKNSILVTALVPKLGYDVAAEVAKEAMDNGLTIKDVLLSKELMTEGDIDDLLDIEKLI

SEQ ID NO: 177630 - protein, 281 aa, Unknown
  Bacterial polypetide isolated from the Sargasso Sea
MHYGGAQTQRAIDNFPISGISMNFPFTNTFISMLGYVKDAAARANKNLKLLETKKQRVISRAAKEVWTNKHGKEFPIDVFQTGSGTSTNMNANEVIANLCYKTSKVKIHPNDDVNMSQSSNDVIPTVMNLAYYFDSTKKLMPALDLLIETMEKKADSVKGVTKTGRTHLMDAMPVDMSDELNAWNSQLKCSRESISVVLEKLLFLPQGGTAVGSGINAHKRFSKEFSKELSKLTGFKTKPSKDFFRNLSAQDLSVQLSGELKNLATVLLKISNDLRWMNSG

SEQ ID NO: 177631 - protein, 464 aa, Unknown
  Bacterial polypetide isolated from the Sargasso Sea
MNEAVRMERDTFGEIAVPADRLWGAQTERSLQNFRISTEKQSPELIHALAIVKRAAAAVNQSLGVLADDKARAIIDAADEIIAGKHPREFPLAVWQTGSGTQTNMNLNEVIANRASELMGGERGEARKVHPNDDVNRGQSSNDVFPTAMHVAAAYAIVNHLLPALRTLRTTLDAKSKAFADIVKIGRTHLQDATPLTLGQEFSGYVAQLDQGIRHVESALPHLYELALGGTAVGTGLNAHPEFAVRVADEIGRLAKLPFVTAPSKFEVMAAADALVFAHGALKTVAAGLMKIANDVRWLASGPRCGLGELSIPENEPGSSIMPGKVNPTQSEAVTMLCCQVFGNDVAVNVGGASGNFELNVFRPMIAHNVLQSVRLLADGAQSFNDHCAVGIEPNRSRIDLLLNESLMLVTALNPHIGYDKSAQIAKKAHKDGTTLKAAALALGYLTEAEFDAWVRPEQMIGSQ

SEQ ID NO: 177632 - protein, 409 aa, Unknown
  Bacterial polypetide isolated from the Sargasso Sea
MKKRKEFDSIGAINVPADKYWGASTERSNKFFNIGKILVNSSIIRSIAIIKRSAAIVHKKERLIPSNISGAIVKASNEVISGKLENNFPLKVWQTGSGTQTNMNVNEVIANRAIEILKGKKGTKKPVHPNDHVNKSQSTNDVFPTAMHISVATETVNKLLPNLKLLENELKKKTIEFKKIVKIGRTHLQDATPLTLGQEFSGYYEQVKKSLERIKFSLKDILFLAQGGTAVGTGLNTKKNFDKKITREISKYCKIPFKPAPNKFSELAAHDAIVSLSGALNSCAVALMKISNDIRFLGSGPRAGYGELILPENEPGSSIMPGKVNPTQCEAVTMVCVKVIGNHTGISIAGTHGHFELNVFKPLIAHNILQSIDILADSVKNFSLYCVKGIKANKLKIKEHLDNSLMLVT

SEQ ID NO: 177633 - protein, 334 aa, Unknown
  Bacterial polypetide isolated from the Sargasso Sea
MKFRKEYDSIGSINVPVDKYWGASTQRSKKYFDIGDVLVRPKLIKSIAIIKKAAAITNYKNKDINSKIYKSIIRASSEVINGKLDSHFPLKVWQTGSGTQTNMNVNEVISNRAIEILKGKKGTKKPVHPNDHVNKSQSTNDVFPTAMHIAIAMETREKLLPSLVLLNKELKKKVREFNKIVKIGRTHLQDATPLSLGQEFSGYQSQLQDCIKRIKVSLNEIYYLAQGGTAVGTGINTKKNFDKKIVNEIKKITKLPFKPARNKFAALAAHDAIVNYSGTLNTTAVCLMKIANDIRFLGSGPRAGYGEIILPENEPGSSIMPGKGYPTQCEAVTM

SEQ ID NO: 177634 - protein, 471 aa, Unknown
  Bacterial polypetide isolated from the Sargasso Sea
MDFFSGVVLVKNRKESDSFGYINVPANAYWGAQTQRSLKNFDIGNEVIPTSIIKSLGIIKLAAAKVNNAQGKLDKKISNAIVKASKEVISGKLNDHFPLSVWQTGSGTQSNMNANEVISNRAIELLGGKKGSKTPVHPNDHCNMSQSSNDTFPTAMHIACALDTKEKLLPSLKKLSNILKTKSEEFKDTVKIGRTHLQDATPVTLGQEFSGYYTQVEKGIERVNKSLEDIMYLAQGGTAVGTGINSKKGFDKKFAKECSIFLNMKFETADNKFEALATHDAIVEFSGSLNTLSSSLFKIANDIRLLGSGPRAGLGEIQLPENEPGSSIMPGKVNPTQCEAMTMLCVQVMGNHSAITIGGSQGHLELNVYKPMIAYNILQSIKLLSDGCNSFVKNCISGIKLNKKMIDLHLNNSLMLVTSLAPVIGYDKAAEIAKKAHKNGTTLKEEAIKLKYISEKEYDKIVRPEKMIKPS

SEQ ID NO: 177635 - protein, 465 aa, Unknown
  Bacterial polypetide isolated from the Sargasso Sea
MKKNKAFRIEQDSLGEVKVPKKALWGAQTQRAVENFPISGIKFRFPFGRSFIKALGAIKHSAAVANQDLGLLTAKKSNAIKSAAKMVMVGEVDDHFPLDVFQTGSGTSTNMNANEVIANIATKKLGADIHPNDDVNMSQSSNDTIPTAICLSTLYDMEEYLLPGLDLLIAEIDKKAKNLQGTIKTGRTHLMDAMPIEFSQELSGWSAQLKSCKTSLVNANQRMLQLPQGGTAIGTGVNSHKNFPKAFCQALEKTSGFKVKPTANFFQGLSSQDNSAELSSALKNLALVVMKISNDLRWMNSGPLTGLSDIELEALQPGSSIMPGKVNPVVPEAVSMACADVIGNDLTVSIAVQSGNFQLNVMLPVIAYNVLKSINLLGNSMPLLAKKCIKSFKVNKKNISENLDRNPILVTALNPIIGYKKAAEIAKKAYKEKRSIIDVAEEMTSIERKELESLLDPKNLTKPYF

SEQ ID NO: 177636 - protein, 328 aa, Unknown
  Bacterial polypetide isolated from the Sargasso Sea
MSIATAHEVQERLIPALRTLQEALHAKVIAWGGVVKIGRTHLQDAVPVTLAQEFSGYEQQVKNSLVRAKGALIHLLELAIGGTAVGTGLNSPPGFGESMAAEISTITGLPFVSAPNKFEALAAHDAQSALSGLLKTIAISLLKIANDIRLLGSGPRAGLGELRLPENEPGSSIMPGKVNPTQCESLMQACAQVIGNDLAVTVGGASLSHFELNVAKPLIAHNNLNSIALLSDSAMSFTKNCVRGVEPDLERIDALMRSSLMLVTSLLPKIGYDNAAKISKKAHAEGTSLKEAGVALGLLTADEFDAWVRPEEMTRPQSESEGGIRSKL

SEQ ID NO: 177637 - protein, 464 aa, Unknown
  Bacterial polypetide isolated from the Sargasso Sea
MNQKTRQEQDSIGKIKVSNSNFWGAQTQRSLKNFKIGNNLMPIEIIHALVTIKMACAKVNQKQKSLAPKIANAIISASKNILTGKHDDQFPLSVWQTGSGTQTNMNVNEVIANLANKKLTGKLGTNSPVHPNDHVNKSQSTNDSFPSAINIAASKKVSDELIPALNEMEKTLGSQSKKWKSIIKIGRTHLQDATPLSLGQEFSGYQSQIDMNIKRLKTALINLNYLAQGGTAVGTGLNTKKGFDRLVANEISKINKIKFKPASNKFQALASHDSLVELSGVLNVIATDLFKIANDIRLLASGPRSGLGELNLPENEPGSSIMPGKVNPTQSEALTMACLQVMGSHNVISMAGTQGHFELNAFKPVIGFNIINSINLLSSGVTNFCDKCLKGIKPNLRNIKEGVENSLMLVTALAPEIGYEKAAELAKLAHKKNITLIEANKILKYIDVRKMKSLLNPSKMISSS

SEQ ID NO: 177638 - protein, 377 aa, Unknown
  Bacterial polypetide isolated from the Sargasso Sea
MATKNYRIERDSLGEVKVPKKALWGAQTQRAVDNFPISGIKMDFPFTKSFVSSLGLIKDAAARANARLKLLPANKAKAISRAAKEVWQEKHHHEFPIDVFQTGSGTSSNMNANEVIANLASKNSKLKIGSNDDVNMSQSSNDVIPTAIKVSAHMDLTKKLYPALDKLIDEIEKKAKTLEGITKTGRTHLMDAMPVDFSDELLAWSSQLHASRKMLSVIEERFLELPQGGTAVGSGINAHKQFAKFFAQELTKLSGNKCKCVPSGNFFHELSAQDSSVQLSGELKNLAVILMKIANDLRWMNSGPLAGLSEIELQALQPGSSIMPGKVNPVIPEAVTMVSADVIGNDASITVAAQAGNFQLNVMLPVIAYNLLKSINL

SEQ ID NO: 177639 - protein, 458 aa, Unknown
  Bacterial polypetide isolated from the Sargasso Sea
MAEKKFRIEKDSMGELKVPEESKWGPQTQRAIDNFQISDHKMPTGFIRSLALLKWGLANANKDLGLLPKEKASAIADAAIEIYEGSHSSEFPLDVFQTGSGTSTNMNMNEVISNLSSTDSNPVHPNDHVNMGQSSNDVIPSAINVDAVLTLTNNLIPSMTHLKNSIEEKAKSIGDLPKNGRTHLMDAMPITFSQEMSAWSAQIEDSITQYELSMSKLQQLAIGGTAVGTGINADPNLSKKCCNHINKLTGMEFRPANNSFQAISSQDASLILSSCNKTLAVALTKISNDLRWMNSGPLGGIGEITLPALQPGSSIMPGKVNPVIPESVCMVASRVLGNDLTITHAAQSSNFQLNVMLPLIAYTLSESLSLLSNACLSLADNAIKGFEVNQENIESMLNRNPILATALNATIGYEKGAQIVKKAYQEKRSIIDVAVEMTDLDSDTLAEILDPLKLTRNQ

SEQ ID NO: 177640 - protein, 463 aa, Unknown
  Bacterial polypetide isolated from the Sargasso Sea
MKFRTEKDSLGEVKVPAKALWGAQTQRAVNNFPISGIKMDFPFTKSFVSSLGLIKDAAARANLRLKLISTKKSKAISRAAKEVWKEKHHNEFPIDVFQTGSGTSSNMNANEVIANLASRYSKLDINPNDDVNMSQSSNDVIPTAIKLSAIMDLDGKLFPALDELIDSIEKKAKSLEGVIKTGRTHLMDAMPIDFSEELGAWASQLSASKEMLRTIEKRFFELPQGGTAVGSGINAHKNFSNYFAQELSKLCNSKKRFSPSKNFYHELSAQDCSVQLSGELKNLAIVLMKISNDLRWMNSGPLAGLSEIELKALQPGSSIMPGKVNPVIPEAVAMASADVIGNDVSITVAAQSGSFQLNVMLPVIAYNLLKSINLIAGSMKALSKNAIKTFKVNEKNLESSLSKNPILVTALNPIIGYEKAAEIAKKAYKENRPIIEVAAQETDLSKAKLLKLLDPKKLAKGGI

SEQ ID NO: 177641 - protein, 359 aa, Unknown
  Bacterial polypetide isolated from the Sargasso Sea
MNANEVIANLASKNSKLEIGPNDDVNMSQSSNDVIPTAIKVSAHMDLTQKLYPALDQLISEIENKAESVQGIVKTGRTHLMDAMPVDFSDELKAWSCQLTASRRMLEVIEERFLEMPQGGTAVGSGINAHKQFAKIFAQELTKLSRSNCKYVSSSNFYHELSAQDCSVQLSSELKNLAVILMKISNDLRWMNSGPLAGLSEIELQALQPGSSIMPGKVNPVIPEAVTMASADVIGNDVSITVAAQAGNFQLNVMLPVIAYNLLKSINLLSGAMDVLSNKAIKTFKVNKKNLEASLSRNPILVTALNPIIGYEKAAEIAKKAYKLGRPIIEVANEETDLTEAQLKRLLNPSKLTKGGISK

SEQ ID NO: 177642 - protein, 461 aa, Unknown
  Bacterial polypetide isolated from the Sargasso Sea
MTKNFRIEKDSMGTIEVPIEALWGAQTQRSIINFSIGEELIPIELIYSLTLIKKAASIANFNLGLIDKRKKDLIVEACTEILDGLHDSQFPLKVWQTGSGTQTNMNVNEVISNIAALKTNSELGSHQPIHPNDDVNKSQSTNDTFPAAIQISVVNEIIKNLVPTIRELTKILDKKSEQWKDLIKIGRTHFQDAVPLTFGQEISGWSEQLKDAENAIIISLNELYFLPLGGTAVGTGINCPKGFCEESIKSISDDTNLMFYKSKNNFSIMASHDRLAQVMSQIKILAGALFKISNDIKILSSGPRSGIYELIIPQNEPGSSIMPGKVNPTQCEALSMVCTQIMGLEYAVSMANSSGTLQMNEYKPLIGFNILTSLKLLKNVIENFRINLVDGMEPNQKKMKLNLENSLMLITAIVPKVGYEKAAEIANLAFKESLNLKEATLKLGYLNEDEFDETMNINSMI

SEQ ID NO: 177643 - protein, 162 aa, Unknown
  Bacterial polypetide isolated from the Sargasso Sea
MKFRKEYDSIGSINVPVDKYWGASTQRSKKYFDIGDILVRPKLIKSIAIIKKAAAVTNYKNKDISSKVYKSIIRASNEVIAGKLDAHFPLKVWQTGSGTQTNMNVNEVISNRAIEILKGKKGTKKPVHPNDHVNKSQSTNDVFPTAMHIAIAMETEKNYYQA

SEQ ID NO: 177644 - protein, 397 aa, Unknown
  Bacterial polypetide isolated from the Sargasso Sea
LLEATKQRVISRAAKEVWTNKHGKEFPIDVFQTGSGTSTNMNANEVIANLCYKTSKVKIHPNDDVNMSQSSNDVIPTVMNLAYYFDSTKKLMPALDLLIVTLEKKADSVKGITKTGRTHLMDAMPVDMSDELNAWNTQLKCSRESIAVVLEKLLFLPQGGTAVGSGINAHKRFSKEFAKELSKLTGFKTQPSKDFFRNLSAQDFSVQLSGELKNLATVLLKISNDLRWMNSGPLSGISEIELQALQPGSSIMPGKVNPVIPEAVAMAAADVIGNDVSITVAAQSGNFQLNVMLPVIAYCNLKSVNILAGSMNVLAKKAIKTFKVNHKKIEESLSRNPILVTALNPVIGYQKAAEIAKRAYKESRPVIDVAHEETGISVSRLKKLLDPSKLTKGGIKS

SEQ ID NO: 177645 - protein, 474 aa, Unknown
  Bacterial polypetide isolated from the Sargasso Sea
IYNITYILNMSKNQTFRAEKDSLGEVKVPKKALWGAQTQRAIENFPISGIKFKFPFGRSFIKALGLIKYSAAVANQDLGNLTIKKANALKASAKMVISGEVDEHFPLDVFQTGSGTSTNMNANEVIANLASKKLGEVVSPNDDVNMSQSSNDTIPTAICISALLDMEELLLPGLDVLIKEMDTKAKKLKGTIKTGRTHLMDAMPIDFAQEISGWSAQLKSCKNAIISANKRMLELPQGGTAIGTGVNSHKNFSKSFCEAVEKISGLKVKPASNFFQGLSSQDNAAELSSALKNLSLVLMKICNDLRWMNSGPLTGLSDIELEALQPGSSIMPGKVNPVIPEAVSMACADVLGNDLTISVAVQNGNFQLNVMLPVIAYNLLKSINLLGNCMPLLAKKCIKSFKVNKKSVLENLNRNPILVTALNPIIGYKKAAEIAKKAYQEQRAIIDVAEEMTTIERKELESLLDPKNLIKPYF

SEQ ID NO: 177646 - protein, 327 aa, Unknown
  Bacterial polypetide isolated from the Sargasso Sea
MVKFRIEKDSLGEIKVESTKLWGAQTQRSIENFQIGIGKFHFQNIFIEALALQKKSCAYANAELKLLPKNHTKIIGKVCDLIISGKFNDHFPLVVWQTGSGTQINMNLNEVIANKSNQFLGRKLPTNNPLHPNDHINMSQSSNDSIPTAMHIATVLSIKKILLPEIAFFKKSLKKKISEFKGIIKIGRTHTQDATPIKISNEFLAFYDQISYAENVIKKSLDKLYELAQGGTAVGSGVNAPKNFSKIFIKYLKKETGLPFKSAPNKYESLASHDVFIEVMSGVEILTSALFKMANDIRVLASGPRSGISELILPANEPGSSIMPGKI

SEQ ID NO: 177647 - protein, 263 aa, Unknown
  Bacterial polypetide isolated from the Sargasso Sea
MKTRKEYDSIGSVNVPVDKYWGASTQRSSKYFNIGDFLVRPIVIKSIAIIKKAAAIVNVKNQDIEKRIGNAIVRAANDVISGKLNDNFPLKVWQTGSGTQTNMNVNEVIANRAIEILGGKKGTKKPVHPNDHVNKSQSTNDVFPTAMHMAIAMNANENLLPSLNLINNELRKKTKEFNKIVKVGRTHLQDATPLTLGQEFSGYHAQLKKCIERIKRALDEIYFLAQGGTAVGTGINTKKGFDKKIVSEIKKITKLPFKKSKNK

SEQ ID NO: 177648 - protein, 108 aa, Unknown
  Bacterial polypetide isolated from the Sargasso Sea
FELNVFKPLIAHNILQSIDLLADSSKNFAKYCIKGIKANERKIKEYLDNSLMLVTALAPEIGYDNAAKIAKNALKNNTTLKHEALKSKLISLRAYNKIVNPKKMINPQ

SEQ ID NO: 177649 - protein, 343 aa, Unknown
  Bacterial polypetide isolated from the Sargasso Sea
KQNALKASAKMVISGEVDEHFPLDVFQTGSGTSTNMNANEVIANLASKKLGEVVSPNDDVNMSQSSNDTIPTAICISALLDMEDLLLPGLDVLIKEMDSKAKKLKGTIKTGRTHLMDAMPIDFAQEISGWSAQLKSCKNTIVSANKRMLELPQGGTAIGTGVNSHKNFSKSFCEAVEKISGLKVKPASNFFQGLSSQDNAAELSSALKNLSLILMKICNDLRWMNSGPLTGLSDIELEALQPGSSIMPGKVNPVIPEAVSMACADVLGNDLTISVAVQNGNFQLNVMLPVIAYNLLKSINLLGNSMPLLAKKCIKSFKVNKKSVQENLNRNPILVTALNPIIG

SEQ ID NO: 177650 - protein, 468 aa, Unknown
  Bacterial polypetide isolated from the Sargasso Sea
MVTKNYRIEKDSLGEVKVPKKALWGAQTQRAVDNFPISGIKMDFPFTKSFVSSLGLIKDAAARANSKLKLLPANKARAISRASKEVWQEKHHHEFPIDVFQTGSGTSSNMNANEVIANLASKNSKLDIGANDDVNMSQSSNDVIPTAIKVSAHMDLTKKLYPALDKLINEIDKKAESVSGIAKTGRTHLMDAMPVDFSDELKAWSSQLNASRKMLGVIEERFLEMPQGGTAVGSGINAHKQFAKIFAQELTKLSGSNCKCVPSSNFFHELSAQDCSVQLSGELKNLAVILMKISNDLRWMNSGPLAGLSEIELQALQPGSSIMPGKVNPVIPEAVTMASADVIGNDVSITVAAQAGNFQLNVMLPVIAYNLLKSINLLSGAMNVLATKAIKTFKVNKKNLETSLSRNPILVTALNPIIGYEKAAEIAKKAYKLGKPIIEVASEETDLTEAQLKKLLNPSKLTKGGISK

SEQ ID NO: 177651 - protein, 462 aa, Unknown
  Bacterial polypetide isolated from the Sargasso Sea
MKLRKEFDSIGSVNVPNDKLWGASTQRSNKFFNIGKILVNISIIKSIAIIKRSAAIVHAKDELIDNKISKAIVRASDEVIKGKLDDNFPLKVWQTGSGTQTNMNVNEVIANRAIEMMGGKKGSKKPVHPNDHVNKSQSTNDVFPTAMHISVAKETLSKLLPNLKILEKELNRKSKEFKNIVKIGRTHLQDATPLSLGQEFSGYHTQVKKSIERIEYALKEIFFLAQGGTAVGTGINSKKNFDKKIVKEIAKYTKIKFKPAPNKFAELAAHDAIVNFSGTLNTCAVALMKISNDIRFLGSGPRAGYGELILPENEPGSSIMPGKVNPTQCEAVTMVCVKVIGNHNGITMAGSHGHFELNVFKPLIAHNILQSIDLIADSTKNFAIYCVRGIKANKKKIQEHLDNSLMLVTSLAPHIGYDNAAKIAKTALKNNTTLKYETLKTGLISEKDYNKIVDPKKMIYPA

SEQ ID NO: 177652 - protein, 316 aa, Unknown
  Bacterial polypetide isolated from the Sargasso Sea
AIEMMDGEIGSKDPVHPNDHVNMSQSTNDTFPTAINIAACETVYHQLIPALTTLRDSLGQKADAFDSIIKLGRTHLQDATPISLGQEFSGYVSAIEHGIKRLENSLENCYELAMGGTAVGTGINSLEGFADAAADEISNLTGLNFRTADNKFEALGGQDCIVELSGALKVVAGSLFKIANDIRWLASGPRSGIGELILPANEPGSSIMPGKVNPTQCEAMTMLCTQVMGNDVTIGFAGASGNFELNVYRPVLAYNILQSIRLLSDGCRSFTKHAVVGIEPNQERIEHNLYNSLMLVTALNPHIGYDKASEVAKKSI

SEQ ID NO: 177653 - protein, 271 aa, Unknown
  Bacterial polypetide isolated from the Sargasso Sea
ITLGQEISSWRTQLDERILGLERALPGLYELAIGGTAVGTGLNAHPNFGEKAAAFISRETDHPFVSASNKFAALAAHDALVEVSAAERGLAMALLKIANDIRWLASGPRCGIGEIAIPENEPGSSIMPGKVNPTQCEALTMVCAQVFGNDATVAFAGSQGNFQLNVYKPVMLHNVLESADLLADGCDSMRVHCATGITPNLDRIEQHLNDSLMLVTALNTHIGYENSAKIAKKAHADGTSLKEAAVALGLVTSEQYDKWVVPVEMTRPLSV

SEQ ID NO: 177654 - protein, 126 aa, Unknown
  Bacterial polypetide isolated from the Sargasso Sea
MKLRKEFDSIGKINVPNDKYWGASTQRSKKYFDIGEFLVRPTLIKSIAIIKKAAAKVHVKEKQISPNISKAIIKASNEVISGKLNEHFPLKVWQTGSGTQTNMNVNEVIANRAIEILGGKKGSKKP

SEQ ID NO: 177655 - protein, 310 aa, Unknown
  Bacterial polypetide isolated from the Sargasso Sea
AINELTSKKLLPKLKNLILELNKKSKKFNKIIKIGRTHTQDATPITLGNEFLAFYSQVKNCYERIKIAKKELDFIAQGATAVGSGINSPKNFDKVFCKYLNKMTTNKYKPAINKYESIAAHDSLVNFSNSLNTLALSILKIINDIRLLSSGPRSGIGEIILPENEPGSSIMPGKVNPTQIEALSMVCTQVIGNNLTVCIAGSSGNFQLNTYKPVIAYNIIQSIHLLSDSIESFNKNCLKDIKANTKKISEHLNNSLMLVTSLNKHIGYDNAAKIAKKAHKENITLKEAAIKLNLVEEDEFDKIVNPKKMI

SEQ ID NO: 177656 - protein, 465 aa, Unknown
  Bacterial polypetide isolated from the Sargasso Sea
MSKNLKTRVETDSLGEIKVPKDALWGAQTQRAIENFPISGIKFKFPFGRSFLKALGVIKYSAAIANNDLGILSNKKSDAIKSAAKKVINGDVDDHFPIDIFQTGSGTSTNMNANEVIANLASAKLKDQISPNDEVNMSQSSNDTIPTAICISALLDMKELLLPGLDVLIKEIDKKEAKLKGVVKTGRTHLMDAMPIEFSQELSAWSAQLRGCKNSLNSSFKRLSELPQGGTAIGTGINSHKDFPKVFCQEVKKTIGISVKPASNFYQHLAAQDVAAEASSALKNLALALMKISNDLRWMNSGPLTGLSDIELEALQPGSSIMPGKVNPVIPEAVAMASADVIGNDLTISIAAQSGNFQLNVMLPVIAYNLLKSINLLGNAMPLLAKKCIKTFKVNKKNVSENLNRNPILVTALNRVIGYKKAAEIAKKAYKEKRSIIDVAEEMTTIERSELETLLDPKNLTKPYF

SEQ ID NO: 177657 - protein, 179 aa, Unknown
  Bacterial polypetide isolated from the Sargasso Sea
MNTRTEKDSLGPIEVPSDRYYGAQTQRSYENFKIGKERFPREFIRAYGILKKAAATVNHNFGNLDSKIMEAIHDATEEVIGGKLDGHFPLVVWQTGSGTQTNMNFNEVISNRAIEMLGGEMGSKDPVHPNDHVNMSQSTNDTFPTAINIAAVESVHHQLLPAMNELRDALNNKSMEFAS

SEQ ID NO: 177658 - protein, 462 aa, Unknown
  Bacterial polypetide isolated from the Sargasso Sea
MKKRKEFDSIGTIGVPKDKYWGASTERSNKFFNIGKILVDSSIIRSIAIIKRSAAIVHKKDQLIPGKISNAIVKASNEVISGKLNNNFPLKVWQTGSGTQTNMNVNEVIANRAIEILGGKKGSKKPVHPNDHVNKSQSTNDVFPTAIHISVATETINNLLPSLKLLESTLKKKSKEFNKIVKIGRTHLQDATPLTLGQEFSGYFEQLKKSIERIKYSLKDILFLAQGGTAVGTGLNTKKNFDKKIIREINKYCKIPFKPAPNKFSELAAHDAIVGMSGSLNACAVALMKISNDIRFLGSGPRAGYGELILPENEPGSSIMPGKVNPTQCEAVTMVCVKVIGNHTGISIAGSHGHFELNVFKPLIAHNILQSIDLLADSVKNFSLYCVKGIKANKLKIKDHLDNSLMLVTALAPRIGYDNAANIAKKALKNNTKLKEEALKTGLISEKEYDKIVNPAKMIGPS

SEQ ID NO: 177659 - protein, 461 aa, Unknown
  Bacterial polypetide isolated from the Sargasso Sea
MKKKFRIEKDSIGNKKIENSCLWGAQTQRSLENFEIGIEKIPSEIIIAIGYQKKAAALTNIQLGKLDRKIGKAIIAACDQIINSNLNNHFPLSVWQTGSGTQTNMNANEVISNYAIKKLKGKIGSKIPVHPNDHVNLSQSSNDTFPTVMHIASNQIIENKLINSLKKIKKILSSKTKIYKNIIKIGRTHTQDATPITLGQVFSGYLEQIKNNEKRILEAKKELQFVVQGGTAVGTGINSPKNFDKHFCKNLSKITKSLYKPASNKFEGIAAHDSLVNLSSALNGLATSLFKISNDLRFLASGPRAGLSEITLPANEPGSSIMPGKVNPTQIEALSMVCLQVMGNNLTTTIAGSQGHFELNAFKPVIIYNIIQSLNLLSDSINSFVEKCLKGLKPNKKNIRVNLLNSLMLVTALNEFIGYDNAAKIAKKAFKENLTLKEAATKLKLVDIKKFDGIVDPKKMI

SEQ ID NO: 177660 - protein, 270 aa, Unknown
  Bacterial polypetide isolated from the Sargasso Sea
MKFRKEFDSIGKINVQNDKYWGASTERSKKFFDIGEIYVQKILIKSIAIIKKAAAIVHKKDKQIETKIARAIIKASNEIISGKLQNNFPLKVWQTGSGTQTNMNVNEVISNRAIKILGGKLGSKKPVHPNDHVNKSQSTNDVFPTAMHIAIALETKNKLLPNLNLLNKELKKKIIKFKKIIKVGRTHLQDATPLTLGQEFSGYQSQLQDCIKRIKIAIKEIYFLAQGGTAVGTGINTKKNFDKKICKEIRKLTNINFKPSRNKFAALAAH

SEQ ID NO: 177661 - protein, 444 aa, Unknown
  Bacterial polypetide isolated from the Sargasso Sea
MKYRTEFDSIGKIKVPGDKYWGASTQRSNKYFDIGDFLVRPILIQSIAIVKKAAAIVNVKNNDLDKKIGKYIVKASDEIIKGKLNSHFPLKVWQTGSGTQTNMNVNEVIANRAIQMMSGKMGTKKPVHPNDHVNKSQSTNDVFPTAMHIAIAMKARKKLLPSLKLLEKELGKKTKQFKKIVKLGRTHLQDATPLTLGQEFSGYQSQLKKCIERIEKALNEIYYLAQGGTAVGTGLNTKKGFDKKIVKEIRQITKLPFQPSKNKFAALASHDPIVNFSGTMNTTAVCLMKIANDIRFLGSGPRAGYGELILPENEPGSSIMPGKVNPTQCEAVTMVCVKVIGNHNGITMAGSHGHFELNVFKPLIIHNILQSINIMSDSSLAFAKYCIKGLKADKKRIKFLLENSLMLVTALSPKIGYDNAAKIAKLAHKNGTTLKHEVLKSGLI

SEQ ID NO: 177662 - protein, 462 aa, Unknown
  Bacterial polypetide isolated from the Sargasso Sea
MKHRNEFDSIGKIKVPGDKYWGASTERSNKYFNIGDFLVRPIVIQSIAIIKKAAAIVNKKNGDLDARISRYIIKAADEVIRGKLDDHFPLKVWQTGSGTQTNMNVNEVISNRAIEMMKGKLGTKKPVHPNDHVNKSQSTNDVFPSAMHISIAIKTTKKLLPSLKILEKELFKKVREFKKIVKVGRTHLQDATPITLGQEFSGYHSQLKKCIQRIESALEEIYFLAQGGTAVGTGLNTKKKFDVKIIKEISKITKLPFKPAKNKFAALAAHDAIVNFSGTMNTTAVCLMKIANDIRFLGSGPRAGYGELILPSNEPGSSIMPGKVNPTQSEAVTMVCVKVIGNHNGITMAGSHGHFELNVFKPLIIHNILQSIEIMADSSKTFALYCVKGIKADRKRIKNLLDSSLMIVTALAPKIGYDNAAKIAKEAHKNGTTLKEEVLKTNLISAKDYEKIMDPIKMTKPK

SEQ ID NO: 177663 - protein, 311 aa, Unknown
  Bacterial polypetide isolated from the Sargasso Sea
MKTRKEKDSIGYVEVPINKYWGAQTQRSLVNFDIGFEKMPWEIIESFAVLKMAAAETNHELGVLNKEKMEVISVVCEEILDGKLVDHFPLVVWQTGSGTQTNMNVNEVISNRGHELMGGKISDNTKKIHPNDDVNKSQSSNDTFPTAMNMAAYHLIESYTIPSVKELEKTLSKKANDFKNIVKIGRTHFMDATPLSLGMEFSGYATQLNNGIKELKQSLKHLSEIALGGTAVGTGLNTPKGYSKIVAKKISEITGYNFVSAPNKFESLAANDAIVGASGALKKLAVALMKIGNDIRMLSSGPRSGIGEILL

SEQ ID NO: 177664 - protein, 369 aa, Unknown
  Bacterial polypetide isolated from the Sargasso Sea
MKYRIEKDSLGEVKVPSKALWGAQTQRAVNNFPISGIKMDFPFTKSFVSSLGLIKDAAAKANLRLKLISPKKSKAISRAAKEVWQEKHHHEFPIDVFQTGSGTSSNMNANEVIANLASKYAKLDVNANDDVNMSQSSNDVIPTAIKISSHMDLTKKLYPALDKLIITIEKKALSLRGTIKTGRTHLMDAMPVDFAEELYAWSSQLKSSKEMLFIIEKKLLELPQGGTAVGSGINAHKNFSKYFAQEMTKLLGKGNKCVPSKNFYHELSAQDCSVQLSGELKNLALILMKISNDLRWMNSGPLAGLSDIELEALQPGSSIMPGKVNPVIPEAVAMASADVIGNDVSITVAAQSGNFQLNVMLPSDSLQPS

SEQ ID NO: 177665 - protein, 453 aa, Unknown
  Bacterial polypetide isolated from the Sargasso Sea
MKYRTDKDSLGPVKIPADAYYGPFTGRAIKQYNVTGSPSHRNLIKSFVMIKRSAAVANMKTKAINRKQGTAIVKACDKILAGKFVDQFMVDMINSGAGTAFNMNSNEVITNVALRVLGKKQGQYEFLHPNDHVNMSQSSNDTYPTAMHMSILFSFKEMLPAIDKLIKSLNKKARQFSKYKKIGRTHLMDALPVTVGSEFAAYVTSLTNARDEIVASQKELAQVALGGTAVGTGANTPKGYRKAVITELARVSKLPLKPQKDMQYSLQSKFPVANASSALKNFAIELSKVSNDIRLMASGPVAGLSELGIPAVHAGSSIMPGKVNPSLAECMNMICFSVIGNDTTVSFASQAGQFELNVMLPGMLKAVLDSTDMLTNFLPIFSANLIDGLTANQTKLRENIENSPVIVTLLTPKIGYLKSAELFKESLKSGKTIRELVVSKKLMTDKEVTALMS

SEQ ID NO: 177666 - protein, 443 aa, Unknown
  Bacterial polypetide isolated from the Sargasso Sea
MRLEKDSMGELEVPSKALYGANTRRAQLNFPISDLRFGRSFIKALGLIKQSAAETNLELNLLDKKIAESIIISAQEVIDGDHDDSFVVDIFQTGSGTSTNMNVNEVISNLAISKMGGEIGSRNPVHPNDHVNKGQSSNDVIPTAIHIAAAISIKDDLVPSMKILKKSLQKKSDEFWNIVKTGRTHLQDATPIRLGQEFKGYYGQIENSIKKVNSGLDELSVLALGGTAVGTGIGMNPEFCGSVISKISDKTGINFSETENHFQSQSTIDGIVYASGCVRSFAVSLMKIANDIRWLGSGPRAGIGELNLPEVQPGSSIMPGKVNPVIAESVTMICAQVMGNDQTVSIAGQSGNFELNVMMPIAAHNLLESIEILSKGSDNFSKQCIEGLVATEKGPNMVNQGLAICTALAPKLGYDKAANIAHIASETGETIKQVTLKRNRINL

SEQ ID NO: 177667 - protein, 457 aa, Unknown
  Bacterial polypetide isolated from the Sargasso Sea
MGSVKVPNDRYYGAQTQRSLNNFKIGNEVFPREFIRAYGLVKKAALKVNVSAGLIDSNISKAISTAINEVISGDLDNHFPLVVWQTGSGTQTNMNVNEVIANRAIEILGGEIGSKDPVHPNDHVNMGQSTNDTFPTAINISAVESVTHNLLPNLEALRDGLNVKAKAFSKIIKLGRTHLQDATPLSLGQEFSGYVTAIDYGCQRIKNALESCYGLAMGGTAVGTGINTIEGFGEKAAEEIASLTNLPFRTAENKFEALAAQDCIVELSGALKTVAVSLFKISNDIRWLSSGPRSGIGELILPANEPGSSIMPGKINPTQCEAMTMVCTQVMGNDTSISFAGANGNFELNVYRPVIAHNILQSVRLLADACQSFLLNAVNGIEPNQKRIDDNLFNSLMLVTALNPHIGYDKAAKVAKKAYDENLSLRDAIQKLGYMTGDDFDKIVKPEKMIKPAKASK

SEQ ID NO: 177668 - protein, 392 aa, Unknown
  Bacterial polypetide isolated from the Sargasso Sea
KAINRKQALAIVKACDSVLKGKAQDQFVVDMINSGAGTAFNMNTNEVISNVALRVLGKRQGQYQFLHPNDHVNMSQSSNDTYPTAMHMAILFSLENLIPQIEKLIKSLERKAKKFSKFKKLGRTHLMDALPVTLGDEFGAYATSLTNAKDSIINSKKQLEQVALGGTAVGTGANTPRGYRKIVISELSRISKLNLKPEKDMQYSLQSKFPVTNTSSALKNFAIELGKISNDIRLMASGPIAGLGELGIPAVHAGSSIMPGKVNPSLAECMNMICFSVIGNDTTVSFSANAGQFELNVMLPVMLKAVLDSTDMLTNFLPIFSSNLIDGLSANQLKLRENIENSPVIVTLLTPKIGYQKSAELFKESLKTGKTIRELVVSKKLLTNKEVNSLLS

SEQ ID NO: 177669 - protein, 462 aa, Unknown
  Bacterial polypetide isolated from the Sargasso Sea
MKNRKEYDSIGGINVPVDKYWGASTQRSSKYFDIGDFLVRPIVIKSIAIIKKAAAIVNAKNGDLDKKISKTIVKAANEVISGKLINHFPLKVWQTGSGTQTNMNVNEVIANRAIEILGGKKGSKKPVHPNDHVNKSQSTNDVFPTAMHMAIAIEAIEKLLPSLNLLNFQLKKKSKEFNKIVKIGRTHLQDATPLTLGQEFSGYHFQLTKCIERIKKSLEEIYFLAQGGTAVGTGLNTKKGFDKKIVSEIKKITKLPFKPSPNKFASLAAHDAIVNFSGTMNTTAVCLMKIANDIRFLGSGPRAGYGELILPENEPGSSIMPGKVNPTQCEAVTMVCVKVIGNHNGITMAGSHGHFELNVFKPLIIHNILQSIHIMSDSAKSFAKYCVSGLKADKKRIKELLDNSLMLVTALAPHVGYDNAAKIAKKALKNKTKLKDEALKSGLISEKEYDKIVDPKKMINPS

SEQ ID NO: 177670 - protein, 244 aa, Unknown
  Bacterial polypetide isolated from the Sargasso Sea
EIYFLAQGGTAVGTGLNTKKGFDKKIVREIKKITKLPFKPSKNKFASLASHDAVVNFSGTMNTTAVCLMKIANDIRFLGSGPRAGYGELILPENEPGSSIMPGKVNPTQCEAVTMVCVKVIGNHNGITMAGSHGHFELNVFKPLIIHNILQSIKIMSDSSKAFAKYCIKGLKADKKRIKSLLDNSLMLVTALSPKIGYDNAAKIAKLAHKNGTTLKEEALKTGLINEREFLKIVNPKKMVKPNN

SEQ ID NO: 177671 - protein, 289 aa, Unknown
  Bacterial polypetide isolated from the Sargasso Sea
MRNKKRTEYDTLGSKRIDNKNFWGAQTQRSLENFQIGSEKIPFEIIRALGMQKKAACETNLQFRLIDKNIGAAIIKACDKIINSELNNQFPLSVWQTGSGTQTNMNINEVISNVAIKLLKGKVGTKKPVHPNDHVNLSQSSNDTFPTVMHIAINERTDEKLIPNLNNLIKELKLKTKKFNKIIKIGRTHTQDATPLTLGQEFSAYLAQIENSKKRIIYSKKDLSFLAQGGTAIGTGINSPKNFDKTFCKNLSKMTNNIYKPAKNKFAAIASHDTLVAFSNSLNSLAIEI

SEQ ID NO: 177672 - protein, 252 aa, Unknown
  Bacterial polypetide isolated from the Sargasso Sea
MSQTRTETDSFGPLEVPSEKYWGAQTQRSIINFPIGWEKQPVAIIRALGVIKQACAEANKSAGNLDEKIADAIIKAAAEVVEGQFDDNFPLVVWQTGSGTQSNMNANEVIANRAIEILGGTIGSKDPVHPNDHCNMAQSSNDTFPTAMHIATAMASSDVLMPGLEKLEKALRSKIEEFDGIIKIGRTHTQDATPIRLSQEFSGYAHQVHMGIRRISKSLEDIYELAQGGTAVGTGLNTFEGWDTTVAENISN

SEQ ID NO: 177673 - protein, 220 aa, Unknown
  Bacterial polypetide isolated from the Sargasso Sea
MKTRKEYDSIGEINVPVDKYWGASTQRSKKYFDIGEFKVRPILIKSIAIIKKSAAIVHKKERQIEPKIANAIIKASEEVIKGKLYEHFPLKVWQTGSGTQTNMNVNEVIANRAIQILKGKLGSKKPVHPNDHVNKSQSTNDVFPSAMHIAIAIETTDKLLPSLNFLNKQLKKKVRQFKKIIKVGRTHLQDATPLTLGQEFSGYQNQVEETINRIKNALKE

SEQ ID NO: 177674 - protein, 462 aa, Unknown
  Bacterial polypetide isolated from the Sargasso Sea
MKFRKEYDSIGSINVPVDKYWGASTERSKKHFNIGDVLVGSKLIKSIAIIKKAAAITNYKNKDISSKIYRSIVRASDEVIKGKLDNHFPLKVWQTGSGTQTNMNVNEVISNRAIEMLKGKKGTKKPVHPNDHVNKSQSTNDVFPTAMHIAIAMETREKLLPSLVLLNKELKKKIREFSKIVKIGRTHLQDATPLSLGQEFSGYQSQLEECIKRIEVSLNEIYYLAQGGTAVGTGINTKKNFDKKIVSEIKKITKLPFKPAKNKFAALAAHDAIVNYSGTLNTTAVCLMKVANDIRFLGSGPRAGYGELILPENEPGSSIMPGKVNPTQCEAVTMVCVKVIGNHNGITMAGSHGHFELNVFKPLIIHNVLQSIQILSDSTRSFAKYCISGLKADKNRIKHLVDNSLMLVTALSPKIGYDNAAKIAKNALKNKTTLKVEAMKSGLINEREYNKIVDPNKMIKPD

SEQ ID NO: 177675 - protein, 349 aa, Unknown
  Bacterial polypetide isolated from the Sargasso Sea
MTKNFRIEKDSMGTIEVPMEALWGAQTQRSIINFSIGEELIPIELIYSLTLIKKAASIANFNLGLIDKRKKDLIVEACTEILDGLHDSQFPLKVWQTGSGTQTNMNVNEVISNIAALKTNSELGSHQPIHPNDDVNKSQSTNDTFPAAIQISVVNEIIKNLVPTIRELTKVLDKKSEEWKDLIKIGRTHFQDAVPLTFGQEISGWSEQLKDAENAIIMSLNELYFLPLGGTAVGTGINCPKGFCEESIKSISDDTNLMFYKSKNNFSIMASHDRLAQVMSQIKILAGALFKISNDIKILSSGPRSGIYELIIPQNEPGSSIMPGKVNPTQCEALSMVCTQIMGLEYAVS

SEQ ID NO: 177676 - protein, 455 aa, Unknown
  Bacterial polypetide isolated from the Sargasso Sea
MGQIEVPDDRYYGAQTQRSLQNFKIGGEKFQRELIRAYAILKKAAAVSNESAGKLDSNISQAIIQAADEVIEGKLDEHFPLVVWQTGSGTQSNMNFNEVIANRAIEILGGQLGSKDPVHPNDHVNMSQSTNDTFPTAINIAAAEMVFNQLIPSLKKLLKSLAQKSKDFDSIVKLGRTHLQDATPLSLGQEFSGYASAINHNIERLEASLDQCYELAMGGTAVGTGINSYEGFAESVAENIASITGLPFKSASNKFEAVATQDAIVELSGSLKTLAASLFKIANDIRWLASGPRSGIGEIIIPSNEPGSSIMPGKVNPTQCEAMTMVCTQVMGNDLTISIAGASGNFELNVFRPVIAYNIIQSIRLLNDACDSFRKNCIDGITPNKDRIKSNLYDSLMLVTALNPHIGYDKAAEVAKKAHKDNTSLKEAVIELGYLSEEDFDKLVDPNKMIKPSEK

SEQ ID NO: 177677 - protein, 458 aa, Unknown
  Bacterial polypetide isolated from the Sargasso Sea
MSDKKFRIEKDSMGELNVPADSKWGPQTQRAVDNFQISDYKMPTGFIRSLALLKWGLANANKDLNLLSKEKASAIADSAMEIYQGDHMKEFPVDVFQTGSGTSTNMNMNEVISHLASSESNAIHPNDDINMGQSSNDVIPSAINVDSSLSVKNNLIPSMKHLKNAIDEKAKSIGDIPKNGRTHLMDAMPVTFSQEMSAWSAQIQDAIEQYEQSMPKIQQLAIGGTAVGTGINADPHLSEKCCKHMNNLTGMEFKPANNSFQAISSQDAALILSSSNKTLAVALTKISNDLRWMNSGPLGGLGEITLPALQPGSSIMPGKVNPVIPESVCMVAGKVFGNDLTITHAAQSGNFQLNVMLPLVAHSLSESLSLLSNACLSLADKAIKDFEVNQDNIESMLSRNPILATALNATIGYETGAQIVKKAYQEKRSIIEVATEMTDLDSKTLAELLDPVKLTRNQ

SEQ ID NO: 177678 - protein, 380 aa, Unknown
  Bacterial polypetide isolated from the Sargasso Sea
MKYRIEKDSLGEVKVPRKALWGAQTQRAVNNFPISGIKMDFPFTKSFVSSLGLIKDAAAKTNLRLKLISSKKAKAISKAAKEVWQEKHHHEFPIDVFQTGSGTSSNMNANEVIANLATKYAKVMVSPNDDVNMSQSSNDVIPTAIKISAHMDLTKKLMPALDELIKTIEKKADSVKGIIKTGRTHLMDAMPIDFSEELRAWSGQLKSSKEILNILEKKFLELPQGGTAVGSGINAHKQFSKYFAQEITKLTGNKCKYIPSKNFYHELSAQDCSVQLSGELKNLAIILTKISNDLRWMNSGPLAGLSEIELKALQPGSSIMPGKVNPVIPEAVAMASADVIGNDVSITVAAQSGNFQLNVMLPVIAYNLLKSINLLSGSMS

SEQ ID NO: 177679 - protein, 462 aa, Unknown
  Bacterial polypetide isolated from the Sargasso Sea
MKYRNEYDSLGSIKVPHDKYWGASTQRSNKHFDIGDFLVRPIVIKSIAMIKKAAAIVNQKNGSLDKKISKAIIRAADEVILGKLNDHFPLKVWQTGSGTQTNMNVNEVIANRAIEILGGKLGSKKPVHPNDHVNKSQSTNDVFPTAMHMAIAIRAKGKLLPFLKLLNEELKKKAKQFNKIIKVGRTHLQDATPITLGQEFSGYHSQLTKCIKRIEVALQEIYFLAQGGTAVGTGLNTKKGFDKKIVAEIRKITKLPFKPASNKFAALAAHDAIVNFSGTMNTTAVCLMKIANDIRFLGSGPRAGYGELILPENEPGSSIMPGKINPTQCEAVTMVCVKVIGNHNGITMAGSHGHFELNVFKPLIIHNILQSIHIMADSSKSFANYCIKGLKPDKKRIKNYLDNSLMLVTALSPKVGYDNAAKIAKRAHKNGTTLKEEAIKSGLITEKEYKKIVNPKKMIRPN

SEQ ID NO: 177680 - protein, 314 aa, Unknown
  Bacterial polypetide isolated from the Sargasso Sea
IAIAIKTKNKLLPSLELLNKELKKKVSQFKNIIKVGRTHLQDATPLSLGQEFSGYQSQLENCIFRIKNALNEIYSLAQGGTAVGTGMNSKKGFDKKIINEIKKITKLPFKPTKNKFAALAAHDEIVNFSGTLNTTAVCLMKIANDIRFLGSGPRAGYGEIILPANEPGSSIMPGKINPTQSEAVTMVCVKVIGNHNGITMAGSHGHFELNVFKPLIADNILQSIDLLADSTKNFSLYCVKGIKANKIKIKKFLDNSLMLVTALTPYIGYDNAAKIAKAALKKGTTLKEEALKTKLINENDFNQIVNPKKMIYPK

SEQ ID NO: 177681 - protein, 208 aa, Unknown
  Bacterial polypetide isolated from the Sargasso Sea
MKFRKEYDSIGSINVPVDKYWGASTERSKKYFNIGDVLVGSKLIKSIAIIKKAAAITNYKNKDISSKIYKSIVRASDEVIKGKLDNHFPLKVWQTGSGTQTNMNVNEVISNRAIEMLKGKKGTKKPVHPNDHVNKSQSTNDVFPTAMHIAIAIETREKLLPSLVLLNKELKKKIREFNKIVKIGRTHLQDATPLSLGQEFSGYPSQLE

SEQ ID NO: 177682 - protein, 180 aa, Unknown
  Bacterial polypetide isolated from the Sargasso Sea
MTNKKRTESDSLGIKKIDSKRMWGAQTQRSLENFKISNNKMPIEIIVALGMQKKAAALTNQNLGLINKYMSNAIVKACDHVINLNLLDEFPLSVWQTGSGTQTNMNANEVISNYAIKILKGKIGSKSPIHPNDHVNLSQSSNDTFPTVMHIAANELTDKKLVPAIKNLIKELKIKTKAYS

SEQ ID NO: 177683 - protein, 255 aa, Unknown
  Bacterial polypetide isolated from the Sargasso Sea
NSIVFINSANMHLKSLAQGGTAVGTGINSHPKFGTLISKEISRKVGLKFNEARNHFESQSSKDALVQLSGTLKTAATSLMKIGNDIRWLSSGPRCGFGEIILPAIQPGSSIMPGKVNPVLAESLTQVCAQVIGNDTTVSIAGQSGNFELNVMMPVMAHNIIESIQILSSCTKIFALDCIKGIKADKGKCEGYIEDSLAMCTSLAPIIGYNNAANVAKKAYSNNKTVREIVNEDKILDIKESNKVLNPKSMVKPSL

SEQ ID NO: 177684 - protein, 461 aa, Unknown
  Bacterial polypetide isolated from the Sargasso Sea
MKFRIEKDSLGEVKVPSKALWGAQTQRAINNFPISGIKMDFPFTKSFVSSLGIIKDAAAKANLKLKLISSKKSKSISKAAKEIWQEKHHHEFPIDVFQTGSGTSSNMNANEVIANLASKYSKTSISPNDDVNMSQSSNDVIPTAIKISAHMDLTSKLLPALENLIKDIDSKAVSVEGVIKTGRTHLMDAMPIDFAEEIGAWSSQLKSSKEMLHILENKLLQLPQGGTAVGSGINAHKQFAKNFSIEVSKLLKHKFVPSKNFYHELSAQDTSVQLSGELKNLAIVLMKISNDLRWMNSGPLAGLSEIELKALQPGSSIMPGKVNPVIPEAVAMVSADVIGNDASISVAAQSGNFQLNVMLPVIAYNLLKSISLLAGSMSVLSKKAIKSFKVNHNNLNESLQKNPILVTALNPIIGYEKAAFIAKKAYKEKRPIIDVAEEETNISKAKLAKLLNPSKLSKGGI

SEQ ID NO: 177685 - protein, 155 aa, Unknown
  Bacterial polypetide isolated from the Sargasso Sea
MKLRKEFDSIGSINVPGDKYWGASTQRSKKYFDIGEFLVRPVLIRSIAIIKKAAAIVHGKEKQILPQISKAIIKASNEVISGKLDEHFPLKVWQTGSGTQTNMNVNEVIANRAIEILGGKKGSKKPVHPNDHVNKSQSTNDVFSTAMHIAIAMET

SEQ ID NO: 177686 - protein, 165 aa, Unknown
  Bacterial polypetide isolated from the Sargasso Sea
MKDGFRIEKDSMGEVKVPKDALYAAQTQRAVDNFPVSGIPIRRPLISALGMIKSSAARVNGVSGAIPEEVAALIQSAAKEVIEGKLDEHFPIDIYQTGSGTSSNMNANEVIANRASQLSTEKNLKVHPNDHVNCGQSSNDTFPTAIRIAAVMETQADLIPALREL

SEQ ID NO: 177687 - protein, 339 aa, Unknown
  Bacterial polypetide isolated from the Sargasso Sea
MSFRIEQDSIGKIKVPSKAYYGAQTQRAIQNFEIGWSMEFSLILPYIIVKKCAAKTNYAQKNISKKLSDAIIKACNHILDNPDQYLNEFPVPVFQTGSGTQTNMNVNEVVANKANEILGAKLGSYKFVHPNDHVNMSQSTNDTFPTAILVGSVISSEDNLLPALTMLEKSLVAKSKEFHTIIKVGRTHLQDATPIRLGQEFSGYASMIKNDILRIKHALKECSDLPIGGTAVGTGINTISGFDELMCSFISEETGLSFNVCKNKFELLSSQNAISNLSAQIRICAGSLNKIANDIRWLACGPMAGIGELILPSNEPGSSIMPGKVNPTQCEAVNMVYAQ

SEQ ID NO: 177688 - protein, 164 aa, Unknown
  Bacterial polypetide isolated from the Sargasso Sea
MDYRIEKDTLGEVKVPKDSLWGAQTERSKKNFKIGNPSSMPIEIIQAYAILKKSAAIANQDLGVLSKEKSKLIQTVCDEIIANKHNEQFPLVIWQTGSGTQTNMNVNEVISNRAHIIEGKRLGESEKTLSPNDDVNLSQSSNDSFPTAINIAAMKIITDNTLVN

SEQ ID NO: 177689 - protein, 320 aa, Unknown
  Bacterial polypetide isolated from the Sargasso Sea
MKFRIEEDSLGKVRVPRNALWGAQTQRAIDNFPISGISMNFPFTNTFISMLGYVKDAAARANKNLKLLEAKKQRVISRAAKEVWTNKHGKEFPIDVFQTGSGTSTNMNANEVIANLCYKTSKVKIHPNDDVNMSQSSNDVIPTVMNLAYYFDSIKKLMPALDLLIETLEKKADSVKGVTKTGRTHLMDAMPVDMSDELNAWNTQLKCSRESIAVVLEKLLFLPQGGTAVGSGINAHKRFSKEFSKELSKLTGFKTKPSKDFYRNLSAQDLSVQLSGELKNLATVLLKISNDLRWMNSGPLSGIAEIELQALQPGSSIMPG

SEQ ID NO: 177690 - protein, 370 aa, Unknown
  Bacterial polypetide isolated from the Sargasso Sea
MKYREEFDSIGKIKVPGDKYWGASTERSNKFFNIGDFLVRPIVIKSIAIIKKAAAIVNAENKDLDSKISKFIIKAADEVIRGKLDNHFPLKVWQTGSGTQTNMNVNEVIANRAIQMMGGKLGSKKPVHPNDHVNKSQSTNDVFPTAMHIAIALRTRTKLLPSLKLLEKELAKKSREFKNIVKVGRTHLQDATPLTLGQEFSGYHAQLKNCIYRIENALKEIYFLAQGGTAVGTGLNTKKNFDKKIIKKISKITKLPFKPASNKFSALAAHDEIVNFSGTLNTAAVCLMKIANDIRFLGSGPRAGYGELILPSNEPGSSIMPGKVNPTQSEAVTMVCVKVIGNHNGITMAGSHGHFELNVFKPLIIHNILQ

SEQ ID NO: 177691 - protein, 379 aa, Unknown
  Bacterial polypetide isolated from the Sargasso Sea
LDDNFPLKVWQTGSGTQTNMNVNEVIANRAIEIMGGKKGSKKPVHPNDHVNKSQSTNDVFPTAMHIAIALKTKNKLLPSLYLLNKSLKKKVKEFSKIIKIGRTHLQDATPLSLGQEFSGYQAQVQESIYRIEHSLNEIYYLAQGGTAVGTGINTRKNFDKKIVNEIKKITKLPFKPTKNKFAALAAHDAVVNFSGALNTSAVSLMKIANDIRFLGSGPRAGYGELMLPENEPGSSIMPGKVNPTQCEALTMVCVKVIGNHNGITIAGSHGHFELNVFKPLIIHNTLQSINLLSDSIKNFSNFCVEGIKADKKKIKELLDNSLMLVTALTPKIGYDNAAKIAKTALKNNTTLKHEALKSRLISKKDYEKLIDPIKMTRPN

SEQ ID NO: 177692 - protein, 312 aa, Unknown
  Bacterial polypetide isolated from the Sargasso Sea
MSQKTRQEQDSLGKILVSNDKLWGAQTQRSIKNFKIGNDKMPIEIIHALTIVKMSCAKANQKQKLLSPKIANAISNAAKQILKHKFDDHFPLSVWQTGSGTQTNMNVNEVIANIANKKLTGKLGTNNPVHPNDHVNKSQSTNDSFPTAMHIATSMKLIHDLIPALIAIEKTLKSQSQKWNSLIKIGRTHLQDATPLSLGQEFSGYSAQITSNIKRVNSSLENVLSLAQGGTAVGTGMNTKKNFDKLVVSEIAKVTKIKFRPSDNKYQSLASHDAIVEVSGVINTIATDLFKIANDIRLLASGPRSGLSELNL

SEQ ID NO: 177693 - protein, 297 aa, Unknown
  Bacterial polypetide isolated from the Sargasso Sea
KVWQTGSGTQTNMNVNEVIANRAIEILGGKKGSKKPVHPNDHVNKSQSTNDVFPTAMHIAIAIETTNKLIPSLELLNKELKKKVTKFKSIIKVGRTHLQDATPLSLGQEFSGYQSQLEDCIKRIKNALNEIYFLAQGGTAVGTGINSKKGFDKKIIKEIKKITKLPFKPTKNKFAALAAHDEIVNFSGALNTTAVCLMKIANDIRFLGSGPRAGYGELILPANEPGSSIMPGKVNPTQSEAVTMVCVKVIGNHNGITMAGSHGHFELNVFKPLIAHNILQSIDLLSDSTKKFFSFLY

SEQ ID NO: 177694 - protein, 279 aa, Unknown
  Bacterial polypetide isolated from the Sargasso Sea
MKYRIEEDTLGKVKVPRGALWGAQTQRAVDNFPISGISMNFPFTPTFIQVLGKIKDAAARANNKLKLLPTNKQRAISKAAKEVWQNKHGKQFPIDVFQTGSGTSTNMNANEVIANLASKYSKLDINPNDDVNMSQSSNDVIPTAMHCAYYVDTAEKLMPAMDLLIDTIAKKIAQYHGVVKTGRTHLMDAMPLTIDQELGAWNSQLLNARASLITVLDALRFLPQGGTAVGTGINAHPRFAREFCKAISPLVGFKAETSNDYFRNLSSQDLSVQLSGELK

SEQ ID NO: 177695 - protein, 438 aa, Unknown
  Bacterial polypetide isolated from the Sargasso Sea
MKFRTESDTLGKVQIPSESLWGPQTQRSINNFKIGDPGSMPIEIVYAYAILKKACSKSNHELGAIEKDKMILINEACQEIIDGKHDEQFPLVIWQTGSGTQTNMNVNEVITNIAHRLEGKDLNSNDKTLKPNDDVNKSQSSNDTFPTAMHIAAYKLLVEKTIPAIKDFYKTLKIKEKEFKDDVKIGRTHLMDATPLTLGQEFSGYASQIEHGLKTLNNSLDHLSELAIGGTAVGTGLNTPKNFDKITVENISKECNINFKVADNKFEALAAHDAIVETHAAIKQLAVSTYKIANDIRLLGSGPRAGFSELILPANEPGSSIMPGKINPTQCEAICMVCAQIIGNDYTISFAGSQGHLELNVYKPLMAAKIIESLKLFSDGIISFNKNCVKGLKANKKKINEHLNNSLMLVTALNNKIGYYKAAEIANNAYKNGTTLKE

SEQ ID NO: 177696 - protein, 170 aa, Unknown
  Bacterial polypetide isolated from the Sargasso Sea
MSQTRTETDSFGPLEVPSEKYWGAQTQRSIINFPIGWEKQPVAIIRALGVIKQACAEANKSAGNLDEKIADAIIKAAAEVVEGQFDDNFPLVVWQTGSGTQSNMNANEVIANRAIEILGGTIGSKDPVHPNDHCNMAQSSNDTFPTAMHIATAMASSDVLIPGLEKLEKL

SEQ ID NO: 177697 - protein, 456 aa, Unknown
  Bacterial polypetide isolated from the Sargasso Sea
MNKKNTRIEKDSMGEFEVPESALYGASTARAVENFPISDLKFSRTFIRSLAEIKKACALVNQKNKLLEKDITTAIVESAQEVIDGKHDDDFVLDIFQTGSGTSTNMNANEVIARLASEKSGSEVHPNDHVNMSQSSNDVIPTATNVAAVLEATEGLIPELKGLVSLLEEKGKDWDKVYKNGRTHLMDATPVTLGQEFMGYAALVSERMQDVDNSLDNVRKLAIGGTAVGTGINAPDGFGADVAKEIKKSLSTDFEEVDNHFTRQGSRDEIVQLSGALKSLAVSLFKIANDIRWMGSGPISGLNELKIPALQPGSSIMPGKVNPVIPEMMMQVSAQVIGNDTAITFAAANGNFELNTMLPVMAHNVLESIAILSTSTKVFGEKLIKGLEANTEKLEGNIQKNSILVTALVPKLGYDTAAEVAKEAMSNDKTIKEVLLEKDLLSEAEIDELLDIEKLI

SEQ ID NO: 177698 - protein, 125 aa, Unknown
  Bacterial polypetide isolated from the Sargasso Sea
MKYRTEFDSIGRIKVPGDKYWGASTQRSNKYFDIGDFLVRPILIQSIAIVKKAAAIVNSKNGDLDRKLSKYIIKAADEVVKGKLDKHFPLKVWQTGSGTQTNMNVNEVIANRAIQMMGGKMGTKK

SEQ ID NO: 177699 - protein, 316 aa, Unknown
  Bacterial polypetide isolated from the Sargasso Sea
MHISVAQQTIVKMLLNLKILEKELKKKSLEFKSIVKIGRTHLQDATPLSLGQEFSGYHFQVKKSIERIEYALKEILFLAQGGTAVGTGINSKKNFDKKIVKEIAKFTKINFKPAPNKFAELAAHDAIVNFSGALNTCAVALMKISNDIRFLGSGPRAGYGELILPENEPGSSIMPGKVNPTQCEAVTMVCVKVIGNHNGITMAGSHGHFELNVFKPLIAHNILQSIDLIADSTKNFALFCVKGIKANKKKIQEHLDNSLMLVTALAPHIGYDNAAKIAKSALKNRTTLKHETLKTGLIKEKDYKRIVNPKKMIYPG

SEQ ID NO: 177700 - protein, 185 aa, Unknown
  Bacterial polypetide isolated from the Sargasso Sea
MKNRKEYDSIGGINVPVDKYWGASTQRSSKYFDIGDFLVRPIVIKSIAIIKKAAAIVNAKNGDLDRKISKTIVRAANEVISGKLISHFPLKVWQTGSGTQTNMNVNEVIANRAIEILGGKKGSKKPVHPNDHVNKSQSTNDVFPTAMHMAIAIKATGELIPSLNLLNLQLKKKSKEFKKILKWKN

SEQ ID NO: 177701 - protein, 391 aa, Unknown
  Bacterial polypetide isolated from the Sargasso Sea
MKYRIEFDSIGKIKVPGDKYWGASTERSNKYFNIGDFLVRPLVIQAIAIVKKAAAIVNTKNKDLEPKLSRYIIKASEEVISGKHDKHFPLKVWQTGSGTQTNMNVNEVIANRAIQMMGGKMGTKKPIHPNDHVNKSQSTNDVFPTAMHIAIALKAREKLIPSLKLLEKELLKKSQQFNRIVKVGRTHLQDATPLTLGQEFSGYYTQLKKCIVRIEAALKEIYYLAQGGTAVGTGLNTKKNFDKKIIREISKITKLPFKPSSNKFAALAAHDEIVNFSGTLNTTAVCLMKIANDIRFLGSGPRAGYGELILPSNEPGSSIMPGKVNPTQSEAVTMVCVKVIGNHNGITMAGSHGHFELNVFKPLIIHNILQSIEIMSDSAKTFALYCVRGIK

SEQ ID NO: 177702 - protein, 454 aa, Unknown
  Bacterial polypetide isolated from the Sargasso Sea
MNKKETRIEKDSMGEFEVPIDAMYGASTARAIENFPISDLKFSRSFIRALGEIKKACAVVNQNNQLLDKKIATAIIDGAQEVISGNHDKDFAVDIFQTGSGTSTNMNANEIIAKIASDKTGESIHPNDHVNMSQSSNDVIPTATNVAAVIDVTQGLIPELSNLISLLYEKAKQWEKVYKNGRTHLMDATPVSLGQEFSGYADLINERMGDIKASLDNVQKLAIGGTAVGTGINAPDNFGADVANELQSSIGIPFKEVENHFTRQGSREEVVHLSSALKALAVSLFKIANDIRWMGSGPVSGLGDLKIPALQPGSSIMPGKVNPVIPEMMMQVSAQVIGNDTTITFSSANGNFELNTMLPVMAHNLLESVALLTTGVSVFGEKLIKDLEANTEKLNEDTQKNSILVTALVPKLGYDVAAEVAKEAMENGLTIKDVLLSKELMSEGDIDDLLDIEK

SEQ ID NO: 177703 - protein, 466 aa, Unknown
  Bacterial polypetide isolated from the Sargasso Sea
MATKKIRIEKDSLGEVKVPKDALWGAQTQRAVNNFPISGIKMDFPFTKSFVSTLGIIKDAAARANLRLKLLPAKKAKAISKAAKEVWQEKHHKEFPIDVFQTGSGTSSNMNANEVIANLASKYAKTPVSPNDDVNMSQSSNDVIPTAIKVSAHMDLTKKLYPALDNLINEIEKKAKSVEGLVKTGRTHLMDAMPIDLSDELRAWTSQLGASRNMLGIIEQRFLELPQGGTAVGSGINAHKQFAKYFAQEMTKLSGNKCVPSENFFHELSAQDCSVQLSGELKNLAVILMKISNDLRWMNSGPLAGFSEIELQALQPGSSIMPGKVNPVIPEAVTMASADVIGNDVTITIAAQAGNFQLNVMLPVIAYNLLKSINLLAGAMNVLSAKGVKTFKVNKKNIVESLSMNPILVTALNPIIGYEKAAEIAKKAYKEGRPIIDVAVEETDLSESRLKKLLDPSKLTKGGISK

SEQ ID NO: 177704 - protein, 442 aa, Unknown
  Bacterial polypetide isolated from the Sargasso Sea
GAQTQRSINNFAIGHQKIPAELIHALARIKQCCAAVNGRHGLLNDQQVALIEGAGQAIQTGQHDHHFPLSVWQTGSGTQTNMNVNEVISNLAAQHSGESLGSHRPLHPNDHINRSQSTNDVFPAAIHVAAALQLQQELLPELKRLIASLDAKADAWQDIIKIGRTHLQDAVPLRLGDEVSAWRDRLSDGVHWLTTAHQDLLALPLGGTAVGSGLNTPDRFAHEVCAELASRTGSTFQPAKNLFAVMAGHDALVQSMAQLRRLAVTLLTIANDIRLLACGPRAGLGELLLPANEPGSSIMPGKVNPTQCEAMAMVCTQVIGMDAAVAAAGAGGHLQMNVYKPLIGFNLIEGIRLLQDACRCFRLNLVTGMEADRDRIAFYVERSLMLVTALTPEIGYEKACAIAQHAHRDGLTLREAAMQSGAITGERFDQLIDPAAMASPHR

SEQ ID NO: 177705 - protein, 355 aa, Unknown
  Bacterial polypetide isolated from the Sargasso Sea
MKFRIEEDSLGKVRVPRNALWGAQTQRAIDNFPISGISMNFPFTNTFISMLGYVKDAAARANKNLKLLEAKKQRVISRAAKEVWTNKHGKEFPIDVFQTGSGTSTNMNANEVIANLCYKTSKVKIHPNDDVNMSQSSNDVIPTVMNLAYYFDSTKKLMPALDLLIETLEKKADSVKGVTKTGRTHLMDAMPVDMSDELNAWNTQLKCSRESISVVLEKLLFLPQGGTAVGSGINAHKRFSKEFSKELSKLTGFKTKPSKDFYRNLSAQDLSVQLSGELKNLATVLLKISNDLRWMNSGPLSGISEIELQALQPGSSIMPGKVNPVIPEAVAMAAADVIGNDVSITVAAQSGNFQL

SEQ ID NO: 177706 - protein, 463 aa, Unknown
  Bacterial polypetide isolated from the Sargasso Sea
MKYRTEFDSIGKIKVPGDKYWGASTQRSNKYFDIGDFLVRPILIRSIAIVKKAAAIVNTKNKDLDKKLSKYIVRASDEIIKGKLDEHFPLKVWQTGSGTQTNMNVNEVISNRAIQLMGGKMGTKKPVHPNDHVNKSQSTNDVFPTAMHIAIALKTRSKLLPSLKLLEKELGKKVKQFNNIVKLGRTHLQDATPLTLGQEFSGYHSQLKKCIERIEKSLGEIYFLAQGGTAVGTGLNTKKGFDKKVVREISKITKLPFKPTKNKFAALASHDPIVNFSGTMNTTAVCLMKIANDIRFLGSGPRAGYGELVLPENEPGSSIMPGKVNPTQCEAVTMVCVKVIGNHNGITMAGSHGHFELNVFKPLIIHNILQSINIMADSSKAFANFCIKGLKADKKRIGSLLENSLMLVTALSPKLGYDNAAKIAKSAHKNGTSLKVEALKTGLITEKDFLKIVNPKKMTRPGK

SEQ ID NO: 177707 - protein, 140 aa, Unknown
  Bacterial polypetide isolated from the Sargasso Sea
MKLRKEFDSIGSVNVPNDKLWGASTQRSNKFFNIGKILVNISIIKSIAIIKRSAAIVHEKDELIDNKISKAIVRASDEVIKGKLDDNFPLKVWQTGSGTQTNMNVNEVIANRAIEMMGGKKGSKKPVHPNGSCKQITIYK

SEQ ID NO: 177708 - protein, 297 aa, Unknown
  Bacterial polypetide isolated from the Sargasso Sea
MKLRKEFDSIGSVNVPNDKLWGASTQRSNKFFNIGKILVNISIIKSIAIIKRSAAIVHAKDELIDNKISKAIVRASDEVIKGKLDDNFPLKVWQTGSGTQTNMNVNEVIANRAIEMMGGKKGSKKPVHPNDHVNKSQSTNDVFPTAMHISVAKETLSKLLPNLKILEKELNRKSKEFKSIVKIGRTHLQDATPLSLGQEFSGYHTQVKKSIERIEYSLKEIFFLAQGGTAVGTGINSKKNFDKKIVKEIAKYTKIKFKPAPNKFAELAAHDAIVNFSGTLNTCAVALMKISNDIRFL

SEQ ID NO: 177709 - protein, 367 aa, Unknown
  Bacterial polypetide isolated from the Sargasso Sea
FQTGSGTSSNMNANEVIATLATKYAKVKVGPNDDVNMSQSSNDVIPTAIKISAHMDLTKKLFPKLDELIKTIEKKAESVKGTIKTGRTHLMDAMPIDFAEELIAWSSQLKSSKDMLCIIEKKFLELPQGGTAVGSGINAHKQFAKYFAQEMTKLAGNKYKCVPSKNFYHELSAQDCSVQLSGELKNLAVILMKISNDLRWMNSGPLAGLSEIELKALQPGSSIMPGKVNPVIPEAVAMASADVIGNDVSITVAAQSGTFQLNVMLPVIAYNLLKSINLLSGAMDVLSKKAIKTFKVNNKNLEKSLSKNPILVTALNPIIGYEKAAAIAKKAYKENRPIIDVAAEETDFTKAKLIRLLDPSKLSKGGI

SEQ ID NO: 177710 - protein, 465 aa, Unknown
  Bacterial polypetide isolated from the Sargasso Sea
MDYRIEKDTLGEVKVPINSLWGAQTERSRNNFKIGNPSSMPLEIIHAYAILKKSAAQTNYNLGQLSKEKCNLIESVCNEILEEMHNDQFPLVIWQTGSGTQTNMNINEVISNRAHIIEGKELGKSDKTLSPNDDVNLSQSSNDTFPTAINIAAMKLITENTIPNIKKLRDSLEKKSKEFNEIVKIGRTHLMDATPITLGQEFSGYVSQLDHGIKSLQNSLDHLSELPIGGTAVGTKLNTPKGYSKNVVENISKNSGLSFKESPNKFEGIASHDCIVKVHGALKTLAASIYKISNDIRLMGSGPRSGIGELILPANEPGSSIMPGKVNPTQCEAISMVCAQIFGNDVAVSFAGASGHFELNVFKPLFACNIIESSKILGDASLSFALNCIDGIEPNNKRIKKFLDDSLMLVTSLNSKIGYYKAADIANKAYKEDITLKEAALALNYLSEKEFDEYVNPNRMTNNDS

SEQ ID NO: 177711 - protein, 393 aa, Unknown
  Bacterial polypetide isolated from the Sargasso Sea
MSQKTRQEQDSLGKIKVANTNLWGAQTQRSLKNFRIGNNIMPIEIIHALAIIKMSCAKANQKQKLLSPKIASAIIDAAKQVSLGKYDEHFPLSVWQTGSGTQTNMNVNEVIANIANRKISKKLGTNSPVHPNDHVNKSQSTNDSFPSAINIACKLKIVSELVPALKSMEKVLKSQSQKWKSIIKIGRTHLQDATPLSLGQEFSGYQAQINSNIRRVEGALTNLSYLAQGGTAVGTGLNTKRGFDQLVVTEISKITKSKFKPAANKFQALASHDSIVELSGVLNVIATDLFKIGNDIRLLASGPRSGLGELNLPENEPGSSIMPGKVNPTQSEALTMVCLQVMGFHNVISMAGSQGHFELNAFKPLIGLNIINSINLLASAINNFNEKCLKGIK

SEQ ID NO: 177712 - protein, 461 aa, Unknown
  Bacterial polypetide isolated from the Sargasso Sea
MTKNFRFEKDSMGQIKVPSKALWGAQTQRSIINFSIGEELIPIELIYSLTVIKRAAAISNFKLGLINNVKKDLIIEACTEILDGKHDSQFPLKIWQTGSGTQTNMNINEVISNIAALKTNSELGSHHPIHPNDDVNKSQSTNDTFPAAIQISVVTQIIKKLVPSIKELTKVLDSKSNKWKDLIKIGRTHFQDAVPISLGQEVSAWSKQLKDAEDALIISLDELCFLPLGGTAVGTGINCPKDFSKESIKSISEYTGLFFYKSKNHFSLMASHDRLAQVMGQIKILASALFKVSNDIKILSSGPRSGIYELIIPKNEPGSSIMPGKVNPTQCEALSMVCTQVMGFEYAVSIANASGTLQMNEYKPLIGFNILTSIKLLNHAISNFRLKLVEGIQPNPKTIKANLENSLMLVTALVPKIGYEKAAEIANLAFNESINLKEATIKLGYLTANDFEDAINTNKMI

SEQ ID NO: 177713 - protein, 450 aa, Unknown
  Bacterial polypetide isolated from the Sargasso Sea
GQVPKDALYAAQTQRAVDNFPVSGIPIRRPLITALGMIKSSAARVNGASGAIPEEVAALIQSAAQEVIEGKLDEHFPIDIYQTGSGTSSNMNANEVIANRASQLSAEKNLKVHPNDHVNCGQSSNDTFPTAIRIAAVMETQADLIPALKELIKAFQDKGSEYAHVVKTGRTHLMDAMPVTLEQEFGGYARQLELGIERLQSSLERMRELPMGGTAVGTGINTPPEFPPAFAEEVSKLSGESMREAENHFEAQSTVDAPVEMSGQLKTIAVGLLKIVNDLRWMNSGPNAGLGEIQLAALQPGSSIMPGKVNPVIEESTAMVCAQVIGYDSAISVGGLSGNFELNVMLPMVAHSLLESIRLLAAASRNLAQRSVSRIIVREEHIQSLVGRNPILVTTLNPLIGYDLAAKIAKTAFAENRPLLEVAKEICDLPEDELKKALDPAKMTQGGLVE

SEQ ID NO: 177714 - protein, 461 aa, Unknown
  Bacterial polypetide isolated from the Sargasso Sea
MKYRIEKDSLGEIKVPAKALWGAQTQRAVNNFPISGIKMDFPFTKSFVSSLGLIKDAAAKANLRLKLISSKKSKAISRASKEVWQEKHHQEFPIDVFQTGSGTSSNMNANEVIANLATKYSKIKISPNDDVNMSQSSNDVIPTAIKISAHMDLSKKLFPALDELIQTIDNKADSVKGVIKTGRTHLMDAMPIDFSEELKAWSSQLQSSKAMLNIIERKFLELPQGGTAVGSGINAPKQFSKYFAQEMTKLLGNKCIPSKNFYHELSAQDCSVQLSGELKNLAVILTKISNDLRWMNSGPLAGLSEIELKALQPGSSIMPGKVNPVISEAVIMASADVIGNDVTITVAAQSGNSQLNVMLPVIAYNLLKSINLLSGSMNALSKKAIKTFKVNEKNLESSLSRNPILVTALNPIIGYEKSAQIAKKAYKENRPIIDVASEETNISKSKLKKLLDPSKLSKGGI

SEQ ID NO: 177715 - protein, 379 aa, Unknown
  Bacterial polypetide isolated from the Sargasso Sea
KHHHEFPIDVFQTGSGTSSNMNANEVIANLASKNSKLEIGPNDDVNMSQSSNDVIPTAIKVSAHMDLTQKLYPALDKLISEIENKAESVKGIVKTGRTHLMDAMPVDFSDELKAWSSQLTASRKMLEVIEERFLEMPQGGTAVGSGINAHKQFAKIFAQELAKLSRSNYKCVASSNFFHELSAQDSSVQLSGELKNLAVILMKISNDLRWMNSGPLTGLSEIELQALQPGSSIMPGKVNPVIPEAVTMVSADVIGNDVSITVAAQAGNFQLNVMLPVIAYNLLKSINLLSGAMDVLSNKAIKTFKVNKKNLEASLSMNPILVTALNPIIGYEKAAAIAKKAYKLGRPIIEVAYEETDLTEAQLKKLLNPSKLTKGGISK

SEQ ID NO: 177716 - protein, 424 aa, Unknown
  Bacterial polypetide isolated from the Sargasso Sea
FRKEFDSIGSVNVPNDKYWGASTQRSNKYFNIGKILVNISIIKSIAIIKRSAAIVHAKDKLIDGRISKAIIKASDEVIKGKLDENFPLKVWQTGSGTQTNMNVNEVIANRAIEILGGKKGTKKPVHPNDHVNKSQSTNDVFPTAMHISVTKETISKMLPSLKILEKELKRKSNEFKNIVKIGRTHLQDATPLSLGQEFSGYHFQVKKSIERIEYALKEILFLAQGGTAVGTGINSKKNFDKKIVKEIAKFTKIKFKPAPNKFAELAAHDSIVNFSGALNTCAVALMKISNDIRFLGSGPRAGYGELILPENEPGSSIMPGKVNPTQCEAVTMVCVKVIGNHNGITMAGSHGHFELNVFKPLIAHNILQSIDLIADSTKNFALYCVKGIKANKKKIQEHLDNSLMLVTALAPHIGYDNAAKIAKT

SEQ ID NO: 177717 - protein, 369 aa, Unknown
  Bacterial polypetide isolated from the Sargasso Sea
VVWQTGSGTQTNMNANEVISNYIIKKLGGKIGSKEPIHPNDHVNLSQSSNDTFPTIMHVAINELVTKGLIPNLKNIIKEFQKKTKIFQNIIKIGRTHTQDATPITLGDEFSAFCSQLNSCLKRIEIAKSELKYLAQGGTAVGSGINAPKKFDKVFCKYLNKLTNDNYKPSLNKFEALASHDPLINFSNSLKTLSISLLKIINDIRFLASGPRSGLGELTLPANEPGSSIMPGKVNPTQIEALSMVCVQVIGNSTTVDFAGSNGHFQLNAYKPVIAYNIIQSVNLLSDGIKSFCNNCLKGLKANKEIINNHLNNSLMLVTALNKSIGYDNAAKIAKKAFNENLTLKEAALKLKLISEKDFNKIVDPKKMV

SEQ ID NO: 177718 - protein, 369 aa, Unknown
  Bacterial polypetide isolated from the Sargasso Sea
RVSSRCLSTGSGTSTNMNMNEVISHLASSESNPIHPNDDVNMGQSSNDVIPSAINVDSSLSVKNTLIPSMKHLKNAIDEKAKSIGDIPKNGRTHLMDAMPLTFSQEMSAWSAQIQDAIEQYEQSMTKIQQLAIGGTAVGTGINADPHLSEKCCKHMNNLTGMEFKPADNSFQAISSQDAALILSSSNKTLAVALTKISNDLRWMNSGPLGGLGEITLPALQPGSSIMPGKVNPVIPESVCMVAGKVFGNDLTITHAAQSSNFQLNVMLPLVAHSLSESLSLLSNACLSLADKAIKDFEVNQDNIESMLSRNPILATALNATIGYETGAQIVKKAYQEKRSIIEVATEMTDLDSKTLAELLDPVKLTRNQ

SEQ ID NO: 177719 - protein, 376 aa, Unknown
  Bacterial polypetide isolated from the Sargasso Sea
RIEFDSIGSKKIDKNKLWGAQTQRSLENFKIGREKIPTELIVALGQQKKAAAQANIELGVLNKKLGSLIISACNDIINLKLIEEFPLVVWQTGSGTQTNMNANEVISNYIIKKLEGKIGSKDPIHPNDHVNLSQSSNDTFPTIMHVAINELSIKNLVPSLKNLIKEFQNKTRVFQGIIKIGRTHTQDATPITLGDEFSAFYSQLQACLKRIQISQSELKFIAQGGTAVGSGINAPNKFDKVFCKYLNKLTNDNYKPSQNKFKALSSHDSLVNFSNSLKILSISLLKIINDIRFLASGPRSGLGELILPANEPGSSIMPGKVNPTQIEALSMVCVQVIGNSTTVDLAGSNGHFQLNTYKPVIAKNIIQSVNLLSDGI

SEQ ID NO: 177720 - protein, 228 aa, Unknown
  Bacterial polypetide isolated from the Sargasso Sea
LLKAIAEATANEISSITDLPFKTAQNKFEALGGQDCIVDLSGALKTVSGSLFKIANDIRWLASGPRSGIGEILIPSNEPGSSIMPGKVNPTQCEAMTMVCAQVMGNDTTIMVSGASGNFELNVYRPVIAYNILQSIRILSDAINSFRTNCVDGIEANEEKINTNLYNSLMLITALNSHIGYDKAAEVAKKAYEDNSSLKEAIIELGYMSGEDFDKFVKPEEMVKPSKK

SEQ ID NO: 177721 - protein, 346 aa, Unknown
  Bacterial polypetide isolated from the Sargasso Sea
LKGKKGTKKPVHPNDHVNKSQSTNDVFPTAMHIAIALETRKKLIPSLDILNKELKKKVIKFKNIVKVGRTHLQDATPITLGQEFSGYQSQLESCIKRIKNALDEIYFLAQGGTAVGTGINTKKNFDKQIIKEIRKFCKIPFKPTKNKFAALAAHDAIVNFSGTLNTAAVCLMKIANDIRFLGSGPRAGYGELILPSNEPGSSIMPGKVNPTQSEAVTMVCVKVIGNHNGITMAGSHGHFELNVFKPLIAHNILQSIDLLSDSSKNFAVYCIRGIKADKNKIKDYLENSLMLVTALAPHIGYDNAAKIAKNALKNNTKLKYEALKTGLINGKEYDKIVNPIKMTSPN

SEQ ID NO: 177722 - protein, 399 aa, Unknown
  Bacterial polypetide isolated from the Sargasso Sea
IDGRISRAIIKASDEVIKGKLDKNFPLKVWQTGSGTQTNMNVNEVIANRAIEILGGKKGTKKPVHPNDHVNKSQSTNDVFPSAMHISVAKETISKMLPSLKILEKELKRKSNQFKNIVKIGRTHLQDATPLSLGQEFSGYHFQVKKSIERIEYALKEILFLAQGGTAVGTGINSKKYFDKKIVKEIAKITKIKFKPAPNKFAELAAHDAIVNFSGALNTCAVALMKISNDIRFLGSGPRAGYGELILPENEPGSSIMPGKVNPTQCEAITMVCVKVIGNHNGITMAGSHGHFELNVFKPLIAHNILQSIDLIADSTKNFALYCVKGIKANKKKIQEHLDNSLMLVTALAPHIGYDNAAKIAKTALKNNTTLKHETLKTGLITKKDYNKIVDPKKMIYPA

SEQ ID NO: 177723 - protein, 166 aa, Unknown
  Bacterial polypetide isolated from the Sargasso Sea
LGSGPRAGYGELILPENEPGSSIMPGKVNPTQCEAVTMVCVKVIGNHTGISIAGTHGHFELNVFKPLIAHNILQSIDILADSVKNFSQYCVKGIKANKLKIKDHLDNSLMLVTALAPKIGYDNAAKIAKKALKNNTRLKDEALKTGLIKEKEYDKIVNPIKMIGPN

SEQ ID NO: 177724 - protein, 253 aa, Unknown
  Bacterial polypetide isolated from the Sargasso Sea
LKNAENAIIMSLNELYFLPLGGTAVGTGINCPKGFCEESIKSISDDTNLMFYKSKNNFSIMASHDRLAQVMSQIKILAGALFKISNDIKILSSGPRSGIYELIIPQNEPGSSIMPGKVNPTQCEALSMVCTQIMGLEYAVSMANSSGTLQMNEYKPLIGFNILTSLKLLKNVIENFRIKLVDGMEPNQKRMKLNLENSLMLVTAIVPKVGYEKAAEIANLAFKESLNLKEATIKLGYLNEDEFDEAMNINSMI

SEQ ID NO: 177725 - protein, 337 aa, Unknown
  Bacterial polypetide isolated from the Sargasso Sea
PVHPNDHVNKSQSTNDVFPTAMHMAIAITATEKLIPSLNLLNLQLKKKSKEFKKIVKVGRTHLQDATPLTLGQEFSGYHFQLTKCIERIKNALQEIYFLAQGGTAVGTGLNTRKGFDKKIVSEIKKITKLPFKPSPNKFASLAAHDAIVNFSGTMNTTAVCLMKIANDIRFLGSGPRAGYGELILPENEPGSSIMPGKVNPTQCEAVTMVCVKVIGNHNGITMAGSHGHFELNVFKPLIIHNILQSIHIMSDSARSFGKYCVSGLKADKKRIKELLDNSLMLVTALAPHVGYDNAAKIAKRALKNKTTLKKEALKSGLISEKDYNRIVDPKKMTSPA

SEQ ID NO: 177726 - protein, 411 aa, Unknown
  Bacterial polypetide isolated from the Sargasso Sea
YVKDASARANKNLKLLEAKKQKVISRAAKEVWNNKHGKEFPIDVFQTGSGTSTNMNANEVIANLCYKTSKVKIHPNDDVNMSQSSNDVIPTVMNLAYYFDSTKKLMPALNLLIDTLEKKAESVKGTTKTGRTHLMDAMPVDMSDELNAWNTQLKCSRESMAVVLEKLLFLPQGGTAVGSGINAHRRFSKEFAKELSKLTGFKTKPSKDFFRNLSAQDLSVQLSGELKNLATILLKISNDLRWMNSGPLSGISEIELQALQPGSSIMPGKVNPVIPEAVAMAAADVIGNDVSITVAAQSGNFQLNVMLPVIAYCNLKSINILAGSMNVLAKKAIKTFKVNHKKIEESLSRNPILVTALNPVIGYQKAAEIAKRAYKESRPVIDVAHEETGISVSRLKKLLDPSKLTKGGIKS

SEQ ID NO: 177727 - protein, 435 aa, Unknown
  Bacterial polypetide isolated from the Sargasso Sea
MPKSFHKFLNTFKITHFNFLSFTFYNYLIKVYYIKESKMKYRTEFDSIGKIKVPGDKYWGASTERSNKYFNIGDFLVRPLVIHSIAIIKKAAAIVNAKNKDLDHRISKYIIRASDEVLKGKHDKHFPLKVWQTGSGTQTNMNVNEVIANRAIQLMGGKMGTKKPIHPNDHVNKSQSTNDVFPTAMHIAIALKSREKLLPSLKLLEKELHKKSKEFSKIVKVGRTHLQDATPLTLGQEFSGYHAQLRKCIFRIEAALKEIYFLAQGGTAVGTGLNTKKNFDKKIIKEISKITKLPFKPSTNKFAALAAHDEIVNFSGTLNTTAVCLMKIANDIRFLGSGPRAGYGELILPSNEPGSSIMPGKINPTQSEAVTMVCVKVIGNHNGITMAGSHGHFELNVFKPLIIHNILQSIEIMSDSAKTFALYCVKGIKADKKRI

SEQ ID NO: 177728 - protein, 165 aa, Unknown
  Bacterial polypetide isolated from the Sargasso Sea
MNSYQQPDASGHFGPYGGSFVSETLTHAIQELREAYARYQNDPEFLAEFQYELKHFVGRPSPIYHAARTSREMGGAQIYLKREDLNHTGAHKINNVIGQAMLAKRMGKPRVIAETGAGQHGVATATICARYGLECVVYMGAEDVKRQSPNVYRMKLLGATVVPVI

SEQ ID NO: 177729 - protein, 172 aa, Unknown
  Bacterial polypetide isolated from the Sargasso Sea
VRQYNKDIPIGLLLYSNLVMAKGIDSFYQQAQQAGVDSILIADVPLHESKLFRNAAMKYDIAPIFIAPPNITDESLRELASYGRGYTYLLSRAGVTGTETQAAMPASTLINQLKEYNAAPTLLGFGISKPEHVKAAIESGAAGAISGSAIVQIIEKYQAEPEQVKQQLFNFV

SEQ ID NO: 177730 - protein, 125 aa, Unknown
  Bacterial polypetide isolated from the Sargasso Sea
SATLVKGSVGILHGTKTYLIQNNDGQIIETHSISAGLDYPGVGPEHSFLKDTERASYVAATDKEALKALALTSKLEGIIPALEPAHALAYLEELAPKLDKKDIILLGLSGRGDKDIDTIMQNMSL

SEQ ID NO: 177731 - protein, 314 aa, Unknown
  Bacterial polypetide isolated from the Sargasso Sea
AHKINNCIGQILLAKRMGKQRIIAETGAGMHGVATATVAARFGMQCVVYMGTTDIDRQQANVFRMKLLGAEVIPVTAGTGTLKDAMNEALRDWVTNVHNTFYLIGTAAGPHPYPAMVRDFQSVIGNEVREQILGKEGRLPDSLVACIGGGSNAIGLFHPFLDDEGVQIVGVEAAGHGIDTGKHAASMAGGAPGVLHGNRTFLLQDEDGQITDAHSISAGLDYPGVGPEHAWLHEIKRVEYVPISDDEALEAFHHCCRLEGIIPALESAHALAEAFKRAPKLPKDHLMVINLSGRGDKDMQTVMHHMQDNQEKHA

SEQ ID NO: 177732 - protein, 272 aa, Unknown
  Bacterial polypetide isolated from the Sargasso Sea
EARMSRLQNRFAELKAENRAALVTFITAGDPDYATSLSILKGLPDAGADVIELGMPFTDPMADGPAIQLANIRALAGKQGMQQTLQMVREFREGNQSTPLVLMGYYNPIFVYGVERFIADAKEAGVDGLIVVDLPPEHNDELCEPAQSAGIDFIRLTTPTTDDDRLPTVLAGSSGFVYYVSVAGVTGAGAATMDHVEEAVARLRRHTDLPLCIGFGIRTPEHAAEVAKRAEGAVVGSALIDKIAEAQSPQQAIDGVLGLCRELAEGVRSARR

SEQ ID NO: 177733 - protein, 192 aa, Unknown
  Bacterial polypetide isolated from the Sargasso Sea
MTSFRTGPDARGLFGRFGGQFVAETLMPLINSLAAEYEKAKSDPAFLEELAYFQRDYIGRASPLYYAERLSEHFGGAKIYLKREDLNHTGAHKINNCIGQILLAKRMGKQRIIAETGAGMHGVATATVAARFGMQCVVYMGTTDIDRQQANVFRMKLLGAEVIPVTAGTGTLKDAMNEALRDWGPTSTTPST

SEQ ID NO: 177734 - protein, 136 aa, Unknown
  Bacterial polypetide isolated from the Sargasso Sea
GKGLNSNLHAASLTAGSPGVLHGNRTYLLQDDDGQIIDAHSISAGLDYPGIGPEHSWLHDIGRIKYLSTTDEESLAAFKLCSSLEGIIPALEPAHALHVTGKLASKRKGQIIIMNMCGRGDKDLSAVLPLMMKDDN

SEQ ID NO: 177735 - protein, 281 aa, Unknown
  Bacterial polypetide isolated from the Sargasso Sea
LFYAERISNDLGGPKIYFKRDELNHTGAHKINNCMGQILLAKKMGKSRIIAETGAGQHGVATATVCALFGLPCIVYMGEKDIERQSPNVFRMKLLGAEIRSVSTGSKSLKDAMNEALRDWVTNVKDTFYIIGTAAGPHPYPAMVRDFQSVIGKEVRNQLEELEGKAPDLLIACIGGGSNALGLFHEFLDDSNVEMIAVEAAGHGIKTDKHAASLTGGKPGVLHGNKTYLLQSKSGQIQEAHSISAGLDYPGIGPEHSFLFEEKRVTYMSATDKEALEAFKY

SEQ ID NO: 177736 - protein, 147 aa, Unknown
  Bacterial polypetide isolated from the Sargasso Sea
CGVEAAGEGMGPGQKHAATLTLGTPGVLHGSFSYLIQDEEGQIIEPHSISAGLDYPGIGPEHSFLKDFGRAEYHAVTDQEALDAFVRVSRTEGIIPALETSHALAYLEKLMPTLKKGQKVVLNCSGRGDKDVNTAAAALDISGEVDI

SEQ ID NO: 177737 - protein, 175 aa, Unknown
  Bacterial polypetide isolated from the Sargasso Sea
MTIKNSYKQLPDDKGYFGVFGGRYVSETLMPLILEVEKEYEKIKSENNFKEELNHYMETYIGRPSPLFFAKRISEDLGGPKIYFKRDELNHTGAHKINNCMGQILLAKRMGKKRIIAETGAGQHGVATATVCALFGLPCIVYMGEKDIKRQSPNVFRMKLLGAEIRSVKTGSKSL

SEQ ID NO: 177738 - protein, 346 aa, Unknown
  Bacterial polypetide isolated from the Sargasso Sea
YFAERLTNHLGGAKIYFKRDELNHTGAHKINNVLGQIILAKRMGKTRIIAETGAGQHGVATATVCAKFGLKCVVYMGSHDVERQAPNVFRMKLLGADVIPVTSGRGTLKDAMNDALRDWVTNVRDTFYCIGTVAGPHPYPAMVRDFQSIIGKETKEQMNDVEGRLPDTLIAAIGGGSNAMGLFFPFLDDSSVNIIGVEAGGKGVNEKMEHCASLTGGRPGVLHGNRTYLLQNEDGQILEGFSISAGLDYPGIGPEHAWLHEIGRAKYVSITDKEALEAFQLSCTTEGIIPALEPSHALAHVMKIAPSLPPDHIICMNMCGRGDKDIFTVARHLGFDMSGPEGRNVE

SEQ ID NO: 177739 - protein, 145 aa, Unknown
  Bacterial polypetide isolated from the Sargasso Sea
ALGIFSGFVDTDADLVGVEPAGGAAVFRGTPGVVHGSLSYLMQDEWGQVLEAESISAGLDYPGIGPEHAHLADIGRARYEKVSDSEVVDAFQLLSRTEGIIPALEPAHALAWMSRARRELSGKTVLLNLSGRGDKDATQMMELLG

SEQ ID NO: 177740 - protein, 155 aa, Unknown
  Bacterial polypetide isolated from the Sargasso Sea
MSKRFNELPDDHGFFGDYGGQYVSEILMPLIHELDQLFHEQIETPEFKRSLNDYYQHYVGRPSPLYFAKRLTEHCAGAQIYFKRDELNHTGSHKINNCIGQILLAQKMGKTRIIAETGAGQHGVATATVCALFGIPCTIYMGAKDIKTSATECFR

SEQ ID NO: 177741 - protein, 194 aa, Unknown
  Bacterial polypetide isolated from the Sargasso Sea
MSDRIKKTFENKNKKLVTFTTGGDPDLETSFKILKTIIKNNIDIIEIGMPFSDPMADGPTIQESSTRSIENGTTINNIFELVKKIRTLNNVIPVILMGYYNSIFNMGVEEFTSKCVEVGVDGLIIVDLQPEEDADLYFKTKQHNIDLIRLITPTTNRERLKTILNNASGFLYYVTITGITGQNSANLKELESSI

SEQ ID NO: 177742 - protein, 226 aa, Unknown
  Bacterial polypetide isolated from the Sargasso Sea
AETGAGQHGVAVATVSARFGLPCVIYMGAKDIERQKPNVFRMKLLGAEVVPVRSGNATLKDAMNEALRDWVANVNDTFYIIGTVAGPHPYPEMVRDFQSIIGKETKEQILDQEGRLPDQLIACIGGGSNAMGLFYPFLDDISVKITGIEAGGMGLQGEKHCASLTAGRPGVLHGNRTYLLQDDEGQIIEGHSISAGLDYPGIGPEHAWLKESGRVEYFAITDSEAV

SEQ ID NO: 177743 - protein, 309 aa, Unknown
  Bacterial polypetide isolated from the Sargasso Sea
VPALKQLENEFNKAQKDPEFQAELSKLLNEYAGRPTPLTLTRNLVKNPKVKLYLKREDLLHGGAHKTNQVLGQALLTKRMGKKEVIAETGAGQHGVATALACALLGLKCRIYMGAKDVERQQPNVFRMKLMGAEVIPVTAGSGTLKDAVNEALRDWSANYQEAHYLLGTAAGPHPFPTIVREYQKIIGEEAKQQVLKAEGRLPDAVIACVGGGSNAIGMFTDFIDEPSVKLIGVEPAGKGLDTHEHGATICKGTKGILHGTYTYIMQNTDGQIEESYSVSAGLDYPAVGPQHAFLHETGRAQYVGITDT

SEQ ID NO: 177744 - protein, 207 aa, Unknown
  Bacterial polypetide isolated from the Sargasso Sea
MDNLTDLPNSDGFFGEYGGKFVPETLMHALKELDETYAKLKNNPKFVEEIDQDLVQFVGRPSPLYFAKRLTDHYSGPQIWLKREDLNHTGAHKINNTVGQILLAKAMGKKRIIAETGAGQHGVATATVAARLGLECHIYMGAADVERQSLNVYRIKLLGAKVHAVDSGTATLKDALNEAMRDWVTNIEDTYYIIGSVTGPHPYPMIV

SEQ ID NO: 177745 - protein, 126 aa, Unknown
  Bacterial polypetide isolated from the Sargasso Sea
VSGPHPYRMIVRDFNCVVGEELISQSKELFNSMPDAIVACVGGGSNAMGAFYPFIKFNETRLIGVEAGGEGVETGEHAAPLNDGTPGVLHGSLSYLMQDDSGQVKGTKSVSAGLDYPGVGPEHSWL

SEQ ID NO: 177746 - protein, 112 aa, Unknown
  Bacterial polypetide isolated from the Sargasso Sea
MTRIEQTFKKLKADNKKAFVSYIMAGDPDFKTSLELVMGLPDAGVDIIELGLPFTDPMADGPTIQLAGGRSLDNGMTLLKTLELAKKFREKNDSTPIVLMGYYNPIYSHGVE

SEQ ID NO: 177747 - protein, 251 aa, Unknown
  Bacterial polypetide isolated from the Sargasso Sea
MGKSRIIAETGAGQHGVATATVCALFGLPCIVYMGEKDIERQSPNVFRMKLLGAEIRSVSTGSKSLKDAMNQALRDWVTNVKDTFYIIGTAAGPHPYPAMVRDFQSIIGKEVRKQLQEVEGKTPDLLMACIGGGSNALGLFHEFLDDSNVEMIAVEAAGHGINTDKHAASLTGGKPGVLHGNKTYLLQSKSGQIQEAHSISAGLDYPGIGPEHSFLFEEKRVTYMSATDKEALEAFQYCCKLEGIIPALEP

SEQ ID NO: 177748 - protein, 241 aa, Unknown
  Bacterial polypetide isolated from the Sargasso Sea
AEIRSVATGSKSLKDAMNEALRDWVTNVKDTFYIIGTAAGPHPYPAMVRDFQSIIGEEVRQQILKAENKLPDLLMACIGGGSNALGLFHEFLDETQIEMIAVEAAGHGIDTNQHAASLSGGKPGILHGNKTYLLQSNDGQIDEAHSISAGLDYPGIGPEHSYLFEQKRVKYMSATDKEAIEAFQYCCNLEGIIPALEPSHALAVLKKIAKKYNKDKIVVMNMCGRGDKDIFTIAEELNIKL

SEQ ID NO: 177749 - protein, 195 aa, Unknown
  Bacterial polypetide isolated from the Sargasso Sea
MPTASTPDPASLQPSVRPGAHGRFGRFGGQYVPETLMPALAELEQAAAQAWNDPAFTAELNQLLKNYVGRATPLYEAERLTAHYRRADGGPRIWLKREDLNHTGAHKINNALGQALLALRMGKKRIIAETGAGQHGVATATVCARFGLECVIYMGAEDMRRQALNVFRMRLLGATVQPVTAGTATLKDATSEAIR

SEQ ID NO: 177750 - protein, 175 aa, Unknown
  Bacterial polypetide isolated from the Sargasso Sea
MPDKNGRFGIYGGRYVAETLVPALEELSEQYEIIKNDENFLKEFTDDLKYYVGRPSPLYFAKRWTELLGGARIFLKREDLNHTGAHKINNTVGQILLAKHMGKKRIIAETGAGQHGVATASVAARHGLECIIYMGEEDIKRQSLNVFRIKLLGAKVVGVSSGTSTLKDAMNEAMR

SEQ ID NO: 177751 - protein, 171 aa, Unknown
  Bacterial polypetide isolated from the Sargasso Sea
MKIGIPKDGRFGDFGGKYIPETLAPAIEELERNYLKIRNDKNFKKELGRLLIDYAGRPTPIYFARNLTKTVGGAKIYLKREDLLHGGAHKINNTLGQALLAKRMGKKRIIAETGAGQHGVATAMACASLGLKAEIYMGYVDTVRQKQNVFRMELLGAKVHAVKSGSKTLKD

SEQ ID NO: 177752 - protein, 283 aa, Unknown
  Bacterial polypetide isolated from the Sargasso Sea
ILELEEQYENAKTDDSFWAEMHDLWTHYVGRPSPLYFAERMTEALGGAKIYLKRDELNHTGAHKINNVLGQIILARRMGKTRIIAETGAGQHGVATATVCAKFGLKCVVYMGAHDVQRQAPNVFRMRLLGAEVVPVTSGRGTLKDAMNDALRDWVTNVRDTFYCIGTVAGPHPYPAMVRDFQSIIGKEAKEQMHAAEGRLPDTVIAAIGGGSNAMGLFFPFLDDKSVNIIGVEAGGKGVNEKMEHCASLTGGRPGVLHGNRTYLLQDDDGQILEGYSISAGLD

SEQ ID NO: 177753 - protein, 245 aa, Unknown
  Bacterial polypetide isolated from the Sargasso Sea
KLYLKREDLLHGGAHKTNQVLGQALLTKRMGKTEVIAETGAGQHGVATALACALLGLKARIYMGAKDVERQAPNVFRMKLMGAEVIPVNAGSGTLKDAVNEAMRDWSANYDTAHYLLGTAAGPHPFPTIVREYHRMIGEETRAQILEKEGRLPDAVVACVGGGSNAIGMFADFIDEPSVRLVGVEPAGKGVHTKEHGATIVTGTKGILHGAYTFIMQDHEGQIEESYSVSAGLDYPAVGPQHAYL

SEQ ID NO: 177754 - protein, 193 aa, Unknown
  Bacterial polypetide isolated from the Sargasso Sea
CGIPAVIGEESKQQCQEAFGRLPDVLMACVGGGSNAMGLFHPFVQDTSVRLIGVEAAGDGVATGRHAATITEGRAGVLHGAMSLLLQDGDGQVMEAHSISAGLDYPGVGPEHSYLREIGRAEYAAVTDQQALDALRLVSELEGIIPALETAHAFAWLEQLCPTLVDGTEVVINCSGRGDKDVNTVAEKLGDQL

SEQ ID NO: 177755 - protein, 289 aa, Unknown
  Bacterial polypetide isolated from the Sargasso Sea
KFINNGRPSPLYRARKLEKHLDTPAKIYYKYEGVSPSGSHKPNTAVAQAFYNKEEGTKKITTETGAGQWGTSLAFACKLFGIELDVYMVKVSFEQKPYRKLVMQTYGARCVASPSKETDSGKAILAKDPNNTGSLGIAISEAVEMAAKNPDTKYALGSVLNHVLMHQTIVGNEALLQMEMADDYPDILVGCTGGGSNFSGLVNPFLGKNFREGKKTRVIACEPKSCPTLTEGKFVYDFGDTGKLTPLVKMHTLGSQFIPPATHSGGLRYHGMAPLVSHLKENNAIEAKA

SEQ ID NO: 177756 - protein, 292 aa, Unknown
  Bacterial polypetide isolated from the Sargasso Sea
GKTRIIAETGAGQHGVATATACAMLGFECVVYMGEEDIIRQRLNVFRMELLGAEVRSVTSGTKTLKDAINEAIRDWVTNVDDTHYLIGSAVGPHPYPEIVRDFQKVIGAESKDQIIEQSGRLPDYVIACVGGGSNAIGLFHEFIKDEEVNLIGVEAGGLGQEEGQHAATLTYGEIGVLHGSMSYLLQDEDGQVSPAHSISAGLDYPGVGPEHSYLKDAGRASYVSVTDQEAIVGFKLLTKTEGIIPALEPAHGIAYLSKFAPTLSRDSIVLFGLSGRGDKDIDTVSEFETNQ

SEQ ID NO: 177757 - protein, 182 aa, Unknown
  Bacterial polypetide isolated from the Sargasso Sea
MDNSYFGKYGGTFIPETLSFALEELENLYREIKDNRSFKEDLKNIYADYVGRPSPLYFAETLTNNLGGPKVWFKREDLNHTGAHKINNTVGQALLAKKLGKQRIIAETGAGQHGVATATICAKLNLDCVIYMGETDIERQELNVFKIKTLGAEVIPVSSGTATLKDALNESIRDWVTNVIQL

SEQ ID NO: 177758 - protein, 232 aa, Unknown
  Bacterial polypetide isolated from the Sargasso Sea
GSRTLKDAVNEAIRDWVTNVENTYYIIGSAVGPHPYPYIVREFQSIIGIESRKQILDKTGSLPNYVLACVGGGSNAIGIFSGFIDDLDVSLIGIEASGEGIDTEKHAATLTKGTPGILHGSLSYVLQDSFGQIQEAHSISAGLDYPGVGPEHSNLKDIERAQYYSATDLKALEGFKLLSVEEGIIPALEPAHALGFLIDWSQEIPKDQSILFLLSGRGDKDMETVSKKMASL

SEQ ID NO: 177759 - protein, 224 aa, Unknown
  Bacterial polypetide isolated from the Sargasso Sea
YFAKRLSNKYKTKIYLKREDLCHTGAHKINNTIGQIILAKKLGKKRIIAETGAGQHGVATATVCALMGIECVVYMGEIDISRQAPNVARMKMLGAKVRSATSGSRTLKDATNEAIRDWIANPIDTHYIIGSVVGPHPYPDMVARFQSVIGYETKKQLLKMEQTDKPTHVIACVGGGSNAAGLFYPFLNDLDVEIVCVEAAGKGVTSGESAATSILGTEGIIHGS

SEQ ID NO: 177760 - protein, 283 aa, Unknown
  Bacterial polypetide isolated from the Sargasso Sea
AGQHGVATAAVCARHGIECIIFMGSEDIERQAQNVYRMKLMGAEVCPVSSGTSTLKDAMNEAMRDWVSYIDDTHYIIGSVAGPHPYPMIVRDFNSIVGTELKKQSKILFGKHPDKIVACVGGGSNAMGIFYPFIKDKMVDLIGVEAAGSGLSSGKHAAPLSDGSPGVLHGMKTYLMQNSDGQILGTHSVSAGLDYPGVGPEHSFLKDMGRVHYEAATDKEALKAFHDLSRIEGIMPALETSHALAWVSKNAKKLKKSDIVVVNLSGRGDKDMQSVAKADGINF

SEQ ID NO: 177761 - protein, 208 aa, Unknown
  Bacterial polypetide isolated from the Sargasso Sea
MSNKNSLKQLPNEKGYFGQFGGRYVSETLMPLIQEVEKEYLKIKNDSNFQKELDYYLKTYIGRPSPLFFASQITKNLNGPKIYFKRDELNHTGAHKINNCMGQILLAKKMGKKRIIAETGAGQHGVATATVCALFGFPCIIYMGEKDIKRQSPNVFRMKLLGAEIRSVSTGSKSLKDAMNEALRDWVTNVRDTFYIIGTVAGPHPYPT

SEQ ID NO: 177762 - protein, 155 aa, Unknown
  Bacterial polypetide isolated from the Sargasso Sea
MSAIAERFACLKERGETAFIPYVTAGDPDLETTKAIVVEMARRGADVIELGIPFSDPLADGPTIQASSQRALDKGATLEGIFGCAEDIRKETDVPIIIFSYYNPVHRYGLEAFVNRCVDVGVDGALVTDLPPEEAGIYGELMSAAGWTRYSCSRL

SEQ ID NO: 177763 - protein, 315 aa, Unknown
  Bacterial polypetide isolated from the Sargasso Sea
HPLRELFSAYKKYATSATFKKTLNSQLKDYVGRPTPIYYAESLSKQLGSSHIYLKREDLNHTGAHKINNALGQALLAKKMGKTRIIAETGAGQHGVATATACARLNLKCVVYMGEEDINRQSVNVYRMKLLGAEVVSVDSGTKTLKDALNEALRDWVTNVDDTHYIIGSVAGPHPYPMIVRDFQSVIGYEARNQFKKEYKCLPDYLVACVGGGSNAIGLFHPFLNDKVKIVGVEAGGSGIKSGKHAAPLSAGSPGVLHGNRTYIMEDENGQIKNTHSISAGLDYPGVGPEHSWLKDLKRVEYTAVTDDDALEAFS

SEQ ID NO: 177764 - protein, 318 aa, Unknown
  Bacterial polypetide isolated from the Sargasso Sea
STLKPIGPDDLAPLFPWALIGQEVSQEREIEIPDPVRKIYQQWRPSPLYRARKLEKLLDTPAKIYYKYEGVSPTGSHKPNTAVAQAFYNKEEGTKKITTETGAGQWGSSLAFACSIFKIELDVYMVKVSYEQKPYRKMIMQTFGANCYASPSDRTPTGKAILEKDPNNTGSLGIAISEAVEMAANDENTKYSLGSVLNHVLMHQTIVGNEAILQMEMADDYPDILVGCTGGGSNFSGLAFPFLGKKFRENKNLRVIACEPKSCPTITKGKFAYDFGDTGNRTPLVKMHTLGSSFMPPSTHSGGLRYHGMAPMGKSSVD

SEQ ID NO: 177765 - protein, 274 aa, Unknown
  Bacterial polypetide isolated from the Sargasso Sea
VYKKLSKSDSFWNEFHSELNHYVGRPSPLYFAERLTERCSGAKIYLKREDLNHTGAHKVNNTIGQALLAKYMGKSRIIAETGAGQHGVASATVAARLGLECHVYMGADDIVRQAPNVYRMKLLGANVVSVKSGSRTLKDALNEALRDWATNVDNTYYIIGTVAGPHPYPQIVRDFQSIIGREAKAQSRELLGKLPDALVACVGGGSNAIGLFHPFLEDETVKMYGVEAGGCGLGTGKHAAPLSAGKPGVLHGNRTYLMTDENGQISETHSVSAG

SEQ ID NO: 177766 - protein, 225 aa, Unknown
  Bacterial polypetide isolated from the Sargasso Sea
NGADLIELGIPYSDPLADGPVIQVAASRALKSGTNLRKVITLLESLKGKLNIPIILFSYLNPLLCFGFEQFCEMASNAGVSGLIIPDLPLEEAYKFSEIVSNHSMDLILLVAPTTPFERMKKISNHTKGFTYLVSVTGVTGERNKMENRVENLIAKLKEVNSNPIAVGFGISTPDHVNRVREWGADGVIIGSAFVKRISSSTEKDVVDNVGEFCKDMRLAADQKK

SEQ ID NO: 177767 - protein, 303 aa, Unknown
  Bacterial polypetide isolated from the Sargasso Sea
MGQALLALRMGKKRIIAETGAGQHGVATATVCARFGLDCVIYMGAEDMRRQALNVFRMRLLGAKVQPVTAGTATLKDATSEAIRDWVTNVETTHYILGSVAGPHPYPMLVRDFHAVIGQESKQQCQEAFGRLPDVLMACVGGGSNAMGLFHPFVQDTSVRLIGVEAAGDGVATGRHAATITEGRAGVLHGAMSLLLQDSDGQVQEAHSISAGLDYPGVGPEHSYLREIGRAEYGAVTDQQALDALRLVSELEGIIPALETAHAFAWLEQLCPTLPDGSEVVINCSGRGDKDVNTVAEKLGDQL

SEQ ID NO: 177768 - protein, 223 aa, Unknown
  Bacterial polypetide isolated from the Sargasso Sea
AVPIHFLKWFPGFQSIIGKEARQQMFDSTGKLPDLIYACVGGGSNASGIFLPFLEDESVELVGVEAGGRGIDTGSHAARFYSGNVGIAQGYKTYFFQDEEGQMLHTHSIAAGLDYIGVSPILSHLHDEKRIRFTATADDAVISATKHLIRTEGIIPALESSHAFASVIEEASHIPEGSQVLINLSGRGDKDIFNIAEAIGDKKWEEFLRQKALSNQRITTTEI

SEQ ID NO: 177769 - protein, 175 aa, Unknown
  Bacterial polypetide isolated from the Sargasso Sea
EGRSPDLLMACIGGGSNALGLFHEFLDDSNVEMIAVEAAGHGIKTDKHAASLTGGKPGVLHGNKTYLLQSKSGQIQEAHSISAGLDYPGIGPEHSFLFEEKRVSYMSATDKEALEAFQYCCKLEGIIPALEPAHALAVLKKIAKNYSKDKIIVMNMCGRGDKDIFTIADELNIKI

SEQ ID NO: 177770 - protein, 298 aa, Unknown
  Bacterial polypetide isolated from the Sargasso Sea
GARIHFKREDLNHTGAHKINNAVGQALLAKHMGKTRIIAETGAGQHGVATATIAARLGLECQIFMGEKDIERQELNVYRMNLLGAKVVSVCSGSRTLKDAMNEAMRDWVTRVNDTFYVIGTVAGPHPYPMLVRDFQSVIGREARIQSLDKIGRLPDALVACVGGGSNAIGLFHPFLDDAGVSMFGVEAGGKGLETGQHAAPLNSGVQGILHGNRTYLMQTTDGQIMDTHSVSAGLDYPGVGPEHAWLKDIGRVEYVVSSDEEALIAFQNVTRIEGIMPALETAHALAYAEKLAADLDP

SEQ ID NO: 177771 - protein, 310 aa, Unknown
  Bacterial polypetide isolated from the Sargasso Sea
KNYNTIINEKGFQNDYNNLLKDYVGRPTPLFYAERISEKYKCKIYLKREDLCHTGAHKINNTIGQILLAKRLGKKRIIAETGAGQHGVATATVCALAGIECVIYMGAVDIKRQAPNVARMKMLGASVVSAESGSKTLKDATNEAIRDWINNPITTHYIIGSVVGPHPYPDMVAKFQSVVSEEIKSQLLEKEGTEKPNYLIANIGGGSNAAGLYYHYLEDESVKIISVEAAGEGIESGKSAATSVLGKIGIIHGSKTLLMQTKDGQIVEPYSISAGLDYPGVGPLHAHLLESKRADFISITDSDAMLAGLE

SEQ ID NO: 177772 - protein, 118 aa, Unknown
  Bacterial polypetide isolated from the Sargasso Sea
MKSNKHNWPDKDGFFGEYGGKFVPETLMHALEELETTYNNFKDKPEFKEQFYKDLSEFVGRPSPLYYADRLTKHYGTGSIWLKREDLNHTGAHKINNTIGQILLEKQMGKKRIIAETG

SEQ ID NO: 177773 - protein, 239 aa, Unknown
  Bacterial polypetide isolated from the Sargasso Sea
MAIKNSFKQLPDDKGYFGSFGGRYVSETLMPLILEVEKEYEKIKNDKTFKGELNHYMETYIGRPSPLFFAERITEDLGGPKIYFKRDELNHTGAHKINNCMGQILLAKRMGKKRIIAETGAGQHGVATATVCALFGLPCIVYMGEKDIKRQSPNVFRMKLLGAEIRSVNTGSKSLKDAMNEALRDWVTNVRDTFYIIGTAAGPHPYPAMVRDFQSIIGEEVREQILKMNKNFLIYWWLA

SEQ ID NO: 177774 - protein, 245 aa, Unknown
  Bacterial polypetide isolated from the Sargasso Sea
MKKNSYKLGPDLDGNFGLFGGRYVAETLMPLIIELEKAYSDALSDKSFRNEIDQFSKDYIGRESPLYFAERLTNYHEGAKIYFKRDELNHTGSHKINNCIGQILLAKRMRKNRIIAETGAGQHGVAVATVCARFGFECVIYMGKKDIERQKSNVFKIKLLGGQIVPVESGNGTLKDAMNEALRDWVANVENTYYLIGTAAGPHPYPSMVRDFQSIIGEEAKRQILDKEKVLPDALVACIGGGSNA

SEQ ID NO: 177775 - protein, 161 aa, Unknown
  Bacterial polypetide isolated from the Sargasso Sea
GLFHPFVGDTSVRLIGVEAAGEGVASGRHAATITEGRTGVLHGAMSLLLQDCDGQVMEAHSISAGLDYPGVGPEHSYLREIGRAEYAAVTDAQALEALQRLSQLEGIIPALETAHAFAWLESLCPTLAPGTEVVINLSGRGDKDVNTVAERLGDQLKPADG

SEQ ID NO: 177776 - protein, 136 aa, Unknown
  Bacterial polypetide isolated from the Sargasso Sea
MPNASTPDPASLQPSVRPGAHGRFGRFGGQYVPETLMPALAELEQAAAQAWNDPAFTAELNRLLKNYVGRATPLYEAERLTAHYRRGDGGPRIWLKREDLNHTGAHKINNALGQALLALRMGKKRIIAETGAGQHG

SEQ ID NO: 177777 - protein, 155 aa, Unknown
  Bacterial polypetide isolated from the Sargasso Sea
SNAMGVFYPFIDSKDVELIGVEAGGKDKNDVGSASINDGTIGVLHGSKTYILQNTSGEILETSSISAGLDYPGVGPEHSYLSDSKRAKYVKVYDDEALDAFYECSRIEGIIPALETAHAIAYLHKLKELNPKENIVINMSGRGDKDLYSIMNHDK

SEQ ID NO: 177778 - protein, 297 aa, Unknown
  Bacterial polypetide isolated from the Sargasso Sea
LQKNYLKITESTDFKKEFNKLLTDYVGRPTPLYFAKRLSNKYKTKIYLKREDLCHTGAHKINNTIGQIILAKKLGKKRIIAETGAGQHGVATATVCALMGIECVVYMGEIDISRQAPNVARMKMLGAKVRSATSGSRTLKDATNEAIRDWIANPIDTHYIIGSVVGPHPYPDMVARFQSVIGYETKKQLLKMEQTDKPTHVIACVGGGSNAAGLFYPFLNDLDVEIVCVEAAGKGVNSGESAATSILGTEGIIHGSKTLLMQTQDGQITEPYSISAGLDYPGKGPMHANLFKSNRGK

SEQ ID NO: 177779 - protein, 273 aa, Unknown
  Bacterial polypetide isolated from the Sargasso Sea
MSYKVVANTLRDGPDENGHFGIFGGQYVAETLMPLIIEVEDAWQTAKNDPSFWSELEYYKEHYIGRPSPLYLASRLTEHFNGAKLYFKRDELNHTGAHKINNVMGQALVARRMGKTKIIAETGAGQHGVATATACALFNLECEVFMGAEDVKRQKPNVDRMRLLGAKIHSVTSGSSTLKDAMNEALRYWVSKAETHFYIIGTVAGPHPYPEMVRDFQCVIGEETKEQIMAVEGKLPDTLVACIGGGSNAIGLFHPFLDDDVKIIGVEAAGHGV

SEQ ID NO: 177780 - protein, 224 aa, Unknown
  Bacterial polypetide isolated from the Sargasso Sea
HTGSHKINNCIGQILLAKRMRKNRIIAETGAGQHGVAVATVCARFGFECVIYMGKKDIERQKSNVFKIKLLGGQIVPVESGNGTLKDAMNEALRDWVANVENTYYLIGTAAGPHPYPAMVRDFQSIIGEEAKRQILDKENILPDALVACIGGGSNALGLFYPFLDDDVDMYGVEAAGLGLNGNEHAASLSKGAPGVLHGNRTYLLQDTEGQIREGHSISAGLDY

SEQ ID NO: 177781 - protein, 185 aa, Unknown
  Bacterial polypetide isolated from the Sargasso Sea
GDEAKDQIKKAEGKLPDFLIACVGGGSNAMGLFYPFLNDRNVKMIAVEAAGEGLNKKHAASIAKGQLGVLHGSKTYILQDEDGQIIEPHSISAGLDYPGIGPEHAWLKDTKRVKYVSVTDKEALEAFQLCTKIEGIIPALEPSHALAYLIKKARKIPKNKIIIMNMCGRGDKDIFTVAKKLKINI

SEQ ID NO: 177782 - protein, 93 aa, Unknown
  Bacterial polypetide isolated from the Sargasso Sea
MSQEDLLKKKFDELKKKKKCGFISFITAGDPDFNTSYKILEKLPESGVDIIELGMPFSDPMADGPVIQKANDRAIKNKMNLKKTFGLIKKFRK

SEQ ID NO: 177783 - protein, 173 aa, Unknown
  Bacterial polypetide isolated from the Sargasso Sea
MDNLTDLPNSDGFFGEYGGKFVPETLMHALKELDETYAKLKNNPKFIEEIDQDLVQFVGRPSPLYFAKRLTDHYSGPQIWLKREDLNHTGAHKINNTVGQILLAKAMGKKRIIAETGAGQHGVATATVAARLGLECHIYMGAADVKRQSLNVYRIKLLGAQVHAVDSGTATLK

SEQ ID NO: 177784 - protein, 208 aa, Unknown
  Bacterial polypetide isolated from the Sargasso Sea
ADGPVIQNANIRALAAGVTPAQCFELISRIRQYNKDIPIGLLLYSNLVMAKGIDSFYQQAQQAGVDSILIADVPLHESRLFRNAALKHDIAPIFIAPPNITDDSLRELASYGRGYTYLLSRAGVTGTETQAAMPASTLINQLKEYNAAPTLLGFGISKPEHVKAAIESGAAGAISGSAIVQIIEKYQAEPEQLKQQLFNFVSAMKAAT

SEQ ID NO: 177785 - protein, 175 aa, Unknown
  Bacterial polypetide isolated from the Sargasso Sea
MSRIAQTFSQLSAQGRKGLIPFITAGDPYPEMTVDLMHALVKGGSNVIELGVPFSDPMADGPVIQRASERALAKKVGLRTVLEYVRAFRTTNSTTPVVLMGYANPIERMGVEAFAKAASEAGVDGVLVVDYPPEECEAFAKTMRAAGIDPIFLLAPTSTEARIAQIARVASGYIY

SEQ ID NO: 177786 - protein, 278 aa, Unknown
  Bacterial polypetide isolated from the Sargasso Sea
SPLFFAERITKDLNGPKIYFKRDELNHTGAHKINNCMGQILLARKMGKTRIIAETGAGQHGVATATVCALFGLPCVIYMGEKDIERQSPNVFRMKLLGAEIRSVSTGSKSLKDAMNEALRDWVTNIKDTFYIIGTAAGPHPYPEMVRNFQSVIGKEVRQQLKDLEGKSPDLLIACIGGGSNALGLFYEFLDDSDVEMIAVEAAGHGINSNKHAASLTGGKPGVLHGNKTYLLQSKTGQIQEAHSISAGLDYPGIGPEHSFLFEEKRVKYMSATDKEAL

SEQ ID NO: 177787 - protein, 207 aa, Unknown
  Bacterial polypetide isolated from the Sargasso Sea
MNNLTNLPNPDGFFGEYGGKFVPETLMHALKELDETYSKLKNNSKFIEEIDQDLAQFVGRPSPLYYAKRLTDHYSGPQIWLKREDLNHTGAHKINNTVGQILLAKAMGKKRIIAETGAGQHGVATATVAARLGLECHIYMGAKDVERQSLNVYRIKLLGAEVHAVDSGTATLKDALNEAMRDWVTNIEDTYYIIGSVTGPHPYPMIV

SEQ ID NO: 177788 - protein, 249 aa, Unknown
  Bacterial polypetide isolated from the Sargasso Sea
DSNGRFGDYGGKFVSETLMPALDELEKNYRKIKNNNKFKKDVSKLLKDFVGRPTPLYLAERTTESLGGAKIYLKREDLAHTGAHKINNTIGQAILAKLMGKKRIIAETGAGQHGVATATVCALLGLDCEIYMGATDTVRQSVNVQRMELLGAKVIPVTSGSQTLKDALNEALRDWVTNVRDTFYIIGSVAGPHPYPMIVRDFQSIIGKECRNQILKLEGKLPDLLIACVGGGSNAIGLFHPFLKDKSVK

SEQ ID NO: 177789 - protein, 272 aa, Unknown
  Bacterial polypetide isolated from the Sargasso Sea
MSKLNLNSLKTGPDSYGKFGIHGGRFVAETLMPLILDVENAYEKAIKDQTFIDELDMYRRDYIGRPSPLYFAERLTEHFGGAKIYLKRDELNHTGAHKINNVIGQILLAKRMGKNKIIAETGAGQHGVATATACALFGFECEVFMGAKDIERQKPNVQRMQLLGAKINSVISGTGTLKDAMNDALRFWVTNANTHFYIIGTAAGPHPYPKMVRDFQSIIGEEAKKQILEKENSLPNALVACIGGGSNALGLFHPFLDDKDVEIFGVEAAGKG

SEQ ID NO: 177790 - protein, 295 aa, Unknown
  Bacterial polypetide isolated from the Sargasso Sea
NSYKNYPNEKGYFGQFGGRYVSETLMPLILEVEKEYENIKNDKKFIDEFNYYLETYVGRPSPLFFAKRISEDLNGPKIYFKRDELNHTGAHKINNCMGQILLAKKMGKTRIIAETGAGQHGVATATVCALFGLPCVVYMGEKDIERQSPNVFRMKLLGAEIRSVSTGSKSLKDAMNEALRDWVTNVKDTFYIIGTAAGPHPYPVMVRDFQSVIGKEVRKQLKDIEGKPPDLLMACIGGGSNALGLFHEFLDDTDVEMIAVEAAGHGIKSGKHAASLTGGKPGVLHGNKTYLLQSE

SEQ ID NO: 177791 - protein, 269 aa, Unknown
  Bacterial polypetide isolated from the Sargasso Sea
MSLANGEGRIERRFASLKAEGRGGLVAFVTAGDPNQEMAQEIVMGLPAAGADLIELGMPFSDPMADGPSVQASSQRALKAGASLAMTLELVRTFRTEDDHTPIVLMGYYNPIYIYGVEAFLADATKAGVDGLIIVDLPPEEDTELCQPAIEAGIRWIRLATPTTNSERLPTVLSNANGFIYYVSILGVTGSATIPEEATRKAVERLKSHTDLPVAVGFGIKTPEMAATVAKCADAAVVGSAIVDRVLAGLDDEGHRNPARGCVLGFVSE

SEQ ID NO: 177792 - protein, 284 aa, Unknown
  Bacterial polypetide isolated from the Sargasso Sea
MLKKNSYKCFPNEKGYFGKFGGRYVSETLMPLIQEVENEYNNLKKDQNFLNELEYYFKNYIGRPSPLFFAERITKDLKGPKIYFKRDELNHTGAHKINNCMGQILLAKKMGKKRIIAETGAGQHGVATATVCALFGLPCIIYMGEKDIERQSPNVFRMKLLGAEVRSVTSGSQSLKDAMNEALRDWVTNVRDTFYIIGTAAGPHPYPSMVRDFQSIIGKEVRTQILEVEKKLPDLLIACIGGGSNALGLFYDFLDDKEVEMLAVEAAGLGLSSGKHAASLSGGK

SEQ ID NO: 177793 - protein, 266 aa, Unknown
  Bacterial polypetide isolated from the Sargasso Sea
YARYQQLFSRLSTAKQGAFVPFVTMGDPGLELSFNIIKTLIDAGADALELGIPFSDPIADGPVIQNANIRALAAGVTPAQCFELIGRIRQYNKDIPIGLLLYSNLVMARGIDNFYLQAQQAGVDSILIADVPLHESKLFRNAAMKHDIAPIFIAPPNITDDSLRELASYGRGYTYLLSRAGVTGTETQAAMPASTLINQLKEYNAAPTLLGFGISKPEHVKAAIDSGAAGAISGSAIVQIIEKHQHQPDTLLSELSAFVRSMKAAT

SEQ ID NO: 177794 - protein, 196 aa, Unknown
  Bacterial polypetide isolated from the Sargasso Sea
MDYEPDTGGHFGDYGGRYVSETLMAALSELDQNYQKLKNDPDFQGEFDADLASFVGRPSPLYHAERWSKAIGGAQIYFKREDLNHTGAHKVNNTIGQALLAKYSGKPRVIAETGAGQHGVASATVAARLGLECVVYMGADDIERQSPNVYRMKLLGAEVVPVESGSRTLKDALNEAMRDWVTNVNDTFYIIGTVAG

SEQ ID NO: 177795 - protein, 262 aa, Unknown
  Bacterial polypetide isolated from the Sargasso Sea
KRDELNHTGAHNINNCLGQILLAKKMGKTRIIAETGAGQHGVATATVCALFGLPCYIYMGSKDIERQKPNVFRMKLLGATIIPVESGSKSLKDAMNEALRDWIKNVRDTFYIIGSTAGPHPYPKMVRDFQSVIGKEAREQILKVEKKLPDYLIACVGGGSNAMGLFYPFLNDKKVKIIGVEAAGRGAKTEETAATMTSGTPGILHGSYSYVLQDNDGQIKEAHSISAGLDYPGVGPEHSHLKDIKRVKYFGVTDTEALEAFQ

SEQ ID NO: 177796 - protein, 261 aa, Unknown
  Bacterial polypetide isolated from the Sargasso Sea
MSSRILKTFLELRNKKTKGFIPFITAGDPSISTSLEIIRTLPKAGADLIEVGMPFSDPMADGKIIQASSLRALEQGITLKKILEIISIFRKDNNVTPIVLMGYYNPIYNFGVDKFLNLCKESGVDGLIIVDLPFEHDDELCLPAKKAGIDFIRLIAPTTNEERIPYLLDQSSGFVYCISLSGITGSKEAKTKIVNETIDRIKKFSELPIAVGFGIKTPKQAGEMSLKADATVIGSIIIEKINEIYSSKMNDETQLNQVYDF

SEQ ID NO: 177797 - protein, 150 aa, Unknown
  Bacterial polypetide isolated from the Sargasso Sea
MPDKNGRFGIYGGRYVAETLVPALEELSEQYELIKKDEKFLKEFKDDLKDYVGRPSPLYFAKRWTELLGGAKIYLKREDLNHTGAHKINNTVGQILLAKHMGKKRIIAETGAGQHGVATASVAARHGLECIVFMGEEDIQRQSLNVFRIK

SEQ ID NO: 177798 - protein, 120 aa, Unknown
  Bacterial polypetide isolated from the Sargasso Sea
PGILHGAKSYLMQDSDGQIMATSSISAGLDYPGVGPEHSFLKDSGRAEYIAVDDESVMKAFHQLSELEGIIPALETAHAFAPLDLICSEFNEDQNIVINVSGRGDKDIASVAKLEGIDLE

SEQ ID NO: 177799 - protein, 294 aa, Unknown
  Bacterial polypetide isolated from the Sargasso Sea
MSEEYLPDNDGRFGVYGGRYVAETLVPALDELAKQYKFIKKDKNFSEEFRNDLIHYVGRPSPLYFAKRWTEQLGGAKVYLKREDLNHTGAHKINNTVGQILLAKHMGKKRIIAETGAGQHGVASATVAARHGLDCVVYMGEEDIKRQSLNVFRMKLLGAEVVGVNSGTRTLKDAMNEAMRDWVTNVDDTYYIIGSVAGPHPYPEIVRDFNSVVGEEVIEQSKNEIGKNPDVLIACVGGGSNALGLFYPFIKSKEVRLIGVEAGGLGLSTGKHAAPLSDGKEGVLHGMRTYLMQD

SEQ ID NO: 177800 - protein, 290 aa, Unknown
  Bacterial polypetide isolated from the Sargasso Sea
MLGDQVLYFLLKELLMIFGGPKIYFKRDELNHTGAHKINNCMGQILLAKKMGKTRIIAETGAGQHGVATATVCALFGLPCIVYMGEKDIERQSPNVFRMKLLGAEIRSVSTGSKSLKDAMNEALRDWVTNVKDTFYIIGTAAGPHPYPAMVRDFQSIIGSEVRKQLEEVEGRRPDLLMACIGGGSNALGLFYEFLDDSNVEMIAVEAAGHGINTNKHAASLTGGKPGVLHGNKTYLLQSNTGQIQEAHSISAGLDYPGIGPEHSFLFEEKRVTYMSATDKEALEAFKYCC

SEQ ID NO: 177801 - protein, 296 aa, Unknown
  Bacterial polypetide isolated from the Sargasso Sea
ADGGPRIWLKREDLNHTGAHKINNALGQALLALRMGKKRIMAETGAGQHGVATATVCARFGLECVIYMGAEDMRRQALNVFRMRLLGASVQPVTAGTATLKDATSEAIRDWVTNVESTHYILGSVAGPHPYPMLVRDFHAVIGKEARQQCREAFGRLPDVLMACVGGGSNAMGLFHPFVECTNVRLIGVEAAGDGVATGRHAATITEGRAGVLHGAMSLLLQDSDGQVQEAHSISAGLDYPGVGPEHSYLREIGRAEYGAVTDQQALDALRLVSELEGIIPALETAPCLRLAEQLC

SEQ ID NO: 177802 - protein, 149 aa, Unknown
  Bacterial polypetide isolated from the Sargasso Sea
MKTRKLNYYKYPDNQGRFGRFGGRFVAETLMPLLLEVEQKYKEAKKSKKFKKKLDYYFTNYVGRPSPLYYAKRTSEFLGNVKLYFKRDELNHTGAHKINNCIGQILLAKEMGKKRIVAETGAGQHGLATATVCALFNLKCVVYMGALDI

SEQ ID NO: 177803 - protein, 275 aa, Unknown
  Bacterial polypetide isolated from the Sargasso Sea
AGQHGLATATVCALFNLKCVVYMGALDIKRQAPNVFKMKLLGAEIIPVKSGTSTLKDAMNEALRDWVSNVKDTFYVIGTVAGPHPYPMMVRDFQSIIGIEAKKQILKVEKRLPDYLVACIGGGSNALGLFYPFLNNENVNIIGIEAGGKGINSKMHAASLSRGKPGFLHGNYTYLLQNEEGQITDAHSISAGLDYPGIGPEHSWLKETGRVNYFSATDKEALDAFKICSKLEGIIPALEPAHALSYLLKNSKKFKKNQIIIMNMCGRGDKDIFSI

SEQ ID NO: 177804 - protein, 174 aa, Unknown
  Bacterial polypetide isolated from the Sargasso Sea
TQYDYPDRLVACVGGGSNAIGLFFPFIEDPVKIIGIEAAGEGLDTVKHAATLTKGSYGVLHGSASYLIQNKEGQILLPHSISAGLDYPGVGPEHSYLKDIKRVQYKSATDEEALRAFKWLSDREGIIPALETSHAIAYLQQSNSGIKKGENIILCLSGRGDKDLDIIFKSESIK

SEQ ID NO: 177805 - protein, 217 aa, Unknown
  Bacterial polypetide isolated from the Sargasso Sea
HYIGRPSPLYFAERLTSYFGGAKLYLKRDELNHTGAHKINNVIGQALLARRMGKTKIIAETGAGQHGVATATACALFDMECEVFMGAEDVERQRPNVERMRLLGAKIHPVTAGTGTLKDAMNEALRYWVSNAETHFYIIGTVAGPHPYPQMVRDFQSVIGIEAREQIIEAEGRLPHKIVACIGGGSNAMGLFHPFLDDRDVEIYGVEAAGKGIPSGL

SEQ ID NO: 177806 - protein, 283 aa, Unknown
  Bacterial polypetide isolated from the Sargasso Sea
FELETAASNAWKDKLFVKELNHLLKTYVGRETPLYEAKRLTEHYKTKRATPRIWLKREDLNHTGAHKINNALGQALLAIRMGKKRIIAETGAGQHGVATATVCARFGLKCIIYMGAEDIKRQSLNVFRMKLLGAEVKVVNSGTATLKDATSEAIRDWVSNVETTHYILGSVAGPHPFPKIVRDFHAVIGEETKKQCLESFGSLPDILLACVGGGSNAMGLFHPFVKETSVRLIGVEAAGSGVNTDKHAATITKGSVGILHGSMSLLLQDDNGQVQEAHSISAG

SEQ ID NO: 177807 - protein, 272 aa, Unknown
  Bacterial polypetide isolated from the Sargasso Sea
SNGRFGEFGGRFVAETLMPLILNVESAYEKAINDINFINQLDILRRDYIGRPSPLYFAERLTEYFGGAKIYFKRDELNHTGAHKINNVIGQILLAKRMGKNRIIAETGAGQHGVATATACALFGFKCEVFMGAEDIKRQKPNVLRMELLGAKIHPVTSGSSTLKDAMNEALRYWVTNAKSHFYIIGTVAGPHPYPKMVRDFQSIIGIETKKQILDKENRLPDALIACIGGGSNALGLFHPFLDDKDVELFGVEASGKGISSGKHAASINAGK

SEQ ID NO: 177808 - protein, 284 aa, Unknown
  Bacterial polypetide isolated from the Sargasso Sea
LQVESAYKAACTDDDFARELLYYQTHYVGRPSPLYFAERLTVHYGGAKLYLKRDELNHTGAHKINNVLGQALLAKRMGKTKIIAETGAGQHGVATATACALFDMECEVFMGEEDVRRQKPNVDRMRLLGAKVHPVTSGTGTLKDAMNEALRYWVANAKTHFYIIGTVAGPHPYPQMVRDFQSVIGKEARQQIIDAEGRLPDSIVACIGGGSNAMGLFHPFLDDEDVTIYGVEAAGKGIPSGLHAASLTGGTPGVLHGNRTYLLQNDDGQIIDAHSISAGLDYPG

SEQ ID NO: 177809 - protein, 138 aa, Unknown
  Bacterial polypetide isolated from the Sargasso Sea
VPVEESAPFRTAALRHNIAPIFICPPNADEELLRQIASYGRGYTYLLSRAGVTGAENRAALPLHHLVEKLKQYDAPPSLQGFGISAPEQVAVAIEAGAAGAISGSAIVKIIEKNVAAPEQMLAELKAFVSTMKAATHQ

SEQ ID NO: 177810 - protein, 299 aa, Unknown
  Bacterial polypetide isolated from the Sargasso Sea
MKTYKQPSTVGRFGEFGGMYVSETLMPLLLNLDKSYKKIQKDKKFKKELNHLFKNYVGRPSSLHYAKNLSKYINGPKVYFKRDELNHTGAHKINNCLGQILLAKKMGKTRIIAETGAGQHGVATATVCALFGLPCYIYMGSKDIERQKPNVFRMKLLGATIIPVESGSKSLKDAMNEALRDWIKNVRDTFYIIGSTAGPHPYPKMVRDFQSVIGKEAREQILKVEKKLPDYLIACVGGGSNAMGLFYPFLNDKKVKIIGVEAAGRGAKTEETAATMTSGTPGILHGSYSYVLQDNDGQI

SEQ ID NO: 177811 - protein, 303 aa, Unknown
  Bacterial polypetide isolated from the Sargasso Sea
MANKTNNYNYPDKNGRFGSFGGRYVSETLISALEELESLYKKIKNDKKFQEELTNDLQTFVGRPSPLYFAKRWTDKLNGAKVFLKREDLNHTGAHKINNTVGQVLLAKKMGKKRIIAETGAGQHGVATAAVCARHGIECIIFMGSEDIERQAQNVYRMKLMGAEVCPVSSGTSTLKDAMNEAMRDWVSYIDDTHYIIGSVAGPHPYPMIVRDFNSIVGTELKKQSKILFGKYPNKIVACVGGGSNAMGIFYPFIKDKEVDLIGVEAAGSGLSSGKHAAPLSDGSPGVLHGMKTYLMQNSDGQI

SEQ ID NO: 177812 - protein, 125 aa, Unknown
  Bacterial polypetide isolated from the Sargasso Sea
APLNKGKPGVLHGNRTYVMEDENGQIQSTHSISAGLDYPGVGPEHSWLKDNKRVKYVSVTDDEALEAFNILTEREGIIPALETAHALAYAFKLAKKLKNKKILINLSGRGDKDIDTIAALSHIKL

SEQ ID NO: 177813 - protein, 253 aa, Unknown
  Bacterial polypetide isolated from the Sargasso Sea
HKINNVLGQALLAKRMGKTRIIAETGAGQHGVATATACALFNMECEVFMGAEDVERQKPNVERMRLLGAKIHPVTSGTGTLKDAMNEALRYWVTNAETHFYIIGTAAGPHPYPQMVRDFQSIIGTEAREQILEAENRLPNALVACIGGGSNAIGLFYPFLDDTDVAIYGVEAAGKGLASGLHAASLTGGTPGILHGNRTYLLQNNDGQIIDAHSISAGLDYPGIGPEHSWLHDIGRVNYVSATDEEALVAFQI

SEQ ID NO: 177814 - protein, 197 aa, Unknown
  Bacterial polypetide isolated from the Sargasso Sea
MVRDFQSIIGKEVREQLFKAEKKLPDLLVACIGGGSNAIGLFHEFLDERSVKMIAVEAAGLGINTNKHAASLSGGKPGVLHGNKTYLLQSKSGQINEAHSISAGLDYPGIGPEHSFLFEEKRVEYVSITDKEAIEAFKYCSKLEGIIPALEPSHALAHLKKIAPKMSKKKIIVMNMCGRGDKDIFTVAEKINVKIHE

SEQ ID NO: 177815 - protein, 128 aa, Unknown
  Bacterial polypetide isolated from the Sargasso Sea
MNNRIKEIFLKKSKKLLTFITAGDPDIKTSLKIMNKLVESGTDIIEIGMPFSDPMADGPTIQLSSIRAIKKNIDLKKIMSLCKEFRKKNKHTPIILMGYYNPIQYYGDQKFIKECSKVGIDGLIIVDL

SEQ ID NO: 177816 - protein, 288 aa, Unknown
  Bacterial polypetide isolated from the Sargasso Sea
INNTVGQALLAKRMGKQRVIAETGAGQHGVATATVAARYGMECVVYMGAEDIKRQAINVFRIKLLGAKVVPVDAGSKTLKDALNEAMRDWVTYVDKTFYIIGTVAGPHPYPAMVRDFNAVVGREVREQCLTQIGKLPDTLVACVGGGSNAIGLFYPFLDDKEISIYGVEAAGGGLSTGKHAAPLNAGKPGVLHGNRTYLMEDDYGQIIETHSISAGLDYPGVGPEHSWLKDTGRADYVSVTDIEAIQAFHDLCQIEGIIPALESSHAIAYTSKIAPKMDKNEIIVVNL

SEQ ID NO: 177817 - protein, 139 aa, Unknown
  Bacterial polypetide isolated from the Sargasso Sea
MKTNKQNLPDKNGFYGEFGGKFVPETLMYALEQLETTYAKLKDNNEFKEKFYSDLSEFVGRPSPLYFAERLTKHYGTGSIWLKREDLNHTGAHKINNTIGQILLAKYMGKKRIIAETGAGQHGVATAAVAARLGLECIF

SEQ ID NO: 177818 - protein, 260 aa, Unknown
  Bacterial polypetide isolated from the Sargasso Sea
FMGEQDIYRQSQNVYRMKLLGAEVIPVTSGSRTLKDALNEALRDWVTNVDDTFYIIGTVAGPSPYPELVRDFQAIIGREVIDQMKGIDKKVDALVACVGGGSNALGLFYPYIDSDAKIYGVEAAGDGLDTEKHSAPLNKGKIGVLHGNRTYLLEDENGQIIETHSISAGLDYPGVGPEHALLKDLGRVNYKSATDKEALEAFHELSRVEGIIPALETSHAVAYAIKLAAQMKKGENIVINLSGRGDKDLNTVARIEGIEI

SEQ ID NO: 177819 - protein, 267 aa, Unknown
  Bacterial polypetide isolated from the Sargasso Sea
FYATLSAVIQPPCRCQQGAFVPFVTMGDPGLELSFDIIKTLIDAGADALELGIPFSDPIADGPVIQNANIRALAAGVTPAQCFELISRIRQYNKDIPIGLLLYSNLVMAKGIDSFYQQAQQAGVDSILIADVPLHESRLFRNAALKHDIAPIFIAPPNITDDSLRELASYGRGYTYLLSRAGVTGTETQAAMPASTLINQLKEYNAAPTLLGFGISKPEHVKAAIESGAAGAISGSAIVQIIEKYQAEPEQLKQQLFNFVSAMKAAT

SEQ ID NO: 177820 - protein, 238 aa, Unknown
  Bacterial polypetide isolated from the Sargasso Sea
MPDARGHFGPYGGRFVSETLSFALEELEQIYLSLRDDPDFQAEFDRDLAYYVGRPSPLYHAKRWSDSLGGAQIWLKREDLNHTGAHKVNNTIGQALLAKKTGKPRVIAETGAGQHGVATATVAARLGLECDVYMGAEDVQRQKLNVYRMRLLGARVIPVESGTRTLKDAMNEALRDWVTNVDNTFYIIGTVAGPHPYPQLVRDFNAVVGREARRQSLEQIGRLPDVLIACVGGGSNAL

SEQ ID NO: 177821 - protein, 88 aa, Unknown
  Bacterial polypetide isolated from the Sargasso Sea
MNRINTCFDQIKKNDKKALIPFITAGDPSSNLTVSIMHELVRSGSDIIELGIPFSDPMADGPVIQRASERALAQGTNTDDVFRHSKKL

SEQ ID NO: 177822 - protein, 225 aa, Unknown
  Bacterial polypetide isolated from the Sargasso Sea
LNEALRDWVTNVDDTYYIIGSVTGPHPYPMIVRDFNSVVGEELISQSKELFNSMPDAIVACVGGGSNAMGAFYPFIKFNETRLIGVEAGGEGVETGEHAAPLNDGTPGVLHGSLSYLMQDESGQVKGTKSVSAGLDYPGVGPEHSWLKDSGRAEYVAVSDDAALKAFHEVSELEGIIPALETAHAFAYLDTLMKEFDKNSNIIVNVSGRGDKDINTVANIDGIKI

SEQ ID NO: 177823 - protein, 315 aa, Unknown
  Bacterial polypetide isolated from the Sargasso Sea
ITQGAHKINNTVGQIILAKMMGKSRIIAETGAGQHGVATATVAARLGLDCHIYMGAEDVQRQSLNVYRIKLLGAKVHPVDSGTSTLKDALNEAIRDWVTNVDDTYYIIGSVTGPHPYPMIVRDFNAIVGRELIEQANNNFGKNPDAIIACVGGGSNAIGIFHPFIDKDDVELIGVEAGGEGIKSGKHAAPLNDGKPGILHGAKSYLMQDADGQVMSTSSISAGLDYPGVGPEHSYLKDVGRAKYLAVTDQEVMKAFHELSELEGIIPALETAHAFAVLPEVCSKMDSSQNIVLNVSGRGDKDISSVASIEGINLE

SEQ ID NO: 177824 - protein, 248 aa, Unknown
  Bacterial polypetide isolated from the Sargasso Sea
MKTNKHDWPDKDGFFGEYGGKFVPETLMHALEELEKTYNNFKDKPEFKEQFYKDLSEFVGRPSPLYFAERLTNHYGTGSIWLKREDLNHTGAHKINNTIGQILLAKYMGKERIIAETGAGQHGVATATVAARLGLECHIYMGAEDVQRQSLNVYRMKLLGAQVHSVESGSATLKDALNEALRDWVTNVDNTYYIIGSVTGPHPYPMIVRDFNSVVGEEVVAPSKDLFNDMPLRICALCGGGSNAMGIF

SEQ ID NO: 177825 - protein, 249 aa, Unknown
  Bacterial polypetide isolated from the Sargasso Sea
PNVARMKMLGAEVKSVKSGSKTLKDATNEAIRDWINNPLNTHYIIGSVVGPHPYPDMVARFQSVISKEITEQLLEKENKSKPNHIIACVGGGSNAAGAYYNFLNDKNVNLIAVEAAGKGIDTGESAATSVLGKDGIIHGSKTLLMQTSDGQITEPYSISAGLDYPGVGPMHSHLYRTGRAEFISITDDSAMQAGLNLTQLEGIIPAIETSHAFAVFENRKFKTDDIVVVNLSGRGDKDLDTFINYFKLK

SEQ ID NO: 177826 - protein, 247 aa, Unknown
  Bacterial polypetide isolated from the Sargasso Sea
MTGYNSRREDSLTRFSPPSPPPQAELESILKDYVGRANPLYFAERLTEHYGTADIYLKREDLNHTGAHKINNAVGQALLAKKMGKKRIIAETGAGQHGVATATVCARFGLECIIYMGAADMERQKLNVFRMRLLGATVNPVRSGTSTLKDATSEAIRDWVTNVETTHYILGSVAGPHPYPMMVRDFHACIGRETRAQAMEKWGGKPDILMACVGGGSNAMGLFHEFVDDEDVRLIGIEAAGEGMGPG

SEQ ID NO: 177827 - protein, 275 aa, Unknown
  Bacterial polypetide isolated from the Sargasso Sea
IAETGAGQHGVATATVCAKLGLECHVYMGSIDIERQNPNVRRMELLGANIISVSSGTKTLKDAINEAIRDWVSNVDTTHYLIGSAIGPHPYPVIVRDFQSVIGAEVREQSLKQLGTLPSAVIACVGGGSNAIGIFYPFINDLDVKLIGVEAGGKGENTDATAATLVKGTPGVLHGTYTYLLQDNYGQIQETHSVSAGLDYPGVGPEHAYLKDTERAKYVSADDQMAIDGFKLLCSTEGIIPALEPAHVIGYLPHIIKDFSSKDIMVIGLSGRGDK

SEQ ID NO: 177828 - protein, 284 aa, Unknown
  Bacterial polypetide isolated from the Sargasso Sea
VLCRKIDRSFGGAKLYLKRDELNHTGAHKINNVLGQALLAKRMGKTKIIAETGAGQHGVATATACALFDMECEVFMGQEDVRRQKPNVDRMRLLGAKVHPVTSGTGTLKDAMNEALRFWVANAQTHFYIIGTVAGPHPYPQMVRDFQSVIGKEAKEQLMEAEGRLPDTIIACIGGGSNAMGLFHPFLDDESVSIYGVEAAGKGIPSGLHAASLTGGTPGVLHGNRTYLLQDEDGQIIDAHSISAGLDYPGIGPEHSWLHDMGRINYVSATDEEALVAFQIMLPH

SEQ ID NO: 177829 - protein, 313 aa, Unknown
  Bacterial polypetide isolated from the Sargasso Sea
AETGAGQHGVATATVCARFGLKCIVFMGKTDVERQAPNVFRMKLLGAEVVSVTSGRGTLKDAMNEALRDWVTNVEDTFYCIGTVAGPHPYPSMVRDFQSIIGSETKQQIIDKEGRLPDSLIACIGGGSNAMGLFFPFLDDKDVKMFGVEAGGKGVNNKMEHAASLTGGRPGILHGNRTYLLQDKNGQIIEGHSISAGLDYPGIGPEHSYLHDIGRVEYVSITDQEALDAFKLCCEKEGIIPALEPSHALAYVTKIAPKLPKNHIMIMNMCGRGDKDIFTVAEYLGFDLKIRELFLKITFYIVRFYLQLIVLFL

SEQ ID NO: 177830 - protein, 207 aa, Unknown
  Bacterial polypetide isolated from the Sargasso Sea
MTRIDAKFAALKAEGKKAFVAYVMAGDPDYDTSLDVIKGLPGAGVDIIELGVPFTDPMADGPTIQLAGQRALEGGMTLERTLQMAREFRKADDTTPIVMMGYYNPIYSRGVDKFLVDAKEAGIDGLIVVDLPPEEDEELCIPAQKAGLNFIRLATPTTDDKRLPKVLTNTSGFVYYVSITGITGAAAAQATDVGHEVARIKSQTDCR

SEQ ID NO: 177831 - protein, 217 aa, Unknown
  Bacterial polypetide isolated from the Sargasso Sea
DWVSNVETTHYILGSVAGPHPFPKIVRDFHAVIGEETKKQCLESFGSFPDILLACVGGGSNAMGLFHPFVKETSVRLIGVEAAGSGVDTDKHAATITKGSVGILHGSMSLLLQDDNGQVQEAHSISAGLDYPGVGPEHSHLKDIGRAEYGSVTDQEALDALKLVSELEGIIPALETSHAFAWLDKLCPTLEKDTHIVINCSGRGDKDVNTVASSLDI

SEQ ID NO: 177832 - protein, 265 aa, Unknown
  Bacterial polypetide isolated from the Sargasso Sea
SFHGGAKGILKDKNQMYKECNYLGAKINPVTSGTGTLKDAMNDALRFWVTNANTHFYIIGTAAGPHPYPKMVRDFQSIIGEEAKKQILEKENQLPNVLVASIGGGSNALGLFHPFLDDEDVEIFGVEAAGKGLNSSLHAASLSAGSPGVLHGNRTYLLQDDDGQINDAHSISAGLDYPGIGPEHSWLHDIGRIKYLSTTDEQSLAAFKLCSSLEGIIPALEPAHALHITGKLASERQGQIIIMNMCGRGDKDLSAVLPLIMKNDS

SEQ ID NO: 177833 - protein, 183 aa, Unknown
  Bacterial polypetide isolated from the Sargasso Sea
MSNINKSNSLKNFPDEDGNFGHYGGRFVAETLMPLLLEVNAAWKKAKRDKSFYNELNYFLEHFVGRPSPLYFAERMTEHLNGAKIYFKRDELNHTGAHKINNCMGQILLAKKMGKTRIIAETGAGQHGVATATVAARFGLKCIIYMGHTDIERQKSNVFRMELLGAEIIPVYSGTGTLKDAMN

SEQ ID NO: 177834 - protein, 208 aa, Unknown
  Bacterial polypetide isolated from the Sargasso Sea
EETTKQIGGAKIYFKSDHLNHLGAHKINNSLFQILLAKRMGKTKVYAETGAGAHLIATAAACAKFNLPCIGYMGKDDVFLQSTNVLKAKLFGAKVIECVDGTGKKGVLKDACTAVLKAWSNDPDAFYCCGSAIGPHPFPRIVQYAQSVIGKEIKEQILEKEGRLPDAIVACIGGGSNLIGSVHEFLDEKEVELHGIEPEHSAALTNGT

SEQ ID NO: 177835 - protein, 234 aa, Unknown
  Bacterial polypetide isolated from the Sargasso Sea
MGSKSLKDAMNEALRDWVTNVKDTFYIIGTAAGPHPYPAMVRDFQSVIGKEVREQLEKVEGRSPDLLMACIGGGSNALGLFHEFLDDSNVEMIAVEAAGHGIKTDKHAASLTGGKPGVLHGNKTYLLQSKSGQIQEAHSISAGLDYPGIGPEHSFLFEEKRVTYMSATDKEALEAFQYCCKLEGIIPALEPAHALAVLKKIAKNYSKDKIVVMNMCGRGDKDIFTIADELNIKI

SEQ ID NO: 177836 - protein, 234 aa, Unknown
  Bacterial polypetide isolated from the Sargasso Sea
MTIKNSYKQLPDHKGYFGSFGGRYVSETLMPLILEVEKEYEKIKNDKSFKEELNHYLKTYIGRPSPLFFAKRISEDLGGPKIYFKRDELNHTGAHKINNCIGQILLAKRMGKKRIIAETGAGQHGVATATVCALFGLPCIVYMGEKDIKRQSPNVFRMKLLGAEIRSVTTGSKSLKDAMNEALRDWVTNVRDTFYIIGTAAGPHPYPTMVRDFQSIIGEEVREQILKAENKLPD

SEQ ID NO: 177837 - protein, 179 aa, Unknown
  Bacterial polypetide isolated from the Sargasso Sea
INKLEGKSPNLLIACIGGGSNALGLFHEFLDDPDVKMIAVEAAGHGIKSNKHAASLAGGKPGVLHGNKTYLLQSNTGQIEEAHSISAGLDYPGIGPEHSYLFEEKRVDYMSATDKEALDAFQYCCKLEGIIPALEPAHALAVLKKVAKDYSKNDIIVMNMCGRGDKDIFTIADELNIKF

SEQ ID NO: 177838 - protein, 154 aa, Unknown
  Bacterial polypetide isolated from the Sargasso Sea
MKKTNKINYYKFPDKHGRFGKFGGRFVAETLMPLLLDVEKKYKEVRRSKKFKRELSYYFENYIGRPSPLYFAKRISKEIGDVKVYFKRDELNHTGAHKINNCVGQVLLAKKMGKKRIVAETGAGQHGLATATVCALFNLKCVVYMGALDIKDKL

SEQ ID NO: 177839 - protein, 244 aa, Unknown
  Bacterial polypetide isolated from the Sargasso Sea
AGQHGVATATVCALMGLECIVYMGEIDIKRQAPNVARMKMLGAEVRPATSGSKTLKDATNEAIRDWINNPTDTFYIIGSVVGPHPYPDMVAKFQRIISQEIKSQLQTSEGIENPNYVIACVGGGSNAAGAFYEYLEEENVQLIAAEAAGHGVDSGESAATSVLGKIGIIHGSKTLLMQSEDGQITEPYSISAGLDYPGIGPMHAHLFDTKRTIFEAITDDEAMKAGLNLCKKEGIIPAIESAHA

SEQ ID NO: 177840 - protein, 218 aa, Unknown
  Bacterial polypetide isolated from the Sargasso Sea
WVTNVKDTFYIIGTVAGPHPYPSMVRDFQSIIGKEVRKQIIEAENKLPDLLVACIGGGSNAIGLFHEFLDDENIKMLAVEAAGCGLNSEKHAASLTGGKPGILHGNKTYLLQSETGQIKEAHSISAGLDYPGIGPEHSFLYDEKRVKYTSATDEEALEAFQYCCRLEGIIPALEPSHALSALKKIAPKMNSDEIVVMNMCGRGDKDIFTVAKALNINI

SEQ ID NO: 177841 - protein, 307 aa, Unknown
  Bacterial polypetide isolated from the Sargasso Sea
FKRDELNHTGAHKINNCMGQILLAKKMGKKRIIAETGAGQHGVATATVCALFGLPCIVYMGEKDIERQSPNVFRMKLLGAEIRSVSTGSKSLKDAMNEALRDWVTNVKDTFYIIGTAAGPHPYPAMVRDFQSVIGKEVRQQLKDIEGKSPDLLMACIGGGSNALGLFYEFLDDSNVEMIAVEAAGHGINTDKHAASLTGGKPGVLHGNKTYLLQSNTGQIQEAHSISAGLDYPGIGPEHSFLFEEKRVKYMSATDKEALDAFKYCCKLEGIIPALEPAHTLSVLRKIAKNYKKDKIIVMNMCGRGDK

SEQ ID NO: 177842 - protein, 124 aa, Unknown
  Bacterial polypetide isolated from the Sargasso Sea
NDGEPGILHGAKSYLMQDENGQVIDTHSVSAGLDYPGVGPEHSNLKDSGRANYIAVDDIEVLDSFHLITKLEGIMPALETAHAFAALDHIAKNYTSDQHLVINVSGRGDKDINTVATMDGISLD

SEQ ID NO: 177843 - protein, 197 aa, Unknown
  Bacterial polypetide isolated from the Sargasso Sea
MKTYKQPSTVGRFGEFGGMYVSETLMPLLLNLDKSYKKIQKDKKFKKELNGLFKNYVGRPSSLHYAKNLSKYVNGPKIYLKRDELNHTGAHKINNCLGQILLAKKMGKTRIIAETGAGQHGVATATVCALFGLPCYIYMGSKDIERQKPNVFRMKLLGATIIPVESGSKSLKDAMNEALRDWIKNVRDTFYIIGSTA

SEQ ID NO: 177844 - protein, 252 aa, Unknown
  Bacterial polypetide isolated from the Sargasso Sea
MTELKLNPYFGEYGGMYVPQILVPALKQLEAAFVDAQQDESFHAEFNDLLKNYAGRPTALTLTRNLSPNPMVKIYLKREDLLHGGAHKTNQVLGQALLAKRMGKKEIIAETGAGQHGVATALACALLGLKCKVYMGAKDVERQSPNVFRMKLMGAEVIPVTSGSSTLKDACNEAMRDWSASYDKAHYLLGTAAGPHPFPTIVREFQRMIGAETKKQILEKEGRLPDAVIACVGGGSNAIGMFADFIDEPSVE

SEQ ID NO: 177845 - protein, 241 aa, Unknown
  Bacterial polypetide isolated from the Sargasso Sea
QTSEVLAPGSKSLKDAMNEALRDWVTNVQDTFYIIGTAAGPHPYPAMVRDFQSVIGEEVRQQILKAENRLPDLLMACIGGGSNALGLFHEFLDDKQIEMIAVEAAGHGLDSGKHAASLSGGKPGILHGNKTYLLQSQDGQIDEAHSVSAGLDYPGIGPEHSYLFEQNRVRYMSATDKEAIDAFQYCCNLEGIIPALEPSHALAVLKKVAKKYAKDKIVVMNMCGRGDKDIFTIAEELNIKL

SEQ ID NO: 177846 - protein, 71 aa, Unknown
  Bacterial polypetide isolated from the Sargasso Sea
MSERIKKIFEKKEKKLITFTTGGDPDLETSLKILKVIINNDIDLIEIGMPFSDPMADGPTIQESSVRSIFN

SEQ ID NO: 177847 - protein, 208 aa, Unknown
  Bacterial polypetide isolated from the Sargasso Sea
MPNSAALDAAARPDGLGRFGRFGGQYVPETLMPALAELETAAAEAWKDKTFTDRLNALLRDYVGRPSPLYEAERLSQHYRRADGGPRIWLKREDLNHTGAHKINNALGQALLALRMGKKRIIAETGAGQHGVATATVCARFGLKCVIYMGSEDMRRQSLNVFRMRLLGATVQPVTAGTATLKDATSEAIRDWVTNVESTHYILGSVAG

SEQ ID NO: 177848 - protein, 204 aa, Unknown
  Bacterial polypetide isolated from the Sargasso Sea
AGPHPYPMIVRDFQSVIGEETKRQFAAVSGGLPDAIVACIGGGSNAMGIFHSFLEDRSVRLIGVEAAGYGLDSGKHAASLNEGSVGVLHGNRTYLLDDKDGQIIEAHSISAGLDYPGVGPEHAFLKDMKRAEYVAIDDHEAMAAFRELNLLEGILPALESSHAVAYAMKLASTMSTDQSIVVNLSGRGDKDIPTVARIDGISIE

SEQ ID NO: 177849 - protein, 185 aa, Unknown
  Bacterial polypetide isolated from the Sargasso Sea
ETKQQMFEAEGKLPDTLVACIGGGSNAIGLFHPFLDDDVEIIGVEAAGLGISTKQHAASLTGGKPGVLHGNRTYLLQDNDGQITEAHSISAGLDYPGIGPEHSWLFETGRIEYVSATDNEALEAFALCSKMEGIIPALEPSHALAYIKNIISSLPKDHTIVMNMCGRGDKDLEAVIPRLEEMDLL

SEQ ID NO: 177850 - protein, 90 aa, Unknown
  Bacterial polypetide isolated from the Sargasso Sea
MKTYKENRLKLLFENLKKEKRGGLGIFIAASDPNLEISLEILKRLPQAGADMIELGMPFSDPMADGPTIQAASLRALKSGGSLKRTLEMV

SEQ ID NO: 177851 - protein, 210 aa, Unknown
  Bacterial polypetide isolated from the Sargasso Sea
MKTYKQPSTVGRFGKFGGMYVSETLMPLLLNLDKSYKKIQKDKKFKKELNDLFKNYVGRPSSLHFAKNLSKYINGPKVYFKRDELNHTGAHKINNCLGQILLAKKMGKTRIIAETGAGQHGVATATVCALFGLPCYIYMGSKDIERQKPNVFRMRLLGATIIPVESGSRSLKDAMNEALRDWIKNVRDTFYIIGSTAGPHPYPKMVRDFQ

SEQ ID NO: 177852 - protein, 238 aa, Unknown
  Bacterial polypetide isolated from the Sargasso Sea
LFGLPCVVYMGDKDIQRQLPNVFRMKLLGAEIKSVSSGSKSLKDAMNEALRDWVTNVKETFYIIGTAAGPHPYPAMVRDFQSVIGKEVRKQLKDLEGKSPDLLIACIGGGSNALGLFHEFLDDSNVEMIAVEAAGHGINTNKHAASLTGGKPGVLHGNKTYLLQSNTGQIQEAHSISAGLDYPGIGPEHSFLFEEKRVKYMSATDKEALEAFQYCCKLEGIIPALEPAHALSVLKKNC

SEQ ID NO: 177853 - protein, 312 aa, Unknown
  Bacterial polypetide isolated from the Sargasso Sea
NHTGAHKINNCLGQILLAKRMKKKRIIAETGAGQHGLATATVCALFGLKCVIYMGSKDIKRQKPNVLKMKLLGADIIPVDSGSSTLKDAMNEALRDWVSNVGDTFYIIGTAAGPHPYPMMVRDFQSVIGKEVREQIFEYEKKLPDSLIACIGGGSNSLGLFHEFLDEKKVALYGIEAGGKGIKTGKHASSLLAGKPGVLHGNKTYILQNKYGQISEAHSISAGLDYPGIGPEHSWLKDIGRVKYFSVKDNQAIEGLKLCSKLEGIIPALEPSHALYFVTKFAPKKKKNHIIVMNLCGRGDKDLDAIAPLLNI

SEQ ID NO: 177854 - protein, 114 aa, Unknown
  Bacterial polypetide isolated from the Sargasso Sea
MTLVDPAPVTSTMPSAEALQASARPDCLGRFGRYGGQYVPETLMPALAELERSAAEAWQDPAFTGRLKELLRTYVGRPSPLYEAERLSEHYRRPEGGPRIWLKREDLNHTGAHK

SEQ ID NO: 177855 - protein, 268 aa, Unknown
  Bacterial polypetide isolated from the Sargasso Sea
CVFSWVKLMWTVSHPNVFRMRLLGAEIISVTSGRATLKDAMNEAMRDWVTNVKDTFYCIGTVAGPHPYPVMVRDFQSIIGREAREQLMNVEGKLPDTIVACIGGGSNAMGLFHAFLDDESVKIIGVEAGGLGVDSRMAHAASLTGGRPGVLHGNRTYLLQDEFGQIIEGHSISAGLDYPGIGPEHSWLHDIKRVEYVSVTDTEALAAFQLCCTKEGIIPALEPSHALAHVIKIAPGLGKRHILLLNMCGRGDKDIFTVANALGEELDA

SEQ ID NO: 177856 - protein, 211 aa, Unknown
  Bacterial polypetide isolated from the Sargasso Sea
MKYSVNSSGFYGDFGGAYIPEMLFSNIDELKKNYLSIVEKDSFTKEFNFYLKKYVGRPTPLYYANRLSKKYGSKIYLKREDLCHTGAHKINNTIGQILLARELKKTKIIAETGAGQHGVATATVCSLMGMECVIYMGEVDIERQRPNVERMRILGAEVRPATSGSRTLKDATNEAMRHWINNPDDTHYIIGSVVGPHPYPDMVARFQSVIS

SEQ ID NO: 177857 - protein, 274 aa, Unknown
  Bacterial polypetide isolated from the Sargasso Sea
FQQEFNQLLKDYVGRPSPLYFSKNLSEKYSAKIYLKREDLNHTGAHKINNTIGQIILAKRLKKSRIIAETGAGQHGVATATVCALMGLKCIVYMGATDVKRQAPNVARMKMLGADVIPVTSGSSTLKDATNEAMRDWINNPIDTHYIVGSVVGPHPFPDMVARFQSVISKEIKEQLLLAEGRNYPDYLIACVGGGSNAAGTFYDYLDDERVKIICVEASGKGVNSGKSAATTKLGKTGIIHGSKTLLMQTDDGQITEPYSISAGLDYPGIGPMH

SEQ ID NO: 177858 - protein, 181 aa, Unknown
  Bacterial polypetide isolated from the Sargasso Sea
MNQKKINFNSLKNQPSEDGKFGEYGGMFVAETLMPLILSLSKNYNKLKKSSSFQEKLKYYQKNYIGRPSPLYFANRITEYCGGAKIFFKRDELNHTGAHKINNVIGQALLAKEMGKNKIIAETGAGQHGVATATVCALFDMDCEVFMGEEDIERQKPNVERMQLLGAKIIPVSSGTGTLKD

SEQ ID NO: 177859 - protein, 175 aa, Unknown
  Bacterial polypetide isolated from the Sargasso Sea
ENKLPDLLIACIGGGSNALGLFYDFLDDKEIKMLAVEAAGLGLSSGKHAASLSGGKPGVLHGNKTYLLQNQDGQIEEAHSISAGLDYPGIGPEHSFLFEQKRVKYVSATDEEALEAFKYCCKTEGIIPALEPAHALAALIKIAPKMSKDEIIVMNMCGRGDKDIFTVADALKIKI

SEQ ID NO: 177860 - protein, 184 aa, Unknown
  Bacterial polypetide isolated from the Sargasso Sea
EVRSQIIAQENRLPDLLIACIGGGSNALGLFYEFLDDKEIKMLAVEAAGLGLSSGKHAASLSGGKPGVLHGNKTYLLQNQDGQIEEAHSISAGLDYPGIGPEHSFLFEQKRVKYVSATDEEALEAFKYCCKTEGIIPALEPAHALAALIKIAPKMSKEEIIVMNMCGRGDKDIFTVADALKIKI

SEQ ID NO: 177861 - protein, 266 aa, Unknown
  Bacterial polypetide isolated from the Sargasso Sea
PLYHASRITKELGGAKVYFKRDELNHTGAHKINNCIGQVLLAKRMGKSRIICETGAGQHGVATATVCALFGLPCTVYMGAKDIERQSPNVFRMKLLGANIVSVQSGSQSLKDAMNEALRAWVSDVEDTFYIIGTAAGPHPYPMLVRDFQSVIGEETKEQIIEAEGRLPDSLIACIGGGSNALGLFYPFLDDISVNLYGVEAAGKGLNTNEHAASLSLGSPGVLHGNRTYLLHNDDGQIIEAHSISAGLDYPGVGPKHSYLKDVNRV

SEQ ID NO: 177862 - protein, 277 aa, Unknown
  Bacterial polypetide isolated from the Sargasso Sea
ATATVCALFNLECVVYMGALDIKRQAPNVFKMKLLGAEIIPVESGTSTLKDAMNEALRDWVSNVDDTFYVIGTVAGPHPYPMMVRDFQSIIGIEAKKQILKKEKRLPDYLLACIGGGSNALGLFYPFLNNDDVKIIGIEAGGEGVNTEKHAASLSKGKPGFLHGNYTYLLQTNEGQISDAHSISAGLDYPGIGPEHSWLKETGRVNYFSATDKEALEAFKICSKLEGIIPALEPSHALAYLLKNSKKFKNNEIIIMNMCGRGDKDIFSISEHLGVTI

SEQ ID NO: 177863 - protein, 295 aa, Unknown
  Bacterial polypetide isolated from the Sargasso Sea
PTALTYASQLSKRWGVEVFLKREDLTHTGAHKINNALGQAMLAKKLGVKRIVAETGAGQHGVASAAACARLGLPCTVYMGAIDIERQAPNVDRMKQLGTEVISVMSGDQTLRAAIDEAFRDWVSDPENTHYIIGSVVGPHPFPYLVREMQSIIGKEARQQMLDVGENLPDAVFACVGGGSNAIGLFHAFLGDTEVELFGIEAGGTSDDLGENAATLASGKPGILHGTYSMLLHDDDGLIQETHSVSAGLDYPGVGPEHAFLQSINRVKYTSARDDEALELLREVCEYEGILPAIE

SEQ ID NO: 177864 - protein, 277 aa, Unknown
  Bacterial polypetide isolated from the Sargasso Sea
YFASRISEKINNAKIYFKRDELNHTGAHKINNCIGQILLAKRMGKKRIVAETGAGQHGLATATVCALFNLKCIVYMGETDIKRQAPNVFKMKLLGAEIRSVKSGTATLKDAMNEALRDWVSNVNDTFYVIGTVAGPHPYPMMVRDFQSIIGIEAKKQILKSEKRMPDLLIACIGGGSNALGLFYPFLNCEKVKIVGVEAGGKGINTDKHAASLSKGKPGYLHGNHTYLLQDKDGQILDAHSISAGLDYPGIGPEHSWLKEIGRVKYVNATDKEALNA

SEQ ID NO: 177865 - protein, 226 aa, Unknown
  Bacterial polypetide isolated from the Sargasso Sea
MRKYKQPSTVGRFGEFGGMYVSETLMPLLLNLDKSYKKIQKDKKFKKELNDLFKNYVGRPSSLHFAKNLSKYINGPKIYFKRDELNHTGAHKINNCLGQILLAKKMGKTRIIAETGAGQHGVATATVCALFGLPCYIYMGAKDIERQKPNVFRMKLLGATIIPVESGSKSLKDAMNEALRDWIKNVRDTFYIIGSTAGPHPYPKMVRDFQSVIGQEAREQILKVEK

SEQ ID NO: 177866 - protein, 279 aa, Unknown
  Bacterial polypetide isolated from the Sargasso Sea
VPPGNIGRGLYGVRAVRPDTHAFHAEPFERQEPCRVEGTRIVSTIEDTRGRFGPFGGRYVPETLVAALDELEAAWLEARKDDAFQAEVDRELRDFVGRPTALTFAPRLTAEVGGANIWLKREDLAHTGAHKINNTIGQVLLARRMGKQRIIAETGAGQHGVATATACARFGIACEVYMGAEDARRQSLNVFRMRLLGATVHEVEHGSRTLKDATNEAMRDWMGSVGDTHYVLGSVVGPHPFPTIVREFQSVIGRECRSQFPKATGGQPAAVIACVGGGS

SEQ ID NO: 177867 - protein, 118 aa, Unknown
  Bacterial polypetide isolated from the Sargasso Sea
MKKNKNINYKIFPDKNGRFGKFGGRFVAETLMPLLLKVEEEYKKAKNSKKFKSKLNYYFESYIGRPSPLYLAERLSSKLNGAKLYLKRDELNHTGAHKINNCVGQILLAMQMGKQRIV

SEQ ID NO: 177868 - protein, 223 aa, Unknown
  Bacterial polypetide isolated from the Sargasso Sea
MKEYETQNAQNESLSKVDETFCELKKNKKLALMPFIMAGDPNIEKTSEILLKLQENGADLIELGIPYSDPLADGPVIQLAASRALKSGTNLREVIKLLESLKGNLNIPIILFSYLNPLLSFGFEKFCEMAFNAGVSGLIIPDLPLEEAYKFSKIVSNNFMDLILLVAPTTPFERMKQISNHTKGFTYLVSVTGVTGERNKMENRVENLISKLKGLNNNPIAVG

SEQ ID NO: 177869 - protein, 187 aa, Unknown
  Bacterial polypetide isolated from the Sargasso Sea
VIKLLESLKGKLNIPIILFSYLNPLLCFGFEQFCKIASNSGVSGLIIPDLPLEEAYKFSQIVSNYSMDLILLVAPTTPFERMKQISNHTKGFTYLVSVTGVTGERNKMENRVENLIAKLKEVNTNPIAVGFGISTPEHVNKVREWGADGVIIGSAFVKRISSSSEKDVVDHVGEFCKNMRLAADQKK

SEQ ID NO: 177870 - protein, 286 aa, Unknown
  Bacterial polypetide isolated from the Sargasso Sea
LETYIGRPSPLFFAKRISEDLGGPKIYFKRDELNHTGAHKINNCMGQILLAKKMGKKRIIAETGAGQHGVATATVCALFGLPCIVYMGEKDIKRQSPNVFRMKLLGAEIRSVTTGSKSLKDAMNEALRDWVTNVRDTFYIIGTAAGPHPYPTMVRDFQSIIGEEVRQQILKAENKLPDLLMACIGGGSNALGLFHEFLDDKQIEMIAVEAAGHGIESGSHAASLSGGKPGILHGNKTYLLQSNDGQIDEAHSISAGLDYPGIGPEHSYLFEQKKSSNICQLQTKRL

SEQ ID NO: 177871 - protein, 76 aa, Unknown
  Bacterial polypetide isolated from the Sargasso Sea
MKNRISQLFDNLIEKKRAGLGIFITAGDPNLEISQKIFDSLPDFGADFIELGMPFSDPMADGPTIQSSSLRALNQG

SEQ ID NO: 177872 - protein, 181 aa, Unknown
  Bacterial polypetide isolated from the Sargasso Sea
MKSTNISRSFSKIKKEKRIALMPFLMAGDPDLETTAKILLELQANGADMIELGIPYSDPLADGPIIQLAASRALSAGTSPDRVFKMLFELRDQLTIPIILFTYSNPLINKGLEEFCLQASKVGVSGLVVPDLPLEEAEKLSDIAESKEIDLVLLVAPTTPKDRMKRIAATSNGFTYLVSVT

SEQ ID NO: 177873 - protein, 261 aa, Unknown
  Bacterial polypetide isolated from the Sargasso Sea
MGEEDIERQKLNVFRMNLMGAHIRPVSSGSKTLKDATNEAIRDWVSNVESTFYIIGSSVGPHPYPMLVRDFQSVIGKEAMIQFKELTGQPLPDKLIACVGGGSNALGLFYPFLPYNVEIIGVEAGGKGIDTAQHAATLTKGEFGVLHGAASMMLQNEDGQVTLPHSISAGLDYPGIGPEHSYLFKSKRVKYKTATDDEALDAFRWMSEKEGIIPALETAHAIAYLRQEDNGILNNEHVILNLSGRGDKDVSTVEQAMKKEI

SEQ ID NO: 177874 - protein, 155 aa, Unknown
  Bacterial polypetide isolated from the Sargasso Sea
IFYPFINIKETRLIGVEAGGKGVETGEHAAPLNDGKPGVLHGALSYLMQNDSGQVKATKSVSAGLDYPGVGPEHSLLKDSGRAEYVAVTDEAALKAFHEVSEFEGIIPALETAHAFAYLDSLMKEFDSSANVIVNVSGRGDKDINTVAEIDGIKF

SEQ ID NO: 177875 - protein, 291 aa, Unknown
  Bacterial polypetide isolated from the Sargasso Sea
YKQWRPSPLYRARKLEKALDTTAKIYYKYEGVSPTGSHKPNTAVAQAFFNKEEGTKKITTETGAGQWGSSLAFACSIFKIELDVYMVKVSYEQKPYRKMIMQTFGANCYASPSNRTPTGKAILEKDPNSTGSLGIAISEAVEMAAQDETTKYSLGSVLNHVLMHQTIVGNEAIMQMEMADDYPDILVGCTGGGSNFSGLVFPFLGKKFREKKDIKVIACEPKSCPTLTKGKFAYDFGDTGMRTPLVKMHTLGSQFMPPSTHSGGLRYHGMAPMVSHLTDIGAIEAKAFGQK

SEQ ID NO: 177876 - protein, 233 aa, Unknown
  Bacterial polypetide isolated from the Sargasso Sea
FGGMYVSETLMPLLLDLDKSYKKIQKDKKFKKELNDLFKNYVGRPSSLHYAKNLSKYINGPKIYFKRDELNHTGAHKINNCLGQILLAKKMGKTRIIAETGAGQHGVATATVCALFDLPCYIYMGSKDIERQKPNVFRMKLLGATIIPVESGSKSLKDAMNEALRDWIKNVRDTFYIIGSTAGPHPYPKMVRDFQSVIGKEAREQILKVEKKLPDYLIACVGGGSNAMGLFYP

SEQ ID NO: 177877 - protein, 144 aa, Unknown
  Bacterial polypetide isolated from the Sargasso Sea
RLIGVEAGGEGVETGEHAAPLNDGTPGVLHGALSYLMQDDSGQVKGTKSVSAGLDYPGVGPEHSWLKDSGRAEYVAVSDDAALKAFHEVSELEGIIPALETAHAFAYLDTLMKEFDKNSNIIVNVSGRGDKDINTVANIDGIKI

SEQ ID NO: 177878 - protein, 196 aa, Unknown
  Bacterial polypetide isolated from the Sargasso Sea
MIVRDFNSVVGEELISQSEELFNGMPDAIVACVGGGSNAMGIFYPFINMTETRLIGVEAGGEGVETGEHAAPLNDGSPGVLHGALSYLMQDDSGQVKSTKSVSAGLDYPGVGPEHSWLKDTGRAEYVAVSDDDALKAFHEVSEFEGIIPALETAHAFAYLDKLMKDFNPDSNIVVNVSGRGDKDINTVAEIDGIKF

SEQ ID NO: 177879 - protein, 290 aa, Unknown
  Bacterial polypetide isolated from the Sargasso Sea
EESYFEAKNDPNFIQECEDFSRDYIGRESPLYFAERLTEYIGGAKIYFKRDELNHTGSHKINNCLGQILLARRMKKSRIIAETGAGQHGVAVATVCARFGFECIIYMGKKDIDRQKSNVFKIKLLGGEVIPVESGSGTLKDAMNEALRDWVANVENTYYLIGTVAGPHPYPSMVRDFQSIIGKETKRQISEKENVLPNALVACIGGGSNALGLFYPFLDDDVDMYGVEAAGLGLEGKDHAASLSKGSPGILHGNRTYLLQDSEGQIEEGHSISAGLDYPGIGPEHSWLKD

SEQ ID NO: 177880 - protein, 292 aa, Unknown
  Bacterial polypetide isolated from the Sargasso Sea
EDLTHTGAHKINNALGQAMLAKKLGVKRIVAETGAGQHGVASAAACARVGLPCTVYMGAIDIERQAPNVDRMKQLGTEVISVMSGDQTLRAAIDEAFRDWVSDPENTHYIIGSVVGPHPFPYLVREMQSIIGKEARQQILNVEESLPDAVFACVGGGSNAIGLFHAFLADSEVELFGIEAGGTSDDLGENAATLASGKPGILHGTYSMLLHDNDGLIQETHSVSAGLDYPGVGPEHAFLQSINRVQYSSARDDEALELLREVCEYEGILPAIESSHALIEAKKWAKENKGKR

SEQ ID NO: 177881 - protein, 103 aa, Unknown
  Bacterial polypetide isolated from the Sargasso Sea
MINNIKKYNYPDSSGHFEEFGGKYVPETLIPALNELEEHYLNKKSNKSFQDKLNNLLKYYGGRETPLYLAKRISKELGYNVWLKREDLNHTGAHKINNALGQM

SEQ ID NO: 177882 - protein, 180 aa, Unknown
  Bacterial polypetide isolated from the Sargasso Sea
MKYTVDKKGFYGNYGGAFVPEMLFPNLDELEKNYNEIINDPNFKEDYNELLKDYVGRPTPLYFAERMSKKYKCKIYFKREDLCHTGAHKINNTVGQILLAKRLGKKRIIAETGAGQHGVATATVCALAGIECVIYMGAVDIKRQAPNVARMKMLGASIVAAESGSKTLKDATNEAIRDWI

SEQ ID NO: 177883 - protein, 300 aa, Unknown
  Bacterial polypetide isolated from the Sargasso Sea
LFFAERISNDLGGAKVYFKRDELNHTGAHKINNCMGQILLAKKMGKTRIIAETGAGQHGVATATVCALFGLPCIVYMGEKDIERQSPNVFRMKLLGAEIRSVSTGSKSLKDAMNEALRDWVTNVKDTFYIIGTAAGPHPYPAMVRDFQSVIGKEVREQLEDVEGRPPDLLMACIGGGSNALGLFHEFLDDSNIEMIAVEAAGHGINTDKHAASLTGGKPGVLHGNKTYLLQSNTGQIQEAHSISAGLDYPGIGPEHSFLFEEKRVKYMSATDKEALDAFQYCCKLEGIIPALEPSHALAV

SEQ ID NO: 177884 - protein, 270 aa, Unknown
  Bacterial polypetide isolated from the Sargasso Sea
MGQILLAKRMGKKRIIAETGAGQHGVATATVCALFGLPCVVYMGEKDIERQSPNVFRMKLLGAEIRSVATGSKSLKDAMNEALRDWVTNVEDTFYIIGTAAGPHPYPAMVRNFQSVIGKEVREQLKKQEGKPPDLLIACIGGGSNALGLFHEFLDDSDVEMIAVEAAGHGIKTNKHAASLNGGKPGVLHGNKTYLLQSDSGQIQEAHSISAGLDYPGIGPEHSFLFEEKRVKYMSATDKEALDAFQYCCKLEGIIPALEPSHALSVLRKI

SEQ ID NO: 177885 - protein, 269 aa, Unknown
  Bacterial polypetide isolated from the Sargasso Sea
MKNNKVNFLSLPDSNGRFGDYGGKFVSETLMPALDELEKNYRKIKNNNKFKKDVSKLLKDFVGRPTPLYLAERTTKSLGGAKIYLKREDLAHTGAHKINNTIGQAILAKLMGKKRIIAETGAGQHGVATATVCALLGLDCEIYMGATDTVRQSVNVQRMELLGAKVIPVKSGSQTLKDALNEALRDWVTNVRDTFYIIGSVAGPHPYPMIVRDFQSIIGKECRNQILKLEGKLPDLLIACVGGGSNAIGLFHPFLKDKSVKMVGVEAGG

SEQ ID NO: 177886 - protein, 169 aa, Unknown
  Bacterial polypetide isolated from the Sargasso Sea
FIIACVGGGSNAMGIFYPFIKMDNVELIGVEAAGKGIETGEHAAPLNDGTPGVLHGAKSYLMQDESGQVKGTASISAGLDYPGVGPEHSWLKDIKRAKYVAVSDDEVMKAFHMVNKMEGILPALETAHAFAYLDELMPKMNKDQHIVINVSGRGDKDLNSVVEIEDIKL

SEQ ID NO: 177887 - protein, 281 aa, Unknown
  Bacterial polypetide isolated from the Sargasso Sea
HSVGRPSPLYFASRLTEFFGGAKVYFKRDELNHTGAHKINNCIGQILLARRMGKKRIIAETGAGQHGVATATVCALFGLECVIYMGAKDIERQAPNVFRMKLLGAEVIPVKSGTSTLKDAMNEALRDWVSSVENTYYLIGTVAGPHPYPAMVRDFQSIIGKEVREQILKTEGRLPDTLVACIGGGSNAIGLFYDFLDEADINLIGVEAAGHGINTGSHAASLNGGVPGVLHGNRTYLLQDNDGQILDAHSISAGLDYPGIGPEHSWLHDIGRVNYVSVQDE

SEQ ID NO: 177888 - protein, 192 aa, Unknown
  Bacterial polypetide isolated from the Sargasso Sea
PVSSGTGTLKDAMNEALRHWVSNAKSHFYIIGTVAGPHPYPMMVRDFQSIIGEEARDQILEIEKKLPSKIIACIGGGSNAMGLFHSFLDDDKVEIIGVEAGGKGVNSKLHAASLTGGKPGILHGNKTYLIQDLDGQIIDAHSISAGLDYPGIGPEHSWLNDIGRVQYKACTDDEALEAFHLCSKLEGIISCP

SEQ ID NO: 177889 - protein, 138 aa, Unknown
  Bacterial polypetide isolated from the Sargasso Sea
MTIKNSFKQLPDEKGYFGSFGGRYVSETLMPLILEVEKEYEKIKNDNSFKEELSYYMETYIGRPSPLFFAERITKDLGGPKIFFKRDELNHTGAHKINNCMGQILLAKRMGKKRIIAETGAGQHGVATATVCALFGLP

SEQ ID NO: 177890 - protein, 252 aa, Unknown
  Bacterial polypetide isolated from the Sargasso Sea
EKKLVTFTTGGDPDLDTSLEILNTIISNGIDIIEIGMPFSDPMADGPTIQESSVRSIANGTKINDILEAVNKVRKLNNEIPIILMGYYNSIFNMGIKNFTSKCANVGVDGLIIVDLQPEEDSELYKEAKEKHIDLIRLVTPTTDEERLKTILNTASGFLYYVTITGITGQNSANIQHLKKSILKIKSSTKLPIVAGFGIKNRKDVEEISIFSDGVVVGSSIINIIKNNLKNKNKMITEIDKFTKDLKKGLKE

SEQ ID NO: 177891 - protein, 166 aa, Unknown
  Bacterial polypetide isolated from the Sargasso Sea
MSNSNKSNSLKNFPDENGNFGDYGGRFVAETLMPLLLEVNDAWKKAKKDKIFYKELNYFLEHFVGRPSPLYFAERMTEYLNGAKIYFKRDELNHTGAHKINNCMGQILLAKKMGKTRIIAETGAGQHGVATATVAARFGLECIIYMGHTDIERQKSNVFRMELLGA

SEQ ID NO: 177892 - protein, 187 aa, Unknown
  Bacterial polypetide isolated from the Sargasso Sea
MKENKKTQFPMNETLSKINKKFLELKKSDKLALMPFIMAGDPNIETTSEILLKLQEKGADLIELGIPYSDPLADGPIIQLSASRALKSGTTLKNVIQLLESLKDKLHIPIILFTYFNPVLNFGLENFCELVSKVGVSGLIIPDLPLEEAYKFSEIISSYSIDLILLVAPTTPSERMKIISNNTKGFT

SEQ ID NO: 177893 - protein, 285 aa, Unknown
  Bacterial polypetide isolated from the Sargasso Sea
MTFQTIIPNESGFYGEYGGMFIPEILRTTFDELIEAFTEAKADPEFWLGFEDVMQNYSCRPTPITPLDNFVNSLGGNFKLFCKREDLNHTGAHKANNVIGQGLLVKRMGKKRVIAETGAGQHGVATATMAARMGLECTIYMGSVDVERQRPNVFWMEQLGAEVVSVTDGTATLKDAINAAMRDWAESMETTHYVLGTTCGPHPFPEMVAWFQSIIGKEARQQMLETTGKLPDLVYACVGGGSNASGIFLPFLNDESVELVGVEAGGRGVDTGSHAARFYGGKVGI

SEQ ID NO: 177894 - protein, 78 aa, Unknown
  Bacterial polypetide isolated from the Sargasso Sea
MSNRINKAFEKKGKKLVTFTTGGDPDLNTSLDILNTIINNDVDIIEIGIPFSDPMADGPTIQESSVRSIANGTKINDL

SEQ ID NO: 177895 - protein, 189 aa, Unknown
  Bacterial polypetide isolated from the Sargasso Sea
SVIGKEVRKQLEELEGRSPDLLMACIGGGSNALGLFHEFLDDTNVEMVAVEAAGHGIKTDKHAASLTGGKPGVLHGNKTYLLQSKTGQIQEAHSISAGLDYPGIGPEHSFLFEEKRVTYMSATDKEALEAFQYCCKLEGIIPALEPAHALAVLKKIAKNYSKDKIIVMNMCGRGDKDIFTIADELNIKI

SEQ ID NO: 177896 - protein, 257 aa, Unknown
  Bacterial polypetide isolated from the Sargasso Sea
MGAEVIPVTSGRGTLKDAMNDALRDWVTNVRDTFYCIGTVAGPHPYPAMVRDFQSVIGKEVRWQLAEQEGEGRLPDTLVAAIGGGSNAMGLFHPFLDDKSVNIIGVEAGGKGVDEKMEHCASLTGGRPGVLHGNRTYLLQDDDGQILEGFSISAGLDYPGIGPEHAWLHETGRAQYVSITDKEALEAFQLSCAMEGIIPALEPSHALAHVMKIAPTLPKDHIIVMNMCGRGDKDIFTVARHLGFDMSDTEEGRDLEE

SEQ ID NO: 177897 - protein, 238 aa, Unknown
  Bacterial polypetide isolated from the Sargasso Sea
MLNNRINSYKEGPDENGRFGSFGGRFVSETLMPLILSLESEYKKAKSDKSFWKEMNFFLKDYVGRPSPLYFSERLTEHFGGAKIYLKRDELNHTGAHKINNVLGQILLAKRMGKKRIIAETGAGQHGVATATVCARFGLKCIVFMGKTDVERQAPNVFRMKLLGADIVSVTSGRGTLKDAMNEALRDWVTNVEDTFYCIGTVAGPHPYPSMVRDFQSIIGSETKQQILDKEGRLPDSL

SEQ ID NO: 177898 - protein, 246 aa, Unknown
  Bacterial polypetide isolated from the Sargasso Sea
MKLLGAEIRSVSTGSKSLKDAMNEALRDWVTNVKDTFYIIGTAAGPHPYPAMVRDFQSIIGKEVRSQLEEAEGKSPDLLMACIGGGSNALGLFHEFLDDTNVEMIAVEAAGHGIKTDKHAASLTGGKPGVLHGNKTYLLQSETGQIQEAHSISAGLDYPGIGPEHSFLFEEKRVTYMSATDKEALDAFQYCCKLEGIIPALEPAHALAVLKKIAKNYSSDKVIVMNMCGRGDKDIFTIADELKIKI

SEQ ID NO: 177899 - protein, 228 aa, Unknown
  Bacterial polypetide isolated from the Sargasso Sea
MKDAMNEALRDWVANVENTYYLIGTAAGPHPYPEMVRDFQSIIGEEAKRQILDKENVLPDALVACIGGGSNALGLFYSFLDDDVDMYGVEAAGMGLDGNEHAASLSKGVPGILHGNRTYLLQDTEGQIREGHSISAGLDYPGIGPEHSWLNDQGRVNYVSSTDDEALNAFEICSKYEGIIPALEPSHALAFVFKLAKDMKKDQIIIVNLCGRGDKDIETVADYLGVEV

SEQ ID NO: 177900 - protein, 226 aa, Unknown
  Bacterial polypetide isolated from the Sargasso Sea
MKVMVNEGVDIIELGIPFSDPMAEGVSIQKGHERALEKGTTITDAFSLVESFREINKETPLVFMGYMNTFESLGAEKFMSEALRVGLDGLLIVDMPPEESSDFTLQAKKNDIDIIRLIAPTTSLVRASNICNKSSGYVYYISVKGITGAANLDSADAKQKVQELKGLTELPVVIGFGIKDAQSAISVKDAADGVVVGSVFVDLVGEGGDILEKVTKKTRELSEALS

SEQ ID NO: 177901 - protein, 182 aa, Unknown
  Bacterial polypetide isolated from the Sargasso Sea
EARQEILKVEKKLPNYVIACVGGGSNAMGLFYPFVEDKDVNLVGVEAGGKGVDTNEHSATLVKGSIGVLHGTKTYLIQDDDGQITETHSISAGLDYPGVGPEHSYLKDSERANYVAVTDQQALKALALTSNLEGIIPALEPAHALAYLEELAPSLGKDQIILLGLSGRGDKDISTIMQNMSL

SEQ ID NO: 177902 - protein, 138 aa, Unknown
  Bacterial polypetide isolated from the Sargasso Sea
MPDKNGRFGIYGGRYVAETLVPALEELSEQYEIIKNDENFLKEFTDDLKYYVGRPSPLYFAKRWTELLGGAKIFLKREDLNHTGAHKINNTVGQILLAKHMGKKRIIAETGAGQHGVATASVAARHGLECIIYMEKKT

SEQ ID NO: 177903 - protein, 237 aa, Unknown
  Bacterial polypetide isolated from the Sargasso Sea
YFTAGFPKLDDTLKIIRELDNSNVDMIEIGLPFSDPLADGPTIQKSSEKALKNGMTTDLLFDQLKGLRSITDIPIVVMGYFNPILQYGFDKFCINCKKSGIDGLIIPDLPVDIYKKNYKSKVENYGLNMMFLITPQTSNDRIHVIDKISKGFIYMVSSFGVTGARDNFDKYQIEYFERIKEMKLSNPLLIGFGISNDKTFKSACENSNGAIIGSAYIQHLKNYGVSKTNDFIKKIKF

SEQ ID NO: 177904 - protein, 234 aa, Unknown
  Bacterial polypetide isolated from the Sargasso Sea
YISKKILKKLPDIGVDFIDIGIPFSDPMADGPLIQESSEAALKNGINIEKCFDLVSEIRLKEKNKPIILMGYYNPIFIYGNEKFIKKSVSLGVDGVIIVDLPIEEDNEFFYDARKHNLHVIRLVTPTTNISRLKKIIKKAQGFIYYVSVTGVTGTKSANINEVYQRVKLIKSLTNIPIIIGFGIKTPEQAKQMSNVSDGIVIGSSIVEEIKKSKSLNKIYNNCLIFIKKLMTKF

SEQ ID NO: 177905 - protein, 231 aa, Unknown
  Bacterial polypetide isolated from the Sargasso Sea
KKMGKSRIIAETGAGQHGVATATVCALFGLPCIVYMGEKDIERQSPNVFRMKLLGAEIRSVSTGSKSLKDAMNEALRDWVTNVKDTFYIIGTAAGPHPYPAMVRDFQSVIGKEVREQLLEVEGKSPDLLIACIGGGSNALGLFHEFLDDSNIEMVAVEAAGHGIDTDKHAASLTGGKPGVLHGNKTYLLQSNTGQIQEAHSISAGLDYPGIGPEHSFLFEEKKSNIYVSNR

SEQ ID NO: 177906 - protein, 181 aa, Unknown
  Bacterial polypetide isolated from the Sargasso Sea
MNKGYYGKFGGIFIPETLSFALRELDTLYQDIKNDTTFNNELQDIYIHYVGRPSPLYFAEKYTENIGGPKIWFKREDLNHTGAHKINNTVGQALLAKKLGKKRIIAETGAGQHGVATATICAKLGLECVIYMGETDIQRQELNVFKINTLGAKVVPVSSGTATLKDALNESIRDWVTNVEN

SEQ ID NO: 177907 - protein, 298 aa, Unknown
  Bacterial polypetide isolated from the Sargasso Sea
LAKYMGKKRNIAETGAGQHGVATATVAARLGLECHIYMGSEDVQRQSLNVYRIKLLGAQVHSVDSGSATLKDALNEALRDWVTNVDDTYYIIGSVTGPHPYPMIVRDFNSVVGEELISQSKELFDSMPDAIVACVGGGSNAMGAFYPFIKFNETRLIGVEAGGEGVETGEHAAPLNDGTPGVLHGALSYLMQDDSGQVKGTKSVSAGLDYPGVGPEHSWLKDSGRAEYVAVSDDAALKAFHEVSELEGIIPALETAHAFAYLDTLMKEFDKNSNIIVNVSGRGDKDINTVANIDGIKI

SEQ ID NO: 177908 - protein, 171 aa, Unknown
  Bacterial polypetide isolated from the Sargasso Sea
MTDPNKEGRFGEFGGRFVPETLIPACEELETAFRDAWADPAFVNEFHRILTDYGGRPSPLTECYRLSEQLGVRILLKREDLNHTGSHKINNVIGQALLARRMGKSRLVAETGAGQHGVATATAAALLDMECKVYMGQVDVERQELNVFRMHLLGSEVEAVSSGSQTLKDAV

SEQ ID NO: 177909 - protein, 150 aa, Unknown
  Bacterial polypetide isolated from the Sargasso Sea
LDDSDIEMIAVEAAGHGINTDKHAASLTGGKPGVLHGNKTYLLQSNSGQIQEAHSISAGLDYPGIGPEHSFLFEEKRVTYMSATDKEALEAFQYCCKLEGIIPALEPAHALAVLKKIAKNYSKDKIIVMNMCGRGDKDIFTIADELKIKI

SEQ ID NO: 177910 - protein, 250 aa, Unknown
  Bacterial polypetide isolated from the Sargasso Sea
NAWKDKLFVKELNHLLKTYVGRETPLYEAKRLTEHYKTKQATPRIWLKREDLNHTGAHKINNALGQALLAIRMGKKRIIAETGAGQHGVATATVCARFGLKCIIYMGAEDIKRQSLNVFRMKLLGAEVKVVNSGTATLKDATSEAIRDWVSNVETTHYILGSVAGPHPFPKIVRDFHAVIGEETKKQCLELFGSLPDILLACVGGGSNAMGLFHPFVKEKSVRLIGVEAAGSGVDTDKHAATITKGSVGI

SEQ ID NO: 177911 - protein, 267 aa, Unknown
  Bacterial polypetide isolated from the Sargasso Sea
MKEYNEPNKLGRFGVYGGMYVSETLMPLLIDLDQSYKKIQKDKKFQKDLADLFKNYVGRPSALHYAKNLSAFVKGPKVYFKRDELNHTGAHKINNCLGQILLAKKMGKTRIIAETGAGQHGVATATVCALFGLPCNIYMGSKDIERQKPNVFRMKLLGANIIPVESGSKSLKDAMNEALRDWIKNVRDTFYIIGSTAGPHPYPKMVRDFQSVIGKEAKEQILKVEKKLPDYLIACVGGGSNAMGLFYPFLDNKDVKIIGVEAHGKRT

SEQ ID NO: 177912 - protein, 298 aa, Unknown
  Bacterial polypetide isolated from the Sargasso Sea
GPHPRRGRQRRHRARRALLRPPRRRSHHPGARESPRRTPFRGRSRPITLTLSENQRGVSNRRSFSHPRRPADQTRAPPLRVRAPRPQAAATRALEAGTTLDQVIDLVARVTPDVSAPIVLFTYYNPIYQRGFEPFVKKIAAAGAKGLLVPDIPLEETGELSAVCKANGLDLVLLSTPTTPEERMAKIAEKSNGFIYLVSVTGVTGVRSGVESRVEGLVKSLKSVTDKPVAVGFGISKREQAAEVVQWGADGVIVGSALVKALGEAKTPEDGLAALKELAVELREGSNREGAKPKGSGG

SEQ ID NO: 177913 - protein, 119 aa, Unknown
  Bacterial polypetide isolated from the Sargasso Sea
MKNRISQLFNNLIEQKRAGLGIFITAGDPNLEISQKIFNSLPDFGADFIELGMPFSDPMADGPTIQSSSLRALNQGMNLKKTLLMVKKFRKNDIKTPVILMGYYNPIYQYDVERFITDS

SEQ ID NO: 177914 - protein, 214 aa, Unknown
  Bacterial polypetide isolated from the Sargasso Sea
DTFYIIGSTAGPHPYPKMVRDFQSVIGKEAREQILKVEKKLPDYLIACVGGGSNAMGLFYPFLNDKKVKIIGVEAAGRGAKTEETAATMTSGTPGILHGSYSYVLQDNDGQIKEAHSISAGLDYPGVGPEHSYLKDIKRVKYFGITDKEALEAFQTCSKLEGIIPALEPSHALAYLIKAFKNKHKNKVVILNLCGRGDKDLFTAAKAIGFDADE

SEQ ID NO: 177915 - protein, 182 aa, Unknown
  Bacterial polypetide isolated from the Sargasso Sea
KKQFTDMTNKKLPDRLIACVVGGSNALGLFYPFIDDNVKIIGVEAAGKGIDTNQHAATLTKGEFGVLHGAASMLLQSMDGQIALPYSLSAGLDYPGIGPEHSYLQKTKRVEYSSATDNEALEAFKWLSEKEGIIPALETAHAVAFLKNKNNNIKKNEHVILNLSGRGDKDINTIAKELGIEL

SEQ ID NO: 177916 - protein, 236 aa, Unknown
  Bacterial polypetide isolated from the Sargasso Sea
MKKTLNTYKSGPNLDGFFGIHGGRFVAETLMPLILELEKEYNAVKNDNSFQKELSYWYKHYIGRPSPLYYASRITKELGGAKVYFKRDELNHTGAHKINNCIGQVLLARKMNKTRIIAETGAGQHGVATATVCALFGLPCTIYMGARDIERQAPNVFRMKLLGAEIVTVESGSKTLKDAMNEALRDWVSNVENTFYIIGTAAGPHPYPMLVRDFQSIIGIETKEQIMNKRAGYLIV

SEQ ID NO: 177917 - protein, 145 aa, Unknown
  Bacterial polypetide isolated from the Sargasso Sea
MSELKLNPYFGQYGGMFVPQLLVPALKQLEQAYVDALADPAFHAEFQQLLTEYAGRPTPLTLCRNISPNPKVKIYLKREDLLHGGAHKTNQVLGQALLTKRMGKQEVIAETGAGQHGVATALACALLGLKCRIYMGAKDIERQQP

SEQ ID NO: 177918 - protein, 229 aa, Unknown
  Bacterial polypetide isolated from the Sargasso Sea
IGSVVGPHPFPGMVRDFQSVVGREAREQFKRMTGGKLPDSLVACVGGGCNAIGLFTAFLDDDKVAMFGVEPSGTDIGTVGKHAATMTKGTPGTIHGFKCLLLQDEKGEPAAVNTCASGLDYPGVGPQHCHLKDSGRVTYETASDEECVDAFMTLSRDQGIIPALESAHAVAFAMKLAAKKPASETILVNLSGRGDKDVDYVVTHFGAKYGVEVKETQMPAWDGAKANSA

SEQ ID NO: 177919 - protein, 236 aa, Unknown
  Bacterial polypetide isolated from the Sargasso Sea
VNSGTSTLKDAMNEAMRDWVTNVDDTYYIIGSVAGPHPYPQIVRDFNAVVGEEVLEQSKSVIGKDPDMLVACVGGGSNAMGLFYPFIEKKNVRLVGVEAGGLGLSTGKHAAPLNDGKEGVLHGMRTYLMQDDVGQVIETHSVSAGLDYPGVGPEHAWLKDIGRAEYESADDEEALDAFKELTRVEGIMPALETAHGIAYVKKIAPTMKDDQSIVVNVSGRGDKDINTVASIEGIEL

SEQ ID NO: 177920 - protein, 281 aa, Unknown
  Bacterial polypetide isolated from the Sargasso Sea
QREFHNDLNHFVGRPTSLYFAERFTGLLGGAKVYLKREDLNHTGAHKICNTVGQALLAKRMGKPRVIAETGAGQHGVATATIAARLGLECDVYMGAEDVRRQSLNVYRMKLMGANVIPVSSGSRTLKDALNEAMRDWVTNVDNTHYIIGTVAGPHPYPMIVRDFASVIGQEARAQMLEREGRLPDTVVACVGGGSNAMGIFYPFVNDSSVSLVGVEAGGNGLQTGEHAAPLNEGKVGVLHGNRTYLMCDDDGQINETHSISAGLDYPGVGPEHAYLKDIGR

SEQ ID NO: 177921 - protein, 145 aa, Unknown
  Bacterial polypetide isolated from the Sargasso Sea
MTNLISQTFKDDKKKLVTFVTGGDPDLETSLRIIKTIINNGADIIEIGMPFSDPMADGPTIQLSSNRAISKGISLEDIFYLASETKKIKSDLPIILMGYYNLILYFGIKKFVKKCKENGVDGLIIVDLQPEENEDLINELNKNKI

SEQ ID NO: 177922 - protein, 225 aa, Unknown
  Bacterial polypetide isolated from the Sargasso Sea
MKTYKQPSTVGRFGEFGGMYVSETLMPLLLNLDKSYKKIQKDKKFKKELNDLFKNYVGRPSSLHYAKNLSKYINGPKVYFKRDELNHTGAHKINNCLGQILLAKKMGKTRIIAETGAGQHGVATATVCALFGLPCYIYMGSKDIERQKPNVFRMKLLGATIIPVESGSKSLKDAMNEALRDWIKNVRDTFYIIGSTAGPHPYPKMVRDFQSVIEKRRESKYKREK

SEQ ID NO: 177923 - protein, 164 aa, Unknown
  Bacterial polypetide isolated from the Sargasso Sea
MPEQDLLKKKFDELKKKKKCGFISFITAGDPDFSTSYKILEKLPSHGVDIIELGMPFSDPMADGPTIQKANDRAIKNKMSLKKTFDLVKKFRKTNTSTPLLLMGYFNPILRFGINNFIKKIKKNKINGVIIVDLPPEEDNELCVPILKNKINFIKLASPTTDKN

SEQ ID NO: 177924 - protein, 287 aa, Unknown
  Bacterial polypetide isolated from the Sargasso Sea
LYFAERLTNYLGGAKIYLKRDELNHTGSHKINNCIGQILLAKRMRKNRIIAETGAGQHGVAVATVCARFGFECVIYMGKKDIERQKSNVFKIKLLGGEIVPVESGNGTLKDAMNEALRDWVANVENTYYLIGTAAGPHPYPSMVRDFQSIIGEEARRQILDKENVLPDALVACIGGGSNALGLFYPFLDDDVEMYGVEAAGLGLDGNEHAASLSKGVPGILHGNRTYLLQDTEGQIREGHSISAGLDYPGIGPEHSWLNDQGRVNYVSSTDDEALNAFEICSKYEGI

SEQ ID NO: 177925 - protein, 57 aa, Unknown
  Bacterial polypetide isolated from the Sargasso Sea
VGRPSPLYFAKRLTEHYNTASIWLKREDLNHTGAHKINNTVGQILLAKYMRKKKDNC

SEQ ID NO: 177926 - protein, 255 aa, Unknown
  Bacterial polypetide isolated from the Sargasso Sea
MSRIAHITKMARERGRKLLIPYLVVGDPSLQVTLDLMHSLVESGADIIELGIPFSDPSSDGPVIQRSIERSLGNGTSLRDAFNVVAEFRKSDQATPIVLMGYLNPVEILGADVFVKKSLEVGVDGVLLVDMPPAEAETIHKKLTEAEIDTIFLVAPTTSEDRVKSIVELTSGYVYYVSLKGVTGASISDAHSVQRNVDTLKKITDLPVVVGFGVKDEQSAKNMSGVSDGVIVGTALVKNIESLNQSTKVYYQDIA

SEQ ID NO: 177927 - protein, 226 aa, Unknown
  Bacterial polypetide isolated from the Sargasso Sea
EALRDWVTNVETTHYIIGSAVGPHPYPSIVKGFQKIIGIESREQILSLTNSLPDYVVACVGGGSNAIGMFSGFIKDDVKLIGVEAAGEGTMTPQHAATISKGRPGILHGAFSYLLQDNDGQVQEAHSISAGLDYPGVGPEHSYLNDTGRVKYVSATDEEALLGFDLLTKTEGIIPALEPSHAMGYLSKFLKKLDKKTKIILLISGRGDKDLDTVAAYRGISLKDKL

SEQ ID NO: 177928 - protein, 208 aa, Unknown
  Bacterial polypetide isolated from the Sargasso Sea
MNKNKNSFKQLPDEKGYFGQFGGRYVSETLMPLIYEVEKEYIKIKNDQNFLKELDYYLKHYIGRPSPLLFAERITKDLKGPKIYFKRDELNHTGAHKINNCMGQILLAKKMGKKRIIAETGAGQHGVATATVCALFGLPCVIYMGEKDIKRQSPNVFRMKLLGAKIESVNSGSKSLKDAMNEALRDWVTNVKDTFYIIGTAAGPHPYP

SEQ ID NO: 177929 - protein, 212 aa, Unknown
  Bacterial polypetide isolated from the Sargasso Sea
MDKLNSYKLGPDQNGRFGIFGGRFVAETLMPLILDLEKAYQQAKKDDSFQSELAYLNKYYTGRPSPLYFAERLTDYLKTAKIYFKRDELNHTGSHKINNCLGQILLAKRMGKTRIIAETGAGQHGVAVATVSARFGIPCVIYMGAKDIERQKPNVFRMKLLGAEVVPVRSGNSTLKDAMNEALRDWVANVNDTFYIIGTVAGPHPYPEMVRD

SEQ ID NO: 177930 - protein, 232 aa, Unknown
  Bacterial polypetide isolated from the Sargasso Sea
SRTLKDAMNEAMRDWVTNIDDTFYIIGTVAGPHPYPELVRDFQCVIGREAREQCLTQAGRLPDALVACVGGGSNAIGLFHPFLNDESVRMYGVEAGGHGIATGEHAAPLSAGQPGVLHGNRTYLMSDEAGQIIETHSVSAGLDYPGVGPEHSWLKDIGRVDYVDATDDEALHAFRELTRVEGIMPALESSHAVAYGMKLAASMSPEEIVVINLSGRGDKDIHTVAGIDGISI

SEQ ID NO: 177931 - protein, 220 aa, Unknown
  Bacterial polypetide isolated from the Sargasso Sea
MKYNVDNNGFYGDFGGSYIPEMLFSNIDELRKNYLKIVNKDSFEKEFNYYLNKYVGRPTPLYYANRLSEKYRAKIYLKREDLCHTGAHKINNTIGQILLAKELKKKKIIAETGAGQHGVATATVCALMGMECVIYMGEVDIKRQKPNVERMRILGADVKPALSGSKTLKDATNEAMRHWINNPDDTHYIIGSVVGPHPYPDMVARFQSVISKELIYQLNK

SEQ ID NO: 177932 - protein, 267 aa, Unknown
  Bacterial polypetide isolated from the Sargasso Sea
MQRYQQLFSRLSAAKQGAFVPFVTMGDPGLELSFDIIKTLIDAGADALELGIPFSDPIADGPVIQNANIRALAAGVTPAQCFELIGRIRQYNKDIPIGLLLYSNLVMARGIDSFYQQAQQAGVDSILIADVPLHESKLFRNAAMKHEIAPIFIAPPNITDDSLRELASYGRGYTYLLSRAGVTGTETQAAMPASTLINQLKEYNAAPTLLGFGISKPEHVKAAIESGAAGAISGSAIVQIIEKYQAEPAQLKQQLFDFVSSMKAATL

SEQ ID NO: 177933 - protein, 132 aa, Unknown
  Bacterial polypetide isolated from the Sargasso Sea
MGGRPGILHGNRTYLLQNDDGQIMEGFSISAGLDYPGIGPEHAWLHEIGRAKYVSITDKEALEAFQLSCTTEGIIPALEPSHALAHVMKIAPDLPSNHIICMNMCGRGDKDIFTVARHLGFEMSGLEGRNME

SEQ ID NO: 177934 - protein, 265 aa, Unknown
  Bacterial polypetide isolated from the Sargasso Sea
MLSPIAQRFEQLKQEKRLALMPFLMAGDPDLATTAEVLLSLQNSGADMVELGMPYSDPLADGPVIQAAAARALAAGTTPGKVLEMLTSLKGQLTIPVILFTYSNPLLNVGMEAFCERAAAAGAAGLVVPDLPLEEAERLSPLAEQQGLDLVLLVAPTTPADRMVRIGQRSRGFTYLVSVTGVTGERAQMETRVEGLVQELKQSSAVPVAVGFGISGADQVRQVRSWGADGAIVGSALVKRMAAAGDGQIAEEAGRFCRELRNAAD

SEQ ID NO: 177935 - protein, 380 aa, Unknown
  Bacterial polypetide isolated from the Sargasso Sea
MTKLNLNPYFGDFGGMFVPELLVPALVQLEQAFVDAQQDPAFIAEFQALLKDYAGRPTPLTLCRNVSPNPLAKIYLKREDLLHGGAHKTNQVLGQALLAKRMGKKDIIAETGAGQHGVATALACALLGVNCKIYMGAKDIERQQPNVFRMKLMGATVIPVTAGSGTLKDAVNEAMRDWSGSYATSHYLLGTAAGPHPFPTIVREFQKMIGEEAKQQILEAEGKLPDAVLACVGGGSNAIGMFADFIKEEGVRLIGVEPGGMGIETHQHGAALSTGSFGILHGAYTAIMQTQDGQIEESYSVSAGLDYPAVGPQHTYLQSIGRAEYVAINDDEALAAFQHLAKSEGIIPALESSHALAHALKMAAATTEPLVLLVNLSGRG

SEQ ID NO: 177936 - protein, 330 aa, Unknown
  Bacterial polypetide isolated from the Sargasso Sea
SDAIGGARILLKREDLNHTGAHKVNNTIGQALLAKYMGKKRVIAETGAGQHGVASATVAARLGLECHVFMGEEDIRRQALNVYRMKLLGARVVSVTSGSRTLKDAMNEAMRDWVTNVDDTFYIIGTVAGPHPYPMLVRDFQSVIGREARAQSLAQCGKLPDALVACVGGGSNAIGLFHPFLQDEGVAMYGVEAGGKGLETGEHAAPLSVGSPGVLHGNRTYLMQDDDGQILETHSVSAGLDYPGVGPEHAWLKDIGRVQYVAANDDEALAAFHRLTRVEGIMPALETAHAMAHAEKLAASMSPEQHIVVNLSGRGDKDILTVADLDGIEV

SEQ ID NO: 177937 - protein, 241 aa, Unknown
  Bacterial polypetide isolated from the Sargasso Sea
MLKNTFKSYPNEKGYFGQFGGRYVSETLMPLILEVEKEYEKIKNDKNFIDEFNHYLKTYVGRPSPLFFAERISKDLGGPKVYFKRDELNHTGAHKINNCMGQILLAKKMGKTRIIAETGAGQHGVATATVCALFGLPCIVYMGKKDIERQSPNVFRMKLLGAEIRSVSTGSKSLKDAMNEALRDWVTNVKDTFYIIGTAAGPHPYPAMVRDFQSVIGKEVREQLEDMEGRSPDLLMACIGG

SEQ ID NO: 177938 - protein, 208 aa, Unknown
  Bacterial polypetide isolated from the Sargasso Sea
MQTRNSYKKLPDEKGYFGNFGGRYVSETLMPLILEVEKEYKLIKNDNQFQKDLKYYLKTYIGRPSPLFFAERITKNLGGPKIYFKRDELNHTGAHKINNCMGQILLAKKMGKKRIIAETGAGQHGVATATVCALFGLPCIIYMGEKDIKRQSPNVFRMKLLGAEIRSVSTGSKSLKDAMNEALRDWVTNVRDTVYIIGTAAGPHPYPE

SEQ ID NO: 177939 - protein, 342 aa, Unknown
  Bacterial polypetide isolated from the Sargasso Sea
MLKKTNLKKFRKFNFKKFPDKNGRFGNFGGRFVAETLMPLLLSVQKEYEKAKKSKKFKDELDYYFKHYIGRPSPLYFAERLSKKLNNAKIYFKRDELNHTGAHKINNCIGQVLLAKRMGKKRIVAETGAGQHGLATATVCALFDLECVVYMGETDIKRQAPNVFKMKLLGAKINPVKSGTSTLKDAMNEALRDWVSNVNDTFYVIGTVAGPHPYPMMVRDFQSVIGIEAKKQILGLEKRLPDFLVACIGGGSNALGLFYPFLNDNVEIIGVEAGGKGINTGKHAASISKGKPGFLHGNHTYLLQNEDGQIEDAHSISAGLDYPGIGPEHAWLKEIGRVSYVN

SEQ ID NO: 177940 - protein, 149 aa, Unknown
  Bacterial polypetide isolated from the Sargasso Sea
EKNIRMLAVEAAGCGLNSEKHAASLTGGRPGILHGNKTYLLQSEDGQIKEAHSISAGLDYPGIGPEHSFLFDEKRVEYTSATDDEALEAFQYCCKLEGIIPALEPSHALAALKKIAPKMNSDEIVIMNMCGRGDKDIFTVAKALNINIK

SEQ ID NO: 177941 - protein, 128 aa, Unknown
  Bacterial polypetide isolated from the Sargasso Sea
MLQVYLGGKPGVLHGNKTYLLQNQDGQIEEAHSISAGLDYPGIGPEHSFLFEQKRVKYVSATDEEALEAFKYCCKTEGIIPALEPAHALAALIKIAPKMSKEEIIVMNMCGRGDKDIFTVADALKIKI

SEQ ID NO: 177942 - protein, 401 aa, Unknown
  Bacterial polypetide isolated from the Sargasso Sea
MNSNNKTLPDKNGFFGDYGGKFVPETLMYALEELESTYKKLKDNPEFKDQFYKDLSEFVGRPSPLYFAERLTKHYGTGSIWLKREDLNHTGAHKINNTIGQILLAKHMGKKRIIAETGAGQHGVATATVAARLGLECHIYMGSEDVQRQSLNVYRIKLLGAQVHAVDSGSATLKDALNEALRDWVTNVDDTYYIIGSVTGPHPYPMIVRDFNSVVGEELINQSKELFNSMPNAIVACVGGGSNAMGAFYPFINIKETRLIGVEAGGEGVETGEHAAPLNDGTPGVLHGALSYLMQDDTGQVKGTKSVSAGLDYPGVGPEHSWLKDSGRAEYVAVSDDAALKAFHEVSEFEGIIPALETAHAFAYLDTLMKEFDKKANIIVNVSGRGDKDINTVAEIDGIKF

SEQ ID NO: 177943 - protein, 262 aa, Unknown
  Bacterial polypetide isolated from the Sargasso Sea
VFWMEQLGAEVIPVTDGTATLKDAINAAMRDWAESMENTHYVLGTTCGPHPFPEMVSYFQSLIGEESKTQMLEKVGRLPDRVYACVGGGSNASGIFLPFIEDKEVSLVGVEAGGHGIETGEHAARFAGGSVGIAQGYKTYFFQNTEGQMQHTHSIAAGLDYIGVSPILSHLHDQGRVRFCAADDEAVVEATKLLIRREGIIPALECSHGFAGLIAEAGQIGDGEIILINLSGRGDKDIFNIAEAMQDEKWQQFIREKASLSL

SEQ ID NO: 177944 - protein, 400 aa, Unknown
  Bacterial polypetide isolated from the Sargasso Sea
MTDNKKMPNQEGYFGKYGGRYVAETLVPALEELSEKYHEIKDDEGFKKEVKEDLEKFVGRPSPLYFAERWSKQLGGASIYLKREDLNHTGAHKINNTVGQILLAKHMGKNRIIAETGAGQHGVATATVAARHGLKCFIYMGEEDTRRQSLNVFRIKLLGAEVIPVNSGTKTLKDAMNEAMRDWVTNVDDTYYIIGSVAGPHPYPEIVRDFNSVVGSELKLQAREQIGTEPDYIVACVGGGSNAMGIFYPFINSKDTKLIGVEAAGNGLETGEHAAPLNIGTEGVLHGMRTYLMQDDQGQIQETHSISAGLDYPGVGPEHSWLKDNGRAEYVAANDEEALDAFKELTLIEGIMPALETAHALAHVKKLAPTLDKEKSIVVNISGRGDKDINTVADLEGIKI

SEQ ID NO: 177945 - protein, 356 aa, Unknown
  Bacterial polypetide isolated from the Sargasso Sea
MNKKNSYKQLPDDRGYFGQFGGRYVAETLMPLVIEVENEYNKIKNDHSFNKEFEYYLEKFVGRPSPLFYAKRITEDLKGPKIYFKRDELNHTGAHKINNCIGQILLAKKMGKKRIIAETGAGQHGVATATVCALFNLPCVIYMGEKDIERQSPNVFRMKLLGAEIKSVSSGSKSLKDAMNEALRDWVTNVKDTFYIIGTVAGPHPYPSMVRDFQSVIGKEAKKQIIDAENRLPDLLVACIGGGSNAIGLFHEFLDDENVKMLAVEAAGHGLDSEKHAASLTGGKPGILHGNKTYLLQSKTGQIKEAHSISAGLDYPGIGPEHSFLYDEKRVKYTSATDSEALEAFQYCCKLEGIIP

SEQ ID NO: 177946 - protein, 286 aa, Unknown
  Bacterial polypetide isolated from the Sargasso Sea
MPTNEKLIPKGRFGRFGGRFVPETLMPALEELETAYEDAKKDPLFQVELDGLLKDFVGRPTPLYFAERLSSELKNLKVYLKREDLCHTGAHKINNTMAQVILAKRLGKKRIIAETGAGQHGVATATAAARYGLECSIYMGEEDIERQELNVFRMQLLGATVIPVKSGSGTLKDATNETLRDWTASVRTTHYIIGSVVGPHPFPEMIRDFQAVIGRETRKQFLEIEGRLPDSCVACVGGGSNAIGLFFPFLEDKDVELVGVEAGGRGLESGEHGASLAAGRIGVLHG

SEQ ID NO: 177947 - protein, 280 aa, Unknown
  Bacterial polypetide isolated from the Sargasso Sea
MKKNKIQMTKDEAISKVDEKFYELKKNKKLALMPFIMAGDPNIEITSEILLNLQENGADLIELGIPYSDPLADGPVIQLSASRALKSGTTPRKVITLLESLKGKLNIPIILFTYLNPLLCFDFEQFCEMASNAGVSGLIIPDLPLEEAYEFSKIVSTYSMDLILLVAPTTPFERMKKISQHTKGFTYLVSVTGVTGERNEMGNRVENLIAKLKEITTNPIAVGFGISSPEHVNKVRNWGADGVIIGSAFVKRISSSSEKDVVNHVGNFCKDMRLAADQKK

SEQ ID NO: 177948 - protein, 272 aa, Unknown
  Bacterial polypetide isolated from the Sargasso Sea
MRLENTFRSLAKKNQSAFITFLTAGDPDYETSINIINELPSCGVDIIEVGVPFSDPMADGPSVQASSLRALNNGMTLEKTLNLVKEFRKKNDITPIVLMGYYNPIYIYGNDKFLKDAKDAGVDGLIVVDLPPEEDHELCVPANKAGLNFIRLCTPTTDEKRIPAVLENTSGFLYYVSITGITGTKTPDFSKLVKPIETLKSKSKLPIAVGFGIKTKENAREVAKIADGVVVGSSIVDIIQTSLNEKKNGDEMKNKVLNYVKNLSEGVKQGRK

SEQ ID NO: 177949 - protein, 345 aa, Unknown
  Bacterial polypetide isolated from the Sargasso Sea
DELNQWAGRPTGLTFAKKLSELWGVKVYLKREDLTHTGAHKINNALGQALIAKQLNAKRVVAETGAGQHGVASAAACARVGIPCVVYMGAVDIERQAPNVDRMRQLGAEVIPVTTGDQTLRAAVDEAFRDWVGNPDDTYYILGSVVGPHPYPYLVRELQSIIGKESKDQIIKATKGLPDAVFACVGGGSNAIGIFHAFLGDESVELIGVEAGGKSQKLGDNAATLASGKPGILHGTYSMLLHDEDGLVQETHSVSAGLDYPGVGPEHAFLQSIGRVTYTSAEDDEALEEVRACCSLEGILPALESAHAFVGAKKWAEANQGKTILIGLSGRGDKDMPTLSKVLKI

SEQ ID NO: 177950 - protein, 368 aa, Unknown
  Bacterial polypetide isolated from the Sargasso Sea
MSDKIKYFLEESKMPKTWYNIAADLPKPLSPVLHPGTLKPIGPDDLAPLFPMALIGQEVSQEREIEIPDPVRKIYQQWRPSPLYRARKLEKLLDTPAKIYYKYEGVSPTGSHKPNTAVAQAFYNKEEGTKKITTETGAGQWGSSLAFACSIFKIELDVYMVKVSYEQKPYRKMIMQTFGANCYASPSDRTPTGKAILEKDPNNTGSLGIAISEAVEMAANDENTKYSLGSVLNHVLMHQTIVGNEAILQMEMADDYPDILVGCTGGGSNFSGLAFPFLGKKFRENKNLRVIACEPKSCPTITKGKFAYDFGDTGNRTPLVKMHTLGSSFMPPSTHSGGLRYHGMAPMVSHLVDIGAIEAKAFGQKECF

SEQ ID NO: 177951 - protein, 313 aa, Unknown
  Bacterial polypetide isolated from the Sargasso Sea
MKTYKQPSSVGRFGEFGGMYVSETLMPLLLNLDKSYKKIQKDKKFRKELNDLFKNYVGRPSSLHFAKNLSKYINGPKVYFKRDELNHTGAHKINNCLGQILLAKKMGKTRIIAETGAGQHGVATATVCALFGLPCYIYMGSKDIERQKPNVFRMKLLGATIIPVESGSKSLKDAMNEALRDWIKNVRDTFYIIGSTAGPHPYPKMVRDFQSVIGREAKEQILKVEKKLPDYLIACVGGGSNAMGLFYPFLNDKEVKIIGVEAAGRGAKTEETAATMTSGTPGILHGSYSYVLQDTDGQIKEAHSISAGLDYPG

SEQ ID NO: 177952 - protein, 400 aa, Unknown
  Bacterial polypetide isolated from the Sargasso Sea
MSKKNYKKYPNKDGHFDQYGGMFVSETLMHPLNQLLAAYKKIGKSSSFQKKLKSELSMFVGRPTPIYHAKRISRELGSCDIYLKREDLNHTGAHKINNAIGQALLAKEMGKTRIIAETGAGQHGVATATACAKYNIKCVVYMGSTDIERQKINVYRMKLLGAEVVPVESGSKTLKDALNEALRDWVTNVDDTHYIIGSVAGPHPYPMIVRDFQSVIGHESKNQMQSLFNTKPDILIACVGGGSNAIGLFHPFLNDNVEMFGVEAGGYGLSTGKHAAPLNKGKPGVLHGNRTYVMEDKNGQIQSTHSISAGLDYPGVGPEHSWLKDNKRVKYVSVTDDEALKAFNILTEREGIIPALETAHALAYAFKIAKKLKNKKILINLSGRGDKDIDTIAALTHIKS

SEQ ID NO: 177953 - protein, 266 aa, Unknown
  Bacterial polypetide isolated from the Sargasso Sea
MNRIEKKFNDSKASGKKCLISYITAGDPEKKITADLMHTLVSSGTDIIELGIPFSDPMADGPVIQKACERALINKTSCKDIFNIVKEFRKKNETTPVVLMGYLNPIERIGYENFSSESKESGVDGVLVVDLPHEEAQDIVNIFKKDGLDSIFLIAPNSTQERILNTLKYASGFLYYVSLKGVTGAKNIDIDDTISNLKKIKEDSNIPLAVGFGINNAESARLISKHSDAVVVGSSIIKVIENNLNKRENIINEVSKIVNEIRTALD

SEQ ID NO: 177954 - protein, 131 aa, Unknown
  Bacterial polypetide isolated from the Sargasso Sea
MTNYNVDKKGFYGDFGGAFIPEMLYPNLNELTLNYVRISKSKSFKKKFNQLLKDYVGRPTPLYFAQSLSEKFKCKVYLKREDLCHTGAHKINNTIGQILLAKELGKKRIIAETGAGQHGVATATVCALLGF

SEQ ID NO: 177955 - protein, 392 aa, Unknown
  Bacterial polypetide isolated from the Sargasso Sea
MAGEFPDEMGRFGPFGGRYIPETLVPAFSRLEEGMKQYLDDINFMEEWHNELNHWVGRPTALTFAPQLSQSWGANVWLKREDMAHTGAHKINNAIGQAMLAKKLGAKKVIAETGAGQHGVASAAACARVGLPCCVYMGVVDIERQAPNVDRMRQLGAEVIAVESGDRTLRAAIDEAMREWVSDPMDTYYIIGSAVGPHPYPFLVREFQSVIGTESKKQMLEQAGCLPDAVFACVGGGSNAIGMFYPLIQEEGIELIGVEAGGLGSGLGQNAASLATGTPGVLQGAYTIILQNKDGQVQETHSISAGLDYSGVGPEHALLQFIDRIQYVSAQDNEALEALTELCQTEGILTALETAHAFAAAKKWASKNPNKNILIGNSGRGDKDMSTLSKYI

SEQ ID NO: 177956 - protein, 273 aa, Unknown
  Bacterial polypetide isolated from the Sargasso Sea
MTVAPGSTAISSRFAGLKQQGRCALMPFLTAGDPDLATTRAALLALQANGADLVELGIPYSDPLADGPVIQAAASRALEVGTTPASVLEMLAGLKGELTMPVVLFTYSNPLLNVGMEKFCADAAAAGAAGLVVPDLPLEEAEKLSPIAAAQGLDLVLLVAPTTPAERMGRIAAASRGFTYMVSVTGVTGERAQMESRVAGLVGQLKAMGPTPVAVGFGISGPQQAIEVRNWGADGAIVGSALVKRMAQAKAEGGDPVAIAGAFCAELRAALDS

SEQ ID NO: 177957 - protein, 402 aa, Unknown
  Bacterial polypetide isolated from the Sargasso Sea
MKKNLKIFPDKDGRFGEYGGKFVSETLMPALNELEKEYKKIKKNKKFKNQISSLLKNFVGRPTPLYLAERTTKDLQGAKIYLKREDLAHTGAHKINNTVGQAILAKAMGKKRIIAETGAGQHGVATATICALLGLDCEVYMGELDTRRQAINVQRMELLGAKVIPVNSGSKTLKDALNEALRDWVTNIESTFYIIGSVAGPHPYPMIVRDFQSIIGEETRKQIIKVESKLPDLLVACVGGGSNAIGLFYPFLNDSKVKMVGVEAGGNGISSGLHSASISAGSKGVLHGSKTYLLQDKFGQINETHSVSAGLDYPGVGPEHSFLNDINRVSYKSVNDKEAIKALQYFSEKEGIIPALETAHALAFALKAAKKMKKSQSIIVNLSGRGDKDLQSVRDFLDKGKK

SEQ ID NO: 177958 - protein, 399 aa, Unknown
  Bacterial polypetide isolated from the Sargasso Sea
MKSSNLPDKNGFFGEYGGKFVPETLMYALDELEKTYNKLKDNNEFKKQFYKDLSEFVGRPSPLYFAERLTQHYGTGSIWLKREDLNHTGAHKINNTIGQILLAKYMGKKRIIAETGAGQHGVATATVAARLGLECHIYMGAEDVQRQSLNVYRIKLLGAQVHSVDSGSATLKDALNEALRDWVTNVDDTYYIIGSVTGPHPYPMIVRDFNSVVGEELIMQSKELFNSMPNAIVACVGGGSNAMGAFYPFINVAETRLIGVEAAGNGINTGEHAAPLNDGTPGVLHGALSYLMQDDSGQVKATKSVSAGLDYPGVGPEHSWLKDSGRAEYVAVDDDEALDAFHEVSELEGIIPALETAHAFAYLKILMKEFDKKSNIIVNVSGRGDKDINTVAQIDGIKL

SEQ ID NO: 177959 - protein, 266 aa, Unknown
  Bacterial polypetide isolated from the Sargasso Sea
MLDGEFPDESGRFGVFGGQYAPETLMPALKKLEKNIKIFLKDKTFQEEFVKELNSWAGRPTALTYAKQLSKRWGVEVFLKREDLTHTGAHKINNALGQAMLAKKLGVKRIVAETGAGQHGVASAAACARVGLPCTVYMGAIDIERQAPNVDRMKQLGTEVISVMSGDQTLRAAIDEAFRDWVSDPENTHYIIGSVVGPHPFPFLVREMQSIIGKEARQQMLNVEESLPDAVFACVGGGSNAIGLFHAFLGDSEVELFGIEAGGTSD

SEQ ID NO: 177960 - protein, 154 aa, Unknown
  Bacterial polypetide isolated from the Sargasso Sea
MDSLVKKYNMPDKHGHFEEFGGKYVPETLIPALDELEQEYLKSKKDKNFQKEFFSLLKHYGGRPTPLYLAKNISEELGFNVWLKREDLNHTGAHKINNALGQILLAHRMGKKRIIAETGAGQHGVATAAAAAKFGLECIVYMGEEDIERQKLNV

SEQ ID NO: 177961 - protein, 295 aa, Unknown
  Bacterial polypetide isolated from the Sargasso Sea
MGKKRIIAETGAGQHGVATATVAARLGLECHIYMGAKDVERQSLNVYRIKLLGAEVHAVDSGTATLKDALNEAMRDWVTNIENTYYIIGSVTGPHPYPMIVRDFNAIVGRELRKQSIEQFSQYPDAIIACVGGGSNAMGIFYPFLEESNVELIGVEAAGSGLKSGKHAAPLNDGEPGILHGAKSYLMQDENGQVIDTHSVSAGLDYPGVGPEHSNMKDSGRANYIAVDDKEVLDSFHLVTKLEGIMPALETAHAFAALDHIAKNYQSNQHLVINVSGRGDKDINTVATIDGISLD

SEQ ID NO: 177962 - protein, 347 aa, Unknown
  Bacterial polypetide isolated from the Sargasso Sea
MMSLLIIVGRPTPIYHASRISKELGSCNIYLKREDLNHTGAHKINNAMGQAMLAKAMGKTRIIAETGAGQHGVATATACARYNLKCVVYMGTEDIERQKVNVYRMKLLGAEVVGVDSGSKTLKDALNEALRDWVSNVDDTHYIIGSVAGPHPYPMIVRDFQSIIGHESKAQMKKIKKKADILVACVGGGSNALGLFHPYLNETVDIYGVEAGGYGLNTGKHAAPLNKGKPGVLHGNRTYIMEDKNGQIQATHSISAGLDYPGVGPEHSWLKDSKRVNYVSVTDKEALKAFYYLTEKEGIIPALETSHALAYAFKLAKTKKNKNILINLSGRGDKDIDTVASLKRMKV

SEQ ID NO: 177963 - protein, 406 aa, Unknown
  Bacterial polypetide isolated from the Sargasso Sea
MKNKDQNLLRALLDGELPDESGRFGSFGGQYAPETLMPALKKLEKNIKIFLNDEAFQEEFINELNSWAGRPTALTYASQLSKRWGVEVFLKREDLTHTGAHKINNALGQAMLAKKLGVKRIVAETGAGQHGVASAAACARLGLPCTVYMGAIDIERQAPNVDRMKQLGTEVISVMSGDQTLRAAIDEAFRDWVSDPENTHYIIGSVVGPHPFPYLVREMQSIIGKEARQQMLDVGENLPDAVFACVGGGSNAIGLFHAFLGDKEVELFGIEAGGTSDDLGENAATLASGKPGILHGTYSMLLHDDNGLIQETHSVSAGLDYPGVGPEHAFLQSINRVKYTSARDDEALELLREVCEHEGILPAIESSHAFVEARKWARGNQGKRILIGLSGRGDKDMPTLSKLMNE

SEQ ID NO: 177964 - protein, 263 aa, Unknown
  Bacterial polypetide isolated from the Sargasso Sea
MTRIDQTFKKLKSEGKKAFVSYIMAGDPDFETSLELVMGLPAAGVDIIELGLPFTDPMADGPTIQLAGGRSLDSGMTLVKTLEMAKRFREKDNSTPIVIMGYYNPIYSFGVEQFLIDAKSAGIDGLIVVDLPPEEDDELCIPAQAAGINFIRLATPTTDEHRLPKVLQNTSGFVYYVSITGITGAAEAQAIDVGPEVERIQKNSGLPVVVGFGINTPEKAKAIAEVADGAVVGSAIVSELAKGKPVADVLAFVKTLADGAHSA

SEQ ID NO: 177965 - protein, 393 aa, Unknown
  Bacterial polypetide isolated from the Sargasso Sea
MKYTVDKKGFYGNYGGAFVPEMLFPNLDELEKKYKKIINDIDFQEDYNNLLKDYVGRPTPLYFAERMSEKYKSKIYLKREDLCHTGAHKINNTVGQILLAKRLGKKRIIAETGAGQHGVATATVCALAGIECVIYMGAIDIKRQAPNVARMKMLGASVVAAESGSKTLKDATNEAIRDWINNPVTTHYIIGSVVGPHPYPDMVAKFQSIVSKEIKSQLIEKEGTDSPDYLIANIGGGSNAAGLYYHYLEDKKVKIISVEAAGEGVESGKSAATSVLGKTGIIHGSKTLLMQTKDGQIVEPYSISAGLDYPGVGPLHAHLLKSKRAEFMSITDSDAMLAGLEVSKLEGIIPAIETAHAFAAFKYLDFKPNDIIVVNFSGRGDKDLNTYIDYFNL

SEQ ID NO: 177966 - protein, 374 aa, Unknown
  Bacterial polypetide isolated from the Sargasso Sea
MTIKNSFKKLPDEKGYFGSFGGRYVSETLMPLILEVEKEYEKIKNEDNFKEELNHYMETYIGRPSPLFFAERITKDLGGPKIYFKRDELNHTGAHKINNCMGQILLAKKMGKKRIIAETGAGQHGVATATVCALFGLPCIVYMGEKDIKRQSPNVFRMKLLGAEIRSVTTGSKSLKDAMNEALRDWVTNVRDTFYIIGTAAGPHPYPAMVRDFQSIIGEEVREQILKAEKKLPDLLMACIGGGSNALGLFHEFLDDKQIEMIAVEAAGHGINSGNHAASLSGGKPGVLHGNKTYLLQSNDGQIDEAHSISAGLDYPGIGPEHSYLFEQKRVKYMSATDKEAIEAFQYCCNLEGIIPALEPSHCSCSFKKNSKKL

SEQ ID NO: 177967 - protein, 247 aa, Unknown
  Bacterial polypetide isolated from the Sargasso Sea
MSSRIRQTFENKKKKLVTFTTGGDPDLDTSVKILNTIINNGIDVIEIGMPFSDPMADGPTIQESSVRSIASGTKINEVFKIVNKVRTINNEIPIILMGYYNSIFNMGIKNFTSKCADAGVDGLIIVDLQPEEDSELYKETKDKNIDLIRLITPTTDEARLKTILNTASGFLYYVTITGITGQNSANIEHLKKSVLKIKLSTKLPIVAGFGIKNRKDVEEISAFTDGVVVGSSIVNIIKNNLNNKNNM

SEQ ID NO: 177968 - protein, 176 aa, Unknown
  Bacterial polypetide isolated from the Sargasso Sea
MANDLFNSFMNGPDDKGRFGKFGGRFVSETLMPLILELENQYEKAKNDKSFWTEMNDLWTNYVGRPSPLYFAERLTNHLGGAKIYFKRDELNHTGAHKINNVLGQIILAKRMEKTRIIAETGAGQHGVATATVCAKFGLRCVVYMGSHDVERQAPNVFRMKLLGAEVIPVTSGRGT

SEQ ID NO: 177969 - protein, 332 aa, Unknown
  Bacterial polypetide isolated from the Sargasso Sea
KDTKTRLYLKREDLLHGGAHKTNQVLGQALLAKRMGKKEIIAETGAGQHGVATALACALLGLKCRVYMGAKDCERQKPNVFRMKLMGATVIPVHSGSSTLKDACNEALRDWAANYESAHYLLGTAAGPHPFPTIVREFQKMIGEEAKAQCFEKEERLPDAVIACVGGGSNAIGMFADFIDEPSVRLIGVEPGGHGIESGEHGAPLGHGSKGVFFGMHSYLMQDNQGQIQESYSVSAGLDFPSVGPQHAHLAAIGRAEYPSVTDKEALDAFQELAKSEGIIPALESSHALAHALKMARSEPEKEQVLIVNLSGRGDKDIFTVADIFEKEGTLS

SEQ ID NO: 177970 - protein, 236 aa, Unknown
  Bacterial polypetide isolated from the Sargasso Sea
MNRYAQLFSRLDAANQGAFVPFVMLGDPTPELSLAIVDALVAGGADALELGIPFSDPVADGPTIQGAALRAFASHTTPDDCFELLGRIRAKYPQLPIGLLVYANLVYVRKIDGFYEKCQQAGVDSVLVADVPVQMCEPYKAAADKFGIDSIFIAPPNGDAETLKQVAELGNGYTYLVSRAGVTGAETKAGMPVEGLINTLREFKAPPALLGFGISEPAQVREAIAAGAAGPLRLRR

SEQ ID NO: 177971 - protein, 169 aa, Unknown
  Bacterial polypetide isolated from the Sargasso Sea
MFGSELITNSVENPKQKGPAIVPFITAGYPDKDSFLDLITALAKTADVIEIGVPFSDPMADGVTIQRSSHAAIESGVTLKWILEELKTLNTKTPIVLMSYLNPLYVYGYDQLVQASLEAGVDGFIIPDLPIEEGEEIREVFNEAKLAMIQLVTPATPENRINTIAKHGT

SEQ ID NO: 177972 - protein, 407 aa, Unknown
  Bacterial polypetide isolated from the Sargasso Sea
MPDRIKYFLEESKMPKTWYNIAADLPKPLSPVLHPGTLKPIGPDDLAPLFPMALIGQEVSQDREIEIPEPVREIYKQWRPSPLYRARKLEKALDTTAKIYYKYEGVSPTGSHKPNTAVAQAFFNKEEGTKKITTETGAGQWGSSLAFACSIFKIELDVYMVKVSYEQKPYRKMIMQTFGANCYASPSNRTPTGKAILEKDPNNTGSLGIAISEAVEMAAQDDHTKYSLGSVLNHVLMHQTIVGNEAIMQMEMADDYPDILVGCTGGGSNFSGLAFPFLGKKFREKKDIKVIACEPKSCPTLTKGKFAYDFGDTGMRTPLVKMHTLGSSFMPPSTHSGGLRYHGMAPLVSHLTDLGAIEPKAFGQKECFEAGVKFANAEGIVPAPEATHAVKGAIDAALECKKNEKRK

SEQ ID NO: 177973 - protein, 128 aa, Unknown
  Bacterial polypetide isolated from the Sargasso Sea
MKKNSYKSGPDTDGNFGLFGGRYVAETLMPLIIELEKAYSDALSDQDFRNEIKQFSKDYIGRESPLYFAERLTNYLKGAKIYFKRDELNHTGSHKINNCIGQILLAKRMRKNRIIAETGAGQHGVAVA

SEQ ID NO: 177974 - protein, 393 aa, Unknown
  Bacterial polypetide isolated from the Sargasso Sea
MKYTVDKKGFYGNYGGAFVPEMLFPNLDELEKNYNKIIGDKDFQNDYNNLLKDYVGRPTPLYFAERMSEKYKCKIYLKREDLCHTGAHKINNTIGQILLAKRLGKKRIIAETGAGQHGVATATVCALAGIECVIYMGAVDIKRQAPNVARMKMLGASVVSAESGSKTLKDATNEAIRDWINNPVTTHYIIGSVVGPHPYPDMVAKFQSVISTEIRSQLLEKEGTESPNYLIANIGGGSNAAGLYYNYLEDESVKIISVEAAGKGVESGKSAATSVLGKIGIIHGSKTLLMQTNDGQITEPYSISAGLDYPGVGPLHAHLLETKRAEFMSITDDDAMLAGLEISKLEGIIPAIETAHAFAAFNYLDFKSDDIIVVNFSGRGDKDLNTYIDYFNL

SEQ ID NO: 177975 - protein, 199 aa, Unknown
  Bacterial polypetide isolated from the Sargasso Sea
MNRIDKKLKEEGKLLSIYFTAGYPSKDDTVDIIFKLQESGVDMIEIGLPFSDPLADGPTIQDSSSEAIKNGMNTNVLFNQLKGIRNKVSIPLIIMGYFNPILQYGVEDFCKKCNEIGIDGLIIPDLPMDYYEENYKSIFKKYEIYNMFLIAPQTSDERIKKIDSISDGFIYMVSSSSITGSKDSFSPEQNLKNSRNGCY

SEQ ID NO: 177976 - protein, 280 aa, Unknown
  Bacterial polypetide isolated from the Sargasso Sea
AGQHGVATATVCALMGVKCVIYMGEVDIKRQSPNVARMKMLGSEVKSAKSGSKTLKDATNEAIRDWINNPLDTHYIIGSVVGPHPYPDMVARFQSVISDEIKTQLLNAENRDYPDYLIACVGGGSNAAGLYYNYLENKNVKIIAVEAAGKGISTGESAATSILGKEGIIHGSKTLLMQNKDGQITEPYSISAGLDYPGIGPMHANLYRSKRAEFVSVTDDEAMNWGLTLSQMEGIIPAIETAHAFSVLDTINFKASDIIVFNCSGRGDKDLDTYINYFKI

SEQ ID NO: 177977 - protein, 398 aa, Unknown
  Bacterial polypetide isolated from the Sargasso Sea
MKDNLPDKDGFFGEYGGKFVPETLMYALNELEQTYKTLKDNNDFNAEFHKDLAEFVGRPSPLYFAKRLTEHYSTASIWLKREDLNHTGAHKINNTVGQILLAKYMGKKRIIAETGAGQHGVATATVAARLGLDCHIYMGSEDVRRQSLNVYRMKLLGAEVHEVNSGSATLKDALNEALRDWVTNIEDTYYIIGSVTGPHPYPMIVRDFNAVVGYELIEQSQESFGRMPDSIIACVGGGSNAMGIFYPFIKMDNVELIGVEAAGKGIETGEHAAPLNDGTPGVLHGAKSYLMQDESGQVKGTASISAGLDYPGVGPEHSWLKDIKRAKYVAVSDDEVMKAFHMVNKMEGILPALETAHAFAYLDELMPKMNEDQHIVINVSGRGDKDLNSVVEIEGIKL

SEQ ID NO: 177978 - protein, 453 aa, Unknown
  Bacterial polypetide isolated from the Sargasso Sea
MSDRIKYFLEESKMPKTWYNIAADLPKPLSPVLHPGTLKPIGPDDLAPLFPMALIGQEVSQDREIEIPEPVREIYKQWRPSPLYRARKLEKALDTTAKIYYKYEGVSPTGSHKPNTAVAQAFFNKEEGTKKITTETGAGQWGSSLAFACSIFKIELDVYMVKVSYEQKPYRKMIMQTFGANCYASPSNRTPTGKAILEKDPNNTGSLGIAISEAVEMAAQDDHTKYSLGSVLNHVLMHQTIVGNEAIMQMEMADDYPDILVGCTGGGSNFSGLVFPFLGKKFREKKDVKVIACEPKSCPTLTKGKFAYDFGDTGMRTPLVKMHTLGSQFMPPSTHSGGLRYHGMAPMVSHLTDIGAIEPKAFGQKECFEAGVKFANAEGIVPAPEATHAVKGAIDAALECKKNGEKKTILFNLCGHGHFDMQAYGDYFNNKLSDDKYNEADANKALEKLPKIA

SEQ ID NO: 177979 - protein, 272 aa, Unknown
  Bacterial polypetide isolated from the Sargasso Sea
MAQNKNSYTQWPNEKGYFGDFGGRYVSETLMPLIEEVEQEYNSVRNDGKFQKEFDYYLKNYVGRPSPLFFAKRITEDLGGAKIYFKRDELNHTGAHKINNCMGQILLAKRMGKKRIIAETGAGQHGVATATVCALFGLPCIIYMGEKDIERQSPNVFRMKLLGAEIKSVSNGSKSLKDAMNEALRDWVTNVQDTFYIIGTAAGPHPYPSMVRDFQSVIGKEVRSQIIAQENKLPDLLIACIGGGSNALGLFHDFLDDKEIKMLAVEAAGLGL

SEQ ID NO: 177980 - protein, 278 aa, Unknown
  Bacterial polypetide isolated from the Sargasso Sea
MSSISNQTIPHQAGRYHAAFSRLKAEGRGAFVPFVTLGDPSPELSLKIIDTLVQNGADALELGFPFSDPLADGPVIQGANLRALAAGTTPTACFELLAKIRAKYPELPIGLLLYANLVFANGIDAFYAKAQQAGVDSVLIADVPVEEAALFIQAAKAHGIAPIFIAPPNADSDTLAKVSQSGEGYTYLLSRAGVTGTDTKAGTPVEEILAKLQAFNAPPPLLGFGIAEPAQVSAAIQAGAAGAISGSAVVKIIETYQQDEVKLLAALGDFTRAMKAAT

SEQ ID NO: 177981 - protein, 396 aa, Unknown
  Bacterial polypetide isolated from the Sargasso Sea
MSQLKLNPYFGEYGGMYVPQILVPALKQLEGAFVDAQTDESFQAEFTDLLKNYAGRPTALTLTRNLSPNPMVKIYLKREDLLHGGAHKTNQVLGQALLAKRMGKKEIIAETGAGQHGVATALACALLGLKCKVYMGAKDVARQSPNVFRMRLMGAEVIPVTSGSATLKDACNEAMRDWSGSYEKAHYLLGTAAGPHPFPTIVREFQRIIGEETKKQILEREGRLPDAVIACVGGGSNAIGMFADFIDEANVELIGVEPAGKGIDTHMHGAPLKHGKTGIFFGMKAPLMQDNEGQIEESYSISAGLDFPSVGPQHAHLNAIGRARYESATDDEALEAFQLLARSEGIIPALESAHALAYAMRLAKECTKETILVVNLSGRGDKDIFTVSDILNGKEE

SEQ ID NO: 177982 - protein, 272 aa, Unknown
  Bacterial polypetide isolated from the Sargasso Sea
MKLDKNNLPDKNGFFGEYGGKFVPETLMYALEELETTYEKLKNNNEFKEQFYKDLSEFVGRPSPLYFAERLTKHYGTGSIWLKREDLNHTGAHKINNTIGQILLAKYMGKKRIIAETGAGQHGVATATVAARLGLECHIYMGSEDVQRQSLNVYRIKLLGAQVHSVDSGSATLKDALNEALRDWVTNVDDTYYIIGSVTGPHPYPMIVRDFNSVVGEELISQSKELFDSMPDAIVACVGGGSNAMGAFYPFIKFNETRLIGVEAGGEGVETG

SEQ ID NO: 177983 - protein, 185 aa, Unknown
  Bacterial polypetide isolated from the Sargasso Sea
REVLEQSQSIIGKDPDMLVACVGGGSNAMGLFYPFIDKKSVRLIGVEAGGLGLSTGKHAAPLNDGKEGVLHGMRTYLMQDDKGQVIETHSVSAGLDYPGVGPEHAWLKDIGRAEYEAADDEEALDAFKELTRVEGIMPALETAHGIAYVKKVAPTMSKDNSIVVNVSGRGDKDINTVASIEGIEL

SEQ ID NO: 177984 - protein, 257 aa, Unknown
  Bacterial polypetide isolated from the Sargasso Sea
MKTYKQPSTVGRFGEFGGMYVSETLMPLLLNLDKSYKKIQKDKKFKKELNDLFKNYVGRPSSLHYAKNLSKYINGPKVYFKRDELNHTGAHKINNCLGQILLAKKMGKTRIIAETGAGQHGVATATVCALFGLPCYIYMGSKDIERQKPNVFRMKLLGATIIPVESGSKSLKDAMNEALRDWIKNVRDTFYIIGSTAGPHPYPKMVRDFQSVIGKEARKQILKVEKKLPDYLIACVGGGSNAMGLFYPFLNDKKVKI

SEQ ID NO: 177985 - protein, 271 aa, Unknown
  Bacterial polypetide isolated from the Sargasso Sea
MTVASGSTAITRCFEGLKQRGSCALMPFLTAGDPDLATTSAALMALQANGADLVELGIPYSDPLADGPVIQAAASRALDGGTTPGAVLEMLAGLKGQLTMPVVLFTYSNPLLNVGMEAFCANAAAAGAAGLVVPDLPLEEAEKLSPIAAAAGLDLVLLVAPTTPSERMARIAAASRGFTYLVSVTGVTGERAQMESRVAGLVGQLKGLGPTPVAVGFGISGPKQAIEVRNWGADGAIVGSALVKRMAQAKGDGADPVATAGAFCAELRSAL

SEQ ID NO: 177986 - protein, 106 aa, Unknown
  Bacterial polypetide isolated from the Sargasso Sea
MNKGYFGDYGGLFIPETLSHALNELEKLYTEIKDDEDFNLQLTNIYRDYVGRPSPLYFAESLTNHINGPKIWFKREDLNHTGAHKINNTVGQALLAKMLGKKRIMR

SEQ ID NO: 177987 - protein, 354 aa, Unknown
  Bacterial polypetide isolated from the Sargasso Sea
LDEFNYYLKTYVGLPSPLFFAERISNDLGGPKIYFKRDELNHTGAHKINNCMGQILLAKKMGKSRIIAETGAGQHGVATATVCALFGLPCIVYMGEKDIERQSPNVFRMKLLGAEIRSVSTGSKSLKDAMNEALRDWVTNVKDTFYIIGTAAGPHPYPTMVRNFQSIIGKEVRKQLEELEGKVPDLLMACIGGGSNALGLFHEFLDDSNVEMIAVEAAGHGIKTDKHAASLTGGKPGVLHGNKTYLLQSKSGQIQEAHSISAGLDYPGIGPEHSFLFEEKRVTYMSATDKEALEAFQYCCKLEGIIPALEPAHALAALKKIAKNYSKDKIIVMNMCGRGDKDIFTIADELNINI

SEQ ID NO: 177988 - protein, 172 aa, Unknown
  Bacterial polypetide isolated from the Sargasso Sea
MPDAIVACVGGGSNAMGAFYPFISMNETRLIGVEAGGEGVETGEHAAPLNDGIPGVLHGALSYLMQDEKGQVKETKSVSAGLDYPGVGPEHSWLKDSGRAEYVAVSDDEALKAFHEVSELEGIIPALETAHAFAYLDILMKEYDSSANIIVNLSGRGDKDINTVAEIDGIKL

SEQ ID NO: 177989 - protein, 130 aa, Unknown
  Bacterial polypetide isolated from the Sargasso Sea
KNNKEIGSASITDGSIGVLHGAKTKILQSSTGEIKETTSISAGLDYPGVGPEHAYLADIKRAEYVKIYDKEALEAFYKVSRLEGIIPALETAHSLAYLEKIKDLGKTLNVVVNMSGRGDKDLYSVMNNDS

SEQ ID NO: 177990 - protein, 274 aa, Unknown
  Bacterial polypetide isolated from the Sargasso Sea
MNQLDTKFGEFGGMYVPELLIPALDQLEKAFLDAKDDPTFNEEFLSLLKDYAGRPTSMTLTRNLVSNPKVKLYLKREDLLHGGAHKTNQVLGQALLTKRMGKKEVIAETGAGQHGVATALACALLGLKARIYMGAKDVERQAPNVFRMKLMGAEVIPVNAGSGTLKDAVNEAMRDWSANYDKAHYLLGTAAGPHPFPTIVREYHRMIGEETRAQIMEKEGRLPDAVVACVGGGSNAIGMFADFIDEPSVRLVGVEPAGKGVHTKEHGATIVTGT

SEQ ID NO: 177991 - protein, 100 aa, Unknown
  Bacterial polypetide isolated from the Sargasso Sea
QVQEAHSISAGLDYPGVGPEHSHLKDIGRAEYGSVTDQEALEALKLVSELEGIIPALETSHAFAWLDKLCPTLEKDTHIVINCSGRGDKDVNTVASSLDI

SEQ ID NO: 177992 - protein, 195 aa, Unknown
  Bacterial polypetide isolated from the Sargasso Sea
PKIVRDFHAVIGEETKKQCFETFGSLPDILLACVGGGSNAMGLFHPFVKETSVRLIGVEAAGSGVDTNKHAATITKGSVGILHGSMSLLLQDDNGQVQEAHSISAGLDYPGVGPEHSHLKDIGRAEYGSVTDQEALDALRLVSELEGIIPALETSHAFAWLDKLCPTLEKDTHIVINCSGRGDKDVNTVASSLKI

SEQ ID NO: 177993 - protein, 350 aa, Unknown
  Bacterial polypetide isolated from the Sargasso Sea
MESKNNLPDKNGFFGEYGGKFVPETLMYALDELENTYNKLKDSNEFKKQFYKDLSEFVGRPSPLYFAERLTKHYGTGSIWLKREDLNHTGAHKINNTIGQILLAKYMGKKRIIAETGAGQHGVATATVAARLGLECHIYMGAEDVQRQSLNVYRIKLLGAKVHSVDSGSATLKDALNEALRDWVTNVDDTYYIIGSVTGPHPYPMIVRDFNSVVGEELIDQSKELFNNMPDAIVACVGGGSNAMGAFYPFININQTRLIGVEAAGNGLKTGEHAAPLNDGSPGVLHGALSYLMQDEAGQVKATKSVSAGLDYPGVGPEHSWLKDSGRAEYVAVDDDEALEAFHQVSELEG

SEQ ID NO: 177994 - protein, 188 aa, Unknown
  Bacterial polypetide isolated from the Sargasso Sea
MQSIIGKEARQQMLNVEESLPDAVFACVGGGSNAIGLFHAFLGDREVELFGIEAGGTSDDLGENAATLASGKPGILQGTYSMLLHDNDGLIQETHSVSAGLDYPGVGPEHAFLQSINRVQYSSARDDEALELLKEVCEYEGILPALESSHAFVEAKKWAKENKGKRILIGLSGRGDKDMPTLSKLMHE

SEQ ID NO: 177995 - protein, 266 aa, Unknown
  Bacterial polypetide isolated from the Sargasso Sea
MLDGELPDESGRFGSFGGQYAPETLMPALKKLEKNIKIFLKDEAFQEEFINELNSWAGRPTALTYASQLSKRWGVEVFLKREDLTHTGAHKINNALGQAMLAKKLGVKRIVAETGAGQHGVASAAACARLGLPCTVYMGAIDIERQAPNVDRMKQLGTEVISVMSGDQTLRAAIDEAFRDWVSDPENTHYIIGSVVGPHPFPYLVREMQSIIGKEARQQMLDVEGKSPRCSVCLCWWRIKCNRFVSCFSRRYRSRAIRDRGRGNKR

SEQ ID NO: 177996 - protein, 358 aa, Unknown
  Bacterial polypetide isolated from the Sargasso Sea
DKDFLKEFRNDLSHYVGRPSPLYYAKRWTQLLGGAKIYLKREDLNHTGAHKINNTVGQILLAKHMGKKRIIAETGAGQHGVASATVAARHGLECIVYMGEEDIQRQSLNVFRMKLLGAEVVGVTSGTRTLKDAMNEAMRDWVTNVDDTYYIIGSVAGPHPYPEIVRDFNAVVGEEVIEQSKNEIGKNPDVLIACVGGGSNALGLFYPFIKSKEVRLIGVEAGGLGLSTGKHAAPLNDGKEGVLHGMRTYLMQDDAGQILETHSVSAGLDYPGVGPEHSWLKDTGRAEYVVADDEEALDAFKELTKIEGIMPALETAHGLAYVKKLAPTMKPDQTIVVNVSGRGDKDINTVASIEGIEL

SEQ ID NO: 177997 - protein, 350 aa, Unknown
  Bacterial polypetide isolated from the Sargasso Sea
QKDYNNLLKDYVGRPTPLYFAERMSEKYKCKIYFKREDLCHTGAHKINNTVGQILLAKRLGKKRIIAETGAGQHGVATATVCALAGIECVIYMGAIDIKRQAPNVARMKMLGASVVAAESGSKTLKDATNEAIRDWINNPITTHYIIGSVVGPHPYPDMVAKFQSIVSKEIKSQLIEKEGTDSPDYLIANIGGGSNAAGLYYHYLEDEKVKIISVEAAGEGVESGKSAATSVLGKTGIIHGSKTLLMQTKDGQIVEPYSISAGLDYPGVGPLHAHLLESKRAEFMSITDSDAMLAGLEVSKLEGIIPAIETAHAFAAFKYLDFKPNDIIVVNFSGRGDKDLNTYIDYFKL

SEQ ID NO: 177998 - protein, 253 aa, Unknown
  Bacterial polypetide isolated from the Sargasso Sea
MNRIDKKLKEEGKLLSIYFTAGYPSLDDTVDIIFKLQESGVDMIEIGLPFSDPLADGPTIQDSSSKAIKNGMNTNVLFDQLKGIRDKISIPLIIMGYFNPILQYGVENFCKKCNEIGIDGLIIPDLPIDYYEANYKSIFEENHLYNMFLIAPQTSDERIEKIDSISNGFIYMVSSSSITGSKNSFSPEQINYFERIEKMNLKTPRIIGFGVGNNQTFNTVVKYSKGAIIGSAFIKNLHEHGVDSIASYIGSIR

SEQ ID NO: 177999 - protein, 278 aa, Unknown
  Bacterial polypetide isolated from the Sargasso Sea
MSNTATQTIPHQGGRYHAAFSRLKAEGRGAFVPFVTLGDPSPELSLKIIDTLVQNGADALELGFPFSDPLADGPVIQGANLRALAAGTTPTQCFSLLAQIRAKYPELPIGLLLYANLVFANGIDAFYAKAQQAGVDSVLIADVPVEEAAPFIQAAKAHGIAPIFIAPPNADSETLEKVSQSGEGYTYLLSRAGVTGTDTKAGTPVEDILAKLQAFNAPPPLLGFGIAEPAQVSAAIKAGAAGAISGSAVVKIIEAHQQDKAKLLSTLGEFTRAMKAAT

SEQ ID NO: 178000 - protein, 396 aa, Unknown
  Bacterial polypetide isolated from the Sargasso Sea
MSQLKLNPYFGEYGGMYVPQILVPALKQLENAFVEAQADESFQAEFTDLLKNYAGRPTALTLTRNLSPNPMVKIYLKREDLLHGGAHKTNQVLGQALLAKRMGKKEIIAETGAGQHGVATALACALLGLKCKVYMGAKDVARQSPNVFRMRLMGAEVIPVTSGSATLKDACNEAMRDWSGSYEKAHYLLGTAAGPHPFPTIVREFQRMIGEETKKQMLEREGRLPDAVIACVGGGSNAIGMFADFIEETSVELIGVEPAGKGIDTHMHGAPLKHGKTGIFFGMKAPLMQDSEGQIEESYSISAGLDFPSVGPQHAHLNAIGRARYESATDDEALEAFQLLARSEGIIPALESAHALAYALRLAKGCTKETILVVNLSGRGDKDIFTVSDILNGKEE

SEQ ID NO: 178001 - protein, 271 aa, Unknown
  Bacterial polypetide isolated from the Sargasso Sea
MSRIQQTFAALAEQGRKGLIPFITAGDPDPAKTVEFMHALAEGGADVIELGVPFSDPMADGPVIQRSSERALARGVTLKSVLADVKRFRETDPKTPVVLMGYANPIERMGVDTFAAEAQAAGVDGVLVVDYPPEEAGVFAEKMRAAQIDPIFLLAPTSTDERIADVGKIASGYVYYVSLKGVTGAGNLDVSSIAGKIPAIKSRVPVPVGVGFGIRDAETARAVAEVSDAVVIGSRLVQLLETAAPEGAAAALKTFIAELRAALDGAGKTAR

SEQ ID NO: 178002 - protein, 287 aa, Unknown
  Bacterial polypetide isolated from the Sargasso Sea
GKKRIIAETGAGQHGVATAMACASLGLKAEIYMGYVDTIRQKQNVFRMELLGAKVHAVKSGSKTLKDAINEAMRDWITNVDSTYYLLGSAVGPHPYPLMVRDFQAVIGTEIKKQMKKIPNAVIACVGGGSNAIGTFYPLIDTKTRIIGIEAGGKGVKTKLHSAPLSAGKKGVLHGMMTYLMQDKDGQISETHSISAGLDYPGVGPEHAYLKDENRVEYKAVTDDEVIDAFLILTRTEGIIPALESAHAIAHAIKISKKMKKTESIVVTLSGRGDKDIDIVKEYLSKQ

SEQ ID NO: 178003 - protein, 344 aa, Unknown
  Bacterial polypetide isolated from the Sargasso Sea
MYNLPDERGHFGPYGGVFVAETLVHALNELRAAYEKYQKDPEFVAEYERELKHFVGRPSPIYHAQRWSEMLGGAQIFLKREDLNHTGAHKINNVIGQALLAKRMGKPRVIAETGAGQHGVATATIAARFGMECVVYMGEEDVRRQAANVYRMKLLGASVVPVQSGSRTLKDALNEAMRDWVTNVENTFYIIGTVAGPHPYPMMVRDFQRVIGDECKVQMPELVGRQPDAVIACVGGGSNAMGIFYPYIDDTSVQLIGVEPAGDGIETGRHAASLIGGSPGVLHGNRTYLLQDENGQIIETHSISAGLDYPGVGPEHAWLKDSKRAQYVSITEEEALKGFHDCCR

SEQ ID NO: 178004 - protein, 128 aa, Unknown
  Bacterial polypetide isolated from the Sargasso Sea
HAAPLNDGTPGVLHGAKSYLMQDENGQVKGTASISAGLDYPGVGPEHSWLKDIKRAKYVAVSDDEVMKAFHMVNRMEGILPALETAHAFAYLDELMPQMSKEQHIVINVSGRGDKDLNSVVEIEGIKL

SEQ ID NO: 178005 - protein, 380 aa, Unknown
  Bacterial polypetide isolated from the Sargasso Sea
MNKETKKLYKPSSNGRFGKFGGKFVPETLMSSLKEIENAFDEISKDQSFWDELILLQKDFVGRPTPIYFAKNLSQKLNQNIWIKREDLAHTGAHKINNALGQGLLAKKLGKKRIIAETGAGQHGVATATVCAMLNLECIVYMGEEDIKRQSPNVYRMEMLGAKVESVKSGSRTLKDAVNEAIRDWVTNVENSYYIIGSAVGPHPYPYIVREFQSVLGVESRSQILEKTGNLPDYVVACVGGGSNAIGIFSGFMDDTSVELIGVEASGEGVETKKHAATMTKGSPGILHGSLSYVLQDEYGQIQEAHSISAGLDYPGVGPEHSYLKDIERAKYFSATDEMALEGFKLLSVEEGIIPALEPAHALGFLLDWSKEIQPKSNIL

SEQ ID NO: 178006 - protein, 227 aa, Unknown
  Bacterial polypetide isolated from the Sargasso Sea
MSSKTSNLPDQNGFYGKYGGKFVPETLMYALEQLEETYNNLKDNKDFRKQFYKDLSEFVGRPSPLYFAERLTQHYGTGSIWLKREDLNHTGAHKINNTIGQILLAKHMGKKRIIAETGAGQHGVATATVAARLGLECHIYMGAEDVIRQSLNVYRIKLLGAQVHSVDSGSATLKDALNEALRDWVTNVDDTYYIIGSVTGPHPYPMIVRDFNSVVGEELIEQSKELF

SEQ ID NO: 178007 - protein, 401 aa, Unknown
  Bacterial polypetide isolated from the Sargasso Sea
MSSKTSNLPDQNGFYGKYGGKFVPETLMYALEQLEDTYKNLKDNKDFRKQFYKDLSEFVGRPSPLYFAERLTQHYGTGSIWLKREDLNHTGAHKINNTIGQILLAKHMGKKRIIAETGAGQHGVATATVAARLGLECHIYMGAEDVIRQSLNVYRIKLLGAQVHSVDSGSATLKDALNEALRDWVTNVDDTYYIIGSVTGPHPYPMIVRDFNSVVGEELIEQSKELFNAMPDAIVACVGGGSNAMGAFYPFININQTRLIGVEAGGEGVETGEHAAPLNDGEPGVLHGALSYLMQDEKGQVKETKSVSAGLDYPGVGPEHSWLKDSGRAEYVAVSDQDALRAFHEVSEFEGIIPALETAHAFAYLDTLMKEFDSKANIIVNVSGRGDKDINTVAKIDGIKF

SEQ ID NO: 178008 - protein, 414 aa, Unknown
  Bacterial polypetide isolated from the Sargasso Sea
MTSQTIIPNESGFYGEYGGMFIPEILRTTFDELIEAFAEAKADPEFWKGFEDVMQNYSCRPTPITPLDNFVNSLGGNFKLFCKREDLNHTGAHKANNVIGQGLLVKRMGKKRVIAETGAGQHGVATATMAARMGLECTIYMGSVDVERQRPNVFWMEQLGAEVVSVTDGTATLKDAINAAMRDWTESMGTTHYVLGTTCGPHPFPEMVAWFQSIIGKEARQQMLDTTGKLPDRIYACVGGGSNASGIFLPFLDDDTVELIGAEAGGKGVDTGSHAARFCGGNVGIAQGYKTYFFQDEEGQMRHTHSIAAGLDYIGVSPILSHLHDKKRVRFTATTDEEVISATKHLIRTEGIIPALECSHAFASVIEETPHIPNGSHVMINLSGRGDKDIFNIAEAIGDKNWDEFLRQKALTNQ

SEQ ID NO: 178009 - protein, 400 aa, Unknown
  Bacterial polypetide isolated from the Sargasso Sea
SLKNQPSEDGKFGEYGGMFVAETLMPLILSLSKNYNKLKKSSSFQEKLKYYQKNYIGRPSPLYFANRITDYCGGAKIFFKRDELNHTGAHKINNVIGQALLAKEMGKNKIIAETGAGQHGVATATVCALFDMDCEVFMGEEDIERQKPNVERMQLLGAKIIPVSSGTGTLKDAMNEALRHWVSNAKSHFYIIGTVAGPHPYPMMVRDFQSVIGEEARNQILAIEKKLPSKIIACIGGGSNAMGLFHSFLDDDKVEIIGVEAGGKGVNSKLHAASLTGGKPGILHGNKTYLLQDFDGQIIDAHSISAGLDYPGIGPEHSWLNDIGRVQYKACTDDEALEAFHLCSKLEGIIPALEPAHALHVTIQEAKTMKKDDIIIMNLCGRGDKDLSAVLPKLKAMGKI

SEQ ID NO: 178010 - protein, 113 aa, Unknown
  Bacterial polypetide isolated from the Sargasso Sea
MKNRISQLFNNLIENKRAGLGIFITAGDPNLETSQKIFNSLPNFGADFIELGMPFSDPMADGPAIQASSLRALNQGMNLKKTLLMVKNFRKKDIKTPVILMGYYNPIYQYGVK

SEQ ID NO: 178011 - protein, 298 aa, Unknown
  Bacterial polypetide isolated from the Sargasso Sea
MPDKHGHFEEFGGKYVPETLIPALDELEQEYLKSKKDKKFQKEFFNLLKYYGGRPTPLYLAKNISEELGFNVWLKREDLNHTGAHKINNALGQILLAHRMGKKRIIAETGAGQHGVATAAAAAKFGLECIVYMGEEDIERQKLNVFKINLMGAKVIPVTSGSKTLKDATNEAIRDWVTNVEDTFYIIGSSVGPHPYPMLVRDFQSVIGTETKKQFKDITNNELPDRLVACVGGGSNALGLFYPFIDDDVKIVGVEAAGKGIDTNQHAATLTKGEFGVLHGAASMLLQSTDGQIALPYS

SEQ ID NO: 178012 - protein, 199 aa, Unknown
  Bacterial polypetide isolated from the Sargasso Sea
MQYKNSYKQLPNEKGYFGQFGGRYVSETLMPLILEVEKEYNIIKEDKKFQSDLKYYLDTYVGRPSPLFFAERITENLGGPKIYFKRDELNHTGAHKINNCMGQILLAKKMGKKRIIAETGAGQHGVATATVCALFGLPCIIYMGEKDIKRQSPNVFRMKLLGAEIRSVSTGSKSLKDAMNEALRDWVTNVRDTFYIIGT

SEQ ID NO: 178013 - protein, 277 aa, Unknown
  Bacterial polypetide isolated from the Sargasso Sea
AVATVSARFGIPCVIYMGAKDIERQKPNVFRMKLLGAEVVPVRSGNSTLKDAMNEALRDWVANVNDTFYIIGTVAGPHPYPEMVRDFQSIIGKETKEQILDQEGRLPDQLIACIGGGSNAMGLFYPFLDDKSVKITGIEAGGMGLQGEKHCASLTAGRPGVLHGNRTYLLQDDDGQIIEGHSISAGLDYPGIGPEHAWLKESGRVEYFAITDSEAVEAFKICTKTEGIIPALEPSHAIAHLINIAPNLSKNDLVVMNLCGRGDKDIFTIAEHLNMEI

SEQ ID NO: 178014 - protein, 398 aa, Unknown
  Bacterial polypetide isolated from the Sargasso Sea
MKIGIPKDGRFGDFGGKYIPETLAPAIEELEKNYLKIRNDKNFKKELGRLLIDYAGRPTPIYFARNLTKTVGGAKIYLKREDLLHGGAHKINNTLGQALLAKRMGKKRIIAETGAGQHGVATAMACASLGLKAEIYMGYVDTIRQKQNVFRMELLGAKVHAVKSGSKTLKDAINEAMRDWITNVDSTYYLLGSAVGPHPYPLMVRDFQAVIGVEIKKQMKKIPNAVIACVGGGSNAIGTFYPLIDTNAKIIGIEAGGKGVKTKLHSAPLTAGKKGVLHGMMTYLMQDKDGQISETHSISAGLDYPGVGPEHAYLKDENRVEYKAVTDDEVIDAFLILTRTEGIIPALESAHAIAHAIKISKKMKKTESIVVTLSGRGDKDIDIVKEYLSKNVKNKRKI

SEQ ID NO: 178015 - protein, 394 aa, Unknown
  Bacterial polypetide isolated from the Sargasso Sea
MENFNINKDGFYGDFGGAFIPEMLQPNIDELQKKYLKITESTDFKKEFNKLLTDYVGRPTPLYFAKRLSNKYKTKIYLKREDLCHTGAHKINNTIGQIILAKRLGKKRIIAETGAGQHGVATATVCALMGIECVVYMGEIDISRQAPNVARMKMLGAKVRSATSGSRTLKDATNEAIRDWIANPIDTHYIIGSVVGPHPYPDMVARFQSVIGYETKKQLLEMEQTDKPTHVIACVGGGSNAAGLFYPFLNDLDVEIVCIEAAGKGVNSGESAATSILGTEGIIHGSKTLLMQTQDGQITEPYSISAGLDYPGIGPMHANLFKSKRGKFISIDDDDAMKWGLMLSQIEGIIPAIETSHAFAVLEKMDFNKDDIIIFNCSGRGDKDLDTYIDYFKL

SEQ ID NO: 178016 - protein, 101 aa, Unknown
  Bacterial polypetide isolated from the Sargasso Sea
MATLVSPDLPDARGRYGAYGGRYVPETLMSLLDDLEAAYRVAKEDPGFQAELDRYLREFIGRPTSLYFADRLTRHLGGARIYLKREDLAHTGAHKINNSMG

SEQ ID NO: 178017 - protein, 270 aa, Unknown
  Bacterial polypetide isolated from the Sargasso Sea
MKNNLPDKDGFFGEYGGKFVPETLMYALNELEQTYKTLKDNNDFNAEFHKDLAEFVGRPSPLYFAKRLTEHYKTASIWLKREDLNHTGAHKINNTVGQILLAKYMGKKRIIAETGAGQHGVATATVAARLGLDCHIYMGSEDVRRQSLNVYRMKLLGAEVHEVNSGSATLKDALNEALRDWVTNIEDTYYIIGSVTGPHPYPMIVRDFNAVVGYELIDQSQESFGRMPDSIIACVGGGSNAMGIFYPFIKMDNVELIGVEAAGKGIETGE

SEQ ID NO: 178018 - protein, 363 aa, Unknown
  Bacterial polypetide isolated from the Sargasso Sea
MSTASLNTYHNQPDESGRFGIHGGRFVAETLMPLILNVEAAYNAASADKAFTAKLAYYQKHYIGRPSPLYLAERLTSYFGGAKLYLKRDELNHTGAHKINNVIGQALLAKRMGKTKIIAETGAGQHGVATATACALFDMKCEVFMGAEDVERQSPNVERMRLLGAKIHPVTSGTGTLKDAMNEALRYWVTNAETHFYIIGTVAGPHPYPQMVRDFQSVIGTEARKQIIEAEGRLPNKIVACIGGGSNAMGLFYPFLDDKDVEIYGVEAAGKGIPSGLHAASLTGGQPGILHGNRTYLLQNNDGQITDAHSISAGLDYPGIGPEHSWLHDTGRVNYVSATDDEALVAFQLCARQEGIIPALEPS

SEQ ID NO: 178019 - protein, 304 aa, Unknown
  Bacterial polypetide isolated from the Sargasso Sea
MVGQILLAKHMGKKRIIAETGAGQHGVATASVAARHGLECIVFMGEEDIQRQSLNVFRIKLLGAKVVGVNSGTSTLKDAMNEAMRDWVTNVDDTYYIIGSVAGPHPYPQIVRDFNAVVGEEVLEQSKSVIGKDPDMLVACVGGGSNAMGLFYPFIEKKNVRLVGVEAGGLGLSTGKHAAPLNDGKEGVLHGMRTYLMQDDAGQVIETHSVSAGLDYPGVGPEHAWLKDIGRAEYESADDEEALDAFKELTRVEGIMPALETAHGIAYVKKIAPTMREDQSIVVNVSGRGDKDINTVASIEGIEL

SEQ ID NO: 178020 - protein, 399 aa, Unknown
  Bacterial polypetide isolated from the Sargasso Sea
MSEEYLPDNKGRFGIYGGRYVAETLVPALDELSEKYKLIKNDKDFLEEFRNDLSHYVGRPSPLYFAKRWTEFLGGAKIYLKREDLNHTGAHKINNTVGQILLAKHMGKKRIIAETGAGQHGVASATVAARHGLECVVYMGEEDIKRQSLNVFRMKLLGADVVAVNSGTRTLKDAMNEAMRDWVTNVDDTYYIIGSVAGPHPYPEIVRDFNAVVGEEVIEQSKDQIGKNPDVLIACVGGGSNALGLFYPFIKSKEVKLIGVEAGGLGLSTGKHAAPLNDGKEGVLHGMRTYLMQDDAGQILETHSVSAGLDYPGVGPEHSWLKDTGRAEYVVADDEEALDAFKELTKIEGIMPALETAHGLAYVKKLAPSMKPDQTIVVNVSGRGDKDINTVASIEGIEL

SEQ ID NO: 178021 - protein, 399 aa, Unknown
  Bacterial polypetide isolated from the Sargasso Sea
MSEEYLPDNKGRFGVYGGRYVAETLVPALDELSEQYQLIKNDKDFLEEFRNDLSHYVGRPSPLYFAKRWTQLLGGAKVYLKREDLNHTGAHKINNTVGQILLAKHMGKKRIIAETGAGQHGVASATVAARHGLECIVYMGEEDIKRQSLNVFRMKLLGAEVVGVTSGTRTLKDAMNEAMRDWVTNVDDTYYIIGSVAGPHPYPQIVRDFNAVVGEEVIEQSKNEIGKNPDVLIACVGGGSNALGLFYPFIQSKEVRLIGVEAGGLGLSTGKHAAPLNDGKEGVLHGMRTYLMQDDAGQILETHSVSAGLDYPGVGPEHSWLKDTGRAEYVVADDEEALDAFKELTKIEGIMPALETAHGLAYVKKLAPTMKPDQIIVVNVSGRGDKDINTVASIEGIEL

SEQ ID NO: 178022 - protein, 204 aa, Unknown
  Bacterial polypetide isolated from the Sargasso Sea
MSRIQARFSALQAAGRKALIPYITAGDPAPAVTLPLMHDLVAAGADIIELGIPFSDPMADGPVIQLAMERALAHEVSLRQVLEMVAEFRQRDNDTPVVLMGYLNPVERMGYDEFAREAAEAGVDGVLTVDLPPEEAVDVVPLFKARGLDTIFLLAPTTTAERARSICQQASGYVYYVSLKGVTGSSALDVTDVANKLDMLRTVT

SEQ ID NO: 178023 - protein, 253 aa, Unknown
  Bacterial polypetide isolated from the Sargasso Sea
MNRIDKKLKEEGKLLSIYFTAGYPNLDDTVDIIFKLQESGVDMIEIGLPFSDPLADGPTIQDSSTKAIKNGMNTNFLFNQLKRIRDKVSIPLIIMGYFNPILQYGVEDFCKKCNKIGIDGLIIPDLPIDYYEANYKSIFEENHLYNMFLIAPQTSDERIKKIDSISNGFIYMVSSSSITGSKNSFSPEQINYFERIEKMNLKTPRIIGFGVGNKETFNTVVKYSKGAIIGSAFIKNITENGVESIASYIDSIR

SEQ ID NO: 178024 - protein, 348 aa, Unknown
  Bacterial polypetide isolated from the Sargasso Sea
MNYNLDEKGYYGSFGGAFIPEMLYPNVNELKKNYLKIISEKNFQKEFNELLNKYVGRPTPLYFASRLSEKYNTKIYLKREDLCHTGAHKVNNTIGQILLAQRLGKNRIIAETGAGQHGVATATVCALMGIECIVYMGELDIKRQAPNVARMKMLGAKVISATSGSKTLKDATNEAIRDWINNPVNTHYIIGSVVGPHPYPDMVARFQSIISIEIQNQLKQVEGRDYPDYLIACVGGGSNAAGLYYQYLNDIRVNIIAVEAAGKGIYSGESAATSALGKEGIIHGSKTLLMQTADGQITEPYSISAGLDYPGVGPLHANLYRSKRAEFISIPDQEAMDWGLTLSQMEGI

SEQ ID NO: 178025 - protein, 294 aa, Unknown
  Bacterial polypetide isolated from the Sargasso Sea
MGKKRIIAETGAGQHGVATATVAARLGLDCHIYMGSEDVRRQSLNVYRMKLLGAEVHEVNSGSATLKDALNEALRDWVTNIEDTYYIIGSVTGPHPYPMIVRDFNAVVGYELIDQSQESFGRMPDSIIACVGGGSNAMGIFYPFIKMDNVELIGVEAAGKGIETGEHAAPLNDGTPGVLHGAKSYLMQDESGQVKGTASISAGLDYPGVGPEHSWLKDIKRAKYVAVSDDEVMKAFHMVNKMEGILPALETAHAFAYLDELMPKMNKDQHIVINVSGRGDKDLNSVVEIEDIKL

SEQ ID NO: 178026 - protein, 401 aa, Unknown
  Bacterial polypetide isolated from the Sargasso Sea
MKKNSYKSGPDTDGNFGLFGGRYVAETLMPLIIELEKAYSDALSDHDFRNEINQFSKDYIGRESPLYFAERLTNYLEGAKIYFKRDELNHTGSHKINNCIGQILLAKRMRKNRIIAETGAGQHGVAVATVCARFGFECVIYMGKKDIERQKSNVFKIKLLGGQIVPVESGNGTLKDAMNEALRDWVANVENTYYLIGTAAGPHPYPEMVRDFQSIIGEEAKRQILDKENVLPDALVACIGGGSNALGLFYTFLDDDVDMYGVEAAGMGLDGDEHAASLSKGVPGILHGNRTYLLQDTEGQIREGHSISAGLDYPGIGPEHSWLNDQGRVNYVSSTDDEALNAFEICSKYEGIIPALEPSHALAFVFKLAKDMRKDQIIIVNLCGRGDKDIETVADYLGVEV

SEQ ID NO: 178027 - protein, 144 aa, Unknown
  Bacterial polypetide isolated from the Sargasso Sea
MNRSIQKGKYNFPDQKGHFGVFGGRFVAETLIYPLDQLKKTYLSLKEDKDFNALMQDDFANFVGRPTPLYFAKRLTDLCKGANIYFKREDLCHTGAHKINNAIGQAILAKKMGKNRIIAETGAGQHGVATATVAARLGMECVSI

SEQ ID NO: 178028 - protein, 280 aa, Unknown
  Bacterial polypetide isolated from the Sargasso Sea
MSRLKQITSSANQKGRKLLIPYLVAGDPSKETTIDLMHALVSNGADIIELGIPFSDPSSDGEVIQNSIERSLRKGTSLNDTLDIVSKFRARNEVTPIVLMGYLNPVEIMGIDNFVRRAQKEGVDGVLMVDMPPAEAGVLNAKLKEVNIDSIFLVAPTTTQERVKSILNMTSGYVYYVSLKGVTGASITDVDEVERNVCSLRSSTDLPIVVGFGIKDGKSAKEMARVSDGVIVGSALVNKIASLTSHEKISAEDIKNSTNIIKEIREELDLDNEVVDEEYL

SEQ ID NO: 178029 - protein, 401 aa, Unknown
  Bacterial polypetide isolated from the Sargasso Sea
MTTNKHNWPDKDGFFGEYGGKFVPETLMHALEELEKTYNNFKDKPEFKEQFYKDLSEFVGRPSPLYFAERLTNHYGTGSIWLKREDLNHTGAHKINNTIGQILLAKYMGKERIIAETGAGQHGVATATVAARLGLECHIYMGAEDVQRQSLNVYRMKLLGAQVHSVESGSATLKDALNEALRDWVTNVDNTYYIIGSVTGPHPYPMIVRDFNSVVGEEVVAQSKDLFNDMPNAIVACVGGGSNAMGIFYPFIDIKETRLIGVEAGGEGVETGEHAAPLNDGTPGVLHGALSYLMQNDSGQVKATKSVSAGLDYPGVGPEHSLLKDSGRAEYVAVTDKAALKAFHEVSELEGIIPALETAHAFAYLDVLMKDFDSSANIIVNVSGRGDKDINTVAEIDGIKF

SEQ ID NO: 178030 - protein, 331 aa, Unknown
  Bacterial polypetide isolated from the Sargasso Sea
YAKQLSKRWGVEVFLKREDLTHTGAHKINNALGQAMLAKKLGVKRIVAETGAGQHGVASAAACARVGLPCTVYMGAIDIERQAPNVDRMKQLGTEVISVMSGDQTLRAAIDEAFRDWVSDPENTHYIIGSVVGPHPFPFLVREMQSIIGKEARQQMLNLEESLPDAVFACVGGGSNAIGLFHAFLGDSEVELFGIEAGGTSDDLGENAATLASGKPGILHGTYSMLLHDNDGLIQETHSVSAGLDYPGVGPEHAFLQSINRVKYSSARDDEALELLREVCEYEGILPAIESSHAFVEAKKWAKDNKGKRILIGLSGRGDKDMPTLSKLMHE

SEQ ID NO: 178031 - protein, 273 aa, Unknown
  Bacterial polypetide isolated from the Sargasso Sea
CALFICLVLFTMGEKDIERQSPNVFRMKLLGAEIKSVSSGSKSLKDAMNEALRDWVTNVNDTFYIIGTVAGPHPYPSMVRDFQSIIGKEVKKQILKYEKKLPDLLLACIGGGSNAIGLFHEFLDDKEVKMIAVEAAGLGLNTDKHAASLSGGKPGVLHGNKTYLLQSKNGQIKEAHSISAGLDYPGIGPEHSFLFDEKRVEYMSATDEEAIEAFQYCCKLEGIIPALEPSHALAILKKIAPNMKQDEIVVMNLCGRGDKDIFTIAENLNINIK

SEQ ID NO: 178032 - protein, 406 aa, Unknown
  Bacterial polypetide isolated from the Sargasso Sea
MKNNKVNFLSLPDSNGRFGDYGGKFVSETLMPALDELEKNYRKIKNNDKFKKDVSKLLKDFVGRPTPLYLAERTTKSLGGAKIYLKREDLAHTGAHKINNTIGQAILAKLMGKKRIIAETGAGQHGVATATVCALLGLNCEIYMGATDTVRQSVNVQRMELLGAKVIPVTSGSQTLKDALNEALRDWVTNVRDTFYIIGSVAGPHPYPMIVRDFQSIIGKESRNQILKLEGKLPDLLIACVGGGSNAIGLFHPFLKDKSVKMVGVEAGGSGIKSGQHSATIVAGSVGVLHGSKTYILQDKQGQVVETHSVSAGLDYPGVGPEHSYLNDIKRVEYKSVKDFEAVKALQYFSEKEGIIAALETSHALFYAMKVAKTMKKNQSIIVNLSGRGDKDLESVNAFIKKNRSN

SEQ ID NO: 178033 - protein, 262 aa, Unknown
  Bacterial polypetide isolated from the Sargasso Sea
MSRIEAKFADLKSKKESAFVTFLMAGDPTIKESQTIFKKLPKLGVDIIEIGMPFTDPMADGILIQKAGQRSLSNETTLNNIFDLVKEIRKEDNKIPIILMGYYNPIYSMGVNKFLNQSKSCGVDGFYSGDLPPEEDQEFCIPARKMGLDFIRLATPTTSSKRIPKVLKNTSGFIYYVSVTGITGSRNLDIEKVEKQVQIIKSQTNIPVCVGFGIKTPEDAKSVSAVADGVVVGSSIVELIEKNTPIDKICDYIKMLADAVHE

SEQ ID NO: 178034 - protein, 194 aa, Unknown
  Bacterial polypetide isolated from the Sargasso Sea
VRDFNSVVGEELISQSKELFDSMPDAIVACVGGGSNAMGAFYPFIKFNETRLIGVEAGGEGIETGEHAAPLNDGTPGVLHGALSYLMQDDSGQVKGTKSVSAGLDYPGVGPEHSWLKDSGRAEYVAVSDDAALKAFHEVSELEGIIPALETAHAFAYLDTLMKEFDKNSNIIVNVSGRGDKDINTVANIDGIKI

SEQ ID NO: 178035 - protein, 208 aa, Unknown
  Bacterial polypetide isolated from the Sargasso Sea
ADGPVIQGANLRALAAGTTPTQCLNLLAQIRAKYPELPIGLLLYANLVFANGIDTFYAKAQQAGVDSVLIADVPVEEAAPFIQAAKAHGIAPIFIAPPNADSETLEKVSQSGEGYTYLLSRAGVTGTDTKAGTPVEDILAKLQAFNAPPPLLGFGIAEPTQVSAAIKAGAAGAISGSAVVKIIEAHQQDEARLLSTLGEFTRAMKAAT

SEQ ID NO: 178036 - protein, 401 aa, Unknown
  Bacterial polypetide isolated from the Sargasso Sea
MNNLTNLPNPDGFFGEYGGKFVPETLMHALKELDETYSKLKNNPKFIEEIDQDLVQFVGRPSPLYYAKRLTDHYSGPQIWLKREDLNHTGAHKINNTVGQILLAKAMGKKRIIAETGAGQHGVATATVAARLGLECHIYMGAKDVERQSLNVYRIKLLGAEVHAVDSGTATLKDALNEAMRDWVTNIEDTYYIIGSVTGPHPYPMIVRDFNAIVGRELRKQSIEQFSQYPDAIIACVGGGSNAMGIFYPFLEESNVELVGVEAAGSGLMSGKHAAPLNDGEPGILHGAKSYLMQDENGQVIDTHSVSAGLDYPGVGPEHSNLKDSGRANYIAVDDKEVLDSFHLITKLEGIMPALETAHAFAALDHIAKNYTSNQHIVINVSGRGDKDINTVASMDGISLD

SEQ ID NO: 178037 - protein, 234 aa, Unknown
  Bacterial polypetide isolated from the Sargasso Sea
MLKNTYKSYPNEKGYFGQFGGRYVSETLMPLILDVEKEYEKIKNDKNFIDEFNYYLKTYVGRPSPLFFAERISKDLEGPKIYFKRDELNHTGAHKINNCMGQILLAKKMGKSRIIAETGAGQHGVATATVCALFGLPCIVYMGEKDIERQSPNVFRMKLLGAEIRSVSTGSKSLKDAMNEALRDWVTNVKDTFYIIGTAAGPHPYPAMVRDFQSIIGKEVRKQLEELEGKAPDL

SEQ ID NO: 178038 - protein, 376 aa, Unknown
  Bacterial polypetide isolated from the Sargasso Sea
PLILSLESEYEKVKSDKSFWKEMDFFLKDYVGRPSPLYFSERLTKHFGGAKIYLKRDELNHTGAHKINNVLGQILLAKRMGKKRIIAETGAGQHGVATATVCARFGLKCIVFMGKTDVERQAPNVFRMKLLGADVVSVTSGRGTLKDAMNEALRDWVTNVEDTFYCIGTVAGPHPYPSMVRDFQSIIGTETKQQILDKEGRLPDSLIACIGGGSNAMGLFFPFLDDKDVKMFGVEAGGKGVNNKMEHAASLTGGRPGILHGNRTYLLQDQNGQIIEGHSISAGLDYPGIGPEHSYLHDIGRVEYVSITDEESLDAFKLCCEKEGIIPALEPSHALAYVKKIAPKLPKDHIMIMNMCGRGDKDIFTVAEYLGFDLKN

SEQ ID NO: 178039 - protein, 98 aa, Unknown
  Bacterial polypetide isolated from the Sargasso Sea
MKLDKNNLPDKNGFFGEYGGKFVPETLMYALEELEATYEKLKNNNEFKEQFYKDLSEFVGRPSPLYFAERLTKHYGTGSIWLKREDLNHTGAHKINNT

SEQ ID NO: 178040 - protein, 401 aa, Unknown
  Bacterial polypetide isolated from the Sargasso Sea
MKNKINLKDYPDRSGHFDSFGGVYVSETLIHPLKELFSAYKSIATSASFRKILKAELKDYVGRPTPIYYAEALSKYLGKSHIYLKREDLNHTGAHKINNALGQALLAKKMGKTRIIAETGAGQHGVATATACARLNLKCVVYMGEQDIQRQSVNVYRMKLLGAEVVSVNSGTKTLKDALNEALRDWVTNVDDTHYIIGSVAGPHPYPMIVRDFQSVIGHEARAQFKRDYKCLPDYLIACVGGGSNAIGLFHPFLNDDVKIIGVEAGGSGIKTGKHAAPLSAGTPGVLHGNKTYIMEDKNGQIKNTHSISAGLDYPGVGPEHSWLKDLNRVEYTSVTDKEALNAFFTLTQKEGIIPALETAHALAYAFELAKNSKNKKLLINLSGRGDKDIDTIAKLKNIKL

SEQ ID NO: 178041 - protein, 229 aa, Unknown
  Bacterial polypetide isolated from the Sargasso Sea
MKLDKNNLPDKNGFFGEYGGKFVPETLMYALEELETTYEKLKNNNEFKEQFYKDLSEFVGRPSPLYFAERLTKHYGTGSIWLKREDLNHTGAHKINNTIGQILLAKYMGKKRIIAETGAGQHGVATATVAARLGLECHIYMGSEDVQRQSLNVYRIKLLGAQVHSVDSGSATLKDALNEALRDWVTNVDDTYYIIGSVTGPHPYPMIVRDFNSVVGEELISQSKELLIQ

SEQ ID NO: 178042 - protein, 365 aa, Unknown
  Bacterial polypetide isolated from the Sargasso Sea
EYEKLKHDETFIKDFNYYLEKYVGRPSPLFFAERITENLKGPRIYFKRDELNHTGAHKINNCIGQILLAKKMGKKRIIAETGAGQHGVATATVCALFGLPCIIYMGEKDIERQSPNVFRMKLLGAEIRSVTTGSKSLKDAMNDALRDWVTNVNDTFYIIGTAAGPHPYPSMVRDFQSVIGKEVREQLNELEGRSPDLLMACIGGGSNALGLFHEFLDDKNVKMIAVEAAGHGINTENHAASLTGGKPGVLHGNKTYLLQSDTGQIKEAHSISAGLDYPGIGPEHSYLFEKGRVKYESATDKEALDAFQYCCKLEGIIPALEPAHALAVLKRIAKNYDEKTIIVMNMCGRGDKDIFTVADELQIKL

SEQ ID NO: 178043 - protein, 314 aa, Unknown
  Bacterial polypetide isolated from the Sargasso Sea
NHTGAHKICNTIGHALLAKRMGKPRVIAETGAGQHGVATATVAARLGLECDVFMGAEDVKRQSPNVYRMKLLGANVIPVHSGSKTLKDALNEAMRDWVTNVDTTHYIIGTVAGPHPYPMIVRDFASIIGQETRAQILEQAGKLPDLIVACVGGGSNAMGLFYPFIDDAEVQMVGVEAGGHGLESGKHAAPLNDGKVGVLHGNRTYLMADEDGQIMETHSISAGLDYPGVGPEHSFLKDIGRAKYDSVTDDEAMSAFRMLNNLEGILPALESSHALAWVIKKAPAMSEEDIVVMNLSGRGDKDILTVAEMDGILV

SEQ ID NO: 178044 - protein, 319 aa, Unknown
  Bacterial polypetide isolated from the Sargasso Sea
MIIGKYPSLRLRRNRKESWSRRLIQENTLSPNDFILPIFLIEGSNKREEISSMPGVYRYTINRLSQIVDRAIKKKIPMVALFPKTQNVHKDELGTESLNENNLVCRAIKEIKKKYNNQIGIMCDVALDPYTSHGHDGLVKSNTILNDETIEVLINQSLLQAEIGCDVIAPSDMMDGRIGKIRKALDKNKFQNVQILSYAAKYASSFYGPFRDAVGSKGSLKGDKKTYQMDFRNSDEALREVALDIKEGADMVMVKPGMPYLDIIKSIKEKFKLPVFAYQVSGEYSLIETAIAKKLINKDAIYESLVAFKRAGANAIVSY

SEQ ID NO: 178045 - protein, 150 aa, Unknown
  Bacterial polypetide isolated from the Sargasso Sea
NCIRFKQFSRYPYSLLCRKYASGFYGPFRDAIGSGSNLGKDGKLTYQMDPSNSDEAIREVGLDISEGADMVMVKPGMPYLDIISRIKSEFKVPTFAYQVSGEYSMIKESINKGWLNEKVVMESLLSFKRAGANGILTYFSLEAAEKLKNE

SEQ ID NO: 178046 - protein, 255 aa, Unknown
  Bacterial polypetide isolated from the Sargasso Sea
MRRNRMKLFSRNLIRETSLSVNDLIYPIFVTFGSRKKEPIKEMPNIYRFSLDMFELEIKRIVKLKIPAVAIFPNIEKNKKDGAGTEALNEKNLICKAIKIAKNVSNDLGVICDVALDPFTDHGHDGVFFNGEIDNDKTLEILIKQALVQVKAGCDIIAPSDMMDGRIGVIRDALERKDFKNIQIMSYTAKYASAFYGPFRSAVGSAGLIGKKDKTSYQMDYSNSTEAIREAELDIAEGADMLMVKPGLPYLDIIQ

SEQ ID NO: 178047 - protein, 244 aa, Unknown
  Bacterial polypetide isolated from the Sargasso Sea
TNKKLKNDKGSEAINENNLICQAIKYIKKKYRNKIGIMCDVALDPYTSHGHDGLLKKNEILNDETIEVLIQQAILQAKMGCDVIAPSDMMDGRIGKIRKALDLNGFNNIQIISYAAKYASSFYGPFRDAVGSKSMLKGDKKTYQMDYKNSNEALREVALDIKEGADMIIIKPGMPYLDVIKKVKDKFKIPVIAYQVSGEYSMIINAIKGNIINENAILESLLSFKRAGATGIITYFALKICEKL

SEQ ID NO: 178048 - protein, 208 aa, Unknown
  Bacterial polypetide isolated from the Sargasso Sea
DVALHPYTDHGHDGILENDEILNDQTLEALAEQSLVLAKAGADIIAPSDMMDGRIGVIRKKLDENNFEDKIILSYAAKYNSKFYGPFRDAVNSKNNLGTSDKSSYQMNPANSLEALNEVAMDIEEGADIVMVKPGMPYLDIISKIKEEFKVPTFAYQVSGEYAMIMESVNKGWLDKGVIIESLTSFKRAGADAVLTYFAKDLIKEFNL

SEQ ID NO: 178049 - protein, 253 aa, Unknown
  Bacterial polypetide isolated from the Sargasso Sea
NDSLKTEDGAECFNEDGLIPKAIRILKKEVPEMAIMTDVALDPYSCDGHDGLVDETGKILNDETIEILIKQALTQARAGADFIGPSDMMDGRVGAIRTALDSQGFSDVGIISYTAKYSSAYYGPFRTALDSAPRENSKKIIPDNKSTYQMDPANSKEALIESALDQYEGADILMVKPGISYLDIVYRLSTFSNKPIAAYNVSGEYSMVKSAAMKNWINEKDIVLETLLSFKRAGAKLILTYHACDASQWLQDT

SEQ ID NO: 178050 - protein, 326 aa, Unknown
  Bacterial polypetide isolated from the Sargasso Sea
MIITGKYPNLRLRRNRKKDWSRRLVQENTLSVNDLILPVFLIEGKNKKQPIKTMPGVFRYTIDKLPLILNNAVKNKIPMVALFPYTNRKFKDMHGSESLNEDNLVCKAIKFIKKKYENKIGVMCDVALDPYTSHGHDGLIKNGEIVNDETIEVLVKQSLLQAKMGCDVIAPSDMMDGRVGIIRKHLDKNNFENVQILSYAAKFASSFYGPFRDAVGSNKSLKGDKKTYQMDYKNSLESLREVAMDIKEGADMVMVKPGMPYLDIIKIVKENFKIPVLAYQVSGEYSLIMNGINKGLIDEQCIIESLIAFKRSGANAVVTYFADRIA

SEQ ID NO: 178051 - protein, 237 aa, Unknown
  Bacterial polypetide isolated from the Sargasso Sea
SLAVDENNLVCRSIKSIKKDFPNIGIVCDVALDPFTDHGHDGLVINDKIDNDKTLEILEQQALVQANAGCDVIAPSDMMDGRVGRIRTALDSNNLTDTLILSYAAKYASGFYGPFRDAIGSGSSLGKDGKLTYQMDPSNSEEAIREVGLDISEGADMVMVKPGMPYLDIISRIKSEFKVPTFAYQVSGEYSMIKESINKGWLNEKVIIESLLSFKRAGANGILTYFALEAAEKLKNE

SEQ ID NO: 178052 - protein, 320 aa, Unknown
  Bacterial polypetide isolated from the Sargasso Sea
MRRSRKTDWMRRLVRENSLSSNDFILPIFVTEGKNKKIPIKTMPQVFRYSVDRLDQIVDRALKLKIPMVAIFPQTNSGLKDSYGSEALNENNLVCKAIRKIKDKYKNEIGIMTDVALDPYTSHGHDGILRNKSILNDETIEILIQQSLLQAQMGSDVIAPSDMMDGRIGEIRQELDNNSLKDIKILSYAVKYASSFYGPFRDAVGSKKSLKGDKKTYQMDFSNSDEALREVALDIKEGADLVMVKPGLPYLDIIKKVKENFKIPVLAYQVSGEYSLLMNGINKELINENSIYEILMSFKRAGANAIISYFADRIDKIIKN

SEQ ID NO: 178053 - protein, 230 aa, Unknown
  Bacterial polypetide isolated from the Sargasso Sea
MDIAYRPRRLRRTPGLRAMVREHHVSAADFIYPLFVHEGASNESIGAMPGAQRWSLDGLLGEVGRAWDLGIRCVVLFPKVADGLKTEDGSECFNDGGLIPRAIRRIKQEHPGMTVMTDVALDPYSCDGHDGIVSNDGIVLNDETVEILCKQAVTQAAAGADLVGPSDMMDGRVGAIREALDDEGFSHVGIISYTAKYASAYYGPFREALDSAPRAATGKPIPNDKSTYQM

SEQ ID NO: 178054 - protein, 138 aa, Unknown
  Bacterial polypetide isolated from the Sargasso Sea
KYASAYYGPFREALDSAPRAATGKPIPNDKSTYQMDPANSREALTEALLDEQEGADIMMVKPGLAYLDIIHRLRAETELPIAAYNVSGEYAMVKAAAEKGWIDERAVVLETLLSFKRAGADLILTYHACDAAAWLRHG

SEQ ID NO: 178055 - protein, 317 aa, Unknown
  Bacterial polypetide isolated from the Sargasso Sea
LERNRKSNWSRRLVSENTLSVNDLILPIFVIEGKNKKIPIKSMPGIFRYSIDKLNQVVGNAVSLKIPMVAIFPYINKNLKNPKGTEALNKDNLVCRATNFIKKKYKDKIGVMCDVALDPYTSHGHDGILKSGKIINDETIKILISQSLIQAEAGCDVIAPSDMMDGRIGLIRKALDKNNFQHVQLLSYAVKYASSFYGPFRDAVGSKNLLKGDKKTYQMDYSNSDEAIREVTLDIKEGADMVMVKPGLPYLDIIKNIKDKFKIPVFAYQVSGEYSLIVNSINQGIVSDKIILETLISFKRAGANAIITYFADKIARD

SEQ ID NO: 178056 - protein, 256 aa, Unknown
  Bacterial polypetide isolated from the Sargasso Sea
ALALFPVVDASGKTPDAKESFNPDGLVPRVVTALRETVPDMGVITDVALDPYTSHGQDGLLDESGYVTNDATVDTLVQQALCHARAGAQVVAPSDMMDGRIGAIREALESEGLVNTRILAYSAKYASSFYGPFRDAVGSAGNLGGGNKYTYQMDPANSDEALREIELDLDEGADMVMVKPGMPYLDIVLRVKQEFGVPTLVYQVSGEYAMLCAAANNGWLDRDAVVMEALLGFKRAGADAILTYFAEEVAAALQRD

SEQ ID NO: 178057 - protein, 134 aa, Unknown
  Bacterial polypetide isolated from the Sargasso Sea
KIILSYAAKYNSKFYGPFRDAVNSKNNLGTSDKSSYQMNPANSLEALNEVAMDIEEGADIVMVKPGMPYLDIISKIKEEFKVPTFAYQVSGEYAMIMESVNKGWLDKGVIIESLTSFKRAGADAVLTYFAKDLI

SEQ ID NO: 178058 - protein, 276 aa, Unknown
  Bacterial polypetide isolated from the Sargasso Sea
MPNCYRWSLDLLLKEIESCIKIGINNFVLFPAVEDELKDKTATYSYSAQNFYLKAIRKIKATFPNISLMSDVAMDPYSSDGHDGLVRNGEIINDETLTILAKMAVAQAEAGIDIIGPSDMMDGRIGFIRNSLDNNGFSNASIMSYTAKYASAYYGPFRDALDSAPKLGDKKTYQMDPRNTKEALREAKLDIIEGADILMVKPAMCYLDVIHQLNNSFDLPISAYNVSGEYAMIHAAAQKGWLDYEATMMETLTSIKRAGASIILTYFAKDFAKLNQ

SEQ ID NO: 178059 - protein, 166 aa, Unknown
  Bacterial polypetide isolated from the Sargasso Sea
MGCDVIAPSDMMDGRIGKIRKYLDKNSYQDVQLLSYAVKYASNFYGPFRDAVGSKKKLKSDKKNYQMDFANSNEAYREVALDIKEGADMVMVKPGMPYLDVIKSIKENFKIPVLAYQVSGEYSLIKNGIKNNLINKEAILESLMCFKRAGASAIVTYFALEIAKNL

SEQ ID NO: 178060 - protein, 194 aa, Unknown
  Bacterial polypetide isolated from the Sargasso Sea
DGLIKSNYVLNDETIKVLIDQSLLQAQMGCDVLAPSDMMDGRIGEIRKNLDSNGYNMTQILSYAVKYASNFYGPFRDAVGSKKLLKGDKKNYQMDFRNNDEALREVTLDIKEGADMVMVKPGLPYLDIIKSVKENFKIPVIAYQVSGEYSLLSNGINKGLVNKDVILENLISFKRAGANAIITYYADRINNIIS

SEQ ID NO: 178061 - protein, 315 aa, Unknown
  Bacterial polypetide isolated from the Sargasso Sea
SSTRLRRNRMKEFSRRLVSENTLSVNDLILPLFVCEGNKVDDPINSMPGVSRYSIDKLLSKVEKAVKLKIPAIAIFPQIESGLKNSEGSLAVDENNLVCRSIKSIKKDFPNIGIVCDVALDPFTDHGHDGLVINDKIDNDKTLEVLERQALIQANAGCDVIAPSDMMDGRVGRIRSALDSNNLIDTLILSYAAKYASGFYGPFRDAIGSGSNLGKDGKLTYQMDPSNSDEAIREVGLDISEGADLVMVKPGMPYLDIISRIKSEFKIPTFAYQVSGEYSMIKESINKGWLNEKVIMESLLSFKRAGANGILTYFA

SEQ ID NO: 178062 - protein, 182 aa, Unknown
  Bacterial polypetide isolated from the Sargasso Sea
LTKQSLVQAESGADILGPSDMMDGRVKLIRENLEKNNFKNTLILSYSAKFSSGFYGPFRAAIGSSGNLKGDKKSYQLNYLNSNEALKDVALDLKEGADMVMVKPGMPYLDLCRQISDTFKVPTFAYQVSGEYAMLAQGVKNGIFDKKNILIETISCFKRAGCNGVLTYFAYEIAKLLENKDL

SEQ ID NO: 178063 - protein, 136 aa, Unknown
  Bacterial polypetide isolated from the Sargasso Sea
AYSAKYASSYYGPFRDAVGSSSTIGSGDKKTYQMDPANGDEAIHEVGLDIDEGADMVMVKPGMPYLDILQRVKATYRLPTFAYQVSGEYSMHAAAIANGWLGESVIHESLLCFKRAGADGILSYFTKRWLETQTRR

SEQ ID NO: 178064 - protein, 256 aa, Unknown
  Bacterial polypetide isolated from the Sargasso Sea
ALFPYTPEVLKTPKCEEAWNPDNLVNKTTKLLKKEVPEIGVMLDVALDPYNSLGHDGLVEGKEILNDETLEALERQSLVQAASGADILGPSDMMDGRIGVIRKALESNGYKSTLIMSYSAKFSSSFYGPFRDAVGASLALSGNKKTYQIDSTNLSEAVREIASDLSEGADMVMIKPGMPYLDVCRIVKNKFKVPTFAYQVSGEYAMIEAASLNGWIDGDSAMIESIKCFKRAGCDGILTYFAPRAAKMLSWKTKEI

SEQ ID NO: 178065 - protein, 212 aa, Unknown
  Bacterial polypetide isolated from the Sargasso Sea
IGIMTDVALDPYTSHGHDGILRDKRILNDETIEILIQQSLLQAQMGSDVIAPSDMMDGRIGEIRQELDNNSLKDIKILSYAVKYASSFYGPFRDAVGSKKSLKGDKKTYQMDFSNSEEALREVALDIKEGADLVMVKPGLPYLDIIKKVKENFKIPVLAYQVSGEYSLLMNGINKGLINENSIYETLMSFKRAGANAIISYFADRIDKIIKN

SEQ ID NO: 178066 - protein, 256 aa, Unknown
  Bacterial polypetide isolated from the Sargasso Sea
FRWDMNGLIKEVTRAWELGIRCVVLFPKINDSLKTEDGAECFNEDGLIPKAIRILKKEIPEMAIMTDVALDPYSCDGHDGLVDDTGKILNDETIEILKKQALTQARAGADFIGPSDMMDGRVGEIRTALDSKGFSDIGIISYTAKYSSAYYGPFRTALDSAPRENSKKIIPDNKSTYQMDPANSKEALIESALDQYEGADILMVKPGISYLDIVYRLSTFSNKPIAAYNVSGEYSMVKSAAMKNWINEKDIVLETL

SEQ ID NO: 178067 - protein, 235 aa, Unknown
  Bacterial polypetide isolated from the Sargasso Sea
GEEAYNPNGIVPRAVGMLKDALPDAIVCTDVALDPYSSKGHDGIVEDGKILNDDTIEQLCKQSIMQARAGSDVVAPSDMMDGRVGAIRDALDSEGFTDVSILAYTAKYASSYYGPFRDALDSHPGFGDKKTYQQDPANGREAYIEAALDELEGADMLMVKPGLPYLDVIHRLRLASNLPIAAYHVSGEYSMLKAAVERGWLDEKKVALETLTCFRRAGADVILTYYAKQASKWIC

SEQ ID NO: 178068 - protein, 208 aa, Unknown
  Bacterial polypetide isolated from the Sargasso Sea
MCDVALDPYTSHGHDGLIKNGYVINDETVEILKNQSLLQAQMGCDVLAPSDMMDGRIGEIRKCLDKNGYQMTQILSYAVKYASNFYGPFRDAVGSKKLLEGNKKNYQMDYRNSDEALREIALDIKEGADMIMVKPGLPYLDIIRLVKDNFKIPVMAYQVSGEYSMLVNGINKKLVNNDVIIESLISFKRAGANAIVSYFADRLDKFLD

SEQ ID NO: 178069 - protein, 222 aa, Unknown
  Bacterial polypetide isolated from the Sargasso Sea
IKYIKKKYKNSIGVMCDVALDPYTSHGHDGLLYKGKILNDETIKILVEQSLLQAQMGCDVISPSDMMDGRVGEIRKNLDKNNFKNVQILSYAVKYASSFYGPFRNAVGSKSLLKGDKKTYQMDYSNSLESLREVALDIKEGADMVMVKPGMPYLDVIKMVKDNFKIPVLAYQVSGEYSLIYNGISKGIVDKSTIIEVLTGFKRAGANAVITYFANEIAKDLR

SEQ ID NO: 178070 - protein, 227 aa, Unknown
  Bacterial polypetide isolated from the Sargasso Sea
CRAVREVKQKLPEVGVMCDVALDPFSSDGHDGLYQNGQILNDETLPILCAQALVQAEAGCDIIGPSDMMDGRVGQIRASLDENKFLDVSIMAYSAKYASGFYGPFRDAVGSSKNLKGDKKTYQMDPTNSDEAIREAGMDIAEGADMVMIKPGLPYLDVIKLIKQCFCVPTFAYNVSGEYAMLKAASEVGWLDYNTVMLETLTSFKRAGADGILTYHAREAALILKKS

SEQ ID NO: 178071 - protein, 172 aa, Unknown
  Bacterial polypetide isolated from the Sargasso Sea
LAEAGADIIAPSDMMDGRIGVIRKKLDENNFEDKIILSYAAKYNSKFYGPFRDAVNSKNNLGTSDKSSYQMNPANSLEALNEVAMDIEEGADIVMVKPGMPYLDIISKIKEEFKVPTFAYQVSGEYAMIMESVNKGWLDKGVIIESLTSFKRAGADAVLTYFAKDLIKEFNL

SEQ ID NO: 178072 - protein, 196 aa, Unknown
  Bacterial polypetide isolated from the Sargasso Sea
HGHDGVINKKQVLNDETIKILSKQAILQAEMGCDVIAPSDMMDGRVGIIRKSLDKNNHKDVQILSYSAKYASSFYGPFRNAIGSKQKSKINKKTYQMNYRNSEEAIREVALDIKEGADFVMIKPGLPYLDIIKSVKENFKIPVFVYQVSGEYSMIKNGIKTGILDNESIIESLISFKRSGASAIVTYFALDIAKKI

SEQ ID NO: 178073 - protein, 240 aa, Unknown
  Bacterial polypetide isolated from the Sargasso Sea
KNEIGLESLNENNLVCKAITQIKKKYKNQIGIMCDVALDPYTSHGHDGLIKSNQIINDETIEVLINQSLLQAEMGCDVLAPSDMMDGRIGKIRKALDKSNFQNVQILSYAAKYASSFYGPFRDAVGSKRSLKGDKKTYQMDYRNSDEALREVALDIKEGADMVMVKPGMPYLDIIKSIKEKFKIPVLAYQVSGEYSLISNAIHKKLVNEDAVYESLVAFKRSGANAIVSYYADRLDKILV

SEQ ID NO: 178074 - protein, 272 aa, Unknown
  Bacterial polypetide isolated from the Sargasso Sea
SIDNILKELETVVKLKIPAIALFPQIDSALKNKEGSQAIDENNLICRTIRSIKKQFPDLGVICDVALDPFTDHGHDGLIVNDIVDNDATLKVLEKQALVQANAGCDIIAPSDMMDGRVGIIRKALDENNFQNTLILSYAAKYASKFYGPFRDAISSSGNLKGGSKSTYQMDTANSNEALREVALDIKEGADMVMVKPGMPYLDIIQRIKSDFNIPTFAYQVSGEYSMIKGAIDNNWLDSKVIKESLLSFKRAGADGILTYFAKEIAEELNNE

SEQ ID NO: 178075 - protein, 184 aa, Unknown
  Bacterial polypetide isolated from the Sargasso Sea
TALSHVVAGADMVAPSDMMDGRIGHIREILDSNGFNETPIMSYASKYASAFYGPFRVAAESAPAFGDRSTYQMDPANSREAIREVAIDIQEGADIILVKPALPYLDVLSKVRSKFDIPVAAYNVSGEYAMLVAAMKAGWLDPEKAFMESLVSIRRAGADFIITYFAKDASRRLLGDFETPLSWM

SEQ ID NO: 178076 - protein, 155 aa, Unknown
  Bacterial polypetide isolated from the Sargasso Sea
GISGIRNSLESNNFANTIILSYAAKYSSKFYGPFRDAVGSSANLGVGSKDTYQMSVANIDEALHEVKMDIEEGADIVMVKPGMPYLDVIKAVKDTFKVPTFAYQVSGEYAMLKAAIENDWLSDEVMLESLLSFKRAGADCVLTYAANEIAIKLNQ

SEQ ID NO: 178077 - protein, 312 aa, Unknown
  Bacterial polypetide isolated from the Sargasso Sea
PWVRRLVEENNISVNDLILPIFVTEGKNKVQEIKTMPGIYRYSVDKLSNVINGASKANIPLIAIFPNTPKSKKDFYGSEALNENNLVCKAIRKIKKNNSKIGIMADVALDPYTSHGHDGIIEKKKVLNDETLEILSKQAVLQAQMGCDVIAPSDMMDGRIGVIRKALDKNNLKDVQLLSYSAKYASSFYGPFRNAIGSSQKNKINKKTYQMDYRNSNEAIREVALDIKEGADFVMVKPGLPYLDVIKSIKDNFKIPVFVYQVSGEYSMIKNAIGKGLLDKESIIESLISFKRSGASAIVTYFALDIAKKLSN

SEQ ID NO: 178078 - protein, 231 aa, Unknown
  Bacterial polypetide isolated from the Sargasso Sea
EDGLIPNAIRILKKEIPEMAIMTDVALDPYSCDGHDGLVDETGKILNDETIEILKKQALTQARAGADFIGPSDMMDGRVGAIRASLDTKGFSDVGIISYTAKYSSAYYGPFRTALDSAPRENSKKIIPDNKSTYQMDPANSKEALIESVLDQYEGADILMVKPGISYLDIVYRLSTFSNKPIAAYNVSGEYSMVKSAAMKNWINEKDIVLETLLSFKRAGAKLILTYHACD

SEQ ID NO: 178079 - protein, 299 aa, Unknown
  Bacterial polypetide isolated from the Sargasso Sea
ILGKFPSTRLRRVRNSDWVRRLISENNLSANDLILPIFLTEGKNKKEKINTMPGIYRYSLDKLSSILDEAEKFKIPMIALFPNTSNHQRDYNGSEALNENNLVCRAIKLIKKKYNKFGIMTDVALDPYTSHGHDGIILNGKIDNDETLKILEKQALLQASVGSDVIAPSDMMDGRIGIIRKSLDKKKFKDTQILSYAVKYASNFYGPFRDAIGSKQKLKGDKKTYQMDMRNYTESLREVGLDIKEGADFVMVKPGMPYLDIISRIKQNFKIPVFSYQVSGEYSMIVNSIKNKSLNENVI

SEQ ID NO: 178080 - protein, 219 aa, Unknown
  Bacterial polypetide isolated from the Sargasso Sea
QNFPDLGVICDVALDPYTNHGHDGIIVDDIIHNDATLEILEKQALVQAVAGCDIIAPSDMMDGRIGRIRNVLDQNKYENTLILSYAAKYASKFYGPFRDAISSSGNLKGGSKSSYQMDVANSNEALREVALDIKEGADMVMIKPGMPYLDIIQRVKSEFQVPTFAYQVSGEYSMIKGAVNNGWLESKVIKESLLSFKRAGVDGILTYFAREIAEELQDE

SEQ ID NO: 178081 - protein, 146 aa, Unknown
  Bacterial polypetide isolated from the Sargasso Sea
KYVNTKILAYSAKYASSFYGPFRDAVGSSKNLGNANKYTYQMNPANTNEAVTEVELDLNEGADMVMIKPGLPYLDIVYRIKETFARPTFVYHVSGEYAMIKAASSKGWLNEKDAVMESILAFKRAGADAILTYYAKQIAEWIEKEE

SEQ ID NO: 178082 - protein, 208 aa, Unknown
  Bacterial polypetide isolated from the Sargasso Sea
MCDVALDPYTSHGHDGLIKSNTILNDETIEVLINQSLLQAEMGCDVLAPSDMMDGRIGKIRKALDKNKFQNVQILSYAAKYASSFYGPFRDAVGSKGSLKGDKKTYQMDYRNSDEALREVALDIKEGADMVMVKPGMPYLDIIKLIKEKFKLPVFAYQVSGEYSLIETAIKKKLINKDAVYESLVAFKRAGANAIVSYYADRIDKIIK

SEQ ID NO: 178083 - protein, 265 aa, Unknown
  Bacterial polypetide isolated from the Sargasso Sea
NNISLDDLIYPIFITYGSNVKEEVVSMPGIYRYSLDLLHKEIEYISSLFIPAIAFFPKVQNELKTSDGKEALNKNNLICKAIEISKKVNPKLGVICDVALDPYTDHGHDGIIINNQIDNDETLSILCKQALVQAEAGCDIIAPSDMMDGRVGFIRDALDKNGFTNIQIMSYAAKYASAFYGPFRDAVGSNLSLLKKSKKSYQMDPANSDEALKEIALDISEGADMVIVKPGMPYLDIIYRVKQEFKMPTYAYQVSGEYSMIKNAN

SEQ ID NO: 178084 - protein, 237 aa, Unknown
  Bacterial polypetide isolated from the Sargasso Sea
LGTEALNENNLVCRALQLIKKRFKNDIGIMCDVALDPYTSHGHDGLIDDNYVLNDETVDVLINQSILQAQMGCDVLAPSDMMDGRIGKIRKSLDKNGFKMTQILSYAVKYSSNFYGPFRDAVGSKGLLKGDKKNYQMDFRNSNEALREVALDIKEGADMVMVKPGLPYLDIIKSVKENFKIPVLAYQVSGEYSLLSNGINNKLISRDVILESLISFKRAGANAIVSYYADRLDKILD

SEQ ID NO: 178085 - protein, 175 aa, Unknown
  Bacterial polypetide isolated from the Sargasso Sea
VQANAGCDIISPSDMMDGRVGEIRRALDKNNFDDVQIMSYSAKYASSFYGPFRDALGSTATLARGSKATYQMDPRNSDEAMREIALDIAEGADMIMIKPGLLYLDIIYRTKQKFGIPTYGYQVSGEYSMIKAAASNDWINLDGCMIESLIAFKRAGANGILTYFALEAARLLKKM

SEQ ID NO: 178086 - protein, 263 aa, Unknown
  Bacterial polypetide isolated from the Sargasso Sea
MNNIQGKFPSTRLRRNRMKEFSRRLVAENTLSVNDLILPLFVCEGNKVDDPINSMPGVSRYSIDKLLSKVEKAVKFNIPAIAIFPQIESGLKNSEGSLAVDENNLVCRSIKSIKKDFPNIGILCDVALDPFTDHGHDGLVINNKIDNDKTLEVLEQQALIQANAGCDVIAPSDMMDGRVGRIRTALDSNNLTDTLILSYAAKYASGFYGPFRDAIGSGSNLGKDGKLTYQMDPSNSDEAIREVGLDISEGADMVMVKPGMPYL

SEQ ID NO: 178087 - protein, 240 aa, Unknown
  Bacterial polypetide isolated from the Sargasso Sea
EIKSMPGVYRYTLDKINPVVDKAIKKGLPMIALFPYTEKKKKNFIGAEALNEDNLVCKALKLIKKKYKSQIGIMCDVALDPYTSHGHDGLLKKDYVLNDETIKILIDQSLLQAQMGCDVLAPSDMMDGRIGEIRKTLDKNGFKMTQILSYAVKYASSFYGPFRDAVGSKGLLKSSKKNYQMDFRNSNEALREVALDIKEGADMVMVKPGLPYLDIIKLVKENFKIPVMDYQVSGEYSLLE

SEQ ID NO: 178088 - protein, 274 aa, Unknown
  Bacterial polypetide isolated from the Sargasso Sea
MRRSRKEEWSRRLVRENTLSGSDFVLPIFLTDGKNKKQEIKLMKGVYRYSVDNLSVIIDRAIKNKIPMIALFPNTNIKLKDKSGSEALNENNLVSKAIVRIKKRYNNKIGIMCDVALDPYTTHGHDGILEKNEILNDKTIEILIKQSLLQAQMGCDVIAPSDMMDGRIGEIRKELDKNGYENIQLLSYAVKYSSSFYGPFRDAVGSKKALQGNKKTYQMDYSNLNEALREVSMDIKEGADMVMVKPGLPYLDIIKAVKDNFKIPVLAYQVSGEY

SEQ ID NO: 178089 - protein, 219 aa, Unknown
  Bacterial polypetide isolated from the Sargasso Sea
FIKKRFKNDIGVMCDVALDPYTSHGHDGVLKKNYVLNDKTVNILMKQALLQAQMGCDVIAPSDMMDGRIGKIRKYLDNNNYQDVQLLSYAVKYASNFYGPFRDAVGSKKTLKSDKKSYQMNFANINEAYREVALDIREGADMVMVKPGMPYLDVIKSIKENFKIPVLAYQVSGEYSLIKNGIKNNLVNKEAILESLMCFKRAGASAIVTYFALEIAKNL

SEQ ID NO: 178090 - protein, 143 aa, Unknown
  Bacterial polypetide isolated from the Sargasso Sea
ENLQNVQILSYAVKYASSFYGPFRDAVGSRKALKGDKKTYQMDFRNNSEAIREVALDIKEGADMVMVKPGMPYLDIIREIKNNFKVPVMTYQVSGEYALLKNGINKKIIDQKSILESLMSFKRAGANAIITYFADSIDFKSFD

SEQ ID NO: 178091 - protein, 166 aa, Unknown
  Bacterial polypetide isolated from the Sargasso Sea
VIAPSDMMDGRVGVIRKALDKHNYKNVQILSYAAKYSSNFYGPFRDAIGSKKKLKGNKKSYQMDYKNSHEAIREVGLDIKEGADFVMVKPALPYLDILKLIKDTFKIPVFAYQVSGEYSMIAQSVKNGVLKEDAIIESLMSIKRSGASGVVTYFALKIAKKLNNKL

SEQ ID NO: 178092 - protein, 170 aa, Unknown
  Bacterial polypetide isolated from the Sargasso Sea
GADIVAPSDMMDGRVVKIREALDRKGFHNTAIMSYAAKFASSLYGPFREALNSEPKSGDKKSYQINPKNYREAIKEILLDEAEGADLLIVKPASFYLDVIRTSSEASVLPIVAYQVSGEYSMIKAAAKKGYIDNDSVMKESLESIKRAGATAIITYFALEIANLLKKSNQ

SEQ ID NO: 178093 - protein, 185 aa, Unknown
  Bacterial polypetide isolated from the Sargasso Sea
YPVFVHEGTNRSEAVTSMPGVDRLSLDLLLPVAADCVKLGIPVLALFPAIDPSLKTPDGKEALNPDGLIPRVVRALKKEFPDLGVMTDVALDPYTSHGQDGVLDETGYIINDETVEILTGQALTHAEAGVDIVAPSDMMDGRIGAIREALEVQGHIHTRIMAYSAKYASAFYGPFRDAVGTRGAL

SEQ ID NO: 178094 - protein, 268 aa, Unknown
  Bacterial polypetide isolated from the Sargasso Sea
VRECEELYSLGVGAINLFGFSSVKDEIATKSYDPEGLIQNAIRKVKGAIPEMCVQTDVALDPYTTHGHDGLVINGEIVNDESVEVLCKMALSHAEAGADWIAPSDMMDGRVGAIRKALDLKGFSHVGILAYSAKYASCFYGPFRGALQSAPSGHKKTYQMDPANSREAMREIALDLEEGADVVMIKPALAYLDVITRVRETFDYPIAAYNVSGEYAMVVSAAEKGLLDRELAIMEILISIKRAGADMILTYFAKDAAAILRADYGSFK

SEQ ID NO: 178095 - protein, 247 aa, Unknown
  Bacterial polypetide isolated from the Sargasso Sea
MIASFPDHRPRRMRRDDFSRRMMRESRLTPDDLIYPVFILEGTNVRQAVPSMPGVERVSIDVLLGVAEQCVQLGIPVLALFPVIEPSLKTPDGIEAANADGLIPRAVKALKARFPELGILTDVALDPYTSHGQDGVLDANGYVLNEETVDILIRQALVQAEAGVDIVAPSDMMDGRIGAIRLALENDDHIYTRIMAYAAKYASAFYGPFRDAVGSAANLGKSNKMTYQMDPANSDEALREGHSTSPK

SEQ ID NO: 178096 - protein, 207 aa, Unknown
  Bacterial polypetide isolated from the Sargasso Sea
VALDPYTNHGHDGILHKKEIINDETVNILSKQALLQAEMGCDVIAPSDMMDGRVGVIRKVLDKNGFKNVQILSYAAKYSSGFYGPFRDAIGSKKKLKGNKKTYQMDYKNSNESLREVGLDIKEGADFVMVKPGMPYLDIIKGIKDNFKIPVFAYQVSGEYSMIVKSIKDGTLNNEAITESLMSLKRAGASAIVTYFALDIAKKLKKN

SEQ ID NO: 178097 - protein, 221 aa, Unknown
  Bacterial polypetide isolated from the Sargasso Sea
SIKTKFPEMLVIADVALDPYTDHGHDGILENDEILNDQTLDVLAEQSLVLAEAGADIIAPSDMMDGRIGVIRKKLDENNFEDKIILSYAAKYNSKFYGPFRDAVNSKNNLGTSDKSSYQMNPANSLEALNEVAMDIEEGADIVMVKPGMPYLDIISKIKEEFKVPTFAYQVSGEYAMIMESVNKGWLDKGVIIESLTSFKRAGADAVLTYFAKDLIKEFNL

SEQ ID NO: 178098 - protein, 269 aa, Unknown
  Bacterial polypetide isolated from the Sargasso Sea
SVDKLNIIMKKAKKYKIPMVAIFPYTPKNKKDNFGTEALNENNLICKSLKFIKKRYSGIGVMCDVALDPYTSHGHDGILVNKKIDNDKTIKILVKQALLQAKMGCDVIAPSDMMDGRVGAIRKALDKRNFQNVSILSYAAKYASSFYGPFRDAVGSKVNLKSDKKTYQMDFRNSNEAFREIGLDVKEGADMVMVKPGLPYLDIIKSIKDNFKIPVFAYQVSGEYSLIKKGIKDKLINDDAILESLIAFKRAGASAIVTYFALEIASKIK

SEQ ID NO: 178099 - protein, 222 aa, Unknown
  Bacterial polypetide isolated from the Sargasso Sea
IIEIKKRYKNQIGIMCDVALDPYTSHGHDGLIKSNQIINDETIEVLINQSLLQAEMGCDILAPSDMMDGRIGKIRKALDKSNYQNVQILSYAAKYASSFYGPFRDAVGSKGSLKGDKKTYQMDFRNSDEALREVALDIKEGADMVMVKPGMPYLDIIKSIKDKFKLPVFAYQVSGEYSLISNAIKKKLINNDSIYESLVAFKRAGANAIVSYYADRIDKIIE

SEQ ID NO: 178100 - protein, 181 aa, Unknown
  Bacterial polypetide isolated from the Sargasso Sea
NDKTLKILTKQAVLQAKMGCDVIAPSDMMDGRIGIIRSALDKNNLIDVQILSYAVKFSSSFYGPFRDAVGSKKLLKGDKKTYQMDFRNSDESLREVSLDIKEGADMVMVKPGMPYLDIIKKVKDSFKIPVFAYQVSGEYSLIMNGINKKLIDKDSIKESLISFKRAGANSIVTYFADQIDL

SEQ ID NO: 178101 - protein, 211 aa, Unknown
  Bacterial polypetide isolated from the Sargasso Sea
IGIMCDVALDPYTSHGHDGVLKSNNIVNDETVDILIKQSLLQAQMGCDVIAPSDMMDGRIGKIRKNLDKNGFKQIQILSYAVKYSSNFYGPFRDAVGSMKNLKGDKKTYQMDFKNKDEALREVALDIKEGADIVMVKPGMPYLDIIKSVKENFKIPVFAYQVSGEYSLIANGIKDKIINKNAIIESLIAFKRAGANAIITYFADKISKELK

SEQ ID NO: 178102 - protein, 272 aa, Unknown
  Bacterial polypetide isolated from the Sargasso Sea
KFSAPGTWGSVASFCSPKVSEGLKTEDGAECFNANGLIPRAIRQIKHEVPGMAIMTDVALDPYSCDGHDGIVSAEGVVLNDETIELLCKQAVVQAEAGADLIGPSDMMDGRVGAIREALDDEGFEHVGIISYTAKYSSAYYGPFREALDSAPRAAGSKPIPTNKDTYQMDPANAREAITEAQLDEQEGADIMMVKPGLAYLDIIHRLRDESELPIAAYNVSGEYSMVKAAAERGWIDERAVVLETLLSFKRAGADLILTYHACDAAEWLRQG

SEQ ID NO: 178103 - protein, 152 aa, Unknown
  Bacterial polypetide isolated from the Sargasso Sea
LWTYRGFSNVGILAYSAKYASCFYGPFRGALQSAPSGHKKTYQMDPANAREAMREIALDLEEGADVVMIKPALAYLDVITRVREAFDAPIAAYNVSGEYAMVVSAAEKGLLDRDQAMMEILTSIKRAGADMILTYFAKDAAAILRADFGSFK

SEQ ID NO: 178104 - protein, 147 aa, Unknown
  Bacterial polypetide isolated from the Sargasso Sea
LDENNFEDKIFLSYAAKYNSKFYGPFRDAVNSKNNLGTSDKSSYQMNPANSLEALNEVAMDIEEGADIVMVKPGMPYLDIISKIKEEFKVPTFAYQVSGEYAMIMESVNKGWLDKGVIIESLTSFKRAGADAVLTYFAKDLIKEFNL

SEQ ID NO: 178105 - protein, 244 aa, Unknown
  Bacterial polypetide isolated from the Sargasso Sea
KTLDAAEAWNPQGIAQRATRALRERFPELGVITDVALDPFTTHGQDGILDEDGYVQNDITVDALVKQALSHAAAGAQVVAPSDMMDGRIQAIREALELAGHVNVRIMAYSAKYASAYYGPFRDAVGSALNLGKANKASYQMDPANSQEALHEVATDLAEGADMVMVKPGMPYLDILYRVKEEFKVPTFVYQVSGEYAMHMAAIQNGWLSEGVILESLTAFKRAGADGILTYFAARAAQLLREQQ

SEQ ID NO: 178106 - protein, 291 aa, Unknown
  Bacterial polypetide isolated from the Sargasso Sea
RRNRKSDWTRRLVQENNLSVNDLILPIFVIDGKNKKESIKTMPDVYRYSVDRLPIIIDKAVNSKIPLVAIFPYTNSNLKNNFGHEALNENNLVCRAIRLIKKKYKNKIGIMCDVALDPYTSHGHDGLLSKGKILNDETVNILVKQSLLQAEMGCDVIAPSDMMDGRIGKIRKALDKKKFQDVQILSYAAKYASSFYGPFRDAVGSKNLLKGDKKTYQMDFSNNQEALREIALDIKEGADMVMVKPGMPYLDIIKSVKENFKIPVFAYQVSGEYSLIKNGINKKIINENSII

SEQ ID NO: 178107 - protein, 266 aa, Unknown
  Bacterial polypetide isolated from the Sargasso Sea
TNVLDKAEDLKIPMIALFPYTPNSKKNNDGSEALNENNLVCRAIRTIKKKYKDFGIMTDVALDPYTSHGHDGIIINNKIDNDETLKLLEKQAILQASMGSDVIAPSDMMDGRIGLIRKSLDKHKLKDIKILSYAVKYASNFYGPFRDAVGSKKKLKGNKKTYQMDIRNYNEAFREVGLDIKEGADFVMVKPGMPYLDIISLIKQNFKVPVFSYQVSGEYAMIANAIKNKNLNQNAIYESLISLKRAGSNAIVTYFALDMAKKISSI

SEQ ID NO: 178108 - protein, 245 aa, Unknown
  Bacterial polypetide isolated from the Sargasso Sea
TAKKLKNNSGSESLNEDYLVCKAIQYIKKKYKNSIGIMCDVALDPYTSHGHDGLLNKGKILNDETVKILVKQSLLQAQMGCDVISPSDMMDGRIGEIRKNLDKNNFKDIQILSYAVKYASSFYGPFRDAVGSKNLLKGNKKTYQMDYSNSHEALREVALDIKEGADMVMVKPGMPYLDVIKSIKENFKIPVLAYQVSGEYSLICNGINKNIIDKNTILEVLTGFKRAGANAVVTYFADKIAKDLK

SEQ ID NO: 178109 - protein, 231 aa, Unknown
  Bacterial polypetide isolated from the Sargasso Sea
LVCKALDKIKNQQLSFGVMCDVALDPYTSHGHDGLLNDSNEILNDETNQVLVQQSLLLAKHKADIIAPSDMMDGRIGLIREALENNDYKNILLLSYAAKYASNFYGPFRDAVGSHKSLKSDKKSYQMNFSNSNEALREVALDISEGADLIMVKPGISYLDIISKIKNEFKFPTFAYQVSGEYSMIKAAGERGWIDEDAAIIEQLTSFKRAGADAILTYFAPYVTKILSSSD

SEQ ID NO: 178110 - protein, 128 aa, Unknown
  Bacterial polypetide isolated from the Sargasso Sea
LNDETVEILIKQSLLQAEMGCDVIAPSDMMDGRIGKIRKALDKNNFKDVQILSYAIKYASNFYGPFRDAVGSKKNLKGDKKTYQMDYNNHSEAIREVALDIKEGADMVMVKPGMPYLDIIKEVKENFK

SEQ ID NO: 178111 - protein, 235 aa, Unknown
  Bacterial polypetide isolated from the Sargasso Sea
GLAQQAMRALKKAFPEVMLMSDIALDPFTSHGQDGLLDETGYVMNDETVEVLIKQALSHAEAGADIVAPSDMMDGRIGNIRKALEEAGHINTCIMAYSAKYASAYYGPFRDAVGSAANIKGGNKKTYQMDPANTDEALHEIALDIEEGADMVMVKPGMPYLDVVRRCKDEFKVPTFAYQVSGEYAMHQAAFANGWLNEDAVILESLLAFKRAGADGILTYFAPQAAALLAKQNDK

SEQ ID NO: 178112 - protein, 264 aa, Unknown
  Bacterial polypetide isolated from the Sargasso Sea
MRRVRNSAWIRRLVSENNLSINDLILPIFVRDGKGKIESIKSMPGVYRYSIDKLNVIMNKAKKNKIPMVALFPYTSKNKKDKHGTEALNENNLICKSLRFIKKKYPRIGVMCDVALDPYTSHGHDGIIVNKKIDNDKTIKILVKQALLQAKMGCDVIAPSDMMDGRVGVIRKALDKRNFHNVCILSYAAKYASSFYGPFRDAVGSKINLKSDKKSYQMDFRNSNEALREIGLDIKEGADIVMVKPGLPYLDIIKKIKDNFKIPV

SEQ ID NO: 178113 - protein, 292 aa, Unknown
  Bacterial polypetide isolated from the Sargasso Sea
GYPAIRMRRNRMKVFSRRMISETYLNANNLIQPLFVTQGKYENTYIESMPGIKRHSIKSVANEAMEIYKLGIPAIAIFPYIPNDLKDENGTESLNKNNIICKAIKEIKNSCPEIGIICDVALDPYTNHGHDGIIINSEINNDKTIEILCKQAVIQAEAGCDIIAPSDMMDGRVKSIRSALDKKNLINTSILSYSAKYASSFYGPFRDALGTKINSDHVFDKKSYQMDPANSREALREIELDINEGADIIMIKPALSYLDIINLAKQNFEIPIFAYQVSGEYSMIKAASEKGG

SEQ ID NO: 178114 - protein, 205 aa, Unknown
  Bacterial polypetide isolated from the Sargasso Sea
MCDVALDPYTSHGLDGLLKKKIIINDKTVEILTKQAVLQAKIGCDVIAPSDMMDGRIGKIRSALDKNNLNDVQILSYAVKFSSSFYGPFRDAVGSKKLLKGDKKTYQMDFRNSDESLREVSLDIKEGADMVMVKPGMPYLDIIRKVKDNFKIPVFAYQVSGEYSLIMNGINKKLIDKASIKESLISFKRAGANSIVTYFADQIDL

SEQ ID NO: 178115 - protein, 223 aa, Unknown
  Bacterial polypetide isolated from the Sargasso Sea
KSIKKEFSEIGIICDVALDPFTDHGHDGLVINNKIDNDKTLEVLEKQALVQVHAGCDVIAPSDMMDGRIGRIRTVLDNNNFQDTLILSYAAKYASAFYGPFRDAIGSGSKLGKDGKLTYQMDPSNSDEALREVAFDINEGADMVMVKPGMPYLDIISRIKSEFKVPTFAYQVSGEYSMIKDSINKGWLNEKVIKESLLSFKRAGANGILTYFALEIAEKLKNE

SEQ ID NO: 178116 - protein, 291 aa, Unknown
  Bacterial polypetide isolated from the Sargasso Sea
MITGKYPGLRLRRSRKNDWSRRLIEENNLTHNDFILPIFLIDGKNKKQEIKSMPGVYRYTLDKINSVVEKAIKKGLPMVALFPYTEKKKKNFIGAEALNEDNLVCRAIKLIKKKYKNQIGIMCDVALDPYTSHGHDGLLKKDYVLNDETIKILIDQSLLQAQMGCDVLAPSDMMDGRIGEIRKALDNNGFKMTQILSYAVKYASSFYGPFRDAVGSKGLLKSSKKNYQMDFRNSNEAIREVALDIKEGADMVMVKPGLPYLDIIKLVKENFKIPVMAYQVSGEYSLLEEWY

SEQ ID NO: 178117 - protein, 289 aa, Unknown
  Bacterial polypetide isolated from the Sargasso Sea
FSMNSSPRVRMRRNRMSEFSRRLVSENNLSIDDLIYPIFITFGSNKKERIKSMPGIYRYSIDLLQKEIEYIASLNIPAIAFFPQIQKKLKTADGKEAFNKNNLICKAIKIAKKTSPKLGVICDVALDPYTDHGHDGVIVNNEIDNDKTLKILCKQALVQAKAGCDIIAPSDMMDGRVGLIRNTLDDNGLTNVQIMSYAAKYASAFYGPFRDAVGSSVNLSNKSKESYQMDPSNSDEALKEIALDLNEGADMVIIKPGMPYLDIIQKVKKEFKVPTYAYQVSGEYSMIRG

SEQ ID NO: 178118 - protein, 187 aa, Unknown
  Bacterial polypetide isolated from the Sargasso Sea
EETVDVLVKQAISHAQAGADIVAPSDMMDGRIGAIRNAFEETKLIHSRILAYSAKYASNYYGPFRDAVGSGKSLGKSGKHSYQMDISNSDEALQEIAFDLAEGADIVMVKPGMPYLDIVNRVKEEFRVPTFVYQVSGEYSMHMAAAQNGWLQEKEIALESLICIKRAGADAILTYFAKRAAKWLAET

SEQ ID NO: 178119 - protein, 246 aa, Unknown
  Bacterial polypetide isolated from the Sargasso Sea
FPVIPDEKKDFFASEAVNPRGVLCRAIKLIKSAYPSLVLVSDVALDPYSILGHDGLVSEGEVLNDETVEVLAKMAVLHAKAGVDIVAPSDMMDGRVGAIRQALDKAGFHTVSILSYAAKYASQLYSPFRDALQSELKDGDKQSYQMDISNRREAIREVSLDLEEGADMVMVKPGTFYLDIIREIRDRFDCPIAAYHVSGEYTMIKLAAQHNILDDKLVLKEALVALKRAGADVIISYGALEIAELL

SEQ ID NO: 178120 - protein, 155 aa, Unknown
  Bacterial polypetide isolated from the Sargasso Sea
LQAEMGCDVIAPSDMMDGRIGKIRKALDKNKFQHVQILSYAAKYASSFYGPFRDAVGSKGSLKGDKKTYQMDFRNSDEALREVALDIKEGADIVMVKPGMPYLDIIKSIKEKFKLPVFAYQVSGEYSLIETAITKKLINKNAIYESLVAFKRAGA

SEQ ID NO: 178121 - protein, 237 aa, Unknown
  Bacterial polypetide isolated from the Sargasso Sea
FGSESLNENNLVCRALKISKQRYKNEIGLMTDVALDPYTSHGHDGLLKNNKILNDETLDILIKQSLLQAEMGSDVLAPSDMMDGRIGKIRRALDKNNLKEVQLLSYAVKYASNFYGPFRDAVGSKLALKGDKKTYQMDYSNSNEAVREVALDIKEGADLVMVKPGMPYLDIIRTIKSKFKIPVLAYQVSGEYSLIKNGIKSKILNQDAILESLISFKRAGASAIVTYFASEIANKLD

SEQ ID NO: 178122 - protein, 283 aa, Unknown
  Bacterial polypetide isolated from the Sargasso Sea
MSIFRKYPSTRLRRLRKNLNLIELVSETNLTSKDLIQPIFIKENFEGKEEIESMPGIFRFGLNHVLSEIEEVINAGINAIAVFPVIESSKKDEKGSEALNKSNFIAHSINKIKQEFPELILIADVALDPYTDHGHDGILINNEVANDETVEVLIEQSILLAEAGADIIAPSDMMDGRIGLIRDSLEKQNLKDTILLSYAAKYNSKFYGPFRDAVNSASNLGNSSKSSYQMNISNKNEALHEVALDINEGADIVMVKPAMPYLDVIQSIKKEFKVPTFAYQVSG

SEQ ID NO: 178123 - protein, 278 aa, Unknown
  Bacterial polypetide isolated from the Sargasso Sea
WSRRLVQENNLSSSDLIYPIFLIDGKNKKQAIKSMPGVYRYSVDQLGKIVNNVIRYKIPMVALFPSTSNTKKDKYGSEALNENNLVCKAIRFIKKRFKNNVGIMCDVALDPYTTHGHDGLLKDNYVMNDETVSVLIKQSILQAQMGCDVIAPSDMMDGRIGKIRKSLDKNKYHDVQILSYAVKYASNFYGPFRDAVGSKKSLKGDKKNYQMDFSNSNESLREVALDIKEGADMVMVKPGLPYLDIIQKVKTNFKIPVLAYQVSGEYSLIKNGIKNNLI

SEQ ID NO: 178124 - protein, 248 aa, Unknown
  Bacterial polypetide isolated from the Sargasso Sea
SIDSALKNKEGSQAIDENNLICRTIRSIKKQFPDLGVICDVALDPFTDHGHDGLIVNDIVDNDTTLKVLEKQALVQANAGCDIIAPSDMMDGRVGIIRKALDKNNFQNTLILSYAAKYASKFYGPFRDAISSSGNLKGGSKSTYQMDTANSNEALREIALDIKEGADMVMVKPGMPYLDIIQRIKSDFNIPTFAYQVSGEYSMIKGAIDNNWLDSKVIKESLLSFKRAGADGILTYFAKEIAEELNNE

SEQ ID NO: 178125 - protein, 153 aa, Unknown
  Bacterial polypetide isolated from the Sargasso Sea
KALDVQGFSNVGILAYSAKYASCFYGPFRGALQSAPSGHKKTYQMDPANAREAMREIALDLEEGADVVMIKPALAYLDVITRVREAFDAPIAAYNVSGEYAMVVSAAEKGLLDRDQAMMEILTSIKRAGADMILTYFAKDAAAILRADFGSFK

SEQ ID NO: 178126 - protein, 220 aa, Unknown
  Bacterial polypetide isolated from the Sargasso Sea
MAVFPVNNGVGQFPTTRMRRNRQTDWSRRLVSENTVTVNDLIWPIFVQEGNNKIATPVESMPGVSRLSIGMLEESAREAVDMGIPAIAIFPVIEQKYKNSRGSEALNPDNLVCQAIRAISEQDLNIGIICDVALDPFTDHGHDGIIKDGYVVNDESVEILTQQAIIQARAGCSVIAPSDMMDGRVGKIRKTLDEEELTHTQILSYAAKYASAFYGPFRDA

SEQ ID NO: 178127 - protein, 267 aa, Unknown
  Bacterial polypetide isolated from the Sargasso Sea
KNKKIPIKTMPEFFRYSVDKLDQIVDRALKLKIPMVAIFPQTNSGLKDSYGSEALNENNLVCKAIRKIKDKYKNEIGIMTDVALDPYTSHGHDGILRNKSILNDETIEILIQQSLLQAQMGSDVIAPSDMMDGRIGEIRQELDNNSLKDIKILSYAVKYASSFYGPFRDAVGSKKSLKGDKKTYQMDFSNSEEALREVALDIKEGADLVMVKPGLPYLDIIKKVKENFKIPVLAYQVSGEYSLLMNGINKGLINENSIYETLMSFKK

SEQ ID NO: 178128 - protein, 232 aa, Unknown
  Bacterial polypetide isolated from the Sargasso Sea
NENNLICQAIKYIKKRYKNQIGIMCDVALDPYTSHGHDGILKKNNILNDETINILVEQALIQAKMGCDVIAPSDMMDGRIGKIRKKLDRENLNDVQILSYAVKYSSSFYGPFRDAVGSKKNLKGDKKTYQMDYRNNNEALREVSLDIKEGADIVMVKPGIPYLDIIRKVKDNFKIPVMAYQVSGEYSLLMNGIKNKIIDEKSIFETLMSFKRAGANSIVTYFADKINLDSFD

SEQ ID NO: 178129 - protein, 246 aa, Unknown
  Bacterial polypetide isolated from the Sargasso Sea
KVVLKILEGNLAVDENNLVCRSIKSIKKDFPNIGIVCDVALDPFTDHGHDGLVINNKIDNDKTLEVLEQQALIQANAGCDVIAPSDMMDGRVGRIRTALDSNNLTDTLILSYAAKYASGFYGPFRDAIGSGSNLGKDGKLTYQMDPSNSDEAIREVGLDISEGADMVMVKPGMPYLDIISRIKSEFKIPTFAYQVSGEYSMIKESINKGWLNEKVIMESLLSFKRAGANGILTYFALEAAKKLKNE

SEQ ID NO: 178130 - protein, 182 aa, Unknown
  Bacterial polypetide isolated from the Sargasso Sea
LEVLAEQSLILAEAGADIIAPSDMMDGRIGVIRKKLDENNFEDKIILSYAAKYNSKFYGPFRDAVNSKNNLGTSDKSSYQMNPANSLEALNEVAMDIEEGADIVMVKPGMPYLDIISKIKEEFKVPTFAYQVSGEYAMIMESVNKGWLDKGVIIESLTSFKRAGADAVLTYFAKDLIKEFNL

SEQ ID NO: 178131 - protein, 191 aa, Unknown
  Bacterial polypetide isolated from the Sargasso Sea
FNSGYVLNDETIDILIKQSLLQAEMGCDVLAPSDMMDGRIGKIRNALDKKDFKNVQLLSYAVKYASNFYGPFRDAVGSKISLKGDKKTYQMDFKNNDEALREVALDIKEGADMVMVKPGLPYLDIIKTIKNNFKIPVFAYQVSGEYSMLANAINKKIIKKDAIFENLMSFKRAGASAIVSYYADRLNKILP

SEQ ID NO: 178132 - protein, 222 aa, Unknown
  Bacterial polypetide isolated from the Sargasso Sea
CRGIQLIKKKFKNKIGIMCDVALDPYTSHGHDGLLKKHNILNDKTVEILTKQAVLQAKMGCDVIAPSDMMDGRIGKIRSALDKNSLNDVQILSYAVKFSSSFYGPFRDAVGSKKLLKGDKKTYQMDFRNSDESLREVSLDIKEGADMVMVKPGMPYLDIIKKVKDNFKIPVFAYQVSGEYSLIMNGINKKLIDKDSIKESLISFKRAGANGIVTYFADQIDL

SEQ ID NO: 178133 - protein, 220 aa, Unknown
  Bacterial polypetide isolated from the Sargasso Sea
MKQRSNKQFSINSFPRVRMRRNRLSEFSRKIVSENNFSVNDLIYPIFITYGSKVKEEINSMPGIYRFSLDQLHKEIEYISSLNIPAIALFPKIENELKTPDGKEALNSNNLICQAIKISKKVNPDLGVITDVALDPYTDHGHDGIIHNNQIDNDLTLNILCKQAIVQAQAGCDIIAPSDMMDGRVGAIRDTLDEHELNNVQIMSYAAKYASSFYGPFRDA

SEQ ID NO: 178134 - protein, 305 aa, Unknown
  Bacterial polypetide isolated from the Sargasso Sea
MITGKFPSLRLRRTRKFTWSRRLIQENNLSTNDFIYPIFLIEGKNNKQPIKSMPDIYKYTIDKLGPLVDKAIKNKIPMIALFPSTPNKKKDYHGNEALNENNLVCKATRFIKKRFKNDIGIMCDVALDPYTSHGHDGLLKKDYVLNDKTIEVLKKQSLLQAQMGCDVIAPSDMMDGRIGKIRKFLDKNGYHDVQLLSYAVKYASNFYGPFRDAIGTKKSLISNKKNYQMDFANINESIREVALDIKEGADMVMVKPGMPYLDVIKNIKDKFKIPVLAYQVSGEYSLIKNGIKNKLIKENAIIESL

SEQ ID NO: 178135 - protein, 149 aa, Unknown
  Bacterial polypetide isolated from the Sargasso Sea
VLDSNNLTDTLILSYAAKYASVFYGPFRDAIGSGSNLGKDGKLTYQMDPSNSDEAIREVGLDISEGADMVMVKPGMPYLDIISRIKSEFKVPTFAYQVSGEYSMIKESINKGWLNEKVVMESLLSFKRAGANGILTYFALEAAEKLKNE

SEQ ID NO: 178136 - protein, 260 aa, Unknown
  Bacterial polypetide isolated from the Sargasso Sea
MSIYRKYPSTRLRRLRKNLNLIELVSETNLTSKDLIQPIFIKENFEGKEEIESMPGIFRFGLNHVMSEIEELINAGINAIAVFPVVESSKKDEKGSEALNKSNFIVQSINEIKQEFPELILIADVALDPYTDHGHDGILINNEVANDETVEVLIEQSILLAEAGADIIAPSDMMDGRIGLIRDSLEKQNLKDTILLSYASKYNSKFYGPFRDAVNSASNLGDSSKSSYQMNISNKNEALHEVALDINEGADIVMVKPAMP

SEQ ID NO: 178137 - protein, 213 aa, Unknown
  Bacterial polypetide isolated from the Sargasso Sea
VIKIADVALDPFTDHGHDGVLLDGKVDNDKTLELLRDQALLLAQSGADVLAPSDMMDGRVGVIRDTLESNGFVDTVILSYAAKYASSFYGPFREAVGSSANLGRASKKTYQMNFANLNEALHETAMDIEEGADIVMVKPGTAYLDVVHAIKTKFQIPTFVYQVSGEYSMLQLSIEKGWLDKNVMLESLMCCKRAGADAILTYAAKQVASELNS

SEQ ID NO: 178138 - protein, 298 aa, Unknown
  Bacterial polypetide isolated from the Sargasso Sea
MRRNRMKDFSRRIISETHLNANNLIQPLFVTQGKYENTYIEAMPGIKRHSIKSVAKEAIEIYKLGIPAIAIFPYIPNDLKDENGSESLNKNNVICKAIKEIKNSCPEIGIICDVALDPYTNHGHDGIIINSEINNDKTIEILCKQAVIQAEAGCDIVAPSDMMDGRVKSIRSALDKENLINTSILSYSAKYASSFFGPFRDALGTKINSDYVYDKKSYQMDPANSREALREIELDINEGADIIMIKPALSYLDIINLAKQNFEIPIFAYQVSGEYSMIKAASEKNWINEQDIIFETLL

SEQ ID NO: 178139 - protein, 215 aa, Unknown
  Bacterial polypetide isolated from the Sargasso Sea
KKKLRNKIGIMCDVALDPYTSHGHDGLLKKNSILNDKTVEILVKQAVLQAKMGCDVIAPSDMMDGRIGKIRSALDKNNLNDVQILSYAVKFSSSFYGPFRDAVGSKKLLKGDKKTYQMDFRNSDESLREVSLDIKEGADMVMVKPGMPYLDIIKRVKDNFKIPVFAYQVSGEYSLIMSGINKKIIDKASIKESLISFKRAGANSIVTYFADQIDL

SEQ ID NO: 178140 - protein, 254 aa, Unknown
  Bacterial polypetide isolated from the Sargasso Sea
GIPMVSIFPYTNQKLKNLKGLESLNEDNLVCKSIRYIKDRYKNQIGIMTDVALDPYTSHGHDGILENNYVNNDKTVEILCKQSLLQAQMGCDVIAPSDMMDGRVGQIRKILDKNNLELVQILSYAVKFASNYYGPFREAIGSRKNLKNDKKDYQMDYRNKKEAFREVSLDIKEGADIVMVKPGLPYLDIISSIKEEFKIPVFAYQVSGEYSLIMNGIKRKIIKDEAILESLISFKRAGCSAIVTYFAYQLARVL

SEQ ID NO: 178141 - protein, 260 aa, Unknown
  Bacterial polypetide isolated from the Sargasso Sea
MSNSSFIRSFPKTRMRRMRKDEFSRELMKETRLSVKDLIYPVFIVDGQDKRQPIESMPSIYRLSIDNLIEEAAELTELGIPAIALFPVVEDKNKSQNGEESYSQDGLIQNAIKEIKSNFPTLGVISDVALDPYTTHGQDGIIDESGYVLNEKTVEILVKQAISHAVAGADIVAPSDMMDGRVGAIRGAFEDKNLIHTRILAYSAKYASNYYGPFRDAVGSGKSLGSSDKYSYQMDFSNSDEALQEIASDLAEGADMVMVK

SEQ ID NO: 178142 - protein, 176 aa, Unknown
  Bacterial polypetide isolated from the Sargasso Sea
LLLAEHCADIIAPSDMMDGRIGLIRNNLEDKGFKNTILLSYSAKYASGFYGPFRDAVGSRGNLVSDKKTYQMDYANSDEALREVALDIAEGADIIMVKPGISYLDVIHRIKSEYNFPTFAYQVSGEYAMVKAAARNNWIDEEKIIIEQLTSFKRAGANAILSYFAIDAAKIINSTS

SEQ ID NO: 178143 - protein, 170 aa, Unknown
  Bacterial polypetide isolated from the Sargasso Sea
AGCDIIAPSDMMDGRVGRIRNALDKNKYENTLILSYAAKYASKFYGPFRDAINSSSNLKGGSKSSYQMDVSNTNEALREVAMDINEGADMVMIKPGMPYLDIIQRIKSEFQIPTFAYQVSGEYSMIKGAVNNGWLDSKVIKESLLSFKRAGADGILTYFAREIAKELQNE

SEQ ID NO: 178144 - protein, 269 aa, Unknown
  Bacterial polypetide isolated from the Sargasso Sea
MIIGKYPGLRLRRNRKISWARKLVQENTLSSSDFILPIFLIDGSNKKESISSMPGVYRYTIDRLSQIIDKAIKKGIPMVALFPKTKNSLKNEIGSEALNENNLVCKAIVQVKKRYKNQIGIMCDVALDPYTSHGHDGLIKSNQIINDETIEILIDQSLLQAEMGCDVLAPSDMMDGRIGKIRKALDKSNFQNVQILSYAAKYASSFYGPFRDAVGSRRSLKGDKKTYQMDFRNSDEALREVALDIKEGADMVMVKPGMPYLDIIKSIKE

SEQ ID NO: 178145 - protein, 184 aa, Unknown
  Bacterial polypetide isolated from the Sargasso Sea
TLEALSKMSINLASSGADILAPSDMMDGRIGKIRDSLEKNNHKDTILLSYAAKYASNFYGPFRDAVGSKQTEGISKKTYQMDSKNLKEAYKEILLDINEGADIVMVKPAMPYLDIINDLSQKTNVPIFAYQVSGEYSMLKMGIDKKIFDHNVIPETLISLFRAGSSSVITYFARWTAENYDNIS

SEQ ID NO: 178146 - protein, 249 aa, Unknown
  Bacterial polypetide isolated from the Sargasso Sea
MKEQSNKQFSINGFPRVRMRRNRLSEFSRRLISENNLSVNDLIYPIFITYGSKVKEEISSMPGIYRYSLDLLHKEIEYISSLNIPAIALFPKIENELKTPDGKEALNNNNLICKAIQISKKVNPDLGVITDVALDPYTDHGHDGIIKEDQIDNDLTLDILCKQAIVQAEAGCDIIAPSDMMDGRVGAIRDTLDGHGLINVQIMSYAAKYASSYYGPFRDAVGSAVNLSNKSKKSYQMDPANSAEALREI

SEQ ID NO: 178147 - protein, 300 aa, Unknown
  Bacterial polypetide isolated from the Sargasso Sea
MRRIRNYDWVRRLVSENNLSTNDLILPLFIKEGKNQKESIKSMPGVYRYSIDKINKVIDQACKLSIPMIALFPYTPNKKKDSLGSEALNENNLICRALRQIKTKKRNIGVMCDVALDPYTSHGHDGVLKNSYVDNDKTLEILAKQSLLQAQMGCDVIAPSDMMDGRVGKIRKILDKNGCINTKILSYAVKYSSNFYGPFRDAVGSKKSLKGDKKTYQMDYRNTNEAMKEVSLDIKEGADMVMVKPGMPYLDIIKTVRENFKIPVFSYQVSGEYSLIKYGIKNKLINEDAILESLVSLKRA

SEQ ID NO: 178148 - protein, 200 aa, Unknown
  Bacterial polypetide isolated from the Sargasso Sea
MDLVFRPRRLRRNGPIRGLVRETELAPRQLIYPIFVAEGNRVREEINTMPGQFRLSVDEVVRDCEVLYELGIGAVNLFGYSEEKDELATKSYDSSGLVQRCIREIKKKIPDLCVQTDVALDPYTTHGHDGLVIEGEIVNDETVGVLCKMALSHAEAGADWIAPSDMMDGRVGAIRDALDEQGFHHVGILAYSAKYASCSS

SEQ ID NO: 178149 - protein, 246 aa, Unknown
  Bacterial polypetide isolated from the Sargasso Sea
YFLILKRKKKDEYGSEALNPDNLVCRGIEYIKGKFKNKIGVMCDVALDPYTSHGHDGLLKKNNILNDETVEILTKQAVLQAKMGCDVIAPSDMMDGRIGKIRKALDINNLNDVQILSYAVKFSSSFYGPFRDAVGSKKLLKGDKKTYQMDFRNSDESLREVSLDVKEGADIVMVKPGMPYLDIIKKVKDNFKIPVLAYQVSGEYSLIMNGINKNIINKDSIIESLTSLKRAGANGIVTYFANQIDL

SEQ ID NO: 178150 - protein, 182 aa, Unknown
  Bacterial polypetide isolated from the Sargasso Sea
RTIEILTKQSLLQAKMGCDVIAPSDMMDGRVAAIRKVLDKENFKDVSILSYAIKFASSFYGPFRDAVGSKKKLKTNKKTYQMDYRNKFDSFREVGFDLKEGADMIIVKPGLPYLDIISKIKEKFSVPVIAYQVSGEYTLIKNAIDKKFLSEESIIESIISFKRAGACAIITYFALEIAKKLK

SEQ ID NO: 178151 - protein, 222 aa, Unknown
  Bacterial polypetide isolated from the Sargasso Sea
IRLIKKKYKNEIGIMCDVALDPYTSHGHDGIIKSGYVLNDETNKILIQQSLLQAEMGCDVLAPSDMMDGRIGEIRKSLDKNGYKMTQILSYAVKYSSNFYGPFRDAVGSKKNLQGDKKNYQMDFRNKDEALREVAMDIKEGADMVMVKPGLPYLDIISSVKEKFKIPVMAYQVSGEYSLLTNGINKNFLDKNVIIESLIAFKRAGANAIVSYYADRLDKIIK

SEQ ID NO: 178152 - protein, 237 aa, Unknown
  Bacterial polypetide isolated from the Sargasso Sea
LGSEALNEDNLVCKAIKYIKKRYKNKIGIMCDVALDPYTKHGHDGILKSKNIMNDETIEILIQQSLLQAQMGCDVLAPSDMMDGRIGRIRKALDKENFKNTQILSYAVKYASNFYGPFRDAVGSKVSLKGDKKTYQMDFRNYDEAIREVALDIKEGADMVMVKPGLPYLDIIRSIKNKFKIPVFAYQVSGEYSMLSNAVEKKIINKDAIFENLMSFKRAGANAIVSYYADRLNEILP

SEQ ID NO: 178153 - protein, 194 aa, Unknown
  Bacterial polypetide isolated from the Sargasso Sea
TIIDNDVDNDETLKTLSSQGLTLVKSGADILAPSDMMDGRVQRIRDTLDMNGFEKIPIFPYSVKYASSFYGPFRNAVDSKLEIGDRKTHQMNFKNTNEFIREIEYDINEGCDAIIIKPALAYLDIISKAKENFNIPIIAYNVSGEYAMVKSAAENNQVDEYELTMEILYAIKRAGASAIITYNAEEIAKILSNK

SEQ ID NO: 178154 - protein, 245 aa, Unknown
  Bacterial polypetide isolated from the Sargasso Sea
EKDLKDENGTNSYNPNNLICRAIKTVKASFPELGIIADIALDPYTIHGHDGLIRGNKVANDETIAVLKKQAIVYAEAGCDILAPSDMMDGRVGALRRELEENNMHDTVIMSYAAKYASSFYGPFRDAIKAQKLSGIKDKKTYQMDSANSDEAMHEIALDINEGTDMVIIKPGMPYLDVIYRCKKEFQIPTFAYQVSGEYSMILSAVSGESKYDIIKESMFSFKRAGADGILSYFTPFLKESLNKR

SEQ ID NO: 178155 - protein, 257 aa, Unknown
  Bacterial polypetide isolated from the Sargasso Sea
VDDLIQPIFVKEDLDGLENIDSLPGISRYGLNALDEEIEKIQNNKIKAVAIFPVINPDKKDETGSDSLNEDNLVCTAIKQIKKNSELAVIADVALDPYTSHGHDGVLDENGYVENDKSLSLLVEQALTLAKAGADMVAPSDMMDGRISGIRNSLESNNFTNTIILSYAAKYSSKFYGPFRDAVGSSANLGVGSKDTYQMSVANIDEALYEVKMDIEEGADIVMVKPGMPYLDVIKAVKDTFKVPTFAYQVSGEYAML

SEQ ID NO: 178156 - protein, 202 aa, Unknown
  Bacterial polypetide isolated from the Sargasso Sea
PNHGHDGILKKKEILNDETIKILSKQALLQAEMGCDVIAPSDMMDGRVGVIRKILDKNNYKNVQILSYAAKYSSSFYGPFRDAIGSKKKLKGDKKTYQMDYKNSYEALREVAMDIKEGADFVMVKPGLPYLDVIKLIKENFKIPVFAYQVSGEYSMIKNAIKNQVINDESIIESLMSFKRAGASAVITYFALEVALKLKKGL

SEQ ID NO: 178157 - protein, 183 aa, Unknown
  Bacterial polypetide isolated from the Sargasso Sea
VEVLMSQSILLAEAGADIIAPSDMMDGRIGLIRDSLEKQNFKDTILLSYAAKYNSKFYGPFRDAVNSASNLGNSSKSSYQMNISNKNEALHEVALDINEGADIVMVKPAMPYLDVIQSIKKEFKVPTFAYQVSGEFSMLKNAINHGWLDKEVMLESLVSIKRAGADAILSYAAKEISKEINKV

SEQ ID NO: 178158 - protein, 241 aa, Unknown
  Bacterial polypetide isolated from the Sargasso Sea
PKKKDEYGNEALNENNLVCQAIKFIKKNYKNEIGIMCDVALDPYTSHGHDGIIRKNEILNDETLEILIKQSILQAKMGCDVIAPSDMMDGRVLKIRKALDKNNLKDVQILSYAVKYASSFYGPFRNAVGSKNLLKGDKKTYQMDFKNNYESLREVALDIKEGADMIIVKPGMPYLDIIREVKNNFKIPVIAYQVSGEYSLIQNAISKKILDKKSVYESLVSFKRAGANAIITYFADQIKLD

SEQ ID NO: 178159 - protein, 167 aa, Unknown
  Bacterial polypetide isolated from the Sargasso Sea
MGCDVLAPSDMMDGRIGQIRKALDNNGHHMTQILSYAVKYASSFYGPFRDAVGSKGLLKGNKKNYQMDFKNSNEALREVALDIKEGADMVMVKPGLPYLDIIKLVKENFKIPVMAYQVSGEYSLLANSINQGFVHKEVIIESLISFKRAGANAIVSYYADRLGEILK

SEQ ID NO: 178160 - protein, 332 aa, Unknown
  Bacterial polypetide isolated from the Sargasso Sea
MSFYPHYRPRRMRRDDFSRRLMRENILTTNDLIYPVFVVEGTNVRQAVPSMPGVERVSVDLLMGVAEQCVELGVPVLSLFPAIEPSLKTPDGREATNPAGLIPRAVRELKKNFPELGVLTDVALDPYTSHGQDGVLDEAGYVINDETVEILVDQARAQAEAGVDIVAPSDMMDGRIGAIREMLESEDYIHTRIMAYAAKFASAFYGPFRDAVGSAANLGKGNKMTYQIDPANSNEALREVQADIEEGADMVMVKPGMPYLDIVRRVKDEFKFPTYVYQVSGEYAMLKAAAQNGWLDHDKAMMESLLAFKRAGADGVLTYFALDAARILRAQK

SEQ ID NO: 178161 - protein, 321 aa, Unknown
  Bacterial polypetide isolated from the Sargasso Sea
MRRVRNSGWIRRLVSENNLSIDDLILPIFVRDGHGKVESIKSMPGVNRYSVDKLNLIMNKAKKYKIPMVALFPYTPKNKKDKFGTEALNRNNLICKSLKFIKKRYTGVGVMCDVALDPYTSHGHDGIIVNKQIDNDKTVKILVKQALLQAEMGCDVIAPSDMMDGRVGAIRRALDKRNFKNVSILSYAAKYASSFYGPFRDAVGSKKNLKSDKKTYQMDYRNLNEAFREISLDIKEGADIVMVKPGLPYLDIIKNIKDSFKIPVFAYQVSGEYSLIKHGIKNKLISDEAILESVMAFKRAGASAIVTYFALEIANKIKKFS

SEQ ID NO: 178162 - protein, 304 aa, Unknown
  Bacterial polypetide isolated from the Sargasso Sea
MIITGKYPNLRLRRNRKSNWSRRLVSENTLSVNDLILPIFVIEGKNKKIPIKSMPGIFRYSIDKLNQVVGNAVSLKIPMVAIFPYIKNNLKNTRGTEALNKNNLVCKATNLIKKKYNDKIGVMCDVALDPYTSHGHDGLLKSGKIVNDETIKILISQSLIQAEAGCDVIAPSDMMDGRIGLIRKALDKNNFQHVQLLSYAVKYASSFYGPFRDAVGSKNLLKGDKKTYQMDYRNSDEAIREVTLDIKEGADMVMVKPGLPYLDIIRNIKNKFKIPIFAYQVSGEYSLFVNSINKGIVSDKIILE

SEQ ID NO: 178163 - protein, 318 aa, Unknown
  Bacterial polypetide isolated from the Sargasso Sea
MRRSRKNSWSRRLVQENSLSYNDLILPIFLTDGSNQKIPIKSMPNIYRYSIDRLSKIIDKSIKKKIPMVALFPQTKIKLKNPLGSEALNENNLVCKAIRYIKKRYKNEIGIMCDVALDPYTSHGHDGLLKNSKIVNDETINVLVKQSLLQASMGCDVIAPSDMMDGRIGKIRKELDKNKFEDVQIVSYAVKYASSFYGPFRDAVGSKGALRGDKKTYQMDFKNTNEALREVSIDIKEGADMVMVKPGLPYLDIIKNVKENFKIPVLAYQVSGEYSLIANGIKQGIIDDNVIYETLMAFKRAGSNAIISYFADQINLDF

SEQ ID NO: 178164 - protein, 331 aa, Unknown
  Bacterial polypetide isolated from the Sargasso Sea
MQKTLFPRVRPRRLRLNETIRDLVSETNINRSKLIQPLFVSDTLKQKEEIVTMPGQYLYSKDDILSEIDELADLGINTIALFPNIESDLKDISGSEALKEDNFICSIVRQIKERFPKLVIITDVALDPYTSSGHDGIILDGKIDNDLTLEALSKMSINLASSGADILAPSDMMDGRIGKIRDSLEKNNHKDTILLSYAAKYASNFYGPFRDAVGSKQTEGISKKTYQMDSKNLKEAYKEILLDINEGADILMVKPAMPYLDVINDLSQKTNVPIFAYQVSGEYSMLKMGIDKKIFDHNVISETLISLFRAGSSSVITYFARWTAENYDNIS

SEQ ID NO: 178165 - protein, 333 aa, Unknown
  Bacterial polypetide isolated from the Sargasso Sea
MTNIQGKFPSTRLRRNRMREFSRRLVAENNLGSSDLILPLFVCEGDNVEDPIQSMPGVNRYSIDKLLHRVEDAVRLSIPAIAIFPQIDTGLKNAQGSLAIDENNLVCRSIKSIKKEFSEIGIICDVALDPFTDHGHDGLVVDNKIDNDKTLEILERQALVQVNAGCDVIAPSDMMDGRVGRIRKCLDNNNFQNTLILSYAAKYASGFYGPFRDAIGSGSNLGKNGKLTYQMDPSNSDEALREVAFDINEGADMVMVKPGMPYLDIISKIKSEFKVPTFAYQVSGEYSMIKESINKGWLNEKVIKESLLSFKRAGANGILTYFALEIAEKLKNE

SEQ ID NO: 178166 - protein, 329 aa, Unknown
  Bacterial polypetide isolated from the Sargasso Sea
MIIGKYPSLRLRRNRKESWSRRLIQENTLSPNDFILPIFLIEGSNKRQEISSMPGVYRYTINRLSQIVDRAIKKKIPMVALFPKTQNVHKDELGTESLNEKNLVCRAIKEIKKRYKNQIGIMCDVALDPYTSHGHDGLIKSNTILNDETIEVLINQSLLQAEMGCDVIAPSDMMDGRIGKIRKALDKNKFQNVQILSYAAKYASSFYGPFRDAVGSKGSLKGDKKTYQMDYRNSDEALREVALDIKEGADMVMVKPGMPYLDIIKSIKEKFKLPVFAYQVSGEYSLIETAIAKKLINKDAIYESLVAFKRAGANAIVSYYADRIDKIIK

SEQ ID NO: 178167 - protein, 333 aa, Unknown
  Bacterial polypetide isolated from the Sargasso Sea
MNKSYPNTRMRRNRSAKFVRNLVRETSFSVNDLIYPVFILPGKNKQEPIKSMPGKKRYSVDMLLPIIGKLHKKGLNAIALFPVIGKEKKSKDAKEAFNPRGLVQSAVKKIKKEYPNLGIITDIALDPFTLSGHDGIVDSKGYVLNDKTVKVLTRQALSHAEAGADIVAPSDMMDGRILAIRDVFEKNKFHNTKILSYAAKYASNFYGPFRDAVDSSKNLNDSSKETYQMDFANITEASLEINLDINEGADMVIIKPGLPYLDIVAKIKNKFSIPIFSYHVSGEYSMIKSAALKGCINEKSSVLEAMYCFKRAGCNAVLTYYTPEIIKWLDGNK

SEQ ID NO: 178168 - protein, 329 aa, Unknown
  Bacterial polypetide isolated from the Sargasso Sea
MIIGKYPSLRLRRNRKESWSRRLIQENTLSPNDFILPIFLIEGSNKRQEISSMPGVYRYTINRLSQIVDRAIKKKIPMVALFPKTQNVHKDELGTESLNEKNLVCRAIKEIKKRYKNQIGIMCDVALDPYTSHGHDGLIKSNTILNDETIEILINQSLLQAEMGCDVIAPSDMMDGRIGKIRKALDKNKFQNIQILSYAAKYASSFYGPFRDAVGSKDSLKGDKKTYQMDYRNSDEALREIALDIKEGADMVMVKPGMPYLDIIKSIKDKFKLPVFAYQVSGEYSLIETAIAKKLINKDAIYESLVAFKRAGANAIVSYYADRIDKIIK

SEQ ID NO: 178169 - protein, 304 aa, Unknown
  Bacterial polypetide isolated from the Sargasso Sea
MRIIGKYPSVRLRRNRKSDWSRRLVAENNLTADDLILPIFVTEGKNKVEPIKSMPDIYKYTLDRVAQVVNKASKLKIPLVAIFPNIPNNKKNNNGTESLNEKNLICRSIKKIKETNPEIGVMTDVALDPYTNHGHDGILKKNEILNDETIEVLTKQALLQAEMGCDVIAPSDMMDGRIGAIRKTLDKNNFEKVQILSYAVKYSSNFYGPFRDAIGSRKKLKGDKKSYQMDFKNSNEALREVALDLKEGADFVMVKPGLPYLDIVRSIKDNFKVPVFVYQVSGEYSMIMNSIKKGYFHADAITES

SEQ ID NO: 178170 - protein, 324 aa, Unknown
  Bacterial polypetide isolated from the Sargasso Sea
MRRMRKHDFSRRLMAENHLTVNDLIYPMFVLEGTNRSEKVASMPGVERYSIDLLLKEAEELVELGIPLIALFPVTPAEKKSLMAEEAYNADALVQRAVRELKKAFPQLGIMTDVALDPFTTHGQDGIIDETGYILNDITTEILVKQALSHAEAGADIVAPSDMMDGRIGAIRQALEAAGHVNTQIMAYSAKYSSSYYGPFRDAVGSAGNLKGGNKHSYQMDPANSDEALHEVALDIQEGADMVMVKPGMPYLDIVHRVKTELAVPTFAYQVSGEYAMHMAAIQNGWLAEKAIVMESLLCFKRAGADGILTYFAKRAAQWLKEAK

SEQ ID NO: 178171 - protein, 287 aa, Unknown
  Bacterial polypetide isolated from the Sargasso Sea
MRRNRKSSWARRLVEENNISVNDLILPIFVTEGKNKIEEIKTMPGIYRYSIDKINNIVNKASKLKIPLVAIFPNTPKSKKDIIGSEALNENNLVCRAIRKIKKNNPEIGVMADVALDPYTSHGHDGIINKKEVLNDETIKILSKQAILQAEMGCDVIAPSDMMDGRVGIIRKSLDKNNHKDVQILSYSAKYASSFYGPFRNAIGSKQKSKINKKTYQMNYRNSEEAIREVALDIKEGADFVMIKPGLPYLDIVKSVKENFKIPVFVYQVSGEYSMIKNGIKTGILDN

SEQ ID NO: 178172 - protein, 333 aa, Unknown
  Bacterial polypetide isolated from the Sargasso Sea
MKKKSLSNFSFPSTRLRRNRMKEFSRKLISENILTTNDLIWPLFVSEGNKIKDKISSMPGIYRNSIDELIKEAEQAVKLKIPAIAIFPHIDSSLKDSKGSNAIDNNNLICRSIKAVKNEFPDLGIISDVALDPFTDHGHDGLVINDEVNNDETLKVLGQQALIQAQAGCDIIAPSDMMDGRVGYIRSILDEAGFINTQILSYAAKYASGFYGPFRDAIGSKLAGATKSTYQLDPANSDEAIREVELDILEGADMVMIKPGMPYLDIVHKVKNTFNIPTFVYQVSGEYAMIMAAIKKNWLDSDKVIMESLLSFKRAGANGILTYFAKDIAKKLK

SEQ ID NO: 178173 - protein, 332 aa, Unknown
  Bacterial polypetide isolated from the Sargasso Sea
MSCTRDNPLKPLRRLRRLRRTEAMRDLVRETQISLSDLVHPLFIEEHITQAVPISTLPGISRLPESALADEIQRLYALGIRYVMPFGISHTKDAQGSDTWDDNGLLARMIRTIKTAAPEMMVIPDICFCEYTDHGHCGVLHHDEVCNDQTVANLVKQSITAAKAGADMLAPSAMMDGQIKAIRQGLDEVGFEHIAILAHAAKFASSFYGPFRAAVDCELSGNRKGYQLDYANGRQALLEALLDEEEGADILMVKPGTPYLDVLSRLRQETHLPLAAYQVGGEYAGIKFAALAGALDERAVVTETFIGLKRAGADLIVSYYAKQYAEWLAQSR

SEQ ID NO: 178174 - protein, 264 aa, Unknown
  Bacterial polypetide isolated from the Sargasso Sea
NIVDRAIKKGIPMIALFPYTEKRKKNDLGTEALNENNLVCRALQRIKNKYKNEIGIMCDVALDPYTSHGHDGLLQNKYVLNDETIKILLDQSLLQAQMGCDVLAPSDMMDGRIGEIRKYLDKHNFKMTQILSYAVKYASSFYGPFRDAVGSKNLLKGNKKNYQMDYRNSDEALREVALDIKEGADMVMVKPGLPYLDIIKKVKENFKIPVMAYQVSGEYSLLEHGIKNDLTDRNIILESLISFKRAGANAIVSYYADRLDQIIK

SEQ ID NO: 178175 - protein, 332 aa, Unknown
  Bacterial polypetide isolated from the Sargasso Sea
MFIQRKFPNTRLRRLRRNNNLINLVSETNLTKDDLIQPIFVKENFDGEEEIESMPNIYRYGINQALNEIEDIIKSGINSLAIFPVIDSENKDHKGSQATKTNNFISKSIKEIKRQFPDLVLIADVALDPYTDHGHDGIIVNGDVDNDETNKILIEQSLILADAGADIIAPSDMMDGRIGLIREALESQNFKNTILLSYAAKFSSKFYGPFRDAVGSSSNLGESSKSSYQMSLKNKQEALHEVALDINEGADIVMVKPAMPYLDIIHSIKDSFQIPTFAYQVSGEYSMLKLSISKGWLDSGVMLESLIGIKRAGADAILTYAAKEISKEIQNK

SEQ ID NO: 178176 - protein, 259 aa, Unknown
  Bacterial polypetide isolated from the Sargasso Sea
VGKAIKKGIPMVALFPHISPKKKDETGTEALNPDNLVCRGIKFIKKKFKNKIGIMCDVALDPYTSHGHDGLLKKKIIINDKTVEILTKQAVLQAKIGCDVIAPSDMMDGRIGKIRSALDKENLNDVQILSYAVKFSSSFYGPFRDAVGSKKLLKGDKKTYQMDFRNSDESLREVSLDIREGADMVMVKPGMPYLDIIKRVKDNFKIPVFAYQVSGEYSLIMNGINQKLIDKASIKESLISFKRAGANSIVTYFADQIDL

SEQ ID NO: 178177 - protein, 330 aa, Unknown
  Bacterial polypetide isolated from the Sargasso Sea
MISRKYPSTRLRRLRQSESIIDLTSECALTKNDLIQPVFVKEGLSDKEPIESMPGIFRFGEDSVLKEIEEINQLGIRAIAIFPVIDPSKKDSKGTEATKRDNFISRVLGSIKTKFPEMLVIADVALDPYTDHGHDGILENDEILNDQTLDVLAEQSLVLAEAGADIIAPSDMMDGRIGVIRKKLDENNFEDKIILSYAAKYNSKFYGPFRDAVNSKNNLGTSDKSSYQMNPANSLEALNEVAMDIEEGADIVMVKPGMPYLDIISKIKEEFKVPTFAYQVSGEYAMIMESVNKGWLDKGVIIESLTSFKRAGADAVLTYFAKDLIKEFNL

SEQ ID NO: 178178 - protein, 331 aa, Unknown
  Bacterial polypetide isolated from the Sargasso Sea
MNVSRKYPQSRLRRTRFTSSIRSLVAENTLSVDDLIQPIFVKEDLDGTESIDSLPGINRYGLNALDEEIEKIQSNKIKAVAIFPVINPDKKDEQGSDSLNEDNLVCTAIKQIKKNSELAVIADVALDPYTSHGHDGVLDENGYVENDRSLSLLVKQALTLAKAGADMVAPSDMMDGRIAGIRESLESNDFVNTIILSYAAKYSSKFYGPFRDAVGSSANLGVGSKDTYQMSVANVEEALHEVKMDIEEGADIVMVKPGMPYLDVIKAVKDTFRVPTFAYQVSGEYAMLKAAIENGWLSEEVLQESLLSFKRAGADCVLTYAANEIALKLNR

SEQ ID NO: 178179 - protein, 332 aa, Unknown
  Bacterial polypetide isolated from the Sargasso Sea
MKILGKFPSTRLRRVRSSDWVRRLISENNLTSDDLILPIFLTEGKNKIEVIKTMPGIYRYTVDNIPRILDKASKYKIPMVSLFPQTPYKKKDLSGSEALNENNLVCRGIREIKKRYKGMGVMSDVALDPYTSHGHDGLLINGKIHNDKTLEVLVQQSLLQAEMGCDVIAPSDMMDGRIGLIRKSLDKKGFKDTKILSYAVKYASNFYGPFRDAVGSKNLLKGDKKTYQMDYKNKDECIREVGLDIKEGADFVLIKPGMPYLDIISLIKQTFKIPVFSYQVSGEYSMIMNGIKNKILNENTILESLISLKRAGSNAIITYFALEALKKINNIK

SEQ ID NO: 178180 - protein, 323 aa, Unknown
  Bacterial polypetide isolated from the Sargasso Sea
MFIRGRRLRQNQNIRNLVEETSISVNDLIMPIFLIEGKNKSEKIDSMPEIYRKTLDKQLEDIKSAAKLGINAIIIFPAIKEKLKDPFGKEALNKKGLVPKAIKAIKKAFPKMLIITDVALDPYNSDGHDGILKDGEILNDKTVEILCRQACIHAEFGADIVAPSDMMDGRVVKIREALDRKGFHNTAIMSYAAKFASSLYGPFREALNSEPKSGDKKSYQINPKNYREAIKEILLDEAEGADLLIVKPASFYLDVIRTSSEASVLPIVAYQVSGEYSMIKAAAKNGYIDNDSVMKESLESMKRAGATIIITYFALEMAKLLKK

SEQ ID NO: 178181 - protein, 331 aa, Unknown
  Bacterial polypetide isolated from the Sargasso Sea
MKIERSYPDTRMRRIRKSSALREMLAETTLSKADLIQPIFIKEDLEGREAIKSMPGINRLGLDILNDEIKKIIDLGIKSVAVFPVINEEKKDEIGSQATIENNFICEAISAIKKNYPDLVVIADVALDPYTDHGHDGLLNDTGDVDNDLTLPALREQALVLAKAGTDIIAPSDMMDGRIKIIRDALEQNDFINTLILAYSAKFSSKFYGPFKDAVESAKFFGNKTKDTYQMPVQNINEALHEVALDIQEGADIVMVKPGMPYLDVIKAVKDEFKVPTFAYQVSGEYSMLKNAVETGLLSDDVIKESLLSFKRAGADCILTYFASEIAKDLS

SEQ ID NO: 178182 - protein, 238 aa, Unknown
  Bacterial polypetide isolated from the Sargasso Sea
MAQSGLDLFPYTRMRRMRRDDFSRRLMAENQLSVNDLIYPVFVLEGKNRREVIESMPGIERLSIDFLLEEAKELVDIGVPAVAIFPVTPGDKKSLMAEEAFNEDGLAQRTVRALKEAFPELGVITDVALDPFTTHGQDGIIDDKGYVINDITTEILVKQALSHAEAGADVVAPSDMMDGRIGAIREALEADGHIHTRIMAYSAKYASSYYGPFRDAVGSAGNLKGADKKTYQMDPANS

SEQ ID NO: 178183 - protein, 337 aa, Unknown
  Bacterial polypetide isolated from the Sargasso Sea
MSNFSFSRSFPKTRMRRMRKDEFSRELVKETRLSVKDLIYPVFIVDGQDKRQPVESMPSIYRLSIDNLIEEASELTELGIPAIALFPVVEDNKKSQNGEESYNQDGLIQNAIQQLKRSFPTLGVISDVALDPYTTHGQDGIIDESGYVLNEKTVEVLVKQAISHAVAGADIVAPSDMMDGRVRAIRDAFEEKKLIHTRILAYSAKYASNYYGPFRDAVGSGKSLGGSEKHSYQMDFSNSDEALQEVALDLAEGADLVMVKPGMPYLDIVHRVKAEFRVPTFVYQVSGEYAMHMAAIENGWLKEDEVVLESLMCIKRAGADAILTYFAKKAARLIQGS

SEQ ID NO: 178184 - protein, 329 aa, Unknown
  Bacterial polypetide isolated from the Sargasso Sea
MIIGKYPSLRLRRSRKDPWSRRLIQENTLSPNDFILPIFLIEGSNKRQEISSMPGVYRYTINRLSQVVDKAIKLGIPMIALFPKTQNSKKDELGTESLNENNLVCKAIQEIKKRYKNKIGIMCDVALDPYTSHGHDGLIKSNNILNDETIEVLINQSLLQAEMGCDVLAPSDMMDGRIGKIRKALDKNKFQNVQILSYAAKYASSFYGPFRDAVGSKGSLKGDKKTYQMDYRNSNEALREVALDIKEGADMVMVKPGMPYLDIIKSIKEKFKLPVFAYQVSGEYSLIQTAITKKIINKDAVYESLVAFKRAGANAIVSYYADRIDKIIK

SEQ ID NO: 178185 - protein, 286 aa, Unknown
  Bacterial polypetide isolated from the Sargasso Sea
MEGKNKKETIKSMPNVFRYSVDKLNIAVGKAIKKGIPMVALFPYISKTKKDENGSEALNPDNLVCRGIKFIKKKFKNKIGIMCDVALDPYTSHGHDGLLKKNNILNDKTIEILTKQAVLQAKMGCDVIAPSDMMDGRIGKIRSALDKNNLNDVQILSYAVKFSSSFYGPFRDAVGSKKLLKGDKKTYQMDFRNSDESLREVSLDIKEGADMVMVKPGMPYLDIIKKVKDNFKIPVFAYQVSGEYSLIMNGINKKLIDKASIKESLISFKRAGANGIVTYFADQIDL

SEQ ID NO: 178186 - protein, 137 aa, Unknown
  Bacterial polypetide isolated from the Sargasso Sea
SIMSYTAKYASAFYGPFRDALSSAPKHGDKKTYQMNPANKREALLEAQLDFEEGADMIMVKPALCYLDVIQTLRESMPIPITAYNVSGECAMIHAASQNGWIDYEPAVAELLLSIRRAGADGILTYFAKDFAKFSKG

SEQ ID NO: 178187 - protein, 314 aa, Unknown
  Bacterial polypetide isolated from the Sargasso Sea
RFSRRLVAENTLSVNDLILPLFVCEGNKVDDPINSMPGVSRYSIDKLLSEVEKAVKFNIPAIAIFPQIESGLKNSEGSLAVDENNLVCRSIKSIKKDFPNIGIVCDVALDPFTDHGHDGLVINDKIDNDKTLEVLEQQALVQANAGCDVIAPSDMMDGRVGRIRTALDSNNLADTLILSYAAKYASGFYGPFRDAIGSGSNLGKDGKLTYQMDPSNSDEAIREVGLDISEGADMVMVKPGMPYLDIISRIKSEFKVPTFAYQVSGEYSMIKESINKGWLNEKVIMESLLSFKRAGANGILTYFALEAAEKLKNE

SEQ ID NO: 178188 - protein, 270 aa, Unknown
  Bacterial polypetide isolated from the Sargasso Sea
MDLVFRPRRLRRNGPIRGLVRETELAPRQLIYPIFVAEGNRVREEIKTMPGQFRLSVDEVVRECEVLYELGIGAVNLFGYSEEKDELATKSYDSSGLVQRCIREIKKKIPDLCVQTDVALDPYTTHGHDGLVIDGEIVNDETVGVLCKMALSHAEAGADWIAPSDMMDGRVGAIRDALDEQGLHHVGILAYSAKYASCFYGPFRGALKSTPKKGDKKTYQMDPANSREALREVSLDLDEGADVVMVKPALAYLDVIARVRSEFDAPSGGL

SEQ ID NO: 178189 - protein, 334 aa, Unknown
  Bacterial polypetide isolated from the Sargasso Sea
MSNIKVGQFPSTRLRRLRMKDFSRRMISENNLSVNDLIWPIFVCEGNNIADEIKSMPGVFRYSIDNILKELENVMNLKIPAVALFPQIDNSLKDENGSQAVDENNLICRTIKAIKQNFPYLGVICDVALDPYTNHGHDGIIVDNIIHNDATLDILEQQALIQAIAGCDIIAPSDMMDGRVGRIRNALDKNKYENTLILSYAAKYASKFYGPFRDAISSSGNLKGGSKSSYQMDISNSNEALREVAMDINEGADMVMVKPGMPYLDIIQRIKSEFQIPTFAYQVSGEYSMIKGAVNNGWLDSKVIKESLLSFKRAGADGILTYFAREIAKELQND

SEQ ID NO: 178190 - protein, 149 aa, Unknown
  Bacterial polypetide isolated from the Sargasso Sea
VIRKALDKNGFKNVQLLSYAVKYASNFYGPFRDAVGTKNLLKGDKKSYQMDFRNSNEAIREVALDIKEGADMVIVKPGLPYLDIIKKIKNKFKIPVVAYQVSGEYSMITSSVQKKIINKDAILETLLSFKRSGANAIITYFAIQVAKEL

SEQ ID NO: 178191 - protein, 334 aa, Unknown
  Bacterial polypetide isolated from the Sargasso Sea
MSDFNIGQYPTTRLRRLRMKDFSRRMISENNLSVNDLIWPIFVCEGNNIADKVNSMPGVSRYSIDNILKELETVIKLKIPAIALFPQIDSALKDKDGSQAIDENNLICRTIISIKKNFPDLGIICDVALDPFTDHGHDGLIVNDIVDNDATLKVLEKQALVQANAGCDIIAPSDMMDGRVGIIRKALDENNFQNTLILSYAAKYASKFYGPFRDAISSSGNLKSGSKSSYQMNIANSNEALREVALDIKEGADMVMVKPGMPYLDIIQRIKSDFNIPTFAYQVSGEYSMIKGAIDNNWLDSKVIKESLLSFKRAGADGILTYFAKEIAEELSNE

SEQ ID NO: 178192 - protein, 285 aa, Unknown
  Bacterial polypetide isolated from the Sargasso Sea
KKEIISMPDYFQLSINNAEKEVKELWDIGIKAILLFVKIEDNLKDNKGSEAINNNGLMQRAIKSIKNKVPEMLVITDVALDPYSCFGHDGIVENFEVLNDPTLEVLSKMSVSHANSGADFVAPSDMMDGRVLRIRQALEKEGFFNTGIMSYGVKYASSLYGPFRNALDSNPGFGDKKTYQIDYSNSKQALNEVNKDIEEGADIIMVKPGMPYIDILNSLYKKIDVPLAVYQVSGEYSMLKSAASKGFLDYDKVVLEQLFSFKRAGAAMIATYHAKEAVKLLNQIL

SEQ ID NO: 178193 - protein, 332 aa, Unknown
  Bacterial polypetide isolated from the Sargasso Sea
MTINRKFPNTRLRRLRRNSNLIDLVAETNLSSQDLIQPIFIKENFNGIESIESMPGINRFGIDEVLKEIEEVIESGINTIAVFPVVESDKKDSKGSEATKEDNFISSAIKTIKKNFPEIILIADVALDPYTDHGHDGILINDEIDNDATIKVLIEQSLILAEAGADIIAPSDMMDGRIGSIRQSLEDSNFKNTILLSYAAKYNSKFYGPFRDAVNSASNLGKATKSSYQMSIHNKDEAIHEVAIDINEGADIVMVKPAMPYLDIIHLIKEKFKIPTFAYQVSGEYSMLKLAIKEGWLDQKVMLESLVSIKRAGSDAILTYAAKEISKEMQNK

SEQ ID NO: 178194 - protein, 238 aa, Unknown
  Bacterial polypetide isolated from the Sargasso Sea
MRRNRMKAFSRRMISETHLNTNNLIQPLFVTEGKYENTYIESMPGIKRHSIKSVVKEAMEIYKLGIPAIAIFPYIPNNLKDENGTESLNKNNIICKAIKEIKNSCPEIGIICDVALDPYTNHGHDGIIINNEINNDKTIEILCKQAVIQAEAGCDIIAPSDMMDGRVKSIRSALDKKNLINTSILSYSAKYASSFYGPFRDALGTKINSDHVFDKQSYQMDPANSREALREIELDINE

SEQ ID NO: 178195 - protein, 332 aa, Unknown
  Bacterial polypetide isolated from the Sargasso Sea
MSSTRENTLKPLRRLRRLRRTEAMRDLVRETQITLSDLVHPLFIEEHISQAVPISTLPGISRLPESALADEIQRLYALGIRYVMPFGISHTKDAQGSDTWDDNGLLARMIRTIKAAAPEMMVIPDICFCEYTDHGHCGVLHHDEVCNDQTVANLVKQSITAAKAGADMLAPSAMMDGQIKAIRQGLDEAGFEHIAILAHAAKFASSFYGPFRAAVDCELSGNRKGYQLDYANGRQALLEALLDEEEGADILMVKPGTPYLDVLSRLRQETHLPLAAYQVGGEYAGIKFAALAGALDERAVVTETFIGLKRAGADLIVSYYAKQYAEWLAQSR

SEQ ID NO: 178196 - protein, 329 aa, Unknown
  Bacterial polypetide isolated from the Sargasso Sea
MDLVFRPRRLRRNGPIRGLVRETELAPRQLIYPIFVAEGNRVREEIQTMPGQLRLSVDEVVRECEVLYELGIGAVNLFGYSEEKDELATKSYDSTGLVQRSIREIKKKIPDLCIQTDVALDPYTIHGHDGLVIDGEIVNDETVGVLCKMALSHAEAGADWIAPSDMMDGRVGAIRDALDEQGLNHVGILAYSAKYASCFYGPFRGALKSAPKKGDKKTYQMDPTNSREALREVSLDLDEGADVVMVKPALAYLDVIARVRREFDVPVAAYNVSGEYAMVIAAAEKGWVDRDMAMMEMLHSIRRAGADMILTYFAKDAAKRLKSDYGSFS

SEQ ID NO: 178197 - protein, 333 aa, Unknown
  Bacterial polypetide isolated from the Sargasso Sea
MELTYRPRRLRRTPALRAMVREHQLSAADFIYPLFVHEGADVEPIGAMPGASRWSLAALTGEVQRAWNLGVRCIVLFPKVAEGLKTEDGAECFNANGLIPRAIRQIKQEVPGMAIMTDVALDPYSCDGHDGIVSAAGVVLNDETIELLCKQAVVQAEAGADLIGPSDMMDGRVGAIREALDDEGFEHVGIISYTAKYSSAYYGPFREALDSAPRAAGSKPIPTNKDTYQMDPANAREAITEAQLDEQEGADIMMVKPGLAYLDIIHRLRNESELPIAAYNVSGEYSMVKAAAERGWIDERAVVLETLLSFKRAGADLILTYHACDAAEWLRQG

SEQ ID NO: 178198 - protein, 331 aa, Unknown
  Bacterial polypetide isolated from the Sargasso Sea
MKFNRSYPDSRMRRIRKSSGLRDMLAETTLSKSDLIQPIFIKESLKGTEEIKSMPGINRLGLDILDGEIEKIIDLGIKSIAVFPVIDEDKKDEIGSQATEENNFICQAISSIKKNFPDLVVIADVALDPYTDHGHDGLLDASGDVDNDLTLPALRDQALVLAKAGTDIIAPSDMMDGRIKIIRDALEQNDFINTLLLAYSAKFSSKFYGPFKDAVESAKFFGNKTKDTYQMPIQNINEALHEVALDIQEGADIVMVKPGMPYLDVIKAVKDEFKMPTFAYQVSGEYSMIKTSIETGLLSNDVIKESLLSFKRAGADCILTYFASEIARDLS

SEQ ID NO: 178199 - protein, 260 aa, Unknown
  Bacterial polypetide isolated from the Sargasso Sea
CGSFPKINDSLKTEDGAECFNEEGLIPKAIQILKKEIPEMAIMTDVALDPYSCDGHDGLVDETGKILNDETIEILKKQALTQARAGADFIGPSDMMDGRVGAIRAALDSQGFSDVGIISYTAKYSSAYYGPFRTALDSAPRENSKKIIPDNKSTYQMDPANSKEALTESALDQYEGADILMVKPGISYLDIVYRLSTFSNKPIAAYNVSGEYSMVKSAAMKNWINEKDIVLETLLSFKRAGAKLILTYHACDASQWLQDN

SEQ ID NO: 178200 - protein, 331 aa, Unknown
  Bacterial polypetide isolated from the Sargasso Sea
MIITGKYPNLRLRRSRKFSWSRRLVQENNLSVNDLILPIFLTEGKNKKIPIRSMPGVFRYSINNLGFIVDKAIKRKIPMIALFPYTNQKLKDSFGSESLNENNLVCQAIKYVKKKYKNKIGIMCDVALDPYTTHGHDGLLKKNEIVNDETVEILVKQALLQAKMGCDVIAPSDMMDGRIKKIRQKLDKENLQDVQILSYAVKFASNFYGPFRDAVGSKGALKGDKKTYQMDFRNFHESLREVSTDIKEGADMIIVKPGMPYLDIIRSIKDKFKIPVIAYQVSGEYSLIKNGINKNIIDEKSIIESLYSFKRAGANAIITYFADSINLDLLD

SEQ ID NO: 178201 - protein, 329 aa, Unknown
  Bacterial polypetide isolated from the Sargasso Sea
MIITGKYPNLRLRRNRKADWCRRLVQENTLSVNDLILPIFIIDGKNKRESIKTMPGVYRYSIDKIPMILDGAVKNKIPMVALFPFTNSKFKNNSGTEALNENNLVCKAIRLIKKKYENKIGIMCDVALDPYTSHGHDGILKKGKILNDKTVDILVKQSILQAIMGCDVIAPSDMMDGRVGKIRNALDENNLQNVQILSYAAKYASSFYGPFRDAVGSKKNLKGNKKTYQMDFKNSDEAIREISLDIKEGADMVMVKPGMPYLDIIKLIKQNFKIPVIAYQVSGEYSLISNGIKKGMIDEKSIVESLYSFKRAGSNAIVTYFADRIAKIL

SEQ ID NO: 178202 - protein, 330 aa, Unknown
  Bacterial polypetide isolated from the Sargasso Sea
MKILGSYPSVRLRRNRKYNWSRRLVSENNLSVSDLILPIFVTDGKKKIEAIKTMPGVFRYSIDRLSGILNQASKLKIPLVAIFPHTPNSKKDSSGNEALNENNLVCRAIKKIKNNFKDIGVMADVALDPYTDHGHDGILKNKEILNDETIEILTKQALLQARMGCDVIAPSDMMDGRVGVIRKSLDKNNFKNVQILSYAAKYSSNFYGPFRDAIGSKKKLRGNKKSYQMDYKNSNEALREIGLDIKEGADFVMVKPGLPYLDIIKSVKENFKIPVFAYQVSGEYSMIINSIKKGIIHQDSVFESLMCLKRAGASAIVTYFALSIAQKLKN

SEQ ID NO: 178203 - protein, 329 aa, Unknown
  Bacterial polypetide isolated from the Sargasso Sea
MFIDRKFPNTRLRRLRKNSKLIDLVSETNISSNDLIQPIFIKENFKGIEPIESMPGINRFGIESSLKEIEELIQLGINSIAVFPVIESAKKNSEGSEAINKDNFISSAIKTIKKNFPEIILIADVALDPYTDHGHDGILINNEIENDLTLKVLIEQSLVLADAGADIIAPSDMMDGRIGYIRKSLENSEFKDTIILSYAAKYNSKFYGPFRDAVDSASSLGKSDKSSYQMSINNKDEALHEVAMDINEGADIVMVKPAMPYLDIIYLIKKTFKIPTFAYQVSGEYSMLKSAIKEGWLDEMVMLESLVSIKRAGADAILTYAAKEIVREI

SEQ ID NO: 178204 - protein, 331 aa, Unknown
  Bacterial polypetide isolated from the Sargasso Sea
MKYSREFPSTRLRRTRLNQPIRDLVAENKLSSDDLIQPIFVKEGLSGTEPINSLPGISRFGLDSLTKEIKTISSLGINGVAVFPVIDPAKKDENGTDSLNENNIVSQAIRQIKSDSDIAIIADVALDPYTSHGHDGVLNDDGYVDNDKSLPILAEQALVLAKAGADIIAPSDMMDGRVRFIRETLENNSFFNTLILSYAAKYSSKFYGPFRDAVGSSANLGAGSKDTYQMSVANIEEALHEVGLDIQEGADMVMVKPGMPYLDVVKAVKDEFKVPTFVYQVSGEYAMLKAAIRNEWLSEDVMLEALLCFKRAGADCVLTYAAKDIATKINS

SEQ ID NO: 178205 - protein, 320 aa, Unknown
  Bacterial polypetide isolated from the Sargasso Sea
MRRLRMKPFIRNLVSETSISCNDLIWPVFLVEGTNEYQEIKSMPNVYRFSIDRLVQELDALVSLGLQAIAIFPQIEKDLKDENGINSYNPNNLICRAIKTVKASFPQLGIIADIALDPYTIHGHDGLIRGNKVANDESIAVLKKQAIVYAEAGCDILAPSDMMDGRVGALRRELEENNMHDIVIMSYAAKYASSFYGPFRDAIKAQKLSGIKDKKTYQMDSANSDEAMHEIALDINEGTDMVIIKPGMPYLDVIYRCKKEFQIPTFAYQVSGEYSMILSAVSGESKYDIIKESMFSFKRAGADGILSYFTPFFLESLNKR

SEQ ID NO: 178206 - protein, 333 aa, Unknown
  Bacterial polypetide isolated from the Sargasso Sea
MNSIIRPRRLRRTEAIREMVRENHLMPSDFIYPLFIHEKDFKEEISAMPGTFRWDMNGLIKEVTRAWELGIRCIVLFPKINDSLKTEDGAECFNEDGLIPKAIRILKKEIPEMAIMTDVALDPYSCDGHDGLVDETGKILNDETIEILKKQALTQARAGADFIGPSDMMDGRVGAIRTALDSQGFSDVGIISYTAKYSSAYYGPFRTALDSAPRENSKKIIPDNKSTYQMDPANSKEALIESALDQYEGADILMVKPGISYLDIVYRLSTFSNKPIAAYNVSGEYSMVKSAAMKNWINEKDIVLETLLSFKRAGAKLILTYHACDASQWLKDT

SEQ ID NO: 178207 - protein, 167 aa, Unknown
  Bacterial polypetide isolated from the Sargasso Sea
MGCDVISPSDMMDGRIGEIRKNLDKNNFKDVQILSYAVKYASSFYGPFRNAVGSKSLLKGDKKTYQMDYSNNLEAIREVALDIKEGADMVMVKPGMPYLDIIRTIKENFKIPVLAYQVSGEYSLIYNGIKKRIIDKNSIIEILTGFKRAGANAVVTYFANEIAKDLK

SEQ ID NO: 178208 - protein, 296 aa, Unknown
  Bacterial polypetide isolated from the Sargasso Sea
AYIYNSDGKNKKESIKTMPGIFRYSVDKIPLILDKAVKYKIPMVALFPYTRKKFKDKFGSEALNEDNLVCKAIRLIKKKYKDKIGIMCDVALDPYTNHGHDGLVKNKEILNDQTIEILIKQSLLQAEMGCDVIAPSDMMDGRILKIRKSLDKNNFKNIQIISYAAKYASSFYGPFRDAVGSKKSLKGDKKTYQMDFNNSLEAMREIALDIKEGADMVMVKPGMPYLDIIKQVKDNFKIPVIAYQVSGEYSLIVNGINKGLINKNSIIETLTSFKRAGANAIVTYFAETVASKLSSN

SEQ ID NO: 178209 - protein, 333 aa, Unknown
  Bacterial polypetide isolated from the Sargasso Sea
MNSIIRPRRLRRTEAIREMVRENHLAASDFIYPLFIHEKDFKEEISAMPGTYRWDINGLLKEVTRAWELGIRCVVLFPKINDSLKTEDGAECFNEDGLIPKAIRILKKEIPEMAIMTDVALDPYSCDGHDGLVDETGNILNDETIAILKKQALTQARAGADFIGPSDMMDGRVGAIRTALDSEGFSDVGIISYTAKYSSAYYGPFRTALDSAPRENSKKVIPDNKSTYQMDPANSKEALIESALDQYEGADILMVKPGISYLDIVYRLSTFSNKPIAAYNVSGEYSMVKSAAMKNWINEKDIVLETLLSFKRAGAKLILTYHACDASQWLQDT

SEQ ID NO: 178210 - protein, 333 aa, Unknown
  Bacterial polypetide isolated from the Sargasso Sea
MNSIIRPRRLRRTEAIREMVRESHLAASDFIYPLFIHEKDFKEEISAMPGTYRWDINGLINEVTRAWELGIRCVVLFPKINDSLKTEDGTECLNEDGLIPRAIRILKKEIPEMAIMTDVALDPYSCDGHDGLVDETGKILNDETIEILKKQALTQAKAGADFIGPSDMMDGRVGAIRTALDSEGFHDVGIISYTAKYSSAYYGPFRTALDSAPRENSKKIIPDNKSSYQMDPANSKEALIESALDQYEGADILMVKPGISYLDIVYRLSTFSNKPVAAYNVSGEYSMVKSAAMKNWINEKDIVLETLLSFKRAGAKLILTYHACDASQWLQDN

SEQ ID NO: 178211 - protein, 266 aa, Unknown
  Bacterial polypetide isolated from the Sargasso Sea
MGIILDRAIKNEIPMVALFPYTSSKLKDNFGSEALNEDNLVCKAIEYIKKRYKNRIGIMCDVALDPYTKHGHDGILKSNNIINDETIEILIQQSLLQAQMGCDVLAPSDMMDGRIGKIRKALDKENFKNTQILSYAVKYASNFYGPFRDAVGSKVVLKGDKKTYQMDFRNYDEAIREVALDIKEGADMVMVKPGLPYLDIIRSIKDKFKIPVFAYQVSGEYSMLSNAVEKKIINKDAIFENLMSFKRAGANAIVSYYADRLNEILP

SEQ ID NO: 178212 - protein, 334 aa, Unknown
  Bacterial polypetide isolated from the Sargasso Sea
MSNIKLGKFPSTRLRRLRMKDFSRRMISENNLSVNDLIWPIFVCEGNNIADEIKSMPGVLRYSIDNILKELETVINLKIPAVALFPQIENSLKDENGSQAVDENNLICRTIKAIKQNFPDLGVICDVALDPYTNHGHDGIIVDNIIHNDATLDILEKQALVQAIAGCDIIAPSDMMDGRIGRIRNILDQNKYENTLILSYAAKYASKFYGPFRDAISSSGNLKGGSKSSYQMDVANSNEALREVALDIKEGADMVMIKPGMPYLDIIQRVKSEFQVPTFAYQVSGEYSMIKGAVNNGWLESKVIRESLLSFKRAGADGILTYFAREIAEELKNE

SEQ ID NO: 178213 - protein, 161 aa, Unknown
  Bacterial polypetide isolated from the Sargasso Sea
MLLHPSDMMDGRIGKIRSALDKNNLNDVQILSYAVKFSSSFYGPFRDAVGSKKLLKGDKKTYQMDFRNSDESLREVSLDIKEGADMVMVKPGMPYLDIIKKVKDNFKIPVFAYQVSGEYSLIMNGINKKLIDKASIKETLISFKRAGANSIVTYFADQIDL

SEQ ID NO: 178214 - protein, 219 aa, Unknown
  Bacterial polypetide isolated from the Sargasso Sea
IKKEIPELIIMSDVALDPYNINGHDGFVENGKIVNDKTVEALVKQALSQAEAGVDVIGPSDMMDGRIGAIRSALEKNGYSEVSIMSYAAKYSSSFYGPFRDAVGASGALTGDKKTYQMDIANSNEALRLVARDLKEGADMVMIKPGMPYLDICRRVKDTFGAPTFAYQVSGEYSMLSAAFEQGWLDRSKIIIETLMAFKRSGCDGILTYFAPEAAKLLK

SEQ ID NO: 178215 - protein, 330 aa, Unknown
  Bacterial polypetide isolated from the Sargasso Sea
MISRKYPSTRLRRLRQSESIIDLTSECAVTKNDLIQPVFVKEGLSDKEPIESMPGIFRFGEDSVLKEIEEINQLGIRAIAIFPVIDPSKKDSKGTEATKRDNFISRVLGSIKSKFPEMLVIADVALDPYTDHGHDGILENDEILNDQTLEVLAEQSLVLAEAGADIIAPSDMMDGRIGVIRKKLDENNFEDKIILSYAAKYNSKFYGPFRDAVNSKNNLGTSDKSSYQMNPANSLEALNEVAMDIEEGADIVMVKPGMPYLDIISKIKEEFKVPTFAYQVSGEYAMIMESVNKGWLDKGVIIESLTSFKRAGADAVLTYFAKDLIKEFNL

SEQ ID NO: 178216 - protein, 317 aa, Unknown
  Bacterial polypetide isolated from the Sargasso Sea
MRRSRKFSWSRRLVQDNDLSYNDFILPIFLTEGKAKKVPINSMPNVFRYSIDKLKSVVDKALKLGIPMVALFPYTNPKKRDEYGNEALNENNLVCQAIKFIKKNYKNEIGIMCDVALDPYTSHGHDGIIKKNEILNDETLEILIKQSILQAKMGCDVIAPSDMMDGRVLKIRKALDKNNLKDVQILSYAVKYASSFYGPFRNAVGSRSLLKGDKKTYQMDFKNNYESLREVALDIKEGADMIIVKPGMPYLDIIREVKNNFKIPVIAYQVSGEYSLIQNAISKNILDKKSIYESLVSFKRAGASAIITYFADQIKLD

SEQ ID NO: 178217 - protein, 331 aa, Unknown
  Bacterial polypetide isolated from the Sargasso Sea
MQKTLFPRVRPRRLRLNETIRDLVSETNINKSKLIQPLFVSDTLKQKEEIVTMPGQYLYSKDDVLSEIDELADLGINTIALFPNIESDLKDISGSEALKEDNFICSIVRQIKERFPKLVIITDVALDPYTSSGHDGIISDGKIDNDLTLEALSKMSINLASSGADILAPSDMMDGRIGKIRDSLEKNNHKDTILLSYAAKYASNFYGPFRDAVGSKQTEGISKKTYQMDSKNLKEAYKEILLDINEGADIVMVKPAMPYLDVINDLSQKTNVPIFAYQVSGEYSMLKMGIDKKIFDHNVIPETLISLFRAGSSSVITYFARWTAENYDNIS

SEQ ID NO: 178218 - protein, 329 aa, Unknown
  Bacterial polypetide isolated from the Sargasso Sea
MITGKFPALRLRRNRKTDWSRRLIEENNLTPNDFILPIFLIDGKNKKQSIKSMPGVYRYTIDKLNNIVDRAIKKGIPMIALFPYTEKRKKNDLGTEALNENNLVCRALQRIKNKYKNEIGIMCDVALDPYTSHGHDGLLQNKYVLNDETIKILLDQSLLQAQMGCDVLAPSDMMDGRIGEIRNYLDKHNFKMTQILSYAVKYASSFYGPFRDAVGSKNLLKGNKKNYQMDYRNSDEALREVALDIKEGADMVMVKPGLPYLDIIKKVKENFKIPVMAYQVSGEYSLLEHGIKNDLTDRNIILESLISFKRAGANAIVSYYADRLDQIIK

SEQ ID NO: 178219 - protein, 334 aa, Unknown
  Bacterial polypetide isolated from the Sargasso Sea
MSNIKVGQFPSTRLRRLRMKDFSRRMISENNLSANDLIWPIFVCEGNNIADEIKSMPGVFRYSIDNILKELENVMNLKIPAVALFPQIDNSLKDENGSQAVDENNLICRTIKAIKQNFPDLGVICDVALDPYTNHGHDGIIVDNIIHNDATLDILEQQALVQAIAGCDIIAPSDMMDGRVGRIRNALDKNKYENTLILSYAAKYASKFYGPFRDAINSSSNLKGGSKSSYQMDVSNTNEALREVAMDINEGADMVMVKPGMPYLDIIQRIKSEFQIPTFAYQVSGEYSMIKGAVNNGWLDSKVIKESLLSFKRAGADGILTYFAREIAKELQND

SEQ ID NO: 178220 - protein, 330 aa, Unknown
  Bacterial polypetide isolated from the Sargasso Sea
MIDRKFPKSRLRRLRRSSNLINLVSENTLSANDLIQPLFIKEDLDGSEPIDSMPNINRYGLKDILKEIEDVLHNGINTIALFPVINPDKKDENGGEAVNENNLISTAIKNIKKEFPEIILIADVALDPYTSHGHDGVLLDGIVDNDSTLDVLVEQSLVLANAGADIIAPSDMMDGRIKFIREVLENSNLKDTILLSYAAKYNSKFYGPFRDAVDSASNLGESSKSSYQMNPSNINEALQEVAMDINEGADIVMVKPAMPYLDVIHAIKQEFKIPTFAYQVSGEYSMLKLAIEKGWLHEDVMLESLLSIKRSGADAILTYAAKDIAKEISK

SEQ ID NO: 178221 - protein, 283 aa, Unknown
  Bacterial polypetide isolated from the Sargasso Sea
KNKKESIKSMPNVFRYSVDKLNTVVGKAIKKGIPMVALFPYTNPKKKDEKGSEALNPDNLVCRGIKFIKKKFKNKIGIMCDVALDPYTSHGHDGLLNKNNILNDKTVEILTEQAVLQAKIGCDVIAPSDMMDGRIGKIRSALDKNNLNDVQILSYAVKFSSSFYGPFRDAVGSKKLLKGDKKTYQMDFRNSDESLREVSLDIKEGADMVMVKPGMPYLDIIKKVKDNFKIPVFAYQVSGEYSLLMSGINKKLIDKSSIKESLISFKRAGANSIVTYFADQVDL

SEQ ID NO: 178222 - protein, 334 aa, Unknown
  Bacterial polypetide isolated from the Sargasso Sea
MSQFNEYFPASRLRRMRQSDFSRRLMAENRLTVDDLIYPMFIVEGENQRQSIPSMPGIERLSLDLLLEEAKELATLSIPAIAIFPVTAAEKKSLLAEEAYNPDALAQRAVRMLKQHVPELGVITDVALDPFTTHGQDGIIDDDGYVLNDITTDILVKQALSHAEAGADIVAPSDMMDGRIGAIRSALEAEGYVNTKIMAYSAKYASAYYGPFRDAVGSAGNLKGGNKKSYQMDPANSNEALREVALDLEEGADMVMVKPGMPYLDIVRRVKDEFGVPTFAYQVSGEYAMHMAAIQNGWLAEEAIVMESLLAFKRAGADGILTYFAKKAAIWLQR

SEQ ID NO: 178223 - protein, 330 aa, Unknown
  Bacterial polypetide isolated from the Sargasso Sea
MKKRFPNTRLRRLRSSAEIRNLVRENRLSAHDLIQPIFIVEGKNITQKIASMPDICRFSIDKAVSEVKKIKNLGIQAIALFPSISNKLKSSDGGESFNPEGLVQRAIREIKKRVEGVLIISDVALDPYTSHGQDGVISKSGKILNDETVEILVQQALSHAEAGADIIAPSDMMDGRVKKIRETLEKKSLKDTMILAYTAKYSSNFYGPFRDAVGSSKNLGSNNKDTYQMDYANTRDALNEVQLDISEGADIVMVKPAMPYLDIISKINDKFNIPVFAYQVSGEYSMIKSVSSKKWLDEKKVVIESLSCIKRSGASAILTYFAKDAAKWLK

SEQ ID NO: 178224 - protein, 162 aa, Unknown
  Bacterial polypetide isolated from the Sargasso Sea
PSDMMDGRVGIIRTKLNENNFEDKIILSYAAKYNSKFYGPFRDAINSKNNLGTSDKSSYQMNPANSLEALNEVAMDIEEGADIVMVKPGMPYLDIISKIKEEFKVPTFAYQVSGEYAMIMESVNKGWLDKGVIIESLTSFKRAGADAVLTYFAKDLIKDFNL

SEQ ID NO: 178225 - protein, 331 aa, Unknown
  Bacterial polypetide isolated from the Sargasso Sea
MNVSRKFPQSRLRRNRFTSSIRSLVAENSLSVNDLIQPIFVKEDLDGVENIDSLPGISRYGLNALDEEIEKIQNNKIKAVAIFPVINPDKKDETGSDSLNEDNLVCTAIKQIKKNSGLAVIADVALDPYTSHGHDGVLDKNGYVENDKSLSLLIEQALTLAKAGADMVAPSDMMDGRISGIRDSLESNNFSNTIILSYAAKYSSKFYGPFRDAVGSSANLGVGSKDTYQMSVANIDEALHEVKMDIEEGADIVMVKPGMPYLDVIKAVKDAFKVPTFAYQVSGEYAMLKAAIENDWLSDEVILESLLSFKRAGADCVLTYAANEIAIKLNQ

SEQ ID NO: 178226 - protein, 332 aa, Unknown
  Bacterial polypetide isolated from the Sargasso Sea
MSFHPLHRPRRMRRDDFSRRLMRENRLTTDDLIYPVFVVEGTNERQPVPSMPGVERVSVDLLMHVAEQCVELGVPVLSLFPAIEPSVKTPDGREAANPEGLIPRAVRELKKRFPELGVLTDVALDPYTSHGQDGVLDENGYVINDDTIEILIDQARAQAEAGVDIVAPSDMMDGRIGAIREMLESDGHIHTRIMAYSAKFASAFYGPFRDAVGSASNLGKGNKMTYQMDPANSDEALREVRLDIDEGADMVMVKPGMPYLDIVRRVKDEFRFPTYVYQVSGEYAMLKAAAMNGWLDHDKVVLESLLAFKRAGADGVLTYFALDAARLLKAQR

SEQ ID NO: 178227 - protein, 150 aa, Unknown
  Bacterial polypetide isolated from the Sargasso Sea
GFDQVGIISYTAKYSSAYYGPFREALDSAPRVAGSKPIPKNKDTYQMDPANAREAITEAQLDEQEGADIMMVKPGLAYLDIIHRLRQESELPIAAYNVSGEYSMVKAAAERGWIDERAVVLETLLSFKRAGADLILTYHACDAAGWLKGG

SEQ ID NO: 178228 - protein, 260 aa, Unknown
  Bacterial polypetide isolated from the Sargasso Sea
VVLFPKINDSLKTEDGAECFNEDGLIPKAIRILKKEIPEMAIMTDVALDPYSCDGHDGLVDETGKILNDETIEILKKQALTQARAGADFIGPSDMMDGRVGAIRTALDSEGFNDVGIISYTAKYSSAYYGPFRTALDSAPRENSKKIIPDNKSTYQMDPANSKEALIESALDQYEGADILMVKPGISYLDIVYRLSTFSNKPVAAYNVSGEYSMVKSAAMKNWINEKDIVLETLLSFKRAGAKLILTYHACDASQWLQDN

SEQ ID NO: 178229 - protein, 252 aa, Unknown
  Bacterial polypetide isolated from the Sargasso Sea
VAVFPVIDPAKKDEGGTDSLNENNIVSQAIRQIKSNSDIAIIADVALDPYTSHGHDGILDEDGYVDNDKSLPLLTEQAIVLAKAGADMIAPSDMMDGRVRSIRKALEDNAFYNTLILSYAAKYSSKFYGPFRDAVGSSANLGAGSKDTYQMSVSNIEEALHEVGLDIQEGADMVMVKPGMPYLDVVKAVKDEFKVPTFVYQVSGEYAMLKAAIQNEWLSEDVMLEALLCFKRAGADCVLTYAAKEIATKINS

SEQ ID NO: 178230 - protein, 195 aa, Unknown
  Bacterial polypetide isolated from the Sargasso Sea
GLLSDSGYILNDETVKVLCEQALVCAEAGADIIAPSDMMDGRVGEIRNRLDLNHLNLTLIMAYSAKYASKYYGPFRDAVGANNTLKGDKKTYQMDPANSDEALHEIALDLSEGADMVMVKPGLPYLDVIKRVKDKFDVPVFAYQVSGEYSMHKAAIDKGWVDKEVIFESLMCFKRAGATGILTYFAKEFAQLQNN

SEQ ID NO: 178231 - protein, 229 aa, Unknown
  Bacterial polypetide isolated from the Sargasso Sea
NFICQAISSIKKNSPDLVIIADVALDPYTDHGHDGLLDTTGDVDNDLTLPALRDQALVLAKAGTDIIAPSDMMDGRIKIIRDALEQNDFVNTLILAYSAKFSSKFYGPFKDAVESAKFFGNKTKDTYQMPIQNINEALHEVALDIQEGADIVMVKPGMPYLDVIKAVKDEFKMPTFAYQVSGEYSMIKTSIETGLLSNDVIKESLLSFKRAGADCILTYFASEIARDLS

SEQ ID NO: 178232 - protein, 348 aa, Unknown
  Bacterial polypetide isolated from the Sargasso Sea
MRREDGRMVTIDDVNALINWREACHSDHEIAYRPARVLLQDFTGVPAIVDLASMRDAMVDIGDDPERINPLSPVDLVIDHSLMAEYAGTHGAIEKNVRMEFERNQERYEFLKWGQGAFQNMRVVPPGTGICHQVNLEYLAQVVFSEKVDGKEVAYPDTLVGTDSHTTMVNGLSVLGWGVGGIEAEAVMLGQPISMLVPEVIGFKLAGAMTEGTTATDLVLTVVEILRHEGVVGKFVEFYGPGLDNLTLADQATIANMAPEYGATCGFFPITQATLDYMTFTGRDAHQVALVEAYAKVQGMWRGRDTPDPVFSDILELDLGDVAASIAGPKRPQDRISLKDASITFKAQ

SEQ ID NO: 178233 - protein, 345 aa, Unknown
  Bacterial polypetide isolated from the Sargasso Sea
MKPGNKNSYKSLSDLEVKGKNYKYYSLKKAEFNGLEGVSKLPKSLKVLLENLLRYEDDISVNKKQIEAVKNWLDTKKSKTEIAYRPARVLLQDYTGIPAVADLAAMREAVKEKNKDPNTINPLSAVDLVIDHSVQVDQSAKKDSFEKNVDIEFKRNGERYSFLKWGQSAFNNFRIVPPGTGICHQVNLEYLSKVVWSEEYKGEKYLFPDTLVGTDSHTTMVNGLSVLGWGVGGIEAEAGMLGQPISMLIPEVIGFEVTKKMPEGTTATDLVLTVVKMLRDKGVVGKFVEFYGEGLKNLTLADRATIANMAPEYGATCGFFPIDEETLKYLEFSGRDKETVAIVEK

SEQ ID NO: 178234 - protein, 318 aa, Unknown
  Bacterial polypetide isolated from the Sargasso Sea
TAFAKVFKENAKRSKPVETDVNGADFKLKDGDIVIAAITSCTNTSNPSVLIGAGLLAKNAYERGLRVKPWVKTSLAPGSQVVTDYLEKAGLNKYLDELGFNLVGYGCTTCIGNSGPLKKNISDAINDKDLYAVSVLSGNRNFEGRINPDVKANYLASPPLVVAYALAGNMNFDLYKSSLGKDKGGKDVFLKDIWPSNKEIEDIMLKSLNADMFKKRYSNVSEGPKEWREINTVDSDIYNWEQNSTYVKRPPFFDNLPDKPEGFKPINDARILLLLGDTVTTDHISPAGSIKKESPTGDYFMEHQIQQKDFNSYGARRG

SEQ ID NO: 178235 - protein, 294 aa, Unknown
  Bacterial polypetide isolated from the Sargasso Sea
IEETIDPVMFSKAYEYSIQGDDAWKNLETPQGEIYQWEENSTYIKKPPYFESMSMDIPGIKTIQNARALALLGDSVTTDHISPAGNIDPESPAGRYLKDNGVERKDFNSYGSRRGNHEVMMRGTFANIRLRNKLAPGTEGGWTKLSENEEPISIFEAAEEFRSSDTDLIVLAGKEYGTGSSRDWAAKGVSLLGVKAVIAESYERIHRSNLIGMGVLPLEFNNGESAESIGLNGFESFDIESITRDSRVFSVKAKSIDGEVNTFEVKIRIDTPKEWEYFEHGGILHYVIRRLVAK

SEQ ID NO: 178236 - protein, 315 aa, Unknown
  Bacterial polypetide isolated from the Sargasso Sea
NIIGYGCTTCIGNSGPIDEKYVKEINDNDIVASSVLSGNRNFEGRIHPEVKMNFLMSPMLVIAYSLIGNINFDITRESLGKDKNNNDVFLSDIWPSSDDINSVIQKNIDSNMFVNSYKDLFEGDDNWKNISTSQSEFFNWEDSSTYIQPSPFFTTQNDSENKLEEITDAYPLLVLGDSVTTDHISPAGSFKESTPAGTYLVDQGTSVLDFNSYGSRRGNFKIMQRGTFANIRIANKLVPDKTGGYTKHIPTNKIVSVYEASELYKNEDRELIVIAGKNYGCGSSRDWAAKGTKLLGVKAVIAESFERIHRSNLVG

SEQ ID NO: 178237 - protein, 235 aa, Unknown
  Bacterial polypetide isolated from the Sargasso Sea
KQIKDARPLLILGDMVTTDHISPAGSIQKESPTGDYFMKHQILPKDFNSYGSRRGNHEVMMRGTFANIRIKNEIAPGTEGGFTKLFPEEKIMPVYDAVVEYKKRGTDLVVIGGKEYGTGSSRDWAAKGTKLLGIKVIIAESFERIHRSNLVGMGILPLQFVDGMNRINLKLEGSELFSLLNIEKGMEPSEKVELEIKYKSGDIKKIKTLCRIDTKNELEYYKNGGILQYVLRNLI

SEQ ID NO: 178238 - protein, 192 aa, Unknown
  Bacterial polypetide isolated from the Sargasso Sea
QKNFNSYGSRRGNHEIMMRGTFANIRIKNEILPETEGGLTKSFISNQKMSIYDASQEYIKNNIDTVIIAGKEYGTGSSRDWAAKGTKLLGIKAVIAESFERIHRSNLIGMGVLPLEFVDSNKYELQIKGDELITITGISNLAPNKILNCKIVSTKTKSINLKCRIDTEKELDYYRAGGILNFVLNEIISNAA

SEQ ID NO: 178239 - protein, 333 aa, Unknown
  Bacterial polypetide isolated from the Sargasso Sea
MLQKKAIEKGLTTKPWVKTSLAPGSQVVTDYLAKAGLNTYLDQLGFNLVGYGCTTCIGNSGPLPDNISDAIKDENIYAVSVLSGNRNFEGRISPLVKANYLASPPLVVAYAIAGSMNKDLYKDPLGKDKEGNDVFLKDIWPTNQEIEDTLQKSLNAEMFIKRYSNVSEGPEQWQKIKTEESSIYNWEDTSTYVKKPPFFDNLSDEPEGFKEIKDARPLLILGDSVTTDHISPAGSIQKESPTGEYFMKHQILPKDYNSYGSRRGNHEVMMRGTFANIRIRNEMAPGTEGGFTKLYPEQKVMPVYDAVVEYKKRGTDLVVIGGKEYGTGSQETG

SEQ ID NO: 178240 - protein, 319 aa, Unknown
  Bacterial polypetide isolated from the Sargasso Sea
LYVRLKNGLKGISNLPKSLKVLLENLLRYEDDLSVTKNQIEAIQKWLVEKKSNIEIAYRPARVLLQDYTGIPAVADLAAMREAVKEKNKDPNTINPLSSVDLVIDHSVQVDQSAKSDSFEKNVDIEFKRNGERYSFLKWGQQAFNNFRIVPPGTGICHQVNLEYLSKVVWCEKYKEEKYLFPDTLVGTDSHTTMVNGLSVLGWGVGGIEAEAGMLGQPISMLIPEVIGFELKNKMPEGTTATDLVLTVVKILRDKGVVGKFVEFYGDGLKNLTLADRATIANMAPEYGATCGFFPIDDETIKYLRFSGRDEHTVVTVEK

SEQ ID NO: 178241 - protein, 264 aa, Unknown
  Bacterial polypetide isolated from the Sargasso Sea
SFLKWGQQAFNNFRIVPPGTGICHQVNLEYLSKVVWNEKFEDKEYLFPDTLVGTDSHTTMVNGLSVLGWGVGGIEAEAGMLGQPISMLIPEVVGFEMKNKLPEGTTATDLVLTVVKMLRDKGVVGKFVEFYGEGLKNLTLADRATIANMAPEYGATCGFFPIDDETLKYLEFSGRSNENIQIVEKYAKEQNLWASDDLVFTDTLSLDMSTVVPTISGPKRPQDKVLLTEASKNFIKVFEDVCKKKKPTIAKVKDTDFEIKDGDI

SEQ ID NO: 178242 - protein, 306 aa, Unknown
  Bacterial polypetide isolated from the Sargasso Sea
KQMSLGLSTKSWVKTSLAPGSRVVTDYLEKAGLDKHLDKLGFQTVGYGCTTCIGNSGPLNQDISEAVIEGNIIGCSVLSGNRNFEGRIHPLVQMNFLASPPLVVAYSLVGTMNINLSNDPIGKDKNDNDVYLKDIWPSQSEVSAALSSSINSEMFASSYKSVFDGDDNWNSLDIATGEKFAWDNNSTYIKHPPYFENMKQEPAGVMDIKNARLLALLGDSVTTDHISPAGAIAKGSPAAKYLIDQGVDENNFNSYGSRRGNHEVMMRGTFANIRLRNKMAPGTEGGWTTHHPSNEIMTIYDAAQKY

SEQ ID NO: 178243 - protein, 334 aa, Unknown
  Bacterial polypetide isolated from the Sargasso Sea
SLDINGKKYKYYSLLEAEKNGLKDISKLPKSLKVLLENLLRYEDDLTVTKDQIDSIKNWLKEKKSKTEIAYRPARILLQDYTGIPAVADLAAMREAVKEKNKDPNTINPLSKVDLVIDHSVQVDKSAKSDAFEKNVDIEFERNGERYSFLKWGQQAFDNFRIVPPGTGICHQVNLEYLSKVVWTEKFEKDYYIFPDTLVGTDSHTTMVNGLSVLGWGVGGIEAEAGMLGQPISMLIPEVVGFEMKNKLPEGTTATDLVLTVVKMLRDKGVVGKFVEFYGEGLKNLTLADRATIANMAPEYGATCGFFPVDDETLKYLNFSGREKHTVDIVESYA

SEQ ID NO: 178244 - protein, 309 aa, Unknown
  Bacterial polypetide isolated from the Sargasso Sea
NLPLPDRATIANMAPEYGATMGFFPVDQEALNYFKLTGRTSEEIELAKEYYINQNSFRDSTSKDPNYYKSLYLNLETVQPALAGPKRPQDRILLADMKESLHAELKSRKIKNDEEFEVENTNESLKNGSVVLAAITSCTNTSNPYVMVTAGLVAKKAHDLGLKVPSFVKTSLAPGSKVVVDYLENAGLLESLSDIGFKTVGFGCTTCIGNSGPLPDEVANLVTDKELHVAAVSSGNRNFEGRVHPLIRLSYLGSPPLVVAYALAGTVDIDFYREEIGKSKDGKDIFLKDIWPTNQEIKDTVNKSILPDT

SEQ ID NO: 178245 - protein, 307 aa, Unknown
  Bacterial polypetide isolated from the Sargasso Sea
CGFFPIDEETLKYLRFSGRDEHTVNTVEKYAKEQGLWASDNIEFTDTVSLDMSSVVPTISGPKRPQDKVLLNEASSRFKKVFKNTTSRKTNLISKVKGADFEIKDGSILIAAITSCTNTSNPNVLIAAGLLAKKAVELGLMTQPWVKTSLAPGSQVVTDYLKKSGLNKYLDELGFNLVGYGCTTCIGNSGPLPENIVEAIEKNDLYAVSVLSGNRNFEGRISPHIKANYLASPPLVVAYALAGHMEVDLYRDPLGKDKNGNNIFLKDIWPSNNQIEETLRDALNAEMFVKRYANVSEGPIQWQKIKT

SEQ ID NO: 178246 - protein, 339 aa, Unknown
  Bacterial polypetide isolated from the Sargasso Sea
VVAYSLVANMHHDLYKSPLGKDKNGKDVFLKDIWPTNKEIEELILNSISADMFVSRYSNVSEGSKEWSSIKTDQSSIYNWKENSTYVKKPPFFDNLPDEPEGFKKIKDARPLLILGDTVTTDHISPAGFIKKDSPTGDYFMEKQVQQKDFNSYGARRGNHEVMLRGTFGNIRIRNEMAPGTEGGLTILQPDGKQMSVYDAAMEYKQRGNDLIVIAGKEYGTGSSRDWAAKGTKLLGIKSVIAESFERIHRSNLVGMGILPLQFKEGFDRKKLNIKGTELFTIINIEKGLNPRAEVSCEIKYVDGSSKTIQLLSRIDTENEIEYYKNGGILQFVLRNMLN

SEQ ID NO: 178247 - protein, 272 aa, Unknown
  Bacterial polypetide isolated from the Sargasso Sea
WNSIKTVSQDTFKWRETSTYIKHPPFFTNNSNNTKEDINDARILALLGDTVTTDHISPAGAIKEKSPAGEYLSMRQISKENFNSYGSRRGNHEIMMRGTFANIRIRNEINKNIEGGITYCYINNKNMPIYDAAMEYAKHSIPLVVLAGKEYGTGSSRDWAAKGTKLLGIRAIIAESFERIHRSNLIGMGVIPFEFTEGQNRINLSIKGDEKISILGINQIAPNKIIECTISRKDFLKKIKLRCRIDTIKELEYFKAGGILQFVLNSIIARAS

SEQ ID NO: 178248 - protein, 207 aa, Unknown
  Bacterial polypetide isolated from the Sargasso Sea
RKSNWVNILLEHQILPKDYNSYGSRRGNHEVMMRGTFANIRIKNEIAPGTEGGFTKLFPEGKVMTVYDAVVEYKKRGTDLVVIGGKEYGTGSSRDWAAKGTKLLGIKTVIAESFERIHRSNLIGMGILPLQFIDGMNRSNLKLKGSELISVLNLEKGLSPSDKVEMEIKYISGDIKKIKTLCRIDTKNELEYYKNGGILQYVLRNMI

SEQ ID NO: 178249 - protein, 307 aa, Unknown
  Bacterial polypetide isolated from the Sargasso Sea
RVLLQDYTGIPAVADLAAMREAVKEKNKDPNTINPLSAVDLVIDHSVQVDQSAKPDSFEKNVDIEFKRNGERYSFLKWGQQAFNNFRIVPPGTGICHQVNLEYLSKVVWSEKYKEDEYLFPDTLVGTDSHTTMVNGLSVLGWGVGGIEAEAGMLGQPISMLIPEVIGFEVKNKMPEGTTATDLVLTVVKILRDKGVVGKFVEFYGDGLKNLTLADRATIANMAPEYGATCGFFPIDDETLKYLRFSGRNEHIVSIVEKYAKEQGLWVSENIEFTDKVSLDMSSIVPTISGPKRPQDKVLLNEASSEF

SEQ ID NO: 178250 - protein, 341 aa, Unknown
  Bacterial polypetide isolated from the Sargasso Sea
KFVEFYGDGLKNLTLADRATIANMAPEYGATCGFFPIDDETLKYLKFSGRDKQTVTIVEKYAKEQGLWASENVQFTDKVSLDMSLLVPTISGPKRPQDKVLLNEASFGFKKVFENTTERKEKSISKVSGTDFEVKDGSILIAAITSCTNTSNPNVLIGAGLLAKKAVEFGLKTKPWVKTSLAPGSQVVTDYLEKAGLNKYLDELGFNLVGYGCTTCIGNSGPLPDNIVEAIEKENIYSVSVLSGNRNFEGRISPHIKANYLASPPLVVAYALAGHMEVDLYKDSLGKDKNGKDIFLKDIWPSNKEIDETLKEALNAEMFVERYSNVSEGPVQWQKIKTEKS

SEQ ID NO: 178251 - protein, 233 aa, Unknown
  Bacterial polypetide isolated from the Sargasso Sea
IKNARPLLILGDMVTTDHISPAGSIQKESPTGEYFMQHQILPKDYNSYGSRRGNHEVMMRGTFANIRIRNEIAPGTEGGFTKLFPEEKIMPIYDAVVEYKKRGTDLIVIGGKEYGTGSSRDWAAKGTKLLGIKVVIAESFERIHRSNLIGMGILPLQFVENVDRKKLNLVGSELITVLNIEKGVNPSDKVKVEIKYLSGDIRIINTICRIDTKNELEYYRNGGILQYVLRNMI

SEQ ID NO: 178252 - protein, 285 aa, Unknown
  Bacterial polypetide isolated from the Sargasso Sea
NGETYAYPDTLVGTDSHTTMINGLGVLGWGVGGIEAEAAMLGQPVSMLIPEVIGFRLTGKLNEGVTATDLVLTVTQMLRKHGVVGKFVEFFGPGLDHLPLADRATIGNMAPEYGATCGFFPVDQVTIDYLRLTGRNEERIALVEAYSKAQGMWRDTNSPDPEFTATLELDLSQVRPSVAGPKRPQDRVTLGDIGANFDLLLETSGRKQQTDTEFAVAGEQFQLKHGAVVIAAITSCTNTSNPNVLMAAGLVAKKAIERGLQRQPWVKTSLAPGSKVEPTTSSAPA

SEQ ID NO: 178253 - protein, 306 aa, Unknown
  Bacterial polypetide isolated from the Sargasso Sea
KANYLASPPLVVAYAIAGHMEVDLYKDPLGKDKEGNNVFLKDIWPSNKEIEDTLKESINAEMFIQRYSNVSEGPTQWQKIKTDKSSIYNWDEGSTYVKKPPFFDSLPDKPEGFKEIKDARPLLILGDMVTTDHISPAGSIQKDSPTGEYFMKHQILPKDYNSYGSRRGNHEVMMRGTFANIRIRNEMAPGTEGGFTKLYPEEKVLPIYDAVVEYKRRGTDLVVIGGKEYGTGSSRDWAAKGTKLLGIKTVIAESFERIHRSNLIGMGILPLQFINNVNRKNLKLIGSELISILNIEKGCESLRRKV

SEQ ID NO: 178254 - protein, 284 aa, Unknown
  Bacterial polypetide isolated from the Sargasso Sea
VSEKLGDVSRLPYSLKVLLENLLRYEDGRTVSTEDVQALADWLKEQRSPREIAYRPARVLMQDFTGVPAVVDLAAMRDAVDNLDADPRLINPLSPVDLVIDHSVMVDHAGDDGAFAKNVELEFERNGERYEFLRWGSTAFNNFRVVPPGTGICHQVNLEYLSETVWSAEEDGKTIAYPDTLVGTDSHTTMVNGLGVLGWGVGGIEAEAAMLGQPISMVVPEVVGFRLDGELKEGMTATDLVLTVTEMLRAKGVVGKFVEFYGDGLDHLTLADRATISNMAPEYG

SEQ ID NO: 178255 - protein, 250 aa, Unknown
  Bacterial polypetide isolated from the Sargasso Sea
YLKTSGRDDATIAIVENYAKEQGLWASNNIEFSDTISLDMSTVLPTISGPKRPQDKVLLNEASSEFKKVFKIATGKNKKSISKINGTEFEIQDGSILIAAITSCTNTSNPNVLIGAGLLAKKAIELGLKTKPWVKTSLAPGSQVVTDYLEKAGLNKYLDKLGFNLVGYGCTTCIGNSGPLPENIVEAIQKENIYAVSVLSGNRNFEGRISPYIKANYLASPPLVVAYALVGHMEFNFYSQPLGKDKNGKE

SEQ ID NO: 178256 - protein, 277 aa, Unknown
  Bacterial polypetide isolated from the Sargasso Sea
NEKYLFPDSVVGTDSHTTMVNSLSVLGWGVGGIEAEAAMLGQAISMNIPEVIGFELKGSLKEGITATDLVLSITKILRDKGVVGKFVEFFGKGLKNLSLADRATISNMAPEYGATCGFFPTDEETINYLKLTGKDIEHLIIVEKYSKRQTLWADENYNPEYSDKILLDLDTVEPTLAGPKRPQDKILLKEVPTEFSKIDKNQSINKNKLNTGDIVIAAITSCTNTSNPNVMVAAGLVAKKAIDFGLEVKPWVKTSLAPGSKVVSDYLDKAGLTEYLD

SEQ ID NO: 178257 - protein, 303 aa, Unknown
  Bacterial polypetide isolated from the Sargasso Sea
KNKDPQIINPLSSVDLVIDHSVQVDKFSTPDSLKKNVEIEFQRNAERYSFLKWGQQAFDNFRIVPPGTGICHQVNLEYLSKVVWKEKFEDKDYIFPDTLVGTDSHTTMVNGLSVLGWGVGGIEAEAGMLGQPISMLIPEVIGFEITNKLPEGTTATDLVLTVVKMLRDKGVVGKFVEFYGEGLKNLTLADRATIANMAPEYGATCGFFPIDDETLKYLEFSGRDKNQVEIVKRYAQEQGLWVSDNIVFTDTLKLDMSTVVPTISGPKRPQDKVLLTEASKNFDLNFKNITKREAFSTSKVEGT

SEQ ID NO: 178258 - protein, 277 aa, Unknown
  Bacterial polypetide isolated from the Sargasso Sea
SLAPGSKVVTDYLEKAGLQKDLNYFGFNLVGYGCTTCIGNSGSLSEDITKNIQDDNLMVSSVLSGNRNFEGRISPLVSANYLASPPLVVAYAIAGTVLINLKTEPLGFDKDEKPIFLKDIWPSNKEISKIMKKVIKPEMYINQYSSVFTGGEDWSKILSEGELTYNWNEDSTYVQNPPYFENMKLKPDKIGDILNAKALAILGDSITTDHISPAGTILKDAPAGEYLLERQVRPNEFNSYGSRRGNHKVMMRGTFANIRLANLMVPGHSGGFTKHFP

SEQ ID NO: 178259 - protein, 271 aa, Unknown
  Bacterial polypetide isolated from the Sargasso Sea
LLENLLRYEDDLSVTKFQIEAIKNWLKTKKSKTEIAYRPARVLLQDYTGIPAVADLAAMREAVKEKNKDPNTINPLSAVDLVIDHSVQVDQSAKADSFEKNVDIEFERNGERYSFLKWGQQAFDNFRIVPPGTGICHQVNLEYLSKVIWSEEFKGEKYLFPDTLVGTDSHTTMVNGLSVLGWGVGGIEAEAGMLGQPISMLIPEVIGFEMKNKLPEGTTATDLVLTVVKMLRDKGVVGKFVEFYGEGLKNLTLADRATIANMAPEYGATCG

SEQ ID NO: 178260 - protein, 245 aa, Unknown
  Bacterial polypetide isolated from the Sargasso Sea
TEIAFRPARVLLQDYTGIPAVADLAAMREAVKKKNKNPNTINPLSTVDLVIDHSVQVDQYANSNSFEKNVDIEFERNGERYSFLKWGQQAFNNFRIVPPGTGICHQVNLEYLSKVVWSEKFKEETYLFPDTLVGTDSHTTMVNGLSVLGWGVGGIEAEAAMLGQPISMLIPEVIGFEIFNKMPEGTTATDLVLTIVKMLRDKGVVGKFVEFYGSGVKNLTLADRATIANMAPEYGATCGFFPIDE

SEQ ID NO: 178261 - protein, 254 aa, Unknown
  Bacterial polypetide isolated from the Sargasso Sea
PGTGICHQVNLEYLSKVVWSEEFKGDNYLFPDTLVGTDSHTTMVNGLSVLGWGVGGIEAEAGMLGQPISMLIPEVIGFEMKNKMPEGTTATDLVLTVVKMLRDKGVVGKFVEFYGEGLKNLTLADRATIANMAPEYGATCGFFPIDEETLKYLKFSGRDQHTVNIVENYAKEQGLWASSDLEFTDIISLDMSTVVPTISGPKRPQDKVPLTDAPYSFKKVLQEATSKNEKSVSKVANTDYDIKDGSILIAAITS

SEQ ID NO: 178262 - protein, 287 aa, Unknown
  Bacterial polypetide isolated from the Sargasso Sea
KNNQGKDVYLKDIWPSNKEIEETLKNSLNADMFVTRYSNVSEGPEQWQKIKTEKSSIYNWEETSTYVKKPPFFENLPDVPDDIQDIKDARPLLILGDMVTTDHISPAGSIQKESPTGEYFMRHQVLTKDYNSYGARRGNHEVMMRGTFANIRIRNEIAPETEGGFTKLYPEEKVMPVYDAVVEYKKRGINLVVIGGKEYGTGSSRDWAAKGTKLLGIKAVLAESFERIHRSNLIGMGVLPLQFIEGMNRKNLDLKGPELISIVDIENGLSPGDHVKVEIKYKSGESK

SEQ ID NO: 178263 - protein, 280 aa, Unknown
  Bacterial polypetide isolated from the Sargasso Sea
LNAEMFVQRYSNVSEGPTQWKKIKTEKSSIYNWDQGSTYVKKPPFFDNLSDEPEGFKEIKNARPLLILGDMITTDHISPAGSIQKESPTGEYFMKHQVLPKDFNSYGSRRGNHEVMMRGTFANIRIRNEMAAETEGGFTKIYPEGKVMTVYDAVVEYKKRGTDLVVIGGKEYGTGSSRDWAAKGTKLLGIKAVIAESFERIHRSNLIGMGILPLQFKDGTNRKNLNLIGSELISILNLEKGINPSDKIVLEIKYASGDIKKIETLCRIDTTNELEYYKNG

SEQ ID NO: 178264 - protein, 291 aa, Unknown
  Bacterial polypetide isolated from the Sargasso Sea
GRTDYEIEDGSILIAAITLCTNTSNPNVLIGAGLLAKKAVELGLKTKPWVKTSLAPGSQVVTDYLEKSGLNKYLDELGFNLVGYGCTTCIGNSGPLPEKIVEAIEKEDLYAVSVLSGNRNFEGRISPHIKANYLASPPLVVAYALAGHMEVDLYKDPLGKDKNGKDIFLKDIWPSNQQIEETLREALNPEMFVKRYSNVSEGPSQWQKIKTEKSSIYNWDQGSTYVKKPPFFENLSDEPEGFKQIKDARPLLILGDMVTTDHISPAGSIQRESPTGEYFMEHQILPKDYNS

SEQ ID NO: 178265 - protein, 229 aa, Unknown
  Bacterial polypetide isolated from the Sargasso Sea
GDSITTDHISPAGAIQSDSPAGIYLKDKGVDPTAFNSYGSRRGNHEVMMRGTFANIRLRNEMVPKREGGFTRCWPLGDETTIFDAAMAYQQEGVASVIIAGKEYGTGSSRDWAAKGPYLLGVTCVIAESYERIHRSNLIGMGILPLQFEGGESRKTLGLIGDERVNVDLDGNIHAGCQIKVTFVRPNDEEFQVACLCRLDTPQELKYFHDGGVLRHVLRKMLSGGESSQ

SEQ ID NO: 178266 - protein, 239 aa, Unknown
  Bacterial polypetide isolated from the Sargasso Sea
MKNMNSFNSEHLIKINNQNFRYFDLNVVAKQFDIDLYKVPISIKVILENLIRNEDGENISKSMISNVFSSLKDRNKKNEKTEIAFFPTRVLMQDFTGVPAVADLAAMRNALKSKGIEPKKINPLSRVDLVIDHSVMVDNYKNNNSLNENVKKEFERNKERYEFLKWGQSSFDNFYLVPPGAGICHQVNLENIAKTVWLKEIENKKYLFPDSVVGTDSHTTMVNSLSVLGWGVGGIEAEA

SEQ ID NO: 178267 - protein, 234 aa, Unknown
  Bacterial polypetide isolated from the Sargasso Sea
TATDLVLIIVEMLRKKGVVGKFVEFYGEGLKNLTLADRATIANMAPEYGATCGFFPIDDETLKYLKLSGRDQETIALVDKYSKEQGLWASNEVVFTDTLSLDVGNVVTSISGPKRPQDKVLLTEASTAFAKVYKENAKRDKAIEAKVEGTEFNIKDGDIVIAAITSCTNTSNPSVMIGAGLLAKKAHEKGLKVKPWVKTSLAPGSQVVTDYLEKAGLNKYLDELGFNLVGYGCT

SEQ ID NO: 178268 - protein, 311 aa, Unknown
  Bacterial polypetide isolated from the Sargasso Sea
GNSGPLPDAITDAIRKAKLTVTSVLSGNRNFEGRIHPDVAANYLASPPLVVAYALAGNMNVDITKEPLGKASDGSPVYLKDIWPTEDEIQQYIAENVTGDLFKEKYADVFKGSGEWNELQVSKTSVYDWPESTYIKHPPFFEVMGKEPEALTAIENARCLVKVGDSITTDHISPAGAIAEDSPAGEYLQAQGVEPKDFNSYGSRRGNHEVMMRGTFANVRLQNQLAPGTRGSATTHFPSGDSMSIFHAAMRYKDDGVPAIVIGGKEYGTGSSRDWAAKGPSLMGVKAVLAESYERIHRSNLIGMGILPLQI

SEQ ID NO: 178269 - protein, 287 aa, Unknown
  Bacterial polypetide isolated from the Sargasso Sea
VTKYLEESGLLPELEQMGFNIVGYGCTTCIGNSGPLNPEVSRAVQELNLTASSVLSGNRNFEGRIHPLVKHNFLASPPLVVAYAIAGSTLLDLTKEPLGRIDGKDIFLKDIWPSQNEIEEIIENTIDPVMFSKAYKDSIQGDDAWKNLETPQGEIYQWQESSTYIKKPPYFESMTMDLPGIQTIKDARVLALLGDSVTTDHISPAGNIDPESPAGIYLKDKGVERKDFNSYGSRRGNHEVMMRGTFANIRLRNKLAPGTEGGWTSLAQNEKPVSIFEAAEEFRSKNT

SEQ ID NO: 178270 - protein, 250 aa, Unknown
  Bacterial polypetide isolated from the Sargasso Sea
KHPPFFEDQNSVELKDIKDARILALLGDSVTTDHISPAGNIKEDSPAGVYLSKRQVNYKNFNSYGSRRGNHEIMMRGTFANIRIKNEILPGTEGGLTKSFISNKSMSIYDASQEYINNKIDTVVIAGKEYGTGSSRDWAAKGTKLLGIKAVIAESFERIHRSNLIGMGVLPLEFMDGLNRQKLEIKGDEKVSIFGIKNLEPNIVLKCQISSNNIDSINLRCRIDTKKELDYYKAGGILNFVLNEIISKAA

SEQ ID NO: 178271 - protein, 296 aa, Unknown
  Bacterial polypetide isolated from the Sargasso Sea
DHFGQPQALKSNAQLEYSRNAERYAFLRWGQTAFSNFRVVPPATGIVHQVNIEYLASVIFSREVDGVELAYPDTVVGTDSHTTMVNGLGVLGWGVGGIEAEAAMLGQPVTMLIPDVVGFELTGTLTEGATATDLVLTVVEILRQKGVVGKFVEFFGDGLNHLSLADKATIANMAPEYGATCGFFPVDNEALEYLKLTGRSDDEIALVEAYSRRQGLFRTADTPVAQYNDTVSLNLADVVASIAGPKRPQDRIALTDAKHTIIAALSDAREGSPAQGQSLELEGGHHTLPDLAVVIA

SEQ ID NO: 178272 - protein, 263 aa, Unknown
  Bacterial polypetide isolated from the Sargasso Sea
PNKINPLSTVDLVIDHSVMVDNYAKKDSFSKNVQREFDRNGERYSFLKWGQSAFNNFRVVPPGTGICHQVNLEYLSKVVWSSEADGQLFAYPDTLVGTDSHTTMVNGLSVLGWGVGGIEAEAAMLGQPISMLIPEVIGFEINGKLTEGTTASDLVLTIVQMLRKKGVVGKFVEFFGDGLKNLSLADRATIANMAPEYGATCGFFPIDDETIKYLKFSGRDQNTISLVEKYSKEQGLWSNQNDQIEFTDTISLDLNSVVPSISG

SEQ ID NO: 178273 - protein, 287 aa, Unknown
  Bacterial polypetide isolated from the Sargasso Sea
EETLKYLKFSGRNQHTVNIVENYAKEQGLWASSDLEFTDTISLDMSTVVPTISGPKRPQDKVLLTDVPNSFKKVLQEATSKNEKSVSKVASTDYDIKDGSILIAAITSCTNTSNPNVLIGAGLLAKKAIEKGLQVKPWVKTSLAPGSQVVTDYLKKAGLNSYLDQLGFNLVGYGCTTCIGNSGPLAENIVDAIQKENIYAVSVLSGNRNFEGRISPHIKANYLASPPLVVAYAIAGHMEVDLYKDPLGKDKEGNKVFLKDIWPSNKEIEETLKDSLNAEMFIKRYSN

SEQ ID NO: 178274 - protein, 289 aa, Unknown
  Bacterial polypetide isolated from the Sargasso Sea
KGVVGKFVEFYGEGLKNLTLADRATIANMAPEYGATCGFFPVDDETLKYLKLSGRDQETIALVEKYSKEQGLWASNDVVFTDTLSLDVSSVVTSISGPKRPQDKVLLTEASTSFAKVYKENTKRDKVIETKVKGSDFNIKDGDIVIAAITSCTNTSNPSVMIGAGLLAKKAHEKGLKVKPWVKTSLAPGSQVVTDYLKKAGLNKYLDELGFNLVGYGCTTCIGNSGPLNQNISEAINKNDLYAVSVLSGNRNFEGRINPDVKANYLASPPLVVAYALAGNMNFDMYKSA

SEQ ID NO: 178275 - protein, 279 aa, Unknown
  Bacterial polypetide isolated from the Sargasso Sea
GIEAEAGMLGQPISMLIPEVVGFELKNKLPEGTTATDLVLTVVKILRDKGVVGKFVEFYGSGLNNLSLADRATIANMAPEYGATCGFFPIDDETLKYLKFSGRDNQTINIVEKYAKEQGLWASENIEFTDTVKLDMSTVVPTISGPKRPQDKVPLTEAKTSFEKNFKEITKRQKEKISEVSGAEFKLKDGSIVIAAITSCTNTSNPNVLIGAGLVAKKAIEKGLKTKPWVKTSLAPGSQVVTDYLNKSGLNKYLDELGFNLVGYGCTTCIGNSGPLPEN

SEQ ID NO: 178276 - protein, 279 aa, Unknown
  Bacterial polypetide isolated from the Sargasso Sea
DNFAYPDTLVGTVFHTTMVNGLSVLGWGVGGIEAEAAMLGQPISMIIPDVVGFKIQNKLPEGTTATDLVLTIVQILRQEGVVGKFVEFYGDGLKNLSLADRATIANMAPEYGATCGFFPIDEETLKYLKFSGRDQHTILLVEKYSKEQGLWADENISFTKSLELDLSTVVPSISGPKRPQDKVLLSESSKSFMSSFKENMNRENIKEEKVSNENFKLKDGNIVIAAITSCTNTSNPSVLIGAGLLAKKAVEKGLKVKPWVKTSLAPGSQVVTDYLEKAG

SEQ ID NO: 178277 - protein, 278 aa, Unknown
  Bacterial polypetide isolated from the Sargasso Sea
QWEDAIGPEMFVNRYSDVLREPRWDSIPSEPSELYPWDQESTYVRLPSFFQGISPEPTPIDPIIDARVLVKVGDSVTTDHISPAGAFPSSGPAGQYLVSKGVEPRDFNSFGSRRGNHEVMVRGTFANIRMRNQVAPGTEGGYSTHFPTNEVTSIHEASERYQGEETPLIVLAGSQYGSGSSRDWAAKGTMLLGVKAVIAKSYERIHRSNLVGMGVLPLTFLEGQDSETLGIDGSEYFSIPTSGELEPLSKLLVTAKRPNGEQITFHTTVRLETPVEVQ

SEQ ID NO: 178278 - protein, 308 aa, Unknown
  Bacterial polypetide isolated from the Sargasso Sea
RDFEGRINPDVKANYLASPPLVVAYALAGNMHHDLYKTPLGKDKEGKEVFLKDIWPTNKEIEELILKSINADMFVKRYSNVSQGPKEWSSIKTDASSIYNWQESSTYVKRPPFFDNLPDKPEGFKKIKDARPLLILGDTVTTDHISPAGSIKKDSPTGDYFMKHQVQQKDFNSYGARRGNHEVMLRGTFGNIRIKNEMVPGTEGGFTVLQPDGKQMSVYDAAMEYKKRENDLVVIAGKEYGTGSSRDWAAKGTKLLGIKAVIAESFERIHRSNLVGMGILPLQFKEGFDRGKLNIKGTELFTIINMKT

SEQ ID NO: 178279 - protein, 291 aa, Unknown
  Bacterial polypetide isolated from the Sargasso Sea
IADRATIANMCPEYGATIGFFPVDKRSLEYLRQTNRDEKVISYVTEYMKSVGMLRDFSDPAQDPVFSSVYELDLSSVVPSLSGPKRPHDRVAAADVKEDFVACLTNPVGFKGYGLPGDKLATCVPFLYEGTEYLVRHGSVLIAAITSCTNTSNPSVMLGAGLMAKKAVQAGLTVAPYIKTSLSPGSGVVTSYLHQSGVIPFLETLGFGVVGYGCMTCIGNSGPLPEPVVEAVEKGELVCCGVLSGNRNFEGRIHPVTQANYLASPLFVIAYAIAGRVDIDFQSEPLAVLTT

SEQ ID NO: 178280 - protein, 313 aa, Unknown
  Bacterial polypetide isolated from the Sargasso Sea
AKDFDKAFKENTKRKVPLEAKVNNKEFKIKDGDIVIGAITSCTNTSNPSVMIGAGLVAKKAVEKGLKVKPWVKTSLAPGSQVVTDYLEKAGLNKYLDQLGFNLVGYGCTTCIGNSGPLDKEISETIHKENLYAVSVLSGNRNFEGRINPDVKANYLASPPLVVAYALAGNMHHDLYKNSLGKDQNGKDVFLKDIWPSNKEIEELMLKSINADMFVKRYSNVSEGPKEWSSIKTDQSSIYNWEESSTYVKRPPFFDNLPDKPEGFKKINDARPLLILGDTVTTDHISPAGSIKKDSPTGDYFMKHQVQQKDFNS

SEQ ID NO: 178281 - protein, 262 aa, Unknown
  Bacterial polypetide isolated from the Sargasso Sea
AGLTKYLDELGFNLVGYGCTTCIGNSGPLNENISKAINNSDLYAVSVLSGNRNFEGRISPDVKANYLASPPLVVAYALAGSMDIDLYKDSLGKDKNNQDVYLKDIWPSNKEIEDLILKSINAEMFKKRYENVSSGPKEWQKINIPASEIYSWDDNSTYVKKPPFFENLTEKPEGFKSIKDARPLLMLADTVTTDHISPAGSIQKDGPTGEYFMKRQIMPKDFNSYGTRRGNHEVMMRGTFANIRIRNEIAPGTEGGLTKLYP

SEQ ID NO: 178282 - protein, 260 aa, Unknown
  Bacterial polypetide isolated from the Sargasso Sea
FKEITKRHVENTSKVSGADFKLKDGSIVIAAITSCTNTSNPNVLIGAGLLAKRAIEKGLKTKPWVKTSLAPGSQVVTDYLNKSGLNKYLDELGFNLVGYGCTTCIGNSGPLPENISNSIKENDIYAVSVLSGNRNFEGRISPLVKANYLASPPLVVAYSLAGFMQVDLYKDPLGKDKSGKDVYLKDIWPSNKEIEDILLKSLNPEMFRERYSNVSKGPDQWQKIKTKKSSIYDWDNNSTYVKKPPFFENLSPSPEGFKPI

SEQ ID NO: 178283 - protein, 306 aa, Unknown
  Bacterial polypetide isolated from the Sargasso Sea
IFNLRKAEKNGLEGIAKLPKSLKVLLENLLRYEDNLTVDKKQILAIKDWLKNRKSNTEIAYRPARTLLQDYTGIPAIADLAAMRDAVKDKNKNPDKINPLSTVDLVIDHSVMVDEYASGKSFNQNVEREFSRNGERYSFLKWGQKAFDNFRVVPPGTGICHQVNLEYLSKVVWSSKSGSDLYAYPDTLVGTDSHTTMVNGLSVLGWGVGGIEAEAAMLGQPISMLIPEVIGVELKGKLKEGTTATDLVLIIVEMLRKKGVVGKFVEFYGEGLKNLTLADRATIGNMAPEYGATCGFFPVDDETLNI

SEQ ID NO: 178284 - protein, 310 aa, Unknown
  Bacterial polypetide isolated from the Sargasso Sea
LENLLRFEDDVSVTKGHIDAIKKWLEVKKSNTEIAYRPARVLLQDYTGIPAVADLAAMREAVKERNKDPKKINPLSPVDLVIDHSVQVDDFASLSSLKKNVDIEFNRNGERYSFLKWGQQAFDNFRIVPPGTGICHQVNLEYLSKVVWCAKSGNDEYIFPDTLVGTDSHTTMVNGLSVLGWGVGGIEAEAGMLGQPISMLIPEVIGFELTKKLPEGTTATDLVLTVVKILRDKGVVGKFVEFYGTGLKNLSLADRATIANMAPEYGATCGFFPIDNETLKYLKFSGRDNNTVEIVENYAKEQGLWASNDI

SEQ ID NO: 178285 - protein, 301 aa, Unknown
  Bacterial polypetide isolated from the Sargasso Sea
MATGVPTISGPKRPQDKVLLSQASSEFKKILKSITGKDKSKVSKVNEAEFEIRDGTILMAAITSCTNTSNPNVLIGAGLLAKKAVELGMKTKPWVKTSLAPGSKVVTDYLEKSSLNKYLDHLGFNLVGYGCTTCIGNSGPLPENIVEAVEKNNIYAVSVLSGNRNFEGRISPHIKANYLASPPLVVAYALAGHMEFDFYKESLGKDKSGKEIYLKDIWPSNKEIEDTLRSSLNSEMFVKRYSNISEGPIQWQKIQTEKSSIYNWDEGSTYVKKPPFFDNLPDKPEGFKKITDARPLLILAI

SEQ ID NO: 178286 - protein, 298 aa, Unknown
  Bacterial polypetide isolated from the Sargasso Sea
YFNPSVMIGAGLLAKKAIEKGLKIKPWVKTSLAPGSKVVTDYLEKAGLNKYLDELGFNLVGYGCTTCIGNSGPLNKNISEAIHKENLYAVSVLSGNRNFEGRISPDVKANYLASPPLVVAFALAGNMNFDMYKDSLGKDKDDKEVFLKDIWPSNQEIEDIMLKSINAEMFINRYSNVSEGPKEWSAIKTVDSSIYNWEDNSTYVKKPPFFENLTDQPEGFKPIKNARLLLLLADSVTTDHISPAGNIKKDSPTGEYFMKNQVQQKDFNSYGARRGNHEVMMRGTFGNIKIRNEMAPGT

SEQ ID NO: 178287 - protein, 277 aa, Unknown
  Bacterial polypetide isolated from the Sargasso Sea
MSFFPTRVLMQDFTGVPAIADLAAMRDAIKSKNINPKIINPVARVDLIIDHSVTVDSFGNSSSYIENVKTEFQRNNERYEFLKWGQNSFNNFYLVPPGAGICHQVNLENIAKTIWVNKIEGKNYIYPDSVVGTDSHTTMVNALSVLGWGVGGIEAEAVMLGQPISMNLPKVLGFNISGSLNEGITATDLVLTITEKLRAHGVVGKFVEFFGSGLENLTLSDRATISNMAPEYGATCGFFPTDNKTLNYLKLSGKDIDHISIVQEYTKKQKLWHDSKN

SEQ ID NO: 178288 - protein, 234 aa, Unknown
  Bacterial polypetide isolated from the Sargasso Sea
LKDWLKNKKSNIEIAYRPARTLLQDYTGIPAIADLAAMRDAVKDKNKDPEKINPLSTVDLVIDHSVMVDEYASGKSFNQNVEREFLRNGERYSFLKWGQKAFDNFRVVPPGTGICHQVNLEYLSKVVWSSKSGNDLYAYPDTLVGTDSHTTMVNGLSVLGWGVGGIEAEAAMLGQPISMLIPEVVGVELKGKLKEGTTATDLVLIIVEMLRKKGVVGKFVEFYGEGLKNLTLAD

SEQ ID NO: 178289 - protein, 248 aa, Unknown
  Bacterial polypetide isolated from the Sargasso Sea
MAPEYGATCGFFPIDEETLKYLKFSGRDQHTILLVEKYSKEQGLWADENISFSKILDLDLSKVVPSISGPKRPQDKVLLSESSKSFMRSFKKNMDRENLKEEIVSGENFKLKDGNVVIAAITSCTNTSNPNVLIGAGLLAKKAVEKGLKVKPWVKTSLAPGSQVVTDYLEKAGLNKYLDQLGFHLVGYGCTTCIGNSGPLNENISGAIQKGKLYAVSVLSGNRNFEGRINPDVKASYLASPPLVVAYA

SEQ ID NO: 178290 - protein, 254 aa, Unknown
  Bacterial polypetide isolated from the Sargasso Sea
MTILLGRKKNNISKVRNAKFEIKDGSILIAAITSCTNTSNPNVLIGAGLLAKKAVELGLKTKPWVKTSLAPGSQVVTDYLEKSGLNKYLDELGFNLVGYGCTTCIGNSGPLPENIVEAIEKENIYAVSVLSGNRNFEGRISPHIKANYLASPPLVVAYALVGDMVFDFYKDSLGENRKGKKIFLKDIWPSNKEIEKTLKDSINAEMFTKRYSNISQGPIQWQKIKTEKSSIYKWDEGSTYIKKPPFFENISDEP

SEQ ID NO: 178291 - protein, 265 aa, Unknown
  Bacterial polypetide isolated from the Sargasso Sea
STISNMAPEYGATCGFFPIDIETINYLKFTGREIETLELVEAYAKAQGMWRDINTKDPIFSSTLELDLTEIKPSLAGPKRPQDRVLVSELKENFMRALDETSNRKEIRTSELKSTKLSDGDIGIAAITSCTNTSNPGVLIAAGLLAKKAFELGLKVKPWVKTSLAPGSKVVTDYLNGSGLQKYLDELGFNLVGYGCTTCIGNSGSLSRDITNLIETNDLLLTSVLSGNRNFEGRISPHIKANYLASPPLVVAYAIVGSVLINLDT

SEQ ID NO: 178292 - protein, 206 aa, Unknown
  Bacterial polypetide isolated from the Sargasso Sea
MSETLRDTCCASLEAAGKTYHYYSLAELAKVYPALEKLPFSLKVLLENLLRNQDDSSVATSDIEALANWADSGHQSEIAFRPSRILLQDFTGVPAVVDLAAMRDAMESIGGNPEKINPLSPVDLVIDHSVMVDHAGGADAAAKNVVLEFARNQERYEFLRWGASAFDNFRVVPPGTGICHQVNLEYLAQTIGHMMKMVFLMPIPTR

SEQ ID NO: 178293 - protein, 263 aa, Unknown
  Bacterial polypetide isolated from the Sargasso Sea
FKENTKRKVPLEAKVNEKEFKIKDGDIVIGAITSCTNTSNPSVMIGAGLLAKKAVEKGLKVKPWVKTSLAPGSQVVTDYLEKAGLNKYLDQLGFNLVGYGCTTCIGNSGPLDKDISDAIHKENLYAVSVLSGNRNFEGRINPDVKANYLASPPLVVAYALAGNMHHDLYKNSLGKDQKGKDVFLKDIWPTNKEIEELILKSINADMFVKRYSNVSVGPKEWSEIKTDQSSIYNWQESSTYVKRPPFFDNLPDKPEGFKKIKNA

SEQ ID NO: 178294 - protein, 241 aa, Unknown
  Bacterial polypetide isolated from the Sargasso Sea
DDPEGFKNIIDARPLLILGDMITTDHISPAGSIQKESPTGEYFMKHQILPQDYNSYGSRRGNHEVMMRGAFANIRIKNEIAPETEGGFTKLYPEEKVLTVFDAVQEYKKRGTDLVVIAGKEYGTGSSRDWAAKGTKLLGIKVIIAESFERIHRSNLIGMGVLPLQFTSGMNRKNLSLTGPELISILNIEGGFKPGSEIEVEIKYADASIKKIKTLCRIDTQNELEYYKNGGILQYVLRNMI

SEQ ID NO: 178295 - protein, 247 aa, Unknown
  Bacterial polypetide isolated from the Sargasso Sea
ITATDLVLTITKILREKGVVGKFVEFFGNGLKNLSLADRATISNMAPEYGATCGFFPTDDETINYLKLTGKDDHHLNLVKKYSKSQFMYVDENYNPKFNKTINLDLNTIEPSLAGPKRPQDKILLKDIPEEFNKLVKKDESNSNKLSSGDIVIAAITSCTNTSNPSVMIAAGLLAKKAVEYNLQTKHWVKTSLAPGSKVVSDYLDQAGLSKYLSKVGFNTVGYGCTTCIGNSGPLDEWVSQEINSNK

SEQ ID NO: 178296 - protein, 306 aa, Unknown
  Bacterial polypetide isolated from the Sargasso Sea
SFSKSFKEITKKNDFSISKVSNSEFEIKDGSILIAAITSCTNTSNPNVLIGAGLLAKKAVELGLEVKPWVKTSLAPGSQVVTDYLEKAGLNTYLDKLGFNLVGYGCTTCIGNSGPLAENIVEAIQKENIYAVSVLSGNRNFEGRISPHIKANYLASPPLVVAYALAGHMNFDLYKDSLGKDKNGKDIFMKDIWPSNKEIEETLKSSLSAEMFIKRYSNVSEGPKQWQEIKTEKSSIYNWEDNSTYVKKPPFFDNLPDKPEGFKEIKNARPLLILGDMVTTDHISPAGNIQKESPTGEYFMKHQNFT

SEQ ID NO: 178297 - protein, 302 aa, Unknown
  Bacterial polypetide isolated from the Sargasso Sea
DEYIFPDTLVGTDSHTTMVNGLSVLGWGVGGIEAEAGMLGQPISMLIPEVIGFELINKLPEGTTATDLVLTVVKMLRDKGVVGKFVEFYGKGLKNLSLADRATIANMAPEYGATCGFFPIDDETLKYLKFSGRDNQTIKIVERYAKEQGLWASEDIEFTDVVKLDMSTVAPTISGPKRPQDKVLLNEAKTSFEKSFKEITKRQNKNKSKVSGTNFEIKDGSIVIAAITSCTNTSNPNVLIGAGLLAKKAIQKGLKTKPWVKTSLAPGSQVVTDYLNKSGLNKYLDELGFNLVGYGCTTHAIG

SEQ ID NO: 178298 - protein, 250 aa, Unknown
  Bacterial polypetide isolated from the Sargasso Sea
KNGLEDISKLPKSLKVLLENLLRFEDEKFVKREQILSIRSWLDKKNSKKEIAFRPTRVLMQDYTGIPAVADLAAMRDAVKSKKKDPKKINPLSTVDLVIDHSVMVDAYASKDSFKKNVEKEFSRNGERYSFLKWGQQAFNNFRVVPPGTGICHQVNLEYLSKVVWSSDNFAYPDTLVGTDSHTTMVNGLSVLGWGVGGIEAEAAMLGQPISMLIPDVVGFKIKNKLSEGTTATDLVLTIVQILRQEGVVG

SEQ ID NO: 178299 - protein, 311 aa, Unknown
  Bacterial polypetide isolated from the Sargasso Sea
FIKVILENLIRNEDGENISKSMISKVFSSLKERNKTNKKIEIAFFPTRVLMQDFTGVPAVADLAAMRNALKSKGIEPKKINPLSRVDLVIDHSVMVDDYKNNSSLKENVKKEFERNKERYEFLKWGQSSFDNFYLVPPGAGICHQVNLENIAKTVWLKEIDNKKYLFPDSVVGTDSHTTMVNSLSVLGWGVGGIEAEAAMLGQAISMNIPDVIGFELKGSLKEGITATDLVLSITKILRDKGVVGKFVEFYGNGLKNLSLADRATISNMAPEYGATCGFFPTDEETINYLKLTGKDNEHLNIVEKYSKKQT

SEQ ID NO: 178300 - protein, 248 aa, Unknown
  Bacterial polypetide isolated from the Sargasso Sea
QIHQTPSVMIGAGLVAKKAVEKGLKVKPWVKTSLAPGSQVVTDYLEKAGLNKYLDQLGFNLVGYGCTTCIGNSGPLDKEISETIHKENLYAVSVLSGNRNFEGRINPDVKANYLASPPLVVAYALAGNMHHDLYKNSLGKDQNGKDVFLKDIWPSNKEIEELMLKSINADMFVKRYSNVSEGPKEWSSIKTDQSSIYNWEESSTYVKRPPFFDNLPDKPEGFKKIKDARPLLILGDTVKTDHISPAGS

SEQ ID NO: 178301 - protein, 197 aa, Unknown
  Bacterial polypetide isolated from the Sargasso Sea
EAVKEKNKDPNTINPLSAVDLVIDHSVQVDQSAKADSFEKNVDIEFERNGERYSFLKWGQQAFDNFRIVPPGTGICHQVNLEYLSKVVWLEEFKGEKYLFPDTLVGTDSHTTMVNGLSVLGWGVGGIEAEAGMLGQPISMLIPEVIGFEMKNKMPEGTTATDLVLTVVKILRDKGVVGKFVEFYGEGLKNLTLADRA

SEQ ID NO: 178302 - protein, 290 aa, Unknown
  Bacterial polypetide isolated from the Sargasso Sea
RDAMTSLDESKADAVNPQCQTDLVIDHSVMVDHFGTSESKDLNTKLEYERNTERYKLLKWGQQAFKNLRIVPPNNGIIHQINIEYIARVIYEKEGQLYPDTVVGTDSHTTMVNGLGVLGWGVGGIEAEAAMLGQPIPMLLPEVIGFELTGRLGQTTTATDLVLTIVQMLREKNVVGKFVEFYGSGLDNLSIADRCTISNMAPEYGATCGFFPVDALTIDYLKMTGKDEGHLAVVEQYSKTCGFFRDDSQDIKYTDSLSLDMGDVEACLSGPKRPQDRVLLSDVKDISERE

SEQ ID NO: 178303 - protein, 243 aa, Unknown
  Bacterial polypetide isolated from the Sargasso Sea
LSDKPEGFKKIEYARPLLILGDMITTDHISPAGSIQKESPTGEYFMKHQIQQKDFNSYGSRRGNHEVMMRGTFANIRIKNEMAKDTEGGFTKLYPEEKVMPIYDAVVEYKKRGTDLVVIGGKEYGTGSSRDWAAKGTKLLGIKMVLAESFERIHRSNLIGMGILPLQFKEDMNRTNLNLIGSELFSVLNIEQGFDPSSDIEVEIKYADATIKKIKTLCRIDTKNELEYYKNGGILQFVLRKMM

SEQ ID NO: 178304 - protein, 256 aa, Unknown
  Bacterial polypetide isolated from the Sargasso Sea
MKNRNSFDSEQNLEINNSIYKYFNLKIVADKFKINLSKVPISIKILLENLLRNEDGENVDKYMISKIFNSLKEKNKKNDLEIAFYPTRVLMQDFTGVPAVADLAAMRNALKKRGFEPKIINPLSRVDLVIDHSVMVDNYKNPNSLELNVKKEFERNKERYEFLKWGQKSFDNFYLVPPGAGICHQVNLENIAKTVWVKKINNQEYLFPDSVVGTDSHTTMVNALSVLGWGVGGIEAEAAMLGQPISMNVPDVVGFK

SEQ ID NO: 178305 - protein, 308 aa, Unknown
  Bacterial polypetide isolated from the Sargasso Sea
VEFFGPGLDHLPLTDRATISNMAPEYGATCGLFPIDEKTCEYLQQTGRDQDVIDVVKEYAQQQGMWRDADSRDASYTKVIELDLNEIEASIAGPKRPQDRVALSNLPKTMNEILDEQVENRETYAEIEGEKFTHGDIVIAAITSCTNTSNPGVVMAAGLLAKKALEQGLTVKPWVKTSLAPGSKIVTRYLEHAKLLEPLNRLGFNVVGYGCTTCIGNSGPLPEKVSQAIDKNNLHVSSVLSGNRNFEGRIHPQVRANWLASPPLVVAYALAGTTRIDLNNEPLGKSTAGKPVFLKDIWPTPVELNWAI

SEQ ID NO: 178306 - protein, 262 aa, Unknown
  Bacterial polypetide isolated from the Sargasso Sea
TTYDWNDASTYIKHPPYFDTQNKFELNDIKNARILVLLGDSVTTDHISPAGSIKEDSPAGLYLTNRQINSKNFNSYGSRRGNHEIMMRGTFANIRIKNLILDNVEGGYTKSFLSNKQMYIYDAAQEYMNSNIDTVIIAGKEYGTGSSRDWAAKGTRLLGVRAVIAESFERIHRSNLIGMGVLPLEFMNNQNKMNLNIGGEESISIFGLSKLKPGIELNCEINSEASRSINLKCRIDTNKELEYYKAGGILNYVLNEIISDAA

SEQ ID NO: 178307 - protein, 251 aa, Unknown
  Bacterial polypetide isolated from the Sargasso Sea
KTDQSSIYNWQDSSTYVKKPPFFDNLPDKPEGFKKIKDARPLLILGDTVTTDHISPAGSIKKDSPTGDYFMKNQVQQKDFNSYGARRGNHEVMMRGTFGNIRIRNEMAPGTEGGFTILQPDGKKMSVYDAATEYKKRNNDLVVVAGKEYGTGSSRDWAAKGTKLLGIKAVIAESFERIHRSNLVGMGVLPLQFKEGFDRKKLNIKGTELFTIIDIEKGINPRAEVKCEIKYKDGSSKNYKFVIKNRYRKRN

SEQ ID NO: 178308 - protein, 304 aa, Unknown
  Bacterial polypetide isolated from the Sargasso Sea
WVKTSLAPGSKVVSDYLEAGGLQEHLDAMGYQVIGYGCTTCIGNSGLIHEKLVESIKEQDIIVTAVLSGNRNFEGRVSPWTKANYLASPPLVVAYALAGNMNIDLLNDVIGKDWDGNPVYLKDIWPTNKEVQEYIQSVLTPEMFHKRYANIIDGDPNWQKIKTVPSLTYNWSPGSTYIKKPPFFENVSPDGREAADILGARPLALLGDFITTDHISPAGSIMRESPAGELLTQHQIRPQDFNSYGSRRGNHEVMMRGTFANIRIKNEMLPGAEGNWTIHRPSGERISMYEAAMRYKKEGVPLFV

SEQ ID NO: 178309 - protein, 260 aa, Unknown
  Bacterial polypetide isolated from the Sargasso Sea
TCGFFPIDEETLKYLKFSGRDQHTISLVEKYSKEQGLWADENISFTKILDLDLSKVVPSISGPKRPQDKVLLSESSKSFMTSFKKNMNREIIKEEIVSGEKFKLKDGNIVIAAITSCTNTSNPSVLIGAGLLAKKAVEKGLKVKPWVKTSLAPGSQVVTDYLEKAGLNKYLDQLGFHLVGYGCTTCIGNSGPLKENISQAIQKGNLYAVSVLSGNRNFEGRINPDVKANYLASPPLVVAYALAGSMNFDLYKESLGKDKR

SEQ ID NO: 178310 - protein, 295 aa, Unknown
  Bacterial polypetide isolated from the Sargasso Sea
RSFNFYSIEKAEKGGFGNFSQLPAVLRVVLENLLRYEDGKTVTLNDISAFSDWSANNGRNPQEISYRPARVLMQDFTGVPAIVDLAAMRDAMVSLGGDPQKINPLNSVDLVIDHSVTIDHYGNSRALSLNVEREYERNFERYSFLKWGQKAFKNFRVVPPGTGICHQVNLEYLGKTIWIDKDQKGQTVVYPDTLVGTDSHTTMINAMAILGWGVGGIEAEAAMLGQPVSMLIPEVVGFELTGEILEGVTATDLVLKVVKMLREKGVVGKFVEFFGNGLSKLPLADRATIANMAPE

SEQ ID NO: 178311 - protein, 281 aa, Unknown
  Bacterial polypetide isolated from the Sargasso Sea
GQKAFDNFRVVPPGTGICHQVNLEYLSKVVWSSKSGNDLYAYPDTLVGTDSHTTMVNGLSVLGWGVGGIEAEAAMLGQPISMLIPEVVGVELKGKLKEGTTATDLVLTIVEMLRKKGVVGKFVEFYGEGLKNLTLADRATIANMAPEYGATCGFFPVDEESLKYLKLSGRDESTILLVEKYSKEQGLWASNDVEFTDTVTLDVSSVVTSISGPKRPQDKVFLTDASNAFAKVYKENTKRSKEVEAVVAGKDFKLKDGDIVIAAITSCTNTSNPSVLIGAGL

SEQ ID NO: 178312 - protein, 322 aa, Unknown
  Bacterial polypetide isolated from the Sargasso Sea
DLVLTVVKMLRDKGVVGKFVEFYGEGLKNLTLADRATIANMAPEYGATCGFFPIDDETLKYLKFSGRDQHTVDIVEIYAKEQGLWASDEIEFTDIISLDMSTVVPTISGPKRPQDKVLLTDASSSFKKVMHDATNKKEKSISKVSNADYQISDGSILIAAITSCTNTSNPNVLIGAGLLAKKAVELGLEVKPWVKTSLAPGSKVVTDYLEKAGLNKYLDKLGFNLVGYGCTTCIGNSGPLAENIVEAIQRDNIYSVSVLSGNRNFEGRISPHIKANYLASPPLVVAYAIAGHMEVDLYKDPFRSDKNGKDIYLKDIWPSIKR

SEQ ID NO: 178313 - protein, 293 aa, Unknown
  Bacterial polypetide isolated from the Sargasso Sea
SIVPTISGPKRPQDKVLLNQASSEFKKVYENITERKEKHISKVNYTDFEIKDGSILIAAITSCTNTSNPNVLIGAGLLAKKAVELGLKTKPWVKTSLAPGSQVVTDYLEKAGLNKFLDELGFNLVGYGCTTCIGNSGPLPGNIVEAIEKNNIYAVSVLSGNRNFEGRISPHIKANYLASPPLVVAYALAGHMEVDLYKDPLGKDKTGKDIFLKDIWPSNKEIEDILEEALNAEMFVKRYSNVSDGPIQWQEIKTEKSSIYNWDQGSTYVKKPPFFENLSDEPEGFKQIKDARP

SEQ ID NO: 178314 - protein, 291 aa, Unknown
  Bacterial polypetide isolated from the Sargasso Sea
DSLGKDNAGNDVFLKDIWPSNKEIEDTLKESLNAEMFIQRYSNVSDGPTQWQQIKTDKSSIYNWDEASTYVKKPPFFDSLPDEPEGFKEIQDARPLLILGDMVTTDHISPAGNIQQDSPTGEYFMEHQILPKDYNSYGSRRGNHEVMMRGTFANIRIKNEMVPGTEGGFTKLYPEGKILPVYDAVVEYKKRGTDLVVIGGKEYGTGSSRDWAAKGTKLLGIKAVIAESFERIHRSNLIGMGVLPLQFIDGVNRKNLNLIGSELISIMNIEKGVNPSDKITIEIKYASGEIK

SEQ ID NO: 178315 - protein, 318 aa, Unknown
  Bacterial polypetide isolated from the Sargasso Sea
AGLNTYLDQLGFNLVGYGCTTCIGNSGPLAENIVDAIKKENLYAVSVLSGNRNFEGRISPYIKANYLASPPLVVAYALAGHMEFDLIKDSFGKDKNGKDVFLKDIWPSNKEIEDTLKISLNADMFVKRYSNVSEGPKQWQEIKTEKSSIYNWDENSTYVKKPPFFENLSDDPEGFKEIKNARPLLILGDMVTTDHISPAGNIQKDSPTGEYFMNYQILPKDYNSYGSRRGNHEVMMRGTFANIRIKNEMAPGTEGGFTKLYPEEKLMSVYDAVVEYKKRGTDLVVIGGKEYGTGSSRDWAAKGTKLLGVKVVIAESLR

SEQ ID NO: 178316 - protein, 242 aa, Unknown
  Bacterial polypetide isolated from the Sargasso Sea
SDKPEGFKEIKDARPLLILGDMVTTDHISPAGSIQKDSPTGEYFMKHQVLPKDYNSYGSRRGNHEVMMRGTFANIRIRNEMAPGTEGGFTKLYPEGKVMPIYDAVVEYKKRDTDLIVIGGKEYGTGSSRDWAAKGTKLLGIKAVIAESFERIHRSNLIGMGILPLQFVSGVDRKKLKLIGSELISILKIENGINPSDEIEIEIKYQSGDIKKIKTLCRIDTKNELEYYKNGGILQFVLRNMM

SEQ ID NO: 178317 - protein, 302 aa, Unknown
  Bacterial polypetide isolated from the Sargasso Sea
TDYLAKAGLNTYLDQLGFNLVGYGCTTCIGNSGPLPENIVEAIQKENIYAVSVLSGNRNFEGRISPHIKANYLASPPLVVAYAIAGHMEVDLYKDPLGKDKEGKDVFLKDIWPSNKEIEETLKDSLNAEMFIQRYSNVSEGPTQWQKIKTDKSSIYNWDEGSTYVKKPPFFDSLPDKPEGFKEIKDARPLLILGDMVTTDHISPAGSIQKDSPTGEYFMEHQILPKDYNSYGSRRGNHEVMMRGTFANIRIRNEMAPGTEGGFTKLYPEEKVLPVYDAVVEYKKRGTDLVVIGGKDYGTRII

SEQ ID NO: 178318 - protein, 303 aa, Unknown
  Bacterial polypetide isolated from the Sargasso Sea
EINVGSKNYKYFSLIEAEKYGLVGINKLPKSLKVLLENLLRYEDDLSVTKSQIEAIKDWLKTKKSKTEIAYRPARVLLQDYTGIPAVADLAAMREAVKEKNKNPNTINPLSAVDLVIDHSVQVDKSAEADSFEKNVDIEFERNGERYSFLKWGQQAFDNFRIVPPGTGICHQVNLEYLSKVVWSEKFKGDEYLFPDTLVGTDSHTTMVNGLSVLGWGVGGIEAEAGMLGQPISMLIPEVIGFEIKNKMPEGTTATDLVLTVVKMLRDKGVVGKFVEFYGEGLKNLTLADRATIANMAPEYGAT

SEQ ID NO: 178319 - protein, 295 aa, Unknown
  Bacterial polypetide isolated from the Sargasso Sea
MIGAGLLAKKAVEKGLKVKPWVKTSLAPGSQVVTDYLEKAGLNKYLDQLGFNLVGYGCTTCIGNSGPLDEDISDTIHKENLYAVSVLSGNRNFEGRINPDVKANYLASPPLVVAYALAGNMHHDLYKNPLGKDKTGKDVFLKDIWPTNKEIEELILKSINADMFVKRYSNVSEGPKEWSSIKTDQSSIYNWQENSTYVKRPPFFDNLSDKPEGFKKIKDARPLLILGDTVTTDHISPAGSIKKDSPTGDYFMKHQVQQKDFNSYGARRGNHEVMLRGTFGNIRIRNEMAPGTERG

SEQ ID NO: 178320 - protein, 250 aa, Unknown
  Bacterial polypetide isolated from the Sargasso Sea
KRKEKNISKVSGTDFEIKDGSILIAAITSCTNTSNPNVLIGAGLLAKKAVELGLKTKPWVKTSLAPGSQVVTDYLEKAGLNKYLDELGFNLVGYGCTTCIGNSGPLPDNIVEAIEKKNIYAVSVLSGNRNFEGRISPYIKANYLASPPLVVAYALAGHMEANLYKDSLGKDKNGKDIFLKDIWPSNKEIESILQKALNAEMFIKRYSNVSDGPIQWQKIKTEKSSIYNWDQESTYVKKPPFFDNLPDKPE

SEQ ID NO: 178321 - protein, 193 aa, Unknown
  Bacterial polypetide isolated from the Sargasso Sea
LPKDYNSYGARRGNHEVMMRGTFANIRIRNEMAPGTEGGFTTLYPEKKVMPIYDAVVEYKKRGTDLVVIGGKEYGTGSSRDWAAKGTKLLGVKTVIAESFERIHRSNLIGMGILPLQFIDNIDRKNLKLIGSELISIINLENGINPSDKVKVEIKYASGEIKTIQALCRIDTKNELEYYKNGGILQYVLRNMI

SEQ ID NO: 178322 - protein, 312 aa, Unknown
  Bacterial polypetide isolated from the Sargasso Sea
KNFNLNFKNITKRESFSTSKVEGTDYEIKDGSILIAAITSCTNTSNPNVLIGAGLLAKKACDLGLTTKPWVKTSLAPGSQVVTDYLEKAGLNVYLDRLGFNLVGYGCTTCIGNSGPLPENISSAVQKNNIYAVSVLSGNRNFEGRISPLIKANYLASPPLVVAYAIAGHMKFDFYKDSLGKSKDGKDFFLKDIWPSNKEIEDTLSNSLNAEMFIKRYSNVSKGPSQWQDIKTKESSIYEWDDNSTYVKKPPFFDNLKDSPDGFKDIINARPLLILGDMVTTDHISPAGSIQKESPTGDYFMKNQVLQKDFNL

SEQ ID NO: 178323 - protein, 318 aa, Unknown
  Bacterial polypetide isolated from the Sargasso Sea
SNDVTFTDQLSLDVSSVVTSISGPKRPQDKVLLTNASSSFAKVFKENTKRNNPIETKVEGKDFKIKDGDIVIAAITSCTNTSNPSVLFGAGLLAKKAFEKGLKVKPWVKTSLAPGSQVVTDYLEKAGLNKYLDELGFNLVGYGCTTCIGNSGPLNKDISDAINNKEIYAVSVLSGNRNFEGRINPDVKANYLASPPLVVAYALAGNMNFDLYKSPLGKDKDGKNIYLKDIWPSNKEIEDLMMTSLSSDMFKKRYSNVSDGPKEWKEINTIDSDIYNWEENSTYVKRPPFFDNLSDKPEGFKQIKDARILLLLADTVTT

SEQ ID NO: 178324 - protein, 277 aa, Unknown
  Bacterial polypetide isolated from the Sargasso Sea
LKNWLKNKKSNTEIAYRPARVLLQDYTGIPAVADLAAMREAVKEKNKDPNTINPLSSVDLVIDHSVQVDQSAKSNSFEKNVDIEFKRNGERYSFLKWGQQAFNNFRIVPPGTGICHQVNLEYLSKVVWQEKYKNENYLFPDTLVGTDSHTTMVNGLSVLGWGVGGIEAEAGMLGQPISMLIPEVIGFELKNKMPEGTTATDLVLTVVKMLRDKGVVGKFVEFYGDGLNNLTLADRATIANMAPEYGATCGFFPVDDETLKYLKFSGRDDHTIKIVEK

SEQ ID NO: 178325 - protein, 275 aa, Unknown
  Bacterial polypetide isolated from the Sargasso Sea
ASPPLVVAYALAGNMNFDMYKSSLGKDKNGKDVFLKDIWPSNKEIEDLMLSSLNADMFKKRYSNVSKGPKEWQAINTTDSDIYNWEANSTYVKRPPFFDDLPDQPEGFKPINDARILLLLADTVTTDHISPAGSIKKDSPTGNYFMKHQIQQKDFNSYGARRGNHEVMMRGTFGNIKIRNEMAPGTEGGFTTLQPDGKVMSVYEAAMEYKKRKNDLVVIAGKEYGTGSSRDWAAKGTKLLGIKAVLAESFERIHRSNLIGMGVLPLQFKEGFDRK

SEQ ID NO: 178326 - protein, 304 aa, Unknown
  Bacterial polypetide isolated from the Sargasso Sea
PSLAGPKRPQDRINLSDAKVAFKQLLDDAPQSRATDMSVTDGDIVIAAITSCTNTSNPSVMVAAGLLARKARQLGLTIKPSVKTSLAPGSKVVTDYLINSGLDKDLDSLGFNLVGYGCTTCIGNSGPLNPQVESQIRANNAIVASVLSGNRNFEGRVHSLTQANYLASPPLVVAYALAGSMLVDLSSEPLGIGSNGHPVYLKDIWPSSEEIQNTIENSLSPEMFQNQYARATEGDSSWREIKTPEGQTYTWPESTYVQKPPYFANIQKTPEKVGNILGARILALLGDSVTTDHISPAGAIPSDG

SEQ ID NO: 178327 - protein, 270 aa, Unknown
  Bacterial polypetide isolated from the Sargasso Sea
NSNGKKYVYYSIQKVEDEGVRYLSKLPACLKVVLENLLRFEDGKLVTHLDVCAFSDWVSKKGHNPKEISFRPARVLMQDFTGVPAVVDLAAMRDAMLHLGGDPQKINPLTPVDLVIDHSVMIDDFGNPRAFSKNVDREYERNIERYKFLKWGQNAFKNFRVVPPGTGICHQVNLEYLGQTAWHDLDQYGENVVYPDTLVGTDSHTTMVNGLAILGWGVGGIEAEAAMLGQPISMLIPDVIGFKLTNQLREGVTATDLVLLIVKMLREKGV

SEQ ID NO: 178328 - protein, 316 aa, Unknown
  Bacterial polypetide isolated from the Sargasso Sea
VPEVIGFEIKGKIKEGITATDLVLTITEQLRKKGVVGKFVEFFGEGLKELSIPDRATISNMAPEYGATCGFFPIDEETIKFLKVSGRDEKGIQLVKKYAKLQGLWEDYKKNDRVYTDKMQLDLSQILPSLAGPKRPQDKIILSKVSDEFLKSLKSEFSQKNISNLSKVKGENFEMDHGHVAIAAITSCTNTSNPSVMVGAGLLAKKAAKLGLKTKPWVKTSLAPGSKIVTDYLTKSGLQKYLDDLGFHLVGFGCTTCIGNSGPLDKNISDTIGKNNLIVSGVLSGNRNFEGRINPFVKANYLASPPLVCAYALAGS

SEQ ID NO: 178329 - protein, 231 aa, Unknown
  Bacterial polypetide isolated from the Sargasso Sea
TVSGKKYNFFNLVKAEKNGLKNIKKLPKSIKVLLENLLRFEDDLTVNKKQIKAIANWLNTKSSKQEIAYRPARILLQDYTGIPAVADLAAMRDAVKSKNKDPNKINPLSTVDLVIDHSVMVDNYAKKDSFSKNVQREFDRNGERYSFLKWGQSAFNNFRVVPPGTGICHQVNLEYLSKVVWSSEANGQLFAYPDTLVGTDSHTTMVNGLSVLGWGVGGIEAEAAMLGQPIS

SEQ ID NO: 178330 - protein, 266 aa, Unknown
  Bacterial polypetide isolated from the Sargasso Sea
YLDKANLSIHLNKIGFNLVGYGCTTCIGNSGPLEEWISKEIKNNNLTVCSVLSGNRNFEGRVHQEVKANFLASPPLVVAFAIAGNMNIDIFKEPIGISKLGKEVFLKDLWPSTSEINKIVDNSISTEMFKKRYKEIYNGDQNWQSIKNISDKTYAWNASSTYIKHPPFFADEKHQVKDIINARILAMLGDSVTTDHISPAGAIKSDSPAGKYLNERQISRKDFNSYGSRRGNHEIMMRGTFANIRIKNEIVPGIEGGVTKFFDQDE

SEQ ID NO: 178331 - protein, 225 aa, Unknown
  Bacterial polypetide isolated from the Sargasso Sea
DKVLLTEASTAFAKVYKENANRDKSIEAKVEGADFNIKDGDIVIAAITSCTNTSNPSVMIGAGLLAKKAHEKGLKVKPWVKTSLAPGSQVVTDYLKKAGLNKYLDELGFNLVGYGCTTCIGNSGPLNQNISDAINKNDLYAVSVLSGNRNFEGRINPDVKANYLASPPLVVAYALAGNMNFDMYKSALGKDKNGKDVFLKDIWPSNKEIEDLMLSSLNADMLSKD

SEQ ID NO: 178332 - protein, 249 aa, Unknown
  Bacterial polypetide isolated from the Sargasso Sea
MSTVNSLNTQSTLEVDGKPYKYHSLLKAAEQLKGIDKLPKSLKVLLENLLRNEDGDTVTRDDIKAIADWLDKRSSDREIQYRPARVLMQDFTGVPAVVDLAAMRDAIARAGGDPESINPLSPVDLVIDHSVMVDRFADDQAFHDNVEIEMQRNGERYAFLRWGQTAFDNFRVVPPGTGICHQVNLEYLAQSVWAANVNGEDWAYPDTLVGTDSHTTMINGIGVLGWGVGGIEAEAAMLGQPVSMLIPEV

SEQ ID NO: 178333 - protein, 300 aa, Unknown
  Bacterial polypetide isolated from the Sargasso Sea
EKNKDPKKINPLSSVDLVIDHSVQVDQSAKSDSFEKNVDIEFERNGERYSFLKWGQQAFNNFRIVPPGTGICHQVNLEYLSKVVWKESYKNEDYLFPDTLVGTDSHTTMVNGLSVLGWGVGGIEAEAGMLGQPISMLIPEVIGFEVKNKLPEGTTATDLVLTVVKMLRDKGVVGKFVEFFGDGLKNLSLADRATIANMAPEYGATCGFFPVDNETLKYLKFSGRDENEVKIVEEYAKAQGLWASEDIEFTDSISLDMSKVVPTISGPKRPQDKVLLNEASESFKKVFKDATGRNEKSSQK

SEQ ID NO: 178334 - protein, 299 aa, Unknown
  Bacterial polypetide isolated from the Sargasso Sea
NFFERDQQTVDIVENYAKEQGLWASNEIEFTDIISLDMSTVVPTISGPKRPQDKVLLTDAPGSFQKVLLEATNKNEKSISKVSNTDYEIKDGSILIAAITSCTNTSNPNVLIGAGLLAKKAIEKGLQVKPWVKTSLAPGSQVVTDYLAKAGLNTYLDQLGFNLVGYGCTTCIGNSGPLPENIVEAIQKENIYAVSVLSGNRNFEGRISPHIKANYLASPPLVVAYAIAGHMEVDLYKDPLGKDKEGTDVFLKDIWPSNKEIEDTLKDCLNAEMFIQRYSNVSEGPTQWQKIKTDKSQYL

SEQ ID NO: 178335 - protein, 303 aa, Unknown
  Bacterial polypetide isolated from the Sargasso Sea
LKIYWPSTKDINKIVDNSLSTDMFLKRYEEIYSGDQNWKLISSVSDTTYKWNTFSTYIKHPPFFENEENEVKDIVNARILAILGDSVTTDHISPAGAIKPDSPAGKYLNERQINRKDFNSYGSRRGNHEIMMRGTFANIRIKNEIIPGTEGGITKFFDDKDLEMSIYDAAIEYSKKQIPLVIFAGKEYGTGSSRDWAAKGTKLLGIKAVIAESFERIHRSNLIGMGVLPLQFISDQNRKSLNLIGDEMITIKGLNSIKPNEELICEIKSDDIRSVKLLCRIDTIKELDYYNQGGILPYVLNSL

SEQ ID NO: 178336 - protein, 321 aa, Unknown
  Bacterial polypetide isolated from the Sargasso Sea
DGDIVIAAITSCTNTSNPSVMIGAGLLAKKAIEKGLKIKPWVKTSLAPGSKVVTDYLEKAGLNKYLDELGFNLVGYGCTTCIGNSGPLNKGISDAIHKENLYAVSVLSGNRNFEGRISPDVKANYLASPPLVVAFALAGNMNFDIYKSSFGIDKEGKEVFLKDIWPSNKEIENIMLKSINAKMFIDRYSNISEGPKEWRSIKTVDSSIYNWEDNSTYVKRPPFFDNLPDQPEGFKPIKDARLLLLLADTVTTDHISPAGNIKKDSPTGDYFMKNQIQQKDFNSYGARRGNHEVMMRGTFGNIKIRNEMAPGTEGGFTTLQP

SEQ ID NO: 178337 - protein, 285 aa, Unknown
  Bacterial polypetide isolated from the Sargasso Sea
GVGGIEAEAAMLGQPISMLIPEVIGVELKGKLKEGTTATDLVLTIVEILRKKGVVGKFVEFYGEGLKNLTLADRATIANMAPEYGATCGFFPVDNETLKYLRLSGRDDQTISLVENYCKEQGLWANNDITFTDIVKLDVSTVVTSISGPKRPQDKVLLTNSATNFAKVYKENTKRDKQVTAKVKGVDFKITDGDIVIAAITSCTNTSNPSVLIGAGLLAKKAYEKGLKVKPWVKTSLAPGSQVVTDYLEKAGLNKYLDELGFNLVGYGCTTCIGNSGPLNEDISD

SEQ ID NO: 178338 - protein, 261 aa, Unknown
  Bacterial polypetide isolated from the Sargasso Sea
LAKKAVAKGLKKKPWVKTSLGPGSRVVSDYLIASLLGESLDELGFHIVGFGCTTCIGNSGPLPEKVVDAINEGDLIVASVLSGNRNFEGRINQHVKANYLASPPLVVAYAIAGNVNHDFKNDPLGIGENNQPVFLKDIWPSNEEIKKAEKFISREMYLKEYQKADQSSPMWNAIETPAGEVFQWNKFSTYIQNPPFFKNMVLETDPVKDITGARVLAKLGDSVTTDHISPAGAFSPESPAGKYLLERGTQINDFNSYGSRR

SEQ ID NO: 178339 - protein, 240 aa, Unknown
  Bacterial polypetide isolated from the Sargasso Sea
EPEDITDIKEARPLLILGDMVTTDHISPAGTIQKESPTGEYFMKHQILTKDYNSYGARRGNHEVMMRGTFANIRIRNEIAPETEGGFTKLYPEEKIMPVYDAVVEYKKRGTNLVVIGGKEYGTGSSRDWAAKGTKLLGIKAVLAESFERIHRSNLIGMGVMPLQFIDGMNRKNLDLKGPELISILDIKKGLNPSDNVEVEIKYQSGESKKIKMLCRIDTKNELEYYKNGGILQYVLRKMI

SEQ ID NO: 178340 - protein, 259 aa, Unknown
  Bacterial polypetide isolated from the Sargasso Sea
MWVKTSLAPGSQVVTDYLDKAGLSKYLDELGFNLVGYGCTTCIGNSGPLPDNITDAVKENNLYAVSVLSGNRNFEGRISPLVKANYLASPPLVVAYAIAGSMRLDLYKDPLGKDSKGQDIYLKDIWPSNKEIEDTLKQSLNPEMFVNRYSNVSEGPEQWQKIKVEKGSIYNWEENSTYVKKPPFFENLPDEPEGFKEIKDARPLLILGDMVTTDHISPAGSIQKESPTGNYFMKHQILPKDYNSYGARRGNHEVMMRGT

SEQ ID NO: 178341 - protein, 302 aa, Unknown
  Bacterial polypetide isolated from the Sargasso Sea
RDLKNLLLADRATIANMAPEYGATCGFFPIDQETLKYLEFSGRDKETVAIVEKYAKDQGLWSSDEIEFTDKISLDMSTVVPTISGPKRPQDKVLLTDASSNFKKVFKESTGKNDYKISKVKDTHYEIKDGSILIAAITSCTNTSNPNVLIGAGLLAKKAVELGLNVKPWVKTSLAPGSQVVTDYLEKAGLNIYLDQLGFNLVGYGCTTCIGNSGPLAENIVEAIQKDNLYGVSVLSGNRNFEGRISPHIKANYLASPPLVVAYALAGHMEFDLFKNSFGKDKNGKDVFLKDIWPSNKEIEDT

SEQ ID NO: 178342 - protein, 275 aa, Unknown
  Bacterial polypetide isolated from the Sargasso Sea
VNGLSVLGWGVGGIEAEAAMLGQPISMLIPEVIGVEIKGKLVEGLTATDLVLAIVEMLRKKGVVGKFVEFYGEGLKNLTLADRATIANMAPEYGATCGFFPVDEETLKYLSLSGRDKETIELVEKYSKDQGLWANEDMEFTDTLSLDISTVMPSISGPKRPQDKVLLTDSSKAFLKTYKENTKRDKPIATKVSGVDFEVTDGDIVIAAITSCTNTSNPSVMIGAGLLAKKAIERGLKIKPWVKTSLAPGSKVVTDYLEKAGLNKYLDKLGFNLVG

SEQ ID NO: 178343 - protein, 238 aa, Unknown
  Bacterial polypetide isolated from the Sargasso Sea
KSALYKWDKNSTYIKEVSFFKEKTSPKKKSVSARILLNLGDSVTTDHISPAGKFSKNEPAGKYLLEKGLNPSQFNSYGSRRGNEEVMVRGTFANIRIKNKLIDYEGGFTICYPIEKEMSIYDASKYYISKKIDTVVIGGKEYGSGSSRDWAAKGTKLLGIKSVLAKSFERIHRSNLIGMGVIPIEADISKLNIKGNEIIKFQIDNLDVKNIIDIYFNDTKIKGIIRIDSEIEKEYYEA

SEQ ID NO: 178344 - protein, 285 aa, Unknown
  Bacterial polypetide isolated from the Sargasso Sea
IKANYLLSPPLVVAYALAGHMEIDLYKDSLGKDKNGKDIFMKDIWPTNMEIEKTLSKALNAEMFVKRYSNVAEGPIQWQKIKTEKSSIYNWDEGSTYVKKPPFFDNLPDEPEGFKEIKDARPLLLLGDMVTTDHISPAGSIQKESPTGEYFMKNQILPKDYNSYGSRRGNHEVMMRGTFANIRIRNEIAPGTEGGFTKLFPEGKVMPIYDAVVEYKKRGTDLVVIGGKEYGTGSSRDWAAKGTKLLGIKAVIAESFERIHRSNLIGMGILPLQFIENINRKNLNL

SEQ ID NO: 178345 - protein, 275 aa, Unknown
  Bacterial polypetide isolated from the Sargasso Sea
MEFKSKNSFQSLDTLAVSGKKYNFFNLVKAEKNGLKNIKKLPKSIKVLLENLLRFEDDLTVNKKQIKAIADWLNTKSSKQEIAYRPARILLQDYTGIPAVADLAAMRDAVKSKNKDPNKINPLSTVDLVIDHSVMVDNYAKKDSFSKNVQREFDRNGERYSFLKWGQSAFNNFRVVPPGTGICHQVNLEYLSKVVWSSEVNGQLFAYPDTLVGTDSHTTMVNGLSVLGWGVGGIEAEAAMLGQPISMLIPEVIGFEINGKLTEGTTASDLVLTIV

SEQ ID NO: 178346 - protein, 275 aa, Unknown
  Bacterial polypetide isolated from the Sargasso Sea
INLVKEPLGKNKKGKNIYLKDIWPSSNEIKKVIDSTINSKLYSSRYKNVFKGDKKWQSIRSPKGLTYKWNNKSTYVQHPPFFQSLNPNIDNIKNIKTAHILGIFGDSVTTDHISPAGSIKGDGPAGFYLKKNNVKETDFNSFGSRRGNHEVMIRGTFSNIRIKNEMVNGIEGGYTICYPSKKQKSIYDAAMIYRKSATPLVIFAGKDYGMGSSRDWAAKGTSLLGVKAVIAESFERIHRSNLIGMGVLPCQFLKSENRKSLKLLGSEKISITGLE

SEQ ID NO: 178347 - protein, 299 aa, Unknown
  Bacterial polypetide isolated from the Sargasso Sea
VFTDTLSLDVSSVVTSISGPKRPQDKVLLTEASTAFAKVYRENAKRDKAIEVKVESTDFNIKDGDIVIAAITSCTNTSNPSVMLGAGLLAKKAHEKGLKVKPWVKTSLAPGSQVVTDYLEKAGLNKYLDELGFNLVGYGCTTCIGNSGPLNQNISDAINKNDLYAVSVLSGNRNFEGRINPDVKANYLASPPLVVAYALAGNMNFDMYKSPLGKDKNGKDVFLKDIWPSNKEIEDLMLSSLNAEMFKQRYSNVSKGPKEWQAINTTDSDIYNWEANSTYVKRPPFFDDLPDQPEGFKPN

SEQ ID NO: 178348 - protein, 283 aa, Unknown
  Bacterial polypetide isolated from the Sargasso Sea
GKTSLAPGSQVVTDYLAKAGLNVFLDKLGFNLVGYGCTTCIGNSGPLPENISSAIQKNNIYAVSVLSGNRNFEGRISPLIKANYLASPPLVVAYALAGHMKFDFYKDSLGKSKDGKDIFLKDIWPSNKEIEDTLSNSLNAEMFINRYSNVSKGPSQWQNIKTKESSIYNWDDNSTYVKKPPFFDNLKDSPDGFKDIINARPLLILGDMVTTDHISPAGSIQKESPTGDYFMKNQVLQKDFNSYGSRRGNHEVMMRGTFANIRIRNEMAPGTEGGFTKLHPEEK

SEQ ID NO: 178349 - protein, 275 aa, Unknown
  Bacterial polypetide isolated from the Sargasso Sea
TDFEIKDGSILIAAITSCTNTSNPNVLIGAGLLAKKAIELGLKTKPWVKTSLAPGSQVVTDYLEKAGLNKYLDMLGFNLVGYGCTTCIGNSGPLKENIVSAIEKESIYAVSVLSGNRNFEGRISPHIKANYLASPPLVVAYALAGHMEIDLYKDPLGKDKNGKDIFLKDIWPSNKEIEVTLADSLNANMFIKRYSNVSEGPVQWQKIKTEKTSIYNWDESSTYVKRPPFFDQLSDEPEGFKEIKDARPLLILGDMVTTDHISPAGSIQKESPTGE

SEQ ID NO: 178350 - protein, 237 aa, Unknown
  Bacterial polypetide isolated from the Sargasso Sea
SSSDYTGIPAVADLAAMREAVKEKNKDPNTINPLSSVDLVIDHSVQVDKFASKNSLKENVDIEFNRNAERYSFLKWGQQAFNNFRIVPPGTGICHQVNLEYLSKVVWSEKFKDENYIFPDTLVGTDSHTTMVNGLSVLGWGVGGIEAEAGMLGQPISMLIPEVIGFKLVNKLTEGTTATDLVLTVVKMLRDKGVVGKFCRFYGEGLKNLTLADRATIANMAPEYGATCGFFPIDKEQ

SEQ ID NO: 178351 - protein, 237 aa, Unknown
  Bacterial polypetide isolated from the Sargasso Sea
MKSLNSFNACKNVIIDKKNYKYYDLNVLAQTYNFDLLKVPNSIKIILENLLRNEDGESVTEQMISKLCKQINETKDNFEISFSPTRVLMQDFTGVPAVVDLAAMRDALKSKGIDPNKINPKSRVDLVIDHSVMVDQYGSNKAYEENVKKEFERNKERYEFLKWGQQAFDNFYLVPPGGGICHQVNLENIATTIWSNNIENENYLYPDSVVGTDSHTTMINALSVLGWGVGGIEAEAA

SEQ ID NO: 178352 - protein, 300 aa, Unknown
  Bacterial polypetide isolated from the Sargasso Sea
PNVLIGAGLLAKKAVELGLKVKPWVKTSLAPGSQVVTDYLDKAGLSKYLDKLGFNLVGYGCTTCIGNSGPLAENIVEAIQKENIYAVSVLSGNRNFEGRISPHIKANYLASPPLVVAYALAGQMDFDLYKDPLGKDKKGNSILMKDIWPSNSEIEEVLKTSLSAEMFVNRYSNVSEGPKQWQEIKTKKSSIYDWEENSTYVKKPPFFDDLSDEPEGFKEIKNARPLLILGDMVTTDHISPAGNIQKESPTGEYFMKHQILPKDFNSYGSRRGNHEVMMRGTFANIRIRNDMVAGKEGGYT

SEQ ID NO: 178353 - protein, 279 aa, Unknown
  Bacterial polypetide isolated from the Sargasso Sea
LRFEDSDTVNIKQIKGVADWLKTKSSKMEIAYRPARILLQDYTGIPAVADLAAMRDAVKSKNKNPKKINPLSTVDLVIDHSVMVDNYAKNDSFKKNVEREFGRNGERYSFLKWGQSAFDNFRVVPPGTGICHQVNLEYLSKVVWSSDVDGKTYAYPDTLVGTDSHTTMVNGLSVLGWGVGGIEAEAAMLGQPISMLIPEVIGFEIKGKLTEGTTASDLVLTIVQMLRKKGVVGKFVEFYGKGLKNLSLADRATIANMAPEYGATCGFFPIDEETIKYLK

SEQ ID NO: 178354 - protein, 292 aa, Unknown
  Bacterial polypetide isolated from the Sargasso Sea
MRKKGVVGKFVEFYGEGLKNLSLADRATIANMAPEYGATCGFFPIDEETIKYLKFSGRDKDTISLVEKYSKQQGLWASKEIDFTDTVSLNLNSVVPSISGPKRPQDKVLLTNAAKSFDKAFKENTKRKIPKEAKVEKKDFSIKDGDIVIGAITSCTNTSNPSVMIGAGLLAKNAVEKGLKVKPWVKTSLAPGSQVVTDYLEKAGLNKYLDHLGFNLVGYGCTTCIGNSGPLDKDISDAIHKENLYAVSVLSGNRNFEGRINPDVKANYLASPPLVVAYALIGNMHQDLYKSP

SEQ ID NO: 178355 - protein, 330 aa, Unknown
  Bacterial polypetide isolated from the Sargasso Sea
IPNKITLLSSVDLVIDHSVQVDKFASKNSLKENVEIEFKRNAERYSFLKWGQQAFNNFRIVPPGTGICHQVNLEYLSKVVWTEKFEGYNYIFPDTLVGTDSHTTMVNGLSVLGWGVGGIEAEAGMLGQPISMLIPEVIGFEMTNKLPEGTTATDLVLTVVKMLRDKGVVGKFVEFYGEGLKNLTLADRATIANMAPEYGATCGFFPIDDETLKYLEFSGRNSQTIKIVETYAKEQGLWADNDILFTDTLSLDMSSIVPTISGPKRPQDKVLLTEASKNFKKIFKEVTKKIEPSASIVENEEFKIRDGDILIAAITSCTNTSNPNVLIGAG

SEQ ID NO: 178356 - protein, 321 aa, Unknown
  Bacterial polypetide isolated from the Sargasso Sea
ATDLVLTVVKMLRDKGVVGKFVEFFGDGLKNLSLADRATIANMAPEYGATCGFFPVDNETLKYLKFSGRDENEVKIVEEYAKAQGLWASEDIEFTDTISLDMSKVVPTISGPKRPQDKVLLNEASESFKTAFKDATGRNEKNNSKVENTDFKIEDGSILIAAITSCTNTSNPNVLIGAGLLAKKAVELGLKTKPWVKTSLAPGSQVVTDYLEKAGLSKYLDILGFNLVGYGCTTCIGNSGPLNDNIVKAIESKNLYAVSVLSGNRNFEGRISPHIKANYLASPPLVVAYALAGHMEVDLYKDSLGKNKDGKRYFSQRHLAY

SEQ ID NO: 178357 - protein, 288 aa, Unknown
  Bacterial polypetide isolated from the Sargasso Sea
KMLRDKGVVGKFVEFYGEGLKNLTLADRATIANMAPEYGATCGFFPIDEETLKYLEFSGRDKTQVEIVKKYAIEQGLWASSDIEFSDTLSLDMSTVVPTISGPKRPQDKVLLTDAAQNFEENFKKNTNRKNFLKVKVNNADFEIQDGSILIAAITSCTNTSNPNVLIGAGLLAKKACELGLNSKPWVKTSLAPGSQVVTDYLERAGLNTYLDKLGFNLVGYGCTTCIGNSGPLAENISESVSKNNLYAVSVLSGNRNFEGRISPLVKANYLASPPLVVAYAIAGNMQV

SEQ ID NO: 178358 - protein, 190 aa, Unknown
  Bacterial polypetide isolated from the Sargasso Sea
DYNSYGSRRGNHEVMMRGTFANIRIRNEMAPGTEGGFTKLHPEGKIMPVYDAVVEYKKRGTDLVVIGGKEYGTGSSRDWAAKGTKLLGVKVVIAESFERIHRSNLIGMGILPLQFIEGMDRKKLKLLGSELITVLKIEKGIKPSDKVDVDIKYLSGDIKKIKTLCRIDTKNELEYYKNGGILQYVLRNMM

SEQ ID NO: 178359 - protein, 317 aa, Unknown
  Bacterial polypetide isolated from the Sargasso Sea
MRNIAETITSNDLIVSGVLSGNRNFEGRINPFVKANYLASPPLVVAYALAGSTKINLTKDPIGIGKNNKEIYLKDIWPKSKEIKSIINKIINSNLYKKRYKNVFKGDKKWNSVKSPTGLTYKWNEKSTYVQHPPYFENLDFEKNNINDVKNAQILALFGDSVTTDHISPAGSIKEDGPAGIYLTKNKINKVDFNSFGARRGNHEVMMRGTFSNIRIKNEMVKNIEGGITVHHPSNKQMTIYDASVKYQKSNTPLVIFAGKDYGMGSSRDWAAKGTKLLGVKAVIAESFERIHRSNLIGMGVLPFSVMEKRKQTISRS

SEQ ID NO: 178360 - protein, 289 aa, Unknown
  Bacterial polypetide isolated from the Sargasso Sea
VIPEVVGFKLTGSMKEGTTATDLVLTVVEMLRKRGVVGKFVEFYGSALASLSLPDRATLANMAPEYGATCGIFPIDEETIRYLKFTSREPDRVSLVESYAKAQGMWWTPETPEPVFSDVLELDISDVEPSISGPKRPQDRIKLSSSAEAFSAALKDIGAGKGPVNSKAGNFSIDDGDVVIAAITSCTNTSNPSVLMAAGLLARNAVKIGLSVKPWVKTSLAPGSQVVTDYLEDAGVKKDLDALGFNVVGYGCTTCIGNSGPLPDDVTAGIEEGDLTVCSVLSGNRNLKV

SEQ ID NO: 178361 - protein, 279 aa, Unknown
  Bacterial polypetide isolated from the Sargasso Sea
VPCLSGPKRPQDKIELPKVARSFMESLKKDFNIKKTDSLSRVKGKNYSIDHGHVAIAAITSCTNTSNPSVMLGAGILAKKAYNLGLRTKPWVKTSLAPGSKVVTDYLIKSGTQKYLDHLGFQLVGFGCTTCIGNSGPINTDIADTITKNNLIVSGVLSGNRNFEGRINPHVKANYLASPPLVVAYALAGSTKINITKDSIGLGKNGKKIFLKDIWPSSKEIKAMIAKTIDSKLYSSRYKNVFAGDAKWKKVKSTTGLTYEWDKKSTYVKHPPYFEDMNF

SEQ ID NO: 178362 - protein, 287 aa, Unknown
  Bacterial polypetide isolated from the Sargasso Sea
MFIKRYENVSDGPKQWKEIRTEKSSIYNWDENSTYVKKPPFFDALPDKPEGFKEIKDARPLLILGDMVTTDHISPAGNIQKDSPTGEYFMKHQILPKDYNSYGSRRGNHEVMMRGTFANIRIRNEMAPGTEGGFTKLYPEGKIVPIYDAVVEYKKRGTDLVVIGGKEYGTGSSRDWAAKGTKLLGVKAVIAESFERIHRSNLIGMGILPLQFIANVNRTNLNLLGSELITINEIEKGIKPSDNVIIEIKYSSGEIKKIKTLCRIDTKNELEYYKNGGILPYVLRNMI

SEQ ID NO: 178363 - protein, 308 aa, Unknown
  Bacterial polypetide isolated from the Sargasso Sea
VLVGTDSHTTMVNGLGVLGWGVGGIEAEAAMLGQPISMLIPEVVGFKLTGSMKEGTTATDLVLTVVEMLRKRGVVGKFVEFYGSALASLSLPDRATLANMAPEYGATCGIFPIDEETIRYLKFTSREPDRVSLVESYAKAQGMWWTPETPEPVFSDVLELDISDVEPSISGPKRPQDRIKLSSSAEAFKVALKDIGAGKGPVNSKAGDFSIDDGDVVIAAITSCTNTSNPSVLMAAGLLARNAVKIGLSVKPWVKTSLAPGSQVVTDYLEDAGVKKDLDALGFNVVGYGCTTCIGNSGPLPDDVTSGI

SEQ ID NO: 178364 - protein, 298 aa, Unknown
  Bacterial polypetide isolated from the Sargasso Sea
ADRATIANMAPEYGATCGFFPIDDETLKYLKFSGRDQTTVNIVEEYAKAQGLWASDDIEFSDVLTLDMSTIAPTISGPKRPQDKVLLTEASKEFVKSFKEITNKEDFSISKVSNTDYEIKDGSILIAAITSCTNTSNPNVLIGAGLLAKKAVDLGLEVKPWVKTSLAPGSQVVTDYLSKAGLSTYLDKLGFHLVGYGCTTCIGNSGPLADNIVDAIKKENIYAASVLSGNRNFEGRISPHIKANYLASPPLVVAYALAGHMNFDFYKDSLGKDKNGNDIYLRDIWPSNKEIEDILKIS

SEQ ID NO: 178365 - protein, 287 aa, Unknown
  Bacterial polypetide isolated from the Sargasso Sea
AFDNFRIVPPGTGICHQVNLEYLSKVVWSEEFMGDKYLFPDTLVGTDSHTTMVNGLSVLGWGVGGIEAEAGMLGQPISMLIPEVIGFEIKNKMPEGTTATDLVLTVVKMLRDKNVVGKFVEFYGEGLKNLTLADRATIANMAPEYGATCGFFPIDDETLKYLKFSGRDQLTVKIVEEYAKAQGLWSSNDIVFTDTLTLDMSTVVPTISGPKRPQDKVLLTDASTNFQKSFSEITKKKIFSSSKVPNTKYEIKDGSILIAAITSCTNTSNPNVLIGAGLLAKRAVELG

SEQ ID NO: 178366 - protein, 282 aa, Unknown
  Bacterial polypetide isolated from the Sargasso Sea
QVPVDLVIDHSVQVDISGANPEALDLNLDIEYHRNMERYTFLKWGQQSLENFRAVPPSRGIVHQVNLEWIATVARQENGVWLPDSLVGTDSHTTMINGLGVLGWGVGGIEAEAVMLGQPIYMLSPDVVGFRLTGSLNPGVTATDMTLRIVEMLREHGVVGKFVEFFGEGMAVLSLPDRATIANMAPEYGATCGFFPVDGNTLSYMRLSGRNEEDIAGVEAYCKAQGLWYDSNSPEKSYTALLELDLNTVDPALAGPKRPQDRVDLSKMSSHFRESLTHELGH

SEQ ID NO: 178367 - protein, 198 aa, Unknown
  Bacterial polypetide isolated from the Sargasso Sea
MEHQILPKDYNSYGSRRGNHEVMMRGTFANIRIRNEMAPGTEGGFTKLYPEEKVLPVYDAVVEYKKRGTDLVVIGGKEYGTGSSRDWAAKGTKLLGIKVVIAESFERIHRSNLIGMGILPLQFIDDVNRKNLKLIGSELISIINIEKGVNPSDEVTVEIKYASGEIKKIKTLCRIDTKNELEYYKNGGILQYVLRNMI

SEQ ID NO: 178368 - protein, 207 aa, Unknown
  Bacterial polypetide isolated from the Sargasso Sea
MPENIVEAIEKENIYAVSVLSGNRNFEGRISPHIKANYLASPPLVVAYALAGHMELDLYKDPLGKDKNDKDIFLKDIWPSNKEIEDILREALNAKMFIERYSNVSEGPAQWQKIKTEKSSIYNWDEGSTYVKRPPFFDNMPDEPEGFKQIKDARPLLILGDMVTTDHISPAGSIQKESPTGEYFMEHQILPKDYNSYGSRRGNHEVM

SEQ ID NO: 178369 - protein, 313 aa, Unknown
  Bacterial polypetide isolated from the Sargasso Sea
KVVGFEMKSKMPEGTTATDLVLTVVKMLRDKGVVGKFVEFYGEGLKNLTLADRATIANMAPEYGATCGFFPIDDETLKYLKFSGRNDHSVEIVKRYAKEQGLWASQEVEFTDTLSLDMSTIVPTISGPKRPQDKVLLTDASSNFKKIFSEITKKVKPDIYKIENEEFKITDGDILIAAITSCTNTSNPSVLIGAGLLAKKAIEKGLMSKPWVKTSLAPGSQVVTDYLEKAGLNIYLDKLGFNLVGYGCTTCIGNSGPLAENISESIKQNNIYAVSVLSGNRNFEGRISPLIKANYLASPPLVVAYAIAGTMRL

SEQ ID NO: 178370 - protein, 266 aa, Unknown
  Bacterial polypetide isolated from the Sargasso Sea
SGPKRPQDKVLLTNAKTSFEKNFQENAKRKKENTTTVLGEEFQIKDGSIVIAAITSCTNTSNPNVLIGAGLLAKNAIEKGLQTKPWVKTSLAPGSQVVTDYLNKSGLNKYLDELGFNLVGYGCTTCIGNSGPLPENISNAIKENDIYAVSVLSGNRNFEGRISPLVKANYLASPPLVVAYSLAGSMQVDLYKDPLGKDKNGKDIFLKDIWPSNKEIEDVLLESLNPEMFRQRYSNVLQGPDQWQKIKTEKTSIYNWDDNSTYVKKP

SEQ ID NO: 178371 - protein, 320 aa, Unknown
  Bacterial polypetide isolated from the Sargasso Sea
MKNKLPEGTTATDLVLTVVKMLRDKGVVGKFVEFYGEGLKNLTLADRATIANMAPEYGATCGFFPIDGETLKYLEFSGRSTENIQIVEQYAKEQNLWASDDIVFTDTLSLDMSTVVPTISGPKRPQDKVLLTDASKNFIKVFKDVCKKTEPTIAKVEKADFEIKDGDILIAAITSCTNTSNPNVLIGAGLLAKNAINKGLTVKPWVKTSLAPGSQVVTDYLDKAGLSKYLDKLGFNLVGYGCTTCIGNSGPLPENITDAVKENNLYSVSVLSGNRNFEGRISPIVKANYLASPPLVVAYAIAGSMRMDLYKDPLGKDSDG

SEQ ID NO: 178372 - protein, 240 aa, Unknown
  Bacterial polypetide isolated from the Sargasso Sea
AYRPARILLQDYTGIPAVADLAAMRDAVKSKNKDPKKINPLSTVDLVIDHSVMVDNYAKKDSFKKNVEREFDRNGERYSFLKWGQNAFNNFRVVPPGTGICHQVNLEYLSKVVWSSKIEGDMFAYPDTLVGTDSHTTMVNGLSVLGWGVGGIEAEAAMLGQPISMLIPEVIGFQINGKLSEGTTASDLVLTIVEMLRKKGVVGKFVEFYGEGLKNLSLADRATIANMAPEYGATCGFFPN

SEQ ID NO: 178373 - protein, 284 aa, Unknown
  Bacterial polypetide isolated from the Sargasso Sea
VLLTEAKNSYEKSFKKITNRKVENTAKVSGENFKLKDGSIVIAAITSCTNTSNPNVLIGAGLLAKKAIEKGLKTKPWVKTSLAPGSQVVTDYLNKSGLNKYLDKLGFNLVGYGCTTCIGNSGPLPENISDTIKENDIYAVSVLSGNRNFEGRISPLVKANYLASPPLVVAYSLAGSMKTDLYNDSIGKDKDGDDVYLKDIWPSNKEIEDVLLKSLNAEMFRQRYANVSKGPEQWQKIKTKESSIYDWDDNSTYVKKPPFFENLSPKPEGFKPIKDARPLLILGE

SEQ ID NO: 178374 - protein, 304 aa, Unknown
  Bacterial polypetide isolated from the Sargasso Sea
SYKTLKSININDNNYKYYSLKEAEKNGLTNISKLPKSLKVLLENLLRYEDGLSVTKDQIDAIKYWLKEKKSKTEIAYRPARVLLQDYTGIPAVADLAAMREAVKKKNKDPNTINPLSKVDLVIDHSVQVDKFAKEDSFEKNVEIEFKRNGERYSFLKWGQQAFNNFRIVPPGTGICHQVNLEYLSKVVWCEKYEEDNYLFPDTLVGTDSHTTMVNGLSVLGWGVGGIEAEAGMLGQPISMLIPEVIGFEFTNKMPEGTTATDLVLTVVKMLRDKGVVGKFVEFYGEGLKNFNSSRQSNHCKYGS

SEQ ID NO: 178375 - protein, 209 aa, Unknown
  Bacterial polypetide isolated from the Sargasso Sea
YQKDSPTGEYFMQHQVLPKDYNSYGSRRGNHEVMMRGTFANIRIRNEMAPGTEGGFTKLYPEGKVVPIYDAVVEYKKRGTDLIVIGGKEYGTGSSRDWAAKGTKLLGIKAVIAESFERIHRSNLIGMGILPLQFMSGVDRKKLDLKGSELISILKIENGINPSDKIEVEIKYQSGDIKKTQTVCRIDTMNELEYYKNGGILQFVLRNMM

SEQ ID NO: 178376 - protein, 286 aa, Unknown
  Bacterial polypetide isolated from the Sargasso Sea
NFRIVPPGTGICHQVNLEYLSKVVWTEEFEGEKYLFPDTLVGTDSHTTMVNGLSVLGWGVGGIEAEAGMLGQPISMLIPEVIGFEVKNKMPEGTTATDLVLTVVKMLRDKGVVGKFVEFYGVGLKNLTLADRATIANMAPEYGATCGFFPIDDETLKYLKFSGRDQHTVDIVEKYAKEQGLWASNEIEFTDTISLDMSTVVPTISGPKRPQDKVLLTEAATSFKKVFEEATSRKNQSISKVSDTDYEIKDGSILIAAITSCTNTSNPNVLIGAGLLAKKAVELGLK

SEQ ID NO: 178377 - protein, 297 aa, Unknown
  Bacterial polypetide isolated from the Sargasso Sea
PKKINPLSRVDLVIDHSVMVDSYKNKNALKENVRKEFDRNKERYEFLKWGQSSFDNFYLVPPGAGICHQVNLENIAKTIWLKEINNQNYLFPDSVVGTDSHTTMVNSLSVLGWGVGGIEAEAAMLGQAISMNIPDVIGFELKGSLKEGITATDLVLSITKILREKGVVGKFVEFYGKGLKNLSLADRATISNMAPEYGATCGFFPTDEETINYLKLTGKETNHLNIVEKYSKQQTLWADESYAPDFSDKISLDLDAIEPTLAGPKRPQDKIPLKEVPNEFSKIDNKKNINENKLNTG

SEQ ID NO: 178378 - protein, 284 aa, Unknown
  Bacterial polypetide isolated from the Sargasso Sea
MSKTLRDKCCVSLTVAGKKYYYYSLSELARFYPLLEKLPFSLKVLLENLLRHEDGSSVKIADIEALATWAEKEQKNEISFRPSRILLQDFTGVPALVDLAAMRDAMETIGGDPEKINPLSPVDLVIDHSVMVDHAGGDDAAAKNVALEFFRNQERYEFLRWGAGAFDNFRVVPPGTGICHQVNLEYLSQTVWTREENGKTYAYPDSVVGTDSHTTMVNGLAVLGWGVGGIEAEAAMLGQPISMLVPDVVGFRLEGKLPEGATATDLVLTIVESLRKRGVVGKFV

SEQ ID NO: 178379 - protein, 273 aa, Unknown
  Bacterial polypetide isolated from the Sargasso Sea
LIRLSYLGSPPLVVAYALAGTVDIDFYSDPIGKSQSGDDVYLKDIWPTNKEISETVYSSIKSDTFSSRYKNIFTGDDRWESISVPEGSIYDWSPDSTYIQKPGFFDEFSIDLPPIEDIKDARVLAYLGDSITTDHISPAGSFTEETPAGIYLNNKGVNKKDFNSYGSRRGNHEVMMRGTFANIRIKNKILDNVEGGFTKFFDNDQIMSIYDAAMKYKETKTQLIVIAGKEYGTGSSRDWAAKGSMLLGVKAVLAESFERIHRSNLVGMGVLPL

SEQ ID NO: 178380 - protein, 306 aa, Unknown
  Bacterial polypetide isolated from the Sargasso Sea
MVDNYAKKDSFSKNVQREFDRNGERYSFLKWGQSAFNNFRVVPPGTGICHQVNLEYLSKVVWSSEADGQLFAYPDTLVGTDSHTTMVNGLSVLGWGVGGIEAEAAMLGQPISMLIPEVIGFEINGKLTEGTTASDLVLTIVQMLRKKGVVGKFVEFFGDGLKNLSLADRATIANMAPEYGATCGFFPIDDETIKYLKFSGRDQNTISLVEKYSKEQGLWSNQNDQIEFTDTISLDLNSVVPSISGPKRPQDKVLLTNAAKDFDKAFKENTKRKVPLEAKVNNKEFKIKDGDIVIGAITSLYNTSNP

SEQ ID NO: 178381 - protein, 311 aa, Unknown
  Bacterial polypetide isolated from the Sargasso Sea
LEFSGRSKENIQIVEKYAKEQNLWASEDVVFTDTLSLDMSTVVPTISGPKRPQDKVLLTEASKNFIKVFEEVCKKTDPTVAKVKDTDFEIKDGDILIAAITSCTNTSNPNVLIGAGLLAKNAIEKGLNVKPWVKTSLAPGSQVVTDYLDKAGLSKYLDELGFNLVGYGCTTCIGNSGPLPDNITDAVKENNLYAVSVLSGNRNFEGRISPLVKANYLASPPLVVAYAIAGSMRMDLYKDPLGKDDKGQDIYLKDIWPSNKEIEDTLKQSLNPEMFVNRYSNVSEGPEQWQKIKVNKGSIYNWEENSTYVKK

SEQ ID NO: 178382 - protein, 304 aa, Unknown
  Bacterial polypetide isolated from the Sargasso Sea
EGLKNLTLADRATIANMAPEYGATCGFFPIDDETLKYLEFSGRSKENTQIVEKYAKEQNLWASEDVVFTDTLSLDMSTVVPTISGPKRPQDKVLLTEASKNFIKVFEDICKKTDPTIAKVKDTDFEIKDGDILIAAITSCTNTSNPNVLIGAGLLAKNAIEKGLNVKPWVKTSLAPGSQVVTDYLDKAGLSKYLDELGFNLVGYGCTTCIGNSGPLPDNITDAVKENNLYAVSVLSGNRNFEGRISPLVKANYLASPPLVVAYAIAGSMRMDLYKDPLGKDSKGQDVYLKDIWPSNKEIEDTLK

SEQ ID NO: 178383 - protein, 254 aa, Unknown
  Bacterial polypetide isolated from the Sargasso Sea
CHQVNLEYLSKVVWSSKINEEIFAYPDTLVGTDSHTTMVNGLSVLGWGVGGIEAEAAMLGQPISMLIPEVIGFKINGKLSEGTTASDLVLTIVEMLRKKGVVGKFVEFYGQGLKNLTLADRATIANMAPEYGATCGFFPIDEETIKYLKFSGRDKDTISLVEKYSKEQGLWASDEIDFTDTISLDLSSVVPSISGPKRPQDKVLLTDASKSFDKAFKENTNRKVPLEAKVDKKDFKIKDGDIVIGAITSCTKYV

SEQ ID NO: 178384 - protein, 291 aa, Unknown
  Bacterial polypetide isolated from the Sargasso Sea
NKKSNTEIAYRPARTLLQDYTGIPAIADLAAMRDAVKDKNKNPDKINPLSTVDLVIDHSVMVDEYASGKSFNKNVEREFSRNGERYSFLKWGQKAFDNFRVVPPGTGICHQVNLEYLSKVVWSSKSRNDLYAYPDTLVGTDSHTTMVNGLSVLGWGVGGIEAEAAMLGQPISMLIPEVIGVELKGKLKEGTTATDLVLIIVEMLRKKGVVGKFVEFYGEGLKNLTLADRATIANMAPEYGATCGFFPIDDETLKYLNLSGRDQETIALVEKYSKEQGLWASNDVVFTDTLH

SEQ ID NO: 178385 - protein, 248 aa, Unknown
  Bacterial polypetide isolated from the Sargasso Sea
FFDNLSDRPEGFKEIKNARPLLILGDTVTTDHISPAGSIKKDSPTGDYFMKHQVQQKDFNSYGARRGNHEVMLRGTFGNIRIRNEMAPGTEGGFTVLQPDGKQMSVYEAAMEYKKRGNSLVVIAGKEYGTGSSRDWAAKGTKLLGVKAVIAESFERIHRSNLVGMGILPLQFEEGFDRKKLNIKGTELFTIIDIEKGINPRAEVSCEIKYADGSSKSIKLLSRIDTENEIEYYKNGGILQYVLRNMLN

SEQ ID NO: 178386 - protein, 281 aa, Unknown
  Bacterial polypetide isolated from the Sargasso Sea
KTSLAPGSQVVTDYLEKAGLNKYLEKLGFHLVGYGCTTCIGNSGPLKKKISEAIQKGNLYSVSVLSGNRNFEGRINPDVKASYLASPPLVVAYALAGSMNIDLYNEPLGKDNNGNNIFLKDIWPTNKEIEELILTSISAEMFAKRYSKVSEGSEEWNKIKTTTSSIYSWDDSSTYVKKPPFFENMSDEPKGFEKIANARPLLILGDTVTTDHISPAGSIKKDSPTGNYFMEHQVQQKDFNSFGARRGNHEVMVRGAFGNIRIKNEMAPGTEGGMTKIYPKE

SEQ ID NO: 178387 - protein, 282 aa, Unknown
  Bacterial polypetide isolated from the Sargasso Sea
LIGAGLLAKKAVELGLDVKPWVKTSLALGSKVVTDYLEKAGLNTYLDQLGFNLVGYGCTTCIGNSGPLSENIVDAIQKENLYAVSVLSGNRNFEGRISPHIKANYLASPPLVVAYALAGHMEFDLFKDSFGKDKNGKDVFLKDIWPSNKEIEDTLKNSLSADMFVKRYSNVSEGPKQWQEIKTEKSSIYNWDENSTYVKKPPFFENLSDEPEGFKEIKNARPLLILGDTVTTDHISPAGNIQKDSPTGEYFMNYQILPKDYNSYGSRRGNHRGDDERNIANI

SEQ ID NO: 178388 - protein, 311 aa, Unknown
  Bacterial polypetide isolated from the Sargasso Sea
LRYEDDLSVTKNQIDALKNWLDTKKSSTEIAYRPARVLLQDYTGIPAVADLAAMREAVKEKNIDPNSINPLSTVDLVIDHSVQVDQSSKADSFEKNVNIEFKRNAERYSFLKWGQDAFNNFRIVPPGTGICHQVNLEYLSKVVWCEKFKDEDYLFPDTLVGTDSHTTMVNGLSVLGWGVGGIEAEAGMLGQPISMLIPEVIGFEVKNKMPEGTTATDLVLTIVKMLRDKGVVGKFVEFYGEGLKNLTLADRATIANMAPEYGATCGFFPIDNETLKYLQFSGRDEEIISLVENTQKIKGCGRAKILSLLIQ

SEQ ID NO: 178389 - protein, 325 aa, Unknown
  Bacterial polypetide isolated from the Sargasso Sea
FDISKAKISHLPYSLRVLLENYVRNNKAISKDVIGKFEAWNGSVKDQTEITFFPSRVIMQDFTGVPAVVDLASMRDAVKALNGDPSLINPQCQTDLVIDHSVMVDHYGSSDSKDLNTKLEYKRNIERYRLLKWGQGAFKNLRIVPPNNGIIHQINIEYISQVIFNKNNILYPDTVVGTDSHTTMVNGLGVLGWGVGGIEAEAAMLGQPIPMLLPEVIGFELSGKLEKSTTATDLVLTIVEQLRKANVVGKFVEFYGDALNSLSIADRCTIANMAPEYGATCGFFPIDDMTLKYMHTTGKDADQIKIIESYSKRVGLFRESSEKII

SEQ ID NO: 178390 - protein, 291 aa, Unknown
  Bacterial polypetide isolated from the Sargasso Sea
FPIDHETLKYLKTSGRNNDEINIVESYAKEQGLWTSDNIEFSETISLDMSTVVPTISGPKRPQDKVFLNEASTEFKKAFRSTTGKNKNSISKVNGAEFEIRDGSILIAAITSCTNTSNPNVLIGAGLLAKKAIEKGLKTKPWVKTSLAPGSQVVTDYLEKSGLNKYLDELGFNLVGYGCTTCIGNSGPLPENIVEAIEKENIYAVSVLSGNRNFEGRISPHIKANYLASPPLVVAYALAGHMEFDFYNNSLGKDENGKEIYLKDIWPSNKEIEETLKNSLNADMFIKRYSN

SEQ ID NO: 178391 - protein, 249 aa, Unknown
  Bacterial polypetide isolated from the Sargasso Sea
FDTQKKIIIDKREYKYFDLNTLSQIYNFELPKIPNSIKIIIENLLRNEDGEAVTREMIDNLCNKISEPLENFEISFSPARVLMQDFTGVPAVADLAAMREALRKKGINPSNINPLSRVDLVIDHSVMVDYFGNDSAFEDNVKKEFDRNKERYEFLKWGQKTFDNFYLVPPGAGICHQVNLENIAKTIWSKKIKNESYLYPDSVVGTDSHTTMVNALSVLGWGVGGIEAEAAMLGQPISMNIPKVVGFKL

SEQ ID NO: 178392 - protein, 314 aa, Unknown
  Bacterial polypetide isolated from the Sargasso Sea
MKPGTKNSYNSLSEIIINSKKYKYYSLSKAESNGLKGISKLPKSLKVLLENLLRYEDDLSVTKNQIDALKNWLETKKSSTEIAYRPARVLLQDYTGIPAVADLAAMREAVKEKNIDPNSINPLSTVDLVIDHSVQVDQSSKADSFEKNVNIEFKRNAERYSFLKWGQDAFNNFRIVPPGTGICHQVNLEYLSKVVWCEKFRNEDYLFPDTLVGTDSHTTMVNGLSVLGWGVGGIEAEAGMLGQPISMLIPEVIGFEVKNKMPEGTTATDLVLTIVKMLRDKGVVGKFVEFYGEGLKNLTLADRATIANRLRIWG

SEQ ID NO: 178393 - protein, 274 aa, Unknown
  Bacterial polypetide isolated from the Sargasso Sea
NAEMFIQRYSNISEGPTQWQKIKTDESSIYKWDERSTYVKKPPFFDKLSDEPEGFKEIKDARPLLILGDMVTTDHISPAGNIQKNSPTGEYFMEHQILPKDYNSYGSRRGNHEVMMRGTFANIRIRNEIAPGTEGGFTKLYPEEKIMPVYDAVVEYKKRGTDLVVIGGKEYGTGSSRDWAAKGTKLLGVKAVLAESFERIHRSNLIGMGILPLQFLEKQNRKNLNFKGSELISIIDIEKGINPGENVEVEIKFQSGDIKKIKMLSRIDTKNELE

SEQ ID NO: 178394 - protein, 214 aa, Unknown
  Bacterial polypetide isolated from the Sargasso Sea
YSLNTLVGTDSHTTMVNGLSVLGWGVGGIEAEAGMLGQPISMLIPEVVGFEVKNKLPEGTTATDLVLTVVKMLRDKGVVGKFVEFYGDGLKNLTLADRATIANMAPEYGATCGFFPIDDETLKYLEFSGRDKDQVQIVKQYAKEQGLWVSSEIEFSDTLTLDMLTVVPTISGPKRPQDKVLLTDASQNFKENFKKYTNRDDFLKAKVNNSDFEI

SEQ ID NO: 178395 - protein, 323 aa, Unknown
  Bacterial polypetide isolated from the Sargasso Sea
VAYAIAGSMKIDLYKEPLGKNKDGNNVYLKDIWPTNKEIEETLRVSLNAEMFVKRYSDVSKGPIQWQNIKTKKSSIYDWEDNSTYVKKPPFFDNLSIEPEGFKEIKDARPLLILGDSVTTDHISPAGTIQKESPTGDYFMEHQILPKDYNSYGSRRGNHEVMMRGTFANIRIKNEMAPGTEGGYTTLYPEGKVMPVFEAVQEYKKRGTDLVVIGGKEYGTGSSRDWAAKGTKLLGIKVVIAESFERIHRSNLIGMGVLPLQFTNGTNRLNLNLQGSELISINNIEKGFYPQDQVELEIKYLSGEIKKVKTLCRIDTNNETGVL

SEQ ID NO: 178396 - protein, 186 aa, Unknown
  Bacterial polypetide isolated from the Sargasso Sea
YGARRGNHEVMVRGAFENIRIRNEIASGTEGGFTKLYPEGKVMSIYEAAMEYKKRGNDLVVIAGKEYGAGSSRDWAAKGTKLLGIKTVIAESFERIHRSNLIGMGILPLQFKDGFNRKKLNLKGSELITIIGIEKNITPGQEVECEIKYADGVAKKINLLSRIDTANEVEYYKNDGILKYVLRSML

SEQ ID NO: 178397 - protein, 245 aa, Unknown
  Bacterial polypetide isolated from the Sargasso Sea
KGSIYNWEENSTYVKKPPFFENLSDKPEGFKEIKHARPLLILGDMVTTDHISPAGSIQKESPTGNYFMKHQILPKDYNSYGSRRGNHEVMMRGTFANIRIKNEMAPGTEGGFTKLYPDEKVMPIYDAVVEYKKRGVDLVVIGGKEYGTGSSRDWAAKGTKLLGIKAVIAESFERIHRSNLIGMGILPLQFIESMNRQNLSLKGSELISILGLEKGINPGDQLNVEIKYATGDIKKIKMLCRIDTK

SEQ ID NO: 178398 - protein, 210 aa, Unknown
  Bacterial polypetide isolated from the Sargasso Sea
NIQKESPTGEYFMKHQILPKDYNSYGSRRGNHEVMMRGTFANIRIKNEMAPGTEGGFTKLYPEEKIMPIYDAVVEYKKRGTDLIVIGGKEYGTGSSRDWAAKGTKLLGVKAVIAESFERIHRSNLIGMGILPLQFINDVNRKNLKLIGSELISINGIENGLNPSDHLTVEIKYLSGEIKKIKTLCRIDTKNELEYYKNGGILQYVLRNMI

SEQ ID NO: 178399 - protein, 250 aa, Unknown
  Bacterial polypetide isolated from the Sargasso Sea
LDMGTVEASLAGPKRPQDRVALPNVGQAFSDFLDLQFKPTSKEEGRLESEGGGGVAVGNADLVGEADYEYEGNTYRLKNGAVVIAAITSCTNTSNPSVMMAAGLVAKKAVEKGLTRKPWVKSSLAPGSKVVTDYYKAAGLTQYLDKLGFDLVGYGCTTCIGNSGPLPEPIEKAIQKADLTVASVLSGNRNFEGRVHPLVKTNWLASPPLVVAYALAGTVRIDISSEPLGNDQQGNPVYLKDIWPSSQEIA

SEQ ID NO: 178400 - protein, 262 aa, Unknown
  Bacterial polypetide isolated from the Sargasso Sea
SQVVTDYLAKAGLNTYLDKLGFNLVGYGCTTCIGNSGPLPENIVNAIQKENIYAVSVLSGNRNFEGRISPHIKANYLASPPLVVAYALAGHMEFDLYKDALGKDKEGNSIYLKDIWPTNEEIEDTLKQSLNAEMFIKRYSNVSEGPSQWQKIKTEESSIYNWDEGSTYVKKPPFFDKLSDQPEGFKPIKDARPLLILGDMVTTDHISPAGNIQKDSPTGEYFMEHQILPKDYNSYGSRRGNHEVMMRGTFANIRIRNEMAPG

SEQ ID NO: 178401 - protein, 323 aa, Unknown
  Bacterial polypetide isolated from the Sargasso Sea
LVLTVTKMMRDYGVVAKFTEFFGPGVANLTLEDQATLSNMSPEFGSTCAFFPVDDDTIKYLSNTGRDADRIALVEAYAKAQGYWRPDMADPVFTGTIELDLSSVVPSISGPKRPQDQVLLSEADTKFAEAMVIEFGTAADDATAIQVEGEDFSVTHGDVFIAAITSCTNTSNPSVLIAAGLVARKAAALGLNRKPWVKTSFAPGSQVVTDYLDKANLTQDLDALGFNLVGYGCTTCIGNSGPLQPEISKAIADGDLVSCSVLSGNRNFEGRIGPDLKANYLASPPLVVAYAIAGSLKINITKEPLGQDKDGKDVFLKDIWPTS

SEQ ID NO: 178402 - protein, 226 aa, Unknown
  Bacterial polypetide isolated from the Sargasso Sea
MILGDMVTTDHISPAGSIQKNSPTGEYFMKHQILPKDYNSYGSRRGNHEVMMRGTFANIRIRNEMAPGTEGGFTKLYPEGKVLSVYDAVVEYKNRGTDLVVIGGKEYGTGSSRDWAAKGTKLLGIKAVIAESFERIHRSNLIGMGVLPLQFVNEVNRKNLNLIGSELISIIDIEKGINPSDELTVEIKYASGEMKKVKTLCRIDTKNELEYYKNGGILQYVLRNMI

SEQ ID NO: 178403 - protein, 322 aa, Unknown
  Bacterial polypetide isolated from the Sargasso Sea
FSGRDQLTVKIVEDYAKAQGLWASSEMEFTDTLILDMSTIVPTISGPKRPQDKVLLTDASNNFKKSFTEITNKKDFSSSKVNNTDFEIKDGSILIAAITSCTNTSNPNVLIGAGLLAKKAVELGLEVKPWVKTSLAPGSQVVTDYLQKAGLNTYLDKLGFNLVGYGCTTCIGNSGPLAENIVEAIQKENIYAVSVLSGNRNFEGRISPHIKANYLASPPLVVAYALAGHMNFDLYKDSFGKDQNGKEIYLKGIWPSNKEIEETLKKSLNAEMFIKRYSNVSEGPKQWQQIETVKSDIYNWDTSSTYVKKPPFFDNLPEKPEG

SEQ ID NO: 178404 - protein, 268 aa, Unknown
  Bacterial polypetide isolated from the Sargasso Sea
ISGPKRPQDKVLLTEASQNFKKVLEQIGKKTKISTSKVKNEEFEIKDGDILIAAITSCTNTSNPNVLIGAGLLAKKAVEKGLTTKPWVKTSLAPGSKVVTDYLEKAGLNKYLDQLGFNLVGYGCTTCIGNSGPLKKDISDAVKKENIYAASILSGNRNFEGRISPLVKANYLASPPLVVAYALAGTMSFDLYKDSLGKDNEGKNVYLKDIWPSNKEIDETLKNSLNADMFVRRYSNISEGPEQWQKIKTEPTSIYNWEESSTYVKKPP

SEQ ID NO: 178405 - protein, 297 aa, Unknown
  Bacterial polypetide isolated from the Sargasso Sea
SKTEIAFRPARVLMQDYTGIPAVADLAAMRDAVKSKKKDPKKINPLSTVDLVIDHSVMVDTYASKDSFKKNVEKEFSRNGERYSFLKWGQQAFDNFRVVPPGTGICHQVNLEYLSKVVWSSDNFAYPDTLVGTDSHTTMVNGLSVLGWGVGGIEAEAAMLGQPISMLIPDVVGFKIQNKLPEGTTATDLVLTIVQILRNEGVVGKFVEFYGDGLKNLSLADRATIANMAPEYGATCGFFPIDEETLKYLKFSGRDQHTISLVEKYSKEQGLWADENISFTKILDLDLSKVVPSISGP

SEQ ID NO: 178406 - protein, 259 aa, Unknown
  Bacterial polypetide isolated from the Sargasso Sea
QESSTYVKRPPFFDNLPDKPEGFKKIKDARPLLILGDTVTTDHISPAGSIKKDSPTGDYFMKHQVQQKDFNSYGARRGNHEVMLRGTFGNIRIRNEMAPGTEGGFTILQPDGKQMSVFEASEEYKKRGNSLVVIAGKEYGTGSSRDWAAKGTKLLGIKAVIAESFERIHRSNLVGMGILPLEFKTGFDRKKLNIKGTELFTIIDIEKGINPRAEVSCEIKYSDGSSKTIKLLSRIDTENEIEYYKNGGILQYVLRNMIN

SEQ ID NO: 178407 - protein, 293 aa, Unknown
  Bacterial polypetide isolated from the Sargasso Sea
NFEGRISPHIKANYLASPPLVVAYSLAGHMSFDLYKDSFGKDKNGKEIYLKDIWPSNKEIEETLKTSLNAEMFIKRYSNVLQGPKQWQEIKTTKSSIYNWDESSTYVKKPPFFDNLSDQPEGFKAIKDARPLLILGDMVTTDHISPAGNIQKESPTGEYFMKHQILPKDYNSYGSRRGNHEVMMRGTFANIRIRNEIAPGTEGGFTKLYPEEKVMPIYDAVVEYKKRGTDLVVIGGKEYGTGSSRDWAAKGTKLLGVKVVIAESFERIHRSNLIGMGILPLQFKDNLNRTNLK

SEQ ID NO: 178408 - protein, 261 aa, Unknown
  Bacterial polypetide isolated from the Sargasso Sea
MNFKSKNSFQSLDKLEVSGKSYYFYNLSKAEKNGLKDINKLPKSIKVLLENLLRFEDNVTVDRKQIESIAGWLKTKSSKMEIAYRPARILLQDYTGIPAVADLAAMRDAVKSKNKDPKKINPLSAVDLVIDHSVQVDNYANKDSFTKNVKKEFDRNGERYSFLKWGQNAFNNFRVVPPGTGICHQVNLEYLSKVVWSTDIDGKTFAYPDTLVGTDSHTTMVNGLSVLGWGVGGIEAEAAMLGQPISMLIPEVIGFEIKGKL

SEQ ID NO: 178409 - protein, 295 aa, Unknown
  Bacterial polypetide isolated from the Sargasso Sea
MRDAVKSKNKDPNKINPLSTVDLVIDHSVMVDNYAKNDSFSKNVKREFDRNGERYSFLKWGQNAFNNFRVVPPGTGICHQVNLEYLSKVVWSTGTGDDIYAYPDTLVGTDSHTTMVNGLSVLGWGVGGIEAEAAMLGQPISMLIPEVIGFEIIGKLKEGTTASDLVLTIVQMLRKKGVVGKFVEFYGEGLKNLSLADRATIANMAPEYGATCGFFPVDEETIKYLKFSGRDKETISLVEKYSKEQGLWSSKEIEFTDKVSLNLNSVVPSISGPKRPPDKVLLTEASKNFDKVFKE

SEQ ID NO: 178410 - protein, 320 aa, Unknown
  Bacterial polypetide isolated from the Sargasso Sea
MKNKLPEGTTATDLVLTVVKMLRDKGVVGKFVEFYGEGLKNLTLADRATIANMAPEYGATCGFFPIDEETLKYLEFSGRSKENIQIVEKYAKEQNLWASEDIVFTDTLSLDMSTVVPTISGPKRPQDKVLLTEASKNFIKVFEDICKKTDPTVAKVKDTDFEIKDGDILIAAITSCTNTSNPNVLIGAGLLAKNAIEKGLNVKPWVKTSLAPGSQVVTDYLDKAGLSKYLDELGFNLVGYGCTTCIGNSGPLPDNITDAVKENNLYAVSVLSGNRNFEGRISPLVKANYLASPPLVVAYAIAGSMRMDLYKDPIGKNSKG

SEQ ID NO: 178411 - protein, 216 aa, Unknown
  Bacterial polypetide isolated from the Sargasso Sea
TKREKPIQAEVSGADFKITDGDIVIAAITSCTNTSNPSVMIGAGILAKKAIERGLKIKPWVKTSLAPGSKVVTDYLKKAGLNKYLDELGFNLVGYGCTTCIGNSGPLNKNISDAIHKQNLYAVSVLSGNRNFEGRISPDVKANYLASPPLVVAFALAGNMNFDMYKNSLGTDKDGKEVFLKDIWPSNKEIEDIMLKSINAEMFIDRYSNVSEGPKE

SEQ ID NO: 178412 - protein, 278 aa, Unknown
  Bacterial polypetide isolated from the Sargasso Sea
CDLDSLPFTIRLLLEAALRKCDGFLVTREDVERIASWSPSMTPEEIPFSPSRVILQDFTGVPAVVDIAALRDAMVELGGDPEKVNPQVPVDLVIDHSVQVDVSGLFPDARERNLEIEYQRNMERYEFLKWGQKSLDNFRAVPPGRGIVHQVNLEWIASVAREENGVWLPDTLVGTDSHTTMINGLGVLGWGVGGIEAEAVMLGQPIYMLLPEVCGFELTGSLRPGVTATDMTLRIVQMLREHGVVGKFVEFHGSGLANLSLPDRATIANMAPEYGATW

SEQ ID NO: 178413 - protein, 184 aa, Unknown
  Bacterial polypetide isolated from the Sargasso Sea
ARRGNHEVMMRGTFANIRIRNEMAPGTEGGFTTLYPEKKVMPIYDAVVEYKKRGTDLVVIGGKEYGTGSSRDWAAKGTKLLGVKTVIAESFERIHRSNLIGMGILPLQFIDNIDRKNLKLIGSELISIINLENGINPSEKVKVEIKYASGEIKTIQALCRIDTKNELEYYKNGGILQYVLRNMI

SEQ ID NO: 178414 - protein, 259 aa, Unknown
  Bacterial polypetide isolated from the Sargasso Sea
KENVDIEFDRNFERYSFLKWGQQAFNNFRIVPPGTGICHQVNLEYLSKVVWNEKFEDKEYLFPDTLVGTDSHTTMVNGLSVLGWGVGGIEAEAGMLGQPISMLIPEVIGFEMKNKLPEGTTATDLVLTVVKMLRDKGVVGKFVEFYGEGLKNLTLADRATIANMAPEYGATCGFFPIDDETLKYLEFSGRSKENIQIVEKYAKEQNLWASEDVVFTDTLSLDMSTVVPTISGPKRPQDKVLLTEASKNFIKVFEEVCKK

SEQ ID NO: 178415 - protein, 257 aa, Unknown
  Bacterial polypetide isolated from the Sargasso Sea
RYSFLKWGQQAFNNFRIVPPGTGICHQVNLEYLSKVVWSEKYKGDEYLFPDTLVGTDSHTTMVNGLSVLGWGVGGIEAEAGMLGQPISMLIPEVIGFELKNKMPEGTTATDLVLTVVKILRDKGVVGKFVEFYGNGLKNLSLADRATIANMAPEYGATCGFFPIDDETLKYLKFSGRDDNTLSIVEKYAKEQGLWANNNIEFTDTVSLDMSSIVPTISGPKRPQDKVLLTEASSGFAKVFENITGRKEKYISKVSEK

SEQ ID NO: 178416 - protein, 191 aa, Unknown
  Bacterial polypetide isolated from the Sargasso Sea
GSQVVTDYLEKAGLNKYLDELGFNLVGYGCTTCIGNSGPLNKNISDAINEKDLYAVSVLSGNRNFEGRINPDVKANYLASPPLVVAYALAGNMNFDLYKTSLGKDKAGKDVFLKDIWPSNKEIEDIMLTSLNADMFKKRYSNVSEGPKEWREINTVDSDIYNWEQNSTYVKRPPFFDNLPDKPEGFKAIND

SEQ ID NO: 178417 - protein, 305 aa, Unknown
  Bacterial polypetide isolated from the Sargasso Sea
RYEFLKWGQSSFDNFYLVPPGAGICHQVNLENIAKTIWLKEIDNQNYLFPDSVVGTDSHTTMINSLSVLGWGVGGIEAEAAMLGQAISMNIPDVIGFELNGSLKEGITATDLVLSITKILRDKGVVGKFVEFYGRGLKNLSLADRATISNMAPEYGATCGFFPIDEETINYLELTGKEREHLNIVKEYSKKQTLWADENYSPDFSDKILLDLDTVEPTLAGPKRPQDKILLKEVPEEFNKIDSNQSINKNKLNTGDIVIAAITSCTNTSNPNVMIAAGLVAKKAINLGLEEKSWVKTSLAPGSKV

SEQ ID NO: 178418 - protein, 282 aa, Unknown
  Bacterial polypetide isolated from the Sargasso Sea
SRSFFLPEALNLNIEKEFERNTERYQLLKWAQNAFDNFKIVPPGTGIVHQVNLEYLAEVILNNSDDQTPVAFPDTCVGTDSHTTMINGLGVLGWGVGGIEAEAVMLGQPYYMVVPEVVGVRLTGKLPEGATATDLVLSIVEMLRKVGVVEKFVEFYGPGLKDLPLADRATIANMAPEYGATCGFFPIDHQTIKYLRDTGRDAETCDLVEEYSKINNFFYDEVNEPSYTTELNFDISSVSPSMAGPKRPQDNVTLQNVANNFKDSFKISSSKNIISIDDQKVE

SEQ ID NO: 178419 - protein, 283 aa, Unknown
  Bacterial polypetide isolated from the Sargasso Sea
MRDAVKDKNKNPDKINPLSTVDLVIDHSVMVDEYASGKSFNQNVEREFSRNGERYSFLKWGQKAFNNFRVVPPGTGICHQVNLEYLSKVVWSSKSGNDLYAYPDTLVGTDSHTTMVNGLSVLGWGVGGIEAEAAMLGQPISMLIPEVVGVELKGKLKEGTTATDLVLVIVEMLRKKGVVGKFVEFYGEGLKNLTLADRATIANMAPEYGATCGFFPVDDETLKYLKLSGRDKATIDLVEKYSKEQGLWASNDVVFTDTLSLDVSSVVTSISGPKRPQDKVLLT

SEQ ID NO: 178420 - protein, 270 aa, Unknown
  Bacterial polypetide isolated from the Sargasso Sea
MKSLDTFKTKSKININDQIYTYFDLNKLANHFDFSLSSVPRSLKILLENLIRNEDGKVVTRDIIDLICNNIHKKEKLLEISFFPTRVLMQDFTGVPAIADLAAMRDVLKSKNIDPKKVNPVSRVDLVIDHSLMVDLFGNSSAHKDNVILEFSRNQERYEFLKWGQNSFKNFYLVPPGAGICHQVNLENIAKTVWIDSFEGGNYIYPDSVVGTDSHTTMVNALSVLGWGVGGIEAEAAILGEPISLNIPKVLGFNIYGSLNEGVTATDLVL

SEQ ID NO: 178421 - protein, 195 aa, Unknown
  Bacterial polypetide isolated from the Sargasso Sea
SAVDLVIDHSVQVDQSAKADSYEKNVDIEFERNGERYSFLKWGQQAFDNFRIVPPGTGICHQVNLEYLSKVVWSEEFKGEKYLFPDTLVGTDSHTTMVNGLSVLGWGVGGIEAEAGMLGQPISMLIPEVIGFEMKNKMPEGTTATDLVLTVVKMLRDKGVVGKFVEFYGEGLKNLTLADRATIANMAPEYGATCG

SEQ ID NO: 178422 - protein, 285 aa, Unknown
  Bacterial polypetide isolated from the Sargasso Sea
NKKNSKTEIAFRPARVLMQDYTGIPAVADLAAMRDAVKLKKKDPKKINPLSTVDLVIDHSVMVDAYASKDSFKKNVEKEFLRNGERYSFLKWGQQAFDNFRVVPPGTGICHQVNLEYLSKVVWTSDNFAYPDTLVGTDSHTTMVNGLSVLGWGVGGIEAEAAMLGQPISMLIPEVVGFKIKNKLSEGTTATDLVLTIVQILRQEGVVGKFVEFYGDGLKNLSLADRATIANMAPEYGATCGFFPIDEETLKYLKFSGRDQHTISLVEKYSKEQGLWADENIAFTK

SEQ ID NO: 178423 - protein, 288 aa, Unknown
  Bacterial polypetide isolated from the Sargasso Sea
SISEFTLANGSKGLFYNISSVEKFSDCKIENLPYSIRVLLEGALRNSDDFLITNEDIKTIAEWKGDGERTEIPFMPSRVILQDFTGVPAVVDMAALRNAMVELNGNPDLVNPQVPVDLVIDHSVQVDYSGAFANAKELNLKIEYQRNMERYKFLKWGQKNLSKFRAIPPGRGIVHQVNLEWIATVAREEENVWLSDTLVGTDSHTTMINGLGVLGWGVGGIEAEAVMLGQPIYMLSPDVVGMKLIGALSPGVTATDMTLRIVELLRNHGVVGKFVEFFGEGNVGFIAS

SEQ ID NO: 178424 - protein, 260 aa, Unknown
  Bacterial polypetide isolated from the Sargasso Sea
ADSTYVKNPPFFENMSMSVEPVSDIREARILALLGDSVTTDHISPAGSIGKDSPAGNYLRENGVAETDFNSFGSRRGNHEVMMRGTFGNIRIRNEMLTDVEGGYTKHVPSGEQLSIYDAAMRYQAEQTPLVVIAGKEYGTGSSRDWAAKGTLLLGVKAVVTESYERIHRSNLIGMGVLPLEFTDGVTRKTLKLTGEELISIEGLASSFVPGMTCTLVVRHPDGEETRVSVLSRIDTANEAEYYRHGGILQYMLRKMIKVT

SEQ ID NO: 178425 - protein, 305 aa, Unknown
  Bacterial polypetide isolated from the Sargasso Sea
SMVIPEVIGFKITNKLPEGTTATDLVLTVVKMLRDKGVVGKFVEFFGDGLKNLTLADRATIANMAPEYGATCGFFPIDEETLKYLEFSGRDKKTLNIVKEYSKTQGLWSSYDVEFTDTISLDMSTVVPTISGPKRPQDKVLLTDASSNFKKVFEKINNRKIQNVSKVFDSDYEIKDGSILIAAITSCTNTSNPNVLIAAGLLAKNAVEQGLQTKPWVKTSLAPGSQVVTDYLKKAGLNTYLDELGFNLVGYGCTTCIGNSGPLSENISDSVKKDNIYVVSVLSGNRNFEERISPLIKANYLASPP

SEQ ID NO: 178426 - protein, 299 aa, Unknown
  Bacterial polypetide isolated from the Sargasso Sea
GLLAKKAVELGLDVKPWVKTSLAPGSQVVTDYLEKAGLNVYLDKLGFNLVGYGCTTCIGNSGPLPENISEAVKKNDLFVVSVLSGNRNFEGRISPLIKANYLASPPLVVAYALAGHMSFDLYKDSFDKNIFLKDIWPSNKEIEEVLNKSLTPKMFINRYSNISEGPKQWQNIKIEKSSIYNWDEGSTYVKKPPFFDNLSDKPEGFKKIEDARPLLILGDMITTDHISPAGSIQKESPTGEYFMKHQIQQKDFNSYGSRRGNHEVMMRGTFANIRIKNEMAKDTEGGFNKLYPEEKVMPI

SEQ ID NO: 178427 - protein, 262 aa, Unknown
  Bacterial polypetide isolated from the Sargasso Sea
NLLSSRVIMQDFTGVPAVVDLASMRDAMKSLDASKSDVVNPQCQTDLVIDHSVMVDHFGTSESKDLNTKLEYERNTERYKLLKWGQQAFKNLRIVPPNNGIIHQINIEYIARVIYEKEGMLYPDTVVGTDSHTTMVNGLGVLGWGVGGIEAEAAMLGQPIPMLLPEVIGFELTGELGQTTTATDLVLTIVQMLREKNVVGKFVEFYGSGLDSLTIADRCTISNMAPEYGATCGFFPIDSLTIEYLKMTGKDEEHLKIVDNYS

SEQ ID NO: 178428 - protein, 289 aa, Unknown
  Bacterial polypetide isolated from the Sargasso Sea
LDMSTVVPTISGPKRPQDKVLLTDASSNFKKVFKEATDKKEYKISKVKDTDYEIKDGSILIAAITSCTNTSNPNVLIGAGLLAKKAVELGLNVKPWVKTSLAPGSQVVTDYLEKAGLNTYLDQLGFNLVGYGCTTCIGNSGPLAENIVDAIQKENLYAVSVLSGNRNFEGRISPHIKANYLASPPLVVAYALAGHMEFDLFKDSFGKDKNGKDIFLKDIWPSNKEIEDTLKISLNADMFVKRYSNVSEGPKQWQEIKTEKSSIYNWDENSTYVKKPPFFDNLSDKPRGF

SEQ ID NO: 178429 - protein, 278 aa, Unknown
  Bacterial polypetide isolated from the Sargasso Sea
MFRERYSNVSKGPEQWQKIKTKESSIYEWDDNSTYVKKPPFFDNLPTKPDGFKPIKDARPLLILGDSVTTDHISPAGTIQKDSPTGDYFMKHQILPKDYNSYGSRRGNHEVMARGTFANIRIKNEVAPGTEGGFTKLYPENKVMPIYDAVVEYKKRGTDLVVIGGKEYGTGSSRDWAAKGTKLLGVKAVIAESFERIHRSNLIGMGILPLQFINGINRKNLNLDGSELFTIIKIEKGIKPSDEVELEIKYNTGEISKIKVLSRIDTKNELEYYKNGGI

SEQ ID NO: 178430 - protein, 220 aa, Unknown
  Bacterial polypetide isolated from the Sargasso Sea
TDHISPAGSIQKESPTGNYFMKHQILPKDYNSYGARRGNHEVMMRGTFANIRIKNEMAPGTEGGFTKLYPEEKVMPIYDAVVEYKKRGTDLVVFGGKEYGTGSSRDWAAKGTKLLGVKAVIAESFERIHRSNLIGMGVLPLQFVENMNRQNLNLKGSELISVLGLEKGINPGDHLEVEIKYAIGDIKKIKMLCRIDTKNELEYYKNGGILQYVLRNMING

SEQ ID NO: 178431 - protein, 275 aa, Unknown
  Bacterial polypetide isolated from the Sargasso Sea
MKSKNSFNTRSNLRINNKNYIYFDLKTISEKFNFDLNTLPFSIKILLENLIRNEDGELITKEMISDFCTKINSDEKIFEIAFFPSRVLMQDFTGVPAVADLAAMREALKNKNVNPGNINPITRVDLVIDHSVMVDKFGNNQAYENNVKKEFERNKERYEFLKWGQESFKNFYLVPPGAGICHQVNLENISKTIWSKKIDKDTMLFPDSVVGTDSHTTMVNALSVLGWGVGGIEAEAAMLGQPISMNIPKIVGCKLESKLKEGITATDLVFTITNL

SEQ ID NO: 178432 - protein, 304 aa, Unknown
  Bacterial polypetide isolated from the Sargasso Sea
GVGGIEAEAAMLGQPISMLIPEVIGFEINGKLSEGTTASDLVLTIVEMLRKKGVVGKFVEFYGKGLKNLSLADRATIANMAPEYGATCGFFPIDEETIKYLKFSGRDKDTISLVEKYSKEQGLWASDTIDFTDTISLDLNSVVPSISGPKRPQDKVLLTDASKSFDKAFKENTNRKSPLEAQVDKKDFKIKDGDIVIGAITSCTNTSNPSVMIGAGLLAKKAVEKGLKVKPWVKTSLAPGSQVVTDYLEKAGLNKYLDELGFNLVGYGCTTCIGNSGPLDKEISDAIQKENLYAVSVLSGNRNF

SEQ ID NO: 178433 - protein, 290 aa, Unknown
  Bacterial polypetide isolated from the Sargasso Sea
MLIPEVIGFEMKNKLPEGTTATDLVLTVVKMLRDKKVVGKFVEFYGEGLKNLTLADRATIANMAPEYGATCGFFPVDSETLKYLKFSGRDEQTIKIVENYSKEQGLWSSNEIEFTDKLSLDMSKVVPTISGPKRPQDKVLLTDASSNFKNVFQKITKRKMPNTSRVDGTKYEIKDGSILIAAITSCTNTSNPNVLIGAGLLAKKAVELGLMTKPWVKTSLAPGSQVVTDYLAKAGLNIFLDELGFNLVGYGCTTCIGNSGPLSENITEAITKNDIYAVSVLSGNRNFEGR

SEQ ID NO: 178434 - protein, 304 aa, Unknown
  Bacterial polypetide isolated from the Sargasso Sea
KIYNLKTAEKNGLEGISKLPKSLKVLLENLLRYEDDVTVDKKQILALKEWLKNKKSNTEIAYRPARTLLQDYTGIPAIADLAAMRDAVKEKNKDPKQINPLSTVDLVIDHSVMVDEYASGRSFNQNVEKEFSRNGERYAFLKWGQKAFDNFRVVPPGTGICHQVNLEYLAKVVWSSKSGNDLYAYPDTLVGTDSHTTMVNGLSVLGWGVGGIEAEAAMLGQPISMLIPEVVGVEIKGKLLEGLTATDLVLAIVEMLRKKGVVGKFVEFYGEGLKNLTLADRATIANMAPEYGATCGFFPVDEET

SEQ ID NO: 178435 - protein, 211 aa, Unknown
  Bacterial polypetide isolated from the Sargasso Sea
GIFLLERQVNKDNFNSYGSRRGNHEIMLRGTFSNDRIRNEILPNSMGGITKNFISDTEKPIYNVAMEYSKENIPLIVLAGKEYGTGSSRDWAAKGTRLLGVRAVIAESFERIHRSNLIGMGILPLEFMNGDTRESLKMNGSEKITIFKLNELSPKKIIECKITNDLSSSIIETLCRIDTQTELEYFKSGGILNYVLNSIINKEQKSDATFK

SEQ ID NO: 178436 - protein, 314 aa, Unknown
  Bacterial polypetide isolated from the Sargasso Sea
NTSNPNVLIGAGLLAKKAVEFGLKTKPWVKTSLAPGSQVVTDYLAKAGLNVFLDKLGFNLVGYGCTTCIGNSGPLDVNISESIKKDNIYAVSVLSGNRNFEGRISPLIKANYLASPPLVVAYALAGHMEFDLYNDSLGKNSEGKDIYLKDLWPSNKEIENTLRSSLNPDMFVKRYSNISKGPEQWQKIKTLKSSIYNWNESSTYVKKPPFFENLKNEPEGFKEIKNARPLLILGDMITTDHISPAGSIQKDSPTGEYFMKHQILTKDYNSYGSRRGNHEVMMRGTFGNIRIRNEMAPGTEGGFTKLYPEGKVMP

SEQ ID NO: 178437 - protein, 312 aa, Unknown
  Bacterial polypetide isolated from the Sargasso Sea
YLSKVVWSEKYKEDEYLFPDTLVGTDSHTTMVNGLSVLGWGVGGIEAEAGMLGQPISMLIPEVIGFEVKNKMPEGTTATDLVLTVVKILRDKGVVGKFVEFYGDGLKNLTLADRATIANMAPEYGATCGFFPIDDETLKYLRFSGRNEHIVSTVEKYAKEQGLWASENIEFTDRVSLDMSSIVPTISGPKRPQDKVLLSQASSEFKKVYENTTERKEKYISKVNNTNFEIKDGSILIAAITSCTNTSNPNVLIGAGLLAKKAVELGLKTKPWVKTSFAPGSQVVTDYLEKAGLNKYLDELGFNLVGYGCTTM

SEQ ID NO: 178438 - protein, 258 aa, Unknown
  Bacterial polypetide isolated from the Sargasso Sea
DHSVMVDEYASGKSFNQNVEREFSRNGERYSFLKWGQKAFDNFRVVPPGTGICHQVNLEYLSKVVWSSKSGNDLYAYPDTLVGTDSHTTMVNGLSVLGWGVGGIEAEAAMLGQPISMLIPEVIGVELKGKLKEGTTATDLVLIIVEMLRKKGVVGKFVEFYGEGLKNLTLADRATIANMAPEYGATCGFFPVDDETLKYLQLSGRDKATINLVEKYSKEQGLWASNDVVFTDTLSLDISSVVTSISGPKRPQDKVLLT

SEQ ID NO: 178439 - protein, 228 aa, Unknown
  Bacterial polypetide isolated from the Sargasso Sea
SNKEIEETLKSALSAEMFVKRYSNISQGPKQWQEIKTEKSSIYNWEENSTYVKKPPFFDNLPDKPEGFKKIKDARPLLILGDMVTTDHISPAGNIQKESPTGDYFMKHQILPKDYNSYGSRRGNHEVMMRGTFANIRIRNEMAPGTEGGFTKLYPEEKVMPIYDAVVEYKKRGTDLVVIGGKEYGTGSSRDWAAKGTKLLGIKVVIAESFERIHRSNLIGMGILPLQF

SEQ ID NO: 178440 - protein, 233 aa, Unknown
  Bacterial polypetide isolated from the Sargasso Sea
GVPAVADLAAMRNALKSKGIEPKKINPLSRVDLIIDHSVMVDDYKKNNSLNENVKKEFERNKERYQFLKWGQSSFDNFYLVPPGAGICHQVNLENIAKTVWTKEIESTKYLFPDSVVGTDSHTTMVNSLSVLGWGVGGIEAEAAMLGQAISMNIPDVIGFQLKGTLKEGITATDLVLTITQILRDKGVVGKFVEFYGMGLKNLSLADRATISNMAPEYGATCGFFPTDEETIN

SEQ ID NO: 178441 - protein, 280 aa, Unknown
  Bacterial polypetide isolated from the Sargasso Sea
GVGGIEAEAGMLGQPISMLIPEVVGFEMKNKLPEGTTATDLVLTVVKMLRDKGVVGKFVEFYGEGLKNLTLADRATIANMAPEYGATCGFFPIDEETLKYLEFSGRSKENIQIVEKYAKEQNLWSSEDIVFTDTLSLDMSTVVPTISGPKRPQDKVLLTEASKNFIKVFEDVCKKTDPTVAKVKDTDFEIKDGDILIAAITSCTNTSNPNVLIGAGLLAKNAIEKGLTVKPWVKTSLAPGSQVVTDYLDKAGLSKYLDELGFNLVGYGCTTCIGNSGPLS

SEQ ID NO: 178442 - protein, 277 aa, Unknown
  Bacterial polypetide isolated from the Sargasso Sea
RNFERYSFLKWGQQAFNNFRIVPPGTGICHQVNLEYLSKVVWNEKFKDKEYLFPDTLVGTDSHTTMVNGLSVLGWGVGGIEAEAGMLGQPISMLIPEVVGFEMKNKLPEGTTATDLVLTVVKMLRDKGVVGKFVEFYGEGLKNLTLADRATIANMAPEYGATCGFFPIDEETLKYLEFSGRSKDNIQIVEKYAKEQNLWASEDVVFTDTLSLDMSTVVPTISGPKRPQDKVLLTEASKNFIKVFEDVCKKTDPTVVKVKDTDFEIKDGDILIAAYYI

SEQ ID NO: 178443 - protein, 288 aa, Unknown
  Bacterial polypetide isolated from the Sargasso Sea
FLASPLLVIAYAVAGTINIDMTKEPLGTDSSGKDVFLSDVWPSSKDIQNEINKSISPEMFKEQYENAILNNTDWNKLESSKGENYKWDSGSSYIQKVPFFDNFSKDTPKIKPLKKARLLCVLGDSVTTDHISPAGSIPELAPSGQFLISKDIPKGQFNSYGSRRGNHDVMARGTFGNIRLKNLLTPGREGDWTMFFPENREMRIFEAAKEYEKNNTPLIVIAGKEYGTGSSRDWAAKGPNLLGVKAVIAESFERIHRSNLIGMGIAPLEFINGESYKSLGLLGDEYFD

SEQ ID NO: 178444 - protein, 247 aa, Unknown
  Bacterial polypetide isolated from the Sargasso Sea
MRDKGVVGKFVEFYGSGLKNLSLADRATIANMAPEYGATCGFFPIDDETLKYLRFSGRDSQTVKIVESYAKEQGLWASEKIEFTDVVKLDMATVVPTISGPKRPQDKVLLTKAKQSFLKNFREITNRNTENISEVVGEDFKLKDGSVVIAAITSCTNTSNPNVLIGAGLLAKKAIERGLKTKPWVKTSLAPGSQVVTDYLNKSGLNKYLDELGFNLVGYGCTTCIGNSGPLPENISNSIKENDIYAA

SEQ ID NO: 178445 - protein, 302 aa, Unknown
  Bacterial polypetide isolated from the Sargasso Sea
VQVDQSAKKDSFDKNVEIEFKRNGERYSFLKWGQQAFNNFRIVPPGTGICHQVNLEYLSKVVWNERFNGEEYLFPDTLVGTDSHTTMVNGLSVLGWGVGGIEAEAGMLGQPISMLIPEVIGFEMKNKMPEGTTATDLVLTVVKMLRDKGVVGKFVEFYGEGLNNLSLADRATIANMAPEYGATCGFFPIDNETLRYLKFSGRDELIVKIVEEYAKAQGLWASKDIEFSDTLTLDMSSIVPTISGPKRPQDKVLLTDASESFKQSFKEITNKKNFSYSKVDNTDYEIKDGSILIAAITSCTNT

SEQ ID NO: 178446 - protein, 224 aa, Unknown
  Bacterial polypetide isolated from the Sargasso Sea
LGDMVTTDHISPAGNIQKESPTGEYFMKHQILPKDYNSYGSRRGNHEVMMRGTFANIRIRNEMAPGTEGGFTKLYPEEKVMPIYDAVVEYKKRGTDLIVIGGKEYGTGSSRDWAAKGTKLLGIKAVIAESFERIHRSNLIGMGVLPLQFTNGINRKNLKLNGSELISVNDIENGIEPSDKIIVEIKYISGEIKKIETLCRIDTKNELEYYKNGGILQYVLRNMI

SEQ ID NO: 178447 - protein, 295 aa, Unknown
  Bacterial polypetide isolated from the Sargasso Sea
IFSLSKAEDNGLTGISKLPKSLKVLLENLLRYEDDLTVNKAQIEAIKNWLKEKKSKKEIAYRPARVLLQDYTGIPAVADLAAMREAVKEKNKDPNTINPLSTVDLVIDHSVQVDQSAKSDSFDKNVEIEFNRNGERYSFLKWGQQAFDNFRIVPPGTGICHQVNLEYLSKVVWTAEYKNENYLFPDTLVGTDSHTTMVNGLSVLGWGVGGIEAEAGMLGQPISMLIPEVIGFEVKNKLPEGTTATDLVLTIVKMLRDKGVVGKFVEFYGEGLKNLTLADRATIANMAPEYGATCG

SEQ ID NO: 178448 - protein, 265 aa, Unknown
  Bacterial polypetide isolated from the Sargasso Sea
GLNKYLDELGFNLVGYGCTTCIGNSGPLNQNISDAINKNDLYAVSVLSGNRNFEGRINPDVKANYLASPPLVVAYALAGNMNFDMYKSALGKDKNGKDVFLKDIWPSNREIEDLMLSSLNADMFKQRYSNVSQGPKEWQAINTTDSDIYDWKANSTYVKRPPFFDDLPDQPEGFKPIDDARILLLLADTVTTDHISPAGSIKKESPTGDYFMKHQIQQKDFNSYGARRGNHEVMMRGTFGNIKIRNEMAPGTEGGFTTLQPDGKE

SEQ ID NO: 178449 - protein, 310 aa, Unknown
  Bacterial polypetide isolated from the Sargasso Sea
MKPGNKNSYNSLIDLKINGKNFKIYSLSKAEANGLDGISKLPKSLKVLLENLLRYEDDLSVNKSQIEAVKSWLNTKKSQIEIAYRPARVLLQDYTGIPAVADLAAMREAVKEKNKDPNTINPLSAVDLVIDHSVQVDQSAKKDSFEKNVDIEFKRNGERYSFLKWGQSAFNNFRIVPPGTGICHQVNLEYLSKVVWSEKYKGEEYLFPDTLVGTDSHTTMVNGLSVLGWGVGGIEAEAGMLGQPISMLIPEVIGFEFTKKMPEGTTATDLVLTVVKMLRDKGVVRKFVEFYGEGLKNLTLADRATIANMA

SEQ ID NO: 178450 - protein, 230 aa, Unknown
  Bacterial polypetide isolated from the Sargasso Sea
LILGDSVTTDHISPAGAIKTDSPAGVYLNERQVMQQDFNSYGSRRGNHEVMMRGTFANIRIKNEMVPGTEGGVTSHQPSGEIMSIYDAAIRYLNEGVPLVVIGGKEYGTGSSRDWAAKGTRLLGVKAVIVESFERIHRSNLIGMGVLPLQFLDGMNRESLGLTGKELISLTGLKEGVKAKMGVSCKIVWEKGEEKNIKLLCRIDTADEVEYYRHGGILQYVLRSLMKSTV

SEQ ID NO: 178451 - protein, 283 aa, Unknown
  Bacterial polypetide isolated from the Sargasso Sea
VVGTDSHTTMVNSLSVLGWGVGGIEAEAAMLGQAISLNVPEVIGFELKGSLKEGITATDLVLSITQILRDKGVVGKFVEFFGNGLKNLSLADRATISNMAPEYGATCGFFPTDEETINYLKLTGKDKEHLNIVEEYSKKQTLWADENYEPEYSDKILLDLNTIEPSLAGPKRPQDKILLKEVPIEFSKIDNKHSTNKNKLNTGDVVIAAITSCTNTSNPNVMISAGLVAKKAIDFGLEVKPWVKTSLAPGSKVVSDYLDKANLTEYLDILGFKTVGYGCTTCI

SEQ ID NO: 178452 - protein, 259 aa, Unknown
  Bacterial polypetide isolated from the Sargasso Sea
VSDEFLKSLKSEFSQKNILNLSKVKGENYEMDHGHVAIAAITSCTNTSNPSVMVGAGLLAKKAAKLGLKTKPWVKTSLAPGSKIVTDYLTKSGLQKYLDKLGFHLVGFGCTTCIGNSGPLDKNISDTIGKNNLIVSGVLSGNRNFEGRINPFVKANYLASPPLVVAYALAGSTKINLDKDPIGFGKNGNNIYLKDIWPTNREIQKIITKTITSQLYKQRYKNVFKGDKKWNSVKAPQGLTYKWNKDSTYVQHPPFFKDL

SEQ ID NO: 178453 - protein, 314 aa, Unknown
  Bacterial polypetide isolated from the Sargasso Sea
VVAFAMPGNMKINLFNDPIGTGKSGEAIYLKDLWPSSSQINKIVNKSLSTDMFIKRYQEIYSGDKNWQSIKSVSNTTYTWSSSSTYIKHPPFFQNEKNEVEDIINARILALLGDSVTTDHISPAGAIKTDSPAGKYLNDRQINIKDFNSYGSRRGNHEIMMRGTFANIRIKNEILPGTEGGITKFFDEKVKNMSIYDAAMQYAKNNTPLVIFAGKEYGTGSSRDWAAKGTKLLGIKAVIAESFERIHRSNLIGMGVLPLQFISNQNRKSLSLSGDELITLRGINNIKPNSELNCEIKSNGIKKIKLLCRIETVK

SEQ ID NO: 178454 - protein, 289 aa, Unknown
  Bacterial polypetide isolated from the Sargasso Sea
MWFFSIDDETLKYLRFSGRDEQTIKIVEEYSKKQGLWISKEVEFTDTISLDMSDVVPTISGPKRPQDKVFLTEASSNFKKVFESVTKRKSPNVSKIEGLDYEIKDGSILIAAITSCTNTSNPNVLIGAGLLAKKAVELGLKTKPWVKTSLAPGSQVVTDYLAKAGLNIFLDELGFNLVGYGCTTCIGNSGPLLEKISEAIKRDNLYTVSVLSGNRNFEGRISPLIKANYLASPPLVVAYALAGSMYFDLYKNSLGKDKNGNHIYLKDIWPTNKEIEDILKVSLNAEMFV

SEQ ID NO: 178455 - protein, 295 aa, Unknown
  Bacterial polypetide isolated from the Sargasso Sea
MLGQPISMLIPEVIGFEFTKKMPEGSTATDLVLTVVKMLRDKGVVGKFVEFYGDGLENLTLADRATIANMAPEYGATCGFFPVDDETLKYLKTSGRENNTLSIVESYAKEQGLWASNNIEFTDTLSLDMSTVVPTISGPKRPQDKVLLNEASSEFRKVFKNITGKKKQNVSKVKGTEFEIRDGSILIAAITSCTNTSNPNVLIGAGLLAKKAVELGLKSKPWVKTSFAPGSQVVTDYLKKSGLNKYLDKLGFNLVGYGCTTCIGNSGPLPENVVEAIEKENIYATSVLSGNRNFE

SEQ ID NO: 178456 - protein, 294 aa, Unknown
  Bacterial polypetide isolated from the Sargasso Sea
VGGKEFEIYKLDAVQEGHVGRLPFSLKILLENLLRFEDGRDVTREDILALANWDPAAVPSTEISFTPSRVILQDFTGVPAIVDLAAMRDAVVKLGGNADSINPLSPAELVIDHSVQIDRYGTADALDLNNKIEFERNRERYSFLRWGQGAFENFRVVPPNTGIVHQVNLEYLSRVVFDAGENGTHQAYPDTVVGTDSHTTMINGIGVLGWGVGGIEAEAAMLGQPITMLIPNVVGFKLTGKLQEGTTATDLVLTVTEMLREKGVVGKFVEFFGDGLDELPLADRATLGNMSPEF

SEQ ID NO: 178457 - protein, 276 aa, Unknown
  Bacterial polypetide isolated from the Sargasso Sea
DGSILIAAITSCTNTSNPNVLIGAGLLAKKAVELGLKTKPWVKTSLAPGSQVVTDYLANAGLNIFLDQLGFNLVGYGCTTCIGNSGPLSENISESLKKENIYAVSVLSGNRNFEGRISPLIKANYLASPPLVVAYALAGYMQFDFYKDSLGKNSKGKDIYLKDIWPSNKEIEDVLRNSLNPEMFVKRYSNVSKGPEQWQKIKTVKSSIYNWNESSTYVKKPPFFENLADEPEGFKEIKDARPLLILGDMITTDHISPAGSIEKNSPTGEYFMKHQI

SEQ ID NO: 178458 - protein, 307 aa, Unknown
  Bacterial polypetide isolated from the Sargasso Sea
KRPQDKVLLNEASSEFKKIFENITERKQKHISKINGTDFEIKDGSILIAAITSCTNTSNPNVLIGAGLLAKKAVELGLKTKPWVKTSLAPGSQVVTDYLEKAGLNKYLDELGFNLVGYGCTTCIGNSGPLPDNIVEAIEKENIFAVSVLSGNRNFEGRISPHIKANYLASPPLVVAYALAGHMEIDLYKDPLGKDKNNKDIFLKDIWPSNKEIEDTLREALNAKMFVERYANVSEGPVQWQKIKTKKSSIYNWDEGSTYVKRPPFFDNMSDEPEGFKQIKDARPLLILGDMVTTDHISPAGSFKKKV

SEQ ID NO: 178459 - protein, 293 aa, Unknown
  Bacterial polypetide isolated from the Sargasso Sea
MRDAVKEKNKDPNSINPLSSVDLVIDHSVQVDQSAKSDSFDKNVDIEFKRNGERYSFLKWGQQAFNNFRIVPPGTGICHQVNLEYLSKVVWSEKYNEDKYIFPDTLVGTDSHTTMVNGLSVLGWGVGGIEAEAGMLGQPISMIIPEVIGFELKNKMPEGTTATDLVLTVVKILRDRNVVGKFVEFYGDGLKNLTLADRATIANMAPEYGATCGFFPIDDETLKYLRFSGRDEHTVITVEKYAKEQGLWSSDDIQFTDTVSLDMSSVVPTISGPKRPQDKVLLNDAPSSFKNAF

SEQ ID NO: 178460 - protein, 321 aa, Unknown
  Bacterial polypetide isolated from the Sargasso Sea
KRPQDKVLLTNASSNFKKVFSEVTKKEEPNIYNVEKEEFKITDGDVLIAAITSCTNTSNPSVLIGAGLLAKNAIEKGLMTKPWVKTSLAPGSQVVTDYLEKAGLNIYLDKLGFNLVGYGCTTCIGNSGPLADNISDSIKNNNIYAVSVLSGNRNFEGRISPIIKANYLASPPLVVAYAIAGTMRFDLYKDPLGKDKDGKDVFLKDIWPSNKEIEETLRNSLNAEMFIKRYSNVSQGPEQWQKIKTEETNIYNWEDNSTYVKKPPFFDNLPDKPEGFKEIKDARPLLILGDSITTDHIFTAGSIQKDSPTGEYFMKHQILPK

SEQ ID NO: 178461 - protein, 321 aa, Unknown
  Bacterial polypetide isolated from the Sargasso Sea
MINPLKRIQGRKIPLDGKVDKKNFKIKDGDIVIGAITSCTNTSNPSVMIGAGLLAKKAVEKGLKVKPWVKTSLAPGSQVVTDYLEKAGLNKYLDQLGFNLVGYGCTTCIGNSGPLDKDISDTIHKENLYAVSVLSGNRNFEGRINPDVKANYLASPPLVVAYALAGNMHHDLYKTPLGKDQKGKDVFLKDIWPTNKEIEELILKSINADMFVKRYSNVSKGPKEWSSIKTDQTSIYNWQESSTYVKRPPFFDNLPDKPEGFKKIKDARPLLILGDTVTTDHISPAGSIKKDSPTGDYFMKHQVQQKDFNSYGARRGNHEVM

SEQ ID NO: 178462 - protein, 299 aa, Unknown
  Bacterial polypetide isolated from the Sargasso Sea
ICHQVNLEYLSKTIWTDFDQDGNLIAYPDTLVGTDSHTTMVNGLAVLGWGVGGIEAEAAMLGQPISMLLPEVIGVKLTGEMGDGVTATDLVLRIVKILRDYGVVGKFVEFFGEGLKNLKLADRATIANMAPEYGATCGFFPVDEETLRYLELSGRGRSAIELVEYYSKENGMWASSEYAPTYTDIIVLDTSEIEPAISGPRRPQDHVPLISASKTFIEELRKTYDQSIENKVKVEGENFSLTSGKIVIAAITSCTNTSNPSVMIAAGLVARKAKAFGLKAKPWVKTSLAPGSKVVSDYL

SEQ ID NO: 178463 - protein, 266 aa, Unknown
  Bacterial polypetide isolated from the Sargasso Sea
LPEGTTATDLVLTVVKMLRDKGVVGKFVEFFGDGLKNLSLADRATIANMAPEYGATCGFFPVDNETLKYLKFSGRDENEVKIVEEYAKVQGLWASEDIVFTDTISLDMSKVVPTISGPKRPQDKVLLNEASESFKKVFKDATGRNKKSNSKVENTDFEIEDGSILIAAITSCTNTSNPNVLIGAGLLAKKAVELGLKTKPWVKTSLAPGSQVVTDYLEKAGLNKYLDALGFNLVGYGCTTCIGNSGPLNDNIIKAIESKNLYGVSV

SEQ ID NO: 178464 - protein, 287 aa, Unknown
  Bacterial polypetide isolated from the Sargasso Sea
VLMQDYTGIPAVADLAAMRDAVKSKKKDPKKINPLSTVDLVIDHSVMVDTYASKDSFKKNVEREFSRNGERYSFLKWGQQAFNNFRVVPPGTGICHQVNLEYLSKVVWSSDNFAYPDTLVGTDSHTTMVNGLSVLGWGVGGIEAEAAMLGQPISMLIPDVVGFKIQNRLPEGTTATDLVLTIVQILRQEGVVGKFVEFYGDGLKNLSLADRATIANMAPEYGATCGFFPIDEETLKYLKFSGRDQHVISLVEKYSKEQGLWADNDVTFTKTLNLDLSKVFQAYQVQN

SEQ ID NO: 178465 - protein, 207 aa, Unknown
  Bacterial polypetide isolated from the Sargasso Sea
KDSPTGEYFMKHQILPKDYNSYGSRRGNHEVMMRGTFANIRIKNEIAPDTEGGFTKLFPEGKVMPVYDAVVEYKRRGTDLVVIGGKEYGTGSSRDWAAKGTKLLGIKLVIAESFERIHRSNLIGMGVLPLQFTEGMDRKKLNITGSELISVLNLEKGIKPTEKVDIEIKYVTGDIKKIKMLCRIDTNNEMEYYKNGGILQYVLRNMI

SEQ ID NO: 178466 - protein, 199 aa, Unknown
  Bacterial polypetide isolated from the Sargasso Sea
MKHQVQQKDFNSYGARRGNHEVMLRGTFGNIRIRNEMAPGTEGGYTILQPDGKQMSVYEAAEEYKKRGNSLVVIAGKEYGTGSSRDWAAKGTKLLGIKAVIAESFERIHRSNLVGMGILPLEFKLGFDRKKLNIKGTELFTIIDIEKGINPRAEVSCEIKYADGSSKTIKLLSRIDTENEIEYYKNGGILQYVLRNMIN

SEQ ID NO: 178467 - protein, 298 aa, Unknown
  Bacterial polypetide isolated from the Sargasso Sea
QVDKSAKSDSFEKNVDIEFKRNGERYSFLKWGQQAFENFRIVPPGTGICHQVNLEYLSKVVWHEKFEGEKYLFPDTLVGTDSHTTMVNALSILGWGVGGIEAEAGMLGQPISMLIPEVIGFEFTNKMPEGSTATDLVLTVVKMLRDKGVVGKFVEFYGEGLKNLTLADRATIANMAPEYGATCGFFPIDNETLKYLRISGRDEKTINIVENYAKEQGLWESNNIEFSDTLSLDMSTVVPTISGPKRPQDKVLLSDASSKFKNVFKSTTGRKEKKISKVKETDFEIRDGSILIAAITSA

SEQ ID NO: 178468 - protein, 302 aa, Unknown
  Bacterial polypetide isolated from the Sargasso Sea
HQGHGVDISEKDRSVEVSAPDGSNFKLQHGDVVIAAITSCTNTSNPSVMMAAGLLARNAKLRGLKVKPWVKPSLAPGSRVVTEYYDAAELSDDLSDMGFNVVGYGCTTCIGNSGPLDEHIESGIDEGDLIVGSVISGNRNFEGRVHQKVKANYLASPPLVVAYALAGTLDIDFEKDPIGIDSDGVPVMLSEIWPSDAEISASVASSISPQMFRERYADIMQEPRWDSIESSSSPLYPWKEESTYVRLPSFFEGIEPNPSPIDPVKGAHVLLKLGDSVTTDHISPAGAFPKSGPAGKYLVSNG

SEQ ID NO: 178469 - protein, 252 aa, Unknown
  Bacterial polypetide isolated from the Sargasso Sea
DLNKIPISIKVIIENLLRNEDGENVSKDMISKIFSSLKYTTKEDEKIEISFFPTRVLMQDFTGVPAVADLAAMRNALKSRGIEPKKINPLSRVDLVIDHSVMVDNYKNSNALKENVKNEFNRNKERYEFLKWGQSSFNNFYLVPPGAGICHQVNLENIAKTVWLKEIENKKYLFPDSVVGTDSHTTMVNSLSVLGWGVGGIEAEAAMLGQAISMNIPDVVGFELKGSLKEGITATDLVLSITKILRDKGVVG

SEQ ID NO: 178470 - protein, 280 aa, Unknown
  Bacterial polypetide isolated from the Sargasso Sea
LVGYGCTTCIGNSGPLPENIVEAIQKENIYAVSVLSGNRNFEGRISPHIKANYLASPPLVVAYAIAGHMEVDLYKDPLGKDKQGKDVFLKDIWPSNKEIEDILKDSLNAEMFIQRYSNVSEGPTQWQKIKTDKSSIYNWDKGSTYVKKPPFFDSLPDKPDGFKEIKDARPLLILGDMVTTDHISPAGSIQKDSPTGEYFMEHQILPKDYNSYGSRRGNHEVMMRGTFANIRIRNEMAPGTEGGFTKLYPEEKVLPVYDAVVEYKKRGTDLVVIGGKEYGT

SEQ ID NO: 178471 - protein, 259 aa, Unknown
  Bacterial polypetide isolated from the Sargasso Sea
LDMSTVVPTISGPKRPQDKVLLTNASSNFKKVFKEATDKKDYKISNVKGTDYEIKDGSILIAAITSCTNTSNPNVLIGAGLLAKKAVELGLNVKPWVKTSLAPGSQVVTDYLEKAGLNTYLDQLGFNLVGYGCTTCIGNSGPLAENIVDAIQKDNLYAVSVLSGNRNFEGRISPHIKANYLASPPLVVAYALAGHMEFDLFKDSFGKDKNGKDIFLKDIWPSNKEIEDTLKNSLNADMFVKRYSNVSEGPKQWQEIKTE

SEQ ID NO: 178472 - protein, 273 aa, Unknown
  Bacterial polypetide isolated from the Sargasso Sea
MLKLIKKTQSREKPIQADVAGADFKITDGDIVIAAITSCTNTSNPSVMIGAGLLAKKAIERGLKIKPWVKTSLAPGSKVVTDYLEKAGLNKYLDELGFNLVGYGCTTCIGNSGPLNKNISDAIHKENLYAVSVLSGNRNFEGRISPDVKANYLASPPLVVAFALAGNMNFDMYKNSLGTDKEGKEVFLKDIWPSNKEIEDIMLKSINAEMFIDRYSNVSEGPKEWSAIKTVDSSIYNWEDNSTYVKRPPFFDNLPDQPEGFKPIKDARLLLLL

SEQ ID NO: 178473 - protein, 278 aa, Unknown
  Bacterial polypetide isolated from the Sargasso Sea
GPTEWQELSTSTGVNFKWDLESTYIQKPPYFENFSQKPQSKSEILNARVLVSVQDSVTTDHISPAGSIPPSAPAGQFLTSNDVPRHQFNSFGSRRGNHDVMARGTFGNIRLRNQLVPDLEGDWTIHLPSKESMRIYEASEKYKQENVPLIILAGKEYGTGSSRDWAAKGPMLLGVRAVIAESFERIHRSNLIGMGVLPLVFQKGESVKSLGLDGTETFDIPDVSNSVTPGSTIHIKATAENGNVTEFDVLARIDTAIENEYYKHGGLLPYVLRQMMLD

SEQ ID NO: 178474 - protein, 249 aa, Unknown
  Bacterial polypetide isolated from the Sargasso Sea
SALGKDKDGKDVFLKDIWPSNKEIEDLMLSSLNADMFKQRYSNVSEGPKEWQAINTTDSDIYNWEANSTYVKRPPFFDNLPDQPEGFKPINDARILLLLADSVTTDHISPAGSIKKESPTGDYFMKHQIQQKDFNSYGARRGNHEVMMRGTFGNIKIRNEMAPGTEGGFTTLQPDGKVMSVYEAAMEYKKRKNDLVVIAGKEYGTGSSRDWAAKGTKLLGIKAVLAESFERIHRSNLIGMGVLPLQFKE

SEQ ID NO: 178475 - protein, 273 aa, Unknown
  Bacterial polypetide isolated from the Sargasso Sea
HSVMVDSYKDNNALKENVSKEFDRNKERYEFLKWGQSSFDNFYLVPPGSGICHQVNLENIAKTIWLKEINNQKYLFPDSVVGTDSHTTMVNSLSVLGWGVGGIEAEAAMLGQAISMNIPEVIGFELKGSLKEGITATDLVLSITSILRKKGVVGKFVEFYGGGLKNLSLADRATISNMAPEYGATCGFFPTDEETINYLRLTGKDNEHLNIVEKYSKKQNLWANENYAPEYSEKIILDLDQIEPSLAGPKRPQDKILLKDVPKEFSKLDKNSY

SEQ ID NO: 178476 - protein, 303 aa, Unknown
  Bacterial polypetide isolated from the Sargasso Sea
MNIPEVVGFELKGSLREGITATDLVLTITKILRENGVVGKFVEFYGEGLSNLSLADRATISNMAPEYGATCGFFPTDEETINYLRLTGKDEQHLNIIRSYSKKQTMWVDKSYNPKFGSKIVLDLENIEASLAGPKRPQDKILLKNVPNEFNKIEQKVDTIKDAKLNTGDIVIAAITSCTNTSNPNVMIAAGLVAKKAFELNLTVKPWVKTSLAPGSKVVSDYLDKAELTPFLDYLGFNTVGYGCTTCIGNSGPLDEWIADEIQTNNLTVCSVLSGNRNFEGRVHQHVKANFLASPPLVVAYAL

SEQ ID NO: 178477 - protein, 242 aa, Unknown
  Bacterial polypetide isolated from the Sargasso Sea
IIFSDTLSLDMSTVVPTISGPKRPQDKVFLTDAAQNFKENFKKYTNRDDFLKAKVKNADFDIQDGSILIAAITSCTNTSNPNVLIGAGLLAKKACELGLKSKPWVKTSLAPGSQVVTDYLERAGLNTYLDKLGFNLVGYGCTTCIGNSGPLAENISESVSKNNLYAVSVLSGNRNFEGRISPLVKANYLASPPLVVAYAIAGNMQIDLYKDPLGKSHDGEDVFLKDIWPSNQEIDDLLKESL

SEQ ID NO: 178478 - protein, 298 aa, Unknown
  Bacterial polypetide isolated from the Sargasso Sea
GLSVLGWGVGGIEAEAGMLGQPISMLIPEVIGFEVKGKMPEGTTATDLVLTIVKMLRDKGVVGKFVEFYGEGLKNLTLADRATIANMAPEYGATCGFFPIDDETLKYLKFSGRDQLTVKIVEEYAKAQGLWASNDIEFTDTLILNMSTIVPTISGPKRPQDKVLLTEASTNFKESFSAITKKKDFSSFKISNTDYEIKDGSILIAAITSCTNTSNPNVLIGAGLLAKKAVELGLEVKPWVKTSLAPGSKVVTDYLEKAGLNTYLDKLGFNLVGYGCTTCIGNSGPLAENIVEAIQKEN

SEQ ID NO: 178479 - protein, 271 aa, Unknown
  Bacterial polypetide isolated from the Sargasso Sea
EIAYRPARVLLQDYTGIPAVADLAAMRDTVKEKNKDPNTINPLSSVDLVIDHSVQVDKFATKNSLKENVDIEFERNFERYSFLKWGQQAFNNFRIVPPGTGICHQVNLEYLSKVVWNEKFKNKEYLFPDTLVGTDSHTTMVNGLSVLGWGVGGIEAEAGMLGQPISMLIPEVVGFEMKNKLPEGTTATDLVLTVVKMLRDKGVVGKFVEFYGEGLKNLTLADRATIANMAPEYGATCGFFPIDEETLKYLEFSGRSKENIQIVEKYAKEQN

SEQ ID NO: 178480 - protein, 256 aa, Unknown
  Bacterial polypetide isolated from the Sargasso Sea
RKIKFLLLQKWLKDKKSETEIAYRPARVLLQDYTGIPAVADLAAMREAVKEKNRDPQIINPLSSVDLVIDHSVQVDKFSTPDSLKKNVEIEFQRNAERYSFLKWGQQAFDNFRIVPPGTGICHQVNLEYLSKVVWKEKFEDKDYIFPDTLVGTDSHTTMVNGLSVLGWGVGGIEAEAGMLGQPISMLIPEVIGFEILNKLPEGTTATDLVLTIVKMLRDKGVVGKFVEFYGEGLQNLTLADRATIANMAPEYGATC

SEQ ID NO: 178481 - protein, 257 aa, Unknown
  Bacterial polypetide isolated from the Sargasso Sea
RNSTYVKKPPFFENLSDEPEDIKDIHEARPLLILGDMITTDHISPAGSIQKESPTGEYFMKHQILTKDYNSYGARRGNHEVMMRGTFANIRIRNEIAPETEGGFTKLYPEEKILPVYDAVVEYKKRGTDLVVIGGKDYGTGSSRDWAAKGTKLLGIKAILAESFERIHRSNLIGMGVLPLQFIEKMNRKNLNLKGPELISILNIEKSLNPSDHVEVQIKYQSGELKKIKMLCRIDTKNELEYYKNGGILQYVLRKMI

SEQ ID NO: 178482 - protein, 268 aa, Unknown
  Bacterial polypetide isolated from the Sargasso Sea
INSSTNTTYNWNDTSTYIKHPPFFDVQNKFDLNDIKEARILALLGDSVTTDHISPAGSIKEDSPAGHYLTDRQINSRNFNSYGSRRGNHEIMMRGTFANIRIKNQILDNVEGGYTKSFISNKQTSIYEAAQEYIKNNVDTVIIAGKEYGTGSSRDWAAKGTRLLGVRAVIAESFERIHRSNLIGMGVLPLEFTQTENKENLNIKGEETITISGLAELKPGIILNCKINAAKTKVINLKCRIDTNKELEYYKAGGILNYVLNEIISEAA

SEQ ID NO: 178483 - protein, 263 aa, Unknown
  Bacterial polypetide isolated from the Sargasso Sea
AGLNIYLDQLGFNLVGYGCTTCIGNSGPLAENIVEAIQKENIYAVSVLSGNRNFEGRISPHIKANYLASPPLVVAYAIAGHMEVDLYKDPLGKDKEGKDVFLKDIWPSNKEIEDTLKDSLNAEMFIQRYSNVSEGPTQWQKIKTDKSSIYNWDEGSTYVKKPPFFDSLPDKPEGFKEIKDARPLLILGDMVTTDHISPAGSIQKNSPTGEYFMEHQILPKDYNSYGSRRGNHEVMMRGTFANIRIRNEMAPGTEGGFTKLYPE

SEQ ID NO: 178484 - protein, 256 aa, Unknown
  Bacterial polypetide isolated from the Sargasso Sea
NKMPEGTTATDLVLTVVKMLRDKGVVGKFVEFYGEGLSNLTLADRATIANMAPEYGATCGFFPVDEETLKYLKFSGRDEHTVKIVEKYSKEQGLWASDNIVFTDKISLDMSTIVPTISGPKRPQDKVLLSQASEDFKNVFQNMTGRKKNNISKVKNTDFEIKDGSILIAAITSCTNTSNPNVLIGAGLLAKKAVEMGLTTKPWVKTSLAPGSQVVTDYLEKAGLNKYLDKLGFNLVGYGCTTCIGNSGPLPENIVE

SEQ ID NO: 178485 - protein, 222 aa, Unknown
  Bacterial polypetide isolated from the Sargasso Sea
KVVTDYLEKAGLNKYLDQLGFNLVGYGCTTCIGNSGPLNKNISEVIHKENLYAVSVLSGNRNFEGRISPDVKANYLASPPLVVAFALAGNMNFDLYKTPLGMDKDGKDVFLKDIWPSNKEIEDIMLSSINANMFIDRYSNVSEGPKEWSSIKTVDSSIYNWESNSTYVKKPPFFDDLPDKPEGFKAIKDARILLLLADSVTTDHISPAGNIKKDSPTGDYFM

SEQ ID NO: 178486 - protein, 320 aa, Unknown
  Bacterial polypetide isolated from the Sargasso Sea
SRKNGLNGVSRLPKSLKVLLENLLRYEDDLTVNKNQILAIKDWLRTKKSNIEIAYRPARVLLQDYTGIPAVADLAAMREAVQEKDKDPNTINPLSAVDLVIDHSVQVDQSAKGDSFDKNVEIEFKRNGERYSFLKWGQNAFDNFRIVPPGTGICHQVNLEYLSKVVWLEKVNDESYIFPDTLVGTDSHTTMVNGLSVLGWGVGGIEAEAGMLGQPISMLIPEVIGFEVKNKMPEGTTATDLVLTVVKMLRDKGVVGKFVEFYGEGLKNLTLADRATIANMAPEYGATCGFFPIDEETLKYLEFSGRDKQTVKIVERYAKA

SEQ ID NO: 178487 - protein, 288 aa, Unknown
  Bacterial polypetide isolated from the Sargasso Sea
YLKFSGRDQQTVDIVENYAKEQGLWASNEIEFTDIISLDMSTVVPTISGPKRPQDKVLLTDAPSSFKKVLQEATNKYEKSISKVSNTDYEIKDGSILIAAITSCTNTSNPNVLIGAGLLAKKAIEKGLQVKPWVKTSLAPGSQVVTDYLAKAGLNTYLDQLGFNLVGYGCTTCIGNSGPLPENIVEAIQKENIYAVSVLSGNRNFEGRISPHIKANYLASPPLVVAYAIAGHMEVDLYKDPLGKDKEGKDVFLKDIWPSNKEIEDTLKDSLNAEMFIQRYSNVSEGPT

SEQ ID NO: 178488 - protein, 279 aa, Unknown
  Bacterial polypetide isolated from the Sargasso Sea
LKYLKFSGRDKHTVDIVESYAKEQGLWASDDIVFTDKLTLDMSSVVPTISGPKRPQDKVLLNEASKNFKKVFEEVAKKSKISTSKVENEEFEIKDGDIVIAAITSCTNTSNPNVLIGAGLLAKKAIEKGLKTKPWVKTSLAPGSQVVTDYLEKAGLNNYLDQLGFNLVGYGCTTCIGNSGPLQENISDAIKKENIYAVSVLSGNRNFEGRISPLVKANYLASPPLVVAYALAGRMSIDLYKDPLGKDREGNDVFLKDIWPSNKEIDDTLKNSLNADMFV

SEQ ID NO: 178489 - protein, 254 aa, Unknown
  Bacterial polypetide isolated from the Sargasso Sea
VNLEYLSKVVWKEKFDDKEYLFPDTLVGTDSHTTMVNGLSVLGWGVGGIEAEAGMLGQPISMLIPEVVGFEMRNKLPEGTTATDLVLTVVKMLRDKGVVGKFVEFYGEGLKNLTLADRATIANMAPEYGATCGFFPIDDETLKYLEFSGRSKENIQIVEKYAKEQNLWASEEVVFTDTLSLDMSTVVPTISGPKRPQDKVLLTEASKNFIKVFEDICKKTEPTVAKVKDSDFEIKDGDILIAAITSCTNTSNPN

SEQ ID NO: 178490 - protein, 260 aa, Unknown
  Bacterial polypetide isolated from the Sargasso Sea
SLADRATISNMAPEYGATCGFFPTDKETINYLELTGKDKHHLEIVKKYSKKQSMWIDKNYNPNFDKKILLDLNSIEPSLAGPKRPQDKILLKNIPEEFKKTQKNFKHKNENKLNTGDIVIAAITSCTNTSNPSVMIAAGLLAKKAVEFGLNIKPWVKTSLAPGSKVVSDYLDNAGLTNYLETIGFYTVGYGCTTCIGNSGPLDSWISDEISSKNLTVCSVLSGNRNFEGRVHQSVKANFLASPPLVVAYAIAGNIHVNLM

SEQ ID NO: 178491 - protein, 305 aa, Unknown
  Bacterial polypetide isolated from the Sargasso Sea
ILDQLGFNLVGYGCTTCIGNSGPLSENIVEAIQKENIYAVSILSGNRNFEGRISPHIKANYLASPPLVVAYAIAGHMEVDLYKDPLGKDKDGKEVFLKDIWPSNKEIEDTLKLSLNADMFIQRYSNVSEGPTQWQKIKTDKSSIYNWDEDSTYVKKPPFFDSLSDEPEGFKEIKDARPLLILGDMVTTDHISPAGSIQKDSPTGEYFMEHQILPKDFNSYGSRRGNHEVMMRGTFGNIRIRNEMAPGTEGGFTKLYPEEKVLPIYDAVVEYKKRGTDLIVIGGKEYGTGSSRDWAAKAQIIRIKQ

SEQ ID NO: 178492 - protein, 248 aa, Unknown
  Bacterial polypetide isolated from the Sargasso Sea
DHSVQVDQSAKADSFENNVDIEFKRNGERYSFLKWGQQAFNNFRIVPPGTGICHQVNLEYLSKVVWSEEFKGDKYLFPDTLVGTDSHTTMVNGLSVLGWGVGGIEAEAGMLGQPISMLIPEVIGFEIKNKMPEGTTATDLVLTIVKMLRDKGVVGKFVEFYGDGLKNLTLADRATIANMAPEYGATCGFFPIDEETLKYLKFSGRDNHTVDIVEKYAKEQGLWTSNEIEFTDILSLDMSTVVPTISGP

SEQ ID NO: 178493 - protein, 258 aa, Unknown
  Bacterial polypetide isolated from the Sargasso Sea
NFIKVFEDVCKKTEPTIAKVEKADFEIKDGDILIAAITSCTNTSNPNVLIGAGLLAKNAINKGLTVKPWVKTSLAPGSQVVTDYLNKASLSKYLDKLGFNLVGYGCTTCIGNSGPLSDNITDAVKKNNLYAVSVLSGNRNFEGRISPLVKANYLASPPLVVAYAIAGSMRIDLYKDPLGKDSDGKEVYLKDIWPTNKEIEDTLIESLNPEMFVNRYSNVSKGPEQWQKIKVDKGSIYNWEQNSTYVKKPPFLKICQRT

SEQ ID NO: 178494 - protein, 287 aa, Unknown
  Bacterial polypetide isolated from the Sargasso Sea
QVVTDYLEKAGLNKYLDELGFNLVGYGCTTCIGNSGPLPDNIVEAIEKENIYAVSVLSGNRNFEGRISPHIKANYLASPPLVVAYALAGHMEVDLYKDPLGKDKNDKNIFLKDIWPSNKEIEDTLSEALNAKMFIERYSNVSEGPVQWQKIKTEKSSIYKWDEGSTYVKRPPFFDNMPDEPEGFKKIKDARPLLILGDMVTTDHISPAGSIQKESPTGQYFMEHQILPKDYNSYGSRRGNHEVMMRGTFANIRIRNEIAPGTEGGFYKLYPEGKVMSVYDAVVEYKK

SEQ ID NO: 178495 - protein, 268 aa, Unknown
  Bacterial polypetide isolated from the Sargasso Sea
LFLDTLVGTDSHTTMVNGLSVLGWGVGGIEAEAGMLGQPISMLIPEVIGFEVTKKMPEGTTATDLVLTVVKMLRDKGVVGKFVEFYGEGLKNLTLADRATIANMAPEYGATCGFFPIDEETLKYLKFSGRDKETVEIVEKYAKEQGLWASDEIEFSDKISLDMSTVVPTISGPKRPQDKVLLTDASINFKKVFKEATNKKDYKISKVKNADYEIKDGSILIAAITSCTNTSNPNVLIGAGLLAKKAVELGLNVKPWVKTSLAPGSKVV

SEQ ID NO: 178496 - protein, 221 aa, Unknown
  Bacterial polypetide isolated from the Sargasso Sea
MITTDHISPAGSIKKDSPTGDYFMKHQVQQKDFNSYGARRGNHEVMVRGAFGNIRIRNEMAPGTEGGFTKLYPEGKVMSIYEAAMEYKKRGNDLVVIAGKEYGAGSSRDWAAKGTKLLGVKAVIAESFERIHRSNLIGMGILPLQFKDGFNKSKLKLKGSELITIINIDKGITPGQEVECEIKYADGVAKKINLLSRIDTANEVEYYKNDGILKYVLRSML

SEQ ID NO: 178497 - protein, 271 aa, Unknown
  Bacterial polypetide isolated from the Sargasso Sea
ADLAVTSVLSGNRNFEGRINPDVKMNYLASPPLVVAYAIAGTMDIDITREPLGTSEDGTPVYLADIWPSADEVQTTIDASIDAEMFTSRYRDVFEGDDRWKSLPTPEGDVFAWDSASTYVRKAPYFDALQRDPQPVANISGARVLALLGDSVTTDHISPAGSIKADSPAGKYLTEHGVERANFNSYGSRRGNHEVMIRGTFANIRLKNLMLDGVEGGFTVDFTQGDDVVVPIFDAASSYAQRNIPLVIVAGKEYGSGSSRDWAAKGTALLG

SEQ ID NO: 178498 - protein, 252 aa, Unknown
  Bacterial polypetide isolated from the Sargasso Sea
QAFNNFRVVPPGTGICHQVNLEYLSKVVWSSDNFAYPDTLVGTDSHTTMVNGLSVLGWGVGGIEAEAAMLGQPISMLIPEVVGFKIQNKLSEGTTATDLVLTIVQILRQEGVVGKFVEFYGDGLKNLSLADRATIANMAPEYGATCGFFPIDEETLKYLKFSGRDKHTISLVEKYSKEQGLWADENISFSKILYLDLSKVVPSISGPKRPQDKVLLSESSESFIQSFKKNTNRENIKEEKVSGENFKLKDGN

SEQ ID NO: 178499 - protein, 287 aa, Unknown
  Bacterial polypetide isolated from the Sargasso Sea
PKSLKVLLENLLRYDYDLSVTKSQIEAVKNWLKTKKSKTEIAYRPARVLLQDYTGIPAVADLAAMREAVKEKNKDPNSINPLSAVDLVIDHSVQVDQSAKADSFEKNVDIEFERNGERYSFLKWGQQAFNNFRIVPPGTGICHQVNLEYLSKVVWSEEFKGDNYLFPDTLVGTDSHTTMVNGLSVLGWGVGGIEAEAGMLGQPISMLIPEVIGFEIKNKMPEGTTATDLVLTVVKMLRDKGVVGKFVEFYGEGLKNLTLADRATIANMAPEYGATCGFFPIDEETLK

SEQ ID NO: 178500 - protein, 225 aa, Unknown
  Bacterial polypetide isolated from the Sargasso Sea
ILGDMVTTDHISPAGSIQKESPTGEYFMEHQILPKDFNSYGSRRGNHEVMIRGTFANIRIRNEIAPGTEGGFTKLFPEGKVMPVYDAVVEYKKRGTDLVVIGGKEYGTGSSRDWAAKGTKLLGIKMVIAESFERIHRSNLIGMGILPLQFINNVNRKNLNLIGSELLTVLNLDKGIKPGDKVALEIKYINGDIKKVELLSRIDTKNELEYYKNGGILQFVLRNMI

SEQ ID NO: 178501 - protein, 176 aa, Unknown
  Bacterial polypetide isolated from the Sargasso Sea
MRGTFANIRIKNEILPGTEGGLTKSFVSDKSMSIYDASREYIDNKIDTVVIAGKEYGTGSSRDWAAKGTKLLGVKAVIAESFERIHRSNLIGMGVLPLEFLDNQNKNSLEIKGNEKISIIGITSLQPNKILQLIISGDKEIKTNLKCRIDTKKELDYYKAGGILNFVLNEIISNAA

SEQ ID NO: 178502 - protein, 253 aa, Unknown
  Bacterial polypetide isolated from the Sargasso Sea
GFFPVDDETLKYLKFSGRDKHTVDIVESYAKEQGLWASNDIFFTDKLYLDMSTVVPTISGPKRPQDKVLLTEASQNFEKVFKKVTKKNKITILKVKNENFEIKDGSILIAAITSCTNTSNPNVLIGAGLLAKKAVEKGLKTKPWVKTSLAPGSQVVTDYLEKAGLNKYLDNLGFNLVGYGCTTCIGNSGPLKENISEAVKKENIYAASVLSGNRNFEGRISPLVKANYLASPPLVVAYALAGTMTIDLYNDPL

SEQ ID NO: 178503 - protein, 290 aa, Unknown
  Bacterial polypetide isolated from the Sargasso Sea
MPSNKEIEDTLKHSLNAEMFIKRYSNVSEGPTQWQKIKTDKSSIYNWDEGSTYVKKPPFFDSLPDEPEGFKEIKDARPLLILGDMVTTDHISPAGSIQKDSPTGEYFMEHQILPKDYNSYGSRRGNHEVMMRGTFANIRIKNEMVPGTEGGFTKLYPEEKVLPIYDAVVQYKKRGTDLVVIGGKEYGTGSSRDWAAKGTKLLGIKAVVAESFERIHRSNLIGMGILPLQFTNDVNRKNLKLIGSELISIINIEKGVNPLDVVTVEIKYASGEIKKIKTLCRIDTKNELEY

SEQ ID NO: 178504 - protein, 313 aa, Unknown
  Bacterial polypetide isolated from the Sargasso Sea
KRPQDKVLLTDAPVSFQKVLQEATNKNEKSTSKVSNSDYEIKDGSILIAAITSCTNTSNPNVLIGAGLLAKKAIEKGLQVKPWVKTSLAPGSQVVTDYLAKAGLNTYLDQLGFNLVGYGCTTCIGNSGPLPENIVEAIQKENIYAVSVLSGNRNFEGRISPHIKANYLASPPLVVAYAIAGHMEVDLYKDPLGKDKKGNDVFLKDIWPSNKQIEETLKDSLNAEMFIQRYSNVSEGPTQWQKIKTDKSSIYNWDEGSTYVKKPPFFDSLPDKPEGFKEIKDARPLLILGDMVTTDHISPAGSIQKDSPTGKYF

SEQ ID NO: 178505 - protein, 301 aa, Unknown
  Bacterial polypetide isolated from the Sargasso Sea
DKEYLFPDTLVGTDSHTTMVNGLSVLGWGVGGIEAEAGMLGQPISMLIPEVIGFEMKNKLPEGTTATDLVLTVVKMLRDKGVVGKFVEFYGEGLKNLTLADRATIANMAPEYGATCGFFPIDEETLKYLEFSGRSKENIQIVEKYAKEQNLWASEDVVFTDTLSLDMSTVVPTISGPKRPQDKVLLTEASKNFIKVFEDVCKKTDPTVAKVKDTDFEIKDGDILIAAITSCTNTSNPNVLIGAGLLAKNAIEKGLTVKPWVKTSLAPGSQVVTDYLDKAGLSKYLDELGFNLVGYGCTTWY

SEQ ID NO: 178506 - protein, 301 aa, Unknown
  Bacterial polypetide isolated from the Sargasso Sea
SQISINGKNYKYFSLKEAEKNGLEGVSKLPKSLKVLLENLLRYEDDLTVNKQQIEAIKNWLKTKKSDIEIAYRPARVLLQDYTGIPAVADLAAMREAVKAKNKDPNTINPLSSVDLVIDHSVQVDKYANKNSLNDNVEIEFNRNAERYSFLKWGQQAFNNFRIVPPGTGICHQVNLEYLSKVVWTEEFEKDHYIFPDTLVGTDSHTTMVNGLSVLGWGVGGIEAEAGMLGQPISMLIPEVIGFELKNKLPEGTTATDLVLTVVKMLRDKGVVGKFVEFYGHGLKNLTLADRATIANMAPEY

SEQ ID NO: 178507 - protein, 253 aa, Unknown
  Bacterial polypetide isolated from the Sargasso Sea
MGPKRPQDKVLLTNSAKSFAKAYKENTKREKPSEANVDGADFKIKDGDIVIAAITSCTNTSNPSVMIGAGLLAKKAIEKGLKIKPWVKTSLAPGSKVVTDYLEKAGLNKFLDELGFNLVGYGCTTCIGNSGPLNKNISDAIHKENLYAVSVLSGNRNFEGRISPDVKANYLASPPLVVAFALAGNMNFDIYKSSLGTDKEGKEVFLKDIWPSNKEIENIMLKSINAKMFIDRYSNISEGSKEWRSIKTVDSSI

SEQ ID NO: 178508 - protein, 230 aa, Unknown
  Bacterial polypetide isolated from the Sargasso Sea
MYDSFKTKKTLKIGKKTYTYYSFKVAEKNGLKNISALPFSIKVLLENLIRNEDGSTVELNDIKEFEKWKSDKKVNKEINFRPARVLMQDFTGVPAVVDLASMRSAIKNERGDPKKVNPLSPVDLVIDHSVMVDKFGTATAHKANVDLEYKRNIERYEFLRWGQKSFNNFRVVPPGTGICHQVNLEYLAKTVWSEKKKIKNKKVNLAYPDTVVGTDSHTTMINGLSVLGWG

SEQ ID NO: 178509 - protein, 268 aa, Unknown
  Bacterial polypetide isolated from the Sargasso Sea
MTYKSFSQLDVNGKNFKAVNFDSIGSKYALDRLPFCIKILLENLIRHEDEEFVNSNDIEQVAKWDTDNHVDHEVSFVPARVILQDFTGVPAIVDLAAMRDAVNRLGGDAQAINPLNPVELVIDHSVMVDHFAEDDALEKNTDIEIQRNRERYQFLKWGQSSFDNFKVVPPGRGIVHQVNLEYLARCAFTKEQDGETLVYPDTLVGTDSHTTMINGLGVLGWGVGGIEAEAAMLGQPVTMLLPKVVGFRLSGKLPAGVTATDMVLTITQ

SEQ ID NO: 178510 - protein, 256 aa, Unknown
  Bacterial polypetide isolated from the Sargasso Sea
PISMLIPEVIGFKIQNKLTEGTTATDLVLTIVQILRQEGVVGKFVEFYGDGLKNLSLADRATIANMAPEYGATCGFFPIDEETLKYLKFSGRDEHTISLVEKYSKEQGLWADDNISFTKNLNLDLSKVFPSISGPKRPQDKVLLSESSKSFMTSFKKNMNRKNIKEEVVSGENFKLKDGNIVIAAITSCTNTSNPNVLIGAGLLAKKAVEKGLKVKPWVKTSLAPGSQVVTDYLEKAGLDKYLDQLGFHLVGYGCT

SEQ ID NO: 178511 - protein, 260 aa, Unknown
  Bacterial polypetide isolated from the Sargasso Sea
MKKVVFITGDQGSTYVKKPPFFDNLPDKPEGFKKIKDARPLLILGDMVTTDHISPAGSIQKESPTGEYFMEHQILPKDYNSYGSRRGNHEVMMRGTFANIRIRNEMAPNTEGGFTKLYPEGKVMPIYDAVVEYKNRGTDLVVIGGKEYGTGSSRDWAAKGTKLLGVKAVIAESFERIHRSNLIGMGILPLQFIENINRKNLNLKGPELISVVNLEKGINPSEKVELQIKYNTGDIKKIKTLCRIDTKNELEYYKNGGILQ

SEQ ID NO: 178512 - protein, 263 aa, Unknown
  Bacterial polypetide isolated from the Sargasso Sea
MQTDLYKDSLGKDKNGKEVYLKDIWPSNKEIEEVLLQSLNPEMFRERYSNVSKGPEQWQQIKTKKSSIYNWNDNSTYVKKPPFFENLSPNPEGFKPLKNARPLLILGDSVTTDHISPAGNIQKDSPAGDYFMKHQILPKDYNSYGSRRGNHEVMMRGTFANIRIRNEVAPGTEGGYTKLFPENKVMPVYDAVVEYKKRGTDLVVIGGKEYGTGSSRDWAAKGTKLLGIKAVIAESFERIHRSNLIGMGVLPLQFINEVNRQNL

SEQ ID NO: 178513 - protein, 289 aa, Unknown
  Bacterial polypetide isolated from the Sargasso Sea
KKFNFSLKEVPNSLKILLENLIRNEDGISISKEIIEKICQQINLNKKNFEISFFPTRVLMQDFTGVPAVADLAAMRNALKNKKIDPKKINPLSRVDLVIDHSVMVDNYGSNKAYEKNVKKEFERNRERYEFLKWGQESFDNFYLVPPGAGICHQVNLENISKTIWLKKEENKEYLFPDSVVGTDSHTTMVNALSVLGWGVGGIEAEAAMLGQPISMNIPKILGFKITGKLKEGITATDLVLTITSILRKHGVVGKFVEFYGPGLANLSLADRATISNMSPEYGATCGFF

SEQ ID NO: 178514 - protein, 323 aa, Unknown
  Bacterial polypetide isolated from the Sargasso Sea
RNFKNINTDKKLNNGDIVMPAITSCTNTSNPSVMIAAGLVAKKAVELGLDIKPWVKTSLAPGSKVVTDYLDKAGLTYYLDKIGFNLVGYGCTTCIGNSGPLDHWVSEEIKKNNLTVSSILSGNRNFEGRVHQEVKANFLASPPLVVAYALAGNINCNLTNEPLGKSKDDNDVYLKDLWPTNKDINFLLDSSLNANMFKERYNEIYEGDENWKAIKSKRKETYDWNITSTYIKLPPFFSNYKNKNISDIHEARILALLGDSVTTDHISPAGNIKEESPAGIYLRKRQINSANFNSYGSRRGNHEIMMRGTFANIRIKNEILPNT

SEQ ID NO: 178515 - protein, 287 aa, Unknown
  Bacterial polypetide isolated from the Sargasso Sea
LKEAEKNGLTGISKLPKSIKVLLENLLRFEDEKSVKKEQILSIKSWLDKKKSKTEISFRPARVLMQDYTGIPAIADLAAMRDAVKSKKKDPKKINPLSTVDLVIDHSVMVDTYASKDSFKKNVEKEFSRNGERYSFLKWGQQAFNNFRVVPPGTGICHQVNLEYLSKVVWSSDNFAYPDTLVGTDSHTTMVNGLSVLGWGVGGIEAEAAMLGQPISMLIPDVVGFKIKNKLPEGTTATDLVLTIVQILREEGVVGKVVEFYGDGLKKPFIGGSSYHAHMAPEYGALV

SEQ ID NO: 178516 - protein, 293 aa, Unknown
  Bacterial polypetide isolated from the Sargasso Sea
VLLENLLRYEDDLTVDKKQILAIKEWLKNKKSNTEIAYRPARTLLQDYTGIPAIADLAAMRDAVKGKNKNPDKINPLSTVDLVIDHSVMVDEYASGKSFNQNVEREFSRNGERYSFLKWGQKAFDNFRVVPPGTGICHQVNLEYLSKVVWSSKSGNDLYAYPDTLVGTDSHTTMVNGLSVLGWGVGGIEAEAAMLGQPISMLIPEVIGVELKGKLKEGTTATDLVLIIVEMLRKKGVVGKFVEFYGDGLKNLTLADRATIANMAPEYGATCGFFPIDDETLKYLKLSGRDQET

SEQ ID NO: 178517 - protein, 295 aa, Unknown
  Bacterial polypetide isolated from the Sargasso Sea
FLKNIWPSNKEIEDTLRGALNAEMFIKRYSNISEGPIQWQNIKTKKSSIYNWDEGSTYVKKPPFFENLTEEPEGFKKIKDARPVVILGDMVTTDHISPAGSIQKKSPTGEYFMKHQILPKDYNSYGSRRGNHEVMMRGTFANIRIRNEMAPGTEGGFTKLYPEGKVMPIYEAVVEYKKRGTDLIVIGGKEYGTGSSRDWAAKGTKLLGVKTVIAESFERIHRSNLIGMGILPLQFIDGMDRLNLKLKGSELISIINLEKGIQPLEKIKVEIKYVSGDIKIIETICRIDTKNEIEY

SEQ ID NO: 178518 - protein, 294 aa, Unknown
  Bacterial polypetide isolated from the Sargasso Sea
IKANYLASPPLVVAYALAGHMEFDLFEDSFGKDKDGKKIYLKDIWPSNKEIEETLNSSLNADMFIKRYSNISQGPKQWQEIKTEKSSIYNWDDNSTYVKKPPFFDNLSDLPEGFKPIKDARPLLILGDMVTTDHISPAGNIQKQSPTGEYFMHHQILPKDYNSYGSRRGNHEVMMRGTFANIRIRNEIAPETEGGFTKLYPEGKVMPVYDAVVEYKKRGTDLVVIGGKEYGTGSSRDWAAKGTKLLGIKTVIAESFERIHRSNLIGMGVLPLQFKEGMNRINLDLKGPELISVL

SEQ ID NO: 178519 - protein, 261 aa, Unknown
  Bacterial polypetide isolated from the Sargasso Sea
LGLEVKPWVKTSLAPGSQVVTDYLEKAGLSKYLDKLGFNLVGYGCTTCIGNSGPLADNIIEAIQRDNIYAVSVLSGNRNFEGRISPHIKANYLASPPLVVAYALAGHMAFDLYKDSYGKDKDGKDIYLKDIWPSNKEIEDKLKSSLNADMFIKRYSNVSEGPKQWQDIKTEKSSIYNWDENSTYVKKPPFFENLPDEPEGFKPIIDARPLLILGDMVTTDHISPAGNIQKESPTGEYFMNYQILPKDYNSYGSRRGNHEVM

SEQ ID NO: 178520 - protein, 300 aa, Unknown
  Bacterial polypetide isolated from the Sargasso Sea
MNFDIYKNSLGIYKDGKEVFLKDIWPTNKEIEDIMLKSINAEMFINRYSKVSEGPKEWSDIKTVDSSIYNWEDKSTYVKRPPFFDNLPDQPEGFKPIKDARLLLLLADSVTTDHISPAGNIKKDSPTGDYFMKNQVQQKDFNSYGARRGNHEVMMRGTFGNIKIKNEMAPGTEGGFTTLQPDGKVMSVYDAAIEYKKRGNDLVVMAGKEYGTGSSRDWAAKGTKLLGIKAVIAESFERIHRSNLIGMGVLPLQFKQGFDRKKLNITGTELITIVDIDKGVKPRDEVSCEIKYKDGTSKII

SEQ ID NO: 178521 - protein, 208 aa, Unknown
  Bacterial polypetide isolated from the Sargasso Sea
ESPTGNYFMKHQILPKDYNSYGARRGNHEVMMRGTFANIRIKNEMAPDTEGGFTKLYPEEKVMPIYDAVVEYKKRGTDLVVFGGKEYGTGSSRDWAAKGTKLLGIKAVIAESFERIHRSNLIGMGVLPLQFVENMNRQNLNLKGSELISVLGLEKGINPGDHLEVEIKYGAGDIKKIKMLCRIDTKNELEYYKNGGILQYVLRNMING

SEQ ID NO: 178522 - protein, 304 aa, Unknown
  Bacterial polypetide isolated from the Sargasso Sea
LQNDEYLFPDTLVGTDSHTTMVNGLSVLGWGVGGIEAEAGMLGQPISMLIPEVIGFEVKNKLPEGTTATDLVLTVVKMLRDKGVVGKFVEFFGDGLKNLSLADRATIANMAPEYGATCGFFPVDNETLKYLKFSGRNENEVKIVEEYAKAQGLWASEDIEFTDTISLDMSKVVPTISGPKRPQDKVLLNEASESFKKVFKDATGRNEKSRSKVENTDFKIEDGSILIAAITSCTNTSNPNVLIGAGLLAKKAVELGLQTKPWVKTSLAPGSQVVTDYLEKAGLNKYLDILGFNLVGYGCTTCIG

SEQ ID NO: 178523 - protein, 279 aa, Unknown
  Bacterial polypetide isolated from the Sargasso Sea
NKEQILAIKEWLNSKKSKTEIAYRPARVLLQDYTGIPAVADLAAMRDTVKEKNKDPNTINPLSSVDLVIDHSVQVDKFATKNSLKENVDIEFDRNFERYSFLKWGQQAFNNFRIVPPGTGICHQVNLEYLSKVVWNEKFEDKEYLFPDTLVGTDSHTTMVNGLSVLGWGVGGIEAEAGMLGQPISMLIPEVIGFEMKNKLPEGTTATDLVLTVVKMLRDKGVVGKFVEFYGEGLNNLTLADRATIANMAPEYGATCGFFPIDEETLKYLEFSGRSKENI

SEQ ID NO: 178524 - protein, 299 aa, Unknown
  Bacterial polypetide isolated from the Sargasso Sea
TCGFFPVDNETLRYLKFSGRDQSIVNIVEKYAKEQGLWVNDEIEFTDTLTLDMSTIVPTISGPKRPQDKVSLTEASNNFKKIFSENTNKKDFSISKVPNTDFEIKDGSILIAAITSCTNTSNPNVLIGAGLLAKKAVDLGLQVKPWVKTSLAPGSQVVTDYLEKAGLNIYLDKLGFNLVGYGCTTCIGNSGPLPENIVEAIQKENIYGVSVLSGNRNFEGRISPHIKANYLASPPLVVAYALAGHMSFDLYKDSFGKDKNGKDIFMKDIWPTNKEIEETFKLSLNAEMFIKRYSNVSEG

SEQ ID NO: 178525 - protein, 265 aa, Unknown
  Bacterial polypetide isolated from the Sargasso Sea
DETLKYLKFSGRDKHTISLVEKYSKEQGLWVDDDISFTKILELDLSKVFPSISGPKRPQDKVLLSESSKSFMESFKKNMNRESIKEEVVSGKNFKLKDGNIVIAAITSCTNTSNPSVLIGAGLLAKKAVEKGLKVKPWVKTSLAPGSQVVTDYLEKAGLNKYLDQLGFHLVGYGCTTCIGNSGPLKENISQAIQKGNLYSVSVLSGNRNFEGRINPDVKANYLASPPLVVAFALAGSMNFDLYKEPLGKDKEGKNIFLKDIWPSK

SEQ ID NO: 178526 - protein, 313 aa, Unknown
  Bacterial polypetide isolated from the Sargasso Sea
KDIWPSNKEIEELILTSINAEMFSKRYSRVSEGSDDWKKIKTTESSIYNWNESSTYVKKPPFFEKMSDNPEGFKKIADARPLVILGDMITTDHISPAGSIKKDSPTGDYFMKHQVQQKDFNSYGARRGNHEVMVRGAFGNIRIRNEMAPGTEGGFTKLYPEGKVMSIYEAAMEYKKRGNDLVVIAGKEYGAGSSRDWAAKGTKLLGVKAVIAESFERIHRSNLIGMGILPLQFKDGFNKSKLKLKGSELITIINIDKGITPGQEVECEIKYADGVAKKINLLSRIDTANEVEYYKNNGILKYVLRSHVIMRNI

SEQ ID NO: 178527 - protein, 268 aa, Unknown
  Bacterial polypetide isolated from the Sargasso Sea
SLKEGITATDLVLSITKILRDRGVVGKFVEFYGRGLKNLSLADRATISNMAPEYGATCGFFPTDEETINYLKLTGKENEHLNIVKEYSKKQNIWADENYAPDYFEKILLDLDTIEPTLAGPKRPQDKILLKDVPTEFSKIDSNQTINNKLNTGDVVIAAITSCTNTSNPNVMIAAGLVAKKAIDLGLEVKPWVKTSLAPGSKVVSDYLEKAGLTEYLDTLGFNTVGYGCTTCIGNSGPLDEWVSNEIQKNNLTVCSVLSGNRNFEGRV

SEQ ID NO: 178528 - protein, 287 aa, Unknown
  Bacterial polypetide isolated from the Sargasso Sea
KYLTFSGRDSNTVKIVETYAKDQGLWASDDIEFTDTISLDMSSIVPTISGPKRPQDKVLLSEASKNFKRIFQDTTKRNIKKSSKVRGFDYDISDGSILIAAITSCTNTSNPNVLIGAGLLAKKAVELGLRTKPWVKTSLAPGSQVVTDYLNKAGLSKYLDMLGFNLVGYGCTTCIGNSGPLSEEIVNAIEKENLYTVSVLSGNRNFEGRISPNVKANFLASPPLVVAYALAGHMEIDIYKDKIGIGNNNKEIFLKDIWPTNKEIEDTLQKALSAEMFVNRYKNVSEG

SEQ ID NO: 178529 - protein, 275 aa, Unknown
  Bacterial polypetide isolated from the Sargasso Sea
FLKWGQQAFNNFRIVPPGTGICHQVNLEYLSKVVWKESYKNDEYLFPDTLVGTDSHTTMVNGLSVLGWGVGGIEAEAGMLGQPISMLIPEVIGFEVKNKLPEGTTATDLVLTVVKMLRDKGVVGKFVEFFGDGLKNLSLADRATIANMAPEYGATCGFFPVDNETLKYLKFSGRDENDVKIVKEYAKVQGLWASEDIEFTDTISLDMSKVVPAISGPKRPQDKVLLNEASESFKKVFKDATGRNEKSSSKVENTDFKIEDGSILIAAITSCTNTS

SEQ ID NO: 178530 - protein, 307 aa, Unknown
  Bacterial polypetide isolated from the Sargasso Sea
VKTSLAPGSQVVTDYLEKAGLNKYLDQLGFHLVGYGCTTCIGNSGPLKENISEAIQKGNLYSVSVLSGNRNFEGRINPDVKANYLASPPLVVAYALAGSMNFDLYNEPLGKDKKGKDIFLKDIWPTNKEIEELILTSINAKMFSKRYSKISEGSNDWKKIKTTESSIYNWNDSSTYVKKPPFFEKMSDNPEGFKKITDARPLLILGDMVTTDHISPAGSIKKDSPTGDYFMKHQVQQKDFNSYGARRGNHEVMVRGAFGNIRIRNEMVPGSEGGFTKLYPEGKVMSIYEAAMEYKKRGNDLVVIAEK

SEQ ID NO: 178531 - protein, 300 aa, Unknown
  Bacterial polypetide isolated from the Sargasso Sea
IANMAPEYGATCGFFPIDEETLKYLEFSGRDKETVAIVEKYAKEQGLWASDEIEFTDKISLDMSTVVPTISGPKRPQDKVLLTDASNNFKKVFKEATDKNDYKISKVKDTDYEIKDGSILIAAITSCTNTSNPNVLIGAGLLAKKAIELGLNVKPWVKTSLAPGSQVVTDYLEKAGLNTYLDQLGFNLVGYGCTTCIGNSGPLAENIVDAIQKENLYAVSVLSGNRNFEGRISPHIKANYLASPPLVVAYALAGHMEFDLIKDSFGKDKNGKDIFLKDIWPSNKEIEDTLKISLYADMFV

SEQ ID NO: 178532 - protein, 247 aa, Unknown
  Bacterial polypetide isolated from the Sargasso Sea
MVLTITQQLREHGVVGKFVEFYGPGLKHLTTADRATIANMAPEYGATCGIFPIDDVALDYLRLTGRDEDQIALVEEYAKFSHLWHDDHSKDAQYHETLELNLDEVVPSLAGPKRPQDRIALDNAAEAFREWHRSQIDVKVLDEETDLIAEAGLGTTDEVDEEHDSFVEFRGSKFNLEDGAIVIAAITSCTNTSNPSVLVGAGLLAKKAAEKGLTRKPWVKTSLAPGSQVVTQYLEDAGLMDPLEALG

SEQ ID NO: 178533 - protein, 251 aa, Unknown
  Bacterial polypetide isolated from the Sargasso Sea
MEKSGLNKYLDNLGFNLVGYGCTTCIGNSGPLSENIVKAIEKENIYAASVLSGNRNFEGRISPHIKANYLASPPLVVAYALAGDMEFDLYKDSLGKNQNGKEIYLKDIWPSNKEIENTLRESLSTDMFVKRYSNVSQGPIQWQKIKTEKNSIYNWNEGSTYVKKPPFFENLSDKPEGFKKIEDARPLLILGDMITTDHISPAGSIQKESITGKYFMEHQILPKDYNSYGARRGNHEVMMRGTFGNIRIRNE

SEQ ID NO: 178534 - protein, 218 aa, Unknown
  Bacterial polypetide isolated from the Sargasso Sea
PPGTGICHQVNLEYLSKVVWSEEFKEEKYLFPDTLVGTDSHTTMVNGLSVLGWGVGGIEAEAGMLGQPISMLIPEVIGFEMKNKLPEGTTATDLVLTVVKMLRDRGVVGKFVEFYGEGLKNLTLADRATIANMAPEYGATCGFFPIDEETLKYLKFSGRDQQTVDVVESYAKEQGLWASNEIEFTDIISLDMSTVVPTISGPKRPQDKVLLTDAPSSF

SEQ ID NO: 178535 - protein, 270 aa, Unknown
  Bacterial polypetide isolated from the Sargasso Sea
TSCTNTSNPSVMIGAGLVAKKAVEKGLKVKPWVKTSLAPGSQVVTDYLEKAGLNQYLDQLGFNLVGYGCTTCIGNSGPLDKEISEAIHKENLYAVSVLSGNRNFEGRINPDVKANYLASPPLVVAYALAGNMHHDLYKNPLGKDENGKDVFLKDIWPSNKEIEELMLKSINAEMFVKRYSNVSEGPKEWSSIKTDQSSIYNWEESSTYVKRPPFFDNLPDKPEGFKKIQDARPLLILGDTVTTDHISPAGSIKKDSPTGDYFMKHHGSAK

SEQ ID NO: 178536 - protein, 270 aa, Unknown
  Bacterial polypetide isolated from the Sargasso Sea
LKDIWPSNKQIEDTLREALNAEMFVKRYSNISDGPIQWQKIKTEKSSIYNWDQGSTYVKKPPFFDNLPDEPEGFKKIKDARPLLILGDMVTTDHISPAGSIQKESPTGEYFMEHQILPKDYNSYGSRRGNHEVMMRGTFANIRIRNEMAPGTEGGFTKLYPEGKVVPVYEAVVEYKKRGTDLVVIGGKEYGTGSSRDWAAKGTKLLGIKAVIAESFERIHRSNLIGMGILPLQFIENISRKNLNLKGSELISVMNLEKGINPSEKVILEI

SEQ ID NO: 178537 - protein, 283 aa, Unknown
  Bacterial polypetide isolated from the Sargasso Sea
TDLVLTVVKMLRDKGVVGKFVEFYGEGLKNLTLADRATIANMAPEYGATCGFFPIDEETLKYLKFSGRDQHTVNIVENYAKEQGLWASSDLEFTDIISLDMSTVVPTISGPKRPQDKVLLTEAPNSFKKVLQEATSKNEKSVSKVANTDYDIKDGSILIAAITSCTNTSNPNVLIGAGLLAKKAIEKGLQVKPWVKTSLAPGSQVVTDYLEKAGLNTYLDQLGFNLVGYGCTTCIGNSGPLAENIVEAIQKENIYAVSVLSGNRNFEGRISPHVKANYLASPP

SEQ ID NO: 178538 - protein, 273 aa, Unknown
  Bacterial polypetide isolated from the Sargasso Sea
DWKKIKTTESSIYNWNDSSTYVKKPPFFEKMSDNPEGFKKIADARPLVILGDMVTTDHISPAGSIKKDSPTGDYFMKHQIQQKDFNSYGARRGNHEVMVRGAFGNIRIRNEMVPGTEGGFTKLYPEGKVMSIYEAAMEYKKRGNDLVVIAGKEYGAGSSRDWAAKGTKLLGVKAVIAESFERIHRSNLIGMGMIPLQFKDGFNRKKLNLKGSELITFIGIEKGITPGQEVECEIKYVDGVAKKINLLSRIDTANEVEYYKNDGILKFVLRSML

SEQ ID NO: 178539 - protein, 254 aa, Unknown
  Bacterial polypetide isolated from the Sargasso Sea
TYVKKPPFFDSLSDEPEGFKEIKDARPLLILGDMVTTDHISPAGSIQKDSPTGEYFMEHQILPKDFNSYGSRRGNHEVMMRGTFANIRIRNEMAPGTEGGFTKLYPEEKVLPIYDAVVEYKKRGTDLVVIGGKEYGTGSSRDWAAKGTKLLGIKAVIAESFERIHRSNLIGMGILPLQFINDVNRKNLKLIGSELISIINIEKGVNPSDEVTVEIKYASGEIKKFKTLCRIDTKNELEYYKNGGILQYVLRNMI

SEQ ID NO: 178540 - protein, 282 aa, Unknown
  Bacterial polypetide isolated from the Sargasso Sea
KIKDGSILIAAITSCTNTSNPNVLIGAGLLAKKAIELGLKTKPWVKTSLAPGSQVVTDYLEKAGLNKYLDMLGFNLVGYGCTTCIGNSGPLKENIVSAIEKESIYAVSVLSGNRNFEGRISPHIKANYLASPPLVVAYALAGHMEIDLFKDPLGKDKNGKDIFLKDIWPSNKEIEATLADSLNANMFIKRYSNVSEGPVQWQKIKTEKTSIYNWDESSTYVKRPPFFDQLSDEPEGFKEIKDARPLLILGDMVTTDHISPAGSIQKESPTGEYFMKHPSASK

SEQ ID NO: 178541 - protein, 295 aa, Unknown
  Bacterial polypetide isolated from the Sargasso Sea
SLAPGSQVVTDYLEKAGLNKYLDQLGFNLVGYGCTTCIGNSGPLDKEISETIHKENLYAVSVLSGNRNFEGRINPDVKANYLASPPLVVAYALAGNMHHDLYKNSLGKDENGKDVFLKDIWPSNKEIEELMLKSINADMFVKRYSNVSEGPKEWSSIKTDQSSIYNWEESSTYVKRPPFFDNLPDKPEGFKKIKDARPLLILGDTVTTDHISPAGSIKKDSPTGDYFMKHQVQQKDFNSYGARRGNHEVMLRGTFGNIRIRNEMAAGTEGGFTILQPNGKQMSVYEAAMEYKKRG

SEQ ID NO: 178542 - protein, 238 aa, Unknown
  Bacterial polypetide isolated from the Sargasso Sea
ETLVYPDTLVGTDSHTTMINGLGVLGWGVGGIEAEAAMLGQPVTMLLPKVVGFRLSGKLPAGVTATDMVLTITQQLREHGVVGKFVEFYGPGLKHLTTADRATIANMAPEYGATCGIFPIDDVALDYLRLTGRDEDQIALVEEYAKFSHLWHDDHSKDAQYHETLELNLDEVVPSLAGPKRPQDRIALDNAAEAFREWHRSQIDVKVLDEETDLIAEAGLGTTDEVDEEHDSFVEFRG

SEQ ID NO: 178543 - protein, 289 aa, Unknown
  Bacterial polypetide isolated from the Sargasso Sea
WSLPENISNSIKENDIYAVSVLSGNRNFEGRISPLVKANYLASPPLVVAYSLVGSMQVDLYKDSIGKDKDDKEVYLKDIWPSNKEIEEVLLQSLSPEMFIERYSNVSKGPEQWQQIKTKESSIYEWDDNSTYVKKPPFFENLSSTPEGFKAIKNARPLLILGDSVTTDHISPAGAIQKESPTGEYFMKHQILPKDYNSYGSRRGNHEVMMRGTFANIRIRNEVAPGTEGGFTKLYPENKVMPVYDAVVEYKQRGTDLVVIGGKEYGTGSSRDWAAKGTKLLGIKAVIAE

SEQ ID NO: 178544 - protein, 288 aa, Unknown
  Bacterial polypetide isolated from the Sargasso Sea
KSSKMEIAYRPARILLQDYTGIPAVADLAAMRDAVKSKNKDPKKINPLSKVDLVIDHSVMVDNYAKKDSFKKNVEREFDRNGERYSFLKWGQSAFNNFRVVPPGTGICHQVNLEYLSKVVWSLDIEGKTYAYPDTLVGTDSHTTMVNGLSVLGWGVGGIEAEAAMLGQPISMLIPEVIGFEINGRLTEGTTASDLVLTIVQMLRKKGVVGKFVEFYGEGLKNLSLADRATIANMAPEYGATCGFFPIDEETIKYLKFSGRDEKTISLVEKYSKEQGLWASEEIEFTDT

SEQ ID NO: 178545 - protein, 271 aa, Unknown
  Bacterial polypetide isolated from the Sargasso Sea
LDTVVGTDSHTTMVNGLGVLGWGVGGIEAEAAMLGQPIPMLLPEVIGFRLDGQLAKTSTATDLVLTIVEKLRQANVVGKFVEFYGDALDTLSIYDRCTIANMAPEYGATCGFFPVDQLTLDYLKTTGKSVEHVDMVENYCKEVGLFRDPNNDIKFSQELHLNLSDVLPCISGPKRPEDKILLSDVKNVISTEISKISKNKDSKKTVLEDGSIVIAAITSCTNTSNPSVIIGAGLLAKNAIEKGLNKKTWVKTSLAPGSKVVENYLRKADLL

SEQ ID NO: 178546 - protein, 310 aa, Unknown
  Bacterial polypetide isolated from the Sargasso Sea
NKDPNQINPLSTVDLVIDHSVMVDEYASGKSFNQNVEKEFSRNGERYAFLKWGQKAFDNFRVVPPGTGICHQVNLEYLAKVVWSSKSGNDLYAYPDTLVGTDSHTTMVNGLSVLGWGVGGIEAEAAMLGQPISMLIPEVVGVEIKGKLLEGLTATDLVLAIVEMLRKKGVVGKFVEFYGEGLKNLTLADRATIANMAPEYGATCGFFPVDEETLKYLKLSGRDNETIELVEKYSKEQGLWASEGMEFTDTLSLDISSVVPSISGPKRPQDKVLLTNSAKSFAKAYKENTKREKPIEANVAGADFKIKDGD

SEQ ID NO: 178547 - protein, 276 aa, Unknown
  Bacterial polypetide isolated from the Sargasso Sea
VVTDYLEKAGLSKYLDELGFNLVGYGCTTCIGNSGPLQDNITEAIKENNLYAVSVLSGNRNFEGRISPLVKANYLASPPLVVAYAIAGSMRVDLYKDPLGKDNKGQDVYLKDIWPTNKEIEDTLKQSLNPDMFVNRYSNVSEGPEQWQKIKVDKGSIYNWEENSTYVKKPPFFENLPDDPEGFKEIKDARPLLILGDMVTTDHISPAGTIQKESPTGNYFMKHQILPKDYNSYGARRGNHEVMMRGTFANIRIKNEMAPGTEGGFTKLYPEEKVMP

SEQ ID NO: 178548 - protein, 203 aa, Unknown
  Bacterial polypetide isolated from the Sargasso Sea
MDQLGFNLVEYGCTTCIGNSGPLQENISEAIKKENIYAASVLSGNRNFEGRISPLVKANYLASPPLVVAYALAGTMSIDLYKDPLGKDNEGNNIYLKDIWPSNKEIEDTLKNSLNPDMFVKRYSNISEGPKQWQKIKTEPSSIYNWEESSTYVKKPPFFENLPDEPEDIKNINEARPLLILGDMVTTDHISPAGTIQKESPTG

SEQ ID NO: 178549 - protein, 306 aa, Unknown
  Bacterial polypetide isolated from the Sargasso Sea
RPQDKILLSNVADQFMTSFEDEFGQKKTSNPISVNNEFEIDHGHVAIAAITSCTNTSNPSVMIGAGLLAQKANKLGLKTKPWVKTSLAPGSKVVTDYLEKSGLQEQLDKLGFNLVGFGCTTCIGNSGPLDENISNAISKNDLIVSGVLSGNRNFEGRINPFVKANYLASPPLVVAYALAGSTKINLIKDPIGIGLNNREIYLKDIWPKSKEIETVINKIINSNLYKNRYKNVFKGDKKWNSVKSPTGLTYQWNKNSTYVQHPPFFKNLDLKVNNVSNIRNAHILGVFGDSVTTDHISPAGAIKEDG

SEQ ID NO: 178550 - protein, 269 aa, Unknown
  Bacterial polypetide isolated from the Sargasso Sea
KEKHISEVNGTDFKIKDGSILIAAITSCTNTSNPNVLIGAGLLAKKAVELGLKTKPWVKTSLAPGSQVVTDYLEKAGLNKYLDELGFNLVGYGCTTCIGNSGPLPDNIVEAIEKENIYAVSVLSGNRNFEGRISPHIKANYLASPPLVVAYALAGYMEVDLYKDPLGKDKNDKDIFLKDIWPSNKEIEDVLREALNAKMFVERYSNVSEGPVQWQKIKTEKSSIYNWDEGSTYVKRPPFFDNMPDEPEGFKKIKNARPLLILGDMVTTD

SEQ ID NO: 178551 - protein, 246 aa, Unknown
  Bacterial polypetide isolated from the Sargasso Sea
SEISNDPGSISNINKAKILAVLGDMITTDHISPAGSFLETTPAGKYLTERQVPAREFNSYGSRRGNHEIMMRGTFANIRIKNEMLSNTEGGYTKDPNGETTSIFDAAMAYKNSGIPLVVIGGDQYGAGSSRDWAAKGTALLGVKAVIAESFERIHRSNLVGMGVIPFEFTQGDNRKSLSLSGDEIVSIHGLEEITPLEHVDCEILYPDGNIKIIRLKCRIDTAIEIEYIEHGGVLHFVLRNLAKAS

SEQ ID NO: 178552 - protein, 276 aa, Unknown
  Bacterial polypetide isolated from the Sargasso Sea
KVLLENLLRWEDAKTVTGTDLKAIAAWLKERQSDREIQYRPARVLMQDFTGVPAVVDLAAMRAAVAKAGGDPQRINPLSPVDLVIDHSVMVDKFGSTSAFEQNVDIEMQRNGERYAFLRWGQSAFDNFSVVPPGTGICHQVNLEYLGRTVWTKEEDGRTYAFPDTLVGTDSHTTMINGLGVLGWGVGGIEAEAAMLGQPVSMLIPEVIGFKLTGKLKEGITATDLVLTVTQMLRKKGVVGKFVEFYGDGLADLPLADRATIANKAPEYGATCGFFP

SEQ ID NO: 178553 - protein, 209 aa, Unknown
  Bacterial polypetide isolated from the Sargasso Sea
MCSQVVTDYLEKAGLNIYLDKLGFNLVGYGCTTCIGNSGPLPENISEAVKKNDIFAVSVLSGNRNFEGRISPLIKANYLASPPLVVAYALAGHMGFDLYKDSFDKNIFLKDIWPSNKEIEEVLNKSLTPNMFINRYSNISEGPKQWQNIKTEKSSIYNWDEGSTYVKKPPFFDNLSDKPEGFKKIEDARPLLILGDMITTDHISPAGSI

SEQ ID NO: 178554 - protein, 303 aa, Unknown
  Bacterial polypetide isolated from the Sargasso Sea
EAYKKNVKNEFDRNKERYEFLKWGQQTFDNFYLAPPGGGICHQVNLENIATTIWSKTIDKENFLYPDSVVGTDSHTTMVNALSVLGWGVGGIEAEAAMLGQPISMNIPKVVGFKLNGKLQEGITATDLVLTITEILRKHGVVGKFVEFYGGGLQNLSLADRSTISNMSPEYGATCGFFPTDQETINYLKLSGKNNTQLNIVKQYTKIQKLWMNEDYEPRFDEMVSLDLGTIEPAVAGPKRPQDKIFVKDLPEAFKKIDKLAISKSNNSQQLQSGDIVIAAITSCTNTSNPNVMDSCRFGAKKA

SEQ ID NO: 178555 - protein, 261 aa, Unknown
  Bacterial polypetide isolated from the Sargasso Sea
EKYKDEQYLFPDTLVGTDSHTTMVNGLSVLGWGVGGIEAEAGMLGQPISMLIPEVIGFEFKNKMPEGITATDLVLTVVKILRDKGVVGKFVEFYGDGLKNLTLADRATIANMAPEYGATCGFFPIDDETLKYLRFSGRNEHNVAIVEKYAKEQGLWASENVEFTDKVSLDMSSLVPTISGPKRPQDKVLLSEASSSFKKVFENTTSRNKKNVSKVNGKEFNIEDGSILIAAITSCTNTSNPNVLIGAGLLAKKAVELGLKT

SEQ ID NO: 178556 - protein, 289 aa, Unknown
  Bacterial polypetide isolated from the Sargasso Sea
SDAIKKENIYAVSVLSGNRNFEGRISPLVKANYLASPPLVVAYALAGSMSIDLYKDPLGKDNKGNDVFLKDIWPSNKEIDDTLKNSLNADMFVKRYSNISEGPKQWQKIKTEPTSIYNWEESSTYVKKPPFFENLPDKPEDIKNINDARPLLILGDMVTTDHISPAGTIQKESPTGEYFMKHQILTKDYNSYGARRGNHEVMMRGTFANIRIRNEIAPETEGGFTKLYPEEKVMPVYDAVVEYKKRGTNLVVIGGKEYGTGSSRDWAAKGTKLLGIKAVLAESFERIHR

SEQ ID NO: 178557 - protein, 252 aa, Unknown
  Bacterial polypetide isolated from the Sargasso Sea
DKLGFNLVGYGCTTCIGNSGPLADNIVEAIQRKNLYGVSVLSGNRNFEGRISPHIKANYLASPPLVVAYSLAGHMSFDLYKDSFGKDKNGNDIFLKDIWPSNKEIEETLKKSLNAEMFIKRYSNVSQGPKQWQDIKTEKSSIYNWDENSTYVKKPPFFDNLSEEPEGFKAIKNARPLLILGDMVTTDHISPAGNIQKESPTGEYFMKHQILPKDYNSYGSRRGNHEVMMRGTFANIRIRNEIAPGTEGGFTK

SEQ ID NO: 178558 - protein, 287 aa, Unknown
  Bacterial polypetide isolated from the Sargasso Sea
PNVLIGAGLLAKKAVDKGLQTKPWVKTSLAPGSQVVTDYLEKAGLSSYLDQLGFNLVGYGCTTCIGNSGPLKENISNAVKNDNIYAVSVLSGNRNFEGRISPLVKANYLASPPLVVAYAIAGSMRIDLLKDPLGKDKNGNDIFLKDIWPSNNEIEETLKDSLNAEMFIKRYSNISEGPEQWQKIKTEQSSIYNWEESSTYVKKPPFFENLPDKPEGFKEIKDARPLLILGDMVTTDHISPAGTIQKESPTGEYFMQHQILSKDYNSYGSRRGNHEVMMRGTFANIRI

SEQ ID NO: 178559 - protein, 251 aa, Unknown
  Bacterial polypetide isolated from the Sargasso Sea
RYEDDVTVDKKQILALKDWLKNKKSNTEIAYRPARTLLQDYTGIPAIADLAAMRDAVKDKNKNPDKINPLSTVDLVIDHSVMVDEYASGKSFNQNVEREFSRNGERYSFLKWGQKAFDNFRVVPPGTGICHQVNLEYLSKVVWSSKSGTDLYAYPDTLVGTDSHTTMVNGLSVLGWGVGGIEAEAAMLGQPISMLIPEVVGVELKGKLKEGTTATDLVLIIVEMLRKKGVVGKLVEFYGEGLKNLTLADRA

SEQ ID NO: 178560 - protein, 276 aa, Unknown
  Bacterial polypetide isolated from the Sargasso Sea
KNVDIEFSRNAERYAFLRWGQQAFQNFRVVPPAIGIVHQVNLEFLAGCVFLRKQSDSEKGGDNRLPVAVPDTLVGTDSHTTMINGLGVVGWGVGGIEAEAVMLGQALSLLMPEVVGFELTGTLPAGATATDLVLTVTEALRKEGVVGKFVEFFGEGLAGMSLADRATIANMAPEYGATMGFFPVDDETLAYLRLTGRSDDHVSLVERYMKEQGLFRTNEAPVPEYTKRLSLDLGSVVPSLAGPKRPQDRVPLSSIKETFGQALQAPANQRGFALEG

SEQ ID NO: 178561 - protein, 241 aa, Unknown
  Bacterial polypetide isolated from the Sargasso Sea
SCTNTSNPSVMIGAGLVAKKAVEKGLKVKPWVKTSLAPGSQVVTDYLEKAGLNKYLDQLGFNLVGYGCTTCIGNSGPLDKEISETIHKENLYAVSVLSGNRNFEGRINPDVKANYLASPPLVVAYALAGNMHHDLYKNSLGKDQNGKDVFLKDIWPSNKEIEELMLKSINADMFIKRYSNVSEGPKEWSSIKTDQSSIYNWEESSTYVKRPPFFDNLPDKPEGFKKINDARPLLILGDTVT

SEQ ID NO: 178562 - protein, 284 aa, Unknown
  Bacterial polypetide isolated from the Sargasso Sea
WTFADNITDAVKENNLYAVSVLSGNRNFEGRISPLVKANYLASPPLVVAYAIAGSMRMDLYKDPLGKDDKGQDVYLKDIWPSNKEIEDTLKQSLNPEMFVNRYSNVSEGPEQWQKIKVNKGSIYNWEENSTYVKKPPFFENLPDEPEGFKEIKDARPLLILGDMVTTDHISPAGSIQKESPTGNYFMKHQILPKDYNSYGARRGNHEVMMRGTFANIRIKNEMAPGTEGGFTKLYPEEKVMPIYDAVVEYKKRGTDLVVFGGKEYGTGSSRDWAAKGTKLLGIK

SEQ ID NO: 178563 - protein, 304 aa, Unknown
  Bacterial polypetide isolated from the Sargasso Sea
TTCIGNSGPLPDNIVEAIEKEDIYGVSVLSGNRNFEGRISPHIKANYLASPPLVVAYGLAGHMEIDLYKDPLGKDKNNKDIFLKDIWPSNKQIEETLREALNAEMFVKRYSNVSKGPIQWQKIKTEKSSIYNWDKGSTYVKKPPFFDNLPDEPEGFKKIKDARPLLILGDMVTTDHISPAGSIPKESPTGEYFMKHQILPKDYNSYGSRRGNHEVMMRGTFANIRIRNEMAPGTEGGYTKLYPEGKVMPVYDAVVEYKKRGTELIVVGGKEYGTGSSRDWAAKGTKLLGIKVVIAESFERIIDQ

SEQ ID NO: 178564 - protein, 281 aa, Unknown
  Bacterial polypetide isolated from the Sargasso Sea
SNISEGPKQWQEIKTEKSSIYNWDENSTYVKKPPFFENLSDEPEGFKEIKNARPLLILGDMVTTDHISPAGNIQKDSPTGEYFMNYQVLPKDYNSYGSRRGNHEVMMRGTFANIRIKNEMVPGTEGGFTKLYPQEKVMSVYDAAVEYKKRGTDLVVIGGKEYGTGSSRDWAAKGTKLLGIKAVIAESFERIHRSNLIGMGILPLQFKNNMNRINLNLIGSEFISVLNIEKGINPSDSVKLEIKYLSGDIKTIDTLCRIDTKNELEYYKNGGILQYVLRNMI

SEQ ID NO: 178565 - protein, 239 aa, Unknown
  Bacterial polypetide isolated from the Sargasso Sea
LRYEDNVTVNKEQIFAIKEWLNSKKSKTEIAYRPARVLLQDYTGIPAVADLAAMRDTVKEKNKDPNTINPLSSVDLVIDHSVQVDKFATKNSLKENVDIEFDRNFERYSFLKWGQQAFNNFRIVPPGTGICHQVNLEYLSKVVWNEKFKDKEYLFPDTLVGTDSHTTMVNGLSVLGWGVGGIEAEAGMLGQPISMLIPEVVGFEMKNKLPEGTTATDLVLTVVKMLRDKGVVGKFVEFY

SEQ ID NO: 178566 - protein, 307 aa, Unknown
  Bacterial polypetide isolated from the Sargasso Sea
NLLRYEDDILVNKKQIEAVKNWVDTKKSKTEIAYRPARVLLQDYTGIPAVADLAAMREAVKEKNKDPNKINPLSAVDLVIDHSVQVDQSAKKDSFEKNVDIEFKRNGERYSFLKWGQSAFNNFRIVPPGTGICHQVNLEYLSKVVWSEEYKEEKYLFPDTLVGTDSHTTMVNGLSVLGWGVGGIEAEAGMLGQPISMLIPEVIGFEVTKKMPEGTTATDLVLTVVKMLRDKGVVGKFVEFYGEGLKNLTLADRATIANMAPEYGATCGFFPIDEETLKYLEFSGRDKETVTIVEKYAKEQGLWASEK

SEQ ID NO: 178567 - protein, 286 aa, Unknown
  Bacterial polypetide isolated from the Sargasso Sea
EEWVSKEIKNKDLTVCSVLSGNRNFEGRVHQEVKANFLASPPLVVAFAIAGNMNINLFSQPVGINKSGKKVFLKDLWPSSSEINEIVDSSLTTDMFKDRYKEIYNGDKNWQSVKSFYEKTYSWSAASTYIKHPPFFADKKTQIQDINNARILALLGDSVTTDHISPAGAIKLDTPAGKYLNARQINTKDFNSYGSRRGNHEIMMRGTFANIRIKNEIVPGTEGGVTKYFETEEKMSIFDAAIAYEQKGIPLVVFAGKEYGTGSSRDWAAKGTKLLGIKAVIAESFE

SEQ ID NO: 178568 - protein, 189 aa, Unknown
  Bacterial polypetide isolated from the Sargasso Sea
FNSYGSRRGNHEVMMRGTFANIRIRNEMAPNTEGGYTKLYPEGKVMPVYDAVEIYKKRKVDLVVIGGKEYGTGSSRDWAAKGTKLLGIKVVIAESFERIHRSNLIGMGILPLQFINGMDRNKLNLIGSELITILDIDKGLQPSEKVKVEIKYNSGDIKIIETICRIDTKNELEYYKNGGILQFVLRNMI

SEQ ID NO: 178569 - protein, 274 aa, Unknown
  Bacterial polypetide isolated from the Sargasso Sea
IRILLEQALRNVEESKSNYEEVSLLANWNASESSYKEIPYRPARVILQDFTGVPAVVDLAALRSAVVEMEGDPAVINPRVPVDLVIDHSIQVDVFGNSDALKNNMDIEFKRNRERYEFLKWGKEAFKNFNVYPPGVGIVHQVNLETIASVVQYRNGVCFPDTLVGTDSHTTMINGLGVMGWGVGGIEAESVMLGQPIYMLIPEVIGFRLHGQLNEGTTATDLVLRVVEMLRQKGVVEKFVEFFGPGLNNLKLADRATLSNMAPEYGATMGFFPS

SEQ ID NO: 178570 - protein, 249 aa, Unknown
  Bacterial polypetide isolated from the Sargasso Sea
PKEWQAINTTDSDIYNWEANSTYVKRPPFFDNLSDQPEGFKPINDARILLLLADTVTTDHISPAGSIKKESPTGDYFMKHQIQQKDFNSYGARRGNHEVMMRGTFGNIKIRNEMAPGTEGGFTTLQPEGKVMSVYEAAMEYKKRKNDLVVIAGKEYGTGSSRDWAAKGTKLLGIKAVLAESFERIHRSNLVGMGVLPLQFKEGFNRKKLNITGVELVSVIDIDKGVKPRQEVTCEIKYQDGTSKKIPML

SEQ ID NO: 178571 - protein, 306 aa, Unknown
  Bacterial polypetide isolated from the Sargasso Sea
EYGATMGFFPVDQETLSYMKLTGRTAEQVELVERYTKEQGLFHTESASTPEFTKRLSLDMSTVVPSLAGPKRPQDRVPMVSVKEAFQDALKAPAANRGFALPESEMTSHATVANNGHSAEIGHGAVVIAAITSCTNTSNPNVMVAAGLVARKAVEKGLSTKSWVKTSLAPGSRVVTDYLEKSGLASDLDSLGFETVGYGCTTCIGNSGPLPEPVAAAVTEGDLVAAAVLSGNRNFEGRVNPLVKANWLASPPLVVAYALAGTIDINLETDSLGEGSDGQPVYLKDIWPTQEEVRETVATAVVPEQF

SEQ ID NO: 178572 - protein, 287 aa, Unknown
  Bacterial polypetide isolated from the Sargasso Sea
SKAESNGLKGISKLPKSLKVLLENLLRYEDDLSVTKNQIDALKNWLETKKSSTEIAYRPARVLLQDYTGIPAVADLAAMREAVKEKNIDPNSINPLSTVDLVIDHSVQVDQSSKADSFEKNVNIEFKRNAERYSFLKWGQDAFNNFRIVPPGTGICHQVNLEYLSKVVWCEKFRDEDYLFPDTLVGTDSHTTMVNGLSVLGWGVGGIEAEAGMLGQPISMLIPEVIGFEVKNKMPEGTTATDLVLTIVKMLRDKGVVGKFVEFYGEGLKNLTLADRATIANMAPEYG

SEQ ID NO: 178573 - protein, 227 aa, Unknown
  Bacterial polypetide isolated from the Sargasso Sea
FNLVGYGCTTCIGNSGPLPDNISNAIKDKNIYAVSILSGNRNFEGRISPEVKANYLASPPLVVAYALAGSMQKDLYKDSLGKDKDGKEVYLKDIWPSDKEIENTLKSSLNAEMFVKRYSNVSKGPEQWQKIKTTKSSIYNWEETSTYVKKPPFFENLPDKPEGFKEIKNARPLLILGDSVTTDHISPAGSIQKESPTGNYFMKHQILPKDYNSYGSRRGNHEVMMRG

SEQ ID NO: 178574 - protein, 284 aa, Unknown
  Bacterial polypetide isolated from the Sargasso Sea
PKIINPLSRVDLVIDHSVMVDSYKSEKSLEKNVKKEFERNKERYKFLKWGQNSFDNFFLVPPGAGICHQVNLENIAKTIWVKKLNNYKYLYPDSVVGTDSHTTMVNALSVLGWGVGGIEAEAAMLGQPISMNIPEVVGFELKGSLKEGITATDLVLTITQILRENGVVGKFVEFFGEGLSNLTLADRATISNMAPEYGATCGFFPTDQETINYLRLTGKDEHHLDIVTEYSKKQLMWADQNYNPNFNNKINLNLNSIEPSLAGPKRPQDKILLKDVPDEFNNII

SEQ ID NO: 178575 - protein, 336 aa, Unknown
  Bacterial polypetide isolated from the Sargasso Sea
NTSNPKCLIGAGLLAKKAVDKGWQTKPWVKTSLAPGSQVVTDYLEKAGLSSYLDQLGFNLVGYGCTTCIGNSGPLKENISNAVKKDNIYAVSVLSGNRNFEGRISPLVKANYLASPPLVVAYAIAGSMRVDLLKDPLGKDKNGNHIFLKDIWPSNNEIEEILKDSLNAEMFIKRYSNISAGPEQWQKIKTEPSSIYNWEESSTYVKKPPFFDNLPDKPEGFKEIKDARPLLILGDMVTTDHISPAGTIQKESPTGEYFMKHQILSKDYNSYGSRRGNHEVMMRGTFANIRIRNEMAPNTEGGFTKLYPEEKVMPVYDAVEAYKKRGTDLVVIGGKE

SEQ ID NO: 178576 - protein, 241 aa, Unknown
  Bacterial polypetide isolated from the Sargasso Sea
VIAAITSCTNTSNPSVMIGAGLLAKKANEKGLKVKPWVKTSLAPGSQVVTDYLEKAGLNKYLDELGFNLVGYGCTTCIGNSGPLNQNISDAINKNDLYAVSVLSGNRNFEGRINPDVKANYLASPPLVVAYALAGNMNFDMYKSSLGKDKNGKDVFLKDIWPSNKEIEDLMLSSLNADMFKERYSNVSQGPKEWQAINTTDSDIYNWEANSTYVKRPPFFDDLPDKPEGFKPINDARILLL

SEQ ID NO: 178577 - protein, 283 aa, Unknown
  Bacterial polypetide isolated from the Sargasso Sea
LPKSLKVLLENLLRYEDDLSVTKAQIEAIKNWIQKKKSSTEIAYRPARVLLQDYTGIPAVADLAAMREAVKEKNKDPNTINPLSSVDLVIDHSVQVDQSAKSDSFEKNVDIEFKRNGERYSFLKWGQQAFNNFRIVPPGTGICHQVNLEYLSKVVWTEKYQDDEYLFPDTLVGTDSHTTMVNGLSVLGWGVGGIEAEAGMLGQPISMLIPEVIGFELKNKMPEGTTATDLVLTVVKILRDKGVVGKFVEFYGDGLKNLTLADRATIANMAPRIWCHMWFFSDR

SEQ ID NO: 178578 - protein, 243 aa, Unknown
  Bacterial polypetide isolated from the Sargasso Sea
MKSIDTFGTLNHLKIANNKYFFYDLNILAKKLQLNLNSLPFSLKILLENLIRNEDGKYITSEKILNFCKVFNENLENNEIYFYPTRVLMQDFTGVPAIADLAAMRSVLDKMKIDPNKINPLSRVDLVIDHSLMVDDYKNKNSLSINVEKEFFRNKERYEFLKWGQASFNNFYLVPPGAGICHQVNLENIAKTVWLDKNKNLAFPDSVVGTDSHTTMINSLSVLGWGVGGIEAEAAMLGQPISL

SEQ ID NO: 178579 - protein, 276 aa, Unknown
  Bacterial polypetide isolated from the Sargasso Sea
VGYGCTTCIGNSGSLSRDITNLIETNDLLITSVLSGNRNFEGRISPHIKANYLASPPLVVAYAIVGSVLINLDIDPLGYDEKNNPIYLKDIWPSNKEVTDVISAVITPEMYREQYSSVFDGGKDWENIQSVDNLTYNWDSTSTYVQNPPYFENMKNEPEKIKDIVGARALAILGDSITTDHISPAGSILKQAPAGKYLSDRQVREDEYNSYGSRRGNHEVMMRGTFANNRLTNAMVQGVKGGITKHQPSQNEMSIYDAAMLYSKNETPLIVFGGKE

SEQ ID NO: 178580 - protein, 295 aa, Unknown
  Bacterial polypetide isolated from the Sargasso Sea
EIAYRPARVLLQDYTGIPAVADLAAMREAIKDKNKDPNTVNPLSAVDLVIDHSVQVDQSAKPDSFDKNVEIEFNRNGERYSFLKWGQQAFNNFRIVPPGTGICHQVNLEYLSKVVWSEEFQGEKYLFPDTLVGTDSHTTMVNGLSVLGWGVGGIEAEAGMLGQPISMLIPEVIGFKIKNKMPEGTTATDLVLTVVKMLRDKGVVGKFVEFYGEGIKNLTLADRATIANMAPEYGATCGFFPIDDETLKYLKFSGRDNLTVKIVEEYAKAQGLWASEEIEFTDTISLDMSTIVPTI

SEQ ID NO: 178581 - protein, 258 aa, Unknown
  Bacterial polypetide isolated from the Sargasso Sea
EKYAKEQNLWASEDIVFTDKLSLDMSTVVPTISGPKRPQDKVLLTDASKNFIKVFEDVCKKTEPTVAKVKDTDFEIKDGDILIAAITSCTNTSNPNVLIGAGLLAKNAIEKGLTVKPWVKTSLAPGSQVVTDYLDKAGLSKYLDELGFNLVGYGCTTCIGNSGPLPDNITDAVKENNLYAVSVLSGNRNFEGRISPLVKANYLASPPLVVAYAIAGSMRVDLYKDPLGKDNKGQDVYLKDIWPTNKEIEDTLKQSLNP

SEQ ID NO: 178582 - protein, 277 aa, Unknown
  Bacterial polypetide isolated from the Sargasso Sea
KSLKVLLENLLRYEDELSVNKIQIEAVKDWLKTKKSKTEIAYRPARVLLQDYTGIPAVADLAAMREAVKDKNKDPNSINPLSSVDLVIDHSVQVDQSAKQDSFEKNVDIEFERNGERYSFLKWGQQAFNNFRIVPPGTGICHQVNLEYLSKVVWSEKFEDDTYLFPDTLVGTDSHTTMVNGLSVLGWGVGGIEAEAGMLGQPISMLIPEVIGFEVKNKMPEGTTATDLVLTVVKMLRDKGVVGKFVEFYGEGLKNLTLADRATIANMAPEYGATCGF

SEQ ID NO: 178583 - protein, 248 aa, Unknown
  Bacterial polypetide isolated from the Sargasso Sea
IVEAIEKEDLYAVSVLSGNRNFEGRISPHIKANYLASPPLVVAYALAGHMEVDLYKDPLGKDKNGNDIYLKDIWPSNQEIEKTLREALNPEMFVKRYSNVSEGPSQWQQIKTEKSSIYNWDQGSTYVKKPPFFENLPDEPEGFKKINDARPLLILGDMVTTDHISPAGSIQKESPTGEYFMEHQILPKDYNSYGSRRGNHEVMMRGTFANIRIRNEIAPGTEGGFTKLFPEGKVMPVYDAVVEYKKRG

SEQ ID NO: 178584 - protein, 271 aa, Unknown
  Bacterial polypetide isolated from the Sargasso Sea
DPNTINPLSSVHLVIDHSVQVDKFASANSLKENVDIEFNRNSERYSFLKWGQQAFNNFRIVPPGTGICHQVNLEYLSKVVWSEKYKDEDYIFPDTLVGTDSHTTMVNGLSVLGWGVGGIEAEAGMLGQPISMLIPEVIGFELTNKLPEGTTATDLVLTVVKMLRDKGVVGKFVEFYGEGLKNLTLADRATIANMAPEYGATCGFFPIDDETLKYLNFSGRDKQTVDIVEAYAKEQGLWASDGIEFTDTVSLDMSKVVPTISGPKRPQDKVL

SEQ ID NO: 178585 - protein, 295 aa, Unknown
  Bacterial polypetide isolated from the Sargasso Sea
GRIHPLVKHNFLASPPLVVAYAIAGSTMLDLTNEPLGNVEGKDIFLKDIWPSQNEIEKIIEETIDPVMFSKAYEDSIQGDDAWKNLETPQGEIYEWQENSTYIKKPPYFESMSMDIPGIKTIQNARALALLGDSVTTDHISPAGNIDPESPAGRYLKDNGVERKDFNSYGSRRGNHEVMMRGTFANIRLRNKLAPGTEGGWTKLSENEEPISIFEAAEEFRSSDTDLIVLAGKEYGTGSSRDWAAKGVSLLGVKAVIAESYERIHRSNLIGMGVLPLEFNNGESAESIGLNGLRV

SEQ ID NO: 178586 - protein, 265 aa, Unknown
  Bacterial polypetide isolated from the Sargasso Sea
LRFSGRDEHTVITVEKYAKEQGLWSSNNIEFTDTVSLDMSTLVPTISGPKRPQDKVLLTDAASNFEKIFFENTKRKKFNLVDVPNEDLVIRDGNILIAAITSCTNTSNPNVLIAAGLLAKKACEFNMISQPWVKTSFAPGSQVVTDYLKKAGLDIYLDKLGFNLVGYGCTTCIGNSGPLNKNISEAVLKNNIYGVSVLSGNRNFEGRISPLVKANYLASPPLVIAYALAGSMDIDLYKDSLQHLADGREIFLKDIWPTNKEIEDV

SEQ ID NO: 178587 - protein, 277 aa, Unknown
  Bacterial polypetide isolated from the Sargasso Sea
MTKYLDEIGFNLVGYGCTTCIGNSGPLEAWVSNEIKSKKLTVCSILSGNRNFEGRVHQEVKANFLASPPLVVAFALLGNINIDILNDSFGIDKNGNEIYLKDLWPTSAEINNVVNQSLSPEMFKKRYNEIYQGDQNWQSIQSSKDTTYSWNLSSTYIKHPPFFEIKEDQSIENINEARILALLGDSVTTDHISPAGNIKLESPAGTYLSDRQIIYKDFNSYGSRRGNHEVMVRGTFANIRIKNEILPDTEGGVTKSFISNKKMSIYDAAKEYADNNI

SEQ ID NO: 178588 - protein, 223 aa, Unknown
  Bacterial polypetide isolated from the Sargasso Sea
WTFADNITEAIKENNLYAVSVLSGNRNFEGRISPLVKANYLASPPLVVAYAIAGSMRVDLYKDPLGKDNKGQDVYLKDIWPTNKEIEDTLKQSLNPEMFVNRYSNVSEGPEQWQKIKVDKGSIYNWEENSTYVKKPPFFENLPDEPEGFKEIKDARPLLILGDMVTTDHISPAGTIQKESPTGNYFMKHQILPKDYNSYGARRGNHEVMMRGTFANIRIKNEM

SEQ ID NO: 178589 - protein, 198 aa, Unknown
  Bacterial polypetide isolated from the Sargasso Sea
MEHQILPKDYNSYGARRGNHEVMMRGTFGNIRIKNEMLTGIEGGFTKLYPEEKIMSVYDASLEYKKRGTDLVVIAGKEYGTGSSRDWAAKGTKLLGIKVVIAESFERIHRSNLVGMGILPLQFIEKTDRKNLKLIGSELISVLDIERGINPGDKLTVEIKYSSGDIKKIKTLCRIDTKNELEYYINGGILQYVLRNMI

SEQ ID NO: 178590 - protein, 389 aa, Unknown
  Bacterial polypetide isolated from the Sargasso Sea
MNTGDIVIAAITSCTNTSNPNVMIAAGLVAKKAIDLGLEVKSWVKTSLAPGSKVVSDYLDKSGLTQYLDKLGFNTVGYGCTTCIGNSGPLDEWVSDEIKSNNLTVCSVLSGNRNFEGRVHQEVKANFLASPPLVVAYAIAGNININLTTDSLGKSKSGEEIFLKDLWPTNTEINQTLSSCLTPEMFIERYKEIYKGDNNWKSINSSTNTTFDWNDSSTYIKHPPFFDSQNKFELNDIKDAKILALLGDSVTTDHISPAGSIKEDSPAGIYLTDRQINSKNFNSYGSRRGNHEIMMRGTFANIRIKNEILNNVEGGFTKSFLSNKQLSIYDAAQEYINNNIDTVIIAGKEYGTGSSRDWAAKGTRLLGIKAVIAESFERIHRSNLIGMGV

SEQ ID NO: 178591 - protein, 420 aa, Unknown
  Bacterial polypetide isolated from the Sargasso Sea
RATIANMAPEYGATCGFFPIDEETLKYLKFSGRDDESVNVVETYAKEQGLWTSDDIIFTDTLSLDMSLVVPTISGPKRPQDKVLLTNAAENFKNVFENETNRKKPIISKVEGENFKIKDGDVLIAAITSCTNTSNPNVLIGAGLLAKKAVEKGLKTKPWVKTSLAPGSQVVTDYLEKAGLNSYLDKMGFNLVGYGCTTCIGNSGPLPETITEAVKKDNIYAVSVLSGNRNFEGRISPLVKANYLASPPLVVAYAIAGSMNLDLYKDSLGKDEDGNDIFLKDIWPSNQEIEEVLKNSLNPEMFINRYSNISDGPEQWQKIKTEASSIYNWDDNSTYVKKPPFFENLSDEPEGFKEIKDARPLLILGDMVTTDHISPAGTIQKENPTGEYFMHHQILPKDYNSYGARRGNHEVMTRGTFGNA

SEQ ID NO: 178592 - protein, 693 aa, Unknown
  Bacterial polypetide isolated from the Sargasso Sea
MPIIVGQNSVGSRKTLDINGKSIAYYSIPEAQEKGLGDFSRIPAALKVVLENMLRFEDGNTVTVDDIKAFADWAQQGGKNPREIAYRPARVLMQDFTGVPAVVDLAAMRDGIVGLGGDAQKINPLNPVDLVIDHSVMIDEFGNPQAFQMNVDREYERNMERYTFLKWGQSAFDNFRVVPPGTGICHQVNLEYLAQTVWSDVDQDGEQVAYPDTLVGTDSHTTMVNGMAVLGWGVGGIEAEAAMLGQPVSMLIPEVVGFELTGAMSEGTTGTDLVLKVVEMLREKGVVGKFVEFYGSGLDSLPLADRATIANMAPEYGATCGFFPIDDETLRYLRNTGRDEDRVALVEAYAKENGFWRSKDYLPVYTDTLHLNMDSIVPAISGPKRPQDYVALNEAQGAFRAEMKDTFDRPLGKKVPVENEEYKMESGKVVIASITSCTNTSNPYVMISAGLVARKAAALGLQRQPWVKTSLAPGSQVVSAYLEASGLQEDLDKVGFNLVGYGCTTCIGNSGPIQSEISQAIADGDLVATAVLSGNRNFEGRISPDVRANYLASPPLVVAYALAGTMDIDLINEPIGSDSSGSPVFLKDIWPSSKEVAELVESTVTTEAFNSKYADVFKGDEKWQSVETTASQTYDWPISSTYVQNPPYFQNMGKEPGVINNIENARVLAVLGDMITTDHISPAGSFQSTTPAG

SEQ ID NO: 178593 - protein, 302 aa, Unknown
  Bacterial polypetide isolated from the Sargasso Sea
NKEIEDTLREALNAKMFVERYSNVSEGPAQWQKIKTEKSSIYKWDEGSTYVKRPPFFDNMPDEPEGFKKIKDARPLLILGDMVTTDHISPAGSIQKESPTGQYFMEHQILPKDYNSYGSRRGNHEVMMRGTFANIRIRNEIAPGTEGGFTKLFPEGKVMTVYDAVVEYKKRGTDLVVIGGKEYGTGSSRDWAAKGTKLLGIKTVIAESFERIHRSNLIGMGILPLQFVDGMNRSNLNIKGSELISVLNIEKGLSPSDKVELEIKYISGDIKKIKTLCRIDTKNELEYYKNGGILQYVLRNMI

SEQ ID NO: 178594 - protein, 320 aa, Unknown
  Bacterial polypetide isolated from the Sargasso Sea
MESLNSFNSCQNITIDNKNYRYFDLNILANSYGFDLSKIPNSIKIILENLIRSEDGKSVTKEMISNLCEKINDTKHNFEIAFSPTRVLMQDFTGVPAVADLAAMRDALKDKGIDPNKINPLSRVDLVIDHSVMVDHFGNDKAYEENVKKEFERNKERYEFLKWGQHAFDNFYLVPPGGGICHQVNLENIATTIWSSTINEYNYLFPDSVVGTDSHTTMVNALSVLGWGVGGIEAEAAMLGQPISMNIPKVVGFKLEGQLQEGITATDLVLNITEILRKHGVVGKFVEFYGKGLNNLSLSDRSTISNMAPEYGATCGFFST

SEQ ID NO: 178595 - protein, 428 aa, Unknown
  Bacterial polypetide isolated from the Sargasso Sea
MKNINSFNTENIIEINNQNFKYFDLNKLAEYFDIDLNKIPISIKIIIENLLRNEDGENISKEMISNLIPYLKEKNKKDEKIEIAFFPTRVLMQDFTGVPAVADLAAMRNALKLKGIEPKKINPLSRVDLVIDHSVMVDNYKDKNALKENVKKEFDRNKERYEFLKWGQSSFDNFYLVPPGAGICHQVNLENIAKTIWLKKINNQNYLFPDSVVGTDSHTTMVNSLSVLGWGVGGIEAEAAMLGQAISMNIPDVIGFELRGSLREGITATDLVLSITKILRDKGVVGKFVEFYGKGLKNLSLADRATISNMAPEYGATCGFFPTDDETINYLKLTGKESGHLNIVEKYSKKQKLWSDESYAPNFSDKILLDLDTVEPTLAGPKRPQDKILLKEVPNEFSKIDNKKILNKNKLNTGDIVIAAITSCTNTS

SEQ ID NO: 178596 - protein, 384 aa, Unknown
  Bacterial polypetide isolated from the Sargasso Sea
NEDGQTVQPQDLQAMVDWLDQRASDREIQYRPARVLMQDFTGVPAVVDLAAMRDAMAKAGGDPQRINPLSPVDLVIDHSVMVDRYASSSAFHDNVELEMQRNGERYAFLRWGQHAFDNFSVVPPGTGICHQVNLEYLARTVWTKEEDGVTLAYPDTLVGTDSHTTMINGLGVLGWGVGGIEAEAAMLGQPVSMLIPEVIGFKLSGKLKEGITATDLVLTVTQMLRKKGVVGKFVEFYGDGLADLPLADRATIANMAPEYGATCGFFPVDEITLGYLRLSGRPDATVQLVEAYSKTQGLWREPGAEPLFTDSLSLDLGSVEASLAGPKRPQDRVSLGQVSQAFDDFVGLQLKPTAKEEGRLLSEGGGGTAVGGDKQSGEVDYEDD

SEQ ID NO: 178597 - protein, 385 aa, Unknown
  Bacterial polypetide isolated from the Sargasso Sea
GPLDKEISETIHKENLYAVSVLSGNRNFEGRINPDVKANYLASPPLVVAYALAGNMHHDLYKNPLGKDENGKDVFLKDIWPSNKEIEELMLKSINADMFVKRYSNVSEGPKEWSSIKTDQSSIYNWEESSTYVKRPPFFDNLPDKPEGFKKINDARPLLILGDTVTTDHISPAGSIKKDSPTGDYFMKHQVQQKDFNSYGARRGNHEVMLRGTFGNIRIRNEMAAGTEGGFTILQPDGKQMSVYEAAMEYKKRGTNLVVVAGKEYGTGSSRDWAAKGTKLLGIKAVIAESFERIHRSNLVGMGILPLQFKEGFDRKKLNIKGTELFTIVDIEKGINPGAEVNCEIKYADGSSKTIKLLSRIDTENEIEYYKNGGILQYVLRNMLN

SEQ ID NO: 178598 - protein, 334 aa, Unknown
  Bacterial polypetide isolated from the Sargasso Sea
MLEGKKKYYDIKSLASANKVDLNKIPFSIRILIENVLRSYDKNISNETQLEQVLKWNKDTVPDKEFPYMPGRVVLQDFTGVPVVVDLAAMRDAVSDLDIEPSIINPIVRSDLVIDHSVQVDSFAQNDSLNMNISREFERNQERYKLLKWAQNAFSNFLVVPPGTGIVHQVNLENLAEVILASNDDDNIFPDTCVGTDSHTTMINAVGVLGWGVGGIEAEAVMLGQPYYMQVPEVVGVKLFGDINEGTTATDIVLAIVEKLREVGVVEKFVEFFGPGLSQLSLTDRATISNMAPEYGATCGFFPVDDRTIDYLMMTGRDEKIIDQVVNYTQSNGL

SEQ ID NO: 178599 - protein, 433 aa, Unknown
  Bacterial polypetide isolated from the Sargasso Sea
MLSVDSFNTLDQFSNNGKQYNFFNLSKLEDSFPKIKNLPKSKKILIENLLRLEDGKDVNKDLIENVLENPEKKHEIFFLPSRVLMQDFTGVPAVADLAAMRDAVSKNGGDPSKVNPMSQVDLVIDHSVMVDYFASPNAFQKNVDMEFGRNAERYEFLKWGQQAFKNFRVIPPGTGICHQVNLEYLAQVVWSREINEKNFLYPDTLVGTDSHTTMVNALGVLGWGVGGIEAEAAMLGQSISMLLPEVIGFEVSGKMKEGVTATDLVLTIVQMLREKGVVGKFIEFYGDGLKNLSLADRATIANMAPEYGATCGFFAVDEETIKYLKLTSRDSDLINTVEKYNRIQGLWADDTCNYNDTVHLKLENVQASLAGPKRPQDRINLEKVNLNFKEFSKNKPVEKEIKNHNYKMQDGNVVIAAITSCTNTSKSDVLVAA

SEQ ID NO: 178600 - protein, 238 aa, Unknown
  Bacterial polypetide isolated from the Sargasso Sea
MVNALGVLGWGVGGIEAEAAMLGQSVSMLLPEVVGFEVSGIMKEGVTATDLVLTIVEMLRKKGVVGKFVEFYGDGLKNLSLADRATIANMAPEYGATCGFFAVDNETIKYLKLTSRGSDLINTVEKYNRIQGLWADDTCNYNDTVHLKLENVQASLAGPKRPQDRINLESVNLNFKEFSKNKPVEKEIKNHNYKMQDGNVVIAAITSCTNTSNPDVLVAAGLVAKKACELGLQVKPWG

SEQ ID NO: 178601 - protein, 407 aa, Unknown
  Bacterial polypetide isolated from the Sargasso Sea
MNKYLDQLGFHLVGYGCTTCIGNSGPLDKDIAECISKNDLTVASVLSGNRNFEGRVNPHVKANYLASPPLVVAYAIAGSVRINLISDPIGIDTDGNEVFLKDIWPNNSEIRNVVEKNVSPEMFKKQYSNALDGPKEWQKINTSTGDLYNWNSSSTYVQKPPFFDNESNDDKEIKPIKNARPLLLLGNSVTTDHISPAGAIKVDSPAGNYFMERQIRQNDFNSYGARRGNHEVMVRGTFANIRIKNQLLSNVEGGYSILEPDKKKMSVYDVAMEYAKRSENVVVFAGEEYGTGSSRDWAAKGTKLLGIKAVIAESFERIHRSNLVGMGVLPIQLKSHTINDLNIQSSDLINIKLTEDLKPLQELEVIIQSNVRNIKIDCILRIDTINELQYYKADGILNFVLKNILKN

SEQ ID NO: 178602 - protein, 236 aa, Unknown
  Bacterial polypetide isolated from the Sargasso Sea
MKPGSKNSFNSLAKISINDIDYKYYSLKEAEKNGLDGISKLPKSIKVLLENLLRYEDDLSVNKSQIKAIKDWLINKKSKTEIAYRPARVLLQDYTGIPAVADLAAMREAVKEKNKDPKTINPLSTVDLVIDHSVQVDKFANKNSLKENVDIEFERNSERYSFLKWGQQAFDNFRIVPPGTGICHQVNLEYLAKVVWTEKYENENYIFPDTLVGTDSHTTMINALSVLGWGVGGIEA

SEQ ID NO: 178603 - protein, 402 aa, Unknown
  Bacterial polypetide isolated from the Sargasso Sea
MLSVDSFQTLDQFSQNGKKFIFYNLSKLEDNFPKIKNLPKSKKILIENLLRLEDGKDVNKDLIENVLENPEKKHEIFFLPSRVLMQDFTGVPAVADLAAMRDAVSKKGGDPSKVNPMSQVDLVIDHSVMVDYFASPNAFQKNVDMEFGRNAERYEFLKWGQQAFKNFRVIPPGTGICHQVNLEYLAQVVWSKKIDEKDLLYPDTLVGTDSHTTMVNALGVLGWGVGGIEAEAAMLGQSVSMLLPEVVGFEVSGKMKEGVTATDLVLTIVQMLREKGVVGKFVEFYGDGLKNLSLADRATIANMAPEYGATCGFFAVDEETIKYLKLTSRGSDLINTVEKYNKIQGLWADDICNYNDTVHLKLENVQASLAGPKRPQDRINLEKVNLNFKEFSKNKPVEKEIK

SEQ ID NO: 178604 - protein, 411 aa, Unknown
  Bacterial polypetide isolated from the Sargasso Sea
SLSKAESSGLEGISKLPKSLKVLLENLLRYEDDISVTKNQIEAIKDWLKSKKSKTEIAYRPARVLLQDYTGIPAVADLAAMRDAVKEKNKDPNTINPLSTVDLVIDHSVQVDQSANSDSFDKNVEIEFDRNGERYSFLKWGQQAFNNFRIVPPGTGICHQVNLEYLSKVVWSEEYKGDKYLFPDTLVGTDSHTTMVNGLSVLGWGVGGIEAEAGMLGQPISMLIPEVIGFEVKNKMPEGTTATDLVLTIVKMLRDKGVVGKFVEFYGDGLKNLTLADRATIANMAPEYGATCGFFPIDDETLKYLRFSGRDQFTIKIVEKYAKVQGLWASNDIEFTDTLTLDMSSIVPTISGPKRPQDKVLLTDASSSFKKSFLEITKRNDFLSSKVSETEYEIKDGSILIAAITSCTNTS

SEQ ID NO: 178605 - protein, 414 aa, Unknown
  Bacterial polypetide isolated from the Sargasso Sea
LVYNTSNPNVLIGAGLLAKKAVELGLKTKPWVKTSLAPGSQVVTDYLEKAGLNKYLDELGFNLVGYGCTTCIGNSGPLPDNIVEAIEKENIYAVSVLSGNRNFEGRISPHIKANYLASPPLVVAYALAGHMEVDLYKDPLGKDKNDKDIFLKDIWPSNKEIEDTLTDSLNANMFVERYSNVSEGPIQWQKIKTEKSSIYNWDEGSTYVKRPPFFDNMSDEPEGFKEIKDARPLLILGDMVTTDHISPAGSIQKESPTGEYFMEHQILPKDYNSYGSRRGNHEVMMRGTFANIRIRNEIAPGTEGGFTKLFPEGKVMSVYNAVVEYKKRGTDLVVIGGKEYGTGSSRDWAAKGTKLLGIKTVIAESFERIHRSNLIGMGILPLQFIGGMNRSNLNLKGSELFSVLNIEKRAISIR

SEQ ID NO: 178606 - protein, 391 aa, Unknown
  Bacterial polypetide isolated from the Sargasso Sea
MYDSFKTKKTLKIGKKTYTYFSFKAAEKNGLKNISSLPFSIKILLENLIRNEDGSTVELGDIKEFEKWKSDKKVSKEINFRPARVLMQDFTGVPAVVDLASMRAAIKNENGDPKKINPLSPVDLVIDHSVMVDKYGSATAHKANVDLEYKRNIERYEFLRWGQKSFNNFRVVPPGTGICHQVNLEYLAKTVWFEKRKIKNKNMTLAYPDTVVGTDSHTTMINGLSVLGWGVGGIEAEAAMLGQPISMVVPEVIGFEIKGKIKEGITATDLVLTITEQLRKKGVVGKFVEFYGKGLKEMSVPDRATISNMAPEYGATCGFFPIDQETINFLKVSGRPLDEIKLVEKYSKAQGLWEDYKKNKRVYSETMELDLSSIEPSLAGPKRPQDKILFI

SEQ ID NO: 178607 - protein, 557 aa, Unknown
  Bacterial polypetide isolated from the Sargasso Sea
SGRDQHTVNIVEKYAKEQGLWASNEIEFTDIISLDMSTVVPTISGPKRPQDKVLLTDAPSSFQKVLQEATNKNEKSISKVSNTDYEIKDGSILIAAITSCTNTSNPNVLIGAGLLAKKAIEKGLEVKPWVKTSLAPGSQVVTDYLAKAGLNTYLDQLGFNLVGYGCTTCIGNSGPLPENIVEAIQKENIYAVSVLSGNRNFEGRISPHIKANYLASPPLVVAYALAGHMEVDLYKDPLGKDKEGKDIFLKDIWPSNKEIEDTLKDSLNAEMFIKRYSNVSEGPTQWQKIKTDKSSIYNWDEGSTYVKKPPFFDSLPDKPEGFKEIKDARPLLILGDMITTDHISPAGSIQKDSPTGEYFMEHQILPKDYNSYGSRRGNHEVMMRGTFANIRIRNEMAPGTEGGFTKLYPEEKVLPIYDAVVEYKKRGTDLVVIGGKEYGTGSSRDWAAKGTKLLGIKAVIAESFERIHRSNLIGMGILPLQFIQDVNRKNLKLIGSELISVLNIEKGVKPSDEVTVEIKYVSGEIKKIKTLCRIDTKNELEYYKNGGILQYVLRNMI

SEQ ID NO: 178608 - protein, 322 aa, Unknown
  Bacterial polypetide isolated from the Sargasso Sea
MKPGTKNSYNSLSEIKIDDKNYKIFSLNQAENNGLSGISKLPKSLKVLLENLLRYEDDLSVTKSQIEAIKVWLQEKKSKTEIAYRPARVLLQDYTGIPAVADLAAMREAVKEKNKDPNTINPLSAVDLVIDHSVQVDQSAKPDSFDKNVEIEFNRNGERYSFLKWGQQAFNNFRIVPPGTGICHQVNLEYLSKVVWSARYDDEDYLFPDTLVGTDSHTTMVNGLSVLGWGVGGIEAEAGMLGQPISMLIPEVIGFEVKNKMPEGTTATDLVLTVVKMLRDKGVVGKFVEFYGEGLKNLTLADRATIANMAPEYGATCGFFPI

SEQ ID NO: 178609 - protein, 285 aa, Unknown
  Bacterial polypetide isolated from the Sargasso Sea
MNFKSKNSFQSLDKLEVSGKSYHFYNLSKAEKNGLKDINKLPKSIKVILENLLRFEDDVTVDRKQIESIADWLKTRSSKMEIAYRPARILLQDYTGIPAVADLAAMRDAVNSKNKDPKKINPLSAVDLVIDHSVQVDNYANKDSFAKNVKKEFDRNGERYSFLKWGQNAFNNFRVVPPGTGICHQVNLEYLSKVVWSSEFEGKTFAYPDTLVGTDSHTTMVNGLSVLGWGVGGIEAEAAMLGQPISMLIPEVIGFEIKGKLSEGTTASDLVLTIVQILRKKGVGR

SEQ ID NO: 178610 - protein, 545 aa, Unknown
  Bacterial polypetide isolated from the Sargasso Sea
MGGDNPFGAKSEFEKSDGTMARFMDLHSLEERGLCKLDDIPFSIRILLESALRKCDGFLVNEEDVSRIASWSPEMKPEEIPFSPSRVILQDFTGVPAIVDIAALRDAMKDLGGDPAKVNPQVPVDLVIDHSVQVDVSGLFPDARERNLEIEYERNSERYKFLKWGQLSLDNFRAVPPGRGIVHQVNLEWIASVAREEDGTWIPDSLVGTDSHTTMINGLGVLGWGVGGIEAEAVMLGQPIYMLLPEVVGFELSGELQPGVTATDMTLRIVEMLREHGCVGKFVEFHGQGLSSLSLPDRATIANMAPEYGATCGFFPVDQTTLDYMILSGRDTDHVEDVKRFMSAQGLFYEQSSTTPKFTSNLELDLGTVEPSLSGPKRPQDRVSLSEMKSHWRASLNAETGHQGHGIDPSRNSDSSPIEGRGCDLNHGDVVIAAITSCTNTSNPSVMIAAGLMARNARSRGLQIKPWVKPSLAPGSRVVTEYYDASGLSDDLDSLGFSVVGYGCTTCIGNSGPLDTEIEAAIDDGDLVVGSVLSGNRNFEGRIHQ

SEQ ID NO: 178611 - protein, 307 aa, Unknown
  Bacterial polypetide isolated from the Sargasso Sea
MKNTNSFNSEDIIEINDKKFKYFNLNKAAQYFDIDLSKTPISIKIIIENLLRNEDGENINKDMISKVFNSLKQINNKSEKIEIAFFPTRVLMQDFTGVPAVADLAAMRNALKSRGIEPKKINPLSRVDLVIDHSVMVDNYKDNNALKENVRKEFDRNKERYEFLKWGQSSFDNFYLVPPGAGICHQVNLENIAKTIWMKEINNQNYLFPDSVVGTDSHTTMVNSLSVLGWGVGGIEAEAAMLGQAISMNIPDVIGFELKGHLKEGITATDLVLSITKMLRDKGVVGKFVEFYGNGLNNLSLADRATI

SEQ ID NO: 178612 - protein, 620 aa, Unknown
  Bacterial polypetide isolated from the Sargasso Sea
LVLTVVKMLRDKGVVGKFVEFYGDGLKNLTLADRATIANMAPEYGATCGFFPVDDETLKYLKFSGRDEITLKIVESYAKEQGLWSSNDIEFSDTISLDMSSIVPTISGPKRPQDKVLLSEASKNFTKVFNDTTKRKQKKYSKVRNTDYEISDGSILIAAITSCTNTSNPNVLIGAGLLAKKAIDLGLKTKPWVKTSLAPGSQVVTDYLNKAGLSKYLDELGFNLVGYGCTTCIGNSGPLSDEIVDAIEKDNLYTVSVLSGNRNFEGRISPHIKANFLASPPLVVAYAIAGHMEVDIYKDAIGKGKNGQEIFLKDIWPSNKEIEKILQSSLSADMFVNRYSNVLEGPSQWQKIKTEPSSIYKWDESSTYVKKPPFFDNLPDKPEGFKSIKDARPLLILGDMVTTDHISPAGSIQKESPTGEYFMKNQILPKDYNSYGSRRGNHEVMMRGTFANIRIRNEMAPGTEGGFTKLYPENKVMPVYDAVVEYKKRGTDLVVIGGKEYGTGSSRDWAAKGTKLLGIKVVIAESFERIHRSNLIGMGILPLQFTDRFNRNNLSLIGSELITILDFEKGVNPTDKVKVEFKYATGDTKIIETICRIDTKNELEYYKNGGILQYVLRNMI

SEQ ID NO: 178613 - protein, 645 aa, Unknown
  Bacterial polypetide isolated from the Sargasso Sea
SSVAREEDGTWIPDSLVGTDSHTTMINGLGVLGWGVGGIEAEAVMLGQPIYMLLPEVVGFELSGELQPGVTATDMTLRIVEMLREHGCVGKFVEFHGQGLSSLSLPDRATIANMAPEYGATCGFFPVDQTTLDYMILSGRDTDHVEDVKRFMSAQGLFYEQSSTTPKFTSNLELDLGTVEPSLSGPKRPQDRVSLSEMKSHWRASLNAETGHQGHGIDPSRNSDSSPIEGRGCDLNHGDVVIAAITSCTNTSNPSVMIAAGLMARNARSRGLQIKPWVKPSLAPGSRVVTEYYDASGLSDDLDSLGFSVVGYGCTTCIGNSGPLDPEIEAAIDDGDLVVGSVLSGNRNFEGRIHQKIKANYLASPPLVVAYALAGTLDIDFSKEPLGLDGAGEPVMLSDIWPSDDEIRRTVEAAIGPEMFIRRYSDVLSEPRWDSIPSEASELFPWDEDSTYVRLPSFFQGIEPEPSPVEPIEDARVLVKVGDSVTTDHISPAGAFPSSGPAGKYLMSKGVEPRDFNSFGSRRGNHEVMIRGTFANIRMRNQTAPGTEGGLTTHFPTNEVVSIHEASERYQSESTQLVVLAGSQYGSGSSRDWAAKGTFLLGVRAVIAKSYERIHRSNLVGMGVLPLAFSDGVDAESLGLDGTEL

SEQ ID NO: 178614 - protein, 864 aa, Unknown
  Bacterial polypetide isolated from the Sargasso Sea
MDYKSDIDYKNQDFTIYNISKSQIAHLPYSLRVLFENYVRNNSSKISQSVIDNFISWSGDITSPIELSFYPSRVIMQDFTGVPAVVDLASMRDAVKKSNGNPSLINPQCQTDLVIDHSIMVDHHGSEKSMELNTKLEYSRNSERYRLLKWGQKAFKNFRIVPPSNGIIHQINIEFISQVVFEKNRNLYPDTVVGTDSHTTMVNGLGVLGWGVGGIEAEAAMLGQPIPMLLPEVIGFRLDGQLAKTSTATDLVLTIVEKLRQANVVGKFVEFYGDALDTLSIYDRCTIANMAPEYGATCGFFPVDQLTLDYLKTTGKSAEHVDMVENYCKEVGLFRDPNNDIKFSQELHLNLSDVLPCISGPKRPEDKILLSDVKKVISNEISKISKNKDSKKTALEDGSIVIAAITSCTNTSNPSVIIGAGLLAKNAIEKGLNKKTWVKTSLAPGSKVVENYLRKADLLKYFNELGFNIIGYGCTTCIGNSGPIDEKYVKEINDNDIVASSVLSGNRNFEGRIHPEVKMNFLMSPMLVIAYSLIGNINFDITRESLGKDKNNNDVFLSDIWPSSDDINSVIQKNIDSNMFVNSYKDLFEGDDNWKNISTSQSEFFNWEDSSTYIQPSPFFTTQNDSENKLEEITDAYPLLVLGDSVTTDHISPAGSFKESTPAGTYLVNQGTSVLDFNSYGSRRGNFKIMQRGTFANIRIANKLVPDKTGGYTKHIPTNKIVSVYEASELYKNEDRELIVIAGKNYGCGSSRDWAAKGTKLLGVKAVIAESFERIHRSNLVGMGVLPLEFIKGENYESLGIDNNSTFTIAALKRNDTNVNINSTKNGQPYTFKAKVRIDTDKEWDYFLNDGILNYVLKNISNST

SEQ ID NO: 178615 - protein, 760 aa, Unknown
  Bacterial polypetide isolated from the Sargasso Sea
MSKIAIETTPEFVKKVYEKSEKNISKFRNTLKRPLTLTEKILAGHLEDEFLDKLLDEKKNYVFLRPDRVALQDVTGQMVMLQFMQAGLKSVTLPTTVHCDHLIQARTEGKSDTKLAMYENNEVYKFLETASSKYGAGFWNPGAGIIHQVVLENYAFPGGLMIGTDSHTPNAGGLGMIAVGVGGLDAAETMAGMPWELLYPKRIGVHLKGKMSGWTAPKDVILYVAGKLSVSGGTNSIIEYFGPGVESISCTGKATITNMGAEIGATCSIFPYDKRMETYLNSTDRKEIASLANDHTSLLQADPEVEQNPEKFFDKIIEIDLSTLEPHVVGPHTPDLARPISELSDEIDSNDYIDKISVALIGSCTNSSYEDMSRSSSVAKQAETHGIKAKIPLLVTPGSEQIRSTIERDGQIDTLRSIGATVLANACGPCIGQWQRPELKDGEKNSIVTSFNRNFPGRNDGKRDTMNFIASPEIVTALALGGSLSFNPLEDSLEGKDGKKIKLSPPEIAPEVPANGFVNAEGIYLSPSENPENVEVLIDPNSERLQKLEPFSSWDGNDFVGLNLILKAKGKCTTDHISPAGPWLRLRGHLDNLSDNLLLGAVNAFNNEVGKAKNILTNSIENCSQIARNYKEKNMHWVIVGDNNYGEGSSREHAAMTPRFLGCAVVIAKSFARIHETNLKKQGILALTFENSDDYEKIKEDDKISISGLSDFAPDKSFECQLEHSDGSTEKIMLNHSYNLSQIEWFKAGSALNVLKNKTS

SEQ ID NO: 178616 - protein, 404 aa, Unknown
  Bacterial polypetide isolated from the Sargasso Sea
MDDLGFNLVGYGCTTCIGNSGPLPENISKSVKNDNIYAVSVLSGNRNFEGRISPLVKANYLASPPLVVAYALAGSMFVNLYKDPLGKDIKGKDIFLKDIWPSNKEIEETLKESLNPEMFIKRYSNVLTGPDQWRRIKTEESSIYKWNESSTYVKKPPFFENMTDEPEGFQSIKDARPLLILGDMITTDHISPAGSIQKDSPTGEYFMKHQILPQDYNSYGSRRGNHEVMMRGTFANIRIKNEMAPGTEGGFTKLYPENKVMPVYEAVMEYKKRGTDLIVIGGKEYGTGSSRDWAAKGTKLLGVKAVIAESFERIHRSNLVGMGILPLQFVNGADRNKLNLKGSELISILNLEKGIEPGDNLTVDIKYASGEIKKIKLLCRIDTKNELEYYKNGGILQYVLRNMF

SEQ ID NO: 178617 - protein, 400 aa, Unknown
  Bacterial polypetide isolated from the Sargasso Sea
FNLFGYGCTTCMENSGPLDKEISDAIHKDNLYAVSVLSGNRNFEGRINPDVKANYLASPPLVVAYALAGNMHQDLYKNSLGKDKNGEDVFLKDIWPSNREIEDLILKSISADMFIQRYSNVSQGPKEWSSIKTEESSIYNWEEKSTYVKKPPFFDNLPDKPEGFKKIKDARPLLILGDTVTTDHISPAGSIKKDSPTGDYFMKNQVQQKDFNSYGARRGNHEVMLRGTFGNIRIRNEMAPGTEGGFTVLQPDGKQMSVYDAAMEYKKRGNSLVVIAGKEYGTGSSRDWAAKGTKLLGIKAVIAESFERIHRSNLVGMGVLPLQFKEGFNKKKLNIKGTELFTIIDIEKGINPRADVSCEIKYPDGSSKTIKLLSRIDTENEIEYYKNGGILQYVLRNMLS

SEQ ID NO: 178618 - protein, 393 aa, Unknown
  Bacterial polypetide isolated from the Sargasso Sea
MDFKSKNSFQSLDKLDVLGNTYHFYSLSKAEKKGLKGIEKLPKSLKVLLENLLRYEDGVTVTKKQINSLVDWLKTKSSKMEIAYRPARILLQDYTGIPAVADLAAMRDAVKSKNKDPNKINPLSTVDLVIDHSVMVDNYAKKDSFKKNVEREFNRNGERYSFLKWGQSAFNNFRVVPPGTGICHQVNLEYLSKVVWSSKMGKETYAYPDTLVGTDSHTTMVNGLSVLGWGVGGIEAEAAMLGQPISMLIPEVIGFEIKGKLSEGTTASDLVLTIVEMLRKKGVVGKFVEFYGDGLKNLSLADRATIANMAPEYGATCGFFPIDEETIKYLKFSGRDEITISLVEKYSKQQGLWASEQMEFTDTISLNLDSVVPSISGPKRPQDKVLLTDAAKS

SEQ ID NO: 178619 - protein, 423 aa, Unknown
  Bacterial polypetide isolated from the Sargasso Sea
PNVMVAAGILAKKAIELGCETKKWVKTSLAPGSLVVNEYLKKSNLMSYLEGLGFHNVGYGCTTCIGNSGPLKNEISMAIQDNDLTVASILSGNRNFEGRVHADVKLNYLASPPLVVSYAIAGTMNIDLTKDPISTVNGKNIYLKDIWPTKEEIDSVIKNSISKDLFEKSYSNIYDGQDEWKEINIENTDKYKWTDSSYIANPPFFNNITSKESVINEITNAKVLAYLGDSVTTDHISPAGNIKSDSPAGKYLLSKNVKESEFNSYGSRRGNHEVMKRGTFANIRLKNKLVPGVEGGFTMHPDSSEMTTIFEASEKYISKSIPTIILAGKEYGCGSSRDWAAKGPKLLGVKAVIAESFERIHRSNLVGMGILPLKFKDGENAQSIGLTGFEKYKISNIDNGNAKSVNIAAINSKGESIEFEAEV

SEQ ID NO: 178620 - protein, 905 aa, Unknown
  Bacterial polypetide isolated from the Sargasso Sea
MAHNLHKTLKEFDSGSGKGKFYSLPQLGKALNIKIDRLPVSIRIVLESVLRNYDGKKIAEEHIEQLANWKPTAARVDEIPFVVSRVVLQDFTGVPLLADIAAMRGVAKHMGKDPKSIEPLVPVDLVVDHSVQIDHFREKNALDLNMKLEFQRNNERYQFMKWGMQAFDTFKVVPPGVGIVHQVNLEYLARGVHKKAEGADTVYYPDSLVGTDSHTTMINGIGVVGWGVGGIEAEAGMLGQPVYFLTPDVVGVELKGKLREGLTATDLVLTVTELLRKEKVVGKFVEFFGEGTKSLSLPDRATIGNMAPEYGATMGFFPVDEKTIDYFKGTGRTDAEISAFENYFKAQGLFGIPKAGQIDYTKVVTLDLGTVTPSLAGPKRPQDRIEIGHVKSTFSDLFSKPVAENGFAKKSEDLDAQYTTSNGVDVKNGDILIAAITSCTNTSNPSVLLAAGLLAKKAVEAGLTVAPHIKTSLAPGSRIVTEYLTKTDLMKYLDKLGFTLAAYGCTTCIGNAGDLTPELNEAITKNDIVAAAVLSGNRNFEARIHPNIRANFLASPPLVVAYAIAGNITRDLMTEPVGKGKGGRDIYLGDIWPTSEEVDALLKFALDADAFRKNYSSLTKKGDLWSKIEGEEGQVYDWPKSTYIAEPPFFGKDFSMTPADSIAAVKNARALGIFGDSVTTDHISPAGSIKEDSPAGKWLKENGVQKADFNSYGSRRGNHDVMMRGTFANVRIKNLMIPAKADGSRVEGGLTIHQPSGEQLSIYDAAMKYIDAGTPTIVFAGEEYGTGSSRDWAAKGTQLLGVKAVVARSFERIHRSNLVGMGVLPLQFKGSDSVQSLGITGEETYDIEGLGADFKPQQEVTLVIRGKDGKEKRVPVLLRIDTPIEVDYYKHGGILPFVLRSLLAA

SEQ ID NO: 178621 - protein, 753 aa, Unknown
  Bacterial polypetide isolated from the Sargasso Sea
MFDLKMIKKYYQSMPDRIHSIKKKLGRPLTLSEKILYCHLNSDLSSKDYLRGVSYVDFNPDRVAMQDATAQMALLQFMMAGKDRVAVPSTVHCDHLIQAKNDAQNDLSSALDTNHEVYRFLESVSNKYGIGFWKPGAGIIHQVILENYAFPGGMMIGTDSHTVNAGGLGMIAIGVGGADAVDVMAGMPWELKFPKLIGVKLTGELSGWTSAKDVILKLAGILTVKGGTGSIIEYFGEGTKTLSCTGKGTICNMGAEIGATTSIFGYDEKMEEYLKATGREEIVGYTNNIAEHLVSDKAVTDNPKDFYDQVIEINLSDLEPHLNGPFTPDRATPISKMRDEAKKNDWPTDVKVGLIGSCTNSSYEDISRAVSIAKQANKLGLSTNAEFTITPGSEQVRQTIERDGFIEEFNALGAKVFANACGPCIGQWSRDGAEKEDKNTIVHSFNRNFAKRADGNPNTHAFVGSPELVTAIAISGDLTFNPLADYITNKNGEKIFLDPPRGFELPGDGFTVDNLGYLPPADNGKSLEVKIDPESERLQLLKPFSPLKEMNYHNVSLLIKTKGKCTTDHISMAGPWLKYRGHLDNISNNMLTGAVNFFNGKVNSVKNQLNGKYDAVPNVQRDYKFNNVLSIVIGDENYGEGSSREHAAMEPRFLGVMAVLVRSFARIHETNLKKQGMLALTFKNKSDYDLIQEDDVFDFIDLDQFEEGKPLTIAIKHNDKTSDQILCNHTYNQSQIEWFNAGSALNLIRSQES

SEQ ID NO: 178622 - protein, 349 aa, Unknown
  Bacterial polypetide isolated from the Sargasso Sea
MQSLNSFNTQKKIIIDKTEYKYFDLKTLSKIYNFELERIPNSIKIIIENLLRNEDGEAVTREMIDNLCKKITEPLENFEISFTPTRVLMQDFTGVPAVADLAAMRDALRKRDINPNNINPLSRVDLVIDHSVMVDYFGNDSALEDNVKKEFDRNKERYEFLKWGQKTFDNFYLVPPGGGICHQVNLENIAKTIWSKKIKNENYLYPDSVVGTDSHTTMVNALSVLGWGVGGIEAEAAMLGQPISMNIPKVVGFKLTGELKEGITATDLVLTITEILRKKGVVGKFVEFFGNGLKNLSLADRSTISNMAPEYGATCGFFSTDNETLNYLKLSGKDEHQLTIVKEYTMCKI

SEQ ID NO: 178623 - protein, 351 aa, Unknown
  Bacterial polypetide isolated from the Sargasso Sea
MTPGKKNSYNSLKKITVNDKEYNYYSLNESEKNGLEGINKLPKSLKVLLENLLRYEDDLSVTKSQIEAIKNWLKTKKSKTEIAYRPARVLLQDYTGIPAVADLAAMREAVKEKNKDPNTINPLSAVDLVIDHSVQVDQSAKADSFEKNVDIEFERNGERYSFLKWGQQAFDNFRIVPPGTGICHQVNLEYLSKVVWSEEFKGEKYLFPDTLVGTDSHTTMVNGLSVLGWGVGGIEAEAGMLGQPISMLIPEVIGFEMKNKMPEGTTATDLVLTVVKMLRDKGVVGKFVEFYGEGLKNLTLADRATIANMAPEYGATCGFFPIDEETLKYLKFSGRDQQTVDIVENYAKEQG

SEQ ID NO: 178624 - protein, 415 aa, Unknown
  Bacterial polypetide isolated from the Sargasso Sea
DPNTINPLSSVDLVIDHSVQVDKFATKSSLKENVDIEFDRNFERYSFLKWGQQAFNNFRIVPPGTGICHQVNLEYLSKVVWNEKFEDKEYLFPDTLVGTDSHTTMVNGLSVLGWGVGGIEAEAGMLGQPISMLIPEVIGFEMKNKLPEGTTATDLVLTVVKMLRDKGVVGKFVEFYGEGLKNLTLADRATIANMAPEYGATCGFFPIDDETLKYLEFSGRSKENIQIVEKYAKEQNLWASEDVVFTDTLSLDMSTVVPTISGPKRPQDKVLLTEASKNFIKVFEDICKKTDPTIAKVKDTDFEIKDGDILIAAITSCTNTSNPNVLIGAGLLAKNAIEKGLTVKPWVKTSLAPGSQVVTDYLDKAGLSKYLDELGFNLVGYGCTTCIGNSGPLPDNITDAVKENNLYAVSVLSGN

SEQ ID NO: 178625 - protein, 749 aa, Unknown
  Bacterial polypetide isolated from the Sargasso Sea
MSDHTNSFSIDEKTYKYFDLKSLDTDKVDRLPFTHKILLENALRYSEDDNEGPKDVETILNWDSKSDRSTEISFTPSRVILQDFTGVPAVVDLATMRDAVVSMQGNPNDINPLSPAELVIDHSVQVDHFGSLDALEKNNKVEFQRNQERYRFLRWGQDAFSNFEVVPPNTGIVHQVNLEYLGRVVFSKDDSLAYPDTLVGTDSHTTMINGIGCLGWGVGGIEAEAAMLGQPITMLLPEVIGVSVKGALKEGVTATDLVLTLTEILRNYGVVGKFVEFFGDGLDHLPVSDRATLSNMAPEFGSTCAIFPIDEATIRYLKLSGRSEHQVELVETYSKIQGLWRETDSNIDYTDVIELDLSKVEPCLSGPKRPQDRIILKDVAEVVKSEIDNKPITTDRLSDGSVLIAAITSCTNTSNPTVMVAAGLVAKKANALGLKSKEWVKTSLAPGSKVVTKYLEESGLLPELEQMGFNIVGYGCTTCIGNSGPLNPEVSRAVQEQNLTASSVLSGNRNFEGRIHPLVKHNFLASPPLVVAYAIAGSTLLDLTKEPLGRIDGKDIFLKDIWPSQNEIEEIIENTIDPVMFSKAYEDSIQGDDAWKNLETPQGEIYQWQESSTYIKKPPYFESMTMDLPGIQTIKDARVLALLGDSVTTDHISPAGNIDPESPAGIYLKDKGVERKDFNSYGSRRGNHEVMMRGTFANIRLRNKLAPGTEGGWTKLAQNEKPVSIFEAAEEFRSKNTDLIVLAGKEYGT

SEQ ID NO: 178626 - protein, 516 aa, Unknown
  Bacterial polypetide isolated from the Sargasso Sea
MYDSFKTKKTLKIGKKTYTYFSFKAAEKNGLKNISSLPFSIKVLLENLIRNEDGTTVSVDDIKDFDNWKTNKKINREINFRPARVLMQDFTGVPAVVDLASMRSAIMSEKGDPKKVNPLSPVDLVIDHSVMVDKYGSATSYKANVDLEYKRNIERYEFLRWGQKSFNNFRVVPPGTGICHQVNLEYLAKTVWSEKKKIKNRNLNLAYPDTVVGTDSHTTMINGLSVLGWGVGGIEAEAAMLGQPISMVVPEVIGFEIKGKIKEGITATDLVLTITEQLRQKGVVGKFVEFYGAGLKELSVPDRATISNMAPEYGATCGFFPIDEETIKFLKVSGRSSEEIKLVEKYAKAQDLWEDYKKSKRVYTETMQLDLSSIEPSLAGPKRPQDKILLSNVSDTFIKSFEKEFGQKHIDNPIHVKDEKFQIDNGHVAIAAITSCTNTSNPSVMIGAGILAQKAIKMGLKSKPWVKTSLAPGSKVVTDYLMKSGLQEYLDKLGFNLVGFGCTTCIGNSGPLDENI

SEQ ID NO: 178627 - protein, 345 aa, Unknown
  Bacterial polypetide isolated from the Sargasso Sea
MNFLASPPLVVAYAIAGRTDIDVYNEPLAQDENGNDIYLKNIWPSVKEVSDLVKETVTKEMFATSYANVYEGDSRWQQIQIPDGKLYDWNDESTYIKKAPFFDGMTVEPPGIPTIEGARCLAKLGDSVTTDHISPAGAIKADAPAGLYLQEHNVEKAQFNSYGSRRGNHEVMMRGTFANVRLKNLLAPGTEGGVTRTQPDNSLESIYDAAMAYQKNDTPLIILAGKEYGTGSSRDWAAKGSLLLGVKAVFAQSYERIHRSNLIGMGVLPLQFKEGESYESHGLTGQEEFDIQGLYDKTDEVTLIATNAEGKKTSVKADVRIDTPKEWDYYKHGGILQYVLRNMLN

SEQ ID NO: 178628 - protein, 305 aa, Unknown
  Bacterial polypetide isolated from the Sargasso Sea
MKPGNKNSYKSLSDLEVNGKNYKYYSLKKAELNGLEGVSKLPKSLKVLLENLLRYEDDISVNKKQIEAVKNWLDTKKSKTEIAYRPARVLLQDYTGIPAVADLAAMREAVKEKNKDPNTINPLSAVDLVIDHSVQVDQSAKKDSFEKNVDIEFKRNGERYSFLKWGQSAFNNFRIVPPGTGICHQVNLEYLSKVVWSEEYKGEKYLFPDTLVGTDSHTTMVNGLSVLGWGVGGIEAEAGMLGQPISMLIPEVIGFEVTKKMPEGTTATDLVLTVVKMLRDKGVVGKFVEFYGEGLKNLTLADRAT

SEQ ID NO: 178629 - protein, 302 aa, Unknown
  Bacterial polypetide isolated from the Sargasso Sea
EIEDTLKQSLNPEMFMNRYSNVSEGPEQWQKIKVDKGSIYNWEENSTYVKKPPFFDNLPDEPEGFKEIKDARPLLILGDMVTTDHISPAGSIQKESPTGNYFMKHQILPKDYNSYGARRGNHEVMMRGTFANIRIKNEMAPGTEGGFTKLHPEKKVMPIYDAVVEYKKRGTDLVVFGGKEYGTGSSRDWAAKGTKLLGVKAVIAESFERIHRSNLIGMGVLPLQFVENMNRQNLNLKGSELISVLGLEKGINPGDHLEVEIKYATGDIKKIKLLCRIDTKNELEYYKNGGILQYVLRNMING

SEQ ID NO: 178630 - protein, 618 aa, Unknown
  Bacterial polypetide isolated from the Sargasso Sea
LTVVKMLRDKGVVGKFVEFYGEGLKNLTLADRATIANMAPEYGATCGFFPVDDETLKYLKFSGRDNHTVDIVESYAKEQGLWASDDIVFTDKLTLDMSSVVPTISGPKRPQDKVLLNEASKNFKKVFEEVAKKSKISTSKVENEEFEIKDGDIVIAAITSCTNTSNPNVLIGAGLLAKKAVEKGLKTKPWVKTSLAPGSQVVTDYLEKAGLNNYLDQLGFNLVGYGCTTCIGNSGPLKENISDAIKKENIYAVSVLSGNRNFEGRISPLVKANYLASPPLVVAYALAGSMSIDLYKDPLGKDREGNDVFLKDIWPSNKEIDDTLKNSLNPDMFVKRYSNISEGPKQWQKIKTEPTSIYNWEESSTYVKKPPFFENLPDKPEDIKNINDARPLLILGDMVTTDHISPAGTIQKESPTGEYFMKHQILTKDYNSYGARRGNHEVMMRGTFANIRIRNEIAPETEGGFTKLYPEEKVMPVYDAVVEYKKRGTNLVVIGGKEYGTGSSRDWAAKGTKLLGIKAVLAESFERIHRSNLIGMGVLPLQFIDGMNRKNLDLKGSELISINDIENGLSPSDHVEVEIKYKSGESKKIKMLCRIDTKNELEYYKNGGILQYVLRKMI

SEQ ID NO: 178631 - protein, 651 aa, Unknown
  Bacterial polypetide isolated from the Sargasso Sea
MAFDIDVIKSVYSKMSSKIDNARKIVGRPLTYAEKILYSHLWDESSKTVFKRGEDYVDFGPDRVTCQDATAQMALLQFMQAGKDKVAIPTTVHCDHLILAQSGAQKDLKNANKVSSEVFNFLESVSRKYGIGFWKPGAGIIHQVILENYAFPGGMMIGTDSHTVNAGGLGMVAIGVGGADAVDVMAGMPWELKFPKLIGIKLTGELNGWASAKDVILKVAGILTVKGGTGYILEYFGDGAESLSCTGKGTICNMGAEVGATTSIFAYDESMERYLKSTEREDVVKAASDIKDDLRADQEVYDNPEKYFDEIIEIDLDTLTPHINGPFTPDLATPVSEMKNKAKSEGWPTDIKWGLIGSCTNSSYEDLSRAASIARQALDKNIKIKSKLGINPGSEQVRYTAERDGLIDLFERLESKIFTNACGPCIGQWNREGEDNTEKNSIIHSFNRNFAKRADGNPNTHAFVTSPEMVMAVALSGNLDFNPITDNLISEDGHEVLLDPPIGDELPSNGFDCEDNGYVEPPLDGSNIEININPDSKRLQVLEAFSPWDGENIKEAKLLIKAHGKCTTDHISMAGPWLRFRGHLDNISDNCLIGAVNHFNMKTNSVKNQVTGEYGPVPETQRFYKKNKIDTIVVGDHNYGEGSSREHAAME

SEQ ID NO: 178632 - protein, 790 aa, Unknown
  Bacterial polypetide isolated from the Sargasso Sea
VADLAAMREAVKDKNKDPNTINPLSAVDLVIDHSVQVDKSANSDSFEKNVDIEFERNGERYSFLKWGQHAFNNFRIVPPGTGICHQVNLEYLSKVVWSEEFEGEKYLFPDTLVGTDSHTTMVNGLSVLGWGVGGIEAEAGMLGQPISMLIPEVIGFEVRNKMPEGTTATDLVLTVVKMLRDKGVVGKFVEFYGEGLKNLTLADRATIANMAPEYGATCGFFPIDDETLKYLKFSGRDQHTVDIVEKYAKEQGLWASNEIEFTDTISLDMSTVVPTISGPKRPQDKVLLTEAATSFKKVFEEATSRKNQSISKVSDTDYEIKDGSILIAAITSCTNTSNPNVLIGAGLLAKKAVELGLEVKPWVKTSLAPGSQVVTDYLAKAGLNTYLDKLGFNLVGYGCTTCIGNSGPLPENIVNAIQKENIYAVSVLSGNRNFEGRISPHIKANYLASPPLVVAYALAGHMEFDLYKDALGKDKDGNNIYLKDIWPTNEEIEDTLKVSLNAEMFIKRYSNVSEGPSQWQKIKTEKSSIYNWDEGSTYVKKPPFFDKLSDQPEGFKPIKDARPLLILGDMVTTDHISPAGNIQKDSPTGEYFMEHQILPKDYNSYGSRRGNHEVMMRGTFANIRIRNEMAPGTEGGFTKLYPEEKVLPVYDAVVEYKKRGTDLVVIGGKEYGTGSSRDWAAKGTKLLGVKAVIAESFERIHRSNLIGMGILPLQFKDNINRKNLNLVGSELISVIGLEKGVKPSDEVSLEIKYASGDIKKIKTLCRIDTKNELEYYKNGGILQYVLRNMI

SEQ ID NO: 178633 - protein, 889 aa, Unknown
  Bacterial polypetide isolated from the Sargasso Sea
MKPGNKNSYKSLSDLEVNGKNFKYYSLKKAELNGLQGISKLPKSLKVLLENLLRYEDDVSVNKNQIEAIKKWLDTKKSKMEIAYRPARVLLQDYTGIPAVADLAAMREAVKEKNKDPNTINPLSAVDLVIDHSVQVDQSAKKDSFEKNVDIEFKRNGERYSFLKWGQSAFNNFRIVPPGTGICHQVNLEYLSKVVWSEEYKGEKYLFPDTLVGTDSHTTMVNGLSVLGWGVGGIEAEAGMLGQPISMLIPEVVGFEVTKKMPEGTTATDLVLTVVKMLRDKGVVGKFVEFYGEGLKNLTLADRATIANMAPEYGATCGFFPIDEETLKYLEFSGRDKETVAIVEKYAKEQGLWSSDEIEFTDKISLDMSTVVPTISGPKRPQDKVLLTDASSNFKKVFKEATDKKDYKISKVKDTDYEIKDGSILIAAITSCTNTSNPNVLIGAGLLAKKAVEFGLNVKPWVKTSLAPGSQVVTDYLEKAGLNTYLDQLGFNLVGYGCTTCIGNSGPLAENIVDAIQKENLYAVSVLSGNRNFEGRISPHIKANYLASPPLVVAYALAGHMEFDLIKDSFGKDKNGKDVFLKDIWPSNKEIENTLKNSLNADMFVKRYSNVSEGPKQWQEIKTEKSSIYNWDENSTYVKKPPFFENLSDEPEGFKEIKNARPLLILGDMVTTDHISPAGNIQKDSPTGEYFMNYQILPKDYNSYGSRRGNHEVMMRGTFANIRIKNEMAPGTEGGFTTLYPEKKVMSVYDAVVEYKKRGTDLVVVGGKEYGTGSSRDWAAKGTKLLGVKVVIAESFERIHRSNLIGMGILPLQFTENMNRKNLNLLGSELISVIDIEKGINPSDKVKVEIKYASGDVKIIDTLCRIDTKNELEYYKNGGILQYVLRNMI

SEQ ID NO: 178634 - protein, 422 aa, Unknown
  Bacterial polypetide isolated from the Sargasso Sea
LTIVEMLRKKGVVGKFVEFYGEGLKNLTLADRATIANMAPEYGATCGFFPVDDESLKYLKLSGRDSATIALVEKYSKEQGLWASNDVEFTDTVSLDVSTVVTSISGPKRPQDKVLLTEAASSFAKVYKENAKRSKVVESDVAGADFKLKDGDIVIAAITSCTNTSNPSVLIGAGLLAKKAYEKGLKVKPWVKTSLAPGSQVVTDYLEKAGLNKYLDELGFNLVGYGCTTCIGNSGPLNKNISDAINEKDLYAVSVLSGNRNFEGRINPDVKANYLASPPLVVAYALAGNMNFDLYKTSLGKDKSGKDVYLKDIWPSNKEIEKIMLTSLNADMFKKRYSNVSEGPKEWREINTVDSDIYNWEQNSTYVKRPPFFDNLPDKPEGFKAINDARILLLLGDTVTTDHISPAGSIKKDSPSGDYFME

SEQ ID NO: 178635 - protein, 546 aa, Unknown
  Bacterial polypetide isolated from the Sargasso Sea
EKYAKEQGLWASNNIEFTDTVSLDMSSLVPTISGPKRPQDKVLLNEASSEFKKVFENTTSRNKKKISKVEGTDYEIKDGSILIAAITSCTNTSNPNVLIGAGLLAKKAVELGLKAKPWVKTSLAPGSQVVTDYLEKSGLNKYLDELGFNLVGYGCTTCIGNSGPLPEKIVEAIEKEDLYAVSVLSGNRNFEGRISPHIKANYLASPPLVVAYALAGHMEVDLYKDPLGKDKNDNDIYLKDIWPSNQEIEKTLREALNPEMFVKRYSNVSEGPSQWQQIKTEKSSIYNWDQGSTYVKKPPFFENLPDEPEGFKQIKDARPLLILGDMVTTDHISPAGSIQKESPTGEYFMEHQILPKDYNSYGSRRGNHEVMMRGTFANIRIRNEIAPGTEGGFTKLFPEGKVMPVYDAVVEYKKRGTDLLVIGGKEYGTGSSRDWAAKGTKLLGIKAVIAESFERIHRSNLIGMGILPLQFIENINRKNLNLKGSELISVVNLEKGINPSDKVELEIKYITGEIKKIKTLCRIDTKNELEYYKNGGILQYVLRNMI

SEQ ID NO: 178636 - protein, 517 aa, Unknown
  Bacterial polypetide isolated from the Sargasso Sea
MKFNSKDSFKSLDNISSSGKEYKIFNLKKAENNGLEGVSKLPKSLKVLLENLLRYEDNKTVDKKQILAIKDWLKSKKSNTEIAYRPARTLLQDYTGIPAIADLAAMRDAVKDKNKNPDKINPLSTVDLVIDHSVMVDEYASEKSFNQNVEREFSRNSERYSFLKWGQKAFDNFRVVPPGTGICHQVNLEYLSKVVWSSKSGNDLYAYPDTLVGTDSHTTMVNGLSVLGWGVGGIEAEAAMLGQPISMLIPEVIGVELKGKLKEGTTATDLVLIIVEMLRKKGVVGKFVEFYGEGLKNLTLADRATIANMAPEYGATCGFFPVDDETLKYLKLSGRDQETISLVEKYSKEQGLWASNDVVFTDTLSLDVSSVVTSISGPKRPQDKVLLTEASAAFAKVYKENAKRDKAIEAKVEGTDFNIKDGDIVIAAITSCTNTSNPSVMIGAGLLAKKAHEKGLKVKPWVKTSLAPGSQVVTDYLEKAGLNQYLDELGFNLVGYGCTTCIGNSGPLNQNISDANK

SEQ ID NO: 178637 - protein, 343 aa, Unknown
  Bacterial polypetide isolated from the Sargasso Sea
SPPLVVAYALAGNMYHDLYKNPLGKDENGKDVFLKDIWPSNKEIEELMLKSINADMFVKRYSNVSEGPKEWSSIKTDQSSIYNWEENSTYVKRPPFFDNLPDKPEGFKKIKDARPLLILGDTVTTDHISPAGSIKKDSPTGDYFMKHQVQQKDFNSYGARRGNHEVMLRGTFGNIRIRNEMASGTEGGFTILQPDGKQMSVYEAAMEYKKRGTSLVVVAGKEYGTGSSRDWAAKGTKLLGIKAVIAESFERIHRSNLVGMGILPLQFKEDFDRKKLNIKGTELFTIIDIEKGINPGAEVNCEIKYADGSSKTIKLLSRIDTENEIEYYKNGGILQYVLRNMLN

SEQ ID NO: 178638 - protein, 889 aa, Unknown
  Bacterial polypetide isolated from the Sargasso Sea
MTPGNKNSYNSLKQISVNNKDYKYYSLIEAEKNGLNGISKLPKSLKVLLENLLRYEDDLSVNKNQIDSIKNWLETKNSNTEIAYRPARVLLQDYTGIPAVADLAAMREAVKDKNKDPNTINPLSSVDLVIDHSVQVDQSAKADSFEKNVDIEFERNAERYSFLKWGQQAFNNFRIVPPGTGICHQVNLEYLSKVVWSEKFKGDNYLFPDTLVGTDSHTTMVNGLSVLGWGVGGIEAEAGMLGQPISMLIPEVIGFEVKNKMPEGTTATDLVLTVVKMLRDKGVVGKFVEFYGEGLKNLTLADRATIANMAPEYGATCGFFPIDDETLKYLKFSGRDQHTVDIVEKYAKEQGLWASNDIVFTDTLTLDMSSIVPTISGPKRPQDKVLLTDAPTSFKKVLEEATNTKEKSIAKVSNSDFEIKDGSILIAAITSCTNTSNPNVLIGAGLLAKKAVELGLEVKPWVKTSLAPGSQVVTDYLAKAGLNTYLDKLGFNLVGYGCTTCIGNSGPLADNIVEAIQKENIYAVSVLSGNRNFEGRISPHIKANYLASPPLVVAYALAGHMEFDLYKDSLGKDKNGNDVFLKDIWPSNDEIENTLKQSLNAEMFINRYSNVSEGPSQWQKIKTDHTSIYNWDKGSTYVKKPPFFDSLPDEPEGFKEIKDARPLLILGDMVTTDHISPAGSIQKDSPTGEYFMEHQILPKDYNSYGSRRGNHEVMMRGTFANIRIRNEMAPGTEGGFTKLYPEEKVLSVYDAVVEYKKRGTDLVVIGGKEYGTGSSRDWAAKGTKLLGIKAVLAESFERIHRSNLIGMGVLPLQFINEVNRKNLNLIGSELISIIDIEKGINPSDEVMVEIKYASGEMKKVKTLCRIDTKNELEYYKNGGILQYVLRNMI

SEQ ID NO: 178639 - protein, 699 aa, Unknown
  Bacterial polypetide isolated from the Sargasso Sea
MKPGNKNSFKALNSININGKNYKYYSLAEAEKNGLNDISKLPKSLKVLLENLLRYEDDVSVTKDQIEAIRNWIKKKKSNTEIAYRPARVLLQDYTGIPAVADLAAMREAVKEKNKDPNTINPLSSVDLVIDHSVQVDQSAKSDSFEKNVDIEFKRNGERYSFLKWGQQAFNNFRIVPPGTGICHQVNLEYLSKVVWSEKYKEDEYLFPDTLVGTDSHTTMVNGLSVLGWGVGGIEAEAGMLGQPISMLIPEVIGFELKNKMPEGTTATDLVLTVVKILRDKGVVGKFVEFYGDGLKNLTLADRATIANMAPEYGATCGFFPIDDETLKYLRFSGRDEHTVNIVEKYAKEQGLWISDNIEFTDTVSLDMSSLVPTISGPKRPQDKVLLNEASSGFKKVFVDTTSRKEKHVSKVNGTDFEIKDGSILIAAITSCTNTSNPNVLIGAGLLAKKAVELGLKTKPWVKTSLAPGSQVVTDYLEKSGLNKYLDELGFNLVGYGCTTCIGNSGPLPDNIVEAIEKEDIYGVSVLSGNRNFEGRISPHIKANYLASPPLVVAYGLAGHMEVDLYKDPLGKDKNNKDIFLKDIWPSNKQIEETLREALNAEMFVKRYSNVSKGPIQWQKIKTEKSSIYNWDQGSTYVKKPPFFDNLPDEPEGFKKIKDARPLLILGDMVTTDHISPAGSIPKESPTGKYFMEHQILPK

SEQ ID NO: 178640 - protein, 270 aa, Unknown
  Bacterial polypetide isolated from the Sargasso Sea
EIKTEKSSIYNWDEGSTYVKKPPFFDNLPDKPEGFKSIKDARPLLILGDMVTTDHISPAGNIQKNSPTGDYFMKNQIQQKDFNSYGSRRGNHEVMMRGTFANIRIRNEMAPGTEGGYTKLYPEGKVMTVYDAVVEYKKRGTDLIVVGGKEYGTGSSRDWAAKGTKLLGVKVVLAESFERIHRSNLIGMGILPLQFLGDMNRKNLDLSGSELLSVIDIEKGINPSDKVKLEIKYLSGDIKIIETLCRIDTKNELEYYKNGGILQYVLRNMI

SEQ ID NO: 178641 - protein, 270 aa, Unknown
  Bacterial polypetide isolated from the Sargasso Sea
NKNWKKVVFIIWEQGSTYVKKPPFFDNLSDEPDGFKQIKDARPLLILGDMVTTDHISPAGSIQKESPTGDYFMKHQILPKDYNSYGSRRGNHEVMMRGTFANIRIRNEIVPGTEGGFTKLFPEGKVMPIYDAVVEYKKRGTDLVVVGGKEYGTGSSRDWAAKGTKLLGVKAVIAESFERIHRSNLIGMGILPLEFINKMNRKNLRLIGSELINILNIEKGISPSDKVEVEIKYISGDVKKIQTLCRIDTNNELEYYKNGGILQYVLRKMI

SEQ ID NO: 178642 - protein, 406 aa, Unknown
  Bacterial polypetide isolated from the Sargasso Sea
LLPELEQMGFNIVGYGCTTCIGNSGPLNPEVSRAVQEQNLTASSVLSGNRNFEGRIHPLVKHNFLASPPLVVAYAIAGSTLLDLTKEPLGRIDGKDIFLKDIWPSQNEIEEIIENTIDPVMFSKAYKDSIQGDDAWKNLETPQGEIYQWQESSTYIKKPPYFESMTMDLPGIQTIKDARVLALLGDSVTTDHISPAGNIDPESPAGIYLKDKGVERKDFNSYGSRRGNHEVMMRGTFANIRLRNKLAPGTEGGWTKLAQNEKPVSIFEAAEEFRSKNTDLIVLAGKEYGTGSSRDWAAKGVSLLGVKAVIAESYERIHRSNLIGMGVLPLEFSSGDCAESIGLDGFESFDFDSITKQSKSVSVKATSADGNEKSFEAKIRIDTPKEWEYFEHGGILHYVIRRLVAK

SEQ ID NO: 178643 - protein, 264 aa, Unknown
  Bacterial polypetide isolated from the Sargasso Sea
MYDSFKTKKTLKIGKKAYTYYSLKYAEKNGLKNVSALPYSIKILLENLIRHEDKKTVLKSDILEFQKWKKQKKIAKEINFRPARVLMQDFTGVPAVVDLASMRSAIKDKKGDPKKINPLSPVDLVIDHSVMVDKFGSTSAHKTNVDLEYKRNIERYEFLRWGQKSFDNFRVVPPGTGICHQVNLEFLAKTIWSSTGLVNNKKIELAYPDTVVGTDSHTTMINGLSVLGWGVGGLEAEAAMLGQPISMVVPEVVGFEIKGKIKEG

SEQ ID NO: 178644 - protein, 383 aa, Unknown
  Bacterial polypetide isolated from the Sargasso Sea
MKPGKKNSYNCMKSLDIGGKNYKYFSLKEAEKNGLDGISKLPKSLLVLLENLLRFEDDISVNKSQIDAIKNWLRTKKSKTEIAYRPTRVLLQDYTGIPAVADLAAMREAVKEKNKDPEKINPLSPVDLVIDHSVQVDDFANKLSLKKNVDIEFKRNGERYSFLKWGQQAFDNFRIVPPGTGICHQVNLEYLSKVVWSAKSGNDEFIFPDSLVGTDSHTTMVNGLSVLGWGVGGIEAEAGMLGQPISMLIPEVIGFELANKLPEGTTATDLVLTVVKILRDKGVVGKFVEFYGSGLKNLSLADRATIANMAPEYGATCGFFPIDDETLKYLKFSGRDNQTIKIVERYSKEQGLWASEDVEFSDVVRLDMSTVVPTISGPKRPQD

SEQ ID NO: 178645 - protein, 298 aa, Unknown
  Bacterial polypetide isolated from the Sargasso Sea
MKPGHKNSFNSLKKININGKDYYYYSLIEAEKNGLTGISKLPKSIKVLLENLLRYEDDVTVSKKQIEDIKNWLKEKKSDTEIAYRPARVLLQDYTGIPAVADLAAMREAVKEKNKNPEKINPLSQVDLVIDHSVQVDNYANKKSLDENVDIEFKRNGERYSFLKWGQEAFNNFRIVPPGTGICHQVNLEYLSKVVWSEKFENKDYLFPDTLVGTDSHTTMVNGLSVLGWGVGGIEAEAGMLGQPISMLIPEVIGFEVKNKMPEGTTATDLVLTVVKMLRDKGVVGKFVEFYGDGLKYL

SEQ ID NO: 178646 - protein, 529 aa, Unknown
  Bacterial polypetide isolated from the Sargasso Sea
MKPGNKNSYKSLKSININGKNYKYYSLVEAEKNGLHNISKLPKSLKVLLENLLRYEDDLSVTKAQIEAIKNWMQKKKSSTEIAYRPARVLLQDYTGIPAVADLAAMREAVKEKNKDPNTINPLSSVDLVIDHSVQVDQSAKSDSFEKNVDIEFKRNGERYSFLKWGQQAFNNFRIVPPGTGICHQVNLEYLSKVVWTEKYKEDEYLFPDTLVGTDSHTTMVNGLSVLGWGVGGIEAEAGMLGQPISMLIPEVIGFELKNKMPEGTTATDLVLTVVKILRDKGVVGKFVEFYGDGLKNLTLADRATIANMAPEYGATCGFFPIDDETLKYLRFSGRDEHTVITVEKYAKEQGFWASDQIEFTDTVSLDMSSIVPTISGPKRPQDKVLLNEASAEFKKVFESTTTRKEKYTSKVSGADFEIKDGSILIAAITSCTNTSNPNVLIGAGLLAKKAVELGLKTKPWVKTSLAPGSQVVTDYLEKAGLNKYLDNLGFNLVGYGCTTCIGNSGPLPENIIEAIEKKNIYAVSVLSG

SEQ ID NO: 178647 - protein, 491 aa, Unknown
  Bacterial polypetide isolated from the Sargasso Sea
MKPGNKNSFNCLKELSVNGKNYFFYSLDEAEKNGLDGINRLPKSVKVLLENLLRYEDGSTVNKKQILSIKEWLNSKKSKTEIAYRPARVLLQDYTGIPAVADLAAMRDTVKEKNKDPKKINPLSSVDLVIDHSVQVDKFATKNSLKENVDIEFDRNFERYSFLKWGQQAFDNFRIVPPGTGICHQVNLEYLSKVVWNEKFEDKEYLFPDTLVGTDSHTTMVNGLSVLGWGVGGIEAEAGMLGQPISMLIPEVIGFEMKNKLPEGTTATDLVLTVVKMLRDKGVVGKFVEFYGEGLKNLTLADRATIANMAPEYGATCGFFPIDKETLKYLEFSGRSKENINIVEKYAKEQNLWASNDIVFTDTLTLDMSTVVPTISGPKRPQDKVLLSDASKNFIKVYEDVCKKTNPTIAKIQGEDFEIKDGDILIAAITSCTNTSNPNVLIGAGLLAKNAIEKGLNVKPWVKTSLAPGSQVVTDYLDKAGLSKYLDRLGF

SEQ ID NO: 178648 - protein, 816 aa, Unknown
  Bacterial polypetide isolated from the Sargasso Sea
INFSPARVLMQDFTGVPAVVDLASMRSAIHKLNGNPNKINPLTPVDLVIDHSVMVDKFGNKSAYQKNVDLEYERNIERYEFLKWGQKSFNNFRVVPPGTGICHQVNLEYLAQSIWSERKSDDGKKINLAYPDTVVGTDSHTTMINGLSVLGWGVGGIEAEAAMLGQPISMVVPEVVGFEISGRLKEGTTATDLVLTITEILRKKGVVGKFVEFFGNGLKELSIPDRATIANMAPEYGATCGFFPIDNETLRFLKVSGRTKSNIDLVKKYSKEQGIWEDYKKNKRVFTTKIKLNLSSIVPSLAGPKRPQDKIHLSKVSSSFEKSLKLDFNQEKIDNKVKLDSFSLDHGHVAIAAITSCTNTSNPSVMVGAGILAKKAIRLGLQTKPWVKSSLAPGSKVVTDYLSKAGLQTYLDKLGFQLVGFGCTTCIGNSGPLDSKIANAVEKNNLILSGVLSGNRNFEGRINPHVKANYLASPPLVVAYAIAGTTKINLTKEPIGKNKKGKNIYLKDIWPSSNEIKKVIDSTINSKLYRARYKNVFKGDGKWKAVKSLKGLTYQWNKKSTYVQHPPFFQNLKPNSSNIKNIKIANILGIFGDSVTTDHISPAGSIKIDGPAGNYLKKNNVKVSDFNSFGSRRGNHEVMMRGTFSNIRIKNEMVKGIEGGYTISYPSKKQKSIYDASIDYQKSGTPLVIFAGKDYGMGSSRDWAAKGTSLLGVKAVIAESFERIHRSNLIGMGVLPCQFIDNENRQSLKLSGSEKISILGLEKDISPGKKLDLKIQYSNGKNVSTKIKLLVNTSTEITYLENGGILQYVMKNLVNS

SEQ ID NO: 178649 - protein, 723 aa, Unknown
  Bacterial polypetide isolated from the Sargasso Sea
MKFNSKNSFNSLETINSSGKNYKIFNLKTAEKNGLEGISKLPKSLKVLLENLLRYEDGLTVDKKQILAIKEWLKNKKSNTEIAYRPTRTLLQDYTGIPAIADLAAMRDAVKEKNKDPNQINPLSTVDLVIDHSVMVDEYASGKSFNQNVEKEFSRNGERYAFLKWGQKAFDNFRVVPPGTGICHQVNLEYLAKVVWSSKSGNDLYAYPDTLVGTDSHTTMVNGLSVLGWGVGGIEAEAAMLGQPISMLIPEVVGVEIKGKLLEGLTATDLVLAIVEMLRKKGVVGKFVEFYGEGLKNLTLADRATIANMAPEYGATCGFFPVDEETLKYLKLSGRDNETIELVEKYSKEQGLWASEGMEFTDTLSLDISTVVPSISGPKRPQDKVLLTNSAKSFAKAYKENTKREKPSEANVDGADFKIKDGDIVIAAITSCTNTSNPSVMIGAGLLAKKAIERGLKIKPWVKTSLAPGSKVVTDYLEKAGLNKYLDELGFNLVGYGCTTCIGNSGPLNKNISDAIHKENLYAVSVLSGNRNFEGRISPDVKANYLASPPLVVAFALAGNMNFDIYKSSLGIDKEGKEVFLKDIWPSNKEIENIMLKSINAKMFIDRYSNISEGPKEWRSIKTVDSSIYNWEDNSTYVKKPPFFDDLPDQPEGFKPIKDARLLLLLADTVTTDHISPAGNIKKDSPTGDYFMKNQVQQKDFNSYGARRGNHEVMMRGTFGNIK

SEQ ID NO: 178650 - protein, 601 aa, Unknown
  Bacterial polypetide isolated from the Sargasso Sea
MTPGKKNSYNSLKKITINNKEYNYYSLSEAEKNGLEGISKLPKSLKVLLENLLRYEDDLSVTKSQIEAIKNWLETKKSKTEIAYRPARVLLQDYTGIPAVADLAAMREAVEEKNKDPNTINPLSAVDLVIDHSVQVDQSAKADSFEKNVDIEFNRNGERYSFLKWGQQAFDNFRIVPPGTGICHQVNLEYLSKVVWSEEFKGEKYIFPDTLVGTDSHTTMVNGLSVLGWGVGGIEAEAGMLGQPISMLIPEVIGFEVKNKMPEGTTATDLVLTVVKMLRDKGVVGKFVEFYGDGLKNLTLADRATIANMAPEYGATCGFFPIDDETLKYLKFSGRDQHTVEIVEKYAKEQGLWASNDLEFTDVISLDMSTVVPTISGPKRPQDKVLLTDAPTSFKKVLSEATNKDQKSISKVSNTDYEIQDGSILIAAITSCTNTSNPNVLIGAGLLAKKAVEYGLEVKPWVKTSLAPGSQVVTDYLEKAGLNTYLDQLGFNLVGYGCTTCIGNSGPLPENIVEAIQKENIHAVSVLSGNRNFEGRISPHIKSNYLASPPLVVAYAIAGHMEFDLYKDPLGKSKDGKDIFLKDIWPSNQEIEDTLKTIFEC

SEQ ID NO: 178651 - protein, 724 aa, Unknown
  Bacterial polypetide isolated from the Sargasso Sea
MKPGKKNSYKSLSEIRIDDKKFKFYSLKKAEENGLSGISKLPKSLKVLLENLLRYEDEITVTKNQIESLKQWLIDKRSKTEIAYRPARVLLQDYTGIPAVADLAAMREAVKDKNKDPEKINPLSAVDLVIDHSVQVDQSAKSDSFDKNVEIEFKRNGERYSFLKWGQQAFNNLRIVPPGTGICHQVNLEYLSKVVWKERFDGDEYIFPDTLVGTDSHTTMVNGLSVLGWGVGGIEAEAGMLGQPISMLIPEVIGFEIKNKMPEGTTATDLVLTVVKMLRDKGVVGKFVEFYGEGLKNLSLADRATIANMAPEYGATCGFFPVDDETLRYLKFSGRDQSTVKIVEEYAKTQGLWASNDIEFTDTLILDMSTIVPTISGPKRPQDKVLLSNASNSFRKNFNEAMNKKNFSSSKVNGTEFEIKDGSILIAAITSCTNTSNPNVLIGAGLVAKKAVELGLEVKPWVKTSLAPGSQVVTDYLQKAGLNIYLDKLGFNLVGYGCTTCIGNSGPLADNIVEAIQRENIYAVSVLSGNRNFEGRISPHIKANYLASPPLVVAYALAGRMDFDLYKEPLGKDKNGKEIFMKDIWPSNKEIEEVLKDSLSADMFIKRYSNVSEGPKQWQEIKTEKSSIYDWEENSTYVKKPPFFENLPDKPEGFKEIKDARPLLILGDMVTTDHISPAGNIQKESPTGEYFMKHQILPKDYNSYGSRRGNHEVMMRGTFAKYKN

SEQ ID NO: 178652 - protein, 334 aa, Unknown
  Bacterial polypetide isolated from the Sargasso Sea
VGKFVEFYGKGLKELSVPDRATISNMAPEYGATCGFFPTDEETVKFLKVSGRAADEIKLVERYSKAQGLWEDYKKNKRVYTDTMELDLSSIEPSLAGPKRPQDKILLSNVADQFMTSFEDEFGQKKTSNPISVNNEFEIDHGHVAIAAITSCTNTSNPSVMIGAGLLAQKANKLGLKTKPWVKTSLAPGSKVVTDYLEKSGLQEQLDKLGFNLVGFGCTTCIGNSGPLDKNISDAVSKNDLIVSGVLSGNRNFEGRINPFVKANYLASPPLVVAYALAGSTKIDLSNEPIGIGHNNKKIYLKDIWPKTKEIKVVINKIINSNLYKQRYKNVFKG

SEQ ID NO: 178653 - protein, 322 aa, Unknown
  Bacterial polypetide isolated from the Sargasso Sea
MKPGTKDSFKSLKDIKINNSNFKYFSLNEAEKNGLYGISKLPKSIKVLLENLLRYEDGSSVNKDQILAIKNWLKNKKSETEIAYRPARVLLQDYTGIPAVADLAAMREAVKEKNKDPNTINPISSVDLVIDHSVQVDKFASKNSLKENVDIEFDRNAERYSFLKWGQQAFNNFRIVPPGTGICHQVNLEYLSKVVWTEKYKDQNYIFPDTLVGTDSHTTMVNGLSVLGWGVGGIEAEAGMLGQPISMLIPEVIGFEMKNKLPEGTTATDLVLTVVKMLRDKGVVGKFVEFYGEGLKNLTLADRATIANMAPEYGATCGFFPN

SEQ ID NO: 178654 - protein, 469 aa, Unknown
  Bacterial polypetide isolated from the Sargasso Sea
MVNSLSVLGWGVGGIEAEAAMLGQAISMNIPEVIGLELKGSLKEGITATDLVLSITKMLRDKGVVGKFVEFYGKGLNNLSLADRATISNMAPEYGATCGFFPTDEETINYLKLTGKQSEHLNIVEEYSKKQTLWADENYSPNFSDKILLDLETVEPTLAGPKRPQDKILLKEVPNEFSKMDNKKITNKKRLNTGDVVIAAITSCTNTSNPNVMIAAGLVAKKAIDLGLEVKPWVKTSLAPGSKVVSDYLDKAGLTEYLDLLGFNTVGYGCTTCIGNSGPLNEWVSNEIKKNNLTVCSVLSGNRNFEGRVHQEVKANFLASPPLVVAYAIAGNINVNLTTDSIGKSKSGKKIYLKDLWPSNKEINQTLSLCLTPMMFKERYKEIYKGDDNWKSINNSKNTTYDWNDTSTYIKHPPFFDIKNKFELRDINNARILALLGDSVTTDHISPAGNIKVDSPAGLYLTDRQINSR

SEQ ID NO: 178655 - protein, 333 aa, Unknown
  Bacterial polypetide isolated from the Sargasso Sea
LAGHMEVDLYKDPLGKDKNDKDIFLKDIWPSNKEIEETLTDALNAKMFVERYSNVSEGPVQWQKIKTEKSSIYNWDEGSTYVKRPPFFDNMSDEPEGFKQIKDARPLLILGDMVTTDHISPAGSIQKESPTGEYFMEHQILPKDYNSYGSRRGNHEVMMRGTFANIRIRNEIAPGTEGGFTKLFPEGKVMSVYNAVVEYKKRGTDLVVIGGKEYGTGSSRDWAAKGTKLLGIKTVIAESFERIHRSNLIGMGILPLQFIDGMNRSNLNLKGPELISVINIEKGLSPSDQVELEIKYISGDIKKIKTLCRIDTKNELEYYKNGGILQYVLRNMI

SEQ ID NO: 178656 - protein, 243 aa, Unknown
  Bacterial polypetide isolated from the Sargasso Sea
MEFKSKNSFQSLDKLTVSGKKYNFFNLVKAEKNGLKNINKLPKSIKVLLENLLRFEDDITVNKKQIEAIADWLKTKSSKQEIAYRPARILLQDYTGIPAVADLAAMRDAVKSKNKDPKKINPLSTVDLVIDHSVMVDNYAKKDSFSKNVQREFDRNGERYSFLKWGQSAFNNFRVVPPGTGICHQVNLEYLSKVVWSSETNGELFAYPDTLVGTDSHTTMVNGLSVLGWGVGGIEAEAAMLGQ

SEQ ID NO: 178657 - protein, 397 aa, Unknown
  Bacterial polypetide isolated from the Sargasso Sea
MKPGNKNSYNSLKKISIDGKDFKYYSLPEAEKNGLDGISKLPKSLKVLLENLLRYEDDLSVTKSQIEAIKNWLNTKKSKIEIAYRPARVLLQDYTGIPAVADLAAMREAVKDRNKDPNTINPLSAVDLVIDHSVQVDQSAKADSFEKNVDIEFERNGERYSFLKWGQQAFNNFRIVPPGTGICHQVNLEYLSKVVWSEEFEGDKYLFPDTLVGTDSHTTMVNGLSVLGWGVGGIEAEAGMLGQPISMLIPEVIGFEMKNKMPEGTTATDLVLTVVKMLRDKGVVGKFVEFYGEGLKNLTLADRATIANMAPEYGATCGFFPIDEETLKYLKFSGRDQHTVNVVENYAKEQGLWASNDIEFSDIISLDMSSVVPTISGPKRPQDKVLLTDAPSSFKKY

SEQ ID NO: 178658 - protein, 377 aa, Unknown
  Bacterial polypetide isolated from the Sargasso Sea
MKNSFDTQHELTINGEQYNIHSLKGLGDKAKRLPFSLKVLLENLLRNEDGENIKEQDINALLNWDPKAKPSSEVAFTPARVVMQDFTGVPAIVDLAAMRDAMEKLGGDPAKINPLSPAELVIDHSVQVDGYGNDGAFDLNAKLEYDRNKERYEFLRWGQTAFDNLKVVPPATGIVHQVNLEYLARVIFNEDSNGKKFAYPDTLVGTDSHTTMINGLGVLGWGVGGIEAEAAMLGQPISLLIPQVVGMKLNGRLPEGTTATDLVLTVTEILRNHGVVGKFVEFYGDGLADLPLADRATIANMAPEYGATCGIFPIDDETINYLRLTNRDEDQLKLIEDYAKHQGLWRNDGDEARYTDTLELKLDDVVPSPCRPKTPTR

SEQ ID NO: 178659 - protein, 459 aa, Unknown
  Bacterial polypetide isolated from the Sargasso Sea
MVDKYKTHNALELNVKKELERNKERYEFLKWGQESFNNFYLVPPGAGICHQVNLENIAKTIWIKEINNQKYLFPDSVVGTDSHTTMVNSLSVLGWGVGGIEAEAAMLGQPISMNIPEVVGFELIGSLKDGITATDLVLTITQILRKSGVVGKFVEFYGNGLHNLSLADRATISNMAPEYGATCGFFPTDNETLNYLKLTGKNNHHLKIVEEYAKKQYIWADESYNPIYRKKIVLDLSSIEPSLAGPKRPQDKILLKNVPDEFKKIEKKYEYNSNQKINNGDIVIAAITSCTNTSNPNVMVAAGLVAKKAIQYNLKVKPWVKTSLAPGSKVVSDYLDKAGLTPYLDKIGFKTVGYGCTTCIGNSGPLDSWVSDEIKSKDLTVCSILSGNRNFEGRVHQSVKANFLASPPLVVAYALAGNININLASEPIGKSKDGKEYFLKDLWPTNEEINNLLNSFITP

SEQ ID NO: 178660 - protein, 509 aa, Unknown
  Bacterial polypetide isolated from the Sargasso Sea
MKINSKDSFKSLKKLKVDSKIYNIFSLKEAEKNGLEGISKLPKSIKVLLENLLRFEDEKSVKKEQILSIKSWLNKKNSKTEIAFRPARVLMQDYTGIPAVADLAAMRDAVKLKKKDPKKINPSSTVDLVIDHSVMVDAYASKDSFKKNVEKEFLRNGERYSFLKWGQQAFNNFRVVPPGTGICHQVNLEYLSKVVWSSDNFAYPDTLVGTDSHTTMVNGLSVLGWGVGGIEAEAAMLGQPISMLIPDVVGFKIKNKLTEGTTATDLVLTIVQILRQEGVVGKFVEFYGDGLKNLSLADRATIANMAPEYGATCGFFPIDEETLKYLKFSGRDQHTISLVEKYSKEQGLWADDNISFTKVLDLDLSKVVPSISGPKRPQDKVLLSESSKSFMTSFKKNMNRENAKEEIVSGENFKLKDGNIVIAAITSCTNTSNPSVLIGAGLLAKKAVEKGLKVKPWVKTSLAPGSQVVTDYLEKAGLNKYLDQLGFHLVGYGCTTCIGNSGPLKENIS

SEQ ID NO: 178661 - protein, 427 aa, Unknown
  Bacterial polypetide isolated from the Sargasso Sea
KTSLAPGSQVVTDYLEKAGLNVHLDKLGFNLVGYGCTTCIGNSGPLPDKISDAIKNNNIYAVSVLSGNRNFEGRISPLVKANYLASPPLVVAYAIAGSMNVDLYKDPLGKSKNGENIYFKDIWPTNKEIEETLKNSLNAEMFTKRYSDVTKGPIQWQNIKTKKSSVYNWEDNSTYVKKPPFFDNLSDEPEGFKKIKDARPLLILGDSVTTDHISPAGTIQKESPTGEYFMKHQILPKDYNSYGSRRGNHEVMMRGTFANIRIKNEMAPGTEGGYTKLYPEGKVMPVFEAVEEYKKRGTDLVVFGGKEYGTGSSRDWAAKGTKLLGIKVVIAESFERIHRSNLIGMGILPLQFNDGTDRLNLKLKGSELISINNIEKGFFPQDQVELEIKYLSGEIKKIKTLCRIDTNNELEYYKNGGILQYVLRKMI

SEQ ID NO: 178662 - protein, 795 aa, Unknown
  Bacterial polypetide isolated from the Sargasso Sea
MKPGNQNSFKCLKEISVNGKNYSYYSLKEAEENGLEGINKLPKSIKVLLENLLRYEDNVTVNKDQILAIKEWLNSKKSKTEIAYRPARVLLQDYTGIPAVADLAAMRDTVKEKNKDPNTINPLSSVDLVIDHSVQVDKFATKNSLKENVDIEFDRNFERYSFLKWGQQAFNNFRIVPPGTGICHQVNLEYLSKVVWNEKFEDKEYLFPDTLVGTDSHTTMVNGLSVLGWGVGGIEAEAGMLGQPISMLIPEVIGFEMKNKLPEGTTATDLVLTVVKMLRDKGVVGKFVEFYGEGLKNLTLADRATIANMAPEYGATCGFFPIDEETLKYLEFSGRSKENIQIVEKYAKEQNLWASEDVVFTDTLSLDMSTVVPTISGPKRPQDKVLLTEASKNFIKVFEEVCKKTDPTVAKVKDTDFEIKDGDILIAAITSCTNTSNPNVLIGAGLLAKNAIEKGLNVKPWVKTSLAPGSQVVTDYLDKAGLSKYLDELGFNLVGYGCTTCIGNSGPLPDNITDAVKENNLYAVSVLSGNRNFEGRISPLVKANYLASPPLVVAYAIAGSMRMDLYKDPLGKDSKGQDVYLKDIWPSNKEIEDTLKQSLNPEMFVNRYSNVSEGPEQWQKIKVDKGSIYNWEENSTYVKKPPFFENLPDEPEGFKEIKDARPLLILGDMVTTDHISPAGSIQKESPTGNYFMKHQILPKDYNSYGARRGNHEVMMRGTFANIRIKNEMAPGTEGGFTKLYPEEKVMPIYDAVVEYKKRGTDLVVFGGKEYGTGSSRDWAAKGTKLLGIKAVRQKV

SEQ ID NO: 178663 - protein, 431 aa, Unknown
  Bacterial polypetide isolated from the Sargasso Sea
MKINSKDSFKSLKKLKVDNKNYNIFSLKEAEKNGLEGISRLPKSIKVLLENLLRFEDSKSVKKEQILSIQSWLEKKNSKTEIAFRPARVLMQDYTGIPAIADLAAMRDAVKLKKKDPKKINPLSTVDLVIDHSVMVDTYASKDSFKKNVEKEFIRNGERYSFLKWGQQAFNNFRVVPPGTGICHQVNLEYLSKVVWSSDNFAYPDTLVGTDSHTTMVNGLSVLGWGVGGIEAEAAMLGQPISMLIPEVVGFKVQNKLTEGTTATDLVLTIVQILRQEGVVGKFVEFYGDGLKNLSLADRATIANMAPEYGATCGFFPIDEETLKYLKFTGRDQHTISLVEKYSKEQGLWADENISFTKVLNLDLSKVVPSISGPKRPQDKVLLSESSKSFMKSFKKDMNRENIKEEIVSGENFKLKDGNIVIAANYINVPT

SEQ ID NO: 178664 - protein, 574 aa, Unknown
  Bacterial polypetide isolated from the Sargasso Sea
MKPGNKNSFKSLTTTKINNNEYYYYSLKLAEKNGLDGISKLPKSLKVLLENLLRYEDDETVTKSQILALQSWLKNKKSDTEIAYRPARVLLQDYTGIPAVADLAAMREAVKEKNKDPNKINPLSSVDLVIDHSVQVDKYSTLNSLKENVEIEFQRNAERYSFLKWGQQAFNNFRIVPPGTGICHQVNLEYLSKVVWMEKFNSKNYIFPDTLVGTDSHTTMVNGLSVLGWGVGGIEAEAGMLGQPISMLIPEVVGFEVKNKLPEGTTATDLVLTVVKMLRDKGVVGKFVEFYGEGLKNLTLADRATIANMAPEYGATCGFFPIDEETLKYLEFSGRDKNQVEIVKKYAIEQGLWASSNIEFSDTLSLDMSTVVPTISGPKRPQDKVLLTDAAQNFEENFQKNTNRKDFLKVKVNNADFEIQDGSILIAAITSCTNTSNPNVLIGAGLLAKKACELGLNSKPWVKTSLAPGSQVVTDYLERAGLNTYLDKLGFNLVGYGCTTCIGNSGPLAENISESVSKNNLYAVSVLSGNRNFEGRISPLVKANYLASPPLVVAYAIAGNMQIDLYKDPLGKTP

SEQ ID NO: 178665 - protein, 692 aa, Unknown
  Bacterial polypetide isolated from the Sargasso Sea
EKVEKNNYIFPDTLVGTDSHTTMVNGLSVLGWGVGGIEAEAGMLGQPISMLIPEVIGFEMINRLPEGTTATDLVLTVVKMLRDKGVVGKFVEFYGDGLKNLTLADRATIANMAPEYGATCGFFPVDEETLKYLKFSGRDKHTVDIVENYAKDQGLWASNDIIFTDKLSLDMLTVVPTISGPKRPQDKVLLTDASQNFKNVFKQITKKTKISSSKVENEEFEIKDGDILIAAITSCTNTSNPNVLIGAGLIAKKAVEKGLKTQPWVKTSLAPGSQVVTDYLEKAGLNKYLDDLGFNLVGYGCTTCIGNSGPLKENISEAIKKENIYAVSVLSGNRNFEGRISPLVKANYLASPPLVVAYALAGTMSIDLYKDPLGKDNDGKDVYLKDIWPSNKEIGDILKNSLNADMFIKRYSNISEGPEQWQKIKTEPTSIYNWEETSTYVKKPPFFENLPDIPEDIKDINEARPLLILGDMITTDHISPAGTIQKESPTGEYFMQHQVLTKDYNSYGARRGNHEVMKRGTFANIRIRNEITPETEGGFTKLYPEEKVMPVYDAVVEYKKRGTDLIVIAGKEYGTGSSRDWAAKGTKLLGIKAVLAESFERIHRSNLIGMGVLPLQFIDGMNRNNLNLKGSELISIINIEKGLNPSDHVEVQIKYQLGELKKIKMLCRIDTKNELEYYKNGGILQYVLRKMI

SEQ ID NO: 178666 - protein, 626 aa, Unknown
  Bacterial polypetide isolated from the Sargasso Sea
ASDLVLTIVQMLRKKGVVGKFVEFFGSGLKNLSLADRATIANMAPEYGATCGFFPTDDETIKYLKFSGRDENTIALVEKYSKVQGLWADQNEKIEFTDTISLDLNSVVPSISGPKRPQDKVLLTSASKDFDKAFKENTKRKVPLEAKVKNKDFKIKDGDIVIGAITSCTNTSNPSVMIGAGLLAKKAVEKGLKVKPWVKTSLAPGSQVVTDYLEKAGLNKFLDQLGFNLVGYGCTTCIGNSGPLDKEISDTIHKENLYAVSVLSGNRNFEGRINPDVKANYLASPPLVVAYALAGNMHHDLYKEPLGKDKSGKDVFLKDIWPSNKEIEELILKSINADMFVKRYSNVSEGPKEWSSIKTNQSSIYNWEDNSTYVKRPPFFDNLSDKPEGFKKIKDARPLLLLGDTVTTDHISPAGSIKKDSPTGDYFMEHQVQQKDFNSYGARRGNHEVMLRGTFGNIRIRNEMAPGTEGGFTVLQPDGKQMSVYDAAMEYKKRGNSLVVIAGKEYGTGSSRDWAAKGTKLLGVKAVIAESFERIHRSNLVGMGILPLQFKEGFDRKKLNIKGTELFTIIDIEKGINPRAEVSCEIKYADGSSKTIKLLSRIDTENEIEYYKNGGILQYVLRNMLN

SEQ ID NO: 178667 - protein, 421 aa, Unknown
  Bacterial polypetide isolated from the Sargasso Sea
MKPGNKNSFKSLKSIKINNKDYKYFSLVEAEKNGLKGISNLPKSLKVLLENLLRYEDDLSVSKDQIEAVQKWLKEKKSNTEIAYRPARVLLQDYTGIPAVADLAAMREAVKEKNKDPNTINPLSTVDLVIDHSVQVDQSAKPDSFEKNVDIEFKRNGERYSFLKWGQQAFNNFRIVPPGTGICHQVNLEYLSKVVWSEKYKEDEYLFPDTLVGTDSHTTMVNGLSVLGWGVGGIEAEAGMLGQPISMLIPEVIGFEVKNKMPEGTTATDLVLTVVKILRDKGVVGKFVEFYGDGLKNLTLADRATIANMAPEYGATCGFFPIDDETLKYLRFSGRNEHAVSIVEKYAKEQGLWVSQNIEFTDKVSLDMSTIVPTISGPKRPQDKVLLNEASSEFKKVFKNTTERKKKHISKVNRTDFEIKD

SEQ ID NO: 178668 - protein, 511 aa, Unknown
  Bacterial polypetide isolated from the Sargasso Sea
MEFKSKNSFQSLDTLTVSGKKYNFFNLVKAEKNGLKNIKKLPKSIKVLLENLLRFEDDLTVNKKQIKAIADWLNTKSSKQEIAYRPARILLQDYTGIPAVADLAAMRDAVKSKNKDPNKINPLSTVDLVIDHSVMVDNYAKKDSFSKNVQREFDRNGERYSFLKWGQSAFNNFRVVPPGTGICHQVNLEYLSKVVWSSEANGQLFAYPDTLVGTDSHTTMVNGLSVLGWGVGGIEAEAAMLGQPISMLIPEVIGFEINGKLTEGTTASDLVLTIVQMLRKKGVVGKFVEFFGDGLKNLSLADRATIANMAPEYGATCGFFPIDDETIKYLKFSGRDQNTISLVEKYSKEQGLWSNQNDQIEFTDTISLDLNSVVPSISGPKRPQDKVLLTNAAKDFDKAFKENTKRKVPLEAKVNNKEFKIKDGDIVIGAITSCTNTSNPSVMIGAGLVAKKAVEKGLKVKPWVKTSLAPGSQVVTDYLEKAGLNKYLDQLGFNLSWLRLYYLYWKLWALR

SEQ ID NO: 178669 - protein, 512 aa, Unknown
  Bacterial polypetide isolated from the Sargasso Sea
YGDGLKNLTLADRATIANMAPEYGATCGFFPIDNETLKYLRFSGREENAVHIVEKYAKEQGLWESDNIQFTDKVSLDMSSIVPTISGPKRPQDKVLLNQASSEFKKVFENVTERKEKHISKVNGTDFEIKDGSILIAAITSCTNTSNPNVLIGAGLLAKKAVELGLKTKPWVKTSLAPGSQVVTDYLEKAGLNKYLDELGFNLVGYGCTTCIGNSGPLPDNIIKAIEKENIYAVSVLSGNRNFEGRISPHIKANYLASPPLVVAYALAGHMELDLYKDPLGKDKNAKNIFLKDIWPSNKEIDDTLSEALNAKMFVKRYSNVSEGPVQWQKIKTEKSSIYNWDKGSTYVKRPPFFDNLSDEPEGFKQIKDARPLLILGDMVTTDHISPAGSIQKESPTGEYFMKHQILPKDYNSYGSRRGNHEVMMRGTFANIRIRNEIAPGTEGGFTKLFPEGKVMPIYDAVVEYKKRGTDLVVIGGKEYGTGSSRDWAAKGTKLLGIKAVIAESFERFIDQ

SEQ ID NO: 178670 - protein, 387 aa, Unknown
  Bacterial polypetide isolated from the Sargasso Sea
AVKEKNKDPSTINPLSSVDLVIDHSVQVDKFANKNSLKENVDIEFNRNAERYSFLKWGQQAFNNFRIVPPGTGICHQVNLEYLSKVVWNEKYKGEEYIFPDTLVGTDSHTTMVNGLSVLGWGVGGIEAEAGMLGQPISMLIPEVIGFEMKSKMPEGTTATDLVLTVVKMLRDKGVVGKFVEFYGEGLKNLTLADRATIANMAPEYGATCGFFPIDDETLKYLKFSGRDDQNVEIVKQYAQEQGLWASLDVEFTDTLSLDMSTIVPTISGPKRPQDKVLLTNASSNFKKVFSEVTKKEEPNIYNVEKEEFKITDGDVLIAAITSCTNTSNPSVLIGAGLLAKNAIEKGLMTKPWVKTSLAPGSQVVTDYLEKAGLNIYLDKLGFNLVG

SEQ ID NO: 178671 - protein, 401 aa, Unknown
  Bacterial polypetide isolated from the Sargasso Sea
MNFKSKNSFQSLDKLEVSGKSYYFYNLSKAEKNGLKDINKLPKSIKVLLENLLRFEDNVTVDRKQIESIAGWLKTKSSKMEIAYRPARILLQDYTGIPAVADLAAMRDAVKSKNKDPKKINPLSAVDLVIDHSVQVDNYANKDSFTKNVKKEFDRNGERYSFLKWGQNAFNNFRVVPPGTGICHQVNLEYLSKVVWSTDIDGKTFAYPDTLVGTDSHTTMVNGLSVLGWGVGGIEAEAAMLGQPISMLIPEVIGFEIKGKLSEGTTASDLVLTIVQILRKKGVVGKFVEFYGEGLKNLSLADRATIANMAPEYGATCGFFPVDEETIKYLKFSGRDEKTISLVETYSKKQGLWTSDEIEFTDKVSLNLNSVVPSISGPKRPQDKVLLTEAAKNFDKAFKEI

SEQ ID NO: 178672 - protein, 408 aa, Unknown
  Bacterial polypetide isolated from the Sargasso Sea
KFSGRDQHTISLVEKYSKEQGLWVDENISFTKVLDLDLSKVVPSISGPKRPQDKVLLSESSKSFMTSFKKNMNRENIKEETVPGENFQLKDGNIVIAAITSCTNTSNPNVLIGAGLLAKKAVEKGLKVKPWVKTSLAPGSQVVTDYLEKAGLNKYLDELGFHLVGYGCTTCIGNSGPLKENISQAIQKGNLYAVSVLSGNRNFEGRINPDVKANYLASPPLVVAYALAGSMNFDLYNDPLGKDKKGKNIFLKDIWPSNKEIEELILTSINAEMFSRRYSKVSEGSEDWKKIKTTESSIYNWNDSSTYVKKPPFFEKMSDNPEGFKKIADARPLVILGDMITTDHISPAGSIKKDSPTGDYFMKHQVQQKDFNSYGARRGNHEVMVRGAFGNIRIRNEKNPGTEGGYTK

SEQ ID NO: 178673 - protein, 329 aa, Unknown
  Bacterial polypetide isolated from the Sargasso Sea
GSVYTNLTKDPLGIDTNGNEVFLKDIWPSNKEIRDAVEKNVSPEMFKKQYSNALDGPKEWQGINTSTGDLFKWDSSSTYVQQPPFFTGQSDDKEIIPIENARPLLLLGNSVTTDHISPAGAIKAESPAGGYFMERQIRQNDFNSYGARRGNHEVMVRGTFANIRIKNQLLSNVEGGYSILEPEKKKMSVYEVAMEYAKRSENVVVFAGQEYGTGSSRDWAAKGTKLLGIKAVIAESFERIHRSNLVGMGVLPIQLNSHKLDVLNIKSSDLVDIKLDNEIKPLQDLEVSIKSDEGIKVLECTLRIDTINELQYYKADGILNFVLKNILKN

SEQ ID NO: 178674 - protein, 441 aa, Unknown
  Bacterial polypetide isolated from the Sargasso Sea
IEAEAGMLGQPISMLIPEVIGFELKNKLPEGTTATDLVLTVVKILRDKGVVGKFVEFYGSGLKNLSLADRATIANMAPEYGATCGFFPIDDETLKYLKFSGRDNQTVKIVESYAKEQGLWASGNIEFTDVVKLDMSTVVPTISGPKRPQDKVLLTNAKVSFEENFKEITKRSTKKISEVNGEDFKLMDGSIVIAAITSCTNTSNPNVLIGAGLLAKKAIDKGLKAKPWVKTSLAPGSQVVTDYLNKSGLNKYLDELGFNLVGYGCTTCIGNSGPLPENISNSIKENDIYAVSVLSGNRNFEGRISPLVKANYLASPPLVVAYSLVGYMHFDLYNDPIGKDKEGKEIFLRDIWPSNKEIEEVLLASLNPTMFRERYSNISKGPEQWQQIKTKESSIYDWDDNSTYVKKPPFFENLSQNPEGFKPIKDARPLLILGDSVTTDH

SEQ ID NO: 178675 - protein, 346 aa, Unknown
  Bacterial polypetide isolated from the Sargasso Sea
NYLASPPLVVAYALAGHMEFDLYKDSFGKDQNGKDIYLKDIWPSNKEIEDTLKQSLNAEMFIKRYSNVAEGPKQWQDIKSEKSSIYKWDSGSTYVKKPPFFDNLPDEPEGFKPIKEARPLLILGDMITTDHISPAGSIQKDSPTGDYFMEHQILPQDYNSYGARRGNHEVMMRGTFANIRIRNEMAPGTEGGFTKLYPDNKIVPVYDAVVEYKKRGTDLVVIGGKEYGTGSSRDWAAKGTKLLGITLVIAESFERIHRSNLIGMGVLPLQFIDSMDRKSLQLTGSELISVLNLEEGINPSDQVDVEIKYISGEIKKIKALCRIDTKNELEYYKNGGILQYVLRNMI

SEQ ID NO: 178676 - protein, 496 aa, Unknown
  Bacterial polypetide isolated from the Sargasso Sea
FKKVLEEATDKKEKSAAKVLNSDFEIKDGSILIAAITSCTNTSNPNVLIGAGLLAKKAVEFGLEVKPWVKTSLAPGSQVVTDYLAKSGLNTYLDKLGFNLVGYGCTTCIGNSGPLADNIVQAIQKENIYAVSVLSGNRNFEGRISPHIKGNYLASPPLVVAYALAGHMEFDLYKDSLGKDKDGNDIYLKDIWPSNDEIENTLKQSLNAEMFINRYSNVSEGPSQWQKIKTDHSSIYNWDKGSTYVKKPPFFDSLPDEPEGFKEIKDARPLLILGDMVTTDHISPAGSIQKDSPAGEYFMKHQILPKDYNSYGSRRGNHEVMMRGTFANIRIRNEMAPGTEGGFTKLYPEGKVLSVYDAVEEYKKRGTDLIVIGGKEYGTGSSRDWAAKGTKLLGVKAVLAESFERIHRSNLIGMGVLPLQFINEVNRKNLNLIGSELISIIDIEKGINPSDEVMVEIKYASGEMKKVKTLCRIDTKNELEYYKNGGILQYVLRNMI

SEQ ID NO: 178677 - protein, 790 aa, Unknown
  Bacterial polypetide isolated from the Sargasso Sea
KEKTYKYYDLKSLDSEKVDRLPFTHKILLENALRHAENDHEGPKDVETILNWNPKSDQSTEISFTPSRVILQDFTGVPAVVDLATMRDAVVSMQGDPKDINPLSPAELVIDHSVQVDHFGSLDALEKNNKVEFQRNQERYRFLRWGQDAFSNFEVVPPNTGIVHQVNLEYLGRVVFSKDDSLAYPDTLVGTDSHTTMINGIGCLGWGVGGIEAEAAMLGQPITMLLPEVIGVSVKGSLKEGVTATDLVLTLTEILRNYGVVGKFVEFFGDGLDHLPVSDRATLSNMAPEFGSTCAIFPIDAATIRYLKLSGRHEEQVELVETYSKIQGLWRESDSEITYTDVIELDLSEIEPCLSGPKRPQDRIKLKDVASVVKSEIGDEPSSLDQISSGSVLIAAITSCTNTSNPTVMVAAGLVAKKANALGLKSKEWVKTSLAPGSKVVTKYLEKSGLLPELETMGFNIVGYGCTTCIGNSGPLDPAVAKIVQENNISASSVLSGNRNFEGRIHPLVKHNFLASPPLVVAYAIAGSTMLDLTNEPLGNVEGKDIFLKDIWPSQNEIEKIIEETIDPVMFSKAYEDSIQGDDAWKNLETPQGEIYEWQENSTYIKKPPYFESMTMDIPGIKTIKNARALALLGDSVTTDHISPAGNIDPESPAGRYLKDNGVERKDFNSYGSRRGNHEVMMRGTFANIRLRNKLAPGTEGGWTKLSENEESISIFEAAEEFRSNDTDLIVLAGKEYGTGSSRDWAAKGVSLLGVKAVIAESYERIHRSNLIGMGVLPLEFNNGESAESI

SEQ ID NO: 178678 - protein, 340 aa, Unknown
  Bacterial polypetide isolated from the Sargasso Sea
MKPGNKNSYKSLKTINISEKNYKYYSLVEAEKNGLKDISKLPKSLKVLLENLLRYEDDLSVTKKQIEAVKNWINEKKSTTEIAYRPARVLLQDYTGIPAVADLAAMREAVKEKNKDPNTINPLSSVDLVIDHSVQVDQSAKSDSFEKNVDIEFKRNGERYSFLKWGQQAFNNFRIVPPGTGICHQVNLEYLSKVVWSEKYKNDEYLFPDTLVGTDSHTTMVNGLSVLGWGVGGIEAEAGMLGQPISMLIPEVIGFEFKNKMPEGTTATDLVLTVVKILRDKGVVGKFVEFYGDGLKNLTLADRATIANMAPEYGATCGFFPIDDETLKYLRFSGRDEHSV

SEQ ID NO: 178679 - protein, 883 aa, Unknown
  Bacterial polypetide isolated from the Sargasso Sea
MKPGTKNSYNSLTDIKINNKDFKIFSLSKAEINGLDGISKLPKSLKVLLENLLRYEDDLSVTKNQIEAIKNWLKEKKSKTEIAYRPARVLLQDYTGIPAVADLAAMREAVKDKNKDPNTINPLSAVDLVIDHSVQVDQSAKADSFDKNVEIEFNRNGERYSFLKWGQQAFNNFRIVPPGTGICHQVNLEYLSKVVWSAEHEGQNYLFPDTLVGTDSHTTMVNGLSVLGWGVGGIEAEAGMLGQPISMLIPEVIGFEVKNKMPEGTTATDLVLTVVKMLRDKGVVGKFVEFYGDGLKNLTLADRATIANMAPEYGATCGFFPIDDETLKYLKFSGRDQSTVKIVEEYAKAQGLWASDDIEFTDTLTLDMSTIVPTISGPKRPQDKVLLTDASTSFKKSFKEITNKKDFSIAKVPNTDFEIKDGSILIAAITSCTNTSNPNVLIGAGLLAKKAVELGLDVKPWVKTSLAPGSQVVTDYLAKAGLNIYLDKLGFNLVGYGCTTCIGNSGPLADNIVEAIQKEDIYGVSVLSGNRNFEGRISPHIKANYLASPPLVVAYALAGHMEFDLYKDSFGKDKNGNDIFMKDIWPTNKEIEETLKSSLNAEMFVKRYSNVSEGPKQWQEIKTEKTSIYNWEENSTYVKKPPFFDNLPDEPEGFQEIKDARPLLILGDMVTTDHISPAGNIQKESPTGEYFMKHQILPKDYNSYGSRRGNHEVMMRGTFANIRIRNEMAPGTEGGFTKLYPEDKVMPIYDAVVEYKKRGTDLVVIGGKEYGTGSSRDWAAKGTKLLGVKTVIAESFERIHRSNLIGMGILPLQFIDDIDRKKLNLIGSELISVMEIENGINPSDKIKVEIKYASGEIKKIQTLCRIDTKNELEYYKNGGIFAY

SEQ ID NO: 178680 - protein, 785 aa, Unknown
  Bacterial polypetide isolated from the Sargasso Sea
MKPGKQNSFNCLKELSVNGKNYSYFSLKEAEKNGLEGINKLPKSIKVLLENLLRYEDNVTVNKEQILAIKEWLNSKKSKTEIAYRPARVLLQDYTGIPAVADLAAMRDTVKEKNKDPNTINPLSSVDLVIDHSVQVDKFATKNSLKENVDIEFDRNFERYSFLKWGQQAFNNFRIVPPGTGICHQVNLEYLSKVVWNEKFEDKEYLFPDTLVGTDSHTTMVNGLSVLGWGVGGIEAEAGMLGQPISMLIPEVIGFEMKNKLPEGTTATDLVLTVVKMLRDKGVVGKFVEFYGEGLKNLTLADRATIANMAPEYGATCGFFPIDDETLKYLEFSGRSKENIQIVEKYAKEQNLWASEDVVFTDTLSLDMSTVVPTISGPKRPQDKVLLTEASKNFIKVFEDICKKTDPTVAKVKDTDFEIKDGDILIAAITSCTNTSNPNVLIGAGLLAKNAIEKGLTVKPWVKTSLAPGSQVVTDYLDKAGLSKYLDELGFNLVGYGCTTCIGNSGPLPENITDAVKENNLYAVSVLSGNRNFEGRISPLVKANYLASPPLVVAYAIAGSMRMDLYKDPLGKDNKGQDVYLKDIWPSNKEIEDTLKQSLNPEMFVNRYSNVSEGPEQWQKIKVDKGSIYNWEENSTYVKKPPFFENLPDEPEGFKEIKDARPLLILGDMVTTDHISPAGSIQKESPTGNYFMKHQILPKDYNSYGARRGNHEVMMRGTFANIRIKNEMAPGTEGGFTKLYPEEKVMPIYDAVVEYKKRGTDLVVFGGKEYGTGSSRDWAAKEQNY

SEQ ID NO: 178681 - protein, 547 aa, Unknown
  Bacterial polypetide isolated from the Sargasso Sea
VEKYAKEQGLWASDEIEFTDKISLDMSTVVPTISGPKRPQDKVLLTDASSNFKKVFKEATDKNDYKISKVKDTDYEIKDGSILIAAITSCTNTSNPNVLIGAGLLAKKAVELGLNVKPWVKTSLAPGSQVVTDYLEKAGLNTYLDQLGFNLVGYGCTTCIGNSGPLAENIVDAIQKENLYAVSVLSGNRNFEGRISPHIKANYLASPPLVVAYALAGHMEFDLIKDSFGKGKNGKDIFLKDIWPSNKEIEDTLKISLNADMFVKRYSNVSEGPKQWQEIKTEKSSIYNWDENSTYVKKPPFFENLSDDPEGFKEIKNARPLLILGDMVTTDHISPAGNIQKDSPTGEYFMNYQILPKDYNSYGSRRGNHEVMMRGTFANIRIKNEMAPGTEGGFTKLYPEEEVMSVYDAVVEYKKRGTDLVVIGGKEYGTGSSRDWAAKGTKLLGVKVVIAESFERIHRSNLIGMGILPLQFTENMNRKNLNLLGSELISVVDIEKGINPSDKVKVEIKYASGDVKIIDTLCRIDTKNELEYYKNGGILQYVLRNMI

SEQ ID NO: 178682 - protein, 342 aa, Unknown
  Bacterial polypetide isolated from the Sargasso Sea
MASPPLVVAYALAGNMNVDITKEPLGQASDGSPVYLKDIWPTEDEIQQYIAENVTGDLFKEKYADVFKGSGEWNELQVSKTSVYDWPESTYIKHPPFFEVMGKEPEALTAIENARCLVKVGDSITTDHISPAGAIAEDSPAGEYLQAQGVEPKDFNSYGSRRGNHEVMMRGTFANVRLQNQLAPGTRGSATTHFPSGDSMSIFHAAMRYKDDGVPAIVIGGKEYGTGSSRDWAAKGPSLMGVKAVLAESYERIHRSNLIGMGILPLQFKSGDSASSLELKGNESFSINAVERGQTEVEVKAVSDEGKTTTFMMDIRIDTSNEFTYFENGGILHYVIREYLKK

SEQ ID NO: 178683 - protein, 602 aa, Unknown
  Bacterial polypetide isolated from the Sargasso Sea
SPNALKNNMDIEFKRNRERYEFLKWGKQAFDNFNVYPPGVGIVHQVNLETVASVVQFRNGIFFPDTLVGTDSHTTMINGLGVMGWGVGGIEAESVMLGQPIYMLIPEVIGFRLHGQLSEGTTATDLVLHVVEMLRQKGVVEKFVEFFGPGINNLKLADRATLSNMAPEYGATMGFFPVDEETLTYLRGTGRPESLVQRVERYCKKQGLFRTNETPDPEFSDTLELDLSTIEPSLAGPKRPQDRVKLSLMKPMWKKALCSNRSDGGFELSADKLKTVIPLEGDSSEKLTHGSVVIAAITSCTNTSNPSVMLAAGLLAKKAVEKGLKRKPWVKTSLGPGSRVVSDYLKASLLEESLDELGFHTVGFGCTTCIGNSGPLPEKIIDAINEGDLIVASVLSGNRNFEGRINQHVKANYLASPPLVVAYAIAGNVNHDFKNDPLGIGENNQQVFLRDIWPSNEEIKEAEKFISREMYLKEYENADQSSPMWNAIETPAGEVFQWNKFSTYIQNPPFFKNMVLDTTPVKDITGARVLAKLGDSVTTDHISPAGAFSPDSPAGKYLLERGTQTNDFNSYGSRRGNDRVMTRGTCANIRLRNELVPENEGG

SEQ ID NO: 178684 - protein, 431 aa, Unknown
  Bacterial polypetide isolated from the Sargasso Sea
KPWVKTSLAPGSQVVTDYLEKAGLNIYLDKLGFNLVGYGCTTCIGNSGPLSENIVSAIEKENIYAVSVLSGNRNFEGRISPQIKANYLASPPLVVAYALAGHMEFDLYKDPLGKDKKGKEIYLKDIWPSNKEIEDVLRKALDAKMFIKRYSDISKGPIQWQKIKTEKSSIYNWDQGSTYVKKPPFFDNISDEPEGFKKIKDARPLLILGDMVTTDHISPAGSIQKESPAGEYFMKHQILPKDYNSYGSRRGNHEVMMRGTFGNIRIRNEIAPGTEGGFTKLFPEGKVLSVYDAVVEYKKRGTDLVVIGGKEYGTGSSRDWAAKGTKLLGVKAVIAESFERIHRSNLVGMGILPLQFLDKMNRINLKLIGSELISIINLEKGISYSDKVDIEIKYESGDIKKIKTLCRIDTKNELEYYKNGGILQYVLRNMV

SEQ ID NO: 178685 - protein, 486 aa, Unknown
  Bacterial polypetide isolated from the Sargasso Sea
FSRTNLFEKEVKNHNYKMQDGNVVIAAITSCTNTSNPDVLVAAGLVAKKACELGLQVKPWVKTSLAPGSKVVTDYLDKSGLNKYLDQLGFHLVGYGCTTCIGNSGPLDEDIAECIAKNDLTVASVLSGNRNFEGRVNPHVKANYLASPPLVVAYALAGSVYTNLTKDPLGIDTNGNKVFLKDIWPSNNEIRDAVEKNVSPEMFKNQYSNALDGPKEWQEIDTSTGDLFKWNSSSTYVQQPPFFTGQSDDKEIIPIENARPLLLLGNSVTTDHISPAGAIKEESPAGSYFMERQIRQNDFNSYGARRGNHEVMVRGTFANIRIKNKLLSNVEGGYSILEPEKKKMSVYEVAMEYAKRSENIVVFAGQEYGTGSSRDWAAKGTKLLGIKAVIAESFERIHRSNLVGMGVLPIQLNSHKLNDLNIKSSDLVDVRLDNEIKPLQDLEVSIKSDENVKVLECTLRIDTVNELQYYKADGILNFVLKNILKN

SEQ ID NO: 178686 - protein, 641 aa, Unknown
  Bacterial polypetide isolated from the Sargasso Sea
IVHQVNLEYLGRVVFSKDDSLAYPDTLVGTDSHTTMINGIGCLGWGVGGIEAEAAMLGQPITMLLPEVIGVSVKGSLKEGVTATDLVLTLTEILRNYGVVGKFVEFFGDGLDHLPVSDRATLSNMAPEFGSTCAIFPIDAATIRYLKLSGRHEEQVELVETYSKIQGLWRESDSKITYTDVIELDLSEIEPCLSGPKRPQDRIKLKDVASVVKSEIGDESSSLDEISSGSVLIAAITSCTNTSNPTVMVAAGLVAKKANALGLKSKEWVKTSLAPGSKVVTKYLEKSGLLPELETMGFNIVGYGCTTCIGNSGPLDPAVAKRVQENNISASSVLSGNRNFEGRIHPLVKHNFLASPPLVVAYAIAGSTMLDLTNEPLGNVEGKDIFLKDIWPSQNEIEKIIEETIDPVMFSKAYEDSIQGDDAWKNLETPQGEIYEWQENSTYIKKPPYFESMSMDIPGIKTIQNARALALLGDSVTTDHISPAGNIDPESPAGRYLKDNGVERKDFNSYGSRRGNHEVMMRGTFANIRLRNKLAPGTEGGWTKLSENEEPISIFEAAEEFRSSDTDLIVLAGKEYGTGSSRDWAAKGVSLLGVKAVIAESYERIHRSNLIGMGVLPLEFNNGESAESIGLNGFESFDIDS

SEQ ID NO: 178687 - protein, 282 aa, Unknown
  Bacterial polypetide isolated from the Sargasso Sea
FYRKIILIFFRETNSGEKLNVKKSSTYDWSLTSTYIKKPPFLDFEKNELLKDIKARPLLILGDSITTDHISPAGVIKEDSSAGKYLRDRQIKVDDFNSYGARRGNHEVMTRGTFANIRIKNKMVSKFGGYTKHFKSDKENEIYEVAKKYQKEDIPLVVLAGKEYGTGSSRDWAAKGTKLLGVKVVIAESFERIHRSNLVGMGVLPLQINGYHLKKNQFHGKEIFNIGKLRDYLLKPNIEKKLEVKKHNGEKFYLDVISRIDTEKEIRYFESNGILPYVLNNI

SEQ ID NO: 178688 - protein, 341 aa, Unknown
  Bacterial polypetide isolated from the Sargasso Sea
VVLYALAGTVNIDFSNDPIGNDKEGKAVYLEDLWPSSKEIEDTINKSLTSEMFIDEYESVFQGPEEWVKLSSSKGNKFNWEKQSTYIQKPPYFDDFNLQPSKKNEVNQARCLVKLSNSVTTDHISPAGSIPQSAPSGQMLISSDVPRFEFNSYGSRRGNHNVMVRGTFGNIRLRNQIVEEEGDWTVYFPTGEKMRIFEASEKYLQSETPLIVLAGKEYGTGSSRDWAAKGPALLGVKVVIAESFERIHRSNLVGMGVIPLQFLEGENSDSLNLNGSEIYDFEGLEKTIVPNSKIKVNVTRENGEKFSFYTMIRIDTEIEAEYYYNGGLLPYVLRKMVKESS

SEQ ID NO: 178689 - protein, 406 aa, Unknown
  Bacterial polypetide isolated from the Sargasso Sea
YLDELGFNLVGYGCTTCIGNSGPLNKNISDAIHKENLYVVSVLSGNRNFEGRISPDVKANYLASPPLVVAFALAGNMNFDIYKASLGKDKEGKEVFLKDIWPSNKEIEDIMLKSINANMFIDRYSNVSKGPKEWSDIKTVDSSIYNWEDNSTYVKKPPFFNNLSDKPEGFKPIKDARILLLLADSVTTDHISPAGNIKKDSPTGDYFMKKQVQQKDFNSYGARRGNHEVMMRGTFGNIKIRNEMAPGTEGGFTTLQPDGKVMSVYDAAIEYKKRGNHLVVMAGKEYGTGSSRDWAAKGTKLLGIKAVIAESFERIHRSNLIGMGVLPLQFKKGFDRKKLKISGSELITIIDIDKGIKPRDEVSCEIKYKDGTIKIIKLLCRIDTQNEVEYYKNGGILQYVLRNMLN

SEQ ID NO: 178690 - protein, 278 aa, Unknown
  Bacterial polypetide isolated from the Sargasso Sea
MTYKSFSQLEVNGKNFKAVNFDGIGSKYALDRLPFCIKILLENLIRHEDQEFVNSNDIEQVAKWDTDNHVDHEVSFVPARVILQDFTGVPAIVDLAAMRDAVNRLGGDAQAINPLNPVELVIDHSVMVDHFAEDDALEKNTDIEIQRNRERYQFLKWGQSSFDNFKVVPPGRGIVHQVNLEYLARCAFTKEQDGETLVYPDTLVGTDSHTTMINGLGVLGWGVGGIEAEAAMLGQPVTMLLPKVVGFRLSGKLPAGVTATDMVLTITQQLREHGVVGK

SEQ ID NO: 178691 - protein, 354 aa, Unknown
  Bacterial polypetide isolated from the Sargasso Sea
RISPHIKANYLASPPLVVAYALAGHMEVDLYKDSLGKNKDGKDIYLKDIWPSNKEIEETLNKSLNPNMFIKRYSNVSLGPAQWQKIKTDKTSIYNWDESSTYVKRPPFFDALSDKPEGFKEIKDARPLLILGDMVTTDHISPAGSIQKNSPTGEYFMKHQVLPKDYNSYGSRRGNHEVMMRGTFANIRIRNEMAPGTEGGFTKLYPEGKVMPIYDAVVEYKKRETDLIVIGGKEYGTGSSRDWAAKGTKLLGIKAVIAESFERIHRSNLIGMGILPLQFMEGVDRKKLKLTGSELISVLKIENGINPSDKIEIEIKYQSGDIKKIKTLCRIDTQNELEYYKNGGILQFVLRNMM

SEQ ID NO: 178692 - protein, 655 aa, Unknown
  Bacterial polypetide isolated from the Sargasso Sea
EAAMLGQPISMLIPEVIGVELKGKLKEGTTATDLVLIIVEMLRKKGVVGKFVEFYGEGLKNLTLADRATIANMAPEYGATCGFFPVDDETLKYLKLSGRDQETIALVENYSKAQGLWASNDVVFTDTLSLDVSSVVTSISGPKRPQDKVLLTEASTAFAKVYRENAKRDKAIEAKVEGTDFNIKDGDIVIAAITSCTNTSNPSVMLGAGLLAKKAHEKGLKVKPWVKTSLAPGSQVVTDYLEKAGLNKYLDELGFNLVGYGCTTCIGNSGPLNQNISDAINKNDLYAVSVLSGNRNFEGRINPDVKANYLASPPLVVAYALAGNMNFDMYKSPLGKDKNGKDVFLKDIWPSNKEIEDLMLNSLNADMFKKRYSNVSKGPKEWQAINTTDSDIYNWEANSTYVKRPPFFDDLPDQPEGFKPINDARILLLLADTVTTDHISPAGSIKKESPTGDYFMKHQIQQKDFNSYGARRGNHEVMMRGTFGNIKIRNEMAPGTEGGFTTLQPDGKVMSVYEAAMEYKKRKNDLVVIAGKEYGTGSSRDWAAKGTKLLGIKAVLAESFERIHRSNLIGMGVLPLQFKDGFDRKKLNITGAELVSVVDIDKGVKPRQEVTCEIKYQDGTSKKIPMLCRIDTANEVEYYKNGGILQYVLRNMLAN

SEQ ID NO: 178693 - protein, 462 aa, Unknown
  Bacterial polypetide isolated from the Sargasso Sea
MKPGKINSFKTLSDIEINNKKFKFYSLNKAEENGLEGISKLPKSLKVLLENLLRYEDDVSVTKNQIEAIKNWLKAKKSETEIAYRPARVLLQDYTGIPAVADLAAMREAVKEKNKDPNTINPLSAVDLVIDHSVQVDQSAKADSFDKNVEIEFNRNGERYSFLKWGQQAFNNFRIVPPGTGICHQVNLEYLSKVVWNEEFEGQNYLFPDTLVGTDSHTTMVNGLSVLGWGVGGIEAEAGMLGQPISMLIPEVIGFEVKNKMPEGTTATDLVLTVVKMLRDKGVVGKFVEFYGDGLKNLTLADRATIANMAPEYGATCGFFPIDEETLKYLKFSGRDEMTVKIVEEYAKAQGLWSSEDIDFTDTLTLDMTTIVPTISGPKRPQDKVLLTDASTSFKKSFSEVTGKKDFSVSKVKDKEYSIKDGSILIAAITSCTNTSNPNVLIGAGLLAKKAVELGLEVKPMG

SEQ ID NO: 178694 - protein, 357 aa, Unknown
  Bacterial polypetide isolated from the Sargasso Sea
MKPGNKNSYNSLKKILIDNKDFKYYSLPEAEKNGLDGISKLPKSLKVLLENLLRYEDDLSVTKSQIEAIKNWLKTKKSKTEIAYRPARVLLQDYTGIPAVADLAAMREAVKDKNKDPNTINPLSAVDLVIDHSVQVDQSAKADSFEKNVDIEFERNGERYSFLKWGQQAFDNFRIVPPGTGICHQVNLEYLSKVVWSEEFKGEKYLFPDTLVGTDSHTTMVNGLSVLGWGVGGIEAEAGMLGQPISMLIPEVIGFEMKNKMPEGTTATDLVLTVVKMLRDKGVVGKFVEFYGEGLKNLTLADRATIANMAPEYGATCGFFPIDEETLKYLKFSGRDQHTVAIVENMLENKVCGQVMI

SEQ ID NO: 178695 - protein, 365 aa, Unknown
  Bacterial polypetide isolated from the Sargasso Sea
MTPGNKNSYKSLKKITINDKEYNYYSLNEAEKNGLEGINKLPKSLKVLLENLLRYEDDLSVTKSQIEAIKNWLKTKKSKTEIAYRPARVLLQDYTGIPAVADLAAMREAVKEKNKDPNTINPLSAVDLVIDHSVQVDQSAKADSFEKNVDIEFERNGERYSFLKWGQQAFDNFRIVPPGTGICHQVNLEYLSKVVWSEEFKGENYLFPDTLVGTDSHTTMVNGLSVLGWGVGGIEAEAGMLGQPISMLIPEVIGFEMKNKMPEGTTATDLVLTVVKMLRDKGVVGKFVEFYGEGLKNLTLADRATIANMAPEYGATCGFFPIDEETLKYLKFSGRDQQTVDIVENYAKEQGLWASNEIEFTDIIS

SEQ ID NO: 178696 - protein, 336 aa, Unknown
  Bacterial polypetide isolated from the Sargasso Sea
AYALAGHMKFDFYKDTLGKSKDGKDIFLKDIWPSNKEIEDTLSNSLNAEMFINRYSNVSKGPSQWQNIKTKESSIYEWDDNSTYVKKPPFFDNLKDSPDGFKDIINARPLLILGDMVTTDHISPAGSIQKESPTGDYFMKNQVLQKDFNSYGSRRGNHEVMMRGTFANIRIRNEMAPGTEGGFTKLYPQEKIMPVFEAVEEYKKRKTDLIVIGGKEYGTGSSRDWAAKGTKLLGVKSVFAESFERIHRSNLIGMGILPLQFIDGMDRKKLKLTGSEIITVNGIEKGLNPGDKLSVEFKYQNGEIKKIKMLCRIDTNNELEYYKHGGILQYVLRNTI

SEQ ID NO: 178697 - protein, 530 aa, Unknown
  Bacterial polypetide isolated from the Sargasso Sea
FTDIISLDMSTIVPTISGPKRPQDKVLLTDAPNSFKKVLQDSANKNDKSFSKVENTEYEISDGSILIAAITSCTNTSNPNVLIGAGLLAKKAVELGLDVKPWVKTSLAPGSQVVTDYLEKAGLNVYLDKLGFNLVGYGCTTCIGNSGPLPENIVDAIQKENIYAVSVLSGNRNFEGRISPHIKANYLASPPLVVAYAIAGHMEFDLYKDALGEDKKGNEIFLKDIWPSNKEIEQTLKQSLNPEMFVERYSNVSEGPTQWQKIKTEKSSIYNWDEGSTYVKKPPFFESLPDEPEGFKEIKDARPLLILGDMVTTDHISPAGSIQKDSPTGEYFMKNQILPKDYNSYGSRRGNHEVMMRGTFANIRIRNEMAPGTEGGFTKLYPEEKILPIYDAVVEYKKRGTDLVVIGGKEYGTGSSRDWAAKGTKLLGIKAVIAESFERIHRSNLIGMGILPLQFINEVNRKNLKLIGSELISIIDIEKGINPSEELMVEIKYASGEMKKIKTLCRIDTKNELEYYKNGGILQYVLRNMI

SEQ ID NO: 178698 - protein, 721 aa, Unknown
  Bacterial polypetide isolated from the Sargasso Sea
MEFKSNNSFESLDKLIVSGKTYHFYNLIKAEKKGLKNIKKLPKSLKVLLENLLRFEDGVTVDKKQIEAIGEWLKTKKSKTEIAYRPARILLQDYTGIPAVADLAAMRDAVKSKNKDPKKINPLSTVDLVIDHSVMVDNYAKKDSFTKNVEKEFDRNGERYSFLKWGQNAFNNFRVVPPGTGICHQVNLEYLSKVVWSSESKGKTYAYPDTLVGTDSHTTMVNGLSVLGWGVGGIEAEAAMLGQPISMLIPEVIGFEIKGKLAEGTTASDLVLTIVQMLRKKGVVGKFVEFYGDGLKNLSLADRATIANMAPEYGATCGFFPIDEETIKYLKFSGRDKKTISLVEKYSKEQGLWASGEIEFTDTISLDLNTVVPSISGPKRPQDKVLLTEATTSFDKAFKENTKRKVPLEVKVDKKDFKIKDGDIVIGAITSCTNTSNPSVMIGAGLVAKKAVEKGLKVKPWVKTSLAPGSQVVTDYLEKAGLNKYLDQLGFNLVGYGCTTCIGNSGPLDKEISDTIHKENLYAVSVLSGNRNFEGRINPDVKANYLASPPLVVAYSLAGNMHHDLYKNPLGKDQNGKDIFLKDIWPTNKEIEELILKSINADMFVKRYSNVSEGPKEWSSIKTDKSSIYNWEESSTYVKRPPFFDNLPDKPKGFEKIKDARPLLILGDTVTTDHISPAGSIKKDSPTGDYFMKHQVQQKDFNSYGARRGNHEVMLRGTLEI

SEQ ID NO: 178699 - protein, 339 aa, Unknown
  Bacterial polypetide isolated from the Sargasso Sea
VVAYALAGNMHHDLYKNPLGKDQKGKDVFLKDIWPTNKEIEELILKSINANMFVKRYSNISEGPKEWSSIKTDQSSIYNWQESSTYVKRPPFFDNLPDKPEGFKKIKDARPLLILGDTVTTDHISPAGSIKKDSPTGEYFMKHQVQQKDFNSYGARRGNHEVMLRGTFGNIRIRNEMAPGTEGGFTILQPDGKQMSVYEAAEEYKKRGNSLVVIAGKEYGTGSSRDWAAKGTKLLGIKAVIAESFERIHRSNLVGMGILPLEFKAGFDRKKLNIKGTELFTIIDIEKGINPRAEVSCEIKYADGSSKTIKLLSRIDTENEIEYYKNGGILQFVLRNMIN

SEQ ID NO: 178700 - protein, 864 aa, Unknown
  Bacterial polypetide isolated from the Sargasso Sea
MNTANRKPLPGTSLDYFDARAAVEAIAPGAYDTLPYTSRVLAENLVRRCDPAILADSLKQIIERKRERDFPWFPARVVCHDILGQTALVDLAGLRDAIADGGGDPAKVNPVVPVQLIVDHSLAVECGGFDPDAFAKNRAIEDRRNEDRFHFIEWTKKAFENVDVIPPGNGIMHQINLEKMSPVIQAQDGVAFPDTCVGTDSHTPHVDALGVIAIGVGGLEAENVMLGRASWMRLPDIVGVELTGKRQPGITATDVVLALTEFLRKEKVVGAYLEFRGEGAASLTLGDRATISNMAPEYGATAAMFFIDGQTTDYLRLTGRSDEQVKLVETYAKVAGLWADTLNNAQYERTLTFDLSSVVRNMAGPSNPHKRLPTSDLAARGIAGKWEEKPGEMPDGAVIIAAITSCTNTSNPRNVIAAALLARNANARGLTRKPWVKSSLAPGSKAVELYLEEANLLPELEKLGFGIVAFACTTCNGMSGALDPKIQQEIVDRDLYATAVLSGNRNFDGRIHPYAKQAFLASPPLVVAYAIAGTIRFDIEKDVLGHDQDGKPVTLKDIWPTDEEIDAIVAASVKPEQFRKVYEPMFARSAEAGERAAPLYDWRAQSTYIRRPPYWEGALAGERTLQGMRPLAVLGDNITTDHLSPSNAILLDSAAGEYLAKMGLPEEDFNSYATHRGDHLTAQRATFANPTLINEMAIVDGAVKKGSLARVEPEGKVMRMWEAIETYMNRKQPLIVVAGADYGQGSSRDWAAKGVRLAGVEAIAAEGFERIHRTNLIGMGVLPLEFKPGTNRTTLGIDGTETFDVIGERTPRADLTLVIHRRNGERVEVPMTCRLDTAEEVSIYEAGGVLQRFAQDFLESSQAA

SEQ ID NO: 178701 - protein, 905 aa, Unknown
  Bacterial polypetide isolated from the Sargasso Sea
MAHNLHKTLKEFDSGSGKGKFYSLPQLGKELKTKIERLPVSIRIVLESVLRNYDGKKITEEHIQQLANWKPNDKRVDEIPFVVSRVVLQDFTGVPLLADIAAMRGVAERTGKNPKKIEPLVPVDLVVDHSVQIDYFRQKDALDLNMKLEFQRNNERYQFMKWGMQAFDTFKVVPPGVGIVHQVNLEYLARGVHKKADGGDTVYYPDTLVGTDSHTTMINGIGVVGWGVGGIEAEAGMLGQPVYFLTPDVVGVELKGKLREGVTATDLVLTITEMLRKEKVVGKFVEFFGEGTKSLSLPDRATIGNMAPEYGATMGFFPVDEKTIEYFEGTGRTKAEIAAFENYFKAQKLFGIPKAGDIDYTKVVTLDLTTVAPSLAGPKRPQDRIEIGHVKSTFTDLFSKPVAENGFAKKAEDLGAQYTTSNGVDVKNGDILIAAITSCTNTSNPSVLLAAGLLAKKAVEAGLTVDPKIKTSLAPGSRIVTEYLTKTGLLPYLSKLGFEVAAYGCTTCIGNAGDLTPELNEAITKNDIVAAAVLSGNRNFEARIHPNIRANFLASPPLVVAYAIAGNITRDLMTEPVGKGKGGRDIYLGDIWPTSEEIHALLKFALDPKKFEDNYSKLTKKGDLWSKIEGESGQVYDWPKSTYIAEPPFFGNDFSMEPAASIPTVKGARALGIFGDSVTTDHISPAGSIKEDSPAGKWLKENGVQKADFNSYGSRRGNHDVMMRGTFANVRIKNLMIPAKADGTRVEGGLTIHQPSGEQQSIYDAAMQYVAADTPTVVFAGEEYGTGSSRDWAAKGTQLLGVKAVIARSFERIHRSNLVGMGVLPLQFKGSDSVQSLGITGEETYDIEGLGDDFKPQQDVTLVIHRKNGESQRVQVLLRIDTPIEVDYYKHGGILPFVLRSLLAA

SEQ ID NO: 178702 - protein, 404 aa, Unknown
  Bacterial polypetide isolated from the Sargasso Sea
KLGFNLVGFGCTTCIGNSGPLDENIAEAITNNDLIVSGVLSGNRNFEGRINPFVKANYLASPPLVVAYALAGSTKINLAKDPIGIGKNDKEIYLKDVWPKSKEIKSIINKIINSNLYKKRYKNVFKGDKKWNSVKSPSGLTYKWNKKSTYVQHPPYFENLDFEKNNINDVKNAQILALFGDSVTTDHISPAGSIKEDGPAGIYLTKNRINKADFNSFGARRGNHEVMMRGTFSNIRIKNEMVKNIEGGITIHHPSNKQMTIYDASVKYQKSNTPLVIFAGKDYGMGSSRDWAAKGTKLLGVKAVIAESFERIHRSNLIGMGVLPFQFMEKENRLSLGLKGDERITITGLSNDISPGMDVKMLIIYSNGKNKTHRLRLLVNTSTEIDYLKTGGILQYVYKNISNQ

SEQ ID NO: 178703 - protein, 365 aa, Unknown
  Bacterial polypetide isolated from the Sargasso Sea
GSKVVTDYLEKAGLNKYLDDLGFNLVGYGCTTCIGNSGPLQQNISEAVKKENIYAVSVLSGNRNFEGRISPLVKANYLASPPLVVAYALAGTMTIDFYKDPLGKDIDGKDVYLKDIWPSNQEIDNTLKSSLNADMFVKRYSNISEGPEQWQKIKTEPTSIYNWEETSTYVKKPPFFENLPDEPEDIKNINEARPLLILGDMVTTDHISPAGSIQKESPTGEYFMKHQILTKDYNSYGARRGNHEVMMRGTFANIRIRNEIVPETEGGFTKLYPEEKVMPVYDAVVEYKKRGIDLVVIGGKEYGTGSSRDWAAKGTKLLGIKAVLAESFERIHRSNLIGMGVLPLQFINGMNRKNLNLKGPELISI

SEQ ID NO: 178704 - protein, 377 aa, Unknown
  Bacterial polypetide isolated from the Sargasso Sea
VEAVQNNRLYGVSVLSGNRNFEGRISPHVKANYLASPPLVVAYALAGHMEFDLYKDSFGKDHNGKDIYLKDIWPSNKEIEDTLKQSLNAEMFIKRYSNVAAGPKQWQDIKSEKSSIYNWDSGSTYVKKPPFFDNLPDEPEGFKPIKEARPLLILGDMITTDHISPAGSIQKDSPTGDYFMEHQILPQDYNSYGARRGNHEVMMRGTFANIRIRNEMAPGTEGGFTKLYPENKIVPVYDAVVEYKRRGTDLVVIGGKEYGTGSSRDWAAKGTKLLGITLVIAESFERIHRSNLIGMGVLPLQFVNGMDRKSLKLTGSELISVLNLEEGINPSDQVDVEIKYISGEIKKIKALCRIDTKNELEYYKNGGILQYVLRNMI

SEQ ID NO: 178705 - protein, 517 aa, Unknown
  Bacterial polypetide isolated from the Sargasso Sea
MSEKSEITINNNNFDVFNINKYQINHLPYSLRVLMENYLRNESDNNKFDSIIEKFTKWNGSADANTELTFYPSRVIMQDFTGVPAVVDLASMRDAMTSLDESKADAVNPQCQTDLVIDHSVMVDHFGTSESKDLNTKLEYERNTERYKLLKWGQQAFKNLRIVPPNNGIIHQINIEYIARVIYEKEGQLYPDTVVGTDSHTTMVNGLGVLGWGVGGIEAEAAMLGQPIPMLLPEVIGFELTGKLGQTTTATDLVLTIVQMLREKNVVGKFVEFYGSGLDNLSIADRCTISNMAPEYGATCGFFPVDALTIDYLKMTGKDEDHLAVVEQYSKTCGFFRDDSQDIKYTSSLSLDMGDVEACLSGPKRPQDRVLLSDVKDVCEREIKKLKKSPSSDGVINDGNILIAAITSCTNTSNPSVILGAGLLAKRAVEKGLATKEWVKTSLAPGSRVVENYLKKANLLDSLNKLGFNIVGYGCTTCIGNSGPLDNEYVKEINDRDLVVSSILSGNRNFEGRIHPE

SEQ ID NO: 178706 - protein, 282 aa, Unknown
  Bacterial polypetide isolated from the Sargasso Sea
MFNQSYKNLFEGDSNWMSIPTSDSDRFDWDEESTYIQPSPFFGKEKDDQEKLPAIENAYPLVILGDSVTTDHISPAGSFKDTTPAGKHLIDNSVNIKDFNSYGSRRGNFKIMQRGTFANIRLSNKLVPEKTGGFTKLLPQGKEMSIYDAAQEYKKSGTNLIIFAGKDYGCGSSRDWAAKGTKLLGVKAVIAESFERIHRSNLVGMGIMPLQFNNDDSFEVLGLSMNSSFDIAEIKKDADTVTITEKETGKSFEAKVRIDTEKEWEYFVSDGILNYVLKKLAN

SEQ ID NO: 178707 - protein, 608 aa, Unknown
  Bacterial polypetide isolated from the Sargasso Sea
ERYEFLKWGQYAFDNFYLAPPGGGICHQVNLENIATTIWSSSIGEHNYLYPDSVVGTDSHTTMVNALSVLGWGVGGIEAEAAMLGQPISMNIPKVLGFKLNGKLQEGITATDLVLTITEILRKHGVVGKFVEFYGEGLKNLSLADRSTISNMAPEYGATCGFFSTDKETIKYLKLSGKNEHQINIVKKYTLMQKMWTNDIYNPNFDEKISLDLNKIEPSVAGPKRPQDKIFVRDIPEVFKTIDNTPYDKSIKNNKLQSGDVVIAAITSCTNTSNPNVMIAAGLVAKKAVELGLSAKPWVKTSLAPGSKVVSDYLDKANLSKYLNQIGFNLVGYGCTTCIGNSGPLEDWISNEIKNNNLTVCSVLSGNRNFEGRVHQEVKANFLASPPLVVAFAIAGNMNINIFNEVIGISKLGKEIFLRDLWPSTSEINEIVDNSISTEMFKKRYKEIYNGDQNWQSIESIQDKTYSWSASSTYIKHPPFFTDEKNQIEDIINARILAMLGDSVTTDHISPAGAIKLDSPAGKYLNERQISRKDFNSYGSRRGNHEIMMRGTFANIRIKNEIVPGIEGGVTKFFDQDEKMSIYDAAIKYKENNVPLVVFAGKEYGTGS

SEQ ID NO: 178708 - protein, 555 aa, Unknown
  Bacterial polypetide isolated from the Sargasso Sea
RDQHTVNIVENYAKEQGLWASSDLEFTDIISLDMSTVVPTISGPKRPQDKVPLTDAPYSFKKVLQEATSKNEKSVSKVANTDYDIKDGSILIAAITSCTNTSNPNVLIGAGLLAKKAIEKGLQVKPWAKTSLAPGSKVVTDYLAKAGLNKYLDNLGFNLVGYGCTTCIGNSGPLPENIVEAIQKENIYAVSVLSGNRNFEGRISPHIKANYLASPPLVVAYAIAGHMEVDLYKDPLGKDKDGKEVFLKDIWPSNKEIEETLKDSLNAEMFIQRYSNVTEGPTQWQKIKTDKSSIYNWDEGSTYVKKPPFFDSLSDEPEGFKEIKDARPLLILGDMVTTDHISPAGSIQKDSPTGEYFMEHQILPKDFNSYGSRRGNHEVMMRGTFANIRIRNEMAPGTEGGFTKLYPEEKVLPIYDAVVEYKKRGTDLVVIGGKEYGTGSSRDWAAKGTKLLGIKAVIAESFERIHRSNLIGMGILPLQFIDDVNRKNLKLIGSELISILNIKKGVNPSDEVTVEIKYASGEIKKIKTLCRIDTKNELEYYKNGGILQYVLRNMI

SEQ ID NO: 178709 - protein, 302 aa, Unknown
  Bacterial polypetide isolated from the Sargasso Sea
NKEIEETLKNSLNPEMFVKRYSNISTGPEQWQKIKTDKSSIYKWDESSTYVKKPPFFENLSDEPEGFKEIKDARPLLILGDMVTTDHISPAGSIQKESPTGDYFMKNQVLPKDYNSYGSRRGNHEVMMRGTFANIRIKNEMAKGTEGGFTKLYPEGKVMSVYDAVVEYKKRKTDLVVIGGKEYGTGSSRDWAAKGTKLLGIKAVITESFERIHRSNLIGMGILPLQFIEGKDRMNLNLKGSELFSVINLEKGIAPSDHVEIEIKYASGESKKIKTLCRIDTENELEYYKNGGILQYVLRNMI

SEQ ID NO: 178710 - protein, 573 aa, Unknown
  Bacterial polypetide isolated from the Sargasso Sea
LLQDYTGIPAVADLAAMREAVKEKNKDPNTINPLSKVDLVIDHSVQVDTSAKSDSFEKNVDIEFKRNGERYSFLKWGQQAFNNFRIVPPGTGICHQVNLEYLSKVVWTEKFETNNYIFPDTLVGTDSHTTMVNGLSVLGWGVGGIEAEAGMLGQPISMLIPEVIGFEMKNKLPEGTTATDLVLTVVKMLRDKGVVGKFVEFYGEGLKNLTLADRATIANMAPEYGATCGFFPIDDETLNYLKFSGRDKHTVDIVENYAKEQGLWASSDIVFTDKLSLDISTVVPTISGPKRPQDKVLLTQSSQNFKKVFEQITKKKKIYVSKVKNEEFEVKDGSILIAAITSCTNTSNPNVLIGAGLLAKKAIEKGLKTKPWVKTSLAPGSKVVTDYLVKAGLNNYLDQLGFNLVGYGCTTCIGNSGPLQENISEAVKKENIYAVSVLSGNRNFEGRISPLVKANYLASPPLVVAYALAGTMTIDLYKDPLGKDTEGKDVFLKDIWPSNKEIEETLKNSLNADMFLKRYSNISEGPKQWQKIKIEPTSIYKWEETSTYVKKPPFFENLPDEPEDIKDINDARP

SEQ ID NO: 178711 - protein, 256 aa, Unknown
  Bacterial polypetide isolated from the Sargasso Sea
TYVKRPPFFDDLPDKPEGFKPINDARILLLLADSVTTDHISPAGSIKKESPTGDYFMKHQIQQKDFNSYGARRGNHEVMMRGTFGNIKIRNEMAPGTEGGFTTLQPDGKVMSVYEAAMEYKKRNNDLVVIAGKEYGTGSSRDWAAKGTKLLGIKAVLAESFERIHRSNLIGMGVLPLQFKEGFDRKKLNITGAELVSVINIDKGVKPRQEVTCEIKYQDGTSKKIQMLCRIDTANEVEYYKNGGILQYVLRNMLAN

SEQ ID NO: 178712 - protein, 299 aa, Unknown
  Bacterial polypetide isolated from the Sargasso Sea
IRRTVEAAIGPEMFIRRYSDVLSEPRWDSIPSEASELFPWDEDSTYVRLPSFFQGIEPEPSPVEPIEDARVLVKVGDSVTTDHISPAGAFPSSGPAGKYLMSKGVEPRDFNSFGSRRGNHEVMIRGTFANIRMRNQTAPGTEGGLTTHFPTNEVVSIHEASERYQSESTQLVVLAGSQYGSGSSRDWAAKGTFLLGVRAVIAKSYERIHRSNLVGMGVLPLAFSDGADAESLGLDGTELYSIPASGDLDPFSEIIVTAKKGDGTVVSFPVIVRLETPVEVEYYRNGGILQTVLRNLAKD

SEQ ID NO: 178713 - protein, 554 aa, Unknown
  Bacterial polypetide isolated from the Sargasso Sea
KLTGELNGWTSSKDVILKVAGLLSVKGGTGAIIEYFGSGAKNLSCTGKGTICNMGAEIGATTSVFAYDENMAKYLQATGRSEVVELADNYRDYLQADMEVYAEPESYFDQVIEINLSELEPHLNGPFTPDLATPISQMTKVAKKNNWPTKIEVSLIGSCTNSSYEDISRSASIAQQALDKNLSIKSDFTITPGSEQVRFTVDRDGFLGVFEKIGGVVLANACGPCIGQWARHSDDPDKKNTIVTSFNRNFAKRNDGNPNTFAFVGSPELVTALAISGDLSFNPMKDTLINDNHEEVMLEPPIGLDLPDNGFEVDNLGYKEPDKNGAKVKVIVDPNSKRLQLLNPFSKWDGNNLSNLRLLIKAKGKCTTDHISMAGPWLKYRGHLDNISDNMLTGANNYFNNKSNLVKNQLTGDYGPVPEVQRYYKSNNTLSIVIGDENYGEGSSREHAAMEPRHLGVIIILVKSFARIHETNLKKQGMLALTFNDPSDYDKILEDDLFTSLDLDDIKPEKSISLEVHHADSTIDIIKCNHTYNNSQIEWFRAGSALNLIRQNER

SEQ ID NO: 178714 - protein, 385 aa, Unknown
  Bacterial polypetide isolated from the Sargasso Sea
YLEKAGLNIYLDKLGFNLVGYGCTTCIGNSGPLADNISDSIKNNNIYAVSVLSGNRNFEGRISPLIKANYLASPPLVVAYAIAGTMRFDLYKDPLGKDKDGKDVFLKDIWPSNKEIEETLRNSLNAEMFIKRYSNVSQGPEQWQKIKTEETNIYNWEDNSTYVKKPPFFDNLPDKPEGFKEIKDARPLLILGDSITTDHISPAGSIQKDSPTGEYFMKHQILPKDYNSYGARRGNHEVMMRGTFANIRIRNEMAPGTEGGFTKLYPEEKVMPVYDAVVEYKKRGTDLVVIGGKEYGTGSSRDWAAKGTKLLGVKAVFAESFERIHRSNLIGMGILPLQFKDGINRTNLKLDGSELFSIIDLEKGIDPRDEVDVEIKYVFWRHQEN

SEQ ID NO: 178715 - protein, 139 aa, Unknown
  Bacterial polypetide isolated from the Sargasso Sea
MGYTIYDKLWNEHLIRSYDDGDSLIYIDRHFLHEVTSPQAFEGLKKKSLKPWRINANIATPDHNVPTTRDNKFSIESIEDNISKLQVVELDKNCNDFGIKQFNINSNNQGIVHVIGPELGLTLPGMSIVCGDSHTSTHG

SEQ ID NO: 178716 - protein, 73 aa, Unknown
  Bacterial polypetide isolated from the Sargasso Sea
MSKTLYDKIWEEHLVHQQEDGTSLLYVDRHLVHEVTSPQAFEGLRINKRKVRKPNLTLAVADHNVPTTDRSKG

SEQ ID NO: 178717 - protein, 356 aa, Unknown
  Bacterial polypetide isolated from the Sargasso Sea
EVTSPQAFEGLSKKNLKPWRLEANIATPDHNVPTIRGDGFDSEKIKDEISKIQVIELDKNCNTFGIKQFDIKSTKQGIVHVIGPELGYTLPGMTIVCGDSHTSTHGALGCLAMGIGTSEVEHVLATQCLKVSKLKNMLVKFEGTPSENVSSKDIVLYFIGQIGTAGGTGYAIEFAGSYIEQISIESRMTICNMAIEAGAKVGLVAPDDKTIDYIRKKSFLDKKLLIEAEDYWSSLKSDEDAIFDKEKTIDISKIKPQVTWGTSPEMVVNFDDDIPRTSDYSEQNKKNIELARDYMGIKDEAKLSDLVFDKVFIGSCTNSRIEDLRQAAEIVKRKFVAENISEAIVVPGSGMVKEAA

SEQ ID NO: 178718 - protein, 326 aa, Unknown
  Bacterial polypetide isolated from the Sargasso Sea
IVHIIGPEQGFTQPGTIIVCGDSHTATHGAFGALAFGIGTSEVEHVLATQTLVQKKSKNFRINVNGSLPVGVTSKDVILQIIGKIGTAGGTGYVIEYAGNLISNLSVEQRMTICNMTIEGGARAGLIEPDEKVFNYLKGKPMSPKNSNWDKALEYWSKLKSDGDAVFDKEISLEGKDIKPMVTWGTSPQDVVDIDGIVPDPENELNEDRKNSINRSLKYMGLKPKTKIKDIRIDKVFIGSCTNGRIEDLREAAKILKDKKIASHVNAMIVPGSGLVKQQAEQEGLDIIFKNSGFEWREPGCSMCLAMNADKLKPEERCASTSNRNF

SEQ ID NO: 178719 - protein, 286 aa, Unknown
  Bacterial polypetide isolated from the Sargasso Sea
DVLATQTIAINKLKVRQIWCDKKLSNGVFAKDLVLHIINKLGVKAGVGFAYEFAGPAIDELSMEERMTICNMSIEGGARCGYINPDDKTFSYIKNKLCAPKSEHWDKALTWWESLKSDENSIYDDVIKLDASKVEPTVTWGITPSQSISINQQIPFLDDLSSNDKLIAKEAYEYMSFKPGQLIKDTPVDVCFIGSCTNGRISDLRVAAKVLKGKKVSKNVKAFAVPGSEKVATEAKQEGLDQIFKDSGFQWREPGCSMCLAMNSDKLIGNQVSASSSNRNFKGRQG

SEQ ID NO: 178720 - protein, 190 aa, Unknown
  Bacterial polypetide isolated from the Sargasso Sea
MPNTLYDKIWNDHLVDQQPDGTALLFVDRHLVHEVTSPQAFEGLRTSNRKVRHPKLTLAVADHNVPTTDRTNGIADQESKIQVDTLEKNCKEFGVQLFGMDDKRQGIVHIIGPEQGFTQPGTVIVCGDSHTATHGAFGALAFGIGTSEVEHVLATQTLVQKKAKNFRINVNGKLPLGVTSKDVILQIIGK

SEQ ID NO: 178721 - protein, 225 aa, Unknown
  Bacterial polypetide isolated from the Sargasso Sea
MSQDTLFDKVWDLHKVSSLPGGSDQIFIGLHLIHEVTSPQAFGALKDKKLKVKFPDRTVATVDHIVPTDNQSRPFKDNLAEQMIETLEKNCLEHKIRFFNIGSGNQGIVHVVAPELGLTQPGMTIACGDSHTSTHGAFGSIAFGIGTSQVRDVLATQTLAMNKLKVRQIWCDNKLSKGVYAKDLVLHIINKLGVKAGVGFAYEFAGPAIDELSMEERMTICNMSI

SEQ ID NO: 178722 - protein, 148 aa, Unknown
  Bacterial polypetide isolated from the Sargasso Sea
MSTTLYDKIWNDHLVDQQDDGTSLLFVDRHLIHEVTSPQAFEGLRNSNRKVRHPNLTLAVADHNVPTTDRSKGISDEESKIQVDTLEANCKEFGVQLFGMDDKRQGIVHIIGPEQGFTQPGTVIVCGDSHTATHGAFGALAFGIGTSE

SEQ ID NO: 178723 - protein, 186 aa, Unknown
  Bacterial polypetide isolated from the Sargasso Sea
MPQTIYDKIWNDHLVHQQEDGTSLLFVDRHLIHEVTSPQAFEGLRNSNRKVRQPSLTLAVADHNVPTTDRSVPITDKDSKIQIETLEKNCAEFGINLFGMNDKRQGIVHIIGPEQGFTQPGTIIVCGDSHTATHGAFGALAFGIGTSEVEHVLATQTLVQKKSKNFRINVNGSLPVGVTSKDVILQ

SEQ ID NO: 178724 - protein, 281 aa, Unknown
  Bacterial polypetide isolated from the Sargasso Sea
MNDKRQGIVHIIGPEQGFTQPGTIIVCGDSHTATHGAFGALAFGIGTSEVEHVLATQTLVQKKSKNFRINVNGTLPIGVTAKDVILQIIGKIGTAGGTGYVIEYAGNLISTLSVENRMTICNMTIEGGARAGLIQPDQKVFDYLKDKPMSPKKDNWEKALEYWGNLKSDDGANFDKEINLEGNDIKPMVTWGTSPQDVVTIDGKVPNPKNETDPDKKNSIERSLKYMGLNSDILVKDIKIDKVFIGSCTNGRIEDLREAAKILKDKKIAKHVNAMVVPGSG

SEQ ID NO: 178725 - protein, 82 aa, Unknown
  Bacterial polypetide isolated from the Sargasso Sea
MKTLYDKLWEEHHVTQLDSGESLLYIDRHYLHEVTSPQAFEGLSKKNLKPWRLEANIATPDHNVPTTRGNNFNSDKIKDEIS

SEQ ID NO: 178726 - protein, 282 aa, Unknown
  Bacterial polypetide isolated from the Sargasso Sea
MPFTTYDKIWNDHLVDEQPDGTSLLFVDRHLIHEVTSPQAFEGLRNSNRKVRHPKLTLAVADHNVPTTDRSKGIADEDSRIQVETLNKNCKEFGVEIFGMDDKRQGIVHIIGPEQGFTQPGNIIVCGDSHTATHGAFGALAFGIGTSEVEHVLATQTLVQKKSKNFRISVNGSLPIGVTSKDVILQIIGKIGTAGGTGYVIEYAGNLISNLSVEQRMTICNMTIEGGARAGLIQPDEKIFQYLKGKPMSPKGENWEKAMEYWHTLKSDKDANFDKELTLDGS

SEQ ID NO: 178727 - protein, 285 aa, Unknown
  Bacterial polypetide isolated from the Sargasso Sea
VILQIIGKIGTAGGTGYVIEYSGNLISSLSVEQRMTICNMTIEGGARAGLIEPDEKVFKYLEGRPMSPKKENWNKAVDYWGSLKTDKDANFDKEVTLEGKDILPMVTWGTSPQDVVSIDGKVPNPKNETDEDKKNSMERSLNYMGLKPDTAMKNIKIDKVFIGSCTNGRIEDLRDAAKILKNRKIANHVYGMVVPGSGLVKQQAEQEGLDKIFKKSGFDWREPGCSMCLAMNSDKLKAEERCASTSNRNFEGRQGRGGRTHLVSPAMAAAAAISGTLDDVRKYQN

SEQ ID NO: 178728 - protein, 291 aa, Unknown
  Bacterial polypetide isolated from the Sargasso Sea
MDDKRQGIVHIIGPEQGFTQPGNIIVCGDSHTATHGAFGALAFGIGTSEVEHVLATQTLVQKKSKNFRISVNGSLPIGVTSKDVILQIIGKIGTAGGTGYVIEYAGNLISDLSVEQRMTICNMTIEGGARAGLIQPDDKIFQYLQGKPMSPKNENWSKALEYWHTLKSDSDAHFDKELTLDGSQIKPMVTWGTSPQDVVEIDGKVPNPDSESDPDRKNSINRSLNYMGLKPNTNIQDIKIDKVFIGSCTNGRIEDIREAAKILKDKKIASHVHAMIVPGSGLVKEQAEQEG

SEQ ID NO: 178729 - protein, 321 aa, Unknown
  Bacterial polypetide isolated from the Sargasso Sea
DTLEATVKEFGVQLFGMNDKRQGIVHIIGPEQGFTQPGNVIVCGDSHTATHGAFGALAFGIGTSEVEHVLATQTLVQKKAKNFIINVNGKLPLGVTSKDVILQIIGKIGTAGGTGCVVEYAGDLIRSLSVEQRMTICNMTIEGGARAGLIAPDEKIFDYLKGKPMSPKAENWDKAISYWNSLKTDSDATFDKEINLDAGEILPMITWGTSPQDVIAIDDKVPNPEKEKDEDKKNSIERALKYMGLKPDMAATDIKIDKVFIGSCTNGRIEDLREAAKILKDKKISSHVSAIVVPGSGLVKEQAEQEGLDKIFVNSGLRERA

SEQ ID NO: 178730 - protein, 222 aa, Unknown
  Bacterial polypetide isolated from the Sargasso Sea
MSTPKTLYDKIWNDHLVSENEDGTSIIYIDRHLVHEVTSPQAFEGLKIANRSVRKPNFTLATADHNIPTTNRDEGISDPESKLQVDTLEENCKEHGITFLSMSDKRQGIVHIIGPEQGFTQPGMTIVCGDSHTSTHGAFGALAWGIGTSEVEHVLATQTLVQTKAKNMQINIQGELPLGVTAKDIVLKIIQTIGTAGGTGYVIEYTGDAIKSLTMEGRMTVC

SEQ ID NO: 178731 - protein, 295 aa, Unknown
  Bacterial polypetide isolated from the Sargasso Sea
SRCFANNCKEFDVELFDMNDKRQGIVHIIGPEQGFTQPGTVIVCGDSHTATHGAFGALAFGIGTSEVEHVLATQTLIQKKSKNFRVNVNGKLPLGVTAKDVILKIIGTIGTAGGTGYVIEFAGEVIRGLSMEERMTVCNMTIEAGARAGLIAPDEKTFDYLKGKPKSPKEEKWKMALENWKKLYSDEGCNFDKEININAKEIEPLVTWGTSPQDVSPISGIVPDPEKEKDKDKKVAMYRSLEYMGLKPNMKITDIKVDKIFIGSCTNGRIEDLREAAKILKGKKIANNVSAMVVP

SEQ ID NO: 178732 - protein, 285 aa, Unknown
  Bacterial polypetide isolated from the Sargasso Sea
FGALAFGIGTSEVEHVLATQTLVQKKSKNFRINVNGTLPIGVTAKDVILQIIGKIGTAGGTGYVIEYAGNLISTLSVENRMTICNMTIEGGARAGLIQPDQKVFDYLKNKPMSPKKDNWEKAVEYWSKLKSDDEAYFDKEINLEGKDIKPMVTWGTSPQDVVTIDGKVPNPNNETDPDKKNSIERSLKYMGLNSDISVKDIKIDKVFIGSCTNGRIEDLREAAKILKDKKIAKHVNAMVVPGSGLVKEKAEQEGLDKIFINSGFEWREPGCSMCLAMNADKLKPR

SEQ ID NO: 178733 - protein, 315 aa, Unknown
  Bacterial polypetide isolated from the Sargasso Sea
MSKTLYDKIWENHLVHEQSDGTSLIYVDRHLVHEVTSPQAFEGLRLQKRKVRRPELTLAVPDHNVPTTDRSKGINDEDSRIQVETLRKNCKDFGVELFDVNDKRQGIVHIIGPEQGFTQPGTVIVCGDSHTATHGAFGALAFGIGTSEVEHVLATQTLMQKKSKNLRINVNGNLPKGVTAKDVILKIIGTIGTAGGTGYVVEFAGDVIKSLSMEERMTVCNMTIEAGARAGLIAPDEKTFSYLKGKTMSPKGENWTKAVEFWKTLYSDKDCKFDKEVNIDGKNIEPLVTWGTSPQDVSPVTGVVPDPEKENNEDR

SEQ ID NO: 178734 - protein, 301 aa, Unknown
  Bacterial polypetide isolated from the Sargasso Sea
AFGALAFGIGTSEVEHVLASQTLIQQPAKNMKISVNGNLKPGVTAKDIILHIIGLIGTAGGTGYVIEYAGDVIHSLSMEGRMTICNMSIEAGARAGLIAPDQTTFDYIEGRPYAPKGQDWDKAIEFWKSLPSDENAKYDKEINIKAEEISPQITWGTSPQDVVPINGKVPNPETIEDLNRKKAVERSLEYMGLEPDQEIEKIKIDKVFIGSCTNGRIEDLREVARVVEGKKVSVDSMIVPGSGLVKEQAEREGLDKIFIDAGFDWREPGCSMCLAMNPDQLKPKERCASTSNRNFEGRQGR

SEQ ID NO: 178735 - protein, 328 aa, Unknown
  Bacterial polypetide isolated from the Sargasso Sea
EGLKIAGREPWRISSNIATPDHNVPTTDREKGIEGIEDKVAKLQVTTLDKNCSELGILQFDILDKRQGIVHVIGPEQGVTLPGMTLVCGDSHTSTHGALATLAIGIGTSEVEHVLATQCLKTSKLRNMKVVIDGELSPGVTPKDVTLAVIGKIGTAGGTGFAIEYSGSAIEAMSIEGRMTVCNMSIEAGARVGLVAFDNITEEYVKNRPFTPKGDEWELALSQWKELKSDDDAHFEEIIYLDGSTLKPQVTWGTSPEMVIDIDGKIPEANSESIQHALEYMNLESGMKISDIKLDQIFIGSCTNSRIEDLRMAAKVVVGKKIHLRLES

SEQ ID NO: 178736 - protein, 212 aa, Unknown
  Bacterial polypetide isolated from the Sargasso Sea
MDKTLFDKVWDSHVIERIKDGPDVLFIDKHFIHEVTSPVAFVGLKNRNLKVMYPHRTYATADHNTPTINQHLPIKDRLSAMQVKTLEKNCKEHGIDFWGLGHKKNGIVHVIGPENGITQPGLTIVCGDSHTSTHGAFGAIAFGIGTSEVEMVLACQTIMQQKPMKMRINVDGKLSPNVTPKDVAIYIISKLSSSGATGYFIEYAGSVFKNMS

SEQ ID NO: 178737 - protein, 189 aa, Unknown
  Bacterial polypetide isolated from the Sargasso Sea
MPNTLYDKIWNEHLVHQQEDGTALLFVDRHLVHEVTSPQAFEGLRNSKRHVRHPKLTLAVADHNVPTTDRSKGISDHESKIQVETLEANCKEFGIKLFGMSDKRQGIVHVTGPEQGFTQPGTVIVCGDSHTATHGAFGALAFGIGTSEVEHVLATQTLVQKKAKNFRINVNGTLPLGVTSKDVILQIME

SEQ ID NO: 178738 - protein, 141 aa, Unknown
  Bacterial polypetide isolated from the Sargasso Sea
MQPGKKIKDIKLDQIFIGSCTNSRIEDLREAAKVLEGKKISESIKRAIVVPGSGLVSQQAIDEGLDKIFIDSGFEWRAPGCSMCLAMNPDQLGDGEHCASTSNRNFEGRQGYGGRTHLVSPVTAAASAVEGHFVDVREYLL

SEQ ID NO: 178739 - protein, 179 aa, Unknown
  Bacterial polypetide isolated from the Sargasso Sea
VLATQCLKTSKLKNMRVNISGELQEGVTPKDVTLAVIGRIGTAGGTGYAIEYAGSVIENMSIEGRMTVCNMAIEAGARAGLVAYDQITEAYIKDRPFTPTGEQWLVAKEQWQDLVSDSEAKFDKEIEIDGSFIAPQVTWGTSPEMVSDIDGVIPEPNSESIRHALNYMNLATWEKNKRY

SEQ ID NO: 178740 - protein, 199 aa, Unknown
  Bacterial polypetide isolated from the Sargasso Sea
KFNKLKSIPAYLPIVNIDTDMIIPKQFLKTIKRTGLGKNLFFEMRYDDQGKEINDFVLNKDPFNQSKILIAGKNFGCGSSREHAPWALLDFGITCVISSSYADIFFSNCFKNGILPIILEEEKIKELSEYANRQEEISIDLQEEKIVYGNNELKFEVDPFKKKCLLEGLDDIALSLKKSEKIEKFETNLKNEKPWVFND

SEQ ID NO: 178741 - protein, 71 aa, Unknown
  Bacterial polypetide isolated from the Sargasso Sea
MPKTLYDKIWDDHLVFEQNDGTSLLYVDRHLVHEVTSPQAFEGLRLNKRKVRKPNFTLAVADHNVPTTDRT

SEQ ID NO: 178742 - protein, 167 aa, Unknown
  Bacterial polypetide isolated from the Sargasso Sea
MSQTIYDKIWNDHLVHEQKDGTSLLFVDRHLIHEVTSPQAFEGLRTSNRKVRQPKLTLAVADHNVPTTDRSKGISDEDSRIQVETLDKNCKEFDIQLFGMNDKRQGIVHIIGPEQGFTQPGNIIVCGDSHTATHGAFGALAFGIGTSEVEHVLATQTLVQRNQKILE

SEQ ID NO: 178743 - protein, 253 aa, Unknown
  Bacterial polypetide isolated from the Sargasso Sea
MTINNPKTLFDKIWEHHLVDRQEDGTCLIYIDRHLVHEVTSPQAFEGLRNNNRKVRRPESTFAVADHNVPTSDRSKGIENKESRIQVETLEKNCKDFDVTLFPLLDSRQGIVHIVGPEQGITQPGMTIVCGDSHTATHGAFGALAFGIGTSEVEHVLATQTLIQKPAKNMRISVEGKLNLGVTAKDIILHIIGRIGTAGGTGYVIEYAGNAISSLSMEGRMTICNMSIEAGARAGLIAPDEKTFEYIKGRPYA

SEQ ID NO: 178744 - protein, 173 aa, Unknown
  Bacterial polypetide isolated from the Sargasso Sea
MGKTLFDKVWDSHVIERIEDGPDILFIDKHFIHEVTSPVAFVGLKNRNLKVMYPHRTFATADHNTPTINQHLPIKDRLSAMQVKTLEKNCNEHGIDFWGLGHKKNGIVHVIGPENGITQPGLTIVCGDSHTSTHGAFGAIAFGIGTSEVEMVLACQTIMQQKPMKMKINVDGK

SEQ ID NO: 178745 - protein, 316 aa, Unknown
  Bacterial polypetide isolated from the Sargasso Sea
MSETLYDKIWNDHLVDQQNDGTALIFVDRHLVHEVTSPQAFEGLRNSKRKVRHPKLTLAVADHNVPTTDRSGGISDKDSKIQVDTLMSNCKEFGIELFGMDDKRQGIVHIIGPEQGFTQPGTVIVCGDSHTATHGAFGALAFGIGTSEVEHVLATQTLVQKKAKNFRINVNGKLPLGVTSKDVILQIIGKIGTAGGTGCVVEYAGDLISSLSVEQRMTICNMTIEGGARAGLIAPDEKVFKYLKGRPMSPQGEKWDKALEYWQSLKSDQSATFDKEVNLKASEILPMITWGTSPQDVITIDGKIPNPSNEKEKIKK

SEQ ID NO: 178746 - protein, 141 aa, Unknown
  Bacterial polypetide isolated from the Sargasso Sea
MSTTLYDKIWNDHLVDQQDDGTSLLFVDRHLIHEVTSPQAFEGLRNSNRKVRHPNLTLAVADHNVPTTDRSKGISDEESKIQVDTLEANCKEFGVQLFGMDDKRQGIVHIIGPEQGFTQPGTVIVCGDSHTATHGAFGALA

SEQ ID NO: 178747 - protein, 299 aa, Unknown
  Bacterial polypetide isolated from the Sargasso Sea
MKTLYDKLWEEHHVTQLDSGESLLYIDRHYLHEVTSPQAFEGLVKKNLKPWRLNANIATPDHNVPTTRGNNFNSESITDEISKIQVVELDKNCNKFGIKQFDIESNKQGIVHVIGPELGFTIPGMTIVCGDSHTSTHGALGCLAMGIGTSEVEHVLATQCLKVSKLKNMNVRFEGEVDEHVSSKDIVLYLIGQIGTAGGTGYAIEFSGSYISSISVEGRMTICNMAIEAGAKVGLIAPDNKTIEYVKSKSFLDDDTFNHAKEYWKTLKSDDDAKFDKEITIDVSKIKPQVTWGTSPEMV

SEQ ID NO: 178748 - protein, 132 aa, Unknown
  Bacterial polypetide isolated from the Sargasso Sea
ELSDLDFDKVFIGSCTNSRIEDLREAAEVLKGQKVSENIHEAIVVPGSGMVKEQAEKEGIHKIFIDAGFQWRAPGCSMCLGMNPDQLSPYERCASTSNRNFEGRQGNLGRTHLMSPKMAALTAINGRIVKEI

SEQ ID NO: 178749 - protein, 191 aa, Unknown
  Bacterial polypetide isolated from the Sargasso Sea
MKDFIEGIVAPIDRDNIDTDQIIPTEYLKSIKKFGYEDYLFDGWRYKDQGRLGMKKAERKINHEFILNNSPYDKSKVLLTRDNFGCGSSREHAVWALRDFGIEVVIASSFGDIFYNNCFKNGVLPLKLKKTEIEELFSLSTDNPVTISVNIKDKVILFKDKLSIYFDLDDNLAERIIYGLDEIDITLKDSN

SEQ ID NO: 178750 - protein, 321 aa, Unknown
  Bacterial polypetide isolated from the Sargasso Sea
MVICLIYIDRHLVHEVTSPQAFEGLRLNNRKVKFPEFTLAVADHNVPTTDRSKGIENKESALQVETLEKNCKDNNIEFYGLTDVRQGIVHVIGPEQGFTQPGMTIVCGDSHTATHGAFGALAFGIGTSEVEHVLATQTLIQSKSKNMKIEVNGNLPNGVTAKDIILNIIGKIGTAGGTGYVIEYAGQTIKNLSMEERMTICNMSIEAGARAGLVAPDEKTINFIKGKPMAPKGDNWDKAKEFWLSLKSDDNAKFDRIEKLQAEEIIPSVTWGTSPQDVLPINSRVPTPDNFKDEDKKKSVKRALDYMGFLGNEKLDEVKID

SEQ ID NO: 178751 - protein, 317 aa, Unknown
  Bacterial polypetide isolated from the Sargasso Sea
VSQHRTDYLGIKDPLSKIQIEALEKNCEEFGVTLFGINDPRQGIVHVIGPEQGITQPGMTIVCGDSHTATHGAFGALAFGIGTSEVEHVLATQTLAMEKPKTMKVEVIGDVSDGVGPKDIILGIIRKIGTGGGAGHVIEYVGDVIKNMSMENRMTICNMSIEGGARAGMIAPDETTFNYLKDKNYAPKDSDWNDAINEWGELFSDDDAAFDKVVTINAGELEPSVSWGTNPSQVIFINDEIPHPDNFQDESDKEAAIRALEYMDLEPGIKINEISLDRVFIGSCTNGRIEDLREAAQVIKGKKVSETVGAMVVPGST

SEQ ID NO: 178752 - protein, 106 aa, Unknown
  Bacterial polypetide isolated from the Sargasso Sea
TPVDVCFIGSCTNGRISDLRVAAKVLKNKKVSKNVKAFVVPGSEKVATEAKQEGLDKIFKDSGFQWREPGCSMCLAMNADKLIGNQVSASSSNRNFKGRQGSPSGR

SEQ ID NO: 178753 - protein, 210 aa, Unknown
  Bacterial polypetide isolated from the Sargasso Sea
NHAKEYWKTLKSDDDAKFDKEITIDVSKIKPQVTWGTSPEMVLNYDESIPTVFDTKDENKKNVELARDYMGIENETKLSDLTFDKVFIGSCTNSRIEDLRQAAEIVKGKTIASNISEAIVVPGSGLVKEQAENEGLDKVFTDAGFIWRDPGCSMCLGMNPDQLKPYERCASTSNRNFEGRQGYLGRTHLMSPIMAAYTAINGTIGDPYEI

SEQ ID NO: 178754 - protein, 142 aa, Unknown
  Bacterial polypetide isolated from the Sargasso Sea
KPYTESKILLGRDNFGCGSSREHAVWALRDFGIKAVIASSFGDIFYNNCFKNGVLPIKLEKENIERLFDLVKNKAVEFSINLQQRIIHLNDKDKIKFKVDAHLIDRIIFGLDDVDISLKEKDKIMLFEKNRKISKPWIYVNE

SEQ ID NO: 178755 - protein, 283 aa, Unknown
  Bacterial polypetide isolated from the Sargasso Sea
MPYTIYDKIWNEHLVNEQDDGTSLLFVDRHLIHEVTSPQAFEGLRNSKRKVRQPKLTLAVADHNVPTTDRSKGISDHESKIQVETLDTNCKEFGIQIFGMNDKRQGIVHIIGPEQGFTQPGTIIVCGDSHTATHGAFGALAFGIGTSEVEHVLATQTLVQKKSKNFRINVNGNLPIGVTSKDVILQIIGKIGTAGGTGYVIEYAGDLISNLSVENRMTICNMTIEGGARAGLIQPDQKVFDYLKDKPTSPKKENWEKAIEYWSNLKSDEGANFDKEINLSGND

SEQ ID NO: 178756 - protein, 139 aa, Unknown
  Bacterial polypetide isolated from the Sargasso Sea
LDTRPFNNSKILITGKNFGCGSSREHAPWALLDFGIKVIISESFADIFYNNCFKNGILPIVAKNEIINELKDYSQRKENIEVKLEEQEIVYGNKIFKFELDIFKKKCLLEGLDDIALSLKKLKNIENFENKISQNKPWL

SEQ ID NO: 178757 - protein, 250 aa, Unknown
  Bacterial polypetide isolated from the Sargasso Sea
MTVCNMTIEAGARAGLIAPDDKTFKYLKDKTMSPKGENWDKAINYWKTLFSDDDCKFDKEIIIEAKEIEPLVTWGTSPQDVLPITGMVPDPSKESDEDRKMAMKRSLEYMGLKANTKISDIKIDKIFIGSCTNGRIEDLRLAANLLKGKKISKSVSAMVVPGSGLVKAQAEEEGLDKIFTDAGFEWREPGCSMCLGMNPDQLKPKERCASTSNRNFEGRQGRGGRTHLVSPGMAVAAAIKGHLTDVREIQ

SEQ ID NO: 178758 - protein, 314 aa, Unknown
  Bacterial polypetide isolated from the Sargasso Sea
STFAVADHNVPTSDRSKGIENKESRIQVETLEKNCKDFDVTLFPLLDSRQGIVHIVGPEQGITQPGMTIVCGDSHTATHGAFGALAFGIGTSEVEHVLATQTLIQKPAKNMRISVEGKLNLGVTAKDIILHIIGKIGTAGGTGYVIEYAGNAISSLSMEGRMTICNMSIEAGARAGLIAPDEKTFEYIKGRPYAPSGDNWNKALEFWKSLPSDEGVKYDEEILINAQDISPQITWGTSPQDVVAINGIVPNPQEESNPNRKKAMERSLEYMGLEPKQEIQKIKIDKVFIGSCTNGRIEDLREVAKVVEGKKVSV

SEQ ID NO: 178759 - protein, 194 aa, Unknown
  Bacterial polypetide isolated from the Sargasso Sea
HSDPEANFDKEIQIFVSSLKPQVTWGTSPEMVIDIDSEIPCPRNESEKLALEYMGLQEGMKMEEIKLDQIFIGSCTNSRIEDLRVASSIVKGNKVSSNIKRAIVVPGSGLVDQQAKEEGIDKIFTEAGFEWRSPGCSMCLGMNPDQISEGQHCASTSNRNFEGRQGYKGRTHLVSPATAAASALSGNFADPRGS

SEQ ID NO: 178760 - protein, 210 aa, Unknown
  Bacterial polypetide isolated from the Sargasso Sea
MSKPRTLFDKIWEAHLVHSDPDAASIIYIDRHLVHEVTSPQAFEGLRNSNRTVRSPERTLAVADHNIPTSDRDKGITDNESRIQVETLGKNASDFSIPYFKMEDIRQGIVHVIGPEQGFTQPGMTIVCGDSHTATHGAFGALAFGIGTSEVEHVLATQTLIQKPAKNMLVEVNGDLPKGVTAKDIILEIIGRIGTAGGTGYVIEYAGSAI

SEQ ID NO: 178761 - protein, 234 aa, Unknown
  Bacterial polypetide isolated from the Sargasso Sea
MKTLYDKLWEEHHVIQLDSGESLLYIDRHYLHEVTSPQAFEGLEKKNLAPWRLNANIATPDHNVPTIRGKTFDVDQIDDNISKIQVVELDKNCSKFGIKQFDITSENQGIVHVIGPELGYTLPGMTIVCGDSHTSTHGAFGCLAMGIGTSEVEHVLATQTLKTTKLKNMRVCFEGSPNEEITSKDIVLYLIRKIGTAGGNEHAIEFSGSYIKSISMEARMTICNMSIEAGAKVD

SEQ ID NO: 178762 - protein, 231 aa, Unknown
  Bacterial polypetide isolated from the Sargasso Sea
MSFTLYDKLWNLHEVSRREDGTYLLYIDRHLIHEVTSPQAFEGLKLAGRKPWRISANIATPDHNVPTTDRDKGIAGINDDVSKLQVVTLDDNCKEHEILQFDIHDKRQGIVHVVGPEQGLTLPGMTIVCGDSHTSTHGALATLSMGIGTSEVEHVLATQCLKTSKLKNMRVNISGELQEGVTPKDVTLAVIGRIGTAGGTGYAIEYAGSVIENMSIEGRMTVCNMAIEAGA

SEQ ID NO: 178763 - protein, 220 aa, Unknown
  Bacterial polypetide isolated from the Sargasso Sea
MHSTLYDKLWNEHFVTSFDTGESLIYIDRHYLHEVTSPQAFEGLIKKNIKPWRVDANIATPDHNVPTLRTEGFAIESIVDEISKIQVKELDKNCDRFGIKQFDIKSLNQGIVHVIGPELGYTLPGMTIVCGDSHTSTHGAFGCLAMGIGTSEVEHVLATQCLKISKLKNMRVNFEGIPSPDITSKDVILFLIRTIGVSGGNGHAIEFAGSYIENISMEAR

SEQ ID NO: 178764 - protein, 326 aa, Unknown
  Bacterial polypetide isolated from the Sargasso Sea
YIDRHLVHEVTSPQAFEGLKIANRSVRKPNFTLATADHNIPTTNRDEGISDPESKLQVDTLEENCREHGITFLSMSDKRQGIVHIIGPEQGFTQPGMTIVCGDSHTSTHGAFGALAWGIGTSEVEHVLATQTLVQTKAKNMQINIQGELPLGVTAKDIVLKIIQTIGTAGGTGYVIEYTGDAIKSLTMEGRMTVCNMSIEAGARAGLISPDEKTIEYLKGRPFSPAENEYQSASDYWLSLASDEGAAYDKTVNIDASDIIPQVTWGTSPEDVVSIDGLVPNPEDERDETKKKSMIRALEYMGLVPNTPLKEIKVDKVFIGSCTNGR

SEQ ID NO: 178765 - protein, 287 aa, Unknown
  Bacterial polypetide isolated from the Sargasso Sea
MFEKIWNAHLVHEQEGNSIVYIDRHLVHEVTSPQAFDGLRISGRSVVHPELTYAVPDHNVPTKNQDKPIEDPIAALQVETLRNNCKEFGITLFDLGDERSGIVHVMGPEQGLTLPWSTIVCGDSHTATHGAFGALAFGIGTSEVEHVLATQTLQQKKPKTMLVEVEGILPKNVTPKDIILAIIGKIGTAGGTGYVIEYAGEAIRSMSMEGRMTLCNMTIEAGARAGMVAPDETTFEYLKDKPFSPKGDAFFEAISVWKKLPSDEGAEFDISVNINAQDVLPQVTWGT

SEQ ID NO: 178766 - protein, 305 aa, Unknown
  Bacterial polypetide isolated from the Sargasso Sea
DRALGIKDPLSKKQIDALENNCSEFGITIFGVNDPRQGIVHVIGPEQGITQPGMTIVCGDSHTATHGAFGALAFGIGTSEVEHVLATQTLAMSKPKTMKVEVIGEMNGRITPKDLILGIIREIGTGGGAGHVIEYSGEVIKKMSMENRMTICNMSIEGGARAGMIAPDETTYEYLKNKNYAPKDEEWKNAIAEWKNLYSDDDAEFDKVVEINVDKLKPSISWGTNPSQVIFIDEEIPSPDSFKNDADKEAAERALEYMDLKPGQKINEIPLDRVFIGSCTNGRIEDLRAAAKIIDGGKVHENINA

SEQ ID NO: 178767 - protein, 301 aa, Unknown
  Bacterial polypetide isolated from the Sargasso Sea
GIGTSEVEHVLATQTLIQKPAKNMRIIVNGELGLGVTAKDIILHIIGQIGTAGGTGYVIEYSGEAISNLSMEGRMTICNMSIEAGARAGLIAPDEKTFEYIKGRPYAPSGDNWDKAISFWKSLPSDDGAKYDKEIVIDAKEISPQITWGTSPQDVVAIKGNVPDPDNEKNPDRKKAMERSLEYMGLEPKQEIQKIKVDKVFIGSCTNGRIEDLREVAKVVKGKKVTVESMIVPGSGLVKKQAEDEGLDKIFTEAGFDWREPGCSMCLAMNPDQLKPKERCASTSNRNFEGRQGREGRTHLV

SEQ ID NO: 178768 - protein, 94 aa, Unknown
  Bacterial polypetide isolated from the Sargasso Sea
MPQTLYDKIWNQHLVHQQDDGTSLLFVDRHLVHEVTSPQAFEGLRTSNRKVRQPSLTLAVADHNVPTTDRSKGIEDEDSRIQVETLEKNLKNWN

SEQ ID NO: 178769 - protein, 219 aa, Unknown
  Bacterial polypetide isolated from the Sargasso Sea
MSKTIYDKIWEEHLVHEQQDGTSLLFVDRHLIHEVTSPQAFEGLRKSKRKVRQPNLTLAVADHNVPTTDRSKGISDQESKIQVDTLDKNCMEFGVQLFGMDDKRQGIVHIIGPEQGFTQPGTIIVCGDSHTATHGAFGALAFGIGTSEVEHVLATQTLVQKKSKNFRINVNGELSLGVTSKDVILQIIGKIGTAGGTGYVIEYAGNLISSLSVEQRMTI

SEQ ID NO: 178770 - protein, 213 aa, Unknown
  Bacterial polypetide isolated from the Sargasso Sea
MKSNSEGLIIDGVVAHIDRDNIDTDQIIPTEYLKSIKKFGFEDYLFDGWRYKDDGKLGVTKDERVIDENFILNKNPFNESKILLTRDNFGCGSSREHAVWALRDFGIKAVIASSFGDIFYNNSFKNGVLPIILEKKEIDFLFNQTQQKVLELSINLQKKEINCGEKTISFHVDKHLVDRIIYGLDDVDITLKEKDKIFDFERTRIEERPWIFK

SEQ ID NO: 178771 - protein, 78 aa, Unknown
  Bacterial polypetide isolated from the Sargasso Sea
EGIAQKLQEAGFEWRLAGCSMCLAMNPDQLSPKERCAATSNRNFEGRQGRGGRTHLMSPAMAAAAAVTGFLTDVRNLM

SEQ ID NO: 178772 - protein, 315 aa, Unknown
  Bacterial polypetide isolated from the Sargasso Sea
QGRKVRKPEFTLAVADHNVPTSDRSKGISDKESRIQVEVLRKNCKEFGVELFDMNDKRQGIVHIIGPEQGFTQPGSVIVCGDSHTATHGAFGALAFGIGTSEVEHVLATQTLIQKKSKNFRINVNGKLPVGVTSKDIILKIIGTIGTAGGTGYVIEFAGEVIENLSMEQRMTICNMTIEAGARAGLIAPDEKTFEYLKGKPKSPKGQNWEMAVNYWKKLKSDKDSKFDKEINIDANKIEPLVTWGTSPQDVTSVNGQVPDPEKENDKEKKDSMYRSLKYMGLKPNMKISEIKIDKVFIGSCTNGRIEDLRLATKI

SEQ ID NO: 178773 - protein, 201 aa, Unknown
  Bacterial polypetide isolated from the Sargasso Sea
MNKFISIKSVPAYLPIVNIDTDMIIPKQFLKTIKRTGLGKNLFFEMRYDQSGKEIDDFILNNRPYNNSKILIAGKNFGCGSSREHAPWALMDFGITCVISSSYADIFYNNCFKNGILPITISEDQIKEISEYSNRKEEISVNLPEQTISFGNKEIKFEIDQFKKKCLIEGLDDIALSLEKSEKIVSYENKIKEAKPWIFND

SEQ ID NO: 178774 - protein, 87 aa, Unknown
  Bacterial polypetide isolated from the Sargasso Sea
MSTPKTLYDKIWNDHLVSENEDGTSIIYIDRHLVHEVTSPQAFEGLKIANRSVRKPNFTLATADHNIPTTNRDEGISDPESKLQVDT

SEQ ID NO: 178775 - protein, 184 aa, Unknown
  Bacterial polypetide isolated from the Sargasso Sea
VEPTVTWGITPGQSVSINQQIPLLDDLSPNDKLLAKEAYKYMSFKPGQLIKNTPVDVCFIGSCTNGRISDLRVAAKVLKDKKVSKNVKAFVVPGSEKVAHEAKQEGIDQIFKDSGFQWREPGCSMCLAMNSDKLIGNQVSASSSNRNFKGRQGSPNGRTLLMSPAMVAAAAINGKVSDVRELIN

SEQ ID NO: 178776 - protein, 134 aa, Unknown
  Bacterial polypetide isolated from the Sargasso Sea
MTDIKIDRIFIGSCTNGRIGDLREVAKIVKDKKVAQHVNAMIVPGSGLVKQQAEQEGLDKIFKHAGFDWREPGCSMCLAMNADKLNPKERCASTSNRNFEGRQGRGGRTHLVSPAMAAAAAVDGHLTDVRSHQN

SEQ ID NO: 178777 - protein, 167 aa, Unknown
  Bacterial polypetide isolated from the Sargasso Sea
MKKFNILKGIPANLPMINVDTDMIIPKQFLKTIKRTGLGKSLFFEMRYDDQGKEIKEFVLNKEPYKSSKILIVGKNFGCGSSREHAAWSLLDFGIKSIISSSFADIFYNNCFKNGMLPIILDEKKIQQLAEYSERKENIEINLQDQEILFGKFKIQFEIDSFKKNVY

SEQ ID NO: 178778 - protein, 285 aa, Unknown
  Bacterial polypetide isolated from the Sargasso Sea
MSTTLYDKIWNDHLVDQQDDGTSLLFVDRHLIHEVTSPQAFEGLRNSNRKVRHPNLTLAVADHNVPTTDRSKGISDEESKIQVDTLEANCKEFGVKLFGMDDKRQGIVHIIGPEQGFTQPGTVIVCGDSHTATHGAFGALAFGIGTSEVEHVLATQTLVQKKAKNFRINVNGELPLGVTSKDVILQIIGKIGTAGGTGSVVEYAGDLIRSLSVEQRMTICNMTIEGGARAGLIAPDEKIFEYLKGKPMSPKSENWDKALNYWETLKTDSDASFDKEISLNANEIY

SEQ ID NO: 178779 - protein, 201 aa, Unknown
  Bacterial polypetide isolated from the Sargasso Sea
MNWSESLIATAAPLLMDNVDTDQIIPSREMKTISKKGLKKGLFANWQYNYLDGKQIGKNDDFILNKKAFEDTKILVSGKNFGCGSSREHAVWALKDFGINVVVAKSFGRIFKNNCARNQLLTIELADEYIDHIVDLLVRGESHNKITIDLKKQTLTTPENKIINYEVDPYLLGMLLKNQDFIDRSLSYEDSIDEFVRQDKK

SEQ ID NO: 178780 - protein, 285 aa, Unknown
  Bacterial polypetide isolated from the Sargasso Sea
AFEGLRNSKRKVRHPNLTLAVADHNVPTTDRTKGISDQESKIQVDTLEANCKEFGVQLFGMDDKRQGIVHIIGPEQGFTQPGTVIVCGDSHTATHGAFGALAFGIGTSEVEHVLATQTLVQKKANNFRINVNGELPLGVTSKDVILQIIGKIGTAGGTGCVVEYAGDLIRSLTVEQRMTICNMTIEGGARAGLIAPDEKIFEYLKGKPMSPKDENWEKAVNYWQTLKTDTGASFDKEISLNADEILPMITWGTSPQDVITIDGKVPNPDNESKQDKKNSIERALN

SEQ ID NO: 178781 - protein, 192 aa, Unknown
  Bacterial polypetide isolated from the Sargasso Sea
MSFTLYDKLWNFHEVSRREDGTYLLYIDRHLIHEVTSPQAFEGLKLAGRQPWRISANIATPDHNVPTTDRDKGIAGINDEVSKLQVVTLDDNCKEHEILQFDIHDKRQGIVHVVGPEQGLTLPGMTIVCGDSHTSTHGALATLSMGIGTSEVEHVLATQCLKTSKLKNMRVNISGELQEGVTPKDVTLAVME

SEQ ID NO: 178782 - protein, 260 aa, Unknown
  Bacterial polypetide isolated from the Sargasso Sea
EAIRNLSMEGRMTLCNMTIEAGARAGMVAPDEKTFEYVKGRDYAPQGEAFEKAVEAWKKLPSDEGAVFDETVKLTADEVFPQVTWGTNPGMVTDINGKVPDPSDINDPAERESIHRALEYMGLEANVPVKDIQIDRVFIGSCTNSRIEDLRAVAGFVEGKKVSGSVAAMIVPGSGLVKQQAESEGLNTIFENAGFEWREPGCSMCLAMNDDVLKPGERCASTSNRNFEGRQGKGSRTHLVSPIMAAAAAIAGTFADPRTL

SEQ ID NO: 178783 - protein, 295 aa, Unknown
  Bacterial polypetide isolated from the Sargasso Sea
NVPTSDRTKGIKNKESRIQVETLEKNCKDFDVTLFPLLDIRQGIVHIVGPEQGITQPGMTIVCGDSHTATHGAFGALAFGIGTSEVEHVLATQTLIQNPAKNMKIEVIGKLNLGVTAKDIILHIIGQIGTAGGTGYVIEYAGDTISNLSMEGRMTICNMSIEAGARAGLIAPDDKTFEYIKGRPYAPEGENWDQAIKFWKSLPSDEEAIYDKQIIIQAEDISPQITWGTSPQDVVAINGEVPNPNEESNPSRKKAMERSIEYMGLEPNQEIQKIKIDKVFIGSCTNGRIEDLREV

SEQ ID NO: 178784 - protein, 189 aa, Unknown
  Bacterial polypetide isolated from the Sargasso Sea
KEIHIKAEEISPQITWGTSPQDVVPINGKVPNPETIEDLNRKKAVERSLEYMGLEPDQEIEKIKIDKVFIGSCTNGRIEDLREVARVVEGKKVSVDSMIVPGSGLVKEQAESEGLDKIFIEAGFDWREPGCSMCLAMNPDQLKPKERCASTSNRNFEGRQGREGRTHLVSPVIAAASAIKGTFAQESDL

SEQ ID NO: 178785 - protein, 191 aa, Unknown
  Bacterial polypetide isolated from the Sargasso Sea
MSKKTLFDKIWESHIVDERNDGTYLIYIDRHLVHEVTSPQAFEGLRNANRKVRQPKRTLAVPDHNVPTTVDRLKHIEDEDSRIQLNILEKNVKEFGIPYIPMDDIRQGIVHIIGPEQGLTLPGMTIVCGDSHTATHGAFGSLAFGIGTSEVEHVLATQTLPMKRPKNMRVNVVGELGFGVEPKDLILTIME

SEQ ID NO: 178786 - protein, 116 aa, Unknown
  Bacterial polypetide isolated from the Sargasso Sea
MIDGIVSYIDRDNIDTDQIIPTEYLKSIKKFGYEDYLFDGWRYKDDGKLGVKKEERDINKDFILNNKPFSESKILLTRDNFGCGSSREHAVWALRDFGIKAVIASSFGDIFYNNWF

SEQ ID NO: 178787 - protein, 173 aa, Unknown
  Bacterial polypetide isolated from the Sargasso Sea
GTSPEMVVNYDDEIPTPMNVSEDNKKNIELARNYMGIQDESKLSDLVFDKVFIGSCTNSRIEDLRQAAEIVKGKTIANNIIEAIVVPGSGMVKEQAEMEGLDEVFKEAGFIWRDPGCSMCLGMNPDQLKPYERCASTSNRNFEGRQGYLGRTHLMSPIMAAYTAINGTVGEPS

SEQ ID NO: 178788 - protein, 140 aa, Unknown
  Bacterial polypetide isolated from the Sargasso Sea
LKPNTKVKDIKIDKVFIGSCTNGRIEDIREAAKILKDKKIASHVNAIIVPGSGLVKEQAEQEGLDKIFINSGFEWREPGCSMCLAMNADKLKPEERCASTSNRNFEGRQGRGGRTHLVSPAMAAAAAISGNLDDVRKYQN

SEQ ID NO: 178789 - protein, 149 aa, Unknown
  Bacterial polypetide isolated from the Sargasso Sea
MKKFTNIKSIPAYLPIVNIDTDMIIPKQFLKTIKRTGLGKNLFFEMRYDEKGNKINNFILNNDPYTQSKILVAGKNFGCGSSREHAPWALLDFGITCVISSSFADIFYNNCFKNGILPIALSEEEIKQISEYSNRKEEIAVNLSDQKIV

SEQ ID NO: 178790 - protein, 133 aa, Unknown
  Bacterial polypetide isolated from the Sargasso Sea
TDIKVDRIFIGSCTNGRIGDLRDAAKIIEGKKVAQHVNAMVVPGSGLVKQQAEEEGIDKIFKQAGFEWREPGCSMCLAMNADKLNPKERCASTSNRNFEGRQGRGGRTHLLSPAMAAAAAIDGHLTDVRKFKN

SEQ ID NO: 178791 - protein, 168 aa, Unknown
  Bacterial polypetide isolated from the Sargasso Sea
MKKFTILKGIPANLQMMNVDTDMIIPKQFLKTIKRTGLGKSLFFEMRYDEKGKANPTFILNKEPYNKSSILLVGKNFGCGSSREHAPWALLDFGIKCIISPSFADIFYNNCFKNGMLPIVLNEKRIEDLIQYSERKESIEINLEEQEIKFGNKKIQFEIDPFKKKCLL

SEQ ID NO: 178792 - protein, 94 aa, Unknown
  Bacterial polypetide isolated from the Sargasso Sea
VVPGSEKVANEAKQEGLDQIFKDSGFQWREPGCSMCLAMNSDKLIGNQVSASSSNRNFKGRQGSPSGRTLLMSPAMVAAAAINGKVSDVREFIN

SEQ ID NO: 178793 - protein, 169 aa, Unknown
  Bacterial polypetide isolated from the Sargasso Sea
VLPINGLVPDPEKETDEEKKQSMYRSLDYMGLKPNMKMSEIKIDKVFIGSCTNGRIEDLRVATKILKGKKIASHVKAMVVPGSGLVKKQAEIEGLDKIFKDSGFEWREPGCSMCLGMNEDQLSPKERCASTSNRNFEGRQGRGGRTHLVSPGMAVAAAIKGYLTDVRKI

SEQ ID NO: 178794 - protein, 140 aa, Unknown
  Bacterial polypetide isolated from the Sargasso Sea
MDKFSIIKSIPAHLPISNIDTDMIIPKQFLKTIKRTGLGKNLFYELRFDEKGDLIDNFVLNSQPFQKSKILIAGKNFGCGSSREHAPWALKDFGIRCILSPSFADIFYNNCFKNGILPIVLNNTQLEELSIYSKNKQEIE

SEQ ID NO: 178795 - protein, 110 aa, Unknown
  Bacterial polypetide isolated from the Sargasso Sea
MKNPNPKTLFDKIWHHHLVNQQEDGTCLIYIDRHLVHEVTSPQAFEGLRDNNRKVHRPESTFAVADHNVPTSDRSKGIDNEESRIQVETLENNCKEFGVTIFPLLDRRQG

SEQ ID NO: 178796 - protein, 287 aa, Unknown
  Bacterial polypetide isolated from the Sargasso Sea
LYDKIWNEHLVNQQEDGTALLFVDRHLIHEVTSPQAFEGIRNSKRKVRQPNLTLAVADHNVPTTDRSKGISDQDSKIQVDTLAENCKEFGIQLFGMNDKRQGIVHIIGPEQGFTQPGTIIVCGDSHTATHGAFGSLAFGIGTSEVEHVLVTQTLIQKKAKNFRINVNGKLPIGVTSKDVILQIIGKIGTAGGTGHVIEYAGSLISSLSVEQRMTICNMSIEGGARAGLIEPDKKIFDYLKNKPMSPKNENWDKAVDYWSGLKSDSGANFDKEENLNAEEIKPNGDMG

SEQ ID NO: 178797 - protein, 296 aa, Unknown
  Bacterial polypetide isolated from the Sargasso Sea
VLATQTLLQYKPKNMKIEINGEIGKNITSKDIILKIISQIGTSAGTGHVIEFMGSTVNKMSIEERMTICNMSIEAGAKAGMVSPDIKTFEYLKHKKYSPKNKQWDKALDKWTKLYTDKNAYFDKSYNLNVSDLKPMVTWGTSPEDGICINEVIPDPLSVRDKEKQKAIKKSLEYMGLYPGKKMLDVPIQKVFIGSCTNGRIEDLRVASSVIKGKKVAKNLQAIVVPGSGVVKKMAEDEGLQEIFIDAGFEWRAPGCSMCLGMNPDQLEDGERCASTSNRNFEGRQGRGGRTHLVSP

SEQ ID NO: 178798 - protein, 112 aa, Unknown
  Bacterial polypetide isolated from the Sargasso Sea
MAKTLYDKVWQAHIIDQIGEDSLIYIDRHLIHEVTSPQAFAGLNEKGRKVRRPDRTVGTMDHSISTRSLAIDACGPANALQLQTLAKNCEDHGIQLFPVGHQKQGIVHVMGP

SEQ ID NO: 178799 - protein, 139 aa, Unknown
  Bacterial polypetide isolated from the Sargasso Sea
LKANTKISDIKIDKIFIGSCTNGRIEDLRLAAELLKGKKIASNVSAMVVPGSGLVKAQAEQEGLDKIFIQAGFEWREPGCSMCLGMNPDQLKPKERCASTSNRNFEGRQGRGGRTHLVSPGMAIAAAINGHLSDVREIK

SEQ ID NO: 178800 - protein, 118 aa, Unknown
  Bacterial polypetide isolated from the Sargasso Sea
MEKFFKLKSIPSYLPLQNIDTDMIIPKQFLKTIKRTGLGKSLFYEMRYDESGEIIKEFILNKEPYNKSKILLAGKNFGCGSSREHAPWALSDFGIKCVISPSFADIFYNNCFKNGILP

SEQ ID NO: 178801 - protein, 120 aa, Unknown
  Bacterial polypetide isolated from the Sargasso Sea
MSTTLYDKIWNDHLVDQQDDGTSLLFVDRHLIHEVTSPQAFEGLRNSNRKVRHPNLTLAVADHNVPTTDRSKGISDEESKIQVDTLEANCKEFGVQLFGMDDKRQGIVHIIGPEQGLLNQ

SEQ ID NO: 178802 - protein, 83 aa, Unknown
  Bacterial polypetide isolated from the Sargasso Sea
MKNNNNPKTLFDKIWLNHLVDQQEDGTSLIYIDRHLVHEVTSPQAFEGLRNSGRKVRRPNYTFAVADHNVPTSDRTKGIKNKE

SEQ ID NO: 178803 - protein, 189 aa, Unknown
  Bacterial polypetide isolated from the Sargasso Sea
MDGDEIKPMVTWGTSPQDVVEIDGKVPNPDNENDEDRKNSITRSLNYMGLKPNTNIKDIKIDKVFIGSCTNGRIEDLRDAAKILKDKKIASHVNAIIVPGSGLVKEQAEQEGLDKIFKQSGFEWREPGCSMCLAMNADKLKPEERCASTSNRNFEGRQGRGGRTHLVSPGMAAAAAISGNLDDVRKYEN

SEQ ID NO: 178804 - protein, 144 aa, Unknown
  Bacterial polypetide isolated from the Sargasso Sea
TQSLKVMKLKNMRINFEGSIQKGVSSKDIVLYLIRTIGTAGGTGYAVEFAGSYIRNISMEARMTICNMSIEAGAKVGLVSVDDKTIDYVKKHSNLEANLINDAIIKWETLRTDKEAIFDMEIDIDVSKINPQVTWGTSPEMVID

SEQ ID NO: 178805 - protein, 219 aa, Unknown
  Bacterial polypetide isolated from the Sargasso Sea
IDHMHLKAKNGKRLFEFWKSLPSDDDAKYDKEININGEDITPQITWGTSPQDVVPINGKVPNPSSIEDTNRKKSIERSLEYMGLEPDQEINKIKIDKVFIGSCTNGRIEDLREVARVVKGKKVSVDSMIVPGSGLVKEQAESEGLDKIFIEAGFDWREPGCSMCLAMNPDQLKPRERCASTSNRNFEGRQGREGRTHLVSPVVAAASAIKGSFAQETDL

SEQ ID NO: 178806 - protein, 84 aa, Unknown
  Bacterial polypetide isolated from the Sargasso Sea
MTTPKTLYDKIWDAHVAHEADDGTCLLYIDRHLVHEVTSPQAFEGLRISGRGVRAPNKTIAVPDHNVPTTTDREGGIDNEESRI

SEQ ID NO: 178807 - protein, 277 aa, Unknown
  Bacterial polypetide isolated from the Sargasso Sea
FDKIWEHHLVDRQEDGTCLIYIDRHLVHEVTSPQAFEGLRNNNRKVRRPESTFAVADHNVPTSDRSKGIENKESRIQVETLEKNCKDFDVTLFPLLDSRQGIVHIVGPEQGITQPGMTIVCGDSHTATHGAFGALAFGIGTSEVEHVLATQTLIQKPAKNMRISVEGKLSLGVTAKDIILHIIGKIGTAGGTGYVIEYAGNAISSLSMEGRMTICNMSIEAGARAGLIAPDDKTFEYIKGRPYAPSGDNWDKALEFWKSLPSDQGAKYDEEILINAE

SEQ ID NO: 178808 - protein, 302 aa, Unknown
  Bacterial polypetide isolated from the Sargasso Sea
MGVELYSMNDIRQGICHVVGPEQGFTLPGTTLVCGDSHTATHGAFGSMSFGIGTSEVEHVLATQTLILQKCRNMRVTVNGSLSDGVTAKDLILAVIGKIGTAGGTGAAIEFSGAAFESLSMEGRMTVCNMTIEAGARVGLFAPDETTFEYLKGRPKSPKGGAWELAVKYWKTLKTDSKAKFDEEVVIDASDIHPQVTWGTSPEDVTTINGQVPNPADIEDENRRSKMERSLEYMGLEAGMPMKDIKINTAFIGSCTNSRIEDIRAAAAVAKGRKVATGVQALVVPGSGLVKELAEQEGLDKI

SEQ ID NO: 178809 - protein, 177 aa, Unknown
  Bacterial polypetide isolated from the Sargasso Sea
MKKFKKITAIAAPLPMINVDTDMIIPKQFLKTIKRSGLGKNLFHELRYDLNGNKKNDFILNWDYYKTAQILVTGENFGCGSSREHAPWSLLDYGFRCIIAPSFADIFFNNCFKNGILPIKLNTVNTNYFIKQAENKKLITVDLDKQEVSCENGKIIKFDVDPFRKKCLLEGLDDIAL

SEQ ID NO: 178810 - protein, 121 aa, Unknown
  Bacterial polypetide isolated from the Sargasso Sea
IYRFLYNGRIEDLREVAKVVEGKKVIVNAMVVPGSGLVKQQAEKEGIDKILIKAGFDWREPGCSMCLAMNPDQLKPKERCASTSNRNFEGRQGREGRTHLVSPAVAAATALKGKLSLVEDL

SEQ ID NO: 178811 - protein, 76 aa, Unknown
  Bacterial polypetide isolated from the Sargasso Sea
MPQTLYDKIWNEHLVHQQEDGTALLFVDRHLIHEVTSPQAFEGLRNSNRKVRQPNLTLAVADHNVPTTDRSNGNRR

SEQ ID NO: 178812 - protein, 149 aa, Unknown
  Bacterial polypetide isolated from the Sargasso Sea
MIKNNPKTLFDKIWSHHLVDKQEDGTCLLYIDRHLVHEVTSPQAFEGLRNSNRKVRRPESTFAVADHNVPTSDRTKGIENKESRIQVETLEKNCDDFNVTLFPLLDSRQGIVHIVGPEQGITQPGMTIVCGDSHTATHGAFGALAFGIG

SEQ ID NO: 178813 - protein, 291 aa, Unknown
  Bacterial polypetide isolated from the Sargasso Sea
FGAFKDKNLKVKFPDRTVATVDHIVPTDNQSRPFKDNLAEQMIETLEKNCLEHKIRFFNIGSGNQGIVHVVAPELGLTQPGMTIACGDSHTSTHGAFGSIAFGIGTSQVRDVLATQTIAMNKLKVRQIWCDNKLSKGVYAKDLVLHIINELGVKAGVGFAYEFAGPAIDELSMEERMTICNMSIEGGARCGYINPDEKTFNYIKNKLCAPKNENWDKALTWWKSLKSDKNSIYDDVVKLDASKIEPTVTWGITPGQSISINQQIPLLDDLSPNDKLVAKEAYEYMSFKPGQ

SEQ ID NO: 178814 - protein, 297 aa, Unknown
  Bacterial polypetide isolated from the Sargasso Sea
RGAASGRAQPWRIDANIATPDHNVPTTRAERQGGLDAIADEVSRIQVQTLDENCDDFGILEFKMNDVRQGIVHVVGPEQGATLPGMTVVCGDSHTSTHGAFGALAHGIGTSEVEHVLATQCLVAKKMKNMQVRVEGKLPFGVTAKDIVLAVIGKIGTAGGNGHALEFAGSAIRDLSLEGRMTICNMSIEAGARVGLVAVDEKTIAYVKDRPFAPKGSDWDKAVAQWQNLVSDADAVFDTVVELAASEIKPQVSWGTSPEMVLAVDQNVPDPAVEADPVKKDSITRALKYMGLAANQP

SEQ ID NO: 178815 - protein, 183 aa, Unknown
  Bacterial polypetide isolated from the Sargasso Sea
MEPFVTLKSIPAPLPMINVDTDMIIPKQFLKTIKRSGLGKNLFHELRYDIQGNIKNDFVLNWDPYKSSKILIAGANFGCGSSREHAPWSLLDFGFKSIIAPSFADIFYNNCFKNGILPIKLDQIKVDLLMNEAEEKNEISVNLQKQIIIHQQHETINFEIDKFRKKCLIEGLDDIGLTLQKND

SEQ ID NO: 178816 - protein, 92 aa, Unknown
  Bacterial polypetide isolated from the Sargasso Sea
MIVPGSGLVKKQAEEEGLDKIFIEAGFDWREPGCSMCLAMNPDQLKPKERCASTSNRNFEGRQGREGRTHLVSPAIAAASAIKGSFSTVEDL

SEQ ID NO: 178817 - protein, 202 aa, Unknown
  Bacterial polypetide isolated from the Sargasso Sea
MAKTLYDKVWQAHIIDQIGEDSLIYIDRHLIHEVTSPQAFAGLNEKGRKVRRPDRTVGTMDHSISTRSLAIDACGPANALQLQTLAKNCEDHGIQLFPVGHQKQGIVHVMGPELGLIQPGMTVVCGDSHTATHGAFGALAFGIGTSQVEHVLATQTLKQSRAKSMLINVNGKLPVGITAKDIILAIIGKIGHAGATGHVIEY

SEQ ID NO: 178818 - protein, 271 aa, Unknown
  Bacterial polypetide isolated from the Sargasso Sea
IIGPEQGFTQPGTVIVCGDSHTATHGAFGALAFGIGTSEVEHVLATQTLVQKKAKNFRINVEGKLPLGVTSKDVILQIIGKIGTAGGTGFVIEYAGDLIRSLSVEQRMTICNMTIEGGARAGLIAPDEKIFKYLESKPMSPKGKNWDEAIEYWKSLKTDNEAKFDKEINLKADEILPMITWGTSPQDVITIDEKVPNPQNEKDQDKKNSLERALNYMGLKPNTPAKDIKIDKVFIGSCTNGRIEDLREAAKILKDKKIASHVHAMVVPGSG

SEQ ID NO: 178819 - protein, 157 aa, Unknown
  Bacterial polypetide isolated from the Sargasso Sea
MSNTLYDKIWNDHLVHQQDDGTALLFVDRHLVHEVTSPQAFEGLRNSKRKVRHPNLTLAVADHNVPTTDRSKGISDKESKIQVDTLESNCKEFGVQLFGMNDKRQGIVHIIGPEQGFTQPGTVIVCGDSHTATHGAFGALAFGIGTSEVEPCISNAN

SEQ ID NO: 178820 - protein, 240 aa, Unknown
  Bacterial polypetide isolated from the Sargasso Sea
MPYTIYDKIWNEHLVHQQEDGTSLLFVDRHLIHEVTSPQAFEGLRNSKRNVRQPKLTLAVADHNVPTTDRSKGISDKESKIQVDTLENNCKEFGIKLFGMNDKRQGIVHIIGPEQGFTQPGTIIVCGDSHTATHGAFGALAFGIGTSEVEHVLATQTLVQKKSKNFRINVNGKLSLGVTSKDVILQIIGKIGTAGGTGYVIEYSGNLISSLSVEQRMTICNMTIEGGARAGLIQPDEKIY

SEQ ID NO: 178821 - protein, 200 aa, Unknown
  Bacterial polypetide isolated from the Sargasso Sea
MEKFELLTGIAAPLPMINVDTDMIIPKQFLKTIKRSGLGKNLFHELRYDMQGNIKNDFVLNWDPYKQASILVAGDNFGCGSSREHAPWSLLDFGFKCIIAPSFADIFYNNCFKNGILPIRLDQKTVDVLMDQANQKKHLTINLKDQLIILEDGNTIEFQIDPFRKKCLLEGLDDIGLTLQKKEKIDQYEASLKNTHPWII

SEQ ID NO: 178822 - protein, 293 aa, Unknown
  Bacterial polypetide isolated from the Sargasso Sea
SIIVCGDSHTATHGAFGSLAFGIGTSEVEHVLATQTLVQKKSKNFRIKVDGKLSIGVTSKDVILQIIGKIGTAGGTGYVIEYAGSLISSLSVEQRMTICNMTIEGGARAGLIEPDEKIFNYLNGRPMSPKKENWDKALDYWSKLKSDSDADFDKEVTLDGKDILPMVTWGTSPQDVISIDGRIPNPENEADEDRKNSIERSLKYMGLKPGTAIKDVKIDKVFIGSCTNGRIEDLRDAAKIVKNKKVAQHVYAMVVPGSGLVKQQAEQEGLDKVFKDSGFDWREPGCSYVLSYE

SEQ ID NO: 178823 - protein, 297 aa, Unknown
  Bacterial polypetide isolated from the Sargasso Sea
KRKNSFTITSKDIILSIIRQIGTAGGAGHVLEYRGNAISDLSMEQRMTICNMSIEAGSRAGLVAPDEKTFDYLNKREFTPSNYDELVDGWKENLQTDPNTKFDKSYTINVDQIAPQVSWGTNPAMVCDVTENIPSPEEFGKGDSVKTHSAEKALSYMDLEPGTPVTEIQLDRIFIGSCTNSRIEDLVDVAEVVKGKSVSSNLNAMIVPGSQMVKHEAEQMGLDKIFKDANFEWRESGCSMCLGMNPDILKPGERCASTSNRNFEGRQGAGGRTHLVSPVMAAAAAIEGHFIDIREWY

SEQ ID NO: 178824 - protein, 323 aa, Unknown
  Bacterial polypetide isolated from the Sargasso Sea
MSKKKTLYDKIWEEHLILEEGDGTSLLYVDRHLVHEVTSPQAFEGLRLAGRKVMAPEKTIAVPDHNVPTTTDRTGGISNEQSRIQVEALDKNAKDFGVIYYPVDDIRQGIVHIIGPELGWTLPGMTIVCGDSHTATHGAFGALAHGIGTSEVEHVLATQTLMQKKSKNMKVEVSGELGNGVSGKDVTLSIIRETGTAGGTGHVIEYMGSVIKDLSVEGRMTVCNMAIEGGARAGLIAPDQKTFDYIKGRPHAPKGSNWELALQYWSTLYSDNGAFFDKNIHIDGGKIAPVVTWGTSPEDVLPINGFVPDPSDFDKQKSLAVKR

SEQ ID NO: 178825 - protein, 236 aa, Unknown
  Bacterial polypetide isolated from the Sargasso Sea
MSTTLYDKIWNDHLVDQQDDGTSLLFVDRHLIHEVTSPQAFEGLRNSNRKVRHPNLTLAVADHNVPTTDRSKGISDEESKIQVDTLEANCKEFGVKLFGMDDKRQGIVHIIGPEQGFTQPGTVIVCGDSHTATHGAFGALAFGIGTSEVEHVLATQTLVQKKAKNFRINVNGELPLGVTSKDVILQIIGKIGTAGGTGSVVEYAGDLIRSLSVEQRMTICNMTIEGGARAGLIAPR

SEQ ID NO: 178826 - protein, 201 aa, Unknown
  Bacterial polypetide isolated from the Sargasso Sea
MQKFTTLKSIPAYLPIVNIDTDMIIPKQFLKTIKRTGLGKNLFFEMRYDEKGKKINDFILNQNPFNNSKILIAGKNFGCGSSREHAPWALLDFGITCVISSSFADIFFSNCFKNGILPIILNEEKIKELSEYANRKEEILVDLNEEKIIYGNSEILFNVDSFKKKCLLEGLDDIALSLKKSDKIENFEKNLKKHKPWIIND

SEQ ID NO: 178827 - protein, 150 aa, Unknown
  Bacterial polypetide isolated from the Sargasso Sea
MSKTLYDKIWDDHLVHEDNDGTALLYVDRHLVHEVTSPQAFEGLRIQGRKVRKPKLTLAVPDHNVPTTDRSKGISDKQSKIQVDTLRNNCKEFGINLFDVNDKRQGIVHIIGPEQGFTQPGTVIVCGDSHTATHGAFGSLAFGIGTSEVE

SEQ ID NO: 178828 - protein, 202 aa, Unknown
  Bacterial polypetide isolated from the Sargasso Sea
MKKFNNLRSIPSYLSLQNIDTDMIIPKQFLKTIKRTGLGKSLFYEMRYDENGNLIKDFTLNKEPYNKSKILLAGKNFGCGSSREHAPWALLDFGIKCVISSSFADIFYNNCFKNGILPIKTNEQTILELSEYSKRKEEIEVNLENQEIKFGNKAVKFEIDPFKKKCLIEGLDDIGLSMEKINYIDSFEKKLETSRPWLIKND

SEQ ID NO: 178829 - protein, 178 aa, Unknown
  Bacterial polypetide isolated from the Sargasso Sea
KSKNFRISVNGSLPIGVTSKDVILQIIGKIGTAGGTGYVIEYAGNLISNLSVEQRMTICNMTIEGGARAGLIQPDEKIFQYLKGKPMSPKGENWEKALEYWHALKSDKDANFDKELTLDGSQIKPMVTWGTSPQDVVEIDGKVPNPESETDPDRKNSINRSLNYMGLKPNTNIQDIKI

SEQ ID NO: 178830 - protein, 268 aa, Unknown
  Bacterial polypetide isolated from the Sargasso Sea
NCKEFGIQIFDMNDKRQGIVHIIGPEQGFTQPGTIIVCGDSHTATHGAFGALAFGIGTSEVEHVLATQTLVQKKSKNFRINVNGSLPIGVTSKDVILQIIGKIGTAGGTGYVIEYAGELISNLSVENRMTICNMTIEGGARAGLIQPDQKIFDYLKDKPMSPKNDNWGKALEYWSNLKSDEGAHFDKEINLNGKDIKPMVTWGTSPQDVVTIDGKVPNPKNEPDPDKKNSIERSLKYMGLNSDIPVQDIKIDKVFIGSCTNGRIEDLR

SEQ ID NO: 178831 - protein, 199 aa, Unknown
  Bacterial polypetide isolated from the Sargasso Sea
MEKFNILNGIPASLSMINIDTDMIIPKQFLKTIKRTGLGKNLFYEMRYDDNGKKIADFILNNKPYDKSPILITGKNFGCGSSREHAPWALLDFGIKCIISQSFADIFYNNCFKNGMLPIVLEESQIEELTQYSKRKENIKIDLSEQEIKYGNKSIRFEVDPFKKKCLINGLDDISLSLKQSEKISSYEDKIRKNRPWIS

SEQ ID NO: 178832 - protein, 121 aa, Unknown
  Bacterial polypetide isolated from the Sargasso Sea
MKKFVSLKSIPAYLPIVNIDTDMIIPKQFLKTIKRTGLGKNLFHEMRYDNDGNIIKDFILNKKPFDVSKILIAGNNFGCGSSREHAPWALLDFGITCVISSSYADIFYNNCFKNGIITNNF

SEQ ID NO: 178833 - protein, 88 aa, Unknown
  Bacterial polypetide isolated from the Sargasso Sea
GLVKEQAEQDCLDKIFIESGFEWREPGCSMCLAMNADKLKPQERCASTSNRNFEGRQGRGGRTHLVSPGMAAAAAIAGNLDDVRKYQN

SEQ ID NO: 178834 - protein, 161 aa, Unknown
  Bacterial polypetide isolated from the Sargasso Sea
FFEMRYDDEGKEIDKFVLNQKPFNQSKILIAGKNFGCGSSREHAPWALLDFGITCVISSSYADIFYNNCFKNGILPIKIEENKIKEISEYSKRQEEISIDLEKQKILFGNNEISFDIDQFKKKCLLEGLDDIALSLEKSEKIKFFENNLKEKKPWIFNDKN

SEQ ID NO: 178835 - protein, 167 aa, Unknown
  Bacterial polypetide isolated from the Sargasso Sea
MGKIPNPENEKNIDKKNSINRSLDYMGLKPDVKVQDIKIDKVFIGSCTNGRIEDLREAAQILKNKKKASHVHGMVVPGSGLVKEQAEQEGLDKIFIESGFEWREPGCSMCLAMNADKLKPQERCASTSNRNFEGRQGRGGRTHLVSPGMAAAAAIAGNLDDVRKYQN

SEQ ID NO: 178836 - protein, 124 aa, Unknown
  Bacterial polypetide isolated from the Sargasso Sea
MKKFTSLKSIPAYLPIVNIDTDMIIPKQFLKTIKRTGLGKNLFHEMRYDDDGKNIDNFILNKSPYNNSKILIAGNNFGCGSSREHAPWALLDFGITCVISSSYADIFYNNCFKNGILPIILDEK

SEQ ID NO: 178837 - protein, 166 aa, Unknown
  Bacterial polypetide isolated from the Sargasso Sea
TGLGKNLFHEMRYDDDGKNIDNFILNKSPYSNSKILIAGNNFGCGSSREHAPWALLDFGITCVISSSYADIFYNNCFKNGILPIILDEEKIKELAEYSKRKEEIEIDLKEEKIIFGNNELKFKIDPFKKKCLIEGLDDIALSLEKSSHINEFEKKIKSARPWIFND

SEQ ID NO: 178838 - protein, 213 aa, Unknown
  Bacterial polypetide isolated from the Sargasso Sea
MKNKVIQGQAIPFTQSNIDTDAIIPKQYLKSIKKSGFGPFLFDSLRYLDPGDLNTTNDRKINPDFILNIEPFKSGNIIVANDNFGCGSSREHAVWALKDYGIEAVISSSFADIFHRNSFKNSLLLICLSKDDIKILLEDISINKYNLTIDIQSQTITTPNHRVFNFDINPSDKERIILGYDDIGLTLKHSNKIHEYEKKMKIKKPWIFEINHE

SEQ ID NO: 178839 - protein, 279 aa, Unknown
  Bacterial polypetide isolated from the Sargasso Sea
TTDRTKGIEDEDSRIQVETLEKNCNEFGIELFGMNDKRQGIVHIIGPEQGFTQPGSIIVCGDSHTATHGAFGALAFGIGTSEIEHVLATQTLLQKKSKNFRINVNGNLPVGVTSKDVILQIIGKIGTAGGTGYVIEYSGNLISSLSVEQRMTICNMTIEGGARAGLIQPDEKIFKYLKDKPMSPKNNNWDKALEYWSSLKSDTNANFDKDINIEGSEIKPMVTWGTSPQDVVEIDGKVPNPDNEIDPDRKNSINRSLNYMGLKPNMKIKDIKIDKVFIG

SEQ ID NO: 178840 - protein, 282 aa, Unknown
  Bacterial polypetide isolated from the Sargasso Sea
MPQTLYDKIWNEHLVHKQEDGTSLLFVDRHLIHEVTSPQAFEGLRNSNRIVRQPKLTLAVADHNVPTSDRSKGIDDKDSKIQVDTLEKNCKDFGIELFGMNDKRQGIVHIIGPEQGFTQPGTVIVCGDSHTATHGAFGALAFGIGTSEVEHVLATQTLVQKKAKNFRINVNGKLPTGVTSKDVILQIIGKIGTAGGTGYVIEYAGSLISSLSVEQRMTICNMTIEGGARAGLIQPDQKIFDYLKNKPKSPKNENWSQAIKYWENLKTDNSAEFDKEINLSGK

SEQ ID NO: 178841 - protein, 243 aa, Unknown
  Bacterial polypetide isolated from the Sargasso Sea
KNMNIAVNGKLKSGVTAKDIILHIIGVIGTAGGTGYVIEYTGDVIHSLSMEGRMTICNMSIEAGARAGLIAPDQKTFDYIKDRPYAPKGSEWEKAIEFWKSLPSDDDAKYDKEININAEDIAPQITWGTSPQDVVPINGKVPNPSSVEDVNRKKSIERSLEYMGLEPDQEINEIKIDKVFIGSCTNGRIEDLREVARVVKGKKVSVDSMIVPGSGLVKEQAESEGLDKIFIEAGFDWREPRMF

SEQ ID NO: 178842 - protein, 283 aa, Unknown
  Bacterial polypetide isolated from the Sargasso Sea
CKEYGITFLSMSDKRQGIVHIIGPEQGFTQPGMTIVCGDSHTSTHGAFGALAWGIGTSEVEHVLATQTLVQTKAKNMQINIQGELPLGVTAKDIVLKIIQIIGTAGGTGYVIEYTGDAIKSLTMEGRMTVCNMSIEAGARAGLISPDEKTIKYLKGRPFSPTENEYQSASDYWLSLASDDGAAYDKTVNIDASDIIPQVTWGTSPEDVVSIDGLVPNPEDESDETKKKSMIRALEYMGLVPNTPLKEVKVDKVFIGSCTNGRIEDLRAASKIAKDKKVADHVK

SEQ ID NO: 178843 - protein, 210 aa, Unknown
  Bacterial polypetide isolated from the Sargasso Sea
YSEGLIIDGVVAHIDRDTIDTDQIIPTEYLKSIKKFGFEDYLFDGWRYKDDGKLGVTKEERIIDKSFILNKEPYNESKILLSRDNFGCGSSREHAVWALRDFGIKAVIASSFGDIFYNNSFKNGLLPIILGKNEIEFLFSESKQNVLELSIDLEKKEIIYNQKCITFAVEKHLIDRIIFGLDDIDITFKDKDKIIDFEKNRISTRPWIFK

SEQ ID NO: 178844 - protein, 194 aa, Unknown
  Bacterial polypetide isolated from the Sargasso Sea
VINEINIDTDAIIPKQFLKTIERTGLGKFLFFDRRYDSSNNIKTDFILNKVPWNNARILIAGSNFGCGSSREHAPWALLDFGIRCIIAPSFADIFFNNSIKNGLLPLTLHKTSVEVLCEHALEKKLIKVSLLEKKIFYDNLKLDFNISEDVRERLLNGYDDIELTLQKKDMIEFYEKKNLSESSWRIIDNERKS

SEQ ID NO: 178845 - protein, 160 aa, Unknown
  Bacterial polypetide isolated from the Sargasso Sea
MIGNVIKYEQDNIDTDVIIPGTYLKIHDYNELATHAMEGIDPEFPSKVKEGDFIVAGKNFGCGSSREHAPIALSTCGIKAVIATSFARIFYRNSVDGAFLLPIEVNDETYQKISNSDQLEVNIEKNEIKNLTKNEVYAMKPFSEIIAKIIAAGGLFKYKK

SEQ ID NO: 178846 - protein, 315 aa, Unknown
  Bacterial polypetide isolated from the Sargasso Sea
LLYIDRHLIHEVTSPQAFEGLKLAGRKPWRISANIATPDHNVPTTDRDKGIAGINDEVSKLQVVTLDDNCKEHEILQFDIHDKRQGIVHVVGPEQGLTLPGMTIVCGDSHTSTHGALATLSMGIGTSEVEHVLATQCLKTSKLKNMRVNISGELQEGVTPKDVTLAVIGRIGTAGGTGYAIEYAGSVIENMSIEGRMTVCNMAIEAGARAGLVAYDQTTEAYIKDKPFTPKGEQWLVAKEQWQDLVSDSEAQFDKEIEIDGSFIAPQVTWGTSPEMVSDIDGVIPEPNSESIRHALSYMNLEPWKKNKDIKLDQI

SEQ ID NO: 178847 - protein, 191 aa, Unknown
  Bacterial polypetide isolated from the Sargasso Sea
MSNTLFEKIWDTHLVHEQDGNSILYIDRHLVHEVTSPQAFEGLRMAGRKVRVPQATFAVPDHNIPTRNQLEPIKDPISAKQVETLRKNCKDFGVPLFDLGDPRQGIVHVMGPEQGLTLPGSTIVCGDSHTATHGAFGALAFGIGTSEVEHVMATQTLQQKKPKTMLVEVSGTIPDNVTAKDIHPRHHRKNR

SEQ ID NO: 178848 - protein, 234 aa, Unknown
  Bacterial polypetide isolated from the Sargasso Sea
MPQTIYDKIWNDHLVHEQDDGTCLLFVDRHLVHEVTSPQAFEGLRNSNRKVRQPNLTLAVADHNVPTTDRTKGIEDEDSRIQVETLEKNCNEFGIELFGMNDKRQGIVHIIGPEQGFTQPGSIIVCGDSHTATHGAFGALAFGIGTSEIEHVLATQTLLQKKSKNFRINVNGNLPIGVTSKDVILQIIGKIGTAGGTGYVIEYSGNLVSSLSVEQRMTICNMTIEGGARAGLIE

SEQ ID NO: 178849 - protein, 206 aa, Unknown
  Bacterial polypetide isolated from the Sargasso Sea
KYWETLHSDDSADFDKSIEFDASVIKPQVSWGTSPEMTVDIDGKVPDPNDIKDKSKKQSYINALKYMDLDANQKIDSIELDKIFIGSCTNSRIEDLRCAALEVEGKRISSRIKQAIVVPGSGHVKKQAENEGLDIIFKKAGFEWRDPGCSMCLGMNDDNLNPYERCASTSNRNFEGRQGDRGRTHLVSPIIAARSSIHGCLTSEKK

SEQ ID NO: 178850 - protein, 275 aa, Unknown
  Bacterial polypetide isolated from the Sargasso Sea
WESHVVDQQDDGTCLIYIDRHLVHEVTSPQAFEGLRLANRAVRRPDATLAVADHNVPTSDRSSGIKDPESLLQVDTLTQNCLDFDIQLFEMNDVRQGIVHIIGPEQGFTQPGATIVCGDSHTATHGAFGALAFGIGTSEVEHVLATQTLLQRPAKNLRITVDGSLLPGVTAKDMILAMIGKIGTAGGTGHVIEYAGEAVKNLSMEGRMTVCNMSIEGGARAGLIAPDDVTYAYLEGRPMSPKAGAWQQALSYWKSLPSDHGAFYEKEVNLSAVDI

SEQ ID NO: 178851 - protein, 251 aa, Unknown
  Bacterial polypetide isolated from the Sargasso Sea
MTINNPKTLFDKIWEHHLVDRQEDGTCLIYIDRHLVHEVTSPQAFEGLRNNNRKVRRSESTFAVADHNVPTSDRSKGIENKESRIQVETLEKNCKDFDVTLFPLLDSRQGIVHIVGPEQGITQPGMTIVCGDSHTATHGAFGALAFGIGTSEVEHVLATQTLIQKPAKNMRISVEGKLNLGVTAKDIILHIIGKIGTAGGTGYVIEYAGNAISSLSMEGRMTICNMSIEAGARAGLIAPDEKTFEYIKGRP

SEQ ID NO: 178852 - protein, 152 aa, Unknown
  Bacterial polypetide isolated from the Sargasso Sea
MEKFIKLKSIPAHIPLMNIDTDMIIPKQFLKTIKRTGLGKSLFYEMRYDEGGKLIDKFILNNEPYSKSKILLAGKNFGCGSSREHAPWALLDFGIKCVISPSFADIFYNNCFNNGILPITINEKSIQELSEYSKRKEEIEVDLNEQVDLYGN

SEQ ID NO: 178853 - protein, 313 aa, Unknown
  Bacterial polypetide isolated from the Sargasso Sea
AVADHNVPTTDRSKGIADEDSRIQVETLNKNCKEFGVEIFGMDDKRQGIVHIIGPEQGFTQPGNIIVCGDSHTATHGAFGALAFGIGTSEVEHVLATQTLVQKKSKNFRISVNGSLPIGVTSKDVILQIIGKIGTAGGTGYVIEYAGNLISNLSVEQRMTICNMTIEGGARAGLIQPDEKIFQYLKGKPMSPKGENWEKALEYWHTLKSDKDANFDKELTLDGSQIKPMVTWGTSPQDVVEIDGKVPNPESETDPDRKNSINRSLNYMGLKPNTNIQDIKIDKVFIGSCTNGRIEDIREAAKILKDKKVASHV

SEQ ID NO: 178854 - protein, 150 aa, Unknown
  Bacterial polypetide isolated from the Sargasso Sea
MPHTIYDKIWNEHLVHQQEDGTSLLFVDRHLIHEVTSPQAFEGLRNSNRKVRQPKLTLAVADHNVPTTDRSKGISDQESKIQVDTLDANCKEFGIKIFGMNDKRQGIVHIIGPEQGFTQPGTIIVCGDSHTATHGAFGALAFGIGTSEVE

SEQ ID NO: 178855 - protein, 331 aa, Unknown
  Bacterial polypetide isolated from the Sargasso Sea
AFGALAFGIGTSEVEHVLATQTLIQKKSKNLLLKVDGKLPIGVTAKDIILKIIGTIGTAGGTGFVIEYSGEVIKNFSMEERMTICNMTIEGGARAGLIQPDEKTFNYLQNRPMSPKNEKWTKALEYWSTLKSDEGCNFDKEVIIKGEEVAPQVTWGTSPQDVVPVNGFVPDPKNEKNQDRRVAMERSLDYMGLKPNTKMTEIKIDKVFIGSCTNGRIQDLREAAKLLKDKKIAKHVNAMVVPGSGLVKNQAEQEGLDKIFKNSGFEWREPGCSMCLGMNEDQLKPKERCASTSNRNFEGRQGRGGRTHLCSPAMAAAAALDGHLSDVRKIW

SEQ ID NO: 178856 - protein, 209 aa, Unknown
  Bacterial polypetide isolated from the Sargasso Sea
QLNIGETLKTDEGAHFDLVVELEADDIQPQITWGTSPEQVIGIDECIPDPDQEPDLIKADAIRSALRYMDLKAGDKLSSAKVDTVFIGSCTNSRIEDLRAAAKIVEGKQVVAGIEALIVPGSGLVKKQAEDEGLADIFKAAGFEWREPGCSMCLAMNDDRLEAGKRCASTSNRNFEGRQGRGGRTHLVSPAMAAAAAVHGHFVDIRGEA

SEQ ID NO: 178857 - protein, 93 aa, Unknown
  Bacterial polypetide isolated from the Sargasso Sea
MSVFFSGLMAPLDKNNVDTDQIIPKQFLTSTSRDGFDAALFYDWRYLENGEPNPDFILNRPCYQGAQILLTRDNFGCGSSREHAPWALKQYGF

SEQ ID NO: 178858 - protein, 149 aa, Unknown
  Bacterial polypetide isolated from the Sargasso Sea
MSTTLYDKIWNDHLVDQQDDGTSLLFVDRHLIHEVTSPQAFEGLRNSNRKVRHPNLTLAVADHNVPTTDRSKGISDEESKIQVDTLEANCKEFGVQLFGMDDKRQGIVHIIGPEQGFTQPGTVIVCGDSHTATHGAFGALAFGIGTSEV

SEQ ID NO: 178859 - protein, 240 aa, Unknown
  Bacterial polypetide isolated from the Sargasso Sea
EAGAKVGLIAPDNKTIEYVKSKSFLDDDTFNHAKEYWKTLKSDDDAKFDKEITIDVSKIKPQVTWGTSPEMVLNYDESIPTVFDTKDENKKNVELARDYMGIENETKLSDLTFDKVFIGSCTNSRIEDLRQAAEIVKGKTIASNISEAIVVPGSGLVKEQAENEGLDKIFTDAGFIWRDPGCSMCLGMNPDQLKPYERCASTSNRNFEGRQGYLGRTHLMSPIMAAYTAINGTIGDPYEI

SEQ ID NO: 178860 - protein, 260 aa, Unknown
  Bacterial polypetide isolated from the Sargasso Sea
TQTLVQKKAKNFRINVNGKLPIGVTSKDVILQIIGKIGTAGGTGYVVEYAGNLISSLSVEQRMTICNMTIEGGARAGLIEPDQKIFDYLKDKPKSPKSKNWDLAMKYWENLKTDSNAKFEKEINLEGSEISPMVTWGTSPQDVVSIDGKIPDPKNEKDIDKKNSIERSLKYMGLKPNIAVKNIKIDKVFIGSCTNGRIEDLREAAKILKDKKKASHVHALVVPGSGLVKEQAEQEGIDKIFVNSGFEWREPGCSMCLAMN

SEQ ID NO: 178861 - protein, 202 aa, Unknown
  Bacterial polypetide isolated from the Sargasso Sea
MEINIDGPAPTGVSAKDIILGIIGRIGVAGAAGHVIEYTGQAITDLSMEGRMTVCNMSIEAGARAGMVAPDQTTFDYIRGRSHAPKDAEFQIATEQWTRLRSDPGSVYDSRVVIEAKDLEPFVTWGTNPGMVIPVTSKIPNPNNAFNEIEKESWERALSYMDLKPDIPITDVAIDRVFIGSCTNSRIEDIRAAATVVKGKKS

SEQ ID NO: 178862 - protein, 257 aa, Unknown
  Bacterial polypetide isolated from the Sargasso Sea
PEQGLTQPGMTIVCGDSHTATHGAFGALAFGIGTSEVEHVLATQTLAMNKPKTMNVNVSGELLYGITPKDLILGIIKTIGTGGGAGHVIEYTGKAIEELSMENRMTVCNMSIEGGARAGMIAPDDTTFNYIKSKNYAPKDSDWEEAEKNWRELYTDKGAKYDSVVTIDAEDIEPYVSWGTNPSQVIAINELIPDPNSFKEKAEKESAMRALEYMDLSPGTKISEVQINKIFIGSCTNGRIEDLRAAASVLEGKKISK

SEQ ID NO: 178863 - protein, 285 aa, Unknown
  Bacterial polypetide isolated from the Sargasso Sea
HGAFGALAFGIGTSEVEHVLATQTLAMEKPKTMKVEVIGDVSDGVGPKDIILGIIRKIGTGGGAGHVIEYVGDVIKNMSMENRMTICNMSIEGGARAGMIAPDETTFNYLKDKNYAPKDSDWNDAINEWGELFSDDDAAFDKVVTINAGELEPSVSWGTNPSQVIFINDEIPHPDNFQDESDKEAAIRALEYMDLEPGIKINEITLDRVFIGSCTNGRIEDLREAAQVIKGKKVSETVGAMVVPGSTLVKNQAEEEGLDKIFIEAGFDWREARMFNVSGYESRIY

SEQ ID NO: 178864 - protein, 81 aa, Unknown
  Bacterial polypetide isolated from the Sargasso Sea
MPKTLYDKIWNEHLVHEQEDGTSLLFVDRHLIHEVTSPQAFEGLRNSQRKVRQPDLTLAVADHNVPTTDRSKGISDEESKI

SEQ ID NO: 178865 - protein, 172 aa, Unknown
  Bacterial polypetide isolated from the Sargasso Sea
VISIFPVEDELRNEQKATYREALEYMGFEDGQPISGVPVQVAFIGSCTNSRISDLREVAAVVKGHQVQDNVRALVVPGSHLVAAQAVEEGLDKVFTEAGFEWREPGCSMCLAMNPDKLIGRELCVSSSNRNFKGRQGSATGRTVLMSPVMVAAAAIRGEISDARSVFEMEGE

SEQ ID NO: 178866 - protein, 193 aa, Unknown
  Bacterial polypetide isolated from the Sargasso Sea
MNYTLYDKIWNEHSILVNADDSELLYIDRHLVHEVTSPQAFDGLAINNRKVWSKKSICAVSDHNVPTRNRLNGIKDSISKLQVDTLIDNCKKHKINYFDLNDINQGIVHVIGPELGFTQPGMTLVCGDSHTSTHGALASLAFGVGTSDVEHVLATQCINVKKEKNFNISVINSLSDGVSSKDLILYIIREIGT

SEQ ID NO: 178867 - protein, 305 aa, Unknown
  Bacterial polypetide isolated from the Sargasso Sea
IQVETLRKNCKEFGVELFDVNDKRQGIVHIIGPEQGFTQPGTVIVCGDSHTATHGAFGSLAFGIGTSEVEHVLATQTLIQKKSKNLRINVNGDLPKGVTAKDVILKIIGTIGTAGGTGYVVEFAGDVIKSLSMEERMTICNMTIEAGARAGLIAPDEKTFEYLKGKTMSPKGENWKKALEFWKTLFSDKDCKFDKEVNIEGKDIEPLVTWGTSPQDVSPITGVVPDPANEKNEDRKIAMERSLEYMGLKANTKISDIKIDKIFIGSCTNGRIEDLRLAADLLKEKNLLKCECNGCSWIRISKGTS

SEQ ID NO: 178868 - protein, 251 aa, Unknown
  Bacterial polypetide isolated from the Sargasso Sea
VSLKGIAAPLEIQNCDSDMIIPKQYLKTIKRTGLGFAAFAELRYENAVEVAAKGAESGIEKPDFILNQPYYRDSVILVAGDNFGCGSSREHAPWAINGFGIRCIISTSFADIFNNNCYKNGMLPVVLPFDQVEELMNDAKAKKDIEVDLVSQQVIRACGTKYPFEVDPFKKHCLLNGLDDIGLTMQKLGEIRAFEAERSKLYPWLDGATTRVPRLFPVASLEARIHEVDQSATPGPEQWQAEARSLAAAAS

SEQ ID NO: 178869 - protein, 137 aa, Unknown
  Bacterial polypetide isolated from the Sargasso Sea
NTKIKDIKIDKVFIGSCTNGRIEDLREAAKILKDKKIAGHVNAMVVPGSGLVKQQAEQEGLDKIFINSGFEWREPGCSMCLAMNADKLKPEERCASTSNRNFEGRQGRGGRTHLVSPGMAAAAAISGNLDDVRKFQN

SEQ ID NO: 178870 - protein, 163 aa, Unknown
  Bacterial polypetide isolated from the Sargasso Sea
MQKFNKLKSIPAYLPIVNIDTDMIIPKQFLKTIKRTGLGKNLFFEMRYDEKGNIVSDFILNQHPFNKSKILIAGKNFGCGSSREHAPWALLDFGITCVISSSYADIFYNNCFKNGILPIILDDEKIKQIAEYSNRKEEIEVDLNNQKIVFGNSEISFDIDSFK

SEQ ID NO: 178871 - protein, 136 aa, Unknown
  Bacterial polypetide isolated from the Sargasso Sea
VKVQDIKIDKVFIGSCTNGRIEDLREAAQILKNKKKAAHVHGMVVPGSGLVKEQAEQEGLDKIFIESGFEWREPGCSMCLAMNADKLKPQERCASTSNRNFEGRQGRGGRTHLVSPGMAAAAAIAGNLDDVRKYRN

SEQ ID NO: 178872 - protein, 163 aa, Unknown
  Bacterial polypetide isolated from the Sargasso Sea
MKKFVSLKSIPAYLPIVNIDTDMIIPKQFLKTIKRTGLGKNLFHEMRYDNDGNIIKDFILNKKPFDVSKILIAGNNFGCGSSREHAPWALLDFGITCVISSSYADIFYNNCFKNGILPIILSEEKIKELSDYSKRQEEIEINLNDEKIIYGNNEISFKIEPFK

SEQ ID NO: 178873 - protein, 284 aa, Unknown
  Bacterial polypetide isolated from the Sargasso Sea
VHVIAPEQGRIMPGMTVVCGDSHTSTHGAFGALAFGIGTSQVEHVLATQTLRVTRAKTMSITLTGALAVGVTAKDIALYVIGKLGARGGTGFVIEYRGECISSLSMESRMTLCNMSIEAGAKSALIAPDETTYHYLKPLMDSFKLEQNMSQRWQTLFTDDNAKFDKSLTLDVSKLSPQVTWGTSPDQVISVNDTIPTACTTSSERALHYMNLNEGDAIDGLAVDVVFIGSCTNSRIEDLRHAASIAKLGKVSPSVRAIVVPGSVAVKTQAEKEGLGQIFIDSGL

SEQ ID NO: 178874 - protein, 281 aa, Unknown
  Bacterial polypetide isolated from the Sargasso Sea
MNTLLATQTLIQKKSKNFRINVIGKLNLGVTSKDVILQTIGKIGTAGGTGMVIEYAGPVIESLNIEQRMTICNMSIEAGARAGLIAPDEKTFKYLKDRPMSPKKENWDKAVEYWSKLKSDSGAKFDQEVEIHGDDIKPMVTWGTSPQDVVSITDSVPDPDKEKDEDRKMSMNRSLNYMGLKPNTKMTDIKVDRIFIGSCTNGRIVDLREAAKILKGKKIAKHVNAMVVPGSGLVKQQAEEEGLDKVFKESGFDWREPGCSMCLAMNADKLNPKERCASTSK

SEQ ID NO: 178875 - protein, 164 aa, Unknown
  Bacterial polypetide isolated from the Sargasso Sea
MEKFSKLKSIPSYLPLQNIDTDMIIPKQFLKTIKRTGLGKSLFYEMRYDDDGKINNNFILNNPPYNKSKILCAGKNFGCGSSREHAPWALLDFGIKCILSSSFADIFYNNCFKNGILPIKIDEKIVFEISEYSKRKEEIEIDLEKQEIKYGNKVIKFVLDPFKK

SEQ ID NO: 178876 - protein, 105 aa, Unknown
  Bacterial polypetide isolated from the Sargasso Sea
LLKGKKIANNVSAMVVPGSGLVKEQAEKEGLDLIFKNAGFEWREPGCSMCLGMNPDQLKPKERCASTSNRNFEGRQGRGGRTHLVSPGMAIAAAIKGYLSDVREI

SEQ ID NO: 178877 - protein, 261 aa, Unknown
  Bacterial polypetide isolated from the Sargasso Sea
SKLQVVELDKNCNDFGIKQFNINSNNQGIVHVIGPELGLTLPGMSIVCGDSHTSTHGAFGCLAMGIGTSEVEHVLATQSLKVRKLKNMRINFEGSIQEGVSSKDIILYLIRTIGTAGGTGYAVEFAGSYIRNISMEARMTICNMSIEAGAKVGLVSVDDKTIEYVKKHSNLEANLINDAIKKWKNLITDKEAIFDKEIDIDVSKINPQVSWGTSPEMVIDFNERIPPSSIFSAEKRKSLDLAKNYMGLSDNQELSDLDFDK

SEQ ID NO: 178878 - protein, 200 aa, Unknown
  Bacterial polypetide isolated from the Sargasso Sea
MEKFELLKGISAPLEMINVDTDMIIPKQFLKTIKRSGLGKNLFHELRYDIQGNIKNDFVLNWDPYKQASILVAGDNFGCGSSREHAPWSLLDFGFKCIIAPSFADIFYNNCFKNGILPIRLDQKTVDVLMDQANQKKQLTINLKDQLIVLEDGNTIEFQIDPFRKKCLLEGLDDIGLTLQKKEKIDQYEASLKNTHPWII

SEQ ID NO: 178879 - protein, 201 aa, Unknown
  Bacterial polypetide isolated from the Sargasso Sea
MQKFNTLKSIPAYLPIVNIDTDMIIPKQFLKTIKRTGLGKNLFFEMRYDDNGKEINDFILNQEPFNNSKILIAGNNFGCGSSREHAPWALLDFGITCVISSSFADIFYSNCFKNGILPIILEEEKIKEISEYANRKEEISVDLNDQKIIYGNNEIKFEIDPFKKKCLLEGLDDIALSLKKSDKIQNFENQLKNKKPWVFND

SEQ ID NO: 178880 - protein, 91 aa, Unknown
  Bacterial polypetide isolated from the Sargasso Sea
MGSGLVKEQAEQEGLDKIFVNSGFEWREPGCSMCLAMNADKLKPEERCASTSNRNFEGRQGRGGRTHLVSPGMAAAAAISGNLDDVRKYQN

SEQ ID NO: 178881 - protein, 288 aa, Unknown
  Bacterial polypetide isolated from the Sargasso Sea
GALAFGIGTSEIEHVLATQTLLQKKSKNFRINVSGKLPTGVTSKDVILQIIGKIGTAGGTGYVIEYAGNLISSLSVEQRMTICNMTIEGGARAGLIQPDEKIFKYLQNKPMSPKNNNWDKALEYWSNLKSDTNANFDKEINIDGLEIKPMVTWGTSPQDVVEIDGKVPNPDNEIDPDRKNSINRSLNYMGLKPNMNVKDIKIDKVFIGSCTNGRIEDIREAAKILKNKKIASHVNAMIVPGSGLVKEQAEQEGLDKIIKESGFEWREPGCSMCLAMNADKLKPEERCA

SEQ ID NO: 178882 - protein, 133 aa, Unknown
  Bacterial polypetide isolated from the Sargasso Sea
MEAFETLSGKVVPLDIINVDTDQIIPKQFLKKIDRTGFGIHLFHDWRYLDDTGTKQNPDFVLNFPRYQGSEILLTRKNFGCGSSREHAPWALHDYGFRCIIASSFADIFYNNCRKNGILAVVLRDHEIQDLLK

SEQ ID NO: 178883 - protein, 148 aa, Unknown
  Bacterial polypetide isolated from the Sargasso Sea
SVKKALKYMDLKANLPIKEISVDRVFIGSCTNSRIEDLRSVAEFVKGRKVSDDVSAMIVPGSGLIKQQAEQEGLDEIFIAAGFEWRQPGCSMCLAMNDDVLKPGERCASTSNRNFEGRQGKGGRTHLVSPLMAAAAAVAGHFVDPRTY

SEQ ID NO: 178884 - protein, 140 aa, Unknown
  Bacterial polypetide isolated from the Sargasso Sea
MKNDYYWIYKQSHIVKTLYDKLWDDHVVHDYDDHRSLIYIDRHLIHEVTSAQAFEGLRLANRKPWRVNTNLAVPDHNVPTKNREIIEDPISKLQLETLDKNCRETGITKFEMSDSRQGIVHVIGPEQGASLPGMTIVCGD

SEQ ID NO: 178885 - protein, 257 aa, Unknown
  Bacterial polypetide isolated from the Sargasso Sea
TKGINDQQSKIQVDTLRKNCKEFGVPLFDMNDKRQGIVHIIGPEQGFTQPGTIIVCGDSHTATHGAFGALAFGIGTSEVEHVLATQTLLQKKSKNFLLKVDGKIPTGVTAKDVILKIIGTIGTAGGTGFVIEYSGNVIKNFSMEERMTVCNMTIEGGARAGLIQPDDKTFEYLKNKPLSPKKDNWKKALDYWSNLKSDDDCTFDKEIIINGHDVVPQVTWGTSPQDVVPVNGSVPDPKKEKNDDRREAMERSLDYMG

SEQ ID NO: 178886 - protein, 235 aa, Unknown
  Bacterial polypetide isolated from the Sargasso Sea
VTLEYFHTKPLAPKGELWFQAEAWWRTLRSDEAAEFDRTLILDGEAISPHVTWGTSPEMVASVEGCVPKLEDMEDETSRQGLRRALEYMGLEEGMAITDIKPDAIFIGSCTNSRIEDLRAAASVLKGRRIAATIRKALVVPGSGLVKAQAESEGLDKIFLDAGMEWRDPGCSMCLAMNADRLLPDERCASTSNRNFEGRQGAGGRTHLVSPAMAAAAAVAGHFVAVDSSIFGEAQ

SEQ ID NO: 178887 - protein, 310 aa, Unknown
  Bacterial polypetide isolated from the Sargasso Sea
RHPNLTLAVADHNVPTTDRTNGIADQESKIQVDTLENNCKEFGIQLFGMNDKRQGIVHIIGPEQGFTQPGTVIVCGDSHTATHGAFGALAFGIGTSEVEHVLATQTLVQKKAKNFRINVNGKLPLGVTSKDVILQIIGKIGTAGGTGCVVEYAGDLIKSLSVEQRMTICNMTIEGGARAGLIAPDEKIFKYLDGKPMSPKGEKWNKALEYWKNLKSDDNAIFDKEISLEAKEILPMITWGTSPQDVITIDGKIPNPNSEQDKDKKNSIERALKYMGLKPDMVAKDIKIDKVFIGSCTNGRIEDLREAAKI

SEQ ID NO: 178888 - protein, 276 aa, Unknown
  Bacterial polypetide isolated from the Sargasso Sea
MSKTLYDKLWKKNLVHEQEDGTSLIYVDRHLVHEVTSPQAFEGLRLNNRKVRRPDLTLAVPDHNIPTTDRSKGIDDKEAKIQIETLRKNCKDFGVQLFDVNDKRQGIVHIIGPEQGFTQPGSVIVCGDSHTATHGAFGALAFGIGTSEVEHVLATQTLMQKKSKNFRININGTLPKGVTAKDVILKIIGTISTAGGTGYVIEYAGDVIRNFSMEERMTVCNMTIEAGARAGLIAPDQKTFDYLKGKKMSPQGENWNKALDYWKTLYSDDDCKFDKE

SEQ ID NO: 178889 - protein, 276 aa, Unknown
  Bacterial polypetide isolated from the Sargasso Sea
SPQAFDGLRAHKRPVRQPGKTFATMDHNVSTQTKDINASGEMARIQMQELIKNCNEFGVELYDLNHPYQGIVHVMGPEQGITLPGMTIVCGDSHTATHGAFGALAFGIGTSEVEHVLATQTLKQGRAKTMKIEVKGTAAPGITAKDIVLAIIGKTGSAGGTGHVVEFCGDAIRALSMEGRMTLCNMAIEMGAKAGLVAPDETTFNYVKGRLHAPKGKDFDEAVAYWKTLHTDEGATFDTVVTLQAEEIAPQVTWGTNPGQVISVTDIIPDPASSPI

SEQ ID NO: 178890 - protein, 254 aa, Unknown
  Bacterial polypetide isolated from the Sargasso Sea
MPYTLYDKIWNQHIVHQQEDGTSLLFVDRHLVHEVTSPQAFEGLRTSNRNVRQPNLTLAVADHNVPTTDRSKGIEDEDSKIQVETLEKNCKEFGIKLFGMNDKRQGIVHIIGPEQGFTQPGTIIVCGDSHTATHGAFGALAFGIGTSEVEHVLATQTLVQKKSKNLRISVNGKLAIGVTSKDVILQIIGKIGTAGGTGYVIEYAGDLVSSLSVEQRMTICNMTIEGGARAGLIKPDEKTFKYLKGRPLSPKNEN

SEQ ID NO: 178891 - protein, 96 aa, Unknown
  Bacterial polypetide isolated from the Sargasso Sea
MKTLYDKLWKEHHVTQLDSGESLLYIDRHYLHEVTSPQAFEGLSKKNLKPWRLEANIATPDHNVPTTRGNNFTSDLINDEISKIQVVELDKNCNKF

SEQ ID NO: 178892 - protein, 262 aa, Unknown
  Bacterial polypetide isolated from the Sargasso Sea
MNNPKPKTLFDKIWHQHLVHQQEDGTCLIYIDRHLVHEVTSPQAFEGLRDNKRKVHRPESTFAVADHNVPTSDRSKGIDNEESRIQVETLENNCKEFGVTIFPLLDRRQGIVHIVGPEQGITQPGMTIVCGDSHTATHGAFGALAFGIGTSEVEHVLASQTLIQQPAKNMKISVNGNLKPGVGAKDIILHIIGVIGTAGGTGYVIEYAGEAIQALSMEGRMTICNMSIEAGARAGLIAPDQTTFDYIKGRPYAPKRGKLGQG

SEQ ID NO: 178893 - protein, 244 aa, Unknown
  Bacterial polypetide isolated from the Sargasso Sea
MSTTLYDKIWNDHLVDQQDDGTALLFVDRHLVHEVTSPQAFEGLRNSNRKVRHPNLTLAVADHNVPTTDRTKGIADQESKIQVDTLDANCKEFGVQLFGMDDRRQGIVHIIGPEQGFTQPGTVIVCGDSHTATHGAFGALAFGIGTSEVEHVLATQTLVQKKAKNFRINVNGKLPLGVTSKDVILQIIGKIGTAGGTGCVIEYAGDLIRSLSVEQRMTICNMTIEGWSRAGLIAPDEKIFEYLK

SEQ ID NO: 178894 - protein, 71 aa, Unknown
  Bacterial polypetide isolated from the Sargasso Sea
MSARTLYDKLWDAHVVRYLSKDTALIYIDRHLIHEVTSPQAFEGLELAGRDLWRKNSLKADSDHNVPTVNL

SEQ ID NO: 178895 - protein, 210 aa, Unknown
  Bacterial polypetide isolated from the Sargasso Sea
MKINNPKTLFDKIWEHHLVDRQEDGTCLIYIDRHLVHEVTSPQAFEGLRNNNRKVRRPQSTFAVADHNVPTSDRSKGIENKESRIQVETLEKNCKDFDVTLFPLLDSRQGIVHIVGPEQGITQPGMTIVCGDSHTATHGAFGALAFGIGTSEVEHVLATQTLIQKPAKNMRISVEGKLNLGVTAKDIILHIIGKIGTAGGTGYVIEYAGK

SEQ ID NO: 178896 - protein, 346 aa, Unknown
  Bacterial polypetide isolated from the Sargasso Sea
VLLLFGGDSHTATHGAFGALAFGIGTSEVEHVLATQTLIQKKSKNFLVNVVGTLPIGVSSKDVILQTIGKIGTAGGTGTVIEYAGSVIENLSIEQRMTICNMSIEAGARAGLIAPDEKTIKYLKNKPMSPKKTNWDQAVEYWSKLKSDQDAKFDKEVEIKGNDISPMVTWGTSPQDVVPITGTVPDPEKEKNEDRKKSMKRSLNYMGLEPNTKITDIKIDRIFIGSCTNGRIEDLREASKIIKGKKVAKHVSAMIVPGSGLVKQQAEEEKIDKIFKEAGFEWREPGCSMCLAMNADKLNPKERCASTSNRNFEGRQGRGGRTHLVSPAMAAAAAIDGHLTDVRKFS

SEQ ID NO: 178897 - protein, 194 aa, Unknown
  Bacterial polypetide isolated from the Sargasso Sea
MDRINVDTDQIIPKQFLKKIERTGFGKHLFHDWRYLNDEGTKLNPDFILNEPRYQGAEILLARDNFGCGSSREHAPWALLDYGFRCIISPSFADIFFNNCRKNGILLVVLNESQVQALFEEVTANVGCQLKVDLQQKTVSSLAGLNYSFEIDDFARQCLLGGMDDIGWTLQFEDRIGRFEQESASQTPWLSLSA

SEQ ID NO: 178898 - protein, 255 aa, Unknown
  Bacterial polypetide isolated from the Sargasso Sea
VSDGVGPKDIILGIIRKIGTGGGAGHVIEYVGDVIKNMSMENRMTICNMSIEGGARAGMIAPDETTFNYLKEKNYAPKDSDWNDAVHEWSNLFSDDDASFDKVVTINAEELEPSVSWGTNPSQVIFINDEIPHPDNFQDASDKEAAIRALEYMDLEPGIKINEINLDRVFIGSCTNGRIEDLREAAQVVKGKKVSETVGAMVVPGSTLVKNQAEEEGLDKIFIDAGFDWREAGCSMCLGMNPDILSPGERCASTS

SEQ ID NO: 178899 - protein, 233 aa, Unknown
  Bacterial polypetide isolated from the Sargasso Sea
MSKTLYDKIWENHLVHKQDDGTSLIYVDRHLIHEVTSPQAFEGLRLQKRKVRRPELTLAVPDHNVPTTDRSKGIDDEESKIQVDTLRNNCEEFNIELFDVNDKRQGIVHIIGPEQGFTQPGTVIVCGDSHTATHGAFGALAFGIGTSEVEHVLATQTLIQKKSKNLRINVNGKLPIGVTAKDVILKIIGTIGTAGGTGYVIEFAGEVIRNLSIEERMTVCNMTIEAGARAGLI

SEQ ID NO: 178900 - protein, 160 aa, Unknown
  Bacterial polypetide isolated from the Sargasso Sea
MFEKIWNAHLVHEQEGNSIVYIDRHLVHEVTSPQAFEGLRISGRSVLHPELTYAVPDHNVPTKNQDKPIEDPIAALQVETLRNNCKEFGITLFDLGDERSGIVHVIGPEQGLTLPWSTIVCGDSHTATHGAFGALAFGIGTSEVEHVLATQTLQQKKPKT

SEQ ID NO: 178901 - protein, 308 aa, Unknown
  Bacterial polypetide isolated from the Sargasso Sea
GAFGALAFGIGTSEVEHVLATQTLVQKKAKNFRINVNGKLPLGVTSKDVILQIIGKIGTAGGTGCVIEYTGDLIRSLSVEQRMTICNMTIEGGARAGLIAPDEKIFKYLKGKPMSPKGENWEKALNYWNGLKTDREANFDKEINLNASEILPMITWGTSPQDVITIDGKVPNPQSETDEDRKNSIERSLKYMGLKPDMSATDIKIDKVFIGSCTNGRIEDLREAAKILKDKKISSHVNAMVVPGSGLVKEQAEQEGLDKIFISSGFEWREPGCSMCLAMNADKLKPEERCASTSNRNFEGRQGRGGRT

SEQ ID NO: 178902 - protein, 198 aa, Unknown
  Bacterial polypetide isolated from the Sargasso Sea
MAYDKFNILNSSAVPLNIDNVDTDQIIPARFLKATERKGFGENLFKDWRYNSDDTPIDSFPLNNKIYNGKILVAGKNFGCGSSREHAVWAIYDYGFRAVVSSFFADIFKNNCLNIGVLPIQVSEEFLIDIFSQIDSNPKSNFEVNLEIQEFKIIETEKSEKFNISSYKKSNMSNGFDDIDYLINKKQEISKFANNSPY

SEQ ID NO: 178903 - protein, 286 aa, Unknown
  Bacterial polypetide isolated from the Sargasso Sea
LPMIDETSSTQIKTLEKNCGDFGIKLFGINDPNQGIVHVIGPQLGITLPGSTIVCGDSHTSTQGAFGAFAFGIGTSEVEHTLATQTLWLEKPKTFEILATGKRKNSFAVTSKDIILSIIKQIGTDGGTGHVLEYRGDAISDLSMEQRMTICNMSIEAGSRAGLIAPDEKTFDYLNNRKYTPKNYDDLVDDWKNNLMTDANSKFDKTFTIDVEKIEPQVSWGTNPAMVSDVTSTVPTPEEFGNNNEIQIESAKKALSYMDLKPDTPIVDIPIDRVFIGSCTNARLED

SEQ ID NO: 178904 - protein, 247 aa, Unknown
  Bacterial polypetide isolated from the Sargasso Sea
CNMSIEAGARAGLISPDQTTFNYIKGRPYAPGTEHWDQAVEYWSSLPSDNDANYDHEIVIDSSEIDPMVTWGTSPEDVVSVKGTVPNPSSAKTENKKKSIERSLEYMGLKPGTKITDIKLDKIFIGSCTNGRIEDLRKVASIVKDKKIASHVQAMIVPGSGLVKKQAEEEGIDIILKDAGFEWREAGCSMCLGMNPDQLKPGERCASTSNRNFEGRQGRGGRTHLMSPELAAASAITGNISDIRDFT

SEQ ID NO: 178905 - protein, 191 aa, Unknown
  Bacterial polypetide isolated from the Sargasso Sea
MPNTLYDKIWIDHLVDQQDDGTALLFVDRHLVHEVTSPQAFEGLRNSKRKVRHPNLTLAVADHNVPTTDRSKGISDKESKIQVETLEANCKEFGVQLFGMNDKRQGIVHVTGPEQGFTQPGTVIVCGDSHTATHGAFGALAFGIGTSEVEHVLATQTLVQKKAKNFRINVNGKLPIGVTSKDVILQIIGKI

SEQ ID NO: 178906 - protein, 274 aa, Unknown
  Bacterial polypetide isolated from the Sargasso Sea
MLKKKSLNMNIMVDGKMPEYFYSKDLALLIISKIGTAGGTGYAIEYTGNAIKNLSMEARMTLCNMTIEAGATTGLIAVDNKTIEYVKNKPFSPKGEDFEIAKKNWQNLVSDIGSIYDKTINIDINKSSPMITWGTSPEMAVGVDENLPDLNDEKFSSKKQDLQNAFSYMGLKEKQNVNSIKLDKIFIGSCTNSRIEDLRIVADIVKNKKIAKNIKSAIIVPGSGLIKEKAENEGLDKIFTKSGFEWRSPGCSMCLGMNDDKLNEYERCASTSNR

SEQ ID NO: 178907 - protein, 150 aa, Unknown; identical to SEQ ID NO: 178827
  Bacterial polypetide isolated from the Sargasso Sea

SEQ ID NO: 178908 - protein, 288 aa, Unknown
  Bacterial polypetide isolated from the Sargasso Sea
AFGALAFGIGTSEVEHVLATQTLVQKKAKNFRINVNGKLPIGVTSKDVILQIIGKIGTAGGTGHVIEYGGSLISSLSVEQRMTICNMSIEGGARAGLIKPDQKIFDYLNGKPKSPTGKNWDLAMEYWKNLKTDPNAKFDKEINLTGEEISPMVTWGTSPQDVVTINGKVPDPNYEKNNDKKKSIERSLKYMGLNPGISVKNIKIDKVFIGSCTNGRIEDLREAAKILKGKKIASHVNAMVVPGSGLVKEQAEQEGLDKIYIDSGFEWREPGCSMCLAMNADKLKPEER

SEQ ID NO: 178909 - protein, 294 aa, Unknown
  Bacterial polypetide isolated from the Sargasso Sea
MEVTSPQAFEGLRNSNRKVRHPNLTLAVADHNVPTTDRSKGISDEESKIQVDTLAANCKEFGVQLFGMDDKRQGIVHIIGPEQGFTQPGTVIVCGDSHTATHGAFGALAFGIGTSEVEHVLATQTLVQKKAKNFRINVNGELPLGVTSKDVILQIIGKIGTAGGTGSVVEYAGDLIRSLSVEQRMTICNMTIEGGARAGLIAPDEKIFEYLKGKPMSPKSENWDKALNYWETLKTDSDASFDKEISLNANEILPMITWGTSPQDVITIDGKVPNPNNETDEDKKNSIERALKYM

SEQ ID NO: 178910 - protein, 237 aa, Unknown
  Bacterial polypetide isolated from the Sargasso Sea
MTICNMSIEAGARAGLIAPDQKTIQYLKDRPMSPKKSNWDKAVEYWSKLQSDTEAKFDKEVEIKGNEINPMVTWGTSPQDVVSITGAVPDPENEKDEDRKSSMNRSLNYMGLKANTKMTDIKIDKIFIGSCTNGRIGDLRDAAKIIKGKKISKHVSAMVVPGSGLVKEQAEQEGIDKIFKDAGFDWREPGCSMCLAMNADKLNPKERCASTSNRNFEGRQGRGGRTHLVSPAMAAAA

SEQ ID NO: 178911 - protein, 168 aa, Unknown
  Bacterial polypetide isolated from the Sargasso Sea
MVIDFNEKIPSSSIFSAEKRKSLDLAKNYMGLSDNQELSDLDFDKVFIGSCTNSRIEDLREAAEVLKGQKVSENIQEAIVVPGSGMVKEQAEKEGIHKIFIDAGFQWRAPGCSMCLGMNPDQLSPYERCASTSNRNFEGRQGNLGRTHLMSPKMAALTAINGRIVKEI

SEQ ID NO: 178912 - protein, 264 aa, Unknown
  Bacterial polypetide isolated from the Sargasso Sea
EVEHVLATQTLIQKKSKNFRVNVNGSLPAGVTSKDVILKIIGTIGTAGGTGYVIEFAGEVIRNLSVEQRMTICNMTIEAGARAGLISPDNKTIEYFKDRPMSPKGENWTKAVAHWKKLFSDSDAKFDKEVNIDAKDIEPLVTWGTSPQDVSPITGEVPDPEKEKDKDRRTAMYRSLEYMGLKPKMKISDIKVDKIFIGSCTNGRIEDLRLAAKLLKGKKIASDVSAMVVPGSGLVKKQAEEEGIDKVFKNAGFEWREPRMFYVF

SEQ ID NO: 178913 - protein, 126 aa, Unknown
  Bacterial polypetide isolated from the Sargasso Sea
KVFIGACTNGRIEDLRAAAKIASGRKVAENITQALVVPGSGLVKVQAEAEGLDQIFTEAGFEWREPGCSMCLAMNADRLEPGERCAATSNRNFEGRQGYGGRTHLVSPSMAAAAAIAGRFVDPNQL

SEQ ID NO: 178914 - protein, 117 aa, Unknown
  Bacterial polypetide isolated from the Sargasso Sea
MEKFVNYSSVVIPIDRSNVDTDALIPKQFLKSVEKSGFGDNLFDEWRYLDQGEPGQDCSGRPLNTDFVLNKNGYKGGRILLARENFGCGSSREHAVWALRDFGIRTVIAGSFADIFF

SEQ ID NO: 178915 - protein, 283 aa, Unknown
  Bacterial polypetide isolated from the Sargasso Sea
DRHLIHEVTSPQAFEGLKIAGREPWRISSNIATPDHNVPTTDREKGIEGIQDEVAKLQVKTLDKNCSDLGILQFDILDKRQGIVHVVGPEQGVTLPGMTLVCGDSHTSTHGALATLAMGIGTSEVEHVLATQCLKASKLRNMKVVIDGELSPGVTPKDVTLAVIGKIGTAGGTGFAIEYSGPVIEAMSIEGRMTVCNMSIEAGARVGLVAFDNITEEYVKNRPFTPKGDEWELALSQWKELRSDDDAHFEEIIYIDGSTLKPQVTWGTSPEMVIDVDGEIPEA

SEQ ID NO: 178916 - protein, 234 aa, Unknown
  Bacterial polypetide isolated from the Sargasso Sea
EQRTLYDKIWDAHCVKSNKDGFDLLYIDRHYIHEVTSPQAFEGLRLSERKTWRSSTNFAVPDHNIPTKDREMGIDDPVSKIQVDTLEDNCNDFNVKKFGMNDPDQGIVHIIGPEQGLTLPGMTIVCGDSHTSTHGAFGTLAFGIGTSEVEHVLATQCLIQKRSKTMLINVDGELSNGITAKDLILFIIGKIGTDGGTGYSIEFGGTAIRSLSMEGRMTVCNMTIEAGARAGLIG

SEQ ID NO: 178917 - protein, 261 aa, Unknown
  Bacterial polypetide isolated from the Sargasso Sea
EQGITQPGMTIVCGDSHTATHGAFGSLAFGIGTSEVEHVLATQTLIQKPAKNMLILIKGNISPGITSKDIILHIIGKIGTAGGTGYVIEYAGEAIKDLSVEARMTICNMSIEAGARAGLIAPDEKTFEYIKGRPYAPKDKDWDNAISFWRTLPSDVGAKYDKEIIIQAKDILPQVTWGTSPQDVVPLNGAVPDPSKIEDENKRKAVMRSLEYMGLEPNQKIQDIKIDRVFIGSCTNGRIEDLRDVAKIVKGKKVKVDAMIV

SEQ ID NO: 178918 - protein, 283 aa, Unknown
  Bacterial polypetide isolated from the Sargasso Sea
LRNSNRKVRQPNLTLAVADHNVPTTDRSKGISDNESKLQVDTLENNCKEFGIQIFGMSDKRQGIVHIIGPEQGFTQPGTIIVCGDSHTATHGAFGSLAFGIGTSEVEHVLATQTLVQKKSKNFRININGNLSLGVTSKDVILQIIGKIGTAGGTGYVIEYAGNLISSLSVEQRMTICNMTIEGGARAGLIQPDQKIFDYLKGKPMSPKNENWEKAIDYWGKLKSDNGANFDKEINLEGKDIKPMVTWGTSPQDVVTIDGKVPNPDNEKDPDKKSSIERSLKYM

SEQ ID NO: 178919 - protein, 147 aa, Unknown
  Bacterial polypetide isolated from the Sargasso Sea
MEKFTNLKGIAAPFNFINVDTDKIIPKQFLKTIKRTGLGKHLFDEMRFNDDGTEKKDFVLNEEPYRSSNIIVAGDNFGCGSSREHAPWALSDFGIKCIISTSFADIFYNNSFKNGLLPIKVTPEQREALMADSYDKENPELEIDYHH

SEQ ID NO: 178920 - protein, 149 aa, Unknown
  Bacterial polypetide isolated from the Sargasso Sea
SYSSALTYMELSPGTKIRDIKLDKIFIGSCTNSRIEDLRAAAEIVKNKKISTSIKLAMVVPGSGPIKRLAEKEGLDEIFLKAGFEWRDPGCSMCLAMNADKLDPGERCASTSNRNFEGRQGQGGRTHLVSPAMAAAAAVAGHFTDIESV

SEQ ID NO: 178921 - protein, 177 aa, Unknown
  Bacterial polypetide isolated from the Sargasso Sea
MEKYKTFTGIVAPLDKNNIDTDAIIPKQYLKSISRTGFGLNLFDEWRYLDTGQPGQDHSKRKINTDFILNKKPYSHASILLTGSNFGCGSSREHAAWAIKDFGINAIIAKSFADIFYNNCFKNGILPIVLNEKDIRAIFKECLEKKEYKLKIDLINQIVNNNADNEIYFDIDPYQKD

SEQ ID NO: 178922 - protein, 159 aa, Unknown
  Bacterial polypetide isolated from the Sargasso Sea
GQDNDSRPTNDSFVLNQDKYKGADILISKKNFGCGSSREHAVWSLLDYGIKVVIAESFADIFYNNCFNNGLLPVQLPEEVIAKLFVLSEESKEIEIDLIEQIISCEGNKLTSFDIDPFRKQCILEGLDEIGLSLKHADAIKEYELNRAKIVPWIFSTYE

SEQ ID NO: 178923 - protein, 296 aa, Unknown
  Bacterial polypetide isolated from the Sargasso Sea
MPGGDSHTSTHGAFGAIAFGIGTSQVRDVLASQTLAMNKLRVRRIRVDGQLADGVSAKDLILHVIRVLGVKGGVGYAYEFAGTAIEALSMEERMTVCNMAIEGGARCGYVNPDQVTFDYLKGRVHAPSDESWQRAVAWWRGLASDGDAVVDDEMVFNAAMIAPTVTWGITPGQGLGIDERIPALEELDPGERPIAEEAYRYMDLHPGTAIAGVPVDVCFIGSCTNGRLGDLRAAAAVAQGRHVASGIKAFVVPGSEQVARDAEAEGLDRVFRAAGFEWREPGCSMCLAMNPDRLEG

SEQ ID NO: 178924 - protein, 280 aa, Unknown
  Bacterial polypetide isolated from the Sargasso Sea
QDDGTSLLYVDRHLVHEVTSPQAFEGLRLNKRKVRRPNFTLAVADHNVPTTDRTKGINDKQSKLQVDTLRKNCKEFGVPLFDMNDKRQGIVHIIGPEQGFTQPGTIIVCGDSHTATHGAFGALAFGIGTSEVEHVLATQTLIQKKSKNLLLKIDGKLPIGVTAKDVILKIIGTIGTAGGTGFVIEYSGDVIKNFSMEERMTVCNMTIEGGARAGLIEPDEKTFKYLENRPLSPKENNWKKALDYWSTLKSDKDCYFDKEINLSGKEVAPQVTWGTSPQDV

SEQ ID NO: 178925 - protein, 234 aa, Unknown
  Bacterial polypetide isolated from the Sargasso Sea
MPKGVTAKDVILKIIGTIGTAGGTGYVVEFAGDVIKSLSMEERMTVCNMTIEAGARAGLIAPDEKTFNYLEGKTMSPKGENWTKAVEFWKTLYSDKDCKFDKEINIDGKNIEPLVTWGTSPQDVSPVTGVVPDPEDERNEDRKMAMKRSLDYMGLKANTKISEIKIDKIFIGSCTNGRIEDLRLAAELLKGKKIAENVSAMVVPGSGLVKEQAEKEGIDKIFKEAGLSERTRLL

SEQ ID NO: 178926 - protein, 130 aa, Unknown
  Bacterial polypetide isolated from the Sargasso Sea
MSKTLYDKIWDEHLVHEQDDGTSLLYVDRHLVHEVTSPQAFEGLRNSKRQVRQPNLTLAVADHNVPTSDRSKGIADVESKLQVETLEKNCKEFGIKLFGMNDKRQGIVHIIGPEQGFTQPGSIIVCGDSH

SEQ ID NO: 178927 - protein, 189 aa, Unknown
  Bacterial polypetide isolated from the Sargasso Sea
MGKTLFDKVWDSHVVKKIEKGPDVLFIDRHMVHEVTSPVAFLGLKSRDIKVLFPEKTFATADHNTPTRNQHLPVKDYLSSKQLKALEENAEHHGISYWGLGHEKNGIVHVIGPEHGITLPGATIVCGDSHTSTHGAFGAIAFGIGTSEVEMVLSTQCVMQPKPKKMRININGQLNESVTPKDVALFIIS

SEQ ID NO: 178928 - protein, 244 aa, Unknown
  Bacterial polypetide isolated from the Sargasso Sea
GTVIVCGDSHTATHGAFGALAFGIGTSEVEHVLATQTLLQKKSKNLRVNVTGKLPTGVTSKDVILQTIGKIGTAGGTGMVIEYAGNVIENLNIEQRMTICNMSIEAGARAGLIAPDEKTIHYLKDKPMSPKKKNWEKAVEYWSKLKSDNGAKFDKEVEITGDNINPMVTWGTSPQDVVSVTGFVPDPEKEKDEDRKQSMIRSLNYMGLKPNTKITDIKIDRIFIGSCTNGRIGDLRDAAKIIKG

SEQ ID NO: 178929 - protein, 210 aa, Unknown
  Bacterial polypetide isolated from the Sargasso Sea
ALNYWETLKTDSDASFDKEISLNANEILPMITWGTSPQDVITIDGKVPNPNNENDKDKKNSIERALKYMGLKPDMAATDIKIDKVFIGSCTNGRIEDLREAAKIVKDKKVSSHVNAIVVPGSGLVKEQAEQEGLDKIFVSSGFEWREPGCSMCLAMNADKLKPEERCASTSNRNFEGRQGRGGRTHLVSPGMAAAAAISGNLDDVRKYQN

SEQ ID NO: 178930 - protein, 291 aa, Unknown
  Bacterial polypetide isolated from the Sargasso Sea
DSHTATHGAFGALAFGIGTSEVEHVLVTQTLQQKKPKTMLVEVEGMLPKNVTPKDIILAIIGKIGTAGGTGYVIEYAGDAIRGMSMEGRMTLCNMTIEAGARAGMVAPDETTFEYLKDRPFSPKGDDFDKAVSVWKQLPSEEFAEFDLTVNINAGDVLPQVTWGTSPGMVTDINSRVPDPEKIKNHSERKSVENALKYMDLKANLPINKISIDRVFIGSCTNSRIEDLRSVAEFVKGRKVSDNVSAMIVPGSGLIKQQAEQEGLDEIFIAAGFEWRQPGCSMCLAMNDDIL

SEQ ID NO: 178931 - protein, 214 aa, Unknown
  Bacterial polypetide isolated from the Sargasso Sea
MQAFDTHVGLVAPLDRVNVDTDQIIPKQFLKSIKRTGFGDYLFDAWRFDDPGELGMTPNERVINRAFVLNQPRYQGASILLARNNFGCGSSREHAVWSIMEFGFKVVVAESFADIFYGNCFKNGLLPVRLPPDVIDRLFELSSDGLELSVDLRNQTVTEDAGEVLSFDIDQGMKTKLLEGQDEISLSLNEREKILLFEQGHKKRQPWLFDRKSG

SEQ ID NO: 178932 - protein, 139 aa, Unknown
  Bacterial polypetide isolated from the Sargasso Sea
MSTPKTLYDKIWNDHLVSENEDGTSIIYIDRHLVHEVTSPQAFEGLKIANRSVRKPNFTLATADHNIPTTNRDEGISDPESKLQVDTLEENCKEHGITFLSMSDKRQGIVHIIGPEQGFTQPGMTIVCGDSHTSTHGAF

SEQ ID NO: 178933 - protein, 307 aa, Unknown
  Bacterial polypetide isolated from the Sargasso Sea
EKFIAPNKTIAVPDHNVATTTNRLTNFGSEEGRIQLETLDKNARDFGIHYYPVDDIRQGIVHIIGPEQGWTLPGMTIVCGDSHTATHGAFGALAHGIGTSEVEHVLATQTLIQKKSKNMKVEVSGVLGNGVTAKDITLTIIGKTGTAGGTGYVIEYCGSAIKSLSMEGRMTVCNMAIEGGARAGLIAPDEKTIDYVRGRPRSPTGEKWEKAVEFWKTLYSDSDAEFEKKLFLKAEDIAPVVTWGTSPEDVLPITDFVPSPENFQGSKIEAANRSLEYMGLRPGQKLQDIEVDAVFIGSCTNGRIEDS

SEQ ID NO: 178934 - protein, 74 aa, Unknown
  Bacterial polypetide isolated from the Sargasso Sea
MSKTLYDKIWENHLVHEQSDGTSLIYVDRHLVHEVTSPQAFEGLRLQKRKVRRPELTLAVPDHNVPTTDRSKGI

SEQ ID NO: 178935 - protein, 159 aa, Unknown
  Bacterial polypetide isolated from the Sargasso Sea
MKKNNPKTLFDKIWLHHLVDQQDDGTCLLYIDRHLVHEVTSPQAFEGLRNSNRKVRRPGSTFAVADHNVPTSDRTKGIENKESRIQVETLEKNCNDFDVTLFPLLDSRQGIVHIVGPEQGITQPGMTIVCGDSHTATHGAFGALAFGIGTSEVEHVLAT

SEQ ID NO: 178936 - protein, 261 aa, Unknown
  Bacterial polypetide isolated from the Sargasso Sea
TLGVKGGVGHAYEFAGPAIEALSMEERMTICNMAIEGGARCGYVNPDATTFAYLKGRPHAPTGEAWERAVQWWQSLASGAAAVFDDEVRFDAAAIAPTVTWGITPGQGIGVDEAVPTLEQTPEEDRPLAQEAYRYMDLQPGQQIAGVPVDVCFIGSCTNGRLSDLRAAAEVAVGRQVADGIKAFVVPGSEQVAAAAEAEGLDAVFKAAGFEWREPGCSMCLAMNPDRLEGRQISASSSNRNFKGRQGSASGRTLLMSPAMG

SEQ ID NO: 178937 - protein, 272 aa, Unknown
  Bacterial polypetide isolated from the Sargasso Sea
ADHNVPTTLRDQGINSIKDKIAKLQVETLEKNLSENNIKYIPLTSKNQGIVHIIGPEQGFTIPGTTIVCGDSHTSTHGAFGSLAFGIGTSEVEHVLATQTLVQTKPKNMRIIINGKLKKNVTSKDIILKVISEIGTAAGTGHVIEFSGSTILDMTMEERMTLCNMSIEAGAKAGLIAPDNKTFDYLYGLPFAPKEKNWELAIEYWKKLVTDKGAIFDQEYSFNIEELKPFVTWGTSPENGIAINEKIPDPKQYNNLEKRQSIEKSFNYMGLK

SEQ ID NO: 178938 - protein, 109 aa, Unknown
  Bacterial polypetide isolated from the Sargasso Sea
MPKTIYDKIWNDHLVHQQEDGTSLLFVDRHLIHEVTSPQAFEGLRNSNRKVRQPSLTLAVADHNVPTTDRSVPITDKDSKIQIETLEKNCAEFGINLFGMNDKRQGIVH

SEQ ID NO: 178939 - protein, 303 aa, Unknown
  Bacterial polypetide isolated from the Sargasso Sea
TSEVEHVLATQTLIQKKSKNLLLKVDGKLPIGVTAKDVILKIIGTIGTAGGTGFVIEYSGEVIKNFSMEERMTICNMTIEGGARAGLIQPDEKTFKYLQNRPMSPKNEKWTKALEYWGRLKSDEGCNFDKEVIIKGEEVAPQVTWGTSPQDVVPVNGSVPDPKNEKNQDRRIAMERSLDYMGLKPNTKMTEIKIDKVFIGSCTNGRIQDLREAAKLLKDKKIAKHVNAMVVPGSGLVKNQAEQEGLDKIFKNSGFEWREPGCSMCLGMNEDQLKPKERCASTSNRNFEGRQGRGGRTHLVSPA

SEQ ID NO: 178940 - protein, 108 aa, Unknown
  Bacterial polypetide isolated from the Sargasso Sea
MSAPKTLYDKIWDNHIVSINDDGTTILYIDRHLVHEVTSPQAFEGLRMSGRKVRRPEFTLATADHNVPTMDRDKGIADPDSKLQVETLERNARENNITYLPMSDKAAK

SEQ ID NO: 178941 - protein, 206 aa, Unknown
  Bacterial polypetide isolated from the Sargasso Sea
MNNPNNKTLFDKIWSHHLVHQQEDGTCLIYIDRHLVHEVTSPQAFEGLRDNNRKVHRPESTFAVADHNVPTSDRSKGIDNEESRIQVETLENNCKEFGVTLFPLLDKRQGIVHIVGPEQGITQPGMTIVCGDSHTATHGAFGALAFGIGTSEVEHVLASQTLIQQPAKNMKIAVNGKLKSGVTAKDIILHIIGVIGTAGGTGYVIE

SEQ ID NO: 178942 - protein, 155 aa, Unknown
  Bacterial polypetide isolated from the Sargasso Sea
MGKTLFDKIWDEHVVVQDIDKPSLLYIDLHLIHEVTSPQAFDGLRENNRKVRRPELTIATVDHNVPTKDRHLPIADQISRTQIEYLDRNVKEFGITYYGMNSAGQGIVHVIGPEQGYTQPGKTIVCGDSHTSTHGAFGALAFGIGTSEVEHVLAT

SEQ ID NO: 178943 - protein, 99 aa, Unknown
  Bacterial polypetide isolated from the Sargasso Sea
GIGTSEVEHVLATQSLKVRKLKNMRINFEGSIQEGVSSKDIILYLIRKIGTGGGTGYAVEFAGSYIRNISMEARMTICNMSIEAGAKVGLVSVDEKTIE

SEQ ID NO: 178944 - protein, 80 aa, Unknown
  Bacterial polypetide isolated from the Sargasso Sea
LIYIDRHLVHEVTSPQAFEGLRDNNRKVYRPKSTFAVADHNVPTSDRSKGIDNEESRIQVETLENNCKEFGVTLFPLLDK

SEQ ID NO: 178945 - protein, 213 aa, Unknown
  Bacterial polypetide isolated from the Sargasso Sea
WNKALEHWQSLKTDDDASFDKEVSLQANEILPMITWGTSPQDVITIDGKVPNPSQEKDEDRKNSIERSLRYMGLKPDMSARDIKIDKVFIGSCTNGRIEDLREAAKILKDKKIASHVHAMVVPGSGLVKQQAEQEGLDKIFVNSGFEWREPGCSMCLAMNADKLKPEERCASTSNRNFEGRQGRGGRTHLVSPGMAAAAAISGSLDDVRKYQN

SEQ ID NO: 178946 - protein, 264 aa, Unknown
  Bacterial polypetide isolated from the Sargasso Sea
VIEYAGDAIQSLSMEGRMTICNMSIEAGARAGLIAPDEKTFNYIKGRPYAPKGEDWDKALAFWKSLPSDQNASYDKEINIIAEDITPQITWGTSPQDVAPINGKVPNPETINDSNRRKAVERSLEYMGLEPNQEIEKIKIDKVFIGSCTNGRIEDLREVARVVEGKKVSVEAMIVPGSGLVKEQAESEGLDKIFIEAGFDWREPGCSMCLAMNPDQLKPKERCASTSNRNFEGRQGREGRTHLVSPSVAAASAIKGTFAQESDL

SEQ ID NO: 178947 - protein, 133 aa, Unknown
  Bacterial polypetide isolated from the Sargasso Sea
MTETLFEKIWNSHVVVERENEPSLIYIDRHLIHEVTSPQAFDGLRVNNRKVRRPDLTVATIDHNVPTTDRSLPMIDETSSTQIKTLEKNCEDFGIKLFGINDPNQGIVHVIGPQLGITLPGSTIVCGDSHTST

SEQ ID NO: 178948 - protein, 158 aa, Unknown
  Bacterial polypetide isolated from the Sargasso Sea
GNVIKYEQDNIDTDVIIPGTYLKIHDYNELATHAMEGLDPDFPSKVKDGDFIVAGKNFGCGSSREHAPIALSTCGIKAVIAVSFARIFYRNSVDGAFLLPIEVDEETYKKISNSDSLEINIETNEIKNITKNETYSMKPFSEIIAQIISAGGLFKYKK

SEQ ID NO: 178949 - protein, 232 aa, Unknown
  Bacterial polypetide isolated from the Sargasso Sea
DEKIFKYLEGKPMSPKGKNWENALGYWRNLKSDDGAKFDKEVNLKAEEILPMITWGTSPQDVITIDGKIPNPQNEKNEDKKNSLERALNYMGLKPNMAAKDIKIDKVFIGSCTNGRIEDLREAAKILKDKKIASHVHAMVVPGSGLVKEQAEQEGLDKIFVNSGFEWREPGCSMCLAMNADKLKPEERCASTSNRNFEGRQGRGGRTHLVSPGMAAAAAISGSLDDVRKYQN

SEQ ID NO: 178950 - protein, 125 aa, Unknown
  Bacterial polypetide isolated from the Sargasso Sea
FIGSCTNGRIEDLREAAKILKDKKIAGHVNAMVVPGSGLVKEQAEQEGLDKIFINSGFEWREPGCSMCLAMNADKLKPEERCASTSNRNFEGRQGRGGRTHLVSPAMAAAAAVSGNLDDVRKYTN

SEQ ID NO: 178951 - protein, 128 aa, Unknown
  Bacterial polypetide isolated from the Sargasso Sea
MKKFKNLKSIPAYLPIVNIDTDMIIPKQFLKTIKRTGLGKSLFFEMRYDHDGKEIKDFILNNEPYNNSKILIAGKNFGCGSSREHAPWALLDFGITCVISSSYADIFYNNCFKNGILPITISEEKIKE

SEQ ID NO: 178952 - protein, 201 aa, Unknown
  Bacterial polypetide isolated from the Sargasso Sea
MKKFTSIKSIPAYLPIVNIDTDMIIPKQFLKTIKRTGLGKNLFYEMRYDQSGNLIKDFVLNNDPYNNSKILITGKNFGCGSSREHAPWALMDFGITCVISSSYADIFYNNCFKNGILPIKISEEEIKEISEYSKRKEEIAVDLLGQKIIFGNKEVKFDIDEFKKKCLIEGLDDIALSLEKSDKINSFEKKIRTSKPWIFND

SEQ ID NO: 178953 - protein, 310 aa, Unknown
  Bacterial polypetide isolated from the Sargasso Sea
QAFEGLRKSNRKVRHPELTLAVADHNVPTTDRSEGISDQESKIQVEALDTNCKEFGINIFGMNDKRQGIVHIIGPEQGFTQPGTIIVCGDSHTATHGAFGSLAFGIGTSEVEHVLATQTLVQKKSKNLRINVNGSLPIGVTSKDVILQIIGKIGTAGGTGYVIEYSGNLISSLSVENRMTICNMTIEAGARAGLIQPDQKVFDYLKNKPMSPKNENWDKAIQYWNTLKSDHGAKFDKEVIIEGNEIIPMVTWGTSPQDVITIDGKVPNPDKEKDPDKKNSIERSLKYMGLKPNILAKNIKIDKSFIGSCT

SEQ ID NO: 178954 - protein, 141 aa, Unknown
  Bacterial polypetide isolated from the Sargasso Sea
GLKPNTKIADIKVDRIFIGSCTNGRIGDLREAAKILKGRKIAAHINAMVVPGSGLVKQQAEEEKIDKIFKDAGFDWREPGCSMCLAMNDDKLNPKERCASTSNRNFEGRQGRGGRTHLVSPAMAAAAAIDGHLTDVRKFNN

SEQ ID NO: 178955 - protein, 118 aa, Unknown
  Bacterial polypetide isolated from the Sargasso Sea
MKKFNILKGIPASLPMMNIDTDMIIPKQFLKTIKRTGLGKSLFFEMRYDDNGKKLKNFVLNNKPYDNSPILITGKNFGCGSSREHAPWALLDFGIKCIISPSFADIFYNNCFKNGMLP

SEQ ID NO: 178956 - protein, 234 aa, Unknown
  Bacterial polypetide isolated from the Sargasso Sea
APDEKIFKYLEGKPMSPKGEKWNKALEQWQSLKTDDDASFDKEVSLQANEILPMITWGTSPQDVITIDGKVPNPSEEKDEDRKNSIERSLKYMGLKPDMSARDIKIDKVFIGSCTNGRIEDLREAAKILKDKKIASHVHAMVVPGSGLVKQQAEQEGLDKIFVNSGFEWREPGCSMCLAMNADKLKPEERCASTSNRNFEGRQGRGGRTHLVSPGMAAAAAISGSLDDVRKYQN

SEQ ID NO: 178957 - protein, 77 aa, Unknown
  Bacterial polypetide isolated from the Sargasso Sea
MSTPKTLYDKIWKDHLVSENEDGTSIIYIDRHLVHEVTSPQAFEGLKIANRSVRKPNFTLATADHNIPTTNRDEGIS

SEQ ID NO: 178958 - protein, 273 aa, Unknown
  Bacterial polypetide isolated from the Sargasso Sea
AGGTVYVVEYAGSVISNLSMEERMTVCNMTIEAGARAGLIAPDEKTFKYLKGRTMSPKGENWIKAVKFWKTLYSDKNCKFDKEININGEDIEPLVTWGTSPQDVSPITGLVPDPEKEKNEDRKMAMKRSLDYMGLKANTKMKDIKIDKIFIGSCTNGRIEDLRVAADLLRGKKIAKNISAMVVPGSGLVKLQAEKEGLDKIFKDAGFEWREPGCSMCLGMNPDQLKPKERCASTSNRNFEGRQGRGGRTHLVSPGMAIAAAINGHLSDVREIK

SEQ ID NO: 178959 - protein, 203 aa, Unknown
  Bacterial polypetide isolated from the Sargasso Sea
FWKSLPSDEGAKYDEEILINAEDISPQITWGTSPQDVVAINGIVPNPQEESNPNRKKAMERSLEYMGLEPKQEIQKIKIDKVFIGSCTNGRIEDLREVAKVVEGKKVSVDSMIVPGSGLVKKQAEEEGLDKIFIEAGFDWREPGCSMCLAMNPDQLKPQERCASTSNRNFEGRQGREGRTHLVSPAIAAASAIKGSFATAEDL

SEQ ID NO: 178960 - protein, 251 aa, Unknown
  Bacterial polypetide isolated from the Sargasso Sea
MKTLYDKLWEEHHVTQLDSGESLLYIDRHYLHEVTSPQAFEGLSKKNLKPWRLDANIATPDHNVPTTRGNDFKSEQIKDEISKIQVVELDKNCNTFGIKQFDIKSSKQGIVHVIGPELGYTLPGMTIVCGDSHTSTHGALGCLAMGIGTSEVEHVLATQCLKVSKLKNMIVKFEGMPADNVTSKDIVLYFIGLIGTAGGTGYAIEFAGNYIKDISIESRMTICNMAIEAGAKVGLIAPDETTIEYVREKSS

SEQ ID NO: 178961 - protein, 185 aa, Unknown
  Bacterial polypetide isolated from the Sargasso Sea
MKPKTLFDKIWDSHLVEKQDDGTCLIYIDRHLVHEVTSPQAFEGLRNTGRVVRKPSHTFAVADHNVPTSDRSNGIKNKESRIQVETLEKNCKEFKVNFFPLMDKRQGIVHIVGPEQGITQPGMTIVCGDSHTATHGAFGALAFGIGTSEVEHVLATQTLIQKPAKNMRISVIGSVSPSITSKDII

SEQ ID NO: 178962 - protein, 284 aa, Unknown
  Bacterial polypetide isolated from the Sargasso Sea
MSKTLYDKIWENHLVHEQSDGTSLIYVDRHLVHEVTSPQAFEGLRLQKRKVRRPELTLAVPDHNVPTTDRSKGINDEDSRIQVETLRKNCKDFGVELFDVNDKRQGIVHIIGPEQGFTQPGTVIVCGDSHTATHGAFGALAFGIGTSEVEHVLATQTLMQKKSKNLRINVNGNLPKGVTAKDVILKIIGTIGTAGGTGYVVEFAGNVIKSLSMEERMTVCNMTIEAGARAGLIAPDEKTFNYLKGKTMSPKGDNWTKAVEFWKTLYSDKDCRFDKEINIDGKNI

SEQ ID NO: 178963 - protein, 160 aa, Unknown
  Bacterial polypetide isolated from the Sargasso Sea
MQKFNKLKSIPAYLPIVNIDTDMIIPKQFLKTIKRTGLGKNLFFEMRYDDQGKEINDFVLNKDPFNQSKILIAGKNFGCGSSREHAPWALLDFGITCVISSSYADIFFSNCFKNGILPIILEEEKIKELSEYANRQEEISIDLNEEKIVYGNNELKFEVD

SEQ ID NO: 178964 - protein, 109 aa, Unknown
  Bacterial polypetide isolated from the Sargasso Sea
AKILKDKKVSSHVNAIVVPGSGLVKEQAEQEGLDKIFVSSGFEWREPGCSMCLAMNADKLKPEERCASTSNRNFEGRQGRGGRTHLVSPGMAAAAAISGNLDDVRKYQN

SEQ ID NO: 178965 - protein, 216 aa, Unknown
  Bacterial polypetide isolated from the Sargasso Sea
MPQTLYDKIWKEHIVHQQNDGTTLLYVDRHLIHEVTSPQAFEGLRLSNRKVRKPNLTLAVADHNVPTTNRSEGIHDKESKIQVEELEKNCKEFGIKLFGMNDKRQGIVHIIGPEQGFTQPGTVIVCGDSHTATHGAFGALAFGIGTSEVEHVLATQTLIQKKSKNLRINVIGNLPIGVTSKDVILQTIGKIGTAGGTGFVIEYAGPGIENLSIEQR

SEQ ID NO: 178966 - protein, 144 aa, Unknown
  Bacterial polypetide isolated from the Sargasso Sea
MPESLYDKIWNEHLVHQQEDGTSLLFVDRHLIHEVTSPQAFEGLRNSKRKVRQPKLTLAVADHNVPTTDRSKGILDVESKLQVDTLDSNCKEFGINLFGMNDKRQGIVHIIGPEQGFTQPGTIIVCGDSHTATHGAFGALAFGI

SEQ ID NO: 178967 - protein, 137 aa, Unknown
  Bacterial polypetide isolated from the Sargasso Sea
MSQDTLFDKVWDLHKVSRLPGGSDQIFIGLHLIHEVTSPQAFGALKDKKLKVKFPDRTVATVDHIVPTDNQSRPFKDNLAEQMIETLEKNCLEHKIRFFNIGSGNQGIVHVVAPELGLTQPGMTIACGDSHTSTHGA

SEQ ID NO: 178968 - protein, 68 aa, Unknown
  Bacterial polypetide isolated from the Sargasso Sea
MPQTLYDKIWNQHLVHQQEDGTSLLFVDRHLIHEVTSPQAFEGLRSSNRKVRQPKLTLAVADHNVPTT

SEQ ID NO: 178969 - protein, 312 aa, Unknown
  Bacterial polypetide isolated from the Sargasso Sea
KNCKDFGVELFDVNDKRQGIVHIIGPEQGFTQPGTVIVCGDSHTATHGAFGALAFGIGTSEVEHVLATQTLMQKKSKNLRINVNGNLPKGVTAKDVILKIIGTIGTAGGTGYVVEFAGDVIKSLSMEERMTVCNMTIEAGARAGLIAPDEKTFSYLKGKTMSPKGENWTKAVEFWKTLYSDKDCKFDKEININGKNIEPLVTWGTSPQDVSPVTGVVPDPENEKNEDRKMAMKRSLDYMGLKANTKISDIKIDKIFIGSCTNGRIEDLRLAADLLKGKKIAQNVSAMVVPGSGLVKEQAEKEGIDKILKKQA

SEQ ID NO: 178970 - protein, 267 aa, Unknown
  Bacterial polypetide isolated from the Sargasso Sea
IEYAGNLISGLSVEQRMTICNMTIEGGARAGLIQPDEKIFEYLKNKPMSPKNENWEKAIEYWTKLKTDSDAKFDKEVVLEGPEIKPMVTWGTSPQDVVEIDGQVPNPDNEKDEDRRSSIERSLNYMGLKPNTKIQDIKIDKVFIGSCTNGRIEDLRDAAKILKDKKIANHVDAMIVPGSGLVKEQAEQEGLDQIFIKSGFEWREPGCSMCLAMNADKLKPEERCASTSNRNFEGRQGRGGRTHLVSPAMAAAAAISGNLDDVRKYKN

SEQ ID NO: 178971 - protein, 179 aa, Unknown
  Bacterial polypetide isolated from the Sargasso Sea
MPNTLYDKIWNDHLVDQQSDGTALLFVDRHLVHEVTSPQAFEGLRNSNRKVRHPKLTLAVADHNVPTTDRTNGIADKESKIQVDTLEKNCKEFEVQLFGMDDKRQGIVHIIGPEQGFTQPGTVIVCGDSHTATHGAFGALAFGIGTSEVEHVLATQTLVQKKAKNFRIKVNGKLPIGVT

SEQ ID NO: 178972 - protein, 108 aa, Unknown
  Bacterial polypetide isolated from the Sargasso Sea
AAAIIEGKKVNKNVRAQVMPGSTLTKIQAEKEGIDEIFRSAGFEWRESGCSMCLGMNPDIIAPGERCASTSNRNFEGRQGKGGRTHLVSPEMAAAAAIEGHFVDVRDW

SEQ ID NO: 178973 - protein, 246 aa, Unknown
  Bacterial polypetide isolated from the Sargasso Sea
AFGIGTSEVEHVLATQTLLQKKPKTMSIEAVGNLPFGVTPKDLILSIIGKIGVDGGTGHAIEFRGDAFENMSMEGRMTVCNMTIEGGGRAGMIAPDEKTIEFVQGKKFTPTGKNFDQLLEIWKELKTDDGAKFDTEIKIDCSSLEPHVSWGTNPGQVVSVNSSVPDPNDFDTPEKKSNAESALEYMGLEAGQKISDVKIDRVFIGSCTNGRLEDLRAAAKIIDGKKVSKKRECNGCSGVRYCKNVS

SEQ ID NO: 178974 - protein, 271 aa, Unknown
  Bacterial polypetide isolated from the Sargasso Sea
LFVDRHLIHEVTSPQAFEGLRTSKRKVRQPKLTLAVADHNVPTTDRSKGISDEDSRIQVETLDKNCKEFDIQLFGMNDKRQGIVHIIGPEQGFTQPGNIIVCGDSHTATHGAFGALAFGIGTSEVEHVLATQTLVQKKSKNFRISVNGELSIGVTAKDVILQIIGKIGTAGGTGYVIEYAGNLISGLSVEQRMTICNMTIEGGARAGLIQPDEKIFEYLKNKPMSPKNDNWEKAIEYWSKLKTDPDAKFDKEIVLEGQEIKPMVTWGTSPQ

SEQ ID NO: 178975 - protein, 259 aa, Unknown
  Bacterial polypetide isolated from the Sargasso Sea
MLFYKIIGKIGTAGGTGCVLEYAGSVISDLSVEQRMTICNMSIEGGARAGLIQPDEKIFNYLKGRPMSPKNENWNKALEYWNSLKTDNDAKFDKEINLNGEDIAPMVTWGTSPEDVVTINGKIPNPDNEKNEDKKNSINRSLKYMGLKPDVKVQDIKIDKVFIGSCTNGRIEDLREAAQILKNKKKAAHVHGMVVPGSGLVKEQAEQEGLDKIFIESGFEWREPGCSMCLAMNADKLKPQERCASTSNRNFEGRQGRGG

SEQ ID NO: 178976 - protein, 216 aa, Unknown
  Bacterial polypetide isolated from the Sargasso Sea
GKDWTKLVEYWKSLITDEGAKFDKEINLKASEILPMITWGTSPQDVITIDEKVPNPENETDEDKKNSLERALNYMGLKPNMAAKDIKIDKVFIGSCTNGRIEDLREAAKILKDKKIASHVHAMVVPGSGLVKEQAEQEGLDKIFVNSGFEWREPGCSMCLAMNADKLKPEERCASTSNRNFEGRQGRGGRTHLVSPGMAAAAAISGNLDDVRKYQN

SEQ ID NO: 178977 - protein, 88 aa, Unknown
  Bacterial polypetide isolated from the Sargasso Sea
MQKFNTLKSIPAYLPIVNIDTDMIIPKQFLKTIKRTGLGKNLFFEMRYDDKGKEINDFVLNQKPFNNSKILIAGKNFGCGSSREHAPW

SEQ ID NO: 178978 - protein, 147 aa, Unknown
  Bacterial polypetide isolated from the Sargasso Sea
ERALEYMDLTPGTPLRDVAVDTVFIGSCTNGRIEDLRVAADILQGRKVKEGMRLMVVPGSARVRLQAESEGLDQVFLEAGGEWRGAGCSMCLGMNPDKLTPGERSASTSNRNFEGRQGPGGRTHLVSPAVAASTAVTGHLSSPADLA

SEQ ID NO: 178979 - protein, 152 aa, Unknown
  Bacterial polypetide isolated from the Sargasso Sea
TEDGSDREDFVLNKPAYKDAEILIAGENFGCGSSREHAPWALLDYGIKCIIAPSFADIFFNNSSKNGILLIKLPQEEVDQLMEDAGRGANAKVSVDLEAQEIISPDGRRVTFEFDAFKKHCLLNGLDDIGLTLQKADKIKNFEAGQRVSQPW

SEQ ID NO: 178980 - protein, 247 aa, Unknown
  Bacterial polypetide isolated from the Sargasso Sea
IVHIIGPEQGFTQPGTIIVCGDSHTATHGAFGALAFGIGTSEVEHVLATQTLLQKKSKNFLLKVNGKIPLGVTAKDVILKIIGTIGTAGGTGFVIEYSGDVIRNFSMEERMTVCNMTIEGGARAGLIQPDEKTFKYLENRPLSPKKDNWNKALDYWNNLKSDNDCKFDKVIVLNGDEVVPQVTWGTSPQDVVPVNGSVPDPKKEKDNDRRVAMERSLDYMGLKPNTKMTDIKIDKVFIGSCTNGRIQ

SEQ ID NO: 178981 - protein, 126 aa, Unknown
  Bacterial polypetide isolated from the Sargasso Sea
MEKFFKLKSIPSYLSLQNIDTDMIIPKQFLKTIKRTGLGKSLFYEMRYDEKGKIIEDFILNKEPYNKSKILLAGKNFGCGSSREHAPWALSDFGIKCIISSSFADIFYNNCFKNGILPIKIGEETV

SEQ ID NO: 178982 - protein, 145 aa, Unknown
  Bacterial polypetide isolated from the Sargasso Sea
EYLKSIKKFGFEDYLFDGWRYHDDGRLGIKKEEREINEDFILNKIPFNESKILLARDNFGCGSSREHAVWALRDFGIKAVIASSFGDIFYNNCFKNRVLPIQLKKNQIEELFKTVQDEIVEFSIDLQERIITNGDKEFSFVVGDP

SEQ ID NO: 178983 - protein, 140 aa, Unknown
  Bacterial polypetide isolated from the Sargasso Sea
MKSNSEGLIINGVVAYIDRDNIDTDQIIPTEYLKSIKKFGFEDYLFDGWRYKDDGKLGVTKDERAIDEKFILNKKPFNESKILLTRDNFGCGSSREHAVWALRDFGIKAVIASSFGDIFYNNSFKNGDLPIKLEKKEIDF

SEQ ID NO: 178984 - protein, 130 aa, Unknown
  Bacterial polypetide isolated from the Sargasso Sea
LTFDKVFIGSCTNSRIEDLRQAAEIVKGKTIASNISEAIVVPGSGLVKEQAENEGLDKIFTDAGFIWRDPGCSMCLGMNPDQLKPYERCASTSNRNFEGRQGYLGRTHLMSPIMAAYTAINGTIGDPYEI

SEQ ID NO: 178985 - protein, 164 aa, Unknown
  Bacterial polypetide isolated from the Sargasso Sea
VPDPKKEKNNDRRIAMERSLDYMGLKPNTKMTDIKIDKVFIGSCTNGRIQDLREAAKLLKDKKIAEHVNAMVVPGSGLVKIQAEQEGLDKVFKESGFEWREPGCSMCLGMNEDQLKPRERCASTSNRNFEGRQGRGGRTHLVSPAMAAAAAIEGHLSDVRKFNI

SEQ ID NO: 178986 - protein, 110 aa, Unknown
  Bacterial polypetide isolated from the Sargasso Sea
MEKFTKIKSIPAYIPLMNIDTDKIIPKQFLKTIKRSGLGKSLFYEMRFDEKGNPIKGFILDQKPFNNSKILLTGKNFGCGSSREHAPWALLDFGIKVIVSESFADIFYNN

SEQ ID NO: 178987 - protein, 314 aa, Unknown
  Bacterial polypetide isolated from the Sargasso Sea
TQPGTVIVCGDSHTATHGAFGALAFGIGTSEVEHVLATQTLIQKKSKNLRVNVIGKLPTGVTSKDVILQTIGKIGTAGGTGMVIEYAGSVIENLNIEQRMTICNMSIEAGARAGLIAPDEKTIKYLKDKPFSPKKNNWDKAVEYWSKLKSDTGAKFDREVEIRGDDISPMVTWGTSPQDVVSVTGHVPDPEKEKDESKKESMNRSLNYMGLKPNTKMTDIKVDRIFIGSCTNGRIGDLREAAKILKGKKVAEHVNAMVVPGSGLVKQQAEEEGIDKIFKDSGFEWREPGCSMCLAMNADKLNPKERCASTSNRN

SEQ ID NO: 178988 - protein, 241 aa, Unknown
  Bacterial polypetide isolated from the Sargasso Sea
GIVHVIGPELGITQPGMTIVCGDSHTSTHGAFGAIAFGIGTSQVAQVLASQCLLLNKPKKMRINVNGVLNKNVTPKDVILYIISKLGTNGGTGFFVEYAGDVFEKMSMEGRMTVCNMSIEMGARGGIIAPDDVTYKYLEGKDFSPKEDEFKSKVSIWKKLKSDENAIFDSEFTFNANDIFPMLTYGTNPGMGIKYNDRIPKHSNSSDLNALKYMGFKSGESLIGKKINYVFIGSCTNSRIE

SEQ ID NO: 178989 - protein, 132 aa, Unknown
  Bacterial polypetide isolated from the Sargasso Sea
FEGLTISDRKLWRKDANLATPDHNVPTDNRSLGIKGITDPIALEQVTTLDENCERFEVEQFDILDERQGIVHVVGPEQGATLPGMTIVCGDSHTSTHGAFGALAQGIGTSEVEHVMATQCLVQKKANNFDLS

SEQ ID NO: 178990 - protein, 149 aa, Unknown
  Bacterial polypetide isolated from the Sargasso Sea
MQAFDTHVGLVAPLDRVNVDTDQIIPKQFLKSIKRTGFGDYLFDAWRFDDPGELGMTPNERVINHDFVLNQPRYQGASILLARNNFGCGSSREHAVWSIMEFGFKVVIAESFADIFYGNCFKNGLLPVQLPPDVIDRLFELSSDGLECQ

SEQ ID NO: 178991 - protein, 181 aa, Unknown
  Bacterial polypetide isolated from the Sargasso Sea
KPQVTWGTSPEMVLNYDESIPTVFDAKDENKKNVELARDYMGIENEKKLSDLTFDKVFIGSCTNSRIEDLRQAAEIVKGKTIASNISEAIVVPGSGLVKEQAENEGLDKVFTDAGFIWRDPGCSMCLGMNPDQLKPYERCASTSNRNFEGRQGYLGRTHLMSPIMAAYTAINGTIGDPYEI

SEQ ID NO: 178992 - protein, 131 aa, Unknown
  Bacterial polypetide isolated from the Sargasso Sea
MKSNSEGLIIDGVVAYIDRDNIDTDQIIPTEYLKSIKKFGFEDYLFDGWRYKDDGKLGITKDERLIDENFILNKNPFNESKILLTRDNFGCGSSREHAVWALRDFGIKAVIASSFGDIFYNNSFKNGVLPN

SEQ ID NO: 178993 - protein, 309 aa, Unknown
  Bacterial polypetide isolated from the Sargasso Sea
KEFGVTLFPLLDKRQGIVHIVGPEQGITQPGMTIVCGDSHTATHGAFGALAFGIGTSEVEHVLASQTLIQQPAKNMKISINGKLKSGVTAKDIILHIIGVIGTAGGTGYVIEYTGEAILSLSMEGRMTICNMSIEAGARAGLIAPDQKTFDYIKGRPYAPKGKEWEKAIEFWKSLPSDENAEYDKEININAEDIAPQITWGTSPQDVVPINGKVPNPSSVEDVNRKKSIERSLEYMGLEPDQEINEIKIDKVFIGSCTNGRIEDLREVARVVKGKKVSVDSMIVPGSGLVKEQAESEGLDKIFIEAGFD

SEQ ID NO: 178994 - protein, 239 aa, Unknown
  Bacterial polypetide isolated from the Sargasso Sea
MIKNNPKTLFDKIWSHHLVDKQEDGTCLLYIDRHLVHEVTSPQAFEGLRNSNRKVRRPESTFAVADHNVPTSDRTKGIENKESRIQVETLEKNCDDFNVTLFPLLDSRQGIVHIVGPEQGITQPGMTIVCGDSHTATHGAFGALAFGIGTSEVEHVLATQTLIQNPAKNMRILVNGKLNLGVTAKDIILTIIGKIGTAGGTGYVIEYAGEVISNLSMEGRMTILYMSIRAGARAGLIAP

SEQ ID NO: 178995 - protein, 200 aa, Unknown
  Bacterial polypetide isolated from the Sargasso Sea
MDKFIVLKGIAAPLPMINVDTDMIIPKQFLKTIKRSGLGKNLFHELRYDMQGNIKNDFVLNWDPYKQASILITGDNFGCGSSREHAPWSLLDFGFKCIIAPSFADIFYNNCFKNGILPIRLNQEKVDILMEEAKNKNNLIVDLEDQKIFCADESSIDFDIDSFRKKCLLDGLDDIGLTLQKKELISQYEDNLKSSHPWIL

SEQ ID NO: 178996 - protein, 98 aa, Unknown
  Bacterial polypetide isolated from the Sargasso Sea
KVSVDAMIVPGSGLVKEQAENEGLDKIFIEAGFDWREPGCSMCLAMNPDQLKPKERCASTSNRNFEGRQGREGRTHLVSPVVAAASAIKGTFAQETDL

SEQ ID NO: 178997 - protein, 225 aa, Unknown
  Bacterial polypetide isolated from the Sargasso Sea
PHAPEGEAWNRAVAWWSSLATDANATVDDEVEFDAAAIPPTVTWGITPGQGLGIDETVPSLDQLDPGERPIAEEAYRYMDLQPGTAIAGVPVDVCFIGSCTNGRLSDLRAAADVACGRQVAEGIKAFVVPGSEQVAKAAEAEGLDEVFRAAGFEWREPGCSMCLAMNPDRLEGRQISASSSNRNFKGRQGSASGRTLLMSPAMVAAAAVNGRVTDVRTLISPSAS

SEQ ID NO: 178998 - protein, 224 aa, Unknown
  Bacterial polypetide isolated from the Sargasso Sea
SKDVILQIIGKIGTAGGTGCVIEYAGDLIRSLSVEQRMTICNMTIEGGARAGLIAPDEKIFEYLKGKPMSPKGQNWEKALNYWSGLKTDKDANFDKEINLNAAEILPMITWGTSPQDVITIDGKVPNPQTEKDEDKKNSIERSLKYMGLKPDMSATDIKIDKVFIGSCTNGRIEDLREAAKILKDKKISSHVNAMVVPGSGLVKEQAEQEGLDKIFISSGFEWR

SEQ ID NO: 178999 - protein, 168 aa, Unknown
  Bacterial polypetide isolated from the Sargasso Sea
MEPFVTLKSIPAPLPMINVDTDMIIPKQFLKTIKRSGLGKNLFHELRYDIQGNIKNDFILNWDPYKSSKILIAGANFGCGSSREHAPWSLLDFGFKSIIAPSFADIFYNNCFKNGILPIKLDQTKVDLLMNEAEEKNEITVNLEKQIIIHQEHETINFEIDKFRKKCL

SEQ ID NO: 179000 - protein, 92 aa, Unknown; identical to SEQ ID NO: 178816
  Bacterial polypetide isolated from the Sargasso Sea

SEQ ID NO: 179001 - protein, 80 aa, Unknown
  Bacterial polypetide isolated from the Sargasso Sea
MTINNPKTLFDKIWEHHLVDRQEDGTCLIYIDRHLVHEVTSPQAFEGLRNNNRKVRRPESTFAVADHNVPTSDRSKGIEN

SEQ ID NO: 179002 - protein, 129 aa, Unknown
  Bacterial polypetide isolated from the Sargasso Sea
IAGANFGCGSSREHAPCLLLDFGFKSIIAPIFADIFYNNCFKNGILPINLDQISVDLLMKEADEKKQITVNLEKQIIIYKQDKAISFEIDEFRKKCLIEGLDDIGLTLKKNNQIDIHEEKIHEIQPWIV

SEQ ID NO: 179003 - protein, 321 aa, Unknown
  Bacterial polypetide isolated from the Sargasso Sea
MTAHLLLFVDRHLIHEVTSPQAFEGLRNSNRKVRHPNLTLAVADHNVPTTDRSKGISDEESKIQVDTLEENCKEFGVQLFGMDDKRQGIVHIIGPEQGFTQPGTVIVCGDSHTATHGAFGALAFGIGTSEVEHVLATQTLVQKKAKNFRINVNGELPLGVTSKDVILQIIGKIGTAGGTGSVVEYAGDLIRSLSVEQRMTICNMTIEGGARAGLIAPDEKIFEYLKGKPMSPKSENWDKALNYWETLKTDSDASFDKEISLNANEILPMITWGTSPQDVITIDGKVPNPNNETDEDKKNSIERALKYMGLKPDMAATDIKK

SEQ ID NO: 179004 - protein, 213 aa, Unknown
  Bacterial polypetide isolated from the Sargasso Sea
MHSTLYDKLWNEHFVTSFDSGESLIYIDRHYLHEVTSPQAFEGLIKKNIKPWRVDANIATPDHNVPTLRAKSFAIESIDDEISKIQVKELDKNCDLFGIKQFDIKSLNQGIVHVIGPELGYTLPGMTIVCGDSHTSTHGAFGCLAMGIGTSEVEHVLATQCLKISKLKNMRVNFEGIPSPDITSKDVILFLIRTIGVSGGNGHAIEFAGSYMK

SEQ ID NO: 179005 - protein, 279 aa, Unknown
  Bacterial polypetide isolated from the Sargasso Sea
MSKTLYDKIWENHLVHEQSDGTSLIYVDRHLVHEVTSPQAFEGLRLQKRKVRRPELTLAVPDHNVPTTDRSKGINDEDSRIQVETLRKNCKDFGVELFDVNDKRQGIVHIIGPEQGFTQPGTVIVCGDSHTATHGAFGALAFGIGTSEVEHVLATQTLMQKKSKNLRINVNGNLPKGVTAKDVILKIIGTIGTAGGTGYVVEFAGDVIKSLSMEERMTVCNMTIEAGARAGLIAPDEKTYSYLKGKTMSPKGENWTKAEEFWKTLYSDKDCKFDKEGKY

SEQ ID NO: 179006 - protein, 230 aa, Unknown
  Bacterial polypetide isolated from the Sargasso Sea
MPKTIYDKIWNEHLVHQQSDGTSLLFVDRHLIHEVTSPQAFEGLRNSNRKVRQPKLTLAVADHNVPTTDRSKGISDKESKLQVDTLEKNCKEFGVQLFGMNDKRQGIVHIIGPEQGFTQPGTIIVCGDSHTATHGAFGSLAFGIGTSEVEHVLATQTLVQKKSKNFRINVNGKLSVGVTSKDVILQIIGKIGTAGGTGYVIEYAGNVISSLSVEQRMTICNMTIEGGARA

SEQ ID NO: 179007 - protein, 118 aa, Unknown
  Bacterial polypetide isolated from the Sargasso Sea
MNKFISIKSIPAYLPIVNIDTDMIIPKQFLKTIKRTGLGKNLFFEMRYDQSGKEIDDFILNNSPYNNSKILIAGKNFGCGSSREHAPWALMDFGITCVISSSYADIFYNNCFKNGILP

SEQ ID NO: 179008 - protein, 190 aa, Unknown
  Bacterial polypetide isolated from the Sargasso Sea
MKKFTIIKSIPVYLPIVNIDTDMIIPKQFLKTIKRTGLGKNLFYEMRYDQKGNKINDFILNNDPYDKSKILVAGKNFGCGSSREHAPWALLDFGITCVISSSFADIFYNNCFKNGILPITISEDEIKEISEYSNRKEEISVNLSDQKIIFGNKEISFDIDKFKKKCLMEGLDDIALSLEKIDNIVSFEKE

SEQ ID NO: 179009 - protein, 112 aa, Unknown
  Bacterial polypetide isolated from the Sargasso Sea
REAAKILKDKKIAKHVNAMIVPGSGLVKEQAEQEGLDQIFIKSGFEWREPGCSMCLAMNADKLKPEERCASTSNRNFEGRQGRGGRTHLVSPAMAAAAAISGNLDDVRKYQN

SEQ ID NO: 179010 - protein, 254 aa, Unknown
  Bacterial polypetide isolated from the Sargasso Sea
EQRMTIGNMSIEAGSRAGLIAPDHKTFDYINNREYTPENYDDLVDTWKNSLMSDANAKFDKSFTIDVEKIEPQVSWGTNPAMVSDVTGTVPTPEEFGLNNEIQVKSAKKALAYMNLEPETPIVEISIDRVFIGSCTNARLEDLKDAAEIVKGKKVNPDVNAMVVPGSQMVKYEAEKLGLDKIFKDANFEWRESGCSMCLGMNPDILKSGERCASTSNRNFEGRQGSGGRTHLVSPVMAAASAIAGHFVDVRDVC

SEQ ID NO: 179011 - protein, 233 aa, Unknown
  Bacterial polypetide isolated from the Sargasso Sea
APDDKTIEYFKDRPMSPKGENWTKAVAHWKKLFSDSDAKFDKEVNIDAKDIEPLVTWGTSPQDVSPITGEVPDPEKEKDKDRRTAMYRSLEYMGLKPKMKISDIKVDKIFIGSCTNGRIEDLRLAAKLLKGKKIASDVSAMVVPGSGLVKKQAEEEGIDKVFKNAGFEWREPGCSMCLGMNEDQLSSKERCASTSNRNFEGRQGRGGRTHLVSPGMAVAAAIKGYLADVREIN

SEQ ID NO: 179012 - protein, 116 aa, Unknown
  Bacterial polypetide isolated from the Sargasso Sea
IQDLREAAKLLKDKKIAEHVNAMVVPGSGLVKNQAEQEGLDKIFKDSGFEWREPGCSMCLGMNEDQLKPKERCASTSNRNFEGRQGRGGRTHLVSPAMAAAAAIEGHLSDVRKFGN

SEQ ID NO: 179013 - protein, 151 aa, Unknown
  Bacterial polypetide isolated from the Sargasso Sea
MKKFENIKSIPAYLPLMNIDTDKIIPKQFLKTIKRSGLGKSLFYEMRYDEKGIPIQGFILDNDPYKNSKILITGKNFGCGSSREHAPWALLDFGIKVIVSESFADIFYNNCFKNGILPIVANDNIINELSEYSKRKENIEIKLLEQEIIYG

SEQ ID NO: 179014 - protein, 230 aa, Unknown
  Bacterial polypetide isolated from the Sargasso Sea
LLYIDRHYLHEVTSPQAFEGLSKKNLKPWRLEANIATPDHNVPTTRGNDFKSEQIKDEISKIQVVELDKNCNTFGIKQFDIKSSKQGIVHVIGPELGYTLPGMTIVCGDSHTSTHGALGCLAMGIGTSEVEHVLATQCLKVSKLKNMIVKFEGMPADNVTSKDIVLYFIGLIGTAGGTGYAIEFAGNYIKDISIESRMTICNMAIEAGAKVGLIAPDETTIEYVREKSFL

SEQ ID NO: 179015 - protein, 226 aa, Unknown
  Bacterial polypetide isolated from the Sargasso Sea
KIWNDHLVSENEDGTSIIYIDRHLVHEVTSPQAFEGLKIANRSVRKPNFTLATADHNIPTTNRDEGISDPESKLQVDTLEENCKEHGITFLSMSDKRQGIVHIIGPEQGFTQPGMTIVCGDSHTSTHGAFGALAWGIGTSEVEHVLATQTLVQTKAKNMQINIQGELPLGVTAKDIVLKIIQTIGTAGGTGYVIEYTGDAIKSLTMEGRMTVCNMSIEAGARAGLI

SEQ ID NO: 179016 - protein, 160 aa, Unknown
  Bacterial polypetide isolated from the Sargasso Sea
MIGNVIKYEQDNIDTDVIIPGTYLKIHDYNELATHAMEGIDPDFPSKVKEGDFIVAGKNFGCGSSREHAPIALSTCGIKAVIATSFARIFYRNSVDGAFLLPIEIDDETYQKISNSDQLEVNIEKNEIKNITKNEVYSMKPFSEIIAKIIAAGGLFKYKK

SEQ ID NO: 179017 - protein, 201 aa, Unknown
  Bacterial polypetide isolated from the Sargasso Sea
MQKFSKLKGIPAYLPIVNIDTDMIIPKQFLKTIKRTGLGKNLFFEMRYDDQGKEINDFVLNQRPYNNSNILIAGKNFGCGSSREHAPWALLDFGITCVISSSYADIFYSNCFKNGILPIIIEEEKIKELSEYANRKEEISVDLNEEKIVYGNNEIKFQIDPFKKKCLLEGLDDIALSLKKSDKIENFEKNLKIQKPWIFND

SEQ ID NO: 179018 - protein, 116 aa, Unknown
  Bacterial polypetide isolated from the Sargasso Sea
IEDLRSAAKIIKGRKVSNNVNAMVVPGSMIVKIQAEKEGLDEIFKDSGFEWREAGCSMCLGMNPDILIPGERCASTSNRNFEGRQGKGGRTHLVSPEMAAAAAIKGHFTDIRNWNI

SEQ ID NO: 179019 - protein, 153 aa, Unknown
  Bacterial polypetide isolated from the Sargasso Sea
MEPFKKFTGLVAPLDRSNVDTDQIIPKQFLKRVERTGFGKFAFFDWRYLEGEIPNPDFILNSPRYLGSEILVAGSNFGSGSSREHAPWALLEYGFKVLISTSFADIFKNNCFQNGILPIVLDSAGVSHIMSNSLSADQEGYMVTVDLENQIVT

SEQ ID NO: 179020 - protein, 260 aa, Unknown
  Bacterial polypetide isolated from the Sargasso Sea
GVEIFGMDDKRQGIVHIIGPEQGFTQPGNIIVCGDSHTATHGAFGALAFGIGTSEVEHVLATQTLVQKKSKNFRISVNGSLPIGVTSKDVILQIIGKIGTAGGTGYVIEYAGNLISNLSVEQRMTICNMTIEGGARAGLIQPDERIFQYLKGKPMSPKGENWEKALEHWHTLKSDKDANFDKELTLDGSQIKPMVTWGTSPQDVVEIDGKVPNPENETDPDRKNSINRSLNYMGLKPNTNIQDIKIDKVFIGSCTNGRIE

SEQ ID NO: 179021 - protein, 202 aa, Unknown
  Bacterial polypetide isolated from the Sargasso Sea
KKFNSLKSIPAYLPIVNIDTDMIIPKQFLKTIKRTGLGKNLFFEMRYDEKGNIIKDFALNKEPYNKSKILITGKNFGCGSSREHAPWALLDFGITCIISSSYADIFYNNCFKNGILPITLNDELIKQLSEYALRKEEIFIDLKDEKILFGNNEVTFEIDPFKKKCLLEGLDDIALSLKKSEKIFSFEKKLKNEKPWIFNDHS

SEQ ID NO: 179022 - protein, 128 aa, Unknown
  Bacterial polypetide isolated from the Sargasso Sea
KNFGCGSSREHAPWALSDFGIKCVISSSFADIFYNNCFKNGILPIKIDEQIVIELSEYSKRKEEIDIDLEKQQIKYGNKISKFEIDSFKKKCLIEGLDDIALSLEKISQIDNFEKKIKENSPWLLKND

SEQ ID NO: 179023 - protein, 198 aa, Unknown
  Bacterial polypetide isolated from the Sargasso Sea
MDDKRQGIVHIIGPEQGFTQPGTVIVCGDSHTATHGAFGALAFGIGTSEVEHVLATQTLVQKKAKNFRINVNGELPLGVTSKDVILQIIGKIGTAGGTGCVVEYAGDLIRSLSVEQRMTICNMTIEGGARAGLIAPDEKIFEYLKGKPMSPKGENWDKALNYWETLKTDTGASFDKEISLNANEILPMITWGTSPQDV

SEQ ID NO: 179024 - protein, 218 aa, Unknown
  Bacterial polypetide isolated from the Sargasso Sea
MTICNMTIEGGARAGLIAPDEKIFKYLNEKPMSPKGEEWSKAIEQWQTLKTDNNAIFDKEVSLKADEILPMITWGTSPQDVITIDGKVPNPNQEKDQDRKNSIERSLKYMGLKPDMLARDIKIDKVFIGSCTNGRIEDLREAAKILKDKKIASHVHAMVVPGSGLVKQQAEQEGLDKIFVNSGFEWREPGCSMCLAMNADKLKPEERCASTSNRNFEG

SEQ ID NO: 179025 - protein, 136 aa, Unknown
  Bacterial polypetide isolated from the Sargasso Sea
MAATDIKIDKVFIGSCTNGRIEDLREAAKIVKDKKVSSHVNAIVVPGSGLVKEQAEQEGLDKIFVSSGFEWREPGCSMCLAMNADKLKPEERCASTSNRNFEGRQGRGGRTHLVSPGMAAAAAISGNLDDVRKYQN

SEQ ID NO: 179026 - protein, 103 aa, Unknown
  Bacterial polypetide isolated from the Sargasso Sea
MQKFNKLKSIPAYLPIVNIDTDMIIPKQFLKTIKRTGLGKNLFFEMRYDDQGKEINDFVLNKDPFNQSKILIAGKNFGCGSSREHAPWALLDFGITCVISSSY

SEQ ID NO: 179027 - protein, 200 aa, Unknown
  Bacterial polypetide isolated from the Sargasso Sea
MSKTLYDKIWENHLVHKQSDGTSLIYVDRHLVHEVTSPQAFEGLRLQKRKVRRPELTLAVPDHNVPTTDRSKGINDEDSRIQVQTLRKNCKDFGVELFDVNDKRQGIVHIIGPEQGFTQPGTVIVCGDSHTATHGAFGALAFGIGTSEVEHVLATQTLMQKKSKNLRINVNGNLPKGVTAKDVILKIIGTIGTAGGTGYV

SEQ ID NO: 179028 - protein, 87 aa, Unknown
  Bacterial polypetide isolated from the Sargasso Sea
MKTLYDKLWEEHHVTQLDSGESLLYIDRHYLHEVTSPQAFEGLIKKNLKPWRLNANIATPDHNVPTTRGNNFNSESITDEISKIQVV

SEQ ID NO: 179029 - protein, 129 aa, Unknown
  Bacterial polypetide isolated from the Sargasso Sea
MFEKIWNAHLVHEQEGNSIVYIDRHLVHEVTSPQAFDGLRMSGRSVLHPELTYAVPDHNVPTKNQDKPIEDPIAALQVETLRNNCKEFGITLFDLGDERSGIVHVIGPEQGLTLPWSTIVCGDSHTATH

SEQ ID NO: 179030 - protein, 201 aa, Unknown
  Bacterial polypetide isolated from the Sargasso Sea
MSKTLYDKIWENHLVHEQSDGTSLIYVDRHLVHEVTSPQAFEGLRLHKRKVRRPELTLAVPDHNVPTTDRSKGINDEDSRIQVETLRKNCKDFGVELFDVNDKRQGIVHIIGPEQGFTQPGTVIVCGDSHTATHGAFGALAFGIGTSEVEHVLATQTLMQKKSKNLRINVNGNLPKGVTAKDVILKIIGTIGTAGGTGYVV

SEQ ID NO: 179031 - protein, 127 aa, Unknown
  Bacterial polypetide isolated from the Sargasso Sea
DNFGCGSSREHAPWALADFGIKCVISTSFADIFYNNSFKNGLLPIIVTKDQRDALLHDAKDIENPELEIDLESQEIRRPNGATIKFDLDSFRKKCLMEGLDDIGITLKKEKNIEEFENLMSEKRPWL

SEQ ID NO: 179032 - protein, 170 aa, Unknown
  Bacterial polypetide isolated from the Sargasso Sea
VPVNGSVPDPKKEKDNDRREAMERSLDYMGLKPNTKMTDIKIDKVFIGSCTNGRIQDLREAAKLLKDKKIAEHVNAMVVPGSGLVKIQAEQEGLDKVFKDSGFEWREPGCSMCLGMNEDQLKPRERCASTSNRNFEGRQGRGGRTHLVSPAMAAVAAIEGHLSDVRKFNN

SEQ ID NO: 179033 - protein, 110 aa, Unknown
  Bacterial polypetide isolated from the Sargasso Sea
MEKFTKIKSVPAYIPLMNIDTDKIIPKQFLKTIKRSGLGKSLFYEMRFDEKGNPIEGFILDQEPFNSSKILITGKNFGCGSSREHAPWALLDFGIRVIISESFADIFYNN

SEQ ID NO: 179034 - protein, 236 aa, Unknown
  Bacterial polypetide isolated from the Sargasso Sea
LIAPDEKIFEYLKGKPMSPKGENWEKALNYWNGLKTDREANFDKEINLNAAEILPMITWGTSPQDVITIDGKVPNPQSETDEDRKNSIERSLKYMGLKPDMSATDIKIDKVFIGSCTNGRIEDLREAAKILKDKKISSHVNAMVVPGSGLVKEQAEQEGLDKIFISSGFEWREPGCSMCLAMNADKLKPEERCASTSNRNFEGRQGRGGRTHLVSPGMAAAAAISGNLDDVRKYQN

SEQ ID NO: 179035 - protein, 253 aa, Unknown
  Bacterial polypetide isolated from the Sargasso Sea
MEGRMTLCNMTIEAGARAGIVAPDEKTFEYMNGRDYAPQGEAFEKAVEAWKKLPSDEGAVFDETVKLAADEVFPQVTWGTNPGMVTDINGKVPDPSGISDPAERESIQRALEYMGLEANVPVKDIQIDRVFIGSCTNSRIEDLRAVAGFVKGKKVSGSVSAMIVPGSGLVKQQAESEGLNTIFENAGFEWREPGCSMCLAMNDDVLKPGERCASTSNRNFEGRQGKGSRTHLVSPIMAAAAAIAGNFADPRTL

SEQ ID NO: 179036 - protein, 126 aa, Unknown
  Bacterial polypetide isolated from the Sargasso Sea
DRVFIGSCTNGRIEDLREAAEVVKGKKVSETIGAMIVPGSTLVKKQAEEEGLDKIFIEAGFDWREAGCSMCLGMNPDILSPGERCASTSNRNYEGRQGAGGRTHLVSPKMAAAAALYGKFVDIRNL

SEQ ID NO: 179037 - protein, 220 aa, Unknown
  Bacterial polypetide isolated from the Sargasso Sea
MSPKKENWDRAMEYWEKLKSDSDAEFDKEVTINGKEIIPMVTWGTSPQDVVTIDGKVPDPKNEKNLDRKSSIERSLKYMGLKPNTLVKDIKIDKVFIGSCTNGRIEDLRDAAKVVKDKKIADHVSAIVVPGSGLVKEQAEHEGLDKIFKKSGFEWREPGCSMCLAMNADKLKPEERCASTSNRNFEGRQGRGGRTHLVSPAMAATAAISGNLDDVRKFVN

SEQ ID NO: 179038 - protein, 148 aa, Unknown
  Bacterial polypetide isolated from the Sargasso Sea
MNQNNKPKTLFDKIWNNHLVDEQDDGTSLIYIDRHLVHEVTSPQAFEGLRNSNRIVRRPESTFAVADHNVPTSDRSKGIENLESRIQVETLEKNCKDFNITLFPLLDKRQGIVHIVGPEQGITQPGMTIVCGDSHTATHGAFGALAFG

SEQ ID NO: 179039 - protein, 167 aa, Unknown
  Bacterial polypetide isolated from the Sargasso Sea
MSKINKPKTLFDKIWSNHLVHKQDDGTCLIYIDRHLIHEVTSPQAFEGLRNSNRIVRRPESTFAVADHNVPTTDRSKVIEDKESRVQVEVLEKNCKDFNITFFPLTDKRQGIVHIIGPEQGITQPGMTIVCGDSHTATHGAFGALAFGIGTSEVEHVLATQTLIQNP

SEQ ID NO: 179040 - protein, 215 aa, Unknown
  Bacterial polypetide isolated from the Sargasso Sea
APKGKDWENAVAFWKSLPSDETAIYDKEIIIDGQSIVPQVTWGTSPQDVAPIDGNVPDPNDFKDKNRSNAIKRSLDYMGLEPNQKIRDIKIDRVFIGSCTNGRIEDLREVAKVVKGKKVIVDAMIVPGSGLVKEQAEKEGLDKILIEAGFDWREPGCSMCLAMNPDQLNPKERCASTSNRNFEGRQGREGRTHLVSPGIAAASAIKGTFSRAEDL

SEQ ID NO: 179041 - protein, 208 aa, Unknown
  Bacterial polypetide isolated from the Sargasso Sea
MSKTLYDKIWENHLVHEQNDGTTLIYVDRHLVHEVTSPQAFEGLRLQKRKVRRPELTLAVPDHNVPTTDRTKGIDDEESRIQVETLRSNCKEFGVKLFDVNDKRQGIVHIIGPEQGFTQPGTVIVCGDSHTATHGAFGALAFGIGTSEVEHVLATQTLIQKKSKNFRINVNGELPKGVTAKDVILKIIGTIGTAGGTGYVVEFAGAVI

SEQ ID NO: 179042 - protein, 200 aa, Unknown
  Bacterial polypetide isolated from the Sargasso Sea
MSNQGPKTLFDKIWSEHLVGQREDGTNLLYIDRHLVHEVTSPQAFEGLKLSNRPVHRPEATIAVADHNVPTINRQNIEDPQSKIQVETLAKNTKEHGIQYFDLMDQRQGIVHIIGPEQGITQPGMTIVCGDSHTSTHGAFGALAFGIGTSEVEHVLATQTIVQNPAKNMRISVNGELPFGVNSKDLILYIIGKIGTAGGT

SEQ ID NO: 179043 - protein, 161 aa, Unknown
  Bacterial polypetide isolated from the Sargasso Sea
MPNTLYDKIWNDHLVDQQSDGTALLFVDRHLVHEVTSPQAFEGLRNSNRRVRHPKLTLAVADHNVPTTDRTNGIADQESKIQVDTLEKNCEEFGVQLFGMDDKRQGIVHIIGPEQGFTQPGTVIVCGDSHTATHGAFGALAFGIGTSEVEHVLATQTLVQK

SEQ ID NO: 179044 - protein, 146 aa, Unknown
  Bacterial polypetide isolated from the Sargasso Sea
MSKTLYDKIWENHLVHEQSDGTSLIYVDRHLVHEVTSPQAFEGLRLQKRKVRRPELTLAVPDHNVPTTDRSKGINDEDSRIQVETLRKNCKDFGVELFDVNDKRQGIVHIIGPEQGFTQPGTVIVCGDSHTATHGAFGALAFGIGT

SEQ ID NO: 179045 - protein, 290 aa, Unknown
  Bacterial polypetide isolated from the Sargasso Sea
RRGIIHVVGPEQGITQPGMIIVCGDSHTSTHGALGALAFGIGASDVSHVLATQTLWQPKPKSMRITVTGKRPIGVTAKDIVLSIIHKIGAAGGSGHVIEYTGQGIEDLSIEERLTVCNMSIEAGARAGMIAPDTKTFKYLNDRPYAPEGSDWDRAEEFWRTLSSDRDASFEKEATVDTTQMEPMVTWGTSPEDVLPIGGSVPDPSLETDTKKQASLKRKMDYMGLIPGQIISDIKVDRVFIGSCTNSRIEDLREAATVFNGRKAKIPTLIVPGSGLIKSQAEQEGLDKIF

SEQ ID NO: 179046 - protein, 311 aa, Unknown
  Bacterial polypetide isolated from the Sargasso Sea
KKSKNLRINVNGNLPKGVTAKDVILKIIGTIGTAGGTGYVVEFAGDVIKSLSMEERMTVCNMTIEAGARAGLIAPDEKTFSYLKGKTMSPKGENWTKAVEFWKTLYSDKDCKFDKEVNIDGKNIEPLVTWGTSPQDVSPVTGVVPDPENEKNEDRKMAMKRSLDYMGLKANTKISDIKIDKIFIGSCTNGRIEDLRLAADLLKGKKIAKNVSAMVVPGSGLVKEQAEKEGIDRIFKEAGFEWREPGCSMCLGMNPDQLKPKERCASTSNRNFEGRQGRGGRTHLVSPGMAIAAAIKGHLTDVREYNMEKFN

SEQ ID NO: 179047 - protein, 262 aa, Unknown
  Bacterial polypetide isolated from the Sargasso Sea
AKDLILHVIRTLGVKGGVGFAYEFAGPAVEALSMEERMTLCNMAIEGGARCGYVNPDQVTFDYLNGRAGAPSGEAWDRAVTWWRSLVTDADAVVDDEAVFDAATIAPTVTWGITPGQGLGIDECVPGLEQLEPGERPIAEEAYRYMDLQPGTAIAGVPVDVCFIGSCTNGRISDLRAAAAVARGRRVADGIKAFVVPGSEQVAKAAEAEGLDRVFLDAGFEWREPGCSMCLAMNPDRLEGRQISASSSNRNFKGRQGSASGR

SEQ ID NO: 179048 - protein, 268 aa, Unknown
  Bacterial polypetide isolated from the Sargasso Sea
NSKRNVRHPNLTLAVVDHNIPTTDRSKGIDDNDSRIQVETLEKNCKDFDIKLFGMNDKRQGIVHIVGPEQGFTQPGTVIVCGDSHTATHGAFGALAFGIGTSEVEHVLATQTLVQKKAKNFRINVSGKLPLGVTSKDVILQIIGKIGTAGGTGCVLEYAGSVISNLSVEQRMTICNMSIEGGARAGLIQPDEKIFNYLKDRPMSPKKENWEKALDYWSKLKSDSDAEFDKEINLKGDEIAPMVTWGTSPEDVVSINGKIPNPENEKKY

SEQ ID NO: 179049 - protein, 292 aa, Unknown
  Bacterial polypetide isolated from the Sargasso Sea
MNNPNNKTLFDKIWSHHLVHQQEDGTCLIYIDRHLVHEVTSPQAFEGLRDNNRKVHRPESTFAVADHNVPTSDRSKGIDNEESRIQVETLEDNCKEFGVTLFPLLDKRQGIVHIVGPEQGITQPGMTIVCGDSHTATHGAFGALAFGIGTSEVEHVLASQTLIQQPAKNMKISINGKLKSGVTAKDIILHIIGVIGTAGGTGYVIEYTGEAILSLSMEGRMTICNMSIEAGARAGLIAPDQKTFDYIKGRPYAPKGEEWEKAIEFWKSLPSDENAEYDKEININAEDIAPQI

SEQ ID NO: 179050 - protein, 199 aa, Unknown
  Bacterial polypetide isolated from the Sargasso Sea
MDKFKNIKSIPAYISLMNIDTDKIIPKQFLKTIKRSGLGKNLFYELRFDEKGKPISGFILDNDPYNKSKILITGKNFGCGSSREHAPWALLDFGIRVIISESFADIFYNNCFKNAILPIVADQNIINELSEYSSRKENIEVSLTEQEILYGNKSFKFELDPFKKKCLLEGLDDIALSLNKAESIKSFENKMTQDKPWIL

SEQ ID NO: 179051 - protein, 255 aa, Unknown
  Bacterial polypetide isolated from the Sargasso Sea
DVILQIIGKIGTAGGTGCVVEYAGDLIRSLSVEQRMTICNMTIEGGARAGLIAPDEKIFEYLKGKPMSPNGEKWEKALEYWKSLKSDDNANFDKEITLQANEILPMITWGTSPQDVITIDGKVPNPNKEKDEDKKNSLERALKYMGLKPDMAAKDIKIDKVFIGSCTNGRIEDLREAAKILKDKKIASHVHAMVVPGSGLVKEQAEQEGLDKIFVSSGFEWREPGCSMCLAMNADKLKPEERCASTSNRNFEGRQ

SEQ ID NO: 179052 - protein, 303 aa, Unknown
  Bacterial polypetide isolated from the Sargasso Sea
FEGLRNSNRKVRHPKLTLAVADHNVPTTDRSKGIEDEDSRIQVETLNKNCKEFGVEIFGMDDKRQGIVHIIGPEQGFTQPGNIIVCGDSHTATHGAFGALAFGIGTSEVEHVLATQTLVQKKSKNFRISVNGSLPIGVTSKDVILQIIGKIGTAGGTGYVIEYAGNLISNLSVEQRMTICNMTIEGGARAGLIQPDEKIFQYLKGKPMSPKGENWEKALEYWHKLKSDNDANFDKELTLDGSQIKPMVTWGTSPQDVVEIDGKVPNPESETDPDRKNSINRSLNYMGFKQIRIFQILRLIKFL

SEQ ID NO: 179053 - protein, 113 aa, Unknown
  Bacterial polypetide isolated from the Sargasso Sea
MPKTLYDKIWDDHLVHQQDDGTSLLYVDRHLVHEVTSPQAFEGLRINKRKVRKPKLTLAVADHNVPTTDRSKGINDEDSKIQVDTLRKNCKEFNVPLFDMNDKRQGIVHIIGT

SEQ ID NO: 179054 - protein, 160 aa, Unknown
  Bacterial polypetide isolated from the Sargasso Sea
MIGNVIKYEQDNIDTDVIIPGTYLKIHDYNELATHAMEGLDPDFPSKVKDGDFIVAGKNFGCGSSREHAPIALSTCGIKAVIAVSFARIFYRNSVDGAFLLPIEVDEETYKKISNSDSLEINIETNEIKNITKNETYSMKPFSEIIAQIISAGGLFKYKK

SEQ ID NO: 179055 - protein, 85 aa, Unknown
  Bacterial polypetide isolated from the Sargasso Sea
MTETLFEKIWNSHVVVERENEPSLIYIDRHLIHEVTSPQAFDGLRVNNRKVRRPDLTVATIDHNVPTTDRSLPMIDETSSTQIKT

SEQ ID NO: 179056 - protein, 147 aa, Unknown
  Bacterial polypetide isolated from the Sargasso Sea
MAYDKFNILNTSAVPLNIDNVDTDQIIPARFLKATERKGFGENLFKDWRYNPDDTTIDSFPLNNKIYNGKILVAGKNFGCGSSREHAVWAIYDYGFRAVVSSFFADIFKNNCLNIGVLPVQVSEEFLIDIFSQIDTDPKSNFEINLE

SEQ ID NO: 179057 - protein, 201 aa, Unknown
  Bacterial polypetide isolated from the Sargasso Sea
MKKFTSVKSIPAYLPIVNIDTDMIIPKQFLKTIKRTGLGKNLFFEMRYDQSGNLIEDFTLNKDPYDNSKILITGKNFGCGSSREHAPWALLDFGITCIISSSYADIFYNNCFKNGILPIKISEEEIKEISEYSKRKEEISVNLIEQKIVFGNKEIKFEIDQFKKKCLTEGLDDIALSLEKSDKIISFEKRVKSSKPWIFND

SEQ ID NO: 179058 - protein, 209 aa, Unknown
  Bacterial polypetide isolated from the Sargasso Sea
MKDFIEGIVAPIDRDNIDTDQIIPTEYLKSIKKFGYEDYLFDGWRYKDQGRLGMKKADRKINKEFILNNSPYDESKVLLTRDNFGCGSSREHAVWALRDFGIEVIIASSFGDIFFNNCFKNGVLPLTLKKTEIEELFSLSMNNPITISVNIKDKVILFKDKLSIDFDLDDNLAERIIYGLDEIDITLKDSELIKKFEENRKENNPWIFE

SEQ ID NO: 179059 - protein, 198 aa, Unknown
  Bacterial polypetide isolated from the Sargasso Sea
MEKFNKIKSIPAYIPLMNIDTDKIIPKQFLKTIKRSGLGKSLFYEMRFDEKGNPIKGFILDQEPFNNSKILITGKNFGCGSSREHAPWALLDFGIRVIISKSFADIFYNNCFKNGILPIVAKDEIVNELKDYSSRKENIEIKLSEQEIVYGNKTFKFELDSFKKKCLLEGLDDIALSLKKVKNIENFENKMSQNKPWL

SEQ ID NO: 179060 - protein, 191 aa, Unknown
  Bacterial polypetide isolated from the Sargasso Sea
MEKFINIKSIPAYLPIMNIDTDKIIPKQFLKTIKRSGLGKSLFYEMRYDEKGNPIRGFILDNDPYKNSKILITGKNFGCGSSREHAPWALLDFGIKVIVSESFADIFYNNCFKNGILPIVANENIIKELSEYSVRKENVEIKLAEQEIIYGNKSYKFELDSFKKKCLIEGLDDIALSLEKIKSIDSFEMKI

SEQ ID NO: 179061 - protein, 261 aa, Unknown
  Bacterial polypetide isolated from the Sargasso Sea
MSQDTLFDKVWDLHKVSSLPGGSDQIFIGLHLIHEVTSPQAFGALKDKNLKVKFPERTVATVDHIVPTDNQSRPFKDNLAEQMIETLEKNCLEHKIRFFNIGSGNQGIVHVVAPELGLTQPGMTIACGDSHTSTHGAFGSIAFGIGTSQVRDVLATQTIAMNKLKVRQIWCDNKLSKGVYAKDLVLHIINKLGVKAGSGFAYEFAGPAIDELSMEERMTICNMSIEGGARCGYINPDEKTFSYIKNKLCAPKNKHWDKALK

SEQ ID NO: 179062 - protein, 168 aa, Unknown
  Bacterial polypetide isolated from the Sargasso Sea
TGLGKGLFHELRTDSSGKNTGEFVLDRPPYNNAKIIIAGPNFGCGSSREHAPWALQDFGVKVVISSSYADIFYNNSFKNGMLLIQLSPEQVDELMAVANDSENPELSIDLEKQEILAPNGVSYSFDLEPFLKQCLLEGLDDIGLTLQKDEKISSFEDKQRIGQPWNYK

SEQ ID NO: 179063 - protein, 224 aa, Unknown
  Bacterial polypetide isolated from the Sargasso Sea
MAKTLYQKIYQSHVVAPVNGSTDLLFVDRHLIHEVTSPQAFAGLRQAGRTVRRPDLTYATMDHNVSTQLRSIDAAGETSRKQLEALAANCKEFNVPLLDLMHPDQGIVHVIGPELGLTQPGMIIVCGDSHTSTHGAFGAIAFGIGTSEVEHVLATQTLQQQVAKTLKVEVTGSLSPFVTPKDVIMAVIGQLGTAGGNGYVAEFCGSAIRGMSMEGRMTLCNMSI

SEQ ID NO: 179064 - protein, 147 aa, Unknown
  Bacterial polypetide isolated from the Sargasso Sea
MSAPKTLFDKIWNAHVVHQQDDGTCLIYIDRHLVHEVTSPQAFEGLRNNHRVVRAPNRTLAVADHNIPTTDRSVGIEDEESRIQVEALEKNAADFGVPYFAMDDIRQGIVHVIGPEQGFTLPGMTIVCGDSHTATHGAFGALAFGIG

SEQ ID NO: 179065 - protein, 198 aa, Unknown
  Bacterial polypetide isolated from the Sargasso Sea
MEKFKNINSIPAYLPEINIDTDKIIPKQFLKTIKRTGLGKNLFFEMRYDDKGNLIKDFILNNEPYSNSQILITGKNFGCGSSREHAPWALLDFGIRCIISSSFADIFYNNCFKNGILPIKIEENSIREISEYSKRKEKIEVNLQNQEIKFGNKIKKFEIDKFKKKCLLEGLDDIALSLENIKKIENFEKNILSKKSWI

SEQ ID NO: 179066 - protein, 166 aa, Unknown
  Bacterial polypetide isolated from the Sargasso Sea
MEKFNNLRSIPSYLSLQNIDTDMIIPKQFLKTIKRTGLGKSLFYEMRYDENGKKNVDFILNKEPYNKSKILLAGKNFGCGSSREHAPWALLDFGIKCVISASFADIFYNNCFKNGILPIKIDDKIVVELAEYSNRKEEIGISLEKQEIKYGNKVANFELDPFKKNV

SEQ ID NO: 179067 - protein, 98 aa, Unknown
  Bacterial polypetide isolated from the Sargasso Sea
AENVSAMVVPGSGLVKEQAEKEGIDKIFKEAGFEWREPGCSMCLGMNPDQLKPKERCASTSNRNFEGRQGRGGRTHLVSPGMAIAAAIKGYLTDVREM

SEQ ID NO: 179068 - protein, 127 aa, Unknown
  Bacterial polypetide isolated from the Sargasso Sea
KVFIGSCTNGRIEDIREAAKILKDKKIAKHVNAMIVPGSGLVKEQAEQEGLDQIFIKSGFEWREPGCSMCLAMNADKLKPEERCASTSNRNFEGRQGRGGRTHLVSPAMAAAAAISGNLDDVRKYQN

SEQ ID NO: 179069 - protein, 142 aa, Unknown
  Bacterial polypetide isolated from the Sargasso Sea
MKKFTIVKSIPSYLPIVNIDTDMIIPKQFLKTIKRTGLGKNLFYEMRYDQKGNKINDFILNNDPYNKSKILIAGKNFGCGSSREHAPWALLDFGITCVISPSFADIFYNNCFKNGILPITLSEEEIKEISEYSNRKEEISVN

SEQ ID NO: 179070 - protein, 200 aa, Unknown
  Bacterial polypetide isolated from the Sargasso Sea
MSFTLYDKLWNLHEVSQREDGTYLLYIDRHLIHEVTSPQAFEGLKLAGRKPWRISANIATPDHNVPTTDRDKGIAGINDEVSKLQVVTLDDNCKEHEILQFDIHDKRQGIVHVVGPEQGLTLPGMTIVCGDSHTSTHGALATLSMGIGTSEVEHVLATQCLKTSKLKNMRVNISGELQKGVTPKDVTLAVIGKIGTAGGT

SEQ ID NO: 179071 - protein, 232 aa, Unknown
  Bacterial polypetide isolated from the Sargasso Sea
MEKFITLKGIAAPLPMINVDTDMIIPKQFLKTIKRSGLGKNLFHELRFDIQGNIKNDFVLNWDPYKKATILIAGDNFGCGSSREHAPWSLLDFGFKCIIAPSFADIFYNNCFKNGILPIRLDQEKVNILMTEAKNKNQLTINLDQQKIILAGENVIEFNIDPFRKKCLVEGLDDIGLTLQKKDKISKYEESIKSSHPWIYKMSNKKVLILPGDGIGNEVMAEVLKIIDWMEK

SEQ ID NO: 179072 - protein, 91 aa, Unknown
  Bacterial polypetide isolated from the Sargasso Sea
DCSWIRSSERQAESEGLDKIFIEAGFDWREPGCSMCLAMNPDQLKPRERCASTSNRNFEGRQGREGRTHLVSPVVAAASAIKGSFAQETDL

SEQ ID NO: 179073 - protein, 191 aa, Unknown
  Bacterial polypetide isolated from the Sargasso Sea
IVLNGEDVVPQVTWGTSPQDVVPVNGSVPDPKKEKDSDRRVAMERSLDYMGLKPNTKMTDIKIDKVFIGSCTNGRIQDLREAAKLLKDKKIAGHVNAMVVPGSGLVKIQAEQEGLDKVFKDSGFEWREPGCSMCLGMNEDQLKPRERCASTSNRNFEGRQGRGGRTHLVSPAMAAVAAIEGRLSDVRKFNN

SEQ ID NO: 179074 - protein, 168 aa, Unknown
  Bacterial polypetide isolated from the Sargasso Sea
MESFLTLNSIAAPLPMINVDTDMIIPKQFLKTIKRSGLGKNLFHELRFDIQGNIKNDFVLNWDPYKNSKILIAGANFGCGSSREHAPWSLLDFGFKSIIAPSFADIFYNNCFKNGILPVKLDQNNVDILMKEAEDKQEIIVNLEKQIIIYQEDKTINFEIDEFRKKCL

SEQ ID NO: 179075 - protein, 127 aa, Unknown
  Bacterial polypetide isolated from the Sargasso Sea
IKIDKVFIGSCTNGRIEDLREVAKVVQGKKVSVDSMIVPGSGLVKKQAEDEGLDKIFIEAGFDWREPGCSMCLAMNPDQLKPKERCASTSNRNFEGRQGREGRTHLVSPAIAAASAIKGSFSTVEDL

SEQ ID NO: 179076 - protein, 257 aa, Unknown
  Bacterial polypetide isolated from the Sargasso Sea
IEYTGDVIHSLSMEGRMTICNMSIEAGARAGLIAPDQKTFDYIKGRPYAPKGEEWEKAIEFWKSLPSDDDAKYDKEINIDAEDITPQITWGTSPQDVVPINGKVPNPSSVEDVNRKKSIERSLEYMGLEPDQEITKIKIDKVFIGSCTNGRIEDLREVARVVKGKKVSVDSMIVPGSGLVKEQAESEGLDKIFIEAGFDWREPGCSMCLAMNPDQLKPRERCASTSNRNFEGRQGREGRTHLVSPVVAAASAIKGSF

SEQ ID NO: 179077 - protein, 202 aa, Unknown
  Bacterial polypetide isolated from the Sargasso Sea
MSQDTLFDKVWDLHKVSSLPGGSDQIFIGLHLIHEVTSPQAFGSLKDKNLKVKFPNRTVATVDHIVPTDNQSRPFKDNLAEQMISTLEKNCLKHKIRFYNIGSGHQGIVHVVAPELGLTQPGMTIACGDSHTSTHGAFGSIAFGIGTSQVRDVLATQTIAMNKLKVRQIWCENELSNGVYAKDLVLHIINKLGVMAGGGFCI

SEQ ID NO: 179078 - protein, 300 aa, Unknown
  Bacterial polypetide isolated from the Sargasso Sea
LFIDRHFIHEVTSPVAFVGLKNRGLKVMFPDKTYATADHNTPTLNQHLPIKDKLSAMQVKALEKNCIEHGIDFWGLGHVKNGIVHVIGPENGITQPGLTIVCGDSHTSTHGAFGAIAFGIGTSEVEMVLACQSIMQQKPLKMRINIDGYLNSHVTPKDVAIYIISKLSSSGATGYFVEYSGEVFKNMSMEGRMTVCNLSIEMGARGGMIAPDDKTFEYIKGREYAPKGDDWKKAQSYWRSLKTDNDAIFDKEFNFKASDIEPMITYGTNPGMAIPISKIIPSSNSDSESSYQKALDYMEF

SEQ ID NO: 179079 - protein, 201 aa, Unknown
  Bacterial polypetide isolated from the Sargasso Sea
SDENAKFDKEISLKAEEILPMVTWGTSPQDVITIEEKVPNPQNEKDEDRKNSIERALNYMGLKPNMAAKDIKIDKVFIGSCTNGRIEDLREAAKILKDKKIASHVHAMVVPGSGLVKEQAEQEGLDKIFVNSGFEWREPGCSMCLAMNADKLKPEERCASTSNRNFEGRQGRGGRTHLVSPAMAAAAAISGSIDDVRKYQN

SEQ ID NO: 179080 - protein, 186 aa, Unknown
  Bacterial polypetide isolated from the Sargasso Sea
MPHTLYDKIWNDHLVHEQDDGTALLFVDRHLIHEVTSPQAFEGLRNSNRKVRQPSLTLAVADHNVPTTDRSKGISDRESKIQVETLEANCKEFGIKLFGMNDKRQGIVHVTGPEQGFTQPGTVIVCGDSHTATHGAFGSLAFGIGTSEVEHVLATQTLVQKKAKNFRINVNGKLPLGVTSKECYFT

SEQ ID NO: 179081 - protein, 200 aa, Unknown
  Bacterial polypetide isolated from the Sargasso Sea
QKFNSLKSIPAYLPIVNIDTDMIIPKQFLKTIKRTGLGKNLFFEIRYDENGKKIKDFILNKEPYNKSKILITGKNFGCGSSREHAPWALLDFGITCVISTSYADIFYNNCFKNGILPIVLKEEKIKELSEYSKRKQEISIDLNEEKIFFGNKEIKFKIDSFKKKCLLEGLDDIALSLEKEESISSFEKSLQNQKPWIFND

SEQ ID NO: 179082 - protein, 201 aa, Unknown
  Bacterial polypetide isolated from the Sargasso Sea
MQKFISLKSIPAYLPIVNIDTDMIIPKQFLKTIKRTGLGKNLFFELRYDETGKEISDFILNKKPFCNSNILISGKNFGCGSSREHAPWALLDFGITCIISSSYADIFYNNCFKNGILPIVLNEDKIKDLSEYSNRKEEISVNLADQKIIYGNNEILFEIDPFKKKCLLEGLDDIALSLEKSDKIKSFENKIKNQRPWIFND

SEQ ID NO: 179083 - protein, 278 aa, Unknown
  Bacterial polypetide isolated from the Sargasso Sea
LFGALAFGIGTSEVEHVLATQTLAMEKPKTMKVEVIGDVAEGVGPKDIILGIIRKIGTGGGAGHVIEYVGDVIQNMSMENRMTVCNMSIEGGARAGMIAPDKVTFNYLKEKNYAPKGSVWDDAIAEWENLYSDEDAVFDKVVTIKADELEPSISWGTNPSQVIFVNDTIPHPNDFNEESEKEAASRALEYMDLKPGEKISEIKLDRVFIGSCTNGRIEDLREAAEVVKGKKVSETIGAMIVPGSTLVKKQAEEEGLDKIFIEAGFDWREAGCSMCLGM

SEQ ID NO: 179084 - protein, 82 aa, Unknown
  Bacterial polypetide isolated from the Sargasso Sea
MAGKTLYDKLWDQHVVKTREDGTALIYIDRQLLHEVTSPQAFEGLRIAGRKPWRLDANLATPDHNVPTTVLERKSGIEGIQD

SEQ ID NO: 179085 - protein, 147 aa, Unknown
  Bacterial polypetide isolated from the Sargasso Sea
RSLDYMGLKPNTKMTDIKIDKVFIGSCTNGRIQDLREAAKLLKDKKIAGHVNAMVVPGSGLVKIQAEQEGLDKVFKDSGFEWREPGCSMCLGMNEDQLKPRERCASTSNRNFEGRQGRGGRTHLVSPAMAAVAAIEGHLSDVRKFNN

SEQ ID NO: 179086 - protein, 155 aa, Unknown
  Bacterial polypetide isolated from the Sargasso Sea
MEKFTKIKSIPAYISLMNIDTDKIIPKQFLKTIKRSGLGKSLFYEMRFDEKGNPIKGFILDQEPFNNSKILITGKNFGCGSSREHAPWALLDFGIRVIISESFADIFYNNCFKNGILPIVAKNETINELKDYSVRKESIEVKLEEQEIVYGNKNF

SEQ ID NO: 179087 - protein, 201 aa, Unknown
  Bacterial polypetide isolated from the Sargasso Sea
MQKFNKLKSIPAYLPIVNIDTDMIIPKQFLKTIKRTGLGKNLFFEMRYDDQGKEINDFVLNKDPFNQSKILIAGKNFGCGSSREHAPWALLDFGITCVISSSYADIFFSNCFKNGILPIILEEEKIKELSEYANRQEEISIDLNEEKIVYGNNELKFEVDPFKKKCLLEGLDDIALSLKKSEKIEKFETNLKNEKPWVFND

SEQ ID NO: 179088 - protein, 157 aa, Unknown
  Bacterial polypetide isolated from the Sargasso Sea
MLQTLYDKIWKEHLVHQQEDGTALLFVDRHLIHEVTSPQAFEGLRNSKRTVRQPSLTLAVADHNVPTTDRSKGIDDIESKIQVDTLESNCEEFGIKLFGMNDKRQGIVHIIGPEQGFTQPGTVIVCGDSHTATHGAFGALAFGIGTSEVEHVLATQT

SEQ ID NO: 179089 - protein, 282 aa, Unknown
  Bacterial polypetide isolated from the Sargasso Sea
FYQLLGEIGTAGGTGHVIEYTGQAIRDLSMEGRMTVCNMTIEAGARAGLIAPDEKTFEYVRGRPMAPKSDNWEKAVNYWMSLPSDESASYDRERVIHADNIAPQVTWGTSPEDVIAIDKLVPDPKNEADQAKKDAMERAIGYMGLTPGMRMTDIEINKVFIGSCTNARIEDLRKAAKITEGHKISDGIKAIVVPGSGLVKLQAEEEGLDKIFISAGWEWREPGCSMCIGMNPDKVEAKERCASTSNRNFEGRQGDNARTHLVSPAMAAAAAITGKLTDVRKF

SEQ ID NO: 179090 - protein, 155 aa, Unknown
  Bacterial polypetide isolated from the Sargasso Sea
MPNTLYDKIWNDHLVDQQTDGTALLFVDRHLVHEVTSPQAFEGLRNSNRKVRHPNLTLAVADHNVPTTDRTNGIADQESKIQVDTLEKNCQEFGIQLFGMNDKRQGIVHIIGPEQGFTQPGTVIVCGDSHTATHGAFGALAFGIGTSEVEHVLAT

SEQ ID NO: 179091 - protein, 301 aa, Unknown
  Bacterial polypetide isolated from the Sargasso Sea
TKGIENKESRIQVETLEKNCKDFEVTLFPLLDSRQGIVHIVGPEQGITQPGMTIVCGDSHTATHGAFGALAFGIGTSEVEHVLATQTLIQKPAKNMRIEVNGKLNLGVTAKDIILHIIGQIGTAGGTGYVIEYAGESISNLSMEGRMTICNMSIEAGARAGLIAPDNKTFEYIKGRPYAPKGENWDKALDFWKSLPSDEGAKYDKEIIIKAEDIYPQITWGTSPQDVVSINGKVPNPNEESNLNRKKAMERSLEYMGLEPQQEIQKIKIDKVFIGSCTNGRIEDLREVAKVVQGKKIKVDS

SEQ ID NO: 179092 - protein, 218 aa, Unknown
  Bacterial polypetide isolated from the Sargasso Sea
MNKNPKTLFEKIWEKHVVDEQDGQPTLLYVDLHMIHEVTSPQAFEGLRLANRKVRRPDLTVGVADHAIPTWAGRNSISDPIAKQQVETLTKNCKEFGVTLYDMYHKNQGIVHVIGPDLGLTQPGKIIVCGDSHTSTNGAFGAFAMGIGTSEVEHVLATQTLRQFKPKTMNIHIDGALPKGVTAKDLILGIIKNIGISGAVGHAIEYTGEALTNLSMEG

SEQ ID NO: 179093 - protein, 174 aa, Unknown
  Bacterial polypetide isolated from the Sargasso Sea
QFLKTIKRTGLGKNLFFELRYDEKGNEIKDFILNQEPYNSSKILISGKNFGCGSSREHAPWALLDFGITCVISSSYADIFYNNCFKNGILPIILNEENIKELSEYSNRKEEISIDLREQKIIYGNNEVGFDIDPFKKKCLLEGLDDIALSLEKSDEINSFEKELKNKKPWIFND

SEQ ID NO: 179094 - protein, 252 aa, Unknown
  Bacterial polypetide isolated from the Sargasso Sea
MSTTLYDKIWNDHLVDQQDDGTSLLFVDRHLIHEVTSPQAFEGLRNSNRKVRHPNLTLAVADHNVPTTDRSKGISDEESKIQVDTLEANCKEFGVQLFGMDDKRQGIVHIIGPEQGFTQPGTVIVCGDSHTATHGAFGALAFGIGTSEVEHVLATQTLVQKKAKNFRINVNGELPLGVTSKDVILQIIGKIGTAGGTGSVVEYAGDLIRSLSVEQRMTICNMTIEGGARAGLIAPDEKIFEYLKGKPMSPKR

SEQ ID NO: 179095 - protein, 127 aa, Unknown
  Bacterial polypetide isolated from the Sargasso Sea
MKQTLYDKIWNDHCVLDNDDHSSLIYIDRHLIHEVTSPQAFDGLDIKKRDIWNKKSIMATTDHNVPTINRDQGITDPVSKIQIEALRENCKKHNIELYDLDNLKQGIVHVIGPELGMTQPGMTIVCG

SEQ ID NO: 179096 - protein, 270 aa, Unknown
  Bacterial polypetide isolated from the Sargasso Sea
MSNTLYDKIWNDHLVDQQDDGTSLVFVDRHLIHEVTSPQAFEGLRNSKRKVRHPNLTLAVADHNVPTTDRSKGISDKESKIQVDTLEANCKEFGVQLFGMDDKRQGIVHIIGPEQGFTQPGTVIVCGDSHTATHGAFGALAFGIGTSEVEHVLATQTLVQKKAKNFRINVNGELPLGVTSKDVILQIIGKIGTAGGTGCVVEYGGDLIKSLSVEQRMTICNMTIEGGARAGLIAPDEKIFEYLKGKPMTPNGEKWDKALNYWETLKTDPD

SEQ ID NO: 179097 - protein, 303 aa, Unknown
  Bacterial polypetide isolated from the Sargasso Sea
IGTSEVEHVLATQTLVQKKAKNFRINVNGELPLGVTSKDVILQIIGRIGTAGGTGCVVEYAGNLIRSLSVEQRMTICNMTIEGGARAGLIAPDEKIFEYLKGKPMSPKGENWDKAVNYWETLKTDSNASFDKEISLNANEILPMITWGTSPQDVITIDGKVPNPNNENDQDKKNSIERALNYMGLKPDMAATDIKIDKVFIGSCTNGRIEDLREAAKILKDKKVSSHVNAIVVPGSGLVKEQAEQEGLDKIFVKSGFEWREPGCSMCLAMNADKLKPEERCASTSNRNFEGRQGRGGRTHLVA

SEQ ID NO: 179098 - protein, 207 aa, Unknown
  Bacterial polypetide isolated from the Sargasso Sea
MEKFNKLSGHAIPLRITNVDTDMIIPKQFLKTIKRTGLGEFLFYELRYDQDGNKISSFALNQEQYKGASILIAGKNFGCGSSREHAPWSIADYGIKCIIAPSYADIFYNNCFKNGILPIILDEATVSRLQDTSDSTLNFNIDLEKQNITFLENNEKKEISFEIDPAKKKCLLEGLDDIGLTLNKSASIGHFEEGQENEIPWLYGNKI

SEQ ID NO: 179099 - protein, 123 aa, Unknown
  Bacterial polypetide isolated from the Sargasso Sea
FSRLLYNGRIEDLRAVSQIAKGRKVEKGVHAMIVPGSGLVKEQAEKEGLDKIFIEAGFDWRDPGCSMCLAMNADKLQPQERCASTSNRNFEGRQGRGGRTHLMSPQMAAAAAIRGKLTDFRDL

SEQ ID NO: 179100 - protein, 109 aa, Unknown
  Bacterial polypetide isolated from the Sargasso Sea
MPQTIYDKIWNDHLVHQQEDGTSLLFVDRHLIHEVTSPQAFEGLRNSNRKVRQPSLTLAVADHNVPTTDRSVPITDEDSKIQIETLEKNCAEFGINLFGMNDKRQGIVH

SEQ ID NO: 179101 - protein, 171 aa, Unknown
  Bacterial polypetide isolated from the Sargasso Sea
SPQDVVSINGKVPNPKEENNPNRKKAMERSLEYMGLEPEQEIQKIKIDKVFIGSCTNGRIEDLREVAKVVKGKKVSVDSMIVPGSGLVKKQAEQEGLDKIFIEAGFDWREPGCSMCLAMNPDQLKPQERCASTSNRNFEGRQGREGRTHLVSPAIAAASAIKGSFATIEDL

SEQ ID NO: 179102 - protein, 297 aa, Unknown
  Bacterial polypetide isolated from the Sargasso Sea
GAFGSLAFGIGTSEVEHVLSTQTLIQKPAKNFLIKFTNKLGKGVTAKDVILYLIGQIGTAGGTGYVLEYAGEIIDDMSMEERMTICNMSIEAGARAGLIAPDEKTFDYLYNKPLAPKGKDWDMAVKCWLKLKSDPDAKYEKTLLIDASKIEPQVTWGTSPEDVLTINSTIPNPEQYTNSEKKKSVIRSLKYMDLKPGQKLTDVEIDKVFIGSCTNGRIEDLRKASKILKGNKINPNVKAFVVPGSGLVKKQAEAEGLDKIFKSSGFEWREPGCSMCLAMNADKLKPYERCASTSNRN

SEQ ID NO: 179103 - protein, 191 aa, Unknown
  Bacterial polypetide isolated from the Sargasso Sea
MKQTLYDKIWNDHCILDNDDQSSLIYIDRHLIHEVTSPQAFDGLEIKKRDIWNKKSIMATTDHNVPTINRDQGITDPVSKIQIEALRENCKKHNIELYDLDNLKQGIVHVIGPELGMTQPGMTIVCGDSHTSTHGALASLSFGIGTSDVEHVLATQCLNLTKEKNFNIEVNGVLHPYITSKDLILYIIGSI

SEQ ID NO: 179104 - protein, 180 aa, Unknown
  Bacterial polypetide isolated from the Sargasso Sea
ITWGTSPQDVITIDGKVPNPQSETDEDRKNSIERSLKYMGLKPNMSATDIKIDKVFIGSCTNGRIEDLREAAEILKDKKISSHVNAMVVPGSGLVKEQAEQEGLDKIFINSGFEWREPGCSMCLAMNADKLKPEERCASTSNRNFEGRQGRGGRTHLVSPGMAAAAAISGNLDDVRKYQN

SEQ ID NO: 179105 - protein, 109 aa, Unknown
  Bacterial polypetide isolated from the Sargasso Sea
MQKFNILKSIPAYLPIVNIDTDMIIPKQFLKTIKRTGLGKNLFFEMRYDDHGKEIDNFVLNKDPFKKSKILIAGKNFGCGSSREHAPWALLDFGITCVISSSYADIFYS

SEQ ID NO: 179106 - protein, 272 aa, Unknown
  Bacterial polypetide isolated from the Sargasso Sea
DGTSLLFVDRHLIHEVTSPQAFEGLRNSNRKVRHPKLTLAVADHNVPTTDRSEGIADEDSRIQVETLNKNCKEFGVELFGMDDKRQGIVHIIGPEQGFTQPGNIIVCGDSHTATHGAFGALAFGIGTSEVEHVLATQTLVQKKSKNFRISVNGSLPIGVTSKDVILQIIGKIGTAGGTGYVIEYAGNLISDLSVEQRMTICNMTIEGGARAGLIQPDEKIFKYLKGKPMSPKGENWDQALEYWHTLKSDKDANFDKELTLDGSQIKPMVTWG

SEQ ID NO: 179107 - protein, 188 aa, Unknown
  Bacterial polypetide isolated from the Sargasso Sea
MEKFNNLKSIPSYLSLQNIDTDMIIPKQFLKTIKRTGLGKSLFYEMRYDENGNKISDFILNKEPYNTSKILLAGKNFGCGSSREHAPWALSDFGIKSVISPSFADIFYNNCFKNGILPIKIDEKIVVELAEYCKRKEEIEISLEKQEIKYGNKAAKFELDPFKKKCLMEGLDDIALSMEKISKIDDYE

SEQ ID NO: 179108 - protein, 86 aa, Unknown
  Bacterial polypetide isolated from the Sargasso Sea
GLVKEQAEKEGLDKIFKNAGFEWREPGCSMCLGMNPDQLKPKERCASTSNRNFEGRQGRGGRTHLVSPGMAIAAAIKGRLTDVREI

SEQ ID NO: 179109 - protein, 203 aa, Unknown
  Bacterial polypetide isolated from the Sargasso Sea
MSKTLYDKIWENHLVHEQSDGTSLIYVDRHLVHEVTSPQAFEGLRLQKRKVRRPELTLAVPDHNVPTTDRSKGINDEDSRIQVETLRKNCKDFGVELFDVNDKRQGIVHIIGPEQGFTQPGTVIVCGDSHTATHGAFGALAFGIGTSEVEHVLATQTLMQKKSKNLRINVNGNLPKGVTAKDVILKIIGTIGTAGGTGYVVEF

SEQ ID NO: 179110 - protein, 201 aa, Unknown
  Bacterial polypetide isolated from the Sargasso Sea
MQKFNKLKSIPAYLPIVNIDTDMIIPKQFLKTIKRTGLGKNLFFEMRYDDKGKEINDFVLNNDPYKQSKILIAGKNFGCGSSREHAPWALLDFGITCVISSSYADIFYSNCFKNGILPIILEEEKIKELSEYANRKEEIYIDLNEEKIVYGNNELKFEIDPFKKKCLLEGLDDIALSLKKSEKIEKFENNLKNEKPWVFND

SEQ ID NO: 179111 - protein, 263 aa, Unknown
  Bacterial polypetide isolated from the Sargasso Sea
HGAFGAIAFGIGTSQVRDVLATQCLAMDPLKVRQVRVNGLLGKGVYAKDVILNIIRQLGVKGGVGYAYEFAGAAIENLTMEERMTVCNMAIEGGARAGYINPDDKTYEYLKGRKYAPQGDAFDRAVDWWKSMASDEDAHYDDIYDLDGSSLEPTVTWGITPGQSLYVTEQVPAPADLNEEDRDVANEAYAYMGLQPGQPIAGTPIDVAFIGSCTNSRISDLREAAKVVQGHKVSSKVKPLVVPGSREILKTAEAEGLHEISKK

SEQ ID NO: 179112 - protein, 268 aa, Unknown
  Bacterial polypetide isolated from the Sargasso Sea
VETLEKNCKDFGVDLFGMTDKRQGIVHIVGPEQGFTQPGTVIVCGDSHTATHGAFGALAFGIGTSEVEHVLATQTLVQKKAKNFRINVNGNLALGVTSKDVILQIIGKIGTAGGTGCVIEYAGSLISNLSVEQRMTICNMTIEGGARAGLIQPDEKIFKYLKGRPMSPKNENWEKALKYWSNLKTDSDAKFDKEINLDGKDIIPMVTWGTSPEDVVPIDGKIPNPENENNLDKKNSIYRSLKYMGLKPGTPVKDKKIDKVFIGSCTNG

SEQ ID NO: 179113 - protein, 171 aa, Unknown
  Bacterial polypetide isolated from the Sargasso Sea
TIKRTGLGKSLFYEMRYDEKGKIIEDFILNKEPYNKSKILLAGKNFGCGSSREHAPWALSDFGIKCIISSSFADIFYNNCFKNGILPIKIGEETVLELSDYSKRHEEIEVNLEKQEIFFGNKVVKFEIDKFKKKCLIDGLDDIGLSMKKVNHIDNYEKKINVNKPWILKND

SEQ ID NO: 179114 - protein, 89 aa, Unknown
  Bacterial polypetide isolated from the Sargasso Sea
MSKTLYDKIWEEHLVHQQEDGTSLLYVDRHLIHEVTSPQAFEGLRINKRKVRKPNLTLAVADHNVPTTDRSKGINDQESKIQVDTLRKN

SEQ ID NO: 179115 - protein, 294 aa, Unknown
  Bacterial polypetide isolated from the Sargasso Sea
CLIYIDRHLVHEVTSPQAFEGLRNSNRKVRRPESTFAVADHNVPTSDRTKGIKNKESRIQVETLEKNCKEFEITLFPLLDSRQGIVHIVGPEQGITQPGMTIVCGDSHTATHGAFGALAFGIGTSEVEHVLATQTLIQKPAKNMRIIVNGELKSGVTAKDVILHIIGQIGTAGGTGYVIEYAGEAISNLSMEGRMTICNMSIEAGARAGLIAPDETTFEYIKGRPYAPSEDNWEKALKFWKSLPSDDGAKYDKEIIINAEDIAPQITWGTSPQDVVAIDGTVPNPNEESNPNRK

SEQ ID NO: 179116 - protein, 253 aa, Unknown
  Bacterial polypetide isolated from the Sargasso Sea
MSQTIYDKIWNDHLVHEQKDGTSLLFVDRHLIHEVTSPQAFEGLRTSNRKVRQPKLTLAVADHNVPTTDRSKGISDEDSRIQVETLDKNCKEFNIQLFGMNDKRQGIVHIIGPEQGFTQPGNIIVCGDSHTATHGAFGALAFGIGTSEVEHVLATQTLVQKKSKNFRISVNGELSIGVTAKDVILQIIGKIGTAGGTGYVIEYAGNLISGLSVEQRMTICNMTIEGGARAGLIQPDEKIYEYLKNKPMSPKKK

SEQ ID NO: 179117 - protein, 153 aa, Unknown
  Bacterial polypetide isolated from the Sargasso Sea
ENGKINKNFILNNEPYNKSKILLAGKNFGCGSSREHAPWALLDFGIKCVISSSFADIFYNNCFKNGILPIKIDDKVVLELAEYSKRKEEIEINLDKQVIKYGNKVAKFEVDTFKKKCLQEGLDDIALSMEKISQIDNFEKKLIQEKPWLLKND

SEQ ID NO: 179118 - protein, 299 aa, Unknown
  Bacterial polypetide isolated from the Sargasso Sea
MGRKVLDPARVFAVMDHIVDTRTGRGDGTLMKGGEGFITETRKACAEAGITLFDVNDRDQGIVHVISPEQGIVLPGATLVAPDSHTCTQGAFGAMAWGIGSSEAEHAMVTGTLRLDKPKTMRVRFTGELARGVTAKDMILTLIAAHGAGGGAGYAVEFAGEATRALDMEARMTLCNMATEFSAMTGLIAPDAKTFEYLAGRPYAPADFDDPYWASISSDADARFDQEIEIDASAIAPMVSWGTSPEHTIGVTGIVPGGPQRAHDYSGLSAGTTIAGTPINAAFIGSCTNSRLSDLRRAA

SEQ ID NO: 179119 - protein, 126 aa, Unknown
  Bacterial polypetide isolated from the Sargasso Sea
MSEQGFTQHTGIAAPLDQANVDTDQIIPKQFLTGVTRAGYGKHLFHDWRYLDLEEKEPNPAFALNKPEHKGASLLLARENFGCGSSREHAPWALADFGFKTVIATSFADIFYGNCINNQLVPVALS

SEQ ID NO: 179120 - protein, 317 aa, Unknown
  Bacterial polypetide isolated from the Sargasso Sea
VIGPEQGACLPGMTIVCGDSHTSTNGALGALAFGIGTSDVEHVLATQCLVLKKDKNMLVNIMGRTGKGISAKDIILNIIRKIGTAGGTGYAIEFAGDVIRSLSMEGRMTICNMSIEAGSRFGLIAVDKTTIDYVENRPYSPTNDEWVNAVNIWEKLKSDSDAHFDKVVEIDASKIEPQVTWGTSPEMVVSINNTIPDPAETKNSVKSEGYKNALSYMNLKPGMKFNQIKIDKVFIGSCTNSRIEDLREAADIVKGKKVSKDVKLAMVVPGSGLIKRQAEDEGLAKIFIDSGFEWREPGCSMCLGMNPDQLQSGERCA

SEQ ID NO: 179121 - protein, 225 aa, Unknown
  Bacterial polypetide isolated from the Sargasso Sea
MSKTIYDKIWNEHLVHTQEDGTSLLFVDRHLIHEVTSPQAFEGLRNSKRHVRQPKLTLAVADHNVPTTDRSKGISDKESKIQVDTLEANCKEFGIQLFGMKDKRQGIVHIIGPEQGFTQPGTIIVCGDSHTATHGAFGALAFGIGTSEVEHVLATQTLVQKKSKNFRINVNGELSVGVTSKDVILQIIGKIGTAGGTGYVIEYAGNLISSLSVEQRMTICNMTIE

SEQ ID NO: 179122 - protein, 287 aa, Unknown
  Bacterial polypetide isolated from the Sargasso Sea
TATHGAFGALAFGIGTSDFEHVLATQTLIQKKSKNFLLKVNGKLPVGVTAKDVILKIIGTIGTAGGTGFVIEFSGDIIKDLSMEERMTICNMTIEGGARAGLIQPDEKTFKYLKDKPMSPKNEKWKKALDYWSTLKSDANCKFDKEVIIDGKDIVPQVTWGTSPQDVVPVNSLVPDPNKEKNKDRRIAMERSLDYMGLKPNTKITDIKIDKVFIGSCTNGRIQDLREAAKLLKDKKIANHVHAMVVPGSGLVKDQAEQEGLDKIFKDSGFEWREPGCSMCLGMNEDQ

SEQ ID NO: 179123 - protein, 193 aa, Unknown
  Bacterial polypetide isolated from the Sargasso Sea
SIPAYLPIVNIDTDMIIPKQFLKTIKRTGLGKSLFFEMRYDENEIEVNDFILNKEPYKNSKILIAGKNFGCGSSREHAPWALLDFGITCVISSSYADIFYNNCFKNGILPITLSEEKIKELSEYSIRKEEISIDLKAQKIRYGNNEIQFEIDDFKKKCLLEGYDDIALSLKQSSKIEKFENHIKTSKPWIFND

SEQ ID NO: 179124 - protein, 208 aa, Unknown
  Bacterial polypetide isolated from the Sargasso Sea
EYWSNLKSDEGVNFDKEISLDGKDIKPMVTWGTSPQDVVTIDGKVPNPKNETDPDKKNSIERSLKYMGLNSDVLVQEIKIDKVFIGSCTNGRIEDLREAAKILKDKKIANHVSAMVVPGSGLVKEKAEQEGLDKIFINSGFEWREPGCSMCLAMNADKLKPGERCASTSNRNFEGRQGRGGRTHLVSPGMAAAAAISGNLDDVRKYQN

SEQ ID NO: 179125 - protein, 98 aa, Unknown
  Bacterial polypetide isolated from the Sargasso Sea
MSTTLYDKIWNDHLVDQQDDGTSLLFVDRHLIHEVTSPQAFEGLRNSNRKVRHPNLTLAVADHNVPTTDRSKGISDEQSKIQVDTLEANCKEFGVQLF

SEQ ID NO: 179126 - protein, 202 aa, Unknown
  Bacterial polypetide isolated from the Sargasso Sea
MEKFKNFKSIPAYLPLMNIDTDMIIPKQFLKTIKRTGLGKNLFYEMRYDEKENLIKDFVLNKKPFSNSKILLTGKNFGCGSSREHAPWALLDFGFRCIISPSFADIFYNNCFKNGILPIKITEKKILAISEYSKRKEAINIDLEKQEIKYGNNIEKFELDKFKKKCLLEGLDDISLSLKKIEHIKKYENRIEKEKTWLRNNE

SEQ ID NO: 179127 - protein, 257 aa, Unknown
  Bacterial polypetide isolated from the Sargasso Sea
EHVLATQCLRQSKPKTMEVRVDGTLPFGVTAKDIILGVIGQIGVDGAVGHVIEYTGEAIRSLSMEGRMTVCNMSIEAGGRAGMIAPDETTYEYLKGRPHCPKGRNFDKAIEKWDQYKSDPDAEYDKVVIINAEDLAPFVTWGTNPGMVAKITDSVPNPDSFELESQQLAGQKALEYMQLNAGTPITDIPLDRVFIGSCTNSRIEDLRAAAEVVKGYKVSETVNAMVVPGSFKVKEKAEKEGLDRIFKESGFEWRDAG

SEQ ID NO: 179128 - protein, 209 aa, Unknown
  Bacterial polypetide isolated from the Sargasso Sea
MKDFIEGIVAPIDRDNIDTDQIIPTEYLKSIKKFGYEDYLFDGWRYKDQGRLGMKKDERKINHEFILNNSPYDESKVLLTRDNFGCGSSREHAVWALRDFGIEVVIASSFGDIFYNNCFKNGVLPLKLKKTEIEELFSLSTDNPVTISVNIKDKVMLFKDKLSIDFDLDDNLAERIIYGLDEIDITLKDSELIKKFEEHRKENNPWIFE

SEQ ID NO: 179129 - protein, 112 aa, Unknown
  Bacterial polypetide isolated from the Sargasso Sea
MEESVGRTLAEKVWHNHVVRSAEGEPDLLYIDLHLVHEVTSPQAFDGLRGAGRPVRRPDLTVATEDHNIPTIDVDKPIADPVSRAQVEALRTNCAEFGVPLYSLGNVKQGIV

SEQ ID NO: 179130 - protein, 254 aa, Unknown
  Bacterial polypetide isolated from the Sargasso Sea
EQRMTICNMTIEGGARAGLIAPDEKIFHYLEGRPMSPKGDNWDKALENWKSLKTDDGAKFDKEVNLKAEEILPMITWGTSPQDVITIDEKVPNPQNEKDEDKKNSLERALNYMGLKPNMAAKDIKIDKVFIGSCTNGRIEDLREAAKILKDKKIASHVHAMVVPGSGLVKEQAEQEGLDKIFVNSGFEWREPGCSMCLAMNADKLKPEERCASTSNRNFEGRQGRGGRTHLVSPGMAAAAAISGSLDDVRKYQN

SEQ ID NO: 179131 - protein, 96 aa, Unknown
  Bacterial polypetide isolated from the Sargasso Sea
MSKTLYDKIWENHLVHEQSDGTSLIYVDRHLVHEVTSPQAFEGLRLQKRNVRRPELTLAVPDHNVPTTDRSKGINDEDSRIQVETLRKNCKDFGVQ

SEQ ID NO: 179132 - protein, 198 aa, Unknown
  Bacterial polypetide isolated from the Sargasso Sea
FKTLEGIAAPMPLINIDTDMLIPKQFLKTIKRTGLGKNLFFEMRYDQNGNEIKDFILNREHYSKASIIVGGANFGCGSSREHAPWALLDFGIKCIISISFADIFFNNCFKNGILPIIVSEDMHKSLLLDADTVKTSYMKIDLENQKIVRSNGDQLDFEVDEFKKYCLLNGLDDIGLTLKNSDKITDFEKDYSDKFSWA

SEQ ID NO: 179133 - protein, 279 aa, Unknown
  Bacterial polypetide isolated from the Sargasso Sea
TAGGSGYAIEFAGSTFASMSIEGRMTVCNMAIEAGSRVGLMGVDDKTIDYIKGRQFAPKAALWEQAKAYWKTLVSDSDAAFDSEVRIHADTIAPQVSWGTSPEMVSAVSDNVPLISNQTTSEQKQTLRRALDYMGLQEGQSISSILIDRVFIGSCTNSRIEDMRAAAAIAKGRKKADSVKQVLVVPGSQMVKSQAEAEGLHEIFLNAGMEWREPGCSMCLAMNSDKLGSGEHCASTSNRNFEGRQGIGGRTHLMSPAMAAAAAVSGHITDVRELLSGVG

SEQ ID NO: 179134 - protein, 118 aa, Unknown; identical to SEQ ID NO: 179007
  Bacterial polypetide isolated from the Sargasso Sea

SEQ ID NO: 179135 - protein, 277 aa, Unknown
  Bacterial polypetide isolated from the Sargasso Sea
LMSQTIYDKIWNEHLVHEQEDGTSLLFVDRHLIHEVTSPQAFEGLRTSKRKVRHPKLTLAVADHNVPTTDRSKGISDEDSRIQVETLDKNCKEFGIELFGMDDKRQGIVHIIGPEQGFTQPGNIIVCGDSHTATHGAFGALAFGIGTSEVEHVLATQTLVQKKSKNFRISVNGKLSIGVTAKDVILQIIGKIGTAGGTGYVIEYSGNLISGLSVEQRMTICNMTIEGGARAGLIQPDEKIFEYLKNKPMSPKNENWEKAVEYWSKKKTDSDAKFDKE

SEQ ID NO: 179136 - protein, 205 aa, Unknown
  Bacterial polypetide isolated from the Sargasso Sea
VEFWKSLPSDEGAKYDEEILINAEDISPQITWGTSPQDVVAINGIVPNPLEESNPNRKKAMERSLEYMGLEPKQEIQKIKIDKVFIGSCTNGRIEDLREVAKVVEGKKVSVDSMIVPGSGLVKKQAEEEGLDKIFIEAGFDWREPGCSMCLAMNPDQLKPQERCASTSNRNFEGRQGREGRTHLVSPAIAAASAIKGFFATVEDL

SEQ ID NO: 179137 - protein, 123 aa, Unknown
  Bacterial polypetide isolated from the Sargasso Sea
MPNTLYDKIWNDHLVDQQADGTALLFVDRHLVHEVTSPQAFEGLRNSNRKVRQPKLTLAVADHNVPTTDRSKGISDQESKIQVDTLDTNCKEFGIQLFGMNDKRQGIVHIIGPEQGFTQPGTV

SEQ ID NO: 179138 - protein, 231 aa, Unknown
  Bacterial polypetide isolated from the Sargasso Sea
VILQIIGKIGTAGGTGYVIEYAGNLISNLSVEQRMTICNMTIEGGARAGLIEPDEKVFNYLKGKPMSPKNSNWDKALEYWSKLKSDGDAVFDKEISLEGKDIKPMVTWGTSPQDVVDIDGSVPDPENELNEDRKNSINRSLKYMGLKPKTKIKDIRIDKVFIGSCTNGRIEDLREAAKILKDKKIASHVNAMIVPGSGLVKQQAEQEGLDVIFKNSGFEWREPGCSMCLAM

SEQ ID NO: 179139 - protein, 294 aa, Unknown
  Bacterial polypetide isolated from the Sargasso Sea
KKRMNNPNNKTLFDKIWSHHLVHQQEDGTCLIYIDRHLVHEVTSPQAFEGLRDNNRKVHRPESTFAVADHNVPTSDRSKGIDNEESRIQVETLEDNCKEFGVTLFPLLDKRQGIVHIVGPEQGITQPGMTIVCGDSHTATHGAFGALAFGIGTSEVEHVLASQTLIQQPAKNMKISINGKLKSGVTAKDIILHIIGVIGTAGGTGYVIEYTGEAILSLSMEGRMTICNMSIEAGARAGLIAPDQKTFDYIKGRPYAPKGEEWEKAIEFWKSLPSDENAEYDKEININAEDIAPQ

SEQ ID NO: 179140 - protein, 215 aa, Unknown
  Bacterial polypetide isolated from the Sargasso Sea
MPKTLYDKIWNDHLVDKQHDGTSLLFVDRHLVHEVTSPQAFEGLRNTNRKVRHPELTLAVADHNVPTSDRSKGISDLDSKIQVETLESNCKEFGIDLFGMRDKRQGIVHIIGPEQGFTQPGTLIVCGDSHTATHGAFGSLAFGIGTSEVEHVLATQTLMQKKSKNFRINVSGNLSLGVTSKDVILQIIGKIGTAGGTGYVIEYAGNLISSLSVEQ

SEQ ID NO: 179141 - protein, 191 aa, Unknown
  Bacterial polypetide isolated from the Sargasso Sea
PAYLPIVNIDTDMIIPKQFLKTIKRTGLGKGLFFEMRYDQSGNTINNFILNNDPYNKSKILIAGKNFGCGSSREHAPWALLDFGITCVISSSFADIFYNNCFKNGILPITLIEEEIKEISEYSNRKEEISVNLFNQKIIFGNKEINFEIDEFKKRCLIEGLDDIALSLEKSEKIINFESKIKSTKPWIFND

SEQ ID NO: 179142 - protein, 107 aa, Unknown
  Bacterial polypetide isolated from the Sargasso Sea
SKIADGRKVAEHVNAIIVPGSGLVKKQAEKEGLDKIFIQSGFEWRDPGCSMCLAMNADKLKPKERCASTSNRNFEGRQGRGGRTHLMSPAMAAAAAIKGKLSDCREF

SEQ ID NO: 179143 - protein, 87 aa, Unknown
  Bacterial polypetide isolated from the Sargasso Sea
MEKFKTIKSNAIPLPMVNVDTDMIIPKQFLKTIKRTGLGKNLFYELRYDENDKEIKSFVLNQDEYKDSQILITGKNFGCGSSREHAP

SEQ ID NO: 179144 - protein, 280 aa, Unknown
  Bacterial polypetide isolated from the Sargasso Sea
DKIWDDHLVFQQDDGTSLLYVDRHLVHEVTSPQAFEGLRLNKRKVRKPNFTLAVADHNVPTTDRTKGIHDQQSKIQVDTLRKNCKEFGVPLFDMNDKRQGIVHIIGPEQGFTQPGTIIVCGDSHTATHGAFGALAFGIGTSEVEHVLATQTLLQKKSKNFLLKVDGKIPLGVTAKDVILKIIGTIGTAGGTGFVIEYSGDVIKNFTMEERMTVCNMTIEGGARAGLIQPDEKTFKYLENRPLSPKKDNWKKALDYWSNLKSDKDCKFDKEIVLNGEDVVP

SEQ ID NO: 179145 - protein, 118 aa, Unknown
  Bacterial polypetide isolated from the Sargasso Sea
MAENRTLYDKIWDNHLIHSENDTSLIYIDRHLVHEVTSPQAFEGLREAGRKVHAPNKTIAVPDHNVATTSNRLTNFGSEEGRIQLETLDKNARDFGIHYYPVDDIRQGIVHIIGPEQG

SEQ ID NO: 179146 - protein, 195 aa, Unknown
  Bacterial polypetide isolated from the Sargasso Sea
LKSIPAYLPIVNVDTDMIIPKQFLKTIKRTGLGKNLFFEMRYDENGKKIDGFILNKEPFNKSNILITGKNFGCGSSREHAPWALLDFGITCVISQSYADIFYNNCFKNGILPITISEEEIKELSEYSTRKEEISIMLEDQKILFGNKEIKFEIDQFKKKCLMEGLDDIALSLEQKKKIETFEINLKSNKPWIFND

SEQ ID NO: 179147 - protein, 194 aa, Unknown
  Bacterial polypetide isolated from the Sargasso Sea
LKGIAAPLPMINVDTDMIIPKQFLKTIKRSGLGKNLFHELRFDIQGNIKNDFVLNWDPYKKATILIAGDNFGCGSSREHAPWSLLDFGFKCIVAPSFADIFYNNCFKNGILPIRLNQEKVNILMTEAKNKNQLTINLDEQIIILEDENAIEFDIDPFRKKCLIEGLDDIGLTLQKKDKISKYEESIKSSHPWII

SEQ ID NO: 179148 - protein, 195 aa, Unknown
  Bacterial polypetide isolated from the Sargasso Sea
MSKTLYDKIWEAHLVHQQEDGTSLLYVDRHLVHEVTSPQAFEGLRINRRKVRKPNLTLAVADHNVPTSDRSKGIGDQESKIQVDTLRNNCKEFGVPLFDMNDKRQGIVHIIGPEQGFTQPGTVIVCGDSHTATHGAFGALAFGIGTSEVEHVLATQTLIQKKSKNFLLRVDGKIPVGVTAKDVILKIYWNHRHSW

SEQ ID NO: 179149 - protein, 161 aa, Unknown
  Bacterial polypetide isolated from the Sargasso Sea
MDPFVTLASIPAPLPMINVDTDMIIPKQFLKTIKRSGLGINLFHELRYDMQGNIKNNFVLNWDPYKNSKILITGANFGCGSSREHAPWSLLDFGFKSIIAPSFADIFYNNCFKNGILPIKLDQTKVDLLMKEAEGKNEITVNLEKQTIIYQENINIDFEID

SEQ ID NO: 179150 - protein, 126 aa, Unknown
  Bacterial polypetide isolated from the Sargasso Sea
KIDKVFIGSCTNGRIEDLREVAKVVKGKKVSVDSMIVPGSGLVKKQAESEGLDKIFIEAGFDWREPGCSMCLAMNPDQLKPKERCASTSNRNFEGRQGREGRTHLVSPAIAAASAIKGSFSSVEDL

SEQ ID NO: 179151 - protein, 149 aa, Unknown
  Bacterial polypetide isolated from the Sargasso Sea
GNIKNDFILNWDPYKSACILIAGENFGCGSSREHAPWSLLDFGIKCIIAPSYADIFYNNCFKNGVLPIRLDQSKVDLLMKEAEDKKLISVNLEEQLISSENMKSINFEIDPFRKKCLLEGLDDIALTLKKSDKIESFENNLHDSLPWIV

SEQ ID NO: 179152 - protein, 132 aa, Unknown
  Bacterial polypetide isolated from the Sargasso Sea
MSQTIYDKIWNDHLVHEQKDGTSLLYVDRHLIHEVTSPQAFEGLRTSNRKVRQPKLTLAVADHNVPTTDRSQGISDEDSRIQVETLDKNCKEFDIQLFGMNDKRQGIVHIIGPEQGFTQPGNIIVCGDSHTA

SEQ ID NO: 179153 - protein, 148 aa, Unknown
  Bacterial polypetide isolated from the Sargasso Sea
MSKTLYDKIWNEHLVHQQEDGTSLLFVDRHLIHEVTSPQAFEGLRNSKRKVRQPGLTLAVADHNVPTTDRSKGISDEESKIQVDTLDANCKEFGIQIFGMNDKRQGIVHIIGPEQGFTQPGTIIVCGDSHTATHGAFGALAFGIGTSR

SEQ ID NO: 179154 - protein, 200 aa, Unknown
  Bacterial polypetide isolated from the Sargasso Sea
MSFTLYDKLWNLHEVSRREDGTYLLYIDRHLIHEVTSPQAFEGLKSAGRKPWRISANIATPDHNVPTTDRDKGIAGINDEVSKLQVVTLDDNCKEHEILQFDIHDKRQGIVHVVGPEQGLTLPGMTIVCGDSHTSTHGALATLSMGIGTSEVEHVLATQCLKTSKLKNMRVNISGELQEGVTPKDVTLAVIGRIGTAGGT

SEQ ID NO: 179155 - protein, 225 aa, Unknown
  Bacterial polypetide isolated from the Sargasso Sea
YAYMEGRAYAPKGSLWDEAYEYWQTLPTDEEAVFDNEITLDVEELVPIVTWGTNPGMAQPITGAIPSPDAAENEDERREIQTALDYMGLQPGQGMEEIEIERVFIGSCTNSRIEDLRAAADVAAKGKAKVESWVVPGSQSIKRQAEIEGLDRVFTEAGFQWREPGCSLCTTLNGDLLKDGQRCVSTSNRNFKGRQGPNGRTHLASPAMAAAAAITGKLTDVRTLG

SEQ ID NO: 179156 - protein, 175 aa, Unknown
  Bacterial polypetide isolated from the Sargasso Sea
MEPFSKITSKITPFDKANVDTDQIIPKQFLKLITKSGFGKFLFYDWRFDQNGNPKNDFILNDPTYQNSQILVTNENFGCGSSREHAVWALKDFGFRVIIAPSFADIFFSNCFKNGVLPIILDVSQVERLLKVQDSIELDLNSQKITFGNESIDFEIDPHRKIRLMEGLDDIDLTL

SEQ ID NO: 179157 - protein, 72 aa, Unknown
  Bacterial polypetide isolated from the Sargasso Sea
FKDANFEWRESGCSMCLGMNPDILKPGERCASTSNRNFEGRQGSGGRTHLVSPVMAAASAIAGHFVDVREWC

SEQ ID NO: 179158 - protein, 191 aa, Unknown
  Bacterial polypetide isolated from the Sargasso Sea
MEAFETLSGKAVPLDIINVDTDQIIPKQFLKKIDRAGFGIHLFHDWRYLDDSGTKKNLDFVLNFQRFKGSEILLTRKNFGCGSSREHAPWALYDYGIRCILAPSFADIFYNNCRKNGILAVVLGEDEIQALFEEVEANEGCLLTVDLPRQNVTSPEGKEFSFEIDSFAKNCLLEGLDDIGWTMQFEDKIHS

SEQ ID NO: 179159 - protein, 96 aa, Unknown
  Bacterial polypetide isolated from the Sargasso Sea
EVSAMIVPGSGLIKQQAEQEGLDEIFIAAGFEWRQPGCSMCLAMNDDILKPGERCASTSNRNFEGRQGKGGRTHLVSPLMAAAAAVAGHFVDPRSY

SEQ ID NO: 179160 - protein, 174 aa, Unknown
  Bacterial polypetide isolated from the Sargasso Sea
MSKTLYDKIWDDHLVYTQDDGTSLLYVDRHLVHEVTSPQAFEGLRNSNRKVRQPNLTLAVADHNVPTSDRSKGISDEESKLQVETLEKNCDEFGIKLFGMNDKRQGIVHIIGPEQGFTQPGSIIVCGDSHTATHGAFGSLAFGIGTSEVEHVLATQTLVQKKSKNFRIKVDGKF

SEQ ID NO: 179161 - protein, 179 aa, Unknown
  Bacterial polypetide isolated from the Sargasso Sea
MKKFVVEEGLVMPLDRANVDTDFIIPKQFLKSIKRSGFGVNLFDEHRYLDKGVPDADNSNRPLNPDFVLNQARYQECKILLARKNFGCGSSREHAPWALDDYGFRVILAPSFADIFFNNCFKNGLLPVVLKAEIIEFLFQEVETSPGFSLKVDLERQLITPVTGNDIPFEVDGFRKHCL

SEQ ID NO: 179162 - protein, 220 aa, Unknown
  Bacterial polypetide isolated from the Sargasso Sea
MIINNPKTLFDKIWEHHLVDRQEDGTCLIYIDRHLVHEVTSPQAFEGLRNNNRKVRRPQSTFAVADHNVPTSDRSKGIENKESRIQVETLEKNCKDFDVTLFPLLDSRQGIVHIVGPEQGITQPGMTIVCGDSHTATHGAFGALAFGIGTSEVEHVLATQTLIQKPAKNMRISVEGKLNLGVTAKDIILHIIGKIGTAGGTGYVIEYGGNAISSLSMEGR

SEQ ID NO: 179163 - protein, 149 aa, Unknown
  Bacterial polypetide isolated from the Sargasso Sea
NNKRKVRQPNNTFAVADHNVPTSDRSKGIENLESRIQVETLEQNCKNFNITIFPLLDKRQGIVHIVGPEQGITQPGMTIVCGDSHTATHGAFGSLAFGIGTSEVEHVLATQTLIQKPAKNMLIKIDNDVVSGVTAKDIILHIIGHIGTA

SEQ ID NO: 179164 - protein, 198 aa, Unknown
  Bacterial polypetide isolated from the Sargasso Sea
MNSPKTLFDKVWENHIVHKGDGNQCLLYIDRHLVHEVTSPQAFEGLRVNGRNVRRPDLTLGVADHNVPTTSREKGINSIKDKIAKLQVDTLEKNLAESKIKYIPLTSKNQGIVHIIGPELGFTLPGTTVVCGDSHTSTHGAFGSLAFGIGTSEVEHVLATQTLLQKKPKNLKITINGSLKKNVTSKDIILKIISEIGT

SEQ ID NO: 179165 - protein, 140 aa, Unknown
  Bacterial polypetide isolated from the Sargasso Sea
NEHYSKASIIVGGANFGCGSSREHAPWALKDFGIKCIISTSFADIFFNNCFKNGILPIIVSGEIHQSLLKDAETERTSHMKIDLENQKIIRNNADQVDFEVDEFKKYCLLNGLDDIGLTLKNTDKISSFEKKYSDKFSWA

SEQ ID NO: 179166 - protein, 128 aa, Unknown
  Bacterial polypetide isolated from the Sargasso Sea
MSTTLYDKIWNDHLVDQQEDGTALLFVDRHLIHEVTSPQAFEGLRNSNRKVRHPNLTLAVADHNVPTTDRTKGISDEDSKIQVDTLESNCKEFGVQLFGMDDKRQGIVHIIGPEQGFTQPGQLLYAET

SEQ ID NO: 179167 - protein, 297 aa, Unknown
  Bacterial polypetide isolated from the Sargasso Sea
NHLVNQQEDGTSLLYVDRHLVHEVTSPQAFEGLRNSSRIVRQPSLTLAVADHNVPTTDRTKGIADEDSRIQVETLEKNCKEFGIKLFGMNDKRQGIVHIIGPEQGFTQPGTVIVCGDSHTATHGAFGALAFGIGTSEVEHVLATQTLVQKKSKNLRINVNGKLPIGVTSKDVILQIIGKIGTAGGTGYVIEYSGDLVSSLSVEQRMTICNMTIEGGARAGLIKPDEKIFKYLKGRPLSPKNENWDKALNYWNKLYSDNEAIFDKEVTLDGKDIKPMVTWGTSPQDVVPIDGKVPNPK

SEQ ID NO: 179168 - protein, 172 aa, Unknown
  Bacterial polypetide isolated from the Sargasso Sea
MSTPKTLYDKIWNDHLVSENEDGTSIIYIDRHLVHEVTSPQAFEGLKIANRPVRKPNFTLATADHNIPTTNRDEGISDPESKLQVDTLEENCKDYGITFLSMSDKRQGIVHIIGPEQGFTQPGMTIVCGDSHTSTHGAFGALAWGIGTSEVEHVLATQTLVQTKAKNMQINI

SEQ ID NO: 179169 - protein, 175 aa, Unknown
  Bacterial polypetide isolated from the Sargasso Sea
MEKFLTLKGIAAPLPMINVDTDMIIPKQFLKTIKRSGLGKNLFHELRYDLQGNIKNDFVLNWDPYKSAKILITGANFGCGSSREHAPWSLLDFGFKCIIAPSFADIFYNNCFKNGILPIKLEQTIIDTLLIEAENKNTLTVNLEDQKIVLNNNEEYNFDIDVFRKKCSNRRIRRH

SEQ ID NO: 179170 - protein, 103 aa, Unknown
  Bacterial polypetide isolated from the Sargasso Sea
VVKGKKVSIDAMIVPGSGLVKNQAEEEGLDKIFIEAGFDWREPGCSMCLAMNPDQLKPKERCASTSNRNFEGRQGREGRTHLVSPAVAAASAIKGFFTIAEEL

SEQ ID NO: 179171 - protein, 138 aa, Unknown
  Bacterial polypetide isolated from the Sargasso Sea
MPRTLYDKIWNEHLVHQQDDGTSLLFVDRHLIHEVTSPQAFEGLRNSKRKVRQPKLTLAVVDHNIPTTDRSKGIDDIDSKIQVETLEKNCKEFGIKLFGMDDKRQGIVHIVGPEQGFTQPGTVIVCGDSHTATHGAFG

SEQ ID NO: 179172 - protein, 174 aa, Unknown
  Bacterial polypetide isolated from the Sargasso Sea
TSPQDTISIEGYVPDPQKEKNNEKKLSMIRSLEYMGLKPNTKITDIKVDRIFIGSCTNGRIEDLRDAAKILKNKTIAKHINAMVVPGSGLVKKQAEQEGIDKIFINSGFEWREPGCSMCLAMNADKLNPKERCASTSNRNFEGRQGRGGRTHLVSPAMAAAAAIKGFLADVRKF

SEQ ID NO: 179173 - protein, 135 aa, Unknown
  Bacterial polypetide isolated from the Sargasso Sea
MEKFEKLSSIPAYLPMINVDTDMIIPKQFLKTIKRTGLGKNLFFEMRYNDDGNKIQNFILNKKPYDKSKILIAGKNFGCGSSREHAPWALLDFGIKCVISSSFADIFYNNCFKNGMLPIILDEEKIQMLAKSADQ

SEQ ID NO: 179174 - protein, 242 aa, Unknown
  Bacterial polypetide isolated from the Sargasso Sea
MSKTLYDKIWEEHLVHQQEDGTSLLFVDRHLIHEVTSPQAFEGLRNSNRKVRNPELTLAVADHNVPTTNRSKGIADEESKIQVDTLGRNCKEFGIKLFGMSDKRQGIVHIIGPEQGFTQPGNIIVCGDSHTATHGAFGALAFGIGTSEVEHVLATQTLVQKKSKNLRISVNGKLPIGVTSKDVILQIIGKIGTAGGTGYVIEYAGDVISSLTVENRMTICNMTIEGGARAGLIAPDEKIFRY

SEQ ID NO: 179175 - protein, 202 aa, Unknown
  Bacterial polypetide isolated from the Sargasso Sea
GKLPVGVTAKDVILKIIGTIGTAGGTGFVIEFAGNVIKNLSMEERMTVCNMTIEGGARAGLIEPDEKTFQYLEKKPMSPKKDKWNKAIDYWSKLKSDNGSKFDKEVTINGNEVVPQVTWGTSPQDVVPVNGSVPDPNKEKDKDRQESMKRSLEYMGLKANTKITDIKIDKVFIGSCTNGRIQDLREAAKLLKDKKIAKHVNA

SEQ ID NO: 179176 - protein, 263 aa, Unknown
  Bacterial polypetide isolated from the Sargasso Sea
ACGDSHTSTHGAFGSIAFGIGTSQVRDVLATQTIAMNKLKVRQIWCDNKLSKGVYAKDLVLHIINELGVKAGVGFAYEFAGPAIDELSMEERMTICNMSIEGGARCGYINPDEKTFSYIKDKLCAPKNEHWDKALAWWKSLKSNENAIYDDLIKIDASKIEPTVTWGITPGQSIGINQKIPLLDELSPNDKLVSEEAYEYMSFKQGQYIKDTPVDVCFIGSCTNGRISDLRIAAKVLKDKKVSKNVKAFVVPGSERVANEAKQ

SEQ ID NO: 179177 - protein, 157 aa, Unknown
  Bacterial polypetide isolated from the Sargasso Sea
GDDHSQRKKNPDFFLYQKKNKNAKILVVGDNFGCGSSREHAVWALMDYGFEVVISTSFADIFYNNCFKNGLLPIFVDKEDIQNIITNIEKNNNEFIVNLKNQSIICDDFKIIFEIDSRRKEVLLEGIDDISETLKLSDKIKEYENKKSLKTPWLFND

SEQ ID NO: 179178 - protein, 139 aa, Unknown
  Bacterial polypetide isolated from the Sargasso Sea
TPFNNSKILIAGTNFGCGSSREHAPWALLDFGITCVISSSYADIFFNNCFKNGILPIVLPEAKIKELSEYSKRKEEIIVNLEKQKINFGNSEIDFEVDQFKKKCLIEGLDDIALSLEKNPKITEFEKKLSSDKPWIFND

SEQ ID NO: 179179 - protein, 185 aa, Unknown
  Bacterial polypetide isolated from the Sargasso Sea
MINVDTDMIIPKQFLKTIKRSGLGKNLFHELRYDIQGNIKNNFVLNWDPYKTSTILIAGANFGCGSSREHAPWSLLDFGFRSIIAPSFADIFYNNCFKNGILPIKLDQEKVDLLMEEAEEKKEISVNLEKQIIVYQNKKNIDFEIDEFRKKCLIEGLDDIGLTLQKNNKIDIHEEKIHSIQPWIV

SEQ ID NO: 179180 - protein, 147 aa, Unknown
  Bacterial polypetide isolated from the Sargasso Sea
MKRSLEYMGLKANTKISDIKIDKIFIGSCTNGRIEDLRVAAELLKGKKIANNVSAMVVPGSGLVKEQAEKEGLDRIFKEAGFEWREPGCSMCLGMNPDQLKPRERCASTSNRNFEGRQGRGGRTHLVSPGMAIAAAINGHLADVREI

SEQ ID NO: 179181 - protein, 127 aa, Unknown
  Bacterial polypetide isolated from the Sargasso Sea
MEKFSNLKSIPSYLSLQNIDTDMIIPKQFLKTIKRTGLGKSLFYEMRYDENGKINNDFILNNKPYNKSRILLAGKNFGCGSSREHAPWALLDFGIKCVISSSFADIFYNNCFKNGILPIKIDDKIVL

SEQ ID NO: 179182 - protein, 146 aa, Unknown
  Bacterial polypetide isolated from the Sargasso Sea
MKSNSDGLIINGIVSYIDRDNIDTDQIIPTEYLKSIKKFGYEDYLFDGWRYKDDGKLGVKKEERDINKDFILNNKPFSESKILLTRDNFGCGSSREHAVWALRDFGIKAVIASSFGDIFYNNCFKNGVLPIYLEKNQIEKLFGLVK

SEQ ID NO: 179183 - protein, 200 aa, Unknown
  Bacterial polypetide isolated from the Sargasso Sea
PSDEGSVFDETVRLTADEVFPQVTWGTNPGMVTDINGKVPDPSDINDPAEKESIQRALEYMGLEANVPVKDIQIDRVFIGSCTNSRIEDLRAVAGFVEGKKVSGTVSAMIVPGSGLVKQQAESEGLNTIFENAGFEWREPGCSMCLAMNDDVLKPGERCASTSNRNFEGRQGKGSRTHLVSPIMAAAAAISGNFADPRTL

SEQ ID NO: 179184 - protein, 104 aa, Unknown
  Bacterial polypetide isolated from the Sargasso Sea
MEAFTQLEALTAVMDRINVDTDQIIPKQFLKKIERTGFGKHLFHDWRYLNDEGTEPNPDFILNESRYHGAEILLARDNFGCGSSREHAPWALLDYGFRCIIGPS

SEQ ID NO: 179185 - protein, 97 aa, Unknown
  Bacterial polypetide isolated from the Sargasso Sea
MQKFNKLKSIPAYLPIVNIDTDMIIPKQFLKTIKRTGLGKNLFFEMRYDDQGKEINDFVLNKDPFNQSKILIAGKNFGCGSSREHAPWALLDFGITC

SEQ ID NO: 179186 - protein, 300 aa, Unknown
  Bacterial polypetide isolated from the Sargasso Sea
DHNVPTTDRSKGIDDEESRIQVDTLRKNCKEFGVELFDVGDKRQGIVHIIGPEQGFTQPGTVIVCGDSHTATHGAFGALAFGIGTSEVEHVLATQTLIQKKSKNLRINVNGVLPKGVTAKDVILKIIGTIGTAGGTGYVIEFAGDIIKNLSMEERMTVCNMTIEAGARAGLIAPDEKTFEYLKGKTMSPIGQNWNKALKFWKSLYSDKDCKFDKEINIDGKEIEPLVTWGTSPQDVSPVTGVVPDPDQETNEDRKMAMKRSLEYMGLKANTKISDIKIDKIFIGSCTNGRIEDLRLAADL

SEQ ID NO: 179187 - protein, 200 aa, Unknown
  Bacterial polypetide isolated from the Sargasso Sea
MDPFITLNSIPAPLPMINVDTDMIIPKQFLKTIKRSGLGKNLFHELRYDIQGNIKNDFVLNWDPYKSSKILIAGANFGCGSSREHAPWSLLDFGFKSIIAPSFADIFYNNCFKNGILPIKLDQSKVDLLMKEAEYKNEITVDLDNQIIIYQKDKNMNFEIDEFRKKCLIEGLDDIGLTLKKNNKIDIHEEKIHNIQPWII

SEQ ID NO: 179188 - protein, 270 aa, Unknown
  Bacterial polypetide isolated from the Sargasso Sea
STTLYDKIWNDHLVDQQDDGTSLLFVDRHLIHEVTSPQAFEGLRNSKRKVRHPNLTLAVADHNVPTTDRSKGISDEESKIQVDTLEANCKEFGVQLFGMDDKRQGIVHIIGPEQGFTQPGTVIVCGDSHTATHGAFGALAFGIGTSEVEHVLATQTLVQKKAKNFRINVNGELPLGVTSKDVILQIIGKIGTAGGTGSVVEYAGDLIRSLSVEQRMTICNMTIEGGARAGLIAPDEKIFEYLKGKPMSPKGENWDKALNYWETLKTDADA

SEQ ID NO: 179189 - protein, 243 aa, Unknown
  Bacterial polypetide isolated from the Sargasso Sea
MTTPKTLYDKIWDAHVAHEADDGTCLLYIDRHLVHEVTSPQAFEGLRMSGRGVRAPNKTIAVPDHNVPTTTDREGGIDNEESRIQVEALDKNAREFGVHYYPVSDIRQGIVHIVGPEQGWTLPGMTVVCGDSHTATHGAFGALAHGIGTSEVEHVLATQTLIQKKSNNMKVEIKGKLRPGVTAKDITLSVIGATGTAGGTGYVIEYCGEAIRDLSMEGRMTVCNMAIEGGARAGLIAPDEKTL

SEQ ID NO: 179190 - protein, 299 aa, Unknown
  Bacterial polypetide isolated from the Sargasso Sea
LATQTLIQKPAKNMRISVEGKLNLGVTAKDIILHIIGKIGTAGGTGYVIEYAGNAISSLSMEGRMTICNMSIEAGARAGLIAPDEKTFEYIKGRPYAPSVDNWDKAVEFWKSLPSDEGAKYDEEILINAEDISPQITWGTSPQDVVAINGIVPNPQEESNPNRKKAMERSLEYMGLEPKQEIQKIKIDKVFIGSCTNGRIEDLREVAKVVEGKKVSVDSMIVPGSGLVKKQAEEEGLDKIFIEAGFDWREPGCSMCLAMNPDQLKPQERCASTSNRNFEGRQGREGRTHLVSPAIAAAS

SEQ ID NO: 179191 - protein, 87 aa, Unknown
  Bacterial polypetide isolated from the Sargasso Sea
MSNQGPKTLFDKIWSEHLVGQREDGTNLLYIDRHLVHEVTSPQAFEGLKLSNRPVHRPEATIAVADHNVPTINRQNIEDPQSKIQVE

SEQ ID NO: 179192 - protein, 201 aa, Unknown
  Bacterial polypetide isolated from the Sargasso Sea
MEKFNTFKGIAAPFNILNVDTDKIIPKQFLTTIKRTGLGKYVFDEMRYKKDGSENPDFVLNQKPYNNSNILIAGDNFGCGSSREHAPWALKDFGIKCIISTSFADIFYNNSFKNGLLPIMVSKDERNALLEDAKDKENPEIEIDLENEEIRRPNGGKIKFKIDPFRKKCLLEGLDDIGLTELHESKIKFFEESRSSKHPWL

SEQ ID NO: 179193 - protein, 97 aa, Unknown
  Bacterial polypetide isolated from the Sargasso Sea
MSQIFAQGLVCPLDKNNVDTDQIIPKQFLTSVSRDGFAEALFYDWRYLADGVPNPDFVLNAPEYKGASILLTRANFGCGSSREHAPWAIQQYGFNVV

SEQ ID NO: 179194 - protein, 177 aa, Unknown
  Bacterial polypetide isolated from the Sargasso Sea
QVIAVDQPVPAPESFSDLIKADAARRALTYMGIEAGQKLTDLTVDVVFIGSCTNSRIEDLRQAAAVVQGKQVASGVRALIVPGSGQVKRQAEAEGLADIFKASGFEWREPGCSMCLGMNDDRVEAGQRCASTSNRNFEGRQGRGARTHLVSPAMAAAAAIAGRFVDISFVEVAGGTY

SEQ ID NO: 179195 - protein, 98 aa, Unknown
  Bacterial polypetide isolated from the Sargasso Sea
MKNPKPKTLFDKIWHHHLVNQQEDGTCLIYIDRHLVHEVTSPQAFEGLRDNNRKVHRPESTFAVADHNVPTSDRSKGIDNEESRIQVETLENNCKEFG

SEQ ID NO: 179196 - protein, 262 aa, Unknown
  Bacterial polypetide isolated from the Sargasso Sea
DIILHIIGVIGTAGGTGYVFEYTGEAIHSLSMEGRMTICNMSIEAGARAGLIAPDEKTFNYIKGRPYAPKGKAWDKALTFWKSLPSDENASYEKEINISAEDITPQITWGTSPQDVAPINGKVPNPETIKDSNRRKAVERSLEYMGLEPNQEIEKIKIDKVFIGSCTNGRIEDLREVAKVVAGKKVSVEAMIVPGSGLVKEQAENEGLDKIFIEAGFDWREPGCSMCLAMNPDQLKPKERCASTSNRNFEGRQGREGRTHLV

SEQ ID NO: 179197 - protein, 208 aa, Unknown
  Bacterial polypetide isolated from the Sargasso Sea
TGMVIEYAGSVIENLSIEQRMTICNMSIEAGARAGLIAPDDKTIKYLKDRPMSPKKSNWDKAVEYWSKLKSDLEAQFDKEVEIKGDDISPMVTWGTSPQDVVPITGIVPDPEKEKDNDKKLSMNRSLDYMGLKPNTKITDIKVDRIFIGSCTNGRIGDLRDVANVVKGKKVAQHVNAMIVPGSGLVKIQAEEEGLDKVFKESGFDWRE

SEQ ID NO: 179198 - protein, 124 aa, Unknown
  Bacterial polypetide isolated from the Sargasso Sea
MNNPNNKTLFDKIWSHHLVHQQEDGTCLIYIDRHLVHEVTSPQAFEGLRDNNRKVHRPESTFAVADHNVPTSDRSKGIDNEESRIQVETLEDNCKEFGVTLFPLLDKRQGIVHIVGPEQGITQP

SEQ ID NO: 179199 - protein, 145 aa, Unknown
  Bacterial polypetide isolated from the Sargasso Sea
MSKTLYDKIWDEHLVHQQDDGTSLLYVDRHLVHEVTSPQAFEGLRLNKRKVRKPNFTLAVADHNVPTTDRTKGINDQQSKIQVDTLRKNCKEFGVPLFDMNDKRQGIVHIIGPEQGFTQPGTIIVCGDSHTATHGAFGALAFGIG

SEQ ID NO: 179200 - protein, 157 aa, Unknown
  Bacterial polypetide isolated from the Sargasso Sea
MSQDTLFDKVWDLHKVSTLPGGSDQIFIGLHLIHEVTSPQAFEALKDKNLKVKFPERTVATVDHIVPTDNQSRPFKDKLAEQMIETLEKNCLEHKIRFFNIGSGNQGIVHVVAPELGLTQPGMSIACGDSHTSTHGAFGSIAFGIGTSQVRDVLAPK

SEQ ID NO: 179201 - protein, 173 aa, Unknown
  Bacterial polypetide isolated from the Sargasso Sea
MKTLYDKLWEEHHVTQLDSGESLLYIDRHYLHEVTSPQAFEGLVKKNLKPWRLNANIATPDHNVPTTRGNNFNSESITDEISKIQVVELDKNCNKFGIKQFDIESNKQGIVHVIGPELGFTIPGMTIVCGDSHTSTHGALGCLAMGIGTSEVEHVLATQCLKVSKLKNMNVRF

SEQ ID NO: 179202 - protein, 302 aa, Unknown
  Bacterial polypetide isolated from the Sargasso Sea
VLASQTLIQQPAKNMKISVNGKLKSGVTAKDIILHIIGVIGTAGGTGYVIEYTGDVIHSLSMEGRMTVCNMSIEAGARAGLIAPDQKTFNYIKGRPYAPKGEEWEKAVEFWKSLPSDDDAKYDKEININAEDIAPQITWGTSPQDVVPINGRVPNPLSVEDINRKKSIERSLEYMGLEPDQEINKIKIDKVFIGSCTNGRIEDLREVARVVKGKKVSVDSMIVPGSGLVKEQAESEGLDKIFIEAGFDWREPGCSMCLAMNPDQLKPRERCASTSNRNFEGRQGREGRTHLVSPSCCCCICN

SEQ ID NO: 179203 - protein, 241 aa, Unknown
  Bacterial polypetide isolated from the Sargasso Sea
TAKDIILHIIGKIGTAGGTGYVIEYAGDAISNLSMEGRMTICNMSIEAGARAGLIAPDDKTFEYIKGRPYAPSGENWDKALKFWKSLPSDEGANYDKEIIIKAEDISPQITWGTSPQDVVAINGKIPNPDEENNLNRKKAMERSLEYMGLEPKQEIQNIKIDKVFIGSCTNGRIEDLREVAKVVKGKKVTVDSMIVPGSGLVKKQAEREGLDKIFIEAGFDWREPRLFYVFSYESPDQIKT

SEQ ID NO: 179204 - protein, 71 aa, Unknown
  Bacterial polypetide isolated from the Sargasso Sea
MSTTLYDKIWNDHLVDQQDDGTSLLFVDRHLIHEVTSPQAFEGLRNSNRKVRHANLTLAVADHNVPTTDRS

SEQ ID NO: 179205 - protein, 229 aa, Unknown
  Bacterial polypetide isolated from the Sargasso Sea
MGKTLFEKIWDRHLVASIDESTNLVFIDLHLVHEVTSPQAFDSLRLAGRKVKHPEMTLATVDHGVPTSNRLLGIKDPLSKIQIEALENNCEEFGVTLFGINDPRQGIVHVIGPEQGITQPGMTIVCGDSHTATHGAFGALAFGIGTSEVEHVLATQTLAMEKPKTMKVEVVGDVSEGVGPKDIILGIIRKIGTGGGAGHVIEYVGDVIKKYEYGKQNDYLQHVNLRWCT

SEQ ID NO: 179206 - protein, 281 aa, Unknown
  Bacterial polypetide isolated from the Sargasso Sea
SPQAFEGLRMAGRSVRHPDKTLAVADHNVPTTDRSVEIEDEESKIQIEALKNNCAEFGINFIDMSDIRQGIVHIIGPEQGFTLPGSTIVCGDSHTSTHGAFGALAHGIGTSEVEHVLASQTLIQKKAKNFKVEIVGTLTDSISAKDLALSVIGAIGTAGGTGYVIEYMGNAVESLSMEGRMTLCNLTIEAGARAGLIAPDQKTFDYLKDRPLAPKGDIWDKAVSYWKTLPSDPGAHYDNSIKIDIDNLSPLVTWGTSPEDVIDIDGNIPKPEDIEDEAKKN

SEQ ID NO: 179207 - protein, 232 aa, Unknown
  Bacterial polypetide isolated from the Sargasso Sea
DQKIFDYLKNKPMSPKKENWSKALDNWKNLKSDSGANFDKELNLEAHEIMPMVTWGTSPQDVITIDGKVPNPNDEKDLDKKNSIERSLKYMGLKPNTAAKDIKIDKVFIGSCTNGRIEDLREAAKILKNKKKASHVEAMVVPGSGLVKQQAEQEGLDKIFINSGFEWREPGCSMCLAMNADKLKPEERCASTSNRNFEGRQGRGGRTHLVSPGMAAAAAISGSLDDVRKYQS

SEQ ID NO: 179208 - protein, 112 aa, Unknown
  Bacterial polypetide isolated from the Sargasso Sea
MSTTLYDKIWNDHLVDQQDDGTSLLFVDRHLIHEVTSPQAFEGLRNSNRKVRHPNLTLAVADHNVPTTDRSKGISDEESKIQVDTLEANCKEFGVQLFGMEDKRQGIVHIIG

SEQ ID NO: 179209 - protein, 258 aa, Unknown
  Bacterial polypetide isolated from the Sargasso Sea
DSRIQVDTLNRNCEEFGIKIFGMDDKRQGIVHIIGPEQGFTQPGTIIVCGDSHTATHGAFGSLAFGIGTSEVEHVLATQTLVQKKSKNFRINVNGSLPIGVTSKDVILQIIGKIGTAGGTGYVIEYSGNLISSLSVEQRMTICNMTIEGGARAGLIQPDQKIFKYLKGKPMSPMGENWEKALEYWSNLKSDDDAKFDKEISLEGKSISPMVTWGTSPQDVVSIDGKVPNPMNEKDLDKKNSIERSLKYMGLEPNTSIK

SEQ ID NO: 179210 - protein, 214 aa, Unknown
  Bacterial polypetide isolated from the Sargasso Sea
MRTEDNIQIEGIMAFIDRDNIDTDQIIPTEYLKSIKKFGYEDYLFDGWRYLDEGKLGVPKTSRKLNNEFILNQPIFMTSKILLARDNFGCGSSREHAVWALRDFGIQVIIASSFGDIFYSNCFKNGLLPINLSKSVIDRLFQLSAQDAQLVKVCLQSRNIYVQGEEFSFNLEDDLADRIINQSDEIDISLKFADKISCFEQDRVTKRPWIFYNE

SEQ ID NO: 179211 - protein, 171 aa, Unknown
  Bacterial polypetide isolated from the Sargasso Sea
VVTIDGKVPNPKNESDPDKKNSIERSLKYMGLNSDIRVQDIKIDKVFIGSCTNGRIEDLREAAKILKDKKIAKHVNAMVVPGSGLVKEKAEQEGLDKIFKNSGFEWREPGCSMCLAMNADKLKPGERCASTSNRNFEGRQGRGGRTHLVSPGMAAAAAISGNLDDVRKYQN

SEQ ID NO: 179212 - protein, 124 aa, Unknown
  Bacterial polypetide isolated from the Sargasso Sea
MQKFNKLTSIPAYLPIVNIDTDMIIPKQFLKTIKRTGLGKNLFFEMRYDDEGKEIKEFVLNQKPFNQSKILIAGKNFGCGSSREHAPWALLDFGITCVISPSYADIFYNNCFKNGILPIKIDEE

SEQ ID NO: 179213 - protein, 171 aa, Unknown
  Bacterial polypetide isolated from the Sargasso Sea
IPKQFLKLITKSGFGKFLFYDWRFHHDGQPKSDFVLNDLRYHDSQILVTNENFGCGSSREHAVWALKDFGFNVIIAPSFADIFYSNCFKNGVLPITLDSNQVKKLIQIENKVQLDLITQTITFGDESINFEIDPHKKNRLLEGLDDIDLTFKENTKIENFEKNSKLVSIFQ

SEQ ID NO: 179214 - protein, 316 aa, Unknown
  Bacterial polypetide isolated from the Sargasso Sea
EGPDVLFIDRHMVHEVTSPVAFLGLEKRGLKVLYPNKTLATADHNTPTINQHLPVKDPLSANQLDTLEKNSKKYGVSYWGLGHKKNGIVHVIGPEYGITLPGATIVCGDSHTSTHGAFGAIAFGIGTSEVEMVLSTQCIMQVKPKKMRINVNGELGEAVTPKDVALYIISKLSTSGATGFFVEYAGTVFSEMSMEGRMTVCNLSIEMGARGGMIAPDEKTFSYIKNREFTPKNKDWTKAMEYWKTLHSDPKSKFDKEFYFNGNEIEPMITYGTNPGMGISITKGIPSGKNLGKAKITYKKSLDYMGYSEGEEMMEK

SEQ ID NO: 179215 - protein, 183 aa, Unknown
  Bacterial polypetide isolated from the Sargasso Sea
MQKFNQLKSIPAYLPIVNVDTDMIIPKQFLKTIKRTGLGKNLFFEMRYDDEGNEIKDFILNQKPFNNSKILIAGKNFGCGSSREHAPWALLDFGITCVISSSYADIFYNNCFKNGILPIKIDEEKIKQISEYSLRKEEIEIDLNEQKIIFGNNEIKFDLDQFKKKCLIEGLDDIALSLEKSEK

SEQ ID NO: 179216 - protein, 72 aa, Unknown
  Bacterial polypetide isolated from the Sargasso Sea
INSGFEWREPGCSMCLAMNADKLKPGERCASTSNRNFEGRQGRGGRTHLVSPGMAAAAAISGNLDDVRKYQN

SEQ ID NO: 179217 - protein, 170 aa, Unknown
  Bacterial polypetide isolated from the Sargasso Sea
MQKFNKLRSIPAYLPIVNIDTDMLIPKQFLKTIKRTGLGKNLFFEMRYDDKGNLIKDFILNQEPFVKSKILIAGKNFGCGSSREHAPWALLDFGITCVISSSYADIFYNNCFKNGILPIILDDEKIKELSQYSNRKEQIEIDLENQKIIFGYNEIKFEIDPFKKKCLLEG

SEQ ID NO: 179218 - protein, 128 aa, Unknown
  Bacterial polypetide isolated from the Sargasso Sea
MDKFHSLKGIAAPLPIVNIDTDMIIPKQFLKTIKRTGLGVSLFYEMRYDNDGNLIKDFVLNTSPFDQSKILVAGDNFGCGSSREHAPWSLKDFGIRCVISTSFADIFYNNCFQNGILPIVVSPENLDQ

SEQ ID NO: 179219 - protein, 105 aa, Unknown
  Bacterial polypetide isolated from the Sargasso Sea
VKDKKIASHVQAMIVPGSGLVKKQAEEEGIDIILKDAGFEWREAGCSMCLGMNPDQLKPGERCASTSNRNFEGRQGRGGRTHLMSPELAAASAITGNISDIRDFT

SEQ ID NO: 179220 - protein, 281 aa, Unknown
  Bacterial polypetide isolated from the Sargasso Sea
ILLEENCKEHGITFLSMSDKRQGIVHIIGPEQGFTQPGMTIVCGDSHTSTHGAFGALAWGIGTSEVEHVLATQTLVQTKAKNMQINIQGELPLGVTAKDIVLKIIQTIGTAGGTGYVIEYTGDAIKSLTMEGRMTVCNMSIEAGARAGLISPDEKTIEYLKGRPFSPAENEYRSASDYWLSLASDEGAAYDKTVNIDASDIIPQVTWGTSPEDVVSIDGLVPNPEDESDETKKKSMIRALEYMGLVPNTPLKEVKVDKVFIGSCTNGRIEDLRAASKIAKD

SEQ ID NO: 179221 - protein, 222 aa, Unknown
  Bacterial polypetide isolated from the Sargasso Sea
KPMSPKGEKWHKALDYWKSLKSDENAKFEKEISLQANEILPMITWGTSPQDVITIDGKVPNPNTEKDEDKKNSLERALKYMGLKPDMAAKDIKIDKVFIGSCTNGRIEDLREAAKILKDKKIASHVHAMVVPGSGLVKEQAEQEGLDKIFVSSGFEWREPGCSMCLAMNADKLKPEERCASTSNRNFEGRQGRGGRTHLVSPGMAAAAAISGNLDDVRKYQN

SEQ ID NO: 179222 - protein, 147 aa, Unknown
  Bacterial polypetide isolated from the Sargasso Sea
RSLKYMGLKPDMAATDIKIDKVFIGSCTNGRIEDLREAAKILKDKKVSSHVNAIVVPGSGLVKEQAEQEGLDKIFVSSGFEWREPGCSMCLAMNADKLKPEERCASTSNRNFEGRQGRGGRTHLVSPGMAAAAAISGNLDDVRKYQH

SEQ ID NO: 179223 - protein, 223 aa, Unknown
  Bacterial polypetide isolated from the Sargasso Sea
YTPPKKYFSDAQKYWESLVSDTDAIFDKEIDINANEVLPQVTWGTSPEMTTNVNGQLPDPDEESDVNKREYMKRALEYMDLKPKQEIQSIKIDKVFIGSCTNSRIEDLREAARVLEGQKINKSLKQAIAVPGSGLVKKQAEDEGLDKIFIKSGFEWRDPGCSMCLGMNDDSLLPYERCASTSNRNFEGRQGDKGRTHLVSPSMAAVAAIKGHFTNVVDFVNEK

SEQ ID NO: 179224 - protein, 101 aa, Unknown
  Bacterial polypetide isolated from the Sargasso Sea
MKNKVIKGQAIPFTQSNIDTDAIIPKQYLKSIKKSGFGPFLFDSLRYLEAGDLSTTNNRKINPDFILNIDPYKSGNIIVANDNFGCGSSREHAVWALKDLG

SEQ ID NO: 179225 - protein, 236 aa, Unknown
  Bacterial polypetide isolated from the Sargasso Sea
MTQTIYDKIWNDHLVHQQEDGTSLLFVDRHLIHEVTSPQAFEGLRNSNRKVRQPSLTLAVADHNVPTTDRSVPITDKDSKIQIETLEKNCAEFGINLFGMNDKRQGIVHIIGPEQGFTQPGTIIVCGDSHTATHGAFGALAFGIGTSEVEHVLATQTLVQKKSKNFRINVNGSLPVGVTSKDVILQIIGKIGTAGGTGYVIEYAGNLISNLSVEQRMTICNMTIEGGARAGLIEPR

SEQ ID NO: 179226 - protein, 88 aa, Unknown
  Bacterial polypetide isolated from the Sargasso Sea
MPNTLYDKIWNDHLVHQQDDGTALLFVDRHLVHEVTSPQAFEGLRNTQRKVRHPRLTLAVADHNVPTTDRSKGISDHESKIQVETLEE

SEQ ID NO: 179227 - protein, 254 aa, Unknown
  Bacterial polypetide isolated from the Sargasso Sea
PTSNRSKGIDDEESRIQIEALEKNCKEFGIELFDMKDKRQGIVHIIGPEQGFTQPGTVIVCGDSHTATHGAFGALAFGIGTSEVEHVLATQTLIQKKSKNLRINVTGNLPTGITSKDVILQTIGKIGTAGGTGMVIEYAGSVIEKLNMEQRMTICNMSIEAGARAGLIAPDEKTIQYLKGRPMSPQKLNWNKAVEYWSNLKSDSDATFDKEVEIKGGDINPMVTWGTSPQDVVPVTGYVPDPEKEKNEDKKNSM

SEQ ID NO: 179228 - protein, 271 aa, Unknown
  Bacterial polypetide isolated from the Sargasso Sea
MTTPRTLYDKIWDAHVAHEAEDGTCLLYIDRHLVHEVTSPQAFEGLRLTGRSVRAPEKTIAVPDHNVPTTMDRESVIDNEESRIQVEALDKNARDFGVHYYPVSDIRQGIVHIVGPEQGWTLPGMTVVCGDSHTATHGAFGALAHGIGTSEVEHVLATQTLIQKKSKNMKVEIRGKLRPGVTAKDITLSVIGATGTAGGTGYVIEYCGEAIRGLSMEGRMTVCNMAIEGGARAGLIAPDEKTFEYCKGRPHAPKGAVWEQAVEYWKSLFTD

SEQ ID NO: 179229 - protein, 116 aa, Unknown
  Bacterial polypetide isolated from the Sargasso Sea
SDLRIAAKVIKNKKVSKNVKAFVVPGSEKVATKAKREGLDQIFKDSGFQWREPGCSMCLAMNSDKLIGNQLSASSSNRNFKGRQGSPSGRTLLMSPAMVAAAAINGKVSDVREFIN

SEQ ID NO: 179230 - protein, 134 aa, Unknown
  Bacterial polypetide isolated from the Sargasso Sea
DRLQDISIDAVFIGSCTNGRIEDLREVEKIVRGKRVKDGVRAMVVPGSGLVKKQAEEEGISETLIEAGFDWRMPGCSMCLAMNPDQLMPGERCAATSNRNFEGRQGRGGRTHLMSPAMAAAAAITGFLTDVRDL

SEQ ID NO: 179231 - protein, 200 aa, Unknown
  Bacterial polypetide isolated from the Sargasso Sea
MDKFVKINGIAVSLRMINVDTDMIIPKQFLKTIKRSGLGKNLFHELRYDLQGNIKNDFILNWDPYKYGVILIAGENFGCGSSREHAPWSLLDFGFKSIIAPSFADIFYNNCFKNGILPIQLSHLEVENLMKKAEDKKKFSIDLAAQIISVEEDDSIKFDIDPFRKKCLLEGLDDIGITLKKKEKIDSYESNLNNSYPWII

SEQ ID NO: 179232 - protein, 245 aa, Unknown
  Bacterial polypetide isolated from the Sargasso Sea
ICNMSIEAGARAGLIAPHEKTFEYIKGRPYAPIGKNWDKAVKFWKSLPTDEGAKYDEEIIIKAEDISPQITWGTSPQDVVSINGKVPNPQEESNPNRKKAMERSLEYMGLEPKQEIQKIKIDKVFIGSCTNGRIEDLREVARVVEGKKVSVDSMIVPGSGLVKKQAEEEGLDKIFIEAGFDWREPGCSMCLAMNPDQLKPQERCASTSNRNFEGRQGREGRTHLVSPAIAAASAIKGSFATVEDL

SEQ ID NO: 179233 - protein, 199 aa, Unknown
  Bacterial polypetide isolated from the Sargasso Sea
LPSDEGAKYDEEIIIKAEDISPQITWGTSPQDVVSINGRVPNPQEENNPNRKKAMERSLEYMGLEPEQEIQKIKIDKVFIGSCTNGRIEDLREVARVVEGKKVSVDSMIVPGSGLVKKQAEQEGLDKIFIEAGFDWREPGCSMCLAMNPDQLKPQERCASTSNRNFEGRQGREGRTHLVSPAIAAASAIKGSFATVEDL

SEQ ID NO: 179234 - protein, 200 aa, Unknown
  Bacterial polypetide isolated from the Sargasso Sea
MEKFITLKGIAAPLPMINVDTDMIIPKQFLKTIKRSGLGKNLFHELRFDIQGNIKNDFVLNWDPYKKATILIAGDNFGCGSSREHAPWSLLDFGFKCIVAPSFADIFYNNCFKNGILPIRLDQTKVNILMTEAKNKNQLTINLDEQKIILADENVIEFDIDPFRKKCLIEGLDDIGLTLQKKDKISKYEESIKSSHPWII

SEQ ID NO: 179235 - protein, 291 aa, Unknown
  Bacterial polypetide isolated from the Sargasso Sea
STIVCGDSHTSTQGAFGAFAFGIGTSEVEHTLATQTLWLEKPKTFEILATGQRKNSFAVTSKDIILSIIKKIGTDGGTGHVLEYRGNAISDLSMEQRMTICNMSIEAGSRAGLIAPDTKTFDYINNREYTPKNYDDLVDSWKENLMSDPNSKFDKSFTIDVEKIEPQVSWGTNPAMVSDVTGKVPTPEDYGKNNEIQVESAKKALAYMNLEPETPIVEIPIDRVFIGSCTNARLEDLKDAAEIVKGKKVNSDVNAMVVPGSQMVKHEAEKLGLDKIFKDANFEWRESGCSM

SEQ ID NO: 179236 - protein, 242 aa, Unknown
  Bacterial polypetide isolated from the Sargasso Sea
MPNTLYDKIWNEHLVHQQEDGTALLFVDRHLVHEVTSPQAFEGLRNSKRKVRHPKLTLAVADHNVPTTDRSKGISDHESKIQVETLEANCKEFGIKLFGMSDKRQGIVHVTGPEQGFTQPGTVIVCGDSHTATHGAFGALAFGIGTSEVEHVLATQTLVQKKAKNFRINVNGTLPLGVTSKDVILQIIGKIGTAGGTGCVIEYAGDLIKSLSVENRMTICNMTIEGGARAGLIAPDEKIFKY

SEQ ID NO: 179237 - protein, 148 aa, Unknown
  Bacterial polypetide isolated from the Sargasso Sea
IDENFILNKNPFNESKILLTRDNFGCGSSREHAVWALRDFGIKAVIASSFGDIFYNNSFKNGVLPIKLEKKEINFLFDQTQQKVLELSINLQKKEINYGKKTISFNVDKHLIDRIIYGLDDVDITLKEKGKIFDFERTRIEERPWIFK

SEQ ID NO: 179238 - protein, 134 aa, Unknown
  Bacterial polypetide isolated from the Sargasso Sea
YKNSKILITGKNFGCGSSREHAPWALVDFGIKVIISESFADIFYNNCFKNGILPVVADEKTIKELSEYSSRKQNIEVKLLDQVIIYGNKSYKFNLDQFKKKCLIDGLDDIALSLEKIKYIESFESKMSQTKTWI

SEQ ID NO: 179239 - protein, 127 aa, Unknown
  Bacterial polypetide isolated from the Sargasso Sea
VGKNFGCGSSREHAPWALLDFGIKCVIGPSFADIFYNNCFKNGMLPIILDEEKISELAQYSERKEKIEINLTKQEILFGNKKIEFKIDPFKKKCLINGLDDIAMTLEQSKKISSYEDEIKINKPWKN

SEQ ID NO: 179240 - protein, 201 aa, Unknown
  Bacterial polypetide isolated from the Sargasso Sea
MQKFNTLKSIPAYLPIVNIDTDMIIPKQFLKTIKRTGLGKNLFFEMRYDDNGNQIDNFILNKPPFNKSKILIAGKNFGCGSSREHAPWALLDFGITCVISSSFADIFYSNCFKNGILPIIINEEKIKELSEYANRKEEIFINLNDEKIVYGNSEIKFKIDSFKKKCLLEGLDDIALSLKKSDKIKTFESDLRDKKPWIFND

SEQ ID NO: 179241 - protein, 216 aa, Unknown
  Bacterial polypetide isolated from the Sargasso Sea
MKSNSEGLIINGIVSYIDRDNIDTDQIIPTEYLKSIKKFGYEDYLFDGWRYKDDGKLGVKKEERDINKDFILNNKPFSESKILLTRDNFGCGSSREHAVWALRDFGIKAVIASSFGDIFYNNCFKNGVLPIYLEKNQIEKLFGLVKKEVVELSIDLQKRIIFLNNQDEINFEVDDHLIERIIYGLDDIDITLKEKDKISNFQKNRKITRPWIYANE

SEQ ID NO: 179242 - protein, 177 aa, Unknown
  Bacterial polypetide isolated from the Sargasso Sea
MPSPRTLLDKIWDNHLICSPAGENPLIYIDRHLVHEVTSAQAFEGLRLAGRPVRRPEATFATPDHNVPTTDRRLPIADPISKQQIDTLRNNCKEFDIRLFDLDDADQGIVHVIGPELGITQPGMTIVCGDSHTATHGALGALAFGIGTSEVEHVLATQALRQSKPKALEVRVQGSLP

SEQ ID NO: 179243 - protein, 272 aa, Unknown
  Bacterial polypetide isolated from the Sargasso Sea
GMTIACGDSHTSTHGAFGSIAFGIGTSQVRDVLATQTIAMNKLKVRQIWCENKLSKGVYAKDLVLHIINELGVKAGVGFAYEFAGPAIDELSMEERMTICNMSIEGGARCGYINPDEKTFSYIKNKLCSPKNENWDKALTWWKSLKSDKNSIYDHVVKLDASNVEPTVTWGITPGQSISINQQIPLLDDLSPNDKLVAKEAYEYMSFKPGQLIKDTPVDVCFIGSCTNGRISDLRVAAQVLKDKKVSKNVKAFVVPGSEKVATEAKQEGIDQ

SEQ ID NO: 179244 - protein, 284 aa, Unknown
  Bacterial polypetide isolated from the Sargasso Sea
VKGISDHESKIQVETLEANCKEFGIKLFGMSDKRQGIVHVTGPEQGFTQPGTVIVCGDSHTATHGAFGALAFGIGTSEVEHVLATQTLVQKKAKNFRINVNGTLPLGVTSKDVILQIIGKIGTAGGTGCVIEYAGDLIKSLSVENRMTICNMTIEGGARAGLIAPDEKIFKYLEGRPMSPKGNDWDKAIENWKNLNTDEGAKFDKEVNLTANEISPMITWGTSPQDVITIDERVPNPKNEKDEDRKNSLERALNYMGLKPDMAAKDIKIDKVFIGSCTNGRIEI

SEQ ID NO: 179245 - protein, 171 aa, Unknown
  Bacterial polypetide isolated from the Sargasso Sea
MQKFDKLTGVAAPLDILNIDTDMIIPKQFLKTIKRSGLGKNLFDEMRYARDGSELPGFVLNKAPYRQAEILVAGDNFGCGSSREHAPWALLDFGIRCVISTSFADIFYNNCFKNGILPIVVSADERDALLADAADIENPELSIDLVSQTIRRPNGVTISFEVDAFRKKCLL

SEQ ID NO: 179246 - protein, 75 aa, Unknown
  Bacterial polypetide isolated from the Sargasso Sea
LDKVFVAAGFEWREPGCSMCLAMNADKLAEGERCASTSNRNFEGRQGRGGRTHLVSPQMAVAAALAGYLADVREI

SEQ ID NO: 179247 - protein, 122 aa, Unknown
  Bacterial polypetide isolated from the Sargasso Sea
MSTPKTLYDKIWNDHLVSENEDGTSIIYIDRHLVHEVTSPQAFEGLKIANRSVRKPNFTLATADHNIPTTNRDEGISDPESKLQVDTLEENCKEYGITFLSMSDKRQGIVHIIGPEQGFTQP

SEQ ID NO: 179248 - protein, 224 aa, Unknown
  Bacterial polypetide isolated from the Sargasso Sea
MSTTLYDKIWNDHLVDQQDDGTSLLFVDRHLIHEVTSPQAFEGLRNSNRKVRHPNLTLAVADHNVPTTDRSKGISDEESKIQVDTLEANCKEFGVQLFGMDDKRQGIVHIIGPEQGFTQPGTVIVCGDSHTATHGAFGALAFGIGTSEVEHVLATQTLVQKKAKNFRINVNGELPLGVTSKDVILQIIGKIGTAGGTGSVVEYAGDLIRSLSVEQENDYLQYDN

SEQ ID NO: 179249 - protein, 113 aa, Unknown
  Bacterial polypetide isolated from the Sargasso Sea
MPKTLYDKIWKEHLVYQQDDGTSLLFVDRHLIHEVTSPQAFEGLRNSKRKVRQPTLTLAVADHNVPTTDRSKGISDEESKIQVDTLDANCKEFGIQIFGMNDKRPGYCSHNRS

SEQ ID NO: 179250 - protein, 171 aa, Unknown
  Bacterial polypetide isolated from the Sargasso Sea
SISINQQIPLLDDLSPNDKLVAKEAYEYMSFKPGQLIKDTPVDVCFIGSCTNGRISDLRVAAKVLKGKKVSKNVKAFAVPGSEKVATEAKQEGLDQIFKDSGFQWREPGCSMCLAMNSDKLIGNQVSASSSNRNFKGRQGSPSGRTLLMSPAMVAAAAINGKVSDVREFIN

SEQ ID NO: 179251 - protein, 279 aa, Unknown
  Bacterial polypetide isolated from the Sargasso Sea
MSTTLYDKIWKDHLVDQQDDGTSLLFVDRHLIHEVTSPQAFEGLRNSNRKVRHPNLTLAVADHNVPTTDRSKGISDEESKTQVDTLEANCKEFGVQLFGMNDKRQGIVHIIGPEQGFTQPGTVIVCGDSHTATHGAFGALAFGIGTSEVEHVLATQTLVQKKAKNFRINVNGELPLGVTSKDVILQIIGKIGTAGGTGSVVEYAGDLIRSLSVEQRMTICNMTIEGGARAGLIAPDEKIFEYLKGKPMSPKSENWDKALNYWETLKTDSDASFDKEIAL

SEQ ID NO: 179252 - protein, 247 aa, Unknown
  Bacterial polypetide isolated from the Sargasso Sea
MPNTLYDKIWNDHLVDLQDDGTALLFVDRHLVHEVTSPQAFEGLRNSNRKVRHPNLTLAVADHNVPTTDRSKGISDKESKIQVETLEANCKEFGIKLFGMNDKRQGIVHVTGPEQGFTQPGTVIVCGDSHTATHGAFGSLAFGIGTSEVEHVLATQTLVQKKAKNFRVNVNGKLPLGVTSKDVILQIIGKIGTAGGTGCVIEYAGDLIRSLSVEQRMTICNMTIEGGARAGLIAPDEKIFKYLKDRP

SEQ ID NO: 179253 - protein, 219 aa, Unknown
  Bacterial polypetide isolated from the Sargasso Sea
GRPYAPSGDNWDKAVEFWKSLPSDEGAKYDEEILINAEDISPQITWGTSPQDVVAINGIVPNPQEESNPNRKKAMERSLEYMGLEPKQKIQKIKIDKVFIGSCTNGRIEDLREVAKVVEGKKVSVDSMIVPGSGLVKKQAEEEGLDKIFIEAGFDWREPGCSMCLAMNPDQLKPQERCASTSNRNFEGRQGREGRTHLVSPAIAAASAIKGSFATVEDL

SEQ ID NO: 179254 - protein, 137 aa, Unknown
  Bacterial polypetide isolated from the Sargasso Sea
MAGFKQHTGLVVPLDAANVDTDAIIPKQFLQKVSRLGFGKHLFHDWRFLDDAGKVPNPEFIMNAPRYQGASILLARENFGCGSSREHAPWALADYGIKAMIAPSFADIFYGNSINNQMVPVRLSEQEVDEIFQFVEN

SEQ ID NO: 179255 - protein, 255 aa, Unknown
  Bacterial polypetide isolated from the Sargasso Sea
VEQRMTICNMTIEGGARAGLIQPDEKIFKYLKDKPMSPKKDNWDKAMDYWSSLKSDSDANFDKEITLDGKDILPMVTWGTSPQDVVSIDGKVPNPKNETNEDKKNSIERSLKYMGLKPDTAIKEIKIDKVFIGSCTNGRIEDLRDAAKILKNRKVANHVYAMVVPGSGLVKEQAEQEGLDKIFKDSGFDWREPGCSMCLAMNADKLKPEERCASTSNRNFEGRQGRGGRTHLVSPAMAAAAAISGTLDDVRKYRN

SEQ ID NO: 179256 - protein, 200 aa, Unknown
  Bacterial polypetide isolated from the Sargasso Sea
MEKFITLKGIAAPLPMINVDTDMIIPKQFLKTIKRSGLGKNLFHELRFDMQGNIKNDFVLNWDPYKKATILIAGDNFGCGSSREHAPWSLLDFGFKCIVAPSFADIFYNNCFKNGILPIHLDQEKVNILMTEAKNKNQLTINLDEQIIILADENIIEFDIDPFRKKCLIEGLDDIGLTLQKKDKIFKYEESIQLSHPGII

SEQ ID NO: 179257 - protein, 114 aa, Unknown
  Bacterial polypetide isolated from the Sargasso Sea
GRIEDLREVARVVKGKKVSVDSMIVPGSGLVKEQAESEGLDKIFIEAGFDWREPGCSMCLAMNPDQLKPRERCASTSNRNFEGRQGREGRTHLVSPVVAAASAIKGSFAQETDL

SEQ ID NO: 179258 - protein, 252 aa, Unknown
  Bacterial polypetide isolated from the Sargasso Sea
ADGLPKEMLSTLERNCQENGIHLNGLGSARQGIVHVMAPELGLTQPGMTVACGDSHTSTHGAFGAIAFGIGTSQVRNVLASQSLTMHKLKVRRIWVDGALQSGVFAKDLVLHIIRTLGVQGGVGYAYEFAGPAIKALSMEERMTLCNMAIEGGARCGYVNPDQTTFDYLKGRPHAPSGDAWDRAVSWWKSLASGQDACFDDEVKLDAATIAPTITWGITPGQGIGVDEAVPTLEQTPEEDRPLAHEAYRYMD

SEQ ID NO: 179259 - protein, 96 aa, Unknown
  Bacterial polypetide isolated from the Sargasso Sea
MSERIKKIFEKKGKKLITFTTGGDPDLETSFEILKKIIDNGIDIIEIGMPFSDPMADGPTIQESSIRSIQNGTKITDIFEIVRKIRILNNNIPIIL

SEQ ID NO: 179260 - protein, 188 aa, Unknown
  Bacterial polypetide isolated from the Sargasso Sea
NAEDVVPQVTWGTSPQDVVPVNGSVPDPKKEKDNDRRVAMERSLDYMGLKPNTKMTDIKIDKVFIGSCTNGRIQDLREAAKLLKDKKIAEHVNAMVVPGSGLVKIQAEQEGLDKVFKDSGFEWREPGCSMCLGMNEDQLKPRERCASTSNRNFEGRQGRGGRTHLVSPAMAAVAAIEGHLSDVRKFNN

SEQ ID NO: 179261 - protein, 258 aa, Unknown
  Bacterial polypetide isolated from the Sargasso Sea
MSKTLYDKIWENHLVHEQSDGTSLIYVDRHLVHEVTSPQAFEGLRLQKRKVRRPELTLAVPDHNVPTTDRSKGINDEDSRIQVETLRKNCKDFGVKLFDVNDKRQGIVHIIGPEQGFTQPGTVIVCGDSHTATHGAFGALAFGIGTSEVEHVLATQTLMQKKSKNLRINVNGNLPKGVTAKDVILKIIGTIGTAGGTGYVVEFAGDVIKNLSMEERMTVCNMTIEAGARAGLIAPDEKTFSYLKDKTMSPKGENGIKL

SEQ ID NO: 179262 - protein, 254 aa, Unknown
  Bacterial polypetide isolated from the Sargasso Sea
SLSMEGRMTICNMSIEAGARAGLIAPDQTTFDYIRGRPYAPKGEDWDKAIKYWKSLPSDENAKYDKEINIKAEDITPQITWGTSPQDVVPIDGKVPNPDSINDINRRKAVERSLEYMGLEPNQEIDKIKIDKVFIGSCTNGRIEDLREVARVVEGKKVSVESMIVPGSGLVKEQAESEGLDKIFIEAGFDWREPGCSMCLAMNPDQLKPKERCASTSNRNFEGRQGREGRTHLVSPAVAAASAIKGTFAQESDL

SEQ ID NO: 179263 - protein, 278 aa, Unknown
  Bacterial polypetide isolated from the Sargasso Sea
GLRNSNRKVRQPSLTLAVADHNVPTTDRSEGILDEESRIQVETLEKNCKEFDIKLFGMNDKRQGIVHIIGPEQGFTQPGNIIVCGDSHTATHGAFGALAFGIGTSEVEHVLATQTLVQKKSKNFRIKVNGRLPIGVTSKDVILQIIGKIGTAGGTGYVIEYAGELISSLSVEQRMTICNMTIEGGARAGLIQPDEKIFNYLKDKPMSPTKDNWDKAIEYWTKLKSDQNADFDKEISIEGSEIKPMVTWGTSPQDVIEIDGKVPNPANEKNEDRKQSIS

SEQ ID NO: 179264 - protein, 280 aa, Unknown
  Bacterial polypetide isolated from the Sargasso Sea
IVCGDSHTATHGAFGALAFGIGTSEVEHVLATQTLQQKKPKTMLVEVDGMLPINVTPKDIILAIIGKIGTAGGTGHVIEYAGDAIRGMSMEGRMTLCNMTIEAGARAGMVAPDETTFEYLKNRPFSPKGDAFEEAVSEWKKLPSDENAEFDLNVKINAQDVLPQVTWGTSPGMVTDINSRVPDPKKIQNPSERKSVENALKYMDLKANLPIKEISIDRVFIGSCTNSRIEDLRSVAEFVEGRKVSENVSAMIVPGSGLIKQKAEQEGLDKIFTSAGFEWR

SEQ ID NO: 179265 - protein, 260 aa, Unknown
  Bacterial polypetide isolated from the Sargasso Sea
TLAVADHNVPTTDRSVEIEDEESKIQIEALKNNCAEFDINFIDMSDIRQGIVHIIGPEQGFTLPGSTIVCGDSHTSTHGAFGALAHGIGTSEVEHVLASQTLIQKKAKNFKVEIVGTLTDSISAKDLALSVIGAIGTAGGTGYVIEYMGNAVESLSMEGRMTLCNLTIEAGARAGLIAPDQKTFDYLKDRPLVPKGDIWDKAVSYWKTLPSDPGAHYDNSIKIDIDNLSPLVTWGTSPEDVIDIDGSIPKPEDIEEKQRR

SEQ ID NO: 179266 - protein, 182 aa, Unknown
  Bacterial polypetide isolated from the Sargasso Sea
PMVTWGTSPQDVLTIDENIPNPESETDLDKKNSIERSLKYMGLKPNTKIQDIKIDKVFIGSCTNGRIEDLREAAKILKDKKIAGHVNAMVVPGSGLVKEQAEQEGLDKIFINSGFEWREPGCSMCLAMNADKLKPGERCASTSNRNFEGRQGRGGRTHLVSPGMAAAAAISGNLDDVRKYQS

SEQ ID NO: 179267 - protein, 115 aa, Unknown
  Bacterial polypetide isolated from the Sargasso Sea
MQKFDKLKSIPAHLPIVNIDTDMLIPKQFLKTIKRTGLGKNLFFEMRYDDQGNIINDFILNQEPFNKSKILIAGKNFGCGSSREHAPWALLDFGITCVISSSYADIFYNNCLKME

SEQ ID NO: 179268 - protein, 203 aa, Unknown
  Bacterial polypetide isolated from the Sargasso Sea
MKKFNTLKSIPAYLPIVNIDTDMIIPKQFLKTIKRTGLGKNLFFEMRYDNEGEKINKFVLNQEPYNKSKILITGKNFGCGSSREHAPWALLDFGITCVISSSYADIFYNNCFKNGILPIKIDEEKIKQISEYSKRKEEISINLEDQKILFGNNEISFDLDKFKKKCLLEGLDDIALSLEKSDKIKSFEENLKENKPWIFDDKN

SEQ ID NO: 179269 - protein, 227 aa, Unknown
  Bacterial polypetide isolated from the Sargasso Sea
MSKTLYDKIWDDHLVYTQDDGTSLLYVDRHLVHEVTSPQAFEGLRNSNRKVRQPNLTLAVADHNVPTSDRSKGISDEESKLQVETLEKNCDEFGIKLFGMNDKRQGIVHIIGPEQGFTQPGSIIVCGDSHTATHGAFGSLAFGIGTSEVEHVLATQTLVQKKSKNFRIKVDGKLSIGVTSKDVILQIIGKIGTAGGTGYVIEYAGSLISSLSVEQRMTICNMTIEGG

SEQ ID NO: 179270 - protein, 230 aa, Unknown
  Bacterial polypetide isolated from the Sargasso Sea
KIFDYLKNKPMSPKKENWSKALDNWKNLKSDSGANFDKELNLEAHEIMPMVTWGTSPQDVITIDGKVPNPNDEKDLDKKNSIERSLKYMGLKPNTAAKDIKIDKVFIGSCTNGRIEDLREAAKILKNKKKASHVEAMVVPGSGLVKQQAEQEGLDKIFINSGFEWREPGCSMCLAMNADKLKPKERCASTSNRNFEGRQGRGGRTHLVSPGMAAAAAISGSLDDVRKYQS

SEQ ID NO: 179271 - protein, 272 aa, Unknown
  Bacterial polypetide isolated from the Sargasso Sea
EQGCVIEYAGDLIKSLSVENRMTICNMTIEGGARAGLIAPDEKIFKYLEGRPMSPKGKLWDKALENWKNLNTDEGAKFDKEVNLNANEISPMITWGTSPQDVITIDEKVPNPKNEKDEDKKNSLERSLNYMGLKPDMAAKDIKIDKVFIGSCTNGRIEDLREAAKILKDKKIASHVEAMVVPGSGLVKEQAEQEGLDKIFVNSGFEWREPGCSMCLAMNADKLKPEERCASTSNRNFEGRQGRGGRTHLVSPGMAAAAAISGNLDDVRKYQN

SEQ ID NO: 179272 - protein, 283 aa, Unknown
  Bacterial polypetide isolated from the Sargasso Sea
SLPKGVTAKDVILKIIGTIGTAGGTGYVIEFAGEVIKSLSMEERMTVCNMTIEAGARAGLIAPDEKTFEYLKGKKMSPTGENWNKAVNFMKSLYSDDGCKFDKEINIDGSEIEPLVTWGTSPQDVSPITGVVPDPEKEKNADRKMAMKRSLEYMGLEANTKISEIKIDKIFIGSCTNGRIEDLRVAADLLKGKKVARNVSAMVVPGSGLVKAQAEEEGLDKIFINAGFEWREPGCSMCLGMNPDQLKPKERCASTSNRNFEGRQGRGGRTHLVSPGMAIAAAV

SEQ ID NO: 179273 - protein, 329 aa, Unknown
  Bacterial polypetide isolated from the Sargasso Sea
NQSQQVDHIVPTESQQRPFSDPLAEEMLSTLEKNCESYGIQFHGIGSNSQGVVHVMAPELGLTQPGMTVACGDSHTSTHGAFGAIAFGIGTSQVRDVLASQSLAMKKLKVRRIWIDGELQKGVYAKDLILHIIRHLGVKGGVGFAYEFAGPAIEKLSMEGRMTICNMAIEGGARCGYINPDETTFQYLKGKEYAPKGQEWDRAMNWWKSLASDSQAKYDDEIQLDGSSIEPTVTWGITPGQGISIKEKIPNPELLPQNEQQIARDACKYMNLKPEKPIEGTAIDVCFIGSCTNGRLSDLLEASKIVEGHTVATGIRAFVVPGSQKVAKE

SEQ ID NO: 179274 - protein, 276 aa, Unknown
  Bacterial polypetide isolated from the Sargasso Sea
VKAGVGYAYEFAGPAIRNLSMEERMTICNMSIEGGARCGYINPDKKTYDYLQERLFTPKNNNWDEALKWWESLKSDEKSVYDDVITIDASKIEPTITWGITPGQSVGINQKIPSKLEIHSDDQFIAEEAYEYMGFQPGQLLKNTPIDVCFIGSCTNGRISDLRAAAKIVKNKKVSKSVKAFVVPGSEQVAMEAKKEGLDQIFLDAGFQWREPGCSMCLAMNSDKLEGNQISASSSNRNFKGRQGSPNGRTLLMSPAMVAAAAISGCVSDVREFIKK

SEQ ID NO: 179275 - protein, 120 aa, Unknown
  Bacterial polypetide isolated from the Sargasso Sea
CTNGRIEDLRLAAELLKGKKIAKSVSAMVVPGSGLVKAQAEKEGLHKIFIEAGFEWREPGCSMCLGMNPDQLKPKERCASTSNRNFEGRQGRGGRTHLVSPGMAIAAAIKGHLSDVREIE

SEQ ID NO: 179276 - protein, 288 aa, Unknown
  Bacterial polypetide isolated from the Sargasso Sea
SKDLILYIIGSIGTSGGTGYTIEYTGETISDLSIESRMTMCNMTIEAGAKSGLMAFDEKTHDYLKDREFLPSSKHYDNALKYWETLISDNEVTFDRKEKFNASDIQPQVTWGTSPEMVTSVDECIPSSDSIDNEEEYVDTLRYMGLEPKTEIKSIDLDKIFIGSCTNSRIEDLRQAAEVVQGEKVSSKIKQAIIVPGSGLVKAQAEREGLDKIFVKAGFEWRDPGCSMCLGMNDDFLQPYERCASTSNRNFQGRQGDKGRTHLVSPGMAAVAAIKGHFYNVKDFMNEK

SEQ ID NO: 179277 - protein, 147 aa, Unknown
  Bacterial polypetide isolated from the Sargasso Sea
LLFVDRHLIHEVTSPPAFEGLRNSNRKVRHPNLTLAVADHNVPTTDRSKGISDEESKIQVDTLESNCKEFGVQLFGMDDKRQGIVHIIGPEQGFTPPGTVIVCGDSHTATHGAFGALAFGIGTSEVEHVLATQTLVQKKAKNFRINV

SEQ ID NO: 179278 - protein, 146 aa, Unknown
  Bacterial polypetide isolated from the Sargasso Sea
MKETLYDKIWNEHLVHQYSDGSSLIYIDRHLIHEVTSPQAFDGLNIENRKIWNKNSIFAVSDHNVPTKNRTSGISDKISKLQVDTLTNNCKKHNIKYFDLNHINQGIVHVIGPELGITQPGMTLVCGDSHTSTHGALASLSFGIGT

SEQ ID NO: 179279 - protein, 289 aa, Unknown
  Bacterial polypetide isolated from the Sargasso Sea
MNDKRQGIVHIIGPEQGFTQPGSVIVCGDSHTATHGAFGALAFGIGTSEVEHVLATQTLIQKKSKNLLLRVDGKLSIGITAKDVILKIIGTIGTAGGTGFVIEYSGEVIKNFSMEERMTICNMTIEGGARAGLIQPDEKTFNYLQNRPMSPKNEKWKKALEYWSKLKSEEGCNFDKEVIIKGEEVVPQVTWGTSPQDVVPVNGSVPDPKNEKNQDRRVAMERSLDYMGLKPNTKMTEIKIDKVFIGSCTNGRIQDLREAAKLLKDKKIAKHVNAMVVPGSGLVKKSAEQ

SEQ ID NO: 179280 - protein, 195 aa, Unknown
  Bacterial polypetide isolated from the Sargasso Sea
FDKEINLNADEILPMITWGTSPQDVITIDEKVPNPQNEKDEDKKNSLERALNYMGLKPNMAAKDIKIDKVFIGSCTNGRIEDLREAAKILKDKKIASHVHAMVVPGSGLVKEQAEQEGLDKIFVNSGFEWREPGCSMCLAMNADKLKPEERCASTSNRNFEGRQGRGGRTHLVSPGMAAAAAISGSLDDVRKYQN

SEQ ID NO: 179281 - protein, 86 aa, Unknown
  Bacterial polypetide isolated from the Sargasso Sea
MQKFNTLKSIPAYLPIVNIDTDMIIPKQFLKTIKRTGLGKNLFFEMRYDEKGKEINDFVLNQSPFDSSKIVIAGKNFGCGSSREHA

SEQ ID NO: 179282 - protein, 307 aa, Unknown
  Bacterial polypetide isolated from the Sargasso Sea
VCGDSHTATHGAFGALAFGIGTSEVEHVLATQTLLQKKSKNLRVSVTGKLPTGVTSKDVILQTIGKIGTAGGTGMVIEYAGDVIKDLNIEQRMTICNMSIEAGARAGLIAPDEKTINYLKDKPMSPKDDNWDKAVEYWNKLKSDKDAKFDKEVEIEGDKISPMVTWGTSPQDVVSVTDIVPDPEKEKDLDKKKSMIRSLNYMGLKPNTKITDIKVDKIFIGSCTNGRIGDLRDAAKILKGKKIAKHITAMVVPGSGLVKQQAEQEKIDEIFKEAGFEWREPGCVMCLAMNADKLNPKRDVLRHQIEL

SEQ ID NO: 179283 - protein, 304 aa, Unknown
  Bacterial polypetide isolated from the Sargasso Sea
DVILQIIGKIGTAGGTGCVIEYAGDLIKSLSVENRMTICNMTIEGGARAGLIAPDEKIFKYLEGRPMSPKGNDWDKALDNWKNLNTDEGANFDKEVNLTANEISPMITWGTSPQDVITIDERVPNPNNEKDEDRKNSLERALNYMGLKPDMAAKDIKIDKVFIGSCTNGRIEDLREAAKILKDKKIAPHVHGMVVPGSGLVKEQAEQEGLDKIFVKSGFEWREPGCSMCLAMNADKLKPEERCASTSNRNFEGRQGRGGRTHLVSPGMAAAAAISGNLDDVRKYQNKYAKIQHFEKYTSIFANS

SEQ ID NO: 179284 - protein, 164 aa, Unknown
  Bacterial polypetide isolated from the Sargasso Sea
VPDPNKEKNKDRQASMKRSLEYMGLEANTKITDIKIDKVFIGSCTNSRIQDLREAAKLLKNKKIATHVNAMVVPGSGLVKIQAEQEGLDKIFKDSGFEWREPGCSMCLAMNADKLNPRERCASTSNRNFEGRQGRGGRTHLVSPAMAAAAAIEGHLSDVRKFNN

SEQ ID NO: 179285 - protein, 162 aa, Unknown
  Bacterial polypetide isolated from the Sargasso Sea
VPDPEKEKNVDRKMAMKRSLDYMGLKANTKISDIKIDKIFIGSCTNGRIEDLRLAADLLKGKKIAKNVSAMVVPGSGLVKEQAEKEGIDKIFKEAGFEWREPGCSMCLGMNPDQLKPRERCASTSNRNFEGRQGRGGRTHLVSPGMAIAAAIKGHLTDVREI

SEQ ID NO: 179286 - protein, 124 aa, Unknown
  Bacterial polypetide isolated from the Sargasso Sea
MEKFNNLKSIPSYLSLQNIDTDMIIPKQFLKTIRRTGLGKSLFYEMRYDENGKENVDFILNKEPYNKSKILLAGKNFGCGSSREHAPWALSDFGIKCVISASFADIFYNNCFKNGILPIKIDDK

SEQ ID NO: 179287 - protein, 221 aa, Unknown
  Bacterial polypetide isolated from the Sargasso Sea
HAPKGQEWDKAISWWKSLASDSKAIFDDEIQLDGSSIEPTVTWGITPGQGISIKETIPNPEFLPKNEQQIAKDACKYMNLKPDEPIEGQSIDVCFIGSCTNGRLSDLEEASKIVKGNTVADGIRAFVVPGSQKVAKEAKEKGLDKIFLKSGFEWREPGCSMCLAMNPDKLEGRQISASSSNRNFKGRQGSANGRTLLMSPAMVAAAAINGKVTDVRKFLQE

SEQ ID NO: 179288 - protein, 250 aa, Unknown
  Bacterial polypetide isolated from the Sargasso Sea
PQAFEGLRNAGRAVRAPNRTLAVADHNVPTTDRSAGIADEESRIQVDALAKNAADFGVPYFAMNDIRQGIVHVIGPEQGFTQPGMTIVCGDSHTATHGAFGALAFGIGTSEVEHVLATQTLIQKPAKNMRITVDGDLAPGVTAKDVILAIIGKIGTAGGTGHVIEFAGSAIRDLSMEGRMTVCNMAIEGGARAGMIAPDEKTFAYIEDKPMSPKGDVWDKAVAYWRSLPSDEGACYDTEIVLPAAEIAPT

SEQ ID NO: 179289 - protein, 172 aa, Unknown
  Bacterial polypetide isolated from the Sargasso Sea
MEVDDDQQVDQQDRAGWNDHLVSENEDGTSIIYIDRHLVHEVTSPQAFEGLKIANRSVRKPNFTLATADHNIPTTNRDEGISDPESKLQVDTLEENCKEHGITFLSMSDKRQGIVHIIGPEQGFTQPGMTIVCGDSHTSTHGAFGALAWGIGTSEVEHVLCTQTLVQTKAKN

SEQ ID NO: 179290 - protein, 289 aa, Unknown
  Bacterial polypetide isolated from the Sargasso Sea
IGTSEVEHVLATQTLIQKKSKNLRVNVTGKLLTGITSKDVILQTIGKIGTAGGTGMVIEYAGKVIENLNIEQRMTICNMSIEAGARAGLIAPDEKTIQYLKDKPMSPKKTNWDKAVEYWDKLKSDRNAFFDKEVEIKGEDISPMVTWGTSPQDVVRITDVVPDPEKEKNEDRKKSMIRSLNYMGLQPNTKMTDIKVDRIFIGSCTNGRIGDLRDAAKIIKGKKIASHVNAMVVPGSGLVKQQAEQEKIDKIFINAGFEWREPGCSMCLAMNADKLNSKERCASTSNRNL

SEQ ID NO: 179291 - protein, 182 aa, Unknown
  Bacterial polypetide isolated from the Sargasso Sea
KQFLKTIKRTGLGEFLFFELKYDQDGNEISSFALNQDQYKGANILIASKNFGCGSSREHAPWSIADYGIKCIIAPSYADIFYNNCFKNGILPIILDEETVSKLQDTAENSLNFNIDLKKQCITYIENNEQKEISFDIDPAKKNSLLEGLDDIGLTLNKSNTITDFEGIQEKKTPWLYGSKLV

SEQ ID NO: 179292 - protein, 99 aa, Unknown
  Bacterial polypetide isolated from the Sargasso Sea
MTGKTLYDKLWEMHEVKRRDDGSSLIYIDRHILHEVTSPQAFEGLRLAGRKPWRIDANIATPDHNVPTTKAERQGGLEAIADEVSRIQVQTLDENCDDF

SEQ ID NO: 179293 - protein, 269 aa, Unknown
  Bacterial polypetide isolated from the Sargasso Sea
GYVIEFSGDVIKNLSMEERMTVCNMTIEAGARAGLIAPDEKTFEYLKDKAMSPKGENWNKAIDFWKSLFSDKGCKFDKEINIDGKEIEPLVTWGTSPQDISPVTGVVPDPDKETNEDRKMAMKRSLEYMGLKANTKISDIKIDKIFIGSCTNGRIEDLRLAAELLKGKKIASTVSAMVVPGSGLVKAQAEQEGLDKIFIKAGFEWREPGCSMCLGMNPDQLKPKERCASTSNRNFEGRQGRGGRTHLVSPGMAIAAAIKGHLSDVREIK

SEQ ID NO: 179294 - protein, 201 aa, Unknown
  Bacterial polypetide isolated from the Sargasso Sea
MQKFNQLKSIPAYLPIVNVDTDMIIPKQFLKTIKRTGLGKNLFFEMRYDDEGNEIKDFILNQKPFNNSKILITGKNFGCGSSREHAPWALLDFGITCVISSSYADIFYNNCFKNGILPIKIDEEKIKQISEYSLRKEEIEIDLNEQKIIFGNNEIKFDLDQFKKKCLIEGLDDIALSLEKSEKIISFEKKLKASKPWIFND

SEQ ID NO: 179295 - protein, 300 aa, Unknown
  Bacterial polypetide isolated from the Sargasso Sea
GISDQESKIQVDTLESNCKEFGIQLFGMNDKRQGIVHIIGPEQGFTQPGTVIVCGDSHTATHGAFGALAFGIGTSEVEHVLATQTLVQKKANNFRINVDGKLPLGVTSKDVILQIIGKIGTAGGTGCVIEYAGDLIRSLSVENRMTICNMTIEGGARAGLIAPDEKIFKYLEKKPMSPKGKNWEKALEYWRNLKTDDGAKFDKEINLKADEILPMITWGTSPQDVITIEEKVPNPQSEKDEDKKNSLERALNYMGLKPNMAAKDIKIDKVFIGSCTNGRIEDLREAAKILKDKKIASHVQ

SEQ ID NO: 179296 - protein, 190 aa, Unknown
  Bacterial polypetide isolated from the Sargasso Sea
MQKFTFIKGIPSYLPIVNIDTDMIIPKQFLKTIKRTGLGKNLFFELRYDDKGNEIKDFILNNKPHNNSKILITGKNFGCGSSREHAPWALLDFGITCIISSSYADIFYNNCFKNGILPIILKEDEIKELSEYSHRKEEISIDLKEQKIIYGNNEIQFDIDQFKKKCLLEGLDDIALSLEKSDKITLFEKN

SEQ ID NO: 179297 - protein, 125 aa, Unknown
  Bacterial polypetide isolated from the Sargasso Sea
FIGSCTNGRMEDLREAAKILKNKKKASHVEAMVVPGSGLVKQQAEQEGLDKIFINSGFEWREPGCSMCLAMNADKLKPEERCASTSNRNFEGRQGRGGRTHLVSPGMAAAAAISGSLDDVRKYQS

SEQ ID NO: 179298 - protein, 153 aa, Unknown
  Bacterial polypetide isolated from the Sargasso Sea
EDVNRRKAVERSLEYMGLEPDQEIEKIKIDKVFIGSCTNGRIEDLREVARVVEGKKVSVDSMIVPGSGLVKEQAESEGLDKIFIDAGFDWREPGCSMCLAMNPDQLKPKERCASTSNRNFEGRQGREGRTHLVSPVVAAASAIKGTFAQESDL

SEQ ID NO: 179299 - protein, 229 aa, Unknown
  Bacterial polypetide isolated from the Sargasso Sea
MFDKIWDAHLVKEEEGIPSILYIDLHLIHEVTSPQAFEGLRLTDREVRRKDLTLAVVDHNTPTWSLDLPITDPIAKQQLDTLEKNCSDFGITLHDRFSPLQGIVHVIGPEQGHTQPGKTIVCGDSHTSTHGAFGAFAMGIGTSEVEHVLATQTLRQFKPKTMEIRVNGELPEGVTAKDIILGIIGKIGTAGATGYVVEYTGKAIRTLSMEGRMTICNMSIEAGARAGMI

SEQ ID NO: 179300 - protein, 264 aa, Unknown
  Bacterial polypetide isolated from the Sargasso Sea
RQGIVHIIGPEQGLTQPGMTVVCGDSHTATHGAFGALAFGIGTSEVEHVLATQTLPMKRPQNMRITIEGNLGIGVEPKDLILAIIGEIGTAGGTGHVIEYTGQAIKSLSMEGRMTVCNMTIEAGARAGLIAPDETTFDYVKGRPMAPKSENWEKAVEYWTSLPSDPSATYDRERVIDANNIAPQVTWGTSPEDVVAIDQLVPDPNKETNLAKKQAMERAIDYMGLRPGMKMTDIEINKVFIGSCTNARIEDLRNAAQIINGNKI

SEQ ID NO: 179301 - protein, 257 aa, Unknown
  Bacterial polypetide isolated from the Sargasso Sea
SKRNVRHPKLTLAVADHNVPTTDRSKGISDIESKIQVDTLESNCKEFEVPLFGMNDKRQGIVHIIGPEQGFTQPGTVIVCGDSHTATHGAFGALAFGIGTSEVEHVLATQTLVQKKANNFRINVEGKLPLGVTSKDVILQIIGKIGTAGGTGCVIEYAGDLIRSLSVEQRMTICNMTIEGGARAGLIAPDEKIFKYLNGKPMSPKGKDWDKALEYWKSLKTDEGAKFDKEINLDANEILPMVTWGTSPQDVITIDEK

SEQ ID NO: 179302 - protein, 196 aa, Unknown
  Bacterial polypetide isolated from the Sargasso Sea
MKKFTNLKSIPAYLPIVNIDTDMIIPKQFLKTIKRTGLGKSLFYEMRYDNDGNEIKDFILNIEPYNNSKILIAGKNFGCGSSREHAPWALLDFGITCIISSSYADIFYSNCFKNGILPITISEDKIKELAQYSNRKEEISVDLAEQKITYGNNEIKFDIDDFKKECLIEGYDDIALSLNYKTKIESFENKIKSERP

SEQ ID NO: 179303 - protein, 133 aa, Unknown
  Bacterial polypetide isolated from the Sargasso Sea
KDIKIDKVFIGSCTNGRIEDLREAAKILKDKKIASHVNAMVVPGSGLVKEQAEQEGLDKIFINSGFEWREPGCSMCLAMNSDKLKPEERCASTSNRNFEGRQGRGGRTHLVSPAMAATAAVSGNLDDVRKYSN

SEQ ID NO: 179304 - protein, 120 aa, Unknown
  Bacterial polypetide isolated from the Sargasso Sea
SCTNARITDLRNAAKIVEGKKVHPKVRAQIMPGSTITKLQAEKEGLDKIFKDSGFEWRESGCSMCLGMNPDIIAPGERCASTSNRNFEGRQGKGGRTHLVSPEMAAAAAIEGHFVDVRDW

SEQ ID NO: 179305 - protein, 263 aa, Unknown
  Bacterial polypetide isolated from the Sargasso Sea
RQGIVHIIGPEQGFTQPGTVIVCGDSHTATHGAFGALAFGIGTSEVEHVLATQTLIQKRSKNFRVNIEGKLPIGVTSKDVILQTIGKIGTAGGTGTVIEYAGSVIENLSIEQRMTICNMSIEAGARAGLIAPDEKTIQYLKDKPMSPKKSNWDKAVEYWSKLKSDSGAEFDKEEKIIAKDISPMVTWGTSPEDVVSILDSVPDPEKQSNKDRKLSMQRSLKYMGLNPNTKMTDIKVDRIFIGSCTNGRIGDLRDAAKILKGKK

SEQ ID NO: 179306 - protein, 133 aa, Unknown
  Bacterial polypetide isolated from the Sargasso Sea
NSPILLTGKNFGCGSSREHAPWALLDFGIKCIISPSFADIFYNNCFKNGMLPIILEEKKIEELAEYSKRQENIEINLTNQEIVFGNKKIEFEVDGFKKKCLVNGLDDIAMTLEQTKKISSYENEAQKSKPWMN

SEQ ID NO: 179307 - protein, 281 aa, Unknown
  Bacterial polypetide isolated from the Sargasso Sea
MAPLTMFDKLWNKHVVYEEEGQPSILYIDLHLVHEVTSPQAFDGLRMAGRSVRRPDLTVCTVDHNTPTWELTKPVTDEISKKQLDALEKNCKEFGLDLYDRFSEFQGIVHVIGPDLGYTQPGKTVVCGDSHTSTHGALGCFAIGIGTSEVEHVLATQTLRQFKPGSMEVRVEGPLPFGVEAKDVILGIIGEIGTNGGTGYVIEYTGEAIESLSMDGRMTVCNMSIEAGARAGMIAPDEKTIEYVRNRRFAPKGEEFEKAAAEWLALRSDPGAKYDKVVVID

SEQ ID NO: 179308 - protein, 133 aa, Unknown
  Bacterial polypetide isolated from the Sargasso Sea
MPKTLYDKIWEEHLVHQQDDGTSLLYVDRHLVHEVTSPQAFEGLRINKRKVRKPNLTLAVADHNVPTTDRSKGIGDQDSKIQVETLRKNCKEFGVPLFDMNDKRQGIVHIIGPEQGFTQPGTLIVCGDSHTAT

SEQ ID NO: 179309 - protein, 231 aa, Unknown
  Bacterial polypetide isolated from the Sargasso Sea
VITSLTVEQRMTICNMTIEAGARAGLIAPDEKIFDYLKGKPMSPKGDSWNRALDEWKKLKSDDDAVFDKEITINGNQILPMITWGTSPEDVITIDQKVPNPRNETDEDKKNSIERSLKYMGLKPDMAATDIKIDKVFIGSCTNGRIEDLREAAKILKDKKISTHVEAMVVPGSGLVKEQAEQEGLDKIFIQSGFDWREPGCSMCLAMNADKLKPEERCASTSNRNFEGRQG

SEQ ID NO: 179310 - protein, 241 aa, Unknown
  Bacterial polypetide isolated from the Sargasso Sea
MAIEAGAKVGLVGVDATTLDYVKKHSNLSDSIYSQACQYWETLKSDLDANFDQTINIDVSKIKPQVTWGTSPEMTIDFDAEIPSQKDVDESNRENLLLAKAYMGLDESKSLQDLSFDKIFIGSCTNSRIEDLRDAASAVEGKKISKDITEAIVVPGSGMVKAQAEDEGLDKIFIEAGFLWRDPGCSMCLGMNPDQLKPYERCASTSNRNFEGRQGNLGRTHLMSPLMAALTAINGKITDPS

SEQ ID NO: 179311 - protein, 168 aa, Unknown
  Bacterial polypetide isolated from the Sargasso Sea
MPNTLYDKIWNDHLVDQQSDGTALLFVDRHLVHEVTSPQAFEGLRNSNRKVRHPKLTLAVADHNVPTTDRTNGIADQESKIQVDTLENNCKEFGIQLFDMDDKRQGIVHIIGPEQGFTQPGTVIVCGDSHTATHGAFGALAFGIGTSEVEHVLATQTLVQKKAKNFRN

SEQ ID NO: 179312 - protein, 190 aa, Unknown
  Bacterial polypetide isolated from the Sargasso Sea
AAPLRMINVDTDMIIPKQFLKTIKRSGLGKNLFHELRYDLQGNIKNDFILNWDPYKSAKILIAGENFGCGSSREHAPWSLLDFGFKCIIAPSFADIFYNNCFKNGILPIKLTNEKVDNLMNQAESKKKFTINLEEQQILVESNSEIKFELDPFRKKCLLEGLDDIALTLKKVDKIGTFENKLHESKPWIL

SEQ ID NO: 179313 - protein, 280 aa, Unknown
  Bacterial polypetide isolated from the Sargasso Sea
MVQKKSKNFRINVNGSLPVGVTSKDVILQIIGKIGTAGGTGYVIEYGGNLISTLSVEQRMTICNMTIEGGARAGLIEPDQKIFDYLKGKPMSPKKENWDKALEYWNTLRSDSDAKFDKEISLEGSEIKPMVTWGTSPQDVVEIDGKVPNPENEKDEDRKSSITRSLNYMGLKPNTNIQDIKIDKVFIGSCTNGRIEDIRDAAKILKDKKVAPHVNAIIVPGSGLVKEQAEQEGLDKIFKESGFEWREPGCSMCLAMNADKLKPEERCASTSNRNFEGRQG

SEQ ID NO: 179314 - protein, 103 aa, Unknown
  Bacterial polypetide isolated from the Sargasso Sea
KVSKNVKAFVVPGSEKVTNEAKHEGLDQIFKDSGFQWREPGCSMCLAMNSDKLIGNQISASSSNRNFKGRQGSPSGRTLLMSPAMVAAAAINGKVSDVREFIN

SEQ ID NO: 179315 - protein, 225 aa, Unknown
  Bacterial polypetide isolated from the Sargasso Sea
GPELGMTQPGMTIVCGDSHTSTHGALASLSFGIGTSDVEHVLATQCLNLAKEKNFNIEVNGVLHPYITSKDLILYIIGSIGTSGGTGYTIEYTGETISDLSIESRMTICNMTIEAGAKSGLMAFDEKTHDYLKDREFLPSSKHYDNALKYWETLISDSGVSFDRKEQFNANDIQPQVTWGTSPEMVTSVDECIPSSDSINNEEEYIDTLAYMGLEPKTEIKSIDL

SEQ ID NO: 179316 - protein, 114 aa, Unknown
  Bacterial polypetide isolated from the Sargasso Sea
MPYTIYDKIWNEHLVHEQEDGTSLLFVDRHLIHEVTSPQAFEGLRNSKRKVRQPKLTLAVADHNVPTTDRTKGISDKESKIQVETLDSNCKEFGIQIFGMNDKRQGIVHIIDQS

SEQ ID NO: 179317 - protein, 140 aa, Unknown
  Bacterial polypetide isolated from the Sargasso Sea
YSPYNKSKILIAGKNFGCGSSREHAPWALMDFGITCVISSSYADIFYNNCFKNGILPITISEDQIKEISEYSNRKEEISVNLPEQTISFGNKEIKFEIDRFKKKCLIEGLDDIALSLEKSAKIVSYENKIKEAKPWIFND

SEQ ID NO: 179318 - protein, 315 aa, Unknown
  Bacterial polypetide isolated from the Sargasso Sea
HSWSFWVIAFGIGTSHVRDVLATQTIAINKLKVRQIWCDKKLSNGVFAKDLVLHIIHKLGVKAGVGFAYEFAGPAIDELSMEERMTICNMSIEGGARCGYINPDDKTFSYIKNKLCAPKSEHWDKALTWWESLKSDENSIYDDVIKLDASKVEPTVTWGITPSQSISINQQIPFLDDLSSNDKLIAKEAYEYMSFKPGQLIKDTPVDVCFIGSCTNGRISDLRVAAKVLKGKKVSKNVKAFAVPGSEKVATEAKQEGLDQIFKDSGFQWREPGCSMCLAMNSDKLIGNQVSASSSNRNFKGRQGSPSGRTLLMSP

SEQ ID NO: 179319 - protein, 172 aa, Unknown
  Bacterial polypetide isolated from the Sargasso Sea
MSKTLYDKIWNEHLVHKQEDGTSLLYVDRHLVHEVTSPQAFEGLRLQKRKVRRPEFTLAVSDHNVPTTDRSKGIDDEESKIQVETLRNNCKEFGVELFDVNDKRQGIVHVIGPEQGFTQPGAVIVCGDSHTATHGAFGALAFGIGTSEVEHVLATQTLIQKKTKNLRINING

SEQ ID NO: 179320 - protein, 162 aa, Unknown
  Bacterial polypetide isolated from the Sargasso Sea
GGPQENVSSKDIVLYLIGKIGTAGGTGYAIEFSGSYIDKLSVEGRMTICNMAIEAGAKVGLIAPDETTIDYVKKNSFLDEELFNQAKQFWKSLRTDDKAVFDNEIEIDVSKIKPQVTWGTSPEMVVNFDDPIPTIIDTNEENKKNVELARTYMGIQNELKII

SEQ ID NO: 179321 - protein, 258 aa, Unknown
  Bacterial polypetide isolated from the Sargasso Sea
MSVPKTLFDKIWDAHVVHRQDDGTCLIYIDRHLVHEVTSPQAFEGLRDAKRAVRAPNRTLAVADHNIPTTDRSVGIEDEESRIQVEALEKNAAEFGVPYFAMDDKRQGIVHVIGPEQGFTLPGMTIVCGDSHTATHGAFGALAFGIGTSEVEHVLATQTLIQRPAKNMRVTVDGSLADGVTAKDVILAIIGKIGTAGGTGHVIEFAGSAIRGLSMEGRMTVCNMAIEAGARAGMIAPDATTFGYLKDRPMAPKGDKWD

SEQ ID NO: 179322 - protein, 98 aa, Unknown
  Bacterial polypetide isolated from the Sargasso Sea
HVNAIVVPGSGLVKEQAEQEGLDKIFVSSGFEWREPGCSMCLAMNADKLKPEERCASTSNRNFEGRQGRGGRTHLVSPGMAAAAAISGNLDDVRKYQH

SEQ ID NO: 179323 - protein, 89 aa, Unknown
  Bacterial polypetide isolated from the Sargasso Sea
MKPQTIFDKIWNNHIVDKSTSGECLIYIDRHLVHEVTSPQAFEGLRNNNRKARRPSLTLAVPDHNVPTTDRKFGITDTESRIQVEKLIE

SEQ ID NO: 179324 - protein, 277 aa, Unknown
  Bacterial polypetide isolated from the Sargasso Sea
LIYIDRHLVHEVTSAQAFEGLRLAGRRVRRPEFTFATPDHNVPTTDRRLPIADPISKQQIDTLRNNCNEFGVRLFDLGDTDQGIVHVIGPELGITQPGMTIVCGDSHTATHGAWGALAFGIGTSEVEHVLATQTLRQVKPKSLEVRVDGALLQGVTAKDLVLYLIGKLSTEGGTGYVIEYTGPVIRGFGMEQRMTVCNMSIEAGARAGMIAPDSVTFDYLRERDFAPKDFEKAIARWEQLPSDPDAVYDRVEVFDGADIVPQVTWGTNPAQVVGVDT

SEQ ID NO: 179325 - protein, 214 aa, Unknown
  Bacterial polypetide isolated from the Sargasso Sea
MKSNSEGLIIDGVVSYIDRDNIDTDQIIPTEYLKSIKKFGYEDYLFDGWRYKDDGKLGIKKEDRDINEDFILNNKPYTESKILLGRDNFGCGSSREHAVWALRDFGIKAVIASSFGDIFYNNCFKNGVLPIKLEKENIERLFDLVKNKAVEFSINLQQRIIHLNDKDKIKFKVDAHLIDRIIFGLDDVDISLKEKDKIMLFEKNRKISKPWIYV

SEQ ID NO: 179326 - protein, 132 aa, Unknown
  Bacterial polypetide isolated from the Sargasso Sea
ILIAGKNFGCGSSREHAPWALLDFGITCVISSSYADIFYNNCFKNGILPITLLEDEIKEISEYSKRKEEVTINLEEQKIIFGNKEIKFEIEEFRKKCLLEGLDDISLSLEKLDKIETYEIKVQKSKPWIFND

SEQ ID NO: 179327 - protein, 294 aa, Unknown
  Bacterial polypetide isolated from the Sargasso Sea
LTIATIDHNVPTTDRSLPMIDETSSTQIKTLEKNCKDFGIKLFGINDPNQGIVHVIGPQLGITLPGSTIVCGDSHTSTQGAFGAFAFGIGTSEVEHTLATQTLWLEKPKTFEILAKGKRKNPFAVTSKDIILSIIKKIGTNGGNGHVLEYRGDAISDLSMEQRMTICNMSIEAGSRAGLIAPDEKTFDYIDNRKYTPKNFDDLVNEWQKNLTTDNNSKFDKSFTIDVEKIEPQVSWGTNPSMVSDVTGVVPTPEEFGHDNEIQIQSAKKALAYMDLEPETPIMEIPIDRVFIGS

SEQ ID NO: 179328 - protein, 132 aa, Unknown
  Bacterial polypetide isolated from the Sargasso Sea
ILVAGDNFGCGSSREHAPWALSDFGIKCVISTSFADIFYNNSFKNGLLPITVTKDQRDTLLEDAKDIENPELEIDLESQEIRRPNGAIIKFDLDPFRKKCLMEGLDDIGITLKKAKNIEEFENLRNHERPWL

SEQ ID NO: 179329 - protein, 143 aa, Unknown
  Bacterial polypetide isolated from the Sargasso Sea
ILNQTPFNNSKILIAGKNFGCGSSREHAPWALLDFGITCVISSSFADIFYNNCFKNGILPIILNNEKIKELSEYTNRKEEISVDLFEEKIIYGNNEIIFQIDSFKKKCLLEGLDDIALSLKKSEKIKDFEKILKSEKPWIFND

SEQ ID NO: 179330 - protein, 285 aa, Unknown
  Bacterial polypetide isolated from the Sargasso Sea
EQGFTQPGNIIVCGDSHTATHGAFGALAFGIGTSEVEHVLATQTLVQKKSKNFRISVNGSLPIGVTSKDVILQIIGKIGTAGGTGYVIEYAGNLISDLSVEQRMTICNMTIEGGARAGLIQPDEKIFKYLKGKPMSPKGENWDKALEYWHTLKSDKDANFDKELTLDGSQIKPMVTWGTSPQDVVEIDGKVPSPENETDPDRKNSINRSLNYMGLKPNTKIQDIKIDKVFIGSCTNGRIEDIREAAKILKDKKIANHVHAMIVPGSGLVKEQAEQEGLDKIFLQS

SEQ ID NO: 179331 - protein, 267 aa, Unknown
  Bacterial polypetide isolated from the Sargasso Sea
SRLQLDTLKKNSRDFGVEYIPMDDVRQGIVHIIGPEQGLTQPGKTIVCGDSHTATHGAFGALAFGIGTSEVEHVLATQTLWMRKSKNMLVKTNGKLPFGSSSKDLILSIIGRIGTAGGTGHVIEYRGNAITSLSIESRMTVCNMTIEGGARAGLIAPDIKTIEYLKDRPRSPKGINWDKAQDYWQKLVSDFDAKFDKEIIINSDEIVPHVTWGTSPEDVLPISDNVPMPKDFEDLDKRRGVERAIDYMGLKAGQPLESINVDKVFIG

SEQ ID NO: 179332 - protein, 331 aa, Unknown
  Bacterial polypetide isolated from the Sargasso Sea
LFGMNDKRQGIVHIIGPEQGFTQPGSIIVCGDSHTATHGAFGALAFGIGTSEIEHVLATQTLLQKKSKNFRINVNGNLSIGVTSKDVILQIIGKIGTAGGTGYVIEYSGNLISSLSVEQRMTICNMTIEGGARAGLIQPDEKIFKYLKNKPMSPKNNNWDKALEYWSKLKSDSTANFDKEINIEASEIKPMVTWGTSPQDVVEIDGKVPNPDNEIDPDRKNSINRSLNYMGLKPNMKIKDIKIDKVFIGSCTNGRIEDIREAAKILKNKKIASHVNGMIVPGSGLVKEQAEQEGLDKIIKESGFEWREPGCSMCLAMNSDKLRPEERCAST

SEQ ID NO: 179333 - protein, 136 aa, Unknown
  Bacterial polypetide isolated from the Sargasso Sea
MSKTLYDKIWENHLVHEQNDGTTLIYVDRHLVHEVTSPQAFEGLRLKKRKVRRPGLTLAVPDHNVPTTDRSKGINDEDSRIQVETLRKNCKDFGVELFDVNDKRQGIVHIIGPEQGFTQPGTVIVCGDSHTATHGA

SEQ ID NO: 179334 - protein, 162 aa, Unknown
  Bacterial polypetide isolated from the Sargasso Sea
MNKLTKIKSKAVVLKSKDVDTDQIIPARFLTTTSKKGLGKHLFHDWRYNEDGTDDPNFILNKKENESSEILIAGNNFGCGSSREHAPWALLDYGIKVVISSKIADIFKGNSLKNGLLPIVVTEDILSMLMDTQRPYLSICIEKSELTLPNNEIFEYEIDEFS

SEQ ID NO: 179335 - protein, 135 aa, Unknown
  Bacterial polypetide isolated from the Sargasso Sea
AVDKVFIGSCTNSRIEDLRAAAAVVKGRKKASSVKQALVVPGSGSVKQQAEAEGLDKVFTEAGLQWRAPSCSMCLAMNADKLEPGEHCASTSNRNFEGRQGFGGRTHLVSPAMAAAAAIAGHFVDAREYGAAQEQ

SEQ ID NO: 179336 - protein, 114 aa, Unknown
  Bacterial polypetide isolated from the Sargasso Sea
MKAFTTLSGIAAPMDRANVDTDMIIPKQFLKSIKRSGFGPNLFDELRYLDEGFPGQDCSNRPLNKEFPLNFPRYQGAQILLARENFGCGSSREHAPWALEDYGFRCVIAPSYAD

SEQ ID NO: 179337 - protein, 201 aa, Unknown
  Bacterial polypetide isolated from the Sargasso Sea
MNKFISIKSIPAYLPIVNIDTDMIIPKQFLKTIKRTGLGKNLFFEMRYDQSGKEIDDFILNNSPYNNSKILIAGKNFGCGSSREHAPWALMDFGITCVISSSYADIFYNNCFKNGILPITISEDQIKEISEYSNRKEEISVNLPEQTISFGNKEIKFEIDQFKKKCLIEGLDDIALSLEKSEKIVSYENKIKEAKPWIFND

SEQ ID NO: 179338 - protein, 141 aa, Unknown
  Bacterial polypetide isolated from the Sargasso Sea
MEKFKKIRSIITPFDKANVDTDQIVPKQFLKLIHKIGFGKYLFYNWRFENDGSPKKDFILNESKYENSKILVTNENFGCGSSREHAVWALKDYGFSVIIAPSFADIFYSNCFKNGVLPIQINRNIVKRIFTDITELEIDLE

SEQ ID NO: 179339 - protein, 203 aa, Unknown
  Bacterial polypetide isolated from the Sargasso Sea
MEKFNKLKSIPSYLSLQNIDTDMIIPKQFLKTIKRTGLGKSLFYEMRYDEKGNIVENFILNKSPYDKSKILLAGKNFGCGSSREHAPWALSDFGIKCIISSSFADIFYNNCFKNGILPIKIAEEIVLELSNYSKRQEEIEVNLENQEISYGNKVIKFEIDQFKKKCLINGLDDIGLSMEKINQIDSYEKKINENKPWILKSEK

SEQ ID NO: 179340 - protein, 228 aa, Unknown
  Bacterial polypetide isolated from the Sargasso Sea
NYRVFKDRPMSPKGENWTKAVAHWKKLFSDSDAKFDKEINIDAKDIEPLVTWGTSPQDVSPITGEVPDPEKEKDKDRRTAMYRSLDYMGLKPKMKISDIKVDKIFIGSCTNGRIEDLRLAAKLLKGKKIASDVSAMVVPGSGLVKKQAEEEGIDKIFKNAGFEWREPGCSMCLGMNEDQLSSKERCASTSNRNFEGRQGRGGRTHLVSPGMAVAAAIKGYLADVREIN

SEQ ID NO: 179341 - protein, 125 aa, Unknown
  Bacterial polypetide isolated from the Sargasso Sea
FIGSCTNGRIEDLREAAKILKDRKIAKHVNGMVVPGSGLVKEKAEQEGLDKIFINSGFEWREPGCSMCLAMNADKLKPGERCASTSNRNFEGRQGRGGRTHLVSPGMAAAAAISGNLDDVRKYQN

SEQ ID NO: 179342 - protein, 287 aa, Unknown
  Bacterial polypetide isolated from the Sargasso Sea
LISTQEDGASLIYIDRHLVHEVTSPQAFEGLRMSGRDVNSPNRTLAVADHNVPTTDRADGIQEEESRIQVEALDKNVEDFGIPYFNMMDKRQGIVHVIGPEQGFTQPGMTIVCGDSHTATHGAFGALAFGIGTSEVEHVLATQTLIQKPAKNMLINVEGELQPGVSPKDLVLAIIGEIGTAGGTGHVIEYSGKAIEQLSMEGRMTVCNMSIEAGARAGMIAPDKVTFDYLRDKPMSPKGKDWDLALEWWKSLPSDENAFYDKKISINANKIKPTVTWGTSPEDVVSI

SEQ ID NO: 179343 - protein, 277 aa, Unknown
  Bacterial polypetide isolated from the Sargasso Sea
IIEKIGTAGGTGYVIEYAGNAISSLSMEGRMTICNMSIEAGARAGLIAPDEKTFEYIKGRPYAPSGDNWDKAVEFWKALPSDEGAKYDEEILINAEDISPQITWGTSPQDVVAINGIVPNPQEESNPNRKKAMERSLEYMGLEPKQEIQKIKIDKVFIGSCTNGRIEDLREVAKVVEGKKVSVDSMIVPGSGLVKKQAEEEGLDKIFIEAGFDWREPGCSMCLAMNPDQLKPQERCASTSNRNFEGRQGREGRTHLVSPAIAAASAIKGSFATAEDL

SEQ ID NO: 179344 - protein, 199 aa, Unknown
  Bacterial polypetide isolated from the Sargasso Sea
MKKFTVLKGIAAVMPDINIDTDAIIPKQFLKTIHRKGLGKSLFYNERYTEGYNKNVDFILNKDPWSNSSIIIAGENFGCGSSREHAPWALLDFGIQCIISNSFADIFFNNSVKNGLLLIKLNKNEIQKLNELAMKKENFTVDLINQKISVKNNEINFNVDPIIKDRLIHGYDDIEITLKNKQLIVDYENNKNKFHIGRI

SEQ ID NO: 179345 - protein, 299 aa, Unknown
  Bacterial polypetide isolated from the Sargasso Sea
PQSRPFADPLAEEMLSTLERNCADHGITLNGIGSGRQGIVHVIAPELGLTQPGMTVACGDSHTSTHGAFGAIAFGIGTSQVRDVLASQSLAMSKLKVRRIQVNGRLSDGVSAKDLILHVIRTLGVKGGVGFAYEFAGPAVEALSMEERMTLCNMAIEGGARCGYVNPDQVTFDYLSGRAGAPSGAAWDRAVSWWRSLASDPDAVVDDELVFDAASIAPTVTWGITPGQGLGIDECIPLLEQLEPGERPIAEEAYRYMDLQPGTAIVGVPVDVCFIGSCTNGRISDLRAAAAVARGRHVA

SEQ ID NO: 179346 - protein, 226 aa, Unknown
  Bacterial polypetide isolated from the Sargasso Sea
GIVHVIGPEQGFTQPGAVIVCGDSHTATHGAFGALAFGIGTSEVEHVLATQTLIQKKTKNFRINVNGSLPKGVTAKDVILKIIGTIGTAGGTGYVVEYAGSVIRNLSMEERMTVCNMTIEAGARAGLIAPDEKTFQYLKGRTMSPEGKNWNKAVEFWNTLYSDKDCKFDKEINIQAENIEPLVTWGTSPQDVSPVTGLVPDPDKEKNADRKMAMKRSLDYMGLKAN

SEQ ID NO: 179347 - protein, 113 aa, Unknown
  Bacterial polypetide isolated from the Sargasso Sea
MPKTLYDKIWNEHLVHEQEDGTSLLFVDRHLIHEVTSPQAFEGLRNSKRKVRQPGLTLAVADHNVPTTDRSKGISDEESKIQVDTLDANCKEFGIKIFGMNDKRQGIVHIIGP

SEQ ID NO: 179348 - protein, 118 aa, Unknown
  Bacterial polypetide isolated from the Sargasso Sea
MPKTLYDKIWEDHLVHQQEDGTSLLYVDRHLIHEVTSPQAFEGLRLNNRKVRQPKLTLAVADHNVPTTDRSKGIDDEESKVQVDTLRNNCKEFGVPLFDMNDRRQGIVHIIGPEQGFT

SEQ ID NO: 179349 - protein, 190 aa, Unknown
  Bacterial polypetide isolated from the Sargasso Sea
MSQDTLFDKVWDLHKVSSLPGGSDQIFIGLHLIHEVTSPQAFGALKDKNLKVKFPNRTVATVDHIVPTDNQSRPFKDNLAEQMISTLEKNCLQHKIRFFNIGSGNQGIVHVVAPELGLTQPGMTIACGDSHTSTHGAFGSIAFGIGTSQVRDVLATQTIAMNKLKVRQIWCDNKLSNGVYAKDLVLHIIN

SEQ ID NO: 179350 - protein, 283 aa, Unknown
  Bacterial polypetide isolated from the Sargasso Sea
ATHGAFGALAFGIGTSEVEHVLATQTLMQKKSKNLRINVNGSLPKGVTAKDVILKIIGTIGTAGGTGYVVEFAGDVIKSLSMEERMTVCNMTIEAGARAGLIAPDDKTFNYLKGKTMSPKGENWLKAVEFWKTLYSDKECKFDKEVNINGKEIEPLVTWGTSPQDVSPVTGVVPDPDKEKNEDRKMAMKRSLDYMGLKANTKISDIKIDKIFIGSCTNGRIEDLRLAAELLKGKKIAENVSAMVVPGSGLVKEQAEKEGIDKIFKNAGFEWREPGCSMCLGRT

SEQ ID NO: 179351 - protein, 131 aa, Unknown
  Bacterial polypetide isolated from the Sargasso Sea
MPYTIYDKIWKEHLVHEQEDGTSLLFVDRHLIHEVTSPQAFEGLRNSNRKVRQPKLTLAVADHNVPTTDRTKGISDQESKIQVDTLDSNCKEFGIQVFGMNDKRQGIVHIIGPEQGFTQPGTIIVCGDSHT

SEQ ID NO: 179352 - protein, 224 aa, Unknown
  Bacterial polypetide isolated from the Sargasso Sea
MPKTLYDKIWEDHLVHSQSDGTSLLYVDRHLVHEVTSPQAFEGLRIQKRKVRKPQFTLAVADHNVPTTDRSKGINDQESKIQVDTLRKNCKEFGVPLFDMSDKRQGIVHIIGPEQGFTQPGTVIVCGDSHTATHGAFGALAFGIGTSEVEHVLATQTLIQKKSKNFLLKVNGKIPIGVTAKDVILKIIGTIGTAGGTGYVIEFSGEVIKNFTMEERMTVCNMTI

SEQ ID NO: 179353 - protein, 107 aa, Unknown
  Bacterial polypetide isolated from the Sargasso Sea
MPQTIYDKIWNDHLVHQQEDGTSLLFVDRHLIHEVTSPQAFEGLRNSNRKVRQPSLTLAVADHNVPTTDRSVPITDEDSKIQIETLEKNCAEFGINLFGMNDKRQGI

SEQ ID NO: 179354 - protein, 213 aa, Unknown
  Bacterial polypetide isolated from the Sargasso Sea
WDKAVDYWNILKTDADAKFDKEITLDGKEIKPMVTWGTSPQDVVTIDDKVPNPNKENDLDKKNSIERSLKYMGLKPDTKMQDIKIDKVFIGSCTNGRIEDLRDAAKILKDKQISSHVEAFVVPGSGLVKEQAEQEGLDKIFKNSGFEWREPGCSMCLAMNADKLKPEERCASTSNRNFEGRQGRGGRTHLVSPAMAAAAAISGNLDDVRKYQS

SEQ ID NO: 179355 - protein, 87 aa, Unknown
  Bacterial polypetide isolated from the Sargasso Sea
MPQTLYDKIWNEHIVHQQNDGTTLIYVDRHLIHEVTSPQAFEGLRLSKRKVRKPNLTLAVADHNVPTTNRLKGIEDKESKIQVEVLE

SEQ ID NO: 179356 - protein, 236 aa, Unknown
  Bacterial polypetide isolated from the Sargasso Sea
VTSPQAFEGLRLNKRKVRKPDFTLAVADHNVPTTDRTKGINDQQSKKQVDTLRKNCKEFGVPLFDMNDKRQGIVHIIGPEQGFTQPGTIIVCGDSHTATHGAFGALAFGIGTSEVEHVLATQTLIQKKSKNFLLKVDGKIPVGVTAKDVILKIIGTIGTAGGTGFVIEYSGDVIKNFSMEERMTICNMTIEGGARAGLIQPDEKTFKYLQNRPLSPKKDNWEKALKYWSNLKSDKD

SEQ ID NO: 179357 - protein, 170 aa, Unknown
  Bacterial polypetide isolated from the Sargasso Sea
MSQTIYDKIWNDHLVHEQKDGTSLLFVDRHLIHEVTSPQAFEGLRTSNRKVRQPKLTLAVADHNVPTTDRSKGISDEDSRIQVETLDKNCKEFGIQLFGMDDKRQGIVHIIGPEQGFTQPGNIIVCGDSHTATHGAFGALAFGIGTSEVEHVLATQTLVQKKSKNFRINV

SEQ ID NO: 179358 - protein, 124 aa, Unknown
  Bacterial polypetide isolated from the Sargasso Sea
MSAGTLYDKVWDLHRVAELPGGSTQLFVGLHLIHEVTSPQAFSALKDKGLTVRCPERTVATVDHIVPTTSQQRPFADPLAEEMLGTLERNCQEHGIPLNNIGSGRQGIVHVIAPELGLTQPGMT

SEQ ID NO: 179359 - protein, 232 aa, Unknown
  Bacterial polypetide isolated from the Sargasso Sea
MKTLYDKLWEEHHVTQLDSGESLLYIDRHYLHEVTSPQAFEGLSKKNLKPWRLEANIATPDHNVPTTRGNDFKSEQIKDEISKIQVVELDKNCNNFGIKQFDIKSSKQGIVHVIGPELGYTLPGMTIVCGDSHTSTHGALGCLAMGIGTSEVEHVLATQCLKVSKLKNMIVKFEGIPAENVTSKDIVLYLIGLIGTAGGTGYAIEFAGNYIEDISIENRMTICNMAIEAGAK

SEQ ID NO: 179360 - protein, 166 aa, Unknown
  Bacterial polypetide isolated from the Sargasso Sea
MEKFNNLKSIPSYLSLQNIDTDMIIPKQFLKTIKRTGLGKSLFYEMRYDENGKKNDNFILNKEPYNKSKILLAGKNFGCGSSREHAPWALSDFGIKCVISASFADIFYNNCFKNGILPIKIDDKTIVELAEYSNRKEEIEVSLDNQEIKYGNKIAKFELDAFKKKC

SEQ ID NO: 179361 - protein, 103 aa, Unknown
  Bacterial polypetide isolated from the Sargasso Sea
LKAKIAQNVSAMVVPGSGLVKEQAEKEGIDKIFKEAGFEWREPGCSMCLGMNPDQLKPKERCASTSNRNFEGRQGRGGRTHLVSPGMAIAAAIKGHLTDVREI

SEQ ID NO: 179362 - protein, 281 aa, Unknown
  Bacterial polypetide isolated from the Sargasso Sea
TDRSKGISDQESKIQVDTLDNNCKEFGVQLFGMEDKRQGIVHIIGPEQGFTQPGTIIVCGDSHTATHGAFGALAFGIGTSEVEHVLATQTLVQKKSKNFRINVNGELSLGVTSKDVILQIIGKIGTAGGTGYVIEYAGNLISSLSVEQRMTICNMTIEGGARAGLIQPDQKIFDYLKNKPMSPKNDNWDKALEYWSKLKSGDDAKFDKEITLDGRDIKPMVTWGTSPQDVVTIDGKVPNPGEENDPDKKNSIERSLKYMGLKPGTAVKDIKIDKVFIGSCT

SEQ ID NO: 179363 - protein, 202 aa, Unknown
  Bacterial polypetide isolated from the Sargasso Sea
FIMEKFELLTGIAAPLPMINVDTDMIIPKQFLKTIKRSGLGKNLFHELRYDMQGNIKNDFVLNWDPYKQASILVAGDNFGCGSSREHAPWSLLDFGFKCIIAPSFADIFYNNCFKNGILPIRLDQKTVDVLMDQANQKKHLTINLKDQLIILEDGNTIEFQIDPFRKKCLLEGLDDIGLTLQKKEKIDQYEASLKNTHPWII

SEQ ID NO: 179364 - protein, 245 aa, Unknown
  Bacterial polypetide isolated from the Sargasso Sea
TICNMSIEAGAKVGLVSVDDKTIDYVKKHSNLEANLINDAIKKWKNLRTDKEAIFDKEIDIDVSKINPQVSWGTSPEMVIDFNEKIPSSSIFSPEKRKSLDLAKNYMGLSDNQELSDLDFDKVFIGSCTNSRIEDLREAAEVLKGQKVSENIQEAIVVPGSGMVKEQAEKEGIHKIFIDAGFQWRAPGCSMCLGMNPDQLSPYERCASTSNRNFEGRQGNLGRTHLMSPKMAALTAINGRIVKEI

SEQ ID NO: 179365 - protein, 275 aa, Unknown
  Bacterial polypetide isolated from the Sargasso Sea
IATPDHNVPTTDRDKGIAGINDEVSKLQVVTLDDNCKEHEILQFDIHDKRQGIVHVVGPEQGLTLPGMTIVCGDSHTSTHGALATLSMGIGTSEVEHVLATQCLKTSKLKNMRVNISGELQEGVTPKDVTLAVIGRIGTAGGTGYAIEYAGSVIENMSIEGRMTVCNMAIEAGARAGLVAYDQVTEAYIKDRPFTPTGEQWLVAKEQWQDLVSDREAQFDKEIEIDGSLIAPQVTWGTSPEMVSDIDGVIPEPNSESIRHALNYMKLEPGKKIKD

SEQ ID NO: 179366 - protein, 163 aa, Unknown
  Bacterial polypetide isolated from the Sargasso Sea
MPFTTYDKIWNEHLVDEQPDGTSLLFVDRHLIHEVTSPQAFEGLRNSNRKVRHPKLTLAVADHNVPTTDRSKGIADEDSRIQVETLNKNCKEFGVEIFGMDDKRQGIVHIIGPEQGFTQPGNIIVCGDSHTATHGAFGALAFGIGTSEVEHVLATQTLVQKKS

SEQ ID NO: 179367 - protein, 198 aa, Unknown
  Bacterial polypetide isolated from the Sargasso Sea
MEKFKNLKSIPAYIPIMNIDTDKIIPKQFLKTIKRSGLGKSLFYEMRFDENGKPIKGFILDSDPYNKSKILITGKNFGCGSSREHAPWALLDFGIRVIVSESFADIFYNNCFKNGILPIEASEDIINELTDYSKRKENIEVKIEEQKILYGNKSYEFKIDTFKKKCLIEGLDDIALSLEKIKSIENFEKNLINRKPWI

SEQ ID NO: 179368 - protein, 198 aa, Unknown
  Bacterial polypetide isolated from the Sargasso Sea
MEKFKDIKSIPAHISMMNVDTDKIIPKQFLKTIKRSGLGKSLFYEMRFDEKGKPIKGFVLDTEPYKNSKILITGKNFGCGSSREHAPWALVDFGIRVIISESFADIFYNNCFKNGILPIIADEKIIKELCEYSSRKQSIEVKLLEQVINYGNKSFKFNLDQFKKKCLINGLDDIALSLEKIQNIEQFEDKMRQSKTWI

SEQ ID NO: 179369 - protein, 122 aa, Unknown
  Bacterial polypetide isolated from the Sargasso Sea
MSSATLYDKVWALHQVAELPSGSTQLFIGLHLIHEVTSPQAFAALKDLGLTVRHPERTVATVDHIVPTTSQARPFADPLAEEMLTTLERNCQENGISMNALGSGRQGIVHVMAPELGLTPRA

SEQ ID NO: 179370 - protein, 165 aa, Unknown
  Bacterial polypetide isolated from the Sargasso Sea
MPFTTYDKIWNEHLVDEQPDGTSLLFVDRHLIHEVTSPQAFEGLRNSNRKVRHPKLTLAVADHNVPTTDRSKGIADEDSRIQVETLNKNCKEFGVEIFGMDDKRQGIVHIIGPEQGFTQPGNIIVCGDSHTATHGAFGALAFGIGTSEVEHVLATQTLVQKKSKN

SEQ ID NO: 179371 - protein, 371 aa, Unknown
  Bacterial polypetide isolated from the Sargasso Sea
IWGTIFPLLDRRQGIVHIVGPEQGITQPGMTIVCGDSHTATHGAFGALAFGIGTSEVEHVLASQTLIQQPAKNMKISVNGNLKPGVTAKDIILHIIGLIGTAGGTGYVIEYAGDVIHSLSMEGRMTICNMSIEAGARAGLIAPDQTTFDYIEGRPYAPKGEDWDKAIEFWKSLPSDANAKYDKEIHIEAEEISPQITWGTSPQDVVPINGKVPNPENIEDLNRKKAVERSLEYMGLEADQEIEKIKIDKVFIGSCTNGRIEDLREVARVVEGKKVSVDSMIVPGSGLVKEQAESEGLDKIFIDAGFDWREPGCSMCLAMNPDQLKPKERCASTSNRNFEGRQGREGRTHLVSPVIAAASAIKGTFAQESDL

SEQ ID NO: 179372 - protein, 178 aa, Unknown
  Bacterial polypetide isolated from the Sargasso Sea
MIIPKQFLKTIKRSGLGKNLFHELRYDMQGNIKNDFVLNWDPYKQASILIAGDNFGCGSSREHAPWSLLDFGFKCIIAPSFADIFYNNCFKNGILPIRLAQDKVDILMEQANNKNTLTIDLKEQKIISEDGNSINFDIDEFRKKCLLEGLDDIGLTLQKKEKITQYETKLKLSHPWII

SEQ ID NO: 179373 - protein, 151 aa, Unknown
  Bacterial polypetide isolated from the Sargasso Sea
ASMKRSLEYMGLKANTKITDIKIDKVFIGSCTNGRIQDLREAAKLLKDKKIAKHVNGMVVPGSGLVKDQAEQEGLDKIFKNSGFEWREPGCSMCLGMNEDQLKPKERCASTSNRNFEGRQGRGGRTHLVSPAMAAAAAIEGHLSDVRKFDN

SEQ ID NO: 179374 - protein, 182 aa, Unknown
  Bacterial polypetide isolated from the Sargasso Sea
MNIDTDKIIPKQFLKTIKRSGLGKSLFYEMRYDEKGNPIKGFILDNDPYKNSKILIAGKNFGCGSSREHAPWALLDFGIKAIVSESFADIFYNNCFKNGILPIVADENIINELAEYSARKENIEIKLEEQEIIYGNKSYKFKLDSFKKKCLLEGLDDIALSLEKIKNIESFEKNMHQSKPWI

SEQ ID NO: 179375 - protein, 422 aa, Unknown
  Bacterial polypetide isolated from the Sargasso Sea
MRLAGRKVKHPEMTLATVDHGVPTSNRLLGIKDPLSKIQIEALENNCEEFGVTLFGINDPRQGIVHVIGPEQGITQPGMTIVCGDSHTATHGAFGALAFGIGTSEVEHVLATQTLAMEKPKTMKVEVIGDVSVGVGPKDIILGIIRKIGTGGGAGHVIEYVGDVIQNMSMENRMTICNMSIEGGARAGMIAPDEVTFNYLKEKNYAPRGSDWDDAIAEWGNLYSDEDAEFDKVVTINADELEPSISWGTNPSQVIFVNDTIPYPDDFNEESEKEAASRALEYMDLKPGEKINEIQLDRVFIGSCTNGRIEDLREAAEVVKGKKVSSTIGAMIVPGSTLVKKQAEEEGLDKIFIEAGFDWREAGCSMCLGMNPDILSPGERCASTSNRNYEGRQGAGGRTHLVSPKMAAAAALYGKFVDIRNL

SEQ ID NO: 179376 - protein, 470 aa, Unknown
  Bacterial polypetide isolated from the Sargasso Sea
FFQCPILYTIKFRNDHLVDLQDDGTALLFVDRHLVHEVTSPQAFEGLRNSNRKVRHPNLTLAVADHNVPTTDRSKGISDKESKIQVETLEANCKEFGIKLFGMNDKRQGIVHVTGPEQGFTQPGTVIVCGDSHTATHGAFGSLAFGIGTSEVEHVLATQTLVQKKAKNFRVNVNGKLPLGVTSKDVILQIIGKIGTAGGTGCVIEYAGDLIRSLSVEQRMTICNMTIEGGARAGLIAPDEKIFRYLKDRPMSPKGQDWDKAMEYWKNLGTDEGAKFDKEINLQAEEILPMITWGTSPQDVITIDEKVPNPQNEKDEDRKNSLERSLNYMGLKPNMAAKDIKIDKVFIGSCTNGRIEDLREAAKILKDKKIAAHVHAMVVPGSGLVKEQAEQEGLDKIFVNSGFEWREPGCSMCLAMNADKLKPQERCASTSNRNFEGRQGRGGRTHLVSPGMAAAAAISGNLDDVRKYQN

SEQ ID NO: 179377 - protein, 118 aa, Unknown
  Bacterial polypetide isolated from the Sargasso Sea
MISNNPKTLFDKIWEHHLVDRQEDGTCLIYIDRHLVHEVTSPQAFEGLRNNNRKVRRPQSTFAVADHNVPTSDRSKGIENKESRIQVETLEKNCKDFDVTLFPLLDSRQGIVHIVGPE

SEQ ID NO: 179378 - protein, 201 aa, Unknown
  Bacterial polypetide isolated from the Sargasso Sea
MKKFDTLESIPAYLPIVNIDTDMIIPKQFLKTIKRTGLGKNLFFEMRYDETGKQIENFILNNEPYTNSKILIAGKNFGCGSSREHAPWALLDFGITCVISSSYADIFYNNCFKNGILPITISEEQIKQISEYSNRREKILINLKDQKIVFGNNEIKFELDEFKKKCLIEGLDDIALSLEKSDKIDSFEKKLKSSKPWIFND

SEQ ID NO: 179379 - protein, 348 aa, Unknown
  Bacterial polypetide isolated from the Sargasso Sea
MSNQGPKTLFDKIWSEHLVGQREDGTNLLYIDRHLVHEVTSPQAFEGLKLSNRPVHRPEATIAVADHNVPTINRQNIEDPQSKIQVETLAKNTKEHGIQYFDLMDQRQGIVHIIGPEQGITQPGMTIVCGDSHTSTHGAFGALAFGIGTSEVEHVLATQTIVQNPAKNMRISVNGELPFGVNSKDLILYIIGKIGTAGGTGHVIEYAGSSIMGLSMEGRMTICNMSIEAGARAGLISPDQTTFNYIKGRPYAPGTEHWDQAVEYWSSLPSDNDANYDHEIVIDSSEIDPMVTWGTSPEDVVSVKGTVPNPSSAKTENKKKSIERSLEYMGLKPGTKITDIKLDKIFIG

SEQ ID NO: 179380 - protein, 202 aa, Unknown
  Bacterial polypetide isolated from the Sargasso Sea
MDKFHSLKGIAAPLPIVNIDTDMIIPKQFLKTIKRTGLGVSLFYEMRYDNDGNLIKDFVLNTSPFNQSKILVAGDNFGCGSSREHAPWSLKDFGIRCVISTSFADIFYNNCFQNGILPIVVSPENLDQLMTAAKNQIEFNIDLPEQIIKAGNHSINFEIEEFRKERLLQGLDDIGITLGYQDKINAYEEDKKNKKPWLFKDT

SEQ ID NO: 179381 - protein, 353 aa, Unknown
  Bacterial polypetide isolated from the Sargasso Sea
QGATCPGMTVVCGDSHTSTHGAFGALAHGIGTSEVEHVFATQCLVAKKMKNMLVRVEGQLPFGVTAKDIVLAVIGKIGTAGGNGHAIEFAGSAIRDLSIEGRMTICNMSIEAGARVGMVAADEKTVEYVKGRPFAPQGADWDAAVEAWKDLVSDADAVFDTVVELDAAQIKPQVSWGTSPEMVLAVDQNVPDPAKEADLVKRGSIERALKYMGLTANQAITDIQLDRVFIGSCTNSRIEDLRAAAVIAKGRKVASTIKQAIVVPGSGLVKAQAEAEGLDKIFLDAGFEWREPGCSMCLAMNPDRLESGEHCASTSNRNFEGRQGAGGRTHLVSPAMAAAAAVNGRFIDVRELI

SEQ ID NO: 179382 - protein, 182 aa, Unknown
  Bacterial polypetide isolated from the Sargasso Sea
MDRANVDTDQIIPKQFLKSIKRTGFGPNLFDEWRYLDVGYAYQDNSKRPLNKDFVLNAERYQGASVLLARENFGCGSSREHAPWALEEYGFRSIIAPSYADIFFNNSFKNGLLPIILSDAEVDELFQQVEANVGYQLTVDLAAQTVTRPDGKVYHFEVDAFRKHCLINGLDDIGLTLQDGDA

SEQ ID NO: 179383 - protein, 350 aa, Unknown
  Bacterial polypetide isolated from the Sargasso Sea
TQPGSIIVCGDSHTATHGAFGSLAFGIGTSEVEHVLATQTLVQKKSKNFRIKVDGELSIGVTSKDVILQIIGKIGTAGGTGYVIEYAGSLISSLSVEQRMTICNMTIEGGARAGLIEPDQKIFDYLKDRPMSPKKDNWNKALDYWSKLKSDNGAKFDKEITLEGKDIMPMVTWGTSPQDVISIDEKIPNPESETDEDRKNSIERSLKYMGLKPGTAIKDVKIDKVFIGSCTNGRIEDLRDAAKIIRNKKVAQHVYAMVVPGSGLVKQQAEQEGLDKVFKESGFDWREPGCSMCLAMNSDKLKPEERCASTSNRNFEGRQGRGGRTHLVSPGMAAAAAISGSLDDVRKYQN

SEQ ID NO: 179384 - protein, 468 aa, Unknown
  Bacterial polypetide isolated from the Sargasso Sea
MTTPKTLYDKIWDAHLAHEADDGTCLLYIDRHLVHEVTSPQAFEGLRMSGRGVRAPNKTIAVPDHNVPTTIDREGGIDNEESRIQVEALDKNAREFGVHYYPVSDIRQGIVHIVGPEQGWTLPGMTVVCGDSHTATHGAFGALAHGIGTSEVEHVLATQTLIQKKSKNMKVEIKGKLRPGVTAKDITLSVIGATGTAGGTGYVIEYCGEAIRDLSMEGRMTVCNMAIEGGARAGLIAPDEKTFEYCKGRPHAPKGAAWEQAVEYWKTLFTDESAYFDKIIEINGDDIAPVVTWGTSPEDVLPITEIVPAPENFQGGKIEAVKRSLDYMGLTAGQKLTDIKIDTVFIGSCTNGRIEDLRAAAKILEGKKVKDGMRAMVVPGSGLVRAQAEEEGLADIFKQAGFEWRLAGCSMCLAMNPDQLSEGERCASTSNRNFEGRQGYKGRTHLVSPAMAAAAAVTGHLTDVREMI

SEQ ID NO: 179385 - protein, 407 aa, Unknown
  Bacterial polypetide isolated from the Sargasso Sea
KIWLHHLVDQQDDGTCLLYIDRHLVHEVTSPQAFEGLRNNKRKVRRPENTFAVADHNVPTTDRTKGIENKESRIQVETLEKNCKDFDVTLFPLLDSRQGIVHIVGPEQGITQPGMTIVCGDSHTATHGAFGALAFGIGTSEVEHVLATQTLIQKPAKNMKIEVKGNLNSGVNAKDIILNIIGKIGTAGGTGYVIEYAGEAISNLSMEGRMTICNMSIEAGARAGLIAPDEKTFEYIKERPYAPKGEDWDRALEFWKSLPSDDGAKYDKEIIIDARDISPQITWGTSPQDVVEINGKVPNPNEESNLSRKKAMERSLEYMGLEPQQEIQKIKIDKVFIGSCTNGRIEDLREVAKVVQGKKVSVDAMIVPGSGLVKKQAEEEGLDKIFIEAGFDWREPGCSMCLAMNPD

SEQ ID NO: 179386 - protein, 381 aa, Unknown
  Bacterial polypetide isolated from the Sargasso Sea
LRKNCKEFGVELFDVDDKRQGIVHIIGPEQGFTQPGTVIVCGDSHTATHGAFGALAFGIGTSEVEHVLATQTLIQKKSKNLRINVNGSLPKGVTAKDVILKIIGTIGTAGGTGYVIEFAGDIIKNLSMEERMTVCNMTIEAGARAGLISPDEKTFEYLKGKTMSPKGENWNKALKFWKSLYSDKDCKFDKEVNIEGKEIEPLVTWGTSPQDVSPVTGIVPDPNEETNEDRKIAMKRSLEYMGLKANTKISDIKIDKIFIGSCTNGRIEDLRLAADLLKGKKIADNVSAMVVPGSGLVKSQAEEEGIDKIFIEAGFEWREPGCSMCLGMNPDQLKPKERCASTSNRNFEGRQGRGGRTHLVSPGMAVAAAIKGYLSDVREIK

SEQ ID NO: 179387 - protein, 170 aa, Unknown
  Bacterial polypetide isolated from the Sargasso Sea
MSQTIYDKIWNEHLVHEQKDGTSLLFVDKHLIHEVTSPQAFEGLRTSNRKVRQPNLTLAVADHNVPTTDRSKGISDEDSRIQVETLEKNCKEFGIQLFGMEDKRQGIVHIIGPEQGFTQPGDIIVCGDSHTATHGAFGALAFGIGTSEVEHVLATQTLVQKKSKNFRISV

SEQ ID NO: 179388 - protein, 465 aa, Unknown
  Bacterial polypetide isolated from the Sargasso Sea
MSKTLYDKIWENHLVHEQSDGTSLIYVDRHLVHEVTSPQAFEGLRIQNRKVRRPELTLAVPDHNVPTTDRSKGINDEDSRIQVETLRKNCKDFGVELFDVNDKRQGIVHIIGPEQGFTQPGTVIVCGDSHTATHGAFGALAFGIGTSEVEHVLATQTLMQKKSKNLRINVNGNLPKGVTAKDVILKIIGTIGTAGGTGYVVEFAGDVIKSLSMEERMTVCNMTIEAGARAGLIAPDEKTFNYLEGKTMSPKGENWTKAVEYWKTLYSDKDCKFDKEINIDGKNIEPLVTWGTSPQDVSPVTGVVPDPEDEKNEDRKMAMKRSLDYMGLKANTKISEIKIDKIFIGSCTNGRIEDLRLAADLLKGKKIAENVSAMVVPGSGLVKEQAEKEGIDKIFKEAGFEWREPGCSMCLGMNPDQLKPKERCASTSNRNFEGRQGRGGRTHLVSPGMAIAAAIKGHLTDVREI

SEQ ID NO: 179389 - protein, 242 aa, Unknown
  Bacterial polypetide isolated from the Sargasso Sea
MPFTTYDKIWNDHLVDEQPDGTSLLFVDRHLIHEVTSPQAFEGLRNSNRKVRHPKLTLAVADHNVPTTDRSKGIADEDSRIQVETLNKNCEEFGVEIFGMDDKRQGIVHIIGPEQGFTQPGNIIVCGDSHTATHGAFGALAFGIGTSEVEHVLATQTLVQKKSKNFRISVNGSLPIGVTSKDVILQIIGKIGTAGGTGYVIEYAGNLISNLSVEQRMTICNMTIEGGARAGLIQPDEKIFHI

SEQ ID NO: 179390 - protein, 151 aa, Unknown
  Bacterial polypetide isolated from the Sargasso Sea
KKSIERSLEYMGLKPGTKITDIKLDKIFIGSCTNGRIEDLRKVASIVKDKKIASHVQAMIVPGSGLVKKQAEEEGIDKILKDAGFEWREAGCSMCLGMNPDQLKPGERCASTSNRNFEGRQGRGGRTHLMSPELAAASAITGNISDIRDFT

SEQ ID NO: 179391 - protein, 253 aa, Unknown
  Bacterial polypetide isolated from the Sargasso Sea
MPNTLYDKIWNDHLVHKQEDGTSLLFVDRHLIHEVTSPQAFEGLRNSRRKVRQPGLTLAVADHNVPTTDRTKGISDQESKIQVDTLDANCKEFGIQIFGMNDKRQGIVHIIGPEQGFTQPGTIIVCGDSHTATHGAFGALAFGIGTSEVEHVLATQTLVQKKSKNFRINVNGSLPIGVTSKDVILQIIGKIGTAGGTGYVIEYAGNLISSLSVENRMTICNMTIEGGARAGLIQPDQKVFDYLKGKPMSPKEK

SEQ ID NO: 179392 - protein, 201 aa, Unknown
  Bacterial polypetide isolated from the Sargasso Sea
MNKFISIKSVPAYLPIVNIDTDMIIPKQFLKTIKRTGLGKNLFFEMRYDQSGKEIDDFILNNSPYNNSKILIAGKNFGCGSSREHAPWALMDFGITCVISSSYADIFYNNCFKNGILPITISEDQIKEISEYSNRKEEISVNLPDQTIRFGNKEIKFEIDQFKKKCLIEGLDDIALSLEKSEKIVSYENKIKEAKPWIFND

SEQ ID NO: 179393 - protein, 190 aa, Unknown
  Bacterial polypetide isolated from the Sargasso Sea
MPQTLYDKIWNEHLVHQQKDGTSLLFVDRHLIHEVTSPQAFEGLRNSNRKVRQPKLTLAVADHNVPTTDRSKGIDDQESKIQVDTLGKNCKDFGIQLFEMNDKRQGIVHIIGPEQGFTQPGTVIVCGDSHTATHGAFGALAFGIGTSEVEHVLATQTLVQKKSKNFRIKVDGKLLLGVTSKRCNFTNNGK

SEQ ID NO: 179394 - protein, 201 aa, Unknown
  Bacterial polypetide isolated from the Sargasso Sea
MNKFNILKSIPAYLPIVNVDTDMIIPKQFLKTIKRTGLGKNLFFEMRYNDDGKLISDFILNKEPYSKSKILITGKNFGCGSSREHAPWALLDFGIRCVISSSFADIFYNNCFKNGILPITIAEEKIKEISDYANRKDEILVNLSDQKIIFGNKEIKFEIDEFKKKCLIEGLDDIALSLEKSDEITAYEKKIKLEKPWIFND

SEQ ID NO: 179395 - protein, 142 aa, Unknown
  Bacterial polypetide isolated from the Sargasso Sea
MGLEPDTPVKNIKIDKVFIGSCTNGRIEDLREAAKILKDKKIANHVGAIVVPGSGLVKEQAEQEGLNKVFINAGFEWREPGCSMCLAMNADKLKPEERCASTSNRNFEGRQGRGGRTHLVSPAMAAAAAVSGNLEDVRKYNN

SEQ ID NO: 179396 - protein, 472 aa, Unknown
  Bacterial polypetide isolated from the Sargasso Sea
MSGKTLSQKVWERHVVHSDESGSDLLFIDLHLVHEVTSPQAFDGLRMAGREVLRPDLTVATEDHNVPTTEIDKPIADPISRKQIETLRNNCSEFGIRLFSMGDQGQGIVHVIGPEMGLTLPGMTVVCGDSHTSTHGAFGALAFGIGTSEVEHVLATQTLPQTEPGTLSVTVDGNLPEGTTAKDVILAIIGELGTGGGIGKIIEYRGEAIRNLSMEGRMTVCNMSIEAGAKAGLIAPDETTFEYLKGRTHSPSADQWEEAIADWKSLATDDDAKFDQEIVINGNEISPYVTWGTNPGQVAPIKGLIPDPEQFAEPAQQESARRALEYMGIAEGTKISEISVDTVFIGSCTNSRIEDLREAAKVAQGQQVAPGVRTLVVPGSGSVKAQAEAEGLHEIFLEAGFDWREPGCSMCLAMNPDKLKEGERCASTSNRNFEGRQGRGGRTHLVSPAVAAATAIVGAFATPEDLEARGVK

SEQ ID NO: 179397 - protein, 331 aa, Unknown
  Bacterial polypetide isolated from the Sargasso Sea
MTKNNPKTLFDKIWLHHLVDQQEDGTCLLYIDRHLVHEVTSPQAFEGLRNNNRKVKRPQSTFAVADHNVPTSDRTKGIENKESRIQVETLEKNCKDFNVTLFPLLDSRQGIVHIVGPEQGITQPGMTIVCGDSHTATHGAFGALAFGIGTSEVEHVLATQTLIQKPAKNMKIEVTGKLNQGVTAKDIILHIIGQIGTAGGTGYVIEYTGEAISNLSMEGRMTICNMSIEAGARAGLISPDNKTFDYIKGRPYAPKGENWDKALKFWKSLPSDEGANYDKEIIIKAEDISSQITWGTSPQDVVAIKGKVPNPNDESNPNRKKAMERSLEYMG

SEQ ID NO: 179398 - protein, 201 aa, Unknown
  Bacterial polypetide isolated from the Sargasso Sea
MQKFNKLKSIPAYLPIVNIDTDMIIPKQFLKTIKRTGLGKNLFFEMRYDNDGKEIKDFILNNKPFTDSKILITGNNFGCGSSREHAPWALLDFGITCVISSSYADIFYSNCFKNGILPIILQEEKIKELSEYSSRKEEISINLSDQKITYGNNEIRFDIDPFKKKCLLEGLDDIALSLEKSAKMDLFEKKLKETKPWIFND

SEQ ID NO: 179399 - protein, 227 aa, Unknown
  Bacterial polypetide isolated from the Sargasso Sea
MSYSDPRTLFEKIWKRHEILTRDDGVSLLSIDRHLCHEGSFHAFDKLKMENRTVRCPDLTVAIADHYVSTNFPDQGNEVEALRVPIEKLEVNAKEAGIRLYGVGSKEQGIVHVVGPEQGLTIPGITLVCGDSHTATHGAFGCLAFGIGASEVAHVLATQTLWQAKPKTMRININGPLSDGVVAKDIILYLISVIGANGASGHMIEYAGSTIKGLSMEGRMTICNMSI

SEQ ID NO: 179400 - protein, 207 aa, Unknown
  Bacterial polypetide isolated from the Sargasso Sea
KTFSGTVAPLDKNNIDTDAIIPKQYLKSISRSGFGVNLFDEWRYTEYGEPGDDHSKRQKNNDFVLNKKPYNTASVLLTGKNFGCGSSREHAAWAIKDFGIKTILAESFADIFYNNCFKNGILPIVLNEDLIKSLFRKCDEDDKFSLKIDLDNQIISGFDNEYLSFEIDPYRKKALLKGLDEIGQTLEDIDLISDFEQKHKKTFPWLF

SEQ ID NO: 179401 - protein, 324 aa, Unknown
  Bacterial polypetide isolated from the Sargasso Sea
IGTSEVEHVLATQTLIQKKSKNFLLKVEGKIPVGVTAKDVILKIIGTIGTAGGTGFVIEYAGDVIRNFSMEERMTVCNMTIEGGARAGLIQPDNKTFKYLENRPLSPKKDNWKKALDYWSNLKSDKDSTFDKEIILNGKEVVPQVTWGTSPQDVVPVNGLVPDPKKEKNNDRRVAMERSLDYMGLKPNTKMTDIKIDKVFIGSCTNGRIQDLREAAKLLKDKKIAEHVNAMVVPGSGLVKIQAEQEGLDKVFKESGFEWREPGCSMCLGMNEDQLKPRERCASTSNRNFEGRQGRGGRTHLLSPAMAAVAAIEGHLSDVRKFTN

SEQ ID NO: 179402 - protein, 208 aa, Unknown
  Bacterial polypetide isolated from the Sargasso Sea
MEKFNKLSGHAIPLRITNVDTDMIIPKQFLKTIKRTGLGEFLFYELRYDQDGNKISSFALNQEQYKDASILIAGKNFGCGSSREHAPWSIADYGIKCIIAPSYADIFYNNCFKNGILPIILDEATVSRLQDTSDSILNFNIDLEKQNITFLENNEKKEISFEIDPAKKKCLLEGLDDIGLTLNKVASIGHFEEDQENEIPWLYGNKLK

SEQ ID NO: 179403 - protein, 467 aa, Unknown
  Bacterial polypetide isolated from the Sargasso Sea
MSKTLYDKIWNEHLVHEQEDGTSLLFVDRHLIHEVTSPQAFEGLRNSKRKVRQPSLTLAVADHNVPTTDRSKGISDEESKIQVDTLDANCKEFGIQVFGMNDKRQGIVHIIGPEQGFTQPGTIIVCGDSHTATHGAFGALAFGIGTSEVEHVLATQTLVQKKSKNFRINVNGTLPVGVTSKDVILQIIGKIGTAGGTGYVIEYAGNLISSLSVENRMTICNMTIEGGARAGLIEPDQKVFDYLKDKPMSPKKENWEKALEYWNSLKSDNAAQFDKEINLDGKDIKPMVTWGTSPQDVLTIDQNVPNPENESDPDKKNSIERSLKYMGLNPNTKIKDIKIDKVFIGSCTNGRIEDLREAAKILKDKKIANHVNAMVVPGSGLVKQQAEQEGLDKIFINSGFEWREPGCSMCLAMNADKLKPGERCASTSNRNFEGRQGRGGRTHLVSPGMAAAAAISGNLEDVRKYQS

SEQ ID NO: 179404 - protein, 201 aa, Unknown
  Bacterial polypetide isolated from the Sargasso Sea
MQKFNKLKSIPAYLPIVNIDTDMLIPKQFLKTIKRTGLGKNLFFEMRYDDKGNIIKDFVLNQEPYNKSKILIAGKNFGCGSSREHAPWALLDFGITCVISSSYADIFYNNCFKNGILPIILNEEKIKQISDYFNRKEEIEVDLDKQKITFGNNEFKFEIDSFKKKCLLEGLDDIALSLEKTDKIISFENKLKNLKPWIFND

SEQ ID NO: 179405 - protein, 456 aa, Unknown
  Bacterial polypetide isolated from the Sargasso Sea
EAHIVKERDDGTCLIYIDRHLTHEVTSPQAFEGLRLKNRKVRRPHRTIAVPDHNVPTTSDRLDIIEDEESRIQLETLKNNAKIFEVPYIPMEDIRQGIVHIIGPEQGLTQPGMTVVCGDSHTATHGAFGALAFGIGTSEVEHVLATQTLPMKRPQNMRISIDGKLRMGVEPKDLILAIIGEIGTAGGTGHVIEYTGEAIRGLSMEGRMTVCNMTIEAGARAGLIAPDEKTIDYVKGRPMAPKSENWEKAINYWASLPSDPSATYDRERIINADDIAPQVTWGTSPEDVVAIDQLVPDPKNELNLAKKQAMERAILYMGLRPGMKMTDIEINKVFIGSCTNARIEDLRNAAKVIGSNKISNNVKAIVVPGSGLVKKQAEEEGLDKIFISAGWEWREPGCSMCIGMNPDKVDPEERCASTSNRNFEGRQGDNARTHLVSPPMAAAASITGKLTDIRNF

SEQ ID NO: 179406 - protein, 416 aa, Unknown
  Bacterial polypetide isolated from the Sargasso Sea
RPDLTLAVADHNVPTTDRSKGIDDEESRIQIEALDKNCLDFGIELYGMNDIRQGICHVIGPEQGFTLPGTTMVCGDSHTATHGAFGCLAFGIGTSEVEHVLATQTMIQTKAKNMRVTVNGSLPTGVTAKDMILRIIGEIGTAGGTGSVIEFSGEAVSELTIEGRMTMCNMTIEGGARAGLVAPDQKTFDYLMGRPKSPKGASWETAIDYWKSLKSDDGAKFEIEIALDAEDIAPQVTWGTSPEDVLPITGRVPSPNNESDTNKKAKMQRSLDYMGLEPGMLLEDIKIDKMFIGSCTNSRIEDLRLAAKVANGQKVADHVDALVVPGSGLVKEQAEKEGLDEIFVSAGFDWREPGCSMCLAMNADKLQPGERSASTSNRNFEGRQGPGGRTHLVSPAMAAAAAIKGHLVDVRSFNID

SEQ ID NO: 179407 - protein, 334 aa, Unknown
  Bacterial polypetide isolated from the Sargasso Sea
MPKTLYDKIWEDHLVHQQSDGTSLIYVDRHLIHEVTSPQAFEGLRIQKRKVRKPDLTLAVADHNVPTTDRSKGITDQDSKKQVDVLRNNCKEFNVELFDMNDKRQGIVHIIGPEQGFTQPGTVIVCGDSHTATHGAFGALAFGIGTSEVEHVLATQTLIQKKSKNFRVNVNGKLPLGVTAKDVILKIIGTIGTAGGTGHVIEFAGGVIKALSMEERMTVCNMTIEAGARAGLIAPDEKTFKYLKGKPKSPKEKKWEMALENWKKFYSDEGCNFDKEININAKEIEPLVTWGTSPQDVSPITGLVPDPEKEKDKDKKLAMYRSLEYMGLKPNMKI

SEQ ID NO: 179408 - protein, 467 aa, Unknown
  Bacterial polypetide isolated from the Sargasso Sea
MSHPSPKTLFDKIWSHHLVHRQEDGTCLIYIDRHLVHEVTSPQAFEGLRNNNRKLHRPESTFAVADHNVPTSDRSKGIDNEESRIQVETLESNCKEFGVTLFPLLDKRQGIVHIVGPEQGITQPGMTIVCGDSHTATHGAFGALAFGIGTSEVEHVLASQTLIQQPAKNMKISVNGNLKSGVTSKDIILHIIGIIGTAGGTGYVIEYAGEAIQSLSMEGRMTICNMSIEAGARAGLIAPDEKTFSYIKGRPYAPKDEDWDKALAFWKSLPSDENASYDKEININAEDITPQITWGTSPQDVAPINGKVPNPETIKDSNRRKAVERSLEYMGLEPNQEIEKIKIDKVFIGSCTNGRIEDLREVAKVVAGKKVSVEAMIVPGSGLVKEQAENEGLDKIFIEAGFDWREPGCSMCLAMNPDQLKPKERCASTSNRNFEGRQGREGRTHLVSPAVAAASAIKGTFAQESDL

SEQ ID NO: 179409 - protein, 178 aa, Unknown
  Bacterial polypetide isolated from the Sargasso Sea
MIIPKQFLKTIKRSGLGKNLFHELRYDMQGNIKNDFVLNWDPYKQASILVAGDNFGCGSSREHAPWSLLDFGFKCIIAPSFADIFYNNCFKNGILPIRLDQKTVDVLMDQANQKKHLTINLKDQLIILEDGNTIEFQIDPFRKKCLLEGLDDIGLTLQKKEKIDQYEASLKNTHPWII

SEQ ID NO: 179410 - protein, 467 aa, Unknown
  Bacterial polypetide isolated from the Sargasso Sea
MSTTLYDKIWNDHLVDQQDDGTALLFVDRHLVHEVTSPQAFEGLRNSNRKVRHPNLTLAVADHNVPTTDRTKGISDKESKIQVDTLDANCKEFGVQIFGMDDRRQGIVHIIGPEQGFTQPGTVIVCGDSHTATHGAFGALAFGIGTSEVEHVLATQTLVQKKAKNFRINVNGKLPIGVTSKDVILQIIGKIGTAGGTGCVIEYAGDLIRSLSVEQRMTICNMTIEGGARAGLIEPDEKIFEYLKGKPMSPKGDNWDKALNYWNGLKTDPNANFDKEINLNASEILPMITWGTSPQDVITIDGKVPNPQNETDEDKKNSIERSLKYMGLKPDMSAKDIKIDKVFIGSCTNGRIEDLREAAKILKDKKVSSHVNAMVVPGSGLVKEQAEQEGLDQIFINSGFEWREPGCSMCLAMNADKLKPEERCASTSNRNFEGRQGRGGRTHLVSPGMAAAAAISGNLEDVRKYQN

SEQ ID NO: 179411 - protein, 361 aa, Unknown
  Bacterial polypetide isolated from the Sargasso Sea
MSTTLYDKIWNDHLVDQQDDGTALLFVDRHLVHEVTSPQAFEGLRNTNRKVRRPNLTLAVADHNVPTTNRTKGIADEESKIQVDTLEANCKEFGIQLFGMDDKRQGIVHIIGPEQGFTQPGTVIVCGDSHTATHGAFGSLAFGIGTSEVEHVLATQTLVQKKAKNFRINVNGQLPLGVTSKDVILQIIGKIGTAGGTGSVIEYSGDLIRSLSVEQRMTICNMTIEGGARAGLIAPDEKIFDYLKGKPMSPKGDNWEKALGYWNTLKTDTDASFDQEINLNANEILPMITWGTSPQDVITIDGKVPNPQSENDEDKKNSIERALKYMGLKPDMAAKDIKIDKVFIGSCTNGRIEDLREAAKI

SEQ ID NO: 179412 - protein, 467 aa, Unknown
  Bacterial polypetide isolated from the Sargasso Sea
MPLTLYDKIWNDHLVHQQEDGTSLLFVDRHLIHEVTSPQAFEGLRSSNRKVRQPNLTLAVADHNVPTTDRTKGISDEESKLQVDTLEKNCKEFGIKLFGMDDKRQGIVHIIGPEQGFTQPGTIIVCGDSHTATHGAFGSLAFGIGTSEVEHVLATQTLVQKKSKNFRINVNGKLPLGVTSKDVILQIIGKIGTAGGTGYVIEYAGDLISSLSVENRMTICNMTIEGGARAGLIQPDEKVFEYLKNKPMSPKNENWDKALEYWETLKSDHGSKFDKEINLEGNDIKPMVTWGTSPQDVITIDGKVPNPKNEKDPDKKNSIERSLKYMGLNPDINAKDIKIDKVFIGSCTNGRIEDLREAAEILKDKKIANHVDAMVVPGSGLVKQQAEQEGLDKIFINSGFEWREPGCSMCLAMNADKLKPGERCASTSNRNFEGRQGRGGRTHLVSPGMAAAAAISGNLDDVRKYQI

SEQ ID NO: 179413 - protein, 367 aa, Unknown
  Bacterial polypetide isolated from the Sargasso Sea
MMDKRQGIVHVIGPEQGFTQPGMTIVCGDSHTATHGAFGALAFGIGTSEVEHVLATQTLIQKPAKNMLINVEGELQPGVSPKDLVLAIIGEIGTAGGTGHVIEYSGKAIEQLSMEGRMTVCNMSIEAGARAGMIAPDKVTFDYLRDKPMSPKGKDWDLALEWWKSLPSDENAYYDKKITINANKIKPTVTWGTSPEDVVSIDGYIPDPSKIKDEDARAKVQRSLDYMGLVGGQKISEVEINTVFIGSCTNSRIEDLRSAAKVIDGKKVKKGIRAMVVPGSGLVKSQAEEEGLNLLFTEAGFEWREPGCSMCLAMNEDKLQPGERCASTSNRNFEGRQGKGGRTHLVSPEIAAASAITGKLTDYTLIT

SEQ ID NO: 179414 - protein, 468 aa, Unknown
  Bacterial polypetide isolated from the Sargasso Sea
MSQDTLFDKVWDLHKVSSLPGGSDQIFIGLHLIHEVTSPQAFGALKDKNLKVKFPERTVATVDHIVPTDNQSRPFKDNLAEQMIETLERNCLEHKIKFFNIGSGNQGIVHVVAPELGLTQPGMTIACGDSHTSTHGAFGSIAFGIGTSQVRDVLASQTIAINKLKVRQIWCDKKLSKGVFAKDLVLHIINELGVKAGVGFAYEFAGPAIDELSMEERMTICNMSIEGGARCGYINPDEKTFSYIKNKLCAPKSEHWDKAITWWKSLKSDENSIYDDVIKLDASKVEPTVTWGITPGQSISINQQIPLLDDLSPNDKLVAKEAYEYMSFKPGQYIKDTPVDVCFIGSCTNGRISDLRVAAKVLKNKKVSKNVKAFVVPGSEKVATKAKQEGLDQIFKDSGFQWREPGCSMCLAMNSDKLIGNQVSASSSNRNFKGRQGSPSGRTLLMSPAMVAAAAINGKVSDVREFIK

SEQ ID NO: 179415 - protein, 467 aa, Unknown
  Bacterial polypetide isolated from the Sargasso Sea
MPLTLYDKIWNEHLVHQQEDGTALLFVDRHLIHEVTSPQAFEGLRNSNRKVRQPTLTLAVADHNVPTTDRSKGIDDIESKIQVDTLETNCKEFGIKLFGMGDKRQGIVHIIGPEQGFTQPGTVIVCGDSHTATHGAFGALAFGIGTSEVEHVLATQTLVQKKAKNFRINVSGKLPIGVTSKDVILQIIGKIGTAGGTGCVVEYSGTLISSLSVEQRMTICNMTIEGGARAGLIEPDQKIFDYLKDRPMSPKKDNWDKALENWKNLKSDSDAIFDKEVNLKAEEIIPMVTWGTSPQDVITIEGKVPNPKNEKDLDKKNSIERSLKYMGLKPDTAAKDIKIDKVFIGSCTNGRIEDLREAAKILKDKKKASHIEAMVVPGSGLVKQQAEQEGLDKIFIDSGFEWREPGCSMCLAMNADKLKPEERCASTSNRNFEGRQGRGGRTHLVSPGMAAAAAISGNLDDVRKYQS

SEQ ID NO: 179416 - protein, 179 aa, Unknown
  Bacterial polypetide isolated from the Sargasso Sea
MIIPKQFLKTIKRTGLGKNLFFELRYDEKGNEIKDFILNQEPYNSSKILISGKNFGCGSSREHAPWALLDFGITCVISSSYADIFYNNCFKNGILPIILNEENIKELSEYSNRKEEISIDLREQKIIYGNNEVGFDVDPFKKKCLLEGLDDIALSLEKSDEINSFEKELKNKKPWIFND

SEQ ID NO: 179417 - protein, 465 aa, Unknown
  Bacterial polypetide isolated from the Sargasso Sea
MNYTLYDKIWNEHSILVNDDDSELLYIDRHLVHEVTSPQAFDGLEINNRKVWSKNSICAVSDHNVPTRNRLNGIKDSISKLQVDTLIDNCKKHKINYFDLNNINQGIVHVIGPELGFTQPGMTLVCGDSHTSTHGALASLAFGVGTSDVEHVLATQCINVKKEKNFNISIINSLSDGVSSKDLILYIIREIGTSGGTGFTIEFSGDCISKLSIEARMTLCNMSIEGGAKSGLVAFDNKTLDYVIKTKNSPSKKYIDDAIKYWETLHSDDSADFDKSIEFDASVIKPQVSWGTSPEMTVDIDGKVPDPNDIKDKNKKQSYINALKYMDLDANQKIDSIELDKIFIGSCTNSRIEDLRCAALEVEGKRISSRIKQAIVVPGSGHVKKQAENEGLDIIFKKAGFEWRDPGCSMCLGMNDDNLNPYERCASTSNRNFEGRQGDRGRTHLVSPIIAARSSIHGCLTSEKK

SEQ ID NO: 179418 - protein, 465 aa, Unknown
  Bacterial polypetide isolated from the Sargasso Sea
MKKTLYDKLWHDHLVKPLGDGFDLLYIDRHLVHEVTSPQAFEGLKLSNRKIWNVKSIVAVPDHNVPTTNRLNGIEDKISRTQVEALNDNCKTFGLMQFDLEDSRQGIVHVVGPEQGIVLPGMTVVCGDSHTSTHGALACLAFGIGTSEVEHVMATQCIIKKKAKNMLVNVEGSNSDFIFSKDIALHIIGQIGTAGGTGYAIEYKGNIINDMSIESRMTLCNMTIEAGATTGLIAFDEKTFDYINDKPYSPSGENLKKAKNSWNDLFSDEGSKFEKVINVDTKNINPMVTWGTSPEMVSDVNGRVPQADDDLIKDHEGYQKALDYMGLESGQSINSIVLDKVFIGSCTNSRIEDLRVVAKVVDGKKVSKTIKKAIIVPGSGVVKEQAEKEGLDEIFIKAGFEWRNPGCSMCLGMNDDQLGPYERCISTSNRNFEGRQGRLGRTHLASPATAAASAIKGNIADAREL

SEQ ID NO: 179419 - protein, 467 aa, Unknown
  Bacterial polypetide isolated from the Sargasso Sea
MPNTLYDKIWNDHLVDQQTDGTALLFVDRHLVHEVTSPQAFEGLRNSNRKVRHPNLTLAVADHNVPTTDRTNGIADQESKIQVDTLEKNCKEFGIQLFGMNDKRQGIVHIIGPEQGFTQPGTVIVCGDSHTATHGAFGALAFGIGTSEVEHVLATQTLVQKKAKNFRINVNGKLPLGVTSKDVILQIIGKIGTAGGTGCVVEYAGDLIRSLSVEQRMTICNMTIEGGARAGLIAPDEKIFKYLSGKPMSPKGEKWDKALEYWASLNSDDDATFEKEISLEANEILPMITWGTSPQDVITIDGKVPNPDAEKDEDKKNSLERSLKYMGLKPNMAAKDIKIDKVFIGSCTNGRIEDLREAAKILKDKKIASHVHAMVVPGSGLVKEQAEQEGLDKIFVSSGFEWREPGCSMCLAMNADKLKPEERCASTSNRNFEGRQGRGGRTHLVSPGMAAAAAISGNLDDVRKYQS

SEQ ID NO: 179420 - protein, 117 aa, Unknown
  Bacterial polypetide isolated from the Sargasso Sea
ISDLRVAAKVLKGKKVSKNVKAFAVPGSEKVATEAKQEGLDQIFKDSGFQWREPGCSMCLAMNSDKLIGNQVSASSSNRNFKGRQGSPSGRTLLMSPAMVAAAAVNGKVSDVREFIN

SEQ ID NO: 179421 - protein, 201 aa, Unknown
  Bacterial polypetide isolated from the Sargasso Sea
MQPFTSHTGLAVMIDSANIDTDQIIPKQFLSKVTRDGFGVHLFHDWRYLDDAGEVPNPDFTLNKPRYSGASILLAQENFGCGSSREHAPWALADFGLRAIIAPSFADIFYGNSINNGLLPVKLSANEVRQLMDEVASEEGAQITVDLTTCKVTSPSGAEFSFTLAESARHKLLNGLDAIGLTLSHGAQIGEYESQIPSWRC

SEQ ID NO: 179422 - protein, 300 aa, Unknown
  Bacterial polypetide isolated from the Sargasso Sea
MSKTLYDKIWENHLVHEQNDGTTLIYVDRHLVHEVTSPQAFEGLRLQKRKVRRPELTLAVPDHNVPTTDRTKGIDDEESRIQVETLRSNCKEFGVKLFDVNDKRQGIVHIIGPEQGFTQPGTVIVCGDSHTATHGAFGALAFGIGTSEVEHVLATQTLIQKKSKNFRINVNGELPKGVTAKDVILKIIGTIGTAGGTGYVVEFAGAVIRSLSMEERMTVCNMTIEAGARAGLIAPDEKTFDYLKNKSMSPKGEDWLKAVKFWKTLYSDKECKFDKEINIDGKDIEPLVTWGTSPLRCITL

SEQ ID NO: 179423 - protein, 398 aa, Unknown
  Bacterial polypetide isolated from the Sargasso Sea
MTINNPKTLFDKIWEHHLVDRQEDGTCLIYIDRHLVHEVTSPQAFEGLRNNNRKVRRPQSTFAVADHNVPTSDRSKGIENKESRIQVETLEKNCKDFDVTLFPLLDSRQGIVHIVGPEQGITQPGMTIVCGDSHTATHGAFGALAFGIGTSEVEHVLATQTLIQKPAKNMRISVEGKLNLGVTAKDIILHIIGKIGTAGGTGYVIEYGGNAISSLSMEGRMTICNMSIEAGARAGLIAPDEKTFEYIKGRPYAPSGDNWDKAVEFWKSLPSDEGAKYDEEILINAEDISPQITWGTSPQDVVAINGIVPNPQEESNPNRKKAMERSLEYMGLEPKQEIQKIKIDKVFIGSCTNGRIEDLREVAKVVEGKKVSVDSMIVPGSGLVKKQAEEERLDKIFY

SEQ ID NO: 179424 - protein, 286 aa, Unknown
  Bacterial polypetide isolated from the Sargasso Sea
MAKTLYQKVFDAHVVREVEGETPLIYIDRHLVHEVTSPQAFDGLRAMNRQLRRPDLTWATMDHNVSTTTKDIAASGEMARIQMETLAANCKEFGVRLYDLNHQYQGIVHVMGPELGITLPGTTIVCGDSHTATHGAFGSLAFGIGTSEVEHVMATQTLKQGRAKTMRISVNGKLAEGISAKDVVLAIIGKVGHAGGTGYVVEFAGEAIEGLTMEGRMTVCNMAIELGAKAGMIAPDQTTIDYIRGKEFAPKGEALEQAIAYWQSLKSDEGAHFDAEVVLDAADIAP

SEQ ID NO: 179425 - protein, 422 aa, Unknown
  Bacterial polypetide isolated from the Sargasso Sea
MSNPKTLYDKIWNDHVVTNNDDGTSVIYIDRHLVHEVTSPQAFEGLKIAGRSVRQPQFTLATADHNIPTTDRDKGIADPESKLQVETLEKNCADHGITYLSMNDNRQGIVHIIGPEQGFTQPGMTIVCGDSHTSTHGAFGALAWGIGTSEVEHVLATQTLIQTKAKNMRIDIQGDLPIGVTAKDIVLKIIQTIGTAGGTGYVIEYTGNVIKALSMEGRMTVCNMSIEAGARAGLISPDEKTAEYIKGRPLAPSDDYYEKAVQYWMSLASDKDAQYDKTISINAKDIIPQVTWGTSPEDVVSIDGSVPNPHDENDTEKKKSMIRALEYMGLEPNTQMKDIKVDKVFIGSCTNGRIEDLRAVSKIANGKKVAGHVNAIIVPGSGLVKEQAEKEGLDKIFIESGFEWRDPGCSMCLAMNADKLQP

SEQ ID NO: 179426 - protein, 145 aa, Unknown
  Bacterial polypetide isolated from the Sargasso Sea
MKPKTLFDKIWDHHLIDTQEDGASLIYIDRHLVHEVTSPQAFEGLRLSGRTVNSPKRTLAVADHNVPTTDRAGGIDEEESRIQVEALDKNVEDFGIPYFNMMDKRQGIVHVIGPEQGFTQPGMTIVCGDSHTATHGAFGALAFGI

SEQ ID NO: 179427 - protein, 201 aa, Unknown
  Bacterial polypetide isolated from the Sargasso Sea
MEKFTNLKGIAAPFNFINVDTDKIIPKQFLKTIKRTGLGKHLFDEMRFNDDGTEKKDFVLNEEPYRSSNIIVAGDNFGCGSSREHAPWALSDFGIKCIISTSFADIFYNNSFKNGLLPIKVTSEQREALMADAKDKENPELEIDLPSQEIRRPNGSVIKFDIDPFRKKCLLEGLDDIGLTMQKSSEIQNFETKMSSERPWL

SEQ ID NO: 179428 - protein, 221 aa, Unknown
  Bacterial polypetide isolated from the Sargasso Sea
MNKFTVHTGLVVPLDRENVDTDAIIPKQFMKSIRRTGYGPHAFDQWRYLDHGEPGMDNSTRPLNQEFILNQPRYQGASILLTRRNFGCGSSREHAPWALEQFGFRALIGPGFAEIFYNNCFKNGLLPIVLPEEQVTHLFEQTRSNCGFQLTIDLERQRITTSGGDEHSFEVEAFRKYCLLNGYDDIALTLRHADLIRSFEKKRIESQPWLARHLTSPLIGK

SEQ ID NO: 179429 - protein, 252 aa, Unknown
  Bacterial polypetide isolated from the Sargasso Sea
MSKTLYDKIWKDHIVHQQEDGTSLLFVDRHLIHEVTSPQAFEGLRNSNRNVRHPNLTLAVADHNVPTTDRSKGINDIDSKIQVDTLETNCKQFGIKLFGMNDKRQGIVHIIGPEQGFTQPGTVIVCGDSHTATHGAFGALAFGIGTSEVEHVLATQTLVQKKAKNFRINVNGKLPIGVTSKDVILQIIGKIGTAGGTGTVIEYSGNLISSLSVEQRMTICNMTIEAGARAGLIEPDQKIFDYLKDKPMSPKG

SEQ ID NO: 179430 - protein, 200 aa, Unknown
  Bacterial polypetide isolated from the Sargasso Sea
MESFKTIIGIPAPLPMINVDTDMIIPKQFLKTIKRSGLGKNLFHELRYDIQGNIKNDFVLNWDPYKTSKILIAGANFGCGSSREHAPWSLLDFGFKSIIAPSFADIFYNNCFKNGILPIKLDQQNVDILMNEAENKNDVSVDLENQKITYQNDKIIEFEIDAFRKKCLLEGLDDIGLTLQKNKKIDVHEEKIHSIQPWIV

SEQ ID NO: 179431 - protein, 353 aa, Unknown
  Bacterial polypetide isolated from the Sargasso Sea
MSKTLYDKIWENHLVHEQSDGTSLIYVDRHLVHEVTSPQAFEGLRLQKRKVRRPELTLAVPDHNVPTTDRSKGINDEDSRIQVETLRKNCKDFGIELFDVNDKRQGIVHIIGPEQGFTQPGTVIVCGDSHTATHGAFGALAFGIGTSEVEHVLATQTLMQKKSKNLRINVNGNLPKGVTAKDVILKIIGTIGTAGGTGYVVEFAGDVIKSLSMEERMTVCNMTIEAGARAGLIAPDEKTFSYLKGKTMSPKGENWTKAVEFWKTLYSDKDCKFDKEVNIDGKNIEPLVTWGTSPQDVSPVTGVVPDPEKENNQDRKMAMKRSLDYMGLEANTKISDIKIDKIFIGSCTNGRIE

SEQ ID NO: 179432 - protein, 170 aa, Unknown
  Bacterial polypetide isolated from the Sargasso Sea
MPNTLYDKIWNDHLVDQQEDGTSLIFVDRHLVHEVTSPQAFEGLRNSKRKVRHPKLTLAVADHNVPTTDRSKGISDEESKIQVDTLESNCKDFGIQLFGMGDKRQGIVHIIGPEQGFTQPGTVIVCGDSHTATHGAFGSLAFGIGTSEVEHVLATQTLVQKKAKNFRVNV

SEQ ID NO: 179433 - protein, 465 aa, Unknown
  Bacterial polypetide isolated from the Sargasso Sea
MGKTLFDKIWDNHLVTSIDESTNLIFIDLHLVHEVTSPQAFDSLRISDRKVKYPELTLATVDHGVPTSNRLLGIKDPLSKIQIEALEKNCEEFGVTLFGINDPRQGIVHVIGPEQGITQPGMTIVCGDSHTATHGAFGALAFGIGTSEVEHVLATQTLAMEKPKTMKVEVIGDVSDGVGPKDIILGIIRKIGTGGGAGHVIEYVGDVIKNMSMENRMTICNMSIEGGARAGMIAPDETTFNYLKDKNYAPKDSDWNDAINEWGELFSDDDAAFDKVVTINAGELEPSVSWGTNPSQVIFINDEIPHPDNFQDESDKEAAIRALEYMDLEPGIKINEITLDRVFIGSCTNGRIEDLREAAQVIKGKKVSETVGAMVVPGSTLVKNQAEEEGLDKIFIDAGFDWREAGCSMCLGMNPDILSPGERCASTSNRNYEGRQGAGGRTHLVSPKMAAAAAIYGKFVDIRDL

SEQ ID NO: 179434 - protein, 186 aa, Unknown
  Bacterial polypetide isolated from the Sargasso Sea
MIIPKQFLKTIKRTGLGKNLFYELRYDEKDAPIDSFVLNQDKYKDSQILITGKNFGCGSSREHAPWSILDYGIKCIIASSFADIFYNNCFKNGILPIKLDESEVTKLQKAAENSLSFTIDLENQKISYFDKNINHEVSFELDKAKKTSLLEGLDDIGLTLAKVNHISDFENKQKSRTPWLYSQQIK

SEQ ID NO: 179435 - protein, 393 aa, Unknown
  Bacterial polypetide isolated from the Sargasso Sea
MSSGTLYDKVWDLHRVAELPGGSTQLFVGLHLIHEVTSPQAFAALRDKGLSVRCPERTMATVDHIVPTTSQSRPFADPLAEEMLSTLERNCADHGITLNGIGSGRQGIVHVIAPELGLTQPGMTVACGDSHTSTHGAFGAIAFGIGTSQVRDVLASQSLAMSKLKVRRIQVNGRLSDGVSAKDLILHVIRTLGVKGGVGFAYEFAGPAVEALSMEERMTLCNMAIEGGARCGYVNPDQVTFDYLSGRAGAPSGAAWDRAVSWWRSLASDPDAVVDDELVFDAASIAPTVTWGITPGQGLGIDECIPLLEQLEPGERPIAEEAYRYMDLQPGTAIAGVPVDVCFIGSCTNGRLSDLRAAAAVARGRNVADGIKAFVVPGSEQVAKAAEAEGLDR

SEQ ID NO: 179436 - protein, 467 aa, Unknown
  Bacterial polypetide isolated from the Sargasso Sea
MPQTIYDKIWNDHLVHQQEDGTSLLFVDRHLIHEVTSPQAFEGLRNSNRKVRQPSLTLAVADHNVPTTDRSVPITDEDSKIQIETLEKNCAEFGINLFGMNDKRQGIVHIIGPEQGFTQPGTIIVCGDSHTATHGAFGALAFGIGTSEVEHVLATQTLVQKKSKNFRINVNGSLPVGVTSKDVILQIIGKIGTAGGTGYVIEYAGNLISNLSVEQRMTICNMTIEGGARAGLIEPDEKVFNYLKGKPMSPKNSNWDKALEYWSKLKSDGDAVFDKEISLEGKDIKPMVTWGTSPQDVVDIDGIVPDPENEQNEDRKNSINRSLKYMGLKPKTKIKDIRIDKVFIGSCTNGRIEDLREAAKILKDKKIASHVNAMIVPGSGLVKQQAEQEGLDVIFKNSGFEWREPGCSMCLAMNADKLKPEERCASTSNRNFEGRQGRGGRTHLVSPAMAAAAAISGNLDDVRKYNS

SEQ ID NO: 179437 - protein, 202 aa, Unknown
  Bacterial polypetide isolated from the Sargasso Sea
MDKFNSLKGIAAPLPIVNIDTDMIIPKQFLKTIKRTGLGVSLFYEMRYDNDGNLIKDFVLNTSPFDQSKILVAGDNFGCGSSREHAPWSLKDFGIKCVISTSFADIFYNNCFQNGILPIVVSSDQLDQLMMAATNQIEFSIDLPEQTVKAGNHSINFEIEEYRKDRLLQGLDDIGITLGYQDKISAYEEDKKNKKPWLFKDN

SEQ ID NO: 179438 - protein, 201 aa, Unknown
  Bacterial polypetide isolated from the Sargasso Sea
MKKFTTLKSIPAYLPIVNIDTDMIIPKQFLKTIKRTGLGKNLFFEMRYDERENLINDFILNNDPFNKSKILIAGKNFGCGSSREHAPWALLDFGITCVISSSFADIFYNNCFKNGILPITLKEEEIKEISEYSNRKEEISVNLPDQKITFGNKEINFQIDEFKKKCLLEGLDDIALSLEKLENIISFEKKIKSKKPWIFND

SEQ ID NO: 179439 - protein, 134 aa, Unknown
  Bacterial polypetide isolated from the Sargasso Sea
MKPKTLFEKIWDNHLIASIDEGTNLLFVDMHLVHEVTSPQAFDSLRISKRKVKYPQLTLATVDHGVPTSDRALGIKDPLSKKQIDALENNCSEFGITIFGVNDPRQGIVHVIGPEQGITQPGMTIVCGDSHTAT

SEQ ID NO: 179440 - protein, 306 aa, Unknown
  Bacterial polypetide isolated from the Sargasso Sea
MPQTLYDKIWNQHLVHQQDDGTSLLFVDRHLVHEVTSPQAFEGLRTSNRKVRQPSLTLAVADHNVPTTDRSKGIEDEDSKIQVDTLEKNCKEFGIKLFGMNDKRQGIVHIIGPEQGFTQPGTVIVCGDSHTATHGAFGALAFGIGTSEVEHVLATQTLVQKKSKNLRINVNGKLPIGVTSKDVILQIIGKIGTAGGTGYVIEYAGDLVSSLSIEQRMTICNMTIEGGARAGLIKPDEKTFKYLKGRPLSPKNENWDKALDHWSKLHSDNDAIFDKEVNLDGKDIKPMVTWGTSPQDVVPIDGKVPN

SEQ ID NO: 179441 - protein, 470 aa, Unknown
  Bacterial polypetide isolated from the Sargasso Sea
MGRTLFEKIWDKHVVESFDDGNDLIYIDRIFLHERTGSIALQNLHDRNIAVRNPKQVFATIDHIVDTIPGRDDETLMPSGKEFIKSLRSSAIRENINFFDLNTPEQGIGHVVSPEQGIALPGLTYICPDSHTCSLGALGTLAWGVGSSECEIALATNTLIKKKPKSIKVNVNGNVNDQVSAKDIVLYLISNYGANGADGSAVEFGGNVIDQMGIEARLTLCNMSVEFGAMTGIIQPDEKVFEYLRGKKYAPTLDQIQEAEKYWRKLKSDKDAEYSEIIDIDCDQVGTFVTWGTSPEHAIDLNEKIPSLNEIDDETKKDSAKKALEYMGLNEGETLMGKKIDAAFIGSCTNSRLSDLRIAASILKDKKVSNGVKAICVPGSSKVKKDAENEGLDEIFISAGFEWRESGCSMCFYAGGESFGLSERVISSTNRNFENRQGKSTRTHLASPATVAASAIKGTIAFPKDLKEDL

SEQ ID NO: 179442 - protein, 467 aa, Unknown
  Bacterial polypetide isolated from the Sargasso Sea
MPHTLYDKIWNDHLVHEQDDGTALLFVDRHLIHEVTSPQAFEGLRSSNRKVRQPSLTLAVADHNVPTTDRSKGISDQESKIQVETLEANCKEFGIKLFGMNDKRQGIVHVTGPEQGFTQPGTVIVCGDSHTATHGAFGSLAFGIGTSEVEHVLATQTLVQKKAKNFRINVNGKLPLGVTSKDVILQIIGKIGTAGGTGCVIEYAGDLIRSLSVEQRMTICNMTIEGGARAGLIEPDEKIFNYLKGRPMSPKGETWDKAVEVWSNLNSDNGSHFDKEVSLTAEEIIPMVTWGTSPQDVITIEGKVPNPNTEKDLDKKSSIERSLKYMGLKPDTLAKDIKIDKVFIGSCTNGRIEDLREAAKILKNKKKASHVHAMVVPGSGLVKQQAEQEGLDKIFIKSGFEWREPGCSMCLAMNADKLKPEERCASTSNRNFEGRQGRGGRTHLVSPGMAAAAAISGNLDDVRKYQN

SEQ ID NO: 179443 - protein, 201 aa, Unknown
  Bacterial polypetide isolated from the Sargasso Sea
MQKFISLKSIPTYLPIVNIDTDMIIPKQFLKTIKRTGLGKNLFFELRYDETGKEIPDFILNKKPFCNSNILITGKNFGCGSSREHAPWALLDFGITCIISSSYADIFYNNCFKNGILPIVLNEDKIKELSEYSNRKEEISVNLVDQKIIYGNNEILFEIDPFKKKCLLEGLDDIALSLEKSDKIKFFENKIKNQRPWIFND

SEQ ID NO: 179444 - protein, 439 aa, Unknown
  Bacterial polypetide isolated from the Sargasso Sea
MPKTLYDKIWNDHLVDQQSDGTALLFVDRHLVHEVTSPQAFEGLRNSHRKVRHPKLTLAVADHNVPTTDRTNGIADQESKIQVDTLENNCKEFGIQLFGMDDKRQGIVHIIGPEQGFTQPGTVIVCGDSHTATHGAFGALAFGIGTSEVEHVLATQTLVQKKAKNFRINVNGKLPLGVTSKDVILQIIGKIGTAGGTGCVVEYAGDLIRSLSVEQRMTICNMTIEGGARAGLIAPDEKIFKYLDGKAMSPKGEKWDKALEYWKNLKSDDNATFDKEISLEAKEILPMITWGTSPQDVITIDGKVPNPNSEKDEDKKNSIERALKYMGLKPDMAARDIKIDKVFIGSCTNGRIEDLREAAKILKDKKIASHVHAIVVPGSGLVKEQAEQEGLDRIFVNSGFEWREPGCSMCLAMNADKLKPEERCASTSNRNFEGRQGRG

SEQ ID NO: 179445 - protein, 119 aa, Unknown
  Bacterial polypetide isolated from the Sargasso Sea
MPNTLYDKIWNDHLVDQQDDGTALLFVDRHLVHEVTSPQAFEGLRNSNRKVRHPKLTLAVADHNVPTTDRTNGIADQESKIQVDTLEKNCKEFGVELFGMDDKRQGIVHIIDQNKGYST

SEQ ID NO: 179446 - protein, 194 aa, Unknown
  Bacterial polypetide isolated from the Sargasso Sea
MEKFKNVESRPVPLNSAHVDTDQIIPKQFLKRIERTGFGQFLFFDWRFNDDGSPNEKFILNDVRFKDSEILLAQENFGCGSSREHAPWALRDYGFKVIISSSFADILYNNCFKNCILPIILNEKDLEYLFESTSNFNDYKLNVDLEKNLLADNKGFEIFFNIDPFRKKCLLEGLDDIALTLEHSEKIDNYEKAL

SEQ ID NO: 179447 - protein, 469 aa, Unknown
  Bacterial polypetide isolated from the Sargasso Sea
MSKSPKTLFEKIWQDHLVIQETKETPAILYIDLHLIHEVTTPQAFQSLRDKGLSVRDPKKVLATMDHSTPTLPVNSIADLDIVAEKGPADQIRDMIKNCEDFGIELHGFGSDKRGIVHVIGPELGATQPGKTIVCGDSHTSTHGAFGALAFGIGTTEVGHVLASQCLLQRKPKTFAVNMSGALKSGVSAKDIILKIIQEVGVDGGVGHVIEYRGQTAGLLSLEERMTICNMSIEAGARAGMFAPDDKTFDYLIDKPMSPKGLDWDEAIQRWSRLITDENAEFDKEVTIDVDRLSPMVTYGTNPGMAMQIDDVVPASNGDLGHKQSLNYMQIEADKPIIGKEIDVVFIGSCTNSRISDLHDAAEILKGRKVSNGVRALVVPGSQAVKKEAESLGLDKIFESAGAEWRESGCSMCLGMNGDTVGNGQLAVSTSNRNFEGRQGKGARTILASPKTAAASAIAGSVDDPRKYS

SEQ ID NO: 179448 - protein, 294 aa, Unknown
  Bacterial polypetide isolated from the Sargasso Sea
MRKFWNKHIVAEPKDQPEILYIDLHLVHEVTSPQAFEGLRLNNRKVRRPDLTIATVDHNITTDDTRTQIIKDEIARKQVETIRENCKSNNITLFDVWDKEQGIVHVIGPEQGYTQPGMTIVCGDSHTSTHGAFGALAFGIGTSEVEHVLATQTLRQRKPKTMKVEFKGSLSKGVTAKDMVLKLIGQIGTAGGTGYVMEYTGEAVKSLNMEGRMTICNMSIEGGARAGMIAPDQTTYDWMKGRNKVPKGSDWEKSIKEWDELRSDPEAIYDSYVEVDLYDLEPFVSWGTNPSQVL

SEQ ID NO: 179449 - protein, 454 aa, Unknown
  Bacterial polypetide isolated from the Sargasso Sea
MNRTLYDKIWDSHFVGTRSDGNSLLYIDLQLLHEVTSPQAFEGLQMAKRPLWRVGANLATPDHNVPTESRELGMAGIKDLISLEQVETLNENCKNFNVQQFDILDERQGIVHVVGPEQGATMPGMTIVCGDSHTSTHGAFASLAQGIGTSEVEHVMATQSLVQNKAKNFEVRVDGLLEEGVFAKDVALAIIGALGTAGATGHTIEYRGDAISALSMEGRMTLCNMSIEAGARAGLVAVDDCTLEYVKGRPFAPKGELWLRALESWKDLYSDDGAHFDNTLSLRAETIEPQVTWGTSPEMVCGITSFVPDPMAISDPVVSESTRLALGYMGLEAGTPITDIELDQIFIGSCTNARIEDLRVAAHVVSGKSVAKKIKRALVVPGSGLVKQQAEEEGLAKIFVDAGFEWRAAGCSMCLGMNPDQLGEKEHCASTSNRNFEGRQGHKGRTHLVSPAMA

SEQ ID NO: 179450 - protein, 371 aa, Unknown
  Bacterial polypetide isolated from the Sargasso Sea
MPQTLYDKLWNLHEVAQREDGTHLLYIDRHLIHEVTSPQAFEGLKIAGRKPWRISSNIATPDHNVPTTDRAKGIQGINDEVAKLQVVTLDENCKQHDILQFDIHDIRQGIVHVVGPEQGLTLPGMTIVCGDSHTSTHGALATLSMGIGTSEVEHVLATQCLKTSKLQNMRVIINGDLQKGVTPKDVTLAVIGKIGTAGGTGYAIEYAGSVIENMSIEGRMTVCNMAIEAGARAGLVAYDQTTEAYIKNRPFAPTGEQWINAKSQWEELISDEDAKFDKEIEIDGSLIAPQVTWGTSPEMVIDIDGFIPEPDSESIQHALDYMDLEPGKKIKDIKLDQVFIGSCTNSRIEDLREAAKVWKEKRYQTQLNEQL

SEQ ID NO: 179451 - protein, 192 aa, Unknown
  Bacterial polypetide isolated from the Sargasso Sea
MVAPLDRVNVDTDQIIPKQFLKSIKRTGFGDYLFDAWRFDDPGELGMTPNERVINHDFVLNQPRYQGASILLARNNFGCGSSREHAVWSIMEFGFKVVIAESFADIFYGNCFKNGLLPVQLPPDVIDRLFELSSDGLELSVDLPNQTVTEGAGEVFSFDIDQGMKIKLLEGQDEISLSLKEREKILLFRERA

SEQ ID NO: 179452 - protein, 230 aa, Unknown
  Bacterial polypetide isolated from the Sargasso Sea
MSTTLYDKIWNDHLVDQQDDGTSLLFVDRHLIHEVTSPQAFEGLRNSNRKVRHPNLTLAVADHNVPTTDRSKGISDEESKIQVDTLEANCKEFGVQLFGMDDKRQGIVHIIGPEQGFTQPGTVIVCGDSHTATHGAFGALAFGIGTSEVEHVLATQTLVQKKAKNFRINVNGELPLGVTSKDVILQIIGKIGTAGGTGSVVEYAGDLIRSLSVEQRMTICNMTIEGGARA

SEQ ID NO: 179453 - protein, 401 aa, Unknown
  Bacterial polypetide isolated from the Sargasso Sea
DRSLPMVDETSSTQIKTLEQNCKDFGIKLFGINDPNQGIVHVIGPQLGITLPGSTIVCGDSHTSTQGAFGAFAFGIGTSEVEHTLATQTLWLEKPKTFEILATGQRKNSFAVTSKDIILSIIKKIGTDGGTGHVLEYRGNAITDLSMEQRMTICNMSIEAGSRAGLIAPDSKTFDYVNNREYTPENYDDLVDTWKENLMSDPNSKFDKSFTIDVEKIEPQVSWGTNPAMVSDVTGTIPTPEDYGKNNEIQVESAKKALAYMNLEPETPIVEIPIDRVFIGSCTNARLEDLKDAAEIVKGKKVNSNVNAMVVPGSQMVKHEAEKLGLDKIFKDANFEWRESGCSMCLGMNPDILKPGERCASTSNRNFEGRQGSGGRTHLVSPVMAAASAISGHFVDVREWC

SEQ ID NO: 179454 - protein, 194 aa, Unknown
  Bacterial polypetide isolated from the Sargasso Sea
MEPFSKVTSKITPFDKANVDTDQIIPKQFLKLITKSGFGKFLFYDWRFDQNGNPKNDFVLNNPVYQNSQILVTNENFGCGSSREHAVWALKDFGFRVIIGPSFADIFFSNCFKNGVLPIILDVTQVEKLLKVQDSVELDLNSQKITFGNESITFEIDSHRKTRLLEGLDDIDLTLKENTNIENFENNSNIIPIF

SEQ ID NO: 179455 - protein, 466 aa, Unknown
  Bacterial polypetide isolated from the Sargasso Sea
MPATLYDKLWDEHLVRTDDSNESLIYIDRHYLHEVTSPQAFEGLRHKDLKPWRLDANIATPDHNVPTDRGHAFNAELIKDQVAKIQVVELDKNCNKFGIHQFDITSNKQGIVHVMGPELGYTLPGMTIVCGDSHTSTHGAFGCLAMGIGTSEVEHVLATQCLKITKLKNMQVNFNGSLQKGVTSKDIVLHLIKLIGTAGGTGHAIEFSGSYIKSASMESRMTICNMAIEAGAKVGLIRVDATTLDYVRKHSNLSDSIFNQASEYWQTLKSDSNANFDQTINIDVSKIKPQVTWGTSPEMTIDFDADIPSQEDIDESHHENLLLAKAYMGLDESKTLQDLSFDKIFIGSCTNSRIEDLRDAASAIKGKKISKDITEAIVVPGSGMVKAQAEDEGLDKIFIEAGFLWRDPGCSMCLGMNPDQLKPYERCASTSNRNFEGRQGNLGRTHLMSPLMAALTAINGKITDPS

SEQ ID NO: 179456 - protein, 127 aa, Unknown
  Bacterial polypetide isolated from the Sargasso Sea
MRKFKTIKSIPAYLSIVNIDTDMIIPKQFLKTIKRTGLGKNLFYEMRYNEKGNPIEDFILNTKPFNESKILIAGKNFGCGSSREHAPWALLDFGITCVISSSYADIFYNNCFKNGILPIILPDTKIK

SEQ ID NO: 179457 - protein, 161 aa, Unknown
  Bacterial polypetide isolated from the Sargasso Sea
MAYEKFNILNSTAVPLNIDNVDTDQIIPARFLKATERKGFGDNLFRDWRYNSDNTLVDSFPLNNKKYEGKILVAGKNFGCGSSREHAVWAIYDYGFRAVVSSFFADIFKNNCLNIGVLPVQVSESFLSEIFSEIDKNSKNIFEINLEDQEFEIKSSGKKEK

SEQ ID NO: 179458 - protein, 201 aa, Unknown
  Bacterial polypetide isolated from the Sargasso Sea
MQKFNTLKSIPAYLPIVNIDTDMIIPKQFLKTIKRTGLGKNLFFEMRYHDNGKEINDFVLNKEPFNNSKILIAGNNFGCGSSREHAPWALLDFGITCVISSSYADIFYSNCFKNGILPIILEEEKIKELSDYANRKEEISVDLNDQKIIYGNNEIKFEIDPFKKKCLLEGLDDIALSLKKSDKIENFENKLKDKRPWVFND

SEQ ID NO: 179459 - protein, 181 aa, Unknown
  Bacterial polypetide isolated from the Sargasso Sea
MAPLTLFEKIWKKHVVHEEDGKPTLLYIDLHLVHEVTSPQAFEGLRQAGRKVRRKDKTFATMDHNVPTVDRYNIKDPISLQQIETLSSNCKEFDIELFDLNSPYQGIVHVIGPEQGLTRPGQTIVCGDSHTSTHGAFGALAFGIGTSEVEHVLSTQCLWQNKPKTFEVRVDGKRQSGVNCK

SEQ ID NO: 179460 - protein, 201 aa, Unknown
  Bacterial polypetide isolated from the Sargasso Sea
MQKFTTLKSIPAYLPIVNIDTDMIIPKQFLKTIKRTGLGKSLFFEMRYDENGKIIDDFILNKDPFNNSKILIAGKNFGCGSSREHAPWALLDFGITCVISSSFADIFYNNCFKNGILPIILNEEKIKELSEYANRKESISVDLNDEKIVYGNNEVKFKVDSFKKKCLLEGLDDIALSLKKSNKIEKFEEDLKRIKPWIIND

SEQ ID NO: 179461 - protein, 417 aa, Unknown
  Bacterial polypetide isolated from the Sargasso Sea
MPQTIYDKIWNDHLVHEQKDGTSLLFVDRHLIHEVTSPQAFEGLRTSNRKVRQPKLTLAVADHNVPTTDRSKGISDEDSRIQVETLDKNCKEFNIQLFGMNDKRQGIVHIIGPEQGFTQPGNIIVCGDSHTATHGAFGALAFGIGTSEVEHVLATQTLVQKKSKNFRISVNGELSIGVTAKDVILQIIGKIGTAGGTGYVIEYAGNLISGLSVEQRMTICNMTIEGGARAGLIQPDEKIFEYLKNKPMSPKNDNWEKAIEYWSNLKTDSDAKFDKEIVLEGQEIKPMVTWGTSPQDVVEIDGQVPNPDNEKDEDRKSSIERSLNYMGLKPNTKVQDIKIDKVFIGSCTNGRIEDIREAAKILKDKKIAKHVNAMIVPGSGLVKEQAEQEGLDQIFIKSGFEWREPGCSMCLAMNADK

SEQ ID NO: 179462 - protein, 467 aa, Unknown
  Bacterial polypetide isolated from the Sargasso Sea
MSKTLYDKIWNEHLVHQQKDGTSLLFVDRHLIHEVTSPQAFEGLRNSKRKVRQPSLTLAVADHNVPTTDRSKGISDEESKIQVDTLDNNCREFGIQVFGMNDKRQGIVHIIGPEQGFTQPGTIIVCGDSHTATHGAFGALAFGIGTSEVEHVLATQTLVQKKSKNFRINVNGNLPIGVTSKDVILQIIGKIGTAGGTGYVIEYAGNLISSLSVENRMTICNMTIEGGARAGLIEPDQKVFDYLKDKPMSPKKENWEKALEYWNTLKSDKEAQFDKEVSLDGKDIKPMVTWGTSPQDVLTIDQNVPSPENETDPDKKNSIERSLKYMGLNPNTKIKDIKIDKVFIGSCTNGRIEDLREAAKILKDKKVANHVNAMVVPGSGLVKQQAEQEGLDKIFINSGFEWREPGCSMCLAMNADKLKPGERCASTSNRNFEGRQGRGGRTHLVSPGMAAAAAISGNLDDVRKYQN

SEQ ID NO: 179463 - protein, 201 aa, Unknown
  Bacterial polypetide isolated from the Sargasso Sea
MQRFNKLKSIPAYLPIVNIDTDMIIPKQFLKTIKRTGLGKNLFFEMRYDDQGNFIKDFVLNQEPFNKSKILIAGKNFGCGSSREHAPWALLDFGITCVISSSYADIFYNNCFKNGILPIVLDEEKIKVISEYSNRKEEIEVNLESQKIIFGNNEIKFELDSFKKKCLLEGLDDIALSLEKTDKIISFENNLKNLKPWIFND

SEQ ID NO: 179464 - protein, 463 aa, Unknown
  Bacterial polypetide isolated from the Sargasso Sea
MGKTLFDKVWDNHVISKIENGPDVLFIDRHFIHEVTSPVAFVGLKSRNLKVLFPDKTFATADHNTPTINQHLPIKDVLSAQQVKTLEKNCEEHGIDFWGLGHKMNGIVHVIGPENGITQPGLTIVCGDSHTSTHGAFGAIAFGIGTSEVEMVLSCQSIMQQKPKKMRITIDGKLNDFVTPKDVAIYIISQLSSSGATGYFVEYAGDVFRSMSMEGRMTVCNLSIEMGARGGMIAPDEKTFEYLKGREFSPKDKEWDNAIKNWSNLKSDSDSVFDKEISFNASDIEPMITYGTNPGMAVPISKEIPDFDNSGSEASFSKSLKYMNFKEGDVMLGKKIDYVFLGSCTNGRIEDFRSFASLIKGKRKAESIDAWLVPGSHKVLKSIKEEGILEILESSGFKLREPGCSACLAMNDDKIPAGKYAVSTTNRNFEGRQGPGARTLLASPLVAAASAITGKITDPREII

SEQ ID NO: 179465 - protein, 113 aa, Unknown
  Bacterial polypetide isolated from the Sargasso Sea
MAYDKFNIIKSSAVPLNIDNVDTDQIIPARYLKATERKGFGDNLFRDWKYNSNNEIIKNFPLNNEDYSGRILVAGKNFGCGSSREHAVWAIYDYGFRAVVSSFFADIFKNQIV

SEQ ID NO: 179466 - protein, 288 aa, Unknown
  Bacterial polypetide isolated from the Sargasso Sea
MSNSGKTLFEKVWDDHLVLQETEETPAILYIDLHLIHEVTTPQAFQSLRDQGLSVRDPSKVLATMDHSTPTLPVKSLRDLDIVAEKGPADQIRDMIRNCEEFGIELHGFDSDKRGIVHVIGPELGATQPGKTIVCGDSHTSTHGAFGALAFGIGTTEVGHVLASQCLLQRKPRTLAVNMNGALKSGVSAKDIILRIIQKLGVDGGVGHVIEYRGSTASILSLEERMTICNMSIEAGARAGMFAPDDKTFNYLIDKPMSPKGLAWDQAVEKWSTLVSDDNCEFDKEVDI

SEQ ID NO: 179467 - protein, 330 aa, Unknown
  Bacterial polypetide isolated from the Sargasso Sea
FGALAFGIGTSEVEHVLATQTLAMSKPKTMKVEVTGEMNGRITPKDLILGIIREIGTGGGAGHVIEYSGEVIKKMSMENRMTICNMSIEGGARAGMIAPDETTYEYLKNKNYAPKDEEWGNALAEWKNLYSDDDAEFDKVVEINVDKLKPSISWGTNPSQVIFIDEEIPSPDSFKNDADKEAAERALEYMDLKPGQKINEIPLDRVFIGSCTNGRIEDLRAAAKIIDGGKVHENINAMVVPGSTLVKKQAEDEGLDKVFINAGFDWREAGCSMCLGMNPDILAPGERCASTSNRNYEGRQGVGGRTHLVSPQMAAAAAINGFFVDVRESN

SEQ ID NO: 179468 - protein, 468 aa, Unknown
  Bacterial polypetide isolated from the Sargasso Sea
MSQYTLFDKVWDLHKVSSLPGGSDQIFIGLHLIHEVTSPQAFGALKDKKLKVKFPDRTVATVDHIVPTDNQSRPFKDNLAEQMIETLEKNCLEHKIRFFNIGSGNQGIVHVVAPELGLTQPGMTIACGDSHTSTHGAFGSIAFGIGTSQVRDVLATQTLAMNKLKVRQIWCDNKLSKGVYAKDLVLHIINKLGVKAGVGFAYEFAGPAIHELSMEERMTICNMSIEGGARCGYINPDEKTFSYIKNKLYAPKNEHWDRALRWWESLKSDENSIYDDVIKLDASKVEPTVTWGITPGQSISINQQIPLLDELSPNDKLVAEEAYEYMSFKPGQLIKDTPVDVCFIGSCTNGRISDLRVAAKVLKGKKVSKNVKAFAVPGSEKVATKAKQEGLDQIFKDSGFQWREPGCSMCLAMNSDKLIGNQVSASSSNRNFKGRQGSPSGRTLLMSPAMVAAAAINGKVSDVREFIN

SEQ ID NO: 179469 - protein, 402 aa, Unknown
  Bacterial polypetide isolated from the Sargasso Sea
PLLIDQKEFQNEESKIQVNTLDSNCKEFGIQIFGMNDKRQGIVHIIGPEQGFTQPGTIIVCGDSHTATHGAFGALAFGIGTSEVEHVLATQTLVQKKSKNFRINVNGSLPIGVTSKDVILQIIGKIGTAGGTGYVIEYSGNLISSLSVENRMTICNMTIEGGARAGLIEPDQKVFDYLKGKPMSPKGKNWDKALEYWNTLKSDENAKFDKEVNLDGKDIKPMVTWGTSPQDVLTIDENVPNPEAETDLDKKNSIERSLKYMGLKPDTKVKDIKIDKVFIGSCTNGRIEDLREAAKILKDKKIAGHVNAMVVPGSGLVKQQAEQEGLDKIFINSGFEWREPGCSMCLAMNADKLQPGERCASTSNRNFEGRQGRGGRTHLVSPGMAAAAAISGNLDDVRKYQN

SEQ ID NO: 179470 - protein, 201 aa, Unknown
  Bacterial polypetide isolated from the Sargasso Sea
MQKFDKLKSIPAYLPIVNIDTDMLIPKQFLKTIKRTGLGKNLFFEMRYDDQGNIIKDFILNKEPFNKSKILIAGKNFGCGSSREHAPWALLDFGITCVISSSYADIFYNNCFKNGILPIVLDEEKIKQISEYSNRKEEIEIDLNNQKIVFGNNEISFEIDSFKKKCLLEGLDDIALSLEKTDKIISFEKNLKNSKPWIFND

SEQ ID NO: 179471 - protein, 196 aa, Unknown
  Bacterial polypetide isolated from the Sargasso Sea
MEKFKTVESRPAPLDSSNVDTDQIIPKQFLKRIERTGFGQFLFFDWRFNDDGTENDKFILNDSRFKNSEILLSQENFGCGSSREHAPWALRDYGFKVIISTSFADILYNNCFKNCILPIIVDEKHLNYLFNSSLNFNDYKVIVNLDEMTLSDNKGFSYKFNIDPYRRKCLLEGLDDISLTLMHEKKITLYENKFSK

SEQ ID NO: 179472 - protein, 103 aa, Unknown
  Bacterial polypetide isolated from the Sargasso Sea
KVRAIVVPGSQVVKYQAEKLGIDKIFKDAGFEWRESGCSMCLAMNPDKLSPGERAASTSNRNFEGRQGKGGRTHLVSPTMAAAAAIEGRFIDIRAYDVDLGDY

SEQ ID NO: 179473 - protein, 357 aa, Unknown
  Bacterial polypetide isolated from the Sargasso Sea
EGIADEDSRIQVETLNKNCKEFGVEIFGMDDKRQGIVHIIGPEQGFTQPGNIIVCGDSHTATHGAFGALAFGIGTSEVEHVLATQTLVQKKSKNFRISVNGSLPIGVTSKDVILQIIGKIGTAGGTGYVIEYAGNLISDLSVEQRMTICNMTIEGGARAGLIQPDEKIFKYLKGKPMSPKGENWDKALEYWHTLKSDKDANFDKELTLDGSQIKPMVTWGTSPQDVVEIDGKVPSPESETDPDRKNSINRSLNYMGLKPNTKIQDIKIDKVFIGSCTNGRIEDIREAAKILKDKKIANHVHAMIVPGSGLVKEQAEQEGLDKIFLQSGFEWREPGCSMCLAMNADKLKPEERCASTS

SEQ ID NO: 179474 - protein, 467 aa, Unknown
  Bacterial polypetide isolated from the Sargasso Sea
MPNTLYDKIWNDHLVDQQADGTALLFVDRHLVHEVTSPQAFEGLRNSNRKVRHPKLTLAVADHNVPTTDRTNGIADQESKIQVDTLDNNCKEFGIQLFGMDDKRQGIVHIIGPEQGFTQPGTVIVCGDSHTATHGAFGALAFGIGTSEVEHVLATQTLVQKKGKNFRINVNGKLPLGVTSKDVILQIIGKIGTAGGTGCVVEYAGDLIRSLSVEQRMTICNMTIEGGARAGLIAPDEKIFKYLEGKPMSPKGEKWEKALEYWKNLKSDDNATFDKEISLEAKEILPMITWGTSPQDVITIDGKVPNPNTEQDEDRKNSIERALKYMGLKPDMAAKDIKIDKVFIGSCTNGRIEDLREAAKILKDKKIAAHVNAMVVPGSGLVKEQAEQEGLDKIFVNSGFEWREPGCSMCLAMNADKLKPEERCASTSNRNFEGRQGRGGRTHLVSPGMAAAAAISGNLDDVRKYQN

SEQ ID NO: 179475 - protein, 57 aa, Unknown
  Bacterial polypetide isolated from the Sargasso Sea
MTGKTLYDKIWDSHLVNQREDGTALIYIDRHLIHEVTSPQAFEGLKMSGRVPWRSDA

SEQ ID NO: 179476 - protein, 321 aa, Unknown
  Bacterial polypetide isolated from the Sargasso Sea
SEVEHVLATQTLVQKKSKNFRINVNGNLPIGVTAKDVILQIIGKIGTAGGTGYVIEYAGNLISSLSVENRMTICNMTIEGGARAGLIQPDQKVFEYLKNKPMSPKKENWEKAIEYWSNLKTDNGAHFDKEINLDGKDIKPMVTWGTSPQDVVTIDGKVPNPKNETDPDKRNSIERSLKYMGLNSDILVKDIKIDKVFIGSCTNGRIEDLREAAKILKDKKIAKHVNAMVVPGSGLVKQKAEQEGLDKIFIKSGFEWREPGCSMCLAMNADKLKPGERCASTSNRNFEGRQGRGGRTHLVSPGMAAAAAISGNLDDVRKYQN

SEQ ID NO: 179477 - protein, 201 aa, Unknown
  Bacterial polypetide isolated from the Sargasso Sea
MQKFNKLQSIPAYLPIVNVDTDMIIPKQFLKTIKRTGLGKNLFFEMRYDDQGNEIKEFVLNKEPFNNSKILIAGKNFGCGSSREHAPWALLDFGITCVISSSYADIFYNNCFKNGILPVKIDEEKIKQLSEYSLRKEEIKIDLNDQKIIFGNNEINFDLDQFKKKCLLEGLDDIALSLEKSEKIISFEKKLEKSKPWIFND

SEQ ID NO: 179478 - protein, 201 aa, Unknown
  Bacterial polypetide isolated from the Sargasso Sea
MKKFNSLKSIPAYLPIVNIDTDMIIPKQFLKTIKRTGLGKNLFFEIRYDNDGKEIKDFVLNQEPYNKSKILITGKNFGCGSSREHAPWALADFGITCIISSSYADIFYNNCFKNGILPIVLEEEKIKELLEYSKRKQEISIDLTEEKIFFGNKEIKFEIDSFKKKCLLEGLDDIALSLEKEEKIFSFEKNLKNKKPWIFND

SEQ ID NO: 179479 - protein, 467 aa, Unknown
  Bacterial polypetide isolated from the Sargasso Sea
MPYTLYDKIWNDHLVHQQEDGTSLLFVDRHLIHEVTSPQAFEGLRNSSRNVRQPNLTLAVADHNVPTTDRTKGISDEESKLQVDTLEKNCNEFGIKLFGMDDKRQGIVHIIGPEQGFTQPGTIIVCGDSHTATHGAFGALAFGIGTSEVEHVLATQTLVQKKSKNFRINVNGKLPLGVTSKDVILQIIGKIGTAGGTGYVIEYAGDLISSLSVENRMTICNMTIEGGARAGLIEPDQKVFDYLKNKPMSPKNENWERALEYWNKLNSDDGAQFDKEINLEGKDIKPMVTWGTSPQDVITIDGKVPNPKNEKDPDKKSSIERSLKYMGLNPDIDAKDIKIDKVFIGSCTNGRIEDLREAAKILKDKKIANHVDAMVVPGSGLVKEQAEQEGLHKIFINSGFEWREPGCSMCLAMNADKLKPGERCASTSNRNFEGRQGRGGRTHLVSPGMAAAAAISGNLDDVRKYQG

SEQ ID NO: 179480 - protein, 201 aa, Unknown
  Bacterial polypetide isolated from the Sargasso Sea
MQKFNKVKGIPAYLPIVNIDTDMLIPKQFLKTIKRTGLGKNLFYEMRYDEKGIKNDQFILNQSPYDKSKILIAGKNFGCGSSREHAPWALLDFGITCVISSSYADIFYNNCFKNGILPIVIDEEKIKQISEYSSRKEEIEIDLVNQIIKFGNNEIKFEIDPFKKKCLLEGLDDIALSLEKTDKIMSFENKLKNSKPWIFND

SEQ ID NO: 179481 - protein, 368 aa, Unknown
  Bacterial polypetide isolated from the Sargasso Sea
MKPKTLFEKIWDNHLIASIDEDTNLLFVDMHLVHEVTSPQAFDSLRISKRKVKYPELTLATVDHGVPTSDRALGIKDPLSKKQIDALENNCSEFGITIFGVNDPRQGIVHVIGPEQGITQPGMTIVCGDSHTATHGAFGALAFGIGTSEVEHVLATQTLAMSKPKTMKVEVIGEMNGRITPKDLILGIIREIGTGGGAGHVIEYSGEVIKKMSMENRMTICNMSIEGGARAGMIAPDETTYEYLKNKNYAPKDEEWESALAEWKNLYSDDDAEFDKVVEINVDKLKPSISWGTNPSQVIFIDEEIPSPDSFKNDADKEAAERALEYMDLKPGQKINEIALDRVFIGSCTNGRIEDLRAAAKIIDGGKV

SEQ ID NO: 179482 - protein, 217 aa, Unknown
  Bacterial polypetide isolated from the Sargasso Sea
MNNPNNKTLFDKIWSHHLVHQQEDGTCLIYIDRHLVHEVTSPQAFEGLRDNNRKVYRPENTFAVADHNVPTSDRSKGIDNEESRIQVETLENNCKEFGVTLFPLLDKRQGIVHIVGPEQGITQPGMTIVCGDSHTATHGAFGALAFGIGTSEVEHVLASQTLIQQPAKNMKIAVNGKLKSGVTAKDIILHIIGVIGTAGGTGYVIEYTGEVINSLSM

SEQ ID NO: 179483 - protein, 392 aa, Unknown
  Bacterial polypetide isolated from the Sargasso Sea
DNDSRIQVETLEKNCKDFDIKLFGMNDKRQGIVHIVGPEQGFTQPGTVIVCGDSHTATHGAFGALAFGIGTSEVEHVLATQTLVQKKAKNFRINVNGKLPLGVTSKDVILQIIGKIGTAGGTGCVLEYAGSVISNLSVEQRMTICNMSIEGGARAGLIQPDEKIFNYLKDRPMSPKKENWEKALDYWSKLKSDSDAKFDKEINLKGDEIAPMVTWGTSPEDVVSINGKIPNPENEKNIDKKNSINRSLNYMGLKPDVKVQDIKIDKVFIGSCTNGRIEDLREAAEILKNKKKASHVHGMVVPGSGLVKEQAEQEGLDKIFIESGFEWREPGCSMCLAMNADKLKPQERCASTSNRNFEGRQGRGGRTHLVSPGMAAAAAIAGNLDDVRKYQN

SEQ ID NO: 179484 - protein, 467 aa, Unknown
  Bacterial polypetide isolated from the Sargasso Sea
MPKTLYDKIWEDHLVHQQEDGTSLLYVDRHLIHEVTSPQAFEGLRLNKRKVRQPKLTLAVADHNVPTTDRSKGINDEESKVQVDTLRNNCKEFGVPLFDMNDKRQGIVHIIGPEQGFTQPGSVIVCGDSHTATHGAFGALAFGIGTSEVEHVLATQTLIQKKSKNLLLKVDGKLPIGVTAKDIILKIIGTIGTAGGTGFVIEYSGEVIKNFSMEERMTICNMTIEGGARAGLIQPDEKTFNYLQNRPMSPKNEKWTKALEYWSRLKSDEGCNFDKEVIIKGEEVAPQVTWGTSPQDVVPVNGFVPDPKNEKNQDRRVAMERSLDYMGLKPNTKMTEIKIDKVFIGSCTNGRIQDLREAAKLLKDKKIAKHVNAMVVPGSGLVKNQAEQEGLDKIFKNSGFEWREPGCSMCLGMNEDQLKPKERCASTSNRNFEGRQGRGGRTHLVSPAMAAAAALDGHLSDVRKFGS

SEQ ID NO: 179485 - protein, 184 aa, Unknown
  Bacterial polypetide isolated from the Sargasso Sea
MDKFENIKSIPAYISLMNIDTDKIIPKQFLKTIKRSGLGKNLFYEMRFDEKGKPISGFILDNDPYNKSKILITGKNFGCGSSREHAPWALLDFGIRAIISESFADIFYNNCFKNGILPIVANQNIINELSEYSSRKENIEVKLTEQEILYGNKSFKFELDPFKKKCLLEGLDDIALSLNKAESI

SEQ ID NO: 179486 - protein, 92 aa, Unknown
  Bacterial polypetide isolated from the Sargasso Sea
MSKTLYDKIWEEHLVHQQEDGTSLLFVDRHLIHEVTSPQAFEGLRNSNRKVRNPELTLAVADHNVPTTDRSKGIADEESKIQVDTLGRNCKE

SEQ ID NO: 179487 - protein, 425 aa, Unknown
  Bacterial polypetide isolated from the Sargasso Sea
SGRAPWRSDANLAVPDHNIPTTTDERRQGLSGIKDPVSKIQVKALEDNCKENNILSLEMNDIRQGIVHVMGPEQGATLPGMTIVCGDSHTSTHGALGALAHGIGTSEVEHVLATQCLMQRKMKNMLVRVDGVLKKGVTAKDVVLAIIGEIGTAGGTGYTIEFGGEVIKNLSIEGRMTICNMAIEAGARAGLIAVDQKTLNYVKGRPFAPSGDMWAHASEAWRSLVSDSNANFDRTVIIDGSEIEPQVTWGTSPEMVAPVSGSIPDPTLETDPTKKGNLEQALKYMGLEAGTEIKNIQLDYIFIGSCTNSRIEDLREAAQVVKDRKVAENIEVAMVVPGSGLVKKQAEEEGLDQIFTSAGIQWREPGCSMCLAMNSDQLGEGKHCASTSNRNFEGRQGFGGRTHLVSPAMAAAAAIHGHFVDVSKI

SEQ ID NO: 179488 - protein, 160 aa, Unknown
  Bacterial polypetide isolated from the Sargasso Sea
IPRTSDYSEQNKKNIELARDYMGIKDEAKLSDLVFDKVFIGSCTNSRIEDLRQAAEIVKGKFVAENISEAIVVPGSGMVKEQAELEGLDKIFTEAGFVWRDPGCSMCLGMNPDQLKPYERCASTSNRNFEGRQGYLGRTHLMSPIMAAYTAINGTVGDPL

SEQ ID NO: 179489 - protein, 207 aa, Unknown
  Bacterial polypetide isolated from the Sargasso Sea
MIDGIVGYIDRDNIDTDQIIPTEYLKSIKKFGFEDYLFDGWRYHDDGRLGIKKEEREINEDFILNKTPFNESKILLARDNFGCGSSREHAVWALRDFGIKAVIASSFGDIFYNNCFKNRVLPIQLKKNQIEELFKTVQDEIVEFSIDLQERIITNGDKEISFDVEDHLIDRIIYGLDDVDITLKVKDQIHNFEKNRKETRPWVFINE

SEQ ID NO: 179490 - protein, 160 aa, Unknown
  Bacterial polypetide isolated from the Sargasso Sea
MIGNVIKYEQDNIDTDVIIPGTYLKIHDYNELATHAMEGLDPEFPSKVKDGDFIVAGKNFGCGSSREHAPIALSTCGIKAVIATSFARIFYRNSVDGAFLLPIEVDEETYKKISNSDQLEINIEKNEIKNITKNESYSMKPFSEIIAKIIAAGGLFKYKR

SEQ ID NO: 179491 - protein, 469 aa, Unknown
  Bacterial polypetide isolated from the Sargasso Sea
MTETLFEKIWNSHVVVERENEPSLIYIDRHLIHEVTSPQAFDGLRVNNRKVRRPDLTVATIDHNVPTTDRSLPMIDETSSTQIKTLEKNCKDFGIKLFGINDPNQGIVHVIGPQLGITLPGSTIVCGDSHTSTQGAFGAFAFGIGTSEVEHTLATQTLWLEKPKTFEILATGKRKNSFAVTSKDIILSIIKQIGTDGGTGHVLEYRGDAISDLSMEQRMTICNMSIEAGSRAGLIAPDEKTYDYLNNREYTPKNYDELVDEWKNNLMSDPNSKFDKSFTIDVEKIEPQVSWGTNPAMVSDVTGKIPTPEDFGQNNEIQIESAKKALSYMDLKPDTAIVEIPIDRVFIGSCTNARLEDLKDAAEIVKGKTVNSDVNAMVVPGSQMVKLEAEKLGLDKIFKDANFEWRESGCSMCLGMNPDILKPGERCASTSNRNFEGRQGSGGRTHLVSPVMAAASAIAGHFVDVREWS

SEQ ID NO: 179492 - protein, 195 aa, Unknown
  Bacterial polypetide isolated from the Sargasso Sea
MKPFSKIISIITPFDKANVDTDQIIPKQFLKLITKSGFGKFLFYDWRFNHDGKEKDDFILNDSHYQNSQILVTNENFGCGSSREHAVWALKDFGFDVIISPSFADIFYSNCFKNGVLPIILDIENIKKLLNFKDKIELDLQSQTINFGSESINFQIDSHRKTRLLEGLDDIDLTLKEDEKIENFEKNSSRISIFE

SEQ ID NO: 179493 - protein, 201 aa, Unknown
  Bacterial polypetide isolated from the Sargasso Sea
MQKFKTIKSIPAHLPIVNIDTDMIIPKQFLKTIKRTGLGKNLFYEMRYNEKGTPIEDFILNTSPFNDSKILIAGKNFGCGSSREHAPWALLDFGITCVISSSYADIFYNNCFKNGILPIVLPEAKIKELSEYSKRKEEIIVNLEEQKITFGNNEIDFEIDQFKKKCLIEGLDDIALSLEKNPKITEFEKKLSTNRPWIFND

SEQ ID NO: 179494 - protein, 201 aa, Unknown
  Bacterial polypetide isolated from the Sargasso Sea
MKKFNNLKSIPAYLPIVNIDTDMIIPKQFLKTIKRTGLGKSLFFEMRYDDNGKENSNFVLNKEPYNKSKILITGKNFGCGSSREHAPWALLDFGITCIISSSYADIFYNNCFKNGILPITVTEENIKELSEYANRKEEISINLSDQNILFGNQKIKFDLDEFKKKCLIEGLDDIALSLKQNQKIDAFEKKLKTNKPWIFND

SEQ ID NO: 179495 - protein, 467 aa, Unknown
  Bacterial polypetide isolated from the Sargasso Sea
MSKTLYDKIWDDHLVHTQDDGTSLLYVDRHLVHEVTSPQAFEGLRNSNRKVRQPNLTLAVADHNVPTSDRSKGISDEESKLQVETLEKNCDEFGIKIFGMNDKRQGIVHIIGPEQGFTQPGSIIVCGDSHTATHGAFGSLAFGIGTSEVEHVLATQTLVQKKSKNFRIKVDGKLSIGVTSKDVILQIIGKIGTAGGTGYVIEYAGSLISSLSVEQRMTICNMTIEGGARAGLIEPDEKIFNYLNGRPMSPKEENWDKALDYWSKLKSDGDANFDKEVTLDGKDIMPMVTWGTSPQDVISIDGKIPNPENEADEDRKNSIERSLKYMGLKPGTAIKDVKIDKVFIGSCTNGRIEDLRDAAKIIKNKKVAQHVYAMVVPGSGLVKQQAEQEGLDKVFKDSGFDWREPGCSMCLAMNADKLKPEERCASTSNRNFEGRQGRGGRTHLVSPGMAAAAAISGSLDDVRKFQN

SEQ ID NO: 179496 - protein, 201 aa, Unknown
  Bacterial polypetide isolated from the Sargasso Sea
MQKFKTIKSIPAYLPIVNIDTDMIIPKQFLKTIKRTGLGKNLFYEMRYNEQGTPINDFILNTSPFNNSKILIAGKNFGCGSSREHAPWALLDFGITCVISSSYADIFYNNCFKNGILPIVLPETKIKELSEYSKRKEEIIVNLEEQKITFGNNEIDFEIDQFKKKCLLEGLDDIALSLEKNPKITEFEKKLSLNRPWIFND

SEQ ID NO: 179497 - protein, 201 aa, Unknown
  Bacterial polypetide isolated from the Sargasso Sea
MQKFSTLKSIPAYLPIVNIDTDMIIPKQFLKTIKRTGLGKNLFFEMRYDDNGNKIGDFILNQDPFTNSKILIAGKNFGCGSSREHAPWALLDFGITCVISSSFADIFYNNCFKNGILPIIVDEEKIKELSEYANRKEEISVDLKEEKIVYGNNEIKFKIDSFKKKCLLEGLDDIALSLNKSDKIKSFEQKLKSSKPWIISD

SEQ ID NO: 179498 - protein, 263 aa, Unknown
  Bacterial polypetide isolated from the Sargasso Sea
MKQTLYDKIWNDHCILDNDDHSSLLYIDRHLIHEVTSPQAFDGLEIKNRDIWNKKSIMATTDHNVPTINRDQGITDPVSKIQIEALRENCKKYNIELYDLDNLKQGIVHVIGPELGMTQPGMTIVCGDSHTSTHGALASLSFGIGTSDVEHVLATQCLNLTKDKNFNIEVNGLLHPYITSKDLILYIIGSIGTSGGTGYTIEYTGETISNLSIESRMTICNMTIEAGAKSGLMAFDEKTHDYLKDREFLPSSKHYDDALKYWE

SEQ ID NO: 179499 - protein, 252 aa, Unknown
  Bacterial polypetide isolated from the Sargasso Sea
MPYTIYDKIWNEHLVHQQEDGTSLLFVDRHLIHEVTSPQAFEGLRNSKRNVRQPKLTLAVADHNVPTTDRSKGISDKESKIQVDTLESNCKEFGIKLFGMNDKRQGIVHIIGPEQGFTQPGTIIVCGDSHTATHGAFGSLAFGIGTSEVEHVLATQTLVQKKSKNFRINVNGKLSLGVTSKDVILQIIGKIGTAGGTGYVIEYSGNVISSLSVEQRMTICNMTIEGGARAGLIQPDEKIYDYLKNKPMSPQE

SEQ ID NO: 179500 - protein, 463 aa, Unknown
  Bacterial polypetide isolated from the Sargasso Sea
MKTLYDKLWDDHVVEDLGSGDHLVYIDRHFLHEVTSPQAFDGINKKNLKPWRLAANIATPDHNVPTARGQNFELESIEDEVSKIQIIELDRNCNKFDIPQFDINSEKQGIVHVVGPENGFTLPGMTIVCGDSHTSTHGAFAALSMGIGTSEVEHVLATQCLRIKKLKNFRINLLGCPRPDVTSKDVILYVIRSIGTDGGTGHAIEFSGDYISSLSMESRMTICNMSIEAGAKVGLIAFDKITESYLFDKVQLDKSEYDKALEFWKSLSSDSKAKFDKEIEIDVSKIKPQVSWGTSPEMTSDYDSCVPELDQNSDKYSTYKKAIEYMGLKEREKLSDLTFNKVFVGSCTNSRIEDLRLVASEVKDKRISKSIEEALIVPGSGQVKLQAEKEGLDKIFIEAGFSWRDPGCSMCLGMNEDKLSPGDRCASTSNRNFEGRQGHMGRTHLVSPMMAARIAIHGGIPHE

SEQ ID NO: 179501 - protein, 163 aa, Unknown
  Bacterial polypetide isolated from the Sargasso Sea
MSEFKNISGIACILDIDNIDTDQIIPTEYLKSIKKFGFGDFLFDGWRYHDIANINTPTSSRSLNQDFILNQAPFNESKIIITGKNFGCGSSREHAVWALRDFGIETVIAESFGDIFYNNCFKNGVLPIALNKDELLIVKDYVSNESKLHISLADKNIVIKKKK

SEQ ID NO: 179502 - protein, 467 aa, Unknown
  Bacterial polypetide isolated from the Sargasso Sea
MSKTLYDKIWDDHLVHAQEDGTSLLYVDRHLVHEVTSPQAFEGLRNSNRKVRQPNLTLAVADHNVPTSDRSKGISDEESRLQVETLEKNCEEFGIKLFGMDDKRQGIVHIIGPEQGFTQPGSIIVCGDSHTATHGAFGSLAFGIGTSEVEHVLATQTLVQKKSKNFRIKVDGKLSIGVTSKDVILQIIGKIGTAGGTGYVIEYAGSLISSLSVEQRMTICNMTIEGGARAGLIEPDQKIFDYLKGRPMAPKKENWDKALDYWSKLKSDNDASFDKEVTLDGKDIMPMVTWGTSPQDVISIDGRIPNPDNEADEDRKNSIERSLKYMGLKPGTAIKDVKIDKVFIGSCTNGRIEDLRDAAKIIKNKKIAQHVYAMVVPGSGLVKQQAEQEGLDKVFKESGFDWREPGCSMCLAMNADKLKPEERCASTSNRNFEGRQGRGGRTHLVSPGMAAAAAISGSLDDVRKYQN

SEQ ID NO: 179503 - protein, 201 aa, Unknown
  Bacterial polypetide isolated from the Sargasso Sea
MQKFKTIKSIPAYLPIVNIDTDMIIPKQFLKTIKRTGLGKNLFYEMRYNEKGVPIEDFILNTSPFNNSEILIAGKNFGCGSSREHAPWALLDFGITCVVSSSYADIFYNNCFKNGILPIVLPEAKIKELSEYSKRKEEIIVNLEEQKITFGNNEIDFEIDQFKKKCLLEGLDDIALSLEKNPKITEFEKKLSSNKPWIFND

SEQ ID NO: 179504 - protein, 159 aa, Unknown
  Bacterial polypetide isolated from the Sargasso Sea
IYEMRYDEKGKKIDDFILNQNPFNNSKILIAGKNFGCGSSREHAPWALLDFGITCVISSSFADIFFNNCFKNGILPIILNEDKIKELSEYANRKEEISIDLNEEKIIYGNNEVTFEVDKFKKKCLLEGLDDIALSLKKSDKIENFEKNLKNQKPWIIND

SEQ ID NO: 179505 - protein, 103 aa, Unknown
  Bacterial polypetide isolated from the Sargasso Sea
KGRKVEKGVHAMIVPGSGLVKEQAEKEGLDKIFIEAGFDWRDPGCSMCLAMNADKLQPQERCASTSNRNFEGRQGRGGRTHLMSPQMAAAAAIRGKLTDFRDL

SEQ ID NO: 179506 - protein, 287 aa, Unknown
  Bacterial polypetide isolated from the Sargasso Sea
MKPETLFDKIWNNHIVHEEDGKPTLLYIDLHLVHEVTSPQAFEGLRQAGRKVRRTNRTFATMDHNVPTLDRNNIKDPISAQQIETLENNCKEFQIELFDLASPYQGIVHVIGPEQGLTKPGSTIVCGDSHTSTHGAFGALAFGIGTSEVEHVLSTQCLWQNKPKTFEVRVDGVRPKGVTAKDIILNIIGEIGTAGATGYVIEYTGDAIKSLSMEQRMTICNMSIEGGARAGMISPDEITLNYLRDKPRIKSLDNLDSLMSEWRKLASDEGCVFDKKLLLDAAKMLLR

SEQ ID NO: 179507 - protein, 431 aa, Unknown
  Bacterial polypetide isolated from the Sargasso Sea
MKKTLFDKIWEKHVVHERQDGSSLIYIDRHLVHEVTSPQAFEGLRNSNRPLRRPDLTLAVADHNIPTENRIEGIKDDIARVQVETLEKNVKEFNVPYIPLMDSRQGIVHVIGPEQGFTLPGCTLVCGDSHTSTHGAFGALAFGIGTSEVEHVFATQTLVQKRPKTMLINVSGKLSIGVTAKDIALGIIKKLGTSGGTGYVLEYAGEAISDLSIEARMTLCNMSIEAGARAGLVAPDSKTYEYIKNRPMSPKGVLFEKSMEDWKLLPSDEGAIYDKVVNINANSLEPHLTWGTSPEDVLPINSNVPDPRNIDKESLKNAMQDSLDYMGLKPGIPLTDIKIDKVFIGSCTNSRIEDLREAAKIAKGNKVNDSVHAMVVPGSGLIKEQAEKEGIADILIQAGFDWREPGCSMCLEMNPDQLKPKERCASTSNRN

SEQ ID NO: 179508 - protein, 466 aa, Unknown
  Bacterial polypetide isolated from the Sargasso Sea
MGYTIYDKLWNEHLIRSYDDGDSLIYIDRHFLHEVTSPQAFEGLKKKSLKPWRINANIATPDHNVPTTRDNKFSIESIEDNISKLQVVELDKNCNDFGIKQFNINSNNQGIVHVIGPELGLTLPGMSIVCGDSHTSTHGAFGCLAMGIGTSEVEHVLATQSLKVRKLKNMRINFEGSIQEGVSSKDIILYLIRTIGTAGGTGYAVEFAGSYIRNISMEARMTICNMSIEAGAKVGLVSVDDKTIEYVKKHSNLEANLINDAIKKWKNLTTDKEAMFDKEIDIDVSKINPQVSWGTSPEMVIDFNEKIPSSSIFSAEKRKSLDLAKNYMGLSDNQELSDLDFDKVFIGSCTNSRIEDLREAAEVLKGQKVSENIQEAIVVPGSGMVKEQAEKEGIHKIFIDAGFQWRAPGCSMCLGMNPDQLSPYERCASTSNRNFEGRQGNLGRTHLMSPKMAALTAINGRIVKEI

SEQ ID NO: 179509 - protein, 209 aa, Unknown
  Bacterial polypetide isolated from the Sargasso Sea
MKDFIEGIVAPIDRDNIDTDQIIPTEYLKSIKKFGYEDYLFDGWRYKDQGRLGMKKGERKINHEFILNNSPYDESKVLLTRDNFGCGSSREHAVWALRDFGIEVVLASSFGDIFFNNCFKNGVLPLKLKKTEIEKLFSLSKDSPVSISVNIKDKVILFKDKLSIDFDLDNNLAERIIYGLDEIDITLKDSELIKKFEEHRKENNPWIFE

SEQ ID NO: 179510 - protein, 143 aa, Unknown
  Bacterial polypetide isolated from the Sargasso Sea
LDYMGLKANTKISDIKIDKIFIGSCTNGRIEDLRLAADLLKGKKIAKNVSAMVVPGSGLVKEQAEKEGIDKIFKEAGFEWREPGCSMCLGMNPDQLKPKERCASTSNRNFEGRQGRGGRTHLVSPGMAIAAAIKGHLTDVREI

SEQ ID NO: 179511 - protein, 202 aa, Unknown
  Bacterial polypetide isolated from the Sargasso Sea
MQKFNNLRSIPSYLSLQNIDTDMIIPKQFLKTIKRTGLGKSLFYEMRYDENGKKITDFILNKEPYNKSKILLAGKNFGCGSSREHAPWALSDFGIKSIISASFADIFYNNCFKNGILPIKIDGKIVVELAEYSKRKEEIEISLENQEIKYGNKVANFELDSFKKKCLMEGLDDIALSMEKISSIDDYEKKLQSTKPWVLNNV

SEQ ID NO: 179512 - protein, 131 aa, Unknown
  Bacterial polypetide isolated from the Sargasso Sea
LVAGDNFGCGSSREHAPWALLDYGVKCVISTSFADIFFNNCFKNGILPIVVSKEELDQLMDDADNGANSVLDIDLENQHIGRPNGEKINFEIDEFRKHCLINGLDDIGLTMQKQSNIDDFEKKREAEKPWI

SEQ ID NO: 179513 - protein, 336 aa, Unknown
  Bacterial polypetide isolated from the Sargasso Sea
ATHGAFGALAFGIGTSEVEHVLATQTLVQKKSKNFRINVNGKLPVGVTAKDVILQIIGKIGTAGGTGYVIEYAGNLISSLSVENRMTICNMTIEGGARAGLIQPDQKVFDYLKDKPMSPKNDNWEKALEYWTNLKSDEGAHFDKEINLDGKDIKPMVTWGTSPQDVVTIDGKVPNPKNETDPDKKNSIERSLKYMGLNSDIPVQDIKIDKVFIGSCTNGRIEDLREAAKILKDKKIAKHVNAMVVPGSGLVKEKAEQEGLDKIFINSGFEWREPGCSMCLAMNADKLKPGERCASTSNRNFEGRQGRGGRTHLVSPGMAAAAAISGNLDDVRKYQN

SEQ ID NO: 179514 - protein, 124 aa, Unknown
  Bacterial polypetide isolated from the Sargasso Sea
MQKFNKLKSIPAYLPIVNVDTDMIIPKQFLKTIKRTGLGKNLFFEMRYDDQGNEIKDFILNKEPFKDSKILIAGKNFGCGSSREHAPWALLDFGITCVISSSYADIFYNNCFKNGILPIKIDEE

SEQ ID NO: 179515 - protein, 397 aa, Unknown
  Bacterial polypetide isolated from the Sargasso Sea
TLNQHLPIKEELSRNQLNQLTKNCKDFGIELYGLGHKYQGIVHVIGPELGITQPGMTIVCGDSHTSTHGAFGSIAFGIGTSEVEMVLATQCLLQKKPKTMLIEINGELQKGVYSKDIILYIISKISSSGGTGYFVEYSGSTISSLSMEARMTICNMSIEMGARGGMIAPDQKTFDYVENKKFSPDGIDFDNKVKYWKTLVSDSNAKYDKVLKYDAKDIEPMITYGTNPGMGMKIRDKIPELPLEGSKDSFDKSLNYMGLKSGTHILNKKIDYVFIGSCTNSRMEDLRIAAKFIDGKQKASGVSAWVIPGSKQVEKMAIEEGIDKIFKNAGFEFRQPGCSACLAMNEDKIPKSKFCVSTSNRNFEGRQGPGSRTMLASPLTAAATAVNGYVTDVRDYI

SEQ ID NO: 179516 - protein, 67 aa, Unknown
  Bacterial polypetide isolated from the Sargasso Sea
GCSMCLAMNPDRLEGRQISASSSNRNFKGRQGSASGRTLLMSPAMVAAAAVHGQVTDVRTLSLQSAV

SEQ ID NO: 179517 - protein, 208 aa, Unknown
  Bacterial polypetide isolated from the Sargasso Sea
MNKFKTFKSIAIPLIRNNIDTDAIIPKQYLKAVSRQGFGNFLFDDWRYKDPGDLDVEISKRKKNDDFILNKKDFEKAQIIISGENFGCGSSREHAVWALSDFGIKSVIAISFADIFYNNCFKNGLLPVILKKEEIEEIKTYIGSLSLIEINLENQLVKCADKSYEFEIDPSRKFNLINGIDDISKTLEYQNDIISYENKRKKNKPWLI

SEQ ID NO: 179518 - protein, 193 aa, Unknown
  Bacterial polypetide isolated from the Sargasso Sea
IDIDASKLNTYVTWGTSPEHAIEIKDKIPSIDDANSSKENTSIKKALDYMGLEENDAIRGTKIDAAFIGSCTNSRLSDLRVAASILKGNKIAPGIKAICVPGSSKVKKEAESEGIDKIFKSAGFEWRESGCSMCFFAGGESFGEDERVISTTNRNFENRQGKKTRTHLASPATVAASAIKGEITTAHLTENET

SEQ ID NO: 179519 - protein, 203 aa, Unknown
  Bacterial polypetide isolated from the Sargasso Sea
MNPVKIISGIAAPFLRINVDTDAIIPSREIKAVSKKGLAEGLFSEWRYTSIADRTPNDEFILNREPFNRSAILLTGDNFGCGSSREHAVWALQEWGIKAVIGSTFGSIFYGNCIRNGLLPIQLSTDDLQKLIDFVEKDPESNQILIDLETLSINFGSSEINFEFDKKYQASLLEGLDEIQQTLKLNDEISSFEEKHLKQNPWL

SEQ ID NO: 179520 - protein, 340 aa, Unknown
  Bacterial polypetide isolated from the Sargasso Sea
MKTLYDKLWEEHHVTQLESGESLLYIDRHYLHEVTSPQAFEGLSKKNLKPWRLEANIATPDHNVPTIRGNDFNSEQIKDEISKIQVVELDKNCNTFGIKQFDIKSSKQGIVHVIGPELGYTLPGMTIVCGDSHTSTHGALGCLAMGIGTSEVEHVLATQCLKVSKLKNMLVRFNGTPAENVSSKDIVLYFIGQIGTAGGTGYAIEFAGSYIDAISIESRMTICNMAIEAGAKVGLIAPDETTINYVREKSFLDKETLEKAEDYWTNLNTDEGANFDNEIIIDVSKIKPQVTWGTSPEMVVNYDDEIPTPMNVSEDNKKNIELARNYMGIQDESKLSDLVF

SEQ ID NO: 179521 - protein, 468 aa, Unknown
  Bacterial polypetide isolated from the Sargasso Sea
MANPQTLFDKIWKNHLVDTQEDGTCLIYIDRHLVHEVTSPQAFEGLRNAGRKVRRPDLTLAVADHNTPTTDISEGIAEEESRIQVETLESNVKEFGVPYIGLTDTRRGIVHIIGPEQGFTLPGMTIVCGDSHTATHGAFGALAFGIGTSEVEHVLATQTLLQKPAKNMRVTVEGELPLGVTAKDVILAIIGKIGTAGGTGHVIEFAGEAVTSLSMESRMTVCNMAIEAGARAGMIAPDDVTFEYLKGKPMSPKAGSFEQAVAYWKTLPSDPGAKYDKEIVLKAAEIVPQVTWGTNPEEVVPITGRIPEPAEIEDPIRRAKLQRSIDYMGLEAGGLISDVKIDKVFIGSCTNGRIEDLRAVAEIAKGRKVASGVHAMIVAGSGLVREQAEQEGLGTIFEEAGFDWRQEPGCSMCLAMNADKLEPGQRCASTSNRNFEGRQGFGSRTHLVSPAMAAAAAIAGSLTDVRDL

SEQ ID NO: 179522 - protein, 121 aa, Unknown
  Bacterial polypetide isolated from the Sargasso Sea
MDKFTKLRGVAAPLNMINIDTDKLIPKQFLKTIKRTGLGKHLFNEMRFNEDGSEKQDFVLNKSAYREASIIVAGDNFGCGSSREHAPWALLDFGIKCVISTSFADILNNNCFKNGISANCC

SEQ ID NO: 179523 - protein, 138 aa, Unknown
  Bacterial polypetide isolated from the Sargasso Sea
AKILLTRDNFGCGSSREHAVWALRDFGFKSVIASSFGDIFYNNCFKNSVLPIKLSKEQINHLFEVSNFAPVSFEIDLLKKELKYKGDSSYMFDVKDSLLDRIINNLDDVDMTLKHKKHIQAFEQKRRSQRPWLFDYSN

SEQ ID NO: 179524 - protein, 474 aa, Unknown
  Bacterial polypetide isolated from the Sargasso Sea
MTNPSISSAPKTLYQKVWDAHVVATPEGEAPIIYVDRHLVHEVTSPQAFSGLKVAGRKLRAPEKTFATMDHNTSTRSASLDALSPMARTQVETLAQNCKDFGVRLYDIHHPNQGIVHVMGPELGITLPGTVIVCGDSHTATHGAFGALAFGIGTSEVEHVLATQTLRQLKAKTMKIEVRGQVTDGVTAKDIVLAIIGKIGMDGGTGYVVEFCGEAIEALSMEGRMTVCNMAIEMGAKAGMVAPDQTTFDYLEGREFAPKGEDWAQAVVAWKALKTDVGAEFDATVVLDAADIAPQLTWGTNPGQVVAIDAPVPNPADEVNPTIRASMEKALDYIGLTAGTPMTDVAINKVFIGSCTNSRIEDLRSAAKHAKGRKVAAGVTAIVVPGSGQVKAQAEAEGLDKIFIEAGFEWRLPGCSMCLAMNDDRLEAGDRCASTSNRNFEGRQGRGSRTHLVSPAMAAAAAIAGHFVDIRKPY

SEQ ID NO: 179525 - protein, 201 aa, Unknown
  Bacterial polypetide isolated from the Sargasso Sea
MQPFTCHTGLAVMIDSANIDTDQIIPKQFLSKVTRDGFGVHLFHDWRYLDDAGDVPNPDFTLNKPRYSGASILLAQENFGCGSSREHAPWALADFGLRAIIAPSFADIFYGNSINNGLLPVKLSANEVRQLMDEVASEEGAQITVDLTTCKVTSPSGAEFSFTLAESARHKLLNGLDAIGLTLSHGMQISEYESQIPSWRC

SEQ ID NO: 179526 - protein, 136 aa, Unknown
  Bacterial polypetide isolated from the Sargasso Sea
MAKTLYEKLFDAHVVFEAQNETPLLYIDRHLVHEVTSPQAFDGLRAHGRQVRQPGKTFATMDHNVSTQTKDINASGEMARIQMQELIKNCNEFGVELYDLNHPYQGIVHVMGPEQGVTLPGMTIVCGDSHTATHGA

SEQ ID NO: 179527 - protein, 467 aa, Unknown
  Bacterial polypetide isolated from the Sargasso Sea
MPTTLYDKIWNEHLVHQQDDGTSLLFVDRHLIHEVTSPQAFEGLRNSKRKVRQPGLTLAVADHNVPTTDRTKGIADEESKIQVDTLDSNCKEFGIQIFGMNDKRQGIVHIIGPEQGFTQPGTIIVCGDSHTATHGAFGALAFGIGTSEVEHVLATQTLVQKKSKNFRINVNGTLPIGVTSKDVILQIIGKIGTAGGTGYVIEYAGNLISSLSVENRMTICNMTIEGGARAGLIEPDKKVFEYLRDKPMSPKSENWDKALEYWNTLKSDEGAHFDKEVNLEGGDIKPMVTWGTSPQDVLTIDETVPNPENETDLDKKNSIERSLNYMGLKANTKVKDIKIDKVFIGSCTNGRIEDLREAAKILKDKKIANHVNAMVVPGSGLVKQQAEQEGLDKIFINSGFEWREPGCSMCLAMNADKLKPGERCASTSNRNFEGRQGRGGRTHLVSPGMAAAAAISGNLDDVRKYQN

SEQ ID NO: 179528 - protein, 222 aa, Unknown
  Bacterial polypetide isolated from the Sargasso Sea
REFLPSSKYYDDALKYWETLISDSGVTFDRKEQFNANDIQPQVTWGTSPEMVTSVDECIPSSDSIDNEEEYVDTLAYMGLEPKTEIKSIDLDKIFIGSCTNSRIEDLRQAAEVVEGEKVSSKIKQAIIVPGSGLVKAQAEREGLDKIFMKAGFEWRDPGCSMCLGMNDDFLQPYERCASTSNRNFQGRQGDKGRTHLVSPGMAAVAAIKGHFYNVKDFMNEK

SEQ ID NO: 179529 - protein, 76 aa, Unknown
  Bacterial polypetide isolated from the Sargasso Sea
IFIDAGLDWRVAGCSMCLGMNPDTLSPGERCASTSNRNFEGRQGKGGRTHLVSPPMAAAAAIAGHFVDVRDWDYVD

SEQ ID NO: 179530 - protein, 197 aa, Unknown
  Bacterial polypetide isolated from the Sargasso Sea
MKAFNQYSRTVIPMNRVNIDTDQIIPAVYLKRIERDGYGEFLFARWRYNEDGSENKEFILNQEGYREGGILVGGNNFGCGSSREHAPWALNDYGIRCVIAPSFADIFYNNCFQNGLLPLKLPEEVVQQIIDKAENNPNFNLHIDLESQRVWDDDEEISIGFDIDQFRKYCLMNGLDDIGLTLENEDKIKNFESAQEN

SEQ ID NO: 179531 - protein, 465 aa, Unknown
  Bacterial polypetide isolated from the Sargasso Sea
MKTLYDKLWEEHHVTQLDSGESLLYIDRHYLHEVTSPQAFEGLSKKNLKPWRLEANIATPDHNVPTTRGDDFDSEKIKDEISKIQVVELDKNCNTFGIKQFDIKSTKQGIVHVIGPELGYTLPGMTIVCGDSHTSTHGALGCLAMGIGTSEVEHVLATQCLKVSKLKNMLVKFEGTPGENVSSKDIVLFFIGQIGTAGGTGYAIEFAGSYIEQISIESRMTICNMAIEAGAKVGLVAPDDKTINYVRKNSFIDKEILLKAEEYWSGLKSDKNAFFEKELIIDISKIKPQVTWGTSPEMVVNFDDDIPRTSDYSEKNKKNIELARDYMGIKDESKLSDLVFDKVFIGSCTNSRIEDLRQAAEIVKGKSLADNISEAIVVPGSGMVKEQAELEGLDKIFTEAGFIWRDPGCSMCLGMNPDQLKPYERCASTSNRNFEGRQGYLGRTHLMSPIMAAFTAINGTIGEPL

SEQ ID NO: 179532 - protein, 207 aa, Unknown
  Bacterial polypetide isolated from the Sargasso Sea
MIDGIVGYIDRDNIDTDQIIPTEYLKSIKKFGFEDYLFDGWRYHDDGRLGVKKEEREINEDFILNKAPFNESKLLLARDNFGCGSSREHAVWALRDFGIKAVIASSFGDIFYNNCFKNGVLPIQLQKDQIEELFQKIKDEILKLSVDLQKRIITIGDKELSFDVEDHLIDRIIYGLDDVDITLKSKDKIFNFEKNRKETRPWIFINE

SEQ ID NO: 179533 - protein, 282 aa, Unknown
  Bacterial polypetide isolated from the Sargasso Sea
MSKTLYDKIWNEHLVHEQIDGTSLLFVDRHLIHEVTSPQAFEGLRNTNRKVRQPNLTLAVVDHNIPTTDRSKGIDDEESRIQVETLEKNCKDFGIKLFGMTDKRQGIVHIVGPEQGFTQPGTVIVCGDSHTATHGAFGSLAFGIGTSEVEHVLATQTLVQKKAKNFRINVNGKLALGVTSKDVILQIIGKIGTAGGTGSVIEYAGTLISNLSVEQRMTICNMTIEGGARAGLIQPDEKIFNYLKGRPMSPKNENWDKALNYWSNLKTDNDAEFDKEINLNGK

SEQ ID NO: 179534 - protein, 217 aa, Unknown
  Bacterial polypetide isolated from the Sargasso Sea
MDKFIVHTGVVAPLDRENVDTDAIIPKQFLKSIKRTGFGPNAFDEWRYLDHGEPGQDNSKRPLNPDFVLNQPRYQGASVLLARKNFGCGSSREHAPWALQQYGFRAIIAPSFADIFYNNCFKNGLLPIVLTEQQVDHLFNETYAFNGFQLTIDLDAQVVRTTDGNTAYPFEVAGFRKYCLLNGFDDIGLTLRHADKIRQFEAERIAKQPWLNHRIVG

SEQ ID NO: 179535 - protein, 406 aa, Unknown
  Bacterial polypetide isolated from the Sargasso Sea
TCPPRDRSHGIADPVSKLQVDTLDTNCDAYGITQFKMNDLRQGIVHIIGPEQGATLPGMTIVCGDSHTSTHGAFGALAHGIGTSEVEHVLATQTLLQKKSKNMLVKVEGPLPRGCTAKDIVLAIIGKIGTAGGTGYAIEFGGSTIRALSMEGRMTVCNMAIEAGARAGMVAVDDTTIEYLKGRPFSPTGVEWDHAVEYWKQFKSDEGAQFDRVVELNAAEIVPQVTWGTSPEMVTAVDGRVPDPEREKDPVKRDAMERALKYMALEPNAPIESIKPDKIFIGSCTNARIEDIRAAAYVVKKLGRRVAPNIRLAMVVPGSGLVKAQAEREGLDKVFTDAGFEWREPGCSMCLAMNADRLDPGERCASTSNRNFEGRQGAGGRTHLVSPAMAAAAAIEGHFVDIRKLG

SEQ ID NO: 179536 - protein, 287 aa, Unknown
  Bacterial polypetide isolated from the Sargasso Sea
MKTLYDKLWEEHHVTQLDSGESLLYIDRHYLHEVTSPQAFEGLIKKNLKPWRLNANIATPDHNVPTTRGNNFNSESITDEISKIQVVELDKNCNKFGIKQFDIESNKQGIVHVIGPELGFTIPGMTIVCGDSHTSTHGALGCLAMGIGTSEVEHVLATQCLKVSKLKNMNVRFEGEVDEHVSSKDIVLYLIGQIGTAGGTGYAIEFSGSYISSISVEGRMTICNMAIEAGAKVGLIAPDNKTIEYVKSKSFLDDDTFNHAKEYWKTLKSDDDAKFDKEITIDVSKIK

SEQ ID NO: 179537 - protein, 201 aa, Unknown
  Bacterial polypetide isolated from the Sargasso Sea
MNKFSTLKSIPAYLPIVNIDTDMIIPKQFLKTIKRTGLGKNLFYEMRYDEKGKVVDDFILNKSPYDNSKILIAGNNFGCGSSREHAPWALLDFGITCVISTSYADIFYNNCFKNGILPIKVNDEQIKELSEYSKRQEEIAINLPDQKIIFGNKEIKFELDEFKKKCLIEGLDDIALSLEKSNKIISFEEKLKSTKPWIFND

SEQ ID NO: 179538 - protein, 104 aa, Unknown
  Bacterial polypetide isolated from the Sargasso Sea
MDKFNSLKGIAAPLPIVNIDTDMIIPKQFLKTIKRTGLGVSLFYEMRYDNDGNLIKDFVLNTSPFDQSKILVAGDNFGCGSSREHAPWSLKDYGIKCVISTSFA

SEQ ID NO: 179539 - protein, 148 aa, Unknown
  Bacterial polypetide isolated from the Sargasso Sea
MEKFKKFSGIAAPMPLVNIDTDMIIPKQFLKTIKRSGLGVNAFAEMRYNSDGSEVEDFVLNKPAYRDSSILIAGDNFGCGSSREHAPWALSDFGIKVVVSTSFADIFFNNCFKNGMLPIILPEEQVEILMNDSEKGSNARVEVDLEAP

SEQ ID NO: 179540 - protein, 128 aa, Unknown
  Bacterial polypetide isolated from the Sargasso Sea
GKNFGCGSSREHAPWALLDFGITCVISSSYADIFYNNCFKNGILPIKIDEEKIKQISEYSLRKEEIKIDLNDQKIIFGNNEITFDLDQFKKKCLIEGLDDIALSLEKSKKIESFENKLKTSKPWIFND

SEQ ID NO: 179541 - protein, 443 aa, Unknown
  Bacterial polypetide isolated from the Sargasso Sea
YLVDRHLVHEVTSPQAFEGLRNSNRKVRHPNLTLAVADHNVPTTDRSKGISDKESKIQVDTLDSNCKKFGIQLFGMNDKRQGIVHIIGPEQGFTQPGTVIVCGDSHTATHGAFGALAFGIGTSEVEHVLATQTLVQKKANNFRINVDGKLPLGVTSKDVILQIIGKIGTAGGTGCVIEYAGSLIKSLSVENRMTICNMTIEGGARAGLIAPDEKIFKYLEGKPMSPKGKDWEKALEYWKNLKTDHGANFDKEINLKADEILPMITWGTSPQDVITIEEKVPNPQNEKDEDKKNSLERALNYMGLKPDMAAKDIKIDKVFIGSCTNGRIEDLREAAKILKDKKIASHVQAMVVPGSGLVKEQAEQEGLDKIFVNSGFEWREPGCSMCLAMNADKLKPEERCASTSNRNFEGRQGRGGRTHLVSPGMAAAAAISGNLDDVRKYRN

SEQ ID NO: 179542 - protein, 135 aa, Unknown
  Bacterial polypetide isolated from the Sargasso Sea
MQKFSSLKSIPAYLPLVNIDTDMIIPKQFLKTIKRTGLGKNLFFEMRYDDQGKEINDFILNQNPFNNSKILITGKNFGCGSSREHAPWALLDFGITCIISSSFADIFYNNCFKNGILPIILDYEKIKELSEYANR

SEQ ID NO: 179543 - protein, 428 aa, Unknown
  Bacterial polypetide isolated from the Sargasso Sea
AFEGLRNSKRKVRHPKLTLAVADHNVPTTDRSKGISDHESKIQVETLEANCKEFGIKLFGMSDKRQGIVHVTGPEQGFTQPGTVIVCGDSHTATHGAFGALAFGIGTSEVEHVLATQTLVQKKAKNFRINVNGTLPLGVTSKDVILQIIGKIGTAGGTGCVIEYAGDLIKSLSVENRMTICNMTIEGGARAGLIAPDEKIFKYLEGRPMSPKGDDWDKALDNWKNLNTDEGAKFDKEVNLTANEISPMITWGTSPQDVITIDERVPNPKNEKDEDRKNSLERALNYMGLKPDMAAKDIKIDKVFIGSCTNGRIEDLREAAKILKDKKIASHVHAMVVPGSGLVKEQAEQEGLDKIFVKSGFEWREPGCSMCLAMNADKLKPEERCASTSNRNFEGRQGRGGRTHLVSPGMAAAAAISGNLDDVRKYQN

SEQ ID NO: 179544 - protein, 440 aa, Unknown
  Bacterial polypetide isolated from the Sargasso Sea
MLYIDRHLIHEVTSPQAFEGLKMAGREPWRVSSNIATPDHNVPTTNREKGIEGIEDEVSKLQVTTLDKNCSDLGILQFDILDKRQGIVHVVGPEQGVTLPGMTLVCGDSHTSTHGALATLAMGIGTSEVEHVLATQCLKASKLKNMKIVIDGQLSPGVTPKDVTLAVIGKIGTAGGTGFAIEYSGSVIEEMSIEGRMTVCNMSIEAGARVGLVAFDKTTQEYVEGRPFSPKGKEWELALFNWEGLKSDDDAHFDETIFIDGSALKPQVTWGTSPEMVLDIDGTIPEAKSESIERALEYMQLKAGMKISDIKLDQVFIGSCTNSRIEDLRLAASLVEGKKISSGIKRAIVVPGSGLVAEQAIREGLDKIFIESGFEWRAPGCSMCLAMNPDQLGEGEHCASTSNRNFEGRQGYGGRTHLVSPATAAASAIEGKFVDVRELF

SEQ ID NO: 179545 - protein, 214 aa, Unknown
  Bacterial polypetide isolated from the Sargasso Sea
MKNQYIFHSGIIMPLPRDNVDTDQIIPKQFLKSIKKSGFGPNLFDAWRYEDEGYPGQDNDYRPKNQDFVLNQDKYKDADILISQKNFGCGSSREHAVWSLMDYGFKVVIAESFADIFYNNCFNNGLLPIQLSKEKINELFLLSEESKGVEIDLIDQLILCEGKEVTSFEIDPFRKQCILEGLDEIGLSLKLSDSIKEYEQKRVEEAPWLFNGYE

SEQ ID NO: 179546 - protein, 94 aa, Unknown
  Bacterial polypetide isolated from the Sargasso Sea
MNNKPNPKTLFDKIWFHHLVHKQEDGTSLIYIDRHLVHEVTSPQAFEGLRNNNRKVHRPESTFAVADHNVPTTDRSKGIDNEESRIQVETLENN

SEQ ID NO: 179547 - protein, 467 aa, Unknown
  Bacterial polypetide isolated from the Sargasso Sea
MSQTIYDKIWNEHLVHEQKDGTSLLFVDRHLIHEVTSPQAFEGLRTSNRKVRQPKLTLAVADHNVPTTDRSKGISDEDSRIQVETLEKNCKEFGIKLFGMDDKRQGIVHIIGPEQGFTQPGNIIVCGDSHTATHGAFGALAFGIGTSEVEHVLATQTLVQKKSKNFRINVNGKLPIGVTSKDVILQIIGKIGTAGGTGYVIEYSGNLISNLTVEQRMTICNMTIEGGARAGLIQPDEKIIEYLKDKPMSPKNDNWEKAVEYWSKLKTDTDAKFDKEISLDGNEIKPMVTWGTSPQDVVEIDGQVPNPDNEKDEDKKNSIKRSLNYMGLKPNTNIQDIKIDKVFIGSCTNGRIEDIRAAAKILKDKKIASHVNAIIVPGSGLVKEQAEQEGLDKIFKESGFEWREPGCSMCLAMNADKLKPEERCASTSNRNFEGRQGRGGRTHLVSPEMAAAAAISGNLDDVRKYQN

SEQ ID NO: 179548 - protein, 201 aa, Unknown
  Bacterial polypetide isolated from the Sargasso Sea
MQKFNTLKSIPAYLPIVNIDTDMIIPKQFLKTIKRTGLGKNLFFEMRYDDQGKEINNFVLNKDPFNKSKILIAGKNFGCGSSREHAPWALLDFGITCVISSSYADIFYSNCFKNGILPIILEEEKIKELSEYANRKEEISVDLNEQIIIYGNNEIKFEIDPFKKKCLLEGLDDIALSLKKSDKIEIFENSLKDKKPWIFND

SEQ ID NO: 179549 - protein, 467 aa, Unknown
  Bacterial polypetide isolated from the Sargasso Sea
MTINNPKTLFDKIWEHHLVDRQEDGTCLIYIDRHLVHEVTSPQAFEGLRNNNRKVRRPESTFAVADHNVPTSDRSKGIENKESRIQVETLEKNCKDFDVTLFPLLDSRQGIVHIVGPEQGITQPGMTIVCGDSHTATHGAFGALAFGIGTSEVEHVLATQTLIQKPAKNMRISVEGKLNLGVTAKDIILHIIGKIGTAGGTGYVIEYAGNAISSLSMEGRMTICNMSIEAGARAGLIAPDEKTFEYIKGRPYAPSGDNWNKAVEFWKSLPSDEGAKYDEEILINAEDISPQITWGTSPQDVVAIDGIVPNPQEESNPNRKRAMERSLEYMGLEPKQEIQKIKIDKVFIGSCTNGRIEDLREVAKVVEGKKVSVDSMIVPGSGLVKKQAEEEGLDKIFIEAGFDWREPGCSMCLAMNPDQLKPQERCASTSNRNFEGRQGREGRTHLVSPAIAAASAIKGSFATAEDL

SEQ ID NO: 179550 - protein, 200 aa, Unknown
  Bacterial polypetide isolated from the Sargasso Sea
MESFKTIIGIPAPLPMINVDTDMIIPKQFLKTIKRSGLGKNLFHELRYDIQGNIKNDFVLNWDPYKTSKILIAGANFGCGSSREHAPWSLLDFGFKSIIAPSFADIFYNNCFKNGILPIKLDQQKVDILMNEAENKNDVSVDLENQKITYQNDKTIEFEIDAFRKKCLLEGLDDIGLTLQKNKKIDVHEEKIHSIQPWIV

SEQ ID NO: 179551 - protein, 201 aa, Unknown
  Bacterial polypetide isolated from the Sargasso Sea
MEKFIKIKGIAAPLDILNIDTDMIIPKQFLKTIKRSGLGKNLFDEMRYTTNGEEIKSFVLNQDPWRNSKIIIAGDNFGCGSSREHAPWALLDFGIRCVISTNFADIFYNNCFKNGILPIKVSEDERLSLLADAKDNENPIIEIDLPNQVINRPNGVSIKFDIDEFRKKCLLEGLDDISLTLENKTKIETYESERDNNRPWL

SEQ ID NO: 179552 - protein, 467 aa, Unknown
  Bacterial polypetide isolated from the Sargasso Sea
MTKPRTLFDKIWDAHLVHSDPNAASILYIDRHLVHEVTSPQAFEGLRNTNRKVRSPERTLAVADHNIPTSNRSEGIKDEESRIQVETLAKNASDFSVPYFNMEDIRQGIVHVIGPEQGFTQPGMTIVCGDSHTATHGAFGALAFGIGTSEVEHVLATQTLIQKPAKNMLVEVNGSLPPGVTAKDIILEIIGKIGTAGGTGYVIEYAGSTIRDLSMEGRMTICNMSIEAGARAGMIAPDEKTYEYLKGKPMSPSGDNWIKALEWWKSLPSDENAIYDKKISIDASKLVPTVTWGTSPEDTAPITGTVPDPKNEKDLAIKAKLERALSYMDLKPGQKISEIKIDTVFIGSCTNSRIEDLRAASKIVKGKKVSNEIRAMIVPGSGLVKEQAEKEGLDAIFKEAGFDWREPGCSMCLAMNADRLSPGERAASTSNRNFEGRQGRLGRTHLVSPEMAAAAAIKGYLTDVRNL

SEQ ID NO: 179553 - protein, 462 aa, Unknown
  Bacterial polypetide isolated from the Sargasso Sea
MFEKIWQKHLVAEPKDQPVILYIDLHLVHEVTSPQAFEGLRISNRKVRRPDLTIATVDHNITTDDTRTLEIKDEIARKQVETIRENCKSNGITLFDVWDEEQGIVHVIGPEQGYTQPGMTIVCGDSHTSTHGAFGSLAFGIGTSEVEHVLATQTLRQRKPKTMKVDFKGELKKGVTAKDMVLKLIGQIGTAGGTGYVMEYTGNAIKNLSMEGRMTICNMSIEAGARAGMIAPDEITYEWMKGRNKVPKGKDWEKAVKEWNELQTDEGAEFDSYIEVDCDDLEPHVSWGTNPSQVLPVSSSIPSPDDYEEVLESQSCNNALDYMGLKPGTKIEDIELDRVFIGSCTNARITDLRSAAKIVKGKKVNSNVRAQIMPGSTITKLQAEKEGLDKIFKDSGFEWRESGCSMCLGMNPDIIAPGERCASTSNRNFEGRQGKGGRTHLVSPEMAAAAAIEGHFVDVRDW

SEQ ID NO: 179554 - protein, 203 aa, Unknown
  Bacterial polypetide isolated from the Sargasso Sea
MKPINSITGIAAPLLRNNVDTDAIIPSREIKKISKLGLADGLFAEWRYSSVQNRIPDQNFILNKDPFQKSVILLTGENFGCGSSREHAVWALQEWGIKAIIGKSFGSIFYNNCIRNGLLAITLEEKIISGLIKNVEENPSDNHIFIDLIKCSIQCCDKEIFFDIHEKDRSLLIEGLDEIEKVLIYKNNIDSFEADHKKIRPWL

SEQ ID NO: 179555 - protein, 201 aa, Unknown
  Bacterial polypetide isolated from the Sargasso Sea
MQKFNKLTSIPAYLPIVNIDTDMIIPKQFLKTIKRTGLGKNLFFEMRYDDQGNEIKDFILNKKPFNQSKILIAGKNFGCGSSREHAPWALLDFGITCVISSSYADIFYNNCFKNGILPIKIDEEKIKQISEYSLRKEEIKVDLNEQKIVFGNNEIKFDLDQFKKKCLIEGLDDIALSLEKSEKIELYEKKLKISKPWIFND

SEQ ID NO: 179556 - protein, 279 aa, Unknown
  Bacterial polypetide isolated from the Sargasso Sea
MPHTIYDKIWNEHLVHQQEDGTSLLFVDRHLIHEVTSPQAFEGLRNSNRKVRQPKLTLAVADHNVPTTDRSKGISDKESKIQVDTLDANCKEFGIKIFGMNDKRQGIVHIIGPEQGFTQPGTIIVCGDSHTATHGAFGALAFGIGTSEVEHVLATQTLVQKKSKNFRINVNGNLPIGVTSKDVILQIIGKIGTAGGTGYVIEYSGDLISSLSVENRMTICNMTIEGGARAGLIQPDQKVFDYLKDKPMSPKNDNWEKALEYWTNLKSDEGAHFDKEINW

SEQ ID NO: 179557 - protein, 198 aa, Unknown
  Bacterial polypetide isolated from the Sargasso Sea
AIPIRITNVDTDMIIPKQFLKTFKRTGLGEYLFFELKFDQDGNKIDSFVLNQDQYNGASILIAGKNFGCGSSREHAPWSIADYGIKCIIAPSYADIFYNNCFKNGILPIILDEETVAKLQDTAENTLNFNIDLEKQNITYLENNEQKEITFEIDPVKKKCLIEGLDDIGLTLNKSSSISDFENNQAKETPWLYGSKII

SEQ ID NO: 179558 - protein, 467 aa, Unknown
  Bacterial polypetide isolated from the Sargasso Sea
MPFTTYDKIWNDHLVDEQPDGTSLLFVDRHLIHEVTSPQAFEGLRNSNRKVRHPKLTLAVADHNVPTTDRSKGIADEDSRIQVETLNKNCKEFGVEIFGMDDKRQGIVHIIGPEQGFTQPGNIIVCGDSHTATHGAFGALAFGIGTSEVEHVLATQTLVQKKSKNFRISVNGSLPIGVTSKDVILQIIGKIGTAGGTGYVIEYAGNLISNLSVEQRMTICNMTIEGGARAGLIQPDEKIFQYLKGKPMSPKGENWEKALEYWHTLKSDKDANFDKELTLDGSQIKPMVTWGTSPQDVVEIDGKVPNPESETDPDRKNSINRSLNYMGLKPNTNIQDIKIDKVFIGSCTNGRIEDIREAAKILKDKKVASHVHAMIVPGSGLVKEQAEQEGLDKIFLESGFEWREPGCSMCLAMNADKLKPEERCASTSNRNFEGRQGRGGRTHLVSPAMAAAAAISGNLDDVRKYQN

SEQ ID NO: 179559 - protein, 201 aa, Unknown; identical to SEQ ID NO: 179337
  Bacterial polypetide isolated from the Sargasso Sea

SEQ ID NO: 179560 - protein, 119 aa, Unknown
  Bacterial polypetide isolated from the Sargasso Sea
MQKFNTLKSIPAYLPIVNIDTDMIIPKQFLKTIKRTGLGKNLFFEMRYDDQGKEIGDFILNQNPFNNSKILIAGKNFGCGSSREHAPWALLDFGITCVISSSFADIFYSNCFKNGILPI

SEQ ID NO: 179561 - protein, 155 aa, Unknown
  Bacterial polypetide isolated from the Sargasso Sea
MSQTIYDKIWNDHLVHEQKDGTSLLYVDRHLIHEVTSPQAFEGLRTSNRKVRQPKLTLAVADHNVPTTDRSQGISDEDSRIQVETLDKNCKEFDIQLFGMNDKRQGIVHIIGPEQGFTQPGNIIVCGDSHTATHGAFGALAFGIGTSEVEHVWQH

SEQ ID NO: 179562 - protein, 361 aa, Unknown
  Bacterial polypetide isolated from the Sargasso Sea
IVHVVAPELGLTQPGMTIACGDSHTSTHGAFGSIAFGIGTSQVRDVLATQTLAMNKLKVRQIWCDNKLSKGVYAKDLVLHIINKLGVKAGVGFAYEFAGPAINALSMEERMTICNMSIEGGARCGYINPDEKTFSYIKNKLCAPKDEHWDKALTWWKSLKSDENSIYDDVIKLDASKVEPTVTWGITPGQSISINQQIPLLDDLSPNDKLVAKEAYEYMSFKPGQLIKDTPVDVCFIGSCTNGRISDLRVAAKVLKGKKVSQNVKAFAVPGSEKVATEAKQEGIDQIFKDSGFQWREPGCSMCLAMNSDKLIGNQVSASSSNRNFKGRQGSPSGRTLLMSPAMVAAAAINGKVSDVREFIN

SEQ ID NO: 179563 - protein, 381 aa, Unknown
  Bacterial polypetide isolated from the Sargasso Sea
MKPKTLFEKIWDKHLIASIDADTNLLFIDMHLVHEVTSPQAFDSLRISGRKVKYPELTLATVDHGVPTSNRALGIKDPLSKKQIDALEDNCKEFGVTIYGVNDPRQGIVHVIGPEQGITQPGMTIVCGDSHTATHGAFGALAFGIGTSEVEHVLATQTLAMNKPKTMKVEVVGEMNETITPKDVILGIIREIGTGGGAGHVIEYSGDAIKKMSMENRMTVCNMSIEGGARAGMIAPDEITYKYLKNKNFAPKNEDWDKALNEWKELYSDDDAEFDKTIKINVNDLKPSISWGTNPSQVIFIDEVIPSPDSFQNEADKEAAERALEYMDLKPGQKFDDISLDRVFIGSCTNGRLEDLRAAAKVLEGKKVHKNINAMVYQGQL

SEQ ID NO: 179564 - protein, 201 aa, Unknown
  Bacterial polypetide isolated from the Sargasso Sea
MSKKTSLTLFDKVWNDHIVLQETKSTPAILYIDLHLIHEVTTPQAFTMLRENSLKVRKTKSTIGTMDHSTPTLPVNKFKDIEVAGADAANQVRQMISNCKEFNIELFDFDSINRGIVHVIGPELGLTQPGKTIVCGDSHTSTHGAFGALAFGIGTTEVGHVLATQCLLQRKPKTLSVEINGKLNNGVTAKDLVLAIIGELA

SEQ ID NO: 179565 - protein, 155 aa, Unknown
  Bacterial polypetide isolated from the Sargasso Sea
WRFLDEKGQQPNPEFVLNFPEYKGASILLARENFGCGSSREHAPWALTDYGFKVVIAPSFADIFYGNSFNNQLLPVTLSDAQVDEMFTLVKANPGIKFEVDLEAQVVKAGDKSYSFKIDDFRRHCMLNGLDSIGLTLQHEAAITEYEDKQPAFMQ

SEQ ID NO: 179566 - protein, 256 aa, Unknown
  Bacterial polypetide isolated from the Sargasso Sea
MARTLYDKLWDAHVVAQREDGTSLLYIDRQLIHEVTSPQAFEGLKLNGRKLWRRSASKATPDHNVPTLDREKGLKGIKDKVAKLQVTTLDENCKEFEIEQFDILDKRQGIVHVVGPEQGITLPGMTVVCGDSHTSTHGALGALAMGIGTSEVEHVLATQCLVATKQKNMRVNLNGVLPEGVFAKDLTLAVIGKIGTAGGTGYAIEYSGNCISGLSMEGRMTVCNMAIEAGSRAGMIAFDETTMDYVKGRPYSPKRF

SEQ ID NO: 179567 - protein, 391 aa, Unknown
  Bacterial polypetide isolated from the Sargasso Sea
MSQDTLFDKVWDLHKVSSLPGGSDQIFIGLHLIHEVTSPQAFGALKDKNLKVKFPNRTVATVDHIVPTDNQSRPFKDNLAEQMISTLEKNCLQHKIRFYNIGSGNQGIVHVVAPELGLTQPGMTIACGDSHTSTHGAFGSIAFGIGTSQVRDVLATQTIAMNKLKVRQIWCKNQLSNGVYAKDLVLHIINKLGVMAGVGFAYEFAGPAINALSMEERMTICNMSIEGGARCGYINPDEKTFTYIKNKLCAPKNENWDKALTWWKSLKSDENSIYDDVIKLDASKIEPTVTWGITPGQSISINQKIPLLDDLSPNDKLVAEEAYEYMSFKPGQAIKDTPVEVCFIGSCTNGRISDLRVAAKVLKDKKVSKNVKAFVVPGSEKVANEAKQEGS

SEQ ID NO: 179568 - protein, 396 aa, Unknown
  Bacterial polypetide isolated from the Sargasso Sea
GITDEDSRIQVETLNKNCKEFGIEIFGMDDKRQGIVHIIGPEQGFTQPGNIIVCGDSHTATHGAFGALAFGIGTSEVEHVLATQTLVQKKSKNFRISVNGTLPIGVTSKDVILQIIGKIGTAGGTGYVIEYAGNLISNLSVEQRMTICNMTIEGGARAGLIQPDEKIFKYLKGKPMSPKGENWDKALEYWYTLNSDPDANFDKELTLEGSQIKPMVTWGTSPQDVVEIDGKVPNPESESDPDRKNSINRSLNYMGLKPNTNIQDIKIDKVFIGSCTNGRIEDIREAAKILKDKKIASHVHAMIVPGSGLVKEQAEQEGLDKIFLQSGFEWREPGCSMCLAMNADKLKPEERCASTSNRNFEGRQGRGGRTHLVSPAMAAAAAISGNLDDVRKYQNK

SEQ ID NO: 179569 - protein, 467 aa, Unknown
  Bacterial polypetide isolated from the Sargasso Sea
MSKTIYDKIWNDHLVHEQKDGTSLLFVDRHLIHEVTSPQAFEGLRTSNRKVRQPKLTLAVADHNVPTTDRTKGIEDEDSRIQVETLEKNCKEFGIQLFGMNDKRQGIVHIIGPEQGFTQPGSVIVCGDSHTATHGAFGALAFGIGTSEIEHVLATQTLVQKKSKNFRISVNGELSIGVTAKDVILQIIGKIGTAGGTGYVIEYAGNLISGLSVEQRMTICNMTIEGGARAGLIQPDEKIFEYLKNKPMSPKNENWEKAIEYWSKLKTESDAKFDKEIVLEGQEIKPMVTWGTSPQDVVEIDGQVPNPDNEKDQDKKNSIERSLNYMGLKPNTKVQDIKIDKVFIGSCTNGRIEDIREAAKILKDKKIAKHVNAMIVPGSGLVKEQAEQEGLDKIIKESGFEWREPGCSMCLAMNADKLKPEERCASTSNRNFEGRQGRGGRTHLVSPAMAAAAAISGNLDDVRKYRN

SEQ ID NO: 179570 - protein, 201 aa, Unknown
  Bacterial polypetide isolated from the Sargasso Sea
MKKFTNVKSIPAYLPIVNIDTDMIIPKQFLKTIKRTGLGNGLFFEMRYDQGGNKINNFILNNNPYNKSKILVTGKNFGCGSSREHAPWALLDFGITCVISSSFADIFYNNCFKNGILPITLKEEKIKEISEYSNRKEEISVNLSDQKITFGNKEINFEIDEFKKKCLLEGLDDIALSLEKSEKIINFESKIKNTKPWIFND

SEQ ID NO: 179571 - protein, 201 aa, Unknown
  Bacterial polypetide isolated from the Sargasso Sea
MKKFISLKSIPAYLPIVNIDTDMIIPKQFLKTIKRTGLGKNLFHEMRYDNDGKVINDFVLNTKPFDRSKILIAGNNFGCGSSREHAPWALLDFGITCIISSSYADIFYNNCFKNGILPIILNEEKIKDLSEYAKRKEEIEVNLQEEKIIYGNNELNFKIDPFKKKCLIEGLDDIALSLEKSSHINDFEKKLKSSKPWIFND

SEQ ID NO: 179572 - protein, 467 aa, Unknown
  Bacterial polypetide isolated from the Sargasso Sea
MPKTLYDKIWDDHLVFQQDDGTSLLYVDRHLVHEVTSPQAFEGLRLNKRKVRKPNFTLAVADHNVPTTDRTKGIHDQQSKIQVDTLRKNCKEFGVPLFDMNDKRQGIVHIIGPEQGFTQPGTIIVCGDSHTATHGAFGALAFGIGTSEVEHVLATQTLLQKKSKNFLLKVDGKIPLGVTAKDVILKIIGTIGTAGGTGFVIEYSGDVIKNFSMEERMTVCNMTIEGGARAGLIQPDEKTFKYLENRPLSPKKDNWKKALDYWSNLKSDKDCKFDKEIVLNGEDVVPQVTWGTSPQDVVPVNGSVPDPKKEKDNDRRVAMERSLDYMGLKPNTKMTDIKIDKVFIGSCTNGRIQDLREAAKLLKDKKIAGHVNAMVVPGSGLVKIQAEQEGLDKVFKDSGFEWREPGCSMCLGMNEDQLKPRERCASTSNRNFEGRQGRGGRTHLVSPAMAAVAAIEGHLSDVRKFSN

SEQ ID NO: 179573 - protein, 198 aa, Unknown
  Bacterial polypetide isolated from the Sargasso Sea
MEKFTKIKSIPAYIPLMNIDTDKIIPKQFLKTIKRSGLGKSLFYEMRFDEKGNTIKGFILDQEPFNSSKILITGKNFGCGSSREHAPWALLDFGIRVIVSESFADIFYNNCFKNGILPIVAKDETINELKDYCERKENIEVKLQEQEIIYGNKTFKFELDSFKKKCLLEGLDDIALSLEKTKNIESFENKMSQNRPWL

SEQ ID NO: 179574 - protein, 85 aa, Unknown
  Bacterial polypetide isolated from the Sargasso Sea
MKTLYDKLWEEHHVTKLNSGESLLYIDRHYLHEVTSPQAFEGLSKKKLKPWRLDANIATPDHNVPTIRGKTLILRILKMKFQKYR

SEQ ID NO: 179575 - protein, 211 aa, Unknown
  Bacterial polypetide isolated from the Sargasso Sea
KAVEYWNTLKSDEGAQFDKEISLDGKDIKPMVTWGTSPQDVLTIDENVPNPETETDADRKNSIERSLKYMGLEPNTKIKDIKIDKVFIGSCTNGRIEDLREAAKILKDKKIAGHVNAMVVPGSGLVKQQAEQEGLDKIFINSGFEWREPGCSMCLAMNADKLKPEERCASTSNRNFEGRQGRGGRTHLVSPGMAAAAAISGNLDDVRKYQN

SEQ ID NO: 179576 - protein, 201 aa, Unknown
  Bacterial polypetide isolated from the Sargasso Sea
MQKFNKLKSIPAYLPIVNIDTDMIIPKQFLKTIKRTGLGKNLFFEMRYDDRGNIIREFILNQDPFNKSKILIAGKNFGCGSSREHAPWALLDFGITCVISSSYADIFYNNCFKNGILPIILDDDKIKQISEYSNRKEEIEVDLNNQKIVFGNNEISFDIDSFKKKCLLEGLDDIALSLEKTNKILSFEKNLKNLKPWIFND

SEQ ID NO: 179577 - protein, 465 aa, Unknown
  Bacterial polypetide isolated from the Sargasso Sea
MGKTLFDKIWDNHLVTSIDESTNIIFIDLHLVHEVTSPQAFDSLRISDRKVKYPELTLATVDHGVPTSNRLLGIKDPLSKIQIEALEKNCEEFGVTLFGINDPRQGIVHVIGPEQGITQPGMTIVCGDSHTATHGAFGALAFGIGTSEVEHVLATQTLAMEKPKTMKVEVIGNVSDGVGPKDIILGIIRKIGTGGGAGHVIEYVGDVIKNMSMENRMTICNMSIEGGARAGMIAPDETTFNYLKDKNYAPKDSDWNDAINEWGELFSDDDATFDKVVTINAGELEPSVSWGTNPSQVIFINDKIPHPDNFQDESDKEAAIRALEYMDLEPGIKINEINLDRVFIGSCTNGRIEDLREAAQVVKGKKVAKTVGAMVVPGSTLVKNQAEEEGLDKIFIDAGFDWREAGCSMCLGMNPDILSPGERCASTSNRNYEGRQGAGGRTHLVSPKMAAAAAIHGKFVDIRNL

SEQ ID NO: 179578 - protein, 83 aa, Unknown
  Bacterial polypetide isolated from the Sargasso Sea
KQAEEEGIDIILKDAGFEWREAGCSMCLGMNPDQLKPGERCASTSNRNFEGRQGRGGRTHLMSPELAAASAITGNISDIRDFT

SEQ ID NO: 179579 - protein, 203 aa, Unknown
  Bacterial polypetide isolated from the Sargasso Sea
MKKFTSLKSIPAYLPIVNIDTDMIIPKQFLKTIKRTGLGKNLFYEMRYDNDGKVIENFVLNKKPYNNSNILIAGNNFGCGSSREHAPWALLDFGITCVISTSYADIFYNNCFKNGILPIVLDEDKIKELSEYSNRQEEILVDLKDEKITYGNNEVSFKIDPFKKKCLMEGLDDIALSLEKSDKIKSFEDKLKIKKPWLFNDQS

SEQ ID NO: 179580 - protein, 142 aa, Unknown
  Bacterial polypetide isolated from the Sargasso Sea
MGLKPDTAVKDIKIDKVFIGSCTNGRIEDLREAAKILKEKKKASHVHAMVVPGSGLVKEQAEQEGLDKIFINSGFEWREPGCSMCLAMNADKLKPEERCASTSNRNFEGRQGRGGRTHLVSPGMAAAAAISGNLDDVRKYNN

SEQ ID NO: 179581 - protein, 89 aa, Unknown
  Bacterial polypetide isolated from the Sargasso Sea
MLYRTLYDKIWDYHLINEQDNDSSLIYIDRHLVHEVTSPQAFEGLRMNGRKVNSPLRTLAVADHNVPTLNRESGIEEEDSRIQVEELDK

SEQ ID NO: 179582 - protein, 470 aa, Unknown
  Bacterial polypetide isolated from the Sargasso Sea
FFSMSKTLYDKIWNDHLVDQQDDGTALLFVDRHLVHEVTSPQAFEGLRNSNRKVRHPNLTLAVADHNVPTTDRTKGIADQESKIQVDTLDANCKEFGIQLFGMDDRRQGIVHIIGPEQGFTQPGTVIVCGDSHTATHGAFGALAFGIGTSEVEHVLATQTLVQKKAKNFKIDVNGKLPLGVTSKDVILQIIGKIGTAGGTGCVIEYAGDLIRSLSVEQRMTICNMTIEGGARAGLIAPDEKIFDYLKGKPMSPKGENWEKALNYWNSLKTDKDANFDKEINLNATEILPMITWGTSPQDVITIDGKVPNPQSETDEDKKNSIERSLKYMGLKPDMSATDIKIDKVFIGSCTNGRIEDLREAAKILKDKKISSHVNAMVVPGSGLVKEQAEQEGLDKIFINSGFEWREPGCSMCLAMNADKLKPEERCASTSNRNFEGRQGRGGRTHLVSPGMAAAAAISGNLDDVRKYQN

SEQ ID NO: 179583 - protein, 201 aa, Unknown
  Bacterial polypetide isolated from the Sargasso Sea
MQKFNKLKSIPAYLPIVNIDTDMIIPKQFLKTIKRTGLGKNLFFEMRYDDQGKEIDDFILNKTPYNKSKILIAGKNFGCGSSREHAPWALLDFGITCVISSSYADIFYSNCFKNGILPIILKEEKIKELSEYANRKEDISIDLNEEKVIYGNNEIKFEIDPFKKKCLLEGLDDIALSLKKSEKIQKFENNLKQQKPWIFDD

SEQ ID NO: 179584 - protein, 198 aa, Unknown
  Bacterial polypetide isolated from the Sargasso Sea
MEKFTKIKSIPAYIPLMNIDTDKIIPKQFLKTIKRSGLGKSLFYEMRFDEKGNPVKGFTLDQKPFKNSKILITGKNFGCGSSREHAPWALLDFGIKVIISESFADIFYNNCFKNGILPIVAKEEIIKELKDYSSRKENIEVRLEEQEITYGNKTFKFKLDSFKKKCLLEGLDDIALSLKKVKNIESFENKMFQNKPWL

SEQ ID NO: 179585 - protein, 401 aa, Unknown
  Bacterial polypetide isolated from the Sargasso Sea
MSAPKTLYDKIWYNHIVSINDDGTTILYIDRHLVHEVTSPQAFEGLRMSGRKVRRPEFTLATADHNVPTMDRDKGIADPDSKLQVETLERNARENNITYLPMSDKRQGIVHIVGPEQGFTQPGMTIVCGDSHTSTHGAFGALAWGIGTSEVEHTLATQTLIQTKAKNMCIKITGEVMDGVTAKDIILAIIKKIGTAGGTGYVIEYTGDVIRNLSMEGRMTVCNMSIEAGARAGLISPDEKTWEYLKGRPLAPSGVEFETAIRYWQSLATDEGAQYDEIVEIKADEIIPQVTWGTSPEDVVSIDGYVPDPKNASSDEKKRSIERALNYMGLKPNTPINEIEVNKVFIGSCTNGRIEDLRAVSKIAKGRKVEKNVHAMIVPGSGLVKEQAEKEGLDKIFMKQG

SEQ ID NO: 179586 - protein, 466 aa, Unknown
  Bacterial polypetide isolated from the Sargasso Sea
MKTLYDKLWEEHHVTQLDSGESLLYIDRHYLHEVTSPQAFEGLIKKNLKPWRLNANIATPDHNVPTTRGNNFNSESITDEISKIQVVELDKNCNKFGIKQFDIESNKQGIVHVIGPELGFTIPGMTIVCGDSHTSTHGALGCLAMGIGTSEVEHVLATQCLKVSKLKNMNVRFEGEVDEHVSSKDIVLYLIGQIGTAGGTGYAIEFSGSYISSISVEGRMTICNMAIEAGAKVGLIAPDNKTIEYVKSKSFLDDDTFNHAKEYWKTLKSDDDAKFDKEITIDVSKIKPQVTWGTSPEMVLNYDESIPTVFDTKDENKKNVELARDYMGIENETKLSDLTFDKVFIGSCTNSRIEDLRQAAEIVKGKTIASNISEAIVVPGSGLVKEQAENEGLDKIFTDAGFIWRDPGCSMCLGMNPDQLKPYERCASTSNRNFEGRQGYLGRTHLMSPIMAAYTAINGTIGDPYE

SEQ ID NO: 179587 - protein, 198 aa, Unknown
  Bacterial polypetide isolated from the Sargasso Sea
MEKFTKIKSIPAYIPLMNIDTDKIIPKQFLKTIKRSGLGKSLFYEMRFDETGNPIKGFILDQEPFNNSKILIVGKNFGCGSSREHAPWALLDFGIRVIVSESFADIFYNNCFKNGILPIVAKEEIINELKAYSSRKEYIEVKLKEQEIVYGNKNFKFELDSFKKKCLLEGLDDIALSLEKAKNIENFEKKLDTEKPWI

SEQ ID NO: 179588 - protein, 391 aa, Unknown
  Bacterial polypetide isolated from the Sargasso Sea
HESKIQVETLEANCKEFGIKLFGMSDKRQGIVHVTGPEQGFTQPGTVIVCGDSHTATHGAFGALAFGIGTSEVEHVLATQTLVQKKAKNFRINVNGTLPLGVTSKDVILQIIGKIGTAGGTGCVIEYAGDLIRSLSVENRMTICNMTIEGGARAGLIAPDEKIFKYLEGRPMSPKGKDWDKALENWKNLNTDEGAQFDKEINLTANEISPMITWGTSPQDVITIDEKVPNPKNEKDEDKKNSLERSLSYMGLRPDMAAKDIKIDKVFIGSCTNGRIEDLREAAKILKDKKIASHVHAMVVPGSGLVKEQAEQEGLDKIFVNSGFEWREPGCSMCLAMNADKLKPEERCASTSNRNFEGRQGRGGRTHLVSPGMAAAAAISGNLDDVRKYQN

SEQ ID NO: 179589 - protein, 201 aa, Unknown
  Bacterial polypetide isolated from the Sargasso Sea
MQKFSTLKSIPAYLPIVNIDTDMIIPKQFLKTIKRTGLGKNLFFEMRYDDKGKEINDFVLNQKPYTNSKILIAGKNFGCGSSREHAPWALLDFGITSVISSSFADIFYNNCFKNGILPIILNDEKIKELSEYAKRKEEIFIDLKEEKIIFGNNETKFKIDPFKKKCLLEGLDDIALSLEKNDKIESFEKSLKIKKPWVFHD

SEQ ID NO: 179590 - protein, 208 aa, Unknown
  Bacterial polypetide isolated from the Sargasso Sea
MIDGIVSYIDRDNIDTDQIIPTEYLKSIKKFGYEDYLFDGWRYKDDGKLGVKKEERDINKDFILNNKPFSESKILLTRDNFGCGSSREHAVWALRDFGIKAVIASSFGDIFYNNCFKNGVLPIYLEKNQIEKLFGLVKKEVVELSIDLQKRIIFLNNQDEINFEVDDHLIERIIFGLDDIDITLKEKDKISNFEKNRKITRPWIYANE

SEQ ID NO: 179591 - protein, 185 aa, Unknown
  Bacterial polypetide isolated from the Sargasso Sea
DIKPMVTWGTSPQDVVTIDGKVPNPKNETDPDKKNSIERSLKYMGLNSDVSVQDIKIDKVFIGSCTNGRIEDLREAAKILKDKKIAKHVNAMVVPGSGLVKEKAEQEGLDKIFINSGFEWREPGCSMCLAMNADKLKPGERCASTSNRNFEGRQGRGGRTHLVSPGMAAAAAISGNLDDVRKYQN

SEQ ID NO: 179592 - protein, 201 aa, Unknown
  Bacterial polypetide isolated from the Sargasso Sea
MQKFNKLTSIPAYLPIVNIDTDMIIPKQFLKTIKRTGLGKNLFFEMRYDDEGNEIKDFVLNQKPFNQSKILIAGKNFGCGSSREHAPWALLDFGITCVISSSYADIFYNNCFKNGILPIKIDEEEIKQISEYSLRKEEIKIDLNEQKIIFGNNEIKFDLDQFKKKCLIEGLDDIALSLEKSEKIESFEKKLKISKPWIFND

SEQ ID NO: 179593 - protein, 309 aa, Unknown
  Bacterial polypetide isolated from the Sargasso Sea
MPNTLYDKIWNDHLIDQQADGTALLFVDRHLVHEVTSPQAFEGLRNSNRKVRHPKLTLAVADHNVPTTDRSKGISDKESKIQVDTLEANCKEFGIKLFGMGDKRQGIVHIIGPEQGFTQPGTVIVCGDSHTATHGAFGSLAFGIGTSEVEHVLATQTLVQKKAKNLRINVEGKLPLGVTSKDVILQIIGKIGTAGGTGFVIEYAGDLIRSLSVEQRMTICNMTIEGGARAGLIAPDEKIFKYLEGKPMSPKGKNWENALEYWRNLKSDDGAKFDKEVNLKVGRNFTNDNLGDLSTRCNHDRWQDSQPSK

SEQ ID NO: 179594 - protein, 101 aa, Unknown
  Bacterial polypetide isolated from the Sargasso Sea
MQKFSTLKSIPAYLPIVNIDTDMIIPKQFLKTIKRTGLGKNLFFEMRYDDKGKEINEFVLNKTPFNKSKILIAGKNFGCGSSREHAPWALLDFGITCVISS

SEQ ID NO: 179595 - protein, 142 aa, Unknown
  Bacterial polypetide isolated from the Sargasso Sea
MGLKPNMAAKDIKIDKVFIGSCTNGRIEDLREAAKILKDKKIASHVHAMVVPGSGLVKEQAEQEGLDKIFVNSGFEWREPGCSMCLAMNADKLKPEERCASTSNRNFEGRQGRGGRTHLVSPGMAAAAAISGSLDDVRKYQN

SEQ ID NO: 179596 - protein, 468 aa, Unknown
  Bacterial polypetide isolated from the Sargasso Sea
LYQKIYQSHVVAPVNGSTDLLFVDRHLIHEVTSPQAFAGLRQAGRTVRRPDLTYATMDHNVSTQLRSIDAAGETSRKQLEALAANCKEFNVPLLDLLHPDQGIVHVIGPELGLTQPGMIIVCGDSHTSTHGAFGAIAFGIGTSEVEHVLATQTLQQQVAKTLKVEVTGTLSPFVTPKDVIMAVIGQLGTAGGNGYVAEFCGSAIRGMSMEGRMTLCNMSIEMGAKAGLIAPDEVTFAYLKGKPHAPQAEHWDAAVTYWQSLYSDEDAVFDKTVTIAAENIRPQVTWGTNPEQVIAVDQPIPAPESFSDLIKADAARRALTYMGIEAGQKLTDLKVDVVFIGSCTNSRIEDLRQAAAVVQGKQVASGVRALIVPGSGQVKRQAEAEGLADIFKASGFEWREPGCSMCLGMNDDRVEAGQRCASTSNRNFEGRQGRGSRTHLVSPAMAAAAAIAGRFVDISSVERTAGAN

SEQ ID NO: 179597 - protein, 158 aa, Unknown
  Bacterial polypetide isolated from the Sargasso Sea
MSQIFAQGLVCPLDKNNVDTDQIIPKQFLTSVSRDGFAEALFYDWRYLANEQPNPDFVLNAPHYKGASILLTRANFGCGSSREHAPWAIQQYGFNVIIAESFADIFFNNSINNGMLLISLSASNIEFLFSRCQQGTQEWKIDLAGQQIILGNNAAVGF

SEQ ID NO: 179598 - protein, 121 aa, Unknown
  Bacterial polypetide isolated from the Sargasso Sea
SCTNSRIEDLRSAARIIEGKKVKQGIRAMVVPGSGLVKAQAEEEGLNLMFTEAGFEWREPGCSMCLAMNEDKLQPGERCASTSNRNFEGRQGKGGRTHLVSPQIAAASAITGKLTDCDSLS

SEQ ID NO: 179599 - protein, 314 aa, Unknown
  Bacterial polypetide isolated from the Sargasso Sea
SEVEHVLATQCLKTSKLRNMKVVIDGELSPGVTPKDVTLAVIGKIGTAGGTGFAIEYSGSVIEAMSIEGRMTVCNMSIEAGARVGLVAFDNITEEYVKNRPFTPKGSEWKLALSQWKDLKSDDDAHFEEIIHIDGSTLKPQVTWGTSPEMVIDIDGKVPEANSESIQHALEYMNLEAGMKISDIKLDQIFIGSCTNSRIEDLRMAAKVVEGKKISSEIKRAIVVPGSGLVAEQAAEEGLDKIFIESGFEWRAPGCSMCLAMNPDHLGEGEHCASTSNRNFEGRQGYGGRTHLVSPATAAASAIEGKFVDVRELF

SEQ ID NO: 179600 - protein, 214 aa, Unknown
  Bacterial polypetide isolated from the Sargasso Sea
MKNQYIFHSGKTLPLSRDNVDTDQIIPKQFLKSIKKSGFGPNLFDAWRYEDEGYLGQDNDNRPKNDSFVLNQEKYQGADILISKKNFGCGSSREHAVWSLIDYGFKVVIAESFADIFYNNCFNNGLLPIQLPEEVILGLIALSEESKEIEIDLIEQIISCEGNELTSFDIDPFRKQCILEGLDEIGLSLKHADAIKEYELKRAKESPWIFNTYE

SEQ ID NO: 179601 - protein, 300 aa, Unknown
  Bacterial polypetide isolated from the Sargasso Sea
MSTTLYDKIWNDHLVDQQDDGTALLFVDRHLVHEVTSPQAFEGLRNSNRKVRHPDLTLAVADHNVPTTDRTKGIADQESKIQVDTLDANCKEFGVQIFGMDDRRQGIVHIIGPEQGFTQPGTVIVCGDSHTATHGAFGALAFGIGTSEVEHVLATQTLVQKKAKNFRINVNGKLPLGVTSKDVILQIIGKIGTAGGTGCVIEYAGDLIRSLSVEQRMTICNMTIEGGARAGLIAPDEKIFEYLKGKPMSPKGENWEKALNYWNGLKTDSEANFDKEINLNASEILPMITWGTSPPRCYYN

SEQ ID NO: 179602 - protein, 469 aa, Unknown
  Bacterial polypetide isolated from the Sargasso Sea
MSNSGKTLFEKVWNDHLVLQETEETPAILYIDLHLIHEVTTPQAFQSLRDQGLSVRDPNKVLATMDHSTPTLPVKSLRDLDIVAEKGPADQIRDMIRNCEEFGIELHGFDSDKRGIVHVIGPELGATQPGKTIVCGDSHTSTHGAFGALAFGIGTTEVGHVLASQCILQRKPRTLAVNMNGALKSGVSAKDIILRIIQKLGVDGGVGHVIEYRGSTASILSLEERMTICNMSIEAGARAGMFAPDDKTFNYLIDKPMSPKGLAWDQAVEKWSTLVSDDNCEFDKEVDIDVDHLSPMITYGTNPGMAIQIDDIVPESNSDLGYKKSLNYMQIEAGRPLLGKEIDVVFIGSCTNSRISDLEDAAEILQGQKVANGIRALIVPGSQAVKKEAESLGLDKIFESAGAEWRESGCSMCLGMNGDTVGNGQLAVSTSNRNFEGRQGKGARTILASPKTAAASAIAGSVEDPRKYS

SEQ ID NO: 179603 - protein, 103 aa, Unknown
  Bacterial polypetide isolated from the Sargasso Sea
MKNPNPKTLFDKIWHQHLVNQQEDGTCLIYIDRHLVHEVTSPQAFEGLRDNNRKVHRPESTFAVADHNVPTSDRSKGIDNEESRIQVETLENNCKEFGVTIFP

SEQ ID NO: 179604 - protein, 464 aa, Unknown
  Bacterial polypetide isolated from the Sargasso Sea
MAKTLYDKLWDLHEVGQREDGTSLLYIDRHLIHEVTSPQAFEGLKLAGREPWRISANIATPDHNVPTTNRKEGIEGIEDEVARLQVVTLDENCKDNKILQFDIHDRRQGIVHVVGPEQGLTLPGMTIVCGDSHTSTHGALATLSMGIGTSEVEHVLATQCLKTSKLKNMRIKISGELQSGVSPKDVTLAVIGKIGTAGGTGYAIEYAGSVIENMSIEGRMTVCNMAIEAGARAGLVAYDSVTEEYVKDRPFAPSGDLWTDAVCQWKKLVSDKDAKFDREIEIDGSLIAPQVTWGTSPEMVSDIDGLIPHPENESIEHALDYMNLEPGKKITDIQLDQVFIGSCTNSRIEDLREAAKILKGKKISSSIKRAIVVPGSGLVSKQAVDEGLDTIFMDAGFEWRAPGCSMCLAMNPDQLGEGEHCASTSNRNFEGRQGYGGRTHLVSPSTAAASAVEGRFVDIREFMS

SEQ ID NO: 179605 - protein, 217 aa, Unknown
  Bacterial polypetide isolated from the Sargasso Sea
MKNTSVFHKGLGVPLDRDNIDTDQIIPKQFLKSIKKSGFGPNLFDAWRYNDEGYPGQDSEMRVVNENFILNNEKFKSSDILITKKNFGCGSSREHAVWSLMDYGFKAVIAESFADIFLNNCFNNGLLPIALTQSEIEILMELAEQGKEIEIDLENQIIFSDETQIATFEIDPFQKKCILEGLDEIGLSLTHSHQIKEFEKRRMSESPWIFNSIDTND

SEQ ID NO: 179606 - protein, 342 aa, Unknown
  Bacterial polypetide isolated from the Sargasso Sea
CGDSHTATHGAFGALAFGIGTSEVEHVLATQTLVQKKANNFRINVNGKLPLGVTSKDVILQIIGKIGTAGGTGCVVEYAGDLIRSLTVEQRMTICNMTIEGGARAGLIAPDEKIFEYLKGKPMSPKDENWEKAVNYWQTLKTDTDASFDKEISLNADEILPMITWGTSPQDVITIDGKVPNPDNESDQDKKNSIERALNYMGLKPDMAATDIKIDKVFIGSCTNGRIEDLREAAKILKDKKISSHVNAIVVPGSGLVKEQAEQEGLDKIFVSSGFEWREPGCSMCLAMNADKLKPEERCASTSNRNFEGRQGRGGRTHLVSPGMAAAAAISGNLDDVRKYEN

SEQ ID NO: 179607 - protein, 201 aa, Unknown
  Bacterial polypetide isolated from the Sargasso Sea
MQKFNKLKSIPAYLPIVNIDTDMIIPKQFLKTIKRTGLGKNLFFEMRYDDQGKEINDFVLNNDPYKQSKILIAGKNFGCGSSREHAPWALLDFGITCVISSSYADIFYSNCFKNGILPIILEEEKIKELSDYANRKEEIHIDLNEEKIVYGNNELKFEIDPFKKKCLLEGLDDIALSLKKSEIIEKFENNLKNEKPWVFND

SEQ ID NO: 179608 - protein, 201 aa, Unknown
  Bacterial polypetide isolated from the Sargasso Sea
MQKFSTLKSIPAYLSTANVDTDMIIPKQFLKTIKRTGLGKNLFFEMRYDDKGAELSDFVLNKNPYNNSKILITGKNFGCGSSREHAPWALLDFGITCVISSSFADIFHNNCFKNGILPITLDEEKIKELSEYANRKEEISVDLVEEKVFFGNNEIKFVVDQFKKKCLLEGLDEIALSLKKSNKIESFENNLKSKRPWVFND

SEQ ID NO: 179609 - protein, 141 aa, Unknown
  Bacterial polypetide isolated from the Sargasso Sea
GLKPDMAATDIKIDKVFIGSCTNGRIEDLREAAKILKDKKISTHVEAMVVPGSGLVKEQAEQEGLDKIFIQSGFDWREPGCSMCLAMNADKLKPEERCASTSNRNFEGRQGRGGRTHLVSPGMAAAAAISGNLEDVRKFQD

SEQ ID NO: 179610 - protein, 157 aa, Unknown
  Bacterial polypetide isolated from the Sargasso Sea
RKKEERIINKEFILNNEPFNKSKILLSRDNFGCGSSREHAVWALRDFGIKAVIASSFGDIFYNNCFKNSVLPIKLEKNYIEMMFNETKDDLLEISIDIQKKEINLKQKIIKFEVDDFLIDRIIYGLDDVDVTLKEKNKIMNFEKERIKNKPWIFAND

SEQ ID NO: 179611 - protein, 136 aa, Unknown
  Bacterial polypetide isolated from the Sargasso Sea
MSQTIYDKIWNDHLVHEQKDGTSLLFVDRHLIHEVTSPQAFEGLRTSKRKVRQPKLTLAVADHNVPTTDRSKGISDEDSRIQVETLDKNCKEFGIQLFGMDDKRQGIVHIIGPEQGFTQPGNIIVCGDSHTATHGA

SEQ ID NO: 179612 - protein, 202 aa, Unknown
  Bacterial polypetide isolated from the Sargasso Sea
MEKFNNLRSIPSYLSLQNIDTDMIIPKQFLKTIKRTGLGKSLFYEMRYDENGKRNEDFILNREPYDKSKILLAGKNFGCGSSREHAPWALSDFGIKCVISASFADIFYNNCFKNGILPIKIDDKIVIELAEYSNRKEEIEISLEKQEIKYGNKVANFELDPFKKKCLMEGLDDIALSMEKISSIDDYEKKLQSTKPWVLNNG

SEQ ID NO: 179613 - protein, 201 aa, Unknown
  Bacterial polypetide isolated from the Sargasso Sea
MQKFNKLKSIPAYLPIVNIDTDMIIPKQFLKTIKRTGLGKNLFFEMRYDDQGKEINDFVLNKDPFNQSKILIAGKNFGCGSSREHAPWALLDFGITCVISSSYADIFFSNCFKNGILPIILEEEKIKELSEYANRQEEISIDLKEEKIVYGNNELKFEVDPFKKKCLLEGLDDIALSLKKSEKIEKFETNLKNEKPWVFND

SEQ ID NO: 179614 - protein, 201 aa, Unknown
  Bacterial polypetide isolated from the Sargasso Sea
MQKFNSLKSIPAYLPIVNIDTDMIIPKQFLKTIKRTGLGKNLFFEMRYDDNGNEIKDFVLNQKPFSKSKILIAGKNFGCGSSREHAPWALLDFGITCVISSSFADIFYSNCFKNGILPIILDDEKIKELSEYANRKEEISIDLSEEKIIYGNSEVNFKIDSFKKKCLLEGLDDIALSLKKSDKIQTFENDLKGRKPWIFND

SEQ ID NO: 179615 - protein, 132 aa, Unknown
  Bacterial polypetide isolated from the Sargasso Sea
MLTRDNFGCGSSREHAVWALRDFGIEVVIASSFGDIFYNNCFKNGVLPLKLKKTEIEELFSLSTDNPVTISVNIKDKVILFKDKLSIYFDLDDNLAERIIYGLDEIDITLKDSKLIKKFEEHRKENNPWIFE

SEQ ID NO: 179616 - protein, 200 aa, Unknown
  Bacterial polypetide isolated from the Sargasso Sea
MQPFVTLNSIAAPLPMINVDTDMIIPKQFLKTIKRSGLGKNLFHELRYDMQGNVKNDFVLNWDPYKNSKILIAGANFGCGSSREHAPWSLLDFGFRSIVAPSFADIFYNNCFKNGILPIKLDQVKVDLLMKEAEEKKEISVNLDKQIIVFQNDKTIDFEIDEFRKKCLIEGLDDIGLTLQKNNKIDIHEEKIHTIQPWIV

SEQ ID NO: 179617 - protein, 334 aa, Unknown
  Bacterial polypetide isolated from the Sargasso Sea
MSKDTLFDKVWDLHKVSSLPGGSDQVFIGLHLIHEVTSPQAFGALKDKNLKVKFPNRTVATVDHIVPTDNQSRPFKDNLAEQMIETLEKNCLKHKIRFFNIGSGNQGIVHVVAPELGLTQPGMTIACGDSHTSTHGAFGSIAFGIGTSQVRDVLATQTIAMNKLKVRQIWCENKLSHGVYAKDLVLHIINKLGVKAGVGFAYEFAGPAINELSMEERMTICNMSIEGGARCGYINPDEKTFSYIKNKLCAPKNEDWDKALLWWKSLKSDENSNFDDLIKLDASEVEPTVTWGITPGQSVGINQQIPVFRKLSPNDQFVAQEAYEYMGIKPGQSI

SEQ ID NO: 179618 - protein, 124 aa, Unknown
  Bacterial polypetide isolated from the Sargasso Sea
FIGSCTNGRIEDLRAASEILKGKKVKDGMRAMVVPGSGLVRMQAEEEGIAEIFREAGFEWRLAGCSMCLAMNPDQLAEGERCASTSNRNFEGRQGYRGRTHLVSPAMAAAAAITGKLTDVREIH

SEQ ID NO: 179619 - protein, 351 aa, Unknown
  Bacterial polypetide isolated from the Sargasso Sea
IHEVTSPQAFEGLRNSNRKVRQPSLTLAVADHNVPTTDRSVPITDKDSKIQIETLEKNCAEFGINLFGMNDKRQGIVHIIGPEQGFTQPGTIIVCGDSHTATHGAFGALAFGIGTSEVEHVLATQTLVQKKSKNFRINVNGSLPVGVTSKDVILQIIGKIGTAGGTGYVIEYAGNLISNLSVEQRMTICNMTIEGGARAGLIEPDEKVFNYLKGKPMSPKNSNWDKALEYWSKLKSDGDAVFDKEISLEGKDIKPMVTWGTSPQDVVDIDGIVPDPENEQNEDRKNSINRSLKYMGLKPKTKIKDIRIDKVFIGSCTNGRIEDLREAAKILKDKKIASHVNAMIVPGSGLV

SEQ ID NO: 179620 - protein, 156 aa, Unknown
  Bacterial polypetide isolated from the Sargasso Sea
MRFNEDGSEKPDFVLNKAAYRGSNIIVAGDNFGCGSSREHAPWALLDFGIKCVISTSFADIFYNNCFKNGILPIVVNKQQLEQLMDDAENGANAVLDIDLEAQEITRPNGESVTFEIDEFRKHCLINGLDDIGLTMEKEKNIDSFEKKRATEQPWA

SEQ ID NO: 179621 - protein, 467 aa, Unknown
  Bacterial polypetide isolated from the Sargasso Sea
MPNTLYDKIWKEHLVDQQDDGTALLFVDRHLVHEVTSPQAFEGLRNSKRKVRHPKLTLAVADHNVPTTDRTNGISDKESKIQVDTLEKNCKEFDIQLFGMEDKRQGIVHIIGPEQGFTQPGTVIVCGDSHTATHGAFGALAFGIGTSEVEHVLATQTLVQKKAKNFRINVNGKLPLGVTSKDVILQIIGKIGTAGGTGCVIEYAGDLIRSLSVEQRMTICNMTIEGGARAGLIAPDEKIFKYLEGKPMSPKGEKWDKALAYWRSLKSDDGANFDKEISLQANEISPMITWGTSPQDVITIEDKVPNPDNEKDEDRKNSIERALKYMGLKPDMAAKDIKIDKVFIGSCTNGRIEDLREAAKILKDKKIASHVHAMVVPGSGLVKEQAEQEGLNKIFEESGFEWREPGCSMCLAMNADKLKPEQRCASTSNRNFEGRQGRGGRTHLVSPGMAAAAAISGNLDDVRKYQN

SEQ ID NO: 179622 - protein, 467 aa, Unknown
  Bacterial polypetide isolated from the Sargasso Sea
MPQTLYDKIWNEHLVHQQEDGTALLFVDRHLVHEVTSPQAFEGLRNSNRKVRQPNLTLAVADHNVPTTDRSKGIDDKESKLQVDTLETNCKEFGIQLFGMSDKRQGIVHIIGPEQGFTQPGTVIVCGDSHTATHGAFGALAFGIGTSEVEHVLATQTLVQKKAKNFRINVSGKLPIGVTSKDVILQIIGKIGTAGGTGCVIEYSGSLISSLSVEQRMTICNMTIEGGARAGLIEPDQKIFDYLKNKPMSPKKENWSKALDNWKNLKSDSGANFDKELNLEAHEIMPMVTWGTSPQDVITIDGKVPNPNDEKDLDKKNSIERSLKYMGLKPNTAAKDIKIDKVFIGSCTNGRIEDLREAAKILKNKKKASHVEAMVVPGSGLVKQQAEQEGLDKIFINSGFEWREPGCSMCLAMNADKLKPEERCASTSNRNFEGRQGRGGRTHLVSPGMAAAAAISGSLDDVRKYQS

SEQ ID NO: 179623 - protein, 201 aa, Unknown
  Bacterial polypetide isolated from the Sargasso Sea
MQKFTFIKGIPSYLPIVNIDTDMIIPKQFLKTIKRTGLGKNLFFELRYDDKGNEIKDFILNNKPHNNSKILITGKNFGCGSSREHAPWALLDFGITCVISSSYADIFYNNCFKNGILPIILKEDKIKELSEYSNRKEEISIDLKEQKIIYGNNEIQFDIDQFKKKCLLEGLDDIALSLEKSDKITLFEKNLKNTKPWIFND

SEQ ID NO: 179624 - protein, 171 aa, Unknown
  Bacterial polypetide isolated from the Sargasso Sea
FLKTIKRSGLGKNLFYEMRFDEKGKPISGFILDNDPYNKSKILITGKNFGCGSSREHAPWALLDFGIRVIISESFADIFYNNCFKNGILPIVANQNIINELSEYSSRKENIEVKLTEQEILYGNKSFKFELDPFKKKCLLEGLDDIALSLNKAESIKSFENKMTQDKPWIL

SEQ ID NO: 179625 - protein, 421 aa, Unknown
  Bacterial polypetide isolated from the Sargasso Sea
MAGRNVRHPDKTLAVADHNVPTTDRSVEIEDEESKIQIEALKNNCAEFGINFIDMSDIRQGIVHIIGPEQGFTLPGSTIVCGDSHTSTHGAFGALAHGIGTSEVEHVLASQTLIQKKAKNFKVEIVGTLTDSISAKDLALSVIGAIGTAGGTGYVIEYMGNAVESLSMEGRMTLCNLTIEAGARAGLIAPDQKTFDYLKDRPLAPKGDIWDKAVSYWKTLPSDPGAHYDNSIKIDIDNLSPLVTWGTSPEDVIDIDGNIPKPEDIEDEAKKNAIRRSLDYMGLEAGEPIKGTKIDKVFIGSCTNGRIEDLRAAASIVSQNKVSDHVNAIVVPGSGLVKAQAENEGLDKIFIEAGFEWREPGCSMCLAMNADKLLPNERCASTSNRNFEGRQGRGGRTHLVSPKMAAAAAIAGCLADVRDFS

SEQ ID NO: 179626 - protein, 209 aa, Unknown
  Bacterial polypetide isolated from the Sargasso Sea
MEKFSKIKGIAAPMLSSDGNQFSMMINIDTDMIIPKQFLKTIKRTGLGKSLFHEMRYDFEGNEIESFILNKDIYRDSKIILAGNNFGCGSSREHAPWALLDFGIRVIIAPSFADIFYNNCFKNGILPIQLSEKLIKEISESALKGNELQVSLSDQIINCDNKEFSFEIDPSNKNFLMEGLDDIGLTLKDTNLIDSYEKDADNNLPWYTL

SEQ ID NO: 179627 - protein, 237 aa, Unknown
  Bacterial polypetide isolated from the Sargasso Sea
GLIQPDDKIFEYLKNKPMSPKKDNWDKALEYWSSLKTDRDAKFDKEISLDGSQIKPMVTWGTSPQDVVEIDGKVPNPDNESDIDKKNSISRSLNYMGLKPDTNIKDIKIDKVFIGSCTNGRIEDIRDAAKILKNKKISSHVEAMVVPGSGLVKEQAEQEGLDKIFKDSGFEWREPGCSMCLAMNADKLKPEERCASTSNRNFEGRQGRGGRTHLVSPAMAAAAAISGNLDDVRKYQS

SEQ ID NO: 179628 - protein, 156 aa, Unknown
  Bacterial polypetide isolated from the Sargasso Sea
MTKNGNLIDDFILNTIPYNNSKILIAGKNFGCGSSREHAPWALLDFGITCVISSSYADIFYNNCFKNGILPIKISDEEIKEISEYSKRKEEISVDLLGQKIVFGNKEITFEIDEFKKKCLIEGLDDIALSLEKSDKIISFEKKIKSSKPWIFNDQS

SEQ ID NO: 179629 - protein, 244 aa, Unknown
  Bacterial polypetide isolated from the Sargasso Sea
MGYTIYDKLWNEHLIRSYDDGDSLIYIDRHFLHEVTSPQAFEGLKKKSLKPWRINANIATPDHNVPTTRGNEFSIENIEDNISKLQVVELDKNCNDFGIKQFNINSNNQGIVHVIGPELGLTLPGMSIVCGDSHTSTHGAFGCLAMGIGTSEVEHVLATQSLKVRKLKNMRINFEGSIQEGVSSKDIILYLIRTIGTAGGTGYAVEFAGSYIRNISMEARMTICNMSIEAGAKVGLVSVDDKTI

SEQ ID NO: 179630 - protein, 350 aa, Unknown
  Bacterial polypetide isolated from the Sargasso Sea
DREKGIEGIEDAVAKLQVKTLDENCSDLGILQFDILDKRQGIVHVVGPEQGVTLPGMTLVCGDSHTSTHGALATLAMGIGTSEVEHVLATQCLKASKLRNMKVVIDGELSPGVTPKDVTLAVIGQIGTAGGTGFAIEYSGSVIEKMSIEGRMTVCNMSIEAGARVGLVAFDSITEEYVKNRPFTPKGDEWELALSQWKELKSDEGAHFEETIYIDGSDLKPQVTWGTSPEMVIDVDGEIPVANSESIQHALEYMNLEPGMKISDIKLDQVFIGSCTNSRIEDLRLAAKVVEGKKISSNIKRAIVVPGSGLVAEQAVDEGLDKIFLESGLEWRAPGCSMCLAMKSDQLGDE

SEQ ID NO: 179631 - protein, 201 aa, Unknown
  Bacterial polypetide isolated from the Sargasso Sea
MKKFNSLKGIPAYLPIVNIDTDMIIPKQFLKTIKRTGLGKNLFFEMRYDNQGKEITDFVLNQSPYNDSKILITGKNFGCGSSREHAPWALLDFGITCVISSSYADIFFSNCFKNGILPIILEEEKIKELSEYANRKEEISVDLNEEKIVYGNNEIKFQVDPFKKKCLLEGLDDIALSLKKSDKIENFESNLKNKKPWIFND

SEQ ID NO: 179632 - protein, 463 aa, Unknown
  Bacterial polypetide isolated from the Sargasso Sea
MPKTLYDKLWDSHEVAQREDGSFLLYIDRHLIHEVTSPQAFEGLKMAGREPWRVSSNIATPDHNVPTTNREKGIEGIEDEVSKLQVTTLDKNCSDLGILQFDILDKRQGIVHVVGPEQGVTLPGMTLVCGDSHTSTHGALATLAMGIGTSEVEHVLATQCLKASKLKNMKIVIDGQLSRGVTPKDVTLAVIGKIGTAGGTGFAIEYSGSVIDEMSIEGRMTVCNMSIEAGARVGLVAFDKTTQEYVQGRPFSPKGKEWELALSHWKDLKSDDDAHFDETIFIDGSALKPQVTWGTSPEMVLDIDGTIPEAKSESIERALEYMQLKAGMKISDIKLDQVFIGSCTNSRIEDLRLAASLVEGKKISSGIKRAIVVPGSGLVAEQAIREGLDKIFIESGFEWRAPGCSMCLAMNPDQLGEGEHCASTSNRNFEGRQGYGGRTHLVSPATAAASAIEGKFVDVRELF

SEQ ID NO: 179633 - protein, 201 aa, Unknown
  Bacterial polypetide isolated from the Sargasso Sea
MKKFSSIKSIPAYLPIVNIDTDMIIPKQFLKTIKRTGLGKNLFFEMRYDQSGKEINDFILNNSPYDNSKILIAGKNFGCGSSREHAPWALLDFGITCVISSSYADIFYNNCFKNGILPITISEDQIKEISEYSKRKEEISVNLPEQTINFGNKEIKFEIDQFKKKCLIEGLDDIALSLEKSDKIISYENKIKTSKPWIFSD

SEQ ID NO: 179634 - protein, 457 aa, Unknown
  Bacterial polypetide isolated from the Sargasso Sea
MKTLYDKLWEEHHVTQLDSGESLLYIDRHYLHEVTSPQAFEGLSKKNLKPWRLEANIATPDHNVPTTRGDDFDSEKIKDEISKIQVIELDKNCNTFGIKQFDIKSTKQGIVHVIGPELGYTLPGMTIVCGDSHTSTHGALGCLAMGIGTSEVEHVLATQCLKVSKLKNMLVKFEGIPAENVSSKDIVLYFIGQIGTAGGTGYAIEFAGSYIEQISIESRMTICNMAIEAGAKVGLVAPDDKTINYIRKKSFLDKELLIEAEDYWSSLKSDDDAFFDKEITIDISKIKPQVTWGTSPEMVVNFDDDIPRTSDYSEQNKKNIELARDYMGIKDEAKLSDLVFDKVFIGSCTNSRIEDLRQAAEIVKGKFVAKNISEAIVVPGSGMVKEQAELEGLDKIFTEAGFIWRDPGCSMCLGMNPDQLKPYERCASTSNRNFEGRQGYLGRTHLMSPIMAAYTAI

SEQ ID NO: 179635 - protein, 255 aa, Unknown
  Bacterial polypetide isolated from the Sargasso Sea
MTEAKTIYDKIWDAHLVADKDNYSLLYIDRHLIHEVTSPQAFEGLRMAGRNVRHPDKTLAVADHNVPTTDRSVEIEDEESKIQIEALKNNCAEFGINFIDMSDIRQGIVHIIGPEQGFTLPGSTIVCGDSHTSTHGAFGALAHGIGTSEVEHVLASQTLIQKKAKNFKVEIVGTLTDSISAKDLALSVIGAIGTAGGTGYVIEYMGNAVESLSMEGRMTLCNLTIEAGARAGLIAPDQKTFDYLKDRPLAPKGEY

SEQ ID NO: 179636 - protein, 472 aa, Unknown
  Bacterial polypetide isolated from the Sargasso Sea
MSKRTLYQKLVDSHLVSRIDEQNVLLYVDLHLMNEYTSPQAFSALDARGRSVRRPRQQMAVVSHIIPTHAESPRVIRDAASLLQAQNLARNCERAGIRLFAADDPLQGIEHIVAPELGLIRPGMVVLCGDSHTTTYGALGALGFGIGTSEVEHVLATQTLVYRVAQTMRITIDGALPYGTSSKDVVIWLISQIGAQGARGYAVEFSGSTIASLSAEARMTLCNMTVEAGARAALIAPDQTTFDYVRAHTPSLDQAAWQNALDDWRNLYSDADASFDAEYRFDAHEIAPFVTWGTSPDQAVAIDQPIPDESMQATPEAAASLRRALDYMGLSARQALTGTHIDRVFIGSCTNGRIEDLRTVAALVRGKHVADGVRAMVVPGSESVRRIAEQEGIAQTLIDAGFEWREPGCSMCLAMNDDVLEAGERCASTTNRNFEGRQGRGGRTHLMSPAMAAAAALTGCITDVRTLEAQTS

SEQ ID NO: 179637 - protein, 176 aa, Unknown
  Bacterial polypetide isolated from the Sargasso Sea
MEKFKNIRGIAAPFNFINVDTDKIIPKQFLKTIKRTGLGKHLFDEMRFNDDGSEKEEFVLNREPYRKCNILVAGDNFGCGSSREHAPWALSDFGIKCIISTSFADIFYNNSFKNGLLPIKVSSDERDALLADSNDMENPELEIDLPSQEIRRPNGAVIKFEIDPFRKKCLLEGLDD

SEQ ID NO: 179638 - protein, 201 aa, Unknown; identical to SEQ ID NO: 179537
  Bacterial polypetide isolated from the Sargasso Sea

SEQ ID NO: 179639 - protein, 462 aa, Unknown
  Bacterial polypetide isolated from the Sargasso Sea
MAKTLFDKVWDSHVIEKIKDGPDVLFIDRHFIHEVTSPVAFVGLKNRGLKVMFPDKTFATADHNTPTINQHLPIKDKLSAMQVKTLEKNCIEHGIDFWGLGHNKNGIVHVIGPENGITQPGLTIVCGDSHTSTHGAFGAIAFGIGTSEVEMVLACQSIMQQKPLKMRINIDGSLNSHVTPKDVAIYIISRLSSSGATGYFVEYSGEVFKNMSMEGRMTVCNLSIEMGARGGMIAPDEKTFEYIKGREYAPKGNDWEKALSYWKSLKTDNDAIFDKEFNFNASDIEPMITYGTNPGMAIPISKSIPGSGSDSESSYQKALDYMEFKEGEMMIGKKIDYVFLGSCTNGRIEDFRTFASLIKGRRKSDDVDAWLVPGSHKVLKSIKDEGILDILTDSGFQLREPGCSACLAMNDDKIPKGKYAVSTTNRNFEGRQGPGARTLLASPLVAAATAITGKITDPREII

SEQ ID NO: 179640 - protein, 198 aa, Unknown
  Bacterial polypetide isolated from the Sargasso Sea
MAYDKFNILNSSAVPLNIDNVDTDQIIPARFLKATERKGFGENLFKDWRYNSDDTTIDSFPLNNKIYNGKILVAGKNFGCGSSREHAVWAIYDYGFRAVVSSFFADIFKNNCLNIGVLPVQVSEEFLIDIFAQIDTNPKSNFEVNIEIQEFKIIETGKFEKFNISSYKKSNMSNGFDDIDYLINKKQEISKFANNSPY

SEQ ID NO: 179641 - protein, 117 aa, Unknown
  Bacterial polypetide isolated from the Sargasso Sea
MSLTTYDKIWNDHLVDEQPDGTSLLFVDRHLIHEVTSPQAFEGLRNSNRKVRHPKLTLAVADHNVPTTDRSEGIADEDSRIQVETLNKNCKEFGVELFGMDDKRQGIVHIIGPEQGF

SEQ ID NO: 179642 - protein, 112 aa, Unknown
  Bacterial polypetide isolated from the Sargasso Sea
MEKFNKLKSIPSYLSLQNIDTDMIIPKQFLKTIKRTGLGKSLFYEMRYDENGKIIKNFVLNKEPYNKSKILLAGKNFGCGSSREHAPWALSDFGIRCVNSSSFADIFYNQLF

SEQ ID NO: 179643 - protein, 213 aa, Unknown
  Bacterial polypetide isolated from the Sargasso Sea
MINPIISGIVATFDRDNIDTDQIIPTEYLKSIKKFGFGDFLFDGWRYLDEGRLDMTSEDRSKNYDFILNKEPYTKSQILLTRDNFGCGSSREHAVWALRDFGFKAVIASSFGDIFYNNCFKNSVLPIKLTIEEINHLFEITATSPISFEIDLAKKTIKYDQVSSYSFDVKESLLERIIHNLDDVDITLKHKEQIEAYELSRRQQRPWLFDYSN

SEQ ID NO: 179644 - protein, 467 aa, Unknown
  Bacterial polypetide isolated from the Sargasso Sea
MTEAKTIYDKIWDAHLVADKDNYSLLYIDRHLIHEVTSPQAFEGLRMAERTVRHPEKTLAVADHNVPTTDRSIEIEDEESKIQIEALKNNCEEFGINFIDMTDIRQGIVHIIGPEQGFTLPGSTIVCGDSHTSTHGAFGALAHGIGTSEVEHVLASQTLIQKKAKNFKVEIVGTLTDSISAKDLALSVIGAIGTAGGTGYVIEYMGNAVESLTMEGRMTLCNLTIEAGARAGLIAPDQKTFDYLKDRPLVPKDEIWDKAVSYWETLPSDPGAHYDNSIKIDIDNLAPLVTWGTSPEDVVDIDGNIPKPEEIEDEAKKNAIKRSLDYMGLEAGRPIKGTKIDKVFIGSCTNGRIEDLRAAASIVSENKVSDHVNAIVVPGSGLVKAQAESEGLDKIFINAGFEWREPGCSMCLAMNADKLLPEERCASTSNRNFEGRQGRGGRTHLVSPKMAAAAAIAGCLADVRDFS

SEQ ID NO: 179645 - protein, 209 aa, Unknown
  Bacterial polypetide isolated from the Sargasso Sea
MEKFDTIKGIAAPMLASDGNQFSMMINIDTDMIIPKQFLKTIKRTGLGKSLFHEMRYDYEGNEVENFILNKNEYRDSKIILAGNNFGCGSSREHAPWALLDFGIKVIIAPSFADIFYNNCFKNGILPIQLSEKVIKEISESALKGNELEVSLSKQIILCENKEINFEIDPSNKNFLMEGLDDIGLTLKDTDLIDIYEKDADDNLPWYSL

SEQ ID NO: 179646 - protein, 238 aa, Unknown
  Bacterial polypetide isolated from the Sargasso Sea
MPFTTYDKIWNDHLVDEQPDGTSLLFVDRHLIHEVTSPQAFEGLRNSNRKVRHPKLTLAVADHNVPTTDRSKGIADEDSRIQVETLNKNCKEFGVEIFGMDDKRQGIVHIIGPEQGFTQPGNIIVCGDSHTATHGAFGALAFGIGTSEVEHVLATQTLVQKKSKNFRISVNGSLPIGVTSKDVILQIIGKIGTAGGTGYVIEYAGNLISNLSVEQRMTICNMTIEGGARAGLIQPDEK

SEQ ID NO: 179647 - protein, 157 aa, Unknown
  Bacterial polypetide isolated from the Sargasso Sea
MRYDEKGKIIEDFVLHKEPYNKSKILIAGKNFGCGSSREHAPWALLDFGIKCVISSSFADIFYNNCFKNGILPIRLDEKIILQLAEYSNRKKEIEVDLEEQVVKFGNEIVNFEVDGFKKKCLLEGLDDIALSMEKLNLVENFEKKVKEDRPWLLKND

SEQ ID NO: 179648 - protein, 378 aa, Unknown
  Bacterial polypetide isolated from the Sargasso Sea
NNCKEFGIKLFYVNDKRQGIVHIIGPEQGFTQPGTVIVCGDSHTATHGAFGALAFGIGTSEVEHVLATQTLIQKKSKNFRINVNGELPKGVTAKDVILKIIGKIGTAGGTGYVVEFAGNVIRSLSMEERMTVCNMTIEAGARAGLIAPDEKTFDYLKNKSMSPKGENWLKAVKFWKTLYSDKECKFDKEINIDGKDIEPLVTWGTSPQDVSPVTGIVPDPEEEKNEDRKMAMKRSLEYMGLKANTKISDIKIDKIFIGSCTNGRIEDLRVAAELLKGKKIANNVSAMVVPGSGLVKEQAEKEGLDKIFKEAGFEWREPGCSMCLGMNPDQLKPKERCASTSNRNFEGRQGRGGRTHLVSPGMAIAAAINGHLTDVREI

SEQ ID NO: 179649 - protein, 202 aa, Unknown
  Bacterial polypetide isolated from the Sargasso Sea
MQKFSNLKSIPSYLSLQNIDTDMIIPKQFLKTIKRTGLGKSLFYEMRYDENGKINNDFILNKEPYNKSRILLAGKNFGCGSSREHAPWALLDFGIKCVISSSFADIFYNNCFKNGILPIKIDDKTVQELAEYSKRKEEIEINLEKQEISYGNKVVKFEVDAFKKKCLMEGLDDIALSMEKISQIDNFEKKLIQEKPWLIKND

SEQ ID NO: 179650 - protein, 165 aa, Unknown
  Bacterial polypetide isolated from the Sargasso Sea
YELRYDENDNKISNFVLNQDQYKDSQILITGKNFGCGSSREHAPWSIADYGIKCIVASSYADIFYNNCFKNGILPIILPEDQVQQLLQAAEESLNFEVDLENQKISYILNNEAKSLEFDIDPAKKACLIEGIDDIGLTLNKVSHISDFENKQKSMNPWLYSQKIT

SEQ ID NO: 179651 - protein, 305 aa, Unknown
  Bacterial polypetide isolated from the Sargasso Sea
MSKTLFDKVWDAHVVKRIKNGPDVLFIDRHLVHEVTSPVAFLGLQNRKLDVLFPDKTFATADHNTPTKNQNLPIKDPLSAKQLQTLKLNSKKHKIPFWGLGHKKNGIVHVIGPENGITLPGATIVCGDSHTSTHGAFGAIAFGIGTSEVEMVLTTQCVLQPKPKKMRIIINGKLNNYVTPKDVALYIISKISTSGATGHFVEYSGDVFEAMSMEGRMTVCNLSIEMGARGGMIAPDKKTINYIRDREFTPKGDVFLKLLKYWNSLKTEKDATFDREYVFEGDKIEPMITYGTNPGMGTSISDGIP

SEQ ID NO: 179652 - protein, 248 aa, Unknown
  Bacterial polypetide isolated from the Sargasso Sea
MSKDTLFDKVWDLHKVSSLPGGSDQIFIGLHLIHEVTSPQAFGALKDKNLTVKFPSRTVATVDHIVPTDNQSRPFKDNLAEQMIETLEKNCLQHKIKFFNIGSGSQGIVHVVAPELGLTQPGMTIACGDSHTSTHGAFGSIAFGIGTSQVRDVLATQTIAMNKLKVRQIWCENQLSNGVYAKDLVLHIINKLGVKAGVGFAYEFAGPAINVLSMEERMTICNMSIEGGARCGYINPDEKTFSYMRNKL

SEQ ID NO: 179653 - protein, 132 aa, Unknown
  Bacterial polypetide isolated from the Sargasso Sea
MPKTLYDKIWNDHLVHQQDDGTSLLFVDRHLIHEVTSPQAFEGLRNSNRKVRQPKLTLAVVDHNIPTTDRSKGIDDKDSKIQVETLEKNCREFGVKLFGMDDKRQGIVHIVDPEQGFTQPGTVIVCGDSHTA

SEQ ID NO: 179654 - protein, 414 aa, Unknown
  Bacterial polypetide isolated from the Sargasso Sea
PNLTLAVADHNVPTTDRSKGISDEDSKIQVDTLEANCREFGVQLFGMDDKRQGIVHIIGPEQGFTQPGTVIVCGDSHTATHGAFGALAFGIGTSEVEHVLATQTLVQKKAKNFRINVNGELPLGVTSKDVILQIIGKIGTAGGTGSVVEYAGDLIRSLSVEQRMTICNMTIEGGARAGLIAPDEKIFEYLKGKPMSPKSENWDKALNYWETLKTDSDASFDKEISLNANEILPMITWGTSPQDVITIDGKVPNPNNETDEDKKNSIERALKYMGLKPDMAATDIKIDKVFIGSCTNGRIEDLREAAKIVKDKKVSSHVNAIVVPGSGLVKEQAEQEGLDKIFVSSGFEWREPGCSMCLAMNADKLKPEERCASTSNRNFEGRQGRGGRTHLVSPGMAAAAAISGNLDDVRKYQN

SEQ ID NO: 179655 - protein, 201 aa, Unknown
  Bacterial polypetide isolated from the Sargasso Sea
MQKFNKLKSIPAYLPIVNIDTDMIIPKQFLKTIKRTGLGKNLFFEMRYDDQGKEINDFVLNKDPFNQSKILIAGKNFGCGSSREHAPWALLDFGITCVISSSYADIFFSNCFKNGILPIILEEEKIKELSEYANRQEEISIDLQEEKIVYGNNELKFEVDPFKKKCLLEGLDDIALSLKKSEKIEKFETNLKNEKPWVFND

SEQ ID NO: 179656 - protein, 230 aa, Unknown
  Bacterial polypetide isolated from the Sargasso Sea
MAKTLYDKLWSDHLVDQQEDGTSLIFVGRHLVHEVTSPQAFEGLRNSKRKVRNPNLTLAVADHNVPTTDRSKGISDKESKIQVDTLAANCKEFGIQLFGMDDKRQGIVHIIGPEQGFTQPGTVIVCGDSHTATHGAFGALAFGIGTSEVEHVLATQTLVQKKGKNFRINVNGQLPLGVTSKDVILQIIGKIGTAGGTGYVLEYAGDVITSLTVEQRMTICNMTIEAGARA

SEQ ID NO: 179657 - protein, 266 aa, Unknown
  Bacterial polypetide isolated from the Sargasso Sea
PAVAALSMEERITLCNMAIEGGARCGYVNPDDVTFDYLLGRSHAPTGEAWDRAVTWWRSLASGSDAVVDDEVVFDASSITPTVTWGITPGQGLGIQELIPAPEQLPAGDRPIAEEAYRYMDLKPGTAIAGLPVDVCFIGSCTNGRLSDLRAAAAVARGRMVADGIRAFVVPGSEQVARAAEAEGLDAVFIDAGFEWRQPGCSMCLAMNPDRLQGRQISASSSNRNFKGRQGSASGRTLLMSPAMVAAAAIHGRVTDVRTLLKPHAS

SEQ ID NO: 179658 - protein, 209 aa, Unknown; identical to SEQ ID NO: 179128
  Bacterial polypetide isolated from the Sargasso Sea

SEQ ID NO: 179659 - protein, 138 aa, Unknown
  Bacterial polypetide isolated from the Sargasso Sea
FILNDSRYKTSQILVTNENFGCGSSREHAVWALKDFGFDVIISPSFADIFYSNCFKNGVLPIILDIENIKKLLQFKSAIELDLESQTIIFGDESINFKIDSHRKIRLLEGLDDIDLTLKEDTKIENFEKKSTRISIFE

SEQ ID NO: 179660 - protein, 159 aa, Unknown
  Bacterial polypetide isolated from the Sargasso Sea
KEKNNDRRVAMERSLDYMGLKPNTKMTDIKIDKVFIGSCTNGRIQDLREAAKLLKDKKIAEHVNAMVVPGSGLVKIQAEQEGLDKVFKDSGFEWREPGCSMCLGMNEDQLKPRERCASTSNRNFEGRQGRGGRTHLVSPAMAAVAAIEGHLSDVRKFNR

SEQ ID NO: 179661 - protein, 198 aa, Unknown
  Bacterial polypetide isolated from the Sargasso Sea
MDKFKLIRSIPAYIPLMNIDTDKIIPKQFLKTIKRSGLGKSLFYEMRFDEKGNPIKGFILDQEPFKNSKILITGKNFGCGSSREHAPWALLDFGIKVIISESFADIFYNNCFKNGILPIVVKDETINELKDYSSRKENIEVKLEEQEIIYGNKSFKFELDSFKKKCLLEGLDDIALSLKKVKNITNFESQMSQNKPWL

SEQ ID NO: 179662 - protein, 131 aa, Unknown
  Bacterial polypetide isolated from the Sargasso Sea
LIAGKNFGCGSSREHAPWALMDFGITCVISSSYADIFYNNCFKNGILPITISEDQIKEISEYSNRKEEISVNLPEQTISFGNKEIKFEIDQFKKKCLIEGLDDIALSLEKSAKIVSYENKIKEAKPWIFND

SEQ ID NO: 179663 - protein, 89 aa, Unknown
  Bacterial polypetide isolated from the Sargasso Sea
MQSFTKHSGVVAAMDRSNVDTDQIIPKQFLKRIERTGFGQFLFNDWRFLSDGTPDPSFELNRPEAEEATILLARSNFGCGSSREHAPWA

SEQ ID NO: 179664 - protein, 289 aa, Unknown
  Bacterial polypetide isolated from the Sargasso Sea
MPYTIYDKIWNDHLVDEQSDGTSLLFVDRHLIHEVTSPQAFEGLRNSNRTVRQPSLTLAVADHNVPTTDRSKGISDEEARIQVEALENNCKEFGIQLFGMNDKRQGIVHITGPEQGFTQPGNIIVCGDSHTATHGAFGALAFGIGTSEVEHVLATQTLVQKKSKNFRINVNGSLPIGVTSKDVILQIIGKIGTAGGTGYVIEYAGNLISSLSVEQRMTICNMTIEGGARAGLIQPDEKIFNYLKDKPMSPKKENWDKAIEHWNKLKSDPDANFDKEISLEGSQIKPMVT

SEQ ID NO: 179665 - protein, 465 aa, Unknown
  Bacterial polypetide isolated from the Sargasso Sea
MKTLYDKLWEEHHVTQLDSGESLLYIDRHYLHEVTSPQAFEGLSKKNLKPWRLDANIATPDHNVPTTRGNNFTSDLINDEISKIQVVELDKNCNKFGIKQFDIQSNKQGIVHVIGPELGYTLPGMTIVCGDSHTSTHGALGCLAMGIGTSEVEHVLATQCLKVSKLKNMNVRFEGVPQVNVSSKDIVLYLIGKIGTAGGTGYAIEFSGSYIDKLSVEGRMTICNMAIEAGAKVGLIAPDETTIDYVKKNSFLDDELFNQAKQCWKSLRTDDKAVFDNEIEIDVSKIKPQVTWGTSPEMVVNFDDPIPTIIDSNEESKKNVELARSYMGIQNESKLSDLVFDKVFIGSCTNSRIEDLRQAAEIVKGKTIAENISEAIVVPGSGLVKEQAENEGLDKVFTDAGFIWRDPGCSMCLGMNPDQLKPHERCASTSNRNFEGRQGYLGRTHLMSPIMAAFTAINGTVGDPS

SEQ ID NO: 179666 - protein, 213 aa, Unknown
  Bacterial polypetide isolated from the Sargasso Sea
MKSNSEGLIIDGVVAHIDRDNIDTDQIIPTEYLKSIKKFGFEDYLFDGWRYKDDGKLGVTKEERIIDESFILNKEPYNESKILLSRDNFGCGSSREHAVWALRDFGIKAVIASSFGDIFYNNSFKNGLLPIILDKNEIEFLFSETKQNVLELSLDLEKKEIIYNQKCITFEVEKHLIDRIIFGLDDIDITFKDKDKIIDFEKNRISTRPWIFK

SEQ ID NO: 179667 - protein, 467 aa, Unknown
  Bacterial polypetide isolated from the Sargasso Sea
MSNTLYDKIWNDHLVHQQDDGTALLFVDRHLVHEVTSPQAFEGLRNSKRKVRHPNLTLAVADHNVPTTDRSKGISDKESKIQVDTLESNCKEFGVQLFGMNDKRQGIVHIIGPEQGFTQPGTVIVCGDSHTATHGAFGALAFGIGTSEVEHVLATQTLVQKKAKNFIINVNGKLPLGVTSKDVILQIIGKIGTAGGTGCVVEYAGDLIRSLSVEQRMTICNMTIEGGARAGLIAPDEKIFDYLKEKPMSPKGENWEKAINYWNSLKSDRDASFDKEIKLDASEILPMITWGTSPQDVIAIDDKVPNPESEKDEDRKNSIERALKYMGLKPDMAATDIKIDKVFIGSCTNGRIEDLREAAKILKDKKISSHVNAIVVPGSGLVKEQAEQEGLDKIFINSGFEWREPGCSMCLAMNADKLKPEERCASTSNRNFEGRQGRGGRTHLVSPGMAAAAAISGNLDDVRKYQN

SEQ ID NO: 179668 - protein, 201 aa, Unknown
  Bacterial polypetide isolated from the Sargasso Sea
MKKFNTLKSIPAYLPIVNIDTDMIIPKQFLKTIKRTGLGKNLFFEMRYDDQGKEINDFVLNQSPYNNSNILIAGKNFGCGSSREHAPWALLDFGITCVISSSYADIFYSNCFKNGILPIIIEEEKIKELSQYANRKEEISIDLKEEKIVYGNNEIKFKIDPFKKKCLLEGLDDIALSLKKSDKIEDFEKKLKIKKPWIFND

SEQ ID NO: 179669 - protein, 150 aa, Unknown
  Bacterial polypetide isolated from the Sargasso Sea
MSTPKTLYDKIWNDHLVSENEEGTSIIYIDRHLVHEVTSPQAFEGLKIANRSVRKPNFTLATADHNIPTTNRDEGISDPESKLQVDTLEENCKEYGITFLSMSDKRQGIVHIIGPEQGFTQPGMTIVCGDSHTSTHGAFGALAWGIELLK

SEQ ID NO: 179670 - protein, 376 aa, Unknown
  Bacterial polypetide isolated from the Sargasso Sea
CEEFGVTLFGINDPRQGIVHVIGPEQGITQPGMTIVCGDSHTATHGAFGALAFGIGTSEVEHVLATQTLAMAKPKTMKVEVVGDVSDGVGPKDIILGIIRKIGTGGGAGHVIEYVGDVIKNMSMENRMTICNMSIEGGARAGMIAPDETTFNYLKDKNFAPKNKDWNDAIREWSGLYSDNDAVFDKIVTINASDLEPSISWGTNPSQVIFVNDTIPYPEDFKDESDKEAASRALEYMDLQAGEKINEINLDRVFIGSCTNGRIEDLREAAQIVKGKKVAKTIGAMVVPGSTLVKNQAEEEGLDKIFIEAGFDWREAGCSMCLGMNPDILNPGERCASTSNRNYEGRQGAGGRTHLVSPKMAAAAALHGKFVDIRDL

SEQ ID NO: 179671 - protein, 205 aa, Unknown
  Bacterial polypetide isolated from the Sargasso Sea
MKKFTIIKGIAAVLPDINIDTDAIIPKQFLKTIHRKGLGKSLFYNERYTEGYNKNVDFILNKDPWSNSNIIIAGENFGCGSSREHAPWALLDFGIQCIISNSFADIFFNNSVKNGLLLIKLNKNEIQKLSALAMKKESFTVDLINQKIAVKNNEINFNVDPIIKDRLIHGYDDIEITLKNKQLIVDYENNKNKFHIWKNIVYEKQ

SEQ ID NO: 179672 - protein, 275 aa, Unknown
  Bacterial polypetide isolated from the Sargasso Sea
GTAGGTGYTIEFGGEVIKNLSIEGRMTVCNMAIEAGARAGLIAVDQKTLDYVKGRPFAPSGDMWARASEAWKTLVSDSNAKFDRTVLIDGSEIEPQVTWGTSPEMVAPVSGSIPDPALETDPTKKGNLEQALKYMGLKAGTEIKNIQLDYIFIGSCTNSRIEDLREAAQVVKDRKVAENIEVAMVVPGSGLVKKQAEEEGLDQIFTNAGIQWREPGCSMCLAMNSDQLGEGKHCASTSNRNFEGRQGFGGRTHLVSPAMAAAAAIHGHFVDVSKI

SEQ ID NO: 179673 - protein, 111 aa, Unknown
  Bacterial polypetide isolated from the Sargasso Sea
MKKFVVEEGLVMPLDRANVDTDFIIPKQFLKSIKRSGFGVNLFDEHRYLDKGVPDADNSNRPLNPDFVLNQARYKGCKILLARKNFGCGSSREHAPWALDDYGFRVILAPS

SEQ ID NO: 179674 - protein, 203 aa, Unknown; identical to SEQ ID NO: 179554
  Bacterial polypetide isolated from the Sargasso Sea

SEQ ID NO: 179675 - protein, 219 aa, Unknown
  Bacterial polypetide isolated from the Sargasso Sea
MPYTIYDKIWNEHLVHEQEDGTSLLFVDRHLIHEVTSPQAFEGLRNSKRKVRQPKLTLAVADHNVPTTDRTKGISDHESKIQVETLDKNCKEFGIQIFEMNDKRQGIVHIIGPEQGFTQPGTIIVCGDSHTATHGAFGALAFGIGTSEVEHVLATQTLVQKKSKNFRINVNGNLPIGVTSKDVILQIIGKIGTAGGTGYVIEYAGDLISNLSVENRMTI

SEQ ID NO: 179676 - protein, 467 aa, Unknown
  Bacterial polypetide isolated from the Sargasso Sea
MSYSEPRTLFEKIWSRHEILTRDDGVSLLSIDRHLCHEGSFHAFDKLKMENRTVRCPELTVAIADHYVSTSFPEKGNEVEALRVPIEKLEINSKDAGIRLYGVGSKEQGIVHVVGPEQGLTIPGITLVCGDSHTATHGAFGCLAFGIGASEVAHVLATQTLWQTKPKTMRININGSLSDGVVAKDIILHLISVIGANGASGHMIEYAGSTIRNLSMEGRMTICNMSIEAGGRAGMVESDQKTFDYLKGRKHAPKLKDWDLAIKDWKTLGTEPGAIFDKEVTVDAGEIAPSLTWGNSPEETLPVTGYIPSPEDESDISKRETLEGTLEYMGLAPGQKLTDITIDRVFIGSCTNSRIEDLRSAARIAQGKKALVPAIIVPGSTLIKEQAEAEGLDKLFLDAGFEWRSTGCSMCVGMNGDITPPGERCASTSNRNFKGRQGPGSRTHLMSPAMAAAAAISGRVTDARDFS

SEQ ID NO: 179677 - protein, 442 aa, Unknown
  Bacterial polypetide isolated from the Sargasso Sea
KIWNEHLVYQQEDGTSLLFVDRHLIHEVTSPQAFEGLRNSNRNVRQPSLTLAVADHNVPTTDRSKGIDDKESKIQVDTLEANCKQFGIKLFGMNDKRQGIVHIIGPEQGFTQPGTVIVCGDSHTATHGAFGSLAFGIGTSEVEHVLATQTLVQKKAKNFRINVNGKLPLGVTSKDVILQIIGKIGTAGGTGCVIEYSGSLISSLSVEQRMTICNMTIEGGARAGLIEPDQKIFDYLKDKPMSPKKENWDKALNNWTNLKSDNDAKFDKEISLEGREILPMVTWGTSPQDVITIEGKVPNPKNEKDEDKKNSMERSLRYMGLKPDTAAKDIKIDKVFIGSCTNGRIEDLREAAKILKNKNKASHVQAMVVPGSGLVKQQAEQEGLDKIFINSGFEWREPGCSMCLAMNADKLKPEERCASTSNRNFEGRQGRGGRTHLVSPGM

SEQ ID NO: 179678 - protein, 198 aa, Unknown
  Bacterial polypetide isolated from the Sargasso Sea
MAYEKFNILSSTAVPLNIDNVDTDQIIPARFLKATERKGFGDNLFRDWRYNSDNTSVDSFPLNNKKYEGKILVAGKNFGCGSSREHAVWAIYDYGFRAVVSSFFADIFKNNCLNIGVLPVQVSDSFLSEIFSEIDENSKNVFEINLDNQEFKIKSSSKKEKFKISTYKKSNMSNGFDDIDYLINKKDQISAFANKLRY

SEQ ID NO: 179679 - protein, 172 aa, Unknown
  Bacterial polypetide isolated from the Sargasso Sea
PGQVIAVNEPIPAPESFSDLMEQQSARKALAYMDLQPGQKLSDVAIDKVFIGSCTNSRIEDLRAAAAIARGRKVAAGVQALVVPGSEQVKAQAEAEGLDKIFIEAGFEWRLPGCSMCLAMNNDRLQPGERCASTSNRNFEGRQGRAGRTHLVSPAMAAAAAVTGRFADIRAL

SEQ ID NO: 179680 - protein, 172 aa, Unknown
  Bacterial polypetide isolated from the Sargasso Sea
MVTPVGSKIPTPDTVTNEQEYMDTLNYMGLEPGVEINSIPLDKIFIGSCTNSRIEDLRDASQVVKGEKISSSIKQAIVVPGSGLVKAQAEAEGLDKVFIDAGFEWRDPGCSMCLGMNDDFLQPYERCASTSNRNFQGRQGDKGRTHLVSPAMAAVAGIKGHFYNVKEFMNEK

SEQ ID NO: 179681 - protein, 216 aa, Unknown
  Bacterial polypetide isolated from the Sargasso Sea
MKSWDKAVEYWSKLNSDNNANFDKEVTLKGEDIQPMVTWGTSPQDVITIDGKVPNPSDEKDNDRRNSIERSLKYMGLKPNTLIKDIKIDKVFIGSCTNGRIEDLRDAAKILKDKKIASHVKAMVVPGSGLVKEQAEQEGLDKIFLNSGFEWREPGCSMCLAMNADKLKPEERCASTSNRNFEGRQGRGGRTHLVSPAMAAAAAISGNFDDVRKYKN

SEQ ID NO: 179682 - protein, 201 aa, Unknown
  Bacterial polypetide isolated from the Sargasso Sea
MKKFNKLKSIPAYIPIVNIDTDMIIPKQFLKTIKRTGLGKNLFFEMRYDDEGKEISDFVLNNEPYNQSKILITGKNFGCGSSREHAPWALLDFGITCVISSSYADIFYNNCFKNGILPITIKEEVIKELSEYSTRKEEISINLEDQSIKFGNNEIKFEIDEFKKKCLLEGLDDISLSLAQSSKISAYESKIKSSKPWIFND

SEQ ID NO: 179683 - protein, 465 aa, Unknown
  Bacterial polypetide isolated from the Sargasso Sea
MGKTLFDKVWDSHVVKKIDDGPDVLFIDRHMVHEVTSPVAFLGLKNRNIKVLFPEKTFATADHNTPTRNQHLPVKDILSSKQLKALEINAKYHGISYWGLGHEKNGIVHVIGPEHGITLPGATIVCGDSHTSTHGAFGAIAFGIGTSEVEMVLSTQCIMQPKPKKMRITINGKLNKAVTPKDVALYIISQLSTSGATGYFVEYAGEVFSDMTMEGRMTVCNLSIEMGARGGMIAPDKKTFNYIQGREFTPKNDDWNKAMKYWSNLKTDDEAIFDKEISFDGSKIEPMITYGTNPGMGMSINGGIPNSNQHEGNKKTFLKSLEYMDYKEGEKVLGKNIDFVFLGSCTNGRIEDFRAFTEVVKGKKKSPNVTAWLVPGSHKVEKAIKDEGLLSILNESGFELREPGCSACLAMNDDKIPSGKYAVSTSNRNFEGRQGPGSRTLLASPIVAAAAAITGKITDPRELIT

SEQ ID NO: 179684 - protein, 201 aa, Unknown
  Bacterial polypetide isolated from the Sargasso Sea
MKKFITLKSIPAYLPIVNIDTDMIIPKQFLKTIKRTGLGKNLFFEMRYDDNGKKIEDFILNKEPFNKSNILITGKNFGCGSSREHAPWALLDFGITCVISQSYADIFYNNCFKNGILPITISEEEIKELSEYSIRKEEISIMLEDQKILFGNKEIKFEIDQFKKKCLIEGLDDIALSLEQKTKIEIFEKDLKSSKPWIFND

SEQ ID NO: 179685 - protein, 180 aa, Unknown
  Bacterial polypetide isolated from the Sargasso Sea
MNKSISNIFSGEAVFLDKANVDTDQIIPKQFLKSIKRTGFGPNLFDAWRYLDKGDLNSDNSKRKLNPDFILNHDLYKSCNILITRENFGCGSSREHAVWALTDYGFTTIIAPSFADIFKNNSYKNGLLLIEIDKEKIDEIFKQITEKKTINIEVDVHNQFIYLEEKHSRLNWMILRKSFF

SEQ ID NO: 179686 - protein, 420 aa, Unknown
  Bacterial polypetide isolated from the Sargasso Sea
NRKVRQPNLTLAVADHNVPTTDRTKGIEDEDSKIQVETLEKNCNEFGIELFGMNDKRQGIVHIIGPEQGFTQPGSIIVCGDSHTATHGAFGALAFGIGTSEIEHVLATQTLLQKKSKNFIINVNGNLPTGVTSKDVILQIIGKIGTAGGTGYVIEYSGNLISSLSVEQRMTICNMTIEGGARAGLIQPDEKIFKYLKNKPMSPKNNNWDKALEYWSNLKSDSNANFDKEINIEGSEIKPMVTWGTSPQDVVEIDGKVPNPENEIDPDRKNSINRSLNYMGLKPNMKIKDIKIDKVFIGSCTNGRIEDIREAAKILKNKKIASHVNGMVVPGSGLVKEQAEQEGLDKIIKESGFEWREPGCSMCLAMNSDKLKPEERCASTSNRNFEGRQGRGGRTHLVSPAMAAAAAISGNLDDVRKYQN

SEQ ID NO: 179687 - protein, 201 aa, Unknown
  Bacterial polypetide isolated from the Sargasso Sea
MKKFISIKSIPAYLPIVNIDTDMIIPKQFLKTIKRTGLGKGLFFEMRYDQNENLVEDFILNKSPYNKSEILIAGKNFGCGSSREHAPWALLDFGIKCIISSSYADIFYNNCFKNGILPIMITEEEIKEISDYSKRKEEIFVNLPDQKIIFGNKEIKFEIDEFKKKCLIEGLDDIALSLEKSEKIISFEKKIKSTKPWIFND

SEQ ID NO: 179688 - protein, 207 aa, Unknown
  Bacterial polypetide isolated from the Sargasso Sea
VQFWKTLYSDKDCKFDKEINIDGKNIEPLVTWGTSPQDFSPVTGIVPDPENEKNEDRKMAMKRSLEYMGLKANTKISDIKIDKIFIGSCTNGRIEDLRLAADLLKGKRIADNVSAMVVPGSGLVKEQAEKEGLDKIFKNAGFEWREPGCSMCLGMNPDQLKPKERCASTSNRNFEGRQGRGGRTHLVSPGMAIAAAIKGRLTDVREI

SEQ ID NO: 179689 - protein, 202 aa, Unknown
  Bacterial polypetide isolated from the Sargasso Sea
MEKFNNLKSIPSYLSLQNIDTDMIIPKQFLKTIKRTGLGKSLFYEMRYDENGNKISDFILNKEPYNKSKILLAGKNFGCGSSREHAPWALSDFGIKSVISSSFADIFYNNCFKNGILPIKIDEKIVVELAEYCKRKEEIEISLEKQEIKYGNKVAKFELDAFKKKCLMEGLDDIALSMEKISKIDDYEKKLQNTKPWVLNNV

SEQ ID NO: 179690 - protein, 474 aa, Unknown
  Bacterial polypetide isolated from the Sargasso Sea
MTTPSTSIAPKTLYQKVWDAHVVATPEGEAPIIYVDRHLVHEVTSPQAFSGLKVAGRKLRAPEKTFATMDHNTSTRSASLDALSPMARTQVETLAQNCKDFGVRLYDIHHPNQGIVHVMGPELGITLPGTVIVCGDSHTATHGAFGALAFGIGTSEVEHVLATQTLRQLKAKTMKIEVRGQVTDGVTAKDIVLAIIGKIGMDGGTGYVVEFCGEAIEALSMEGRMTVCNMAIEMGAKAGMVAPDQTTFDYLEGREFAPKGEDWVEAVTAWKTLKTDVGAEFDATVVLDAADIAPQLTWGTNPGQVVAIDAPVPNPADEANPTIRASMEKALDYIGLTAGTPMTDVAINKVFIGSCTNSRIEDLRSAAKQAKGRKVASGVTAIVVPGSGQVKAQAEAEGLDKIFIEAGFEWRLPGCSMCLAMNDDRLEAGDRCASTSNRNFEGRQGRGSRTHLVSPAMAAAAAIAGHFVDIRKPY

SEQ ID NO: 179691 - protein, 202 aa, Unknown
  Bacterial polypetide isolated from the Sargasso Sea
MDKFHSLKGIAAPLPIVNIDTDMIIPKQFLKTIKRTGLGVSLFYEMRYDNDGNLIKDFVLNTSPFDQSKILVAGDNFGCGSSREHAPWSLKDFGIRSVISTSFADIFYNNCFQNGILPIVVSPENLDQLMTAAKNQIEFTIDLPEQIIKAGNHTINFEIEEFRKERLLQGLDDIGITLGYQDKINAYEEDKKNKKPWLFKKN

SEQ ID NO: 179692 - protein, 380 aa, Unknown
  Bacterial polypetide isolated from the Sargasso Sea
LRNNCKEFGITLFDLGDERSGIVHVIGPEQGLTLPWSTIVCGDSHTATHGAFGALAFGIGTSEVEHVLATQTLQQKKPKTMLVEVEGMLPKNVTPKDIILSIIGKIGTAGGTGYVIEYAGDAIRSMSMEGRMTLCNMTIEAGARAGMVAPDETTFEYLKDKPFSPKGDAFFDAISVWKKLPSDEDAEFDISVNINAQDVLPQVTWGTSPGMVTDINNKVPDPAKIQNPSERKSVENALKYMDLKANIPIKEISIDRVFIGSCTNSRIEDLRSVAEFVKGRKVSDEVSAMIVPGSGLIKQQAEQEGLDEIFIAAGFEWRQPGCSMCLAMNDDILKPGERCASTSNRNFEGRQGKGGRTHLVSPLMAAAAAVAGHFVDPRTY

SEQ ID NO: 179693 - protein, 138 aa, Unknown
  Bacterial polypetide isolated from the Sargasso Sea
MPNTLYDKIWKDHLVDQQNDGTALLFVDRHLVHEVTSPQAFEGLRNTNRKVRHPKLTLAVADHNVPTTDRSKGISDHESKIQVDTLESNCKEFGVQLFGMNDKRQGIVHIIGPEQGFTQPGTVIVCGDSHTATHGAFG

SEQ ID NO: 179694 - protein, 465 aa, Unknown
  Bacterial polypetide isolated from the Sargasso Sea
MSKTLYDKIWENHLVHEQSDGTSLIYVDRHLVHEVTSPQAFEGLRLQKRKVRRPELTLAVPDHNVPTTDRSKGINDADSRIQVETLRKNCKDFGVELFDVNDKRQGIVHIIGPEQGFTQPGTVIVCGDSHTATHGAFGALAFGIGTSEVEHVLATQTLMQKKSKNLRINVNGNLPKGVTAKDVILKIIGTIGTAGGTGYVVEFAGDVIKSLSMEERMTVCNMTIEAGARAGLIAPDEKTFSYLKGKTMSPKGENWDKAVEFWKTLYSDKDCKFDKEVNIDGKNIEPLVTWGTSPQDVSPVTGVVPDPEKEKNEDRKMAMKRSLDYMGLKANTKISDIKIDKIFIGSCTNGRIEDLRLAADLLKGKKIAENVSAMVVPGSGLVKEQAEKEGIDKIFKEAGFEWREPGCSMCLGMNPDQLKPRERCASTSNRNFEGRQGRGGRTHLVSPGMAIAAAIKGHLTDVREI

SEQ ID NO: 179695 - protein, 164 aa, Unknown
  Bacterial polypetide isolated from the Sargasso Sea
MEKFNNLRSIPSYLSLQNIDTDMIIPKQFLKTIKRTGLGKSLFYEMRYDENGKKNVNFILNKEPYNKSKILLAGKNFGCGSSREHAPWALSDFGIKCVISASFADIFYNNCFKNGILPIKIDDKIVIELAEYSNRKEEIEISLERQEIKYGNKVSNFELDPLKR

SEQ ID NO: 179696 - protein, 467 aa, Unknown
  Bacterial polypetide isolated from the Sargasso Sea
MPKTLYDKIWSDHLVHQQDDGTSLLFVDRHLIHEVTSPQAFEGLRNSKRDVRHPNLTLAVVDHNIPTTDRSKGIDDNDSRIQVETLEKNCKDFDIKLFGMNDKRQGIVHIVGPEQGFTQPGTVIVCGDSHTATHGAFGALAFGIGTSEVEHVLATQTLVQKKAKNFRINVNGKLPLGVTSKDVILQIIGKIGTAGGTGCVLEYAGSVISNLSVEQRMTICNMSIEGGARAGLIQPDEKIFNYLKDRPMSPKKENWEKALDYWSKLKSDSDAKFDKEINLKGDEIAPMVTWGTSPEDVVSINGKIPNPENEKNIDKKNSINRSLDYMGLKPDVKVQDIKIDKVFIGSCTNGRIEDLREAAQILKNKKKASHVHGMVVPGSGLVKEQAEQEGLDKIFIESGFEWREPGCSMCLAMNADKLKPQERCASTSNRNFEGRQGRGGRTHLVSPGMAAAAAIAGNLDDVRKYQN

SEQ ID NO: 179697 - protein, 201 aa, Unknown
  Bacterial polypetide isolated from the Sargasso Sea
MKKFTSLKSIPAYLPIVNIDTDMIIPKQFLKTIKRTGLGKNLFHEMRYDDDGKNIDNFILNKSPYNNSKILIAGNNFGCGSSREHAPWALLDFGITCVISSSYADIFYNNCFKNGILPIILDEEKIKELAEYSKRKEEIEIDLKEEKILFGNNELKFKIDPFKKKCLIEGLDDIALSLEKSSHINEFEKKVKSVRPWIFND

SEQ ID NO: 179698 - protein, 190 aa, Unknown
  Bacterial polypetide isolated from the Sargasso Sea
NLEGKDIKPMVTWGTSPQDVLTIDENVPSPESETDLDKKNSIERSLKYMGLKPNTKIKDIKIDKVFIGSCTNGRIEDLREAAKILKDKKIAGHVNAMVVPGSGLVKQQAEQEGLDKIFINSGFEWREPGCSMCLAMNADKLKPEERCASTSNRNFEGRQGRGGRTHLVSPGMAAAAAISGNLDDVRKYQN

SEQ ID NO: 179699 - protein, 201 aa, Unknown
  Bacterial polypetide isolated from the Sargasso Sea
MQKFNKLKSIPAYLPIVNIDTDMLIPKQFLKTIKRTGLGKNLFFEMRYDDKGNIIKEFILNQVPFNQSKILIAGKNFGCGSSREHAPWALLDFGITCVISSSYADIFYNNCFKNGILPIILDDEKIKQISEYSNRKEEIEVDLQNQKILFGNNEIGFDIDSFKKKCLLEGLDDIALSLEKTEKIISFEKNLKNSKPWIFND

SEQ ID NO: 179700 - protein, 220 aa, Unknown
  Bacterial polypetide isolated from the Sargasso Sea
MPPPSPAASPIFARCNYEENKMTGFKQHKGIVVPLDSANVDTDAIIPKQFLQKVNRIGFGKHLFHDWRFLDDAGQQPNPEFVLNQPQFAGASILLARENFGCGSSREHAPWALADYGFKTIIAPSFADIFYGNAINNGMVPVRLKEEEVEALFQLVAAQPGIEIEVDLEANQVRAGSLCFGFEIDEFRRYCLLNGLDAIGLTLQHEAAISAFEAKQPSWI

SEQ ID NO: 179701 - protein, 225 aa, Unknown
  Bacterial polypetide isolated from the Sargasso Sea
MGYTIYDKLWNEHLIRSYDDGDSLIYIDRHFLHEVTSPQAFEGLKKKSLKPWRINANIATPDHNVPTTRNNKFSIENIEDNISKLQVIELDKNCNDFGIKQFNINSNNQGIVHVIGPELGLTLPGMSIVCGDSHTSTHGAFGCLAMGIGTSEVEHVLATQSLKVRKLKNMRINFEGSIQKGVSSKDIILYLIRTIGTAGGTGYAVEFAGSYIRNISMEATNDNMQ

SEQ ID NO: 179702 - protein, 106 aa, Unknown
  Bacterial polypetide isolated from the Sargasso Sea
MPKTLYDKLWDSHEVAQREDGSFLLYIDRHLIHEVTSPQAFEGLKMAGREPWRVSSNIATPDHNVPTTNREKGIEGIEDEVSKLQVTTLDKNCSDLGILQFDILDK

SEQ ID NO: 179703 - protein, 213 aa, Unknown
  Bacterial polypetide isolated from the Sargasso Sea
MKSNSEGLIIDGVVAYIDRDNIDTDQIIPTEYLKSIKKFGFEDYLFDGWRYKDDGKLGITKDQRVIDENFILNKNPFNESKILLTRDNFGCGSSREHAVWALRDFGIKAVIASSFGDIFYNNSFKNGVLPIKLEKKEIDFLFDQTQQKVLELSINLQKKEINCGEKTISFHVDKHLIDRIIYGLDDVDITLKEKDKIFDFERTRIEERPWIFK

SEQ ID NO: 179704 - protein, 467 aa, Unknown
  Bacterial polypetide isolated from the Sargasso Sea
MKTLYDKLWEEHHVTQLDSGESLLYIDRHYLHEVTSPQAFEGLIKKNLKPWRLNANIATPDHNVPTTRGNNFNSESITDEISKIQVVELDKNCNKFGIKQFDIESNKQGIVHVIGPELGFTIPGMTIVCGDSHTSTHGALGCLAMGIGTSEVEHVLATQCLKVSKLKNMNVRFEGEVDEHVSSKDIVLYLIGQIGTAGGTGYAIEFSGSYISSISVEGRMTICNMAIEAGAKVGLIAPDNKTIEYVKSKSFLDEDTFNQAKEYWKTLKSDDDAKFDKEITIDVSKIKPQVTWGTSPEMVLNYDESIPTVFDTNDENKKNVELARDYMGIENETKLSDLTFDKVFIGSCTNSRIEDLRQAAEIVKGKTIASNISEAIVVPGSGLVKEQAENEGLDKVFTDAGFIWRDPGCSMCLGMNPDQLKPYERCASTSNRNFEGRQGYLGRTHLMSPIMAAYTAINGTIGDPYEI

SEQ ID NO: 179705 - protein, 216 aa, Unknown
  Bacterial polypetide isolated from the Sargasso Sea
MEKFTVHTGVVAPLDRENVDTDAIIPKQFLKSIKRTGFGPNAFDEWRYLDHGEPGQDNSKRPLNPDFVLNQPRYQGASVLLARKNFGCGSSREHAPWALQQYGFRAIIAPSFADIFFNNCYKNGLLPIVLTEQQVDHLFNETVAFNGFEVTVDLDAQVVRTGDGREYPFEIAAFRKYCLLNGFDDIGLTLRHADKIRQFEAERLVKQPWLNTKLVG

SEQ ID NO: 179706 - protein, 260 aa, Unknown
  Bacterial polypetide isolated from the Sargasso Sea
ISSLSVEQRMTIANMTMEGGARAGLIEPDTKIFNYLKGKPMSPKGESWDKAIEYWSKLKTDKNAYFDKEITLDGVEIKPMVTWGTSPQDVVEIDGKVPNPDNESDEDRKNSITRSLNYMGLKPNTNIKDIKIDKVFIGSCTNGRIEDLRDAAKILKDKKIASHVNAIIVPGSGLVKEQAEQEGLDKIFKQSGFEWREPGCSMCLAMNADKLKPEERCASTSNRNFEGRQGRGGRTHLVSPGMAAAAAISGNLDDVRKYEN

SEQ ID NO: 179707 - protein, 140 aa, Unknown
  Bacterial polypetide isolated from the Sargasso Sea
LKPDVAMKDLKIDTVFIGSCTNGRIEDLREAAQILKDKKKAAHVHAMVVPGSGLVKEQAEQEGLDKIFINSGFEWREPGCSMCLAMNADKLKPEERCASTSNRNFEGRQGRGGRTHLVSPGMAAAAAIAGNLDDVRKYQK

SEQ ID NO: 179708 - protein, 398 aa, Unknown
  Bacterial polypetide isolated from the Sargasso Sea
RSKGINDEDSRIQVETLRKNCKDFGVELFDVNDKRQGIVHIIGPEQGFTQPGTVIVCGDSHTATHGAFGALAFGIGTSEVEHVLATQTLMQKKSKNLRINVNGNLPKGVTAKDVILKIIGTIGTAGGTGYVVEFAGDVIKSLSMEERMTICNMTIEAGARAGLIAPDEKTFDYLKGRTMSPKDDNWTKAVEFWKTLYSDKDCKFDKEINIDGKNIEPLVTWGTSPQDVSPVTGVVPDPDNEMNEDRKMAMKRSLDYMGLKANTKICDIKIDKIFIGSCTNGRIEDLRLAAELLKGKKIAESVSAMVVPGSGLVKEQAEKEGIDKIFKDAGFEWREPGCSMCLGMNPDQLKPKERCASTSNRNFEGRQGRGGRTHLVSPGMAIAAAIKGRLTDVRENIK

SEQ ID NO: 179709 - protein, 400 aa, Unknown
  Bacterial polypetide isolated from the Sargasso Sea
TTTDREKGIDNEESRIQVEALDKNAQEFGVHYYPVSDIRQGIVHIVGPEQGWTLPGMTVVCGDSHTATHGAFGALAHGIGTSEVEHVLATQTLIQKKSKNMKVEIKGKLRPGVTAKDITLSVIGATGTAGGTGYVIEYCGEAIRDLSMEGRMTVCNMAIEGGARAGLIAPDEKTFEYCKGRPHAPKGAAWEQAVEYWKTLFTDEGADFDKIIEINGDDIAPVVTWGTSPEDVLPITEIVPAPENFQGGKIEAVKRSLDYMGLTAGQKLTDIKIDTVFIGSCTNGRIEDLRAAAKILEGKKVKDGMRAMVVPGSGLVRAQAEDEGLADIFKQAGFEWRLAGCSMCLAMNPDQLSEGERCASTSNRNFEGRQGYKGRTHLVSPAMAAAAAVTGHLTDVREMI

SEQ ID NO: 179710 - protein, 158 aa, Unknown
  Bacterial polypetide isolated from the Sargasso Sea
KRKSTEDALNYMGLKPNTNIEDIKIDTVFIGSCTNGRLEDLIAASKVIQGNKVPSNVNAIVVPGSQIVKIKAEKLGLDKIFKDAGFDWRESGCSMCLAMNPDKLSPGERCASTSNRNFEGRQGKGGRTHLVSPVMAAAAAINGRFTDIRSLNLDLGEY

SEQ ID NO: 179711 - protein, 274 aa, Unknown
  Bacterial polypetide isolated from the Sargasso Sea
TEGGAGYVIEYTGECIRSLGMEQRMTVCNMSIEAGARAGMIAPDAVTFDYLRGRDFVPRDFEKAVQEWQKLPSDEGATYDRVEVFESADIVPQVTWGTNPAQVVGVDAAVPNVGAMSDPSERSSGEKALEYMGLSSGTQITDIPLERVFIGSCTNSRIEDLRAAAAVVRGYHVSRDVHAMVVPGSGRVKRQAEHEGLDKLFVAAGFEWREAGCSMCLAMNPDTLSAGQRCASTSNRNFEGRQGQGGRTHLVSPAMAAAAAVEGHFVDVRKWQYQ

SEQ ID NO: 179712 - protein, 305 aa, Unknown
  Bacterial polypetide isolated from the Sargasso Sea
KKSKNLRINVNGNLPKGVTAKDVILKIIGTIGTAGGTGYVVEFAGDVIKSLSMEERMTVCNMTIEAGARAGLIAPDEKTFSYLKGKTMSPKSENWTKAVEFWKTLYSDKDCKFDKEVNIDGKNIEPLVTWGTSPQDVSPVTGVVPDPEKENNEDRKMAMKRSLDYMGLEANTKISDIKIDKIFIGSCTNGRIEDLRLAADLLKGKKIADNVSAMVVPGSGLVKEQAEKEGIDKIFKEAGFEWREPGCSMCLGMNPDQLKPKERCASTSNRNFEGRQGRGGRTHLVSPGMAIAAAIKGHLTDVREI

SEQ ID NO: 179713 - protein, 388 aa, Unknown
  Bacterial polypetide isolated from the Sargasso Sea
KIQVETLEKNVKEFGIKLFGMNDKRQGIVHIIGPEQGFTQPGTVIVCGDSHTATHGAFGALAFGIGTSEVEHVLATQTLVQKKSKNLRINVNGKLSIGVTSKDVILQIIGKIGTAGGTGYVIEYAGDLVSSLSMEQRMTICNMTIEGGARAGLIKPDEKTFKYLKDRPLSPKKENWDKALNYWSKLYSDDNAIFDKEVKLDGKDIKPMVTWGTSPQDVVPIDGKVPNPKDITDPDKKSSIERSLKYMGLKPDINVKDIKIDKVFIGSCTNGRIEDLREAAKILKDKKIAKHVNAMVVPGSGLVKEQAEQEGLDKIFISSGFEWREPGCSMCLAMNADKLKPEERCASTSNRNFEGRQGRGGRTHLVSPAMAAAAAVSGNLEDVRKYSN

SEQ ID NO: 179714 - protein, 201 aa, Unknown
  Bacterial polypetide isolated from the Sargasso Sea
MKKFTNLKSIPAYLPIVNIDTDMIIPKQFLKTIKRTGLGKSLFFEMRYDQDGNEIKDFILNKDPYKNSKILIAGKNFGCGSSREHAPWALLDFGITCVISSSYADIFYNNCFKNGILPITISEDKIKELAEYSTRKEEIKVDLIEQKISYGNNEIKFDIDDFKKECLIEGYDDIALSLNHKSKIQEFENKIKSERPWIFND

SEQ ID NO: 179715 - protein, 418 aa, Unknown
  Bacterial polypetide isolated from the Sargasso Sea
NRPVHRPEATIAVADHNVPTINRQNIEDPQSKIQVETLAKNTKEHGIQYFDLMDQRQGIVHIIGPEQGITQPGMTIVCGDSHTSTHGAFGALAFGIGTSEVEHVLATQTIVQNPAKNMRISVNGDLPFGVNSKDLILYIIGKIGTAGGTGHVIEYAGSSIMGLSMEGRMTICNMSIEAGARAGLISPDQTTFNYIKGRPYAPSADHWDQAVEYWSSLPSDNDANYDHEIVIDSSEIDPMVTWGTSPEDVVSVKGLVPNPSSAQTENKKKSIERSLEYMGLKPGTKITDIKLDKIFIGSCTNGRIEDLRKVASIVKDKKIASHVQAMIVPGSGLVKKQAEEEGIDIILKDAGFEWREAGCSMCLGMNPDQLKPGERCASTSNRNFEGRQGRGGRTHLMSPELAAASAITGNISDIRDFT

SEQ ID NO: 179716 - protein, 453 aa, Unknown
  Bacterial polypetide isolated from the Sargasso Sea
GYHLVDEQVDGTCLIYIDRHLVHEVTSPQAFEGLRNTNRKVRRPKNTFAVADHNVPTTDRSKGIENLESRIQVETLEQNCKDFDITLFPLLDKRQGIVHIVGPEQGITQPGMTIVCGDSHTATHGAFGSLAFGIGTSEVEHVLATQTLIQKPAKNMLININNDVLSGVTAKDIILHIIGHIGTAGGTGYVIEYAGKAIENLSMEGRMTICNMSIEAGARAGLIAPDQTTFDYIKGRPYAPQGDDWDNALKFWKSLPSDKNAKYDKEININAEEIAPQITWGTSPQDVVPINGKVPNPSYIKDVNRKKSIERSLEYMGLEPNQEIEKIKIDKVFIGSCTNGRIEDLREVARVVKGKKVSVDAMIVPGSGLVKEQAEKEGLDKIFIEAGFDWREPGCSMCLAMNPDQLKPKERCASTSNRNFEGRQGREGRTHLVSPTVAAASAIKGTFAQESDL

SEQ ID NO: 179717 - protein, 304 aa, Unknown
  Bacterial polypetide isolated from the Sargasso Sea
KNFDVSVSGRLSEGVYAKDLILAIIGQLGTAGATGHTIEFRGDVVKALSMESRMTLCNMAIEAGARAGLVGVDEITLDYVSGRPFSPQGALWNSALEYWSTLVTDDGAVFDSKIELDASLLGPQVSWGTSPEMVLPVGGAVPNPDLISDPVKCEATRLSLDYMGLRADQPITDIALDRIFIGSCTNARIEDLRAAAKVLKGRKISKRIKEAIAVPGSGLVKKQAEKEGLADIFIDSGFQWRDAGCSMCLGMNPDQLGEQEHCASTSNRNFEGRQGYRGRTHLVSPAMAAAAALEGSFVDVRTLM

SEQ ID NO: 179718 - protein, 361 aa, Unknown
  Bacterial polypetide isolated from the Sargasso Sea
LYIDRHLVHEVTSPQAFEGLRMSGRKVRRPEFTLATADHNVPTMDRDKGIADPDSKLQVETLERNASENNITYLPMSDKRQGIVHIVGPEQGFTQPGMTIVCGDSHTSTHGAFGALAWGIGTSEVEHTLATQTLIQTKAKNMCIKITGEVVDGVTAKDIILAIIKKIGTAGGTGYVIEYTGDVIKNLSMEGRMTVCNMSIEAGARAGLISPDEKTWEYLKGRPLAPSGEEFETAIKYWQSLATDEGAQYDEIVEIKADEIIPQVTWGTSPEDVVSIDGYVPDPKNASSDEKKISIERALDYMGLEPNTPINEIEVNKVFIGSCTNGRIEDLRAVSKIAKGRKVEKNVHAMIVPGSGLVKEQ

SEQ ID NO: 179719 - protein, 270 aa, Unknown
  Bacterial polypetide isolated from the Sargasso Sea
QARIYWSQLENNKKVGFRFHHISTDEVYGDLPHPDKYLYVGSNPISQTRNKAKPQKHQLGSTLFTENTSYAPSSPYSASKASSDHLVRAWNRTYNLPTIVTNCSNNYGPFHFPEKFIPLIILNCLQGKPLPVYGNGQQIRDWLYVEDHARALVLVATTGEIAETYNIGGHNEKRNIEIVTIICELLEKLAPRKPKGIKHYKDLINFVKDRAGHDLRYAINASKIADQLNWKPVETFETGIKKTVQWYIDNQDWCQNVQDGSYQGERLGLV

SEQ ID NO: 179720 - protein, 321 aa, Unknown
  Bacterial polypetide isolated from the Sargasso Sea
VTGGAGFIGANFALDWLAHVDEPVVNIDKLTYAGNLENLASLNGDARHVFVQADIGDSAKLAQLLAQHQPRAVVNFAAESHVDRSIHGPEDFIQTNVVGTFRLLEAVRAYWHGLQGEAKSGFRFLHVSTDEVYGTLAPTDPAFTEEHNYEPNSPYSASKAASDHLVRAWHHTYGLPVLTTNCSNNYGPLHFPEKLIPLVIVNALAGKPLPIYGDGMQVRDWLYVRDHCSAIRRVLEAGQLGETYNVGGWNEKANIDIVKTVCSLLDELRPRADGKTYAEQITYVTDRPGHDRRYAIDARKLERELGWKPAETFETGIRKTV

SEQ ID NO: 179721 - protein, 242 aa, Unknown
  Bacterial polypetide isolated from the Sargasso Sea
GTLNLLNVSRNFFDSLSARNREGFIFHHISTDEVYGDLEINDPPFKEINRYQPNSPYSASKASSDHLVRAWNRTYGLPTLVSNCSNNYGPFQCIEKLIPMTITNIIKGQKIPIYGNGLQIRDWLHVNDHVDALIKIVLNGKSNETYNIGTKNEKTNIEVIKKICEIMDSIHPKKISIDSYKNLIDFVEDRPGHDKRYSIDPTKINNQLGWQGNIDFEEGLKNTIQWYIDNQNWWQSEEDFIK

SEQ ID NO: 179722 - protein, 311 aa, Unknown
  Bacterial polypetide isolated from the Sargasso Sea
SNFIHKILQKDSSIYIINLDKLTYAGNLMNLSSISTKRYTFVRGDICDKGLVKSLFNEYNFQSVVHFAAESHVDRSIDGPSAFIQTNIVGTLNLLEHSKKFFLKSKNKDFKFLHVSTDEVYGSLGNNGKFLENTPYAPSSPYSASKAGSDHLVRAWNKTYDLPILITNCSNNYGPYQFPEKLIPLMIIRAINNKPLPVYGNGDNVRDWLYVLDHCDAILTVLDRGEIGQTYNVGGNNEIKNIDVVESICDIIDHLIPKGNSKSHKELIHFVQDRPGHDFRYAIDASKLNSKLGWVSKESFESGLEKQFGGI

SEQ ID NO: 179723 - protein, 227 aa, Unknown
  Bacterial polypetide isolated from the Sargasso Sea
YLNSDSINVPQKFRFHHISTDEVFGSLGKTGLFDEFSQYKPSSPYSASKASSDHLVRAWNHTFGIPTIITNCSNNYGPNQYPEKLIPLTILNALEGKDIPIYGNGEQIRDWLYVDDHADALYQILQKGKIGETYNIGGNNEITNIELVKKICSILDGKIKVKPSKIKSFVELISFVQDRPGHDYRYGIDASKLKNELNWEPRTSLDLGLLKTVDWYINNQTFKSTLI

SEQ ID NO: 179724 - protein, 268 aa, Unknown
  Bacterial polypetide isolated from the Sargasso Sea
MRILITGGAGFIGSALIRHLIQSTEHEVLNLDKLTYAGNLESLAPVDDNPRYRFVQADVADSPVVAQTLAEFQPEAIMHLAAESHVDRSIDGPAAFIQTNIVGTYSLLESTRTYWLGLSAERKAAFRFHHISTDEVYGDLHGVDDLFTETTPYAPSSPYSASKAASDHLVRAWQRTYGLPVLITNCSNNYGPYHFPEKLIPLMILNALAGKPLPVYGNGQQVRDWLYVEDHARALLKVVSEGQVGETYNIGGHNEQKNLDVVRAICAL

SEQ ID NO: 179725 - protein, 230 aa, Unknown
  Bacterial polypetide isolated from the Sargasso Sea
NKDFRFLHISTDEVYGSLGSDGKFLESTPYDPSSPYSASKAGSDHLVRAWNRTYGLPTLITNCSNNYGPYQFPEKLIPLIIINCLNDKPLPIYGKGANVRDWLYVKDHCEAISYVLNNGEIGQTYNIGGDNEIKNIDVVKTICSILDDILPKQDGNSYSELISFVKDRPGHDFRYAIDAEKIKTNLGWEPKESFDSGLRKTIHWYLNNTTWWKSIQKNTYEQERLGVIKS

SEQ ID NO: 179726 - protein, 256 aa, Unknown
  Bacterial polypetide isolated from the Sargasso Sea
MKILVTGGAGFIGSAVIRHIISNTDDSVVNVDKLTYAGNLESLLSVSDSPRYTFEKVDICDRHTLDGVLQRHQPDVIMHLAAESHVDRSIDGPAAFMETNIIGTYTLLEAARQYWNSLDDTAQQAFRFHHISTDEVYGDLEGPEDLFTETTPYAPSSPYSASKASSDHLVRAWLRTYGFPTLITNCSNNYGPYHFPEKLIPLMILNALEGKPLPVYGQGTQVRDWLYVEDHARALYKVATEGKVGETYNIGGHNEK

SEQ ID NO: 179727 - protein, 299 aa, Unknown
  Bacterial polypetide isolated from the Sargasso Sea
MGSAVVRHLINDTDHTVVNLDKLTYAGNLESLTPVSDSDRYSFEQVDICDAEEVKRVFNTHQPDIIMHLAAESHVDRSIDGPGEFIQTNVVGTYTLLEQARAYWSELEGDKKAGFKFHHISTDEVYGDLPHPDEVEPGTKLPLFTETTPYAPSSPYSASKASSDQLVRSWLRTYKLPTLVTNCSNNYGPYHFPEKLIPLVILNALAGKPLPVYGKGNQIRDWLYVEDHARALVVVALNGEIGETYNIGGHNEKQNIEVVQTICSILDEVKPKDTKYAEQITYVQDRPGHDMRYAIDASK

SEQ ID NO: 179728 - protein, 228 aa, Unknown
  Bacterial polypetide isolated from the Sargasso Sea
ISTDEVYGDLPHPDEVEPGTELPLFTETTPYAPSSPYSASKASSDQLVRSWLRTYKLPTLVTNCSNNYGPYHFPEKLIPLVILNALAGKPLPVYGKGNQIRDWLYVEDHARALVVVALNGEIGETYNIGGHNEKQNIEVVQTICSILDEVKPKDSKYADQITYVQDRPGHDMRYAIDASKIERELGWKPQETFESGIRKTVEWYLANEGWWKAVLDGSYQGERLGSGS

SEQ ID NO: 179729 - protein, 247 aa, Unknown
  Bacterial polypetide isolated from the Sargasso Sea
NILGTYSMLEASRLYLTKHLEKKNNFLFHHISTDEVYGDLKDSNDLFNENTKYDPSSPYSASKASSDHLVRAWGSTYELPIVITNCSNNYGPYHFPEKLIPRIILNAIHGKALPVYGNGQQIRDWLYVDDHARALLKVLFQSKIGETYNIGGHNEIKNINVVESICILLEDLLPDKPDGVKFYKDLIEFVDDRPGHDERYAIDATKINNELGWEPIETFESGLKKTVKWYLDNKDWWENILKNKHKL

SEQ ID NO: 179730 - protein, 235 aa, Unknown
  Bacterial polypetide isolated from the Sargasso Sea
QLRVDSVSSYFTDEVYGDLLHSDEVLPDVTLPLFTESTPYAPSSPYSASKASSDHLVRAWLRTYGFPTIVTNCSNNYGPYHFPEKLIPLVILNALEGKPLPIYGKGDQIRDWLYVEDHARALYKVVTEGQIGETYNIGGHNEKQNLEVVQTICTILDALVPKASSYAEQITYVTDRPGHDRRYAIDASKMSRELNWQPQETFETGLRKTVEWYLANQEWCQHVQDGTYQRERLGI

SEQ ID NO: 179731 - protein, 202 aa, Unknown
  Bacterial polypetide isolated from the Sargasso Sea
PSSPYSASKASSDHLVRAWQRTYGLPVLITNCSNNYGPYHFPEKLIPLVILNALDGKPLPVYGDGSQIRDWLFVEDHARALFKVVSEGVVGETYNIGGHNEQKNIEVVRGICALLEELAPSKPAGLARYEDLITFVKDRPGHDLRYAIDASKIERELGWVPQETFQTGLRKTVQWYLENLEWCRRVQDGSYQRERLGALENA

SEQ ID NO: 179732 - protein, 304 aa, Unknown
  Bacterial polypetide isolated from the Sargasso Sea
SALIRHLIQHTEHEVLNLDKLTYAGNLESLTSIASNSRYEFVQADIIDQATVSALLARFEPDAIMHLAAESHVDRSIDGPSDFIQTNIVGTYSLLEATRAYWQKLAEPAKGAFRFHHISTDEVYGDLHGVDDLFTETTPYAPSSPYSASKAASDHLVRAWQRTYGLPVLLTNCSNNYGPFHFPEKLIPLVILNALAGKPLPVYGDGLQVRDWLFVEDHARALLTVVTTGVVGETYNIGGHNEQKNIDVVRGICALLEELAPQRPAGVEKFTDLITFVKDRPGHDQRYAIDASKIERELGWVPEE

SEQ ID NO: 179733 - protein, 226 aa, Unknown
  Bacterial polypetide isolated from the Sargasso Sea
MLVTGGCGFIGSNFIQYVLQKNPYVDIINLDKLTYAGNLMNLSSLPNDRYTFIKGDICDKDKIEALFNKYNFEYVVHFAAESHVDRSIDGPAEFIQTNIVGTLNLLEHSKKFVFESNKKDFKFLHVSTDEVYGSLGNKGKFHENTPYAPSSPYSASKAGSDHLVRAWNKTYDLPILITNCSNNYGPYQFPEKLVPLMIINALNDKPLPIYGKGDNVRDWLYVLDPL

SEQ ID NO: 179734 - protein, 213 aa, Unknown
  Bacterial polypetide isolated from the Sargasso Sea
MFLETTPYAPSSPYSASKASSDHLVRAWHRTYGLPTMITNCSNNYGPYHFPEKLIPLVILNALEGKALPIYGKGDQIRDWLYVEDHARALYKVVTEGVVGETYNIGGHNEKQNIEVVKTICKILDELRPQANAEPYESLITFVKDRPGHDLRYAIDASKIQKDLGWVPEESFETGLRKTVEWYLNNQAWVQHIQSGEYQNWINQQYQVAEETN

SEQ ID NO: 179735 - protein, 255 aa, Unknown
  Bacterial polypetide isolated from the Sargasso Sea
MKNILITGGCGFIGSNFIHHLIDKEESYYIVNLDKLTYAGNISNLSKIPDSSYSHVQGDICDSILVDSLFKEYQFESIIHFAAESHVDRSIDGPSSFIQTNIMGTFNLLEHARAHFSKMKNKNFRFLHVSTDEVYGSLGSNGKFLESTPYDPSSPYSASKAGSDHLVRAWNRTYGLPTLITNCSNNYGPYQFPEKLIPLIIINCLNDKPLPVYGEGTNVRDWLYVKDHCEAISYVLNNGKIGQTYNIGGDNEIKN

SEQ ID NO: 179736 - protein, 221 aa, Unknown
  Bacterial polypetide isolated from the Sargasso Sea
LNKDSFIFHHISTDEVYGDLLPSDDPFSEENRYVPSSPYSASKASSDHLVRAWYRTYGLPVLITNCSNNFGPYQNREKLIPTVILNAIKGMNIPIYGDGKQIRDWLYVEDHCEALLKVITEGDIGETYNIGGNNEVTNLELIELICNMLENICPNMKHKSISKFSDLIEFVDDRPGHDQRYAIDSSKIKESLGWEPKHSYKDAIDKTIKWYIRTYEGEVAN

SEQ ID NO: 179737 - protein, 356 aa, Unknown
  Bacterial polypetide isolated from the Sargasso Sea
MKILVTGGAGFIGSAVVRHIIENTEDSVVNVDKLTYAGNLESLVNVAGSSRYAFEKVDICDRSELDRVFAIHQPDAVMHLAAESHVDRSITGPSDFIQTNIVGTYTLLESAREYWTKLDSHKKKAFRFHHISTDEVYGDLLHPDEVSSDVTLPLFTESTPYAPSSPYSASKASSDHLVRAWLRTYGLPTIVTNCSNNYGPYHFPEKLIPLVILNALEGKALPIYGKGDQIRDWLYVEDHARALYKVVTEGQIGETYNIGGHNEKQNLEVVQTICTILDALVPKASSYAEQITYVTDRPGHDRRYAIDASKMSRELNWHPQETFETGLQKTVEWYLANHEWCQHVQDGTYQRERLGI

SEQ ID NO: 179738 - protein, 350 aa, Unknown
  Bacterial polypetide isolated from the Sargasso Sea
MVILITGGAGFIGSNLIHYWLAQNPGDTIVNFDALTYAGNLANLAGVESNQNYHFFQGDLRKQEQLDEVFEQFSIDSVIHLAAESHVDRSINDPSPFIDSNIKGTFQLLETARNHWKEDLKDHRFLHVSTDEVYGTLGKEGLFTEQTPFAPNSPYSASKASSDHLVRAWHHTFGMDTLITHCSNNYGPYQFPEKLIPLMIRNCLFGKELPVYGDGLQVRDWLYVEDHCEALDVVFHRGQSGESYNVGGLNEWENLSMVRHICKFMDSELGNSPEQSCLNLIRHIQDRPGHDRRYAIDASKIQNKLGWQPRHLIGEGLEKTMRWYLDHQEWVEQVTSGAYRDYYKHHYGTG

SEQ ID NO: 179739 - protein, 353 aa, Unknown
  Bacterial polypetide isolated from the Sargasso Sea
MLLVTGGAGFIGGNFVLDWLAGSNESIVNLDILTYAGNLDTLKSLESDSRHHFVRGDIGDRQLVSKLLSEHRPRAVINFAAESHVDRSIHGPGDFIQTNVVGTFNLLESVRAYWSGLVEEERRAFRFLHVSTDEVFGTLGENDPPFTETNAYEPNSPYSASKAASDHLVRAWHHTYGLPVVTTNCSNNYGPYHFPEKLIPLIILNALAGKPLPIYGDGQQIRDWLYVRDHCSAIRAVLADGALGETYNVGGWNEKPNIEVVYAICAILDELQPRGDGQSYATQISYVQDRPGHDRRYAIDARKLERELGWKPAETFETGIRKTVEWYLKNQGWVKNVTSGQYRTWIDRHYGER

SEQ ID NO: 179740 - protein, 359 aa, Unknown
  Bacterial polypetide isolated from the Sargasso Sea
MKILVTGGAGFIGSAVVRHIISNTQDSVINLDKLTYAGNLESLVSVAASERYSFEQVDICDRAELDRVFSQYQPGAVMHLAAESHVDRSITGPADFIQTNIVGTYTLLEAARQYWTELDAERKSAFRFHHISTDEVYGDLPHPDEQEGQVVNQELPLFTESTPYAPSSPYSASKASSDHLVRAWLRTYGLPTIVTNCSNNYGPYHFPEKLIPLVILNALEGKPLPIYGKGDQIRDWLYVEDHARALYKVVTEGKVGETYNIGGHNEKRNLEVVQTICRILDSLVPKVTPYAEQITYVTDRPGHDRRYAIDASKMSNELNWQPQETFDTGLRKTIEWYLANQEWCQHVQDGTYQRERLGI

SEQ ID NO: 179741 - protein, 286 aa, Unknown
  Bacterial polypetide isolated from the Sargasso Sea
MVNKMRKTILVTGGAGFIGSAVVRHLINDTDHTVVNLDKLTYAGNLESLTSVSNSDRYSFEQVDICDAEEVKRVFSTHQPDIIMHLAAESHVDRSIDGPGEFIQTNVVGTYTLLEQARAYWSVLEGDKKAGFKFHHISTDEVYGDLPHPDEVEPGAELPLFTENTPYAPSSPYSASKASSDQLVRSWLRTYKLPTLVTNCSNNYGPYHFPEKLIPLVILNALAGKPLPVYGKGNQIRDWLYVEDHARALVVVALNGEIGETYNIGGHNEKQNIEVVQTICSILDEV

SEQ ID NO: 179742 - protein, 289 aa, Unknown
  Bacterial polypetide isolated from the Sargasso Sea
DSILVDSLFKEYQFESVVHFAAESHVDRSIDGPSSFIQTNIMGTFNLLEHARAYLSKMKNKDFRFLHVSTDEVYGSLGSNGKFLESTPYDPSSPYSASKAGSDHLVRAWHRTYGLPTLITNCSNNYGPYQFPEKLIPLIIINCLNDRPLPVYGEGINVRDWLYVKDHCEAISYVLNNGEIGQTYNIGGDNEIKNIDVVKTICSILDDILPKQDGNSYSELISFVKDRPGHDFRYAIDAEKIKTNLGWAPKESFDSGLRETIHWYLNNKTWWQSIQKNTYEQERLGVIKS

SEQ ID NO: 179743 - protein, 354 aa, Unknown
  Bacterial polypetide isolated from the Sargasso Sea
MDNKILVTGGSGFIGSSFIHYLINNTDYKRIINLDKLTYAGNNDNLINIQQNIRYKFIKGDICDRQCIKKIFQDYSPNKIVHFAAESHVDRSIDGPKDFINTNIVGTSILLEESLSYYNKLKKLSKSSFKFHHISTDEVFGSLGEKGFFVEDSPYDPSSPYSASKASSDHLVRAWHRTFGLPVTISNCSNNYGPYQFPEKLIPLIIINCLSNKSLPVYGKGENIRDWLYVEDHCKAINLILQEGAIGDTYNIGGNNEISNINIVESICTILDKLKPSNSGKSYKQLISFVKDRPGHDFRYAINTTKIKKDLNWEPKETFDSGLTKTIKWYLENENWWKKIQKNIYKQERIGVSS

SEQ ID NO: 179744 - protein, 364 aa, Unknown
  Bacterial polypetide isolated from the Sargasso Sea
MRSFVVKILVTGGAGFIGSAVVRNIIENTNDSVINLDKLTYAGNLESLTSIANNARYTFEKVDICDRAELERVFSLHQPDAVMHLAAESHVDRSITGPADFIQTNIVGTCTLLEAARHYWMQLDAERKSAFRFHHISTDEVYGDLPHPDEQESQAVKQELPLFTESTPYAPSSPYSASKASSDHLVRAWLRTYGLPTIVTNCSNNYGPYHFPEKLIPLVILNALEGKPLPIYGKGDQIRDWLYVEDHARALYKVVTEGKIGETYNIGGHNEKQNLEVVQTICRILDSLVPKTTPYAEQITYVTDRPGHDRRYAIDASKMSAELDWQPQETFETGLRKTVEWYLANQEWCQHVQDGTYQRERLGI

SEQ ID NO: 179745 - protein, 339 aa, Unknown
  Bacterial polypetide isolated from the Sargasso Sea
MRILITGGAGFIGSALVRMLIEQTTCVVTNVDKLTYASHPEALAAIAESERYHFIQADICDAATLEQVFQAHQPDMVMHLAAESHVDRSIEGPAAFIQTNIVGTYTLLEASRRYWQQLADTRKGLFRFHHVSTDEVFGSLTETGLFSETSAYDPSSPYSASKASADHLVRAWHRTYALPIVMTNCSNNYGPFQYPEKLIPLMVTNALQGKPLPIYGNGQQVRDWLYVDDHVKALYLVATQGELGQTYNIGGSCEQTNLTVVRQICALLEELVPTHPQSLAMGSAGFADLIQYVVDRPGHDVRYAIDASKIQRELGWRAQESFESGLRKTVEWIINQQHL

SEQ ID NO: 179746 - protein, 323 aa, Unknown
  Bacterial polypetide isolated from the Sargasso Sea
ITGQDGSYLAEFLLKKGYEVHGIKRRASSFNTSRIDHLYQDPHVEEQKFILHYGDLTDSSNLIRIIQQVQPDEIYNLGAQSHVAVSFESPEYTANSDALGTLRLLEAIRILGLTKTTKFYQASTSELYGLVREVPQNEKTPFYPRSPYGVAKLYSYWITVNYREAYKMFACNGILFNHESPRRGETFVTRKITRGLARINSGLEKVLYMGNLDAKRDWGHAKDYVKMQWLMLQQSEPDDFVISSGRMETVRRFIEKTAKEIGWSKNDKESAIIWEGSGINEIGRRADTNQIVIKIDPRYFRPTEVQQLLGDATKAKEKLGWEN

SEQ ID NO: 179747 - protein, 282 aa, Unknown
  Bacterial polypetide isolated from the Sargasso Sea
MKRALITGLTGQDGSYLAEFLLEKGYEVHGIKRRSSSFNTDRVNHVFNTSKNFYMHYGDLTDSTNLIRLIQIIQPDEIYNLGAQSHVKVSFETPEYTANSDAIGTLRILEAIRILGLEKKTKFYQASTSEMFGLVQENPQKETTPFYPRSPYGVAKLYAHWITKNYRESYGMFACSGILFNHESPRRGETFVTRKITRDLARVSLGLLKTLRLGNLDAKRDWGHAKDYVRAMWMMLQQDDPDDFVISTMEQITVREFCERTGKCLGMDIRWQGKGVDEIGID

SEQ ID NO: 179748 - protein, 273 aa, Unknown
  Bacterial polypetide isolated from the Sargasso Sea
PHEKKRNFFLHFGDVTDAISVSSLIKKIKPNEIYNLAAQSHVAVSFEVPEYTANADAIGALRILEAIKFHGLEKFTKFYQAGTSEMFGKVKQIPQNEKTPFYPRSPYGVAKVYAHWITVNYREAYNIFACNGILFNHESPVRGETFVTRKIVSALCKVKLGKQKTLYLGNLDAKRDWGHAKDYVKAMWKMLQKKKPQDYVIATGKQYTVKQFVNLVLKELEIKYNWKGSGINSKCYDSNGNCLVKCDKEYFRPLEVDTLLGDAKKAKKELNWK

SEQ ID NO: 179749 - protein, 237 aa, Unknown
  Bacterial polypetide isolated from the Sargasso Sea
MKKKKALIFGITGQDGSYLAEFLLNKNYIVHGVKRRSSSFNTGRVDHLYQDPHEQSRNFILHYGDITDAISVSSIIENIKPDEIYNLAAQSHVAVSFEVPEYTANADALGALRILEAIKFHNLSKKTKFYQAGTSEMFGKVVEVPQKESTPFYPRSPYGVAKVYAHWITVNYREAYNLFACNGILFNHESPVRGETFVTKKIVSALCKIKLGRQKKLYLGNLDAKRDWGHAKDYVEA

SEQ ID NO: 179750 - protein, 227 aa, Unknown
  Bacterial polypetide isolated from the Sargasso Sea
YQASTSELYGKVQISPQDENTPFYPRSPYGVAKLYAYWIVVNYREAYGIFACNGILFNHESPRRGETFVTRKITRGLSRIEAGLDECLYMGNLNAKRDWGHAKDYVAMQWLMLQQKEAKDYVISTGRMETIRKFIELTAKQIGWNKNKNEPAIIWEGDGINEIGRRADNNKIVIRVDPKYFRPTEVEELRGDSSKAYKDMGWEPKITLEQMIKEMVEEDKKEVQKDL

SEQ ID NO: 179751 - protein, 288 aa, Unknown
  Bacterial polypetide isolated from the Sargasso Sea
SWCTKPCKCEFESPEYTANSDALGTLRILEAIRILNLQKKTKIYQASTSELFGKVQETPQKEETPFYPRSPYGVAKLYAYWITINYREAYGIFACNGILFNHESPRRGETFVTRKITMGLARINAGLEKCLYLGNLESKRDWGHAKDYVVMQWLMLQQEIPDDYVIATGRSSTVRCFIEKCADNLGWGRNKPKSIIWEDKGINEIGRRADTNEIVIRIDPRYFRPTEVEELLGDASKAKNKLGWEPKITLEELIEEMMHKDTEIARRESLLRKNGLGVLSPKEGSPSN

SEQ ID NO: 179752 - protein, 280 aa, Unknown
  Bacterial polypetide isolated from the Sargasso Sea
QSHVAVSFESPEYTADVDAMGTLRILEAIRILGLEKKTRFYQASTSELYGLVQEIPQKETTPFYPRSPYAVAKLYAYWITVNYREAYGMYACNGILFNHESPRRGETFVTRKITRGLANIAQGLEKRLYMGNLDALRDWGHAKDYVRMQWLMLQQEQPEDFVIATGTQYSVREFIQWSAEQLGISLRFEGEGVNEKAIVERIKGRNAPALAPGDVIVEVDPRYFRPAEVETLLGDPSKAKDKLGWVPEITAREMCREMVAHDLQQAKQHALLVNTATTLQ

SEQ ID NO: 179753 - protein, 237 aa, Unknown
  Bacterial polypetide isolated from the Sargasso Sea
RIYQASTSELYGLVQEVPQKESTPFYPRSPYGVAKLYAYWITVNYREAYGMYACNGILFNHESPRRGETFVTRKITRGLARIDAGLEQCIFMGNLDSLRDWGHARDYVEMQWRMLQQEQPEDFVIATGRQESVRRFIELAASQLGWGGIQWQGEGLQETGRRADNGELVVCIDPRYFRPAEVETLLGDPAKAREKLDWTPTTTLEELVAEMVAKDREDAKKEAYLKRKGFSVVGARE

SEQ ID NO: 179754 - protein, 275 aa, Unknown
  Bacterial polypetide isolated from the Sargasso Sea
MSRRALITGITGQDGSYLAELLLSKGYEVHGLRRRSSTFGTERIEHLIFGDDPPLHLHYGDLSDGNGLMRLLREIEPHEVYNLAAQSHVRVSFDQPTYTADVTAVGTLRLLEAIRDVQDDTGRQIRFYQASSSEMFGKVVETPQKETTPFYPRSPYGVAKVYSHWITINYRESYDLHASCGILFNHESPRRGETFVTRKITRAATRIKLGLQEKLYLGNLDAKRDWGFAGDYVEAMWLMLQQETPDDYVVATNELYSVRDFCEKTFGQLGLNYED

SEQ ID NO: 179755 - protein, 251 aa, Unknown
  Bacterial polypetide isolated from the Sargasso Sea
QDGSYLTEIFLKKGYEVHGLVRKSSSFNTRRIDHIIESNKYADSFFFHYGDLTDPSSLNRLLERIKPKEIYNLGAQSHVKVSFQIPDYTAQVDAIGTLRILDALRETNLDAKFYQASTSELFGKTTELPQNENTPFYPRSPYGVAKLYAYWIVVNYREAYNIFACNGILFNHESPRRGKTFVTRKITYAVSKISKGLQDILYLGNLDAKRDWGYAPEYCEGMWKMLQQKTPQDFVLATGKTSSVRKFVELA

SEQ ID NO: 179756 - protein, 253 aa, Unknown
  Bacterial polypetide isolated from the Sargasso Sea
MGTLKKAFITGVTGQDGSYLSEFLLKKGYIVHGIKRRSSSFNTGRVDHLYQDPHEDNPQFLLHYGDLTDSTNLINLIQKIQPDEIYNLGAQSHVAVSFESPEYTANSDALGTLRILEAIRSLGMAKKTKFYQASTSELFGKVQQVPQNEETPFYPRSPYAAAKLYAYWITINYREAYDIFACNGILFNHESPRRGETFVTRKITRGIARIDAGLDECLYLGNLDARRDWGHARDYVEMMWLMLQQHRPDDYVI

SEQ ID NO: 179757 - protein, 261 aa, Unknown
  Bacterial polypetide isolated from the Sargasso Sea
LAELLLSKGYEVHGIIRRSSSFNTGRIEELYQDPHIDTRKLILHYGDLTDSTNCFEIVSKVRPDELYNLGAQSHVKVSFEMSEYTADADGMGVLRLLNAIRSAGLIEKTKFYQASTSELYGLVQEVPQKETTPFYPRSPYAVAKQYAYWIVVNYREAYNMHASNGILFNHESPRRGPTFVTRKVTRAVARIHKGLQNCLYMGNIDAKRDWGHARDYVEMMWMMLQQDTADDYVVATGETNTVRSFIELAFKCIDITITWRG

SEQ ID NO: 179758 - protein, 230 aa, Unknown
  Bacterial polypetide isolated from the Sargasso Sea
MSKDDSYKRRKVALITGATGQDGSYLAELLIEKGYEVHGIKRRASSFNTSRVDHLYVDPPEINKPGLELHYGDLTDSSNLIRIVQQVQPDEIYNLGAQSHVAVSFESPEYTADVDALGTLRILETVRILGLIKKTRIYQASTSELYGLVQEVPQTEKTPFYPRSPYGVAKLYAYWITLNYRESYGMYACNGILFNHESPRRGATFVTRKITRGLARIDQGLEEYLYMGNL

SEQ ID NO: 179759 - protein, 216 aa, Unknown
  Bacterial polypetide isolated from the Sargasso Sea
ANSDALGTLRILEAIKTLKLIDNTKFYQASTSELYGLVQETPQTEKTPFYPRSPYAVAKLYAYWIAINYRESYGLFACNGILFNHESPRRGETFVTRKITRGLSQIDEGLTKYLYLGNIDAIRDWGHAKDYVEIQWKILQQDKPEDFVVATGRQKSVRTFIELAAKELGWGGITWEGEGIKEIGRRNDTNEIVIKIDKKYFRPCEVNSLVGDAAKA

SEQ ID NO: 179760 - protein, 257 aa, Unknown
  Bacterial polypetide isolated from the Sargasso Sea
ALVHVAVSFDLPQYTANSDALGTLALLEAIRFNNLEGKTKFYQASTSELYGKVQEIPQTEKTPFYPRSPYAVAKLYAYWIVINYREAYGIHASNGILFNHESPRRGETFVTRKITRAVAAIEKGLQDKLYLGNLNAKRDWGHAKDYVEMMWMMLQMDQPDDYVVATNETHEVREFVSLAFKAVDKDIVWEGEGVNEKGIDKLSGKVLVEVDPTYFRPTEVDLLIGDSTKAKNKLGWEPKIKFEDLVNEMVESDLKQT

SEQ ID NO: 179761 - protein, 298 aa, Unknown
  Bacterial polypetide isolated from the Sargasso Sea
GDLTDSSNIIRTIQNIKPQEIYNLGAQSHVAVSFQSPEYTANCDALGTLRILDAIKLLGLEKNTRFYQASTSELYGLVREIPQSESTPFYPRSPYAAAKLYAYWITINYREAYGIYACNGILFNHESPKRGETFVTRKITRGLARIDQGLDSCLYLGNLESKRDWGHAKDYVEMQWLMLQQEEAEDYVIATGKMETVRKFVEISAKMMGWQKNKEGPAIIWEGKGVKEIGRRADNNQIVIRIDPQYFRPTEVDLLVGDATKAKENLGWENKVTLDELIAEMVSHDLNETKKEVILNKK

SEQ ID NO: 179762 - protein, 268 aa, Unknown
  Bacterial polypetide isolated from the Sargasso Sea
MSKKVVLITGITGQDGAYLAEYLLSKGYEVHGIKRRTSLFNTDRIDHLIKEKNFHFHHGDMTDSSSIVNIISKTKPCEIYNLAAQSHVQVSFEEPEYTANADGIGVLRILEAIRALNLENHTKFYQASTSELFGKVLETPQSEKTPFYPRSPYGVAKLYAYWITVNYREAYNIFACNGILFNHESPLRGETFVTRKITMALAKIKLGSNEVLKLGNLNALRDWGHAKDYVKMQWLMLQQEKPDDFVISTGVQYSVRDFVNKACEVLDI

SEQ ID NO: 179763 - protein, 284 aa, Unknown
  Bacterial polypetide isolated from the Sargasso Sea
KQVQPDEIYNLGAQSHVAVSFETPEYTANSDALGMLRILEAVRNLGLSKKTKIYQASTSELYGKVQEIPQNENTPFYPRSPYAVAKLYAYWITINYREAYGLYACNGILFNHESPRRGETFVTRKITRGLSRINAGLDSCLFMGNLDAKRDWGHAKDYVEMQWLMLQQEKPEDFVISTGRMETVRRFIEITSNYLGWNKDHKNGIIWENEGTNEVGLRADTKEVVVRVDSRYYRPTEVEQLLGDSKKAREKLGWEAKTTLEELISEMVNFDKAEALKESILKRK

SEQ ID NO: 179764 - protein, 263 aa, Unknown
  Bacterial polypetide isolated from the Sargasso Sea
NLAAQSHVAVSFEKPEYTANSDALGTLRILEAIRILGLEKKCRMYQASTSELYGKVQEVPQTEKTPFYPRSPYGVAKLYAYWITVNYREAYGLYAVNGILFNHESPRRSRAFVTRKITNGLTRIKHGVQNTLYLGNLKAKRDWGHAKDYVKAMWLMLQQDNPEDYVISTGMQYSVEDFINIVAEELEMKIKWKGQGVDRVGIDVSSGKEIIQIREKYFRPSEVNELVGDPKKALKNLCWKADRSINDLVKDMIKKVCKYFKIK

SEQ ID NO: 179765 - protein, 292 aa, Unknown
  Bacterial polypetide isolated from the Sargasso Sea
NTKRIDEFFENKQLHDKKFILHHGDMTDASSLTSILNKVKPNEIYNLAAQSHVKVSFEIPEYTANSDAIGVLRLLEAVRSANLEKKIKIYHASTSELYGKSKSQTQNEDTPFYPRSPYGVAKLYAHWIIINYREAYNIHACNGILFNHESPLRGETFVTRKITMGLTKIKLGLQKNLLLGNIYSKRDWGHAKDYVEAMWKILQYKKPEDFVIATGKQYSIKDFVNLTAKYLKINLKWVGKGINEKAIDKKTNRVIIKISKKYFRPTEVDSLIGSFKKAKKLLNWKPKISLNN

SEQ ID NO: 179766 - protein, 291 aa, Unknown
  Bacterial polypetide isolated from the Sargasso Sea
LHYGDLTDTSNLTRLIRDIEPDEIYNLGAQSHVAVSFEAPEYTADVDALGTLRILEAIRFLGLEQKTRFYQASTSELYGLVQEIPQRETTPFYPRSPYAVAKMYAYWIAVNYRESYGVYACNGILFNHESPRRGETFVTRKITRGLSNIALGLEDCLYMGNIDSLRDWGHAKDYVRMQWMMLQQDVPEDFVISTGVQYSVREFIEWSAWELGLTIEFSGSGVEEIGTITAVEGDLAPSLAVGDVVVRIDPQYFRPAEVETLLGDSTKAKEKKGWVPEINAQEMCAEMVQQT

SEQ ID NO: 179767 - protein, 264 aa, Unknown
  Bacterial polypetide isolated from the Sargasso Sea
MSKVAFITGITGQDGSYLAEFLLKKGYTVHGLVRRSSSYNTKRIDHLREDEDSENCKFYTHYGDMTDTLSLFHVIQKVQPDEIYNLAAQSHVAVSFEKPEYTANSDALGTLRILEAVRILGLEKKTRIYQASTSELYGKVQEIPQTEKTPFYPRSPYGVAKLYAYWITVNYREAYGLFAVNGILFNHESPRRSRAFVTRKITNGLTRIKYGHQDCLYLGNLKAKRDWGHAKDYVKAMWLMLQQDNPEDYVISTGMQYSVEDFIN

SEQ ID NO: 179768 - protein, 307 aa, Unknown
  Bacterial polypetide isolated from the Sargasso Sea
STNLIRVIQKVQPDEIYNLGAQSHVAVSFETPEYTANCDAIGILRILEAVRILNLIKKTKIYQASTSELYGLIQESPQSENTPFYPRSPYAVAKLYAYWIIVNYREAYDMYACNGILFNHESPRRGETFVTRKITRGLSRIDTGLDNCLYLGNLDSKRDWGHAKDYVAMQWLMLQQKKPKDFVIATGRMETVRKFIEISAQKLKWYKEPNGPSIIWEGDGVNEVGKRADNGNIVIKIDPRYFRPTEVNELLGDPTKAQKELGWTPRITLEDLISEMILCDKKEAKKELILKESGINVESNFESPPSY

SEQ ID NO: 179769 - protein, 229 aa, Unknown
  Bacterial polypetide isolated from the Sargasso Sea
QLDSTNLENKTRFYQASTSELYGKVQEIPQTEKTPFYPRSPYAVAKLYAYWIVVNYREAYDIHASNGILFNHESPRRGETFVTRKITRAVAAIERGIQDKLYLGNLNAKRDWGHAKDYVEMMWMMLQMEQPDDYVVATNETHEVREFVSLAFKAVKKDIIWEGDGVNEKGIDKSTGKVLVKVDPMYFRPTEVDLLIGDSSKAKEKLGWEPKIKFEDLVTEMVESDLKRV

SEQ ID NO: 179770 - protein, 357 aa, Unknown
  Bacterial polypetide isolated from the Sargasso Sea
MKKVLITGITGQDGSYLAELLLEKGYEVHGIKRRSSSFNTERIDHIYQDYHESDKNFHLHYGDLSDSLSIFSLIQKIKPDEVYNLGAQSHVGVSFENPEYTGNVVALGALRVLESIRHCGLSSKTKFYQASSSELYGKVRQVPQTEKTPFYPRSPYGVAKLYAYWITVNYRESYGMYACNGILFNHESPRRGETFVTKKITRGLARIALGIEKCLYLGNLEALRDWGHAKDYVEMQWLMLQQKEPRDYVISSGVECSVRDFVKISCKKMGIEIAFKNKGLDEVGYIKSLSRFTDTLKVGQEIIRVSEKYFRPAEVDKLLGDSNLAKEKLKWSPKISLDELCEEMINYDLEKEMIVKR

SEQ ID NO: 179771 - protein, 252 aa, Unknown
  Bacterial polypetide isolated from the Sargasso Sea
MSRRALITGVTGQDGSYLAELLLAKGYEVHGLRRRSSTFGTERIEHLILGDDPQLHLHYGDLADGNGLMRLLREIEPHEVYNLAAQSHVRVSFDQPTYTADVTAVGTLRLLEAIRDVQDDTGRQIRFYQASSSEMFGKVVETPQKETTPFYPRSPYGVAKVYSHWITINYRESYDLHASCGILFNHESPRRGETFVTRKITRAATRIKLGLQEKLYLGNLDAKRDWGFAGDYVEAIRLMLQQETPDDYVSQP

SEQ ID NO: 179772 - protein, 362 aa, Unknown
  Bacterial polypetide isolated from the Sargasso Sea
MKSTNRKNKVALITGITGQDGAYLAELLLDKGYEVHGIKRRASLFNTDRIDHLLTNKYFHFHHGDMTDSSSLVNIISKLRPTEIYNLAAQSHVQVSFEEPEYTANADGIGVLRILEAIRSLKLEDHTRFYQASTSELFGKVLETPQSETTPFYPRSPYGVAKLYAYWITVNYREAYNIFACNGILFNHESPLRGETFVTRKITMALARIKIGSGEVLRLGNLNALRDWGHAKDYVRMQWMMLQEDKPDDYVIATGIQYSVREFVNATCAALDIKITWDGEGINEKGYDEKGNIIVAVDSAYFRPTEVETLLGDFSKAKEILNWEPSISFEELVKEMAESDLELAKLNASNDFKVNKFYRTDI

SEQ ID NO: 179773 - protein, 300 aa, Unknown
  Bacterial polypetide isolated from the Sargasso Sea
MITGITGQDGSYLAELLLEKGYKVHGLLRRSSQKNTQLIDHLSNENQKQKIQLHYGDLTDSSNILRLIQDLKPDEIYNLGAQSHVHVSFDSPEYTAQADALGPLRILEAVRSLDLTNKTRIYQASTSELYGLVRETPQKESTPFYPRSPYGVAKLYAYWITVNYRESYGMYACNGILFNHESPRRGEIFVTRKITRGLTRINEGIQDCLHMGNINSLRDWGHAKDYVEMQWRMLQQEKPEDYVIASGQMTSVRKFIEMSAEVLDWGGIIWEGEGTKEIGKRKDNGKTVIRIDPKYYRPAE

SEQ ID NO: 179774 - protein, 234 aa, Unknown
  Bacterial polypetide isolated from the Sargasso Sea
LALLEAIRFNNLEDKTRFYQASTSELYGKVQEIPQTEKTPFYPRSPYAVAKLYAYWIVVNYREAYDIHASNGILFNHESPRRGETFVTRKITRAVAAIERGIQDKLYLGNLNAKRDWGHAKDYVEMMWMMLQMEQPDDYVVATNETHEVREFVTLAFDAVKKNIIWEGEGINEKGIDKSTGKVLVEVDPVYFRPTEVDLLIGDASKAKEKLGWEPKIKFEDLVSEMVENDLDNI

SEQ ID NO: 179775 - protein, 274 aa, Unknown
  Bacterial polypetide isolated from the Sargasso Sea
MKRLDPTREIRAPRGAVLNTKSWQTEAPLRMLMNNLDPEVAEHPQNLVVYGGIGRAARDWASYDKIVEVLKRLNTDETLLIQSGKPVGVFPTHENAPRVLIANSNLVPHWANWEQFNALDKEGLMMYGQMTAGSWIYIGSQGIVQGTYETFVSVAKAHFNGVAKGRWILTGGLGGMGGAQPLAATMAGFSMLAVEVDETRIDFRIRTGYLDKKAHSLDEAMTMLEEAKKADKPVSIGLLGNAAEVFPAMLAQGIIPDVVTDQTSAHDPLNGYLP

SEQ ID NO: 179776 - protein, 228 aa, Unknown
  Bacterial polypetide isolated from the Sargasso Sea
GVDNAFDFPGFVPAYIRPLFCRGIGPFRWVALSGDPQDIYKTDAKVKEIIKDDKHLHHWLDMARERISFQGLPARICWVGLEWRQKLGLAFNEMVRSGEVSAPIVIGRDHLDSGSVASPNRETESMRDGSDAVSDWPLLNALLNTASGATWVSLHHGGGVGMGFSQHSGMVIVCDGTDEAAARIARVLHNDPATGVMRHADAGYDIAIECAAEQGLNLPMVAATQGQR

SEQ ID NO: 179777 - protein, 299 aa, Unknown
  Bacterial polypetide isolated from the Sargasso Sea
AGSWIYIGTQGIVQGTYETFAEAGRKHFGGSLEGRWILTAGLGGMGGAQPLAATFAGAVSLNIECQQSSIDFRLRTRYVDKQARDIDHALELIQQHTAAKEAVSIALLGNAAEILPELVRRAKAGGLKPDLVTDQTSAHDLVNGYLPAGWTVAQWRAAQQDVTQHEVLKKAAARSCAAHVQAMLDFQHMGIPVVDYGNNIRQVAFDEGVKDAFDFPGFVPAYIRPLFCEGKGPFRWVALSGDPEDIRKTDAKIKELFPENKHVHRWLDMAGERIAFQGLPARICWLGLGERHIAGLAFN

SEQ ID NO: 179778 - protein, 289 aa, Unknown
  Bacterial polypetide isolated from the Sargasso Sea
DPDVAENPHELVVYGGIGRAARDWECYDAIVNALTKLETDETLLVQSGKPVGVFKTHDNAPRVLIANSNLVPHWATWEHFNELDAKGLAMYGQMTAGSWIYIGSQGIVQGTYETFVEAGRQHYQGNLSGRWVLTAGLGGMGGAQPLAATLAGACSLNIECQQSRVDFRLRTRYVDEQATSLDDALARIDKYTREGKAVSIALCANAADVVPELVKRGVRPDMVTDQTSAHDPLHGYLPSGWSWEEYQAKAVSDPQGTVQAAKRSMATHVEAMLAFSKMGVPTFITATTS

SEQ ID NO: 179779 - protein, 272 aa, Unknown
  Bacterial polypetide isolated from the Sargasso Sea
VIAGAVFLGVDVDEKRIAKRLNTKYLDKMTHSLDEALSLVKQACENKQALSIGLVGNVADVLSKLIRLDMIPDIVTDQTSAHDELNGYFPNQMPFEEALDFRKKDPEHYRQQAFRTMAEHVNAMIECQKKGAVVFDYGNNIRAQAQTGGCKEAFAFDGFVPEFIRPLFCEGKGPFRWAALSGNPNDIHVIDNALLKAFPDDKKLSTWLTAAREQIAFQGLPCRICWFGYGDREKAGLIINDLVRSGEVTAPIVIGRDHLDCGSVASPYRETE

SEQ ID NO: 179780 - protein, 297 aa, Unknown
  Bacterial polypetide isolated from the Sargasso Sea
KPVRNDPKRSIRAPRGTELSCKSWLTEAPMRMLMNNLDPEVAEKPEDLVVYGGIGRAARNWDCYDRIIETLKRLENHQSLLIQSGKPVGVFETHTEAPRVLIANSNLVPHWATWEHFHELDRKGLFMFGQMTAGSWIYIASQGIIQGTYETFVELGRQHFSGDWSGKWILTSGLGGMGGAQPLAATMAGASMLAVECDPSRIHRRLETGYLDESSETLEDALKILESHHQQGKAISVGLLGNAAEILPEMLKRGVRPDAVTDQTSAHDPLNGYLPAGWSLEKAELMRKTEPNAVIEA

SEQ ID NO: 179781 - protein, 215 aa, Unknown
  Bacterial polypetide isolated from the Sargasso Sea
MKSIHPPKGKRLTCKNWQIEAAYRMIQHNLDPDVAEIPEELIVYGGKGKAARNWDSFDTILETLKRLEPDETLLVQSGKPVGVAKTHTYAPRVLIANSNLVPEWATWDHFNKLEKDGLMMFGQMTAGSWIYIGTQGILQGTYETFIAAAKTHWNKDNLKGKLVLTAGLGGMGGAQPLAVTMAGGVVICIEIDQHRVQRRLETKYLDKATDSFEKA

SEQ ID NO: 179782 - protein, 304 aa, Unknown
  Bacterial polypetide isolated from the Sargasso Sea
CASLGQIWDHFNELDKRGLAMYGQMTAGSWIYIGTQGIVQGTYETFVEAGRQHYGGNLKGKWILTAGLGGMGGAQPLAAVFAGASCLAVECNPESIEFRLRTRYLDERAETLDEALHMINSWTKDGKTKSVGLVGNAADIFPEIVKREIKPDIVTDQTSAHDPTNGYLPLGWSISKWREKRETDPKAVEKAARRSMRLHVKAMVDFWHMGVPTLDYGNNIRQVALEEGLENAFDFPGFVPAYIRPLFCRGVGPFRWCALSGDPEDIYKTDAKVKELIPDDPHLHKWLDMARERIAFQGLPARIC

SEQ ID NO: 179783 - protein, 182 aa, Unknown
  Bacterial polypetide isolated from the Sargasso Sea
DEAMKELFPENTHLHKWLDMARERISFQGLPARICWIGLGDRHRAGLKFNEMIASGELKAPVVIGRDHLDSGSVASPNRETEAMKDGSDAVSDWPLLNALINTASGATWVSLHHGGGVGIGFSQHAGLVIVADGTPEAAKRLERVLWNDPASGVWRHADAGYEDAVRCAKDHGLRLPGILGN

SEQ ID NO: 179784 - protein, 236 aa, Unknown
  Bacterial polypetide isolated from the Sargasso Sea
MGKPVRNDPKRSIRAPRGTELSCKSWLTEAPMRMLMNNLDSEVAEKPEDLVVYGGIGRAARNWDCYDRIIETLKRLENHQSLLIQSGKPVGVFETHADAPRVLIANSNLVPHWANWEHFHELDRKGLFMFGQMTAGSWIYIASQGIIQGTYETFVELGRQHFSGDWSGKWILTAGLGGMGGAQPLAATMAGASMLAVECDPSRIRRRLETGYLDESAETLEDALKILESHHQQGKA

SEQ ID NO: 179785 - protein, 156 aa, Unknown
  Bacterial polypetide isolated from the Sargasso Sea
LPARICWVGLGDRHRLGLAFNEMVAKGELKAPVVIGRDHLDGGSVASPNRETEAMKDGSDAISDWPLLNALLNCASGATWVSFHHGGGVGIGFSQHAGLVICCDGTPEAGKRIERVLWNDPATSVMRHADAGYETALECAREKGLNLPGIMDTVQA

SEQ ID NO: 179786 - protein, 245 aa, Unknown
  Bacterial polypetide isolated from the Sargasso Sea
MKINIKPPVGNQLICKNWQIEAPFRMIQNNLHPDVAEDPENLVVYGGKGKAARNWDCYNIIIKSLKNLNEDETLLIQSGKPVGIIKTHKSSPRVLIANSNIVPNWANWDHFNELDKNGLIMYGQMTAGSWIYIGTQGILQGTYETFAAAAKKHFGNDLTGKLVVSAGLGGMGGAQPLSITMNNGVALIIEIDPTRIQKRIDTNYLEYSTESLNDAINKVKKAINDRKPLSVGLLGNAADIIPKIS

SEQ ID NO: 179787 - protein, 296 aa, Unknown
  Bacterial polypetide isolated from the Sargasso Sea
QMTAGSWIYIASQGIIQGTYETFVELGRQHFSGDWSGKWILTAGLGGMGGAQPLAATMAGASMLAVECDPSRIHRRLETGYLDESAETLEDALKILESHHQQGKAVSVGLLGNAAEILPEMLKRGVRPDAVTDQTSAHDPLNGYLPAGWSLDKAELMRKTESNAVIEAAKDSMATHVRAMLDFHRKGIPTIDYGNNIRQMALEKGVEDAFDFPGFVPACIRPLFCRGYGPFRWAALSGDPEDIYRTDEKVKELIPEDPHLHNWLEMAKKRIQFQGLPARICWVGLADRTRLGVAFN

SEQ ID NO: 179788 - protein, 281 aa, Unknown
  Bacterial polypetide isolated from the Sargasso Sea
GGAQPLAATLAGACSLNIECQQSRIDFRLETRYVDEQATDLDDALARIAKYTAEGKAISIALHGNAAEILPELVKRGVRPDMVTDQTSAHDPLNGYLPAGWTWEQYRDRAQTEPAAVVKAAKQSMAVHVQAMLDFQKQGIPTFDYGNNIRQMAKEEGVANAFDFPGFVPAYIRPLFCRGVGPFRWAALSGEAEDIYKTDAKVKELIPDDAHLHRWLDMARERISFQGLPARICWVGLGLRAKLGLAFNEMVRSGELSAPVVIGRDHLDSGSVSSPNRETEA

SEQ ID NO: 179789 - protein, 302 aa, Unknown
  Bacterial polypetide isolated from the Sargasso Sea
NLVPHWGNWEHFNELDAKGLAMYGQMTAGSWIYIGSQGIVQGTYETFVEAGRQHYNGNLTGRWVLTAGLGGMGGAQPLAATLAGACSLNIECQQASIDFRLRTRYVDEQATDLDDALARIEKYTKEGKAISIALHGNAAEILPELVRRGVHPDMVTDQTSAHDPLNGYLPIGWTWEEYRQRAKTEPEAVVKAAKKSMAKHVQAMLDFQKMGVPTFDYGNNIRQMAQEEGVENAFDFPGFVPAYIRPLFCRGVGPFRWVALSGDPEDIYKTDAKVKELIPDDEHLHRWLDMARERISFQGLPA

SEQ ID NO: 179790 - protein, 168 aa, Unknown
  Bacterial polypetide isolated from the Sargasso Sea
MKRLDPTREIRAPRGSTLNAKSWQTEAPLRMLMNNLDPDVAEHPQNLVVYGGIGRAARDWASYDKIVEVLKRLNTDETLLVQSGKPVGVFPTHENAPRVLIANSNLVPHWANWEHFNALDKEGLMMYGQMTAGSWIYIGSQGIVQGTYETFVSVAKTHFEGSAKGRWI

SEQ ID NO: 179791 - protein, 212 aa, Unknown
  Bacterial polypetide isolated from the Sargasso Sea
VPEYIRPLFCKGMGPFRWVALSGDEEDIFKTDQMVLEMFSDNLALCKWIKMAQEKVEFQGLPSRICWLGYGERAKFGLKLNEMVRSGELSAPIVIGRDHLDCGSVASPNRETEAMLDGSDAVADWPILNALLNTASGASWVSFHHGGGVGMGYSLHSGQVLVADGTKEMDSRLHAVLTNDPKMGIYRHADAGYKDAIENSKKWNINIPMIKS

SEQ ID NO: 179792 - protein, 167 aa, Unknown
  Bacterial polypetide isolated from the Sargasso Sea
MDKRHDPSRRIIAPHGSQLSCKSWLTEAPMRMLMNNLHPDVAERPEDLVVYGGIGRAARDWDCYDKIIEVLKRLEDDETLMVQSGKPVGVFRTHADAPRVLIANSNLVPHWANWEHFNELDKQGLAMYGQMTAGSWIYIGTQGIVQGTYETFVAVAKQHFGGVAAGK

SEQ ID NO: 179793 - protein, 297 aa, Unknown
  Bacterial polypetide isolated from the Sargasso Sea
ITDQTSAHDELDGYIPNNMSFSEALRLRESNPDLYITESYRAMAEHCEGILKLKKMGSIAFDYGNNLRGQAQKAGVKNAFDFPGFVPAYIRDLFCEGKGPFRWVALSGDPNDIYKTDEKVLEMFSDDKTLVRWIKLAREKVKFQGLPSRICWLGYNQRAKFGLALNEMVANGELSAPIVIGRDHLDCGSVASPYRETEDMKDGSDAVADWPLLNAMTSTASGATWASIHHGGGVGMGLAIHAGQVICVDGTTEMAKRIEAVLTNDPGMGLLRHADAGYDDAIKNSKNWNLNIPMINE

SEQ ID NO: 179794 - protein, 146 aa, Unknown
  Bacterial polypetide isolated from the Sargasso Sea
MDRKLDQSREIKAPTGTNLNCACWTIEAAFRMLQNNLDREVAENPDELVVYGGIGRAARSWADFDKIIETLKALQEHETLLIQSGKPVGVFTTHSDAPRVIIANSNLVPHWANWDHFNELDQKGLMMFRQMTAGSWIYIGTQGIVQ

SEQ ID NO: 179795 - protein, 111 aa, Unknown
  Bacterial polypetide isolated from the Sargasso Sea
DCGSVASPYRETENMLDGSDAVADWPILNALINAVNGASWISFHHGGGVGMGYSLHAGMVIVADGTNEAREKLSRVLNSDPGMGVLRHADAGYKIAREKAESSDIKIPFLN

SEQ ID NO: 179796 - protein, 95 aa, Unknown
  Bacterial polypetide isolated from the Sargasso Sea
GSDAVSDWPLLNALLNTAGGATWVSLHHGGGVGMGFSQHSGVVIVCDGTDEAAARIARVLTNDPATGVMRHADAGYDIAIDCAKEQGLNLPMITQ

SEQ ID NO: 179797 - protein, 232 aa, Unknown
  Bacterial polypetide isolated from the Sargasso Sea
ANSNLVPHWATWEHFHELDRKGLFMFGQMTAGSWIYIASQGIIQGTYETFVELGRQHFSGDWSGKWILTAGLGGMGGAQPLAATMAGASMLAVECDPSRIRRRLETGYLDESSETLEESLKILESHHQQGKAVSVGLLGNAAEILPEMLKRGVRPDAVTDQTSAHDPLNGYLPAGWSLEKAELMRKTEPNAVIEAAKDSMASHVRAMLDFHRLGIPTIDYGNNIRQMALKKG

SEQ ID NO: 179798 - protein, 232 aa, Unknown
  Bacterial polypetide isolated from the Sargasso Sea
LRGQAMKSGVQNAFDFPGFVPEYIRPLFCEGRGPFRWVALSGEKEDIFKTDNKIMEMFPNDNTLTRWIKLAREKVKFQGLPARICWLNYEQRSQFGVELNNMVAKGELSAPIVIGRDHLDTGSVASPYRETEGMLDGSDAVADWPLLNALMNTASGATWVSIHHGGGVGMGLSIHSGQVICADGTKEMEKRLERVLSNDPGIGILRHADAGYENAKYHANNWNIEIPMKENN

SEQ ID NO: 179799 - protein, 254 aa, Unknown
  Bacterial polypetide isolated from the Sargasso Sea
YRRGVRPDIVTDQTSAHDPINGYLPQGWKLAEWREKRESDPKAVEKAARASMKVHVRAMVDFWNDGVPTLDYGNNIRQVALDEGLKNAFAFPGFVPAYIRPLFCRGIGPFRWCALSGDPEDIYKTDEAMKELFPENTHLHKWLDMARERISFQGLPARICWIGLGDRHRAGLKFNEMVASGELKAPVVIGRDHLDSGSVASPNRETEAMKDGSDAVSDWPLLNALINTASGATWVSLHHGGGVGIGFSTTRWAW

SEQ ID NO: 179800 - protein, 154 aa, Unknown
  Bacterial polypetide isolated from the Sargasso Sea
MGKPVRNDPKRSIRAPRGTELSCKSWLTEAPMRMLMNNLDPEVAEKPEDLVVYGGIGRAARNWDCYDRIIETLKRLENHQSLLIQSGKPVGVFETHADAPRVLIANSNLVPHWATWEHFHELDRKGLFMFGQMTAGSWIYIASQGIIQGTYETF

SEQ ID NO: 179801 - protein, 149 aa, Unknown
  Bacterial polypetide isolated from the Sargasso Sea
CRICWFSYGEREKAPFLINELVRSRQVKAPIVIGRDHLDCGSVASPNRETEGMKDGSDAVADWPILNALINCANGATWVSFHHGGGVGMGYSLHAGMVIVADGTKEAERRLARVLNSDPAMGVLRHADAGYDKAKEVARDSKLKIPMLD

SEQ ID NO: 179802 - protein, 331 aa, Unknown
  Bacterial polypetide isolated from the Sargasso Sea
CLWRNGRAARTGKDFDQIVQSFKELEENETLVIQSGKPVGIFETHADAPRVLIANSNLVPHWATWEHFNELDKKGLAMYGQMTAGSWIYIGTQGIVQGTYETFVEAGRQHYSGDLTGRWILTGGLGGMGGAQPLAAVMAGACCLVVECDESRADFRLRTGYVDEKVKTLDEALSLINKWTTAKEAKSVGLIGNAADIFPELVRRGIKPDIVTDQTSAHDPIHGYLPQGWSLAEWREKQEIDPRCVEKAARASMKKHVAAMVDFWNMGVPTLDYGNNIRQIAKEEGLENAFAFPGFVPAYIRPLFCRGVGPFRWCALSGDPKDPFIKLDSKK

SEQ ID NO: 179803 - protein, 311 aa, Unknown
  Bacterial polypetide isolated from the Sargasso Sea
AARNWKSYDRIISCLQELEDDETLLIQSGTPVGIFQTHEEAPRVLIANANLVGRWANWEHFRELDKKGLMMYGQMTAGSWIYIGTQGILQGTYETFGAMGKKHFGSNLEGKWILTGGMGGMGGAQPLAATMNGASILVVEVDPDRIERRLNTGYCDKMTYDMAEALEWIKRATEKKNPLSVGLVGNCAEILPQMVKEQVIPDIVTDQTSAHDPLNGYVPAGLSLLEADSLRESDPEEYLKRSMESMRIHCEAIVAMMKKGSYATDYGNNLRTQAYDAGYEAAFSFPGFVPEYIRPLFCEGKGPFRWAALSG

SEQ ID NO: 179804 - protein, 251 aa, Unknown
  Bacterial polypetide isolated from the Sargasso Sea
CGPCLTFTDWGIPTIDYGNNIRQMALEKGVEDAFDFPGFVPACIRPLFCRGYGPFRWAALSGDPEDIYRTDEKVKELIPEDPHLHNWLEMAKKRIQFQGLPARICWVGLADRARLGVAFNDMVRSGELKAPVVIGRDHLDSGSVASPNRETEGMRDGSDAISDWPLLNALLNTAGGATWVSIHHGGGVGMGFAQHAGMVIVCDGSPEAEMRLRRVLRNDPGTGVMRHADAGYEEALASARENDLDLPMLGR

SEQ ID NO: 179805 - protein, 205 aa, Unknown
  Bacterial polypetide isolated from the Sargasso Sea
ATHVRAMLDFHRLGIPTIDYGNNIRQMALEKGVEDAFDFPGFVPACIRPLFCRGYGPFRWAALSGDPEDIYRTDEKVKELIPEDPHLHNWLEMAKKRIQFQGLPARICWVGLADRARLGVAFNEMVRIGELKAPVVIGRDHLDSGSVASPNRETEGMRDGSDAVSDWPLLNALLNTAGGATWVSLHHGGGVRDGVRPARGNGDRM

SEQ ID NO: 179806 - protein, 194 aa, Unknown
  Bacterial polypetide isolated from the Sargasso Sea
GWPYLGDPDDIYKTDQKVLELFSSNKSLCNWIEMAQEQVQFQGLPSRICWLGYNERAKFGLALNDMVRTGELSAPIAIGRDHLDCGSVASPNRETESMKDGSDAIADWPILNALLNTASGATWVSFHHGGGVGMGYSLHAGQVIVADGTKELEVRLKAVLTNDPGMGIYRHADAGYTDAQANAEKWNIDIPMSK

SEQ ID NO: 179807 - protein, 285 aa, Unknown
  Bacterial polypetide isolated from the Sargasso Sea
NLNGKLVLTAGLGGMGGAQPLAVKMAGGAIICIEIDPNRIQKRIDTKYLDCSTKSLEEALNIAKESMKKNNPISIGLLGNAADIIPEVVGTDFVPDIVTDQTSAHDELVGYIPNNYSIEEANYLRQSDKEKYIFESKRSMGEHVRGMLKLKDKGSIVFDYGNNIRSQALEAGVSNAFDLPGFVPEYIRPLFCEGKGPFRWVALSGNPEDIYKTDKRLIEIFPEDEALCNWIGMAGKEVQFQGLPSRICWLGYGQREKFGLALNKMVRTKELSAPIVIGRDHLDCG

SEQ ID NO: 179808 - protein, 266 aa, Unknown
  Bacterial polypetide isolated from the Sargasso Sea
DALKILESHHQQGKAVSVGLLGNAAEILPEMLKRGVRPDAVTDQTSAHDPLNGYLPAGWSLEKAELMRKTEPNAVIEAAKDSMATHVRAMLDFYRLGIPTIDYGNNIRQMALEKGVEDAFDFPGFVPACIRPLFCRGYGPFRWAALSGDPEDIYRTDEKVKELIPEDLHLHNWLEMAKKRIQFQGLPARICWVGLADRARLGVAFNDMVRSGELKAPVVIGRDHLDSGSVASPNRETEGMRDGSDAVSDWPLLNALLNTAGGATWV

SEQ ID NO: 179809 - protein, 227 aa, Unknown
  Bacterial polypetide isolated from the Sargasso Sea
PWPGASMVAVECDPSRIRRRLETGYLDESAETLEEALKILESHHQQGKAVSVGLLGNAAEILPEMLKRGVRPDAVTDQTSAHDPLNGYLPAGWSLEKAELMRKTEPNAVIEAAKDSMAIHVRAMLDFHRQGIPTIDYGNNIRQMALEKGVEDAFDFPGFVPACIRPLFCRGYGPFRWAALSGDPEDIYRTDEKVKELIPEDPHLHNWLEMAKKRIQFQGLPARICWV

SEQ ID NO: 179810 - protein, 243 aa, Unknown
  Bacterial polypetide isolated from the Sargasso Sea
MTRHDPSRSPRAPRGNTLNCKSWQTEAPFRMLQNNLDAEVAEDPASLVVYGGIGRAARDWESYDTILETLRRLDDNQTLLVQSGKPVGVFPTHPDAPRVLIANSNLVPHWANWEHFNELDKKGLMMYGQMTAGSWIYIGSQGIVQGTYETFVEMGRQHYGGSLAGKWILTAGLGGMGGAQPLAASLAGASSLTIECRQSSIDFRLRTRYVDEQASDIDDALARIARYTAAGEARSIALLGNAA

SEQ ID NO: 179811 - protein, 287 aa, Unknown
  Bacterial polypetide isolated from the Sargasso Sea
PINGYLPKGWSLNEWKEQREKNPKLVEKAARESMKEHVEAMVEFWNRGIPTLDYGNNIRQVALDEGLKTAFKFPGFVPAYIRPLFCKGIGPFRWCALSGDPEDIYKTDKKVKELIPDDIHLHNWLDMARERINFQGLPARICWVGLGQRHKLGLAFNEMVANGELSAPVVIGRDHLDSGSVASPNRETESMIDGSDAVSDWPLLNALLNTSSGATWVSIHHGGGVGMGYSQHSGMVICCDGTEDASKRVERVLWNDPATGVMRHADAGYEIAIEHAKKNKLNLPGIL

SEQ ID NO: 179812 - protein, 170 aa, Unknown
  Bacterial polypetide isolated from the Sargasso Sea
MTNSNTRRNVGEIHSPTGSDLSAKSWSTEAPMRMLMNNLDPDVAERPEELVVYGGIGRAARNWECFETIVAQLKNLEEDETLLVQSGKPVGVFRTHADAPRVLIANSNIVAHWATLDHFTELDRVGLMMYGQMTAGSWIYIGSQGIVQGTYETFSEVGRQHFGGDLTGKW

SEQ ID NO: 179813 - protein, 528 aa, Unknown
  Bacterial polypetide isolated from the Sargasso Sea
MSNPRLDPSRVIRAARGSEITAKSWQTEAAKRMLMNNLDPEVAEHPTSLVVYGGIGRAARDWACYDKIVEVLDRLNDDQTLLIQSGKPVGVFPTHPDAPRVLLANSNLVPNWANWEHFNELDKQGLMMYGQMTAGSWIYIGTQGIVQGTYETFVAIAKQHFAGEPKGKWVLTGGLGGMGGAQPLAATMAGFHMIACEVDESRIDFRLRTGYVDQKAYNLDEALAQLEAAKASGKPTSIGLLGNAADIFAELVARNIIPDVVTDQTSAHDPLNGYLPQGWTMQQAAERRLESETAVVQAAKASMAIQVKATLDMQTKGAVAVDYGNNIRQMALDMGVANAFDYPGFVPAYIRPLFCEGIGPFRWVALSGDPEDIYKTDTKVKELIPDNPHLHRWLDMARERIKFQGLPARICWIGLKDRARIALAFNEMVKNGELKAPIIIGRDHLDSGSVASPNRETEAMLDGSDAVSDWPLLNALLNTAGGATWVSLHHGGGVGMGYSQHSGVVILADGTEAAARRLGRVLWNDPGT

SEQ ID NO: 179814 - protein, 333 aa, Unknown
  Bacterial polypetide isolated from the Sargasso Sea
MAQDAILGQRPLSIGLLGNAADMVPKFVKRGVVPDIVTDQTSAHDEMVGYIPNHFTIEEANKLRGSNPKKYKQESIRSMGEHVKAILDLQAKGSIAFDYGNNIRAQAVKAGIENAFGFPGFVPAYIRPLFCEGKGPFRWVALSGDPKDIYATDKKIIELFPNDKALQHWIEMAQKKVKFQGLPSRICWLGYNQRAKFGLALNEMVRNGELSAPIVIGRDHLDCGSVASPNRETEAMKDGSDAVADWPILNALLNTASGASWVSFHHGGGVGMGYSLHSGQVIVADGTKEMDVRLKRVLTNDPGMGIYRHADAGYSDAIKNAKKWDVDIPMNNK

SEQ ID NO: 179815 - protein, 556 aa, Unknown
  Bacterial polypetide isolated from the Sargasso Sea
MDKRHDPSRRIIAPHGSQLSCKSWLTEAPMRMLMNNLHPDVAERPEDLVVYGGIGRAARDWDCYDKIIEVLQRLEDDETLMVQSGKPVGVFRTHADAPRVLIANSNLVPHWANWEHFNELDKQGLAMYGQMTAGSWIYIGTQGIVQGTYETFVAVAKQHFGGVAAGKWILTGGLGGMGGAQTLAGTMAGFSVLACEVDETRIDFRLRTRYVDKKATSLDEALAMINDANASGKPVSVGLLANAADVFAELVKRGITPDVVTDQTSAHDPLNGYLPQGWTMAQAADMRKTDEAAVVKAAKASMAVQVQAMLDLQAAGAATLDYGNNIRQMAFETGVKNAFDFPGFVPAYIRPLFCEGIGPFRWVALSGDPEDIYKTDAKVKELIPDNPHLHNWLDMARERIAFQGLPARICWVGLKDRARLAQAFNEMVKNGELSAPIVIGRDHLDSGSVASPNRETESMMDGSDAVSDWPLLNALLNTASGATWVSLHHGGGVGMGFSQHSGVVIVCDGTEAAAKRVGRVLWNDPATGVMRHADAGYEIAKNCAKEQGLDLPMLKD

SEQ ID NO: 179816 - protein, 579 aa, Unknown
  Bacterial polypetide isolated from the Sargasso Sea
MKRLDPTREIRAPRGSTLNAKSWQTEAPLRMLMNNLDPDVAEHPQNLVVYGGIGRAARDWASYDKIVEVLKRLNTDETLLVQSGKPVGVFPTHENAPRVLIANSNLVPHWANWEHFNALDKEGLMMYGQMTAGSWIYIGSQGIVQGTYETFVSVAKTHFEGSAEGRWILTGGLGGMGGAQPLAATMAGFSMVAVEVDETRIDFRIRTGYLDKKAHSLEEAMQLLEEAKEEGKPVSIGLLGNAAEVFPDMLAKGIIPDVVTDQTSAHDPLNGYLPVGWTLDQAEAQRKKDEAGVVKSAKQSMALQVKAMLGFQQAGAATLDYGNNIRQMALEEGIEHAFDFPGFVPAYIRPLFCQGIGPFRWAALSGDPEDIYKTDAKVKELIPDNPHLHNWLDMAKERIQFQGLPARICWVGLGERQKLGLAFNEMVRSGELSAPVVIGRDHLDSGSVASPNRETEAMLDGSDAVSDWPLLNALLNTAGGATWVSLHHGGGVGMGFSQHSGVVIVCDGTDEAAERIARVLHNDPATGVMRHADAGYDIAKDCAAKHNLDLPMVNSAANNQIPDRTGTHSSSNKSFGGEK

SEQ ID NO: 179817 - protein, 147 aa, Unknown
  Bacterial polypetide isolated from the Sargasso Sea
WLNYEQRSQFGVELNNMVAKGELSAPIVIGRDHLDTGSVASPYRETEGMLDGSDAVADWPLLNALINTASGATWVSIHHGGGVGMGLSIHSGQVICADGTKEMEKRLKRVLSNDPGIGILRHADAGYEDAKYYANNWNIEIPMKENN

SEQ ID NO: 179818 - protein, 556 aa, Unknown
  Bacterial polypetide isolated from the Sargasso Sea
MDKRHDPSRRIIAPHGSQLSCKSWLTEAPMRMLMNNLHPDVAERPEDLVVYGGIGRAARDWDCYDKIIEVLKRLEDDETLMVQSGKPVGVFRTHADAPRVLIANSNLVPHWANWEHFNELDKQGLAMYGQMTAGSWIYIGTQGIVQGTYETFVAVAKQHFGGVAAGKWILTGGLGGMGGAQTLAGTMAGFSVLACEVDETRIDFRLRTRYVDKKATSLDEALAMINDANASGKPVSVGLLANAADIFAELVKRGITPDVVTDQTSAHDPLNGYLPQGWTMAQAADMRKTDEAAVVKAAKASMAVQVQAMLDLQAAGAATLDYGNNIRQMAFETGIKNAFDFPGFVPAYIRPLFCEGIGPFRWVALSGDPEDIYKTDAKVKELIPDNPHLHNWLDMARERIAFQGLPARICWVGLKDRARLAQAFNEMVKSGELSAPIVIGRDHLDSGSVASPNRETESMMDGSDAVSDWPLLNALLNTASGATWVSLHHGGGVGMGFSQHSGVVIVCDGTEAAAKRVGRVLWNDPATGVMRHADAGYEIAKNCAKEQGLDLPMLKD

SEQ ID NO: 179819 - protein, 348 aa, Unknown
  Bacterial polypetide isolated from the Sargasso Sea
ETKYLDTSVKTLDEAIIIANQAKNNKEAITIGLEGNAADIVPKMVELNFVPDMITDQTSAHDELDGYIPNGLSIKESNDLRKSDSKRYISESYKAMVTHCEAIIKLQAMGSIAFDYGNNLRGQAKKAGLKNAFDFPGFIPEYIRPLFCQGKGPFRWVALSGDPDDIYKTDAAVLEMFPDDKVLSNWINMAKDQVQFQGLPSRICWLGYNQRAKFGVRLNEMVARGELSAPIVIGRDHLDCGSVASPYRETESMKDGSDAVADWPLLNALLNTASGSTWVSIHQGGGVGMGLSIHAGQVLCVDGSNEMALRAERVLTNDPATGIIRHVDAGYDDAIKNADQWDVDIPSL

SEQ ID NO: 179820 - protein, 552 aa, Unknown
  Bacterial polypetide isolated from the Sargasso Sea
MSNKNIKASIGNQLEAKSWQTEAPLRMIMNNLDRDVAENPDELIVYGGIGKAARNWECYETIVSELKKLEDNETLLIQSGKPVGIFKTHTDAPRVLIANSNLVPAWANWEHFNELDKKGLMMYGQMTAGSWIYIGSQGIVQGTYETFVEMGRQHFDGDLSGRWILTAGLGGMGGAQPLAATMAGASLLAIECDQDRIQKRLSTGYLDKTADNLDEALEMIQSSIDNKEPISVGLLGNVVDILPKMIEMKVKPDIVTDQTSAHDPVNGYLPSGWSIDEWDKKRKSHPEIVAKYAKESMAKHVEAMLAFHGQGIPTVDYGNNLRQMAFDQGVSAAFSFPGFVPAYVRPLFCRGIGPFRWVALSGDPEDIYKTDAKVKELMPNDSHLHRWLDAAQKKIKFQGLPARICWLGLGDRDRMALAFNEMVRKGELSAPIVIGRDHLDSGSVASPNRETEDMLDDSDAVSDWPLLNALLSTASGATWVSLHHGGGVGMGYSQHSGLVIVCDGTIEADERISRVLWNDPASGVMRHADAGYQEALECASQHNLNLPMQKKN

SEQ ID NO: 179821 - protein, 466 aa, Unknown
  Bacterial polypetide isolated from the Sargasso Sea
MKNNIKPPIGNNLTCKNWQIEAPYRMIQNNLHPDVAEDPENLVVYGGKGKAARNWDCYKAIIRSLKALNEDETLLVQSGKPVGVVKTHLSAPRVLIANSNLVPNWANWEHFNELDRNGLTMYGQMTAGSWIYIGTQGILQGTYETFAAAAKQHFDSDLRGKLVVSAGLGGMGGAQPLAVTMNNGVALIVESDPSKIQRRLDTQYLQYSTESLNEAISMVKKAINSKKPLSVGLLGNAADIIPNLAKMDIIPDFVTDQTSAHDELDGYIPNGYTYQEALALRKNNPDEYIKESYRAMSEHCKGILALNQKGSICFDYGNNLRGQAMKSGVQNAFDFPGFVPEYIRPLFCEGRGPFRWVALSGEKEDIFKTDNKIMEMFPNDNTLTRWIKLAREKVKFQGLPARICWLNYEQRSQFGVELNNMVAKGELSAPIVIGRDHLDTGSVASPYRETEGMLDGSDAVADWPLL

SEQ ID NO: 179822 - protein, 557 aa, Unknown
  Bacterial polypetide isolated from the Sargasso Sea
MTNRLDTSRVIRAPHGDMISAKSWQTEAAKRMLMNNLDPEVAEHPHALVVYGGIGRAARDWPSFDKIIATLDRLNDDETLLVQSGKPVGVFKTHSNAPRVLIANSNLVPHWANWEHFNELDKKGLMMYGQMTAGSWIYIGSQGIVQGTYETFVAMAKQHFNGQAKGKWVLTGGLGGMGGAQPLAATMAGFCALVVECDESRIDFRIKTGYVDVKATNLEHALQLITDACVNDKAISVGLLGNAADIFSTLVSSGITPDIVTDQTSAHDPLNGYLPQGWTMEHAAKMREQNPKAVVKAAKQSMAVQVNAMLALQKAGAATTDYGNNIRQMAFEEGVTNAFDFPGFVPAYIRPLFCQGIGPFRWVALSGDPEDIYKTDAKVKELIPDDAHLHNWLDMARERIQFQGLPARICWVGLKDRARLALAFNEMVKNGELKAPIVIGRDHLDSGSVASPNRETESMKDGSDAVSDWPLLNALLNTASGATWVSLHHGGGVGMGFSQHSGVVIVADGTDEAKARVGRVLWNDPATGVMRHADAGYDIAKNCAKEQNLDLPMLNEE

SEQ ID NO: 179823 - protein, 276 aa, Unknown
  Bacterial polypetide isolated from the Sargasso Sea
MPNSRHNIRDVYPPTGNQITAKSWLTEAPMRMLMNNLHPDVAEDPHALVVYGGIGRAARTWEDYDKMVATLQDLETDQTLLVQSGKPVGVFRTHKDAPRVLIANSNLVPHWATWDHFNELDKRGLAMYGQMTAGSWIYIGTQGIVQGTYETFVEAGRQHYKGDLTGRWILTAGLGGMGGAQPLAAVMAGACCLAVECDESRADFRLRTRYVDEKTHSLDEALAMIKGWCDAGEAKSVALIGNAADVFPELVRRGVKPDIVTDQTSAHDPLHGYLPL

SEQ ID NO: 179824 - protein, 198 aa, Unknown
  Bacterial polypetide isolated from the Sargasso Sea
PFRWAALSGDPEDIYRTDEKVKELIPEDPHLHNWLEMAKKRIQFQGLPARICWVGLADRARLGVAFNDMVRSGELKAPVVIGRDHLDSGSVASPNRETEGMCDGSDAVSDWPLLNALLNTAGGATWVSIHHGGGVGMGFAQHAGMVIVCDGSPEAEMRLRRVLRNDPGTGVMRHADAGYEEALASARENDLDLPMLGR

SEQ ID NO: 179825 - protein, 562 aa, Unknown
  Bacterial polypetide isolated from the Sargasso Sea
MNHPKHIDPRLDPTRTIRAPRGSEKVCKTWLAEAAYRMIQNNLDPEVAEHPHALVVYGGIGRAARNWECYDQILASLKDLEENETLLIQSGKPVGVFRTHKDAPRVLLANSNLVPHWANWDHFHELDRKGLMMYGQMTAGSWIYIGSQGIVQGTYETFFSVANQHFNGDPSGRWILTGGLGGMGGAQPLAATMAGFSMIAVECDETRIDFRLKTRYVDKKATTLDEALGMIEEAKRTGKPVSIGLLGNAADVFAELVTRGITPDCVTDQTSAHDPINGYLPQGWTVAQWREAQKVDPQSIVKVAKQSMAVQVRAMLALQERGAATLDYGNNIRQMALEMGVENAFDFPGFVPAYIRPLFCEGKGPFRWVALSGDPEDIYKTDQKVKELIPDDPHLHNWLDMARERIAFQGLPARICWVGVKDRYRLGQAFNEMVKNGELKAPIVIGRDHLDTGSVASPNRETEAMKDGSDAVSDWPLLNALLNTAGGASWVSLHHGGGVGMGFSQHSGVVIVADGTAEAHERLGRVLLNDPATGVMRHADAGYELAQQTAREAGLKLPMLGR

SEQ ID NO: 179826 - protein, 483 aa, Unknown
  Bacterial polypetide isolated from the Sargasso Sea
GRAARNWDCFDQILASLKDLNEDETLLIQSGKPVGVFRTHADAPRVLLANSNLVPHWATWEHFHELDRKGLMMYGQMTAGSWIYIGSQGIVQGTYETFFSVANQHFNGDPSGRWILTGGLGGMGGAQPLAATMAGFSMIAVECDETRIDFRLKTRYVDKKAKTLDEALAMLDEAKKSGKPVSIGLLGNAADVFAECVTRGITPDCVTDQTSAHDPIHGYLPQGWSVEDWRERQKTAPDSIVTPAKQSMAKQVQAMLALQARGAATLDYGNNIRQMALEMGVENAFDFPGFVPAYIRPLFCEGKGPFRWVALSGDPEDIYKTDAKVKELIPDDPHLHNWLDMARERIAFQGLPARICWVGVKDRYRLGQAFNEMVKNGELKAPIVIGRDHLDTGSVASPNRETESMKDGSDAVSDWPLLNALLNTAGGASWVSLHHGGGVGMGFSQHSGVVIVADGTDAAKERLGRVLFHDPATGVMRHADAGY

SEQ ID NO: 179827 - protein, 146 aa, Unknown
  Bacterial polypetide isolated from the Sargasso Sea
WRQKLGLAFNEMVRSGEVSAPIVIGRDHLDSGSVASPNRETEAMRDGSDAVSDWPLLNALLNTASGATWVSLHHGGGVGMGFSQHAGMVIVCDGTDEAAARIARVLHNDPATGVMRHADAGYDIAVECAVEEGLNLPMVTATQEKR

SEQ ID NO: 179828 - protein, 281 aa, Unknown
  Bacterial polypetide isolated from the Sargasso Sea
ARAAKSAPQEVNVAARHSMARQVEAMLTLQSRGAATLDYGNNIRQMALEEGVKNAFDFPGFVPAYIRPLFCEGIGPFRWVALSGDPEDIYKTDQKVKELIPDDPHLHNWLDMARERIAFQGLPARICWVGVKDRVRLGLAFNEMVKNGELKAPIVIGRDHLDSGSVASPNRETESMMDGSDAVSDWPLLNALLNTAGGATWVSLHHGGGVGMGFSQHSGVVIVCDGTDDAARRVGRVLRNDPATGVMRHADAGYEIAINCAHEAKLDLPMIDGANGVKGKV

SEQ ID NO: 179829 - protein, 550 aa, Unknown
  Bacterial polypetide isolated from the Sargasso Sea
MKNIHPPIGNNLKCKNWQIEAAYRMIQHNLDPDVAEIPEELIVYGGKGKAARNWESFNAILRTLERLEPDETLLVQSGKPVGVAKTHSYAPRVLIANSNLVPKWATWDHFNKLEKDGLMMFGQMTAGSWIYIGTQGILQGTYETFIAAAKKHWGIDSLKGKLILTSGLGGMGGAQPLAVTMAGGVVICIEIDNHRINRRLETNYLDKATDSFEKAIKMAKDAVFKKIPLSIGLLGNAADIVPKFVSSDIIPDMVTDQTSAHDELIGYIPNHYTIEEADKLRESNPKKYKHESIRSMGEHVNAILELQRKGSIAFDYGNNIRAQAEKAGVKNAFDFPGFVPAYIRPLFCEGKGPFRWVALSGDPNDIYNTDKKVIELFPKDKALCHWIEMAQKKVKFQGLPSRICWLGYGQRAKFGLALNAMVKSGELSAPIVIGRDHLDCGSVASPNRETESMKDGSDAVADWPILNALLNTASGASWVSFHHGGGVGMGYSLHSGQVIVADGTDEMDARLSVVLNNDPGMGIYRHADAGYSDAIENAKKWNIDIPMLEK

SEQ ID NO: 179830 - protein, 531 aa, Unknown
  Bacterial polypetide isolated from the Sargasso Sea
VYGGIGRAARDWASYDKIVEVLKRLNTDETLLVQSGKPVGVFPTHENAPRVLIANSNLVPHWANWEHFNALDKEGLMMYGQMTAGSWIYIGSQGIVQGTYETFVSVAKTHFEGSAEGRWILTGGLGGMGGAQPLAATMAGFSMVAVEVDETRIDFRIRTGYLDKKAHSLEEAMQLLEEAKEAGKPVSIGLLGNAAEVFPDMLAKGIIPEVVTDQTSAHDPLNGYLPVGWTLDQAEAQRKKDEAGVVKSAKQSMALQVKAMLGFQQAGAATLDYGNNIRQMALEEGIEHAFDFPGFVPAYIRPLFCQGIGPFRWAALSGDPEDIYKTDAKVKELIPDNPHLHNWLDMAKERIQFQGLPARICWVGLGERQKLGLAFNEMVRSGELSAPVVIGRDHLDSGSVASPNRETEAMLDGSDAVSDWPLLNALLNTAGGATWVSLHHGGGVGMGFSQHSGVVIVCDGSDEAAERIARVLHNDPATGVMRHADAGYDIAKDCAAKHNLDLPMINNAANNQSPDGTSTHSSANKSFGGEK

SEQ ID NO: 179831 - protein, 433 aa, Unknown
  Bacterial polypetide isolated from the Sargasso Sea
MGKPVRNDPKRSIRAPRGTELSCKSWLTEAPMRMLMNNLDPEVAEKPEDLVVYGGIGRAARNWDCYDRIIETLKRLENHQSLLIQSGKPVGVFETHADAPRVLIANSNLVPHWATWEHFHELDRKGLFMFGQMTAGSWIYIASQGIIQGTYETFVELGRQHFSGDWFGKWILTAGLGGMGGAQPLAATMAGASMLAVECDPSRIRRRFETGYLDESAETLEDALKILESHHQQGKAVSVGLIGNAAEILPEMLKRGVRPDAVTDQTSAHDPLNGYLPAGWSLEKAELMRKTEPNAVIEAAKDSMATHVRAMLDFHRLGIPTIDYGNNIRQMALEKGVEDAFDFPGFVPACIRPLFCRGYGPFRWAALSGDPEDIYRTDEKVKELIPEDPHLHNWLEMAKKRIQFQGLPARICWVGLADRARLGVAFNDMVRSG

SEQ ID NO: 179832 - protein, 409 aa, Unknown
  Bacterial polypetide isolated from the Sargasso Sea
TYETFVAVAKQHFGGVAAGKWILTGGLGGMGGAQTLAGTMAGFSVLACEVDETRIDFRLRTRYVDKKATSLDEALAMINDANAAGKPVSVGLLANAADIFAELVKRGITPDVVTDQTSAHDPLNGYLPQGWTMAQAADMRKTDEASVVKAAKASMAVQVQAMLDLQAAGAATLDYGNNIRQMAFETGVKNAFDFPGFVPAYIRPLFCEGIGPFRWVALSGDPEDIYKTDAKVKELIPDNPHLHNWLDMARERIAFQGLPARICWVGLKDRARLAQAFNEMVKSGELSAPIVIGRDHLDSGSVASPNRETESMMDGSDAVSDWPLLNALLNTASGATWVSLHHGGGVGMGFSQHSGVVIVCDGTEAAAKRVGRVLWNDPATGVMRHADAGYEIAKNCAKEQGLDLPMLKD

SEQ ID NO: 179833 - protein, 555 aa, Unknown
  Bacterial polypetide isolated from the Sargasso Sea
MSDLIKNSRIVKPPTGDKITAKSWSTEAPMRMLMNNLHPDVAENPNELVVYGGIGRAARSWQDFDKIVSSLKSLDEDETLLVQSGKPVGIFKTHEDAPRVLIANSNLVPNWANWDHFNELDKKGLAMYGQMTAGSWIYIGTQGIVQGTYETFVEAGRQHYNGDLKGKWILTAGLGGMGGAQPLAAVMAGACCLAVECNPESIDFRLRTGYLDEKAESLKEALEMIKAWTSSGVSKSVGLLGNAATIFTEIAEMGIKPDIVTDQTSAHDPTNGYLPENWSISEWKDKRETNPKLVEAEARKSMKKHVQAMVSFWNKGVPTLDYGNNIRQVALDEGLETAFSFPGFVPAYIRPLFCKGIGPFRWCALSGDPDDIYKTDAKVKELIPDDKHLHKWLDMARERIKFQGLPARICWVGLGQRDKLGLAFNEMVAKGELSAPIVIGRDHLDSGSVASPNRETEAMKDGSDAVSDWPLLNALLNTASGATWVSLHHGGGVGMGYSQHSGMVICCDGTKKASERIKRVLWNDPATGVMRHADAGYNIAIESAKYHKLNLPSIK

SEQ ID NO: 179834 - protein, 427 aa, Unknown
  Bacterial polypetide isolated from the Sargasso Sea
RLGVGYIFGTQGILRGTYETFISAAKVHWGNDNLKGKLVLTAGLGGMGGAQPLAVSMAGGVSICVEIDKNIIKRRIDTKYLDKSADNVDEAIIMAKIALEDKKPLSIGLLGNAADIIPKFVEKNIIPDLVTDQTSAHDELDGYIPNNISFDEAILLKNADPNKFRKESIRSMGIHVKGMLELQDKGSIVFDYGNNIRAQAKKAGVEAAFNIPGFVPEYIRPLFCEGKGPFRWVALSGKVEDIYKTDELILSMFPNDKALCHWIKMANEKVSFQGLPSRICWLGFKDRAKFGLKLNEMVASGELSGPIVIGRDHLDCGSVASPNRETESMKDGSDAIADWPLLNALINTASGASWVSIHHGGGVGMGYSIHAGQVIVADGTSEMKERISRVLTNDPGIGVIRHADAGYSEAIVNARNWDIDIPLIKKK

SEQ ID NO: 179835 - protein, 389 aa, Unknown
  Bacterial polypetide isolated from the Sargasso Sea
WILTAGLGGMGGAQPLAATMAGASMLAVECDPSRIRRRLETGYLDESAENLEEALKILESHHQQGKAVSVGLLGNAAEILPEMLKRGVRPDAVTDQTSAHDPLNGYLPAGWSLEKAELMRKTEPNAVIEAAKDSMATHVLAMLDFHRLGIPTIDYGNNIRQMALDKGVEDAFDFPGFVPACIRPLFCRGYGPFRWAALSGDPEDIYRTDEKVKELIPEDPHLHNWLEMAKKRIQFQGLPARICWVGLADRARLGVAFNDMVRNGELKAPVVIGRDHLDSGSVASPNRETEGMRDGSDAVSDWPLLNALLNTAGGATWVSIHHGGGVGMGFAQHAGMVIVCDGTPEAEMRLRRVLRNDPGTGVMRHADAGYKEALASARENDLDLPMLGR

SEQ ID NO: 179836 - protein, 136 aa, Unknown
  Bacterial polypetide isolated from the Sargasso Sea
MFKGSNVALITPFKDNILDEEAYIKLIHFHINNGTNGLVPAGTTGESPTLSHDEHQRVIDLCIKESSGKIPVIAGTGSNSTEEAISLTTHAEKAGADGALIVTPYYNKPTQEGLYQHYKAINDKSSIPIIIYNIPR

SEQ ID NO: 179837 - protein, 212 aa, Unknown
  Bacterial polypetide isolated from the Sargasso Sea
VAIVQAKLWEATKKAYDSGADGALVVVPYYNKPPQEGLYKHFSSIAKSAKDLPLMLYNIPGRTGCNLLPDTVKKLMDFSNILSIKAASGRIEEVTELRAICGSELSVYSGDDSLLLPMLSVGAVGVVSVASHLVGLQLKEMIHSFQSGKVSNALAIHEKLQPLFKALFMTTNPIPIKAALELSGWDVGNPRSPLSPLTNDMKKQLSFILNSL

SEQ ID NO: 179838 - protein, 134 aa, Unknown
  Bacterial polypetide isolated from the Sargasso Sea
MQALKGSLVALVTPMEESGEVDYESLEKLIDWHINHGTNGIVSVGTTGESATLDVDEHLEVIKHTVEHVNSRVPVIAGTGANSTSEAIELTQESKQNGADFALIVTPYYNKPTQKGLISHYTKLANEVDIPQIL

SEQ ID NO: 179839 - protein, 265 aa, Unknown
  Bacterial polypetide isolated from the Sargasso Sea
MFKGSIVALITPFKNNMMDEERYRSLIHYHISNGTKAVVPAGTTGESPTLNHDEHKKVIEIAVKECKDKIPVIAGTGSNSTAEAIELSKHAEKAGADGLLVVTPYYNKPVQEGLFQHYKLINDNVGIPIIIYNIPPRSVVDMSVDTMARLFELKNIVGVKDATADLNRVNQQLEKMGSEFIQLSGEDGTALEFNMRGGVGCISVTANIAAKLCADFQDACLNKNYKLAKEINDKLMPLHKALFLESNPSPVKYAASLLKLSPEDV

SEQ ID NO: 179840 - protein, 246 aa, Unknown
  Bacterial polypetide isolated from the Sargasso Sea
GESPTLSHEEHKLAVEICVEETAKRVPVIAGTGSNNTDEAIDLTMHAEKAGADGALVVTPYYNKPTQHGLYSHFEAISKATTLPIIIYNIPGRSIVDMNTKTMRDLFKIKNIVGVKDATSDIPRVYETKTTIGEDFNQLTGDDATTLAFMIYGGHGSISVTSNIAPKLCSEFMKYCLDQNFAKASEINDKLMPLHHALFVESSPAPVKYAASKLGLCKDDIRLPLTSISDETKQLVDKAMKHASLI

SEQ ID NO: 179841 - protein, 156 aa, Unknown
  Bacterial polypetide isolated from the Sargasso Sea
MFKGSIVALITPFKDDKLDEEKYAQLINHHIKNGTNGIVPAGTTGESPTLSHNEHRKVIEISVNECKGKIPVIAGTGSNSTDEAIELSKHAEKVGANGLLIVTPYYNKPTQEGLYQHYKKINDNVGIPIIIYNIPSRSVIDMKVETMARLFELKIF

SEQ ID NO: 179842 - protein, 202 aa, Unknown
  Bacterial polypetide isolated from the Sargasso Sea
EKAGAFGALVVTPYYNKPTQEGLYQHYKAINDKCGIPIIIYNIPGRSVIDMSVDTMARLYELKNIVGVKDATGDLDRVNQQLNKMGKDFIQLTGNDDNAFEFNKRGGVGTISVTANIAPKLCSEFQKNSISRKDEDLAKAKELDNILQPVHTAMFVESNPSPVKYAAKLMNLCDDEVRLPLVKVTEETKIIVKKAIETAKLI

SEQ ID NO: 179843 - protein, 113 aa, Unknown
  Bacterial polypetide isolated from the Sargasso Sea
MFKGSNVALITPFKNNGLDEEAYIKLIHFHIDNGTNGLVPAGTTGESPTLSHDEHQRVIDLCIKESNGKIPVIAGTGSNSTEEAISLTTHAEKAGANGALIVTPYYNKPTQEG

SEQ ID NO: 179844 - protein, 293 aa, Unknown
  Bacterial polypetide isolated from the Sargasso Sea
MITDKTECNKPLFGKILTAMVTPFTENGDVDYELAIKLSNYLFENGSDGIVLCGTTGESPTLSWAEQHDLFVAVRGSLDATCKVIVGTGSNCTSEAVEATKKAYDSGADGALVVVPYYNKPPQEGLYKHFSSISNSAKDLPLMLYNIPGRTGCNLLPDTVKKLMDFSNILSIKAASGRIEEVTELRAICGSELSVYSGDDSLLLPMLSVGAVGVVSVASHLVGLQLKEMIHSFQSGEVSNALAIHEKLQPLFKALFMTTNPIPIKAALELSGWDVGNPRSPLSPLTNDMKKQL

SEQ ID NO: 179845 - protein, 252 aa, Unknown
  Bacterial polypetide isolated from the Sargasso Sea
MFNLKGSIVALVTPMNSDGTIDWQALKDLIEWHINSGSAGIVIVGTTGESATLDVAEHVQVIEKSVKIADGRIMVIAGTGANSTKEAIYLTASAKSAGVDAALLVTPYYNKPSQEGLYRHYSNIADEVDLPQILYNVPSRTGCDLLSDTVIKLVPHDSIVGLKDATGDLNRLDEILILLQDLKDNEFKLYSGDDPTATQFMLNGGSGTISVTANVVPSSIAEISKKALSGETKMAIKLDEELKELNEILFIE

SEQ ID NO: 179846 - protein, 174 aa, Unknown
  Bacterial polypetide isolated from the Sargasso Sea
MFKGSNVALITPFKNNELDIDNYIKLIHFHIENGTNGLVPAGTTGESPTLSHTEHQKVIELCIKESNGKIPVIAGTGSNSTEEAISLTKHAEKVGANGALVVTPYYNKPTQEGLYQHYKAINDNCSIPIIIYNIPSRSVIDMTVDTMARLFELKNIFGVKDATGDLSRVVSKKK

SEQ ID NO: 179847 - protein, 194 aa, Unknown
  Bacterial polypetide isolated from the Sargasso Sea
MFKGSNVALVTPFKNDKLDDETYINLIHFHIQNGTNGLVPAGTTGESPTLSHDEHERVIELCVKESNGKLPVFAGTGSNSTEEAISLTTHAEKIGATGALIVTPYYNKPTQEGLYQHYKAINDKCGIPIIIYNIPGRSVIDMSVDTMARLFELKNIIGVKDATGDLNRVEQTLKKIGNEFIQLTGNDDNALEFN

SEQ ID NO: 179848 - protein, 226 aa, Unknown
  Bacterial polypetide isolated from the Sargasso Sea
MFTGSIVALVTPMDENGNVCRSSLKKLIDYHVASGTSAIVSVGTTGESATLSHEEHGDVVMMTLELADGRIPVIAGTGANATAEAISLTKRFNNSGVVGCLTVTPYYNRPTQEGLFQHFKAIAEHTDLPQILYNVPSRTGCDMLPETVGRLAEVKNIIGIKEATGNLSRVHQIKELVSDDFILLSGDDATGMDFMQLGGQGVISVTANVAAREMADMCRLAAEGQF

SEQ ID NO: 179849 - protein, 226 aa, Unknown
  Bacterial polypetide isolated from the Sargasso Sea
AKKRVPVIAGTGSNSTDEAIQLTKFAEKIGADAALVVTPYYNKPTQDGMYSHFKAINDNCKIPIIIYNIPGRCIVDMNINTMLKLSKLKNIVGVKDASNDLSRPLLTSLNIGKKFCQLSGEDATLLPFLVQGGHGCISVTANIVPRLCSDLHESFFSNNFKKAYKINESLFPLNQALFNETSPGPVKFAASLMNFCTDECRLPLVKVSQNTKILIKKVMKQLKIKK

SEQ ID NO: 179850 - protein, 236 aa, Unknown
  Bacterial polypetide isolated from the Sargasso Sea
EEQHDLFIAVKGSLDSSCKVIVGTGSNSTSEAVEATKKAFESGADGALVVVPYYNKPPQEGLYQHFSSVANSAKDLPLMLYNIPGRTGCNLLPDTVKKLMNFSNILSIKAASGRIEEVTELRAICGSELSVYSGDDSLLLPMLSVGAVGVVSVASHLVGLQLREMIESFQRGKISNALAIHEKLQPLFKALFMTTNPIPIKAALELSGWNVGNPRSPLSPLTTDMKEQLSFILKSL

SEQ ID NO: 179851 - protein, 111 aa, Unknown
  Bacterial polypetide isolated from the Sargasso Sea
MFKGSNVALITPFKNNLLDEEAYVKLIHFHIENGTSGLVPAGTTGESPTLSHDEHQKVIDLCIKESNGKIPVIAGTGSNSTEEAISLTSHAEKAGANGALIVTPYYNKPTQ

SEQ ID NO: 179852 - protein, 220 aa, Unknown
  Bacterial polypetide isolated from the Sargasso Sea
TGSNSTEEAVSLTKHAEKAGADGALVVTPYYNKPTQEGLYQHYKSINDNCGIPIIIYNIPSRSVIDMSVETMARLYELKNIVGVKDATGDLNRVDQQKEKMGNDFIQLTGNDDNAFEFNKRGGVGTISVTANVAPKLCSEFQKLSKSSNEDDLKKAQQLDDMLQPLHKNLFIESNPSPVKYAAKLLGLCDDAVRLPLVKITENTKKEVEKALKVAKLIDE

SEQ ID NO: 179853 - protein, 185 aa, Unknown
  Bacterial polypetide isolated from the Sargasso Sea
MFKGSIVALITPFKNNKIDEDRYASLIHYHISNGTNGLVPAGTTGESPTLDHDEHKKVIEIAVRESNGKIPVIAGTGSNSTSEAIELSQHAEKAGANALLIVTPYYNKPTQEGLYQHYKTINDKVGIPIIIYNIPPRSVVDMSVDTMARLFELKNIAGVKDATADLDRVDQQLKKMGPRIYSVIW

SEQ ID NO: 179854 - protein, 203 aa, Unknown
  Bacterial polypetide isolated from the Sargasso Sea
KAGADGALVVTPYYNKPTQEGLYQHYKSINDNCGIPIIIYNIPSRSVIDMSVETMARLYELKNIVGVKDATGDLNRVDQQKEKMGNDFIQLTGNDDNAFEFNKRGGVGTISVTANVAPKLCSEFQKLSKSSNEDDLKKAQQLDDMLQPLHKNLFIESNPSPVKYAAKLLGLCDDTVRLPLVKITENTKKEVEKALKVAKLIDE

SEQ ID NO: 179855 - protein, 273 aa, Unknown
  Bacterial polypetide isolated from the Sargasso Sea
YIKIINFHLENGTNGLVPAGTTGESPTLSHKEHEKVIELCIKEAKGKIPVIAGTGSNSTTEAISLTEHAEKAGADGALIVTPYYNKPTQEGLYQHYKAINDKCGIPIIIYNIPGRSVIDMTVDTMARLFELKNIVGVKDATGDLNRVDETFKKIGNEFIQLTGEDGLAYEYNKRGGVGCISVTANIAPKMCSDMQKFSKSQNNDEQKKAGEIDKKLQPVHKSLFIESNPSPVKYAAKLIGLCDDNVRLPLVTVLDETKAEVKKALISAKLINE

SEQ ID NO: 179856 - protein, 265 aa, Unknown
  Bacterial polypetide isolated from the Sargasso Sea
FHIENGTSGLVPAGTTGESPTLSHSEHERVIELCVKESKGKLPVFAGTGSNSTEEAISLTSHAEKIGANGALIVTPYYNKPTQEGLYQHYKSINDKCGIPIIIYNIPGRSVIDMTVDTMAKLYELKNIIGVKDATGDLNRVDQTIKKMGKDFLQLTGNDDNAFEFNKRGGQGAISVTANIAPKLCSEFQKFSKLKSDDNIKEAEKLNKILQPLHHAMFVESNPSPVKYAAKLLNLCDDSVRLPLVKVTEKTKEIVEKALLSANLI

SEQ ID NO: 179857 - protein, 160 aa, Unknown
  Bacterial polypetide isolated from the Sargasso Sea
MFTGSMVAMVTPMHDDGSVDWTALEGLVNHHVAEGTDAIVSVGTTGESATLNHDEHGEVIARTVKAAAGRIPVIGGTGANSTAEAISLTRHAAEVGVDACLLVVPYYNKPPQEGLYQHFKAIADAVSIPQILYNVPGRTGVDMHNDTTLRLAEIDNIVAI

SEQ ID NO: 179858 - protein, 92 aa, Unknown
  Bacterial polypetide isolated from the Sargasso Sea
MFKGSHTALITPFDGKSIDEKSFRSLIDFQISEGIHGLVPVGTTGESPTLSHEEHKLAVEICVEETAKRVPVIAGTGSNNTDEAIDLTMHAE

SEQ ID NO: 179859 - protein, 307 aa, Unknown
  Bacterial polypetide isolated from the Sargasso Sea
MFKGSIVALITPFKNNVLDQDKYGSLIHHHIKNGTNGVVPAGTTGESPTLDHDEHKKVIEIAVKETNGKIPVIAGTGSNSTTEAIELSIHAEKTGANALLIVTPYYNKPTQEGLYQHYKAINDKVGIPIIIYNIPPRSVVDMSVDTMARLFELKNIAGVKDATADLNRVDKQLKKMGPEFIQLSGEDGTALEFNLRGGVGCISVTANVAPKLCSDFQNASLSKNNSNLIAKAKEINEKLMPLHKSLFIESNPSPVKYAASLLNLSSEEVRLPLVKVTEKTKKGSTKGTQNRRTSLNEVKKNTGNKIV

SEQ ID NO: 179860 - protein, 132 aa, Unknown
  Bacterial polypetide isolated from the Sargasso Sea
MFKGSNVALITPFKNNGLDEEAYINLIHFHIDNGTNGLVPAGTTGESPTLSHDEHQRVIDLCIKESNGKIPVIAGTGSNSTEEAISLTTHAEKAGANGALIVTPYYNKPTQEGLYQHYKAINNKCGIPNYNL

SEQ ID NO: 179861 - protein, 256 aa, Unknown
  Bacterial polypetide isolated from the Sargasso Sea
MLKGSIVALITPFEDNILKEDVYRKLIQYHIKNGTNGIVPGGTTGESPTLSHDEHKLIIDIAVSECKGKIPVIAGTGSNSTAEAVELSKYAEKAGSDALLVVTPYYNKPTQEGLYQHYKKINDNVGIPIIIYNIPSRSVIDMSVETMTRLYELKNIAGVKDATGDLNRVSLQLKSMGKEFIQLTGNDDNSFEFNKRGGVGSISVTANIAAKLCSDFQKSCENDLKKADELNKTLLPLHHSMFIESNPSPVKYAASI

SEQ ID NO: 179862 - protein, 247 aa, Unknown
  Bacterial polypetide isolated from the Sargasso Sea
STLNHREHEQVIELCIKESKGKIPVIAGTGSNSTEEAISLSKHAEKAGADGVLVVTPYYNKPTQEGLYQHYKAINDNISIPIIIYNIPSRCVIDMSVDTMARLFELKNISGVKDATGDLNRLDETIKKLGPEFIQLTGEDGLAFKFNKRGGVGIISVTANIAPKLCSDMQKYSKSKSDNETKEAERIDQILQPLHKSLFIESNPSPVKYAAKLLGLCDDEIRLPLVKVKKETQEEVKKALSSAKLIS

SEQ ID NO: 179863 - protein, 236 aa, Unknown
  Bacterial polypetide isolated from the Sargasso Sea
MFKGSNVALVTPFKNNKLDEENYIKLINFHIENGTNGLVPAGTTGESPTLSHNEHEKVIELCIKEAKGKIPVIAGTGSNSTDEAISLTKHAEKAGADAALVVTPYYNKPTQEGLFQHYKALNDNSGIPIIIYNIPGRSVIDMSVETMARLFELKNIVGVKDATGDLNRVDQQKEKMGNDFIQLTGEDGNAFEFNKRGGVGCISVTANIAPKLCSNMQKFSKSTSDNEIKEAERIDQ

SEQ ID NO: 179864 - protein, 262 aa, Unknown
  Bacterial polypetide isolated from the Sargasso Sea
MFKGSNVALITPFKDDKLDTENYIKLINFHIENGTNGLVPAGTTGESPTLSHDEHQKVIELCIKEAKGKIPVIAGTGSNSTTEAVELTKHAEKAGADGALVVTPYYNKPTQEGLYQHYKTINDNTSLPIIIYNIPSRCVIDMSVDTMARLFELKNIAGVKDATGDLKRLDQTIEKLGHEFIQLTGEDGLAFEFNKRGGVGIISVTANIAPKLCSDMQRCSKSKSDNEMKEAERIDQLLQPLHKSLFLESNPAPVKYAAKLWD

SEQ ID NO: 179865 - protein, 189 aa, Unknown
  Bacterial polypetide isolated from the Sargasso Sea
MFFGSIPAVITPFKNNEVDYSSLNKILEFLIQNGSNGLVPCGTTGESPTLSHEEHKKIVEETIKITDKRIPVIAGTGSNNTLEAIEYTSHAEEAGADAALIVTPYYNKPTQAGLYHHYKSIADNTNLPIIIYNIPGRSIVDMSIETMIELSKIKNIIGVKDATNDLFRPLLTRKLMSEDFCYLSGEDGT

SEQ ID NO: 179866 - protein, 111 aa, Unknown
  Bacterial polypetide isolated from the Sargasso Sea
MFKGSIVALITPFKNNVLDQDKYASLIHHHIKNGTNGVVPAGTTGESPTLDHNEHKKVIEIAVKETNGKIPVIAGTGSNSTTEAIELSIHAEKTGANALLIVTPYYNKPTQ

SEQ ID NO: 179867 - protein, 234 aa, Unknown
  Bacterial polypetide isolated from the Sargasso Sea
MTTDFGKLITAMVTPFTQQGEVNYTEAVNVAGYLVETGSDTILLAGTTGESPTLTHAEEFELFKTVKQALGSTRHVMAGAGSNCTQTAIDATHKAAQAGVDSVLHVVPYYNKPSQEGIVEHFKAIEAQTELPIMLYNIPGRTGTNMEIDTIERCATFSGIHAIKEAGGSVEVVKQLCERLPKEFAVYSGDDGITFPCLEVGAKGVVSVAAHCVGDAIKQMINTFYAGNIAQAKE

SEQ ID NO: 179868 - protein, 167 aa, Unknown
  Bacterial polypetide isolated from the Sargasso Sea
MFKGSMVAIVTPMNEDSSLDHTSLENLIEFHIENKTDVIISVGTTGESATLDFDEHSEVIKSTLDIVNKRVPVIAGSGANSTSEALHLTQRSKELGADACLLVTPYYNKPTQRGLYEHYKKIADEVSIPQILYNVPGRTSVDMLPDTVKNLSTHPNIIGIKEASGNL

SEQ ID NO: 179869 - protein, 232 aa, Unknown
  Bacterial polypetide isolated from the Sargasso Sea
CIKESNGKIPVIAGTGSNSTEEAISLTSHAEKAGANGALIVTPYYNKPTQEGLYQHYKAINDKCGIPIIIYNIPGRSVIDMSVDTMARLYELKNIVGVKDATGDLDRVDQTLEKMGKDFIQLTGNDDNAFEFNKRGGVGTISVTANIAPKLCSDFQKFSKSDTDNEFKEAERLDKILQPVHHSMFVESNPSPVKYAAKLLGLCDDNVRLPLVKVTDTTKEIVKKALQSAKLI

SEQ ID NO: 179870 - protein, 233 aa, Unknown
  Bacterial polypetide isolated from the Sargasso Sea
MVAIATPMNTDGSLDFNSLERLVEFNIENKTDVIIAVGTTGESATLSMREHSEVIQKTISIVNKRVPVIAGTGANSTSEALELTHQSKALGADACLLVTPYYNKPTQNGLYQHYSKIANEVNIPQILYNVPGRTSVDMYPDTVLKLCEHDNIIGIKEASGDIDRSKELLDKCSDKISIFSGDDKTAMRDILQGFKGNISVTANICPREMHDVCRLASAGSKDEAEIINKKIEK

SEQ ID NO: 179871 - protein, 244 aa, Unknown
  Bacterial polypetide isolated from the Sargasso Sea
MFKGSNVALITPFKNNKLDIDAYIKLIHFHLKNGTNGLVPAGTTGESPTLDHSEHEKVIELCVQEAKGKIPIIAGTGSNSTQEAISLTKHAEKVGADGVLIVTPYYNKPTQEGLYQHYKAINDNTSLPIIIYNIPSRCVIDMSVDTMAKLFELKNIAGVKDATGDLNRLDQQLKKMGPEFILLTGEDGLAFDFNKRGGVGCISVTANVAPKLCSEMQKLSKSNSENDLNQAKKIDKFLQPLHKS

SEQ ID NO: 179872 - protein, 182 aa, Unknown
  Bacterial polypetide isolated from the Sargasso Sea
MFKGSNVALITPFKNNKLDVDAYIKLVHFHLNNGTNGLVPAGTTGESPTLSHDEHQQVIEICIKESNGKVPVIAGTGSNSTEEAISLTKHAEKAGANGALVVTPYYNKPTQEGLYQHYKAINDNTNLPIIIYNIPSRCVIDMSVDTMARLFELKNIVGVKDATGDLNRLDQTIKKLGPEFIQ

SEQ ID NO: 179873 - protein, 199 aa, Unknown
  Bacterial polypetide isolated from the Sargasso Sea
MLEGSLVAIVTPMKVDGSLDLPKLKGLVEWHIREGTNGIVAVGTTGESPTVDFNEHCSVITAVVDQVAGRIPVIAGTGANSTKEAIELTRFAEKVGANLSLSVVPYYNKPTQKGLYDHFNAIAESADIGHIVYNVPGRTVADLADETTLSLSEIPNIVGIKDATADMGRGVKLIKHAPENFAIYSGDDATAISLMMLGG

SEQ ID NO: 179874 - protein, 241 aa, Unknown
  Bacterial polypetide isolated from the Sargasso Sea
LSHDEHKKIIEETIRIADKRVPVIAGTGSNNTIEAIEFTNHAEKSGADGALVVTPYYNKPTQSGLYYHFKTIAEKTNIPIIIYNIPGRSIVDMTIETMIELSKIKNIIGVKDATNDLFRPLLTRKKMQNDFCYLSGEDGTALAFLAQGGHGCISVTANVAPKLCSQMHNEWQKGNITESQEINLKLSSLHNALFLESSPGPVKYAASLLGLCNESTRLPLSEINEDTKQEVKSCLIELQLL

SEQ ID NO: 179875 - protein, 259 aa, Unknown
  Bacterial polypetide isolated from the Sargasso Sea
LYENGSDGIVLCGTTGESPTLSWEEQHDLFIAVKGSLDSRCKVIVGTGSNCTSEAVEATKKAYDSGADGALVVVPYYNKPPQEGLYKHFSSIANSAKDLPLMLYNIPGRTGCNLLPATVNKLMDFSNILSIKAASGRIEEVTELRAVCGSEFSVYSGDDSLLLPMLSVGAVGVVSVASHLVGLQLKEMIESFQSGKVSNALAIHEKLQPLFKALFMTTNPIPIKAALELTGWNVGNPRSPLSPLTSEMKNQLSFILKSL

SEQ ID NO: 179876 - protein, 114 aa, Unknown
  Bacterial polypetide isolated from the Sargasso Sea
MFFGSIPAIITPFSNNKVDYNSLNKIVNFLIENHSNGLVPCGTTGESPTLSHEEHKKIIEEVIAVNDGRVPVIAGTGSNNTLEAIDFTKHAQSVGASAALVVTPYYNKPTQSGL

SEQ ID NO: 179877 - protein, 245 aa, Unknown
  Bacterial polypetide isolated from the Sargasso Sea
MVPAGTTGESPTLSHKEHQKVIELCIKESGGKIPVIAGTGSNSTEEAISLTKHADKVGANGALVVTPYYNKPTQEGLYQHYKAINDSCGIPIIIYNIPSRSVIDMTVDTMARLFELKNIVGVKDATGDLDRVTQQKEKMGSDFIQLTGEDGNVLEFNKRGGVGCISVTANIAPKQCSDFQNFSLSNNSNEIKEAERINELLQPVHKALFIESNPSPVKYAAKLLNLCSDDVRLPLGKVWIPLKKA

SEQ ID NO: 179878 - protein, 269 aa, Unknown
  Bacterial polypetide isolated from the Sargasso Sea
MFKGSNVALVTPFKDNKLDEETYIKLINFHLENGTNGLVPAGTTGESPTLTHSEHEKVIELCIKEAKGKIPVIAGTGSNSTEEAISLTKHAEKVGADGALVVTPYYNKPTQEGLYQHYKSISDNSDIPIIIYNIPGRSVVDMSVDTMSRLFELKNIVGVKDATGDLDRVDQQKNKMGNEFIQLTGEDGNALEFNKRGGVGCISVTANIAPKLCSDMQKFSKSNSDNEIKEAERIDILLQPLHKSLFIESNPSPVKYAAKLLGLCDDAVR

SEQ ID NO: 179879 - protein, 212 aa, Unknown
  Bacterial polypetide isolated from the Sargasso Sea
MFKGSHTALITPFDGKSIDEKSFRSLIDFQISEGIHGLVPVGTTGESPTLSHEEHKLAVEICVEETAKRVPVIAGTGSNNTDEAIDLTMHAEKAGADGALVVTPYYNKPTQHGLYSHFEAISKATTLPIIIYNIPGRSIVDMNTKTMRDLFKIKNIVGVKDATSDIPRVYETKTTIGEDFNQLTGDDATTLAFMVYGGHGSISVTSNIAPKL

SEQ ID NO: 179880 - protein, 248 aa, Unknown
  Bacterial polypetide isolated from the Sargasso Sea
ALITPFKDNNLDEDIYRKLINYHLNNGTNGVVPGGTTGESPTLSHAEHKKIIEIAVSECKNKIPVIAGTGSNSTEEAVDLSKFAEQAGSDALLVVTPYYNKPTQEGLYQHYKKINDNVGIPIIIYNIPSRSVIDMSIDTMSKLYDLKNIVGVKDATGDLNRVDQQLKIMGKEFIQLTGNDDNALEFNKRGGVGSISVTANIAAKLSADFQSACNNDIKRAKELDNLLQPLHSALFIESNPSPVKYAAS

SEQ ID NO: 179881 - protein, 246 aa, Unknown
  Bacterial polypetide isolated from the Sargasso Sea
MFKGSNVALITPFKNNGLDDEAYIKLIHFHIDNGTNGLVPAGTTGESPTLSHDEHQRVIDLCIKESNGKIPVIAGTGSNSTEEAISLTTHAEKAGANAALIVTPYYNKPTQEGLYQHYKAINDKCGIPIIIYNIPGRSVIDMSVDTMARLYELKNIIGVKDATGDLDRVNQTLEKMGKDFIQLTGNDDNAFEFNKRGGVGTISVTANIAPKLCSDFQKFSKSDSDNEMKEAERLDKILQPSSSLNV

SEQ ID NO: 179882 - protein, 144 aa, Unknown
  Bacterial polypetide isolated from the Sargasso Sea
MFKGSNVALVTPFKNNTLDEESYIKLIDFHLKNGTNGLVPAGTTGESPTLSHDEHEKVIEICIKESKGKIPVIAGTGSNSTTEAISLTKHAEKAGANAALVVTPYYNKPTQEGLYQHYKSINDTCGIPIIIYNIPSRSVIDMTV

SEQ ID NO: 179883 - protein, 254 aa, Unknown
  Bacterial polypetide isolated from the Sargasso Sea
MIEVGRLVTAMVTPFDESGAVDYKQAKSLANALINSGSDGLVVSGTTGESPTLTSEEKLRLFAEIKESIGDRGSVVAGTGNYNTAESIEMSQEAESAGADCLLLTVPYYNKPPQEGLYQHFKAIAESVTIPCMLYNVPGRTSLNMTAETTIRLSHVDNIIGVKEASGDMDQIASIISGAPDGFKVWSGNDNETFYIMSMGGYGVVSVLSHLVGNQIKQMMGLILEGDIEQAAAEHHRMLPIFKIMFTITSPIPV

SEQ ID NO: 179884 - protein, 247 aa, Unknown
  Bacterial polypetide isolated from the Sargasso Sea
GESATLNVDEHCQTIARVVSYSSGRIPVIAGTGANATSEAIELTRAASQAGAAACLLVTPYYNRPTQRGLYAHFESIAKAVDCPQILYNVPSRTAVDMSNDIVLELASIDNIIGIKDATGDVDRGSALLAKTPEDFAVYSGDDATASDLILAGGHGNISVTANVIPKEMARLVDSALAGDVEYCNRLNQEISGLNKALFQEANPIPIKWVLAEMGIIPPGIRLPLTILDVEFRQPLRNELKKFEIFI

SEQ ID NO: 179885 - protein, 291 aa, Unknown
  Bacterial polypetide isolated from the Sargasso Sea
MFKGSNVALVTPFKGDSLDEETYVKIINFHLENGTNGLVPAGTTGESPTLSHKEHEKVIELCIQEAKGKIPVIAGTGSNSTAEAISLTEHAEKAGADGALIVTPYYNKPTQEGLYQHYKAINDKCGIPIIIYNIPGRSVIDMTVDTMARLFELENIVGVKDATGDLNRVDETFKKIGNEFIQLTGEDGLAYEYNKRGGVGCISVTANIAPKMCSDMQKFSKSQDNDEQKKAKEIDKKLQPVHKSLFIESNPSPVKYAAKLIGLCDDKVRLPLVTVLDETKAEVKKALTSAE

SEQ ID NO: 179886 - protein, 240 aa, Unknown
  Bacterial polypetide isolated from the Sargasso Sea
DSFWAEQHDLFIAVKGSLDSSCKVIVGTGSNCTSEAVEATKKAYEFGADGALVVVPYYNKPPQEGLYKHFSSIANSAKDLPLMLYNIPGRTGCNLLPDTVKKLMDFSNILSIKAASGRIEEVTELRAICGSELSVYSGDDSLLLPMLSVGAVGVVSVASHLVGLQLKEMIHSFQSGNISNALAIHEKLQPLFKALFMTTNPIPIKAALELSGWNVGNPRSPLSPLPTEMKKQLSFILKSL

SEQ ID NO: 179887 - protein, 263 aa, Unknown
  Bacterial polypetide isolated from the Sargasso Sea
MVESQTKAIVVVGTTGESATLTSEEHCNMISKVVAEADGRIPVIAGTGSNSTHEALFLTKEAKARGADAALIVTPYYNRPTQKGLFEHHKIIANEVNLPQILYNVPSRTACDMEVETVIKLSKLDNIVGVKEASGQLNRVKAIRESCKKNFLIYSGEDSNAKDFILQGGDGVISVTANVAPAKMSKMCEAAIEKDLELATQLNNELMLLHENLFIEANPIPVKWAVEQIGLIKKGIRLPLTELSSDNHENVKIAMDRANLLNQ

SEQ ID NO: 179888 - protein, 240 aa, Unknown
  Bacterial polypetide isolated from the Sargasso Sea
MFKGSNVAIVTPFKNNKLDEEAYLKLINFHLENGTNGLVPAGTTGESPTLSHDEHEKVIEICIKESNGKIPVIAGTGSNSTEEAVALTKHAEKAGADGVLVVTPYYNKPTQEGLYQHYKKINDNTNLPIIIYNIPSRCVIDMSVDTMARLFELKNIAGVKDATGDLDRLDQTIKKLGNEFIQLTGEDGLALEFNKRGGVGVISVTANIAPKLCSDMQKFSKSNLDNELKEAQKIDKILQP

SEQ ID NO: 179889 - protein, 199 aa, Unknown
  Bacterial polypetide isolated from the Sargasso Sea
KAYDSGADGALVVVPYYNKPPQEGLYKHFSSIANSAKDLPLMLYNIPGRTGCNLLPDTVKKLMDFSNILSIKAASGRIEEVTELRAICGSELSVYSGDDSLLLPMLSVGAVGVVSVASHLVGLQLKEMIHSFQSGEVSNALAIHEKLQPFFKALFMTTNPIPIKAALELSGWDVGNPRSPLSPLTNDMKKQLSFILKSL

SEQ ID NO: 179890 - protein, 186 aa, Unknown
  Bacterial polypetide isolated from the Sargasso Sea
MFKGSNVALITPFTNNKVDEEKYIKIINFHLENGTNGLVPVGTTGESPTLSHVEHQKLIELCIKESNGKIPVIAGTGSNSTEEAISLTKHAEKAGSDAALVVTPYYNKPTQEGLYQHYKAINDSCGIPIIIYNIPSRSVIDMSVETMARLFELKNIVGVKDATGDLDRVNKQKTKMGNEFIQLTGN

SEQ ID NO: 179891 - protein, 235 aa, Unknown
  Bacterial polypetide isolated from the Sargasso Sea
MVAIATPMNTDGSLDFNSLERLVEFNIENKTDVIIAVGTTGESATLSMREHSEVIQKTISIVNKRVPVIAGTGANSTSEALELTHQSKALGADACLLVTPYYNKPTQNGLYQHYSKIANEVNIPQILYNVPGRTSVDMYPDTVLKLCEHDNIIGIKEASGDIDRSKELLDKCSDKISIFSGDDKTAMRDILQGFKGNISVTANICPREMHDVCRLASAGSKDEAEIINKKIEKLH

SEQ ID NO: 179892 - protein, 174 aa, Unknown
  Bacterial polypetide isolated from the Sargasso Sea
MFKGSIPALITPFKNGSVDYSSFAKIIEWSIENGSHGFVPCGTTGESPTLSHQEHKQVIQECIKIVDKRVPVIAGTGSNNTIEAIEFTKHAEEIGADGALVVTPYYNKPTQEGLYQHFKKIADSSTLPIIIYNIPGRSIVDMSIDTMTRLSNIDNIVGVKDATNDLFRPLLTLN

SEQ ID NO: 179893 - protein, 240 aa, Unknown
  Bacterial polypetide isolated from the Sargasso Sea
KLLDWHIDHGTNGIVSVGTTGESATLDVDEHVKVIKHTVDYVKSRVPVIAGTGANSTSEALELTQESKQNGADFALIVSPYYNKPTQKGLISHYTKLANEVDIPQILYNVPSRTACDILPETVEVLSTHNNIIGIKEAVDTKERIDDLIAISSNNQNFQLFSGDDPSFIKMIQKGGDGVISVAANVVPSKISEICKLIEYKKYDEAIIINNALSNLYDLLFIESNPIPVKWMLFKMNLIK

SEQ ID NO: 179894 - protein, 237 aa, Unknown
  Bacterial polypetide isolated from the Sargasso Sea
MFFGSIPAVITPFKNGDVDYKSLEKVVTFLIDNGSNGLVPCGTTGESPTLSHTEHKKIIEETIKIADKRVPVIAGTGSNNTLEAIEYTKHAENAGASAALIVTPYYNKPTQSGLYEHFKSISDKTSLPIIIYNIPGRSIVDMTIETMIELSKIENIIGVKDATNDLFRPLLTRKKMNKDFCFLSGEDGTALAFLAQGGAGCISVTANIAPKLCSDMHKAWREGKVKEAQKINCNYQD

SEQ ID NO: 179895 - protein, 235 aa, Unknown
  Bacterial polypetide isolated from the Sargasso Sea
MFKGSNVALITPFKNNKLDEESYIKLIHFHMENGTNGLVPAGTTGESPTLNHDEHQRVIDLCIRECKGKIPVIAGTGSNSTEEAISLTSHAEKAGANGALIVTPYYNKPTQEGLYQHYKAINDSVGIPIIIYNIPSRCVIDMSVDTMARLFELKNIAGVKDATGDLNRLDETIKKLGPEFIQLTGEDGLAYKFNKKGGVGIISVTANIAPKLCSDMQKYSKSDSDNELKEAERID

SEQ ID NO: 179896 - protein, 241 aa, Unknown
  Bacterial polypetide isolated from the Sargasso Sea
LSHEEHKKIIEETIKITDKRIPVIAGTGSNNTLEAIEYTNHAEESGADASLIVTPYYNKPTQSGLYEHFKMIADKTNIPIIIYNIPGRSIVDMTIETMIELSKIKNIIGVKDATNDLFRPLLTRKKMQNDFCYLSGEDGTALAYLAQGGHGCISVTANVAPKLCSEMHSAWQEKNISKAQEINLKLSSLHNALFKESSPGPVKYAASLLGLCNEDTRLPLSGIKEDTKKLVKSCLQELQLL

SEQ ID NO: 179897 - protein, 263 aa, Unknown
  Bacterial polypetide isolated from the Sargasso Sea
MFKGSIVALVTPFKNNVLDQDKYASLIQHHIANGTKGVVPAGTTGESPTLNHDEHKKVIEIAVKECKGKIPVIAGAGSNSTAEAVDLSRHAEKSGADGLLIVTPYYNKPTQEGLYQHYKLINDNVGIPIIIYNIPPRSVIDMSVETMARLFELKNIVGVKDATADLNRVDQQLKKMGPEFIQLSGEDGTALEFNVRGGVGCISVSANVAAKLCSEFQDACLNKNNNKAKEINEKLMPLHKSLFIESNPSPVKYAASLLNLCSD

SEQ ID NO: 179898 - protein, 242 aa, Unknown
  Bacterial polypetide isolated from the Sargasso Sea
STLSHDEHKKIIEIAVKECKGKIPVIAGTGSNSTTEAVELSKYAEKIGSDALLVVTPYYNKPTQEGLYQHYKKINDSVGVPIIIYNIPSRSVIDMSIETMKKLYELKNIAGVKDATGDLNRVDQQLKAMGKEFIQLTGNDDNALEFNKRGGKGSISVTANIAAKLCSNFQNSCANGFKDSEKLDKILQPLHSSMFIESNPSPVKYAASLLGMCDPDVRLPLVQVKEESKKKISQALKDAKLL

SEQ ID NO: 179899 - protein, 240 aa, Unknown
  Bacterial polypetide isolated from the Sargasso Sea
EHQKVIEICIEEAKGKIPIIAGTGSNSTEEAVSLTRHAEKAGADGALVVTPYYNKPTQEGLYQHYKSINDNTSLPIIIYNIPSRCVIDMSVDTMSRLFELKNITGVKDATGDLNRLDQTIKKLGPEFIQLTGEDGLALKFNKRGGVGIISVTANVAPKLCSDMQKFSKSKSDNEIKEAERIDQLLQPLHKSLFIESNPAPAKYAAKLLGLCSDEIRLPLVKIKKETEEEVKKALSFAKLI

SEQ ID NO: 179900 - protein, 120 aa, Unknown
  Bacterial polypetide isolated from the Sargasso Sea
MFKGSNVALITPFKNDSLDEEAYIKLIHFHIDNETNGLVPAGTTGESPTLNHDEHQKVIDLCIKESNGKIPVIAGTGSNSTEEAISLTTHAEKAGANGALIVTPYYNKTTQEGLYQHYKA

SEQ ID NO: 179901 - protein, 288 aa, Unknown
  Bacterial polypetide isolated from the Sargasso Sea
NVALVTPFKDNKLDEETYIKLIHFHIENGTNGLVPAGTTGESPTLSHQEHEKVIELCVNESNQKLPVFAGTGSNSTEEAISLTRHAEKIGANGALIVTPYYNKPTQEGLYQHYKAINDKCGIPIIIYNIPGRSVIDMSVDTMAKLFELKNIIGVKDATGDLKRVEQTLKKMGKDFLQLTGNDDNALEFNKRGGEGAISVTANIAPKLCSDFQKFSKSKIDDEKKEAEKLNKILQPVHHSMFVESNPSPVKYAAKLLNLCDDSVRLPLVKVTEPTKKVIKEALLSAKLI

SEQ ID NO: 179902 - protein, 253 aa, Unknown
  Bacterial polypetide isolated from the Sargasso Sea
MFFGSIPAVITPFKNQQVDYESLNKIINYLIENGSDGLVPCGTTGESPTLSHEEHKKIIEETIKFADKRVPIIAGTGSNNTAEAIEYTKHAKISGADAALVVTPYYNKPTQKGLYAHFESIAKSVNIPIIIYNIPGRSVVDMTIETMIELSKLDNIIGVKDATNDLFRPLLTEANLENNFCFLSGEDGTALAFLAQGGHGCISVTANVAPKLCSDLQKFWRENNIQKAQELNLKLAKLHHSLFLESSPGPVKL

SEQ ID NO: 179903 - protein, 296 aa, Unknown
  Bacterial polypetide isolated from the Sargasso Sea
MNIKGAITALATPMKMDGSLDFSSLEKLIEFQISEGINGLVAVGTTGESATVDVEEHLEIISFFIKISNNRVPIIAGTGANSTKEAIELTREAKDLGADAALLVSPYYNKPTQEGLFRHFTEIANQVDIPQIIYNVPSRTASNIDVNTIKRLCTNPNIIGVKDATGDLKVFDEIKNKCIEEIESDNFSLFSGDDETSFEFISRGGHGTISVTSNILPNMIAKMCKAASNNSDDLQEMKIRLEKINKLLFVESNPIPVKFALKNMGLIDEGIRLPLTWLDHKFHHEITEELNKLDLI

SEQ ID NO: 179904 - protein, 193 aa, Unknown
  Bacterial polypetide isolated from the Sargasso Sea
ALVVTPYYNKPSQEGLLQHFTKIANSVNIPIVIYNIPGRSVIDMTNETMAKLYKLKNIVGVKDATGDIPRVYFTKNDVGKDYILLTGDDSTTLAFMTYGGHGAISVTSNIAPQLCSEFQNLCMDKKFYEASIINDQLMPLHRALFLESSPGPVKYAASVLGLCSEEVRLPVTTISKETKESIDSALRHASLID

SEQ ID NO: 179905 - protein, 256 aa, Unknown
  Bacterial polypetide isolated from the Sargasso Sea
SAGTTGESPTLSHKEHEKVIELCINEAKGKIPVIAGTGSNSTEEAINLTKHAEKAGADGVLVVTPYYNKPTQEGLYQHYKAINDNCGIPIIVYNIPGRSVIDVSVDTMARMFELKNIAGVKDATGILERVDQHKNKMGSEFIQLTGEDGLAFEYNKRGGVGCISVTANVAPKLCSEMQSLSTSGDKDKISGAEKIDNLLQPLHKSLFIESNPSPVKYAAKLLNLCDDTVRLPLVKITDTTKIEVKKALKIAKLINE

SEQ ID NO: 179906 - protein, 176 aa, Unknown
  Bacterial polypetide isolated from the Sargasso Sea
MFKGSNVALITPFKDNKLDEESYIKIINHHLENGTNGLVPVGTTGESPTLSHDEHERTIELCIKEATGKLPIIAGTGSNSTEEAVSLTKHAEKAGADGALVVTPYYNKPTQEGLYQHYKSINDNCGIPIIIYNIPSRSVIDMSVETMARLYELKNIVGVKDATGDLNRVDQQKEKM

SEQ ID NO: 179907 - protein, 250 aa, Unknown
  Bacterial polypetide isolated from the Sargasso Sea
MLKIEGCITALITPFTKAGNLDQVTLRKLIKRQIDFGVHGIVPCGTTGESPTLSHDEHDKVIEIAVSTSNGRVPVIAGTGSNSTKEAIRLTKAAEKAGADASLQVVPYYNKPNQEGLFNHFRNIAKATKLPIILYNIPGRSSVNLETDTIVKLEKVCKNIVGIKEASGKITKVKEIIKRCSKKFIVLSGEDSLNLKILKSGGKGFISVTSNLMPKECSELYENYIANNTKELNKIDRILMNINKLLFVDT

SEQ ID NO: 179908 - protein, 137 aa, Unknown
  Bacterial polypetide isolated from the Sargasso Sea
MFKGSNVALITPFKDNNLDEENYIKLINFHLENNTNGLVPAGTTGESPTLSHKEHEKVIELCIKEAKGKVPVIAGTGSNSTEEAVALTKHAEKAGADGALVVTPYYNKPTQEGLFQHYKSINDNTSLPIIIYNIPSR

SEQ ID NO: 179909 - protein, 268 aa, Unknown
  Bacterial polypetide isolated from the Sargasso Sea
ESYWEWHLEKGTHGIVPMGTTGESATLDTDEHLKVIKRTIEVIGGRVPVIAGTGSNSTAEAIHQTQEAERAGADACLLVTPYYNKPTQEGLYAHYREIASATSVPIVLYNVPPRTACDMSAETVARLSELDGIVGIKEACGDVERVKAIHDLVGEGFVILSGEDAQTRQMFDYGAKGAISVTANILPKEMSEFCRSFLDGDLRRCEELDSTLQPVHDVLFIEVSPSPTKWVLNRMGMIEEGIRLPLLPLSEQNRIPVSKCLAKLGLIN

SEQ ID NO: 179910 - protein, 246 aa, Unknown
  Bacterial polypetide isolated from the Sargasso Sea
PTLSHTEHERVIDLCIKESNGKIPVIAGTGSNSTEEAISLTSHAEKAGANGALVVTPYYNKPTQEGLYQHYKAINDKCGIPIIIYNIPGRSVIDMSVDTMARLYELKNIVGVKDATGDLDRVNQQLNKMGKDFIQLTGNDDNAFEFNKRGGVGTISVTANIAPKLCSEFQKNSISRKDEDLAKAKELDNILQPVHTAMFVESNPSPVKYAAKLMNLCDDEVRLPLVKVTEETKIIVKKAIETAKLI

SEQ ID NO: 179911 - protein, 242 aa, Unknown
  Bacterial polypetide isolated from the Sargasso Sea
MFKGSNVALITPFTNNKVDEEKYIKIINFHLENGTNGLVPVGTTGESPTLSHDEHQKLIEICIKESNSKIPVIAGTGSNSTEEAIALTKHAEKAGADGALVVTPYYNKPTQEGLYQHYKSINDNCGIPIIIYNIPSRSVIDMSVDTMARLFELKNIVGVKDATGDLNRVDQQKLKMGDEFIQLTGNDDNAFEFNKRGGVGTISVTANIAPKMCSDFQKFSKSKNQDEIDKAEKLDKILQPIT

SEQ ID NO: 179912 - protein, 147 aa, Unknown
  Bacterial polypetide isolated from the Sargasso Sea
MFKGSNVALITPFKNNGLDEEAYIKLIHFHIENGTSGLVPAGTTGESPTLSHSEHERVIDLCIKESNGKIPVIAGTGSNSTEEAISLTSHAEKAGANGALVVTPYYNKPTQEGLYQHYKAINDHCGIPIIIYNIPSRSVIDMSVDTM

SEQ ID NO: 179913 - protein, 141 aa, Unknown
  Bacterial polypetide isolated from the Sargasso Sea
MLKGSIVALITPFENNALNEDVYRKLIHYHLKNGTNGIVPGGTTGESPTLSHDEHKRIIEIAVKECSRKIPVVAGTGSNSTSEAVELSKFAEKAGADALLVVTPYYNKPTQEGLYQHYKKINDNVGIPIIIYNIPSRSVID

SEQ ID NO: 179914 - protein, 263 aa, Unknown
  Bacterial polypetide isolated from the Sargasso Sea
DALNKIIDWHIQQGTNGIVSVGTTGESATVNFEEHLEVIRHTINYVDGKLPVIAGTGANSTSEALDLTKEAKIIGANYALIVTPYYNKPSQKGLIEHYTKIADSVDIPQILYNVPSRTACDLLPSTSEILSEHRNIVGIKEAVSDKDRIKDLIKISLSNDNFKIYSGDDPSFLNMLNVGGHGVISVAANVVPKYISDICSFFQNNEVEKAEEINDKLKNLYDLLFIQSNPIPVKWMMYKMGLVQNALRLPLVELDRKYQEIII

SEQ ID NO: 179915 - protein, 243 aa, Unknown
  Bacterial polypetide isolated from the Sargasso Sea
SIFIDAFKDRIPLILGISSNDTNYLIQQISKTDLTGFEAIMSVCPYYNKPSQEGLYQHFKSVCDVSPIPLLLYNVPGRTSCDISNETIVRLSEYSDKIIGIKEASGDVKRIIELRKKIKRKFLIISGDDFTMIDAVRNGADGIISVAANAFPSIMNSTYISLIWENDKQVPNNIKELGTVDSSTFLLNDFFDLIFEEGNPSGIKFALQCLNLCNDKVRLPLTGISEDLKSKISNFIHKNSSDE

SEQ ID NO: 179916 - protein, 122 aa, Unknown
  Bacterial polypetide isolated from the Sargasso Sea
MFKGSIVALITPFKDNKLDEDSYISLIHYHLKNGTSGLVPAGTTGESPTLDHNEHQRVIELCVKEAKGKIPVIAGTGSNSTDEAVSLTKYAEKVGANAALVVTPYYNKPTQEGLYQHFKIYK

SEQ ID NO: 179917 - protein, 243 aa, Unknown
  Bacterial polypetide isolated from the Sargasso Sea
SPTLSHSEHRKIIEIAVKECKGKIPVIAGTGSNSTDEAIELSKFAEKAGSDSLLVVTPYYNKPTQEGLYQHYKKINDNVGIPIIIYNIPSRSVIDMSVETMTKLYELKNIVGVKDATGDLNRVNQQLKSMGKEFIQLTGNDDNALEFNKRGGVGAISVTANIAAKICSEFQKSCSNDFKESEKFDKILQPIHSAMFIESNPSPVKYAASLLKMCNSEVRLPLVQVKDETKKKVLEVLKVAKLL

SEQ ID NO: 179918 - protein, 250 aa, Unknown
  Bacterial polypetide isolated from the Sargasso Sea
LCGTTGRISYSFHGAEQHDLFIAVKGSLDATCKVIVGTGSNCTSEAVEATKKAYDSGADGALVVVPYYNKPPQEGLYKHFSSIANSAKDLPLMLYNIPGRTGCNLLPDTVKKLMYFSNILSIKAASGRIEEVTELRAICGSELSVYSGDDSLLLPMLSVGAVGVVSVASHLVGLQLKEMIHSFQSGKVSNALAIHEKLQPLFKALFMTTNPIPIKAALELSGWDVGKPRSPLSPLTNDMRKKLSIILKSL

SEQ ID NO: 179919 - protein, 197 aa, Unknown
  Bacterial polypetide isolated from the Sargasso Sea
MFKGSIVALITPFKNNKLDEANYSKILHHHLKNGTNGVVPAGTTGESPTLSHIEHKKVIEIAIKECKGKIPVIAGTGSNSTSEAIELSKHAENAGADGLLIVTPYYNKPTQEGLYQHYKSINDSVGIPIIIYNIPSRSVIDMTVDTMARLYELENIKGVKDATGDLNRVSMQLNKMGKEFIQLTGEDDNALEFNKRG

SEQ ID NO: 179920 - protein, 195 aa, Unknown
  Bacterial polypetide isolated from the Sargasso Sea
MFFGSIPAVITPFKNNQVDYNSLDKIVNHLILNGSNGLVPCGTTGESPTLSHEEHKQIIEQTIKISDKRVPVIAGTGSNNTKEAVDYTKHAESVGADAALVVTPYYNKPTQNGLYAHFKMIADSVKLPIIIYNIPGRSVIDMSIETMIELSKIENIIGVKDATNDLFRPLLTAAYMKNEFCYLSGEDGTALAFLS

SEQ ID NO: 179921 - protein, 185 aa, Unknown
  Bacterial polypetide isolated from the Sargasso Sea
MFKGSNVALITPFRNNGLDEEAYIKLIHFHIDNGTSGLVPAGTTGESPTLSHDEHQRVIDLCIRESNGKIPVIAGTGSNSTEEAISLTSHAEKAGADGALIVTPYYNKPTQEGLYQHYKAINDKCGIPIIIYNIPSRSVIDMSVDTMARLFELKNIVGVKDATGNLDRVDQQLSKMGKEFIQMTG

SEQ ID NO: 179922 - protein, 251 aa, Unknown
  Bacterial polypetide isolated from the Sargasso Sea
MCSGTSGESATLDMAEHKEAIRRTVQQVAGRIPVIAGTGANSTREAVELTEAARSVGADAALLVTPYYNKPTQEGLYLHHKHIAEAVAIPQILYNVPGRTACDMLPETVERLAAIDNIVGIKEATGDLQRAREVIERVGDRMAVYSGDDATAVELILLGGKGNISVTANVAPLQMHEMCAAALRGDEATARRLNEALMPLHKALFIEANPIPVKWALLEMGLIADGIRLPLTPLSARCHDTVHGALRQCGL

SEQ ID NO: 179923 - protein, 140 aa, Unknown
  Bacterial polypetide isolated from the Sargasso Sea
MLTGSIPAIITPFSNGEVDYDSFEKLLYWQIKSGISGVTVCGTTGESPTLSHDEHMKLVEFAIKVASKKIPVIAGTGSNSTKEAIEFTKHAYKAGAKYGLVVTPYYNKPNQLGLINHFKKIAKVSPLKQLIYNIPGRSIV

SEQ ID NO: 179924 - protein, 128 aa, Unknown
  Bacterial polypetide isolated from the Sargasso Sea
MFKGSNVALVTPFKDNKLDEESYIKLINLHLENGTNGLVPAGTTGESPTLTHTEHNKVIELCINESKGKIPVIAGTGSNSTEEAVSLTKHAEKVGADAALIVTPYYNKPTQEGLYQHYKTINDNTSLP

SEQ ID NO: 179925 - protein, 115 aa, Unknown
  Bacterial polypetide isolated from the Sargasso Sea
MFKGSIVALITPFKNNRLDEDCYISLIHHHLKNGTSGLVPAGTTGESPTLNHEEHERVIELCVKESKGKIPVIAGTGSNSTAEAISLTKHAEKVGANAALVVTPYYNKPTQEGLI

SEQ ID NO: 179926 - protein, 252 aa, Unknown
  Bacterial polypetide isolated from the Sargasso Sea
MIANTTKFTNPLFGRILTAMVTPFTENGDVDYELAIKLSNYLFENGSDGIVLCGTTGESPTLSWAEQNDLFIAVKGSLDSRCKVIVGTGSNCTSEAVEATKKAYDSGADGALVVVPYYNKPPQEGLYKHFSSIANSAKDLPLMLYNIPGRTGCNLLPDTVNKLMDFSNILSIKAASGRIEEVTELRAICGSQLSVYSGDDSLLLPMLSVGAVGVVSVASHLVGLQLKEMIESFQSGNVSNALTIHEKLQSLS

SEQ ID NO: 179927 - protein, 259 aa, Unknown
  Bacterial polypetide isolated from the Sargasso Sea
NGLVPAGTTGESPTLNHNEHEKVIEICVNEAKGKIPVIAGTGSNSTEEAVSLTKHAEKAGADGALVVTPYYNKPTQEGLYQHYKKINDNTNIPIIIYNIPSRCVIDMSVDTMARLFELKNIVGVKDATGDLNRLDQTIKKLGSEFIQLTGEDGLAFKFNLRGGVGIISVTANIAPKLCSDMQKYSKSDSENEIKEAEKIDQMLQPLHKSLFIESNPAPTKYAAKLLGLCSDEIRLPLVNIKKETEEEVEKALSTIKLLK

SEQ ID NO: 179928 - protein, 256 aa, Unknown
  Bacterial polypetide isolated from the Sargasso Sea
SNGLVPCGTTGESPTLSHDEHKRVIEETIRINDKRVPVIAGTGSNNTSEAIDFTKHAESSGADAALVVTPYYNKPTQEGLFAHFKSIAKSVKIPIIIYNIPGRSIVDMSIKTMIELSKIENIVGVKDATNDLFRPLLTAANMNNDFCLLSGEDGTALAFLAQGGHGCISVTANVAPKLCSELHQAWREKNLNKAQDINLKLAKLHHALFLESSPGPVKYAASLIGLCSKETRLPLFEISEVTKKSVSNCLKDLSLI

SEQ ID NO: 179929 - protein, 191 aa, Unknown
  Bacterial polypetide isolated from the Sargasso Sea
VIGGNGANATAEAIELTKSLSKVGVAGMLGVTPYYNKPTPKGLIAHYKAVAASTDIPQILYNVPGRTAVDMQPETVAELVGVSNIIGVKEATGDIARVKRLRELCGNDFKLYSGDDATAREFLLLGGNGVISVANNIVPKAFKAMCDAALAGNAELALSLDTPLRGLYSTLFCEANPIPVKWAAHRMGLIK

SEQ ID NO: 179930 - protein, 121 aa, Unknown
  Bacterial polypetide isolated from the Sargasso Sea
MFKGSIVALITPFKDDKLDEEKYAQLVNHHIKSGTDGIVPAGTTGESPTLSHNEHRKVIEISVNECKGKIPVIAGTGSNSTDEAIELSKHAEKVGANGLLIVTPYYKQPNSEGLYPHYKKI

SEQ ID NO: 179931 - protein, 228 aa, Unknown
  Bacterial polypetide isolated from the Sargasso Sea
MFKGSIVALITPFKNNELDEDCYISLIHHHIKNGTSGLVPAGTTGESPTLNHKEHNRVIELCVKESKGKIPVIAGTGSNSTEEAISLTKHAEKVGADAALVVTPYYNKPTQEGLYQHFKSINDNCSIPIIIYNIPPRSVVDMSVDTMARLFELKNIIGVKDATGDLNRVDQQKNKLGPDFIQLSGEDGTALEFNMRGGLGCISVTANVASKLCAEFQEASLSKNNSNL

SEQ ID NO: 179932 - protein, 221 aa, Unknown
  Bacterial polypetide isolated from the Sargasso Sea
MGRVPVIAGTGSNSTEEAVALTKHAEKSKVDAVLVVTPYYNKPTQEGLYQHYKKINDNCGIPIIIYNIPGRSVVDMSVDTMARCFELKNIIGVKDATGDLDRVTQQKSKMGDEFLMLSGNDENTYEFNKRGGSGCISVSANVVPDMCSEFHSLCNDKNFEKAKLLFDKLLPLHDILFIESNPVPTKYSLNLLGKMKEDVRLPLVVANSKSKEKIRNVLKQL

SEQ ID NO: 179933 - protein, 114 aa, Unknown
  Bacterial polypetide isolated from the Sargasso Sea
MFKGSNVALITPFKNNGLDEEAYIKLIHFHMDNGTSGLVPAGTTGESPTLSHDEHQRVIDLCIKESKGKIPVIAGTGSNSTEEAISLTSHAEKAGADGALIVTPYYNKPTQEGL

SEQ ID NO: 179934 - protein, 263 aa, Unknown
  Bacterial polypetide isolated from the Sargasso Sea
INNGTNGLVPAGTTGESPTLSHDEHQRVIDLCIKESNGKIPVIAGTGSNSTEEAISLTTHAEKAGANGALIVTPYYNKPTQEGLYQHYKAINDKCGIPLIIYNIPGRSVIDMSVDTMARLFELKNIVGVKDATGDLDRVNQTLEKMGKDFIQLTGNDDNAFEFNKRGGVGAISVTANIAPKLCSDFQKLSKSETDNEMKEAERLDKILQPVHHSMFVESNPSPVKYAAKLLELCDDNVRLPLVKVTDTTKEIVKKALQSAKLI

SEQ ID NO: 179935 - protein, 236 aa, Unknown
  Bacterial polypetide isolated from the Sargasso Sea
MFKGSIVALITPFKNNVLDQDKYASLIHHHIKNGTNGVVPAGTTGESPTLNHEEHKKVIEIAVKETNGKIPVIAGTGSNSTSEAIELSIHAEKTGANALLIVTPYYNKPTQEGLYQHYKAINDKVGIPIIIYNIPPRSVVDMSVDTMARLFELKNIAGVKDATADLNRVDKQLKKMGPEFIQLSGEDGTALEFNLRGGVGCISVTANVAPKLCSDFQNASLSKNNSNLISKAKEIN

SEQ ID NO: 179936 - protein, 217 aa, Unknown
  Bacterial polypetide isolated from the Sargasso Sea
MFKGSNVALVTPFKNNKLDDETYIKLIHFHIKNGTNGLVPAGTTGESPTLSHDEHERVIELCVKESNGKLPVFAGTGSNSTEEAISLTTHAEKIGANGALIVTPYYNKPTQEGLYQHYKAINDKCGIPIIIYNIPGRSVIDMSVDTMAKLFELKNIIGVKDATGDLNRVDQTLLKMGKDFIQLTGNDDNALEFNKRGGVGAISVTANIAPKICSEFQ

SEQ ID NO: 179937 - protein, 192 aa, Unknown
  Bacterial polypetide isolated from the Sargasso Sea
MFKGSIVALITPFKNNELDEDKYVSLIHHHIKNGTKGVVPAGTTGESPTLNNNEHKKVIEIAVRESKGKIPVIAGTGSNSTEEAVELSKHAEKSGSDALLIVTPYYNKPTQEGLYQHYKTINDSVGIPIIIYNIPPRSVVDMSVDTMARLFELKNIAGVKDATADLDRVDKQLKKMGPDFIQLSGEDGTALE

SEQ ID NO: 179938 - protein, 155 aa, Unknown
  Bacterial polypetide isolated from the Sargasso Sea
MFKGSNVALITPFKNNGLDEEAYIKLIHFHIDNGTNGLVPAGTTGESPTLSHDEHQRVIDLCIKESNGKIPVIAGTGSNSTEEAISLTTHAEKAGANGALIVTPYYNKPTQEGLYQHYKAINDKCGIPIIIYNIPGRSVIDMSVDTMARLYELKN

SEQ ID NO: 179939 - protein, 112 aa, Unknown
  Bacterial polypetide isolated from the Sargasso Sea
MFKGSNVALITPFKNNGLDEEAYIKLIHFHIDNGTNGLVPAGTTGESPTLSHDEHQRVIDLCIKESNGKIPVIAGTGSNSTEEAISLTTHAEKAGANGALIVTPYYNKPTQE

SEQ ID NO: 179940 - protein, 273 aa, Unknown
  Bacterial polypetide isolated from the Sargasso Sea
YIKLINFHLENGTNGLVPAGTTGESPTLSHVEHNKVIELCVNEAKGKIPVIAGTGSNSTEEAVALTKHAETAGADGALVVTPYYNKPTQEGLFHHYKTINDNTSLPIIIYNIPGRCVIDMTVDTMARLFELKNIAGVKDATGDLNRLDQTIKKLGNEFIQLTGEDGLAFEFNKRGGAGIISVTANIAPKLCSDMQKFSKSDSDNEKKEAERIDSLLQPVHKALFIESNPAPVKYAAKLMGLCDDAVRLPLVKIMDETKLKVKNSLVSAKLLND

SEQ ID NO: 179941 - protein, 254 aa, Unknown
  Bacterial polypetide isolated from the Sargasso Sea
VLMFKGSIPALITPFKNEKVDYSSFDKIIEWSLGEGSHGFVPCGTTGESPTLSHQEHKQVIEECIRIVDRRAPVIAGTGSNNTVEAIEFTKHAENAGADGALVVTPYYNKPTQDGLFQHFKKIAESTSLPIIIYNIPGRSIVDMTIDTMIKLSNIKNIVGVKDATNDLFRPLLTQVNMKKNFCYLSGEDGTALAFLAQGGNGCISVTANVVPKLCSELHNSWMNKDIDKATSINLKLAKLHNALFIESSPGPVK

SEQ ID NO: 179942 - protein, 242 aa, Unknown
  Bacterial polypetide isolated from the Sargasso Sea
HDEHQKLIELCIKESNGKIPVIAGTGSNSTEEAISLTRHAENAGANGALVVTPYYNKPTQEGLYQHYKAINDNCGIPIIIYNIPSRSVIDMSVDTMSKLFELKNIVGVKDATGDLDRVEQQKSKMGTEFIQLTGNDDNAFEFNKRGGVGTISVTANIAPKMCSDFQKFSKSKNPNEYKEAERLDSILQPLHKNLFIESNPSPVKYVAKLIGLCDDAVRLPLVKCTDKTKKILEETSKKAKII

SEQ ID NO: 179943 - protein, 249 aa, Unknown
  Bacterial polypetide isolated from the Sargasso Sea
ISTLSHSEHEKVIELCIKEAKGKIPVIAGTGSNSTAEAISLTKHAEKAGANGALIVTPYYNKPTQEGLYAHYKAINDNCGIPIIIYNIPGRSVIDMTVDTMARLFELKNIVGVKDATGDLNRVDETFKKIGNEFIQLTGEDGLAFEYNKRGGVGCISVTANIAPKMCSDMQKFSKSSDENELKKAEEIDKKLQPVHKSLFIESNPSPVKYAAKLIGLCEDKVRLPLVTVLDKTKNEVKKALLSAELINE

SEQ ID NO: 179944 - protein, 166 aa, Unknown
  Bacterial polypetide isolated from the Sargasso Sea
MFKGSIPAVITPFIGDEVDYNSLAKVLNFLIDNGSHGLVPCGTTGESPTLSHEEHKKIIEETIRIADKRVPVIAGTGSNNTLEAVEYTEHAEKSGADAALIVTPYYNKPTQSGLYEHFKTIADRTNIPIIIYNIPGRSIVDMTIETMIELSKIKKIIGVKDATNDL

SEQ ID NO: 179945 - protein, 290 aa, Unknown
  Bacterial polypetide isolated from the Sargasso Sea
MFFGSIPAVLTPFNNQKVDYESLSKILNHLIENGSNGLVPCGTTGESPTLSHDEHKKIIEETIKINDKRVPIIAGTGSNNTAEAIDYTKHAESSGADAALVVTPYYNKPTQKGLYAHFYSIAKSVKIPIIIYNIPGRSVVDMSIDTMIELSKIENIIGVKDATNDLFRPLLTAANMSNDFCFLSGEDGTAMAFLAQGGHGCISVTANVAPKLCAEMHHAWRSNNINKALEINLKLAKLHNSLFLESSPGPVKYAASLIGLCSSETRLPLVDINDNTKKIVTDCLKELSLI

SEQ ID NO: 179946 - protein, 260 aa, Unknown
  Bacterial polypetide isolated from the Sargasso Sea
GTNGLVPAGTTGESPTLSHKEHERVIELCVKESAGKLPVFAGTGSNSTEEAISLTSHAEKIGADGALIVTPYYNKPTQEGLYQHYKAINDKCGIPIIIYNIPGRSVIDMSVDTMAKLYELKNIVGVKDATGDLNRVNQTLNKMGKDFIQLTGNDDNAFEFNQRGGVGAISVTANIAPKICSDFQKLSMSNDKGQIKEAEKLDKILQPLHHSMFVESNPSPVKYAAKLLNLCEDDVRLPLVKVTETTKEIVKKALVSAQLI

SEQ ID NO: 179947 - protein, 133 aa, Unknown
  Bacterial polypetide isolated from the Sargasso Sea
MFKGSNVALITPFMDNKLDVDAYIKIIHFHLKSGTNGLVPAGTTGESPTLNHEEHQQVIEICIKESNGTIPVIAGTGSNSTSEAVSLTKHAEKVGANAALVVTPYYNKPTQEGLYQHYKAINDSCGIPIIYLQ

SEQ ID NO: 179948 - protein, 180 aa, Unknown
  Bacterial polypetide isolated from the Sargasso Sea
MLKGSIPAIITPFSNGEVDYDCFEKLLNWQIKSGISGVTVCGTTGESPTLSHDEHMQLVEFAIKVASKKIPVIAGTGSNSTKEAIEFTKHAYKAGANYGLVVTPYYNKPNQTGLINHFKKIAKVSPLKQLIYNIPGRSIVDLSFDSFKQLNKISNIVGIKDASNDMSRPLIMRTFMKKRF

SEQ ID NO: 179949 - protein, 111 aa, Unknown
  Bacterial polypetide isolated from the Sargasso Sea
MFKGSNVALITPFKDNNLDEENYIKLINFHLENGTNGLVPAGTTGESPTLSHKEHEKVIELCVKEANGKIPVIAGTGSNSTVEAVALTKHAEKAGANGVLVVTPYYNKPTQ

SEQ ID NO: 179950 - protein, 237 aa, Unknown
  Bacterial polypetide isolated from the Sargasso Sea
VIEIAIKESKGKIPVIAGTGSNSTEEAVELSKHAEKSGANGLLIVTPYYNKPTQEGLYQHYKLINDKVGIPIIIYNIPPRSVVDMSVDTMARLFELKNIVGVKDATADLNRVDEQLKKMGPEFIQLSGEDGTALEFNIRGGTGCISVSANVAAKLCAEFQEASLAKNNSNLLSKAKEINNKLMPLHKALFIESNPSPVKYAASLLNLSSEEVRLPLVKITEKTKQEVRKALKFADLI

SEQ ID NO: 179951 - protein, 255 aa, Unknown
  Bacterial polypetide isolated from the Sargasso Sea
MFKGSIPALITPFKNEKVDFSSYEKIIEWSISEGSHGFVPCGTTGESPTLSHEEHKKIVEECINTVNKRVPVIAGTGSNNTIEAIEYTQHAEKMGADGALIVTPYYNKPTQKGLYQHFKKIAESTSLPIIIYNIPGRSIVDMSIDTMSELSEIDNIAGVKDATNDLFRPLLTQTKIKKDFCYLSGEDGTALAYLSQGGVGCISVTANVAPRFCSDLHNAWMDHDIIKSQEINLKLAKLHNALFIESSPGPVKYAA

SEQ ID NO: 179952 - protein, 275 aa, Unknown
  Bacterial polypetide isolated from the Sargasso Sea
IEGSVDYSSYNKIIEWSLEQGSHGFVPCGTTGESPTLTHNEHKAVIEECIRIVDKRVPVIAGTGSNNTIEAVEFTKHAEKAGADGALVVTPYYNKPTQEGLYMHFKKIAESSSLPIIIYNIPGRSVVDMSIETMVKLSEIKNIVGVKDATNDLFRPLLTQTKIKKEFCYLSGEDGTAFAYLAQGGNGCISVTANVVPKLCSDLHNNWNNKDIVKAMEINLKLAKLHHALFIESSPGPVKYAAELLNLCSSETRMPLIKIKESTKKIVKECLIELN

SEQ ID NO: 179953 - protein, 109 aa, Unknown
  Bacterial polypetide isolated from the Sargasso Sea
MFKGSNVALITPFKDNKLDEESYIKIINHHLENGTNGLVPVGTTGESPTLSHNEHERTIELCIKEATGKLPIIAGTGSNSTEEAVSLTKHAEKAGADGALVVTPYYNKP

SEQ ID NO: 179954 - protein, 165 aa, Unknown
  Bacterial polypetide isolated from the Sargasso Sea
MFKGSNVALVTPFKDNKLDEENYIKLINFHLENGTNGLVPAGTTGESPTLSHGEHEKVIELCINEAKGKIPVIAGTGSNSTEEAISLTKHAEKAGADGVLVVTPYYNKPTQEGLYQHYKAINDNCGVPIIIYNIPGRSVVDMSVETMARLFELKNITGVKDATGD

SEQ ID NO: 179955 - protein, 144 aa, Unknown
  Bacterial polypetide isolated from the Sargasso Sea
MLKGSIVALITPFKDDNLDESTYRALINYHLKNGTNGVVPGGTTGESPTLSHSEHKKIIEIAVKECKGKIPVIAGTGSNSTDEAVDLSKFAEKAGSDALLVVTPYYNKPTQEGLYQHYKKINDNVGIPIVIYNIPSRSVIDMSV

SEQ ID NO: 179956 - protein, 272 aa, Unknown
  Bacterial polypetide isolated from the Sargasso Sea
MFKGSNVALVTPFKNNELDVETYIKLIHFHIENGTHGLVPAGTTGESPTLSHEEHQKVIELCIKESNGKLPVIAGTGSNSTKEAISLTKHAEKVGADGALIVTPYYNKPTQEGLYHHYKSINDNCEIPIIIYNIPSRSVIDMTVDTMARLFELKNIVGVKDATGDLARAKLQKEKMGNDFIMLTGEDGNVLEFNKRGGVGCISVTANIAPKLCSDFQNFSQSTNNKELEEAERINDLLQPVHKALFIESNPSPGKYAAKLLNLCSDDVRLPF

SEQ ID NO: 179957 - protein, 259 aa, Unknown
  Bacterial polypetide isolated from the Sargasso Sea
MKGFMGVVPVGTTGESPTLSHEEHKQAVEICINQTNKRVPVIAGTGSNNTEEAIDLTRHAEKSGADAALIVTPYYNKPTQRGMYEHYKSISTNSNIPIIIYNIPGRSVVNMTNDTMKELFKLKNIVGVKDATADIPRVYNSKIDIGEDFNLLTGDDATCLAFMLYGGHGAISVTANIAPKLCSDFMNLCLEGKFQEAAKINALLMPLHTALFIESSPGPVKYAANKLGLCSSEVRLPLTETSNESKKTVEQALKHASLI

SEQ ID NO: 179958 - protein, 285 aa, Unknown
  Bacterial polypetide isolated from the Sargasso Sea
MFKGSNVALITPFTNNKVDEEKYIKIINFHLENGTNGLVPVGTTGESPTLSHDEHQKLIELCIKESNGKIPVIAGTGSNSTEEAISLTKHAEKAGADGALVVTPYYNKPTQEGLYQHYKAINDNCSLPIIIYNIPSRSVIDMSVETMARLYELKNIVGVKDATGDLDRVDQQKNKMGSDFIQLTGNDDNALEFNKRGGVGTISVTANIAPKFCSDFQKFSKSKNPDEFKEAERLDKILQPLHKNLFIESNPSPVKYVAKLMGLCDDAVRLPLVSCTSKTKKILER

SEQ ID NO: 179959 - protein, 132 aa, Unknown
  Bacterial polypetide isolated from the Sargasso Sea
MFKGSNVALITPFKDNELDKDAYIKLIHYHLNNGTNGLVPAGTTGESPTLNHKEHQEIIEICIKEAKNKIPVIAGTGSNSTEEAVSLTKHAEKAGADGVLVVTPYYNKPTQEGLYQHYKKINDNTSLPNNNL

SEQ ID NO: 179960 - protein, 149 aa, Unknown
  Bacterial polypetide isolated from the Sargasso Sea
MFKGSNVALITPFKDNILDEENYIKLINFHIENGTNGLVPAGTTGESPTLNHSEHEKVIEICIKESRGKVPVIAGTGSNSTEEAVSLTKHAERAGADGVLVVTPYYNKPTQEGLYRHYKAINDNTSLPIIIYNIPSRCVIDMSVDTMDK

SEQ ID NO: 179961 - protein, 248 aa, Unknown
  Bacterial polypetide isolated from the Sargasso Sea
ESPTLSHDEHQKLIELCIKESNGKIPVIAGTGSNSTEEAISLTKHAEKAGADGALVVTPYYNKPTQEGLYQHYKAINDSSGIPIIIYNIPSRSVIDMSVDTMARLFELKNIIGVKDATGDLNRVDQQKSKMGEEFIQLTGNDDNAFEFNKRGGVGTISVTANIAPKMCSDFQKFSKSKNPNEFKEAERLDSVLQPLHKNLFIESNPSPVKYVAKLMGLCDDAVRLPLVKCTENTKKILEEISKTAKLI

SEQ ID NO: 179962 - protein, 244 aa, Unknown
  Bacterial polypetide isolated from the Sargasso Sea
MFKGSNVALVTPFKNNKLDEETYVKLIHFHIKNGTNGLVPAGTTGESPTLSHYEHERVIELCVKESAGKLPVFAGTGSNSTEEAISLTTHAEKMGANGALIVTPYYNKPTQEGLYQHYKSINDKCGIPIIIYNIPGRSVIDMSVDTMARLFELKNIIGVKDATGDLTRVDKTLKKLGKDFIQLTGNDDNALEFNRKGGVGAISVTANIAPKLCSDFQRFSKANNDNEIKEAERLNEILQPVHHA

SEQ ID NO: 179963 - protein, 267 aa, Unknown
  Bacterial polypetide isolated from the Sargasso Sea
EKVDFSSYEKIIEWSISEGSHGFVPCGTTGESPTLSHEEHKKIVEECINTVNKRVPVIAGTGSNNTTEAIEYTQHAEKMGADGALVVTPYYNKPTQKGLYQHFKKIAESTSLPIIIYNIPGRSIVDMNIDTMNELSEIKNIAGVKDATNDLFRPLLTQTKIKKDFCYLSGEDGTALAYLSQGGVGCISVTANVVPRFCADLHNAWIDHDIKKSQEINLKLAKLHDALFIESSPGPVKYAAELLNLCSSETRMPLVEIQDSTKKIVKD

SEQ ID NO: 179964 - protein, 173 aa, Unknown
  Bacterial polypetide isolated from the Sargasso Sea
MLKGSIVALITPFDNNNLSEEGYIKLINYHLDNGTNGLVPGGTTGESPTLSHKEHRRIIEIAVKECKGKIPVIAGTGSNSTEEAVELSKFAENAGSDALLVVTPYYNKPTQEGLYQHYKKINDNVGIPIIIYNIPSRSVIDMSVDTMAKLYELKNIKGVKDATGDLNRVNLQL

SEQ ID NO: 179965 - protein, 209 aa, Unknown
  Bacterial polypetide isolated from the Sargasso Sea
MQALKGSLVALVTPMMENDDIDYKSLESLIDWHIEQGTNGIVSVGTTGESATLDVKDHLDVIKHTVDYANSRIPIIAGTGANSTTEAIELTEESKKHGADYALIVTPYYNKPNQNGLIKHYLKLADSVDIPQILYNVPSRTACDLLPSSVKVLSEHKNIIGIKEAVNTDKRVNDLLDISKDNYDFMLFSGDDPTFLSMMQKGGNGVISV

SEQ ID NO: 179966 - protein, 235 aa, Unknown
  Bacterial polypetide isolated from the Sargasso Sea
MFKGSNVALVTPFKNNKLDEETYIKLIHFHIENGTNGLVPAGTTGESPTLSHDEHEKVIELCVKESNGKLPVFAGTGSNSTEEAISLTKHAEKIGADGALIVTPYYNKPTQEGLYQHYKAINDKCGIPIIIYNIPGRSVIDMSVETMARLYELKNIIGVKDATGDLSRVNKTLEKLGKEFIQLTGNDDNALEFNKRGGTGAISVTANIAPKLCSNFQKFSIINDDKSKSETEILD

SEQ ID NO: 179967 - protein, 169 aa, Unknown
  Bacterial polypetide isolated from the Sargasso Sea
MFRGSIPALITPFKNGEVDYLSFCKIVEWSINNGSHGFVPCGTTGESPTLSHDEHKKVIEECVRVVDKRVPVIAGTGSNNTSEAIDFTNHAEKIGADAALVVTPYYNKPTQDGLYSHYKKISESTKLPIIIYNIPGRSIVDMSIETMQQLSKLDNIVGVKDATNDLFRP

SEQ ID NO: 179968 - protein, 201 aa, Unknown
  Bacterial polypetide isolated from the Sargasso Sea
MFKGSNVALVTPFKDNKLDEEAYIKLINFHLENGTNGLVPAGTTGESPTLTHTEHNKVIELCINESKGKIPVIAGTGSNSTEEAVALTKHAEKAGADGALVVTPYYNKPTQEGLYQHYKTINDNTSLPIIIYNIPGRCVIDMSVDTMARLFELKNIVGVKDATGDLNRLDNTIKKLGSEFIQLTGEDGLAFEFNKRGGVGI

SEQ ID NO: 179969 - protein, 286 aa, Unknown
  Bacterial polypetide isolated from the Sargasso Sea
MLKGSIVALITPFDGENLSEDNYIKLINYHLENGTNGVVPGGTTGESPTLSHNEHKKIIEIAVKECKGKIPVVAGTGSNSTDEAIELSKFAEKVGSDALLVVTPYYNKPTQEGLYQHYKMINDNVGIPIIIYNIPSRSVIDMNVDTMAKLYELKNIKGVKDATGDLNRVDQQLKAMGKEFIQLTGNDDNAFEFNKRGGVGAIGVTANVAAKLASDFQKACVNDIKKASELDKLLQPLHTSLFIESNPSPVKYAASLLGMCKPTVRLPLDEIREETKNKVSDALKVA

SEQ ID NO: 179970 - protein, 121 aa, Unknown
  Bacterial polypetide isolated from the Sargasso Sea
MFFGSIPAVITPFKNNKVDYNSLDKIVNHLILNGSNGLVPCGTTGESPTLSHEEHKQIIEQTIKISDKRVPVIAGTGSNNTKEAVDYTKHAESVGADAALVVTPYYNKPTQKGLYAHFKII

SEQ ID NO: 179971 - protein, 155 aa, Unknown
  Bacterial polypetide isolated from the Sargasso Sea
MFKGSNVALVTPFKGNSLDEETYIKIINFHLENGTNGLVPAGTTGESPTLSHKEHEKVIELCIKEANGKIPVIAGTGSNSTTEAISLTEHAEKAGADGALIVTPYYNKPTQEGLYQHYKAINDKCGIPIIIYNIPGRSVIDMTVDTMARLFELKN

SEQ ID NO: 179972 - protein, 260 aa, Unknown
  Bacterial polypetide isolated from the Sargasso Sea
MFKGLNTALITPFHNNQIDEDALKKLIDFQVAGGVDSIVVCGTTGESPTLSNEEHRKLITLAVEYANKRTKVVAGTGSNCTKEAVDMTQFARDAGADGCLIVAPYYNKPTANGILKHFQKLNECKIPLIIYNIPGRSIIDISDDTIAQLALLDNVVAVKDATGDLSRIASLKSKITKDFCYLSGEDETTVGFNAMGGDGIISVTSNILPKMCKELQNYCDNDNYIEARKCQDQLLEVNKSMFCETNPIPVKYAAYLLGLC

SEQ ID NO: 179973 - protein, 290 aa, Unknown
  Bacterial polypetide isolated from the Sargasso Sea
MFKGSIPAVITPFQGNKVDYASLVDVLNYLIDNGSHGLVPCGTTGESPTLSHDEHKKIIEETIRVADKRVPVIAGTGSNNTLEAIEYTEHAKKSGADAALVVTPYYNKPTQSGLYEHFKTIAEKTKIPIIIYNIPGRSIVDMSIETMIKLSNIENIIGVKDATNDLFRPLLTRKNMQNDFCYLSGEDGTALAYLAQGGHGCISVTANVAPKLCSEMHSYWQDGNILKAQEINLKLASLHNALFIESSPGPAKYAASLLGLCKENTRLPLTSIKDHTKELVKSCLEELQLL

SEQ ID NO: 179974 - protein, 199 aa, Unknown
  Bacterial polypetide isolated from the Sargasso Sea
MLRGSIVALVTPMLASGEVDWASLATLVDYHVSAGTSAIVAVGTTGESVTLSEQEHIAVVEKTVELAAGRIPVIAGCGSNNTAHAIDLAKRFAETGVVAGLSVTPYYNKPTQEGLYRHYCAIAEASGLPQILYNVPGRTGCDLKPETVARLAKVPGIIGLKEATGDLSRTPLLRELCGAQFALYSGDDASGCDFMLQGG

SEQ ID NO: 179975 - protein, 171 aa, Unknown
  Bacterial polypetide isolated from the Sargasso Sea
MFKGSNVALITPFKNNGLDEEAYIKLIHFHIDNGTNGLVPAGTTGESPTLSHDEHQRVIDLCIKESSGKIPVIAGTGSNSTEEAISLTTHAEKAGANGALIVTPYYNKPTQEGLYQHYKAINDKCGIPIIIYNIPGRSVIDMSVDTMARLYELENIVGVKDATGDLDRVNQ

SEQ ID NO: 179976 - protein, 79 aa, Unknown
  Bacterial polypetide isolated from the Sargasso Sea
MFKGSIVALITPFKNNIMDEDKYIKLIHHHIKNGTNGLVPAGTTGESLTLNNEEHKKVIEIAVKESNGKIPVIAGTGSN

SEQ ID NO: 179977 - protein, 231 aa, Unknown
  Bacterial polypetide isolated from the Sargasso Sea
NEAKGKIPIIAGTGSNSTEEAISLSKHAENAGADGVLVVTPYYNKPTQEGLYQHYKAINDNIGIPIIIYNIPSRCVIDMSVDTMAKLFELNNIAGVKDATGDLNRLDQTIKKLGSDFIQLTGEDGLAFEFNKRGGVGIISVTANVAPKLCSDMQKFSKSKSDNEIKEAEKIDLMLQPLHKSLFIESNPAPVKYAAKLLGLCDDEIRLPLVKIKKETQEKVKKALSSANLIS

SEQ ID NO: 179978 - protein, 225 aa, Unknown
  Bacterial polypetide isolated from the Sargasso Sea
MFKGSIPALITPFKNNKVDYDSLFKIINFLIDNGSDGIVPCGTTGESPTLSHDEHKKIIEETIRIADKRVPIIAGTGSNNTAEAIEYTQHAQKSGANAALIVTPYYNKPTQTGLYEHYKLISEETNIPIIIYNIPGRSVVDMNISTMIELAKLNNIIGVKDATNDLFRPLLTQKQMTNDFCYLSGEDGTALAYLAQGGHGCISVTANVAPKICSEMHKAWRDGNI

SEQ ID NO: 179979 - protein, 228 aa, Unknown
  Bacterial polypetide isolated from the Sargasso Sea
MLSGSIVALVTPMTIDGKVDWRAMDDLLEWHIEMGTAGIVPVGTTGESATVSMAEHCEIVEYVVNSVRKRVPVIAGTGANATWEAIELTKAAKEVGADACLLVTPYYNKPTQEGLYQHYKAIADAVDLPQVLYNVPSRTACDMLPQTIARLSKLDSVVAVKEATGDIDRTKQILDLCDLVVYSGDDLSARELMLNGAKGTISVTANVAPEKMAAMCNAAIAGQAEGCG

SEQ ID NO: 179980 - protein, 293 aa, Unknown
  Bacterial polypetide isolated from the Sargasso Sea
MFRGSMVAIVTPMNEDGSIDFISLKNLIEFHIENQTDVIISVGTTGESATLDFDEHSQVIKKTIEFVNGRIPVIAGTGANSTSEAIELTKSAKNNGADGCLLVTPYYNKPTQEGLYQHYKKIADLVDIPQILYNVPGRTSVDMQPETVLRLSTHKNIVGIKEASGNKDRSLSLMKLCSKDIKIFTGDDKTSMSDISDGFSGNISVTANVAPLEMHQMCQSALEGDIENASKLNSNLDILHDLLFCESNPIPVKWCLHKMGLIKKGIRLPLTWMDQKFDRPLTEGLIKSGIIDE

SEQ ID NO: 179981 - protein, 226 aa, Unknown
  Bacterial polypetide isolated from the Sargasso Sea
ISNGRIKVIAGTGANSTKEAIYLTSSAKSAGADAALLVTPYYNKPTQEGLYLHYQLIADEVDFPQILYNVPSRTGCDLLNDTVMRLVDHQNIVGLKDATGDLGRLEDFVTNLDSEQKDNFALYSGDDPTATEFMINGGTGTISVTSNIVPKIISNICDHALSGEAKAARDLDTTLVRLNQILFIESNPIPVKWMLNRIGRITDGIRLPLSHLDAKFHDKAEEVLSE

SEQ ID NO: 179982 - protein, 224 aa, Unknown
  Bacterial polypetide isolated from the Sargasso Sea
MIIDKTKFTNPLFGRILTAMVTPFTENGNVDYELAIKLANYLFENGSDGIVLCGTTGESPTLSWEEQHDLFIAVKGSLDSNCKVIVGTGSNCTSEAVEATKKAYDSGADGALVVVPYYNKPPQEGLYKHFSSIANSAKDLPLMLYNIPGRTGCNLLPDTVKKLMDFSNILSIKAASGRIEEVTELRAICGSKLSVYSGDDSLLLPMLSVGAVGVVSVASHLVGL

SEQ ID NO: 179983 - protein, 289 aa, Unknown
  Bacterial polypetide isolated from the Sargasso Sea
MLKGSIVALITPFKDDNLDENTYRDLIDYHLNNGTNGIVPGGTTGESPTLSHSEHKKIIEIAVKECNGKIPVIAGTGSNSTDEAVELSRYAEKAGSDALLVVTPYYNKPTQEGLYQHYKKINDSVGIPIIIYNIPSRSVIDMSVETMSKLYELKNITGVKDATGDLNRVDQQLKAMGKDFIQLTGNDDNALEFNKRGGVGAIGVTANIAAKISSDFQKACEQKNEEAASLDKLLQPLHSALFIESNPSPVKYAASLLGMCDPSVRLPLVEIREETKKKVSDALKVAKLL

SEQ ID NO: 179984 - protein, 293 aa, Unknown
  Bacterial polypetide isolated from the Sargasso Sea
MFKGSNVALITPFKNNKLDEENYIKLIDFHLKNGTNGLVPAGTTGESPTLNHREHEKVIEICIKESNGKLPIIAGTGSNSTAEAISLTQHAETAGADAALVVTPYYNKPTQEGLYQHYKAINDNTILPIIIYNIPGRCVIDMSVDTMARLFELKNIVGVKDATGDPNRIDQTIKKLGPEFIQLTGEDGFAFEFNKRGGVGIISVTANVAPKLCSDFQKYSKSKSDSELKEAEKLNNMLQPLHKSLFIESNPAPVKYAAKLLGLCDDEIRLPLVKIKKETQEEVKKALSHAKLI

SEQ ID NO: 179985 - protein, 159 aa, Unknown
  Bacterial polypetide isolated from the Sargasso Sea
MFKGSNVALITPFKNDKLDDETYIKLIHFHISNGTNGLVPAGTTGESPTLSHIEHERVIELCVKESNGKLPVFAGTGSNSTEEAISLTRHAEKIGANGALIVTPYYNKPTQEGLYQHYKAINDKCGISIIIYNIPGRSVIDMSVETMARLYELKNIIGV

SEQ ID NO: 179986 - protein, 294 aa, Unknown
  Bacterial polypetide isolated from the Sargasso Sea
MFKGSNVALITPFKDNNLDEENYIKLINFHLENNTNGLVPAGTTGESPTLSHREHEKVIELCINEVKGKIPVIAGTGSNSTEEAVALTKHAEKAGADGALVVTPYYNKPTQEGLYQHYKAINDNTNLPIIIYNIPSRCVIDMSVDTMARLFELKNIAGVKDATGDLNRLDQTIKKLGPEFIQLTGEDGLAFEFNKRGGVGIISVTANIAPKLCSDMQKYSKSKSDNELKEAERIDQLLQPLHKSLFIESNPAPVKYAAKLLGLCDDEIRLPLVKIKQETQEEVKKALSSAKLIS

SEQ ID NO: 179987 - protein, 248 aa, Unknown
  Bacterial polypetide isolated from the Sargasso Sea
SPTLSHNEHRKVIEFSVNECKGKIPVIAGTGSNSTDEAIELSKYAEKVGANGLLIVTPYYNKPTQEGLYQHYKKINNNVGIPIIIYNIPSRSVIDMKVETMARLFELKNILGVKDATGDLNRVDQQLKTMGNDFLQLTGEDDNALEFNRRGGKGCISVTANVAAKLCSDFQSASLKTGDKNMQTKAEEINNILKPLHKALFIESNPSPVKYAASLLKLAPDDVRLPLVKVMDETKTVVKDALKFAKLL

SEQ ID NO: 179988 - protein, 300 aa, Unknown
  Bacterial polypetide isolated from the Sargasso Sea
MITDKTKCTKPLFGRILTAMVTPFTENGNVDYELAIKLSNYLCENGSDGIVLCGTTGESPTLSWEEQHDLFIAVKGSLDSSCKVIVGTGSNCTSEAVEATKKAYDSGADGALVVVPYYNKPPQEGLYKHFSSIANAAKDLPLMLYNIPGRTGCNLLPDTVKKLMDFSNILSIKAASGRIEEVTELRAICGDQLSVYSGDDSLLLPMLSVGAVGVVSVASHLVGLQLKEMIESFQSGKVSNALAIHERLQPLFKALFMTTNPIPIKAALDLSGWNVGNPRSPLSPLNGNMKKQLSFILKSL

SEQ ID NO: 179989 - protein, 295 aa, Unknown
  Bacterial polypetide isolated from the Sargasso Sea
MFKGSNVALVTPFKNDKLDEETYIKLINFHLENGTNGLVPAGTTGESPTLSHAEHERVIELCIKESKGKIPVIAGTGSNSTEEAISLTKHAEKAGADGVLIVTPYYNKPTQEGLYQHYKAINDNTNLPIIIYNIPGRCVIDMSVDTMARLFELKNIAGVKDATGDLNRLDQTIKKLGPEFIQLTGEDGLAFEFNKRGGVGIISVTANIAPKLCSDMQKFSKSDSDNEMKEAERIDTLLQPVHKALFIESNPSPVKYAAKLLGLCDDSVRLPLVKVMEETKINVKNSLISAKLLNE

SEQ ID NO: 179990 - protein, 229 aa, Unknown
  Bacterial polypetide isolated from the Sargasso Sea
SKGKIPVIAGTGSNSTEEAVALTKHAEKAGADGVLVVTPYYNKPTQEGLYQHYKAINDNTSLPIIIYNIPSRCVIDMSVDTMAKLFELKNISGVKDATGDLNRLDQTIKKLGNEFIQLTGEDGLAFEFNKRGGVGIISVTANIAPKLCSEMQMLSKSKKDEDLKKAEIIDKNLQPLHKALFIESNPAPVKYAAKVLGLCTDEIRLPLVKIQKKTEEQIDKALSIAKLIN

SEQ ID NO: 179991 - protein, 289 aa, Unknown
  Bacterial polypetide isolated from the Sargasso Sea
MLKGSIVALITPFKDDNLDENTYRSLIDYHLNNGTNGIVPGGTTGESPTLSHSEHKKIIEIAVEECRGKIPVIAGTGSNSTDEAVELSQYAEKAGSDALLVVTPYYNKPTQEGLYQHYKKINDSVGIPIIIYNIPSRSVIDMSVETMSKLYELKNITGVKDATGDLNRVDQQLKAMGKDFIQLTGNDDNALEFNKRGGVGAIGVTANIAAKISSNFQKACEQKNEEAELLDKLLQPLHSVLFIESNPSPVKYAASLLGMCNPSVRLPLVEIREETKKKVLEALKVAKLL

SEQ ID NO: 179992 - protein, 178 aa, Unknown
  Bacterial polypetide isolated from the Sargasso Sea
MFKGSNVALVTPFKNDKLDDETYINLIHFHIQNGTNGLVPAGTTGESPTLSHDEHERVIELCVKESNGKLPVFAGTGSNSTEEAISLTTHAEKIGATGALIVTPYYNKPTQEGLYQHYKAINDKCGIPIIIYNIPGRSVIDMSVDTMARLFELKNIIGVKDATGDLNRVEQTLKKMER

SEQ ID NO: 179993 - protein, 289 aa, Unknown
  Bacterial polypetide isolated from the Sargasso Sea
MLKGSIVALITPFKNDSLDEDTYRRLIDYHLKNGTNGVVPGGTTGESPTLSHSEHKKIIQIAVEECKGKIPIIAGTGSNSTDEAIELSRYAEKAGSDALLVVTPYYNKPTQEGLYQHYKKINDNVGIPIIIYNIPSRSVIDMSVETMSKLYELKNIVGVKDATGDLKRVDSQLKSMGKEFIQLTGNDDNALEFNKRGGVGAIGVTANIAAKLSSDFQKACKNDMAEAVKLDKILQPLHSSLFIESNPSPVKYAASLLKMCSPSVRLPLVEIRDETKKKVSDALKSAKLF

SEQ ID NO: 179994 - protein, 239 aa, Unknown
  Bacterial polypetide isolated from the Sargasso Sea
IKIAIDVTKNKVPVIAGTGSNSTYEAIKMTENAEKAGADATLQVVPYYNKPNQSGLFNHFSEIAGNTSLPLILYNIPGRSVVNLTVETIANLERENKNIIGIKEASGDIEMVKKIKSSCSDKFMVLSGEDSLNLSILELGGAGYISVTSNLLPNKCSSMFNTYIDGNTKNAEKINLELSEINKLLFIDTNPIPIKYAMSKLGLCHNSLRLPLCSLDEEKSLILSTELEKHILKENKLDK

SEQ ID NO: 179995 - protein, 290 aa, Unknown
  Bacterial polypetide isolated from the Sargasso Sea
MFKGSHTALITPFDGKSIDEKSFRSLIDFQISEGIHGLVPVGTTGESPTLSHEEHKLAVEICVEETAKRVPVIAGTGSNNTDEAIDLTVHAEKAGADGALVVTPYYNKPTQHGLYSHFEAISKATTLPIIIYNIPGRSIVDMNTETMRDLFKIKNIVGVKDATSDIPRVYETKTTIGEDFNQLTGDDATTLAFMTYGGHGSISVTSNIAPKLCSEFMKYCLDQNFAKASEINDKLMPLHHALFVESSPAPVKYAASKLGLCKDDIRLPLTSISDETKQLVDKAMKHASLI

SEQ ID NO: 179996 - protein, 293 aa, Unknown
  Bacterial polypetide isolated from the Sargasso Sea
MFKGSNVALVTPFKNDKLDDETYINLIHFHIQNGTNGLVPAGTTGESPTLSHDEHERVIELCVKESNGKLPVFAGTGSNSTEEAISLTTHAEKIGATGALIVTPYYNKPTQEGLYQHYKAINDKCGIPIIIYNIPGRSVIDMSVDTMARLFELKNIIGVKDATGDLNRVEQTLKKMGNEFIQLTGNDDNALEFNKRGGVGAISVTANIAPKLCSDFQKLSKSENNDEIKEAEKIDKILQPLHHAMFVESNPSPVKYAAKLLNLCDDNVRLPLVKVTAETKDIVKKALHSAKLV

SEQ ID NO: 179997 - protein, 251 aa, Unknown
  Bacterial polypetide isolated from the Sargasso Sea
MFKGSNVALITPFKNNGLDEDAYIKLIHFHIDNGTSGLVPAGTTGESPTLSHTEHERVIDLCIKESNGKIPVIAGTGSNSTEEAISLTSHAEKAGANGALIVTPYYNKPTQEGLYQHYKAINDKCGIPIIIYNIPGRSVIDMSVDTMARLYELKNIVGVKDATGDLDRVDQQLKKMGNEFIQLTGNDDNAFEFNKRGGVGTISVTANIAPKLCSEFQKNSTSKNDENLAKAKELDDILQPSTYCNVCREQP

SEQ ID NO: 179998 - protein, 252 aa, Unknown
  Bacterial polypetide isolated from the Sargasso Sea
MFKGSNVALITPFKDNKLDIDAYIELIHFHIKNGTNGLVPAGTTGESPTLNHDEHQKVIELCINESKGKIPVIAGTGSNSTAEAISLTKHAEKVGANGALVVTPYYNKPTQEGLYQHYKSINDNCGIPIIIYNIPSRSVIDMTVDTMARLFELKNIVGVKDATGVLNRVDQQKEKMGNEFIQLTGEDANVLEFNKKGGVGCISVTANVAPKLCSDFQKFSLSKDKSNLKEAERINDNLQPLHKSLFLESNPS

SEQ ID NO: 179999 - protein, 296 aa, Unknown
  Bacterial polypetide isolated from the Sargasso Sea
MQALHGSLVALVTPMNSKGDIDFNSLEKLIEWHIANDTNGIVSVGTTGESATLTVDEHLKVIEHTVKCVNGRIPVIAGSGSNSTAQAIETTTESHRIGADFSLLVTPYYNRPNQKGLIEHYIKIADECNINQILYNVPSRTGCDILPETVEVLSKHQNIIGIKEAVNNQKRINELVKISKQSQEDFLIFSGDDESFFNLITSGGHGVISVAANVIPKSISDICKLIIEEKIEEANEINKKYQNLYDLLFIESNPIPVKWILFKMGFIQNSLRLPLVNLDKKFEENIMSEMIKLKLL

SEQ ID NO: 180000 - protein, 223 aa, Unknown
  Bacterial polypetide isolated from the Sargasso Sea
MFKGSNVALITPFINNKVDEEKYIKIINFHLENGTNGLVPVGTTGESPTLSHDEHQKLIELCIKESNGRIPVIAGTGSNSTEEAISLTRHAEKAGADGALVVTPYYNKPTQEGLYQHYKAINDSCGIPIIIYNIPSRSVIDMSVDTMARLFELKNIVGVKDATGDLNRVDQQKIKMGEEFIQLTGNDDNAFEFNKRGGVGNYSVTANIAPKMCSDFQKFSKSK

SEQ ID NO: 180001 - protein, 294 aa, Unknown
  Bacterial polypetide isolated from the Sargasso Sea
MFKGSIVALITPFKNNMLDEDKYVSLIHHHITNGTKGVVPAGTTGESPTLSNDEHKRVIEIAVKECKGKIPVIAGTGSNSTDEAVNLSRYAEKAGADAILVVTPYYNKPTQEGLYQHYKLINDNVGIPIIIYNIPPRSVIDMSVDTMARLFELKNIVGVKDATADLDRVNKQMKKMGPEFIQLSGEDATALDFNMRGGTGCISVTANVAAKLCSDFQEASLAKNNNNLLSKAKEINKKLMPLHKALFIESNPSPVKYAASLLNLSSEDVRLPLVKITENTKKEVQKALKFANLL

SEQ ID NO: 180002 - protein, 298 aa, Unknown
  Bacterial polypetide isolated from the Sargasso Sea
MQPLQGSFVALVTPMFPGGSLDYASLQDLIEWQIKDGISGIVSVGTTGESATLNVKEHLEIIEKTIEYTNGRVPVIAGTGANSTQEAIELTQTANSLGADYALIVTPYYNKPNQDGLLKHYLKIANEVDIPQILYNVPSRTACDLQPETVLRLSDHPNIIGIKEAVDDQQRMDALLTISKKLKNKKNFSILSGDDPTFNSFMSKGADGVISVAANIIPGAISKICTFNLNKEFNEAIELNQKYSNLYDLLFVESNPIPVKWALEKMNKIESGIRLPLVSLDGAFNEEISKEMSKLELI

SEQ ID NO: 180003 - protein, 295 aa, Unknown
  Bacterial polypetide isolated from the Sargasso Sea
MFTGSIVAIVTPMQAGVAPDTELDFKGLEQLIEFHIENGTKGIVAVGTTGESATLTEQEHCDVIEAVVKITKNRVPVIAGTGANSTIEAISLTKCAKKVGADACLLVTPYYNKPTQQGLYEHYKIIAESVDIPQILYNVPGRTACDMLPETVIELSAISNIIGVKEATADLKRVKQIREGATKGFLLLSGDDETTKDFILSGGDGVISVTANVAPKKMSEMCAFASQGKIDEANDIDESIAGLHKELFVESNPIPVKWVLHKMGLIKSGIRLPMTWLAKESESKLLSAMKQANIV

SEQ ID NO: 180004 - protein, 291 aa, Unknown
  Bacterial polypetide isolated from the Sargasso Sea
MVAIATPMNTDGSLDFNSLERLVEFHIENKTDVIIAVGTTGESATLSMREHSEVIQKTISIVNKRIPVIAGTGANSTSEALELTHQSKTLGADACLLVTPYYNKPTQNGLYQHYSKIANEVNIPQILYNVPGRTSVDMQPDTVLKLCEHDNIIGIKEASGDIDRSKELLDKCSDKISIFSGDDKTAMRDILQGFKGNISVTANICPREMHDVCRLASAGSKDEAEIINKKIEILHDDLFIESNPIPVKWALNKMNLIDKGIRLPLTWLDEKYQKILGKSLISAGIITDNDL

SEQ ID NO: 180005 - protein, 219 aa, Unknown
  Bacterial polypetide isolated from the Sargasso Sea
MFKGSLPAMVTPFNNGEIDVKGLRNLVNWHIEQGSHGLVPVGTTGESPTLTHAEHEQVVSEVINEAAGRVPVIAGAGSNNTAEATRFVEHAKNVGANAALVVTPYYNKPTQAGLIAHFTELSKIGLPIVIYNIPGRSVVDMSPETMGELAKLNEIIGVKDATGDLARVCDQRLTCGDDFIQLSGEDATAHGFNAQGGVGCISVTANVAPELCSRCRKQL

SEQ ID NO: 180006 - protein, 294 aa, Unknown
  Bacterial polypetide isolated from the Sargasso Sea
MFKGSNVALITPFKNNQLDVDSYIKLIHFHLKNGTNGLVPAGTTGESPTLNHKEHEQVIELCIQEAKGKIPVIAGTGSNSTEEAISLTRHAEKAGADGVLVVTPYYNKPTQEGLYQHYKAINDNTSLPIIIYNIPSRCVIDMSVDTMSKLFELKNIAGVKDATGDLNRLDQTIKKLGPEFIQLTGEDGLAFEFNKRGGVGIISVTANIAPKLCSDMQKYSKSKSDNEIKEAERIDQILQPLHKSLFIESNPAPVKYAAKLLGMCDDEIRLPLVKIKKETQEQVKKALSSAKLIS

SEQ ID NO: 180007 - protein, 298 aa, Unknown
  Bacterial polypetide isolated from the Sargasso Sea
MDNKYKGSFVALITPFVNGKIDEASFQKFIEWQISQGTNGLVPCGTTGESPTLSHSEHERLIDLTVEVSNGRVPVMAGTGSNSTEEAINLTKYAKKAGADSALVVMPYYNKPTQEGMYAHFEAINNAVDLPLFIYNIPGRSVIDMSVETMVKLAKLTNIVGVKDASNDPIRPTLLRNALNSNNFIQFSGEDPSQLPFMASGGDGIISVTGNVAPNLMSEFHQLWSSNKLSEARNLQEKLMPLHMSLFVETSPAPVKYAASIRGISSAELRLPLVEPNYNTKKIVELALKDLKLSKIEI

SEQ ID NO: 180008 - protein, 295 aa, Unknown
  Bacterial polypetide isolated from the Sargasso Sea
MQVLNGSLVALVTPMMPDGEIDFDTLNKIIDWHIQEGTNGIVSVGTTGESATLNFEEHIEVIRYTINYVDGRLPVIAGTGANSTSEALDLTKEAEIIGANYALIVTPYYNKPSQKGLIEHYTKIADSVDIPQILYNVPSRTACDLLPTTAEILSKHKNIVGIKEAVCDEERIKELIKISLSNNSFKVYSGDDPSFLNMLSVGGHGVISVAANIVPKYISGICSFYQNNEVEKAEEINNKLKNLYDLLFIQSNPIPVKWMMYKMGLVQNALRLPLVELDKKYQEIIISEMLKLELL

SEQ ID NO: 180009 - protein, 289 aa, Unknown
  Bacterial polypetide isolated from the Sargasso Sea
MLKGSIVALITPFKDESLSEGEYVKLINYHLENGTNGVVPGGTTGESPTLSHNEHRKIIEIAVKECKGKIPVIAGTGSNSTDEAIELSKFAEKAGSDSLLVVTPYYNKPTQEGLYQHYKKINDNVGIPIIIYNIPSRSVINMEVDTMAKLYELKNIKGVKDATGDLNRVDLQLKAMGKEFIQLTGNDDNALEFNKRGGVGAIGVTANVAAKLASDFQKACVDDPKKAVELDKLLQPLHTSLFIESNPSPVKYAASLLRMCKPTVRLPLVEIREETKKKVSEALKVAKLL

SEQ ID NO: 180010 - protein, 289 aa, Unknown
  Bacterial polypetide isolated from the Sargasso Sea
MLKGSIVALITPFKDDNLDENTYRRLIDYHLNNGTNGIVPGGTTGESPTLSHSEHKKIIEIAVKECSGKIPVIAGTGSNSTDEAVELSQYAEKAGSDALLVVTPYYNKPTQEGLYQHYKKINDSVGIPIIIYNIPSRSVIDMSVETMSKLYELKNITGVKDATGDLNRVNQQLKAMGKDFIQLTGNDDNALEFNKRGGVGAIGVTANIAAKISSDFQKACEQKNGEAESLDKLLQPLHSALFIESNPSPVKYAASLLGMCNPSVRLPLVEIREETKKKVSAALKVAKLL

SEQ ID NO: 180011 - protein, 284 aa, Unknown
  Bacterial polypetide isolated from the Sargasso Sea
MEEDGAIDWQALKELTEWHVSSGTAGLVIVGTTGESATLDVAEHVQVIENSVKNADGRIKIIAGTGANSTKEAVYLTNSAKSAGADAALLVTPYYNKPSQEGLYRHYIHIADEVNFPQILYNVPSRTGCDLLTDTVIKLVPHENIVGLKDATGDLNRLNEILSKLEEMKDHEFHLYSGDDPTSTQFMLSGGSGTISVTANVVPSLIADICNKALSNESKTAIELDIKLKDLNEILFVESNPIPVKWILNRLGRIPKGLRLPLVELDKKFHSKAELILKELSLLN

SEQ ID NO: 180012 - protein, 295 aa, Unknown
  Bacterial polypetide isolated from the Sargasso Sea
MQALKGSLVALVTPMEESGEVDYESLEKLIDWHINHGTNGIVSVGTTGESATLDVDEHLEVIKHTVEHVNSRVPVIAGTGANSTSEAIELTQESKQNGADFALIVTPYYNKPTQKGLISHYTKLANEVDIPQILYNVPSRTACDILPETVEILSTHNNIVGIKEAVDSKERIDDLITISSNNQNFQLFSGDDPSFIKMIQKGGDGVISVAANVVPSKISEICKLVEEKKHDEATFIDNTLSNLYDLLFIESNPIPVKWMLFKMNLIKNSIRLPLEELDEIYQEDIINEMLKLELI

SEQ ID NO: 180013 - protein, 290 aa, Unknown
  Bacterial polypetide isolated from the Sargasso Sea
MFKGAHTALITPFKGGQIDEESFRSFIDFQISEGIHGLVPVGTTGESPTLSHEEHKLAVELCVQQADKRVPIIAGTGSNNTEEAIDLTRHAESAGADAALVVTPYYNKPTQKGLYSHFEAISKSTKLPIIIYNIPGRSIVDMSTETMKSLFKIENIVGVKDATSNIPRVYESKTVIGENFNQLTGDDATTLAFMTYGGHGSISVTSNIAPKLCSQFMQLCLSKDFAEAAKINDKLMPLHHALFVESSPGPVKYAASKLGLCGEEIRLPLTLISDETKVLVDKALKHASLI

SEQ ID NO: 180014 - protein, 254 aa, Unknown
  Bacterial polypetide isolated from the Sargasso Sea
IVVVGTTGESATLSMEEHCDLVSHCVGAANKRIPIIAGTGSNSTEEALYFTNSAKECGADACLLVAPYYNKPTQEGLFKHFKLIAESVDIPQILYNVPSRTGCDMEFELVNRLADIDNIIALKDASGDVSRGKVLIDRCGDRIDIYSGEDALTLELMKHGASGTISVTANIVPNLMAQMCNFALERNFESAAMLDEKLQGLHRALFLESNPIPVKWALNKMNKIGETLRLPLTELNGKFHVELIEALNLVNVNI

SEQ ID NO: 180015 - protein, 295 aa, Unknown
  Bacterial polypetide isolated from the Sargasso Sea
MSIFKGSMVAIATPMNLDGSLDFDSLHQLIEFHVDNKTDVIISVGTTGESATLDFKEHSSVIKTTIELVKGRIPVIAGTGANSTSEAIELTESAKKNGADGCLLVTPYYNKPTQEGLFQHYKKIADTVAIPQILYNVPGRTSVDMLPETVQRLSTHNNIIGIKEASGNKDRSMKLMKLCSENIQIFTGDDKTSMSDIIDGFSGNISVTANVAPLEMHMMCKYAIEGDKEKAEEINSKIGILHDILFCESNPIPVKWCLNRMGLIKKGIRLPLTWMDDKYDESLNDALINTGIMNE

SEQ ID NO: 180016 - protein, 259 aa, Unknown
  Bacterial polypetide isolated from the Sargasso Sea
DLCPQEQLGESPTLSHAEHEKVIELCIKEANGKVPVIAGTGSNSTEEAISLTKHAENAGADAALIVTPYYNKPTQEGLYHHYKAINDNTNLPIIIYNIPGRCVIDMSVDTMARLFELRNITGVKDATGDLNRLDQTIKKLGPEFIQLTGEDGLAFKFNKRGGVGIISVTANIAPKLCSDMQKFSKSKIDNEIMEAERIDGILQPVHKALFIESNPAPVKYAAKLLGLCDDAVRLPLVSIMEETKLKVKNSLISAKLLNE

SEQ ID NO: 180017 - protein, 300 aa, Unknown
  Bacterial polypetide isolated from the Sargasso Sea
MITDKTECNNPLFGRILTAMVTPFTENGDVDYELAIKLSNYLFENGSDGIVLCGTTGESPTLSWAEQHDLFIAVKGSLDASCKVIVGTGSNCTSEAVEATKKAYDSGADGALVVVPYYNKPPQEGLYKHFSSIAKSAKDLPLMLYNIPGRTGCNLLPDTVKKLMDFSNILSIKAASGRIEEVTELRAICGSELSVYSGDDSLLLPMLSVGAVGVVSVASHLVGLQLKEMIHSFQSGKVSNALAIHEKLQPLFKALFMTTNPIPIKAALELSGWDVGNPRSPLSPLTNDMKKQLSFILKSL

SEQ ID NO: 180018 - protein, 273 aa, Unknown
  Bacterial polypetide isolated from the Sargasso Sea
MFKGSNVALITPFKNNGLDEAAYIKLIHFHIDNGTSGLVPAGTTGESPTLSHTEHERVIDLCIKESNGKIPVIAGTGSNSTEEAISLTSHAEKAGANGALVVTPYYNKPTQEGLYQHYKAINDKCGIPIIIYNIPGRSVIDMSVDTMARLYELKNIVGVKDATGDLDRVNQQLNKMGKDFIQLTGNDDNAFEFNKRGGVGTISVTANIAPKLCSEFQKNSISKHDQDLAKAKELDNILQPVHTAMFVESNPSPVKYAAKLMNLCDDEVRLPLV

SEQ ID NO: 180019 - protein, 272 aa, Unknown
  Bacterial polypetide isolated from the Sargasso Sea
AYIKLIHFQIDNGTNGLVPAGTTGESPTLSHDEHQRVIDLCIKESDGKIPVIAGTGSNSTEEAISLTTHAEKTGANGALIVTPYYNKPTQEGLYQHYKAINDKCGIPIIIYNIPGRSVIDMSVDTMARLYELKNIVGVKDATGDLDRVNQTLEKMGKEFIQLTGNDDNAFEFNKRGGVGTISVTANIAPKLCSDFQKFSKSDTDNEMKEAERLDKILQPVHHSMFVESNPSPVKYAAKLLGLCDDNVRLPLVKVTDTTKEIIKKALQSAKLI

SEQ ID NO: 180020 - protein, 206 aa, Unknown
  Bacterial polypetide isolated from the Sargasso Sea
MFKGSIVALITPFKNNKLDEANYSQILQHHLKNGTNGVVPAGTTGESPTLSHIEHKKVIEIAIKECKGKIPVIAGTGSNSTSEAIELSKHAENVGADGLLIVTPYYNKPTQEGLYQHYKSINDSVGIPIIIYNIPSRSVIDMTVDTMARLYELKNIKGVKDATGDLNRVSMQLNKMGKEFIQLTGEDDNALEFNKRGGVGCISVTA

SEQ ID NO: 180021 - protein, 210 aa, Unknown
  Bacterial polypetide isolated from the Sargasso Sea
MFKGSNVALITPFKNNGLDEDAYIKLIHFHIDNGTNGLVPAGTTGESPTLSHHEHQRVIDLCIKESNGKIPIIAGTGSNSTEEAISLTTHAEKAGANAALIVTPYYNKPTQEGLYQHYKAINDKCGIPIIIYNIPGRSVIDMSVNTMARLYELKNIVGVKDATGDLDRVNQTLKKMGKDFIQLTGNDDNAFEFNKTRRCWHYKCNSKYCP

SEQ ID NO: 180022 - protein, 296 aa, Unknown
  Bacterial polypetide isolated from the Sargasso Sea
MKGDYKINPFIIEKNESPFAGIGVAVVTPFDQNNKIDKQAIYRISDYLFRNGVSYVVVQGTTGESSVLNPDEKNEVNSIFIDAFKDRLPLILGISSNDTNYLTQQISKTDLTGFEAIMSVCPYYNKPSQEGLYQHFKSVCDVSPIPLLLYNVPGRTSCDISNETILRLSEYSDKIIGIKEASGDVKRIIELRKKIKRKFLIISGDDFTMIDAVRNGADGIISVAANAFPSIMNSTYISLIWENDKQVPNNIKELGTVDSSTFLLNDFFDLIFEEGNPSGIKFALQCLNLCKTKLDT

SEQ ID NO: 180023 - protein, 295 aa, Unknown
  Bacterial polypetide isolated from the Sargasso Sea
MFKGSNVALVTPFKGNSLDEETYIKIINFHLENGTNGLVPAGTTGESPTLSHREHEKVIELCIQEAKGKIPVIAGTGSNSTTEAISLTEHAEKAGADGALIVTPYYNKPTQEGLYQHYKAINDKCGIPIIIYNIPGRSVIDMTVDTMARLFELKNIVGVKDATGDLNRVDETFKKIGNEFIQLTGEDGLAYEYNKRGGVGCISVTANIAPKMCSDMQKFSKSQNNDEQKKAEEIDKKLQPVHKSLFIESNPSPVKYAAKLIGLCDDNVRLPLVTVLDETKAEVKKALISAELINE

SEQ ID NO: 180024 - protein, 104 aa, Unknown
  Bacterial polypetide isolated from the Sargasso Sea
MFFGSIPALITPFNNYNVDYDSLNNIINHSISSGSNGLVPCGTTGESPTLSHDEHQKIIEETIRITDKRVPVIAGTGSNNTAEAIDYTKHAEKSGANAALVVTP

SEQ ID NO: 180025 - protein, 150 aa, Unknown
  Bacterial polypetide isolated from the Sargasso Sea
MFKGSNVALITPFKDNKLDEESYIKIINHHLENGTNGLVPVGTTGESPTLSHDEHERTIELCIKEATGKLPIIAGTGSNSTEEAVSLTKHAEKAGADGALVVTPYYNKPTQEGLYQHYKSINDNCGIPIIIYNIPSRSVIDMSVETMARL

SEQ ID NO: 180026 - protein, 294 aa, Unknown
  Bacterial polypetide isolated from the Sargasso Sea
MINGSIVALITPMNSDGSVDFASLERLVEFHIDQGTDAIVAVGTTGESATLPMNEHVTVVAQTVKFAAGRIPVIGGNGANATSEAIELTKSLSKVGVAAMLGVTPYYNKPTPKGLVAHYKAVAASTDIPQILYNVPGRTAVDMKPETVAELVAVSNIIGVKEATGDVSRVQRLRELCGNDFMLYSGDDATAREFLLLGGNGVISVANNIVPKAFKAMCDAALAGNAELAASIDEPLRGLYSTLFCEANPIPVKWAAHRMGLIECGHIRLPLTELSEQCHGLLLDAMTRAQIEVK

SEQ ID NO: 180027 - protein, 295 aa, Unknown
  Bacterial polypetide isolated from the Sargasso Sea
MFKGSNVALVTPFKGDSLDEETYIKIINFHLENGTNGLVPAGTTGESPTLSHGEHEKVIELCIKEAKGKIPVIAGTGSNSTVEAISLTKHAEKAGADGALIVTPYYNKPTQEGLYAHYKAINDSCGIPIIIYNIPGRSVIDMSVDTMARLFELKNIVGVKDATGDLNRVDETFKKIGNEFIQLTGEDGLAFEYNKRGGVGCISVTANIAPKMCSDMQKFSKSNDKDELEIAEEIDKKLQPVHKSLFIESNPSPVKYAAKLIGLCDDKVRLPLVTVLDETKNEVKKALLSAELINE

SEQ ID NO: 180028 - protein, 285 aa, Unknown
  Bacterial polypetide isolated from the Sargasso Sea
LVTPFKNDKLDDETYIKLIHFHIKNGTNGLVPAGTTGESPTLSHKEHERVIELCVKESNGRLPVFAGTGSNSTEEAISLTTHAEKIGANGALIVTPYYNKPTQEGLYQHYKAINDKCGIPIIIYNIPGRSVIDMSVDTMAKLYELKNIIGVKDATGDLNRVDQTLKKMGKDFIQLTGNDDNALEFNMKGGVGAISVTANIAPKLCSDFQKFSKSESDNEIKEAERLNKILQPVHHAMFVESNPSPVKYAAKLLNLCDDNVRLPLVKVTEPTKEIVKKALHSAKLI

SEQ ID NO: 180029 - protein, 292 aa, Unknown
  Bacterial polypetide isolated from the Sargasso Sea
MFKGSNVALVTPFKNNKLDDDTYIKLIHFHIKNGTNGLVPAGTTGESPTLSHEEHERVIDLCVKESNGKLPVFAGTGSNSTEEAISLTKHAEKIGANAALIVTPYYNKPTQEGLYQHYKAINDKCGIPIIIYNIPGRSVIDMKVDTMARLYELKNIVGVKDATGDLNRVDQTLKKMGKEFIQLTGNDDNALEFNKRGGVGAISVTANIAPKLCSEFQKFSILKDQKSIDEAEKLNKILQPIHHSMFVESNPSPVKYAAKLLSLCDDDVRLPLVKVTETTKEIVKKALQSANL

SEQ ID NO: 180030 - protein, 294 aa, Unknown
  Bacterial polypetide isolated from the Sargasso Sea
MFKGSNVALVTPFKNDKLDDETYIKLIHFHIENGTNGLVPAGTTGESPTLSHNEHERVIDLCVKESNGKLPVFAGTGSNSTEEAISLTTHAEKMGADGALIVTPYYNKPTQEGLYQHYKAINDKCGIPILIYNIPGRSVIDMSVETMARLFELKNIIGVKDATGDLTRVDKTLEKLGKDFIQLTGNDDNALEFNKKGGVGAISVTANIAPKLCSDFQRFSKSNNDNEIKEAERLNEILQPVHHAMFVESNPSPVKYAAKLLDLCDDDVRLPLVKVTDTTKDIVKKALHTAKLIQ

SEQ ID NO: 180031 - protein, 289 aa, Unknown
  Bacterial polypetide isolated from the Sargasso Sea
MLKGSIVALITPFKDNNLDENTYRKLIDYHLNNGTNGIVPGGTTGESPTLSHSEHKKIIEIAVKECKGKIPVVAGTGSNSTDEAVELSKFAEKAGSNALLVVTPYYNKPTQEGLFQHYKKINDSVGIPIIIYNIPSRSVIDMSVETMSKLYELKNITGVKDATGDLNRVDQQLKAMGKEFIQLTGNDDNALEFNKRGGVGAIGVTANIAAKMSSDFQKACQEKNGMAETLDKLLQPLHFALFIESNPSPVKYAASLLGMCNSSVRLPLVEIREETKKKVLEALKVAKLL

SEQ ID NO: 180032 - protein, 294 aa, Unknown
  Bacterial polypetide isolated from the Sargasso Sea
MINGSIVALITPMNSDGSVDFASLERLVEFHIDQGTDAIVAVGTTGESATLPMNEHVAVVAQTVKFVAGRIPVIGGNGANATAEAIELTKSLSKVGVDAMLGVTPYYNKPTPKGLVAHYKAVAASTDIPQILYNVPGRTAVDMKPETVAELVSVSNIIGVKEATGDVSRVKRLRELCGNDFMLYSGDDATAREFLLLGGNGVISVANNIVPKAFKAMCDAALAGNAELAASIDEPLRGLYSTLFCEANPIPVKWAAHRMGLIQCGHIRLPLTELSEQCHGLLLDAMTRAQIEVK

SEQ ID NO: 180033 - protein, 295 aa, Unknown
  Bacterial polypetide isolated from the Sargasso Sea
MQVLNGSLVALVTPMMPNGDIDFNALDKIIDWHIKEGTNGIVSVGTTGESATVNFDEHIKIIKHTINYVDGRVPVIAGTGANSTSEALDLTMEAKSIGANYALIVTPYYNKPSQLGLIEHYTKIADSIDIPQILYNVPSRTACDLLPSSVEVLSDHKNIIGIKEAVDIEERMKDLIKISSTNENFKIYSGDDPSFLKMLMLGGHGVISVAANIVPKYISEICSLCLDNKINNAKMVNEKLTKIYDLLFIQSNPIPVKWMMYKMGLIQNFLRLPLTELDEKYKELIISEMLKLELL

SEQ ID NO: 180034 - protein, 294 aa, Unknown
  Bacterial polypetide isolated from the Sargasso Sea
MFKGSNVALITPFKDNNLDEENYIKLINFHLENNTNGLVPAGTTGESPTLSHDEHKKVIELCIREAKGKIPIIAGTGSNSTEEAVELTKHAEKAGADGALVVTPYYNKPTQEGLYQHYKSINDNSSLPIIIYNIPSRCVIDMSVDTMARLFELKNIAGVKDATGDLNRLDQTIKKLGPEFIQLTGEDGLAFEFNKRGGVGIISVTANIAPKLCSDMQKYSKSKTDNEIKEAERIDQILQPLHKSLFLESNPAPVKYAAKLLGLCSDEIRLPLVKIKKETQEEVKKALSSAKLIS

SEQ ID NO: 180035 - protein, 274 aa, Unknown
  Bacterial polypetide isolated from the Sargasso Sea
DCYIKLIHFHLKNGTNGLVPAGTTGESPTLSHKEHEQVIELCIKEAKGKIPVIAGTGSNSTAEAISLTKHAEKAGADGALVVTPYYNKPTQEGLYQHYKAINDNTSLPIIIYNIPSRCVIDMSVDTMARLFELKNIAGVKDATGDLNRLDQTIKKLGPDFIQLTGEDGLAFEFNKRGGVGIISVTANIAPKMCSDMQKFSKSESDNEIKEAERIDQLLQPLHKSLFIESNPAPVKYAAKLLGLCDDEIRLPLVKIKKETQEKVKQALSSAKLIS

SEQ ID NO: 180036 - protein, 158 aa, Unknown
  Bacterial polypetide isolated from the Sargasso Sea
MQALKGSLVALVTPMEEGGDVDYNSLEKLVDWHIQEGTNGIVSVGTTGESATLDVEEHLNVIKHTVEYVNSRIPVIAGTGANSTSEAIELTEESKKLGANYALLVTPYYNKPNQNGLINHYTKIADEVDIPQILYNVPSRTACDLLPSSVKILSEHNN

SEQ ID NO: 180037 - protein, 266 aa, Unknown
  Bacterial polypetide isolated from the Sargasso Sea
MFKGSNVALLTPFKNNKLDEDCYIKLINFHIENGTNGLVPAGTTGESPTLSHEEHEKVIELCIKEAKGKIPVIAGTGSNSTTEAVALTKHAEKAGADGVLVVTPYYNKPTQEGLYQHYKSINDNTSLPIIIYNIPSRCVIDMSVDTMARLYELKNIAGVKDATGDLNRLDQTLKKLGPDFIQLTGEDGLAFEFNKRGGVGIISVTANIAPKLCSDFQKFSKSNSDNEIKEAERIDALLQPLHKALFIESNPAPAKYAAKLLGLCSD

SEQ ID NO: 180038 - protein, 158 aa, Unknown
  Bacterial polypetide isolated from the Sargasso Sea
MFFGSIPAVITPFKNNQVDYNSLDKIVNHLILNGSNGLVPCGTTGESPTLSHEEHKKIIEQTIKISDKRVPVIAGTGSNNTKEAVDYTKHAESVGADAALVVTPYYNKPTQNGLYAHFKMIADSVKLPIIIYNIPGRSVIDMSIETKNELSKIENIIG

SEQ ID NO: 180039 - protein, 214 aa, Unknown
  Bacterial polypetide isolated from the Sargasso Sea
FTEEAISLTSHAEKAGANGALVVTPYYNKPTQEGLYQHYKAINDKCGIPIIIYNIPGRSVIDMSVDTMARLYELKNIVGVKDATGDLDRVNQQLNKMGKDFIQLTGNDDNAFEFNKRGGVGTISVTANIAPKLCSEFQKNSISKHDEDLAKAKELDNILQPVHTAMFVESNPSPVKYAAKLMNLCDDEVRLPLVKVTEETKIIVKKAIETAKLI

SEQ ID NO: 180040 - protein, 166 aa, Unknown
  Bacterial polypetide isolated from the Sargasso Sea
MKKNSYSYDELINCGEGGLFGPGNAKLPLPPMLMFDRITEISENGGAYKKGVIKAELNVKDDLWFFNCHFKEDPVMPGCLGLDAMWQLVGFYLGWLGKPGKGRALGVNAVKFTGEVLKSVNIATYEIDMKRILIKEGTTVGLADGILSADGKKIYSAENLKVGLFK

SEQ ID NO: 180041 - protein, 166 aa, Unknown
  Bacterial polypetide isolated from the Sargasso Sea
MKKGAFNYDELISCANGELFGPGNAKLPSPPMLMFDRIIEIDENKGFFNKGIIKAELDVKDNLWFFDCHFKEDPVMPGCLGLDAMWQLVGFYLGWLGNPGRGRALGVNSVKFTGEVLKNVKMATYVIDMKRILIKEGTTVGLANGILLADGKKIYSAESLKVGLFK

SEQ ID NO: 180042 - protein, 166 aa, Unknown
  Bacterial polypetide isolated from the Sargasso Sea
KKTSYNYEDLIKCGNGKLFGPGNAKLPLPPMLMFDRISEIRENEGTFKKGLIKAELDIKDNLWFFDCHFKDDSVMPGCLGLDAMWQLVGFYLGWLGNPGKGRALGVNTVKFTGEVLKNIKLASYEINMKRVLIKEGTTVGLANGILKADGKEIYSAENLKVGLFKK

SEQ ID NO: 180043 - protein, 168 aa, Unknown
  Bacterial polypetide isolated from the Sargasso Sea
MKQKNNYTYQELIDCGNGLLFGKGNAKLPLPPMLMFDRITKIEENKGKYKKGFINAELDIRENLWFFNCHFKEDPVMPGCLGLDAMWQLVGFFLGWKGEPGKGRALGVSAVKFTGEVLQNVKMATYKIDMKRILKKEGAVVGLADGILDADGKIIYRAENLKVGLFRS

SEQ ID NO: 180044 - protein, 157 aa, Unknown
  Bacterial polypetide isolated from the Sargasso Sea
DCANGDLFGKGNAQLPSPPMLMFDRITNINETGGIFNKGEIVAELDIRPDLWFFDCHFKGDPVMPGCLGLDAMWQLVGFYLGWLEQPGKGRALGVGEVKFTGQILDTIKKVTYHISLKRLILRKLILGVADGILKADGEPIYEAKDMKVGLFQSDNK

SEQ ID NO: 180045 - protein, 168 aa, Unknown
  Bacterial polypetide isolated from the Sargasso Sea
MKQKNSYTYEDLINCGDGELFGKGNAKLPLPPMLMFDRITEIQKDTGKFKKGHMKAELDIKDSLWFFNCHFKDDPVMPGCLGLDAMWQLVGFFLGWTGEPGKGRALGVSSVKFTGEVLKNVKMATYNIDMKRILKKEGAVVGLADGVLDADGKKIYSAENLKVGLFKT

SEQ ID NO: 180046 - protein, 152 aa, Unknown
  Bacterial polypetide isolated from the Sargasso Sea
MFGLNNAQLPLKPMLMFDRIIEISNNGGKTGKGEIIAELDINPELWFFDCHFDGDPVMPGCLGLDAMWQLIGFFLGWSGAEGKGRALGAGAVKFSGQVTPKNKLVTYHVDMRRVVLRKLVMGVADASMSVDGEEIYAAEDLRVGLFKSTENF

SEQ ID NO: 180047 - protein, 162 aa, Unknown
  Bacterial polypetide isolated from the Sargasso Sea
YEQLIDCANGDLFGKGNAQLPSPPMLMFDRITNINETGGVFKKGEIVAELDIRPDLWFFDCHFKGDPVMPGCLGLDAMWQLVGFYLGWLEQPGKGRALGVGEVKFTGQVLNTIKKVTYHISLKRLILRKLILGVADGVLKADGEPIYEAKDMKVGLFQSNNK

SEQ ID NO: 180048 - protein, 167 aa, Unknown
  Bacterial polypetide isolated from the Sargasso Sea
MQKNSYNYDELISCGEGKLFGEGNAKLPLPPMLMFDRITEIKEDTGEFKRGFIKAELDIKDNLWFFDCHFKKDPVMPGCLGLDAMWQLVGFYLGWIGEPGKGRALGVNSVKFTGEVLKNVKMATYEINMKRILKKEGTAVGLANGILSADGKIIYTAENLKVGLFKS

SEQ ID NO: 180049 - protein, 166 aa, Unknown
  Bacterial polypetide isolated from the Sargasso Sea
MKKGSFNYDELINCANGDLFGPGNAKLPSPPMLMFDRISEINENKGFFNKGLIKAELDIKDDLWFFDCHFKQDPVMPGCLGLDAMWQLVGFYLGWLGNPGRGRALGVNSVKFTGEVLKNVKMASYVIDMKRILIKEGTTVGLANGVLLADGKKIYSAESLKVGLFK

SEQ ID NO: 180050 - protein, 168 aa, Unknown
  Bacterial polypetide isolated from the Sargasso Sea
MKENSFSYEKLIECGKGILFGEGNAQLPLPPMLMFDRIININETGGEFSKGEVIAELDIRSDLWFFDCHFKNDPVMPGCLGLDAMWQLVGFYLGWLGQPGKGRALGVGEVKFTGQVLHTVKKITYHISLKKLILRKLILGVADGVLEADGKPIYQAKDMKVGLFTPNK

SEQ ID NO: 180051 - protein, 166 aa, Unknown
  Bacterial polypetide isolated from the Sargasso Sea
MKKGSFNYDELISCANGMLFGPGNAKLPSPPMLMFDRISEISENNGFFNKGLIKAELDINDNLWFFNCHFKEDPVMPGCLGLDAMWQLVGFYLGWLGNPGRGRALGVNSVKFTGEVLKNVKLATYIIDMKRILIKEGTTVGLANGVLLADGKKIYSAENLKVGLFK

SEQ ID NO: 180052 - protein, 169 aa, Unknown
  Bacterial polypetide isolated from the Sargasso Sea
MATYPTEFNKEELLKCSRGELFGPGNAQLPAPPMLMIDRITEISEDSGPDRKGHVVAEFKITPDLWFFECHFPDNPIMPGCLGLDALWQLTGFNLGWRGWPGKGYALGVGEVKLTGMVRPDRKLLTYRVNFSKAIQTRRLTMGVANGIVEADGDVIYQVTDMKVALSEN

SEQ ID NO: 180053 - protein, 165 aa, Unknown
  Bacterial polypetide isolated from the Sargasso Sea
KKSFNYDELIACGKGELFGEGNAKLPLPPMLMFDRITEIKKDIGEFKKGFIKAELDIKNDLWFFNCHFKNDPVMPGCLGLDAMWQLVGFYLGWIGEPGKGRALGVNTVKFTGEVLKKAKMATYEINMKRILKKEGAVVGLANGILSADGKVIYTAENLKVGLFKS

SEQ ID NO: 180054 - protein, 153 aa, Unknown
  Bacterial polypetide isolated from the Sargasso Sea
MRQWGTFWTWKCKIPSPPMLMFDRITEISEETGAFGKGLMKAELDIKEDLWFFDCHFKEDPVMPGCLGLDAMWQLVGFYLGWLGNPGRGRALGVSAVKFTGEVLKNVKMATYIIDMKRILIKGETTVGLANGVLLADDKKIYSADGLKVGLFK

SEQ ID NO: 180055 - protein, 166 aa, Unknown
  Bacterial polypetide isolated from the Sargasso Sea
MKKNSYSYDDLINCGNGDLFGPGNAKLPLPPMLMFDRITEINDNNGTFNKGSLKAELDIKDDLWFFDCHFKSDPVMPGCLGLDAMWQLVGFYLGWIGNPGKGRALGVGTVKFTGEVLKNVKLVTYKIDMKKIMSPGGTTVGLANGVVFADDKKIYSADSLKVGLFK

SEQ ID NO: 180056 - protein, 167 aa, Unknown
  Bacterial polypetide isolated from the Sargasso Sea
MNKKSSYNYKELISCGNGELFGPGNAKLPLPPMLMFDRITEISENTGTFKKGLIKAELDIKNDLWFFDCHFKEDSVMPGCLGLDAMWQLVGFFLGWLGNPGKGRALGVNAVKFTGEVLKNVKLASYEVDMKRVLIKEGTTVGLANAVLKADGKKIYSAENLKVGLFK

SEQ ID NO: 180057 - protein, 168 aa, Unknown
  Bacterial polypetide isolated from the Sargasso Sea
MEKKSSYKYEELIDCGNGKLFGPGNAKLPLPPMLMFDRISEIKENKGAFKKGLIKAELDIKENLWFFECHFKDDSVMPGCLGLDAMWQLVGFYLGWLGNPGKGRALGVNTVKFTGEVLKNVKLASYEIDMKRIFIKEGATVGLANGILKADGKQIYSAENLKVGLFKS

SEQ ID NO: 180058 - protein, 166 aa, Unknown
  Bacterial polypetide isolated from the Sargasso Sea
MKKNSYSYDDLITCGNGELFGPGNAKLPLPPMLMFDRITEINDNNGTFNKGSLKAELDIKDNLWFFDCHFKSDPVMPGCLGLDAMWQLVGFYLGWLGNPGKGRALGVGTVKFTGEVLKNIKLVTYKIDMKKIMSPGGTTVGLANGFVFADDKKIYSADSLKVGLFK

SEQ ID NO: 180059 - protein, 164 aa, Unknown
  Bacterial polypetide isolated from the Sargasso Sea
SFSYEKLIECGKGILFGEGNAQLPLPPMLMFDRIININESGGAFSKGEVIAELDIKSDLWFFDCHFKNDPVMPGCLGLDAMWQLVGFYLGWLGQPGKGRALGVGEVKFTGQVLNTVKKVSYHISLKKLILRKLILGVADGVLKADGESIYQAKDMKVGLFTPNK

SEQ ID NO: 180060 - protein, 166 aa, Unknown
  Bacterial polypetide isolated from the Sargasso Sea
MKKGSFNYDELISCANGELFGPGNAKLPSPPMLMFDRISEINDNKGFFNKGLIKAELDIKDDLWFFDCHFKEDPVMPGCLGLDAMWQLVGFYLGWLGNPGRGRALGVNSVKFTGEVLKNVKMATYIIDMKRILIKEGTTVGLANGILLADSKKIYSAENLKVGLFK

SEQ ID NO: 180061 - protein, 173 aa, Unknown
  Bacterial polypetide isolated from the Sargasso Sea
MSFIPKNSYNKEELLDCAQGNLFGQENGRLPSPNMLMFDRISTINTDGGKFSKGEIIAELDVNPDLWFFDCHFKGDPVMPGCLGLDAMWQLVGFYLCWLGNPGRGRALGASEVKFFGQVLPTAKLVTLKIDMKRILNLDLTVGIGEGSMLVDGREIYTAKGLKVGLFQDTSSF

SEQ ID NO: 180062 - protein, 166 aa, Unknown
  Bacterial polypetide isolated from the Sargasso Sea
MKKNSYSYDELINCGEGKLFGPGNAKLPLPPMLMFDRITEIYDDKGAFKKGSLKAELDIKENLWFFDCHFKEDPVMPGCLGLDAMWQLVGFYLGWIGNPGKGRALGVGTVKFTGEVLQDVKLVKYEIDMKKIMSPGGTTVGLANGVLLADDKKIYSADSLKVGLFK

SEQ ID NO: 180063 - protein, 167 aa, Unknown
  Bacterial polypetide isolated from the Sargasso Sea
MEKKSSYSYKELINCGNGELFGPGNAKLPLPPMLMFDRITEVKEDNGAFKKGSITAELDIKDNLWFFDCHFKEDPVMPGCLGLDAMWQLVGFYLGWLGNPGKGRALGVGTVKFTGEVLKSVKKAKYIIDMKKIISPGGTTVGLANGILLADEKKIYSAENLKVGLFK

SEQ ID NO: 180064 - protein, 148 aa, Unknown
  Bacterial polypetide isolated from the Sargasso Sea
LFGPGNAKLPLPPMLMFDRITEINENKGFFNKGQIKAELDIKDNLWFFDCHFKEDPVMPGCLGLDAMWQLVGFYLGWLGNPGRGRALGVNSVKFTGEVLKKVKNATYEIDMKRILIKEGTTVGLANGVLLADGKKIYSAESLKVGLFK

SEQ ID NO: 180065 - protein, 166 aa, Unknown
  Bacterial polypetide isolated from the Sargasso Sea
MQKNSFTYDELIACGKGELFGEGNAKLPLPPMLMFDRITKIDNKSGEFKKGIIEAELDIKDNLWFFDCHFQGDPVMPGCLGLDAMWQLVGFFLGWTGEPGKGRALGVNSVKFTGEVLKKVKMATYEINMKRILKKEGTTVGLANGILSADGKVIYRAENLKVGLFK

SEQ ID NO: 180066 - protein, 167 aa, Unknown
  Bacterial polypetide isolated from the Sargasso Sea
MNKKPSYNYQELIDCGNGKLFGPGNAKLPLPPMLMFDRISEISENKGAYKKGLIKAELDIKDNLWFFECHFKEDSVMPGCLGLDAMWQLVGFYLGWLGNPGKGRALGVNTVKFTGEVLKNVKMASYEVDMKRILIKEGATVGLANGILKADGRKIYSAENLKVGLFK

SEQ ID NO: 180067 - protein, 166 aa, Unknown
  Bacterial polypetide isolated from the Sargasso Sea
MKKNSYSYDELINCGEGKLFGPGNAKLPLPPMLMFDRITEITDDKGAFNKGSLKAELDIKKNLWFFGCHFKEDPVMPGCLGLDAMWQLVGFYLGWIGNPGKGRALGVGTVKFTGEVLQNVKNVRYEIDMKKIMSPGGTTVGLANGVVLADNKKIYSADSLKVGLFK

SEQ ID NO: 180068 - protein, 166 aa, Unknown
  Bacterial polypetide isolated from the Sargasso Sea
MKKNAYSYDDLITCGNGELFGPGNAKLPLPPMLMFDRITEINENNGTFNKGSLKAELDIKDDLWFFDCHFKKDPVMPGCLGLDAMWQLVGFFLGWLGNPGKGRALGVGNVKFTGEVLQSVKNVRYEIDMKKIMSPGGTTVGLANGIVLADNKKIYSAESLKVGLFK

SEQ ID NO: 180069 - protein, 175 aa, Unknown
  Bacterial polypetide isolated from the Sargasso Sea
MSKVFKPKDCYSKEDLVDCGFGQLFGEGNGRLPVDPMLMFDRITKINNAGGKYSKGEVYAELDVNPDLWFFDCHFKEDPVMPGCLGLDAMWQLLGFFLCWSQLPGIGRALGAEKVKFFGQVLPTAKKVNYVLDIKRVVNRGAVVGFSDADMFVDDKHVYSADNLKVGLFADPSKF

SEQ ID NO: 180070 - protein, 167 aa, Unknown
  Bacterial polypetide isolated from the Sargasso Sea
MEKNSYTYDELISCGEGKLFGEGNAKLPLPPMLMFDRITEIEKDKGEFKKGFIKAELDIKDNLWFFDCHFKKDPVMPGCLGLDAMWQLVGFYLGWIGEPGKGRALGVNNVKFTGEVLKNIKMATYEINMKRILKKEGTTVGLANGILSADGKIIYTAENLKVGLFKS

SEQ ID NO: 180071 - protein, 148 aa, Unknown
  Bacterial polypetide isolated from the Sargasso Sea
FGEGNAKLPLPPMLMFDRITNIKKDTGEFKKGFIKAELDIKDNLWFFDCHFQKDPVMPGCLGLDAMWQLVGFYLGWIGEPGKGRALGVNSVKFTGEVLKNINIATYEINMKRILKKEGTTVGLANGLLSADGKIIYRAENLKVGLFKT

SEQ ID NO: 180072 - protein, 147 aa, Unknown
  Bacterial polypetide isolated from the Sargasso Sea
LVPGNAKLPLPPMLMFDRITEINDNKGTFKKGLLKAELDIKNDLWFFDCHFKEDPVMPGCLGLDAMWQLVGFYLGWIGNPGKGRALGVGAVKFTGEVLQNVKLVTYEIEMKKIMSPGGTTVGLANGIVLADGKKIYSADSLKVGLFK

SEQ ID NO: 180073 - protein, 167 aa, Unknown
  Bacterial polypetide isolated from the Sargasso Sea
MKQKNSYSYQDLIDCGNGMLFGEGNAKLPLPPMLMFDRITKIENNTGSFKRGYLEAELDIKDDLWFFKCHFQKDPVMPGCLGLDAMWQLVGFYLGWTGEPGKGRALGVSTVKFTGEVLKKIKMATYKINIKRILKKEGAVVGLANGTLDADGKVIYVAENLKVGLFK

SEQ ID NO: 180074 - protein, 167 aa, Unknown
  Bacterial polypetide isolated from the Sargasso Sea
MEKKSSYSYEELINCGNGELFGPGNAKLPLPPMLMFDRIIEVKEDNGAFKKGSITAELDIKDDLWFFNCHFKEDPVMPGCLGLDAMWQLVGFYLGWLGNPGKGRALGVGTVKFTGEVLKSVKKAKYIIDMKKIMSPNGTTVGLANGVLLADEKKIYSAENLKVGLFK

SEQ ID NO: 180075 - protein, 163 aa, Unknown
  Bacterial polypetide isolated from the Sargasso Sea
SYSYQELINCGNGDLFGPGNAKLPLPPMLMFDRITEIKDNLGAFKKGLIKAELDIKKNLWFFDCHFKEDPVMPGCLGLDAMWQLVGFYLGWLGNPGKGRALGVGSVKFTGEVLKNVKIAEYIIDMKRVLIKEGTTVGLANGILLADGKEIYTTENLKVGLFKQ

SEQ ID NO: 180076 - protein, 142 aa, Unknown
  Bacterial polypetide isolated from the Sargasso Sea
MKENSFSYEKLIECGKGMLFGEGNAQLPLPPMLMFDRIININESGGTFSKGEVIAELDIKSDLWFFDCHFKNDPVMPGCLGLDAMWQLVGFYLGWLGQPGKGRALGVGEVKFTGQVLNTVKKSLLSYFFKKIDSKKINFRCC

SEQ ID NO: 180077 - protein, 173 aa, Unknown
  Bacterial polypetide isolated from the Sargasso Sea
MAFSPKNSYSKEELLDCADGNLFGEDNGKLPTPNMLMFDRITKISDSEGKYKKGKIIAELDVNPDLWFFDCHFKGDPVMPGCLGLDAMWQLVGFYLCWLGNPGRGRALGASEVKFFGQVLPTAKKVTLTIDMKRILNLDLTVGIGEGTMLVDDREIYTAKGLKVGLFQDTSSF

SEQ ID NO: 180078 - protein, 160 aa, Unknown
  Bacterial polypetide isolated from the Sargasso Sea
NYEELISCAEGKLFGEGNAKLPLPPMLMFDRITEINKEVGEFKKGFIKAELDIKENLWFFDCHFKKDPVMPGCLGLDAMWQLVGFYLGWIGEPGKGRALGVNSVKFTGEVLKNIKKATYEINMKRILKKEGTTVGLANGILSADDKIIYRAENLKVGLFK

SEQ ID NO: 180079 - protein, 166 aa, Unknown
  Bacterial polypetide isolated from the Sargasso Sea
MKKNSYSYDDLITCGNGDLFGPGNAKLPLPPMLMFDRITEINENNGAFNKGSLKAELDIKDDLWFFDCHFKKDPVMPGCLGLDAMWQLVGFFLGWLGNPGKGRALGVGTVKFTGEVLQGVKNVRYEIDMKKIMSPGGTTVGLANGIVLADNKKIYSAESLKVGLFK

SEQ ID NO: 180080 - protein, 167 aa, Unknown
  Bacterial polypetide isolated from the Sargasso Sea
MKKNSYSYDELINCGNGDLFGPGNAKLPLPPMLMFDRITDINDGNGAFNKGSLKAELDIKKDLWFFNCHFKEDPVMPGCLGLDAMWQLVGFYLGWIGNPGKGRALGVGTVKFTGEVLQNVKLVKYEIDMKKIMSPGGTTVGLANGILLADDKKIYSADNLKVGLFKS

SEQ ID NO: 180081 - protein, 167 aa, Unknown
  Bacterial polypetide isolated from the Sargasso Sea
MQKNSFNYDELIACANGELFGEGNAKLPLPPMLMFDRITEIKRDIGEFKKGFIKAELDIKNNLWFFDCHFKNDPVMPGCLGLDAMWQLVGFYLGWIGEPGKGRALGVNSVKFTGEVLKKAKKATYEINMKRILKKEGATVGLANGILSIDGKIIYNAENLKVGLFKS

SEQ ID NO: 180082 - protein, 166 aa, Unknown
  Bacterial polypetide isolated from the Sargasso Sea
MKKNSFNYDELIGCANGELFGPGNAKLPSPPMLMFDRITEINENKGAFGKGLMKAELDIKDDLWFFDCHFKEDPVMPGCLGLDAMWQLVGFYLGWLGNPGRGRALGVSTVKFTGEVLKNVKMATYIIDMKRILIKGETTVGLANGILLADDKKIYSADGLKVGLFK

SEQ ID NO: 180083 - protein, 166 aa, Unknown
  Bacterial polypetide isolated from the Sargasso Sea
MKKSSFDYDELINCANGELFGPGNAKLPSPPMLMFDRITEISEKNGAFDKGLMKAELDIKDDLWFFDCHFKEDPVMPGCLGLDAMWQLVGFYLGWLGNPGRGRALGVSTVKFTGEVLKNVKMATYIIDIKRILIKGETTVGLANGILLADDKKIYSADGLKVGLFK

SEQ ID NO: 180084 - protein, 166 aa, Unknown
  Bacterial polypetide isolated from the Sargasso Sea
MKKNSFNYDELIDCGNGGLFGPGNAKLPLPPMLMFDRITEINENKGAFKKGIIKAELDIKDELWFFNCHFKEDPVMPGCLGLDAMWQLVGFYLGWLGNPGRGRALGVNNVKFTGEVLKNVKKATYEIDMKRILIKEGTTVGLANGILHADGKKIYSAENLKVGLFK

SEQ ID NO: 180085 - protein, 169 aa, Unknown
  Bacterial polypetide isolated from the Sargasso Sea
MKQNSFSYEQLINCANGDLFGKGNAQLPSPPMLMFDRITNINETGGLFNKGEIVAELDIRPDLWFFDCHFKGDPVMPGCLGLDAMWQLVGFYLGWLEQPGKGRALGVGEVKFTGQVLDTIKKVTYHISLKRLILRKLILGVADGILKADGEPIYEAKDMKVGLFQSENK

SEQ ID NO: 180086 - protein, 140 aa, Unknown
  Bacterial polypetide isolated from the Sargasso Sea
PLPPMLMFDRITNIQNQKGKFNKGLVEAELDIKEKMWFFDCHFKNDPVMPGCLGLDAMWQLVGFFLGWIGEPGKGRALGVNTVKFTGEVLKSIKIARYEIHIKRILKKADAVVGLADGKLYSDNKAIYLAEGLKVGLFKK

SEQ ID NO: 180087 - protein, 166 aa, Unknown
  Bacterial polypetide isolated from the Sargasso Sea
MKKNSYSYDDLITCGNGDLFGPGNAKLPLPPMLMFDRITEINDNNGAYKKGSLKAELDIKDDLWFFDCHFKSDPVMPGCLGLDAMWQLVGFYLGWLGNPGKGRALGVGTVKFTGEVLQSVKNVRYEIDMKKIMSPGGTTVGLANGLVFADNKKIYSADSLKVGLFK

SEQ ID NO: 180088 - protein, 167 aa, Unknown
  Bacterial polypetide isolated from the Sargasso Sea
MEKKSAYNYDELIKCGNGELFGPGNAKLPLPPMLMFDRITEVAENKGAFKKGILKAELDIKNELWFFDCHFKEDPVMPGCLGLDAMWQLVGFFLGWLGNPGRGRALGVGAVKFTGEVLKNVKIATYEIDMKRILVKEGTTVGLANGILKADDKKIYSAENLKVGLFK

SEQ ID NO: 180089 - protein, 164 aa, Unknown
  Bacterial polypetide isolated from the Sargasso Sea
KNSYSYEELINCAEGKLFGPGNAKLPLPPMLMFDRIIEINENKGAFKKGSLKAELDIKKNLWFFDCHFKEDPVMPGCLGLDAMWQLVGFYLGWIGNPGKGRALGVGTVKFTGEVLQEVKLVRYEIDMKKIMSPGGTTVGLANGIVLADGKQIYSAESLKVGLFK

SEQ ID NO: 180090 - protein, 143 aa, Unknown
  Bacterial polypetide isolated from the Sargasso Sea
NAKLPLPPMLMFDRITEIRESKGEYKKGLIKAELDIKDSLWFFECHFKNDSVMPGCLGLDAMWQLVGFYLGWLGNPGKGRALGVNSVKFIGEVLKNIKLASYEIDIKRILIKEGTTVGLANGILKADGKEIYSAENLKVGLFK

SEQ ID NO: 180091 - protein, 166 aa, Unknown
  Bacterial polypetide isolated from the Sargasso Sea
MKKNSYSYDELINCGEGKLFGPGNAKLPLPPMLMFDRITEINDKKGTFNKGVLKAELDIKKDLWFFDCHFREDPVMPGCLGLDAMWQLVGFYLGWIGNPGKGRALGVGTVKFTGEVLQNVKLVRYEIDMKKIMSPGGTTVGLANGVVLADEKKIYSADNLKVGLFK

SEQ ID NO: 180092 - protein, 166 aa, Unknown
  Bacterial polypetide isolated from the Sargasso Sea
MKKGSFNYNELISCSNGELFGPGNAKLPSPPMLMFDRITEINENKGFFNKGLIKAELDIKDNLWFFDCHFKEDPVMPGCLGLDAMWQLVGFYLGWLGNPGRGRALGVNSVKFTGEVLKNVKIAYYEINMKRILIKEGTTVGLANGLLLADDKKIYTAENLKVGLFK

SEQ ID NO: 180093 - protein, 167 aa, Unknown
  Bacterial polypetide isolated from the Sargasso Sea
MQKNSFNYEELIACGKGDLFGEGNAKLPLPPMLMFDRITKIKKDVGEFKKGFIKAELDIKENLWFFDCHFQNDPVMPGCLGLDAMWQLVGFYLGWVGEPGKGRALGVNSVKFTGEVLKKVKMATYEINMKRILKKEGAVVGLANGILSADGKIIYKAENLKVGLFKQ

SEQ ID NO: 180094 - protein, 167 aa, Unknown
  Bacterial polypetide isolated from the Sargasso Sea
MEKKSSYSYEELINCGNGGLFGPGNAKLPLPPMLMFDRIIEVKEDNGAFKKGSITAELDIKEDLWFFNCHFKEDPVMPGCLGLDAMWQLVGFYLGWLGNPGKGRALGVGTVKFTGEVLKSVKKAKYIIDMKKIMSPNGTTVGLANGVLLADEKKIYSAENLKVGLFK

SEQ ID NO: 180095 - protein, 167 aa, Unknown
  Bacterial polypetide isolated from the Sargasso Sea
MQKNSYNYDELISCGEGKLFGEGNAKLPLPPMLMFDRITEIKKDTGEFKKGFIKAELDIKDNLWFFDCHFKRDPVMPGCLGLDAMWQLVGFYLGWIGEPGKGRALGVNSVKFTGEVLKNIKMATYEINMKRILKKEGTAVGLANGILSADGKIIYTAENLKVGLFKS

SEQ ID NO: 180096 - protein, 166 aa, Unknown
  Bacterial polypetide isolated from the Sargasso Sea
MKKNSYSYDDLITCGNGELFGPGNAKLPLPPMLMFDRITEINDNNGTYNKGSLKAELDIKEDLWFFDCHFKSDPVMPGCLGLDAMWQLVGFYLGWLGNPGKGRALGVGAVKFTGEVLQDVKNVRYEIDMKKIMSPGGTTVGLANGVVFADNKKIYSADSLKVGLFK

SEQ ID NO: 180097 - protein, 166 aa, Unknown
  Bacterial polypetide isolated from the Sargasso Sea
MKKSSFNYDELISCANGELFGPGNAKLPSPPMLMFDRITEISEKNGAFDKGIMKAELDIKDDLWFFNCHFKEDPVMPGCLGLDAMWQLVGFYLGWLGNPGRGRALGVSTVKFTGEVLKNVKMATYIIDMKRILIKGETTVGLANGILLADGKKIYSADSLKVGLFK

SEQ ID NO: 180098 - protein, 140 aa, Unknown
  Bacterial polypetide isolated from the Sargasso Sea
MEKANSFTKEQLIACGNGNLLGPNRPKLPVDNMLMIDRIITINEDGGEFGKGEIVAELDITPDLWFFDCHFKTDPVMPGCLGLDAMWQLVGFYLGWEGAEGKGRALGVGEVKFTGQVLPDAKKVTYKLNIKRKIHRKLVM

SEQ ID NO: 180099 - protein, 166 aa, Unknown
  Bacterial polypetide isolated from the Sargasso Sea
MKKNSYTYDELINCGEGGLFGPGNAKLPLPPMLMFDRITEISENGGAYKKGIIKAELNVKDDLWFFNCHFKEDPVMPGCLGLDAMWQLVGFYLGWLGKPGKGRALGVNAVKFTGEVLKSVKMATYEIDMKRILIKEGTTVGLADGILSADGKKIYSAENLKVGLFK

SEQ ID NO: 180100 - protein, 168 aa, Unknown
  Bacterial polypetide isolated from the Sargasso Sea
MKKNSFNYDQLIDCAKGILFGKGNAQLPLPPMLMFDRITNINKDGGEFSKGEIEAELDIKSDLWFFNCHFKDDPVMPGCLGLDAMWQLVGFYLGWLGQPGKGRALGVGEVKFTGQVLQTVKKVTYHISLKRLILRKLILGVADGVMKADGKQIYEVKDMKVGLFTPSE

SEQ ID NO: 180101 - protein, 166 aa, Unknown
  Bacterial polypetide isolated from the Sargasso Sea
MKKNSYCYDDLITCGNGDLFGPGNAKLPLPPMLMFDRITEINENNGKFNKGSLKAELDIKDDLWFFDCHFKKDPVMPGCLGLDAMWQLVGFFLGWLGNPGKGRALGVGTVKFTGEVLRSVKNVRYEIDMKKIMSPGGTTVGLANGTVLADNKKIYSAESLKVGLFK

SEQ ID NO: 180102 - protein, 166 aa, Unknown
  Bacterial polypetide isolated from the Sargasso Sea
MKKNSYSYDELINCGEGKLFGPGNAKLPLPPMLMFDRITEINDDKGAFKKGLLKAELDIKNDLWFFDCHFKEDPVMPGCLGLDAMWQLVGFYLGWIGNPGKGRALGVGTVKFTGEVLQNVRLVTYEIDMKKIMSPGGTTVGLANGVVLADGKKIYSADNLKVGLFK

SEQ ID NO: 180103 - protein, 166 aa, Unknown
  Bacterial polypetide isolated from the Sargasso Sea
MKKNSYSYKELIDCGNGQLFGPGNAKLPLPPMLMFDRITEINDDNGAFNKGSIKAELDIKQDLWFFNCHFKEDPVMPGCLGLDAMWQLVGFYLGWVGNPGKGRALGVGTVKFTGEVLKKVKLVRYEIDMKKIMSPGGTTVGLANGVVLADDKKIYSAESLKVGLFK

SEQ ID NO: 180104 - protein, 167 aa, Unknown
  Bacterial polypetide isolated from the Sargasso Sea
MEKKSSYSYEELINCGNGKLFGPGNAKLPLPPMLMFDRITEVKEHNGAFKKGSICAELDIKSNLWFFDCHFKEDPVMPGCLGLDAMWQLVGFYLGWLGNPGKGRALGVGTVKFTGEVLKSAKKAKYVIDMKKIISPGGTTVGLANGILLADEKKIYSAENLKVGLFK

SEQ ID NO: 180105 - protein, 168 aa, Unknown
  Bacterial polypetide isolated from the Sargasso Sea
MKQNSFSYDKLIDCGKGILFGKGNAQLPLPPMLMFDRIININEDGGFFSKGEVKAELDIKPDLWFFDCHFKDDPVMPGCLGLDAMWQLLGFYLGWLGQPGKGRALGVGEVKFTGQVLKTVKKVTYHISIKRLILRKLILGVADGVLEADGKSIYEVKDMKVGLFTDSE

SEQ ID NO: 180106 - protein, 115 aa, Unknown
  Bacterial polypetide isolated from the Sargasso Sea
SLNITSDLWFFDCHFIGDPVMPGCLGLDAMWQLVGFYLGWSQYPGKGRALGVGEVKFTGQILPTAKKVTYKIHIKRLITRKLIMGIGDGIVSVDGREIYIAKDLRVGLFTSTEGF

SEQ ID NO: 180107 - protein, 168 aa, Unknown
  Bacterial polypetide isolated from the Sargasso Sea
MDKKSSYTYEELIDCGNGKLFGSKNAKLPLPPMLMFDRISEISENKGTFKKGLIKAELDIKDNLWFFECHFKDDSVMPGCLGLDAMWQLVGFYLGWLGNPGKGRALGVNTVKFTGEVLKNVKLASYEIDMKRILIKEGTTVGLANGILKADGKKIYSAENLKVGLFNQ

SEQ ID NO: 180108 - protein, 112 aa, Unknown
  Bacterial polypetide isolated from the Sargasso Sea
CNPDLWFFDCHFKEDPVMPGCLGLDAMWQLLGFFLCWSELPGIGRALGAEKVKFFGQVLPTAKKVNYVLDIKRVVNRGAVVGFSDADMFVDDKHVYSADNLKVGLFADPSKF

SEQ ID NO: 180109 - protein, 166 aa, Unknown
  Bacterial polypetide isolated from the Sargasso Sea
MKKGSFNYDELISCAKGELFGPGNAKLPSPPMLMFDRISEIDENKGFFNKGIIKAELDIKDDLWFFDCHFKEDPVMPGCLGLDAMWQLVGFYLGWLGNPGRGRALGVNSVKFTGEVLKNVKMATYIIDMKRILIKEGTTVGLANGVLLADGKKIYAAENLKVGLFK

SEQ ID NO: 180110 - protein, 168 aa, Unknown
  Bacterial polypetide isolated from the Sargasso Sea
MDKKSSYNYEELINCGNGKLFGSGNAKLPLPPMLMFDRISEISENKGAFKKGLIKAELDIKDNLWFFECHFKDDSVMPGCLGLDAMWQLVGFYLGWLGNPGKGRALGVNTVKFTGEVLKNVKLASYEIDMKRILIKEGTTVGLANGILKADGKKIYSAENLKVGLFKQ

SEQ ID NO: 180111 - protein, 167 aa, Unknown
  Bacterial polypetide isolated from the Sargasso Sea
MIKKNSFKYEDLIECANGKLFGPGNAKLPSPPMLMFDRITNIQIDKGRYNKGLINAELDIKEKMWFFDCHFKEDPVMPGCLGLDAMWQLVGFYLGWIGEPGKGRALGVNSVKFTGEVLKNVKIASYQIDMKRILKKKGTVVGLADGTLLADNKPIYEAENLKVGLFK

SEQ ID NO: 180112 - protein, 166 aa, Unknown
  Bacterial polypetide isolated from the Sargasso Sea
MKKNSYSYDELINCGNGQLFGSGNAKLPLPPMLMFDRITEINDKNGAFKKGSLKAELDIKQDLWFFDCHFKEDPVMPGCLGLDAMWQLVGFYLGWLGNPGKGRALGVGTVKFTGEVLKSVKNVRYEIDMKKIMSPGGTTVGLANGVVFADSKKIYSADSLKVGLFK

SEQ ID NO: 180113 - protein, 167 aa, Unknown
  Bacterial polypetide isolated from the Sargasso Sea
MEKKSSYSYDELIKCGNGELFGPGNAKLPLPPMLMFDRITEIRENEGSFKKGVLKAELDIKDDLWFFDCHFKEDPVMPGCLGLDAMWQLVGFYLGWLGNPGRGRALGVSSVKFTGEVLKNIKTATYEIDMKRILVKEGTTVGLANGILKADNKKIYTAENLKVGLFK

SEQ ID NO: 180114 - protein, 166 aa, Unknown
  Bacterial polypetide isolated from the Sargasso Sea
MKKNSYSYDELINCGEGKLFGPGNAKLPLPPMLMFDRITEINDDQGAFKKGSLKAELEIKKNLWFFDCHFKEDPVMPGCLGLDAMWQLVGFYLGWIGNPGKGRALGVGTVKFTGEVLQDVRLVKYEIDMKKIMSPGGTTVGLANGVVLADEKKIYSADNLKVGLFK

SEQ ID NO: 180115 - protein, 167 aa, Unknown
  Bacterial polypetide isolated from the Sargasso Sea
MEKKSSYSYQELISCGNGELFGPGNAKLPLPPMLMFDRITEVKEDNGAFKKGSITAELDIKDDLWFFDCHFKKDPVMPGCLGLDAMWQLVGFYLGWLGNPGKGRALGVGTVKFTGEVLKSVKKAKYIIDMKKILSPSGTTVGLANGVLLADEKKIYSAENLKVGLFK

SEQ ID NO: 180116 - protein, 167 aa, Unknown
  Bacterial polypetide isolated from the Sargasso Sea
MQKKTSYSYQELISCGNGELFGPGNAKLPLPPMLMFDRITEIRENSGIYKKGSVKAELDIKKSLWFFDCHFKEDPVMPGCLGLDAMWQLVGFYLGWLGNPGRGRALGVNAVKFTGEVLQNVKKASYEIDMKKILAKEGTTVGLANGVLLADGKKIYSAENLKVGLFK

SEQ ID NO: 180117 - protein, 124 aa, Unknown
  Bacterial polypetide isolated from the Sargasso Sea
MKSNSFSYEQLIDCAKGLLFGKGNAQLPLPPMLMFDRIIEINKQGGEFLKGEIVAELDIKPNLWFFECHFKNDPVMPGCLGLDAMWQLVGFYLGWLGEKGRGRALGVGEVKFTGQVLDSVKKVT

SEQ ID NO: 180118 - protein, 166 aa, Unknown
  Bacterial polypetide isolated from the Sargasso Sea
MKKSSFNYDELLDCANGKLFGPGNAKLPSPPMLMFDRITEITENQGIYKKGSMKAELDIKDNLWFFDCHFREDPVMPGCLGLDAMWQLVGFFLGWLGNPGRGRALGVSTVKFTGEVLKNVKMATYEIDMKRILVKGETTVGLANGILLADGKKIYSAENLKVGLFK

SEQ ID NO: 180119 - protein, 173 aa, Unknown
  Bacterial polypetide isolated from the Sargasso Sea
MSFSPKNSYNKEEILDCAQGNLFGEENGRLPTPNMLMFDRITEINVDGGKFSKGQIIAELDINPDLWFFDCHFKGDPVMPGCLGLDAMWQLVGFYLCWMDNPGKGRALGASEVKFFGQVLPSAKLVTLKIDMKRILNLDLTVGIGEGSMLVDGREIYSAKGLKVGLFQDTSSF

SEQ ID NO: 180120 - protein, 166 aa, Unknown
  Bacterial polypetide isolated from the Sargasso Sea
MKKNSYSYDDLITCGNGDLFGPGNAKLPLPPMLMFDRITEINENNGTFNKGSLKAELDIKDDLWFFDCHFKKDPVMPGCLGLDAMWQLVGFFLGWLGNPGKGRALGVGNVKFTGEVLQNVKNVRYEIDMKKIMSPGGTTVGLANGIVLADNKKIYSAESLKVGLFK

SEQ ID NO: 180121 - protein, 173 aa, Unknown
  Bacterial polypetide isolated from the Sargasso Sea
MSFSPKNSYSKEELLDCANGNLFGEDNGRLPTPNMLMFDRITKISDSEGKYKKGKIIAELDVNPDLWFFDCHFKGDPVMPGCLGLDAMWQLVGFYLCWLGNPGRGRALGASEVKFFGQVLPTAKKVTLTIDMKRILNLDLTVGIGEGSMLVDDREIYTAKGLKVGLFQDTSSF

SEQ ID NO: 180122 - protein, 166 aa, Unknown
  Bacterial polypetide isolated from the Sargasso Sea
MKKGSFNYKELISCANGELFGPGNAKLPSPPMLMFDRITEIDENKGFFNKGLIKAELDIKDNLWFFDCHFREDPVMPGCLGLDAMWQLVGFYLGWLGNPGRGRALGVNSVKFTGEVLKNVKMATYVIDMKRILIKEGTTVGLANGILLADGNKIYSAENLKVGLFK

SEQ ID NO: 180123 - protein, 177 aa, Unknown
  Bacterial polypetide isolated from the Sargasso Sea
MTEPAPFSPQSQYDKAELMACGLGELFGPGNAQLPVDNMLMVDRISHISSEGGSADKGELIAELDIHPDLWFFGCHFPGDPVMPGCLGLDAMWQLVGFFLGWRGNPGRGRALGCGEVKFTGQILPSHKQVQYHIHMKRVIERKLVMGIADGSVSVDGETIYTASDLRVGLFQNTEAM

SEQ ID NO: 180124 - protein, 166 aa, Unknown
  Bacterial polypetide isolated from the Sargasso Sea
MKKNSFTYEELISCGNGELFGPGNAKLPLPPMLMFDRITEINDNSGAFKKGLIKAELDIKEDLWFFKCHFKEDPVMPGCLGLDAMWQLVGFYLGWLGNPGKGRALGVGAVKFTGEVLKNIKKATYIIDMKKIMSPGETSVGLANGLLLADDKEIYSAENLKVGLFK

SEQ ID NO: 180125 - protein, 169 aa, Unknown
  Bacterial polypetide isolated from the Sargasso Sea
MIKKNSFKYEELIACADGKLFGPGNAKLPSPPMLMFDRIINIQDNKGVFNKGLIEAELDIRKKMWFFDCHFKEDPVMPGCLGLDAMWQLVGFFLGWKGEPGKGRALGVNSVKFTGEVLTNSKVARYKVDMKRILKKEGAVVGLADGILYSDDKAIYEAENLKVGLFKNE

SEQ ID NO: 180126 - protein, 153 aa, Unknown
  Bacterial polypetide isolated from the Sargasso Sea
WRGKIVCEGNAKLPLPPMLMFDRITEIKKDTGEFKKGFIKAELDIKDNLWFFDCHFKKDPVMPGCLGLDAMWQLVGFFLGWIGEPGKGRALGVNSVKFTGEVLKNIKMATYEINMKRILKKEGTAVGLANGILSADGKIIYTAENLKVGLFKS

SEQ ID NO: 180127 - protein, 167 aa, Unknown
  Bacterial polypetide isolated from the Sargasso Sea
MEKKSSYSYEDLINCGNGGLFGPGNAKLPLPPMLMFDRIIEVKDDNGAFKKGSITAELDIKDDLWFFNCHFKEDPVMPGCLGLDAMWQLVGFYLGWLGNPGKGRALGVGTVKFTGEVLKSVKKTKYIIDMKKIMSPNGTTVGLANGVLLADEKKIYTAENLKVGLFK

SEQ ID NO: 180128 - protein, 140 aa, Unknown
  Bacterial polypetide isolated from the Sargasso Sea
MTKNSFTKQDLVACGRGELFGEGNSQLPVDNMLMIDRVVHISEEGGKYGKGEIIAEFDINPELWFFDCHFKGDPVMPGCLGLDAMWQLVGFFLGWAGGPGKGRALGVGEVKFTGQILPTAKKVTYRIDMTRVIKRKLFMG

SEQ ID NO: 180129 - protein, 148 aa, Unknown
  Bacterial polypetide isolated from the Sargasso Sea
MKENSFNYEKLIECGKGILFGEGNAQLPLPPMLMFDRIININESGGAFSKGEVIAELDIKSDLWFFDCHFKNDPVMPGCLGLDAMWQLVGFYLGWLGQPGKGRALGVGEVKFTGQVLNTVKKVSYHISLKKLILRKLILGVAERCFKS

SEQ ID NO: 180130 - protein, 169 aa, Unknown
  Bacterial polypetide isolated from the Sargasso Sea
MPGFPLSFSREDLLKCARGELFGPGNAQLPEPPMLMMDRITDISSDKGEHGKGHVIAEFDIVPDLWFFDCHFPGNPIMPGCLGLDGLWQLTGFNLGWRGWRGRGYALGVGEVKLTGMVRPDRKLLKYTVNFTKALQTRRLTMGVADGTVEADGELIYQVKDMKVALSSN

SEQ ID NO: 180131 - protein, 166 aa, Unknown
  Bacterial polypetide isolated from the Sargasso Sea
MKKNSYSYEDLISCGNGALFGPGNAKLPLPPMLMFDRITQISDKDGAFKKGSLKAELDINKDLWFFDCHFKKDPVMPGCLGLDAMWQLVGFYLGWIGNPGKGRALGVGTVKFTGEVLQNVKLVKYEIDMKKIMSPGGTTVGLANGILLADEKKIYSADNLKVGLFK

SEQ ID NO: 180132 - protein, 167 aa, Unknown
  Bacterial polypetide isolated from the Sargasso Sea
MQKNSYNYNELIDCGKGKLFGKGNAKLPLPPMLMFDRITEINQNAGEFKKGLIKAELDVKDNLWFFDCHFQDDPVMPGCLGLDAMWQLVGFFLGWIGEPGKGRALGVGSVKFTGEVIKKIKMASYEVNIKRVLKKEGTAVGLANGVLNADGKTIYTAENLKVGLFKS

SEQ ID NO: 180133 - protein, 167 aa, Unknown
  Bacterial polypetide isolated from the Sargasso Sea
MIKKSSYSYKELIDCGNGKLFGPGNAKLPLPPMLMFDRISEIKENEGAFKKGLIKAELDIKDSLWFFECHFKDDSVMPGCLGLDAMWQLVGFYLGWLGNPGKGRALGVNSVKFTGEVLKNVKLASYEIDMKRILIKEGTTVGLANGILKADGKDIYSAENLKVGLFK

SEQ ID NO: 180134 - protein, 167 aa, Unknown
  Bacterial polypetide isolated from the Sargasso Sea
MEKKSSYSYEELINCGNGELFGPGNAKLPLPPMLMFDRITKIKENNGAFKKGNICAELDIKDDLWFFNCHFKEDPVMPGCLGLDAMWQLVGFYLGWLGHPGKGRALGVGTVKFTGEVLKSVKKAKYIIDMKKIISPGGTTVGLANGVLFADEKKIYSAENLKVGLFK

SEQ ID NO: 180135 - protein, 166 aa, Unknown
  Bacterial polypetide isolated from the Sargasso Sea
MKKSSFNYDELIDCANGKLFGPGNAKLPSPPMLMFDRITEITESEGFYKKGSMKAELDIKDNLWFFDCHFREDPVMPGCLGLDAMWQLVGFFLGWLGKPGRGRALGVSTVKFTGEVLKNVKMATYEIDMKRILVKGETTVGLANGILLADGKKIYSAENLKVGLFK

SEQ ID NO: 180136 - protein, 173 aa, Unknown
  Bacterial polypetide isolated from the Sargasso Sea
MCEQGKDSFTREELLACSRGELFGEGNSQLPAPNMLMMDRIVKINDNGGEHGKGEILAELDITPDLWFFDCHFPGDPVMPGCLGLDAMWQLVGFFLGWKGGPGKGRALGVGEVKFTGQILPTAKKVTYKITFKRVINRKLVMGIADGVVEVDGRPIYSATDLKVGLFKDTTAF

SEQ ID NO: 180137 - protein, 175 aa, Unknown
  Bacterial polypetide isolated from the Sargasso Sea
MNKVFKPKNSYSKADLVDCGFGQLFGEGNGRLPIDPMLMFDRITKINDTGGKYSKGEVYAELDVNPDLWFFDCHFKEDPVMPGCLGLDAMWQLLGFFLCWSELPGIGRALGAEKVKFFGQVLPTAKKVNYVLDIKRVVNRGAVVGFSDADMFVDDKHVYSADNLKVGLFADPSKF

SEQ ID NO: 180138 - protein, 166 aa, Unknown
  Bacterial polypetide isolated from the Sargasso Sea
MKKNSYSFDELINCGNGGLFGAGNAKLPLPPMLMFDRITEINDNNGAFKKGSLKAELDIKKDMWFFDCHFKEDPVMPGCLGLDAMWQLVGFYLGWIGNPGKGRALGVGTVKFTGEVLQDVKLVKYEIDMKKIMSPGGTTVGLANGVVSADGKKIYSAESLKVGLFK

SEQ ID NO: 180139 - protein, 166 aa, Unknown
  Bacterial polypetide isolated from the Sargasso Sea
MKKNSYSYDELINCGEGKLFGPGNAKLPLPPMLMFDRITEINDDKGAFKKGLLKAELDIKNDLWFFDCHFKEDPVMPGCLGLDAMWQLVGFFLGWKGNPGKGRALGVGTVKFTGEVLKNVKNVRYEIDMKKIMSPGGTTVGLANGVLLADEKKIYSADNLKVGLFK

SEQ ID NO: 180140 - protein, 167 aa, Unknown
  Bacterial polypetide isolated from the Sargasso Sea
MQKNNYNYDDLISCGEGKLFGEGNAKLPLPPMLMFDRITEINQNSGEFKKGFIKAELDIKDNLWFFDCHFQKDPVMPGCLGLDAMWQLVGFYLGWLGEPGKGRALGVNSVKFTGEVLKNVKMATYEINMKRILKKEGTTVGLANGVLSADGKIIYRAENLKVGLFKS

SEQ ID NO: 180141 - protein, 166 aa, Unknown
  Bacterial polypetide isolated from the Sargasso Sea
MKKNSYSYDELINCGEGKLFGPGNAKLPLPPMLMFDRITEITDDKGAFNKGSLKAELDIKKNLWFFDCHFKEDPVMPGCLGLDAMWQLVGFYLGWIGNPGKGRALGVGTVKFTGEVLQSVKNVRYEIDMKKIMSPGGTTVGLANGVVLADNKKIYSADSLKVGLFK

SEQ ID NO: 180142 - protein, 167 aa, Unknown
  Bacterial polypetide isolated from the Sargasso Sea
MQKNSYNYEELISCGEGKLFGEGNAKLPLPPMLMFDRITEIKKDVGEFKKGIIKAELDIKDNLWFFNCHFQNDPVMPGCLGLDAMWQLVGFYLGWIGEPGKGRALGVNTVKFTGEVLKNVKKATYEINMKRILKKEGAVVGLANGILNADGKTIYTAENLKVGLFKS

SEQ ID NO: 180143 - protein, 166 aa, Unknown
  Bacterial polypetide isolated from the Sargasso Sea
MKKNSFNYDELINCGKGDLFGPGNAKLPLPPMLMFDRITEISEDKGAFKKGLIKAELDIKDELWFFDCHFQGDPVMPGCLGLDAMWQLVGFYLGWLGNPGRGRALGVNSVKFTGEVLKNVKKAIYEIDMKRILVKEGTTVGLANGILLADGKKIYSAENLKVGLFK

SEQ ID NO: 180144 - protein, 166 aa, Unknown
  Bacterial polypetide isolated from the Sargasso Sea
YEKNSYSYDDLITCGNGELFGPGNAKLPLPPMLMFDRITEINDNTGTFNKGSLKAELDIKDNLWFFDCHFKSDPVMPGCLGLDAMWQLVGFYLGWLGNPGKGRALGVGTVKFTGEVLKNVKLVTYKIDMKKIMSPGGTTVGLANGFVFADDKKIYSADSLKVGLFK

SEQ ID NO: 180145 - protein, 168 aa, Unknown
  Bacterial polypetide isolated from the Sargasso Sea
MKESSFSYEKLIECGKGLLFGEGNAQLPLPPMLMFDRIININETGGMFSKGEVIAELDIKSDLWFFDCHFKNDPVMPGCLGLDAMWQLVGFYLGWLGQPGKGRALGVGEVKFTGQVLNTVKKVSYHISLKKLILRKLILGVADGVLKADGESIYQAKDMKVGLFTPNK

SEQ ID NO: 180146 - protein, 167 aa, Unknown
  Bacterial polypetide isolated from the Sargasso Sea
MEKKSSYTYKELISCGNGELFGPGNAKLPLPPMLMFDRITEINENNGIYNKGFLKAELDIKNELWFFDCHFKEDPVMPGCLGLDAMWQLVGFYLGWLGNPGRGRALGVNAVKFTGEVLKNIKMATYEIDIKKILTKEGATVGLANGVLLADGKKIYSAENLKVGLFK

SEQ ID NO: 180147 - protein, 166 aa, Unknown
  Bacterial polypetide isolated from the Sargasso Sea
MKKNSFDYEELIHCANGELFGPGNAKLPSPPMLMFDRITEISENTGEFKKGIIKAELDIKDELWFFDCHFKEDPVMPGCLGLDAMWQLVGFYLGWLGNPGRGRALGVNSVKFTGEVLKKCKTAFYQIDMKRILVKEGTTVGLANGILLADGKKIYSAENLKVGLFK

SEQ ID NO: 180148 - protein, 123 aa, Unknown
  Bacterial polypetide isolated from the Sargasso Sea
FIKKGEIVAELDIRPDLWFFECHFKKDPVMPGCLGLDAMWQLVGFYLGWLEQPGKGRALGVGEVKFTGQVLDTIKKVTYHISLKRLILRKLILGVADGILKADGEPIYEAKDMKVGLFQSDNK

SEQ ID NO: 180149 - protein, 152 aa, Unknown
  Bacterial polypetide isolated from the Sargasso Sea
ANGELFGPGNAKLPSPPMLMFDRITEISEKKGAFDKGLMKAELDIKDDLWFFDCHFKEDPVMPGCLGLDAMWQLVGFYLGWLGNPGRGRALGVSTVKFTGEVLKNVKMATYIIDMKRILIKGETTVGLANGILLADGKKIYSADSLKVGLFK

SEQ ID NO: 180150 - protein, 166 aa, Unknown
  Bacterial polypetide isolated from the Sargasso Sea
MKKNSFNYDELIDCANGELFGPGNAKLPSPPMLMFDRITEIDENKGAFGKGLMKAELDIKDDLWFFDCHFKEDPVMPGCLGLDAMWQLVGFYLGWLGNPGRGRALGVSTVKFTGEVLKNVKMATYIIDMKRILIKGETTVGLANGILLADDKKIYSADGLKVGLFK

SEQ ID NO: 180151 - protein, 167 aa, Unknown
  Bacterial polypetide isolated from the Sargasso Sea
MNKKSSYNYEDLINCGNGGLFGPGNAKLPLPPMLMFDRITNIEEDGGTFKKGIIEAELDIKDNLWFFDCHFKNDAVMPGCLGLDAMWQLVGFYLGWLGNPGKGRALGVNTVKFTGEVLKDVKVAKYEVDMKRVLIKEGTTVGLANGILKADGKKIYSAENLKVGLFK

SEQ ID NO: 180152 - protein, 166 aa, Unknown
  Bacterial polypetide isolated from the Sargasso Sea
MKKNSYSYDDLITCGNGDLFGPGNAKLPLPPMLMFDRITEINENNGAFNKGSLKAELDIKDDLWFFDCHFKKDPVMPGCLGLDAMWQLVGFFLGWLGNPGKGRALGVGTVKFTGEVLQSVKNVRYEIDMKKIMSPGGTTVGLANGIVLADNKKIYSAESLKVGLFK

SEQ ID NO: 180153 - protein, 166 aa, Unknown
  Bacterial polypetide isolated from the Sargasso Sea
MKKSSFDYDELISCANGELFGPGNAKLPSPPMLMFDRITEISEKNGAFNKGLMKAELDIKDDLWFFDCHFKEDPVMPGCLGLDAMWQLVGFYLGWLGNPGRGRALGVSTVKFTGEVLKNVKMATYIIDMKRILIKGETTVGLANGILLADGKKIYSADSLKVGLFK

SEQ ID NO: 180154 - protein, 166 aa, Unknown
  Bacterial polypetide isolated from the Sargasso Sea
MKKSSFDYDDLISCANGELFGPGNAKLPSPPMLMFDRITEISEKNGAFDKGLMKAELDIKDNLWFFDCHFKEDPVMPGCLGLDAMWQLVGFYLGWLGNPGRGRALGVSTVKFTGEVLKDVKMATYIIDMKRILIKGETTVGLANGVLLADGKKIYSADSLKVGLFK

SEQ ID NO: 180155 - protein, 166 aa, Unknown
  Bacterial polypetide isolated from the Sargasso Sea
MKKSSFNYNELIDCANGGLFGPGNAKLPLPPMLMFDRITEINENKGFFNKGQIKAELDIKDNLWFFDCHFKEDPVMPGCLGLDAMWQLVGFYLGWLGNPGRGRALGVNSVKFTGEVLKKVKNATYEIDMKRILIKEGTTVGLANGVLLADGKKIYSAESLKVGLFK

SEQ ID NO: 180156 - protein, 166 aa, Unknown
  Bacterial polypetide isolated from the Sargasso Sea
MKKNSYTYEDLISCANGDLFGPGNAKLPLPPMLMFDRITEISENKGTFSKGLIIAELDIKDNLWFFDCHFKKDPVMPGCLGLDAMWQLVGFYLGWLGNPGRGRALGVNTVKFTGEVLKNVKKAIYEINMKKILKKEGATVGLANGILLADGKQIYTTENLKVGLFK

SEQ ID NO: 180157 - protein, 167 aa, Unknown
  Bacterial polypetide isolated from the Sargasso Sea
MEKKSAYNYDELIKCGNGELFGPGNAKLPLPPMLMFDRITEIAENKGAFKKGILKAELDIKNELWFFDCHFKEDPVMPGCLGLDAMWQLVGFFLGWLGNPGRGRALGVGAVKFTGEVLKNVKIATYEIDMKRILVKEGTTVGLANGILKADDKKIYSAENLKVGLFK

SEQ ID NO: 180158 - protein, 166 aa, Unknown
  Bacterial polypetide isolated from the Sargasso Sea
MKKNSYSYDELINCGEGKLFGPGNAKLPLPPMLMFDRITEINDDKGAFNKGSLKAELDIKNNLWFFDCHFKKDPVMPGCLGLDAMWQLVGFFLGWQGNPGKGRALGVGNVKFTGEVLKTVKNVRYEIDMKKIMSPGGTTVGLANGILLADEKKIYSADNLKVGLFK

SEQ ID NO: 180159 - protein, 164 aa, Unknown
  Bacterial polypetide isolated from the Sargasso Sea
KNSYSYDELINCGEGKLFGPGNAKLPLPPMLMFDRITEITDDKGAFKKGSLKAELDIKKNLWFFDCHFKEDPVMPGCLGLDAMWQLVGFYLGWIGNPGKGRALGVGTVKFTGEVLQSVKNVRYEIDMKKIMSPGGTTVGLANGVVLADNKKIYSADSLKVGLFK

SEQ ID NO: 180160 - protein, 167 aa, Unknown
  Bacterial polypetide isolated from the Sargasso Sea
MEKKSSYTYEELISCGNGELFGPGNAKLPLPPMLMFDRITEINENSGIFKKGSMKAELDIKDELWFFDCHFKEDPVMPGCLGLDAMWQLVGFYLGWLGNPGRGRALGVNSVKFTGEVLKNVKMATYKIDIKKILTKEGTTVGLANGILLADGKKIYNAENLKVGLFK

SEQ ID NO: 180161 - protein, 171 aa, Unknown
  Bacterial polypetide isolated from the Sargasso Sea
MNKANSFNKEELIACGHGKLFGPNSPRLPVDNMLMIDRIITINDNGGEFGKGEIVAELDIKPELWFFDCHFITDPVMPGCLGLDAMWQLVGFYLGWEGAEGKGRALGVGEVKFTGQVLPGAKKVTYKLNIKRTIHRKLVMGIADAILEVDGRQIYSATDLKVGVFSDTSTF

SEQ ID NO: 180162 - protein, 96 aa, Unknown
  Bacterial polypetide isolated from the Sargasso Sea
VMPGCLGLDAMWQLLGFFLCWSELPGIGRALGAEKVKFFGQVLPTAKKVTYVLDIKRVVNRGAVVGFSDADMFVDDKHVYSADNLKVGLFADPSKF

SEQ ID NO: 180163 - protein, 175 aa, Unknown
  Bacterial polypetide isolated from the Sargasso Sea
MNKAFKPKESYSKEDLVDCGFGQLFGEGNGRLPVDPMLMFDRITKINNTGGKYSKGEVYAELDVNPDLWFFDCHFKEDPVMPGCLGLDAMWQLLGFFLCWNELPGIGRALGAEKVKFFGQVLPTAKKVNYVLDIKRVINRGTVVGFSDADMFVDDKHVYSADNLKVGLFADPSKF

SEQ ID NO: 180164 - protein, 168 aa, Unknown
  Bacterial polypetide isolated from the Sargasso Sea
MKQNSFNYDKLIECGKGLLFGEGNAQLPLPPMLMFDRIIEINENGGDFSKGEVIAELDIKPNLWFFDCHFKNDPVMPGCLGLDAMWQLVGFYLGWLGQPGKGRALGVGEVKFTGQVLQTVKKVTYHISLKRLILRKLILGIADGVLKADGQNIYEAKDMKVGLFTTNK

SEQ ID NO: 180165 - protein, 162 aa, Unknown
  Bacterial polypetide isolated from the Sargasso Sea
SFNYDELIDCGNGGLFGPGNAKLPLPPMLMFDRITEISENKGAFKKGIIKAELDIKNELWFFNCHFKEDPVMPGCLGLDAMWQLVGFYLGWLGNPGRGRALGVNSVKFTGEVLKNVKQATYEIDMKRILIKEGTTVGLANGILKADGKKIYSAENLKVGLFK

SEQ ID NO: 180166 - protein, 166 aa, Unknown
  Bacterial polypetide isolated from the Sargasso Sea
MKKKSYSYDDLISCGNGDLFGPGNAKLPLPPMLMFDRITEINENNGAFNKGFLKAELDIKKDLWFFDCHFKKDPVMPGCLGLDAMWQLVGFYLGWLGNPGKGRALGVGTVKFTGEVLQDVKNVRYEIDMKKIMSPGGTTVGLANGVVFADNKKIYSADSLKVGLFK

SEQ ID NO: 180167 - protein, 136 aa, Unknown
  Bacterial polypetide isolated from the Sargasso Sea
MDRISTIESTGGNHGRGHVIAELDIHPDLWFFECHFPGDPVMPGCLGLDALWQLVGFFLAWRGYPGKGRALGAGEVKFTGEIRPDAKKVTYELSISRIIDRKLVVGLADGTVAVDDKIIYTTKSLKVGLFTPEQTF

SEQ ID NO: 180168 - protein, 166 aa, Unknown
  Bacterial polypetide isolated from the Sargasso Sea
MKKNSFNYDELIDCANGGLFGPGNAKLPLPPMLMFDRITKINDKEGFFKKGHIKAELDIKDELWFFNCHFKEDPVMPGCLGLDAMWQLVGFYLGWLGNPGRGRALGVNSVKFTGEVLKNVKMATYVIDIKRILIKEGTTVGLANGILLADGKKIYSAENLKVGLFK

SEQ ID NO: 180169 - protein, 166 aa, Unknown
  Bacterial polypetide isolated from the Sargasso Sea
MKKNSYSYDDLITCGNGDLFGPGNAKLPLPPMLMFDRITEINENNGTFNKGSLKAELDIKDDLWFFDCHFKKDPVMPGCLGLDAMWQLVGFFLGWLGNPGKGRALGVGTVKFTGEVLQSVKNVRYEIDMKKIMSPGGTTVGLANGIVLADNKKIYSAESLKVGLFK

SEQ ID NO: 180170 - protein, 169 aa, Unknown
  Bacterial polypetide isolated from the Sargasso Sea
MKQNSFSYEQLIDCANGDLFGKGNAQLPSPPMLMFDRITNINETGGLFKKGEIIAELDIKPELWFFDCHFKGDPVMPGCLGLDAMWQLVGFYLGWLEQPGKGRALGVGEVKFTGQVLDTIKKVSYHISLKRLILRKLILGVADGILKADGEPIYEAKDMKVGLFQSNNK

SEQ ID NO: 180171 - protein, 166 aa, Unknown
  Bacterial polypetide isolated from the Sargasso Sea
MKKNSFNYDDLISCGNGQLFGPGNAKLPLPPMLMFDRITEISENNGTFKKGIIKAELDIKNDLWFFDCHFKDDAVMPGCLGLDAMWQLVGFYLGWLGNPGRGRALGVSSVKFTGEVLRNAKKANYDINMKRILIKEGTTVGLANGILSVDGKKIYSAENLKVGLFK

SEQ ID NO: 180172 - protein, 166 aa, Unknown
  Bacterial polypetide isolated from the Sargasso Sea
MKKNSYTYNELINCGEGGLFGPGNAKLPLPPMLMFDRITEISENTGNYKKGLVKAELDIKNDLWFFNCHFKEDPVMPGCLGLDAMWQLVGFYLGWLGNPGRGRALGVSAVKFTGEVLKNVKMATYEIDMKRILIKGETTVGLANGILLADGEKIYSAENLKVGLFK

SEQ ID NO: 180173 - protein, 166 aa, Unknown
  Bacterial polypetide isolated from the Sargasso Sea
MKKNSYSYEDLISCGNGALFGPGNAKLPLPPMLMFDRITEISDKNGAFKKGSLKAELDIKKDLWFFDCHFKKDPVMPGCLGLDAMWQLVGFYLGWIGNPGKGRALGVGTVKFTGEVLQNVKLVKYEIDMKKIMSPGGTTVGLANGILLADEKKIYSADNLKVGLFK

SEQ ID NO: 180174 - protein, 166 aa, Unknown
  Bacterial polypetide isolated from the Sargasso Sea
MKKSSYTYDDLISCANGDLFGPGNAKLPAPPMLMFDRITEISENKGEFGKGFIVAELDIKDSLWFFDCHFKKDPVMPGCLGLDAMWQLVGFYLGWLGNPGRGRALGVNTVKFTGEVLKNVKKAVYEINMKRVLIKEGTTVGLANGILLADGKKIYSTENLKVGLFK

SEQ ID NO: 180175 - protein, 166 aa, Unknown
  Bacterial polypetide isolated from the Sargasso Sea
MKKSSFDYDELISCANGELFGPGNAKLPYPPMLMFDRITEISEKNGAFDKGLMKAELDIKDDLWFFDCHFKEDPVMPGCLGLDAMWQLVGFYLGWLGNPGRGRALGVSTVKFTGEVLKNVKMATYIIDMKRILIKGETTVGLANGILLADGKKIYSADSLKVGLFK

SEQ ID NO: 180176 - protein, 153 aa, Unknown
  Bacterial polypetide isolated from the Sargasso Sea
MNKVFKPKDCYSKEDLVDCGFGQLFGEGNGRLPVDPMLMFDRITKINNTGGRYSKGEVYAELDVNPDLWFFDCHFKEDPVMPGCLGLDAMWQLLGFFLCWSELPGIGRALGAEKVKFFGQVLPTAKKVNYVLDIKRVVNRGAVVGFSDADMFV

SEQ ID NO: 180177 - protein, 166 aa, Unknown
  Bacterial polypetide isolated from the Sargasso Sea
MKKNSYSYDDLITCGNGDLFGPGNAKLPLPPMLMFDRITEITENNGAFNKGSLKAELDIKDDLWFFDCHFKKDPVMPGCLGLDAMWQLVGFFLGWLGNPGKGRALGVGTVKFTGEVLQSVKNVRYEIDMKKIMSPGGTTVGLANGLVLADNKKIYSAESLKVGLFK

SEQ ID NO: 180178 - protein, 166 aa, Unknown
  Bacterial polypetide isolated from the Sargasso Sea
MKKNSYSYDDLITCGNGDLFGPGNAKLPLPPMLMFDRITEINENNGEFNKGSLKAELDIKNDLWFFDCHFKADPVMPGCLGLDAMWQLVGFYLGWLGNPGKGRALGVSTVKFTGEVLQSVKNVRYEIDMKKIMSPGGTTVGLANGLVFADDKKIYSAESLKVGLFK

SEQ ID NO: 180179 - protein, 167 aa, Unknown
  Bacterial polypetide isolated from the Sargasso Sea
MNKKSSYNFEELIDCGNGKLFGPGNAKLPLPPMLMFDRITEISENKGVFKKGVIKATLDIKDELWFFNCHFKDDPVMPGCLGLDAMWQLVGFYLGWLGNPGKGRALGVGTVKFTGEVLKNVKEATYEIDMKRILVKEGTTVGLANGMLKADQKQIYSAENLKVGLFK

SEQ ID NO: 180180 - protein, 168 aa, Unknown
  Bacterial polypetide isolated from the Sargasso Sea
MKQKNSYNYQDLIDCGNGILFGEGNAKLPLPPMLMFDRITKIESSSGTFKRGYLEAELDIKDDLWFFKCHFQKDPVMPGCLGLDAMWQLVGFYLGWTGEPGKGRALGVSTVKFTGEVLKKVKMATYKINIKRILKKEGAVVGLANGTLDADGKVIYVAENLKVGLFKS

SEQ ID NO: 180181 - protein, 166 aa, Unknown
  Bacterial polypetide isolated from the Sargasso Sea
MKKNSFNYDELLGCANGELFGPGNAKLPSPPMLMFDRITEIDENKGAFGKGLMKAELDIKDDLWFFNCHFKEDPVMPGCLGLDAMWQLVGFYLGWLGNPGRGRALGVSTVKFTGEVLKNVKMATYIIDMKRILIKGETTVGLANGILLADDKKIYSADGLKVGLFK

SEQ ID NO: 180182 - protein, 167 aa, Unknown
  Bacterial polypetide isolated from the Sargasso Sea
MNKKSSYNYEDLISCGNGVLFGPGNAKLPLPPMLMFDRITNIKIKGGAFNKGIIEAELDIKENMWFFDCHFKNDSVMPGCLGLDAMWQLVGFYLGWLGNPGKGRALGVNSVKFTGEVLKNIKIAKYEVDMKRILAKEGTTVGLANGILKADGKKIYSAENLKVGLFK

SEQ ID NO: 180183 - protein, 166 aa, Unknown; identical to SEQ ID NO: 180084
  Bacterial polypetide isolated from the Sargasso Sea

SEQ ID NO: 180184 - protein, 166 aa, Unknown
  Bacterial polypetide isolated from the Sargasso Sea
MKKSSFDYDELISCANGELFGPGNAKLPSPPMLMFDRITEISEKNGAFNKGLMKAELDIKDDLWFFDCHFKEDPVMPGCLGLDAMWQLVGFYLGWLGNPGRGRALGVSTVKFTGEVLKDVKMATYVIDMKRILIKGETTVGLANGILLADGKKIYSADSLKVGLFK

SEQ ID NO: 180185 - protein, 170 aa, Unknown
  Bacterial polypetide isolated from the Sargasso Sea
MKQNSFSYEQLIDCANGDLFGKGNAQLPSPPMLMFDRITNINETGGLFKKGEIVAELDIKPDLWFFDCHFKGDPVMPGCLGLDAMWQLVGFYLGWLEQPGKGRALGVGEVKFTGQVLDTIKKVTYHISLKRLILRKLVLGVADGTLKADGEPIYEAKDMKVGLFQSDNKQ

SEQ ID NO: 180186 - protein, 171 aa, Unknown
  Bacterial polypetide isolated from the Sargasso Sea
MNKANSFNKEELIACGHGNLFGPNSPRLPVDNMLMIDRIITINDNGGEFGKGEIVAELDINPDLWFFGCHFISDPVMPGCLGLDAMWQLVGFYLGWEGAEGKGRALGVGEVKFTGQVLPGAKKVTYKLNIKRTIHRKLVMGIADAILEVDGRQIYSATDLKVGVFSDTSTF

SEQ ID NO: 180187 - protein, 173 aa, Unknown
  Bacterial polypetide isolated from the Sargasso Sea
MTFLPKNSYSKQELLDCAEGNLFGSNNGRLPTPNMLMFDRITEISEYGGKYNKGKMIAELDINPNLWFFDCHFKGDPVMPGCLGLDAMWQLVGFYLCWLGNPGRGRALGASEVKFFGQVLPTAKKVTLIIEMKRILNLDLTVGIGEGSMLVDNREIYTAKGLKVGLFKDTSSF

SEQ ID NO: 180188 - protein, 166 aa, Unknown; identical to SEQ ID NO: 180058
  Bacterial polypetide isolated from the Sargasso Sea

SEQ ID NO: 180189 - protein, 167 aa, Unknown
  Bacterial polypetide isolated from the Sargasso Sea
MEKKSSYSYKELINCGNGELFGPGNAKLPLPPMLMFDRITEVKEDNGAFKKGSITAELDIKDDLWFFNCHFKEDPVMPGCLGLDAMWQLVGFYLGWLGNPGKGRALGVGTVKFTGEVLKSVKKAKYVIDMKKIMSPNGTTVGLANGILLADEKKIYLAENLKVGLFK

SEQ ID NO: 180190 - protein, 166 aa, Unknown
  Bacterial polypetide isolated from the Sargasso Sea
MKKGSFNYEELISCANGELFGPGNAKLPSPPMLMFDRISEINENKGFFNKGLIKAELDINNELWFFDCHFKEDPVMPGCLGLDAMWQLVGFYLGWLGNPGRGRALGVNSVKFTGEVLKNVKMATYIIDMKRILIKEGTTVGLANGILLADGKKIYSAENLKVGLFK

SEQ ID NO: 180191 - protein, 166 aa, Unknown
  Bacterial polypetide isolated from the Sargasso Sea
MKKNSYSHDELINCGKGKLFGPGNAKLPLPPMLMFDRITEINDNKGAFKKGSLKAELDIKKDLWFFDCHFKEDPVMPGCLGLDAMWQLVGFYLGWIGNPGKGRALGVGTVKFTGEVLQEVKLVRYEIDMKKIMSPGGTTVGLANGIVLADEKKIYSAESLKVGLFK

SEQ ID NO: 180192 - protein, 168 aa, Unknown
  Bacterial polypetide isolated from the Sargasso Sea
MKQKNSYNYQDLIDCGNGILFGEGNAKLPLPPMLMFDRITKIENNSGSFKRGYLEAELDIKDDLWFFKCHFQNDPVMPGCLGLDAMWQLVGFYLGWTGEPGKGRALGVSTVKFTGEVLKKVKMASYKINIKRILKKEGAVVGLANGTLDADGKIIYVAENLKVGLFKS

SEQ ID NO: 180193 - protein, 173 aa, Unknown
  Bacterial polypetide isolated from the Sargasso Sea
MSFSPKNSYNKEEILDCAQGNLFGEENGRLPTPNMLMFDRIIEINVDGGKFSKGQIIAELDINPDLWFFDCHFKGDPVMPGCLGLDAMWQLVGFYLCWMNNPGRGRALGASEVKFFGQVLPSAKLVTLKIDMKRILNLDLTVGIGEGSMLVDGREIYSAKGLKVGLFQDTSSF

SEQ ID NO: 180194 - protein, 213 aa, Unknown
  Bacterial polypetide isolated from the Sargasso Sea
LHILQRPGAEADYTAEEIAQANERFATMSDEDKARLTRNIIAGLPGAEEGYTLDQFRQHLARYKDIDKAALRENFAVFLKAVIPVAEEAGVRMAVHPDDPPRPILGLPRIVSTVEDMQWMVDTVNSMANGFTMCTGSYGVRADNDLVDMIKQFGPRIYFTHLRSTLREDNPKTFHEAAHLNGDVDMYEVVKAIVEEEQRRKAEGKEDLIPMRP

SEQ ID NO: 180195 - protein, 86 aa, Unknown
  Bacterial polypetide isolated from the Sargasso Sea
MEQTWRWYGPNDPVSLDDVRQAGATGVVTALHHIPNGQVWPVDEIKQRQALLAEKGLTWSVVESIPVHEEIKTQSGQCATWIANYQ

SEQ ID NO: 180196 - protein, 130 aa, Unknown
  Bacterial polypetide isolated from the Sargasso Sea
MEQTWRWYGPNDPVSLDDVRQAGATGVVTALHHIPNGEVWPVEEIQQRQAILAEKGLTWSVVESIPVHEDIKTRSGQYQTWIANYQQSIRNLATCGIDTVCYNFMPILDWTRTDIEYQLPDGSKALRLTR

SEQ ID NO: 180197 - protein, 386 aa, Unknown
  Bacterial polypetide isolated from the Sargasso Sea
TDIRQTGATGIVNALHEIEIGKVWSIEAIEERKRLIEWEDSNEIPQKTGLRWSVVESVAVHEDIKTQTGNFQTYIEAYKQTIRNLGKCGIDTICYNFMPVLDWTRTNLEYLLEDGSTALYFDFSVLAAFDLFILKRPDAKKSYTEKEIKIARKKFDEMSELEIEELVDTILKGLPGTDTGYSLEDVQAALDLYKNIDSEQLKKYLAYFLEEIIPVAEEAGVRMAIHPDDPPRSLLGLPRIISTEKDLSELLNMIDSPSNGFTMCAGSYGANPDNDLVGMIERYGHRLSFTHLRSTKTIEGKDWCFYEADHLAGDADMYGIVRALVKEQRKRVAQGRADHQIPMRPDHGHRMLDDLKKESNPGYSCIGRLRGLAELRGLEMGIEKSL

SEQ ID NO: 180198 - protein, 290 aa, Unknown
  Bacterial polypetide isolated from the Sargasso Sea
CYDALVGLAGCDKSLPGLMMSMVRLNVPSVFIYGGSILPGRFNGKDVTVVDVIEGVGKYHSGKMSLHALRKLELKACPSAGACGGQFTANTMACVSEAIGLALPYSAGTPAPYTKRDKYAVDSGKAVMNLLAKNIRPRDIVTRKSLENAATIVAATGGSTNAALHLPAIANEIGIKFDLMDVAKIFKKTPYLADLKPGGKYVAKDMWLAGGVPMLLKTLYEGGFIHGDCMTVTGKSMKENLKKVKFNPNQKVMRSYNKPLSPDGGVVGLKGNLAPDGGIVKIAGLKKLQF

SEQ ID NO: 180199 - protein, 271 aa, Unknown
  Bacterial polypetide isolated from the Sargasso Sea
VGCLGYDGVVAIGGCDKNMPGALIGLARLNRPSIFIYGGSIQPSSINTDYVTVCEKVGEYAKGSLSEEDLIAFEKVSVKGPGSCGGMYTANTMASSIEALGMSLPGSSSQDAVSNNKKQDCKDAGAAIKNLLDLDIKPSDIMTKKAFENSIAVVIALGGSTNAVLHLIAMAHSIGVDLDLDDFTRIGKVTPVLADIKPFGVHFMSELNAIGGIAPMMKLMLEKGLLHGDCLTVTGKTVQENLQEVLPYPDGQKIILPILEPVKESSHLRVL

SEQ ID NO: 180200 - protein, 215 aa, Unknown
  Bacterial polypetide isolated from the Sargasso Sea
VTGKTIEENLSKIKSPDLKSTDIIFPLSNPIKESGHIQILKGNLAEQGCVAKITGKEGLKFSGPAKVFDSEFECLTAISESKVNKGEVVVIRYEGPKGGPGMPEMLKPTSAIMGAGLGKDVALITDGRFSGGTHGFVVGHIVPEAYDGGVIAIVENGDMITIDSENNQIFVDISDDEIKNRIKNWSKPDLKIKKGILYKYVKSVSNASSGCVTDE

SEQ ID NO: 180201 - protein, 303 aa, Unknown
  Bacterial polypetide isolated from the Sargasso Sea
MRKYSSKLVDGKDRAPSRSMLRAVGFNDKDFLKPQVGIASTWSMVTPCNMHINDLAKVATKAIDSNGGKAVNFNTITISDGISMGSDGMRYSLVSREIISDSIEAVVAGEGLDGFISFGGCDKNMPACVMAMLRLNRPSVFVYGGTILPGTHRNKKIDIVSVFEAVGKNANGDMDDKELMQIEKKAIPGPGSCGGMYTANTMACAIEAMGLSLTNSSAQTAISKSKSTDTKNASIALMSCIKKDLKPRDIVTKKSLENAITIVMALGGSTNAVLHLLAIAKEAKLNLSLRDLERMGKKTLFLQ

SEQ ID NO: 180202 - protein, 223 aa, Unknown
  Bacterial polypetide isolated from the Sargasso Sea
MTATKKTGESGHRRYSKLVTDTNARAASRGMLYGVGFKKGDFHKSQVGIASTWGTVTPCNMHINDLAEHAARGVRKARGMPLTFGTITVSDGISMGTEGMKYSLVSREVIADSIETVVGCQSYDGIVTIGGCDKNMPGCMIAIARLNRPAVFVYGGTILPGTHKGKDVDIVSIFEAVGKQAAGTITQDELEEVESCAIPGAGSCGGMYTANTMASAIEALGMS

SEQ ID NO: 180203 - protein, 275 aa, Unknown
  Bacterial polypetide isolated from the Sargasso Sea
MLRAVGFESEDFNKPQVGIASTWSMVTPCNMHINQLAESAASGADLVGSKSVIFNTITVSDGISMGTKGMRYSLISREVIADSIETVVGGQGFDGLITIGGCDKNMPACVMAMARLNRPSIFVYGGSIKPGSNRTDVVSVFEAVGKHSEGAISDIELLDIESTAIPGPGSCGGMYTANTMASAIEALGMSLPNSSAQEAVSSSKLKDSSDAGESIMNLISLDLKPRDIMTKQAFENAIAVVIALGGSTNAVLHLLAIAHEAKINLSLNDFERIGK

SEQ ID NO: 180204 - protein, 284 aa, Unknown
  Bacterial polypetide isolated from the Sargasso Sea
VLHILAIANTAGIDININDFERIRQKVPVICDLKPSGKYVTVDLHKAGGIPQVMKILLNAGLIHGDCKNIEGKTISEYLQNIPDKPPTNQNVIRDIDDPLYKKGHLAILKGNLASEGSVAKISGVKNPVLTGPAKIFESEEDCLKSILNNDIKAGDVVVIRNEGPVGGPGMREMLAPTSAIVGQGLGEKVALITDGRFSGGTYGLVVGHIAPEAAVGGNIALIKQGDLITVDAVKQLIEVDLSDEELEKRKKDWVKPIQKYKRGILSKYSRIVSTSSLGAVTDL

SEQ ID NO: 180205 - protein, 328 aa, Unknown
  Bacterial polypetide isolated from the Sargasso Sea
PCNMHIDKLAEQVNRATDSAGGKGIIYNAITISDGISMGTEGMKYSLVSREVIADSVETVSGCMGHDAIIAIGGCDKNMPGLMMGLSRLNRPSIFVYGGTIQPGPNHTNIISVFEAVGAHSAGSISDIQLKQIEDTAIPGPGSCGGMYTANTMASAIEALGMSLPNSSAQDAISQAKVDDCVNSGEAIMNLVEHDIKPSDIMTRPAFENAIKVIIALGGSTNAVLHLLAMAHTMNVKLELDDFTRIGKTIPMVADLKPSGKYLMSELIKIGGIQPLMKEMLEAEMLDGSCLTVTGKTLKENLANVKAYPSDQDIIRNFNNPIKKDSHL

SEQ ID NO: 180206 - protein, 172 aa, Unknown
  Bacterial polypetide isolated from the Sargasso Sea
NLAKDGAVAKITGKEGTSFEGKARVFNSEEEGVEAILSNSIEDGDVIVIRYEGPKGGPGMREMLKPTSAIMGLGLGEKVAFITDGRFSGGTHGFVVGHISPEAADGGLIAMIEDGDKILIDAENDQLILKVDDEEINRRESNWKNPIKKPKKGVLAKYAKSVKSASLGAITD

SEQ ID NO: 180207 - protein, 286 aa, Unknown
  Bacterial polypetide isolated from the Sargasso Sea
FCTITVTDGIAMGHEGMKSSLISREVIADSAELTVRGHCYDALVGIAGCDKSLPGLMMSMLRLNVPSVFIYGGSILPGKFKGKDVTVVDVFEAVGKHSSGKMSSEELRELELVACPSAGACGGQFTANTMACVSEAIGLALPYSAGTPAPYEERDKFAFESGQAVMNLLEKKIKPREIVTKKSLENAATIVAATGGSTNAALHLPALANEIGVKFDLMDVAKIFKKTPYLADLKPGGQYVAKDMWEAGGVPMLLKTLLDGGYIHGECLTVTGKTMKENLKNIKFNK

SEQ ID NO: 180208 - protein, 338 aa, Unknown
  Bacterial polypetide isolated from the Sargasso Sea
MAAEDLEKELSADKSAEILVSAIEKDIRPLDLMTKKAFENAISVIMAIGGSTNAVLHILAIANTAGIDININDFERIRQKVPVICDLKPSGKYVTVDLHNAGGIPQVMKILLNAGLIHGDCKNIEGKTISEYLQNIPDKPPTNQNVIRDIDDPLYKKGHLAILKGNLASEGSVAKISGVKNPVLTGPAKIFESEEDCLESILNNDIKAGDVVVIRNEGPVGGPGMREMLAPTSAIVGQGLGEKVALITDGRFSGGTYGLVVGHIAPEAAVGGNIALIRQGDLITVDAVKQLIEVDLSDEELEKRKKDWVKPTPKYKRGILSKYSRIVSTSSLGAVTDL

SEQ ID NO: 180209 - protein, 239 aa, Unknown
  Bacterial polypetide isolated from the Sargasso Sea
LNKVGGIQPLMKMLLDANLLHGDCLTVSGKTISENLSEVDPYPDNQTIIREISNPIKSSSHLRILYGNLAPEGAVAKITGNEGLKFTGTAKVFDSEEDGNKAIQNNLINEGDVVVIRYEGPKGGPGMREMLKPTSAIMGQGLGDKVAFITDGRFSGGTHGFVVGHISPEAYVGGPIGVIENGDKITIDAETNSISIDISDEELQKRLDSFKPNKELPKKGVLSKYSKSVQSASLGAITD

SEQ ID NO: 180210 - protein, 168 aa, Unknown
  Bacterial polypetide isolated from the Sargasso Sea
MNKLRSSAITQGVQRSPNRSMLRAVGFNDEDFNKPIIGVANGYSTITPCNMGLNKLALKAEESIKRSGGMPQMFGTITVSDGISMGTEGMKYSLVSREVIADSIETACNAQSMDGVLAIGGCDKNMPGAMIAIARMNIPSIFIYGGTIKPGKLHGEDLTVVSAFEAVG

SEQ ID NO: 180211 - protein, 223 aa, Unknown
  Bacterial polypetide isolated from the Sargasso Sea
LIHGDCKNIEGKTISEYYRNIPDKPPTNQNVIRDIDNPLYQKGHLAILKGNLASEGSVAKISGVKNPVLTGPAKIFESEEDCLKSILNNDIKAGDVVVIRNEGPVGGPGMREMLAPTSAIVGQGLGEKVALITDGRFSGGTYGLVVGHIAPEAAVGGNIALIKQGDLITVDAVKQLIEVDLSDEELEKRRKDWVKPKPKYKRGILSKYSKIVSTSSLGAVTDL

SEQ ID NO: 180212 - protein, 171 aa, Unknown
  Bacterial polypetide isolated from the Sargasso Sea
YKGKDISIVDVFEGIGAYEKGMITKEDLYEIECAACPGVGSCAGMFTANTMASVGEAIGMSLPGTASIPAEDSRLRVAAEESGKQLNYLLKHDIKPRDIMTNEAFKNAITTVLALGGSTNAVLHLLAIAHESKVSLSLETFDELSRNVPHLADMKPFGKFHMVDLDKIGGV

SEQ ID NO: 180213 - protein, 312 aa, Unknown
  Bacterial polypetide isolated from the Sargasso Sea
TGVKDTDFGKPIIAVVNSFTQFVPGHVHLRDLGKLVAEAIEEAGGIAKEFNTIAIDDGIAMGHGGMLYSLPSREIIADSVEYMVNGHCADAMVCISNCDKITPGMLMAALRLNIPAIFVSGGPMEAGKTKLSDQIIKLDLVDAMVSAANPNVSDADSEKIERSACPTCGSCSGMFTANSMNCLVEALGLGQPGNGSMLATHSDRKALFISAGQRIMDLCNRWYKQNDASALPRNIANKTAFENAMMLDIAMGGSTNTVLHLLAAAIEAEVDFGMSDIDRLSRIVPHLSKVAPSTQKYHMEDVHRAGGVIAIL

SEQ ID NO: 180214 - protein, 306 aa, Unknown
  Bacterial polypetide isolated from the Sargasso Sea
EFCTITVTDGIAMGHEGMKSSLISRDVIADSTELTVRGHCYDALVGLAGCDKSLPGLMMAMVRLNVPSVFIYGGSILPGRFEGKDVTVVDVFEGVGKYTSKKMTAHALRKLELKACPSAGACGGQFTANTMACVSEAIGLALPFSAGTPAPYAERNKYAIDSGKAVMHLLAKNIRPRDIVTRKSLENAATIVAATGGSTNAGLHLPAIANEIGIKFDLMDVAKIFRKTPYLADLKPGGKYVAKDMWEAGGVPMLLKTLMDGGYIHGDCMTVTGKTMRENLKNVKFRENQKVMRSYKNPISPTGGVV

SEQ ID NO: 180215 - protein, 334 aa, Unknown
  Bacterial polypetide isolated from the Sargasso Sea
FTANTMACVSEAIGLALPYSSGTPAPYLDRDKYALESGMQVMRLLKDKIRPRDIVTLDSLKNAAVIVAATGGSTNAALHLPAIANECGIKFDLLDVAKIFKQTPYLADLKPGGKYVAKDMFEAGGVPMLLKTLLDGGYINGKCLTVTGNTMEENLKNIKFNKDQKVMRSYDNPITKTGGVIGLKGNLASEGAIVKVAGLKKLKFVGKAKCYDSEEEAFEAVKNKKYKEGDVIVIRYEGPKGGPGMREMLSTTAAIYGQGMGEKVALITDGRFSGATRGFCVGHVGPEAYVGGMIGLLNDGDKIIIDAENGSINVEIDDNEIEKRKKIGRRKSQI

SEQ ID NO: 180216 - protein, 283 aa, Unknown
  Bacterial polypetide isolated from the Sargasso Sea
HLIAMAHSVGITLTLDDFQAVSDKTPFIADLKPSGKYVMEDVHKVGGTPAVLKYLMSEGMIDGSCMTVTGKTLAENLAMCPELTAGQDVILPVSTPIKKTGHLQCLYGNIAQEGSVAKITGKEGLYFKGFAKCYDSEEDMLAALSEDPESFKGSVIVIRYEGPKGGPGMPEMLTPTSAIMGAGLGNDCALITDGRFSGGSHGFVIGHVTPEAQVGGNIGLLKDGDIIEIDAEARTINAPDVNDAEWEKRRAGWKAPPLEATSGTLYKYTKLVASASQGCITDL

SEQ ID NO: 180217 - protein, 254 aa, Unknown
  Bacterial polypetide isolated from the Sargasso Sea
MNKLRSSAITQGVQRSPNRSMLRAVGFNDEDFNKPIIGVANGYSTITPCNMGLNKLALKAEESIKRSGGMPQMFGTITVSDGISMGTEGMKYSLVSREVIADSIETACNAQSMDGVLAIGGCDKNMPGAMIAIARMNIPSIFIYGGTIKPGKLHGEDLTVVSAFEAVGQLTSGKINEERLIQVEKNCIPGAGSCGGMFTANTMSAVIEVLGLSLPHSSTMAAEDLEKELSADKSAEILVSAIEKDIRPLDLMTK

SEQ ID NO: 180218 - protein, 279 aa, Unknown
  Bacterial polypetide isolated from the Sargasso Sea
MMSMLRLNVPSVFIYGGSILPGKFKGKDVTVVDVFEAVGKHSSGKMSSEELRELELVACPSAGACGGQFTANTMACVSEAIGLALPYSAGTPAPYEERDKYAYESGQAVMNLLEKKIKPREIVTKKSLENAATIVAATGGSTNAALHLPALANEIGVKFDLMDVAKIFKKTPYLADLKPGGKYVAKDMWEAGGVPMLLKTLFDGGYIHGDCLTVTGKTMKENLKDIKFNKNQKVLREYNKPLSPDGGVVGLKGNLAPEGAIVKIAGLKKLQFSGIARWF

SEQ ID NO: 180219 - protein, 93 aa, Unknown
  Bacterial polypetide isolated from the Sargasso Sea
SGLSIGHVSPEAAAGGTIGLVRDGDVIQIDIPNRSIHLQVDDDLLAERRKFQDEVGWKPEMQRPRKVSAALKAYGLMTTSADKGAVRDLSAFL

SEQ ID NO: 180220 - protein, 271 aa, Unknown
  Bacterial polypetide isolated from the Sargasso Sea
GVGKYSTGNMSKKELLKLESVACPSSGSCGGQFTANTMACVSEAIGLALPGSAGTPAVYETRDKFAVSSGHAVMNLLKKNIRPRDIVTKKSLENAAVVVAASGGSTNAALHLPAIANEAGIKFTLEDVTNISRKTPYIADLKPGGKYVAKDLYEIGGVPILIKALLEGGYLHEDCMTVSGKTIGENHKNITFPSNQKIIYKTSKPISPSGGFVGLKGNLAPEGAIVKVAGMKRRIFKGKAKCFDGEKLALQAVLKRKIKPGDVIVIRYEGP

SEQ ID NO: 180221 - protein, 155 aa, Unknown
  Bacterial polypetide isolated from the Sargasso Sea
SCRVFDGEYAANDGIKKGSVKKGDVVVIRYEGPKGGPGMPEMLKPTSALMGAGLGKDVALITDGRFSGGTHGFVVGHVVPEAQEGGPIALINDGDIISIDAEKNLIDVNLSKSELESRRKKWVKPPNKFSMGIMVKYVNNVSNASEGCVTDKINE

SEQ ID NO: 180222 - protein, 320 aa, Unknown
  Bacterial polypetide isolated from the Sargasso Sea
KEVSAEKSAEILVDAIRKDIRPLTLMTKESFENAISVIMAIGGSTNAVLHILAIANTAGIDINIDDFERIRQKVPVICDLKPSGKYVTVDLHKAGGIPQVMKILLNAGLINGNCRNIEGKTIFESLKDIPNKPPENQDVIRDIDNPLYKKGHLAILKGNLASEGCVAKISGIKNPVLKGPARIFESEEDCLKSILNNDIKAGNVVVIRNEGPVGGPGMREMLAPTSAIVGQGLGEKVALITDGRFSGGTYGLVVGHIAPEAAVGGNIALIKEGDLITVDATNQLIEVELSDEELEMRRINWEKPSKKYKKGVLSKYSRIS

SEQ ID NO: 180223 - protein, 329 aa, Unknown
  Bacterial polypetide isolated from the Sargasso Sea
DKVSDADTDEIERSACPTCGSCSGMFTANSMNCLTEALGLSLPGNGSMLATHADREGLFKQAGKQIVELCKRYYGDDDESVLPRNIANFKAFENAMSLDIAMGGSTNTILHLLAAAMEGEVPFTMADIDRLSRKVPHLCKVAPSTPKYHMEDVHRAGGVLGILNELNKAGLLNTDVNHVLGKPLTDVISEWDITNPENEDAITFYRAGPAGIRTTKAFSQDCRWDEADDDRENGCIRSIEHAFSQEGGLAVLYGNVAEDGCIVKTAGVDESILKFNGTARIYESQDDAVAGILGNEVKAGDVVFIRYEGPRGGPGMQEMLYPTSYLKSK

SEQ ID NO: 180224 - protein, 297 aa, Unknown
  Bacterial polypetide isolated from the Sargasso Sea
GAGKAVSNLINLDLKPRDIMTKEAFENAISMVIALGGSTNAVLHLIAIAHEAKIDISLDDFERLGKRIPVLADLKPSGNYLMSELIEIGGIVPLMRKLLEKQLLHGDQMTVTGKTLEENLSDSSNYPEGQEIIKDFNSPIKKDSHLRILYGNLAPEGAVAKISGKEGLTFDGKARVFDSEETAMEGILKGQINEGDVLIIRYEGPKGGPGMREMLGPTSAIMGKGLGDKVAFLTDGRFSGGTHGFVVGHISPEAYEGGPLALVRDGDSIKIDARSNQINVSITDEEIKERRESWKLP

SEQ ID NO: 180225 - protein, 314 aa, Unknown
  Bacterial polypetide isolated from the Sargasso Sea
VSREVIADSVELVMHAERFDGMVTIAGCDKSLPGMLMAAGRINRPAIFLYGGSSLPGVYNGKDISIVDVFEGIGAFEKGIISEEELYKIECAACPGVGSCAGMFTANTMASVGEAIGMSLPGTAAIPAEDAKLRDAAVESGKQLNYLLKNNIKPSDIMTHDAFTNAITTVLALGGSTNAVLHLLAIAHETGVELSIDKFDQLSRNVPHLADMKPFGKYHMVNLNEIGGVPVISKILLENKLINPDCMTVTGQTIGENLEKVQIPKNQNVISFPDNPISNEGGIAVLKGSLSPNGSVVKTAGIDINTFSGPAKMF

SEQ ID NO: 180226 - protein, 310 aa, Unknown
  Bacterial polypetide isolated from the Sargasso Sea
APYLERNKYAIDSGKAVMNLLAKNIRPRDIVTRKALENAATIVAATGGSTNAGLHLPAIANEIGIKFDLMDVAKIFKKTPYLADLKPGGKYVAKDMWEAGGVPMLLKTLMDGGYIHGDCMTVTGKTMRENLKNVKFRTNQKVMRSYKNPISPTGGVVGLKGNLAPEGGIVKIAGLKKLQFTGRARCFDNEESAYKAVINRKYKDGDIIIIRYEGPIGGPGMREMLQTTAAIYGQGKGEKVALITDGRFSGATRGFCIGHVGPEASVGGPIALLRNGDIIDIDAKKGTINVRLTKKELSARRKKWKPRKVN

SEQ ID NO: 180227 - protein, 327 aa, Unknown
  Bacterial polypetide isolated from the Sargasso Sea
HGPTKCSSVFIYGGSILPGRYNGKDITVVDVFEGVGKYSSGKISAKDLRKLELKACPSAGACGGQFTANTMACVSEAIGLALPYSAGTPAPYEERDKYAYQSGKAVMNLLKKNIRPRDIVTRKSLENAATIVAATGGSTNAALHLPALANEIGIKFDLMDVAKIFKKTPYLADLKPGGKYVAKDMWMAGGVPMLLKTLYDGGFIHGNCMTVTGKTMKENLKNVKFNLKQKVLRKYNNPLSPDGGVVGLKGNLAPDGAIVKVAGLKRLQFTGRARCFDTEEAAYSAVKNKKYKDGDIIIIRYEGPKGGPGMREMLSTTGAIYGQGKGE

SEQ ID NO: 180228 - protein, 257 aa, Unknown
  Bacterial polypetide isolated from the Sargasso Sea
KIVAKDMWKAGGVPMLLKTLLDGGYIHGNCLTVTGKTMKENLKKVKFNEKQKVMRKYDRPLSKDGGVVGLKGNLAPQGAIVKVAGLKKLKFTGRARCFDTEESAYKAVLKRKYRDGDIIVIRYEGPKGGPGMREMLQTTGAIYGQGKGEKVALITDGRFSGATRGFCIGHVGPEASVGGPIALLKNGDTITIDAKKGTINVHLSKKELVKRRKKWKPKKLNFGNGTLWKYAQTVGPAYLGASTHPGGKNEIKCYADI

SEQ ID NO: 180229 - protein, 280 aa, Unknown
  Bacterial polypetide isolated from the Sargasso Sea
FLSCWKHSSGQMSAKELRKLELVACPTAGACGGQFTANTMACVSEAIGLALPYSAGTPAPYEERDKYAKASGRMVMELLAKKIKPRDIVTRKALENAATIVAATGGSTNAALHLPAIANEAGIKFDLMDVAKIFKRTPYLADLKPGGKYVAKDMWLAGGVPMLLKTLYDGGYIHGDCMTVTGKKMKENLKGIKFNPKQKVLRAYNRPLSPDGGVVGLKGNLAPEGAIVKIAGLKKLQFTGKARCFDNEESAMKAVQSRKYKDGDVIIIRYEGPVGGPGMR

SEQ ID NO: 180230 - protein, 110 aa, Unknown
  Bacterial polypetide isolated from the Sargasso Sea
APEGAIVKVAGLKKLQFTGRARCFDTEESAYKAVKQKKYKDGDIIIIRYEGPKGGPGMREMLQTTGAIYGQGKGEKVALITDGRFSGATRGFCIGHVGPRSICRWTNSFT

SEQ ID NO: 180231 - protein, 329 aa, Unknown
  Bacterial polypetide isolated from the Sargasso Sea
DHDDDRVLPRNIASFSSFENAMTLDIAMGGSTNTILHLLAAAREAEIDFTMADIDRLSRDVPTLCKVAPSSDYHMEDVHRAGGVMAILGELARAGKLHLEGSTVYSDTFGDAIEAFDIVRNTEASLHEFYRAAPGGVATQTAFSQNRHYAELDLDREQGCIRSLENAYSTDGGLAVLFGNLAPDGAIVKTAGVDEEILTFTGPARVYESQDAACVGILGDEVKAGEVVVIRYEGPKGGPGMQEMLYPTSYLKGKGLGKACALLTDGRFSGGTSGLSIGHASPEAANGSIMALVETGDIIEIDIPNRTLNLKVDDDTLARRRTDEEARGP

SEQ ID NO: 180232 - protein, 297 aa, Unknown
  Bacterial polypetide isolated from the Sargasso Sea
ELTVVDVYEAVGSYDAGKISAEELENIENVACPNAGSCGGMFTANTMASISEAIGLSLPGSASPPAEDDRRNKMVLETGKACAKLLQLGIKPLDIVTFEAFENSITMLNAVGGSTNGILHLLAMANEAGINLTYDDFERIRKKTPHLADMKPGGNYVMNSLDKIGGIPLVMKKLLDKNLIHGDSLTVTGKTIKENLEELAIVEVPDQQIIKPVEQPIHEVGTAVILKGTLAPEGGVIKTAGVEMTEFTGTAKVFDREEYAFEAVSKGEIDEGDVVVIRYEGPKGGPGMREMLSTTAA

SEQ ID NO: 180233 - protein, 333 aa, Unknown
  Bacterial polypetide isolated from the Sargasso Sea
DIELQEVEATAIPGPGSCGGMYTAYTMASSMEALGLSLPNSSAQNAVSEAKLQDSFNAGAAVRHLIKLGIKPSDILCREAFENAITLTIALEGSTNAVLHLLAIAHAAQIPLTLDDFSRIGGRVPVLADMRPAGHYAMSELIEIGGIQPLMKTLLAEGLIHGDCLTVTGKTLAENLMNVPDYPATQKIIRPLSNPIKKDSHLVILRGNLAPEGAVAKITGHEGLTFTGTARCFHGEEAAMAAIMDGTVDKGDVVIVRYEGPKGGPGMREMLSPTSAINGRGLSEHVALLTDGRFSGGFHGFVIGHVTPEAHLGGPIALVHDGDTVTVDAEQCT

SEQ ID NO: 180234 - protein, 246 aa, Unknown
  Bacterial polypetide isolated from the Sargasso Sea
GVPMLLKTLMDGGYIHGNCITVTGKTMKENLKNVKFNSNQKVMRKYNNPLSPDGGVVGMKGNLAPEGAIVKVAGLKKLQFTGRARCFDTEEAAYKAVKNRKYKDGDIIIIRYEGPKGGPGMREMLQTTGVIYGQGKGEKVALITDGRFSGATRGFCIGHVGPEAFVGGPIALLRNGDIIDLDAKKGTINVRLSKKELAKRRKRWKPKKINFGNGTLWKYAQTVGPAYLGAPTHPGGKNEVRTYADI

SEQ ID NO: 180235 - protein, 290 aa, Unknown
  Bacterial polypetide isolated from the Sargasso Sea
GLDFGMDDIDRLSRRVPNLCKVAPSSNFHMEDVHRAGGIMAILGELERAKLLNSDNKTVHSETMLDAIQKWDINRKPSNEVKEFYSAAPGMIPTTQPFSQNKRYSELDVDRQNGCIRDSDNAHSQDGGLAVLKGNIASDGCIVKTAGVDEKILTFSGPAKVFESQDDAVEAILGDQIVAGDVVVIRYEGPKGGPGMQEMLYPTSYLKAKGLGEKCALITDGRFSGGTSGLSIGHISPEAASKGYIALIKDGDIINIDIPKRSIDVDLLDEELEIRKKEMTSLGKKSVEAS

SEQ ID NO: 180236 - protein, 234 aa, Unknown
  Bacterial polypetide isolated from the Sargasso Sea
MVKFSDDVTQGVEKSAARAMLRAVGLQDDDFNKFQVGIVSAGNEVTPCNLTGPELSIHAKEGVNGTDSAGLIFSTIAVSDGISMGHEGMRASLVSREVIADSVELVMHAERFDGMVTIAGCDKSLPGMLMASARINRPAIFLYGGSSLPGVYKGKDISIVDVFEGIGAFEKGIISEEELYEIECNACPGQGSCAGMFTANTMASVGEAIGMSLPGTASIPAEDQRLRTAAKESG

SEQ ID NO: 180237 - protein, 254 aa, Unknown
  Bacterial polypetide isolated from the Sargasso Sea
MSLPGTASIQAEDKRLRKAAKETGDQLNYLLKNDLKPRDIMTREAFHNAITTVLSLGGSTNAVLHLLAIAYEAKVDLTIDVFDELAREVPHLADMKPFGKYHMVDLDKIGGVPVVSKILLENKLIDPNCMTVTGKTVGENLENIEVPKDQDVVYFPENPISKEGGLAILRGSLSPNGSVVKVAGIEIDTFKGPANVFDSEQEALDALFNNKIKKGEVVVIRNEGPKGGPGMREMLQITAAMKGAGLGKDVLLIT

SEQ ID NO: 180238 - protein, 313 aa, Unknown
  Bacterial polypetide isolated from the Sargasso Sea
SKRFIMKKFNRKKLPSRHTTIGADKAPQRSFYYAMDLTEKDVAKPFVGVVSTWNEAAPCNINLMKQAQSVKKGVQATGGTPREFCTITVTDGIAMGHEGMKSSLISRDVIADSTELTVRGHCYDALVGLAGCDKSLPGLMMAMVRLNVPSVFIYGGSILPGRFEGKDVTVVDVFEGVGKYTSKKMTAHALRKLELKACPSAGACGGQFTANTMACVSEAIGLALPFSAGTPAPYLERNKYAIDSGKAVMNLLAKNIRPRDIVTRKALENAATIVAATGGSTNAGLHLPAIANEIGIKFDLMDVAKILRKLLIC

SEQ ID NO: 180239 - protein, 219 aa, Unknown
  Bacterial polypetide isolated from the Sargasso Sea
KENLKKVKFKDKQKVMRKYDNPLSNDGGVVGLKGNLAPDGAIVKVAGLKKLQFTGRARCFDTEESAYKAVLKRKYKDGDIIVIRYEGPKGGPGMREMLQTTGAIYGQGKGEKVALITDGRFSGATRGFCIGHVGPEASVGGPIGLLKNGDIIHIDAKKGTINVNLSRKELSKRKKKWKPKKINFGNGTLWKYAQTVGPAYLGASTHPGGKKEVKCYADI

SEQ ID NO: 180240 - protein, 279 aa, Unknown
  Bacterial polypetide isolated from the Sargasso Sea
AKVTPCNMHINELSEIVEKSVNASGGKGILFNTITVSDGISMGTQGMKYSLISREVIADSIETVVACLGYDALITVGGCDKNMPGCLISMARLDRPSIFIYGGSIKPSEENTDYVTVSEKVGEYSKGKISEKELIHFEEISVKGPGSCGGMYTANTMASAIEALGMSLPGSSSQDAVSKSKEQDCLDAGSAVMNLLKHDIKPSDIMTKEAFENAITIVVALGGSTNAVLHLLAIAHSIGVNLSLDDFTVIGKRVPVLADLKPFGNKFMSDLNSSGGIQP

SEQ ID NO: 180241 - protein, 286 aa, Unknown
  Bacterial polypetide isolated from the Sargasso Sea
RGHCYDALVGLAGCDKSLPGLMMSMVRLNIPSVFIYGGSILPGRFNGKDVTVVDVFEGVGKYTSKKMTAHALRKLELKACPSAGACGGQFTANTMACVSEAIGLALPYSAGTPAPYTSRNKYAVDSGKAVMNLLAKNIRPRDIVTRKSLENAATIVAATGGSTNAGLHLPAIANEIGIKFDLMDVAKIFKKTPYLADLKPGGKYVAKDMWKAGGVPMLLKTLMDGGYIHGDCMTVTGKTMRENLKNVKFKTNQKVMRKYSNPITPTGGVVGLKGNLAPEGGIVKIA

SEQ ID NO: 180242 - protein, 188 aa, Unknown
  Bacterial polypetide isolated from the Sargasso Sea
LKGNLAPEGGIVKIAGLKKLQFTGRARCFDNEESAMKAVQSRKYKDGDVIIIRYEGPVGGPGMREMLSTTGAIYGQGKGEKVALITDGRFSGATRGFCVGHVGPEAALGGPIALLRNGDVIDIDAKKGTINVRLTKSQLASRRRKWKARKSDFGSGTLWKYAQTVGPAFLGAPTHPGKKKEVKDYSKI

SEQ ID NO: 180243 - protein, 279 aa, Unknown
  Bacterial polypetide isolated from the Sargasso Sea
LANEIGIKFDLMDVANIFKKTPYLADLKPGGKYVAKDMWKAGGVPMLLKTLMDGGYIHGDCMTVTGKTMRQNLKNVKFNLKQKVMRKYTNPLSPDGGVVGLKGNLAPEGAIVKIAGLKKLQFTGRARCFDTEESAYKAVKNKKYKDGDIIIIRYEGPKGGPGMREMLQTTGAIYGQGKGEKVALITDGRFSGATRGFCIGHVGPEASVGGPIALLRNGDIIDLDAKKGIINVRLSKKELAKRRKKWRPKKINFGNGTLWKYAQTVGPAYLGAPTHPGGK

SEQ ID NO: 180244 - protein, 272 aa, Unknown
  Bacterial polypetide isolated from the Sargasso Sea
KFKGKDVTVVDVFEAVGKHSSGKISSEELRELELVACPSAGACGGQFTANTMACVSEAIGLALPYSAGTPAPYEERDKYAYESGQAVMNLLEKKIKPREIVTKKSLENAATIVAATGGSTNAALHLPALANEIGLKFDLMDVAKIFKKTPYLADLKPGGKYVAKDMWEAGGVPMLLKTLFDGGYIHGDCLTVTGKTMRENLKDIKFNKNQKVLREYNKPLSPDGGVVGLKGNLAPEGAIVKIAGLKKLQFSGTARCFDNEEDAMKAVQTKKY

SEQ ID NO: 180245 - protein, 288 aa, Unknown
  Bacterial polypetide isolated from the Sargasso Sea
YGGSILPGRFNGKDVTVVDVFEGVGKYSSGKMTEHALRKLELKACPSAGACGGQFTANTMACVSEAIGLALPYSAGTPAPYQQRDKYALQSGKAVMNLLKKNIRPRDIVTRKSLENAATIVAATGGSTNAALHLPALANEIGIKFDLMDVAKIFKKTPYLADLKPGGKYVAKDMWKAGGVPMLLKTLLDGGFIHGNCLTVTGKTMKENLKKVKFNEKQKVMRKYNRPLSNDGGVVGLKGNLAPQGAIVKVAGLKKLQFTGRARCFDTEESAYKAVLKRKYKDGDIIVI

SEQ ID NO: 180246 - protein, 200 aa, Unknown
  Bacterial polypetide isolated from the Sargasso Sea
MTVTGKTIEENLKDVEFNENQKVIRPYNKPLSPTGGVVGLKGNLAPDGAIVKVAGLENTFFEGYARCFDCEEDAFECVSKKGYENGEVIVIRYEGPKGGPGMREMLSTTAALSGQDVGGKVALITDGRFSGGTRGLCVGHVGPEAATGGPIALIKDGDKITIDGEKGILNVDLSDEELEERRKLWKPRGTDYNSGTLWKY

SEQ ID NO: 180247 - protein, 267 aa, Unknown
  Bacterial polypetide isolated from the Sargasso Sea
SINASGGKGVLFNTITVSDGISMGTQGMKYSLVSREVIADSIETVVGCLGYDGLIAIGGCDKNMPGCLIGMARLNRPSIFIYGGSIKPSNENTDYVTVSEKVGEFSKGSINEDELIHYEKISVDGPGSCGGMYTANTMASAIEALGMSLPGSSSQDATSKSKNADCVNAGSAIMNLLDKDIKPSDIMTREAFENAITVVIALGGSTNAVLHLLAMAHSIGVELCLDDFTSIGEKTPVLADLKPFGKHYMSELNANGGIQPLMKTLLD

SEQ ID NO: 180248 - protein, 263 aa, Unknown
  Bacterial polypetide isolated from the Sargasso Sea
VTPCNMHIDQLAKHTDVGVTDGGGKGVIFNTITISDGISMGTEGMKYSLVSREVIADSIETVVGCQGFDGLVAIGGCDKNMPGCLIGMIRLDRPSVFVYGGTILPGCHKEQDVDIVSVFEAVGAHANNKIDDAELKAIESCAIPGPGSCGGMYTANTMASAIEALGMSLPNSSAQAAISTDKAADCEQAGKAVLHLIEKNIKPSDILTKQSFENAITVITALGGSTNAVLHLLAIAHSVGIELSLEDFTRIGNKTPVIADLKP

SEQ ID NO: 180249 - protein, 281 aa, Unknown
  Bacterial polypetide isolated from the Sargasso Sea
TEQDVAKPFVGVVSTWNEAAPCNTALMRQAQSVKKGVKQFGGTPREFCTITVTDGIAMGHEGMKSSLISREIIADSAELTVRGHCYDALVGIAGCDKSLPGLMMSMLRLNVPSVFIYGGSILPGKYKGKDVTVVDVFEAVGKHSSGSMSSKELRELELVACPSAGACGGQFTANTMACVSEAIGLALPYSAGTPAPYEERDKYAFESGKTVMNLLEKNIKPRSIVTKESLENAATIVAATGGSTNAALHLPALANEIGVKFDLMDVAKIFKKTPYLADLKP

SEQ ID NO: 180250 - protein, 311 aa, Unknown
  Bacterial polypetide isolated from the Sargasso Sea
FFIPQVGIASTWSQVTPCNMHIDKLALKVSKSLSKHNVKPVIFNSITISDGISMGTEGMKYSLVSREVIADSIETVVGCEGFDGLVTIGGCDKNMPGCLIAMSRLNRPSVFIYGGTIMPGKHNNKNIDIVSVFEAVGEFSKGRISKKELTNIETKAIPGPGSCGGMYTANTMASAIEALGMSLPGSSSQAAISKQKMLDCENASKALANLIKKDIKPSDIMTKKAFYNAITIVIALGGSTNAVLHIIAMAKAMNININLNDFSKIGKKVPVLADLRPSGKYMMSELVNIGGIQPLMKYLLKYGLLNGDCLT

SEQ ID NO: 180251 - protein, 254 aa, Unknown
  Bacterial polypetide isolated from the Sargasso Sea
AKDVYEAGGVPIIIKTLYEGGFIHGDCLTVTGKSIKENLASIEFNKDQKVIRPYDNPLSPTGGVVGLKGNLAPEGAIVKVAGMENLKFTGVARCFDCEEDAFKCVKNEDYKEGDVFVIRYEGPRGGPGMREMLATTAAIYGQGMGDKVALITDGRFSGATRGFCVGHVSPEAAVCGPIALIEDGDRIMLDAENGQISLDVRESVLEERKKYWKKPKTDFNSGTIWKYSRTVGSAVNGAVTHPGAEEETHVYADI

SEQ ID NO: 180252 - protein, 143 aa, Unknown
  Bacterial polypetide isolated from the Sargasso Sea
AGDVIVIRYEGPKGGPGMREMLATTAAIYGQGMGEKVALITDGRFSGATRGLCVGHISPEAMVLGPIALIENGDQILIDAKEGLIKLNVAEKTLKARKNSILKRENNFGSGALWKFSQTVGSARFGAVTHPGAKKETKNYSDI

SEQ ID NO: 180253 - protein, 293 aa, Unknown
  Bacterial polypetide isolated from the Sargasso Sea
KNIRPRDIVTRKALENAATIVAATGGSTNAGLHLPAIANEIGIKFDLMDVAKIFKKTPYLADLKPGGKYVAKDMWEAGGVPMLLKTLMDGGYIHGDCMTVTGKTMRENLKNVKFRENQKVMRSYKNPISPTGGVVGLKGNLAPEGGIVKIAGLKKLQFTGRARCFDNEESAYKAVINRKYKDGDIIIIRYEGPIGGPGMREMLQTTAAIYGQGKGEKVALITDGRFSGATRGFCIGHVGPEASVGGPIALLRNGDIIDIDAKKGTINVRLTKKELSARRKKWKPRKVNFGNGT

SEQ ID NO: 180254 - protein, 280 aa, Unknown
  Bacterial polypetide isolated from the Sargasso Sea
KKLPSRHTSLGADKAPQRSFYYAMGETEKDVAKPFVGVVSTWNEAAPCNIALMRQAQSVKKGVKFSGGTPREFCTITVTDGIAMGHEGMKSSLVSRDVIADSTELTVRGHCYDALVGVAGCDKSLPGLMMAMLRLNVPSVFIYGGSILPGRFNGKDVTVLDVFEGVGKYSSGQISEHALRKLELKACPSAGACGGQFTANTMACVSEAIGLALPYSAGTPAPYDQRDKYALQSGKAVMNLLKKNIRPRDIVTRKSLENAATIVAATGGSTNAALHLPSTC

SEQ ID NO: 180255 - protein, 185 aa, Unknown
  Bacterial polypetide isolated from the Sargasso Sea
YKKGHLAILKGNLASEGSVAKISGVKTPVLTGPARVFKSEEECLAAILDNKVNAGDVVVVRYEGPVGGPGMREMLSPTSAIVGQGLREKVALITDGRFSGGSYGLVVGHVAPEAAVGGTIGLVEEGDSITVDANKLLIQLNVHEEELTRRKEKWKKPKPRYKTGILGKYSRLLSSSSQGATTDQV

SEQ ID NO: 180256 - protein, 319 aa, Unknown
  Bacterial polypetide isolated from the Sargasso Sea
MLRGVGFTSEDFTKPFVGMASTGAKVTPCNMHINQLSELVEGSINASGGKGVLFNTITVSDGISMGTQGMKYSLVSREVIADSIETVVGCLGYDGLIAIGGCDKNMPGCLIGMARLNRPSIFIYGGSIKPSNENTDYVTVSEKVGEFSKGSINEDELIHYEKISVDGPGSCGGMYTANTMASAIEALGMSLPGSSSQDATSKSKNADCVNAGSAIMNLLDKDIKPSDIMTREAFENAITVVIALGGSTNAVLHLLAMAHSIGVELCLDDFTSIGKKTPVLADLKPFGKHYMSELNANGGIQPLMKTLLDKGLLHGQCMT

SEQ ID NO: 180257 - protein, 310 aa, Unknown
  Bacterial polypetide isolated from the Sargasso Sea
ANTMACVSEAIVLALPYSAGTPAPYEERDKYAKASGRMVMELLAKKIKPRDIVTRKALENAATIVAATGGSTNAGLHLPAIANEAGIKFDLMDVAKIFKRTPYLADLKPGGKYVAKDMWLAGGVPMLLKTLYEGGYIHGDCMTVTGKTMKENLKGIKFNPKQKVMRSFKNPLSPTGGVVGLKGNLAPEGGIVKIAGLKKLQFTGRARCFDNEESAMKAVQSRKYKDGDVIIIRYEGPVGGPGMREMLSTTGAIYGQGKGEKVALITDGRFSGATRGFCVGHVGPEAALGGPIALLQNGDIIDIDAKEGNN

SEQ ID NO: 180258 - protein, 277 aa, Unknown
  Bacterial polypetide isolated from the Sargasso Sea
ANTMASAIEAMGFALPYNSSNPATSEEKKSDSKKAGNAVVNLLKIDLKPLDIISKKSLENAMTLITALGGSTNAVLHILAIAHTAGIDFNLKDFQNISNKTPFLADLKPSGKYLMEDVHKVGGTPAVLKYLFEKGLIHGDCMTITGKTLAENLKDVPSLTPNQKIIKPLENPIKQTGHIRIMYGNLASEGSVAKITGKEGLIFKGKAKVFEGEYEANDGIKNGLVKKGDVVVIRYEGPKGGPGMPEMLKPTAAIMGAGLGKDVALITDGRFSGERTV

SEQ ID NO: 180259 - protein, 239 aa, Unknown
  Bacterial polypetide isolated from the Sargasso Sea
SEGAISDIELLDIESTAIPGPGSCGGMYTANTMASAIEALGMSLPNSSAQEAVSSSKLKDSSDAGESIMNLISLDLKPRDIMTKQAFENAIAVVIALGGSTNAVLHLLAIAHEAKINLSLNDFERIGKRTPVLADLRPSGNYLMSELIEIGGIVPLMKSMLEKGLIDGNQMTVTGKTLEENLCEYDHYPKDQKIITSTDKPIKTDSHLRILYGNLAPSGAVAKISGKEGLSFQGKAKVY

SEQ ID NO: 180260 - protein, 226 aa, Unknown
  Bacterial polypetide isolated from the Sargasso Sea
MRIGYKSPVLADLKPSGKYLMTDFVKIGGLPPLMKMLLDAGLLHGDCMTVTGKTVRDNLKNVKPYEEGQEIVKSLDDPIRKTGHLVILRGNLAAEGAVAKISGKEGEFFRGTARVFNSEEEALMRILDGTVVKGDVIVIRYEGPKGGPGMREMLSPTSAIMGRGLGNDVALITDGRFSGGSHGFVIGHITPEAFDGGLLGMVENGDNITIDITKRTIDLEVSEHEI

SEQ ID NO: 180261 - protein, 223 aa, Unknown
  Bacterial polypetide isolated from the Sargasso Sea
FHGDCLTVTGTTLRENLENVKNFKPDQDIVHSFEDPIKKTGHLVVLRGNLAIGGAVAKISGKEGEYFKGVARVFNSEEEALEKILDGTVIKGDVIVIRYEGPKGGPGMREMLSPTSAIMGRGLGKDVALITDGRFSGGSHGFVIGHITPEAQEGGLLAIVENGDQITIDITERTIELELSEDLVKTRKENLILPTTKYRRGVLAKYSKTVSSASLGAVTDLDM

SEQ ID NO: 180262 - protein, 256 aa, Unknown
  Bacterial polypetide isolated from the Sargasso Sea
VTRKSLENAATIVAATGGSTNAGLHLPAIANEIGIKFDLMDVAKIFKRTPYLADLKPGGRYVAKDMWLAGGVPMLLKTLMDGGFIHGDCMTVTGKTMKENLKNIKFKINQKVMRKYNNPLSKTGGVVGLKGNLAPEGGIVKIAGLNKLQFTGKARCFNTEEDAYKAVKSRKYKDGDIIIIRYEGPKGGPGMREMLQTTAAIYGQGKGEKVALITDGRFSGATRGFCIGHVGPEASVGGPIALLRNGDVIDIDAKKG

SEQ ID NO: 180263 - protein, 235 aa, Unknown
  Bacterial polypetide isolated from the Sargasso Sea
LRGVGFTSHDFTIPHVGIASTWSKVTPCNMHINKLASIVEESINDQDCKGVLFNTITVSDGISMGTEGMKYSLVSREVIADSIETVVGCLGYDGVIAIGGCDKNMPGAIIGLARLNRPSIFIYGGSIMPSEINTDYVSVLEKTGEFAKGDISEEELIKIEEISVKGPGSCGGMYTANTMASAIEALGMSLPGSSSQDAVSKAKENDCVRSGSAIKTLLDKNIVPKDIMTKHAFEN

SEQ ID NO: 180264 - protein, 299 aa, Unknown
  Bacterial polypetide isolated from the Sargasso Sea
AVEKHSSGQMSAKELRKLELVACPTAGACGGQFTANTMACVSEAIGLALPYSAGTPAPYEERDKYAKASGQMVMELLAKKIKPRDIVTRKALENAATIVAATGGSTNAALHLPAIANEAGIKFDLMDVAKIFKKTPYLADLKPGGKYVAKDMWLAGGVPMLLKTLYDGGYIHGDCMTVTGKTMKENLKGIKFNPKQKVLRAYDRPLSPDGGVVGLKGNLAPEGGIVKIAGLKKLQFTGRARCFDNEESAMRAVQSRKYKDGDVIIIRYEGPVGGPGMREMLSTTRCYLWTRKRGKGCFN

SEQ ID NO: 180265 - protein, 288 aa, Unknown
  Bacterial polypetide isolated from the Sargasso Sea
DRAPHRSFYYAMGETEQDVAKPFVGVVSTWNEAAPCNTALMRQAQSVKKGVKKYGGTPREFCTITVTDGIAMGHEGMKSSLISREVIADSAELTVRGHCYDALVGIAGCDKSLPGLMMSMLRLNVPSVFIYGGSILPGKYKGKDVTVVDVFEAVGKHSSGSMSSEELRELELVACPSAGACGGQFTANTMACVSEAIGLALPYSAGTPAPYEERDKYAFDSGQTVMNLLEKNIKPRDIVTKKSLENAATIVAATGGSTNAALHLPALANEIGVKFDLMDVAKIFKKTP

SEQ ID NO: 180266 - protein, 283 aa, Unknown
  Bacterial polypetide isolated from the Sargasso Sea
GIKFDLMDVAKIFKKTPYLADLKPGGRYVAKDMWKAGGVPMLLKTLMDGGYIHGDCMTVTGKTMKENLKNVKFNLKQKVMRKYNNPLSPDGGVVGMKGNLAPEGAIVKVAGLKKLQFTGKARCFDTEEAAYKAVKNKKYKDGDIIIIRYEGPKGGPGMREMLQTTGAIYGQGKGEKVALITDGRFSGATRGFCIGHVGPEASVGGPIALLRNGDIIDLDAKKGIINVRLSKKELAKRRKKWKPRKINFGNGTLWKYAQTVGPAYLGAPTHPGGKNEVKTYADI

SEQ ID NO: 180267 - protein, 313 aa, Unknown
  Bacterial polypetide isolated from the Sargasso Sea
MSAHALRKLELKACPSAGACGGQFTANTMACVSEAIGLALPYSAGTPAPYTQRDSYALKSGKAVMNLLAKNIRPRDIVTKKSLENAATIVAATGGSTNAALHLPALANEAGIKFDLMDVARIFKKTPYLADLKPGGKYVAKDMWKAGGVPMLLKTLLDGGYIHGDCMTVTGKTMRQNLKNVKFNKNQKVMRTHNQPLSPDGGVVGLKGNLAPDGAIVKVAGLKKLQFTGKARCFDTEEAAYKAVKNKKYKDGDIIIIRYEGPKGGPGMREMLQTTGAIYGQGKGEKVALITDGRFSGATRGFCIGHVGPEASV

SEQ ID NO: 180268 - protein, 251 aa, Unknown
  Bacterial polypetide isolated from the Sargasso Sea
KNDCINAGKAVIELINKNIKPLDILTKKAFENAITVITALGGSTNAVLHLIAMAHSAGVELTLNDFTRIGKKVPVLADLKPSGKYTMSKLVEIGGIAPLMKQLLNEGLLHGDCLTVTGKTLEENLKNIDPYPTGQDIIKPLSNPIKKDGHLVICYGNIAPKGSVAKITGKEGLSFTGKARVFNAEEEALKRILDDTIKKGDVIVIRYEGPKGGPGMREMLSPTSAVMGKGLGQEVALITDGRFSGGTHGFV

SEQ ID NO: 180269 - protein, 267 aa, Unknown
  Bacterial polypetide isolated from the Sargasso Sea
PTVFVSGGPMEAGTNKKGEKVDLVSVFEGVGKFKTGSIDEDDLKDLEENGCPTCGSCSGMFTANSMNCLLEVLGLALPGNGTILATDPSRLELVKQAGKAIIDLVQMDLKPRDIVNNDSIRNAFALDMAMGGSTNTVLHTLAASIEAGLSFDMEEINEISRRTPYLCKVSPATPNVHMEDVLKAGGISAILMELSKQSGLLKLDRPTVLGVTLGESIASAKNYNKDIIRSVDDPFSKEGGLAVLFGNIAPHGSIVKTAAVNKRNVSS

SEQ ID NO: 180270 - protein, 284 aa, Unknown
  Bacterial polypetide isolated from the Sargasso Sea
MGHDGMLYSLPSRDLIADSVEYMCNAHCVDALICISNCDKITPGMLMAGLRLNIPFVLVSGGPMEAGRILKGKSFRRTDPIEAYVSAMTPNYNQTDAMEIEAEACPTCGSCAGMFTANSMNCLAEAIGLALPGNGSLLATHVGRKQLFVDAGKKIVSIARKYYFEKDNSVLPRNIATKPAFENAMKVDIAMGGSTNTILHLLAMAQEANIDFDMRDMDKISRQIPHICKLSPANQDYYMEDVHRAGGIMGILGELDRGNLIDTSVNTIAGENLKKVLLKWDYLN

SEQ ID NO: 180271 - protein, 241 aa, Unknown
  Bacterial polypetide isolated from the Sargasso Sea
MSELNANGGIQPLMKSLLDKGLLHGKCITVTGNTLEENLQDIKPYDNNEIIKSFEDPIKKDSHLRILYGNLAKDGAVAKITGKEGTSFEGKAKVFNSEEEGVEAILSNKIIEGDVVVIRYEGPKGGPGMREMLKPTSAIMGLGLGNKIAFITDGRFSGGTHGFVVGHVSPEAADGGLIALIEDGDTILIDADNDQLILKVDVDEIVKRKSNWKNPIEGPKKGVLSKYAESVKSASLGAITD

SEQ ID NO: 180272 - protein, 168 aa, Unknown
  Bacterial polypetide isolated from the Sargasso Sea
GSVAKITGKEGLVFSGPAKVYNSEFETIDAIQNSKVKKGEVVVIRYEGPKGGPGMPEMLKPTSAIMGAGLGKDVALITDGRFSGGTHGFVVGHIVPEAFEGGTIALVEDGDIITIDSKNNVISVDISDNEIEERRKKWKKPDLKINQGILYKYVKSVSSASKGCVTDE

SEQ ID NO: 180273 - protein, 296 aa, Unknown
  Bacterial polypetide isolated from the Sargasso Sea
ACGGQFTANTMACVSEAIGLALLYSAGTPAPYKERHKYAINSGKAVMKLLEKNIRPRDIVTRKALENAATVVAATGGSTNAGLHLPAIANEIGIKFDLMDVAKIFKRTPYLADLKPGGKYVAKDMWEAGGVPMLLKTLYDGGYIHGDCMTVTGKTMKENLKNVKFNPKQKVMRSYKNPITPTGGVVGLRGNLAPEGGIVKIAGLKKLQFTGRARCFDSEEKAYKAVKERKYKDGDIIIIRYEGPKGGPGMREMLQTTAAIYGQGKGEKVALITDGRFSGATRGFCIGHVGPEASIG

SEQ ID NO: 180274 - protein, 227 aa, Unknown
  Bacterial polypetide isolated from the Sargasso Sea
MNIPSVFVYGGTIKPGKLGGCDLTVVSAFEAVGQLTSGKIDEAQLTAVEKNACPGAGSCGGMFTANTMSAAIETMGLSLPFSSTMAAEDEEKADSAARSAEVLVDAVNANIRPLDLLTKEAFENAISVIMAVGGSTNAVLHLLAIARTAGVDLTIDDFERIRQRVPVICDLKPSGRYVTVDLHNAGGIPQVMKLLLDAGLLHGDCRTVEGKSLKELLAAVPSEPPAG

SEQ ID NO: 180275 - protein, 226 aa, Unknown
  Bacterial polypetide isolated from the Sargasso Sea
MYNKFSRVVTKDDSQPAAQAMLHAIGLSEEDFDKPFIGIASTGYEGNPCNMHLNDLSVKIKKSISASEYVGLIFNTIGVSDGISMGTFGMRYSLPSRDIIADSMETVVQAMSYDGLVTVVGCDKNMPGALMAMLRLDRPSILVYGGTIDSGCYNNKELDVVSAFEAWGEKVSGKIDDKEYKSVIKNACPGAGACGGMYTANTMASAIEALGMSLPYNSSNPAISKK

SEQ ID NO: 180276 - protein, 304 aa, Unknown
  Bacterial polypetide isolated from the Sargasso Sea
VSDDKVRDCFQAGETVLRLIEKNICPLDILTREAFENSITVVMALGGSTNAVLHLLAMANAAKINLELDDFLRIGNKAPVLTDLKPSGKYLMTDFVKIGGLPPLMKMLLDAGLLHGDCMTVTGKTVRENLKNVKPYEEGQEIVKSLDDPIRKTGHLVILRGNLAAEGAVAKISGKEGEFFRGTARVFNSEEEALIRILDGTVVKGDVIVIRYEGPKGGPGMREMLSPTSAIMGRGLGNDVALITDGRFSGGSHGFVIGHITPEAFEGGLLGIVENGDNITIDITKRTIDLEVSEHEIKRRQDNW

SEQ ID NO: 180277 - protein, 296 aa, Unknown
  Bacterial polypetide isolated from the Sargasso Sea
MLYPVGFSEDDFKKPQIGIASTWSMITPCNMHINELADQAEIGANEAGGKAVQFNTITVSDGISMGTPGMRYSLVSREVIADSIETVVAAQGFDGFVAIGGCDKNMPACGIAMARLNRPSVFVYGGTILPGKERRDIVSVFEAVGGHAAGSVSDIELKEVESTAIPGPGSCGGMYTANTMASAMEALGLSLPNSSAQNAVSEEKKIDSRNAGIAVRNLIRLGVKPSDILCKESFENAITVSIALEGSTNAVLHLLGIAHAAGIKLELDDFSRIGARVPVLADMRPAGQYAMSELIE

SEQ ID NO: 180278 - protein, 251 aa, Unknown
  Bacterial polypetide isolated from the Sargasso Sea
MWLAGGVPMLLRTLLDGGYIHGDCMTVTGKTMRQNLKNIKFNPKQKVMRKYNNPLSNDGGVVGLKGNLAPEGAIVKVAGLKKLQFTGKARCFDTEESAYKAVKNKKYKDGDIIIIRYEGPRGGPGMREMLQTTGAIYGQGKGEKVALITDGRFSGATRGFCIGHVGPEASVGGPIALLRNGDVIDIDAKKGTINVRLSKKELQKRRKKWRPKKINFGNGTLWKYAQTVGPAYLGAPTHPGGKNEVKVYADI

SEQ ID NO: 180279 - protein, 270 aa, Unknown
  Bacterial polypetide isolated from the Sargasso Sea
GLSLPYSSTMAAEDPEKADSAARSAEVLVEAIAANIRPLDLLTREAFENAISVIMAVGGSTNAVLHLLAIARTAGVPLSIDDFETIRQRVPVICDLKPSGRFVTVDLHEAGGIPQVMKLLLDGGLLHGDCRTVEGKTLREVLADIPSSPPADQDVIRPLSNPLYAKGHLAVLKGNLASEGAVAKISGVKTPVLTGPAKVFESEEECLQAILANKIQAGDVVVVRNEGPVGGPGMREMLAPTAAIVGEGLGDKVALITDGRFSGGTYGLVV

SEQ ID NO: 180280 - protein, 253 aa, Unknown
  Bacterial polypetide isolated from the Sargasso Sea
KIVPGMLMASLRVNIPTVFVSGGPMEAGTNKKGEKVDLVSVFEGVGKFKTGSIDKDDLKDLEENGCPTCGSCSGMFTANSMNCLLEVLGLALPGNGTILATDPSRLDLVKQAGKAIIDLVDKDLKPRDIVNNDSIRNAFALDMAMGGSTNTVLHTLAASIEAGLSFDMKEINEISRKTPYLCKVSPATPNVHMEDVLKAGGISAILMELSKQNGLLKLDRPTVLGVTLGESISGAKNYNKDIIRSVDDPFSKE

SEQ ID NO: 180281 - protein, 321 aa, Unknown
  Bacterial polypetide isolated from the Sargasso Sea
PDKAPQRSFYYAMNLTEKDVAKPFVGVVSTWNEAAPCNINLMKQAQSVKKGVHLSGGTPREFCTITVTDGIAMGHEGMKSSLISRDIIADSTELTVRGHCYDALVGLAGCDKSLPGLMMSMVRLNVPSVFIYGGSILPGRFNGKDVTVVDVFEGVGKYTSKKMTAHALRKLELKACPSAGACGGQFTANTMACVSEAIGLALPYSAGTPAPYNERNKYALESGKAVMNLLAKNIRPRDIVTRKSLENAATIVAATGGSTNAGLHLPAIANEIGIKFDLMDVAKIFKRTPYLADLKPGGKYVAKDMWEAGGVPMLLKTLMDG

SEQ ID NO: 180282 - protein, 309 aa, Unknown
  Bacterial polypetide isolated from the Sargasso Sea
MRKFNKKKLPSRHTSLGPDRAPHRSFYYAMGETEKDVAKPFIGVVSTWNEAAPCNIALMRQAQSVKKGVRASGGTPREFCTITVTDGIAMGHEGMKSSLISREVIADSAELTVRGHCYDALVGIAGCDKSLPGLMMSMVRLNVPSVFIYGGSILPGKYKGKDVTVVDVFEAVGKHSSGQMSAKELRKLELVACPTAGACGGQFTANTMACVSEAIGLALPYSAGTPAPYEERDKYAKASGRMVMELLAKKIKPRDIVTRKALENAATIVAATGGSTNAGLHLPAIANEAGIKFDLMDVAKIFKRTPYLA

SEQ ID NO: 180283 - protein, 295 aa, Unknown
  Bacterial polypetide isolated from the Sargasso Sea
VGVVSTWNEAAPCNINLMKQAQSVKKGVKASGGTPREFCTITVTDGIAMGHEGMKSSLISRDVIADSTELTVRGHCYDALVGLAGCDKSLPGLMMSMVRLNIPSVFIYGGSILPGRFNGKDVTVVDVFEGVGKYTSKKMTAHALRKLELKACPSAGACGGQFTANTMACVSEAIGLALPFSAGTPAPYLERNKYAIDSGKAVMNLLAKNIRPRDIVTRKALENAATIVAATGGSTNAGLHLPAIANEIGIKFDLMDVAKIFKKTPYLADLKPGGKYVAKDMWEAGGVPMLLKTLM

SEQ ID NO: 180284 - protein, 287 aa, Unknown
  Bacterial polypetide isolated from the Sargasso Sea
RDIVQRKALENAATVVAATGGSTNAGLHLPAIANEAGIKFDLMDVAKIFKRTPYLADLKPGGKYVAKDMWLAGGVPMLLKTLYEGGYIHGDCMTVTGKTMKENLKGIKFNPRQKVMRSYKNPLSPTGGVVGLKGNLAPEGAIVKVAGLKKLQFTGKARCFENEESAMKAVQSKKYNDGDVIIIRYEGPVGGPGMREMLSTTSAIYGQGKGEKVALITDGRFSGATRGFCVGHVGPEAALGGPIGLLRTGDIIDIDAKKGTINVRLSKKELAARKRKWKARKSDFGSG

SEQ ID NO: 180285 - protein, 263 aa, Unknown
  Bacterial polypetide isolated from the Sargasso Sea
MTINSKDISLLKHKSAAISLGPDRAPARSMLRAVGLGDDDMEKPFVAIANLASDVTPCNVHLTRIADKAKQGLWDANAVPFMFGTITISDGISMGTEGMKGSLVSREVIADSIETVCFTEGMDGLLIVAACDKNMPGAMMSMARLNIPSVFVYGGAILPGSYKGEDINIQDMFEAVGAYSKCQMSLEELIDMERVACPGEGACSGMFTANTMASAIEAMGMSVPGAASIPAVDDRNLSVAEQAGKHIYTMLEKGVKPRDIMTR

SEQ ID NO: 180286 - protein, 213 aa, Unknown
  Bacterial polypetide isolated from the Sargasso Sea
MLFPIEQDVIYPVTNPLSKTGGVVGLKGNLAPKGAIVKVAGMKNLTFTGPARVFECEDDCFKAVQNREYKTGEVLVIRYEGPKGGPGMREMLATTAALYGQGVGEEVALITDGRFSGGTRGFCVGHVGPEAATGGPIALLVDGDIITIDANLGLLDVDLNEQELEKRKSNWKPKTTNYQTGALWKYSQEVSDAEKGAVTHPGAKSETHIYADL

SEQ ID NO: 180287 - protein, 281 aa, Unknown
  Bacterial polypetide isolated from the Sargasso Sea
KLPSRHTSLGADRAPHRSFYYAMGETEKDVSKPFVGVVSTWNEAAPCNIALMRQAQSVKKGVRSSGGTPREFCTITVTDGIAMGHEGMKSSLISREVIADSAELTVRGHCYDALVGIAGCDKSLPGLMMSMVRLNVPSVFIYGGSILPGRYKGKDVTVVDVFEAVGKHSSGQMSAKELRKLELVACPTAGACGGQFTANTMACVSEAIGLALPYSAGTPAPYEERDKYAKASGRMVMELLAKKIKPRDIVTRKSLENAATIVAATGGSTNAALHLPAIANE

SEQ ID NO: 180288 - protein, 171 aa, Unknown
  Bacterial polypetide isolated from the Sargasso Sea
KKLQFTGRARCFDTEEAAYKAVKNRKYKDGDIIIIRYEGPKGGPGMREMLQTTAAIYGQGKGEKVALITDGRFSGATRGFCIGHVGPEASVGGPIALLRNGDIIDIDAKKGTINVRLSKQELSKRRKKWKPKKINFGSGTLWKYAQTVGPAYKGAPTHPGGKNEVKVYADI

SEQ ID NO: 180289 - protein, 167 aa, Unknown
  Bacterial polypetide isolated from the Sargasso Sea
FKKTPYLADLKPGGQYVAKDVYEAGGVPIIIKTLFEGGYIHGDCLTVTGRTIAENLKNVEFNNDQKVIRPYSDPLSPTGGVVGLKGNLAPEGAIVKVAGMENLKFSGKAICFDCEEDAFECVKNGNFKEGDVFVIRYEGPRGGPGMREMLATTAAIYGQGMGDKVAL

SEQ ID NO: 180290 - protein, 112 aa, Unknown
  Bacterial polypetide isolated from the Sargasso Sea
GKSCALITDGRFSGGTSGLSIGHVSPEAASGGAIALVEEGDRIEIDIPNRKIGIAVSDDELAARRAAMDAKGKQGWKPLNRQRVVSAALKAYALLASSADKGAVRDLSKLEE

SEQ ID NO: 180291 - protein, 135 aa, Unknown
  Bacterial polypetide isolated from the Sargasso Sea
GQDVIRPISNPMYAQGHLAILKGNLSPEGSVAKITGLKNPVITGPARVFDDEQSALEAILAGKIKAGDVMVLRYLGPKGGPGMPEMLAPTGALIGAGLGESVGLITDGRFSGGTWGMVVGHVAPEAAAGGTIAFV

SEQ ID NO: 180292 - protein, 306 aa, Unknown
  Bacterial polypetide isolated from the Sargasso Sea
LIALKEVQFVGPGSCGGMYTANTMASSMKALGMSLPGSSSQDAVSEDKKVDCQNAGEAIKHLLDLDLKPSDIMTKKAFENSIAVVIALGGSTNAVLHLIAIAHCIGIDLDLDDFTRIGKVTPVLADIKPFGDHFMSQLNEIGGITPMMKTMLENKLLHGDCMTVTGKTLEENLEDVDPYPSNQKIIMPLNNPVKDSSHLRVLYGNLAPEGAVAKITGKEGTVFTGNARVFNSEEAGMKAILDKKIKDGDVVVIRFEGPRGGPGMREMLKPTSAIMGQGLGDRVAFITDGRFSGGTHGFVVGHISPE

SEQ ID NO: 180293 - protein, 312 aa, Unknown
  Bacterial polypetide isolated from the Sargasso Sea
MYEIECNACPGQGSCAGMFTANTMASVGEAIGMSLPGTASIPAEDQRLRTAAKESGSQLNYLLKEDIKPRDIMTLEAFKNAITTVLALGGSTNAVLHLLAISYEAKINLDLNTFDELGKSVPHLADMKPFGKYHMVDLDKIGGVPVVSKILLENKLIDPDCLTVTGKTVGENLENIEIPKSQDVVSFPDNPISKEGGIAILNGTLSPNGSVVKTAGIDVNEFSGPANVFESEQDALDALFNNKIEKGDVVVIRNEGPKGGPGMREMLQITAAIKGAGLGKDVLLITDGRFSGGTTGLCIGHVTPESFDLGPI

SEQ ID NO: 180294 - protein, 234 aa, Unknown
  Bacterial polypetide isolated from the Sargasso Sea
VAKIFKKTPYLADLKPGGKYVAKDMWLAGGVPMLLKTLHDGGFIHGDCMTVTGKTMKENLKNVKFNVKQKVLRKYNNPLSLDGGVVGLKGNLAPEGGIVKIAGLKKLQFTGIARCFDNEESAYLAVKKKKYKDGDIIIIRYEGPIGGPGMREMLSTTAAIYGQGKGEKVALITDGRFSGATRGFCVGHVGPEAAIGGPIALLRNGDVIDIDAKKGTINVRLSNKKLAARRKNWK

SEQ ID NO: 180295 - protein, 247 aa, Unknown
  Bacterial polypetide isolated from the Sargasso Sea
KISEHALRKIELKACPTAGACGGQFTANTMACVSEAMGLALPYSAGTPAPFNRRDKYALASGKAVMNLLAKNIRPRDIVTKKALENAATIVAATGGSTNAALHLPAIANEIGIKFDLMDVAKIFKRTPYLADLKPGGKYVAKDMWKAGGVPMLLKTLMDGGYIHGNCMTVTGKTMKENLKNVKFNSKQKVMRKYNNPLSKDGGVVGMKGNLAPEGAIVKVAGLKRLQFTGRARCFDTEEAAYKAVKK

SEQ ID NO: 180296 - protein, 253 aa, Unknown
  Bacterial polypetide isolated from the Sargasso Sea
VRLNVPSVFIYGGSILPGKYKGKDVTVVDVFEAVGKHSSGQMSAKELRKLELVACPTAGACGGQFTANTMACVSEAIGLALPYSAGTPAPYEERDKYAKASGRMVMELLAKKIKPRDIVTRKALENAATIVAATGGSTNAALHLPAIANEAGIKFDLMDVAKIFKRTPYLADLKPGGKYVAKDMWLAGGVPMLLKTLYDGGYIHGDCMTVTGKTMKENLKGIKFNPKQKVLRAYNRPLSPDGGVVGLKGNLAP

SEQ ID NO: 180297 - protein, 232 aa, Unknown
  Bacterial polypetide isolated from the Sargasso Sea
ETEKDVAKPFVGVVSTWNEAAPCNIALMRQAQSVKKGVRATGGTPREFCTITVTDGIAMGHEGMKSSLISREVIADSAELTVRGHCYDALVGIAGCDKSLPGLMMSMVRLNVPSVFIYGGSILPGRYKGKDVTVVDVFEAVGKHSTGQMSAAELRKLELVACPSAGACGGQFTANTMACVSEAIGLALPYSAGTPAPYEERDKYAKASGKTVMNLLKKGIKPRDIVTKKALE

SEQ ID NO: 180298 - protein, 273 aa, Unknown
  Bacterial polypetide isolated from the Sargasso Sea
MKQKVNLTIDDFDMLSRDTPYLTDLKPGGKYVMSDMDRSGGVQVVLKELLDAGLIHGNEMTINGKTIGENLENVKTRPDNKVIFSVPNAKSSTGGLAILKGNLAPEGAVMKVSGTSHHKHEGPAKVYDGERAAFEAVTNGDVVDGDVVIIRYEGPKGGPGMQEMLAVTGAVMGAGLGESTLLITDGRFSGATRGPMIGHVAPEAAVGGPIALVQEGDIISMDVNSRQLDVKISKEELESREKAWKPREPNYKKGVLAKYSKLVSSASIGAVTN

SEQ ID NO: 180299 - protein, 299 aa, Unknown
  Bacterial polypetide isolated from the Sargasso Sea
LRGRDKYAKESGKMVMNLLQKKIKPRDIVTRKALENAATIVAATGGSTNAGLHLPAIANEAGIKFDLMDVAKIFKRTPYLADLKPGGKYVAKDMWLAGGVPMLLKTLYEGGYIHGDCMTVTGKTMKENLKNIKFNPKQKVMRSYKDPISPTGGVVGLKGNLAPEGAIVKVAGLKKLQFTGKARCFDNEESAMKAVQSRKYNDGDVIIIRYEGPVGGPGMREMLSTTGAIYGQGKGEKVALITDGRFSGATRGFCVGHVGPEAALGGPIGLLKNGDIIDIDAKKGTINVRLSKKELASRR

SEQ ID NO: 180300 - protein, 272 aa, Unknown
  Bacterial polypetide isolated from the Sargasso Sea
EQVACPSAGSCGGQFTANTMACISEAVGLALTNSAMPPAVNTEERKAYGEKSGKAIMNLLEKNIRPRDIVTIDSLVNAARVVAATGGSTNAALHLPAIANEAGLKFTLRDVVEIYNSTPYIGDMQPGGKYVAKDLYDVGGVPVVIKSLLDGGYINGDCITVTGKTIAENHKEVIFPTNQDVVYKCDNPISENSSVVGLWGNLAPDGCISKIAGLKNLTFKGKAKCFDSEEDALTAVLKNEIKAGDAVIIRYEGPKGGPGMREMLSQQVQYMG

SEQ ID NO: 180301 - protein, 281 aa, Unknown
  Bacterial polypetide isolated from the Sargasso Sea
KFDLMDVAKIFKKTPYLADLKPGGKYVAKDMWKAGGVPMLLKTLMDGGYIHGDCMTVTGKTLKENLKNVKFNKNQKVMRKYDNPLSPDGGVVGLKGNLAPEGAIVKVAGLKKLQFTGRARCFDTEEAAYKAVKNKKYKDGDIIIIRYEGPKGGPGMREMLQTTGAIYGQGKGEKVALITDGRFSGATRGFCIGHVGPEASVGGPIALLKNGDIIDLDAKKGTINVRLSKKELAARKKKWKPKKINFGNGTLWKYAQTVGPAYLGAPTHPGGKNEVKVYADI

SEQ ID NO: 180302 - protein, 278 aa, Unknown
  Bacterial polypetide isolated from the Sargasso Sea
AAPCNIALMRQAQSVKKGVKSNGGTPREFCTITVTDGIAMGHEGMKSSLISRDVIADSTELTVRGHCYDALVGVAGCDKSLPGLMMAMVRLNVPSVFIYGGSILPGRLNGKDVTVVDVFEGVGKYSSGKMSAHALRKLELKACPSSGACGGQFTANTMACVSEAIGLALPYSAGTPAPYEQRDKYAMLSGKAVMNLLKKNIRPRDIVTRKALENAATIVAATGGSTNAALHLPAIANEVGIKFDLMDVAKIFKKTPYLADLKPGGKYVAKDMWASWWG

SEQ ID NO: 180303 - protein, 231 aa, Unknown
  Bacterial polypetide isolated from the Sargasso Sea
MVRLNVPSVFIYGGSILPGKYKGKDVTVVDVFEAVGKHSSGQMSAKELRKLELVACPTAGACGGQFTANTMACVSEAIGLALPYSAGTPAPYEERDKYAKASGRMVMELLAKRIKPRDIVTRKALENAATIVAATGGSTNAALHLPAIANEAGIKFDLMDVAKIFKKTPYLADLKPGGKYVAKDMWLAGGVPMLLKTLYDGGYIHGDCMTVTGKTMKENLRGIKFNPKQKV

SEQ ID NO: 180304 - protein, 315 aa, Unknown
  Bacterial polypetide isolated from the Sargasso Sea
KGSNIKSRLPSRHVSVGQKSAPHRSMYYAMGMTEEQIYQPFVGVATTWNESAPCNITLGRQAQAVKKGVSKLNGTPREFTTITVTDGIAMGHEAMKASLVSREVIADSVELSVRGHCYDGIVGLAGCDKSLPGLMMAMVRLNIPSVFIYGGSILPGNYKGKDLTIIDVFEAVGKHASGEIDESELKNIEKVACPTAGSCGGQFTANTMACISEALGLALTNSAMTPATYEERDNYGFESGKAVMSLIENNIRPRDIVTLESLKNAAVVVAATGGSTNAALHLPAIANEAGIKFTLSDVVEIYQSTPYIGDMSPWW

SEQ ID NO: 180305 - protein, 224 aa, Unknown
  Bacterial polypetide isolated from the Sargasso Sea
SCFIGECMTVTGKTVRENLENVKPYEDGQKIVQSLDDPVRKTGHLVILRGNLAADGAVAKISGKEGEFFKGTARVFNSEEEALNSILDGTVVKGDVIVIRYEGPRGGPGMREMLSPTSAIMGRGLGNDVALITDGRFSGGSHGFVIGHITPEAFEGGLLGIVENGDKIKIDITKRTIDLELPENEIKRRQDRWVRPQARYTRGVLAKYAKSVSSASKGAVTDLV

SEQ ID NO: 180306 - protein, 300 aa, Unknown
  Bacterial polypetide isolated from the Sargasso Sea
CGGQFTANTMACVSEAIGLALPYSAGTPAPYEERDKYAKLSGKMVMELLAKKIKPRDIVTRKALENAATIVAATGGSTNAGLHLPAIANEAGIKFDLMDVAKIFKRTPYLADLKPGGKYVAKDMWLAGGVPMLLKTLYEGGFIHGDCMTVTGKTMKENLKKIKFNPKQKVMRSYKNPLSPTGGVVGLKGNLAPDGGIVKIAGLKKLQFTGRARCFDNEESAMKAVQSKKYKDGDVIIIRYEGPVGGPGMREMLSTTGAIYGQGKGEKVALITDGRFSGATRGFCVGHVGPEAAFGGPIAL

SEQ ID NO: 180307 - protein, 275 aa, Unknown
  Bacterial polypetide isolated from the Sargasso Sea
CNGQSMDGVLAVGGCDKNMPGAMLAMARMNIPAVFVYGGTIKPGKLGGCDLTVVSAFEAVGQLTSGNIDEEQLTAVEKNACPGAGSCGGMFTANTMSAAIETMGLSLPYSSTMAAEDEEKADSAARSAEVLVDAVKANIRPLDLLTNDAFENAISVIMAVGGSTNAVLHLLAIARTAGVSLSIDDFERIRQRVPVICDLKPSGRYVTVDLHNAGGIPQVMKLLLDAGLLHGDCRTVEGKSLRDLLADVPSQPPADQDVIRPLSNPLYAKGHLAIL

SEQ ID NO: 180308 - protein, 231 aa, Unknown
  Bacterial polypetide isolated from the Sargasso Sea
MKMLLDAGLLHGDCMTVTGKTLKQNLKGVRTYSKKQKIIRPLKDPVKATGHLVILKGNLARDGAVAKISGKEGEVFQGSARVFESEEEALQKILDGTVQKGDVIVIRYEGPKGSPGMREMLSPTGAIMGRGLGQDVALITDGRFSGGSHGFVIGHITPEAYEGGVIAVVRNGDPITINAKKRLINLDLPEEEITKRLEKWKQPKPRFIRGVLSKYAESVSSASLGAVTDRN

SEQ ID NO: 180309 - protein, 322 aa, Unknown
  Bacterial polypetide isolated from the Sargasso Sea
KKLPSRHTSLGPDRAPHRSFYYAMGETEKDVSKPFIGVVSTWNEAAPCNIALMRQAQSVKKGVRASGGTPREFCTITVTDGIAMGHEGMKSSLISREVIADSAELTVRGHCYDALVGIAGCDKSLPGLMMSMVRLNVPSVFIYGGSILPGKYKGKDVTVVDVFEAVGKHSSGQMSAKELRKLELVACPTAGACGGQFTANTMACVSEAIGLALPYSAGTPAPYEERDKYAKASGRMVMELLAKKIKPRDIVTRKALENAATIVAATGGSTNAALHLPAIANEAGIKFDLMDVAKIFKRTPYLADLKPGGKYVAKDMWWQEVS

SEQ ID NO: 180310 - protein, 238 aa, Unknown
  Bacterial polypetide isolated from the Sargasso Sea
GKPIIAVANSFTQFVPGHVHLKDLGQLVCREIEAAGGVAKEFNTIAVDDGIAMGHDGMLYSLPSREIIADSVEYMVNAHCADALVCISNCDKITPGMLMAAMRLNIPTIFVSGGPMEAGKTKLSEHKLDLVDAMVIAADPTATDEMVEEYERSACPTCGSCSGMFTANSMNCLTEAIGLALPGNGSMLATHADREQLFLKAGRQIVENARRYYEQNDASVLPRSIASVEAFENAMTMD

SEQ ID NO: 180311 - protein, 231 aa, Unknown
  Bacterial polypetide isolated from the Sargasso Sea
MKKKYSSAVTSGLDKAPNRAMLRAVGFTNPDFDKPMIGVASTWAMVTPCNMHINKLAEFASKGANRNGGKSIIFNTITVSDGISMGTPGMKYSLISREVIADSIETVTVAEGFDGIITIGGCDKNMPGCLIAMGRLNRPSIFVYGGSILPGIYKKKPVDVVSVFEAVGSYSNKTISKEELLKIEECAIPGPGSCGGMYTANTMASAIEALGMSLPGSSTQIAVSKKKEYDC

SEQ ID NO: 180312 - protein, 301 aa, Unknown
  Bacterial polypetide isolated from the Sargasso Sea
MRKFNKKKLPSRHTSLGPDRAPHRSFYYAMGETEKDVSKPFVGVVSTWNEAAPCNIALMRQAQSVKKGVRASGGTPREFCTITVTDGIAMGHEGMKSSLISREVIADSAELTVRGHCYDALVGIAGCDKSLPGLMMSMVRLNVPSVFIYGGSILPGKYKGKDVTVVDVFEAVGKHSSGQMSAKELRKLELVACPTAGACGGQFTANTMACVSEAIGLALPYSAGTPAPYEERDKYAKASGRMVMELLAKKIKPRDIVTRKALENAATIVAATGGSTNAALHLPAIANEAGIIFDLMDVQKY

SEQ ID NO: 180313 - protein, 225 aa, Unknown
  Bacterial polypetide isolated from the Sargasso Sea
MTTLNRYSARITQPRAQGASQAMLLGTGLTPEDLSKPQVGIASMWYEGNTCNMHLDTLAAAVRDGVVESGLVGMRFNTIGVSDGISMGTDGMSYSLPSRDIIADSIEIVMQAQWYDGLVAIPGCDKNMPGCLIAMGRLNRPALMVYGGTIKPGHLDDGTSLDIVSAFQCYGEYVAGRIDDSRRSDIVQRACPGAGACGGMYTANTMATAIEAMGMALPDTASIPA

SEQ ID NO: 180314 - protein, 267 aa, Unknown
  Bacterial polypetide isolated from the Sargasso Sea
DSTELTVRGHCYDALVGLAGCDKSLPGLMMSMVRLNIPSVFIYGGSILPGRFNGKDVTVVDVFEGVGKYTSKKMTAHALRKLELKACPSAGACGGQFTANTMACVSEAIGLALPFSAGTPAPYLERNKYAIDSGKAVMNLLAKNIRPRDIVTRKALENAATIVAATGGSTNAGLHLPAIANEIGIKFDLMDVAKIFRKTPYLADLKPGGKYVAKDMWEAGGVPMLLKTLMDGGYIHGDCMTVTGKTMRENLKNVKFRENQKVMRSYK

SEQ ID NO: 180315 - protein, 227 aa, Unknown
  Bacterial polypetide isolated from the Sargasso Sea
MLRGVGFETSDFSKSLVGIASTWSKVTPCNMHINELADLVESSIDSSGCKGVLFNTITVSDGISMGTQGMKFSLVSREVIADSIETVVGCLGYDGVIAIGGCDKNMPGALMGLARLDRPSIFIYGGSIRPSSINTDYVTVSEKVGEYAKGDITKDELIAIEEVSVVGPGSCGGMYTANTMASSIEALGMSLPGSSSQDAVSDDKKLDCQNAGEAIKHLLDLDLKPSD

SEQ ID NO: 180316 - protein, 267 aa, Unknown
  Bacterial polypetide isolated from the Sargasso Sea
KIFKRTPYLADLKPGGKYVAKDMWKAGGVPMLLKTLMDGGYIHGNCMTVTGKTMRENLKNVKFNNKQKVMRKYNNPLSPDGGVVGMKGNLAPEGAIVKVAGLKKLQFTGRARCFDTEEAAYKAVKNRKYKDGDIIIIRYEGPKGGPGMREMLQTTGAIYGQGKGEKVALITDGRFSGATRGFCIGHVGPEASVGGPIALLRNGDIIDLDAKKGTINVRLSKKELSKRRKKWKPKKINFGNGTLWKYAQTVGPAYLGAPTHPGVKKKE

SEQ ID NO: 180317 - protein, 259 aa, Unknown
  Bacterial polypetide isolated from the Sargasso Sea
GGQYVAKDVYEAGGVPIIIKTLYEGGYIHGECLTVTGNTISENLKSVEFNKNQKVIRPYDEPLSITGGVVGLKGNLAPEGAIVKVAGMENLKFKGNAKCFDCEEDAFECVKNENYKEGDVFVIRYEGPRGGPGMREMLATTAAIYGQGMGDKVALITDGRFSGATRGFCVGHISPEAAVCGPIALVEDGDEIILDAENGEISINVSMETLEMRKKSWKERKTDFNSGTLWKYSQTVGSAVKGAVTHPGAEKETHVYSDI

SEQ ID NO: 180318 - protein, 216 aa, Unknown
  Bacterial polypetide isolated from the Sargasso Sea
TIFVSGGPMEAGKGLVKGQEASLDLVDAMVLAADPSVSDEDVAKVERSACPTCGSCSGMFTANSMNCLVEALGLALPGNGSVLATHIDRKELFLRAGKIIVELTKQYYEKDDESVLPRNIANLESFENAMTLDIAMGGSTNTVLHILAAAKEAGLNFGMDDIDRLSRRVPNLCKVAPSSNFHMEDVHRAGGIMAILGELEKAKLLNSDNKTVHSET

SEQ ID NO: 180319 - protein, 295 aa, Unknown
  Bacterial polypetide isolated from the Sargasso Sea
AITVVIALGGSTNAVLHLLAMAHSIGVNLCLDDFTKIGKKTPVLADLKPFGKHYMSELNANGGIQPLMKNLLDRGLLHGKCMTVTGNTLEENLQAIKPYENNEIIKSFEDPIKEDSHLRILYGNLAEDGAVAKITGKEGTSFEGKAKVFNSEEEGVEAILSNKIIEGDVVVIRYEGPKGGPGMREMLKPTSAIMGLGLGNKIAFITDGRFSGGTHGFVVGHVSPEAADGGLIALIEDGDTILIDADNDQLILKVDVDEIAKRKSNWKNPIEGPKKGVLSKYAESVKSASLGAITD

SEQ ID NO: 180320 - protein, 111 aa, Unknown
  Bacterial polypetide isolated from the Sargasso Sea
MLRSNAITQGIQRSPNRAMLRAVGFDDNDFNKPIIGIANGHSTITPCNMGLMDLANRAESALKEAGAMPQTFGTITVSDGISMGTEGMKYSLVSREVIADSIETACNAQSH

SEQ ID NO: 180321 - protein, 218 aa, Unknown
  Bacterial polypetide isolated from the Sargasso Sea
ENLKNVKFKTNQKVMRKYNNPLSKTGGVVGLKGNLAPEGGIVKIAGLKKLQFTGKARCFNTEEDAYKAVKNRKYKDGDIIIIRYEGPKGGPGMREMLQTTAAIYGQGKGEKVALITDGRFSGATRGFCIGHVGPEASVGGPIALLRNGDVIDIDAQKGTINVRLSKKELSARRKKWKPKKMNFGNGTLWKYAQTVGPAYKGAPTHPGGKNEVRTYADI

SEQ ID NO: 180322 - protein, 259 aa, Unknown
  Bacterial polypetide isolated from the Sargasso Sea
IGKKTPVLANLKPFGKHYMSELNANGGIQPLMKTLLDKGLLHGQCMTVTGNTLEENLKDIKAYKTSEIIKDFNNPIKKDSHLRILYGNLAKDGAVAKITGKEGTSFEGKAKVFNSEEEGVSAILSNQINDGDVIVIRYEGPKGGPGMREMLKPTSAIMGLGLGDKIGFITDGRFSGGTHGFVVGHVSPEAAEGGLIALVEDGDTILIDAESDQLVLKVDDDEIKRRQSIWKNPNSKPKKGVLAKYAESVKSASLGAITD

SEQ ID NO: 180323 - protein, 314 aa, Unknown
  Bacterial polypetide isolated from the Sargasso Sea
ELTVRGHCYDALVGIAGCDKSLPGLMMSMVRLNVPSVFIYGGSILPGTYKGKDVTVVDVFEAVGKHSSGQMSAKELRKLELVACPTAGACGGQFTANTMACVSEAIGLALPYSAGTPAPYEERDKYAKASGRMVMELLAKKIKPRDIVTRKALENAATIVAATGGSTNAALHLPAIANEAGIKFDLMDVAKIFKRTPYLADLKPGGKYVAKDMWLAGGVPMLLKTLYDGGYIHGDCMTVTGKTMKENLKGIKFNPKQKVLRAYNRPLSPDGGVVGLKGNLAPEGAIVKIAGLKKLQFTGKSRCFDNEESAMKAV

SEQ ID NO: 180324 - protein, 300 aa, Unknown
  Bacterial polypetide isolated from the Sargasso Sea
CWCVSTWNESAPATFTLQDQAQHVKTGVKDAGGTPREFTTITVTDGIAMGHEAMKSSLISREVIADSIELSVRGHCYDAIVGLAGCDKSLPGLMMAMVRLNVPSVFIYGGSILPGKYKGKDVTVIDVFEAVGKHAAGTISDQDLKDIEQVACPSAGSCGGQFTANTMACISEAVGLALTNSSMPPAVNTEERKAYGEKSGKAIMNLLEKNIRPRDIVTIDSLVNAARVVAATGGSTNAALHLPAIANEAGLKFTLRDVVEIYNSTPYIGDMQPGGKYVAKDLYDVGGVPVVIKSLLDGGY

SEQ ID NO: 180325 - protein, 191 aa, Unknown
  Bacterial polypetide isolated from the Sargasso Sea
VVGLKGNLAPDGAIVKVAGMENLKFKGKAICFDCEEDAFECVKNNNYSEGDVFVIRYEGPKGGPGMREMLSTTAAIYGQGMGDKVALITDGRFSGATRGFCVGHVSPEAAVCGTIALVQDGDEIILDAEIGEIQLNVPENVLEERKSKWKERVTDFNSGTLWKYSKTVGSASSGAVTHPGAKEETHTYADI

SEQ ID NO: 180326 - protein, 155 aa, Unknown
  Bacterial polypetide isolated from the Sargasso Sea
TLEGTARVFESEEDALEKILNGTVIKGDVIVIRYEGPKGGPGMREMLSPTSAVMGKGLGKDVALITDGRFSGGSHGFVVGHITPEAYEGGLLAIVQDGDPIIIDATTKEINLCIDENEIKKRQATWTQPKPRYRKGVLAKYAKCVQSASLGAITD

SEQ ID NO: 180327 - protein, 298 aa, Unknown
  Bacterial polypetide isolated from the Sargasso Sea
SLYINLMKQAQSVKKGVKASGGTPREFCTITVTDGIAMGHEGMKSSLISRDVIADSTELTVRGHCYDALVGLAGCDKSLPGLMMSMVRLNIPSVFIYGGSILPGRFNGKDVTVVDVFEGVGKYTSKKMTAHALRKLELKACPSAGACGGQFTANTMACVSEAIGLALPFSAGTPAPYLERNKYAIDSGKAVMNLLAKNIRPRDIVTRKALENAATIVAATGGSTNAGLHLPAIANEIGIKFDLMDVAKIFKKTPYLADLKPGGKYVAKDMWEAGGVPMLLKTLMDGGYIHGDCMTVTG

SEQ ID NO: 180328 - protein, 278 aa, Unknown
  Bacterial polypetide isolated from the Sargasso Sea
TPREFCTITVTDGIAMGHEGMKSSLISRDVIADSTELTVRGHCYDALVGVAGCDKSLPGLMMAMVRLNVPSVFIYGGSILPGRLNGKDITVVDVFEGVGKYSSGKISEHALRKIELKACPTAGACGGQFTANTMACVSEAMGLALPYSAGTPAPFNRRDKYALASGKAVMNLLAKNIRPRDIVTKKALENAATIVAATGGSTNAALHLPAIANEIGIKFDLMDVARIFKRTPYLADLKPGGKYVAKDMWKAGGVPMLLKTFMDGGYIHGNCMTVTGKT

SEQ ID NO: 180329 - protein, 216 aa, Unknown
  Bacterial polypetide isolated from the Sargasso Sea
CLTVTGKTIKENLKNVESFDFNQDIIRPIDNPIKTSGHIRILYGNLASEGSVAKITGKEGVVFKGKANVFNCEDDANDAIKSNSISKGDVIVIRYEGPVGGPGMPEMLKPTSAIMGAGLGNDVALITDGRFSGGTHGFVVGHISPEAAKGGVLALVKNGDEIVIDAEKNEINVNIDKKELIIRKKLWVKPDLKFKSGILYKYSKLVSSASSGCVTD

SEQ ID NO: 180330 - protein, 276 aa, Unknown
  Bacterial polypetide isolated from the Sargasso Sea
IENAIAVIMATGGSTNAVLHFLAIANAAEVRWNIDDFERVRRKVPVICDLKPSGQYVTTDLHKAGGIPKVMKILFDEGLIYGDCMTVTGKTVEETLVDIDSKNTEDRIIRNFNEPLYKEGHLAILKGNLAVDGCVAKISGVKNPYIDGPARVFDSEELAMEAIIKRQIKAGDVVVIRYEGPKGGPGMREMLAPTSALVGQGLGESVALITDGRFSGGTWGMVVGHICPEAYVGGNIAFIKDGDRIVIDAHQKTINVKLSEKEIDARKVYWHPPQKK

SEQ ID NO: 180331 - protein, 262 aa, Unknown
  Bacterial polypetide isolated from the Sargasso Sea
MPDYRSKTSTHGRNMAGARALWRATGMKDDDFKKPIIAIANSFTQFVPGHVHLKDLGQLVAREIERAGGVAKEFNTIAVDDGIAMGHDGMLYSLPSREIIADSVEYMVNAHCADAIVCISNCDKITPGMLMAALRLNIPVIFVSGGPMEAGKTKLASHGLDLVDAMVIAADSSASDEKVAEYERSACPTCGSCSGMFTANSMNCLVEALGLALPGNGSTLATHGDREQLFLQAGRTIVELCKRYYGENDESVLPRNIANFQG

SEQ ID NO: 180332 - protein, 215 aa, Unknown
  Bacterial polypetide isolated from the Sargasso Sea
MNKLRSSAITQGVQRSPNRSMLRAVGFNDEDFNKPIIGIANGYSTITPCNIGLNKLALKAEESVKRSGGMPQMFGTITVSDGISMGTEGMKYSLVSREVIADSIETACNAQSMDGVLAIGGCDKNMPGAMIAIARMNIPSIFIYGGTIKPGKLHGEDLTVVSAFEAVGQLTSGKINEERLIQVEKNCIPGAGSCGGMFTANTMSAVIEVLGLSLP

SEQ ID NO: 180333 - protein, 281 aa, Unknown
  Bacterial polypetide isolated from the Sargasso Sea
MLAMARMNIPSVFVYGGTIKPGKLGGCDLTVVSAFEAVGQLTSGKIDEAQLTAVEKNACPGAGSCGGMFTANTMSAAIETMGLSLPYSSTMAAEDEEKADSAARSAEVLVEAVKANIRPLDLLTKEAFENAISVIMAVGGSTNAVLHLLAIARTAGVDLSIDDFERIRQRVPVICDLKPSGRYVTVDLHNAGGIPQVMKLLLDAGLLHGNCRTVEGKSLKELLADVPGEPPTGQDVIRPLSDPMYAKGHLAILKGNLAIEGSVAKISGVKTPVLTGPARVF

SEQ ID NO: 180334 - protein, 211 aa, Unknown
  Bacterial polypetide isolated from the Sargasso Sea
TISEYLQNIPDKPPSNQNVIRDIDDPLYKKGHLAILKGNLASEGSVAKISGVKNPVLTGPAKIFESEEECLKSILNNDIKAGDVVVIRNEGPVGGPGMREMLAPTSAIVGQGLGEKVALITDGRFSGGTYGLVVGHIAPEAAVGGNIALIKQGDLITVDAVKQLIEVDLSDEELEKRKKDWVKPTQKYKRGILSKYSRIVSTSSLGAVTDL

SEQ ID NO: 180335 - protein, 307 aa, Unknown
  Bacterial polypetide isolated from the Sargasso Sea
ICNDKGYIMAKFNKKKLPSRHTSLGPDRAPHRSFYYAMGETEKDVAKPFVGVVSTWNEAAPCNIALMRQAQSVKKGVRANGGTPREFCTITVTDGIAMGHEGMKSSLISREVIADSAELTVRGHCYDALVGIAGCDKSLPGLMMSMVRLNVPSVFIYGGSILPGTYKGKDVTVVDVFEAVGKHSSGQMSASELRKLELVACPSAGACGGQFTANTMACVSEAIGLALPYSAGTPAPYEERDKYAKASGKMVMNLLQKKIKPRDIVTRKALENAATIVAATGGSTNAGLHLPAIANEAGIKFDLMDVQ

SEQ ID NO: 180336 - protein, 308 aa, Unknown
  Bacterial polypetide isolated from the Sargasso Sea
FNTIGVDDGIAMGHIGMRYSLASRELIADSVETVAESHRLDGLVCISNCDKIVPGMLMAALRVNIPTIFVSGGPMKAGVNQQGQKVDLISVFEGVGKFKAGSIDEIALNDLEKNGCPTCGSCSGMFTANSMNCLMEALGLALPGNGTILAVDPARLDLVDKTGKAIMDLVKNNLKPRDIVNQKTILNAFALDMAMGGSTNTVLHTLAAAIEAGLNFNLEELNSLSRKTPYLCKVSPATPDVHMEDVFDAGGISVILKELSKKEGLLDLNRPTVSGQTLGENIANARNNNSKVIRSVDNPFSEEGGLAV

SEQ ID NO: 180337 - protein, 357 aa, Unknown
  Bacterial polypetide isolated from the Sargasso Sea
MHAQVRGACGGMYTANTMATAIEAMGMALPDTASIPAEDEAKIAECRRAGAALLHLLELDIKPRDIMTRAAFENAMVVIMALGGSTNAVLHLIAMARSVGVTLEPDDFQAVSRRIPYLADLKPSGKFVQEDLHSIGGTSGLMKYLLDKGLLEGDCLTVTGKTLAENLAGSKGLAEGQRIIQPVEDPIKPTGHITILTGNLAPGTAVAKITGKEGSRFSGPARVFDSEEDMLTALENGGIHRGDVVIIRYEGPKGGPGMPEMLTPTSALMGAGLGADVALITDGRFSGGSHGFIVGHVVPEAFDGGPIALVENGDVITIDAEKAAIDVDVSATELADRKSRWQQPSPKSDRGIWQNIF

SEQ ID NO: 180338 - protein, 302 aa, Unknown
  Bacterial polypetide isolated from the Sargasso Sea
MTEEDVRELECVACPSAGSCGGQFTANTMATVSEAIGLAIPGSAGAPAPYESRDEYAYKSGIEVMNLVENNLRPRDIVTIKSLENAATVVAASGGSTNAALHLPAIANEAGIDFDLHDVAKIFKKTPYIADLKPGGKYVAKDMFEVGGVPILMKTLLDGGYLHGDCITVTGKTIEENLKGVVFPNNQDVIYPVSKPISPTGGVVGLKGNLAPKGAIVKVAGMRNLIFTGPARVFDSEDDCFQAVQEKKYKLGEVLVIRYEGPKGGPGMREMLATTAALYGQGVGEEVALITDGRFSGGTRGF

SEQ ID NO: 180339 - protein, 249 aa, Unknown
  Bacterial polypetide isolated from the Sargasso Sea
GIRQRVPVICDLKPSGRYVTVDLHNAGGIPQVMKLLLDAGLLHGDCRTVEGKSLREVLADVPSVPPADQDVIRPLSNPLYAKGHLAILKGNLASEGSVAKISGVKTPVLTGPARVFESEEDCLAAILDQRIKAGDVVVVRNEGPVGGPGMREMLAPTSAIVGQGLGDKVALITDGRFSGGTYGLVVGHVAPEAAVGGTIGLVQEGDSITVDADQLLLQLNVDEAELARRREAWSKPEPRYRTGILGKYA

SEQ ID NO: 180340 - protein, 316 aa, Unknown
  Bacterial polypetide isolated from the Sargasso Sea
MLMGETEKDVSKPFVGVVSTWNEAAPCNIALMRQAQSVKKGVRANGGTPREFCTITVTDGIAMGHEGMKSSLISREVIADSAELTVRGHCYDALVGIAGCDKSLPGLMMSMVRLNVPSVFIYGGSILPGKYKGKDVTVVDVFEAVGKHSTGQMSAAELRKLELVACPSAGACGGQFTANTMACVSEAIGLALPYSAGTPAPYEERDKYAKASGKTVMNLLKKGIKPRDIVTRKALENAATVVAATGGSTNAGLHLPAIANEAGIKFDLMDVAKIFKRTPYLADLKPGGKYVAKDMWVAGGVQMLLKTLYEGGYIHG

SEQ ID NO: 180341 - protein, 257 aa, Unknown
  Bacterial polypetide isolated from the Sargasso Sea
MNSFFGNLKPSGKYLMEDLHEIGGVPAVMKFMMDNGLLHEDCLTVTGKTIKENLKNIESFDFNQDIIRPIDNPIKASGHIRILYGNLASEGSVAKITGKEGLVFKGKANVFNCEDDANDAIKSNSISKGDVIVIRYEGPVGGPGMPEMLKPTSAIMGAGLGNDVALITDGRFSGGTHGFVVGHISPEAAKGGVLALVKNGDEIVIDAEKNEINVNINKKELEIRKKLWVKPDLKFKSGILYKYSKLVSSASSGCVTD

SEQ ID NO: 180342 - protein, 218 aa, Unknown
  Bacterial polypetide isolated from the Sargasso Sea
DCLTVTGKTLAENLAGSKGLAEGQKIIQPVENPIKPTGHITILTGNLAPGTAVAKITGKEGSRFSGPAKVFDSEEEMLAALESGGIHRGDVVIIRYEGPKGGPGMPEMLTPTSALMGAGLGADVALITDGRFSGGSHGFIVGHVVPEAFDGGPIALVHDGDVITMDAEKATIDVDVSEVELAERKSRWEQPNPKCDRGILAKYIRCVAPASQGCVTDE

SEQ ID NO: 180343 - protein, 270 aa, Unknown
  Bacterial polypetide isolated from the Sargasso Sea
AAVVVAASGGSTNAALHLPAIANEAGIKFTLEDVTNISKKTPYIADLKPGGKYVAKDLYEIGGVPVLIKALLDGGFLHEDCMTVSGKTIAENHKHVVFPTNQTVIYKTSKPLSPRGGFVGLKGNLAPEGAIVKVAGMKRRKFIGKAKCFDGEPAALDAVLNRKIKSGDVIVIRYEGPRGSPGMPEMLSTTGAIYGQGLGEEVALITDGRFSGGTHGFSIGHVGPEAASGGPIALIKNGDVIEIDADKGSLKVNLSKAEFNQRKKKWKPKK

SEQ ID NO: 180344 - protein, 247 aa, Unknown
  Bacterial polypetide isolated from the Sargasso Sea
MEKVACPGEGACSGMFTANTMASAIEAMGMAIPGASSIPAVDPRNEEVALKSGEYLLDLLKNDIKPRDIMTKNAFENAITAVLAMGGSTNAVLHLLAMAHESEVDLDIEDFNRLSDKTPYITDLRPGGKYVMSDVDKSGGVPVILKELLDAGLLHGDELTITGKTMAENLSEVTTKPDSKVIYPHTSPRSDTGGLIILKGNLAPEGAVFKVAGTKHVEHKGPAKVYNGEREAFNAITSGEVVDGDVV

SEQ ID NO: 180345 - protein, 149 aa, Unknown
  Bacterial polypetide isolated from the Sargasso Sea
KNRKYKDGDIIIIRYEGPKGGPGMREMLQTTGAIYGQGKGEKVALITDGRFSGATRGFCIGHVGPEASVGGPIALLRNGDIIDLDAKKGTINVRLTKKELAKRRKKWKPKKINFGNGTLWKYAQTVGPAYLGAPTHPGGKNEVKTYADI

SEQ ID NO: 180346 - protein, 299 aa, Unknown
  Bacterial polypetide isolated from the Sargasso Sea
TVTDGIAMGHEGMKSSLISREVIADSAELTVRGHCYDALVGIAGCDKSLPGLMMSMVRLNVPSVFIYGGSILPGKYKGKDVTVVDVFEAVGKHSTGQMSAAELRKLELVACPSAGACGGQFTANTMACVSEAIGLALPYSAGTPAPYEERDKYAKASGKTVMNLLKKGIKPRDIVTRKALENAATVVAATGGSTNAGLHLPAIANEAGIKFDLMDVAKIFKRTPYLADLKPGGKYVAKDMWLAGGVPMLLKTLYEGGYIHGDCMTVTGKTIKGNLKGIKFNPKQKVMRSYKNPLSPTGG

SEQ ID NO: 180347 - protein, 264 aa, Unknown
  Bacterial polypetide isolated from the Sargasso Sea
VGIAGCDKSLPGLMMSMVRLNVPSVFIYGGSILPGKYKGKDVTVVDVFEAVGKHSSGQMSAEELRKLELVACPTAGACGGQFTANTMACVSEAIGLALPYSAGTPAPYEERDKYAKASGRMVMELLAKRIKPRDIVTRKSLENAATIVAATGGSTNAALHLPAIANEAGIKFDLMDVAKIFKKTPYLADLKPGGKYVAKDMWLAGGVPMLLKTLSDGGYIHGDCMTVTGKTMKENLKGIKFNPKQKVLRAYNKPLSPDGGVVGL

SEQ ID NO: 180348 - protein, 198 aa, Unknown
  Bacterial polypetide isolated from the Sargasso Sea
PLSPDGGVVGMKGNLAPEGAIVKVAGLKRLQFTGRARCFDTEEAAYKAVKNRKYKDGDIIIIRYEGPKGGPGMREMLQTTGAIYGQGKGEKVALITDGRFSGATRGFCIGHVGPEASVGGPIALLRNGDIIDLDAKKGTINVRLSKKELAKRRKKWKPKKINFGNGTLWKYAQTVGPAYLGAPTHPGGKNEVKTYADI

SEQ ID NO: 180349 - protein, 262 aa, Unknown
  Bacterial polypetide isolated from the Sargasso Sea
VSDADTDEIERSACPTCGSCSGMFTANSMNCLTEALGLSLPGNGSMLATHADREGLFKQAGKQIVELCKRYYGDDDESVLPRNIANFKAFENAMSLDIAMGGSTNTILHLLAAAMEGEVPFTMDDIDRLSRKVPHLCKVAPSTPKYHMEDVHRAGGVLGILNELNKAGLLNTDVNHVLGKPLTDVISEWDITNPENKDAITFYRAGPAGIRTTKAFSQDCRWDEADDDRENGCIRSIENAFSQEGGLAVLYGNLAEDGCIVK

SEQ ID NO: 180350 - protein, 63 aa, Unknown
  Bacterial polypetide isolated from the Sargasso Sea
RKAQGMPLTFGTITVSDGISMGTEGMKYSLVSREVIADSIETVVGCQSYDGIVTIGGCDKNMP

SEQ ID NO: 180351 - protein, 282 aa, Unknown
  Bacterial polypetide isolated from the Sargasso Sea
VNSSGGTPREFCTITVTDGIAMGHEGMKSSLISRDVIADSTELTVRGHCYDALVGLAGCDKSLPGLMMSMVRLNIPSVFIYGGSILPGRFEGKDVTVVDVFEGVGKYTSKKMTAHALRKLELKACPSAGACGGQFTANTMACVSEAIGLALPYSAGTPAPYKERHKYAINSGKAVMKLLEKNIRPRDIVTRKALENAATVVAATGGSTNAGLHLPAIANEIGIKFDLMDVAKIFKRTPYLADLKPGGKYVAKDMWEAGGVPMLLKTLYDGGYIHGDCMTVTG

SEQ ID NO: 180352 - protein, 267 aa, Unknown
  Bacterial polypetide isolated from the Sargasso Sea
RDVIADSTELTVRGHCYDALVGLAGCDKSLPGLMMSMVRLNIPSVFIYGGSILPGRFNGKDVTVVDVFEGVGKYTSKKMTAHALRKLELKACPSAGACGGQFTANTMACVSEAIGLALPYSAGTPAPYKERDKYAVDSGKAVMNLLAKNIRPRDIVTRKSLENAATIVAATGGSTNAGLHLPAIANEIGIKFDLMDVAKIFKKTPYLADLKPGGKYVAKDMWLAGGVPMLLKTLYDGGFIHGDCMTVTGKTMKENLKNVKFNPNQKV

SEQ ID NO: 180353 - protein, 320 aa, Unknown
  Bacterial polypetide isolated from the Sargasso Sea
KKKLPSRHTSLGADRAPHRSFYYAMGETEKDVAKPFVGVVSTWNEAAPCNIALMRQAQSVKKGVRANGGTPREFCTITVTDGIAMGHEGMKSSLISREVIADSAELTVRGHCYDALVGIAGCDKSLPGLMMSMVRLNVPSVFIYGGSILPGRYKGKDVTVVDVFEAVGKHSSGQMSAAELRKLELVACPSAGACGGQFTANTMACVSEAIGLALPYSAGTPAPYEERDKYAKASGKMVMNLLKKGIKPRDIVTKKALENAATVVAATGGSTNAGLHLPAIANEAGIKFDLMDVAKIFKRTPYLADLKPRRKNMLQKIYVV

SEQ ID NO: 180354 - protein, 201 aa, Unknown
  Bacterial polypetide isolated from the Sargasso Sea
EHAYSADGGLAVLYGNLAEDGCVVKTAGVDEANLVFTGRAHVVESQDEAVDHILNDKVTEGSVVVVRYEGPRGGPGMQEMLYPTSYLKSKGLGKACALLTDGRFSGGTSGLSIGHVSPEAAAGGTIGLVRDGDIIQIDIPNRSIHLQVDDDLLAERRKFQDELGWKPEMQRPRKVSAALKAYGLMATSADKGAVRDLSAFL

SEQ ID NO: 180355 - protein, 272 aa, Unknown
  Bacterial polypetide isolated from the Sargasso Sea
MRKYSSQIVDGKDRSPSRSMLRAVGFKDKDFKLPQIGVASTWSMVTPCNMHIDELAKLSAKALDKNGGKSIIFNTITISDGISMGTEGMKYSLVSREVIADSIETVMGCEGLDGLIAIGGCDKNMPACIIAMARLNRPSIFIYGGTILPGVHKSKKIDIVSVFEAVGKNANNEISNQELTQIEKKAIPGPGSCGGMYTANTMACAIEALGMSLTNSSAQAAISSEKKIDCRESAKALMRCVRKDIKPRDIINKKSIENAITVVMALGGSTNA

SEQ ID NO: 180356 - protein, 193 aa, Unknown
  Bacterial polypetide isolated from the Sargasso Sea
VIRDIDDPLYKKGHLAILKGNLAREGSVAKISGVKNPVLTGPAKIFESEEDCLKSILNNDIKAGDVVVIRNEGPVGGPGMREMLAPTSAIVGQGLGEKVALITDGRFSGGTYGLVVGHIAPEAAVGGNIALIKQGDLITVDAVKQLIEVDLSDEELEKRKKDWVKPIQKYKRGILSKYSRIVSTSSLGAVTDL

SEQ ID NO: 180357 - protein, 264 aa, Unknown
  Bacterial polypetide isolated from the Sargasso Sea
AVDDGIAMGHGGMLYSLPSRELIADSVEYMVNAHCADAMVCISNCDKITPGMLMASLRLNIPVIFVSGGPMEAGKTKLSDQIIKLDLVDAMIQGADPKVSDSQSEQVERSACPTCGSCSGMFTANSMNCLTEALGLSQPGNGSLLATHADRKTLFLNAGKRIVELTKRYYEQDDDSALPRNIASKAAFENAMTLDIAMGGSTNTVLHLLAAAQEAEIDFTMSDIDKLSRKVPQLCKVAPSTQKYHMEDVHRAGGVLGILGELDR

SEQ ID NO: 180358 - protein, 221 aa, Unknown
  Bacterial polypetide isolated from the Sargasso Sea
MGECKNIEGKTISEYLQNVPDKPPTNQNVIRAIDDPIYKKGHLAILKGNLASEGSVAKISGVKNPVLTGPAKIFESEEDCLKSILNNDIKAGDVVVIRNEGPVGGPGMREMLAPTSAIVGQGLGEKVALITDGRFSGGTYGLVVGHIAPEAAVGGNIALIKQGDLITVDAVKKLIEVDLSEEELEKRKKDWVKPTQKYKRGILSKYSRIVSTSSLGAVTDL

SEQ ID NO: 180359 - protein, 292 aa, Unknown
  Bacterial polypetide isolated from the Sargasso Sea
MNKFNKKKLPSRHTSLGPDKAPQRSFYYAMNLTEKDVAKPFVGVVSTWNEAAPCNIALMRQAQSVKKGVKKKGGTPREFCTITVTDGIAMGHEGMKSSLVSRDIIADSTELTVRGHCYDALVGVAGCDKSLPGLMMAMVRLNVPSVFIYGGSILPGRFNGKDVTVVDVFEGVGKYSSGKMTAHALRKLELRACPSAGACGGQFTANTMACVSEAIGLALPYSAGTPAPYEQRDRYALLSGEAVMNLLKKNIRPRDIVTKKALENAATIVAATGGSTNAALHLPAIANEVGIK

SEQ ID NO: 180360 - protein, 289 aa, Unknown
  Bacterial polypetide isolated from the Sargasso Sea
AMGHEGMKSSLISREVIADSAELTVRGHCYDALVGIAGCDKSLPGLMMSMVRLNVPSVFIYGGSILPGRYKGKDVTVVDVFEAVGKHSSGQMSAAELRKLELVACPSAGACGGQFTANTMACVSEAIGLALPYSAGTPAPYEERDKYAKASGKMVMNLLKKGIKPRDIVTKKALENAATVVAATGGSTNAGLHLPAIANEAGIKFDLMDVARIFKRTPYLADLKPGGKYVAKDMWLAGGVPMLLKTLYEGGYIHGDCITVTGKTMKENLKSIKFNPKQQVMRSYKNPLS

SEQ ID NO: 180361 - protein, 194 aa, Unknown
  Bacterial polypetide isolated from the Sargasso Sea
DGGVVGLKGNLAPDGAIVKVAGLKKLQFTGRARCFDTEESAYKAVLKRKYRDGDIIVIRYEGPKGGPGMREMLQTTGAIYGQGKGEKVALITDGRFSGATRGFCIGHVGPEASIGGPIGLLKNGDIIHIDAKKGTINVNLTKKELAKRKRKWKPKKINFGNGTLWKYAQTVGPAYLGASTHPGGKNEVKCYADI

SEQ ID NO: 180362 - protein, 130 aa, Unknown
  Bacterial polypetide isolated from the Sargasso Sea
MLRSDAVTKGIQRSPNRAMLRAVGFGDSDFGKPILGIANGYSTITPCNVGLNDLAKRAEEAARQAGGMPQMFGTITVSDGISMGTEGMKYSLVSREVIADAIETACNGQSMDGVLAVGGCDKNMPGAMLA

SEQ ID NO: 180363 - protein, 273 aa, Unknown
  Bacterial polypetide isolated from the Sargasso Sea
YAMDLTEKDVAKPFVGVVSTWNEAAPCNIALMRQAQSVKKGVKSNGGTPREFCTITVTDGIAMGHEGMKSSLISRDVIADSTELTVRGHCYDALVGVAGCDKSLPGLMMAMVRLNVPSVFIYGGSILPGRFNGKDVTVVDVFEGVGKYSSGKMSAHALRKLELKACPSSGACGGQFTANTMACVSEAIGLALPYSAGTPAPYEQRDKYAMLSGKAVMNLLKKNIRPRDIVTRKALENAATIVAATGGSTNAALHLPAIANEVGIKFDLMDVAK

SEQ ID NO: 180364 - protein, 197 aa, Unknown
  Bacterial polypetide isolated from the Sargasso Sea
MKKKPIRSGHRRYSKLVTETNARAASRGMLYGVGFKKDDFKKSQVGIASTWGNVTPCNMHINDLAEHTARGVRKARGMPLIFGTITVSDGISMGTQGMKYSLVSREVIADSIETVVGCQCYDGLVAIGGCDKNMPGCLIAIARLNRPAVFVYGGTILPGKYKGNDVDIVSIFEAVGKEAAGKISQSELEEVESCAIP

SEQ ID NO: 180365 - protein, 249 aa, Unknown
  Bacterial polypetide isolated from the Sargasso Sea
AELTVRGHCYDALVGIAGCDKSLPGLMMSMVRLNVPSVFIYGGSILPGRYKGKDVTVVDVFEAVGKHSSGQMSAKELRKLELVACPSAGACGGQFTANTMACVSEAIGLALPYSAGTPAPYEERDKYAKNSGKMVMELLAKKIKPRDIVTKKALENAATIVAATGGSTNAALHLPAIANEAGIKFDLMDVAKIFKKTPYLADLKPGGKYVAKDMWLAGGVPMLLKTLYDGGYIHGECMTVTGKTMKENL

SEQ ID NO: 180366 - protein, 310 aa, Unknown
  Bacterial polypetide isolated from the Sargasso Sea
GHCYDALVGIAGCDKSLPGLMMSMVRLNVPSVFIYGGSILPGKYRGKDVTVVDVFEAVGKHSTGQMSAAELRKLELVACPSAGACGGQFTANTMACVSEAIGLALPYSAGTPAPYEERDKYAKASGKTVMNLLKKGIKPRDIVTRKALENAATVVAATGGSTNAGLHLPAIANEAGIKFDLMDVAKIFKRTPYLADLKPGGKYVAKDMWLAGGVPMLLKTLYEGGYIHGDCMTVTGKTMKENLKGIKFNPKQKVMRSYKNPLSTTGGVVGLKGNLAPEGAIVKVAGLKKLQFTGKARCFENEESAMKAVQ

SEQ ID NO: 180367 - protein, 212 aa, Unknown
  Bacterial polypetide isolated from the Sargasso Sea
KTISEYLQNIPDKPPTNQNVIRDIDNPLYKKGHLAILKGNLASEGSVAKISGVKNPVLTGPAKIFESEEDCLKSILNNDIKAGDVVVIRNEGPVGGPGMREMLAPTSAIVGQGLGEKVALITDGRFSGGTYGLVVGHIAPEAAVGGNIALIKEGDLITVDAVKQLIEVNLSDEELEKRKKDWVKPTPKYKRGILSKYSKIVSTSSLGAVTDL

SEQ ID NO: 180368 - protein, 282 aa, Unknown
  Bacterial polypetide isolated from the Sargasso Sea
NELTEKDVAKPFVGVVSTWNEAAPCNIALMRQAQSVKKGVQLSGGTPREFCTITVTDGIAMGHEGMKSSLISRDVIADSTELTVRGHCYDALVGVAGCDKSLPGLMMAMVRLNVPSVFIYGGSILPGRLNGKDITVVDVFEGVGKYSSGKISEHALRKLELKACPTAGACGGQFTANTMACVSEAIGLALPYSAGTPAPFNRRDKYALASGKAVMNLLAKNIRPRDIVTKKALENAATIVAATGGSTNAALHLPAIANEIGIKFDLMDVAKIFKRTPYLADL

SEQ ID NO: 180369 - protein, 268 aa, Unknown
  Bacterial polypetide isolated from the Sargasso Sea
FIYGGSILPGRFNGKDVTVVDVFEGVGKYTSKKMTAHALRKLELKACPSAGACGGQFTANTMACVSEAIGLALPFSAGTPAPYLERNKYAIDSGKAVMNLLAKNIRPRDIVTRKALENAATIVAATGGSTNAGLHLPAIANEIGIKFDLMDVAKIFKKTPYLADLKPGGKYVAKDMWEAGGVPMLLKTLMDGGYIHGDCMTVTGKTMRENLKNVKFRTNQKVMRSYKNPISPTGGVVGLKGNLAPEGGIVKIAGLKKLQFTGRARCFD

SEQ ID NO: 180370 - protein, 278 aa, Unknown
  Bacterial polypetide isolated from the Sargasso Sea
QLSGGTPREFCTITVTDGIAMGHEGMKSSLISRDVIADSTELTVRGHCYDALVGVAGCDKSLPGLMMAMVRLNVPSVFIYGGSILPGRLNGKDITVVDVFEGVGKYSSGKISEHALRKLELKACPTAGACGGQFTANTMACVSEAMGLALPYSAGTPAPFNRRDKYALASGKAVMNLLAKNIRPRDIVTKKALENAATIVAATGGSTNAALHLPAIANEIGIKFDLMDVAKIFKRTPYLADLKPGGKYVAKDMWKAGGVHMLLKTLMDGGYIHGNCMT

SEQ ID NO: 180371 - protein, 239 aa, Unknown
  Bacterial polypetide isolated from the Sargasso Sea
ADLKPGGKYVAKDMWLAGGVPMLLKTLYEGGYIHGDCMTVTGKTMKENLKGIKFNPKQKVMRSYKNPLSQTGGVVGLKGNLAPEGAIVKVAGLKKLQFTGKARCFENEESAMKAVQSKKYNDGDVIIIRYEGPVGGPGMREMLSTTSAIYGQGKGEKVALITDGRFSGATRGFCVGHVGPEAALGGPIGLLRTGDIIDIDAKKGTINVRLSKKELAARKRKWKARKSDFGSGTLWKYAQ

SEQ ID NO: 180372 - protein, 253 aa, Unknown
  Bacterial polypetide isolated from the Sargasso Sea
LDEKTKISKSIINLIKQDIKPSDILSKKSIENAVRLITILGGSTNAVLHILAICKTANIDFKIDDFQRISDETPFLANLKPSGKYLMEDLHEIGGVPAVMKFMMDNGLLHEDCLTVTGKTIKENLKNVESFDFNQDIIRPIDNPIKTSGHIRILYGNLASEGSVAKITGKEGVVFKGKANVFNCEDDANDAIKSNSISKGDVIVIRYEGPVGGPGMPEMLKPTSAIMGAGLGNDVALITDGRFSGGTHGFVVG

SEQ ID NO: 180373 - protein, 265 aa, Unknown
  Bacterial polypetide isolated from the Sargasso Sea
DFTRIGKKTPVLADLKPSGKYTMSKLVEIGGILPLMKRLLDRGYLHGDCLTVTGKTLAENLASFPDYPEDQEVIKSFNDPIKKSGHLVICYGNIAPEGAVAKISGKEGTEFTGNAKVFESEETALTAILEDKITKGDVIVIRYEGPKGGPGMREMLSPTSAVMGKGLGQDVALITDGRFSGGTHGFVVGHITPEAYSGGPIAIIEDGDEITINTETQEVNIAISTEEIKNRLQDWKQPSPNYRRGVLSKYAKLVTSASEGAITDK

SEQ ID NO: 180374 - protein, 276 aa, Unknown
  Bacterial polypetide isolated from the Sargasso Sea
RGHCYDALVGLAGCDKSLPGLMMSMVRLNIPSVFIYGGSILPGRFNGKDVTVVDVFEGVGKYTSKKMTAHALRKLELKACPSAGACGGQFTANTMACVSEAIGLALPYSAGTPAPYTARNKYAVDSGKAVMNLLAKNIRPRDIVTRKSLENAATIVAATGGSTNAGLHLPAIANEIGIKFDLMDVAKIFKKTPYLADLKPGGKYVAKDMWKAGGVPMLLKTLMDGGYIHGDCMTVTGKTMRENLKNVKFKTNQKVMRKYSNPITPTGGVVGLKGNL

SEQ ID NO: 180375 - protein, 180 aa, Unknown
  Bacterial polypetide isolated from the Sargasso Sea
GAIVKVAGMENLKFLGKAKCFDCEEDAFECVKNENYNEGDVFVIRYEGPKGGPGMREMLSTTAAIYGQGMGDKVALITDGRFSGATRGFCVGHVSPEAAVCGPIALIEDGDEISLDAEKGVISLNVSPQILEKRQKNWKRRQTDFNSGTLWKYSKTVGSAVDGAVTHPGADKETHVYGDI

SEQ ID NO: 180376 - protein, 289 aa, Unknown
  Bacterial polypetide isolated from the Sargasso Sea
GGQFTANTMACVSEAIGLALPYSAGTPAPYEERDKYAKESGKMVMQLLKKKIKPRDIVTRKALENAATIVAATGGSTNAGLHLPAIANEAGIKFDLMDVAKIFKRTPYLADLKPGGKYVAKDMWLAGGVPMLLKTLYEGGYIHGDCMTVTGKTMKENLKNIKFNPKQKVMRSYKDPLSPTGGVVGLKGNLAPDGAIVKVAGLAKLQFTGKARCFDNEESAMKAVQSKKYNDGDVIIIRYEGPVGGPGMREMLSTTGAIYGQGKGEKVALITDGRFSGATRGFCVGHVGP

SEQ ID NO: 180377 - protein, 287 aa, Unknown
  Bacterial polypetide isolated from the Sargasso Sea
MGILGELDRAGLLHTDVFHVAADEGGNLKSVLAKYDVMQTQDEKVKHFFMAGPAGIPTTKAFSQDCRWPSLDNDRQEGCIRSREFAFSQEGGLAVLSGNVAENGCIVKTAGVDESNLTFVGSARVYESQDDAVAGILGGEVVAGDVVVIRYEGPKGGPGMQEMLYPTSYLKSRGLGKACALITDGRFSGGTSGLSIGHVSPEAAAGGTIALIENGDRIEIDIPKRSIKLALTDAELAARREAMLARGPMAWKPIGRERFVSLALKAYAMLATSADKGAVRDRSKLED

SEQ ID NO: 180378 - protein, 319 aa, Unknown
  Bacterial polypetide isolated from the Sargasso Sea
KYAKASGKMVMNLLKKGIKPRDIVTRKALENAATIVAATGGSTNAGLHLPAIANEAGIKFDLMDVAKIFKRTPYLADLKPGGKYVAKDMWLAGGVPMLLKTLYEGGYIHGDCMTVTGKTMKENLKSIKFNPKQKVMRSYKNPLSPTGGVVGLKGNLAPEGAIVKVAGLKKLQFTGKARCFDNEESAMKAVQSRKYNDGDVIIIRYEGPVGGPGMREMLSTTGAIYGQGKGEKVALITDGRFSGATRGFCVGHVGPEAALGGPIGLLRTGDIIDIDAKKGTINVRLSKKEMAVRKRKWKARKSDFGSGTLWKYAQTVGPA

SEQ ID NO: 180379 - protein, 302 aa, Unknown
  Bacterial polypetide isolated from the Sargasso Sea
KNAATIVAATGGSTNAALHLPAIANEIGIKFNLMDVAKIFKKTPYLADLKPGGKYVAKDMWKAGGVPMLLKTLLDGGYIHGNCMTVTGKTMKENLKNVKFNSNQKVMRKYNNPLSPDGGVVGMKGNLAPEGGIVKIAGLKKLQFTGRARCFDTEEAAYKAVKNKKYKDGDIIIIRYEGPKGGPGMREMLQTTGAIYGQGKGEKVALITDGRFSGATRGFCIGHVGPEASVGGPIALLRNGDIIDLDAKKGTINVRLSKKELAKRKKKWRPKKINFGNGTLWKYAQTVGPAYLGAPTHPGEKT

SEQ ID NO: 180380 - protein, 187 aa, Unknown
  Bacterial polypetide isolated from the Sargasso Sea
KGNLALDGAIVKVAGLKRLQFTGRARCFDTEESAYKAVLKRKYKDGDIIVIRYEGPKGGPGMREMLQTTGAIYGQGKGEKVALITDGRFSGATRGFCIGHVGPEASVGGPIGLLKNGDIIHIDAKKGTINVDLSRKELSKRKKKWKPKKINFGNGTLWKYAQTVGPAYLGASTHPGGKEEVKCYADI

SEQ ID NO: 180381 - protein, 295 aa, Unknown
  Bacterial polypetide isolated from the Sargasso Sea
VSTWNEAAPCNTALMRQAQSVKKGVKESGGTPREFCTITVTDGIAMGHEGMKSSLISREVIADSAELTVRGHCYDALVGIAGCDKSLPGLMMSMLRLNVPSVFIYGGSILPGRYKGKDVTVLDVFEAVGKHSSGNMSSEELRELELVACPSAGACGGQFTANTMACVSEAIGLALPYSAGTPAPYEERDKYAHLSGKTVMNLLEKNIKPRDIVTKKSLENAATIVAATGGSTNAALHLPALANEIGVKFELMDVAKIFKNTPYLADLKPGGKYVAKDLWEAGGVPMLLKTLFDGG

SEQ ID NO: 180382 - protein, 287 aa, Unknown
  Bacterial polypetide isolated from the Sargasso Sea
YDAGKISAEELENIENVACPNAGSCGGMFTANTMASISEAIGLSLPGSASPPAEDDRRNKMVLETGKACAKLLQLGIKPLDIVTFEAFENSITMLNAVGGSTNGILHLLAMANEAGINLTYDDFERIRKKTPHLADMKPGGNYVMNSLDKIGGIPLVMKKLLDKNLIHGDSLTVTGKTIKENLEELAIVEVPDQQIIKPVEQPIHEVGTAVILKGTLAPEGGVIKTAGVEMTEFTGTAKVFDREEYAFEAVSKGEIDEGDVVVIRYEGPKGGPGMREMLSTTAALVG

SEQ ID NO: 180383 - protein, 194 aa, Unknown
  Bacterial polypetide isolated from the Sargasso Sea
WNSSSINRRDKYALASGKAVMNLLAKNIRPRDIVTKKALENAATIVAATGGSTNAALHLPAIANEIGIKFDLMDVAKIFKRTPYLADLKPGGKYVAKDMWKAGGVPMLLKTLMDGGYIHGNCMTVTGKTMKENLKNVKFNSKQKVMRKYNNPLSKDGGVVGMKGNLAPEGAIVKVAGLKRLQFTGRARVLIRRS

SEQ ID NO: 180384 - protein, 295 aa, Unknown
  Bacterial polypetide isolated from the Sargasso Sea
MSKIDKKKLPSRHTSLGPDRAPHRSFYYAMGETEQDVAKPFVGVVSTWNEAAPCNTALMRQAQSVKKGVKQSGGTPREFCTITVTDGIAMGHEGMKSSLISREVIADSAELTVRGHCYDALVGIAGCDKSLPGLMMSMLRLNVPSVFIYGGSILPGKFKGKDVTVVDVFEAVGKHSSGKMSSEELRELELVACPSAGACGGQFTANTMACVSEAIGLALPYSAGTPAPYEERDKYAYESGQAVMNLLEKKIKPREIVTKKSLENAATIVAATGGSTNAALHLPALANEIGVKFDL

SEQ ID NO: 180385 - protein, 278 aa, Unknown
  Bacterial polypetide isolated from the Sargasso Sea
SIETVVGCQGFDGLVTIGGCDKNMPGCVMGMIRLNRPSVFVYGGTILPGCHKEKDVDIVSVFEAVGQYANNKIDDKELKEIESCAIPGAGSCGGMYTANTMACAIEALGLSLPNSSAQAASSPEKINDCKAAGKAVMNLIKRQITPKQILTKKSFENAITVITALGGSTNAVLHLLAIAHTAGIDLTIDDFTRIGNKTPVLADVKPSGKYTMSKLVSIGGVTPLMKRLLNEGFLHGDCLTVTGATLEENLRYCDDYPSGQDIIYPTSNPIKETGHLVI

SEQ ID NO: 180386 - protein, 275 aa, Unknown
  Bacterial polypetide isolated from the Sargasso Sea
REVIADSIETVVFAERFDGLVAVAGCDKSLPGAMMAIARLNVPSVFIYGGSILPGNLNGKTIQIQDVFEAVGKHQSGEINDNELYQIESRACPGPGSCGGMFTANTMSSVGEALGLSLPGSASEPAVDQRKSASSRLAGEAVLNLLRNDIKPSDILTKEAFENAVTVVTAMGGSTNTCLHLPAIAYEAGIDLTLENIHDISMRTPHLANMKPAGKYLMYDLDNVGGVPLVMKRLLDLGLIHGECITVTGKTVRENLESIKDDGIENEVVRKIDNP

SEQ ID NO: 180387 - protein, 271 aa, Unknown
  Bacterial polypetide isolated from the Sargasso Sea
MTDKGSNIKSRLPSRHVSVGPKSAPHRSMYYAMGMTEEQIYQPFVGVATTWNESAPCNITLGRQAQAVKKGVSKLNGTPREFTTITVTDGIAMGHEAMKASLVSREVIADSVELSVRGHCYDGIVGLAGCDKSLPGLMMAMVRLNIPSVFIYGGSILPGSYKGKDLTIIDVFEAVGKHASGEIDESELKNIEKVACPTAGSCGGQFTANTMACISEALGLALTNSAMTPATYEERDNYGFESGKAVMSLIEKNIRPRDIVTLESLKMQQLL

SEQ ID NO: 180388 - protein, 297 aa, Unknown
  Bacterial polypetide isolated from the Sargasso Sea
AKPFVGVVSTWNEAAPCNINLMKQAQSVKKGVQATGGTPREFCTITVTDGIAMGHEGMKSSLISRDVIADSTELTVRGHCYDALVGLAGCDKSLPGLMMAMVRLNVPSVFIYGGSILPGRFEGKDVTVVDVFEGVGKYTSKKMTAHALRKLELKACPSAGACGGQFTANTMACVSEAIGLALPFSAGTPAPYLERNKYAIDSGKAVMNLLAKNIRPRDIVTRKSLENAATIVAATGGSTNAGLHLPAIANEIGIKFDLMDVAKIFKKTPYLADLKPGGKYVAKDMWEAGGVPMLLKL

SEQ ID NO: 180389 - protein, 252 aa, Unknown
  Bacterial polypetide isolated from the Sargasso Sea
VLAVGGCDKNMPGAMLAMARMNIPSVFVYGGTIKPGKLGGCDLTVVSAFEAVGQLTSGKIDEEQLTAVEKNACPGAGSCGGMFTANTMSAAIETMGLSLPYSSTMAAEDEEKADSAARSAEVLVEAVKANIRPLDLLTKEAFENAISVIMAVGGSTNAVLHLLAIARTAGVDLSIDDFERIRQRVPVICDLKPSGRYVTVDLHNAGGIPQVMKLLLDAGLLHGDCRTVEGKSLKELLADVPSEPPSGQDVIR

SEQ ID NO: 180390 - protein, 308 aa, Unknown
  Bacterial polypetide isolated from the Sargasso Sea
PAPYEERDKYAKASGRMVMELLAKRIKPRDIVTRKALENAATIVAATGGSTNAALHLPAIANEAGIKFDLMDVAKIFKKTPYLADLKPGGKYVAKDMWLAGGVPMLLKTLYDGGYIHGDCITVTGKTMKENLKGIKFNPKQKVLRAYNRPLSPDGGVVGLKGNLAPEGGIVKIAGLKKLQFTGRARCFDNEESAMKAVQSRKYKDGDVIIIRYEGPVGGPGMREMLSTTGAIYGQGKGEKVALITDGRFSGATRGFCVGHVGPEAALGGPIALLRNGDVIDIDAKKGTINVRLTRTQLASRKRKWKAK

SEQ ID NO: 180391 - protein, 211 aa, Unknown
  Bacterial polypetide isolated from the Sargasso Sea
GKTIKENLKNVESFDFNQDIIRPIDNPIKASGHIRILYGNLASEGSVAKITGKEGLVFKGKANVFNCEDDANDAIKSNSISKGDVIVIRYEGPVGGPGMPEMLKPTSAIMGAGLGNDVALITDGRFSGGTHGFVVGHISPEAAKGGVLALVKNGDEIVIDAEKNEINVNIDKKELEIRKKLWVKPDLKFKSGILYKYSKLVSSASSGCVTD

SEQ ID NO: 180392 - protein, 328 aa, Unknown
  Bacterial polypetide isolated from the Sargasso Sea
SAPRSFYYAMNLTEKDVSKPFVGVVSTWNEAAPCNIALMRQAQSVKKGVKIKGGTPREFCTITVTDGIAMGHEGMKSSLISRDVIADSTELTVRGHCYDALVGVAGCDKSLPGLMMAMVRLNVPSVFIYGGSILPGRFNGKDVTVVDVFEGVGKYSSGKMSAHALRKLELKACPSAGACGGQFTANTMACVSEAIGLALPYSAGTPAPYEQRDKYALLSGKAVMNLLKKNIKPRDIVTRKALENAATIVAATGGSTNAALHLPAIANEIGIKFDLMDVAKIFKKTPYLANLKPGGKYVAKDMWKAGGVPMFTKNAYGMEDIFMGNCMT

SEQ ID NO: 180393 - protein, 221 aa, Unknown
  Bacterial polypetide isolated from the Sargasso Sea
MLRGAGFTDEDFEKSIVGIASLGASVTPCNMHLNSLAEIVEDSVNNSGCKAVTFNTITVSDGISMGTEGMKYSLVSREVIADSIETVVGCLGYDGVVGIGGCDKNMPGVIIGLARLNRPSLFIYGGSIRPSEQNTDYVTVCEKTGEFSKGSISEEELISVEKVSVVGPGSCGGMYTANTMASAIEALGMSLPGSSSQDAVSNDKKNDCINTGSAIRNLLEK

SEQ ID NO: 180394 - protein, 166 aa, Unknown
  Bacterial polypetide isolated from the Sargasso Sea
MVTDTNSRAASRGMLYGVGFKKGDFQKSQIGIASTWGTVTPCNMHINDLAEHAARGVRKAKGMPLTFGTITVSDGISMGTEGMKYSLVSREVIADSIETVVGCQSYDGIVTIGGCDKNMPGCMIAIARLNRPAVFVYGGTILPGTHKGKDVDIVSIFEAVGKQAAG

SEQ ID NO: 180395 - protein, 217 aa, Unknown
  Bacterial polypetide isolated from the Sargasso Sea
SLGDALHRWDIMQTEAEDVRTLYAAGPAGIPTQQAFSQDLRWPRLDTDREGGCVREMAHAYSQEGGLAVLFGNIAELGCVVKTAGVDDESLQFTGPAHICDSQEAAVADILEDRVQAGDVVIVRYEGPRGGPGMQEMLYPTSYLKSKGLGKACALITDGRFSGGTSGLSIGHVSPEAAAGGAIALIEPGDPIEIDIPARTINVLVDDATLASRREAM

SEQ ID NO: 180396 - protein, 144 aa, Unknown
  Bacterial polypetide isolated from the Sargasso Sea
MLRGVGFTDEDFKKPHVGIASLGASVTPCNMHLDDLASIVEKSVNSYDCKGITFNTITVSDGISMGTEGMKYSLVSREVIADSIETVVGCLGYDGVIGIGGCDKNMPGVVMAMARLNRPSIFVYGGSIRPSIENTDYVTVCEKT

SEQ ID NO: 180397 - protein, 256 aa, Unknown
  Bacterial polypetide isolated from the Sargasso Sea
MLRGAGFKDEDFEKSIVGIASLGASVTPCNMHLNSLAEIVEESVNNSGCKAVTFNTITVSDGISMGTEGMKYSLVSREVIADSIETVVGCLGYDGVVGIGGCDKNMPGVIIGLARLNRPSLFIYGGSIRPSEQNTDYVTVCEKTGEFSKGSISEEELISVEKVSVVGPGSCGGMYTANTMASAIEALGMSLPGSSSQDAVSDDKKNDCINTGRAIENLLEKDIKPSDIMTKEAFENAITVVIALGGSTNAVLHLIA

SEQ ID NO: 180398 - protein, 263 aa, Unknown
  Bacterial polypetide isolated from the Sargasso Sea
QIKPRDIVTRKALENAATIVAATGGSTNAGLHLPAIANEAGIKFDLMDVAKIFKRTPYLADLKPGGKYVAKDMWLAGGVPMLLKTLYEGGYIHGDCMTVTGKTMKENLKNIKFNPKQKVMRSYKDPLSPTGGVVGLKGNLAPDGAIVKVAGLAKLQFTGKARCFDNEESAMKAVQSKKYNDGDVIIIRYEGPVGGPGMREMLSTTGAIYGQGKGEKVALITDGRFSGATRGFCVGHVGPEAALGGPIGLLRNGDIIDIDAKKG

SEQ ID NO: 180399 - protein, 306 aa, Unknown
  Bacterial polypetide isolated from the Sargasso Sea
VIAVDDSADDATVDEYERSACPTCGSCSGMFTANSMNCLTEALGLSLPGNGSTLATHADRKELFLEAGRRIVALARQYYEQDDDSILPRNIANFNAFENAMSLDIAMGGSTNTILHLLAAANEAELDFSMADIDRLSRKVPQLCKVAPNSPLYHMEDVHRAGGVMAILGELSRAGLLHDDTTTVHAPTMAEAIAHNDIMVTDNPARQRFFSAGPAGIPTQTAFSQSTRWPSLDKDREDGCIRSIENAFSLEGGLAVLFGNIAEDGCVVKTSGVDESILVFEGKAYICESQESAVAAILDDKVQAGD

SEQ ID NO: 180400 - protein, 241 aa, Unknown
  Bacterial polypetide isolated from the Sargasso Sea
SELIEIGGIMPLMKMLLEKGLLNGDCLTVTGKTLKENLSSVKSYPQEQDIVKGFDEPVKEDSHLRVLYGNLAPEGAVAKISGKEGTKFKGIAKPYNSEEEAMEAILGGQIKKGDVVIIRYEGPQGGPGMREMLSPTSAIMGRGLGNEVAFLTDGRFSGGTHGFVVGHITPEAHLGGPLALVEKGDQIEIDADKNEINLLVDKNKLSERKKNWKQIVNEEEKGVLSKYADSVASASKGAVTT

SEQ ID NO: 180401 - protein, 278 aa, Unknown
  Bacterial polypetide isolated from the Sargasso Sea
TVTDGIAMGHEGMKSSLISRDVIADSTELTVRGHCYDALVGLAGCDKSLPGLMMSMVRLNVPSVFIYGGSILPGRFNGKDVTVVDVFEGVGKYTSKKMTAHALRKLELKACPSAGACGGQFTANTMACVSEAIGLALPYSAGTPAPYTERNKYALASGKAVMNLLAKNIRPRDIVTRKSLENAATIVAATGGSTNAGLHLPAIANEIGIKFDLMDVAKIFKRTPYLADLKPGGKYVAKDMWLAGGVPMLLKTLMDGGFIHGDCMTVTGKTMKENLKNV

SEQ ID NO: 180402 - protein, 269 aa, Unknown
  Bacterial polypetide isolated from the Sargasso Sea
TLEDVCKIFQSTPYIGNLAPGGKYVAKDLYEVGGVPVLIKTLIDGGLIDGSCMTVTGKTLAENVKDVELPKNQDVIFPVNNPITKTGGVVGLKGSLAPDGAIVKIAGLKKLQFKGKAICFEREELALDAVLSGKIKPGHVVIIRYEGPKGGPGMREMLSTTSALYGQDLGEDVALITDGRFSGGTRGFCIGHVGPEAYDCGPIALVEDGDEIEIDADKNLLNLNVDEKTLAERKTKWVNKEPEFTSGTLWKYMNCVGPAHLGAVTHPGA

SEQ ID NO: 180403 - protein, 293 aa, Unknown
  Bacterial polypetide isolated from the Sargasso Sea
PFVFGTITVSDAISMGHIGMRGSLVSREVIADSIETVVFAERFDGLVAVAGCDKSLPGAMMAIARLNVPSVFIYGGSILPGNLNGKTIQIQDVFEAVGKHQSGEINDSELYQIESRACPGPGSCGGMFTANTMSSVGEALGLSLPGSASEPAVDQRKSASSRLAGEAVLNLLRNDIKPSDILTKEAFENAVTVVTAMGGSTNTCLHLPAIAYEAGIDLTLEDIHNISMRTPHLANMKPAGKYLMYDLDNVGGVPLVMKRLLDLGLIHGECMTVTGKTVRENLESIKDDGIENE

SEQ ID NO: 180404 - protein, 281 aa, Unknown
  Bacterial polypetide isolated from the Sargasso Sea
MALARMNRPGIFVYGGTILPGLHGGKNLDIVSVFEAVGAHSNGMIDEEELTNIEKKAIPGPGSCGGMYTANTMSSAIEALGMSLPDSSAQLAVSEDKRIDARDAGEAVVHLIANDIKPRDIMTREAFENAITVVITLGGSTNAVLHLLAMAHAAEVPLSLDDFTEIGKRVPVLCDLKPSGKYNMSHFVRIGGLRPLLKTLLEEGLLHGDCMTVTGKTLAENVSDAEPYAPYPGGQDLVRPFNNPIKPDSHLRILYGNLAAEGAVAKISGKEGLKFTGEAIV

SEQ ID NO: 180405 - protein, 269 aa, Unknown
  Bacterial polypetide isolated from the Sargasso Sea
MADNWRSKLITAGITKSPNRSMLRAVGFKDGDFDKPIVGVANGHSNMNPCNAGIQPLIDEAMDALEKVGAKPQVFGVPTVTDGIGMGTEGMKYSLVSREVIADAIETAVNGQMMDGALVVGGCDKNMPAGMMALARINIPSIYVYGGTIKPGVWKGKDLTIASVFESVGQYSAGDMTEEDFQGIEKNALPTFGACGGMFTANTMSTSFEALGMSLLGSGTMAAPDKEKADSSSTSAEVLYRAIQNNLRPRDIITRQSNENAITLVMATG

SEQ ID NO: 180406 - protein, 270 aa, Unknown
  Bacterial polypetide isolated from the Sargasso Sea
RIRKLELVACPTAGACGGQFTANTMACVSEAIGLALPYSAGTPAPYEERDKYAKASGRMVMELLAKKIKPRDIVTRKALENAATIVAATGGSTNAALHLPAIANEAGIKFDLMDVAKIFKRTPYLADLKPGGKYVAKDMWLAGGVPMLLKTLYDGGYIHGDCMTVTGKTMKENLKGIKFNPKQKVLRAYNRPLSPDGGVVGLKGNLAPEGAIVKIAGLKKLQFTGRARCFDNEESAMKAVQSRKYKDGDVIIIKKEGPVGGPGMREMLQQ

SEQ ID NO: 180407 - protein, 317 aa, Unknown
  Bacterial polypetide isolated from the Sargasso Sea
YKGKDVTVVDVFEAVEKHSSGKMTAAELRKLELVACPSAGACGGQFTANTMACVSEAIGLALPYSAGTPAPYEERDKYAKASGKTVMNLLKKRIKPRDIVTKKALENAATIVAATGGSTNAGLHLPAIANEAGIKFDLMDVAKIFKRTPYLADLKPGGKYVAKDMWLAGGVPMLLKTLYEGGYIHGDCITVTGKTMKENLKNIKFNPKQKVMRSYKNPLSPTGGVVGLKGNLAPEGAIVKVAGLKKLQFTGKARCFDNEESAMKAVQSKKYNDGDVIIIRYEGPVGGPGMREMLSTTGAIYGQGKGEKVALITDGRF

SEQ ID NO: 180408 - protein, 257 aa, Unknown
  Bacterial polypetide isolated from the Sargasso Sea
NEIGIKFDLMDVAKIFKKTPYLADLKPGGKYVAKDMWEAGGVPMLLKTLMDGGYIHGDCMTVTGKTMRENLKNVKFRTNQKVMRSYKNPISPTGGVVGLKGNLAPEGGIVKIAGLKKLQFTGRARCFDNEESAYKAVINRKYKDGDIIIIRYEGPIGGPGMREMLQTTAAIYGQGKGEKVALITDGRFSGATRGFCIGHVGPEASVGGPIALLRNGDIIDIDAKKGTINVRLTKKELSARRKKRKPRKMNFGNGTLW

SEQ ID NO: 180409 - protein, 283 aa, Unknown
  Bacterial polypetide isolated from the Sargasso Sea
IADSTELTVRGHCYDALVGVAGCDKSLPGLMMAMVRLNVPSVFIYGGSILPGRFNGKDVTVVDVFEGVGKFSSGKMSAHALRKLELKACPSAGACGGQFTANTMACVSEAIGLALPYSAGTPAPYTQRDSYALKSGKAVMNLLAKNIRPRDIVTKKSLENAATIVAATGGSTNAALHLPALANEAGIKFDLMDVARIFKKTPYLADLKPGGKYVAKDMWKAGGVPMLLKTLLDGGYIHGDCMTVTGKTMRQNLKNVKFNKNQKVMRTHNQPLSPDGGVVGLKG

SEQ ID NO: 180410 - protein, 288 aa, Unknown
  Bacterial polypetide isolated from the Sargasso Sea
MACVSETIGLSLPGSAMTPAPYTSRDQYAYDSGKTVMDLINKNLKPRDIVTKQALINSAIVVSASGGSTNAGLHLPAMANEVGIDFTLGDVCKIFESTPYIGNLAPGGKYVAKDLYEVGGVPVLIKTLIDGGLIDGSCMTVTGKTLAENVKDVELPKNQDVIYPISKPITKTGGVVGLKGSLAPDGAIVKIAGLKKLQFKGKAICFEREEDALEAVLNGKIKPGHVLIIRYEGPKGGPGMREMLSTTSALYGQELGEDVALITDGRFSGGTRGFCIGHVGPEAYDCGP

SEQ ID NO: 180411 - protein, 234 aa, Unknown
  Bacterial polypetide isolated from the Sargasso Sea
MHINELADLVESSIDSSGCKGVLFNTITVSDGISMGTQGMKFSLVSREVIADSIETVVGCLGYDGVIAIGGCDKNMPGALMGLARLDRPSIFIYGGSIRPSSINTDYVTVSEKVGEYAKGDITKDELIAIEEVSVVGPGSCGGMYTANTMASSIEALGMSLPGSSSQDAVSDDKKLDCQNAGEAIKHLLDLDLKPSDIMTKKAFENSIAVVIALGGSTNAVLHLLAIAHCIGVD

SEQ ID NO: 180412 - protein, 238 aa, Unknown
  Bacterial polypetide isolated from the Sargasso Sea
IGHPYLFMRGSIMPGQYKKKPIDVVSVFEAVGAYSNKEISKSELTDIEKAAIPGPGSCGGMYTANTMASAIEALGMSLPGSSTQIAISSNKKDDCINSGKQLVKLIAKDIKPRDIMTREAFENAIAVTIALGGSTNAVLHLLAMADAAKVKLNINDFNKIGKKIPVLADLKPSGTHMMAKFCEIGGLPPLLKRLLNAKLLHGDCITVTGKTVKENLKNVKDILGDDVIKPLSSPIKKR

SEQ ID NO: 180413 - protein, 299 aa, Unknown
  Bacterial polypetide isolated from the Sargasso Sea
MRKFNKKKLPSLHTSLGPDRAPHRSFYYAMGETEKDVAKPFVGVVSTWNEAAPCNIALMRQAQSVKKGVRASGGTPREFCTITVTDGIAMGHEGMKSSLISREVIADSAELTVRGHCYDALVGIAGCDKSLPGLMMSMVRLNVPSVFIYGGSILPGKYKGKDVTVVDVFEAVGKHSSGQMSAKELRKLELVACPTAGACGGQFTANTMACVSEAIGLALPYSAGTPAPYEERDKYAKASGRMVMELLAKKIKPRDIVTRKALENAATIVAATGGITNAGLHLPAIANEAGIKFDLMDVA

SEQ ID NO: 180414 - protein, 180 aa, Unknown
  Bacterial polypetide isolated from the Sargasso Sea
GAIVKVAGLKKLQFTGRARCFDTEESAYKAVLKRKYKDGDIIVIRYEGPKGGPGMREMLQTTGAIYGQGKGEKVALITDGRFSGATRGFCIGHVGPEASIGGPIALLKNGDVIHIDAKKGTINVNISRKELAKRKRKWKPKKINFGNGTLWKYAQTVGPAYLGASTHPGAKNEVKCYADI

SEQ ID NO: 180415 - protein, 305 aa, Unknown
  Bacterial polypetide isolated from the Sargasso Sea
HCYDALVGIAGCDKSLPGLMMSMVRLNVPSVFIYGGSILPGKYKGKDVTVVDVFEAVGKHSTGKMSAAELRKLELVACPSAGACGGQFTANTMACVSEAIGLALPYSAGTPAPYEERDKYAKASGKTVMNLLKKGIKPRDIVTRKALENAATVVAATGGSTNAGLHLPAIANEAGIKFDLMDVAKIFKRTPYLADLKPGGKYVAKDMWLAGGVPMLLKTLYEGGYIHGDCMTVTGKTMKENLKGIKFNPKQKVMRSYKNPLSPTGGVVGLKGNLAPEGAIVKVAGLKKLQFTGKARCFENEESAM

SEQ ID NO: 180416 - protein, 260 aa, Unknown
  Bacterial polypetide isolated from the Sargasso Sea
NKAPVLADLKPSGKYLMTDFVRIGGLPPLMKMLLDAGLLHGDCMTVTGKTVRDNLKNVKPYEEGQEIVKSLDDPIRKTGHLVILRGNLAAEGAVAKISGKEGEFFRGTARVFNSEEEALIRILDGTVVKGDVIVIRYEGPKGGPGMREMLSPTSAIMGRGLGNDVALITDGRFSGGSHGFVIGHITPEAFEGGLLGMVENGDNITIDIAKRTIDLEVSEHEIKSRQDSWVCPQARYTRGVLAKYAKSVSSASLGAVTDLP

SEQ ID NO: 180417 - protein, 261 aa, Unknown
  Bacterial polypetide isolated from the Sargasso Sea
QKLGKVTPVLADLKPFGSHFMSELNANGGIQPLMKSLLDKGMLHGDCLTVTGNSLEENLKDIEPYKDEKIIKSLDNPIKSDSHLRVLYGNLAKDGAVAKITGKEGLSFEGKAKVFNSEEEGVAAILAKKINPGDVVVIRYEGPKGGPGMREMLKPTSAIMGLGLGDKVAFITDGRFSGGTHGFVVGHISPEAADGGLIALIKDGDNILIDAENDELILKVDQDEIDLRKKNWKNPTNPPKKGVLAKYAASVKSASLGAITD

SEQ ID NO: 180418 - protein, 288 aa, Unknown
  Bacterial polypetide isolated from the Sargasso Sea
STNTVLHTLAASIEAGLSFDMKEINEISRRTPYLCKVSPATPNVHMEDVLKAGGISAILMELSKQNGLLKLDRPTVLGLTLGESISGAKNYNKDIIRSVDDPFSKEGGLAVLFGNIAPHGSIVKTAAVNKEMLVHEGPARIYESQDQAMKGILDGEVCDGDVVVIRYEGPKGGPGMPEMLAPTSAIMGMGLGSKVALITDGRFSGGTRGACVGHISPEAAAGGPIAIIQPGEMIKIDINARSIELKIEQSEIDKRMENLPDFEAKIQSGYLGRYTRMVSSANTGAVLI

SEQ ID NO: 180419 - protein, 205 aa, Unknown
  Bacterial polypetide isolated from the Sargasso Sea
VMRKYNNPLSKTGGVVGLKGNLAPEGGIVKIAGLKKLQFTGKARCFNTEEDAYKAVKNRKYKDGDIIIIRYEGPKGGPGMREMLQTTAAIYGQGKGEKVALITDGRFSGATRGFCIGHVGPEASVGGPIALLRNGDVIDIDAQKGTINVRLSKKELSSRRKKWKPKKMNFGNGTLWKYAQTVGPAYKGAPTHPGGKNEVRTYADI

SEQ ID NO: 180420 - protein, 238 aa, Unknown
  Bacterial polypetide isolated from the Sargasso Sea
SIPGAGSCGGMYTANTMASAIEAMGMSLPNSSAQAAISKDKVKDCVKAGEAVMKLIDMNLCPRDIMTRKAFENAITVVMALGGSTNAVLHLLAMAHSTGVNLKIDDFRRIGQKSPVLADLRPSGQFMMIDFVKIGGLPPLMKMLLDAGLLHGDCMTVTGKTLKQNLKGVKAYPKKQKIIRPLKDPVKATGHLVILKGNLARDGAVAKISGKEGEVFQGSARIFESEEEALQKILDGTV

SEQ ID NO: 180421 - protein, 265 aa, Unknown
  Bacterial polypetide isolated from the Sargasso Sea
SVVGPGSCGGMYTANTMASSIEALGMSLPGSSSQDAVSDDKKVDCQNAGEAIKRLLDLDLKPSDIMTKKAFENSIAVVIALGGSTNAVLHLIAIAHCIGVDLDLDDFTRIGKVTPVLADIKPFGDHFMSQLNEIGGITPMMKTMLDNNLLHGDCMTVTGKTLEENLKDLDPYPTNQKIIMPLNNPVKDSSHLRVLYGNLAPEGAVAKITGKEGTVFTGNARVFNSEEEGMKAILDKKIKDGDVVVIRFEGPQGGPGMREMLKPTS

SEQ ID NO: 180422 - protein, 204 aa, Unknown
  Bacterial polypetide isolated from the Sargasso Sea
MRSYKNPITPTGGVVGLRGNLAPEGGIVKIAGLKKLQFTGKARCFNTEEDAYKAVKNRKYKDGDIIIIRYEGPKGGPGMREMLQTTAAIYGQGKGEKVALITDGRFSGATRGFCIGHVGPEASVGGPIALLRNGDVIDIDAKKGTINVRLSKKELNSRRKKWKPKKMNFGNGTLWKYAQTVGPAYKGAPTHPGGKNEVKTYADI

SEQ ID NO: 180423 - protein, 329 aa, Unknown
  Bacterial polypetide isolated from the Sargasso Sea
PYSAGTPAPFNRRDKYALASGKAVMNLLAKNIRPRDIVTKKALENAATIVAATGGSTNAALHLPAIANEIGIKFDLMDVAKIFKRTPYLADLKPGGKYVAKDMWKAGGVPMLLKTLMDGGYIHGNCMTVTGKTMKENLKNVKFNSKQKVMRKYNNPLSKDGGVVGMKGNLAPEGAIVKVAGLKRLQFTGRARCFDTEEAAYKAVKNRKYKDGDIIIIRYEGPKGGPGMREMLQTTGAIYGQGKGEKVALITDGRFSGATRGFCIGHVGPEASVGGPIALLRNGDIIDLDAKKGTINVRLSKKELAKRRKKWKQRKLTFGMEHFGKYAQL

SEQ ID NO: 180424 - protein, 295 aa, Unknown
  Bacterial polypetide isolated from the Sargasso Sea
EAIGLALPYSAGTPAPYEERDKYAKASGKTVMNLLKKRIKPRDIVTKKALENAATIVAATGGSTNAGLHLPAIANEAGIKFDLMDVAKIFKRTPYLADLKPGGKYVAKDMWLAGGVPMLLKTLYEGGYIHGDCMTVTGKTMKENLKNIKFNPKQKVMRSYKNPLSPTGGVVGLKGNLAPDGAIVKVAGLKKLQFTGKARCFDNEETAMKAVQSKKYNDGDVIIIRYEGPVGGPGMREMLSTTGAIYGQGKGEKVALITDGRFSGATRGFCVGHVGPEAALGGPIGLLRNGDIIDI

SEQ ID NO: 180425 - protein, 144 aa, Unknown
  Bacterial polypetide isolated from the Sargasso Sea
MKAIMDGSVNKGDVVVVRYEGPKGGPGMREMLSPTSAINGRGLSEHVALITDGRFSGGSHGFVIGHITPEAFDGGPIALIEDGDSITINAETCEINLLISDEEWEVRRAKWFKPEPYTKIGTLAKYAKLVSTASEGAVTDKYLD

SEQ ID NO: 180426 - protein, 295 aa, Unknown
  Bacterial polypetide isolated from the Sargasso Sea
ISMVIALGGSTNAVLHLIAIAHEARVNLSLKDFERLGKRTPVLADLKPSGNYLMSELIEIGGIVPLMRMMLEKELLHGDQITVTGKTLEENLSDTKNYPKDQEIVKEFDDPIKKDSHLRILYGNLAPGGSVAKISGKEGLTFEGKARVFDSEETAMQAIMNDKIIEGDVLVIRYEGPKGGPGMREMLGPTSAIMGKGLGDKVAFLTDGRFSGGTHGFVVGHISPEAYEGGPLAFLRNGDSISIDANSNQINVSISDKEIKKRRDSWEKPKSNEEIGVLGKYRSLVTSASNGAVTT

SEQ ID NO: 180427 - protein, 268 aa, Unknown
  Bacterial polypetide isolated from the Sargasso Sea
MLRGAGFKDEDFEKSIVGIASLGASVTPCNMHLNSLAEIVEESVNNAGCKAVTFNTITVSDGISMGTEGMKYSLVSREVIADSIETVVGCLAYDGVVGIGGCDKNMPGVIIGLARLNRPSLFIYGGSIRPSKQNTDYVTVCEKTGEFSKGSMSEEELIAVEKVSVVGPGSCGGMYTANTMASAIEALGMSLPGSSSQDAVSADKKNDCINTGSAIEKLLEKDIKPSDIMTKQAFENAITIVIALGGSTNAVLHLIAMAHAINVDINLD

SEQ ID NO: 180428 - protein, 135 aa, Unknown
  Bacterial polypetide isolated from the Sargasso Sea
MELNKYSKVITKKGSQPAAQAMLHAIGLKKEDFDKPFVGIASTGYEGNPCNMHLNDLSYQIKNEIDKAKAVPLIFNTIGISDGISMGTSGMKYSLPSREIIADSIESVVNGMSYDSLITVVGCDKNMPGALMAMI

SEQ ID NO: 180429 - protein, 298 aa, Unknown
  Bacterial polypetide isolated from the Sargasso Sea
TIGVSDGMSMGTDGMSYSLQSRDLIADSIETVMAAQWYDGLVTLPGCDKNMPGCIIAMGRLDRPAIMVYGGTIRAGCGTIGGVEEKLDVVSAFQSYGQFLAGAITEEERQTIVSCAIPGAGACGGMYTANTMATAIEAMGLSLPYSSCTPAEDPAKIQECVTAGAMMEMLLSEGLTPRRVVTRESLENAMVVTMALGGSTNAVLHMIAMARAFELELSLDDWLATSSRVPLLADLKPSGQYVMEDLHDVGGVPGVMRYLLNEGMLDGDQMTVTGKTLGENLSEVPDLLKDQDVLASLE

SEQ ID NO: 180430 - protein, 204 aa, Unknown
  Bacterial polypetide isolated from the Sargasso Sea
ITEVPEQQIVKPVEQPIHEVGTAVILKGSLAPEGAVIKTAGVEMTEFTGTARVYDREEYAFESVSKGDVDEGDVVVIRYEGPKGGPGMREMLSTTAALVGQGLGKKVAMVTDGRFSGGTRGFMVGHVAPEAFVGGPIALVKDGDKISINVEDSSINLHVSEEELANRKKEWRRPEPNYSTGALAKFASLVGSAAKGAITKPAEY

SEQ ID NO: 180431 - protein, 275 aa, Unknown
  Bacterial polypetide isolated from the Sargasso Sea
LMTKKAFENAISVIMAIGGSTNAVLHILAIANTAGIDININDFERIRQKVPVICDLKPSGKYVTVDLHNAGGIPQVMKILLNAGLIHGDCKNIEGKTISEYLQNIPDKPPTNQNVIREIDDPLYKKGHLAILKGNLASEGSVAKISGVKNPVLTGPAKIFESEEDCLESILNNDIKAGDVVVIRNEGPVGGPGMREMLAPTSAIVGQGLGEKVALITDGRFSGGTYGLVVGHIAPEAAVGGNIALIRQGDLITVDAVKQLIEVDLSDEELEKRKK

SEQ ID NO: 180432 - protein, 291 aa, Unknown
  Bacterial polypetide isolated from the Sargasso Sea
APCNIALMRQAQSVKKGVKSSGGTPREFCTITVTDGIAMGHEGMKSSLVSRDVIADSTELTVRGHCYDALVGVAGCDKSLPGLMMAMVRLNIPSVFIYGGSILPGRYNGKDVTVLDVFEGVGKHSSGKMTEHALRKLELKACPSAGACGGQFTANTMACVSEAIGLALPYSAGTPAPYEQRDKYALQSGKTVMNLLKKNIRPRDIVTRKSLENAATIVAATGGSTNAALHLPALANEIGIKFDLMDVAKVFKRTPYLADLKPGGKYVAKDMWKAGGVPMLLKTLLDGGYIH

SEQ ID NO: 180433 - protein, 274 aa, Unknown
  Bacterial polypetide isolated from the Sargasso Sea
RNIATKAAFENAMALDIAMGGSTNTVLHLLAAAQEAGVDFTMADIDRMSRKVPQLCKVAPSTQKYHMEDVHRAGGVVAILGQLEKAGLVHGDTRNVLGTSLVELLAEYDVSRQPSQEVVDFYRAGPAGIRTTKAFSQDCRWPELDLDRAEGCIRSLDNAYSLEGGLAVLAGNLALNGAIVKTAGVDEENLTFRGPARVFESQDTAVAGILDGTVKAGEVVVIRYEGPKGGPGMQEMLYPTTYLKSMGLGKACALITDGRFSGGTSGLSIGHVSP

SEQ ID NO: 180434 - protein, 221 aa, Unknown
  Bacterial polypetide isolated from the Sargasso Sea
DCLTVTGKTISENLSKVKKYPKKQKIIKSLDNPIKKDSHLVVLYGNIAPEGAVAKISGKEGLVFEGKAIVFNSEELAMKAILSGKVKKGHVIVIRYEGPKGGPGMREMLGPTSAIMGKGLGKDIALITDGRFSGGSHGFVIGHVAPEAASRGPIAVIKNGDQIIIDAKNQTITLKVSKKEMNSRFKKLPVFKSKYKKGVLAKYASQVSSASTGAVTDIIDS

SEQ ID NO: 180435 - protein, 320 aa, Unknown
  Bacterial polypetide isolated from the Sargasso Sea
ALAGDIYCNTMACVSEAIGLALPYSAGTPAPYNKRDKYALESGKAVMNLLAKNIRPRDIVTKKSLENAATIVAATGGSTNAALHLPAIANEIGIKFDLMDVAKIFKRTPYLADLKPGGKYVAKDMWKAGGVPMLLKTLFEGGYIHGNCMTVTGKTMKENLKNVKFNSNQKVMRKFNNPLSPDGGVVGMKGNLAPEGAIVKVAGLKRLQFTGRARCFDTEEAAYKAVKNRKYKDGDIIIIRYEGPKGGPGMREMLQTTGAIYGQGKGEKVALITDGRFSGATRGFCIGHVGPEASVGGPIALLRNGDIIDLDAKKGTINVR

SEQ ID NO: 180436 - protein, 315 aa, Unknown
  Bacterial polypetide isolated from the Sargasso Sea
KVKCTKWFLYIGGSILPGRLNGKDITVVDVFEGVGKYTSGKISEHALRKIELKACPTAGACGGQFTANTMACVSEAMGLALPYSAGTPAPFNRRDKYALASGKAVMNLLAKNIRPRDIVTKKALENAATIVAATGGSTNAALHLPAIANEIGIKFDLMDVAKIFKRTPYLADLKPGGKYVAKDMWLAGGVPMLLKTLMDGGYIHGNCMTVTGKTMKENLKNVKFNSKQKVMRKYNNPLSKDGGVVGMKGNLAPEGAIVKVAGLKKLQFTGRARCFDTEEAAYKAVKNRKYKDGDIIIIRYEGPKGGPGMREMLQT

SEQ ID NO: 180437 - protein, 258 aa, Unknown
  Bacterial polypetide isolated from the Sargasso Sea
PAPYTQRDSYALKSGKAVMSLLEKKIRPRDIVTKKSLENAATIVAATGGSTNAALHLPALANEAGIKFDLMDVARIFKKTPYLADLKPGGKYVAKDMWKAGGVPMLLKTLLDGGYIHGDCITVTGKTMRQNLKNVKFNKNQKVMRTYNQPLSPDGGVVGLKGNLAPDGAIVKVAGLKRLQFTGKARCFDTEEAAYKAVKNKKYKDGDIIIIRYEGPKGGPGMREMLQTTGAIYGQGKGEKVALITDGRFSGATRGFCI

SEQ ID NO: 180438 - protein, 214 aa, Unknown
  Bacterial polypetide isolated from the Sargasso Sea
KACPTAGACGGQFTANTMACVSEAMGLALPYSAGTPAPFNRRDKYALASGKAVMNLLAKNIRPRDIVTKKALENAATIVAATGGSTNAALHLPAIANEIGIKFDLMDVAKIFKRTPYLADLKPGGKYVAKDMWKAGGVPMLLKTLMDGGYIHGNCMTVTGKTMKENLKNVKFNSKQKVMRKYNNPLSKDGGVVGMKGNLAPEGAIVKVAGLKRL

SEQ ID NO: 180439 - protein, 295 aa, Unknown
  Bacterial polypetide isolated from the Sargasso Sea
TTLLCWNPAPYEERDKYAKASGRMVMELLAKKIKPRDIVTRKALENAATIVAATGGSTNAGLHLPAIANEAGIKFDLMDVAKIFKRTPYLADLKPGGKYVAKDMWLAGGVPMLLKTLYEGGYIHGDCMTVTGKTMKENLKGIKFNPKQKVMRSFKNPLSPTGGVVGLKGNLAPEGGIVKIAGLKKLQFTGRARCFDNEESAMKAVQSRKYKDGDVIIIRYEGPVGGPGMREMLSTTGAIYGQGKGEKVALITDGRFSGATRGFCVGHVGPEAALGGPIALLRNGDIIDIDAKKGT

SEQ ID NO: 180440 - protein, 252 aa, Unknown
  Bacterial polypetide isolated from the Sargasso Sea
AKPFVGVVSTWNEAAPCNINLMKQAQSVKKGVHSAGGTPREFCTITVTDGIAMGHEGMKSSLISRDVIADSTELTVRGHCYDALVGLAGCDKSLPGLMMSMVRLNVPSVFIYGGSILPGRFNGKDVTVVDVFEGVGKYTSKKMTAHALRKLELKACPSAGACGGQFTANTMACVSEAIGLALPYSAGTPAPYTERNKYALASGKAVMNLLAKNIRPRDIVTRKSLENAATIVAATGGSTNAGLHLPAIANEI

SEQ ID NO: 180441 - protein, 237 aa, Unknown
  Bacterial polypetide isolated from the Sargasso Sea
LDGGYIHGDCMTVTGKTMRQNLKNVKFNKNQKVMRTHNQPLSPDGGVVGLKGNLAPDGAIVKVAGLKKLQFTGKARCFDTEEAAYKAVKNKKYKDGDIIIIRYEGPKGGPGMREMLQTTGAIYGQGKGEKVALITDGRFSGATRGFCIGHVGPEASVGGPIALLKNGDIIDLDAKKGTINVRLSRKELAKRRKKWKPKKINFGNGTLWKYAQTVGPAYLGAPTHPGAKEEVRTYADI

SEQ ID NO: 180442 - protein, 230 aa, Unknown
  Bacterial polypetide isolated from the Sargasso Sea
GNCLTVTGKTMRENLKKVKFNNKQKVMRKYNNPLSNDGGVVGLKGNLAPQGAIVKVAGLKKLQFTGRARCFDTEESAYKAVLKRKYKDGDIIIIRYEGPKGGPGMREMLQTTGAIYGQGKGEKVALITDGRFSGATRGFCIGHVGPEASVGGPIALLKNGDLIHIDAKKGTINVNLSKKELFKRRKKWKPKKINFGNGTLWKYAQTVGPAYLGASTHPGGKKEVKCYADI

SEQ ID NO: 180443 - protein, 237 aa, Unknown
  Bacterial polypetide isolated from the Sargasso Sea
FYYAMGETEKDVSKPFVGVVSTWNEAAPCNIALMRQAQSVKKGVRAFGGTPREFCTITVTDGIAMGHEGMKSSLISREVIADSAELTVRGHCYDALVGIAGCDKSLPGLMMSMVRLNVPSVFIYGGSILPGRYKGKDVTVVDVFEAVGKHSSGQMSAKELRKLELVACPSAGACGGQFTANTMACVSEAIGLALPYSAGTPAPYEERDKYAKLSGKMVMELLAKRIKPRDIVTKKAL

SEQ ID NO: 180444 - protein, 193 aa, Unknown
  Bacterial polypetide isolated from the Sargasso Sea
TIIREISNPIKSSSHLRILYGNLAPEGAVAKITGNEGLKFTGTAKVFDSEEDGNEAIQNNLINEGDVVVIRYEGPKGGPGMREMLKPTSAIMGQGLGDKVAFITDGRFSGGTHGFVVGHISPEAYVGGPIGVIENGDKITIDAETNSISIDISDEELQKRLDNFKPNKELPKKGVLSKYSKSVQSASLGAITD

SEQ ID NO: 180445 - protein, 219 aa, Unknown
  Bacterial polypetide isolated from the Sargasso Sea
LKELNELAERVPYLCKVSPATKDVHMEDVDEAGGVSAILNELSKLDVLDLSRPTVTGFTLGENISSAKVSNRNVIRSVKNPYSPTGSLSVLFGNLAPNGSIVKTAAVDPSVMTFTGNARIYNSQDDALKGILDGQVQPGDVVVIRYEGPKGGPGMPEMLAPTSTIMGLGLGDKVALITDGRFSGATRGACVGHISPEAAEGGPIGALIDGDSITIDIPE

SEQ ID NO: 180446 - protein, 181 aa, Unknown
  Bacterial polypetide isolated from the Sargasso Sea
NLESFENAMTLDIAMGGSTNTVLHILAAAKEAGLDFGMDDIDRLSRRVPNLCKVAPSSNFHMEDVHRAGGIMAILGELEKAKLLNSDNKTVHSETMLDAIQKWDINRKPSNEVKEFYSAAPGMIPTTQPFSQNKRYSELDVDRENGCIRDSDNAHSQDGGLAVLKGNIAIDGCIVKTSGCR

SEQ ID NO: 180447 - protein, 97 aa, Unknown
  Bacterial polypetide isolated from the Sargasso Sea
MLRGAGFKDEDFEKSIVGIASLGASVTPCNMHLNSLAEIVEESVNNSGCKAVTFNTITVSDGISMGTEGMKYSLVSREVIADSIETVVGCLGYDGVV

SEQ ID NO: 180448 - protein, 237 aa, Unknown
  Bacterial polypetide isolated from the Sargasso Sea
MDGGYIHGNCMTVTGKTMKENLKNVKFNSKQKVMRKYNNPLSKDGGVVGMKGNLAPEGAIVKVAGLKRLQFTGRARCFDTEEAAYKAVKNRKYKDGDIIIIRYEGPKGGPGMREMLQTTGAIYGQGKGEKVALITDGRFSGATRGFCIGHVGPEASVGGPIALLRNGDIIDLDAKKGTINVRLSKKELAKRRKKWKPKKINFGNGTLWKYAQTVGPAYLGAPTHPGGKNEVKTYADI

SEQ ID NO: 180449 - protein, 266 aa, Unknown
  Bacterial polypetide isolated from the Sargasso Sea
MRKFNKKKLPSRHTSLGPDRAPHRSFYYAMGETEKDVSKPFVGVVSTWNEAAPCNIALMRQAQSVKKGVRASGGTPREFCTITVTDGIAMGHEGMKSSLISREVIADSAELTVRGHCYDALVGIAGCDKSLPGLMMSMVRLNVPSVFIYGGSILPGKYKGKDVTVVDVFEAVGKHSSGQMSAKELRKLELVACPTAGACGGQFTANTMACVSEAIGLALPYSAGTPAPYEERDKYAKLSGKMVMELLAKKIKPRDIVTKKALENAA

SEQ ID NO: 180450 - protein, 289 aa, Unknown
  Bacterial polypetide isolated from the Sargasso Sea
AGACGGQFTANTMAMALSVMGISPMGANDVPAVDPAKGEQGERCGRLIVERVFAGDTARKYITKASLKNAAVAVSASGGSTNAVMHLTAIAAEAGVEFGVEDCHQACVEAPVICDLKPGGRFLASHLYAAGGTRLVAQRLAEAGKIVNTPTVSGRSLFVEASEAEETPGQQVVTDFEAPVMARGSFAVIYGDVAPEGAVIKLTGHKVDKFEGPACVFDSEEDAFHAVQDGSVGEGDVIIIRYEGPKGGPGMREMLQVTAALKGRKIDNVALLTDGRFSGASYGFVAGHV

SEQ ID NO: 180451 - protein, 309 aa, Unknown
  Bacterial polypetide isolated from the Sargasso Sea
NIRPRDIVTRKSLENAATIVAATGGSTNAGLHLPAIANEIGIKFDLMDVAKIFKRTPYLADLKPGGKYVAKDMWLAGGVPMLLKTLMDGGFIHGDCMTVTGKTMKENLKNVKFKTNQKVMRKYNNPLSKTGGVVGLKGNLAPEGGIVKIAGLKKLQFTGKARCFNTEEDAYKAVKNRKYKDGDIIIIRYEGPKGGPGMREMLQTTAAIYGQGKGEKVALITDGRFSGATRGFCIGHVGPEASVGGPIALLRNGDVIDIDAQKGTINVRLSKKELNARRKKWKPKKMNFGNGTLWKYAQTVGPAYKGAPT

SEQ ID NO: 180452 - protein, 187 aa, Unknown
  Bacterial polypetide isolated from the Sargasso Sea
KGNLAPEGAIVKVAGLKRLQFTGRARCFDTEEAAYKAVKNRKYKDGDIIIIRYEGPKGGPGMREMLQTTGAIYGQGKGEKVALITDGRFSGATRGFCIGHVGPEASVGGPIALLRNGDIIDLDAKKGTINVRLTKKELAKRRKKWKPKKINFGNGTLWKYAQTVGPAYLGAPTHPGGKNEVKTYADI

SEQ ID NO: 180453 - protein, 189 aa, Unknown
  Bacterial polypetide isolated from the Sargasso Sea
MLRGVGFTSEDFTKPFVGIASTGAKVTPCNMHINQLSELVEDSINASGGKGVLFNTITVSDGISMGTQGMKYSLVSREVIADSIETVVGCLGYDGLIAIGGCDKNMPGCLIGMARLNRPSIFIYGGSIKPSNENTDYVTVSEKVGEFSKGSINEDELIHYEKISVDGPGSCGGMYTANTMASAIEALGM

SEQ ID NO: 180454 - protein, 287 aa, Unknown
  Bacterial polypetide isolated from the Sargasso Sea
MGEDLTIISAFEAVGKRQAGEINDEELRQIEIHACPGPGACGGMFTANTMSSIGEALGLSIPGSASEPAVDQRKKDSSMEAGKAVMNLVRENIRPSDILTKKAFENAVTLVVAMGGSTNTALHLPAIANEMGISLTLKEIHDISMRTPLLADLKPGGKYVMYDLDKVGGVQVVMKRLLEAGLLHGDQLTVTGKTMEENLKDIDINKEENNIVRHIDNPISKTGGLVTLFGNLAPDGCVLKVAGHDFGKKFTGPAKVFDQEEQAMESLRKREIKAGDVVIIRYEGPKG

SEQ ID NO: 180455 - protein, 257 aa, Unknown
  Bacterial polypetide isolated from the Sargasso Sea
QVPVLADLKPSGRFTMSKLVEMGGVTPLMKRLLDMGLLHGDCLTVTGKTLAENLEHVSDYPAGQEIIRPFSDPIKDSGHLVICYGNLAPEGGVAKITGKEGALFSGSARVFDSEELALTAILDGTIQAGDVIVIRYEGPKGGPGMREMLSPTSAVMGRGLGNEVALITDGRFSGGTHGFVVGHITPEAYEGGPIAIVQDGDPITINCETAEVNLEIDDAEIQARLKGFKTPAPRYTRGVLSKYAKTVSTASEGAVTD

SEQ ID NO: 180456 - protein, 305 aa, Unknown
  Bacterial polypetide isolated from the Sargasso Sea
IADSTELTVRGHCYDALVGVAGCDKSLPGLMMAMLRLNIPSVFIYGGSILPGRYNGKDVTVLDVFEGVGKYSSGKISEHALRKLELKACPSAGACGGQFTANTMACVSEAIGLALPYSAGTPAPYGQRDKYALQSGKAVMNLLKKNIRPRDIVTRKSLENAATIVAATGGSTNAALHLPALANEIGIKFDLMDVAKIFKKTPYLADLKPGGRYVAKDMWKAGGVPMLLKTLLDGGYIHGNCMTVTGKTMKENLKKIKFNNKQKVMRKHNNPLSNDGGVVGLKGNLAPDGAIVKVAGLKKLQFTEE

SEQ ID NO: 180457 - protein, 308 aa, Unknown
  Bacterial polypetide isolated from the Sargasso Sea
AAVIVAASGGSTNAALHLPAIAHEAGIKFTLEDVTKISKKTPYIADLKPGGKYVAKDLYEIGGVPILIKALLDGGFLHEDCLTVSGKTIGENHKDIVFPTDQKIIYKTSQPLSSSGGFAGLKGNLAPEGAIVKVAGMKRRKFKGKAKCFDGEPSALNAVLQRKIKAGDVLVIRYEGPKGSPGMPEMLSTTGAIYGQGLGEKVALITDGRFSGGTHGFSIGHVGPEAAVGGPIGLIKNGDEIEIDADKGMLKVNLTNKELAKRKKKWKPKKIEYTSGTLWKYSQSVGPAYKGAVTHPGALKEKKCYADI

SEQ ID NO: 180458 - protein, 283 aa, Unknown
  Bacterial polypetide isolated from the Sargasso Sea
MNIPSIFVYGGTIKPGKLDGCDLTVVSSFEAVGQLTSGKIDEERLIAVEKNAIPGPGSCGGMFTANTMSAAIETMGFSLPFSSTMAAVDDEKAESAAESAQVLVNAVKNNIRPLDLLTKKAFENAISVIMAVGGSTNSVLHLLAIARTAGVDLTIDDFERIRQTVPVICDLKPSGRYVTVDLHQAGGIPQVMKLLLDAGMLHGECKTIEGKTIKEVLRDIPSNPKENQDVIRPISNPIYKKGHLAILKGNLASEGSVAKISGVKTPVLTGPARVFESEEECLA

SEQ ID NO: 180459 - protein, 310 aa, Unknown
  Bacterial polypetide isolated from the Sargasso Sea
FGTITVSDGISMGTEGMKYSLVSREVIADSIETACNAQSMDGVLAIGGCDKNMPGAMIAIARMNIPSIFIYGGTIKPGKLHGEDLTVVSAFEAVGQLTSGKINEERLIQVEKNCIPGAGSCGGMFTANTMSAVIEVLGLSLPHSSTMAAEDLEKELSAEKSAEILVSAIEKDIRPLDLMNKKAFENAISVIMAIGGSTNAVLHILAIANTAGIDVNINDFERIRQKVPVICDLKPSGKYVTVDLHNAGGIPQVMKILLNAGLIHGDCKNIEGKTISEYLKNIPDKPPTNQNVIRDIDDPLYKKRTSSNLK

SEQ ID NO: 180460 - protein, 296 aa, Unknown
  Bacterial polypetide isolated from the Sargasso Sea
SSLISREVIADSSELTVRGHCYDALVGIAGCDKSLPGLMMSMLRLNVPSVFIYGGSILPGKFKGKDVTVVDVFEAVGKHSSGKMSSEELRELELVACPSAGACGGQFTANTMACVSEAIGLALPYSAGTPAPYEERDKYAYESGQAVMNLLKKKIKPREIVTKKSLENAATIVAATGGSTNAALHLPALANEIGVKFDLMDVAKIFKKTPYLADLKPGGKYVAKDMWEAGGVPMLLKTLFDGGYIHGGCMTVTGKTMKENLANIKFNTNQKVLREYNNPLSPDGGVVGLKGNLAPD

SEQ ID NO: 180461 - protein, 250 aa, Unknown
  Bacterial polypetide isolated from the Sargasso Sea
YEAGGVPIIIKTLFEGGFIHGDCLTVTGRTVAENLEQVKFNSKQDVIRPYDKPLSLTGGVVGLKGNLAPDGAIVKVAGMENLKFSGKAKCFDCEEDAFECVKNGNYKEGDVFVIRYEGPKGGPGMREMLATTAAIYGQGMGDKVALITDGRFSGATRGFCVGHVSPEAAVCGPIALIQNGDEITLDAEKGEINLNVSKNELDQRKSAWKERKTDFNSGTLWKYTKTVGSAANGAVTHPGAEDETHVYADI

SEQ ID NO: 180462 - protein, 164 aa, Unknown
  Bacterial polypetide isolated from the Sargasso Sea
RRSQGKEGTSFEGKAKVFNSEEEGVEAILSNKIIEGDVVVIRYEGPKGGPGMREMLKPTSAIMGLGLGNKIAFITDGRFSGGTHGFVVGHVSPEAADGGLIALIEDGDTILIDADNDQLILKVDVDEIARRKSNWKNPIEGPKKGVLSKYAESVKSASLGAITD

SEQ ID NO: 180463 - protein, 315 aa, Unknown
  Bacterial polypetide isolated from the Sargasso Sea
LPYSAGTPAPFNRRDKYALASGKAVMNLLAKNIRPRDIVTKKALENAATIVAATGGSTNAALHLPAIANEIGIKFDLMDVAKIFKRTPYLADLKPGGKYVAKDMWKAGGVPMLLKTLMDGGYIHGNCMTVTGKTMKENLKNVKFNSKQKVMRKYNNPLSKDGGVVGMKGNLAPEGAIVKVAGLKRLQFTGRARCFDTEEAAYKAVKNRKYKDGDIIIIRYEGPKGGPGMREMLQTTGAIYGQGKGEKVALITDGRFSGATRGFCIGHVGPEASVGGPIALLRNGDIIDLDAKKGTINVRLTKKELAKRRKKWKPK

SEQ ID NO: 180464 - protein, 266 aa, Unknown
  Bacterial polypetide isolated from the Sargasso Sea
VVAGEGLDGFISFGGCDKNMPACVMAMLRLNRPSVFVYGGTILPGIYKNKNIDIVSVFEAVGKNANGIIDDNELYNIEKKAIPGPGSCGGMYTANTMACAIEAMGLSLTNSSAQTAISKSKLNDTKEASKALMKCVKKDLKPRDIVTKKSLENAITVVMALGGSTNAVLHLLAIANEAKIKLSLKDFERIGKKTPVLADLKPSGKYSMAELVEIGGVAPLMKVLINEGLMHGDCLTVTGKTIKNNLNKIKPYPLNQIIIKPISDPI

SEQ ID NO: 180465 - protein, 236 aa, Unknown
  Bacterial polypetide isolated from the Sargasso Sea
GDDDFGKPIIAIANSFTQFVPGHVHLKDLGQMVAREIEKSGGVAKEFSTIAVDDGIAMGHSGMLYSLPSRELIADAVEYMANAHCADALVCLSNCDKITPGMLMATMRLNIPTIFVSGGPMEAGKGLIKGQEASLDLIDAMVLAGDPSVSDEEVEKIERSACPTCGSCSGMFTANSMNCLVEALGLALPGNGSVLATHIDRKELFLKAGRIIVELTKQYYEKDDESVLPRNIANLK

SEQ ID NO: 180466 - protein, 271 aa, Unknown
  Bacterial polypetide isolated from the Sargasso Sea
QRLHIALMRQAQSVKNCVSKSGGTPREFCTITVTDGIAMGHEGMKSSLISRDVIADSTELTVRGHCYDALVGVAGCDKSLPGLMMAMVRLNVPSVFIYGGSILPGRFNGKDVTVVDVFEGVGKYSSGKMTAHALRKLELKACPSAGACGGQFTANTMACVSEAIGLALPYSAGTPAPYEQRDKYALSSGKAVMNLLQKNIRPREIVTKKALENAATIVAATGGSTNAALHLPAIANEIGIKFDLMDVAKIFKKTPYLADLKPGGKYVAKDM

SEQ ID NO: 180467 - protein, 284 aa, Unknown
  Bacterial polypetide isolated from the Sargasso Sea
VRGHCYDALVGVAGCDKSLPGLMMAMVRLNVPSVFIYGGSILPGRFNGKDVTVVDVFEGVGKFSSGKMSAHALRKLELKACPSAGACGGQFTANTMACVSEAIGLALPYSAGTPAPYTQRDSYALKSGKAVMNLLAKNIRPRDIVTKKSLENAATIVAATGGSTNAALHLPALANEAGIKFDLMDVARIFKKTPYLADLKPGGKYVAKDMWKAGGVPMLLKTLLDGGYIHGDCMTVTGKTMRQNLKNVKFNKNQKVMRTHNQPLSPDGGVVGLKGNLAPDGAIV

SEQ ID NO: 180468 - protein, 277 aa, Unknown
  Bacterial polypetide isolated from the Sargasso Sea
AIGLALPNSTGAPAPYESRDEYALAAGKQVMTLIEKNLRPRDIVTRKSFENAARVVAASGGSTNAALHLPAMANEAGIDFDLFAVAEIFKSTPYIADLKPGGKYVAKDLHEAGGVQVILKALFEAGYIHGDCMTVTGKTIEENLADITFPEEQDVIYKVENAITPTGGVVGLKGNLAEEGAIVKVAGMTRTKHVGPAIVFDCEEDAYKAVNERNYKEGDVFVIRYEGPKGGPGMREMLATTAAIYGQGMGEKVALITDGRFSGATRGFCVGHVGPEA

SEQ ID NO: 180469 - protein, 225 aa, Unknown
  Bacterial polypetide isolated from the Sargasso Sea
MNKLRSSAITQGVQRSPNRSMLRAVGFNDEDFNKPIIGVANGYSTITPCNMGLNKLALKAEESIKRSGGMPQMFGTITVSDGISMGTEGMKYSLVSREVIADSIETACNAQSMDGVLAIGGCDKNMPGAMIAIARMNIPSIFIYGGTIKPGKLHGEDLTVVSAFEAVGQLTSGKINEERLIQVEKNCIPGAGSCGGMFTANTMSAVIEVLGLSLPHSSTMAAEDL

SEQ ID NO: 180470 - protein, 286 aa, Unknown
  Bacterial polypetide isolated from the Sargasso Sea
SFENAITVSIALEGSTNAVLHLLGIAHAAGIKLELDDFSRIGKRVPVLADMRPAGQYAMSELIEIGGIQPLMKLLLAEGLLKGDCLTVTGKTLAENLEQVEDYPANQKIIRPLSNPIKKDSHLVILRGNLAPEGAVAKITGHEGLTFEGTAKCYKGEEAAMKAIMDGSVDKGDVVVVRYEGPKGGPGMREMLSPTSAINGRGLSEHVALITDGRFSGGSHGFVIGHITPEAFEGGPIALIEDGDSIAINAETCEINLLISKEEWDVRRAKWSKPEPYTRIGTLAKY

SEQ ID NO: 180471 - protein, 212 aa, Unknown
  Bacterial polypetide isolated from the Sargasso Sea
EGGCVREMAHAYSQEGGLAVLFGNIAQQGCVVKTAGVDEESLQFTGPAHVCESQEAAVADILEDRVRAGDVVIVRYEGPRGGPGMQEMLYPTSYLKSKGLGKACALITDGRFSGGTSGLSIGHVSPEAAGGGAIALIEPGDVIEIDIPARTINVKVDEVTLNERRAKMNQRDRAWQPAADRPRQISTALKVYASMVTSADKGAIRDSSLIDR

SEQ ID NO: 180472 - protein, 311 aa, Unknown
  Bacterial polypetide isolated from the Sargasso Sea
DQDLKDIEQVACPSAGSCGGQFTANTMACISEAVGLALTNSAMPPAVNTEERKAYGEKSGKAIMNLLEKNIRPRDIVTIDSLVNAARVVAATGGSTNAALHLPAIANEAGLKFTLRDVVEIYNSTPYIGDMQPGGKYVAKDLYDVGGVPVVIKSLLDGGYINGDCITVTGKTIAENHKEVIFPTNQDVVYKCDNPISENSSVVGLWGNLAPDGCISKIAGLNNLTFKGKAKCFDSEEDALTAVLKNEIKAGDAVIIRYEGPKGGPGMREMLSTTGAIYGQGLGETVALITDGSFSGGTRGFCIGHVGPRSC

SEQ ID NO: 180473 - protein, 212 aa, Unknown
  Bacterial polypetide isolated from the Sargasso Sea
CPGVGACGGMYTANTMASAIEALGMSVPFSSSNPAKSSDKINECNSLGDTLDTLIKKNILPSQIVTKKSIENALRLISVLGGSTNAVLHFLAIAKAANINLTLNDFQSISDKTPFLADLKPSGKYLMKDLHKVGGIPAVLKFMLENKMLHGDCLTVTGKTLAENLSKTSSLTKGQNLIRPLDQPIKPSGHIRILYGNLASKGAVAKITGKEG

SEQ ID NO: 180474 - protein, 255 aa, Unknown
  Bacterial polypetide isolated from the Sargasso Sea
LENAATIVAATGGSTNAALHLPALANEIGVKFDLMDVARIFKKTPYLADLKPGGQYVAKDMWEAGGVPMLLKTLYDGGFIHGDCMTVTGKKMGENLKNISFNKNQKVLREHNNPLSPDGGVVGLKGNLAPDGAIVKIAGLKKLQFTGKARCFDNEEEAMKAVQTKKYKDGDVIIIRYEGPRGGPGMREMLSTTGAIYGQGKGEKVALITDGRFSGATRGFCVGHVGPEAALGGPIALLKNGDIIDIDAKKGSINV

SEQ ID NO: 180475 - protein, 247 aa, Unknown
  Bacterial polypetide isolated from the Sargasso Sea
SVNNSGCKAVTFNTITVSDGISMGTEGMKYSLVSREVIADSIETVVGCLGYDGVVGIGGCDKNMPGVIIGLARLNRPSLFIYGGSIRPSEQNTDYVTVCEKTGEFSKGSISEEELISVEKVSVVGPGSCGGMYTANTMASAIEALGMSLPGSSSQDAVSNDKKNDCINTGSAIRNLLEKDIKPSDIMTKEAFENAITVVIALGGSTNAVLHLIAMAHAINVDLDLDDFTRIGKRVPVVADIKPFGEN

SEQ ID NO: 180476 - protein, 265 aa, Unknown
  Bacterial polypetide isolated from the Sargasso Sea
RSFYYAMGETEKDVSKPFIGVVSTWNEAAPCNIALMRQAQSVKKGVRASGGTPREFCTITVTDGIAMGHEGMKSSLISREVIADSAELTVRGHCYDALVGIAGCDKSLPGLMMSMVRLNVPSVFIYGGSILPGKYKGKDVTVVDVFEAVGKHSSGQMTAKELRKLELVACPSAGACGGQFTANTMACVSEAIGLALPYSAGTPAPYEERDKYAKLSGKMVMELLAKRIKPRDIVTKKALENAATIVAATGGSTNAALHLPAIANE

SEQ ID NO: 180477 - protein, 163 aa, Unknown
  Bacterial polypetide isolated from the Sargasso Sea
KITGKEGTSLKGKAKVFNSEEEGVSAILSNQINDGDVIVIRYEGPKGGPGMREMLKPTSAIMGLGLGDKIGFITDGRFSGGTHGFVVGHVSPEAAEGGLIALVEDGDTILIDAESDQLVLKVDDDEIKRRQSIWKNPNSKPKKGVLAKYAESVKSASLGAITD

SEQ ID NO: 180478 - protein, 271 aa, Unknown
  Bacterial polypetide isolated from the Sargasso Sea
LGPDKAPQRSFYYAMDLTEKDVAKPFVGVVSTWNEAAPCNIALMRQAQSVKKGVHQAGGTPREFCTITVTDGIAMGHEGMKSSLISRDVIADSTELTVRGHCYDALVGVAGCDKSLPGLMMAMVRLNVPSVFIYGGSILPGRFNGKDVTVVDVFEGVGKFSSGKMSAHALRKLELKACPSAGACGGQFTANTMACVSEAIGLALPYSAGTPAPYTQRDSYALKSGKAVMNLLAKNIRPRDIVTKKSLENAATIVAATGGSTNAALHLPALA

SEQ ID NO: 180479 - protein, 206 aa, Unknown
  Bacterial polypetide isolated from the Sargasso Sea
LSKIKSPNVSSNDLIFPISNPIKNTGHIQILKGNLAEDGCVAKITGKEGLTFSGPAKVFNSEFECLSAIKNSEVSKGDVVVIRYEGPKGGPGMPEMLKPTSAIMGAGLGKEVALITDGRFSGGTHGFVVGHIVPEAFEGGTIAIVENGDIITIDSEKNKIFVDISDKEIMERKEKWKQPDLKIKKGILYKYLKSVSNASNGCVTDE

SEQ ID NO: 180480 - protein, 288 aa, Unknown
  Bacterial polypetide isolated from the Sargasso Sea
IANEIGIKFDLMDVPRILKRTPYLADLKPGGKYVAKDMWKAGGVPMLLKTLMDGGYIHGNCMTVTGKTMKENLKNVKFNSNQKVMRKYNNPLSPDGGVVGMKGNLAPEGAIVKVAGLKRLQFTGRARCFDTEEAAYKAVKNRKYKDGDIIIIRYEGPKGGPGMREMLQTTGAIYGQGKGEKVALITDGRFSGATRGFCIGHVGPEASVGGPIALLRNGDIIDLDAKKGTINVRLSKKELAKRRKKWKPKKINFGNGTLWKYAQTVGPAYLGAPTHPGGKNEVKTYADI

SEQ ID NO: 180481 - protein, 291 aa, Unknown
  Bacterial polypetide isolated from the Sargasso Sea
AGCDKSLPGLMMSMVRLNVPSVFIYGGSILPGKYKGKDVTVVDVFEAVGKHSSGKMSAAELRKLELVACPSAGACGGQFTANTMACVSEAIGLALPYSAGTPAPYEERDKYAKESGKMVMQLLKKQIKPRDIVTRKALENAATIVAATGGSTNAGLHLPAIANEAGIKFDLMDVAKIFKRTPYLADLKPGGKYVAKDMWLAGGVPMLLKTLYEGGYIHGDCMTVTGKTMKENLKNIKFNPKQKVMRSYKDPLSPTGGVVGLKGNLAPDGAIVKVAGLAKLQFTGKARCFDN

SEQ ID NO: 180482 - protein, 303 aa, Unknown
  Bacterial polypetide isolated from the Sargasso Sea
YTANTMASAIEAMGMSLPNSSAQEAVSDDKVRDCVQAGETVLRLIEKNICPLDILTREAFENAVTVVMALGGSTNAVLHLLAMANAAKINLELDDFLRIGYKAPVLADLKPSGKYLMTDFVKIGGLPPLMKMLLDAGLLHGECMTVTGKTVRDNLKNVKPYEEGQEIVKTLDDPIRKTGHLVILRGNLASEGAVAKISGKEGEFFRGTARVFNSEEEALKRILDGTVVKGDVIVIRYEGPKGGPGMREMLSPTSAIMGRGLGNDVALITDGRFSGGSHGFVIGHITPEAFDGGLLGMVKMVIT

SEQ ID NO: 180483 - protein, 282 aa, Unknown
  Bacterial polypetide isolated from the Sargasso Sea
GQGFDGLITIGGCDKNMPACVMAMARLNRPSIFVYGGSIKPGSNRTDVVSVFEAVGKHSEGAISDIELLDIESTAIPGPGSCGGMYTANTMASAIEALGMSLPNSSAQEAVSSSKLKDSSDAGESIMNLISLDLKPRDIMTKQAFENAIAVVIALGGSTNAVLHLLAIAHEAKINLSLNDFERIGKRTPVLADLRPSGNYLMSELIEIGGIVPLMKSMLEKGLIDGNQMTVTGKTLEENLSDYDHYPKDQKIITSTDKPIKTDSHLRILYGNLAPSGAVAKI

SEQ ID NO: 180484 - protein, 240 aa, Unknown
  Bacterial polypetide isolated from the Sargasso Sea
KTLFEGGYIHGDCLTVTGKTIEENLKDVTFNTDQKVIRPYNEPLSPTGGVVGLKGNLAPDGAIVKVAGMENLHFKGKAICFDCEEDAFECVKNNNYSEGDVFVIRYEGPKGGPGMREMLSTTAAIYGQGMGDKVALITDGRFSGATRGFCIGHVSPEAAVCGPIALVENGDEIILDAENGTITISVSDEEMEKRKLSWKERKTDFNSGTLWKYSRTVGSASSGAVTHPGAEEETHTYADI

SEQ ID NO: 180485 - protein, 308 aa, Unknown
  Bacterial polypetide isolated from the Sargasso Sea
KFKGKDVTVVDVFEAVGKHSSGKMSSEELRELELVACPSAGACGGQFTANTMACVSEAIGLALPYSAGTPAPYEERDKYAYESGQAVMNLLEKKIKPREIVTKKSLENAATIVAATGGSTNAALHLPALANEIGVKFDLMDVAKIFKKTPYLADLKPGGKYVAKDMWEAGGVPMLLKTLYNGGYIHGDCMTVTGKTMKENLANIKFNTNQKVLREYNNPLSPDGGVVGLKGNLAPDGAIVKIAGLKKLQFTGKARCFDNEEDAMKAVQTKKYKDGDVIIIRYEGPKGGPGMREMLSTTGAIYGQGKGE

SEQ ID NO: 180486 - protein, 220 aa, Unknown
  Bacterial polypetide isolated from the Sargasso Sea
MKENLKNVKFKTNQKVMRKYNNPLSKTGGVVGLKGNLAPEGGIVKIAGLKKLQFTGKARCFNTEEDAYKAVKNRKYKDGDIIIIRYEGPKGGPGMREMLQTTAAIYGQGKGEKVALITDGRFSGATRGFCIGHVGPEASVGGPIALLRNGDVIDIDAKKGTINVRLSKKELSARRKKWKPKKMNFGNGTLWKYAQTVGPAYKGAPTHPGGKNEVRTYADI

SEQ ID NO: 180487 - protein, 279 aa, Unknown
  Bacterial polypetide isolated from the Sargasso Sea
AAVVVAATGGSTNAVLHLPAIAHEAGIKFTLDDVARIFKKTPYLADLMPGGKYTATDMYRAGGVPVVIKELLDNGLLHGDCITVTGKTLKQNHAKLKFPEKQKVFYRVKDALSPTGGVVGLKGTLAPEGAIVKVAGMEKLNFEGPARVFNCEEDAFEAVVQRKIKEGDVIVIRYEGPKGGPGMREMLSTTAALYGLGLGEKVALITDGRFSGGTRGFCIGHVGPEAAVGGPIGLLKNGDIISIDAKKGKLDVKLSKAELARRPENWKPREHDYQAGALW

SEQ ID NO: 180488 - protein, 270 aa, Unknown
  Bacterial polypetide isolated from the Sargasso Sea
MRKFNKKKLPSRHTSLGPDRAPHRSFYYAMGETEKDVSKPFVGVVSTWNEAAPCNIALMRQAQSVKKGVKASGGTPREFCTITVTDGIAMGHEGMKSSLISREVIADSAELTVRGHCYDALVGIAGCDKSLPGLMMSMVRLNVPSVFIYGGSILPGKYKGKDVTVVDVFEAVGKYSSGKISAKELKKLELVACPTAGACGGQFTANTMACVSEAIGLALPYSAGTPAPYEERDKYAKASGRMVMELLAKKIKPRDIVTRKAWKMQQRLLL

SEQ ID NO: 180489 - protein, 277 aa, Unknown
  Bacterial polypetide isolated from the Sargasso Sea
TAGVSLSIDDFERIRQHVPVICDLKPSGRYVTVDLHNAGGIPQVMKLLLDAGLLHGDCRTVEGKSLREVLADVPSVPPADQDLIRPLSNPLYAKGHLAILKGNLASEGSVAKISGVKTPVLTGPARVFESEEDCLAAILDQRIKAGDVVVVRNEGPVGGPGMREMLAPTSAIVGQGLGDKVALITDGRFSGGTYGLVVGHVAPEAAVGGTIGLVQEGDSITVDADQLLLQLNVDEAELTRRRTAWSKPEPRYRTGILGKYARLVSSSSRGAVTDQPD

SEQ ID NO: 180490 - protein, 211 aa, Unknown
  Bacterial polypetide isolated from the Sargasso Sea
MNKLRSSAITQGVQRSPNRSMLRAVGFNDEDFNKPIIGVANGYSTITPCNMGLNKLALKAEESIKRSGGMPQMFGTITVSDGISMGTEGMKYSLVSREVIADSIETACNAQSMDGVLAIGGCDKNMPGAMIAIARMNIPSIFIYGGTIKPGKLYGEDLTVVSAFEAVGQLTSGKINEERLIQVEKNCIPGAGSCGGMFTDNTMSAVIEVLG

SEQ ID NO: 180491 - protein, 295 aa, Unknown
  Bacterial polypetide isolated from the Sargasso Sea
NIALMRQAQSVKKGVKDAEGTPREFCTITVTDGIAMGHQGMKSSLVSREVIADSTELTVRGHSYDAIVGLAGCDKSLPGLMMAMCRLNVPSVFMYGGSILPGRYKGNDVTVVDVFEAVGKYAAGAATEKDLKELEQVACPSDGACGGQFTANTMACVSEIIGLALPYSSGAPAPYEDRDKYAYDSGKQIMNLIEKNIRPRDIVTKKSLENAATIVAATGGSTNAGLHLPAIAHECGIKFSLDDVVEIFKRTPYIADLKPGGQYVAKDVYEAGGVPIIIKTLFDGGFLHGDCMTVT

SEQ ID NO: 180492 - protein, 276 aa, Unknown
  Bacterial polypetide isolated from the Sargasso Sea
LHLPAIAHECGIKFDLDDVVEIFKRTPYLADLKPGGQYVAKDVYEAGGVPIIIKTLYEGGFIHGECLTVTGNTIAENLKSVEFNKNQRVIRSYDEPLSITGGVVGLKGNLAPEGAIVKVAGMENLKFKGHAKCFDCEEDAFECVKNENYKEGDVFVIRYEGPRGGPGMREMLATTAAIYGQGMGDKVALITDGRFSGATRGFCVGHVSPEAAVCGPIALVEDGDEIILDAENGEISINVPLETLEKRKKSWKERKTDFNSGTLWKNSQTVGSAVKG

SEQ ID NO: 180493 - protein, 186 aa, Unknown
  Bacterial polypetide isolated from the Sargasso Sea
PACVMAMARLNRPSVFVYGGTIKPGPNKTDIVSVFEAVGALSSGKIDNNQFTEVEKTAIPGPGACGGMYTANTMASAIEALGLSLANSSAQEAVSNEKVLDCREAGKAVMNLIKKDIKPLDILSKEAFENAITVVIALGGSTNAVLHLIAMAKEANIDVSLDDFSRIGAKVPVLADLKPKWKIFNV

SEQ ID NO: 180494 - protein, 297 aa, Unknown
  Bacterial polypetide isolated from the Sargasso Sea
ACPSAGSCGGQFTANTMACVSETIGLALPGSAMTPAPFESRDQYAYESGKVVMDLIEKNLRPRDIVTKQSLINAAIVVSASGGSTNAGLHLPAIAHEAGIDFNLEDVTKIFQSTPYIGNLAPGGKYVAKDLYEVGGVPVLIKTLIDGGLIDGSCITVTGKTLAENVKDFELPKNQDVIYPISNPISKTGGVVGLKGSLAPEGAIVKIAGLKKLQFKGNAICFDREEEALSAVLEGKIKPGNVLVIRYEGPKGGPGMREMLSTTSAIYGQGMGEEVALITDGRFSGGTRGILYRSCWP

SEQ ID NO: 180495 - protein, 314 aa, Unknown
  Bacterial polypetide isolated from the Sargasso Sea
DVIEGVGEYSSGKISQHALRKLELKACPSAGACGGQFTANTMACVSEAIGLALPYSAGTPAPYQKRDKFAVASGKMVMNLLRKKIRPRDIVTRKSLENAAAVVAATGGSTNAALHLPAIANEIGIKFDLMDVAKIFRRTPYLANLKPGGLYVAKDMWKAGGIPMLLKTMLDGGYLHGDCLTVTGKTMRENLKNVKFNIRQKVMRKYNNPITKDGGVVGLKGNLSPHGAIVKIAGLKKLSFTGKARCFDSEESALKAVLNKKYKKGDVIVIRHEGPKGGPGMREMLQTTAAIYGQGMGEKVALITDGRFSGATRG

SEQ ID NO: 180496 - protein, 280 aa, Unknown
  Bacterial polypetide isolated from the Sargasso Sea
GALVASEIEAAGGVAKEFNTIAVDDGIAMGHGGMLYSLPSRELIADSVEYMVNAHCADAMVCISNCDKITPGMLMAAMRLNIPVVFVSGGPMEAGKVKSPTDGQVIAKIDLIDAMIKAGDSRVSDAEVAEIERNACPTCGSCSGMFTANSMNCLTEAIGLALPGNGTIVATHAYRKSLFEQAGRLVVDLCRRYYQEEDASVLPRSIANKQAFENAMALDVAMGGSTNTVLHLLAAAQEGGVDFTMSDIDRISRKVPCLCKVAPATDKYHIEDVHRAGGIP

SEQ ID NO: 180497 - protein, 320 aa, Unknown
  Bacterial polypetide isolated from the Sargasso Sea
AMVRLNVPSVFIYGDQSSRKINGKDVTVVDVFEGVGKYSSGKMTEHALRKLELVACPSAGACGGQFTANTMACVSEAIGLALPYSAGTPAPYEQRDKYALQSGKAVMNLLKKNIRPRQIVTRKSLENAATIVAATGGSTNAALHLPALANEIGIKFDLMDVAKIFKKTPYLADLKPGGKYVAKDMWAAGGVPMLLKTLMDGGYIHGDCMTVTGKTMRQNLKKVKFNIKQKVMRKYNNPLSQDGGVVGLKGNLAPDGAIVKIAGLKKLQFTGKARCFDTEESAYKAVKNRKYKDGDIIIIRYEGPKGGPGMREMLQTTGAI

SEQ ID NO: 180498 - protein, 252 aa, Unknown
  Bacterial polypetide isolated from the Sargasso Sea
EAGIKFDLMDVAKIFKRTPYLADLKPGGKYVAKDMWLAGGVPMLLKTLYEGGYIHGDCMTVTGKTMKENLKGIKFNPKQKVMRSFKNPLSPTGGVVGLKGNLAPEGGIVKIAGLKKLQFTGRARCFDNEESAMKAVQSRKYKDGDVIIIRYEGPVGGPGMREMLSTTGAIYGQGKGEKVALITDGRFSGATRGFCVGHVGPEAALGGPIALLRNGDIIDIDAKKGTINVRLTRAQLASRRRKWKARKSDFGS

SEQ ID NO: 180499 - protein, 263 aa, Unknown
  Bacterial polypetide isolated from the Sargasso Sea
MEISSRNVVEGTSRAPHRAMYKAMGLSDDDLAKPFVGVCHTGNEATPCNIHLPGLAQKAKDGVKDSGATPREFSTIAVSDGIAMGHEGMKSSLVSREVIADSIELMVRAHQYDALVGIAGCDKSLPGTMMAMARLNIPSIFVYGGTIMPGILDGKELTVVDVYEAVGSYNAGQISLEELKNIEDTACPNAGSCGGMFTANTMASISEALGIALPGSASPPAEDDRREKIVYETGKACTELLELNIKPRDILTFESFENAITML

SEQ ID NO: 180500 - protein, 138 aa, Unknown
  Bacterial polypetide isolated from the Sargasso Sea
VIRYEGPRGGPGMREMLATTAAIYGQGMGDKVALITDGRFSGATRGFCVGHVSPEAAVCGPIALVEDGDEITLDAENGEISINVPLETLEKRKKSWKERKTDFNSGTLWKYSQTVGSAVKGAVTHPGALKETHVYSDI

SEQ ID NO: 180501 - protein, 246 aa, Unknown
  Bacterial polypetide isolated from the Sargasso Sea
YQVSLFIGGSILPGRFNGKDVTVVDVFEGVGKFSSGKMSAHALRKLELKACPSAGACGGQFTANTMACVSEAIGLALPYSAGTPAPYTQRDSYALKSGKAVMNLLAKNIRPRDIVTKKSLENAATIVAATGGSTNAALHLPALANEAGIKFDLMDVARIFKKTPYLADLKPGGKYVAKDMWKAGGVPMLLKTLLDGGYIHGDCMTVTGKTMRQNLKNVKFNKNQKVIRTHNQPLSPDGGVVGLKGN

SEQ ID NO: 180502 - protein, 283 aa, Unknown
  Bacterial polypetide isolated from the Sargasso Sea
PSLLVYGGTVRPGKWKGEDLNIVSAFEAYGKRLGNAISDEDYDGIIKNSIPGPGACGGMYTANTMSSAIEAMGMSLPSSASNPAEGDAKQNEIAKVGKAIYHLLKEDIRPSDIMTLEAFENAIRVIMILGGSTNAVLHLIAMAKAVNVPIGLDDFQRLSDTTPFIADLKPSGEYLMEDLHKVGGVPAVMKMMLEQGYLHGDCLTVTGKTLAENLEGYPDLAQGQKVIHDFTQPIKKTGHLQILYGNLAPEGAVAKITGKEGEYFEGPARCFNDEFEAIEGIGK

SEQ ID NO: 180503 - protein, 281 aa, Unknown
  Bacterial polypetide isolated from the Sargasso Sea
GLSLPYSSTMAAEDPEKADSAARSAEVLVEAIAANIRPLDLLTREAFENAISVIMAVGGSTNAVLHLLAIARTAGVPLSIDDFETIRQRVPVICDLKPSGRFVTVDLHEAGGIPQVMKLLLDGGLLHGDCRTVEGKTLREVLADIPSSPPADQDVIRPLSNPLYAKGHLAVLKGNLASEGAVAKISGVKTPVLTGPAKVFESEEECLQAILANKIQAGDVVVVRNEGPVGGPGMREMLAPTAAIVGEGLGDKVALITDGRFSGGTYGLVVGHVAPEAAVGG

SEQ ID NO: 180504 - protein, 291 aa, Unknown
  Bacterial polypetide isolated from the Sargasso Sea
KKKIKNNDRRKYSQKFYDGFERAPSRSMLYPLGFKKDDFNKPQVGIASTWSRVTPCNAHIHDLAKKVVDGVEKHQGKGVHFNTITVSDGISMGTSGMNYSLVSREVIADSIETVVEAQGFDGVVALGGCDKNIPACLMSMIRLNRPSLFVYGGSILPGTLPGNKKIDIVSVFEAVGKYAKKEIDETELELIESKAIPGFGSCGGMYTANTMASAATALGMTLPDSSSNLAESDEKLDDCERAGKAVMKLIEKNLCPKDILSFKSFENAITVVMTLGGSTNAVLHLLALAKE

SEQ ID NO: 180505 - protein, 269 aa, Unknown
  Bacterial polypetide isolated from the Sargasso Sea
MKFDKNKLPSRHVSVGPERAPHRSYYYAMGLNEDDIGKPFVGVVSTWNEAAPCNIALMRQAQSVKKGVTKAEGTPREFCTITVTDGIAMGHQGMKSSLVSREVIADSTELTVRGHCYDAIVGLAGCDKSLPGLMMAMCRLNVPSVFMYGGSILPGKYKGKDVTVVDVFEAVGKYSSGNATEEELHELECVACPSAGACGGQFTANTMACVSEAIGLALPYSSGAPAPYEERDKYAYEAGKQVMQLIEKNIRPRDIVTRKSLENAATIVA

SEQ ID NO: 180506 - protein, 347 aa, Unknown
  Bacterial polypetide isolated from the Sargasso Sea
AIVLALPYSAGPPAPYKERHKYAINSGKAVMELLSKNIRPRDIVTRKALENAATVVAATGGSTNAGLHLPAIANEIGIKFDLMDVAKIFKRTPYLADLKPGGKYVAKDMWEAGGVPMLLKTLYDGGYIHGDCMTVTGKTMKENLKNVKFNPKQKVMRSYKNPITPTGGVVGLRGNLAPEGGIVKIAGLKKLQFTGRARCFDSEEKAYKAVKERKYKDGDIIIIRYEGPKGGPGMREMLQTTAAIYGQGKGEKVALITDGRFSGATRGFCIGHVGPEASIGGPIALLKNGDIIDIDAKKGTINVRLSKKELSLRKKKWRQRKMNFGNGTLWKYAQTVGPAYLGAPTHP

SEQ ID NO: 180507 - protein, 322 aa, Unknown
  Bacterial polypetide isolated from the Sargasso Sea
KKKLPSRHSSLGADRAPHRSFYYAMGETEKDVAKPFVGVVSTWNEAAPCNIALMRQAQSVKKGVRANGGTPREFCTITVTDGIAMGHEGMKSSLISREVIADSAELTVRGHCYDALVGIAGCDKSLPGLMMSMVRLNVPSVFIYGGSILPGRYKGKDVTVVDVFEAVGKHSTGQMSAAELRKLELVACPSAGACGGQFTANTMACVSEAIGLALPYSAGTPAPYEERDKYAKASGKTVMNLLKKGIKPRDIVTKKALENAATVVAATGGSTNAGLHLPAIANEAGIKFDLMDVAKIFKRTPYLADLKPRWKNMLQKTHVVSQ

SEQ ID NO: 180508 - protein, 267 aa, Unknown
  Bacterial polypetide isolated from the Sargasso Sea
FLRAGKIIVELTKKYYEKDDESVLPRNIANLESFENAMTLDIAMGGSTNTVLHILAAAKEAGLDFGMDEIDRLSRRVPNLCKVAPSSNFHMEDVHRAGGIMAILGELEKAKLLNSDSKTVHSETMLDAIQKWDINRKPSNEVKEFYSAAPGMIPTTQPFSQNKRYSELDVDRENGCIRDSHNAHSQDGGLAVLKGNIASDGCIVKTAGVDEKILTFSGPAKVFESQDDAVEAILGDQIVAGDVVVIRYEGPKGGPGMQEMLYPTSYL

SEQ ID NO: 180509 - protein, 282 aa, Unknown
  Bacterial polypetide isolated from the Sargasso Sea
STNAVLHLIAMAHVINVDINLDDFTRIGKKVPVIADIKPFGKNYMSSLNELGGIQPLMKMLLDAGLIHGNCLTVSGKTISENLSKVDAYPENQTIIREMSNPIKSSSHLRILYGNLAPEGAVAKITGNEGLKFTGTAKVFDSEEDGNEAIQKNLINDGDVVVIRYEGPKGGPGMREMLKPTSAIMGQGLGDKVAFITDGRFSGGTHGFVVGHISPEAYVGGPIGVIKNGDKITIDAETNSISIDISDEELQKRLDNFKPNKELPKKGVLSKYSKSVQSASLG

SEQ ID NO: 180510 - protein, 299 aa, Unknown
  Bacterial polypetide isolated from the Sargasso Sea
FDIRHKSRVLVDGPDRAAARSQLHSVGYTRDDLKKPLVMVAHEWIGTMPCNYSQRALAQQVMAGIRAAGGTPMEVNTVSISDGITMGTEGMKASLISRELIADSIELCGIGYSFDAAVIIVGCDKTIPGGAMALARLNLPGIVLYSGSIAPGSFQGEDVTIQDVFEGVGKHAAGNMTDEELAELEAAACPGAGACGAQYTANTMATVLEFLGISEMGTSTPGATDPRKNDIGVEIGERVMELLANGTLPRELLTKEAFENGIACATATGGSTNVVLHLLAIAAECGIDLDIDDFNPCFG

SEQ ID NO: 180511 - protein, 297 aa, Unknown
  Bacterial polypetide isolated from the Sargasso Sea
TTITVTDGIAMGHEGMKSSLVSREIIADSVELTMRGHCYDALVGLAGCDKSLPGMMMSMVRLNVPSVFVYGGTILPGKFQGRDVTIVDVFEGVGQYAAGNMSDIELKTLESVACPCEGSCGGQYTANTMACVAETIGLALPTSSGAPAVYKSRDEMVRASGIAVMDALEKDLRPRDIVTRESLENAAVVVAATGGSTNAGLHLPAIANEAGIKFTLDDVVKIFKKTPYLADLMPGGRYTATDMYRAGGVPVIIKELLDNGLLHGECMTITGKTLKQNHAKQKFPEKQKVFYRVRNAL

SEQ ID NO: 180512 - protein, 211 aa, Unknown
  Bacterial polypetide isolated from the Sargasso Sea
FNNKQKVMRKYNNPLSHDGGVVGLKGNLAPQGAIVKVAGLKKLQFTGRARCFDTEESAYKAVLKRKYKDGDIIIIRYEGPRGGPGMREMLQTTGAIYGQGKGEKVALITDGRFSGATRGFCIGHVGPEASVGGPIALLKNGDIIHIDAKKGTINVDLSKKELIKRRKKWKPKKINFGNGTLWKYAQTVGPAYLGASTHPGGKNEVKCYADI

SEQ ID NO: 180513 - protein, 281 aa, Unknown
  Bacterial polypetide isolated from the Sargasso Sea
VRGHCYDALVGIAGCDKSLPGLMMSMVRLNVPSVFIYGGSILPGRYKGKDVTVVDVFEAVGKHSSGQMSAAELRKLELVACPSAGACGGQFTANTMACVSEAIGLALPYSAGTPAPYEERDKYAKASGKMVMNLLKKAIKPRDIVTRKALENAATVVAATGGSTNAGLHLPAIANEAGIKFDLMDVAKIFKRTPYLADLKPGGKYVAKDMWLAGGVPMLLKTLYEGGYIHGDCMTVTGKTMKENLKGIKFNPKQKVMRSYKNPLSPTGGVVGLKGNLAPEG

SEQ ID NO: 180514 - protein, 158 aa, Unknown
  Bacterial polypetide isolated from the Sargasso Sea
TEESAYKAVLQRKYKDGDIIVIRYEGPKGGPGMREMLQTTGAIYGQGKGEKVALITDGRFSGATRGFCIGHVGPEASVGGPIALLKNGDLIHIDAKKGTINVNLSKKELFKRKKKWKPKKINFGNGTLWKYAQTVGPAYLGASTHPGGKKEVKCYADI

SEQ ID NO: 180515 - protein, 302 aa, Unknown
  Bacterial polypetide isolated from the Sargasso Sea
CGCCFTWNEAAPCNIALMRQAQSVKKGVRANGGTPREFCTITVTDGIAMGHEGMKSSLISREVIADSAELTVRGHCYDALVGIAGCDKSLPGLMMSMVRLNVPSVFIYGGSILPGRYKGKDVTVVDVFEAVGKHSSGKMTAAELRKLELVACPSAGACGGQFTANTMACVSEAIGLALPYSAGTPAPYEERDKYAKASGRTVMNLLKKRIKPRDIVTKKALENAATIVAATGGSTNAGLHLPALANEAGIKFDLMDVAKIFKRTPYLADLKPGGKYVAKDMWLAGGVSMLLKTLYEGGYIHG

SEQ ID NO: 180516 - protein, 297 aa, Unknown
  Bacterial polypetide isolated from the Sargasso Sea
RATGQIKSDEDFDRPFIGVANSYIDLIPGHVHLQEFGSVAKKAVREAGGVPFEFNTIGVDDGIAMGHIGMRYSLASRELIADSVETVAESHRLDGLICISNCDKIVPGMLMASLRVNIPTVFVSGGPMEAGTNKRGEKVDLVSVFEGVGKFKTGSIDEDDLLDLEENGCPTCGSCSGMFTANSMNCLLEVLGLALPGNGTILATDPSRLDLVKQAGKAIIDLVDKDLKPRDIVNNDSIRNAFALDMAMGGSTNTVLHTLAASIEAGLSFDMKEINEISRRTPYLCKVSPATPNVHME

SEQ ID NO: 180517 - protein, 271 aa, Unknown
  Bacterial polypetide isolated from the Sargasso Sea
QDAVSSSKNQDCVDAGIAIMDLLEKDIKPSDIMTKEAFENAITIVIALGGSTNAVLHILAMAHSIGVKLKLDDFTNIGKKTPVLADLKPFGSHYMSELNSSGGIQPLMKSLLEKGLLNGECMTVTGKTLEDNLKDIEPYKDNKIIKSFESPIKSDSHLRILYGNLASDGAVAKITGKEGTSFEGKAKVFNSEEDGVKAILGNQIEEGDVIVIRYEGPKGGPGMREMLKPTSAIMGLGLGDKVAFITDGRFSGGTPWFCSWPHILPEAADGG

SEQ ID NO: 180518 - protein, 157 aa, Unknown
  Bacterial polypetide isolated from the Sargasso Sea
MNKLRSSAITQGVQRSPNRSMLRAVGFNDEDFNKPIIGVANGYSTITPCNIGLNKLALRAEESIKRSGAMPQMFGTITVSDGISMGTEGMKYSLVSREVIADSIETACNAQSMDGVLAIGGCDKNMPGAMIAIARMNIPSIFIYGGTIKPGKLHGED

SEQ ID NO: 180519 - protein, 271 aa, Unknown
  Bacterial polypetide isolated from the Sargasso Sea
NTAGIEININDFERIRQKVPVICDLKPSGKYVTVDLHKAGGIPQVMKILLNAGLIHGDCKNIEGKTISEYLQNIPDKPPTNQNVIREINNPLYKKGHLAILKGNLASEGSVAKISGVKNPVLTGPAKIFESEEDCLKSILNNDIKAGDVVVIRNEGPVGGPGMREMLAPTSAIVGQGLGEKVALITDGRFSGGTYGLVVGHIAPEAAVGGNIALIKEGDLITVDAVKQLIEVDLSDEELEKRKKDWVKPTPKYKRGILSKYSKIVSTSSLG

SEQ ID NO: 180520 - protein, 255 aa, Unknown
  Bacterial polypetide isolated from the Sargasso Sea
VAKDMWLAGGVPMLLKTLYEGGYIHGDCMTVTGKTMKENLKNIKFNPKQKVMRSYKDPLSPTGGVVGLKGNLAPDGAIVKVAGLAKLQFTGKARCFDNEESAMKAVQSKKYNDGDVIIIRYEGPVGGPGMREMLSTTGAIYGQGKGERVALITDGRFSGATRGFCVGHVGPEAALGGPIGLLRNGDIIDIDAKKGTINVRLSKKELASRKRKWRARKSDFGSGTLWKYAQTVGPAFLGAPTHPGKKKEVKDYSEI

SEQ ID NO: 180521 - protein, 235 aa, Unknown
  Bacterial polypetide isolated from the Sargasso Sea
IPQVMKILLNAGLIHGDCKNIEGKTISEYLQNIPDKPPTNQNVIRDIDNPLYKKGHLAILKGNLASEGSVAKISGVKNPVLTGPAKIFESEEDCLKSILNNDIKAGDVVVIRNEGPVGGPGMREMLAPTSAIVGQGLGEKVALITDGRFSGGTYGLVVGHIAPEAAVGGNIALIKQGDLITVDAVKQLIEVDLSDEELEKRKKDWVKPIRKYKRGILSKYSRIVSTSSLGAVTDL

SEQ ID NO: 180522 - protein, 301 aa, Unknown
  Bacterial polypetide isolated from the Sargasso Sea
DEDVAKVERSACPTCGSCSGMFTANSMNCLVEALGLALPGNGSVLATHIDRKELFLRAGKIIVELTKQYYEKDDESVLPRNIANLESFENAMTLDIAMGGSTNTVLHILAAAKEAGLNFGMDDIDRLSRRVPNLCKVAPSSNFHMEDVHRAGGIMAILGELEKAKLLNSDNKTVHSETMLDAIQKWDINRKPSNEVKEFYSAAPGMIPTTQPFSQNKRYSELDVDRQNGCIRDSDNAHSQDGGLAVLKGNIASDGCIVKTAGVDEKILTFSGPAKVFESQDDAVEAILGDPDCSWRCGCYS

SEQ ID NO: 180523 - protein, 115 aa, Unknown
  Bacterial polypetide isolated from the Sargasso Sea
MLRGAGFKDEDFEKSIVGIASLGASVTPCNMHLNSLAEIVEESVNNSGCKAVTFNTITVSDGISMGTEGMKYSLVSREVIADSIETVVGCLGYDGVVGIGGCDKNMPGVIIGLAR

SEQ ID NO: 180524 - protein, 247 aa, Unknown
  Bacterial polypetide isolated from the Sargasso Sea
LIHYEKVSVEGPGSCGGMYTANTMASSIEALGMSLPGSSSQDAVSDSKNQDCINAGNAIMNLLEKDIKPSDIMTREAFENAITVVIALGGSTNAVLHLLAIAYSIGVELCLDDFTKIGKRTPVLANLKPFGDHYMSELNANGGIQPMMKTLLEKGLLHGECITVTGKTLSENLENVQPYKNNIIIKDFDEPIKEDSHLRILYGNLAKEGAVAKITGKEGTSFEGKARVFNSEEDGVKAILSNSIKAG

SEQ ID NO: 180525 - protein, 288 aa, Unknown
  Bacterial polypetide isolated from the Sargasso Sea
INNQLKPRDIVTKQALLNGARVVACSGGSTNAALHLPAIANEVGIDFDLLDVAKIFKETPYIVDLKPGGKYLAKDLYEIGGVPIIMRALLDGGLLDGKCMTVTGKTIEENLEGIKLDVDSQKIVYPTHSPISKTGGVVGLQGNLAPDGAIVKVAGMKSLKFKGNARCFNCEEDAFEAVSNNKYSDGDVFVIRYEGPRGGPGMREMLATTAAIYGQGMGEKVALITDGRFSGATRGFCVGHVSPEAADGGPISLINDGDEIIIDAEKGIIQLEVSDEELKSRKKKIKKQ

SEQ ID NO: 180526 - protein, 279 aa, Unknown
  Bacterial polypetide isolated from the Sargasso Sea
ILIHGKISDDVTQGVSKSAARAMLRAVGLKDDDFNKFQVGIVSAGNEVTPCNLTGPELSEYAKVGVNGPDSAGLIFSTIAVSDGISMGHEGMRASLVSREVIADSVELVMHAERFDGMVTIAGCDKSLPGMLMAAGRINRPAIFLYGGSSLPGVYKGKDISIVDVFEGIGAYEKGMITKEDLYEIECAACPGVGSCAGMFTANTMASVGEAIGMSLPGTASIPAEDSRLRVAAEESGKQLNYLLKNDIKPRDIMTKEAFINAITTVLALGGSTNAVLHL

SEQ ID NO: 180527 - protein, 575 aa, Unknown
  Bacterial polypetide isolated from the Sargasso Sea
MTDKGSNIKSRLPSRHVSVGPKSAPHRSMYYAMGMTEEQIYQPFVGVATTWNESAPCNITLGRQAQAVKKGVSELNGTPREFTTITVTDGIAMGHEAMKASLVSREVIADSVELSVRGHCYDGIVGLAGCDKSLPGLMMAMVRLNIPSVFIYGGSILPGNYKGKDLTIIDVFEAVGKHASGEIDEKELKNIEKVACPTAGSCGGQFTANTMACISEALGLALTNSAMTPATYEERDNYGFESGKAVMSLIEKNIRPRDIVTLESLKNAAVVVAATGGSTNAALHLPAIANEAGIKFTLNDVVEIYQSTPYIGDMSPGGKYVAKDLYEVGGVPIVIKSLLDGGYINGDCMTVTGKTIAENHKSVIFPKDQDVVYTCDNPISDHSSVVGLWGNLAKEGSISKIAGLKNLSFKGKAKCFDCEEDALTAVLKNEIVAGDAVIIRYEGPKGGPGMREMLSTTGAIYGQGLGETVALITDGRFSGGTRGFCIGHVGPEAAVGGMIGLVKDGDEIIINAIKGEINVSLTEEEIVKRKKEWKPRTTNHNSGSIWKYAQTVGPAYAGAVTQPGAKEETHTYADI

SEQ ID NO: 180528 - protein, 373 aa, Unknown
  Bacterial polypetide isolated from the Sargasso Sea
KNCIPGAGSCGGMFTANTMSAVIEVLGLSLPHSSTMAAEDLEKELSADKSAEILVSAIEKDIRPLDLMTKKAFENAISVIMAIGGSTNAVLHILAIANTAGIDININDFERIRQKVPVICDLKPSGKYVTVDLHNAGGIPQVMKILLNAGLIHGECKNIEGKTISEYLQKIPDKPPANQDVIRDIDNPLYKKGHLAILKGNLASEGSVAKISGVKNPVLTGPAKIFESEEDCLKSILNNDIKAGDVVVIRNEGPVGGPGMREMLAPTSAIVGQGLGEKVALITDGRFSGGTYGLVVGHIAPEAAIGGNIALIKQGDLITVDAVKQLIEVDLSDEELEKRKKDWVKPRQKYKRGILSKYSRIVSTSSLGAVTDL

SEQ ID NO: 180529 - protein, 349 aa, Unknown
  Bacterial polypetide isolated from the Sargasso Sea
CPGAGACGGMYTGNTMASAAEALGLTLPYSSSIPAAQDRKKAECRRVGAVLRRLLEEDLRPRDIMTRAAFENAIVLVTILGGSTNAVLHLLAIAHSAEVELTLDDFQAVSDRTPYLSDLKPSGRYVMQDLDRVGGVPAVLRTLLDAGLIDGSCLTVTGYTVEENLSEVAPLSVKQEVVRPLSDPIKASGHLRIMRGSMAPEGAVAKITGKEGVEFSGPARVFDREEAALAALERNEILSGDVVVIRYEGPRGGPGMPEMLTITSAIMGAGLGSEVALVTDGRFSGGSHGFVIGHVTPEAQNGGPIALVENGDRITIDAERNDIAWDVDFEEAERRRAAWREPPLAAKRG

SEQ ID NO: 180530 - protein, 482 aa, Unknown
  Bacterial polypetide isolated from the Sargasso Sea
GHEGMKSSLISREVITDSAELTVRGHCYDALVGIAGCDNSLPGLMMSMVRLNVPSVFIYGGSILPGKYKGKDVTVVDVFEAVGKHSSGQMTAKELRKLELVACPTAGACGGQFTANTMACVSEAIGLALPYSAGTPAPYEERDKYAKDSGKMVMELLAKKIKPRDIVTKKALENAATIVAATGGSTNAALHLPAIANEAGIKFDLMDVAKIFKRTPYLADLKPGGKYVAKDMWLAGGVPMLLKTLYEGGYIHGDCMTVTGKTMKENLKNIKFNPKQKVMRSYKDPLSPTGGVVGLKGNLAPDGAIVKVAGLAKLQFTGKARCFDNEESAMKAVQSKKYNDGDVIIIRYEGPVGGPGMREMLSTTGAIYGQGKGEKVALITDGRFSGATRGFCVGHVGPEAALGGPIGLLRNGDIIDIDAKKGTINVRLSKKELASRKRKWRARKSDFGSGTLWKYAQTVGPAFLGAPTHPGKKKEVKDYSEI

SEQ ID NO: 180531 - protein, 415 aa, Unknown
  Bacterial polypetide isolated from the Sargasso Sea
IYGGTIKPGKLHGEDLTVVSAFEAVGQLTSGKINEERLIQVEKNCIPGAGSCGGMFTANTMSAVIEVLGLSLPHSSTMAAEDLEKELSADKSAEILVSAIEKDIRPLDLMTKKAFENAISVIMAIGGSTNAVLHILAIANTAGIDININDFERIRQKVPVICDLKPSGKYVTVDLHKAGGIPQVMKILLNAGLIHGDCKNIEGKTISEYLQNIPDKPPTNQNVIRDIDDPLYKKGHLAILKGNLASEGSVAKISGVKNPVLTGPAKIFESEEDCLKSILNNDIKAGDVVVIRNEGPVGGPGMREMLAPTSAIVGQGLGEKVALITDGRFSGGTYGLVVGHIAPEAAVGGNIALIKQGDLITVDAVKQLIEVDLSDEELEKRKKDWVKPIQKYKRGILSKYSRIVSTSSLGAVTDL

SEQ ID NO: 180532 - protein, 163 aa, Unknown
  Bacterial polypetide isolated from the Sargasso Sea
MPKLRSATSTEGRNMAGARALWRATGVKETDFGKPIIAIANSFTQFVPGHVHLKDMGALVASAIEEVGGIAKEFNTIAVDDGIAMGHGGMLYSLPSRELIADSVEYMVNAHCADALVCISNCDKITPGMLMAALRLNIPVVFVSGGPMEAGKTKLSDKIIKLD

SEQ ID NO: 180533 - protein, 619 aa, Unknown
  Bacterial polypetide isolated from the Sargasso Sea
MPKLRSATSTEGRNMAGARALWRATGVKDNDFGKPIIAIANSFTQFVPGHVHLKDMGSLVASAIEEAGGIAKEFNTIAVDDGIAMGHGGMLYSLPSRELIADSVEYMVNAHCADALVCISNCDKITPGMLMAALRLNIPVVFVSGGPMEAGKTKLSDKLIKLDLVDAMVAAADSSVSDEDSAKIERSACPTCGSCSGMFTANSMNCLTEALGLSLPGNGSMLATHSDRRELFLEAGRRVMALTKRYYEQDDASALPRNIASFKAFENAMALDIAMGGSSNTVLHLLAAAQEADVAFTMDDIDRMSRQVPHLCKVAPSTAKYHMEDVHRAGGVMGILGELDRAGLLHTDVPHVAADAGGNLKSVLAKYDVMQTQDNKVKQFFMAGPAGIPTTKAFSQDCRWPSLDDDRREGCIRSREFAFSQEGGLAVLSGNLADNGCIVKTAGVDESNLTFIGSARVYESQDDAVAGILGGEVVAGDVVVIRYEGPKGGPGMQEMLYPTSYLKSRGLGKACALITDGRFSGGTSGLSIGHVSPEAAAGGTIALIENGDRIEIDIPKRSIKLAVSDAELAARRETMLARGPMAWKPLSRQRYVSLALKAYAMLATSADKGAVRDRSKLED

SEQ ID NO: 180534 - protein, 326 aa, Unknown
  Bacterial polypetide isolated from the Sargasso Sea
MKKLNKYSSSITQDNSQPAAQAMLYAIGFSDEDFNKLLIGIASTGYEGNPCNMHLNNIALEVKEGVNSIDFVGLIFNTIGVSDGISMGTPGMRYSLPSRDIIADSVETVVQAMSYDGLITVVGCDKNMPGALMGMIRLNRPSILLYGGTIDSGCHKNKKLDIVSAFEAWGEKVAGSIDNKEYKEIIRKSCPGSGACGGMYTANTMASAIEALGMSLPFSSSIPANNNSRNKVSMETGKSMKRLIEADIKPLDIVTKKSIENAVTTVVALGGSTNAVLHFLAIARAAKIDFTLDDFQRISEKTPFIADLKPSGKYLMEDLHDIGGIP

SEQ ID NO: 180535 - protein, 412 aa, Unknown
  Bacterial polypetide isolated from the Sargasso Sea
MAKFNKKKLPSRHTSLGADRAPHRSFYYAMGETEKDVAKPFVGVVSTWNEAAPCNIALMRQAQSVKKGVRANGGTPREFCTITVTDGIAMGHEGMKSSLISREVIADSAELTVRGHCYDALVGIAGCDKSLPGLMMSMVRLNVPSVFIYGGSILPGKYKGKDVTVVDVFEAVGKHSTGQMSAAELRKLELVACPSAGACGGQFTANTMACVSEAIGLALPYSAGTPAPYEERDKYAKASGKTVMNLLKKGIKPRDIVTRKALENAATVVAATGGSTNAGLHLPAIANEAGIKFDLMDVAKIFKRTPYLADLKPGGKYVAKDMWLAGGVPMLLKTLYEGGYIHGDCMTVTGKTMKENLKGIKFNPKQKVMRSYKNPLSPTGGVVGLKGNLAPEGAIVKVAGLKKLQFTGKARC

SEQ ID NO: 180536 - protein, 321 aa, Unknown
  Bacterial polypetide isolated from the Sargasso Sea
MSYDGLVTVVGCDKNMPGALMAMLRLDRPSILVYGGTIDSGCYNNKELDVVSAFEAWGEKVSGKIDDKEYKNVIKNACPGAGACGGMYTANTMASAIEALGMSLPYNSSNPAISNEKVSECAQLGSAIKLLIEKDIKPSDIVTKKSLENALRLITVLGGSTNAVLHFLAISRAANLDLSIDYFQEISDSTPYIANLKPSGKYLMKDLHKIGGVPSVLKYMLENKMLNGDCMTVTGKTLEENLSKIKSPDLKSSDIIFPLSNPIKESGHIQILKGNLAEEGCVAKITGKEGLKFSGPAKVFDSEFECLTAIAESRVTKEMLL

SEQ ID NO: 180537 - protein, 216 aa, Unknown
  Bacterial polypetide isolated from the Sargasso Sea
GKTIQENINEFSMPDAPEQQIVKSTENPIHNVGTAVILKGTLAPDGAVIKTAGVEMTEFTGTAKVFDREELAFDAVAEGEIDEGDVVVIRYEGPKGGPGMREMLATTAALVGQGLGKKVAMVTDGRFSGGTRGFMVGHVAPEAFVGGPIALIKDGDKISISTESNSIDLHVSEDELEKRKQEWKKPAPNYTSGALAKYASLVGSAAKGAITTPANY

SEQ ID NO: 180538 - protein, 166 aa, Unknown
  Bacterial polypetide isolated from the Sargasso Sea
MEKQDAFNTEEDAYKAVKNRKYKDGDIIIIRYEGPKGGPGMREMLQTTAAIYGQGKGEKVALITDGRFSGATRGFCIGHVGPEASVGGPIALLRNGDVIDIDAKKGTINVRLSKKELSARRKKWKPKKMNFGNGTLWKYAQTVGPAYKGAPTHPGGKNEVRTYADI

SEQ ID NO: 180539 - protein, 485 aa, Unknown
  Bacterial polypetide isolated from the Sargasso Sea
MPKFNKKKLPSRHTSVGPDKAPQRSFYYAMNLTEKDVAKPFVGVVSTWNEAAPCNIALMRQAQSVKKGVHQGGGTPREFCTITVTDGIAMGHEGMKSSLISRDVIADSTELTVRGHCYDALVGVAGCDKSLPGLMMAMVRLNVPSVFIYGGSILPGRFNGKDVTVVDVFEGVGKYSSGKMTEHALRKLELVACPSAGACGGQFTANTMACVSEAIGLALPYSAGTPAPYEQRDKYALQSGKAVMNLLKRNIRPRDIVTRKSLENAATIVAATGGSTNAALHLPALANEIGIKFDLMDVAKIFKKTPYLADLKPGGKYVAKDMWKAGGVPMLLKTLLDGGYIHGNCMTVTGKTMRENLKKVKFNLKQKVMRKYNNPLSPDGGVVGLKGNLAPEGAIVKVAGLKKLQFTGRARCFDTEEAAYKAVKNRKYKDGDIIIIRYEGPKGGPGMREMLQTTGAIYGQGKGEKVALITDGRFSGATRGFCVGH

SEQ ID NO: 180540 - protein, 439 aa, Unknown
  Bacterial polypetide isolated from the Sargasso Sea
AGGVAKEFNTIAVDDGIAMGHDGMLYSLPSRDLIADSVEYMVNAHCADAMVCISNCDKITPGMLNAAMRLNIPVVFVSGGPMEAGKTALSEHKLDLVDAMVIAADSSADDATVEAYERSACPTCGSCSGMFTANSMNCLTEALGLSLPGNGSLLATHADREQLFLRAGRLIVDLARRWYEQDDATALPREIASRRAFENAMSLDIAMGGSTNTILHLLAAAQEAGVDFDMAAIDTLSRKIPQLCKVAPSTPLYHMEDVHRAGGVMAILGELARGDLLHLDCPTVHSASLGEALGHWDIMQTEADDVRTLYAAGPAGIPTQQAFSQDLRWPSLDTDREGGCVREMAHAYSQEGGLAVLFGNIAELGCVVKTAGVDDESLQFTGPAHICDSQEGAVADILEDRVQAGDVVIVRYEGPRGGPGMQEMLYPTSYLKSKGLGKA

SEQ ID NO: 180541 - protein, 326 aa, Unknown
  Bacterial polypetide isolated from the Sargasso Sea
MKKFNKKKLPSRHTTIGADKAPQRSFYYAMDLTEKDVAKPFVGVVSTWNEAAPCNINLMKQAQSVKKGVKASGGTPREFCTITVTDGIAMGHEGMKSSLISRDVIADSTELTVRGHCYDALVGLAGCDKSLPGLMMSMVRLNIPSVFIYGGSILPGRFNGKDVTVVDVFEGVGKYTSKKMTAHALKKLELKACPSAGACGGQFTANTMACVSEAIGLALPFSAGTPAPYLERNKYAIDSGKAVMNLLAKNIRPRDIVTRKALENAATIVAATGGSTNAGLHLPAIANEIGIKFDLMDVAKIFKKTPYLADLKPGENMLQKILEAGG

SEQ ID NO: 180542 - protein, 616 aa, Unknown
  Bacterial polypetide isolated from the Sargasso Sea
MPKLRSATTTQGRNMAGARALWRATGMKDSDFGKPIIAIANSFTQFVPGHVHLKDLGQLVARSVEEAGGVAKEFNTIAVDDGIAMGHSGMLYSLPSREIIADAVEYMVNAHCADAIVCISNCDKITPGMLMASMRLNVPVIFVSGGPMEAGKTKLSDQLIKLDLVDAMVAAADDKVSDADTDEIERSACPTCGSCSGMFTANSMNCLTEALGLSLPGNGSMLATHADREGLFKQAGKQIVELCKRYYGDDDDSVLPRNIANFKAFENAMSLDIAMGGSTNTILHLLAAAMEGEVPFTMADIDRLSRKVPHLCKVAPSTPKYHMEDVHRAGGVLGILNELNKAGLLNTDVNHVLGKPLTDVISEWDITNPENEDAITFYRAGPAGIRTTKAFSQDCRWDEADDDRENGCIRSIDHAFSQEGGLAVLYGNVAEDGCIVKTAGVDESILKFNGTARIYESQDDAVAGILGDEVKAGDVVFIRYEGPRGGPGMQEMLYPTSYLKSKGLGKHCALVTDGRFSGGTSGLSIGHCSPEAASGGGIGLVEDGDKIEIDIPNRSINIAISDEELAERRAKMEASDKPWKPKDRVREVSTSLKTFAALATSADKGAVRDVTKLENL

SEQ ID NO: 180543 - protein, 300 aa, Unknown
  Bacterial polypetide isolated from the Sargasso Sea
MVDKSKLPSRHVSVGPKSAPHRAFYYAMGITEEQINQPFVGVVTTWNESAPCNISLSRQAQSAKKGVWDAKGTPREFTTITVTDGIAMGHEGMKSSLTSREIIADSTELSVRGHCYDALVGLAGCDKSLPGLMMAMLRLNVPSVFMYGGSILPGVYKDRDVTIVDVFEAVGKHSTGKISDQELHDIECVACPSAGSCGGQFTANTMACVSETIGLALPGSAMTPAPYESRDKYAYESGKVVMELIEKNLRPRDIVTKQSLINAAVVVSASGGSTNAGLHLPALAHEAGIEFTLEDVCKIF

SEQ ID NO: 180544 - protein, 158 aa, Unknown
  Bacterial polypetide isolated from the Sargasso Sea
MNKLRSSAITQGVQRSPNRSMLRAVGFSDEDFNKPIIGVANGYSTITPCNIGLNKLALRAEDSIRRSGGMPQMFGTITVSDGISMGTEGMKYSLVSREVIADSIETACNAQSMDGVLAIGGCDKNMPGAMIAIARMNIPSIFIYGGTIKPGKLNGEDL

SEQ ID NO: 180545 - protein, 293 aa, Unknown
  Bacterial polypetide isolated from the Sargasso Sea
ITILGGSTNAVLHLLAMARSVDVNLTIDDFQSVTDKTPYLADLKPSGQYVMEDLHKIGGTPAVMKFLLENNLLNGDCLTVTGKTIKENLTDLPGLSNGQKIIYPLAKPLKSSGHIRILKGNLAPGGSVAKITGKEGEVFTGPAKVYDSEEAMLSSLENNEIKKGDVIIIRYEGPKGGPGMPEMLTPTSAIIGAGLGNDVAMITDGRFSGGSHGFIIGHVVPEAQEGGPIALIENGDVVTINAKKNKIEFEIDNQELISRQKKWNMPPYKVNKGTLYKYISNVKTASEGCVTDE

SEQ ID NO: 180546 - protein, 469 aa, Unknown
  Bacterial polypetide isolated from the Sargasso Sea
MSKIDKKKLPSRHTSLGPDRAPHRSFYYAMGETEQDVAKPFVGVVSTWNEAAPCNTALMRQAQSVKKGVKESGGTPREFCTITVTDGIAMGHEGMKSSLISREVIADSAELTVRGHCYDALVGIAGCDKSLPGLMMSMLRLNVPSVFIYGGSILPGKFKGKDVTVVDVFEAVGKHSSGKMSSEELRELELVACPSAGACGGQFTANTMACVSEAIGLALPYSAGTPAPYEERDKYAYESGQAVMNLLEKKIKPREIVTKKSLENAATIVAATGGSTNAALHLPALANEIGVKFDLMDVAKIFKKTPYLADLKPGGKYVAKDMWEAGGVPMLLKTLYDGGYIHGECMTVTGKTMKENLANIKFNVNQKVLREYNNPLSPDGGVVGLKGNLAPDGAIVKIAGLKKLQFTGKARCFDNEEDAMKAVQTKKYKDGDVIIIRYEGPKGGPGMREMLSTTGAIYGQGKGEKVALI

SEQ ID NO: 180547 - protein, 572 aa, Unknown
  Bacterial polypetide isolated from the Sargasso Sea
MPKFNKKKLPSRHTSVGPDKAPQRSFYYAMDLTEKDVAKPFVGVVSTWNEAAPCNIALMRQAQSVKKGVHQAGGTPREFCTITVTDGIAMGHEGMKSSLISRDVIADSTELTVRGHCYDALVGVAGCDKSLPGLMMAMVRLNVPSVFIYGGSILPGRFNGKDVTVVDVFEGVGKYSSGKMSANALRKLELKACPSAGACGGQFTANTMACVSEAIGLALPYSAGTPAPYTQRDSFALKSGKAVMSLLEKKIRPRDIVTKKSLENAATIVAATGGSTNAALHLPALANEAGIKFDLMDVARIFKKTPYLADLKPGGKYVAKDMWKAGGVPMLLKTLLDGGYIHGDCMTVTGKTMRQNLKNVKFNKNQKVMRTYNQPLSPDGGVVGLKGNLAPDGAIVKVAGLKRLQFTGKARCFDTEEAAYKAVKNKKYKDGDIIIIRYEGPKGGPGMREMLQTTGAIYGQGKGEKVALITDGRFSGATRGFCIGHVGPEASVGGPIALLRNGDIIDLDAKKGTINVRLSKKELAKRRKKWKPKKINFGNGTLWKYAQTVGPAYLGAPTHPGAKEEVRTYADI

SEQ ID NO: 180548 - protein, 572 aa, Unknown
  Bacterial polypetide isolated from the Sargasso Sea
MRKFNKKKLPSRYTTIGADRAPQRSFYYAMDLTEKDVAKPFVGVVSTWNEAAPCNINLMKQAQFVKQGVNASGGTPREFCTITVTDGIAMGHEGMKSSLISRDVIADSTELTVRGHCYDALVGLAGCDKSLPGLMMSMVRLNIPSVFIYGGSILPGRFEGKDVTVVDVFEGVGKYTSKKMTAHALRKLELKACPSAGACGGQFTANTMACVSEAIGLALPYSAGTPAPYKERHKYAINSGKAVMKLLEKNIRPRDIVTRKALENAATVVAATGGSTNAGLHLPAIANEIGIKFDLMDVAKIFKRTPYLADLKPGGKYVAKDMWEAGGVPMLLKTLYDGGYIHGDCMTVTGKTMKENLKNVKFNPKQKVMRSYKNPITPTGGVVGLRGNLAPEGGIVKIAGLKKLQFTGRARCFDSEEKAYKAVKERKYKDGDIIIIRYEGPKGGPGMREMLQTTAAIYGQGKGEKVALITDGRFSGATRGFCIGHVGPEASIGGPIALLKNGDIIDIDAKKGTINVRLSKKELSLRKKKWKQRKMNFGNGTLWKYAQTVGPAYLGAPTHPGGKNEVKTYADI

SEQ ID NO: 180549 - protein, 459 aa, Unknown
  Bacterial polypetide isolated from the Sargasso Sea
MVKFSDDVTQGVEKSAARAMLRAVGLKDEDFQKFQVGIVSAGNEVTPCNLTGPELSEHAKEGVNGDVSAGLIFSTIAVSDGISMGHEGMRASLVSREVIADSVELVMHAERFDGMVTIAGCDKSLPGMLMASARINRPSIFLYGGSSLPGEYKGKDISIVDVFEGIGALEKGLISEEELYEIECAACPGQGSCAGMFTANTMASVGEAIGMSLPGTASIQAEDKRLRKAAKETGDQLNYLLKNDLKPRDIMTREAFHNAITTVLSLGGSTNAVLHLLAIAYEAKVDLTIDVFDELAREVPHLADMKPFGKYHMVDLDKIGGVPVVSKILLENKLIDPNCMTVTGKTVGENLENIEVPKDQDVVYFPDNPISKEGGLAILRGSLSPNGSVVKVAGIEIDIFKGPANVFDSEQEALDALFNNKIKKGEVVVIRNEGPKGGPGMREMLQITAAMKGAGLGKD

SEQ ID NO: 180550 - protein, 304 aa, Unknown
  Bacterial polypetide isolated from the Sargasso Sea
VGIAGCDKSLPGLMMSMVRLNVPSVFIYGGSILPGKYKGKDVTVVDVFEAVGKHSSGQMSAKELRKLELVACPTAGACGGQFTANTMACVSEAIGLALPYSAGTPAPYEERDKYAKASGRMVMELLAKRIKPRDIVTRKALENAATIVAATGGSTNAALHLPAIANEAGIKFDLMDVAKIFKRTPYLADLKPGGKYVAKDMWLAGGVPMLLKTLYDGGYIHGDCMTVTGKTMKENLKGIKFNPKQKVLRAYNRPLSPDGGVVGLKGNLAPDGGIVKIAGLKKLQFTGRARCFDNEESAMKAVQK

SEQ ID NO: 180551 - protein, 348 aa, Unknown
  Bacterial polypetide isolated from the Sargasso Sea
KKKLPSRHTSLGPDRAPHRSFYYAMGETEKDVSKPFIGVVSTWNEAAPCNIALMRQAQSVKKGVRASGGTPREFCTITVTDGIAMGHEGMKSSLISREVIADSAELTVRGHCYDALVGIAGCDKSLPGLMMSMVRLNVPSVFIYGGSILPGKYKGKDVTVVDVFEAVGKHSSGQMSAKELRKLELVACPTAGACGGQFTANTMACVSEAIGLALPYSAGTPAPYEERDKYAKASGRMVMELLAKKIKPRDIVTRKALENAATIVAATGGSTNAALHLPAIANEAGIKFDLMDVAKIFKRTPYLADLKPGGKYVAKDMWLAGGVPMLLKTLYDGGYIHGDCMTVTGKTM

SEQ ID NO: 180552 - protein, 369 aa, Unknown
  Bacterial polypetide isolated from the Sargasso Sea
MTKKSISKLNQKRTLKRQVGKWRSWETTEGVARAPHRSMMRAMGLNDDDINAPFIGVASTHNEVTPCNAGIKPLADEVKNGIISSKGTPFEFGTITVSDAISMGTEGMKGSLVSREIIADSIETVCFAERYDGVVAIAGCDKSLPGAMMAMARLNIPSVFVYGGSILPGHLNGQDLTIISAFEAVGKRQSGEINDKQLRDIEMHACPGPNSCGGMFTANTMSSIGEAIGLSLPGSASEAAVDQRKKDSSRQAGVAVMNLVRKNIRPSDILTKKAFENAVTLVVAMGGSTNTALHLPAIANEMGIKLSLKEIHDISMRTPLLADMKPGGKYVMFDLDKVGGVQLVMKRLLEAGLLHGDEMTVTGKTIKKP

SEQ ID NO: 180553 - protein, 258 aa, Unknown
  Bacterial polypetide isolated from the Sargasso Sea
GKKTPVLADLKPFGKHYMSELNANGGIQPLMKTLLDKGLLHGQCMTVTGNTLEENLKDIKAYETSEIIKDFNNPIKKDSHLRILYGNLAKDGAVAKITGKEGTSFEGKAKVFNSEEEGVSAILSNQINDGDVIVIRYEGPKGGPGMREMLKPTSAIMGLGLGDKIGFITDGRFSGGTHGFVVGHVSPEAAEGGLIALVEDGDTILIDAESDQLVLKVDDDEIKRRQSIWENPNSKPKKGVLAKYAESVKSASLGAITD

SEQ ID NO: 180554 - protein, 362 aa, Unknown
  Bacterial polypetide isolated from the Sargasso Sea
MNKFNKKKLPSRHTSLGADKAPQRSFYYAMGETEKDVAKPFVGVVSTWNEAAPCNIALMRQAQSVKKGVKFSGGTPREFCTITVTDGIAMGHEGMKSSLVSRDIIADSTELTVRGHCYDALVGVAGCDKSLPGLMMAMLRLNVPSVFIYGGSILPGRYNGKDVTVLDVFEGVGKYSSGKMSEHALRKLELKACPSAGACGGQFTANTMACVSEAIGLALPYSAGTPAPYGQRDKYALQSGKAVMNLLKKNIRPRDIVTKKSLENAATIVAATGGSTNAALHLPALANEIGIKFDLMDVAKIFKKTPYLADLKPGGRYVAKDMWKAGGVPMLLKTLLDGGYIHGNCLTVTGKTMKENLKISKI

SEQ ID NO: 180555 - protein, 188 aa, Unknown
  Bacterial polypetide isolated from the Sargasso Sea
MKGNLAPDGAIVKVAGLKKLQFTGRARCFDTEESAYKAVLKRKYKDGDIIVIRYEGPKGGPGMREMLQTTGAIYGQGKGEKVALITDGRFSGATRGFCIGHVGPEASVGGPIALLKNGDIIHIDAKKGTIKVDLSRKELSKRKKKWKPKKINFGNGTLWKYAQTVGPAYLGASTHPGGKEEVKCYADI

SEQ ID NO: 180556 - protein, 336 aa, Unknown
  Bacterial polypetide isolated from the Sargasso Sea
MTKKLNKFSSRITEPKSQGASQAMLYGTGMKEEDMSKAQVGISSIWYEGNTCNMHLLALAEKVKEGVIDAGLVGMRFNTVGVSDGISMGTEGMSFSLQSRDLIADSIETVMSAQWYDANISIPGCDKNMPGCLIAMGRLNRPSLMIYGGTIKPGYYENNKIDIISAFQSYGEFISGNIDDQKRKEIIKKSCPGAGACGGMYTANTMASAIEAMGMSLPYSSSTPAVDEKKLNECFEAGKAIKYLLKEDIKPREIMTRDAFENAMVLVTVLGGSTNAVLHLLAMARSVNIDLTIDDFQSVSNRIPYLADLKPSGQYVMEDLHKIGGTPAVMKFLTRQ

SEQ ID NO: 180557 - protein, 398 aa, Unknown
  Bacterial polypetide isolated from the Sargasso Sea
MGHQGMKSSLVSREVIADSTELTVRGHCYDAIVGLAGCDKSLPGLMMAMCRLNVPSVFMYGGSILPGKYKGKDVTVVDVFEAVGKYSSGNATEEELHELECVACPSAGACGGQFTANTMACVSEAIGLALPYSSGAPAPYEERDKYAYESGKQVMNLIEKNIRPRDIVTRRSLENAATIVAATGGSTNAGLHLPAIAHECGIKFNLDDVVEIFKRTPYLADLKPGGQYVAKDVYEAGGVPIIIKTLFEGGYIHGDCLTVTGKTIAENLEFVKFNNKQNVIRPYNNPLTPTGGVVGLKGNLAPEGAIVKVAGMENLKFQGTAKCFDCEEDAFECVKNENYKEGDVFVIRYEGPKGGPGMREMLATTAAIYGQGMGDKVALITDGRFSGATRGFCVGHVS

SEQ ID NO: 180558 - protein, 191 aa, Unknown
  Bacterial polypetide isolated from the Sargasso Sea
MSKKLNKYSSRITEPKSQGASQAMLYGTGMTEEDMLKAQVGISSIWYEGNTCNMHLLKLAEKIKEGVVSAGLVGMRFNTIGVSDGISMGTDGMSFSLQSRDLIADSIETVMSAQWYDANISIPGCDKNMPGCLIAMGRLNRPSLMVYGGTIKPGYHKNDKVDIISAFQSYGQYISGNIDDSERLDIVKKSC

SEQ ID NO: 180559 - protein, 443 aa, Unknown
  Bacterial polypetide isolated from the Sargasso Sea
MDGVLAIGGCDKNMPGAMLSMARMNIPSIFVYGGTIKPGKLDGCDLTVVSSFEAVGQLASGKIDKERLIAVEKNAIPGPGSCGGMFTANTMSAAIETMGFSLPFSSTMAAVDDEKAESAAESAQVLVNAVKNNIRPLDLLTKEAFENAISVIMAVGGSTNSVLHLLAIARTAGVDLTIDDFERIRQTVPVICDLKPSGKYVTVDLHQAGGIPQVMKLLLDAGMLHGECKTIEGKTIKEVLRDIPSKPKANQDVIRQISNPIYKKGHLAILKGNLASEGSVAKISGVKTPVLTGPARVFESEEECLTAILDNKVKAGDVVVVRYEGPVGGPGMREMLSPTSAIVGQGLGEKVALITDGRFSGGSYGLVVGHVAPEAAVGGTIGLVEEGDSITVDANKLLIQLNVEERELARRKEKWEKPKPRYKTGILGKYSRLVSSSSQGATT

SEQ ID NO: 180560 - protein, 572 aa, Unknown
  Bacterial polypetide isolated from the Sargasso Sea
MAKFNKKKLPSRHTSLGADRAPHRSFYYAMGETEKDVSKPFIGVVSTWNEAAPCNIALMRQAQSVKKGVRANGGTPREFCTITVTDGIAMGHEGMKSSLISREVIADSAELTVRGHCYDALVGIAGCDKSLPGLMMSMVRLNVPSVFIYGGSILPGRYKGKDVTVVDVFEAVGKHSSGKMSSAELRKLELVACPSAGACGGQFTANTMACVSEAIGLALPYSAGTPAPYEERDKYAKESGKMVMQLLKKQIKPRDIVTRKALENAATIVAATGGSTNAGLHLPAIANEAGIKFDLMDVAKIFKRTPYLADLKPGGKYVAKDMWLAGGVPMLLKTLYEGGYIHGDCMTVTGKTMKENLKNIKFNPKQKVMRSYKDPLSPTGGVVGLKGNLAPDGAIVKVAGLAKLQFTGKARCFDNEESAMKAVQSKKYNDGDVIIIRYEGPVGGPGMREMLSTTGAIYGQGKGEKVALITDGRFSGATRGFCVGHVGPEAALGGPIGLLRNGDIIDIDAKKGTINVRLSKKELASRKRKWRARKSDFGSGTLWKYAQTVGPAFLGAPTHPGKKKEVKDYSEI

SEQ ID NO: 180561 - protein, 570 aa, Unknown
  Bacterial polypetide isolated from the Sargasso Sea
MVDKSKLPSRHVSVGPKSAPHRAFYYAMGITEEQIKQPFVGVVTTWNESAPCNISLSRQAQSAKKGVWDAKGTPREFTTITVTDGIAMGHEGMKSSLTSREIIADSTELSVRGHCYDALVGLAGCDKSLPGLMMAMLRLNVPSVFMYGGSILPGVYKDKDVTIVDVFEAVGKHSTGKISDQELHDIECVACPSAGSCGGQFTANTMACVSETIGLALPGSAMTPAPYESRDKYAYESGKVVMELIEKNLRPRDIVTKQSLINAAVVVSASGGSTNAGLHLPAMAHEAGIEFTLEDVCKIFQSTPYIGNLAPGGKYVAKDLYEVGGVPVLIKALIDGGLIDGSCMTVTGKTLAENVKDVELPKNQDVVYPVSSPITKTGGVVGLKGSLAPDGAIVKIAGLKKLQFRGKAICFDREEHALDAVLNGKIKPGHVVIIRYEGPKGGPGMREMLSTTSALYGQDLGEEVALITDGRFSGGTRGFCIGHVGPEAYDCGPIALVEDGDEIEIDAEKNILNLNVDEKTLSDRKTKWVNKEPEFMSGTLWKYMKTVGPANLGAVTHPGGKLEKKTYSDI

SEQ ID NO: 180562 - protein, 224 aa, Unknown
  Bacterial polypetide isolated from the Sargasso Sea
LGKTMKENLKNIKFNPKQKVMRSYKDPLSPTGGVVGLKGNLAPDGAIVKVAGLAKLQFTGKARCFDNEESAMKAVQSKKYNDGDVIIIRYEGPVGGPGMREMLSTTGAIYGQGKGEKVALITDGRFSGATRGFCVGHVGPEAALGGPIGLLRNGDIIDIDAKKGTINVRLSKKELASRKRNWRARKSDFGSGTLWKYAQTVGPAFLGAPTHPGKKKEVKDYSEI

SEQ ID NO: 180563 - protein, 413 aa, Unknown
  Bacterial polypetide isolated from the Sargasso Sea
MAKFNKKKLPSRHTSLGADRAPHRSFYYAMGETEKDVAKPFVGVVSTWNEAAPCNIALMRQAQSVKKGVRANGGTPREFCTITVTDGIAMGHEGMKSSLISREVIADSAELTVRGHCYDALVGIAGCDKSLPGLMMSMVRLNVPSVFIYGGSILPGKYKGKDVTVVDVFEAVGKHSTGQMSAAELRKLELVACPSAGACGGQFTANTMACVSEAIGLALPYSAGTPAPYEERDKYAKASGKTVMNLLKKGIKPRDIVTKKALENAATVVAATGGSTNAGLHLPAIANEAGIKFDLMDVAKIFKRTPYLADLKPGGKYVAKDMWLAGGVPMLLKTLYEGGYIHGDCMTVTGKTMKENLKGIKFNPKQKVMRSYKNPLSPTGGVVGLKGNLAPEGAIVKVAGLKKLQFTGKSKMF

SEQ ID NO: 180564 - protein, 534 aa, Unknown
  Bacterial polypetide isolated from the Sargasso Sea
MLRPTGFSDEDFKKPQVGIASTWSNVTPCNMHINELAQTICSSVDDAGLKSVLFNTITISDGISMGTLGMRYSLVSREVIADSIETVVGCQSFDSVVAIGGCDKNMPGCMMGLIRLDRPSLFVYGGSIKPGKDHTDFATVLEKVGAYSQNQISEDELIAIEKNALPGPGSCGGMYTANTMASAIEALGMSLPGSSSQDAISQEKKNDCLAVGQAIDYLLEKDIKPSNILTKSAFENSIKVVIALGGSTNAVLHLLAMAKSANVALNLDDFTRIGKNTPVLSDIRPSGYYLMSDLNEQGGIQPLMKMMLNDGLLDGSCMTVSGKTLEENLKDIEPYKDDQKIIAQISKPIKKESHIRILKGNLAPEGAVAKITGKEGLSFSGPAIIFESEEEAVEAIFKNTIQEGSVIVIRYEGPVGGPGMREMLKPTAAIMGAGLGDKVALITDGRFSGGSHGFVVGHITPEAANGGPIGLLQNGDLITIDAKKDQINIDISEEQLVDRKKNWRSLKEPPCRGVLAKYARSVSSASEGAVTDDF

SEQ ID NO: 180565 - protein, 572 aa, Unknown
  Bacterial polypetide isolated from the Sargasso Sea
MPKFNKKKLPSRHTSLGPDKAPQRSFYYAMDLTEKDVAKPFVGVVSTWNEAAPCNIALMRQAQSVKKGVHQAGGTPREFCTITVTDGIAMGHEGMKSSLISRDVIADSTELTVRGHCYDALVGVAGCDKSLPGLMMAMVRLNVPSVFIYGGSILPGRFNGKDVTVVDVFEGVGKYTSGKMSAHALRKLELKACPSAGACGGQFTANTMACVSEAIGLALPYSAGTPAPYTQRDSYALKSGKAVMNLLQKRIRPRDIVTKKSLENAATIVAATGGSTNAALHLPALANEAGIKFDLMDVARIFKKTPYLADLKPGGKYVAKDMWKAGGVPMLLKTLLDGGYIHGDCMTVTGKTMRQNLKNVKFNKNQKVMRTYNQPLSPDGGVVGLKGNLAPDGAIVKIAGLKKLQFTGKARCFDTEEAAYKAVKNKKYKDGDIIIIRYEGPKGGPGMREMLQTTGAIYGQGKGEKVALITDGRFSGATRGFCIGHVGPEASVGGPIALLKNGDIIDLDAKKGTINVRLSRKELAKRRKKWKPKKINFGNGTLWKYAQTVGPAYLGAPTHPGAKEEVRTYADI

SEQ ID NO: 180566 - protein, 531 aa, Unknown
  Bacterial polypetide isolated from the Sargasso Sea
MLRGVGFTSEDFTKPFVGIASTGAKVTPCNMHINKLSEIVEDSINNSGGKGVLFNTITVSDGISMGTQGMKYSLISREVIADSIETVVGCLGYDGLIAIGGCDKNMPGCLIGMARLDRPSIFIYGGSIKPSNENTDYVTVSEKVGEFSKGEINEDRLIHYEKISVEGPGSCGGMYTANTMASAVEALGMSLPGSSSQDAVSESKKDDCVSAGEAIMNLLESDIKPSDIMTREAFENAITVVIALGGSTNAVLHLLAIAHSIGVELELDDFTKIGKETPVLADLKPFGSHYMSELNANGGIQPLMKLLLDKGLLHGDCLTVTGKTLSQNLENVIPYEKKNIIRDFDNPIKENSHLRIMYGNLAVDGAVAKITGKEGTSFEGNARVFNSEEEGVEAILSNSINDGDVIVIRYEGPKGGPGMREMLKPTSAIMGLGLGDKVGFITDGRFSGGTHGFVVGHISPEAAEGGNIALVENGDTILIDAENDQLILKVEDKVLDERRSNWTNPIKTPKKGVLAKYAKSVKSASLGATTD

SEQ ID NO: 180567 - protein, 468 aa, Unknown
  Bacterial polypetide isolated from the Sargasso Sea
MKKFNKKKLPSRHTSLGPDKAPQRSFYYAMNLTEKDVAKPFVGVVSTWNEAAPCNIALMRQAQSVKKGVQATGGTPREFCTITVTDGIAMGHEGMKSSLISRDVIADSTELTVRGHCYDALVGLAGCDKSLPGLMMAMVRLNVPSVFIYGGSILPGRLNGKDITVVDVFEGVGKYSAGKISEHALRKIELKACPTAGACGGQFTANTMACVSEAIGLALPYSAGTPAPYNKRDKYALESGKAVMNLLAKNIRPRDIVTKKSLENAATIVAATGGSTNAALHLPAIANEIGIKFDLMDVAKIFKRTPYLADLKPGGKYVAKDMWKAGGVPMLLKTLFEGGYIHGNCMTVTGKTMKENLKNVKFNSKQKVMRKYNNPLSPDGGVVGMKGNLAPEGAIVKVAGLKRLQFTGRARCFDTEEAAYKAVKNRKYKDGDIIIIRYEGPKGGPGMREMLQTTGAIYGQGKGEKLHL

SEQ ID NO: 180568 - protein, 569 aa, Unknown
  Bacterial polypetide isolated from the Sargasso Sea
FNKKKLPSRYTTVGADRAPQRSFYYAMDLTEKDVAKPFVGVVSTWNEAAPCNINLMKQAQFVKQGVNSSGGTPREFCTITVTDGIAMGHEGMKSSLISRDVIADSTELTVRGHCYDALVGLAGCDKSLPGLMMSMVRLNIPSVFIYGGSILPGRFEGKDVTVVDVFEGVGKYTSKKMTAHALRKLELKACPSAGACGGQFTANTMACVSEAIGLALPYSAGTPAPYKERHKYAINSGKAVMKLLEKNIRPRDIVTRKALENAATVVAATGGSTNAGLHLPAIANEIGIKFDLMDVAKIFKRTPYLADLKPGGKYVAKDMWEAGGVPMLLKTLYDGGYIHGDCMTVTGKTMKENLKNVKFNPKQKVMRSYKNPITPTGGVVGLRGNLAPEGGIVKIAGLKKLQFTGRARCFDSEEKAYKAVKERKYKDGDIIIIRYEGPKGGPGMREMLQTTAAIYGQGKGEKVALITDGRFSGATRGFCIGHVGPEASIGGPIALLRNGDIIDIDAKKGTINVRLSKKELSLRKKKWKQRKMNFGNGTLWKYAQTVGPAYLGAPTHPGGKNEVKTYADI

SEQ ID NO: 180569 - protein, 459 aa, Unknown
  Bacterial polypetide isolated from the Sargasso Sea
MKKRNFDHSKLPSRHVRVGSEKAPHRSYYYAMGLDEDDIDKPFIGVATCWNESAPCNISLMRQSKSVKEGVSKEGGTPREFTTITVTDGIAMGHQGMKSSLVSREIISDSIEVSMRGHCYDALVGVAGCDKSLPGMMMAMLRLNVPSVFIYGGSILPGSYKGKDVTVVDVFEAVGEFSAGKISEEDLYELECVACPSAGSCGGQFTANTMACVSEAIGLALPYSAGPPAPDESRDKYAFDSGKAVMDLLENNIRPRDIVTRESFINAAVVVAATGGSTNGALHLPAMANEIGIDFDLFDVADIFKSTPYIADLKPGGNYVAKDMHEAGGVPMLLRTLLDEGFINGDCLTVTGKSIAENISEVTFDGTQKVIYPANKPITKTGGVVGLKGNFAPDGAIVKVAGMDNLKFTGPARCFDCEEDAFIAVENKNYNDGDVIVIRYEGPKGGPGMREMLSTTAAL

SEQ ID NO: 180570 - protein, 254 aa, Unknown
  Bacterial polypetide isolated from the Sargasso Sea
MPKLRSATTTQGRNMAGARALWRATGMKDSDFGKPIIAIANSFTQFVPGHVHLKDLGQLVARSVEEAGGVAKEFNTIAVDDGIAMGHSGMLYSLPSREIIADAVEYMVNAHCADAIVCISNCDKITPGMLMASMRLNVPVIFVSGGPMEAGKTKLSDQLIKLDLVDAMVAAADDKVSDADTDEIERSACPTCGSCSGMFTANSMNCLTEALGLSLPGNGSMLATHADREGLFKQAGKQIVELCKRYYGDDDDSV

SEQ ID NO: 180571 - protein, 362 aa, Unknown
  Bacterial polypetide isolated from the Sargasso Sea
MPDYRSKTSTHGRNMAGARALWRATGMGDDDFGKPIIAIANSFTQFVPGHVHLKDLGQMVAREIEKSGGVAKEFSTIAVDDGIAMGHSGMLYSLPSRELIADAVEYMVNAHCADALVCLSNCDKITPGMLMATMRLNVPTIFVSGGPMEAGKGLVKGQEASLDLVDAMVLAADPSVSDEDVAKVERSACPTCGSCSGMFTANSMNCLVEALGLALPGNGSVLATHIDRKELFLRAGKIIVELTKQYYEKDDESVLPRNIANLESFENAMTLDIAMGGSTNTVLHILAAAKEAGLDFGMDDIDRLSRRVPNLCKVAPSSNFHMEDVHRAGGIMAILGELERAKLLNSDNKTVHSETMLDAIQK

SEQ ID NO: 180572 - protein, 387 aa, Unknown
  Bacterial polypetide isolated from the Sargasso Sea
MPKFNKKKLPSRHTSVGPDKAPQRSFYYAMDLTEKDVAKPFVGVVSTWNEAAPCNIALMRQAQSVKKGVHQAGGTPREFCTITVTDGIAMGHEGMKSSLISRDVIADSTELTVRGHCYDALVGVAGCDKSLPGLMMAMVSLNVPSVFIYGGSILPGRFNGKDVTVVDVFEGVGKYSSGKMSANALRKLELKACPSAGACGGQFTANTMACVSEAIGLALPYSAGTPAPYTQRDSYALKSGKAVMSLLEKKIRPRDIVTKKSLENAATIVAATGGSTNAALHLPALANEAGIKFDLMDVARIFKKTPYLADLKPGGKYVAKDMWKAGGVPMLLKTLLDGGYIHGDCMTVTGKTMRQNLKNVKFNKNQKVMRTYNQPLSPDGGVVGLKG

SEQ ID NO: 180573 - protein, 553 aa, Unknown
  Bacterial polypetide isolated from the Sargasso Sea
MVKFSDDVTQGVEKSAARAMLRGVGLKDEDFQKFQVGIVSAGNEVTPCNLTGPELSEYAKEGVNGDVSAGLIFSTIAVSDGISMGHEGMRASLVSREVIADSVELVMHAERFDGMVTIAGCDKSLPGMLMSAARINRPAIFLYGGSSLPGEYKGKDISIVDVFEGIGALEKGLISEEELYEIECAACPGQGSCAGMFTANTMASVGEAIGMSLPGTASIQAEDQRLRKAAKETGDQLNYLLKNDLKPRDIMTREAFHNAITTVLSLGGSTNAVLHLLAIAYEAKVDLTIDIFDELARKVPHLADMKPFGKYHMVDLDKIGGVPVVSKILLENKLIDPNCITVTGKTVGENLENIQIPKDQDVVYFPDNPISKEGGLAILRGSLSPNGSVVKVAGIEIDTFKGPANVFDSEQEALDALFNNKIKKGEVVVIRNEGPKGGPGMREMLQITAAMKGAGLGKDVLLITDGRFSGGTTGLCIGHVTPESFDNGPIAICKNGDEISLDLKKRELNINIDEDEIEKRLKKYTNPEPRYKSGVLNKYSKLVTGADRGAVTG

SEQ ID NO: 180574 - protein, 431 aa, Unknown
  Bacterial polypetide isolated from the Sargasso Sea
MPGGMIALARTNVPGIYVYGGTIKPGHWKGKDLTIVSSFEAVGEFTAGRMSEEDFEGIEKNACPSSGSCGGMYTANTMSSSFEALGMSLLYSSTMANPDQEKVDSAAESARVLVDAVRRDLKPRDIITRKSIENAVAVIMATGGSTNAVLHYLAIAHAAEVEWTIDDFERVRQRVPVICNLKPSGQYVATDLHEAGGIPQVMKLLLNAGLLHGDCITITGKSLAEELAHVPDQPRADQNVILPIDKALYQEGHLAILKGNLAEEGAVAKITGLKNPVITGPARVFEDEQSAMSAILGDQIKAGDILVLRYLGPKGGPGMPEMLAPTSAIIGKGLGESVGFITDGRFSGGTWGMVVGHVAPEAYVGGTIGLVHEGDSITIDAHQRLLQLNVPDDVLARRRAAWKQPAPRYTRGVLAKFAKLAATASKGAVTD

SEQ ID NO: 180575 - protein, 572 aa, Unknown
  Bacterial polypetide isolated from the Sargasso Sea
MAKFNKKKLPSRHTSLGPDKAPQRSFYYAMNLTEKDVAKPFVGVVSTWNEAAPCNIALMRQAQSVKKGVSLSGGTPREFCTITVTDGIAMGHEGMKSSLISRDVIADSTELTVRGHCYDALVGVAGCDKSLPGLMMAMVRLNVPSVFIYGGSILPGRFNGKDVTVVDVFEGVGKYSSGKMTKHALRKLELIACPSAGACGGQFTANTMACVSEAIGLALPYSAGTPAPYEQRDKYALQSGKAVMNLLKRNIRPRQIVTRKSLENAATIVAATGGSTNAALHLPALANEIGIKFDLMDVAKIFKKTPYLADLKPGGKYVAKDMWQAGGVPMLLKTLMDGGYIHGDCMTVTGKTMRQNLKNVKFNLKQKVMRKYNNPLSPDGGVVGLKGNLAPEGAIVKVAGLKKLQFTGRARCFDTEEAAFKAVKNKKYKDGDIIIIRYEGPKGGPGMREMLQTTGAIYGQGKGEKVALITDGRFSGATRGFCIGHVGPEASVGGPIALLRNGDIIDLDAKKGTINVRLSKKELTKRRKKWKPKKINFGNGTLWKYAQTVGPAYLGAPTHPGGKNEVKVYADI

SEQ ID NO: 180576 - protein, 557 aa, Unknown
  Bacterial polypetide isolated from the Sargasso Sea
MAYNRRSKHITQGVARSPNRSMYYALGYQKDDFDKPMVGIANGHSTITPCNSGLQRLSDAAVAAVKAADANPQIFGTPTISDGMSMGTEGMKYSLVSREVIADCIETCVQGQWMDGVVVVGGCDKNMPGGMIALARLNVPGIYVYGGTIRPGNWKGRDLTIVSSFEAVGEFTAGRMSQEDFEGVEQNACPTSGSCGGMYTANTMSSSFEALGMSLLYSSTMANPDQEKVDSAAESARVLVEAVKRDLKPRDIITKESIENAVSVIMATGGSTNAVLHYLAIAHAAEVDWTIEDFERIRKRVPVICDLKPSGKYVATDLHRAGGIPQVLKILLDAGLLHGDCMTITGRTIAEELKDVPSVPRADQDVIFPIDRALYKEGHLAILKGNLAEDGAVAKITGLKNPVITGPARVFDDEQSAMDAILGDRIRAGDILVLRYLGPKGGPGMPEMLAPTSAIIGKGLGESVGFITDGRFSGGTWGMVVGHVAPEAFVGGTIALVQEGDSITIDAHRLLLQLNVDDAELARRRAAWQQPAPRYTRGVLAKFAALARPANNGAVTG

SEQ ID NO: 180577 - protein, 375 aa, Unknown
  Bacterial polypetide isolated from the Sargasso Sea
MARLNRPSIFIYGGSIKPSNENTDYVTVSEKVGEFSKGSINEDELIHYEKISVDGPGSCGGMYTANTMASAIEALGMSLPGSSSQDATSKSKNADCVNAGSAIMNLLDKDIKPSDIMTREAFENAITVVIALGGSTNAVLHLLAMAHSIGVELCLDDFTSIGKKTPVLADLKPFGKHYMSELNANGGIQPLMKTLLDKGLLHGQCMTVTGNTLEENLKDIKAYETSEIIKDFNNPIKKDSHLRILYGNLAKDGAVAKITGKEGTSFEGKAKVFNSEEEGVSAILSNQINDGDVIVIRYEGPKGGPGMREMLKPTSAIMGLGLGDKIGFITDGRFSGGTHGFVVGHVSPEAAEGGLIALVEDGDTILIDAESDQLV

SEQ ID NO: 180578 - protein, 189 aa, Unknown
  Bacterial polypetide isolated from the Sargasso Sea
MLRGVGFKDKDFFIPQVGIASTWSQVTPCNMHIDKLALKVSKSLSKHNVKPVIFNSITISDGISMGTEGMKYSLVSREVIADSIETVVGCEGFDGLITIGGCDKNMPGCLIAMSRLNRPSVFIYGGTIMPGKHNNKNIDIVSVFEAVGEFSKGRISKKELTNIETKAIPGPGSCGGMYTANTMASAMKP

SEQ ID NO: 180579 - protein, 575 aa, Unknown
  Bacterial polypetide isolated from the Sargasso Sea
MSNLHKHRSRTVTEGITRTPHRAFLRATGMDDAAIEKPFVAIVDTFGENTPCSMSLAAVSDNVRLGVAAGGGVPIRGSAISVSDGTSMNHSGMRFSLVSREIIADSVEVFVRAHCYDAFVGVAGCDKTLPGILMGMVRVNVPGVFLFGGAMLPGIAPDGTQATILTAIEAVGAAQRGDMSLETLRGIEKRCTPGAGSCPGQFTANTMAMVAETLGLAPLGSAMVPAVYSERIAIARRAGETVMNTLKNGGPLPRDLVTRKSLENACAAVAATGGSTNAALHIPAIAHEAGIRFTLDDVSEVLARTPLIGDLQPGGKYLALDLYHVGGVPAVLNALLAGGFLHGDTLTQTGETLETALKSFAGPDGRVVRAYNEPLSENAGLVVLRGNLAPDGACLKTAGLKSLVFSGTARVFETEEACMSVVSKRTYQEGDVLVIRNEGPKGGPGMREMLSVTAAIYGQGMGEKVALLTDGRFSGATRGMCIGYVGPEAAAGGPIRLLRDGDRIHIDAHKGTLDVELSDAELARRNSEVVPFTRGRLGGVLEKYEALVRPANLGAVTHSGAVEWPYEASIGEDEA

SEQ ID NO: 180580 - protein, 305 aa, Unknown
  Bacterial polypetide isolated from the Sargasso Sea
MGTQGMKYSLVSREVIADSIETVVNCLGYDGLIAIGGCDKNMPGCLIGIARLNRPSIFVYGGSIKPSEENTDYVTVCEKTGEFSKGSIPESDLIHVEKVSVKGPGSCGGMYTANTMASAIEALGMSLPGSSSQDAISSEKKQDCEDAGLAIMKLLEKDIKPKDIMTKKAFENAITMVIALGGSTNAVLHLLAMADAIGVDLSLDDFTRIGKNTPVLANLKPFGDYFMSELNAKGGIQPLMKMLLDHDMLHGDCLTVTGETLSKNLETIKSYDQNQEIISTLDSPIKASSHLRILYGNLAEEGAVA

SEQ ID NO: 180581 - protein, 557 aa, Unknown
  Bacterial polypetide isolated from the Sargasso Sea
MAYNRRSKNITQGVARSPNRSMYYALGYQKDDFDKPMIGIANGHSTITPCNAGLQRLADAAVAAVKGADANPQIFGTPTISDGMSMGTEGMKYSLVSREVIADCIETCVQGQWMDGVVVIGGCDKNMPGGMIGMLRTNVPSIYVYGGTIRPGNWKGTDLTIVSSFEAVGEFTAGRMSQEDFEGIEKNACPSTGSCGGMYTANTMSSSFEALGMSLLYSSTMANPDQEKVDSAAESARVLVEAVRKDLKPRDIVTKKSIENAVAVLMATGGSTNAVLHFLAIAHAAEVEWTIEDFERMRKKVPVICNLKPSGQFVATDLHKAGGIPQVMKILLDAGLLHGDCITITGKTIAEELKDVPGKPRADQQVIFPIEQALYKEGHLAILKGNLAVDGAVAKITGLKNPVITGPARVFDDEQSALEAILADKIVAGDVVVLRYLGPKGGPGMPEMLAPTSAIIGKGLGESVGLITDGRFSGGTWGMVVGHVAPEAFVGGTIAFVQEGDSITIDAHKLLLQLNIDDAELERRRAAWQQPKPRYTRGVMAKYSALALPANKGAVTG

SEQ ID NO: 180582 - protein, 463 aa, Unknown
  Bacterial polypetide isolated from the Sargasso Sea
PSRDIIADSMETVVQAMSYDGLITVVGCDKNMPGALMAMLRLDRPSILVYGGTIDSGCYNNKELDVVSAFEAWGEKVSGKINESEYKNVIKNACPGAGACGGMYTANTMASAIEALGMSLPYNSSNPAISKEKINECSEIGESIKNLIEKDIKPSDIVTKKSLENALRLVTVLGGSTNAVLHFLAISRAANLDLSIDYFQEISDSTPYLANLKPSGKYLMKDLHKIGGVPYVLKYMLENKMLHGDCLTVTGNTLEENLSKIKSPDVSSNDLIFPISNPIKNTGHIQILKGNLAEDGCVAKITGKEGLIFSGPAKVFNSEFECLSAIKNSEVSKGDVVVIRYEGPKGGPGMPEMLKPTSAIMGAGLGKEVALITDGRFSGGTHGFVVGHIVPEAFEGGTIAIVKNGDIITIDSEKNKIFVDISDKEIIKRKEKWKKPDLKIKNGILYKYIKSVSNASNGCVTDE

SEQ ID NO: 180583 - protein, 566 aa, Unknown
  Bacterial polypetide isolated from the Sargasso Sea
MNKKLKEKRQIGKWRSWETTEGVIRAPHRSMMRAMGLTDDDINAPFIGVASTHNEVTPCNSGIKPLADAVKKGINYSKGTPFEFGTITVSDAISMGTEGMKGSLVSREIIADSIETVCFAERYDGVVAVAGCDKSLPGAMMAMARLNIPSVFVYAGSILPGSLNGEDLTIISAFEAVGKRQAGEITDEQLREIETHACPGPGACGGMFTANTMSSIGEALGLSIPGSASEANVDQRKIASSREAGIAVMNLVRKNIRPSDILTKKSFENAVTLVVAMGGSTNTALHLPAIANEIGIKLTLKDIHEISMKTPLLVDMKPGGKYVMFDLDKVGGVPLVMKRLLDAGLLHGDELTVTGKTIRENLQNIDPNLSENNIVRHIDNPISKTGGLVTLFGNLAPDGCVLKVAGHDFGKKFTGPVKVFDQEEQAMESLRKREIKAGDVVIIRYEGPKGGPGMREMLSITGALVGQGLGESVYLITDGRFSGGSTGAIIGHLGPEAAVGGPIAAVENGDQVEIDLEKFELNLLIEDSEINKRLSKWKPRPPLYDRGTLGKYIKLVQPASEGAITR

SEQ ID NO: 180584 - protein, 122 aa, Unknown
  Bacterial polypetide isolated from the Sargasso Sea
MLYPTSYLKSKGLGKACALLTDGRFSGGTSGLSIGHVSPEAAAGGTIGLVKDGDIIRIDIPNRSIYLEVDDEELAKRRKIQDELGWSPEMQRPRKVSAALKAYGLMATSADKGAVRDLSAFL

SEQ ID NO: 180585 - protein, 329 aa, Unknown
  Bacterial polypetide isolated from the Sargasso Sea
MAKFNKKKLPSRHTSLGPDRAPHRSFYYAMGETEKDVAKPFVGVVSTWNEAAPCNIALMRQAQSVKKGVRANGGTPREFCTITVTDGIAMGHEGMKSSLISREVIADSAELTVRGHCYDALVGIAGCDKSLPGLMMSMVRLNVPSVFIYGGSILPGTYKGKDVTVVDVFEAVGKHSSGQMSAAELRKLELVACPSAGACGGQFTANTMACVSEAIGLALPYSAGTPAPYEERDKYAKESGKMVMNLLQKKIKPRDIVTRKALENAATIVAATGGSTNAGLHLPAIANEAGIKFDLMDVAKIFKRTPYLADLKPGGKYVAKDMWLAGGVP

SEQ ID NO: 180586 - protein, 497 aa, Unknown
  Bacterial polypetide isolated from the Sargasso Sea
MDKKGSNIKKNLPSRHVSVGPKSAPHRSMYYAMGMSEEEIYQPFIGVATTWNESAPCNITLGRQAQAVKIGVKEKNGTPREFTTITVTDGIAMGHEAMKASLVSREVIADSVELSVRGHCYDGIVGLAGCDKSLPGLMMAMVRLNIPSVFIYGGSILPGHHKGKDLTIIDVFEAVGKHAQGAIDDNELKTIEQVACPTAGSCGGQFTANTMACISEALGLALTNSAMTPATYEERDNYGIESGKAVMQLIEKNIRPRDIVTLESLRNAAVVVAATGGSTNAGLHLPAIANEAGIKFTLKDVVDIYKSTPYIGDMSPGGKYVAKDLYEVGGVPIVIKSLIDGGYINGDCMTVTGKTIGENHRDVIFPKNQDVVYTCDNPISEHSSVVGLWGNLAEDGSISKIAGLKNLQFKGKAKCFDCEEDALTAVLKNEIVAGDAVIIRYEGPKGGPGMREMLSTTGAIYGQGLGETVALITDGRFSGGTRGFCIGHVDQKLQWRH

SEQ ID NO: 180587 - protein, 539 aa, Unknown
  Bacterial polypetide isolated from the Sargasso Sea
SFYYAMDLTTEQIHQPFIGVATTWNESAPCNITLRRQAQSVKKGVTSADGTPREFTTITVTDGIAMGHQGMKASLASREAIADTIELSVRGHCYDGLVGVAGCDKSLPGVMMSMLRLNIPSVFIYGGSIMPGKHKGRDLTVQDVYEAVGQNDAGIIDADELDLIERAACPSAGSCGGQFTANTMACVSEAIGLALPNSTGAPAPYESRDEYALAAGKQVMTLIEKNLRPRDIVTRKSFENAARVVAASGGSTNAALHLPAMANEAGIDFDLFAVAEIFKSTPYIADLKPGGKYVAKDLHEAGGVQVILKALFEAGYIHGDCMTVTGKTMEENLADITFPKEQDVIYKVENAITPTGGVVGLRGNLAEEGAIVKVAGMTRTKHVGPAIVFDCEEDAYKAVNERNYKEGDVFVIRYEGPKGGPGMREMLATTAAIYGQGMGEKVALITDGRFSGATRGFCVGHVGPEAAVGGTIALIKDGDIITIDSDTGELSVDLSDEELKNRKKDWKPREHEYGSGEIWKYSQLVGSALKGAVTHPGAK

SEQ ID NO: 180588 - protein, 497 aa, Unknown
  Bacterial polypetide isolated from the Sargasso Sea
PCNIHLPNLAQQAKQGVTDGGTTPREFSTIAVSDGIAMGHEGMKSSLISREVIADSIELMVRAHQYDALVGIAGCDKSLPGTMMGMIRLNIPSVFVYGGTIMPGMLDGRELTVVDVYEAVGSYDAGKITAEELENIENVACPNAGSCGGMFTANTMASISEAIGLSLPGSASPPAEDERRNKIVYETGKACSELLKLGIKPLDIVTFESFENSITMLNAVGGSTNGILHLLAMANEAGINLTYDDFERIRKKTPHVADMKPGGNYVMNSLDKIGGIPLIMKKLLDKNLIHGDCLTVTGKTIKQNLDELLITEVPEQQIVKPVEQPIHEVGTAVILKGSLAPEGAVIKTAGVEMTEFTGTARVYDREEYAFESVSKGDVDEGDVVVIRYEGPKGGPGMREMLSTTAALVGQGLGKKVAMVTDGRFSGGTRGFMVGHVAPEAFVGGPIALVKDGDKISINVEDSSINLHVSEEELAKRKEQWRRPEPNFLQVHCEVASL

SEQ ID NO: 180589 - protein, 508 aa, Unknown
  Bacterial polypetide isolated from the Sargasso Sea
AHCADALVCLSNCDKITPGMLMATMRLNVPTIFVSGGPMEAGKGLVKGQEASLDLVDAMVLAADPSISDEDVAKVERSACPTCGSCSGMFTANSMNCLVEALGLGLPGNGSVLATHIDRKELFLRAGKIIVELTKQYYEKDDESVLPRNIANLESFENAMTLDIAMGGSTNTVLHILAAAKEAGLDFGMDDIDRLSRRVPNLCKVAPSSNFHMEDVHRAGGIMAILGELEKAKLLNSDSKTVHSETMLDAIQKWDINRKPSNEVKEFYSAAPGMIPTTQPFSQNKRYSELDVDRENGCIRDSDNAHSQDGGLAVLKGNIASDGCIVKTAGVDEKILTFSGPAKVFESQDDAVEAILGDQIEAGDVVVIRYEGPKGGPGMQEMLYPTSYLKAKGLGEKCALITDGRFSGGTSGLSIGHISPEAASKGYIALIKDGDIINIDIPKRSIDVDLLDEELELRKKEMASLGKKAWKPHKRNRTVSLALQAYALLASSASDGAVRQIEGIIDDE

SEQ ID NO: 180590 - protein, 422 aa, Unknown
  Bacterial polypetide isolated from the Sargasso Sea
MRLNVPTIFVSGGPMEAGKGLVKGQEASLDLVDAMVLAADPSVSDEDVAKVERSACPTCGSCSGMFTANSMNCLVEALGLALPGNGSVLATHIDRKELFLRAGKIIVELTKQYYEKDDESVLPRNIANLESFENAMTLDIAMGGSTNTVLHILAAAKEAGLDFGMDDIDRLSRRVPNLCKVAPSSNFHMEDVHRAGGIMAILGELEKAKLLNSDNKTVHSETMLDAIQKWDINRKPSNEVKEFYSAAPGMIPTTQPFSQNKRYSELDVDRENGCIRDSDNAHSQDGGLAVLKGNIASDGCIVKTAGVDEKILTFSGPAKVFESQDDAVEAILGDQIVAGDVVVIRYEGPKGGPGMQEMLYPTSYLKAKGLGEKCALITDGRFSGGTSGLSIGHISPEAASKGYIALIKDGDIINIDIPKRSI

SEQ ID NO: 180591 - protein, 194 aa, Unknown
  Bacterial polypetide isolated from the Sargasso Sea
MLRGVGFTSEDFLKPFIGIASTGAKVTPCNMHINKLSETVEDSVNSSGGKGVLFNTITVSDGISMGTQGMKYSLISREVIADSIETVVGCLAYDGLITIGGCDKNMPGCLIGMARLDRPSIFIYGGSIKPSNEDTDYVSVLEKVGEFSKGKIDEEKLIHYEKISVEGPGSCGGMYTANTMASSIEALGMSLPGS

SEQ ID NO: 180592 - protein, 277 aa, Unknown
  Bacterial polypetide isolated from the Sargasso Sea
MKFNKNKLPSRHVSVGPERAPHRSYYYAMGMDENDINKPFVGVVSTWNEAAPCNIALMRQAQSVKKGVSEAEGTPREFCTITVTDGIAMGHQGMKSSLVSREVIADSTELTVRGHCYDAIVGLAGCDKSLPGLMMAMCRLNVPSVFMYGGSILPGKYKGKDVTVVDVFEAVGKFSSGNATEEELHELECVACPSAGACGGQFTANTMACVSEAIGLALPYSSGAPAPYEERDKYAYESGKQVMYLIENNIRPRDIVTKKSLENAATIVAATGGSTNA

SEQ ID NO: 180593 - protein, 556 aa, Unknown
  Bacterial polypetide isolated from the Sargasso Sea
MDYNRYSKVITKKGSQPAAQAMLHAIGLTKKDFNKPFIGIASTGYEGNPCNMHLNELSIQIKNKINRDEAVPLIFNTIGISDGISMGTSGMKYSLPSRDIIADSIESVVNGMSYDSLITVVGCDKNMPGALMAMIRLNRPSILVYGGTISAGCYKGKKLDVVSAFEAWGERVAGKLSDDDYDNIISKACPGPGACGGMYTANTMSSAIEAMGMSLPYNSSNPATSQKKLDEKTKISKSIINLIKQDIKPSDILSKKSIENAVRLITILGGSTNAVLHILAICKTANIDFKIDDFQRISDETPFLANLKPSGKYLMEDLHEIGGVPAVMKFMMNNGLLHEDCLTVTGKTIKENLKNVESFDFNQDIIRPIDNPIKTSGHIRILYGNLASEGSVAKITGKEGLVFKGKANVFNCEDDANDAIKSNSISKGDVIVIRYEGPVGGPGMPEMLKPTSAIMGAGLGNDVALITDGRFSGGTHGFVVGHISPEAAKGGVLALVKNGDEIVIDAEKNEINVNIDKKELEIRKKLWVKPDLKFKSGILYKYSKLVSSASSGCVTD

SEQ ID NO: 180594 - protein, 532 aa, Unknown
  Bacterial polypetide isolated from the Sargasso Sea
MLRGVGFETSDFSKSLVGIASTWSKVTPCNMHINELADLVESSIDSSGCKGVLFNTITVSDGISMGTQGMKFSLVSREVIADSIETVVGCLVYDGVIAIGGCDKNMPGALMGLARLDRPSIFIYGGSIRPSSINTDYVTVSEKVGEYAKGDITEDELIAIEEVSVVGPGSCGGMYTANTMASSIEALGMSLPGSSSQDAVSDDKKLDCQNAGEAIKHLLDLDLKPSDIMTKKAFENSIAVVIALGGSTNAVLHLLAIAHCIGVDLDLDDFTRIGKVTPVLADIKPFGDHFMSQLNEIGGITPMMKTMLDNNLLHGDCMTVTGKTLAENLKDVDPYPSNQKIIMPLNNPVKDSSHLRILYGNLAPDGAVAKITGKEGTVFTGNARVFNSEEEGMTAILDEQIKDGDVVVIRFEGPRGGPGMREMLKPTSAIMGQGLGDKVAFITDGRFSGGTHGFVVGHISPEAELGGPIALIEDGDEITIDANKDILELNISDDEMKKRANVWKNPNSSPKSGVLAKYKRTVQSASKGAITD

SEQ ID NO: 180595 - protein, 416 aa, Unknown
  Bacterial polypetide isolated from the Sargasso Sea
PAIFLYGGSSLPGVYKGKDISIVDVFEGIGAFEKGIISEEELYEIECNACPGQGSCAGMFTANTMASVGEAIGMSLPGTASIPAEDQRLRTAAKESGLQLNYLLKEDIKPRDIMTLEAFKNAITTVLALGGSTNAVLHLLAISYEAKINLDLNTFDDLGKSVPHLADMKPFGKYHMVDLDKIGGVPVVSKILLENKLIDPNCLTVTGKTVGENLENIDIPKNQDVVSFPNNPISKEGGIAILNGTLSPNGSVVKTAGIEVNEFSGPANVFESEQDALDALFNNKIEKGDVVVIRNEGPKGGPGMREMLQITAAIKGAGLGKDVLLITDGRFSGGTTGLCIGHVTPESFDLGPIAICQNGDLINLNLSKRELNLELTESEIKKRFESYKLPEPRYKSGVLSKYSKLVSGADSGAVTS

SEQ ID NO: 180596 - protein, 411 aa, Unknown
  Bacterial polypetide isolated from the Sargasso Sea
GCDKNMPACGIAMARLNRPSVFVYGGTILPGKERRDIVSVFEAVGGHAAGSVSDIELKEVESTAIPGPGSCGGMYTANTMASAMEALGLSLPNSSAQNAVSEAKKIDSRNAGVAVRNLIRLGIKPSDILCKESFENAITVSIALEGSTNAVLHLLGIAHAAGIKLELDDFSRVGMRVPVLADMRPAGQYAMSELIEIGGIQPLMKLLLAEGLLNGNCLTVTGKTLAENLEHVEDYPANQKIIRPLSNPIKKDSHLVILRGNLAPEGAVAKITGHEGLTFEGTAKCYKGEEAAMKAIMDGRVDKGDVVVVRYEGPKGGPGMREMLSPTSAINGRGLSEHVALITDGRFSGGSHGFVIGHITPEAFEGGPIALIEDGDSIAINAETCEINLLISKEEWDVRRAKWSKPEPPIQ

SEQ ID NO: 180597 - protein, 430 aa, Unknown
  Bacterial polypetide isolated from the Sargasso Sea
VPSVFIYGGSILPGTYKGKDVTVVDVFEAVGKHSSGQMSAAELRKLELVACPSAGACGGQFTANTMACVSEAIGLALPYSAGTPAPYEERDKYAKESGKMVMKLLQKKIKPRDIVTRKALENAATIVAATGGSTNAGLHLPAIANEAGIKFDLMDVAKIFKRTPYLADLKPGGKYVAKDMWLAGGVPMLLKTLYEGGYIHGDCMTVTGKTMKENLKNIKFNPKQKVMRSYKDPLSPTGGVVGLKGNLAPEGAIVKVAGLKKLQFTGKARCFDNEESAMKAVQSRKYNDGDVIIIRYEGPVGGPGMREMLSTTGAIYGQGKGEKVALITDGRFSGATRGFCVGHVGPEAALGGPIGLLRTGDIIDIDAKKGTINVRLSKKEMAARKRKWKARKSDFGSGTLWKYAQTVGPAYLGASTHPGKKKEVKDYSEI

SEQ ID NO: 180598 - protein, 331 aa, Unknown
  Bacterial polypetide isolated from the Sargasso Sea
MAKFNKKKLPSRHTSLGADRAPHRSFYYAMGETEKDVAKPFVGVVSTWNEAAPCNIALMRQAQSVKKGVRSNGGTPREFCTITVTDGIAMGHEGMKSSLISREVIADSAELTVRGHCYDALVGIAGCDKSLPGLMMSMVRLNVPSVFIYGGSILPGRYKGKDVTVVDVFEAVGKHSSGKMSSAELRKLELVACPSAGACGGQFTANTMACVSEAIGLALPYSAGTPAPYEERDKYAKESGKMVMQLLKKQIKPRDIVTRKALENAATIVAATGGSTNAGLHLPAIANEAGIKFDLMDVAKIFKRTPYLADLKPGGKYVAKDMWLAGGVPML

SEQ ID NO: 180599 - protein, 329 aa, Unknown
  Bacterial polypetide isolated from the Sargasso Sea
MNLLAKNIRPRDIVTKKALENAATIVAATGGSTNAALHLPAIANEIGIKFDLMDVAKIFKRTPYLADLKPGGKYVAKDMWKAGGVPMLLKTLMDGGYIHGNCMTVTGKTMKENLKNVKFNSKQKVMRKYNNPLSKDGGVVGMKGNLAPEGAIVKVAGLKRLQFTGRARCFDTEEAAYKAVKNRKYKDGDIIIIRYEGPKGGPGMREMLQTTGAIYGQGKGEKVALITDGRFSGATRGFCIGHVGPEASVGGPIALLRNGDIIDLDAKKGTINVRLTKKELAKRRKKWKPKKINFGNGTLWKYAQTVGPAYLGAPTHPGGKNEVKTYADI

SEQ ID NO: 180600 - protein, 531 aa, Unknown
  Bacterial polypetide isolated from the Sargasso Sea
MLRGVGFTSEDFSKSFVGIASTGAKVTPCNMHINKLAEVVENSVNVSGGKGVLFNTITVSDGISMGTQGMKYSLVSREVIADSIETVVGCLGYDGLITIGGCDKNMPGCLIGMARLNRPSIFIYGGSIKPSNEKTDYVTVSEKVGEFSKGDIDEKELIHYEKISVEGPGSCGGMYTANTMASAIEALGMSLPGSSSQDAVSKSKNEDCITAGRAIMNLLEKDLKPSDIMTKEAFENAITVVIALGGSTNAVLHLLAMAHAVGVELQLDDFTKIGKVTPVLADLKPFGNHFMSELNANGGIQPLMKSLLDKGMLHGNCLTVTGNSLEENLKDIEPYKDEKIIKSLDSPIKSDSHLRVLYGNLAKDGAVAKITGKEGFSFEGKAKVFNSEEDGVEAILAKKINPGDVVVIRYEGPKGGPGMREMLKPTSAIMGLGLGDKVAFITDGRFSGGTHGFVVGHVSPEAADGGLIALIKDGDTILIDAENDELILKVDQDEIDLRKKNWKNPTNPPKKGVLAKYAASVKPASLGAITD

SEQ ID NO: 180601 - protein, 430 aa, Unknown
  Bacterial polypetide isolated from the Sargasso Sea
MGHEGMKSSLISREVIADSAELTVRGHCYDALVGIAGCDKSLPGLMMSMVRLNVPSVFIYGGSILPGKYKGKDVTVVDVFEAVGKHSTGQMSAAELRKLELVACPSAGACGGQFTANTMACVSEAIGLALPYSAGTPAPYEERDKYAKASGKTVMNLLKKGIKPRDIVTRKALENAATVVAATGGSTNAGLHLPAIANEAGIKFDLMDVAKIFKRTPYLADLKPGGKYVAKDMWLAGGVPMLLKTLYEGGYIHGDCMTVTGKTMKENLKGIKFNPKQKVMRSYKNPLSPTGGVVGLKGNLAPEGAIVKVAGLKKLQFTGKARCFDNEESAMKAVQSRKYNDGDVIIIRYEGPVGGPGMREMLSTTSAIYGQGKGEKVALITDGRFSGATRGFCVGHVGPEAALGGPIGLLRTGDIIDIDAKKGSINVRLS

SEQ ID NO: 180602 - protein, 315 aa, Unknown
  Bacterial polypetide isolated from the Sargasso Sea
MAKISDDVTQGVSKSAARAMLRAVGLKDDDFNKFQVGIVSAGNEVTPCNLTGPELSEHAKVGLNGPDSAGLIFSTIAVSDGISMGHEGMRASLVSREVIADSVELVMHAERFDGMVTIAGCDKSLPGMLMAAGRINRPAIFLYGGSSLPGVYKGKDISIVDVFEGIGAYEKGMITKEDLYEIECAACPGVGSCAGMFTANTMASVGEAIGMSLPGTASIPAEDSRLRVAAEESGKQLNYLLKNDIKPRDIMTKEAFINAITTVLALGGSTNAVLHLLAIAHESKMSLSLETFDELSRNVPHLADMKPFGKFHMVT

SEQ ID NO: 180603 - protein, 478 aa, Unknown
  Bacterial polypetide isolated from the Sargasso Sea
MKSSLVSRDVIADSTELTVRGHCYDALVGLAGCDKSLPGLMMAMVRLNVPSVFIYGGSILPGRLNGKDITVQDVIEGVGEYSSGRITEHALRKLELKACPSAGACGGQFTANTMACVSEAIGLALPYSAGTPAPYQKRDKYAFDSGKMVMNLLRKKIRPRDIVTKKSLENAAAIVAATGGSTNAALHLPAIANEIGIKFDLMDVARIFRKTPYLANLKPGGLYVAKDMWKAGGIPMLLKTMLDGGYIHGDCLTVTGKTMRENLKNVKFNKKQKVMRSYNNPLSKDGGVVGLKGNLSPDGAIVKIAGLKNLNFTGRARCFDTEEAALKAVLKKKYKKGDVIVIRYEGPKGGPGMREMLQTTAAIYGQGMGEKVALITDGRFSGATRGFCIGHVGPEASVGGPIGLLKNGDIIHIDAKKGTINVDLSRKELLKRKKKWKPKRINFGNGTLWKYAQTVGPAYLGASTHPGGKEEVKCYADI

SEQ ID NO: 180604 - protein, 553 aa, Unknown
  Bacterial polypetide isolated from the Sargasso Sea
MEKISDDVTKGASKSAARAMLRAVGLEDDDFNKFQVGVVSAGNEVTPCNLTGPELSEFAKKGVNGPDSAALIFSTIAVSDGISMGHEGMRASLVSREVIADSVELVMHAERFDGMVTIAGCDKSLPGMLMAAGRINRPAIFLYGGSSLPGVYNGKDISIVDVFEGIGAFEKGIISEEELYKIECAACPGVGSCAGMFTANTMASVGEAIGMSLPGTAAIPAEDAQLRDAAVESGKQLNYLLKNNIKPSDIMTQDAFTNAITTVLALGGSTNAVLHLLAIAHETGVELSIDKFDQLSRNVPHLADMKPFGKYHMVNLNEIGGVPVVSKILLENKLINPDCMTVTGQTVGENLEKVQIPKNQNVISFPDNPISNEGGIAILKGSLSPNGSVVKTAGIDINTFSGPANVFDSEQDALDALFNNKISKGEVVVIRNEGPKGGPGMREMLQITAAIKGAGLGKDVLLITDGRFSGGTTGLCIGHVAPESFDKGPISVCQNGDIITLDIENRSLNLEIEKNEFDERISKLKLPPPRYNSGVLYKYSKLVSGSDTGAVTN

SEQ ID NO: 180605 - protein, 401 aa, Unknown
  Bacterial polypetide isolated from the Sargasso Sea
MSTRKYSKELVDGPNQAASRSMLRGAGFTTEDFSKPFVGIASTGAKVTPCNMHINELSEVVEDSVNSSGGKGVLFNTITVSDGISMGTQGMKYSLISREVIADSIETVVGCLAYDGLITIGGCDKNMPGCLIGIARLNRPSIFIYGGSIKPSNENTDYVTVSEKVGEFSKGSINEKELIHYEKISVEGPGSCGGMYTANTMASAIEALGMSLPGSSSQDAISDSKNNDCINAGVAIMNLLEKDIKPSDIMTREAFENAITVVIALGGSTNAVLHLLAMAHSIGVDLCLDDFTKIGKKTPVLADLKPFGKHYMSELNANGGIQPLMKSLLDKGLLHGKCITVTGNTLEENLQDIKPYDNNEIIKSFEDPIKEDSHLRILYGNLAKDGAVAKINRKEGTSFEG

SEQ ID NO: 180606 - protein, 532 aa, Unknown
  Bacterial polypetide isolated from the Sargasso Sea
KSDEDFDRPFIGVANSYIDLIPGHVHLQEFGSVAKKAVREAGGVPFEFNTIGVDDGIAMGHIGMRYSLASRELIADSVETVAESHRLDGLICISNCDKIVPGMLMASLRVNIPTVFVSGGPMEAGTNKRGEKVDLVSVFEGVGKFKTGSIDEDDLKDLEENGCPTCGSCSGMFTANSMNCLLEVLGLALPGNGTILATDPSRLDLVKQAGKAIIDLVDKDLKPRDIVNNDSIRNAFALDMAMGGSTNTVLHTLAASIEAGLSFDMKEINEISRRTPYLCKVSPATPNVHMEDVLKAGGISAILMELSKQNGLLKLDRPTVLGVTLGESISGAKNYNKDIIRSVDDPFSKEGGLAVLFGNIAPHGSIVKTAAVNKEMLVHEGPARIYESQDEAMKGILDGEVCDGDVVVIRYEGPKGGPGMPEMLAPTSAIMGMGLGSKIALITDGRFSGGTRGACVGHISPEAAAGGPIAVIQPGEMIKIDINARSIELKIQQSEIDKRMKSLPDFEAKIQSGYLGRYTRMVSSANTGAVLI

SEQ ID NO: 180607 - protein, 443 aa, Unknown
  Bacterial polypetide isolated from the Sargasso Sea
MRKFNKKKLPSRHTSLGPDRAPHRSFYYAMGETEKDVSKPFVGVVSTWNEAAPCNIALMRQAQSVKKGVRASGGTPREFCTITVTDGIAMGHEGMKSSLISREVIADSAELTVRGHCYDALVGIAGCDKSLPGLMMSMVRLNVPSVFIYGGSILPGKYKGKDVTVVDVFEAVGKHSSGQMSAKELRKLELVACPTAGACGGQFTANTMACVSEAIGLALPYSAGTPAPYEERDKYAKASGKMVMELLAKRIKPRDIVTRKALENAATIVAATGGSTNAALHLPAIANEAGIKFDLMDVAKIFKKTPYLADLKPGGKYVAKDMWLAGGVPMLLKTLYDGGYIHGDCMTVTGKTIKENLKGIKFNLKQKVLRAYNKPLSPDGGVVGLKGNLAPEGGIVKIAGLKKLQFTGKARCFDNEESAMKAVQSRKYKDGDVIIIRYEGPVG

SEQ ID NO: 180608 - protein, 450 aa, Unknown
  Bacterial polypetide isolated from the Sargasso Sea
MRKFDKKKLPSRHTSLGADRAPHRSFYYAMGETEKDVSKPFVGVVSTWNEAAPCNIALMRQAQSVKKGVRASGGTPREFCTITVTDGIAMGHEGMKSSLISREVIADSAELTVRGHCYDALVGIAGCDKSLPGLMMSMVRLNVPSVFIYGGSILPGKYKGKDVTVVDVFEAVGKHSSGQMSAKELRKLELVACPTAGACGGQFTANTMACVSEAIGLALPYSAGTPAPYEERDKYAKNSGKMVMELLAKKIKPRDIVTRKALENAATIVAATGGSTNAGLHLPAIANEAGIKFDLMDVAKIFKRTPYLADLKPGGKYVAKDMWLAGGVPMLLKTLYEGGFIHGDCMTVTGKTMKENLKKIRFNPKQKVMRSYKNPLSPTGGVVGLKGNLAPDGGIVKIAGLKKLQFTGKARCFDNEESAMKAVQSKKYKDGDVIIIRYEGPVGGPGMREM

SEQ ID NO: 180609 - protein, 423 aa, Unknown
  Bacterial polypetide isolated from the Sargasso Sea
MAKFNKKKLPSRHTTLGPDKAPQRSFYYAMKLTEKDVAKPFVGVVSTWNEAAPCNIALMRQAQSVKKGVSMSGGTPREFCTITVTDGIAMGHEGMKSSLISRDVIADSTELTVRGHCYDALVGVAGCDKSLPGLMMAMVRLNVPSVFIYGGSILPGRLNGKDITVVDVFEGVGKYTSGKISEHALRKIELKACPTAGACGGQFTANTMACVSEAIGLALPYSAGTPAPFNKRDKYALASGKAVMNLLAKKIRPRNIVTRKSLENAATIVAATGGSTNAALHLPAIANEVGIKFDLMDVAKIFKRTPYLADLKPGGKYVAKDMWKAGGVPMLLKTLMDGGYIHGNCMTVTGKTMRENLKNVKFNTKQKVMRKYNNPLSPDGGVVGMKGNLAPEGAIVKVAGLKKLQFTGRARCFDTEEAAYKAV

SEQ ID NO: 180610 - protein, 265 aa, Unknown
  Bacterial polypetide isolated from the Sargasso Sea
MRKFDKKKLPSRHTSLGADRAPHRSFYYAMGETEKDVSKPFVGVVSTWNEAAPCNIALMRQAQSVKKGVRASGGTPREFCTITVTDGIAMGHEGMKSSLISREVIADSAELTVRGHCYDALVGIAGCDKSLPGLMMSMVRLNVPSVFIYGGSILPGKYKGKDVTVVDVFEAVGKHSSGQMSAKELRKLELVACPTAGACGGQFTANTMACVSEAIGLALPYSAGTPAPYEERDKYAKASGRMVMELLAKRIKPRDIVTRKALENA

SEQ ID NO: 180611 - protein, 572 aa, Unknown
  Bacterial polypetide isolated from the Sargasso Sea
MKKFNKKKLPSRHTSLGPDKAPQRSFYYAMNLTEKDVAKPFVGVVSTWNEAAPCNIALMRQAQSVKKGVQSAGGTPREFCTITVTDGIAMGHEGMKSSLISRDVIADSTELTVRGHCYDALVGVAGCDKSLPGLMMAMVRLNVPSVFIYGGSILPGRLNGKDITVVDVFEGVGKYSSGKISEHALRKIELKACPTAGACGGQFTANTMACVSEAMGLALPYSAGTPAPFNRRDKYALASGKAVMNLLAKNIRPRDIVTKKALENAATIVAATGGSTNAALHLPAIANEIGIKFDLMDVARIFKRTPYLADLKPGGKYVAKDMWKAGGVPMLLKTLMDGGYIHGNCMTVTGKTMKENLKNVKFNSNQKVMRKYNNPLSPDGGVVGMKGNLAPEGAIVKVAGLKKLQFTGRARCFDTEEAAYKAVKNRKYKDGDIIIIRYEGPKGGPGMREMLQTTGAIYGQGKGEKVALITDGRFSGATRGFCIGHVGPEASVGGPIALLRNGDIIDLDAKKGTINVRLTKKELAKRRKKWKPKKINFGNGTLWKYAQTVGPAYLGAPTHPGGKNEVKTYADI

SEQ ID NO: 180612 - protein, 205 aa, Unknown
  Bacterial polypetide isolated from the Sargasso Sea
LEKLPDLSDGQKVFHSLADPIKETGHIRILKGNFAPGGSVAKITGKEGRQFSGPARVFDGEEAMLKSLEEGGIQKGDVIIIRYEGPKGGPGMPEMLTPTSAIMGAGLGSDVALITDGRFSGGSHGFIIGHVVPEAQEGGPIGLVRDGDMIHLDADANTIDVDLSEEELKARRDSWTMPPYKTSRGTLYKYIKNVKTASDGCVTDE

SEQ ID NO: 180613 - protein, 244 aa, Unknown
  Bacterial polypetide isolated from the Sargasso Sea
PMLLKTLLDGGYIHGNCMTVTGKTMKENLKNVKFNSNQKVMRKYSNPLSPTGGVVGMKGNLAPEGAIVKVAGLNKLKFTGRARCFDTEEAAYKAVKNRKYKDGDIIIIRYEGPKGGPGMREMLQTTGAIYGQGKGEKVALITDGRFSGATRGFCIGHVGPEASVGGPIALLRNGDVIDLDAKKGTINVRLSKKELAKRRKKWKPKKINFGNGTLWKYAQTVGPAYLGAPTHPGGKNEVKVYADI

SEQ ID NO: 180614 - protein, 532 aa, Unknown
  Bacterial polypetide isolated from the Sargasso Sea
MLRGVGFETADFSKPLVGIASTWSKVTPCNMHINELADLVESSIDASGCKGVLFNTITVSDGISMGTQGMKFSLVSREVIADSIETVVGCLGYDGVIAIGGCDKNMPGALMGLARLNRPSIFIYGGSIRPSSINTDYVTVSEKVGEYAKGDITEDELIAIEKVSVVGPGSCGGMYTANTMASSIEALGMSLPGSSSQDAVSNDKKVDCQNAGEAIKHLLDLDLKPSDIMTKKAFENSIAVVIALGGSTNAVLHLIAIAHCIGVDLDLDDFTRIGKVTPVLADIKPFGDHFMSQLNEIGGITPMMKTMLDNNLLHGDCMTVTGKTLEENLKDLDPYPSNQKIIMPLNNPVKDSSHLRVLYGNLAPEGAVAKITGKEGTVFTGNARVFNSEEEGMKAILDKKIKDGDVVVIRFEGPQGGPGMREMLKPTSAIMGQGLGDRVAFITDGRFSGGTHGFVVGHISPEAELGGPIALIEDGDEITIDANKDILELNISDNEMKKRADLWKNPNSSPKSGVLAKYKKTVQSASKGAITD

SEQ ID NO: 180615 - protein, 424 aa, Unknown
  Bacterial polypetide isolated from the Sargasso Sea
LAGCDKSLPGLMMSMVRLNVPSVFIYGGSILPGRFNGKDVTVVDVFEGVGKYTSKKMTAHALRKLELKACPSAGACGGQFTANTMACVSEAIGLALPYSAGTPAPYTERNKYALASGKAVMNLLAKNIRPRDIVTRKSLENAATIVAATGGSTNAGLHLPAIANEIGIKFDLMDVAKIFKRTPYLADLKPGGKYVAKDMWEAGGVPMLLKTLMDGGFIHGDCMTVTGKTMKENLKNVKFKTNQKVMRKYNNPLSKTGGVVGLKGNLAPEGGIVKIAGLKKLQFTGKARCFNTEEDAYKAVKNRKYKDGDIIIIRYEGPKGGPGMREMLQTTAAIYGQGKGEKVALITDGRFSGATRGFCIGHVGPEASVGGPIALLRNGDVIDIDAKKGTIHVRLSKKELNARRKKWKTKENEFLVTVHYGNMH

SEQ ID NO: 180616 - protein, 348 aa, Unknown
  Bacterial polypetide isolated from the Sargasso Sea
MLRGAGFTDEDFEKSIVGIASLGASVTPCNMHLNSLAEIVEGSVNNSGCKAVTFNTITVSDGISMGTEGMKYSLVSREVIADSIETVVGCLGYDGVVGIGGCDKNMPGVIIGLARLNRPSLFIYGGSIRPSEQNTDYVTVCEKTGEFSKGSISEEELISVEKVSVVGPGSCGGMYTANTMASAIEALGMSLPGSSSQDAVSDDKKNDCINTGSAIRNLLEKDIKPSDIMTKEAFENAITVVIALGGSTNAVLHLIAMAHAINVDLDLDDFTRIGKRVPVVADIKPFGKNYMSSLNEVGGIQPLMKMLLDADLLHGDCLTVSGKTISENLSEVDPYPKNQTIIREISNP

SEQ ID NO: 180617 - protein, 447 aa, Unknown
  Bacterial polypetide isolated from the Sargasso Sea
VGGQGFDGLVTIGGCDKNMPACLMAMARLNRPSVFVYGGSIKPGKGRTDVISVFEAVGKHSKGDISDIELLEIESSAIPGPGSCGGMYTANTMASAIEAMGMSLPNSSAQEATSKIKLQDSMEAGKAVSNLINLDLKPRDIMTKEAFENAISVVIALGGSTNAVLHLIAIAHEAKVDLSLDDFERLGKRTPVLADLKPSGTYLMSELIEIGGIVPLMQKMLEKELLYGDQMTVTGKTLEENLSDSKNYPEDQTIVKNFDNPIKNDSHLRILYGNLAPEGAVAKISGKEGLKFEGKARVFDSEETAMEGIMKGKINEGDVLIIRYEGPKGGPGMREMLGPTSAIMGKGLGDKVAFLTDGRFSGGTHGFVVGHISPEAYEGGPLALVRDGDSINIDAHSNQINIAISDKEIKERREAWECPKKNQETGVLGKYRSLVTSASQGAVTTKN

SEQ ID NO: 180618 - protein, 257 aa, Unknown
  Bacterial polypetide isolated from the Sargasso Sea
MPDYRSKTSTHGRNMAGARALWRATGMGDDDFGKPIIAIANSFTQFVPGHVHLKDLGQMVAREIEKSGGVAKEFSTIAVDDGIAMGHSGMLYSLPSRELIADAVEYMVNAHCADALVCLSNCDKITPGMLMATMRLNVPTIFVSGGPMEAGKGLVKGQEASLDLVDAMVLAADPSISDEDVAKVERSACPTCGSCSGMFTANSMNCLVEALGLGLPGNGSVLATHIDRKELFLRAGKIIVELTKQYYEKDDESVLPK

SEQ ID NO: 180619 - protein, 340 aa, Unknown
  Bacterial polypetide isolated from the Sargasso Sea
MLRSDAVTKGIQRSPNRAMLRAVGFGDEDFGKPILGIANGYSTITPCNVGLNDLSRRAEEAARQAGGMPQMFGTITVSDGISMGTEGMKYSLVSREVIADAIETACNGQSMDGVLAVGGCDKNMPGAMLAMARMNIPAVFVYGGTIKPGKLGGCDLTVVSAFEAVGQLTSGNIDEDQLTAVEKNACPGAGSCGGMFTANTMSAAIETMGLSLPYSSTMAAEDEEKADSAARSAEVLLDAVKANIRPLDLLTKEAFENAISVIMAVGGSTNAVLHLLAIARTAGVSLSIDDFERIRQRVPVICDLKPSGRYVTVDLHNAGGIPQVMKLLLDAGLLHGDCRT

SEQ ID NO: 180620 - protein, 355 aa, Unknown
  Bacterial polypetide isolated from the Sargasso Sea
SNDTYKQIVQKACPGPGSCGGMYTANTMASALEAMGMSLPYSASYLATSSDKAEECKNLGKYVRRLLEKDIRPRDIVTKKSLENAVCVAVALGGSTNLVLHILAIARALEVDFSLEDIQRVNDRTPLLGNLKPSGKYLMEDLTEVGGVPAVMKLLYERGYLHGECLTVTGKTLAENLKGVKALADGQDVVNDPKVPLKPEGHLNILYGNLAPKGSVAKITGKEGETFKGNARVFNSEDDAVEAIKNLSIKEGDVVVIRYVGPKGGPGMPEMLKPTSALMGVGLGGKVALLTDGRFSGGSHGFVVGHISPEAMEGGPLAFVENGDEISVDAKTKEINLEIDDNELVKRKESWGKTP

SEQ ID NO: 180621 - protein, 483 aa, Unknown
  Bacterial polypetide isolated from the Sargasso Sea
MGHEGMKSSLISRDVIADSTELTVRGHCYDALVGVAGCDKSLPGLMMAMVRLNVPSVFIYGGSILPGRFNGKDVTVVDVFEGVGKYSSGKMSAHALRKLELKACPSSGACGGQFTANTMACVSEAIGLALPYSAGTPAPYEQRDKYAMLSGKAVMNLLKKKIRPRDIVTRKALENAATIVAATGGSTNAALHLPAIANEVGIKFDLMDVAKIFKKTPYLADLKPGGRYVAKDMWQAGGVPMLLKTLMDGGYIHGDCLTVTGKTMRENLKKVKFNLKQKVMRKHNNPLSPDGGVVGLKGNLAPEGAIVKVAGLKKLQFTGIARCFDTEEAAFKAVQKKQYKDGDIIIIRYEGPRGGPGMREMLQTTGAIYGQGKGEKVALITDGRFSGATRGFCIGHVGPEASIGGPIALLRNGDVIDIDAKKGTINVRLSKKELSKRKKKWKPKKINFGNGTLWKYAQTVGPAYLGAPTHPGAKNEVKVYADI

SEQ ID NO: 180622 - protein, 488 aa, Unknown
  Bacterial polypetide isolated from the Sargasso Sea
MKKFNKKKLPSRHTSLGPDKAPQRSFYYAMDLTEKDVAKPFVGVVSTWNEAAPCNIALMRQAQSVKKGVHQAGGTPREFCTITVTDGIAMGHEGMKSSLISRDVIADSTELTVRGHCYDALVGVAGCDKSLPGLMMAMVRLNVPSVFIYGGSILPGRFNGKDVTVVDVFEGVGKFSSGKMSAHALRKLELKACPSAGACGGQFTANTMACVSEAIGLALPYSAGTPAPYTQRDSYALKSGKAVMNLLAKNIRPRDIVTKKSLENAATIVAATGGSTNAALHLPALANEAGIKFDLMDVARIFKKTPYLADLKPGGKYVAKDMWKAGGVPMLLKTLLDGGYIHGDCMTVTGKTMRQNLKNVKFNKNQKVMRTHNQPLSPDGGVVGLKGNLAPDGAIVKVAGLKKLQFTGKARCFDTEEAAYKAVKNKKYKDGDIIIIRYEGPKGGPGMREMLQTTGAIYGQGKGEKVALITDGRFSGATRGFCIGSCRT

SEQ ID NO: 180623 - protein, 150 aa, Unknown
  Bacterial polypetide isolated from the Sargasso Sea
VKNRKYKDGDIIIIRYEGPKGGPGMREMLQTTAAIYGQGKGEKVALITDGRFSGATRGFCIGHVGPEASVGGPIALLRNGDVIDIDAKKGTINVRLSKKELSARRKKWKPKKMNFGNGTLWKYAQTVGPAYKGAPTHPGGKNEVRTYADI

SEQ ID NO: 180624 - protein, 503 aa, Unknown
  Bacterial polypetide isolated from the Sargasso Sea
ALKAEESIREAGGMPQMFGTITVSDGISMGTEGMKYSLVSREVIADSIETACNAQSMDGVLAIGGCDKNMPGAMIAIARMNIPSIFIYGGTIKPGKLNGEDLTVVSAFEAVGQLTSGKINEKRLIEVEKNCIPGAGSCGGMFTANTMSAVIEVLGLSLPYSSTMAAEDYEKEVSAEKSAEILVDAIRKDIRPLTLMTKESFENAISVIMAIGGSTNAVLHILAIANTAGIDINIDDFERIRQKVPVICDLKPSGKYVTVDLHKAGGIPQVMKILLNAGLIHGNCRNIEGKTIVESLKDIPDKPPENQDVIRDIDNPLYKKGHLAILKGNLASEGCVAKISGIKNPVLKGPARIFESEEDCLKSILNNDIKAGNVVVIRNEGPVGGPGMREMLAPTSAIVGQGLGEKVALITDGRFSGGTYGLVVGHIAPEAAVGGNIALIKEGDLITVDAINQLIEVELSDEELEIRRINWEKPSKKYKKGVLSKYARIVSTSSLGAVTDLEE

SEQ ID NO: 180625 - protein, 155 aa, Unknown
  Bacterial polypetide isolated from the Sargasso Sea
SFEGKAKVFNSEEEGVEAILSNSIKDGDVIVIRYEGPKGGPGMREMLKPTSAIMGLGLGEKVAFITDGRFSGGTHGFVVGHISPEAADGGLIAMIEDGDKILIDAENDQLILKVDDEEINRRESNWKNPIKKPKKGVLAKYAKSVKSASLGAITD

SEQ ID NO: 180626 - protein, 174 aa, Unknown
  Bacterial polypetide isolated from the Sargasso Sea
MGLKKLQFTGRARCFDTEESAYKAVKNKKYKDGDIIIIRYEGPKGGPGMREMLQTTGAIYGQGKGEKVALITDGRFSGATRGFCIGHVGPEASVGGPIALLRNGDVIDIDAKKGTINVRLSKKELQKRRKKWRPKKINFGNGTLWKYAQTVGPAYLGAPTHPGGKNEVKVYADI

SEQ ID NO: 180627 - protein, 306 aa, Unknown
  Bacterial polypetide isolated from the Sargasso Sea
MPDYRSKTSTHGRNMAGARALWRATGMGDDDFGKPIIAIANSFTQFVPGHVHLKDLGQMVAREIEKSGGVAKEFSTIAVDDGIAMGHSGMLYSLPSRELIADAVEYMANAHCADALVCLSNCDKITPGMLMATMRLNIPTIFVSGGPMEAGKGLIKGQEASLDLIDAMVLAGDPSVSDEEVEKIERSACPTCGSCSGMFTANSMNCLVEALGLALPGNGSVLATHIDRKELFLKAGRIIVELTKQYYEKDDESVLPRNIANLKSFENAMTLDIAMGGSTNTVLHILAAEKEGELDFGMDDIDRLSR

SEQ ID NO: 180628 - protein, 215 aa, Unknown
  Bacterial polypetide isolated from the Sargasso Sea
CITVTGKTLAENLKDVEPYNNNEIIRDFDKPIKEDSHLRILYGNLAQEGAVAKITGKEGTSFEGKARVFNSEEEGVKAILSNSINEGDVIVIRYEGPKGGPGMREMLKPTSAIMGLGLGDKVAFITDGRFSGGTHGFVVGHISPEAADGGLIAMIEDGDQILIDAKNDQLVLKVDDHEIKQRKSNWKNPIKKPKKGVLAKYAKSVKSASLGAITD

SEQ ID NO: 180629 - protein, 404 aa, Unknown
  Bacterial polypetide isolated from the Sargasso Sea
DKAPQRSFYYAMKLTEKDVAKPFVGVVSTWNEAAPCNIALMRQAQSVKKGVKSSGGTPREFCTITVTDGIAMGHEGMKSSLVSRDVIADSTELTVRGHCYDALVGVAGCDKSLPGLMMAMVRLNVPSVFIYGGSILPGRFNGKDVTVVDVFEGVGKYSSGQMNAHALRKLELKACPSAGACGGQFTANTMACVSEAMGLALPYSAGTPAPYEQRDKFALQSGKAVMNLLAKNIRPRDIVTRKALENAATIVAATGGSTNAALHLPAIANEIGIKFDLMDVAKIFKRTPYLADLKPGGRYVAKDMWLAGGVPMLLRTLLDGGYIHGDCMTVTGKTMRQNLKNIKFNPKQKVMRKYNNPLSNDGGVVGLKGNLAPEGAIVKVAGLKKLQFTGRARCFDTEESAYKA

SEQ ID NO: 180630 - protein, 322 aa, Unknown
  Bacterial polypetide isolated from the Sargasso Sea
MLRGVGFTTEDFSKPFIGIASTGAKVTPCNMHLNQLSEVVESSVNSSGGKGVLFNTITVSDGISMGTQGMKYSLVSREVIADSIETVVGCLAYDGLITVGGCDKNMPGCLIGMARLNRPSIFIYGGSIKPSDENTDYVTVLEKVGEFSKGKIDEEQLIHYEKVSVDGPGSCGGMYTANTMASSIEALGMSLPGSSSQDAVSDSKKDDCLNAGNAIMNLLERDIKPSDIMTREAFENAITVVIALGGSTNAVLHLLAIAHSIGVDLCLDDFTEIGKRTPVLANLKPFGDHYMSELNANGGIPPMMKTLLDKGLLNGICMTVTG

SEQ ID NO: 180631 - protein, 415 aa, Unknown
  Bacterial polypetide isolated from the Sargasso Sea
MKKFNKKKLPSRHTTIGADKAPQRSFYYAMDLTEKDVAKPFVGVVSTWNEAAPCNINLMKQAQSVKKGVKASGGTPREFCTITVTDGIAMGHEGMKSSLISRDVIADSTELTVRGHCYDALVGLAGCDKSLPGLMMSMVRLNIPSVFIYGGSILPGRFNGKDVTVVDVFEGVGKYTSKKMTAHALRKLELKACPSAGACGGQFTANTMACVSEAIGLALPFSAGTPAPYLERNKYAIDSGKAVMNLLAKNIRPRDIVTRKALENAATIVAATGGSTNAGLHLPAIANEIGIKFDLMDVAKIFKKTPYLADLKPGGKYVAKDMWEAGGVPMLLKTLMDGGYIHGDCMTVTGKTMRENLKNVKFRTNQKVMRSYKNPISPTGGVVGLKGNLAPEGGIVKIAGLKKLQFTGRARCFDK

SEQ ID NO: 180632 - protein, 557 aa, Unknown
  Bacterial polypetide isolated from the Sargasso Sea
MSKGNRKYSSKIVDGVEQAPSRAMLRAVGFENEDFNKPQVGVASTWSMVTPCNMHIDKLADSTVKGVNESGSKGIIFNTITVSDGISMGTQGMRFSLVSREVIADSIETVVSGQGFDGLVTIGGCDKNMPACLMAMARLNRPSIFVYGGSIKPGKGRTDVISVFEAVGKHSEGVISDIELLDIESSAIPGPGSCGGMYTANTMASAIEAMGMSLPNSSAQEATSKTKLLDSLEAGKAVSNLINLDLKPRDIMTKEAFENAISMVIALGGSTNAVLHLIAIAHEAKINISLDDFERLGKRIPVLADLKPSGHYLMSELIEIGGIVPLMRKMLEKELLYGDQITVTGKTLEENLSDSTNYPEGQEIIKDFKSPIKKDSHLRILYGNLAPEGAVAKISGKEGLTFDGKARVFDSEETAMEGILKGQINEGDVLIIRYEGPKGGPGMREMLGPTSAIMGKGLGDKVAFLTDGRFSGGTHGFVVGHISPEAYEGGPLALVRDGDSIKIDARSNQINVSITDKEMKERRESWKLPKKNEETGVLGKYRSLVSSASQGAVTTRN

SEQ ID NO: 180633 - protein, 405 aa, Unknown
  Bacterial polypetide isolated from the Sargasso Sea
MSKIDKKKLPSRHTSLGPDRAPHRSFYYAMGETEQDVAKPFVGVVSTWNEAAPCNTALMRQAQSVKKGVKESGGTPREFCTITVTDGIAMGHEGMKSSLISREVIADSAELTVRGHCYDALVGIAGCDKSLPGLMMSMLRLNVPSVFIYGGSILPGKFKGKDVTVVDVFEAVGKHSSGKMSSEELRELELVACPSAGACGGQFTANTMACVSEAIGLALPYSAGTPAPYEERDKYAYESGQAVMNLLEKKIKPREIVTKKSLENAATIVAATGGSTNAALHLPALANEIGVKFDLMDVAKIFKKTPYLADLKPGGKYVAKDMWEAGGVPMLLKTLYDGGYIHGECLTVTGKTMKENLANIKFNTNQKVLREYNKPLSPDGGVVGLKGNLAPDGAIVKIAGLKKLQ

SEQ ID NO: 180634 - protein, 282 aa, Unknown
  Bacterial polypetide isolated from the Sargasso Sea
LHFLAIAKAANIDVSIDYFQKISDSTPFLANLKPSGKYLMKDLHEIGGIPSVLKYMLENKMLYGDCLTVTGKTIKENLSDVKSLDFSNDVIFPLSKPIKETGHIQILKGNLAKEGSVAKITGKEGLVFSGPAKVFNSEFETIDAIQNSKVNKGEVVVIRYEGPKGGPGMPEMLKPTSAIMGAGLGNDVALITDGRFSGGTHGFVVGHIVPEAFEGGTIALVEDGDIITIDSKNNVISVDISDNEIGERRKKWKKPDLKINQGILYKYVKSVSNASKGCVTDE

SEQ ID NO: 180635 - protein, 288 aa, Unknown
  Bacterial polypetide isolated from the Sargasso Sea
LGGSTNAVLHLLAIAYEAKVDLTIDVFDELARKVPHLADMKPFGKYHMVDLDKIGGVPVVSKILLENKLIDPNCMTVTGKTVGENLEDIEVPKDQDVVYFPDNPISKEGGLAILRGSLSPNGSVVKVAGIEIDTFKGPANVFDSEQEALDALFNNKIKKGEVVVIRNEGPKGGPGMREMLQITAAMKGAGLGKDVLLITDGRFSGGTTGLCIGHVTPESFDNGPIAICETGDEISLDLKKRELNLNVDEDEIEKRLKKYSNPEPRYNSGVLNKYSKLVTGADRGAVTG

SEQ ID NO: 180636 - protein, 31 aa, Unknown
  Bacterial polypetide isolated from the Sargasso Sea
MPDYRSKTSTHGRNMAGARALWRATGMGDDD

SEQ ID NO: 180637 - protein, 193 aa, Unknown
  Bacterial polypetide isolated from the Sargasso Sea
MLRGVGFTSEDFTKPFVGIASTGAKVTPCNMHINQLSELVEDSINASGGKGVLFNTITVSDGISMGTQGMKYSLVSREVIADSIETVVGCLGYDGLIAIGGCDKNMPGCLIGMARLNRPSIFIYGGSIKPSNENTDYVTVSEKVGEFSKGSINEDELIHYEKISVDGPGSCGGMYTGNTMASAIEALGMSLPG

SEQ ID NO: 180638 - protein, 389 aa, Unknown
  Bacterial polypetide isolated from the Sargasso Sea
MVKFSDDVTQGVEKSAARAMLRAVGLEDEDFNKFQVGIVSAGNEVTPCNLTGPELSIHAKEGVNGTDSAGLIFSTIAVSDGISMGHEGMRASLVSREVIADSVELVMHAERFDGMVTIAGCDKSLPGMLMASARINRPAIFLYGGSSLPGVYKGKDISIVDVFEGIGAYEKGIISEEELYEIECNACPGQGSCAGMFTANTMASVGEAIGMSLPGTASIPAEDQRLRTAAKESGLQLNYLLKEDIKPRDIMTLGAFKNAITTVLALGGSTNAVLHLLAISYEAKINLDLNTFDDLGKSVPHLADMKPFGKYHMVDLDKIGGVPVVSKILLENKLIDPDCLTVTGKTVGENLENIDIPKSQDVVSFPDNPISKEGGIAILNGTLSPNGSV

SEQ ID NO: 180639 - protein, 292 aa, Unknown
  Bacterial polypetide isolated from the Sargasso Sea
MPKFNKKKLPSRHTSVGPDKAPQRSFYYAMNLTEKDVAKPFVGVVSTWNEAAPCNIALMRQAQSVKKGVQSSGGTPREFCTITVTDGIAMGHEGMKSSLISRDVIADSTELTVRGHCYDALVGVAGCDKSLPGLMMAMVRLNVPSVFIYGGSILPGRLNGKDITVVDVFEGVGKYSSGKISEHALRKLELKACPTAGACGGQFTANTMACVSEAIGLALPYSAGTPAPFNRRDKYALASGKAVMNLLAKNIRPRDIVTRKSLENAATIVAATGGSTNAALHLPAIANEIGIK

SEQ ID NO: 180640 - protein, 244 aa, Unknown
  Bacterial polypetide isolated from the Sargasso Sea
MSEKLNKVSSRITQPRSQGASQAMLYATGLTREDMDKAQVGIASMWWQGNPCNMHLNDLADQIATGVRESDLIPMRFNTIGVSDGISMGTEGMSYSLQSRDLIADSIETVMGGQWYDALVTVPGCDKNMPGCLMAMGRVNRPALMLYGGTIRPGHAGSQVVDIVSAFQSYGQYIAKVITDEERQDIVDNACPGAGACGGMYTANTMASAIEAMGMSLPYSSSAPATTEQKKNECLNVGAAVRNL

SEQ ID NO: 180641 - protein, 557 aa, Unknown
  Bacterial polypetide isolated from the Sargasso Sea
MSKDKRKYSSEIVDGVEQAPSRAMLRAVGFESEDFNKPQVGIASTWSMVTPCNMHIDKLAESAAEGANSVGSKAVIFNTITVSDGISMGTKGMRYSLVSREVIADSIETVVGGQGFDGLVTIGGCDKNMPACVMAMARLNRPSIFVYGGSIKPGSNRTDVVSVFEAVGKHSEGAISDIELLDIESSAIPGPGSCGGMYTANTMASAIEALGMSLPNSSAQEATSRSKMLDSSSAGEAIMHLISEDIKPRDIMTKEAFENAIAVVIALGGSTNAVLHLLAIAHEAKVDLSLDDFERIGKRTPVLADLRPSGNYLMSELIEIGGIVPLMKTMLEKDLLNGKQMTVTGKTLEENLLEYEDYPDDQKIVSNFDDPIKPDSHLRILYGNLAPQGAVAKISGKEGLRFEGKAKVYNSEEDAMEGILSNQISEGDVLVIRYEGPRGAPGMREMLSPTSAIMGKGLGDKVAFLTDGRFSGGTHGFVVGHITPEAFDGGLIAFVQDGDLISIDAETNQINLDLTEEEIQKRKDSWVCPVKDEEGGVLDKYRSLVASASEGAVTTKK

SEQ ID NO: 180642 - protein, 400 aa, Unknown
  Bacterial polypetide isolated from the Sargasso Sea
MYNKFSRVVTKDDSQPAAQAMLHAIGLNDEDFDKPFIGIASTGYEGNPCNMHLNDLSVKIKDSITASKYVGLIFNTIGVSDGISMGTFGMRYSLPSRDIIADSMETVVQAMSYDGLITVVGCDKNMPGALMAMLRLDRPSILVYGGTIDSGCYNNKELDVVSAFEAWGEKVSGKIDESEYKNVIKNACPGAGACGGMYTANTMASAIEALGMSLPYNSSNPAISNEKINECDEIGESIKNLIEKDIKPSDIVTKKSLENALRLVTVLGGSTNAVLHFLAISRAANLDLSIDYFQEISDSTPYLANLKPSGKYLMKDLHKIGGVPYVLKYMLENKMLHGDCLTVTGSTIEENLSKIKSPDVSSNDLIFPISDPIKNTGHIQILKGNLAEDGCVAKITVKKV

SEQ ID NO: 180643 - protein, 603 aa, Unknown
  Bacterial polypetide isolated from the Sargasso Sea
AYAGARALWRATGMTDDDFGKPIIAVVNSFTQFVPGHVHLRDLGKLVAEQIEASGGVAKEFNTIAVDDGIAMGHGGMLYSLPSRELIADSVEYMVNAHCADAMVCISNCDKITPGMLMASLRLNIPVIFVSGGPMEAGKTKLSDQIIKLDLVDAMIQGADPKVSDSQSEQVERSACPTCGSCSGMFTANSMNCLTEALGLSQPGNGSLLATHADRKTLFLNAGKRIVELTKRYYEQDDASALPRNIASKAAFENAMTLDIAMGGSTNTVLHLLAAAQEAEIDFTMSDIDKLSRKVPQLCKVAPSTQKYHMEDVHRAGGVLGILGELDRAGLLNRDVKNVLGLTLPQTLDRYDVMLTKDDAVKKMFRAGPAGIRTTQAFSQDCRWDTLDDDRAEGCIRSLEHAYSKDGGLAVLYGNFAENGCIVKTAGVDDSILKFTGPAKVYESQDDAVEAILGGKVVAGDVVVIRYEGPKGGPGMQEMLYPTTFLKSMGLGKACALITDGRFSGGTSGLSIGHVSPEAASGGNIAIIEDGDMIAIDIPNRGIQLQLSDAEIAARREAQEAHGDKAWTPKYRQRQVSFALRAYASLATSADKGAVRDKSKLGG

SEQ ID NO: 180644 - protein, 387 aa, Unknown
  Bacterial polypetide isolated from the Sargasso Sea
IADSIETVVFAERFDGLVAVAGCDKSLPGAMMAIARLDVPSVFVYGGSILPGNLNGKTIQIQDVFEAVGKHQKGDLSDNELYQIESRACPGPGSCGGMFTANTMSSVGEALGLSLPGSASEPAVDQRKSASSRKAGEAVLNLLRKDIRPSDILTKKAFENAVTVVTAMGGSTNTALHLPAIAHEMGVDLSLEDIHDISMKTPHLADMKPGGKYIMYDLDNVGGVPLVMKRLFKLGLIHGDCMTVTGKTVEENLAEIKDNGTENDVVRLPDNPISNTGGLVILHGNLAPEGAVLKVAGHNYGKSWSGPARVFNQEEECMESLKKHEIKEGDFVVIRYEGPKGGPGMREMLSITSAIVGQGLGDKVFLMTDGRFSGASHGPMIGHVGLR

SEQ ID NO: 180645 - protein, 532 aa, Unknown
  Bacterial polypetide isolated from the Sargasso Sea
MLRGAGFKDEDFEKSIVGIASLGASVTPCNMHLNSLAEIVEESVNNSGCKAVTFNTITVSDGISMGTEGMKYSLVSREVIADSIETVVGCLGYDGVVGIGGCDKNMPGVIIGLARLNRPSLFIYGGSIRPSEQNTDYVTVCEKTGEFSKGSISEEELISVEKVSVVGPGSCGGMYTANTMASAIEALGMSLPGSSSQDAVSDDKKNDCINTGRAIENLLEKDIKPSDIMTKEAFENAITVVIALGGSTNAVLHLIAMAHAINVDLDLDDFTRIGKRVPVVADIKPFGENYMSSLNKVGGIQPLMKMLLDADLLHGDCITVSGKTISENLSEVDSYPDNQTIIREISNPIKSSSHLRILYGNLAPEGAVAKITGNEGLKFTGTAKVFDSEEDGNEAIQNNLVNEGDVVVIRYEGPKGGPGMREMLKPTSAIMGQGLGDKVAFITDGRFSGGTHGFVVGHISPEAYVGGPIGVIENGDKITIDAETNSISIDISDEELQKRLDNFKPNKELPKKGVLSKYSKSVQSASLGAITD

SEQ ID NO: 180646 - protein, 413 aa, Unknown
  Bacterial polypetide isolated from the Sargasso Sea
MLRGAGFKDEDFEKSIVGIASLGASVTPCNMHLNSLAGIVEESVNNAGCKAVTFNTITVSDGISMGTEGMKYSLVSREVIADSIETVVSCLGYDGVVGIGGCDKNMPGVIIGLARLNRPSLFIYGGSIRPSKQNTDYVTVCEKTGEFSKGSISEEELIAVEKVSVVGPGSCGGMYTANTMASAIEALGMSLPGSSSQDAVSDDKKNDCINTGSAIENLLEKDIKPSDIMTKEAFENAITVVIALGGSTNAVLHLIAMAHAINVDLDLDDFTRIGKRVPVVADIKPFGENYMSSLNKVGGIQPLMKMLLDADLLHGDCLTVSGKTILENLSEVDPYPDNQTIIREISNPIKSSSHLRILYGNLAPEGSVAKITGNEGLKFTGTAKVFDSEEDGNEAIQNNLINEGDVVVIRYEG

SEQ ID NO: 180647 - protein, 323 aa, Unknown
  Bacterial polypetide isolated from the Sargasso Sea
GHEGMKSSLISRDVIADSTELTVRGHCYDALVGVAGCDKSLPGLMMAMVRLNVPSVFIYGGSILPGRFNGKDVTVVDVFEGVGKYSSGKMTKHALRKLELIACPSAGACGGQFTANTMACVSEAIGLALPYSAGTPAPYEQRDKYALQSGKAVMNLLKRNIRPRQIVTRKSLENAATIVAATGGSTNAALHLPALANEIGIKFDLMDVAKIFKKTPYLADLKPGGKYVAKDMWQAGGVPMLLKTLMDGGYIHGDCMTVTGKTMRQNLKNVKFNLKQKVMRKYNNPLSPDGGVVGLKGNLAPEGANCKSSWVKKITVYWKSKMF

SEQ ID NO: 180648 - protein, 136 aa, Unknown
  Bacterial polypetide isolated from the Sargasso Sea
MKVQIVKVAGLKKLQFTGRARCFDTEEAAYKAVKNRKYKDGDIIIIRYEGPKGGPGMREMLQTTGAIYGQGKGEKVALITDGRFSGATRGFCIGHVGPEASVGGPIALLRNGDIIDLDAKKGIINVRLSKKELAKR

SEQ ID NO: 180649 - protein, 301 aa, Unknown
  Bacterial polypetide isolated from the Sargasso Sea
MGGSTNAALHLPAIANEIGIKFDLMDVARIFKKTPYLADLKPGGKYVAKDMWKAGGVPMLLKTLLDGGYIHGNCMTVTGKTMKENLKNVKFNSKQKVMRKHNNPLSPDGGVVGMKGNLAPEGAIVKVAGLKKLQFTGRARCFDTEEAAYKAVKNRKYKDGDIIIIRYEGPKGGPGMREMLQTTGAIYGQGKGEKVALITDGRFSGATRGFCIGHVGPEASVGGPIALLRNGDVIDLDAKKGTINVRLSKKELAKRRKKWKPKKINFGNGTLWKYAQTVGPAYLGAPTHPGGKNEVKTYADI

SEQ ID NO: 180650 - protein, 473 aa, Unknown
  Bacterial polypetide isolated from the Sargasso Sea
SKPFVGVVSTWNEAAPCNIALMRQAQSVKKGVKLSGGTPREFCTITVTDGIAMGHEGMKSSLVSRDVIADSTELTVRGHCYDALVGLAGCDKSLPGLMMAMVRLNVPSVFIYGGSILPGRLNGKDITVQDVIEGVGEYSSGRITKHALRKLELKACPSAGACGGQFTANTMACVSEAIGLALPYSAGTPAPYEKRDKYAVESGKMVMNLLRKKIRPRDIVTKKSLENAAAIVAATGGSTNAALHLPAIANEIGIKFDLMDVARIFRKTPYLANLKPGGLYVAKDMWKAGGIPMLLRTMLDGGYIHGECLTVTGKTMRENLKNVKFNNKQKVMRNHKNPLSKDGGVVGLKGNLSPQGAIVKIAGLKKLNFTGRARCFDTEESALKAVLNKKYKKGDVIVIRYEGPRGGPGMREMLQTTAAIYGQGMGEKVALITDGRFSGATRGFCIGHVGPEASVGGPIGLLKNGDIIHIDAK

SEQ ID NO: 180651 - protein, 619 aa, Unknown
  Bacterial polypetide isolated from the Sargasso Sea
MPTYRSKTSTAGRNMAGARSLWRATGMKDDDFSKPIIAVVNSFTQFVPGHVHLKDLGQLVAREIEAAGGVAKEFNTIAVDDGIAMGHDGMLYSLPSRDIIADSVEYMVNAHCADAMVCISNCDKITPGMLMAAMRLNIPVIFVSGGPMEAGKTRLANPVTKAIEVKKLDLVDAMVIAVDPSYSDAEVAEVERSACPTCGSCSGMFTANSMNCLTEALGLSLPGNGTVVATHADREQLFKRAGRRIVELTRQHYEQDDERVLPRSVGFKAFENAMTLDIAMGGSTNTILHLLAIAQEAGIDFTMKDIDRLSRVVPQLCKVAPNTNKYHIEDVHRAGGIMAILGELDRAGKLHTDVPTVHTPTLKDALDQWDIVRTQDDAVRTFYQAGPAGIPTQVAFSQNTRWPSLDLDRAEGCIRSYEHAFSKEGGLAVLTGNIALDGCVVKTAGVDESILVFEGTAHVTESQDEAVENILNDKVKAGDVVIVRYEGPKGGPGMQEMLYPTSYIKSKGLGKACALLTDGRFSGGTSGLSIGHCSPEAAAGGAIGLVRDGDKIRIDIPNRTIDVLVSDEELARRREEQNAKGWKPAQPRPRKVSAALKAYAKLVMSADKGAVRDLSLLDD

SEQ ID NO: 180652 - protein, 352 aa, Unknown
  Bacterial polypetide isolated from the Sargasso Sea
LFNTITVSDGISMGTEGMKYSLVSREVIADSIETVVGCLGYDGLVAIGGCDKNMPGALIGMARLNRPSLFIYGGSIKPSHENTDYVTVCEKTGEYAKGDITEDELIRIEEISVKGPGSCGGMYTANTMASAIEALGMSLPGSSSQDAISNNKKQDCKEAGRAIEHLIELDLKPSDIMTKEAFENAITVVIALGGSTNAVLHLLAMADAIGVDLHLDDFSRIGENVPVIADIKPFGNHFMSELNEQGGISPVLKMLLDKNLLHGDCLTVTGKTLAENLEDINPYNSSQAIIKSLEDPIKGSSHLRILYGNLAPEGAVAKITGQEGTIFEGKAKVFNSEEDGNQAILNKEIKAG

SEQ ID NO: 180653 - protein, 143 aa, Unknown
  Bacterial polypetide isolated from the Sargasso Sea
EEGVAAILAKNFNPGDVVVIRYEGPKGGPGMREMLKPTSAIMGLGLGDKVAFITDGRFSGGTHGFVVGHISPEAADGGLIALIKDGDTILIDAENDELILKVDQDEIDLRKKNWKNPTNPPKKGVLAKYAASVKSASLGAITD

SEQ ID NO: 180654 - protein, 256 aa, Unknown
  Bacterial polypetide isolated from the Sargasso Sea
MTDKKRKYSSIIVDGVEQAPSRAMLRAVGFEEEDFSKPQVGIASTWSMVTPCNMHIDKLAKESARGADEAGTKSIIFNTITISDGISMGTKGMRYSLVSREVIADSIETVVAGQLFDGLVAIGGCDKNMPGCMMAIARLNRPAIFVYGGSIQPGEGRTDVVSVFEAVGAHSDGKLSDIELLDIESKAIPGPGSCGGMYTANTMASAIEALGMSLPGSSAQEAISSDKEEDSYNAGKFLSTFNRERHKTQRHLTKEA

SEQ ID NO: 180655 - protein, 557 aa, Unknown
  Bacterial polypetide isolated from the Sargasso Sea
MNKLRSSAITQGVQRSPNRSMLRAVGFNDEDFNKPIIGVANGYSTITPCNMGLNKLALKAEESIKRSGGMPQMFGTITVSDGISMGTEGMKYSLVSREVIADSIETACNAQSMDGVLAIGGCDKNMPGAMIAIARMNIPSIFIYGGTIKPGKLHGEDLTVVSAFEAVGQLTSGKINEERLIQVEKNCIPGAGSCGGMFTANTMSAVIEVLGLSLPHSSTMAAEDLEKELSADKSAEILVSAIEKDIRPLDLMTKKAFENAISVIMAIGGSTNAVLHILAIANTAGIDININDFERIRQKVPVICDLKPSGKYVTVDLHKAGGIPQVMKILLNAGLIHGDCKNIEGKTISEYLQNIPDKPPTNQNVIRDIDDPLYKKGHLAILKGNLASEGSVAKISGVKNPVLTGPAKIFESEEDCLKSILNNDIKAGDVVVIRNEGPVGGPGMREMLAPTSAIVGQGLGEKVALITDGRFSGGTYGLVVGHIAPEAAVGGNIALIKQGDLITVDAVKQLIEVDLSDEELEKRKKDWVKPIQKYKRGILSKYSRIVSTSSLGAVTDL

SEQ ID NO: 180656 - protein, 379 aa, Unknown
  Bacterial polypetide isolated from the Sargasso Sea
AVTFNTITVSDGISMGTEGMKYSLVSREVIADSIETVVGCLGYDGVVGIGGCDKNMPGVIIGLARLNRPSLFIYGGSIRPSEQNTDYVTVCEKTGEFSKGSISEEELISVEKVSVVGPGSCGGMYTANTMASAIEALGMSLPGSSSQDAVSDDKKNDCINTGSAIRNLLEKDIKPSDIMTKEAFENAITVVIALGGSTNAVLHLIAMAHAINVDLDLDDFTRIGKRVPVVADIKPFGENYMSSLNEVGGIQPLMKMLLDADLLHGDCLTVSGKTISENLSEVDPYPKNQTIIREISNPIKSSSHLRILYGNLAPEGAVAKITGNEGLKFTGTAKVFDSEEEGNEAIQNNLINEGDVVVIRYEGPKGGPGMREMLKPTSA

SEQ ID NO: 180657 - protein, 137 aa, Unknown
  Bacterial polypetide isolated from the Sargasso Sea
MTDSSKPSAPINRRSANITQGKSRAPNRSMYYAMGYEEGDFVKPMVGVANGHSTITPCNSGLQKLADAAIAGIEEAGGNAQVFGTPTISDGMAMGTEGMKYSLVSREVISDCIETCVGGQWMDGVLVVGGCDKNMPG

SEQ ID NO: 180658 - protein, 213 aa, Unknown
  Bacterial polypetide isolated from the Sargasso Sea
MPIYRSKTSTAGRNMAGARSLWRATGMKDDDFSKPIIAVVNSFTQFVPGHVHLKDLGQLVAREIEAAGGVAKEFNTIAVDDGIAMGHDGMLYSLPSRDIIADSVEYMVNAHCADAMVCISNCDKITPGMLMAAMRLNIPVIFVSGGPMEAGKTRLANPVTKVMEFKKLDLVDAMVIAADTNYSDADVAEVERSACPTCGSCSGMFTANFMNCL

SEQ ID NO: 180659 - protein, 199 aa, Unknown
  Bacterial polypetide isolated from the Sargasso Sea
MGNKIIRDISNPIKKDSHLVILKGNISPDGAVAKISGKEGLVFEGPAIVFDSEEECMESILKKKIKKGHVIVIRYEGPKGGPGMREMLAPTSAIMGQGLGSDVAFITDGRFSGGTHGFVVGHVTPEAFDGGLISIIKNNDVIKIDSSKRLLEIKITKKEITARQKKWKKPSQKHLTGAIYKYSALVSSASEGAITDGKN

SEQ ID NO: 180660 - protein, 619 aa, Unknown
  Bacterial polypetide isolated from the Sargasso Sea
MPKLRSATSTEGRNMAGARALWRATGVKDNDFGKPIIAIANSFTQFVPGHVHLKDMGSLVASAIEEAGGIAKEFNTIAVDDGIAMGHGGMLYSLPSRELIADSVEYMVNAHCADALVCISNCDKITPGMLMAALRLNIPVVFVSGGPMEAGKTKLSDKLIKLDLVDAMVAAADSSVSDEDSAKIERSACPTCGSCSGMFTANSMNCLTEALGLSLPGNGSMLATHSDRRELFLEAGRRVMALTKRYYEQDDASALPRNIASFKAFENAMALDIAMGGSSNTVLHLLAAAQEADVAFTMDDIDRMSRQVPHLCKVAPSTAKYHMEDVHRAGGVMGILGELDRAGLLHTDVPHVAADAGGNLKSVLAKYDVMQTQDDNVKQFFMAGPAGIPTTKAFSQDCRWPSLDDDRREGCIRSREFAFSQEGGLAVLSGNLADNGCIVKTAGVDESNLTFIGSARVYESQDDAVAGILGGEVVAGDVVVIRYEGPKGGPGMQEMLYPTSYLKSRGLGKACALITDGRFSGGTSGLSIGHVSPEAAAGGTIALIENGDRIEIDIPKRSIKLAVSDAELAARRETMLARGPMAWKPLSRQRYVSMALKAYAMLATSADKGAVRDRSKLED

SEQ ID NO: 180661 - protein, 82 aa, Unknown
  Bacterial polypetide isolated from the Sargasso Sea
MPKLRSATTTHGRNMAGARALWRATGMTDQDFGKPIIAVVNSFTQFVPGHVHLKDLGQLVAREIEAAGGVAKEFNTIAVDDG

SEQ ID NO: 180662 - protein, 553 aa, Unknown
  Bacterial polypetide isolated from the Sargasso Sea
MAKFSDDVTQGIEKSAARAMLRAVGLNDDDFNKFQVGIVSAGNEVTPCNLTGPELSNFAKEGVNGADSAGLIFSTIAVSDGISMGHEGMRASLVSREVIADSVELVMHAERFDGMVTIAGCDKSLPGMLMASARINRPAIFLYGGSSLPGVYKGKDISIVDVFEGIGAFDKGLISEEELYEIECNACPGQGSCAGMFTANTMASVGEAIGMSLPGTASIPAEDDRLRDAAKESGLQLNYLLKNDIKPRDIMTIDAFKNAITTVLALGGSTNAVLHLLGIAHEARVNLDLSTFDDIGRQVPHIADMKPFGKYHMVDLDKIGGVPVVSKILLENKLINPDCLTVTGKTVGENLENIEIPTNQDVVYFPDNPIASEGGIAILKGSLSPKGSVVKTAGIEINEFSGPANVFESEQDAIDALFNNKINKGDVVVIRNEGPKGGPGMREMLQITAAIKGAGLGKDVLLITDGRFSGGTTGLCIGHVTPESFDHGPISICKNGDVITLNLTKRELNLEISESEVVSRLEDYVLPEPRYKSGVLNKYSKLVSGADTGAVTS

SEQ ID NO: 180663 - protein, 553 aa, Unknown
  Bacterial polypetide isolated from the Sargasso Sea
MVKFSDDVTQGVEKSAARAMLRAVGLQDEDFEKFQVGIVSAGNEVTPCNLTGPELSEHAKEGVNGDVSAGLIFSTIAVSDGISMGHEGMRASLVSREVIADSVELVMHAERFDGMVTIAGCDKSLPGMLMASARINRPAIFLYGGSSLPGEYKGKDISIVDVFEGIGALEKGLITKEELYEIECAACPGQGSCAGMFTANTMASVGEAIGMSLPGTASIQAEDQRLRKAAKETGDQLNYLLKNDLKPRDIMTREAFHNAITTVLSLGGSTNAVLHLLAIAYEAKVDLTIDVFDELARKVPHLADMKPFGKYHMVDLDKIGGVPVVSKILLENKLIDPNCMTVTGKTVGENLENIEVPKDQDVVYFPDNPISKEGGLAILRGSLSPNGSVVKVAGIEIDTFKGPANVFDSEQEALDALFNNKIKKGEVVVIRNEGPKGGPGMREMLQITAAMKGAGLGKDVLLITDGRFSGGTTGLCIGHVTPESFDNGPIAICETGDEISLDLKKRELNLNVDEKEIEKRLKKYTNPEPRYSSGVLNKYSKLVTGADRGAVTG

SEQ ID NO: 180664 - protein, 362 aa, Unknown
  Bacterial polypetide isolated from the Sargasso Sea
MKKFNKKKLPSRHTSLGPDKAPQRSFYYAMNLTEKDVAKPFVGVVSTWNEAAPCNIALMRQAQSVKKGVQLSGGTPREFCTITVTDGIAMGHEGMKSSLISRDVIADSTELTVRGHCYDALVGVAGCDKSLPGLMMAMVRLNVPSVFIYGGSILPGRLNGKDITVVDVFEGVGKYSSGKISEHALRKIELKACPTAGACGGQFTANTMACVSEAMGLALPYSAGTPAPFNRRDKYALASGKAVMNLLAKNIKPRDIVTKKALENAATIVAATGGSTNAALHLPAIANEIGIKFDLMDVAKIFKRTPYLADLKPGGKYVAKDMWKAGGVPMLLKTLMDGGYIHGNCMTVTGKTMKENLKNVKF

SEQ ID NO: 180665 - protein, 285 aa, Unknown
  Bacterial polypetide isolated from the Sargasso Sea
MPDYRSKTSTHGRNMAGARALWRATGMGDDDFGKPIIAIANSFTQFVPGHVHLKDLGQMVAREIEKSGGVAKEFSTIAVDDGIAMGHSGMLYSLPSRELIADAVEYMVNAHCADALVCLSNCDKITPGMLMATMRLNVPTIFVSGGPMEAGKGLVKGQEASLDLVDAMVLAADPSVSDEDVAKVERSACPTCGSCSGMFTANSMNCLVEALGLALPGNGSVLATHIDRKELFLRAGKIIVELTKQYYEKDDESVLPRNIANLESFENAMTLDIAMGGSTNTVLHI

SEQ ID NO: 180666 - protein, 248 aa, Unknown
  Bacterial polypetide isolated from the Sargasso Sea
MKISSRNVVEGTARAPHRAMYKAMGLTNEDLAKSMVGVCHTGNEATPCNIHLPNLAQQAKQGVLDGGSTPREFSTIAVSDGIAMGHEGMKSSLISREVIADSIELMVRAHQYDALVGIAGCDKSLPGTMMGMIRLNIPSVFVYGGTIMPGMLDGKELTVVDVYEAVGSYDAGKITAEELENIENVACPNAGSCGGMFTANTMASISEAIGLSLPGSASPPAEDERRNKIVYDTGKACSELLKTGIKPL

SEQ ID NO: 180667 - protein, 375 aa, Unknown
  Bacterial polypetide isolated from the Sargasso Sea
KKLPSRHTSLGPDKAPQRSFYYAMDLTEKDVAKPFVGVVSTWNEAAPCNINLMKQAQSVKKGVHSAGGTPREFCTITVTDGIAMGHEGMKSSLISRDVIADSTELTVRGHCYDALVGLAGCDKSLPGLMMSMVRLNVPSVFIYGGSILPGRFNGKDVTVVDVFEGVGKYTSKKMTAHALRKLELKACPSAGACGGQFTANTMACVSEAIGLALPYSAGTPAPYTERNKYALASGKAVMNLLAKNIRPRDIVTRKSLENAATIVAATGGSTNAGLHLPAIANEIGIKFDLMDVAKIFKRTPYLADLKPGGKYVAKDMWLAGGVPMLLKTLMDGGFIHGDCMTVTGKTMKENLKNVKFKKNQKVMREYNNPLSKTGG

SEQ ID NO: 180668 - protein, 345 aa, Unknown
  Bacterial polypetide isolated from the Sargasso Sea
MAKFNKKKLPSRHTSVGPDKAPQRSFYYAMNLTEKDVAKPFVGVVSTWNEAAPCNIALMRQAQSVKKGVQLSGGTPREFCTITVTDGIAMGHEGMKSSLISRDVIADSTELTVRGHCYDALVGVAGCDKSLPGLMMAMVRLNVPSVFIYGGSILPGRFNGKDVTVVDVFEGVGKYSSGKMSAHALRKLELKACPSAGACGGQFTANTMACVSEAIGLALPYSAGTPAPYTQRDSYALKSGKAVMNLLQKKIRPRDIVTKKSLENAATIVAATGGSTNAALHLPALANEAGIKFDLMDVARIFKKTPYLADLKPGGKYVAKDMWKAGGVPMLLKTLLEGGYIHGNC

SEQ ID NO: 180669 - protein, 572 aa, Unknown
  Bacterial polypetide isolated from the Sargasso Sea
MPKFNKKKLPSRHTSVGPDKAPQRSFYYAMNLTEKDVAKPFVGVVSTWNEAAPCNIALMRQAQSVKKGVHQGGGTPREFCTITVTDGIAMGHEGMKSSLISRDVIADSTELTVRGHCYDALVGVAGCDKSLPGLMMAMVRLNVPSVFIYGGSILPGRFNGKDVTVVDVFEGVGKYSSGKMTEHALRKLELVACPSAGACGGQFTANTMACVSEAIGLALPYSAGTPAPYEQRDKYALQSGKAVMNLLKRNIRPRDIVTRKSLENAATIVAATGGSTNAALHLPALANEIGIKFDLMDVAKIFKKTPYLADLKPGGKYVAKDMWKAGGVPMLLKTLMDGGYIHGDCMTVTGKTMRQNLKNVKFNLKQKVMRKYNNPLSPDGGVVGLKGNLAPEGAIVKVAGLKKLQFTGRARCFDTEEAAYKAVKNRKYKDGDIIIIRYEGPKGGPGMREMLQTTGAIYGQGKGEKVALITDGRFSGATRGFCIGHVGPEASVGGPIALLRNGDIIDLDAKKGTINVRLSKKELAKRRKKWKPKKINFGNGTLWKYAQTVGPAYLGAPTHPGGKNEVKVYADI

SEQ ID NO: 180670 - protein, 576 aa, Unknown
  Bacterial polypetide isolated from the Sargasso Sea
MEDKGSNRKSNLPSRYVSVGPKSAPHRSYYYAMGLKEHEIYQPFVGVVSTWNESAPCNITLQDQAQHVKTGVKDAGGTPREFTTITVTDGIAMGHEAMKSSLISREVIADSIELSVRGHCYDAIVGLAGCDKSLPGLMMAMVRLNVPSVFIYGGSILPGKYKGKDVTVIDVFEAVGKHAAGTISDQDLKDIEQVACPSAGSCGGQFTANTMACISEAVGLALTNSAMPPAVNTEERKAYGEKSGKAIMNLLEKNIRPRDIVTIDSLVNAARVVAATGGSTNAALHLPAIANEAGLKFTLRDVVEIYNSTPYIGDMQPGGKYVAKDLYDVGGVPVVIKSLLDGGYINGDCITVTGKTIAENHKEVIFPTNQDVVYKCDNPISENSSVVGLWGNLAPDGCISKIAGLKNLTFKGKAKCFDSEEDALTAVLKNEIKAGDAVIIRYEGPKGGPGMREMLSTTGAIYGQGLGETVALITDGRFSGGTRGFCIGHVGPEAAVGGMIGLLKDGDEIIIDAVKGEINVTLSDQEIEKRKKDWKPRKTNHNSGSIWKYSQTVGPAYEGAVTQPGAKDETHTYADI

SEQ ID NO: 180671 - protein, 434 aa, Unknown
  Bacterial polypetide isolated from the Sargasso Sea
MRKYSSIIVDGKDRSPSRSMLRAVGFKKKDFKLPQIGIASTWSMVTPCNMHIDKLANVAASNINSCGGKSVIFNTITVSDGISMGTSGMRYSLVSREVIADSIETVVGCEGFDGFLTIGGCDKNMPGCVIAMARLNRPSIFIYGGTILPGLYKGKKIDIVSVFEAVGKNANKQISNRELEDIEKKAIPGPGSCGGMYTANTMASAIEAMGLSLTNSSAQSAVSSNKKNDCKKSAAALMNCVKKDIKPRDIITKKSLENAITVVMALGGSTNAVLHLIAIAKASKVKLTLDDFDRIGKRTPVLADLKPSGKFSMSELIHIGGVAPLMKMLLNAKLLHGDCLTVTGKTLAQNLKNIKPYTKKQTIVRDFDNPIKKDGHLIILKGNLSPNGSVAKISGKEGNIFIGKAQVFNSEERALKTILNGKIKKGTVIVIRNE

SEQ ID NO: 180672 - protein, 557 aa, Unknown
  Bacterial polypetide isolated from the Sargasso Sea
MRKYSSIIVDGKDRSPSRSMLRAVGFKKKDFKLPQIGVASTWSMVTPCNMHINELANVAASNIDSCGGKSVIFNTITVSDGISMGTSGMRYSLVSREVIADSIETVVGCEGFDGFLTIGGCDKNMPGCVIAMARLNRPSIFVYGGTILPGLHKGKKIDIVSVFEAVGKNANKQISNRELEDIEKKAIPGPGSCGGMYTANTMASAIEAMGLSLTNSSAQSAVSSSKKNDCKKSAIALMNCVKKDIKPRDIITKKSLENAVTVVMALGGSTNAVLHLIAIAKASRVRLTLDDFDRIGKKTPVLADLKPSGKYSMSELINIGGVAPLMKTLLNAKLLHGDCLTVTGKTLAQNLKDIKPYPKKQTIVRGLDNPIKKDGHLIILKGNLSPNGSVAKISGKEGNIFIGKAQVFNSEERALRAILNGKIKKGTVIVIRNEGPVGGPGMREMLSPTSAVMGKGLGKDVALITDGRFSGGSHGFVVGHISPEAFVGGPLAAVKNGDLIEIDSVKKELNLKIKKTEITKRLKKYDKSRNQKLDGVLLKYAKLVSQADEGAVTTDIN

SEQ ID NO: 180673 - protein, 552 aa, Unknown
  Bacterial polypetide isolated from the Sargasso Sea
MSSRKYSKDLVDGPNQAASRSMLRGVGFTTEDFTKPLVGVASTGAKVTPCNMHLNKLSEVVEDSINSSGGKGVLFNTITVSDGISMGTQGMKYSLVSREVIADSIETVVGCLGYDGLITIGGCDKNMPGCLIGMARLNRPSIFIYGGSIKPSKENTDYVTVSEKVGEFSKGKISQEELIHFEEISVEGPGSCGGMYTANTMASAIEALGMSLPGSSSQDAVSSSKNQDCIDAGIAIMNLLEKDIKPSDIMTKEAFENAITIVIALGGSTNAVLHIIAMAHSIGVKLTLDDFTNIGKKTPVLADLKPSGSHYMSELNSSGGIQPLMKSLLEKGLLNGECITVTGKTLEDNLKDIEPYKDNKIIKSFDNPIKSDSHLRILYGNLASDGAVAKITGKEGTSFEGKAKVFNSEEDGVEAILGNQIEEGDVIVIRYEGPKGGPGMREMLKPTSAIMGLGLGDKVAFITDGRFSGGTHGFVVGHISPEAADGGLIALIEDGDQILIDAKTDKLILKVNDDEIEKRRMAWKSPIKTPEKGVLSKYAKSVKSASLGAITD

SEQ ID NO: 180674 - protein, 446 aa, Unknown
  Bacterial polypetide isolated from the Sargasso Sea
CDKSLPGLMMAMCRLNVPSVFMYGGSILPGKYKGKDVTVVDVFEAVGKFSSGNATEEELHELECVACPSAGACGGQFTANTMACVSEAIGLALPYSSGAPAPYEERDKYAYDSGKQVMNLIENNIRPRDIVTRKSLENAATIVAATGGSTNAGLHLPAIAHECGIKFDLDDVVEIFKRTPYLADLKPGGQYVAKDVYEAGGVPIIIKTLYEGGFIHGDCLTVTGKTIAENLKSVEFNKNQKVIRPYDEPLSITGGVVGLKGNLAPEGAIVKVAGMENLKFKGHAKCFDCEEDAFECVKNENYKEGDVFVIRYEGPRGGPGMREMLATTAAIYGQGMGDKVALITDGRFSGATRGFCVGHVSPEAAVCGPIALVEDGDEIILDAENGKISINVPLETLEKRKKSWKERKTDFNSGTLWKYSQTVGSAVSGAVTHPGAEKETHVYSDI

SEQ ID NO: 180675 - protein, 388 aa, Unknown
  Bacterial polypetide isolated from the Sargasso Sea
VGEFSKGSINEDELIHYEKISVDGPGSCGGMYTANTMASAIEALGMSLPGSSSQDATSKSKNADCVNAGSAIINLLDKDIKPSDIMTREAFENAITVVIALGGSTNAVLHLLAMAHSIGVELCLDDFTTIGKKTPVLADLKPFGKHYMSELNANGGIQPLMKTLLDKGLLHGQCMTVTGNTLEENLKDIKPYETSEIIKDFNNPIKKDSHLRILYGNLAKDGAVAKITGKEGTSFEGKAKVFNSEEDGVSAILSNQINDGDVIVIRYEGPKGGPGMREMLKPTSAIMGLGLGDKIGFITDGRFSGGTHGFVVGHVSPEAAEGGLIALIEDGDTILIDAESDQLVLKVDDDEIKRRQSIWKNPNRKPKKGVLAKYAESVKSASLGAITD

SEQ ID NO: 180676 - protein, 148 aa, Unknown
  Bacterial polypetide isolated from the Sargasso Sea
CFDSEESAMRSILNGKVKKGHVVIIRFEGPKGGPGMREMLGPTSAIMGAGLGKDVALITDGRFSGGSHGFVIGHVSPEAAEGGEIAIVRNGDSITIDAKSKKISLHLTAKEIKHRKSKLPAHKSKYKKGVLAKYAKSVSSASEGAITD

SEQ ID NO: 180677 - protein, 278 aa, Unknown
  Bacterial polypetide isolated from the Sargasso Sea
EAGINLTYDDFERIRKKTPHLADMKPGGNYVMNSLDKIGGIPLVMKKLLDKNLIHGDSLTVTGKTIKENLEELAIVEVPDQQIIKPVEQPIHEVGTAVILKGTLAPEGGVIKTAGVEMTEFTGTAKVFDREEYAFEAVSKGEIDEGDVVVIRYEGPKGGPGMREMLSTTAALVGQGLGKKVAMVTDGRFSGGTRGFMIGHVAPEAFVGGPIALVKDGDKISIKLEDNSLNLHVSEEELSKRKEQWRRPAPNYSTGALAKFASLVGSAANGAITKPAEY

SEQ ID NO: 180678 - protein, 598 aa, Unknown
  Bacterial polypetide isolated from the Sargasso Sea
ALWRATGMGDDDFGKPIIAIANSFTQFVPGHVHLKDLGQMVAREIEKSGGVAKEFSTIAVDDGIAMGHSGMLYSLPSRELIADAVEYMANAHCADALVCLSNCDKITPGMLMATMRLNIPTIFVSGGPMEAGKGLIKGQEASLDLIDAMVLAGDPSVSDEEVEKIERSACPTCGSCSGMFTANSMNCLVEALGLALPGNGSVLATHIDRKELFLKAGRIIVELTKQYYEKDDESVLPRNIANLKSFENAMTLDIAMGGSTNTVLHILAAAKEGELDFGMDDIDRLSRRVPNLCKVAPSSNFHMEDVHRAGGIMAILGELEKAKLLNSESKTVHTETMLDAINEWDINRKPSEEVKEFYSAAPGMIPTTQPFSQNKRYPELDLDRENGCIRGSDNAHSQDGGLAVLKGNIATDGCIVKTAGVDEKILTFSGPAKVFESQDDAVDAILGDEILAGDVVVIRYEGPKGGPGMQEMLYPTSYLKSKGLGEKCALITDGRFSGGTSGLSIGHISPEAASKGYIALIKDGDIINIDIPNRSINVDLLDEELELRRKEMSSFGKKAWKPRNRDRTVSLALQAYALLASSASDGAVRQIEGIGDDE

SEQ ID NO: 180679 - protein, 192 aa, Unknown
  Bacterial polypetide isolated from the Sargasso Sea
GNIASDGCIVKTAGVDEKILTFSGPAKVFESQDDAVEAILGDQIVAGDVVVIRYEGPKGGPGMQEMLYPTSYLKAKGLGEKCALITDGRFSGGTSGLSIGHISPEAASKGYIALIKDGDIINIDIPKRSIDVDLLDEELEIRKKEMASLGKKAWKPHKRNRKVSLALQAYALLASSASDGAVRQIEGIIDDE

SEQ ID NO: 180680 - protein, 429 aa, Unknown
  Bacterial polypetide isolated from the Sargasso Sea
MQLTNTKVASQQVSFLDAVRIGLGEQQGLFFPTQWPSLDIDTLLELPFVERSAKVLQALIGDELPAEQIHQMVSNAFQFPAPLAQVTDDLACLELFHGPTLAFKDFGGRFMAQALIQAQKQQNVSKTTIVTATSGDTGAAVAHAFYQQAGVDVVILFPKGKISPLQEKLFTTLGHNIHTLAVEADFDQCQALVKEVFNDRDLVKQLNINSANSINISRLFAQICYYFEAVAQVPKDKRDQIVIAVPSGNFGNLTAGLIAKVLGLPIKRMIAATNLNDTVPRYWKEGQWAPNKTVATLSNAMDVSAPNNWPRVEALLAQGKICRDDLEAVMVDEEDTQVSMRQLAHLGYVSEPHAAIAYKALKRSLQDGEFGIFLGTAHPAKFKEQVENILGSPIALPPELAAVASEASLSADMAPDFVQLRQFLLTLDK

SEQ ID NO: 180681 - protein, 424 aa, Unknown
  Bacterial polypetide isolated from the Sargasso Sea
MNLYNIKDRSEQVSFAQAVRQGLGREQGLFFPERLEPLADVDALLDLPLVERSARILSHLLGDEVAAPQVHELVKAAFTFPAPLVKLKDGTYALELFHGPTLAFKDFGGRFMAQCLAAFRTNDKITILTATSGDTGAAVAHAFYGLEGIEVVILYPKGKISPLQEALFCTLGGNIRTIAIDGDFDACQALVKQSFDDEELKKAIGLNSANSINISRLLAQVCYYFEAVAQLPKADRAKAVISVPSGNFGNLTAGLIAKALGLPVKRFIAATNANDTVPRYLKTGQWEPHQTVATLSNAMDVSRPNNWPRVEELCRRNGWALETLGSGMRSDAQTRDALKRLHELDYLCEPHGAIAWDLLGEQLAEDEVGVFLCTAHPAKFKESVDEILGLDVPLPGPLAKHAVLPLLSHNLPAEFAPLRAFLLG

SEQ ID NO: 180682 - protein, 244 aa, Unknown
  Bacterial polypetide isolated from the Sargasso Sea
VAATYQRGVPFIQVPTTLLSQVDSSVGGKTAVNHPLGKNMIGAFYQPVYVAIDTDTLATLPAREFAAGMAEVIKYGIIYDAPFFEWLESNVDALTSLDTEILTQAISRCCEIKADVVAKDEREGGLRAILNLGHTFGHAIEAEQGYGNWLHGEAVAAGTIIACKAAEALTWFEASETRRVSSLFEAFALPVAGPNSMTKDDYVKHMKRDKKVEAGSIRFVLPQGIGKAVVTKDVTDAILTDILS

SEQ ID NO: 180683 - protein, 280 aa, Unknown
  Bacterial polypetide isolated from the Sargasso Sea
MKPIKLKVNTKSQNYNIIIGNDLVSRVFNLAKNNSLNFKQCLLIIDKNISKKIISKIKKSLIKKKVYVYFFNASEKNKNQNNVNKILDILLKKNFSRDDCLISIGGGITGDVCGFAASLFKRGLKFINVPTTLLSQVDSSIGGKTGVNTKYGKNLIGNFYQPNLVISDIQFLKTLPKREIICGYGEILKHSLIANKNFYNFLNKNSNKILKLSTPFIEKSIYESCKIKKNVVEKDEKEKGLRKILNFGHTFAHAYEASLGYSKKLNHGEAVILGIKQHKI

SEQ ID NO: 180684 - protein, 297 aa, Unknown
  Bacterial polypetide isolated from the Sargasso Sea
MYYLKKSLSDTAFSVKLIPVKSRDKNKNLKTLTFIINEILKFNLERNSLIITFGGGVVGDIGGFVSSILLRGINYVQIPTTLLAQVDSSIGGKTGINTSHGKNLVGSFYQPKCVIVDTQILRTLPKRELYAGLAEVIKYSLILDKNFFNYLKNNYDKILTLKEPFIEYAIHKSCKIKSEIVSQDEKEHGIRALLNLGHTFAHAFESELRYKPDLLHGEAVAIGICMAFRLSRNLDLCKFTEVEKVENLISTYKLPTSINQIKTISFKRKNVFKKLFSDKKVKDGKLTFILCTGMEKR

SEQ ID NO: 180685 - protein, 280 aa, Unknown
  Bacterial polypetide isolated from the Sargasso Sea
LKNINIILDKLFKFNFNRYDCIISLGGGITGDVSGFAASIYKRGLKFINIPTTLLAQVDSSIGGKTGVNNIYGKNLIGSFMQPDLVISDINFLNSLPKRELICGYGEILKHSIIYNKNTFYFLKKNFNEILNLKSPFIEKAIADSCKIKKKIVEKDEKEKNLRKILNLGHTFAHAYEASLSYSKKLNHGEAVILGIVSAAKFSFQNNFLDKSDYNEIINHTNNLRIPISLKYYFKKKHINSIVKYMKTDKKNSSSKINIILVKKIGKIILNSNFSELKIK

SEQ ID NO: 180686 - protein, 252 aa, Unknown
  Bacterial polypetide isolated from the Sargasso Sea
VIGDIVGFAAATYMRGLPFIQIPTSLLAQVDSSVGGKTGINHPEGKNLVGSFYQPIAVVSDIDTLKTLPNREYKCGLAEIIKYGAIYDSDFFDWLEVNISLLLKRDHDALIYAISRSCEIKADIVSQDELETGKRAILNFGHTFAHAIENHIGYGTIFHGEAVAIGMLMASKISSISQSDQERLKNLIINSGLPHNLEEFDKNEMLEIMLLDKKIKNKKLRLILLNRLGEAYIEDNIHNDHIMDAFEKFHQD

SEQ ID NO: 180687 - protein, 245 aa, Unknown
  Bacterial polypetide isolated from the Sargasso Sea
MKTKIIKVKTKSKNYEVHIGTNIISKLRNIIKKNKLSFSKCLIVIDSKIPKKFRTILLGNLKHQEIYTLNFSANEKNKSSLSIDKIHNVLFKNNFYREDCIISFGGGITGDVVGYAASTFKRGIKFINIPSTLLAQVDSSIGGKTGINNKFGKNLVGSFYQPDLVISDINLLRTLPKREIICGYAEIFKSSLIDSKKKFIFLDKNFNKILNLKGNFIINAILNSCLLKKKIIEKDEKEKNLRKSL

SEQ ID NO: 180688 - protein, 331 aa, Unknown
  Bacterial polypetide isolated from the Sargasso Sea
VTKTEKYPIIIGSKLTSNISKIFKLNSIDFNKCLIVVDKNVPKKFVSNIKRSLKNKSIFVLFFNASEKNKNIDSVNKIIEILLNKNFSRNDVLISLGGGITGDVSGFAASLLKRGLKFINIPTTLLAQVDSSIGGKTGVNSKYGKNLIGSFYQPSLVLSDIQFLKSLSKRELICGYGEILKHSLIDNKKLFNFLNKNLKEILNLSSPFIEKAIYESCKIKKKIVERDEKEKALRKVLNFGHTFGHAYEASLGYSHKLNHGEAVILGMKTALNFSLKENMLSKSRYNLIINHIDNSGLPSSIKKYFSIKDLNKILSFMIKDKKNNSEKINLV

SEQ ID NO: 180689 - protein, 319 aa, Unknown
  Bacterial polypetide isolated from the Sargasso Sea
MRTLPVELPWSEYKIEIGTGNLQDSLLSAVRQFDPERVVTVTNSTLELFYPAQINKILEPEGYQNDTCILPDGEAYKNLETLQRIYDFLMEKKANRGTVMVAFGGGVIGDMAGFAAATFMRGIKMIQVPTTLLAQVDSSVGGKTAVNHPLGKNTIGAFKQPNHVSIDLEFLKTLPSRELQAGYFELAKHGLTHDRELLDFLQEGKLEPLDLDFLEEAVYRSCRVKARIVEQDETEAGLRATLNFGHTLGHLIETHCGYGTYLHGEAVGTGMFFAAFLSKQEQLLEQSSWETIREFLEPKLRSVTLPKLDYDLFSSLLLH

SEQ ID NO: 180690 - protein, 236 aa, Unknown
  Bacterial polypetide isolated from the Sargasso Sea
TLLAQVDSSIGGKTGFNTKFGKNLIGTFYQPSIVISDIETLNSINKREIICGYAEILKHALIQSKNFYNYLVNNQKKILELNSQKILILIYKSCLIKKKIVQKDTAEKNIRKILNFGHTFGHAYESTLNFSKKLNHGEAVLLGIISAIKLSNKLNILSKKNYENITNHFKKLSLPNDIKKYFKNKDINKIVYFMKNDKKNTDRYINLVLLSNIGKTIYYKINKKSLKKFFNDQLNK

SEQ ID NO: 180691 - protein, 174 aa, Unknown
  Bacterial polypetide isolated from the Sargasso Sea
MRTLPVELPGSEYKIEIGAGNLRDSLLSAIRQFDPERVVTVTNSTLEHFYPAQIKKLLEPEGYQNDTCILPDGEEYKNLETLQRIYDFLMEKKANRGTVMVAFGGGVIGDMAGFAAATFMRGIKMIQVPTTLLAQVDSSVGGKTAVNHPLGKNTIGAFKQPNHVSIDLEFLKTP

SEQ ID NO: 180692 - protein, 202 aa, Unknown
  Bacterial polypetide isolated from the Sargasso Sea
MKVQEIKFQNLKKNYSILIGNNILTKLSNKIKILCPKTKNIAIFYDKKVPNNFKKVLIKNLKRYNLIFFAFNANEKLKSLKVANYYLEKLLSKNLNRNDLIIGVGGGITGDVVGFIASIFKRGINFINIPTTLLAQVDSAIGGKTGVNTSYGKNLIGSFYQPKLVLSDTSFLKSLSKKEMICGYAEILKHAIIKDKKFFNWL

SEQ ID NO: 180693 - protein, 299 aa, Unknown
  Bacterial polypetide isolated from the Sargasso Sea
VSSPTLRRIAVALERNPYEVVIGAGGLSRLGDELLKAGIQPGRRILVVSNPDVAAPYGEGCLQSLRQQGFHADLLVIDAGEERKTPATVAAIHDYAFEQRLERSSLMLALGGGVVGDMTGFAAATWLRGIRVIQVPTTLLAMVDAAIGGKTGVNHPGGKNLIGAFHQPSLVLIDPETLNTLPEREFRAGMAEVIKYGILGDPELFQCLEEGPEPNSAAGLGNSRLETILELSAAAKARVVAADEREGGVRAVLNYGHTFGHVVETLCGYGTWLHGEAVAIGMVAVGQLALNRGSWTADD

SEQ ID NO: 180694 - protein, 276 aa, Unknown
  Bacterial polypetide isolated from the Sargasso Sea
MKIINIKIKTKTKEYFVVVGSNIIKNIKTVLSDKKITFQKCLIVIDKNIPRKFQSTLIKKLSLKKLLVYKFNANEKNKNDTNVNKIHTILFENRFNREDCVISFGGGIVGDVVGFASSTYKRGIKFINIPSTLLAQVDSSIGGKTGINNKFGKNLIGSFYQPELVISDTNLLSSLPQREIICGYAEIFKSSLIDNYKSFKFLDKNINEILKLKSPFIEKSIINSCKLKKKIVEKDEKEKNLRKVLNLGHTFAHAYESTLNFSKKLNHGEAVILGIK

SEQ ID NO: 180695 - protein, 160 aa, Unknown
  Bacterial polypetide isolated from the Sargasso Sea
MKIDRINVKNKDMNYPIFIGGGALNLLSKQLKVLCPGSKKVALILDKNVPYFYKKKIRKLVKNYQIFSREFTPNENLKSIKYANTLIENLIEKKFNRNDTLIAVGGGIIGDFTGFVASIFKRGINFVNIPTTLLAQVDSSIGGKTGVNSKYGKNLIGSFY

SEQ ID NO: 180696 - protein, 269 aa, Unknown
  Bacterial polypetide isolated from the Sargasso Sea
MKKIIKINTKSHNYKIIIEKNSILKEVLKEEKKQKNFIIIDKKLFSLITILKKNKNFNLITIQGGEKIKSLKYFEDIANKLLKLKIDRKSCIIAIGGGTIGDLSGFIASTVLRGVKFILVPTTLLSQVDSSIGGKNGLNTSYGKNLVGTFYQPNKVIIDHSILNFLSKKQIISGYSEILKHAIIKNKDFYFWLKKNYQKIIKLESKFISIAIIESIKIKTHFVKIDENEILINDNSRAMLNFGHTFGHALESMNNYKKNLSHGEAISIG

SEQ ID NO: 180697 - protein, 254 aa, Unknown
  Bacterial polypetide isolated from the Sargasso Sea
NYSIYFGNDFIKSFPLKKISNSKEIFFIFDSKMPDLSIRKVKSFITKSMPSKFDSFKFIANEKNKSIETSQKIIEKLIDLKFSRDSLIISFGGGITTDLAGFVASVYLRGIEVMHIPTTLLAQVDASVGGKTGVNSKKFKNMIGAFKQPAAVLIDTYFLKSLSKRHLAAGYSEIIKHALIEDKNLLSKLDNFDQSIKKKGNITELSNLIRISTKIKANIVEQDEREKSVRAHLNFGHTFAHAIESVQSFKGLNH

SEQ ID NO: 180698 - protein, 251 aa, Unknown
  Bacterial polypetide isolated from the Sargasso Sea
MKKIKLNVKTKSKEYPIIIGKNIILQTSNILKLNNFNFEKILIVVDTKIPKRKIEILKKKFTQKKIVVHYFKANEKNKNLKSINLILEKLFKFNFNRNDCIISFGGGITGDVSGFAASIFKRGLKFINIPTTLLAQVDSSIGGKTGVNNKYGKNLIGSFMQPDLVLSDISMLNSLPKRELNCGYGEILKHSIISNIKIFNYLKKNYPKIIKLKSPFIERAISDSCKIKRNIVQQDEKEKNKRKILNLGHTF

SEQ ID NO: 180699 - protein, 268 aa, Unknown
  Bacterial polypetide isolated from the Sargasso Sea
MKNQEIKFKDKNHKYSIFIGENNIRRILANEIKSLCPKTKKVAIIIDRNVPNKFKRILVNSLKKYEVFFLSFNASEKSKSLKTVNYYLNKLFLKKLNRNDLIISVGGGITGDVVGFISSVYKRGVNLINIPTTLLAQVDSSIGGKTGVNSPFGKNLIGSFYQPKLVLIDTNFLETLSRKQMICGYAEILKHSLIKDKSFFNWIKINTKDILSKKKKQVAHAIKKSCEIKMYFVKKDVNERGLRMTLNFGHTFAHAIEIKNRLSKKISH

SEQ ID NO: 180700 - protein, 271 aa, Unknown
  Bacterial polypetide isolated from the Sargasso Sea
MIKKVLVGDEKYKVLIGKNKIFKDYLPSAVSKNNKIFIITDKNIPAEYIDLVRKSIPSNKVIDLLKIKPGEESKSFTNFQMILNKLAKGKYDRSDCIVSIGGGVVGDLSGFVAASFMRGIDYIQIPTSLLAQVDSSVGGKTAINIESGKNLVGAFKNPKLVLISSALLKSLPEREFKSGIAEIIKYGLIYNKKIFNIFDKQHKQILKRNQKIIEELIHESVKTKAKIVTVDERELGIRAILNFGHTYGHAIEAINNYKNILHGEAVAMGMR

SEQ ID NO: 180701 - protein, 221 aa, Unknown
  Bacterial polypetide isolated from the Sargasso Sea
MKVNKIKINTKTKKYSIIIGKGLINKVDKILNNNNLFFEKCLIVNDSNIPNNFKKLLNKKLKSKKIFKIDLIASERNKNYKTIEKIHKILFKNRFNREDCVISFGGGIIGDVVGFASSTFKRGIKFINIPSTLLSQVDSSIGGKTGINNNFGKNLIGSFYQPDLVISDIDILNSLPKREIICGYAEVLKSSIIENFKTFNYLDKNFEKILKLESPFIEKSI

SEQ ID NO: 180702 - protein, 159 aa, Unknown
  Bacterial polypetide isolated from the Sargasso Sea
MNINKIDFKGFNKNYSILIGKNISSILSAKIRTLCPKTRKIALIFDKGVPNFYKRKIIKNLKKYNVLVYNFNANEKNKSIKSVTLLLNKLLAKNFNRSDLIIGIGGGITIDFSGFVASIFKRNINYISMPTTLLAQVDAAIGGKTGVNSKFGKNLIGSF

SEQ ID NO: 180703 - protein, 264 aa, Unknown
  Bacterial polypetide isolated from the Sargasso Sea
RRRDTGDISGFAASIFKRGIKYINIPTTLLAQVDSSIGGKTGVNTKVGKNLLGSFYPPSLVITDINFLKTLPRREIICGYAEILKHALILDKKFFLFLNKNAKKILNINNLLIQKSIYKSCIIKKKIVEKDEDEKNLRKILNFGHTFAHAYEGTMKFSKKLNHGEAVLLGINSAITFSVNKKLLIEKDFFLIKNHLKNLNLPNKISKYFKKKDVSNILNFMQKDKKNNNNKINLVLLKKIGSTINNYYTENKILRKFLLSELNY

SEQ ID NO: 180704 - protein, 232 aa, Unknown
  Bacterial polypetide isolated from the Sargasso Sea
MIVPIGGKTGINSLQGKNLIGTFYQPSYILSDISFLKTLKKREYLSGYAEAVKKALIKDYNFFKWLENKDYNELREDKNIIDIIYKSCEIKINLVQRDEKEQGERALLNLGHTFGHALETANHYSRNLLHGEAVIIGCCLALQLSRKFNLINSNQCERIINHFKRLNYYTEIKQTNINNFTAQKLLNIMYQDKKVVNKKLNFILLKRIGEGLIQKDVDADIVKKILTKSIKG

SEQ ID NO: 180705 - protein, 247 aa, Unknown
  Bacterial polypetide isolated from the Sargasso Sea
GFAAATWLRGIEYIQIPTTLLSMVDSSVGGKTGVNHPKGKNLIGAFNQPKAVFIDPETLKSLPKREFNAGMAEVIKYGVIRDKELFEYLEIEKHKNELINLKNDYLIKIINSSIKTKSHIVSQDEHENGVRAILNYGHSFGHVIENLCGYGKFLHGEAISIGMNIAGKIAIEKGLWSQEELERQQILLESYDLPTEIPKINKEDVLTILMGDKKVRDGKMRFILPKEIGAVDIYDDVEDSLFLKFFS

SEQ ID NO: 180706 - protein, 291 aa, Unknown
  Bacterial polypetide isolated from the Sargasso Sea
IFVGTDLTSNCEEILKNFIENRKVILIHDNFFCLNKNKNENFIAFVKTINKLSTSLNLINLPGGDKTKNISQLNRILEKSLLFEIDRDSLIIAFGGGVIGDIAGFAASILLRGINYIQIPTTLLSQVDSSVGGKTGINSSKGKNLIGSFHQPLAVIADIEILRSLPKREFLAGLVEIIKYGLIKDIKFFDYLEENYKEILNFDKSKLKDIIKRSCEIKSEIIKSDEKEIGQRALLNLGHTFGHAIESFGKYDGTIIHGEAVSIGICLAFKLSNKMGFCSQIETQRVINLFK

SEQ ID NO: 180707 - protein, 250 aa, Unknown
  Bacterial polypetide isolated from the Sargasso Sea
MKILPINTKSKKYNIYIGNNIITKFNTIIKKEKINFKKSLLIVDKNIPKKFIKKINSNIKCEKKLIFFFNSSEKNKNLSYVNSILEILFKNYFTRNDIIICAGGGISGDVAGFVASIYKRGLKFINIPSTLLSQVDSSIGGKTGVNNKYGKNLIGSFHQPDLVISDTQILKSLPKREIMCGYAEILKHSLIANKNMFLFLDKNLKNILELKKKFIEKAILESCKIKKQIVEKDEKEISLRKSLNLGHTFG

SEQ ID NO: 180708 - protein, 228 aa, Unknown
  Bacterial polypetide isolated from the Sargasso Sea
VVSNPDVAAPYGEECLQSLRLQGFQADLLVIDAGEDRKTPATVAAIHDAAFGQRLERSSLMLALGGGVVGDMTGFAAATWLRGIRVIQVPTTLLAMVDAAIGGKTGVNHPGGKNLIGAFHQPSLVLIDPETLNTLPEREFRAGMAEVIKYGILGDPELFQCLEEGPEPNSAAGLGNSRLETILERSAAAKARVVAADEREGGLRAVLNYGHTFGHVVETLCGYGTWLH

SEQ ID NO: 180709 - protein, 252 aa, Unknown
  Bacterial polypetide isolated from the Sargasso Sea
QNFFLKKIKNSLKNKKKFFFIFKSNEINKNQKSVNKILEVLLKNNFNRNDCLISIGGGITGDVAGFAASIFKRGIKFVNIPTTLLAQVDSSIGGKVGINDKKFGKNLIGSFYQPSLVISDTDFLKTLPKREIICGYAEILKHSLIANKKFFNFLDNNIGKIINLKSPVIEKTIYKSCLIKKKFVEKDEKEKGLRKVLNLGHTFAHAYESSFNYSRNLNHGEAVLLGIMTAIKFSFDIKLIKKKDFDLIKKHL

SEQ ID NO: 180710 - protein, 247 aa, Unknown
  Bacterial polypetide isolated from the Sargasso Sea
GFAAATWLRGIEYIQIPTTLLSMVDSSVGGKTGVNHPKGKNLIGAFNQPKAVFIDPETLKSLPKREFNAGMAEVIKYGVIRDKELFEYLEIEKNKNELINLKNEYLIKIINSSIKTKSYIVSQDEHENGLRAILNYGHSFGHVIENLCGYGKFLHGEAISIGMNIAGKIAIEKGLWSQEELERQQILLESYDLPTEIPKINKEEVLTILMGDKKVRDGKMRFILPKEIGAVDIYDDVEDSLFLKFFS

SEQ ID NO: 180711 - protein, 264 aa, Unknown
  Bacterial polypetide isolated from the Sargasso Sea
MKQIKLNIKTKTQKYPIIIGSNLTPIISNIIKKNLINFRQCLIIVDKNIPKKFIFNIKKSLKQKKVYIYFFKANEINKNINYVNKILEILLKNNFSRDDCVISVGGGITGDVSGFVASLFKRGLKFINLPTTLLSQVDSSIGGKTGVNSKYGKNLIGSFYQPNLVITDIQFLKSLSKREIICGYGEILKHSLISNKKFFVFLNKNVKKVLNLNTPFIEKAIYESCKIKKAVVEKDEKEKGLRKILNFGHTFAHAYEASLGYNQV

SEQ ID NO: 180712 - protein, 263 aa, Unknown
  Bacterial polypetide isolated from the Sargasso Sea
MKPIKLKINTNTESYRIIIGTKLLTQFSNLINHNLIKFEKCLLVIDKNIPKKKIAQIKRALKNKKIFTQFIKAKEKNKNQKNLDLIIKTLLKKNFSRQDCLISIGGGITGDVSGFAASIYKRGLQFINIPTTLLSQVDSSIGGKTGINTSYGKNLIGTFYQPKLVISDIDFLKSLPRREIICGYAEILKHSLISNKKLYKFLEKNIFKILNLQSPFIEKAIYESCKIKKMVVEKDEKEKNLRKVLNFEHTFAHAYEASLGYSR

SEQ ID NO: 180713 - protein, 272 aa, Unknown
  Bacterial polypetide isolated from the Sargasso Sea
ISNKSVANHYLDRLISSLSGFDFSVYLIPEGEQFKNLSTVEEIISVMIKKGANRTSTILALGGGVVGDTAGFVAAIFQRGIPFLQIPTTLLAQVDSSVGGKTAVNHEDGKNMIGAFYQPKTVIIDTDTLNTLPKREVSTGLAEIIKHGILADRSYFDWIEKNISKLLRLDSDTLEYVVAGSCRIKAEIVSEDELETGKRALLNLGHTFGHAIETATGYSEWLHGEAVGAGLVMAADLSFRLGMCALDDAKRIKALVKDAGLPFAPPASMKKR

SEQ ID NO: 180714 - protein, 265 aa, Unknown
  Bacterial polypetide isolated from the Sargasso Sea
NNFSRNDCVISVGGGITGDVSGFAASLFKRGLKFINLPTTLLSQVDSSIGGKTGVNSKYGKNLIGSFYQPNLVITDIQFLNSLSKREIICGYGEILKHALIANKNFFIFLNKNVKEVLNLSSPFIEKAIYESCKIKKVIVEKDEKEKNLRKTLNFGHTFAHAYEASLGYHKKLNHGEAVILGMITALNFSTKNSFLKKKEYELIINHIHKTRLPFSLKKFFSLKDLNKISFFMTKDKKNNSSKINLILLKKIGSPVLNKEYTKKN

SEQ ID NO: 180715 - protein, 249 aa, Unknown
  Bacterial polypetide isolated from the Sargasso Sea
MKLKIKTKVNSYSVIIGKNLCSKINKTILNERIYSQKFLLVYDSKVPTKMIKSISSRFNKKKIEKKKIVFNEKSKNFKTVSSIVKILEKKNFSRNDCLISVGGGICGDVCGFASSIFKRGLNFINVPTTLLSQVDSAIGGKTGINSLSGKNMIGSFYQPSLVISDINFLKSLPKKEMICGYAEILKHSLISNKIFFKFLKKNFIKILNHNHKFLERAIYKSCLIKKQVVEKDEKEKNIRRVLNLGHTSL

SEQ ID NO: 180716 - protein, 295 aa, Unknown
  Bacterial polypetide isolated from the Sargasso Sea
RKNVTMKTVTVPLENYSYDILIGENLISNIPSYLENLLSRKFIAIVTDKNVESLHLSKFVKVLSEAGIETNILTINPGEGSKSWKTLQMTVDWMLANKIERNDIVVALGGGVVGDLVGFAAAILRRGIRYIQCPTSLLAQVDSSVGGKTGINTIHGKNLVGAFYQPTQVISDISTLNTIKERDFLAGYGEVVKYGLLGDYKFYCWLETNFAKIKERDTKTLIEAVAHSCEMKAEIVINDEKEHGNRALLNLGHTFCHALEAATGYSDRMLHGEGVAIGCILAFDLSAKIGVNITR

SEQ ID NO: 180717 - protein, 232 aa, Unknown
  Bacterial polypetide isolated from the Sargasso Sea
MKIKKLNIKTKSQNYNIIIGSNLISEIFQIIKNDSIKFHKCLIIFDKNIPKKIIDKIKYSFREKKMYIHFISANEKNKNYKTANIILNILLKNNFSRSDCLISVGGGITGDIVGFTASLFKRGIQFINVPTTLLAQVDSSIGGKTGINTIYGKNLIGTFFQPKLVISDSIFLNSLPRREIICGYGEILKHSLISNKKFFNFLNKNILRILNLKSPFLEKAIYESCKIKKLVV

SEQ ID NO: 180718 - protein, 230 aa, Unknown
  Bacterial polypetide isolated from the Sargasso Sea
YREDCIISFGGGITGDVVGYAASTFKRGIKFINMPSTLLAQVDSSIGGKTGINNKFGKNLVGSFYQPDLVISDINLLRTLPKREIICGYAEILKSSLIDSKKNFVFLDKNFNRILNLKGNFIINAILNSCLLKKKIIEKDEKEKNLRKSLNLGHTFAHAYEATLGYSKKLNHGEAVIFGLMNAVNFSKEKKIISNSNSELINNHIKKIEIKNKYRNLFNKRKITSILNFM

SEQ ID NO: 180719 - protein, 197 aa, Unknown
  Bacterial polypetide isolated from the Sargasso Sea
IDTDSLRTLPEREVSAGLAEIVKYGLIRDADFLTWLEQNMAALRALDAALVTYAIERSCAIKAEVVAADEREGGVRAILNLGHTFGHAIEAHQGYGSWLHGEAVGAGMAMALDLSCRLGWITDAERDRGVALISAAGLPTVPPKGMVAADFERLMSVDKKVLDGQLRLVLLRGMGEAVVTAEFTADALRQCLVGFEQ

SEQ ID NO: 180720 - protein, 276 aa, Unknown
  Bacterial polypetide isolated from the Sargasso Sea
MNTNKISIKTSTKNYPIVIGRDLIGKIDKILKANSLKFDKCLIVTDKNIPNKFKRLLYKKLNTNKLFKIEITASEKNKNYRTVEKIHTVLFENRFNREDCVISFGGGIIGDIVGFASSTFKRGMKFVNIPSTLLSQVDSSIGGKTGVNNKFGKNLIGSFYQPDLVISDMNILASLPEREIICGYAEILKSSIIDNFNNFLYLDQNLKKILKLKSPFIERSIIKSCNLKKKVVEKDENEKNYRKVLNLGHTFAHSYESTLGFSKKLNHGEAVILGIK

SEQ ID NO: 180721 - protein, 171 aa, Unknown
  Bacterial polypetide isolated from the Sargasso Sea
MKKINLKTSNTNVPIYVGNGILNNFEISKYVFNKDVLIITNTKVGKLYLNKTKRLFIEYKVNSLVLPDGEKYKNNETLKKIYDFLVKNHYDRSLTIVALGGGVIGDLVAFAADTFMRGVSLIHIPTTLLSQVDSSIGGKCGINHKLGKNLIGSFKHPNLVLIDTSVLKSLP

SEQ ID NO: 180722 - protein, 252 aa, Unknown
  Bacterial polypetide isolated from the Sargasso Sea
SILKRGINFINLPSTLLAQVDSSIGGKTGINSNRGKNLIGSFYQPKIVISELGFLKSLSRRNLVCGFAEILKHSLIHDNKFFNSLIKNTESILEKFDFKIIKDVITKSCKIKLYFVNQDEKEKGQRMILNFGHTFAHGIEAANGYSRKINHGEAVLMGMMLATRLSFRKRICSYNTLDKIETIYETNNLPKNLISFFSKKGLNKVVSFMEIDKKNYDNKINLILLKKIGKTTNPGDFRISPKEMRNVLKKIS

SEQ ID NO: 180723 - protein, 219 aa, Unknown
  Bacterial polypetide isolated from the Sargasso Sea
VLFENRFNREDCVISFGGGIIGDIVGFASSTFKRGMKFVNIPTTLLAHVDSSIGGKTGVNNKFGKNLIGSFYHPDLVISDMNILASLPEREIICGYAEILKSSIIDNFNNFLYLDKNLKKILKLKSPFIERSIIKSCNLKKRVVEKDEKEKNYRKVLNLGHTFAHVYESTLGFSKKLNHGEAVILGIKNAVEFSFKRKILSKQKFNIILNHINRIRMKP

SEQ ID NO: 180724 - protein, 259 aa, Unknown
  Bacterial polypetide isolated from the Sargasso Sea
MKLKVKTNISNYSVIIGNNLCPKINNIILNEGIYSQKFLLIYDSKVPSQMIKSIISKFNKKKIEKKKIIFNEKSKNLKTVSSIVKILEKKNFSRNDCLISVGGGICGDVCGFASSIFKRGLNFVNVPTTLLSQVDSAIGGKTGINSLSGKNMIGSFYQPALVISDINFLKSLPKKEMICGYAEILKHSLIKNEIFFNFLKKNFIKILNHNSKFLEKAIYKSCLIKKEVVENDEKEKNTRKVLNLGHTFAHAYEATIGYN

SEQ ID NO: 180725 - protein, 220 aa, Unknown
  Bacterial polypetide isolated from the Sargasso Sea
MKQVKLNINTKTQKYPIIIGSNLTSNISNIIRKNSINFRQCLIIIDKNVPKKFIFNIKKSLKQKKVYTYLFKANEINKNINYVNKILEILLKKNFSRDDCVISVGGGITGDVSGFAASLFKRGLKFINFPTTLLSQVDSSIGGKTGINSKHGKNLIGSFYQPNLVITDIQFLKSLSKREIICGYGEVLKHSLISNKKFFGFLNKNIKKVLNLHTPFIEKT

SEQ ID NO: 180726 - protein, 158 aa, Unknown
  Bacterial polypetide isolated from the Sargasso Sea
MNNKILKVKTQQGTYPIIIGHNTIKEIGKYIKPIISNNRIFIISSKKVIEIYKTKLLKELNKNNIKTILITINDSEKEKNFNTIVKITNTLLKKGIDRNDSLIAFGGGVIGDITGFVSSITLRGIKFIQIPTTLLGSVDSSVGGKTGVNTSNGKNLIG

SEQ ID NO: 180727 - protein, 322 aa, Unknown
  Bacterial polypetide isolated from the Sargasso Sea
HKFKRLLYKKLKTNKLVQIEIAASEKNKNYRTIEKIHKVLFENRFNREDCVISFGGGIIGDIVGFASSTFKRGMKFVNIPTTLLAQVDSSIGGKTGVNNKFGKNLIGSFYQPDLVVSDMNILASLPEREIICGYAEILKSSIIDNFKNFLYLDKNLKKILKLKSPFIERSIIKSCNLKKRVVEKDEKEKNYRKVLNLGHTFAHAYESTLGFSKKLNHGEAVILGIKNAVEFSFKRKILTKQKFNIILNHINRIGMKPKIKKLFKKRHVFKIMNYMRSDKKNNSNNINLILVKDFGKIIIDFQINPTNLKKYLSSSLNYLICN

SEQ ID NO: 180728 - protein, 228 aa, Unknown
  Bacterial polypetide isolated from the Sargasso Sea
MKKFSNVNILIEYLIKNKFNRNDLVIAVGGGIIGDFSGFVASIFKRGVNFINVPTTLLAQVDSAIGGKTGVNSKTGKNLIGSFYQPKLVLSDISFLKSLPKREFICGFGEILKYSLIKDQKFFNFIKRNSKQILKGSDLNILKYIVLRSSKNKVHFVVADEKESNKRMVLNFGHTFAHGIESSNNFSKKINHGEAVLIGMFLATKLSFNKNICSLKTMEEIEKIYISN

SEQ ID NO: 180729 - protein, 244 aa, Unknown
  Bacterial polypetide isolated from the Sargasso Sea
KKNLETVKILTSHLLKNKIDRDDTLIALGGGVIGDLVGFVASITLRGLSFIQVPTTLLSQVDSSVGGKTGVNTPIGKNLIGSFYQPALVISDVGMLKSLHKREVLSGYAEVIKYGIIMDKTFFNWLLKNDKYFINLNANYLIEIVYKSCKNKAKIVNQDEKEKNIRALLNLGHTFGHAIESLNNYKKTIVHGEAVAIGIIMALELSFLEGKISKDIINKIEIHFDKIGIKRKIPNQLKRHLSTS

SEQ ID NO: 180730 - protein, 285 aa, Unknown
  Bacterial polypetide isolated from the Sargasso Sea
MKIQKLKFKSKSKPYTVIIGDKTINALSKEIKFLCPKTKKIAIFLDKNIPRKFKKIFIKKLKKYKVSIIPFKADEKSKSMSTVSIYLNKLLKKNFNRSDLVLSVGGGITGDVIGFVASIYKRGINFINIPTTLLAQVDSAIGGKTGVNTTHGKNLVGSFYQPKLVIIDTSFLNSLPQKEIVCGYAEILKHSLIKDKKFFIWLKTNTKNILLKKKRQLDYAIKKSCQIKMSFVNKDVHEKNLRMILNFGHTFAHAIEIKNNYSKKTTHGEAVLSGIILATRIISNK

SEQ ID NO: 180731 - protein, 262 aa, Unknown
  Bacterial polypetide isolated from the Sargasso Sea
LPKRIRKICPKVKNIAIIIDLNVPVKFRQSLLKKLKNYNVVFFNFLPNEKAKSINTVNLFLNKLLSKNFNRDDLIIGIGGGITGDVVGFVASVFKRGINFINIPTTLLAQVDSAIGGKTGVNSPFGKNLIGAFYQPRLVISDTLFLKSLSKKEMICGYAEILKHAIIKDNTFFNWLKKNTKSILLKKANELAYAIKKSCQIKINFVNKDVNEKGLRMSLNFGHTFAHAIEAENNFSKKITHGEAVLAGMILETRLSVIKKSL

SEQ ID NO: 180732 - protein, 274 aa, Unknown
  Bacterial polypetide isolated from the Sargasso Sea
MDNNVPKKFDKILKIKLKNYKLYFFNYSASEKTKSMYHVSYFVNKLLHANFNRSDLIIAAGGGITGDVVGFVASIFKRGINFINLPTTLLAQVDSAIGGKTGVNSTHGKNLIGAFYQPKLVLSDIVFLKSLPKKEIICGYAEILKHAIIKDQNFFNWLKKNSNSIFSKRPKELIYAIKKSCEIKIFFVSKDLNEKGLRMTLNFGHTFAHAIEAKNKFSKNITHGEAVLAGMIFALRLSIIRKVCDKKVFNKIKEIFNDNKLNYTYLRFKNSKKI

SEQ ID NO: 180733 - protein, 303 aa, Unknown
  Bacterial polypetide isolated from the Sargasso Sea
QQGIQTIQPESIKGRKIAIISDDDAAINNLAALKKALSSYDIKTIEIILPPGEKNKELIVAESIIDKLLSKKFERGDIIIGLGGGVIGDLSGFVASIIHRGVKFINIPTTLLAQVDSSIGGKTGVNSKYGKNLIGCFKQPELVICDINSLSTLPKRDLLAGYAELIKHALIGDAELFSYLQNNVKNIFNDHAILQEVIHRSALVKADIVMEDTHEKNIRAQLNLGHTYGHAIESFYKYDGRLLHGEAISIGIIMAFKTSLRLGLCAADHLHIVEDHFNNIGLLTDLKSLDGKKILPEKIMTLC

SEQ ID NO: 180734 - protein, 245 aa, Unknown
  Bacterial polypetide isolated from the Sargasso Sea
MIDEFVWELYKDHLSLQALFGTTRKKIVLKMLPRGEKAKCFDVYERMCEEILKEGIHRNFHVIACGGGAISDISGFIASSLLRGLSWSVIPTTLLSMVDASIGGKTGINSKFGKNLIGAFHMPDHVWLNPLFLETLPKIEGLNGYGEVLKYSFLDRTIKESLLNSKSKIGEMILLCANYKSSLVEEDFKEKGPRKYLNLGHTFGHAFEKMHPISHGEAVYWGMRLLFHIFEREDLLIECDEMVNE

SEQ ID NO: 180735 - protein, 259 aa, Unknown
  Bacterial polypetide isolated from the Sargasso Sea
MKQTRLNIITKTEKYPIIIGSNLTSSISKIFKSNSIGFDKCLIVVDKNVPKKFVSNIKRSFKNKSIFVLFFNASEKNKNINSVNKILEFLLNKNFSRNDVLISLGGGITGDVSGFAASLFKRGLKFANIPTTLLAQVDSSIGGKTGVNSKYGKNLIGSFYQPSLVLSDIQFLKSLSKREIVCGYGEILKHSLIENKKFFIFLNKNLKKILSLSSPFIEKAIYESCKIKKKIVEKDEKETALRKVLNFGHTFAHAYEAGL

SEQ ID NO: 180736 - protein, 256 aa, Unknown
  Bacterial polypetide isolated from the Sargasso Sea
LNERIFSQKFLLVYDSKVPAQMIKSIISRFNKDIIEKKKIVFNEKSKNLKTVSSIVKTLEKNNFSRNDSLISVGGGICGDVCGFASSIFKRGLNFINVPTTLLSQVDSAIGGKTGINSLSGKNMIGSFYQPSLVISDIDFLKSLPKREMICGYAEILKHSLLKDKIFFKFLKKNFIKILSHNHTVLEKTIYKSCLIKKEIVEKDEKEKNIRKVLNLGHTFAHAYEATVGYNRGLNHGEAVLLGIMSAVEFSRKKNI

SEQ ID NO: 180737 - protein, 262 aa, Unknown
  Bacterial polypetide isolated from the Sargasso Sea
KFLNNLKDNNFQAKMFLIKAGESYKNLKTLSEIYDVAFEFGLDRNSIIIALGGGIVGDVSGFAAATWLRGIEYIQIPTTLLSMVDSSVGGKTGVNHPKGKNLIGAFNQPKAVFIDPKTLKSLPKREFSAGMAEVIKYGVIRDKELFEYLEIEKNKNELMNLKNEYLIKIINSSIKTKSHIVSQDEHENGVRAILNYGHSFGHVVENLCGYGKFLHGEAISIGMNIAGEIAIEKGLWSKEELERQKNLLKSYDLPTEIPKINK

SEQ ID NO: 180738 - protein, 241 aa, Unknown
  Bacterial polypetide isolated from the Sargasso Sea
LKIKIIIIQLLFGKNVLNILPKRIKLICPNTKSIAILFDDNVPKKFKSILKKKLKNYKLLFLPFEANERNKSFATINSYLKILLKKNLNRSDLLISIGGGITGDVAGFIASIFKRGINFINIPTTLLAQVDSAIGGKTGVNSEYGKNLIGSFYQPKLVISDTSFINSLPRKEMICGYAEILKHSIIKDLGFFKWLRKNTKLILSKNSKALTYAIKKSCQIKLYFVTKDLNEKGLRMILNFG

SEQ ID NO: 180739 - protein, 306 aa, Unknown
  Bacterial polypetide isolated from the Sargasso Sea
KNMQKKNEKVFCIIDSKIRNNLNINNKKNIIIISFKCGEKIKTFDGYKNLAEKLILKDVNRKSAVIAIGGGSLGDLVGFVASTLLRGLDFFLIPTTLLSQVDSSIGGKNGINTRFGKNLLGTFFQPKEVLIDISVLNSLPRKEIRSGYAEIIKHALIKDYAFFNWLEKNANKLLNLNKSILEQAIYKSIMIKLYYVIKDEKEFLSNNNSRAMLNFGHTIGHAIENHYNYEKFNHGEAISIGMITEAKISNYLGLLSSKELEKIIMHFKKCKLKIYDKILKDRILIKILAKDKKNFQNNINFSLIKQ

SEQ ID NO: 180740 - protein, 153 aa, Unknown
  Bacterial polypetide isolated from the Sargasso Sea
IDSILEILLNKNFSREDSLLAIGGGITGDVGGFAASLFKRGLHFINIPTTLLAQVDSSIGGKTGVNSKYGKNLIGSFYQPKLVISDINTLKTLNKREIVCGYGEILKHSIISKKKFFKYLDQNFDDIIKLKSPYIEKTIFESCKIKKDVFEKD

SEQ ID NO: 180741 - protein, 158 aa, Unknown
  Bacterial polypetide isolated from the Sargasso Sea
MKKIKLIVKTTSKKYSINIGLNIVKKISNIIKSNRINFEKCIIIVDKKVPKKKLLDLKNNLFCKKKIIHFFSSSEKNKNQKNVNKILNKLFKNNFNRNDCIISLGGGITGDVASFAASTFKRGIKFINIPTTLLAQVDSSIGGKTGINNKYGKNLIGT

SEQ ID NO: 180742 - protein, 262 aa, Unknown
  Bacterial polypetide isolated from the Sargasso Sea
MKNYKLLIKTKSKKYTIIIGKNILTKIKNYFINEKIYYNKCLIVVDTKISKTSLNKVKKNFNKKDCIVYNFVSNEKNKNLNSVNKIINLLFKNNFSRDDCLISLGGGITGDVVGFAASIYKRGLKFINIPTTLLSQVDSSIGGKTGINNIYGKNLIGSFYQPDLVISDISTLKTLPDREIICGYGELLKHSLIKSKKNFNYLNNFYKQIIKLKTPYIQKAIFESCKIKKSIVEKDEKESGLRKILNFGHTFAHAYEATLGFQ

SEQ ID NO: 180743 - protein, 284 aa, Unknown
  Bacterial polypetide isolated from the Sargasso Sea
NEKNKNQLSINKILQILLKNNFNRNDTIISIGGGITGDISGFTASIFKRGIKFINVPSTLLAQVDSSIGGKTGINSKYGKNMIGSFYQPSLVISDIDFLKTLPKKEIICGYGEILKHSLISNKKFFLFLNKNAFKVLNLKEPYIEKAIFNSCLIKKKVIEKDEREKDLRKILNFGHTFAHAFEATLGYSKKLNHGEAVILGIMCASKFSLKNKLLSTKNFNLIKNHLIENKLPFKLKKYFSNKLLKKIISFMEKDKKNNTKKISLVLIKKIGEPIYNINFENKK

SEQ ID NO: 180744 - protein, 281 aa, Unknown
  Bacterial polypetide isolated from the Sargasso Sea
IIIDNNVPGKFKQILKSKLKHYKPIFFSFKPSEKSKSMQYVNYYIEKLLLNKFNRSDLVISVGGGITGDLAGFVASIFKRGINFVNIPSTLLAQVDSSIGGKTGVNSIHGKNLIGSFYQPKLVIVDTKFLKSLPKKEMICGYAEILKHAIIKDKIFFEWLKKNTKNILFKKSKDLIFAIKRSCQIKMYFVNKDVNEKGLRMVLNFGHTFAHAIEAKYGYSKAITHGEAVLSGMILATRLSVIKKVCNEKILKQIEKIYMNNNLNFVLKKFSKTKSILNLIP

SEQ ID NO: 180745 - protein, 303 aa, Unknown
  Bacterial polypetide isolated from the Sargasso Sea
LEFKKCLIIIDKNIPTKYLSLLKFKLRNKKTFIHKFNSSEKNKNFQSVNFLLEILLKNNFNRDDLLISVGGGIIGDVSGFVANIFKRGIKFVNIPSTLLAQVDSSIGGKTGINNKYGKNLVGTFYQPNLVLSDISLLKSLPKREKICGYGEILKHSLISKKKIFIFLKKNYQNILDIKSPYIEKAIKDSCNIKKNIVQKDEKESGLRKILNLGHTFAHSFEAALNFSNKLNHGEAVLLGLKNEILFAYNKKIISKKDMLEIFDHLNSLDIKLDINNFFKKKDIEKILKFMKSDKKNVSLKINL

SEQ ID NO: 180746 - protein, 223 aa, Unknown
  Bacterial polypetide isolated from the Sargasso Sea
MIKKVFAGVNKKYPIIIGKKSILKDFLPKAVKNNSKILIVTDTGIPTEIIKSVSKILEKGSKIIKIHKVAKGEKSKSFAQFERIQNKLAKLRFDRTDCIIALGGGVVGDLAGYVASSYQRGVDFIQIPTTLLAQVDSSVGGKTAINLEHGKNLVGAFYNPKLVLICPEFLKTLSNREYFAGLAEILKYGLIRNKKIFNIFETSYEKIHTRHQKTLNELILLSV

SEQ ID NO: 180747 - protein, 286 aa, Unknown
  Bacterial polypetide isolated from the Sargasso Sea
ILPKNVFVIKIESSEKIKSISSYHSLTKKVLSKGIDRNSVIIAIGGGTIGDLSGFVASTILRGVKFILMPTTLLSQVDSSIGGKNGINTSMGKNLIGTFYNPDAVYIDPKILSSLSKREIKSGYAEIIKHSLINDLSFFNWLDQNHKKIFSLEKNAIVYSIYKSVKIKSKYVEQDNKERLINKNSRAILNFGHTFGHAIETFYNYKTKITHGEAISIGMIFASKLSKNLGYISIDELDKIINHFKRTGLPIRDNNINYKKILTILKKDKKNNNDKINLILLEKIGR

SEQ ID NO: 180748 - protein, 191 aa, Unknown
  Bacterial polypetide isolated from the Sargasso Sea
MRPINLKVKTKHENYRIIIGSNIIKNLDSYLKKNSIIFNQCLLVIDKNIPNRMILKITKSLKKKKAFKFIFTANEKNKNIKYVNQILQILLDKNFSRQDCIITIGGGITGDVGGFAASLYKRGLSYINIPTTLLSQVDSSIGGKTGVNTKEGKNLIGSFYQPKIVISDTEFLRSLNKREIICGYGEVFKHS

SEQ ID NO: 180749 - protein, 229 aa, Unknown
  Bacterial polypetide isolated from the Sargasso Sea
VGGKTGINTSHGKNLVGTFHQPKCVIIDTKILKTLPKRELYAGFAEVIKYSLIMDKNFYNYLNINYDKILNLKEPYINHTVYKSCQIKSQIVSKDEKENGIRAILNLGHTFAHAFESELSYKSDLIHGEAVAIGICMAFRLSSKLNLCKNSEVKKVENLISKYKLPTTINEIKTISFKRKNVFKKLFSDKKVKDGKLTFILCQSIGKAMIKNDIDENTIINFLKEEINE

SEQ ID NO: 180750 - protein, 273 aa, Unknown
  Bacterial polypetide isolated from the Sargasso Sea
MKISKINVKNKNTNYPIFIGNGVINLLGKQIKKLCPKSKKVVIIFDKRIPNKYKFKIKKQVKNYKLYIYEYFPNENLKSFTKVNHLVESLLKNNLSRADVIISAGGGIIGDFAGFVASILKRGVNFINIPSTLLAQVDSSIGGKTGVNSIKGKNLIGSFYQPRLVISEIGLLKSLKKRERICGFAEILKHSIIKDSQFFEKLKKNTDKILKNPNSDIMRDIIAKSCKIKLFFVNQDEKEKNQRMILNFGHTFAHGIEAANKFSSKINHGEAVL

SEQ ID NO: 180751 - protein, 234 aa, Unknown
  Bacterial polypetide isolated from the Sargasso Sea
AQVDSSVGGKTGINNSYGKNLVGSFYQPEVVVSDINLLKSLNTREIICGYAEIFKSSLLESYQSFNYLDKNIKDILKLKEPFINKAILKSCNLKKKIVQKDETEKNLRKVLNLGHTFAHAYESCLGFSKKLNHGEAVIIGIKNSIEFSKKKNLISIKSYEFIKNHINKIPLDKSFKSLFKKKDINKIISFMKSDKKNSSKKINLILFKNFGKIKTDFQITEFSLKKFLNSQLSN

SEQ ID NO: 180752 - protein, 309 aa, Unknown
  Bacterial polypetide isolated from the Sargasso Sea
KKYNTKVYKITATEKTKNFIYAQKLIENILKHILNRSDCIISFGGGITGDLSAFVSNLTKRGIKFINIPTTLLAQVDASIGGKTAVNSRQGKNLIGTFYQPDFVLIDISILKNLPRREMICGYGEILKHALILNRNFFLWLTKNAKKIINDKNKKVTKLAIIQSCKIKSKIVSQDEKEKNLRMILNFGHTFAHGFEAATNFSKRLNHGEAVLLGMITASHLSYKIKLLPRNDLSLIKKHYTELKLPMKIDKFFKKNKINKIVSFMQKDKKNSDNKINLILIKKIGKVSKPIIINFNKNKIKNFLNNLYK

SEQ ID NO: 180753 - protein, 210 aa, Unknown
  Bacterial polypetide isolated from the Sargasso Sea
MKVSKLIIKSSSGKYPILIGSNVISNISKLMFDNSINFEKCLLVVDKNVPKKFISKIKKSLKNKKLFIFLITANEKNKNQKTTNSILKILLDKNFSREDCLIAVGGGITGDVSGFAASLFKRGLKFINIPTTLLSQVDSSIGGKTGINTNQGKNLIGSFYQPRLVISDTNFLKTLSKREVICGYGEILKHAIISNKVFYNFLNKNFFNII

SEQ ID NO: 180754 - protein, 290 aa, Unknown
  Bacterial polypetide isolated from the Sargasso Sea
ILDRGEKAKSLKNFQKILNFLANNNFDRADLIIAVGGGVVGDISGYVASSYLRGIQFIQIPTTLLAQVDSSVGGKTAINIAAGKNLVGAFYNPKAVIVDTSVLDTLPNREFKAGLAEVIKYALIQDKSLFSLLKKYSQKVLSMDPKIIEEIIFSSIQTKAKIVTKDEKENGIRAILNFGHTFGHAIEAQSKYKKILHGEAVAKGMKIASRISYLENLITAKEHQEIIELLQEFEFDLSLSQYKYRELKPYIFRDKKIKKGKLNLILLNQISDAIVTNSFEIKNLQKGLQD

SEQ ID NO: 180755 - protein, 279 aa, Unknown
  Bacterial polypetide isolated from the Sargasso Sea
FLKLIVIDKNVPTKFKSKFVKNLKSSLKKIYIFNANEKNKNQKNVELIQKILFKNRFNRDDCLIAFGGGITGDVVGYCASTYKRGIKFINIPTTLLSQVDSSIGGKTGINNTYGKNLVGSFYQPSLVVSDLDVLKSLNTREIICGYAEILKSSLLDSLIKFKYLDKNFKNIINLKQPFIGKAILNSCKLKKKIVQKDETEKNLRKVLNLGHTFAHAYESKLSFSNKLNHGEAVIIGIKNALAFSYKYKLLKGRSYNLIMNHINKIPFKKKFKELFKIKD

SEQ ID NO: 180756 - protein, 271 aa, Unknown
  Bacterial polypetide isolated from the Sargasso Sea
MKAQQIKINTKSKKYSIFIGSKLISKLDKILIAQKISFPKVMVVIDKNIPSKFKSILIKKLNSKFIKKYIFIADERNKNQRNVDLIQNILFKNRFNRDDCIVAFGGGITGDVVGYCASIYKRGIKFINIPTTLLSQVDSSIGGKTGINNSYGKNLLGSFYQPNLVISDTDLLKSLNSREIICGYAEILKSSLLDSIKNFKYLDNNLNSILKLKQPFIENAILNSCNLKKMVVQKDEDEKNLRKILNLGHTFAHAFESCLGFSSKLNHGEAV

SEQ ID NO: 180757 - protein, 250 aa, Unknown
  Bacterial polypetide isolated from the Sargasso Sea
DLTGFVAACYQRGVRFIQIPTTLLSQVDSSVGGKTAVNHPLGKNMIGAFKQPDLVLINTAVLSSLPASEFAAGMAEVIKYALISDLAFFNWLEQNQQAIRELQPAVLGEMIRHCCQMKADIVSRDETEQGERALLNLGHTFGHAIEAFLGYGHWLHGEAVAVGMVMATQLAVSRGDVSRDELQRIIRLLSAFNLPVAPPVQMKIADFMPYMKTDKKVQAGKMRFIVPISLGQSAIVDDVTEQELMAIFSI

SEQ ID NO: 180758 - protein, 270 aa, Unknown
  Bacterial polypetide isolated from the Sargasso Sea
AFEQRLERSSLMLALGGGVVGDMTGFAAATWLRGIQVIQVPTTLLAMVDAAIGGKTGVNHPGGKNLIGAFHQPSLVLIDPETLNTLPEREFRAGMAEVIKYGILGDPALFQCLEEGPEPNSAAGLGNSRLETILERSAAAKARVVAADEREGGLRAVLNYGHTFGHVVETLCGYGTWLHGEAVAIGMVAVGQLAVNRGSWTADEAGRQTQLIQRCGLPTAWPDLDPDAVLRTLQGDKKVKDGRLRFVLPMAIGRVEIRDDISRDEILHCL

SEQ ID NO: 180759 - protein, 248 aa, Unknown
  Bacterial polypetide isolated from the Sargasso Sea
VLRGIDLIQVPSTLLAQVDSSVGGKTAINSGYGKNLIGTFKQPKCVIISTDLLKTLKKRDLVSGYAEILKYSFIKDKLFFGWLEKNAKKILSLNTESCIYAIKKSCSIKSDIVSKDEKEKGIRELLNFGHTFGHAIESITGYSNKIKHGEAIFIGMYLAIKFSIFLKLCDEKVAINYAKHLNGLGIHFKLDDYGLNISYKEFIKHMKFDKKVKNGKMKFVLIKKIGVPVRIFLEDVRLLSIFLKNELK

SEQ ID NO: 180760 - protein, 151 aa, Unknown
  Bacterial polypetide isolated from the Sargasso Sea
MQKVSVGLEKHSYDILIGHGLIKNSGQIIAPLLSNNRVVVITDQNVALLHLRSFESSMKSAGVSVSSLVLPCGESTKSWNHLIRVVEWILEQKVERNDLVVALGGGVIGDLVGFAAATVRRGVQFAQIPTSLLAQVDSSIGGKTGINVSFG

SEQ ID NO: 180761 - protein, 267 aa, Unknown
  Bacterial polypetide isolated from the Sargasso Sea
IICIGGGIAGDVSSFAASIYKRGLKFINIPTTLLSQVDSSIGGKTGVNTKFGKNLIGSFYQPDLVVSDTTFLKSLPRREIICGYAEILKHSLINNKRLFHFLNNNLSNILKLKKKFIEKAILESCKIKKEIIELDERESNLRKSLNFGHTFGHAYEASLNYSKKLNHGEAVLYGILSATKLSKKLKTLNNEEYQIIIEHLSKLKFDNLKKFFNKKDIDKIVRYMTVDKKNTSKKINFITLKKIGRYNLKNQLNPSEVRNFIKLNLFN

SEQ ID NO: 180762 - protein, 232 aa, Unknown
  Bacterial polypetide isolated from the Sargasso Sea
KKLSKNISKIIKSNSIDFNRCLLVIDSNVPKKFIYTISKALKNKIIYIHFLKANELNKNMNSINKILEILLIKNFSRDDCLISIGGGITGDLSGFAASLFKRGLKFINIPTTLLSQVDSSIGGKTGINTKYGKNLIGSFYQPDLVISDTEFLKSLPKREIVCGYGEILKHSIIGNKKFYNFLNKHKKKVLELTSPFLERAIYESCKIKKSVVEKDEKEKNLRKILNFGHSFA

SEQ ID NO: 180763 - protein, 304 aa, Unknown
  Bacterial polypetide isolated from the Sargasso Sea
LRFDKCLIVTDKNIPHKFKKLLYKNIKTNKLVKIEITASEKNKNYRTIEKIHKVLFENRFNREDCVISFGGGIIGDIVGFASSTFKRGMKFVNIPTTLLAQVDSSIGGKTGVNNKFGKNLIGSFYQPDLVISDMNILASLPEREIICGYAEILKSSIIDNFNNFLYLDKNLKKILKLKSPFIERSIIKSCNLKKRVVEKDEKEKNYRKVLNLGHTFAHAYESTLGFSKKLNHGEAVILGIKNAVEFSFKRKILSKQKFNIILNHINRIRMKPKIEKLFKKTHVSKIMNYMRSDKKNYSNNINLI

SEQ ID NO: 180764 - protein, 252 aa, Unknown
  Bacterial polypetide isolated from the Sargasso Sea
HLKRGINFISVPTTLLSQVDAAVGGKTGVNSKYGKNLIGSFSQPKLVISDTSVLKSLPKKEMVCGYAEILKHAVINDKKFFNWLKLNTKYIFSHHSKKLIYAIKKSCNIKLFFVNKDVKEKNSRMILNFGHTFAHAIEVKNNYSKKITHGEAVLAGMILATKLSVVKKVCNKKTLRDLMEIYATNNLSYSFKKYKKTKEINSLIPYLKNDKKNNDEKINFILLSKIGKTTMPYKNKITIKELKKHIGLFTQY

SEQ ID NO: 180765 - protein, 289 aa, Unknown
  Bacterial polypetide isolated from the Sargasso Sea
KGLTMKKVTVPLDTRSYDILIGEDLIPNFPIHLEGILSRNFLAIITDKNVEKIHLSRLVNALSEVGIETKILSIDPGEGSKSWKTLQMTVDWMLESKIERNDIVVALGGGVVGDLVGFAAAILRRGVRFIQCPTSLLAQVDSSVGGKTGINSAYGKNLVGAFYQPSQVISDISTLHTINERDFLAGYGEVVKYGLLGDHDFYCWLEKNFTKIKERDTQTLITAVAHSCEMKAEIVTNDEKEHGNRALLNLGHTFCHALEAATGYSDRMLHGEGVAIGCILAFDLSARME

SEQ ID NO: 180766 - protein, 151 aa, Unknown
  Bacterial polypetide isolated from the Sargasso Sea
KFIYNANEKNKNQKNVGKILDLLLKKNFSREDCLISIGGGITGDVAGFAASLFKRGLKFVNIPTTLLSQVDSSVGGKTGINTSQGKNLIGSFYQPKIVISDVNVLRSLPFREVVCGYAEIVKHALIANKKFYNFLDKNVDDILKLKSPTIE

SEQ ID NO: 180767 - protein, 289 aa, Unknown
  Bacterial polypetide isolated from the Sargasso Sea
  misc_feature (259)..(259): Xaa can be any naturally occurring amino acid
KCLIVTDKNIPKKFKQLLYKKLKTKKLFKVDILASEKNKNYDTVEKVHSILFKNRFNREDCVISFGGGIVGDIVGFASSTFKRGIKFINIPSTLLSQVDSSIGGKTGVNNKFGKNLIGSFYQPDLVISDINILDSLPRREIICGYAEILKSSIIENYTSFIYLDKYLQQILELKSPFIERSILKSCNLKRMVVEIDEREKNFRKVLNLGHTFAHAYESALGFSKKLNHGEAVILGIKSATQFSYNKKILSKSRLDNISXHIEKIGINLKINNFFKKKHSTKILNYMKND

SEQ ID NO: 180768 - protein, 297 aa, Unknown
  Bacterial polypetide isolated from the Sargasso Sea
MKPFKLNVKTKDENYPIIIGSNIITNLAIYFKENSINFDQCLLIIDKKVPSKMISKITKSLKRKKISKFLFNANEKNKNLIIVNKIIQILLTKNFSRQDCIITIGGGITGDVGGFAASLYKRGLQFINLPTTLLSQVDSSVGGKTGVNTKEGKNLIGSFYQPKIVITDTDFLKSLPRREIICGYGEVFKHSLILNKTFYKYLNNNASKILNLKKPFIEKAIYQSCKIKKIIVEKDEKEKGIRKILNFGHTFAHAYEATLGYSKKLNHGEAVILGIYTALKFSLDVRLIKIGEYEIIY

SEQ ID NO: 180769 - protein, 272 aa, Unknown
  Bacterial polypetide isolated from the Sargasso Sea
MQKIKFKNSNKDYSILIGSNILSVLSSKIKSLCPQTKKVALIFDKGVPIKYKKILLRNLKRYNVFIYKINANEKAKSIKSATFLLEKLLLKNFNRTDLIIGIGGGITGDISGFVASILKRGVNFISIPTTLLSQVDAAVGGKTGVNSKYGKNLIGSFSQPKLVISDISFLKSLKRKEMVCGYAEILKHAVIKDKNFFNWLKYNTKYIFSHNSRKLIYAIKKSCNIKLFFVNKDVNEKNLRMVLNFGHTFAHAIEVKNNYSKKITHGEAVLAG

SEQ ID NO: 180770 - protein, 296 aa, Unknown
  Bacterial polypetide isolated from the Sargasso Sea
MKVHKISAKTKNTKYPILVGNDVIKLLGKQVRLVSPNTKKVALILDKNIPKKYKKKIKKQLKNYYIYTKEYLPSENLKSFRYVNFLAEKLLEKNFNRNDIIIAAGGGIIGDFAGFTASILKRGISFVNLPSTLLSQVDSSIGGKTGINSKKGKNLIGSFYQPKLVISELSFLKSLPKRELVCGFAEILKYSLIRDQNFFKWIKKNSKNILKEKNNEILKHAIVRSCKNKIYFISNDEKETGKRMLLNFGHTFAHAIEAASNFFKKINHGEAVLIGMLLATKLSVKKNICSNSTLKQ

SEQ ID NO: 180771 - protein, 153 aa, Unknown
  Bacterial polypetide isolated from the Sargasso Sea
MKKVTVPLDTRSYDILIGEDLIPNFPLHLENILSRKFLAIITDKNVEKIHLSRLVKALSDSEIETKILSIDPGEGSKSWKTLQMTVDWMLATKIERNDIVVALGGGVVGDLVGFAAAILRRGIRFIQCPTSLLAQVDSSVGGKTGINSVHGKN

SEQ ID NO: 180772 - protein, 290 aa, Unknown
  Bacterial polypetide isolated from the Sargasso Sea
IKDYLPSAVSKNNKILIIFDKNIPDDYIELVRKSIPSSKVTDVLKIKPGEQSKSFSSFQMILNKLAKKKYDRSDCIVAIGGGVVGDLSGFVAASYMRGIDYIQVPTSLLAQVDSSVGGKTAINIESGKNLVGAFKNPKLVLISSTLLKTLPEREFKSGIAEIIKYGLIYNKKIFNIFDKQHKLILKRNQRVIEELIHESVKTKAKIVTEDERELGIRAILNFGHTYGHAIEAINNYENILHGEAVAMGMRMASKMSMLEGHLNEKAYKKIINVFDALGFPKNTSNNYSDL

SEQ ID NO: 180773 - protein, 222 aa, Unknown
  Bacterial polypetide isolated from the Sargasso Sea
MPINLKVKTKTENYPIIIGSNLISKLNFYLNRESIFFNQCLLVIDKNVPKKMISKISKSLKRNKVHKFIFKASEENKNIISVRRVLQILLNKNFSRQDCLITIGGGITGDVGGFAASLYKRGLNFVNIPTTLLSQVDSSIGGKTGVNTEEGKNLIGSFYQPKMVISDVDFLKSLSKREIICGYGEIFKHSLILNKSFFKYLDNNSSNIINLKSPFIEKAILE

SEQ ID NO: 180774 - protein, 266 aa, Unknown
  Bacterial polypetide isolated from the Sargasso Sea
MSAVTRVSVHPEGGAYEIFVGADVMHSAGQRIAKALGQRQIFIITDENISLLYKSQLESNLAEAGHEVETVVVAPGERSKNFQSLEYVVGEILRRGVSRHSLVVAFGGGVVGDLAGFVSSIMLRGIDYVQIPTTLLSQVDSSVGGKTAINTNLGKNLVGTFYQPKLVLVDTGLLKSLPSRELRAGYGEVVKYALLGDAPLFEWLEHNGGDVLGVDAEACRYVVAACCQNKAEIVTRDEREKGSRLLLNLGHTFGHAMEADLSYDNR

SEQ ID NO: 180775 - protein, 277 aa, Unknown
  Bacterial polypetide isolated from the Sargasso Sea
MIRNKPIGILSRKASYDIWIGKNLLKKRKSDLKLTLGEKKIAIITDKNVHACQYSNLLNQVTDLDINPHLLLIEPGESSKSWDILKKVLNWLTELNFDRTDYIIAFGGGVVGDLVSLAASLFRRGINLIQVPTTLLSQVDSSVGGKTAINSGSAKNSIGTFYHPKAVYCDTSFLSTLSERDFLSGYAEVFKMALVFDKDFYKFLLKNQKHTLARDHKILIYIIEKSLELKSKIVEIDETEKGERALLNFGHTFGHALESYFNYSQKLLHGEAVSLGM

SEQ ID NO: 180776 - protein, 295 aa, Unknown
  Bacterial polypetide isolated from the Sargasso Sea
FFYKVLIIYDSKIKFKEVLKIKLKLRKKEVLIYKFVSNEKSKKFNTVNKIISKLLKNNFTRQDCIIAFGGGITGDLSGFVSSIYKRGIKFINIPTTLLAQVDASIGGKTGINHEIYGKNLIGSFYPPNLVISDTNYLKSLSKKELICGYAEIFKHSLIYSKQNFLFLEKFHKKIISLEKNILEKAILESCKIKRSIVQKDEKEKNLRMMLNLGHTFGHAYEAACGYKKILNHGEGVMLGIKTATLFSLIEKKLSLNEFKRINQNILNLNFNLKLNKFFKLTDINKLISFMKNDKK

SEQ ID NO: 180777 - protein, 203 aa, Unknown
  Bacterial polypetide isolated from the Sargasso Sea
MNQSKIKIRTKNQSYNIVVGKDLIKNFSKLLKNNFIYFNKCLLVVDNNVPKKIVKKIYSQLKKNKFLFYFKSTEKNKDQKSIDKLLNILLKNNFNRNDCIISLGGGIVGDVTGFAASIFKRGIKFVNIPTTLLAQVDSSIGGKTGINTKYGKNLIGSFYQPNLVISDTIFLKSLPKREIICGYAEILKHSLIMNKKLFSYLDK

SEQ ID NO: 180778 - protein, 244 aa, Unknown
  Bacterial polypetide isolated from the Sargasso Sea
QIPTTLLANVDSSVGGKTAVNHPLGKNTIGSFKQPEYVCIELSFLKTLPSRELKAGFIELLKHGIIHDEELFDFIQSYSLEPLNFEFLEEAILRSCTIKGRIVEKDETENGIRATLNFGHTLGHLIETHAGYGKYLHGEAVGLGMFFAAFVSWRYDNLKENEWMKIKNYLRKILISIKLPPIDQNLFREMILHDKKSQKQSINFIMLCKLGESYINKETSVDMLWEEFKKFVEKFADFIEIELR

SEQ ID NO: 180779 - protein, 211 aa, Unknown
  Bacterial polypetide isolated from the Sargasso Sea
MRTIEVNLDKDPYKVLYSDLQQGIQTIQPESINGRKIAIISDDHAANNNLDVLRKALSRYDIKIIEIILSPGEKNKELMVAENIIDKLLSKKFERGDLIIGLGGGVIGDLSGFVAGIIHRGVKFINIPTTLLAQVDSSIGGKAGVNSKYGKNLIGCFKQPELVICDINSLSTLPKRDLLAGYTELIKHALIGDAELFSYLQNNVKNIFNDH

SEQ ID NO: 180780 - protein, 252 aa, Unknown
  Bacterial polypetide isolated from the Sargasso Sea
MTALYLYGGGIVGDVSGFAASIFKRGLKFVNIPTTLLAQVDSSIGGKTGVNNKYGKNLIGSFMQPDLVISDVNMLSSLKKREIICGYGEILKHSLISNEKIFNYLKKNYLKIFKLKSPFIEKTIADSCKIKKNIVQLDEKEKNLRKVLNLGHTFAHAYEAALSYSKKLNHGEAVILGIVSAAKFSVKNNILNKKDYKQIINHIKNLKIPINLNFYFKKKDINLIIKYMKSDKKNNSSKINLILIKKIGKVIL

SEQ ID NO: 180781 - protein, 272 aa, Unknown
  Bacterial polypetide isolated from the Sargasso Sea
MKISKIQVKNKDTNYSILVGHGAVNLLGEQIKKLCPKTKKVGLILDKNIPMKYKKKIKKQIKRYEVHLYEFTPNENLKSFTKANNLIESLLKNNFNRSDVIIAAGGGIIGDFAGFVASILKRGINFINLPSTLLAQADSSIGGKTGVNSIKGKNLIGSFYQPKVVITELGFLKSLSKRNFICGFAEILKHSLIYDSSFFKTLDKNSNNILEKIDFEMIRYVISKSCKIKLHFTNKDEKEKNARMILNFGHTFAHGIEAANNYSRKLIMGKRF

SEQ ID NO: 180782 - protein, 228 aa, Unknown
  Bacterial polypetide isolated from the Sargasso Sea
MSDAETVRVDLGDRSYDIVIGDGVLSRAGSLIADAVPGVRPVVVTDETVASLHLETFSQALEKDGIAFDTIVLPPGEQTKDFKHLEELLDCLLTRGIDRSTVLIALGGGVIGDLTGFAAAIALRGIDFVQVPTTLLAQVDSSVGGKTAIDTPKGKNLVGAFHQPRLVLADVGVLDTLPRRDLMAGYAETVKYGLIDDAEFFGWLEGYAVALIDGDMAVRRHAVGKAAA

SEQ ID NO: 180783 - protein, 252 aa, Unknown
  Bacterial polypetide isolated from the Sargasso Sea
NQTRNYLTYSFEYNVDESLKSFKHVISLNEKLLSKNFNRNDIIIAVGGGVVGDFAGFSASIIKRGINFINIPSTFLAQVDSAIGGKTGINTKKGKNLIGTFSQPKLVLSELGLLKSLPKREMICGFAEVLKHAIIKDKDFFKWIEKRAEEIIFNKNMEIIKTTIIRSCKIKIFFVTKDEKERGDRAILNFGHTFAHGLEGASNFSKKINHGEAVLVGMYLATKLSEQRKICSVKTFNRLKNFYRKNNLPNNI

SEQ ID NO: 180784 - protein, 228 aa, Unknown
  Bacterial polypetide isolated from the Sargasso Sea
MRPIKLIVNTNSNKYPIIIGRNLISNLSEIFKKNSIVFKKCLLVLDKNIPDRYIKQISESLKRYELYKFIYNANEKNKNQKNVSKILDVLLKKNFSRDDCLISIGGGITGDVAGFAASLFKRGLKFVNIPTTLLSQVDSSVGGKTGINTSQGKNLIGSFYQPKIVISDVDFLKSLPFREIVCGYAEIVKHALIANKKFYNFLDKNIYEILKLKSPTIEKSIYESCKVK

SEQ ID NO: 180785 - protein, 239 aa, Unknown
  Bacterial polypetide isolated from the Sargasso Sea
MKTLSKIYDVAFEFGLDRNSIIIALGGGIVGDVSGFAAATWLRGIEYIQIPTTLLSMVDSSVGGKTGVNHPKGKNLIGAFNQPKAVFIDPETLKSLPKREFSAGMAEVIKYGVIRDKELFEYLEIEKNKNELINLRNEYLIKIINSSIKTKSHIVSQDEHENGVRAILNYGHSFGHVIENLCGYGKFLHGEAISIGMNIAGKIAIQKGLWSKEELERQQNLLESYDLPTEIPKINKRDV

SEQ ID NO: 180786 - protein, 301 aa, Unknown
  Bacterial polypetide isolated from the Sargasso Sea
MIKKVLVGDEKYKVLIGRNGIFKDFLPNSLAKNKKILVISDENIPRKYIELVIKSVPSDKVVNIHKIKPGEESKSFANFEIILNKLAKKKYDRSDCIVAIGGGVVGDLSGFVAASYMRGIDYIQIPTTLLSQVDSSVGGKTAINIESGKNLVGAFKNPKLVLISSTFLRTLPDREFRAGIAEVIKYGLIYNKRIFNIFEKENKLILKRNQRIIEKLIHESVKTKAKIVTEDEKELGIRAILNFGHTYGHAIEAKNNYKNILHGEAVAMGMRMASKMSMLEGHINETAYKKIINVFDMLGLS

SEQ ID NO: 180787 - protein, 221 aa, Unknown
  Bacterial polypetide isolated from the Sargasso Sea
MKNTKLIVKTKSKIYPIYFGNKILSKIGTLLKNNLPGVKKVCIISDNKLPKILLKTLNKSLKKYEVKIYKLHSSEKIKSLKIANKIIEGLLDYNFNRSDCIIALGGGVIGDLSAFISNLTKRGIKFINIPTTLLAQVDASIGGKTGINSKEGKNLIGTFYQPDFILTDVSILKSLPQREIIAGYGEILKHSLISDKRFFFWLFKNGKKIIYEKNTNLLKQA

SEQ ID NO: 180788 - protein, 256 aa, Unknown
  Bacterial polypetide isolated from the Sargasso Sea
CGFAASLFKRGLKFINLPTTLLSQVDSSVGGKTGVNSKYGKNLIGSFYQPNLVITDIQFLKSLTKREIVCGYGEILKHSLISNKKFFNFLNKNIKKIFNLSSPFIEKAIYKSCEIKRKVIEEDEKEKNLRKILNFGHTFAHAYEASLGYSKKLNHGEAVILGMKTALNFSLKNLFLKKNEYKIIVNHIKNAGLPSSLNKFFSLKDLNKILSFMIKDKKNNSSKISLVLLKKIGSPVFDKEYTKKNIYLFLKNYLRD

SEQ ID NO: 180789 - protein, 265 aa, Unknown
  Bacterial polypetide isolated from the Sargasso Sea
NASEKQKSLKIANLYLKKLLKKNFNRSDLVISVGGGITGDLIGFVASIFKRGINFINVPTTLLAQADAAIGGKTGVNSVFGKNLIGSFYQPKLVINDTAFLKSLPRKELICGYAEILKHSIIKDKKLFIWLKKNTRKLLSKDSKKLIYAIKKSCEIKLFFVNKDVNEKDLRMTLNFGHTFAHAIEVKNNYSKNILHGEAVLSGMVLAARLSNLLKICNNKTLEDITEIYKRNKLTYTIKKYSNYRKINELLPFLLHDKKNDNDKI

SEQ ID NO: 180790 - protein, 258 aa, Unknown
  Bacterial polypetide isolated from the Sargasso Sea
MKQIKLNIKTKTQKYPIIIGSNLTSSISNIVRKNSINFRQCLIVVDKNIPKKFIFNIKKSFRKKKIYIYLFNANEINKNINYVNKILEILLIKNFSRDDCVISVGGGITGDVSGFAASLFKRGLKFINLPTTLLSQVDSSIGGKTGVNSKYGKNLIGSFYQPNLVITDIQFLKSLSKREIICGYGEVLKHSLISNKKFFNFLNKNIKKVLNLSSPFIEKAIYESCKIKKIVVEKDEKEKGLRKILNFGHTFAHAYEAS

SEQ ID NO: 180791 - protein, 315 aa, Unknown
  Bacterial polypetide isolated from the Sargasso Sea
SGTDKYKIFIGNNILSSSGSLIKKKLINPRVFIVTNRFIYKLYGKKLENSLRKNKISFNKIIINDGERYKNIKTINLITTKLLKYKVDRNDTLIAFGGGVIGDIVGFSASITLRGINFIQIPTTLLSQVDSAVGGKTGVNTKEGKNLIGTFYQPKLVISDVSLLKTLPKREILSGYAEIIKYGLIMDKKFLNWLLDNESKLITFNKKYLIEAIFHSCKNKAIIVRQDEKENNIRAILNLGHTFGHAIEAINNYQKSLTHGEAVSIGIMMALEMSSLQGNILDKNINKIKDHFQKLKMKTKIPINIKSKSSLNKLK

SEQ ID NO: 180792 - protein, 260 aa, Unknown
  Bacterial polypetide isolated from the Sargasso Sea
MNNLFQVQSLKDINLQISCNDFQLIKTTLSKLNNTTTSKCVVITNTSLTSICYKKIETQLSDVFSSVHLIEVPEGEVEKNLGRVSNLLDLLMDINLERRDYIIALGGGVIGDLVGFVASIYKRGVNLVQIPTTLLAQVDSSIGGKTGVNHQVGKNLIGSFFQPDLIFSDIGFLASLPKREWLCGMAEVVKYGVISNYEFFEYIELNTQSIKAFDVNHDSKLWLHLVSVSANEKVNVVQKDEKESGLREILNYGHTFAHAI

SEQ ID NO: 180793 - protein, 284 aa, Unknown
  Bacterial polypetide isolated from the Sargasso Sea
TIEKIHTVLFENRFNREDCVISFGGGIIGDIVGFASSTFKRGMKYVNIPTTLLSQVDSSIGGKTGVNNKFGKNLIGSFYQPDLVVSDMNILASLPEREIICGYAEILKSSIIDSFNNFLYLDKNYKKILKLKSPFIERSIIKSCNLKKRVVEKDEKEKNYRKVLNLGHTFAHSYESTLGFSKKLNHGEAVILGIKNAVEFSFKRRILSKQKLNIIINHINKIEMKPKIERLFKKKHVSKIMNYMRSDKKNNSNNINLILIKDFGKIVVDFQISPSDLKKYISES

SEQ ID NO: 180794 - protein, 238 aa, Unknown
  Bacterial polypetide isolated from the Sargasso Sea
TLLAQVDSSIGGKNGVNSKAGKNLIGSFYQPKLVISDLSFLKSLPKRELICGFGEVLKYSLIRDKKFFDYIKRYSKEILKGNDLNILKYLVLRSAKNKIHFVIGDERESNKRMTLNFGHTFAHGIESSNNFTRKINHGEAVLIGMLLAIKLSLDKNICSIKTLKEVEKIYASNKLPSNLNQYLNKKQILNIPKLMINDKKNDDDKINLILLKRIGKTTIPGKIKMSVSQVNKFLKKIN

SEQ ID NO: 180795 - protein, 267 aa, Unknown
  Bacterial polypetide isolated from the Sargasso Sea
IKTKNLGNNYSILIGENILKILPKKIKSLCPKTKRIVIIIDKNIPKKFKNILVKNLKRYKLIIYTFEANERTKSLNTVNTYLNLLLNQNLNRSDLIISVGGGITGDVVGFISSIFKRGINFINIPTTLLAQVDSSIGGKTGVNSFYGKNLVGSFYQPKLVISDISFLKSLPKKEMICGYAEILKHSLIKDKNFFNWLKKNTHNLFLKKNFELIHSIKKSCLIKLHFVNKDVSEKNLRMILNFGHTFAHAIEVKNKYSKKITHGEAVL

SEQ ID NO: 180796 - protein, 241 aa, Unknown
  Bacterial polypetide isolated from the Sargasso Sea
MKQFKLNINTKTQKYPIIIGRGLLNDLPKLLKHNSLYFTKYLIVIDNKIKKKVILRILKKFNKKNIITFLFNANEKNKNQKNVDKILAVLLKNNFQRNDCLISVGGGITGDVSGFASSIYKRGINFVNIPTTLLAQVDSSIGGKTGINTSFGKNLIGSFYQPKLVISDIDFLKTLPKREIICGYAEIFKHSLIFEKKFFSFLDKNANEILNLKSPFIEKSIVKSCEIKKKIVELDEKEKSL

SEQ ID NO: 180797 - protein, 247 aa, Unknown
  Bacterial polypetide isolated from the Sargasso Sea
SILKKHNIFFKKCLIVVDKNIPSKFKLTLIKNLKTKKKFIYNFTPSEKNKNYKSVNQIHNLLFNKRFNREDCVISFGGGITGDVVGFASSTFKRGIKYINIPSTLLSQVDSSIGGKTGINNNFGKNLIGSFYQPELVVSDINILKSLPKREIVCGYAEILKSSLIDNYKNFYFLDKNLKNILQLKSPFIEKALINSCKLKKRIVEQDEVEKNFRKVLNLGHTFAHAYESSLNFSNKLNHGEAVILGI

SEQ ID NO: 180798 - protein, 271 aa, Unknown
  Bacterial polypetide isolated from the Sargasso Sea
IDKNVPIKFKTDLKKKLKSYNLLFLSFSASEKNKSFNAVNYYLNILLSKNFNRSDLIISVGGGITGDVAGFVASIFKRGINFINIPTTLLAQVDAAIGGKTGINSNCGKNLIGSFHQPKLVISDTSFINSLSKKEMICGFAEILKHSIIKDKKFFNWLEKNARLIFSKKNKELTYAIKKSCEIKIHFVTKDVNEKGLRMILNFGHTFAHAIEVKNNYSKKITHGEAVLSGMILATKLSVVKKICSTKTLSQIKNIYLKNKLDFTFKKYSNQ

SEQ ID NO: 180799 - protein, 277 aa, Unknown
  Bacterial polypetide isolated from the Sargasso Sea
MPKLKKNKNFNLITIQGGEKIKSLKYFEDITNKLLKLKIDRKSCIIAIGGGTIGDLSGFIASTVLRGVKFILVPTTLLSQVDSSIGGKNGVNTSYGKNLVGTFYQPNKVIIDHSILNFLSKKQIISGYAEILKHAIIKNKEFYFWLKKNYKKIIKLESKYISIAIIESIKIKAHFVKIDENEVLINDNSRAILNFGHTFGHALESMNNYKRNLTHGEAISIGMCLAMKISYKMNLISNNEYNNFILHLKNVGLPIYDKRIENNTIYNVMMNDKKNTE

SEQ ID NO: 180800 - protein, 175 aa, Unknown
  Bacterial polypetide isolated from the Sargasso Sea
MKIIDVDLGSHSYPIYIGDSLLSEKQLLTQFITSKQVLVITNEKIAPLYLKVIEEHLVEHSYKTFVLPDGEPYKSLDSLNQIITTLIENKYSRTCTLIALGGGVIGDLTGFAASCYQRGVKYIQIPTTLLAQVDSAVGGKTAVNHPLGKNMIGAFHQPYCVFSDTSVLATLPDRE

SEQ ID NO: 180801 - protein, 275 aa, Unknown
  Bacterial polypetide isolated from the Sargasso Sea
GIERSDTLIALGGGVIGDLAGFISSIIYRGINFIQIPTTLLAQVDSSVGGKTAINVKQGKNLVGSFFQPKAVITDVNYLSSLSDREIKCGISEIIKYGIIGDRSFFYWLKENISKLKKLDNECLIHAIQKSCQMKADIVQKDEKEKGERALLNLGHTFGHALEKHFTKDGILLHGEAVAIGMAYAAKFSFNTGVLEQDECDMIIDLISDSGLPTSINDIKGEITKQEILNLMMYDKKRVNQKNTLILIKKIGESFINKNITDEEIIDFFDKESIQ

SEQ ID NO: 180802 - protein, 207 aa, Unknown
  Bacterial polypetide isolated from the Sargasso Sea
MKKIKLIIKTKSKNYSIFIGSNIINSIASILKLNNFSFEKCLIIYDSKVPKKKLNILKNKIKSEKKIIYLFNSSEKNKNFKNVDLILNRLFKFNFSRKDCIISFGGGITGDVSGFAASIYKRGLKFINIPTTLLAQVDSSIGGKTGVNNSYGKNLIGSFMQPDLVVSDISMLSSLPKREIICGYGEILKHSIIKNRKAFNYLKNNYS

SEQ ID NO: 180803 - protein, 156 aa, Unknown
  Bacterial polypetide isolated from the Sargasso Sea
MKIRKIIDKQPHEIEFLKIAQLEKKLINNISNSDILIFDRNIAEIGLIKKLLKRFPKRCIVIKCHEKIKNIHNYSSIIEKIIKLGVQRKTIIYSFGGGTLGDLSGFLASTILRGVEHIMIPTSLLAMVDSSIGGKTGINSKFGKNLIGTFYLPKKV

SEQ ID NO: 180804 - protein, 292 aa, Unknown
  Bacterial polypetide isolated from the Sargasso Sea
IVANRHIIIVSDKNVANLHLTRLKASFKSFARKVDHFAIIAGEASKSMTMLSRLLDDILALGVDRSVLLVAFGGGVVGDLAGFAAASLLRGVDFVQIPTSLLAQVDSSVGGKTGVNATAGKNLIGAFHQPKAVLADTSLLISLPERELRAGYAEVAKYGLLGDARFFAWLEKNSSAVLALEPNAIMYAIRKSCEAKARIVEADEREAGKRALLNLGHTFAHAFEAESGYNGSLLHGEAVAAGLGLAFDLSVDLGICAADDANRCKTHLRTVGLPSGQSDLATGNISANRLIE

SEQ ID NO: 180805 - protein, 222 aa, Unknown
  Bacterial polypetide isolated from the Sargasso Sea
MKIHKIQINTKTKKYSIFIGSNLISKINKILASQKFSFSKILIVIDKNIPFKFRSKLIKNLKTDVKKTYIFNANERNKNQKNVDLIQKILFKNRFNRDDCLIAFGGGITGDVVGYSASTYKRGIKFINIPTTLLSQVDSSIGGKTGINNSYGKNLVGSFYQPDIVISDIDILKSLKFREIICGYAEILKSSLLDSLKKFKYLDKNFKGIINLEQPIIGNAIL

SEQ ID NO: 180806 - protein, 250 aa, Unknown
  Bacterial polypetide isolated from the Sargasso Sea
FIASTVLRGLDFFLIPTTLLSQVDSSIGGKNGINTVYGKNLIGTFYQPKEVLIDISILNSLPKKEIKSGYAEIVKHALIKDYSFFCWLEKNANKLLNLNSSILEKAIHKSILIKLFYVKKDEKEFLLNNNSRAMLNFGHTIGHAIESHYNYKKFNHGEAISIGMITEAKISNYLGLLSSIELERIILHFKNCRLKTYDDILKDKLLLNKIIKDKKNFLNNINFSLIDKIGSSIFYKKLDKQKVYKILQNI

SEQ ID NO: 180807 - protein, 258 aa, Unknown
  Bacterial polypetide isolated from the Sargasso Sea
HIGENLANEIPNIISPFVKRNKIFIVCDESLGSIILPEIKNSFIEAGFEVLISLVKSGEESKSFESLELTISELLDNGIERNDAVIAIGGGVIGDLAGFISSIIYRGINFIQVPTTLLAQVDSSVGGKTAINVKQGKNLIGSFYQPKAVITDVSFLSSLSEREIKCGLSEIVKYGVIGDRDFFYWLKENVDNLTKLNQDCLIYAIEKSCSMKANIVQKDEKERGDRALLNFGHTFGHALEKHFTKNEVLLHGEAVAIG

SEQ ID NO: 180808 - protein, 219 aa, Unknown
  Bacterial polypetide isolated from the Sargasso Sea
MKSEIIKVTFSNKVDNLSYPIFVGANLIYNCEKILKKFIHNKKIILIHDKVFYKKNEINESFVAFINLIEKFTSSVNLIGISGGDKTKNISELNHIIEKSLSFEIDRDSIVIAFGGGVIGDIAGFAASILLRGINYIQIPTTLLSQVDSSVGGKTGINSRKSKNLIGSFHQPLAVIIDINLLNTLPKREFLAGLVEVIKYGLIKDDKFFHYVEENYKQI

SEQ ID NO: 180809 - protein, 235 aa, Unknown
  Bacterial polypetide isolated from the Sargasso Sea
SFSSTLLSQVDASVGGKTAINHSQGKNMIGAFHQPIKVYADLELLNSLPKVEISNGLSEVIKHALISDKKYFNWLEENIESIISLKTEALGHAITRSIEIKAEIVSKDEKEKGIRKFLNFGHTFGHSIELYGGFREFSHGQSVALGMLMAMELSKLTEGFSKEDLIKSKKLIIKANPDLNIKIAFDEKKLIENMSVDKKRAGNKIFFVLLEEIGQAKVKADIDESNIIKAIQSLV

SEQ ID NO: 180810 - protein, 289 aa, Unknown
  Bacterial polypetide isolated from the Sargasso Sea
LQRIYDFLMEKKANRGTVMVAFGGGVIGDMAGFAAATFMRGIKMIQVPTTLLAQVDSSVGGKTAVNHPLGKNTIGAFKQPDHVSIDLEFLKTLPSRELQAGYFELVKHGLTHDRELLDFLQEGKLEPLDLDFLEEAVFRSCRVKVRIVEQDETEAGLRAILNFGHTLGHLIETHCGYGTYLHGEAVGTGMLFAAFLSKQEQLLDPSSWETIREFLEPKLRSVTLPKLDYDLFSSLLLHDKKASREAVNFILLREIGSCYIQKEMPLDLIWKHFNGFCEEFPDLCQLMTD

SEQ ID NO: 180811 - protein, 315 aa, Unknown
  Bacterial polypetide isolated from the Sargasso Sea
AGILNNISEELLKIGITKNRKILVISNKEVSNLYGKKFLNNLKDNKFQAKMFLIKAGESYKNLRTLSEIYDVAFEFGLDRNSIIIALGGGIVGDVSGFAAATWLRGIQYIQIPTTLLSMVDSSVGGKTGVNHPKGKNLIGAFNQPKAVFIDPETLKSLPKREFNAGMAEVIKYGVIRDKELFEYLEIEKNKNKLINLKNEYLIKIINSSIKTKSHIVSQDEHENGVRAILNYGHSFGHVIENLCGYGKFLHGEAISIGMNIAGEIAIEKGLWSKEELERQKNLLKSYDLPTEIPKINKEDVLNILMGDKKVRDGK

SEQ ID NO: 180812 - protein, 282 aa, Unknown
  Bacterial polypetide isolated from the Sargasso Sea
MKAQKIHFKNSNKGYAILIGSNILKVLSLKIKSLCPKTKKIAVIFDKGVPSKYKRIILNNLKKYEVYIYNFNANEKTKSIKSVTSLIDKLLYKNFNRSDLILGVGGGITVDFSGFVASILKRGLNFISIPTTLLSQVDAAVGGKTGVNSKYGKNLIGSFSQPKLVISDTSFLKSLSKKEMVCGYAEILKHAVINDKKFFNWLKLNTKYIFSHHSRKLIYAIKKSCNIKLFFVNKDVNEKNLRMMLNFGHTFAHAIEVKNNYSKNITHGEAVLAGMILATKLS

SEQ ID NO: 180813 - protein, 293 aa, Unknown
  Bacterial polypetide isolated from the Sargasso Sea
KWEKQIKIKTKNQNYNIVISDGSAKKYLKKMISSNFKVFLIIDKRISGRFSNIIKKRKNVFVIRIDASEKIKSINSYWKIISFLLEKKINRNSKIIAIGGGTIGDLSGFVASTVLRGLKFTLIPSTLLSQVDSSIGGKNGINSKHGKNLIGTFYQPDKVIIDPSLLKSLPKNQLKSGYAEIVKHALINDKYFFNWLKQNYKKVLLLKRKELIYAIYKSIRIKAKFVFRDEKENLINAYSRSMLNFGHTFGHALETLNRYSSKLLHGEAISIGMVLASKYPINLKILVNSNLKK

SEQ ID NO: 180814 - protein, 244 aa, Unknown
  Bacterial polypetide isolated from the Sargasso Sea
KFINIPTTLLSQVDSSVGGKTGINTNQGKNLIGSFYQPRLVISDTNFLKSLSRREVICGYGEILKHAIISNKVFYNFLNKNFINIIKLKSPFIDKAIYESCKIKKLVVEKDEKENGMRKILNFGHTFAHAYEASSGFSKKLNHGEAVILGMNTALSFSYKNKFLNFKEYSLIKEHIYNSKLPSNLKKYFSLRDLKKILNFMTKDKKNNSDKINLVLLKKIGNPIISKKYKKTTLSLFLKKELIN

SEQ ID NO: 180815 - protein, 297 aa, Unknown
  Bacterial polypetide isolated from the Sargasso Sea
AGQQVMIVTNDTVGPLYLEKVKGCFPGKAIDVVTLPDGEQFKDWQTLNLIFDALLEKRHTRKTTLVALGGGVVGDMAGFAAACYQRGVPFIQVPTTLLSQVDSSVGGKTGINHPLGKNMIGAFHQPQAVLIDTNSLQTLPEREVSAGLAEVIKYGLIRDESFLAWLEDSMESLLRLDAEALGEAIYRSCVCKAEVVALDEREGGLRAILNLGHTFGHAIETFAGYGNWLHGEAVGTGMMMAADLSVREGLISADDRARAVALIRRARLPEWAPSGMTSEDFMNLMSVDKKNVDGRLR

SEQ ID NO: 180816 - protein, 276 aa, Unknown
  Bacterial polypetide isolated from the Sargasso Sea
SSGSLIKKKLINSRVFIITNKFIHKLYGKKLENSLKKNKINFNKIIINDGEKYKNIKTINLITSKLLKYKVDRNDTLIAFGGGVIGDIVGFSASITLRGINFIQIPTTLLSQVDSAVGGKTGVNTKEGKNLIGTFYQPKLVISDVSLLKTLPKREILSGYAEIIKYGLIMDKKFLNWLLHNESKLMAFNKKYLIEAVFHSCKNKAIIVRKDEKEKNIRAILNLGHTFGHAIEAINNYQKSLTHGEAVSIGIMMALEMSSLQGNSLNKNINKIKDHF

SEQ ID NO: 180817 - protein, 263 aa, Unknown
  Bacterial polypetide isolated from the Sargasso Sea
MKSINLNVKTKSKSYSIIIGKNIIKNISSFFKSNNINFEKILIVTDTKIPIKKLSILKKSISSKKIIIHHFKANEKNKNLKNINLILEKLFKNNFNRNDCIVSFGGGITGDVSGFAASIYKRGLQFVNIPSTLLAQVDSSIGGKTGVNNKYGKNLIGSFMQPDLVVSDVSLLHSLSKRELICGYGEILKHAIISDIKVFKYLKENFSKILKLKTPFIEKTIADSCNIKKNIVQKDEKEKNLRKILNLGHTFAHAYEATLSYSK

SEQ ID NO: 180818 - protein, 240 aa, Unknown
  Bacterial polypetide isolated from the Sargasso Sea
GACPWWHIPTTLVAQVDSAIGGKTGINLDAGKNLVGCFWQPQGVFSDIQTLSTLPDREYRSGLAEVIKYGIILDEEFFGWLEDHTDELLSRESSALMHAVSRSSALKAHVVEKDEREVTGLRAILNYGHTFAHAFEKAAGYGTLLHGEAVSIGMACAARLAHSLDRVGEDMVCRQNTLISKFQLPQSLPSLDVSKDDLITIMARDKKSVHGQLRFILPNKIGHVEMIADIHPDLVKSAIQ

SEQ ID NO: 180819 - protein, 290 aa, Unknown
  Bacterial polypetide isolated from the Sargasso Sea
MGSNIIQNISKILLKEKIYFEKCLIVLDKNIPLNFISILLKKLKTKKVVYKFKALEKNKNYKNVDKIHNILFKHKFNRTDCIISFGGGITGDVVGFSASTFKRGIKFINIPSTLLSQVDSSIGGKTGINNSFGKNLVGSFYQPDLVISDTKLLKSLPYREIICGYAEILKSSLINNKKNFDYLEKNYKNIINLQPPFIEKAIIFSCKLKKKVVEKDEKEKNYRKVLNLGHTFAHAYESTLKFSNKLNHGEAVIMGIKNAIQFSKNNKYLSKHRFNFINNHINKNWINAQI

SEQ ID NO: 180820 - protein, 216 aa, Unknown
  Bacterial polypetide isolated from the Sargasso Sea
MKTLQVKLPGRSYNIDIGFNILQTRLPKVVLKQNTDLVVVVTNQTLQNLYPDHIKCILENSGIQVAACVLPDGEQYKNLDSLSKIFDFLMKVSANRKTLLIAFGGGVIGDMAGFAAATFVRGISYIQIPTTLLAHVDSSVGGKTAVNHPLGKNSIGAFKQPEYVCIELSFLKTLSSRELNSGYIELLKHGIIHDEELFDFVQINSLEPLDFEFLED

SEQ ID NO: 180821 - protein, 289 aa, Unknown
  Bacterial polypetide isolated from the Sargasso Sea
MNYINKILDILLNKNFSRDDCLISVGGGITGDIAGFAASLFKRGMKFINIPTTLLAQVDSSIGGKTGVNSKYGKNLIGSFYQPDLVISDIKFLKTLPKREVVCGYGEILKHSLIANRNFYNFLNKNSSKILNLYSPFIEKAIYESCKIKKKIVEKDEKEKGLRKILNFGHTFAHAYEASLGYSKRLNHGEAVILGLQSALNFSLANNFIKKNEHDLIINHIHDAKLPSDINKFFKKKDLNKILSFMSKDKKNKTNKISLVLLKKIGSPIINKEYKKKSLGLFLKSQLSN

SEQ ID NO: 180822 - protein, 182 aa, Unknown
  Bacterial polypetide isolated from the Sargasso Sea
MVTYSNGVCPIYSGWDIYADIPKIFSQLNIQGNLFLISDRNVYSLYGEEVEKFIASTGKKVFSHELEPGEHNKTFDSISNVYSWLAESKAQRRDTIVALGGGVVGDMAGFVAATYNRGLGFIQIPTSLAAMVDASVGGKTAVDLPEGKNLVGAFYQPKVVIADVSTLKSLPHRETMEGWAEA

SEQ ID NO: 180823 - protein, 193 aa, Unknown
  Bacterial polypetide isolated from the Sargasso Sea
MKKVTVPLDTRSYDILIGEDLIPYFPIHLEGILTRNFLAIITDKNVEKTHLSRLVKALSASGIETKILSIDPGEGSKSWKTLQMTVDWMLANKIERNDIVVALGGGVVGDLVGFAAAILRRGIRFIQCPTSLLAQVDSSVGGKTGINSVHGKNLVGAFYQPSQVISDISTLHTINERDFLAGYGEVVKYGLLG

SEQ ID NO: 180824 - protein, 222 aa, Unknown
  Bacterial polypetide isolated from the Sargasso Sea
KILDILLKENFSREDCLISIGGGITGDISGFAASLFKRGLKFINVPTTLLSQVDSSIGGKTGVNTKYGKNLIGSFYQPHLVVSDIQFLKTLPKREIICGYGEILKHSLIADKKIFNYLDRNSEKILSLTSPFIEKTIYESCKIKKNVVEKDEKEKGLTKILNFGHTFAHAYEASLGYSKRLNHGEAVILGMKTALNFSLKNNLLKNEEYNLIINHIGNSNLP

SEQ ID NO: 180825 - protein, 261 aa, Unknown
  Bacterial polypetide isolated from the Sargasso Sea
MCPNTKKIAVIFDKNVPNTFKTKIKKLLKKYKIFIKDYSPSEGLKNFLNVNILIEYLIKNKFNRNDLVIAVGGGIIGDFSGFVASIFKRGINFINVPTTLLAQVDSAIGGKTGVNSKTGKNLIGSFYQPKLVISDISFLKSLPKREFICGFGEILKYSLIKDQKFFNFIKKNSKQILKGSDLDILKYLVLRSSRNKVYFVVADEKESNKRMILNFGHTFAHGIESTNKFSKKINHGEAVLIGMLLATKLSFYKNICSLKTV

SEQ ID NO: 180826 - protein, 154 aa, Unknown
  Bacterial polypetide isolated from the Sargasso Sea
IKDYLPNALSKNNKILIISDKNIPTSYIELVRKFIPSSKVIDVLKIKPGEQSKSFSNFQMILNKLGKKKYDRSDCIVAIGGGVVGDLSGFVAASYMRGIDYIQMATSLLAQVDSSVGGKTAINIESGKNLVGAFKNPKLVLISSALLKTLPERE

SEQ ID NO: 180827 - protein, 309 aa, Unknown
  Bacterial polypetide isolated from the Sargasso Sea
RQVVIISNPVVAGLYLPAVTALFPDSTVHSFILPDGEAYKTLHSFEQVMSFLLEHKVNRDVLLVALGGGVIGDLTGFVAACYQRGVRFIQIPTTLLSQVDSSVGGKTAVNHPLGKNMIGAFKQPDLVLINTSVLSSLPASEFAAGMAEVIKYALISDLAFFNWLEQNQQAIRELQPAVLGEMIQHCCQMKADIVSRDETEQGERALLNLGHTFGHAIEAFLGYGQWLHGEAVAVGMVMASQLAVSRGALNHEELQRIMGLLSAFDLPVAPPAQMSIADFMPYMKTDKKVQAGQNALYCSYGSGTKCNSR

SEQ ID NO: 180828 - protein, 298 aa, Unknown
  Bacterial polypetide isolated from the Sargasso Sea
KIKIVCPKVRKISLIFDTKVPKNFRKKIFQNLKKYDLLNYNLNANEKTKSIDTVNKIINKLLAENFNRSDLIIGVGGGVTGDLAGFVASIYKRGINFINLPTTLLSQVDAAIGGKTGVNSKHGKNLIGSFYQPKLVLSDITFLKSLPKKEIVCGYAEILKHAIIFDKKFFEWLKLNTKYILDKNFGKLIYAIKKSCKIKLFFVNKDTNERNQRMILNFGHTFAHAIEVKNNYSKTTTHGEAVLAGIILATKLSVIKNVCNLKILKELISIYQKNNLNYTIKKYSNLKNITNLNPIFEK

SEQ ID NO: 180829 - protein, 264 aa, Unknown
  Bacterial polypetide isolated from the Sargasso Sea
MKEIKFNNNKQKYSIIIGKNSLNQLSKRIKFLCPGTKKIALIIDKKVPKKFKKQILKSLKNYELISLSFNANEKAKSINSVNLLLNKLLKKNLNRSDLIIGIGGGITGDLSGFVASIFKRGINYISIPTTLLSQVDAAIGGKTGVNSTQGKNLIGSFFQPKLVINDISFLKSLNKKEIICGYAEILKHAIIKDSIFFKWLRKNTKNVFSLNQKDLIYAIKKSCEIKLHFVNKDTNEKKIRMTLNFGHTFAHAIEVKNNFSKKIT

SEQ ID NO: 180830 - protein, 264 aa, Unknown
  Bacterial polypetide isolated from the Sargasso Sea
KNLKSVNKILAKLFKFNFNRNDCIISIGGGITGDVSGFAASIFKRGLKFINIPTTLLSQVDSSIGGKTGVNNEYGKNLIGSFMQPDLVISDISILKSLPKREIICGYGEILKHSLIKNKNTFKYLDKNYLKIINLKSPFIEKSIADSCKIKKNIVEHDEKERNLRKILNLGHTFAHAYEATLSYTKKLNHGEAVILGIISAAKFSFEKNILNKNDYNQIINHTKNLKIPLYLKYYFKKNDINKIIKYMKADKKNNSSKNKFNFN

SEQ ID NO: 180831 - protein, 297 aa, Unknown
  Bacterial polypetide isolated from the Sargasso Sea
LLYKKLKTNKLFKVEISASEKNKNYRTIEKIHTILFKNRFNREDCIISFGGGIIGDIVGFASSTFKRGMKLINIPSTLLSQVDSSIGGKTGVNNKFGKNLIGSFYQPDLVVSDMNILASLPEREIICGYAEILKSSIIDSFNNFLYLDKNLKKILKLESPFIERSIIKSCNLKKRVVETDENEKNYRKVLNLGHTFAHSYESTLGFSRKLNHGEAVILGIKNAVEFSFKRGILSKQKFNIILNHINRIEMKPKIEKLFKKKHVSKIMNYMRSDKKNNSNNINLILIKDFGKIIVDFQ

SEQ ID NO: 180832 - protein, 300 aa, Unknown
  Bacterial polypetide isolated from the Sargasso Sea
KKNYEIKKIFLFNFNANEKNKNQTTINSILEILLNKNFSREDSLLAIGGGITGDVGGFAASLFKRGLHFVNIPTTLLAQVDSSIGGKTGVNSKYGKNLIGSFYQPKLVISDIDTLKTLNKREIVCGYGEILKHSIISKKKFFKYLDQNFDNIIKLKSPYIERAIFESCKIKKDVVEKDEKESNLRKKLNFGHTFGHSFEASLGYSKRLNHGEAVILGMMVALKFSNKNKFLNSNDYKLISDHYKNSKLPSNIKKYFKRKDLDKIIKFMKTDKKNNSDKIKKVLLKKMGQIILNQEYSVKN

SEQ ID NO: 180833 - protein, 206 aa, Unknown
  Bacterial polypetide isolated from the Sargasso Sea
MQQIQVQLGDRSYPIYIGQNLMSDGELFTRYLQHKKVLIVSNDTIAPLYLKQVQQAMSACTSIETVILPDGEQYKDLQHLDLIFSGLLEHNFARDSVLVALGGGVVGDMTGFAAACYQRGIDFIQVPTTLLSQVDSSVGGKTAVNHPLGKNMIGAFYQPKSVIIDTLCLQTLPAKEFAAGMAEVIKYGIIWDNDFFQWLEQNVESL

SEQ ID NO: 180834 - protein, 223 aa, Unknown
  Bacterial polypetide isolated from the Sargasso Sea
MKIDKIVVKNKSINYPIIVGNGAISLLKKQVSRLCPHTKKVAIVFDKNVPNIFKIKIKKLLNKYKIFFKDYSPSEELKNFQSVNNLIEYLIKNKFNRNDLVVAVGGGIIGDFSGFAASIFKRGLNFINVPTTLLAQVDSAIGGKTGINSKTGKNLIGSFYQPKLVISDLSFLKTLPKREFICGFGEILKYSLIRDKKFFNFIKKNSKEILNGRNYDILKYLVL

SEQ ID NO: 180835 - protein, 105 aa, Unknown
  Bacterial polypetide isolated from the Sargasso Sea
MILEDGESTETEKTWSTIIDKLIDMKANRDTTIIALGGGVIGDIAGFAAATYMRGLPFIQIPTSLLAQVDSSVGGKAGINHPKGKNLVGSFYQPIAVVSDIDTLK

SEQ ID NO: 180836 - protein, 267 aa, Unknown
  Bacterial polypetide isolated from the Sargasso Sea
MSNKIKVDLGNNSYNVSLIESFKNSVVKFASSTKSQCMLITQQEILNLYKDEIDELSNLPNVNIFLIDQGEKAKSFESISLIVNEMSKKHFDRSSLVFAVGGGVVGDVGGFASSIFMRGIKYIQYPTTLLAMVDSAIGGKTGINLKDGKNLVGRIYQPIAVEIDTNFLSTLPDRELQAALAEVVKYGFIYDREFFDFVVANSTEIQNKDIDVLQKIIIQCCEIKSDIVSEDENENELRMILNFGHTVGHAIESFTDYKNLLHGEAIF

SEQ ID NO: 180837 - protein, 251 aa, Unknown
  Bacterial polypetide isolated from the Sargasso Sea
ASILLRGIDFIQIPTTLLAQVDSSVGGKTGINSTKSKNLIGSFHQPIAVIADIDILKTLPKREFLAGLVEVIKYGLIYDVRFFDTLENNYKDILNYDQLKLNEVISKSCEIKSLIIKDDEKENGKRALLNLGHTFGHAIESFGKYDGTIIHGEAVSIGICLAFKLSSKMGYCPYIETERVVSFFKKLNLPTSLQEVQNLPISTSEMLKKFKYDKKNKNNQLTFILNEKIGKSFIKNNMDENILTKFLNDEI

SEQ ID NO: 180838 - protein, 265 aa, Unknown
  Bacterial polypetide isolated from the Sargasso Sea
KSNSIDFNKCLIVVDKNVPKKLVSNIKKSLKNKSIFVLFFNASEKNKNINSVNKILEVLLNKNFSRNDILISLGGGITGDVSGFAASLFKRGIKFANIPTTLLAQVDYSIGGKTGVNSKYGKNLIGSFYQPSLVLSDIQFLKSLSKREIICGYGEILKHSLIENKKFFIFLNKNLKKILSISSPFIEKAIYESCKIKKKIVEKDEKETALRKVLNFGHTFGHAYEAGLGYNHKVNHGEAVILGMKTALNFSLRENMLSKNEYNLI

SEQ ID NO: 180839 - protein, 208 aa, Unknown
  Bacterial polypetide isolated from the Sargasso Sea
MIINKIKVKTKTKKYLILIGPNIIKNISSIFSNQKMSFEKCLVVVDKNIPKKFQLNLLKKLKLKKLLIHKFNASEKNKNYKNVDKIHKILLKNRFNREDCLISFGGGIVGDVVGFASSTYKRGIKFINIPSTLLAQVDSSIGGKTGINNQFGKNLIGSFYQPDLVISDTSLLTSLPQREIICGYAEIFKSSLIDNYKNFNFLNKNIYK

SEQ ID NO: 180840 - protein, 230 aa, Unknown
  Bacterial polypetide isolated from the Sargasso Sea
MTILSAGRGTTKYNIHIYDKKLPKNAIDNHIGKNNKILIITDSGVPKKFLDELKKNIKNNNLYFLILQNGERSKSFITYQKIINKLIQYKFDRSDLLIAFGGGVVGDITGFVASSYLRGIKYIQIPTTLLAQVDSSVGGKTAINVKEGKNLIGAFYNPHLVLISTYFLSTLSEREFKSGLGEVVKYALIGNKKLKKIIEKNPIEIIQRKSSILKVIIEESIKTKSKIVTQ

SEQ ID NO: 180841 - protein, 245 aa, Unknown
  Bacterial polypetide isolated from the Sargasso Sea
MKDYKLVINTKTKKYPIYIGYNILKSSNKIFKNNKLDIKKCLIVVDKNVPKKNVLILKKNIKSSKVFIHYFNSNEKNKSLKYVNSILAILFKYNFNREDYIFALGGGITGDLVGFVASIFKRGIKFINVPTTLLSQVDSSIGGKTGVNNIFGKNLIGSFYQPELVISDVKILSSLNKREIICGYGELFKHSVISKKSSFNYLNKNKFKILDLKTPFLEKAIYESCKIKKNVVEKDEKEKNLRKIL

SEQ ID NO: 180842 - protein, 221 aa, Unknown
  Bacterial polypetide isolated from the Sargasso Sea
MIFGCGKTAINAKQGKNLIGSFYNPKFVLISTHFLKTLPENEYKSGLGEVIKYGFIGNKKLKKIIETNAKKIIIRDEKILKLIIEESIKTKSNIVTKDEKETGIRAILNFGHTFGHAIEAYNGFKNITHGAAITLGMVIASKISYFEGHIKDYQLDNVINTIDSLGLNTDHKKYKYSHLKKYITSDKKVADGKINLVLIDKKFNAFKTSKFSHRNIIKALG

SEQ ID NO: 180843 - protein, 208 aa, Unknown
  Bacterial polypetide isolated from the Sargasso Sea
MNKLIVKTNNKNYPIYVGNHILKNLGKILVNEKINFRKTLILVDRKIKKKFIKQTLNSLKNKENYIIRFKSTEINKNINEVEKIINFLLSKNFSRHDCVISMGGGILGDLTGFVSSIYKRGIKFINIPTTLLSQVDASIGGKTGVNQKKFGKNLIGSFYQPELVLSDTEFLKTLNRKELICGYGEILKHSLLQGTTNFSYLDKNFNNI

SEQ ID NO: 180844 - protein, 251 aa, Unknown
  Bacterial polypetide isolated from the Sargasso Sea
MGENILRILPKKIKSLCPRTKNIAIILDDNVPGKFKNKLRNLLKNYKILFLSFNANERNKSLNVVNNYLNNLLSKNFNRSDLIISVGGGITGDVVGFLSSIFKRGINFINIPTTLLAQVDSAIGGKTGVNSSYGKNLIGSFYQPKLVISDTSFISSLPKKEMICGYAEILKHSIIKDKKFFNWLEKNSKSILAKKKKELTYAIKKSCEIKIYFVNKDVNEKNLRMILNFGHTFAHAIEVKNSYSKNISHGE

SEQ ID NO: 180845 - protein, 158 aa, Unknown
  Bacterial polypetide isolated from the Sargasso Sea
MKQKIIKVKTKSKNYEVHIGTNLIPKLKNILKKNKVLFSKCLIVIDSKIPKKFITLLLRNLKNQKIYTLNFNANEKNKNYLSIDKIHNVLFKNNFYREDCIISFGGGITGDVVGYAASTYKRGIKFINIPSTLLAQVDSSIGGKTGINNKFGKNLVGS

SEQ ID NO: 180846 - protein, 261 aa, Unknown
  Bacterial polypetide isolated from the Sargasso Sea
FNFNRNDCIISLGGGITGDISGFAASIYKRGIKFINIPTTLLAQIDSSIGGKTGVNNKYGKNLIGSFMQPDIVLSDISFLKSLPKRELICGYGEIIKHAIISNKNIFNYLDKNIYNILKLKSPFIEKTIADSCRVKKDIVEKDEKEKNLRKILNLGHTFAHAYEATSNYSKKLNHGEAVILGIISSAKFSYTNKLLKKKDYEKIFNHIKKLNFPLNLNNYFKKKDVNLIIKYMKSDKKNISSKINLILIKKIGKIILDLRF

SEQ ID NO: 180847 - protein, 265 aa, Unknown
  Bacterial polypetide isolated from the Sargasso Sea
MKISKLIIKSSSGKYPILIGSNVISNISKLMFNNSINFEKCLLVVDKNVPKKFISKIRKSLRSKKLFIFLITANEKNKSQKTTNTILQILLDKNFSREDCLIAVGGGITGDVSGFASSLFKRGLKFVNIPTTLLSQVDSSIGGKTGINTNQGKNLIGSFYQPRLVISDTNFLKSLNKREIICGYGEILKHAIISNKVFYNFLNKNFFNIIKLKSPFIDKAIYESCKIKKLVVEKDEKEKGMRKILNFGHTFAHAYEASLGFSKKL

SEQ ID NO: 180848 - protein, 259 aa, Unknown
  Bacterial polypetide isolated from the Sargasso Sea
IGDLSGFVASIILRGVNIVHFPTTLLAQVDSSIGGKTGVNNKIYGKNLIGTFFQPKLVICDTSFLKTLPKREIISGFAEVIKYGVLFDKKFFTWLENNFEKILKNDQSKLTYLINKSVRIKSYFVSKDEFDKKDRRALLNLGHTFAHSLEKCAGYSRNLLHGEAVAIGICMASRLSLKLGYLSIKDYQRIELLLKNFGLPTNLDYLKTLKDKKNNIIKNMSNDKKVLKGKLNFVLCRSIGKAFVYKKEININLLKKTIL

SEQ ID NO: 180849 - protein, 213 aa, Unknown
  Bacterial polypetide isolated from the Sargasso Sea
GNHPLGKNMIGAFYQPVYVAIDTDSLATLPPREFAAGMAEVIKYGIIYDAPFFKWLEENVNALTSLDTEILTYAISRCCEIKADVVAKDEREGGLRAILNLGHTFGHAIEAEQGYGNWLHGEAVAAGTILACKAAEGLSWFSASETRRVSALFEAFALPVKGPSSMTKDDYVKHMKRDKKVEAGNIRFVLPQGIGKAVVTKDVTDDILTDIIA

SEQ ID NO: 180850 - protein, 240 aa, Unknown
  Bacterial polypetide isolated from the Sargasso Sea
MIKKVLVGDEKYKVLIGKNKIFKDYLPSAVSKNNKIFIITDKNIPTAYIELIKKSIPSNKVTDLIKIKPGEESKSFTNFQMILNKLAKKKYDRSDCIVAIGGGVVGDLSGFVAASFMRGIDYIQIPTSLLAQVDSSVGGKTAINIESGKNLVGAFKNPKLVLISSALLKSLPEREFKSGIAEIIKYGLIYNKKIFNIFDKQHKQILKRNQRVIEELIHESVKTKAKIVTEDERELGIRAI

SEQ ID NO: 180851 - protein, 331 aa, Unknown
  Bacterial polypetide isolated from the Sargasso Sea
MSKIAAGKGDTKYNIYISNKISKRTLNQYLKTYNKLLVVTDSGIPKEHLKNLKSNINNKNVYFFTLPMGENSKSFSLYQKIINELVKFNFDRTDALIAFGGGVVGDITGFVAATYLRGICYIQIPTTLLAQVDSSIGGKTAINIPQGKNLVGSFNNPKCVFISTYFLNTLPQKEFNSGLGEIVKYALIGNRKLKKLIENNPQQIKDKKESILRIIIEESIKTKSKIVTRDEKESGVRAILNFGHTFGHAIEAYNDYKNISHGAAITLGMIIASKLSFYEGHIRDYQLDNVINIVDSLGLNSDHRKYNYFKLKKFMANDKKVSKGKLNFIMI

SEQ ID NO: 180852 - protein, 360 aa, Unknown
  Bacterial polypetide isolated from the Sargasso Sea
MERLKVELGERSYPIEIAAGLLQHAEVLTQTIKGKRVMIVTNTVVAPLYLERIAQLLSGYQVEHLILPDGEAYKTLATFERIMSALLETNHGRDTTLIALGGGVIGDVVGFAAASYQRGIPFIQVPTTLLSQVDSSVGGKTAVNHPLGKNMIGAFYQPRHVVIDTECLQTLPTREFAAGMAEVIKYGIIWDVEFFCWLEANMSRLQAQEPAALAYAIRRCCEIKADVVGQDETEHGVRALLNLGHTFGHAIEAEKGYGNWLHGEAVAAGTMLAANTALARGDVTEQQVDRIRALLLAANLPVTAPPEMDFAAFIRHMRRDKKVLEGKLRLVLPVGIGHAQVVADVSDAELLAVIESGRDE

SEQ ID NO: 180853 - protein, 368 aa, Unknown
  Bacterial polypetide isolated from the Sargasso Sea
MKQTRLNILTKTEKYPIIIGSNLTLSVSKIFKSNSIDFDKCLIVVDKNVPKKFVSNIKKSFKNKNIFVLFFNPSEKNKNIKSVNKILEVLLNKNFSRNDVLISLGGGITGDVSGFAASLFKRGLKFANIPTTLLAQVDSSIGGKTGVNSKYGKNLIGSFYQPSLVLSDIQFLKSLSKREIICGYGEILKHSLIENKKFFIFLNKNLKKILSLSSPFIEKAIYESCKIKKKIVEKDEKETALRKVLNFGHTFAHAYEAGLGYSYKLNHGEAVILGMKTALSFSFKENMLRKSEYNLIINHIDNSGLPSSIKKYFSIKDLNKILSFMIKDKKNNSKKINLVLLKKIGKPIFNKQYSKKKINLFLKKFLTN

SEQ ID NO: 180854 - protein, 356 aa, Unknown
  Bacterial polypetide isolated from the Sargasso Sea
MRTLTVNLEDRSYPIYIGAGISLKDELYSKHINANKIALITNEEIADLYLSEISQTLTLFDLKVLVLPEGESEKNLETVQKAVEFLSDNEIDRKASIIALGGGVVGDITGFVASSYMRGINFLQVPTTLLAQVDSSVGGKTGVNTKKGKNLIGAFYQPSAVIADTRFLKTLEPQRFSEGLAEVIKYGLIRDLDFFEWLEVNTSKILALEPKVMTHLIERCCQIKAEIVSEDEREGSVRAILNFGHTFGHAIESLTDYSVYSHGEAVAMGMVMASNMSHKMDMLSSEDKKRITNLIKSMNLPTNKPDLDKNDFFESMRRDKKTQDGQIRLILLESIGRAMIASDYPKELLMKTILES

SEQ ID NO: 180855 - protein, 265 aa, Unknown
  Bacterial polypetide isolated from the Sargasso Sea
MAKEIFAGKNDKKYKIIISANAISKKNLGPLLKEHNKALIISDNGVPLNITRKVTYISKAFSKVFSVTLTKGEQAKSIQNFQKILDLLAENNFDRTDAIIAVGGGVVGDIAGYVASSYLRGVQFIQIPTTLLAQVDSSVGGKTAINISAGKNLVGAFYNPKGVIIDTSVLTSLPQREYRAGLAEVVKYALIKNKYLFTLLKENVQKILLMDKKIIEEVIFESIKTKAEIVTKDEKENGLRAILNFGHTFGHAIEAHGNYKKILHG

SEQ ID NO: 180856 - protein, 259 aa, Unknown
  Bacterial polypetide isolated from the Sargasso Sea
MAKELFAGQNESRYKIIIGKNTISKKNLFYLLKEHNKVLIITDNGVPLKIKNKVTSICKAYSKVLAISLKQGERAKSIQNFQKIQNFLANKNFDRSDAIIALGGGVIGDISGYVASSYLRGIKFIQIPTTLLAQVDSSVGGKTAINILAGKNLVGAFYNPKGVIIDTMVLDSLPAREFKAGLAEVIKYALIKNRYLFSLLRENSKEIRSMGNKLIEEIIFESIKTKAKIVSMDEKENGIRATLNFGHTFGHAIEADGKY

SEQ ID NO: 180857 - protein, 260 aa, Unknown
  Bacterial polypetide isolated from the Sargasso Sea
MNTNKISIKTSTKSYQIVIGRDLISKIDKILKANHLKFDKCLIVTDKNIPQKFKRILYKKLKINKLIKIEITASEKNKNYRTIEKIHTILFENRFNREDCIISFGGGIIGDIVGFASSTFKRGMKYVNIPSTLLSQVDSSIGGKTGVNNKFGKNLIGSFYQPDLVVSDMNILASLPEREIICGYAEILKSSIIDNFNNFLYLDKNLKKILKLKSPFIEGSIIKSCNLKKRVVEKDENEKNYRKVLNLGHTFAHSYESTLG

SEQ ID NO: 180858 - protein, 265 aa, Unknown
  Bacterial polypetide isolated from the Sargasso Sea
MKNQEIKFNNSNYKYSIIIGKGILGILSKKIKKLCPKVKKIAIIIDKKVPNKFKIILKKNLKNYNVTFLIFNSSEKSKSFYSVNYFINKLLQINLNRNDLIISVGGGITGDVVGFVASIYKRGIDFINIPTTLLAQVDSAIGGKTGVNSKQGKNLIGSFYQPKLVLSDTNFINTLSNKEMICGYAEILKHAIIKDKNFFKWLQKNSPKIFLKHPKVLTYAIKKSCIIKVYFVTKDVNEKGLRMKLNFGHTFAHAIETKNNYSKNF

SEQ ID NO: 180859 - protein, 338 aa, Unknown
  Bacterial polypetide isolated from the Sargasso Sea
MRTLNVNLEDRSYPIYIGSDVSLDNKLYSKHIKTKKIALITNEQIADLYLSEITQTLNAFDLKTLILPEGEAEKNLETIGKAVEFLSDNGIDRDSSIIAFGGGVIGDITGFVASSYMRGIKFLQVPTTLLAQVDSSVGGKTGVNISTGKNLIGAFYQPSAVIADIRYLNTLEPNRFSEGLAEVIKYGLIRDEDFFAWLGNNTDRILALEPEVMAHLIERCCQIKAEIVSEDEREGSVRAILNYGHTFGHAIESLTDYSVYTHGEAVSIGMVMAASMAERMGMLSQEDKKDITSLLESVSLPTRKPDLNSNDFLESMKRDKKVQDGGIRLILLESIGKA

SEQ ID NO: 180860 - protein, 311 aa, Unknown
  Bacterial polypetide isolated from the Sargasso Sea
MAEAFFGGLDVTFFEIEDGEQYKSFQTYRAVIDFLVSKEFDRTLNLVALGGGVVGDLCGFVSATYLRGVNFIQIPTTLLAQVDSSVGGKTGINHPAGKNLIGAFYQPSAVLIDPDVLLSLPKREYVAGLAEVIKYGLIYDQDFFSWIESNASNLASREIPAVATAITRSCEIKAEIVSLDERELGIRAILNFGHTVGHAIETVSGYGTWLHGEAVSIGIEMACSLSHKMGLIELDVLERIRRTLIDLGLPIAASNLSDSDVDRLVDTIRLDKKVKDGLLTFILILEIGKVKIETGVSEKSVREVLIQALSN

SEQ ID NO: 180861 - protein, 338 aa, Unknown
  Bacterial polypetide isolated from the Sargasso Sea
GIGKELTQVGINKDRKILIVSNKEISKLFGEKILNNLKKYNFNAEILNIKAGESNKNLASLSEIFNAAFEFGLDRNSLMIALGGGIVGDVTGFAAATWLRGIEYIQIPTTLLSMVDSSVGGKTAVNHPKGKNLIGAFYQPKAVFIDPETLTTLPTREFKAGMAEVIKYGVIKDKSLFEYLENKNNRDKILNLENESLIKIINKSIKTKACIVSEDEKENGIRAILNYGHSFGHVIENLCGYGEYLHGEAISIGMKIAGDIATEKNLWPKEHSSRQDHLIESYGLPTQTPKIKKNEVMKILMGDKKVRNGKMRFILPIKLGEVDIFNDINETQFLKYFD

SEQ ID NO: 180862 - protein, 256 aa, Unknown
  Bacterial polypetide isolated from the Sargasso Sea
MQVFTKEELILISIPSTLLAQVDSSIGGKTAVNSVGGKNLIGTFYQPKLVLSDLTLLKSLSKRNLVCGFAEILKHSIIKDGKFFNKLDKDKNKIFENFNFNVLSEIIFKSCKIKLSFVNKDEKEQNERMILNFGHTFAHGIEAANKYSGKINHGEAVLIGMILATRLSFIKKVCSKQTLDKIEKLYLNQKLLKKFLNFLNINNLNKIVNFMEVDKKNYGKKINLILLKRIGKTTKPGQYRFSPQEMKKVLKKIIRF

SEQ ID NO: 180863 - protein, 370 aa, Unknown
  Bacterial polypetide isolated from the Sargasso Sea
MRTLPVELSGREYKIEIGVGNLRDSLLSVIRKFDLERVVTVTNSTLEQFYPAQINKLLEPEGYQNDTCILPDGEEYKNLETLQRIYDFLMEKKANRGTVMLAFGGGVIGDMAGFSAATFMRGIKMIQVPTTLLAQVDSSVGGKTAVNHPLGKNTIGAFKQPNHVIIDLEFLKTLPSRELQAGYFELAKHGLTHDRELLDFLQEGKLEPLDLDFLEEAVFRSCRVKARIVEQDETEAGLRATLNFGHTLGHLIETHCGYGTYLHGEAVGTGMLFAAFLSKQEQLLDQTSWETIREFLEPKLRSVTLPKLDFDLFSSLLLHDKKASREAVNFILLREIGSCFIQKEMPLDLIWKHFTVFCKEFPNLCQLTTD

SEQ ID NO: 180864 - protein, 355 aa, Unknown
  Bacterial polypetide isolated from the Sargasso Sea
MRTLKVNLEDRSYPIYIGSDVSLNNEIYSKHISSNKIALITNEQIADLYLSEISQTLNAFDLKTLVLPEGETEKNLETVGKAVEFLSDNGIDRDSSIIAFGGGVIGDITGFVASSYMRGIKFLQVPTTLLAQVDSSVGGKTGVNINTGKNLIGSFYQPSAVIADTRYLNSLEPNRLSEGLAEVIKYGLIRDEDFFKWLSKNTSRILALEPEVMTHLIERCCQIKAEIVSEDEREGSIRAILNYGHTFGHAIESLTDYSVYTHGEAVSIGMVMAASMAERMGMLSQADKTDITNLLESVNLPTKKPDLNSNDFLESMKRDKKVQDGEIRLILLESIGRAVISNDYPNEILMETISE

SEQ ID NO: 180865 - protein, 272 aa, Unknown
  Bacterial polypetide isolated from the Sargasso Sea
MTKTKTITINLDRNSYDIHIGENLANEIPNIISPFVKRNKIFIVCDESLGSIILPEIKNSFIEAGFEVLVSLVKSGEESKSFESLEITISELLDNGIERNDTVIAIGGGVIGDLAGFISSIIYRGINFIQVPTTLLAQVDSSVGGKTAINVKQGKNLIGSFYQPKAVITDVSFLSSLSEREIKCGLSEIVKYGVIGDRDFFYWLKENVDNLTKLNQDCLIYAIEKSCSMKANIVQKDEKERGDRALLNFGHTFGHALENTLQKMRYFCMEKL

SEQ ID NO: 180866 - protein, 359 aa, Unknown
  Bacterial polypetide isolated from the Sargasso Sea
MTKQIQVDLGERSYPIYIGQSLMSDGETLSRYLLKKRILIVTNETVAPLYLKQIQDTMASFGEVTSVILPDGEQFKDLTHLDSIFTALLQRNYGRDSVLVALGGGVIGDMTGFAAACYQRGVDFIQIPTTLLSQVDSSVGGKTAVNHPLGKNMIGAFYQPQIVIIDTECLQTLPAREFAAGMAEVIKYGIMWDAEFFQWLENNVQALKSLDTQALVYAISRCCEIKADVVSQDETEQGVRALLNLGHTFGHAIEAEMGYGNWLHGEAVAAGTVLAAQTAKSMGLIDESIVRRIVQLFHAFDLPVTAPESMDFDSFIKHMRRDKKVLGGQIRLVLPTAIGRADVFSQVPESTLEQVICCA

SEQ ID NO: 180867 - protein, 370 aa, Unknown
  Bacterial polypetide isolated from the Sargasso Sea
MTETKKIKINLDEESYDIHIGVNLSDEIPNIVSELTSRNKIFLICDESLGSLILPQVKNSLSKAGFEIFVCFVKSGENSKSFEILEKTIAELLNNGIERSDTLIALGGGVIGDLAGFISSIIYRGINFIQIPTTLLAQVDSSVGGKTAINVEQGKNLVGSFFQPKAVITDVNYLSSLSDREIKCGISEIIKYGIIGDRSFFYWLKENISKLKKLDNECLIHAIEKSCQMKADIVQKDEKEKGERALLNLGHTFGHALEKHFTKDGVLLHGEAVAIGMTYAAKFSFNIGALEQDECDMIIDLISDSGLPTSINDIKGEITKQEILNLMMYDKKRVNQKNTLILIKKIGESFINKDITDEEIIDFFDKESIQ

SEQ ID NO: 180868 - protein, 368 aa, Unknown
  Bacterial polypetide isolated from the Sargasso Sea
MKPIKLIIKTNSEKYPIFIGKNLITKISSLMVNNSIKSKKCLLVVDRKVPKKFISEIKKKLRNKKIFLFNFNANEKNKNQTTINSILEILLNKNFSREDSLLAIGGGITGDVGGFAASLFKRGLYFINIPTTLLAQVDSSIGGKTGVNSKYGKNLIGSFYQPKLVISDIDTLKTLNRREIVCGYGEILKHSIISRKKFFKYLDQNFDDIIKLKSPYIEKAIFESCKIKKDVVEKDEKESNLRKKLNFGHTFGHSFEASLGYSKRLNHGEAVILGMMMAVKFSNKNKFLNINDYKLISDHYKNSKLPSDIKKYFKSKDLDKIIKFMKTDKKNNSDKIKLVLLKKMGQTILNQEYSVKNLNGFLKNELID

SEQ ID NO: 180869 - protein, 366 aa, Unknown
  Bacterial polypetide isolated from the Sargasso Sea
MRTIEVNLDKDPYKVLYSDIQQGIQTIQAESIKGRKIAVISDNDAANNNLDALKKALSRYDIKLIEIILSPGEKNKELMIAESIIDKLLSKKFERGDLIIGLGGGVIGDLSGFVASIIHRGVKFINIPTTLLAQVDSSIGGKTGVNSKYGKNLIGCFKQPELVVCDINSLSTLPKRDLLAGYAELIKHALIGDAELFSYLQNNVKNIFNDHTILQEAIHRSALVKADIVMEDTHEKNIRAQLNLGHTYGHAIESFYKYDGRLLHGEAISIGIIMAFKTSLRLGLCQADHLHIVEDHFNKIGLLTHLKSLNGKKILPEKIIDLMRNDKKVTNGTINLVLPREIGRVEIRNDVNENVIQDVLHETLHL

SEQ ID NO: 180870 - protein, 368 aa, Unknown
  Bacterial polypetide isolated from the Sargasso Sea
MKNNKIIISTVNSKYEILIGSNLINKLDKILKSKLPKSEKYLIIFDSKVPFKMIKKLKQKIKKKVILYKFSSSEKNKDQHNVNKLLTVMQKYNFNRNDSLIAVGGGVVGDVSGFAASIFKRGLKFINIPTTLLAQVDSSIGGKTGINTSFGKNLIGSFYQPNLVIADIDFLKSLPKREIICGYAEIFKHSIISDKKFFNFLLKNFDKIIKLKQPFINKAIYKSCLIKKRIVEKDEKEKNLRKTLNLGHTFAHSYEAAYKYSKKLNHGEAVLLGINSASEFSLKEKFLNLREHDLIIKHIYAIDKSLNLKNYFSRKDVSKLLEFMKNDKKNNSNKINLILIKKIGNVTYNNFFDLNKISKFLRLQFYNI

SEQ ID NO: 180871 - protein, 353 aa, Unknown
  Bacterial polypetide isolated from the Sargasso Sea
MIKKVLVGEKKYKVLIGKNKIFKDYLPSAVSKNNKIFIITDKNIPTAYIELIKKSIPSNKEIDLFKIKPGEESKSFTNFQMILNKLAKKKYDRSDCIVAIGGGVVGDLSGFVAASFMRGIDYIQIPTSLLAQVDSSVGGKTAINIESGKNLVGAFKNPKLVLISSALLRTLPEREFKSGVAEIIKYGLIYNKKIFNIFDKQHKQILKRNQRVIEELIHESVKTKAKIVTEDERELGIRAILNFGHTYGHAIEAINNYKNVLHGEAVAMGMRMASKMSMLEGHLNEKAYKKIINVFDALNFPKNTSNNYSDLKKFILSDKKVKGGNINLILLKGIGQSFQTQKFNFENFKKSFS

SEQ ID NO: 180872 - protein, 367 aa, Unknown
  Bacterial polypetide isolated from the Sargasso Sea
MNTNKISIKTSTKNYPIIIGRDLIGKIDKILKANHLKFDKCLIVTDKNIPQKFKRILYKKLKINKLFKIELTASEKNKNYRTIEKIHTVLFENRFNREDCVVSFGGGIIGDIVGFASSTFKRGMKFINIPTTLLSQVDSSIGGKTGVNNKFGKNLIGSFYQPDLVVSDMNILASLPEREIICGYAEILKSSIIDNLNNFLYLDKNLNKILKLKSPFIERAIIKSCNLKKRVVEKDENEKNYRKVLNLGHTFAHSYESALGFSKKLNHGEAVILGIKNAVEFSFKRRFLSKQKFNIIINHINKIEMKPKIEKLFKKKHVSKIMNYMRSDKKNNSNNINLILIKDFGKIIVDFQISPSNLKKYISNSLN

SEQ ID NO: 180873 - protein, 354 aa, Unknown
  Bacterial polypetide isolated from the Sargasso Sea
MAEIPAGKGKSKYKIHITGKSLPKSEINRQIGLNNKVLIVTDSGIPKTYIKELRKVIKNKSVNVITLSQGEKSKSFSSYQKILNKLLNLKFDRSDKLIALGGGVVGDITGFCAATYLRGIEYIQIPTSLLAQVDSSVGGKTAINAKQGKNLIGSFYNPKFVLISTHFLKTLPENEYKSGLGEVIKYGFIGNKKLKKIIETNAKKIIIRDEKILKLIIEESIKTKSNIVTKDEKETGIRAILNFGHTFGHAIEAYNGFKNITHGAAITLGMVIASKISYFEGHIKDYQLDNVINTISSLGLNTDHKKYKYSHLKKYITSDKKVADGKINLVLIDKKFNAFKTSKFNHKNIIKALS

SEQ ID NO: 180874 - protein, 225 aa, Unknown
  Bacterial polypetide isolated from the Sargasso Sea
MVDSSVGGKTGVNHPKGKNLIGAFNQPKAVFIDPETLKSLPKREFSAGMAEVIKYGVIRDKELFEYLEIEKNKNELINLKNEYLIKIIDSSIKTKSYIVSRDEHENGIRAILNYGHSFGHVIENLCGYGKFLHGEAISIGMNIAGKIAIEKGLWSKEELERQQILLESYDLPTEIPKINKEEVLTILMGDKKVRDGKMRFILPKEIGAVDIYDDVEDSLFLKFFS

SEQ ID NO: 180875 - protein, 368 aa, Unknown
  Bacterial polypetide isolated from the Sargasso Sea
MKKIRLLVKTKSKKYPIIIGSNIINQINYLLNLNNINFEKSLIVFDKNVPKKKLNIIKQKLKTKKNIIHIFNANEKNKNFKSINLILNKLFKFNFNRNDCIISLGGGITGDVSGFAASIYKRGIKFVNIPTTLLAQIDSSIGGKTGVNNKYGKNLIGSFMQPDIVLSDISFLKSLPKRELVCGYGEIVKHSIISNKNIFNYLDKNINNILKLKSPFIEKTIADSCRVKKNIVEKDEKEKNLRKILNLGHTFAHAYEATSNYSKKLNHGEAVILGIISSAKFSYINRLLKKKDYEKIFNHIKKLNFPLNLNNYLKKKDVNLIIKYMKSDKKNSSSKINLILIKKIGKIILDLRFDKFIIKKYLYNELSN

SEQ ID NO: 180876 - protein, 356 aa, Unknown
  Bacterial polypetide isolated from the Sargasso Sea
MLKLTVNLDERSYPIYIGQSALQDNGRLIHHIGDCRPIIITNDTIEPLYLQGLLDSLAELNPLSFIIPDGEQYKSLEWFEKISAFLLQNNCGRDTCLIALGGGVVGDLTGFVAACYQRGVPFIQIPTTLLSQVDSSVGGKTAVNHPLGKNMIGAFYQPQAVFIDTQSLHTLPKREFAAGMAEVIKYGLIYDTELFTYLEQNVENLQQLNETCLQHIIYRCCEIKALIVAEDEKEQGLRALLNLGHTFGHAIEAQMGYGKWLHGEAVATGMVLASQLAHTRGDLTQQDVARIVDVIKQYNLPTEVPADMTSEQFLLHMRKDKKNKKGTIRFILPTQFGQCALVDDVSDDQVRALIEH

SEQ ID NO: 180877 - protein, 368 aa, Unknown
  Bacterial polypetide isolated from the Sargasso Sea
MKNRKIIINTNENKYPILIGKNLSFKLGSILSKNSIKPSKILFIIDNKVPKKIISKITKSIKKKYQILYFNSNEKNKCQKSINKIIDILLKNNFNRNDCLISIGGGITGDTAGYAASIFKRGMVYINIPSTLLAQVDASIGGKTGINTKYGKNLIGSFYQPALVISDTNFLKSLPKREILCGYGEIFKHSIIFDRKFFLFLDKNLDKILKLQTPYIENSILKSCIIKKKIVEKDFKEKNLRKTLNLGHTFGHAYEACLGYSRKLNHGEAVILGIASATAFSYLNRLLNFSNYKLILNHISKISKNLEIKKYFNIKSKNKILKYMVNDKKNFDKNINLVLINNIGKVNFKNKYALSKINKFLSHQLKSI

SEQ ID NO: 180878 - protein, 358 aa, Unknown
  Bacterial polypetide isolated from the Sargasso Sea
MKRIPLKLNTKKIPIYIGNNLLRDGVVNDYIKHKDVVIITNTKVAKLHLSHVKKSIKNCRIQTLILPDGEKYKNIATLNKIHDYLVKNKFNRDLTIIALGGGVIGDLAGFASDTFLRGVNLIHIPTTLLAQVDSSIGGKTGVNHKNGKNLIGSFKHPTVIFIDIIFLKTLSNKQFISGLAEVIKYGAIGNASFLKWLNKKSVSILERKPEDLIKLITVSVKAKVMIVQKDEEESNLRAHLNFGHTLGHAIESAMKYKGILHGEAISIGMVFAAAISVEQNSLEIAEYNLLENTLTNMGLPTSIPTNLKNQMIMKHMAFDKKKKNGKNHFVLLDSIGKSCISNKLTNTYISTFVKTFQS

SEQ ID NO: 180879 - protein, 355 aa, Unknown
  Bacterial polypetide isolated from the Sargasso Sea
MRKLNVNLEDRSYPIYIGSDVSLDNELYSKHIKTKKIALITNEQIADLYLSEITQTLNAFDLKTLILPEGETEKNLETVGKAVEFLSDNGIDRDSSIIAFGGGVIGDITGFVASSYMRGIKFLQVPTSLLAQVDSSVGGKTGVNISTGKNLIGAFYQPSAVIADIRYLNTLEPNRFSEGLAEVIKYGLIRDEDFFAWLSNNTDRILALEPEVMAHLIERCCQIKAEIVSEDEREGSVRAILNYGHTFGHAIESLTDYSVYTHGEAVSIGMVMAASMAERMGMLSQEDKKDITSLLESVNLPTKKPDLNSNDFLESMKRDKKVQDGEIRLILLESIGKAIISNDYPNEILMKTISE

SEQ ID NO: 180880 - protein, 212 aa, Unknown
  Bacterial polypetide isolated from the Sargasso Sea
MDSGGAMTTVTVELTRPYDVVIGQGSLQQLGERLKQQAIRVGTKVLVVSNPVVAEHYGATVMGSLSAAGYQAELLVIEAGEEQKTPATVAQIHDKAYAMQLERSSLMLALGGGVVGDMTGFAAATWLRGVAVVQVPTTLLAMVDAAIGGKTGVNHPGGKNLIGAFHQPRLVMIDSVTLGTLPIREVHAGMAEVIKYGVIGDPVLFEALEAHG

SEQ ID NO: 180881 - protein, 213 aa, Unknown
  Bacterial polypetide isolated from the Sargasso Sea
MVASPTLRRIAVALERNPYEVVIGAGGLSRLGDELLNAAIQPGRRILVVSNPDVAAPYGEGCLQSLRLQGFHADLLVIDAGEDRKTPATVAAIHDAAFEQRLERSSLMLALGGGVVGDMTGFAAATWLRGIRVIQVPTTLLAMVDAAIGGKTGVNHPGGKNLIGAFHQPSLVLIDPETLNTLPEREFRAGMAEVIKYGILGDPELFQCLEEGP

SEQ ID NO: 180882 - protein, 350 aa, Unknown
  Bacterial polypetide isolated from the Sargasso Sea
VIGRDLIVKIDKILKANRLKFDKCLIVTDKNIPHKFKRILYKKLKTNKLVKIEIAASEKNKNYRTIEKIHKVLFENRFNREDCIISFGGGIIGDIVGFASSTFKRGMKFVNIPTTLLAQVDSSIGGKTGVNNKFGKNLIGSFYQPDLVVSDMNILASLPKREIICGYAEILKSSIIDNLNNFLYLDKNLKKILKLKSPFLERSIIKSCNLKKRVVEKDEKEKNYRKVLNLGHTFAHAYESTLGFSKKLNHGEAVILGIKNAVEFSFKRKILTKPKFNIILNHINRIGMKPKIEKLFKKRHISKIMNYMRSDKKNNSNNINLILVKDFGKIIIDFQINPTNLKKYLSNSLN

SEQ ID NO: 180883 - protein, 290 aa, Unknown
  Bacterial polypetide isolated from the Sargasso Sea
MKKITVDLKSRSYPIYIEPGLVKKIHSYLSEYNKGQKWVIISQQNIMEIIGYDIEKYLIEKGFDCIHFTLPIGEAAKSMNEYNRVIRQMIENECDRKTFIVSLGGGAVGDVAGFIASTYMRGIAYIQIPTTLLSMVDSSIGGKTGVNTSEGKNLIGSIYQPRAVFIDQEILKTLPKQEIISGLGEIIKYGAIANQNFFDKVSEWLDDIQNFPYNKAIEICCKIKADIVSKDEHDFGVRKILNFGHTIGHALESLYGFKNIRHGEAVALGMICSGYISNKLNKLDKNQYFL

SEQ ID NO: 180884 - protein, 167 aa, Unknown
  Bacterial polypetide isolated from the Sargasso Sea
MANKVKVDLGNNSYNITMIEDFKDSVKRFASSTESQCMLITQENIFDLYKNQFNDLSNISNVNIFLIDEGEKAKSFDSTISIVNEMADKRFDRSSLVLAIGGGVVGDIAGFAASIYMRGVKYIQYPTTLLAMVDSSIGGKTGINLEDGKNLVGRIYQPIAVEIDTNF

SEQ ID NO: 180885 - protein, 314 aa, Unknown
  Bacterial polypetide isolated from the Sargasso Sea
MIKSIISRFNKDKIEKKKIVFNEKSKNLKTVSSIVKVLEKNNFSRNDSLISVGGGICGDVCGFASSIFKRGLNFINVPTTLLSQVDSAIGGKTGINSLSGKNMIGSFYQPSLVISDIDFLKSLPKREMICGYAEILKHSLIKDKIFFKFLKKNFIKILSHDRKFLEKTIYKSCLIKKEIVEKDEKEKNIRKVLNLGHTFAHAYEATIGYNKGLNHGEAVLLGIMSAVEFSRKKNILKKSDFGQITEHLRKLNYNNLNKYFKLNDISKIIFYMKQDKKNKDNKINLILLKNIGKPILNKSFRENNIRLFLKTLIY

SEQ ID NO: 180886 - protein, 282 aa, Unknown
  Bacterial polypetide isolated from the Sargasso Sea
EAAKSMKEYNRAISQMIENECDRKTFIVSLGGGAIGDVAGFIASTYMRGIAYIQIPTTLLSMVDSSIGGKTGVNTSEGKNLIGSIYQPKAVFIDQEILKTLPRQEIVSGLGEIIKYGAIADQNLFDKVSVWLDDIQNFPFNQAIEICCKIKADIVSKDEHDLGVRKILNFGHTIGHALETFYGFKNIKHGEAVALGMICSGYISHKLNKLDKNQYFRLRNTINKLPLPVLKKFNENQIFDSIKKDKKYENGKLKFIILNQIGNAEITNQVDEKLLLKSLSEL

SEQ ID NO: 180887 - protein, 210 aa, Unknown
  Bacterial polypetide isolated from the Sargasso Sea
MKKNKILVNTNNGSYPILIGMGLINNLKKILNSYSIKSSKYLVIFDKNIPKKYIKIIKRNIQKKTIFVKFSSSEKNKNQKSVNSILNILLKNNFNRNDCVISIGGGIIGDVSAFASSIFKRGIKFINIPTTLLAQVDSSIGGKTGINTKFGKNLIGSFYQPNLVISDINFLNSLPKREIICGYGEILKHSIIANKKFFVFLSKNIFKIIK

SEQ ID NO: 180888 - protein, 371 aa, Unknown
  Bacterial polypetide isolated from the Sargasso Sea
MKQKIIKVKTKSKNYEVHIGINLISKLRNIIKKNKLSFSKCLIVIDSKIPKKFRTILLGNLKNQKIYTLNFSANEKNKSNLSIDKIHNVLFKNNFYREDCIISFGGGITGDVVGYAASTFKRGIKFINIPSTLLAQVDSSIGGKTGINNKFGKNLVGSFYQPDLVISDINLLRTLPKREIICGYAEILKSSLIDSKKNFIFLDKNFNKILNLKGNFIINAILNSCLLKKKIIEKDEKEKNLRKSLNLGHTFAHAYEASLGYSKKLNHGEAVIFGLMNAVNFSKEKKIISNSNSELINNHIKKIEIKNKYKDLFNKRKITSILNFMKSDKKNKSDSINLILIRNFGKLNLNYQAKSVELNKFLLKELNKAYL

SEQ ID NO: 180889 - protein, 354 aa, Unknown
  Bacterial polypetide isolated from the Sargasso Sea
MIELSAGKANTKYKIYISKTTLTKKVLSRNIDKDKKILIITDSGIPKKYIKELKKQLINKSVYVYSIDSGEKSKSFRTYQQIINKLIDLEFSRSDLIIAFGGGVVGDISGFCASSFLRGIDYIQIPTTLLAQVDSSVGGKTAINVPQGKNLVGAFYNPRVVLISTVYLKTLSEREYKSGLGEVVKYSLIGNKKLKKLLEEHTEKVVNRDDKILIKIIEESIKTKSKIVTEDEKESGIRAILNFGHTFGHAIEAFNKYKNLSHGAAITLGMIIASKISYYEGHIKNHQLDNIINMIDSLNLDTDYSKYNYSDLIKYVKSDKKISKGKLNLVLINKQLNAFKTSKFDKKSVLRAFS

SEQ ID NO: 180890 - protein, 334 aa, Unknown
  Bacterial polypetide isolated from the Sargasso Sea
MKKFAENKEILLVCDPEIGRSKIEGVLDELKRCEPSNLKKLEIACSEEIKNFSSVEKIHDVLINSSFSRDCLLIGLGGGILTDITGFAASTYQRGVNFLLIPTTLLAQVDASVGGKTAVNHKLAKNMIGAFHQPIEVIISVDFLDSLPDREIRSGLVEMIKHGLILDQTYFNWLEKTSKKILNLDKETLVEAIAKSVEIKAKIVSEDEKERGKRALLNFGHTFGHGIEVLGNYKTYNHGEAVALGIICALRLSESHYDLNKDILRRTKELYESYGIEAKPKKAINPSDLLSFMQLDKKKSGNELAFILLQDIGKANKVSGLSNKEVEKSILEAF

SEQ ID NO: 180891 - protein, 246 aa, Unknown
  Bacterial polypetide isolated from the Sargasso Sea
MHVIREELNLYQIPTTLLAQVDSSVGGKTAVNHTSGKNMIGAFYQPSAVFSDTSVLSTLPEREFSAGLAEVIKYGIIKDGKFFDWLEENLSSLVMRDEKSLSYVIERSCINKAEVVAEDEKEIGYRAILNLGHTFGHAIETALSYKKWLHGEAVGCGMLMAADLSRRLGIFEQSDLDRIKSLLIKANLPVKIHKDVQFEKIYENMKIDKKSKEGILHLVLLKNIGEAFLTSEYSDELLKETIESFL

SEQ ID NO: 180892 - protein, 355 aa, Unknown
  Bacterial polypetide isolated from the Sargasso Sea
MRTLKVNLEDRSYPIYIGSDVSLDNELYSKHISSKKIALITNEQIADLYLSEISQTLNAFDLKTLVLPEGETEKNLETVGKAVEFLSDNRIDRDSSIIAFGGGVIGDITGFVASSYMRGIKFLQVPTTLLAQVDSSVGGKTGVNINTGKNLIGSFYQPSAVIADIRYLNSLEPNRLSEGLAEVIKYGLIRDEDFFKWLSKNTNRILALEPEIMTHLIERCCQIKAEIVSEDEREGSIRAILNYGHTFGHAIESLTDYSIYTHGEAVSIGMVMAASMAERMGMLSQDDKTDITRLLESVNLPTKKPDLNSNDFLESMKRDKKVLDGEIRLILLESIGRAIISNDYPNEILLETILE

SEQ ID NO: 180893 - protein, 364 aa, Unknown
  Bacterial polypetide isolated from the Sargasso Sea
MKKININTNIGSYKIYIGNKILNKVDFILKKNNIISNKFLIIIDSNVPKKYKKIFKSKYFKKKYIISIRFNEREKNYHSVEKILEVLQKNNFNRNDSIICLGGGIAGDLCGFSASIFKRGLKFINIPTTLLSQVDSSIGGKTGFNTKFGKNLIGTFYQPSIVVSDTETLNSLSKREIICGYAEILKHALIQSKSFYNFLAKNGKNVLKLNSKELQIAIYRSCLIKKKVIQLDTMEKNIRKILNFGHTFGHAYESTLNFSTKLNHGEAVLLGIISATKLSNKLKILNKKNYKDIINHFEKLSLPNDIKKKFNKKNIDKILTFMKNDKKNIDNHINLILLSDIGKTTNYKINKKHLKKFLKDELNK

SEQ ID NO: 180894 - protein, 368 aa, Unknown
  Bacterial polypetide isolated from the Sargasso Sea
MKQSRLNIVTKTEKYPIIIGSNLTLSISKIFKLNSIDFDKCLIVVDKNVPKKFVSNIKKSLKNKNIYLFFFNASEKNKNINSVNKILEVLLNKNFSRNDVLISLGGGITGDVSGFAASLFKRGLKFANIPTTLLAHVDSSIGGKTGVNSKYGKNLIGSFYQPSLVLSDIQFLKSLSKREIICGYGEILKHSLINNKNFFNFLNKNLKKILSLSSPFVEKAIYESCKIKKKIVEKDEKERALRKVLNFGHTFGHAYEAGLGYSHKLNHGEAVILGMKTALNFSLRENMLSKNEYNLIINHIDNSVLPSSIKKHFSIKDLNKILSFMIKDKKNNSKKINLVLLKNIGKPIFNKQYSKKKVNLFLRKFLTN

SEQ ID NO: 180895 - protein, 312 aa, Unknown
  Bacterial polypetide isolated from the Sargasso Sea
MKPKKLIIKTVSQKYSILIGPNLIVNISKIMKKNLNNFEKCLFIVDKKVPKKFIFFIKKSFQNKNIFFEYLTMNEKNKNLQTVNKILKILLIKNFSRKDCLITIGGGITGDVGGFAASLFKRGLQFVNIPTTLLSQVDSSVGGKTGVNTKYGKNLIGSFYQPNLVISDTNFLKTLPYREIICGYAEILKHALIANKKFFKYLDKNFLKILRLHSPFLENAIYESCKIKKNVVQKDEKEQDFRKILNFGHTFAHAFEATLGYSKKLNHGEAVILGMYIALSFSNKNKILKKNEYSLILNHFKKSSLPSNINKF

SEQ ID NO: 180896 - protein, 175 aa, Unknown
  Bacterial polypetide isolated from the Sargasso Sea
MKIIKKIKVDLGDRSYPIIIGNGIYGNKNLYRNSNPKNSILVSTKKIKNLKNSSIPKRFYNSEILIGDGENFKNLNSCESIYKNLLKNKYSRDCCLLAYGGGVIGDITGYVAATYLRGVNFIQVPTTLLSMVDSSVGGKTGVNHSLGKNMIGAFYQPQSVIIDLNSLKTLPKKQL

SEQ ID NO: 180897 - protein, 251 aa, Unknown
  Bacterial polypetide isolated from the Sargasso Sea
VVGDISGFVASTYLRGIDFIQIPTTLLAQVDSSVGGKTAINSKNGKNLFGAFYNPSLVIIDPSHLNSLAEREYKAGLAEVIKYGLIDNRKLFNYLKKNYESILDKDNKALSFIISESIKSKAKIVQQDEREKGLRAILNFGHTFGHALEAKYKYKKYLHGEAVAIGMRCASKISLELKLITTKEFEAVLELFDKLKIKSNLPNLKLNDLMPYLKRDKKILKGKIRFVLLDGISKAKIEDKVSSKVIRNIFN

SEQ ID NO: 180898 - protein, 268 aa, Unknown
  Bacterial polypetide isolated from the Sargasso Sea
MDLKFDRSDTLIALGGGVVGDITGFCAATYLRGIDYIQIPSTLLAQVDSSVGGKTAINVKQGKNLIGSFYNPKLVLISTNFLKTLSENEYKSGLGEILKYAFIGNKKLKKIIESNTNKINKRDDKILKIIIEESIKTKSKIVTLDEKENDIRAILNFGHTFGHAIEAHNKYKNITHGAAITLGMVIASKISFFEGHIKDYQLDNIINMIDSLGLSSDHGKYKYSNLKKYFLSDKKVTNGELNLILIDKKFNAFKTSKFNQKNIIKALS

SEQ ID NO: 180899 - protein, 229 aa, Unknown
  Bacterial polypetide isolated from the Sargasso Sea
SSIGGKTGINSNYGKNLIGSFYQPNLVISDVDFLKSLPKREIICGYGEILKHSLIRDKNFFKFLNKNVSKITQLTSPFIEKAIYESCKIKKSVVEKDEKEKHLRKVLNFGHTFAHAYEASLNYSKKLNHGEAVILGMKTALSFSLSLKMLEKSDYNLILNHVNKLNLSISVNKFFTKKNLNKILYFMAKDKKNKSQKINLVLLKKIGSPQINNEYSKERIKKFFNDYLT

SEQ ID NO: 180900 - protein, 371 aa, Unknown
  Bacterial polypetide isolated from the Sargasso Sea
MVASPTLRRISVALERYPYEVVIGAGGLNRLGDELLTAGIQPGRRILVVSNPDVAGPYGEACLQSLAQQGFHADLLVIDAGEDRKTPATVAAIHDAAFERHLERSSLMLALGGGVVGDMTGFAAATWLRGIPVIQVPTTLLAMVDAAIGGKTGVNHPGGKNLIGAFHQPSLVLIDPETLNTLPIREFRAGMAEVIKYGILGDPDLFHCLEEGPEPDSAPGLGSGRLEIILERSAAAKARVVAADEREGGLRAVLNYGHTFGHVVETLCGYGTWLHGEAVAIGMVAVGQLALNRGSWTEKDAERQKQLIQRCGLPTAWPDLNPDAVLRTLQGDKKVKDGRLRFVLPTAIGHVEIRDDINRDEILRCLEQLRG

SEQ ID NO: 180901 - protein, 368 aa, Unknown
  Bacterial polypetide isolated from the Sargasso Sea
MKIHKIQINTKTKKYSIFIGTSLISKINKILSSQKLSFSKVLVVIDKNIPSKFKSKLIKNLKSDIKKTYIFKANERNKNQKNVDLIQKILFKNRFNRDDCLIAFGGGITGDVVGYCASTFKRGIKYINIPTTLLSQVDSSIGGKTGINNSYGKNLVGSFYQPNIVISDIDVLKSLNFREIICGYAEILKSSLLDSFKKFKYLDKNFNDIINLKQPQIGNAILNSCNLKKKIVQKDETEKNLRKVLNLGHTFAHAYESKLGFANKLNHGEAVLIGIKNAVKFSYQSKILKNKPYNLIIKHLDKIPLNKNFNELFKAKDMNKIISFMKSDKKNISKKINIILIQDFGKIKKSYQISDNSLKKFLISELNK

SEQ ID NO: 180902 - protein, 298 aa, Unknown
  Bacterial polypetide isolated from the Sargasso Sea
MERITVTLGERSYPITIAAGLFNEPASFLPLKSGDQVMLVTNETLAPLYLDKVRGVLEQAGVNVDSVILPDGEQHKSLTVLDTVFTALLQKPHGRDTTLVALGGGVIGDLTGFAAASYQRGVRFIQVPTTLLSQVDSSVGGKTAVNHPLGKNMIGAFYQPASVVVDLDCLKTLPARELASGLAEVIKYGIILDGEFFSWLEDNLDALLRLDGPAMAYCIRRCCELKAEVVAADEREMGLRALLIWGTRLAMRSKLKWVMAIGYMGEAVAAGMVMAARTSETLGQFTSADTQRIITLVQ

SEQ ID NO: 180903 - protein, 358 aa, Unknown
  Bacterial polypetide isolated from the Sargasso Sea
MKKIKVDIKSNSYEVIVGSDLVNQENLKRLKGKEVLLVADEKVPSEYKNSIIEVLSDLSSNLHICEIHASEENKDRNTLDKIHSKLINEKFSRDCYLVALGGGITCDITGFAAATYQRGVSFILFPTTLLSQVDASVGGKTAINHPLGKNMIGAFHQPIGVFADIGFLDSLPKKEISDGLSEVIKHALIADSKFFDWLEKYIEAIITLEPEALKHTISRSIEIKSEIVSKDEKESGIRKVLNFGHTFGHAIELYGEFKQFSHGQSVALGMLMAMELSKITGSFKDKDLQRAKSLINKINPQLNLNIDFEDQKLIENMSVDKKRIGDKLVFILLEEIGVAKIKKDISVADIATAITSLA

SEQ ID NO: 180904 - protein, 369 aa, Unknown
  Bacterial polypetide isolated from the Sargasso Sea
MKIDKIIVKTKETTYPIMVGNGAISLLKSQVNKLCPNTKKIAILFDKNVPNIFKTKIKKLLKKYKIFIKDYTPSEELKSFSNVNILIEYLIKNKFNRNDLVIAVGGGIIGDFSGFVASIFKRGINFINIPTTLLAQVDSAIGGKTGVNSKTGKNLIGSFYQPKLVLSDISFLKSLPKREFICGFGEILKYSLIKDQKFFNFIKKNSKQILKGSDLNILKYIVLRSSKNKVHFVVADEKESNKRMVLNFGHTFAHGIESSNNFSKKINHGEAVLIGMLLATKLSFNKNICSLKTMEEIEKIYISNKLPSKLNIYLKKKQINNISKLMINDKKNDDEKINLILLKRIGKTTIPGKIKMSVGQIGNFLKKVN

SEQ ID NO: 180905 - protein, 355 aa, Unknown
  Bacterial polypetide isolated from the Sargasso Sea
MRTLKVNLGDRSYPIYIGSDVSLNNELYSKHISSKKIALITNEQIADLYLSEISQTLNSFDLKTLVLPEGEAEKNLETVGKAVEFLSDNGIDRDSSIIAFGGGVIGDITGFVASSYMRGIKFLQVPTTLLAQVDSSVGGKTGVNINTGKNLIGSFYQPSAVIADTRYLNSLEPNRLSEGLAEVIKYGLIRDEDFFIWLCKNTNRISALESEVMTHLIERCCQIKAEIVSEDEREGSIRAILNYGHTFGHAIESLTDYSVYTHGEAVSIGMVMAASMAERMGMLSKDDKTDITNLLESVNLPTKKPDLNSNDFLESMKRDKKVQDGEIRLILLESIGRAIISNDYPNEILMETISE

SEQ ID NO: 180906 - protein, 328 aa, Unknown
  Bacterial polypetide isolated from the Sargasso Sea
LNKYVKRNNKLLIVTDTGIPNDHIKNLKSIISSRNCHIFKLPKGEKSKSLNSYKKIIDELIKLKFDRSDSLLAFGGGVVGDITGFVASTYLRGINYIQIPTTLLAQVDSSVGGKTAINIPQGKNLVGAFNNPCCVMISTNYLKTLPEKEFNSGLGEVIKYALIGNSKLKNIIEKNPKQIKDKKEPFLKIIIEESIKTKSKIVTKDEKEAGVRAILNFGHTFGHAIEAYNNYKNISHGAAITLGMIIASKLSFYEGYIKEYQLDNVINIVDSLGLNSDHSKYNYSKLKKFMANDKKVSKGKLNFIMIDKNFNGFKTSNYDIKNVKKALN

SEQ ID NO: 180907 - protein, 299 aa, Unknown
  Bacterial polypetide isolated from the Sargasso Sea
DGEQYKNLNILSQIFDFLMKVNANRQTLLIAFGGGVIGDMAGFAAATFVRGIPYIQVPTTLLANVDSSVGGKTAVNHPLGKNSIGSFKQPEYVCIELSFLKTLPSRELRAGYIELLKHGLIHDEELLDFIRSNSLEPLDFDFLEEAILRSCTIKGRIVEKDETETGIRATLNFGHTLGHLIETHAGFGKYLHGEAVGAGMFFASFVSWRSNEMMEDEWMRIKNFLSQILTPIQLPPLDQNLFREMILHDKKSQNHSVNFIMLKKLGKSFIKKETPVEMLWNELKEFTKKFPEIIKIEGR

SEQ ID NO: 180908 - protein, 283 aa, Unknown
  Bacterial polypetide isolated from the Sargasso Sea
GEAAKSMNEYKRVISQMIEYECDRKTFIISLGGGAVGDVAGFIASTYMRGVAYIQIPTTLLSMVDSSIGGKTGVNTFEGKNLIGSIYQPIAVFIDQDILKTLPKQEIVSGLGEIIKYGAIANQNFFNKISDWLDDIQNFPFNRAIEICCKIKADIVSKDEYDLGMRKILNFGHTIGHALETFYGFKNIKHGEAVALGMICSGYISHKLNKLDKNQYFRLRDTINKLPLPVLKKFNNRQIFDHIKKDKKYENGKLKFIILNQIGNAEITNQVDEKLLLKSLSEL

SEQ ID NO: 180909 - protein, 245 aa, Unknown
  Bacterial polypetide isolated from the Sargasso Sea
RGIKFINFPTTLLSQVDSSVGGKTGVNNRYGKNLIGSFNQPDLVLSEINFLKSLPKRELICGYAEILKHAIIADKKKFLFLEKNKNKILSLNGDVIQKTIIDSCTIKKKVIEKDEKEKNLRKVLNFGHTFAHSFEASLRYSKKLNHGEAVLMGIKCAVKFSKKINHIPENDAKRIINHIDSLKIKKLNDFFNLKYLETLIKFIKIDKKNKSNKINLILLKKIGKPDINSNYNVNTVKKFLYNELN

SEQ ID NO: 180910 - protein, 289 aa, Unknown
  Bacterial polypetide isolated from the Sargasso Sea
MRTLKVNLEERSYPIYIGTDVSLDNELYSKHIKTKKIALITNEQIADLYLSEISQTLNAFDLKTLVLPEGETEKNLETVGKAVEFLSDNGIDRESSIIAFGGGVIGDITGFVASSYMRGIRFLQVPTTLLAQVDSSVGGKTGVNTSTGKNLIGAFYQPSAVIADTRYLNTLEPNRFSEGLAEVIKYGLIRDADFFAWIGKNTSRILTLEPEVMAHLIERCCQIKAEIVSEDEREGSVRAILNYGHTFGHAIESLTDYSVYTHGEAVSIGMVMAASMAKRMGMLSQADKK

SEQ ID NO: 180911 - protein, 350 aa, Unknown
  Bacterial polypetide isolated from the Sargasso Sea
MNKKINFASKGIKCSVEIEVHSIKKKIESIINTNSNVIFLIDKKVLNVFKKVKNYKNLKYITLNCSEKIKSFQYYSIICNKVLSLGVDRKSVLVVIGGGTLGDLGGFIASTLLRGIDLVLIPTTLLSQVDSSIGGKNGINTSFGKNLVGTFYQPKLIIIDPYFLSSLPKREILSGYAEIVKHAIIYDQKFFDWLNRNSKDIFKLKYHVLCKAIHKSILIKKTYVEKDEKEKLKNKYSRAILNFGHTFGHALETYYNYNKRLTHGEAISIGMMIATTLSYKLNYLSFKDLIKIKNHFIANGLPIEDKEMYNKKIFEIIYKDKKNTDNKINLILLKNIGKSFFKPNINLNKN

SEQ ID NO: 180912 - protein, 368 aa, Unknown
  Bacterial polypetide isolated from the Sargasso Sea
MIKTLKVTTPLKKYNIIIGNNIIASSGKYSKKYLKSDRVFIVTNKLLKSLYLKKIKNSFVKHGITVSEIIINDSESKKNLESVKILTSHLLKNKVDRNDTLIALGGGVIGDLVGFVASITLRGINFIQIPTTLLSQVDSSVGGKTGVNTPLGKNLIGSFYQPALVISDVGILKSLNKREILSGYAEVIKYGIIMDKAFFNWLLKNDKHFLNQNANYLIEIVYKSCKNKAKIVNQDEKEKNIRALLNLGHTFGHAIEALNNYKKTVVHGEAVAIGIIMALELSFLEGKISKDIINKIESHFDKIGIKRKIPKQLKQHLNTSQFIEAMSSDKKVKNKKINLILCKSIGEAYITDTFKHKNMKKVIKDFLN

SEQ ID NO: 180913 - protein, 210 aa, Unknown
  Bacterial polypetide isolated from the Sargasso Sea
MNTNKISIKTSSKNYPILIGRDLISKIDKILKANHLKFDKCLIVTDKNIPHKFKRLLYKKLKINKLFKIEITASEKNKNYRTIEKIHTVLFENRFNREDCVISFGGGIIGDIVGFASSTFKRGMKYVNIPTTLLSQVDSSIGGKTGVNNKFGKNLIGSFYQPDLVVSDMNILASLPEREIICGYAEILKSSIIDNFNNFLYLDKNLKKIL

SEQ ID NO: 180914 - protein, 357 aa, Unknown
  Bacterial polypetide isolated from the Sargasso Sea
MFVGYNSINLLSKKIKLINAKSNKIGVVLDKKVPKKYKNKIKKLLKNYRVFFFEYSVSENLKSFSNVNGLLEKCIRLNFNRNDFLIAVGGGIVGDFCGFVASILKRGVNFINIPTTLLAQVDSAVGGKTGVNSKQGKNLIGSYYQPNLVICDLSFLNSLPKRQLTNGYAEILKHAIISDKRFFNWLKKNSQKILKNKDVNCLTYAITKSNKIKLSFANKDVRDKNIRMTLNFGHTFAHAIEARHSYSKKINHGEAVLVGMMMAAKLSFIKKVCNKVTLLELIKIYKKNNLDYKLKHFLKKKEFNSITKFMVQDKKNDDNKINLILLRKIGKTTRPGQYKLTLSELRKNNTKLNNLNF

SEQ ID NO: 180915 - protein, 368 aa, Unknown
  Bacterial polypetide isolated from the Sargasso Sea
MKKTLEVKTGTDEYKILIGDNILLSSGSLIKKKLINPRVFIITNKLIYKLYGKKLENSLKKNKISFNKIIINDGEKYKNIKTINLITSKLLKYKVDRNDTLIAFGGGVIGDIVGFTASITLRGINFIQIPTTLLSQVDSAVGGKTGVNTKEGKNLIGTFYQPKLVISDVSLLKSLPKREILSGYAEIIKYGLIMDKRFLNWLLDNESKLMTFNKKYLIEAVFHSCKNKAIIVRKDEKEKNIRAILNLGHTFGHAIEAINNYQKSLTHGEAVSIGILMALDMSSLQGNSLNKNINKIKDHFQKLKMKTKIPNNIKRKTSLKKFKETMNSDKKVKNNRINLILLRNLGKAYLANRYSTRKLDSVINNYIN

SEQ ID NO: 180916 - protein, 327 aa, Unknown
  Bacterial polypetide isolated from the Sargasso Sea
DQRCFLITDSKIPKKHIIKVKKIIGQYSVSLHTYLMNAGESSKSQKVFFDIQDYLLKNRFERSDLIIAFGGGVVGDMSGFVASTYLRGIDYLQVPTTLLSQVDSSVGGKTAINTRHGKNLIGSFYNPLKVIIDLSFLETLPEREYKAGLAEIIKYGLIKNKKLLDYLFANEIKINDKALDALEYIIYESVKTKAKIVSMDEKESGVRAILNFGHTFGHAIEAHHNYKSFLHGEAVAIGMLMAAKLSQFENHISEKQFNFIEKLLNQYNLNYKLKKMTYKDFTKHIKQDKKVKSGKVRIVLLKRLSNAFVTEKFGQLNFSRAIKQHLQ

SEQ ID NO: 180917 - protein, 254 aa, Unknown
  Bacterial polypetide isolated from the Sargasso Sea
MRLVFSKGALKFANIPTTLLAQVDSSIGGKTGVNSKYGKNLIGSFYQPSLVLSDIQFLKSLSKREIICGYGEILKHSLIDNKKFFSFLNKNLKKILSLSSPFIEKAIYESCKIKKKIVEKDEKEIALRKVLNFGHTFAHAYEAGLGYSHKLNHGEAVILGMKTALSFSFKENMLSKSEYNLIINHIDNSGLPSSIKKYFSIRDLNKILSFMIKDKKNNSEKINLVLLKNIGKPIFNKQYSKKKVNLFLRKFLTN

SEQ ID NO: 180918 - protein, 303 aa, Unknown
  Bacterial polypetide isolated from the Sargasso Sea
MKISKLIIKSSSGKYPILIGSNVISNISKLIFNNSINFEKCLLVVDKNVPKKFISEIRKSLKNKKLFIFLITANEKNKNQKTTNLILQILLDKNFSREDCLIAVGGGITGDVSGFAASLFKRGLKFINIPTTLLSQVDSSIGGKTGINTNQGKNLIGSFYQPRLVISDTNFLKTLSKREVICGYGEILKHAIISNKVFYNFLNKNFFNIIKLKSPIIDKAIYESCKIKKLVVEKDEKENGMRKILNFGHTFAHAYEASLGFSKKLNHGEAVILGMNTALSFSYKNKFLNLKEYNLIREHIYNS

SEQ ID NO: 180919 - protein, 291 aa, Unknown
  Bacterial polypetide isolated from the Sargasso Sea
KIKETFELIQNILFKNRFNRDDCVIAFGGGITGDVVGYCASNYKRGIKFINIPTTLLAQVDSSIGGKTGINNPYGKNLVGSFYQPDLVVSDIDVLKSLNSREVICGYAEILKSSLLDSLKKFKYLEKNFKEIINFKQPFIENAILNSCKLKKKIIQKDETEKNLRKVLNLGHTFAHAYESSLGFSNKLNHGEAVIIGIKNALELSSQFKIISYKSYNLIKKHIDKIPLNKNFKQLFKVKDINKIISFMKSDKKNNSKDINVILIQNFGKIKINYQMKHNILRKFLSSELKK

SEQ ID NO: 180920 - protein, 356 aa, Unknown
  Bacterial polypetide isolated from the Sargasso Sea
MNVELGNRSYPIIVGNGLLRDEALLAPYIAGDEVVVLTNETIAPLYLDQVTTSLKDRQLICQVLPDGEQFKNLDTLQSIFDTLLENRCSRTTTLIALGGGVIGDVVGFAAACYQRGIPFIQLPTTLLAQVDSSVGGKTAVNHPQGKNMIGAFHQPACVVSDTGTLATLDPRQLAAGIAEVIKYGLIRDQKFFSWLEENIERLLRYEDDALEFVILESCRHKAQVVANDEREAGERALLNLGHTFGHAIEAATDYVGWLHGEAVAVGMVMAATMSEKMGWLDVAEVERIRELVKRAGLPVMPPAAMSPHDFMKHMTVDKKVSGGRIRLVLLSELGQASLTSDYPDELLAEVLDAFSV

SEQ ID NO: 180921 - protein, 292 aa, Unknown
  Bacterial polypetide isolated from the Sargasso Sea
KSFHFLENLWARKYLKKNIERKDIIIALGGGVIGDLSGFAAGIIRRGIRYIQIPTTLLAQVDSSVGGKTAIDTKHGKNLIGLFNQPSLVICDTTTLNSLDEREIISGYAEIVKYALIKDKEFFEWLLINGQKIIKKDRDALEYAIVKSCKHKAQIVCSDEFEINNYRALLNFGHTFAHAIENALNYKDTLKHGEAVAIGIIMAFELSILLNLCKKDDLIIVKKHFTSLGLPTSLNFLKNEIDVNMILKPMLQDKKNINGKVIFILAKSIGSAFVADFVSIEDAKQIISKHLK

SEQ ID NO: 180922 - protein, 279 aa, Unknown
  Bacterial polypetide isolated from the Sargasso Sea
MSNKIKVDLGNNSYNVSLIESFKNSIVKFASTTKSQCMLITQQEILNLFKDEINELSNLPNVNIFLIEQGEKAKSFESISLIVNEMSKKHFDRSSLVFAVGGGVVGDVGGFASSIYMRGIKYIQYPTTLLAMVDSAIGGKTGINLKDGKNLVGRIYQPIAVEIDTNFLSTLPDRELQAALAEVVKYGFIYDREFFDFVVANSTEIQNKDIDVLQKIIIQCCEIKSDIVSEDENENELRMILNFGHTVGHAIESFTDYKNLLHGEAIFYGMKCALYLFKQ

SEQ ID NO: 180923 - protein, 365 aa, Unknown
  Bacterial polypetide isolated from the Sargasso Sea
MRTLNVNLEDRSYPIYIGTDVSLDNELYSKHIKTKKIALITNEQIADLYLSEISQTLNAFELKILVLPEGETEKNLETVGKAVEFLSDNGIDRDSSIIAFGGGVIGDITGFVASSYMRGIKFLQVPTTLLAQVDSSVGGKTGVNISTGKNLIGAFYQPSAVIADTRYLNTLEPNRFSEGLAEVIKYGLIRDADFFAWIGKNTSRILTLEPEVMAHLIERCCQIKAEIVSEDEREGSVRAILNYGHTFGHAIESLTDYSVYTHGEAVSIGMVMAASMAERMGMLSQADKKDITNLLESVNLPTKKPDLNSNDFLESMKRDKKVQDGEIRLILLESIGKAIISNDYPNRDFDENHIGIRDEHKEQRP

SEQ ID NO: 180924 - protein, 270 aa, Unknown
  Bacterial polypetide isolated from the Sargasso Sea
TIVAAGGGIVGDFAGFVASILKRGVNFVNIPTTLLAQVDSSIGGKTGVNSKNGKNLIGSFYQPKLVISELSFLESLKKRDLICGFGEILKYSLINDKLFFKWIKKNSSIILRGKDKNILKYAIIKSCKNKIYFVTADEKEKSKRMLLNFGHTFAHGIEAANDFSKKINHGEAVLIGMLLATKLSVKKKLCSKKTLLEIEKIYENNNLPSSLQKYFRKKDYKKIADFMANDKKNNDNRINLILLKSIGKTTKPGSFKMSLKQMRNIIKKIN

SEQ ID NO: 180925 - protein, 354 aa, Unknown
  Bacterial polypetide isolated from the Sargasso Sea
MIELSAGKANTKYRIYISKTALTKKVLNQNIDKDKKILIITDSGIPKKYIKELKKQLINKSVYVHSIDSGEKSKSFRTYQQIINKLIDLEFSRSDLIIAFGGGVVGDISGFCASSFLRGIDYIQIPTTLLAQVDSSVGGKTAINVPQGKNLVGAFYNPRVVLISTVYLKTLSEKEYKSGLGEVVKYSLIGNKRLKKLLEENAEKVINRDDKILIKIIEESIKTKSKIVTKDEKESGIRAILNFGHTFGHAIEAFNKYKNLSHGAAITLGMIIASKISYYEGHIKNHQLDNIINMIDSLNLDTDYSKYNYSDLIKYVKSDKKISKGKLNLVLINKQLNAFKTSKFDKKSVLRAFS

SEQ ID NO: 180926 - protein, 370 aa, Unknown
  Bacterial polypetide isolated from the Sargasso Sea
MKVQEIKFKNLNKNYSILIGNNILKILPKKIRLLCPRTKKIALIFDRKVPNKFKKSISKNLKKYELLNYNFEASEKTKSLRTVDFLLNKLLSKNFNRSDLVIAIGGGITGDLVGFVASIFKRGLNFISIPTTLLSQVDAAVGGKTGINSSYGKNLIGSFSQPKLVISDTSFLRSLKKKEMVCGYAEILKHAVIKDKKFFDWLKKNTKYIFSHDKKKLIYAIKKSCKIKLLFVNRDVDEKNIRMVLNFGHTFAHAIEVKNNYSKNITHGEAVLAGMILATKLSVIKKVCNIKVLKDLMEIYSKNNLNYTLKKYKAPKEINKLIPYLKNDKKNNDEKINFILLNKIGKTTMANKCKISINELKKNIRRLIQY

SEQ ID NO: 180927 - protein, 448 aa, Unknown
  Bacterial polypetide isolated from the Sargasso Sea
MPEKPWHRRLPARQSARSVAAHAQGQEPPAAADRRSEGAPRSAVRGTRPAVPRMRGFRHRDRPSVGQRSRQHGADATRTGRRHRQTATSMITVNVDLGDRAYPIHIGAGLIGRAELFAPHIKGSSVTIVTNTTVDPLYGDALRAALAPLGKRVSTVVLPDGEAYKNWETLNLIFDGLLTDRADRKTTLVALGGGVIGDMTGFAAACYMRGVPFIQVPTTLLSQVDSSVGGKTGINHPLGKNMIGAFYQPQAVIADIGALTTLPDRELAAGVAEVIKTGAIADAEFFDWIEANVDALNRRDPAALAHAVKRSCEIKASVVAADEREGGLRAILNFGHTFGHAIEAGLGYGEWLHGEAVGCGMVMAGDLSVRLGLLDEASRQRLDAVIAAAHLPTRGPALGDARYMDLMRVDKKAEAGAIKFILLKRFGDTLITQAPDEAVSATLAQTTR

SEQ ID NO: 180928 - protein, 251 aa, Unknown
  Bacterial polypetide isolated from the Sargasso Sea
SIIYRGINFIQVPTTLLAQVDSSVGGKTAINVRQGKNLIGSFYQPKAVITDVSFLSSLSEREIKCGLSEIVKYGVIGDRDFFYWLKENVDNLTKLNQDCLIYAIEKSCSMKANIVQKDEKERGDRALLNFGHTFGHALEKHFTKNEVLLHGEAVAIGMAYASKFSANTGILKKDECDEIINLISDIGLPISINDIKGEITKEEILNLMMFDKKRVNQKNTLILLNRIGEAFINNDISDKEIIDFFNMENIQ

SEQ ID NO: 180929 - protein, 152 aa, Unknown
  Bacterial polypetide isolated from the Sargasso Sea
MIKKVLVGDEKYKVLIGKNKIFKDYLPSAVSKNNKIFIITDKNIPAGYIELVRNSIPSNKVIDLLKIKPGEESKSFTNFQMILNKLAKKKYDRSDCIVAIGGGVVGDLSGFVAASFMRGIDYIQIPTSLLAQVDSSVGGKTAINIESGKNLV

SEQ ID NO: 180930 - protein, 380 aa, Unknown
  Bacterial polypetide isolated from the Sargasso Sea
MNNIFLVGFSGTGKSEIGPIVSNILSYKFIDLDTEIVKYFNKSIDKIFSEDSEEVFRKKESELLEYYGSSSQLVIATGGGAIIYNDNYELMKSNGFIVCLEATPQTIYNRLTSEDGKNEIRPVLKDNVNIDSITNIKNKRQKYYAKSDWTIHTDNLTPYQSAEEVSKIYKTFVNLDTSKFIQKDMKADLAGIVTYTNGVCPIYSGWDIYKDIPKIFSRLDIQGNLFLISDTNVYSLYGQEVEKYIASTGKQVFSHELEPGEHNKTFDAISNVYSWLAESKAQRRDTIVALGGGVVGDMAGFVAATYNRGLGFIQIPTSLAAMVDASVGGKTAVDLPEGKNLVGAFYQPKVVIADVSTLKSLPHRETMEGWAEAIKHGLIL

SEQ ID NO: 180931 - protein, 354 aa, Unknown
  Bacterial polypetide isolated from the Sargasso Sea
MAVLSAGKGESKYNIHISNKKIPKNVLNKILSTKNKVLIITDSGVPSQYLKSLKKDINTKNQYSLILAKGEISKSFKSYQKILNKLVELKFDRSDYLIALGGGVIGDVTGFAASSYLRGIGYIQIPTTLLSQVDSSVGGKTAVNLAQGKNLIGAFYNPRLVLISTSFLKTLSDKEYKSGLGEIVKYSLIGNKKLKKIIEDRSQLIVDKDESTLKVIIEESIKTKSKIVTKDEKESGIRAILNFGHTFGHAIEAYNNYKNITHGAAITLGMVIASKLSFYEGHIKDYQLDNIINMIESLRLNTDHSKYSYSKLKKYMASDKKVKDGKLNLILIDKKFNAFKTSKYNIKNIKSALD

SEQ ID NO: 180932 - protein, 369 aa, Unknown
  Bacterial polypetide isolated from the Sargasso Sea
MKIYKTNVKNINSRYSILIGFGAINQLKKNIRSVCPNTKKIALIFDKKIPNRMLNKVKRQIRDYKIFVYKYSVNENLKSFEKVNSLNESLLAKNFNRNDLLIAVGGGVIGDFAGFAASILKRGVNFINLPSTLLAQVDSSIGGKTGVNSKKGKNLIGTFYQPKLVISELEFLKSLPRREIICGFAEILKHSFISDKKFFKWIEKNTKKIINNKDYKIINSAIFKSCKIKISFVQKDEKEKGDRAILNFGHTFAHGIEAASNFSKKINHGEAVLIGMYLASKLSKDKNICSKKTLGKIINFYKENNLPNDLKQFSLKNKLDKIIELMKNDKKNVDSKISLILLKRIGKTTKPGRIKMTPRQIKLSLKKFT

SEQ ID NO: 180933 - protein, 145 aa, Unknown
  Bacterial polypetide isolated from the Sargasso Sea
MAVISAGKGKSKYDIHINGSSLPKKILNKHLGNKNKILIVTDNGVPKGHIKKLKSSINNKNINILTLSNGENSKSFNSYQKILNKLFELKFDRSDILIAFGGGMVGDISGFSAATYLRGIKYIQIPTTLLAQVDSSVGGKTAINV

SEQ ID NO: 180934 - protein, 355 aa, Unknown
  Bacterial polypetide isolated from the Sargasso Sea
MKKIIKINTKSHNYRIIIEKNSILKEILKEEKKQKNFIIIDKKLLSLIPTLKKNKNFNLITIQGGEKIKSLKYFENITNKLLKLKIDRKSCIIAIGGGTIGDLSGFIASTVLRGVKFILVPTTLLSQVDSSIGGKNGVNTSSGKNLVGTFYQPNKVIIDHSILNFLSKKQIISGYAEILKHAIIKNKNFYFWLTKNYKKIIKLESRFISIAIIESIKIKAHFVQIDENEILINDNSRAMLNFGHTFGHALESMNNYKRNLSHGEAISIGMCLAMKISCKMNLISNNKYNDFINHLKDVGLPIYDKRIEKNTIYNVMMSDKKNTKNLINLILLKKIGKAFYKRGLTKEKIKSYLIK

SEQ ID NO: 180935 - protein, 194 aa, Unknown
  Bacterial polypetide isolated from the Sargasso Sea
MIKKVLVGDEKYKVLIGKNKIFKDYLPSAVSKNNKIFIITDKNIPTAYIELIKKSIPSNKVIDLLKIKPGEESKSFTNFQMILNKLAKKKYDRSDCIVAIGGGVVGDLSGFVAASYMRGIDYIQIPTSLLAQVDSSVGGKTAINIESGKNLVGAFKNPKLVLISSALLKSLPEREFKSGIAEIIKYGLIYNKKI

SEQ ID NO: 180936 - protein, 330 aa, Unknown
  Bacterial polypetide isolated from the Sargasso Sea
SRYLLKKRILIVTNETVAPLYLKQIQDTMASFGEVTSVILPDGEQFKDLTHLDSIFTALLQRNYGRDSVLVALGGGVIGDMTGFAAACYQRGVDFIQIPTTLLSQVDSSVGGKTAVNHPLGKNMIGAFYQPQIVIIDTECLQTLPAREFAAGMAEVIKYGIMWDAEFFQWLENNVQTLKGLDTQALVYAISRCCEIKADVVSQDETEQGVRALLNLGHTFGHAIEAEMGYGNWLHGEAVAAGTVLAAQTAKSMGLIDESIVRRIVQLFHAFDLPVTAPESMDFDSFIKHMRRDKKVLGGQIRLVLPTAIGRADVFSQVPESTLEQVICCA

SEQ ID NO: 180937 - protein, 368 aa, Unknown
  Bacterial polypetide isolated from the Sargasso Sea
MKQFKLNINTKSQKYPIIIGKGLYNNLHKIIVNNSIFFNKCLIIIDSKIKKKIVLKILSNFKSKNRIVYFFNANEKNKNQNNVNKILNLLLKNNFQRNDCLISIGGGITGDVSGFASSIYKRGMKFVNVPTTLLAQVDSSIGGKTGVNTAHGKNLIGSFYQPNLVVSDTNFLKTLPKREIICGYAEMLKHSLILKSKNFTFLDKNASKILKMKSPFIEKSIIESCKIKKKIVELDENERNLRKILNFGHTFAHAYETTLNYSKKLNHGEAVLLGITSAINFSLKIKLLSKKDYFMIKNHFTKNNLPNNLSNYFSKKDLQKLVLFMKNDKKNTSDLINLILLKKIGNIKLNLNFTNRKIYDFLKLQLMN

SEQ ID NO: 180938 - protein, 355 aa, Unknown
  Bacterial polypetide isolated from the Sargasso Sea
MKTRNHIYKEEYKIEFDKDLGKYLSSLNKKYYKISVITDENIYRIYKNLLNKRYLNVIKIKPGEKSKSIENKVMIERKLLKLKFNRKSAIIALGGGVVGDLVGFVASTFLRGIDLIQIPTSLVAMVDSSIGGKTGINNDLGKNLIGTFYNPKSIIVNSSFLKTLPKSELRQGLAEIIKYGIIYDGKLFKLLEKINTNFMENSEQIINKIIKNCICIKVKVVEEDFKETDKRSILNFGHTVGHGLEKLYSYKKSHGDCIGLGMAIEASIANKYFSLSDNNLNKIYTILNRFSLRCIKYSSAQIKTIIKHMELDKKNKTNKITFSLPDKIGSIMVNNKKHTIEVSKEKINSVLKEFS

SEQ ID NO: 180939 - protein, 159 aa, Unknown
  Bacterial polypetide isolated from the Sargasso Sea
MTKTKTITINLDKNSYDIHIGENLANEIPKIISPFVKRNKIFIISDESLGSIILPEIKNSFIEAGFEVFVSFVQSGEKSKSFESLEFTISELLDNGIERNDTVIAIGGGVIGDLTGFISSIIYRGINFIQVPTTLLAQVDSSVGGKTAINVKQGKNLNW

SEQ ID NO: 180940 - protein, 354 aa, Unknown
  Bacterial polypetide isolated from the Sargasso Sea
MIERYAGKGISRYKIVITDKSIPSLELNKNISKNSKVLIITDSGIPKNYIKALKDKIKKSEVYIHIIKKGETSKSFSAYIEILAELVKLRISRTDMIIAFGGGVVGDIAGFVASSYLRGINYIQIPTTLLSQVDSSVGGKTAINIPEGKNLVGAFYNPKLVLISTKFLQTLTDKEYKSGLGEVIKYALIDNRKLKIILEENTQKILDRDSKILLRIIEESIKTKSKIVTKDEKENNLRAILNFGHTFGHAIESKTDYKKLSHGAAITLGMIIASKISLYEGYIKVHQLDNIINLIDSLGLKTDYSEFKYNDLKKYILSDKKVADGKLNLVLINNKFKAFKTNKFSEDSLKKAFK

SEQ ID NO: 180941 - protein, 370 aa, Unknown
  Bacterial polypetide isolated from the Sargasso Sea
MRTLPVELPGREYKIEIGAGNLQDSLLSAIRQFDPERVVTVTNSTLEQFYPVQINKILEPEGYQNDTCILPDGEAYKNLETLQRIYDFLMEKKANRGTVMVAFGGGVIGDMAGFAAATFMRGIKMIQVPTTLLAQVDSSVGGKTAVNHPLGKNTIGAFKQPNHVSIDLEFLKTLPSRELQAGYFELAKHGLTHDRELLDFLQEGKLEPLDLDFLEEAVFRSCRVKARIVEQDETEAGLRATLNFGHTLGHLIETHCGYGTYLHGEAVGTGMLFAAFLSKQEQLLDPSSWETIREFLEPKLRSVTLPKLDYDLFSSLLLHDKKASREAVNFILLREIGSCFIQKEMPLDLIWKHFTGFCKEFPNLCQLTTD

SEQ ID NO: 180942 - protein, 134 aa, Unknown
  Bacterial polypetide isolated from the Sargasso Sea
KADVVSQDETEQGVRALLNLGHTFGHAIEAEMGYGNWLHGEAVAAGTVLAAQTAKSLGLVDESIVRRIVQLFQAFDLPVKAPESMDFDSFIQHMRRDKKVLGGQIRLVLPTAIGRAEVFSQVSESTLEQVICCA

SEQ ID NO: 180943 - protein, 293 aa, Unknown
  Bacterial polypetide isolated from the Sargasso Sea
ERNKNYRTIEKIHTVLFENRFNREDCVISFGGGIIGDIVGFASSTFKRGMKYVNIPTTLLSQVDSSIGGKTGVNNKFGKNLIGSFYQPDLVVSDMNILASLPEREIICGYAEILKSSIIDNFYNFLYLDKNLNKILKLESPFIERSIIKSCNLKKRVVEKDENEKNYRKVLNLGHTFAHSYESTLGFSKKLNHGEAVILGIKNAVEFSFKRRFLSKQKFNIIINHINKIEMKPKIEKLFKKKHIFKIMYYMRSDKKNNSNKINLILIKDFGKIIVNFQISPSDLKKYISNTLK

SEQ ID NO: 180944 - protein, 208 aa, Unknown
  Bacterial polypetide isolated from the Sargasso Sea
ALFQIGSISADTVDLEFVNENKFFFPDRSKISSLEEFFEELIKEGDSIGAKLNIKVQNCPVGLGEPVFDKLNADLAKAIMSINAVKSVSIGNSDKIPFYKGSELRDEITKTGFDSNNSGGILGGISNGDDIDISFLIKPTSSISKATTSIDKDGNEIELEIKGRHDPCVGIRAVPIAEAMVNLVLIDHFLRNQAQCGDVDQKLPFVTE

SEQ ID NO: 180945 - protein, 272 aa, Unknown
  Bacterial polypetide isolated from the Sargasso Sea
MSGNTFGKLFSVTTFGESHGTALGCIIDGCPPGLELSSSDLQQDLNRRKPGQSRYTTQRKEDDEVEILSGVFEGVTTGTPIGLMVRNQDQKSKDYSKIRDLYRPAHADYAYDRKYGIRDYRGGGRSSARETTMRVAAGAVAKKWLAERYGMQIRGYLSQLGPHSARAHDWGLVEQNPFFCGDAALVPQLEAYMQDLIKQGNSVGARINVEAERVPAGWGEPVFDRLDADIAHAMMGINAVKGVEVGDGFASVAQLGSEHRDLMSPEGFLSNH

SEQ ID NO: 180946 - protein, 188 aa, Unknown
  Bacterial polypetide isolated from the Sargasso Sea
MSGNTFGKNFCVTTFGESHGSALGCIIDGCPPQVEITEGEIQSELDKRRPGQSNVTTQRNEKDKVEILSGVFEGKTLGTPIGLIIKNEDQISSDYSNLKNTFRPNHADLTYFAKYGHRDYRGGGRSSARETAMRVAAGAIAKKFLKSRGIDVTCFVSQIETIIAEEINIDYINKNKFFFPDASKINFT

SEQ ID NO: 180947 - protein, 158 aa, Unknown
  Bacterial polypetide isolated from the Sargasso Sea
GGVIECLVRNVPSGLGMPVFDKLEADLAKALMSLPATKGFEIGSGFSGTYLKGSEHNDAFIKSDDISKLRTTSNNSGGIQGGISNGENIEMKIAFKPTATIGKEQKTVNAEGKEVLMKAKGRHDPCVLPRAVPMVDAMVALVLADHLLLNHAQCDLIT

SEQ ID NO: 180948 - protein, 232 aa, Unknown
  Bacterial polypetide isolated from the Sargasso Sea
MSFNTFGKFFRFTTWGESHGPAIGCVVDGCPPNVALKQEDIQRELNKRKPGQSKFTTQRKEDDKVEILSGVFEGKTTGTPISLIIYNKDMRSRDYETIKNKFRPGHADFTYFKKYGIRDYRGGGRQSARETASRVAAGAVAKKVLEKKIGKKYKVVGAVTQLGILGCDVTRWNDKEIGKNPFFCPDKKIIKLWEKYLLAIRKSGSSCGAIIEVRARGVPVGLGAPIYSKLDM

SEQ ID NO: 180949 - protein, 318 aa, Unknown
  Bacterial polypetide isolated from the Sargasso Sea
GLAISETDIQKELNKRRPGQSRFTSQRKETDEVSIMSGVFEGVTTGTPINLVVQNVDQKSKDYTAIKDKFRPGHADFTYYHKYGIRDYRGGGRSSARETVMRVAAGAIARKYLFEKTGIEIFGFLGQLGPIHLEMKDRSFIETNPFFCGDPEKISELESYMDQLRKEGDSIGARINLVATNVPVGLGEPVFDKLEADIAHGLMSINAVKGVEIGAGFSVVNQKGSEHRDEIDSDGFKQNNSGGTLGGISSGQDIFASIALKPTSSIIKPAETIDKTGEKTEIVTKGRHDPCVGLRATPIGEAMLAIVLMDHFMRNRAQ

SEQ ID NO: 180950 - protein, 196 aa, Unknown
  Bacterial polypetide isolated from the Sargasso Sea
DSINHKDINNKYFFCDESKLADLDSMFKDLIEEGNSVGAKLGVVVKNCPVGLGDPVFEKLDANLAKAIMTVNAVKSVSIGNADDLLNLKGSEARDEMTSSGYASNNSGGILGGISNGDDISLSFIIKPTSSIKSKGKTVNKDGEEVDIEVTGRHDPCVGIRAVPIAEAMVSLVLVDHLLINRAQCAEVKQELPFSE

SEQ ID NO: 180951 - protein, 245 aa, Unknown
  Bacterial polypetide isolated from the Sargasso Sea
YGIRDYRGGGRQSARETATRVAAGAIAKKVLQTKIGVKYKVIGAVTQLGILGCDTNNWSDNFILKNSLFCPDKSILRIWEKYLLSIRKAGSSCGAIIELRARGLPVGLGAPIYSKLDMDLASAMMSINAVKGVNIGSGMNSAQLTGEQNSDEIFRKGKKINFKTNNAGGILGGISTGQDIIVSFAVKPTSSILTSRKTIDKFGKNTSISVKGRHDPCVGIRAVPIGEAMMHCVLLDHLFDEYCSV

SEQ ID NO: 180952 - protein, 212 aa, Unknown
  Bacterial polypetide isolated from the Sargasso Sea
MSFNTFGKLFRFTTWGESHGPAIGCIVDGCPPNIHLKEQDIQIELDKRKPGQSKFTTQRKEDDKVQILSGVFEGKTTGTPISLIIYNKDMRSKDYSNIKDKFRPGHADFTYFKKYGIRDYRGGGRSSARETAARVAAGAIAKVVLQKKLGKKFKVIGAVTQLGILGCDTNQWNDKVISKNPFFCPDKSMIKLWEKYLLGVRKAGSSCGAVIE

SEQ ID NO: 180953 - protein, 147 aa, Unknown
  Bacterial polypetide isolated from the Sargasso Sea
MSSSFGKIFRVSTFGESHGGAVGVILDGCPPKLEIDIKLIQNELDRRRPGQSDITTPRNEEDKIEILSGIKEGLTLGTPIAMLVRNKDQRPGDYNNLEQVFRPSHADGTYHLKYGIQASSGGGRASARETIGRVAAGAVAKQLLKNV

SEQ ID NO: 180954 - protein, 135 aa, Unknown
  Bacterial polypetide isolated from the Sargasso Sea
LGEPVYEKFDSDIAKAMMTINAVKGVEIGNGFNSVYETGISNVDEMGVKNNKPFFYSNNNGGVLGGITTGQEVICRFVVKPTSSIITKRKTITTNLKKTTISTKGRHDPCVGIRAVPVGEAMMATTIADHCLRYL

SEQ ID NO: 180955 - protein, 291 aa, Unknown
  Bacterial polypetide isolated from the Sargasso Sea
SFKVKQLGTPISMIIYNTDMRSRDYETIKNKFRPGHADFTYLKKYGIRDYRGGGRQSARETASRVAAGAIAKKVLEKKIGKKYKVIGAVTQLGILGCDTNNWNDKFISKNPFFCPDKNILNLWEKYLLNIRKAGSSCGAIIEVRARGIPVGLGAPIYSKLDMDLASAMMSINAVKGVNIGSGMNSAQLSGEQNSDEMYQKGDKIKFESNNAGGILGGISSGQEIIVSFAVKPTSSIVTSRKTINKFGKNTSISVRGRHDPCVGIRAVPIGEAMMHCVVLDHFLMNTAQCKS

SEQ ID NO: 180956 - protein, 64 aa, Unknown
  Bacterial polypetide isolated from the Sargasso Sea
VKPTSSILKEKKTIDIEGKNQTLITKGRHDPCVGIRAVPIGQAMMACVLADHLLLSGKYYSNIS

SEQ ID NO: 180957 - protein, 272 aa, Unknown
  Bacterial polypetide isolated from the Sargasso Sea
MSFNTFGKLFRFSTWGESHGPAIGCIVDGCPPNINLSEKDIQKELDKRKPGQSKFTTQRKEDDKVQILSGVFDGRTTGTPISLIIYNKDMRSKDYGNIKDKFRPGHADFTYFKKYGIRDYRGGGRSSARETASRVAAGAIAKLVLQKKLGKKFKVIGAVTQLGILGCDTDKWNDKIISKNPFFCPDKSMIKLWEKFLLGVRKSGSSCGAVIEIRARGIPVGLGAPIYSKLDSDIASSFMSINAVKGVNIGAGMNSAQLSGEQNSDEISQKVK

SEQ ID NO: 180958 - protein, 94 aa, Unknown
  Bacterial polypetide isolated from the Sargasso Sea
MGIKYKVVGAVTQLGILGCDTGKWDEKVNILSGVFEGRTTGTPISMIIYNKDMRSRDYETIKNKFRPGHADYTYFKKYGIRDYRGGGRQSARET

SEQ ID NO: 180959 - protein, 139 aa, Unknown
  Bacterial polypetide isolated from the Sargasso Sea
PGHADYTYFKKYGIRDYRGGGRQSARETASRVAAGAIAKKILQNKLGIKYKVVGAVTQLGILGCDTGKWDEKVNILSGVFEGRTTGTPISMIIYNKDMRSRDYETIKNKFRPGHADYTYFKKYGIRDYRGGGRQSARET

SEQ ID NO: 180960 - protein, 132 aa, Unknown
  Bacterial polypetide isolated from the Sargasso Sea
MSGNTFGKLFQVTTYGESHGKALGCVIDGCPPQIEISVDDIQSELNRRKPGQSDITSQRKEADIVEILSGVFEGKTLGTPISLIIYNQDQRSKDYSNIKDVFRPNHADITYQAKYGHRDYRGGGRSSARETA

SEQ ID NO: 180961 - protein, 117 aa, Unknown
  Bacterial polypetide isolated from the Sargasso Sea
VKGVNIGAGMNSAQLSGEQNSDEISQKGKKLKFDTNNAGGILGGISTGQEIIASFAVKPTSSILTTRKTINKFGKNTTISVTGRHDPCVGIRAVPVGEAMMNCVLLDHYLMNKAQCH

SEQ ID NO: 180962 - protein, 132 aa, Unknown
  Bacterial polypetide isolated from the Sargasso Sea
MDMDLASAMMSINAVKGVNIGSGMNSAQLTGEQNSDEIIKKGKKIKFISNNAGGILGGISSGQEIIISFAVKPTSSILNSRKTIDKFGKNTNISVKGRHDPCVGIRAVPIGEAMMHCVILDHYLMNKAQCQS

SEQ ID NO: 180963 - protein, 309 aa, Unknown
  Bacterial polypetide isolated from the Sargasso Sea
PENEEDKIEILSGIKEGLTLGTPIAMLVRNKDQRPGDYNNLEQVFRPSHADGTYHLKYGIQASSGGGRASARETIGRVAAGAVAKQLLKTFCDTEILSWVKRIHDIDSDINKEKISLKKIDSNIVRCPDEKVSIEMIERIKELKRLGDSCGGVIECLVRNVPSGLGMPVFDKLEADLAKALMSLPATKGFEIGSGFSGTYLKGSEHNDAFIKSDDISKLRTTSNNSGGIQGGISNGENIEMKIAFKPTATIGKEQKTVNAEGKEVLMKAKGRHDPCVLPRAVPMVDAMVALVLADHLLLNHAQCDLINK

SEQ ID NO: 180964 - protein, 188 aa, Unknown
  Bacterial polypetide isolated from the Sargasso Sea
MSFNTFGKIFRFTTWGESHGPAIGCVIDGCPPNIPMSEKDIQIDMDRRRPGQSKFTTQRKESDKVVILSGVFEGKTTGTPISIIIYNEDKRSRDYETIKNKFRPGHADYTYFKKYGIRDYRGGGRQSARETACRVAAGAVAKIVLKKMIGAKFNVIGAVTQLGLMSCDKSNWNDNEIRKNPFFCPDKK

SEQ ID NO: 180965 - protein, 186 aa, Unknown
  Bacterial polypetide isolated from the Sargasso Sea
MSFNTFGKLFRFTTWGESHGPAIGCIVDGCPPNINLKEQDIQIELDKRKPGQSKFTTQRKEDDKVQILSGVFEGKTTGTPISLIIYNKDMRSKDYSNIKDKFRPGHADFTYFKKYGIRDYRGGGRSSARETAARVAAGAIAKVVLQKKLGKKFRVIGAVTQLGILGCDTNEWNDKVISKNPFFCPE

SEQ ID NO: 180966 - protein, 226 aa, Unknown
  Bacterial polypetide isolated from the Sargasso Sea
KQLLKTFCDTEILSWVKRIHDIDSDINKEKISLKKIDSNIVRCPDEKVSIEMIERIKELKRQGDSCGGVIECLVRNVPSGLGMPVFDKLEADLAKALMSLPATKGFEIGSGFSGTYLKGSEHNDAFIKSDDISKLRTTSNNSGGIQGGISNGENIEMKIAFKPTATIGKEQKTVNAEGKEVLMKAKGRHDPCVLPRAVPMVDAMVALVLADHLLLNHAQCDLINKQ

SEQ ID NO: 180967 - protein, 126 aa, Unknown
  Bacterial polypetide isolated from the Sargasso Sea
GIGGVRGFEIGLGFKIASMKGSQVNDIMVGKSKGKVKFRTNNAGGILGGISNGNDLILRFALKPTSSISQKQDSIDNKGKQRKLQVKGRHDPCLCPRAVPIAEAMVNLVLLDCILENNLSTVKKIT

SEQ ID NO: 180968 - protein, 158 aa, Unknown
  Bacterial polypetide isolated from the Sargasso Sea
MSNSFGNLFTLTTFGESHGECIGGIIDGCPAGKKIDIKSVQTDLDRRKPGQSKIVTQRKEDDQLEILSGIFEGKTTGTPIGFIIKNKDHKSKDYNHIKESFRPSHADYVYEKKYGNRDYRGGGRSSARETACRVVAGSIAKQILDNVKINAYVSSVGN

SEQ ID NO: 180969 - protein, 135 aa, Unknown
  Bacterial polypetide isolated from the Sargasso Sea
MSFNTFGKLFRFTTWGESHGPAIGCIVDGCPPNINLKEQDIQIELDKRKPGQSKFTTQRKEDDKVQILSGVFEGKTTGTPISLIIYNKDMRSKDYSNIKDKFRPGHADFTYFKKYGIRDYRGGGRSSARELRQEL

SEQ ID NO: 180970 - protein, 189 aa, Unknown
  Bacterial polypetide isolated from the Sargasso Sea
MSFNTFGKIFRFTTWGESHGPAIGCVIDGCPPNIPISEKDIQKDMDRRRPGQSKFTTQRKESDKVIILSGIFEGKTTGTPISIIIHNEDKKSRDYESIKNKFRPGHADYTYFKKYGIRDFRGGGRQSARETACRVAAGAVAKIVLKKIIGKKFKVIGAVTQLGLMSCDKQNWKDSEIRKNPFFCPDKQS

SEQ ID NO: 180971 - protein, 234 aa, Unknown
  Bacterial polypetide isolated from the Sargasso Sea
ETAMRVTAGAIADIILKSYFKDFQIQGCVKQIGPYKIEKNQINWEFSKTNPLFCPNKKVLKVWEDFLDKVRKKGSSAGAIIQLKASGIPPGIGSPVYSKLDSEIASGLMSINAVKGVEIGSGFNLVDIDGTKASDEINIDENNNVTFKSNHSGGILGGISSGQDIEVSFVVKPTSSILTPKESVDIDGNNIKVQTKGRHDPCVGIRAVPVGEAMLSFTLADLYLAHKAQVGTIN

SEQ ID NO: 180972 - protein, 279 aa, Unknown
  Bacterial polypetide isolated from the Sargasso Sea
SLIIYNEDMRSKDYNDIKDKFRPGHADFTYFKKYGIRDYRGGGRSSARETAARVAAGAVAKKVLENKLGKKFKITGAVTQLGILGCDTNKWDDKIISKNPFFCPDKSMLKIWEKYLLSIRKAGSSCGAIIEVRANGIPAGLGAPIYSKLDSDIASAMMSINAVKGVNIGSGMNSAQLSGEENSDEISQNRKKTKFKSNNAGGILGGISSGQEIIVSFAVKPTSSILKSRKTINKFGKNTSISVKGRHDPCVGIRAVPVGEAMLSCVLLDHYLLHKAQCS

SEQ ID NO: 180973 - protein, 203 aa, Unknown
  Bacterial polypetide isolated from the Sargasso Sea
AVTQLGILGCDTNQWNDKVISKNPFFCPDKSMIKLWEKYLLGVRKSGSSCGAVIEIRARGVPVGLGAPIYSKLDTDITSGLMSINAVKGVNIGAGMNSAQLSGEQNSDEIYSKGNKLKFNSNKAGGILGGISTGQEIIASFAVKPTSSILTSRKTINKFGKNTSISVKGRHDPCVGIRAVPIGEAMMNCVLLDHYLMNKAQCS

SEQ ID NO: 180974 - protein, 70 aa, Unknown
  Bacterial polypetide isolated from the Sargasso Sea
KPTSSIKTEGNTINKKGEEIKIEVTGRHDPCVGIRAVPIAEAMVSLVLVDHLLINKAQCANVEQNLPFTE

SEQ ID NO: 180975 - protein, 172 aa, Unknown
  Bacterial polypetide isolated from the Sargasso Sea
MLKIWEKYLLNIRKAGSSCGAIIEVRANGIPAGLGAPIYSKLDSDIASAMMSINAVKGVNIGSGMNSAQLSGEENSDEISQDKKKTKFRSNNAGGILGGISSGQEIIVSFAVKPTSSILKIRKTINKFGKNTNISVKGRHDPCVGIRAVPVGEAMLSCVLLDHYLLHKAQCG

SEQ ID NO: 180976 - protein, 114 aa, Unknown
  Bacterial polypetide isolated from the Sargasso Sea
MSFNTFGKSFRFTTWGESHGPAIGCIIDGCPPLIPLKEADIQKELNKRKPGQSKFTTQRKESDKVQILSGVFEGKTTGTPISLIIYNEDMRSKDYNDIKDKFRPGHADFTYFKK

SEQ ID NO: 180977 - protein, 285 aa, Unknown
  Bacterial polypetide isolated from the Sargasso Sea
GTPIALLIRNEDQISKDYSNIKDTFRPNHADLAYQGKYGIRDYRGGGRSSARETAMRVAGGAVAKKYLNTHGIITKGFVSQIGSISADTVDLEFVNENKFFFPDRSKISSLEEFFEELIKEGDSIGAKLNIKVQNCPVGLGEPVFDKLNADLAKAIMSINAVKSVSIGNSDMIPFSKGSELRDEITKTGFDSNNSGGILGGISNGDDIDISFLIKPTSSISKATTSIDKDGNEVELEIKGRHDPCVGIRAVPIAEAMVNLVLIDHLLRNKAQCGDVDQKLPFVTE

SEQ ID NO: 180978 - protein, 140 aa, Unknown
  Bacterial polypetide isolated from the Sargasso Sea
FDKLDADLAKAIMSINAVKSVSIGNSQNIAKLRGSELRDEISSKGFSSNNSGGILGGISNGDDINIDFMIKPTSSISKPTKSIDEQGNEVDLEIKGRHDPCVGIRAVPIAEAMVNLVLIDHFLRNQAQCGHIEQNLPFGE

SEQ ID NO: 180979 - protein, 182 aa, Unknown
  Bacterial polypetide isolated from the Sargasso Sea
MSFNTFGKIFRFTTWGESHGPAIGCIVDGCPPNIALSEKDLQKDMNRRRPGNSKFVSQRKESDKIEILSGVFNGKTTGTPISILIRNEDKRSRDYESIKNKFRPGHADFTYFKKYGIRDYRGGGRQSARETASRVAAGAIAKTVLKNIIGKKFNIIGGVIQLGLMGCNRNNWNNKEIRKNPF

SEQ ID NO: 180980 - protein, 171 aa, Unknown
  Bacterial polypetide isolated from the Sargasso Sea
MSFNTFGKIFRFTTWGESHGPAIGCVVDGCPPNISIKEKDIQVELNKRKPGQSKFTTQRKEDDNVNILSGVFEGKTTGTPISMIIYNKDMRSRDYETIKNKFRPGHADFTYFKKYGIRDYRGGGRQSARETASRVAAGAIAKKVLENKIGKKYKVVGAVTQLGILGCDTKK

SEQ ID NO: 180981 - protein, 122 aa, Unknown
  Bacterial polypetide isolated from the Sargasso Sea
MSNSFGKIFKISTYGESHGKAIGVIIDGCPSGIKIEELDIQKELDRRKPGQSKITTQRKESDSVQILSGVFNGKTTGSPISLFIKNKDQKSSDYDHISKAFRPSHADYTYHKKYKNRDHRGE

SEQ ID NO: 180982 - protein, 228 aa, Unknown
  Bacterial polypetide isolated from the Sargasso Sea
MSFNTFGKIFRFTTWGESHGPAIGCVIDGCPPNIPISERDIQKDMDMRKPGKSKFTSQRKESDKAIILSGVFKGKTTGTPISIIINNEDKRSRDYESIKNKFRPGHADFTYFKKYGIRDFRGGGRQSARETASRVAAGAVAKIVLKKLLGKKFHLVGAVTQLGLMSCNKNNWNNSEIRKNPFFCPDKKSVKLWEKYLDAVRKNGSSCGAIIELRAEGVPVGLGAPNIF

SEQ ID NO: 180983 - protein, 243 aa, Unknown
  Bacterial polypetide isolated from the Sargasso Sea
QISEKQIQIELNKRKPGQSKFTTQRKEDDKVHILSGIFEGKTTGTPISMIIYNKDMRSRDYETIKNKFRPGHADYTYFKKYGIRDYRGGGRQSARETASRVAAGAIAKKVLQTKLGKKFKVIGAVTQMGILGCDTNNWNDKFIQSNTLFCPDKSILKLWEKYLLGIRKAGSSCGAIIEVRARGLPAGLGAPIYSKLDMDLASAMMSINAVKGVSIGSGMNSATLTGEQNSDEISQKGKKIIFE

SEQ ID NO: 180984 - protein, 170 aa, Unknown
  Bacterial polypetide isolated from the Sargasso Sea
MSFNTFGKIFRFTTWGESHGPAIGCIVDGCPPNVSINEADIQKELNKRKPGQSKFTTQRKEDDKVNILSGVFEGKTTGTPISLIIYNKDMRSRDYETIKNKFRPGHADYTYFKKYGIRDYRGGGRQSARETASRVAAGAIAKKVLEVKIGKKYNVKGAVTQLGILGCDIK

SEQ ID NO: 180985 - protein, 191 aa, Unknown
  Bacterial polypetide isolated from the Sargasso Sea
GIEINENDIQLELDRRKPGQSKITTQRKESDSVEVLSGVFNGKTTGSPISLYIKNKDQKSSDYDHISTVFRPSHADYTYHKKYKNRDHRGGGRSSARETANWVAAGALAKKILNKIGVEINAYVSKVGKMEMDINYKDLNFKNTESNIVRCPDKNFANKFITIIDEARKNRDTVGGVISCIISGCPVGIWR

SEQ ID NO: 180986 - protein, 253 aa, Unknown
  Bacterial polypetide isolated from the Sargasso Sea
MSFNTFGKIFRFTTWGESHGPAIGCIVDGCPPNIPLSEKDIQNDMNRRRPGSSKFVSQRKESDKIEILSGVFNGKTTGTPISILIRNEDKRSRDYESIKNKFRPGHADFTYFQKYGIRDYRGGGRQSARETASRVAAGAIAKTVLKNILGKKFNIIGAVIQLGLMSCDKNNWNDNETKKNPFFCPDKKSVKLWEKYLLAVRKSGSSCGAIIELRARGIPAGLGAPIYSKLDSDISAALMSINAVKGVKIGAGM

SEQ ID NO: 180987 - protein, 290 aa, Unknown
  Bacterial polypetide isolated from the Sargasso Sea
WGESHGPAIGCIVDGCPPNIQIKLEEIQKELNKRKPGQSRFTTQRKEDDKVEILSGMFEGKTTGTPISMIIYNKDMRSKDYGNIKNKFRPGHADFTYFQKYGIRDYRGGGRQSARETASRVAAGAIAKKVLQTKLGKKYNVIGAVTRLGILGCDLNNWRDKEISKNPLFCPDKSAIKLWEKYLLGIRKAGSSCGAVIEVRARGVPVGLGAPIYSKLDMDLASAMMSINAVKGVNIGSGMNSAQLSGEQNSDEMSKKGKKTKFYSNNAGGILGGISSGQEIVVSFAVKPTL

SEQ ID NO: 180988 - protein, 300 aa, Unknown
  Bacterial polypetide isolated from the Sargasso Sea
SDKAEILSGVFESKTTGHPIALNIKNEDQRSKDYNEIANKFRPSHADITYHEKYKIRDYRGGGRSSARETAVRVAAGAIAFKILEERFPKLFIKASVIQIGEHKIDKENFSWNEVDNNPFFCADKETVPIWEKSLHSLRKSGNSTGAIIEIIAENVPKGIGSPIYKKLDSQIAEGLMSINAVKGVEIGSGFKSASSTGSQNNDEIFPDNDGGYIFNSNNAGGILGGISTGQPIVANFAVKPTSSILIEKNSIDVENQKTKIITKGRHDPCVGIRAVPIAEAMMAIILVDQIMMHEAQIGS

SEQ ID NO: 180989 - protein, 299 aa, Unknown
  Bacterial polypetide isolated from the Sargasso Sea
GKIFRFTTWGESHGPAIGCVIDGCPPNISIKEKDIQNELNKRRPGQSKFTTQRKEDDKINILSGIFEGKTTGTPISLLIYNKDMRSRDYETIKNKFRPGHADFTYFKKYGIRDYRGGGRQSARETATRVAAGAVAKKVLEKKIGKKYKVTGGVTQLGILGCNLKNWNDNFISKNPFFCPDKSIVKIWEKYLLSIRKAGSSCGAIIEIRAKGVPLGLGAPIYSKLDMDLAAAMMSINAVKGVNIGSGMNSAQLTGEQNSDEISQKGKKTSFKSNNAGGILGGISTGQNIVLSFAVKPTSS

SEQ ID NO: 180990 - protein, 147 aa, Unknown
  Bacterial polypetide isolated from the Sargasso Sea
RANGIPAGLGAPIYSKLDSDIASAMMSINAVKGVNIGSGMNSAQLSGEENSDEILQKNSKLKFKSNNAGGILGGISSGQEIIVSFAVKPTSSILKSRKTINKFGKNTTISVKGRHDPCVGIRAVPVGEAMLSCVLLDHLLMHKAQCQ

SEQ ID NO: 180991 - protein, 181 aa, Unknown
  Bacterial polypetide isolated from the Sargasso Sea
FSFTTWGESHGKAIGCVVDGVPSNINLTEKDIQPYLDKRKPGQSKFTTQRKEEDKVQILSGTFEGKTTGHPISLIIYNQDQRSKDYGDIKSKFRPGHADYTYWKKYGIRDYRGGGRSSARETAMRVAAGAIARKIIKNKIKNQVIITGALIQIGNHKINYDNWNNNFIQKNNFWSPDKEII

SEQ ID NO: 180992 - protein, 109 aa, Unknown
  Bacterial polypetide isolated from the Sargasso Sea
MNSATLTGDENADEIRSNKTNLPIYESNNSGGILGGISTGQDLITRFAVKPTSSILKTKNTVNENYDNVQIQTTGRHDPCVGIRAVPVGEAMMACVLLDQYLINRGQIG

SEQ ID NO: 180993 - protein, 177 aa, Unknown
  Bacterial polypetide isolated from the Sargasso Sea
MSFNTFGKIFRFTTWGESHGPAIGCVVDGCPPNIHISEKDIQKDLDRRRPGKSKFTSQRKESDKVKILSGVFQGKTTGTPISMIIYNDDARSRDYETIKNKFRPGHADYTYFLKYGIRDYRGGGRQSARETASRVAAGAIAKIALSEILGKKFKVVGGVVQLGILGCNKNNWNEKEI

SEQ ID NO: 180994 - protein, 231 aa, Unknown
  Bacterial polypetide isolated from the Sargasso Sea
VAAGSVARKYLRESAGVEITVYLSQIGSIKVNKIDIKEIEKNPFFCPDKELIPKIEDLINELSDEGDSIGAKITVIVRNLPSGLGEPVFDKLDGEIAKALMGINAVKGVEIGAGFSVIESKGSESRDEMSPEGFKSNTSGGTSGGISTGQDLIVSIALKPTSSIAKEGDTIDKEGRATKIKVTGRHDPCVGIRATPIAESMVALVLIDHLLRNRGQNLDVSSGVPEIPPNQ

SEQ ID NO: 180995 - protein, 292 aa, Unknown
  Bacterial polypetide isolated from the Sargasso Sea
GQSKFTTQRKEDDKVNILSGVFEGKTTGTPISMIIYNKDMRSRDYETIKNKFRPGHADFTYFKKYGIRDYRGGGRQSARETASRVAAGAIAKKVLENKIGKKYNVKGAVTQLGILGCDIKKWDDKFISKNPFFCPDKSILKLWEKYLLSIRKAGSSCGAIIEVRARGVPVGLGAPIYSKLDMDLASAMMSINAVKGVNIGSGMNSAQLTGEQNSDEISQTGNKTKFDSNNAGGILGGISSGQEITVSFAVKPTSSILTSRKTIDRFGKNTSISVKGRHDPCVGIRAVPMEKP

SEQ ID NO: 180996 - protein, 336 aa, Unknown
  Bacterial polypetide isolated from the Sargasso Sea
CIIDGCPPLIQLKEQDIQKELDKRKPGQSKFTTQRKESDKVQILSGVFEGKTTGTPISLIIYNEDMRSKDYKNIKDKFRPGHADFTYFKKYGIRDYRGGGRSSARETAARVAAGAIAKKVLEKKLGKRFSISAAVTQLGILGCDTTKWNDKIIYKNPFFCPDKSMLKIWEKYLLSIRKAGSSCGAVIEVRANGIPAGLGAPIYSKLDSDIASAMMSINAVKGVNIGSGMNSAQLSGEENSDEISQNNKRMKFSSNNAGGILGGISSGQEIVVSFAVKPTSSILKSRKTINKFGKNTTISVTGRHDPCVGIRAVPVGEAMLSCVLLDHYLMNKAQCN

SEQ ID NO: 180997 - protein, 184 aa, Unknown
  Bacterial polypetide isolated from the Sargasso Sea
MSFNTFGKLFRFTTWGESHGPAIGCIVDGCPPNINLKEQDIQIELDKRKPGQSKFTTQRKEDDKVKILSGVFEGKTTGTPISLIIYNKDMRSKDYSNIKDKFRPGHADFTYFKKYGIRDYRGGGRSSARETAARVAAGAIAKVVLQKKLGKKFKVIGAVTQLGILGCDTNQWNDKVISKNPFFC

SEQ ID NO: 180998 - protein, 240 aa, Unknown
  Bacterial polypetide isolated from the Sargasso Sea
LYRPSHADYTYEAKYGFRNWMGGGRASARETIGRVAAGALAKKLLKQWNGTQTLAWVEQIHDLKANVDHSQVTEQQIEQSIVRCPDTAASNEMEQRILEVRKKGDSVGGIIRAVSRNVPVGLGEPVFDKLTADLAKALMSLPATRGVEFGLGFQSVSLMGSEHNDEYVIEDGNVKTRSNRSAGIQGGISNGEEIDLRIAFKPTATINHEQKTVTRDGESTTLSAKGRHDPCVLPRAVPMV

SEQ ID NO: 180999 - protein, 157 aa, Unknown
  Bacterial polypetide isolated from the Sargasso Sea
MGNSFGKIFKLTSFGESHGKGIGGVIDGVPPNIPIDVEVIQNDLQRRKPGQSNIVTQRKEDDSAEFYSGIFEGKTTGTPIGFFIKNKDQKTKDYNHIKDSFRPSHADFVYEKKYGNRDYRGGGRSSARETASRVVAGSIAKQILNTVTIKAFVSQVG

SEQ ID NO: 181000 - protein, 241 aa, Unknown
  Bacterial polypetide isolated from the Sargasso Sea
KYGIRDYRGGGRSSARETTSRVVAGAIAKQFLSPIKITAYVSKVGSLGLEKPYSDLHFDEIEKNPVRCPDAEMAQKMENYIKEVRKAGDTVGGIVSAVIQKVPVGLGEPAFDKLHALLGHAMLSINAVKGFEYGSGFVGASLRGSAHNDLFNPDGTTKTNHSGGIQGGISNGMDIYFNVAFKPVATIMQSQETIDKEGNKVAMQGKGRHDPCVVPRAVPIVEAMAALVLADFSLLNRTIRK

SEQ ID NO: 181001 - protein, 180 aa, Unknown
  Bacterial polypetide isolated from the Sargasso Sea
MSLNSFGHIYKVTTWGESHGPSLGATIDGCPPGIEINQSQLQSWLDKRKPGQNKYTTQRNEPDSVEILSGVFEGVSTGTPIQLLIKNTDQRSKDYSEIAQTFRPGHADITYWQKYGIRDYRGGGRSSARETAARVAAGGIARLALNHFAPDIEIYGYMTQMGDQKIDRSQIDLNKINNNP

SEQ ID NO: 181002 - protein, 315 aa, Unknown
  Bacterial polypetide isolated from the Sargasso Sea
KRKPVQSKFTTQRKEDDKVEILSGTFEGKTTGTPISMIIFNKDMRSKDYKNIKDKFRPGHADYTYFKKYGIRDYRGGGRQSARETASRVAAGAIAKQVLEKIIGKKYSVIGAVTQLGILGCDIEKWNDKFISKNPLFCPDKTVLKLWEKYLLGIRKAGSSCGAIIEVRARGVPVGLGAPIYSKLDMDLASAMMSINAVKGVNIGSGMNSAQLSGEQNSDEMSQKGKKTKFKSNNAGGILGGISSGQEIMVSFAVKPTSSILSQRKTINKFGKNTSISVTGRHDPCVGIRAVPIGEAMMHCVILDHYLMNKAQCGN

SEQ ID NO: 181003 - protein, 256 aa, Unknown
  Bacterial polypetide isolated from the Sargasso Sea
MSFNTFGKLFRFTTWGESHGPAIGCIVDGCPPNINLNEKDIQLELDKRKPGQSKFTTQRKEDDKVQILSGVFEGKTTGTPISLIIYNKDMRSKDYGNIKDKFRPGHADFTYFKKYGIRDYRGGGRSSARETASRVAAGAIAKLVLQKKLGKKFKVIGAVTQLGILGCDTSQWNDKIISKNPFFCPDKSMIKLWEKYLLGVRKSGSSCGAVIEVRARGIPAGLGAPIYSKLDSDIASAFMSINAVKGVNVGAGMNSA

SEQ ID NO: 181004 - protein, 288 aa, Unknown
  Bacterial polypetide isolated from the Sargasso Sea
KLFRFTTWGESHGLAIGCIIDGCPPLIDLKEHDIQKELNKRKPGQSKFTTQRKESDKIQILSGVFEGKTTGTPISLIIYNEDMRSKDYKNIKDKFRPGHADFTYFKKYGIRDYRGGGRSSARETAARVAAGAIAKKVLEKKLGKKFKISGAVTQLGILGCDTTKWNDKIIYKNPFFCPDKSMLKIWEKYLLSIRKAGSSCGAIIEVRAKGIPPGLGAPIYSKLDADITSAMMSINAVKGVNIGSGMNSAQLSGEENSDEISQNKKKLKFNSNNAGGILGGISSGQEII

SEQ ID NO: 181005 - protein, 268 aa, Unknown
  Bacterial polypetide isolated from the Sargasso Sea
EIAKQFRPGHADITYQTKYGIRDYRGGGRSSARETAVRVAAGAIAFKVLEHKLEKPLVIKASVIQMGPHKINKKNFDWNEVDKNPFFCGDAIAAKEWESWLDNLRKNGNSAGAIIEVIAENVPKGLGSPVYKKLDSQIAEALMSINAVKGVEIGSGFNLASITGDEANDEIFPDNKGSYYFGSNHSGGILGGISSGQPIIARFIVKPTSSILKEKNSINSENEAIQIKTKGRHDPCVGIRAVPVAEAMMAITLLDQLLEHESQIGIIK

SEQ ID NO: 181006 - protein, 251 aa, Unknown
  Bacterial polypetide isolated from the Sargasso Sea
YFKKYGIRDYRGGGRQSARETASRVAAGAIAKKVLQTKIGKKYKVIGAVTQLGILGCDKNKWNDNFILSNSLFCPDKSVLKLWEKYLLSIRKAGSSCGAIIEVKARGLPAGLGAPIYSKLDMDLASAMMSINAVKGVNIGSGMNSALLTGEENSDEISQKGKKINFKSNNAGGILGGISSGQDITVSFAVKPTSSILTSRKTIDKFGKNTSISVKGRHDPCVGIRAVPIGEAMMHCVLLDHYMMNIAHCKS

SEQ ID NO: 181007 - protein, 281 aa, Unknown
  Bacterial polypetide isolated from the Sargasso Sea
FNTFGKIFRFTTWGESHGPSIGCIVDGCPPNIAISEKEIQKDMDKRRPGQSKFTTQRKESDKVSILSGVFQGKTTGTPISMIIYNEDKRSRDYESIKNKFRPGHADFTYFKKYGIRDYRGGGRQSARETASRVAAGAIAKIVLKKLIGKKISITGAVTQLGIMGCNTSKWNDKEIRRNAFFCPDKSSVKLWEKYLMEIRKSGSSCGAVIELRARGIPIGLGAPIYSKLDADLAAALMSINAVKGVNIGAGMSSALLTGEENSDEIRGSSGKIKFKSNKAGG

SEQ ID NO: 181008 - protein, 266 aa, Unknown
  Bacterial polypetide isolated from the Sargasso Sea
PISLIIYNEDMRSKDYKYIKDKFRPGHADFTYFKKYGIRDYRGGGRSSARETAARVAAGAIAKKVLQKKLGKKFRISAAVTQLGILGCDTTKWNDKVIYKNPFFCPDNSMLKTWEKYLLSIRKAGSSCGAIIEVRAKGIPTGLGAPIYSKLDADIASAMMSINAVKGVNIGSGMNSAQLSGEENSDEISLNKKKLKFNSNNAGGILGGISSGQEIIVSFAVKPTSSILKSRKTINKFGKNTSISVRGRHDPCVGIRAVPIGEAMLS

SEQ ID NO: 181009 - protein, 166 aa, Unknown
  Bacterial polypetide isolated from the Sargasso Sea
MSGNSFGKLFSVTTFGESHGKAIGCIVDGCPPGYKVSEKDIQPDLNRRKPGQSKYTTQRKEDDKVEILSGTFEGITTGTPIMLIIHNIDQRSRDYSEIKNKFRPGHADFTYQQKYGLRDYRGAGRSSARETVARVAAGAIAKKILKEVCKTNIYGYVSQLGNIIPQ

SEQ ID NO: 181010 - protein, 290 aa, Unknown
  Bacterial polypetide isolated from the Sargasso Sea
IEIKKEDIQYELNRRKPGQSDVTTQRKEDDAVEILSGVFEGKTLGTPIGMIIYNKDQKSKDYSNIKDVFRPNHADITYQAKYGHRDYRGGGRASARETANWVAAGAIAKKILKKEGVSVNGFVSEIGKVKADTINHKNISNKYFFSDESKLSELDSMFKDLIKEGNSVGAKLGVIVENCPVGLGDPVFEKLDANLAKAIMTINAVKSVSIGNADDLLSLKGSEARDEITAAGFISNNSGGILGGISNGDDITLSFIIKPTSSIRTTGKTVNKEGNEVEIEVTGRHDPCVG

SEQ ID NO: 181011 - protein, 152 aa, Unknown
  Bacterial polypetide isolated from the Sargasso Sea
MAGNSFGQMFRISTFGESHGPALGCVIDGCPPGLPITEEDIQRDLDRRKPGTSRYATQRKEPDAVSILSGVFEGRTTGTSIGLVIHNTDHRSRDYSDVKDIFRPAHADYSYLKKYGTRDYRGGGRASARETAMRVAAGAIARRFLEEAYGIS

SEQ ID NO: 181012 - protein, 101 aa, Unknown
  Bacterial polypetide isolated from the Sargasso Sea
MSFNTFGKLFRFTTWGESHGPAIGCVVDGCPPGINLTEKEIQVDLDRRKPGKSKFTSQRKEADKVEILSGIFQGKTTGTPISMIIYNKDAKSRDYETIKNK

SEQ ID NO: 181013 - protein, 163 aa, Unknown
  Bacterial polypetide isolated from the Sargasso Sea
GVRKAGSSCGAVIEIRGKGIPIGLGAPIYSKLDMDLASAMMSINAVKGVNIGSGMNSAQLTGEQNSDEIFQTKTKTKFKSNNAGGILGGISTGQNIIISFAVKPTSSILNTRKTIDKFGKNTSISVKGRHDPCVGIRAVPIGEAMMHCVILDHYLMNFAQCKS

SEQ ID NO: 181014 - protein, 109 aa, Unknown
  Bacterial polypetide isolated from the Sargasso Sea
GISSAYLSGEEISDEMRSKSGKIKFKSNNAGGILGGISSGQQIIASFAVKPTSSIINSRETVNKKGINTKISVRGRHDPCVGIRAVPIGEAMMSCVLLDHLLMNRAQCG

SEQ ID NO: 181015 - protein, 120 aa, Unknown
  Bacterial polypetide isolated from the Sargasso Sea
MSINAVKGVNIGAGMNAAFLSGEENSDEMSKGSGKVKFKTNQAGGILGGISSGQNIVASFAVKPTSSILTSRNTIDKKGKNTKISVKGRHDPCVGIRAVPIGEAMLNCVLLDHYLLNRAQ

SEQ ID NO: 181016 - protein, 96 aa, Unknown
  Bacterial polypetide isolated from the Sargasso Sea
ELRVNKNKKIIFSSNNSGGILGGISSGQDIQLSVAIKPTSSILKSQKTINDKYKNTTISTRGRHDPCVGIRAVPIVEAMTACVLADHLMRNKAQCG

SEQ ID NO: 181017 - protein, 286 aa, Unknown
  Bacterial polypetide isolated from the Sargasso Sea
GLEISESDIQKELDKRKPGSSKYTTQRKEEDKVEILSGVFEGKTTGTPIGMIVKNKDQKSKDYDKLKDIFRPSHADYSYTQKYGIRDHRGGGRASARETVMRVAAGAIAKKFLKKELNLEIVGYLSQIGKLKISEVNFNEIPNNPFFCPDKSLVKEIELLIDDLRKEGDSVGAKISISVKNMPLGLGEPVFDKLDADIAKAMMSINAVKGVELGGGFDLVESKGSEVRDEMTSDGFKKNNSGGSAGGISTGQDLIVNIALKPTSSINKEGETIDKEGKNTKIQVKG

SEQ ID NO: 181018 - protein, 159 aa, Unknown
  Bacterial polypetide isolated from the Sargasso Sea
KSGSSCGAVIEIRARGVPVGLGAPIYSKLDTDIASGLMSINAVKGVNIGAGMNSAQLSGEQNSDEIFSKRKKLKFNSNNAGGILGGISTGQEIVASFAVKPTSSILTNRKTINKFGKNTSISVKGRHDPCVGIRAVPIGEAMMNCVLLDHYLMNKAQCN

SEQ ID NO: 181019 - protein, 118 aa, Unknown
  Bacterial polypetide isolated from the Sargasso Sea
MSINAVKGVSIGSGFEVVDMKGSECRDEITPKGFLSNHSGGTLGGITTGQDICIHLALKPTSSILKEGKTVNLKNKATTIKTKGRHDPCVGIRAVPIAEAMMALVLLDLYLCDKAQNK

SEQ ID NO: 181020 - protein, 188 aa, Unknown
  Bacterial polypetide isolated from the Sargasso Sea
MSFNTFGKLFRFTTWGESHGPAIGCVVDGCPPRIKISEKDIQKELNKRKPGQSKFTTQRKEDDKVEILSGIFNGETTGTPILMIIYNKDMKSRDYETIKNKFRPGHADLTYFKKYGIRDFRGGGRQSARETAARVAAGAIAKKVLEKKIGKKYYVKGAVIQLGILGCDVSAWNNKFIEKNPFFCPDKK

SEQ ID NO: 181021 - protein, 157 aa, Unknown
  Bacterial polypetide isolated from the Sargasso Sea
SSCGAIIEVRAKGVPIGLGAPIYSKLDMDLAAAMMSINAVKGVNIGSGMNSAQLTGEQNSDEIIQKGKKTNFKSNNAGGILGGISSGQDIVISFAVKPTSSILSSRKTIDKFGKNTSISVRGRHDPCVGIRAVPIGEAMMHCVLLDHYLMNAAQCNS

SEQ ID NO: 181022 - protein, 87 aa, Unknown
  Bacterial polypetide isolated from the Sargasso Sea
IKFKTNHAGGILGGISSGQDIVASFAVKPTSSILTKRETIDKKGKNTNISVKGRHDPCVGIRAVPIGEAMINCVLLDHFLMHKAQCG

SEQ ID NO: 181023 - protein, 127 aa, Unknown
  Bacterial polypetide isolated from the Sargasso Sea
MSFNTFGKLFRFTTWGESHGPAIGCIVDGCPPNINLKEQDIQSELDKRKPGQSKFTTQRKEDDKVQILSGIFEGKTTGTPISLIIQNKDMRSKDYGNIKDKFRPGHADFTYFKKYGIRDYRGGGRSS

SEQ ID NO: 181024 - protein, 317 aa, Unknown
  Bacterial polypetide isolated from the Sargasso Sea
SHGPAIGCVVDGCPPNIPIKDSDIQKELNKRKPGQSKFTTQRKEDDKINILSGVFEGRTTGTPISLVIYNKDMRSRDYETIKNKFRPGHADYTYFKKYGIRDYRGGGRQSARETAARVAAGAIAKIVLKNKIGKNYQAIGAVTQLGILGCDLKKWKDKTISSNPFFCPDKTVIKLWEKYLLGIRKAGSSCGAIIEVRAKGVPLGLGAPIYSKLDMDLAAAMMSINAVKGVNIGSGMNSAMLTGEENSDEILKKKGKTSFRSNNAGGILGGISTGQEINVSFAVKPTSSILSSRKTIDRFGKNTTISVKGKTRFMRWN

SEQ ID NO: 181025 - protein, 124 aa, Unknown
  Bacterial polypetide isolated from the Sargasso Sea
MSFNSFGKLFRFTTWGESHGPAIGCIVDGCPPNIKLKEEDIQKELNKRRPGQSKFTTQRKEDDKVNILSGIFEGKTTGTPISMIIYNKDMRSRDYETIKNKFRPGHADFTYFKKYGIRDYRGGG

SEQ ID NO: 181026 - protein, 252 aa, Unknown
  Bacterial polypetide isolated from the Sargasso Sea
FRPSHADYVYEKKYGNRDYRGGGRSSARETACRVVAGSIAKQILDNVKINAYVSSVGNISVNKPHSELDFDNTEKNNVRCPDLDVAKEMEELILKVRKDGDTVGGIVTCVIKNTPVGLGEPVFKKLHSELGAAMLSINAVKGFEYGSGFDGVKMRGSDHNDIINSDGSTKTNNSGGIQGGISNGMDIYFNVAFKPVATIMKDQESIDSKGKKTTVKGKGRHDPCVVPRAVPIVEAMAALVILDYTLINNSRK

SEQ ID NO: 181027 - protein, 97 aa, Unknown
  Bacterial polypetide isolated from the Sargasso Sea
MRLYKSGKKTNFKSNNAGGILGGISSGQDVVISFAVKPTSSILSSRKTIDKFGKNTSISVRGRHDPCVGIRAVPIGEAMMHCVLLDHYLMNAAQCNS

SEQ ID NO: 181028 - protein, 244 aa, Unknown
  Bacterial polypetide isolated from the Sargasso Sea
RDYRGGGRQSARETASRVAAGAIAKQVLEKIIGKKYGVIGAVTQLGILGCDIEKWNDKFITKNPLFCPDKTVLKLWEKYLLGIRKAGSSCGAIIEVRARGVPVGLGAPIYSKLDMDLASAMMSINAVKGVNIGSGMNSAQLSGEQNSDEMSQTGKKTKFKSNNAGGILGGISSGQEIMVSFAVKPTSSILSQRKTINKFGKNTSISVTGRHDPCVGIRAVPIGEAMMHCVILDHYLMNKAQCGN

SEQ ID NO: 181029 - protein, 240 aa, Unknown
  Bacterial polypetide isolated from the Sargasso Sea
MSFNTFGKFFRFTTWGESHGPAIGCVIDGCPPNIKLNIKDIQLELNKRKPGQSKFTTQRKEDDKVEILSGTFEGKTTGTPISMIIFNKDMRSKDYKNIKDKFRPGHADYTYFKKYGIRDHRGGGRQSARETASRVAAGAIAKQVLKKIIGKKYNVIGAVTQLGILGCDIEKWNDKFIAKNPLFCPDKTVLKLWEKYLLGIRKAGSSCGAIIEVRARGVPVGLGAPIYSKLDMDLASAMMS

SEQ ID NO: 181030 - protein, 174 aa, Unknown
  Bacterial polypetide isolated from the Sargasso Sea
MDSMFDDLIKEGNSVGAKLGVIVKNCPVGLGDPVFEKLDANLAKAIMTINAVKSVSVGNVDDLLNLKGSEARDEITTSGFLSNNSGGILGGISNGDDISLSFIIKPTSSIKTKGKSIDKDGKEVDIEVTGRHDPCVGIRAVPIAEAMVSLVLVDHFLINKAQCADVKQNLPFSE

SEQ ID NO: 181031 - protein, 287 aa, Unknown
  Bacterial polypetide isolated from the Sargasso Sea
SFGESHGPALGCIIDGCPPGLELSEADMQRDLDRRKPGTSRHTTQRREADEVRILSGVFEGKTTGTPIGLLIENTDQRSKDYSKISEQFRPAHADYTYMHKYGVRDYRGGGRSSARETAMRVAAGAVARKFLEQRLGIRIRGYLSQLGPIKAEKLDWDQVHQNPFFCPDADKVPEMEAYMDALRKEGDSIGARINVVAEGVPPGLGEPIFDRLDADLAHALMSINAVKGVEIGAGFDCVDQKGTEHRDEMTPEGFLSNNAGGVLGGISSGQPIVGSIALKPTSSLRL

SEQ ID NO: 181032 - protein, 272 aa, Unknown
  Bacterial polypetide isolated from the Sargasso Sea
IYNEDHRSKDYKNIKNLFRPGHADYTYWAKYGIRDYRGGGRSSARETAMRVAAGAIARKIIKHKLKKDIKIKGALVQIGNSKIDYNNWSDNFINKNQFFCPDKNIIKKWELMINKARKSGSSLGAIIEIHCKKMPTGLGEPVYDKLDADLAKAIMSINAVKGVEIGNGFASVLESGISNVDEMRIRNKKPIFLSNNNGGILGGISTGQDLVLRFCVKPTSSILETKKTINTNLKEVNIKTKGRHDPCVGIRAVPVGEAMVANTLADHCLRFF

SEQ ID NO: 181033 - protein, 96 aa, Unknown
  Bacterial polypetide isolated from the Sargasso Sea
DEISQNKKKTKFKSNNAGGILGGISSGQEIIVSFAVKPTSSILKSRKTINKFGKNTSISVKGRHDPCVGIRAVPVGEAMLSCVLLDHYLLHKAQCG

SEQ ID NO: 181034 - protein, 249 aa, Unknown
  Bacterial polypetide isolated from the Sargasso Sea
FLKYGIRDYRGGGRQSARETASRVAAGAIAKKVLKKLIGKKFKVVGGVIQLGLLGCNKNNWNDKEIQKNPFFCPDKKAIKLWEKYLLAIRKSGSSCGAVIELRASGIPAGLGAPIYSKLDTDLAGALMSINAVKGVNIGAGMNAAFLGGEENSDEIRNVKGKTKFKSNNAGGILGGISSGQEIVASFAVKPTSSILNTRETISKKGKNTKISVRGRHDPCVGIRAVPIGEAMMSCVLLDHYLLNRGQCG

SEQ ID NO: 181035 - protein, 228 aa, Unknown
  Bacterial polypetide isolated from the Sargasso Sea
MSFNTFGKLFRFTTWGESHGPAIGCIVDGCPPNINLKEQDIQIELDKRKPGQSKFTTQRKEDDKVQILSGIFEGKTTGTPISLIIYNKDMRSKDYSNIKDKFRPGHADFTYFKKYGIRDYRGGGRSSARETAARVAAGAVAKVVLQKKLGKKFKVIGAVTQLGILGCDTNQWNDKIISKNPFFCPDKSMIKLWEKYLLGVRKSGSSCGAVIEIRARGIPVGLGAPIYS

SEQ ID NO: 181036 - protein, 285 aa, Unknown
  Bacterial polypetide isolated from the Sargasso Sea
TTGTPISIIIYNEDKKSRDYESIKNKFRPGHADYTYFKKYGIRDFRGGGRQSARETACRVAAGAIAKIVLKKILGKKFNVIGAVTQLGLMSCDKQNWKDTEIRKNPFFCPDKKSVKLWEKYLLAVRKSGSSCGAIIELRASGIPVGLGAPIYSKLDTDIAAALMSINAVKGVNIGSGMSSAFLSGEENSDEIRRSGGKLKFKTNHAGGILGGISSGQDIIASFAVKPTSSILNSRETIDTKGKNTKISVKGRHDPCVGIRAVPIGEAMISCVILDHLLMNRAQCG

SEQ ID NO: 181037 - protein, 261 aa, Unknown
  Bacterial polypetide isolated from the Sargasso Sea
MTSNTFGNLFTLTTFGESHGECIGGIIDGCPAGKKIDIKSVQTDLDRRKPGQSKIVTQRKEDDQLEILSGIFEGKTTGTPIGFIIKNKDHKSKDYNHIKESFRPSHADYVYEKKYGNRDYRGGGRSSARETACRVVAGSIAKQILDNVKINAYVSSVGNISVNKPHSELDFDNTEKNNVRCPDLDVAKEMEELILKVRKDGDTVGGVVTCVIKNTPVGLGEPVFKKLHSELGAAMLSINAVKGFENGSGFNGVKMRGSDHN

SEQ ID NO: 181038 - protein, 113 aa, Unknown
  Bacterial polypetide isolated from the Sargasso Sea
EIGSGFHAANMQASEHNDAFINEGALIKTKTNQSGGTQGGISNGEIIYFNVAFKPTATIHKTQQTVTDTGNPVNLNATGRHDPCVLPRAVPIVDSMAALVLADHSLRNRSAKL

SEQ ID NO: 181039 - protein, 249 aa, Unknown
  Bacterial polypetide isolated from the Sargasso Sea
SEQDIQVELDKRRPGSNAFTTQRSEKDKVQILSGIFEGKTTGTPIGMIIFNEDQKSEDYDNLKDVFRPSHADYTYLKKYGSRDHRGSGRASARETVMRVAAGAIAKKYLKDYLSVEITGYVEQVGEIIADQIDFKEINNNAFFFPDKTKLKSLEDLIASLREAGDSVGAKIKINVNNVPAGLGEPVFDKLDADLAHGLMSINAVKGVELGLGFDVVSKKGSEHRDEIDRDGFASNNAGGILGGILQASQ

SEQ ID NO: 181040 - protein, 187 aa, Unknown
  Bacterial polypetide isolated from the Sargasso Sea
DNWNENYIYENDFFCPDEKIIPEWQNLITTARKDGSSLGAIIELRASGVPAGLGEPIYDKLDSDIAKALMTINAVKGVEIGNGFASVNEDGKTNVDEMRIKDGKPLFLSNNNGGILGGISSGQDIICRFVVKPTSSISTERKTIDINLRETSISTKGRHDPCVGIRAVPVGEAMIATTIADHSLRYL

SEQ ID NO: 181041 - protein, 79 aa, Unknown
  Bacterial polypetide isolated from the Sargasso Sea
FIKSDDISKLRTTSNNSGGIQGGISNGENIEMKIAFKPTATIGKEQKTVNAEGKEVLMKAKGRHDPCVLPRAVPMVDAM

SEQ ID NO: 181042 - protein, 282 aa, Unknown
  Bacterial polypetide isolated from the Sargasso Sea
FEGKTTGHPISLMIHNHDQRSKDYSEIKDIFRPGHADYTYWSKYGIRDYRGGGRSSARETAMRVAAGAVARKIIELKLKKFEIKGYLVQIGNSKINYNNWDSNFIDKNDFFCPDKDIIPTWEKIINDARKNGSSVGAIIEIVAKGIPPGLGEPIYEKLDSDLAKAMMSINAVKGVEIGNGFNSVNESGVSNVDEMRIKNNTPLFTSNNNGGILGGISTGQDIIVRFCVKPTSSIISAKKTINTDLKETNVTTKGRHDPCVGIRAVPVGEAMMATTLADHCLR

SEQ ID NO: 181043 - protein, 167 aa, Unknown
  Bacterial polypetide isolated from the Sargasso Sea
KYLLAVRKSGSFCGAVIEVRAKGVPLGLGAPVYSKLDMDIASAMMSINAVKGVNIGSGMNSAKLTGEENSDEMFKKGKKTIFKSNNAGGILGGISTGQDIIVSFAVKPTSSILNERKTIDKKGKNTSISVKGRHDPCVGIRAVPIGEAMMHCVLLDHYLMNKAQCSN

SEQ ID NO: 181044 - protein, 272 aa, Unknown
  Bacterial polypetide isolated from the Sargasso Sea
MLSKLKFLTAGESHGKGLLGILDGIPAGLNISEDYIDIQLSRRQMGHGRGGRMKIEKDHGEIWSGVRHGKTLGSPVGILVENKDWKNWENKMSITPIKEKLKRVTLPRPGHADLAGIQKYGSDDIRNILERSSARETTMRVALGSVCRKLIEEFGIEVGSRVIQIHNAVDKDPFPNNMNPNQLSNVADLSPVRCLNKNIESLMMANIDNAKKNGDSVGGIFEVIATGVPYGLGSPMQWDSKLQAKISGMMMSVNAFAGIEIGAGFNKAEKLG

SEQ ID NO: 181045 - protein, 87 aa, Unknown
  Bacterial polypetide isolated from the Sargasso Sea
KTNRSGGIQGGISNGDPIIFETVFKPTATVFKKQRTVDINKKEIDLEAKGRHDPCVLPRAVPIVESMAAIVILDHYLRQIAISKTLK

SEQ ID NO: 181046 - protein, 219 aa, Unknown
  Bacterial polypetide isolated from the Sargasso Sea
MSFNTFGKIFRFTTWGESHGPAIGCIVDGCPPNISIKEQDIQFELNRRKPGQSKFTSQRKEDDKVQILSGIFEGKTTGTPISLIIYNKDMRSRDYETIKNKFRPGHADFTYLKKYGIRDYRGGGRQSARETASRVAAGVIAKKVLENKIGKKFKVIGAVTQLGILGCDTNKWNDKEIKKNLFFCPDKSIVKLWEKYLLNIRKSGSSCGAIIEVRARGIP

SEQ ID NO: 181047 - protein, 100 aa, Unknown
  Bacterial polypetide isolated from the Sargasso Sea
MSINSFGHLFRVTTWGESHGSAIGATVDGCPPGVGLSEADIQPWLDRRRPGQSKYTTQRKELDKVKILSGTFEGVTTGTPIQLLIENQDQRSKDYSEIAN

SEQ ID NO: 181048 - protein, 169 aa, Unknown
  Bacterial polypetide isolated from the Sargasso Sea
WEKYLLSIRKAGSSCGAIIEIRARGVPLGLGAPIYSKLDMDLAAAMMSINAVKGVNIGSGMNSAMLTGEENSDEILQRKGKTSFKSNNAGGILGGISTGQEIKVSFAVKPTSSILSSRKTIDKFGKNTTISVKGRHDPCVGIRAVPIGEAMMHCVILDHYLMNNAQNKF

SEQ ID NO: 181049 - protein, 277 aa, Unknown
  Bacterial polypetide isolated from the Sargasso Sea
IFNKDMRSKDYKNIKDKFRPGHADYTYLKKYGIRDYRGGGRQSARETASRVAAGAIAKQVLQNIIGKKYSAIGAVTQLGILGCDTEKWNDKFIAKNPLFCPDKTVLKLWEKYLLGIRKAGSSCGAIIEIRARGVPVGLGAPIYSKLDMDLASAMMSINAVKGVNIGSGMNSAQLSGEQNSDEMSQTGKKTKFKSNNAGGILGGISSGQEIIVSFAVKPTSSILSQRKTINKFGKNTSISVTGRHDPCVGIRAVPIGEAMMHCVILDHYLMNKAQCGN

SEQ ID NO: 181050 - protein, 297 aa, Unknown
  Bacterial polypetide isolated from the Sargasso Sea
IGGIVDGLPPGLKLDLEQIQLELDRRKPGTSRYTTARREDDIVKILSGVFEGYSTGASIGLLIENTDQRSQDYSAIKDLFRPGHADYTYWHKFGIRDYRGGGRSSARETAVRVAAGAIAKQYLKAKFGIEIRGYLAQLGPIKAQKLDWDQVEQNAFFCPDVDVLEQLDEYMRQLKKDGDSVGARINVVASGVPVGWGEPVFDRIDADIAHAMMSINAVKAVEIGDGFAVVEQRGSTHRDELRLAGFSANHAGGTLGGISSGQDINVSIALKPTSSISIPGKTITTSGEETEMITKGR

SEQ ID NO: 181051 - protein, 229 aa, Unknown
  Bacterial polypetide isolated from the Sargasso Sea
MSFNTFGKIFRFTTWGESHGPAIGCIVDGCPPNITLSEKDIQKDMNRRRPGNTKFVSQRKESDKIEILSGIFNGRTTGTPISILIRNEDKRSRDYESIKNKFRPGHADFTYFKKYGIRDYRGGGRQSARETASRVAAGAIAKAVLKNMIGKKFSIFGAVTQLGLMGCDVTKWDNNEIRKNPFFCPDRKSVKLWEKYLLAVRKSGSSCGAIIELRADGIPAGLGAPIYSK

SEQ ID NO: 181052 - protein, 306 aa, Unknown
  Bacterial polypetide isolated from the Sargasso Sea
MSGNSIGKSFTVTTFGESHEKALGCIIDGCPPGIIISEQDIQVELDKRRPGSNAFTTQRSEKDKVQILSGIFEGKTTGTPIGMIIFNEDQKSEDYDNLKDVFRPSHADYTYLKKYGLRDHRGSGRASARETVMRVAAGAIAKKYLKDHLAVEITGYVEQVGEIIADQIDLKEINNNAFFFPDKRKLKSLEDLIASLREAGDSVGAKIKINVKNVPAGLGEPVFDKLDADLAHGLMSINAVKGVELGLGFDVVSKKGSEHRDEIDRDGFASNNAGGILGGISSGQPIDIAIALKPTSSISTEGKTVD

SEQ ID NO: 181053 - protein, 287 aa, Unknown
  Bacterial polypetide isolated from the Sargasso Sea
FLKGRQLGTPIGLLIRNKDQKSKDYDDLKDVFRPSHADYTYTKKYGFRDHRGGGRSSARETTMRVAAGAIAKKYLKDSLGVNIKGYLSQIGNIKIKQIDLSEVDQNPFFCPDPQMVESIEILIDDLRSEGDSVGARIEIMASNLPVGLGEPVFDKLDADIAKGLMSINAVKGVEIGNGFDLVSAKGSDSRDEITPEGFKTNSSGGIAGGISTGQEIIAGIALKPTSSIVKQGDTVDTSGKATKVTVKGRHDPCVGIRATPIAEAMMALVLMDHFLRNRAQNADVESD

SEQ ID NO: 181054 - protein, 251 aa, Unknown
  Bacterial polypetide isolated from the Sargasso Sea
FRPGHADFTYFKKYGIRDYRGGGRQSARETAARVAAGAIAKKVLEKKIGKKYKVVGAVTQLGILGCDVSKWNDKFISKNPFFCPDKDILKLWEKYLLSVRKAGSSCGAIIEVRARGIPLGLGAPIYSKLDMDLAAAMMSINAVKGVNIGSGMNSAQLSGEQNSDEIFQRGKSTKFKSNNAGGILGGISTGQEIVISFAVKPTSSILTSRKTIDKFGKNTSISVRGRHDPCVGIRAVPIGEAMMHCVLLDHY

SEQ ID NO: 181055 - protein, 275 aa, Unknown
  Bacterial polypetide isolated from the Sargasso Sea
EEESDKIHILSGVFNGRTTGTPISIIIHNEDKRSRDYESIKEKFRPGHADFTYFKKYGIRDFRGGGRQSARETASRVAAGAVARIVLKNLIGSKFNVIGAVTQLGLMSCNKNNWNNKEIRKNPFFCPDKKSVKLWEKYLLAVRKAGSSCGAIIELRASGVPVGLGAPIYSKLDTDIAAALMSINAVKGVNIGAGMSAAYLSGEENSDEIRKLSGKIKFKSNNAGGILGGISTGQGIVASFAVKPTSSILSKRETIDKKGKNTSISVKVVMTLAWE

SEQ ID NO: 181056 - protein, 153 aa, Unknown
  Bacterial polypetide isolated from the Sargasso Sea
MSFNTFGKIFRFTTWGESHGPAIGCIVDGCPPNIPISEKEIQKDMDKRRPGQSKFTTQRKESDKVSILSGVFQGKTTGTPISMIIYNEDKRSRDYESIKDKFRPGHADFTYFKKYGIRDYRGGGRQSARETASRVAAGAIAKIVLKKIIGKKF

SEQ ID NO: 181057 - protein, 220 aa, Unknown
  Bacterial polypetide isolated from the Sargasso Sea
MSINSFGHLFRVTTWGESHGSAIGATVDGCPPGVELSEKDIQPWLDRRRPGQSKYTTQRKELDQVKILSGTFQGVTTGTPIQLLIENQDQKPKDYSEIANTFRPGHADLTYHLKYGIRDYRGGGRSSARETASRVAAGGVARKILANLAPDIEITGYLIRIGKMEIDRKNFSETTIEENDFWCPDKAIVPNWEKYIKDLRKSGNSVGANDEILLKAYLQD

SEQ ID NO: 181058 - protein, 84 aa, Unknown
  Bacterial polypetide isolated from the Sargasso Sea
SNKAGGILGGISSGQEIIVSFAVKPTSSILSTRKTIDKFGKNTSISVKGRHDPCVGIRAVPIGEAMMHCVLLDHYLMNEAQCSN

SEQ ID NO: 181059 - protein, 86 aa, Unknown
  Bacterial polypetide isolated from the Sargasso Sea
KFKSNQAGGILGGISSGQNIVASFAVKPTSSILTSRSTIDKKGKNTKISVKGRHDPCVGIRAVPIGEAMVNCVLLDHFLMNRAQCS

SEQ ID NO: 181060 - protein, 143 aa, Unknown
  Bacterial polypetide isolated from the Sargasso Sea
MLRYWTAGESHGPALTALVDGFPAGLTIDTDSIDSELQRRQGGYGRGGRQRIETDTVTFLSGLWKGKTLGSPLTLQVINRDAKIEQMDDIERPRPGHADLPGAIKHLGGVRPVLERASARETAARVAAGALARQLLSLFGIEV

SEQ ID NO: 181061 - protein, 182 aa, Unknown
  Bacterial polypetide isolated from the Sargasso Sea
MSFNTFGKVFRFTTWGESHGPAIGCIIDGCPPLINLNERDIQIELNKRKPGQSKFTTQRKESDKVEILSGVFEGKTTGTPISLIIYNEDMRSKDYSDIKDKFRPGHADFTYFKKYGIRDYRGGGRSSARETASRVAAGAVAKKVLEKKLGKKFKISGAVTQLGILGCDTNKWDDKIIYKNPF

SEQ ID NO: 181062 - protein, 267 aa, Unknown
  Bacterial polypetide isolated from the Sargasso Sea
YRNIKNKFRPGHADFTYFQKYGIRDYRGGGRQSARETASRVAAGAIAKKVLQTKLGKKYNVIGGVTRLGILGCDLNNWRDKEISKNSLFCPDKSVVKLWEKYLLGIRKAGSSCGAVIEVRARGVPVGLGAPIYSKLDMDLASAMMSINAVKGVNIGSGMNSAQLSGEQNSDEMSKKGKKTKFYSNNAGGILGGISSGQEIVVSFAVKPTSSILSQRKTIDKFGKNTSISVKGRHDPCVGIRAVPIGEAMMHCVILDHYLLNKAQCGN

SEQ ID NO: 181063 - protein, 202 aa, Unknown
  Bacterial polypetide isolated from the Sargasso Sea
MSGNTFGKIFKLTTFGESHGTAMGCILDGCPPQIELTKEDIQNELDKRKPGQSDVTTQRKEDDAVEILSGVFEGKTLGTPIGMIIYNKDQKSKDYSNIKDVFRPNHADITYQAKYGHRDYRGGGRASARETANWVAAGAIAKKILKNQGVSVNGFVLEIGKVKAEFINHKNINNKYFFSDESKLSELDSMFKDLIEEGNSVG

SEQ ID NO: 181064 - protein, 172 aa, Unknown
  Bacterial polypetide isolated from the Sargasso Sea
MAGNAFGKLFSVTTYGESHGEAIGCIVDGCPPNIELNENDIQTDLNRRKPGQSRYTTQRREDDEVVILSGTFEGKTTGTPIGLLVKNEDQKTKDYSKIKDIYRPSHADYTYEKKYGIRDYRGGGRSSARETTMRVAAGAIAKKVLRDTLGVSVYGFVSQIGDIRYSKFDRKV

SEQ ID NO: 181065 - protein, 255 aa, Unknown
  Bacterial polypetide isolated from the Sargasso Sea
MGDSFGKIFRITTWGESHGAGVGVVIDGCPSGLPLNVEDFQYELDRRKPGQSKITTQRKESDIAKILSGVFEGRTTGASISVMVSNQDAKPHAYDHLKELYRPSHADFTYEKKYGLRDWRGGGRASARETVGRVAAGTIAKKLLHHWRKIQTIAWVEQIHDIKSSIDKKTVKTKQIEASIVRCPDLEASEAMVERIHQARKSGDSVGGIIRAVVRNVPSGLGEPVFDKLTADLAKGLMSLPATRGVEFGLGFNSV

SEQ ID NO: 181066 - protein, 258 aa, Unknown
  Bacterial polypetide isolated from the Sargasso Sea
VEILSGVFEGKTLGTPIGMIIYNKDQKSKDYSNIKDVFRPNHADISYQAKYGHRDYRGGGRASARETANWVAAGAIAKKILKNEGVSVNGFVSEIGKVKADSINHKNINNKYFFSDESKLSELDSMFKDLIEEGNSVGAKLGVIVENCPVGLGDPVFEKLDANLAKAIMTINAVKSVSIGNADDLLSLKGSEARDEITASGFTSNNSGGILGGISNGDDISLSFIIKPTSSIKTKGKTVNKEGNEVDIEVTGRHDPCV

SEQ ID NO: 181067 - protein, 141 aa, Unknown
  Bacterial polypetide isolated from the Sargasso Sea
MAGNSFGNIFKISSFGESHGKALGGVIDGCPAGLEIDLEFINSELNRRRPGQSEIVTQRKEDDSVEFLSGIFEGKSTGTPIGFIIVNKDQKSKDYSHIKESYRPSHADFVYDKKYGFRDYRGGGRSSARETVIRVVAGAIA

SEQ ID NO: 181068 - protein, 204 aa, Unknown
  Bacterial polypetide isolated from the Sargasso Sea
MSFNTFGKVFRFTTWGESHGPAIGCVVDGCPPNIKISEKDIQIELNKRKPGQSKFTTQRKEDDKVNILSGVFEGKTTGTPISMIIYNKDMRSRDYETIKNKFRPGHADLTYFKKYGIRDYRGGGRQSARETASRVAAGAIAKKVLENKFGKKFKTIGAVTQLGILGCNINKWNDNEIRKNPFFCPDKSIVQLWKKYLLSVRKSG

SEQ ID NO: 181069 - protein, 293 aa, Unknown
  Bacterial polypetide isolated from the Sargasso Sea
PAIGCIVDGCPPNIKISEKDIQAELDKRRPGQSKFTTQRKEDDKVNILSGIFEGKTTGTPISMIIYNRDMRSRDYETIKNKFRPGHADYTYFKKYGIRDYRGGGRQSARETASRVAAGAIAKKVLEKKLGKKYKTIGAVIQLGILGCDTKKWNDKVISKNPFFCPDKSILKLWEKYLLGIRKSGSSCGAIIEIRAKGIPVGLGAPIYSKLDMDLASAIMSINAVKGVNIGSGMNSAFLTGEENSDEIIQKGKSPIFKSNNAGGILGGISSGQDIVISFAVKPTSSILSSRKTI

SEQ ID NO: 181070 - protein, 244 aa, Unknown
  Bacterial polypetide isolated from the Sargasso Sea
KKYGIRDYRGGGRSSARETSMRVAAGAIARKIINNKIKNQVVITGALIQIGNHKINYDNWNNNFIPKNKFWSPDKEIIKIWENEIQTARKSGSSLGAIIEIRVKGLPVGLGEPIYEKIDSDIAKALMSINAVKGVEMGNGFSSVYETGISNVDEMRIKNKKPIFLSNNNGGVLGGITTGQELITRFVVKPTSSILSTKKTINTKLKETTISTKGRHDPCVGIRAVPVGEAMVATTLADHCLRFL

SEQ ID NO: 181071 - protein, 239 aa, Unknown
  Bacterial polypetide isolated from the Sargasso Sea
MSFNTFGKFFRFTTWGESHGPAIGCVVDGCPPNIELNIKDIQLELNKRKPGQSKFTTQRKEDDKVEILSGTFEGKTTGTPISMIIFNKDMRSKDYKNIKDKFRPGHADYTYFKKYGIRDYRGGGRQSARETASRVAAGAIAKQVLQNIIGKKYSVIGAVTQLGILGCDTEKWNDSFITKNPLFCPDKTVLKLWEKYLLGIRKAGSSCGAIIEVRARSVPVGLGAPILSKLDMDLASAMM

SEQ ID NO: 181072 - protein, 260 aa, Unknown
  Bacterial polypetide isolated from the Sargasso Sea
KFRPGHADYTYFKKYGIRDFRGGGRQSARETASRVAAGAVARVVLKRILGKKFKVIGAVTQLGLMSCDKSNWKDSEIRKNPFFCPDKKSVKLWEKYLLAVRKAGSSCGAIIELRASGIPVGLGAPIYSKLDTDIAAALMSINAVKGVNIGSGMNAAFLSGEENSDEMSKNSGKLKFKTNHAGGILGGISSGQDIIASFAVKPTSSILTSRDTIDKKEKNTKISVKGRHDPCVGIRAVPIGEAMINCVLLDHLLMNRAQCG

SEQ ID NO: 181073 - protein, 91 aa, Unknown
  Bacterial polypetide isolated from the Sargasso Sea
GKKTKFSSNNAGGILGGISSGQEIRVSFAVKPTSSILTRRKTIDRFGKNTSISVKGRHDPCVGIRAVPIGEAMMHCVLLDHYLMNSAQCKI

SEQ ID NO: 181074 - protein, 204 aa, Unknown
  Bacterial polypetide isolated from the Sargasso Sea
MSFNTFGKLFRFTTWGESHGPAIGCIIDGCPPNIQIRAEDIQKELNKRKPGQSKFVTQRKEKDLVHIMSGVFEGKTTGTPISLIIYNEDQKSRDYETIKSKFRPGHADYTYFMKYGIRDYRGGGRQSARETAARVAAGAVAKKVLENKIGKKYKVIGAVTQIGILGINPNNWDEKFIGKNLFFCPDKKILKLWEKYLLAIRKAG

SEQ ID NO: 181075 - protein, 123 aa, Unknown
  Bacterial polypetide isolated from the Sargasso Sea
MSINAVKGVNIGSGMNSAQLTGEENSDEIISKGKNIKFRSNKAGGILGGISSGQEIIVSFAVKPTSSILSTRKTIDKFGKNTSISVKGRHDPCVGIRAVPIGEAMMHCVLLDHYLMNKAQCGN

SEQ ID NO: 181076 - protein, 236 aa, Unknown
  Bacterial polypetide isolated from the Sargasso Sea
MSGNSFGHLFKFTTFGESHGPAIGVVVDGVPPNIDLIEEDIQLYLDKRKPGRSRFTTQRREADEVEILSGVFEGTTTGAPVGLLIRNSDARSKDYDDIKDLFRPGHADWTYFIKYGNRDYRGGGRASARETACRVAAGAIARKILGPNIEVRGALIQIGPHEINRDNWDWDQVSKNPFWSPDAEIITSWETYMDQLRKDGSSAGAKIEIVAHGVPVGLGAPLYDKLDSEIAAGLMS

SEQ ID NO: 181077 - protein, 257 aa, Unknown
  Bacterial polypetide isolated from the Sargasso Sea
MAGNSFGKVFRVTTYGESHGESIGGIIDGCPAGLEMNLDFVQQQLDYRKPGQSAITTARKEEDKVRFLSGIFKGRTTGTPIAFQIQNKDQQSKDYSEIKTAFRPSHADYVYQEKYGHRDYRGGGRSSARETACRVVAGAIAELILKQHGIEINAYVQQVGTIAMLKHFDELDYGLIYKNNVRCPDEELAHKMQAYITDIKEKGDTVGGAVQTIVKNCPVGLGEPVFDKLHADLAKALMSINATKGIEFGSGFCAAEM

SEQ ID NO: 181078 - protein, 153 aa, Unknown
  Bacterial polypetide isolated from the Sargasso Sea
GAIIEVRANGIPAGLGAPIYSKLDSDIASAMMSINAVKGVNIGSGMNSAQLSGEENSDEISQNRKKTKFKSNNAGGILGGISSGQEIIVSFAVKPTSSILKSRKTINKFGKNTSISVKGRHDPCVGIRAVPVGEAMLSCVLLDHYLLDKAQCS

SEQ ID NO: 181079 - protein, 84 aa, Unknown
  Bacterial polypetide isolated from the Sargasso Sea
KTNHAGGILGGISSGQDIIASFAVKPTSSILTSRDTIDKKGKNTKISVKGRHDPCVGIRAVPIGEAMINCVLLDHLLMHRAQCG

SEQ ID NO: 181080 - protein, 202 aa, Unknown
  Bacterial polypetide isolated from the Sargasso Sea
LVQIGEKKINFNNWNWKEIEKNSFFCPDKNILKTWEDYVLKIRKEGSSIGAVIQITASGVPAGLGEPVFSKIDALLAQGIMSIPAVKGVEIGNGFKSAALRGEQNADEMRYQNNKVTFESNNSGGTLGGISSGQDIVVKFAVKPTSSILKERKTVNLVNKNTIIRTKGRHDPCVGIRAVPVGEAMVAIVLADLFLLNQKNKI

SEQ ID NO: 181081 - protein, 273 aa, Unknown
  Bacterial polypetide isolated from the Sargasso Sea
MSGNTFGKIFKITTFGESHGTAMGCILDGCPPQIELKKEDIQYELDRRKPGQSDVTTQRKEDDAVEILSGVFEGKTLGTPIGMIIYNKDQKSKDYSNIKDVFRPNHADITYQAKYGHRDYRGGGRASARETANWVAAGAIAKKILKKEGVSVNGFVSEIGKVKADSINHKNINNKYFFSDESKLSELDSMFKDLIEEGNSVGAKLGVIVENCPVGLGDPVFEKLDANLAKAIMTINAVKSVSIGNADDLLSLKGSEARDEITTSGFTSNNSGG

SEQ ID NO: 181082 - protein, 187 aa, Unknown
  Bacterial polypetide isolated from the Sargasso Sea
MSGNKYGKLFELTTFGESHGEAIGGIIEGCPAGTPLDLEFIQSELDRRKPGQSSIVTQRKESDKVNFFSGIFEGKTTGTPIGFSISNDDQKPKDYKHIIDNYRPSHADRVYDQKYGFRDYRGGGRSSARETACRVVAGSIAKQFLKKVKITAYVSSVGEISLDKDYSRLDFKNIETNPVRCPDNETA

SEQ ID NO: 181083 - protein, 250 aa, Unknown
  Bacterial polypetide isolated from the Sargasso Sea
IFEGKTTGTPICLLIANEDQRPKDYKEIKEKFRPGHADFTYTKKYGFRDYRGAGRSSARETVARVAGGAIAKKYLKQSSKINIFGYVSKIGEHRANKVNYNDIEKNSFFFPDKKMVPILEDYISKIRKSGDSIGAEVTVIAQNVPAGLGNPVFDKLDALLASSMMSINAVKGVEIGSGFDVVSKKGSECRDEITPKGFKSNHAGGTLGGISTGQDIVVKIALKPTSSILIPGQTITIKNKKTTIVTKGRH

SEQ ID NO: 181084 - protein, 322 aa, Unknown
  Bacterial polypetide isolated from the Sargasso Sea
LKEQDIQKELDKRKPGQSKFTTQRKESDKVQILSGVFEGKTTGTPISLIIYNEDMRSKDYNDIKDKFRPGHADYTYFKKYGIRDYRGGGRSSARETAARVAAGAVAKKVLERKLGKKFRISGAVTQIGILGCDTSKWDEKIIYKNPLFCPDKSMLKIWEKYLLSIRKAGTSCGAVIEVRANGIPPGLGAPIYSKLDSDIASAMMSINAVKGVNIGSGMNSAQLSGEENSDEISNNKKKLKFDSNNAGGILGGISSGQEIIVSFAVKPTSSILKKRKTINKFGKNTTISVRGRHDPCVGIRAVPIGEAMLSCVLLDHYLMNKA

SEQ ID NO: 181085 - protein, 258 aa, Unknown
  Bacterial polypetide isolated from the Sargasso Sea
YSEIKDKFRPGHADFAYQRKYGLRDYRGAGRSSARETVARVAAGAIAKKILKKFCKTNIYGYVSQLGEIVPDKFRKNDIEKNPFFFPNLSQIKTLEDYLTSIRKEGDSIGAKVSVIAQKAPIGLGDPVFDKVDALLAQAMMSINAVKGVAIGSGFDVIDKKGSECRDEISPSGFLSNHSGGTLGGITTGQDVCVHLALKPTSSILKKAKTINNNNKSTTIRTKGRHDPCVGIRAVPIAEAMMALVLLDLYLSNKAQNK

SEQ ID NO: 181086 - protein, 123 aa, Unknown
  Bacterial polypetide isolated from the Sargasso Sea
MSINAVKGVNIGSGMNSSTLTGEENSDEIFQKKGKIKFKSNNAGGILGGISTGQEIVVSFAVKPTSSILTSRKTIDRFGKNTSISVKGRHDPCVGIRAVPIGEAMMHCVILDHYMMNNGQCKI

SEQ ID NO: 181087 - protein, 314 aa, Unknown
  Bacterial polypetide isolated from the Sargasso Sea
CPPGIRLDESDLQVDLDRRKPGTSRYTTQRREADQVKIMSGVFEGETTGTPIGLVIENTDHKSKDYTSIKNKFRPGHADYTYAHKYGIRDYRGGGRASARETCIRVAAGAIAKRCLEIEAGIEICGYVSQIGILELGLVDEEFISLNPFFSGDPDKISELEAYIDETRKQGDSVGARINLIARGLPPGWGEPVFDRLDADIGASMMGINAVKGVEIGDGFDVVQQRGSENRDQLRSSGFASNHSGGILGGISTGQELLVAIALKPTSSIRLEGETVDQEGKDTVISTLGRHDPCVGIRAVPIAEAMLALVLVDI

SEQ ID NO: 181088 - protein, 158 aa, Unknown
  Bacterial polypetide isolated from the Sargasso Sea
SGSSCGAVIEIRVRGIPVGLGAPIYSKLDTDIASGLMSINAVKGVNIGAGMDSAQLSGEQNSDEISSKGNKLKFNSNKAGGILGGISTGQEIIASFAVKPTSSILTSRKTINKFGKNTSISVKGRHDPCVGIRAVPIGEAMMNCVLLDHYLMNKAQCS

SEQ ID NO: 181089 - protein, 141 aa, Unknown
  Bacterial polypetide isolated from the Sargasso Sea
MTDNSFGKLFSFTSFGESHGTAIGCVVDGVPPNLPLNEKLIQTYLDRRRPGTSKFVTQRQEDDKIEILSGVFEGKTTGTPIGVLIRNKDQRSKDYGEISRQFRPGHADYTYQAKYGIRDYRGGGRSSARETAVRVAAGAIA

SEQ ID NO: 181090 - protein, 108 aa, Unknown
  Bacterial polypetide isolated from the Sargasso Sea
FTTQRKESDKVQILSGIFDGKTTGTPISLIIYNEDMRSKDYKDIKDKFRPGHADFTYFKKYGIRDYRGGGRSSARETAARVAAGAIAKKVLEKKLGKKFRISGAVTQL

SEQ ID NO: 181091 - protein, 181 aa, Unknown
  Bacterial polypetide isolated from the Sargasso Sea
MSFNTFGKLFRFTTWGESHGPAIGCIVDGCPPNINLDEKDIQLELNKRKPGQSKFTTQRKEDDKAQILSGVFEGKTTGTPISLIIYNKDMRSKDYGNIKDKFRPGHADFTYFKKYGIRDYRGGGRSSARETASRVAAGAIAKIVLQKKLGKKFNVIGAVTQLGILGCDTSQWNDKIISNNP

SEQ ID NO: 181092 - protein, 98 aa, Unknown
  Bacterial polypetide isolated from the Sargasso Sea
NSDEISQKGKKLEFNSNNAGGILGGISTGQEIIASFAVKPTSSILTTRNTVDKFGKNTTISVTGRHDPCVGIRAVPVGEAMMNCVLLDHYLMNKAQCQ

SEQ ID NO: 181093 - protein, 270 aa, Unknown
  Bacterial polypetide isolated from the Sargasso Sea
NYSGGIQGGISNGETIYFDVAFKPPATIGVDQMSVNKLGEETLLKCKGRHDPCIVNRAVPIVEAMAALVLMDQFLIQTARKAAQSAMQANMVLATEVAAASVAQAQAKAQVVPATAAAAPPPADIASVKREDIVRPVLGGNLAVPPEKYLHPVDFGDWRGHVLRLTQTKTTHVLVLCDQVVHGLYQNQIQTLLDDTAVAGRSFYVHVIPNGEPVKHISFKAEIEEKMLSLHFPRGTSALVALGGGVIGDLGGFVAATYARGIPVIQVPTT

SEQ ID NO: 181094 - protein, 95 aa, Unknown
  Bacterial polypetide isolated from the Sargasso Sea
ISQKGKLTKFSSNNAGGILGGISSGQDIILSFAVKPTSSILTSRKTINKFGKNTSISVKGRHDPCVGIRAVPIGEAMMHCVLLDHLLMHRAQCED

SEQ ID NO: 181095 - protein, 132 aa, Unknown
  Bacterial polypetide isolated from the Sargasso Sea
LDMDLAAAMMSINAVKGVNIGSGMNSAQLTGEQNSDEMSKKGKKTKFYSNNAGGILGGISSGQEIIVSFAVKPTSSILSQRKTIDKFGKNTSISVKGRHDPCVGIRAVPIGEAMVNCVILDHYLLNKAQCGS

SEQ ID NO: 181096 - protein, 175 aa, Unknown
  Bacterial polypetide isolated from the Sargasso Sea
MSFNTFGKSFRFTTWGESHGPAIGCIIDGCPPLIPIKEADIQKELNKRKPGQSKFTTQRKESDKVQILSGIFEGKTTGTPISLIIYNEDMRSKDYNDIKDKFRPGHADFTYFKKYGIRDYRGGGRSSARETAARVAAGAVAKKVLENKLGKKFKITGAVTQLGILGCDTNKWDDK

SEQ ID NO: 181097 - protein, 81 aa, Unknown
  Bacterial polypetide isolated from the Sargasso Sea
NGDDINIDFMIKPTSSISKPTKSIDEQGNEVNLEIKGRHDPCVGIRAVPIAEAMVNLVLIDHFLRNQAQCGHIEQNLPFGE

SEQ ID NO: 181098 - protein, 324 aa, Unknown
  Bacterial polypetide isolated from the Sargasso Sea
INLDEKDIQVELNKRKPGQSKFTTQRKEDDKVQILSGVFEGKTTGTPISLIIYNKDMRSKDYGNIKDKFRPGHADFTYFKKYGIRDYRGGGRSSARETASRVAAGAIAKLVLQKKLGKKFKVIGAVTQLGILGCDTSQWNDKIISKNPFFCPDKSMIKLWEKYLLGVRKSGSSCGAVIEVRARGIPAGLGAPIYSKLDSDIASAFMSINAVKGVNVGAGMNSAQLSGEQNSDEISSKNNKLKFNSNNAGGILGGISSGQEIIASFAVKPTSSILTTKKTINKFGKNTTISVKGRHDPCVGIRAVPVGRAMMNLCFIRPLSNESG

SEQ ID NO: 181099 - protein, 264 aa, Unknown
  Bacterial polypetide isolated from the Sargasso Sea
MGDSFGHLFRITTWGESHGGGIGVVIDGCPAGLEISESEIQYELDRRRPGQSKITTQRKESDSARILSGIFEGKTTGTAISIMVENQDARPQAYKHLKNLYRPSHADYTYEAKYGFRNWMGGGRASARETIGRVAAGALAKKLLKQWNGTQTLAWVEQIHDLKANVDHSQITEQQIEQSIVRCPDTAASNAMEQRILEVRKKGDSVGGIIRAVSTNVPVGLGEPVFDKLTADLAKALMSLPATRGDEFGLGFQSISLMVQSTMT

SEQ ID NO: 181100 - protein, 136 aa, Unknown
  Bacterial polypetide isolated from the Sargasso Sea
GLGEPVYDKLDADLAKSMMSINAVKGVEIGNGFNSVYESGVSNVDEMRIKNNKPIFLSNNNGGILGGISTGQDIIVRFCVKPTSSILTKRKTIDINYNEKEISTKGRHDPCVGIRAVPVGEAMMATTLADHCLRYL

SEQ ID NO: 181101 - protein, 52 aa, Unknown
  Bacterial polypetide isolated from the Sargasso Sea
MQITHIWKKYGIRDYRGGGRSSARETAMRVAAGAIARKIINNKIKNQVVIIG

SEQ ID NO: 181102 - protein, 287 aa, Unknown
  Bacterial polypetide isolated from the Sargasso Sea
IILKRVNPMSMNSFGHLYRFTTWGESHGKAIGVTIDGCPPKVDLNEKKIQKFLDKRKPGQSRFTTQRKEPDTVEILSGVFEGKTTGTPIQLMIKNLDQRSKDYSKISTSFRPGHADITYFQKYGIRDYRGGGRSSARETAARVAAGAVARIALKKILPRLEILGYLVQIGNKKINWNRFDKRQISKNPFWCPDKDIVEDWSLYLSKIRKDGNSIGAIIEVIAKNLPAGIGAPIYNKLDTQIASAMMSINAVKGVEIGEGMNAATLTGNENDDEIRSTSKKNTMYKSN

SEQ ID NO: 181103 - protein, 273 aa, Unknown
  Bacterial polypetide isolated from the Sargasso Sea
IIENNDVKSKDYNDIKNKFRPGHADYTYQMKYGIRDFRGGGRASARETAMRVAAGAIAQKILGNKVKIRGALIQIGKEKINYDNWDWNQIKKNNFFCPDKSVLGKWEKYIKEVRRDGSSIGAMIEINVSGVPVGLGEPVFNKIDAMLAQGIMSIPAVKGFEIGSGLKSAELRGEENADEIISKNNKVSFKSNNAGGTLGGITSGQDLVIRFAVKPTSSILKKKSTINVEGKNTYITTKGRHDPCVGIRAVPIGEAMVAIVLADLLLIQKSLKN

SEQ ID NO: 181104 - protein, 107 aa, Unknown
  Bacterial polypetide isolated from the Sargasso Sea
SAMLTGEENSDEILQRKGKTSFKSNNAGGILGGISTGQEIKISFAVKPTSSILSSRKTIDKFGKNTTISVKGRHDPCVGIRAVPIGEAMMHCVILDHYLMNTAQNKI

SEQ ID NO: 181105 - protein, 106 aa, Unknown
  Bacterial polypetide isolated from the Sargasso Sea
NGFGSINEDGKTNVDEMSIKDGKPSFLSNNNGGILGGISSGQDIICRFVVKPTSSISTERKTIDINLQETTISTKGRHDPCVGIRAVPVGEAMIATTIADHILRFL

SEQ ID NO: 181106 - protein, 293 aa, Unknown
  Bacterial polypetide isolated from the Sargasso Sea
RKPGPELTGIIEGVPAGFTISKEFIDSYLKRRQKDTGSGGRMNIESDEVFISSGVINNISTGAPIALRIKNKDWENWKDKDIEPYVVPRPGHADLIGTAKYHLNDIRLVLERSSARETAMRSAIGAIAMQILESMGISICGYVSSIGKVDYRYSNDFSLDEMRKLTDDSPVSCPDVNKSKQMVKEISDARKKKDTLGGSITTIATGVPPTLGSYVHWDKKLDAKLARILMSIQSVKAIEVGDGIESSKNYGTSVQDQYALNKKEIKKESNNLGGFEGGMTNGENIELTAYLNQ

SEQ ID NO: 181107 - protein, 264 aa, Unknown
  Bacterial polypetide isolated from the Sargasso Sea
QNFVVTTFGESHGVALGCIIDGCPPGLELTVEDMQHDLDRRRPGTSRYTTARREADEVKILSGVFEGKTTGTSIGLLIENTDQRSQDYSDIKDTFRPGHADYTYQQKYGMRDYRGGGRSSARETAMRVAAGAVAKKYLKQVHGIEIYGYLAQLGPITADTVDLTQIEQNAFFFPDATKLDALDEYMRDLRKSGDSIGAKITVAATGVPVGLGEPVFDRLDADIAHALMGINAVKGVEIGDGFGVVTQKGSEGRDLMSPEGFASN

SEQ ID NO: 181108 - protein, 319 aa, Unknown
  Bacterial polypetide isolated from the Sargasso Sea
FFGSYLDLLPGGESHGPAIGCVVDGCPPNIPIKDSDIQKELNKRKPGQSKFTTQRKEDDKINIISGVFEGRTTGTPISLIIYNKDMKSRDYETIKNKFRPGHADYTYFKKYGIRDYRGGGRQSARETAARVAAGAIAKVVLKHKIGKKYQAVGAVTQLGILGCDLKKWKDKTISSNPFFCPDKTVIKLWEKYLLGIRKAGSSCGAIIEVRVRGVPLGLGAPIYSKLDMDIAAAMMSINAVKGVNIGSGMNSAMLTGEENSDEILKKKGKTSFRSNNAGGILGGISTGQEIIVSFAVKPTSSILSSRKTIDRFGKNTTIS

SEQ ID NO: 181109 - protein, 235 aa, Unknown
  Bacterial polypetide isolated from the Sargasso Sea
MSFNTFGKFFRFTTWGESHGPAIGCVIDGCPPNIQIRAADIQNELNKRKPGQSKFVTQRKEKDLVHIMSGVFEGKTTGTPISLIIYNEDQKSRDYETIKTKFRPGHADYTYFMKYGIRDYKGGGRQSARETAARVAAGAIAKKVLENKIGKKYKVIGAVTQIGILGINPNNWDDKFIGKNSFFCPDKKILKLWEKYLLSIRKVGSSCGAVIEVRAKGVPVGLGAPIYSKLDMDIA

SEQ ID NO: 181110 - protein, 207 aa, Unknown
  Bacterial polypetide isolated from the Sargasso Sea
MSGNSIGQLFKVTTFGESHGPAIGGIVDGLPPGLKLDLEQIQHELDRRKPGTSRYTTARREDDIVKILSGVFEGYSTGASIGLLIENTDQRSQDYSAIKDLFRPGHADYTYWHKFGIRDYRGGGRSSARETAVRVAAGAIAKQYLKAKFGIEIRGYLAQLGPIKAQKLDWDQVEQNAFFCPDVDVLEQLDEYMRQLKKDGDSVGPAS

SEQ ID NO: 181111 - protein, 160 aa, Unknown
  Bacterial polypetide isolated from the Sargasso Sea
RKSGSSCGAVIEIRARGIPVGLGAPIYSKLDTDIASGLMSINAVKGVNIGAGMNSAQLSGEQNSDEISSKGNKLKFNSNKAGGILGGISTGQEIIASFAVKPTSSILTTRKTINKFGKNTSISVKGRHDPCVGIRAVPIGEAMINCVLLDHYLMNKAQCS

SEQ ID NO: 181112 - protein, 279 aa, Unknown
  Bacterial polypetide isolated from the Sargasso Sea
SLIIYNEDMRSKDYDDIKDKFRPGHADFTYFMKYGIRDYRGGGRSSARETAARVAAGAVAKRVLENKLGKKFKISGAVTQLGILGCDTNKWDDRVISKNPFFCPDKSMLKIWEKYLLSIRKAGSSCGAIIEVRANGIPAGLGAPIYSKLDSDIASAMMSINAVKGVNIGSGMNSAQLSGEENSDEISQSRKKTKFKSNNAGGILGGISSGQEIIISFAVKPTSSILKSRKTINKFGKNTSISVKGRHDPCVGIRAVPVGEAMLSCVLLDHYLLHKAQCG

SEQ ID NO: 181113 - protein, 221 aa, Unknown
  Bacterial polypetide isolated from the Sargasso Sea
AAGAIARKVIEKKLKNKFKITGALVQIGQSKIDYNNWNNAFINKNDFFSPDKKIVSEWEKLILKARKNGSSLGAIIELRCSGMPVGLGEPVYDKLDSDLARAIMSINAVKGIEIGNGFSSVYESGISNVDEMRIKNKKPIFLSNNNGGILGGISTGQDIILRFCVKPTSSILSSRKTIDKNLKERVISTKGRHDPCVGIRAVPVGEAMMAITLADHCLRYL

SEQ ID NO: 181114 - protein, 219 aa, Unknown
  Bacterial polypetide isolated from the Sargasso Sea
KVVLQKKLGKKFKVIGAVTQLGILGCDTYQWNDKVISKNPFFCPDKSMIKLWEKYLLGVRKSGSSCGAVIEIRARGIPVGLGAPIYSKLDTDIASGLMSINAVKGVNIGAGMNSAQLSGEQNSDEISSKGNKLKFNSNKAGGILGGISTGQEIIASFAVKPTSSILTSRKTINKFGKNTSISVKGRHDPCVGIRAVPIGEAMMNCVLLDHYLMNKAQCS

SEQ ID NO: 181115 - protein, 198 aa, Unknown
  Bacterial polypetide isolated from the Sargasso Sea
YSWDVTLQNGMTKLFIKTHFFVLTNRCLKYWEKYLLSIRKAGSSCGAIIEVRANGIPAGLGAPIYSKLDSDIAAAMMSINAVKGVNIGSGMNSAQLSGEENSDEISQNKTNMKFTSNNAGGILGGISSGQEIIISFAVKPTSSILKSRKTINKFGKNTTISVKGRHDPCVGIRAVPVGEAMLSCVLLDHYLMNKAQCG

SEQ ID NO: 181116 - protein, 149 aa, Unknown
  Bacterial polypetide isolated from the Sargasso Sea
ELRARGVPVGLGAPIYSKLDADIASALMSINAVKGVNIGAGMSSAYLTGEENSDEIRGGAGRIKFKSNKAGGILGGISSGQDIIASFAVKPTSSILNSRETINKKGKNTKISVKGRHDPCVGIRAVPIGEAMLACVILDHYMMNKAQCS

SEQ ID NO: 181117 - protein, 229 aa, Unknown
  Bacterial polypetide isolated from the Sargasso Sea
MSFNTFGKTFRFTTWGESHGPAIGCVIDGCPPLIPLKEADIQKELNKRKPGQSKFTTQRKESDKVQILSGVFEGKTTGTPISLIIYNEDMRSKDYNDIKNKFRPGHADFTYFKKYGIRDYRGGGRSSARETAARVAAGAVAKKVLENKLGKKFKITGAVTQLGILGCDTNKWDDKVISKNSFFCPDKSMLKIWEKYLLSIRKAGSSCGAIIEVRANGIPAGLGAPIYSK

SEQ ID NO: 181118 - protein, 250 aa, Unknown
  Bacterial polypetide isolated from the Sargasso Sea
MSFNTFGKIFRFTTWGESHGPSIGCVIDGCPPNIPISEKDIQIDMDRRRPGQSKFTTQRKESDKAIILSGVFEGKTTGTPISIIIHNEDKRSRDYETIKSKFRPGHADYTYFKKYGIRDFRGGGRQSARETACRVAAGAVAKIVLKKVIGSKFNVIGAVTQLGLMSCDKSNWKDSEIRKNPFFCPDKKSVKLWEKYLLAVRKAGSSCGAIIELRATGIPVGLGAPIYSKLDTDIAAALMSINAVKGVNME

SEQ ID NO: 181119 - protein, 217 aa, Unknown
  Bacterial polypetide isolated from the Sargasso Sea
IARKVIKNKIKNKVVITGALVQIGNHKINYNNWNSSFIAKNNFWSPDKEIIKTWEKEIQNARKSGSSLGAIIEIRVKGLPAGLGEPIYEKIDSDIAKGLMSINAVKGVEMGNGFNSVYETGISNVDEMRIKNKKPIFLSNNNGGVLGGITTGQELISRFVVKPTSSILSTKKTINSKLKETTISTKGRHDPCVGIRAVPVGEAMVATTIADHCLRFL

SEQ ID NO: 181120 - protein, 290 aa, Unknown
  Bacterial polypetide isolated from the Sargasso Sea
EGKTTGHPIALHIKNEDQRSKDYSEISNQFRPGHADITYQNKYGIRDYRGGGRSSARETAVRVAAGAIAFKVLEHKLKKSIKIRASVIQLGPNKINRENFDWNEVNKNPFFCGDPKAAKEWEIWLDNLRKNGNSAGAIIEVIAENVPRGLGSPVYKKLDSQIAEALMSINAVKGVEIGSGFDLVSLTGSEANDEIYPDNKGDYYFGSNHSGGILGGISSGQPIIAKFIVKPTSSILTEKNSINLQNEPVKIKTKGRHDPCVGIRAVPVAEAMMAITILDQLLEHESQMER

SEQ ID NO: 181121 - protein, 235 aa, Unknown
  Bacterial polypetide isolated from the Sargasso Sea
MTSNSIGKIFNFTTWGESHGKAIGCVVDGVPSNINLTEKDIQPYLDKRKPGQSKFTTQRKEEDKVEILSGTFEGKTTGHPISLIIYNQDQRSKDYGDIKSKFRPGHADYTYWKKYGIRDYRGGGRSSARETAMRVAAGAIARKIIKNKIKNQVVITGALIQIGNHKINYDNWNNNFIPKNNFWSPDKEIIKKWENEIQTARKSGSSLGAIIEIRVKGLPAGLGEPIYEKIDSDIA

SEQ ID NO: 181122 - protein, 181 aa, Unknown
  Bacterial polypetide isolated from the Sargasso Sea
DESKLSELDSMFPDLIEEGNSVGAKLGVIVKNCPVGLGDPVFEKLDANLAKAIMTINAVKSVSIGNADDLLSLKGSEARDEITESGFTSNNSGGILGGISNGDDISLSFIIKPTSSIKAKGKTVNKEGNEVDIEVTGRHDPCVGIRAVPIAEAMVSLVLVDHLLINKAQCADVEQNLPFSE

SEQ ID NO: 181123 - protein, 276 aa, Unknown
  Bacterial polypetide isolated from the Sargasso Sea
MFKVTTWGESHGKAIGCIIDGCPPLISLNEKDIQKYLDLRKPGTSKFVTQRKEDDKVEILSGVFKGKTTGTPISLIIYNKDQKSKDYGDIKNKFRPGHADLSYFLKYGIRDYRGGGRSSARETATRVAAGAIARKVIKHILKKDIKIRGAVTQVGALSINPRNFNWNSVNSNPFFCPDKKIVQVWEEYLDLIRKKGLSVGAIIRVNAQGLPSGIGEPIYGKLDTELAAAMMSINAVKGVEIGLGMEAATITGDKNSDEIRTKGKISFLVQTMPVEY

SEQ ID NO: 181124 - protein, 170 aa, Unknown
  Bacterial polypetide isolated from the Sargasso Sea
MSENSFGKLFSFTSFGESHGPGIGCVVDGVPPRLPLSEEIIQPYLDRRKPGQSRFVTQRREDDEVEILSGVFEGMTTGTPVAMLIRNKDQRSKDYSEISRQFRPGHADFTYQEKYGIRDYRGGGRSSARETAVRVAAGAIADQMLKTVLGDSYRIRGGVVQIGPHAIDRS

SEQ ID NO: 181125 - protein, 324 aa, Unknown
  Bacterial polypetide isolated from the Sargasso Sea
MSDNSFGKLFSFTSFGESHGPGVGCVVDGAPPRMALSEALIQPYLDRRRPGQSRFVTQRKEEDKVEILSGVFEGQTTGTPIGLLIRNNDQRSGDYGDIARQFRPGHADYTYQEKYGIRDYRGGGRSSARETAVRVAAGAIADLFLKQALGSAYRVRGSVVQIGPHAINRENLDWDQFDRNPFFCPDAEAAKAWEAYLDEVRKQGSSAGAILEIVADGIPAGLGQPIYGKLDTELSAAMMSINAVKGVEIGGGFALAAMDGREAGDEMREGPAFLSNHAGGILGGISTGAQIVVRIAIKPTSSILTKRRSIDEDGKEVELLTKGR

SEQ ID NO: 181126 - protein, 166 aa, Unknown
  Bacterial polypetide isolated from the Sargasso Sea
YCLSIRKAGSSCGAIIEIRARGVPVGLGAPIYSKLDMDLASAMMSINAVKGVNIGSGMNSAQLTGEQNSDEITKKGMKTKFKSNNAGGILGGISSGQEIIVSFAVKPTSSILITRKTIDRYGKNTSISVKGRHDPCVGIRAVPIGEAMMHCVILDHFLMNEAQCNS

SEQ ID NO: 181127 - protein, 300 aa, Unknown
  Bacterial polypetide isolated from the Sargasso Sea
GLSVILEGIPSNLSISEDFIEKDMSRRQKGYGSGGRMKIEKDRAEILSGVRHGKTLGSPISLWIENKDWANWTTPMSITPVDVNEDIKKQTKIVPGHADFPGTLKFNHKDVRNVLERASARETAARVAAASVCKKFLNEIGIEIKSRAKSVGWKKSEIENIDEIDWDFVESSEVRASNANEDINFKKVIDKVKKERTTIGGIFQVIAFNVPLGLGSHTHWDNKLDGKIAQSMVSINAVKGVEIGNGFENTERWGREVQDVIEPNSSDVRNFSQISNNSGGIEGGMSNGNDIIVNVAIKPI

SEQ ID NO: 181128 - protein, 89 aa, Unknown
  Bacterial polypetide isolated from the Sargasso Sea
KTNFISNNAGGILGGISTGQDIVVSFAVKPTSSILTTKKTIDRFGKNTSISVKGRHDPCVGIRAVPIGEAMMNCVLLDHFLMNSAQCKS

SEQ ID NO: 181129 - protein, 192 aa, Unknown
  Bacterial polypetide isolated from the Sargasso Sea
TNQWNDKVISKNPFFCPDKSMIKLWEKYLLSVRKSGSSCGAVIEIRARGVPVGLGAPIYSKLDTDIASGLMSINAVKGVNIGAGMNSAQLSGEQNSDEISSKGNKLKFNSNKAGGILGGISTGQEIVASFAVKPTSSILTSRKTINKFGKNTSISVKGRHDPCVGIRAVPIGEAMMNCVLLDHYLMNKAQCG

SEQ ID NO: 181130 - protein, 165 aa, Unknown
  Bacterial polypetide isolated from the Sargasso Sea
MAGNSFGNIFTLTTFGESHGPALGGIIDGCPAGLKINLKKVNDDLNRRRPGQSEIVTQRKEADSVEFLSGIFKDKTTGTPIGFIIKNRDHKSKDYKHIMNSYRPSHADFVYDKKYGFRDYRGGGRSSARETVVRVVAGSIAKQLISPVKINAFVSSVGDVKMDLD

SEQ ID NO: 181131 - protein, 251 aa, Unknown
  Bacterial polypetide isolated from the Sargasso Sea
HADYTYLSKYGIRDPRGGGRQSARETAMRVAAGAIARKIIPEIEIKGALVQLGDLKIDKTKWDDDFINENPFWCPDKSAIKSWEDKINSLVDEGDSCGAIIEIIAKNVPVGLGAPVYGKLDSDLGSAIMSINAVKGVEIGNGFDAVNLKGSENGDEMRMKNNKPAFLSNNSGGILGGISSGQDIIVRFAVKPTSSIRKKRKTIDKTQKDTEITTKGRHDPCVGIRAVPVGEAMVACVLADHFLRNRAQIGN

SEQ ID NO: 181132 - protein, 191 aa, Unknown
  Bacterial polypetide isolated from the Sargasso Sea
MSFNTFGKLFRFTTWGESHGPAIGCVVDGCPPNININEQDIQIELNKRKPGQSKFTTQRKEDDKVNILSGIFEGKTTGTPISMIIYNKDMRSRDYETIKNKFRPGHADYTYLKKYGIRDYKGGGRQSARETAARVAAGAIAKKVLEIKIGKKYKVIGAVTQLGMLGCDINNWNDKFISKNPFFCPDKSIIK

SEQ ID NO: 181133 - protein, 310 aa, Unknown
  Bacterial polypetide isolated from the Sargasso Sea
CVVDGCPPNILLKEEDIQKELNKRKPGQSKFTTQRKEDDKVQILSGVFEGKTTGTPISMIIFNKDMRSRDYETIKNKFRPGHADFTYFKKYGIRDYRGGGRQSARETASRVAAGAIAKKVLEKKIGLKYKVVGAVTQLGILGCDISRWNDNVIKKNPFFCPDQKIIKLWEKYLLAIRKSGSSCGAIIEIRARGIPTGLGAPIYSKLDMDLAAAMMSINAVKGVNIGSGMNSAQLTGEENSDEISNRGKKIKFKSNNAGGILGGISSGQEIVVSFAVKPTSSILTSRKTIDRFGKNTSISVKGRHDPCVGI

SEQ ID NO: 181134 - protein, 211 aa, Unknown
  Bacterial polypetide isolated from the Sargasso Sea
MTSNSIGKIFNFTTWGESHGKAIGCVVDGVPSNINLTEKDIQPYLDKRKPGQSKFTTQRKEEDKVEILSGTFEGKTTGHPISLIIYNQDQRSKDYGDIKSKFRPGHADYTYWKKYGIRDYRGGGRSSARETAMRVAAGAIARKIIKNKIKNQVVITGALIQIGNHKINYDNWNNNFIPKNNFWSPDKEIIKLWENEIQTARKFWFLFRCYN

SEQ ID NO: 181135 - protein, 198 aa, Unknown
  Bacterial polypetide isolated from the Sargasso Sea
RENMAWSERHNNPFFCPDAAMAKQWEAYLDGVRKAGSSAGAILEITADGIPVGLGQPVYGKLDSELAAAMMSINAAKGVEIGGGFDLSAVDGSFASDEMRAGKSLETPSFLSNYAGGVLGGISSGQQIVVRVAIKPTSSILTPRKSIDRDNKNVDVITKGRHDPCVGIRGVPVAEAMMSLVLADLFMRHQAQCGFGDF

SEQ ID NO: 181136 - protein, 221 aa, Unknown
  Bacterial polypetide isolated from the Sargasso Sea
MLRFLTGGESHGPGLVALLEGLPAGIKISEADIRLDLARRQAGYGRGGRMKIETDYAVVQSGVRHGATTGAPISLLIENKDHLSGNGPDGKPWTITMSKEAVEEEVTPIHRLRPGHADTPGISKYLQNDARNILERSSARESTSRVAIGAICRAFLLEFGVEVHSHVTNIGGIQARKPNVINWANVEKSPVRCSDPEAEKQMIDEIDNAQEAGDSLGGVIE

SEQ ID NO: 181137 - protein, 211 aa, Unknown
  Bacterial polypetide isolated from the Sargasso Sea
MSFNTFGKLFRFTTWGESHGIAIGCVVDGCPPNIKIKENDIQIELNKRKPGQSKFTSQRKEDDKVNILSGIFEGKTTGAPISLIIYNKDMRSRDYETIKNKFRPGHADYTYFKKYGIRDYKGGGRQSARETAARVAAGAIAKKVLQHKIGSKYKVIGAVTQLGILGCDTKNWNDNFISKNAFFCPDKSILKLWEKYLLSIRKSGSSCGAII

SEQ ID NO: 181138 - protein, 239 aa, Unknown
  Bacterial polypetide isolated from the Sargasso Sea
GGGRQSARETACRVAAGAIAKIVLRKIIGKKFSIVGAVTQLGLMSCDKQNWKDSEIRKNPFFCPDKNSVKLWEKYLLAVRKAGSSCGAVIELRAKGIPVGLGAPIYSKLDTDIAAALMSINAVKGVNIGSGMNAAFLSGEENSDEIRKDLGKIKFKTNHAGGILGGISSGQDIVASFAVKPTSSILNSRETIDKKGKNTKISVKGRHDPCVGIRAVPIGEAMISCVILDHLLMHRAQCG

SEQ ID NO: 181139 - protein, 89 aa, Unknown
  Bacterial polypetide isolated from the Sargasso Sea
KIKFETNNAGGILGGISSGQEIKVSFAVKPTSSILTSRRTIDKFGKNTSISVKGRHDPCVGIRAVPIGEAMMNCVLLDHLLMNNAQCKF

SEQ ID NO: 181140 - protein, 148 aa, Unknown
  Bacterial polypetide isolated from the Sargasso Sea
MSFNTFGKVFRFTTWGESHGPAIGCIIDGCPPLINLNERDIQIELNKRKPGQSKFTTQRKESDKVEILSGVFEGKTTGTPISLIIYNEDMRSKDYSDIKDKFRPGHADYTYFKKYGIRDYRGGGRSSARETASRVAAGAVAKKVLEKK

SEQ ID NO: 181141 - protein, 231 aa, Unknown
  Bacterial polypetide isolated from the Sargasso Sea
MSSSFGKIFRVNTFGESHGGAVGVILDGCPPKLKVDINLIQNELDRRRPGQSDITTPRNEEDKIEILSGIKEGLTLGTPIAMLVRNKDQRPGDYNDLEQVFRPSHADGTYHLKYGIQASSGGGRASARETIGRVAAGAVAKQLLKNFCNTEILSWVKRIHDIDSDINKEKISLNKIDSNIVRCPDEKVSAEMIERIKQLKRQGDSCGGVIECLVRNVPSGLGMPVFDKLEA

SEQ ID NO: 181142 - protein, 310 aa, Unknown
  Bacterial polypetide isolated from the Sargasso Sea
ELNKRKPGQSKFTTQRKEDDKVEILSGMFGGKTTGTPISMIIYNKDMRSKDYKDIKNKFRPGHADFTYFQKYGIRDYRGGGRQSARETASRVAAGAIAKKVLQTKLGKKYNVIGGVTRLGILGCDLNNWRDKEISKNPLFCPDKSVVKLWEKYLLSIRKAGSSCGAIIEIRARGVPVGLGAPIYSKLDMDLASAMMSINAVKGVNIGSGMNSAQLSGEQNSDEMSKKGKKTKFYSNNAGGILGGISSGQEIVVSFAVKPTSSILSQRKTIDKFGKNTSISVKGRHDPCVGIRAVPIGEAMMHCVILDHYL

SEQ ID NO: 181143 - protein, 271 aa, Unknown
  Bacterial polypetide isolated from the Sargasso Sea
MSFNTFGHLYRTTTWGESHGPAIGCVVDGCPPNINLEEIDIQKWLDKRKPGQSRFTTQRKEQDKVKILSGVFEGKTTGTPISLLIENTDARSKDYDKIKDKFRPGHADFTYEKKYGHRDYRGGGRQSARETACRVASGAIARKILGSELSIKGAVIQIGDLEINRNNWNENEIDNNPFWCPDIEKVKIWEKYLDEIRMSGSSVGAVIEITARGIPVGLGAPIYKKLDADIASAMMSINAVKAIEIGSGVNASTLKGEENADEIVIKNNKIK

SEQ ID NO: 181144 - protein, 244 aa, Unknown
  Bacterial polypetide isolated from the Sargasso Sea
RGGGRSSARETAVRVAAGAIADLTLQQVLGADYRVRGGVVQIGPHAISRDRLDWNECDNNPFFCPDPVAAKEWEAYLDGVRKQGSSAGAILEIVADGIPAGLGQPIYGKLDTELAAAMMSINAVKGVEIGSGFDLAAIDGREAGDEMRAGTDGPSFSSNHAGGILGGISSGQQIVVRIAIKPTSSILTPRQSIDKDGKEVDIMTKGRHDPCVGIRGVPVAEAMMAITLLDALMRHKAQTNLIPE

SEQ ID NO: 181145 - protein, 140 aa, Unknown
  Bacterial polypetide isolated from the Sargasso Sea
MAENTLGKIFSFTTWGESHGKAIGCVVDGVPPNISLTEKDIQKYLNKRRPGQTKYTSQRKESDKINILSGTFNGLTTGHPISLIINNEDQRTKDYSEIKNIFRPGHADYTYWAKYKIRDYRGGGRSSARETAMRVAAGAI

SEQ ID NO: 181146 - protein, 212 aa, Unknown
  Bacterial polypetide isolated from the Sargasso Sea
MSGNSFGSSFIVTTFGESHGVALGCIVDGCPPGLELCEEDIQKELDKRKPGSSKYTTQRKEDDEVEILSGVFEGKTTGTPIGLLIRNKDQKSKDYDQLKDVFRPSHADYVYSKKYGIRDHRGGGRSSARETSMRVAAGAIAKKYLSEKLDIKIIGYLSQIGSITISNFDSSQISQNPFFCPDPEVLTSIEDLIDQLRKDGDSVGAKIEVSVS

SEQ ID NO: 181147 - protein, 213 aa, Unknown
  Bacterial polypetide isolated from the Sargasso Sea
MLGHKFNVIGAVTQLGLMSCDKSNWKDNEIRKNPFFCPDKKSVKLWEKYLLAVRKAGSSCGAIIELRAKGIPVGLGAPIYSKLDTDIAAALMSINAVKGVNIGAGMNAAFLSGEENSDEMHKGSGSIKFKSNQAGGILGGISSGQEIIASFAVKPTSSILTSRSTIDKRGKNTKISVKGRHDPCVGIRAVPIGEAMINCVLLDHLLMHKAQCG

SEQ ID NO: 181148 - protein, 144 aa, Unknown
  Bacterial polypetide isolated from the Sargasso Sea
MSGNTFGKLFQVTTYGESHGSALGCIIDGCPPQIELSSDDIQSELNRRKPGQSDVTTQRKEDDIVEILSGVFEGKTLGTPISLIVYNEDQRSKDYSKIKDVFRPNHADITYQAKYGHRDYRGGGRSSARETAMRVAAGAVAKKY

SEQ ID NO: 181149 - protein, 241 aa, Unknown
  Bacterial polypetide isolated from the Sargasso Sea
FRGGGRQSARETACRVAAGAVAKIVLNKILGKKFNVIGAVTQLGLMSCDKQNWKNSEIRKNPFFCPDKRSVKLWEKYLLAVRKAGSSCGAVIELRASGIPVGLGAPIYSKLDTDIASSLMSINAVKGVNIGSGMNAAFLSGEENSDEIRKSSGKIKFKTNHAGGILGGISSGQDIVASFAVKPTSSILTSRKTIDKKGKNTKISVKGRHDPCVGIRAVPIGEAMISCVILDHLLMHRAQCG

SEQ ID NO: 181150 - protein, 243 aa, Unknown
  Bacterial polypetide isolated from the Sargasso Sea
KYGIRDYRGGGRSSARETAMRVAAGAVARKVINKKIGNKPKIIGSLVQIGNSKIDYNNWDEKIISQNEFFSADEKIIPKWKNLIDKARKEGSSLGAIIEIRALGIPAGLGEPIYEKLDSDIAKALMTINAVKGVEIGNGFNSVNENGKTNVDEMVIKNGEPLFLSNNNGGILGGISSGQDIICRFVVKPTSSIISERKTIDINFKETKISTKGRHDPCVGIRAVPVGEAMLATTIADHCLRHF

SEQ ID NO: 181151 - protein, 119 aa, Unknown
  Bacterial polypetide isolated from the Sargasso Sea
MSFNTFGKIFRFTTWGESHGPAIGCVIDGCPPNISIKEKDIQYELNKRRPGQSKFTTQRKEDDKINILSGVFEGKTTGTPISLLIYNKDMRSRDYETIKNKFRPGHADFTYFKKYGIRD

SEQ ID NO: 181152 - protein, 254 aa, Unknown
  Bacterial polypetide isolated from the Sargasso Sea
MDAAVTPRASGSSFGRLFRVTTFGESHGGGVGCVVDGVPPRLQITREELQFELDRRRPGQSRITTPRNEEDSCEILSGVGLDGVTLGTPIAVLVRNKDHRSQDYGEIAVAYRPSHADATYDMKYGVRAIAGGGRSSARETIGRVAAGAIAKKVLKQIAGTEILAYVSQVKDVTSENVDHATMTMEDVEANIARCPDEASAERMIAAIDEVRVKGDSCGGVVTCIVRNCPRGLGAPVFDKLEADLAKAMMSLPAT

SEQ ID NO: 181153 - protein, 111 aa, Unknown
  Bacterial polypetide isolated from the Sargasso Sea
MGNSFGKLFRITTWGESHGGGVGVVIDGCPPNIDIDLNFIQQELDRRRPGQSHITTPRKESDEVHVLSGIFEGKTLGTPISMMVKNKDANPKAYNHLKDVYRPSHADYTYD

SEQ ID NO: 181154 - protein, 272 aa, Unknown
  Bacterial polypetide isolated from the Sargasso Sea
PGISLSVEDLLVDMDRRRPGQSRIVTQRKESDTPEILSGVFEGRTTGTSLAILVRNEDQRSRDYSNIKDKYRPGHADFSFDARYGFRDYRGGGRSSARETTVRVAAGVVAKKILESFGAKVVGYVCQVGGIHATVPDPASVTLEQVEKLPDGEPNIVRCPDLDAAEKMIQLIEEVRKDQDSIGGAAEIVASGVPAGLGEPVFDKIKADLAKALFSLPAVLGVEYGIGFGCTTMRGSEHNDLFVAGDATASNPRGITTKTNRHGGMLGGITTG

SEQ ID NO: 181155 - protein, 319 aa, Unknown
  Bacterial polypetide isolated from the Sargasso Sea
TTWGESHGKAIGCVIDGVPSNIKLTEKDIQPYLDKRKPGQSKFTTQRKEKDFIEILSGTFEDKTTGHPISLIIYNKDQRSRDYKDIKEKFRPGHADYTYWAKYGIRDYRGGGRSSARETAMRVAAGAVARKIITKKVKTQVSITGALVQIGRYKINYNNWNNNFISQNEFWSPDKKIISTWKKAINDARKLGSSLGAIIEIRVKGLPAGLGEPIYEKIDSDIAKALMSINAVKGVEIGNGFDCVNESGVTNVDEMRIKNNKPIFLSNNNGGILGGITTGQELVCRFVVKPTSSILSSKKTINTKMKETIISTKGRHDPC

SEQ ID NO: 181156 - protein, 223 aa, Unknown
  Bacterial polypetide isolated from the Sargasso Sea
AIAKKVLQNKLGKKYKVVGAVIQLGILGCDVTKWNERFISKNPFFCPDKSIIKLWEKYLLSIRKSGSSCGAVIELRAKGIPVGLGAPIYSKLDMDLASAMMSINAVKGVNIGSGMSSAQLTGEQNSDEIVQKSKKTNFKSNNAGGILGGISSGQDIIVSFAVKPTSSILTSRKTIDKFGQNTSISVKGRHDPCVGIRAVPIGEAMMHCVLLDHYLMNAAQCNS

SEQ ID NO: 181157 - protein, 283 aa, Unknown
  Bacterial polypetide isolated from the Sargasso Sea
KVIILSGVFGGKTTGTPISIIIYNEDKKSRDYESIKNKFRPGHADYTYFKKYGIRDFKGGGRQSARETACRVAAGAVAKIVLKKILGIKFNIIGAVTQLGLMSCDKQNWKDSEIRKNPFFCPDKKSVKLWEKYLLAVRKAGSSCGAIIELRASGIPVGLGAPIYSKLDTDIAAALMSINAVKGVNIGSGMNSAFLSGEENSDEIRKNSGKIKFKTNHAGGILGGISSGQDIVASFGVKPTSSILTSRETIDKKGKNTKISVKGRHDPCVGIRASAYRRSNVKL

SEQ ID NO: 181158 - protein, 234 aa, Unknown
  Bacterial polypetide isolated from the Sargasso Sea
GGRSSARETAMRVAAGAIARKIIKNKVKNQVVITGALIQIGNHKINYDNWNNSFIPKNNFWSPDKKIIKTWENEIQTARKSGSSLGAIIEIRVKGLPAGLGEPIYEKIDSDLAKALMSINAVKGVEMGKGFSSVYETGISNVDEMRIKNKKPLFLSNNNGGVLGGITTGQELITRFVVKPTSSILSTKKTINTKLKETTISTKGRHDPCVGIRAVPVGEAMVATTIADHCLRFL

SEQ ID NO: 181159 - protein, 80 aa, Unknown
  Bacterial polypetide isolated from the Sargasso Sea
SGGTLGGISTGQDLHVNIALKPTSSILIPGKTIDQKNKPTTIRTKGRHDPCVGIRAVPIAEAMMALTLCDLYLRHKAQNK

SEQ ID NO: 181160 - protein, 309 aa, Unknown
  Bacterial polypetide isolated from the Sargasso Sea
SKITTQRKEDDKVNILSGIFEGKTTGTPISMIIYNKDMRSRDYETIKNKFRPGHADYTYFKKYGIRDYRGGGRQSARETAARVAAGAIAKKVLENKIGKKYKVIGAVTQLGILGCDLKKWNDKFISKNPFFCPDRSIIKLWEKYLLSVRKAGSSCGAIIEVRARGVPIGLGAPIYSKLDMDLASAMMSINAVKGINIGSGMNSAQLTGEENSDEILKKGKKINFKSNNAGGILGGISSGQDIIISFAVKPTSSILTKRQTIDRFGKNTSISVKGRHDPCVGIRAVPIGEAMMHCVILDHYLMNIAQCGN

SEQ ID NO: 181161 - protein, 182 aa, Unknown
  Bacterial polypetide isolated from the Sargasso Sea
KNPFFCPDKSMIKLWEKYLLGVRKSGSSCGAVIEVRARGIPAGFGAPIYSKLDSDIASAFMSINAVKGVNVGAGMNSAQLSGEQNSDEISSKNNKLKFNSNNAGGILGGISSGQEIIASFAVKPTSSILTTRNTVNKFGKNTTISVKGRHDPCVGIRAVPVGEAMMNCVLLDHYLMNQAQCG

SEQ ID NO: 181162 - protein, 255 aa, Unknown
  Bacterial polypetide isolated from the Sargasso Sea
MSFNTFGKFFRFTTWGESHGPAIGCVIDGCPPNIALKQEHIQKELNKRKPGQSKFTTQRKEDDKVEILSGVFEGKTTGTPISLIIYNKDMRSRDYETIKNKFRPGHADFTYFKKYGIRDYRGGGRQSARETASRVAAGAVAKKVLEKKIGKKYKVVGAVTQLGILGCDVTRWNDKEIGKNPFFCPDKKIIKLWEKYLLAIRKSGSSCGAIIEVRARGVPVGLGAPIYAKLDMDLASAMMSINAVKGVNIGSGMNA

SEQ ID NO: 181163 - protein, 209 aa, Unknown
  Bacterial polypetide isolated from the Sargasso Sea
MSFNTFGKSFRFTTWGESHGPALGCVIDGCPPLIPLKEADIQKELNKRKPGQSKFTTQRKESDKVQILSGVFEGKTTGTPISLIIYNEDMRSKDYNDIKDKFRPGHADFTYFKKYGIRDYRGGGRSSARETAARVAAGAVAKKVLENKLGKKFKITGAVTQLGILGCDTNKWDDKIISKNPFFCPDKSMLKIWEKYFVSIRKAGSSCGA

SEQ ID NO: 181164 - protein, 229 aa, Unknown
  Bacterial polypetide isolated from the Sargasso Sea
MRVAAGAIARKYLFEKAGIEIFGFLGQLGPIHLEMKDRSFIETNPFFCGDPEKISELESYMDQLRKEGDSIGARINLVATNVPVGLGEPVFDKLEADIAHGLMSINAVKGVEIGSGFSVVNQKGSEHRDEIDTDGFKQNNSGGTLGGISSGQDIFASIALKPTSSIIKPAETIDKTGEKTEIVTKGRHDPCVGLRATPIGEAMLAIVLMDHFLRNRAQNADVSIEEKGE

SEQ ID NO: 181165 - protein, 249 aa, Unknown
  Bacterial polypetide isolated from the Sargasso Sea
MSGNTFGKIFKITTFGESHGTAMGCILDGCPPQIELKKEDIQHELDRRKPGQSDVTTQRKEDDAVEILSGVFEGKTLGTPIGMIIYNKDQQSKDYSNIKDVFRPNHADITYQAKYGHRDYRGGGRASARETVNWVAAGAIAKKILQEEGISVNGFVSEIGKVKAEQINNKDINNKYFFCDESKLSDLDSMFSDLIEEGNSVGAKLGVVVENCPVGLGDPVFEKLDANLAKANMTINAVKSVSIGNADDL

SEQ ID NO: 181166 - protein, 113 aa, Unknown
  Bacterial polypetide isolated from the Sargasso Sea
VKGVEIGAGFDVVSQKGSEARDEITPKGFLSNFSGGTLGGISTGQDLHVNIALKPTSSILIPGKTVDQKNKPTTIRTKGRHDPCVGIRAVPIAEAMMALTLCDLYLRHKAQNK

SEQ ID NO: 181167 - protein, 161 aa, Unknown
  Bacterial polypetide isolated from the Sargasso Sea
SWVKRIHDIDSDINKEKISLKKIDSNIVRCPDEKVSTEMIERIKELKRQGDSCGGVIECLVRNVPSGLGMPVFDKLEADLAKALMSLPATKGFEIGSGFSGTYLKGSEHNDAFIKSDDISKLRTTSNNSGGIQGGISNGENIEMKIAFKQTATIGKEQKTV

SEQ ID NO: 181168 - protein, 161 aa, Unknown
  Bacterial polypetide isolated from the Sargasso Sea
RKKGSSLGAKLLVNAKNVPAGLGEPVYGKLDADLAGAMMSINAVKGVEIGAGNEAVELSGDENSDEIRANKNKKIIFSSNNSGGILGGISSGQDLNLSITIKPTSSILKAKKTINNKFQNTSISTKGRHDPCVGLRAVPIAEAMMACVLADHILRNRAQCG

SEQ ID NO: 181169 - protein, 255 aa, Unknown
  Bacterial polypetide isolated from the Sargasso Sea
ADYTYFKKYGIRDYRGGGRQSARETASRVAAGAIAKKVLQSKLGNKYKVVGAVIQIGILGCDTSKWDEKFISKNPFFCPDKSIIKLWEKYLLSIRKSGSSCGAIIQVRAKGVPIGLGAPIYSKLDMDLAAAMMSINAVKGVNIGSGMNVAQLTGEQNSDEITQKGKKTNFKSNNAGGILGGISSGQDIIVSFAVKPTSSILSSRKTIDKFGKNTFISVKGRHDPCVGIRAVPIGESMMHCVLLDHYLMNVAQCKS

SEQ ID NO: 181170 - protein, 211 aa, Unknown
  Bacterial polypetide isolated from the Sargasso Sea
GSKFNVTGAVTQLGLMSCDKSNWKDSEIRRNPFFCPDKKSVKLWEKYLMAVRKSGSSCGAIIELRAKGVPVGLGAPIYSKLDADIASALMSINAVKGVNIGAGMNAAFLSGEENSDEMNKKSGKINFKSNQAGGILGGISSGQNIIASFAVKPTSSILTSRDTIDKKGKNTKISVKGRHDPCVGIRAVPIGEAMISCVLLDHYLMNKAQCG

SEQ ID NO: 181171 - protein, 172 aa, Unknown
  Bacterial polypetide isolated from the Sargasso Sea
MSFNTFGKIFRFTTWGESHGPAIGCVIDGCPPNIPISEKDIQKDMDRRRPGQSKFTTQRKESDKVIILSGVFEGKTTGTPISIIIYNEDKRSRDYETIRNKFRPGHADFTYFKKYGIRDFRGGGRQSARETACRVAAGAVAKIILKKIIGLKFNIIGAVTQLGLMSCDKQNG

SEQ ID NO: 181172 - protein, 132 aa, Unknown
  Bacterial polypetide isolated from the Sargasso Sea
LDMDLASAMMSINAVKGVNIGSGMNSAQLTGEQNSDEISQKGSKAKFASNNAGGILGGISSGQEIIVSFAVKPTSSILTSRKTINKFGKNTSISVRGRHDPCVGIRAVPIGQAMMHCVLLDHYLMNQAQCKY

SEQ ID NO: 181173 - protein, 147 aa, Unknown
  Bacterial polypetide isolated from the Sargasso Sea
IIEVRASGIPAGLGEPIYEKLDSDIAKALMTINAVKGVEIGNGFNSVNEDGKTNVDEMVIKDGEPKFLTNNNGGILGGISSGQDIISRFVVKPTSSIISERRTIDINFKETIISTKGRHDPCVGIRAVPVGEAMLATTIADHCLRHF

SEQ ID NO: 181174 - protein, 206 aa, Unknown
  Bacterial polypetide isolated from the Sargasso Sea
KIEILSGIFNGKTTGTPISILIRNEDKRSRDYESIKNKFRPGHADFTYFKKYGIRDYRGGGRQSARETASRVAAGAIAKVVLKKILGNKFSIYGAVTQLGLMGCDRTNWSNGEIRKNPFFCPDKKSVKLWEKYLMAVRKSGSSCGAIIELRANGIPAGLGSPIYSKLDMDIAGALMSINAVKGVNIGAGIKAAYLSGEENSDEMKS

SEQ ID NO: 181175 - protein, 284 aa, Unknown
  Bacterial polypetide isolated from the Sargasso Sea
YCSSIKNEDQRSKDYSDIAKQFRPGHADITYQNKYGIRDYRGGGRSSARETAVRVAAGAIAFKVLEHKLNKTIKIRASVVQMGPNKINRENFNWNEVNHNPFFCGDREAAKEWEIYLDGLRKSGNSTGAIIEVIAENVPRGLGSPVYKKLDSQIAEAMMSINAVKGVEIGSGFGLASLTGEESNDEIFPDNKGDYYFGSNHSGGILGGISSGQPIVARFIVKPTSSILKEKNSINLNNEAIQIRTKGRHDPCVGIRAVPVAESMMAITILDQLLEHESQIGKVK

SEQ ID NO: 181176 - protein, 230 aa, Unknown
  Bacterial polypetide isolated from the Sargasso Sea
MSFNTFGKFFRFTTWGESHGPAIGCVVDGCPPNIPIKEAEIQLELDKRKPGQSKFTTQRKEDDKINILSGIFEGRTTGTPILMLIYNKDMRSRDYETIKNKFRPGHADYTYFKKYGIRDYRGGGRQSARETAARVAAGAIAKKVLEKLIGKKYKTIGAVTQLGTLGCDKNRWNDNFIRKNPFFCPDKSVLKLWEKYLLSIRKAGSSCGAIIEIRARGVPLGLGAHNLFKT

SEQ ID NO: 181177 - protein, 192 aa, Unknown
  Bacterial polypetide isolated from the Sargasso Sea
KSNWKDSEIRNLPFFCPDKKSVKLWEKYLLAVRKAGSSCGAIIELRATGIPVGLGAPIYAKLDTDIAAALMSINAVKGVNIGAGMNAAFLSGEENSDEISKYSGKVKFKSNQAGGILGGISSGQNIVASFAVKPTSSILTSRKTIDKKGKNTKISVKGRHDPCVGIRAVPIGEAMINCVLLDHFLMDRAQCG

SEQ ID NO: 181178 - protein, 292 aa, Unknown
  Bacterial polypetide isolated from the Sargasso Sea
KEDDKVKILSGVFEGKTTGTPIGLIIFNEDQRSHDYSNIKDVFRPNHADITYQGKYGIRDYRGGGRASARETSMRVAAGAVAKKVLKEKGIVISSWVQQIGEIKAENFNNNSSNKYNFCDESKLPELDELFNQLIDDGDSVGAELGVKISGCKIGLGEPVFDKLDAELAKAIVSINAVKSISFGNADLFLSKKGSEVRDEMNSDGYLSNNSGGILGGISSGQDIDLSFIIKPTSSIASKSKAVDVDGNEVSLEVKGRHDPCVAIRAVPIAEAMCALCILDHYLRNVAQCSDV

SEQ ID NO: 181179 - protein, 233 aa, Unknown
  Bacterial polypetide isolated from the Sargasso Sea
GGGRSSARETACRVVAGSIAKQILKNIKITAFVKSVGSVSLNGSYKNYNLKDAENNIVRCPDKSVAKKMEKLIIETRKMGDTIGGVVSCVITGSPIGLGEPVFDKLHAELGKAMLSINAVKGFEFGSGFNGTKMYGSEHNDQFDSAGKTVTNFSGGIQGGISNGMDIFFNVAFKPVATIMKSQKTINKDGDEKEMKGKGRHDPCVVPRAVPIVESMAALVILDNLLLNNKKEI

SEQ ID NO: 181180 - protein, 213 aa, Unknown
  Bacterial polypetide isolated from the Sargasso Sea
KLGKKFKVIGAVTQLGILGCDTNKWNDKIISKNPFFCPDKSVIKLWEKYLLGVRKSGSSCGAVIEIRARGIPVGLGAPIYSKLDSDIASSFMSINAVKGVNIGAGMNSAQLSGEQNSDEISLKGKKLKFNSNNAGGILGGISTGQEIIASFAVKPTSSILTTRKTVDKFGKNTTISVTGRHDPCVGIRAVPVGEAMMNCVLLDHYLMNKAQCQ

SEQ ID NO: 181181 - protein, 159 aa, Unknown
  Bacterial polypetide isolated from the Sargasso Sea
KKGSSLGAVIEVRVSNCPVGIGEPIYQKLDSELSKAIMSINAVKGIEFGTGFDLVNFDGTNGSDQINFKNKKINFNTNHAGGILGGISSGQDIIFKYIVKPTSSVLSEKNTITKNFKNTKIKTKGRHDPCVGIRAVPVGIAMTNFVIADLLLIHKSKLL

SEQ ID NO: 181182 - protein, 273 aa, Unknown
  Bacterial polypetide isolated from the Sargasso Sea
MSFNTFGKFFRFTTWGESHGPAIGCIIDGCPPLIQLKEQDIQKELDKRKPGQSKFTTQRKESDKVQILSGIFEGKTTGTPISLIIYNEDMRSKDYKNIKDKFRPGHADFTYFKKYGIRDYRGGGRSSARETAARVAAGAIAKKVLEKKLGKKFKISAAVTQLGILGCDTTKWNDKIIYKNPFFCPDKSMLKIWEKYLLNIRKAGSSCGAVIEVRANGIPAGLGAPIYSKLDSDIASAMMSINAVKGVNIGSGMNSAQLSGEENSDEISQNNKK

SEQ ID NO: 181183 - protein, 253 aa, Unknown
  Bacterial polypetide isolated from the Sargasso Sea
MSFNTFGKLFRFTTWGESHGPAIGCIIDGCPPLIHLKDQDIQRELDKRKPGQSKFTTQRKENDKVHILSGVFEGKTTGTPISLIIYNEDVRSKDYKNIKDKFRPGHADFTYYKKYGIRDYKGGGRSSARETAARVAAGAIAKKVLEKKLGKKFQISGAVTQLGILGCDTTKWSNKIINKNPFFCPDKSMLRIWEKYLLSIRKAGSSCGAIIEVRANGIPAGLGAPIYSKLDSDIASAMMSINAVKGVNIGSGM

SEQ ID NO: 181184 - protein, 193 aa, Unknown
  Bacterial polypetide isolated from the Sargasso Sea
SQQIDSNIVRCPDEQISAEMIERIKQLKSQGDSCGGVIECLVRNAPSGLGMPVFDKLEADLAKALMSLPATKGFEIGSGFSGTYLKGSEHNDAFIKSDDIRKLRTISNNSGGIQGGISNGENIEMKIAFKPTATIGKEQKTVNAEGKEVLMKAKGRHDPCVLPRAVPMVDAMVALVLADHLLLNQAQCGLMTN

SEQ ID NO: 181185 - protein, 281 aa, Unknown
  Bacterial polypetide isolated from the Sargasso Sea
RFHHGRNQDARPRAYEHLKDLYRPSHADYTYEAKYGFRNWMGGGRASARETIGRVAAGALAKKLLKQWNTTQTLAWVEQIHDLKANVDHSQITEQQIEQSIVRCPDTAASNAMEQRILEVRKKGDSVGGIIRAVSKNVPVGLGEPVFDKLTADLAKALMSLPATRGVEFGLGFQSVSLMGSEHNDEYVIEDGNVKTRSNRSAGIQGGISNGEEIDLRIAFKPTATINHEQKTVTRDGESTTLSAKGRHDPCVLPRAVPMVEAMINLVLADHYLRQQSSQLH

SEQ ID NO: 181186 - protein, 309 aa, Unknown
  Bacterial polypetide isolated from the Sargasso Sea
MGSSFGSLFRISTFGDSHGGGVGVIVDGCPPMLNLDLEAIQAELDRRKPGQSRITTPRKEDDRVEVLSGLLDGQTLGTPIALVVRNKDQRPGDYKEMQVAFRPSHADATYQAKYGIQARSGGGRASARETIGRVAAGAVAKQLLHQLHGTEVLAWVKRIHTLEASIDPAVPTLETVEANIVRCPDAAMADEMIERIEEIGRDGDSCGGVIECVVRRAPIGLGMPVFDKLEADLAKAVMSLPATKGFEIGSGFAGTLMRGSEHNDAFLPTADGALHTATNNSGGIQGGISNGEPIVLRVAFKPTATIRKN

SEQ ID NO: 181187 - protein, 270 aa, Unknown
  Bacterial polypetide isolated from the Sargasso Sea
MAGNTIGQIFTLTTFGESHGPALGAIVDGCPPGIEISVEDLQLDLDRRRPGQSKYTTQRREKDQIQILSGVFEGKTTGTSIGLLIQNEDQKSKDYEDIKNIFRPAHADFTYQKKYGLRDYRGGGRSSARETSMRVAAGAIAKKFLSKHAGISVYGYLSAIGELKLACKDREFINENPFFSGDPDSTDQIVSLIDSIRKQGDSIGAQVSVVAEGVPAGLGEPVFDKLDADLAGALMGINAVKAVEIGDGVSVVEQKGSEHRDEMTKAGFLS

SEQ ID NO: 181188 - protein, 190 aa, Unknown
  Bacterial polypetide isolated from the Sargasso Sea
MSGNSFGKSFVVTTFGESHGVALGCIVDGCPPGLELTAEDIQMDLNKRKPGSSKYTTQRKEDDIVEILSGVFEGKTTGTPIGLLIRNKDQKSKDYDDLKDVFRPSHADYTYTKKYGFRDHRGGGRSSARETTMRVAAGSIAKKYLKTVAGINIKGYLSQIGKMKVKQIDLSEVDNNPFFCPDPLLIKEIE

SEQ ID NO: 181189 - protein, 177 aa, Unknown
  Bacterial polypetide isolated from the Sargasso Sea
MSFNTFGKFFRFTTWGESHGPAIGCIIDGCPPLIQLKEQDIQKELNKRKPGQSKFTTQRKESDKVQILSGVFEGKTTGTPISLIIYNEDMKSKDYKNIKDKFRPGHADFTYFKKYGIRDYRGGGRSSARETAARVAAGAVAKKVLEKKLGKKFKISAAVTQLGILGCDTSKWDDKII

SEQ ID NO: 181190 - protein, 114 aa, Unknown
  Bacterial polypetide isolated from the Sargasso Sea
MASNTFGNILQFSTWGESHGVAIGGVVDGVPPLIPLVEEDIQYYLDKRKPGQSRFTTQRKEPDKIKILSGVFENKTTGTPISLLIQNEDQRSKDYGEIKDQFRPGHADFTYQKK

SEQ ID NO: 181191 - protein, 213 aa, Unknown
  Bacterial polypetide isolated from the Sargasso Sea
SCSNKLKVTSAVIQIGNEKINDKAWNNSFINKNPFFSPNKTIVKKWEELILFHRKNGSSIGAIIEVRVSNCPVGIGEPIYQKLDSEISKAIMSINAVKGIEFGSGFNLVNLDGTNASDQMDLDKKNISFDTNHAGGVLGGISSGQDIVFRYIVKPTSSVLTVKKTITKNLKKTKIRTIGRHDPCVGIRAVPVGIAMTNFVLADLYLINKSKSL

SEQ ID NO: 181192 - protein, 182 aa, Unknown
  Bacterial polypetide isolated from the Sargasso Sea
TTIGGIFQVVAFYSPVGLGNFSQWDRKLDGKIAQAMMSINAVKGVEIGNGFENTRKPGSEVQDVIVPDTKDRRNFKHITNHAGGLEGGVTNGEPIVVNVAIKPIATLAKPLPSVDINTGEIIEAQYNRSDVCQVPPACVIGEAMMSLILTESIIEKFGGDHIDELVMNFSNYIKSHNEFGKK

SEQ ID NO: 181193 - protein, 192 aa, Unknown
  Bacterial polypetide isolated from the Sargasso Sea
MSGNSIGQVFKLTTFGESHGPFIGGVIDGCPSGLKVDFDAIQHDLDRRKPGQSKVTTARKEADFVEFVSGIYDGHTTGTPIGFLIKNKDAKSKDYGDLENVFRPSHADYTYHQKYGNRDHRGGGRSSARETANRVVAGAIAKQVLANYKIEVLAFVCAVGDIACNIDKELSNESLRAAVESNIVRCPDQETA

SEQ ID NO: 181194 - protein, 204 aa, Unknown
  Bacterial polypetide isolated from the Sargasso Sea
IGAVTQLGLMSCDKDNWKNSEIRKNPFFCPDKKSVKSWERYLLAVRKSGSSCGAIIELRASGVPVGLGAPIYSKLDSDITAALMSINAVKGVNIGSGMNSAFLSGEENDEIRIRSGKVKFKTNNAGGILGGISSGQNIVASFAVKPTSSILTSRETVDKKGKNTKISVRGRHDPCVGIRAVPIGEAMLLCVLLDHYLMNRAQCG

SEQ ID NO: 181195 - protein, 198 aa, Unknown
  Bacterial polypetide isolated from the Sargasso Sea
MSFNTFGKIFRFTTWGESHGPAIGCVVDGCPPNIPLSERDIQKDMNRRRPGKSKFTSQRKESDKVEILSGVFQGKTTGTPISMIIYNQDAKSRDYESIKNKFRPGHADYTYLKKYGIRDFRGGGRQSARETASRVAAGAIAKTVLNKLIGKKFKIVGGVVQLGLLGCNKNNWNEREIRNNPFFCPDKKAVKLGKNIFC

SEQ ID NO: 181196 - protein, 141 aa, Unknown
  Bacterial polypetide isolated from the Sargasso Sea
GLGAPIYSKLDMDIASAMMSINAVKGVNIGAGMNSAQLMGEQNSDEISNKGKKIKFSSNNAGGILGGISTGQEIVVSFAVKPTSSILLSRKTIDRFGKNTSISVKGRHDPCVGIRAVPIGEAMLNCVLLDHYLLNKAQCGN

SEQ ID NO: 181197 - protein, 155 aa, Unknown
  Bacterial polypetide isolated from the Sargasso Sea
MSFNTFGKLFRFTTWGESHGPAIGCIVDGCPPNINLKEQDIQIELDKRKPGQSKFTTQRKEDDKVQILSGIFEGKTTGTPISLIIYNKDMRSKDYSNIKDKFRPGHADFTYFKKYGIRDYRGGGRSSARETAARVAAGAIAKVVLQKKLGKKFKV

SEQ ID NO: 181198 - protein, 66 aa, Unknown
  Bacterial polypetide isolated from the Sargasso Sea
IIYNQDQRSKDYGDIKSKFRPGHADYTYWKKYGIRDYRGGGRSSARETAMRVAAGAIARKIINNKI

SEQ ID NO: 181199 - protein, 106 aa, Unknown
  Bacterial polypetide isolated from the Sargasso Sea
SEHNDAFIKSDDMSKLRTTSNNSGGIQGGISNGENIEMKIAFKPTATIGKEQKTVNAEGKEVLMKAKGRHDPCVLPRAVPMVDAMVALVLADHLLLNHAQCDLINK

SEQ ID NO: 181200 - protein, 84 aa, Unknown
  Bacterial polypetide isolated from the Sargasso Sea
SNNAGGILGGISTGQEIKISFAVKPTSSILSSRKTIDKFGKNTTISVKGRHDPCVGIRAVPIGEAMMHCVILDHYLMNTAQNKI

SEQ ID NO: 181201 - protein, 214 aa, Unknown
  Bacterial polypetide isolated from the Sargasso Sea
KKLGKKFKISGAVTQLGILGCDTNKWDDKIIYKNPFFCPDKSMLKIWEKYLLSIRKAGSSCGAIIEIRANGIPAGLGAPIYSKLDSDIASAMMSINAVKGVNIGSGMNSAQLSGEENSDEISKSKNKLKFNSNNAGGILGGISSGQQIVVSFAVKPTSSILNSRKTITKFGKNTNISVKGRHDPCVGIRAVPVGEAMLSCVLLDHYLLNQAQCG

SEQ ID NO: 181202 - protein, 244 aa, Unknown
  Bacterial polypetide isolated from the Sargasso Sea
PGRPAAGWPDPLRRARGRHTCAGLCPAGRCCVSFNSFGRLFRFTTWGESHGPALGAVVDGCPPGIALSEEDIQPWLDKRRPGTSRFTTQRREPDQVRILSGVFEGRTTGTPISLMIENVDQRSKDYGNVALAYRPGHADYAYDAKYGFRDYRGGGRSSARETAARVAAGAVARAVIPQVKIRAWVESIGGDRIDYEAFDDAQIDANPFFCPDAAAAERWEAIVDGARKSGSSVGAVVACEATGV

SEQ ID NO: 181203 - protein, 264 aa, Unknown
  Bacterial polypetide isolated from the Sargasso Sea
TVLPLGCIIDGSPPNIGINEKEIQIELNKRKPGQSKFTTQRKEDDKVEILSGVFQGKTTGTPISLIIYNKDAKSRDYETIKNKFRPGHADFTYLKKYGIRDYRGGGRQSARETASRVAAGAIAKKILQKKIGKKFKVIGAVTQLGILGCDTKKWEDKVITKNPFFCPDKTIIKLWEKYLLSIRKSGSSCGAIIELRARGVPVGLGAPIYSKLDMDIAAAMMSINAVKGVNVGSGMNSALLTGEQNSDEISQKGKKIKFNSNNAG

SEQ ID NO: 181204 - protein, 228 aa, Unknown
  Bacterial polypetide isolated from the Sargasso Sea
SSRGCSSKKGFRKKKFGKKYKVTGGVTQLGILGCNLKNWNDNFISKNPFFCPDKSIVKIWEKYLLSIRKAGSSCGAIIEIRAKGVPLGLGAPIYSKLDMDLAAAMMSINAVKGVNIGSGMNSAQLTGEQNSDEISQKGKKTSFKSNNAGGILGGISTGQNIVLSFAVKPTSSIINSRKTIDKFGNNTSISVKGRHDPCVGIRAVPIGEAMMHCVILDHYLMHNAQCKS

SEQ ID NO: 181205 - protein, 146 aa, Unknown
  Bacterial polypetide isolated from the Sargasso Sea
MSGNSFGNSFIVTTFGESHGVALGCIVDGCPPGLELCEEDIQKELDKRKPGSSKYTTQRKEDDEVEILSGIFEGKTTGTPIGLLIRNKDQKSKDYDQLKDVFRPSHADYVYSKKYGIRDHRGGGRSSARETAMRVAAGAIAKKYLS

SEQ ID NO: 181206 - protein, 213 aa, Unknown
  Bacterial polypetide isolated from the Sargasso Sea
MSFNTFGKIFRFTTWGESHGPAIGCVVDGCPPLIQLKEQDIQKELDKRKPGQSKFTTQRKEADKVQIVSGVFEGKTTGTPISLIIYNEDARSKDYKDIKDKFRPGHADFTYFKKYGIRDYRGGGRSSARETASRVAAGAIAKKVLENKLGKRFKISGAVTQLGILGCDTTKWDDKIINKNPFFCPDRSMLKNMGKIFIKCKKSRIFLWSYYLK

SEQ ID NO: 181207 - protein, 139 aa, Unknown
  Bacterial polypetide isolated from the Sargasso Sea
GAPIYSKLDMDLASAMMSINAVKGVNIGSGMNSAQLTGEQNSDEIFQKRKKISFESNNAGGILGGISSGQDIIVSFAVKPTSSILTSRKTIDKFGKNTSISVKGRHDPCVGIRAVPIGEAMMYCVLLDHYMMHFAQCKS

SEQ ID NO: 181208 - protein, 240 aa, Unknown
  Bacterial polypetide isolated from the Sargasso Sea
KTTGTPISMIIYNKDMRSRDYETIKNKFRPGHADYTYFKKYGIRDYRGGGRQSARETASRVAAGAIAKKVLENKLGKKYKVIGAVTQLGILGCDKENWNDKLINKNPLFCPDKSILKLWKKYLLGIRKSGSSCGAIIEVRARGIPAGLGAPIYSKLDMDLASAMMSINAVKGVNIGSGMNSAFLSGEENSDEIVQKGKNPVFKSNNAGGILGGISSGQEIIVSFAVKPTSSIIKIKKNNR

SEQ ID NO: 181209 - protein, 194 aa, Unknown
  Bacterial polypetide isolated from the Sargasso Sea
MTSNTFGNLFTLTTFGESHGECIGGIIDGCPAGKKIDIKSVQTDLDRRKPGQSKIVTQRKEDDQLEILSGIFEGKTTGTPIGFIIKNKDHKSKDYNHIKESFRPSHADYVYEKKYGNRDYRGGGRSSARETACRVVAGSIAKQILDNVKINAYVSSVGNISVNKPHSELDFDNTEKNNVRCPDLDVAKEMEELI

SEQ ID NO: 181210 - protein, 257 aa, Unknown
  Bacterial polypetide isolated from the Sargasso Sea
NKFRPGHADYTYLLKYKTRDYRGGGRQSARETAARVAAGAIAKIVLNKLIGKKFKVIGGVTQLGILGCNKSNWNEKFIRKNPFFCPDKKSVKLWEKYLLSIRKAGSSCGAIIELRASGVPAGLGAPIYSKLDSDLAGALMSINAVKGVNIGAGMSSAFLSGEENSDEIRNIKGKTKFKSNNAGGILGGISSGQEIIASFAVKPTSSILSKRSTIDKKGKNTIISVKGRHDPCVGIRAVPIGEAMMSCVILDHFLLNR

SEQ ID NO: 181211 - protein, 238 aa, Unknown
  Bacterial polypetide isolated from the Sargasso Sea
MSFNTFGKIFRFTTWGESHGPAIGCIVDGCPPNIGLSEKDIQKDMDRRRPGNSKFVSQRKESDKVEILSGVFQGKTTGTPISLIIHNEDKRSRDYESIKDKFRPGHADFTYFKKYGIRDFRGGGRQSARETASRVAAGSIAKIVLKKIIGKKFNIVGGVIQLGLMGCDRNNWNNKEINKNPFFCPDKKSVKLWEKYLMAVRKSGSSCGAIIELRANGVPAGLGAPIYSKLDTDIAAAL

SEQ ID NO: 181212 - protein, 247 aa, Unknown
  Bacterial polypetide isolated from the Sargasso Sea
MSSSFGKIFRVSTFGESHGGAVGVILDGCPPKLKLDTKLIQNELDRRRPGQSDITTPRNEEDKIEILSGLKEGFTLGTPIAMIVRNKDQRPRDYNNLEQIFRPSHADGTYHLKYGIQAGSGGGRASARETIGRVAAGAVAKQLLKNFCNTEILSWVKRIHDIDSDINKEKISFTKIDSNIVRCPDEKVSAEMIKRIKELKLQGDSCGGVIECLVRNVPSGLGMPVFDKLEADLAKALMSLPATKGLK

SEQ ID NO: 181213 - protein, 235 aa, Unknown
  Bacterial polypetide isolated from the Sargasso Sea
MSFNTFGKIFRFTTWGESHGPAIGCVIDGCPPNIPISERDIQKDMDRRRPGQSKFTTQRKESDKVIILSGIFQGKTTGTPISIIIYNEDKRSRDYESIKNKFRPGHADFTYFKKYGIRDFRGGGRQSARETACRVAAGAVAKIVLKKIIGSKFNIIGAVTQLGLMSCDKDNWKNSEIRKNPFFCPDKKSVKSWEEYLLAVRKSGSSCGAIIELRASGIPVGLGAPIYSKLDSDIS

SEQ ID NO: 181214 - protein, 263 aa, Unknown
  Bacterial polypetide isolated from the Sargasso Sea
IKNKFRPGHADYTYFKKYGIRDFRGGGRQSARETACRVAAGAVAKVVLKKMIGSKFNVVGAVTQLGLMSCDKTNWKDSEIRKNPFFCPDKKSVKLWEKYLLAVRKAGSSCGAIIELRATGVPVGLGAPIYSKLDTDIAAALMSINAVKGVNIGAGMNAAFLSGEENSDEMSKSSGSVKFKSNQAGGILGGISSGQNIIASFAVKPTSSILTSRSTIDKKGKNTKISVKGRHDPCVGIRAVPIGEAMINCVLLDHYLMNKAQCG

SEQ ID NO: 181215 - protein, 245 aa, Unknown
  Bacterial polypetide isolated from the Sargasso Sea
MEKYGIRDYRGGGRSSARETAMRVAAGAVARKVISKKIKNKVFITGALVQIGNYKINYNNWNDNFILKNNFWSPDKKIINIWEKEIRNARKNGSSLGAIIEIRVKGLPAGLGEPVYDKIDSDIAKALMSINAVKGVEIGNGFNSVYESGISNVDEMRIKNKKPIFLSNNNGGVLGGITTGQELICRFVVKPTSSILSTKKTINTKLKETTISTKGRHDPCVGIRAVPVGEAMIATTIADHCLRFL

SEQ ID NO: 181216 - protein, 96 aa, Unknown
  Bacterial polypetide isolated from the Sargasso Sea
DEMRSDKGKVKFKSNNAGGILGGISSGQEIVASFAVKPTSSIINSRETIDKKGKNTKISVRGRHDPCVGIRAVPIGEAMLSCILLDHFLMNRAQCG

SEQ ID NO: 181217 - protein, 143 aa, Unknown
  Bacterial polypetide isolated from the Sargasso Sea
MSFNTFGKIFRFTTWGESHGPAIGCVVDGCPPNIKITEKDIQIELNKRKPGQSKFTTQRKEDDRVNILSGVFEGKTTGTPISMIIYNKDMKSRDYETIKNKFRPGHADYTYFKKYGIRDFRGGGRQSARETASRVAAGAIAKK

SEQ ID NO: 181218 - protein, 199 aa, Unknown
  Bacterial polypetide isolated from the Sargasso Sea
MSSNSLGKIFNFTTWGESHGEAIGCVVDGVPSKIALCEKDIQKYLDKRRPGKSKFTTQRKEKDKVEILSGIFDGYTTGHPISLIIRNTDQRSKDYSDIKNIFRPGHADYTYWAKYGIRDYRGGGRSSARETAMRVAAGAIARKVISSKIKNKIEIIGALVQVGDSKIDYNNWNNNYIKKNDYFSPDKKIISEWESLINK

SEQ ID NO: 181219 - protein, 150 aa, Unknown
  Bacterial polypetide isolated from the Sargasso Sea
MSFNTFGKIFRFTTWGESHGPAIGCVVDGCPPNIKISEKDIQIELNKRKPGQSKFTTQRKEDDKVNILSGVFEGKTTGTPISMIIYNKDMRSRDYETIKNKFRPGHADYTYFKKYGIRDYRGGGRQSARETASRVAAGAIAKKVLQNKIG

SEQ ID NO: 181220 - protein, 227 aa, Unknown
  Bacterial polypetide isolated from the Sargasso Sea
MTSNSIGKNFSFTTWGESHGKAIGCVIDGVPSNIKLTEKDIQPYLDKRKPGQSKFTTQRKEKDIVEILSGTFEEKTTGHPISLIIYNQDHRSKDYSSIKNKFRPGHADYTYWKKYGIRDYRGGGRSSARETAMRVAAGAVARKIIQKKLSNKVKILGAVVQIGRHKINYKNWNEKFISKNSFWSPDKDIISIWEKDILNARKNGSSLGAIIEIRVRGLPAGLGEPNI

SEQ ID NO: 181221 - protein, 134 aa, Unknown
  Bacterial polypetide isolated from the Sargasso Sea
MSHNSFGNLLKFTTWGESHGDAIGCVVDGFPAGIPIDTKYIQTRLDLRKPGQSKFTTQRKEKDEVNLLSGVFNGKSTGAPISMIIYNSDQRSKDYSEIKNKFRPGHADYTYFMKYKNYDYRGGGRSSARETAVR

SEQ ID NO: 181222 - protein, 232 aa, Unknown
  Bacterial polypetide isolated from the Sargasso Sea
RTASRVAAGAVARKVVGHILKKDILIQGAVTQVGKLAINQRNFNWNDVKKNSFFCPDKKIVKVWEEYLDETRKKGSSLGAKLLINARNVPAGLGEPVYGKLDADLAGAMMSINAVKGVEIGAGNEAVELSGDENSDEIRANKNKKIIFSSNNAGGILGGISSGQDLNLSITIKPTSSILKAKKTINNKFQNTSISTKGRHDPCVGLRAVPIAEAMMACVLADHILRNRAQCG

SEQ ID NO: 181223 - protein, 144 aa, Unknown
  Bacterial polypetide isolated from the Sargasso Sea
MPVFDKLEADLAKALMSLPATKAFEVGSGFGGTYLKGSEHNDPFLPSDSDQLKTATNNSGGIQGGISNGEDIVLRVGFKPTATIRKSQKTIDEDGNAITLQATGRHDPCVLPRAVPMVEAMVAIVLADHFLRHKGQCTDYCSNN

SEQ ID NO: 181224 - protein, 140 aa, Unknown
  Bacterial polypetide isolated from the Sargasso Sea
FEKLDANLAKAIMTINAVKSVSIGNADDLLSLKGSEARDEITESGFTSNNSGGILGGISNGDDISLSFIIKPTSSIKTKGKTVNKEGNEVDIEVTGRHDPCVGIRAVPIAEAMVSLVLVDHLLINKAQCADVEQNLPFSE

SEQ ID NO: 181225 - protein, 260 aa, Unknown
  Bacterial polypetide isolated from the Sargasso Sea
YNKDQKSKDYSNIKDVFRPNHADITYQAKYGHRDYRGGGRASARETANWVAAGAIAKKILKNEGVSVNGFVSEIGKVKADSINHKNINNKYFFSDESKLSELDSMFKDLIDEGNSVGAKLGVIVENCPVGLGDPVFEKLDANLAKAIMTINAVKSVSIGNADDLLSLKGSDARDEITASGFTSNNSGGILGGISNGDDISLSFIIKPTSSIKTKGKTVNKEGNEVDIEVTGRHDPCVGIRAVPIAEAMVSLVLVDYLLIN

SEQ ID NO: 181226 - protein, 260 aa, Unknown
  Bacterial polypetide isolated from the Sargasso Sea
GRPQAYEHLKDLYRPSHADYTYEAKYGFRNWMGGGRASARETIGRVAAGALAKKLLKQCNGTETLAWVEQIHDLKANVDHSQVTEQQIEQSIVRCPDTAASNAMEQRILEVRKKGDSVGGIIRAVSKNVPVGLGEPVFDKLTADLAKALMSLPATRGVEFGLGFQSVSLMGSEHNDEYVIEDGNVKTRSNRSAGIQGGISNGEEIDLRIAFKPTATINHEQKTVTRDGESTTLSAKGRHDPCVLPRAVPMVEAMINLVFG

SEQ ID NO: 181227 - protein, 283 aa, Unknown
  Bacterial polypetide isolated from the Sargasso Sea
MSFNTFGKLFRFTTWGESHGPAIGCVVDGCPPRIKISEKDIQKELNKRKPGQSKFTTQRKEDDKVEILSGVFNGETTGTPILMIIYNKDMKSRDYETIKNKFRPGHADLTYFKKYGIRDFRGGGRQSARETAARVAAGAIAKKVLEKKIGKKYYVKGAVTQLGILGCDVSAWNNKFIEKNPFFCPDKKVLKLWEKYLLAIRKSGSSCGAVIELRANGVPSGLGAPIYSKLDMDLASAMMSINAVKGVNIGTGMDVAQLTGEQNSDEIRQKGNKTVFKSNNAGG

SEQ ID NO: 181228 - protein, 168 aa, Unknown
  Bacterial polypetide isolated from the Sargasso Sea
MSFNTFGKIFRFTTWGESHGPAIGCIIDGCPPNIEIKSEDIQKELNKRRPGQSKFVTQRKEKDLVHIMSGVFEGKTTGTPISLIIYNKDQKSRDYETIKSKFRPGHADYTYFMKYGIRDYKGGGRQSARETAARVAAGAVAKKVLEKKIGKKYNVIGAVTQVGILGSN

SEQ ID NO: 181229 - protein, 195 aa, Unknown
  Bacterial polypetide isolated from the Sargasso Sea
PQAVTLDAIESNIVRCPDAPTAAQMVERIEAMGRDGDSCGGVIECVVRNPAPGLGMPVFDKLEADLAKAVMSLPATKGFEIGSGFSGTLLKGSEHNDAFVPTDDGRLQTATNNSGGIQGGISNGEPIVIRVAFKPTATIRKEQQTIDSDGKATNLAGKGRHDPCVLPRAVPMVEAMVALVLADHLLRQQGQCSLW

SEQ ID NO: 181230 - protein, 210 aa, Unknown
  Bacterial polypetide isolated from the Sargasso Sea
KKFKITGAVTQLGILGCDTNKWDDKIISKNPFFCPDKSMLKIWEKYLLSIRKAGSSCGAIIEVRANGIPTGLGAPIYSKLDSDIASAMMSINAVKGVNIGSGMNSAQLSGEENSDEISQNRKKTKFKSNNAGGILGGISSGQEIIVSFAVKPTSSILKSRKTINKFGKNTSISVKGRHDPCVGIRAVPVGEAMLSCVLLDHYLLHKAQCS

SEQ ID NO: 181231 - protein, 82 aa, Unknown
  Bacterial polypetide isolated from the Sargasso Sea
GGILGGISSGQPIVAKFIVKPTSSILTEKNSINLQNEPIKIKTKGRHDPCVGIRAVPVAEAMMAITILDQLLEHESQIGKIE

SEQ ID NO: 181232 - protein, 270 aa, Unknown
  Bacterial polypetide isolated from the Sargasso Sea
GTPISLMIENKDQRSKDYSEVAKAYRPGHADYAYDAKYGFRDYRGGGRSSARETASRVAAGAVARLVIPEVDIFAYVSEIGGDAIDYGNFDAAQISQNPFFCPDSEAAVRWEALVDGARKDGSSLGAVVECVASGVPAGWGAPLYAKLDSELASAMMSINAVKGVEIGDGFAAARLRGEQNADPMRPGQDGPVFLANHAGGIAGGISTGQPVKVRIAFKPTSSILIPVETVTREGEASDIITKGRHDPCVGIRGVPVVEAMMALVLADQK

SEQ ID NO: 181233 - protein, 113 aa, Unknown
  Bacterial polypetide isolated from the Sargasso Sea
MGDSFGHLFRITTWGESHGGGVGVVIDGCPAGLSLTEEEIQIELDRRKPGQSRITTQRKESDTARILSGLFENTTLGTAISIMVKNQDARSNAYDDMKDLFRPSHADYTYEQK

SEQ ID NO: 181234 - protein, 308 aa, Unknown
  Bacterial polypetide isolated from the Sargasso Sea
SKFTTQRKESDKITILSGVFEGKTTGTPISIIIYNEDKRSRDYETIKNKFRPGHADYTYFKKYGIRDYRGGGRQSARETACRVAAGAVAKIILKNILGKKFNVIGAVTQLGLMSCDKQNWKDAEIRKNSFFCPDKKSVKLWEKYLLAVRKAGSSCGAVIEIRASGVPVGLGAPIYSKLDTDIAAALMSINAVKGVNIGSGMNAAFLSGEENSDEIIRSSGKVKFESNHAGGILGGISSGQKIIATFGVKPTSSILTTRRTIDKKGKNTKISVKGRHDPCVGIRAVPIGESMMSCVILDHLLIHRAQCG

SEQ ID NO: 181235 - protein, 93 aa, Unknown
  Bacterial polypetide isolated from the Sargasso Sea
SQNNKKMKFSSNNAGGILGGISSGQEIVVSFAVKPTSSILKSRKTINKFGKNTTISVSGRHDPCVGIRAVPVGEAMLSCVLLDHYLMNKAQCG

SEQ ID NO: 181236 - protein, 129 aa, Unknown
  Bacterial polypetide isolated from the Sargasso Sea
MSFNTFGKFFRFTTWGESHGPAIGCIIDGCPPLIQLKEQDIQRELDKRKPGQSKFTTQRKESDKVEILSGVFEGKTTGTPISLIIYNQDVRSKDYNDIKDKFRPGHADFTYFKKYGIRDYRGGGRSSAK

SEQ ID NO: 181237 - protein, 303 aa, Unknown
  Bacterial polypetide isolated from the Sargasso Sea
RKEFDKVEILSGVFGGKTLGTPISMIIYNKDAKSRDYETIKNKFRPGHADYTYFLKYGIRDYRGGGRQSARETASRVAAGAIARVVLSKLIGKKFKVIGAVIQLGLLGCNKNNWNEKYIRKNPFFCPDKKSIKLWEKYLLAVRKAGSSCGAIIELRASGIPAGLGAPIYSKLDSDLAGALMSINAVKGVNIGAGMSAAFLSGEENSDEIRRIKGSAKFISNNAGGILGGISSGQEIIASFAVKPTSSILSSRKTIDKKGKNTNISVHGRHDPCVGIRAVPIGEAHDVLRAIRSLFIKSCSVQV

SEQ ID NO: 181238 - protein, 234 aa, Unknown
  Bacterial polypetide isolated from the Sargasso Sea
QKELNKRRPGQSRFTSQRKETDEVSIMSGVFEGVTTGTPINLVVQNVDQKSKDYTAIKDKFRPGHADFTYYQKYGIRDYRGGGRSSARETVMRVAAGAIARKYLFEKMGIEIFGFLGQLGPIHLEMKDRSFIETNPFFCGDPDKISELESYMDQLRKEGDSIGARINLIATNVPVGLGEPVFDKLEADIAHGLMSINAVKGVEIGAGFSVVNQKGSEHRDEIDTDGFKQNNSGG

SEQ ID NO: 181239 - protein, 170 aa, Unknown
  Bacterial polypetide isolated from the Sargasso Sea
MSFNTFGKIFRFTTWGESHGPAIGCVVDGCPPNVSINEADIQKELNKRKPGQSKFTTQRKEDDKVNILSGVFDGKTTGTPISMIIYNKDMRSRDYETIKNKFRPGHADYTYFKKYGIRDYRGGGRQSARETASRVAAGAIAKKVLEKKIGKKYNVKGAVTQLGILGCDIK

SEQ ID NO: 181240 - protein, 103 aa, Unknown
  Bacterial polypetide isolated from the Sargasso Sea
IWVKKNSDEISQNNKKMKFYSNNAGGILGGISSGQEIVISFAVKPTSSILKSRKTINKFGKNTTISVKGRHDPCVGIRAVPVGEAMLSCVLLDHYLMNKAQCS

SEQ ID NO: 181241 - protein, 302 aa, Unknown
  Bacterial polypetide isolated from the Sargasso Sea
PAIGCIVDGCPPNINLKEQDIQMELNKRKPGQSKFTTQRKEDDKVQILSGVFEGKTTGAPISLIIYNKDMRSKDYSNIKDKFRPGHADYTYFKKYGIRDYRGGGRSSARETAARVAAGAIAKLVLQKKLGKKFKVIGAVTQLGVLGCDISQWSDKVISKNPFFCPDKSIIKLWEKYLLGVRKSGSSCGAIIEIRARGIPAGLGAPIYSKLDTDIASALMSINAVKGVNIGAGMNSAQLSGEQNSDEIFQKGKKLKFNSNNAGGILGGISSGQEIIASFAVKPTSSILTTRKTINKFGKILLY

SEQ ID NO: 181242 - protein, 250 aa, Unknown
  Bacterial polypetide isolated from the Sargasso Sea
MLDLRRPGQSLVSTQRKEGDIVEILSGVFRGYTTGAPITTIIWNKDHDSKSYDKLRTAMRPGHSDYPAFVKYKKFNDHRGGGRFSGRLTATHVMGGAIARKLLKVTLGVETNAYTCKIGKIGMKNQATKQLLKSIYTNEVRCPEKTIAGKMKKSILDARKKGDSLGGIVESVTNNIPIGLGEPIFSSLESELSKAIYAIPAVKGVEFGSGFSGSEKHGSQNNDSYTFRDGKVVTKTNNAGGILGGISNGN

SEQ ID NO: 181243 - protein, 200 aa, Unknown
  Bacterial polypetide isolated from the Sargasso Sea
LGVLGCDIKKWNDKNIRKNPFFCPDKSIVKLWEKYLLSIRKSGSSCGAVIEIRARGVPVGLGAPIYSKLDMDIASAMMSINAVKGVNIGAGMNSAQLMGEQNSDEISNKGKKIKFFSNNAGGILGGISTGQEIIVSFAVKPTSSILVNRKTIDKFGKNTSISVKGRHDPCVGIRAVPIGEAMLNCVLLDHYLLNKAQCGN

SEQ ID NO: 181244 - protein, 289 aa, Unknown
  Bacterial polypetide isolated from the Sargasso Sea
MAGNSIGQLFKVSTFGESHGVALGGVVDGTPAGLELTEADLQIDLDRRKPGQSRYTTQRRESDQIKILAGVFEGKTTGTSIGLLIENTDQRSQDYGKIKDVFRPGHGDYSYWHKYGLRDYRGGGRSSARETAIRVAAGAIAKKYLKQFHGIEVKACLSQLGPIKAESYDWDEVENNLFFFPDVSKLEALDEYMRDLKKQGDSVGAKVKVVASNVPVGLGEPVFDRLDAEIAHSLMSINAVKGVEIGDGFDVVEQKGSEHRDELTPEGFTSKHAGGVLAGISTGQDIVAS

SEQ ID NO: 181245 - protein, 106 aa, Unknown
  Bacterial polypetide isolated from the Sargasso Sea
MSFNTFGKIFRFTTWGESHGPAIGCVIDGCPPNIPISEKDIQIDMDRRRPGQSKFTTQRKESDKVNILSGVFEGKTTGTPISIIIYNEDKRSRDYESIKDKFRPGH

SEQ ID NO: 181246 - protein, 277 aa, Unknown
  Bacterial polypetide isolated from the Sargasso Sea
MSGNTFGKIFKITTFGESHGTAMGCILDGCPPQIDLKKEDIQYELDRRKPGQSDVTTQRKEDDAVEILSGVFEGKTLGTPIGMIIYNKDQKSKDYSNIKDVFRPNHADITYQAKYGHRDYRGGGRASARETANWVAAGAIAKKILKNEGVSVNGFVSEIGKVKADSINNKNINNKYFFSDESKLSELDSMFKDLIEEGNSVGAKLGVIVKNCPVGLGDPVFEKLDANLAKAIMTINAVKSVSIGNADDLLSLKGSEARDEITESGFTSNNSGGILGG

SEQ ID NO: 181247 - protein, 84 aa, Unknown
  Bacterial polypetide isolated from the Sargasso Sea
MSFNTFGKLFRFSTWGESHGPAIGCIIDGCPPNIKLNEKDIQIELDKRKPGQSKFTTQRKEADKVQILSGVFEGKTTGTPISLI

SEQ ID NO: 181248 - protein, 291 aa, Unknown
  Bacterial polypetide isolated from the Sargasso Sea
CNGKTFGSLFKISTWGESHGGGVGVVIDGCPSLLPLTEADIQRDLDRRRPGQSRITTQRDESDKAEILSGVFEGKTIGAPIAILVRNEDAKPAAYEHLKDTYRPSHADFTYEAKYGIRNWQGGGRSSARETIGRVAAGAVARALLSETTQIEVIAWVSQIHNIKANVETETVNIDDIEAEITRCPDHNASEAMTAAITDARKNGDSLGGIVTCLVRGVPPGLGVPVFDRIEADLAKAVLSLPASKGFDIGSGFSAVEMTGSEHNDAFEPGASSPVTTSNHSGGVQGGITNG

SEQ ID NO: 181249 - protein, 320 aa, Unknown
  Bacterial polypetide isolated from the Sargasso Sea
KITTFGESHGTAMGCILDGCPPQLELTKEDIQHELDKRKPGQSDVTTQRKEDDAVEILSGVFEGKTLGTPIGMIIYNKDQKSKDYSNIKDVFRPNHADITYQAKYGHRDYRGGGRASARETVNWVAAGAIAKKILEKEGVSVNGFVSEIGQVKADLINHIDINNKYFFCDESKLSDLDSMFNDLIEEGNSVGAKLGVVVENCPVGLGDPVFEKLDANLAKAIMTINAVKSVSIGNADDLLNLKGSEARDEMTSSGYASNNSGGILGGISNGDDISLSFIIKPTSSIKSKGKTVNKDGEEVDIKVTGRHDPCVGIRAVPMP

SEQ ID NO: 181250 - protein, 193 aa, Unknown
  Bacterial polypetide isolated from the Sargasso Sea
MSGNAFGKIFKIMTFGESHGTAMGCILDGCPPEIEISEEDIQLELDRRKPGQSDVTTQRQEDDAVQILSGVFEGKTLGTPIGMIIYNKDQQSKDYSNIKDVFRPNHADITYQAKYGHRDYRGGGRASARETANWVAAGAIAKKILKKEGVEVNGFVSAIGKVRAESINYKDIDNKYFFCDESKLTDLDSMFDN

SEQ ID NO: 181251 - protein, 241 aa, Unknown
  Bacterial polypetide isolated from the Sargasso Sea
YETIKNKFRPGHADYTYFKKYGIRDYRGGGRQSARETAARVAAGAIAKVVLKNKIGKKYQAVGAVTQLGILGCDLKKWKDKTISSNPFFCPDKTVVKLWEKYLLGIRKAGSSCGAIIEVRARGVPLGLGAPIYSKLDMDLAAAMMSINAVKGVNIGSGMNSAMLTGEENSDEILKKKGKTSFKTNNAGGILGGISTGQEINVSFAVKPTSSILSSRKTIDRFGKNTTISVKGRHDPCVELE

SEQ ID NO: 181252 - protein, 69 aa, Unknown
  Bacterial polypetide isolated from the Sargasso Sea
FDSNNGGGILGGISYGQEITVSFDVKPTSSILTSRKTIDRFGKNTSISVKGRHDPCVGIRAVPIGEAMM

SEQ ID NO: 181253 - protein, 130 aa, Unknown
  Bacterial polypetide isolated from the Sargasso Sea
MSFNTFGKIFRFTTWGESHGPAIGCVVDGCPPNISIKEADIQRDLNRRKPGQSKFTTQRKEDDKVNILSGVFEGKTTGTPISMIIYNKDMRSRDYETIKNKFRPGHADYTYFKKYGIRDYRGGGRQSARE

SEQ ID NO: 181254 - protein, 84 aa, Unknown
  Bacterial polypetide isolated from the Sargasso Sea
NPEFLSNNNGGILGGISTGQEIIVRFCVKPTSSINTKRKSINNKFKEVEIATKGRHDPCVGIRAVPVGEAMMATTLADHSLRYL

SEQ ID NO: 181255 - protein, 259 aa, Unknown
  Bacterial polypetide isolated from the Sargasso Sea
DWVMLTIHILKKYGIRDYRGGGRQSARETASRVAAGAIAKKVLQNKLGTKYKVVGAVTQIGILGCDTSKWDEKFISRNPFFCPDKSIIKLWEKYLLGIRKSGSSCGAIIQVRAKGVPIGLGAPIYSKLDMDLAAAMMSINAVKGVNIGSGMNSAQLTGEQNSDEIIQKGKKTNFKSNNAGGILGGISSGQDIIVSFAVKPTSSILSSRKTIDKFGKNTSISVKGRHDPCVGIRAVPIGEAMMHCVILDHYLMNVAQCKI

SEQ ID NO: 181256 - protein, 141 aa, Unknown
  Bacterial polypetide isolated from the Sargasso Sea
VPSGLGNPVFDKVDALIAYAMMSINAVKGVEIGSGFDVVNQKGSESRDEISSKGFLSNNAGGTLGGISSGQDIIVKMALKPTSSILIPGSTVTTDNKDTTIVTKGRHDPCVGIRATPIAEAMLALVLCDLYLRDKAQNSNK

SEQ ID NO: 181257 - protein, 248 aa, Unknown
  Bacterial polypetide isolated from the Sargasso Sea
RVLGGGRASARETIGRVAAGAIAKQLLKNFCHTEILSWVKRIHDIDSDINKEKISLNKIDSNIVRCPDEKVSEKMIERIKQLKREGDSCGGVIECLVRNVPSGLGMPVFDKLEADLAKALMSLPATKGFEIGSGFSGTYLKGSEHNDAYIKSDDIRKLRTISNNSGGIQGGISNGENIEMKIAFKPTATIGKEQKTVNAEGKEVLMKAKGRHDPCVLPRAVPMVDAMVALVLADHLLLNQAQCGLINN

SEQ ID NO: 181258 - protein, 203 aa, Unknown
  Bacterial polypetide isolated from the Sargasso Sea
MGSSFGKLFNISTFGESHGGGVGVIIDGCPPRLELDINAIQNDLNRRRPGQSKITTPRNESDEVEILSGLSGNKTLGTPIAMVVRNKDHRPKDYSEIKKTFRPSHADATYQKKYGIQASSGGGRASARETIGRVAAGSVAKQLLTQSSNTEILAWVKRIHDIDAEIHPSEVTSDEIEKNIVRCPNQSAADLMIQRVETFGKER

SEQ ID NO: 181259 - protein, 276 aa, Unknown
  Bacterial polypetide isolated from the Sargasso Sea
IYNEDMRSKDYQNIKNKFRPGHADFTYFKKYGIRDYRGGGRSSARETAARVAAGAVAKKVLENKLGKKFKISAAVTQLGILGCDTTKWNDKVIYQNPFFCPDKSMIKIWEKYLLSIRKAGSSCGAIIEVRANGIPAGLGAPIYSKLDSDIASAMMSINAVKGVNIGSGMNSAQLSGEENSDEISQNKKKLKFKTNNAGGILGGISSGQEIIVSFAVKPTSSIIKSRKTITKFGKNTTISVKGRHDPCVGIRAVPIGEAMLSCVLLDHYLMNKAQCS

SEQ ID NO: 181260 - protein, 287 aa, Unknown
  Bacterial polypetide isolated from the Sargasso Sea
FTTWGESHGPAIGCIVDGCPPNINLNEKEIQLELDKRKPGQSKFTTQRKEDDKVQILSGVFEGKTTGTPISLIIYNKDMRSKDYGNIKDKFRPGHADFTYFKKYGIRDYRGGGRSSARETASRVAAGAIAKIVLQKKLGKKFKVIGAVTQLGILGCNTSQWNDEIISKNPFFCPDKSMIKLWEKYLLSVRKSGSSCGAVIEVRARGIPAGLGAPIYSKLDSDIASAFMSINAVKGVNVGAGMNSAQLSGEQNSDEISSKNNKLKFNSNNAGGILGGISSGQEIIASL

SEQ ID NO: 181261 - protein, 171 aa, Unknown
  Bacterial polypetide isolated from the Sargasso Sea
KIWEKYLLSIRKAGSSCGAIIEIRARGIPAGLGAPIYSKLDMDLASAMMSINAVKGVNIGSGINSAYLTGEQNSDEIVQKGKRTKFFSNNAGGILGGISSGQEIIVSFAVKPTSSILTSRKTINKYGKNTTISVKGRHDPCVGIRAVPIGEAMMHCVLLDHYLMNKAQCGN

SEQ ID NO: 181262 - protein, 250 aa, Unknown
  Bacterial polypetide isolated from the Sargasso Sea
CVVDGCPPNIPINADDIQIELNRRKPGQSKFTTQRKEDDKVQILSGVFEGKTTGTPISLIIYNKDMRSRDYETIKNKFRPGHADFTYLKKYGIRDYRGGGRQSARETASRVAAGAIAKKVLGVKLGKKYNVVGAVTQLGILGCNLKNWNDKFIRKNKLFCPDKSILKLWEKYLLSIRKSGSSCGAVIEVRARGIPVGLGAPIYSKLDMDLAAAMMSINAVKGVNIGSGMNSAQLTGEQNSDEMSKKGRST

SEQ ID NO: 181263 - protein, 244 aa, Unknown
  Bacterial polypetide isolated from the Sargasso Sea
MSFNTFGKIFRFTTWGESHGPAIGCVIDGCPPNIPLSERDIQSDMDRRRPGQSKFTTQRKESDKAVILSGVFEGKTTGTPISIIIHNEDKRSRDYETIKNKFRPGHADYTYFKKYGIRDFRGGGRQSARETACRVAAGAVAKIVLKKLIGSKFKVIGAVTQLGLMSCNKSNWKDSEIRKNPFFCPDKKSVKLWEKYLLAVRKAGSSCGAIIELRATGVPVGLGAPIYSKLDTDIAAGLMSINAV

SEQ ID NO: 181264 - protein, 100 aa, Unknown
  Bacterial polypetide isolated from the Sargasso Sea
QNSDEISQKGTKAKFASNNAGGILGGISSGQEIIVSFAVKPTSSILTRRKTINRFGKNTSISVKGRHDPCVGIRAVPIGEAMMHCVLLDHYLMNQAQCSY

SEQ ID NO: 181265 - protein, 158 aa, Unknown
  Bacterial polypetide isolated from the Sargasso Sea
AGSSCGAVIELRATGIPVGLGAPIYSKLDTDIAAALMSINAVKGVNIGVGMNAAFLSGEENSDEMSKSSGKVRFKSNQAGGILGGISSGQNIVASFAVKPTSSILTSRSTIDKKGKNTKISVKGRHDPCVGIRAVPIGEAMINCVLLDHFLMNRAQCD

SEQ ID NO: 181266 - protein, 148 aa, Unknown
  Bacterial polypetide isolated from the Sargasso Sea
MSFNTFGKLFRFTTWGESHGSAIGCIVDGCPPNIKIREQDIQKELDKRKPGQSKFTTQRKEDDKVQILSGVFEGKTTGTPISLIIYNKDMKSKDYNDIKDKFRPGHADYTYFKKYGIRDHRGGGRSSARETAARVAAGAIAQIVLKKN

SEQ ID NO: 181267 - protein, 331 aa, Unknown
  Bacterial polypetide isolated from the Sargasso Sea
LGCILDGCPPGLVLSEKDIQKDLDRRKPGKSKYTTQRKESDKVEILSGTFEGKTTGTPIAMIIYNEDQRSKDYSEIKNKFRPGHADYTYTMKYGFRDYRGAGRSSARETVARVAGGAIAKKVLHDKLKMKITGYVSQIGQYKPKKINLKEIENNSFFFPDKSMIPDLEKYINSIRKEGDSIGAEVTVVAKKVPAGLGNPVFDKLDALIAFAMMSINAVKGVEIGNGFDVVAQKGSECRDEITSKGFLSNNSGGTLGGISSGQDIVVKLALKPTSSIIKSGKTITSKKKNTTIVTKGRHDPCVGIRATPIAEAMLALVLCDLYLRDKAQNSI

SEQ ID NO: 181268 - protein, 130 aa, Unknown
  Bacterial polypetide isolated from the Sargasso Sea
MDLASAMMSINAVKGVNIGSGMNSAFLTGEENSDEIVQKGNYPVFKSNNAGGILGGISSGQEIKLSFAVKPTSSILKSRKTIDKFGKNTSISVKGRHDPCVGIRAVPIGEAMAHCVILDHYLINKAQCGK

SEQ ID NO: 181269 - protein, 224 aa, Unknown
  Bacterial polypetide isolated from the Sargasso Sea
MSFNTFGKLFRFTTWGESHGPAIGCIVDGCPPNINLKEQDIQIELDKRKPGQSKFTTQRKEDDKVQILSGVFEGKTTGTPISLIIYNKDMRSKDYSNIKDKFRPGHADFTYFKKYGIRDYRGGGRSSARETAARVAAGAIAKVVLQKKLGKKFKVIGAVTQLGILGCDTNQWNDKVISKNPFFCPDKLMIKLWEKYLLSVRKSGSSCGAVVEIRARGIPVGLGA

SEQ ID NO: 181270 - protein, 298 aa, Unknown
  Bacterial polypetide isolated from the Sargasso Sea
AIGCVIDGCPPNIPISELNIQKDMNRRRPGQSKFTTQRKESDKVIILSGVFQGKTTGTPISIIIYNEDKKSRDYESIKNKFRPGHADFTYFKKYGIRDFRGGGRQSARETACRVAAGAVAKIVLKKMIGPKFNVIGAVTQLGLMSCDKGNWKNSEIRKNPFFCADKKSVKLWEKYLLAVRKSGSSCGAIIELRASGIPVGLGAPIYSKLDSDISAALMSINAVKGVNIGSGMNSAFLSGEENDEIKIKSGKIKFKTNNAGGILGGISSGQNIVASFAVKPTSSILTSRETIDKKGKNT

SEQ ID NO: 181271 - protein, 196 aa, Unknown
  Bacterial polypetide isolated from the Sargasso Sea
WDECAKNPFFCADAKAATKWAEYLDEVRKSGSSAGAILEIVAEGIPAGLGQPIYGKLDSELARAMMSINAVKGVEIGGGFALSAIEGHLASDQMRSGNSPEQPHFIGNQSGGILGGISSGQPIVVRVAIKPTSSILTPRQSIDLDGKNIDVVTKGRHDPCVGIRGVPVAEAMMSLVLIDMLMRHNAQTGSLNAQQH

SEQ ID NO: 181272 - protein, 217 aa, Unknown
  Bacterial polypetide isolated from the Sargasso Sea
MRSKDYGNIKDKFRPGHADFTYFKKYGIRDYRGGGRSSARETASRVAAGAIAKLVLQKKLGKKFKVVGAVTQLGILGCDTNKWNDKIITKNPFFCPDKSMIKLWEKYLLGVRKSGSSCGAVIEIRARGIPVGLGAPIYSKLDSDIASSFMSINAVKGVNIGAGMNSAQLSGEQNSDEISKKGKKLEFNSNNAGGILGGISTGQEIIASFAVKQHLRS

SEQ ID NO: 181273 - protein, 208 aa, Unknown
  Bacterial polypetide isolated from the Sargasso Sea
MGSSFGKLFSISTFGESHGGGVGVIIDGCPPRLELDINAIQNDLNRRRPGQSKITTPRNESDEVEILSGLLGNQTLGTPIAMVVRNKDHRPKDYSEIKKTFRPSHADATYQKKYGIQASSGGGRASARETIGRVAAGSVAKQLLTKASDTEILAWVKRIHDIEAEIQPSQVTFDDIEKNIVRCPNQSAADLMIQRVEAFGKEETLVAD

SEQ ID NO: 181274 - protein, 275 aa, Unknown
  Bacterial polypetide isolated from the Sargasso Sea
TVIVEGMPADLEISENYIEHQMTRRQKGYGSGGRMKIEKDKALIKSGVRHGKTLGSPIALWIENKDFENWNEAMSIEEVPVDVDKKVFTKVVPGHADFPGALKYNQTDLRNILERASARETASRVAAGSIARKFLEFFGVSIHSRVISIGSKSSQNLNYEKIDWEFIENSEVRANDLDSEAKFKKEIDLAKSQRTTVGGIFQIITYGVPVGLGSHVHWDRKLDGQIGQSILSINAVKGVEIGNGFENTTKKGKEVHDVIIPDKNNIKNFKHILIT

SEQ ID NO: 181275 - protein, 186 aa, Unknown
  Bacterial polypetide isolated from the Sargasso Sea
MSFNTFGKIFRFTTWGESHGPAIGCVVDGCPPNISINEKDIQTELNKRKPGQSKFTTQRKEDDKVNILSGVFEGKTTGTPISMIIYNKDMKSRDYETIKNKFRPGHADYTYFKKYGIRDYRGGGRQSARETAARVAAGAVAKKVLENKIGKKYKVVGAVTQLGILGCDTKNWNDKFISKNPLFCPG

SEQ ID NO: 181276 - protein, 257 aa, Unknown
  Bacterial polypetide isolated from the Sargasso Sea
YTYQQKYGIRDYRGGGRASARETCMRVAAGAIAKKYLKEKFGIIIRGYLSQLGPIRIEHKDWNEVENNVFFCPDASRVSELDDYMDALRKEGESVGARINIHAENIPVGLGEPIFDRLDADIAKGMMSINAVKGVELGIGFGCVEQKGTQHRDEITPKGFIGNNSGGVLGGISSGQDIIVSVALKPTSSIRLPGNTVDKSGKATKVETKGRHDPCVGIRATPIAEAMLALVIMDHTLRHRAQNADVASETPIIPSSK

SEQ ID NO: 181277 - protein, 171 aa, Unknown
  Bacterial polypetide isolated from the Sargasso Sea
MSSNSIGKLFSFSTWGESHGKAIGCVIDGVPASIELSEKDIQPYLDSRKPGKSKYTTQRKEDDKVEVLSGVFEGKTTGHPISLIIYNKDQRSKDYSDIKDKFRPGHADYTYWKKYGIRDYRGGGRSSARETAMRVAAGAIARKIICKKIGNEAKITGALVQIGNSRINYDN

SEQ ID NO: 181278 - protein, 258 aa, Unknown
  Bacterial polypetide isolated from the Sargasso Sea
NIKDKFRPGHADFTYFKKYGIRDYRGGGRSSARETASRVAAGAIAKIVLQKKLGKKFKVIGAVTQLGILGCDTSQWNDKIISKNPFFCPDKSMIKLWEKYLLGVRKSGSSCGAVIEVRARGIPAGLGAPIYSKLDSDIASAFMSINAVKGVNIGAGMNSAQLSGEQNSDEISSKNNKLKFNSNNAGGVLGGISSGQEIIVSFAVKPTSSILTTRKTINKFGKNTTISVKGRHDPCVGIRAVPVGEAMMNCVLLDHFLM

SEQ ID NO: 181279 - protein, 273 aa, Unknown
  Bacterial polypetide isolated from the Sargasso Sea
GESHGGGIGVVIDGCPPRLPLSEEDIQCELDRRRPGQSEITTPRKESDKATIVSGVYEGMTLGTPIAIYVPNGDHRPEAYKEMKDKFRPSHADFTYQTKFGIRNHEGGGRSSARETIGRVAAGAIAQKILKHAGGVEVRAFIRRIHSIEAPEMKEFPTLEAVEASPVRCPHPETAETMVNFIKEMRSKGDSVGGVIECRVKNLPVGLGVPVFDRLEADLAKAMLSLPATKGFEVGSGFAGTELIGSEHNDVFIEKDGHVGTETNRSGGVQGGY

SEQ ID NO: 181280 - protein, 150 aa, Unknown
  Bacterial polypetide isolated from the Sargasso Sea
IEVRARGVPVGLCAPIYSKLDTDIASGLMSINAVKGVNIGAGMNSAQLSGEQNSDEISSTGNKLKFYSNKAGGILGGISTGQEIIASFAVKPTSSILTSRKTINKFGKNTSISVKGRHDPCVGIRAVPIGEAMMNCVLLDHYLMNKAQCS

SEQ ID NO: 181281 - protein, 161 aa, Unknown
  Bacterial polypetide isolated from the Sargasso Sea
RKKGSSLGAKLLINARNVPAGLGEPVYGKLDADLAGAMMSINAVKGVEIGAGNEAVELSGDENSDEIRANKNKKIIFSSNNSGGILGGISSGQDLNLSITIKPTSSILKAKKTINNKFQNTSISTKGRHDPCVGLRAVPIAEAMMACVIADHILRNRAQCG

SEQ ID NO: 181282 - protein, 72 aa, Unknown
  Bacterial polypetide isolated from the Sargasso Sea
MAGNTFGEQFRITTFGESHGGGVGVVIDGCPPRLELDASDVQVELDRRRPGQSRLVTQRNEDDRVEIYSGLF

SEQ ID NO: 181283 - protein, 134 aa, Unknown
  Bacterial polypetide isolated from the Sargasso Sea
LASGLMSINAVKGVEIGIGMQAAEIEGIENADEIFLEDDKISFTSNNAGGVLGGITSGQHIVTRFAVKPTSSILSERKSITKAGSSTTVSTKGRHDPCVGIRAVPVGEAMVACIILDHFLLHRGQIGSNSGTLL

SEQ ID NO: 181284 - protein, 224 aa, Unknown
  Bacterial polypetide isolated from the Sargasso Sea
MRVAAGAVARKVINKKIGSYPKITGALIQIGKSKIDYKNWNENFITKNEFFCPDENIIPEWKDLINKARKDGSSIGAIIEIRASGIPIGLGEPVYEKLDSDIARALMTINAVKGVEIGNGFNCVYETGKDNIDEMAIEDNKPVFLSNNNGGVLGGISSGQEIVCRFVVKPTSSIITERKTIDIHYNETKISTKGRHDPCVGIRAVPVGEAMIATTIADHCLRHL

SEQ ID NO: 181285 - protein, 189 aa, Unknown
  Bacterial polypetide isolated from the Sargasso Sea
MSFNTFGKLFRFTTWGESHGPAIGCIVDGCPPNIQISEKEIQLELNKRKPGQSKFTTQRKEDDKVNILSGVFEGKTTGTPISMIIFNKDMRSRDYETIKNKFRPGHADYTYFKKYGIRDYRGGGRQSARETATRVAAGAIAKKVLQKKIGKKYKVIGAVNSIGILGCDTKKWNDNFIFINSLFCPDNQF

SEQ ID NO: 181286 - protein, 168 aa, Unknown
  Bacterial polypetide isolated from the Sargasso Sea
GKYLLGIRKAGSSCGAIIEVRARGVPLGLGAPIYSKLDMDLAAAMMSINAVKGVNIGSGINSAMLTGEENSDEILKKKGKTSFKSNNAGGILGGISTGQEINVSFAVKPTSSILSSRKTIDRFGKNTTISVKGRHDPCVGIRAVPIGEAMMHCVILDHYLMNTAQNKI

SEQ ID NO: 181287 - protein, 257 aa, Unknown
  Bacterial polypetide isolated from the Sargasso Sea
PGHADFTYFKKYGIRDFRGGGRQSARETASRVAAGAIAKIVLKNLLGKKFSVYGAVIQLGLMGCDRKNWNNKEIRKNPFFCPDKKSVKLWEKYLMAVRKSGSSCGATIELRANGIPAGLGAPIYSKLDTDIAGALMSINAVKGVNIGAGMSAAHLSGEENSDEMRSKSGKTKFKSNNAGGILGGISSGQEIIASFAVKPTSSIINSRETIDKKGKNTKISVKGRHDPCVGIRAVPIGEAMLSCVLLDHFLMNRAQCG

SEQ ID NO: 181288 - protein, 276 aa, Unknown
  Bacterial polypetide isolated from the Sargasso Sea
IYNEDKKSRDYETIKNKFRPGHADYTYFKKYGIRDFRGGGRQSARETACRVAAGAVAKIVLKKTLGMKFNIIGAVTQLGLMSCNKQNWKDSEIRKNPFFCPDKKSIKLWEKYLLAVRKAGSSCGAVIELRASGVPVGLGAPVYSKLDTDIAAALMSINAVKGVNIGSGMNAAFLSGEENSDEIRKKAGKVKFRTNHAGGILGGISSGQDIIASFAVKPTSSILTSRETIDKKGKNTKISVKGRHDPCVGIRAVPIGEAMMSCVILDHLLMHRAQCG

SEQ ID NO: 181289 - protein, 234 aa, Unknown
  Bacterial polypetide isolated from the Sargasso Sea
GRVAAGAVAKQLLKTFSNTEILSWVKRIHDIDSDINKEKISLKKIDSNIVRCPDEKVSTEMIERIKELKRQGDSCGGVIQCLVRNVPSGLGMPVFDKLEADLAKALMSLPATKGFEIGSGFSGTYLKGSEHNDAFIKSDDISKLRTTSNNSGGIQGGISNGENIEMKIAFKPTATIGKEQKTVNAEGKEVLMKAKGRHDPCVLPRAVPMVDAMIALVLADHLLLNHAQCDLINK

SEQ ID NO: 181290 - protein, 128 aa, Unknown
  Bacterial polypetide isolated from the Sargasso Sea
IASAIMSINAVKGVNIGAGMNSAQLMGEQNSDEIFNKGKKIKFSSNNSGGILGGISTGQEIIISFAVKPTSSILLTRKTVDKFGKNTSISVKGRHDPCVGIRAVPIGEAMLNCVLLDHYLLNKAQCGD

SEQ ID NO: 181291 - protein, 190 aa, Unknown
  Bacterial polypetide isolated from the Sargasso Sea
MIGKNTNKNSFFCPDKKIIPIWEEYLDTIRKKGLSVGAKIFVEAKNVPAGLGEPVYSKLDSDLASAMISINAVKGVEIGLGNDSVDITGAENSDELRVNKNKKIIFSSNNSGGILGGISSGQDIQLSVAIKPTSSILKSQKTINDKYKNTTISTRGRHDPCVGIRAVPIVEAMTACVLADHLMRNKAQCG

SEQ ID NO: 181292 - protein, 56 aa, Unknown
  Bacterial polypetide isolated from the Sargasso Sea
RKEQQTVDSDGKATTLAGKGRHDPCVLPRAVPMVEAMVALVLADHLLRQQGQCSLW

SEQ ID NO: 181293 - protein, 213 aa, Unknown
  Bacterial polypetide isolated from the Sargasso Sea
IGKKYQAVGAVTQLGILGCDLKKWKDKTISSNPFFCPDKTVIKLWEKYLLGIRKAGSSCGAIIEVRARGVPLGLGAPIYSKLDMDLAAAMMSINAVKGVSIGSGMNSAMLTGEENSDEILKKKGRTNFKSNNAGGILGGISTGQEINVSFAVKPTSSILSSRKTIDRFGKNTTISVKGRHDPCVGIRAVPIGEAMMHCVILDHYLMNIAQNKI

SEQ ID NO: 181294 - protein, 227 aa, Unknown
  Bacterial polypetide isolated from the Sargasso Sea
VAAGAIAKKVLISKIGKKYNVVGAVTQLGILGCDVNKWKDKFINKNPFFCPDKSSIKLWEKYLLSIRKAGSSCGAIIEVRARGVPLGLGAPIYSKLDMDLASAMMSINAVKGVNIGSGISSAQLTGEQNSDEILRKGNKIKFKSNNAGGILGGISSGQEIIVSFAVKPTSSILNSRKTIDKFGKNTNISVRGRHDPCVGIRAVPIGEAMMHCVILDHYLMNKAQCYS

SEQ ID NO: 181295 - protein, 211 aa, Unknown
  Bacterial polypetide isolated from the Sargasso Sea
MSFNTFGKLFRFTTWGESHGPAIGCVVDGCPPNIPINESDIQKELNKRKPGQSKFTTQRKEDDKINILSGVFEGRTTGTPISLIIYNKDMRSRDYETIKNKFRPGHADYTYFKKYGIRDYRGGGRQSARETAARVAAGAIAKVVLKNKIGKKYQAVGAVTQLGILGCDLKKWRDKTISSNPFFCPDKTVIKLWEKYLLAIRKAGSSCGANY

SEQ ID NO: 181296 - protein, 87 aa, Unknown
  Bacterial polypetide isolated from the Sargasso Sea
KFKSNKAGGILGGISSGQEIKLSFAVKPTSSILSSRKTIDKFGKNTSISVKGRHDPCVGIRAVPIGEAMMHCVLLDHYLMNKAQCSN

SEQ ID NO: 181297 - protein, 145 aa, Unknown
  Bacterial polypetide isolated from the Sargasso Sea
MNGNQFGKLFQITTFGESHGPGIGCTISGCPAGVKIDDSYIQHDLDRRRPGQSMVTTSRDEPDQVSLLSGLEGGYTTGAPIGMVIYNKDAKSNKYEPFVTAPRPSHGDFTYSAKFGTRSWAGGGRSSARETANWVAAGAVAKKVL

SEQ ID NO: 181298 - protein, 294 aa, Unknown
  Bacterial polypetide isolated from the Sargasso Sea
MEKRRPGQSKYTTQRREKDLVEILSGVFENKSTGTPIQLLIKNTDQRSKDYSEIENTFRPGHADITYWQKYGIRDYRGGGRSSARETASRVAAGAVARAVLSELMPDLRIQAYLTQIGPDKIDKSNFDWQEIEQNDFWSPDKKAAERWAKYLDKIRKSHNSTGAVIEVQATNVPAGLGAPIYGKLDMDIASALMSINAVKGVEIGEGMQAAELTGSENADEIFLGNDGKPEYTSNHAGGILGGISTGQHIIARFAVKPTSSILSSRKSITKTGEPTKVVTKGRHDPCVEYEQCR

SEQ ID NO: 181299 - protein, 179 aa, Unknown
  Bacterial polypetide isolated from the Sargasso Sea
MSFNTFGKFFRFTTWGESHGPAIGCVVDGCPPNVALKQEDIQKELNKRKPGQSKFTTQRKEDDKVEILSGVFEGKTTGTPISLIIYNKDMRSRDYETIKNKFRPGHADFTYFKKYGIRDYRGGGRQSARETASRVAAGAIAKKVLEKKIGKKYKVVGAVTQLGILGCDVTRWNDKEIEK

SEQ ID NO: 181300 - protein, 346 aa, Unknown
  Bacterial polypetide isolated from the Sargasso Sea
MSFNTFGKIFRFTTWGESHGPAIGCIIDGCPPNIAISDKEIQADMDRRRPGNTKFVSQRKESDKIEILSGVFEGKSTGTPISILIRNEDKRSRDYESIKNKFRPGHADFTYFKKYGIRDFRGGGRQSARETASRVAAGAIAKIVLKNLLGKKFSLYGAVVQLGLMGCDRKNWNNKEIRKNPFFCPDRKSVKLWEKYLMAVRKSGSSCGAVIELRANGIPAGLGAPIYSKLDTDIAGALMSINAVKGVNIGAGMGAAYLSGEENSDEMRSKSGKAKFKSNNAGGILGGISSGQEIIASFAVKPTSSIINSRETIDKKGKNTKISVRGRHDPCVGIRAVPIGEAMLSC

SEQ ID NO: 181301 - protein, 365 aa, Unknown
  Bacterial polypetide isolated from the Sargasso Sea
MSGNTIGTLFAVTNFGESHGPAIGCVIDGCPPGMPLTEADIQTDLDRRRPGTSRHVTQRNEPDAVEILSGVYEGKTTGTPIALLIRNTDQRSKDYSNIAESFRPGHADYTYWHKYGIRDPRGGGRSSARLTAPTVAAGAVAKKWLAQQYGAEFRACMTQLGELPIPFESWDHVRSNPFFAPVADVQQYEDYMDALRKAGDSCGARIRVQATGVPVGLGEPLYDKLDADIAHAMMGLNAVKGVEIGAGFASVAHRGTMHGDSMTPQGFRTNNAGGVLGGISTGQDLEVSIAIKPTSSIISPRESIDIHGKSTEVITKGRHDPCVGIRAAPIAEALLALVVMEHALRHRAQCGDVVPPVPPIQASFL

SEQ ID NO: 181302 - protein, 361 aa, Unknown
  Bacterial polypetide isolated from the Sargasso Sea
MSFNTFGKNFRFTTWGESHGEAIGCVIDGCPPLIPLKDKDIQKYLDMRKPGKNRFVTQRKEDDKVSILSGVFEGKTTGTPIMLLIWNKDQKSKDYSDIKNKFRPGHADLTYFLKYGVRDYRGGGRSSARETASRVAAGAVARKVVGHILKKDILIQGAVTQVGKLVINQRNFNWNDVKKNSFFCPDKKIVKVWEEYLDETRKKGSSLGAKLLINARNVPAGLGEPVYGKLDAELAGAMMSINAVKGVEIGAGNEAVELSGDENSDEIRANKNKKITFSSNNSGGILGGISSGQDLNLSVTIKPTSSILKAKKTINNKFQNTSISTKGRHDPCVGLRAVPIAEAMMACVLADHILRNRAQCG

SEQ ID NO: 181303 - protein, 273 aa, Unknown
  Bacterial polypetide isolated from the Sargasso Sea
EDMRSKDYKISKDKFRLGHADFTYFKKYGIRDYRGGGRSSARETATRVAAGAIAKKVLEEKLGKKFKISAGVTQLGILGCDTTKWDEKIIYKNPFFCPDKSMLKIWEKYLLSIRKAGSSCGAVIEVRANGVPAGLGAPIYAKLDSDIASAMMSINAVKGVNIGSGMNSAQLSGEENSDEISQDKKKMRFASNNAGGILGGISSGQDIIVSFAVKPTSSILKSRKTINKFGKNTTISVKGRHDPCVGIRAVPVGEAMLSCVLLDHYLMNKGQCG

SEQ ID NO: 181304 - protein, 259 aa, Unknown
  Bacterial polypetide isolated from the Sargasso Sea
MSFNTFGKLFRFTTWGESHGPAIGCVVDGCPPNIPIKESDIQIELNKRKPGQSKFTTQRKEDDKINILSGVFEGRTTGTPISLIIYNKDMRSRDYETIKNKFRPGHADYTYFKKYGIRDYRGGGRQSARETAARVAAGAIAKVVLKNKIGKNYQAVGAVTQLGILGCDLEKWKDKTISSNPFFCPDKTVIKLWEKYLLGIRKAGSSCGAIIEVRARGVPLGLGAPIYSKLDMDLAAAMMSINAVKGVNIGSGMNSAMLT

SEQ ID NO: 181305 - protein, 283 aa, Unknown
  Bacterial polypetide isolated from the Sargasso Sea
MSFNTFGKLFRFTTWGESHGPAIGCVVDGCPPNIKISEKEIQLELNKRKPGQSKFTTQRKEDDKVHILSGIFEGKSTGTPISMIIHNKDMRSRDYETIKNKFRPGHADYTYFKKYGIRDYRGGGRQSARETATRVAAGAIAKKVLQKKIGKKYKVVGAVTQIGILGCDKKKWNDNFILSNSLFCPDRSVLKLWEKYLLSIRKAGSSCGAVIEVRARGLPAGLGAPIYSKLDMDLASAMMSINAVKGVNIGSGMNSALLTGEENSDEIFQKSKKINFKSNNAGG

SEQ ID NO: 181306 - protein, 166 aa, Unknown
  Bacterial polypetide isolated from the Sargasso Sea
MASNSFGNIFRFTSFGESHGKVIGCVVDGVPPNISLSEKDIQKFLDRRKPGQSKFVSQRKESDKVEILSGVFENKTTGHPIALNIVNEDHRSKDYSEIAKKFRPGHADITYYEKYKIRDYRGGGRSSARETAVRVAAGAIASKVLNFKLKNKIKIRASVIQIWPSQ

SEQ ID NO: 181307 - protein, 169 aa, Unknown
  Bacterial polypetide isolated from the Sargasso Sea
MSDNSFGTLFRVTTWGESHGPSIGCVVDGTPPGIALKEADIQSWLDKRRPGTSRFVTQRKEPDKVKILSGIFEGKTTGTPISLLIENQDARSKDYKAIKDKFRPGHADFTYWKKYGFRDFRGGGRPSARETAMRVAAGGIARKVLGRSVKIRGAMIQLGTEKIDRGRGA

SEQ ID NO: 181308 - protein, 365 aa, Unknown
  Bacterial polypetide isolated from the Sargasso Sea
MSGNSFGKLFTVTTFGESHGIAIGGVVDGCPPGLEITEEDLQVDLDRRKPGTSRYTTARREDDEVQILSGVFEGKTTGTSIGLLIKNKDQRSQDYGNIKDRFRPGHADYTYDQKYGSRDYRGGGRSSARETAIRVAAGGIAKKYLKEVHGIEVLGYLSQLGPVTVDKVDHSVTNTNPFFCPDESKLDALDEYMRDLKKSGDSIGAKVSVVAKNVPVGLGEPVFDRLDAEIAHAMMGINAVKGVEIGDGFDVINQKGSEHRDTLTPEGFTSNHAGGVLGGISTGQDIEVHMALKPTSSISVPGKTINKDNEEIDIVTKGRHDPCVGIRAVPIAEAMLALVLMDHLLRHRAQNAGVQSTTKPIAGQA

SEQ ID NO: 181309 - protein, 357 aa, Unknown
  Bacterial polypetide isolated from the Sargasso Sea
MSFNTFGKVFRFTTWGESHGPAIGCVIDGCPPLIQLNEQDIQRELDKRKPGQSKFTTQRKESDKVQILSGVFEGKTTGTPISLLIYNEDMRSKDYKNIKDKFRPGHADFTYFKKYGIRDYRGGGRSSARETAARVAAGAIAKKVLKNKFGKKFKISGAVTQLGILGCDTKKWNDKIIHKNPFFCPDKSMLKIWERYLLTIRKAGSSCGAIIEVRANGIPAGLGAPIYSKLDSDIASAMMSINAVKGVNIGSGMNSAHLSGEENSDEISQNKKKLKFHSNNSGGILGGISSGQEIVVSFAVKPTSSILKSRKTINKFGKNTTISVKGRHDPCVGIRAVPVGEAMLSCVLLDHYMMNKA

SEQ ID NO: 181310 - protein, 349 aa, Unknown
  Bacterial polypetide isolated from the Sargasso Sea
TTWGESHGPAIGCVVDGCPPNVKIKEQDIQKELNKRKPGQSKFTTQRKEDDKVNILSGVFEGKTTGTPISMIIYNKDMRSRDYETIKNKFRPGHADYTYLKKYGIRDFRGGGRQSARETAGRVAAGAIAKKILEQKIGKKYKVIGAVTQLGILGCDEKKWNDKFILKNPFFCPDKSIVKLWEKYLLSIRKAGSSCGATIQVRAKGVPVGLGAPIYSKLDMDLAAAMMSINAVKGVNIGSGMNSAQLTGEQNSDEIFQKGKRTNFKSNNAGGILGGISSGQDIIVSFAVKPTSSIHSKRMTIDKFGRNTSISVKGRHDPCVGIRAVPIGEAMMHCVILDHYLMHSAQCKS

SEQ ID NO: 181311 - protein, 360 aa, Unknown
  Bacterial polypetide isolated from the Sargasso Sea
MASNAFGKIFQFSTWGESHGNAIGGVVDGVPPLIPIVEEDIQYYMDKRKPGQSRFTTQRKEPDKVKILSGVFENKTTGTPISLLIQNKDQRSKDYGEIKDQFRPGHADFTYQKKYGIRDYRGGGRSSARETAMRVAAGAIARKVLELKTGNKISIKGALVQIGPHKINRKNWDWNQVERNPFWSPDAETAVKWADFLDDIRKKGSSAGAVVEIEINGIPAGLGEPIYGKLDSDLANAMMSINAVKGVEIGDGFDLVTTPGELASDEIRISDGEPVFLTNKAGGILGGISTGQPIIVRFAIKPTSSILTPRRSIDTLGNEVEVRTKGRHDPCVGIRAVPVGEAMAACVLADHALRHQAQCY

SEQ ID NO: 181312 - protein, 327 aa, Unknown
  Bacterial polypetide isolated from the Sargasso Sea
MSFNTFGKIFRFTTWGESHGPAIGCIIDGCPPNIPISEKEIQLDMDRRRPGNTKFVSQRKESDKIEILSGVFDGKSTGTPISILIRNEDKRSRDYESIKNKFRPGHADFTYFKKYGIRDFRGGGRQSARETASRVAAGAIARIVLKNLLGKKFSVYGAVIQLGLMGCDRKNWNNKEIRKNPFFCPDKKSVKLWEKYLMAVRKSGSSCGAIIELRANGIPAGLGAPIYSKLDTDIAGALMSINAVKGVNIGAGMGAAYLSGEENSDEMRSKSGKAKFKSNNAGGILGGISSGQEIIASFAVKPTSSIINSRETIDKKGKNTKISVRGR

SEQ ID NO: 181313 - protein, 362 aa, Unknown
  Bacterial polypetide isolated from the Sargasso Sea
MAGNTFGKIFTLTTFGESHGTALGCILDGCPPGLEISESDIQKELDKRKPGSSKYTTQRKEEDKVEILSGVFEGKTTGTPIGMIIKNKDQKSKDYDNLKDVFRPSHADYSYTQKYGIRDHRGGGRASARETVMRVAAGAIARKFLKEKLNLDIVGYLSQIGKLKINEVDFNEIPNNSFFCPDEGLIKEIELLIDDLRKEGDSVGAQISIAVKNMPLGLGEPVFDKLDADIAKAMMSINAVKGVELGGGFSLVESKGSEVRDEMASDGFKKNNSGGSAGGISTGQDLIVNIALKPTSSINKEGKTIDKEGKNTKIQVTGRHDPCVGIRATPIAESMIALVLMDHYLRNRAQNADVDTKPLLED

SEQ ID NO: 181314 - protein, 353 aa, Unknown
  Bacterial polypetide isolated from the Sargasso Sea
MPGNSHGQLFKVTTYGESHGEAIGCIIDGCPPNLKIDIEDIQRDLDRRKPGKTRHTSQRRESDKVKILSGVFEGKTTGTPISLIIYNEDARSKDYSEIKDLYRPGHADITYDQKYGLRDYKGGGRSSARETATRVAAGAIAKLYLKEHFNLNIQGYVAQLGPIVSDKKNYADIEKNPFFFPNNEKVKDLEDYMDALRKEGNSIGARINVMATNVPAGLGEPVFDRIDADIAKAMMSINAVKAVEIGAGFLSVTQKGTEHRDEIDSKKGFLSNNSGGTLGGITSGQDIEVSIAIKPTSSIRLEGKTIDNKGKNAKVVTKGRHDPCVGIRAVPIAEAMLALVLIDHALRHKAQNL

SEQ ID NO: 181315 - protein, 193 aa, Unknown
  Bacterial polypetide isolated from the Sargasso Sea
MSGNTFGKLFKITTFGESHGTAMGCVLDGCPPQIELTKEDIQHELDRRKPGQSDVTTQRKEDDAVEILSGVFEGKTLGTPIGMIIYNKDQKSKDYSNIKDVFRPNHADITYQAKYGYRDYRGGGRASARETVNWVAAGAIAKKILKKEGVSVHGFVSEIGQVKADSINHKDINNKYFFCDESKLSDLDSMFYD

SEQ ID NO: 181316 - protein, 333 aa, Unknown
  Bacterial polypetide isolated from the Sargasso Sea
MSSNTFGKLFRFTTWGESHGPAIGCVIDGCPPNIQLNEKDIQKFLDKRKPGTSKFVTQRKEDDKVLILSGVFNGKTTGTPISLIIWNKDQRSKDYGDIKSKFRPGHADLTYFLKYQNRDYRGGGRSSARETACRVAAGAIARKVIKHLTKKEILIHGAVVQVGEIAINPRNFDWKNTNKNPFFCPDKKIIPIWEEYLDTIRKKGLSVGAKIFVEAKNVPAGLGEPVYSKLDSDLALAMISINAVKGVEIGLGNDSVDITGAENSDELRVNKNKKIIFSSNNSGGILGGISSGQDIQLSVAIKPTSSILKSQKTINDKYKNTTISTRGRHDPCV

SEQ ID NO: 181317 - protein, 306 aa, Unknown
  Bacterial polypetide isolated from the Sargasso Sea
MSGNTFGKLFQVTTYGESHGKALGCIIDGCPPQLELSSDDIQFELNRRRPGQSDVTTQRNEDDIVEILSGVFEGKTLGTPISLIIYNQDQRSKDYSKIKDVFRPNHADITYQAKYGHRDYRGGGRSSARETAMRVAAGAIAKKYLNSLGIYTDGYVTQIGSISADAINLTNAKSNKYFFADESKLEELDVMFLELIEEGNSVGAKLGVRVTNCPIGLGEPVFDKIDADIAKAIMSINAVKSVSIGNAQNILDLRGSEARDEITKEGFKSNNAGGILGGITNGDLIELEFIIKPTSSIKSQGQTINT

SEQ ID NO: 181318 - protein, 172 aa, Unknown
  Bacterial polypetide isolated from the Sargasso Sea
MLKIWEKYLLSIRKAGSSCGAIIEVRANGIPAGLGAPIYSKLDSDIASAMMSINAVKGVNIGSGMNSAQLSGEENSDEISQNRKKTKFKSNNAGGILGGISSGQEIVVSFAVKPTSSILKSRKTINKFGKNTSISVKGRHDPCVGIRAVPVGEAMLSCVLLDHYLLHKAQCS

SEQ ID NO: 181319 - protein, 356 aa, Unknown
  Bacterial polypetide isolated from the Sargasso Sea
MSSNSIGKIFSFSTWGESHGKAMGCVIDGVPSNIELSENDIQPYLDLRKPGQSKYTTQRKEDDKVEILSGVFEGKTTGHPISLIIFNNDQRSKDYSEIKDKFRPGHADFTYWKKYGIRDYRGGGRSSARETAMRVAAGAVARKVIWKKIDNKVKITGALIQIGSSKINYNNWNESCIHENDFFCPDEKIIPKWQDLITQARKDGSSLGAIIEVRASGVPAGLGEPIYDKLDSDIAKALMTINAVKGVEIGNGFGSVNEDGKTNVDEMSIKDGKPAFLSNNNGGILGGISSGQDIICRFVVKPTSSISTERKTIDINLQETTISTKGRHDPCVGIRAVPVGEAMIATTIADHILRFL

SEQ ID NO: 181320 - protein, 308 aa, Unknown
  Bacterial polypetide isolated from the Sargasso Sea
MSFNTFGKIFRFTTWGESHGPAIGCVIDGCPPNIPISEKDIQKDMDRRRPGQSKFTTQRKESDKVNILSGVFEGKTTGTPISIIIHNEDKKSRDYESIKNKFRPGHADYTYFKKYGIRDFRGGGRQSARETACRVAAGAVAKIVLKKIIGIKFNIIGAVTQLGLMSCDKQNWKNSEIRKNPFFCPDKKSVKLWEKYLLAVRKAGSSCGAVIEVRASGIPVGLGAPIYSKLDTDIAAALMSINAVKGVNIGSGMNAAFLSGEENSDEIRKSVGKVKFKTNHAGGILGGISSGQDIVASFAVKPTSSILT

SEQ ID NO: 181321 - protein, 185 aa, Unknown
  Bacterial polypetide isolated from the Sargasso Sea
MPGNSIGQAFQVTTFGESHGKAIGCIIDGCPPNLKIDLSEIHKDLDRRKTGKSRHTSQRREEDKVEILSGLFDGVTTGTPISLLIHNNDARSKDYNDIKNLFRPGHADFTYQKKYGLRDYKGGGRSSARETAIRVAAGSIAKQYLKKKYKTKIFGYLKSLGPIEAEKIIVTDIEKNPFFFPNNKQ

SEQ ID NO: 181322 - protein, 352 aa, Unknown
  Bacterial polypetide isolated from the Sargasso Sea
MSGNSFGKLFSVTTFGESHGKAIGCIVDGCPPGYKVSEKDIQPDLNRRKPGQSKYTTQRKEDDKVEILSGTFEGITTGTPIMLIIHNIDQRSRDYSEIKNKFRPGHADFTYQQKYGLRDYRGAGRSSARETVARVAAGAIAKKILKEVCKTKIYGYVSQLGNIIPSKFNKNDIEKNPFFFPNNKQIKDLEEYINSIRKEGDSIGAKVSVVANKVPVGLGNPVFDKTDALLAQAMMSINAVKGVSIGSGFEVVDMKGSECRDEITPKGFLSNHSGGTLGGITTGQDICIHLALKPTSSILKEGKTVNLKNKATTIKTKGRHDPCVGIRAVPIAEAMMALVLLDLYLCDKAQNK

SEQ ID NO: 181323 - protein, 360 aa, Unknown
  Bacterial polypetide isolated from the Sargasso Sea
MSFNTFGKFFRFTTWGESHGPAIGCIIDGCPPLIELKEQDIQKELDKRKPGQSKFTTQRKESDKVQILSGVFEGKTTGTPISLIIYNEDMRSKDYKNIKDKFRPGHADFTYFKKYGIRDYRGGGRSSARETATRVAAGAIAKKVLEKKLGKKFKISAAVTQLGILGCDTTKWNDKIIYKNPFFCPDKSMLKIWEKYLLSIRKAGSSCGALIEVRANGVPAGLGAPIYSKLDSDIASAMMSINAVKGVNIGSGMKSALLSGEENSDEISQNNKKMKFSSNNAGGILGGISSGQEIVVSFAVKPTSSILKSRKTINKFGKNTTISVTGRHDPCVGIRAVPVGEAMLSCVLLDHYLMNKAQCD

SEQ ID NO: 181324 - protein, 272 aa, Unknown
  Bacterial polypetide isolated from the Sargasso Sea
MRSKDYKNIKDKFRPGHADYTYFKKYGIRDYRGGGRQSARETASRVAAGAIAKQVLQNIIGKKYSVIGAVTQLGILGCDTEKWNDNFITKNPLFCPDKTVLKLWEKYLLGIRKAGSSCGAIIEVRARGVPVGLGAPIYSKLDMDLASAMMSINAVKGVNIGSGMNSAQLSGEQNSDEMSQKGKKTKFKSNNAGGILGGISSGQEIIVSFAVKPTSSILSQRKTINKFGKNTSISVTGRHDPCVGIRAVPIGEAMMHCVILDHYLMNKAQCGY

SEQ ID NO: 181325 - protein, 361 aa, Unknown
  Bacterial polypetide isolated from the Sargasso Sea
MSFNTFGKIFRFTTWGESHGPAIGCVVDGCPPNIQIKVEEIQKELNKRKPGQSKFTTQRKEDDKVEILSGVFEGKSTGTPISMIIYNKDMRSKDYGNIKNKFRPGHADFTYFQKYGIRDYRGGGRQSARETASRVAAGAIAKKVLQTKLGKKFNVVGAVTRLGILGCDLNNWRDKDISKNPLFCPDKSVLKLWEKYLLGIRKAGSSCGAIIEVRARGVPVGLGAPIYSKLDMDLAAAMMSINAVKGVNIGSGMNSAQLTGEQNSDEMTKKGKKTKFYSNNAGGILGGISSGQEIVVSFAVKPTSSILTQRKTIDKFGKNTSISVKGRHDPCVGIRAVPIGEAMMNCVILDHYLLNKAQCGS

SEQ ID NO: 181326 - protein, 312 aa, Unknown
  Bacterial polypetide isolated from the Sargasso Sea
MSGNTFGKLFKITTFGESHGTAMGCILDGCPPQIELTKEDIQHELDKRKPGQSDVTTQRKEDDAVEILSGVFEGKTLGTPIGMIIYNKDQKSKDYSNIKDVFRPNHADITYQAKYGHRDYRGGGRASARETVNWVAAGAIAKKILKKEGVSVHGFVSEIGQVKADSINYKDINNKYFFCDESKLADLDSMFKDLIEEGNSVGAKLGVVVKNCPVGLGDPVFEKLDANLAKAIMTINAVKSVSIGNADDLLNLKGSEARDEMTSSGYASNNSGGILGGISNGDDISLSFIIKPTSSIKSKGKTVNKDGEEVDI

SEQ ID NO: 181327 - protein, 360 aa, Unknown
  Bacterial polypetide isolated from the Sargasso Sea
MSFNTFGKSFRFTTWGESHGPAIGCIIDGCPPLIPLKEADIQKELNKRKPGQSKFTTQRKESDKVQILSGVFEGKTTGTPISLIIYNEDMRSKDYNDIKDKFRPGHADFTYFKKYGIRDYRGGGRSSARETAARVAAGAVAKKVLENKLGKKFKITGAVTQLGILGCDTNKWDDKIISKNPFFCPDKSMLKIWEKYLLSIRKAGSSCGAIIEVRANGIPAGLGAPIYSKLDSDIASAMMSINAVKGVNIGSGMNSAQLSGEENSDEISQNRKKTKFKSNNAGGILGGISSGQEIIVSFAVKPTSSILKSRKTINKFGKNTSISVKGRHDPCVGIRAVPVGEAMLSCVLLDHYLLHKAQCS

SEQ ID NO: 181328 - protein, 265 aa, Unknown
  Bacterial polypetide isolated from the Sargasso Sea
MSFNTFGKFFRFTTWGESHGPAIGCIIDGCPPLIQLKEQDIQKELDKRKPGQSKFTTQRKEGDKVQILSGVFEGKTTGTPISLIIYNEDMRSKDYKDIKDKFRPGHADFTYFKKYGIRDYRGGGRSSARETAARVAAGAIAKKVLENKLGRKFKISAAVTQLGILGCDTTKWDNKIIYKNPFFCPDKSMLKIWEKYLLSVRKAGSSCGAIIEVRANGVPAGLGAPIYSKLDSDIASAMMSINAVKGVNIGSGMNSAQLSGEENSD

SEQ ID NO: 181329 - protein, 360 aa, Unknown
  Bacterial polypetide isolated from the Sargasso Sea
MSFNTFGKLFRFSTWGESHGPAIGCIVDGCPPNINLSEKDIQKELDKRKPGQSKFTTQRKEDDKVQILSGVFDGRTTGTPISLIIYNKDMRSKDYGNIKDKFRPGHADFTYFKKYGIRDYRGGGRSSARETASRVAAGAIAKLVLQKKLGKKFKVIGAVTQLGILGCDTDKWNDKIITKNPFFCPDKSMIKLWEKYLLGVRKSGSSCGAVIEIRARGIPVGLGAPIYSKLDSDIASSFMSINAVKGVNIGAGMNSAQLSGEQNSDEISQKGKKLKFNSNNAGGILGGISTGQEITASFAVKPTSSILTTRKTINKFGKNTTISVTGRHDPCVGIRAVPVGEAMMNCVLLDHYLMNKAQCH

SEQ ID NO: 181330 - protein, 211 aa, Unknown
  Bacterial polypetide isolated from the Sargasso Sea
KKYKTVGAVIQLGILGCDTNKWDDKIISKNPFFCPDKSILKLWEKYLLGIRKSGSSCGAVIEVRVKGVPVGLGAPIYSKLDMDLASAMMSINAVKGVNIGSGMNSAFLTGEENSDEIIQKGKSPIFKSNNAGGILGGISSGQDIVISFAVKPTSSILKSRKTIDKFGKNTSISVKGRHDPCVGIRAVPIGEAMAHCVILDHYLMNKAQCEK

SEQ ID NO: 181331 - protein, 353 aa, Unknown
  Bacterial polypetide isolated from the Sargasso Sea
MTSFGESHGKCIGAVLDGCPAGLELEEKDIQKMLDLRKPGQSLVSTQRKEGDIVEILTGTFRGYTTGAPITMVIWNKDQKSIAYEKLRTEMRPGHSDYPAYMKYKKFNDHRGGGRFSGRLTATHVMGGAIARKLLKDTIGVETNSYTTQIGKIKMKKAATKKEFRSIYTNEVRCPEKNTAQKMKSIILDARKKGDSLGGIIESITTNLPVGLGEPIFGSLESDISKAIFSIPAVKGIEFGSGFAGSEKFGSENNDAYVMKGGKVSTKTNNSGGILGGISNGMPITIRIAFKPASSISQIQQSVDIKKKKSIKLQVGGRHDPCVVPRAPPVVDSLVALTIADHALLSGTIKPTL

SEQ ID NO: 181332 - protein, 360 aa, Unknown
  Bacterial polypetide isolated from the Sargasso Sea
MSHNSFGHIFKFTTWGESHGKAIGCVVDGTPPMIELTEKDIQLWLDKRRPGQNQYTSPRNEPDKVEILSGVYIEEKVQYTTGTPISMIIYNKDQKSGDYDDTKEKFRPGHADYTYLSKYGIRDPRGGGRQSARETAMRVAAGAIARKIIPKIEIKGALVQLGDLKIDRSKWDNNFIDENPFWCPDKSSIKDWEDKINSLVAEGDSCGAVIEVVAKNVPVGLGAPIYGKLDSDLGSAIMSINAVKGVEIGNGFEAVSLKGSENGDEMRMKNDKPVFLSNNSGGILGGISSGQDIVVRFAVKPTSSIKKERKTIDKSQNDTEITTKGRHDPCVGIRAVPVGEAMVACVLADHFLRNRAQIGS

SEQ ID NO: 181333 - protein, 163 aa, Unknown
  Bacterial polypetide isolated from the Sargasso Sea
MSFNTFGKIFRFTTWGESHGPAIGCVVDGCPPNISLKEKDIQVELNKRKPGQSKFTTQRKEDDNVNILSGVFEGKTTGTPISMIIYNKDMRSRDYETIKNKFRPGHADFTYFKKYGIRDYRGGGRQSARETAARVAAGAIAKKVLENKIGKKYKVTGAVTQLG

SEQ ID NO: 181334 - protein, 179 aa, Unknown
  Bacterial polypetide isolated from the Sargasso Sea
MSGNTFGKIFKITTFGESHGTAIGCILDGCPPQIELTKEDIQHELNRRKPGQSDVTTQRKEDDAIEILSGVFEGKTLGTPIGMIIYNKDQQSKDYSNIKDVFRPNHADITYQAKYGHRDYRGGGRASARETANWVAAGAIAKKILQKEGVSVSGFVFEIGKIKADTINHKETANKYFFC

SEQ ID NO: 181335 - protein, 295 aa, Unknown
  Bacterial polypetide isolated from the Sargasso Sea
SGVFEGKSTGSPIAMIIDNIDHRTKDYTEIKKKFRPGHADYTYNKKYGIRDFRGGGRSSARETAMRVAAGAIADIILKSYFKDFLIQGCVKQIGPHKIEKNQINWEFSKTNPLFCPNKKVLKVWEDFLEKIRKKGSSAGAIIQLKASGIPPGIGSPVYSKLDSEIASGLMSINAVKGVEIGSGFNLVDIDGAKASDEINIDENNHVTFKSNHSGGILGGISSGQDIEVSFVVKPTSSILTPKESIDTDGNNINIQTKGRHDPCVGIRAVPVGEAMLSFTLADLYLAHKAQVGAIN

SEQ ID NO: 181336 - protein, 272 aa, Unknown
  Bacterial polypetide isolated from the Sargasso Sea
MAGNTIGKLFTVTTSGESHGPGLSAIIDGCPPGLAISETDIQKELNKRRPGQSRFTSQRKETDEVSIMSGVFEGVTTGTPINLVVQNVDQKSKDYTAIKDKFRPGHADFTYYHKYGIRDYRGGGRSSARETVMRVAAGAIARKYLFEKAGIEIFGFLGQLGPIHLEMKDRSFIETNPFFCGDPEKISELESYMDQLRKEGDSIGARINLVATNVPVGLGEPVFDKLEADIAHGLMSINAVKGVEIGAGFSVVNQKGSEHRDEIDTDGFKQNN

SEQ ID NO: 181337 - protein, 326 aa, Unknown
  Bacterial polypetide isolated from the Sargasso Sea
MSGNTFGKLFKITTFGESHGIAMGCILDGCPPQIELTKEDIQHELDKRKPGQSEVTTQRKEDDAVEILSGVFGGKTLGTPIGMIIYNKDQKSKDYSNIKDVFRPNHADITYQAKYGHRDYRGGGRASARETVNWVAAGAIAKKILKKEGVSVHGFVSEIGQVKADSINHKDINNKYFFCDESKLADLDSMFKDLIEEGNSVGAKLGVVVENCPVGLGDPVFEKLDANLAKAIMTINAVKSVSIGNADDLLNLKGSEARDEMTSSGYASNNSGGILGGISNGDDISLSFIIKPTSSIKSKGKTVNKDGEEVDIEVTGRHDPCVGIRA

SEQ ID NO: 181338 - protein, 357 aa, Unknown
  Bacterial polypetide isolated from the Sargasso Sea
MSGNTFGKIFKLTTFGESHGIALGAVIDGCPPNIEINELDIQKELDRRKPGQSKYVTQRKESDKVEVLSGVFEGKTTGTPIGLLVRNTDHKSKDYENIKDKFRPGHADFTYQQKYGIRDFRGGGRASARETVMRVAGGAIAKKVLEKKGVIVRAGVMQIGDIVADSHNFSDVSKNDFNFVDKSKVKALENFFKELIKDQDSIGAKIIVNISGLQPGVGSPVFSKLDAELAKSLMSVNAVKAIEIGTGVDSVTMRGSENRDIISVDGFETNNSGGILGGISNGDDINIFTSLKPTSSISQKTTTTNIDNQKVDLEVKGRHDPCVGLRAVPILEAMAALTIIDQMLIDKAQCFDVERKS

SEQ ID NO: 181339 - protein, 199 aa, Unknown
  Bacterial polypetide isolated from the Sargasso Sea
EVNKIDLTQIDKNPFFCPDSEVLEDIETLIDNLRKEGDSIGAKIEVTVSNMPIGLGEPVFDKLEADLAKGLMSINAVKGFEIGKGFGLIVSKGSDARDEMSPDGFLSNNSGGISGGISTGQDINLSIALKPTSSINKEGKTIDSSGESQEIQVKGRHDPCVGVRATPIAEAMTALVIMDHFLRNRAQNADVVTDIPDYS

SEQ ID NO: 181340 - protein, 255 aa, Unknown
  Bacterial polypetide isolated from the Sargasso Sea
MAGNTIGQIFTLTTFGESHGPALGAIVDGCPPGIEISVEDLQLDLDRRRPGQSKYTTQRREKDQVQILSGVFEGKTTGTSIGLLIQNEDQKSKDYEDIKNIFRPAHADFTYQKKYGLRDYRGGGRSSARETSMRVAAGAIAKKFLSEHVGISVYGYLSAIGELKLACKDREFIVENPFFSGDPDSIDQIASLIDSIRKQGDSIGAQVSVVAEGVPAGLGEPVFDKLDADLAGALMGINAVKAVEIGDGVSVVEQK

SEQ ID NO: 181341 - protein, 365 aa, Unknown
  Bacterial polypetide isolated from the Sargasso Sea
MSGNSIGQLFKVTTFGESHGPAIGGIVDGLPPGLKLDLEQIQLELDRRKPGTSRYTTARREDDIVKILSGVFEGYSTGASIGLLIENTDQRSQDYSAIKDLFRPGHADYTYWHKFGIRDYRGGGRSSARETAVRVAAGAIAKQYLKAKFGIEIRGYLAQLGPVKAQKLDWEQVEQNAFFCPDVDVLEQLDEYMRQLKKDGDSVGARINVVASGVPVGWGEPVFDRIDADIAHAMMSINAVKAVEIGDGFAVVEQRGSTHRDELRLAGFSANHAGGILGGISSGQDINVSIALKPTSSISIPGQTITTSGEETEMITKGRHDPCVGIRAVPIAEAMLAIVLMDHFLRHRAQNADVIVMTPDIARQP

SEQ ID NO: 181342 - protein, 384 aa, Unknown
  Bacterial polypetide isolated from the Sargasso Sea
MLKRLQFLTAGESHGKGLLGIIDGLPSDLEISEEYIDQELKRRQMGHGRGGRMKIEKDHAEIWCGVRHGKTLASPVGILIKNLDWENWTDKMSVEKLDKEIKRVTLPRPGHADLAGIHKYGFDDIRNVLERSSARETTMRVALGTVCRKLLEEVGINIGSRVVQIHNVKDESKYDMNPKKLNQTADSSPVRCLDNKVEKGMIKVIDDAKKSGDSVGGIFEVIATGIPYGLGSYTQWNEKLQARITAMMMSVNAFKGIEIGSGFHSSTQFGSEVHDEIGHDGNKFTRYSNNAGGLEGGMSNAQPIVLWMSMKPISTLIKPLRSVDIDSKEKKKAHKERTDSCAVPAASVISESMLCIVLVDALLEKFGGDSMEQLKSHMKASAKY

SEQ ID NO: 181343 - protein, 150 aa, Unknown
  Bacterial polypetide isolated from the Sargasso Sea
IELRASGVPTGLGAPIYSKLDADIASALMSINAVKGVNIGSGMSSAFLSGEENSDEMRSNSGKVKFKSNNAGGILGGISSGQNIVASFAVKPTSSILNNRETVNKKGKNTNISVKGRHDPCVGIRAVPIGEAMLACVLLDHYLMNKAQCG

SEQ ID NO: 181344 - protein, 362 aa, Unknown
  Bacterial polypetide isolated from the Sargasso Sea
MAGNSFGQLFRVTTFGESHGLALGAVVDGCPPGLEISEADLQGDLDRRKPGTSRYTTPRREPDEVKILSGVFEGKTTGTSIGLLIENTDQRSKDYSDIKDLFRPGHADYTYHQKYGQRDYRGGGRSSARETAMRVAAGAIAKKYLKQVHGIEITGFLSQLGPIKAEAFDAAQIEQNPFFFPDVGKLEALDQYMRDLKKEGNSIGAKVQVIASNVPVGLGEPVFDRLDADIAHAMMGINAVKGVEIGDGFAVVEQKGSEHRDEMTPAGFASNHAGGILGGISSGQDIVVSMALKPTSSITVPGKTITTEGEATEMITKGRHDPCVGIRAVPIAEAMLALVLMDHLLRHRAQNQGVLTHTPQLR

SEQ ID NO: 181345 - protein, 356 aa, Unknown
  Bacterial polypetide isolated from the Sargasso Sea
MTSNSIGKIFNFTTWGESHGKAIGCVVDGVPSNINLTEKDIQPYLDKRKPGQSKFTTQRKEEDKVEILSGTFEGKTTGHPISLIIYNQDQRSKDYGDIKSKFRPGHADYTYWKKYGIRDYKGGGRSSARETAMRVAAGAIARKIIKNKIKNPVIITGALIQIGNYKINYDNWNNNFIPKNNFWSPDRDIIKIWESEIQTARKSGSSLGAIIEIRVKGLPAGLGEPIYEKIDSDLAKALMSINAVKGVEMGNGFSSVYETGISNIDEMRIKNKKPIFLSNNNGGVLGGITTGQELITRFVVKPTSSILSTKKTINTKLKETTISTKGRHDPCVGIRAVPVGEAMVATTIADHCLRFL

SEQ ID NO: 181346 - protein, 88 aa, Unknown
  Bacterial polypetide isolated from the Sargasso Sea
KISFKSNKAGGILGGISSGQEIIASFAVKPTSSILNSRETINKKGKNTKISVKGRHDPCVGIRAVPIGEAMLACVILDQYMMNKAQCS

SEQ ID NO: 181347 - protein, 365 aa, Unknown
  Bacterial polypetide isolated from the Sargasso Sea
MSSSFGKIFRVSTFGESHGGAVGVILDGCPPRLKVDINLIQNELDRRRPGQSDITTPRNEEDKIEILSGIKEGLTLGTPIAMLVRNKDQRPGDYNNLEQVFRPSHADGTYHLKYGIQASSGGGRASARETIGRVAAGAIAKQLLKSFCNTEILSWVKRIHDIDSDINKEKISLKKIDSNIVRCPDEKVSTEMIERIKELKRQGDSCGGVIECLVRNVPSGLGMPVFDKLEADLAKALMSLPATKGFEIGSGFSGTYLKGSEHNDSFIKSDDSSKLKTTSNNSGGIQGGISNGENIEMKIAFKPTATIGKEQKTVNAEGKEVLMKAKGRHDPCVLPRAVPMVDAMVALVLADHLLLNHAQCDLINK

SEQ ID NO: 181348 - protein, 93 aa, Unknown
  Bacterial polypetide isolated from the Sargasso Sea
VDEMILKDGKPSFLSNNNGGILGGISSGQNIVCRFVVKPTSSITSERKTIDINLQETTIATKGRHDPCVGIRAVPVGEAMLATTIADHCLRYF

SEQ ID NO: 181349 - protein, 360 aa, Unknown
  Bacterial polypetide isolated from the Sargasso Sea
MSFNTFGKLFRFSTWGESHGPAIGCIVDGCPPNINLSEKDIQKELDKRKPGQSKFTTQRKEDDKVQILSGIFEGRTTGTPISLIIYNKDMRSKDYGKIKDKFRPGHADFTYFKKYGIRDYRGGGRSSARETASRVAAGAIAKLVLQNKLGKKFKVVGAVTQLGILGCDTNKWNDNIISKNPFFCPDKSMIKLWEKYLLRVRKSGSSCGAVIEIRARGIPVGLGAPIYSKLDSDIASSFMSINAVKGVNIGAGMNSAQLSGEQNSDEISQKGKKLKFNSNNAGGILGGISTGQEIIASFAVKPTSSILTTRNTVNKFGKNTTISVTGRHDPCVGIRAVPVGEAMMNCVLLDHYLMNKAQCQ

SEQ ID NO: 181350 - protein, 105 aa, Unknown
  Bacterial polypetide isolated from the Sargasso Sea
MLTGEENSDEILKKKGKTSFKSNNAGGILGGISTGQEINVSFAVKPTSSILSPRKTIDRFGMNTTISVKGRHDPCVGIRAVPIGEAMMHCVILDHYLMNTAQNKI

SEQ ID NO: 181351 - protein, 361 aa, Unknown
  Bacterial polypetide isolated from the Sargasso Sea
MSFNTFGKIFRFTTWGESHGPAIGCVVDGCPPNIKITEKDIQIELNKRRPGQSKFTTQRKEDDKVNILSGVFEGKTTGTPISMIIYNKDMRSRDYETIKNKFRPGHADYTYFKKYGIRDYRGGGRQSARETASRVAAGAIAKKILQNKLGIKYKVVGAVTQLGILGCDTGKWDEKFISKNPFFCPDKSIVKLWEKYLLSIRKSGSSCGAIIEIRAKGVPIGLGAPIYSKLDMDLAAAMMSINAVKGVNIGSGMNSAQLTGEQNSDEITQKGRKTNFKSNNAGGILGGISSGQEIVISFAVKPTSSILSSRKTIDKFGKNTSISVRGRHDPCVGIRAVPIGEAMMHCVLLDHYLMNAAQCKS

SEQ ID NO: 181352 - protein, 322 aa, Unknown
  Bacterial polypetide isolated from the Sargasso Sea
MTSNSIGKIFNFTTWGESHGKAIGCVVDGVPSNINLTEKDIQPYLDKRKPGQSKFTTQRKEEDKVEILSGTFEGKTTGHPISLIIYNQDQRSKDYGDIKSKFRPGHADYTYWKKYGIRDYRGGGRSSARETAMRVAAGAIARKIIKSKIKNQVLITGALIQIGNHRINYDNWNNNFIPKNNFWSPDKEIVKTWENEIQTARKSGSSLGAIIEIRVKGLPAGLGEPIYEKIDSDIAKALMSINAVKGVEMGNGFSSVFETGISNVDEMRIKNKKPIFLSNNNGGVLGGITTGQELITRFVVKPTSSILSTKKTINKNLKETTI

SEQ ID NO: 181353 - protein, 96 aa, Unknown
  Bacterial polypetide isolated from the Sargasso Sea
KYLKKGKNIKFKSNNAGGILGGISTGQEIIASFAVKPTSSILKSRKTIDKFEKNTSISVKGRHDPCVGIRAVPIGEAMMHCVLLDHYLMNKAQCVN

SEQ ID NO: 181354 - protein, 356 aa, Unknown
  Bacterial polypetide isolated from the Sargasso Sea
MSGNTIGKLFTVTSYGESHGPALGCVVDGCPPGMELCESDMQRDLDRRKPGQSRFTTQRREDDKVKILSGVFEGKTTGTPIGLLIENNDQRSKDYSKIKDRFRPAHADYTYWKKYGVRDYRGGGRSSARETAMRVASGAIAKKFLKEKFSVEIRGYLTQLGPISVENIDFDQIDQNPFFCPDKSKVAEMEEYMSALSKEGNSIGAKIAIEASNVPAGLGEPVFDRLDADIAKALMSINAVKGVEIGSGFDSVAQKGTEHRDEITPEGFLSNNAGGVLGGISSGQDITATIALKPTSSIRIPGKSINTEGEVENVVTTGRHDPCVGIRATPIAEAMLALVLMDHVLRVRGQVGSFLE

SEQ ID NO: 181355 - protein, 360 aa, Unknown
  Bacterial polypetide isolated from the Sargasso Sea
MSGNTFGKLFKITTFGESHGTAMGCILDGCPPQIELTKEDIQNELDKRKPGQSDVTTQRKEDDAVEILSGVFDGKTLGTPIGMIIYNKDQKSKDYSNIKDVFRPNHADITYQAKYSHRDYRGGGRASARETVNWVAAGAIAKKILKKQGVSVHGFVSEIGQVKADSINHKDINNKYFFCDESKLADLDSMFKDLIDEGNSVGAKLGVVVENCPVGLGDPVFEKLDANLAKAIMTINAVKSVSIGNADDLLNLKGSEARDEMTSSGYASNNSGGILGGISNGDDISLSFIIKPTSSIKSKGKTVNKDGEEVDIEVTGRHDPCVGIRAVPIAEAMVSLVLVDHLLINRAQCAEVKQELPFSE

SEQ ID NO: 181356 - protein, 367 aa, Unknown
  Bacterial polypetide isolated from the Sargasso Sea
MSLNSFGHMYKVTTWGESHGPSLGATIDGCPPGIEIDQNKLQVWMDKRKPGQNKYTTQRNEADSVEILSGVFEGVSTGTPIQLVIKNTDQRSKDYSEIAQTFRPGHADITYWQKYGIRDYRGGGRSSARETAARVAAGGVARLVLKHLAPNLEIYGYMTQMGDQKIDRSRIDLNQIDDNPFWCPDLKAVSKWKDYLEKVRKSRDSVGAIIEIIAKNVSPGLGAPIYGKIDTDLAAAMMSINAVKGVEIGEGMNAASLLGSQNADEIFMDGKNGPRYSSNHSGGILGGISTGQDIVVRFAVKPTSSILSPKKTITQKGEETEIITKGRHDPCVGIRAVPVGEAMMACVLLDHYLLHRGQIGENRGQIG

SEQ ID NO: 181357 - protein, 95 aa, Unknown
  Bacterial polypetide isolated from the Sargasso Sea
MSFNTFGKIFRFTTWGESHGPAIGCVIDGCPPNIPISEKDIQKDMDRRRPGQSKFTTQRKESDKAIILSGVFEGKTTGTPISIIIHNEDKRSRDY

SEQ ID NO: 181358 - protein, 186 aa, Unknown
  Bacterial polypetide isolated from the Sargasso Sea
MSFNTFGKLFRFSTWGESHGPAIGCIVDGCPPNIKLNEKDIQIELDKRKPGQSRFTTQRKEADKVQILSGIFEGKTTGTPISLIIYNQDMRSKDYQDIKNKFRPGHADYTYFKKYGIRDYRGGGRSSARETASRVAAGAIAKIVLKNKLGKKFKVIGAVTQLGILGCDTSQWNDKIIKKNPFFCPR

SEQ ID NO: 181359 - protein, 226 aa, Unknown
  Bacterial polypetide isolated from the Sargasso Sea
MSFNTFGKIFRFTTWGESHGPAIGCIIDGCPPNIPISDKEIQKDMDLRRPGQSKFTTQRKESDKVTILSGVFEGKTTGTPISIIIYNEDKRSRDYETIKNKFRPGHADYTYFKKYGIRDYRGGGRQSARETACRVAAGAVAKIVLKKIIGPKYNVIGAVTQLGLMSCDKSNWNNNEIRKNPFFCPDKKSVKLWEKYLLAVRKAGSSCGAIIELRATGVPVGLGAPI

SEQ ID NO: 181360 - protein, 360 aa, Unknown
  Bacterial polypetide isolated from the Sargasso Sea
MSFNTFGKLFRFTTWGESHGPAIGCIVDGCPPNINLKDQDIQIELDKRKPGQSKFTTQRKEDDKVQILSGVFEGKTTGTPISLIIYNKDMRSKDYSNIKDKFRPGHADFTYFKKYGIRDHRGGGRSSARETAARVAAGSIAKVVLQKKLGKKFKVIGAVTQLGILGCDTNQWNDKIISKNPFFCPDKSMIKLWEKYLLGVRKSGSSCGAVIEIRARGIPVGLGAPIYSKLDTDIASGLMSINAVKGVNIGAGMNSAQLTGEQNSDEISSKGNKLKFNSNNAGGILGGISTGQEIIASFAVKPTSSILTSRKTINKFGKNTLISVKGRHDPCVGIRAVPIGEAMMNCVLLDHYLMNKAQCS

SEQ ID NO: 181361 - protein, 364 aa, Unknown
  Bacterial polypetide isolated from the Sargasso Sea
MSGNSIGQNFVVTTFGESHGVALGCIIDGCPPGLELTEADMQHDLDRRRPGTSRYTTARREPDEVRILSGVFEGKTTGTSIGLLIENTDQRSQDYSNIKDLFRPGHADYTYQQKYGLRDYRGGGRSSARETAMRVAAGAVAKKYLKQVHGINIQGYMSQLGPISAETLDFSQIEQNAFFFPDATKLEALDEYMRELKKSGDSIGAKISVVATGVPVGLGEPVFDRLDADIAHALMGINAVKGVEIGDGFGVVTQKGSEGRDLMSPQGFESNHAGGILGGISSGQPIIAHIALKPTSSISVPGQSMTAQGEMAEVVTKGRHDPCVGIRAVPIAEAMLAIVLMDHLLRHRAQNQDVRSHTPILGMR

SEQ ID NO: 181362 - protein, 279 aa, Unknown
  Bacterial polypetide isolated from the Sargasso Sea
SLLIYNEDMRSKDYSDIKDKFRPGHADFTYFKKYGIRDYRGGGRSSARETASRVAAGAVAKKVLEKKLGKKFKISGAVTQLGILGCNTNKWDDKIIYKNPFFCPDKSMLKIWEKYLLSIRKAGSSCGAIIEIRANGIPAGLGAPIYSKLDSDIASAMMSINAVKGVNIGSGMNSAQLSGEENSDEISKSKNKLKFKSNNAGGILGGISSGQQIIVSFAVKPTSSILKSRKTINKFGKNTSISVKGRHDPCVGIRAVPVGEAMLSCVLLDHYLLNQAQCG

SEQ ID NO: 181363 - protein, 183 aa, Unknown
  Bacterial polypetide isolated from the Sargasso Sea
SKNPFFCPDKAMLKIWEKYLLSIRKAGSSCGAIIEVRANGIPAGLGAPIYSKLDSDIASAMMSINAVKGVNIGSGMNSAQLSGEENSDEISQNRKKTKFKSNNAGGILGGISSGQEIIVSFAVKPTSSILKSRKTINKFGKNTSISVKGRHDPCVGIRAVPVGEAMLSCVLLDHYLLHKAQCS

SEQ ID NO: 181364 - protein, 352 aa, Unknown
  Bacterial polypetide isolated from the Sargasso Sea
MSGNTFGKIFRVTTFGESHGKALGCVIDGCPPNIKIDESDIQKDLNRRKPGQSKYTTQRKEDDKVEILSGIFNGVTTGTPITLIIFNKDQKSKDYSEIKNKFRPGHADFTYQKKYGIRDYRGAGRSSARETVARVAAGAIAKKFLNKINKTKIFGYVSQLGEITPDKIKLTDIEKNSFFFPDRKKIPELEKYLMGIRKSGDSIGAKVTIVGKNIPIGIGEPVFDKLDAMLAQAMMSINAVKGVEIGAGFDVVTQKGSEARDEITPKGFLSNFSGGTLGGISTGQDLKINIALKPTSSILVPGKTVDIKNKPTTIRTKGRHDPCVGIRAVPIAEAMMALTLCDLYLRHKAQNL

SEQ ID NO: 181365 - protein, 295 aa, Unknown
  Bacterial polypetide isolated from the Sargasso Sea
MSLNSFGHMYKVMTWGESHGPSLGATIDGCPPGIEINQSKLQVWMDKRKPGQNKYTTQRNEPDSVEILSGVFEGVSTGTPIQLIIKNTDQRSKDYGEIAQTFRPGHADITYWQKYGIRDYRGGGRSSARETAARVAAGGVARLVLKHLAPNLEIYGYMTQMGDQKIDRSRIDLNQIDNNPFWCPDLNAANNWKDYLENVRKSRDSVGAVIEIIAKNVSPGLGAPIYGKIDTDLAAAMMSINAVKGVEVGEGMNAASLLGSENADEIFMDGQNRPRYSSNRSGGILGGITTGQDII

SEQ ID NO: 181366 - protein, 352 aa, Unknown
  Bacterial polypetide isolated from the Sargasso Sea
MSGNTFGKIFKVTTFGESHGKALGCIIDGCPPNLKIDESDIQRDLDRRKPGQSKYTTQRKEDDKIEILSGVFNGLTTGTPIALLIYNKDHKSKDYSEIKNKFRPGHADFTYQKKYGIRDYRGAGRSSARETVARVAAGAIAKKYLSKINKTKIFGYVSQLGEIKAESIKISDIEKNPFFFPDKKKILELEEYLTGIRKAGDSIGAKVTIIGKNIPIGLGEPVFDKLDALLAQGMMSINAVKGVEIGAGFNVVSQKGSEARDEITPKGFLSNFSGGTLGGISTGQDLHVNIALKPTSSILIPGKTIDQKNKPTTIRTKGRHDPCVGIRAVPIAEAMMALTLCDLYLRHKAQNK

SEQ ID NO: 181367 - protein, 253 aa, Unknown
  Bacterial polypetide isolated from the Sargasso Sea
ADITYQGKYGIRDYRGGGRASARETSMRVAAGAVAKKVLKEKGIVISSWVQQIGEIKAENFSNNSSNKYNFCDESKLPQLDELFSQLIDDGDSVGAELGVKISGCKIGLGEPVFDKLDAELAKAIVSINAVKSVSFGNAELFLSKKGSEVRDEMNSDGYLSNNSGGILGGISSGQDIDLSFIIKPTSSIASKSKAVDVDGNEVSLEVKGRHDPCVAIRAVPIAEAMCALCILDHYLRNAAQCSDVNQKLPFNS

SEQ ID NO: 181368 - protein, 195 aa, Unknown
  Bacterial polypetide isolated from the Sargasso Sea
VDHSQVTEQQIEQSIVRCPDTVTSNAMEQRILEVRKKGDSVGGIIRAVSKNVPVGLGEPVFDKLTADLAKALMSLPATRGVEFGLGFQSIALMGSEHNDEYMFEDGNVKTRSNLSAGIQGGISNGEEIDLRIAFKPTATINHEQKTVTREGESTTLSAKGRHDPCVLPRAVPMVEAMINLVLADHYLRQQSSQLH

SEQ ID NO: 181369 - protein, 361 aa, Unknown
  Bacterial polypetide isolated from the Sargasso Sea
MSFNTFGKFFRFTTWGESHGPAIGCVVDGCPPNIKLNIRDIQLELNKRKPGQSKFTTQRKEDDKVEILSGTFEGRTTGTPISMIIFNKDMRSRDYKNIKDKFRPGHADYTYFKKYGIRDYRGGGRQSARETASRVAAGAIAKQVLQNIIGKKYSVIGAVTQLGILGCDTEKWNDSFITKNPLFCPDKTVLKLWEKYLLGIRKAGSSCGAIIEVRARGVPVGLGAPIYSKLDMDLASAMMSINAVKGVNIGSGMNSAQLSGEQNSDEMSQTGKKTKFKSNNAGGILGGISSGQEIIVSFAVKPTSSILSQRKTINKFGKNTSISVTGRHDPCVGIRAVPIGEAMMHCVILDHYLMNKAQCGN

SEQ ID NO: 181370 - protein, 357 aa, Unknown
  Bacterial polypetide isolated from the Sargasso Sea
MSGNTFGTIFKLTTFGESHGLAMGAIIDGCPPNIELNEKMIQMELDRRKPGQSKHVTQRKEPDEIEILSGVFEGKTTGTPIGLLIRNKDQKSKDYEDIKDKFRPGHADFTYLKKYGTRDYRGGGRASARETVMRVAGGAIAKRILSSMEVKISGGVVQIGSIKADSIDLAGISNNSFSFADNSKVNELEEFFEKLRKEQDSIGAKILIRVEGLMPGVGSPVFSKLDAELAKSMMGVNAVKAVELGSGVGVVEMKGSENRDLIKKDGFETNNSGGILGGISNGDDIDIFVSLKPTSSISQKTKTVDTENKEVDLQVKGRHDPCVGLRATPILEAMAAMCILDQILLDRGQCFNVDRDL

SEQ ID NO: 181371 - protein, 154 aa, Unknown
  Bacterial polypetide isolated from the Sargasso Sea
MSFNTFGKLFRFTTWGESHGPAIGCVVDGCPPRIKISEKDIQKELNKRKPGQSKFTTQRKEDDKVEILSGVFNGETTGTPILMIIYNKDMKSRDYETIKNKFRPGHADLTYFKKYGIRDFRGGGRQSARETAARVAAGAIAKKVLEKKIGKKYY

SEQ ID NO: 181372 - protein, 375 aa, Unknown
  Bacterial polypetide isolated from the Sargasso Sea
MLKKISYMTAGESHGKGLIGIIEGIPAGLQLTEEYIAVDLLRRMQGHGRGKRMKIEKDFAEIFSGVRHEHTLGSPISLIIKNLDWVNWEDRMAVGKPKKEHKKVTMPRPGHADLAGMMKYDFDDIRNVLERSSARETAMRVAIGAICRKLLDEAGITIGSRVYQIHDVVDNKEVDHTLTMSKLNDLADKSSVRCLDKDAEERMINVIDEAKSKGDSVGGSFEVIAKGMPYGLGSYINADGKLQARISQAMMSVNAFKGVEVGAGFASSAAFGSELHDEILFENERITRSRNNAGGIEGGMSNAQPIHVKVSMKPISTLIKPLRSIDLNTMEPKLAHKERTDSCAVPAASIIGESMLAIVLADALLEKFGGDSIKQ

SEQ ID NO: 181373 - protein, 362 aa, Unknown
  Bacterial polypetide isolated from the Sargasso Sea
MLGNTFGKIFSVTTFGESHGEAMGCIIDGCPPNFEIKNEDIQMELDRRKPGQSDVTTQRKEDDKVEIMSGVFEGKTLGTPIALLIRNEDQISKDYSNIKDTFRPNHADLTYQAKYGIRDYRGGGRSSARETAMRVAAGAVAKKYLNTHGIITKGFVSQIGSISADTVDLKFVNENKFFFPDRSKISLLEEFFEELIKEGDSIGAKLNIKVQNCPVGLGEPVFDKLNADLAKAMMSINAVKSVSIGNSDMIPFSKGSELRDEITKTGFDSNNSGGILGGISNGDDIDISFLIKPTSSISKATTSIDKDGNEVELEVKGRHDPCVGIRAVPIAEAMVNLVLIDHLLRNKAQCGDVDQKLPFVTE

SEQ ID NO: 181374 - protein, 356 aa, Unknown
  Bacterial polypetide isolated from the Sargasso Sea
MSSNSSGKIFNFNTWGESHGKAIGCVVDGVPSKIELSEEDIQIYLNKRRPGQSKFTTQRKESDQVEILSGVFEGKTTGHPISLLINNEDQKTKDYSDIKDIFRPGHADYTYWSKYGIRDYRGGGRSSARETAMRVAAGAIARKVIKNKIKKEFKITGALVQIGEIKINYDNWNEDFIEKNDFFSPDEKIIEKWEKLILKARKEGSSLGAIIEVRCKGMPVGLGEPVYDKLDADLAKSMMSINAVKGVEIGNGFNSVYESGVSNVDEMRIKNNKPIFLSNNNGGILGGISTGQDIIVRFCVKPTSSILTKRKTIDINYNEKEISTKGRHDPCVGIRAVPVGEAMMATTLADHCLRYL

SEQ ID NO: 181375 - protein, 346 aa, Unknown
  Bacterial polypetide isolated from the Sargasso Sea
MTAGESHGKGLIGIIEGIPAGLQLTEEYIAIDLLRRMQGHGRGKRMKIEKDFAEIFSGVRHEHTLGSPISLIIKNLDWVNWEDRMAVGKPKKEHKKVTMPRPGHADLAGMMKYDFDDIRNVLERSSARETAMRVAIGAICRKLLEEVGISIGSRVYQIHDVVDSDEVDLSLTMSKLNDLADKSSVRCLNKDAENRMINVIDEAKSNGDSVGGSFEVIAKGMPYGLGSYINADGKLQARITQAMMSVNAFKGVEVGAGFASSAVFGSELHDEILFENEKITRSRNNAGGIEGGMSNAQPIHVKVSMKPISTLIKPLRSIDLNTMEPKLAHKERTDSCAVPAASIIGE

SEQ ID NO: 181376 - protein, 170 aa, Unknown
  Bacterial polypetide isolated from the Sargasso Sea
MSGNSFGNSFVVTTFGESHGIALGCVIDGCPPGLDLSKEDIQSELDKRKPGSSKYTTQRKEDDEVEILSGVFEGKTTGTPIGLLIRNKDQKSKDYDDLKDVFRPSHADYVYSKKYGHRDHRGGGRSSARETAMRVAARCIAKKYLSDKQGINVKGYLSQIGTIEVNKIDL

SEQ ID NO: 181377 - protein, 210 aa, Unknown
  Bacterial polypetide isolated from the Sargasso Sea
MSGNTFGKIFSVTTFGESHGEAMGCIIDGCPPNFEIKNEDIQMELDRRKPGQSDVTTQRKEDDKVEIMSGVFEGKTLGTPIALLIKNEDQISKDYSNIKDTFRPNHADLTYQGKYGIRDYRGGGRSSARETAMRVAAGAVAKKYLNTHGIITKGFVSQIGSISADTVDLEFVNKNKFFFPDRSKISSLEEFFEELIKEGDSIGAKLDIKV

SEQ ID NO: 181378 - protein, 88 aa, Unknown
  Bacterial polypetide isolated from the Sargasso Sea
GILGGISNGDDISLSFIIKPTSSIKTKGKTVNKEGKEVDIEVTGRHDPCVGIRAVPIAEAMVSLVLVDHLLINKAQCADIEQKLPFSE

SEQ ID NO: 181379 - protein, 232 aa, Unknown
  Bacterial polypetide isolated from the Sargasso Sea
RVAAGGIAKKYLREVHGIEVSGYLSQLGPIAVENVDHSITNTNPFFCPDENKLDALDEYMRDLKKSGDSIGAKVSVVAKNVPVGLGEPVFDRLDAEIAHAMMGINAVKGVEIGDGFDVINQKGSEHRDTLTPDGFASNHAGGVLGGISTGQDIEVHMALKPTSSISVPGTTINKQNEEIDIVTKGRHDPCVGIRAVPIAEAMMALVLMDHLLRHRAQNMGVVSTTAPIAGSR

SEQ ID NO: 181380 - protein, 317 aa, Unknown
  Bacterial polypetide isolated from the Sargasso Sea
DMNKRKPGQSKFTTQRKESDKVIILSGVFEGKTTGTPISMIIHNEDKKSRDYESIKDKFRPGHADYTYFKKYGIRDFRGGGRQSARETACRVAAGAIAKIVLRKIIGKKFSVVGAVTQLGLMSCDKQNWKDSEIRKNPFFCPDKNSVKLWEKYLLAVRKAGSSCGAVIELRAKGIPVGLGAPIYSKLDTDIAAALMSINAVKGVNIGSGMNAAFLSGEENSDEIRKDLGKIKFKTNHAGGILGGISSGQDIVASFAVKPTSSILNSRETIDKKGKNTKISVKGRHDPCVGIRAVPIGEAMISCVILDHLLMHRAQCG

SEQ ID NO: 181381 - protein, 206 aa, Unknown
  Bacterial polypetide isolated from the Sargasso Sea
EVRANDLESEVKFKKEIDLAKSQRTTVGGIFQIITCGVPVGLGSHVHWDRKLDGQIGQSILSINAVKGVEIGNGFENTTKKGKDVHDVIIPDKNNVKNFKHISNHAGGIEGGMTNGEPIIVNVAIKPIATMTKPLPSVDINTGEIVEAAYNRSDICQVSRACPIGESMIALTLANSFLEKFGGDSMLEIQTNYTSFIKTHKKFGSK

SEQ ID NO: 181382 - protein, 356 aa, Unknown
  Bacterial polypetide isolated from the Sargasso Sea
MTSNSIGKIFNFTTWGESHGKAIGCVVDGVPSNINLTEKDIQPYLDKRKPGQSKFTTQRKEEDKVEILSGTFEGKTTGHPISLIIYNQDQRSKDYGDIKSKFRPGHADYTYWKKYGIRDYRGGGRSSARETAMRVAAGAIARKIIKNKIKNQVVITGALIQIGNHKINYDNWNNNFIPKNNFWSPDKEIIKIWENEIQTARKSGSSLGAIIEIRVKGLPAGLGEPIYEKIDSDIAKALMSINAVKGVEMGNGFSSVYETGISNVDEMRIKNKKPLFLSNNNGGVLGGITTGQELITRFVVKPTSSILSPKKTINTKLKETTISTKGRHDPCVGIRAVPVGEAMVATTIADHCLRFL

SEQ ID NO: 181383 - protein, 308 aa, Unknown
  Bacterial polypetide isolated from the Sargasso Sea
SKFVSQRKESDKIEILSGVFQGKTTGTPISIIIKNEDKRSRDYESIKNKFRPGHADFTYFKKYGIRDFRGGGRQSARETASRVAAGAIAKIVLKKLIGKNFNVIGGVTQLGLMGCDINNWDDNQINKNPFFCPDKKSVKIWEKYLLAVRKSGSSCGAIIEIRARGVPAGLGAPIYSKLDSDIAAALISINAVKGVNIGAGMSSAYLSGEENSDEIRSKSGKIKFKSNNAGGILGGISSGQEIIASFSVKPTSSIINSRETIDKKGKNTKISVRGRHDPCVGIRAVPIGEAMLSCVLLDHYLMNKAQCG

SEQ ID NO: 181384 - protein, 366 aa, Unknown
  Bacterial polypetide isolated from the Sargasso Sea
MSGNTLGTLFTVTTFGESHGPAIGCVIDGCPPGMALNEADIQLELDRRKPGTSRHVTQRQEEDKVEILSGVFEGQTTGAPIALLIRNTDQRSKDYGNIADTFRPGHADYTYWQKYGIRDYRGGGRSSARLTAPTVAAGAVAKKWLREKFGTEIRGYMAALGEIDVPFVDWAHVRENPFFVPNAQIVPELETYMDALRKDGDSIGARINVVASGVPVGLGEPLFDRLDADIAHAMMGINAVKGVEIGAGFASVAQRGSVHGDELTPEGFVGNHAGGVLGGISTGQDITVSIAIKPTSSIRTPRRSINKAGQPAIVETFGRHDPCVGIRATPIAESMLALVLIDHALRHRAQCGDVAVSTPKIAASAS

SEQ ID NO: 181385 - protein, 95 aa, Unknown
  Bacterial polypetide isolated from the Sargasso Sea
ILKKGKKTIFKSNNAGGILGGISTGQDIIVSFAVKPTSSILKKRKTIDKKGRNTSISVKGRHDPCVGIRAVPIGEAMMHCVLLDHYLMNKAQCGD

SEQ ID NO: 181386 - protein, 360 aa, Unknown
  Bacterial polypetide isolated from the Sargasso Sea
MSFNTFGKLFRFTTWGESHGPAIGCIVDGCPPNITLKEQDIQIELDKRKPGQSKFTTQRKEDDKVQILSGVFEGKTTGTPISLIIYNKDMRSKDYSNIKDKFRPGHADFTYFKKYGIRDYRGGGRSSARETAARVAAGAIAKVVLQKKLGKKFKVIGAVTQLGILGCDTNQWNDKVISKNPFFCPDKSMIKLWEKYLLGVRKSGSSCGAVIEIRARGIPVGLGAPIYSKLDTDIASGLMSINAVKGVNIGAGMNSAQLSGEQNSDEISSKGNKLKFNSNKAGGILGGISTGQEIIASFAVKPTSSILTSRKTINKFGKNTSISVKGRHDPCVGIRAVPIGEAMVNCVLLDHYLMNKAQCS

SEQ ID NO: 181387 - protein, 173 aa, Unknown
  Bacterial polypetide isolated from the Sargasso Sea
MSGNTFGTIFKLTTFGESHGLAMGAIIDGCPPNIELNEKMIQMELDRRKPGQSKHVTQRKEPDEIEILSGVFEGKTTGTPIGLLIRNKDQKSKDYEDIKDKFRPGHADFTYLKKYGTRDYRGGGRASARETVMRVAGGAIAKRILSSMEVKISGGVVQIGSIKADSIDLAGIS

SEQ ID NO: 181388 - protein, 356 aa, Unknown
  Bacterial polypetide isolated from the Sargasso Sea
MSGNSFGTIFKVTTFGESHGVAMGAIIDGCPPNIEISEKDIQKELDKRKPGQSAYVTQRNESDAVEILSGVFEGKTTGTPIGLVVKNQDQRSKDYENIKDKFRPGHADFTYFKKYGIRDYRGGGRASARETVMRVAAGAIAKKTLLMFGIEVFGGVVQIGQICADSINLDDVYSNSFFFTDKSKISELEQFFKNLMEAQDSIGAKILIKVKGVGPGLGAPVFSKLDAELAKAVMSVNAVKAFEIGVGADVVTMRGSENNDEISKEGFKTNNSGGILGGISNGEDIDVFASIKPTSSISKNSKTVDIKNEEVDIAIKGRHDPCVGLRATPILESMVAITVLDQHLIDRAQCGDVKRD

SEQ ID NO: 181389 - protein, 360 aa, Unknown
  Bacterial polypetide isolated from the Sargasso Sea
MGDSFGKIFRITTWGESHGAGVGVVIDGCPSGLPLNEDDFQYELDRRKPGQSKITTQRKESDIAKILSGVFEGRTTGASISVMVSNEDAKPHAYEHLKELYRPSHADFTYEKKYGIRDWRGGGRASARETVGRVAAGTIAKKLLFHWGNIQTIAWVEQIHDVKSSVDKKIVGVKQIEASIVRCPDSQASDEMIELIHKARKSGDSVGGIIRAVVRNVPAGLGEPVFDKLTADLAKGLMSLPATRGVEFGLGFDSVKLKGSEHNDSFVMREGVIRTNTNRSGGIQGGISNGEDIDLRVTFKPTATINYEQDTVTRDGKATKLKAKGRHDPCVLPRAVPMVEAMINLVLTDHYLRQQKNFLQ

SEQ ID NO: 181390 - protein, 290 aa, Unknown
  Bacterial polypetide isolated from the Sargasso Sea
MSGNAFGKIFKIMTFGESHGTAMGCILDGCPPEIEISEEDIQLELDRRKPGQSDVTTQRQEDDAVKILSGVFEGKTLGTPIGMIIYNKDQQSKDYSNIKDVFRPNHADITYQAKYGHRDYRGGGRASARETANWVAAGAIAKRILKKEGVKVYGFVSAIGKVRAESINYKDIDNKYFFCDESKLSDLDSMFDDLIKEGNSVGAKLGVIVKNCPVGLGDPVFEKLDANLAKAIMTINAVKSVSVGNVDDLLNLKGSEARDEITTSGFLSNNSGGILGGISNGDDISLSFII

SEQ ID NO: 181391 - protein, 351 aa, Unknown
  Bacterial polypetide isolated from the Sargasso Sea
RFTTWGESHGPAIGCVVDGCPPNINISEKDIQVELNKRKPGQSKFTTQRKEDDNVNILSGVFEGKTTGTPISMIIYNKDMRSRDYETIKNKFRPGHADFTYFKKYGIRDYRGGGRQSARETAARVAAGAIAKKVLQNKIGKKYKVTGAVTQLGILGCDTKKWNDKFISKNPFFCPDKSIVKLWEKYLLSIRKAGSSCGAIIEVRARGVPIGLGAPIYSKLDMDLASAMMSINAVKGVNIGSGMNSAQLTGEQNSDEISQRNKKTNFKSNNAGGILGGISSGQDIIVSFAVKPTSSILTSRKTIDKFGKNTSISVKGRHDPCVGIRAVPIGEAMMHCVLLDHYLMNSAQCKS

SEQ ID NO: 181392 - protein, 145 aa, Unknown
  Bacterial polypetide isolated from the Sargasso Sea
MTSNSIGKIFNFTTWGESHGKAIGCVVDGVPSNINLTEKDIQPYLDKRKPGQSKFTTQRKEDDKVEILSGTFEGKTTGHPISLIIYNQDQRSKDYGDIKSKFRPGHADYTYWKKYGIRDYRGGGRSSARETAMESSSRGNSKKKS

SEQ ID NO: 181393 - protein, 88 aa, Unknown
  Bacterial polypetide isolated from the Sargasso Sea
MSHNTFGHMFRVTTWGESHGPALGCVIDGCPPGIAFTLSDIQTYLDRRKPGQSRFVTQRREADEVKVLSGVLPQEDGVTYITTGTPIS

SEQ ID NO: 181394 - protein, 119 aa, Unknown
  Bacterial polypetide isolated from the Sargasso Sea
VEIGAGFSVVNQKGSEHRDEIDTDGFKQNNSGGTLGGISSGQDIFASIALKPTSSIIKPAETIDKTGEKTEIVTKGRHDPCVGLRATPIGEAMLAIVLMDHFLRNRAQNADVSIEEKGE

SEQ ID NO: 181395 - protein, 261 aa, Unknown
  Bacterial polypetide isolated from the Sargasso Sea
MGSSFGKIFRVTTFGESHGGAVGVILDGCPPKLKINIDLIQNELDRRRPGQSNITTPRNEDDKLEILSGLKEGITLGTPIAMLVRNKDQRPGDYSNLEQVFRPSHADGTYHLKYGIQAGSGGGRASARETIGRVAAGAIAKQLLKNLFNTEILSWVKRIHDIDSQVNKNKLTQSKIDSNIVRCPDDKVASKMIKRIKELQQDGDSCGGVIECLVKNVPSGLGMPVFDKLEADLAKALMSLPATKGFEIGSGFLGTYLRGSE

SEQ ID NO: 181396 - protein, 364 aa, Unknown
  Bacterial polypetide isolated from the Sargasso Sea
MSGNSIGQNFVVTTFGESHGVALGCIIDGCPPGLELTEADMQHDLDRRRPGTSRYTTARREPDEVRILSGVFEGKTTGTSIGLLIENTDQRSQDYSNIKDLFRPGHADYTYQQKYGLRDYRGGGRSSARETAMRVAAGAVAKKYLKQVHGISIQGYMSQLGPISAETLDFSQIEQNAFFFPDASKLEALDEYMRELKKSGDSIGAKISVVATGVPVGLGEPVFDRLDADIAHALMGINAVKGVEIGDGFGVVTQKGSEGRDLMSPLGFESNHAGGILGGISSGQPIVAHIALKPTSSISVPGQSMTAQGEMAEVVTKGRHDPCVGIRAVPIAEAMLAIVLMDHLLRHRAQNQDVRSHTPILGMR

SEQ ID NO: 181397 - protein, 361 aa, Unknown
  Bacterial polypetide isolated from the Sargasso Sea
MSFNTFGKIFRFTTWGESHGPAIGCVVDGCPPNVSINEADIQKELNKRKPGQSKFTTQRKEDDKVNILSGVFEGKTTGTPISMIIYNKDMRSRDYETIKNKFRPGHADFTYFKKYGIRDYRGGGRQSARETASRVAAGAIAKKVLEKKIGKKYYVKGAVTQLGILGCDIKKWDDRFISKNPFFCPDKSILKLWEKYLLSIRKAGSSCGAIIEVRARGVPVGLGAPIYSKLDMDLASAMMSINAVKGVNIGSGMNSAQLRGEQNSDEISQSGNKTKFDSNNAGGILGGISSGQEITVSFAVKPTSSILKSRKTIDRFGKNTSISVKGRHDPCVGIRAVPIGEAMMHCVLLDHYLMHNAQCNS

SEQ ID NO: 181398 - protein, 360 aa, Unknown
  Bacterial polypetide isolated from the Sargasso Sea
MSHNTFGKLFRFTTWGESHGEAIGCVIDGCPPMIPLNEKDIQKYLDKRKPGTSRFVTQRKEDDKVSILSGVFEGKTTGTPILLLIWNKDQKSKDYTEIKNKFRPGHADITYFLKYGMRDYRGGGRSSARETASRVAAGAVARKVISHLSKKKILIQGAVTQIGKMSINPRHFKWNEVRKNSFFCPDKKIISTWEEYLDVTRKNGTSLGARILVNVKNVPSGLGEPIYGKLDAELASAMMSINAIKGVEIGLGNESVEITGDENSDEIRANGKKISFSSNNSGGILGGISSGQDINISIAVKPTSSILKTKKTINNRLNNTTISTKGRHDPCVGLRAVPIAEAMTACVLADHIMRNKAQCG

SEQ ID NO: 181399 - protein, 328 aa, Unknown
  Bacterial polypetide isolated from the Sargasso Sea
MPSNIELNEEMIQMELDRRKPGQSKHVTQRKEPDEIEILSGVFEGKTTGTPIGLLIRNKDQKSKDYEDIKDKLRPGHADFTYLKKYGTRDYRGGGRASARETVMRVAGGAIAKRILSSMEVKISGGVVQIGSIKADSIDLAEISNNSFSFADSSKINELEEFFDKLRKEQDSIGAKILIRVEGLMPGVGSPVFSKLDAELAKSMMGVNAVKAVELGSGVGVVEMKGSENRDLIKKDGFETNNSGGILGGISNGDDIDIFVSLKPTSSISQKTKTVDTENKEVDLQVKGRHDPCVGLRATPILEAMAAMCILDQILLDRGQCFNVDRDL

SEQ ID NO: 181400 - protein, 360 aa, Unknown
  Bacterial polypetide isolated from the Sargasso Sea
MSFNTFGKIFRFTTWGESHGPAIGCIVDGCPPNIPISEKEIQKDMDKRRPGQSKFTTQRKESDKVSILSGVFQGKSTGTPISMIIYNEDKRSRDYESIKDKFRPGHADFTYFKKYGIRDYRGGGRQSARETASRVAAGAIAKIVLKKIIGKKFSIIGAVTQLGIMGCNTSKWKDSEIRKNPFFCPDRSSVNLWEKYLLGIRKSGSSCGAVIELRARGVPVGLGAPIYSKLDADIASALMSINAVKGVNIGAGMGSAYLTGEENSDEIRGGANKIKFKSNKAGGILGGISSGQDIIASFAVKPTSSILNSRETINKKGENTKISVKGRHDPCVGIRAVPIGEAMLACVILDHFMMNKAQCD

SEQ ID NO: 181401 - protein, 228 aa, Unknown
  Bacterial polypetide isolated from the Sargasso Sea
MSFNTFGKNFRFTTWGESHGEAIGCIIDGCPPLIPLKEKDIQKYLDMRKPGKNRFVTQRREDDKVSILSGVFEGKTTGTPIMLLIWNKDQKSKDYSDIKNKFRPGHADLTYFLKYGIRDYRGGGRSSARETASRVAAGAVARKVIGHILKKDILIQGAVTQVGKLTINQRNFNWNDVKKNSFFCPDKKIVKVWEEYLDETRKKGSSLGAKLLVNAKNVPGRTWRTSIW

SEQ ID NO: 181402 - protein, 361 aa, Unknown
  Bacterial polypetide isolated from the Sargasso Sea
MSFNTFGKLFRFTTWGESHGPAIGCIVDGCPPNIPIKEQDIQKELNKRKPGQSKFTTQRKEDDKVQILSGIFEGKTTGTPISLIIYNKDMKSRDYETIKNKFRPGHADFTYFKKYGIRDYRGGGRQSARETASRVAAGAIAKKVLQNKLGKKFKVVGGVTQLGILSCDLKKWNDNEIRKNPFFCPDKNIVKLWKKYLLSIRKSGSSCGAIIEVRARGIPTGLGAPIYSKLDMDIASAMMSINAVKGVNIGSGMNSAVLTGEENSDEIFQKGKKIQFNSNNAGGILGGISTGQEIIVSFAVKPTSSILNSRKTINKFGKNTSISVKGRHDPCVGIRAVPVGEAMLNCVLLDHYLLNKAQCSD

SEQ ID NO: 181403 - protein, 152 aa, Unknown
  Bacterial polypetide isolated from the Sargasso Sea
MIELRAKGIPLGLGAPIYSKLDADIASALMSINAVKSVNIGAGSDVASLTGELNSDEMRIKKGKTKFKTNKAGGILGGISSGQDIICSFAVKPTSSILNSRQTIDKKGKNTNISVRGRHDPCVGIRAVPIGEAMLACVLLDHYLMNKAQCGS

SEQ ID NO: 181404 - protein, 210 aa, Unknown
  Bacterial polypetide isolated from the Sargasso Sea
SVNGFVSEIGSIKANSFDYKKTSNKYFFCDESKLSDLDKMFADLIDKGDSVGARLGIVVENCPVGLGDPVFEKLDANLAKAIMTINAVKSISVGNADDILSLKGSEARDEITSSGYSSNNSGGILGGISNGDDINLSFIIKPTSSIKTKGKTVNTDGKEVNIEVTGRHDPCVGIRAVPIAEAMVSLVLVDHLLINRAQCADVEQKLPFTE

SEQ ID NO: 181405 - protein, 150 aa, Unknown
  Bacterial polypetide isolated from the Sargasso Sea
IEIRARGIPAGLGAPIYSKLDTDIASGLMSINAVKGVNIGAGMNAAQLSGEQNSDEISQKGKKMKFDSNNAGGILGGISSGQEIIASFAVKPTSSILSTRKTINKFGKNTTISVKGRHDPCVGIRAVPIGEAMMNCVLLDHYLMNKAQCG

SEQ ID NO: 181406 - protein, 126 aa, Unknown
  Bacterial polypetide isolated from the Sargasso Sea
GAMMSINAVKGVEIGAGNEAVELSGDENSDEIRANKNKKIIFSSNNSGGILGGISSGQDLNLSITIKPTSSILKAKKTINNKFQNTSISTKGRHDPCVGLRAVPIAEAMMACVLADHILRNRAQCG

SEQ ID NO: 181407 - protein, 354 aa, Unknown
  Bacterial polypetide isolated from the Sargasso Sea
MAGNSFGNIFTLTTFGESHGPALGGIIDGCPAGLKINLNKVNDDLNRRRPGQSEIVTQRKEADSVEFLSGIFKDKTTGTPIGFIIKNRDHKSKDYKHIMNSYRPSHADFVYDKKYGFRDYRGGGRSSARETVVRVVAGSIAKQLIKPVKINAFVSSVGDISMDLDFSKINFNNTEKSIVRCPEPKTAKKMEDLIKKTRKAGDTVGGVVSCVIRNTPIGLGEPVFNKLHSELGRAMLSINAVKGFEFGSGFEGSKMKGSEHNDIFTKEGKTKTNLSGGIQGGISNGMDIYFNVAFKPVSTIMRDQETINSKGKTIKIKGKGRHDPCVVPRAVPIVEAMSAIVIADFYLLNRLSKI

SEQ ID NO: 181408 - protein, 360 aa, Unknown
  Bacterial polypetide isolated from the Sargasso Sea
MSGNTFGKIFKITTFGESHGTAMGCILDGCPPQIELKKEDIQYELDRRKPGQSDVTTQRKEDDAVEILSGVFEGKTLGTPIGMIIYNKDQKSKDYSNIKDVFRPNHADITYQAKYGHRDYRGGGRASARETANWVAAGAIAKKILKNEGVSVNGFVSEIGKVKADSINHKNINNKYFFSDESKLSELDSMFKDLIEEGNSVGAKLGVIVENCPVGLGDPVFEKLDANLAKAIMTINAVKSVSIGNADDLLSLKGSEARDEITTSGFTSNNSGGILGGISNGDDISLSFIIKPTSSIKTKGKTVNKEGNEVDIEVTGRHDPCVGIRAVPIAEAMVSLVLVDHLLINKAQCADVEQNLPFSE

SEQ ID NO: 181409 - protein, 285 aa, Unknown
  Bacterial polypetide isolated from the Sargasso Sea
TGTPISMIIYNKDMRSRDYETIKNKFRPGHADYTYFKKYGIRDYRGGGRQSARETASRVAAGAIAKKVLENKLGNKYKVVGAVTQIGILGCDTSKWDEKFISKNPFFCPDKSIIKLWEKYLLSIRKSGSSCGAIIQVRAKGVPIGLGAPIYSKLDMDLAAAMMSINAVKGVNIGSGMNSAQLTGEQNSDEIIQKGKKTNFKSNNAGGILGGISSGQDIIVSFAVKPTSSILSSRKTIDKFGKNTSISVKGRHDPCVGIRAVPIGESMMHCVLLDHYLMNVAQCKS

SEQ ID NO: 181410 - protein, 360 aa, Unknown
  Bacterial polypetide isolated from the Sargasso Sea
MSGNTFGKIFKITTFGESHGTAMGCILDGCPPQIELTKEDIQHELDRRKPGQSDVTTQRKENDAVEILSGVFEGKTLGTPIGMIIYNKDQKSKDYSNIKDVFRPNHADITYQAKYGHRDYRGGGRASARETVNWVAAGAIAKKILKKEGVSVNGFVSEIGKVKADAINHKDINNKYFFCDESKLSDLDLMFNDLIEEGNSVGAKLGVVVENCPVGLGDPVFEKLDANLAKAIMTINAVKSVSIGNAEDLLSLKGSEARDEITSSGYSSNNSGGILGGISNGDNISLSFIIKPTSSIKTKGKTVNKDGKEVDIEVSGRHDPCVGIRAVPIAEAMVSLVLVDHLLINRAQCGEVDQELPFSE

SEQ ID NO: 181411 - protein, 277 aa, Unknown
  Bacterial polypetide isolated from the Sargasso Sea
MSFNSFGKVLKFTTFGESHGPSIGCVIDGVPPNLKIDEKIIQPYLDRRKPGTSKFVTQRREDDRVKILSGVFEGKSTGTPIAMIIDNIDHRSKDYTEIKKKFRPGHADYTYNKKYGIRDFRGGGRSSARETAMRVTAGAIADIILKSYFKDFLIQGCVKQIGPHKIEKNQINWEFSKTNPLFCPNKQALKVWEDFLEKVRKEGSSAGAIIQLKASGIPPGIGSPVYSKLDSEIASGLMSINAVKGVEIGSGFNLVDIDGTKASDEINIDENNNVTFK

SEQ ID NO: 181412 - protein, 207 aa, Unknown
  Bacterial polypetide isolated from the Sargasso Sea
MSGNTFGKIFTLTTFGESHGKALGCIIDGCPPGIDLSESDIQIDLDRRKPGQSKYTTQRKESDKVEILSGTFEGKTTGTPISLIIFNEDQRSKDYGEIKDKFRPGHADYTYSKKYGFRDYRGAGRSSARETVARVAGGAVAKKVLKDMIGLDIFGYVSQIGEHKPSKISKNDIESNPFFFPDKSMISTLEDYINAIRKSGDSIGAEV

SEQ ID NO: 181413 - protein, 218 aa, Unknown
  Bacterial polypetide isolated from the Sargasso Sea
MDEKLNIKIRGYLSQIGALKITSIDFDEINNNPFFCPDGSIVSDIEHLIDTLRKEGDSTGAKIEVSVINLPVGLGEPVFDKLEADLAKALMSINAVKGFEVGRGFGLVDSKGSESRDEMSPEGYLTNNSGGISGGISTGQEIKLSIALKPTSSITKEGQTIDSTGESKSIQVKGRHDPCVGVRATPIAEAMTALVLMDHYLRNRAQNADVKSEIPDLS

SEQ ID NO: 181414 - protein, 181 aa, Unknown
  Bacterial polypetide isolated from the Sargasso Sea
PLFCPDKSILKLWEKYLLGIRKSGSSCGAIIEIRARGIPVGLGAPIYSKLDMDLASAMMSINAVKGVNIGSGMNSALLTGEENSDEIVQKGKSPIFKSNNAGGILGGISSGQEIIVSFAVKPTSSILSSRKTIDKFGKNTSISVKGRHDPCVGIRAVPIGEAMIHCVLLDHFLMNKAQCGK

SEQ ID NO: 181415 - protein, 366 aa, Unknown
  Bacterial polypetide isolated from the Sargasso Sea
MSGNTLGTLFTVTTFGESHGPAIGCVIDGCPPGMGLTEADIQVELDRRKPGTSRHVTQRQEADEVEILSGVFEGVTTGTPIALLIRNTDQRSKDYGNIVETFRPGHADYTYWQKYGIRDYRGGGRSSARLTAPIVGAGAVAKKWLRERFGVEVRGYMSGLGEIDVPFVDWSHVHENPFFSPNAAVVPELEAYMDALRKDGDSIGARIDVVASGVPVGWGEPVFDRLDADIAKAMMSINAVKGVEIGAGFDSVAQRGSVHGDELTPAGFVGNHAGGVLGGISTGQDITVSIAIKPTSSIRTPRRSITKAGEEATVETFGRHDPCVGIRATPIAESMLALVLIDHALRHRAQCGDVETSTPKIAGSAT

SEQ ID NO: 181416 - protein, 322 aa, Unknown
  Bacterial polypetide isolated from the Sargasso Sea
MSFNTFGKIFRFTTWGESHGPAIGCIIDGCPPNIPISEKEIQIDMDRRRPGNTKFVSQRKESDKIEILSGVFDGKSTGTPISILIRNEDKRSRDYESIKNKFRPGHADFTYFKKYGIRDFRGGGRQSARETASRVAAGAIARIVLKNLLGKKFSIYGAVIQLGLMGCDRKNWNNKEIRKNPFFCPDKKSVKLWEKYLMAVRKSGSSCGAIIELRANGIPAGLGAPIYSKLDTDIAGALMSINAVKGVNIGAGMGAAYLSGEENSDEMRSKSGKAKFKSNNAGGILGGISSGQEIIASFAVKPTSSIINSRETIDKKGKNTKI

SEQ ID NO: 181417 - protein, 288 aa, Unknown
  Bacterial polypetide isolated from the Sargasso Sea
MSGNSYGKSFVVTTFGESHGVALGCIIDGCPPGLELNAEDIQKDLDKRKPGSSKYTTQRKEDDSVEILSGVFEGKTTGTPIGLLIRNKDQKSKDYDDLKDVFRPSHADYTYTKKYGFRDHRGGGRSSARETTMRVAAGAIAKKYLKESVGVSIKGYLSQIGNIKIKQIDLSEVDKNPFFCPDTQIVERIETLIDELRSEGDSVGARIEIMASNLPVGLGEPVFDKLDADIAKGLMSINAVKGVEIGNGFDLVSARGSDSRDEITPEGFKTNSSGGIAGGISTGQEIIA

SEQ ID NO: 181418 - protein, 155 aa, Unknown
  Bacterial polypetide isolated from the Sargasso Sea
MWSNNEVRARGVPLGLGAPIYSKLDMDLAAAMMSINAVKGVNIGSGMNSAMLTGEENSDEILKKKGKTSFKSNNAGGILGGISTGQEINVSFAVKPTSSILSSRKTIDRFGKNTTISVKGRHDPCVGIRAVPIGEAMMHCVILDHYLMNTAQNKI

SEQ ID NO: 181419 - protein, 356 aa, Unknown
  Bacterial polypetide isolated from the Sargasso Sea
MSSNSIGKIFSFSTWGESHGKAIGCVIDGVPSNIELSENDIQPYLNLRKPGQSKYTTQRKEDDKVEILSGVFEGKTTGHPISLIIYNNDQRSKDYSEIKDKFRPGHADFTYWKKYGIRDYRGGGRSSARETAMRVAAGAVARKVIWKKINNKVKITGALIQIGKSKINYDNWNESNIHENDFFCPDEKIIPIWQDLITQARKDGSSLGAIIEVRASGVPAGLGEPIYDKLDSDIAKALMTINAVKGVEIGNGFGSVNEDGKTNVDEMSIKDGKPAFLSNNNGGILGGISSGQDIICRFVVKPTSSISTERKTIDINLKETTISTKGRHDPCVGIRAVPVGEAMIATTIADHILRFL

SEQ ID NO: 181420 - protein, 170 aa, Unknown
  Bacterial polypetide isolated from the Sargasso Sea
MGKIFIGVSEKQDLHAGAIIEVRARGVPVGLGAPIYSKLDMDLASAMMSINAVKGVNIGSGMNSAQLSGEQNSDEMSKKGKKTKFYSNNAGGILGGISSGQEIVVSFAVKPTSSILSQRKTIDKFGKNTSISVKGRHDPCVGIRAVPIGEAMMHCVILDHYLLNKAQCGN

SEQ ID NO: 181421 - protein, 286 aa, Unknown
  Bacterial polypetide isolated from the Sargasso Sea
MGTPIALLIKNEDQISKDYSNIKDTFRPNHADLTYQGKYGIRDYRGGGRSSARETAMRVAAGAVAKKYLNTHGIITKGFVSQIGSISADTVDLEFVNKNKFFFPDRSKISSLEEFFEELIKEGDSIGAKLNIKVQNCPVGLGEPVFDKLNADLAKAIMSINAVKSVSIGNSDKIPFSKGSELRDEITKTGFDSNNSGGILGGISNGDDIDISFLIKPTSSISKATTSIDKDGNEVELEIKGRHDPCVGIRAVPIAEAMVNLVLIDHLLRNQAQCGDVDQKLPFVTE

SEQ ID NO: 181422 - protein, 80 aa, Unknown
  Bacterial polypetide isolated from the Sargasso Sea
GDDISLSFIIKPTSSIKTKGKTVNKDGEEVDIEVTGRHDPCVGIRAVPIAEAMVSLVLADYLLINRAQNAEVKQELPFSE

SEQ ID NO: 181423 - protein, 361 aa, Unknown
  Bacterial polypetide isolated from the Sargasso Sea
MSFNTFGKIFRFTTWGESHGPAIGCVVDGCPPNIKINIDEIQKDLNKRKPGQSKFTTQRKEDDRVEILSGIFEGKTTGTPISMIIYNKDMRSKDYGNIKNKFRPGHADFTYFKKYGIRDYRGGGRQSARETASRVAAGGIAKQILKFILGKKYDVVGGVTQLGILGSNPKNWNEKFIKKNQLFCPDKSVLKLWEKYLLSIRKAGSSCGAIIEIRAKGVPVGLGAPIYSKLDMDLASAMMSINAVKGVNIGSGMNSAQLTGEENSDEINQRGKSTKFNSNNAGGILGGISSGQDIIVSFAVKPTSSILSTRKTIDKFGKNTTISVKGRHDPCVGIRAVPIGEAMMHCVILDHYLLNKAQCGN

SEQ ID NO: 181424 - protein, 109 aa, Unknown
  Bacterial polypetide isolated from the Sargasso Sea
MNSAQLTGEQNSDEISQKGKKTSFKSNNAGGILGGISTGQNIVLSFAVKPTSSILNSRKTIDKFGKNTSISVKGRHDPCVGIRAVPIGEAMMHCVILDHYLMHNAQCKS

SEQ ID NO: 181425 - protein, 260 aa, Unknown
  Bacterial polypetide isolated from the Sargasso Sea
MSFNTFGKIFRFTTWGESHGPAIGCVIDGCPPNISIKEKDIQNELNKRRPGQSKFTTQRKEDDKINILSGVFEGKTTGTPISLLIYNKDMRSRDYETIKNKFRPGHADFTYFKKYGIRDYRGGGRQSARETAARVAAGAVAKMVLEKKIGKKYKVTGGVTQLGILGCNLKNWNDNFISKNPFFCPDKSIVKIWEKYLLSIRKAGSSCGAIIEIRAKGVPLGLGAPIYSKLDMDLAAAMMSINAVKGVNIGSGNELGPTYW

SEQ ID NO: 181426 - protein, 103 aa, Unknown
  Bacterial polypetide isolated from the Sargasso Sea
NSVYETGISNVDEMKIKNKKPIFLSNNNGGVLGGITTGQELITRFVVKPTSSILSTKKTINTKLKETTISTKGRHDPCVGIRAVPVGEAMIASTIADHCLRFL

SEQ ID NO: 181427 - protein, 200 aa, Unknown
  Bacterial polypetide isolated from the Sargasso Sea
MSFNTFGKIFRFTTWGESHGPAIGCIIDGCPPNIPISEKEIQVDMDRRRPGNTKFVSQRKESDKIEILSGIFNGKSTGTPISILIKNEDKRSRDYESIKNKFRPGHADFTYFKKYGIRDFRGGGRQSARETASRVAAGAIARIVLKNLLGKKFSVYGAVIQLGLMSCDRKNWNNKEIRKNPFFCPDKKSVKLWEKYLIAV

SEQ ID NO: 181428 - protein, 84 aa, Unknown
  Bacterial polypetide isolated from the Sargasso Sea
GITNGDLIELEFIVKPTSSIKSKGQTINTAGEEVKVEVTGRHDPCVGIRAVPIAEAMINLVLMDHLLRNQAQCGKVDQSSPFKN

SEQ ID NO: 181429 - protein, 391 aa, Unknown
  Bacterial polypetide isolated from the Sargasso Sea
MIRFLTSGESHGPELTGIIEGLPSGFLVTKEYIDSFLQRRQKSLGSGGRMNIESDQVEISSGIINNLTTGGPITLKIKNNDWKNWKDKDIDPYVVPRPGHADLVGTAKYDAKDIRLILERSSARETAMRCAIGAIASQILENFDIHICGYVSGIGSLEYLYKGTDGIKNLQNKVTESSVSCPDDKISKEMENEIKLARKKKDTLGGSITTIATGVPPTLGSFVHWDRKLDANMARIFMSIQSVKAVEIGNGIEVSKNYGTEVQDQYFLDQENIKKESNNLGGFEGGMTNGEDIVVKAYLKPISTTLTPIKSINLSTKNETETVYERSDTCAVPRAVPIFESAMALEILKNLLIKTGGDSKKEITKNFENISKLHLDEFDLDNKTWNMKYET

SEQ ID NO: 181430 - protein, 152 aa, Unknown
  Bacterial polypetide isolated from the Sargasso Sea
MSFNTFGKNFRFTTWGESHGDAIGCVIDGCPPLIPLKEKDIQKYLDMRKPGKNRFVTQRREDDKVSILSGVFEGKTTGTPIMLLIWNKDQKSKDYSDIKNKFRPGHADLTYFLKYGIRDYRGGGRSSARETASRVAAGAVARKVIGHILKKD

SEQ ID NO: 181431 - protein, 361 aa, Unknown
  Bacterial polypetide isolated from the Sargasso Sea
MSFNTFGKLFRFTTWGESHGPAIGCVVDGCPPNIPIKESDIQKELNKRKPGQSKFTTQRKEDDKINILSGVFEGRTTGTPISLIIYNKDMRSRDYETIKNKFRPGHADYTYFKKYGIRDYRGGGRQSARETAARVAAGAIAKVVLKSKIGKKYQAVGAVTQLGILGCDLKKWKDKTISSNPFFCPDKTVIKLWEKYLLGIRKAGSSCGAIIEVRARGVPLGLGAPIYSKLDMDLAAAMMSINAVKGVNIGSGMNSAMLTGEENSDEILKKKGKTSFKSNNAGGILGGISTGQEINVSFAVKPTSSILSSRKTIDRFGKNTTISVKGRHDPCVGIRAVPIGEAMMHCVILDHYLMNAAQNKI

SEQ ID NO: 181432 - protein, 360 aa, Unknown
  Bacterial polypetide isolated from the Sargasso Sea
MSHNSFGNLLKFTTWGESHGEAIGCVVDGFPAGIPINTKYIQTRLDLRKPGQSKFTTQRKEKDEVNILSGVFNGKSTGAPISMIIYNSDQRSKDYSEIKNKFRPGHADYTYFMKYKNYDYRGGGRSSARETAMRVAAGALSELLLKKISKNKINVTSAVIQIGNEKIENSTWNNNFIYNNPFFSPNKSVLKKWEDLILTHRKKGSSLGAVIEVRVSNCPVGIGEPIYQKLDSELSKAIMSINAVKGIEFGTGFDLVNYDGTNGSDQINFKNKKIKFHTNHAGGILGGISSGQDIIFRYIVKPTSSVLSEKNTVTKNFKNTKIKTKGRHDPCVGIRAVPVGIAMTNFVIADLLLIHKSKSL

SEQ ID NO: 181433 - protein, 357 aa, Unknown
  Bacterial polypetide isolated from the Sargasso Sea
MSGNTFGTIFKLTTFGESHGLAMGAIVDGCPPNIELNEEIIQAELDRRKPGQSKHVTQRKEPDRVEILSGVFEGKTTGTPIGLLIKNTDQKSKDYEDIKDKLRPGHADYTYFKKYGIRDYRGGGRASARETVMRVAGGAIAKKILSSMKIKISGGVVQIGSVKAKSIDLSAVLDNSFSFVDSSKINELEDFFNKLRKEQDSIGAKILIRIEGLMPGIGSPVFSKLDAELAKSMMGVNAVKAVELGSGTKVVEMKGSENRDLIKKDGFETNNSGGILGGISNGDDIDIFVSLKPTSSISQSTKTVDTENNEVDLQVKGRHDPCVGLRATPILEAMAAMCILDQILLDRGQCSNVDRDL

SEQ ID NO: 181434 - protein, 158 aa, Unknown
  Bacterial polypetide isolated from the Sargasso Sea
MGDSFGHLFRITTWGESHGGGVGVVIDGCPAGLEISESEIQYEMDRRRPGQSKITTQRKESDSVRILSGIFEGKTTGTAISIMVENQDARPQAYEHLKDLYRPSHADYTYEAKYGFRNWMGGGRASARETIGRVAAGALAKKLLKQWNGTQTLAWVEQ

SEQ ID NO: 181435 - protein, 172 aa, Unknown
  Bacterial polypetide isolated from the Sargasso Sea
TAVKWADFLDDVRKKGSSAGAVVEIEINGIPAGLGEPIYGKLDSDLANAMMSINAVKGVEIGDGFDLVTTPGELASDEIRISDGEPVFLTNKAGGILGGISTGQPIIVRFAIKPTSSILTPRRSIDKFGNDVEVRTKGRHDPCVGIRAVPVGEAMAACVLADHVLRHQAQCF

SEQ ID NO: 181436 - protein, 360 aa, Unknown
  Bacterial polypetide isolated from the Sargasso Sea
MSHNTFGSIFKFTTWGESHGKAIGCVVDGTPPMIELLEKDIQLWLDKRRPGQNQYTSPRNEPDQVEILSGVYEKEGIQYTTGTPISMVIYNKDQKSRDYDDTKDKFRPGHADYTYLSKYGIRDPRGGGRQSARETAMRVAAGAIARKIIPEIEIKGALVQLGDLKIDKTKWDDDFINENPFWCPDKSSINSWEDKINSLVDEGDSCGAIIEIIAKNVPVGLGAPVYGKLDSDLGSAIMSINAVKGVEIGNGFDAVNLKGSENGDEMRMKNNKPAFLSNNSGGILGGISSGQDIIVRFAVKPTSSIRKKRKTIDKTQKDTEITTKGRHDPCVGIRAVPVGEAMVACVLADHFLRNRAQIGN

SEQ ID NO: 181437 - protein, 360 aa, Unknown
  Bacterial polypetide isolated from the Sargasso Sea
MSGNAFGKIFKIMTFGESHGTAMGCILDGCPPEIEISEEDIQLELDRRKPGQSDVTTQRQEDDAVQILSGVFEGKTLGTPIGMIIYNKDQQSKDYSNIKDVFRPNHADITYQAKYGHRDYRGGGRASARETANWVAAGAIAKKILKKEGVEVNGFVSAIGKVRAESINYKDIDNKYFFCDESKLTDLDSMFDNLIKEGNSVGAKLGVIVKNCPVGLGDPVFEKLDANLAKAIMTINAVKSVSVGNVDDLLNLKGSEARDEITTSGFSSNNSGGILGGISNGDDISLSFIIKPTSSIKTKGKTIDKDGKEVDIEVTGRHDPCVGIRAVPIAEAMVSLVLVDHFLINKAQCADVKQNLPFSE

SEQ ID NO: 181438 - protein, 250 aa, Unknown
  Bacterial polypetide isolated from the Sargasso Sea
MGSSFGDLFRISTFGESHGGGVGVIVEGCPPRLNLSVESIQAELDRRKPGQSHITTPRKEADQVEILSGLLDGETTLGTPIAMVVRNKDQRPGDYKDMAVAFRPSHADATYQAKYGIQARSGGGRASARETIGRVAAGAIAKQLLKQAAGTEILAWVKRIHTIEASGIDPQQVQLSDVEANIVRCPEPAIAERMIERIEAIGREGDSCGGVIECVVRHPAIGLGMPVFDKLEADLAKAVMSLPATKGFEI

SEQ ID NO: 181439 - protein, 288 aa, Unknown
  Bacterial polypetide isolated from the Sargasso Sea
GKTTGTPISMIIYNKDMRSRDYETIKNKFRPGHADYTYFKKYGIRDYRGGGRQSARETATRVAAGAIAKKVLEAKLGKKFNVVGAVTQLGILGCDLNNWRDKEISKNPLFCPDKSVLKLWEKYLLSIRKAGSSCGAIIEVRARGVPVGLGAPIYSKLDMDLAAAMMSINAVKGVNIGSGMNSAQLTGEQNSDEISKKGKTTNFYSNNAGGILGGISSGQEIVVSFAVKPTSSILSQRKTIDKFGKNTSISVTGRHDPCVGIRAVPIGEAMMHCVILDHYLLNKAQCGN

SEQ ID NO: 181440 - protein, 361 aa, Unknown
  Bacterial polypetide isolated from the Sargasso Sea
MSFNTFGKLFRFTTWGESHGPAIGCVVDGCPPNVPIKESDIQKELNKRKPGQSKFTTQRKEDDKINILSGVFEGKTTGTPISLIIYNKDMRSRDYETIKNKFRPGHADYTYFKKYGIRDYRGGGRQSARETAARVAAGAIAKVVLKNKIGAKYQAVGAVIQLGILGCDINKWKDKTISTNPFFCPDKSVIKLWEKYLLGIRKAGSSCGAIIEIRARGVPLGLGAPIYSKLDMDLAAAMMSINAVKGVNIGSGMDSAMLTGEENSDEILQRKGKTSFKSNNAGGILGGISTGQEIKISFAVKPTSSILSSRKTIDKFGKNTTISVKGRHDPCVGIRAVPIGEAMMHCVILDHYLMNTAQNKI

SEQ ID NO: 181441 - protein, 393 aa, Unknown
  Bacterial polypetide isolated from the Sargasso Sea
MKIRYLTAGESHGPELTAILEGIPSNFIITKEYIDSFLSRRQKSLGSGGRMNIEKDEVLISSGVVNNKTTGGPIALKIINRDWNNWKDKEVEPFVVPRPGHADLVGTLKYNHEDIRIALERASARETAIRCAVGAIAHQILDQLNISIIGFVSSIGKQELDVSKFITDTDLKDSIYNSEVSCPDEETSKLMIDEIKSARKKKDTLGGSITCVAKNFPPACGSYVHFDRKLDAIISSSMMSVQSVKAVEIGDGFDSSKKFGTEVQDQIVLNEKKVERITNNLGGFEGGMTTGEPIVVTSYLKPISTTLTPIKSVNLVEQAETETNYERSDTCAVPRAVPIFESVFSIDLLNSLLEKTGGDSKEEIHSRVVKLQEFTIDDISLSNKNWNMKYENE

SEQ ID NO: 181442 - protein, 336 aa, Unknown
  Bacterial polypetide isolated from the Sargasso Sea
CVIDGCPPNISISEKDIQKDMDRRRPGQSKFTTQRKESDKVNILSGVFEGKTTGTPISIIIHNEDKKSRDYESIKNKFRPGHADYTYFKKYGIRDFRGGGRQSARETACRVAAGAVAKIVLKKIIGVKFNIIGAVTQLGLMSCDKQNWKDSEIRKNPFFCPDKQSIKLWEKYLLAVRKAGSSCGAVIELRASGVPIGLGAPIYSKLDTDIAAALMSINAVKGVNIGSGMNSAFLSGEENSDEIKKIGGKVKFKTNHAGGILGGISSGQNIVASFAVKPTSSILTSRETIDKKGKNTKISVKGRHDPCVGIRAVPIGEAMISCVILDHLLMHRAQCG

SEQ ID NO: 181443 - protein, 360 aa, Unknown
  Bacterial polypetide isolated from the Sargasso Sea
MGSSFGHLFRISTFGESHGGGVGVIVDGCPPQLAIDLGAVQAELDRRKPGQSKITTPRKEDDRVEVLSGLLDGVSLGTPIAMVVRNKDQRPGDYKEMQVAFRPSHADATYQSKYGIQARSGGGRASARETIGRVAAGAVAKQMLKQLHGTEVLAWVKRIHTLEASIDPAQPTLEAVEANIVRCPDDAMAQQMIERIESIGRDGDSCGGVIECVVRQPPAGLGMPVFDKLEADLAKAVMSLPATKGFEIGSGFAGTTLLGSQHNDAFLPTTDGSLHTATNNSGGIQGGISNGEPIVVRVAFKPTATIRKEQQTITASGDATTLAAKGRHDPCVLPRAVPMVEAMVALVLADHALRQRGQCG

SEQ ID NO: 181444 - protein, 203 aa, Unknown
  Bacterial polypetide isolated from the Sargasso Sea
GPHKIDRNNWDWDQVDQNPFWSPDKNMASHWANFLDEVRKKGSSAGAVVEIVVTGVPAGLGEPIYGKLDSDLASAMMSINAVKGVEIGDGFDLVSTPGELASDEIRMLDGQPDFLTNKAGGILGGISTGQPIIVRFAIKPTSSILTPRRSIDRFDNEVEVRTKGRHDPCVGIRAVPVGEAMAACVIADHVLRHQAQCLSNSTL

SEQ ID NO: 181445 - protein, 361 aa, Unknown
  Bacterial polypetide isolated from the Sargasso Sea
MAGNTIGKLFTVTTSGESHGPGLSAIIDGCPPGLAISEKDIQKELNKRRPGQSRFTSQRKETDEVSIMSGVFEGLTTGTPINLVVQNVDQKSKDYSAIKDKFRPGHADYTYFHKYGIRDYRGGGRSSARETVMRVAAGAIARKYLFEKVGIEIFGFLGQLGPIHLEMKDREFIETNPFFCGDPDKISELESYMDQLRKEGDSIGARINLMATNVPVGLGEPVFDKLEADIAHGLMSINAVKGVEIGAGFSVVNQKGSEHRDEIDTDGFKQNNSGGTLGGITSGQDIFASIALKPTSSIIKPADTIDKTGEKTEIVTKGRHDPCVGLRATPIGEAMLAIVLMDHFLRNRAQNSDVSFEDKGD

SEQ ID NO: 181446 - protein, 101 aa, Unknown
  Bacterial polypetide isolated from the Sargasso Sea
MSGNSFGKSFVVTTFGESHGVALGCIIDGCPPGLEIKAEDIQKDLDKRKPGSSKYTTQRKEDDSVEILSGVFEGKTTGTPIALIIKNKDQKSKDYDKLKDV

SEQ ID NO: 181447 - protein, 304 aa, Unknown
  Bacterial polypetide isolated from the Sargasso Sea
MSSSFGKIFRVSTFGESHGGAVGVILDGCPPKLKIDINLIQNELDRRRPGQSDITTPRNEEDKIEILSGIKEGLTLGTPIAMLVRNKDQRPGDYNNLEQVFRPSHADGTYHLKYGIQASSGGGRASARETIGRVAAGAVAKQLLKTFCNTEILSWVKRIHDIDSDINKEKISLKKIDSNIVRCPDEKVSTEMIERIKELKRQGDSCGGVIECLVRNVPSGLGMPVFDKLEADLAKALMSLPATKGFEIGSGFSGTYLKGSEHNDAFIKSDDISKLRTTSNNSGGIQGGISNGENIEMKIALNLQ

SEQ ID NO: 181448 - protein, 202 aa, Unknown
  Bacterial polypetide isolated from the Sargasso Sea
IADQIDFKEINNNAFFFPDKTKLKSLEDLIASLREAGDSVGAKIKINVNNVPAGLGEPVFDKLDADLAHGLMSINAVKGVELGLGFDVVSKKGSEHRDEIDRDGFASNNAGGILGGISSGQPIDIAIALKPTSSISTEGKTVDKSGKETTVQSIGRHDPCVGLRAVPIAESMVAIILLDHYLRNRAQNNDVENSSYTIPTSE

SEQ ID NO: 181449 - protein, 360 aa, Unknown
  Bacterial polypetide isolated from the Sargasso Sea
MSFNTFGKLFRFTTWGESHGTAIGCIVDGCPPNINLEEKGIQLELDKRKPGQSKFTTQRKEDDKVQILSGVFEGKTTGTPISMIIYNKDMRSKDYGNIKDKFRPGHADFTYFKKYGIRDYRGGGRSSARETASRVAAGAIAKLVLQKKLGKKFKVIGAVTQLGILGCDTSQWNDKIISKNPFFCPDKSMIKLWEKYLLGVRKSGSSCGAVIEVRARGIPAGLGAPIYSKLDSDIASAFMSINAVKGVNVGAGMNSAQLSGEQNSDEISSKNNKLKFNSNNAGGILGGISSGQEIIASFAVKPTSSILTTRKTINKFGKNTTISVKGRHDPCVGIRAVPVGEAMMNCVLLDHYLMNQAQCR

SEQ ID NO: 181450 - protein, 338 aa, Unknown
  Bacterial polypetide isolated from the Sargasso Sea
CIIDGCPPNFEIKNEDIQMELDRRKPGQSDVTTQRKEDDKVEIMSGVFEGKTLGTPIALLIKNEDQISKDYSNIKDTFRPNHADLTYQGKYGIRDYRGGGRSSARETAMRVAAGAVAKKYLNTHGIITKGFVSQIGSISADTVDLEFVNENKFFFPDRSKISSLEEFFEELIKEGDSIGAKLNIKVQNCPVGLGEPVFDKLNADLAKAIMSINAVKSVSIGNSDKIPLSKGSELRDEITKTGFNSNNSGGILGGISNGDDIDISFLIKPTSSISKATTSIDKDGNEVELEIKGRHDPCVGIRAVPIAEAMVNLVLIDHLLRNQAQCGNIDQKLPFVTE

SEQ ID NO: 181451 - protein, 244 aa, Unknown
  Bacterial polypetide isolated from the Sargasso Sea
GGRQIFRRETTMRVAAGSIAKKYLKELVGIDIKGYLSQIGNIKIKKIDLSEVDNNPFFCPDPEIIENIENLIDELRSEGDSVGARIEIMASNLPVGLGEPVFDKLDADIAKGLMSINAVKGVEIGSGFDLVSAKGSESRDEITPEGFKTNSSGGIAGGISSGQEIIAGIALKPTSSIVKEGDTVDTSGKATKVKVTGRHDPCVGIRATPIAEAMMALVLMDHFLRNRAQNADVVSETPDIPSKK

SEQ ID NO: 181452 - protein, 110 aa, Unknown
  Bacterial polypetide isolated from the Sargasso Sea
SLKGSEARDEITASGFTSNNSGGILGGISNGDDISLSFIIKPTSSIKTKGKTVNKEGNEVDIEVTGRHDPCVGIRAVPIAEAMVSLVLVDHLLINKAQCADVEQNLPFSE

SEQ ID NO: 181453 - protein, 185 aa, Unknown
  Bacterial polypetide isolated from the Sargasso Sea
DPSAVESIAELIDSLRREGDSIGAEVTVMATGMPIGLGEPVFDKLDSDLASALMSINAVKGVGIGDGFSVVNQRGSEHRDEMTKYGFLSNHAGGTLGGISSGQDLLVKMALKPTSSIVTPGRSIDKIGDEIEVVTKGRHDPCVGIRATPIGEAMVAMVLMDHYLRYRGQIDHFNLGELQVTESTD

SEQ ID NO: 181454 - protein, 353 aa, Unknown
  Bacterial polypetide isolated from the Sargasso Sea
KLFRFTTWGESHGPAIGCIVDGCPPNIYIKEQDIQKELNKRKPGQSKFTTQRKEDDKVKILSGVFQGKTTGTPISMIIYNKDMRSKDYGNIKDKFRPGHADLTYFKKYGIRDYRGGGRSSARETASRVAAGAIAKIVLQKKLGKNFQVIGAVTQLGILGCDTNEWNDKIINKNPFFCPDKSMIKIWEKYLLGVRKSGSSCGAIIEIRARGVPAGLGAPIYSKLDSDIASGLMSINAVKGVNIGSGMNSAQLSGEQNSDEISQSGKKLKFNSNNAGGILGGISSGQEIIASFAVKPTSSILTSRKTINKFGKNTTISVRGRHDPCVGIRAVPVGEAMMNCVLLDHYLMHKAQCG

SEQ ID NO: 181455 - protein, 359 aa, Unknown
  Bacterial polypetide isolated from the Sargasso Sea
NSFGSSFIVTTFGESHGVALGCIVDGCPPGLELCEEDIQKELDKRKPGSSKYTTQRKEDDKVEILSGVFEGKTTGTPIGLLIRNKDQKSKDYDQLKDVFRPSHADYVYSKKYGIRDHRGGGRSSARETAMRVAAGAIAKKYLSEKLDIKIIGYLSQIGSITISNFDSSQISLNPFFCPDPEVLTSIEDLIDKLRKDGDSVGAKIEVSVTNMPIGLGEPVFDKLEADLAKGLMSINAVKGFEIGKGFDLIHSKGSESRDEMTSEGYLSNNSGGISGGISTGQEIKLSIALKPTSSINKEGKTIDSGGESKKIQVKGRHDPCVGVRATPIAEAMTALVIMDHFLRNRAQNADVITEIPDIS

SEQ ID NO: 181456 - protein, 317 aa, Unknown
  Bacterial polypetide isolated from the Sargasso Sea
IQAELDRRKPGQSKHVTQRKEPDRVEILSGVFEGKTTGTPIGLLIKNTDQKSKDYEDIKDKLRPGHADYTYFKKYGIRDYRGGGRASARETVMRVAGGAIAKKILSSMKIKISGGVVQIGSVKAKSIDLSTVSDNSFSFADSSKINELEDFFDKLRKEQDSIGAKILVRIEGLMPGIGSPVFSKLDAELAKSMMGVNAVKAVELGSGTKVVEMKGSENRDLIKKDGFETNNSGGILGGISNGDDIDIFVSLKPTSSISQSTKTVDTENNEVDLQVKGRHDPCVGLRATPILEAMAAMCILDQILLDRGQCSNVDRDL

SEQ ID NO: 181457 - protein, 307 aa, Unknown
  Bacterial polypetide isolated from the Sargasso Sea
KFTTQRKEDDKVNILSGVFEGRSTGTPISLVIYNKDMRSRDYETIKNKFRPGHADYTYFKKYGIRDYRGGGRQSARETASRVAAGAIAKKVLETKLGKKFKVVGAVTQLGILGCDVSKWNDNYIKKNQLFCPDKSIIKLWEKYLLSVRKSGSSCGAIIEVRARGVPPGLGAPIYSKLDMDLAAAMMSINAVKGVNIGSGMNSAQLSGEQNSDEIFNKGKKTNFNSNNAGGILGGISSGQEIVVSFAVKPTSSILSSRKTIDKFGKNTSISVKGRHDPCVGIRAVPIGEAMMNCVLLDHYLMHKAQCK

SEQ ID NO: 181458 - protein, 375 aa, Unknown
  Bacterial polypetide isolated from the Sargasso Sea
MIHNLNKIIYIVYFMSFNTFGKIFRFTTWGESHGPAIGCVVDGCPPNININEQDIQKELNKRKPGQSKFTTQRKEDDKVNILSGIFNGKTTGTPISMIIYNKDMRSRDYETIKNKFRPGHADYTYFKKYGIRDYRGGGRQSARETASRVAAGAIAKKVLEKKIGSKYNLIGAVTQLGILGCNVKKWNDKFISKNPFFCPDKSIVKLWEKYLLSIRKAGSSCGAIIELRARGVPVGLGAPIYSKLDMDLASAMMSINAVKGVNIGSGMNSAQLTGEQNSDEISQKGSKAKFASNNAGGILGGISSGQEIIVSFAVKPTSSILTSRKTINTFGKNTSISVKGRHDPCVGIRAVPIGEAMMHCVLLDHYLMNQAQCSY

SEQ ID NO: 181459 - protein, 266 aa, Unknown
  Bacterial polypetide isolated from the Sargasso Sea
HEQFVVDMIQGGAGTSTNMNANEVIANIALEAMGFEKGQYQHLHPNNDVNMAQSTNDAYPTAIRLGLLLGHDSLLGALDKLIQSFAAKGLEFGHVLKMGRTQLQDAVPMTLGQEFRAFATTLGEDLQHLKLLAPTLLTEVNLGGTAIGTGINADPKYQALAVKRLAIISGHPLTPAVDLIEATSDMGAFVLFSGMLKRTAVKLSKICNDLRLLSSGPRTGINEINLPARQPGSSIMPGKVNPVIPEAVNQVAFEVIGNDLALTMAA

SEQ ID NO: 181460 - protein, 326 aa, Unknown
  Bacterial polypetide isolated from the Sargasso Sea
APKEVSNDLYYGVHTLRAVENFKISTQKISDVPEFVRGMVLTKKAAALANGELGTIRPEIADKIVEACDLMLNTGKCFDQFPVDVYQGGAGTSVNMNTNEVLANIALEIMGLAKGRYDVINPNDHVNKCQSTNDAYPTGFRVAVVNSTDTTLFALEALIAAFDAKAAEFKGILKMGRTQLQDAVPMTLGQEFHAFAVTLREEIKSIKRCQELLLEVNLGATAIGTGLNTPPEYSALAIKRLAEITGRAYVPAEDLIEATSDCGAYVMLHGAIKRMAMKLSKICNDLRLLSSGPRTALKEINLPEMQAGSSIMPAKVNPVIPEVVNQ

SEQ ID NO: 181461 - protein, 282 aa, Unknown
  Bacterial polypetide isolated from the Sargasso Sea
GKCMDQFPVDVFQGGAGTSVNMNTNEVLANIGLELMGHQKGEYQYLNPNDHVNKCQSTNDAYPTGFRIAVYASLLKLTDAINQLGDGFQNKAVEFQDVLKMGRTQLQDAVPMTLGQEFHAFNVLLNEEIKSILRTGELLLEVNLGATAIGTRLNTPDGYQQLAVQKLAEVSGLPVIPAEDLIEATSDCGAYVMVHSSLKRLAVKLSKICNDLRLLSSGPRAGLNEINLPELQAGSSIMPAKVNPVVPEVVNQVCFKVIGNDTTVTMASEAGQLQLNVMEPVI

SEQ ID NO: 181462 - protein, 473 aa, Unknown
  Bacterial polypetide isolated from the Sargasso Sea
MISVMSSAASFRTEKDLLGVLEVPAQAYYGIQTLRAVNNFRLSGVPISHYPKLVVGLAMVKQAAADANRELGQLSEAKHAAISEACARLIRGDFHEEFVVDMIQGGAGTSTNMNANEVIANIALEAMGHQKGEYQYLHPNNDVNMAQSTNDAYPTAIRLGLLLGHDALLASLDSLIQAFAAKGAEFSHVLKMGRTQLQDAVPMTLGQEFRAFATTLGEDLARLKTLAPELLTEVNLGGTAIGTGINADPRYQALAVQRLATISGQPLVPAADLIEATSDMGAFVLFSGMLKRTAVKLSKICNDLRLLSSGPRTGINEINLPARQPGSSIMPGKVNPVIPEAVNQVAFQVIGNDLALTMAAEGGQLQLNVMEPLIAFKIFDSIRLLQRAMDMLREHCIVGITANEARCRELVEHSIGLVTALNPYIGYENATRIARIALESGRGVLELVREEGLLDDAMLDDILRPENMIAPRL

SEQ ID NO: 181463 - protein, 241 aa, Unknown
  Bacterial polypetide isolated from the Sargasso Sea
MRSHGVTVVEYEEDYGVAVEQGRKAAESDPNCFFIDDENSRTLFLGYAVAGQRLKAQFAQQGRVVDADHPLFVYLPCGVGGGPGGVAFGLKLAFGDNVHCFFAEPTHSPCMLLGIYTGLHDTISVQDIGIDNLTAADGLAVGRASGFVGRAMERLLDGLYTLDDQTMYDMLGWLAQEEGIRLEPSALAGMAGPQHVCASTDYQQMHGFSADQLNNATHLVWATGGGMVPETEMAQYLAKGR

SEQ ID NO: 181464 - protein, 436 aa, Unknown
  Bacterial polypetide isolated from the Sargasso Sea
QLTQQFPLLQSLIALEPVSWFNPKATTLVEGLPHVGLDGRDVADASARLARFAPYLCEAFPETRASKGIIESDIAAIPAMLRALNARYGVKVSGRLLLKKDSHLPISGSIKARGGIYEVLTHAEQLAIKAGLLCEEDDYRKLFTDEFRHFFSQYSIAVGSTGNLGMSIGIMSARLGFRVTVHMSADAREWKKRKLREHGAIVVEYAEDYGVAVEQGRKEAERDPTCFFIDDENSRTLFLGYAVAGERVKKQFDEMGIVVDADHPLFVYLPCGVGGGPGGVAFGLKLAFGDHVHCLFAEPTHSPCMLLGVHTGLHDAIAVQDLGIDNLTAADGLAVGRASGFVGRAMERLLAGFYTLSDQEMYDLLGLLARAEQIKLEPSALAGMAGPWRVAANLAWQAGQGLDAARMARATHLVWATGGGMVPAEEMEKYLVSARC

SEQ ID NO: 181465 - protein, 231 aa, Unknown
  Bacterial polypetide isolated from the Sargasso Sea
PYSLRCQPQVMGACLAQIRFAASVLLVEANGVTDNPLVFAAEDDIISGGNFHAEPVAMAADNLALAIAEIGSISERRMALLIDSHLSKLPAFLVNNGGVNSGFMIAQVTAAALASENKSLAHPASVDSLPTSANQEDHVSMATFAARRLADMAENTLGVLAVEYLAAAQGMDFRAPLKGAAAVEQAKALLRKEVSFYDVDRYFAPDIEKAAELLRHGRLNSLLPANLLSSF

SEQ ID NO: 181466 - protein, 327 aa, Unknown
  Bacterial polypetide isolated from the Sargasso Sea
MSDSRFSSTIIDDQHSDRSTIYHVDGVKHLKLIPGTLTLDQLREVYRSPIQLSLDESAIPAINAAEQAVLNVIKENRTVYGINTGFGLLANTRINVDELELLQRSIVLSHAAGTGDFMQEDTVRLLMLLKINSLARGYSGIRLSVINALIKLFNAQVYPAIPEKGSVGASGDLAPLAHMSVVLLGEGEAFHKGKRINATEALNIAGLAPIALAPKEGLALLNGTQASTAFALQGLFYTENALYSAIGIGALTVEAALGSRVPFDARIHKVRGHKSQSDVAEAFRRLLASSEIGRSHQGCEKVQDPYSLRCQPQVMGASLQQMRYAQE

SEQ ID NO: 181467 - protein, 96 aa, Unknown
  Bacterial polypetide isolated from the Sargasso Sea
EDHVSMATFAGRRLADMAENTRGILAVELLAAAQGLDFRAPLRSTELIELAKGRLREEVSFYDKDRYFAPDIEAAAALLGRASYNDLLPAGVLPSL

SEQ ID NO: 181468 - protein, 216 aa, Unknown
  Bacterial polypetide isolated from the Sargasso Sea
MDQMRFAAHQLRVEANAVTDNPLVFPEEGEILSGGNFHAEPVAMIADNLALAIAEIGALSERRISLLTDPGFSKLPAFLSEDPGLHSGFMVAQITSASLASENKSLAHPASVDSLPTSANQEDHVSMATFAARRLGEMSENTAKILGIELLAACQGIDFRRPLKTSYLLEEAHQMVRQRVPHLDQDRPLAPDIEDASVIIRRGLFNGWMRPQLLSD

SEQ ID NO: 181469 - protein, 280 aa, Unknown
  Bacterial polypetide isolated from the Sargasso Sea
REGEAFYKGERISAAQALEIAGMQPIALAPKEGLALLNGTQASTAFALQGLFYTENALHSAIGIGALTVEAALGSRVPFDARIHEVRGHKSQSDVATAFRTLLDTSEIGHSHQRCEKVQDPYSLRCQPQVMGACLQQMRYAQGILVVEANGVSDNPLVFVENNDDADTPTGDILSGGNFHAETVAMAADMLAIALSEIGALSERRMSLMIDTHLSGLPPFLVENGGVNSGFMIAQVTCAALASENKTLAHPASIDSLPTSANQEDHVSMATFAARHLRDI

SEQ ID NO: 181470 - protein, 252 aa, Unknown
  Bacterial polypetide isolated from the Sargasso Sea
SGVKWTTIKQIEQIINSGIVPEIPHQGSVGASGDLAPLAHMAAVMIGEGFAFYNGEKLSGFEALKRAGIEPITLGPKEGLALLNGTQFSTACALASLLDAWRSVLNSIVISSLSTDAIMGSTSPLLPQIHELRGHKGQIFVASKMRELMDGSVIRESHRENDQRVQDPYCIRCQPQVLGASLDILKNASVTIDIETKAVTDNPLVLVDENKIVSGGNFHAEPIGFAADQIALALAEIGSISQRRIALMVDPT

SEQ ID NO: 181471 - protein, 285 aa, Unknown
  Bacterial polypetide isolated from the Sargasso Sea
GALTLEAIKGSITPFDERIHEARGQKGQIDVAKELSKLIDGSEILKSHANCDRIQDPYSVRCQPQVMGACLDSIRYIASILSIEANAVTDNPLVFADDNEIISGGNFHAEPVALVADQLAVAIAEMGSISERRSALLVDSNLSGLPPFLIKKSGLNSGFMIHQVTAAALVSENKLFAHPASVDSIPTSANQEDHVSMATHAAYRLMNMNENLSYILAIELLSASQGIEFHKPLKTSSLLQKALAEVRTFSEPIEDDRSLANEIEALSGALIKGPCFWARVIKYSM

SEQ ID NO: 181472 - protein, 201 aa, Unknown
  Bacterial polypetide isolated from the Sargasso Sea
VSDNPLVFAAEGEVISGGNFHAEPVAMAADNIALAIAEIGSLSERRVSLMMDKHMSQLPPFLVANGGVNSGFMIAQVTAAALASENKALSHPHSVDSLPTSANQEDHVSMAPAAGKRLWDMAANTRGVLAVEWLGACQGLDFREGLKSTPALEQARQALRAKVPYYVEDRFFAPDIAAADALLAERVLTPLLPAGMLPSVG

SEQ ID NO: 181473 - protein, 189 aa, Unknown
  Bacterial polypetide isolated from the Sargasso Sea
MELLIQPGKLTLADLRKAYLNPIKVKLDDSASDAINASVACVEKIVNEGRTAYGINTGFGLLASTKIAPEDLEKLQRSLVLSHAAGVGEALDDAMVRLIMLLKANSLARGFSGIRRKVIDAILALINAEVYPHIPLKGSVGASGDLAPLAHMSLVLLGESKARYKGEWLPAVEALKKAGLEPISTCCKR

SEQ ID NO: 181474 - protein, 289 aa, Unknown
  Bacterial polypetide isolated from the Sargasso Sea
LKRVGIEPITLGPKEGLALLNGTQFSTACALANLLDAWRSVLNSIVISSLSTDAIMGSTSPLLPQIHELRGHKGQIFVASKMRELMDGSVIRESHRENDQRVQDPYCIRCQPQVLGASLDILKNAAVTIDIETKAVTDNPLVLFDENKIVSGGNFHAEPIGFSADQIALALAEIGSISQRRIALMVDPTLSYDLPPFLTDDAGLNSGFMIAEVTSAALMSENKHLANPCVTDSTPTSANQEDHVSMSAHGAYRLFKMNKNLNSIFGIELLCAAQGVETRKPLKTSRIAS

SEQ ID NO: 181475 - protein, 229 aa, Unknown
  Bacterial polypetide isolated from the Sargasso Sea
YSLRCQPQVLGACLDQMRFAAQQLRIEANAVTDNPLVFPEEGEILSGGNFHAEPVAMIADNLALAIAEIGALSERRISLLTDPGFSKLPAFLSEDPGLHSGFMVAQITSASLASENKSLAHPASVDSLPTSANQEDHVSMATFAARRLGEMSENTAKILGIELLAACQGIDFRRPLTTSYLLEEAHQMVRQRVPHLDQDRPLAPDIEDASVIIRRGLFNGWMRPQLLSD

SEQ ID NO: 181476 - protein, 214 aa, Unknown
  Bacterial polypetide isolated from the Sargasso Sea
VTIDIETKAVTDNPLVLVDQNKIVSGGNFHAEPIGFAADQIALALAEIGSISQRRIALMVDPTLSYDLPPFLTDDAGLNSGFMIAEVTSAALMSENKHLANPCVTDSTPTSANQEDHVSMSAHGAYRLFKMNKNLNSIFGIELLCAAQGVESRQPLKTSPLLQNAVDELRKDVPRLNEDRFVANDINNVSNLLDKKNILKSSKLDLPISTFFNL

SEQ ID NO: 181477 - protein, 209 aa, Unknown
  Bacterial polypetide isolated from the Sargasso Sea
MTTLNLKPGQLTLADLRAAYQAPVHLTLDASAHQAIDASVACVNQIIAEGRTAYGINTGFGLLASTRIANDDLEKLQRSLVLSHAAGIGEPLSDAMVRLIMLLKINSLARGFSGIRRQVIDALIALVNAEVYPHIPLKGSVGASGDLAPLAHMSLVLLGESQARHKGQWLPATEALAIAGLEPMTLAAKEGLALLNGTQVSTAYALRGL

SEQ ID NO: 181478 - protein, 288 aa, Unknown
  Bacterial polypetide isolated from the Sargasso Sea
NVINSDMCIELGKNAQNAIIDCRNYLENKIATSKELHYGINTGFGALCNTAISNEDLAKLQRNLVLSHACGMGKFIPKRIVRLMMLLKIISLSHGHSGIQKETVDRLIFLYNEKITPLVFEQGSLGASGDLAPLAHLSLPLIGEGDVIFKEKRVSCISVLKLYDKKPLVLGAKEGLALLNGTQFMCAFAIDSIIKSNKLWHNWNKIASLSLDAYACKSESFLPHPNEIRKQSGQIQTAKEISSILNGSNLFANKKEHVQDPYSFRCIPQVHGATKDSLNHFETVMKMR

SEQ ID NO: 181479 - protein, 199 aa, Unknown
  Bacterial polypetide isolated from the Sargasso Sea
IALAPKEGLALLNGTQASTAFALEGLFHAEDLYAGAITIGAMSVEAALGSRRPFDARIHAVRGQRGQIDAAACYRHLLVDGSEIGMSHHNCEKVQDPYSLRCQPQVMGACLTQIRQAAEVLVCEANAVSDNPLVFAEDEDILSGGNFHAEPVAFAADNLALAIAEIGSLSERRMALLIDSRMSGLPAFLVTTAASTPAS

SEQ ID NO: 181480 - protein, 227 aa, Unknown
  Bacterial polypetide isolated from the Sargasso Sea
LRCQPQVLGACLDQMRFAAQQLRVEANAVTDNPLVFPEEGEILSGGNFHAEPVAMIADNLALAIAEIGALSERRISLLTDPGFSKLPAFLSEDPGLHSGFMVAQITSASLASENKSLAHPASVDSLPTSANQEDHVSMATFAARRLGEMSENTAKILGIELLAACQGIDFRRPLTTSYLLEEAHQMVRQRVPHLDKDRPLAPDIEDASVIIRRGLFNGWMRPQLLSD

SEQ ID NO: 181481 - protein, 219 aa, Unknown
  Bacterial polypetide isolated from the Sargasso Sea
GACLDQMRFAAQQLRIEANAVTDNPLVFPEEGEILSGGNFHAEPVAMIADNLALAIAEIGALSERRISLLTDPGFSKLPAFLSEDPGLHSGFMVAQITSASLACENKSLAHPASVDSLPTSANQEDHVSMATFAARRLGEMSENTAKILGIELLASCQGIDFRRPLTTSYLLEEAHQMVRQRVPHLDRDRPLAPDIEDASVIIRRGMFNGWMRPQLLID

SEQ ID NO: 181482 - protein, 308 aa, Unknown
  Bacterial polypetide isolated from the Sargasso Sea
VSFGRGASGVRWNIVELLEKMLEKGVMPVIPAQGSVGASGDLAPLAHMTAAMIGEGKSEYNGTIFHGADALTEAGLFPITLGPKEGLAFINGTQFSTAFALAGLFEAWHAAQNSIITSAMSTDAIMGSTAPTQPEIHALRGHRGQCEVANSMRVLLAGSEIRESHIEGDSRVQDPYCIRCQPQVTGAAMDVLRQASNTLEIEANAATDNPLVIAKSNRIVSGGNFHAEPVGFAADMIALAIAEVGAISQRRVALMVDPSLNHNLPPFLTPEPGLNSGLMMAEVTTAALMSENKHLATPCVTDSTPNQC

SEQ ID NO: 181483 - protein, 291 aa, Unknown
  Bacterial polypetide isolated from the Sargasso Sea
MRYLLDLADVVGAMSIEGMQGSGSPFRPELHQIRPFAGNIEVAARMRRLFKDSQNMASHFGCARVQDPYSLRCIPQVHGASRNAYYHLKELVEIEMNSVTDNPIVISAEEALSGGGFHGQPLAMALDYTSIAAAELGNISDRRCYLLLEGLHGLPRLLTKAGGLNSGLMIPQYTTAALVTENKSLCFPPSADSVPTSMGQEDHVSMGSISGRKLNQILGNLEKILAIELMYAAQAIEFRRPHTCSDLIEENHAIIRAKVAKLEEDRLLKPDIDAMIQLVRNQAFHVAFAVN

SEQ ID NO: 181484 - protein, 513 aa, Unknown
  Bacterial polypetide isolated from the Sargasso Sea
MKSVNHLVLTPGSLSLAQLREISRHKLTLELAPEAINDINTSAQIVQKVLDEGRTVYGINTGFGLLANTKIAPEDLQLLQRSIVLSHAAGTGQYMQDATVRLMMVLKINSLSRGFSGIRLEVINFLISLVNAEVYPCVPEKGSVGASGDLAPLAHMCLPLLGEGEMSYQGQIISAAEGLEIAGLKPIDLAAKEGLALLNGTQASTALALEGLFHAEDLFAASSVIGAMSVEAAMGSRSPFDPRIHAARGQKGQIDSAMVFRHLLGEESEISLSHANCEKVQDPYSLRCQPQVLGACLTQIRQAAEVLGTEANGVTDNPLVFQDTGDIISGGNFHAEPVAMAADNLAIAIAELGAIAERRIALLIDSSLSKLPPFLVKNGGVNSGFMIAQVTAAALASENKTYAHPASVDSLPTSANQEDHVSMATFAARRLRDMSENTRGVLAIELLAAAQGLDFRAPLAPSDAVAKAKAELREVVAYYDKDRYFAPDIEAATDLLYTASFNTYLPQGVLPSL

SEQ ID NO: 181485 - protein, 527 aa, Unknown
  Bacterial polypetide isolated from the Sargasso Sea
MSHSSFFTENGGVKQLNLVPGTLTLDQLREVHRSHVHLSLDESAVPAINAAEQVVLNVIKENRTVYGINTGFGLLANTRINVDELELLQRSIVLSHAAGTGDFMQEDTVRLLMLLKINSLARGYSGIRLSVIEALITLFNAQVYPAIPEKGSVGASGDLAPLAHMSVVLLGEGEAFYKGERISAAQALEIAGMQPIALAPKEGLALLNGTQASTAFALQGLFYTENALHSAIGIGALTVEAALGSRVPFDARIHEVRGHKSQSDVATAFRTLLDTSEIGHSHQRCEKVQDPYSLRCQPQVMGACLQQMRYAQEILVVEANGVSDNPLVFVENNDDADTPTGDILSGGNFHAETVAMAADMLAIALSEIGALSERRMSLMIDTHLSGLPPFLVENGGVNSGFMIAQVTCAALASENKTLAHPASIDSLPTSANQEDHVSMATFAARRLRDIFDNVAGILAIEWLAACQGLDFRKPFKTSEKLQVLMQLLRDQVPFYDKDRYFAPDIEKAKQLIKQHDLMDKTQLNLLG

SEQ ID NO: 181486 - protein, 331 aa, Unknown
  Bacterial polypetide isolated from the Sargasso Sea
KLGLEPLELQPKEGLALLNGTQVSTALALHGLFASENCLASSIVAGSLSVEASLSSYRPFDKRIHQVRGLKGQIDVAANFRQLLNESEINASHENCGHVQDPYSLRCQPQVLGACLDQMRFAAQQLRVEANAVTDNPLVFPEEGEILSGGNFHAEPVAMIADNLALAIAEIGALSERRISLLTDPGFSKLPAFLSEDPGLHSGFMVAQITSASLASENKSLAHPASVDSLPTSANQEDHVSMATFAARRLGEMSENTAKILGIELLAACQGIDFRRPLTTSYLLEEAHQIVRQRVPHLDQDRPLAPDIEDASVIIRRGLFNGWMRPQLLSD

SEQ ID NO: 181487 - protein, 513 aa, Unknown
  Bacterial polypetide isolated from the Sargasso Sea
MKSVNHLVLTPGSLSLAQLREISRHKLTLELAPEAITEINTSAQIVQKVLDEGRTVYGINTGFGLLANTKIAPEDLQLLQRSIVLSHAAGTGQYMQDATVRLMMVLKINSLSRGFSGIRLEVINFLISLVNAEVYPCVPEKGSVGASGDLAPLAHMCLPLLGEGEMSYQGQIISAAEGLEIAGLKPIDLAAKEGLALLNGTQASTALALEGLFHAEDLFAASSVIGAMSVEAAMGSRSPFDPRIHAARGQKGQIDAAMVFRHLLGEESEISLSHLNCEKVQDPYSLRCQPQVLGACLTQIRQAAEVLGTEANGVTDNPLVFQDTGDIISGGNFHAEPVAMAADNLAIAIAELGAIAERRIALLIDSSLSKLPPFLVKNGGVNSGFMIAQVTAAALASENKTYAHPASVDSLPTSANQEDHVSMATFAARRLRDMSENTRGVLAVELLAAAQGLDFRAPLMPSKAVAQAKAELREVVAYYDKDRYFAPDIDAATDLLYTASFNAYLPLGVLPSL

SEQ ID NO: 181488 - protein, 343 aa, Unknown
  Bacterial polypetide isolated from the Sargasso Sea
MVELTLTPGSLDLNSLRKINASSVQINLEKNAESQIAASAQTVQNVINEQRTVYGINTGFGLLANTKIADDELELLQRSIVLSHAAGIGEYMDDSTVRLMITLKINSLSRGFSGIRLQVIEFFIQLLNSEVYPCVPKKGSVGASGDLAPLAHMCLPLLSEGQMRHQGKIISAAEGLKIAGLEPLTLAAKEGLALLNGTQASTAFALQGLFRAEDLYAQSCVIGSISIEAAMGSRAPFDSRIHEIRGQRGQIDTAQVFRDLLDTQSQISDSHVNCEKVQDPYCLRCQPQVLGACLTQIRQAADVLLCESNGVTDNPLVFADVGDIISGGNFHAEPVAMAADNLA

SEQ ID NO: 181489 - protein, 513 aa, Unknown
  Bacterial polypetide isolated from the Sargasso Sea
MTFQLTPGSATLEQLERIWREGLVVSLGENARTAIDAAAHAVKKAAAGDAAVYGVNTGFGKLASVRIKPADTAKLQRNLILSHCCGVGEPLDVKTTRLMMVLKLLSVGRGASGIRWETIELLQNLLASGITPLIPTQGSVGASGDLAPLAHMAATLIGEGEALFESQRMKSAKALELAGLQPVVLGPKEGLGLINGTQFSTACALVGLFEAIRNAENAVVISCLSTDAIMGSTAPLEPAMHKLRGHAGQIDVASAMRSIMTGSEIRESHRDGDTRVQDPYCIRCQPQVTGAALDLLRFAGRTLEIEANAVSDNPLVLAEEDKVVSGGNFHAEPVAFAADQIALAVSEIGAIAQRRVALMVDPTLSFDLPPFLTPEPGINSGLMIAEVTTAALMSENKHLANPCSTDSTPTSANQEDHVSMAAHGALRLARMNNNLNVILGVEMLCAVQGVEFRAPLRTSRTLQNAIAVLRDRIPALEDDRFLSGDLTSAAELVKSGEIVCVCGIVGTLLESMG

SEQ ID NO: 181490 - protein, 216 aa, Unknown
  Bacterial polypetide isolated from the Sargasso Sea
AGQTLEIEANAVTDNPLVLVEEGWIVSGGNFHAEPVAFAADQIALALAEIGSISQRRIALMVDPSLSFDLPPFLTGNPGLNSGFMVAEITSAALMSENKHLANPCSTDSTPTSANQEDHVSMAAHGSRRLHKMNANLNMILGIELACGCQGIGFRAPLKTSPILQDVIAHVRTRVKPLAEDRYMASDLQMAAFMIADGSLVQGLNMPAYVLGRLTA

SEQ ID NO: 181491 - protein, 378 aa, Unknown
  Bacterial polypetide isolated from the Sargasso Sea
KGSVGASGDLAPLAHMSVVLLGEGEAFYKGERISAAQALEIAGMQPIALAPKEGLALLNGTQASTAFALQGLFYTENALHSAIGIGALTVEAALGSRVPFDARIHEVRGHKSQSDVAAAFRTLLDTSEIGHSHQRCEKVQDPYSLRCQPQVMGACLQQMRYVQDILVVEANGVSDNPLVFVENNDDADTPTGDILSGGNFHAETVAMAADMLAIALSEIGALSERRMSLMIDTHLSGLPPFLVENGGVNSGFMIAQVTCAALASENKTLAHPASIDSLPTSANQEDHVSMATFAARRLRDIFDNVAGILAIEWLAACQGLDFRKPLKTSEKLQVLMQLLRDQVPFYDKDRYFAPDIEKAKQLIKQHDLMDKTQLNLLG

SEQ ID NO: 181492 - protein, 410 aa, Unknown
  Bacterial polypetide isolated from the Sargasso Sea
MIPGQVTLDQLRKIGNEPVQVSLPEDAWHQVRHSRDSLNAVVQRGAPAYGINTGFGKLAKTQVDNADLSTLQHNLIRSHAVGVGQPLGLEITRLIMVLKLLSLARGYSGVRPEVIEHFISMVSHDILPVIPEKGSVGASGDLAPLAHLSLALIGEGEVFFRGKRVSTAEALQSAELDPLVLEAKEGLALLNGTQVSAALAIDGLFSAEQNLASAMVIGAISVDAALGSYVPFDARIHEARGQSGQTRVAAIYRVLLNDSELNRSHADCDRVQDPYCLRCQPQVLGACLDQLDHAARILLREANAVSDNPILCSETGDVLSGGNFHAEPVALVADNIALAIAETGSLSERRIAMLVDASISELPPFLTRNAGLESGFMIAHVTAAALASENKSLAHPASVDSLPTSANQED

SEQ ID NO: 181493 - protein, 507 aa, Unknown
  Bacterial polypetide isolated from the Sargasso Sea
MITLTPGHLTLPQLRQIARESVQLKLDPASFAKIDAGAKAVADIAAKGEPAYGINTGFGRLASTHIPHDQLELLQKNLVLSHAVGVGEPMARSSVRLLMALKLSSLGRGHSGIRREVMDALITLFNADVLPLIPVKGSVGASGDLAPLAHMSAVLLGVGEVFIRGERASALDGLRVAGLAPLTLQAKEGLALLNGTQASTALALDNMFAIEDLYRTALVAGALSVDAAAGSVKPFDARIHELRGHQGQIDAAASYRDLLEGSPINQSHRDCDKVQDPYSLRCQPQVMGACLDQMRHAADVLLVEANAVSDNPLIFPDTGEVLSGGNFHAEPVAFAADNLALAAAEIGALAERRIALLIDATLSGLPPFLVRDGGVNSGFMIAHVTAAALASENKTLAHPASVDSLPTSANQEDHVSMATFAARKLADIADNTKHILAIELLAAAQGVDLRAPYHTSPKLAPVMETIRSKVAHYELDHYFAPDIAVIAKLVGERAFAKVAPFSFASEQ

SEQ ID NO: 181494 - protein, 473 aa, Unknown
  Bacterial polypetide isolated from the Sargasso Sea
MVTITLKEGQLSLAEMRAAMKTPLQVKLDPGCLSRIETSAKTVDSVLEQDQTVYGINTGFGSLAQTKIARDKLVELQQNLILSHASGTGPLLDDGVVRLILVLKLNSLIRGFSGIRMKTVEYLLALLEADALPCIPAKGSVGASGDLAPLAHLSMVLLGEGEARIDGEYIAAWELLRKLGLEPLELQPKEGLALLNGTQVSTALALHGLFAAEDCLASSIVAGSLSVEASLSSYSPFDGRIHEVRGLQGQKDVAANFRQLLNESEINASHENCGHVQDPYSLRCQPQVLGACLDQMRFAAQQLRIEANAVTDNPLVFPEEGEILSGGNFHAEPVAMIADNLALAIAEVGALSESRISLLTDPGFSKLPAFLSEDPGLHSGFMVAQITSASLASENKSLAHPASVDSLPTSANQEDHVSMATFAARRLGEMSENTAKILGIELLAACQGIDFRRPLTTSYLLEEAHQMVPSRGP

SEQ ID NO: 181495 - protein, 506 aa, Unknown
  Bacterial polypetide isolated from the Sargasso Sea
MILKPGYLTLPQLRQIAREHVALQLDPASHAAIDACAKAVADIAAKGEPAYGINTGFGRLASTHIPHDQLELLQRNLVLSHAVGVGEPMSRPVVRLLIALKLSSLGRGHSGIRREVMEALITLYNADVLPVIPVKGSVGASGDLAPLAHMSATLLGVGEVFAKGERMPATEGLALVGLKPLTLQAKEGLALLNGTQASTALALYNMFAIEDLYRTALVAGALSVDAAAGSVKPFDARIHELRGHQGQIDAAAAYRSLLQGSAINVSHADCDKVQDPYSLRCQPQVMGACLDQMRHAAEVLLLEANAVSDNPLIFPDTGEVLSGGNFHAEPVAFAADNLALAVAEIGALAERRIALLIDATLSGLPPFLVRDGGVNSGFMIAHVTAAALASENKTLAHPASVDSLPTSANQEDHVSMATFAARKLGDIAENVANILSIELLAAAQGVDLRAPHKTSPSLQKVMDAVRKDVAHYELDHYFAPDIAAVTRLVQNGTIAKLSPFSFASEQ

SEQ ID NO: 181496 - protein, 351 aa, Unknown
  Bacterial polypetide isolated from the Sargasso Sea
MNTMTLTPGHLSFIQLREIWQQPVKLSLDAGAIDAINASVACVNNIVAEGRTAYGINTGFGLLAQTRIATEDLQNLQRSLVLSHAAGVGEALDDAMVRLIMVLKINSLARGFSGIRLSVIEALIALVNAEVYPLIPAKGSVGASGDLAPLAHMSLTLLGEGKARWQGEWLPATEALKKAGLEPITLEAKEGLALLNGTQASTAFALRGLIEAQELFASATVCGALTTEAVLGSRRPFDARIHAARGQRGQIDAATLYRHVLTDTSALSQSHHNCEKVQDPYSLRCQPQVMGACLTQMRQVMDVLLVEANAVSDNPLVFAEEGDVISGGNFHAEPVAMAADNLALAIAEIGS

SEQ ID NO: 181497 - protein, 325 aa, Unknown
  Bacterial polypetide isolated from the Sargasso Sea
MTEIISPHSINLDFLEKIFRHKLEIAVDPELETNVAKSYEIVKKSAEGDLPVYGVNTGFGKLANKIIPSEDREQLQKNLVLSHCAGIGEPLPEDVTRLMMVLKIVSLSLGASGVKWSTIKQIERIINSGIVPEIPHQGSVGASGDLAPLAHMAAVMIGEGFAFYNGEKLSGFEALKRAGIEPITLGPKEGLALLNGTQFSTACALASLFDAWRSVLNSIVISSLSTDAIMGSTSPLLPQIHELRGHKGQIFVASKMRELMDGSVIRESHRENDQRVQDPYCIRCQPQVLGASLDILKNAAVTIDIETKAVTDNPLVLVDQNKIVS

SEQ ID NO: 181498 - protein, 510 aa, Unknown
  Bacterial polypetide isolated from the Sargasso Sea
MFELTITPGELDLATLRRVSREPVHVSLDPAALAGIHASAAVVTKVIEQNRVVYGINTGFGLLANTRIPVEQLDELQRSIVLSHAAGIGEYMDDATVRLMMVLKLNSLARGFSGIRLVVLEALMRLINAEVYPVVPKKGSVGASGDLAPLAHMSCLLIGEGKARHAGELIDAATALKIAGLEPIALAPKEGLALLNGTQASTAFALEGLFHAEDLYAGAITIGAMSVEAALGSRRPFDARIHAVRGQRGQIDAAACYRHLLVDGSEIGMSHHNCEKVQDPYSLRCQPQVMGACLTQIRQAAEVLVCEANAVSDNPLVFAEDEDILSGGNFHAEPVAFAADNLALAIAEIGSLSERRMALLIDSRMSGLPAFLVNNGGVNSGFMIAQVTSAALASENKTLAHPASVDSLPTSANQEDHVSMATFAGRRLADMAENTRGILAVELLAAAQGLDFRAPLRSTELIELAKGRLREEVSFYDKDRYFAPDIEAAAALLGRASYNDLLPAGVLPSL

SEQ ID NO: 181499 - protein, 305 aa, Unknown
  Bacterial polypetide isolated from the Sargasso Sea
MKKFVINGQQISLSQIDEVIKADLQIEIGPEARKNIIKCRDYLEKKIASSESLHYGINTGFGSLCNEVISNEDLSKLQRNLVLSHACGMGDFIPEKIVRLMILLKVISLSHGHSGIQEQTINRLVFLYNEKITPLVFEQGSLGASGDLAPLAHLSLPLIGEGDVIYKGKRVTCKEVFKEFNIQPLVLGAKEGLALLNGTQFMCAFAIDCINRSLELWNKWSKISALSLDAYNCRPESFYPHPNEIRKQNGQIETAKNISKILKSSQIFHQEKEHVQDPYSFRCIPQVHGASKDTLDHCAGVMKTK

SEQ ID NO: 181500 - protein, 146 aa, Unknown
  Bacterial polypetide isolated from the Sargasso Sea
GLPPFLVEQPGLNSGFMIAHVTAAALASENKTFAHPASVDSLPTSANQEDHVSMATFAGRRLQDMAENTATIVGIEALAAAQGIDFHKPLATSDTLQKAHGCIRARVAYYGEDRLFAPDIEAARRLVLDGDLGDSCRAHVGELALV

SEQ ID NO: 181501 - protein, 510 aa, Unknown
  Bacterial polypetide isolated from the Sargasso Sea
MEAQIISDKLIDWHDLKHLIVSPKPVRLSQSSKKLIKTSNETLNNILNSGKQIYGVNTGFGKLSSVSINRKDIKELQLNLVRSHATGVGKPFDLGITRITMLLKLLTWAKGYSGIRPKLAILLIDMLNHDILPIIPRQGSVGASGDLAPLSHLACSMIGEGSVHFQDRVMPSMIALKEANLKPIDLDSKEGLSLVNGTQISTAIAIKTLHEAEKLLFSADIISALSVEASLSTRDVFKPVIHKLKKHKGQIISATNIFNLLKNSEIVSSHKNCDRVQDPYSMRCIPHIHGASWETFSSAEKIINNEINSVSDNPLIFSNGQVHSSGHFHAEPVAQALDSLSIAMSEIGAISERRIHFFMKGADNKLPMFGAVNGGLESGFMLAHVTAASLASENKTLAHPSSVDSLSTSAGQEDIVSMAPWAGRSCLRILDNVRMILAIELLVAGNINHRFHHKFNSSDGLQPLMKLLKKSKVLSKTDRVFSKDIEIISELIKTDQVYSAVNKVNKISRV

SEQ ID NO: 181502 - protein, 276 aa, Unknown
  Bacterial polypetide isolated from the Sargasso Sea
EPTVQPELPDNPWLELRRLTPARIALGRTGTSLPTSAQLDFQFAHAQARDAVHLPFDHAGLSHQLAERGRDSLLLHSAATDRHIYLQRPDLGRRLSDESAQTLRDYALAQPGGVDLAIVVADGLSALAVHKHTAPFLARLEEQTHAEGWSLSPVILVEQGRVAVADEIGQLLGAKMVVILIGERPGLSSPDSLGLYFTYNPKVGLTDAYRNCISNVRLEGLSYGMAAHRLLYLMREACRRQLSGVNLKDEAQVQTLESDDPDLMKGNFLLSPADDR

SEQ ID NO: 181503 - protein, 234 aa, Unknown
  Bacterial polypetide isolated from the Sargasso Sea
NSIDTVSDRDFVIDFLYSVSVCSMHISRIAEELIIWNSDGFNLINLSDKVVTGSSIMPQKKNPDLLEYLRGKSGIAYGNLFSMLTILKGLPLSYFKDLQDDKEIVFNSNDTLINCLKIFDEVLKNCSPNKKKMLNLANKGYMTATDLADYLVKNHSMSFRNAYQKTSAIVNLAEKTKKSLNELSLDQLKKIEPKLTEDVLKVFDLNNSVNSKRSFGGTSFDNIKKMIVKYKKEI

SEQ ID NO: 181504 - protein, 302 aa, Unknown
  Bacterial polypetide isolated from the Sargasso Sea
DQADRHQSTMIPGYTHLQRAQPLCLAHHLLAYIEMLQRDRQRLGDARGRVNICPLGAAALAGTPVPIDRRRTAEDLGFTAIYANSLDAVSDRDFCVEFSAAASLVMAHLSRLAEEVIAWASEEFGFVRLSDRCATGSSLMPQKKNPDVPELVRGKCGRVFGHLQGLLTMIKGLPLAYNKDFQEDKEALFDAYRTTRDCVEAMAILFEEGLEFRIDRLNQAVESDFSNATDVADYLVARGVPFREAYQLVGAVVRRCLEQGCLLRELSLEQWKELHPAFEADLHEALAPRAVVSARRSEGGTG

SEQ ID NO: 181505 - protein, 335 aa, Unknown
  Bacterial polypetide isolated from the Sargasso Sea
MAKVWSKRFNNSLNPFIEEFNASIGFDRKLILEDLECSMAHAKMLGKTKVLTSSETLQIINGLEKIKVDFMEGKFSPGPPSEDIHYCIEEKLISLIGETGKKLHTGRSRNDQVGTDIRLWLRKEIDNLDILITDLQKSFFKLAKTNIYTLIPGYTHMQRAQPLSLAHHLLAYLEMFQRDRERFQEVRSRVNTSPLGAAALAGTKIKIDREFTAAELGFEKIYKNSIDAVSDRDFCIEFASASALAMSHLSKISEEIILWVTDEFSFAKLTDNCSTGSSLMPQKKNPDVPELIRGKTGRVYGHLQALLTMVKGVPLAYNKDFQEDKEPIFDTAETI

SEQ ID NO: 181506 - protein, 260 aa, Unknown
  Bacterial polypetide isolated from the Sargasso Sea
MTEKDTSPPQERQKSSIWGGRFSSGPSQLMQDINASIDYDRRLFRQDIAGSKAHASMLAHCGIISSEDRDAIHAGLETILGEITGGGFVFSAELEDIHMNIESRLAELIGEPARRLHTARSRNDQVATDFRLWVRELIDSVDAALAEMQAVLLRRADEHAETLMPGFTHLQTAQPVTFGFHLMAYVEMFGRDRGRFADARRRLNESPLGAAALAGTSFPTDRHMTAELLGFDRPAANAMDAVSDRDFAVEFLAAAALCAV

SEQ ID NO: 181507 - protein, 208 aa, Unknown
  Bacterial polypetide isolated from the Sargasso Sea
MSKNKNNKPIWGTRIKKNASTLFKKVGGSLPVDKRLFKEDIEGSIAHVEMLHKQKIINFRIKNKIIWGLKRIKNEIVKKKFNFDYDLEDIHMNIENRLFELIGDDAGYIHTARSRNDQVITDLKLWLKDATKKIIILLDNTNSNILNLAKKNIRTIIPGFTHLKNAQPLSLAHYLLAYVEMFKRDKKKFKNNLEFLDENPLGVGALSG

SEQ ID NO: 181508 - protein, 286 aa, Unknown
  Bacterial polypetide isolated from the Sargasso Sea
NLINSSELKKIKKGLNKILDEIKRDKFDWDSSLEDVHMNIEAKLVKIAGTAAKKIHTGRSRNDQVATDLRLFLKNQIDEILNLTILLQKSLLKKADENTDTLMPGLTHLQIAQPVTFGHHLMAWFEMLSRDYSRLEDAKKRMDVMPLGSAALSGTRFNIDRKFLAKKLGFGEISRNSMDAVSDRDFVLELASSLSIVGIHLSRICEEIILWSSSQYSYICLSDEVCTGSSIMPQKKNPDMAELIRGGASKTIANLMGLLSLMKNLPLTYNRDLQDDKEYIFNSIDF

SEQ ID NO: 181509 - protein, 288 aa, Unknown
  Bacterial polypetide isolated from the Sargasso Sea
AARDRQRLGDVRGRVNICPLGAAALAGTPVPIDRRRTAEDLGFAAIYANSLDAVSDRDFCVEFSAAASLVMAHLSRLAEEVIAWASEEFGFVRLSDRCATGSSLMPQKKNPDVPELVRGKCGRVFGHLQGLLTMIKGLPLAYNKDFQEDKEALFDAYRTTRDCVEAMAILFEEGLEFRIDRLNQAVERDFSNATDVADYLVARGVPFREAYQLVGAVVRRCLEQGCLLRELSLEQWKELHPAFEADLHEALAPRAVVSARRSEGGTGFDRVHEQVMLWQERLKESAIG

SEQ ID NO: 181510 - protein, 313 aa, Unknown
  Bacterial polypetide isolated from the Sargasso Sea
YIPQMLIKQKIIPSKDGKKIIRGLNKIKSQIDKGKFIFREKFEDIHLNIEKKLFDIIGPSAGYMHTARSRNDQVVTDFKLWVKESTQDVLKNISDVMKALLRKAEKNVETVMPGFTHLKNAQPVSFAHYLLAYYEMLNRDKKRFKNNLTLLDECPLGSAALTGTSYKIDRNFTARKLGFKKPTNNSIDSVSDRDFAIDFLYAAAVCAMHLSRLAEDFIILNSDAYKLISFQDNMLTGSSIMPQKKNPDPAELIRGRTGINYGKLNSILTIMKGLPISYFKDLQDDKSLVFDGYDTLKDTLIMGHELINSLKPQ

SEQ ID NO: 181511 - protein, 318 aa, Unknown
  Bacterial polypetide isolated from the Sargasso Sea
LEILQKNYTPGRSRNDQVVTDLKLFLKDETKAIKKKIKDLQKSILNKAQKHYADLMPGFTHLQIAQPVTLGHHLLAYFEMLQRDSIRFESNEKTLNQMPLGVGALAGNRFGIDRIKLAKKLGFTEITKNSIDTVSDRDFVTDVSYSCSMLAVHLSRMSEEIILWSSSQFDYVQLPEELCTGSSIMPQKKNPDMAELIRGGSSQTLGNLVTTLSLMKNQSLSYNRDNQEDKEPLFKSINFIKDALEIMSEMIKGMSFNIKKMLKDLDLSEVGATDFAEYLVLKGVPFREAHKITGKIVKEAERKNLFIREFNLSELKKI

SEQ ID NO: 181512 - protein, 307 aa, Unknown
  Bacterial polypetide isolated from the Sargasso Sea
PGFTHLQTAQPITWGHHMMAYVEMFARDRSRFKDARNRMNECPLGSAALAGTSFPIDRDHTARALKFERPTANSLDAVSDRDFALEFLTSSSICAMHLSRLAEELVIWSSAQFKFIDLSDRFSTGSSIMPQKKNPDAAELVRAKIGRILGANIGLMTVMKGLPLAYSKDMQEDKEKVFDAADSLSLALCAMEGMIQDLTANKENLELAAKSGFSTATDLADWLVRVLNLPFREAHHVTGEIVSLAERAKCDLSELELKDMQSINSDINEDVFKVLSVENSVKSRSSYGGTSPKEVQFQIDRWKKVLR

SEQ ID NO: 181513 - protein, 294 aa, Unknown
  Bacterial polypetide isolated from the Sargasso Sea
GLIMVLAYVEMIGRDRTRLEDCLYRLNENPLGAAALAGTSFPIDRKYTTKELGFREPTKNAMDTVSDRDFVIEFLFVLSLIAVHLSKIAEETVLWSNQQFNFINLPDDLSTGSSIMPQKKNPDGAELVRGKTSIIISNLSSMLNIIKGLPLSYSKDLQDDKQITFNSYDNVSLCIKVMNEILSKSTFNKTRMKELIDNSNATATDLANWLVQNLRYSFRDAYIITGKIVSYCLKQDRNIDSLSLGELKKFDKNITADAKKVLSTTNSVKSKSSFGGTAPEITKKMIKLVIKKYL

SEQ ID NO: 181514 - protein, 267 aa, Unknown
  Bacterial polypetide isolated from the Sargasso Sea
ESPLGSGAIAGTSFDIDRNYTSEKLNFDRPMMNSIDAVSSRDFAAEFISCCSINSLHLSRLSEEIIIWMSEPFKFIKLSDSFSTGSSMLPQKRNPDAAELVRAKSGRIIGDLNALLIMLKGLPLAYSKDLQEDKEAVFDCYDSLCVCLMAMKGMIENISPNKERMYHYAKEGFSTATDLADWLVINLNLPFRKAHEITGEIVKLAEKSNRILEEITLEEMLEINPNINKEIKNILSVKNSVFSKKSFGGTSPDRIKEAISLAKERIK

SEQ ID NO: 181515 - protein, 246 aa, Unknown
  Bacterial polypetide isolated from the Sargasso Sea
MTNKNKTVWSNRFKKSTSQSFQRIGASINVDKRLYEQDIFASKIHTQMLVKRKIIPAKEGKKIIKGLDKIKGQIKKGKFVFKEKFEDIHLNIEKKLFEIIGDSAGYMHTARSRNDQVVTDFKLWVKDSSLILIKELNSLMKNIIGKADKNVSTVMPGFTHLKNAQPVSFAHYLLAYYEMLKRDKQRFQNNLKLIDESPLGAAALSGTSYNIDRNFTSQKLGFKKPTNNSIDTVSDRDFAIDFLYAC

SEQ ID NO: 181516 - protein, 224 aa, Unknown
  Bacterial polypetide isolated from the Sargasso Sea
MANKNKTVWSNRFKGSTSKSFQRIGASINVDKRLYSQDIFASKIHTQMLIKNKIIPAKEGKRIIKGLEKIKKLIDNGKFIFKEKFEDIHLNIEKKLFEIIGNSAGYMHTARSRNDQVVTDLKLWIKDSTISIIKELDSLMKNIVSKSEKNISTVMPGFTHLKNAQPISFAHYLLAYYEMLKRDKKRFHNNLELINESPLGAAALSGTSYKINRNYTSKKLGFKK

SEQ ID NO: 181517 - protein, 218 aa, Unknown
  Bacterial polypetide isolated from the Sargasso Sea
RLFKQDIMGSIAHVEMLFKQKIISFKIKNKIIYGLGKIEKEISKNKFEYNLKYEDIHMNIEKRLFEIIGEEAGYIHTARSRNDQVITDLKIWMRSSNKEILNHLNKIIKTTLRIAEKNIKTIMPGFTHLKNAQPISFAHYLMAYVEMFTRDKKRFNDNIESLNESPLGVLALAGTSFNIDREYTAKKLGFKKPTNNSIDTVSDRDFVLDYLYSCSVCS

SEQ ID NO: 181518 - protein, 305 aa, Unknown
  Bacterial polypetide isolated from the Sargasso Sea
MVRQINKQMDTEVLEFSQSLSVDIVLYETDIAVTIAHIEMLFKCGHIKKNECVKIISGLKKVLKQAETGRLKWNIAFEDVHMNIENALVKIIGDLGKKIHLGRSRNDLVATDLRIYLREFVDIYLLKLREIQVVLAHMSKEHSKSLFPGYTHLQVAQPVTFGHHLLAWCEMLYRDELRLLSFRKLLNIMPLGSAALSGTSLKIDREFVAKKLGFDSVTNNSMDAVSDRDFVCDFAYANSMIMMHLSRISEELVLWMSPQINLVSLDESFCTGSSIMPQKKNPDVPELIRGKTGSVYGALIGMLTL

SEQ ID NO: 181519 - protein, 231 aa, Unknown
  Bacterial polypetide isolated from the Sargasso Sea
RDFVLESLSIATLIMVHISRLSEEIIIWASPGFNFVKLPEDFSTGSSIMPQKRNPDSAELIRGKTGRIASAYLNIVTMLKGLPLSYSKDMQEDKEAVFDSFDNLKICLDVAIGLIKEINFNTKNMYEMAKLGYLTATDLADWLVKEVGVPFRDAHAITGKVVKLAESKNLGLNELELNDLRSINKNISEEALKVLSLEYSLKSRDSFGGTAPKMVKKAIKKAKIQWLKNIV

SEQ ID NO: 181520 - protein, 211 aa, Unknown
  Bacterial polypetide isolated from the Sargasso Sea
MSKNKNNQPIWNTRISKRKKTLFGKVGGSLSIDKRLFNEDIEASIAHVEMLFKQKIINFKIKNKIIWGLKRIKNEIIKKKFLFDQNLEDIHMNIEKRLFELIGDEAGYIHTARSRNDQVITDLKLWLKKANQEIIKNLNITINNLIKKANSNVKTIMPGFTHLKNAQAVSFAHYLMAYVEMFERDIKRFNNNFESINENPLGAAALTGTSF

SEQ ID NO: 181521 - protein, 210 aa, Unknown
  Bacterial polypetide isolated from the Sargasso Sea
AALSGTSFNIDRFFTTKKLGFKKPTNNSIDTVADRDFVLDFLYSISVCSLHISRIAEELIIWNSDGFNLIKLSDKVVTGSSIMPQKKNPDPLEYLRGKAGGTFGNLFSMLTILKGLPLSYFKDLQDDKEIVFRSFDTLNNSISILNEVLNNFKPNKLKMIKLANKGFVTATDLADYLVKYHGKTFRDAYQKTAMIVNYAEKNNIKLNELA

SEQ ID NO: 181522 - protein, 283 aa, Unknown
  Bacterial polypetide isolated from the Sargasso Sea
DQVITDFKLWLKSATKEINNNLDKVIKTSIKLAEKNIHTIMPGFTHLKNAQAISFAHYLLSYVEIFNRDKKRFSNNLESLDENPLGVAALSGTSFNIDRFYTTKKLGFKKPTNNSIDTVSDRDFVIDFLYSISVCSMHISRIAEELILWNSDGFNLINLSDKVVTGSSIMPQKKNPDLLEYLRGKSGSAYGNLFSMLTILKGLPLSYFKDLQDDKEIAFNSNDTLINCLKIFDEVLKNCSPNKKKMLKLANSGYITATDLADYLVKNHSMSFRKAYQKTSAIV

SEQ ID NO: 181523 - protein, 282 aa, Unknown
  Bacterial polypetide isolated from the Sargasso Sea
TAQPISLGFHLAAYIEMVGRDRNRLQDCRKRVNESPLGAAALAGTSFPIDRHLTAKLLDFDRPMPNALDAVSARDFALEFTSAATICAIHLSRLAEEIVIWSTDRFNFIRLSDEFTTGSSIMPQKRNPDAAELIRAKPGRIMGHFISLATILKGLPLAYCKDMQEDKEPLFDTTKTLSISIAAMSGMIDDMSFNKAAMRDALQKGHPTATDLADFLVRSLGKPFRDAHHVSGTLVALADERGCALENLSLDEMRNVEPLLNEDVYTVLRIDDAFNARSSLAE

SEQ ID NO: 181524 - protein, 269 aa, Unknown
  Bacterial polypetide isolated from the Sargasso Sea
KNSSSLFAKVGSSIDVDKRLYKQDIQASTIHVEMLLKKKIISLQVKNKIVWGLKKILNEIIKKKFNFDKQSEDIHMSIEKRLFEIIGEDAGFIHTARSRNDQVLVDFKLWMIEATNDIIKEINSNISSILKIAEKNIFTVMPSFTHLKNAQPISFAHYILAYVEMFQRDKKRFLNNREALMENPLGVAAIAGTSFDIDREYTTKKLKFKKPTGNSIDTVSDRDFVLDFLYSISVCSNHISRFAEEFILWNSDAFDLIKLKDKVVTGSSI

SEQ ID NO: 181525 - protein, 261 aa, Unknown
  Bacterial polypetide isolated from the Sargasso Sea
RLFREDIFASTIHVKMLVKQKIIKKAIGEKIIFGLNKILKEINNKKFKFSKKNEDIHLNIEKRLFKLIGSSAGYMHIARSRNDQVVTDFKLWVKKSSTTLVNVLDKICKSFVEKAEKNISTAMPGFTHLKNAQPIVFAHYLLAYVEMFQRDKKRFLSNINYLNECPLGAAALAGTSYKIDRKFTAKKLNFLKPTNNSIDTVADRDFALDFLSAASICAVHISRFAEELVIWNSDAFKLISFSDNLLTGSSIMPQKKNPDPA

SEQ ID NO: 181526 - protein, 191 aa, Unknown
  Bacterial polypetide isolated from the Sargasso Sea
MKKNPSRNTHFKKSPSKLLESINNSIDIDKRMYKEDIEGSIAHATMLGKQKIISKKDQTKIVNGLKIILQNINSGKILFKSKLEDIHMNIESLLFKQIGEAAGKLHTARSRNDQVVTDFKLWIRNNSINLNKHVQNLQKSLINVAKKNTATVMPGYTHLQVAQPISLAHHCLAYVEMMGRDRSRLKDCIER

SEQ ID NO: 181527 - protein, 289 aa, Unknown
  Bacterial polypetide isolated from the Sargasso Sea
KWGNSIDIDKRLYKEDIKGSIAHVEMLFKQKIISFKIKNKIIYGLAKIDKEITKNKFEFNKKYEDIHMNIEKRLFQIIGEEAGYVHTARSRNDQVITDFKIWMKNSTIEINSNINKVIKSTIKLAEKNIETIMPGFTHLKNAQAISFAHYLMSYVEMFNRDKKRFSNNLDSLNENPLGVAALAGTSFNIDRNYTTKKLGFKTPTNNSIDTVSDRDFVLDFLYASSVCAMHISRIAEELIIWNSDGFNLINLSDKVVTGSSIMPQKKNPDLLEYLRGKSGSAYGNLFSML

SEQ ID NO: 181528 - protein, 295 aa, Unknown
  Bacterial polypetide isolated from the Sargasso Sea
KEIETNKFKFKMELEDIHMNIESRLIELIGDSGKKLHTARSRNDQVVTDFKMWIKSDLDSILDLLKQLQENLIIQAEDNYETLMPGYTHLQVAQPVTFGHHLLAYVEMFGRDRARIKDCVSRMNECPLGSAALAGTSYPIDRNFVAKKLNFSSPTRNSIDAVSSRDFAIEYLSVLSLIGINLSRIAEELILWSSNGFNFIVINEEYTTGSSIMPQKRNPDAAELIRGKSNRLVGNLVNLTTLLKGLPLAYSKDLQEDKEPVFDSSENIKNCLLNMIGIIKSLKINKNKMLKALQK

SEQ ID NO: 181529 - protein, 322 aa, Unknown
  Bacterial polypetide isolated from the Sargasso Sea
YEDIHMNIEKRLFQIIGEEAGYIHIARSRNDQVITDFKIWIKSAIKEINIELDKIIKSTLKLAEKNIDTIMPGFTHLKNAQAISFAHYLMAYVEMFNRDKKRFKNNLNNLDENPLGVAALSGTSFNIDRNYTTKKLGFKKPTNNSIDTVSDRDFVLDFLYSISVCSMHISRIAEELIIWNSDGFNLINLSDKVVTGSSIMPQKKNPDLLEYLRGKSGSTYGNLFSMLTILKGLPLSYFKDLQDDKEIIFKSNDTLLDCLKIFDEILKNFTPNKKQMLKLANSGYITATDLADYLVKNHSISFRRAYQKTASVVNLAEKKIKS

SEQ ID NO: 181530 - protein, 241 aa, Unknown
  Bacterial polypetide isolated from the Sargasso Sea
SSIFAHYLLAYVEMLKRDKQRFINNLKSLSENPLGVAALTGTSFNIDRNFTTKKLGFKKPTNNSIDTVADRDFVLDFLYSVSVCSLHISRIAEEFIIWNSDAFSLINLSDSVVTGSSIMPQKKNPDLLEYLRGKSGTSFGNLFSMLTILKGLPLSYFKDLQDDKEIVFKSNETLINCIQILNEILKNFSPNKKKMLELANIGYITATDLADYLVKNHTMSFRKAYQVTASVVNYAEKNKKK

SEQ ID NO: 181531 - protein, 206 aa, Unknown
  Bacterial polypetide isolated from the Sargasso Sea
MKKSSLNKQKNNKIWGGRFSSSPSELMDELNSSIQFDQILYVEDIDGSIAHSEMLSKQNIISKKEFLSIKYGLEQIKKEISNNEFNFSTKLEDIHMNIENRLVEIIGDNGKKLHTGRSRNDQVATDIKLWIRNKIDKIELSLKDLQRTLIKKSEIYYDLLMPGYTHLQVGQPVTFGHHLLAYVEMFGRDRGRLIDCRKRMNELPLG

SEQ ID NO: 181532 - protein, 300 aa, Unknown
  Bacterial polypetide isolated from the Sargasso Sea
IGSSINIDKRLYKEDIFASIIHAQMLVKQKIIPRKDGAKIIKGLKKIEKEIEKNRFKFREKFEDIHLNIEKRLFEFIGKSAGYLHTARSRNDQVVTDFKIWVKKASLDINDTLNLLIKSILKKAEKNIDTVMPGFTHLKNAQPISFAHYLLAYVEMLNRDKKRFLNNIELINECPLGSAALAGTSYKIDRQFTAKKLGFKKPTGNSIDAVCDRDFAIDFLSAAATCAMHMSRLAEDFIIFNSEAFNFLKFSDNVLTGSSIMPQKKNPDPAELIRGKTAINYGKLNSMLTIMKGLPISYYK

SEQ ID NO: 181533 - protein, 266 aa, Unknown
  Bacterial polypetide isolated from the Sargasso Sea
ESPLGSGALAGTPFNIDRDFTAKKLDFNKPMMNSIDAVSSRDFVIEFISCCSISSIHLSRLSEEVIIWMSDPFQFIKLSDSFSTGSSMLPQKRNPDAAELVRAKSGRIIGDLNTLLVVLKGLPLAYSKDLQEDKEAIFDSYDTLKLCLLAIKGMIENLTPNKERMLYFAEKGFSTATDLADWLVINLNLPFREAHEITGKIVKLAEQANCTLEEVKLEDMKDIHKGINREIKKVLNVRDSVLSKKSFGGTSPERIKHAVKKAKERI

SEQ ID NO: 181534 - protein, 222 aa, Unknown
  Bacterial polypetide isolated from the Sargasso Sea
MKNKNKAVWGTRFNNPTSRIFEKIGASIDIDKRLFEEDILASTIHVQMLIRQKIINKKRGNKIINGLKKIKKEIKNNKFNFNKKYEDIHLNIEKRLFDIIGQDAGYLHIARSRNDQVITDFKLWVKKASYTIIENLNVLIKSFLKKSENNIQTIMPGFTHLKNAQPISFAHYLLAYVEMFKRDKKRFLSNIDYIDECPLGVGALAGTSYKIDRNYTSKKLGL

SEQ ID NO: 181535 - protein, 264 aa, Unknown
  Bacterial polypetide isolated from the Sargasso Sea
MTKNKNNQAIWSTRIKGTSSMLFQKVGNSIDVDKRLYKEDIAGSIAHVEMLFKQKIISFKIKNKIIYGLNKIQKEISKKKFEFNEKYEDIHINIEKRLFQIIGEEAGYIHTARSRNDQVITDFKIWIKSATLDIISMIDKIIISSVRLAEKNIYTIMPGFTHLKNAQAISLGHYLMAYVEMFERDKKRFKDNLDNLEENPLGVAALSGTSFNIDRNYTSKKLGFKKPTNNSIDTVSDRDFVLDFLFSVSVCSMHISRIAEELII

SEQ ID NO: 181536 - protein, 185 aa, Unknown
  Bacterial polypetide isolated from the Sargasso Sea
NKPIWGNKIKSKTASAFQKVSSSIEFDKRLFREDILASIAHVEMLNRQKIISFKIKNKIIWGLKKIQNQIIKKTYVFNYQDENIHMSIEKKLFELIGDDAGFIHTARSRNDQVLVDFKIWMTNSNEKLIKMLDQTIKNILKIAEKNIYTIMPGFTHLKNAQPISFAHYILAYVEMFNRDKNRLKN

SEQ ID NO: 181537 - protein, 288 aa, Unknown
  Bacterial polypetide isolated from the Sargasso Sea
MKKNPSRNTHLKKGPSKLLESINNSIDVDKRMYREDIQGSIAHATMLGKQKIISKKDQTKIVNSLKVILNKINSGKIHFKSEFEDIHMNIEALLFKQIGKTAGKLHTARSRNDQVVTDFKLWIRNNSVNLNKHIQNLQKSLINVAKKNTNTVMPGYTHLQVAQPISLAHHCLAYVEMMGRDRSRLKDCIERLNESPLGAGALAGTSFPIDRNLTAKLLKFSKPTVNALDSVSDRDFAVEFLFVISLLSTHLSRMADEIILWSNQQFNFINLPDELVTGSSIMPQKKNP

SEQ ID NO: 181538 - protein, 182 aa, Unknown
  Bacterial polypetide isolated from the Sargasso Sea
MALWGGRFRQGADSRFKQFNDSLRFDYRLAEQDIQGSMAWAKALVKVGVLTEGEQAKLQQAMEVLLASVQQDPQQILSSDAEDIHSWVESQLIAAVGDLGKKLHTGRSRNDQVATDLKLWCKAQGELLLGSITALQQGLVASARANQAAVLPGYTHLQRAQPVTYAHWALAYVEMLERDYSR

SEQ ID NO: 181539 - protein, 255 aa, Unknown
  Bacterial polypetide isolated from the Sargasso Sea
RDYERLVDCRKRANRMPLGSAALAGTTYPIDREYTAQLLGFDAVGGNSLDGVSDRDFAIEFCAAASIAMMHLSRFSEELVLWTSAQFQFIDLPDRFCTGSSIMPQKKNPDVPELVRGKSGRVFGALMGLLTLMKGQPLAYNKDNQEDKEPLFDAADTLRDSLRAFADMIPAIKPKHAIMREAALRGFSTATDLADYLVRRGLPFRDCHEIVGHAVKYGVDTGKDLAEMSLEELRQFSDQIEQDVFAVLTLEGSVN

SEQ ID NO: 181540 - protein, 320 aa, Unknown
  Bacterial polypetide isolated from the Sargasso Sea
HLKKAPDQVMQDINASIGFDKKLYKQDIAGSLAHVAMLAACKIVTKKEADLITKGLKQIEQEIEAGKFKFKAELEDIHMNIEARLKAIIGDVAGKLHTARSRNDQVATDFKLFVVEANEQVITLLKGLINNLLKKAEKNLDTILPGYTHLQAAQPVTFAHHLHAYVEMLGRDISRFSDAKERANQCPLGSAALAGTSFPIDRKRVAKSLGFKEPTANSLDSVSDRDFALDFLANTSICMGHLSRFAEEIVVWMSQGFAFVKLSDSYTTGSSIMPQKRNPDAAELVRGKTGRAYGNLITLLTTMKALPLAYSKDMQEDKEP

SEQ ID NO: 181541 - protein, 322 aa, Unknown
  Bacterial polypetide isolated from the Sargasso Sea
INASIDVDQRLFKEDIKGSIAHAKMLGKQKIISKRDSNKLVTGLKSIQTDIEKKRVKFSRKLEDIHMNIESLLLKKIGKVAEKLHTARSRNDQVVTDLKLWIKNNSSQLDKELKIFQKTLINISKKNIDTIMPGYTHLQVAQPITFAHHLLAYVEMIGRDRSRIKDCLYRLDENPLGSAALAGTSYPIDRSYTTKQLGFREPTKNAMDSVSDRDFVIEYIFCLSLIGLHLSRLAEEIILWSNQQFKFIFLPDELSTGSSIMPQKKNPDGAELVRAKSSLIISNLGSILNILKGLPLSYSKDLQDDKSLIFYSYDNLILCLKV

SEQ ID NO: 181542 - protein, 262 aa, Unknown
  Bacterial polypetide isolated from the Sargasso Sea
MAKNKNNQTIWGTRIKNSTSTLFQKVGSSIDIDKRLYKEDIASSIAHVEMLLKQKIISFKIKNKIVYGLNKIEKEISNKKFEFKKKYEDIHINIEKRLFEIIGEEAGYIHTARSRNDQVITDLKIWIKSANNKINIGIDKIIKSSLKLAEKNIYTIMPGFTHLQNAQAISFAHYLMAYVEIFNRDKKRFINNLDNLDENPLGVAALTGTSFNIDRNFTTKKLGFKRPTSNSIDTVSDRDFVLDFLYSVSICSMHISRIAEEL

SEQ ID NO: 181543 - protein, 218 aa, Unknown
  Bacterial polypetide isolated from the Sargasso Sea
MEKKTKEIDKKNKAKDKSQVSSVWGGRFTDGPSDIMDKINPSIDFDQRFFSQDVQGSRVHAEMLAKQGIISKRESRDIIEGLNKVEKEIRDGEFRFRRELEDIHMNVEARLTELIGESGGRLHTARSRNDQVATDFKMWVREKIDDLVQAVVLLQKALIDKAEENTAVVMPGFTHLQVAQPVTFGHHLLAYVEMFGRDKGRLEDCRSRLNECPLGSAA

SEQ ID NO: 181544 - protein, 314 aa, Unknown
  Bacterial polypetide isolated from the Sargasso Sea
LIKSILKKAEKNIDTVMPGFTHLKNAQPISFAHYLLAYVEMLNRDKKRFLNNIELIDESPLGSAALAGTSYKIDRQFTAKKLGFKKPTGNSIDAVCDRDFAIDFLSAAATCAMHMSRLAEDFIIFNSEAFNFLKFSDRVLTGSSIMPQKKNPDPAELIRGKTAINYGKLNSMLTIMKGLPISYYKDLQDDKALVFDSYDTLKDTLLMANELILNLNANKINMKQMAQKGYTTATDFADYLVKKNNFPFREAYVASSKLVNYAEKRKVRLDELSLKEINKFLKGVKVDNIKIFDVLSSMNSKTSYGGTATKILKI

SEQ ID NO: 181545 - protein, 131 aa, Unknown
  Bacterial polypetide isolated from the Sargasso Sea
MTDQKKSDQATSSEKPWGGRFSEPTDAFVERFTASVGFDQRLYHHDITGSIAHATMLAKVGVLTDAERDQIIEGLKGVKEDIEAGRFEWSVSLEDVHMNIEARLTDRIGITGKKLHTGRSRNDQVATDISL

SEQ ID NO: 181546 - protein, 300 aa, Unknown
  Bacterial polypetide isolated from the Sargasso Sea
FKIKNKIVWGLNRIKNEIIKKKFIYDENLEDIHMNIENRLFQLIGEDAGFIHTARSRNDQVITDLKIWLKKATKEINSNLNLTIKNILKNADKNVETIMPGFTHLKNAQPVSFAHYLLAYVEMFTRDKKRFNNNLDNLNENPLGVAALTGTSFSIDRFYTTKKLKFNKPTKNSIDTVSDRDFVIDFLYCCSTCSIHISRIAEEFIIWNSDAFNLISLNDKIVTGSSIMPQKKNPDPLEFLRGKTGGSIGNLFSMLTILKGLPLSYFKDLQDDKELVFKSFDQLKNSLIILNECFKKFFSK

SEQ ID NO: 181547 - protein, 245 aa, Unknown
  Bacterial polypetide isolated from the Sargasso Sea
MSKNKNNQPIWGNRINKSSKNLFEKVGSSLKIDKRLYHEDILASSVHVEMLFRQKIIDFKIKNKIIWGLKRIKNEIIKKKFSFDEKLEDIHMNIEKRLFDLIGDDAGYIHTARSRNDQVITDFKIWIKKATNQIVKNLDSTINLTLKNANKNVETIMPGFTHLKNAQPVSFAHYLMAYVEMFSRDKKRFLNNIDNLNENPLGVAALTGTSFNIDRFYTSKKLKFKKPTKNSIDTVSDRDFVLDFL

SEQ ID NO: 181548 - protein, 294 aa, Unknown
  Bacterial polypetide isolated from the Sargasso Sea
TDIKLWLRKKIDQIELSLKSFQQILIEKSETYYDLLMPGYTHLQVGQPVTFGHHLLAYVEMLGRDRGRLTDCRNRLNELPLGSAALAGTSYPIDRHYVAQKLNFSKPTENSMDAVSDRDFAIEFMSASSLIAIHLSRLAEELIIWSSDSFNFVKLPESYTTGSSIMPQKRNPDAAELIRAKPGRIFGNLFSLMTVLKGLPMTYGKDMQEDKEPLFDTAKTIEACIINMEGMIKSLEPIPDKMMEALQKGYPTATDLADYLVTELKIPFRDAHHFTGQIVLLAEKKKSTLEKLTM

SEQ ID NO: 181549 - protein, 300 aa, Unknown
  Bacterial polypetide isolated from the Sargasso Sea
NKIIWGLNKIKNEIIKKKFNFNSNLEDIHINIENRLFEIIGEDAGYIHTGRSRNDQVITDLKLWLRSSTVKILNQLNNLIKIIIKDAEKNVQTIMPGFTHLRNAQPISFAHYLLAYVEMFNRDKKRFQNNLENLSENPLGVAALAGTSFNIDRNYTSKKLKFKNPTNNSIDTVSDRDFVLDFLYSVSVCSIHISRMAEEFIIWNSDAFGLIKLHDKVVTGSSIMPQKKNPDPLEYLRGKTGSSFGNLFSMLTILKGLPLSYFKDLQDDKELVFNSYDQIKNSILILSEILKNFTPNKKRM

SEQ ID NO: 181550 - protein, 287 aa, Unknown
  Bacterial polypetide isolated from the Sargasso Sea
YMHTARSRNDQVVTDFKLWVKDSSIILIKELNSLMKNIVSKADKNVSTVMPGFTHLKNAQPVSFAHYLLAYYEMLKRDKKRFQNNLELINESPLGAAALSGTSYNIDRNFTSKKLGFKKPTNNSIDTVSDRDFAIDFLYACAVCAMHLSRLAEDFIILNSDAYQLISFNDKMLTGSSIMPQKKNPDPAELIRGRTGINYGKLNSMLTIMKGLPISYFKDLQDDKSLVFDGFDTLKDTLVMSSELIKNIYPNKTRMSNMAKTGYTTATDFADYLVKDKKLSFREAYKI

SEQ ID NO: 181551 - protein, 202 aa, Unknown
  Bacterial polypetide isolated from the Sargasso Sea
LIIWNSDGFNLIYLSDKIVTGSSIMPQKKNPDLLEYLRGKSGLTFGNLFSMLTILKGLPLSYFKDMQDDKEIVFKSYDTLMNCLKIFDEILKNISPNKKRMYELADSGFLTATDLADYLVKNHSMSFRKAYQKTAEIVNFAEKKKKRLKDLKLEELKKIEPKLTNEVLKVFDLKNSINSKKSYGGTSFENIKRMIMKYRKDK

SEQ ID NO: 181552 - protein, 206 aa, Unknown
  Bacterial polypetide isolated from the Sargasso Sea
MSKNKNNKAIWNARIKANTSALFEKVGTSIDVDKKLFKEDIASSIVHVEMLFRQKIISFKIKNKIIYGLNKIEKEIVKKKFEYKKKYEDIHMNIEKRLFELIGDDAGYIHTARSRNDQVITDFKIWLTKSTKEITKNIDIIIKTILKVAEKNIHTIMPGFTHLKNAQPVSFAHYLMAYVEMFKRDKKRFLDNLENLSENPLGCAAL

SEQ ID NO: 181553 - protein, 274 aa, Unknown
  Bacterial polypetide isolated from the Sargasso Sea
FSNNLNSLNENPLGVAALAGTSFNIDRNYTTKKLGFKIPTNNSIDTVSDRDFVVDFLYASSVCAMHISRIAEDLIIWNSDGFNLINLSDKVVTGSSIMPQKKNPDILEYLRGKSGDAYGNLFSMLTILKGLPLSYFKDLQDDKEIVFKSFDNLNNCLKIFDEILKNCNPNKNKMLELANSGYTTATDLADYLVKNHSMSFRKAYQKTAEVVNFVEKRKKKLNQLTLEELKKIEPKLNEDVLKVFNLKNSINSKKSYGGTSFDNIKKMILKYKKE

SEQ ID NO: 181554 - protein, 274 aa, Unknown
  Bacterial polypetide isolated from the Sargasso Sea
YGLQKIEKEISKNNFDFNKKYEDIHMNIEKKLFDIIGEEAGYIHTARSRNDQIITDFKIWIKKATQEITINLDKVIKSSLKIAEKNIETVMPGFTHLKNAQPTSFAHYLMAYVEMFSRDKRRFINNLENLNESPLGVAALTGTSFNIDRNYTAKKLGFSHPTNNSIDTVSDRDFVLDFLFSISVCSIHISRIAEELIIWNSDGFNLIHLSDKVVTGSSIMPQKKNPDLLEYLRGKTGSMFGNLFSMLTILKGLPLSYFKDMQDDKEIVFKSNDT

SEQ ID NO: 181555 - protein, 269 aa, Unknown
  Bacterial polypetide isolated from the Sargasso Sea
MRGEIDRIGGLLTELRTALLDMAEKNASTIMPGFTHLQVAQPVTFGHHLLAYVEMFSRDAERMIDCRKRVNRLPLGAAALAGTSYPIDRHAVAKTLGFDGICANSLDAVSDRDFAIEFTAASALVMTHVSRFSEELVLWMSPRVGFIDLADRFCTGSSIMPQKKNPDVPELARGKTGRVNGHLIALLTLMKGQPLAYNKDNQEDKEPLFDTVDTVADTLRIFAEMVAGISVKPQAMRDAALQGFSTATDLADYLVKRGLPFRDAHEAVA

SEQ ID NO: 181556 - protein, 315 aa, Unknown
  Bacterial polypetide isolated from the Sargasso Sea
NLKLPLQTQEEDIHSWVEAQWQQKIGAVAKKLHTGRSRNDLVATDLRLWTKLNASQVRSTLITAIGALITFADAHFGAVMPGFTHLQRAQPVLVSHWALAYIEMFKRDLSRIDDALERMDVCPLGCGALAGTGIQIDRTALAQRLGFKSAALNSLDAVSDRDYVVELSATASLCMTHLSRLSEDVIFFCSGEAAFFKLGDAISSGSSLMPQKKNPDVFELLRGKTGRVLGHLVAILHVLKGLPLAYNKDMQEDKQGFFDLMASWQQCLLVLATVLPHLSVNVERCHLAAELGYSNATDLTDYLVGKGIAFRDAHE

SEQ ID NO: 181557 - protein, 262 aa, Unknown
  Bacterial polypetide isolated from the Sargasso Sea
LKRKVGDIAGKVHTGKSRNDQVATDLKMWIKEKLDEIIKRIMHIQKTIIKKSEENINIIMPGFTHLQNAQPILFSHYLLSFFEMINRDKKRAAQLIKNLNECPLGSGALAGTNFFEIDRFFIAKQLGFEKPTENSIDSVSNRDYVVEFLTILSMISMHFSKMSEDFIIWASGAFEFIKFPDSLCTGSSIMPQKKNPDAAELIRSKTGRVFSSLSNLLIIQKGIPSGYSKDLQEDKEPTFDAYYSIEIILNVADEMIKSIKIN

SEQ ID NO: 181558 - protein, 309 aa, Unknown
  Bacterial polypetide isolated from the Sargasso Sea
RSRNDQVITDFKLWLRNSTHEIVKLLNSSIKIILICADKNIKTIMPGFTHLKNAQPISFAHYLLAYVEMFQRDKKRFNNNLDNLMENPLGVAAIAGTSFNIDRNFTTKKLKFSIPTKNSIDTVSDRDFVIDFLYAVSVCSLHISRFAEEFIIWNSDAFKLIQLNDKIVTGSSIMPQKRNPDPLEFLRGKTGNAFGNLFSMLTILKGLPLSYFKDMQDDKELVFKSFDQLKNSLLIFNDILKNFSANKKRMFELAKSGHTTATDLADYMVKEFQFPFRKSYEITSKIVKYAESKRKNLDELDINELKKIE

SEQ ID NO: 181559 - protein, 279 aa, Unknown
  Bacterial polypetide isolated from the Sargasso Sea
FKFKEKFEDIHQNIEKRLFQIIGESAGYLHTARSRNDQVVTDFKIWVKNASLDINKTLNHLMRSILKKASKNIDTVMPGFTHLKNAQPISFAHYLLAYVEMLNRDKKRFVNNIELIDECPLGSAALAGTSFNIDRKFTAKKLGFKKPTNNSIDSVSDRDFAIDFLSAAATCAMHLSRLAEDFIIFNSEAFGFVEFTDKVLTGSSIMPQKKNPDPAELIRGRTAINYGNLNSMLTIMKGLPISYYKDLQDDKALVFDSYDTLKDSLSMSIELIENLNTKK

SEQ ID NO: 181560 - protein, 296 aa, Unknown
  Bacterial polypetide isolated from the Sargasso Sea
VETIMPGFTHLKNAQAISFAHYLMSYVEMFNRDKKRFSNNLNSLNENPLGVAALAGTSFNIDRNYTTRKLGFKIPTNNSIDTVSDRDFVLDFLYASSVCAMHISRIAEELIIWNSDGFNLINLSDKVVTGSSIMPQKKNPDLLEYLRGKSGSAYGNLFSMLTILKGLPLSYFKDLQDDKEIVFKSNDNLNNCLKIFDEILKNCNPNKSKMLELANSGYTTATDLADYLVKNHSMSFRKAYQKTAAVVNFAEKRKKKLNELTLEELRKIEPKLKDDVLKVFNLKNSINSKKSYGGTS

SEQ ID NO: 181561 - protein, 217 aa, Unknown
  Bacterial polypetide isolated from the Sargasso Sea
MSQNKNNKAVWSSRITKKTSSIFQKVGSSISIDKRLFKEDITGSIAHVEMLFKQKIISFKTKNKIVWGLNKIRNEIIKKKFNYKSEYEDIHMNIEKRLFEIIGDDAGFVHTARSRNDQVITDFKLWLRSSTNDIIKLLNSSIKIILIIAEKNIQTIMPGFTHLKNAQPISFAHYLLAYVEMFKRDKKRFKNNIDSLLENPLGASAIAGTSFNIDRNF

SEQ ID NO: 181562 - protein, 280 aa, Unknown
  Bacterial polypetide isolated from the Sargasso Sea
MRKSTNEIIKLLNSTNKLIIKKSEINKETIMPGFTHLKNAQPVSFGHYLLAYVEMFNRDNNRFKNNLNNLLENPLGSAALVGTSFNIDRNFTSKKLGFKYPTSNSIDTVSDRDFVVDFLYAVSLCSLHISRFAEEFIIWNSDGFKLITLNDKIVTGSSIMPQKKNPDPLEFLRGKTGIAYGNLLSMLTILKGLPLSYFKDLQDDKELVFKSFDQLKSSLMILNDVLNNFSPNKKRMLELANEGFITATDLAEYLVKKMNFPFRKAYILTSKIVNYAEKNN

SEQ ID NO: 181563 - protein, 230 aa, Unknown
  Bacterial polypetide isolated from the Sargasso Sea
MSDRKTENSQELWGGRFSEPTDAFVQRFTASEAFDRQLAVYDIAGSSAHAEMLMSTGVLTADENAAIQQGLTDILAEIEQGAFEWSVAREDVHMNIEARLTELIGDVGKKLHTGRSRNDQVATDLRLYLRAALDAISAELTRLQTGIVTLAAQHASTVMPGFTHLQVAQPVTFGHHLLAWNEMLERDYGRLADCRKRLNVSPLGAAALAGTTFPIDRDATAEMLGFDAPT

SEQ ID NO: 181564 - protein, 233 aa, Unknown
  Bacterial polypetide isolated from the Sargasso Sea
SIDTVSDRDFVLDFLYAVSVCSMHISRIAEELIIWNSDGFNLINLSDKVVTGSSIMPQKKNPDLLEYLRGKTGTSYGNFFSMLTILKGLPLSYFKDLQDDKELVFNSNDTLINCLKIFDEVLKNCSANKKKMLELANTGHITATDLADYLVRNHSMSFRKAYQKTAAIVNMAEKRKKNLSELTLHELKKIEPKLTEEVLNIFKLKNSINSKKSFGGTSFDNVRKMIIKYKKIK

SEQ ID NO: 181565 - protein, 283 aa, Unknown
  Bacterial polypetide isolated from the Sargasso Sea
DQVITDARLFAKDALQRLTQETQRLVTALVTLAETHPRTLFPGFTHFQPAQPVLFSHYILAYAQKFMRDIQRFEQAFDTSDVCTLGSGALAGNNYALDRQFMADLLGFSRISFNSMDAVSDRDFMCETLAATSLCMTHLSRFCEDIIVYCSPAMGFLQLGDSVTTGSSLMPQKKNPDIAELIRGKTGRVHAHWHALQTTLKGLPLTYNRDLQEDKPLLYDSVDTTEACLRCFCNMIETIKLDEEAIQTGLEKGYGVATDLADYLVAKGVPFRDAHEITGQMVL

SEQ ID NO: 181566 - protein, 320 aa, Unknown
  Bacterial polypetide isolated from the Sargasso Sea
FKIIGEEAGYVHTARSRNDQVITDFKLWLKSATKEINYNLDKVIKSSIKLAEKNIQTIMPGFTHLKNAQPISFAHYLMSYVENFNRDKKRFINNLESLNENPLGVAAISGTSFNIDRNYTTQKLGFKKPTNNSIDTVSDRDFVLDFLYSISVCSMHISRIAEELILWNSDGFNLINLSDKVVTGSSIMPQKKNPDLLEYLRGKSGTTYGNLFSMLTILKGLPLSYFKDLQDDKEIVFNSNDTLINCLKIFDEVLKNCSPNKKQMLKLANNGYTTATDLADYLVNNNSMSFREAYQKTAAIVNLAEKKKKKLDELTLINKK

SEQ ID NO: 181567 - protein, 324 aa, Unknown
  Bacterial polypetide isolated from the Sargasso Sea
DAGFLHIARSRNDQVITDFKLWIKKSSKEVVNSLNVLIKNFLQQSEKNIKTIMPGFTHLKNAQPISFAHYLLAYVEMFKRDKKRFSSNINYIDECPLGVGALAGTSYKIDRNFTSKKLGFKKPTNNSIDSVSDRDFALDFLSAASICAMHISRFAEELIIWNSDIFKLIELDDKMLTGSSIMPQKKNPDPAELIRGRAGKNFGALQAMLTTMKGLPLSYYKDMQEDKALVFNSYDTLLESIIITNELVKNLKPNKERMFSLSNEGYTTATDFADYLVQNNNLSFRDAYKISAKLVNYAEKKNKKLNQLSFNEVKLMNNDLNKNV

SEQ ID NO: 181568 - protein, 294 aa, Unknown
  Bacterial polypetide isolated from the Sargasso Sea
MGKNKNNKPIWNTRIKKEKINLFKKVGGSISIDKRLFREDIEASIVHVEMLFRQKIINFKIKNKIVWGLNRIKNEIIKKKFIFDDKLEDIHMNIEHRLFELIGEDAGYIHTARSRNDQVVTDFKIWLRNANKEIVRNIDATIKNILKKAEKNVETVMPGFTHLKNAQPVSFAHYLMAYLEMFNRDKIRFKNNLESLNENPLGVAALTGTSFKIDRFYTSKKLGFDRPTKNSIDTVADRDFVIDFLYSCSACAIHISRIAEEFIIWNSDAFRLINLNDKIVTGSSIMPQKKILIH

SEQ ID NO: 181569 - protein, 235 aa, Unknown
  Bacterial polypetide isolated from the Sargasso Sea
MKKNPSRNVHFSKGPSEILDAINSSIDIDQRLYKEDITGSIAHAKMLGKQKIISKKEQNAIVSGLKAIERDIEKNKVVFSKKLEDIHMNIESLLFKKIGKIAGKLHTARSRNDQVVTDLKLWIKKESKILDSELKKFQKTLINIAKKNTETIMPGYTHLQIAQPITLAHHVLAYVEMIGRDRTRLEDCLYRLNENPLGAAALAGTSFPIDRKYTSKELGFREPTKNAMDTVSDRD

SEQ ID NO: 181570 - protein, 271 aa, Unknown
  Bacterial polypetide isolated from the Sargasso Sea
MLDCSKRLNINPLGSAALAGTAFPIDRQSTTKELNFTSPTTNSIDAVSDRDFVMEFLSISAITSIHISRLSEEIVIWCSDQFNFIKLSDKFSTGSSIMPQKRNPDAAELARGKSGRIIGSLMSILVVLKGLPLSYSKDLQEDKEGLFDSFDSLYICIKACIGMISDVTINKEKMLEASKYGYTTATDLADWLVKELKIPFRKSHEISGRLVKLAEKNNCLLHELPLDSFKSIEKKINNNVFKVLSVENSVKSKISYGGTSPKEVLKQIKNA

SEQ ID NO: 181571 - protein, 252 aa, Unknown
  Bacterial polypetide isolated from the Sargasso Sea
HYILAYVEMFERDKRRLKNNFKSLEENPLGSGALSGTSFNIDRNFTTKKLGFKVPTNNSIDTVSDRDFVLDFLYASSTCAMHISRLAEEFIIWNSDAFRMISLNDSMVTGSSIMPQKKNPDPLEYLRGKVSNSYGNLFSMMTILKGLPLSYFKDLQDDKKIVFDTFDNLIDSIKVLNEVLKNFSINKSEMLNLAKKGHITATDLADYLVKNLNYPFRKSYQITAKIVNYCEKNKKNLSDLSFKELKRIETNI

SEQ ID NO: 181572 - protein, 194 aa, Unknown
  Bacterial polypetide isolated from the Sargasso Sea
MKNKTIWSNRFKYKTSQSFQKIGSSIHIDKRLYEQDIAASVVHTQMLMKQKIIKSQDGKKIINGLKKIKAQIDKGNFEFKEKYEDIHLNIEKALFDIIGPSAGFLHTARSRNDQVVTDFKLWIKKASNEIIKDISVVMKNLIKKAEKNTDTVMPGLTHLKNAQPISFAHYLLSYYEMLKRDKKRFENNLELLDE

SEQ ID NO: 181573 - protein, 196 aa, Unknown
  Bacterial polypetide isolated from the Sargasso Sea
MKKKNKAVWGTRFSNAPSKIFEEIGASIDVDKRLFAEDVLGSVVHTQMLVKQKIIDRKKGNKIISGLKKIRNEIEKNKFKFNKKYEDIHLNIEKRLFAIIGNDAGYLHIARSRNDQVITDFKLWIKKASKETVKRLNDLIKSFIKKSENNIQTIMPGFTHLKNAQPISFAHYLLAYVEMFKRDKKRFISNIDYINE

SEQ ID NO: 181574 - protein, 289 aa, Unknown
  Bacterial polypetide isolated from the Sargasso Sea
RAQPVLVAHWALAYVEMFKRDVSRLDDALARMDVCPLGCGALAGTGVAVDRVALAQSLGFASAALNSLDAVSDRDYVVELSAAASLCMTHLSRLSEDVIFFCSGEAGFFKLGDAISSGSSLMPQKKNPDVFELLRGKTGRVLGHLVAILHVLKGLPLAYNKDMQEDKQGFFDLMQTWQQSLLVLATVLPHLSVNVQQCRQAAELGYSNATDLADYLVSKGMPFRDAHEVVGELVVHAAKQQQALEALTLDEFKQFSSLISEDVYPALQLEAGLQKRAALGGTAPQQVLA

SEQ ID NO: 181575 - protein, 269 aa, Unknown
  Bacterial polypetide isolated from the Sargasso Sea
GSLVHTQMLIKQKIISRIKGKKIIYGLKKIRNEIKKNKFKFNKKYEDIHLNIEKRLFTIIGNDAGYLHIARSRNDQVITDFKIWIKKASKEIIKNLNFLTKSFLNKSKNNIETIMPGFTHLKNAQPISFAHYLLAYVEMFKRDKKRFINNIEYIDECPLGVGALAGTSYKIDRNFTSKKLGFKKPTNNSIDSVSDRDFTLDFLSAASICAVHISRFAEELIIWNSDIFKLIQLNDKMLTGSSIMPQKKNPDPAELIRGRAGKNFGSLSA

SEQ ID NO: 181576 - protein, 299 aa, Unknown
  Bacterial polypetide isolated from the Sargasso Sea
MQRAQPLSLAHHLLAYLEMLQRDRERLKEVRARVNISPLGAAALAGTKIKIDRHFTAAELGFEKIYKNSIDAVSDRDFCIEFVSASALLMSHLSKISEEIILWVTDEFSFAKLTDKCATGSSLMPQKKNPDVPELIRGKTGRVYGHLQALLTMVKGVPLSYNKDFQEDKEPIFDTAETISSCTKAMTILINEGIEFNIKNLSDSVENDFSNATDLADYLVAKDVPFRTAYQVVGEIVKYCLERKMLFKNLKIDEFKKFHPEFDEDVFVDLKPLNVVKSRNSEGGTGFVQVEKEVNSGKK

SEQ ID NO: 181577 - protein, 281 aa, Unknown
  Bacterial polypetide isolated from the Sargasso Sea
KIIHGLKKIKKNISSNKIKLDPRHEDIHMNIESILNKNIGSIAGMLHTGRSRNDQVVTDFKLWIKNHAKIIDKEIKLLQKVLIKISKKNLFTVMPGYTHLQIAQPVSLAHHFLAYVEMFGRDQKRIHNCITLLDENPLGSGAIAGTQFPIDRKFTTKLLGFKSPTTNSIDSVSDRDFAIEFIFTLTMLGTHLSRLAEEIILWSSQHFNFINLPDHLSNSSSIMPQKKNPDGAEIVRSNVSSLIGNLNSILIILKGLPLAYSKDLQDDKKLTFQSYDNVLLS

SEQ ID NO: 181578 - protein, 263 aa, Unknown
  Bacterial polypetide isolated from the Sargasso Sea
AAFTFQKVGSSLNVDKRLFREDITASIAHVEMLEKQKIITVAVKNKIIWGLKKILNEIIKKKFSFDERNEDIHMSIEKRLFEILGEDAGFIHTARSRNDQVLTDLKIWLRKSTYEIIDDLNKTMKIFLKCAEKNIHTIMPGLTHLKNAQPISFGHYLVAYIEMFLRDKKRFKNNLENLYENPLGVAAFSGTSFNIDRFYTTKKLKFNKPTGNSIDTVSDRDFVCDFLYSVSLCSIHISRFSEEFIIWNSDAFNMISLNDKIVT

SEQ ID NO: 181579 - protein, 216 aa, Unknown
  Bacterial polypetide isolated from the Sargasso Sea
MSKVKKNKSVWSSRILNENSNNFKKFGSSIYIDKRLFKEDISASMVHIEMLCKQKIISLKVKNKIIWGLKKILNEIVKKKFNFDIKHEDIHMNIENRLFEIIGEDAGYLHTARSRNDQVITDFKLWIRKANKEIIKNLDTTIKIILSSSEKHIYTIMPGFTHLKNAQPISLAHYLLAYVEMFSRDKKRFLRNLSSLLENPLGVGALSGTSYNIDRN

SEQ ID NO: 181580 - protein, 277 aa, Unknown
  Bacterial polypetide isolated from the Sargasso Sea
MAKVWSKRFDNALDPFIEKFNASVGFDKKLILEDLECSIAHAKMLGKTKVLSPSEVLQIINGLKLIKVEYLEGKFSPGPPSEDIHYCIEEKLISLIGETGKKLHTGRSRNDQVGTDIRLWLRKEIDNIEILLIDLQKSFLNLAKSNIYTLIPGYTHMQRAQPLSLAHHLLAYIEMLQRDRERYKEVRSRVNISPLGAAALAGTKIKIDRHFTATELGFKKIYKNSIDAVSDRDFCIEFVSASALLMSHLSKISEEIILWVTDEFSFAKLTDKCATGS

SEQ ID NO: 181581 - protein, 239 aa, Unknown
  Bacterial polypetide isolated from the Sargasso Sea
FSFKIKNKIIWGLNRIHNEIIKKKFNFDISHEDIHMSIEKRLFDLIGDDAGYIHTARSRNDQVVTDFKLWLIKSTKEIIKILEKLNKVIILNAEKNIDTIMPGFTHLKNAQPISLAHYLMSHIEMFNRDKERFNNNFQSLLENPLGVAAISGTSFNIDRNYTTKKLKFSKPTRNSVDTVSDRDFVLDFLYATSVCSMHISRISEELIIWNSDAFNFISLNDKMVTGSSIMPQKRNPDPL

SEQ ID NO: 181582 - protein, 228 aa, Unknown
  Bacterial polypetide isolated from the Sargasso Sea
MSKNKNNKPVWSSRISKDTSYIFQKVGSSLRIDRRLFKEDLRGSIAHVEMLYKQKIISLSIKNKIVWGLNRIFNEINKKKFFFNEKNEDIHMSIENRLFELIGEDAGYIHTARSRNDQVLTDFKLWLRDSTKEIIKELNLTMQIIIKNAEKNINTIMPGFTHLKNAQPISFAHYILAYMEMFERDKKRFQNNLENLMENPLGVAALSGTSFNIDRNYTTKKLKFNKPT

SEQ ID NO: 181583 - protein, 276 aa, Unknown
  Bacterial polypetide isolated from the Sargasso Sea
FDSSLNPFIEKFNASIDFDRKLVLEDLDCSIAHAKMLGKTKVLTANEALQIVKGLEKIKVEYLEGEFFPSPPSEDIHYCIEEKLIRLIGETGKKLHTGRSRNDQVGTDIRLWLRKEIDNLEILITNLQKSFLNIAKSHIYTLIPGYTHMQRAQPLSLAHHLLAYLEMLQRDRERFKEVRARVNISPLGAAALAGTKIKIDRNFTAAELGFEKIYKNSIDAVSDRDFCIEFVSASALLMSHLSKISEEIILWVTDEFSFAKLTDKCATGSSLMPQKK

SEQ ID NO: 181584 - protein, 299 aa, Unknown
  Bacterial polypetide isolated from the Sargasso Sea
RYYYWPGFTHLKNAQAISFAHYLMAYVEMFERDKKRFNNNLDSLNENPLGAAALTGTSFNIDRNYTSKKLGFKKPTNNSIDTVSDRDFVLDFLFAVSICSMHISRIAEELIIWNSDGFNLINLSDKVVTGSSIMPQKKNPDLLEFIRGKSGISYGNLFAMLTILKGLPLSYFKDLQDDKEIIFKSFDTLSDCLKIFDEILKNISPNKKKMLELANSGYITATDLADYLVINCSTPFRKAYQKTAKIVNLAEKKKKRLNELTLEDLKLIEPKLTEDVLKVFDLKNSIKSKTSYGGTSFVI

SEQ ID NO: 181585 - protein, 287 aa, Unknown
  Bacterial polypetide isolated from the Sargasso Sea
NIDTVMPGFTHLKNAQPISFAHYLLAYVEMLNRDKKRFSNNIELIDECPLGSAALAGTSYKIDRQFTAKKLGFKKPTGNSIDAVCDRDFAIDFLSAAATCAMHMSRLAEDFIIFNSEAFNFLKFSDKVLTGSSIMPQKKNPDPAELIRGKTAINYGKLNSMLTIMKGLPISYYKDLQDDKALVFDSYDTLKDTLLMANELILNLNTNKINMKEMAQKGYTTATDFADYLVKKKNFPFREAYATTSKLVNYAEKKKLRLDELSLKEINKFLKKVKIDNVKIFNVFSSM

SEQ ID NO: 181586 - protein, 282 aa, Unknown
  Bacterial polypetide isolated from the Sargasso Sea
ILGSLIHVEMLAKQKIITKKIKNKIINGLKKIEKEILRKKFIFNKKHEDIHMNIEKRLFELIGNDAGFIHTARSRNDQVITDFKLWTKSANNQLQKNLSRLIKTILKIANKNIETIMPGFTHLKNAQPVSLAHYLLAYVEMFERDKKRLLNNLDNLNENPLGVAAISGTSFNIDRLYTTKKLGFKKPTNNSIDTVADRDFVLDFLYTISVCSLHISRIAEELIIWNSDGFNLITLNDKVVTGSSIMPQKKNPDPLEYLRGKVGGTFGNLFSMLTILKGLPLS

SEQ ID NO: 181587 - protein, 276 aa, Unknown
  Bacterial polypetide isolated from the Sargasso Sea
SSDTVKPWGGRFTGPTDAFVEAFTASVEFDQRLALCDIEGSMAHVQMLGEVGVLEAAECAAIRNGLAAVKGRIESGEFAWSIALEDVHMNVEQALVEEVGDVGKKLHTARSRNDQVATDIRLYLRTQIDAIRVVLSRLMMALVDLAEREADSLMPGFTHLQAAQPISFGHHMMAWFEMLWRDHERLADCRKRTNVLPLGAGALAGTTFPIDRERVAALLGFDGVAENSLDAVSDRDFAIEFCAAAAMLMMHLSRMAEELILWNSQAFGFVTMDDAF

SEQ ID NO: 181588 - protein, 257 aa, Unknown
  Bacterial polypetide isolated from the Sargasso Sea
TKIKIDRHFTAEELGFEKIYKNSVDAVSDRDFCIEFVSSSALLMSHLSKISEEIILWVTDEFSFAKLTDKCATGSSLMPQKKNPDVPELIRGKTGRVYGHLQALLTMVKGVPLSYNKDFQEDKEPIFDTAETISSCIKAMSILINEGIEFNIQNLSDSVENDFSNATDLADYLVNKDVPFRTAYQVVGEIVKYCLERKMLFKNLKIDEFKKFHPEFDEDVFVDLKPFNVVKSRNSEGGTGFVHVEKEVNNWQKKLLL

SEQ ID NO: 181589 - protein, 265 aa, Unknown
  Bacterial polypetide isolated from the Sargasso Sea
SIAHAKMLGKTLVLSSSETLKIINGLQKIKVEYLEGNFSPGLPSEDIHYCIEEKLISLIGETGKKLHTGRSRNDQVGTDIRLWLRKEIDNLEILINDLQKSLLHLAKTNIYTLIPGYTHLQRAQPLSLAHHLLAYLEMFQRDRDRFKEVRSRVNICPLGAAALAGTKIKIDRNFTASELGFDKIYKNSIDAVSDRDFCIEFISASALLMSHLSKISEEIILWVTDEFSFAKLTDKCATGSSLMPQKKNPDVPELIRGKTGRVYGH

SEQ ID NO: 181590 - protein, 272 aa, Unknown
  Bacterial polypetide isolated from the Sargasso Sea
RHNYSPLGSAALAGTTFNINRDETSNNLDFKAPMSNSIDAVSDRDFILDALNLCCSISIHLSRLSEEIILWSSPGFNFINLPDTFSTGSSIMPQKKNPDAAELIRGKSGRVIGNYVNLFNVMKALPLAYSKDMQEDKEPLFDSIKTTKDTINVMSEMIKEITFNPDKMLEMCNKGHINATDVADALVADLGVPFRDAHRITGKLVAIADRKKIQIHELNIRDFKKVDKRINKNIVNKITLEASVKNRDSYGGTSPENIKKEIIFSKEKWCND

SEQ ID NO: 181591 - protein, 232 aa, Unknown
  Bacterial polypetide isolated from the Sargasso Sea
IDTVADRDFVLYFLYSVSVCSLHLSRISEELIIWNSDGFNLINLSDKIVTGSSIMPQKKNPDLLEYLRGKSGITFGNLFSMFTILKGLPLSYFKDLQDDKEIIFKSYDVLFQSLKIFSEILKNVSPNKKRMLELAYSGYITATDLADYLVKNNSMSFRKAYQKTASLVNLAEKKKKKLNELSLEDLKKVEPTLTKDVLKVFDLKNSVNSKKSYGGTSFDNIKKMIRKYRKLR

SEQ ID NO: 181592 - protein, 194 aa, Unknown
  Bacterial polypetide isolated from the Sargasso Sea
GNQFIDLDDAWCTGSSIMPQKKNPDIPELIRGKTGRVYGDLIALLTLMKAQPLAYNRDNQEDKESLFDAVDTLKMCLTAFAGLIPSITVNNKSMLDAAERGYTTATDLADYLVLQGVPFRDAHAVVGKAVQYASKKSKTLSALSLSELQQFSELIKDDVFAVLKLEGSVLARNHVGGTSPTQVKTQIARVKKKI

SEQ ID NO: 181593 - protein, 185 aa, Unknown
  Bacterial polypetide isolated from the Sargasso Sea
TGSSIMPQKKNPDVAELVRGRSGRAVGNLTALLVLMKGQPLAYNRDNQEDKQPLFDSFDNAHACLGVLAAMVPNMTFDRERMRNAASRGHATATDLADYLVREGMAFRDAHEVVGRAVQLAESSGRELDALSLEELRGVSDRINKDVFEILTLEGSLHSRNHIGGTAPGQVRLAAEQARQVLAER

SEQ ID NO: 181594 - protein, 310 aa, Unknown
  Bacterial polypetide isolated from the Sargasso Sea
PIDKRLFKEDIEGSIAHVEMLHKQKIINFRIKNKIIWGLKRIKNEIVKKKFNFNYDLEDIHMNIENRLFELIGDDAGYVHTARSRNDQVITDLKLWLKEATKKIIILLDNTNSNILNLAQKNIRTIMPGFTHLKNAQPLSLAHYLLAYVEMFKRDKKKFKNNLEFLDENPLGVGALSGTSFKIDRDYTTKKLKFKKPTNNSVDTVSDRDFVLDFLYSSLACSLHISRIAEELIIWNSDAFNMITLNDKLVTGSSIMPQKKNPDPLEYLRGKTGIFIGNINSMISILKGLPLSYFKDLQDDKEIVFKQMIN

SEQ ID NO: 181595 - protein, 275 aa, Unknown
  Bacterial polypetide isolated from the Sargasso Sea
MKKNPSRNVHFSKGPSELLDKINSSIDVDQRLFREDIAGSIAHAKMLGIQNIISKKDSGKIVSGLKSIEKDIENNKVKFSRKLEDIHMNIESLLLKKIGKVAEKLHTGRSRNDQVVTDLKLWIKKNSNDLDNELKTFQKTIIRVSKKNINTVMPGYTHLQIAQPITLAHHLLAYFEMIGRDRLRLKDCLYRLNENPLGSAALAGTSFPINRKYTTKELGFREPTRNAMDSVSDRDFVIEFMFLLSLTGVHLSRLAEEIILWSNQQFDFIFFTDDL

SEQ ID NO: 181596 - protein, 286 aa, Unknown
  Bacterial polypetide isolated from the Sargasso Sea
VSLAHHCMAYVEMIGRDRERIFDCIKRMNQNPLGSGALAGTSFSIDRNFTTKNLGFDKPTNNSIDSVSDRDFVIEFIFSLSLLGIHLSRLAEEIVMWSNQNFNFIKLPDELSTGSSIMPQKKNPDGAELVRSNVATSIGNLNSILIIMKSLPLAYSKDLQDDKKLTFSTFDITLLSIKVINEIMKKVKFNKQNMQNAIENSFSTATDLADWLVKNLNYNFRKAYKITGNIVNYAYKKDKLLFQLSLKEMQKFEKKINKDIFSVLSVEKSMKSKTSFGGTAPNRVKN

SEQ ID NO: 181597 - protein, 215 aa, Unknown
  Bacterial polypetide isolated from the Sargasso Sea
MKKNPARNVHLKKGPSNLLEEINSSIETDYRLYREDIEGSIAHAKMLANKKIISKNEGISIIKGLNKILKKIEVGKVSFRKELEDIHMNIESLLFKEIGKTAGKLHTARSRNDQVVTDFKLWIKNNSKSLNKNIQQLQKSLINISKKNLNTVLPGYTHLQIAQPISLAHHCLAYVEMLGRDRSRLNDCLNRLNENPLGSAALAGTSFPIDRNLTS

SEQ ID NO: 181598 - protein, 292 aa, Unknown
  Bacterial polypetide isolated from the Sargasso Sea
DFKFWMKNSTNEINSNINKFFKNTIKLAEKNVETIMPGFTHLKNAQAISFAHYLMSYVEMFNRDKKRFSNNLNSLNENPLGVAALSGTSFNIDRNYTTKKLGFKIPTNNSIDTVSDRDFVLDFLYASSVCAMHISRIAEELIIWNSDGFNLINLSDKVVTGSSIMPQKKNPDLLEYLRGKSGNAYGNLFSMLTILKGLPLSYFKDLQDDKEIVFKSNDNLNNCLKIFDEVLKNCNPNKSRMLELANSGYITATDLADYLVKNHSMSFRKAYQKTAAVVNFAEKRKKKLNELT

SEQ ID NO: 181599 - protein, 251 aa, Unknown
  Bacterial polypetide isolated from the Sargasso Sea
KKANKEIVKNIDVTIKNILKKAEKNVETIMPGFTHLKNAQPVSFAHYLMAYLEMFNRDKNRFKNNLESLNENPLGVAALTGTSFKIDRFYTSKKLGFNRPTKNSIDTVSDRDFVIDFLYSCSACAVHISRIAEEFIIWNSDAFKLINLNDKIVTGSSIMPQKKNPDPLEYLRGKTGLMFGNLFSMLTTLKGLPLSYFKDLQDDKEIVFKSFDQLKNSLIILNDVLKNFSPDKKRMIELAENGFITATDLAD

SEQ ID NO: 181600 - protein, 239 aa, Unknown
  Bacterial polypetide isolated from the Sargasso Sea
NPTVNSIDSVSDRDFAVEFIFVLSMIAIHLSRLAEEIILWSSQHFNFVKLPDQLSTGSSIMPQKKNPDGAEIVRSNVSSIIGNLSSIMIILKGLPLAYSKDLQDDKKITFKSFDDVLLSTKVMTEILNNVQFNKKVMHNSIYNSYSTATDLADWLVKNLDFTFRDAYNLTGKIVNYASKRDKLLDKISLKEFQKFEKNITKQVFKVLSPLNSMKSKSSFGGTSPETVKKSIQYAIKKYL

SEQ ID NO: 181601 - protein, 264 aa, Unknown
  Bacterial polypetide isolated from the Sargasso Sea
LKNAQPISFAHYVLAYVEMFGRDKRRLKNNFTNLRQNPLGSGALSGTSFNIDRNFTTKKLGFKVPTSNSIDTVSDRDFVLDFLFASSVCAMHISRLAEEFIIWNSDAFRLITLKDNIVTGSSIMPQKKNPDPLEYLRGKVSNAYGNLFSMMTILKGLPLSYFKDLQDDKKIVFDAFDNLTNSIKVLNEVLINFSVNKNEMLNLAKIGYITATDLADYFVKNLNYPFRKAYQITAKIVNYCEKNKKNLSDLSYKELKRIEPGIKE

SEQ ID NO: 181602 - protein, 301 aa, Unknown
  Bacterial polypetide isolated from the Sargasso Sea
NNSKILDDAVKSLQKKLIIIAKKHTLTIMPGYTHLQIAQPVSLSLHLMAYVEMFNRDRSRLKDCLYRLNENPLGAAALSGTSFPIDRDFTSKLLNFRNPTRNAMDSVSDRDFAIEFIFVLSLIAVHLSRISEEIILWSNQQFNFISLPDELATGSSIMPQKRNPDAAEIVRGQTSLIISNLNALLTILKGLPLTYSKDLQDDKKLVFNSFDSVLMAINIITEILSKTKFNIINMKKAVDNSQSTATDFANWLVQELNYTFRDAYNLTGKIVLYASKKNINLESLSLNDLKKLTKTYQNQQQ

SEQ ID NO: 181603 - protein, 293 aa, Unknown
  Bacterial polypetide isolated from the Sargasso Sea
IAHVEMLSKQKIIPFKVKNKIVWGLNKIRNEIIKKKFIFKLEYEDIHMNIEKRLIEIIGDDAGFVHTARSRNDQVLTDFKMWLKTSTNEIINLLNSSIKILITNAEKNVETIMPGFTHLKNAQAISFAHYLLAYVEMFKRDKNRFNNNLDSLLENPLGVGAIAGTSFNIDRNYTSKKLKFSNPTNNSIDTVSDRDFVIDFLYAVSVCSVHISRLAEEFIIWNSDAFRIIKLNDKMVTGSSMMPQKKNPDPLEYLRGKTGNAFGNLFSMLTILKGLPLSYFKDMQDDKELVFKS

SEQ ID NO: 181604 - protein, 270 aa, Unknown
  Bacterial polypetide isolated from the Sargasso Sea
MTKNKNNEAIWSNRIKKKPSKLFQEIGGSIDVDKRLFKEDILASSVHVEMLAKQKIISSKIKKKILNGLKKINKEIQNKKFIFSKKHEDIHMNIEKRLFQLIGDDAGFIHTARSRNDQVITDFKLWIKKANKNLDQNLNELIKTILKIANKNIKTVMPGFTHLKNAQPVSLAHYLLAYVEMFKRDKERLFYNLDNLNENPLGVAALSGTSFNIDRFYTTKKLGFKKPTNNSIDTVADRDFVLDFLYTISVCSLHISRVAEELIIGTQMVL

SEQ ID NO: 181605 - protein, 270 aa, Unknown
  Bacterial polypetide isolated from the Sargasso Sea
MAKVWSKRFDNALDPFIEKFNASIGFDRKLILEDLDCSIAHAKMLGKTKVLSSSEALQIINGLESIRVEYLEGKFSPSPPSEDIHYCIEEKLISLIGETGKKLHTGRSRNDQVGTDIRLWLRKEIDNIEVLITDLQKSFLSLAKSNIYTLIPGYTHMQRAQPLSLAHHLLAYIEMLQRDRERLKEVRTRVNISPLGAAALAGTKIKIDRYFTASELGFEEIYKNSIDAVSDRDFCIEFVSASALLMSHLSKISEEIILWVTDEFSLQNNR

SEQ ID NO: 181606 - protein, 280 aa, Unknown
  Bacterial polypetide isolated from the Sargasso Sea
MFKRDKQRFKNNLENLNENPLGVAALSGTSFNIDRFFTSKKLGFKKPTNNSIDTVADRDFVLDFLYTVSVCSLHISRLAEEFIIWNSDGFGLINLNDKIITGSSIMPQKKNPDPLEYLRGKTGFTFGNLFSMLTILKGLPLSYFKDLQDDKEIVFKSNEIIINCINILNEILKNFSPNKQKMLELASIGYITATDLADYLVQNNNIPFRKAYKITASIVNYAEKNKKKLSDLNINELKKIEPKLSKDVLKIFNLKYSINSKKSYAGTAFDNIKKMITKHK

SEQ ID NO: 181607 - protein, 150 aa, Unknown
  Bacterial polypetide isolated from the Sargasso Sea
MKKNPSRNVHFTKGSSNLLDTINASIDVDQRLYKEDILGSIAHAKMLGKQKIISKKDETNLISGLKSVQKDIEKNKVFFSKKLEDIHMNIENLLLKKIGKVAGKLHTARSRNDQVVTDLKLWIKSNSLLLDYELKNFQKTLINVAKKNTA

SEQ ID NO: 181608 - protein, 269 aa, Unknown
  Bacterial polypetide isolated from the Sargasso Sea
KEDIAVSIAHTELLFKQKIISFKIKNKIIYGLNKIEKEILNKKFEFNKKYEDIHMNIEKRLFQIIGEEAGYVHTARSRNDQVITDLKIWIKSATNEIDITLNKIIKSTLKLAEKNVETIMPGFTHLKNAQPISFSHYLLAYVEIFNRDKKRFKNNLDDLNENPLGVAALSGTTFNIDRDYTTKKLGFKRPTNNSIDTVSDRDFVLDFLYTVAVCSMHISRIAEELIIWNSDGYGMINLSDKVVTGSSIMPQKKNPDVLEYLRGKSGTVY

SEQ ID NO: 181609 - protein, 287 aa, Unknown
  Bacterial polypetide isolated from the Sargasso Sea
MRWLERDYSRLVDAKNRMSVMPLGSAALAGSRYKINRSFLAKKLGFQSLSRNSIDAVSDRDFVIETASTLSILGVHLSRICEEIVLWSSSQFEYVYLSDEVCTGSSIMPQKKNPDVAELIRGGSSKTIANLMGLLSLMKNLPLSYNRDLQEDKDFIFRSIDYSNDSLVLLGLLIKGMKANTKKMEADCKLGQITATDLADYLVDKSMPFRKAHETVGKIVAHAESKGVQIFELEISELRKFSKLISEDVNSYLDPVKSINSRKLVGGTAPSQVRKEINYAKKVLAKR

SEQ ID NO: 181610 - protein, 179 aa, Unknown
  Bacterial polypetide isolated from the Sargasso Sea
MPQKRTPDAAELVRGKSGRVVGDLNALLTMVKGLPLAYNRDLQEDREALFDALETTTACARITAGMWRTLEVKRERYEAALTGDFLLATELADYLATKGVPFRDAHHVSGRLVAWCEDNDTDFSSLTLEVLQQHHAAFDADALGWLEPRAAAERRDSLGGTASSEIARQIDALRVWLAE

SEQ ID NO: 181611 - protein, 305 aa, Unknown
  Bacterial polypetide isolated from the Sargasso Sea
MVDKRLYREDIFASVIHTKMLIKQKIIPKKDGIRIVNGLKKIKKEIDKNKFKFREQYEDIHQNIEKRLFEIIGKPAGYLHTARSRNDQVVTDFKMWVKSASLNINLILNSLIKSILIKAEKNIDTVMPGLTHLKNAQPISFAHYLLAYVEMLTRDKRRFLNNIELIDECPLGSAAMAGTSYNIDRNFTAKKLGFKKPTRNSIDSVCDRDFAIDFLYSAATCAMHMSRLAEDFIIFNSEAFNFLKFSDKVLTGSSIMPQKKNPDPAELIRGKTAINYGTLNSMLTIMKGLQISYYKDLQDDKALVF

SEQ ID NO: 181612 - protein, 194 aa, Unknown
  Bacterial polypetide isolated from the Sargasso Sea
ISKDTSYIFQKVGSSLRIDRRLFKEDLRGSITHVEMLYKQKIISLSIKNKIVWGLNKIFNEISRKKFFFNEKNEDIHMSIENRLFEIIGEDAGYIHTARSRNDQVLTDFKLWLRDSTKEIIKELNLTMQIIVKNAEKNINTIMPGFTHLKNAQPISFAHYILAYMEMFGRDKKRFKNNLENLMENPLGVAALSG

SEQ ID NO: 181613 - protein, 299 aa, Unknown
  Bacterial polypetide isolated from the Sargasso Sea
MKKKLKNKNLWGGRFLENPSKEMTRINASINFDKKLYRQDILASKAHAEMLCNQKIINEDEKNKLLKGLDKIGKEISKSKIKFEEELEDIHTHIEHRLIKLLGDLGKKLHTARSRNDQVATDLKIWIREEHYLIDALLKNLQSSLLEKAEKHIFDIMPGFTHLQAAQPITLAHHMLAYVNMFGRDRENLISLIERHNYSPLGSAALAGTTFNINRDETASKLGFNSPMSNSLDAVSDRDFVLDALNLCCSIFIHLSRLAEEIILWSSPGYGFVELPDTFSTGSSIMPQKKNPDAAELIR

SEQ ID NO: 181614 - protein, 221 aa, Unknown
  Bacterial polypetide isolated from the Sargasso Sea
DFLYNCSVCSMHISRIAEELIIWNSDGFNLIRLSDKVVTGSSIMPQKKNPDLLEYLRGKTGLVYGNLFSMLTILKGLPLSYFKDLQDDKEIVFKANDTLINCLKILNETLINIIPNKKNMLELANLGYLTATDLADYLVKNHSKSFREAYQITAKLVNFAEKNKKKLEDLSIQDLKTIEPKLTNDVLKVFDLKNSINSKKSYGGTAFYNIKKMILKYKKTL

SEQ ID NO: 181615 - protein, 294 aa, Unknown
  Bacterial polypetide isolated from the Sargasso Sea
IDNIEILITELQKSFLNLAKSNIYTLIPGYTHMQRAQPLSLAHHLLAYIEMLQRDRERYKEVRSRVNISPLGAAALAGTKIKIDRHFTAAELGFKKIYKNSIDAVSDRDFCIEFVSASAILMSHLSKISEEIILWVTDEFSFAKLTDKCATGSSLMPQKKNPDVPELIRGKTGRVYGHLQALLTMVKGVPLSYNKDFQEDKEPIFDTAETISSCIKAMTILINEGIEFDIENLSDSVENDFSNATDLADYLVDKDVPFRTAYQVVGQMVKYCLERKMLFKNLKIEEFKKFHPEI

SEQ ID NO: 181616 - protein, 254 aa, Unknown
  Bacterial polypetide isolated from the Sargasso Sea
TSFNIDRNFTTKKLGFKKPTDNSIDTVSDRDFVLDFLYASSVCAMHISRFAEEFIIWNSDAFKLITLNDSIVTGSSIMPQKKNPDTLEHLRGKVGNSYGNLFSMLTILKGLPLSYFKDLQEDKKIVFETFDNLSNSIKIFNDVLKNFTVNKKEMLELADKGYITATDLADYFVRELNYSFRKSYQLTAKIVNYCEKNKKFFSDLSIQELKKIEPNIKDNVIKVFDIRNSVNSKKSYGGTSFENIKKMIRKYKNA

SEQ ID NO: 181617 - protein, 305 aa, Unknown
  Bacterial polypetide isolated from the Sargasso Sea
ADLLTKINSSIDIDKRLAFEDILGSKAHVEMLAKVQIINKKTKTKILNGLKKIEKELNDGDFSFDNLLEDIHMNIESRLGEIIGADAGRIHTARSRNDQVVTDLRLWIRKAIEDIELELSKLQSVLLKKAEKNMEIIFPGYTHLQVAQPVRFSHHLLAYLEMFGRDLERFKQTKERLNECPLGAAALAGTSFPIDRFYTAKALGFKAPMRNSMDAVSDRDFVLEFISDSSIAMVHFSRLAEEFILWGSTEFDFISLPDSLVTGSSIMPQKKNPDAAELIRAKTGRVNGALLSLLTVMKGLPLAYA

SEQ ID NO: 181618 - protein, 121 aa, Unknown
  Bacterial polypetide isolated from the Sargasso Sea
MSRKKTNKIRKRFSKSSSLNFQKINSSIEFDKFLYQEDIEGSIAHASMLASQKIITMQEGKKITNGLKKILKEIKTNKLKFDANLEDIHMNIESRLEELIGDTAGKLHTARSRNDQVVTDL

SEQ ID NO: 181619 - protein, 223 aa, Unknown
  Bacterial polypetide isolated from the Sargasso Sea
VLDFLYAISVCSMHISRIAEELIIWNSDGFNLINLSDKVVTGSSIMPQKKNPDLLEYLRGKTGASYGNFFSMLTILKGLPLSYFKDLQDDKELVFNSNDTLINCLKIFNEVLKNCSANKKKMLELANTGHITATDLADYLVRKHTMSFRKAYQKTAAIVNMAEKRKKNLNELTLNELKKIEPKLTEEVLEIFNLKNSVNSKKSFGGTSFENIKKMITKYKKLK

SEQ ID NO: 181620 - protein, 177 aa, Unknown
  Bacterial polypetide isolated from the Sargasso Sea
MLEKINSSIEIDSRLYKEDIEGSVAHAKMLIKTKIIKSKEGKQIISALFSILKDIEKNKVKFSSSYEDIHMNIEFLLQKKIGSLAGKLHTARSRNDQVVTDLKLWIKKHIHTIDNECKKFQKILINVAKKNINTVMPGYTHLQIAQPVSLAHHCLAYVEMIGRDRSRLNDCKHRLNE

SEQ ID NO: 181621 - protein, 247 aa, Unknown
  Bacterial polypetide isolated from the Sargasso Sea
MNNKNKAVWGTRFNKATSKIFEKIGASIDIDKRLFEEDILASTVHAQMLIKQKIIDKKKGKKIINGLKKIREEIRKNRFKFDKKYEDIHLNIEKRLFSIIGNDAGYLHIARSRNDQVITDFKLWIKKSSKEIIKNLDNLIRSFLQKSERNIQTIMPGFTHLKNAQPISFAHYLLAYVEMFKRDRKRFINNIDYIDECPLGVGALAGTSYKIDRNFTSRKLGFKKPTNNSIDSVSDRDFALDFLSSAS

SEQ ID NO: 181622 - protein, 198 aa, Unknown
  Bacterial polypetide isolated from the Sargasso Sea
MKKLWGGRFKQSTDSLMETFSASISFDKRLYDCDIEGSIAHCKMLARCKIITTAESNKIIKGLKRILRECDEGRFKFSDSLEDIHMNIENRLREIIGPVAGKLHTARSRNDQICLDIRLYLRKEIDDIVGAINRLTKTLITIAKKNINHLIPGYTHLQRAQPVLLSHHLLAYVEMMLRDKERFLDAYKRINVMPLGSA

SEQ ID NO: 181623 - protein, 283 aa, Unknown
  Bacterial polypetide isolated from the Sargasso Sea
RDFERIIETRSRTDVSPLGAGALAGSSLPIDPLMTSESLGFSETFKNSLDAVSDRDFVAEAIFVNALLGVHLSRIGEELVLWSSEEFGFVDIDDEYTTGSSMLPQKKNPDVAELARAKTGRIIGNLAGFLTVLKGLPLTYNKDLQEDKEPLFDSFDTNSLVLTALTGMLNSITFNEEKMSAAADKPFSMAIDLAEYLVHKGMPFREAHALIGGLVKTSIDDKKDFEKLVLENDNFGPEIEDFFKPEMAIRRRITPGSTGLEAVEVQKELIEKRLETQTSMISR

SEQ ID NO: 181624 - protein, 211 aa, Unknown
  Bacterial polypetide isolated from the Sargasso Sea
MVRNKNNQTIWNTRIKKKISTYFKKVGSSINIDKRLYKEDIRGSVAHTEMLFRQKIISFKIKNKILYGLQKIEKEILNNKFDFKKEFEDIHMNIEKRLFQIIGEEAGYIHTARSRNDQVITDLKIWIKSSNKELNINLDKIIKSTIKIAEKNIETVMPGFTHLKNAQPISLAHYLMAYVEMFVRDKNRFTNNLKNLNESPLGVAALTGTSF

SEQ ID NO: 181625 - protein, 304 aa, Unknown
  Bacterial polypetide isolated from the Sargasso Sea
NKKKGNKIVSGLKKIKSEINKNKFIFKKKYEDIHLNIEKRLFEIIGPDAGYLHIARSRNDQVITDFKMWVKKASYEIEKNLNNLIKSFLKKSEQNIQTIMPGFTHLKNAQPISFAHYLLAYVEMFKRDKQRFINNIDYINECPLGVGALSGTSYNIDRFFTSKKLGFKKPTNNSIDTVADRDFALDFLSAASICAVHISRLAEELIIWNSDIFKIINFDDRMLTGSSIMPQKKNPDPAELIRGRAGKNFGSLQAMLTTMKGLPLSYYKDMQEDKAIVFNSYDTLLGSIIINNELVKALKPNKKR

SEQ ID NO: 181626 - protein, 233 aa, Unknown
  Bacterial polypetide isolated from the Sargasso Sea
MSKAQATSADSAPSHNQLDTKAQAWSALFSEPMSDLVKRYTSSVFFDKRLWQADIAGSLAHAEMLAAQGIISAEDNASIQRGMAQIKEEIESGAFEWKLDLEDVHLNIEARLTQLVGDAGKRLHTGRSRNDQVATDVRLWLRGEIDLIGDLLKELQVSLVDVAEQNVEVILPGFTHLQVAQPVSFGHHMLAYVEMFKRDAERMADVRRRTNVLPLGSAALAGTTYPLDRERVA

SEQ ID NO: 181627 - protein, 272 aa, Unknown
  Bacterial polypetide isolated from the Sargasso Sea
MADEILLPFDIWTNRAHCIMLEQCGLIQSTHLTSILNGLRELEDSIEKGTFRLKPELEDVHTNIEVFVSEAQGADAGGRMHIGRSRNDQSACDMRLYLRNRATGLFGDVKSFAKTLLDLAEEHTGTVMPGFTHYQPAMITSWGHWLCAYVQGLCRDLERVGFTLRLVNRNPLGAAAGFGSSWPLNRELTTELLGFDRVESNSLDCIVSRWENEAQLAHAFSMLMNRLSVISQDLIILSLPYLKMVRIDDGFVTGSSIMPQKKNPDFAEVIRS

SEQ ID NO: 181628 - protein, 307 aa, Unknown
  Bacterial polypetide isolated from the Sargasso Sea
NQAIWQTRIKKNASSLFQKVGNSIDIDKRLYKEDILGSIAHVEMLFKQKIISFKIKNKIVYGLAKIDKEITNNKFEFNKKYEDIHMNIEKRLFQIIGEEAGYVHTARSRNDQVITDFKIWMKNSTNEINNNINKVIKSTIKLAEKNVETIMPGFTHLKNAQAISFAHYLMSYVEMFSRDKKRFLNNLESLNENPLGVAALAGTSFNIDRNYTTKKLGFKIPTNNSIDTVSDRDFVLDFLYATSVCAMHISRIAEELIIWNSDAFNLINLSDRVVTGSSIMPQKKNPDLLEYMRGKSGSAYGNLFSML

SEQ ID NO: 181629 - protein, 290 aa, Unknown
  Bacterial polypetide isolated from the Sargasso Sea
FKKVGSSIEVDKRLYKEDILASVSHAEMLYKQKIITIKIKDKILWGLKKIQNEIERKNFKFDENLEDIHMNIENRLFELIGNDAGYLHSARSRNDQVVTDLKLWLKKSTVEIDGLLLKLIKSLIKISEKNIFSIMPGFTHLKNAQPISLAHYFLSNVEMFKRDRFRFSSNMKSLNQNPLGASAFSGTSFNIDRWYTTKKLKFEEPTNNSLDTVSDRDFVLDFLYSSSICSMHISRIAEELIIWNSDQFKFISLKDNIVTGSSIMPQKKNPDTLEFLRGKTGSIFGNLFSM

SEQ ID NO: 181630 - protein, 261 aa, Unknown
  Bacterial polypetide isolated from the Sargasso Sea
MFKQKIISFKIKNKIIYGLNKIEKEILNKKFEFNEKYEDIHMNIEKRLFQIIGEDAGYIHTARSRNDQVITDFKIWVRDATYKINTSLDKVIRSTLNLAEKNIYTIMPGFTHLKNAQAISFAHYLMAYIEMFKRDKKRFINNFDTLDENPLGVAALSGTPFNIDRNYTTKKLGFKRPTNNSIDTVSDRDFVLDFLYSISLCSMHISRIAEELIIWNSDGFNLINLSDKVVTGSSIMPQKKNPDLLEYLRGKSGSAYGNLFS

SEQ ID NO: 181631 - protein, 261 aa, Unknown
  Bacterial polypetide isolated from the Sargasso Sea
MEDIHMNVESRLKEIIGDTAGKLHTARSRNDQVSTDLRLWVRNAISILDKELKELQKRLIVLAESNTSTIMPGFTHLQNAQPITFGHHLLAYVEMFGRDRSRLLDCSKRLNINPLGSAALAGTAFPIDRQSTTKELNFTSPTTNSIDAVSDRDFVMEFLSISAITSIHISRLSEEIVIWCSDQFNFIKLSDKFSTGSSIMPQKRNPDAAELARGKSGRIIGSLMSILLVLKGLPLSYSKDLQEDKEGLFDSFDSLYIVLKH

SEQ ID NO: 181632 - protein, 158 aa, Unknown
  Bacterial polypetide isolated from the Sargasso Sea
MYHTNINNSDNEIFQKFTESVSYDRNLFKQDIKGSIAHAKMLAKQNIISTDDADKICSGLYQIEKEIINNKFIWKYELEDIHMNIESRLQELIGDIAGKLHTARSRNDQIALDMRLFLKETIVDTIKLLLELQSTIIARAEENLDVIIPGYTHMQRAQ

SEQ ID NO: 181633 - protein, 283 aa, Unknown
  Bacterial polypetide isolated from the Sargasso Sea
MTNFEDIHMNIEHRLFELIGDDAGFIHTARSRNDQVVTDFKIWLKKANSEILKNIDVTIKNILKKAEDNIETIMPGFTHLKNAQPVSFAHYLMAYLEMFNRDKKRFVNNLDSLNENPLGVAALTGTSFKIDRFYTSKKLGFQKPTKNSIDTVSDRDFVIDFLYSCSACAVHISRIAEEFIIWNSDAFKLINLNDKIVTGSSIMPQKKNPDPLEYLRGKTGFMFGNLFSMLTTLKGLPLSYFKDLQDDKEIVFKSFDQLKNSLIILNDVLKNFSPDKKKMLELA

SEQ ID NO: 181634 - protein, 276 aa, Unknown
  Bacterial polypetide isolated from the Sargasso Sea
MFSRDKKKFKNNLDNLNENPLGVAALTGTSFNIDRFYTTKKLKFNKPTKNSIDTVSDRDFVIDFLYSCSACSIHISRIAEEFIIWNSDAFNLITLNDKIVTGSSIMPQKKNPDPLEFLRGKSGGSIGNLFSMLTILKGLPLSYFKDLQDDKELVFKSFDQLKNSLVILNDILKNFSVNKKRMLELANTGYTTATDLADYMVKELNYPFRKAYLQTAKIINYSEKNKKKLSELKIEEIKKIEPKLNNDVFKVFDLKYSINSKTSFGGTSFANIKKMI

SEQ ID NO: 181635 - protein, 236 aa, Unknown
  Bacterial polypetide isolated from the Sargasso Sea
MRNKNKTVWSNRFSKGNSRNFQRIGSSINIDKRLYEEDIFASIIHAQMLIKQRIIPKKDGAKIIKGLKKIEKEIEKNKFKFKEKFEDIHLNIEKRLFEIIGQSAGYLHTARSRNDQVVTDFKMWVKKASLDINETLNLLIKSILKKAEKNIDTVMPGFTHLKNAQPISFAHYLLAYVEMLNRDKKRFLNNIELIDECPLGSAALAGTSYKIDRQFTAKKLGFKKPTGNSIDAVCDR

SEQ ID NO: 181636 - protein, 242 aa, Unknown
  Bacterial polypetide isolated from the Sargasso Sea
FGEDAGYIHTARSRNDQVITDFKIWIKNSTYVINDNINKIIRSTIKLAEKNIETIMPGFTHLKNAQVISFAHYLMSYVEMFNRDKKRFHNNLDSLNENPLGAAALAGTSFNIDRNFTSKKLGFQKPTNNSIDTVSDRDFVLDFLFAASLCAMHISRIAEELIIWNSDGFNLIKLSDKIVTGSSIMPQKKNPDLLEYLRGKSGTIYGNLFSMLTILKGLPLSYFKDLQDDKEILFKSYDDLNN

SEQ ID NO: 181637 - protein, 158 aa, Unknown
  Bacterial polypetide isolated from the Sargasso Sea
MNIESLLFKQIGKTAGKLHTARSRNDQVVTDFKLWIIDNSVSLNNLLQKFQKSLIKVAKKNISTVMPGFTHLQVAQPISLAHHCLAYVEMIGRDRSRLNDCIRRLNENPLGSCALAGTSFPIDRNFTTRLLKFSRPTVNALDSVSDTDFAVEFLFVLT

SEQ ID NO: 181638 - protein, 236 aa, Unknown
  Bacterial polypetide isolated from the Sargasso Sea
ANSLDAVSDRDFAMEFLSAASICAVHLSRFAEEIINWNSIQFGFVSLSDAFTTGSSIMPQKRNPDAAELVRGKTGRVLGSLNSLLIMMKGLPLAFFKDMQEDKEPLFDASDTLEVCIYACIGMVDDMKPNAEKMRAASDQGFSTATDLADWLVRELDLPFRRAHHVTGEIVKLAEQKSCRLVDLKIEELKSIETSINEKIFDVLDPVKSVFSRVSFGGTAPGNVKKAAVEARKRFL

SEQ ID NO: 181639 - protein, 232 aa, Unknown
  Bacterial polypetide isolated from the Sargasso Sea
KNIKVIIPFYTHLQKAQPILASHFINSYIEMFLRDMARLKHAYDISDVSPLGSCAGAGTSFNIDRKLTAKLLGFKEISRNSLDSVSDRDFVADSIYSCSMLMMHFSRFCEDLIIWNSSEFGFIKIGDSFTTGSSIMPQKKNPDILELIRGKCGSVYGNLNNILVNLKGLPSSYNRDLQEDKEPLFSSFKTAMECTGIFTDMIKSVVFNSEKIKSSINSGFMTATDIADYLVK

SEQ ID NO: 181640 - protein, 242 aa, Unknown
  Bacterial polypetide isolated from the Sargasso Sea
MLFRQKIINFKIKNKIVWGLSRIKNEIIKKKFIFDDKLEDIHMNIENRLFELIGEDAGYIHTARSRNDQVITDFKIWLRKANKEIVKNIDVTIKNILKKAEKNVETIMPGFTHLKNAQPVSFAHYLMAYLEMFNRDKNRFQNNLESLNENPLGVAALTGTSFKIDRFYTSKKLGFQRPTKNSIDTVSDRDFVIDFLYSCSACAVHISRIAEEFIIWNSDAFKLINLNDKIVTGSSIMPQKKN

SEQ ID NO: 181641 - protein, 301 aa, Unknown
  Bacterial polypetide isolated from the Sargasso Sea
PSEDIHYCIEEKLISLIGETGKKLHTGRSRNDQVGTDIRLWLRKEIDNLEILLIDLQKSFLNLAESNIYTLIPGYTHMQRAQPLSLAHHFLAYLEMFQRDRERFKEVRSRVNISPLGAAALAGTKIKIDRNFTAAELGFEKIYKNSIDAVSDRDFCIEFVSASALVMSHLSKISEEIILWVTDEFSFAKLTDKCATGSSLMPQKKNPDVPELIRGKTGRVYGHLQALLTMVKGLPLAYNKDLQEDKEPIFDTAETISSCIKAMTILVNEGIEFNIKNLTDSVENDFSNATDLADYLVGKEV

SEQ ID NO: 181642 - protein, 261 aa, Unknown
  Bacterial polypetide isolated from the Sargasso Sea
ALAGTSFPINREKTSSALHFKAPSANSLDAVSDRDFALEFLSVSSICGMHLSRLAEELVIWSSAQFKLISLSDRFSTGSSIMPQKKNPDAAELIRAKIGRIFGANVALMIVMKGLPLAYSKDMQEDKEQVFDAADNLMVALAAMSGMIKDLKANKENMEAAAHFGFSTATDLADWLVQKLNLPFREAHHITGQIVQRAEVKKCDLCDLDLAVIREVDDRITEDIYSVLSVQNSVASRASYGGTAPSQVRSQIARWRKTLEL

SEQ ID NO: 181643 - protein, 234 aa, Unknown
  Bacterial polypetide isolated from the Sargasso Sea
MSKNKNNKAIWSTRIKKNTTSTFKKVGSSISIDKRLFKEDIQGSIVHVEMLFKQKIISFKIKNKIIWGLNKIQNEILKGKFDFKVELEDIHMNIENRLHEIIGEDAGFVHTGRSRNDQVVTDLKIWMKTSTLDLIKLLESLNKIFLKVAEKNIETVMPGFTHLKNAQPISFAHYLLAYFEMFKRDKVRFANNLKSLNENPLGAAAFAGTNFNIDRFFTTKKLKFNYPTNNSIDT

SEQ ID NO: 181644 - protein, 261 aa, Unknown
  Bacterial polypetide isolated from the Sargasso Sea
GLNKIEKEISNKKFEFEKKYEDIHINIEKRLFQIIGEEAGYVHTARSRNDQVITDFKIWIKSANHKISIMLNNVISNSINLAEKNVDTIMPGFTHLKNAQAVSFAHYLMAYVEMFKRDKDRFKSNLESLNENPLGVAALTGTSFNIDRNYTTKKLGFERPTNNSIDTVADRDFVLDFLYSVSVCSLHLSRIAEELIIWNSDGFNLINLSDKIVSGSSIMPQKKNPDLLEYLRGKSGITFGNLFSMFTILKGLPLSYFKDLQ

SEQ ID NO: 181645 - protein, 278 aa, Unknown
  Bacterial polypetide isolated from the Sargasso Sea
HLLAWVEMLLRDRSRLQDCRKRINVLPLGSAALAGTTFPIDRNYVAKILGFDEVTQNSLDAVSDRDFAVEFLASGSLIMMHLSRFSEEIVFWMSQRNHFIDLDDAWCTGSSIMPQKKNPDIPELVRGKTGRVYGDLMALLTLMKSQPLAYNRDNQEDKENLFNAVDIVKSCLIAYTGLISAISVNQKAMYEAAQAGFSTATDLADYLVAKGLPFRDAHEVVGKVVQYLIENNKTLKKDDMPLFELEKFSNLIEADVFDILTLEGSVSARDHIGGTSPT

SEQ ID NO: 181646 - protein, 221 aa, Unknown
  Bacterial polypetide isolated from the Sargasso Sea
MSRKKTNKIRKRFSKSSSLNFQKINSSIEFDKFLYQEDIEGSIAHASMLASQKIITMQEGKKITNGLKKILKEIKTNKLKFDANLEDIHMNIESRLEELIGDTAGKLHTARSRNDQVVTDLKLWMKKDNDLISKKIKELKLILVKNAQSNVANIMPGLTHFQTAQPISIGHYFMSYYEMFNRDSKRFEEAKNRIDENPLGSCALAGTSFKINRNKTSKLLG

SEQ ID NO: 181647 - protein, 222 aa, Unknown
  Bacterial polypetide isolated from the Sargasso Sea
LELLSDASIGMVHLSRFAEDLIFFNTGEAGFIELSDRVTSGSSLMPQKKNPDALELIRGKCGRVQGALTGMMMTLKGLPLAYNKDMQEDKEGLFDALDTWLDCLHMAALVLDGIQVKRPRCEEAAQQGYANATELADYLVAKGVPFREAHHIVGEAVVEAIAQGKPLEDLALADLQKFSGVIADDVYPILSLQSCLDKRSAKGGVSPKQVAQAIADAKQRLV

SEQ ID NO: 181648 - protein, 245 aa, Unknown
  Bacterial polypetide isolated from the Sargasso Sea
EKGKFNFKTELEDIHMNVESRLKEIIGDTAGKLHTARSRNDQVSTDLRLWVRNAISILDKELKELQKRLIVLAESNISTIMPGFTHLQNAQPITFGHHLLAYVEMFGRDRSRLLDCSKRLNINPLGSAALAGTAFPIDRQSTTKELNFAAPTTNSIDAVSDRDFVMEFLSISAITSIHISRLSEEIVIWCSDQFNFIKLSDKFSTGSSIMPQKRNPDAAELARGKSGRIIGSLISILLVLKGLPI

SEQ ID NO: 181649 - protein, 244 aa, Unknown
  Bacterial polypetide isolated from the Sargasso Sea
KATKEIVGNLNLTIKNILKSADKNIETIMPGFTHLKNAQPVSFAHYLLAYVEMFTRDKKKFNYNLENLNENPLGVAALTGTSFNIDRFYTTKKLKFTKPTKNSIDTVSDRDFVIDFLYSCSRCSIHISRIAEEFIIWNSDAFNLISLNDKVVTGSSIMPQKKNPDPLEFLRGKTGGSIGNLFSMLTILKGLPLSYFKDLQDDKELVFKSFDQLKRSLIILNDILKNFTVNKKRMLELANEGYIT

SEQ ID NO: 181650 - protein, 295 aa, Unknown
  Bacterial polypetide isolated from the Sargasso Sea
ANDQVITDMRLYLLDEITQIISKLEDVMKALWTVADEKLGIIIPGFTHLQPAQPVLLSHHFLAHFEKFSRDRGRFIQNIQSTDVCPLGSGALAGNNYDLDRKLVAKELGFDAMTRNSMDAVSDRDFMLEFCHNATVCMTHLSQFCEELIIWSSPITNFIVIGDEFTTGSSIMPQKKNPDIAELIRGKSGRVLGNYTALVHLIKGLPLTYNRDLQEDKEIVFDTAVTLAGALTCFSKMIGSITFNKEAMDEALKKGFLLATDFADYLVKKGVPFRESHEITGKVVLYCQENKKELW

SEQ ID NO: 181651 - protein, 228 aa, Unknown
  Bacterial polypetide isolated from the Sargasso Sea
MNSVIKNTLKLAEKNIYTIMPGFTHLKNAQAISFAHYLLAYVEMFNRDKKRFNNNLDNLNENPLGVAALTGTSFNIDRNYTSKKLGFNKPTNNSIDTVSDRDFVLDFLYSVSVCSMHISRIAEELIIWNSDAYNLINLSDKVVTGSSIMPQKKNPDLLEFLRGKSGSAYGNLFSMLTILKGLPLSYFKDLQDDKEIVFKSYDTLIGCLKIFEEVIKNLRPNKEQMLEL

SEQ ID NO: 181652 - protein, 196 aa, Unknown
  Bacterial polypetide isolated from the Sargasso Sea
MTNKNKTVWSGRFKSSTSKSFQRIGASINVDKRLYEQDIFASKIHTQMLIKKKIIPAKDGKKIIKGLDKIRSQIKKGKFIFKEKFEDIHLNIEKKLYEIIGNSAGYMHTARSRNDQVVTDFKLWVKDSSIILIKELNSLMKNIVSKADKNVSTVMPGFTHLKNAQPISFAHYLLAYYEMFKRDKLRFKNNLELIDE

SEQ ID NO: 181653 - protein, 96 aa, Unknown
  Bacterial polypetide isolated from the Sargasso Sea
ANATELADYLVAKGIPFREAHHIVGETVVYAIQVKKPLEELTIGEFQRFSPVIEFDVYPNLELEATLAKRVAKGGVAREQVEAALTAAEAWLAKRG

SEQ ID NO: 181654 - protein, 312 aa, Unknown
  Bacterial polypetide isolated from the Sargasso Sea
IRRIGEVGKKLHTGRSRNDQVATDLRLYLRDITDQITHYLKHLQKALLELAEKETFTIFPGFTHLQVAQPVSFAHHIMAWFEMIDRDIDRFNDYRKRLNVLPLGSAALAGTSYKINRDQVASILGFDSVSKNSMDAVSDRDFAIEFCSNSSLLIMHLSRWAEEIILWSTPQYDFVSLPDSFCTGSSIMPQKKNPDVPELIRGKTGRVYGSLFNLLTLMKAQPLAYNKDNQEDKEPVFDTANTIKDCLKALILLVPEISVNREKMATAATQGFSTATDLADYLVKKGIAFRDSHETVGKIVQHAIQSNCLLSE

SEQ ID NO: 181655 - protein, 197 aa, Unknown
  Bacterial polypetide isolated from the Sargasso Sea
MTRKKNSSLSKPTKNKKNTRNVIWGGRFDQNPTKAMVNLNSSIDFDKRLYKHDISASIAHSEMLAKKGIISKKDERSIKKGLKAILKEIETGNFGYSQRLEDIHMNVESRLKELIGEAAGRLHIARSRNDQVATDFRLWIREALETMDILLRDFQGTLISIAEKHTETIMPGYTHLQNAQPVTLGHHLLAYVEMLGR

SEQ ID NO: 181656 - protein, 194 aa, Unknown
  Bacterial polypetide isolated from the Sargasso Sea
MKNKTVWANRLKGKTSLSFQKIGSSIGVDKRLYEQDIAASIVHTKMLVKQKIISGKDGSKIINGLKKIKSQIDKGKFKFQEKFEDIHLNIEKKLFELIGPSAGFMHTARSRNDQVVTDFKLWIKKSSKETIGNINSLMKILIKKSEKNFDTVMPGLTHLKNAQPISFAHYLLSYFEMFKRDIKRFENNIKLLDE

SEQ ID NO: 181657 - protein, 289 aa, Unknown
  Bacterial polypetide isolated from the Sargasso Sea
KGLQRILRECNEGSFEFSNSLEDIHMNIENRLREIVGPVAGKLHTARSRNDQVCLDLRIYLRKEIDDIVVELDRLSKALVDIAQKNIEHSIPGYTHLQRAQPVLLSHHLLAYVEMMLRDKERFLDAYKRINVMPLGSAALAGTNFPIDRKITAKLLGFPEISHNSMDAVADRDFAAEFCSASALTMMHLSRFCEEVVIWNSSEFGFLELSDAFTTGSSIMPQKKNPDAAELIRGKSGRVFGNLVSLLTMMKGLPLAYNKDLQEDKEPIFDTSETVKACLRIFTDMIKTG

SEQ ID NO: 181658 - protein, 186 aa, Unknown
  Bacterial polypetide isolated from the Sargasso Sea
TGSSMMPQKKNPDFAELARGKTGRVFGNLFRILTILKGLPLTYNRDLQEDKEGFFDTIDTVLATLDVFAGMIPAMEINVQNMNALSESSEMLATDLADYLVNKGTPFRIAYNAVKDLCQYCEDNNSKPSDLSLDEFKKFAKEFGEDALNITAQSSVEARDNPGGTAPNRVKAALENAKSQVNKNEL

SEQ ID NO: 181659 - protein, 299 aa, Unknown
  Bacterial polypetide isolated from the Sargasso Sea
MGSKAHASMLASCKIISEADYLAIDQGLNQISAEIESGEFVFSEDLEDIHMNIEARLAELIGEPALRLHTARSRNDQVATDFKLWVRELLDTVDEALADMQSALLDQAEAHADLLMPGFTHLQTAQPVTFGFHLMAYVEMIGRDRGRFSDARARLNESPLGAAALAGTTFPTDRHLTAKALEFDRPAANAMDAVSDRDFALEFLTSAAICSVHLSRFAEELVIWSSDRFGFIVLSDDFTTGSSIMPQKRNPDAAELVRVKPGRIIGALNGLLIVLKGLPLAYGKDMQEDKESVFDAADS

SEQ ID NO: 181660 - protein, 168 aa, Unknown
  Bacterial polypetide isolated from the Sargasso Sea
MKKNPSRNVHLKKGPSKLLEEINSSIEIDHRLYREDIQGSIAHAKMLANKKIISKNEKGLIVKGLNKILKKIEAGKVSFKKELEDIHMNIESLLYSEIGKTAGKLHTARSRNDQVVTDFKLWIKNNSKNLDKNIQQLQKNLINISKKNLNTVLTGYTHLQIAQPNFNG

SEQ ID NO: 181661 - protein, 260 aa, Unknown
  Bacterial polypetide isolated from the Sargasso Sea
IMSKNKNNKAVWSLRIKKDSSSIFKKAGSSINIDKRLFKEDILASTAHVEMLFKQKIISFKIKNKIVWGLNKIRNEIIKKKFNFKIEHEDIHMNIEKRLFDIIGDDAGFVHTARSRNDQVITDFKLWLRNSTNEIVKLLNSSIKIILICADKNIKTIMPGFTHLKNAQPISFAHYLLAYVEMFQRDKKRFKSNLDNLMENPLGVAAIAGTAFNIDRNFTTKKLKFSTPTKNSIDTVSDRDFVIDFLYAVSVCSLHISRFA

SEQ ID NO: 181662 - protein, 285 aa, Unknown
  Bacterial polypetide isolated from the Sargasso Sea
NIALNPSWGGRFENAVNRLAISYTSSIDVDKRLYEQDILGSMKYALALKEAKVIKNIDYFKISKGLKSILKEIESGKFQWKEELEDVHMNIENSLKRKIGNAAKKLHTGRSRNDQVSTDLRLFVLKSIDEMGELISNVQTTILNKAKRHCDDLMPGFTHLQVAQPVTFGHHLMAWYEMLSRDFARLQDTKKRTSIMPLGSGALSGNRYNIDRQKLAKRLNFDGISNNSIDAVSDRDFSIELLSNISILGIHLSRISEELILWSSSQFNYVDLPDEFCTGSSIMPQ

SEQ ID NO: 181663 - protein, 248 aa, Unknown
  Bacterial polypetide isolated from the Sargasso Sea
MDKESEKKPWGGRFSEPTNQFVERFTASIDFDKRLGLYDITGSKAHAEMLERCGIISSEELKQIDNGLEEIADTIRNGTFKWSAALEDVHMNIEGELVNRIGEVGKKLHTARSRNDQVATDLRLFLRDKTDESVEKLKDLVRSIVQLAHKESATLMPGYTHLQVAQPVTFGHHLLAWAEMILRDISRFKNCRSRINILPLGSGALAGTTFPIDRRITADILGFDDVSENSMDSVADRDFVIEFVSAAT

SEQ ID NO: 181664 - protein, 262 aa, Unknown
  Bacterial polypetide isolated from the Sargasso Sea
MKKNPSRNTHLKNIPSKLLESINNSIDIDQRMYKEDIEGSIAHATMLGKQKIISKKDQTKIVNGLKIILQKINSGKIHFKSELEDIHMNIESLLFKQIGETAGKLHTARSRNDQVVTDFKLWIRNNSINLDKHLQNLQKSLINVAKKNTATVMPGYTHLQVAQPISLAHHCLAYIEMMGRDRSRLKDCIERLNESPLGSGALAGTSFPIDRNLTSKLLKFSKPTANALDSVSDRDFAVEFLFVISLISTHLSRMADEIVLWS

SEQ ID NO: 181665 - protein, 251 aa, Unknown
  Bacterial polypetide isolated from the Sargasso Sea
HAKMLGKTQVLSSSEALQIINGLESIKVEYLEGKFSPGPPSEDIHYCIEEKLISLIGETGKKLHTGRSRNDQVGTDIRLWLRKEIDNIEILITDLQKSFLNSAKSNIYTLIPGYTHMQRAQPLSLAHHLLAYVEMLQRDRERFKEVRARVNISPLGAAALAGTKIKIDRQFTALELGFEKIYKNSIDAVSDRDFCIEFVSASALLMSHLSKISEEIILWVTDEFSFAKLTDKCATGSSLMPQKKNPDVPEL

SEQ ID NO: 181666 - protein, 283 aa, Unknown
  Bacterial polypetide isolated from the Sargasso Sea
THLKNAQPISFAHYLLAYVEMFKRDRKRFVNNIDYINECPLGVGALAGTSYKIDRNFTSKKLGFKKPTNNSIDTVSDRDFALDFLSSASICAMHISRFAEELIIWNSDIFKLVKLDDKMLTGSSIMPQKKNPDPAELIRGRAGKNFGSLQAMLTTMKGLPLSYYKDMQEDKALVFESYDTLLESIIIANELIKSLKPNKERMFSLSNEGYTTATDFADYLVQNNNLSFREAYKISAKLVNYAEKNKKKLNQLNFNEVKKVKNNLDKKVMNVFNVRNSVNFKTS

SEQ ID NO: 181667 - protein, 301 aa, Unknown
  Bacterial polypetide isolated from the Sargasso Sea
SSSQPVTFGHHLLAYVEMLGRDKGRLEDCRTRLNECPLGSAALAGTSFPIDRDFTAHYLGFDRPTANSLDAVSDRDFAMEFLSAASICAVHLSRFAEEIINWNSIQFGFVSLSDAFTTGSSIMPQKRNPDAAELVRGKTGRVLGSLNSLLIMMKGLPLAFFKDMQEDKEPLFDASDTLEVCIYACIGMVDDMKPNVKKMRAASDQGFSTATDLADWLVRELDLPFRKAHHVTGEIVKLAEQKSCRLVDLKIEELKSIETSINEKIFDVLDPVKSVFSRVSFGGTAPGNVKKAAVEARKRFL

SEQ ID NO: 181668 - protein, 202 aa, Unknown
  Bacterial polypetide isolated from the Sargasso Sea
LWVTDEFSFAKLTDKCATGSSLMPQKKNPDVPELIRGKTGRVYGHLQALLTMVKGVPLSYNKDFQEDKEPIFDTAETISSCIKAMTILINEGIEFNIKNLSDSVENDFSNATDLADYLVNKDVPFRTAYQVVGQMVKYCLERKMLFKNLKIEEFKKFHPEFDDDVFVDLKPLNVVKSRNSEGGTSFVQVEKEINNWQKRLLI

SEQ ID NO: 181669 - protein, 306 aa, Unknown
  Bacterial polypetide isolated from the Sargasso Sea
KKIYKEIEKGKFNFKTELEDIHMNVESRLKEIIGDTAGKLHTARSRNDQVSTDLRLWVRNAISILDKELKELQRRLIVLAESNTSTIMPGFTHLQNAQPVTFGHHLLAYVEMFGRDRSRLLDCSKRLNINPLGSAALAGTAFPIDRQSTTKELNFTSPTTNSIDAVSDRDFVMEFLSISAITSIHISRLSEEIVIWCSDQFNFIKLSDKFSTGSSIMPQKRNPDAAELARGKSGRIIGSLISILVVLKGLPLSYSKDLQEDKEGLFDSFDSLYICIKACTGMISDVTINKEKMLEASKTAYTTATD

SEQ ID NO: 181670 - protein, 244 aa, Unknown
  Bacterial polypetide isolated from the Sargasso Sea
TNLGFDNPTNNSIDTVSDRDFVLDFLFSISVCSMHISRISEELIIWNSDGFNLIQLSDKVVTGSSIMPQKKNPDLLEYLRGKSGFTFGNLFSMLTILKGLPLSYFKDMQDDKALVFKSYDTLINSLKVFDEILKNISPNKKKMFELADTGFITATDLADYLVKNHSMSFRKAYQKTAEIVNFAEKKGKKFKDLKIEELKKIEPKLTSEVLKIFELKNSINSKKSYGGTSFENIKRMIMKYKRNK

SEQ ID NO: 181671 - protein, 192 aa, Unknown
  Bacterial polypetide isolated from the Sargasso Sea
MTNKNKTVWSGRFKSSTSKSFQRIGASINVDKRLYEQDIFASKIHTQMLIKKKIIPAKEGKKIIKGLEKIKGQIKKGKFIFKEKFEDIHLNIEKKLYEIIGNSAGYMHTARSRNDQVVTDFKLWVKDSSIIMIKEINILMKHILSKAEKNVSTVMPGFTHLKNAQPVSFAHYLLAYYEMLKRDKKRFQNNLE

SEQ ID NO: 181672 - protein, 253 aa, Unknown
  Bacterial polypetide isolated from the Sargasso Sea
LLKLQKVLISIVKKHTNTIMPGYTHLQVAQPISLAHYSLAYVEMMGRDRQRLKNCIEILNENPLGSGALAGTSFPIDRNYTSSLLKFKNPTVNALDSVSDRDFAVEFLFVLSLISIHLSRMADEVILWTNQQFNFVKLPDELTTGSSIMPQKKNPDGAELVRGNSGNVISNLSTLLIILKGLPLAYSKDLQDDKKIIFSSFDNVSLALKVMTEMWSGITFNTHVMKEAVKNSNATATDFANWLVQNLNFSFRE

SEQ ID NO: 181673 - protein, 278 aa, Unknown
  Bacterial polypetide isolated from the Sargasso Sea
RIVPPKEGKKIISGLKIIRQQIDKGKFVFKEKFEDIHLNIEKKLFEIIGPSAGYLHTARSRNDQVVTDFKLWIKKSTIEIVEDVSKIMKTLVKKAEKNIGTVMPGFTHLKNAQPISFAHYLLAYYEMLKRDKKRFLNNLKLLDESPLGAAALSGTSYKIDRNYTAKKLGFKKPTDNSIDSVSDRDFAIDFLYASAVCAMHLSRLAEDFIILNSDAYKLISFRDRMLTGSSIMPQKKNPDPAELIRGRTGINYGKLNSILTIMKGLPISYFKDLQDDKS

SEQ ID NO: 181674 - protein, 281 aa, Unknown
  Bacterial polypetide isolated from the Sargasso Sea
FKEKYEDIHLNIEKKLFDIIGPSAGFLHTARSRNDQVVTDFKLWLKKSTDDLIKDISEVMKVLVLKAEKNVDTVMPGFTHLKNAQPISFAHYLLAYYEMLKRDKKRFLNSKELLDESPLGAAALSGTSYKIDRNYTSKKLGFKKPTKNSIDSVSDRDFAIDFLYSSAVCAMHLSRLAEDFIIMNSDAYKLISFRDNMLTGSSIMPQKKNPDPAELIRGRTGINYGKLNSILTIMKGLPISYFKDLQDDKSLVFEGYDTLKETLIMSIELIKSLRPSKEKMY

SEQ ID NO: 181675 - protein, 241 aa, Unknown
  Bacterial polypetide isolated from the Sargasso Sea
ALAGTSFNIDRNYTAKKLGFKKPTNNSIDTVSDRDFVLDFLYAVSVCSMHISRISEELIIWNSEGFNLINLSDKIVTGSSIMPQKKNPDMLEYLRGKTGKTYGNLFSMLTILKGLPLSYFKDLQDDKEIVFQSNDNLINCLKIFDEILKNYSSNKKRMLELANCGYITATDLADYLVKNHSMSFRKAYQKTASIVNLAEKKKKNLNDLTIEELKKIEPKLTNDVLKVFDLKNSIYSKKSYG

SEQ ID NO: 181676 - protein, 213 aa, Unknown
  Bacterial polypetide isolated from the Sargasso Sea
ASGAFKSINSSFEIDKFLFREDIEGSIAHARMLESKKIISKTDFKKISIGLKKILSEIELGKFTFKSDFEDIHMNIENRLEELIGEVAGKLHTARSRNDQVVTDVKLWMKKDIDNILSKITRLQKIIIKKSENNIDTLFPGMTHFQTAQPVSFAHHLMAYYEMFKRDLERFNQSKKRLDQNPLGAGALAGTSFDINRYQTTKLLKFKEPTRNS

SEQ ID NO: 181677 - protein, 274 aa, Unknown
  Bacterial polypetide isolated from the Sargasso Sea
TASIVHTEMLFKQKIINFKIKNKIVWGLNRIKNEIIKKKFPFEKNLEDIHMNIEQRLFDLIGEDAGFIHTARSRNDQVITDFKIWLKKSTYEITKTLDGLISTILKVADKNIKTVMPGFTHLKNAQPISFAHYMMAYVEMFKRDKKRFKNNLDALNENPLGVAALSGTSFNIDRNFTTKKLNFSKPTDNSIDTVSDRDFVLDFLYACSASSIHISRIAEEFIIWNSDAYNLIHLNDKIVTGSSIMPQKKNPDPLEYLRGKTGSSFGNLFSMLTI

SEQ ID NO: 181678 - protein, 267 aa, Unknown
  Bacterial polypetide isolated from the Sargasso Sea
SDEDIHTAVERRATELTSAAAKIHTGRSRNDQVAGDLRLVALAEIDSLSSVIFDLIEVLLKRAEEAHKAGIYLPGYTHLQRAQPVGLAHHFGAFCWMFLRDLDRLADVRRRTDVSVLGAGALAGSSLPIDPMFTAQKLGFARVFDNSLDAVSDRDFVSDLLYVLSLTGVHLSKLGEEICLWASSEFDFVELADEFATGSSMMPQKKNPDVAELARGKAGRLLGNLTGFLATQKGLPLTYNKDLQEDKEPLFDSCDTIRLTTLAMTGL

SEQ ID NO: 181679 - protein, 266 aa, Unknown
  Bacterial polypetide isolated from the Sargasso Sea
CRRTPDRLIGDAAGRLHTARSRNDQVATDFRLWVRDAIDAADDALKSLQSALIDQAEAHADWVMPGFTHLQAAQPVTVGHHLLAYVEMFGRDRGRFSDARARLNESPLGAGALAGTSFPIDREATAKTLGFDRPTANSLDSVSDRDFVLEYLSAAAICAGHLSRLGEELVIWSSAQFRFVRLSDSFSTGSSMMPQKRNPDAAELIRGKTGRILGAFTALATVMKGLPLAYSKDMQEDKEPVFDAAETLMVCLAAAGRHDGRYGVRP

SEQ ID NO: 181680 - protein, 307 aa, Unknown
  Bacterial polypetide isolated from the Sargasso Sea
LKKGPSKFLEEINSSIETDHRLYREDIQGSIAHTKMLANKKIISKNEGNAIVKGLNKILKKIETGKVSFKKELEDIHMNIESLLFKEIGITAGKLHTARSRNDQVVTDFKLWIKNNSKSLDKNIQQLQKNLINVSKKHLNTVLPGYTHLQIAQPISLAHHCLAYVEMFGRDRTRLNDCVNRLNENPLGSAALAGTSFPIDRNLTSKLLGFKKPTVNALDSVSDRDFAVEFIFVLSLLSLHLSRMAEEIIFWANSQFNFIDLPDDLATGSSIMPQKKNPDGAELVRGQSSLIIGNLSSLLIILKRIAV

SEQ ID NO: 181681 - protein, 210 aa, Unknown
  Bacterial polypetide isolated from the Sargasso Sea
MSRLAEEIVLWASPQFGFVKLSDAFSTGSSIMPQKRNPDAAELARAKVGRILGAFTALTVVMKGLPLAYGKDMQEDKEPTFDATDSLSLAITAMAGMITDLKANSDAMRAALEVGFPTATDLADWLVRELDLPFRKAHHITGRIVSMAEERGCLLEDLPLEVMQTVESGINSSIYSVLSIDASAKSRTSFGGTAPENVRAAVAKARERFL

SEQ ID NO: 181682 - protein, 277 aa, Unknown
  Bacterial polypetide isolated from the Sargasso Sea
RLKSCQQRLNESPLGSGALAGTTFDIDRFQTSEKLEFNNPMKNSLDAVSSRDFAIEFLSSASICSINLSRIAEEIILWTSEQFKFVRLSDEFTTGSSMMPQKRNPDAAELIRAKSARIIGNLNSLMIVMKGLPLSYSKDLQEDKEPVFDTFDNLILSISAMSGMIKDLTANSNEMYRATESGFITATDLADWLVININIPFRESHSITGKIVKLAEKMNCSLDQIPIQELKNIEPRINDKIYNALEINSSLNNRKSYGGTAPKLVLDAINKYKEIYL

SEQ ID NO: 181683 - protein, 228 aa, Unknown
  Bacterial polypetide isolated from the Sargasso Sea
DTVSDRDFVLDFLYSSSVCSMHMSRIAEELIIWNSDGFNLITLSDKVVTGSSIMPQKKNPDLLEYLRGKTGSSYGNLFSMLTILKGLPISYFKDLQDDKQLIFNTFDTLINCIKILDEVLNNLSPNKKKMLELAETGYITATDLADYLVQNLSMSFRNAYQITATIVNIAEKKKKKLEELDIMELKKVEPRLTKEVMKVFNLKNSLNSKKSYGGTSFYNIKKMILKYK

SEQ ID NO: 181684 - protein, 286 aa, Unknown
  Bacterial polypetide isolated from the Sargasso Sea
VITDFKLWLRASTNEVINLLNNLEKVIIKSAEKNVKTVMPGFTHLKNAQPISFAHYLLAYVEMFKRDKKRFQNNLENLLENPLGVAALSGTSFNIDRNYTSKKLKFKNPTNNSIDTISDRDFVLDFLYSVSVCSIHISRIAEEFIIWNSDAFRLIKLNDKVVTGSSIMPQKKNPDLLEYLRGKTGNSFGNLFSMLTILKGLPLSYFKDLQDDKELVFNSFDQLKNSVLILIDVLNNFIPNKKRMYELANIGYTTSTDLADYIVKFYNLSFRKAYQITSKIVNYAEN

SEQ ID NO: 181685 - protein, 239 aa, Unknown
  Bacterial polypetide isolated from the Sargasso Sea
KPTNNSIDTVSDRDFVLDFLYNVSICSMHISRISEEMIIWNSDQFNFIKLKDNLTTGSSIMPQKKNPDTLEYLRGKTGFSYGSLISMMTIVKGLPLSYFKDLQDDKELVFKSFDTLKNSLILFDEVLKGLIINKQEMLKTAGKGYTTATDLADNMVKNLNITFREAYKITSKIVNLAEKLNLTFEELNIDQIKSIDKRLNYEILEQAELKNSVNSKKSYGGTSFENIRKMINKLKKEIK

SEQ ID NO: 181686 - protein, 303 aa, Unknown
  Bacterial polypetide isolated from the Sargasso Sea
EINILLNTVIKSVIRAAEKNIHTLMPGFTHLKNAQPVSFGHYLMAYVEMFKRDKKRFINNLDSLNENPLGVAALTGTSFNIDRNYTTKKLGFTKPTNNSIDTISDRDFVLDFLYSTSVCSMHISRIAEELIIWNSDAFKLINLSDKVVTGSSIMPQKKNPDLLEFLRGKSGITYGNLFSMLTVLKSLPLSYYKDLQDDKEIVFKSNDTLQNCLKILDEILKNFTPNKKQMIELANTGYLTATDLADYLVKNHSMPFRKAYKVTANIVNFAEKKKKNLDQLTLAELKKIEPKLSNDVLKVFDLK

SEQ ID NO: 181687 - protein, 188 aa, Unknown
  Bacterial polypetide isolated from the Sargasso Sea
MSKNKNNKPIWNTRIKKVSTNLFKKVGSSLWIDKRLFNEDIEASVIHTEMLFKQKIINFKIKNKIIWGLNRIKNEIIKKKFLFDESLEDIHMNIENRLFQLIGEDAGFVHIARSRNDQVITDFKIWLKKGTNEIIKSLNLTNKTILSIASKNIETIMPGFTHLKNAQPVSFAHYLLAYVEMFSRDKKK

SEQ ID NO: 181688 - protein, 218 aa, Unknown
  Bacterial polypetide isolated from the Sargasso Sea
AAAALCLTHMSRWCEEMVLWSSQQFNFITLPDRFCTGSSIMPQKKNPDVPELIRGKTGRVNGHLISLLTLMKGQPLAYNKDNQEDKEPLFDAVDTLGNSLTALIGMVPNIEANKSVMLQATLRGFTTATDLADYLVRKNVPFRDAHDMVGQAVQLAVSQGKALEELSLAELNGNETNVIEQDIYEVLTLQGSIASRDHLGGTAPTQVRAAIARARLQI

SEQ ID NO: 181689 - protein, 191 aa, Unknown
  Bacterial polypetide isolated from the Sargasso Sea
MIKSLLKKASGNIDTVMPGFTHLKNAQPISFAHYLLAYVEMLYRDKKRFKNNISLIDECPLGSAALAGTSFNIDRNYTAKKLGFKKPTSNSIDSVSDRDFAIDFLSASATCAMHLSRLAEDFIIFNSEAFSFIEFTDKVLTGSSIMPQKKNPDPAELIRGRTAINYGNLNSMLTIMKGLPISYYKDLQDDK

SEQ ID NO: 181690 - protein, 301 aa, Unknown
  Bacterial polypetide isolated from the Sargasso Sea
MAKVWSKRFDNALDPFIEKFNASIGFDRKLILEDLDCSIAHAKMLGKTKVLSSSEALQIINGLESIKVEYLEGKFSPGPPSEDIHYCIEEKLISLIGETGKKLHTGRSRNDQVGTDIRLWLRKEIDNIEILITDLQKSFLHLAKSNIYTLIPGYTHMQRAQPLSLAHHLLAYIEMLQRDRERYTEVRSRVNISPLGAAALAGTKIKIDRHFTAAELGFEKIYKNSIDAVSDRDFCIEFVSASALLMSHLSKISEEIILWVTDEFSFAKLTDKCATGSSLMPQKKNPDVPELIRGKTGRVYG

SEQ ID NO: 181691 - protein, 198 aa, Unknown
  Bacterial polypetide isolated from the Sargasso Sea
MKKNPSRNTNLKNGPSKLLESINNSIDIDQRMYKEDIYGSIAHATMLGKQKIISKKDQTKIVNGLKVILQNINSGKIHFESKLEDIHMNIESLLFKQIGNTAGKLHTARSRNDQVVTDFKLWIRNNSINLDKHIQNLQKSLISVAKKNTVTVMPGYTHLQVAQPISLAHHCLAYVEMMGRDRSRLKDCIQRLNESPLG

SEQ ID NO: 181692 - protein, 264 aa, Unknown
  Bacterial polypetide isolated from the Sargasso Sea
RFEEATSPFVERFTSSVSFDNSLYQYDIDGSIAHAKMLEKVGTLTKKEVTDIIDGLEEIREEISNQNFDWSTELEDVHMNIESALTKKIGEAGKKLHTGRSRNDQIATDLRLYARSQIDEICKLITDFQRAIVNLAEKEANTILPGFTHLQTAQPVTFGHHMMAWFEMLSRDFDRFQDCRKRVNQSPLGSAALAGTTFPIDRNYTSEMLDFDSPCANSLDAVSDRDFVIEFASTATLLMTHLSRFSEEIVLWTSAHFDFIDLPR

SEQ ID NO: 181693 - protein, 273 aa, Unknown
  Bacterial polypetide isolated from the Sargasso Sea
MKKNPSRNKILKKGPSKLLETINNSIDIDQRMYKEDIEGSIAHATMLGKQKIISSKDQAKIVKGLKVILHNINSNKVSFKSELEDVHMNIESLLFKQIGKTAGKLHTARSRNDQVVTDFKLWIRNNSIDLDRHIQKLQKTLINIAKKNIFTAMPGYTHLQIAQPISLAHHCLAYVEMMGRDRSRLKDCMERLNESPLGSGALAGTSFPIDRNLTAKLLKFSKPSANALDSVADRDFAVEFIFVISLVSTHLSRMADEIILWSNQQFNFIKLPD

SEQ ID NO: 181694 - protein, 178 aa, Unknown
  Bacterial polypetide isolated from the Sargasso Sea
MTDDKTKPPAEASSIWGGRFSSGSDVVVEAINASIDFDKRMYTQDIVASMAHARMLASQEIISAADADTIVSGLETIRGEIENGDFQFSRALEDIHMNVESRLSALIGDAAGRLHTARSRNDQVATDFRLWVRDALDHLDREMKELQAALLRQAHTHAGSVMPGFTHLQPAQPGRSVI

SEQ ID NO: 181695 - protein, 233 aa, Unknown
  Bacterial polypetide isolated from the Sargasso Sea
AVADRDLFVEFAGACSICGLHISRFAEDLILWNSSEFGFVELPESFTTGSSLMPQKKNPDSLELLRGKTGRLIGNLQSLYVAIKGLPLTYNRDLQEDKPPIFDSFDQLGMGLAVLAGTIDGMSMNERTCREAASDPALLATDLADYLVEKGVPFRDAHHAVGSLVACAEEQKTSILELTDEMVRSAHPACEKLADDWRDVFDLQRAFSMREKPGMPGPGQVSSRILHWERLLG

SEQ ID NO: 181696 - protein, 326 aa, Unknown
  Bacterial polypetide isolated from the Sargasso Sea
KKKSKITNFVFNKKFEDIHLNIEKRLFAIIGEDAGYLHIARSRNDQVITDFKLWIKKASNEVITNLDNLIKSFLKKAENNIHTIMPGFTHLKNAQPISFAHYLLAYVEMFKRDKKKFKNNINYINECPLGAGALAGTSYKIDRNFTSKKLGFAKPTNNSIDSISDRDFALDFLSTSSICAMHISRFAEELIIWNSDIFKLIKLDDKMLTGSSIMPQKKNPDPAELIRGRAGKNFGALQAMLTTMKGLPLSYYKDMQEDKALVFNSYDTILQSIIITNELVKSLKPNKQRMLDLSNEGYTTATDFADYFGRKINYLSENLIKFQLNW

SEQ ID NO: 181697 - protein, 201 aa, Unknown
  Bacterial polypetide isolated from the Sargasso Sea
MLEEINSSIDVDQRLFFEDIEVSIAHTTMLAKQKIISNHDEKKIIKGLKEIIKDFKNGKINFNKKYEDIHMNVEMLLHKKIGNIAGKVHTARSRNDQVVTDFKLWIKKNGFELDNIIKQFQKTLIKISKKHIDSVMPGYTHLQVAQPISLAHHCLAYVEMFGRDRSRLKNCLDLLNQNPLGAGALAGTSFPIDRYLTTKLK

SEQ ID NO: 181698 - protein, 238 aa, Unknown
  Bacterial polypetide isolated from the Sargasso Sea
IPTNNSIDTVSDRDFVLYFLYASSVCAMHISRIAEELIIWNSDGFNLINLSDKVVTGSSIMPQKKNPDLLEYLRGKSGSAYGNLFSMLTILKGLPLSYFKDLQDDKEIVFKSNDNLNNCLKIFDEILKNCNPNKSKMLELANSGYITATDLADYLVKNHSMSFRKAYQKTAAVVNFAEKRKKKLDELTLEELRKIEPQLKDDVLKVFNLKNSINSKKSYGGTSFDNIKKMIMKYKKEK

SEQ ID NO: 181699 - protein, 309 aa, Unknown
  Bacterial polypetide isolated from the Sargasso Sea
HMNMKKRLFQIIGEEAGYIHTGRSRNDQVITDFKIWIRSSIKDINMLIDKIIYSTLNLASKNIDTIMPGFTHLKNAQPISFAHYLMAYIEMFERDKKRFHHTLNILDENPLGVAALTGTSFNIDRNYTSKKLGFQKPTNNSIDTVSDRDFVLDFLYDVSVCSMHISRIAEELIIWNSDGFKLINLSDKIVMGSSIMPQKKNPDLLEYLRGKSGSAYGNLFSMLTILKGLPLSYFKDLQDDKKLIFDSNDILVSCLKILNEILKNLNPNKKNMLELANVGYITATDLADYFVRNHSLSFRKAYEKTASIV

SEQ ID NO: 181700 - protein, 317 aa, Unknown
  Bacterial polypetide isolated from the Sargasso Sea
KYELEDIHMNIESRLTELTGDIGAKLHTGRSRNDQIALDLRLYTRDVIKETVNKLNAVQKAIVELCEKNIDVIMPGYTHLQRAQPVLFAHHMLAYFNMFQRDIERYQDSLKRVNVCPLGSGAIAGVTYNTDREWVAKELGFDSITTNSMDAVSDRDYVIELSSAASILMMHFSRLSEEIILWNSQEFGFIRLPDQFVTGSSMMPQKKNPDFAELARGKTGRVFGNLFRILTILKGLPLTYNRDLQEDKEGFFDTIDTVLATLDVFAGMIPAMEINVQNMNALSESSEMLATDLADYLVNKGTPFRIAYNAVKDLCQY

SEQ ID NO: 181701 - protein, 240 aa, Unknown
  Bacterial polypetide isolated from the Sargasso Sea
LKKPTGNSVDTVSDRDFVLDFLYAISVCSNHISRFAEEFILWNSDAFDLIKLKDKVVTGSSIMPQKKNPDTLEYLRGKTGNVYGNLFSMLTILKGLPLSYFKDLQDDKELAFKSFDQIKISLQIMREILNNFIVNKKKMIHLAEQGYTTATDLADYIVREHKYPFRKAYFITSKIVNLAEQKGKKLDQLTVPEIKSINKNLNENVLKLITLENSVKSKKSYGGTSFENIKKMIKKYKKHV

SEQ ID NO: 181702 - protein, 157 aa, Unknown
  Bacterial polypetide isolated from the Sargasso Sea
MTKKKSTSNDATKSSIWGGRFASGPSQLMQDINSSISYDQRLYQQDIAGSKAHATMLAACGIITPIDCEAIHKGLGQIAIEIEQGKFVFSDSLEDIHMNIESRLAELIGEPAHRLHTARSRNDQVATDFKLWVRDAIDAINHALADMQIALIEKAAS

SEQ ID NO: 181703 - protein, 290 aa, Unknown
  Bacterial polypetide isolated from the Sargasso Sea
ADWVMPGFTHLQAAQPVTIGHHLLAYVEMFGRDRGRFADARARLNESPLGAGALAGTSFPIDREATAKTLGFDRPTANSLDSVSDRDFVLEYLSAAAICAGHLSRLGEELVIWSSAQFRFVRLSDSFSTGSSMMPQKRNPDAAELIRGKTGRILGAFMALATVMKGLPLAYSKDMQEDKEPVLDAVETLMVCLAAAAGMTADMAFDRERLAAAAGEGYTTATDLADWLVREAGVPFRESHHIIGRVVALAEEKGCGLKDLSIADLQAIDDRIDDKVFNVLGVDNSVRSRT

SEQ ID NO: 181704 - protein, 182 aa, Unknown
  Bacterial polypetide isolated from the Sargasso Sea
MKVTTSNLLDSINSSINIDKRLYKEDIEGSIAHCKTLMKSKIINLKDGKLIIKGLLEIEREIEKQKIKFDIKLEDIHMNIESILHKKIGKVSGKLHTARSRNDQVVTDLKLWIKKNILFLDDELKNFQKTLIKISKKNVNTVMPGYTHLQVAQAISLGHHFMAYVEMIGRDRHRLNNCFERT

SEQ ID NO: 181705 - protein, 291 aa, Unknown
  Bacterial polypetide isolated from the Sargasso Sea
SIAHVEMLFKQKIISFKIKNKVIYGLTKIDKEITNNKFEFNKKYEDIHMNIEKRLFQIIGEEAGYVHTARSRNDQVITDFKIWMKNSTHEINNNINKVIKSTIKLAEKNVETIMPGFTHLKNAQAISFAHYLMSYVEMFNRDKKRFSNNLNSLNENPLGVAALAGTSFNIDRNYTTKKLGFKIPTNNSIDTVSDRDFVLDFLYASSVCAMHISRIAEDLIIWNSDGFNLINLSDKVVTGSSIMPQKKNPDLLEYLRGKSGGAYGNLFSMLTILKGLPLSYFKDLQDDKEIV

SEQ ID NO: 181706 - protein, 303 aa, Unknown
  Bacterial polypetide isolated from the Sargasso Sea
SIHVDKRLYKEDIFASIVHTKMLIRQSIIPKKDGLKIIKGLKKIEKEIVKNKFKFKEQFEDIHQNIEKRLFQIIGESAGYLHTARSRNDQVVTDFKMWVKDSSKDIMKSLNGLVNEILKKAEKNINTVMPGFTHLKNAQPVSFAHYLLAYVEMLNRDKKRFANNINLIDECPLGSAALAGTSFNIDRKFTAKKLGFKKPTNNSIDSVSDRDFAIDFLSAAATCAMHLSRLAEDFIIFNSEAFGFVEFSDKVLTGSSIMPQKKNPDPAELIRGRTAINYGNLNSMLTIMKGLPISYYKDLQDDK

SEQ ID NO: 181707 - protein, 217 aa, Unknown
  Bacterial polypetide isolated from the Sargasso Sea
MTNKNKTVWSGRFKNSTSKSFQRIGASINVDKRLYEQDIFASKIHTQMLIKKKIIPAKEGKKILKGLDKIRGQIKKGRFVFKEKFEDIHLNIEKKLFEIIGASAGYMHTARSRNDQVVTDFKLWVKDSSLILIKELNSLMKNIVNKADRNIGTVMPGFTHLKNAQPVSFAHYLLAYYEMFKRDKQRFLNNLELIDESPLGTAALSGTSYNIDRNFTS

SEQ ID NO: 181708 - protein, 314 aa, Unknown
  Bacterial polypetide isolated from the Sargasso Sea
ELEDIHMNIENRLHEIIGEDAGFVHTGRSRNDQVITDLKIWMKKSTLDLIKLLENLNKNFLKVAEKNIETLMPGFTHLKNAQPISFAHYLLAYFEMFKRDKVRFTNNLKSLNENPLGVAAFAGTNFNIDRFFTTKKLKFEYPTNNSIDTVSDRDFVLDFLYTVSTCSVHISRIAEEFIIWNSDAFKLIKLNDKVVTGSSIMPQKKNPDPLEFLRGNSGSSFGNLFSMLTILKGLPLSYFKDMQDDKKLVFNSYDLLKNSIQVLIDILNNFSPNKKRMLELANEGFILSTDLADYLVQNHNLPFRKAYMVTARIV

SEQ ID NO: 181709 - protein, 204 aa, Unknown
  Bacterial polypetide isolated from the Sargasso Sea
MNIENRLFELIGNDAGYLHTARSRNDQVVTDLKLWLKKSTVEIDSLLLKLIKSLIKISEKNIFSIMPGFTHLKNAQPISLAHYFLSNVEMFKRDRFRFSSNMKSLNQNPLGAGAFSGTSFNIDRWYTTKKLKFVEPTNNSLDTVSDRDFVLDFLYSSSICSMHISRIAEELIIWNSDQFKFISLKDNIVTGSSIMPQKKNPDTL

SEQ ID NO: 181710 - protein, 189 aa, Unknown
  Bacterial polypetide isolated from the Sargasso Sea
EIIGDEAGFIHTARSRNDQIITDFKIWIKSSNEKIHKNLNRVIKTTLKVAEKNIKTIMPGFTHLKNAQPISLGHYLMAYVEMFIRDKKRFINNLESLNENPLGVCAFSGTSFNIDRNFTTKKLGFKIPTNNSIDTVSDRDFVLDFLYSSSVCSLHISRIAEDLIILNSDGFNLISLSEQIVTGSSIMPQ

SEQ ID NO: 181711 - protein, 319 aa, Unknown
  Bacterial polypetide isolated from the Sargasso Sea
EDIHMNIEMELHKLIGDTAGKLHTARSRNDQVATDLKLWISESIKDICASLETLQKNIVKKANLHVYTIMPGLTHLQSAQIVSFAHHLMAYYEMLKRDKKRFLNNLAGLNECPLGSAALAGTSFPIDRMFTAKNLGFKKPTSNSMDSVSDRDYALEFLSNIAICGSHLSRLSEDIVIWASDQFNYVSLSDDFSTGSSIMPQKKNPDSAELVRGKMGRFAGNFFSLLTTIKGLPLTYSKDLQEDKEPIFDSFDNLLLVLKVINGIINGLKINKNEMFNACKKGNLMATDLADWLVINYNMPFRKAYKITAKIVGLANKKT

SEQ ID NO: 181712 - protein, 284 aa, Unknown
  Bacterial polypetide isolated from the Sargasso Sea
MFWSNRLSKNNSRSFQRIGSSISVDKRLYNEDIEASTVHAKMLMKQNIIPKKDGKKIINGLKKIKKEIDRNKFKFKEKFEDIHQNIEKRLFQIIGDSAGYLHTARSRNDQVVTDFKIWVKSASEDINKTLDELMRSILKKASKNVDTVMPGFTHLKNAQPVSFAHYLLAYIEMLNRDKKRFKNNIDLIDECPLGSAALAGTSFNIDRKFTAKKLGFKKPTNNSIDSVSDRDFAIDFLYAAATCAMHLSRLAEDFIIFNSEAFGFVEFSDKVLTGSSIMPQKKNP

SEQ ID NO: 181713 - protein, 284 aa, Unknown
  Bacterial polypetide isolated from the Sargasso Sea
EKNKVKFSKKLEDIHMNIESLLLKKVGKVAEKLHTARSRNDQVVTDLKLWIKNNAEELDKELKNFQKTLISLSKKNTYTIMPGYTHMQVAQPITLAHHLLAYVEMIGRDRSRLKDCLYRLDENPLGSAALAGTSYPINRTYTTKELGFREPTKNAMDSVSDRDFAVEFIFSLSLISVHLSRLAEEIILWSNQQFNFIFLPDELSTGSSIMPQKKNPDGAELVRAKSSLMIGNLSSILNILKGLPLSYSKDLQEDKKLIFDSYDNLILSLKIINEILFKSKFYQP

SEQ ID NO: 181714 - protein, 222 aa, Unknown
  Bacterial polypetide isolated from the Sargasso Sea
FISCLSLTATHFSRFAEDLTIWTSDQFDFVRLPEAFTSGSSIMPQKRNPDAAELVRGKVGRVNGALISMLTVMKGLPLSYSKDMQEDKEQLFDAFDTVLLMIKVMTGIISDITPNKKNLLSAASMGYSTATDLADWLTKELNIPFRDSHKITGRIVSYAERNNLKLNEVPIEFMHKLDGSITKDIYKVMEVKYSVGSRKSFGGTSPREVLKRCSDWRIKLHG

SEQ ID NO: 181715 - protein, 230 aa, Unknown
  Bacterial polypetide isolated from the Sargasso Sea
MAKNKNNQAIWNTRIKKSASNLFQKVGNSIDIDKRLYKEDIQGSIAHVEMLFKQKIISFKIKNKIIYGLIKIEKEITKNKFVFNKKYEDIHMNIEKRLFQIIGEEAGYVHTARSRNDQVITDFKIWIKNSTKEINNNINKVIKSTIRLAEKNVETVMPGFTHLKNAQAISFAHYLMSYVEMFNRDKKRFSNNLDSLNENPLGVAALAGTSFNIDRNYTTKKPLVLKYLQI

SEQ ID NO: 181716 - protein, 284 aa, Unknown
  Bacterial polypetide isolated from the Sargasso Sea
GSSIEVDKRLYKEDILASVSHAEMLYKQKIITIKIKDKILWGLKKIQNEIERKNFKFDENLEDIHMNIENRLFELIGNDAGYLHSARSRNDQVVTDLKLWLKKSTVEIDGLLLKLIKSLIKISEKNIFSIMPGFTHLKNAQPISLAHYFLSNVEMFKRDRFRFSSNMKSLNQNPLGASAFSGTSFNIDRWYTTKKLKFEEPTNNSLDTVSDRDFVLDFLYSSSICSMHISRIAEELIIWNSDQFKFISLKDNIVTGSSIMPQKKNPDTLEFLRGKTGSIFGNLF

SEQ ID NO: 181717 - protein, 293 aa, Unknown
  Bacterial polypetide isolated from the Sargasso Sea
MLFKQKIISFKIKNKIIWGLNRIRNEIIKKKFSFNSNLEDIHMNIENRLFEIIGDDAGYIHTARSRNDQVITDFKIWLRNSTSEIIKQLNDLIKIFVNNAEKNVETIMPGFTHLKNAQPISFAHYLLAYVEMFKRDKKRFKNNLENLSENPLGVAALAGTSFNIDRIYTSKKLKFKNPTNNSIDTVSDRDFVLDFLYSVSVCSTHISRLAEEFIIWNSDAFKLIKLHDKVVTGSSIMPQKKNPDPLEYLRGKTGISFGNLFSMLTILKGLPLSYFKDLQEDKELVFNSFDQIK

SEQ ID NO: 181718 - protein, 195 aa, Unknown
  Bacterial polypetide isolated from the Sargasso Sea
FGWFNLIYLSDKVVTGSSIMPQKKNPDLLEYLRGKSGSSYGNLFSMLTILKGLPLSYFKDLQDDKEIVFKSNDTLINCLKIFDEILKNTSANKKKMLELASSGYITATDLADYLVRNHSMSFRKAYQKTAAIVNLAEKKKKKLDELSIEELKKIEPKLTNDVLKVFDLKNSVNSKKSYGGTSFENIKKMIMKYKK

SEQ ID NO: 181719 - protein, 250 aa, Unknown
  Bacterial polypetide isolated from the Sargasso Sea
GFIHTARSRNDLIVTDFKIWLKKATKEIISNLDLTIKNILKVADKNIETIMPGFTHLKNAQPVSFAHYLLAYVEMFSRDKKKFNSNLDNLNENPLGVAALTGTSFNIDRFYTTKKLKFNKPTKNSIDTVSDRDFVIDFLYSCSACSIHISRIAEEFIIWNSDAFNLISLNDKIVTGSSIMPQKKNPDPLEFLRGKTGGSIGNLFSMLTILKGLPLSYFKDLQDDKELVFKSFDQLKNSLIILNDVLKIFL

SEQ ID NO: 181720 - protein, 246 aa, Unknown
  Bacterial polypetide isolated from the Sargasso Sea
KKLHTGRSRNDQVATDLRLFLMRKIDLILHELSSTQKRVTKLAKRYHKALMPGLTHTQIAQPITFGHHLLAWNEMLERDYSRFTEVRKRTSILPLGSSALSGNSYGLDREKMAKRLGFDSASNNSMDSVSDRDYVIEFLSAASLLGIHLSRINEELILWSSSQFNYIEISEEFCTGSSIMPQKKNPDIAELLRGGSSKPISYLMGILTLMKNLPLSYNRDLQEDKYFLFNGIDYCLSSLEIFSLMI

SEQ ID NO: 181721 - protein, 174 aa, Unknown
  Bacterial polypetide isolated from the Sargasso Sea
DVAELGRGKTGRLIGNLMSILTLLKGLPTSYNRDLQEDKEPLFDTIDTLSLTLPALKGAVSTASFCPERMSEVMDVQLLATDLADYLVRRGVPFRTTHEVVGRLVRSAEEKGVALSELSLEAFTTENPVFKEDVFDVFDWEASVEARLAPGGTALESVDSQLRDVRAQIEGFRS

SEQ ID NO: 181722 - protein, 210 aa, Unknown
  Bacterial polypetide isolated from the Sargasso Sea
MAKIKNNNAIWNKRIKVKPSTLLKKFGNSINIDKRLYRKDIDASIVHVEMLYSQKIISLKIKNKIVWGLKKIHTEIKNNKFFFNEELEDIHMNIENRLSVLIGEDAGYIHTARSRNDQVITDLKLWMIDATNEILNCHNQIIKSFLNLAEKNIKTIMPGFTHLKNAQPISFAHYLLAYVEMFIRDKKRLKNNLYDLNENPLGAAALSGTS

SEQ ID NO: 181723 - protein, 292 aa, Unknown
  Bacterial polypetide isolated from the Sargasso Sea
MSIFAVERRLIELLGPLGKKLHTGRSRNDQVGTDLRLWLRQQIDAIDASLLRFQRALFGHAEQHLHTLIPGYTHLQRAQPLSLAHHLLAYIEMAGRDRHRLQDVRQRVNLCPLGAAALAGTPLPINRRQTAEDLGFEGLYANSLDAVSDRDFAVEFSAAASLVMVHLSRLSEEVIFWASEEFAFVRLTDRCATGSSLMPQKKNPDVPELVRGKTGRVFGHLQGLLTMIKGLPLAYNKDFQEDKEALFDVVRTTQDCLEAMAILMEEGIRFRPERLEQAVTSDFSNATDVADY

SEQ ID NO: 181724 - protein, 462 aa, Unknown
  Bacterial polypetide isolated from the Sargasso Sea
MSKNKNNQPIWSNRIKKSSKNLFKRIGGSLSIDKRLFKEDIEASIVHVEMLFKQKIINFKIKNKIIFGLNRIKNEIIKKKFIFDENLEDIHMNIENRLFDLIGEDAGFIHTARSRNDQVITDLKIWLRIATNDIIKNIDIVINNILKNANKNIETIMPGFTHLKNAQPISFSHYLLAYVEMFTRDKQRFNNNLENLSENPLGVSALTGTSFKIDRFYTTKKLKFKRPTKNSIDTVSDRDFVVDFLSSCSICAVHISRIAEEFIIWNSDAFKLIILNDKIVTGSSIMPQKKNPDPLEYLRGKSGGIFGNLFSMLTILKGLPLSYFKDLQDDKELVFNSYDQLKNSLLILNDILKNFSVDKKRMLELAEEGFLTATDLADYMVKELKYPFRKAYLQTARIVNFAEKNKKRLSDLKINEINKIEPKLTIDVFKVFDLKNSINSKTSYGGTSFDNIKKMIRSYKKK

SEQ ID NO: 181725 - protein, 464 aa, Unknown
  Bacterial polypetide isolated from the Sargasso Sea
MNKVRKNKSVWGSRITNETSYNFKKFGASIDVDKRLFREDIEASIVHVEMLSKQKIITLKIKNKIIWGLKKISNEIKKKKFKFNSRYEDIHMNIENRLFEIIGEDAGYLHTARSRNDQVITDFKLWLRKANKEIIKSLTTTIKIIINNSEKHVYTVMPGFTHLKNAQPISLAHYLLAYVEMFNRDKKRFQNNFLDLMENPLGVGAISGTSFNIDRNYTSKKLKFTKPTRNSIDTISDRDFVVDFLHASSLCSMHISRISEEFIIWNSEAFNLISLNDKIVTGSSIMPQKKNPDPLELIRGKTGAIYGNLFSMFTVLKGLPLSYFKDLQDDKKFVFDTFDQLKNSILVLNDVLKNVLFNKKEMKNLAEKGYITSTDFADYLVRELKYPFRKSYKITAELVNYCEKKKKTLSELNLNEIKKIEPRVNDNVLDVFNLNNSVNSKKSYGGTSFGNIKKMISKYKKEIK

SEQ ID NO: 181726 - protein, 464 aa, Unknown
  Bacterial polypetide isolated from the Sargasso Sea
MKKKIKSIWSTRINKKTSSLFQKVGSSIEVDKRLFKEDIDGSIAHVEMLCKQKIISFKIKNKIIWGLKKIGNEIKKKKFIFKTEYEDIHMNIEKRLYDIIGEDAGFMHSARSRNDQVLTDLKLWMRKSTNELIEVLKNLNKHFVNLAEKNVYTIMPGFTHLKNAQPISLGHYLLAYVEMFDRDLNRFNYNLNNLNESPLGVGALSGTSFNIDRKFTAKKLKFKKISNNSIDTVSDRDFALDFLFSCATCSMHISRLSEEFIIWNSDAFNFISLKDSLVTGSSMMPQKKNPDPLEYLRGKSGNAYGNLFSMFTILKGLPLSYFKDLQDDKNLIFKSFDDLKNSILILSEIIKNINFNKKKMLQLASIGYITSTDLAEHIVQKLKIPFRKSYEITAKIVNYAEKNNKTLDQISIKEIKKIEKKLDSDVLKILNLENSIKSKKSYGGTSFENVNRMIKKYKKGINVK

SEQ ID NO: 181727 - protein, 327 aa, Unknown
  Bacterial polypetide isolated from the Sargasso Sea
MNLLIKSILKKAEKNIDTVMPGFTHLKNAQPISFAHYLLAYVEMLIRDKKRFLNNLELIDECPLGSAALAGTSYNIDRKFTAKKLGFKKPTGNSIDSVCDRDFAIDFLSAAATCAMHMSRLAEDFIIFNSEAFSFINFSDKVLTGSSIMPQKKNPDPAELIRGKTAINYGKLNSMLTIMKGLPISYYKDLQDDKGLVFDSYDTLKDTLVMGNELILNLNTNKNNMKKMAQKGYTTATDFADFLVKDKNIPFREAYIISSKLVNFAEKKKVRLDEIPLKDINKFLKKININNIKIFDVVSSMNSKTSYGGTATKNIKGMIKKYRKEAL

SEQ ID NO: 181728 - protein, 368 aa, Unknown
  Bacterial polypetide isolated from the Sargasso Sea
IIGDVAGKLHTARSRNDQVITDLKLWMKKDNVLISKKIKRLKNSLVKSANKNIEILIPGLTHFQSAQPISAGHYFMAYYEMFSRDTTRFGDSLKRLDENPLGVGALAGTNFSINRNKTTKTLGFKKPTRNSLDTVSDRDFVIDFLSSASLLSMHLSRIAEEVALYSSDLINFFKIGDQLMSSSSIMPQKRNPDGAELIRAKASIAIGNLSSMLNLMKSLPLTYSKDLQEDKILVTSTSETLHICLDCMVEIIDSLEINKKSAEKIISKTYINATELADWLVIKLNYTFRDAHSLTGKIVNFAEKKKLFLKDITLRDYKSFDQNIDKSLYDFLSIKKSVNNKQSYGGTAISQIKKMIAIARKEIKNEKY

SEQ ID NO: 181729 - protein, 329 aa, Unknown
  Bacterial polypetide isolated from the Sargasso Sea
MTSKNTKKPWGGRFSGPTDSFVEQFTESVSYDQRLAHYDIMGSIAHAQMLEKIKVISKKESSEIVNALKEIEKEIQSDRFVWSTALEDVHMNIESALVDRIGDIGKKLHTARSRNDQVATDIRLYLRDEVDEITLKINEVINALLNLAEEHHGTIMPGMTHMQSAQPVTFGHHLLAWVEMLLRDRSRLQDCRKRINVLPLGSAALAGTTFPIDRNYVAKILGFDEVTQNSLDAVSDRDFAVEFLAFGSLIMMHLSRFSEEIVFWMSQRNHFIDLDDAWCTGSSIMPQKKNPDIPELVRGKTGRVYGDLMALLTLMKSQPLAYNRDNTRG

SEQ ID NO: 181730 - protein, 284 aa, Unknown
  Bacterial polypetide isolated from the Sargasso Sea
MLYRDKKRFKNNIILIDECPLGSAALAGTSFNIDRNYTAKKLGFKKPTGNSIDAVSDRDFAIDFLSASATCAMHLSRLAEDFIIFNSEAFSFIEFTDKVLTGSSIMPQKKNPDPAELIRGRTAINYGNLNSMLTIMKGLPISYYKDLQDDKELVFDSFDTLKDSLSMSIELIDNLNTKKNNMKNMAQRGYTTATDFADYLAQKKNLPFRKGYAISSKLVNYAERKKIRLDQLSLKEINKFIKNTKINIPKIFDVVNSMNSKTSYGGTSTKNIKKMIKQYKSYLR

SEQ ID NO: 181731 - protein, 309 aa, Unknown
  Bacterial polypetide isolated from the Sargasso Sea
MSKNKNNQPIWNTRIKKETKNLFKKVGGSIEIDKRLFREDIEASIVHVEMLFKQKIINFKIKNKIVWGLNRIKNEIIKKKFIFDDRLEDIHMNIEHRLFELIGEEAGYIHTARSRNDQVVTDFKMWLRKANKEIVKNIDATIKNILKKAEKNVETIMPGFTHLKNAQPVSFAHYLMAYLEMFNRDKKRFNNNIESLNENPLGVAALTGTSFKIDRFYTSKKLGFHRPTKNSIDTVSDRDFVIDFLYSCSTCAVHISRIAEEFIIWNSDAFKLINLNDKIVTGSSIMPQKKNPDPLEYLRGKTGLMFGNL

SEQ ID NO: 181732 - protein, 205 aa, Unknown
  Bacterial polypetide isolated from the Sargasso Sea
MSKKINKKNPLWGGRFEGSTDSLTQSFSASIDIDKELYAVDIKGSIAYAEALKEAKVITPKEFQKIKRGLSKILAEIEDEKFEWNESLEDVHMNIETALVRKAGNAAKKIHTGRSRNDQVSTDLRMYLSLKIDETLKNITLLQKSIVKQAEKHTSSIMPGFTHLQIAQPVTFGHHLMAWYEMLDRDFARLADAKHRMSVLPLGSA

SEQ ID NO: 181733 - protein, 423 aa, Unknown
  Bacterial polypetide isolated from the Sargasso Sea
MKNKTVWANRLKGKTSLSFQKIGSSISVDKRLYEQDVAASIVHAKMLVKQKIISRKEGTKIINGLKKIKSQINKGRFKFQEKFEDIHLNIEKKLFELIGSSAGSLHTARSRNDQVVTDFKLWIKKSSKDTIGNINSLMKILIKKAEKNVDTVMPGLTHLKNAQPISFAHYLLSYFEMFKRDIKRFENNIKLLDECPLGSAALAGTSYNIDRNYTSRQLGFKKPTDNSIDSVADRDFAVDFLYASALCAMHLSRLAEDFIIYNSNAFNLISFDDNMLTGSSIMPQKKNPDPAELIRGRVSLNYGNLNSMLTIMKGLPMSYFKDLQDDKKLIFDGFDTLNDSLILSFELLNSIKPNKKNMLKMANEGYTTATDFADYLVKEKKLTFRESYAVAAKLVNYAEKKNKLLFELSLQEIKKVYKNLDKK

SEQ ID NO: 181734 - protein, 175 aa, Unknown
  Bacterial polypetide isolated from the Sargasso Sea
MKNKTVWANRLKGKTSLSFQKIGSSISSDNRLYEQDIAASIVHTKMLAKQKIIGKKEGTKIINGLKKIKSKIDKGKFKFQEKFEDIHLNIEKKLFELIGPSAGFLHTARSRNDQVVTDFKLWIKKSSKETIDNINSLMKILIKKAEKNVDTVMPGLTHLKNAQPISFAHYLLSLL

SEQ ID NO: 181735 - protein, 303 aa, Unknown
  Bacterial polypetide isolated from the Sargasso Sea
MSKNKNNKPIWNTRIKKVSTNHFKKVGGSLSVDKRLFREDIEVSIVHTEMLFKQKIIDFKIKNKIVWGLNRIKNEIIKKKFIFDENLEDIHMNIENRLFEIIGEDAGYIHTARSRNDQIITDFKIWLKKATNEIINNLNLTIKNILKNADKNVETIMPGFTHLKNAQPVSFAHYLLAYVEMFDRDKKKFNNNLNNLNENPLGVAALTGTSFKIDRFYTTKKLKFNNPTRNSIDTVSDRDFVIDFLYSCSTCSIHISRIAEEFIIWNSDAFNLISLNDKIVTGSSIMPQKKNPDPLEFLRGKTG

SEQ ID NO: 181736 - protein, 270 aa, Unknown
  Bacterial polypetide isolated from the Sargasso Sea
MGKNKNNLPIWNTRIKKNSTNLFKKVGGSLSVDKRLFREDIEASIVHVEMLFKQKIINFKIKNKIVWGLNRIKNEILKKKFIFNEKLEDIHMNIENRLFELIGEDAGFIHTARSRNDQVVTDFKIWLRKANKEIIKNIDVTIKNILKKAEKNIETIMPGFTHLKNAQPVSFAHYLMAYLEMFSRDKKRFENNLEGLNESPLGAAALTGTSFKIDRFYTSKKLGFKNPTKNSIDTVSDRDFVIDFLYSCSACAVHISRIAEEFIIWNSDGY

SEQ ID NO: 181737 - protein, 219 aa, Unknown
  Bacterial polypetide isolated from the Sargasso Sea
MTMMHLSRISEELVFWMNSHIKLVDIDEAFCTGSSIMPQKKNPDVPELVRGKTGAVIGSLTSLFVLLKGLPLTYNRDLQEDKSIILEAIGTVVSCLALMPRLILTLKVNKERALIFSKQDYSNATDLADYMSMKGIPFRTSHEIVGKIVKYAESKNISLHEISLDVFKTFSNKINKDVYTSIDVEKSIHKKKSVGASSPANVRKEAKKILSALKIHGYK

SEQ ID NO: 181738 - protein, 248 aa, Unknown
  Bacterial polypetide isolated from the Sargasso Sea
MSKNKNNQAIWNNRIKKKTSSIFQKVGSSLNIDKRLFKEDIEASIAHVEMLFKQKIISFKIKNKIVWGLNKIRNEIIKKKFIFNPNYEDIHMNVEKRLFEIIGDDAGYLHTGRSRNDQVITDFKLWLRSSTTEIIKLLNSSIKIIIRTAEKNIETIMPGFTHLKNAQPISFAHYMLAYVEMFNRDKNRFKNNMENLLENPLGSSALSGTSFNIDRNYTTKKLKFKQPTNNSIDTVSDRDFVIDFLYAV

SEQ ID NO: 181739 - protein, 455 aa, Unknown
  Bacterial polypetide isolated from the Sargasso Sea
MALWGGRFQGETSALFKLFNDSLPVDYRLFEQDVVGSIAWADAIASVGIITATECSDLKKALNELLVEVKGDPAIILASGAEDIHSFVESALIAKVGDLGKKLHTGRSRNDQVATDLKLWCQSEGAALVARLQTLRSELIALAEREFDAVMPGYTHLQRAQPVTFGHWCLAYVEMIERDLSRLTDALKRANTCPLGSGALAGTAYQMDRHALAAALNFASPTLNSLDSVSDRDHVVELCSTASISMMHLSRMAEDLIFFNSGEAGFISLSDEVTSGSSLMPQKKNPDALELIRGKTGRVYGSLVGILTTMKALPLAYNKDMQEDKEGLFDVVDSWAICLDMAALVLSGLVVNRPNALLAAQQGYANATELADYLVSKGMPFREAHHVVGVAVVAAIAKKIPLEGFTLAEFKTFAEIIEDDVYPNLTIEACLAKRDVLGGTALTQVKQAIAAKQAG

SEQ ID NO: 181740 - protein, 383 aa, Unknown
  Bacterial polypetide isolated from the Sargasso Sea
FEFNKKYEDIHMNIEKRLFQIIGEEAGYVHTARSRNDQVITDFKIWMKNSTNEINNNINKVIKSTIKLAEKNVETIMPGFTHLKNAQAISFAHYLMSYVEMFNRDKKRFSNNLDSLNENPLGVAALAGTSFNIDRNYTTKKLGFKIPTNNSIDTVSDRDFVLDFLYATSVCAMHISRIAEELIIWNSDAFNLINLSDKVVTGSSIMPQKKNPDLLEYLRGKSGTAYGNLFSMLTILKGLPLSYFKDLQDDKEIVFKSNDNLNNCLKICDEILKNCNPNKSKMLELANSGYITATDLADYLVKNHSMSFRKAYQKTAAVVNLAEKRKKKLNELTLDELKKIEPKLKEDVLKVFNLKNSINSKKSYGGTSFDNIKKMIMKYKKEK

SEQ ID NO: 181741 - protein, 296 aa, Unknown
  Bacterial polypetide isolated from the Sargasso Sea
ALSLGHYLMSYVEMFTRDRKRFLNNFESLNENPLGVCALTGTSFNIDRKFTTKKLGFKSPTNNSVDTISDRDFVTDFLYSCSVCAMHISRIAEELIIWNSDGFNLINLSDKIVTGSSIMPQKKNPDMLEFLRGKTGGMYGNLFSMLTVLKGLPLSYYKDLQEDKEIIFKTNDTLNNCLKILDEILNNFSPNKKKMLELASSGYITATDLADYIVKNHSRSFREAYQKTAAIINMAEKRKKRLDELTLYDLKKIEPNLTKDVLKVFDLNNSVNSKKSYGGTAFDNIKKMIIKYKKRL

SEQ ID NO: 181742 - protein, 402 aa, Unknown
  Bacterial polypetide isolated from the Sargasso Sea
MALWGGRFESGASSMFKQVNDSLPFDQVMASQDIQGSISWSRALQKAGVLTVDEQAQLESALSELKAKADAGELDFNASSEEDIHSFVEAALIEKLGDIGRKLHTGRSRNDQVATDFRLWVREHIASLRADVLGVIKSLLNAASRHQEAIIPGYTHLQRAQPIHFAHWCLAYVEMLKRDLSRLDDLKVRMNQCPLGSGALAGTTFPVDRHAIAEELGFDSPCLNSLDAVSDRDFVLELLFVASTSMMHLSRLAEDMIFYNSGEAGFLQLGDSVTSGSSLMPQKKNPDALELMRGKCGRVFGSLQALLVTMKGLPLAYNKDMQEDKEGAIDTVNQWHICLCIASEVLDSLQLNEERCRVAATQGFSNATELADYLVGKGVPFRTGHDIAGRVVLQAIDKSCAI

SEQ ID NO: 181743 - protein, 377 aa, Unknown
  Bacterial polypetide isolated from the Sargasso Sea
MVKNKNNQTIWNTRIKNNSNLSQKIGSSIDVDKRLYKEDINGSIAHVEMLFKQKIISFRTKNKIIYGLNKIEKEISNKKFEFNKKYEDIHINIEKRLFQIIGEEAGYVHTARSRNDQVITDFKIWIKSANQKINVMLNNVIKNSINLAEKNVDTIMPGFTHLKNAQAVSFAHYLMAYVEMFKRDKDRFKNNLDSLNENPLGVAALTGTSFNIDRNYTTKKLGFEKPTNNSIDTVADRDFVLDFLYSVSVCSLHLSRISEELIIWNSDGFNLINLSDKIVTGSSIMPQKKNPDLLEYLRGKSGITFGNLFSMLTILKGLPLSYFKDLQDDKEIIFKSYDVLVQSLKIFNEILKNVSPNKKRMLELAYSGYITATDLAD

SEQ ID NO: 181744 - protein, 402 aa, Unknown
  Bacterial polypetide isolated from the Sargasso Sea
MKNKTIWSNRFKGKTSKSFQRIGSSINVDKRLYKQDIIASIAHVQMLMKQKIINNIDGKKIINGLNKIKSQIDRGQFNFQEKFEDIHLNIEKKLFQIIGSSAGYMHTARSRNDQVVTDFKLWVKESTTDILKHIALAMKCILKKAEKNTDTVMPGLTHLKNAQPISFAHHLLAYYEMLKRDKKRFENNINLLNECPLGSAALSGTSYKIDRKYTAKKLGFKKPTDNSIDSVSDRDFAIDFLYSAAICAMHLSRLAEDFIIFNSDAFNLIGFKDTMLTGSSIMPQKKNPDPAELIRGRVGINYGKLNSMLTIMKGLPTSYFKDLQDDKKLVFEGYDTLKDTLILSTELIDSVMPIKDRMLKMANKGFTTSTDFADYLVKEKKINFRESYSLAAKLVNFAEKNN

SEQ ID NO: 181745 - protein, 486 aa, Unknown
  Bacterial polypetide isolated from the Sargasso Sea
MYRSRLGKDLDDITLSYVSSIKDDSDIAFYDIIGSEAHVIMLYENKLLTKNETKKILTALEELKGGNISQPDFEPEDIHELIESLVIKKTGIENGGKMHTARSRNDQVALDIRLKIRDDINILLQCLIETISTLLKTAKENTKTIMPLYTHLQQAQVGVFSHYLLSYADSLLRDLDRFMSLYTRVNQSPLGAGPVGGTSLPIDRDSTAKMLGFASLIENSIDATSTRDFVAEYVASAAIMMTNLSRLAEDFIIWSSAEFSFIELSDDFTSPSSVMPQKKNPDILELTRGKTSQVIGYLTSILTTTKGLSSGYSRDLQQIKSSIWSTSKTSITALIIIKSMLSDLTVNQEKMQKATEEGFLVALDLAENLVIEKIPFRSAHNIVGNLVQLSHNSKKLLSDLDLDEIDCLDIKEIKPAKLFELIQKTTISSSLKQRKSKGSAGTSEQTRMIGQRTRKLVSLKNSVKSQNDSVKKSLTLLEKRVKTLTK

SEQ ID NO: 181746 - protein, 336 aa, Unknown
  Bacterial polypetide isolated from the Sargasso Sea
MAKVWSKRFDNSLDPFIEKFNASIDFDRKLILEDLDCSIAHAKMLGKTKVLSSSEALQIINGLELIKVEYLEGKFSPSLPSEDIHYCIEEKLISLIGETGKKLHTGRSRNDQVGTDIRLWLRKEIDNIEILITDLQKSFLNLAKSNIYTLIPGYTHMQRAQPLSLAHHLLAYIEMLQRDRERFKEVRARVNISPLGSAALAGTKIKIDRHFTAAELGFEKIYKNSIDAVSDRDFCIEFVSTSALLMSHLSKISEEIILWVTDEFSFAKLTDKCATGSSLMPQKKNPDVPELIRGKTGRVYGHLQALLTMVKGVPLSYNKDFQEDKEPIFDTTETIS

SEQ ID NO: 181747 - protein, 283 aa, Unknown
  Bacterial polypetide isolated from the Sargasso Sea
MGRDRSRLKDCIERLYESPLGSGALAGTSFPIDRNLTSKLLKFSKPTANALDSVSDRDFAVEFLFVISLISTHLSRMADEIILWSNQQFNFINLPDELETGSSIMPQKKNPDGAELVRGKASGIISNLNALLVILKGLPLAYSKDLQDDKKIVFSAFDDVCLTLEVMKEIWSKVSFNKNIMAEAVNNSNSTATDFANWLVQHIELSFREAYQLTGRIVAHANKNNKRLDQLGLEELQKFNKKITQDAQKTLSINESIKNKKSFGGTSPQRVKQSIKYAIKKYL

SEQ ID NO: 181748 - protein, 463 aa, Unknown
  Bacterial polypetide isolated from the Sargasso Sea
MAKNKNNQAIWGIRIKDNTSNLFQKIGSSINIDKRLYKEDIAVSIAHVEMLFKQKIITFKIKNKIIYGLNKIEKEISKNKLEFNKKYEDIHMNIEKRLFQIIGDEAGYVHTARSRNDQVLADFKIWIKSANKEINSKLNSLIKTSLKLAEKNIYTIMPGFTHLKNAQAISFAHYIMAYIEMFNRDKKRFNNSLDNLNENPLGVAALTGTSFNIDRYYTTKKLGFNKPTNNSIDTVSDRDFVLDFLYSVSVCSMHISRIAEELIIWNSDAYNLINLSDKVVTGSSIMPQKKNPDLLEFLRGKSGSTYGNLFSMLTILKGLPLSYFKDLQDDKEIVFKSYDTLIGCLKIFEEVIKNLRPNKEQMFKLANDGYITATDLADYLVKNHSLSFRKAYQKTAGIVNLAEKKKKNLNELSLDEMKKIVPGLKDDVFKVFDLKNSVNSKRSYGGTSFDNIKKMIMKYKKTQ

SEQ ID NO: 181749 - protein, 316 aa, Unknown
  Bacterial polypetide isolated from the Sargasso Sea
MTKNKNNQTIWRTRVKKKGSVLFQKIGSSIEIDKNLYKQDILGSIVHVEMLFRQKIISFKIKNKIIFGLKKIESEIKKKKFVYKSEYEDIHMNIEKRLFEIIGDDAGFIHTARSRNDQVITDFKMWLKIETQELIKKLENLNKNILKVAQRNINTIMPGFTHLKNAQAVSFAHYMMAYIEMFNRDKHRFKNNLESLNENPLGVAALTGTSFNIDRNFTSKKLGFKKATNNSIDTVADRDFVLDFLYSASVCSLHISRISEEFIIWNSDAFCLINLSDKVVTGSSIMPHKKKSRHARIFERKNWKNFWKPFFNANNS

SEQ ID NO: 181750 - protein, 263 aa, Unknown
  Bacterial polypetide isolated from the Sargasso Sea
MAKVWSKRFDNALNPFIEKFNASIGFDRKLILEDLDCSIAHAKMLGKTKVLSSAEALQIINGLELIKVEYLEGKFSPGPPSEDIHYCIEEKLISLIGETGKKLHTGRSRNDQVGTDIRLWLRKEIDNIEILITDLQKSFLNLAKSNIYTLIPGYTHMQRAQPLSLAHHLLAYIEMLQRDRERYKEVRSRVNISPLGAAALAGTKIKIDRHFTAAELGFKKIYKNSIDAVSDRDFCIEFVSASAILMSHLSKISEEIILWVTDE

SEQ ID NO: 181751 - protein, 467 aa, Unknown
  Bacterial polypetide isolated from the Sargasso Sea
MAKKEKEINPLWGGRFESGTDDLAQSFSASIDIDKRLFEVDIQGSIAYAEILNVANLINSSELKKIKKGLNKILDEIKHDKFNWDPSLEDVHMNIEARLVKIAGTAAKKIHTGRSRNDQVATDLRLFLKNQIDEILNLTILLQKSLLKKADENTDTLMPGLTHLQIAQPVTFGHHLMAWFEMLSRDYSRLEDVKKRMDVMPLGSAALSGTRFNIDRKYLAKKLGFEKISRNSMDAVSDRDFVLELASSLSIVGIHLSRICEEIIIWSSSQYSYIHLSDEVCTGSSIMPQKKNPDMAELIRGGASKTIANLMGLLSLMKNLPLTYNRDLQDDKEYIFSSIDFTKDSLELLSLIIEGMEPNIEKMKIDCFTGQITATDLADYLVEKGIAFRKAHEIVGRIVAHAEKKKVQIFELEISELRKFSKIINEDVTNYLNPQKTILSRKQVGGTAPSQVKKEIQIAKKELIRKQ

SEQ ID NO: 181752 - protein, 462 aa, Unknown
  Bacterial polypetide isolated from the Sargasso Sea
MSKNKNNKPIWGTRIKKNASTLFKKVGGSLPIDKRLFKEDIEGSIAHVEMLHKQKIINFRIKNKIIWGLKRIKNEIVKKKFNFNYDLEDIHMNIENRLFELIGDDAGYVHTARSRNDQVITDLKLWLKEATKKIIILLDNTNSNILNLAQKNIRTIMPGFTHLKNAQPLSLAHYLLAYVEMFKRDRKKFENNLEFLDENPLGVGALSGTSFKIDRNYTTKKLKFKKPTNNSVDTVSDRDFVLDFLYSSLACSLHISRIAEELIIWNSDAFNLVTLNDKLVTGSSIMPQKKNPDPLEYLRGKTGIFIGNINSMISILKGLPLSYFKDLQDDKEIVFKTNDQLKISLSLLNDVLKNSIINKKSMLSLAEKGFTTATDLSDYIVRELGYPFRKAYIQTAKIINLAEKKNKKLHELELKEINQIEPKLTLNVYKILNLENSINSKKSYGGTSFENVKKMIKKAKNE

SEQ ID NO: 181753 - protein, 446 aa, Unknown
  Bacterial polypetide isolated from the Sargasso Sea
MFKQVNDSLPFDQGMASQDIQGSISWSRALQKAGVLTVDEQAQLESALSELKAKADAGELDFNASSEEDIHSFVEAALIEKLGDIGRKLHTGRSRNDQVATDFRLWVREHIASLRADVLGVIKSLLNAASRHQEAIIPGYTHLQRAQPIHFAHWCLAYVEMLKRDLSRLDDLKVRMNQCPLGSGALAGTTFPVDRHAIAEELGFDSPCLNSLDAVSDRDFVLELLFVASTSMMHLSRLAEDMIFYNSGEAGFLQLGDSVTSGSSLMPQKKNPDALELMRGKCGRVFGSLQALLVTMKGLPLAYNKDMQEDKEGAIDTVNQWHICLCIASEVLDSLQLNEERCRVAATQGFSNATELADYLVGKGVPFRTGHDIAGRVVLQAIDKGCAIEDLPLSDMQAICDKIEDDVYPVLQLEYGVNQRNILGGTSKETVTKALYQELEDLDKQG

SEQ ID NO: 181754 - protein, 261 aa, Unknown
  Bacterial polypetide isolated from the Sargasso Sea
MSKNKNNQAIWSKRIGKKTSVLFEKVGSSVNIDKRLFSEDINVSITHVEMLFRQKIISFKIKNKIVYGLKKIEKEILTKKFEFNNKYEDIHMNIEKRLHEIIGDDAGYIHTARSRNDQVITDFKLWIRKSTKEIINNLDIINKTILNVSEKNIYTIMPGFTHLKNAQPISFAHYLMAYIEMFKRDKKRFTNNLENLNENPLGVAALTGTSFNIDRNFTAKKLGFKTSTNNSIDTVSDRDFVLDFLYCISICSLHISRLAEE

SEQ ID NO: 181755 - protein, 467 aa, Unknown
  Bacterial polypetide isolated from the Sargasso Sea
MSVKKSLKNKKLWGGRFEEATSPFVERFTSSVSFDNSLYQYDIDGSIAHAKMLEKVGTLTKKEVTDIIGGLEEIREEISNQNFDWSTELEDVHMNIESALTKKIGEAGKKLHTGRSRNDQIATDLRLYARSQIDEICKLITDFQKAIVNLAEKEANTVLPGFTHLQTAQPVTFGHHVMAWFEMLSRDFDRFQDCRKRVNQSPLGSAALAGTTFPIDRNYTSEMMGFDSPCANSLDAVSDRDFVIEFASTATLLMTHLSRFSEEIVLWTSAHFDFIELPDSFCTGSSIMPQKKNPDVPELIRGKFGRVAGAHTALISIMKSQPLAYNKDNQEDKEPLFDIVDTIKDCLYAYAQMMPAIKCNRGNMENAALKGFATATDLADYLVKKGATFRDAHEIVGNVVSYAIREDLLLTEIPLSKLVEFTSIITEDVSTILTLEGSVRARNHFGGTSPEQVLNAVTNAKILLDQR

SEQ ID NO: 181756 - protein, 467 aa, Unknown
  Bacterial polypetide isolated from the Sargasso Sea
MPSNDTPNRTNKRLLKGRLQSSTNEFVQEFTASISFDKRLYKEDITASIAHAEMLSEIGVLKKTETQKIIKGLNKIEKEIETGDFLWTNSLEDIHMHIEHRLIEITGDLGKKLHTGRSRNDQIATDMRLFLRKSIDEILALENSLLHSLLDLASSHINTIMPGFTHLQVAQPVTFGHHIMAWFEMLLRDRDRLIDCRKRTNVMPLGSAALAGTSFKPKRKIVATRLGFDQLTRNSLDGVSDRDFLIEFSSCVAITMVHFSRWCEEIVLWSSQQFNFVVLPDAFCTGSSIMPQKKNPDVPELIRGKTGRSIGNLNSLLVLMKSQPLAYNKDNQEDKEPLFDNVDTIKSCLTALLGIIDEIEVNEENMLKHAQEGYSTATDLADYLVSKSVPFREAHEIVGKAVAKAISMNKKLHELDLHELNEEDSDFIGPDVYDVLSVEGSIKSRDHEGATAPKQVRRAIDRARKLI

SEQ ID NO: 181757 - protein, 459 aa, Unknown
  Bacterial polypetide isolated from the Sargasso Sea
MWGGRFSSDQDRIMLEMNSSIGFDSRLYAEDINASIAHAKMLAKQKIISWKESQKIVSGLKKIKVEFEKGTFNLDPLLEDIHMNIESNLQKKIGNVAKKLHTGRSRNDQVATDMRLYMRSQCQEIIKKINIIQKELSKKASKYYDLIMPGYTHMQIAQPVTFGHHLLAYVEMLDRDKNRFKDALKRINQSPLGAAALAGTTFPIDRQMTAKALGFTNPMANSIDAVSARDFIIEPLAASSILASHLSRFSEEIILWVSDGFDFIELPDSLATGSSIMPQKKNPDIAELVRGKNGRVIGALMSILVVMKGLPLAYSKDLQEDKELTFDAMDNILNSLEAINAIVKKLIPKKDNLSSAAQKSYSTATDLADWLVANLDIPFREAHKITGNIVRYCEKRKIKLSELTIQELKGFNKKINDDIFNVLNAEQSVNQKKSFGSTSPSMVKKSASKWIKKLQNEKK

SEQ ID NO: 181758 - protein, 470 aa, Unknown
  Bacterial polypetide isolated from the Sargasso Sea
MNKSKSKKNKQTSSIWGGRFIKDSSEIMKNINASIWFDKRLAFHDIVLSKEHSNMLYKQKIISHKENRIIQKGLKQIESEMINDQFYFSDELEDIHMHIEARLIELIGDTGKKLHTARSRNDQVATSFKMWVRDELDTLLILIKNLQASIIKQAEAHINTILPGFTHLQPAQPISLAHHLLAYVEMLGRDRTRLEDAKNRLNKSPLGAAALAGTSFPIDRFYTAKALGFDNPMENSIDAVSDRDFVLEVLSNASIIMVHLSRLAEELVIWSSPGFNFIALPDSFSTGSSIMPQKRNPDAAELIRGKTGRVSSAFNNVLTMLKGLPLAYSKDMQEDKEPFFDAIDNLKLCLSVSEGLIKEISFNVDEMKKMAELGYITATDIADWLVKECNIPFRDAHSITGRVVKYAEKNNLTLDEVSINEFKKIDKRITNNILKVLTLQNSLESRNSYGGTAPKLVKKALKKAKTKWLK

SEQ ID NO: 181759 - protein, 309 aa, Unknown
  Bacterial polypetide isolated from the Sargasso Sea
MPGFTHLQIAQPVTFGHHLMAWYEMLERDYTRLIDTRNRMSVLPLGSAALAGSKYPINRNFLAMKLGFKALSRNSIDAVSDRDFVIETASALSILGIHLSRICEEIVLWSSSQFEYVHLSDEVCTGSSIMPQKKNPDVAELIRGGSSKTIANLMGLLSLMKNLPLSYNRDLQEDKEFIFESMDYSNDSLLLLSLLIQGMKANVKKMEEDCSLGQITATDLADYLVDKSMPFRKAHETVGKIVAYAESKKVQIFELEITELRKFSKLISEDVSSHLDPLKSINSRKLVGGTAPSQIRKEINFAKKVLAKR

SEQ ID NO: 181760 - protein, 266 aa, Unknown
  Bacterial polypetide isolated from the Sargasso Sea
MTNKMWGGRFSKATNELLEDLNASIKYDYRLAKYDIEVSIAHVMMLAKSGVIRKEECQLIVNGLKKVQKEISDGKFEFKKKLEDIHMNIESRLTEIIGPIAGKLHTARSRNDQVATDIRLFLIEKINGLVTLIEENQKTLSQQALDNFDAIMPGYTHLQIAQPITLGHHLLSYVELLNRDKLRLTDSLKRLDESPLGAAAMAGTSYPVDREYSAKLLGFNKPMSNSIDAVSSRDMLLETLSNIAILSVNLSRLAEEIILWVSTEFN

SEQ ID NO: 181761 - protein, 469 aa, Unknown
  Bacterial polypetide isolated from the Sargasso Sea
MTSQLHKKGEAWSARFSEPMSELVKRYTSSVFFDKRLALVDIAGSLAHANMLAAQKIISADDLAAIERGMAQIKGEIERGEFEWQLDLEDVHLNIEARLTALIGDAGKRLHTGRSRNDQVATDIRLWLRGEIDRIGGLLNDLRGALLDLAEQNADTIMPGFTHLQVAQPVTFGHHLLAYVEMFSRDAERMRDCRTRVNRLPLGAAALAGTSYPIDRHAVAKTLGFDGICANSLDAVSDRDFAIEFTAASALVMTHVSRFSEELVLWMSPRVGFIDIADRFCTGSSIMPQKKNPDVPELARGKTGRVNGHLMALLTLMKGQPLAYNKDNQEDKEPLFDTVDTVVDTLRIFAEMVAGITVKPDAMRAAALQGFSTATDLADYLVKRGLPFRDAHEAVAHAVKICDDRGIDLADLTLDEMKQELPNVAHLIGEDVFGYLTLEGSVASRNHPGGTAPDQVRAAVKAARAALGQ

SEQ ID NO: 181762 - protein, 461 aa, Unknown
  Bacterial polypetide isolated from the Sargasso Sea
MKKNRTVWSNRITKGNSKNFQRIGSSINIDKRLYKEDIFASIVHAKMLIKQKIIPKKDGFKIINGLKKIEREISKKKFKFKEQFEDIHQNIEKRLFQIIGESAGYLHTARSRNDQVVTDFKIWVKDSSQDTIDTINDLIKCILNKAEKNINTVMPGFTHLKNAQPVSFAHYLLAYVEMLNRDKKRFLNNILLIDECPLGSAALAGTSFNIDRKFTAKKLGFKKPTNNSIDSVSDRDFAIDFLSAAATCAMHLSRLAEDFIIFNSEAFSFLEFKDQVLTGSSIMPQKKNPDPAELIRGRTAINYGNLNSMLTIMKGLPISYYKDLQDDKGLVFDSYDTLKDSLMMAIELIQNLNTKKNNMRDMAQKGYTTATDFADFLSMKKNLPFRKGYSISSKLVNYAEKKKIRLDQLSKGEINKFVKEVNINIPKMFDVVNSMNSKTSFGGTSAKNVKRMIAKCKKELK

SEQ ID NO: 181763 - protein, 319 aa, Unknown
  Bacterial polypetide isolated from the Sargasso Sea
KAEENSETIMPGFTHLQMAQPVTFGHHLMAWYEMLSRDYSRLQDASERMSVLPLGSAALSGTRFDINRELLKSKLGFKDISKNSMDAVSDRDFVLELASVLSIIGIHLSRICEEIVIWSSSQFNYVELSDEVCTGSSIMPQKKNPDMAELIRGGSSKTIANLTGLLALMKNLPLTYNRDLQDDKEYIFSSIDFSEDSLALLTVVVNGMEPNKAKMKQDCFQGQITATDLADYLVEKNMPFRQAHEVVGKIVALAESKDLQIFELDFSELRKFSKLIQEDVKDYLDPQKTILSRKQTGGTAPSQVKKEIKKAKLTLERRK

SEQ ID NO: 181764 - protein, 463 aa, Unknown
  Bacterial polypetide isolated from the Sargasso Sea
MKNNTWSGRFIKGIDSDVLDFSQSLSVDLVLYDVDIRVTEVHVEMLYKCKHLTKSDFQKIVSGLKKVRKLADSGKLPWSVKLEDVHMNIENSLVKIIGPVGKKIHLGRSRNDLVTTDLRLYLRELSEFIIIRLRNLRFSLAKLAKVYSSDLFPGYTHLQIAQPVVFGHHLLAWAEMFARDEKRIENVMSLMNTLPLGSAAMSGTSLKIDRKFVAKKLGFTSVSNNSMDAVSDRDYVIDLAYSNSMIMMHLSRVCEEIVLWMNPQFNLIDLDQGFCTGSSIMPQKKNPDVAELVRGKTGSVYGNLVGLLTLMKGLPLTYNRDLQEDKEQIFTSVDTTLSCIEIISKMIPTIVLNKQRASELSSTSFSTATDIAEYLSLKGMPFREAHHLVGKIVKYCEDKHCSLGEIPESEFQKFSSLIEIDIYKKIIPSNTVKMRANKGDTAPKLVEKEASILIKALKKYEQK

SEQ ID NO: 181765 - protein, 168 aa, Unknown
  Bacterial polypetide isolated from the Sargasso Sea
MTNKNKTVWSSRFKSSTSKSFQRIGASINVDKRLYAQDIFASKIHTQMLIKKKIIPAKEGKKILRGLDKIEGQIRKGKFIFEEKFEDIHLNIEKKLYEIIGHSAGYMHTARSRNDQVVTDFKLWVKDSSQILIMELNSLMKNIVAKADKNVSTVMPGFTHLKNAQPIS

SEQ ID NO: 181766 - protein, 455 aa, Unknown
  Bacterial polypetide isolated from the Sargasso Sea
MTKNLNNKTSSVQGGEIYGDFTSSFDSDIRMYSEDIDVSIAYSNMLNKIGVLTLDETNLINTALEEIRNEIKNSAFNWDKKLEDIHLNIENSMYEKIGEVAGKLHFGRSRNDQVATDSRLYFIRKIDFLNTLIIDFLEELVKLSEKNISIILPGYTHLQKGQPILISHNLMSYFSIISRDLQRFLNARNNLDNMPLGSGAFAGVTIPIDREYLANELGFSNISSNSIDGVSSRDHILDILYSCSSIMINLSRISEELIIWNSEEFDFINIPDEFTTGSSIMPQKRNPDYLELIRGKTGHSLGQLVNLATSLKGLTFTYNRDLQEDRKGAMDSIELVTQSLEVIKNLFSKISFNEEKMNNSANNSNILATDFADYLANKKIPYREAYKIIKDISLNLKGKYIHELSLDELRQFSKLFEKDVLDISLRNSIENRNSIGGTSTNSVENQIIEAKNFLK

SEQ ID NO: 181767 - protein, 307 aa, Unknown
  Bacterial polypetide isolated from the Sargasso Sea
MPGFTHLKNAQAISFAHYLMSYVEMFNRDKKRFSNNLVSLNENPLGVAALAGTSFNIDRNYTTKKLGFKIPTNNSIDTVSDRDFVLDFLYASSVCAMHISRIAEELIIWHSDGFNLINLSDKVVTGSSIMPQKKNPDLLEYLRGKSGNAYGNLFSMLTILKGLPLSYFKDLQDDKEIVFKSNDNLNSCLKIFDEVLKNCNPNKSRMLELANSGYITATDLADYLVNNHSMSFRKAYQKTAAIVNFAEKRKKKLNELTLEELRKIEPKLKDDVLKVFNLKNSINSKKSYGGTSFDNIKKMIMKYKKEK

SEQ ID NO: 181768 - protein, 260 aa, Unknown
  Bacterial polypetide isolated from the Sargasso Sea
MGTRFDINRELLKSKLGFKEISRNSMDAVSDRDFVLELASVLSIIGIHLSRICEEIVVWSSSQFNYVELSDEVCTGSSIMPQKKNPDMAELIRGGSSKTIANLIGLLALMKNLPLTYNRDLQDDKEYIFSSIDFSEDSLALLTILINGMEPNKDKMKQDCFQGQITATDLADYLVEKNMPFRQAHEVVGKIVALAESKNLQIFELDFSELRKFSKLILEDVKDYLDPQKTILSRKQTGGTAPSQVKKEIKKAKLTLERRK

SEQ ID NO: 181769 - protein, 459 aa, Unknown
  Bacterial polypetide isolated from the Sargasso Sea
MAKVWSKRFDNALDPFIEKFNASIGFDRKLILEDLDCSIAHAKMLSKTKVISSSEAYQIINGLELIKVEYLEGKFSPSPPSEDIHYCIEEKLISLIGETGKKLHTGRSRNDQVGTDIRLWLRKEIDNIEILITELQKSFLNLAKSNIYTLIPGYTHMQRAQPLSLAHHLLAYIEMLQRDRERYKEVRSRVNISPLGAAALAGTKIKIDRHFTAAELGFKKIYKNSIDAVSDRDFCIEFVSASAILMSHLSKISEEIILWVTDEFSFAKLTDKCATGSSLMPQKKNPDVPELIRGKTGRVYGHLQALLTMVKGVPLSYNKDFQEDKEPIFDTAETISSCIKAMTILINEGIEFDIENLSDSVENDFSNATDLADYLVDKDVPFRTAYQVVGQMVKYCLERKMLFKNLKIEEFKKFHPEFDEDVFVDLKPLNVVKSRNSEGGTGFVQVEKEVNNWQKRLLL

SEQ ID NO: 181770 - protein, 447 aa, Unknown
  Bacterial polypetide isolated from the Sargasso Sea
MNEERKTLWGGHLIQNPAQQNVQFCAGRDVREVPMADEILLPFDIWTNRAHCIMLEQCGLIQGMHLTRILNGLRELEDSIEKGTFRLKPELEDVHTNVEVFVSEAQGADAGGRMHIGRSRNDQSACDMRLYLRNTAIGLFGEVKSFAETLLDLAEEHTGTVMPGFTHYQPAMITSWGHWLCAYVQGLCRDLERLVFTLRLVNRNPLGAAAGFGSSWPLNRELTTELLGFDHVESNSLDCIVSRWENEAQLAHAFSMLMNRLSVISQDLIILSLPYLKMVRIDDGFVTGSSIMPQKKNPDFAEVIRSKAAFVQGQLQSLLGIQKGALSGYNRDTQWTKYLIMDVVRECEDAPGILCEVYRTLEVDMDAMRRHCQSGFMNAVDLADLLCRENGLAFREAHNIIARAVKLSSESGSISTDSLKKAFQESGRDPQELPENIEAYQNPSTLI

SEQ ID NO: 181771 - protein, 275 aa, Unknown
  Bacterial polypetide isolated from the Sargasso Sea
MTKKIWGGRFTQETDNDAENFTSSIKIDKNLYNFDILGSIAHVEMLSKQKVISPSDKNKIIVGLKKILKEIESDNFIFSHQLEDIHMNIENSLINKIGTAGKKVHTARSRNDQVATDIKLFIKDMAIKLKNDLIKLQKVIIKKSEKNINVIIPFYTHLQRAQPILASHYLLAFFEMFARDIERIDDTIKRLDESPLGACAGSGTSFNIDRFHTSKKLGFKKPTRNSIDSVSDRDYVADSIYTCSIIMMHLSRFCEDLILWNSAEFNFIKIGDSFT

SEQ ID NO: 181772 - protein, 198 aa, Unknown
  Bacterial polypetide isolated from the Sargasso Sea
MAGGVTGGSDGTWSDRFEQGLHPFIERFNASIGFDLALLQEDLDGSIAHARMLAGCGVITTDEADQIVGGLETIRAEAASGVFQPGLADEDVHFAVERRLIALLGPIGKKLHTGRSRNDQVGTDLRLWLRRRLDELDPGLGRLQTALWRQADRHRSTLIPGYTHLQRAQPLCLAHHLLAYIEMLQRDRDRLGDVRKRV

SEQ ID NO: 181773 - protein, 271 aa, Unknown
  Bacterial polypetide isolated from the Sargasso Sea
MKNKNKTVWSNRFSKGNSRNFQRIGSSINIDKRLYKEDIFASIIHAQMLVKQRIIPKKDGAKIIKGLKKIEKEIEKNKFKFKEKFEDIHLNIEKRLFEIIGQSAGYLHTARSRNDQVVTDFKIWVKKASFDINDTLNLLIESILKQAEKNIDTVMPGFTHLKNAQPISFAHYLLAYVEMLNRDKKRFLNNIELIDECPLGSAALAGTSYKIDRQFTAKKLGFKKPTGNSIDAVCDRDFAIDFLSAAATCAMHMSRLAEDFIIFNSEAFNFL

SEQ ID NO: 181774 - protein, 191 aa, Unknown
  Bacterial polypetide isolated from the Sargasso Sea
MSKNKNNKPIWNTRIKKESTNLFKKVGSSLSVDKRLFNEDIEGSIVHVEMLFKQKIINFKIKNKIVWGLKRIKNEIIKKKFMYDESLEDIHMNIENRLFELIGEDAGFIHTARSRNDQVITDFKIWLKKATKEIIGNLNLTIKNILKSADKNVETIMPGFTHLKNAQPVSFAHYLLAYVEMFNRDKKKLST

SEQ ID NO: 181775 - protein, 416 aa, Unknown
  Bacterial polypetide isolated from the Sargasso Sea
VEMLFRQKIISFKIKNKIIYGLNKIYKEITYKKFEFNKKYEDIHMNIEKRLFQIIGDEAGYIHTARSRNDQVITDFKIWIKTATKDINNNIDKVIKSTIKLAEKNIETIMPGFTHLKNAQAISFGHYLMAYVEMFTRDKKRFLNNLDNLDESPLGVAALSGTSFNIDRNFTSKKLGFRRPTNNSIDTVSDRDFVLDFLYAISVCSMHISRIAEELIIWNSDGFNLINLSDKVVTGSSIMPQKKNPDLLEYLRGKTGISYGNFFSMLTILKGLPLSYFKDLQDDKELVFNSNDTLINCLKIFDEVLKNCSANKKKMLELANTGHITATDLADYLVRKHNMSFRKAYQKTAAIVNMAEKRKKNLNELSLNELKKIEPKLTEEVLEIFNLKSSINSKKSFGGTSFENIKKMITKYKNLK

SEQ ID NO: 181776 - protein, 201 aa, Unknown
  Bacterial polypetide isolated from the Sargasso Sea
IIWNSDGFNLINLSDKVVTGSSIMPQKKNPDLLEYLRGKTGVSYGNFFSMLTILKGLPLSYFKDLQDDKELVFNSNDTLINCLKIFDDVLKNCSSNKKKMLELANTGHITATDLADYLVREHNISFRKAYQKTAAIVNMAEKRKKNLNELTLNELKKIEPKLTEKVLEIFNLKNSVNSKKSFGGTSFENIKKMITKYKKLK

SEQ ID NO: 181777 - protein, 316 aa, Unknown
  Bacterial polypetide isolated from the Sargasso Sea
MKNKTVWANRLKGKTSLSFQKIGSSISVDKRLYEQDIAASIVHAKMLVKQKIIGKKEGSKIINGLKKIKLQIDKGKFKFQEKFEDIHLNIEKKLFELIGPSAGFLHTARSRNDQVVTDFKLWIKKSSKETIANIYSLMKILIKKAEKNVDTVMPGLTHLKNAQPISFAHYLLSYFEMFKRDKKRFENNIKLLNECPLGSAALAGTSYKIDRNYTSRQLGFKKPTDNSIDSVADRDFAVDFLYASALCAMHLSRLAEDFIIFNSNAFNLISFDDSMLTGSSIMPQKKNPDPAELIRGRVGLNYGYLNSMLTIMKGLR

SEQ ID NO: 181778 - protein, 461 aa, Unknown
  Bacterial polypetide isolated from the Sargasso Sea
MTKKNTSWGGRFTQSVSAIASKFSNSIDVDSVLAEKDIIGSIAYAESLQEAGVINKSELIKIKRGLNQIKKEIETGKFKWNPSLEDVHMNIESALEKKIGDSAKKLHTGRSRNDQVVTDLKLFLKDETKAIKKKVKDLQKSILNKAQKHYADLMPGFTHLQIAQPVTLGHHLLAYFEMLQRDYIRFENNEKTLNQMPLGVGALAGNRFGINRPKLAKKLGFTDITKNSIDTVSDRDFVTDVSYSCSMLAVHLSRMSEEIILWSSSQFDYVQLPEELCTGSSIMPQKKNPDMAELIRGGSSQTLGNLVTTLSLMKNQSLSYNRDNQEDKEPLFKSINFIKDALEIMSEMIKGMSFNIKKMIQDLDLSEVGATDFAEYLVLKGVPFREAHEITGKTVKEAERKNLFIREFNLSELKKIHPKIEKDIYKFIDPKKAIHAKNSLGGTSPKKVKAAIIAAKKTVSS

SEQ ID NO: 181779 - protein, 268 aa, Unknown
  Bacterial polypetide isolated from the Sargasso Sea
MTNKNKTVWSGRFKSSTSKSFQRIGASINVDKRLYEQDIFASKIHTQMLVKKKIIPAKEGKKILKGLEKIKGQIRKGKFIFKEKFEDIHLNIEKKLYEIIGNSAGYMHTARSRNDQVVTDFKLWVKDSSLILIKELNSLMKSIVNKADKNVGIVMPGFTHLKNAQPISFAHYLLAYYEMLKRDQKRFQNNLELIDESPLGAAALSGTSYNIDRNFTSKKLGFKKPTNNSIDTVSDRDFAIDFLYACAVCAMHLSRLAEDFIILNSDAY

SEQ ID NO: 181780 - protein, 386 aa, Unknown
  Bacterial polypetide isolated from the Sargasso Sea
MTKNINNKTSSVQGGKIYGDFTSSFHSDIRMYSEDIDVSIAYSKMLKKIGILSSQESELIKNSLEEIRKEIKDNIFDWDDTLEDIHLNIENSMYKKIGEVAGKLHYGRSRNDQVATDSRLYFLRNVDLIISSIIKFLEVLIKLSEKNIELLLPGYTHLQKGQPILISHNLMSYFSMISRDLSRFQNTRFNLDNMPLGSGAFAGVTIPLDRDLLADELGFSRVSSNSIDSVSSRDHITDLLYSCSSIMINLSRISEELIIWNTEEFNFINIPDEFTTGSSIMPQKRNPDYFELIRGKSGIPIGHLVSLLTSLKGLTFTYNRDLQEDRKGAMDSIEIVSQSLEVFSNLFSNLTFNQKIMLDSAHNSNILATDFADYLANKKMPYREAY

SEQ ID NO: 181781 - protein, 425 aa, Unknown
  Bacterial polypetide isolated from the Sargasso Sea
MTKIKNNDAIWGTRIKSKTSSVLKKFGSSINIDKRLYNEDINASIAHVEMLYSQKIINLKIKNKIIWGLNKVLLEIKKNKFLFKEELEDIHMNIEKRLFELIGEDAGFVHTARSRNDQVITDLKLWMTKSSKEILKLYDQIIKNFLNIAEKNIKTVMPGFTHLKNAQPISFAHYLLAYVEMFGRDKKRLTNNLEDLSENPLGVAALTGTSFNINRNYTTRKLKFKFPTKNSIDTVSNRDFVLDFLYSNSVCAIHISRFAEEFIIWNSDAFNLITLKDNIVTGSSIMPQKKNPDLLELLRGKSALSFGYLFSMLTILKGLPLSYFKDLQDDKELVFKSFDQTKLSLLSLNEILKNFIVNKKNMLSLAQKGHIVATDFADYLVKHNNYSFRKAYKITSSVVNYCEKKRKNLSDLNFVEIKKLEPRSK

SEQ ID NO: 181782 - protein, 345 aa, Unknown
  Bacterial polypetide isolated from the Sargasso Sea
MAKKEKQINPLWGGRFESGTDALAQSFSASIDIDKRLFEVDIKGSIAYAEILNVANLINSSELKKIKKGLNKILDEINQDKFNWDPDLEDVHMNIEARLVKIAGTAAKKIHTGRSRNDQVATDLRLFLKNQIDEILNLLILLQKSLLNKADENTDTLMPGLTHLQIAQPVTFGHHLMAWFEMLSRDYSRLEDAKKRMDVMPLGSAALSGTRFNIDRKFLAKKLGFEKISRNSMDAVSDRDFVLELASSLSIVGIHLSRICEEIIIWSSSQYSYIYLSDEVCTGSSIMPQKKNPDMAELIRGGASKTIANLMGLLSLMKNLPLTYNRDLQDDKEYIFSSIDFTKDS

SEQ ID NO: 181783 - protein, 462 aa, Unknown
  Bacterial polypetide isolated from the Sargasso Sea
MSKNKNNQPIWSTRITKGKKTLFSKVGGSLLVDKRLFNEDIEASIVHVEMLFKQKIINFKIKNKIIWGLKRIKNEIIKKKFIFDENLEDIHMNIEKRLFELIGEEAGYVHTARSRNDQVITDFKLWLRKANKEIIKILNMIITNITKKAKNNIETIMPGFTHLKNAQPVSFAHYLMAYVEMFERDKKRFNNNFVSISENPLGVAALTGTSFNIDRFYTSRKLKFNKPTKNSIDTVSDRDFVIDFLYSCAACSVHISRIAEEFIIWNSDAFRLINLNDKIVTGSSIMPQKKNPDPLEYLRGKTGISFGNLFSMLTVLKGLPLSYFKDLQDDKEITFASFDQLKNSLIILNDIIKNFSADKKRMLQLAETGYLTATDLADYMVKELNYSFRRAYLQTAKIVNYAEKTKKKLSELKLEEINKFEKRLDKNVLKVFDLKNSVRSKISYGGTSFENIKKMINNYKKI

SEQ ID NO: 181784 - protein, 462 aa, Unknown
  Bacterial polypetide isolated from the Sargasso Sea
MKNKNKTVWSNRFGKTNSKNFQRIGASINVDKRLYNEDIQASIVHVQMLIKKSIIPKKDGIKIIKGLKKIKTEIDKNKFKFKEKFEDIHQNIEKRLFQIIGDSAGHLHTARSRNDQVVTDFKIWVKKASIDINDTINSLIKSILKKASRNIDTVMPGFTHLKNAQPISFAHYLLAYVEMLYRDKKRFKNNISLIDECPLGSAALAGTSYNIDRNYTAKKLGFKKPTGNSIDSVSDRDFAIDFLSASATCAMHLSRLAEDFIIFNSEAFSFIEFTDKVLTGSSIMPQKKNPDPAELIRGRTAINYGNLNSMLTIMKGLPISYYKDLQDDKELVFDSFDTLKDSLSMSIELIDNLNTKKNNMKNMAQKGYTTATDFADYLSQKKNLPFRKGYAISSKLVNYAEREKIRLDQLSLKEINKFIKNTNINIPKIFDVVNSMNSKTSYGGTSTKNIRKMIKQYKSYLN

SEQ ID NO: 181785 - protein, 467 aa, Unknown
  Bacterial polypetide isolated from the Sargasso Sea
MNNNDKTNPLWGGRFKGKADETALKFSASVDLDKRLYKEDIEGSIVYAMALKEAKVITQKDYSQIKKGLLAISKSIENGKFHWDVNLEDVHMNIESALQRKIGKAAKKLHTGRSRNDQVATDLRLFLMRKIDLILHEISSTQKRITKLAKKYHEAIMPGLTHTQIAQPITFGHHLLAWNEMLERDYSRFKEVRKRASILPLGSSALSGNSYGLDREKMAERLGFDSASNNSMDSVSDRDYVVEFLSAASLLGIHLSRINEELILWSSSQFNYIELSEEFCTGSSIMPQKKNPDIAELLRGGSSKPISYLMGILSLMKNLPLSYNRDLQEDKHFLFNGIDYCLSSLEIFSLMIQSLKPNLDQMKNDCEKGHITATELADYLVSKGMTFRAAHKKTGELVADADNENLQLHELSLDKLKKRCKLIEEDVFECLIPENALKLRDSKGGTSPKEVLKQIKRIERDLKKRAI

SEQ ID NO: 181786 - protein, 486 aa, Unknown
  Bacterial polypetide isolated from the Sargasso Sea
MYRSRLGKDLDDITLSYVSSIKDDSDIAFYDIIGSEAHVIMLYENKLLSKIETKKILTALEELKGGNISQPDFEPEDIHELIESLVIKKTGIENGGKMHTARSRNDQVALDIRLKIRDDINILLQCLIETISTLLKTAQENTKTIMPLYTHLQQAQVGVFSHYLLSYADSLLRDLDRFMSLYGRVNQSPLGAGPVGGTSLPIDRDSTAKLLGFSSLVENSIDATSTRDFVAEYVANSAIMMTNLSRLSEDFIIWSSAEFSFIELSDDFTSPSSVMPQKKNPDILELTRGKTSQVIGYLTSILTTTKGLPSGYGRDLQQIKSSIWSTSKTSITALIIIKSMLSDLTVNQEKMQKATEEGFLVALDLAENLVLEKIPFRAAHNIVGNLVQLAHNSKKLLSDLELSEIESLRIKDIKSTKLFELIQKTTVSSSLKQRKSKGSAGTSEQTRMIGQRTRKLVTLKKSVKTQNDNVKKSLTFLEKRVKTLTK

SEQ ID NO: 181787 - protein, 463 aa, Unknown
  Bacterial polypetide isolated from the Sargasso Sea
MSKNKNNKPIWNTRINKNSNNLFKKIGGSLQVDKRLFNEDIEGSIVHVEMLFKQKIINFKIKNKIVWGLNRIRNEIIKKKFKFNENLEDIHMNIENRLFELIGEDAGFIHTARSRNDQIVTDFKIWLKKGTNEVIKNLNITINNILKIANKNVETIMPGFTHLKNAQPVSFAHYLLAYVEMFTRDKKRFNNNLENLNENPLGTAALTGTSFNIDRFYTTKKLKFNKPTRNSIDTVSDRDFVIDFLYACSACSIHISRIAEEFIIWNSDAFNLISLNDKIVTGSSIMPQKKNPDPLEFLRGKTGGSFGNLFSMLTILKGLPLSYFKDLQDDKELVFNSFDQLKSSLIILNDILKNFSVNKKRMLELAGSGYLTATDLADYMVRELNYPFRKAYLQTAKIINFAEKNKKKLNQLKIEEIKKIEPKLNSDVFKVFDLKYSINSKTSFGGTSFVNIKKMIRSYKKDL

SEQ ID NO: 181788 - protein, 359 aa, Unknown
  Bacterial polypetide isolated from the Sargasso Sea
MSSEKTNQSWGGRFSEPVDAFVARFTASVEFDKRLYRHDIMGSIAHATMLAKVGVLTDAERDAIIDGLKQIQGEIEAGQFDWRVDLEDVHMNIEARLTDRIGVTGKKLHTGRSRNDQVATDIRLWLRDEIDVILAEITRLQQGLLGLAEAEADTIMPGFTHLQTAQPVTFGHHLLAWFEMLSRDYERLVDCRKRTNRMPLGSAALAGTTYPIQREITAQLLGFDAVGGNSLDGVSDRDFAIEFCAAASLAMMHLSRFSEELVLWTSAQFQFIDLPDRFCTGSSIMPQKKNPDVPELVRGKTGRVFGALTGLLTLMKGQPLAYNKDNQEDKEPLFDAADTLRDSLRAFADMVPAIKPKRE

SEQ ID NO: 181789 - protein, 455 aa, Unknown
  Bacterial polypetide isolated from the Sargasso Sea
MALWGGRFQGETSALFKLFNDSLPVDYRLFEQDVVGSIAWADAIASVGIITATECSDLKKALNELLVEVKGDPAIILASGAEDIHSFVESALIAKVGDLGKKLHTGRSRNDQVATDLKLWCQSEGAALVARLQTLRSELIALAEREFDAVMPGYTHLQRAQPVTFGHWCLAYVEMIERDLSRLTDALKRANTCPLGSGALAGTAYQMDRYALAAALNFASPTLNSLDSVSDRDHVVELCGAASISMMHLSRMAEDLIFFNTGEAGFISLSDEVTSGSSLMPQKKNPDALELIRGKTGRVYGSLVGILTTMKALPLAYNKDMQEDKEGLFDVVDSWAICLDMAALVLSGLVVNRPNALLAAQQGYANATELADYLVSKGMPFREAHHVVGVAVVAAIAKKIPLEGFTLAEFKTFADIIEDDVYPNLTIEACLAKRDVLGGTALTQVKQAIATKKAG

SEQ ID NO: 181790 - protein, 463 aa, Unknown
  Bacterial polypetide isolated from the Sargasso Sea
MVKNKNNQAIWNTRIKKNASSLFQKVGNSIDIDKRLYKEDIQGSIAHVEMLFKQKIISFKIKNKIVYGLTKIDKEITNNKFEFKKKYEDIHMNVEKRLFQIIGEEAGYVHTARSRNDQVITDFKIWMKNSTNEIINNINKVIKSTIKLAEKNVETIMPGFTHLKNAQAISFAHYLMSYVEMFNRDKKRFLNNLDSLNENPLGVAALAGTSFNIDRNYTTKKLGFKTPTNNSIDTVSDRDFVLDFLYTSSVCAMHISRSAEELIIWNSDGFNLINLSDKVVTGSSIMPQKKNPDLLEYLRGKSGSVYGNLFSMLTILKGLPLSYFKDLQEDKEIVFKSNDNLNNCLKIFDEILKNCKPNKSRMLELANSGYITATDLADYLVKNHSMSFRKAYQKTAVVVNFAEKRKKNLNELTLEELRKIEPKLKEDVLKVFNLKNSINSKKSYGGTSFDNIKKMIMKYKKEK

SEQ ID NO: 181791 - protein, 420 aa, Unknown
  Bacterial polypetide isolated from the Sargasso Sea
MKNKNKTVWSNRFGETNSKNFQRIGASINIDKRLYNEDIQASIVHTQMLTKKKIIPRNDGIKIIKGLKKIKTEIDKNKFKFKEKFEDIHQNIEKRLFQIVGDSAGYLHTARSRNDQVVTDFKIWVKKASLDINETINLLIKSLLKKASRNIDTVMPGFTHLKNAQPISFAHYLLAYIEMLYRDKKRFKNNISLIDECPLGSAALAGTSFNIDRNYTAKKLGFRKPTGNSIDSVSDRDFAIDFLSASATCAMHLSRLAEDFIIFNSEAFSFIEFTDKVLTGSSIMPQKKNPDPAELIRGRTAINYGNLNSMLTIMKGLPISYYKDLQDDKELVFDSFDTLKDSLSMSIELIDNLNTKKNNMRNMAQKGYTTATDFADYLAQKKNLPFRKGYAISSKLVNYAERKKIRLDQLSIKEINKFIK

SEQ ID NO: 181792 - protein, 460 aa, Unknown
  Bacterial polypetide isolated from the Sargasso Sea
MKKNPSRNVHFSKGPSEILDAINTSIDIDQRLYKEDITGSIAHARMLGKQKIINKKEQSAIVSGLKAIERDIEKNKVVFSKKLEDIHMNIESLLFKKIGKVAGKLHTARSRNDQVVTDLKLWVKKESKILDSELKKFQRTLINIATKNTETIMPGYTHLQIAQPITLAHHVLAYVEMISRDRTRLEDCLYRLNENPLGAAALAGTSFPIDRKYTSKELGFRGPTKNAMDTVSDRDFVIEFLFVLSLIAVHLSKIAEEIVLWSNQQFDFINLPDDLSTGSSIMPQKKNPDGAELVRGKTNIIISNLSTMLNIIKGLPLSYSKDLQDDKQITFNSYDNVSLCIKVMNEILSKSTFNKTRMKELIDNSNATATDLANWLVQKLRYSFRDAYVVTGKIVSYCSKQDRNIDSLSLGELKKFDKNITADAKKVLSTTNSVKSKSSFGGTAPEITKKMIKLVIKKYL

SEQ ID NO: 181793 - protein, 205 aa, Unknown
  Bacterial polypetide isolated from the Sargasso Sea
EDFIILNSDAYQLISFNDKMLTGSSIMPQKKNPDPAELIRGRTGINYGKLNSILTIMKGLPISYFKDLQDDKALVFDGFDTLKDTLTMSNELIKNVNPNKTRMSNMAKTGYTTATDLADYLVKDKKLSFREAYKISSKLVNYAEKNKKKLDELTLAEIKKFYKNLNNNVLKIFDIKNSMNSKNSYGGTSERNIKNMIRKYKKELK

SEQ ID NO: 181794 - protein, 259 aa, Unknown
  Bacterial polypetide isolated from the Sargasso Sea
TKIKIDRNFTAAELGLKKIYKNSIDAVSDRDFCVEFVSASALAMSHLSKISEEIILWVTDEFSFAKLTDSCATGSSLMPQKKNPDVPELIRGKTGRVYGHLQALLTMVKGVPLAYNKDFQEDKEPIFDTVDTLSSCIKAMTILINEGIVFNTKNLSDSVKNDFSNATDLADYLVAKKVPFRTAYQVVGEIVKYCLEKNILFKDLEIDEFTKFHPEFDEDLFVDLEPFNVVKSRISEGGTGFTQVEKEINNWQKQLFPLI

SEQ ID NO: 181795 - protein, 260 aa, Unknown
  Bacterial polypetide isolated from the Sargasso Sea
MVNKDITKENRQSSTIWGGRFNSKPSAIMEEINSSISFDKRLFHEDIIASIAHAQMLARQNIISKGEGLKIINGLKRIYKEIEKGKFNFKTELEDIHMNVESRLKEIIGDTAGKLHTARSRNDQVSTDLRLWVRNAISILDKELKELQKRLIVLAESNISTIMPGFTHLQNAQPITFGHHLLAYVEMFGRDRSRLLDCSKRLNINPLGSAALAGTAFPIDRQSTTKELNFTSPTTNSIDAVSDRDFVMEFLSISAITSIH

SEQ ID NO: 181796 - protein, 463 aa, Unknown
  Bacterial polypetide isolated from the Sargasso Sea
MAKNKNNQAIWNTRIKKNASTLFQKVGNSINIDKRLYKEDIQGSIAHVEMLFKQKIISFKIKNKIIYGLNKIEKEISNKKFEFNKKYEDIHINIEKRLFQIIGEEAGYIHTARSRNDQVITDFKIWIRSATKEININLDKVIKSTIKLAEKNIDTIMPGFTHLKNAQAISFAHYLMAYVEMFSRDKKRFLNNLDNLEESPLGVAALAGTSFNIDRNYTAKKLGFKKPTNNSIDTVSDRDFVLDFLYSVSVCSMHISRISEELIIWNSEGFSLINLSDKIVTGSSIMPQKKNPDMLEYLRGKTGKTYGNLFSMLTILKGLPLSYFKDLQDDKEIVFQSNDNLINCLKVFDEIIKNSSSNKKRMLELANSGYITATDLADYLVKNHSMSFRKAYQKTASIVNFAEKKKKNLSDLTTEELKKIEPKLTNDVLKVFDLKNSINSKKSYGGTSFDNIKKMIMKYKKQK

SEQ ID NO: 181797 - protein, 462 aa, Unknown
  Bacterial polypetide isolated from the Sargasso Sea
MKNKNKTVWSNRFSKDNSRNFQRIGSSINIDKRLYKEDIFASIIHAQMLVKQRIIPRKDGARIIKGLKKIEKEIEKNRFKFKEKFEDIHLNIEKRLFEIIGQSAGYLHTARSRNDQVVTDFKIWVKKASQDINDTLNLLIKSILKKAEKNIDTVMPGFTHLKNAQPISFAHYLLAYVEMLNRDKKRFLNNIELIDECPLGSAALAGTSYKIDRQFTAKKLGFKKPTGNSIDAVCDRDFAIDFLSAAATCAMHMSRLAEDFIIFNSEAFNFLKFSDNVLTGSSIMPQKKNPDPAELIRGKTAINYGKLNSMLTIMKGLPISYYKDLQDDKSLVFDSYDTLKDTLLMANELILNLNANKINMKQMAQKGYTTATDFADYLVKKKNFAFREAYVTSSKLVNYAEKKKVRLDELSLEEINKFLKRVKLDNIKIFDVLGSMNSKTSYGGTATKNIKNMIKKYRKEVK

SEQ ID NO: 181798 - protein, 382 aa, Unknown
  Bacterial polypetide isolated from the Sargasso Sea
MKKNPSRNTHLKKNPSKLLESINNSIDIDQRMYKEDIEGSIAHATMLGKQKIISKKDQTKIVNGLKIILQNINSGKIHFKSELEDIHMNIESLLFKQIGKTAGKLHTARSRNDQVVTDFKLWIRNNSINLNKHVQNLQKSLINVAKKNTATVMPGYTHLQVAQPISLAHHCLAYVEMMGRDRSRLKDCIERLNESPLGSGALAGTSFPIDRNLTAKLLKFSKPTANALDSVSDRDFAVEFLFVISLISTHLSRMADEIILWSNQQFNFINLPDELATGSSIMPQKRNPDGAELVRGKASGIISNLNGLLVILKGLPLAYSKDLQDDKKIVFSAFDDVCLTLEVMTEMWSKISFNKGIMAAAVNNSNATATDFANWLVQHLNL

SEQ ID NO: 181799 - protein, 203 aa, Unknown
  Bacterial polypetide isolated from the Sargasso Sea
MATDKLWGGRFSGRTDTTVEAFTASEHFDRRLAEYDIAGSRAHALMLKSCGIISEADCNAIIDGLETIAQEIADDRFVWSAALEDVHMNIEARLTEIAGEPGKKLHTARSRNDQVATDMRLFTRDAIDQLQADLTVLQQALVDLAEAEAESVMPGMTHMQSAQPVTCGHHLLAWNAMLERDWQRFGDCRKRVNLSPLGVAALA

SEQ ID NO: 181800 - protein, 264 aa, Unknown
  Bacterial polypetide isolated from the Sargasso Sea
MTKNKNNKAIWNSRIKNKTSTLFQNVGSSILVDKRLYKEDIKASTVHVEMLFKQKIISFKIKNKIIYGLEKIEKEINKNKFEFKKKYEDIHMNIEKRLFQIIGDEAGYIHTARSRNDQVITDLKLWIRSSTKEINLHLNKIIRSTIKISEKNIETIMPGFTHLKNAQAISFAHYLMAYVEMFSRDKKRFENNLDSLNQNPLGVAALTGTSFTIDRNYTTKKLGFKIPTNNSIDTVSDRDFVLDFLYSISVCSLHLSRIAEELII

SEQ ID NO: 181801 - protein, 347 aa, Unknown
  Bacterial polypetide isolated from the Sargasso Sea
DQVITDLKIWLKKSTKEIIKNINLTINNILKSANKNVETIMPGFTHLKNAQPVSFAHYLLAYVEMFIRDKKRFNNNLENLNENPLGVAALTGTSFNIDRFYTTKKLKFDKPTKNSIDTVSDRDFVIDFLYSCSACSIHISRIAEEFIIWNSDAFNLISLNDKIVTGSSIMPQKKNPDPLEFLRGKTATSFGNLFSMLTILKGLPLSYFKDLQDDKELVFKSFDQLKNSLLILNDILKNFSVDKKRMLELANLGFITATDLADYMVKELNYPFRKAYLQTARIINFAEKNKKTLKELKIDEIKKIEPKLNSDVFKVFDLKYSINSKNSFGGTSFVNIKKMIRSYKKGL

SEQ ID NO: 181802 - protein, 279 aa, Unknown
  Bacterial polypetide isolated from the Sargasso Sea
MVQNKNNKAIWNTRIKKDTSSIFKKIGSSINVDKRLFKEDIQGSIAHVEMLFKQKIITFKVKNKIIWGLNRIKNEIIKKKFNFNSNLEDIHMNIENRLFEIIGEDSGYIHTGRSRNDQVVTDFKLWLRSSTIEIINHLNNLEKIIIKNAEKNIKTIMPGFTHLKNAQPISFAHYLLAYVEMFKRDKKRFQNNLESLLENPLGAAALAGTGFNIDRNYTSKKLKFKNPTNNSIDTVSDRDFVLDFLYSVTVCSIHISRLAEEFIIWNSDAFQLIKLNDKV

SEQ ID NO: 181803 - protein, 335 aa, Unknown
  Bacterial polypetide isolated from the Sargasso Sea
MKNKNKTVWSNRFKSKTSQSFQKIGSSIHIDKRLYEQDIAASIVHTQMLSKQKIIKSEDANKIINGLKKIKAQIDKSNFEFKEKFEDIHLNIEKALFDIIGPSAGYMHTARSRNDQVVTDFKLWIKDASKEILKDISLVMKNLLKKAEKNTDTVMPGLTHLKNAQPISFAHYLLSYFEMLKRDKKRFENNLDLLDECPLGSAALSGTSYKIDRTYTAKKLGFKKPTENSVDSVSDRDFAIDFLYASAVCAMHLSRLAEDFIIYNSDAFKLISFKDSMLTGSSIMPQKKNPDPAELIRGKVGINYGKLNAILTIMKGLPMSYFKDMQDDKELVFSG

SEQ ID NO: 181804 - protein, 239 aa, Unknown
  Bacterial polypetide isolated from the Sargasso Sea
MKNKTIWSNRFKNKTSLSFQKIGSSIGIDKRLYEQDIAASIVHTQMLSKQKIISSKDGVKIINGLKKIKSLIDKGNFDFKEKFEDIHLNIEKKLFEMIGPSAGFLHTARSRNDQVVTDFKLWIKKASKEILKDISLIMKNIIKKAEKNTDTVMPGLTHLKNAQPISFAHYLLSYYEMLKRDKNRFENNIKLLDECPLGSAALSGTSYKIDRNYTSKKLGFKKPTANSMDAVSDRDFAID

SEQ ID NO: 181805 - protein, 335 aa, Unknown
  Bacterial polypetide isolated from the Sargasso Sea
MTKNKNNQPIWSSRIKKNSNNLFKKVGGSLDIDKRLFNEDISASIVHTEMLFKQKIINFKIKNKIVWGLNRIKNEIIKKKFPFDKNLEDIHMNIEKRLFDLIGEDAGFIHTARSRNDQVITDFKIWLKKSTYEITKTLDDLINTILKVADKNIKTIMPGFTHLKNAQPISFAHYMMAYIEMFKRDKKRFKNNLDALNENPLGVAALSGTSFNIDRNFTTKKLNFSKPTDNSIDTVSDRDFVLDFLYSCSTCSIHISRIAEEFIIWNSDAYNLIHLNDKIVTGSSIMPQKKNPDPLEYLRGKTGSSFGNLFSMLTILKGLPLSYFKDLQDDKELVF

SEQ ID NO: 181806 - protein, 462 aa, Unknown
  Bacterial polypetide isolated from the Sargasso Sea
MTNKNKTVWSSRFKSSTSKSFQRIGASINVDKRLYEQDIFASKIHTQMLIRKKIIPTKEGKKILKGLEKIKGQIKKGNFVFKEKFEDIHLNIEKKLYEIIGTSAGYMHTARSRNDQVVTDFKLWVKDSTLILIKELNSLMKNIVSKANKNVSTVMPGFTHLKNAQPVSFAHYLLAYYEMLKRDKKRFQNNLELIDESPLGAAALSGTSYNIDRNFTSKKLGFKKPTDNSIDTVSDRDFAIDFLYACAVSAMHLSRLAEDFIILNSDAYQLISFNDKMLTGSSIMPQKKNPDPAELIRGRTGINYGKLSSILTIMKGLPISYFKDLQDDKALVFDGFDTLKDTLIMSNELIKNVNPNKTRMFNMAKTGYTTATDFADYLVKDKKLSFRDAYKISSKIVNYAEKNKKNLDELTLNEIKKFYKNLNNNVLKIFNVKNSMNSKNSYGGTSERNIKNMIRKYTKELK

SEQ ID NO: 181807 - protein, 462 aa, Unknown
  Bacterial polypetide isolated from the Sargasso Sea
MSKNKNNQPIWNTRIKKEIENLFKKVGGSIEIDKRLFREDIEASIVHVEMLFRQKIINFKIKNKIVWGLNRIKNEIIKKKFIFDDKLEDIHMNIEHRLFELIGEEAGYIHTARSRNDQVVTDFKIWLRKANKEIVKNIDATIKNILKKAEKNVETIMPGFTHLKNAQPVSFAHYLMAYLEMFNRDKNRFQNNLESLNENPLGVAALTGTSFKIDRFYTSKKLGFDRPTKNSIDTVSDRDFVIDFLYSCSACAVHISRIAEEFIIWNSDAFKLINLNDKIVTGSSIMPQKKNPDPLEYLRGKTGFIFGNLFSMLTILKGLPLSYFKDLQDDKEIVFKSFDQLKNSLIILNDVLKNFSPDKKRMIELAESGYITATDLADYMVRELNYPFRKAYLQTAKIINFAEKNKKKLSELTIKEINKIEKGLTTDVLKVFELKKSVNSKVSYGGTSFNNIKKMILNYKKK

SEQ ID NO: 181808 - protein, 360 aa, Unknown
  Bacterial polypetide isolated from the Sargasso Sea
GEDAGYIHTARSRNDQVLVDFKIWMINSNNKLIKLIDQTIKNILKIAEKNIYTIMPGFTHLKNAQPISFAHYILAYVEMFGRDKKRLENNFDNLKENPLGSGALSGTSFNIDRNFTTKKLGFKIPTGNSIDTVSDRDFVLDFLYSSSVCSMHISRLAEEFIIWNSDAFKLITLNDNVVTGSSIMPQKKNPDPLEYLRGNVGNQYGNLFSMMTILKGLPLSYFKDLQEDKKIVFSSFDSLCDSIKVLNEVLNNFSVNKNEMLNLANTGYITATDLADYFVKNLKYPFRKSYQITAKIVNYCEKNKKSLSELSIDELKKIEPNISKDVSKIFDLKYSVNSKKSYGGTSFENVKKMIKKYKNA

SEQ ID NO: 181809 - protein, 400 aa, Unknown
  Bacterial polypetide isolated from the Sargasso Sea
KIINVLNKIKSQIEKGKFIFKEKYEDIHLNIEKKLFDLIGPSAGYMHTARSRNDQVVTDFKLWIKNSSKEIVNDLTEVMKTLIKKSENNIGTCMPGFTHLKNAQPISFAHYLLAYYEMLKRDKKRFLNNLELLDESPLGAAALSGTSYKIDRQYTAKKLGFKKPTDNSIDSVSDRDFAIDFLYASAVCAMHLSRLAEDFIILNSDAYKLISFKDNMLTGSSIMPQKKNPDPAELIRGRTGINYGKLNSLLTIMKGLPISYFKDLQDDKSLVFDGYDTLKDTLIMSNELIKSLKPSKERMLKMANEGYTTATDFADYLVKEKKISFRQSYMISSKLVNYAEKNKKTLDKLSLVELKKFYKDLDKNVMKIFKVKNSMNSKSSYGGTAEKNIKKMIKKYKREI

SEQ ID NO: 181810 - protein, 462 aa, Unknown
  Bacterial polypetide isolated from the Sargasso Sea
MGKNKNNQPIWNTRIKKKKTNLFKKVGGSIEIDKRLFREDIEASIVHVEMLFRQKIINFKIKNKIVWGLNRIKNEIIKKKFIFDRKLEDIHMNIEHRLFELIGEDAGYIHTARSRNDQVVTDFKMWLRKANKEIAKNIDGTIKNILKKAEKNVETIMPGFTHLKNAQPVSFAHYLMAYLEMFNRDKKRFKNNLESLNESPLGVAALTGTSFKIDRFYTSKKLGFTRPTKNSIDTVSDRDFVIDFLYSCSACAVHISRIAEEFIIWNSDAFKLINLNDKIVTGSSIMPQKKNPDPLEYLRGKTGFMFGNLFSMLTTLKGLPLSYFKDLQDDKEIVFKSFDQLKNSLIILNDVLKNFSPDKKRMIELAESGYITATDLADYMVRELNYPFRKAYLQTAKIVNFAEKNKKKLSELTIKEINKIEKGLTTDVLKVFELKKSVNSKVSYGGTSFDNIKKMILSYKKK

SEQ ID NO: 181811 - protein, 463 aa, Unknown
  Bacterial polypetide isolated from the Sargasso Sea
MAKNKNNQAIWNTRIKKNSSSLFQKVGNSLDVDKKLYKEDIKGSIAHVEMLFKQKIISFKIKNKIIYGLNKIEREISSKKFEFNKKYEDIHMNIEKRLFQIIGEEAGYVHTARSRNDQVITDFKLWLKSATNEINNNLDKVIKTSIKLAEKNIQTIMPGFTHLKNAQAISFAHYLMSYVEIFNRDKKRFSNNLESLDENPLGVAALSGTSFNIDRNYTTKKLGFKKPTNNSIDTVSDRDFVIDFLYSVSVCSMHISRIAEELIIWNSDGFNLINLSDKVVTGSSIMPQKKNPDLLEYLRGKSGSTYGNLFSMLTILKGLPLSYFKDLQDDKEIVFNSNDTLVNCLKIFDEVLKNCSPNKKKMLELANKGYITATDLADYLVKNHSMSFRNAYQKTSAIVNLAEKTKKNLNELSLDQLKKIEPKLTADVLKVFDLNNSVNSKKSFGGTSFDNIKKMIVKYKKEI

SEQ ID NO: 181812 - protein, 460 aa, Unknown
  Bacterial polypetide isolated from the Sargasso Sea
MKNKTVWANRLKGKISLSFQKIGSSISVDKRLYEQDINASIVHAKMLVKQKIISKKEGSKIINGLKKIKSQIDKGKFKFQEKFEDIHLNIEKKLFELIGPSAGFLHTARSRNDQVVTDFKLWTKKSSKETIGNINSLMKILIKKAEKNVNTVMPGLTHLKNAQPISFAHYLLSYFEMFKRDVKRFENNIKLLDECPLGSAALAGTSYKIDRNYTSKQLGFKKPTDNSIDSVADRDFAVDFLYASALCAMHLSRLAEDLIIFNSNAFNLISFDNSMLTGSSIMPQKKNPDPAELIRGRVGLIYGNLNSMLTIMKGLPMSYFKDLQDDKKLVFDGFDTLNNSLVLSLELVNSVKPNKKNMLKMANEGFTTATDFADYLVKEKELTFRESYVVAAKLVNYAEKKNKLLSELSLQEIMKVYKNLDKNVLKIFDVNNSMNSKKSYGGTSTTNVKAMIRKYKKEVK

SEQ ID NO: 181813 - protein, 463 aa, Unknown
  Bacterial polypetide isolated from the Sargasso Sea
MSKNKNQAIWKSRIKKKTSSLFQKVGSSIDIDKELYKEDIKVSIVHVEMLFRQKIISFKIKNKIIYGLNKIEREISGKKFQFNKKFEDIHMNIEKRLFEIIGEDAGFLHTARSRNDQVITDFKIWMRSSVININKKLDEILKSLLVIAQKNIKTVMPGLTHLKNAQPVSFAHYLLAYLEMFKRDKKRFLNNLDSLSENPMGVAALTGTSFNIDRNFTTKKLGFKKPTNNSIDTVSDRDFVLDYLFNVSVCSMHISRVAEELIIWNSDGFKMIGLSDKIVTGSSIMPQKKNPDLLEYLRGKSGTSFGNLFSMLTILKGLPLSYFKDLQDDKEIVFKSDETINNCLGIFNEILKNFYPNKKIMLKLAEEGFTTATDLADYLVKKHDFTFRNAYYLTGTIVNYAEKKNKKLSQLSLKELQNLEPKLDSEVLKIFDLNHSVNSKKSFGGTSFDNIKKMLTRYKREIK

SEQ ID NO: 181814 - protein, 461 aa, Unknown
  Bacterial polypetide isolated from the Sargasso Sea
MALWGGRFSQGADSRFKQFNDSLRFDYRLAEQDIQGSMAWAKALVKVGVLTADEQGKLQQAMEVLLASVQQDPRQILSSDAEDIHSWVESQLIAAVGDLGKKLHTGRSRNDQVATDLKLWCKAQGELLLGSITALQQGLVASARANQAAVLPGYTHLQRAQPVTYAHWALAYVEMLERDYSRLQDALKRLDTSPLGCGALAGTAYAIDREALALDMGFSGATRNSLDSVSDRDHVVELMHVASLSMTHLSRFAEDLIFYNTGEAGFVELSDAVTSGSSLMPQKKNPDALELIRGKTGRVVGAQMGMLMSLKALPLAYNKDMQEDKEGLFDALDTWHDCLDMAALVLIDLKVNGERTMAAAQGGYANATELADYLVAKGIPFREAHHIVGETVVYAIQVKKPLEELTIGEFQRFSPVIEFDVYPNLELEATLAKRVAKGGVAREQIEGALVAAEALLAKRAG

SEQ ID NO: 181815 - protein, 363 aa, Unknown
  Bacterial polypetide isolated from the Sargasso Sea
MGKKLHTGRSRNDQVGTDIRLWLRKEIDKLEILITDLQKSFLNVAKSNIYTLIPGYTHMQRAQPLSLAHHLLAYLEMFQRDLERFKEVRSRVNTSPLGAAALAGTKIKIDRNFTAAELGFEKIYKNSIDAVSDRDFCIEFVSASALAMSHLSKISEEIILWVTDEFSFAKLTDSCATGSSLMPQKKNPDVPELIRGKTGRVYGHLQALLTMVKGVPLAYNKDFQEDKEPIFDTAETISSCIKAMTILINEGIEFNIKNLSDSVENDFSNATDLADYLVGKKVPFRTAYQVVGEIVKYCLERKMLFKNLKIDEFKKFHPEFDDDVFIDLEPLNVVKSRTSEGGTGFIQVEKEVNNWQKKLSSRI

SEQ ID NO: 181816 - protein, 459 aa, Unknown
  Bacterial polypetide isolated from the Sargasso Sea
MWGGRFNTDQDKIMLEMNSSIEFDSRLYLEDIIASIAHAKMLGKKKIISSVESQKIISGLKKIKIEFEKGIFNLDPLLEDIHMNIEANLQKKIGNVAKKLHTGRSRNDQVATDMRLYMRKQCQEIIKKITMIQKELSKKANKYYDFIMPGFTHMQIAQPVTFGHHLLAYVEMLERDKNRFHDALKRINQSPLGAAALAGTTFPIDREMTSKALGFTNPMANSIDAVSSRDFIIEPLAAASILASHLSRFSEEIILWVSEGFDFIELPDSLATGSSIMPQKKNPDIAELVRGKNGRVIGALMSILVVMKGLPLAYSKDLQEDKELTFDAIDNILNSLEAINAIIKKLKPKKENLSSAAQKSYSTATDLADWLVSNLNIPFREAHKITGNIVRYCEKKKIKLSELTIKELKSFNKKINDDIFNVLDAEQSVNQKKSFGSTSPLMVKKSAAKWIKKLQNEKK

SEQ ID NO: 181817 - protein, 348 aa, Unknown
  Bacterial polypetide isolated from the Sargasso Sea
LVATDLRLWTKLNATQVRSTLINAIGALITFADAHFGAVMPGFTHLQRAQPVLVSHWALAYIEMFKRDLSRIDDALARLDVCPLGCGALAGTGIQIDRTALAQRLGFKSAALNSLDAVSDRDYVVELSATASLCMTHLSRLSEDVIFFCSGEAAFFKLGDAISSGSSLMPQKKNPDVFELLRGKTGRVLGHLVAILHVLKGLPLAYNKDMQEDKQGFFDLMASWQQCLLVLATVLPHLSVNVERCRLAAELGYSNATDLADYLVGKGIAFRDAHELSGELVLVASKQQKPLEALALAEMQQVSPLISEDVFAALTIEAGLAKRASLAGTSPDRVKEALDATKVWFEAL

SEQ ID NO: 181818 - protein, 460 aa, Unknown
  Bacterial polypetide isolated from the Sargasso Sea
MKKNPARNVHLVKGPTNLLEKINLSIDVDSRLYREDIEASIAHVKMLSKTKIISSSESKILLKGLNNILKDIEKGRIKFSNKHEDIHMNIEALLFKKVGNVAGKLHTARSRNDQVVTDFKLWIRNNSNNIDKLCKNFQKILINVAKKNISSVMPGYTHLQIAQPITLAHHLLAYVEMIGRDRERIKDCVKRLNENPLGSGALAGTSFPIDRLMTSKILGFNRPTSNSVDSVSDRDFVIEFLFCLTLISVHLSRLAEEIIIWSSQQYDFVKLPDEIATGSSIMPQKKNPDGAELVRAQAATTIGNLNSLLVLLKGLPMTYSKDLQKDKQITFDSFDTVHLGLNVMSEIIDKAKFNIKSMKEATDFSYATATDLADWLVRYLKYTFRDAYKITGKIVAYAEKNNKMLNELSLKDFQKFDKKINKNIFTVLSSINSVKSKKSYGGTSPENVKKSISKAIKRYL

SEQ ID NO: 181819 - protein, 465 aa, Unknown
  Bacterial polypetide isolated from the Sargasso Sea
MSIKKNKLRDRFNKKSSESFININSSLENDKFLFEEDIEASIAHATMLSSQKIISNKDSKKIISGLKKIRTEIKNNKFIFDDNLEDIHMNIESRLEELIGDAAERLHTGRSRNDQVVTDLKLWMKKDNILISKKLKKLKSALLQVASKNILITFPGLTHLQTAQPISVGHFFMAYFEMFNRDTNRFSDSFRRMNENPLGAGALAGTNFPINRNKTTKMLDFKKPTKNSLDTVSDRDFVVDFLSSSSLMAVHLSRLAEEITLYNSDLVGFFKIGDQLMSSSSIMPQKKNPDGAELIRAKSSTISGNLSSMLNLLKSLPLTYSKDLQEDKALVTSTSKNIHLCLDCMIEIISTIKIEKSNIEKKLKSSFANATDLADWLVINLGYSFRSAHNLTAKIVNFAEKKKISLNKISMKDYKKFDKNIDKSVYGFLDLKNSINNKKSYGGTAISEIRKMISQARKELSNEKY

SEQ ID NO: 181820 - protein, 267 aa, Unknown
  Bacterial polypetide isolated from the Sargasso Sea
ENPLGVAALTGTSFNIDRFYTTKKLNFKNPTKNSIDTVSDRDFVIDFLYSCSACAIHISRIAEEFIIWNSDAFKLIILNDKIVTGSSIMPQKKNPDPLEYLRGKTGGIFGNLFSMLTILKGLPLSYFKDLQDDKELAFKSFDQLKNSLIILNDILKNFSADKKRMLELAESGFLTATDLADYMVRELNYPFRKAYLQTAKIVNFAEKNKKKLSELSIEELQIIEKKLTYDVMKVFDLKNSINSKTSYGGTSFENIKKMILSYKKDKK

SEQ ID NO: 181821 - protein, 393 aa, Unknown
  Bacterial polypetide isolated from the Sargasso Sea
KIKKGLVKILSEIKSDKFEWEEGLEDVHMNIESALAKKAGNAAKKLHTGRSRNDQVSTDLRMYLNIKIDESLKNITYLQKNIIKQAEKHISSIMPGFTHLQIAQPVTFGHHLMAWYEMLERDYMRLIDAKNRMSVLPLGSAALAGSRYKINRSFLAKKLGFQSLSRNSIDAVSDRDFVIEIASSLSILGIHLSRICEEIVLWSSSQFEYVHLSDEVCTGSSIMPQKRNPDVAELIRGGSSKTVANLMGLLSLMKNLPLSYNRDLQQDKEFIFGSVDYTNDSLALLALLIKDMKVNIKKLEADCKLGQITATDLADYLVDKSMPFRKAHETVGKIVAFAESKGVQIFELEISELRKFSKLISEDVNYYLDPVKSINSRTLVGGTAPSRVKKEIN

SEQ ID NO: 181822 - protein, 283 aa, Unknown
  Bacterial polypetide isolated from the Sargasso Sea
RDLNYFDFCINNSDENVLGSAALAGSNYNLDIGLLNKSLHFSKSKNNSMDGVSDRDFCMYFLHASSLTATHLSKLSSELILWSSNFMKLFNISSEYSTGSSIMPQKRNPDSLELVRSKTNSIRIKSIELSNIVSNLPLTYFKDFQEDKRIIFDCYDELISCIKIMEKVIKKSNFEKSIGRDLCNNYFATATDLADYLVIEKKIPFRESYKIIADIVNYAQKKNKNLSQIKIDEYQKFQKSIDKNIYKYVDINNSLSRKKTPMSSNPKDVSRVIKKYIKFLRVR

SEQ ID NO: 181823 - protein, 300 aa, Unknown
  Bacterial polypetide isolated from the Sargasso Sea
NAHPISFAHYLLAYVEMFKRDKKRFTSNISYIDECPLGVGALAGTSYKIDRNFTSKKLGFKKPTNNSIDSVADRDFVLDFLSAASICAMHISRFAEELIIWNSDIFKLVKINDKMLTGSSIMPQKKNPDPAELIRGRAGKNFGSLQAMLTTMKGLPLSYYKDMQEDKALVFDSYDTLLESIIITNELVKNLTPNKNRMLDLSNEGYTTSTDFADYLVQNEDLSFREAYKISAKLVNYAEKKRKKLNELSLSEVNKIKNNLKKDVMKIFDVKNSVNYKTSYGGTSTKNIKKMISKLKKELK

SEQ ID NO: 181824 - protein, 456 aa, Unknown
  Bacterial polypetide isolated from the Sargasso Sea
MELSALTAVSPIDGRYGDKADALRPIFSEFGLLRFRVEVEVRWLQKLASHAGIPEVPALSATASALLDGIVQSFNEQDAARIKQIERTTNHDVKAVEYFLKEKVEVNPELAAVSEFIHFACTSEDINNNSHGLMLKTAREEVIKPYCEKLISELKRLAHEYRDMPLLSRTHGQPATPSTMGKEMANVAYRLERQYKQIMVVEILGKINGAVGNYNAHISAYPDVDWHQFSEEFVTSLGLSWNPYTTQIEPHDYIAELFDAMARFNTILIDFDRDVWGYISLGHFKQRTIAGEIGSSTMPHKVNPIDFENSEGNLGLANAVFQHLASKLPISRWQRDLTDSTVLRNLGVAVGYSLIAYQATLKGISKLEANDAAMAADLDANWEVLAEPIQTVMRRYGIEKPYEKLKELTRGRRVDAEGMRTFIDTLALPEAVKVELKKLTPANYIGDAQRLVDLLK

SEQ ID NO: 181825 - protein, 270 aa, Unknown
  Bacterial polypetide isolated from the Sargasso Sea
SDYLGRDIFIKRDDVTPMAMGGNKLRKLEFLAADALREGADTLITAGAIQSNHVRQTAAVAAKLGLHCVALLENPIGTTAENYLTNGNRLLLDLFNTQIEMCDALTDPNAQLQELATRVEAQGFRPYVIPVGGSNALGAMGYVESALEIAQQCEGAVSLSSVVVASGSAGTHAGLAVGLEQLMPDVELIGVTVSRSVADQKPKVVTLQQDIAGELELTASADILLWDDYYAPGYGTPNEEGMEAVKLLARLEGILLDPGVYTVRRWRGFD

SEQ ID NO: 181826 - protein, 212 aa, Unknown
  Bacterial polypetide isolated from the Sargasso Sea
MLQQNLSLQNLTRFPRLELIGAPTALEYLPRLSDHLGREIFIKRDDTTPLAMGGNKLRKLEFLAAEALREGADTLVTAGAIQSNHVRQTAAVAAKLGLHCVALLENPIGTQAENYLTNGNRLLLDLFNVQVEMCAALDAPDAQLAEIAERLEAQGFRPYVVPVGGSNALGALGYVESALEIAGQCDEAARISSVIVASGSAGTHAGLAVGLE

SEQ ID NO: 181827 - protein, 107 aa, Unknown
  Bacterial polypetide isolated from the Sargasso Sea
MPLLDSFTVDHTRMNAPAVRVAKHMSTPKGDAITVFDLRFCAPNKDILSERGIHTLEHLFAGFMRDHLNGSDVEIIDISPMGCRTGFYMSLIGEPSERQVADAWLAS

SEQ ID NO: 181828 - protein, 168 aa, Unknown
  Bacterial polypetide isolated from the Sargasso Sea
MPLLDSFTVDHTIMKAPAVRVAKKMNTPKGDDITVFDLRFCVPNEEILSEKGIHTLEHLFAGFMRDHLNGDGVEIIDISPMGCRTGFYMSLIGTPDEQRVAAAWKAAMADVLTVQNQSEIPELNIYQCGTAQMHSLAEAKEIAQNIISRGVGVNLNDELKLSAEFLKQ

SEQ ID NO: 181829 - protein, 169 aa, Unknown
  Bacterial polypetide isolated from the Sargasso Sea
MPLLDSFTVDHTIMKAPAVRVAKKMNTPKGDDITVFDLRFCVPNEEILSEKGIHTLEHLFAGFMRDHLNGDGVEIIDISPMGCRTGFYMSLIGTPDEQRVAAAWKAAMADVLTVQNQSEIPELNIYQCGTAQMHSLAEAKEIAQNIISRGVGVNLNDELKLSAEFLKNS

SEQ ID NO: 181830 - protein, 169 aa, Unknown
  Bacterial polypetide isolated from the Sargasso Sea
MPLLDSFTVDHTRMNAPAVRVAKHMTTPKGDAITVFDLRFCAPNKDILSERGIHTLEHLFAGFMRDHLNGNDVEIIDISPMGCRTGFYMSLIGVPTEHQVADAWLASMEDVLKVVEQSEIPELNEYQCGTYEMHSLEQAQEIARNIIAAGVSVNRNDDLKLSDEILGKL

SEQ ID NO: 181831 - protein, 169 aa, Unknown
  Bacterial polypetide isolated from the Sargasso Sea
MPLLDSFTVDHTRMNAPAVRVAKHMSTPKGDAITVFDLRFCAPNKDILSERGIHTLEHLFAGFMRDHLNGSDVEIIDISPMGCRTGFYMSLIGEPSERQVADAWLASMEDVLKVVEQSEIPELNEYQCGTYEMHSLEQAQDIARNIIAAGVSVNRNDDLKLSDEILGQL

SEQ ID NO: 181832 - protein, 169 aa, Unknown
  Bacterial polypetide isolated from the Sargasso Sea
MPLLDSFTVDHTRMNAPAVRVAKHMSTPKGDAITVFDLRFCAPNKDILSERGIHTLEHLFAGFMRDHLNGSDVEIIDISPMGCRTGFYMSLIGEPSERQVADAWLASMEDVLKVVEQSEIPELNEYQCGTYQMHSLEQAQDIARNIIAAGVSVNRNDDLKLSDEILGQL

SEQ ID NO: 181833 - protein, 287 aa, Unknown
  Bacterial polypetide isolated from the Sargasso Sea
AATLLHYHHPLMPGYLEGSVPKGICLYTPDETQRHYLNELELYRGMPPQESPKGELPITGVYSMGSTSSVGQSCSSDLDIWVCHQSWLDNEERQLLQRKCSLLESWAASLGVEVSFFLIDENRFRHNESGSLGGEDCGSTQHILLLDEFYRTAVRLAGKRILWNMVPGDEEEHYDDYVMTLYAQGVLTPNEWLDLGGLSSLSAEEYFGASLWQLYKSIDSPYKAVLKTLLLEAYSWEYPNTRLLAKDIKQRLHDGEIVSFGLDHYCMMLERVTHYLTAIEDFTRLDL

SEQ ID NO: 181834 - protein, 281 aa, Unknown
  Bacterial polypetide isolated from the Sargasso Sea
GVLTRKLYAAFEALPGKVTLVNPQISPDLSEPNLTFIHVPPGRANRTGWYLYNRAPNMDSIVSHQPLEYNRYLNKLVAWAWFNGLLTSRTRLFIKGNGIVDLAKLQEMVANVSHHFPLRLPAPTPKALYSPCEIRHLAIIVNLEYDPTAAFRNQVVHFDFRKLDVFSFGEQQNCLVGSVDLLYRNSWNEVRTLHFNGEQAMIEALKTILGKMHQDAAPPDSVEVFCYSQHLRGLIRTRVQQLVSECIELRLSSTRQETGRFKALRVAGQTWGLFFERLNVS

SEQ ID NO: 181835 - protein, 299 aa, Unknown
  Bacterial polypetide isolated from the Sargasso Sea
MYLYIETLKQRLAAINQLRVDRALAAMGPAFQQVYSLLPTLLHYHHPLMPGYLDGNVPKGICLYTPDETQRHYLNELELYRGMSPQDPPKGELPITGVYSMGSTSSVGQSCSSDLDIWVCHQSWLDSEERQLLQRKCSLLESWAASLGVEVSFFLIDENRFRHNESGSLGGEDCGSTQHILLLDEFYRTAVRLAGKRILWNMVPGDEEEHYDDYVMTLYAQGVLTPNEWLDLGGLSSLSAEEYFGASLWQLYKSIDSPYKAVLKTLLLEAYSWEYPNPRLLAKDIKQRLHDGEIVSFGL

SEQ ID NO: 181836 - protein, 244 aa, Unknown
  Bacterial polypetide isolated from the Sargasso Sea
KLVAWAWFNGLLTSRTRLFIKGNGIVDLAKLQEMVADVSHHFPLRLPSPTPKALYSPCEIRHLAIIVNLEYDPTAAFRNQVVHFDFRKLDVFSFGEEQKCLIGSVDLLYRNSWNEVRTLHFNGEQAMIEALKTILGKMHQDAAPPDSVEVFCYSQHLRGLIRTRVQQMVSECIELRLSSTRQDTGRFKALRVSGQTWGLFFERLNVSVQKLENAIEFYGAISHNKLHGLSVQVETNHVKLPAVV

SEQ ID NO: 181837 - protein, 406 aa, Unknown
  Bacterial polypetide isolated from the Sargasso Sea
MVKLDTLVARYDELNRLKTQRALGLMSRYGQQVFQLLPVMLHFNHPLLPGYVAGDVPHGIWSFTANDAQQAFIEDLCQNANCLNGLTTHDKSIQGLYSMGSTSSIGQCCHSDLDIWVCHVAGLSQERLELLDLKCQQLSKWAEQRGVDLNFFLIPEDKFRQRNDAQMQGESCGSAQHLLLLDEFYRSAMLIAGKRLLWYLVPSEYDDHYDDYVNGLFAHGKLSQDDWLDLGGFNRIPAEEYFGSALWQLYKGIDSPYKAVLKSVLMEAYSHEYPNTRLLSVTSRDWFQHNEGMHYRLDNYCLMLDKVTNYLKSIGDMQRLDLVRRCFYLKVCDGLSHPKEEHSPAWRREQMTQLVSYWGWSQERLHHLDHRQEWKVEDVKVAHAELLEALMQSYRNLIQFARRNNI

SEQ ID NO: 181838 - protein, 158 aa, Unknown
  Bacterial polypetide isolated from the Sargasso Sea
MIRIGHGFDVHKFGGVGPCMLGGVAVPYEQGLLAHSDGDVVLHAVSDALLGAIGAGDIGRHFPDTAAEFKGIDSRILLRDVFARVQQSGYAIGNLDVTIIAQAPKMAPHIEAMCAVLAADLQCDLNRVNVKATTTEQLGFTGRKEGIATEAVVLLVKQ

SEQ ID NO: 181839 - protein, 110 aa, Unknown
  Bacterial polypetide isolated from the Sargasso Sea
MIRIGHGFDVHKFGGEGPLTICGEKIDYPQGFLAHSDGDVAIHALCDAILGALAMGDIGKHFPDTASEYENIDSRILLRHVVKLAKEQGYVLGNADVTIVAQAPKMLPHI

SEQ ID NO: 181840 - protein, 55 aa, Unknown
  Bacterial polypetide isolated from the Sargasso Sea
GPHRDAMRARVAEILAVDVSRVSVKATTTEQLGFTGRGEGIAAQATATIALDIGE

SEQ ID NO: 181841 - protein, 111 aa, Unknown
  Bacterial polypetide isolated from the Sargasso Sea
MNWMDIRIGQGYDVHALVEGRKLILGGVEIPHTRGLLGHSDADALLHAITDALFGAAGLGDIGRHFPDTDPAFAGADSRMLLREAVRRVHKAGYAVGNVDATVIAQKPKLA

SEQ ID NO: 181842 - protein, 123 aa, Unknown
  Bacterial polypetide isolated from the Sargasso Sea
VALHALCDALLGAAGLGDIGRHFPDTDQAFSGADSRDLLRAVVEQLAAAGWSVGNVDLTVIAQTPPLGPHIAEMRACIAEDLRVSEDQVNIKATTTERLGFVGREEGIASHAVALIVTGGATE

SEQ ID NO: 181843 - protein, 189 aa, Unknown
  Bacterial polypetide isolated from the Sargasso Sea
TVSGEVENIKITTQEDYKLLVKMHYQLNGTIHVGTGFDVHPFSEGNHLVLCGVKIPYKQSLKGHSDSDVAIHAATDAILGAIGEDDIGKHFPSEDKKWKNTPSSIFLQHALFLVNELNGRVNNLDVTIICEKPKIGPYRKQMREKLSKILALPVTSVNVKATTTEKLGFTGREEGIAAQAIATVFLPIR

SEQ ID NO: 181844 - protein, 111 aa, Unknown
  Bacterial polypetide isolated from the Sargasso Sea
MRIGHGFDVHAFGGEGPIIIGGVRVPYEKGLLAHSDGDVALHALTDALLGAAALGDIGKLFPDTDPAFKGADSRELLREAWRRIQAKGYTLGNVDVTIIAQAPKMLPHIPQ

SEQ ID NO: 181845 - protein, 159 aa, Unknown
  Bacterial polypetide isolated from the Sargasso Sea
MFRTGIGFDAHPLLEGQPLVIGGVRIPHSKGLLGHSDADVLVHAVMDAILGALALGDIGEHFPDTENEFEGADSLELLSRVQKMIEDRAYCCENLDSIIIAEKPKLKAYLLDMRKNLASILKINIDHLSIKATTTEHMGFTGREEGIAAQAVVLLKSKN

SEQ ID NO: 181846 - protein, 159 aa, Unknown
  Bacterial polypetide isolated from the Sargasso Sea
MKIRIGHGFDVHKFGEARPLILCGVEVPYETGLVAHSDGDVVLHAISDAILGAMALGDIGKHFPDTDAAYKGADSRVLLRHCYALARAKGFELGNLDVTIIAQAPKMAPHIEDMRLVLAADLNADIADINVKATTTEKLGFTGRKEGIAVEAVVLLSRQ

SEQ ID NO: 181847 - protein, 159 aa, Unknown
  Bacterial polypetide isolated from the Sargasso Sea
MPFRIGHGFDVHAFGGEGPVTLGGVKIPYEQGLLAHSDGDVVLHAVSDALLGAMALGDIGHHFPDTDAAFKGIDSRILLRKVFADVKALGYEVGNLDVTIMAQAPKMAPHVDAMRACIAEDLVCGLSQVNVKATTTEKLGFVGRKEGIAVEAVVLLVKS

SEQ ID NO: 181848 - protein, 158 aa, Unknown
  Bacterial polypetide isolated from the Sargasso Sea
IAGPIMLAGIQVDSDRAMLAHSDGDVGLHALCDAVFGALADGDIGHHFPPSDPQWQAADSALFLKFAMQRVRARNATVMNLDLTIICETPKIGLLRDQMRARIAAITELPVERIAVKATTSEKLGFTGRGEGIAAQATASILLPDDANNPPQAPASGS

SEQ ID NO: 181849 - protein, 159 aa, Unknown
  Bacterial polypetide isolated from the Sargasso Sea
MFRTGIGFDAHALLEGRPLVIGGVRIPHSKGLLGHSDADVLVHAVMDAILGALALGDIGEHFPDTDDEFEGADSLELLSRVQKMIEDRAYCCENLDSIIIAEKPKLKAYLLDMRKNLASVLKINIDQLSIKATTTEHMGFTGREEGIAAQAAVLLKSKN

SEQ ID NO: 181850 - protein, 161 aa, Unknown
  Bacterial polypetide isolated from the Sargasso Sea
MDFRIGQGYDVHQLVEGRALIIGGVTIPYERGLLGHSDADVLLHAITDALFGAAALGDIGRHFSDTDAAFKGADSRVLLRECAARIKAAGFTIQNVDSTVIAQAPKLAPHIDGMRANIAADLGLPLDRVNVKAKTNEKLGYLGRGEGIEAQAAALLVKQGG

SEQ ID NO: 181851 - protein, 127 aa, Unknown
  Bacterial polypetide isolated from the Sargasso Sea
MLAHSDGDVLLHALCDAMLGAAALGDIGKHFPDTDDAYAGADSRVLLRHVVNVVREKGYRLSNADMTIVAQAPKMAPHITAMREIIAQDCNVSLDDINVKATTTEKLGYTGRKEGIASHAVVLLEKL

SEQ ID NO: 181852 - protein, 159 aa, Unknown
  Bacterial polypetide isolated from the Sargasso Sea
MKIRIGHGFDVHKFGEPRPLILCGVEVPYETGLVAHSDGDVVLHAISDAILGAMALGDIGKHFPDTDAAYKGADSRVLLRHCYALARAKGFELGNLDVTIIAQTPKMAPYIEDMRHVLAADLNADVADINVKATTTEKLGFTGRKEGIAVEAVVLLSRQ

SEQ ID NO: 181853 - protein, 155 aa, Unknown
  Bacterial polypetide isolated from the Sargasso Sea
MSRVGVVLLNLGGPERIQDVGPFLYNLFADPEIIRLPSPALQKPLAWLISTLRSGKSQEAYRSIGGGSPLRRITEQQARELQSLLRQRGLDATTYVAMRYWHPFTESAVADMKADGMDEVVVLPLYPHFSISTSGSSFRELQRLRQGDAAFEQLP

SEQ ID NO: 181854 - protein, 217 aa, Unknown
  Bacterial polypetide isolated from the Sargasso Sea
MEDHPQIKFGKTGVLIVNLGTPDSTKWLDIRRYLKEFLSDRRVIEVNPILWQLILNLIILNLRPSKTAKAYKEIWMHDINMSPLMYYTKKQAEKVSNSISNENIIVDFAMRYGNPSIKSKIKKLHDNGCENLIILPLYPQYSAATTATVCDEVYRTLMSMRWQPSLKIIPHYESDPLYIDALVNSINSKIEKINWKPDLILASYHGIPKKYFDKGDP

SEQ ID NO: 181855 - protein, 151 aa, Unknown
  Bacterial polypetide isolated from the Sargasso Sea
SIKEFWKKNEKPQKIIFSYHGIPKRYLTNGDPYHCFCLKTTRLVKEYMGLSDDEIMTTFQSRFGREEWLKPYTSETLKELPKQGIKNIHIISPGFSSDCLETLEELEEENKEYFLESGGENYSYIPCLNDSEDHIDMFVNLIKKHIQGWPL

SEQ ID NO: 181856 - protein, 303 aa, Unknown
  Bacterial polypetide isolated from the Sargasso Sea
MLVNLGTPAAPTTAAVKAFLSQFLHDQRVVDLPRYLWCPLLHFIILPTRSPKVAKLYQQVWTEQGSPLMVISKQQRAALEQELKREGVEVPVELAMTYGSPSLDEGWQALKAKGVNRVILLPLYPQYSVSTTASVFDGWAKAMKKERNLPVVRLIRDYHAHPEYIQALAMSVRRHWEQHGQGEHLLMSFHGIPERYEREGDPYGHQCRRTAALLAEALGLEASQWTASFQSRFGKEEWLKPYTDVTIGGLPATGIKRLDVICPAFAADCLETLEEIQVQNREIFMAAGGEQFEYIPALNSDQA

SEQ ID NO: 181857 - protein, 308 aa, Unknown
  Bacterial polypetide isolated from the Sargasso Sea
SQQAYLPIGGGSPIRRITEQQARELQSKLRDKGFNATTYIAMRYWHPFTESAIADMKADGIDQVVVIPLYPHFSISTSGSSFRELKKLRDSDNEFKKVPMRCVRSWFSQSGYLKSMVELISEQISLCESPSKAHIFFTAHGVPKSYVEEAGDPYKQQIEDCSLLIINELEKCLGHSNPHTLSYQSRVGPVEWLKPYTEEVLADLGRSNVNDLIVVPISFVGEHIETLQEIDIEYKEIAENAGIKNFRRVRALNTHPTFIEGLSDLVISCLEGPLVNIEEASKLPEKVKLYPQEKWQWGWNNSSEVWNG

SEQ ID NO: 181858 - protein, 282 aa, Unknown
  Bacterial polypetide isolated from the Sargasso Sea
MKKDIEHPPINFGKTGVLIINLGTPDSTSWLDIRKYLKEFLSDRRVIEVNPIIWQVILNIFILNLRPSKTAKAYKEIWMKEENISPLLYYTKKQAEKLSISISKENLVVDYAMRYGNPSIRSKIKNLHEMGCENLVILPLYPQYAAATTATVCDEVYRTLMKMRWQPSLKIIPHYESDPLYIEALVNSLNKKIKEINWKPDLILASYHGIPQKYFDKGDPYHCYCHKTTRLISEKFNSIEIKTTFQSRFGPQKWLQPYTDKALEKLPAEGKKNVLAICPGFL

SEQ ID NO: 181859 - protein, 293 aa, Unknown
  Bacterial polypetide isolated from the Sargasso Sea
RRVIDNNRFLWWLILNCIILTFRPKKTGKAYKEIWNYDKNESPLKTYTRSQAQLLSERLKNVEVDWCMRYGNPSIRDGLKSMREKGVDRLLICPLYPQYSAATTATVNDKVFAELSHMRWQPAIRTLPPFYDNNEYIAKLNKSMNQHLEKLDWQPDIILTSYHGLPRRYLDLGDPYHCHCHKTTRLLKEMNKKYSKKIILSFQSRFGREEWLKPYTEETVIKLANDGVKKLAVLSPAFFSDCVETLEELNIGIQEVFTENGGEEFTLIPCLNDSQNGIDLLDYLVKNELQGWV

SEQ ID NO: 181860 - protein, 168 aa, Unknown
  Bacterial polypetide isolated from the Sargasso Sea
ELEKCLGHSNPHTLSYQSRVGPVEWLKPYTEEVLADLGRSNVNDLIVVPISFVGEHIETLQEIDIEYKEIAEKAGIKNFRRVKALNTHPTFIEGLSDLVISCLEGPLINIEEASQLPEKVKLYPQEKWQWGWNNSSEVWNGRVAMIIFLVLFIELISGSGPLHKLGIL

SEQ ID NO: 181861 - protein, 283 aa, Unknown
  Bacterial polypetide isolated from the Sargasso Sea
NPIIWQLILNLFILTFRPSKTAKAYKKIWMKDENMSPLLYYTQKQSEKISSSISKENLLIDFAMRYGNPSIKSKIYKLQQQGCENLVILPLYPQYAAATTATVCDEVYRTLMQMRWQPSLKIVPHYESDSLYIDALVKSINKKINEINWKPDVIIASYHGIPKKYFDKGDPYHCYCHKTTRLISEKLNSIKIKTTFQSRFGPQEWLQPYTDKTLESLPKEGKKNVLTICPGFASDCVETLEEILIQGKESFLNSGGENFDMIPCLNDNDDHIILLKSLIEKNI

SEQ ID NO: 181862 - protein, 285 aa, Unknown
  Bacterial polypetide isolated from the Sargasso Sea
MVKYIGEKDYKHGSKEKIGVLITNLGTPDAPNRKELKVYLNQFLSDPRVVELPKILWQILLKLVILQIRPSRSAEAYKQIWTKNGSPLLNIANKQLNKIQSSFSFKDGNIVFELGMRYGNPSISDALSKLQKKQVRRLLVLPMYPQYCAATTGSTFDEVTNVLQKWRWIPEMRFINQYFEEKDYIEALSNSIKTFWEKNQKPQKIIFSYHGIPKRYLTNGDPYHCFCLKTTRLVKEHIGLSDEEIMTTFQSRFGREEWLKPYTSDTLKELPKKGIKNIHIISPGF

SEQ ID NO: 181863 - protein, 273 aa, Unknown
  Bacterial polypetide isolated from the Sargasso Sea
MSVKPIPNDHPKWKNLSDTGVLLINLGTPDATDKKSMRRYLKEFLSDTRVIEYPKFIWWFILNLIILNVRPKKSGKAYNKIWIPNDPDGSPLRKFTRLQSEKLQKLFKKNKHLIVDWAMRYGNPSINEKLNNFKENGIKKIVILPLYPQYSAATTATVCDEVYRWALKERWQPSFRIVPPWFDHPDYINAIARQIKKSLNNKKNFHLMLSFHGIPKRYFINGDPYHCHCMKTARLIKEKINFKDSLFHVTFQSRFGSETWLQPYTDETIQSLA

SEQ ID NO: 181864 - protein, 294 aa, Unknown
  Bacterial polypetide isolated from the Sargasso Sea
GWLDIRRYLREFLSDRRVIEVNPIIWQIILNLFILNFRPSKTAKAYKEIWMKDKNMSPLRYFTEIQAEKLSQQISNENLIVDFAMRYGNPSIKSKIYGLQNKGCENLIILPLYPQYAAATTATVCDEVYRTLMKMRWQPNLKIIPHYESEPLYIEALKNSILKKIEEINWKPDLIVASYHGIPKKYFDKGDPYHCYCHKTTRLISEKYSDIEIKTTFQSRFGPQEWLQPYTDKTFETLPKEGKRNILVICPGFSSDCVETLEEICIQGKESFIKSGGKNFEMVPCLNDNDDHIA

SEQ ID NO: 181865 - protein, 291 aa, Unknown
  Bacterial polypetide isolated from the Sargasso Sea
YNLFADPEIIRLPSPALQKPLAWLISTFRSGKSQEAYRSIGGGSPLRRITEQQARELQSLLRQRGLDATTYVAMRYWHPFTESAVADMKADGMDEVVVLPLYPHFSISTSGSSFRELQRLRQGDAAFEQLPIRCIRSWFDHPGYIKAMAELIAEEVRNSDDPEKAHVFFSAHGVPKSYVEEAGDPYQQQIEACTDLIMKSLADHMGHANPHTLAYQSRVGPVEWLKPYTEEALEQLGEAKTNDLVVVPISFVSEHIETLEEIDIEYRELATEAGVVNFRRVRALDTYPPFI

SEQ ID NO: 181866 - protein, 289 aa, Unknown
  Bacterial polypetide isolated from the Sargasso Sea
STLRSTTSQQAYLSIGGGSPIRRITEQQARELQSKLRDKGFNATTYIAMRYWHPFTESAIADMKADGIDQVVVIPLYPHFSISTSGSSFRELKKLRDSDDEFKKVPMRCVRSWFSQSGYLKSMVELISEQISLCESPSKAHIFFTAHGVPKSYVEEAGDPYKQQIEDCSLLIINELEKCLGHSNPHTLSYQSRVGPVEWLKPYTEEVLADLGKSNVNDLIVVPISFVGEHIETLQEIDIEYKEIAEKAGIKNFRRVKALNTHPTFIEGLSDLVISCLEGPLINIEEASQ

SEQ ID NO: 181867 - protein, 265 aa, Unknown
  Bacterial polypetide isolated from the Sargasso Sea
IILNLIILTFRPSKTAKAYKKIWMKDKNMSPLRYYTQVQSLKLNKKIGNDKLIVDYAMRYGQPSIKSKIKDLKEKGCENLVILPLYPQYAAATTATVCDEVYRSLIKMRWQPSLQIIPHYESEPLYINAISKSIETKISQINWKPDIIMASYHGIPKKYFEKGDPYHCYCHKTTRLINEKIKSSIPIMTTFQSRFGPQEWLQPYTDKTLEKLPKEGKKNILLICPGFASDCVETLEEISIEGKKSFMEAGGENFDFIPCLNDSEG

SEQ ID NO: 181868 - protein, 147 aa, Unknown
  Bacterial polypetide isolated from the Sargasso Sea
FGKDNKPQKIVFSYHGFPKRYLTNGDPYHCFCLKTTRLVKEKMKLNDDEIITTFQSRFGREEWLKPYTSETLKELPGQGVKNIHIISPGFSADCLETLEELEEENREYFMEAGGEQYKYIPCLNDDQKHLNFISNLVLKHTQGWNIS

SEQ ID NO: 181869 - protein, 269 aa, Unknown
  Bacterial polypetide isolated from the Sargasso Sea
MTSNNNHPSIKFGKTGVLIVNLGTPDSTNWLDIRKYLKEFLSDKRVIEINPLVWRVILNLFILTFRPSKTAKAYKEIWMKEENMSPLLYYTQKQSEKISELIAREDLIIDFAMRYGNPSIKSKIYRLQEDGCENLVVLPLYPQYAAATTATVCDEVYRTLMKMRWQPSLKIIPHYESDPLYIDALVKSINKKINEIKWKPDLIIASYHGIPKKYFDQGDPYHCYCHKTTRLISEKFNAIEIKTTFQSRFGPQEWLQPYTDKILENLPRE

SEQ ID NO: 181870 - protein, 236 aa, Unknown
  Bacterial polypetide isolated from the Sargasso Sea
MNSDHPAVKFGKTGLLLVNLGTPDSTNWFDIRKYLKEFLSDRRVIEVNPILWKIILNLFILNLRPSKTAKAYKEIWMQKENMSPLRYYTIMQTKKLSEKIGNEDLIIDFAMRYGNPSIKSKLKNLQKSGCENIIVLPLYPQYAAATTATVCDEVYKTLMGMRWQPSLQIIPHYESEPLYINSLKNSLEKKILELSWEPDLIVASYHGIPKKYFSKGDPYHCYCQKTSRLLSEKFKK

SEQ ID NO: 181871 - protein, 289 aa, Unknown
  Bacterial polypetide isolated from the Sargasso Sea
LAKLISTLRTKEASEIYSEIGGKSPILDITNDQAAALEGALAKQGMSPKVFVCMRYWHPMTAEIVKKVKDYDPDNIFLLPLYPQYSTTTTKSSLDLWFKEARKQNLSAPTKYTCCYPINKKFIESHQQLIQEKIDRIIDKKIRVLFSAHSLPVSIIKGGDPYQWQVEQTVSAVMAGLKGHNDHVLAYQSKVTPVKWLEPSTPSEIEKAIKEDVAIIIVPIAFVSDHSETLVELDIEYKEMADEMGYKHYFRSESLNIDSVFIDSLAEIVTNSDQTSNVNIAEKICPTTF

SEQ ID NO: 181872 - protein, 267 aa, Unknown
  Bacterial polypetide isolated from the Sargasso Sea
MKTAVILFNLGGPDKQESVKPFLFNLFNDPNIFRLPNPFRYLLARLISSRRTKEASEIYAEIGGKSPILEITKDQAKALQKALENKGIENEVFVCMRYWHPMTPEVVAKVKDYNPDKIFLLPLYPQYSTTTTKSSLDAWFKEAKVQKLNTITKYTCCYPNDSKLIKAHQKLIQDKINQVKDKKVRVLFSAHSLPVSIIKKGDPYQWQVEQTVNAVIKGIRGHEDHVLAYQSKVTPVKWLEPTTPSEIEKAIREDKALVIVPIAFVSD

SEQ ID NO: 181873 - protein, 220 aa, Unknown
  Bacterial polypetide isolated from the Sargasso Sea
MKADHPKISYGKTGILLVNLGTPDSTNWLDIRKYLKEFLSDRRVIEVNPLIWQVILNLFILTFRPSKTAKAYKEIWMQDKDMSPLRYYTESQSEKLSKQIGNENLIVDFAMRYGNPSIKSKIYSLQNKGCENLIVLPLYPQYAAATTATVCDEVYRTLMKMRWQPNLKIIPHYESEPLYIQAIKNSIIKKVSEINWQPDLIIASYHGIPKKYFDKGDPYH

SEQ ID NO: 181874 - protein, 251 aa, Unknown
  Bacterial polypetide isolated from the Sargasso Sea
ISKKQIKGVKKITSLKYSNIEFALGMRYGNPSIESALKDLQNRQVRRLLVLPLYPQYCGATTGSTFDEVTNILQTWRWIPELRFINQYFEEEEYIDALATSIKNFWEKNEKPQKIVFSYHGIPKKYLTNGDPYHCFCLKTTRLVKEKMNLTDEETITTFQSRFGRSEWLKPYTAETLKEFPAQGVKDIHIISPGFSADCLETLEELEEENRAYFIEAGGEKYKYIPCLNDNEKHLKLISQLVIKHTQGWKI

SEQ ID NO: 181875 - protein, 276 aa, Unknown
  Bacterial polypetide isolated from the Sargasso Sea
KMKKDHPTINYGKKGLLLINLGTPDSTSWWDIRRYLKEFLSDKRVIEVNPFLWKIILNLFILNFRPSKTARAYKEIWMKKEDMSPLRYFTIMQTKKLAQNIGNKNLLVDYAMRYGNPSIKSKIKKLQKEGCENIVIFPLYPQYAAPTTATVCDEVYKTLMKMRWQPSLQIIPHYESEPLYIAALVNSLNKKISEISWKPDLIIASYHGIPKKYFEKGDPYHCYCQKTTRLLSEKFTNIDIKTTFQSRFGPQDWLKPYTDKTLEGLPKEGKKNVLVI

SEQ ID NO: 181876 - protein, 263 aa, Unknown
  Bacterial polypetide isolated from the Sargasso Sea
INFGKTGVLIVNLGTPDSTNWFDIRKYLREFLSDRRVIEVNPIIWQIILNVIILNFRPSKTAKAYKEIWMKEQNISPLLYYTQKQAEKLSSQISKENLIVDYAMRYGNPSIRSKIKTLHDKGCENLIVLPLYPQYAAATTATVCDEVYRSLMKMRWQPSLSIIPHYESDPLYIDAIVNSLNKKIKELNWKPDLILASYHGIPQKYFDKGDPYHCYCHKTTRLISEKFNSIEIKTTFQSRFGPQKWLQPYTDKTKKASLAREKK

SEQ ID NO: 181877 - protein, 269 aa, Unknown
  Bacterial polypetide isolated from the Sargasso Sea
TFRPSKTAKAYKEIWMKDENMSPLLYYTQKQSEKISSLISKENLLIDFAMRYGNPSIKSKIYKLQQQGCENLVILPLYPQYAAATTATVCDEVYRTLMKMRWQPSLKIIPHYESDSLYIDALVKSINKKINEINWKPDVIIASYHGIPKKYFDKGDPYHCYCHKTTRLISEKFNSIEIKTTFQSRFGPQEWLQPYTDKTLESLPKEGKKNILTICPGFASDCVETLEEILIQGKESFLSSGGENFDMIPCLNDNDDHITLLKSLIEKNL

SEQ ID NO: 181878 - protein, 148 aa, Unknown
  Bacterial polypetide isolated from the Sargasso Sea
KFWIKNKKPEKIIFSFHGIPKRYLINGDPYHCFCLKTTRLVKEYMQLNDEDIMTTFQSRFGREEWLQPYTSETLKELPKQNIKNIHIISPGFSADCLETLEELEEENKEYFLKAGGVSYNYIPCLNDSQEHIDFISELITKHTQGWKK

SEQ ID NO: 181879 - protein, 117 aa, Unknown
  Bacterial polypetide isolated from the Sargasso Sea
MSRVGVVLLNLGGPERIQDVGPFLYNLFADPEIIRLPSPALQKPLAWLISTLRSGKSQEAYRSIGGGSPLRRITEQQARELQSLLRQRGIDATSYVAMRYWHPFTESAVADIKADGM

SEQ ID NO: 181880 - protein, 291 aa, Unknown
  Bacterial polypetide isolated from the Sargasso Sea
MVKYIGEKDYQHGSQEKTGVLITNLGTPDAPTRKALKPYLKEFLSDPRVIEIPKLIWQIILNLVILQIRPRRSAVNYKKIWTDEGSPLLYISKEQVRLVEEKLKKEFPNTVFSLAMRYGNPSIHSALDKLQKQQVRRLLVLPLYPQYCAATSGSTFDAVSSILQKWRWIPELRFINQYFEESLFIKAIGDSIKKAEKNKGKPQKIIFSYHGIPKKYLLEGDPYHCFCLKTTRLVREYLNYKEEDIITTFQSRFGTQEWLQPYTDETLKKLPKEGIKNIHILSPGFSADCLE

SEQ ID NO: 181881 - protein, 293 aa, Unknown
  Bacterial polypetide isolated from the Sargasso Sea
TVPCFQKPLAWLISTLRSTTSQQAYLSIGGGSPIRRITEQQARELQSKLRDKGFNATTYIAMRYWHPFTESAIADMKADGIDQVVVIPLYPHFSISTSGSSFRELKKLRDSDEEFKKVPMRCVRSWFSQSGYLKSMVELISEQISLCESPSKAHIFFTAHGVPKSYVEEAGDPYKQQIEDCSLLIINELEKCLGHSNPHTLSYQSRVGPVEWLKPYTEEVLADLGRSNVNDLIVVPISFVGEHIETLQEIDIEYKEIAEKAGIKNFRRVKALNTHPTFNEGLSDLVISCLEGP

SEQ ID NO: 181882 - protein, 269 aa, Unknown
  Bacterial polypetide isolated from the Sargasso Sea
MKEDHPKVNYGKTGLLLVNLGTPDSTSWWGIRKYLKEFLSDQRVIEVNPLLWQVILNLFILNLRPSKTAKAYKEIWMKEENMSPLRYYTIMQTKKLKEKIKNKNIIIDFAMRYGNPGIKNQLKKLQQNGCENIIVLPLYPQYASATTATVCDEVYRTLMKMRWQPSLQIISHYESEPLYIKALENSLNKKISEINWKPDIIIASYHGIPKKYFEKGDPYHCYCQKTSRLLSEQFTKINIKTTFQSRFGPQEWLQPYTDKTLESLPQEGK

SEQ ID NO: 181883 - protein, 136 aa, Unknown
  Bacterial polypetide isolated from the Sargasso Sea
IFSYHGIPKRYLTNGDPYHCFCLKTTRLVKEHMGLSDEEIMTTFQSRFGREEWLKPYTSDTLKELPKKGVKNIHIISPGFSSDCLETIEELEEENKEYFMQSGGEHYQYIPCLNDNHKHIEVFVNLIKKHLQGWPL

SEQ ID NO: 181884 - protein, 299 aa, Unknown
  Bacterial polypetide isolated from the Sargasso Sea
MKKAVILFNLGGPDNLENVEPFLFNLFNDPAILNLPSFFRYPVAKLIANRRAPTAKKIYEELGGSSPILKLTKEQANALELKLNKNDRSSHYKCFVVMRCWHPRAENVIKDVINYNPGEITLMPLYPQYSAATSGSSIKEWNDICKKNSFKVKTSTICCYPTDKSFIQAHKEEIIKKINDIKNFKLIFSAHGLPEKNIKKGDPYQWQVEQSVFEIVKSLNIKDLDWVLSYQSRVGPLKWIGPSTEDIIVENSKLEKHIILVPIAFVSEHSETLVELDIEYKELAEKNGCKNYSRVPALE

SEQ ID NO: 181885 - protein, 299 aa, Unknown
  Bacterial polypetide isolated from the Sargasso Sea
TTYIAMRYWHPFTESAIADMKADGIDQVVVIPLYPHFSISTSGSSFRELKKLRDSDDEFKKVPMRCVRSWFSQAGYLKSMVELISEQISLCESPSKAHIFFTAHGVPKSYVEEAGDPYKQQIEDCSLLIINELEKFLGHTNPYTLSYQSRVGPVEWLKPYTEEVLADLGRSNVNDLIVVPISFVGEHIETLQEIDIEYKEIAEQAGIKNFRRVRALNTHPTFIEGLSDLVISCLEGPLVNIEDASKLPEKVKLYPQEKWQWGWNNSSEVWNGRVAMIIFLILFIELISGSGPLHRLGIL

SEQ ID NO: 181886 - protein, 194 aa, Unknown
  Bacterial polypetide isolated from the Sargasso Sea
VPKSYVEEAGDPYKQQIEDCSLLIINELEKCLGHSNPHTLSYQSRVGPVEWLKPYTEEVLADLGRSNVNDLIVVPISFVGEHIETLQEIDIEYKEIAEKAGIKNFRRVKALNTHPTFIEGLSDLVISCLEGPPVNIEEASQLPEKVKLYPQEKWQWGWNNSSEVWNGRVAMIIFLVLFIELISGSGPLHRLGIL

SEQ ID NO: 181887 - protein, 211 aa, Unknown
  Bacterial polypetide isolated from the Sargasso Sea
QKKQVERLLILPMYPQYCAATTGSTFDEVTNVLQKWRWIPEMRFINQYFEEKNYIEALSNSIKLFWKKNPKPQKIIFSYHGIPKRYLTNGDPYHCFCIKTTRLVKEHMGLSDDEIMTTFQSRFGREEWLKPYTSETLKELPKQGIKNIHIISPGFSSDCLETLEELEEENKEYFMESGGENYHYIPCLNDHDDHIDVFVNLIKKHIQGWPL

SEQ ID NO: 181888 - protein, 281 aa, Unknown
  Bacterial polypetide isolated from the Sargasso Sea
MEINHPKINYGKTGVLIVNLGTPNSTNWFDIRKYLKEFLSDRRVIEVNPILWQLILNLFILNFRPSKTAKAYKEIWMKDQNMSPLRYFTQNQSAKLSRVFKDEQIIIDFAMRYGDPSILSKMNELQKKGCENIIVLPLYPQYAAATTATVCDEVYRSLMKMRWQPSLQIISHYESEDLYIDALVKTIKNKISEINWKPDIILASYHGIPKKYFDKGDPYHCYCQKTSRLISEKFKDIKILTTFQSRFGPQEWLQPYTDKTLEKLPSSGTKNILVICPRFCI

SEQ ID NO: 181889 - protein, 204 aa, Unknown
  Bacterial polypetide isolated from the Sargasso Sea
EKGCENLIILPLYPQYAAATTATVCDEVYRTLMNMRWQPNLKIIPHYESEPLYIEAIKNSIIKKINEINWKPDLIVASYHGIPKKYFDKGDPYHCYCHKTTRLISEKYSDTKIMTTFQSRFGPQEWLQPYTDKTFEALPKEGKKNILVICPGFSSDCVETLEEISIQGKESFIKSGGENFEMIPCLNDNEDHISLFKHLISKNL

SEQ ID NO: 181890 - protein, 321 aa, Unknown
  Bacterial polypetide isolated from the Sargasso Sea
RRITEQQARELQSKLGDKGFNATTYIAMRYWHPFTESAIADMKADGIDQVVVIPLYPHFSISTSGSSFRELKKLRDSDDEFKKVPMRCVRSWFSQSGYLKSMVELISEQISLCESPSKAHIFFTAHGVPKSYVEEAGDPYKQQIEDCSLLIINELEKCLGHSNPHTLSYQSRVGPVEWLKPYTEEVLEDLGRSNVNDLIVVPISFVGEHIETLQEIDIEYKEIAEKAGIKNFRRVKALNTHPTFIEGLSDLVISCLEGPLVNIEEASQLPEKVKLYPQEKWQWGWNNSSEVWNGRVAMIIFLVLFIELISGSGPLHKLGIL

SEQ ID NO: 181891 - protein, 197 aa, Unknown
  Bacterial polypetide isolated from the Sargasso Sea
MKTAVVLFNLGGPDKQESVKPFLFNLFNDPNIFRLPNPFRYLLARLISSRRTKEATEIYAEIGGKSPILEITNSQAEALQKELKNKGIENKVFVCMRYWHPMTAEVVSSVKDYNPDKIFLLPLYPQYSTTTTKSSLDAWFKEAQNQELNTKTKYTCCYPYDAKLIKAHQKLIQDKINHVKDKKVRVLFSAHSLPVSI

SEQ ID NO: 181892 - protein, 191 aa, Unknown
  Bacterial polypetide isolated from the Sargasso Sea
KPFTEDAIEAIKRDGVNRLVVLPLYPQFSISTSGSSLRLLEQYFSDDEELARVRHTVIPSWYQRPGYVKAMAAMIAKTLREQFDDEKEPIIFFSAHGVPTSYVEEAGDPYKDEMEACVRLIVDELRDAGVDNEHVLAYQSRVGPVEWLKPYTDDTIRELGRKGTKALCAVPISFVSEHIETLEEIDMEYRQ

SEQ ID NO: 181893 - protein, 170 aa, Unknown
  Bacterial polypetide isolated from the Sargasso Sea
MKKEHPEVNFGKTGVLLVNLGTPDSTSWWDIRKYLKEFLSDRRVIEVNPILWKIILNLFILNLRPSKTAKAYKEIWMNKEDMSPLRYFTIMQTKKLLDRIGTEKCIVDYAMRYGNPSIKNKIHKLHHAGCERLVVLPLYPQYAAATTATVCDEVYRVLMRMRWQPSLQIS

SEQ ID NO: 181894 - protein, 163 aa, Unknown
  Bacterial polypetide isolated from the Sargasso Sea
LGHSNPHTLSYQSRVGPVEWLKPYTEEVLADLGRSNVNDLIVVPISFVGEHIETLQEIDIEYKEIAEKAGIKNFLRVKALNTHPTFIEGLSDLVISCLEGPLVNIEEASQLPEKVKLYPQEKWQWGWNNSSEVWNGRVAMIIFLVLFIELIAGSGPLHKLGIL

SEQ ID NO: 181895 - protein, 207 aa, Unknown
  Bacterial polypetide isolated from the Sargasso Sea
KLNEKGCESLVILPLYPQYAAATTATVCDEVYKTLMNMRWQPSLKIIPHYESDPLYIDALVNSINVKINNINWKPDLILASYHGIPKKYFDKGDPYHCYCHKTTRLVSEKFKSVEIKTTFQSRFGPQEWLKPYTDKTLENLPKEGKKNILMICPGFSSDCVETLEEILIQGKKSFMDSGGENFDMIPCLNDNDDHINLLKNLIQKNI

SEQ ID NO: 181896 - protein, 260 aa, Unknown
  Bacterial polypetide isolated from the Sargasso Sea
MKTAVVLFNLGGPDKQESVKPFLFNLFNDPNIFRLPNPFRYLLARLISSRRTKEATEIYAEIGGKSPILEITNSQAEALHKKLKNKGIENKVFVCMRYWHPMTAEVVSKVKDYNPDKIFLLPLYPQYSTTTTKSSLDAWFKEAQNQELNTKTKYTCCYPYDAKLIKAHQKLIQDKINHIKDKKVRVLFSAHSLPVSIIKKGDPYQWQVEQTVKAVMQGIHGYEDHVLAYQSKVTPVKWLEPTTPGEIENAINEDRALVIV

SEQ ID NO: 181897 - protein, 278 aa, Unknown
  Bacterial polypetide isolated from the Sargasso Sea
MARFSGLDKDTGHKARGKTGVLIMNLGTPDAPTASAVRTYLAEFLSDPRVVEIPKLVWMLILHGIILRIRPAKSAALYQQVWTEAGSPLLDISQRQQTKLANQLQAQGHDVSVHLAMRYGSPSVATTLQTMHKQGIDNLVVLPLYPQYAAPTTGSAFDALAKEMMKWRYLPALHFINTYHDNPDFIDAIAASIQKDFELNGKPQKLVMSYHGMPERNLHLGDPYYCFCMKTTRLVVEKLGLSEDEYVATFQSRFGKAKWLQPYTDMTIGSLPEKGITD

SEQ ID NO: 181898 - protein, 275 aa, Unknown
  Bacterial polypetide isolated from the Sargasso Sea
EHGSKEKTGVLITNLGTPDAPERRELKVYLNQFLSDPRVIELPKFLWLALLKLVILQIRPSKSAKSYKKIWTNNGSPLLDISKRQLVKIQSSFSNSNKNLVFELGMRYGNPSIQDALNKFQKNQVRRLLVLPMYPQYCAATTGSTFDEVTNVLQKWRWIPEIRFINQYFDEKNYIEALSNSIKSFWKKNSKPQKIIFSYHGIPKRYLINGDPYHCFCLKTTRLVKELMRLSDNEIITTFQSRFGREEWLKPYTSETLKELPKKGIKNVHIISPRF

SEQ ID NO: 181899 - protein, 174 aa, Unknown
  Bacterial polypetide isolated from the Sargasso Sea
MSRVGVVLLNLGGPERIQDVGPFLYNLFADPEIIRLPSPALQKPLAWLISTLRSGKSQEAYRSIGGGSPLRRITEQQARELQSLLRQRGLDATTYVAMRYWHPFTESAVADMKADGMDEVVVLPLYPTSPSAPAAPASGNCSGCVRAMQPFDSFPIAAFAVGLDTPATSRRWPS

SEQ ID NO: 181900 - protein, 282 aa, Unknown
  Bacterial polypetide isolated from the Sargasso Sea
TEDGSPLIIYSKKVLEKVKQKTSVPTYLAMRYGKPSIEHTLLDIVKNHPKMEKLFIIPLYPQYAMSTTKTVIEKVKEQLIKHNITTKTDTFPAFYNEPNYLKNLETSMKEYLNAPYDHLIFSFHGLPERHLKKTDPTQSHCLKKANCCEMPSPAHETCYCHQCKWVANTMIDRLNIPPEKTTIAFQSRLGIDPWLKPATKNVILELAKQNKKRLLVACPAFVSDCLETLEEIQIGLEEEFIEAGGEKLQLIPCLNDNDDWCQTVANWITDYKNGRLEVTNIQ

SEQ ID NO: 181901 - protein, 255 aa, Unknown
  Bacterial polypetide isolated from the Sargasso Sea
TPDAPNKKELKVYLNQFLSDPRVIELPKILWQILLKLVILQIRPSKSAEAYKQIWTDKGSPLLDIANRQLNKIQASFSSKNDKIVFEVGMRYGNPSIPDALSKLQKKQVRKLLVLPMYPQYCAATTGSTFDEVTNVLQKWRWIPEMRFINQYFEEKNYIEALSNSIKSFWKENQKPQKIIFSYHGIPKRYLTNGDPYHCFCLKTTRLVKEHMGLSDDEIMTTFQSRFGREEWLKPYTSETLKELPKQGIKNIHII

SEQ ID NO: 181902 - protein, 286 aa, Unknown
  Bacterial polypetide isolated from the Sargasso Sea
EASEIYAEIGGKSPILEITNNQAEALQKELENKGIENKVFVCMRYWHPMTPEVVAKVKKYNPDKIFLLPLYPQYSTTTTKSSLDAWFKEAQVQELNSKTKYTCCYPYDTKLIKAHQKLIQDKINQVKDKKVRVLFSAHSLPVSIIKKGDPYQWQVEQTVNAVMQGIHGYEDHVLAYQSKVTPVKWLEPTTPSEIENAIHKDRALVIVPIAFVSDHSETLVELDIEYQELASELGCKHYYRSESLNIDRTFIESLSEIVSESDKIESGNIRQKICPATFKQCDQELR

SEQ ID NO: 181903 - protein, 270 aa, Unknown
  Bacterial polypetide isolated from the Sargasso Sea
MKKDHPKVNYGKTGLLLVNLGTPDSTNWWDIRKYLKEFLSDRRVIEVNPFLWQIILNLFILNLRPSKTAKAYKEIWMQKENMSPLRYYTIMQTKKLSERMGDKKTIIDFAMRYGNPSIKIKMQKLQKEGCENIIVLPLYPQYAAATTATVCDEVYRTLTKMRWQPSLQIIPHYESEPIYIKALESSLNKKIDELNWRPDLILASYHGIPKKYFEKGDPYHCYCQKTSRLLSERFTKIPITTTFQSRFGPQEWLQPYTDKTLERLPKEGKK

SEQ ID NO: 181904 - protein, 277 aa, Unknown
  Bacterial polypetide isolated from the Sargasso Sea
DGIDEVVVLPLYPHFSISTSGSSFRELQRLRQSDSSFEKLPIRCIRSWFDHPGYVRAMAQLIAEEVRSSDGPEQAHIFFSAHGVPKSYVEEAGDPYQKEIESCTALIMNQLEELLGYSNPHTLAYQSRVGPVEWLKPYTEEALEELGEAKTRDLVVVPISFVSEHIETLEEIDIEYRELATEAGVVNFRRVRALDTYPPFIEGLADLVTTSLEGPEVTLDAAAELPTKVKLYPQEKWEWGWNNSSEVWNGRLAMLGFSAFLLELISGQGPLHALGLL

SEQ ID NO: 181905 - protein, 207 aa, Unknown
  Bacterial polypetide isolated from the Sargasso Sea
LQANGCEKLIVLPLYPQYAAATTATVCDEVYRCLMKMRWQPSLQIIPHYESNPLYINALANSIEKKISEINWQPDLIIASYHGIPKKYFEKGDPYHCYCHKTTRLMREKFDKVPIETTFQSRFGPQEWLQPYTDKTLENLPKTGKKKILVICPGFSSDCVETLEEISIQGKESFLNSGGLNFDVIPCLNDNEDHIKLLNNLVQRHIS

SEQ ID NO: 181906 - protein, 204 aa, Unknown
  Bacterial polypetide isolated from the Sargasso Sea
MNNEHPKINFGKTGVLLVNLGTPDSTKWIDIRKYLKEFLSDRRVIEVNPFVWQIILNLFILNLRPSKTAKAYKEIWMQKENMSPLRYYTIMQTKKLLDKIGNKNLIVDYAMRYGNPSIKSKIYKLHEAGCEKLVVLPLYPQYAAATTATVCDEVYRVLMSMRWQPSLQIIPHYESDPLYIKALINSLNFQISKLSWKPDLVLAS

SEQ ID NO: 181907 - protein, 211 aa, Unknown
  Bacterial polypetide isolated from the Sargasso Sea
MDKQEHPPVKFGKTGVLIVNLGTPDSTSWFDIRKYLKEFLSDRRVIEVNPIIWQFILNVFILTFRPSKTAKAYKEIWMKDKNISPLLHYTQKQAEKLSNQMSESNLLVDYAMRYGNPSIRSKIATLHEMGCENLIILPLYPQYAAATTATVCDEVYRTLMKMRWQPSLKIVPHYESDPLYIEALVNSLNKKIKEINWKPDLILASYHGIPQ

SEQ ID NO: 181908 - protein, 265 aa, Unknown
  Bacterial polypetide isolated from the Sargasso Sea
MINKPEDHPEIKANKIGILLVNLGTPESTDTKSIRKYLKEFLSDRRVIDVPRVLWWIILNFIILNTRPKKTGAAYKKIWINNDIDGSPLRKITRLQSEKLSKMLKNENIIVDYAMRYGNPAIHSKLNQFKQKGCDRIIIFSLYPQYSGPTTATVNDEVCKWMVKQKWQPSIRIIPPYFDNPEYISSISKSILKSFKENGKPDLLLLSFHGAPKRYLIEGDPYHCQCVKSGRLIKEYLKLNNGDFMMSFQSRFGSEPWLQPYTDET

SEQ ID NO: 181909 - protein, 210 aa, Unknown
  Bacterial polypetide isolated from the Sargasso Sea
KNGCSKILLVPLYPQYAASTTATVKDEVFKWLLKQRWQPDIRTVPPWFDNKNYIKALTSTITKHMKNRNKVDKLVISFHGIPKRYFMAGDPYHCHCIKTARLLKEELKWPENKILVTFQSRFGPEPWLQPYTDETIIELAKQGSKNIALIAPGFISDCLETLEELNVEARELFLENGGQTFQYIPCLNDNEYSIKFLNNLVKQNLLGWDN

SEQ ID NO: 181910 - protein, 293 aa, Unknown
  Bacterial polypetide isolated from the Sargasso Sea
MIEKSHPPIKYGNTGVLIINLGTPDSTNWFDIRKYLKEFLSDRRVIEVNPLVWQIILNLFILNFRPSKTAKAYKEIWMKDENISPLLYYTKKQSEKISNLLAKKNIITDFAMRYGNPSIKSKIHKLHEMGCENLVILPLYPQYAAATTATVCDEVYRTLMKMRWQPSLKIIPHYESDALYIDALVNSVNKKINEISWKPDLIIASYHGIPKKYFDKGDPYHCYCHKTTRLISEKFSSIKIKTTFQSRFGPQEWLQPYTDKTLENLPKEGVKNVLTICPGFSSDCVETLEEFLF

SEQ ID NO: 181911 - protein, 321 aa, Unknown
  Bacterial polypetide isolated from the Sargasso Sea
NLGGPERITDVGPFLYYLFSDPEIIRTPFPFFQKPLAWLISTLRSTTSQQAYLSIGGGSPIRRITEQQARELQSKLRDKGFNATTYIAMRYWHPFTESAIADMKADGIDQVVVIPLYPHFSISTSGSSFRELKKLRDSDDEFKKVPMRCVRSWFSQSGYLKSMVELISEQISLCESPSKAHIFFTAHGVPKSYVEEAGDPYKQQIEDCSLLIINELEKCLGHSNPHTLSYQSRVGPVEWLKPYTEEVLADLGRSNVNDLVVVPISFVGEHIETLQEIDIEYKEIAEKAGIKNFRRVKALNTHPTFIEGLSDLVISCLEGLL

SEQ ID NO: 181912 - protein, 201 aa, Unknown
  Bacterial polypetide isolated from the Sargasso Sea
LPLYPQYCAATTGSTFDAVSSILQKWRWIPELRFINQYFEENLFIKAIGDSIKKAEKHKGKPQKIIFSYHGIPKKYLLEGDPYHCFCLKTSRLVREYLNYKEEDIISTFQSRFGSQEWLQPYTDETLKKLPKEGIKNIHILSPGFSADCLETLEELQEENKEYFMKAGGESYYYIPCLNANPEHIEVISYLVRKHTQGWEV

SEQ ID NO: 181913 - protein, 219 aa, Unknown
  Bacterial polypetide isolated from the Sargasso Sea
MTPDHPKINYGKTGILIVNLGTPDSTSWLDIRKYLKEFLSDRRVIEVNPLIWKVILNLFILTFRPSKTAKAYKEIWMEEKNMSPLRYFTESQAKKLSKEIGNENLIVDFAMRYGNPSIKSKILGLQEKGCENLIILPLYPQYAAATTATVCDEVYRTLMKMRWQPNLQIIPHYESEPLYIEAIKNSIVKKISEINWKPDLIIASYHGIPKKYFDKGDPY

SEQ ID NO: 181914 - protein, 198 aa, Unknown
  Bacterial polypetide isolated from the Sargasso Sea
MKTAIILFNLGGPDKQESVRPFLFNLFNDPNIFKLPNPFRFLLAKLISTLRTKEATEIYSEIGGKSPILDITNDQATALEGALAIQGIPSKVFVCMRYWHPMTAEIVKEVKNYNPDNIFLLPLYPQYSTTTTKSSLDLWFKEAKKQNLLAPTKYTCCYPMNKKFIESHQRLIQKKIDQIKDKKIRILFSAHSLPVSII

SEQ ID NO: 181915 - protein, 222 aa, Unknown
  Bacterial polypetide isolated from the Sargasso Sea
HPSIPNALSKLQKKQVRRLLVLPMYPQYCAATTGSTFDEVTNVLQKWRWIPEMRFINQYFEEKLYIEALSNSIKNFWKKNQKPQKIIFSYHGIPKRYLTNGDPYHCFCLKTTRLVKEHMGLSDDEIMTTFQSRFGREEWLKPYTSDTLKELPKEGIKNIHIISPGFSSDCLETLEELEEENKEYFMESGGEHYKYIPCLNDNHDHIDVFVNLIKKHSQGWPI

SEQ ID NO: 181916 - protein, 285 aa, Unknown
  Bacterial polypetide isolated from the Sargasso Sea
NLGTPNSTSWFDIRKYLKEFLSDRRVIEVNPFLWKIILNLFILNFRPSKTAKAYKKIWMKNKNMSPLRYYTQMQTKKLNEKIKDKKIIIDYAMRYGDPSINSKMRNLQSEGCENIVILPLYPQYAAATTATVCDEVYRTLMKMRWQPSLQIIPHYESEPLYIEALVKSLNKKISEISWRPDLIIASYHGIPKKYFEKGDPYHCYCQKTTRLLSEKFTSIEIKTTFQSRFGPQEWLQPYTDKTFVSLAKEGKKKILVICPGFSSDCVETLEEILIQGKETFINCGG

SEQ ID NO: 181917 - protein, 213 aa, Unknown
  Bacterial polypetide isolated from the Sargasso Sea
IKSKIKKLHDNGCENLVILPLYPQYAAATTATVCDEVYRTLMSMRWQPSLKIIPHYESDPLYIDALVNSINSKIENINWKPDLILASYHGIPKKYFDKGDPYHCYCHKTTRLISEKFNEIKIKTTFQSRFGPEEWLQPYTDKTLEHLPKEGVKNVLAICPGFSSDCVETLEEILIQGKESFIEAGGENFDMVSCLNDNDDHIKLLNNLIKRNI

SEQ ID NO: 181918 - protein, 290 aa, Unknown
  Bacterial polypetide isolated from the Sargasso Sea
MNKDHPEVNFGKTGVLLINLGTPDSTNWWDIRKYLKQFLSDRRVIEVNPFLWQIILNLFILTFRPSKTAHAYKKIWRKDTNESPLLYFTRNQALKLKERIQNDKTFVDFAMRYGNPSINYKLNILKEKGCENLIILPLYPQYAAATTATVCDEVYRSLMKMRWQPSIQIVPHYESEQMYIKALVTSIKKKIEKIDWKPDLILSSYHGIPKSYFEKGDPYHCYCHKTTRLIKEKFDQIELQTTFQSRFGPQEWLTPYTDKTIEHLPEKGIKNLLVICPGFASDCVETLEEI

SEQ ID NO: 181919 - protein, 287 aa, Unknown
  Bacterial polypetide isolated from the Sargasso Sea
MEKNHPEIKFGKTGVLLINLGTPNSTSWLDIRRYLKEFLSDRRVIEVNPIIWKIILNVFILTFRPSKTAKAYKEIWMNDINMSPLRYYTKQQAEKLSQKLNNSDIIVDYAMRYGDPSIFSKMKLLQKNGCENIVVLPLYPQYAAATTATVCDEVYRSLMQMRWQPSLQIIPHYESEPMYINALINSIKKKISEIKWKPDLILASYHGIPKKYFEKGDPYHCYCQKTSRLISEQFKDVELITTFQSRFGPQEWLQPYTDRTLEKLPSDGKKNILVICPGFSSDCVETL

SEQ ID NO: 181920 - protein, 265 aa, Unknown
  Bacterial polypetide isolated from the Sargasso Sea
IRRYLKEFLSDRRVIEVNPFLWQIILNLFILTFRPSKTAKAYKEIWMKKENMSPLRYYTQKQAVKLSEKISLDNLKVDFAMRYGNPSIKSVIEKMQADGCENLIILPLYPQYAAATTATVCDEVYRALMNARWQPSLQIIPHYESEPLYIDALVNSIEKKIKEIDWIPDLIIASYHGIPKKYFDKGDPYHCYCHKTTRLMKEKFNKVPIETTFQSRFGPQEWLQPYTDKTLEKLPNSGKKNVLVICPGFSSDCVETLEEIAIQGR

SEQ ID NO: 181921 - protein, 271 aa, Unknown
  Bacterial polypetide isolated from the Sargasso Sea
MIEKNHPPIKYGKIGVLIINLGTPDTTNWFDIRKYLREFLSDRRVIEVNPLVWQIILNLFILNFRPSKTAKAYKEIWMKNENISPLLYYTKKQSEKISNSLSKENIVIDFAMRYGNPSIKSKIHKLHKMGCENLVILPLYPQYAAATTATVCDEVYRTLMKMRWQPSLKIIPHYESEPLYIEALVNSINKKIKEINWKPDLIIASYHGIPKKYFDKGDPYHCYCHKTTRLISEKFSSIEIKTTFQSRFGPQEWLQPYTDKTLENLPKEGIK

SEQ ID NO: 181922 - protein, 199 aa, Unknown
  Bacterial polypetide isolated from the Sargasso Sea
NLVILPLYPQYAGATTATVCDEVYRTLMKMRWQPSLKIIPHYESDPLYVDALVNSINVKIKNINWKPDLILASYHGIPKKYFDKGDPYHCYCHKTTRLVSEKFKSIEIKTTFQSRFGPQEWLQPYTDKTLENLPKEGKKNVLTICPGFSSDCVETLEEILIQGKKSFMDSGGENFDMIPCLNDNDDHINLLKNLVQKNI

SEQ ID NO: 181923 - protein, 305 aa, Unknown
  Bacterial polypetide isolated from the Sargasso Sea
TSWLDIEKYLREFLSDRRVIEVNPVIWQIILNVFILNFRPSKTAKAYKEIWIKDKNMSPLLYYTKMQSEKISNSISKENIIIDFAMRYGNPSIKSKIHKLHEMGCENLVILPLYPQYAAATTATVCDEVYRTLMKMRWQPSLKIIPHYESDPFYIDALVNSINKKLNEINWKPDLIVASYHGIPKKYFDKGDPYHCYCHKTTRLISEKFTSIEIKTTFQSRFGPQEWLQPYTDKTLENLPKEGVKNVLTICPGFSSDCVETLEEILIQGKESFISAGGENFDMVPCLNDNDDHILLLKSLIERNI

SEQ ID NO: 181924 - protein, 206 aa, Unknown
  Bacterial polypetide isolated from the Sargasso Sea
MTDHALLLVNLGSPASTEVADVRRYLNQFLMDPYVVDLPWPLRRLLVSLILIKRPAASAHAYASIWWDEGSPLIVLSRRLQEAMKAHWTHGPVELAMRYGQPSIESTLQRLAAQGIRQVTLAPLYPQFADSTTTTVIEEVRRVVRERGLDLRLSSLPPFYDQPEYLDALVASAKPHLQQGFDHLLLSFHGLPERHLHKLDPSGHCL

SEQ ID NO: 181925 - protein, 305 aa, Unknown
  Bacterial polypetide isolated from the Sargasso Sea
MNPDHPAVKFGKTGLLLVNLGTPDSTNWFDIRKYLKEFLSDRRVIEVNPILWQIILNLFILNLRPSKTAKAYKEIWMQKENMSPLRYYTIMQTKKLSEKMGNENLIVDFAMRYGNPSIKSKLKNLQKSGCENIVVLPLYPQYAAATTATVCDEVYKTLMGMRWQPSLQIIPHYESEPLYINSLKNSLEKKISELAWQPDLIVASYHGIPKKYFSKGDPYHCYCQKTSRLLSEKFKKIPIKTTFQSRFGPQEWLQPYTDKTLENLPKEGKKNILVICPGFSSDCVETLEEISIQGKESFIKNGEKI

SEQ ID NO: 181926 - protein, 274 aa, Unknown
  Bacterial polypetide isolated from the Sargasso Sea
MQKELNHPPINFGKTGVLIVNLGTPDSTSWFDIRKYLKEFLSDKRVIEVNPFIWQIILNVFILNLRPSKTAKAYKEIWMKDENISPLLHYTRQQAKKLSNSISEKKIIIDYAMRYGNPSIKSKIKKLHEKGCENLIILPLYPQYAAATTATVCDEVYRTLMKMRWQPSIKIIPHYESHPLYIDALVNSLNKKIKEIDWKPDLILVSYHGIPQKYFDKGDPYHCYCQKTTRLISEKFNSIELKTTFQSRFGPQKWLKPYTDKTLEKLPKEGKKNV

SEQ ID NO: 181927 - protein, 241 aa, Unknown
  Bacterial polypetide isolated from the Sargasso Sea
AEKIKSILSNQNLIVDYAMRYGNPSIKSKMLDLQESGCENIIILPLYPQYAAATTATVCDEVYRALMKMRWQPSLQIIPHYESEPLYIQAIVNSINHKLANINWKPDLILASYHGIPKKYFEKGDPYHCYCHKTSRLIKEKFSKEIPILTTFQSRFGPQEWLQPYTDKTLENLPKEGKKNVLVISPGFSSDCVETLEEISIQGKESFLEAGGEKFDTIPCLNDSDDHIKLLVHLINKSIKK

SEQ ID NO: 181928 - protein, 270 aa, Unknown
  Bacterial polypetide isolated from the Sargasso Sea
VLPLYPHFSISTSGSSFRELKKLRDSDSDFKKIPMRCVRSWFSQSGYLKSMVELISEQISLCESPAEAHIFFTAHGVPKSYVEEAGDPYKEQIEDCSLLIIDELEKYLGHSNAYTLSYQSRVGPVEWLKPYTEEVLTDLGKSKINDLIVVPISFVGEHIETLQEIDIEYKEIAEKAGIVNFRRVKALNTHPTFIEGLSDLVISSLEGPIINIEKASELPEKVKLYPQEKWQWGWNNSSEVWNGRVAMIVFLILFIELISGSGPLHKLGIL

SEQ ID NO: 181929 - protein, 199 aa, Unknown
  Bacterial polypetide isolated from the Sargasso Sea
FSAHGVPKSYVEEAGDPYQKEIEACTGLIMDQLARELGHANPHTLAYQSRVGPVEWLKPYTEEALEELGQAKTKDLVVVPISFVSEHIETLEEIDIEYRELATEAGVVNFRRVRALDTYPPFIEGLADLVTTSLEGPEVTLDAAAELPTKVKLYPQEKWEWGWNNSSEVWNGRLAMLGFSAFLLELLSGRGPLHSLGLL

SEQ ID NO: 181930 - protein, 273 aa, Unknown
  Bacterial polypetide isolated from the Sargasso Sea
MGTPDSTNWWDIRKYLKEFLSDRRVIEVNPFLWQIILNLFILTFRPSKTAKAYKKIWMKDKNMSPLRYYTEMQSSKLHNKISNENTVVDFAMRYGNPSIRSKISSLKDLGCENLIVLPLYPQYAAATTATVCDEVYRSLSKMRWQPSLQIIPHYESDPLYIKAICKSIEDRISKINWKPDIIMASYHGIPKKYFDKGDPYHCYCHKTTRLISENIKTSIPIMTTFQSRFGPQEWLQPYTDKTLEKLPKEDKKNILVICPGFASDCVETLEEIS

SEQ ID NO: 181931 - protein, 274 aa, Unknown
  Bacterial polypetide isolated from the Sargasso Sea
MNPDHPAVKFGKTGLLLVNLGTPDSTNWFDIRKYLKEFLSDRRVIEVNPILWQIILNLFILNLRPSKTAKAYKEIWMQKENMSPLRYYTIMQTKKLSEKMGNENLIVDFAMRYGNPSIKSKLKNLQKSGCENIVVLLLYPQYAAATTATVCDEVYKTLMGMRWQPSLQIIPHYESEPLYINSLKNSLEKKISELAWEPDLIVASYHGIPKKYFSKGDPYHCYCQKTSRLLYEKFKKIPIKTTFQSRFGPQEWLQPYTDKTLENLPKEGKKNILV

SEQ ID NO: 181932 - protein, 296 aa, Unknown
  Bacterial polypetide isolated from the Sargasso Sea
FERFLSDRRVIEVNPIIWQIILNLFILTFRPSKTAHAYKQIWRKDSNESPLLYFTKKQAAKLSEKIGSDNIIVDFAMRYGNPSIKSKLKYLKEEGCENIIILPLYPQYASATTATVCDEVYKSLIKMRWQPSLQIIPHYESNPLYINALIKSIEKKIYEINWKPDLIISSYHGIPKSYFDKGDPYHCYCHKTTRLMREKFKKVEIRTTFQSRFGPQEWLKPYTDQTLETLPKEGIKNLLVICPGFASDCVETLEEINIQGRDSFIEKGGENFDLIPCLNDSPDHIDLFEKLVSKYL

SEQ ID NO: 181933 - protein, 313 aa, Unknown
  Bacterial polypetide isolated from the Sargasso Sea
MEKEIKHPPINFGKTGVIIINLGTPDSTSWFDIRKYLREFLSDRRVIEVNPFIWQIILNVFILNLRPSKTAKAYKEIWMKHENISPLLYYTRQQAKKLSNSISEKNIIIDFAMRYGNPSIKSKIKKLHEDGCENLIILPLYPQYAAATTATVCDEVYRTLMKMRWQPSIKIIPHYESHPLYIDALVNSLDKKIKEINWKPDLILASYHGIPQKYFDKGDPYHCYCQKTTRLISEKFNSIELKTTFQSRFGPQKWLEPYTDKTLEKLPKEGKKNVLAICPGISSDCVETLEEILIQGKESFLESGGRNLIWCPV

SEQ ID NO: 181934 - protein, 246 aa, Unknown
  Bacterial polypetide isolated from the Sargasso Sea
RRITEQQARELQSLLRQRGLDATTYVAMRYWHPFTESAVADMKADGMDEVVVLPLYPHFSISTSGSSFRELQRLRQGDAAFEQLPIRCIRSWFDHSGYIKAMAELIAEEVRNSDDPEKAHVFFSAHGVPKSYVEEAGDPYQQQIEACTDLIMKSLAEHMGHANPHTLAYQSRVGPVEWLKPYTEEALEQLGEAKTNDLVVVPISFVSEHIETLEEIDIEYRELATEAGVVNFRRVRALDTYPPFIE

SEQ ID NO: 181935 - protein, 308 aa, Unknown
  Bacterial polypetide isolated from the Sargasso Sea
KVNMKTAVVLFNLGGPDKQESVKPFLFNLFNDPNIFRLPNPFRYFLARFISSRRTKEATEIYAEIGGKSPILEITNSQANALQKELKNKGIENKVFVCMRYWHPMTAEVVSKVKDYNPDKIFLLPLYPQYSTTTTKSSLDAWFNEAQNQELNAKTKYTCCYPYDAKLIKAHQKLIQDKINHIKDKKVRVLFSAHSLPVSIIKKGDPYQWQVEQTVKAVMQGIHGHEDHVLAYQSKVTPVKWLEPTTPSEIENAISEDRALVIVPIAFVSDHSETLVELDIEYQELASELGCKHYYRSESLNIDQTFIE

SEQ ID NO: 181936 - protein, 227 aa, Unknown
  Bacterial polypetide isolated from the Sargasso Sea
MECATVIQVFSKGLNNLRNQNCDRIIVLPLYPQYCAATTGSTFDAVAEELQNWRWVPSLRFIGGYYEHELYINALKNSIEEFWTKNDKPQKILFSYHGVPKKYLDKGDPYHCFCRKTTRLVAEAMGLPEENYMTTFQSRFGPAEWLQPYTDKTIESLAKNGTDHIHVISPAFSSDCLETIEELNEENREIFMENGGKEFGYIPCLNDREDHILLLTSLLENELHGWV

SEQ ID NO: 181937 - protein, 246 aa, Unknown
  Bacterial polypetide isolated from the Sargasso Sea
LKEFLSDPRVIEVPKFLWQVILRGIILNLRPKKVAKLYKSIWRKEGGPLLVMLEKQKKGIMRILKNKKKKVKFEIGMRYGNPSIKLGLEKLRKQKCRRILILPLYPQYCAATTGSTFDKVTEVLRKWRWIPEIRFINNYFEEPLYIDCLIKSIKENWKKFGKPQKLIFSYHGIPKKYLLKGDPYHCFCQKTTRLVAEKMKLKEKEYMTTFQSRFGPDEWLQPYTDKTLEELPSKNVKKINIISPRV

SEQ ID NO: 181938 - protein, 314 aa, Unknown
  Bacterial polypetide isolated from the Sargasso Sea
MGGPDKQESVKPFLFNLFNDPNIFRLPNPFRYLLARLISSRRTKEASEIYAEIGGKSPILEITNNQAEALQRDLENKGIKNKVFVCMRYWHPMTPEVVAKVKDYNPDKIFLLPLYPQYSTTTTKSSLDVWFKEAQLQELNSKTKYTCCYPYDTKLIKAHQKLIQDKINQVKDKKVRVLFSAHSLPVSIIKKGDPYQWQVEQTVEAVMQGIHGYEDHVLAYQSKVTPVKWLEPTTPSEIENAISEDRALVIVPIAFVSDHSETLVELDIEYQELASELGCKHYYRSESLNIDQTFIESLSEIVSESEKSESGNIR

SEQ ID NO: 181939 - protein, 269 aa, Unknown
  Bacterial polypetide isolated from the Sargasso Sea
LIVNLGTPDSTKWLDIRRYLKEFLSDRRVIEVNPFIWQLILNLIILNLRPSKTAKAYKEIWMKDINMSPLMYYTQKQSEKVSNSISNENILVDFAMRYGNPSIKSKIKKLHDNGCENLVILPLYPQYAAATTATVCDEVYRTLMSMRWQPSLKIIPHYESDPLYIDALVNSINSKIENINWKPDLILASYHGIPKKYFDKGDPYHCYCHKTTRLISEKFREIEIKTTFQSRFGPEEWLQPYTDKTLERLPKEGVKNVLAICPGFSSDLC

SEQ ID NO: 181940 - protein, 270 aa, Unknown
  Bacterial polypetide isolated from the Sargasso Sea
MDKNHPAVNYGKKGVLLINLGTPDSTGWWDIRKYLKEFLSDRRVIEVNPIIWQIILNLFILTFRPSKTAHAYKQIWRKDTNESPLLYFTKKQSDELNRKIGSENIVVDFAMRYGNPSIKSKLHKLKDKGCENIIIFPLYPQYAAATTATVCDEVYRSLMKMRWQPSLQIIPHYESEPLYIDALVSSIERKIKTLKWTPDLIISSYHGIPKTYFDKGDPYHCYCHKTTRLIKEKIKKVEIKTTFQSRFGPQEWLTPYTDKTLENLPKEGVK

SEQ ID NO: 181941 - protein, 317 aa, Unknown
  Bacterial polypetide isolated from the Sargasso Sea
MEDHPKINFGKTGVLLINLGTPESTSWFDIRSYLKEFLSDRRVIEVNPILWKFILNVFILTFRPSKTAKAYKEIWMEKENMSPLRYYTKLQAEKIDKLIENENVIVDYAMRYGNPSIKSKINKLHEAGCEHLLIIPLYPQYAAATTATVCDEVYRSLMKMRWQPSLKIVPHYESEELYIDALVNSLNKKISEINWKPDLIIASYHGIPQKYFDKGDPYHCYCHKTTRLISEKFKDVKIRTTFQSRFGPEQWLKPYTDKTLEELPSDNINNILVICPGFASDCVETLEEIAIQGQESFLKSGGKNFDMIPCLNDNEDH

SEQ ID NO: 181942 - protein, 268 aa, Unknown
  Bacterial polypetide isolated from the Sargasso Sea
MTPDHPKVNYGKTGVLIINLGTPDSTSWMDIRKYLKEFLSDRRVIEVNPFIWRVILNLFILTFRPSKTAKAYKEIWMEDKNMSPLRFFTESQAHKLSDKIGNENLIVDFAMRYGNPSIKSKINDLHEKGCENLIVLPLYPQYAAATTATVCDEVYRTLMKMRWQPNLKIIPHYESEPLYIDAIKNSIIKKINEINWKPDLLIASYHGIPKKYFDKGDPYHCYCHKTTRLISEKYSDIKIMTTFQSRFGPQEWLQPYTDKTFEVLRKRE

SEQ ID NO: 181943 - protein, 387 aa, Unknown
  Bacterial polypetide isolated from the Sargasso Sea
MSRVGIVLLNLGGPERIQDVGPFLYNLFSDPEIIRLPIPAFQKPLAWLISTLRSNKSQEAYRSIGGGSPLRRITDQQARELQSLLRQREVDATTYVAMRYWHPFTESAVADMKADGIEQVVVLPLYPHFSISTSGSSFRELQRLRQGDEHFAQLPLRAIRSWHDHPGYLQAMAQLMAREIDACVDPSSAHVFFSAHGVPKSYVEEAGDPYQKEIESCAELIMKTLGRDNPWTLAYQSRVGPVEWLQPYTEEALEELGEQGVKELVVVPISFVSEHIETLEEIDIEYREIATEAGVSNFRRVPALDTDPTFIASLADLVETSLAGPEVDLEEAAALPARTKLYPQEKWSWGWNNSSEVWNGRLAMLGFSAFLMELLSGHGPLHALGLL

SEQ ID NO: 181944 - protein, 256 aa, Unknown
  Bacterial polypetide isolated from the Sargasso Sea
MKPDHPKINYGKTGILIVNLGTPDSTSWLDIRKYLKEFLSDRRVIEVNPLIWQVILNLFILTFRPSKTAKAYKEIWMKDKDMSPLRYFTESQAEKLSYQIGDENLIVDFAMRYGNPSIKSKIYGLQKKGCENLIVLPLYPQYAAATTATVCDEVYRTLMKMRWQPNLKIIPHYESEPLYIEAIKNSILKKISEINWKPDLIIASYHGIPKKYFDKGDPYHCYCHKTTRLISEKFTDIEIKTTFQSRFGPQEWLQPY

SEQ ID NO: 181945 - protein, 333 aa, Unknown
  Bacterial polypetide isolated from the Sargasso Sea
MNNNHPKINHGKTGVLLVNLGTPDSTSWLDIRKYLKEFLSDNRVIEVNPILWKVILNLFILNFRPSKTAKAYKEIWMKKEDMSPLRYYTLMQSKKLSEKLTGEKLIVDYAMRYGNPSIKSKIKKLHELGCENMIVLPLYPQYAAATTATVCDEVYKTLISMRWQPSLQIIPHYESEPLYIDALVNSLNKKISEIKWRPDLILASYHGIPKKYFEKGDPYHCYCQKTSRLLTEKFNKIPIKTCFQSRFGPQEWLQPYTDKTLESLPKEGKKNILVICPGFSSDCVETLEEILIQGKKSFLNNGGENFDLVPCLNYNEDHIILLQYLVKKYLVEK

SEQ ID NO: 181946 - protein, 229 aa, Unknown
  Bacterial polypetide isolated from the Sargasso Sea
MIVDYAMRYGNPSIKSKMLDLQESGCENIIILPLYPQYAAATTATVCDEVYRTLMKMRWQPSLQIIPHYESEPLYIQAIVNSINNKLSSINWKPDLILASYHGIPKKYFDKGDPYHCYCHKTSRLIKEKFNKDIPILTTFQSRFGPQEWLQPYTDKTLENLPKEGKKNILVISPGFSSDCVETLEEISIQGKESFLESGGEKFDTIPCLNDNEDHIKLLVHLINKSIRK

SEQ ID NO: 181947 - protein, 209 aa, Unknown
  Bacterial polypetide isolated from the Sargasso Sea
LNKLKELGCENIVVLPLYPQYAAATTATVCDEVYRSLMKMRWQPSLQIIPHYESEPLYIQALIKSIENKIREIDWKPELIISSYHGIPKSYFDKGDPYHCYCHKTTRLIKEKFNKIEIQTTFQSRFGPQEWLTPYTDRTLESLPGKGVKNLLVICPGFASDCVETLEEINIQGRESFLQNGGEKFDLIPCLNDSSDHIELFEELIKRYI

SEQ ID NO: 181948 - protein, 327 aa, Unknown
  Bacterial polypetide isolated from the Sargasso Sea
EHPPVKHGKTGVLIVNLGTPDSTSWFDIRKYLKEFLSDKRVIEVNPLIWQVILNIFILNLRPSKTAKAYKEIWMKNENMSPLLYYTKKQAEKLSSSILEKDIIINFAMRYGNPSIKDRINQLHAEGCENLTILPLYPQYAAATTATVCDEVYRVLMKMRWQPSLKIIPHYESDPLYIDALVNSLNRKIKEINWTPDLIIASYHGIPKKYFDKGDPYHCYCHKTTRLISEKFNSIKIKTTFQSRFGPQEWLQPYTDKTLENLPKEGFKNVLTICPGFASDCVETLEEILIQGKESFIESGGENFDMVPCLNDNDDHISLFESLIRKNI

SEQ ID NO: 181949 - protein, 340 aa, Unknown
  Bacterial polypetide isolated from the Sargasso Sea
MILKPTDHPKTHHDKNIGVLLVNLGTPENTETKSIRIYLKEFLSDRRVIDVPKILWWLILNLIILNTRPKKTAAAYKKIWLKNDPDGSPLRKITRLQSEKLQKKINKKNVIVDYAMRYGSPSIKSKLSELKEKGCDRIIILSLYPQYSGPTTATVNDEVCKWMLSQKWQPSIRIASPYFDTPEYINSISKSILNSFKKDGTPDLLLLSFHGAPKRYLIEGDPYHCQCAKTGRLIKEKLKIHDNKFMISFQSRFGSEPWLQPYTDETLEKLGNKNIKHLSVITPGFSADNIETLEEINMEGREEFLESGGKKFTYIPCLNDTKEGMDLLHKLALKELAGWI

SEQ ID NO: 181950 - protein, 340 aa, Unknown
  Bacterial polypetide isolated from the Sargasso Sea
MASFKGNKLYVHGSGLKTGILITNLGTPDEPTKSSLKTYLKQFLSDERVIETPKAIWWPILNGIVLNTRPAKSAKNYKSVWTEEGSPLLFHTKNQLSKIKEFINKKYQNIVFDIGMRYGNPSISKGLNNLRNQNCDRIIILPLYPQYCAATTGSTFDAVAEELKSWRWVPSLRFIGGYYENELYIKALKNSIEEFWTKNSKPKKIIFSYHGVPKKYLDKGDPYHCFCRKTTRLVAETMGLPEESYMTTFQSRFGPAEWLQPYTDKTIESLAKNGTDHIHVISPAFSSDCLETIEELNEENREIFMENGGKEFGYIPCLNDREDHILLLTSLIENELHGWV

SEQ ID NO: 181951 - protein, 333 aa, Unknown
  Bacterial polypetide isolated from the Sargasso Sea
MDSNHPKVNFGKTGVLLVNLGTPDSTGWWDIRKYLNEFLSDRRVIEVNPFLWKIILNLFILTFRPSKTAKAYKEIWMKEENISPLRYYTIKQAEKVRSIISNENLIVDYAMRYGNPSIKSKMLDLQESGCENIIILPLYPQYAAATTATVCDEVYRTLMKMRWQPSLQIIPHYESEPLYIRAIVNSINHKLNNISWKPDLILASYHGIPKKYFDKGDPYHCYCHKTSRLIKESFNKDIPILTTFQSRFGPQEWLQPYTDKTLESLPKEGKKNILVISPGFSSDCVETLEEISIQGKESFLDAGGEKFDTIPCLNDNEDHIKLLVHLVNKNIGK

SEQ ID NO: 181952 - protein, 211 aa, Unknown
  Bacterial polypetide isolated from the Sargasso Sea
KIKKMQNKGCENLIIFPLYPQYASPTTATVCDEVFRVLMKMRWQPALKIVPHYESEPMYIDAIVKSINKKINEIDWKPDLIVASYHGIPKKYFEKGDPYHCYCQKTTRLISEKLKQIKIITTFQSRFGPQEWLQPYTDKTLEKLPKEGAKKILVISPGFASDCVETLEEISIQGKESFEKSGGEKFGSIPCLNDNDDHIELLEHLVRKNIG

SEQ ID NO: 181953 - protein, 281 aa, Unknown
  Bacterial polypetide isolated from the Sargasso Sea
MSAHSLYNLFSDTEIIRTPFPVFQKPLAWLISTLRSTTSQQAYLSIGGGSPIRRITEQQARELQSKLRDKGFNATTYIAMRYWHPFTESAIADMKADGIDQVVVIPLYPHFSISTSGSSFRELKKLRDSDDEFKKVPMRCVRSWFSQSGYLKSMVELISEQISLCESPSKAHIFFTAHGVPKSYVEEAGDPYKQQIEDCSLLIINELEKCLGHSNPHTLSYQSRVGPVEWLKPYTEEVLADLGRSNVNDLIVVPISFVGEHIETLQEIDIEYKEIAEKAGI

SEQ ID NO: 181954 - protein, 329 aa, Unknown
  Bacterial polypetide isolated from the Sargasso Sea
MEKHPEIKYGKTGVLIINLGTPDSTKWLDVRRYLKEFLSDRRVIEVNPIIWQVILNLFILNFRPSRSAKAYKEIWMKEENISPLLYYTKKQAEKLSKSFSNENLFIDFAMRYGNPSIKGKIKKLNEEGCENLIILPLYPQYAAATTATVCDEVYRTLMNMRWQPSLKIIPHYESHPLYVDALVNSINAKIKNIKWKPDLILASYHGIPKKYFDKGDPYHCYCHKTTRLISEKFKAIEIKTTFQSRFGPQEWLQPYTDKTLEILPKEGKKNVLTICPGFSSDCVETLEEILIQGKKSFMDSGGENFDMIPCLNDNDDHINLLKNLIQKNI

SEQ ID NO: 181955 - protein, 280 aa, Unknown
  Bacterial polypetide isolated from the Sargasso Sea
FVALILNVFILNLRPSKTAKAYKEIWMKKENMSPLLYYTQKQAEKVGNLISNENLIIDFAMRYGNPSIKSKIRKLHDDGCENLVILPLYPQYAAATTATVCDEVYRTLMSMRWQPSLKIIPHYESDPLYIDALVNSINSKISELNWKPDLILASYHGIPKKYFDKGDPYHCYCHKTTRLISEKFKSIEIKTTFQSRFGPQEWLQPYTDKTLENLPKEGKKNVLAICPGFASDCVETLEEILIQGRESFMESGGENFDMIPCLNDSEDHINLINHLIKRNI

SEQ ID NO: 181956 - protein, 228 aa, Unknown
  Bacterial polypetide isolated from the Sargasso Sea
ENTVIDFAMRYGNPSINSKISKLHEQGCENLVILPLYPQYAAATTATVCDEVYRVLMKMRWQPSLKIIPHYESDSLYIDALVNSINKKISEINWKPDLIIASYHGIPKKYFDKGDPYHCYCHKTTRLISEKFHSIEIKTTFQSRFGPQEWLQPYTDKTLENLPKEGKKNILTICPGFSSDCVETLEEILIQGKESFINSGGKNFDIIPCLNDSDDHILLLKSLIERSI

SEQ ID NO: 181957 - protein, 344 aa, Unknown
  Bacterial polypetide isolated from the Sargasso Sea
MKKAVILFNLGGPDKLENVEPFLFNLFNDPAILNLPGFFRYPLAKLIANRRAPTAKKIYEELGGSSPILKLTEEQASALESKLNHDDDLSEYKCFIVMRCWHPRATNVVKDVINYNPNEVILMPLYPQYSAATSGSSIKEWHDICAQNNFKVKTSTICCYPTDENFVQAHKDEIVKKISNLENFKLIFSAHGLPEKNIKKGDPYQWQVEQSVEKIVKSLNIKNLDWILSYQSRVGPLKWIGPSTEDIIIENSKLGKHIVLVPIAFVSEHSETLVELDIEYKELADRNGCKNYSRVPALGTNENYIKSISNLIIKKQNYNFNGDLFPPKIQCPNQFKKCPCLSYE

SEQ ID NO: 181958 - protein, 242 aa, Unknown
  Bacterial polypetide isolated from the Sargasso Sea
TEMQAHRLSDQIKEEKIIIDYAMRYGNPSIKTKIHDLQKLGCENLVIFPLYPQYAAATTATVCDEVYRTLMKMRWQPNLKIIPHYESEPLYIEAIKNSILKKVDEINWKPDLLVASYHGIPKKYFDKGDPYHCYCHKTTRLISEKYSNTKIITTFQSRFGPQEWLQPYTDKTLESLPKEGKKNILVICPGFSSDCVETLEEISIQGKESFMKSGGENFEMIPCLNDSDDHISLIKHLVLENI

SEQ ID NO: 181959 - protein, 341 aa, Unknown
  Bacterial polypetide isolated from the Sargasso Sea
MKYFGEKNYEHGSKDKTGVLITNLGTPDAPDAKSLRVYLNQFLSDPRVIEIPKFLWQIILKGIILQVRPRKSAANYKKIWTDNGSPLLDISNKQLSGIKKILSSKYPNIEFALGMRYGNPSIDSALKDLQSRQVRRLLVLPLYPQYCAATTGSTFDEVTNILQKWRWIPELRIINQYFEEEEYLDALVSSIETFWKKNNKPQKIVFSYHGIPKRYLTNGDPYHCFCLKTTRLVKEKMKLNDDEIITTFQSRFGREEWLKPYTSETLKELPGQGVKNIHIISPGFSADCLETLEELEEENREYFMEAGGEQYEYIPCLNDNDKHLSFISNLVLKHTQGWNIS

SEQ ID NO: 181960 - protein, 321 aa, Unknown
  Bacterial polypetide isolated from the Sargasso Sea
KTGLLLVNLGTPDSTSWWDIRKYLKEFLSDKRVIEVNPILWKIILNVFILNLRPSKTAKAYKEIWMRDKNISPLRHYTEMQTKKLSEKLDNDKVITDFAMRYGSPSIRSKMKKLQNNGCERIIVIPLYPQYAAATTATVCDEVFRSLIDMRWQPSLQIIPHYESEPLYISALEKSLNKKISDINWKPDLIVASYHGIPKKYFDKGDPYHCYCQKTSRLLSEKFTKIPIQTTFQSRFGPQEWLKPYTDKTLESLPKEGKKNILVICPGFSSDCVETLEEISIQGRESFLNNGGKNFDVVPCLNDGKDHIDLLEHLAKKYLVK

SEQ ID NO: 181961 - protein, 330 aa, Unknown
  Bacterial polypetide isolated from the Sargasso Sea
MTSDHPKVNYGKTGVLIINLGTPDSTSWLDIRKYLKEFLSDRRVIEVNPLIWQVILNLFILTFRPSKTAKAYKEIWMKDKNMSPLRFFTESQAHKLSEKIGNEKLIVDFAMRYGNPSIKNKINDLHEKGCENLIVLPLYPQYAAATTATVCDEVYRTLMKMRWQPNLKIIPHYESEPLYIDAIKNSIVKKINEINWKPDLIVASYHGIPKKYFEKGDPYHCYCHKTTRLISEKYSDIKIMTTFQSRFGPQEWLQPYTDKTFEALPKEGKKNILVICPGFSSDCVETLEEISIQGKESFIKSGGENFEMVPCLNDNEDHISLFKHLISKNL

SEQ ID NO: 181962 - protein, 356 aa, Unknown
  Bacterial polypetide isolated from the Sargasso Sea
MRFDLERPSQNATSHRVAVLLINLGTPDAPTPRAVRRYLAQFLSDPRVVEIPALLWQVILRLLILPFRSRASAKKYAAVWMPEGSPLRVFTEKQVEGLRHLLQLNDYTVLVDYAMRYGTPGIPAMLNQLKLAGAERVLLVPMYPQYSSSTTATAFDDAFSALKRMRNQPEIRTVRQYADHPAYIAALAAQVHQYWHQHGRPDFAAGDKLVLSFHGVPKRTMDLGDPYHEQCQQTGALLMQALGLTQVECRVTFQSRFGKAEWLQPYTAPTLKELGLAGVRRADVFCPGFTADCLETIEEIGMEVRDEFLHAGGKEFHRIPCVNASQPWIAALGEIVAQNLQGWPVQAVPVPHTTGA

SEQ ID NO: 181963 - protein, 255 aa, Unknown
  Bacterial polypetide isolated from the Sargasso Sea
WMKNENMSPLLYYTQKQSEKISQLLSKENLILDFAMRYGNPSIKSKIYKLQKEGCENLIILPLYPQYAAATTATVCDEVYRTLMQMRWQPSLKIIPHYESDPLYIDALVKSINKKINEISWKPDVIIASYHGIPKKYFDKGDPYHCYCHKTTRLISEKLNSIEIKTTFQSRFGPQEWLQPYTDKTLESLPKEGKKNILTICPGFASDCVETLEEILIQGKESFLNSGGENFDMIPCLNDNDDHINLLKSLIEKNI

SEQ ID NO: 181964 - protein, 332 aa, Unknown
  Bacterial polypetide isolated from the Sargasso Sea
MEFDNNHPPIKFGKTGVLIINLGTPDSTSWLDIRKYLKEFLSDKRVIEVNPIIWQLILNIFILTFRPSKTAKAYKEIWMKNENMSPLLYYTQKQSEKISRSISKENLIINFAMRYGNPSIKSKIHKLKEEGCENLVILPLYPQYAAATTATVCDEVYRTLMQMRWQPSLKIIPHYESDSLYIDALVKSINKKINEINWKPDLIIASYHGIPKKYFDKGDPYHCYCHKTTRLISEKFNSIEIKTTFQSRFGPQEWLQPYTDKTLESLPKEGKKNILTICPGFASDCVETLEEILIQGKESFLNSGGENFDMIPCLNDNDDHITLLKSLIEKNI

SEQ ID NO: 181965 - protein, 354 aa, Unknown
  Bacterial polypetide isolated from the Sargasso Sea
MRFDLEPPSSTAAAHRIGVLLINLGTPDAPTPRAVRRYLAEFLSDPRVVEIPQAIWQVLLRTVILPLRGRASAKKYAAVWMPEGSPLRVYTERQTDSVRHLLVSNGYQVQVDYAMRYGSPNISHALAQFKRAGVERVLLMPMYPQYSASTTATAFDAAFEALARMRNQPEVRTVRHYADHPAYIHALAEQVRQYWAQHGRPDFAAGDKLVLSFHGVPKRTLDLGDPYHDQCQQTGALLMAALGLSTTECRVTFQSRFGKAEWLQPYTAPTLREFGEAGVRRADVFCPGFTADCLETIEEIGMEVRDEFLAGGGKVFHRIPCLNGAPAWIGALGEIVAENLQGWPVGAAQPETVG

SEQ ID NO: 181966 - protein, 341 aa, Unknown
  Bacterial polypetide isolated from the Sargasso Sea
MVKYIGEKDYEHGSKEKIGVLITNLGTPDAPNKKELKVYLNQFLSDPRVIELPKILWQIILKLVILQIRPSKSAEAYKQIWTDKGSPLLDIANRQLNKIQSSFSSKNENIVFEVGMRYGNPSIPDALLKLQKKQVRRLLVLPMYPQYCAATTGSTFDEVTNVLQKWRWIPEMRFINQYFEEKNYIEALSNSIKSFWKKTSKPQKIIFSYHGIPKRYLTNGDPYHCFCLKTTRLVKEHMGLSDDEIMTTFQSRFGREEWLKPYTSETLKELPKQGIKNIHIISPGFSSDCLETLEELEEENKEYFMESGGENYHYIPCLNDHDDHIDFFVNLIKKHTKGWSL

SEQ ID NO: 181967 - protein, 331 aa, Unknown
  Bacterial polypetide isolated from the Sargasso Sea
MIKDHPKVQFGKTGVLIVNLGTPDSTSWFDIRKYLKEFLSDRRVIEVNPILWQIILNLFILNLRPSKTAKAYKEIWMKDENMSPLRYYTLKQADKLTKEIGNKNLLVDYAMRYGSPSIKSKIHSLKENGCENLIVLPLYPQYAAATTATVCDEVYRTLMKMRWQPNLQIIPHYESEPLYIDALINSLRKKINEISWKPDLVIASYHGIPKKYFDKGDPYHCYCHKTTRLLSEKFKEIPIKTTFQSRFGPQEWLQPYTDKTIEKLPEEGKKNILVISPGFSSDCVETLEEISIQAKDTFLKSGGLNFEMVPCLNDSDDHIKLLKFLITRKNL

SEQ ID NO: 181968 - protein, 330 aa, Unknown
  Bacterial polypetide isolated from the Sargasso Sea
MTPDHPKISYGKTGILIINLGTPDSTSWFDIRKYLKEFLSDRRVIEVNPLIWQVILNLFILTFRPSKTAKAYKEIWMNDKNMSPLRYFTERQAEKLSNQIGKEDLIVDFAMRYGNPSIKSKIHGLQKKGCENLIVLPLYPQYAAATTATVCDEVYRTLMKMRWQPNIKIIPHYESEPLYIEAIKNSILKKISEINWKPDLIIASYHGIPKKYFDKGDPYHCYCHKTTRLISEQYSDIEIKTTFQSRFGPQEWLQPYTDKTFEALPKEGKKNILVICPGFSSDCVETLEEISIQGKESFIKSGGENFEMVPCLNDSEDHISLLKHLVTKNL

SEQ ID NO: 181969 - protein, 329 aa, Unknown
  Bacterial polypetide isolated from the Sargasso Sea
MENHPEIKYGKTGVLIINLGTPDSTNWLDVRRYLKEFLSDRRVIEVNPIIWQVILNLFILNFRPSKSAKAYKEIWMKEENISPLLYYTKKQAEKLSKSFSKENLIIDFAMRYGNPSIKSKIKKLNEEGCENLVILPLYPQYAAATTATVCDEVYRTLMNMRWQPSLKIIPHYESDPLYVDALVNSINVKINNINWKPDLILASYHGIPKKYFDKGDPYHCYCHKTTRLVSEKFKDIEIKTTFQSRFGPQEWLQPYTDKTLENLPKEGKKNVLTICPGFSSDCVETLEEILIQGKKSFMDSGGENFDMIPCLNDNDDHINLLKNLIQKNI

SEQ ID NO: 181970 - protein, 370 aa, Unknown
  Bacterial polypetide isolated from the Sargasso Sea
MNYKGNPEYTHDSPSCTGILITNLGTPDEPTVTSVRKYLAEFLSDPRVIELPRYIWWLVLHGIILRIRPSRSAKAYKKIWTEDGSPLLSISKKQALGLEKILTKKIQGPIKIELSMRYGNPSIKSGLKKLQESNASRILILPLYPQYSAATTGSTFDAISNELKKWRWLPEIRMVNHYHDYPDYIDALKNSIQEYWKHNGRPQKLIFSFHGLPKHYFLAGDPYHCECHKTARLVAEKLKLDQDEWLVTFQSRFGPREWLKPYTDETLISLAESGVKNINIVCPGFSADCLETLEEIDIQNREFFIKAGGEKFNYIPALNDHGNHIELLSNIILKHTNGWSEFSKNWDQEKIETELSKSKERAEKSIYNKN

SEQ ID NO: 181971 - protein, 391 aa, Unknown
  Bacterial polypetide isolated from the Sargasso Sea
MDKIGVLLMNLGGPERITDVGPFLYNLFSDPEIIRTPFPVFQKPLAWLISTLRSTTSQQAYLSIGGGSPIRRITEQQARELQSKLRDKGFNATTYIAMRYWHPFTESAIADMKADGIDQVVVIPLYPHFSISTSGSSFRELKKLRDSDDEFKKVPMRCVRSWFSQSGYLKSMVELISEQISLCESPSKAHIFFTAHGVPKSYVEEAGDPYKQQIEDCSLLIINELEKCLGHSNPHTLSYQSRVGPVEWLKPYTEEVLADLGRSNVNDLVVVPISFVGEHIETLQEIDIEYKEIAEKAGIKNFRRVKALNTHPTFIEGLSDLVISCLEGPLVNIEEASQLPEKVKLYPQEKWQWGWNNSSEVWNGRVAMIIFLVLFIELISGSGPLHKLGIL

SEQ ID NO: 181972 - protein, 330 aa, Unknown
  Bacterial polypetide isolated from the Sargasso Sea
MTSEHPKINYGKTGILIVNLGTPDSTDWLDIRKYLKEFLSDRRVIEVNPFIWQIILNLFILTLRPSKTAKAYKEIWMKDKNMSPLRFFTESQAEKLSKQIGNENLIVNFAMRYGNPSIKSKIHSLQKKGCENLIVLPLYPQYAAATTATVCDEVYRTLMKMRWQPNLKIIPHYESEPLYIGAIKNSIVKKITEINWRPDLIIASYHGIPKKYFDKGDPYHCYCHKTTRLISEQFSDIEIKTTFQSRFGPQEWLQPYTDKTFEALPKEGKKNILVICPGFSSDCVETLEEISIQGKESFIKSGGENFEMVPCLNDNDDHINLLKHLISKNL

SEQ ID NO: 181973 - protein, 330 aa, Unknown
  Bacterial polypetide isolated from the Sargasso Sea
MRSDHPKVNYGKTGVLIINLGTPDSTSWLDIRKYLKEFLSDRRVIEVNPLIWQVILNLFILTFRPSKTARAYKEIWMKDKNMSPLRFFTESQAQKLSEKIGNEKLIVDFAMRYGNPSIKSKINELHEKGCENLIILPLYPQYAAATTATVCDEVYRTLMKMRWQPNLKIIPHYESEPLYIDAIKNSIVKKINEINWKPDLIVASYHGIPKKYFDKGDPYHCYCHKTTRLISEKYSDIKIMTTFQSRFGPQEWLQPYTDKTLEALPKEGKKNILVICPGFSSDCVETLEEISIQGKESFIKSGGENFEMIPCLNDNEDHISLFNHLISKNL

SEQ ID NO: 181974 - protein, 260 aa, Unknown
  Bacterial polypetide isolated from the Sargasso Sea
MEKHPEVKHGKTGALIINLGTPDSTKWLDIRKYLKEFLSDRRVIEVNPIIWQIILNVFILNLRPSKTAKAYKEIWMKEENMSPLLYYTKKQAEKLSKSISNENLIIDFAMRYGNPSIKSKIIKLHEEGCENIIILPLYPQYAAATTATVCDEVYRTLMNMRWQPSLKIIPHYESDPLYVDALVNSINDKLKSINWKPDLILASYHGIPKKYFDKGDPYHCYCHKTTRLISEKFKSIEIKTTFQSRFGPQEWLKPYTDKTL

SEQ ID NO: 181975 - protein, 123 aa, Unknown
  Bacterial polypetide isolated from the Sargasso Sea
VTHITGFCLKTTRLVKEKMRLSDDQIMTTFQSRFGREEWLQPYTSETLKELPDKGIKDIHIISPGFSADCLETLEELEEENREYFIESGGEKYKYIPCLNDNKQHLDFISHLIIKNTHGWNKE

SEQ ID NO: 181976 - protein, 391 aa, Unknown
  Bacterial polypetide isolated from the Sargasso Sea
MAKIGVLLMNLGGPERIADVGPFLYNLFSDPEIIRTPFPAFQKPLAWLISTLRSTTSQQAYLSIGGGSPIRRITEQQARELQSKLRDNGVNATTYIAMRYWHPFTESAIADMKADDVDQIVVLPLYPHFSISTSGSSFRELKKLRDSDNDFKKIPMRCVRSWFSQSGYLKSMVELISEQVSLCESPLNAHIFFTAHGVPKSYVEEAGDPYKQQIEDCSLLIINELEKYLGHSNPHTLSYQSRVGPVEWLKPYTEEVLADLGMSNVNDLIVVPISFVGEHIETLQEIDIEYKEIAEKAGIKNFRRVKALNTHPTFIEGLSDLVVSCLEGPLVNIEEASQLPEKVKLYPQEKWQWGWNNSSEVWNGRVAMIVFLVLFIELISGFGPLHRLGIL

SEQ ID NO: 181977 - protein, 341 aa, Unknown
  Bacterial polypetide isolated from the Sargasso Sea
MTKYIGENNYEHGSVERTGILLTNLGTPDEPNSKAVKIYLAEFLSDTRVIEFPKFIWKIILHGIILRIRPKRSAKTYKTIWTDEGSPLLNIAKKQIELVKEKFEGKYPNTVFALGMRYGNPSIESALLELQSKKVRRLIIFPLYPQYCAATTASTFDAVTNVLQKWRWIPELRFINQYFEEESYIKALANSIEVFWKKNGKPQKLIFSYHGIPKKYHTKGDPYHCFCLKTTRLVKEYMNLDDNEVLTTFQSRFGRDEWLQPYTSETLKKLPSEGIKDIHIISPGFSADCLETLEELEAENREYFENAGGKNYLYIPCLNTNPMHIDMMSTIIEKHTQGWSV

SEQ ID NO: 181978 - protein, 344 aa, Unknown
  Bacterial polypetide isolated from the Sargasso Sea
MGFRMTDHALLLVNLGSPASTEVADVRRYLNQFLMDPYVIDLPWPLRRLLVSLILIKRPAASAHAYASIWWDDGSPLVVISRRLQEAMKAHWTQGPVELAMRYGEPSIESTLQRLAAQGIREVTLAPLYPQFADSTTTTVIEEVKRVVRERGLDMRLSTLPPFYDQPEYLDALVASAKPYLEQDFDHLLLSFHGLPERHLHKLDPSGHCLKGEDCCRSASPEVLANCYRAQCLRSAELFAQRMGLRPEQWSVSFQSRLGRAKWIEPYTESRLDELAAQGVKKLLVMCPAFVADCIETLEEIGDRGREQFVEAGGESLQLVPCLNDHPDWAAALKVLCERAPLMI

SEQ ID NO: 181979 - protein, 307 aa, Unknown
  Bacterial polypetide isolated from the Sargasso Sea
MDNKHPEVKFGKKGVLIVNLGTPDSTNWWDIRKYLKEFLSDRRVIDVNPIVWQIILNLFILTFRPSKTAHAYKQIWRKDTNESPLLYFTKRQSEELGKKIGNEKIIVDFAMRYGNPSIQFKLNQLKEKGCENIIILPLYPQYAAATTATVCDEVYRSLMKMRWQPSLQIIPHYESEPMYIIALIKSIKKKLANINWKPDLIISSYHGIPKSYFKKGDPYHCYCQKTTRLIKEQFDEIEIQTTFQSRFGPQEWLTPYTDKTIEDLPSRGIKNLLVICPGFASDCVETLEEINIQAKEAFIEKGGKNFD

SEQ ID NO: 181980 - protein, 348 aa, Unknown
  Bacterial polypetide isolated from the Sargasso Sea
MLACRGIWLIKGNTLTSPSPAFGVLLVNLGTPDEPTPKAVKRFLKQFLSDPRVVDLSPWLWQPILQGIILNTRPAKVAKLYQSVWTEQGSPLMVISEQQAQKLATDLSATFNQTIPVELGMSYGNPSIESGFAKLKAQGAERIVVLPLYPQYSCSTVASVFDAVAQYFTQVRDIPELRFSKQYFDHEAYIAALAHSVKRHWKTHGQADKLILSFHGIPLRYATEGDPYPEQCRATAKLLAQALELTDGQWQVCFQSRFGKEEWLTPYADELLADLPRQGVKSVDVICPAFATDCLETLEEISIGGKETFLHAGGEAYHFIPCLNDDELHIELLRQLVQEQAQPWIRAD

SEQ ID NO: 181981 - protein, 333 aa, Unknown
  Bacterial polypetide isolated from the Sargasso Sea
MEINHPKINYGKTGVLIVNLGTPNSTNWFDIRKYLKEFLSDRRVIEVNPIIWQLILNLFILNFRPSKTAKAYKEIWMKDQNMSPLRYYTQNQSKKLSRVFKNENFIIDFAMRYGDPSIFSKMNELQKKGCENIIILPLYPQYAAATTATVCDEVYRSLMKMRWQPSLQIIPHYESEDLYIDALVKTIKNKISEINWKPDIILASYHGIPKKYFDKGDPYHCYCQKTSRLIMEKFKDIKILTTFQSRFGPQEWLQPYTDKTLEELPSTGTKNILVICPGFAADCVETLEEISIQGKESFMKSGGNNFDMIPCLNDSEDHINLLSLLIKRHIIKK

SEQ ID NO: 181982 - protein, 327 aa, Unknown
  Bacterial polypetide isolated from the Sargasso Sea
MGHATRGKVGVLLLNLGTPDAPTASAVRRYLAEFLSDPRVVEIPKLLWMLILHGIVLRVRPAKSAALYQKVWTEAGSPLMDISLRQTAKLSDKLTADGYPVSVHLAMRYGNPSVANTLKDMHKQGIDKIVVLPLYPQYAAPTTGSAFDAIAKELCQWRYLPSLHFIHTYHDNPEFIAALVNSIRADFDKHGKPQKLVLSYHGMPERNLHLGDPYYCFCMKTTRLVAEQLGLAKDEFAITFQSRFGKAKWLQPYTDATMAALPSQGVRDVAIVCPAFSADCLETLEEIVGENGHIFTHAGGEKFRYIPALNDNDDHISMMASLVKPYL

SEQ ID NO: 181983 - protein, 333 aa, Unknown
  Bacterial polypetide isolated from the Sargasso Sea
MDKIGVLLMNLGGPERITDVGPFLYNLFSDPEIIRTPFPVFQKPLAWLISTLRSTTSQQAYLSIGGGSPIRRITEQQARELQSKLRNKGFNATTYIAMRYWHPFTESAIADMKADGIDQVVVIPLYPHFSISTSGSSFRELKKLRDSDDEFKKVPMRCVRSWFSQSGYLKSMVELISEQISLCESPSKAHIFFTAHGVPKSYVEEAGDPYKQQIEDCSLLIINELEKCLGHGNPHTLSYQSRVGPVEWLKPYTEEVLADLGKSNVNDLIVVPISFVGEHIETLQEIDIEYKEIAEKAGIKNFRRVKALNTHPTFIEGLSDLVISCLEGPLVNN

SEQ ID NO: 181984 - protein, 340 aa, Unknown
  Bacterial polypetide isolated from the Sargasso Sea
MGKAVILFNLGGPDKLESVEPFLFNLFNDPAIISIPSIIRYPLAKFISKRRAPIAKNIYKEIGNKSPILELTQNQAKSLENSLLKKGDYKCFIIMRCWHPRAENVIKEVKQYNPEEIILLPLYPQYSASTSGSSIKEWNDLCKKENYKVKTKTVCCYPTEDNFLESHANLIKKTIKNLENKDFKLLFSAHGLPEIKIKKGDPYQWQVEQTVEGIMSKLTDENPDYIISYQSRVGPLKWIGPSTDDIIIKYSKEKKGIVIVPVAFVSEHSETLVELDIEYKKLAEKNGCSFYKRVPALGIEEDFIKGLTELVLQQETKGNFVSSIMCPNKYKKCPCLAIKS

SEQ ID NO: 181985 - protein, 391 aa, Unknown
  Bacterial polypetide isolated from the Sargasso Sea
MDKVGVLLMNLGGPERINDVGPFLYNLFSDPEIIRTPFPAFQKPLAWLISTLRSTTSQQAYLSIGGGSPIRRITEQQARELQSKLRDKGLNATTYIAMRYWHPFTESAIADMKADGIDQIVVLPLYPHFSISTSGSSFRELKKLRDSDNDFKKIPMRCIRSWFSQSGYLKSMVELISEQILLCESPSNAHIFFTAHGVPKSYVEEAGDPYKQQIEDCSLLIINELEKYLGHGNPYTLSYQSRVGPVEWLKPYTEEVLEDLGRSKVNDLIVVPISFVGEHIETLQEIDIEYKEIAEKAGIKNFRRVKALNTHPTFIEGLSDLVVSCLEGPLVNIEDASKLPEKVKLYPQEKWQWGWNNSSEVWNGRVAMIVFLILFIELISGSGPLHRLGIL

SEQ ID NO: 181986 - protein, 344 aa, Unknown
  Bacterial polypetide isolated from the Sargasso Sea
MSPHIPDGHPSIPKEKIGVLLLNLGTPDATDFWSIRRYLKEFLSDPRVIEVNRILWSVILNLIILNIRPKISAKAYKEIWLEAADESPLRYYTRAQSEALSRRFTEMGVSVEVDWAMRYGTPAIGDRLEEMRAKGCRKILLLALYPQYSATTTASAHDKAFQALQSMRWQPVIRTSPAYYNNEQYIKVLGKSIREHIKVLDWEPDVLLTSFHGLPKRYLDAGDPYHCQCAQTSRLIAEELGWNAEKVRLAFQSRFGREEWLKPYIQEVITELPAKGIKKIAIISPGFISDCVETLEEVAIGLKESFFEAGGEKFTYVPCLNSSEDSIDLLQKLVLNELGGWVPE

SEQ ID NO: 181987 - protein, 329 aa, Unknown
  Bacterial polypetide isolated from the Sargasso Sea
MKNHPKINFGKNGVLLVNLGTPDSTSWWDIRKYLKEFLSDKRVIEVNPFIWQIILNFIILNFRPSKTAKAYKEIWMKEENMSPLRYFTIKQSEKLKSKIGSENVIVEYAMRYGNPSIKNTIIKLQKAGCENLIVLPLYPQYAAATTATVCDEVYRTLMQMRWQPNLQIIPHYESEPLYINALVNSLNNKVENIKWTPDLVIASYHGIPKKYFEKGDPYHCYCLKTTRLLSEKFKSIPITTTFQSRFGPQEWLQPYTDKTLESLPKEGKKNILVICPGFSSDCVETLEEISIQGKDSFIKSGGLNFDTVPCLNDNADQINLLEHLVSKYL

SEQ ID NO: 181988 - protein, 332 aa, Unknown
  Bacterial polypetide isolated from the Sargasso Sea
MENKNEHPPVNFGKTGVLIINLGTPDSTSWLDIRKYLKEFLSDRRVIEVNPIIWQFILNVFILTFRPSKTAKAYKEIWMKDKNISPLLHYTQKQAEKLSSIISEENLIVDYAMRYGNPSIRSKIATLHEMGCENLIILPLYPQYAAATTATVCDEVYRTLMKMRWQPSLKIVPHYESDPLYIEALVNSLNKKIKEINWKPDLILASYHGIPQKYFDKGDPYHCYCHKTTRLISEKFTSVEIKTTFQSRFGPEKWLQPYTDKTLESLPKEGKKNVLAICPGFSSDCVETLEEIQIQGKESFLESGGENFDMVPCLNDNEDHIILLKSLIQKNI

SEQ ID NO: 181989 - protein, 312 aa, Unknown
  Bacterial polypetide isolated from the Sargasso Sea
NLGTPDSTKWLDIRKYLKEFLSDRRVIEVNPIIWQLILNIFILTFRPSKTAKAYKEIWMKDKDMSPLRYFTERQAKKLSEQIGNEKIIVDFAMRYGNPSIKSKIHKLHKEGCENLIILPLYPQYAAATTATVCDEVYRTLMKMRWQPNLKIIPHYESEPLYIEAIKNSIKKKINEINWKPDLIIASYHGIPKKYFDKGDPYHCYCHKTTRLISEKYSDIEIKTTFQSRFGPQEWLQPYTDKTFEALPKEGKKNILVICPGFASDCVETLEEISIQGKESFIKSGGENFEMIPCLNDSEDHIALFKYLLMKNI

SEQ ID NO: 181990 - protein, 327 aa, Unknown
  Bacterial polypetide isolated from the Sargasso Sea
MGHAKRGKVGVLLLNLGTPDAPTASAVRRYLAEFLSDPRVVEIPRLLWMLILHGIVLRVRPAKSAALYQKVWTEAGSPLMDISLRQTAKLSDKLTADGHQVSVHLAMRYGNPSVANTLQTMHQQGIDKLVVLPLYPQYAAPTTGSAFDAIARELTQWRYLPSLHFIHSYHDNPDFITALVNSIRADFEQQGKPQKLVLSYHGMPERNLHLGDPYYCFCMKTTRLVAEQLGLTADEFVMTFQSRFGKAKWLQPYTDATMQALPSEGVRDVAIVCPAFSADCLETLEEIVGENGHIFANAGGEKFRYIPALNDNDDHISMMANLVKPHL

SEQ ID NO: 181991 - protein, 370 aa, Unknown
  Bacterial polypetide isolated from the Sargasso Sea
MSRVGVVLLNLGGPERIQDVGPFLYNLFADPEIIRLPSPALQKPLAWLISTLRSGKSQEAYRSIGGGSPLRRITEQQARELQSLLRQRGLDATTYVAMRYWHPFTESAVADMKADGMDEVVVLPLYPHFSISTSGSSFRELQRLRQGDAAFEQLPIRCIRSWFDHPGYIKAMAELIAEEVRNSDDPEKAHVFFSAHGVPKSYVEEAGDPYQQQIEACTDLIMKSLADHMGHSNPHTLAYQSRVGPVEWLKPYTEEALEQLGEAKTNDLVVVPISFVSEHIETLEEIDIEYRELATEAGVVNFRRVRALDTYPPFIEGLADLVTTSLEGPEVSLDAAAELPTKVKLYPQEKWEWGWNNSSEVWNGRLAMLG

SEQ ID NO: 181992 - protein, 348 aa, Unknown
  Bacterial polypetide isolated from the Sargasso Sea
MLACRGIRLIKGNTLTSPSPAFGVLLVNLGTPDEPTPKAVKRFLKQFLSDPRVVDWSPWLWQPILQGIILNTRPAKVAKLYQSVWTEQGSPLMVISEQQAQKLATDLSATFNQTIPVELGMSYGNPSIDSGFAKLKAQGAERIVVLPLYPQYSCSTVASVFDAVAQYFAKVRDIPELRFSKQYFDHEAYIAALAHSVKRHWKTHGQADKLILSFHGIPLRYATEGDPYPEQCRTTAKLLAQALGLTDGQWQVCFQSRFGKEEWLTPYADELLADLPRQGVKSVDIICPAFATDCLETLEEISIGGKETFLHAGGEAYHFIPCLNDDELHIELLRQLVQEQAQPWIRAE

SEQ ID NO: 181993 - protein, 242 aa, Unknown
  Bacterial polypetide isolated from the Sargasso Sea
MQALRKQGVERILVLPMYPQYSGTTTATAFDEVFRVLGEMRNQPELRLVKHFHDDPAYINALHQQVGAYWAQHGAPDFAHGDKLVLSFHGVPRRTLELGDPYHCECLKTGRLLGEALGLQPGQYLVTFQSRFGRAEWLQPYTAPTLEELGRVGTHRVDVFCPGFPADCLETLEEIAMEGQSTFRVAGGKEFHYIPCLNDSEAWIAGIADIALAHLQGWPLTLTHPHVLEASRMRAQSKGAAA

SEQ ID NO: 181994 - protein, 178 aa, Unknown
  Bacterial polypetide isolated from the Sargasso Sea
MKIVLLLIINELEKCLGHSNPHTLSYQSRVGPVEWLKPYTEEVLADLGRSNVNDLIVVPISFVGEHIETLQEIDIEYKEIAEKAGIKNFRRVKALNTHPTFIEGLSDLVISCLEGPLVNLEEASQLPEKVKLYPQEKWQWGWNNSSEVWNGRVAMIIFLVLFIELISGSGPLHKLGIL

SEQ ID NO: 181995 - protein, 199 aa, Unknown
  Bacterial polypetide isolated from the Sargasso Sea
MYPQYCAATTGSTFDEVTNVLQKWRWIPEMRFINQYFEEKNYIEALSNSIKSFWKKTSKPQKIIFSYHGIPKRYLTNGDPYHCFCLKTTRLVKEHMGLSDDEIMTTFQSRFGREEWLKPYTSETLKELPKQGIKNIHIISPGFSSDCLETLEELEEENKEYFMESGGENYHYIPCLNDHDDHIDVFVNLIKKHIQGWPL

SEQ ID NO: 181996 - protein, 391 aa, Unknown
  Bacterial polypetide isolated from the Sargasso Sea
MDKIGVLLMNLGGPERITDVGPFLYNLFSDPEIIRTPFPVFQKPLAWLISTLRSTTSQQAYLSIGGGSPIRRITEQQARELQSKLRDKGFNATTYIAMRYWHPFTESAIADMKADGIDQVVVIPLYPHFSISTSGSSFRELKKLRDADDEFKKVPMRCVRSWFSQSGYLKSMVELISEQISLCELPSKAHIFFTAHGVPKSYVEEAGDPYKQQIEDCSLLIINELEKCLGHSNPHTLSYQSRVGPVEWLKPYTEEVLADLGRSNVNDLIVVPISFVGEHIETLQEIDIEYKEIAEKAGIKNFRRVKALNTHPTFIEGLSDLVISCLEGPLINIEEASQLPEKVKLYPQEKWQWGWNNSSEVWNGRVAMIIFLVLFIELISGSGPLHKLGIL

SEQ ID NO: 181997 - protein, 80 aa, Unknown
  Bacterial polypetide isolated from the Sargasso Sea
MQAATVVINRRALRHNLQRLRELAPASKLVAVVKANAYGHGLLETARTLPDADAFGVARLEEALRLRAGGITKPILLLEG

SEQ ID NO: 181998 - protein, 307 aa, Unknown
  Bacterial polypetide isolated from the Sargasso Sea
GRGKADAYGHGAVACARALDGEADAFGVACIEEALELRAAGISGPILLLEGFFDADELPLIVQHKLWFAVAAPWQVDAVEAFQTDATLQIWLKLDSGMHRLGLAPAEFRAAHARLSALPQVAPMVLMSHMARADELDSPRTREQADLFAATIEGLAGETSLCNSPALLGWPDVRSDWVRPGLMLYGANPLAAHNAYTERLRPVMTMQSKIFATREIAAGEPVGYGARFVAERPTRVGVVALGYADGYPQFAPNGTPVQIDGQPGHLIGRVSMDMLTVDLTDLPQAGVGSTVTLWGDAPPLDVLAPLC

SEQ ID NO: 181999 - protein, 306 aa, Unknown
  Bacterial polypetide isolated from the Sargasso Sea
NFSQIKKLTSNSKVMAIVKADAYGHGLVRVASALCNADAFGVACIEEAEQLRAASIKTPIILLEGPYQPDDLSLILNLNLDIVVHNEYQLEILENSKLEGSIRAWLKIDTGMHRLGFSESDAKNALSRLISCRNIKKNPILMTHLAIANEKGKELTTKQLASFKEISNIENMEKTISNSAAVINYPEAHLDWVRPGLMLYGVSPLVNSKGYEHNLKPVMTLESEIISIKFLSKGETVGYGATWTCPEDMLIGIIAAGYGDGFPRHAKSGTPVLVNNTRCKLIGRAFMDMMTVDLRNQPSAKIGDKV

SEQ ID NO: 182000 - protein, 94 aa, Unknown
  Bacterial polypetide isolated from the Sargasso Sea
RLGVVAMGYGDGYPRAAPSGTPVLVNGREVPIVGRVAMDMICVDLGPQAQDKAGDAVVLWGEELPVERIAEITKVSAYELITRLTSRVAMKYLD

SEQ ID NO: 182001 - protein, 111 aa, Unknown
  Bacterial polypetide isolated from the Sargasso Sea
AGEPVGYGGTWLSERDTLLGVVAMGYGDGYPRAAPSGTPVLVNGREVPIVGRVAMDMICVDLGPEAQDKAGDSVILWGEGLPVERIAEMTKVSAYELITRLTSRVAMKYID

SEQ ID NO: 182002 - protein, 207 aa, Unknown
  Bacterial polypetide isolated from the Sargasso Sea
MRLMTHFASADEPTLDSTQQQIDLFLKTVEGLAGELCLANSAGTLAWPQSHGHWIRPGIALYGVSPMEQGRAEQHQLKAVMSFSSSVIAVRDVKQGDKVGYGGTWTAPTDTRLAVVAVGYGDGYPRAASNGCPVLIKGQRYPIVGRVSMDMTTVDIGHADVQIGDEVVLWGADLPVEEIAEQVQTIPYELLCNITSRVEFRYLTAET

SEQ ID NO: 182003 - protein, 356 aa, Unknown
  Bacterial polypetide isolated from the Sargasso Sea
MPRPLSATIHTSALANNLAVARRYAPKSKIWAVVKANAYGHGLARAFPGLRATDGFGLLDLEEAVKLRELGWAGPILLLEGFFRPTDIDVIDRYSLTTALHSDEQLRMLEMARLSKPVNIQLKMNTGMNRLGYTVEKFRSAWERARACQGVGQITLMTHFSDADGERGIAHQMEAFERGAQGIAGARSLSNSAATLWHPAAHFDWVRPGIMLYGASPSGVTSAIAGTGLQPAMTLTSELIAVQTLVEGNTVGYGSAFKARAPMRIGVVACGYADGYPRVAPEGTPVIVDGVRTRIVGRVSMDMLTVDLTPIPTANIGSRVELWGNALPIDDVAQACGTIGYELMCAVAPRVPVRAE

SEQ ID NO: 182004 - protein, 356 aa, Unknown
  Bacterial polypetide isolated from the Sargasso Sea
MPRPISATIHTAALANNLSVVRRFAGPSKVWAVVKANAYGHGLARVFPGLRGTDGFGLLDLDEAVKLRELGWAGPILLLEGFFRSTDIDVIDRYSLTTTVHNDEQMRMLETARLSKPVNVQLKMNSGMNRLGYVPEKYRAAWERARACPGIGQITLMTHFSDADNERGVAEQLATFERGAESIAGARSLANSAAVLWHPDTHFDWVRPGIILYGASPSGLSSDIADTGLKPAMTLASELIAVQTIGKGQAIGYGSTFSAQAPMRIGVVACGYADGYPRVAPEGTPVIVDGIRTRIVGRVSMDMITVDLTPCPQAGVGARVELWGNALPIDDVARHCGTIGYELMCAVAGRVPVRAE

SEQ ID NO: 182005 - protein, 359 aa, Unknown
  Bacterial polypetide isolated from the Sargasso Sea
MTRPSRVIINIKALEQNFSRIKELAPQSKVMAIIKADAYGHGIVRVAKTLRDADAFGVACLEEAEQLRQSSIKTPIVLLEGPYKPDDLALIAKFKLDIVIHNEYQIELLEKAEIEGSINAWLKIDTGMHRLGFPVEKVDVMLNRLLLCKNINSRPILMTHLATANEKKNNLTQQQLDAFKKISKVIDGEKTVANSAALINFPEAHFDWVRPGLMLYGVSPIVGSSGIDHGLKSVMTLESEIISVQNLMKGEPVGYGATWRCPEDMPVGIIAAGYGDGFPRHAKTGTPILVNNVRCPLIGRASMDMLTVDLRNQPNTKIGDKVILWGDSLPIEEIAVHAETIPYELLCGVHKRLQFVEHN

SEQ ID NO: 182006 - protein, 268 aa, Unknown
  Bacterial polypetide isolated from the Sargasso Sea
MAANNLQTAVHTWEQLEALEQADLPAPVVAWLKLDTGMHRLGVRADEMPAFIERLARCKNVVQPFNIMTHFSRSDELEQPTTREQIDLFSQLTAPLLGERAMANSAGILAWPDSHCDWIRPGVILYGVSPFPNTVAADYDLQPVMTLKTQLIAVRDHKAGEPVGYGANWVSDRDTRLGVIAIGYGDGYPRMAPNGTPVLVNGRIVPLVGRVSMDMTTVDLGPGATDKAGDEAVLWGEGLPVERVADQIGTIPYELITKLTSRVFMEYV

SEQ ID NO: 182007 - protein, 369 aa, Unknown
  Bacterial polypetide isolated from the Sargasso Sea
MNTVTASIDIDALQHNFAVVRRHAPHSKIIAVLKANAYGHGLLPVAHALAQADAYAVARVEEALVLRANAITKPILVLGGFFSAEALPLLAKHELQTTLHTWEQLALLEQASLPAPIKVWLKLDTGMNRLGLRAEELPTFIERLSHCRNVVQPFHLMTHFSQSDEQDTQATQLQIEEFNRLSAHLPGERAMANSAGILAWPASRSDWIRPGFMLYGASPFAGQLAADHDLRPVMTLKSQLIATRACAQGEAVGYGGHWVADRKTTLGVVAAGYGDGYPRMAPEGTPMLINGRRVPIVGRVSMDMITVDLGPAASDKVGDEVTLWGEGLPVEQVAEKIGTIPYELLTRLTSRVHLTHCDKREQMPMLKLA

SEQ ID NO: 182008 - protein, 359 aa, Unknown
  Bacterial polypetide isolated from the Sargasso Sea
MRLATAEINLTALAHNLAQVKRFAPNSKVMAVLKANAYGHGLVKIAQHLNDADAFAVARIDEALALRAGGLTKPIVLLEGFFNKDDLPILLANNFQTIIHDGYQLAALEEAELEAPLLCWLKVNTGMHRLGIAPEQFDEFYKRLQKTPNANNTVNLMTHFACADDVNNTKTAQQISQFDCLVNNINQAHCLSNSAGIIAWPNAHGDWVRPGLMLYGVSPMANALGEQHQLKPVMRLTTRVIAVRHVPANEAVGYGGRWKSDKATQLAVVAMGYGDGYPRHAKEGTPVVIGKQRYGIVGSVAMDMISVDIGQNEHNIKVGDRVTMWGPELPVEEIAQCADTIPYELLCNITPRVSYEYQP

SEQ ID NO: 182009 - protein, 358 aa, Unknown
  Bacterial polypetide isolated from the Sargasso Sea
MKPFPRAEISSSALQNNLAVLRQQASRSQVMAVVKANGYGHGLLNVANCLHTADGFGLARLEEALELRAGGVKARLLLLEGFFRSTDLPLLVAHDIDTVVHHESQIEMLEQATLSKPVTVWLKVDSGMHRLGVTPEQFTQVYARLMACDNVAKPIHLMTHFACADEPENHYTQVQMQTFNQLTADLPGFRTLANSAGALYWPKSQGDWIRPGIALYGVSPVTGDCGANHGLIPAMNLVSRLIAVRDHKAGQPVGYGCYWTAKQDTRLGVVAIGYGDGYPRNAPEGTPVWVNGRRVPIVGRVSMDMLTVDLGADATDLVGDEALLWGAALPVEEVAEHIGTIAYELVTKLTPRVAVCLA

SEQ ID NO: 182010 - protein, 333 aa, Unknown
  Bacterial polypetide isolated from the Sargasso Sea
SSSQVMAVVKANGYGHGLLNVAHCLHTADGFGLARLEEALELREGGIKARLLLLEGFFRSTDLPLLVEHDIDTVVHHESQIEMLEQANLTKPVTVWLKVDSGMHRLGVTPEQFTAVYARLAACENVAKPVHLMTHFACADEPDNHYTQVQMQTFNQLTADLPGFRTLANSAGALYWPKSQGDWIRPGIALYGVSPVTGDCGANHGLIPAMNLVSRLIAVRDHKAGQPVGYGCYWTAKQDTRLGVVAIGYGDGYPRNAPEGTPVWINGRRVPIVGRVSMDMLTVDLGQDAADQVGDDVLLWGQALPVEEVAEQIGTIAYELVTKLTPRVAVCLA

SEQ ID NO: 182011 - protein, 236 aa, Unknown
  Bacterial polypetide isolated from the Sargasso Sea
EVDSGMHRLGVTPEQFTQVYARLMACDNVAKPIHLMTHFACADEPENHYTQVQMQTFNQLTADLPGFRTLANSAGALYWPKSQGDWIRPGIALYGVSPVTGDCGANHGLIPAMNLVSRLIAVRDHKAGQPVGYGCYWTAKQDTRLGVVAIGYGDGYPRNAPEGTPVWVNGRRVPIVGRVSMDMLTVDLGADATDLVGDEALLWGAALPVEEVAEHIGTIAYELVTKLTPRVAVCLA

SEQ ID NO: 182012 - protein, 373 aa, Unknown
  Bacterial polypetide isolated from the Sargasso Sea
MPRPIVAHIRPDAVRHNLDFIRRTAAQSRVWAVIKANAYGHGIERIYPGLAAADGIALLDLDEAVRVRELGWDKPVLLLEGIFEPADVELADRHRLTVAVHCDEQLDLLIAARPQQPIDIQLKMNSGMNRLGYRPAAFRAAWERAAGAPSIGKITLMMHFANADEGEVDWQLDQFDAATAGIPGERSTSNSAAVLWHPRAHRDWVRPGTILYGASPTGAARDIADTPLMAAMTLTSKIIGVQTLSPDETVGYGRRFTADRPMRIGVVACGYADGYPRHAPTGTPIAVDGVMTRVVGRVSMDMLTVDLTPCPNAGIGSGVELWGDQVKVDDVAEASGTIGYELMCALARRVPVVIVPPGASSEQPTLRTGSYGR

SEQ ID NO: 182013 - protein, 241 aa, Unknown
  Bacterial polypetide isolated from the Sargasso Sea
EIRRLLPDLHYIYAFDNVAFPYGEKSEEFIVERVVEIVTAVQQRYPLSLAVIACNTASTVSLPALREKFAFPVVGVVPAIKPAARLTANGVVGLLATRATVKRSYTHELIARFANECQIAMLGSAELVELAEAKLHGETVSLEELRRILRPWLRMSEPPDTVVLGCTHFPLLQEELLQVLPEGTRLVDSGAAIARRTAWLLEHEAPDAKSTDENVAFCMAMTTEAEQLMPVLQRYGFKTLE

SEQ ID NO: 182014 - protein, 227 aa, Unknown
  Bacterial polypetide isolated from the Sargasso Sea
YISDKKNCPYGEKSKKEIDEISIYNSRFLIDRNCKIIVVACNTATTNSISKLRRKFKVPFIGIEPAIKPAALNSKTKKVGVLATKGTLTSNLFFKTSSDQIADVELINTYGEGLIELIEKGDCGNELNVLLKKYLIPMIDYGIDQLVLGCTHYPLVKDSIKNIVGEGINVVDCNDAVAMQTKRIIELNNLMHNNKLDSPNHCFFNSGEDDSSIKEILQNKYEIFKFE

SEQ ID NO: 182015 - protein, 276 aa, Unknown
  Bacterial polypetide isolated from the Sargasso Sea
METGLSQPILVFDSGIGGLSVLAEIRKLLPHHDYCYLFDNARLPYGELEEQELVSGCVALIDQVVERTHAAIVVVACNTASTVVLPALRATLSIPVVGVVPAIKPAAQLSKSKRIGLLATPGTVKRHYTYELISQFADDCHVELFGSSELVLMAEQKIATGQLDMARLTQVLSPIVEADLDVLVLGCTHFPMLRDELQQVLGQGVTLLDSGEAIAKRVKTLLAETNSEQQVQEDAHCDAHMQAFYTKAEISEGLATTLVDCGFSTLERITTINSNG

SEQ ID NO: 182016 - protein, 229 aa, Unknown
  Bacterial polypetide isolated from the Sargasso Sea
MSSHPIGFFDSGIGGITLWKKITSLLPNENTIYISDKKNCPYGEKSKKEIDEISIYNSRFLIDRNCKIIVVACNTATTNSISKLRRKFKVPFIGIEPAIKPAALNSKTKKVGVLATKGTLTSNLFFKTSSDQIADVELINTYGEGLIELIEKGDCENELNVLLKKYLIPMIDYGIDQLVLGCTHYPLVKDSIKNIVGEGINVVDCNDAVAMQTKRILELNNLMHNNTLD

SEQ ID NO: 182017 - protein, 265 aa, Unknown
  Bacterial polypetide isolated from the Sargasso Sea
MDNRPIGVFDSGLGGLTVVKAVKELLPNESIIYFGDTARLPYGVKSQSLVEQYSKEIIKFLLDKNAKAIIIACNTATAMALNILKNEFINVPIIGVIEPGSEKAISETITKKIGVIGTISTISSGAYEKAIHQKDNRAEIISKACPLFVPFVEEGLINGSAINEIAKHYLYSFNDKVDTLILGCTHYPLLKDIIFDNTENIKLIDSASSVAEFAYKVLVNHKLLSGEKNLGGLECYVTDLPMRFEELGNIFFGSDIKNVQLVDEF

SEQ ID NO: 182018 - protein, 271 aa, Unknown
  Bacterial polypetide isolated from the Sargasso Sea
MHQRGAQVANILVFDSGMGGLTIYREIRRALPAHNYFYCFDNANFPYGELSEAALTEVCTRLVSHMVVEHAIDLVVIACNTASTIALPSLRAAMTVPVVGVVPAIKPAAALTRNGCIGLLATPGTVSREYTHELIAQFAPGKRVLLKGATELVVEAEHKLAGLPVNMALLREVLADWLEGEEHPDTLVLGCTHFPLLDEEIRQLMPACQLVDSGSAVAKRVAHLLAGLVTTPTRLEDVGGKAYCTRLDAQTQKLTAPLQAWGLSSLEEVRF

SEQ ID NO: 182019 - protein, 262 aa, Unknown
  Bacterial polypetide isolated from the Sargasso Sea
MRIGFIDSGVGGLSILEAVRALVPADYFYMMDNRYLPYGTKSELFIRQRLKQLTEHLLTHQVDLIVIACNTATTQAVDWLRQQFDLPFVGVVPAIKPAAFYCAGEKMALLATPATVKGHYIKKLVADYAGESQVQLVGSSELVMLAEQKVWAGADVTSAVAQVIKDSGLNEFAPKAIILGCTHFPFLAEEIRAAFTDAPKLFDTADAIARRVQHLTSAITDLYKEKGKDRFIATQELTEQQKLRVKQMGFGQQSCWPDVYQD

SEQ ID NO: 182020 - protein, 286 aa, Unknown
  Bacterial polypetide isolated from the Sargasso Sea
MKRITFIKMNGLGNDFVIMDSRYLNLSLETLSIDLICDRYRGIGCDQLLILSESNSEADVNMLIFNADGTEAEACGNGLRCVASYVMNLLNSQHVVIETTAGLLPAWRQSNGDIRVSMGIPKFDWNSIPLAKECDPLAAPISRGALKSPTCINIGNPHAVFFVDDADSVNLVELGPELEVHPMFPNRSNIEVVSILDKNTIRMRVWERGAGVTAACGSGACAAMVAANIRGLVGSSAKIKLDGGILRVELEENGAVFLSGPIATSFSGVIEPPYISDYIIEETSNE

SEQ ID NO: 182021 - protein, 135 aa, Unknown
  Bacterial polypetide isolated from the Sargasso Sea
MELEFTKMHGLGNDFMIIHWPDGMALPSKDIVRRLADRRIGIGFDQLLVLQTPIQSGVAVYYRIFNSDGSEVEQCGNGARCIAWHLAAESESSELVLESMAGIVEAKLQSDDTVAINLGEPNFMPTALPFLVDAE

SEQ ID NO: 182022 - protein, 203 aa, Unknown
  Bacterial polypetide isolated from the Sargasso Sea
QCGNGARCFARFVRMKGLTNKHKISVSTKSGNLTLYIEKDGQVTVNMGHPNFEPSKIPLKASKRELTYIIRAEEHTVFSGAVSMGNPHCVLEVDDITTAQVDVLGPLLENHERFPQRANIGFMQVISQEHIKLRVWERGVNETLACGTGACAAMVIGHMQSKLSSAVQVDLPGGTLQIRWSGEGHPVRMTGPAEHVFDGQVAL

SEQ ID NO: 182023 - protein, 271 aa, Unknown
  Bacterial polypetide isolated from the Sargasso Sea
MTIPFIKMHGLGNDFVIIDHRLSTNVLDSSQITHLGNRRRGIGFDQLLTIFPARGDGDVFLKINNPDGSEAEACGNGTRCVADLVMREGNLSKITIETVAGKLYCHRTRDNNVSVNMGIVKTNWDEIPLIQPADTSRVQLEDAPFTECCCVNIGNPHAVFFCDDADAVDLRAIGPILEKNKMFPKGANIEFATVQSNNQIRMRVWERGAGITEACGSGACAVLVASARNGLTGRRAEVILDGGSLDIEWVDDGSILMTGPTTVSFRGKISV

SEQ ID NO: 182024 - protein, 229 aa, Unknown
  Bacterial polypetide isolated from the Sargasso Sea
MHGLGNDFMVIDAVSQNVFLTKEQIKKLADRNFGVGFDQLLMVEPPYDPDLDFHYRIFNADGSEVEQCGNGARCFAKFVRHKGLTNKYKISVSTKSGKITLYIEQDGQVTVNMGVPQFDPVKVPFKAQKQELNYILHSEDATTLCGVVSMGNPHAVILVDDIQTAPVHQWGPVFENHERFPERANIGFMQVLSPSHVKLRVWERGAGETLACGTGACAAAVVGQMQKKL

SEQ ID NO: 182025 - protein, 297 aa, Unknown
  Bacterial polypetide isolated from the Sargasso Sea
GLGNDFLILEGRAGQLPSLITSPDPDWVRLICDRRFGVGADGLILALPADGEADLRMRILNADGSEAEMCGNGIRCLARFLADSDGNPPGTIWSIETLAGVIRPQLQSDGQLCVDMGPPFLQPGDIPTTLEMGPRGCPQGVAVVGDDELEIAAVGMGNPHVIVPVQDLQSIPFDRWGHELEQHPLFPAKTNVHFLQIHSSRSLEIRVWERGAGPTLACGTGACATLVAASLLGLCDDSAEVMLPGGPLQISWPDRQGPVLMTGPAKAAFDCVLSPDLMPSNGAIDSAVSVGTVQAAS

SEQ ID NO: 182026 - protein, 273 aa, Unknown
  Bacterial polypetide isolated from the Sargasso Sea
MQKINFIKMHGLGNDFVIIDRRVNEINITKELISKLSDRKSGAGCDQLITINNSSEKDNDIDAEIKIYNPSGDQAEACGNGTRCVAKLLFEELNKNNIKILSDAGILVAKQKDNNVSVNLGKLTTNWKKIPIIKDMDTMNVPITINDFSNGVAVNIGNPHLVFFGQNINDVDLETIGPNIENHKFFPNKINVELVEIINRNKIKLRVWERGAGLTLACGSGACASVYAGMLKNLLENDVEVILERGSLYINIVNDEAIMTGPAEISFYGSLDY

SEQ ID NO: 182027 - protein, 194 aa, Unknown
  Bacterial polypetide isolated from the Sargasso Sea
MTAFLKMHGLGNDFIVLDAREPATGIPDVISEAASTALADRHFGIGCDQILVIRSSQKADIFLQILNSDGSVAMACGNGTRCVADHIMQECEQDRLSIETDVGILQSWRPAEYPNQIAVDMGPAYLDWAAVPLASEANTLAVDLGPLAPATAVCHSLGNPHAVLFVDDAEAVDLDNVGPQLEHHPLFPERANIS

SEQ ID NO: 182028 - protein, 199 aa, Unknown
  Bacterial polypetide isolated from the Sargasso Sea
MEIPFTKMHGLGNDFVVVDNQSLEFRLTKPSVQKIADRRRGIGFDQLLTIEPARRNGDLFLDIKNPDGTSAEACGNGTRCVASLIMSKRQANTLRIETVGGLLICERTKTGDVTVDMGEPSTEWHEIPLAREANTKDLVLENMPHQIFTCVNMGNPHAVLFSENCELFELEKIGPKIECHEMFPDKINVEVATVENKNK

SEQ ID NO: 182029 - protein, 229 aa, Unknown
  Bacterial polypetide isolated from the Sargasso Sea
MKISFTKMHGLGNDFMILDSTGKSLELSAEKIKVLSNRNFGVGFDQLLLIEKATSETVDFHYRIFNIDGSEVQHCGNGARCFATYVHEKGLTDKNPIKVSTTNRTLSLTINDDGEVSVDMGSPEFNPAMIPFLSASKLPIYERSIEISGEESVILFSALSMGNPHAVISVEDLTKTAVKDIGEALCNHSDFPEGVNVNFMEILSRNEIRLRVFERGTGETLACGTGACA

SEQ ID NO: 182030 - protein, 255 aa, Unknown
  Bacterial polypetide isolated from the Sargasso Sea
FQLRPKLIRKLSDRIFGVGFDQLLLVEKASTSEVDFHYRIFNTDGTEVEHCGNGARCFATFVRDKGLSNKDLIDVSTINRNLKLTFHDDGEISVDMGHPEFDPSKIPFLCDSRLNIYERFIKISGVKTTISFSVLSMGNPHAVVCVEDVANTAVKDIGKALGSHPDFTEGVNVGFMEILSRDTIQLRVFERGTGETLACGSGACAAVVVGRLLEKLNSKVIVNLPGGQLTVCWDLSSSVIMKGPTQTVYEGTIEI

SEQ ID NO: 182031 - protein, 161 aa, Unknown
  Bacterial polypetide isolated from the Sargasso Sea
SASTWGAPRLSPAQVPFQAEQQALSYPVEVDGQSVELAAVSMGNPHAVLRVDSVEQAPVHSLGPKLEHHPRFPQRVNVGFLQVLDRKHAKLRVWERGAGETQACGTGACAAAVAAISQGWMDSPLQIELPGGKLSIEWAGPGQPVMMTGPAVRVYEGQVRL

SEQ ID NO: 182032 - protein, 194 aa, Unknown
  Bacterial polypetide isolated from the Sargasso Sea
ARFVRNKGLTNKNKIRVSTSAGKMTLRLERDGTVTVNMGVPVLDPSQIPFKAKKAEKTYLLQTPQQTFLCGAASMGNPHCVLDVEDVANANVAEIGALLTKHERFPRGVNVGFMQVVNSGHIKLRVYERGAAETLACGTGACAAVVVGQIQGKLDQQVRVDLPGGTLTINWEGEGKPLWMTGPAQHVYDGQIQL

SEQ ID NO: 182033 - protein, 275 aa, Unknown
  Bacterial polypetide isolated from the Sargasso Sea
MIQFTKMHGLGNDFMVVDGVTQNVFFSPEQIRRLADRNFGIGFDQLLLVEPPYDPDLDFHYRIFNADGGEVENCGNGARCFARFVRNKGLTNKNKIRVSTSAGKMTLRLERDGTVTVNMGVPVLEPSQIPFKAKKAEKTYLLQTPQQTFLCGAASMGNPHCVLDVEDVTSANVAEIGALLTKHERFPRGVNVGFMQVVNSGHIKLRVYERGAAETLACGTGACAAVVVGQIQGKLDQQVQVDLPGGSLTINWEGEGKPLWMTGPAQHVYDGQIQL

SEQ ID NO: 182034 - protein, 172 aa, Unknown
  Bacterial polypetide isolated from the Sargasso Sea
MHGLGNDFIIFDNIKNSKIHDPKFINKVSNRRIGIGCDQVLIIENTNTPENFKVKIYNSDGSETGACGNGTRCVADYLMKKNDLKSLTIKSVSNELYCSKTNNLVTVNMGVPKFSWNEIPLSKKQDTQNVKLDEFEAFCLSMGNPHAVIFINNLEELENLNINSIGPRLENI

SEQ ID NO: 182035 - protein, 302 aa, Unknown
  Bacterial polypetide isolated from the Sargasso Sea
MLQFSKYQGLGNDFLILEGRQGQLPQSVVEPDPVWVRQLCDRRFGIGGDGVILALPPQGQGDLRMRIFNADGSEAEMCGNGIRCLARFLADSDGDAPGKRWAIETPAGLIRPELQSDGQLRVDMGAPFLEPSSIPTTLPLVDGLARGSADLADRALEVAAVGMGNPHVVVPVEDLNAIPFDAWGAALEVHHLFPAKTNVHFLQVHARNRLEIRVWERGAGPTLACGTGACATLVAAVLLGLADDHAEVMLPGGPLQIAWPGRHGAVLMTGPGRVGVRWGVVTGSDAGWRVTRCRAVDARCRG

SEQ ID NO: 182036 - protein, 269 aa, Unknown
  Bacterial polypetide isolated from the Sargasso Sea
MHGLGNDFMVIDAVSQNVFLTKEQIKKLADRNFGVGFDQLLMVEPPYDPDLDFHYRIFNADGSEVEQCGNGARCFAKFVRHKGLTNKYKISVSTKSGKITLYIEQDGQVTVNMGVPQFDPAKVPFKAQKQELNYILHSEDATTLCGVVSMGNPHAVILVDDIQTAPVHQWGPVFENHERFPERANIGFMQVLSPSHVKLRVWERGAGETLACGTGACAAAVIGQMQKKLQTQVRVDLPGGSLQIRWQGPGQPVKMTGPAEHVFDGQLFL

SEQ ID NO: 182037 - protein, 275 aa, Unknown
  Bacterial polypetide isolated from the Sargasso Sea
MIQFTKMHGLGNDFMVVDGVTQNVFFSPEQIRRLADRNFGIGFDQLLLVEPPYDPDLDFHYRIFNADGGEVENCGNGARCFARFVRNKGLTNKNKIRVSTSAGKMTLRLERDGTVTVNMGVPVLDPSQIPFKAKKAEKTYLLQTPQQTFLCGAASMGNPHCVLDFEDVANANVAEIGALLTKHERFPRGVNVGFMQVVNSGHIKLRVYERGAAETLACGTGACAAVVVGQIQGKLDQQVRVDLPGGTLTINWEGEGKPLWMTGPAQHVYDGQIQL

SEQ ID NO: 182038 - protein, 228 aa, Unknown
  Bacterial polypetide isolated from the Sargasso Sea
MQKIEFTKMHGLGNDFVIIDKRSNTVEINDNLIKKLSDRRTGAGCDQLITINEPKNNNADISIDIFNPAGDKAEACGNGTRCVAKILFDENNDKASLKILSDAGTLIAKKVGDQISVNMGIITTDWEKIPLSKETNTLNVPIHVEGFDVGVAVNIGNPHIVFFGKSIENVNLSEIGPKIEQHHLFPNKTNVEFIEVVNSNKIKMKVWERGAGITLACGSGACAAVYAG

SEQ ID NO: 182039 - protein, 309 aa, Unknown
  Bacterial polypetide isolated from the Sargasso Sea
MARRRARRADRLVRHGNPDPVKLSFTKMHGAGNDFVVLDGYSRALPPLTEAQVRALANRHFGIGADQLLLVEKPTVDGVDFKYRIFNCDGGEVEHCGNGARCFVKFVSDRGLTDKRSVRVQVMKGLITLTMQDNGEVVVDMGAPVFTPAQVPFDAAGLEGRTEGRDTLWPLDVGGATRWISTVTMGNPHAVQVVDDTEAYPVLEEGPLIEHHARFPERVNAGFMQIVSRSEVKLRVYERAAGETLACGTGACAAVAAGIRRGLLDSPVTVHTHGGTLTISWDGARDEAAALMMAGPATTVFEGEIDLPA

SEQ ID NO: 182040 - protein, 275 aa, Unknown
  Bacterial polypetide isolated from the Sargasso Sea
MIQFTKMHGLGNDFMVVDGVTQNVFFSPEQIRRLADRNFGIGFDQLLLVEPPYDPDLDFHYRIFNADGGEVENCGNGARCFARFVRNKGLTNKNKIRVSTSAGKMTLRLERDGTVTVNMGVPVLEPSQIPFKAKKAEKTYLLQTPQQTFLCGAASMGNPHCVLDVEDVASANVAEIGALLTKHERFPRGVNVGFMQVVNSGHVKLRVYERGAAETLACGTGACAAVVVGQIQGKLDQQVQVDLPGGSLTINWEGEGKPLWMTGPAQHVYDGQIQL

SEQ ID NO: 182041 - protein, 269 aa, Unknown
  Bacterial polypetide isolated from the Sargasso Sea
MHGLGNDFMVIDAVSQNVFLTKEQIKKLADRNFGVGFDQLLMVEPPYDPDLDFHYRIFNADGSEVEQCGNGARCFAKFVRHKGLTNKYKISVSTKSGKITLYIEQDGQVTVNMGVPQFDPVKVPFKAQKQELNYILHSEDATTLCGVVSMGNPHAVILVDDIQTAPVHQWGPVFENHERFPERANIGFMQVLSPSHVKLRVWERGAGETLACGTGACAAAVIGQMQKKLQTQVRVDLPGGSLQIRWQGPGQPVKMTGPAEHVFDGQLFL

SEQ ID NO: 182042 - protein, 276 aa, Unknown
  Bacterial polypetide isolated from the Sargasso Sea
MQVQFSKMHGLGNDFMVIDNVTQNVFFSKEKIQQLANRNFGIGFDQLLMVEPPYDPEQDFHYRIFNADGSEVEQCGNGARCFARFVKQKGLINRNKIVVSTKAGKMVLYLEKDGQVTVNMGKPEFEPANIPLKANKQENTYILRVGESTLFIGSASMGNPHCVMEVDDVDTANVAEIGPLVEKHERFPEGVNVGFMQIINESHIKLRVFERGSGETLACGSGACAAVAIGQIQGKLGKDVRVDLPGGSLRIRWPGPDNVLKMTGPAEHVYDGHINL

SEQ ID NO: 182043 - protein, 250 aa, Unknown
  Bacterial polypetide isolated from the Sargasso Sea
MQKINFIKMHGLGNDFVIIDKRVNKITITKELISKLSDRKSGAGCDQLITINNSSEKDNDIDAEIKIYNPSGDQAEACGNGTRCVAKLLFEELNKNNIKILSDAGILVATQKDKNISVNLGKLTTNWKKIPMTKDMDTMNVPIKINDFSNGVAVNVGNPHLVFFGQNINDVDLGIIGPNIENHNFFPNKVNVELVEIINRNKIKIRVWERGAGLTLACGSGACASVYAGMLKNLLENDVKVILERGSYCI

SEQ ID NO: 182044 - protein, 282 aa, Unknown
  Bacterial polypetide isolated from the Sargasso Sea
MAGMVNFTKMHGIGNDFVIIDCRDGIELNEIVAKKIANRRFGIGCDQIILLKNPLLGNDILLEFINNDGSLSSACGNGTRCAAKLIFIENSTNNINIETNAGILEAWKDNNSNLISVNMGKPNFIWNEIPLSKNIDHTNVDLGFEKGNNAFCLSMGNPHAVFFVDSVESVNVSLVGPKLENHPIFPEKANISFAEVKSKSKIKMKVWERGAGQTAACGSGACAVAVAAKQLSKIDNNCEIILDGGILNVTILDDESIVLKGPTEISFQGTFGDRINKLIKSN

SEQ ID NO: 182045 - protein, 271 aa, Unknown
  Bacterial polypetide isolated from the Sargasso Sea
QKIEFTKMHGLGNDFVIIDRRSKKIEINDNLIQKLSDRRTGAGCDQLITINDPKKNDVDVSIDIFNPAGDKAEACGNGTRCVAKILFDENNEKETLKIISDAGSLIAKKAGDEISVNMGKITTDWKKIPLSKEMDSLNIPIHVEGFDKGVAVNIGNPHIVFYGKSIENVDLNAIGPMVEKHHFFPNKTNVEFIEVVNSNTIKMKVWERGAGVTLACGSGACAAVYAGWKKKLIEKNSQVQLEKGSLHINIDADEAIMTGPAEISYNGYIEI

SEQ ID NO: 182046 - protein, 276 aa, Unknown
  Bacterial polypetide isolated from the Sargasso Sea
MLIDFSKMHGLGNDFMVVDGVTQKVFFSNEVIKKLADRHFGIGFDQLLLVEPPYDPELDFHYRIFNADGSEVEQCGNGARCFARFVRLKGLINRDRIAVSTARGRIVLQLEGENQVTVNMGVPQFEPGKIPFRAQKAEKTYLLRAQEHTVMCGAVSMGNPHCVIEVPSVADAPVATLGPIMERHERFPERVNVGFMEMVNASEIKLRVFERGVGETLACGTGACAAVVVGISQGKLKERVTVTLPGGKLTIAWKGPGQPVYMTGPAEHVFDGQIEL

SEQ ID NO: 182047 - protein, 135 aa, Unknown
  Bacterial polypetide isolated from the Sargasso Sea
MGNVIKISPSILSADFSKLGSEVISLEKAGADYIHIDVMDGHFVPNLTIGPEVIKKLRPLTQKTFDVHLMISPVDNFIKDFANAGADIITFHPEATKDTLNTIELIRKENKKVGISLKPKSKIDLIEKYLDKIDL

SEQ ID NO: 182048 - protein, 220 aa, Unknown
  Bacterial polypetide isolated from the Sargasso Sea
MSGTIKISPSILSADFSKLGEEIISLDKAGADYIHVDVMDGHFVPNITIGPEVIKKLRPLTKKTFDVHLMISNVNKYIEAFSNAGSDIITFHPEATDNTSETIKLIKKHKKKVGISLKPKSSIKLIEDHLDDIDLVLIMSVEPGFGGQKFMPEVISKLKEIKKIISEKKINIDIEIDGGINFENCKLAKEAGANVLVSGSTIFKENSGNLKKNISLLRSN

SEQ ID NO: 182049 - protein, 219 aa, Unknown
  Bacterial polypetide isolated from the Sargasso Sea
MKKIQISPSILSADFSQLGNEIKRLEESGADMIHVDVMDGHFVPNLTIGPPVIKALKKNTSMIFDVHLMISPVHKYIEAYSDAGADIITIHPEATDDLKTSISKIKELNKKVGISLNPETQTDVILNYLDQIDLVLIMSVNPGFGGQKFMPEVLPKVIELKKIQHDKNLNFDIEIDGGINFDNAKRALEAGANILVSGTTIFKSNNGDIKKNIELLKSK

SEQ ID NO: 182050 - protein, 222 aa, Unknown
  Bacterial polypetide isolated from the Sargasso Sea
MSDQKNIIAPSILASDFARLGEEVRNVLDAGADWVHFDVMDNHYVPNLTIGPMVCKALREYGIKEFIDVHLMIDPVDELAQSFIDAGADLISFHPEATKHIHRSIHAIKDKGCKAGLVYNPATPLHTLESVLEDLDLVLIMSVNPGFGGQSFIHSSLEKIAQVRKMIDESGKDVRLEVDGGINKDTIGLASEAGADTFVAGSAIFNTENYEQTISELRSKIV

SEQ ID NO: 182051 - protein, 148 aa, Unknown
  Bacterial polypetide isolated from the Sargasso Sea
MKNIQISPSILSADFSQLGTEIKRLEEGGADMIHVDVMDGHFVPNLTIGPPVIKALRKHCSLKFDVHLMISPVHKYIEAYADAGADIITVHPEATDNLEDSINKIKDLKKKVGVSLNPETSINLIKNLLDKIDLVLIMSVNPGFGGQK

SEQ ID NO: 182052 - protein, 197 aa, Unknown
  Bacterial polypetide isolated from the Sargasso Sea
MSDQKNIIAPSILASDFARLGEEVRNVLDAGADWVHFDVMDNHYVPNLTIGPMVCKALREYGIKEFIDVHLMIDPVDELAQSFIDAGADLISFHPEATKHIHRSIHAIKDKGCKAGLVYNPATPLHTLESVLEDLDLVLIMSVNPGFGGQSFIHSSLEKIAQVRKMIDESGKDVRLEVDGGINKDTIGLASEAGADT

SEQ ID NO: 182053 - protein, 219 aa, Unknown
  Bacterial polypetide isolated from the Sargasso Sea
MNNSVKISPSILSADFSKLGQEIISLDKAGADYIHVDVMDGHFVPNITIGPEVIKKLRPLTKKIFDVHLMISPVDKYIEAFSNAGSDIITFHPEATTDSLNTIKLIKKFKKKVGISLKPKTKINLIEKHLNEIDLILVMSVEPGFGGQKFMPEVIDKLKSIKKIISEKKLNIDLEVDGGINFENCKIVKEAGANVLVSGSTIFKSNSGNLKKNIIYLDQ

SEQ ID NO: 182054 - protein, 215 aa, Unknown
  Bacterial polypetide isolated from the Sargasso Sea
MPDVKISPSILSADFGKLSSEIQNLEKAKADLIHIDVMDGHFVPNITIGPEVISKLRKSTSLPFDVHLMISPVHNFIKNFAEAGADIITIHPEATSNLISSINEIKSFNKKVGISLNPGTSIDKVLPVLNLIDLVLVMSVNPGFGGQKFMPETLEKVKTLRKEIDTKKIKTQIEIDGGINFENAKVAVKAGVDILVSGTTIFKENGGDLKKNIQL

SEQ ID NO: 182055 - protein, 149 aa, Unknown
  Bacterial polypetide isolated from the Sargasso Sea
MNENLIAPSILSADFARLGEEVDNVLASGADIVHFDVMDNHYVPNLTIGPLVCEALRKHGITAPIDVHLMIKPVDRIVPDFASAGASYITFHPEASEHVDRTLQLIASEGCKAGLVFNPATPLDVLEHVIDKVDMVLLMSVNPGFGGQS

SEQ ID NO: 182056 - protein, 220 aa, Unknown
  Bacterial polypetide isolated from the Sargasso Sea
MTETIKISPSILSADFSKLGSEVISLEKAGADYIHIDVMDGHFVPNLTIGPEVIKKLRPLTKKIFDVHLMISPVDNFIKDFANAGADIITFHPEATKDTAKTIDLIKKEGKKVGISLKPNSKIDLVEEYLDDIDLVLIMSVEPGFGGQKFMPEVLEKTKRLKEIINNKKLDVDIEIDGGINFENCTLAKQAGANILVSGSTIFRENKGDLKKNIEILRKN

SEQ ID NO: 182057 - protein, 181 aa, Unknown
  Bacterial polypetide isolated from the Sargasso Sea
MKNIQISPSILSADFSQLGTEIKRLEEGGADMIHVDVMDGHFVPNLTIGPPVIKALRKHCSLKFDVHLMISPVHKYIDAYADAGADIITIHPEATDNLENSIKKIKEKNKKVGVSLNPESKIDLILDLLDQIDLVLIMSVNPGFGGQKFMPEVLDKIKELKKIKEQKKMAFDIEIDGGIQF

SEQ ID NO: 182058 - protein, 212 aa, Unknown
  Bacterial polypetide isolated from the Sargasso Sea
PSILSADFSQLGKEIKRLEEGGADMIHVDVMDGHFVPNLTIGPPVIKALRKHCSLEFDVHLMISPVHKYIDAYAEAGADIITIHPEATDSLENSIKKIKEKNKKVGVSLNPESEIDLILDLLDQIDLVLIMSVNPGFGGQKFMPEVLDKIKELKKIREQKKMAFDIEIDGGINFDNCKSAIDAGANILVSGTTVFKSNDGDIKKNINLLKLK

SEQ ID NO: 182059 - protein, 182 aa, Unknown
  Bacterial polypetide isolated from the Sargasso Sea
MKNIQISPSILSADFSQLGSEIKRLEEAGADMIHVDVMDGHFVPNLTIGPPVIKALRKHCSLKFDVHLMISPVHKYIEAYADAGADIITIHPEATDNLENSIKKIKEKNKKNGVSLNPETKIDLILDLLDQIDLVLIMSVNPGFGGQKFMPEVLDKIKELKRIREQKKLDFDIEIDGGINFD

SEQ ID NO: 182060 - protein, 157 aa, Unknown
  Bacterial polypetide isolated from the Sargasso Sea
MAQENPEVIIAPSILSADFGRLNDEVRAVEQAGADWIHVDVMDGHFVPNITIGPAVVESVRKATELPLDVHLMIENADSYIKDFASAGSDIITVHVEACPHLNRTIQLIKEQKVRAGVVLNPATPLSSIEEILHEIDMVLLMCVNPGFGGQSFIPSM

SEQ ID NO: 182061 - protein, 207 aa, Unknown
  Bacterial polypetide isolated from the Sargasso Sea
MKNIQISPSILSADFSQLGLEIKRLEEGGADMIHVDVMDGHFVPNLTIGPPVIKALRKHCSLKFDVHLMISPVHKYIEAYADAGADIITIHPEATDNLENSIKKIKEKRKKVGVSLNPETKIDLILDFLDQVDLILIMSVNPGFGGQKFMPEVLDKIKDLKKIRQEKNLDFDIEIDGGIILIIAKVQLMLVLTFLFLVLRCLKVMME

SEQ ID NO: 182062 - protein, 219 aa, Unknown
  Bacterial polypetide isolated from the Sargasso Sea
MKNIQISPSILSADFSQLGAEIKRLEEGGADMIHVDVMDGHFVPNLTIGPPIIKALRKHCSLKFDVHLMISPVQKYIKAYANAGADIITIHPEATQDLAESIKTIKDLNKKVGVSLNPETKIELINEFLDQIDLVLIMSVNPGFGGQKFMPEVLDKIKKLKKIQQEENLNFDIEIDGGINFENCKTAVDAGANILVSGTTVFKSNDGDIKKNIDLLKLK

SEQ ID NO: 182063 - protein, 201 aa, Unknown
  Bacterial polypetide isolated from the Sargasso Sea
MNNFIKISPSILSADFSKLGSEVISLEQAGADYIHIDVMDGHFVPNLTIGPEVIKKLRPLTKKIFDVHLMISPVDNFIKDYADAGADIITFHPEATSDTSKTIQLIKNENKKVGISLKPKSKIDLIEKHLNEIDLVLVMSVEPGFGGQKFMPEVLDKTKTLRNIISKKNLKVDIEIDGGINFENCTLAKKAGANILVSGST

SEQ ID NO: 182064 - protein, 220 aa, Unknown
  Bacterial polypetide isolated from the Sargasso Sea
MTSSIKISPSILSADFSKLGEEIVSLDKAGADYIHVDVMDGHFVPNLTIGPEVVKKLRSFTKKIFDVHLMISPVDKYIKAFSEAGSDIITFHPEATDNTANTIGLIKKYKKKVGISLKPKSSIELIKEYIDEIDLILVMSVEPGFGGQKFMPEVLDKVKNLKKIISEKNLNIDIEIDGGINFKNSKQVKDAGANILVSGSTIFNENNGDLKKNIGLLRSS

SEQ ID NO: 182065 - protein, 223 aa, Unknown
  Bacterial polypetide isolated from the Sargasso Sea
MSEDWIAPSILSADFARLGEEVDAVLKAGADLVHFDVMDNHYVPNLTIGPMVCEALRKHGVSAPIDVHLMVTPVDRLVEDFAAAGASYISFHPEASLHPDRTLQLIRDAGCRSGLVFNPATPLSWLDHLMDKVDMILLMSVNPGFGGQAFIETTLTKLATARRLIEESDCSIRLEVDGGVKVDNIGRIAQAGADTFVAGSAIFGAGDYTQTINQMRSEIAAVR

SEQ ID NO: 182066 - protein, 168 aa, Unknown
  Bacterial polypetide isolated from the Sargasso Sea
MKNIQISPSILSADFSQLGSEIKRLEDGGADMIHVDVMDGHFVPNLTIGPPVIKALRKHCSLKFDVHLMISPVHKYIDAYADAGADIITIHPESTDNLESSIKKIKEKNKKAGVSLNPESKIDLILDLLDQIDLVLIMSVNPGFGGQKFMPEVLDKIKDLKKIKEQKK

SEQ ID NO: 182067 - protein, 220 aa, Unknown
  Bacterial polypetide isolated from the Sargasso Sea
MSSNIKISPSILSADFSKLGDEIISLDKAGADYIHVDVMDGHFVPNITIGPEIIKKLRPVTEKTFDVHLMIEPVDKYIKDFADAGADIITFHPEATPSTEETINLIKKFNKKVGISLKPKSDINLIEKHLEKIDLVLVMSVEPGFAGQKFMPNVLPKLKKLKEIIANKKLKIDLEIDGGINFENSKTVINAGANVLVSGSTIFKQNNGDLKKNISLLRSS

SEQ ID NO: 182068 - protein, 154 aa, Unknown
  Bacterial polypetide isolated from the Sargasso Sea
MNQIKISPSILSADFTRLAEQVIEAEEAGVDYVHVDVMDGHFVPNITIGPLIVKALRGVTNIPLDVHLMIENPDLYIEDFSKAGADIITVHQEATHHLHRTIQKIHDLGIKAGVSINPSTSVSTLDEIICKVDLVLVMSVNPGFGGQSYIPSST

SEQ ID NO: 182069 - protein, 219 aa, Unknown
  Bacterial polypetide isolated from the Sargasso Sea
MSDQKNIIAPSILASDFARLGEEVRNVLDAGADWVHFDVMDNHYVPNLTIGPMVCKALREYGIKEFIDVHLMIDPVDELAQSFIDAGADLISFHPEATKHIHRSIHAIKDKGCKAGLVYNPATPLHTLESVLEDLDLVLIMSVNPGFGGQSFIHSSLEKIAQVRKMIDESGKDVRLEVDGGINKDTIGLASEAGADTFVAGSAIFNTENYEQTISELRS

SEQ ID NO: 182070 - protein, 219 aa, Unknown
  Bacterial polypetide isolated from the Sargasso Sea
MKKIKISPSILSADFSQLGNEIKKLEQGGADLIHVDVMDGHFVPNLTIGPPVIKNLRKYTKLPFDVHLMISPVHKYIENYAEAGADIITIHPEATDNLKESINLIKKLGKKVGISLNPKTEIKTLIDEIQNIDLVLVMSVNPGFGGQKFMPEVLDKIKELKKIKDKKQYQFDIEVDGGINFSNSKMVLEAGADILVSGTTVFKENHGNIKTNIEKLKSM

SEQ ID NO: 182071 - protein, 219 aa, Unknown
  Bacterial polypetide isolated from the Sargasso Sea
MKNIQISSSILSADFSQLGTEIKRLEEGGADMIHVDVMDGHFVPNLTIGPPVIKALRKHCSLKFDVHLMISPVHKYIKAYADAGADIITIHPEATQNLKESIKMIKDLKKKVGVSLNPESKIELITEFLDQIDLVLIMSVNPGFGGQKFMPEVLDKIKQLKKIQQEKNLNFDIEIDGGINFENCKIAIDAGANILVSGTTVFKSNDGDIKKNIDLLKLK

SEQ ID NO: 182072 - protein, 150 aa, Unknown
  Bacterial polypetide isolated from the Sargasso Sea
MSSPIKISPSILSADFSKLGEEVIALEKAGADYIHIDVMDGHFVPNLTIGPEVIKKLRPLTKKTFDVHLMISPVDNFIKDFSNAGADIITFHPEATPNISNTISLIRKEKKKVGISLKPKSKIDLIEKYIDQVDLILIMSVEPGFSGQKF

SEQ ID NO: 182073 - protein, 111 aa, Unknown
  Bacterial polypetide isolated from the Sargasso Sea
MSDLIKISPSILSADFSKLGDEVISLEKAGADYIHIDVMDGHFVPNLTIGPEVIKNLRPLTKKIFDVHLMISPVDNFIKEFADAGADIITFHPEATCDVSKTIKLIKDLNK

SEQ ID NO: 182074 - protein, 189 aa, Unknown
  Bacterial polypetide isolated from the Sargasso Sea
MKKIQISPSILSADFSQLGSEIKKLEECGADMIHVDVMDGHFVPNLTIGPPVIKSLKKHSSLIFDVHLMISPVHKYIDDYANAGADIITIHPEATDNLAESILKIKKLNKKVGLSLNPGTKIDVILKFLDQIDLVLIMSVNPGFGGQKFMPEVLTKVKDLTAIKEDKGMKFDIEIDGGINFENSKAAIK

SEQ ID NO: 182075 - protein, 201 aa, Unknown
  Bacterial polypetide isolated from the Sargasso Sea
MKKIQISPSILSADFSNLGEEIQKLEKAGADMIHVDVMDGHFVPNLTIGPPVIKALKKYTSLIFDVHLMISPVHKYIKAYSDSGADIITIHPEATDDLNASILKIKELKKKVGVSLNPETKIDTILNHLSKIDLILIMSVNPGFGGQKFMPEVLEKVKKLGKIRDEKKLNFDIEIDGGINFENSKIAIEAGVNILVSGTTI

SEQ ID NO: 182076 - protein, 220 aa, Unknown
  Bacterial polypetide isolated from the Sargasso Sea
MNNPIKISPSILSADFSKLGNEVISLEKAGADYIHIDVMDGHFVPNLTIGPEVIKKLRPLTKKIFDVHLMISPVNNFIKDFANAGADIITFHPEATKDTLETIKIIKKENKKVGISLKPKSKIDLVENHLEEIDLVLIMSVEPGFGGQKFMPEVLEKTRQLRDIIERRKLNVDIEIDGGINFENCTLAKRAGANILVSGSTIFKENKGNLKKNIEILRKN

SEQ ID NO: 182077 - protein, 185 aa, Unknown
  Bacterial polypetide isolated from the Sargasso Sea
MKKIKISPSILSADFSNLRTEIQRLESGGADMIHVDVMDGHFVPNLTIGPPVIKALKKHSSLLFDVHLMISPVHKYIQSYSEAGADIITIHPEATENLNSSILKIKELRKKVGISLNPETKIDVILDFLEKIDLVLIMSVNPGFGGQKFMPEVLSKVKELKKIQSEKKLNFDIEIDGGINFENSK

SEQ ID NO: 182078 - protein, 220 aa, Unknown
  Bacterial polypetide isolated from the Sargasso Sea
MSNSIKISPSILSADFSKLGSEVVALEKAGADYIHIDVMDGHFVPNLTIGPEVIKKLRPLTKKTFDVHLMISPVDNFVKEFANAGADIITFHPEATSNISNTINLIRKENKKVGISLKPNSRINLIENHLDEIDLVLIMSVEPGFGGQKFMPEVLEKTKLLKDLIEKKNLKVDIEIDGGINFENCSLAKKAGANILVSGSTIFNENKGDLKKNIEILRKN

SEQ ID NO: 182079 - protein, 148 aa, Unknown
  Bacterial polypetide isolated from the Sargasso Sea
MSSNIKISPSILSADFSKLGNEVISLEKAGADYIHIDVMDGHFVPNLTIGPEVIKKLRPLTKKTFDVHLMISPVDNFIKDFADAGADIITFHPEATPDVSTTIRMIKDQNKKVGISLKPKSKIDLIKDHLNQIDLVLIMSVEPGFGGQ

SEQ ID NO: 182080 - protein, 219 aa, Unknown
  Bacterial polypetide isolated from the Sargasso Sea
MKNIQISPSILSADFSQLGTEIKRLEEGGADMIHVDVMDGHFVPNLTIGPPVIEALRKHCSLKFDVHLMISPVHKYIEAYADAGADIITIHPEATQNLEDSIKKIKDLKKKVGVSLNPESKVELITEFLDQINLVLIMSVNPGFGGQKFMPEVLDKIKQLKKIQKEKNLTFDIEIDGGINFENCKSAIDAGANILVSGTTVFKSNGGDIKKNINLLKLK

SEQ ID NO: 182081 - protein, 219 aa, Unknown
  Bacterial polypetide isolated from the Sargasso Sea
MALIKISPSILSADFSKLGNEIQDLEKAKADLIHIDVMDGHFVPNITIGPEVIKKLRKYTSLPFDVHLMISPVHNFIKNFAEAGSDIITIHPEATDDLLSSIKKIKSFNKKAGVSLNPETPVDKVLPVLKLIDLVLVMSVNPGFGGQKFIKETLNKVKILRKEIDAQKLKTQIEIDGGINFENAAMAKKAGVDILVSGTTIFKENGGDLKKNIQLLRTG

SEQ ID NO: 182082 - protein, 193 aa, Unknown
  Bacterial polypetide isolated from the Sargasso Sea
MAKKLAPSILSADFARLGEEVSEVVNAGADIIHFDVMDNHYVPVLTFGPKICADLRAYGVSAPIDVHLMAKPVDDLIKAFGDAGADFITFHPEASEHIDRSLRLIEQAGCKAGLVFNPATPLDYLEYVIDQIDMILIMSVNPGYGGQKFISTTYKKIKDAKKLISKLGAEILVEVDGGINLSNISEISSAGAD

SEQ ID NO: 182083 - protein, 219 aa, Unknown
  Bacterial polypetide isolated from the Sargasso Sea
MKKIQISPSILSADFSKLGSEIKKLEEGGADLIHVDVMDGHFVPNLTIGPPVIKNLRKYTKLPFDVHLMISPVHEYIVNYANAGADIITIHPEATENLKESLNLIKNLGKRVGVSLNPKTQIKTLIDEIEIIDLVLVMSVNPGFGGQKFMPEVLNKIRELKTIKDNGQYKFDIEVDGGINFSNSKIVLEAGANILVSGTTIFKENDGNIKTNIEKLRSM

SEQ ID NO: 182084 - protein, 212 aa, Unknown
  Bacterial polypetide isolated from the Sargasso Sea
PSILSADFSQLSLEIKKLEDAGADMIHVDVMDGHFVPNLTIGPPVIKSLRKHTNLIFDVHLMISPVHKYIESFSNAGADIITFHPEATESMNETISLIKKLKKKVGVSLNPQTSIDLVKDFLDKIDLVLVMSVHPGFGGQKFMPEILDKIEDLSKLRKEKKLTFDIEVDGGIDFDNSKLVKKAGANILVSGTTIFKNNNGDIKKNIDALRTG

SEQ ID NO: 182085 - protein, 148 aa, Unknown
  Bacterial polypetide isolated from the Sargasso Sea
MKNIQISPSILSADFSQLGKEIKRLEEGGADMIHVDVMDGHFVPNLTIGPPVIKALRKHCSLKFDVHLMISPVHKYIEAYADAGADIITIHPEATDNLENSIKKIKEKNKKIGVSLNPETKIDLILDLLDQIDLVLIMSVNPGFGGQK

SEQ ID NO: 182086 - protein, 220 aa, Unknown
  Bacterial polypetide isolated from the Sargasso Sea
MSNLIKISPSILSADFSMLGNEVISLEKAGADYIHIDVMDGHFVPNLTIGPEVIKKLRPLTKKTFDVHLMISPVNNLIKNFADAGADIITFHPEATDNTLETIKLIKAQNKKVGISLKPNSKLSLIENYLDKIDLVLIMSVEPGFAGQKFMPEVLEKIKKLKEIIEKKNLNVDIEIDGGINFQNCSLAKKAGANILVSGSTIFKENNGDLKKNIEILRKN

SEQ ID NO: 182087 - protein, 164 aa, Unknown
  Bacterial polypetide isolated from the Sargasso Sea
MKKIQISPSILSADFSQLGKEIKKLEDAGADMIHVDVMDGHFVPNLTIGPPVIKALKKNSLLPFDVHLMISPVHKYIESYAIAGADIITIHPEATNDLLGSINKIREFKKKVGVSLNPETKIEIIKEHLNQIDLVLIMSVNPGFGGQKFMPEVLNKVKKLDEIR

SEQ ID NO: 182088 - protein, 217 aa, Unknown
  Bacterial polypetide isolated from the Sargasso Sea
MKNIQISPSILSADFSQLGTEIKRLEEGGADMIHVDVMDGHFVPNLTIGPPVIKALRKHCSLKFDVHLMISPVHKYIKAYADAGADIITIHPEATQNLRESIKTIKDLKKKVGVSLNPESKIELITEFLDQIDLVLIMSVNPGFGGQKFMPEVLDKIKQLKKIQREKNLNFDIEIDGGINFENCKIAIDAGANILVSGTTVFKSNDGDIKKNIDLLN

SEQ ID NO: 182089 - protein, 185 aa, Unknown
  Bacterial polypetide isolated from the Sargasso Sea
MKKIQISPSILSADFGQLGIEIKRLEDAGADMIHVDVMDGHFVPNLTIGPPVIKALKKQSSMIFDVHLMISPVHKYIEAYSDAGADIITIHPEATDDLNSSILKIKELNKKVGVSLNPETKIDIIIEHLKKIDLVLIMSVNPGFGGQKFMPEVLEKIKRLKKIQEKEGLNFDIEIDGGINFDNSK

SEQ ID NO: 182090 - protein, 184 aa, Unknown
  Bacterial polypetide isolated from the Sargasso Sea
MSNLIKISPSILSADFSRLGSEVISLEKAGADYIHIDVMDGHFVPNLTIGPEVIKKLRPLTNKVFDVHLMITPVDKFIKDYSNAGADIITFHPEATENTTKTIQLIKKEKRKVGLSLKPNSKIDLIEKHLNDIDLVLIMSVEPGFGGQKFMPEVLEKTRKLKEIIEQKNMNIDIEIDGGINFEN

SEQ ID NO: 182091 - protein, 170 aa, Unknown
  Bacterial polypetide isolated from the Sargasso Sea
MNNSIKISPSILSADFSKLGNEVISLEKAGADYIHIDVMDGHFVPNLTIGPEVIKKLRPLTNKVFDVHLMISPVDNFIKEFARAGSDIITFHPEATHDTAKTIELIRKENKKVGISLKPNSSIDLIKNYLEQIDLVLIMSVEPGFAGQKFMPQVLEKTKNLKEIINKKNL

SEQ ID NO: 182092 - protein, 220 aa, Unknown
  Bacterial polypetide isolated from the Sargasso Sea
MSSYVKISPSILSADFSKLGEEIISLDKAGADYIHVDVMDGHFVPNITIGPEIIKKIRPVTKKIFDVHLMIEPVDKYIKDFADAGADIITFHPEATPNTLETINLIRKYNKKVGISLKPRSEISLIEKFLDKIDLILVMSVEPGFAGQKFMPEVLPKLKNLKEMISLKKLKIDLEIDGGINFENSKIAIEAGANILVSGSTIFKKNNGDLKKNISLLRSI

SEQ ID NO: 182093 - protein, 193 aa, Unknown
  Bacterial polypetide isolated from the Sargasso Sea
MKNIQISPSILSADFSQLRTEIKRLEEGGADMIHVDVMDGHFVPNLTIGPPVIKALRKHCSLKFDVHLMISPVHKYIEDYANAGADIITIHPEATENLEVSINKIQDLKKKVGVSLNPESNIDLIKNLLSQIDLVLIMSVNPGFGGQKFMPEVLEKIKELKKIREIEKLDFDIEIDGGINFDNCKIAIEAGAN

SEQ ID NO: 182094 - protein, 153 aa, Unknown
  Bacterial polypetide isolated from the Sargasso Sea
MTSSIKISPSILSADFSKLGQEIISLDKAGADYIHVDVMDGHFVPNITIGPEVIKKLRPLTKKVFDVHLMISPVDKYIEAFSDAGADIITFHPEATENIDVTINLIKKHKKKVGISLKPKSSINLIKDYITKIDLILIMSVEPGGWWTKIYAR

SEQ ID NO: 182095 - protein, 219 aa, Unknown
  Bacterial polypetide isolated from the Sargasso Sea
MNSIKISPSILSADFSKLGNEIQNLEKAKADLIHIDVMDGHFVPNITIGPEVISKLRKYTSLPFDVHLMISPVHDFIKNFADAGADIITIHPEATNDLASSIKKIKSLNKKAGVSLNPETPVEKVLPVLKQIDLVLIMSVNPGFGGQKFMENTLEKVKILRKEIDQTNLKTLIEIDGGINFENATMAKKAGVDILVSGTTIFKENGGNLKKNIELLRTG

SEQ ID NO: 182096 - protein, 215 aa, Unknown
  Bacterial polypetide isolated from the Sargasso Sea
MKKIQISPSILSADFSQLGSEIKKLEEGGADLIHVDVMDGHFVPNLTIGPPVIKNLRKYTKLPFDVHLMISPVHDYIENYANAGADIITIHPEATENLKESISLIKKFGKKVGVSLNPKTEIKTLIDEIDNIDLVLVMSVNPGFGGQKFMPEVLDKIKELKRIKDKNQYHFDIEVDGGINFSNSKIVLEAGADILVSGTTVFKENGGNIKTNMKN

SEQ ID NO: 182097 - protein, 219 aa, Unknown
  Bacterial polypetide isolated from the Sargasso Sea
MKKIKISPSILSADFSQLGNEIKKLEESGADMIHVDVMDGHFVPNLTIGPPVIKSLKKNSKLKFDVHLMISPVHKYIDAFAEAGADIITIHPEATDNLEESISKIKNLKKIVGVSLNPETKINTIIKLLDKIDLVLIMSVNPGFGGQKFMPEVLEKIKELKKIQQEKKLNFDIEIDGGINFENCKLAIDAGANILVSGTTIFKSNNGNIKKNIDLLKSN

SEQ ID NO: 182098 - protein, 180 aa, Unknown
  Bacterial polypetide isolated from the Sargasso Sea
MSDQKNIIAPSILASDFARLGEEVRNVLDAGADWVHFDVMDNHYVPNLTIGPMVCKALREYGIKEFIDVHLMIDPVDELAQSFIDAGADLISFHPEATKHIHRSIHAIKDKGCKAGLVYNPATPLHTLESVLEDLDLVLIMSVNPGFGGQSFIHSSLEKICSVRKMIDESGKDVRLEVDG

SEQ ID NO: 182099 - protein, 215 aa, Unknown
  Bacterial polypetide isolated from the Sargasso Sea
MSSKDYIIAPSILSADFARLGEESKNVLDAGADWIHFDVMDNHYVPNLTIGPMVCKALRDYGIKAPIDTHLMVKPVDKLIESFAEAGSTYITFHPEASDHVDRSIELIKSLKCKAGLVLNPASPVSLLEESIEKLDMVLLMSVNPGFGGQKFIDSVLNKVTKVRSLIDRHNLNIRLEVDGGINLDNISKVASAGADTFVAGSAIFSQADYIDSIS

SEQ ID NO: 182100 - protein, 196 aa, Unknown
  Bacterial polypetide isolated from the Sargasso Sea
MKKIKISPSILSADFSQLAKEIKRLEDGGADLIHVDVMDGHFVPNLTIGPPVIKSLRKYTKLLFDVHLMIAPVHKYIKDYADAGSDIITFHPEATDNLDETINHIKELKKKVGISLNPDSSIELIRDKLSKIDLVLVMSVYPGFGGQEFMPETIPKISELKNIKDNLKLNFDIEVDGGINFKNAKSVINAGANILV

SEQ ID NO: 182101 - protein, 192 aa, Unknown
  Bacterial polypetide isolated from the Sargasso Sea
MKNIQISPSILSADFSQLGTEIKRLEEGGADMIHVDVMDGHFVPNLTIGPPVIKALRKHCSLKFDVHLMISPVHKYIEAYADAGADIITIHPEATQNLEESIKTIKDLKKKVGVSLNPESKIELIDEFLDKIDLVLIMSVNPGFGGQKFMPEVLDKIKQLKKIQQEKNLNFDIEIDGGINFENCKIAIDAGA

SEQ ID NO: 182102 - protein, 219 aa, Unknown
  Bacterial polypetide isolated from the Sargasso Sea
MANIKISPSILSADFSKLGSEIENLEKAKADLIHIDVMDGHFVPNITIGPEVINKLRKHTSLPFDVHLMISPVHNFIKNFAEAGADIITIHPEATEDLVSSIKKIKSYNKKVGISLNPETSVDKVMPVLNLIDLVLVMSVNPGFGGQKFMKEVLEKVKILRKEIDTKKLKVEIEIDGGINFENSKMAKDAGVDILVSGTTIFKENGGNLKKNIQLLKTG

SEQ ID NO: 182103 - protein, 210 aa, Unknown
  Bacterial polypetide isolated from the Sargasso Sea
MSGIIKISPSILSADFSKLGNEVISLEKAGADYIHIDVMDGHFVPNLTIGPEVIKKLRPLTKKTFDVHLMISPVDNFVKDFADAGADIITFHPEATSDVSKTIKLIRDRNKKVGISLKPKSKIDLIKDYIDQVDLVLIMSVEPGFGGQKFMPEVLDKTKAVRNLINENNLNVDVEIDGGINFENCSKAKDAGANILVSGSTVFNENKGDL

SEQ ID NO: 182104 - protein, 165 aa, Unknown
  Bacterial polypetide isolated from the Sargasso Sea
MSDQKNIIAPSILASDFARLGEEVRNVLDAGADWVHFDVMDNHYVPNLTIGPMVCKALREYGIKEFIDVHLMIDPVDELAQSFIDAGADLISFHPEATKHIHRSIHAIKDKGCKAGLVYNPATPLYTLESVLEDLDLVLIMSVNPGFGGQSFIHSSLEKLLKLEK

SEQ ID NO: 182105 - protein, 186 aa, Unknown
  Bacterial polypetide isolated from the Sargasso Sea
MSDQKNIIAPSILASDFARLGEEVRNVLDAGADWVHFDVMDNHYVPNLTIGPMVCKALREFGIKEFIDVHLMIDPVDELAQSFIDAGADLISFHPEATKHIHRSIHAIKDKGCKAGLVYNPATPLHTLESVLEDLDLVLIMSVNPGFGGQSFIHSSLEKIAQVRKMIDESGKDVRLEVDGGINKDT

SEQ ID NO: 182106 - protein, 153 aa, Unknown
  Bacterial polypetide isolated from the Sargasso Sea
MKKIQVSPSILSADFSQLGNEIKRLEKGGADLIHVDVMDGHFVPNLTIGPPVIKTLKKCTNLPFDVHLMISPVHKYIEDYAKAGADIITFHPEATENLKETIELVKKLNKKVGISLNPNTDINVLDKKFKYIDLILVMSVYPGFGGQKIYSRR

SEQ ID NO: 182107 - protein, 219 aa, Unknown
  Bacterial polypetide isolated from the Sargasso Sea
MQKIKISPSILSADFSQLSLEIKKLEDAGADMIHVDVMDGHFVPNLTIGPPVIKSLRKHTNLIFDVHLMISPVHKYIESFSNAGADIITFHPEATESMSETISLIKKLKKKVGVSLNPQTPIDLVKNFLNKIDLVLVMSVHPGFGGQKFMPETLGKIEDLSKLKKEKKLDFDIEVDGGIDFDNSKLVKKAGANILVSGTTIFKNNNGNIKKNIDALRTG

SEQ ID NO: 182108 - protein, 168 aa, Unknown
  Bacterial polypetide isolated from the Sargasso Sea
MSGAIKISPSILSADFSKLGEEIISLDKAGADYIHVDVMDGHFVPNLTIGPEVVKKLRPFTKKTFDVHLMISPVDNYIKQFSEAGSDIITFHPEATENISHTIGLIKKYNKKVGISLKPKSNISLIEKHLNEIDLILIMSVEPGFGGQKFMPEVLAKVKKLKKIISER

SEQ ID NO: 182109 - protein, 219 aa, Unknown
  Bacterial polypetide isolated from the Sargasso Sea
MKKIQVSPSILSADFSQLGNEIKRLEEGGADLIHVDVMDGHFVPNLTIGPPVIKSLKKNCSIKFDVHLMISPVHKYIEAYSDAGADIITIHPEATEDLSASISKIKYLKKKVGLSLNPETNVSVIKEHLNKIDLVLIMSVNPGFGGQKFMPEVLEKIKELKNIQKQQSLDFDIEIDGGINFENSKIAIKAGANILVSGTTIFKSNNGDIKKNIDLLKSL

SEQ ID NO: 182110 - protein, 220 aa, Unknown
  Bacterial polypetide isolated from the Sargasso Sea
MVKPIKISPSILSADFSKLGEEVIALEKAGADYIHIDVMDGHFVPNLTIGPEVIKKLRPLTKKIFDVHLMISPVDKFIKDFINAGADIITFHPEATPDVSKTINLIKNENKKVGISLKPKSKIELIEKYIDKVDLVLIMSVEPGFGGQKFMPEVLEKTKKIKEIIDKKNLNTEIEIDGGINFDNCILAKKAGANILVSGSTIFKENQGDLKKNIGILKTN

SEQ ID NO: 182111 - protein, 223 aa, Unknown
  Bacterial polypetide isolated from the Sargasso Sea
MATKDYIIAPSILSADFSRLGEEVNSVIEAGADWVHFDVMDNHFVPNLTIGPMVCQSLREYGITAPIDVHLMVEPVDELIKSFVKAGATYITFHPEASEDVDRSISLIKDGGCKAGLVLNPDISIDVLDGYLDKLDMILLMSVFPGFGGQEFIDSVLEKVNKIRSIIDDKNLNTRLEIDGGIKLDNIKEVADAGADTFVSGSAIFNQPDYFQIIQEMRDSLET

SEQ ID NO: 182112 - protein, 109 aa, Unknown
  Bacterial polypetide isolated from the Sargasso Sea
MRNSIKISPSILSADFSKLGSEVISLEKAGADYIHIDVMDGHFVPNLTIGPEVIKKLRPLTKKIFDVHLMISPVDNFIKDFADAGADIITFHPEATKDTSKTIQLIRKE

SEQ ID NO: 182113 - protein, 171 aa, Unknown
  Bacterial polypetide isolated from the Sargasso Sea
MKKIQISPSILSADFSKLGEDIKRLEESGADMIHVDVMDGHFVPNLTIGPPVIKSLRKYTKLPFDVHLMIDPVHNYIKDYISAGADIITFHPEATKNIDETIDLIKSFRKKIGISLNPDTQIEMVIDHLEKIDLILIMSVYPGFGGQKFINDVVKKIKDLDKIRENKKLNF

SEQ ID NO: 182114 - protein, 220 aa, Unknown
  Bacterial polypetide isolated from the Sargasso Sea
MSNSIKISPSILSADFSKLGSEVVALEKAGADYIHIDVMDGHFVPNLTIGPEVIKKLRPLTTKTFDVHLMISPVDNFIKDFANAGADIITFHPEATSNISNTINLIKKENKKVGISLKPNSKIDLIYEYLNKIDLVLIMSVEPGFGGQKFMPEVLEKTKKIKEIIDERNLNVDIEIDGGINFENCSLAKNAGANILVSGSTVFKENKGDLKKNIEKLRKN

SEQ ID NO: 182115 - protein, 224 aa, Unknown
  Bacterial polypetide isolated from the Sargasso Sea
MKDFLIAPSILSADFARLGDDVAKVLAAGADVVHFDVMDNHYVPNLTIGPMVCQALRDYGIEAPIDVHLMVKPVDRIIPDFAKAGASLITFHPEASDHVDRSLGLIKEMGCQAGLVLNPATPLTCLEYVMDKLDVILLMSVNPGFGGQSFIPGTLDKLRQVRRLIDESGRDIRLEIDGGVKVDNIREIAQAGADMFVAGSAIFSRPDYKAVIDEMRAELSHVKR

SEQ ID NO: 182116 - protein, 190 aa, Unknown
  Bacterial polypetide isolated from the Sargasso Sea
MSDLIKISPSILSADFSKLGSEVISLEKAGADYIHIDVMDGHFVPNLTIGPEVIRKLRPLTKKTFDVHLMISPVDNFIKDYANAGADIITFHPEATKDTLKTIELIKKENKKVGISLKPKSEISLVEKYLKEIDLVLIMSVEPGFGGQKFMPEVLKKTKLLKEIINKNKLNVDIEIDGGINFENCSLAKK

SEQ ID NO: 182117 - protein, 219 aa, Unknown
  Bacterial polypetide isolated from the Sargasso Sea
MKKIQISPSILSADFSQLGNEIKRLEEGGADLIHVDVMDGHFVPNLTIGPPVIKSLKKNCSLKFDVHLMISPVHKYIEIFSNAGADIITIHPEATEDLAASISKIKELGKKAGVSLNPETEVDVIKNYLSQIDLVLIMSVNPGFGGQKFMPEVLDKIRELKNIQKRQNIDFDIEIDGGINFENSKIAIKAGANILVSGTTIFKSNNGDIKKNIDLLKSS

SEQ ID NO: 182118 - protein, 219 aa, Unknown
  Bacterial polypetide isolated from the Sargasso Sea
MKKIQISPSILSADFSQLGSEIKKLEEGGADLIHVDVMDGHFVPNLTIGPPVIKNLRKYTKLPFDVHLMISPVHDYIENYANAGADIITIHPEATKNLKESISLIKRFGKKVGVSLNPKTEIKTLFDEIDNIDLVLVMSVNPGFGGQKFMPEVLDKIRELKKIKDEGQYHFDIEVDGGINFSNSKIVLEAGANILVSGTTVFKENNGNIKTNIEKLKSM

SEQ ID NO: 182119 - protein, 227 aa, Unknown
  Bacterial polypetide isolated from the Sargasso Sea
MFSPEQKYLIAPSILSADFAKLGEDVDSVLAAGADVVHFDVMDNHYVPNLTIGPMVCKALRDYGITAPIDVHLMVKPVDSIIPQFAEAGASIITFHPEASEHIDRTIQLIKDHGCKAGLVFNPATSLSYLDHVIDKLDTILLMSVNPGFGGQSFIPHTLKKLAQAKQRIVESGRDIRLEVDGGIKVDNIAAAAQAGADMFVAGSAIFNQPDYEVVIDQMRKQLESVK

SEQ ID NO: 182120 - protein, 220 aa, Unknown
  Bacterial polypetide isolated from the Sargasso Sea
MSGIIKISPSILSADFSKLGEEVISLEKAGADYIHIDVMDGHFVPNLTIGPEVIKKLRPLTKKTFDVHLMISPVDNFIKDFANAGADIITFHPEATTNVSKTIKLIKEENKKVGISLKPKSNINLVKDYLNQIDLVLIMSVEPGFGGQKFMPEVLEKTKSIRKFINEKKLKVDVEIDGGINFENCSKAKNAGANILVSGSTVFKENEGNLKKNIEILRNN

SEQ ID NO: 182121 - protein, 219 aa, Unknown
  Bacterial polypetide isolated from the Sargasso Sea
MKKIQISPSILSADFSQLGNEIKKLEKGGADLIHVDVMDGHFVPNLTIGPPVIKNLRKYTKLPFDVHLMISPVHEYIENYANAGADIITIHPEATKNLKESMNLIKKLGKKVGVSLNPKTEIETLIDEIHNIDLVLVMSVNPGFGGQKFMPEVLDKIKELKKIKDKSQYHFDIEVDGGINFSNSKIVLEAGADILVSGTTVFKENNGNIKTNIKKLKSM

SEQ ID NO: 182122 - protein, 219 aa, Unknown
  Bacterial polypetide isolated from the Sargasso Sea
MKNIQISPSILSADFSQLGIEIKRLEEGGADMIHVDVMDGHFVPNLTIGPPVIKALRKHCSLKFDVHLMISPVHKYIEAYADAGADIITIHPEATQNLEESIKTIKDLKKKVGVSLNPVSKIELITEFLDQIDLVLIMSVNPGFGGQKFMPEVLDKIKQLKKIQREKNLNFDIEIDGGINFENCKIAIDAGANILVSGTTVFKSNDGDIKKNIDLLKLK

SEQ ID NO: 182123 - protein, 148 aa, Unknown
  Bacterial polypetide isolated from the Sargasso Sea
MTSSIKISPSILSADFSKLGEEIVSLDKAGADYIHVDVMDGHFVPNLTIGPEVVKKLRPFTKKTFDVHLMISPVDNYIKSFSEAGSDIITFHPEATDNIAHTIGLIKKYNKKVGVSLKPKSRINLIEKYINEIDLILIMSVEPRFGGQ

SEQ ID NO: 182124 - protein, 222 aa, Unknown
  Bacterial polypetide isolated from the Sargasso Sea
MNQIKISPSILSADFTRLADQVREAEEAGVDYIHVDVMDGHFVPNITIGPLVVKALRPITKLPLDVHLMIENPEFFIEDFSKAGADIITVHQEATPHLHRTIQQIHDLGIKAGVSINPSTSVKTLDEIICDVDLILVMSVNPGFGGQSYIHSCTNKIRKVREMLDERGVSADLEVDGGVNVDTVCEVISAGANAFVAGSAIFNDKNSVAENVSALREKIKTS

SEQ ID NO: 182125 - protein, 220 aa, Unknown
  Bacterial polypetide isolated from the Sargasso Sea
MSEIIIAPSILSADFARLGDEVKDVLEAGADWVHFDVMDNHYVPNLTIGPMVCKSLRDFGIDAFIDVHLMIDPVDRLAQDFIDAGASLVSFHPEASKHVHRSVSAIKDRGCKAGLVLNPATQVNVLEDVLEDLDLVLIMSVNPGFGGQSFIKSSLKKVEKVRKMIDSSGKDIKLEIDGGINKDTIASAYSAGADTFVAGSAIFNSNNYEETISLFRKLAS

SEQ ID NO: 182126 - protein, 220 aa, Unknown
  Bacterial polypetide isolated from the Sargasso Sea
MGNSIKISPSILSADFSKLGEEIINLDKAGADYIHVDVMDGHFVPNITIGPEVIKKLRPLTKKTFDVHLMISPVNNYIEQFALAGADIITFHPEATKDTNETIKLIKNHKKKVGISLKPKSSIDLITKHLESIDLVLIMSVEPGFGGQKFMPEVVEKVKEIKKIVLEKNLKIDIEIDGGINFENCKVVKNAGANVLVSGSTIFKENSGNIKKNISLLRSN

SEQ ID NO: 182127 - protein, 219 aa, Unknown
  Bacterial polypetide isolated from the Sargasso Sea
MKNIQISPSILSADFSQLGTEIKRLEEGGADMIHVDVMDGHFVPNLTIGPPVIKALRKHCSLKFDVHLMISPVHKYIDAYADAGADIITIHPEATDNLENSIKKIKEKNKNVGVSLNPETKIDLIIDLLDQIDLVLIMSVNPGFGGQKFMPEVLDKIKELKKIREQKKFDFDIEIDGGINFDNCKSAIDAGANILVSGTTVFKSNDGDIKKNINLLKLK

SEQ ID NO: 182128 - protein, 192 aa, Unknown
  Bacterial polypetide isolated from the Sargasso Sea
MSEIIIAPSILSADFARLGEEVEEVLNAGADWVHFDVMDNHYVPNLTIGPMVCKSLRDYGIDSFIDVHLMIDPVDRLAQDFIDAGASLVSFHPEASKHVHRSVSAIKDRGCKAGLVLNPATQVNVLEDVLEDLDLVLIMSVNPGFGGQSFIESSLKKVEKVRKMIDSSGKDIKLEIDGGINKDTIASAYSAG

SEQ ID NO: 182129 - protein, 225 aa, Unknown
  Bacterial polypetide isolated from the Sargasso Sea
MRPFLIAPSILSADFARLGDDVKAVLDAGADVVHFDVMDNHYVPNLTIGPMVCKALRDYGITADIDVHLMVKPVDRIVPDFAKAGASIITFHPEASEHIDRTLQLIKESGCKAGLVFNPATPLHYLDHVMDKLDVILLMSVNPGFGGQSFIPSTLDKLRQVRERIDASGFDIRLEVDGGVKVDNIAEIAAAGADMFVAGSAIFGKPDYKVVVDEMRAELAKVEAK

SEQ ID NO: 182130 - protein, 222 aa, Unknown
  Bacterial polypetide isolated from the Sargasso Sea
MSDQKNIIAPSILASDFARLGEEVRTVLDAGADWVHFDVMDNHYVPNLTIGPMVCKALREYGIKEFIDVHLMIDPVDELAQSFIDAGADLISFHPEATKHIHRSIHAIKDKGCKAGLVYNPATPLHTLESVLEDLDLVLIMSVNPGFGGQSFIHSSLEKIAQVRKMIDESGKDVRLEVDGGINKDTIGLASEAGADTFVAGSAIFNTENYEQTISELRSKIV

SEQ ID NO: 182131 - protein, 213 aa, Unknown
  Bacterial polypetide isolated from the Sargasso Sea
SPSILSADFSQLGSEIKNFEEGGADLIHVDVMDGHFVPNLTIGPPVIKNLRKYTKLPFDVHLMISPVHKYIENYAEAGADIITIHPEATENLKESINLIKKFGKKVGVSLNPKTEIKTLIDEIKNIDLILVMSVNPGFGGQKFMPEVLDKIKELKNIKDKNQYHFNIEVDGGINFSNAKTVLEAGADILVSGTTIFKENNGDIKNNIEKLKSM

SEQ ID NO: 182132 - protein, 148 aa, Unknown
  Bacterial polypetide isolated from the Sargasso Sea
MKKIQISPSILSADFSQLGNEIKKLEEGGADLIHVDVMDGHFVPNLTIGPPVIKNLRKYTKLPFDVHLMISPVHEHIENYANAGADIITIHPEATKNLKESISLIQKFGKKVGVSLNPKTEIKTLIDEIDNIDLVLVMSVNPGFGGQK

SEQ ID NO: 182133 - protein, 220 aa, Unknown
  Bacterial polypetide isolated from the Sargasso Sea
MSSSIKISPSILSADFSKLGSEVISLEKAGADYIHIDVMDGHFVPNLTIGPEVIKKLRPLTKKTFDVHLMISPVDNFIKDFADAGSDIITFHPEATQDVSKTIDLIKNEKKKVGISLKPKSKIDLIENYLSEIDLVLIMSVEPGFGGQKFMPEVLSKTKILKKIIKEKNLNVDIEIDGGINFENCTLAKEAGANILVSGSTIFKENQGNLKKNIEILRKN

SEQ ID NO: 182134 - protein, 151 aa, Unknown
  Bacterial polypetide isolated from the Sargasso Sea
MKNIQISPSILSADFSQLGTEIKRLEEGGADMIHVDVMDGHFVPNLTIGPPVIKALRKHCSLKFDVHLMISPVHKYIKAYADAGADIITIHPEATQNLEESIKMIKDLKKKVGVSLNPGSKIELITGYLDKIDLVLIMSVNPGFGGQKFMP

SEQ ID NO: 182135 - protein, 219 aa, Unknown
  Bacterial polypetide isolated from the Sargasso Sea
MAKKLAPSILSADFARLGEEVSEVVKAGADIIHFDVMDNHYVPVLTFGPKICADLRAYGVSAPIDVHLMAKPVDDLIKAFGDAGADYITFHPEASEHIDRSLRLIEQVGCKAGLVFNPATPLDYLEYVTDQIDMILIMSVNPGYGGQKFISTTYKKIREAKECISRLGAEILVEVDGGINLSNISEISSAGADIFVAGSAIFDSENYAETIAKLKKEIE

SEQ ID NO: 182136 - protein, 197 aa, Unknown
  Bacterial polypetide isolated from the Sargasso Sea
MKKIRISPSILSADFSQLGNEIKKLEQGGADLIHVDVMDGHFVPNLTIGPPVIKNLRKYTKLPFDVHLMISPVHDYIENYANAGADIITIHPEATKNLNESINLIKKFGKKVGVSLNPKTEIKTLIDEIENIDLVLVMSVNPGFGGQKFMPEVLDKIRELKKIKDKSKYHFDIEVDGGIDFSNSKIVLEAGADILVS

SEQ ID NO: 182137 - protein, 219 aa, Unknown
  Bacterial polypetide isolated from the Sargasso Sea
MKNIQISPSILSADFGQLGSEIKRLEEGGADMIHVDVMDGHFVPNLTIGPPVIKALRKHCSLKFDVHLMISPVHKYIDAYAEAGADIITIHPEATDNLENSIKKIKEKNKKVGVSLNPESKIDLILDLLDQIDLVLIMSVNPGFGGQKFMPEVLDKIKELKKIKEQKKMVFDIEIDGGINFDNCKSAIDAGANILVSGTTVFKSNDGDIKKNINLLKLK

SEQ ID NO: 182138 - protein, 222 aa, Unknown
  Bacterial polypetide isolated from the Sargasso Sea
MSDQKYIIAPSILASDFARLGDEVRNVLDAGADWVHFDVMDNHYVPNLTIGPMVCKALRKYGIKEFIDVHLMIDPVDELAQRFIEAGADLISFHPEASTHVHRSIHAIKDKGCKAGLVYNPATPLNTLENVLDDIDLVLIMSVNPGFGGQSFIHSSLDKITQVRKMIDESGKDIRLEVDGGINNDTIGLASAAGADTFVAGSAIFNTENYEQTISELRSKIV

SEQ ID NO: 182139 - protein, 220 aa, Unknown
  Bacterial polypetide isolated from the Sargasso Sea
MSSLIKISPSILSADFSKLGEEVIALEKAGADYIHIDVMDGHFVPNLTIGPDVIKKLRPLTKKTFDVHLMISPVDNFIKDFSKAGADIITFHPEATENIANTIKLIKSEGKKVGISLKPKSKVDLIEKYLNQIDLVLIMSVEPGFAGQKFMPEVLDKTRKIKQLVDKNKLKVEIEIDGGINFENCTEAKKAGANVLVSGSTIFKENQGNLEKNIGILRSN

SEQ ID NO: 182140 - protein, 219 aa, Unknown
  Bacterial polypetide isolated from the Sargasso Sea
MKKIQISPSILSADFSQLGVEIKRLEEGGADMIHVDVMDGHFVPNLTIGPPVIKALRKQCDLKFDVHLMISPVHKYIESYADAGADIITIHPEATDNLEASILKIRELNKKVGVSLNPESKIDLIKGFLDKIDLILIMSVNPGFGGQKFMPEVLEKIKELKKIQNDNNLDFDIEIDGGINFDNCKDAIEAGANILVSGTTIFKSNNGDIKKNINLLKLK

SEQ ID NO: 182141 - protein, 220 aa, Unknown
  Bacterial polypetide isolated from the Sargasso Sea
MSEIIIAPSILSADFARLGEEVEEVLNAGADWVHFDVMDNHYVPNLTIGPMVCKSLRDYGIDSFIDVHLMIDPVDRLAQDFIDAGASLVSFHPEASKHVHRSVSAIKDRGCKAGLVLNPATQVNVLEDVLEDLDLVLIMSVNPGFGGQSFIESSLKKVEKVRKMIDSSGKDIKLEIDGGINKDTIASAYSAGADTFVAGSAIFNSNNYEETISLFRKLAS

SEQ ID NO: 182142 - protein, 178 aa, Unknown
  Bacterial polypetide isolated from the Sargasso Sea
MSEIIIAPSILSADFARLGEEVEEVLNAGADWVHFDVMDNHYVPNLTIGPMVCKSLRDYGIDSFIDVHLMIDPVDRLAQDFIDAGASLVSFHPEASKHVHRSVSAIKDRGCKAGLVLNPATQVNVLEDVLEDLDLVLIMSVNPGFGGQSFIESSLKKVEKVRKMIDSSGKDIKLEIDG

SEQ ID NO: 182143 - protein, 219 aa, Unknown
  Bacterial polypetide isolated from the Sargasso Sea
MKNIQISPSILSADFSQLGTEIKRLEEGGADMIHVDVMDGHFVPNLTIGPPVIKALRKHCSLKFDVHLMISPVHKYIKAYADAGADIITIHPEATQNLEESIKMIKDLKKKVGVSLNPGSKIELITEYLDKIDLVLIMSVNPGFGGQKFMPEVLDKIKQLKKIQQEKNFTFDIEIDGGINFENSKIAIEAGANILVSGTTVFKSNDGDIKKNIDLLKLK

SEQ ID NO: 182144 - protein, 220 aa, Unknown
  Bacterial polypetide isolated from the Sargasso Sea
NWIAPSILSADFARLGEDVSRVLTAGADVVHFDVMDNHYVPNLTFGPMICSALRNYGITAPVDVHLMVENVDSLVPAFAAAGASIISFHPEASKHVDRTLQLIRQQGCKAGLVFNPATPLTYLDYVLDKVDLVLLMSVNPGFGGQSFIPATLKKLQQARQIIDQSGLPIRLEIDGGVKVENIREIAEAGADTFVAGSAIFSQSDYQQVINQMRAELAGVN

SEQ ID NO: 182145 - protein, 219 aa, Unknown
  Bacterial polypetide isolated from the Sargasso Sea
MKNIQISPSILSADFSQLGKEIKRLEEGGADMIHVDVMDGHFVPNLTIGPPVIKALRKHCSLKFDVHLMISPVHKYIDTYADAGADIITIHPEATDNLENSIKKIKEKNKKVGVSLNPESKIDLILNLLDQIDLVLIMSVNPGFGGQKFMPEVLDKIKELKKIKEQKKMAFDIEIDGGINFDNCKSAIDAGANILVSGTTIFKSNDGDIKKNINLLKLK

SEQ ID NO: 182146 - protein, 211 aa, Unknown
  Bacterial polypetide isolated from the Sargasso Sea
MKNIQISPSILSADFSRLGDEIKRLEEGGADMIHVDVMDGHFVPNLTIGPPVIKALRKHCSLKFDVHLMISPVHNYIDAYADAGADIITIHPEATDDLENSIKKIKEKNKKVGVSLNPESKIDLILDLLDQIDLVLIMSVNPGFGGQKFMPEVLDKIKELKKIKEQKKMTFDIEIDGGINFDNCKSAIDAGANILVSGTTVFKSNDGDIKK

SEQ ID NO: 182147 - protein, 219 aa, Unknown
  Bacterial polypetide isolated from the Sargasso Sea
MKNIQISPSILSADFSQLGSEIKRLEEGGADMIHVDVMDGHFVPNLTIGPPVIKALRKHCSLKFDVHLMISPVHKYIDAYADAGADIITIHPEATENLENSIKKIKEKNKKVGVSLNPESKIDLILGLLDQINLVLIMSVNPGFGGQKFMPEVLDKIKDLKKIKEQKKLDFDIEIDGGINFDNYKSAIDAGANILVSGTTVFKSNDGDIKKNINLLKLK

SEQ ID NO: 182148 - protein, 222 aa, Unknown
  Bacterial polypetide isolated from the Sargasso Sea
MSDKKYIIAPSILASDFAKLGEEVRDVLDAGADWIHFDVMDNHYVPNLTIGPMVCKALRNYGIKEFIDVHLMIDPVDELAQSFIEAGADLISFHPEASKHIHRSIHAIKDKGCKAGLVYNPATPLHTLESVLEDLDLVLIMSVNPGFGGQSFIHGSIEKIAQVRKMIDALGKDIRLEVDGGINKDTIALASEAGADTFVAGSAIFNTENYEQTISELRSKIV

SEQ ID NO: 182149 - protein, 225 aa, Unknown
  Bacterial polypetide isolated from the Sargasso Sea
MRPFLIAPSILSADFARLGDDVKAVLDAGADVVHFDVMDNHYVPNLTIGPMVCKALRDYGITAEIDVHLMVKPVDRIVPDFAKAGASIITFHPEASEHIDRTLQLIKESGCKAGLVFNPATPLHYLDHVMDKLDVILLMSVNPGFGGQSFIPSTLDKLRQVRERIDASGFDIRLEVDGGVKVDNIAEIAAAGADMFVAGSAIFSQPDYKAVVDEMRAELAKVEAK

SEQ ID NO: 182150 - protein, 219 aa, Unknown
  Bacterial polypetide isolated from the Sargasso Sea
MKNIQISPSILSADFSQLASEIKRLEEGGADMIHVDVMDGHFVPNLTIGPPVIKALRNHCSLKFDVHLMISPVHKYIEAYASAGADIITIHPEATENLENSIKKIKELNKKVGVSLNPESKISLITNLLDQIDLVLIMSVNPGFGGQKFMPQVLEKIKDLKKIQQEKNLNFDIEIDGGINFDNCKSAIDAGANILVSGTTIFKSNNGDIKKNINLLKLK

SEQ ID NO: 182151 - protein, 219 aa, Unknown
  Bacterial polypetide isolated from the Sargasso Sea
MKNIQISPSILSADFSQLGTEIKRLEEGGADMIHVDVMDGHFVPNLTIGPPVIKALRKHCSLKFDVHLMISPVHKYIEAYADAGADIITVHPEATDNLEDSINKIKDLKKKVGVSLNPETSIDLIKNLLDKIDLVLIMSVNPGFGGQKFMPEVLEKIKELKKIREIEKLNFDIEIDGGINFDNCKIAIEAGANILVSGTTVFKSNDGDIKKNINLLKTK

SEQ ID NO: 182152 - protein, 207 aa, Unknown
  Bacterial polypetide isolated from the Sargasso Sea
MRQPNWIAPSILSADFARLGEDVVRVLKAGADVVHFDVMDNHYVPNLTFGPMICSALRNYGVTAPVDVHLMVENVDTLVPAFAEAGASIISFHPEASKHIDRTLQLIRQHGCKAGLVFNPATPLSYLDYVLDKVDLVLLMSVNPGFGGQSFIPATLKKLQQARQIIDQSGLPIRLEIDGGVKVENIREIAEAGADTFVAGSAISARA

SEQ ID NO: 182153 - protein, 222 aa, Unknown; identical to SEQ ID NO: 182050
  Bacterial polypetide isolated from the Sargasso Sea

SEQ ID NO: 182154 - protein, 220 aa, Unknown
  Bacterial polypetide isolated from the Sargasso Sea
MSALIKISPSILSADFSKLGEEVIALEKAGADYIHIDVMDGHFVPNLTIGPEVIKKLRPLTKKIFDVHLMISPVDNFIKDFSKAGADIITFHPEATPNILNTINLIKKEGKKVGISLKPKSKIELIEKYIEQVDLVLIMSVEPGFGGQKFMPEVLDKTKKIKELVDKKNLKTEIEIDGGINFENCTQAKKAGANVLVSGSTIFKENQGDLKKNIGILRTN

SEQ ID NO: 182155 - protein, 224 aa, Unknown
  Bacterial polypetide isolated from the Sargasso Sea
MTTKDYIIAPSILSADFARLGEESESVLTSGADWIHFDVMDNHYVPNLTIGPMVCKALRDYGIKAPIDTHLMVKPVDSLIESFAKAGSTYITFHPEATDHIDRSIELIKSHDCKAGLVLNPATPVSLIEESIDKLDMILLMSVNPGFGGQKFIDSVLTKVTKVRDTIDRKNLDIRLEVDGGINLENIATVAEAGADTFVAGSAIFNEEDYSKIIKQMRSSLEAL

SEQ ID NO: 182156 - protein, 228 aa, Unknown
  Bacterial polypetide isolated from the Sargasso Sea
MTQFRIAPSILSADFARLGEEVRNVVAAGADWIHFDVMDNHYVPNLTIGPLVCEAIRPHVQVPIDVHLMVRPVDRIVPDFAKAGANLISFHPEGSDHIDRTLSLIRDHGCKAGLVFNPATPLNYLDHVMDRLDFVLLMSVNPGFGGQSFIPETLNKLREARARIDAYTERTGREILLEVDGGVKTDNIAEIAAAGADTFVAGSAIFGKPDYRKVIDEMRAALATVERS

SEQ ID NO: 182157 - protein, 219 aa, Unknown
  Bacterial polypetide isolated from the Sargasso Sea
YIIAPSILSADFSRLGDEVHSVLEAGADWVHFDVMDNHYVPNLTIGPMVCQALRDYGITAPIDVHLMVEPVDELIKSFSRAGATYITFHPEASTDIDQSINLIKDGGCKAGLVLNPDIPIDVLEGYLEKLDMILLMSVFPGFGGQKFIDSVLEKVVELRSIINDKNLETRLEIDGGIKLDNIREVADAGADTFVSGSAIFGQPDYSEIIQKMRASLKAK

SEQ ID NO: 182158 - protein, 317 aa, Unknown
  Bacterial polypetide isolated from the Sargasso Sea
QEDRFESKVCVTAQHREMLDQVLDLFSIKPDFDLGVMKTGQTLYDVTTDVLKGLEKIVASYKPDLLLVHGDTTTTFAASLAAYYQQIEVGHIEAGLRTGNMYSPWPEEANRKLTGVLAKYHFTPTEVSKDNLLKESIPEENIVVTGNTVIDSLLWVTEKLNQSKSLTKDMASTFDFLDEEKKLILVTGHRRESFGQGFQRICRALKQISSDNPQTQILYPVHLNPNVQEPVKKLLADLDNVFLIQPQSYLQFCYLMKRSEIILTDSGGIQEEAPSLGKPVLVLRETTERPEAIEAGTVKLVGTKVDTIVKEVNLLLK

SEQ ID NO: 182159 - protein, 382 aa, Unknown
  Bacterial polypetide isolated from the Sargasso Sea
MNSRILLTFGTRPEAIKMAPLVRRLKNTKGIDCFVCVTGQHREMLDQVLSLFRIRPHFDLNVMKRGQDLYDVTTSIMLGMRDVLTDCRPDLVLVHGDTTTTMAASLASFYQRIPVGHVEAGLRTGNLLSPWPEEANRKLTGVLAATHFAPTERARQNLLAENVPDDRIVVTGNTVIDALLHVRELLANDPQLRASAERHLPNLEADRRIVLVTGHRRESFGDGFERICSALAQLARAHPDADIVYPMHLNPSVREPVNRLLSNIPNVHLIEPLDYLPFVHLMDRAFLILTDSGGVQEEAPSLGKPVLVMRDTTERQEAVDAGVVKLVGTDAQKIFDGASQLLSDSRMYDAMSRGSNPYGDGNACERIARALTANPPAATLAA

SEQ ID NO: 182160 - protein, 185 aa, Unknown
  Bacterial polypetide isolated from the Sargasso Sea
MTILVTGGAGYIGSHTLVELLNVGQQVVVLDNLSNSSPESLERVERITGKPVIFVEGDVLDRACLQQLFAAHQIESVIHFAGLKAVGESSQIPLTYYQNNITGTLVLCEEMAKAGVFRLVFSSSATVYGDPASVPLREDFPTSATNPYGRSKLMVEEILRDLAKSDPRWAIVLLRYFNPVGAHES

SEQ ID NO: 182161 - protein, 193 aa, Unknown
  Bacterial polypetide isolated from the Sargasso Sea
GESVAKPLFYYENNVSASGLLMQVMLAHQVKTLVFSSSATVYGEPVSSPIREDFAVHPESPYGRSKLMVEQIMSDLVVAQPDFSAISLRYFNPVGAHESGLIGEDPNGIPNNLMPFINQVAIGRRPYLSVFGDDYDTPDGTGVRDYIHVCDLASGHVKALETLHQNAGFHVFNLGTGHGVSVLEMVDAYRRIS

SEQ ID NO: 182162 - protein, 284 aa, Unknown
  Bacterial polypetide isolated from the Sargasso Sea
MSHILLTGGAGYIGSHTALELLNAGFNVLSFDNFSNSSDAALKRVEQLSGKSVVSVKGDIRDEQALRDVFSQYDIAAVVHFAGLKAVGESTQIPLHYYDNNVAGTVTLCRVMREFGVKKLVFSSSATVYGDTKQVPIPETAPRSATNPYGQSKLMIEHILEDLVRAEPDWGITLLRYFNPVGAHDSGQIGEDPNGIPNNLMPFISQVAVGKREQLSVFGNDYATHDGTGVRDYIHVVDLARGHLKALQYLQTHSGIEAINLGTGTGYSVLDMVKAFSETNKVPV

SEQ ID NO: 182163 - protein, 234 aa, Unknown
  Bacterial polypetide isolated from the Sargasso Sea
TCTLVEVMNVFKCKNIVFSSSATVYGNPKSVPIKENFSLSATNPYGQSKLMIERFLQDLFDADSSWRIAILRYFNPVGAHKTGIIGEDPNGIPNNLMPYISQVAIGKLKQLNIFGGDYDTPDGTGIRDYIHVVDLAKGHVNAINTLKDKSQIMKINLGTGTGYSVLEMVMAFEKASGKDIPYKITDRRVGDIAASYTDPSFAEEKLNWKANLKIDEMCEDTWRWQNNNPNGYKD

SEQ ID NO: 182164 - protein, 251 aa, Unknown
  Bacterial polypetide isolated from the Sargasso Sea
MSYVLLTGGAGYIGSHTALALLRAGEQVISFDNYSNSSAESLKRVEQLAGKSVIQIEGDVLDADALAAVFEQYPIKAVVHFAGLKAVGESTQKPLWYYETNVGGTIKLCQVMTKFGVKNLVFSSSATVYGDAQNSPLPETTPTVAMNPYGQSKLMTEWVLQDLYQSDNSWNIAVLRYFNPVGADASGRIGEDPNGIPNNLMPFITQVAVGKRAQLQIFGNDYPTVDGTGVRDYIHVTDLAAGHVAALQHLA

SEQ ID NO: 182165 - protein, 258 aa, Unknown
  Bacterial polypetide isolated from the Sargasso Sea
MRGGGPKDKQVVLVTGGVGYIGSHTVLELLQAGYEVVIADNLCNSNIECLKRVQKLAGREATFHKVDIRDKAALSDLFSKYNVGSVIHFAGLKAVGESVAKPLLYYQVNIEGTLNLVQCMDDAGCRNIVFSSSATVYGDPASVPVTESFPTGATNPYGSSKLFNEQILTDVAKAPGENKWNVCLLRYFNPVGAHESGQIGEDPKGIPNNLMPFIQQVAVGKRPHLSVFGSDYPTADGTGVRDYIHVVDLAKGHLAALR

SEQ ID NO: 182166 - protein, 246 aa, Unknown
  Bacterial polypetide isolated from the Sargasso Sea
KPIEYYINNFVGTCTLVEVMNMFKCKNIVFSSSATVYGNPKSVPIKEDFPLSATNPYGQSKLMIERFLQDLFDADSSWRIAILRYFNPVGAHKTGIIGEDPSGIPNNLMPYISQVAIGKLKQLNIFGGDYDTPDGTGIRDYIHVVDLAKGHVNAINTLRNKSQIIKINLGTGTGYSVLDMVMAFEKASGKKIPYKIVERRAGDIAASYTDPSYAKEKLCWKANLKIDEMCEDTWRWQNNNPNGYKD

SEQ ID NO: 182167 - protein, 184 aa, Unknown
  Bacterial polypetide isolated from the Sargasso Sea
MVEMMLQDIAKSDERFAFAILRYFNPVGAHESGIIGEDPNGIPNNLLPFIAQVAVGKLKQLAVFGDDYDTIDGTGVRDYIHVVDLAIGHLKALDKIATNTGALVYNLGTGNGYSVLQMVNAFIKASNQAVPYQVSPRRPGDIAACYAAPEKALNELGWEAKRGIDAMMQDTWRWQSNNPNGYSK

SEQ ID NO: 182168 - protein, 337 aa, Unknown
  Bacterial polypetide isolated from the Sargasso Sea
MSYVLLTGGAGYIGSHTALALLRAGEQVVSFDNYSNSSPESLKRVEHLAGKSVIQIKGDVLDAAALAAVFEQYPIKAVVHFAGLKAVGESTQKPLWYYETNVGGTIKLCQVMAKFGVKNLVFSSSATVYGDAQNSPLPETTPTVAMNPYGQSKLMTEWVLKDLYQSDNSWNIAVLRYFNPVGADASGRIGEDPNGIPNNLMPFITQVAVGKRAQLQIFGNDYPTTDGTGVRDYIHVTDLAAGHVAALQHLSKGPGFDCFNLGSGEGLSVLDIVNSFAEVNKVAVPYQFVERRPGDVARYFADPSKAKAVLNWQTKQSLEDIVRDSWNWQKNNPNGYN

SEQ ID NO: 182169 - protein, 337 aa, Unknown
  Bacterial polypetide isolated from the Sargasso Sea
MKVLVTGGCGYIGSHTCLALQAAGMEPVVVDNLCNSKAGVLARIAAISGREPRFYQGDIRDPALLDRIFSEQRIDAVIHFAALKAVGESTRLPLAYYENNLSGTLVLLQAMQRAGVHNLVFSSSATVYGDPASTPIREDFPRSATNPYGRSKLIIEEILEDLQRAEPHWSMTLLRYFNPVGAHESGTMGEDPQGIPNNLMPFLTQVAIGRRDCLSIFGNDYPTVDGTGVRDYIHVMDLAEGHVKALQHCASKGGVHVYNLGTGQGQSVLQMVAAFEAASGRPLPYRIEPRRPGDIAECWADPAKAERELGWRARRDLAAMCADSWRWQSANPQGYEA

SEQ ID NO: 182170 - protein, 337 aa, Unknown
  Bacterial polypetide isolated from the Sargasso Sea
MTILVTGGAGYIGTHTVVELLNAGSEVIVLDNLSNSSIEALNRVERITGKAVTFYQGDILNKALLQKVFSDHNIDAVIHFAGLKAVGESVAKPLKYYENNVTGTLILCQVMAEFKVKNLVFSSSATVYGDPASLPITEDFPTGATNPYGQSKLMVEHILADLHHSDPSWNIARLRYFNPVGAHASGLIGEDPNDIPNNLMPFIAQVAVGKREALSVFGNDYPTHDGTGVRDYIHVVDLALGHLKALEKLGTKPGLVTYNLGTGQGYSVLDMVKAFEKACGKSIAYQIAPRRPGDIAACYANPDHAKTDLGWQATHSLEDMANSSWHWQSTNPNGYKG

SEQ ID NO: 182171 - protein, 340 aa, Unknown
  Bacterial polypetide isolated from the Sargasso Sea
MTAKGTILVTGGAGYIGSHTAVELLDNGYDVVIVDNLVNSKAESVRRIERITGKTPAFHQVDVCDEAALAKVFDAHPITGTIHFAALKAVGESVAKPLEYYQNNIGGLLAVLKVMRKRNVRQFVFSSSATVYGVPERSPIDESFPLSATNPYGQSKLIAEQILRDLEVSDPSWRIATLRYFNPVGAHASGLIGEDPAGIPNNLMPYVAQVAVGKLERLRVFGSDYPTPDGTGVRDYIHVVDLAKGHIAALDALAKRDASFVVNLGTGQGYSVLEVVRAFEKASGRPVPYELVARRPGDIAECYANPQAAADIIGWRATLGIEEMCADHWRWQEGNPRGFV

SEQ ID NO: 182172 - protein, 337 aa, Unknown
  Bacterial polypetide isolated from the Sargasso Sea
MTILVTGGAGYIGTHTVVELLNAGSEVIVLDNLSNSSIEALNRVERITGKSVTFYQGDILNKALLQKVFSDHNIDAVIHFAGLKAVGESVAKPLKYYENNVTGTLILCQVMAEFKVKNLVFSSSATVYGDPASLPITEDFPTGATNPYGQSKLMVEHILADLHHSDPSWNIARLRYFNPVGAHASGLIGEDPNDIPNNLMPFIAQVAVGKREALSVFGNDYPTHDGTGVRDYIHVVDLAIGHLKALEKLATKPGLVTYNLGTGQGYSVLDMVKAFEKACGKSIAYQIAPRRPGDIAACYANPEHARTDLGWQATHSLEDMANSSWHWQSTNPNGYKS

SEQ ID NO: 182173 - protein, 276 aa, Unknown
  Bacterial polypetide isolated from the Sargasso Sea
DLTIADYMDKDEFQARIVSGDEFEEWDDGIEVIFHEGACSATTEWNGKFIMEVNYEYSKDLFHYCIEREIPFIYASSAATYGGRNDNFIEDPRFEQPLNVYGYSKQLFDQYVRRWMPEINSQVVGLKYFNVYGPREQHKGSMASVAFHLNTQVKQGDNPKLFEGCDGFPDGGQMRDFIYVDDVCKVNLWFWQNPQHSGIFNCGTGRAEPFQNVAEAVIRHHQKGAIEYIPFPDHLKGRYQSFTQADLTKLRGVGYDGEFKTVAEGVADYMAWLNRA

SEQ ID NO: 182174 - protein, 199 aa, Unknown
  Bacterial polypetide isolated from the Sargasso Sea
MIVVTGGAGFIGSNILKGLNDIGEKNILVVDNLSNAQKHLNLNRLSFTDYIDKDDFVLNIGKFTNLSTIFHQGACSSTTEQDGKYMMSNNYEYSKILLNNCLEHKIDFLYASSAAVYGNGGNGFTEESKAEYPMNVYGFSKFAFDNYVRRVLPKSEIQILGLRYFNVYGPQENHKGRMASVAFHLFNQLHDSGKMRLFE

SEQ ID NO: 182175 - protein, 330 aa, Unknown
  Bacterial polypetide isolated from the Sargasso Sea
MTLIVTGAAGFIGANIVKALNERGETRIIAVDNLTRADKFRNLVDCEIDDYLDKTEFVERFARGDFGKVRAIFHEGACSDTMETDGRYMMDNNFRYSRAVLDACLAQGTQFLYASSAATYGGSTRFVEEREVEAPLNIYGYSKFLFDQVIRRVLPTAKSQIAGFRYFNVYGPRETHKGRMASVAFHNFNQFRAEGKVKLFGEYNGYAPGEQTRDFVSVEDVTKVNLFFFDHPEKSGIFNLGTGRAQPFNDIASTVVNTLRALDNQPPLTLAQQVEQGLIEYVPFPDALRGKYQCFTQADQTKLRAAGYDAPFLTVQEGVDRYVRWLSGQV

SEQ ID NO: 182176 - protein, 216 aa, Unknown
  Bacterial polypetide isolated from the Sargasso Sea
MIIVTGSNGFIGSNLIKGLNSMGIKDILAVDDHEKLPPSENLSNCEFEDLIKIEDIAELLRNYPTNDITHIFHQGACSDTMEKDINYMIKNNYLFSKDLLTLALEKNINFIYASSASVYGDGKIFEEDKKYEKPINLYAYSKFIFDQYVRELINKTDSQIVGLRYFNVYGPNEQHKGRMASVAFHLHQQLKESQSIKLFKALMVMKMESKKEILFM

SEQ ID NO: 182177 - protein, 318 aa, Unknown
  Bacterial polypetide isolated from the Sargasso Sea
MIVVTGGAGFIGSNLVKQLNAQGRTDVVVIDDLTDGTKFVNLVDLTIADYMDKDEFQARIVSGDEFEEWDGGIEVIFHEGACSATTEWNGKFIMEVNYEYSKDLFHYCIEREIPFIYASSAATYGGRNDNFIEDPKFEQPLNVYGYSKQLFDQYVRRWMPEINSQVVGLKYFNVYGPREQHKGSMASVAFHLNTQVKKGENPKLFEGCDGFPNGGQMRDFIYVDDVCKVNLWFWQNPQHSGIFNCGTGRAEPFQNVAEAVIKHHQKGAIEYIPFPDHLKGRYQSFTQADMTKLRGVGYDAEFKTVAEGVADYMAWLNR

SEQ ID NO: 182178 - protein, 321 aa, Unknown
  Bacterial polypetide isolated from the Sargasso Sea
MIVVTGSNGFIGSNLIKGLNKIGYKDIIAVDDHNNPELKENIIHCEIQDYLDIDEFLLLIQKNKFDGTKLKSIYHQGACSNTMEWDAEYLYKNNFLYSKEILNLSIKSNTPLIYASSASVYGSGNVFEESIENESPINLYAYSKFKFDQLVRQALTEKTTQIVGLRYFNVYGPQEQHKGSMASVAYHLHNQLKDNGSIKLFKGSDGYSDGEQRRDFIYIDDIVKVNLWFMENKKISGIFNLGTGKSRTFNDVAQAVISWHSKGRIEYIDFPEKLKGSYQSFTEANISKLREVGYREDFIDITEGVNLYLDNLEKWPKNDPS

SEQ ID NO: 182179 - protein, 330 aa, Unknown
  Bacterial polypetide isolated from the Sargasso Sea
MTLIVTGAAGFIGSNLVKALNERGEQRIIAVDNLTRADKFKNLVDCEIDDYLDKTEFVERFKRGDFGKVRAIFHEGACSDTMETDGRYMMDNNFRYSREVLDVCLAQNIQFLYASSAATYGGSSRFVEEREVEQPLNVYGYSKFLFDQVIRRVLPTAKSQIAGFRYFNVYGPRETHKARMASVAFHNFNQFRAEGKVKLFGEYNGYAAGEQTRDFVSVEDVVKVNLFFFDNPDKSGIFNLGSGRAQPFNDIASTVVNTLRALNNEPPLSLADQVQRGLIEYIPFPDALRGKYQCFTQADLTKLRAAGYDAPFLSVQEGVDRYVRWLFGQV

SEQ ID NO: 182180 - protein, 319 aa, Unknown
  Bacterial polypetide isolated from the Sargasso Sea
MIVVTGSNGFIGSNLIKNLNALGFAEILAVDNHDDEDLKENIKDCQISEYLGIDEFLTLIKNRNLDSEIKTIFHQGACSNTMEWDGEYLFQNNLLYSKELLKFCLEKSIQFIYASSASVYGSGTNFKEDLNNESPINLYAYSKYLFDQLVRKHLGKNKSQIVGLRYFNVYGPKETHKGSMASVAFHLHQQLKAGTKVNLFKGSDGFADGEQRRDFVYVDDVIDVNLWFMKNPDKSGIYNVGTGKSQTFNEVAEAVIEWNQKGLINYIDFPDHLKGAYQSYTEADIDSLRKAGYSQEFLDVKAGVKKYLDSLSNWPQNEY

SEQ ID NO: 182181 - protein, 131 aa, Unknown
  Bacterial polypetide isolated from the Sargasso Sea
MNLEPPKGNLDTSKTYKAKIDTEKGEIVIHLYSDQTPLTCENFINLSKAGYYDGTTFHRVIPGFMIQGGDPTGTGAGGPGYQFEDEFVSSLKHDSEGILSMANAGPGTNGSQFFITHGPTPHLDGAHTVFG

SEQ ID NO: 182182 - protein, 209 aa, Unknown
  Bacterial polypetide isolated from the Sargasso Sea
ANAGPSTNGSQFFITHLETPWLDNKHTVFGNVVDGMDVVNSISQNDEIISIKINAVGDKAKAFDAAKAFEDFNKSKADRIKKEKENELKMLKDLSKGFSKTSSGLLYKFEKENNSHKPSNGNKVKVHYKGMLLDGTVFDSSFKRNQPIEFTLGVGQVIKGWDEGISLLGIGDKASFIIPSDLAYGASGAGGVIPPNATLIFEVELISAE

SEQ ID NO: 182183 - protein, 166 aa, Unknown
  Bacterial polypetide isolated from the Sargasso Sea
MNLEPPKGNLDTKKTYKAKIDTEKGEIVIHLYSDQTPITCENFINLSKAGYYNGTTFHRVIPGFMIQGGDPTGTGAGGPGYQFNDEFVSSLKHDSEGILSMANAGPGTNGSQFFITHGPTPHLDGAHTVFGKVISGMDVVLKIRERDPMSDPNPGDMINSIEIEEK

SEQ ID NO: 182184 - protein, 174 aa, Unknown
  Bacterial polypetide isolated from the Sargasso Sea
MSLDRLEVKHREPFKCFFDITIGGEAAGRVVMEIRGDVTPKCGENFRQLCTGEPGFGYKGSPFHRVIPGFMCQGGDFTNRNGTGGKSIFGNKFEDENFILKHTGPGILSMANAGPNTNGSQFFLCTAETAWLDGKHTVFGSVVEGMDVVQKVEAVGSQSGATSQEVLIADCGEL

SEQ ID NO: 182185 - protein, 250 aa, Unknown
  Bacterial polypetide isolated from the Sargasso Sea
TCAPADAYGEVRPENILRVPKKDVVDAVGEDFVKVGEKLMVGQGMPAEIIEVTDSEVALDANHPLAGKTLNFDIEVMSLDRLEVKHREPFKCFFDITIGGEAAGRVVMEIRGDVTPKCGENFRQLCTGEPGFGYKGSPFHRVIPGFMCQGGDFTNRNGTGGKSIFGNKFEDENFILKHTGPGILSMANAGPNTNGSQFFLCTAETAWLDGKHTVFGSVVEGMDVVQKVEAVGSQSGATSQEVLIADCGEL

SEQ ID NO: 182186 - protein, 231 aa, Unknown
  Bacterial polypetide isolated from the Sargasso Sea
MNKIYIIMSALIAIAMSTSCKSPQKPIDNSKQLPEGIYAQFETTKGEIICKLEHEKTPMTVANFVALAEGTMKNNKKEIGQAFFDGLKFHRVIPNFMIQGGCPDGNGMGDPGYKFPDEIHSDLKHSKAGILSMANSGPATNGSQFFITHKETPWLDGKHTVFGHVIGGGQKVVDSIKKDDVMKRVKILRIGEKAKKFDANKIFNTQMAIIEKEAEEKRKAAAEKIKKLTEG

SEQ ID NO: 182187 - protein, 275 aa, Unknown
  Bacterial polypetide isolated from the Sargasso Sea
LCTGERGRSARTGTPLTYKGSTFHRVIPNFMCQGGDFTKGDGTGGESIYGETFRDENFTLRHQGAGTLSMANAGPNTNGSQFFVCTGDTSWLDGKHVVFGSVVGGMDVIRRVEACGTKSGKTRETIKIVDCGEIPRELIGEDELTEAGKEILARQHAERRLAEKEARQVDGENADAASARRLRETAEAAEAKAVEVVADEPEPAHDVSAADPTAVMSAKKRKLFELRLKLNEGRKKNQAAVVDEKKRTDAPEDYANAQKRKAREASAKSRADNMV

SEQ ID NO: 182188 - protein, 293 aa, Unknown
  Bacterial polypetide isolated from the Sargasso Sea
KLEYEKTPITVANFVSLAEGNNDYVSEEYKNKKYYDGIYFHRVISDFMIQTGDPTKTGSGGPGYKFEDEITDLTHYKPGILSMANAGINTNGSQFFITHKATPWLDGKHTVFGEVIKGQNVVDSIEQNDIIEKLSIIKKGKEAKMFNAPKVISNYFEEKEKILEKRRYEEEELIKNIVEEMTKTSSGLWYKIIKNSIKPKPKNGEMVKVHYTGMLLNGEVFDSSYSRNMPIEFVLGSGRVIKGWDEGISLIPIGASAKLVIPSDLAYGERGAGGVIPPNSTLIFEIEVIDSKK

SEQ ID NO: 182189 - protein, 271 aa, Unknown
  Bacterial polypetide isolated from the Sargasso Sea
GLKFHRVIPEFMIQGGCPDGNGTGDPGYKFPDEIDASLKHSGPGILSMANSGPATNGSQFFITHKETPWLDGKHTIFGHVVEGQEIVNKIEQNDIMKKVVIIRIGKEAKRFDANKAFENGIKKAKIEEEKIKAKAAENLKKIKEGATVTPSGLAYKVLKKGSGKVHPKATQTVTVHYTGKLLDGKVFDSSVKRGQPASFPLNRVIPGWTEGVQLMVVGDKFTFIIPSNLAYGERGAGGVIPPNADLIFEVELLEIKAEESHDGHNHDGHNH

SEQ ID NO: 182190 - protein, 204 aa, Unknown
  Bacterial polypetide isolated from the Sargasso Sea
MKNGLYAKLETSRGEILLQLYHQRVPQTVANFVGLAEATKAWKDPISGKSKKTRFYDGLSFHRVIADFMIQGGDPLGTGSGGPGYRFQDEIHPDLKHSGPGILSMANAGPNTNGSQFFITHKATPWLDGKHSVFGKVIQGMETVNKIQKGDLIQTVSIIRRGKDAKGFDPSKIEAAQKAKQKSLAIKQKKDLPPLTGESDPSKV

SEQ ID NO: 182191 - protein, 210 aa, Unknown
  Bacterial polypetide isolated from the Sargasso Sea
MKRITGLLLASSLSMVLSACGGGEDDLTPNIPKPDPTPPSLSADVCYLMSTTKGDVTLAIDLTHMPITGKNFKQYVDKSFYNGTLFHRTINNFMIQGGGFTTGLQSKPTSSPIKNEAAVGISNKRGTIAMARTTVPDSATSQFFINVLDNPQLDASASNYGYAVFGKVVEGMDVVDQISIVPTKTSNGFNDTPVTEILINSVTETNCPKA

SEQ ID NO: 182192 - protein, 172 aa, Unknown
  Bacterial polypetide isolated from the Sargasso Sea
MATTATIATNHGDIRINLFPDQAPKTVRNFTGLAEGTQEWTDPTVQAKSTAPLYDGTIFHRIIPGFMIQGGDPLGTGTGGPGYRFDDEPHPELTFDKPYLLAMANAGPNTNGSQFFITVAPTTWLNFKHTIFGEVADQESRDVVDAIAAVETGAQDRPTQDVVIESISISRD

SEQ ID NO: 182193 - protein, 317 aa, Unknown
  Bacterial polypetide isolated from the Sargasso Sea
NDYSDLNEGIYANLETSKGDLILELFYKQTPLTVSNFVALSEGNHPAADEQFSGKPYYDGLKFHRVIDNFMIQGGDPTGTGSGGPGFQFDDEFSEELKHTGPGILSMANAGPGTNGSQFFITHVETPWLDGKHSIFGKVNSGQDVVDNIAQDDIIKSVKIIRIGKDAKEFDAPKIFEDYITNKSQADILKAEEEAKLLDDLTSGMIETESGLKYKVSKKGSGPNAKIDDVLSVHYSLKLVDGSEIDSSFTRGEPIEFTCGVGQVIKGWDEAMQLLNKGSKATLVIPSELGYGSTGAGNGVIPPNATLIFEVELVDIK

SEQ ID NO: 182194 - protein, 163 aa, Unknown
  Bacterial polypetide isolated from the Sargasso Sea
MNDYSELNEGIYANLETSKGDIILELFFKQTPLTVSNFVALSEGNHPAADEQFSGKPYYDGLKFHRVIDNFMIQGGDPTGTGSGGPGFQFDDEFSEELKHTGPGILSMANAGPGTNGSQFFITHVETPWLDGKHSVFGKVNSGQDVVDNIAQDDLIKSVKIIR

SEQ ID NO: 182195 - protein, 162 aa, Unknown
  Bacterial polypetide isolated from the Sargasso Sea
MTETIISEELPQIQIQTERGLITLEMFEDEAPNTVANMISLTEQDFYNGLTFHRVIPNFMIQGGCPQGTGAGDPGYRFDDECTPERLHNGPGVLSMANAGPGTNGSQFFITHEAQPHLDGKHTVFGKVISGMEVVNNIEQGDVIEKMLVVRKRDHEYKVEIL

SEQ ID NO: 182196 - protein, 310 aa, Unknown
  Bacterial polypetide isolated from the Sargasso Sea
MKNGLYAKFVTTKGEIIANLKYEITPGTVGNFVGLAEGEIKNSFKEDGLPFYDGIKFHRVIKDFMIQAGCPQGKGTGGPGYQFDDEFSKDLKHDEPGILSMANAGPGTNGSQFFITHVPTNWLDGKHTVFGKVIEGIDVVNIIEQNDLIISIEIIRVGNNAKKWNATKAFNKFINDKKDSKELENKLEILEFEKHIEGMSKTSSGLYYKINKEGNKNKPLKGQNIRVHYKGMLLDGTVFDSSIQRDQPIDFTLGIGQVIAGWDEGISLLSEGASAKLVIPSELAYGANGAGGVIPPNATLIFEVELLKIN

SEQ ID NO: 182197 - protein, 162 aa, Unknown
  Bacterial polypetide isolated from the Sargasso Sea
MTEVEISESLPKIEIQTSKGSIKIELFEEDAPNTVGNMISLIEKGFYDGLVFHRVIPNFMIQGGCPLGTGSGDPGYRFDDEFKSNRCHDGPGILSMANAGPATNGSQFFITHSAQPHLDGKHTVFGKVIDGQEVVDEVQQGDVIERITILNKRDHVYEVIKL

SEQ ID NO: 182198 - protein, 300 aa, Unknown
  Bacterial polypetide isolated from the Sargasso Sea
MKDGLYAKLETSRGEILLQLYHKRVPQTVANFVGLAEATKAWKDPISGKSKKTRFYDGLSFHRVIADFMIQGGDPLGTGSGGPGYRFQDEIHPDLKHSGPGILSMANAGPNTNGSQFFITHKATPWLDGKHSVFGKVIQGMETVNKIQKGDLIQTVSIIRRGKDAKGFDPSKIEAAQKAKQKSLAIKQKKDLPPLTGESDPSKVPGKNHPLAEEVSLELMVIAYEGVQTPLPALYYDKSGAKKVAEQLAELARRKNSNFSRLIDQFSDLKQQKKIPMLRADTPNLMPFLKAGLSLKEGQI

SEQ ID NO: 182199 - protein, 208 aa, Unknown
  Bacterial polypetide isolated from the Sargasso Sea
MNKNFIILISIITLNSCNMNNYSDLSEGLYADIETSKGNIILELYYEQAPLTVSNFVALAEGNHPVVDDQHSGKPYYDGLKFHRVIENFMIQGGDPTGTGSGGPGYQFDDEFNEELKHDGPGILSMANAGPGTNGSQFFITHLETPWLDGKHSIFGKVNTGQEVVDNVEQDDIIKKVKIIRVGEAAKSFDAPKNFEDYISEKSEADIL

SEQ ID NO: 182200 - protein, 359 aa, Unknown
  Bacterial polypetide isolated from the Sargasso Sea
MNSKKYILILLLTINFSCNMSQKNNDGVIYASIETNKGIIKTELFYNQTPVTVANFISLAEGKNKEVSDQYKGKKYYDGLTFHRVIPDFMIQGGDPTGTGSGSPGYNFKDEFVDELKHDSAGILSMANAGPGTNGSQFFITHKETPWLDGAHTVFGKVLEGQDIVDKIEQGDSILTVEIIRDGSGAKRFNATKVFSNHFKEEEKRKKEAEKQLLKLKEDVSTIHSKLKNDATETETGLKYFINEKGEGDKVDENKVVLTHYAVYFEDGNLLDTSILKVAEKYNMVDKRRAQAGGYSPIEAKVGPKDMMIQGFKEGLKLLNVGDKATLFLPYYLAYGETESRGIPAKSNLIFEVEIVDQK

SEQ ID NO: 182201 - protein, 161 aa, Unknown
  Bacterial polypetide isolated from the Sargasso Sea
MIKMTTTIGDITIELYEDDAPISSENFMEYVKDGFFNDTIFHRVIPNFMIQGGGMTEDMMSKPTRAPIKNEAKNGKKNLRGTLAMARTMEIDSATSQFFINLVDNNFLDHGDRDFGYAVFGEVTEGMDVVDKIAGVTTGSNQGHQDVPTEPIFIKEVVIVD

SEQ ID NO: 182202 - protein, 247 aa, Unknown
  Bacterial polypetide isolated from the Sargasso Sea
MIVANWKCNGSKVMINEWTNNFLTNYVEMKKSFIGIAPPSIYIESILDTKLSKLEEINIGSQDIDISSGARTGAISYEMILDFDCKFSIIGHSERRQFFNENNHEIKQKILKIANKTLTILCVGETEEENMNDQTKDVLKRQLEVIKDIEFNDSLVIAYEPVWAIGTGNTPTPDKINEIHKFIKDVVQSYSDISSIPMVLYGGSVNEENAENFFKEESVDGALIGGASLDGRQFANIINIFNGINLK

SEQ ID NO: 182203 - protein, 196 aa, Unknown
  Bacterial polypetide isolated from the Sargasso Sea
TISHKKLVIGAQNCHHDESGAYTGDVSAKMLKDAGAKIIIVGHSERRQFYNETNEIVNKKAVSVIKSALQTIICIGETEEEKNMGLTNKIVCTQLKNSMPSVSDENNTVIAYEPIWAIGTGRIPTIKEIEVVHKELRSLVSKIKGIDTANKMRILYGGSVKPNNAKDIFDLDNVDGALVGGASLKSDDFMGIINVC

SEQ ID NO: 182204 - protein, 183 aa, Unknown
  Bacterial polypetide isolated from the Sargasso Sea
FKIVVLILGEISLSMLLECNVEYVIIGHSERRQIFNEENDSINKKVLKVIESGIKPILCVGETIDEMNAGKAHNTIEEQLISGLNGIKSLNNIIIAYEPVWAIGTGLTASFEQINVVHKFIRKILSKLFDDKGSKNTPILYGGSVNSANANELISIDGVNGFLIGGASLDVVKFSEVVKIVNG

SEQ ID NO: 182205 - protein, 213 aa, Unknown
  Bacterial polypetide isolated from the Sargasso Sea
MVAPSYIHLSDAVEMVKDSNLEVLAQNMHFLNNGAFTGEVSVKMLKSIDVNKVILGHSERRIYYNENDDSLKEKIKIALENNFEIIFCFGEQLSDRKNGKHFDVIEDQLSIPLFHLESSNWKNIILAYEPVWAIGTGETATPNQVQEIHSFIRTLITNKYSLDLANSISILYGGSVKSNNSQEIFSKQDVDGGLIGGASLDFKEFVKIIESII

SEQ ID NO: 182206 - protein, 233 aa, Unknown
  Bacterial polypetide isolated from the Sargasso Sea
MAANWKMNYTREETKEYFENFKSLAEKSLWYSDKSFELVFAVPFTSILTTQKWQNELFFLTAAQNVHFAQKGAFTGEISIPMLQDLGVQWVILGHSERRQFFAETDESVAKKAVSSMEAGLNIIVCVGESKEERLAGESERIVSSQLKPLLEKGFNAEKLVVAYEPIWAIGTGEAASAHEAQKMHHLIRCELSRYCSAQEAEKIRILYGGSMNEKNCHNFLKEKDIDGGLVGG

SEQ ID NO: 182207 - protein, 250 aa, Unknown
  Bacterial polypetide isolated from the Sargasso Sea
MSYLIVANWKMNKTNQESLKLITEINNAIQQTSNINVVICPPYTSIVPAAEVLENSSIMLGSQNMSHEAPGAHTGEISVDMISPYCEYVILGHSERRIIYGETNDIVNMKILKALGSKLTPIICIGENIDQRNEGKLDSILKEMLESSLTGVKSFDNLVIAYEPLWAIGTGISASPEQANEACSKIKILLMEHFNKTEKDITTPILYGGSVTKENIKDFLNQDCIDGALIGSASLSSEQFLSIIQTIDTL

SEQ ID NO: 182208 - protein, 251 aa, Unknown
  Bacterial polypetide isolated from the Sargasso Sea
MRKPLIAGNWKMNGNRGLASKMLQAMESSLDQTSADLVVCPPFSLLQSVGECFEKTPIFLGAQNVHAQLSGAYTGEISAPMLNEMDVKWCIVGHSERRAQFSETDAIVRQKVGILLQNGIQPIMCVGESLEEREAGKHEEVVVEQLKNGLSGLTSDDHLRCTIAYEPVWAIGTGKTATPEQANSMHLVIRNQLAELANEQFATKMRILYGGSVNADNAEELLGQSEIDGALVGGASLKTNQFPGIITAAKG

SEQ ID NO: 182209 - protein, 139 aa, Unknown
  Bacterial polypetide isolated from the Sargasso Sea
FSESDEQINKRAVFAQSSGLTPIVCVGETLEQRERGEAFRVITRQVEQGLENTDPSNLIVAYEPIWAIGTGKTCEAEDANKICSLIRKLIGFDDLIIQYGGSVKPNNIDEIMSMSDIDGVLVGGASLDPNSFARIANYQ

SEQ ID NO: 182210 - protein, 126 aa, Unknown
  Bacterial polypetide isolated from the Sargasso Sea
NLINDKIIPVICVGETLEQKEKNLTKSIITEQLEKGISENSNFQNTVIAYEPVWAIGTGLTPSLNEIEEVHSFIKEVDKKFNNYKVLYGGSVNASNSADINSLNSVDGCLVGGSSLNVDEFNKIIS

SEQ ID NO: 182211 - protein, 182 aa, Unknown
  Bacterial polypetide isolated from the Sargasso Sea
MATPPIIAGNWKMNLVLESSTKLISDLKKGGISKSRARVIIIPPATLLSSIADQIKNTGIFLGAQNCHEELKGAFTGEVSAEMLTSAGCNYVILGHSERRTLFGETNAQIKAKMLSAIKCGLTPIVCVGESLRQREAGGAMDTVETQLEECLIDEVSKDNCIIAYEPVWAIGTGQTAEPDDI

SEQ ID NO: 182212 - protein, 184 aa, Unknown
  Bacterial polypetide isolated from the Sargasso Sea
MTCAEAKSYLEEFIPLIQNISEDRKIVIAPPFTAISTFSNHSDFNYLDISSQNIHWEDEGAFTAEISPKMLLEHGVSYAIVGHSEPRKYFSESDEQINKRAVFAQSRGLTPIVCVGESLEQRERGEADRVITRQVEQGLENTDPSKLIVAYEPIWAIGTGKTCQAIDANKICALIRKLIGFDDV

SEQ ID NO: 182213 - protein, 221 aa, Unknown
  Bacterial polypetide isolated from the Sargasso Sea
GNIEFIKEYYQKLLPNSKNCTVVCSPSIFLNRLKYNSNNLFIGAQDVSIYNEGAFTGEISAKMLSNENVSFCLVGHSERRQYFHDKNEIINKKSINLIENKIIPVICVGETLKEKENKLTKNVLVKQIEESVPEISNFDNTIIAYEPIWAIGTGLTPSLEEIEEVHSFIKNINETYNNFKVLYGGSVKAENSADINNLQNVDGCLVGGASLKVNEFNKIIS

SEQ ID NO: 182214 - protein, 209 aa, Unknown
  Bacterial polypetide isolated from the Sargasso Sea
MIKLSDFSSFFVANWKLNGNFQFIDEFINNLSLPKDNSKCVVICPTAVHLDYMSKNKNGFYVGAQNVSEHKEGAYTGEISVHSLSDLNVNFCIIGHSERRLIFKEKNEAINLKSEKLIGNGLIPIICIGETLEQKEKGITKKVLEEQLMNSVPRSSNFENTIIAYEPVWAIGTGLTPTIEEIDETHRYIREHNDKLNKYKILYGGSVKA

SEQ ID NO: 182215 - protein, 182 aa, Unknown
  Bacterial polypetide isolated from the Sargasso Sea
MIFLVKIFIGEDQGAFTAEISPKMLLEHGVSYAIVGHSEPRKYFSESDEQINKRAVFAQSSGLTPIVCVGETLEQRERGEADRVITRQVEQGLENTDPSNLIVAYEPIWAIGTGKTCEAEDANKICSLIRKLIGFDDVIIQYGGSVKPNNIDEIMSMSDIDGVLVGGASLDPNSFARIANYQ

SEQ ID NO: 182216 - protein, 52 aa, Unknown
  Bacterial polypetide isolated from the Sargasso Sea
IGENIRILYGGSVTPSNAADLFAQPDVDGGLIGGASLNSTEFLSLCTIAMSA

SEQ ID NO: 182217 - protein, 248 aa, Unknown
  Bacterial polypetide isolated from the Sargasso Sea
MSENILIVSNWKMNLNLDNATKLLDNLKKIKLGSKPKVLNIVCPQFLLIPYVSNLLSSTDIILGGQDCHFEDFGSFTGDSSIQLLKYYKCEYVILGHSERRSQYGETNLMIKKKCEIARKNKIKPIVCVGESIKLRKKGKHIDFIINQLDECIEKNLENIIVAYEPIWSIGSGLIPSYDEILEVKTKSMNFLKERKGIKNVKILYGGSVNSENFNDIIQMSGVDGALIGSASINIKEITKIILNVDFN

SEQ ID NO: 182218 - protein, 236 aa, Unknown
  Bacterial polypetide isolated from the Sargasso Sea
MNFNSTQSKEYLDSIRSKIFKRNNIKIIIASSFIDIAMNSKYLSNNISFAAQNVFYKSQGAYTGEISCNMLKEVNCNWVIIGHSERRAMFHESNEIINKKLTKVINEKLSPILCIGETEEERKQNKTLEILTSQLLTAFNGISYDKINNIKLAYEPVWAIGTGNTANFDIIDDTHKIIRNILLKNGYNGNDIPILYGGSVNEKNAKELAGIKNVDGFLIGGASLEVEKFYSIYKNL

SEQ ID NO: 182219 - protein, 236 aa, Unknown
  Bacterial polypetide isolated from the Sargasso Sea
MRENLIVANWKLNGDWQLCQKFASHNWVVPNNTSVIVCPPSIYLQSFSEVLIKNKSPLKLGAQDVSERSGGAYTGQISARMLNDASLEYVIIGHSERRQWCMETNEQVAEKVRQSLKVGLHPIICVGESLEQREADKTFKVIEEQLSSVFKVLEDFDTSLGNVSFAYEPRWAIGTGKSATPEQAQLVHESIREFLSVLSLSDDLRILYGGSVTDANIRSLLAMTDIDGALVGGASL

SEQ ID NO: 182220 - protein, 246 aa, Unknown
  Bacterial polypetide isolated from the Sargasso Sea
MGDLKFLTKLVNNFIKLHKKVKPRCDVLLLPPTLYLSMILSRLRYHRISLRKISLGVQNISPFLNGAYTGEQSVDMIKDYKCSFTLIGHSERRHILLEDENMITSKVKLSLQANLNTILCVGETLKEYNQKLTKKVISRQLRSALSKSTHLFKSDHSKVIIAYEPVWAIGTGKAAISEDIVEVHSYIRQVLNKILGSKSNSIKILYGGSVNDANAKSILDLPDVNGALVGGASLNSKKFIDICSSI

SEQ ID NO: 182221 - protein, 235 aa, Unknown
  Bacterial polypetide isolated from the Sargasso Sea
GNLKSIKSTNNVIKLTKLKKFQKLRIIYCPPYTLLDALIKKTKNSRISVGAQNCHYRSDYGAYTGSVNAKMIKDIGSNYVILGHSEARLEGDDDKKINFKIKSALDAKLKVIFCVGETLKNKKNNRTNQVIKKQINIGLKKINNYKNIIVAYEPVWSIGTGILPNKIELEKNINFIRKLLNKRKNGKKVIILYGGSVNSNNIKNLIKISQIKGFIVGGASLKAKNFIDIIKKSIN

SEQ ID NO: 182222 - protein, 132 aa, Unknown
  Bacterial polypetide isolated from the Sargasso Sea
INKRAVFAQSSGLTPIVCVGETLEQRERGEADRVITRQVEQGLENTDPSNLIVAYEPIWAIGTGKTCEAEDANKICSLIRKLIGFDDVIIQYGGSVKPNNIDEIMSMSDIDGVLVGGASLDPNSFARIANYQ

SEQ ID NO: 182223 - protein, 236 aa, Unknown
  Bacterial polypetide isolated from the Sargasso Sea
LDNFSSILVANWKLNGNKEFIKEYYQKLIPSNSNCVVICSPSIFLTSLPQNNKNLFSGAQDISSYKQGAYTGELSASMLYDNNIHFCIVGHSERRNYFRENNAIINSKSINLIENKIIPIVCVGETLEEKEKNLTKNVLSNQIKESIPSISNHQNTIIAYEPIWAIGTGLTPSLKDIEAVHSHIKNIDKRFNKFKVLYGGSVKNSNSADIKSLKNVDGCLIGGASLKVDEFNTIIS

SEQ ID NO: 182224 - protein, 163 aa, Unknown
  Bacterial polypetide isolated from the Sargasso Sea
YMLIGHSERRHIFMESEKFISNKISIALQKNKKVILCVGETLKDYRSNNTKQVITKQINSALKESLQLINKNKKNLVIAYEPVWAIGTGRSAKIQDIETTHTLIRKLLFKLINDAKSEIKILYGGSVSPQNAKEILDAENVDGALVGGASLSAKKFIEICRTI

SEQ ID NO: 182225 - protein, 312 aa, Unknown
  Bacterial polypetide isolated from the Sargasso Sea
RASPIGAQNIYHESSGAYTGEMSAEMAKSVGCTHVLVGHSERRELFGETDEVTRLKTRKVIDCDMTAVLCIGETKEEYETGQAKRVCARQLAAALEGVEADEMNKVIIAYEPVWAIGTGLTATPAIAQSVHAGIRDWFRQTYGEAVASKVRIQYGGSVKPETVDELMEAPDVDGCLVGGASLNAEQFGRIFGFNPTPTGPTKIWAEEVVPCGNQLGESPIWSEERQMLYWVDAPSGTLYSWDLKSAPQRTNFGETLGCVALRSKDTLLLGLESGLHAYEPSSRKLKLLSEFEPGLNTRPNDGRVDRFGNFVI

SEQ ID NO: 182226 - protein, 204 aa, Unknown
  Bacterial polypetide isolated from the Sargasso Sea
IDYLRNLINNLPISVGGQNCHFKSSGAFTGEVSANFLKDTGCEYVLIGHSERRILNNENNAEIKSRAQTAINSNLKVILCVGESLTNREEGKALEYIEKQINDCLPNNFKNSFIAYEPIWSIGTGKIPSAFEIQEMHSHIKKIVFRISNKNINILYGGSVNTENINEILKITNVDGVLVGGASLKAKDFLAIYSAAVKHLDNLS

SEQ ID NO: 182227 - protein, 220 aa, Unknown
  Bacterial polypetide isolated from the Sargasso Sea
MSLRLIANWKLNGSVEFCDNWAEEFFKNFSSSNSIEIGIAPASIYIDHLKKLITDCRIEIGAQNICDEESGSRTGEISAPMIKDLGCKFSLIGHSERRIFYHESNKKISKKLNLANNNTIIPVLCIGESADENDRNNTHYVLESQINDALKGSNEINSLIIAYEPVWAIGSGKLPNPEEINFIHKMIKDVVQSRFPKIGLKSVLYGGSVNSDNASSLFAQ

SEQ ID NO: 182228 - protein, 232 aa, Unknown
  Bacterial polypetide isolated from the Sargasso Sea
FVIFIANWKLNGNIEFIREYYQKLLPNSRNCTIVCSPSIFLNKLKYNSNNLFIGAQDVSIYNEGAFTGEISAKMLSYENVSFCLVGHSERRQYFHDKNEIINKKSINLIENKIIPVICVGETLKEKENKLTKNVLIKQIEESVPEISNFDNTIIAYEPIWAIGTGLTPSLDEIEEVHSFIKNINEKYNKFKVLYGGSVNAENSADINNLQNVNGCLVGGASLKVNEFNKIIS

SEQ ID NO: 182229 - protein, 252 aa, Unknown
  Bacterial polypetide isolated from the Sargasso Sea
MSKKIIAGNWKQNGTLKSSISLTKKVLQAVKKEKYNHEIIIIPPSIFLLPIKDLIHKSQIKLGAQNVSAFKDGAYTGEISGSMLKDSGVDYCLVGHSERRHIINEDESDFSSKVSRLIDNDIKIIYCFGETLKDYKNKKTKLIIKRQLKKLFLNNKDNLKKHPSKLILAYEPVWAIGTGLVPSSEELVSTFKYIRDTVNNLDKKYASIKLLYGGSVTPDNASSLMDTEHIDGLLIGGASLIAKKFIDICSTI

SEQ ID NO: 182230 - protein, 244 aa, Unknown
  Bacterial polypetide isolated from the Sargasso Sea
IIAGNLKMNKTPNECRILAKEIISSLNGIMGIHVIFSPPFTGLNEIETSNPFFKAAQNCYFEQSGAFTGEISIEMIKSCDATHVIIGHSERRMLFNEDNYTINQKILAVKKNGLIPIFCIGESLEDRNNGSTEKKISDQIEKGLIGIDSLEGLVVAYEPVWAIGTGVAASAKEIEDIHKFIHNVLKNIDKKHYTQVLYGGSVKPENSEELIRVPGVDGFLIGGASLNVDSFVSIAKVMEKYRSN

SEQ ID NO: 182231 - protein, 156 aa, Unknown
  Bacterial polypetide isolated from the Sargasso Sea
MRRKIVAGNWKMNNGLKESTGLVKEIIKKNNSYNCEVYVAPAFPFLNDVSVISNSSQIKVLAQNVSSKSNGAFTGEVSVDMLKSINIKSVIIGHSERRMLFGEDDKILKMKLENCFKNDMEVFFCVGETLDKREKRMQNEVIENQLKNTLFDLDNG

SEQ ID NO: 182232 - protein, 242 aa, Unknown
  Bacterial polypetide isolated from the Sargasso Sea
MIKLDSFSSFFVANWKLHGNLNFIDEFLDKIQMPNDISKCIVVCPTSIYLDTLSKKKKKFFIGAQNVSQYADGAYTGEISSNSLRDFKIDFCIVGHSERRQIFYEKNGEINLKSFQLIKDGIIPIVCVGETLEEKKQGRTNEVLENQLKESISDSSNSFNTIIAYEPVWAIGTGLTPSYEEIESTHKFIRENNKKFNNFKILYGGSVKSSNAKEIVALPNVDGALIGGASINLDEFKKIIED

SEQ ID NO: 182233 - protein, 178 aa, Unknown
  Bacterial polypetide isolated from the Sargasso Sea
MGEISVSMIKDCNAKFVIIGHSERRHVFGELDEHINLKVSAVMSGGLKPILCIGETLEQRQQNKTNSVIKSQIEKGLKGISSFENIVIAYEPVWAIGTGLTAEENQIYDAHERVRITMRELYGENLNIQVLYGGSVNSKNADSLIQVSGVDGFLIGGASLDIESFTSIVKIVEKIQGK

SEQ ID NO: 182234 - protein, 228 aa, Unknown
  Bacterial polypetide isolated from the Sargasso Sea
MTCVESKSYLEEFIPLIKNIKEDRKVVIAPPFTAISTFSTNSDFDYLDIASQNIHWEDEGAFTAEISPKMLLEHGVSYAIVGHSEPRKYFSESDDQINKRAVFAQSSGLTPIVCVGESLEQRERGEADRVITRQVEQGLENTDPSNLIVAYEPIWAIGTGKTCEAIDANKICSLIRKLIGFDDVIIQYGGSVKPNNIDEIMSMSDIDGVLVGGASLDPNSFARIANYQ

SEQ ID NO: 182235 - protein, 250 aa, Unknown
  Bacterial polypetide isolated from the Sargasso Sea
MRAPLVAANWKMNGSFSMLDKILDSLRNSSGSNSCQVIICPPHVLLSSLKTAIEGTRIEVGAQNVHSELSGAFTGEISAPLLKECGVKWCIVGHSERRKLFDESDEFIRSKTETLLSYGIRPILCVGESLEQRDSGKHEDVVVAQLRKGLSGFNTEDQSRCVLAYEPIWAIGTGITATPEQANSMHAIIRNELESLGNHEVAANIQIIYGGSVNIENAKSLLAQSEIDGALVGGASLKAGDFSQIVAART

SEQ ID NO: 182236 - protein, 248 aa, Unknown
  Bacterial polypetide isolated from the Sargasso Sea
MAKAPKVLIAGNWKMNGKSASASEIKKLAKLKKPKAEVLICPPATLIGEFGKIAKGTAVKIGAQDCHTAVSGAHTGDISAEQLVDAGAKYIIVGHSERRADHGETDAVVRAKAEAVLATKASVIVCVGETEAQKDKGQTLRVVGAQLKGSVPDGSTAKNMVVAYEPVWAIGTGRTPTVEDIDKVHSFIRKKLVERFGEDGNGVRILYGGSMKPDNAAEILNVTDVNGGLVGGASLKAADFSKIIKAAE

SEQ ID NO: 182237 - protein, 198 aa, Unknown
  Bacterial polypetide isolated from the Sargasso Sea
KAVEGTRIEVGAQNVHCELSGAFTGETSVTLLKEFGVQWCIVGHSERRMLFEESDEFIRRKTRTLLNHGIRPILCVGESIEQRNSGTHEDVVVEQLRKVFSGLSTEDQGRCVVAYEPIWAIGTGKTATPGQANSMHTLIRKEVESLANPGIAENFQILYGGSVNVENTKSLLSMSEIDGALVGGASLKTEDFSQIVTA

SEQ ID NO: 182238 - protein, 244 aa, Unknown
  Bacterial polypetide isolated from the Sargasso Sea
MKYLIANWKMNSLDISDWIFKFENNCGEISSKETLQIVICPNFLQIPFFIEKSAFSKYLLTGSQDVSEKDPGPFTGQVSSKHLSNFSEIHYCIVGHSEQRMAGDTNSIVFQKTQKLINEKISPIVCVGESLETRESGDRENFLFKQLESFSNFENFKSNSIIVAYEPIWAIGTGISAEISSIRESIDFIKATLETKNIQSEILYGGSVNATNSKEILAEKNISGLLVGNASLDGEEFAKIAQNF

SEQ ID NO: 182239 - protein, 116 aa, Unknown
  Bacterial polypetide isolated from the Sargasso Sea
ERKSGQTLNINRRQLRGSLPVGVTAANTVIAYEPIWAIGTGQVATPSQAQEVHAAIRKALKSKLGANEGDNMRILYGGSMKPDNAAELLILPDVDGGLIGGASLSMTDFWAIAKAA

SEQ ID NO: 182240 - protein, 177 aa, Unknown
  Bacterial polypetide isolated from the Sargasso Sea
MRKKIVAGNWKMNMNKAEANDLFNNINGFEIPEGINVIIAPPSLYLTQFAVTNPKLKLASQNVSHEMNGAFTGEISAEMLSSIDLTYSIVGHSERRTYNWENDKLISKKIDSLLSFNVTPIYCCGELKSDRESENHEYVVETQIKEALFHLSNEQISSIIIAYEPVWAIGTGLTASA

SEQ ID NO: 182241 - protein, 274 aa, Unknown
  Bacterial polypetide isolated from the Sargasso Sea
AAPAPSASHAGGKRRPIVGGNWKCNPATASSLPALCRNFDGVAPYLENCDVYVCPSNLHVALVKDNFTPGVHVAPQNCNFKGCGAYTGEMSVDQIQDLGLGWVLIGHSERRGEFGLPTPAESNQLMATKLQYILDQGLNCVFCIGEPLSIRQKGIQAVLAECADQLTDIVPILSALSDKSRVVIAYEPVWAIGTGEAATPEQAQETHKGIRDWIAANVDRATADAIRIQYGGSANAQNAPELSSFPDIDGFLVGGASLKPEISDIVKAIAEAKV

SEQ ID NO: 182242 - protein, 243 aa, Unknown
  Bacterial polypetide isolated from the Sargasso Sea
MLEIKEFNKIIVANWKLNGSSEFLEAYFEELDLKEINSDICGIVCPPITYFQNCYSKLHSLHLGGQDCSKFKEGAYTGEISASMLRESNCEFCIVGHSERRQVFNEKNEEIKLKAELLLEEKIIPIICIGETFEQKKANETKKILKEQIIKSLPRKTSNELVVIAYEPIWAIGSGITPSPQEINNIHEYLKKEIQDIQGYKILYGGSVNSNNANEIMSLENVDGVLVGGASLKPKQFSEILRA

SEQ ID NO: 182243 - protein, 210 aa, Unknown
  Bacterial polypetide isolated from the Sargasso Sea
MIKLTNFSSFFVANWKLNGNLQFIDQFINNLSLPNDHSKCVVICPTAIHLDYLSKNKNGFYVGAQNVSEHEEGAYTGEISVLSLSETNVNFCIVGHSERRQIFKEKDKNINLKSERLIENNVIPIICIGETLEQKEKGITNRILEEQLMNSIPSSSSYENTIIAYEPVWAIGTGLTPTIEEIDETHRFIRENHDKLNKYKILYGGSVKAS

SEQ ID NO: 182244 - protein, 242 aa, Unknown
  Bacterial polypetide isolated from the Sargasso Sea
MIIANWKSNGSSEMYKSWSNDYLKEINDSHKMFIGIAPPIIYFSNLQNFHKNLPFVGVQDVDHLYGARTGAISVDMLVDMNCAFSIIGHSERRELFNEDNDLIKLKLKSLNKKIMTVLCIGETKEENDIGATKDVLKNQLEVLNKIELDNQFTIAYEPIWAIGSGLTPEPKDINQIHKYIKDVVQSKSINNLLPKVLYGGSVTDKNAESFFKEEFIDGALVGGASLDGVTFAKIANIFNITK

SEQ ID NO: 182245 - protein, 259 aa, Unknown
  Bacterial polypetide isolated from the Sargasso Sea
MNKYCIANWKMYMNKSKINSYFSEFLDMDFKSACNIVICPSTIHLGYVNDIIKSNEHIKLGAQNVSEFESGAYTGEHSLEMLNEYNCKYSIIGHSERRQLYGETDLNINNKLRLLNNSNIVPIVCIGETLEENESGIAYAVLENQLKKIFNNIDLNNTKDCIIAYEPIWAIGTGKSADVQTIYSVHKHLKNIINEINTNNCNICLLYGGSVNEDNATEILKINEVDGFLIGSASLVADKFYNIYNKFLRRVNLNALYYI

SEQ ID NO: 182246 - protein, 46 aa, Unknown
  Bacterial polypetide isolated from the Sargasso Sea
VIIQYGGSVNDANVDALMACPDIDGALVGGASLKAESFSRIINFVK

SEQ ID NO: 182247 - protein, 251 aa, Unknown
  Bacterial polypetide isolated from the Sargasso Sea
MFIAANWKMNLDKKSILEFSKSLQKFKFSNKINTCIFPPMTYIDYLNNLIYNLPISIGGQNCHFKSSGAFTGEVSASFLKDTGCDYVLIGHSERRTLNNENNAEIKLRAETAINSSLKVILCVGENLTDRQEDNALEFIEKQLNDCLPDNFENSFIAYEPIWSIGTGKIPSAIEIQEMHTHIKNITYKIVNKKINVLYGGSVNDKNIKDILEITNVDGVLVGGASLKAKDFLAIYSAAVKHLNTSFILQDI

SEQ ID NO: 182248 - protein, 79 aa, Unknown
  Bacterial polypetide isolated from the Sargasso Sea
TGKVPSLDEINHVHETLRNLLREVKGEDVSKKIKILYGGSVKPDNAKAIFSLDDVDGALVGGASLKADDFINIAKKAQA

SEQ ID NO: 182249 - protein, 222 aa, Unknown
  Bacterial polypetide isolated from the Sargasso Sea
LTDLSGDSQIAVCPSFVHWDLVYQILKSSGSKIELGAQDARAEDKGAFTGDVSVSMLKDFGASFVLVGHSERRLGLGESDELVASKFGAIQDIGLTPVLCVGESESQRETGKTEKIVLSQVRAVIDKFGISAFEGAIIAYEPIWAIGTGVTATPEQAQEVHELIRAYLAMENALTADSVRIIYGGSVNSRNAASLFNQRDIDGGLVGGASLKAEEFISICKS

SEQ ID NO: 182250 - protein, 227 aa, Unknown
  Bacterial polypetide isolated from the Sargasso Sea
LARAIAAQGDIPTCDLLVCPPATILRAVAEAAGGSSVAVGGQDCHEAESGAFTGDVSAAMVRDAGASHVILGHSERRHGLGESDARVCAKAVAAHAAGLTAIVCIGETEAERDAGKTLDVLSGQLAGSLPDAGVDGATTVIAYEPVWAIGTGRTPTLDEVAVAHGHIRATLAVAMGDTAADIGLLYGGSMKPGNAADLLAVPDVDGGLIGGASLDAESFLAIAAAAG

SEQ ID NO: 182251 - protein, 209 aa, Unknown
  Bacterial polypetide isolated from the Sargasso Sea
MTNKYLYFIANWKMFGGLSTLNSLNKVIKFLKIFKKSNDTKIIYCPPSTLISPMSKKVMNSKIQVGAQNCHESLTYGASTGSINPKMLKNAGAKYVILGHSENRSSGETDKLINAKIRAATQAGLKVIFCIGETLGQKRKKITKKILSKQINFGLQKIKKRKNIVIAYEPVWAIGTGLIPKADDLFKTINFIKKKVRNIKVLYGGSVNP

SEQ ID NO: 182252 - protein, 106 aa, Unknown
  Bacterial polypetide isolated from the Sargasso Sea
MNKTNEVLKEQVINSLPQKSSKESIVIAYEPIWAIGTGMTPTLEEINNIHNYLKKDIKKIDEYKLLYGGSVNSKNARDIMNLENVDGVLVGGASLKADQFSEILKA

SEQ ID NO: 182253 - protein, 239 aa, Unknown
  Bacterial polypetide isolated from the Sargasso Sea
MINLDKYSSIFIANWKLNGNSSFLKDYYEKLKVNSNNCTIICSPSIYLKSLKGNNENLFCGAQDVSSFKDGAYTGELSASMLKDNNIDFCLVGHSERRQYFAETNNKVNTKSSNLIEENIIPVICIGETLEQKEKNLTEEILTSQIKDSVPNLANHQNALIAYEPVWAIGTGLTPTLDEINQAHELIKNFDQKFIDFKVLYGGSVKSSNSKEITNLSHVDGCLVGGASLKVDEFNTIIS

SEQ ID NO: 182254 - protein, 259 aa, Unknown
  Bacterial polypetide isolated from the Sargasso Sea
MSKQRAKLVVGNWKMHGRLAGNATLLQAVAQGAGELPADVRVGVCVPCPYLTQTQSLLEGSRVVWGVQDVSAFTHGAYTGEVAAQMVVDFGATLAIVGHSERRAYHRESSDLVAVKTQRSLEAGLTPIVCVGETLEERDAGSTEQVVGAQLDAVLATLSADDAARIVVAYEPVWAIGTGKSATSAQAQAVHAFLRARLAAKGAAVADVPVLYGGSVKPENAEELFREPDIDGGLIGGASLKDQDFLAICKAAAATSVAG

SEQ ID NO: 182255 - protein, 260 aa, Unknown
  Bacterial polypetide isolated from the Sargasso Sea
MALRRPMVAGNWKMNGSAALAQELFKKFASKLQNDSAEVVLCPPSIYLESVRQLLEANKEALDGSLVRMGAQNLSQHDFGAYTGEVSGQMLKDCGCRYVIIGHSERRRMYGETSNIVAEKFAAAQKHGLTPILCVGESGPAREARRTFEVIAEELDIVIQKNGTMAFDNAIIAYEPLWAVGTGKSATPEQAQEVHAFIRKRLSEVSPFIGENIRILYGGSVTPSNAADLFAQPDVDGGLIGGASLNSTEFLSLCTIAMSA

SEQ ID NO: 182256 - protein, 252 aa, Unknown
  Bacterial polypetide isolated from the Sargasso Sea
MSKKIIAGNWKQNGTLKSSISLTRKVLQAVKKEKYTHEIVIIPPSIFLLPIKDLIHKSQIKLGAQNVSAFNDGAYTGEISGSMLKDSGVDYCLVGHSERRHIINEDESEFSNKVSRLIDNDIKIIYCFGETLNDYKNKKTKLIIKRQLKKLFLNNKNNLKKYPSKLILAYEPVWAIGTGLVPSPEELVSIFKYIRDTVNKFDKKYASIHILYGGSVTPDNASSLINTKHIDGLLIGGASLIAKKFIDICSTI

SEQ ID NO: 182257 - protein, 243 aa, Unknown
  Bacterial polypetide isolated from the Sargasso Sea
MLEIREFNKIIVANWKLNGSNDFLEAYFEELDSKNLSLNVCGVICPPTAYIQNCYSKLHSLYLGAQDCSKFKEGAYTGEISASMLKENNCIFCIVGHSERRQVFKENNEDIKIKAAQLLDEKIIPIICIGETLEQKKMHKTHEVLKEQVINSLPPNSSKESVVIAYEPIWAIGTGMTPTLDEINNIHKYLKKDIKEIEGYKLLYGGSVNPKNASDIMNLEYVDGVLVGGASLKADQFSQILKA

SEQ ID NO: 182258 - protein, 250 aa, Unknown
  Bacterial polypetide isolated from the Sargasso Sea
MRAPLVAANWKMNGSFSMLDKMLDILRKNSGNTACRVVICPPHVLLTSLKKAVEGSGIEVGAQNVHSELSGAFTGETSAPLLKECGVKWCIVGHSERRILFKESDEFIRSKTETLLRNGIRPILCVGESLEQRISGNHEDVVVAQLRKVLADFTTEDQSRCVLAYEPIWAIGTGKTATPEQANSMHAIIRKEIGSLSNTKVATNIQILYGGSVNVENAENLLAQSEIDGALVGGASLKIEDFSQIITAGT

SEQ ID NO: 182259 - protein, 245 aa, Unknown
  Bacterial polypetide isolated from the Sargasso Sea
MYKTPQEGVDFISELSNLLLDKEKPTIIFFPPFTSLFHMNEMISDLDMSLGAQNVYFEEEGAFTGEISVNMLKSCSVQYVIIGHSERRYIFNESNKDTNRKIHTVLDNEIIPIFCVGEKLDDRESNNTRTILLEQLEEGLAGVNIDALDRIIIAYEPVWAIGTGVNALPNQVQESHEMIRDILMELYDNNLNIDIPILYGGSVKPDNSEELINAKGVDGFLIGGASLNLDTFSKIIEIVHSKFMR

SEQ ID NO: 182260 - protein, 177 aa, Unknown
  Bacterial polypetide isolated from the Sargasso Sea
VHILGEVSAEMLSDNDCKYVLVGHSERRTILGENDHIISEKFNMAIKKNLVPILCIGETLDQKEKSLTEEIINSQITAITEGIDLDKHSKFIIAYEPVWAIGSGLSATPEDAQDVHEFIRSMIKKISKELAESTQILYGGSVNIDNAKKLFSMPDIDGGLIGGASLDSSGFLAIAKQ

SEQ ID NO: 182261 - protein, 186 aa, Unknown
  Bacterial polypetide isolated from the Sargasso Sea
MGAKTVITLNEGAFTGCISAQMLKSAGCKYVIIGHSERREYQKETSKELNLKIDIANKYNLKIIYCIGEKLSEIKIRKKILNSQLSSLPKKINIKNLIIAYEPVWAIGTGKTPTIGEINSIHLDIRNLLSKKIGKSKSQNISILYGGSVNPSNASDILNLDQVDGALVGGASLKSKDFSKIIDSYS

SEQ ID NO: 182262 - protein, 246 aa, Unknown
  Bacterial polypetide isolated from the Sargasso Sea
MTNFYLIGNWKQHGSRAAIQAFSEQWSFDANPALRIAIAPPFPYLQALVEALPGCELAAQDCSVHAQGAYTGEVSADMLADLGCQFVLVGHSERRQYHHETDELIAEKLAAAQSAGVTPVLCVGEQLSAREAGEHGVAVRAQLRSALATSQSTLLIAYEPVWAIGTGLTATPDQANEMHAMIKQEVESLLGASQATPILYGGSVNAENADALFACPHVDGALVGGASLEAASFTAIAQSASNNLSH

SEQ ID NO: 182263 - protein, 250 aa, Unknown
  Bacterial polypetide isolated from the Sargasso Sea
MSKKLLIAGNWKLNGEKKDISFIKNLVKFNSIKLSKNVDILICPPFTMIDRFCQLTQRSQIQIGAQDCSEHDFGAYTGEVSANMLNDLNASYCIVGHSERRLYHNENNNLLNKKILNVQKNNIKAILCIGESLLDRRNSKTLRVLGNQLNGVLKNNINPNLLEIAYEPIWAIGTGLVPEYSDIEEVHDYISNKLEKLYGKKSKKIRILYGGSVNSKNVFQILSIKNVGGALIGGASLKIRDMKSILKQFI

SEQ ID NO: 182264 - protein, 247 aa, Unknown
  Bacterial polypetide isolated from the Sargasso Sea
MIVANWKCNGSKAMINEWTNNFLTNYVEMKKAFIGIAPPSIYIESILDTKLSKLKEINIGSQDIDISSGARTGAISSEMILDFDCKFSIIGHSERRQFFNEKNDEIKQKILKIANKTLTILCVGETEEENKNDQTKDVLKRQIEVIEDIEFNGSLVIAYEPVWAIGTGNTPTPDKINEIHKFIKDVVQSFSDNSAIPMVLYGGSVNQENAENFFKEESVDGALIGGASLDGRQFANIINIFNGINLK

SEQ ID NO: 182265 - protein, 251 aa, Unknown
  Bacterial polypetide isolated from the Sargasso Sea
MSKQRTKRVIGNWKMHGRLAGNQALLNEVVQGAGAVAAETSVGVCVPFPYLAQVQAQLDGGRVAWGAQDVSAHEQGAFTGEVAAAMVAEFGARYAIVGHSERRAYHGERNETVAAKTQRALAAGLTPVVCVGETLDERESGATEQVVGAQLDAVLAVLTADEAARIVVAYEPVWAIGTGKSATSAQAQDVHAFLRARLAAKGAADVSVLYGGSVKPDNAEELFAQPDIDGGLIGGASLKAEDFLAICRAAR

SEQ ID NO: 182266 - protein, 215 aa, Unknown
  Bacterial polypetide isolated from the Sargasso Sea
MKVILIPPATLLGSIADQIRNSPFFLGAQNCHEERFGAFTGEVSAEMLADLGCKYVVLGHSERRTLFGETNNQIRARASSALDFGLTAIICVGESIEQRQAGLAMDTVSKQLEECVGSESNSNNCIIAYEPIWAIGTGKTAELQDIEEMHRHIRNVLIAKSATGNDIPILYGGSVKAENASNIFAVPQVGGALVGGASLNSQDFLEIIKAGQRND

SEQ ID NO: 182267 - protein, 253 aa, Unknown
  Bacterial polypetide isolated from the Sargasso Sea
MIVAGNWKMNLSVNEAIELSNELLKHNEIFVEEKIIIFPSFLIIPDIYKLYKNSKISIGAQDCSMYDNGAFTGQVSAEMIRDVGCKYVIIGHSERRSLCHETSSIVSLKAVKAVSAGLKVIICIGENSKDREKGDYLFVLENQLKQSLSDISSDSNLLSKNIIIAYEPVWAIGTGNTASEKDIEEVHKFIKEIINTNYQFNYDLPILYGGSVNSKNSSEIFKINNVDGVLVGGASLKLDEFLKIIKNSMYFFM

SEQ ID NO: 182268 - protein, 258 aa, Unknown
  Bacterial polypetide isolated from the Sargasso Sea
VSAVSWPADQSRIEGVRRPVIAGNWKMHMTCAQARDYMAAFLPQIERAPQDREIVLAPPFTALSTMAAAAEHSVVGLASQNVHWQDHGAFTAEISAEMLLEHGVAYTIVGHSEPRKYFSESDEQINHRARCSQAKGLIPIVCVGESDEQRERGEAERVIRRQIEQGLEGLDANKLVVAYEPIWAIGTGKTCEAAEANRICGLIRSWVGATDLIIQYGGSVKPTNIDELMAMSDIDGVLVGGASLKPDSFARIANYQAI

SEQ ID NO: 182269 - protein, 248 aa, Unknown
  Bacterial polypetide isolated from the Sargasso Sea
MKPIIAANWKMNFTPEESLCLIDDITSQGLPSDVDIIFFPSFISLPAVVDKLLDSAYSVGGQNIFHKENGAFTGEISASMLKALNIQYVIIGHSERRQYLHENDKQVNDKIHLALNAELIPIICIGETLKERENGQTDPVLKEQLNSAFENINLDNQKNIIVAYEPVWAIGTGLTAEKNKILDAHSLIKETLETIYNFNIPILYGGSVNTDNAASLINIENVDGFLVGGASLKSESFCQIVKNITKNF

SEQ ID NO: 182270 - protein, 241 aa, Unknown
  Bacterial polypetide isolated from the Sargasso Sea
MRKSVIAGNWKMHMTCADAKSYLEKFIPLIKNIKNDRKIVIAPPFTAISTFSDHSDFEYLDISSQNIHWEDQGAFTAEISPKMLLEHRVAYAIVGHSEPRKYFSESDEQINKRAVFAQSSGLTPIVCVGETLEQRERGEAVRVITRQVEQGLENTDPSNLIVAYEPIWAIGTGKTCEAEDANKICSLIRKLIGFDDVIIQYGGSVKPNNIDEIMSMSDIDGVLVGGASLDPNSFARIANYQ

SEQ ID NO: 182271 - protein, 246 aa, Unknown
  Bacterial polypetide isolated from the Sargasso Sea
MSKLVAGNWKMFGNKAMIADIKKIDQHCKEKTCEVAICPPFPLISTAHEQTKNIKIGAQNCHININGAHTGEVSAEMLIEVGAQLILVGHSERRQDNYETNDIVKLKSEAVHRAGATAVVCIGETLEERTAEKTLSVLQEQMLKSLPKNITPINTVVAYEPVWAIGTGLVPETDQIRSAHAFIRGFLASTYGAEAHNVKILYGGSVKGSNAKEIFSISNVNGALVGGASLKSDDFIEIIKAASNSI

SEQ ID NO: 182272 - protein, 257 aa, Unknown
  Bacterial polypetide isolated from the Sargasso Sea
MTKIIAANWKQNGSLKLLIKLTRDIRTGINRLKKRPKVILFPPSVYLDSISKEIKKNKANNKNIQLGIQNISPYNNGAYTGEVSINMTNDFDCSYILIGHSERRHIFMESEKFISNKISIAFQKNKKVILCVGETLKDYRSKNTKQVITKQINSALKESLKLIKKNKKNLVIAYEPVWAIGTGRSAKIQDIETTHTLIRKLLFKLINDAKSEIKILYGGSVSPQNAKEILYAENVDGALVGGASLSAKKFIEICRTI

SEQ ID NO: 182273 - protein, 140 aa, Unknown
  Bacterial polypetide isolated from the Sargasso Sea
MARTLIAGNWKMNTTLSDAISLSISIRDQLTLPPDTEVVLFPPAPFAVPVRDAVRGTTIKLGAQNIHNEESGAYTGETSVTMLDGICEYALIGHSERRTLFNESNDFINQKIQACFAHGIKAILCVGETETERNEGITSQ

SEQ ID NO: 182274 - protein, 251 aa, Unknown
  Bacterial polypetide isolated from the Sargasso Sea
MRKPLIAGNWKMNGNLGLAADMLQAMQSSLDQTSADVVVCPPFSLLQSVRECFEKTPVFLGAQNVHAQLSGAYTGEISAPMLNEMDVKWCIVGHSERRAQFSETDAIVRQKVGILLQNGIQPIMCVGESLEEREAGKHEEVVVEQLKNGLSGLAADDQLRCTIAYEPVWAIGTGKTATPEQANSMHRVIRNQLAELANEQFATKMRILYGGSVNADNAEELLGQSEIDGALVGGASLKTDQFPGIITAAKG

SEQ ID NO: 182275 - protein, 234 aa, Unknown
  Bacterial polypetide isolated from the Sargasso Sea
MNGQKDSYKLVKSISNYCQKMKRKTSKVVICPPFTLLPELIKKENKIKFGGQDCHYKSEGAYTGSISANMLKSINCQYVIVGHSERRIYQKETSQELNLKIQSAIKSNLTVIYCIGEKLEEINKRNIILKKQLSSLPKKIDPKKIIIAYEPVWAIGTGKVPSLNDINKIHEKIRHILSNLLSLRFSKHVSILYGGSVNATNSVDILNLDHVDGALVGGASLKSKEFCKIIDSYY

SEQ ID NO: 182276 - protein, 252 aa, Unknown
  Bacterial polypetide isolated from the Sargasso Sea
MGRVPIVAGNWKMNKNPEEGFSFVDEVQNLLLEIKHVSIIFAPPFTGLFEMNVHPPFYSAAQNCHWESNGAFTGEVSVSMIKECGAKYVIIGHSERRHIFGELDDWINKKLKAILNVGLSPILCVGETIDQRDKGQTEQILYEQLDEGLRGITNFEDCVIAYEPVWAIGTGVTADNEQVRLAHSAIRDILKNKLNGSDDVHILYGGSVNSANAEDLIQIEGVDGFLIGGASLQLDSFTSIARTVEMVQEKKL

SEQ ID NO: 182277 - protein, 251 aa, Unknown
  Bacterial polypetide isolated from the Sargasso Sea
MRKPLIAGNWKMNGSRGLAAEMLQAMESSLDQTFADVVVCPPFSLLQSAGESFEKTPVFLGAQNVHVQLSGAYTGEISAPMLNEMDVKWCIVGHSERRAQFSETDSLVRQKVATLLQNGIQPIMCVGESLEEREAGKYEEVVVEQLKNGLSGLAADDQLRCTIAYEPVWAIGTGKTATPEQANSMHLVIRNQLAELATEQFATKMRILYGGSVNADNAEELLGQSEIDGALVGGASLKTDQFPGIINAAKG

SEQ ID NO: 182278 - protein, 226 aa, Unknown
  Bacterial polypetide isolated from the Sargasso Sea
MQSTIFGVAPPSLYIEKMQRMGQIIHVFDDGELGSQEVLCGVQDVDHSYGSRTGAISVDMVLDSGCNFAIIGHSERRDLFNEDNDLIKEKLKSLKNKVMAVLCIGETKEENDKGITKDVLKQQLDIVKEVELDQSFTVAYEPVWAIGSGLTPEPKDINEIHKYIKDVVQSNSANKLIPEVLYGGSVTDKNAESFFKKEFVDGALVGGASLDGKTFARIVNIYNSTK

SEQ ID NO: 182279 - protein, 245 aa, Unknown
  Bacterial polypetide isolated from the Sargasso Sea
MKVIANWKMHGFKDDYLHWYKNLSKSADENLFDDLGIAPPFTLLDVCKTHQSKIKLGAQNISHLPEGPVTGEISAAMIKNSGADFVILGHSERRELHTETEEAIKSKILEASNHNIHPVLCIGEPKEIYVAKKTEDFLCSQLQGSLNDLNNINLSIAYEPIWAIGTGDVAKPSDINKIHSIIKDICSREFDVKIENIIYGGSVNDQNSKEIFEQEHVNGALIGGASLDGHSFGRIANNFFEIHNG

SEQ ID NO: 182280 - protein, 228 aa, Unknown
  Bacterial polypetide isolated from the Sargasso Sea
MTCAEAKSYLEEFIPLIKNIKDDRKVVIAPPFTAISTFSDHSDFDYLDISSQNIHWEDQGAFTAEISPKMLLEHGVSYAIVGHSEPRKYFSESDEQINKRAVFAQSSGLTPIVCVGETLEQRERGEAVRVITRQVEQGLENTDPSNLIVAYEPIWAIGTGKTCEAEDANKICSLIRKLIGFDDVIIQYGGSVKPNNIDEIMSMSDIDGVLVGGASLDPNSFARIANYQ

SEQ ID NO: 182281 - protein, 221 aa, Unknown
  Bacterial polypetide isolated from the Sargasso Sea
MVNLGKFSSIFIANWKLNGNYSFLKDYYQKLNVNSDNCTIICSPPIYLKSLKGNNENLFCGAQDVSSFKEGAYTGELSASMLKDNNINFCLVGHSERRQYFAETNDNVKIKSSNLIEENIIPVICVGETLEQKENNLTEKILSTQIKDGIPNSANHQNALIAYEPVWAIGTGLTPTLDEINQVHKLIKNFDQKFANFKVLYGGSVKSTNSKEITELSHVDG

SEQ ID NO: 182282 - protein, 246 aa, Unknown
  Bacterial polypetide isolated from the Sargasso Sea
MSKPLIVANWKMNGSLEGLKDFFEKLDLPEYAEAVVLPPAVYIRDCISAIGNRALAVGIQNIWTEDAGAFTGEISAKMARDIGAYWALVGHSERRQLQKESDELVKQKLECSLKAGMNVIVCVGETLEERLSGQAESVVSKQLKKVLAIDLTKIQNEVVIAYEPIWAIGSGESATLEEVKEMHAFIRNALLGVLGRLGANVRILYGGSVTAENAADLIKQDHVNGLLVGGASLKADSFSLILNALD

SEQ ID NO: 182283 - protein, 254 aa, Unknown
  Bacterial polypetide isolated from the Sargasso Sea
MKKIIIGNWKLNLDHLEAIQLLQKLNYTIEEGKEEKIDIVVSPSHTSLRSIQTIIDTDKLNIQLSAQDVSQFSGGAYTGEVSSHQLNKLNVNYCIVGHSERRIELNESDEVINQKVHNLVSEGITPIVCFGETLEQRNSNKYLEHITNQINSAVKGLRKDKVENLVFAYEPIWAIGTGEVASLVDAVEVLSVVKENISEKPFYDSDSIRFIYGGSVTPDNSSELLNSKIIDGALVGGASLDIDKFVTIINSVDL

SEQ ID NO: 182284 - protein, 250 aa, Unknown
  Bacterial polypetide isolated from the Sargasso Sea
MSKKLLIAGNWKLNGEKKDISFIKNLLKFHSKKLTKKVDILICPPFTLIDKFCQLTQRSNIEIGGQDCSENEIGAYTGEVSANMLNDLKATYCIVGHSERRLYHNENNNLLNKKILNIQKNNIKAILCIGESLSDRKQSKTLRVLGNQLKGALKNNINPNLLEIAYEPIWAIGTGLVPEYSDIEEVHDYISKKLEDFYGKRSKKIRILYGGSVNAKNVFSILSLNNVNGALIGGASLKIKDMKSILKQFI

SEQ ID NO: 182285 - protein, 250 aa, Unknown
  Bacterial polypetide isolated from the Sargasso Sea
MSKKLLIAGNWKLNGEKKDISFIKNLLKFHSKKLTKKVDILICPPFTLIDKFCQLTQRSNIEIGGQDCSQNETGAYTGEVSAKMLNDLKASYCIVGHSERRLYHDESNNLLNKKILNIQKNKMKAILCIGESLSDRKQSKTLRVLGNQLKGALKNNINPNLLEIAYEPIWAIGTGLVPEYSDIEEVHDYISKKLEDFYGKRSKKIRILYGGSVNAKNVFSILSINNVNGALIGGASLKIKDMKSILKQFI

SEQ ID NO: 182286 - protein, 257 aa, Unknown
  Bacterial polypetide isolated from the Sargasso Sea
MIPKPIVAANWKMHKTPQEGVKFLSELNNLLLDKEMPSIIFCPPFTSLFHMNEILSDLEYCLGAQNVYFENEGAFTGEISMNMLVSCGVQYVIIGHSERRHIFNESNNDINKKIHTVLKQEIFPIFCIGEKLDDRETNNTRKVLVKQLEEGLLGINKDMMSKIIIAYEPVWAIGTGINAVPKQVEESHDMIREILLELYSMNIANDIPILYGGSVKPDNSEELIKTKGVDGFLIGGASLNLEMFSGIIENVHNNSMR

SEQ ID NO: 182287 - protein, 141 aa, Unknown
  Bacterial polypetide isolated from the Sargasso Sea
MGVRRRVIAGNWKMHMTCAQARDYMGVFLPLIEATPDDRHVVLAPPFTAISTMAGLADGSRVQLASQNVHWQAEGAFTAEISAEMLLEHKVRYTIVGHSEPRKYFSESDEQINHRARCAQANGLIPIVCVGESDQQRERGE

SEQ ID NO: 182288 - protein, 255 aa, Unknown
  Bacterial polypetide isolated from the Sargasso Sea
MIIANWKSNIVDIGQWTEDFHDEYIVNERLQSTIFGVAPPSIYIEKMKGWKEIHTVFVDGELDFQEVLCGVQDVDHSYGSRTGAISVDMVLDSGCNFAIIGHSERRDLFNEDNDLIKEKLKSLKNKVMAVLCIGETKEENDKGITKDVLKQQLDIVKEAELDQSFTVAYEPVWAIGSGLTPQPKDINEIHKYIKDVVQSNSANKLIPRVLYGGSVTDKNAESFFMEEFVDGALVGGASLDGKTFANIVNIYNSTK

SEQ ID NO: 182289 - protein, 226 aa, Unknown
  Bacterial polypetide isolated from the Sargasso Sea
NKFFEKYNFKNEETFIGIAPPFVYIEQINILKKSNINTGLQDIEPFSGARTGAISADMALDLECCFSIIGHSERRELYKESNNQIKEKIINLDNKIIPILCVGETEKENIAGKTKQVIQNQLEIIKDYELHDLFTVAYEPVWAIGSGKTPHAEEINEIHKFIKDVVQSISTNDLVPDVLYGGSVTHKNASSFFNQDFVDGALIGGASLDGSIFAEIVNIYNGTKNK

SEQ ID NO: 182290 - protein, 260 aa, Unknown; identical to SEQ ID NO: 182255
  Bacterial polypetide isolated from the Sargasso Sea

SEQ ID NO: 182291 - protein, 159 aa, Unknown
  Bacterial polypetide isolated from the Sargasso Sea
MLNENKTNFCIVGHSERRQLFNETNNNIKLKAINLIDKNIIPVICVGETLKEKESKITKSVLLKQLEETIPDIANIENTLVAYEPIWAIGTGLTPVLEEIQEVHEYIKQIDKKLNNFKVLYGGSVKPTNSININQLKSVDGCLVGGASLKVHDFNKIIS

SEQ ID NO: 182292 - protein, 251 aa, Unknown
  Bacterial polypetide isolated from the Sargasso Sea
MRRKIVAGNWKMNNDLNQSMSLIDSVIENSEGITNCELYLSPSFPFLRDSKIKCEPTNIKVLAQNVSHLEKGALTGDVSCDMLKSININSVIIGHSERRTIFKENDDILLKKIELCVKNNFEIFLCIGEDLESRNSNKEFSVIEDQLNNTIFNLNDINPKKLIIAYEPVWAIGTGLSANPSQAQEMHNFIREKFKVKFSESISDNLTIIYGGSVKPETAKDIFDQPDVDGGLIGGASLNHNDFIKIVKSIT

SEQ ID NO: 182293 - protein, 198 aa, Unknown
  Bacterial polypetide isolated from the Sargasso Sea
PALSTMADLSQGSRLCLSSQNVHWEGQGAFTGEISPAMLKEHGVTHTIVGHSEPRKYFSESDEQINHRARSSQSNGLIPIVCVGESDEQRERGEAERVIRRQIEQGLEGLDAEKLVVAYEPIWAIGTGKTCEAEEANRICGLIRSWVGSPDLVIQYGGSVKPTNIDQLMGMSDIDGVLVGGASLEPESFARIANYQTA

SEQ ID NO: 182294 - protein, 190 aa, Unknown
  Bacterial polypetide isolated from the Sargasso Sea
MSEKYQKVIAANWKMNGSLELLRSLSSFPSSKNKIIICPPTTLIYKCKEILPREVFIGGQNCNENASGPYTGEISAAMLYESGARYVILGHSERRSIFQESNKMILNKVLSATKFNLVPILCVGETLEEKKQGKAKEIIKSQLGQCIPKDVDFEHLIIAYEPVWAIGTGLVPKIKDIEEIHGFIRNFLKE

SEQ ID NO: 182295 - protein, 135 aa, Unknown
  Bacterial polypetide isolated from the Sargasso Sea
MEIGVITLSTSKHKQSDALVERKTIMTPFMTEDFLLDTEFARRLYHDYAKDQPIFDYHCHLPPQQIAENYRFNNLYDIWLKGDHYKWRAMRTNGVAERLCTGDASDREKFDAWAATVPHTIGNPLYHWNHLELRR

SEQ ID NO: 182296 - protein, 167 aa, Unknown
  Bacterial polypetide isolated from the Sargasso Sea
MARRCGDSRAGAAVAKDGSFDVKVLPSWRPDKAFNIELATFNDYMAKLGEVSDTDIRRFSDLQAALTKRLDHFAAHGCKVSDHALDVVLFAESNESELDSILARRLAGETLSEHEVAQFKTAVLVFLGAEYARREWVQQYHIGALRNNNLRQFKLLGADVGFDSIND

SEQ ID NO: 182297 - protein, 291 aa, Unknown
  Bacterial polypetide isolated from the Sargasso Sea
QFNIETLCTTESADDKLIHHTAIRNSGWDGHVITAFRPDSVMNIDSGEWKQEIEKLSISSGINIDSYKSFLHAIENRREFFKKMGATSTDQGVISPYTGRVSDSLADEIFQRALKSNLNQDDQEIFIGHMLMEMARMSTEDGLVMQIHAGSRRNHNQFIFNRFGPDKGADIPVKTDFTNNLHSLLNEFGNNIDFSLIIFTLDESVYARELAPLAGHYPSMKLGPPWWFHDSIEGMKRFRKRVTETAGIYNTAGFNDDTRAFLSIPARHDLCRRIDSNFLAEQVVRHIIDMD

SEQ ID NO: 182298 - protein, 201 aa, Unknown
  Bacterial polypetide isolated from the Sargasso Sea
TEALKKGLSGKKAEMFRGQMLTEMARMSLEDGLVMQIHPGSFRNHNQTLFQCFGRDMGADIPTQTDYVHALQPLLNRFGNESDLSVILFTLDETSYSRELAPLAGHYPILKLGPPWWFFDSPEGMLRFRRETTETAGFYNTVGFNDDTRAFLSIPARHDMARRIDCRFLAELVCEHRLSEEEAHETSIDLAYRLVKKAYRL

SEQ ID NO: 182299 - protein, 292 aa, Unknown
  Bacterial polypetide isolated from the Sargasso Sea
MKVQFGAATSDLFYDSITESLASEAFRPRALFDRFGIEVIATTEGPLDTLDHHAAIRAENRKAGGWQGKVITAYRPDAVIDPEFEGFAANLGRLSDLTGEDCFTWSGYLAAHRQRRAVFAEMGATSSDHGHATPRTANLRPDEAASLFAKIVSGMFDMHDAELFRAQMLTEMAGMSVDDGLVMQIHPGSFRNHNASLFARFGRDKGADIPMRTEFVANLKPLLDRFGNDPRLSIILFTLDESVYARELAPLAGHYPCLKLGPAWWFHDSPEGMRRFRHMTTETAGCYNTVGF

SEQ ID NO: 182300 - protein, 284 aa, Unknown
  Bacterial polypetide isolated from the Sargasso Sea
MEWKNIPTYRPDAVIDPENRDFKRSLLKMGELTDEDVNSWLGYLNAHKSRRLYFKKLGATATDHGHPSARTENLSQNEAEKLFKLILTGNFTRDDADKFRGQMLTEMAKMSCDDGLVMQIHPGSIRNHSNKIFNQFGLDKGFDIPGSTNYVSALKPLLDQVGLRTDLTIILFTLDETSYSRELAPLAGVYPALKLGPPWWFFDSYEGMKRFRETTTETCGFYNTVGFNDDTRAFCSIPARHDVARRVDCAYLAELISTGRLRENEAYELAYDLAYGLAKSAYNL

SEQ ID NO: 182301 - protein, 344 aa, Unknown
  Bacterial polypetide isolated from the Sargasso Sea
QIWDRANEQLAEPSFSARGMLRRFDVKALCTTDDPADPITHHEAIANDPEIETAVYPTFRPDKSWGIGLAGPFKGWLKGLEATSGISISSLDDFLSALAKRVEDFHALGSRISDHSFPYFFCDFPSEEDAKRIFQDTLDGKDAERPEEEAFGAFVMHRLARLYAERGWTMQIHLGPLRNNSSRLLRSFGPDAGTDSIGDWPQAERMSHFLDRLDSEDALPRTIVYNNNPSDNFTVATMLGNFQREVPGKMQFGSGWWHLDQRDGMEEQLKTLANLGLLSRFVGMLTDSRSFLSFPRHEYFRRILCNLLGTWMRDGFVPNDPEMIGDLARRVCFRNAREFLRLGE

SEQ ID NO: 182302 - protein, 159 aa, Unknown
  Bacterial polypetide isolated from the Sargasso Sea
GHFHPTEVISDKISAVSLFVRHLLLHVSRPVRWDSDHVVLLDDETQAIANEIIRNELLERVHIGLDFFDASINRIAAWVIGTRNMKKALLRALLEPIEMLRQAECKGDYSTRLALMEETRSLPWQAVWDYACAREGVAVGVDWLDAVKEYEVQELLTRR

SEQ ID NO: 182303 - protein, 419 aa, Unknown
  Bacterial polypetide isolated from the Sargasso Sea
MTTQLEQAWELAKLRFAAVGIDVEAALRQLDRLPISMHCWQGDDVAGFENPEGSLTGGIQATGNYPGKARNATELRADLEQALSLIPGPKRLNLHAIYLESDTPVARDQIKPEHFKNWVEWAKANQLGLDFNPSCFSHPLSADGFTLAHADDTIRQFWIDHCKASRRVSAYFGEQLGTPSVMNIWIPDGMKDITVDRLAPRQRLLDALDEVISEKLDPAHHIDAVESKLFGIGAESYTVGSNEFYMGYATSRQTALCLDAGHFHPTEVISDKISAAMLYVPRLLLHVSRPVRWDSDHVVLLDDETQAIASEIVRHNLFDRVHIGLDFFDASINRIAAWVIGTRNMKKALLRALLEPTEQLRQLEASGDYTARLALLEEQKSLPWQAVWEMYCQRHDTPAGSQWLDSVRTYEKEILSKRS

SEQ ID NO: 182304 - protein, 242 aa, Unknown
  Bacterial polypetide isolated from the Sargasso Sea
MKIIPAIDLKEGKCVRLREGKMDQETIFSEDPIATAEHWFSEGADLLHIVDLDGAVSGKPINNKIISEIALEFPSKHIQVGGGIRSFEIAQDYIRIGVQRVIMGTSAIESPEVLKDFSNSYPNQVVLGIDALDGKVKTEGWLKESGITPLDLIKVFEGLPIAAIIFTDISKDGMMSGPNFEATSSLAKATAIPVIASGGISSLSHIKKLSEDKLIYGAICGRALYEKVFTFAEAEKTAESRL

SEQ ID NO: 182305 - protein, 255 aa, Unknown
  Bacterial polypetide isolated from the Sargasso Sea
MDLIPAIDLMNGKCVRLFKGDFNKRKDFTKEPHEQAKFWESEGAKYIHIVDLDAAKTGSPTNDKSIKKIAKTVNIPIQIGGGIRSQERIEQLFSYGIHRVIMGTSAIENKELVKDLSNKFPGRIIVGIDAKDGKVSTRGWLEQSNILATDLVKEFSSFKIASFIVTDINTDGTLEGTNEEFIQSILEITDIPVIASGGVGSISDLLSLVKFENSGLFGVIVGKALYENKFTINEANNVLSSERLNDFDLNRNYYA

SEQ ID NO: 182306 - protein, 199 aa, Unknown
  Bacterial polypetide isolated from the Sargasso Sea
MDLIPAIDLMNGKCVRLFKGDFNKRKDFTKEPHEQAKFWESEGAKYLHIVDLDAAKTGSPTNDKSIKKIAKTVDIPIQIGGGIRSQERIEQLFSYGIEKVIMGTSAIENKELVKDLSNKFPGRIIVGIDAKDGKVSTRGWLKQSNILATDLVKEFSSFKIANFIVTDINTDGTLEGTNEEFIKSILEITDIPVIASGGV

SEQ ID NO: 182307 - protein, 247 aa, Unknown
  Bacterial polypetide isolated from the Sargasso Sea
LMNGKCVRLFKGDFNKRKDFTKEPHDQAKFWESEGAKYIHIVDLDAAKTGSPTNDKSIKKIAKTVNIPIQIGGGIRSQERIEQLFSYGIEKVIMGTSAIENKELVKDLSNKFPGRIIVGIDAKDGKVSTRGWLEQSNIFATDLVKEFSSFKIASFIVTDINTDGTLEGTNEEFIKSILEITDIPVIASGGVGSISDLLSLVKFENSGLFGVIVGKALYENKFTINEANNVLSAERLNDIDLNTNYYA

SEQ ID NO: 182308 - protein, 104 aa, Unknown
  Bacterial polypetide isolated from the Sargasso Sea
MIIPALDLIDGTVVRLHQGDYGQQRDYGNDPLPRLQSYAAQGAEVLHLVDLTGAKDPAKRQIPLLKTLVAGVNVPVQVGGGVRTEEDVAALLAAGVARVVVGST

SEQ ID NO: 182309 - protein, 255 aa, Unknown
  Bacterial polypetide isolated from the Sargasso Sea
MEILPAIDLLDGACVRLHKGDYEQVTRFSDDPVAQALSWQQQGATRLHLVDLDGAKRGEPVNDSAVQAITSALDIPVQLGGGVRSLERAEQLLACGLDRVILGTVAIEQPDLVRSLAERYPGRIVVGIDAKDGRVATRGWIEQSDVLATDLARTFSSSGIAAIITTDIATDGTLAGPNLEALRTMAASSSVPVIASGGIGCMADLLSLLPLEPLGVRGVIVGRALYDGRVDLAEAVRALAEPRLQDITAVAADLA

SEQ ID NO: 182310 - protein, 248 aa, Unknown
  Bacterial polypetide isolated from the Sargasso Sea
LVIPAIDLKDGQCVRLRQGKMEESTVFSDNPIEMARHWVEQGAQRLHVVDLNGAFAGTLVNSDIVASIVKNFPNLEVQVGGGIRTLEGIKFYVDVGVSFVIIGTAALKNPDFVREACQAYEGKVIVGLDTIDGKVATEGWSDVSDTSAIELVGKFAGLGVQAIVYTDIARDGMMQGCNIDATVELARRSPIPIIASGGVAKLADIVDLKAAINSEVSANIVGAITGRAIYEGKLNLRTAQEYCDSEAS

SEQ ID NO: 182311 - protein, 245 aa, Unknown
  Bacterial polypetide isolated from the Sargasso Sea
MIIPAIDLIDGRVVRLYQGDYEQKTQYELDPVDVVHDYADQGATWLHIVDLTGAKDTSKRQLSLIKSMVDTKRMKFQAGGGIRSEEEVAQLLETGVSRVVIGSLAVKQPELVKSWVEKYGPEHIVLALDINISDSGEKLIATHGWQENSGVALEGLLEDFASVGAKHVLCTDISRDGTLQGANTELYQEMAARFPHVSWQASGGIGSIADIEALKPTNVGGVILGRALLEGKFTVKEAIACWQNA

SEQ ID NO: 182312 - protein, 237 aa, Unknown
  Bacterial polypetide isolated from the Sargasso Sea
MDLIPAIDLMNGKCVRLFKGDFNKRKDFAKEPHEQAKYWEREGAKYIHIVDLDAAKTGSPTNDKSIKKIAKTVNIPIQIGGGIRSQERIEQLFSYGIEKVIMGTSAIENKELVKDLSNKFPGRIIVGIDAKDGKVSTRGWLEQSNIFATDLVKELSSFKIASFIVTDINTDGTLEGTNEEFIKSILEITDIPVIASGGVGSISDLLSLVKFENSGLFGVIVGKALYENKFTINEANN

SEQ ID NO: 182313 - protein, 230 aa, Unknown
  Bacterial polypetide isolated from the Sargasso Sea
MLLIPAIDLKQGKCVRLLQGQEEEQTVYSDDPVSQALEFQKAGAQRLHLVDLDGAFQGRGENHETIGKIISALNIPVQVGGGIRSPDDVENKIKLGAASVIIGTMAVKNPEHFEQTLETHGGDSVLLGIDARNRRVAVEGWKEGTDLEDVEFAKLWKSKGVKRVIFTDIARDGMLSGPNLEALEDFTIRSGLNVTASGGVSSIEDLKNLRKLETNGVDQVIVGKAIYDGR

SEQ ID NO: 182314 - protein, 241 aa, Unknown
  Bacterial polypetide isolated from the Sargasso Sea
MIIPAIDLIDGRVVRLYQGDYEQKTQYELDPVDVVHDYADQGATWLHIVDLTGAKDTSKRQLSLIKSMVDTKRMQFQAGGGIRSEEEVAQLLETGVSRVVIGSLAVKQPELVKSWVEKYGPEHIVLALDINISDSGEKLIATHGWQENSGVALEGLLEDFATVGAKHVLCTDISRDGTLQGANTELYQEMAARFPHVSWQASGGIGSIADIEALKPTNVGGVILGRALLEGKFTVKEAIAC

SEQ ID NO: 182315 - protein, 218 aa, Unknown
  Bacterial polypetide isolated from the Sargasso Sea
MIFFPAIDLKDGKCVRLKQGDILKSTIFDSDPVARAESFHDAGCSWLHLVDLNGAFEGKPINHQIVEKIIKSVDIKIQLGGGVRNFDTIDFWMNAGIKRLIIGTMALKKPELVIEACEKYPGKIALGIDVRDGKIATEGWVEQSQISAVDLVKKFEDVDVSAIIYTDISRDGILMGPAIEETLKFSDKTKIPIIISGGVSSEKDIIEIKKRANDKILG

SEQ ID NO: 182316 - protein, 255 aa, Unknown
  Bacterial polypetide isolated from the Sargasso Sea
MGWKSIVLVIPAMDLKDGQCVRLRQGKMNESTVFSDNPVEMAGHWAEQGAQRLHVVDLNGAFTGSLVNSEIVASIVKSFPGLQVQIGGGIRDLKSIEFYIGVGARFVIIGTAALKDPDFVAEACQMYPGKVIVGLDTINGKVATEGWAEVSEISPIEIANKFSEYGVQAIVYTDIARDGMMQGCNIEATVELAKQSPIPIIASGGIAKLADIVDLKAATKKGVGANIVGAITGRAIYEGKLDLMAAQKYCNSEAS

SEQ ID NO: 182317 - protein, 237 aa, Unknown
  Bacterial polypetide isolated from the Sargasso Sea
KGDYEQVTRFSDDPVAQALSWQQQGATRLHLVDLDGAKRGEPVNDSAVQAITSALDIPVQLGGGVRSLERAEQLLACGLDRVILGTVAIEQPDLVRSLAERYPGRIVVGIDAKDGRVATRGWIEQSDVLATDLARTFSSSGIAAIITTDIATDGTLAGPNLEALRTMAASSSVPVIASGGIGCMADLLSLLPLEPLGVRGVIVGRALYDGRVDLAEAVRALAEPRLQDITAVAADLA

SEQ ID NO: 182318 - protein, 193 aa, Unknown
  Bacterial polypetide isolated from the Sargasso Sea
VDLNGAFEGQPMNAAAVESILSAIDIPVQLGGGIRDMATIDAWLGRGIRRVILGTVAVKDPDLVRAACEKWPGRVAVGIDAKGGKVAIEGWAEVSELTAETLAGEFEGVGVSAIIYTDVDRDGVLAGANIEATARLAESTAIPVIASGGVASLDDLLAIQANGTIAGAIIGRALYDGRISFEEALAALGERAS

SEQ ID NO: 182319 - protein, 209 aa, Unknown
  Bacterial polypetide isolated from the Sargasso Sea
PAAQALEFVASGCEWLHLVDLNGAFAGEPVNAAPVEEILKQCQVPAQLGGGIRDMATIERWLDKGLARVILGTVAVENPDLVREAARAFPGKVAVGIDARGGKVATKGWAEETDVDVTDLAKSFEDAGVAAIIYTDIMRDGAMKGPNIDATAALANAVSIPVIASGGVSSLDDLRALKSCGAPLNGAISGRALYDGAIDLSEALAVLKG

SEQ ID NO: 182320 - protein, 248 aa, Unknown
  Bacterial polypetide isolated from the Sargasso Sea
MDLIPAIDLMNGKCVRLFKGDFNKRKDFTKEPHDQAKFWESEGAKYIHIVDLDAAKTGSPTNDKSIKKIAKTVNIPIQIGGGIRSQERIEQLFSYGVEKVIMGTSAIENKELVKDLSNKFPGRIIVGIDAKDGKVSTRGWLEQSNIFATDLVKEFSSFKIASFIVTDINTDGTLEGTNEEFIKSILEITDIPVIASGGVGSISDLLSLVKFENSGLFGVIVGKALYENKFTINEANHVLSAERLNDFD

SEQ ID NO: 182321 - protein, 239 aa, Unknown
  Bacterial polypetide isolated from the Sargasso Sea
MDLIPAIDLMNGKCVRLFKGDFNKRKDFTKEPHEQAKFWESEGAKYIHIVDLDAAKTGSPTNDKSIKKIAKTVNIPIQIGGGIRSQERIEQLFSYGIEKVIMGTSAIENKELVKDLSNKFPGRIIVGIDAKDGKVSTRGWLEQSNIFATDLVKEFSSFKIASFIVTDINTDGTLEGTNEEFIKSILEITDIPVIASGGIGSISDLLSLVKFENSGLFGVIVGKALYENKFTINEANNVL

SEQ ID NO: 182322 - protein, 255 aa, Unknown
  Bacterial polypetide isolated from the Sargasso Sea
MDLIPAIDLMNGKCVRLFKGDFNKRKDFTKEPHEQAKFWESEGAKYIHIVDLDAAKSGSPTNDESIKKIVKTVNIPIQIGGGIRSQERIEQLFSYGIEKVIMGTSAIENKELVKNLSNKFPGRIIVGIDAKDGKVSTRGWLEQSNIFATDLVMEFSSFKIASFIVTDINTDGTLEGTNEEFIKSILEITDIPVIASGGVGSISDLLSLVKFENSGLFGVIVGKALYENKFTINEANNVLSSERLNDFDLNRNYYA

SEQ ID NO: 182323 - protein, 239 aa, Unknown
  Bacterial polypetide isolated from the Sargasso Sea
MILYPAIDLKNGKCVRLIQGKMNKETVFNNDPLLQAKSFVDQGCEWLHLVDLDGALSQSLVNQTIIKKIISTVPIPVQLGGGIRNFKTIEHLISVGVQRIILGTIALSDPQLVKKACKYFPNKIAIGIDAKNSKVMVEGWIKKSKMSVFDLAKSFEDVGVSAIIYTDISKDGMMLGPDISGTKKLLEYISIPIIASGGVSSISDLKKLKKDCSELNGIVCGRALYDKKINIDEAIRVLN

SEQ ID NO: 182324 - protein, 190 aa, Unknown
  Bacterial polypetide isolated from the Sargasso Sea
MIVIPAIDLKNGKCVRLREGKMDEETIFSEDPISTAGSWFSQGAEILHIVDLDGAVNGQPMNQEVIFSIIAEFPEKRIQIGGGIRSFESASEYLNEGIERVIMGTSAVEEPDMLKDFCSKFPNRLILGIDALDGVVKTQGWLKGSGISPSELIKKFEDDPIAAIIFTDISKDGMMIGPYIEATADLANQQ

SEQ ID NO: 182325 - protein, 173 aa, Unknown
  Bacterial polypetide isolated from the Sargasso Sea
MIVIPAIDLKNGKCVRLREGKMEEETIFSEDPISTAGSWFSQGAEILHIVDLDGAIEGKPMNQEIIFSIISEFPEERIQIGGGIRSFDSAAEYLKAGIERVIMGTSAVEEPGMLKDFCVKYPNRLVLGIDALDGVVKTQGWLKGSGISPAELVKKFEDDPIAAIIFTDIAKDG

SEQ ID NO: 182326 - protein, 247 aa, Unknown
  Bacterial polypetide isolated from the Sargasso Sea
MNVIIPAIDLIQGKTVRLYQGSYDKTTEYQQTPLQLRDLYAEAGAGILHLVDLTGAKNAADRQLELLTTLMKNAPLPVQVGGGVRTAADVEQLLAAGASRVVVGSVAIREPETVQGWLRTYGGDKIVLALDVAINAKGDKTLPSHGWIEESTITLEQVLDGFIAAGAKHVLCTDISKDGTLQGPNVALYAELVQKYPQIQWQASGGVGSLADIKALKPTGVAGVILGRALLEGKFTVEEAIQCWQDA

SEQ ID NO: 182327 - protein, 239 aa, Unknown
  Bacterial polypetide isolated from the Sargasso Sea
MLLIPAIDLKQGKCVRLLQGQEEEQTVYSDDPVSQALEFQKAGAHRLHLVDLDGAFRGRGENHETIGKIISALNIPVQVGGGIRTPEDVETKLKLGADSVIIGTMAVKNPEHFEQTLETHGGDSVLLGIDARNRRVAVEGWKEGTDLEDVEFAKLWKSKGVKRVIFTDIARDGMLSGPNLEALEDFTTRSGLNVTASGGVSSIEDLKNLRRLETSGVDQVIVGKAIYDGRINLKEALEC

SEQ ID NO: 182328 - protein, 242 aa, Unknown
  Bacterial polypetide isolated from the Sargasso Sea
MIVIPAIDLKDGKCVRLKEGKMDEVTIFSEDPLRTSEVWFAQGAEVLHIVDLDGAVKGRPLNDRYILSISEKFPDKHIQVGGGIRDFNSASGYIEKGISRVIMGTAAVRDPEMLKEFCNVYPNKLILGVDCLDGYVKTDGWLESSKLKPEELIEKFEDMKLAGLIYTDISRDGMMTGPNIESTLSLCDKTDLPIIASGGVSSLEHIRELSSSSRIYGVICGRALYEEKFTLEEAIKVANQSK

SEQ ID NO: 182329 - protein, 241 aa, Unknown
  Bacterial polypetide isolated from the Sargasso Sea
MIFFPAIDLKDGKCVRLKQGDILKSTIFDSDPVARAESFHDAGCSWLHLVDLNGAFEGKPINHQIVEKIIKSVDIKIQLGGGVRNFDTIDFWMKAGIKRLIIGTMALKKPELVIEACEKYPGKIALGIDVRDGKIATEGWVEQSKISAVDLVKKFEDVDVSAIIYTDISRDGILMGPALEETLKFSDKTNIPIIISGGVSSEKDVIEIKKRANDKILGVISGRAIYDNRLNIHACNKILGN

SEQ ID NO: 182330 - protein, 245 aa, Unknown
  Bacterial polypetide isolated from the Sargasso Sea
MIIPAIDLIDGKVVRLYQGDYGQQTTFDLSPLAQLQSYQDQGANWLHIVDLTGAKDPAKRQTALIAKLTAGLNANIQVGGGVRTEEQVAELLSLGVKRVVIGSLAVKEPELVKGWFNKFGSEAICLALDVNINQSGEKIVAVSGWQSGGGKSLESIVEDFSQVGLKDALVTDISRDGTLTGANTALYRELSSRYPDIAWQASGGIATLEDVAAVRDCGAAGIIIGKALLINQFNVAEAIQCWPNE

SEQ ID NO: 182331 - protein, 245 aa, Unknown
  Bacterial polypetide isolated from the Sargasso Sea
MIIPAIDLIDGRVVRLYQGDYEQKTQYELDPIDVVHDYADQGATWLHIVDLTGAKDTSKRQLSLIKSMVDTKRMQFQAGGGIRSEEEVAQLLETGVSRVVIGSLAVKQPELVKSWVEKYGPEHIVLALDINISDSGEKLIATHGWQENSGVALEGLLEDFATVGAKHVLCTDISRDGTLQGANTELYQEMAARFPHVSWQASGGIGSIADIEALKPTNVGGVILGRALLEGKFTVKEAIACWQNA

SEQ ID NO: 182332 - protein, 73 aa, Unknown
  Bacterial polypetide isolated from the Sargasso Sea
MLLIPAIDLKDGHCVRLKQGDMDQSTTFGEDPAAMARKWVDAGARRLHLVDLNGAFAGRAQELQRHQVHPERG

SEQ ID NO: 182333 - protein, 237 aa, Unknown
  Bacterial polypetide isolated from the Sargasso Sea
IDGHVVRLYQGDYEQKTQYELDPVEVVHDYADQGATWLHIVDLTGAKDTSKRQLELIKSMVDTKRMQFQAGGGIRSEEEVAQLLETGVSRVVIGSLAVKQPELVKSWVEKYGPERIVLALDININESGEKLIATHGWQENSGVALEGLLEDFATVGAKHVLCTDISRDGTLQGANTELYQEMAARFPNVSWQASGGIGSINDIEALKPTNVGGVILGRALLEGKFTVKEAIACWQSA

SEQ ID NO: 182334 - protein, 245 aa, Unknown
  Bacterial polypetide isolated from the Sargasso Sea
MIIPAIDLIDGQVVRLYQGDYGQQTTFDLSPLAQLQSYQGQGASWLHIVDLTGAKDPTKRQTALIAKLTAGLSANIQVGGGIRTEEQVAELLSLGVKRVVIGSLAVKEPELVKGWFNKFGSEAICLALDVNINQNGEKIVAVSGWQSGGGKSLESIVEDFSQVGLKHALVTDISRDGTLTGANTELYRELSSRYPNIAWQASGGIATLEDVAAVRDSGAAGIIIGKALLINQFNVAEAIQCWPNE

SEQ ID NO: 182335 - protein, 253 aa, Unknown
  Bacterial polypetide isolated from the Sargasso Sea
LIPAIDLMNGKCVRLFKGDFNKRKDFTKEPHEQAKFWESEGAKYIHIVDLDAAKSGSPTNDESIKKIAKIVNIPIQIGGGIRSQERIEQLFSYGIEKVIMGTSAIENKELVKDLSNKFPGRIIVGIDAKDGKVSTRGWLEQSNIFATDLVKEFSSFKIASFIVTDINTDGTLEGTNEEFIKSILEITDIPVIASGGVGSISDLLSLVKFENSGLFGVIVGKALYENKFTINEANNVLSSERLNDFDLNRNYYA

SEQ ID NO: 182336 - protein, 250 aa, Unknown
  Bacterial polypetide isolated from the Sargasso Sea
MLLIPAIDLKDGQCVRLKQGDMDQATIFSEEPAAMARHWVDRGARRLHLVDLNGAFAGKPKNEDAIRAIIEEVGGEIPVQLGGGIRDLNTIERYLDDGLSYVIIGTAAVKNPGFLQDACTAFGGHIIVGLDAKDGKVATDGWSKLTGHEVADLARKFEDYGCESIIYTDIGRDGMLQGINIEATVRLARAVKIPVIASGGLSNLTDIESLCEVEDEGIEGVICGRAIYSGDLDFAAAQTLADRLRESDDA

SEQ ID NO: 182337 - protein, 247 aa, Unknown
  Bacterial polypetide isolated from the Sargasso Sea
MIIPAIDLINGQVVRLYQGDYGQKTAYSDSPQARFDEYVSQGAVQLHLVDLDGAKDAKARQLPLIAQLLSATEAPVQVGGGVRSEQDVADLLAAGSSRVVIGSTAVKSPALVTSWMEKYGPERIVLALDVNIDAQGNRHIAVAGWQENSGVTIEALIERFLPAGLKHVLCTDISRDGTLAGTNVELYRDLCARYPSVGFQASGGIGGIEDIEALKGSGVKGIILGRALLEGKFSVGDAIACWGNGSL

SEQ ID NO: 182338 - protein, 79 aa, Unknown
  Bacterial polypetide isolated from the Sargasso Sea
MLIIPAIDLKDGACVRLRQGRMEDSTVFSDDPVSMAAKWVEGGCRRLHLVDLNGAFEGQPVNGEVVTAIAKRYPTLPIQ

SEQ ID NO: 182339 - protein, 251 aa, Unknown
  Bacterial polypetide isolated from the Sargasso Sea
MLLIPAIDLKDGQCVRLKQGDMDQATIFSEDPAAMARKWVDLGARRLHLVDLNGAFAGKPKNLEAIEAILDEVGDEIPVQLGGGIRSLETIEKYLDAGLSYVIIGTAAVKNPGFLQDACTAFSGNIIVGLDAKDGKVATDGWSKLTGHEVIDLARKFEDYGVESIVYTDIGRDGMLQGINIEATVKLAQAVGIPVIASGGLSNLTDIENLCEVEEHGVEGVICGRAIYSGDLDFAAAQKRADELNGELDNA

SEQ ID NO: 182340 - protein, 220 aa, Unknown
  Bacterial polypetide isolated from the Sargasso Sea
VGGEVGKQLGVTYFLERRELGVINIGGPGTITVDGQCYEIGHRDALYVGKGAKEVVFASIDTTKPAKFYYNCAPAHTTYPTKKVTPADVAPVTLGDNLTSNRRTINKYFVPDVLETCQLSMGLTELAPGNLWNTMPCHTHERRMEVYFYFNMEEDTCVFHMMGQPQETRHIVMHNEQAVISPSWSIHSGVGTKAYTFIWGMVGENQVFDDMDHVAVKDLR

SEQ ID NO: 182341 - protein, 232 aa, Unknown
  Bacterial polypetide isolated from the Sargasso Sea
MEVRQSINSEYAKTLDTAGLRKQFLVEQVFERDALQLTYSHIDRIIVGGVWPASRAVELPASLGKAIGVNYLLERRELGAINIGGDGWVDVNGTRHTVRNEEAIYIGKGAQAVAFGSDDAARPAKFYLNCAPAHESYPTRTISLAQASPETLGAPETSNRRTIYKFIVPEVLPTCQLSMGMTKLEPGNLWNTMPCHTHERRMEVYFYFNIADDAAVFHMMGEPSETRHILVH

SEQ ID NO: 182342 - protein, 322 aa, Unknown
  Bacterial polypetide isolated from the Sargasso Sea
IRDMMQGNQKLADKGRGEESLGYNAMAAGFQGQRHWTDQYPNGDTAEALLNSSFDWNGIREPFVVATENDSLNGVAMLFGHQLTGTAQVFADVRTYWSPEAVERVTGKPLTGLAEHGIIHLINSGSAALDGSCKQRDYAGKPTMKPHWEISQKEVDDCLAATEWCPAIHEYFRGGGYSSRFLTEGGVPFTMTRINIIKGLGPVLQIAEGWSVELPEDMHDQLDARTNSTWPTTWFAPRLTGKGPFSDVYSVMANWGANHGVLTIGHVGADFITLAAMLRIPVCMHNVEDEKIYRPSAWAAHGMDTEGQDYRACQNYGPLYKR

SEQ ID NO: 182343 - protein, 298 aa, Unknown
  Bacterial polypetide isolated from the Sargasso Sea
VWLHTFSPAKMWINGLAILNKPLMQFHTQFNAALPWDSIDMDFMNLNQTAHGGREFGFIGARMRQQHAVVTGHWQDKQAHERIGSWMRQAVSKQDTRHLKVCRFGDNMREVAVTDGDKVAAQIKFGFSVNTWAVGDLVQVVNAISDGEINALIDEYESSYTMTAATQVHGEKRQNVLEAARIELGMKRFLEQGGFHAFTTTFEDLHGLKQLPGLAVQRLMQQGYGFAGEGDWKTAALLRIMKVMSTGLQGGTSFMEDYTYHFEKGNDLVLGSHMLEVCPSIAVEEKPILDVQHLGIGG

SEQ ID NO: 182344 - protein, 262 aa, Unknown
  Bacterial polypetide isolated from the Sargasso Sea
MTIFDNYEVWFVIGSQHLYGPETLRQVTQHAEHVVNALNTEAKLPCKLVLKPLGTSPDEITAICRDANYDDRCAGMVVWLHTFSPAKMWINGLTILNKPLMQFHTQFNAALPWDSIDMDFMNLNQTAHGGREFGFIGARMRQQHAVVTGHWQDKQAHERIGSWMRQAVSKQDTRHLKVCRFGDNMREVAVTDGDKVAAQIKFGFSVNTWAVGDLVQVVNAISDGEINALIDEYESTYTMTAATQVHGENVRTSWKRPVLNWG

SEQ ID NO: 182345 - protein, 500 aa, Unknown
  Bacterial polypetide isolated from the Sargasso Sea
MKAFKQKQVWFITGSQDLYGPKVLEQVAKNSEQIVHGFNESSAISMEVVYKPTVKSPREIHAVCQAANSDENCVGVILWMHTFSPAKMWIAGLNELSKPFMHLHTQFNAELPWSEINMNYMNTHQSAHGCREFGFIGTRMRKERKVVVGHWQSSDVQAQIDDWCRAAAGWHESQNLRIARFGDNMRQVAVTEGDKVAAQIQFGYEVHAYSLGELNEAIAAIAEGDVTAQLDRYASEYQVGNELFGDEYQLDRLRKEAKIELGLTQFLTQGGFGAFTNCFENLTGMTGLPGLATQRLMANGFGYGGEGDWKTAAMVRIMKVMGQGRAGGTSFMEDYTYNFGATDQVLGAHMLEVCPSIAAAKPRLEVHRHTIGVRCDVPRLLFTGKAGPAINVSTIDLGNRFRIILNELDTVTPPQDLPNLPVASALWEPRPNLAVAAAAWIHAGGAHHSAYSQAITTDQIVDFAEMAGAELVIIDADTKIREFKNELRQNSVYYGLARGL

SEQ ID NO: 182346 - protein, 323 aa, Unknown
  Bacterial polypetide isolated from the Sargasso Sea
MELMKQLEVWFLVGSQHLYGAATLKQVADHAHTITSQLNERAGLPVKIVLKPTGTTLDEISAVARDANHDERCIGLMVWMHTFSPAKMWIPALSQLQKPLLQFHTQFNRDLPWSEIDMDFMNLNQTAHGGREFGFMGARLRLPRTVVVGHWQEEEAHRKLGNWMRVAAAIHDSRHLKIARFGDNMRNVAVTEGDKIEAQIQFGYQVNYHPVGDLVKVIDAVPASDIEALLAEYEETYTLTEAVQAGGVLRASLYEAARQELGMKKFLTDGGFGAFTTTFEDLHGLHQLPGLACQRLMQQGFGFGAEGDWKTAALLRTLKVMGA

SEQ ID NO: 182347 - protein, 385 aa, Unknown
  Bacterial polypetide isolated from the Sargasso Sea
MKAFKQKQVWFITGSQDLYGPKVLEQVAKNSEQIVHGFNESSAISIEVVYKPTVKSPREIHAVCQAANSDENCVGVILWMHTFSPAKMWIAGLNELSKPFMHLHTQFNAELPWSEINMNYMNTHQSAHGCREFGFIGTRMRKERKVVVGHWQSGDVQAQIDDWCRAAAGWHESQNLRIARFGDNMRQVAVTEGDKVAAQIQFGYEVHAYSLGELNEAIAAIAEGDVTAQLDRYASEYQVGNELFGDEYQLDRLRKEAKIELGLTQFLTQGGFGAFTNCFENLTGMTGLPGLATQRLMANGFGYGGEGDWKTAAMVRIMKVMGQGRAGGTSFMEDYTYNFGATDQVLGAHMVRSVPIDCRCKTTFRSSPPHHWVWRCDVPTSVVHW

SEQ ID NO: 182348 - protein, 219 aa, Unknown
  Bacterial polypetide isolated from the Sargasso Sea
MSSYFKDISKIQYEGVDSNNPLSFKYYDEDKVILGKKMKDHLRFATCYWHTFTWPGLDPFGGPTFERPWMQQGDPIEKAEEKLDEAFDFFDKITTPFFCFHDRDISPEGKNYSETQKNFFHIIDLMEKKISKSKVKLLWGTANAFSHRRYMAGASTNPDPEVFAYKAAQVKDCMEATMRLGGQNYVLWGGREGYETILNTNMKLEMNNLARFLELVVNH

SEQ ID NO: 182349 - protein, 324 aa, Unknown
  Bacterial polypetide isolated from the Sargasso Sea
FPCQKSSDVFERAYNKMDAAFEFISKLGLEYFCFHDFDLIDEGENLIESEARLAKIVEYGKNKINSSNVKVLWGTANLFSNPRYMNGAATNPNFDVLSYAGAQVKNALDATIALEGENYVFWGGREGYSSLINTNMKKELDNLAKFLHMAKDYARSNGFKGWFFIEPKPMEPSKHQYDFDAATVVGFLNEYNLQKDFKLNIEVNHATLASHTFDHELQVAANANMLGSIDANRGDYQNGWDTDQFPNSIYEIIEALLVINRSGGLQGGGINFDAKTRRNSTDLIDLFYSHIGAIDLFSRSLLITEKILNNSEYLGLLDSRYSSL

SEQ ID NO: 182350 - protein, 242 aa, Unknown
  Bacterial polypetide isolated from the Sargasso Sea
GIPYYCFHDTDVAPEGSNIKEYVNNFSAMVDVLEQKQAESGVKLLWGTANLFSNPRYAAGAASNPDPQVFSYGATQVFHAMNATKRLGGDNYVLWGGREGYETLLNTDLRQERAQLGRFMQMVVEHKHKIGFKGTLLIEPKPQEPTKHQYDYDSATVYGFLKQFGLEKEFRVNIEANHATLAGHSFHHEIATAISLGIFGSIDANRGDAQNGWDTDQFPNNVEELSLVMYEILKSGGFSTGG

SEQ ID NO: 182351 - protein, 222 aa, Unknown
  Bacterial polypetide isolated from the Sargasso Sea
MTEYFSKIPEIKFEGEESNNPFAFKFYDENKKVLGKSMKEHLRFATCYWHTFTWPGLDPFGGQTFDRPWMQAGDEMKMAEMKLDAAFDFFTKIKTPFFCFHDRDISPEGSNYAETQKNFFHIIDLMEQKINDSGMKLLWGTANAFSHKRYMSGASTNPDPEVFAYKAAQVKDCMDATMRLGGQNYVLWGGREGYETILNTDMTKETANLQRFLELVVNYKHK

SEQ ID NO: 182352 - protein, 260 aa, Unknown
  Bacterial polypetide isolated from the Sargasso Sea
NTQFLGGQNYVLWGGREGYETILNTNMKQEYDQLGRFLNMVAEHKHKIGFKGLLLIEPKPHEPTKHQYDFDSANVFAFLQKYGLEKEFKLNIEQNHAILAKHSFEHEIAYALSNNILGSIDINRGDYLVGWDTDQFPNNVEELVLPFYYIFKNGGFSSGGLNMDAKIRRQSIDPEDLFYAHIGSMDTCARTLIAVEKMINDGSYESFLKQRYESWNDNSDLMNKLSLEDIHNKVIKENINPDPKSGRQEYLENLINSFVE

SEQ ID NO: 182353 - protein, 268 aa, Unknown
  Bacterial polypetide isolated from the Sargasso Sea
EFISKMGFDYYCFHDYDLIQEGKSIKESEKRLELISDYLLLKQKEHGIKPLWGTANCFSNPVYMNGAATNPEFDIVARAGAQVKLALDTTIKLGGLNYVFWGGREGYLSLLNTDMKRELDHMAEFLRMSRDYARNNGFKGTFFIEPKPMEPSKHQYDFDTATAIGFLKNYGLEKDFKINIEVNHATLAQHTFQHELTVAANDDMLGSIDANRGDYQNGWDTDQFPNNLQETTLAMMVILKSSGLKGGGVNFDAKLRRNSTDLEDLFHA

SEQ ID NO: 182354 - protein, 278 aa, Unknown
  Bacterial polypetide isolated from the Sargasso Sea
PDPDVFAFAAATVKSCIDVTQKLGGENYVLWGGREGYETLLNTDLEKELDQMGRFLSMVVDYKHKIGFPGMILVEPKPQEPSKHQYDFDVATCIGFLRKYNLENDVKINIEQGHAILAGHSFEHEIALAVSEGMLGSIDMNRNDYQSGWDTDQFPNNTPEVALAYYHIIKGGGFQTGGTNFDAKLRRQSIDAEDLIAAHVGAMDICARGFKAAAAMVEDGYLEQTLQERYGGWEHQEAQDMLNSDLATITTKVIENSINPRPKSGKQEALENYVNRFV

SEQ ID NO: 182355 - protein, 215 aa, Unknown
  Bacterial polypetide isolated from the Sargasso Sea
FKGTLLIEPKPQEPTKHQYDYDSATVYGFLKQFGLEKEFAVNIEANHATLAGHSFHHEVATAISLGIFGSIDANRGDAQNGWDTDQFPNSVEELSLVMYEILKAGGFTTGGFNFDAKLRRQSMDRADMFHGHIGGMDHLAMALKRAAVLVEKDFLGKAVAERYAGWKGELGGAIQAGGHSLQSLAAMVEREQLSPKAVSGRQELLENQVNLVLFR

SEQ ID NO: 182356 - protein, 293 aa, Unknown
  Bacterial polypetide isolated from the Sargasso Sea
ALKMAELKLDIAFDFFSKIKTPFFCFHDRDIAPEGSTYKETQKNFFHIIDLMEKKMELTNMQLLWGTANAFSHKRYMSGASTNPNPEVFAYKAAQVKDCMEATMRLGGQNYVLWGGREGYETILNTNMKLEMENLKRFLELVVSYKYKIGFKGQILVEPKPHEPTKHQYDFDSASCLALIRKAGLEGEIKLNIEANHATLSGHSYEHEIAYAIANNALGSLDINRGDSLLGWDTDQFPNNIGDLLIAFYYIYSNGGLGKGGLNFDAKIRRQSIDPEDIFYAHIGGMDVCAKTL

SEQ ID NO: 182357 - protein, 275 aa, Unknown
  Bacterial polypetide isolated from the Sargasso Sea
PFGPGTQQFPWAEGSDADERARNKMDAAFEFFTKIGTPYYCFHDFDLVEEGDSFAESSRRLDAIIAYAKEKQAASGVKLLWGTANLFSNPRYMNGAGTNPDFNVVAYAGAQLKNAIDATIALDGENYVFWGGREGYMSLLNTNMKQELDNFGNFLRMARDYARGQGFKGTFFIEPKPAEPSKHQYDFDAATVIGFLQAHGLEEDFKLNLEVNHATLANHTFEHELQVAVDAGMLGSIDANRGDYQNGWDTDQFPNNILETTQQMMIILQGGGLQG

SEQ ID NO: 182358 - protein, 300 aa, Unknown
  Bacterial polypetide isolated from the Sargasso Sea
FVKGTFDRPWIQPVGNQLELAEQKVKVAFEFFEKLGVPYFCFHDVDIAPEGKTLQESHDNVTHIANIIEKEMQRTGVKLLWGTANLFSNKRFCAGGATNPNPNTYAYAAAQVKHAMEITHRLGGENYVLWGGREGYDTLLNTDLAQESEQYARFLKMVVEHKKKIGFKGTLLIEPKPQEPTKHQYDYDTATVAGFLHKHGLQNEIKVNIEANHATLAGHSFHHEIAVACAEGIMGSIDANRGDMQNGWDTDQFPNDVAECTLIMYEILKNGGFTTGGFNFDTKLRRQSCERDDLFIGHIG

SEQ ID NO: 182359 - protein, 284 aa, Unknown
  Bacterial polypetide isolated from the Sargasso Sea
NPDLEIFAFAAATVKSCIDATHQLKGENYVLWGGREGYETLLNTDIKSEINQLGTFLNLVVDYKHKIGFKGTILIEPKPQEPTKHQYDYDVGNVFGFLKKYGLENEVKVNIETGHAFLANHSFEHEIALACALGIFGSIDMNRNDVQSGWDTDQFPNNYLDVALAYYHILLNGGFKSGGTNFDAKLRRQSLDPEDLLLAHIGAMDTCALGFKSALKLLKNGDLKEFIDNRYSNWSKTFGKSLMNREMDLEQITRWIEDNNINPKPVSGKQEYLENIFLQNVIMK

SEQ ID NO: 182360 - protein, 284 aa, Unknown
  Bacterial polypetide isolated from the Sargasso Sea
MSKYFANIPEIKFEGSESTNPLSFKFYDEKKIVLGKTMKEHLRFATCYWHSFTWPGLDPFGGQTFDRPWMQVGDEIKMAEMKLSAAFDFFIKIKTPFFCFHDRDISPEGSKYAETQKNFFHIIDLMEQKINDTGIKLLWGTANAFSHKRYMSGASTNPDPQVFAYKAAQVKDCMDATMRLGGQNYVLWGGREGYETILNTDMAKETANLQRFLELVVNYKHKIGFKGQILLEPKPHEPTKHQYDFDSASCLAFLRKAGLENEIKLNIEVNHATLSGHNFEHEIA

SEQ ID NO: 182361 - protein, 245 aa, Unknown
  Bacterial polypetide isolated from the Sargasso Sea
GYETILNTNMGLEIDNLKRFLELVVNYKHKIGFGGQILLEPKPHEPTKHQYDFDSASCLAFLRKAGLEKEIKLNIEANHATLSGHSFEHEIAYAISNNALGSLDINRGDTLLGWDTDQFPNSVAELILPFYHIFSNGGIGNGGLNFDAKIRRQSIDPEDLFYAHIGGMDVCARTLLAVEKMINDKKLSDYVAQRYEDWQKNLGQFIHDKSTSLDAIHQKVLDDNIEPEPRSGNQEYLENILNKYL

SEQ ID NO: 182362 - protein, 286 aa, Unknown
  Bacterial polypetide isolated from the Sargasso Sea
CDNPDPEIFAFAAATVKSCIDATHQLKGENYVLWGGREGYETLLNTDIKSEIDQLGTFLNLVVDYKHKIGFKGTILIEPKPQEPTKHQYDYDVGNVFGFLKKYGLENEVKVNIETGHAFLANHSFEHEIALACALGIFGSIDMNRNDVQSGWDTDQFPNNYLDVALAYYHILLNGGFKSGGTNFDAKLRRQSLDPEDLLLAHIGAMDTCALGFKSALKLLKNGDLKEFIDKRYSNWSKTFGKSLMNREMNLEQITRWVEDNNINPEPVSGKQEYLENIFIQNAITK

SEQ ID NO: 182363 - protein, 184 aa, Unknown
  Bacterial polypetide isolated from the Sargasso Sea
MTEYFSKIPEIKFEGEESTNPFAFKFYDENKKVLGKSMKEHLRFATCYWHTFTWPGLDPFGGQTFDRPWMQAGDEMKMAEMKLDAAFDFFTKIKTPFFCFHDRDISPEGSNYAETQKNFFHIIDLMEQKIKDSGMKLLWGTANAFSHKRYMSGASTNPDPEVFAYKAAQVKDCMDATMRLGGQN

SEQ ID NO: 182364 - protein, 251 aa, Unknown
  Bacterial polypetide isolated from the Sargasso Sea
ETQKNFFHIIDLMEQKINDSGMKLLWGTANAFSHKRYMSGASTNPDPEVFAYKAAQVKDCMDATMRLGGQNYVLWGGREGYETILNTDMTKETANLKRFLELVVNYKHKIGFKGQILLEPKPHEPTKHQYDFDSATCLAFLRKAGLENEIKLNVEVNHATLSGHNFEHEIAYATSNSALGSIDINRGDTLIGWDTDQFPNNPAELIMSFYFIFKNGGLGQGGMNFDAKIRRQSIDAEDLFYAHMEAWMFVQ

SEQ ID NO: 182365 - protein, 237 aa, Unknown
  Bacterial polypetide isolated from the Sargasso Sea
PFGPGTMVRPWETNDDPMTMALQRVDVAFEFLEKLGCDFYCFHDRDVAPEAASLAECNNQLDTIADRLEEKQKETGKKLLWGTANLFSHPRYVHGAATSPHVESFAYAASQVKKAIEVTHRLDGAGYVFWGGREGYQCLWNTDMKREVDHLATFMHMAVDYAKEIGFSGQFYFEPKPREPMKHQYDFDSATCINFLRSYGLEKHVKMNIETNHATLAGHEMQHELEYAGMQGFLGSI

SEQ ID NO: 182366 - protein, 262 aa, Unknown
  Bacterial polypetide isolated from the Sargasso Sea
MSEYFKNISKIKYEGISSDNPLSFKYYNENQTVMGKTMKEHLRFATCYWHTFTWPGLDPFGGPTLDRPWMLSGDPVKMAELKLEAAFDFFSKIQTPFFCFHDRDIAPEGATYSETKKNLDHIVNLMEKKIEETGVKLLWGTANAFSHKRYMGGASTNPDPEVFAYVAAQVKDCMDVTMRLGGQNYVLWGGREGYETILNTNMKLEMNNLSRFLELVVEYKHKIGFTGQILLEPKPHEPTKHQYDFDTAACLALIRKAGLEKE

SEQ ID NO: 182367 - protein, 285 aa, Unknown
  Bacterial polypetide isolated from the Sargasso Sea
NSSNVKLLWGTANAFSHKRYMSGASTNPDPEVFAYKAAQVKDCMDATKRLGGSNYVLWGGREGYETILNTNMGLEIDNLKRFLELVVDYKHKIGFDGQILLEPKPHEPTKHQYDFDSASCLAFLRKAGLENEIKLNIEANHATLSGHSFEHEIAYAIANNALGSLDINRGDTLLGWDTDQFPNSVSELILPFYHLFSNGGIGKGGLNFDAKIRRQSIDPEDLFYAHIGGMDVCAKTLLAVEKMINDKKLSDYVTKRYEDWQKDLGNFIHSKGTTLDSIHQKVLSD

SEQ ID NO: 182368 - protein, 225 aa, Unknown
  Bacterial polypetide isolated from the Sargasso Sea
MVVEHKHKIGFKGTLLIEPKPQEPTKHQYDYDSATVYGFLKQFGLEKEFAVNIEANHATLAGHSFHHEVATAISLGIFGSIDANRGDAQNGWDTDQFPNSVEELSLVMYEILKAGGFTTGGFNFDAKLRRQSMDRADMFHGHIGGMDHLAMALKRAAVLVEKDFLGKAVAERYAGWKGELGGAIQTGGHSLQSLAAMVEREQLSPKAVSGRQELLENQVNLVLFR

SEQ ID NO: 182369 - protein, 174 aa, Unknown
  Bacterial polypetide isolated from the Sargasso Sea
MTESFFKNIEPIKYEGTETDSNLAFRHYNPNEIVLGKRLEEHLRFAVAYWHSFAWEGGDPFGGLTFERPWHPQDSMENAYLKADVAFDMFSILGQPYFCFHDADIRPDQGNFPDNLARLNEITDYFLDKMKNQKTKLLWGTANMFSHRRWMAGASTNPDPEVFAFAAATVKSCI

SEQ ID NO: 182370 - protein, 292 aa, Unknown
  Bacterial polypetide isolated from the Sargasso Sea
RFATCYWHTFTWPGLDPFGGATFDRPWMTGGDPLKMAEMKLNEAFDFFQKIKTPFFCFHDRDISPEGSTYKETQNNFFHIIDLMESKMEETGTQLLWGTANAFSHKRYMSGASTNPDPEVFAYKAAQVKDCMDATKKLRGSNYVLWGGREGYETILNTNMKLEMDNLRRFLELVVEYKHKIGFAGQILLEPKPHEPTKHQYDFDSASCLAFLRKAGLENEIKLNIEANHATLSGHSFEHEISYAIANDALGSLDINRGDTLLGWDTDQFPNSVSELILPFYHIFSNGGLKKR

SEQ ID NO: 182371 - protein, 221 aa, Unknown
  Bacterial polypetide isolated from the Sargasso Sea
MSDYFKKINEIKFEGENSTNPLSFRFYDENKIVMGKKMKDHLRFATCYWHTFTWPGLDPFGGPTFDRPWMNSSDPLKMAEMKLNEAFDFFQKIKTPFFCFHDRDISPEGSNYKETQNNFFHIIDLMESKMEETGTQLLWGTANAFSHKRYMSGASTNPDPEVFAYKAAQVKDCMDATKKLGGSNYVLWGGREGYETILNTNMKLEMDNLRRFLELVVEYKP

SEQ ID NO: 182372 - protein, 265 aa, Unknown
  Bacterial polypetide isolated from the Sargasso Sea
RHYDPNEMVIGKRMEDHLRFAVAYWHSFAWPGGDPFGGQTFDRPWFGDTMEHARHKADVAFEMFEILGAPYFCFHDLDVRPEGKSFAESLSNLEEITDYIAEKMESTNIKLLWGTANLFTHRRFMSGAATNPDPDVFAYSAATVKSCMDATVKLGGENYVLWGGREGYETLLNTDLTRESQQAGRFLQMVVEYKHKIGFKGQVLIEPKPQEPSKHQYDYDVATVYGFLRRFGLENEVRVNIEAGHAILAGHSFEHEIALANALGI

SEQ ID NO: 182373 - protein, 184 aa, Unknown
  Bacterial polypetide isolated from the Sargasso Sea
MSDYFKNINEIIYEGPNSDNPLSFKYYDESRQVLGKTMKEHLRFATCYWHTFTWPGLDPFGGATFERPWMSGEEPLKMAEMKLDEAFDFFAKIKTPFFCFHDRDISPEGTSYKETQKNFLHIIDLMESKMEFSNVKLLWGTANAFSHKRYMSGASTNPDPEVFAYKAAQVKDCMDATKRLGGAN

SEQ ID NO: 182374 - protein, 273 aa, Unknown
  Bacterial polypetide isolated from the Sargasso Sea
MNVPYYCFHDVDVSPEGASLKEYLDNFTRMVDVLAAKQEQSGVKLLWGTANCFTNPRYGAGAATNPDPEVFSWAATQVVTAMNATHKLGGENYVLWGGREGYETLLNTDLRQEREQIGRFMQLVVEHKHKIGFQGTLLIEPKPQEPTKHQYDYDASTVYGFLKQFGLEKEIKLNIEANHATLAGHSFHHEIATAIALGLFGSVDANRGDPQLGWDTDQFPNSVEENALVMYEILKAGGFTTGGLNFDAKVRRQSTDKYDLFYGHIGAMDTMAL

SEQ ID NO: 182375 - protein, 260 aa, Unknown
  Bacterial polypetide isolated from the Sargasso Sea
MHLGGENYVLWGGREGYETILNTNMQLEMDNLSRLLELVVNHKQKIGFKGQILLEPKPHEPTKHQYDFDSAACLALIRKAGLENEIQLNIEVNHATLSGHNFEHEIAYAIANNVLGSIDINRGDTLLGWDTDQFPNNVQDLLMAFYFIFSKGGFKKGGLNFDAKIRRQSIDPEDLFYAHIGGMDVAARTLIAVEKMIKDKKLSEYIEQRYENWNNELGHFILNKNTDLNDIANKVINENIDPQPKSGQQEYLENILNKYI

SEQ ID NO: 182376 - protein, 235 aa, Unknown
  Bacterial polypetide isolated from the Sargasso Sea
MSNYFKNIDEINFEGLDSDNPLSFKYYDEDKQVLGKTMKEHLRFATCYWHTFTWPGLDPFGGATFDRPWMSASDPLEMAEMKLNEAFDFFNKIKTPFFCFHDRDIAPEGSNYKETQKNFLHIVDLMESKMSSSDVKLLWGTANAFSHKRYMSGASTNPDPEVFAYKAAQVKDCMDATKRLGGSNYVLWGGREGYETILNTNMGLEIDNLKRFLELVIDYKHKIGFAGQILLEPKP

SEQ ID NO: 182377 - protein, 282 aa, Unknown
  Bacterial polypetide isolated from the Sargasso Sea
MAHEIFKHIPTIEYRGEDNDNPLAYNWYDAEKIILGKSLKEHLRFAVCYWHSFNWTGNDVFGEGAFNRPWLTNPKSHQAALEKLDAAFDFFSKLGAPFFCFHDVDVAAHADTVKELSENLRRISDPLNDKMQKHNIELLWGTANLFSHPRYMAGAATNPDPEVFKCAAYQVKNMLELTHQLGGKNYVLWGGREGYDTLLNTDIKQELDQYARFLSLIVEHKEKIGFRGQLLIEPKPCEPTKHQYDRDVSTVIAFLEKYGLLDSIKLNIEAKSCNISRLIFRA

SEQ ID NO: 182378 - protein, 170 aa, Unknown
  Bacterial polypetide isolated from the Sargasso Sea
MSEYFKNIPQIKYEGLESNNPLSFKYYNEDQIILGKTMKEHFRFSTCYWHTFTWPGLDPFGGPTFERPWMQQGDPLKMAEIKLDAAFDFFSKIKTPYFCFHDRDIAPEGNNYDETKKNLDHIVDLMEKKMNEVGVKLLWGTANAFSHKRYMSGASTNPDPEIFAFVAAQV

SEQ ID NO: 182379 - protein, 280 aa, Unknown
  Bacterial polypetide isolated from the Sargasso Sea
MGAATNPDFDVVAYAGSQVKAALDATIKLGGENYVFWGGREGYSSLLNTNMKRELDHLAMFLSQARDYGRNNGFSGTFLIEPKPMEPSKHQYDFDVAAVAAFLKHYDLDNDFRINIENNHATLAGHTFDHEIQAAYNYGLFGSLDINQGDPHNGWDTDEFLHNIYDAVHIMLVLLEEGGLKSGGMNFDAKTRRNSTDLEDIFIGHINSMDTLARGLMIASKILEDPNYNKLKSNRYSSFDSGDGHSFEKGGVNLEQLTELAQKNMEPEQISGKQELYEML

SEQ ID NO: 182380 - protein, 197 aa, Unknown
  Bacterial polypetide isolated from the Sargasso Sea
MSDYFKDIPTIKYEGRDSTNPLSFKFYDANKKILGKTLEEHLRMAVCYWHTFNWPGSDPFGGQTFLRPWMEAGDKIEQAKDKLNNAFDFFEKLGIPYFCFHDVDVAPEGESFSETEKIQKTIIDEISKKLETSKVKLLWGTANLFSHRRYMSGAATNPDPDVFQYAAAQVKMCMENTLYLGGQNYVLWGGREGYETF

SEQ ID NO: 182381 - protein, 263 aa, Unknown
  Bacterial polypetide isolated from the Sargasso Sea
DITHRLGGENYVLWGGREGYETILNTNMQMEMENLARFLELVVNYKYKIGFKGLILLEPKPHEPTKHQYDFDAASCLALIRKAGLEQEIKLNIEVNHATLSGHNFEHEIAYAIANDSLGSIDINRGDTMLGWDTDQFPNNPADLIMAFYHIFSNGGFKTGGFNFDAKIRRQSIDPEDLFYAHIGAMDVCAKTLIATEKIINDKIISKYISERYKNWKGDLGKFIYNKDTDLEKITNLVDNNNIYPSPKSGQQELLENILNKYL

SEQ ID NO: 182382 - protein, 401 aa, Unknown
  Bacterial polypetide isolated from the Sargasso Sea
MQDYFKNIPEIQFEGENSDNPLAFKFYDENKTILGKSMKEHFRFATCYWHTFTWPGLDPFGGQTFERPWMGNGDPIKMAEQKLNCAFDFFTKIKTPFFCFHDRDIAPEGSNYKETQKNFMHIIDLMENKIEETGMKLLWGTANAFSHKRYMSGASTNPDPEVFAYKAAQVKDCMDATLRLGGQNYVLWGGREGYETILNTDMSKEMDNLKRFLELVVNYKHKIGFKGQILIEPKPHEPTKHQYDFDSAACLAFIRKAGLEGEIKLNIEANHATLSGHNYEHEIAYAIANDALGSLDINRGDTLIGWDTDQFPNNPADLIMAFYFIFTNGGLGKGGLNFDAKIRRQSIDPEDLFYAHIGGMDVCAKTLIAVEKLIEDNVIPKFNKDRYSDWDGELGKFIHNK

SEQ ID NO: 182383 - protein, 390 aa, Unknown
  Bacterial polypetide isolated from the Sargasso Sea
YWHTFTWPGLDPFGGQTFDRPWMQAGDEMKMAEMKLDAAFDFFTKIKTPFFCFHDRDISPEGSNYAETQKNFFHIIDLMEQKINDSGMKLLWGTANAFSHKRYMSGASTNPDPEVFAYKAAQVKDCIDATMRLGGQNYVLWGGREGYETILNTDMTKETANLQRFLELVVNYKHKIGFKGQILLEPKPHEPTKHQYDFDSATCLAFLRKAGLENEIKLNVEVNHATLSGHNFEHEIAYATSNSALGSIDINRGDTLIGWDTDQFPNNPADLIMSFYFIFKNGGLGQGGMNFDAKIRRQSIDAEDLFHAHIGGMDVCAKTLIAVEKLMNDNVIPKFIEDRYSDWNKELGQLIHNKDTGLDDINKKVIDDNIEPEPRSGRQEYLENILNKYL

SEQ ID NO: 182384 - protein, 372 aa, Unknown
  Bacterial polypetide isolated from the Sargasso Sea
ERPWMQKGDPIEKAEEKLDEAFDFFDKITTPFFCFHDRDISPEGNTYSETQKNFFHIIDLMEKKLSQSKVKLLWGTANAFSHKRYMAGASTNPDPEVFAYKAAQVKDCMEATMRLGGQNYVLWGGREGYETILNTNMKLEMDNLARFLELVVNHKHKIGFKGQILLEPKPHEPTKHQYDFDSASCLALIRKAGLEGEIKLNIEVNHATLSGHNFEHEIAYAIANNALGSIDINRGDTLLGWDTDQFPNSPLELLMPFYFIFSNGGFKQGGLNFDAKIRRQSIDPEDLFYAHIGGMDVAGRALIAVEKIINDKELSNYIQNRYKKWDHDLGKFIHSNEGSLESIANKVISEKIEPAPKSGQQEYLENILNKYI

SEQ ID NO: 182385 - protein, 301 aa, Unknown
  Bacterial polypetide isolated from the Sargasso Sea
MAEHLRMAACYWHNFCWNGQDVFGQGTFGRPWLEAGDAMAQAKAKADVAFEFFSKLSIPYYCFHDIDVAPEGNSIKEYINNFSAMVDVLEQKQAETGVKLLWGTANLFSNPRYAAGAATNPNPEIFSYGATQVFHAMNATQRLGGENYVLWGGREGYETLLNTDLRQEREQLGRFMQMVVEHKHKIGFKGTLLIEPKPQEPTKHQYDYDSATVYGFLKQFGLEKEFAVNIEANHATLAGHSFHHEVATAISLGIFGSIDANRGDAQNGWDTDQFPNSVEELSLVMYEILKAGGFTTGGFNF

SEQ ID NO: 182386 - protein, 364 aa, Unknown
  Bacterial polypetide isolated from the Sargasso Sea
MSDYFKDIPSIKFEGKDSKNPLAFKYYQSDRKILGKTLEEHLRMAVCYWHTFNWPGGDPFGGQTFLRPWMESGDKLEQAKDKLNNAFTFFEKLGVPFFCFHDVDVAPEGDNFSETEKLQKTIVDEISKKLETSKVKLLWGTANLFSHRRYMSGAATNPDPEVFQYAAAQVKMCLENTQFLGGQNYVLWGGREGYETILNTNMKQEYDQLGRFLNMVAEHKHKIGFKGLLLIEPKPHEPTKHQYDFDSANVFAFLQKYGLEKEFKLNIEQNHAILAKHSFEHEIAYALSNNILGSIDINRGDYLVGWDTDQFPNNVEELVLPFYYIFKNGGFSSGGLNMDAKIRRQSIDPEDLFYAHIGSHGYMC

SEQ ID NO: 182387 - protein, 440 aa, Unknown
  Bacterial polypetide isolated from the Sargasso Sea
MSYFEHIPAIRYEGPQSDNPLAYHHYDPEKRVLGKTLAEHLRIAVCYWHTFVWPGHDIFGQAAFQRPWQQPGDALERARMKADAAFEFFTKLGTPFYTFHDTDVAPEGDSLREYAANFARMVDYLGERQQASGVRLLWGTANLFSHPRFAAGAATNPNPDVFAWAATQVCHALDATHRLGGENYVLWGGREGYETLLNTDLKRERDQFARFLSMVVEHKHRIGFKGALLIEPKPQEPTKHQYDYDVATVHGFLVQYGLQNEIRVNIEANHATLAGHSFHHEIANAFALGVFGSVDANRGDPQNGWDTDQFPNSVEELTLAFYEILRHGGFTTGGMNFDAKVRRQSIDPEDLFYGHVGAIDVLALALERAAVLVENDRLDALRRQRYAQWDDAFGRQILSGGYTLESLAADALARGVNPRHVSGAQERLENIVNQAIYGLR

SEQ ID NO: 182388 - protein, 249 aa, Unknown
  Bacterial polypetide isolated from the Sargasso Sea
MPAYFDQLDRVRFEGTQSTNPLAFRHYNPDEIVLGKRMEDHLRFAACYWHTFCWNGADMFGMGAFDRPWQQPGEALALAKRKADVAFEFFHKLNVPYYCFHDVDVSPEGASLKEYKNNFAQMVDVLAAKQEQSGVKLLWGTANCFTNPRYGAGAATNPDPEVFSWAATQVVTAMDATHKLGGENYVLWGGREGYETLLNTDLRQEREQIGRFMQLVVEHKHKTGFQGTLLIEPKPQEPTKHQYDYDAAL

SEQ ID NO: 182389 - protein, 287 aa, Unknown
  Bacterial polypetide isolated from the Sargasso Sea
MSGASTNPDPEVFAYKAAQVKDCMDATLRLGGQNYVLWGGREGYETILNTDMARETNNLQRFLELVVNYKHKIGFKGQILLEPKPHEPTKHQYDFDSATCLAFLRKAGLENEIKLNVEVNHATLSGHNFEHEIAYATSNKALGSIDINRGDTLLGWDTDQFPNNPADLLMSFYFIFKNGGLGQGGMNFDAKIRRQSIDPEDIFYAHIGGMDVCAKTLIATEKLMNDNVIPKFIEDRYSDWNENLGQFIHNKDTGLDDINKKVIHDNIEPEPRSGSQEYLENILNKYL

SEQ ID NO: 182390 - protein, 442 aa, Unknown
  Bacterial polypetide isolated from the Sargasso Sea
MTTIGNKEFFKGINKIEFEGKDSKNPLAFKYYNPNQIVAGKTMRDHFKFAVAYWHSFCGQGADPFGVGTQNFPWDKSKDPFEASKDKADAAFEFISKMGFDYFCFHDFDLIEESDDFSESEDRLNFITDYVQNKMKKSGIKLLWGTANCFSKPHYMNGAATNPDFDVVSRAGGQIKLALDATIKLNGENYVFWGGREGYMSLLNTDMKRELDHMAQFLKMCRDYARSKGFKGTFFIEPKPMEPSKHQYDFDTATSIGFLKEYGLEKDFKINIEVNHATLAQHTFQHELTVAAKSGMLGSIDANRGDYQNDWDTDQFPTNIQETTEAMLVFLKEGGLQGGGINFDAKLRRNSTDLEDLFLAHIGGADTFARSLLIADKLLSESPLPEILKSRYESFDSGNGKKFEEGKLKLEDLYSFAKLNGHLSLKSGKQEMIENILFNYIR

SEQ ID NO: 182391 - protein, 250 aa, Unknown
  Bacterial polypetide isolated from the Sargasso Sea
MGGREGYETILYTNMGLEIDNLKRFLELVVDYKHKIGFDGQILLEPKPHEPTKHQYDFDAASCLAFLRKAGLENEIKLNIEANHATLSGHSFEHEIAYAIANNALGSLDINRGDTLLGWDTDQFPNSVGELILPFYHIFSNGGIGNGGLNFDAKIRRQSIEPEDLFYAHIGGMDICARTLLAVEKMINDKTLSNYVSKRYGDWKKDLGKFIHDKSTSLDAIHQKVLNDNLEPQPRSGNQEYLENILNKYL

SEQ ID NO: 182392 - protein, 437 aa, Unknown
  Bacterial polypetide isolated from the Sargasso Sea
MTNYFKNIPEIKFEGENSSNPLAFKFYDEDKVVLGKTMKEHLRFATCYWHTFTWPGLDPFGGQTFDRPWMQAGDEMKMAEMKLDAAFDFFTKIKTPFFCFHDRDISPEGSNYAETQKNFFHIIDLMEQKINDSGMKLLWGTANAFSHKRYMSGASTNPDPEVFAYKAAQVKDCMDATMRLGGQNYVLWGGREGYETILNTDMTKETANLQRFLELVVNYKHKIGFKGQILLEPKPHEPTKHQYDFDSATCLAFLRKAGLENEIKLNVEVNHATLSGHNFEHEIAYATSNSALGSIDINRGDTLIGWDTDQFPNNPADLIMSFYFIFKNGGLGQGGMNFDAKIRRQSIDAEDLFHAHIGGMDVCAKTLIAVEKLMNDNVIPKFIEDRYEDWNKNLGQFIHNKDTGLDDINKKVIDDNIEPEPRSGRQEYLENILNKYL

SEQ ID NO: 182393 - protein, 437 aa, Unknown
  Bacterial polypetide isolated from the Sargasso Sea
MSDYFKNISSIEFEGEKSDNPLAFKFYDENKIVLGKTMKEHFRFATCYWHTFTWPGLDPFGGKTFERPWMEQGDQLKMAEIKLEAAFDFFSKIKTPFFCFHDRDVAPEGINYKESQKNFLHIVDLMEKKIESSGVKLLWGTANAFSHKRYMSGASTNPDPEVFAYKAAQVKDCIDATMRLGGQNYVLWGGREGYETILNTDMKKETDNLKRFLELVVNYKHKIGFKGQILLEPKPHEPTKHQYDFDSASCLAFLRNAGLENEIKLNIEVNHATLSGHNFEHEIAYAVCNNSLGSIDINRGDTLVGWDTDQFPNNSADLIMAFYFIFKNGGLGQGGMNFDAKIRRQSLDPEDLFYAHIGGMDICAKTLISVEKMINDNVIPKFVEDRYSDWNNDLGKFIHNEETGLDDINKKVLNDDIEPEPRSGRQEYLENILNKYL

SEQ ID NO: 182394 - protein, 437 aa, Unknown
  Bacterial polypetide isolated from the Sargasso Sea
MSSYFKDISKIQYEGVDSNNPLSFKYYDEDKVVLGKKMKDHLRFATCYWHTFTWPGLDPFGGPTFERPWMQQGDPIEKAEEKLDEAFDFFDKITTPFFCFHDRDISPEGKNYSETQKNFFHIIDLMEKKLSKSKVKLLWGTANAFSHRRYMAGASTNPDPEVFAYKAAQVKDCMEATMRLGGQNYVLWGGREGYETILNTNMKLEMNNLARFLELVVNHKHKIGFKGQILLEPKPHEPTKHQYDFDSAACLALIRKAGLENEIHLNIEVNHATLSGHNFEHEIAYAIANNALGSVDINRGDTLLGWDTDQFPNNPLELLMPFYYIFSNGGFKQGGLNFDAKIRRQSIDPEDLFYAHIGGMDVAARSLIAVEKMIKDKELSSYIQNRYKKWDLDLGKFIHSEEGDLESIANKVINENIEPKPQSGQQEYLENILNKYL

SEQ ID NO: 182395 - protein, 420 aa, Unknown
  Bacterial polypetide isolated from the Sargasso Sea
LNKFSFKYYNPDEIINNKRMEDHLRFAACYWHNFVWPGTDPFGGDTFERPWFGNTIKHAKLKADIAFEMFSILNIPYFCFHDHDVRPEGTGFKENTRNLNEMVDYFQFKMEECKVKLLWGTANLFSHKRYMAGAATNPDPEIFAFAAATVKSCIDATHQLKGENYVLWGGREGYETLLNTDIKSEINQLGTFLNLVVDYKHKIGFKGTILIEPKPQEPTKHQYDYDVGNVFGFLKKYGLENEVKVNIETGHAFLANHSFEHEIALACALGIFGSIDMNRNDVQSGWDTDQFPNNYLDVALAYYHILLNGGFKSGGTNFDAKLRRQSLDPEDLLLAHIGAMDTCALGFKSALKLLKNGDLKEFIDNRYSNWSKTFGKSLMNREMDLEQITRWVEDNNINPNPVSGKQEYLENIFLQNVIMK

SEQ ID NO: 182396 - protein, 390 aa, Unknown
  Bacterial polypetide isolated from the Sargasso Sea
IRHTFTWPGLDPFGGQTFDRPWMQAGDEMKMAEMKLDAAFDFFTKIKTPFFCFHDRDISPEGSNYAETQKNFFHIIDLMEQKINESGMKLLWGTANAFSHKRYMSGASTNPDPEVFAYKAAQVKDCMDATMRLGGQNYVLWGGREGYETILNTDMTKEIANLQRFLELVVNYKHKIGFKGQILLEPKPHEPTKHQYDFDSATCLAFLRKAGLENEIKLNVEVNHATLSGHNFEHEIAYATSNSALGSIDINRGDTLIGWDTDQFPNNPADLIMSFYFIFKNGGLGQGGMNFDAKIRRQSIDAEDLFHAHIGGMDVCAKTLIAVEKLMNDNVIPKFIENRYEDWNKNLGQFIHNKDTGLDDINKKVIDDNIEPEPRSGRQEYLENILNKYL

SEQ ID NO: 182397 - protein, 438 aa, Unknown
  Bacterial polypetide isolated from the Sargasso Sea
MAAFPDIPKIQYEGPESKNPLAFRWYNPDEVVAGKTMREHFRFTVVYWHTFRGTGSDPFGAATLQRPWDDGTESVDNACNRARAAFELFEKLDAPFYAFHDRDVAPEGQTLAESHSNLDAVAKVLKEEQERSGVGLLWGTANLFSNPRYMHGAATSCNVEVYAYAAAQVKKAIEVTNELGGENYVFWGGREGYQCLYNTDMKRELDHLAQFFHMAVDHAKSIGFSGQFLIEPKPKEPTKHQYDSDVAACVNFLRAYDLTDSFKLNLETNHATLAGHEMLHELEAAGSQGFLGSIDANTGDLLLGWDTDQFATNYYLTTQIMLALLKYGLSPGGVNFDAKVRRESFEPVDLFYAHIGSMDAFARGLRVAAAIREENALSTVVTERYKSWDGDLGKKIEAGECSFAELEKLMLEKGEAAANTSGRQELLENIVNRYLDKR

SEQ ID NO: 182398 - protein, 274 aa, Unknown
  Bacterial polypetide isolated from the Sargasso Sea
MFSILGQPYFCFHDADVRPDQGNFPDNLATLNEITDYFLDKMKNQKTKLLWGTANMFSHRRWIAGASTNPDPDIFAFAVATVKSCMDVTQKLGGENYVLWGGREGYETLLNTDLEKELDQMGRFLSMVVDYKHKIGFPGMILVEPKPQEPSKHQYDFDVATCIGFLRKYNLENEVKINIEQGHAILAGHSFEHEIALAVSEGMLGSIDMNRNDYQSGWDTDQFPNNTPEVALAYYHIIKGGGFQTGGTNLMPTQKASIDAETLLLLTLERWMFV

SEQ ID NO: 182399 - protein, 435 aa, Unknown
  Bacterial polypetide isolated from the Sargasso Sea
MSDYFKDIPTIKYEGRDSTNPLSFKFYDANKKILGKTLEEHLRMAVCYWHTFNWPGGDPFGGQTFLRPWMEAGDKIEQAKDKLNNAFDFFEKLGIPYFCFHDVDVAPEGESFSETEKIQKTIIDEISKKLETSKVKLLWGTANLFSHRRYMSGAATNPDPDVFQYAAAQVKMCMENTMFLGGQNYVLWGGREGYETILNTNMKQEYDQLGRFLNMVAEHKHKIGFKGLLLIEPKPHEPTKHQYDFDSANVFAFLQKYGLEKEFKLNIEQNHAILAKHSFEHEIAYALSNDIFGSIDINRGDYLVGWDTDQFPNNVEELVLPFYYIFKNGGFSSGGLNMDAKIRRQSIDPEDLFYAHIGSMDTCARTLIAVEKMINDGSYENFLKQRYEQWASEKQLMTSMSLEDIHKNVIAKNINPQPKSGRQEYLENLINSFVD

SEQ ID NO: 182400 - protein, 437 aa, Unknown
  Bacterial polypetide isolated from the Sargasso Sea
MSSYFKDISKIQYEGVDSNNPLSFKYYDEDKVVLGKKMKDHLRFATCYWHTFTWPGLDPFGGPTFERPWMQQGDPIEKAEEKLYEAFDFFDKITTPFFCFHDRDISPEGKNYSETQKNFFHIIDLMEKKLSKSKVKLLWGTANAFSHRRYMAGASTNPDPEVFAYKAAQVKDCMEATMRLGGQNYVLWGGREGYETILNTNMKLEMNNLARFLELVVNHKHKIGFKGQILLEPKPHEPTKHQYDFDSAACLALIRKAGLENEIHLNIEVNHATLSGHNFEHEIAYAIANNSLGSIDINRGDTLLGWDTDQFPNNPLELLMPFYHIFSNGGFKQGGLNFDAKIRRQSIDPEDLFYAHIGGMDVAARSLIAVEKMINDKELSTYIQNRYKKWDQALGKFIHSQEGNLETIANKVISENIEPKPQSGQQEYLENILNKYL

SEQ ID NO: 182401 - protein, 192 aa, Unknown
  Bacterial polypetide isolated from the Sargasso Sea
STVNILIDNLSKVKNKIRNVVSSSVKSTELLEANGFEVSELRDVGKLTKYIDGADEVNKHLQMVKGGGGALTREKILAHNSNQFICIVDESKKVDILGKFPLPIEVIPLSRSAVSLELIKLGGRPVLRENFVSDNGNLILDVHNLQIMEPIKLEQTINNIPGVVTNGIFALDHANILLCASDSGIDKTDLNA

SEQ ID NO: 182402 - protein, 168 aa, Unknown
  Bacterial polypetide isolated from the Sargasso Sea
MKKIVADAAIKEVKSDMILGLGSGSTAALMIKSLADEMRSGKLQNIRGVATSFQSEVLALELDIPLIDLASVSQIDLAIDGADEVDPGFQLIKGGGACHVREKLVASKANQLLIVVDETKLVQNLNQSFPLPVEVLPNAWKQVQEVISEMNGSSSLRMATKKAGPVVT

SEQ ID NO: 182403 - protein, 220 aa, Unknown
  Bacterial polypetide isolated from the Sargasso Sea
MNSEEQKKQAALKSLEFIADDCVLGVGTGSTVNHLIAALPSVKNKIEAVTSSSKASTQLLEENGFRVDDLSSVGSPDLYIDGADEITEHFHMIKGGGGALTREKIIAEASRMFVCIIDDSKLVDLLGKFPLPVEVIPMAKSLVARELTKLGGLPELRHDFVTDNGNLILDVHNLKILDPVDLENHINNIPGVVTNGIFAQRSADVMIIGNESGPETKIKN

SEQ ID NO: 182404 - protein, 231 aa, Unknown
  Bacterial polypetide isolated from the Sargasso Sea
MKQVVADAAIREVKSDMILGLGSGSTAALMIKRLADEIRSEKLQNIRGVATSFQSEVLALELDIPLIDLASVSQIDLAIDGADEVDPRFQLIKGGGACHVREKLVASKANQLLIVVDETKLVQNLNQSFPLPVEVLPNAWKQVQEVISEMNGSSSLRMATKKAGPVVTDQGNLILDILFNNGIENPKDIEMKINNIPGVLENGLFVDLTDKVLVGKIEDNVPVVYSPSRAS

SEQ ID NO: 182405 - protein, 133 aa, Unknown
  Bacterial polypetide isolated from the Sargasso Sea
MKQVVADAAIREVKSDMIIGLGSGSTAALMIKSLANEIRLGKLQNIRGVATSFQSEVLALELDIPLIDLASVSQIDLAIDGADEVDPGFQLIKGGGACHVREKLVASKADLLLIVVDETKLVQNLNQSFPLPV

SEQ ID NO: 182406 - protein, 212 aa, Unknown
  Bacterial polypetide isolated from the Sargasso Sea
GLGSGSTAALMIKSLADEIRSGKLQNIRGVATSFQSEVLALELDIPLIDLASVSQIDLAIDGADEVDPGFQLIKGGGACHVREKLVASKANRLLIVVDETKLVQNLNQSFPLPVEVLPNAWKQVQEAISEMNGSSYLRMATKKAGPVVTDQGNLILDVLFNEGIKHPKDIEMKINNIPGVLENGLFVDLTDKVLVGKIENENPVVYSPSRAS

SEQ ID NO: 182407 - protein, 153 aa, Unknown
  Bacterial polypetide isolated from the Sargasso Sea
VFDLNSVDRLGIYVDGADEINGHMQMIKGGGAALTREKIIASVADKFICIADASKQVDILGKFPLPVEVIPMARSAVARELVKLGGRPEYRQGVVTDNGNVILDVFGLEILDAIALENKINGIPGVVTVGLFANRGADVALIGTADGVKTIVK

SEQ ID NO: 182408 - protein, 159 aa, Unknown
  Bacterial polypetide isolated from the Sargasso Sea
MTQDELKQAVAKAAVDHIAPHLEPKSIVGVGTGSTANFFIDYLAEYKNDFDGAVASSEATAERLKKHGIPVYDLNAVNEIEFYVDGADETNERLELIKGGGGALTREKIVAAVAKTFICIADESKMVGILGEFPLPVEVIPMARSHVGREIVKLGGDPV

SEQ ID NO: 182409 - protein, 189 aa, Unknown
  Bacterial polypetide isolated from the Sargasso Sea
VNHLIAALPSVKNKIEAVTSSSKASTKLLEENGFRVDDLSSVGSPDLYIDGADEITEHFHMIKGGGGALTREKIIAEASRMFVCIIDDSKLVDLLGKFPLPVEVIPMAKSLVAREVTKLGGLPELRHDFVTDNGNLILDVHNLKILDPVDLENHINNIPGVVTNGIFAQRSADVMIIGNESGPETKIKN

SEQ ID NO: 182410 - protein, 231 aa, Unknown
  Bacterial polypetide isolated from the Sargasso Sea
MKQVVADAPIREVKSDMILGLGSGSTAALMIKSLANEIRLGKLQNISGVATSFQSEVLALELNIPLIDLASVSQIDLAIDGADEVDPRFQLIKGGGACHVREKLVASKADQLLIVVDETKLVQDLNQSFPLPVEVLPNAWKQVQEVISEMNGSSTLRMATKKAGPVVTDQGNLVLDVLFNAGIKNPKDVEMTINNIPGVLENGLFVDLTDKVLVGKFENNSPVVYSPSRAS

SEQ ID NO: 182411 - protein, 139 aa, Unknown
  Bacterial polypetide isolated from the Sargasso Sea
IDGADEVNKYKQLIKGGGGALTREKIIAEASENFICIADETKMVDVLGRFPLPIEVIPMARSFVSRKIVAMKGFPVWRRDFVTDNGNNIIDVSNLEISEPIKLEQELNAIPGVVTNGLFANRPADKVILGYHKDEVKIF

SEQ ID NO: 182412 - protein, 152 aa, Unknown
  Bacterial polypetide isolated from the Sargasso Sea
MKQIVADAAIKEIEDGMIVGLGSGSTAALMIKSLAEEIKSGKLKNIIGVPTSFQSEVLALELNIPLIDLASVSQIDLAIDGADEVDPHFQLIKGGGACHVREKLVASKANKLLIVVDETKLVQHLNLVFPLPIEVLPTAWKQVKDIVSEMSG

SEQ ID NO: 182413 - protein, 190 aa, Unknown
  Bacterial polypetide isolated from the Sargasso Sea
TVNHLISALPSVKNKIDAVTSSSEASTKLLEENGFRVDDLSSVGSPDLYIDGADEITEHFHMIKGGGGALTREKIIAEASRKFVCIIDNSKLVDLLGKFPLPVEVIPMAKSLVARELTKLGGLPELRHDFITDNGNLILDVHNLKILDPVDLENHINNIPGVVTNGIFAKRSADVMIIGNESGPETKIKN

SEQ ID NO: 182414 - protein, 107 aa, Unknown
  Bacterial polypetide isolated from the Sargasso Sea
MNQDVLKKQVAEAALRFVPEGDIIGVGTGSTANFFIDALATLKDRIKGTVASSEATAERLKQHGIEVFSLNDVGSLSVYVDGADEVNQHREMIKGGGGALTREKIVA

SEQ ID NO: 182415 - protein, 239 aa, Unknown
  Bacterial polypetide isolated from the Sargasso Sea
MADLQTQMKQAVADAAVQQIRDSMVLGLGSGSTAALMIKALGAKLASGELKDIVAVTTSFQGEVLAAELNIPLLSLNAVQRIDLAIDGADEVDPGFQLIKGGGACHVQEKLVAARAETFVVVVDSTKLVDRLNLGFLLPVEVLPGAWRQVQQQLASMGGTAELRMAQRKAGPVVTDQGNLVLDVRMDGGIADPVELERAVNNIPGVLENGLFVNLADEVLVGEITDGTAGVRSLEKRLS

SEQ ID NO: 182416 - protein, 220 aa, Unknown
  Bacterial polypetide isolated from the Sargasso Sea
MNSEEQKKQAALKSLEFIADDCVLGVGTGSTVNHLIAALPSVKNKIEAVTSSSKASTQLLEENGFRVDDLSSVGSPDLYIDGADEITEHFHMIKGGGGALTREKIIAEASRMFVCIIDDSKLVDLLGKFPLPVEVIPMAKSLVARELTKLGGLPELRHDFVTDNGNLILDVHNLKILDPVDLENHINNIPGVVTNGIFAQRSADVMIIGNESEPETKIKN

SEQ ID NO: 182417 - protein, 190 aa, Unknown
  Bacterial polypetide isolated from the Sargasso Sea
KIKNIRGVATSFQSEVLALELDIPLIDLASVSQIDLAIDGADEVDPGFQLIKGGGACHVREKLVASKADQLLIVVDETKLVQNLNHSFPLPVEVLPNAWKQVQGVISEMNGSSHLRMATKKAGPVVTDQGNLILDVLFDDGIKNPKDIEMTINNIPGVLENGLFVDLADKVLVGKIENNIPMVYSPSKVN

SEQ ID NO: 182418 - protein, 237 aa, Unknown
  Bacterial polypetide isolated from the Sargasso Sea
MADLQTQMKQAVALAATDQVKDGMVLGLGSGSTAALMIQEVGARLKDGRLSDIVGVTTSFQGEVLAAELGIPLQSLNAIDRIDLAIDGADEVDPRFELIKGGGACHVQEKLVARRAERFVVVVDSTKLVDRLNLGFLLPVEVLAGAWRQVQAELQQLGGAAELRMAQRKAGPVVTDQGNLVLDVSFAGGIDDPAELESSINNIPGVLENGLFVGLADQVLVGEIKEGVAGVRDLAKA

SEQ ID NO: 182419 - protein, 193 aa, Unknown
  Bacterial polypetide isolated from the Sargasso Sea
RSGKLQNIRGVATSFQSEVLALELGIPLIDLASLSQIDLAIDGADEVDPGFQLIKGGGACHVREKLVASKANQLLIVVDETKLVQNLNKSFPLPVEVLPNAWKQVQETISEMNGNSILRMATKKAGPVVTDQGNLILDVLFNDGIKNPKDIEMKINNIPGVLENGLFVDLTDKVLVGKIENNIPVVYSPSRAS

SEQ ID NO: 182420 - protein, 209 aa, Unknown
  Bacterial polypetide isolated from the Sargasso Sea
MKKIVADAAIKEVKSDMILGLGSGSTAALVIKSLADEMRSGKLQNIRGVATSFQSEVLALELDIPLIDLASVSQIDLAIDGADEVDPGFQLIKGGGACHVREKLVASKANQLLIVVDETKLVQNLNQSFPLPVEVLPNAWKQVQEVISEMNGSSSLRMATKKAGPVVTDQGNLIIDVLFKDGIKNPKDIEMKINNIPGVLENGLFVDLT

SEQ ID NO: 182421 - protein, 203 aa, Unknown
  Bacterial polypetide isolated from the Sargasso Sea
HIHNDCLLGMGTGSTVNFLIDLLPEIKNKISAVASSSVQTENLLKMNGFEVQALNQLGMLDLYIDGADEATKNLHLIKGGGGALTREKILAENSKKFICIADETKLVKRLGIFPLPIEVIPMARSFVSREIIKYHGKPVYRENFVTDNGNEIIDIHNLDIIDPIQLENDLNQIPGVVTVGIFARRKADVLLIAGEHGVDEMYP

SEQ ID NO: 182422 - protein, 212 aa, Unknown
  Bacterial polypetide isolated from the Sargasso Sea
MSAAKITVAKKAIGHIEKKLDRNMVLGIGTGSTVNFFIEELAKFKNLFKGAVSSSEASTKLLQDIGIEVFNLNDVNEVSYYIDGADEVSPENFLIKGGGGAHTREKIVAAASKNFICIVDSSKLVDQLGLFPLPIEVIPESRSMVARKIIELGGLPEYRSGFITDQGNQIIDVKNLIIKDPKELESYLNNIPGVVENGIFSYNKPDLVLTEI

SEQ ID NO: 182423 - protein, 187 aa, Unknown
  Bacterial polypetide isolated from the Sargasso Sea
MKKVVADAAIREVKSDMILGLGSGSTAALMIKSLADEMRSGKLQNIKGVATSFQSEVLALELNIPLIDLASVSQIDLAIDGADEVDPGFQLIKGGGACHVREKLVASKSDQLLIVVDETKLVQNLNLSFPLPVEVLPNAWKQVQEVISEMKGSSTLRMATKKAGPVVTDQGNLILDVLFDDGINNPK

SEQ ID NO: 182424 - protein, 200 aa, Unknown
  Bacterial polypetide isolated from the Sargasso Sea
MSDAKISVSKKAIKYIENKLTRDMVLGIGTGSTVNYFISELSKFKNNFLGAVSSSETSTKLLEDIGIEVFNLNDVNEVSYYVDGADEVSPENYLIKGGGGAHTREKIIASASKEFICIVDKSKLVENLGSFPLPIEVIPESRSLVSRKIMALGGTPIYREGFVTDQGNQIIDIEGIDISDPEALEELINNIPGVVDNGIL

SEQ ID NO: 182425 - protein, 141 aa, Unknown
  Bacterial polypetide isolated from the Sargasso Sea
MTQDQLKQAVAQAAVDLILPKLDDKSIVGVGTGSTANCFIDALARHKGAFDGAVASSEATAARLKGHGIPVYELNTVSDLEFYVDGADESDEHLNLIKGGGAALTREKIVAAVAKTFICIADASKLVPVLGTFPLPVEVIP

SEQ ID NO: 182426 - protein, 213 aa, Unknown
  Bacterial polypetide isolated from the Sargasso Sea
VGLGSGSTAALMIKSLAYEIRCGKLKNIKGVATSFQSEVLALELDIPLIDLASVSQIDLAIDGADEVDPGFQLIKGGGACHVREKLVASKANQLLIVVDETKLVKNLNQAFPLPVEVLPNAWKQVQEVISEMNGSSSLRMAIKKAGPVVTDQGNLILDVLFNDGIKNPKEIEMKINNIPGVLENGLFVDLTDKVLVGKIEETIPVVYSPSRTS

SEQ ID NO: 182427 - protein, 174 aa, Unknown
  Bacterial polypetide isolated from the Sargasso Sea
LEGAVASSKETARRLKSIGIPVFDLNTVGEVQIYVDGADEANEYLHLIKGGGAALTREKIIAAASKEFICIADESKLVPILGKFPLPVEVIPMSRSFVGRQIVKLGGDPVYREGCVTDNGNHIIDIFNLVIDHPKEMEQRLNQITGVVTNGLFANRRADQLFLGTSSEVKIINS

SEQ ID NO: 182428 - protein, 197 aa, Unknown
  Bacterial polypetide isolated from the Sargasso Sea
IVGVGTGSTANFFIDALAKHKMDFDGAVASSEATAARLKGHGIPVYDLNSTAELEFYVDGADESDERLHLIKGGGAALTREKIVAAVAKTFICIADASKLVPVLGAFPLPVEVIPMARSHVARELVKLGGDPVYREGVLTDNGNVILDVHNLSITDPVKLEADINAIVGVVTNGLFAARPADLLLLGTAEGVKTLKR

SEQ ID NO: 182429 - protein, 179 aa, Unknown
  Bacterial polypetide isolated from the Sargasso Sea
FQSEVLALELDIPLIDLASVSKIDLAIDGADEVDPGFQLIKGGGACHVREKLVASKAEQLLIVVDETKLVQELNQSFPLPVEVLPNAWKQVQDVISEMNGNSTLRMATKKAGPVVTDQGNLILDVLFNDGIKNPKDIEMSINNIPGVLENGLFVDLTSKVLVGKIENSLPVVYSPSKVG

SEQ ID NO: 182430 - protein, 218 aa, Unknown
  Bacterial polypetide isolated from the Sargasso Sea
MKQQAGIIACDFVQEGMKIGLGTGSTVRYTVLELGRRMQEEGLSIVGVPTSEATRELAESLNIPLVPLADAGVLDLVIDGADEFDSDYNLIKGGGGALTREKIVAQSSNGMIVVADDRKQVELLGAFDLPIEVLPFEWERTADRVAEICPGNVHRRGGDEPFISDNGGYILDCSFGSTITNPSELESSLLEIAGVVEVGLFVGICDAVVMAASGGVSL

SEQ ID NO: 182431 - protein, 221 aa, Unknown
  Bacterial polypetide isolated from the Sargasso Sea
MDELKLKVAKEAFNYVENSIERDTIIGVGTGSTANFFIEELGKIASRLEGAVASSEETARRLKSIGIPVFDLNTVGEVQVYVDGADEVNEYLHLIKGGGAALTREKIIAAASREFICIADESKLVPILGKFPLPVEVIPMSRSFVGRQIVKVGGDPVYREGCVTDNGNHIIDIFNLVIDQPTEMEQRLNQITGVVTNGLFANRGADQLFLGTSSGVKVFNS

SEQ ID NO: 182432 - protein, 139 aa, Unknown
  Bacterial polypetide isolated from the Sargasso Sea
MKQIVADAAIKEVKSDMILGLGSGSTAALMIKSLADEIHSGKLQNIKGVPTSFQSEVLALELNIPLIDLASVSQIDLAIDGADEVDPGFQLIKGGGACHVREKLVASKANKLLIVVDETKLVQSLNQSFPLPVEILPNS

SEQ ID NO: 182433 - protein, 202 aa, Unknown
  Bacterial polypetide isolated from the Sargasso Sea
MIKSLANEIRLGNLKNIRGVATSFQSEVLALELDIPLIDLASVSQIDLAIDGADEVDPGFQLIKGGGACHVREKLVASKADQLLIVVDETKLVQNLNQSFPLPVEVLPNAWKQVKDVISEMNGISSLRMATKKAGPVVTDQGNLILDVVFNDGIKNPKEIEMSINNIPGVLENGLFVDLTDKVLVGKIENNSPMVYSPSRAS

SEQ ID NO: 182434 - protein, 230 aa, Unknown
  Bacterial polypetide isolated from the Sargasso Sea
LVSKHALKYVKKEMIIGLGTGSTAGIFIKELAKLNRREALRITGVPTSDVSMRLAKDLGINIASPDEINSIDIAFDGADEVDPSLNLIKGGGGALLKEKIVAENAKQMIVLVDESKIVQILGKFPLPIEIVKFGSEKTISLIRNYFKECFGQIPEMYLRKNKGSNFVTEEEHFILDIFQTKITNPEKLDIELNAIVGVVETGLFVNTANTLIVGNRDGSVKIDHRVENAI

SEQ ID NO: 182435 - protein, 185 aa, Unknown
  Bacterial polypetide isolated from the Sargasso Sea
GVTTSFQGEVLAAELNIPLLSLNAVDRIDLAIDGADEVDPGFQLIKGGGACHVQEKLVAARADRFVVVVDSTKLVERLNLEFLLPVEVLPGAWRQVQQQLAALGGKAELRMAQRKAGPVVTDQGNLVLDVTMNGGISDPAALESTVNNIPGVLENGLFVDLVDEVLVGEITDGSAGVRSLEKRLS

SEQ ID NO: 182436 - protein, 84 aa, Unknown
  Bacterial polypetide isolated from the Sargasso Sea
EVIPMARSYVAREIVKLGGDPAYRSGVVTDNGNVILDVHNLDILNPVELEDKLNNIVGVVTNGLFAARGADIVLTGTENGVVKN

SEQ ID NO: 182437 - protein, 199 aa, Unknown
  Bacterial polypetide isolated from the Sargasso Sea
MALSQDELKKLVGYKSVDDHVQSGMVVGLGTGSTAYFAVERVGQKLASGELKDVICIPTSERTREQAESLNIPLCTLNEKSELDVAIDGADEVDPALALVKGGGGALLREKMVEVMAKKFIVIVDESKLCKGLGPGFPLPVEITPFCHMHTLRTVGKLPSLAGCEPILRLGSSSNNKIDGDEPAVTDNGNYIVDLHFQE

SEQ ID NO: 182438 - protein, 220 aa, Unknown
  Bacterial polypetide isolated from the Sargasso Sea
MNSEEQKKQAALKSLEFIADDCVLGVGTGSTVNHLIAALPSVKNKIEAVTSSSKASTKLLEENGFRVDDLSSVGSPDLYIDGADEITEHFHMIKGGGGALTREKIIAEASRMFVCIIDDSKLVDLLGKFPLPVEVIPMAKSLVAREVTKLGGLPELRHDFVTDNGNLILDVHNLKILDPVDLENHINNIPGVVTNGIFAQRSADVMIIGNESGPETKIKN

SEQ ID NO: 182439 - protein, 231 aa, Unknown
  Bacterial polypetide isolated from the Sargasso Sea
MKQIVADVAVKEVKSEMIIGLGSGSTAALMIKSLADEIRSGRLKNIRGVATSFQSEVLALELDIPLIDLASVSQIDLAIDGADEVDPGFQLIKGGGACHVREKLVATKANQLLIVVDQTKLVQNLNQSFPLPVEVLPNAWKQVQDVISEMNGRSTLRMATKKAGPVVTDQGNLILDVLFNDGIKNPKDIEMSINNIPGVLENGLFIDLTDKVLVGKIENNIPVVYTPSKVG

SEQ ID NO: 182440 - protein, 228 aa, Unknown
  Bacterial polypetide isolated from the Sargasso Sea
MTQDELKALVAQAAADYVLANVPEGAVLGVGTGSTANLFIDAMAPHKARFAGAVSSSEASTRRLQGHGFTVLDLNEVDTIPVYVDGADEIDASGAMIKGGGGALTREKIVASVANVFVCIADGSKLVETMGAFPLPVEVVPMARAAVARQLAALGGQPRLRMTKEGQIYKTDNGNVILDVMGLRIADPKGLESVVNEIPGVVTVGLFAKRGANVLLLGTEAGVQRRDF

SEQ ID NO: 182441 - protein, 187 aa, Unknown
  Bacterial polypetide isolated from the Sargasso Sea
MDQNAKKQAVAKAAIDYVESDSIVGVGTGSTVNFFIEELGKIKHKIEGAVSSSEASTARLKALGIEVFALNEVSNLSVYIDGADEVTEHKHMIKGGGAALTREKIVAGAATTFVCIVDESKRVPVLGAFPLPVEVIPMARSFVARELVKLGGDPEYRQGVITDNGNVILDVHNLEILNPRELEQKIN

SEQ ID NO: 182442 - protein, 231 aa, Unknown
  Bacterial polypetide isolated from the Sargasso Sea
MTQDELKQLVGQAAADYVNANVPEGSVIGVGTGSTANCFIDALAASKTRYRGAVSSSLATTARLQAHGFKVLDLNEIDSLPVYVDGADEIDHGGAMIKGGGGALTREKIVASVSDVFVCIADASKLVDTLGNFPLPIEVVPMARTAIGRRVTALGGVPVVRVTKEGVPFITDNGNEIIDVKGLRISDPRTLEMHINAWPGVVTVGLFAGRGANLCMLGTDTGVETIDYNKN

SEQ ID NO: 182443 - protein, 221 aa, Unknown
  Bacterial polypetide isolated from the Sargasso Sea
MDQNTKKQRVAEAVLDYIDNGESLGIGSGSTVNILIENLSKVKNKIRNVVSSSVKSTELLEANGFEVSELRDVGRLTKYIDGADEVNKDLQMIKGGGGALTREKILAHNSNQFICIVDDSKKVDMLGKFPLPIEVIPLSRSSVSLELIKHGGRPVLRENFLTDNGNVILDIHNLEIMEPIKLEKTINNIPGVVTNGIFALDHANVLLCASDSGIDKTDLNA

SEQ ID NO: 182444 - protein, 217 aa, Unknown
  Bacterial polypetide isolated from the Sargasso Sea
MSQEQKKRNAAKAAIEHINNNAVIGVGTGSTVNFFIEELAKNKGLIDGAVSSSVATENLLKQHNIPVVPLNSVIELPIYIDGADEATKNKHLIKGGGGALTREKIIAAASKQFVCIIDDTKLVPLLGNFPLPVEVVPMAQSYVAREITKLGGQPELRQNFTTDNGNVILDIHNMKIENPSEIENKLNQITGVVTNGLFAKRPADVLIIASDNEVIKK

SEQ ID NO: 182445 - protein, 231 aa, Unknown
  Bacterial polypetide isolated from the Sargasso Sea
MTQDELKRLVGQAAADYVIQNVPEGAVIGVGTGSTANCFIDALAVVKARYRGAVSSSVATTERLKSHGIKVFDLNEVDSLQVYVDGADEIDASGAMIKGGGGALTREKIVASVADTFVCIADASKRVPVLGAFPLPIEVVPMARTAIGRRVTALGGVPVLRVTKDGAPYITDNGNEIIDVKGLQIADPRGFEAQVNAWPGVVTVGLFAERGANLCLLGTENGVETIVYSAN

SEQ ID NO: 182446 - protein, 212 aa, Unknown
  Bacterial polypetide isolated from the Sargasso Sea
MSTAKISVARKAINHIEKKLSKDMVLGIGTGSTVNFFIDELSNFKNYFKGAVSSSEASTILLESNGIDVFSLNDVNGLEFYIDGADEVSPDNVLIKGGGGAHTREKIVASASREFICIVDQSKLVDKLGDFPLPIEVIPESRSLVARKIISLGGTPIYRSGFVTDQGNHILDIKDIDISQPEKLESLINNIPGVVDNGIFAFNKPNIVFVSD

SEQ ID NO: 182447 - protein, 124 aa, Unknown
  Bacterial polypetide isolated from the Sargasso Sea
MTQDELKQAVAKAAVDHIAPHLEPSSIVGVGTGSTANFFIDYLAEYRNDFDGAVASSEATAERLKKHGIPVYDLNAVNEIEFYVDGADETNESLELIKGGGGALTREKIVAAVAKTFICIADES

SEQ ID NO: 182448 - protein, 219 aa, Unknown
  Bacterial polypetide isolated from the Sargasso Sea
MTQDEMKKAAGWAALKYVEKDSIVGVGTGSTVNHFIDALATMKADIEGAVSSSEASTQKMKALGIPVYDLNSVDKLSVYVDGADEINGHMDMIKGGGAALTREKIVAAVAEKFVCIVDNTKQVDILGEFPLPVEVIPMARSYVARELVKLGGDPVYREGVVTDNGNVILDVYNLKIINPKELEEKINAIVGVVTNGLFAKRGADVLLVGTPEGVKTFTA

SEQ ID NO: 182449 - protein, 232 aa, Unknown
  Bacterial polypetide isolated from the Sargasso Sea
MKHAVADAAVEQIKDGMVLGLGSGSTAALMIKALGAKLASGALKDIVGVTTSFQGEVLAAELNIPLLSLNAVDRIDLAIDGADEVDPGFQLIKGGGACHVQEKLVAARAERFVVVVDSTKLVERLNLGFLLPVEVLPGAWRQVQQQLSALGGQAELRMAQRKAGPVVTDQGNLVLDVTMNGGISDPAALESTVNNIPGVLENGLFVDLVDEVLVGEITDGKAGVRSLEKRLS

SEQ ID NO: 182450 - protein, 211 aa, Unknown
  Bacterial polypetide isolated from the Sargasso Sea
AKQLDIILPKLYEDSIIGIGTGSTVDLFIEMLAEKNPVFKAVVSSSERSSKLLEQKGIEVSLLNDVGGPDIYVDGADEYDDKKQLIKGGGGALTREKIIAYSAREFICIVDESKKVNRLGAFPLAIEVLEYARSYVAREIVKLGGKPTYRTGFVTDQGNQILDILNLDYAVPYELEIRLNRIPGVVENGIFAQKTATKIVVATQNGVEVID

SEQ ID NO: 182451 - protein, 219 aa, Unknown
  Bacterial polypetide isolated from the Sargasso Sea
MTQDEMKKAAGWAALKYVEKDSIVGVGTGSTVNHFIDALATMKADIEGAVSSSEASTQKMKALGIPVYDLNSVDKLSVYVDGADEINDHMDMIKGGGAALTREKIVAAVAEKFICIVDNTKQVDILGEFPLPIEVIPMARSYVARELVKLGGDPVYREGVITDNGNVILDVYNLKIINPKELEDKINAIVGVVTNGLFAKRGADVLLVGTPEGVKTFTA

SEQ ID NO: 182452 - protein, 218 aa, Unknown
  Bacterial polypetide isolated from the Sargasso Sea
MDQNAKKQAVAKAAIEYVEADSIVGVGTGSTVNFFIEELGKIKHKIEGAVSSSEASTERLKALGIEVFELNEVSNLSVYIDGADEVTEHKHMIKGGGAALTREKIVAGAATTFVCIVDESKRVPVLGSFPLPVEVIPMARSFVARELVKLGGDPEYRQGVVTDNGNVILDVHNLEILNPRELEQKINNIPGVVTNGIFALRGADIVLSATDSGVETFK

SEQ ID NO: 182453 - protein, 231 aa, Unknown
  Bacterial polypetide isolated from the Sargasso Sea
MKQIVADAAVKEVEDGMILGLGSGSTAALMIKSLAEQIRSGKLKNIKGVPTSFQSEVLALELNIPLIDLASVPHIDLAIDGADEVDPDFQLIKGGGACHVREKLVASKANKLLIVIDESKLVQNLNQVFPLPVEVMPSAWKQVKDIISEMSGVSNLRMATKKAGPVVTDQGNLILDVLFDAGIKDPKDLEMRINNIPGVLENGLFVDLVDKVLVGRIEDDVPVLFSPSRKS

SEQ ID NO: 182454 - protein, 203 aa, Unknown
  Bacterial polypetide isolated from the Sargasso Sea
MSQDNKKRNVAKAAIEYIKNSTIIGVGTGSTVNFFVEELAKNKGLIEGAVSSSIATEKLLKDNNIPVVTLNSVTELSVYIDGADEATKNKHLIKGGGGALTREKIIAAASKEFICIIDDSKLVPLLGSFPLPVEVIPMAQSYVAREIVKIGGQPELRQDFQTDNGNIILDIHNLKIENPIELENQLNQITGVVTNGLFAKRAA

SEQ ID NO: 182455 - protein, 261 aa, Unknown
  Bacterial polypetide isolated from the Sargasso Sea
MVKAESLSPNHKPSTRESSLHRFQASATSFNLRAPNITNVDQNHLKRSVAEATIEHIESRLTKDTILGIGTGSTVNFFIEELIKIRHKFDCAVSSSTASTLLLENGGIKVIDLNAAPTLEIYVDGADEADHSKQLIKGGGGALTREKIVAQAADEFVCMIDETKLVNNLGGFPLPVEVIPLARGLVARQLKQFSSTPIWRQGFVTDNGNIILDVHDLKIADGEELERKINDIPGVVSNGLFTLRTADTLLVSGSKGISVIN

SEQ ID NO: 182456 - protein, 162 aa, Unknown
  Bacterial polypetide isolated from the Sargasso Sea
MLEENGFRVDDLSSVGSPDLYIDGADEITEHFHMIKGGGGALTREKIIAEASRMFVCIIDESKLVDLLGKFPLPVEVIPMAKSLVAREVTKLGGLPELRHDFVTDNGNLILDVHNLKILDPVDLENHINNIPGVVTNGIFAQRSADVMIIGNESGPETKIKN

SEQ ID NO: 182457 - protein, 219 aa, Unknown
  Bacterial polypetide isolated from the Sargasso Sea
MDQNEKKLNVAKAAVKHIHNDCLLGMGTGSTVNFLIDLLPEIKNKISAVASSSVQTENLLKMNGFEVQALNQLGMLDLYIDGADEATKNLHLIKGGGGALTREKILAENSKKFICIADETKLVKRLGIFPLPIEVIPMARSFVSREIIKYHGKPVYRENFVTDNGNEIIDIHNLDIVDPIQLENELNQIPGVVTVGIFARRKADVLLIAGEHGVDEIHP

SEQ ID NO: 182458 - protein, 231 aa, Unknown
  Bacterial polypetide isolated from the Sargasso Sea
MKKVVADAAIREVKSDMILGLGSGSTAALMIKSLADEIRLGKLQNIKGVATSFQSEVLALELDIPLIDLASVSQIDLAIDGADEVDPRYQLIKGGGACHVREKLVASKADQLLIVVDETKLVQNLNKSFPLPVEVLPNAWKQVQEVISEMNGSSSLRMATKKAGPVVTDQGNLVLDVLFNDGIKNPKEVEMTINNIPGVLENGLFVDLTDKVLVGKIENNTPVVYSPSKVS

SEQ ID NO: 182459 - protein, 212 aa, Unknown
  Bacterial polypetide isolated from the Sargasso Sea
MSAAKITVAKKAIGHIEKKLDRNMVLGIGTGSTVNFFIEELAKFKNLFKGAVSSSEASTKLLQDIGIEVFNLNDVNEVSYYIDGADEVSPENFLIKGGGGAHTREKIVAAASTSFICIVDSSKLVDQLGLFPLPIEVIPESRSMVARKIIELGGLPKYRSGFITDQGNQIIDVKNLIIKDPKELESYLNNIPGVVENGIFSFNKPDLVLTEI

SEQ ID NO: 182460 - protein, 220 aa, Unknown
  Bacterial polypetide isolated from the Sargasso Sea
MNSEEQKKQAALKSLEFIADDCVLGVGTGSTVNHLIAALPSVKNKIEAVTSSSKASTQLLEENGFRVDDLSSVGSPDLYIDGADEITEHFHMIKGGGGALTREKIIAEASRMFVCIIDDSKLVDLLGKFPLPVEVIPMAKSLVAREVTKLGGLPELRHDFVTDNGNLILDVHNLKILDPVDLENHINNIPGVVTNGIFAQRSADVMIIGNESGPEIKIKN

SEQ ID NO: 182461 - protein, 220 aa, Unknown
  Bacterial polypetide isolated from the Sargasso Sea
MNPEEQKKQAALKSLEFIDDDCILGVGTGSTVNHLISALPRVKNKIDAVTSSSEASTKLLEENGFRVDDLSSVGSPDLYIDGADEITEHFHMIKGGGGALTREKIIAEASRKFVCIIDNSKLVDLLGKFPLPVEVIPMAKSLVARELTKLGGLPELRHDFITDNGNLILDVHNLKILDPVDLENHINNIPGVITNGIFAKRSADVMIIGNESGPETKIKN

SEQ ID NO: 182462 - protein, 219 aa, Unknown
  Bacterial polypetide isolated from the Sargasso Sea
MDELKLKVAKEAFNYVENSIERDTIIGVGTGSTANFFIEELGKIASRLEGAVASSEETARRLKSIGIPVFDLNTVGEVQVYVDGADEANEYLHLIKGGGAALTREKIIAAASREFICIADESKLVPILGKFPLPVEVIPMSRSFVGRQIVKLGGDPVYREGCVTDNGNHIIDIFNLVIDHPTEMEQRLNQITGVVTNGLFANRRADQLFLSTSSGVKVL

SEQ ID NO: 182463 - protein, 218 aa, Unknown
  Bacterial polypetide isolated from the Sargasso Sea
MTQDQMKKAAAWAALDYVTAGTIVGVGTGSTVNHFIDALATIKDQIKGAVSSSVQSTEKMRALGITVLDLNEVESFAVYVDGADEINSRKHMIKGGGAALTREKIVAAVAQKFVCIVDQTKQVDVLGKFPLPVEVIPMARAYVARELEKLGGRPVWRENVVTDNGNIILDVHGLSIAEPEELEQQINNLVGVVTNGIFARRAADIVLVGTAQGTQVLN

SEQ ID NO: 182464 - protein, 222 aa, Unknown
  Bacterial polypetide isolated from the Sargasso Sea
MNQETKKKNAAKAAFNLIKPNLNKDIVLGIGTGSTTNYFIDELNASNIEIKGAVCSSISSEKNLNPSINILSLNEVHSIDFYVDGADEFNDRFELIKGGGGALTREKILAYSSSKFICIVDDTKHADLLGKFPLPIEVLEIARSAISREIMKMGGRPVYRNKFITDNGNQIIDVHNFPIRIPLELEEQLNNIPGVVENGIFSNRKADIIINANKNGLQILER

SEQ ID NO: 182465 - protein, 231 aa, Unknown
  Bacterial polypetide isolated from the Sargasso Sea
MKQIVADAAIQEVKSDMILGLGSGSTAALMIKSLADEIHSGKLQNIRGVATSFQSEVLALELNIPLIDLASVSQIDLAIDGADEVDPKFQLIKGGGACHVREKLVASKANQLLIVVDETKLVQKLNQSFPLPVEVLPNAWKQVKDVISEINGSSTLRMATKKAGPVVTDQGNLILDVLFDDGIKNPKDIEMSINNIPGVLENGLFVDLTDKVLVGKIENNFPVVYSPSKVG

SEQ ID NO: 182466 - protein, 219 aa, Unknown
  Bacterial polypetide isolated from the Sargasso Sea
MSPKKQAAEYAFESVKNLLDKNFVLGIGTGSTTNYFIELLKEKKPEIKCFVSSSVASTELLKDAGYSEAELNDVGGPDLYIDGADEVNSKLELIKGGGGALTREKIIASASKTFICIVDKSKIVDRFGKFPVAIEVIPMARSFVSRQVVAMGGRPAYRVGFITDNGNQIIDVSNLNFDVPFETESRINRIPGVVENGIFAARKADKIIVADGQKVSELK

SEQ ID NO: 182467 - protein, 218 aa, Unknown
  Bacterial polypetide isolated from the Sargasso Sea
MTQDQMKKNAAWAALDYVAPQTIVGVGTGSTVNHFIDALATIKDQIKGAVSSSVQSTEKMRALGITVLDLNDVESFGVYVDGADEINPQNHMIKGGGAALTREKIVAAVAEKFVCIVDQTKQVNVLGKFPLPVEVIPMARAYVTRELEKLGGRPVWRENVVTDNGNIILDVHGLSITKPEELEQQINNLVGVVTNGIFARRAADIVLVGTAEGTKILN

SEQ ID NO: 182468 - protein, 161 aa, Unknown
  Bacterial polypetide isolated from the Sargasso Sea
MADLQTQMKQAVADAAVEQIKDGMVLGLGSGSTAALMIQGLGAKLASGELKDIVGVTTSFQGEVLAAELNIPLLSLNAVSRIDLAIDGADEVDPGFQLIKGGGACPRAGKTRGGTGGSFCCGGGLHQTGGPSQPRFSAAGGSASRGLAPGAAAAGSPRGQR

SEQ ID NO: 182469 - protein, 217 aa, Unknown
  Bacterial polypetide isolated from the Sargasso Sea
MNQDEKKMRVAEAALDYIEHGQIVGIGSGTTVHAFIKQLTKVKNKIDAVVSSSELTTQLILDCNIRVIDLKESGGLPIYIDGADESNANKQLIKGGGGALTREKIIAGASKKFVCMIDDSKYVQTLGKFPLPIEVIPMSQSIVALEIIKLGGRPVYRENFVTDNGNIILDIHNLEISEPLTLEQAINNIPGVVTNGLFAMRPADNLLISNGDEIKVM

SEQ ID NO: 182470 - protein, 330 aa, Unknown
  Bacterial polypetide isolated from the Sargasso Sea
FEDRQVLHTALRILSNENPHNEVKNCLQRMEVIVNRIHSGKWKGFSGKNIKDIVNIGIGGSDLGPRLVCDALEDFKVGEHKMHFVSNVDPSHFDEVISELNPETTIFIVASKSFNTPETALNAAIAKKWLLRASDAPVAIERHFIAITGNKNSAINFGMAEDNVFPVWDWVGGRYSVWSAIGLPVALSVGMESFIAFHAGAHSMDRHFQEESAEKNMPVIMALITVWYNAFFNCQSSAVVPYSHRLKELPFYLQQLSMESLGKSVTKENDQVSINTGEILWGTVGTNSQHSYFQLLHQGTQFVPVDFVAIAKTRSKSVTIKRCTIISLLI

SEQ ID NO: 182471 - protein, 269 aa, Unknown
  Bacterial polypetide isolated from the Sargasso Sea
VALQLGMEQFQQLLKGARDMDQHFINAPLEQNMPVILALLGVWYINAKGCQAQALLPYSHYLRFLPSYVQQLDMESNGKGVDLDGKPLTDATAPVIWGDAGTNGQHAYHQLLHQSVLAVPSDFILPAKVSHELKDHHHRLAAHCFAQTQALMQGKTFEEAKAEVLASGASEAEAIALAPHKVSPGNKPSNTLLLPELSPYYLGALIALYEQKVFCQGVLWNINSFDQWGVELGKQLSTPIYQVLSDQQKNNFDASTEALIAKFKQLNLG

SEQ ID NO: 182472 - protein, 240 aa, Unknown
  Bacterial polypetide isolated from the Sargasso Sea
TFTTLETMTNARSLRDWFIARGCPEEALAKHFVGVSANPAEVVKFGIAADNVFEMWDWVGGRYSLWSAVGLSIMIAIGPEQFDELLAGANDMDRHFREAPLERNLPVLLGLIGIWYRNFFGSQSYLVAPYSEALHYLPSYLQQLEMESNGKSARLDGTFVDYPTSAVTWGEPGTNGQHAFFQMLHQGPTIVPIDFIAVLTPEHPLASHHPKLLANCFAQSEALMLGRTLDEARKVAGPGK

SEQ ID NO: 182473 - protein, 284 aa, Unknown
  Bacterial polypetide isolated from the Sargasso Sea
NSVSNTKAFGIPKERVFDFADWVGGRYSIWGPIGLSLMLAIGVKNFDEFLEGAFEMDQHFMDAPAERNMPIMLALVGIWHNQICGYHTRAVLPYEQRLSKLPAYLQQLEMESNGKNVSMEGKKLNYHTGPIVWGEPGTNGQHAFFQLIHQGTRIVPCEFLVGAMGNESYLVKHHDILVANCLAQSEALMLGLSLSEVIERMTQKKGNNQELEAIASHRVFPGNRPSTTLVYSKLSPSTLGKIIALYEHRVFVEGIILGINSFDQWGVELGKVLAEELTQIMREK

SEQ ID NO: 182474 - protein, 268 aa, Unknown
  Bacterial polypetide isolated from the Sargasso Sea
QHFANAPFEENLPLTLGMLSVWNVSFLGCPARAILPYCQALAKLAPHIQQVAMESNGKGVAIDGTPLDYETGEIDFGEPGTNGQHSFYQLIHQGRTIPCDFIGIVKSQQSVYLKGEIVSNHDELMCNFFAQADALAVGKSAIELRAESTPDALIPHKTFTGNRPSLSIMLPELNAYTTGQLLALYEHRVATQGFVWGINSFDQWGVELGKVLASRVRTSMNAKRTKGDTMTPADGFNPSTTALLNRYLAGKAALIYPEPKDVFPCDLM

SEQ ID NO: 182475 - protein, 275 aa, Unknown
  Bacterial polypetide isolated from the Sargasso Sea
RAVLHTALRNVESTPIYVNKLDVMPSILQTLEKMKVFSDRIRSGQFSGQGGTITDVVNIGIGGSDLGPAMVVKALAPYQDGPNCHFISNVDGSHIHDVLSKLNPEKTLVIVASKTFTTSETIKNARTAYDWMSGTVNEPSLQFAAVSTAVQKTDEFGISRDHVFGFGDWVGGRYSLWGPIGLSIIIALGAEAFETLLNGAHEMDIHFKTAEMGKNLPILLALIGVWHNQICNYSTRAVLPYDQRLNKLPAYLQQLEMESNGKSVDLDGNLLGFHS

SEQ ID NO: 182476 - protein, 248 aa, Unknown
  Bacterial polypetide isolated from the Sargasso Sea
NINPTQTSAWQALQKHFEEMKDVTIADLFAKDSDRFTKFSATFDDLMLVDFSKNRITEETLAKLQDLAKETDLAGAIKSMFSGEKINRTEDRAVLHVALRNRSNTPIIVDGKDVMPEVNAVLEKMKSFSEAIISGSWKGYTGKAITDVVNIGIGGSDLGPFMVTEALRPYKNHLNMHFVSNVDGTHIAEVLKKVNPETTLFLVASKTFTTQETMTNAHSARDWFLATAGDNKHVAKHFAALSTNGKAV

SEQ ID NO: 182477 - protein, 236 aa, Unknown
  Bacterial polypetide isolated from the Sargasso Sea
MCEETNLKNNINQYFNGAIINETEGRAVLHTALRSSGNDEVDKTLNKIINISDEINSAKRSGYSGKRITDVVNIGIGGSHLGPEMVTEALAYYSKGVKPHFISNIDPDFTSKLLKDLNPETTLFIIVSKTFTTIETLENANKVRAWFIDNSSEIAIKDHFIAISNNTKAPKKFGISPDNILSIPDWVGGRFSLWGSVGLIISIVIGSKNFKDFLKGAHEMDIHFENSPFEKNIPVV

SEQ ID NO: 182478 - protein, 302 aa, Unknown
  Bacterial polypetide isolated from the Sargasso Sea
KQIKDFLISRSIEDVSKHFIGVTSNIKSAVEFGLDKENIFNMYDFVGGRFSVWGSVGLSVSLAIGYENFEKFLKGANKMDEHFKVSRLNQNIPVCLALISIWYNNFMNCETEAVLPYSEYLKFLPNYLQQMFMESNGKYIDRSSKKVDYQTGTIVWGGTGTNSQHAFFQLLHQGTKLIPCDFIGFKSSLHGNNEAHNKLMSNFIAQTQALMIGGSMGDSPFRKFEGNNPSNTILFDKVSPESLGMILSMYEHKVFVQGIILNIFSFDQWGVELGKSLANTLLTEIESKNILDHDPSTENLLD

SEQ ID NO: 182479 - protein, 188 aa, Unknown
  Bacterial polypetide isolated from the Sargasso Sea
DKLTSLVDYIQQLEMESNGKSHTNENENLNYSTSPIIWGGVGTNGQHSYHQLLHQGTNAFSANFYLVADQGEELLEHQEWLIANALAQAKVLKHGNKAEEQSLNYKSLMGNHPSSTILLDKITPETIGALLAVHEHKVFCEGALWHINSFDQWGVEHGKNIAQAIHAKIVTSRGESHRSFYDSYGEFI

SEQ ID NO: 182480 - protein, 268 aa, Unknown
  Bacterial polypetide isolated from the Sargasso Sea
ILGIGTENFKQFLQGARTIDEHFLNTAPENNLPLVLGMLEIWYTSVLKFGSRAIIPYDHRLEGFVSYIQQLEMESNGKSVDKDGQKMTQKTAAVVWGSEGTNAQHSFFQLLHQGTSVIPCDFLIAAVSDEEFAGHQEVLLANCLAQARALMTGRSLQKTTKRLSDLGLSTQNARRLAPHSTFIGNRPSTIFLFKQLTPNILGQLIAIYEHKTFVQGAIWNINSFDQWGVELGKELTNEILPLLKNKIIDPNLDRSTANLIEEVFKFRK

SEQ ID NO: 182481 - protein, 283 aa, Unknown
  Bacterial polypetide isolated from the Sargasso Sea
MFPKNRPTGLPSWQALTSHYAKLQNKSIRSLFDAHPDRANAFSLEKCGLYLDYSKNLIDERGLKLLMDLARDSALGTAKKAMETGEKINEREDRSVLHYALRSHRQSILMEGENIMPLVKDELAKIETIANAITSGHWAGHTGKEIKYVVNIGIGGSDLGPQMVCNALRPYWSGITPYFLSNIDAAQWEEIRGEIVAEETVFIVASKTFTTDETMTNARTVRSWFIEEMGTDEALKKHFFAVSTNITEVENFGIPKQNIVGFWDWVGGRFSLWSSIGLSVALA

SEQ ID NO: 182482 - protein, 300 aa, Unknown
  Bacterial polypetide isolated from the Sargasso Sea
RHLIDEDVMVALLHLAESCNLQGRINDMFSGAPINISEDRPVQHMAIRTSEYRKSEAYQTLAAFADSVRRDRDITAVVNLGIGGSDLGPKMVTQALAGYHDGPVCHFVGNICPTDLHDVLVTCDPKKTLFIITSKTFTTAETLANAMVAKHWLGQHGIDAGTAMVAVTGAETLARAWGIRPDHIFTFADGIGGRYSLWSSVGLSVMIAIGNENFSRMLAGAHAMDCHVWQADLQQNIGVIMGLIRVWCRRYLQLPAYGLIPYDQRLVAFPAWAQQLEMESNGKSVDRQGHTLQLPAGPLI

SEQ ID NO: 182483 - protein, 276 aa, Unknown
  Bacterial polypetide isolated from the Sargasso Sea
FLEGAWNVDEHFATAPFEKNLPVTLGMLSLWNVSFLNCPARAILPYTQALAKLAPHIQQVAMESNGKGVSIDGQPLDYETGEIDFGEPGTNGQHSFYQLIHQGRTIPCDFIGIIKSQQSVYLKGEIVSNHDELMCNFFAQADALAVGKTDVQLRSENVPDSLIPHKTFTGNRPSLSIMLPALNAYTTGQLLAIYEHRVAVQGFIWGLNSFDQWGVELGKVLASKVRSSMNEKRTKGEMMSDSDGFNPSTTAMLNRYLEGKAQLKYDQPEDVFPCDL

SEQ ID NO: 182484 - protein, 228 aa, Unknown
  Bacterial polypetide isolated from the Sargasso Sea
VLMGLISLWYNNFFCCESEAIISYSEYLQKLPSYLQQASMESNGKNVDRNGKKVTHQTGNIIWGGTGTNSQHAFFQLLHQGTKLIPCDFIGFKTPLYCENDQHDILMSNFFAQTQALLNGKSYKIVKSELEKNSQNEDLAPFKSFDGNRPSNSILIDKLTPEALGSLIAFYEHKIFVLGIIWNIYSFDQWGVELGKELASSLLDDIRTKKSTSKDLSTKSLINNYNKG

SEQ ID NO: 182485 - protein, 181 aa, Unknown
  Bacterial polypetide isolated from the Sargasso Sea
HIVAIGIGGSFLGPKIMTEALKPHTVDAVKVHFVANVDGCHIHDVLSSVDFEETLVVMSSKSFTTQETIQNTLTAKDWFLKSGGTQQDIAKHFVAVSSNVKAATDFGISEDNIFPMWDWVGGRYSLWSAIGLPISLALGFDNYKALLEGAFEMDTHFTTAPLEENMPVLLGLLGVWYRNFF

SEQ ID NO: 182486 - protein, 301 aa, Unknown
  Bacterial polypetide isolated from the Sargasso Sea
MSRLSLDFSNLTTFVSEKDLEAIYPKVLSCHEMLENAQGPGSHFLGWRKPEISKTVLSEIHEVAESVRELCQVFIVIGIGGSYIGSQAGISFLKSSFPNQLYKEGLPEIYFSGHNISSDYHADLLELIEDRDICINVISKSGTTTEPAIAFRLFKELIERKYGPENAKQRIIITTDGSQGALNNLAMAQGYRKFVIPEDIGGRFSVLSPVGLLPMSVTGIDIAELISGACVGQKLYSENFNNDAYQYAGFRYLLYKNGMTTEILATFHPAFHYFSEWWKQLVAESEGKDLKGIFPASVSSP

SEQ ID NO: 182487 - protein, 243 aa, Unknown
  Bacterial polypetide isolated from the Sargasso Sea
MSLSKINPKNTEAWKMLIKKREEIAGIQIIDLFDSSKNRIKKFSIEFDKMFLDFSKNIINDETFELLLKLCEDCELKKNIKSLFNGEKINETENRSVLHTALRDFNLNSEIGKELLLDRQKIEKFTNDILSGKTRGSTNKKITDIVNIGIGGSDLGPNMVVESLKFYKTDLNCHFVSNVDGDHLKEVLKLVDPETTVFIIVSKTFTTQETLTNAKKIKEFLISRSIEDISKHFIGVTSNIKVQ

SEQ ID NO: 182488 - protein, 289 aa, Unknown
  Bacterial polypetide isolated from the Sargasso Sea
VAVSNNLDKTKDFGISSDKIFPMNDWVGGRFSLWSSAGITIALAIGQDNFQELLNGAQEVDFHFKTAKFNDNIPKILAMIGIWYTNFWNAETEAIVPYTEYLRSLPSYLQQSVMESNGKNVNREGEKINYQTSPIIWGASGTNSQHAFFQHIHQGTKLIPIDFIGFKNSLFKNDEHQKKLLANLIGQVDALMKGKNEGEVEKELVSKKINEDEIKFLTPYKVFDGNKPSNTIIFDKVTPENIGRLIAIYEHKIFVQGIVWNIFSYDQWGVELGKELADEILKKDNQNSS

SEQ ID NO: 182489 - protein, 258 aa, Unknown
  Bacterial polypetide isolated from the Sargasso Sea
VGGRFSLWGSVGLVISIVIGSQNFKDFLKGAHEMDIHFKNSPFEKNIPVVLALISIWYNNFFKCETEAVLPYSQFLIKLPDYLQQASMESNGKSIDRSGKKINYETGSIVWGSTGTNAQHAFFQLMHQGTKIIPSDFIAFKKSLHGDTNQLKILNSNFLAQTNALMTGKQTSGDDIHKNIDGNKPSTSIVINKLDPSSIGSLIAMYENKIFTIGSILNVFSFDQWGVELGKSIAKEILLGNDGYLDKSTKKIRDQLKD

SEQ ID NO: 182490 - protein, 281 aa, Unknown
  Bacterial polypetide isolated from the Sargasso Sea
AVSTAVQKTDEFGISRDHVFGFEDWVGGRYSLWGPIGLSITIALGAETFEALLNGAHEMDIHFKTAEIGKNLPILLALIGVWHNQICNYSTRAVLPYDQRLNKLPAYLQQLEMESNGKSVDLDGSLLGFHSAPVVWGEAGTNGQHAFFQLLHQGTRVIPCEFLVAAQSHEMYLDHHHKSLLSNCFAQSEALMQGRSLEEVYSKLSSDDMNHDKFEEKARHRVFPGNRPSTTLLYPKLTPKILGKIIALYEHRVFVEGKILGINSFDQWGVELGKELATGLE

SEQ ID NO: 182491 - protein, 223 aa, Unknown
  Bacterial polypetide isolated from the Sargasso Sea
KHFRESDFENNIPVLLALISIWYNNFFKCETEAIIPYSELLKNLPKYLQQASMESNGKSTDRNNQKINYETGGIIWGASGTNAQHSFFQLLHQGTRIIPCDFIAFQQPYSKDLEQHKILIANFLAQTNALMLGEKKAGGHKYIEGNKPSNSLFINSLTPYNLGALIAMYENKIFTIGSILNIFSFDQWGVELGKSIAKGILDGDTDLLDMSTKKLFDRYKEGK

SEQ ID NO: 182492 - protein, 268 aa, Unknown
  Bacterial polypetide isolated from the Sargasso Sea
MAYYQQPHDVTTLPAWQALQQHRAEMAGFSMREAFTADTRRFQRFSLDACGLLLDYSKNLIDEHSLELLMQLAEQAGLHEAITALFGGEHVNASEGRAALHTALRSPVGHRLVVDGTDIIPEVHRVLNQVTELVSRIHSGLWRGYSEKPIKEVVNIGIGGSFLGPQLVSEALRPFTQRGVRCHYLANIDGSEFRELTARLDPETTLFIVSSKSFGTLETLKNTLAARDWYLAMGGPEEELHRHFIAVTSNREAAIEFGIGEENIFPMW

SEQ ID NO: 182493 - protein, 244 aa, Unknown
  Bacterial polypetide isolated from the Sargasso Sea
MSNLTNSNTWNALKNHQNQIKKYSLRDLFQDPNRFLDFSIESDDFLIDFSKNIINKQTMNLLFKLANESKILDKIEDMFSAKKINWTEKRSVLHTALRDKSKTQTLINNKDIKSDIRESLNKIRIFSNKVRDGVWKGSTGKKIKNIVNIGIGGSDLGPKMVYEALSYYNDGPSIHFVSNIDASDISETLKKINPEETLFLVASKTFTTQETMTNAETAKSWLTKALDKSSVSKHFAAMSTNIPA

SEQ ID NO: 182494 - protein, 290 aa, Unknown
  Bacterial polypetide isolated from the Sargasso Sea
AWTGHSGQRITDVVNIGIGGSDLGPRMVCRALEHLAVPQVRVHFVSNVDGTDLAETLDHLNPGTTLAIVCSKTFTTLETMANAHSMRRWFVEHGVAEDQLRHHFVAVSTNREAVVQFGIDPDNMFTFWDWVGGRFSLWSAVGLSIVLAIGPQQFEAMLDGARAMDRHFATAAPRENLPLILGMLSVWYRGFFDAASACTVPYCAPLELLTDFMQQLEMESNGKSVQRNGAAIDTDTGPIVWGTAGTNGQHAYFQLIHQGSQIVPVDFITTLEPVRTLPGHHAKLLANCFA

SEQ ID NO: 182495 - protein, 222 aa, Unknown
  Bacterial polypetide isolated from the Sargasso Sea
MFDRLKDMAAGLAGQDIVDLFAQDDTRAEGFSARFDGLLLDYSKTLVTKEVLAALIALAETRGVTARRDAMFAGQVINETEGRAVLHTALRNLDGAPVMVEGHDVMPEVRDTLARMEAFAEDVRGGRFKGQGGAITDVVNIGIGGSHLGPEMGTLALRPYHDGPRCHFVSNVDGADIADTLAGLDPVTTLIVVASKSFTTVETMTNAETARAWMAEAVSDPA

SEQ ID NO: 182496 - protein, 113 aa, Unknown
  Bacterial polypetide isolated from the Sargasso Sea
ALADNTLNVHYVSNADGVQIASVLKNIDPETTLFVISSKTFTTSETMTNAKTAVDWFLETTKDESTIAKHFVAVSTNLEKTAAFGIADENVFTMWDWVGGRFSLWSAIGLPIA

SEQ ID NO: 182497 - protein, 299 aa, Unknown
  Bacterial polypetide isolated from the Sargasso Sea
IGGSFLGPKVVSQALRPYWNQGLNCHFVANVDGTSISEKLKLLDSETTLFIMSSKSFGTQETLTNTLTAKAWFLAKGGLQSDVAKHFVAVTSNVTKATEFGIDADNIFPMWDWVGGRYSLWSAIGLPIALLVGMDNFRALLNGAHQMDEHFASAPLAENMPVIMGLLSLWYGNFFNAQSHVVLTYDHYLRGLPAYFQQLDMESNGKSVTLDGTDVDYSTGPVIWGGEGTNGQHAYHQLIHQGTALIPADFIMPLQSHNPIGVHHDQLASNCFGQTQALMQGRTFEEALAELANSSLTDE

SEQ ID NO: 182498 - protein, 179 aa, Unknown
  Bacterial polypetide isolated from the Sargasso Sea
TGPVIWGGVGCNGQHAYHQLLHQGTQLIPADFIVPIVSFNPVSDHHQWLYANCLSQSQALMLGKTRSEAETELREKGLPEAEVQKLAPHKVIPGNRPSNTLVVERISPRRLGALVAMYEHKVFVQSVVWGINAFDQWGVELGKELGKGVYNRLTGAEETLAEDASTQGLINYFRGRHRG

SEQ ID NO: 182499 - protein, 259 aa, Unknown
  Bacterial polypetide isolated from the Sargasso Sea
QLHQGTYKGYQGDAITDLIWIGIGGSLLGPQMACEALAPFNQSPVRIHFAGNIDGAVVSDVVKALNPATTLVFVASKSFGTEETKQNALAVRQWFTDKGADKAAIARHFWATSSNIKAAAEFGIVAEHILPMWDWVGGRYSLWSAIGFPVALQLGMAQFQQLLKGARDMDQHFINAPLEQNMPVILALLGVWYINAKGCQAQALLPYSHYLRFLPSYVQQLDMESNGKGVDVDGKPLTDATAPVIWGDAGTNGQHAYHQ

SEQ ID NO: 182500 - protein, 218 aa, Unknown
  Bacterial polypetide isolated from the Sargasso Sea
MLPKIDPTSTRSWESLYELAKADSGDIKSLFTDPNRFDKFSFKNGEFLFDFSKNNISEAVLSNLLVLADECHLSDAISAQFSGSPINETENRAVLHTALRDLNAQNANAKKVEQELNKIKSFSERLLSGNWKGYSGKGITNVVNIGIGGSDLGPKMVACALRDHWSSITPHFISNVDAAQLAEELEGLNPETTLFIIASKTFTTQETMTNAATAKSWF

SEQ ID NO: 182501 - protein, 276 aa, Unknown
  Bacterial polypetide isolated from the Sargasso Sea
MVTEALSVYSQGIKPYFISNIDPDYTENLLKSLNPDTTIFIIVSKTFTTIETLENAKKVRKWFIKNVNEESIKNHFIAVSNNTEDPKEFGIESKNILSIPEWVGGRFSLWGSVGLIISICIGSKNFDDFLRGAREMDLHFKETPFEKNIPVVLALISIWYNNFFKCETEVILPYNQFLCKLPDYLQQVSMESNGKSIDREGKKVDYESGTIIWGSTGTNAQHAFFQLMHQGTKLIPADFIAFKEPLYDDVEQHKILTSNFLAQTNALLVGNIKSDN

SEQ ID NO: 182502 - protein, 202 aa, Unknown
  Bacterial polypetide isolated from the Sargasso Sea
QHFIDEKNKIKNIPIVSALFSIWNRNFLGSHSHALLVYNDKLKSLVDYIQQLEMESNGKSHSNENETLNYSTSPIVWGGVGTNGQHSYHQLLHQGTNTFSANFYLVADQGEELLEHQEWLIANALAQAKVLKQGNKVEDQSLNYKSLTGNHPSSTILLDKITPETIGALLAVHEHKVFCEGALWHINSFDQWGVEHGKNIAQ

SEQ ID NO: 182503 - protein, 269 aa, Unknown
  Bacterial polypetide isolated from the Sargasso Sea
DPSHFDEVINELNPETTIFIVASKSFNTPETALNAAIAKKWLLESSDAPVAIEKHFIAITSNKNGAIDFGVAEDNVFPVWDWVGGRYSVWSAIGLPVALSVGMESFIAFHAGAHSMDRHFQEESAEKNMPVIMGLITVWYNAFFNCQSSAVVPYSHRLKELPFYLQQLSMESLGKSVTKENDQVSINTGEILWGTVGTNSQHSYFQLLHQGTQFVPVDFVAIAKTRSKSADHNEMHNHLLANCLSQSLALMKGNSESEEAQKKVTGNKP

SEQ ID NO: 182504 - protein, 162 aa, Unknown
  Bacterial polypetide isolated from the Sargasso Sea
ETCPIIWGGLGSNAQHSFYQLLHQGTERTSIDFFLPILSGGLEKEQQDVLTTNCLAQSWALAEGNSSTNAETPHQHCFGNRPSSLVVFEKLDPKTLGKLIALYEHKVYVQGLIWDVNSFDQWGVELGKSLATEVNGLLSQELSNKPPPALQEVIIRLRRWKI

SEQ ID NO: 182505 - protein, 121 aa, Unknown
  Bacterial polypetide isolated from the Sargasso Sea
LPHHHDLLIANCLAQSEALMNGRISDNANSFESYREFPGNRPSVTIVYPKLTPKVLGTLIALFEHRTFVEGTVWGINSFDQWGVELGKDLSNDLLSIIQKKSASKALNQSTAGLLSTLMKE

SEQ ID NO: 182506 - protein, 262 aa, Unknown
  Bacterial polypetide isolated from the Sargasso Sea
FIARGCPEEALAKHFVGVSANPAEVVKFGIAADNVFEMWDWVGGRYSLWSAVGLSIMIAIGPEQFDELLAGANDMDRHFREAPLERNLPVLLGLIGIWYRNFFGSQSYLVAPYSEALHYLPSYLQQLEMESNGKSARLDGTFVDYPTSAVTWGEPGTNGQHAFFQMLHQGPTIVPIDFIAVLTPEHPLASHHPKLLANCFAQSEALMLGRTLDEARKVAGPGKEALAPHLTFPGNRPTTTLLVDALTPRTLGALIALYEHKV

SEQ ID NO: 182507 - protein, 337 aa, Unknown
  Bacterial polypetide isolated from the Sargasso Sea
DPSELKFKLSSINAESTLVIVSSKSFSTSETMLNSNATLDWLTKNIGKDNALKQRVAITSNLKNALKEGFKEEQIFLFDECIGGRTSIWSSIGLPLVISIGSKEFENFLTGARQVDIHVKKQPINSIPCTMALLSYIQRNYFEATSQAIIPYDSNLEFFPSYLQQLEMESNGKSVKNDGKFLTKPSSPLIWGGIGTNAQHSFFQMLHQGLEKIPIDILLSRKPVFDATKDELIRHRVLAANALAQCEALSLGSKNNNKNLNFFGGRSVSLLSYNKLNPHTLGSLIALYEHKVMFLAGLWEINPFDQFGVELGKEYAKSILNNKEKNKGVSSKLLDEL

SEQ ID NO: 182508 - protein, 253 aa, Unknown
  Bacterial polypetide isolated from the Sargasso Sea
MAVEALKFYKNSLNIHFISNVDGDHNEEVLKTLNPETTFFIVVSKTFTTQETLTNASLAKNWVQKKLDTKEIQNHFCAISTNIDAVKNFGINEDYIFKMYDFVGGRFSMWGSVGLSISISIGYDNFKKFLIGAEKMDIHFKESPIEKNIPICLALISIWNSNFLGSQTQGIIPYTEYLNLLPNYLQQSMMESNGKNIDRSGKKINYSTGNIIWGGTGTNTQHAFFQLIHQGDKLIPCDFIGFKNSLHGNKDSH

SEQ ID NO: 182509 - protein, 306 aa, Unknown
  Bacterial polypetide isolated from the Sargasso Sea
CLKKWRRRSQAYISGEWKGFTGQKIKDIVNIGIGGSDLGPLLVCDALTDFKVSDLNMHFVSNLDPSHFDDVIEMLNPETTLFIIASKSFGTLETEQNASFAKKWLIASSKSSDAIDKHFIAITSNLSGAANFGVAKENIFPIWDWVGGRYSVWSAVGLPIAISVGMDNFVDFLAGAHSMDKHFVENDPEMNMPVIMALITVWYGAFFNCCSHAVVPYSHRLRELPFYLQQLCMESLGKNITKDNEPVLTRTGEIVWGTVGTNSQHSYFQLLHQGTQFVPIDFMVVAKTASRSINHNERHNHLLANC

SEQ ID NO: 182510 - protein, 237 aa, Unknown
  Bacterial polypetide isolated from the Sargasso Sea
MSLKKIDPTKTKSWDNLNSHYKTIKSSSISSFFKENPFRSDDFKIEWEDFYVDFSKNIINSKTIKLLIELCKEVDLKNSIDKYFSGVKINSTENRSVLHTALRSKEKIFLENIDISKNVKEVKRKLKKFSNKIISGKFKSSSEKKITDIVNIGIGGSDLGPVMVTHALKHYSNHLKIHFISNVDGDHVVETLKKIDPETTLFIIVSKTFTTQETITNANSVKKWFLSKYPPMEMFQN

SEQ ID NO: 182511 - protein, 311 aa, Unknown
  Bacterial polypetide isolated from the Sargasso Sea
TELRNFKSKIQSIINDRKKIQSLCDKIINGKLKGQTGEKYTDIVNIGIGGSDLGPKMAVEALKFYKNHLNIHFISNVDGDHIADILNKLNPETTFFIIVSKTFTTQETITNASIAKEWVINNLKTNEISNHFCAVSSNLNAVENFGINKDLIFSMYDFIGGRFSMWGSVGLSIALSVGYDNFEKFLKGAEKMDNHFKNASFEKNIPICLALIGIWNSNFLNSETQAIIPYNESLCFLPNYLQQAMMESNGKNTDRSGNKIDYNTGSIIWGGTGTNTQHAFFQLIHQSNKLIPCDFIGFKKSLHGNTNSHNK

SEQ ID NO: 182512 - protein, 545 aa, Unknown
  Bacterial polypetide isolated from the Sargasso Sea
MTILTQSTTWKALAAHSQQIPHMRELFAGDPARFSNMSLSTCGLFLDYSKNRATPETLNLLLTLAQEAKLDAKIKAMFAGDIINTTEKRAVLHTALRSTADQSIIAEGQDIVPEVQQTLNKMQQFVTSVTSGQWKGYTGKAITDIVSIGIGGSFLGPKIVSQALRPYWITGLNCHFVANVDGTSISEKLKLLDPETTLFIMSSKSFGTQETLTNTLTAKAWFLAKGGSQSDVAKHFVAVTSNVAKATEFGIDAANIFPMWDWVGGRYSLWSAIGLPIALLIGMDNFRSLLKGAHQMDTHFATAPLAENMPVIMGLFSLWYGNFFNAQSHVVLTYDHYLRGLPAYFQQLDMESNGKSVTLNGTHVDYSTGPVIWGGEGTNGQHAYHQLLHQGTALIPADFIMPLQSHNPIGEHHDQLASNCFGQTQALMQGRTLDEALAELSKSNLSDEEKLLIAKHKVMPGNKPSNTLLMDKLTPETLGALIALYEHRTFVQGAIWDINSFDQWGVELGKTLGNDVLARIGADQEATALDASSNGLINLYRRGKI

SEQ ID NO: 182513 - protein, 438 aa, Unknown
  Bacterial polypetide isolated from the Sargasso Sea
MRNKLIKEIKDYYQVVKSRRIESLFLEKNRFKKFSREASGIFLDFSKTNIDNVQLDLLMKLLSNSSFSTAREDLFEGRKVNYTEGKPALHTSIRSPLQPILVGNKNVAEELLAEQKKMIEFCERIQSGSIVSATGKRFTDVVNIGIGGSQLGPEMVINALKTSKNLLNIHFLSNIDPSNLIDVLDNLNPETTLFVVVSKSFNTLETLKNATSVEKWLREHLKSGVSVQKHFVAVLSDTNKIENFSFQFGYKFKIHDFIGGRYSFWGVAGISIMLGLGVDNFSKILAGGASMDRHFRHSEVDENLPALLGLIGVWHSSFCNYTNLAILPYESRLEFFPRYIQQLQMESNGKNSSRYSETVSSLMSPVVWGDIGTNSQHSFFQYLHQGTHTVPIEFIVGRSSSVGLDEEHHDLLKLNCVAQSEALMSGNSDNEESSPMSI

SEQ ID NO: 182514 - protein, 540 aa, Unknown
  Bacterial polypetide isolated from the Sargasso Sea
MTLNSLPAWTALQSHFEQIRHARLRDWFAPENDHAPTRAERFTLAGGGLAADFSKNRINDETLRLLVQLARDAGVEARRDAMFAGEIVNPTEGRAALHTALRATDPRAPFHAQISAERAKMATFARAVRSGTWTGYTGKRIRHVINIGIGGSDLGPKMVVHALHYVATPDITTHFVSNVDGADLARVLEQVDPEETLAIIVSKTFTTLETMTNARSLRDWFIARGCPEEALAKHFVGVSANPAEVVKFGIAADNVFEMWDWVGGRYSLWSAVGLSIMIAIGPEQFDELLAGANDMDRHFREAPLERNLPVLLGLIGIWYRNFFGSQSYLVAPYSEALHYLPSYLQQLEMESNGKSARLDGTFVDYPTSAVTWGEPGTNGQHAFFQMLHQGPTIVPIDFIAVLTPEHPLASHHPKLLANCFAQSEALMLGRTLDEARKVAGPGKEALAPHLTFPGNRPTTTLLVDALTPRTLGALIALYEHKVLVQATVWDINPFDQWGVELGKILGKVVEADLTAESVDPAKHDSSTTALIERARAALKR

SEQ ID NO: 182515 - protein, 518 aa, Unknown
  Bacterial polypetide isolated from the Sargasso Sea
MPLNKLDPSKLNSWKALGSQFKNENSITIEELMEEPNRLDNFSIEWEEFILDFSKNRISKGTLDQLVNLCNESKLKNNIESYFKGDIINETEKRSVLHTALRSQKHESNEISQIVNELREQIINTADKINSGDRVGYSGKKFTDVVNIGIGGSHLGQEMVVEALSFCSKGITPHFISNIDPDYTSQVLEKLDPETTLFIVVSKSFKTIETIENAKKSKEWFISESKGQNIRDHFIGISNNTSAAKEFGINKDSIFPIPEWVGGRFSLWGSAGLIIAISIGSENFRELLNGANSMDKHFRESNFENNMPVLLALISIWYNNFFKCETEAIIPYSEVLNKLPKYLQQASMESNGKSTDRNSQKVNYETGGIIWGASGTNAQHSFFQLLHQGTKLIPCDFIAFQKPHSKDLEQHKILIANFLAQTNALMSGQKKEGAHKYIEGNKPSNSLFINSLTPYNLGALIAMYENKIFTVGSILNIFSFDQWGVELGKSIAKGILYGDSDSLDISTKNLLTKYNKEK

SEQ ID NO: 182516 - protein, 405 aa, Unknown
  Bacterial polypetide isolated from the Sargasso Sea
KAIEHVVNIGIGGSDLGPVMITEALRPYKNHLQMHFVSNVDGTHIAETLKKVDPETTLFLVASKTFTTQETMTNAHSARDWFLKAAGDEAHVAKHFAALSTNGKAVAEFGIDTANMFEFWDWVGGRYSSWSAIGLPIALSLGFENFEALHQGAYEMDMHFATTAFEQNVPVLLALIGIWYNNFYGAETEAILPYDQYMHRFAAYFQQGNMESNGKYVDRNGNKVDYQTGPIIWGEPGTNGQHAFYQLMHQGTKLIPCDFLAPAISHNPIGDHHPKLLANYFAQTEALAFGKSKEQVEAEFLAIGKTLDEVKDLVPFKVFDGNRPTNSILFKQLTPKTLGALIAMYEHKIFVQGIIWNIFSFDQWGVELGKQLANKILPELNTAEPISSHDSSTNSLINTWKAWKA

SEQ ID NO: 182517 - protein, 343 aa, Unknown
  Bacterial polypetide isolated from the Sargasso Sea
IVSSKTFTTSETMKNAKTAYNWMSGAVSEPSLQFVAVSTAIQKTDEFGISRDHVFGFEDWVGGRYSLWGPIGLSIIIALGAEAFVSLLNGAHEMDIHFKTAEIGKNLPILLALIGVWHNQICNYSTRAVLPYDQRLNRLPAYLQQLEMESNGKSVDLDGNLLDFHSAPVVWGEAGTNGQHAFFQLLHQGTRVIPSEFLVAAQSHEMHLDHHHKSLLSNCFAQSEALMKGRSFEEVYSKLRSDDMNHDEFEKQARHRVFPGNRPSTTLLYPKLTPKILGKIIALYEHRVFVEGKILGINSFDQWGVELGKELATGLENFLITGSDSNDLNASTQNLVQVAKTMQ

SEQ ID NO: 182518 - protein, 483 aa, Unknown
  Bacterial polypetide isolated from the Sargasso Sea
MSLSKKNPTNQKSWSNLKDLYNQENNLHINDYFNSEKNRLENFTASLNDLHIDFSKNRISKKAFDLLIELCEETDLKENIDKYFNGSAINETENRPVLHTALRSKNTNSTEISEQVKNTLSKIRTISDEINNGIKLGHSGKKIENVVNIGIGGSHLGPEMVTEALSFYSQGIKPYYISNIDPDYTENLLKSLDPDTTIFIIVSKTFTTIETLENAKKVKKWFVKNVNEESMKNHFIAVSNNTEDPKEFGIESNNILPIPEWVGGRFSLWGSVGLIISICVGSKNFDNFLNGAREMDLHFKETPFEKNIPVVLALLSIWYNNFFKCETEAILPYNQFLGKLPDYLQQASMESNGKSIDREGNKVDYQTGTIIWGSTGTNAQHAFFQLMHQGTKLIPADFIAFKEPLYNDKEQHKILTSNFLAQTNALMVGNKKSGNEIQKNIDGNKPSNTILINKLTPHSLGSLIAMYESKIFVIGSILNIYSF

SEQ ID NO: 182519 - protein, 549 aa, Unknown
  Bacterial polypetide isolated from the Sargasso Sea
MKNINPTQTQAWQALEAHFAANKETRLKDLFAQDPQRFDKFSLTFGGDILVDYSKNLITEETLKLLVDLAKETDLRSAIDAMFNGDKINMTEGRSVLHVALRNRSDRPIESDGKDVMPEVNAVLAKMKGFCEKIISGEWKGYTGKAIQHVVNIGIGGSDLGPVMITEALRPYKNHLQMHFVSNVDGTHIAETLKKIDPETTLFLVASKTFTTQETMTNALTARDWFIKIAGDKAHVAKHFAALSTNGKAVAEFGIDTNNMFEFWDWVGGRYSSWSAIGMPIALSVGFENFEALLQGAFEMDMHFATASYEQNVPVLLALIGLWYNNFYGAESEAILPYDQYMHRFPAYFQQGNMESNGKYVDRNGKPVDYQTGPIIWGEPGTNGQHAFYQLIHQGTKLIPCDFLAPAISHNPIGDHHPKLLANFFAQTEALAFGKSKEQVEAEFLAAGKTLEQVKDLVPFKVFEGNRPTNSILFKSLTPKTLGSLIAMYEHKIFVQGAIWNIFSFDQWGVELGKQLANKILPELNTDAAVTSHDCSTNGLINTWKAWKA

SEQ ID NO: 182520 - protein, 501 aa, Unknown
  Bacterial polypetide isolated from the Sargasso Sea
ERFAFAGGGLAADFSKNRITDETLKLLVQLAREAGVEKRRDAMFAGEIVNPTEGRAALHTALRATDPKAPFHAEIQAERAKMAAFADQVRSGEWTGYTGKRIRYVVNIGIGGSDLGPKMVVHALHHLATPEITTHFVSNVDGADLYNVMQMIDPEETLAIIVSKTFTTLETMTNARSLRDWFIEKGCPESALAKHFVGVSANPAEVVKFGIAKENVFEMWDWVGGRYSLWSAVGLSIMIAIGPQQFDELLAGANEMDQHFRDAPLEKNLPVLLGMIGIWYRNFFGSQSYLVAPYSEALHFLPSYLQQLEMESNGKSARLDGAMVDYPTAAVTWGEPGTNGQHAFFQMLHQGPTIVPIDFIAVLTPEHPLVSHHPKLLANCFAQSEALMFGRTLEEAKKVAGADKPELAPHLVFPGNRPTTTLLVDALTARSLGALIALYEHKVLVQASVWDINPFDQWGVELGKILGKVVEADLTSASVDEKKHDSSTSALIARARAALKR

SEQ ID NO: 182521 - protein, 425 aa, Unknown
  Bacterial polypetide isolated from the Sargasso Sea
MPSSNKKDKIKELLKKHHEILSESHISKLFSEDINRAKKFTTQFSDLYVDYSKNFITNETLDLLLQYAASSNLETTINAMFKGEKINHTEDRAALHVALRGKSKLKLENIEIENDIKNELKKIKSFVCDVHEKKITGWTNKSFDTFVNIGAGGSDLGSKMAVKGLAEYRLGNTHSFFISNVDPDEIESIKKKINPETTLFIISSKSSSTLETITNANTLKSWMVESGCKNINKHFFVVSSNMKLIKDFGLSEDNLFKIWDWVGGRFSLWSAAGLPTALAIGFENFEKMLTGAFAMDQHFLNESPQNNIPVILALIDFWYIRFFNTSTHALIPYDESLRYLPEHLAQLFMESNGKSTDLSGKKINHETGSIAWGTVGTNAQHSISQLLHQGKHLIPIDFLVPLQKNGDQQHHQLLLANCLAQSRAL

SEQ ID NO: 182522 - protein, 254 aa, Unknown
  Bacterial polypetide isolated from the Sargasso Sea
FSLWGFVGLVISIVIGFENFKDFINGAHEMDIHFKNSPFEKNIPVVLALLSIWYNNFFKCETEAVLPYSQFLTKLPDYLQQASMESNGKSIDRSGEKVNYQTGSIVWGSTGTNAQHAFFQLMHQGTKIIPSDFIAFKNSLYGDSDQHEILNSNFLAQTNALMMGKSTSGEYIHKNIDGNKPSNSIVINKLDPFNLGSLIAMYENKIFTIGSILNVFSYDQWGVELGKSIAKEILAGKVVDLDDSTKKTMDQLKK

SEQ ID NO: 182523 - protein, 549 aa, Unknown
  Bacterial polypetide isolated from the Sargasso Sea
MSVLTSLPEWKKLSELAATVKDAHMRDWFAQDANRADKMQLEACGIFLDYSKNRVNDDALKGLFDLARACKLETLRDAMFSGEQINSTEGRAVLHTALRNFSDRKVLVDGEDVMPEVHATLAKIEAFTASVHSGEHKGYTGKPIKHIVAIGIGGSFLGPKIMTEALKPHTVDAVKVHFVANVDGCHIHDVLSSVDFEETLVVMSSKSFSTQETLQNTLTAKDWFLKSGGTQEDIAKHFVAVSSNVKAATEFGISADNIFPMWDWVGGRYSLWSAIGLPISLALGFENFKGLLEGAFGMDTHFTTAPLEENMPVLLALLGVWYRNFFDAQSHVLLPYYHYLRGLPAYVQQLDMESNGKEVTQEGEHVDYPTGPIIWGSEGTNGQHSFHQLIHQGSGVIPADFMLPLNVPNQDDTHHAMLASNCFGQTQALMQGKTFEECYADLDGKGLDDAERKRLAAHKTMPGNKPSNTFLFDSLTPKTLGALVAMYEHKVFVQGVIWNLNSFDQWGVELGKVLGNQVLAGIQGEADKDNFDASTQQLIAKFRAANAPK

SEQ ID NO: 182524 - protein, 545 aa, Unknown
  Bacterial polypetide isolated from the Sargasso Sea
MTILTQSTTWQALAAHSQQIPHMRELFAGDPARFSNMSLSTCGLFLDYSKNRATPETLNLLLTLAQEAKLDAKIKAMFAGDIINTTEKRAVLHTALRSTAEQTIIAEGQDIVPEVQQTLNKMQQFVTSVTSGQWKGFTGKAITDIVSIGIGGSFLGPKIVSQALRPYWITGLNCHFVANVDGTSISEKLKLLDPETTLFIMSSKSFGTQETLTNTLTAKAWFLAKGGSQSDVAKHFVAVTSNVAKATDFGIDADNIFPMWDWVGGRYSLWSAIGLPIALLIGMDNFRSLLKGAQQMDTHFANAPLAENMPVIMGLFSLWYGNFFNAQSHVVLTYDHYLRGLPAYFQQLDMESNGKSVTLNGTHVDYSTGPVIWGGEGTNGQHAYHQLLHQGTALIPADFIMPLQSHNPIGEHHDQLASNCFGQTQALMQGRTLDEALAELSKSSLSDEEKLLIAKHKVMPGNKPSNTLLMDKLTPDTLGALIALYEHRTFVQGAIWDINSFDQWGVELGKSLGNDVLARIGAEQDATALDASSNGLINLYRQGKI

SEQ ID NO: 182525 - protein, 415 aa, Unknown
  Bacterial polypetide isolated from the Sargasso Sea
MSIDQSTALINEATFSYFENYAEKHDFVQKFQDLKSGVRLNNTENRAVTHFKYREPESDLYSKNLDEIEVLTKLIKTNFKKIIIFGIGGSYLGPKLMHDVFSNDEIQINFVTGSDPAEFEKFKNLDLSEYGLVIASKSFSTLETLRSYEVITKNKYLNNTFAVTASRKSAIDYGINANNILGFDVGTGGRFSIWTGINIGFFLSHGRTAFEKFLSGANSIDLLSLQKPELNPALSLAIQDIVFNNLLNFDTTLILNYDYKLRNFYAYAQQLEMESLGKSVDRDTNELLGFNTGSIIWGGYGPRSQHSFFQHLFQGNRETNSYFIASKNNELNFKQFKGQTKSLREGTLDESDSHKRVLPKRYTTILLENISPESLGELIAIWENKTIFMSMFWNINPFDQWGVELGKLNTKKEIE

SEQ ID NO: 182526 - protein, 193 aa, Unknown
  Bacterial polypetide isolated from the Sargasso Sea
NGKSVTLNGTHVDYSTGPVIWGGEGTNGQHAYHQLLHQGTALIPADFIMPLQSHNPIGEHHDQLASNCFGQTQALMQGRTLDEALAELSKSSLSDEEKLLIAKHKVMPGNKPSNTLLMDKLTPETLGALIALYEHRTFVQGAIWDINSFDQWGVELGKSLGNDVLARIGSEQDATALDASSNGLINLYRQGKI

SEQ ID NO: 182527 - protein, 353 aa, Unknown
  Bacterial polypetide isolated from the Sargasso Sea
KALNPETTFFIVVSKTFTTQETLTNANLAKNWIQKKLDTKEIQNHFCAISTNIDNVKDFGIDEEYIFKMYDFVGGRFSMWGSVGLSISISIGYDNFKKFLIGAEKMDTHFKESPIEKNIPICLALIGIWNSNFLGSHTQGIIPYTEYLNLLPSYLQQSMMESNGKNIDRHGNKINYSTGNIIWGGTGTNTQHAFFQLIHQGDKLIPCDFIGFKKSLHGNKDSHNKLMSNYVGQMQALMKGRSLKEVVSEMESKNIDKETINKNANFKVFDGNKPTTSILIDQLNPESLGMLISMYEHIVFTKGVIWNIFSFDQWGVELGKVLASKLLTEIEGGEIGNHDHSTESHLKKLKNIS

SEQ ID NO: 182528 - protein, 388 aa, Unknown
  Bacterial polypetide isolated from the Sargasso Sea
MSVSSWPGLKALAAQQGSLRQAFAEDPTRAEQFSTQACGITLDYSKNLINRQSWQALQQLAAQSRIKPVLSAMLAGEKINNTEQRSVWHMMLRKTDVSGLMLDGENIGDAIHDCRKRMTALVSQLHNGEYLGYTGKTITDLIWVGIGGSLLGPQMAVEALTPYHCSPVRLHFAGNIDGAVVSDIVKGLNPATTLVFVASKSFGTEETKQNALAIRQWFKDHGADGAAIARHFWATSSNISAAAEFGIVEQNILPMWDWVGGRYSLWSAIGFPVALMIGNAHFAELLKGAEAMDTHFTEAPFSDNLPLILALLGIWYINGFGCQAQALLPYSHYLRLLPSYVQQLDMESNGKSVDVNGVAVTDATAPVIWGDAGTNGQHAYHQLLHQSA

SEQ ID NO: 182529 - protein, 467 aa, Unknown
  Bacterial polypetide isolated from the Sargasso Sea
KECKISDSIKMLFNGDKINETEGRSVLHTELRNFKTSNSSIVGDREKIKSFSSKIINGTIKGYTGKKFTDVVNIGIGGSDLGPKMAVEALKFYKNSLNIHFISNVDGDHNKEVLKALNPETTFFIVVSKTFTTQETLTNANLAKNWIQKKLDTKEIQNHFCAISTNIDAVKDFGIDEEYIFKMYDFVGGRFSMWGSVGLSISISIGYDNFKKFLIGAEKMDMHFKESPIEKNIPICLALVGIWNSNFLGSHTQGIIPYTEYLNLLPSYLQQSMMESNGKNIDRSGKKINYSTGNIIWGGTGTNTQHAFFQLIHQGDKLIPCDFIGFKKSLHGNKDSHNKLMSNYVGQMQALMKGRSLKEVVSEMESKNIDEETINKNANFKVFDGNKPTTSILIDELNPESLGMLISMYEHIVFTRGVIWNVFSFDQWGVELGKVLASKLLTEIEGGEISNHDHSTESHLKKLKNIS

SEQ ID NO: 182530 - protein, 305 aa, Unknown
  Bacterial polypetide isolated from the Sargasso Sea
MATVMGRYYSMDRDMRWDRIKLAYDALVRGKGVQSYNLHDSIKKSYDKNVFDEFILPTVGMEKDRPICKINDGDVVFAYNFRSDRMRQLTSVLTQKDYIKYQMKKKKLYFLSMTNYGDEFKNINVLYNKTNIKNTLGEVLSKHKKKQLRIAETEKYPHVTYFFSGGREKSFLNEERILCPSPKVSTYDLKPEMSAFDVEKKIIQKIELDIYDFICLNLANPDMVGHTGDFDSTIKACEVVDKCSNKIINKALKFNYNIILIADHGNADIMINKDGSPHTYHTTNPVPFILIDKKFNSKLKKWNFS

SEQ ID NO: 182531 - protein, 169 aa, Unknown
  Bacterial polypetide isolated from the Sargasso Sea
MKERNLILVRHGQSEWNEKNLFTGWENPGLTKKGLDEARNAGTLIDELDIEFHCMFTSALIRAQLTGSIILETINQTKIEVIKDKALNERFYGDLQGLNKDECREKWGEEQVQIWRRSYDGGPPGGESLKETGERVLPYYLNQIHPLINLDKNIIIAAHGNSLRSLIKH

SEQ ID NO: 182532 - protein, 239 aa, Unknown
  Bacterial polypetide isolated from the Sargasso Sea
MSKLILVRHGQSVWNAENRFTGWVDVDLSEKGILEAQKSGLLIKNLNINIDVSYTSFLRRAIKTLTAILQENSLELKFNTSWELNERHYGSLTGLNKEETKKKIGEEQFKKYRRSWDIPPPPMPENDKNHSLFSPLNPSIPVGMIPFTESLKDTYKRVIPYYEKEIQKHIKENKNVLISAHGNSLRTMCKYLFKISDQKISELEIPTGNPLIIEFDNNLKIKKYYYLDETRAKTIIFNQ

SEQ ID NO: 182533 - protein, 209 aa, Unknown
  Bacterial polypetide isolated from the Sargasso Sea
MNKLVLLRHGQSEWNLENKFTGWTDVPLTKKGIEEAKNGGFLLNKNNIFIDVIFSSVLKRANQTAYICAKEANFIHLFDNDKLIYTRNEKLNERDYGDLVGLNKAETAKKFGKEQVHIWRRSYNTPPPNGESLEDVVNRVSPYFEINILPLLKKNKNILIAAHGNSLRAIMIKIGLYKSEEISSIELPTGKPFCIDYKKNKIIDKYYLN

SEQ ID NO: 182534 - protein, 151 aa, Unknown
  Bacterial polypetide isolated from the Sargasso Sea
MYRLVLLRHGQSQWNLENRFTGWTDVDLTDQGKNEANIAGGLFLKEGFTFDLAYTSVLKRAIRTLWIVLDKMDLMWIPVIRTWKLNERHYGALQGLDKAETAEKHSAEQVKIWRRSYATPPPALDDDDERLPAKDPKYSEVPINLLPKTEA

SEQ ID NO: 182535 - protein, 123 aa, Unknown
  Bacterial polypetide isolated from the Sargasso Sea
DATIKAIEKVDKCVGQIVNATGEMGGSILITADHGNAELMKGSEGEPWTAHTTNKVPLILIEGEKRKIPNMGNEINLRENAGLADIAPTLLQLLNLPIPREMTGKSLIQEIELKGYNKVVQHV

SEQ ID NO: 182536 - protein, 138 aa, Unknown
  Bacterial polypetide isolated from the Sargasso Sea
TELTDKLVAAIESAQYDVIICNYPNGDMVGHTGNFDAAVKACEAVDACIGRVVDALAKVGGECIITADHGNAEQMTDETTGQAHTAHTSELVPFVFVGRDATIDEGGKLSDVAPTILHLMGEAIPAEMTGKPLIHVKE

SEQ ID NO: 182537 - protein, 178 aa, Unknown
  Bacterial polypetide isolated from the Sargasso Sea
SEMKIKNIPIEYNWRLNERHYGALQGLNKSETAEKYGDEQVLQWRRSYNTPPPPLEKSDSRWPGNDSKYSNIDQNDIPACECLKDTVERFLPYWNNSIKPSVQNGKRVLIVAHGNSLRSLVKHLDNISDNDIISLNIPTGIPLIYELSDDLNPIKSCYLGNKEEIEKAISSVKNQAKT

SEQ ID NO: 182538 - protein, 231 aa, Unknown
  Bacterial polypetide isolated from the Sargasso Sea
MSKISSKNIKRLSVPQSPVVLAILDGWGYRKEKSDNAIKSASTPVMDSLWHAYPHTLISASGSDVGLPDGQMGNSEVGHLTIGSGRIIQQELVRISNIVKNNQLGFLNELKEMAASLKKNNSTLHITGLCSDGGVHSHIDHLLGLIKWASDNKLKKVAIHIITDGRDTPAKSASKYLNQIESCIKKFNVGEIASICGRYWIMDRNLLWDRTEKAYSNLTDPDIQITNISPR

SEQ ID NO: 182539 - protein, 230 aa, Unknown
  Bacterial polypetide isolated from the Sargasso Sea
MHTLVLLRHGESQSNQDNLFTGWSDVDLTEKGAKEAKNSGILLKKHNYQFDKIFTSVLKRAVKTMDLCLNEIEQNNIPIVYDWRLNEQHYGDLEGLNKSETVKLHGEEKVFNWRRSFNVSPPPLALNDKRHPRFDNRYKKLSDLEIPSTESLKDTLNRLLPIWNQDIAPFIKSGKNALIVAHGNSLRALIKYLNNISDEDISNFNIPTGIPLVLRLNNDLNTTQFFFLDS

SEQ ID NO: 182540 - protein, 207 aa, Unknown
  Bacterial polypetide isolated from the Sargasso Sea
MHTLVLLRHGESQSNQDNLFTGWSDVDLTEKGAKEAKNSGILLKKHNYQFDKIYTSVLKRAVKTMDLCLNEIEQNNIPIVYDWRLNEQHYGDLEGLNKSETVKLHGEEKVFNWRRSFNVSPPPLALNDKRHPRFDNRYKKLSDLEIPSTESLKDTLNRLLPIWNQDIAPFIKSGKNALIVAHGNSLRALIKYLNNISDEDISNFNIP

SEQ ID NO: 182541 - protein, 237 aa, Unknown
  Bacterial polypetide isolated from the Sargasso Sea
MSFLVLIRHGQSTWNLEKRFTGWVDVDLTDQGKIEAEKAGLLVKNQNINIDFYYSSFQVRANHTLKIIQKVLKSKKNFIRAWQLNERHYGELTGLNKIETANKIGEDKVFKFRRSWDIKPGKLSRESSYHPLNIETYEKIPKELIPDTESLKDTYNRVLEYFKKEIQPKLINKNVLITAHGNSIRALCKYLFNLDNNQITSLEIPTGNPLIINFGENLKINECKYLDKERSKNLLVF

SEQ ID NO: 182542 - protein, 280 aa, Unknown
  Bacterial polypetide isolated from the Sargasso Sea
HRNDSEHNAIRQGDTPVMEALWHAYPHTLIHASGSHVGLPDQQMGNSEVGHLTIGAGRIIRQELVRISDTVRDDQLKNTPALVELAERLRNGTGTLHLLGLCSDGGVHSHVNHLCGLIHWAAAAGIEKVAVHAITDGRDTPTQSAMGSITLVLRAIEEAGVGHLASLCGRYWAMDRDKRWDRTGKAYDLYTDPTRPVSNQSPQQLLTESYAAGITDEFLEPVRLSNDVMQDGDSVLVFNFRPDRARQIAQTLCLDDFDGFERRTTPKLDVVTFTQVEQDL

SEQ ID NO: 182543 - protein, 218 aa, Unknown
  Bacterial polypetide isolated from the Sargasso Sea
MQLILLRHGESQWNLENRFTGWKDVSLTEAGVKEASISAKNLIENNIEVSTIHTSLLKRAIDTAKIVADLIEFPTRNIKYDWRLNERHYGALQGLNKSETASKFGEEQVKIWRRSFDIAPPLLSEDDKRHPKFSSMFKNVDFDLPRAESLKDVILRLNPFWDKYFKEMKEAKGSHLIVAHSNSLRAIIKILDNLSKDEIMSVDIPTGVPLILYFDNNF

SEQ ID NO: 182544 - protein, 252 aa, Unknown
  Bacterial polypetide isolated from the Sargasso Sea
ESDEFISPTAITQGSKTPVVVEDDDVVIFANYRSDRARQLARSFTKPTFIAFERERMPKLSAFISLTSYKAEYEFPVAFPSASLPNVFGKYISSLGLKQLRIAETEKYAHVTFFFNGGDENVFDGEDRVLVPSPHVRTYDLAPEMSAEKITDHLVKSINSRKYDSIVCNFANADMVGHTGNFKATITAIEVIDKCLGKIIESTQKVGGEILITADHGNAEQIKSYTTEKIKSQAHTAHTSNLVPLIYIGRSA

SEQ ID NO: 182545 - protein, 119 aa, Unknown
  Bacterial polypetide isolated from the Sargasso Sea
VNFANPDMVGHTGDLKATIKAVETVDNCIGELTQQIEELNGTILITADHGNCENMWDSNSKSVHTAHTTNLVPFIFVNNEQKDIKLNDGKLADIAPTIIDLLGIKKSKLITGKSLIRKN

SEQ ID NO: 182546 - protein, 236 aa, Unknown
  Bacterial polypetide isolated from the Sargasso Sea
MNYLVLVRHGQSEWNLQNRFTGWVDVDLAPKGKLEACKSGELLKELDLNINHFFTSYQKRAIETLKLILNTMRIKDDKIIKAWELNERHYGSLTGLNKDEMKKKLGEKKVQLFRRSWNISPEPLSKNNPYHPLNIEIYRDIPKEKIPDTESLEDTYNRVIPYFEKNIKDKIKENVIVSAHGNSIRSLCKFLFKLDDTRISKLEIPTGNPLIIKFKNDIIDKAYYLDIARKKNLLVF

SEQ ID NO: 182547 - protein, 265 aa, Unknown
  Bacterial polypetide isolated from the Sargasso Sea
RYWAMDRDQRWERIEKAYNLYTDPNIAVDSRTAEQVLAESYAENITDEFLEPVRLQNSVIKDGDSVLVFNFRPDRARQIVQALCLTDFEGFERSHTPELDVVTFTQVEQDLPVQVAFPPEPLDQLLGQVVADAGLKQYRTAETEKYPHVTYFMNGGIEQPLAGEDRHLVPSPRVATYDLSPAMSAEQLTDSCISAIEKADYSLIVINYANPDMVGHTGVMEAAKEAIQTVDACIGRLLDAVGRQCGTMLITADHGNAELMKGPDG

SEQ ID NO: 182548 - protein, 262 aa, Unknown
  Bacterial polypetide isolated from the Sargasso Sea
AIEDGSFYDNAALQAFIARLKETGGAAHLMGLVSDGGVHGHVTHILAAIKAIRDAGVPVWLHAVTDGRDVAPKSALGYLDQLEAGMAEGAQIATVTGRYFAMDRDNRWERVSQAYEAMVKGAGQFTAPSAKAAVEAAYGREELDEFVKATVIDGFDGIQDGDGFFCLNFRADRAREILRAIGEPEFAEFDTGPRPALAGLLGMVEYSQGHNAYMTTAYPKKAIVNTLGEWVAKQGKRQFRLAETEKYPHVTFFLNGGKETPE

SEQ ID NO: 182549 - protein, 200 aa, Unknown
  Bacterial polypetide isolated from the Sargasso Sea
MASLVLVRHGQSEWNEKNLFTGWKDPDLTDKGEKEALIAGKALKASGYKFDIMFTSVLLRAKRTGNIILGQMAQEDIKIVENEALNERNYGDLAGLNKDEARKNWGKDQVHKWRRSFNVAPPGGESLKMTAERVLPYYEKNILPLLIDNLEIIIAAHGNSLRALVMELDKLSPEEVVKLEIQTGMPICYQMSKLGEVVAK

SEQ ID NO: 182550 - protein, 159 aa, Unknown
  Bacterial polypetide isolated from the Sargasso Sea
LKKKGIKFNIAFFSNLIRAQNTLNIILKELEQNNIKNERNVALNERNYGELAGLNKDDARKKWGDEQVQEWRRSYHTRPPGGESLKDTADRVLPYFKKNITPKIKEGSNILIVAHGNSLRALVMHIESIKPEDIVSLEIKTGVPLIYNSTKINNIERIY

SEQ ID NO: 182551 - protein, 295 aa, Unknown
  Bacterial polypetide isolated from the Sargasso Sea
MNYLKQSFLVEMVKDLKKSKKAVHLLGLLSDGGVHSHQDHMAYLVKFFAENDVKIYLHAFLDGRDVAQKSATDLYQKFCADVGGEDRFELATVGGRYYGMDRDNKWDRIQLAYNAFAYGKSGYEREFSSFNELVKNCYDQNITDEFVKPCAMDGYGGVEEGDGLLFCNFRSDRARQISDALLDADFGGFERKKIDFSHKVAMTRYSDSLEKYYDILFPSLKIDKSLPEILSQNGLRQLRVAETEKFAHVTFFFSCGKENEFEGEKRILVPSPDVATYDLQPEMSANKVTDNLVRL

SEQ ID NO: 182552 - protein, 200 aa, Unknown
  Bacterial polypetide isolated from the Sargasso Sea
MNSNYLVLVRHGQSEWNEKNLFTGWRDPGLTKKGINEAHAAGKALKEQNLSFDLLFTSDLIRAQLTGEIILEEMQQLDVTTVKDKSLNERAYGDLTGMNKDQARAKFGKDQVQIWRRSYDISPPGGESLKDTYDRVIPFFKNNIEPKLSSKNILVSAHGNSLRALVKHLEDISEQEIVKLEIATGVPIIYKFSNGNYTKH

SEQ ID NO: 182553 - protein, 238 aa, Unknown
  Bacterial polypetide isolated from the Sargasso Sea
MVKKPPCLVLLRHGQSQWNLDNRFTGWFDIDLTKQGVAEAKKAGHSLNAAGIQPDIVHTSLQTRAILTANLALAECNRLWIPVHRTWRLNERHYGALTGLNKDETSEKFGVDQVRKWRRSYATPPPLMEDDHPHNPNTDQRYRSVPNHLLPRGECLADVVERLVPFWDEALVQDLHDNEVVLIAAHGNSLRALVKHLENIDDEQIVDVEIPTGVPIVYELDSDFNPLKSIPLVERFLS

SEQ ID NO: 182554 - protein, 101 aa, Unknown
  Bacterial polypetide isolated from the Sargasso Sea
KMGGSILITADHGNAEVMKGTEGEPWTAHTTNKVPLILIEGEKRKIPNMGNKINLRDNAGLADIAPTLLQLLNLPIPREMTGKSLIQEIELKGYNKVVQHV

SEQ ID NO: 182555 - protein, 228 aa, Unknown
  Bacterial polypetide isolated from the Sargasso Sea
MSKNSTLILVRHGQSMWNMKNLFTGWVDVPLSKKGVDEALKAGEQIKDYAIDKIFVSELMRAQQTAMLMMSQSSSDKVPVMQHDTGKMSQWGEIYADSALKNIIPVIADWRLNERYYGHLQGADKDQARAKYGEDQVHIWRRSYDVPPPEGESLQLTAQRTIPYLNEQILPALAEGKNCLVAAHGNSLRSIVMEIEGLTKEQVLALELPTGQPRVYKYFSEDKALRKV

SEQ ID NO: 182556 - protein, 295 aa, Unknown
  Bacterial polypetide isolated from the Sargasso Sea
ASGSDVGLPDGQMVNSEVGHLTIGSGRIIQQELVRISNIVQNNELGLVNELKEIADSLKKKNSTLHITGLCSDGGVHSHIDHLLGLIKWASDNGIKKVAIHVITDGRDTPSKSASKYINQIESCLNKFKIGEIASICGRYWIMDRNLLWERTEKAYANLTDPNIEITNISPQDYIKKSYNKNITDEFIEPIRMSENYLKEGDSLICFNFRPDRARQIIKSLSEKAFSDFERKFFPNLDLVTFTQYDANFTAKVAFPPESLNNFIGQIVSENGLKQYRTAETEKYPHVTYFFNGGV

SEQ ID NO: 182557 - protein, 211 aa, Unknown
  Bacterial polypetide isolated from the Sargasso Sea
MTNIRSKNINRLCPPQSPVVLAILDGWGYREDVTDNAIKNARTPIMDSLWHAYPRTLISASGSDVGLPDGQMGNSEVGHLTIGSGRIIQQELVRISNVVRNNQLEKVDHLKEIAYSLKKNKATLHITGLCSDGGVHSHIDHLLGLIKWASDNGIKKVAIHIITDGRDTPAKSAYKYLNKIESCIKKFNTGEIASICGRYWIMDRNLLWTEQ

SEQ ID NO: 182558 - protein, 276 aa, Unknown
  Bacterial polypetide isolated from the Sargasso Sea
SAIEFINEVNPILSDKVQVGTVIGRYYAMDRDNRWERVELAYNAIVFGNSDQKTYNTELAIKKSYKSGVSDEFILPTVISQYSGIRRNDGFFCLNFRADRARQILSAIGDPNFSKLEIKNRPQLTNLVGMVEYSDNHNTFMSTCYPKPKIKNTLGEWVSLAKKKQFRLAETEKYPHVTFFLNGGNEKPLTGEARNMPHSPKVATYDLKPEMSSEAVTEALVGAIESNYDLIVTNYANPDMVGHTGNLDAAIQACEAVDKGIGRLVEALKKVNGTLF

SEQ ID NO: 182559 - protein, 210 aa, Unknown
  Bacterial polypetide isolated from the Sargasso Sea
MIENKKPLVLCVMDGWGVRARSDNNSIAMAKTPNFDFVTKNYPTTLLRADGVHVGLPYNQMGNSEVGHMTIGAGRVTMMTLPRINQSISDGSLKKSTELNNFIYDLKKSGGAAHLAGLVSDGGVHSQQNHIEYIANMIAESGVKVKIHCFLDGRDTPPKSGIEYFSRLQNNLSPGIEIVSLVGRYFAMDRDLRWERTAKAYRVIMKEKAR

SEQ ID NO: 182560 - protein, 195 aa, Unknown
  Bacterial polypetide isolated from the Sargasso Sea
LVRHGQSEWNKKNLFTGWKDPNLTKQGINEASEAGKQLNSLGINFDVMFTSDLIRAQETGRIILKEMNQESIAIVKSQKLNERSYGDLAGLNKDDAREKWGEDQVHIWRRSFDVPPPGGESLKNTAERVLPYFRSEILPKIQEGSNVLIAAHGNSLRALVMELEGISPDKIVGLEIATGDPLIYECLDHSINRVN

SEQ ID NO: 182561 - protein, 242 aa, Unknown
  Bacterial polypetide isolated from the Sargasso Sea
KEKSNNAIAMAHTPNWSDFLSRYPHHLIQTSGEFVGLPKGQMGNSEVGHMTIGAGRVIYQDLPRINRAIENGEFQQNPVLLNLIDQSIKNKSALHLIGLLSDGGVHSHENQIHAAIQLCKDKKVDDLRIHAILDGRDTPPKSAERNLSKLAELLDETGVGQISTVSGRFFAMDRDQRWDRVELAFKAMALGESTFHASSAKEALMKAYDRGESDEFVSPTVIRQKEAIEQNIKPSDSILFMN

SEQ ID NO: 182562 - protein, 148 aa, Unknown
  Bacterial polypetide isolated from the Sargasso Sea
MESNKKLILLILDGWGISSNKDKSAIDQAKTPFYDSLINNYPNAQLLTHGESVGLPKGQMGNSEVGHMNIGAGRIVFQELAKINKEIETGNFRNNKKLNELVDNAISNQKNIHLIGLLSDGGVHSHVSHLYELIDLIESKNSNNTFVH

SEQ ID NO: 182563 - protein, 172 aa, Unknown
  Bacterial polypetide isolated from the Sargasso Sea
MPPVVLCILDGWGLSKEKNSNAPALAKTPNFDHLWSTCPKTTLLTHGLDVGLPHGQMGNSEVGHMNIGAGRIVSMDLGQIDLEIENKNFFNNEILLNQIKIIKNTRGRAHLMSLLSDGGVHGHLNHLLASIKLFQSHAIPITLHLVTDGRDVAPRSAMEFFEKITPHLSAQC

SEQ ID NO: 182564 - protein, 172 aa, Unknown
  Bacterial polypetide isolated from the Sargasso Sea
QRVSTYDQAPEMSAEELTISCTSAIKSGKYSFIVINFANPDMVGHTGNMNATIKAIETVDRCIGKIVNATGKMGGSLLITADHGNAEVMRGPSGEPWTAHTINKVPLIFIEGEKRKIPNMGNEIYLRDNAGLADIAPTLLQLLNLPIPKEMTGKSLIKEIELKGYNKVVQHV

SEQ ID NO: 182565 - protein, 276 aa, Unknown
  Bacterial polypetide isolated from the Sargasso Sea
MAITNSYESDVSDEFIVPTVINQYSGIRKNDGFFCLNFRADRARQILSAIGDPNFLKLKIKNRPKLTNLLGMVEYSDIHNTFMSTCYPKLRIKNTLGEWVSLAKKKQFRLAETEKYPHVTFFLNGGDEKPLAGEVRNMPHSPKVATYDLKPEMSSEAVTTALVDAIESNYDLIVANYANPDMVGHTGNLNAAIEACESVDKGIGQLVEALKKVDGTLLLTADHGNCEVMTDPFTGNPHTSHTLNPVPAILFNGPKNKSLSNGGRLSDIAPTNIRTY

SEQ ID NO: 182566 - protein, 204 aa, Unknown
  Bacterial polypetide isolated from the Sargasso Sea
MSKLILTRHGQSVWNAENRFTGWVDVDLSEKGVKEAEKSGELLKKLNIQIDISYTSFLKRAIKTLTTILKKNNLKLKFNTAWQLNERHYGSLTGLNKDETKKKIGEDQFKKYRRSWDIPPPPMPEDSKYLSNFSPLNGSIPFGMTPFTESLKNTYERVIPFYESEIKKNLSEGKNILISAHGNSLRALCKFLFKISDNKINELE

SEQ ID NO: 182567 - protein, 192 aa, Unknown
  Bacterial polypetide isolated from the Sargasso Sea
MNSKYLVLVRHGQSEWNAKNLFTGWKDPGLTDKGSHEAKRTGMQLAELNLKFDVMYTSALKRAQLTGKIILDVLGQSDLEIIENEALNERDYGELTGSNKDEAKENFGTEQVQIWRRSYEIPPPGGESLRDTYNRVIPYFKKEVLPLMDNKNVLMSAHGNSLRALVKYLDNISEEDIVKLEISTGEPIFYKF

SEQ ID NO: 182568 - protein, 238 aa, Unknown
  Bacterial polypetide isolated from the Sargasso Sea
MSHLILVRHGQSEWNFQKRFTGWVDIDLTAQGKLEAVKAGELIKEKRVKINFFYSSLQKRAVNTLKLILNTLRIKDEKIIKAWELNERHYGALTGLNKDEMKKIYGDKKILEFRRSWSVSPEPLNRNNPYHPMNIEIYNDIPRDKIPDTESLKNTYDRVVNYFENNVLPMLKKDNNILISAHGNSLRGLCKFLFKIDDVKISKLEIPTGNPLMINFNEKNEILDASYLDKSRAKDLVV

SEQ ID NO: 182569 - protein, 247 aa, Unknown
  Bacterial polypetide isolated from the Sargasso Sea
MAGKLVLCRHGQSEWNLENKFTGWEDVGLTPLGEEEALEAGRQLKAIDINFDIAFTSLLKRANKTLFSILEQMDLTWIPITHAWELNERHYGALQGKNKAEVAKEFGDEQVHIWRRSYDIPPPSIDNEDPSHPRFDSKYDGIDELPSGESLKDTLSRVKPYWENQILPELLGNKNVLVVAHGNSLRSMIKIIEKIDDESIVGLNLPTGIPIVYEFNENLEPVSKDFLADSKSLQAAQDAVANQGKSK

SEQ ID NO: 182570 - protein, 224 aa, Unknown
  Bacterial polypetide isolated from the Sargasso Sea
AENRFTGWVDVDLSKKGIEEAEKSGELIKKLNIKIDISYTSFLKRAIKTLTTMLKKNNLELKFNTAWQLNERHYGSLTGLNKDETKKKIGEEQFKKYRRSWDIPPPPMQEDSKYLSNFSPLNGSIPIGMTPFTESLKNTYERVMPFYENEIKKNLSEGKNILISAHGNSLRALCKFLFKISDDKINELEIPTGNPLVIEFEKNLKIKKYFYLDETRSKNIIFNQ

SEQ ID NO: 182571 - protein, 201 aa, Unknown
  Bacterial polypetide isolated from the Sargasso Sea
VHCFLDGRDTPPRAGKASLNYFLKEIKNLNDCKISSMSGRYWAMDRDSNWDRVAPVYDAIVSAKGKIEDNLIDSVSSYYKEKITDEFITPTISRGYSGMEDGDGLFMANFRADRARQILTALVGKTFTGFIRSKICNFSSCLGMVEYSSELNKYFEAIFPAPELKANLGQVISEAEGSQLRIAETEKYAHVTYFFSGGREE

SEQ ID NO: 182572 - protein, 202 aa, Unknown
  Bacterial polypetide isolated from the Sargasso Sea
MKSSYLVLVRHGQSEWNEKNLFTGWKDPKLTPRGVDEAIKAGKELKEAGYSFDKMFTSDLFRAQDTGRIILEQMNLASIEVIKDISLNERNYGDLAGLNKDEARKEWGEDQVHIWRRSFDIPPPGGESLRDTADRVLPYFRENIIPELIQGLNILVAAHGNSLRALVMELEEISSEEIVELEISTGVPLIYKFEENNIERLD

SEQ ID NO: 182573 - protein, 293 aa, Unknown
  Bacterial polypetide isolated from the Sargasso Sea
FLSIKDENISLASLIGRFYAMDRDNRWERVEKAYGAIVNADGEKLNDFTMGIKNQYELGITDEFVEPLIKDTFNGINNGDSLFFANFRADRARELLSAIVDPAFTSFPRTSLPNFSAKAGLVSYSDHLDSFLDTVFPKENLNQTLGETIAKQDITQLRIAETEKYPHVTFFLNGGQEVQFSGEERILVPSPKVLTYDTQPEMSAKIVTQELTNAIARNEFGFIVVNYANPDMVGHTGNIKAAIKAVETVDQCVGKVVESVLDYDGTMLLTADHGNCEVMFDEERGIPHTAHTT

SEQ ID NO: 182574 - protein, 247 aa, Unknown; identical to SEQ ID NO: 182569
  Bacterial polypetide isolated from the Sargasso Sea

SEQ ID NO: 182575 - protein, 151 aa, Unknown
  Bacterial polypetide isolated from the Sargasso Sea
RTAAEYGEEQVHIWRRSYTVPPPKLDSDDERHPRFDDKYSSIQSDILPDGECLKDTVDRFMPYWLDSIKPDIESGKNVLIVAHGNSLRALVKYLDKVSDDDIVELNIPTGVPLVYELDDAMNPVKSYYLGDQEEISKRTAEVAAQGKNRSI

SEQ ID NO: 182576 - protein, 239 aa, Unknown
  Bacterial polypetide isolated from the Sargasso Sea
MSKLILTRHGQSTWNAENRFTGWVDVDLSEKGKEEAKKSGELISELNIKIDISYTSYLKRAIETLTIILKTLNLSMKFNTAWELNERHYGSLTGLNKEETKKKIGEEQFKKYRRSWDIAPPLMAKASNYLENFSPLNDGIPKNKIPFTESLKHTYERVVPFYNFEIKKNLENGKNILISAHGNSLRALCKYLFKISDIKINELEIPTGNPLIIDFDNQLKIQKYYYLDKSRSKNIIFNQ

SEQ ID NO: 182577 - protein, 305 aa, Unknown
  Bacterial polypetide isolated from the Sargasso Sea
GQIDLEIENGSFYKNNAILKFVQSVKSSQGIAHVIGLLSDGGVHGHIDHLLASLEIFSKERVGVALHLITDGRDVAPVSALKYADKLLIEMPSNVVISTVTGRYYALDRDNRWERISQAYNAIIKSESEVVCQNIHEAINSAYKSNLTDEFIPATIINGYQGVKDGDGIFCLNFRSDRAREILSAIGDPSFESFSIGNRPKLSSLLGMVEYSKQHNKFMETCYPKEIIKNTLGEWVAKNGRTQFRVAETEKYPHVTFFLNGGTELPFEGETRDMPPSPKVATYDLQPEMSAEKVTDSLVNAIGAN

SEQ ID NO: 182578 - protein, 201 aa, Unknown
  Bacterial polypetide isolated from the Sargasso Sea
MKSKLVLVRHGQSEWNAKNLFTGWKDPELTDLGIQEAIKAGDLLENRNLKFDLMFTSDLFRAQETGRLILEQMNQTDTQVIKNQSLNERNYGDLAGLNKDEAREKWGEEQVHIWRRSFDVPPPGGESLKNTAERVLPYFELEIMPKVKEGLNILVAAHGNSLRALVMELEKISSEEIVKLEIATGDPLTYEYSNGEFVRID

SEQ ID NO: 182579 - protein, 284 aa, Unknown
  Bacterial polypetide isolated from the Sargasso Sea
ELSNILIDNGLVIRLHAFLDGRDTPPSSSKLFLREVIDKIENKTKFSVATISGRYFPMDRDNNWERIEKSYLAISESRGYTSADCFEAIDKNYKEGITDEFIEPTCIEGYKGVCDGDGLLVCNFRADRIRQILSAFLDPDFTEFSRPKFGKLSASCGLVEYSDKLSKLMTNIFSRTELNNILGEVISNNSIPQLRIAETEKYAHVTFFFNGGREELFLHEDRILIPSPKVPTYDMKPEMSAKELTNKLLESIAGGKYGLIVANYANGDMVGHTGVFAAGIKAAE

SEQ ID NO: 182580 - protein, 205 aa, Unknown
  Bacterial polypetide isolated from the Sargasso Sea
PSNYIPNTLGGSFCNNGLLQLRLAETEKYAHVTFFFNGGREKPFKFEERILIPSPKVATYDQQPEMSADEVTNNLLEAIRNNRNDLIIVNYANPDMVGHTGNLNAAISAVEFIDKCLKKIINEVKATNSILIITADHGNVECMQDESNQQPHTAHTTEDVPIIIINEKKIKSLSNGRLCDVSPTILDIIGIDKPSIMTGKSLINK

SEQ ID NO: 182581 - protein, 219 aa, Unknown
  Bacterial polypetide isolated from the Sargasso Sea
MSKLILTRHGQSVWNAENRFTGWVDVDLSEKGIAEAQKSGQLIKSLNINIDVSYTSFLKRAIKTLTTILQENGLELKFNTSWEINERHYGSLTGLNKEETKNKIGEEQFKKYRRSWDIPPPPMAENDKNQSLFSPLNASIPLGMIPFTESLKDTYNRVIPYYEKEIQKHIKENKNVLVSAHGNSLRALCKYLFKISDQKINELEIPTGNPLIIEFNNNL

SEQ ID NO: 182582 - protein, 306 aa, Unknown
  Bacterial polypetide isolated from the Sargasso Sea
AIHLMGLVSYGGVHSSLYHLLSLCTFLIENFKGKVYIQGFSDGRDSSPNSGISAFDKLYQHIEGSNISISSIIGRYYAMDRDQRWDRIQKAYDLLINGKGVLKENFKIAFEESYEKEVSDEFMKPVKIKNFDGNIKNNDVVICFNFRTDRCRQITTALTQKDFPDYNMKSKSLSYFTMTNYDRSFKNIEVIYDKENLSMTLGEILSINNKTQLRIAETEKYPHVTYFFSGGREEEFIGESRIVVNSPKVATYDLKPEMSAKDLTREAISFLEKNNPDFICLNFANPDMVGHTGIPEAIIKACETVD

SEQ ID NO: 182583 - protein, 270 aa, Unknown
  Bacterial polypetide isolated from the Sargasso Sea
TDIKGEKIHNFNNDDIVISFNYRSDRGRQLTSAMCEKDLTDFGMKSVTKNFYTLTNYDDTFKVVKPIFKKNILKNTLGEILSKNEILQLRIAETEKYPHVTYFFNGGIEESFLGEERILCPSPKVATYDLKPEMSAKEVTQNVITEIKKNKFGFICLNFANPDMVGHTGNLKAAVEACESVDKSLGKIVEVANLNDYVTIIIADHGNCEIMINSDGTENTSHTVNPVPIIIVNSNSNKINNGILADIAPTVLNIMGIQKPDEMTGKSLIN

SEQ ID NO: 182584 - protein, 269 aa, Unknown
  Bacterial polypetide isolated from the Sargasso Sea
MTDKAERPVRPVVLCILDGWGHREDEADNAITPSNTPNFQRLIKACPHSLIDTSGLDVGLPAGQMGNSEVGHMNLGAGRIVNQDIRRVDAAIEEGSLASNPRLTAYIDALKATGGTCHLLGLLSPGGVHSHQDHLATLVEILANEGVPVAIHAFLDGRDTPPSSAAGFMETFENQISGFNDVDVATVCGRFYAMDRDQRWDRVEKAYDLIVSGTGNDAPDAVNAIRAAYYADITDEFVEPASIAGYAGVQNGDGILMGNFRADRAREIL

SEQ ID NO: 182585 - protein, 255 aa, Unknown
  Bacterial polypetide isolated from the Sargasso Sea
PNDYIEKSYAKKITDEFIEPIRISENYLKDGDSLICFNFRPDRARQIVKSLSVKEFTDFERKKYPNLDFVTFTQYDPNFPVKVAFPPESLNNFIGQIVSENGLKQYRTAETEKYPHVTYFFNGGVEIPLPGEERHLIPSPRVATYDMEPEMSAEELTISCSKAIKSGNYAFVVINFANPDMVGHTGNMDATIKAIEKVDKCVGQIVNATGEMGGSIVITADHGNAEVMKGSEGEPWTAHTINKVPLILIEGEKRK

SEQ ID NO: 182586 - protein, 258 aa, Unknown
  Bacterial polypetide isolated from the Sargasso Sea
KNFLEFERKFFPKLDLITFTQYDTNFPVKIAFPPESLNNFIGQIVSENGLKQYRTAETEKYPHVTYFFNGGEEIPLPGEERHLIPSPRVATYDIKPEMSAEELANSCSNAIKSGDYAFVVINFANPDMVGHTGNMNATIKAIETVDKCVGQIVNATGEMGGSILITADHGNAEVMKGPSGEPWTAHTINKVPLIFIEGEKRKIPNMGNEIYLRDNAGLADIAPTLLQLLNLPIPKEMTGKSLIKEVELKEYNKVVQHA

SEQ ID NO: 182587 - protein, 286 aa, Unknown
  Bacterial polypetide isolated from the Sargasso Sea
FSPKDYIEKSYAKNITDEFIEPIRMSENYLKDGDSLICFNFRPDRARQIVKSLSENEFSDFERKNYPNLDFVTFTQYDPNFPVKVAFPPESLNNFIGQIVSENGLKQYRTAETEKYPHVTYFFNGGVEIPLLGEERHLIPSPRVATYDMKPEMSAEELTISCSKAIKSGNYAFVVINFANPDMVGHTGNMDATIKAIEKVDKCIGQIVNATGEMGGSIVITADHGNAEVMKGSEGEPWTAHTINKVPLILIEGEKRKIPNMGNEINLRENAGLADIAPTLLQLLNL

SEQ ID NO: 182588 - protein, 277 aa, Unknown
  Bacterial polypetide isolated from the Sargasso Sea
KEMAASLKKNNSTLHITGLCSDGGVHSHIDHLLGLIKWASDNKLKKVAIHIITDGRDTPAKSASKYLNQIEACIKKYNVGEIASICGRYWIMDRNLLWDRTKKAYSNLTDPDIQITNISPKDYIEKSYDKNITDEFIEPIRMSENYLKDGDSLICFNFRPDRARQIVKSLSVNEFSDFERKNYPNLDFVTFTQYDPNFPVKVAFPPESLNNFIGQIVSENGLKQYRTAETEKYPHVTYFFNGGIEIPLPGEERHLIPSPRVATYDMEPRNVCGGINH

SEQ ID NO: 182589 - protein, 136 aa, Unknown
  Bacterial polypetide isolated from the Sargasso Sea
MNKKVILMILDGWGKSPDPKVSAIDNANTPFIDSLYTKFPNAQLRTDGLHVGLPEGQMGNSEVGHMNLGAGRIVYQDLAKINLAVENNTLAKEQVLIDAFNYAKAEGKNVHFLGLVSDGGVHSHINHIKGLITAAK

SEQ ID NO: 182590 - protein, 188 aa, Unknown
  Bacterial polypetide isolated from the Sargasso Sea
MNNTSLILVRHGQSEWNEKNLFTGWENPGLTKKGIDEAKHAGILINDLDIEFDHLFTSVLDRAKLTGAIILENINQKDLDSIENKALNERFYGDLQGLNKDECRQKWGAEQVQIWRRSYDVGPPGGESLKETGERVLPYYLNEIYPLILQGKNVLVAAHGNSLRSLIMHLDKLSSDEIVKLEIPTGAP

SEQ ID NO: 182591 - protein, 219 aa, Unknown
  Bacterial polypetide isolated from the Sargasso Sea
MSKLILVRHGQSVWNAENRFTGWVDVDLSEKGILEAQKSGQLIKNLNINIDVSYTSFLKRAIKTLTTMLKENNLELKFNTSYFLNERHYGILTGLNKDETKKKIGEEQFKKYRRSWDIPPPPMAENDKNHSLFSPLNSSIPMGMIPFTESLKDTYKRVIPYYEKEIQKNIKENKNVLISAHGNSLRALCKYLLKISDQKINELEIPTGNPLIIEFDNNL

SEQ ID NO: 182592 - protein, 237 aa, Unknown
  Bacterial polypetide isolated from the Sargasso Sea
MGKLIAIRHGQSIWNAENRFTGWVDVDLSEKGVLEAEKSGKLLKDLNLNYDICFTSCLKRAIKTLEIVLKIVGKESKYTKAWELNERHYGAFTGLDKFKTKEKLGEEKFNQYRRSWDNPPPVLDKESKYSSHNDSLYKGLKSVPNTESLKNTYDRVIPYFQKNIQEHLKQNKNIIISAHGNSLRALCKYLFNISDKKINELEIPTGNPLIIFFDKSLKAEKYYYLDKEREKKIIFNQ

SEQ ID NO: 182593 - protein, 340 aa, Unknown
  Bacterial polypetide isolated from the Sargasso Sea
ETSSNINTVKENKLMPNPALNQFSQSLKKGGGTLHIMGLASDGGVHSHIKHLCGLIEWAASKGLKNVSLHLFTDGRDTSAKSATKYINTIEAKIKSTGVGEISSLCGRYWAMDRDNRWERTSKAYELLTDPRFAISKLSAAESINKSYQEGITDEFIEPVRLSSSFLKDGDGVVFFNFRPDRARQLVKALKLKDFDGFERKNKTDIDVLTFTQYESGLPVSVAFPPEPLNDLLGQVISDHGLNQYRTAETEKYPHVTYFLNGGIEKPLKGEVRHLVPSPRVATYDLQPEMSADELTESCIQAIDTGIYSLVVINFANPDMVGHSGIMKAAIKANEKVDSC

SEQ ID NO: 182594 - protein, 285 aa, Unknown
  Bacterial polypetide isolated from the Sargasso Sea
TLAQGEFQADTAVAGLQAAYARDENDEFVKATVIRAAGQADAAMEDGDALIFMNFRADRAREITRAFVNADFDGFARKKEVKLDFVMLTEYAADIKVACAYPPASLANTFGEWMAKNDKTQLRISETEKYAHVTFFFNGGVEEPFKGEERILINSPKVATYDLQPEMSSAELTEKLVAAIKGGQYDTIICNYPNGDMVGHTGVMEAAIKAVETLDNCIDQVAKAVESVGGQLLITADHGNAEQMRDPATGQAHTAHTNLPVPLIYVGNKTVKVAEGGKLSDIAPT

SEQ ID NO: 182595 - protein, 238 aa, Unknown
  Bacterial polypetide isolated from the Sargasso Sea
GESKWNLENRFTGWKDVSLTNNGKNEAAFSGHQILEKNIKINSVYTSLLKRAIETTNIVTEIIKFPKKNVQFDWRLNERHYGALQGLNKSETAAKYGEDKVKIWRRSYDIPPPFLDDNDKRHPKFNKKFKDIRAELPVGESLKQVINRLKPFLDNYLESIKKTNGNHLIVAHSNSLRAIIKILDNLNEREIVSVNIPTGVPLIYSFGPNFNVHSKEYLINEKELQKKQEMIKNQGKVN

SEQ ID NO: 182596 - protein, 96 aa, Unknown
  Bacterial polypetide isolated from the Sargasso Sea
MSKLILTRHGQSEWNAENRFTGWVDVDLSEKGVLEAKKSGQLIKSLNINIDVSYTSFLKRAIKTLTTILKENGLELKFNTSWELNERHYGSLTGLN

SEQ ID NO: 182597 - protein, 250 aa, Unknown
  Bacterial polypetide isolated from the Sargasso Sea
MKKLVLMRHGESQWNLENRFTGWTDVDLTEKGEAEAKNCGLLFREAGFQFDIVHTSLLKRANRTMEICLYEMGLSGISIKYNWRLNERHYGALQGLNKAETAAEYGEEQVHIWRRSYTVPPPKLDSDDERHPRFDDKYSSIQSDILPDSECLKDTVDRFMPYWLDSIKPDIESGKNVLIVAHGNSLRALVKYLDKVSDDDIVELNIPTGVPLVYELDDEMNPVKSYYLGDQEEISKRTAEVAAQGKNRSI

SEQ ID NO: 182598 - protein, 206 aa, Unknown
  Bacterial polypetide isolated from the Sargasso Sea
MKHLILIRHGQSEWNQQKRFTGWVDIGLTDKGRAEAKKAGELIKEKKIKLDSFYSSYQKRANDTLKIVMKELNEDENLITKKWQLNERHYGELTGLNKEDMKKKYGEEKIHQFRRSWDVKPGALDRKSPYHPLNIETYKDIPVSDIPDTESLKDTHKRVVDCYNELILKDLQNGKGVCISAHGNSLRALCKFLFKINDREISKMEI

SEQ ID NO: 182599 - protein, 305 aa, Unknown
  Bacterial polypetide isolated from the Sargasso Sea
SAEAAIRAAYDADTTDEFVLPTVIGDYAGMKDGDGLLMTNFRADRAREILAAICGPDFDGFDRGTPIRFAVQAGMVEYSSDHAKYMDAIYPPQVLPNIFGEVVSRAGMKQLRIAETEKYPHVSFFFNGGEEQVFEGEDRILVPSPKVATYDLQPEMSAPEVTEKLVAAIRAETYDAIILNFANPDMVGHSGILSAAMKAAEAVDTCLGQVVEAVKSVGGVMFVTADHGNCEMMVDPETGEPHTAHTLNLVPTILVNGPEGATLENGRLADVAPTLLQLLGLPQPAEMTGKPLIKVLKGNDALLAK

SEQ ID NO: 182600 - protein, 235 aa, Unknown
  Bacterial polypetide isolated from the Sargasso Sea
TSLCGRYWAMDRDNRWERVEKAYRLLTEASPISSASPQDVVKAAHANGKSDEFLEPVRFAPELIEANDALVLFNFRPDRMRQLTAAFVSSSFQGFERQLITPLPVVTFTQYDKTLPVAVAFPPESLDDLLGEVVARAGLSQFRTAETEKYPHVTYFLNGGMEKPFPGEDRHLVPSPKVATYDQSPHMSADELTDGCVSAIKKGIYSLVVINYANPDMVGHTGDMDATIEAIGCVD

SEQ ID NO: 182601 - protein, 218 aa, Unknown
  Bacterial polypetide isolated from the Sargasso Sea
MSHLILIRHGQSEWNLEKRFTGWVDVDLAANGKLEACKSGELLKEKNIKIDHSFSSLQIRAINTLKLVHNTMRIKETFTKAWQLNERHYGALTGLNKDEMKKKFGEKKVHQFRRSWNIKPEPLSKNNPYHPINIETYKDIPKANLPDTESLEDTYNRVLPYYKKNIQSKIFEGKNILIVAHGNSIRAMCKYLFKLDEKKISLLEIPTGNPLIINFDSK

SEQ ID NO: 182602 - protein, 149 aa, Unknown
  Bacterial polypetide isolated from the Sargasso Sea
ETAEKHGDEQVLIWRRSYDVRPPELDYDDKRHPRFDKLYSKMPADLLPNSECLKDTVERFMPYWFDVIKPDIEQGEKVLIVAHGNSLRALVKYLDQISDEDILKLNIPTGVPLVYELDEDLKPIKSYFLGDQEEISKKADAVAAQGRKD

SEQ ID NO: 182603 - protein, 117 aa, Unknown
  Bacterial polypetide isolated from the Sargasso Sea
MKKLVLLRHGESQWNLENRFTGWTNVDLTQKGEEEAKKAGELLNQEAIEFDVVHTSLLKRANRTMEICIDEMGISKVSKKFDWRLNERHYGALQGLNKAETAEKHGDEQVLIWRRKL

SEQ ID NO: 182604 - protein, 118 aa, Unknown
  Bacterial polypetide isolated from the Sargasso Sea
VDRCIGRLLDAVGRRGGTMLITADHGNAELMQGPDGQAWTAHTTNPVPCILVEGEQRKLPGHGNDISLREDGGLADIAPTLLQILNLEQPAAMTGRSLIEPVSNVDPSPLSARLPLPV

SEQ ID NO: 182605 - protein, 248 aa, Unknown
  Bacterial polypetide isolated from the Sargasso Sea
MKLVLLRHGQSEWNLENKFTGWTDVDLTEKGEAEAKNAGRLIKNEKIKIDLVFTSVLKRAVNTMNICLSNLDDNNPEIVQDWRLNERHYGSLQGLNKSETAEKYGEDQVLIWRRSYDIKPPELDRDDDRHPRFDKKYAELSSEILPSSECLKDTVERFLPYWEKTISPEINSGKCIMIVAHGNSLRALVKHLDRVSDKDIIGINIPTGVPLIYELDRDLIPIKNYYLGDQEKILEKIKSVEKQGESKK

SEQ ID NO: 182606 - protein, 287 aa, Unknown
  Bacterial polypetide isolated from the Sargasso Sea
GRYFAMDRDKRWDRVQAAYDLLTQGKALFTATTAVDALKAAYSRDENDEFVKATAIKNAAGDVIKMQDGDSLIFMNFRADRARQFSRAFIDADFAGFAREYQPQLASFVMLTEYAADIKAPCAYPPESLDNVLGEWLAKHQKTQLRISETEKYAHVTFFFSGGREDVFNGEQRILVPSPNVATYDLQPEMNSTELTNKLVGAIHSGEFDVIICNYPNGDMVGHTGILSAAIKAVEAVDHCIGRVVEALQQVGGECLITADHGNAEQMMDPESGQAHTAHTSDPVPLI

SEQ ID NO: 182607 - protein, 204 aa, Unknown
  Bacterial polypetide isolated from the Sargasso Sea
METNYLVLVRHGQSAWNQKNLFTGWKDPELTELGKEEAFKAGQHIKKQNIKFNLLFTSALKRAQDTASIILEVIEESNINIFKNEALNERDYGDLTGLNKDMARQEFGEEQVQIWRRSYSDGPPNGESLEDTYNRVIPYFKNEIMPALQKNKNVIISAHGNSLRALVKFIEEISKEEIVKLEIATGEPIFYEFNEKKLQRKLNW

SEQ ID NO: 182608 - protein, 312 aa, Unknown
  Bacterial polypetide isolated from the Sargasso Sea
SDGGVHSHIDHYLGLIKWASDNGIKKVAIHIITDGRDTPAKSASKYLNQIESCIKKYNTGEIASICGRYWIMDRNLLWDRTEKAYDNLTNKDIKITNISPQDYIQKSYDKNITDEFIEPIRLSDNYLKDGDSMICFNFRPDRARQIIKSLTDKEFSDFERKIFPDLELVTFTQYDANFPVKVAFPPESLNNFIGQIVSENGLKQYRTAETEKYPHVTYFFNGGVEIPLPGEERHLVPSPRVATYDMEPEMSAEELTNSCAKAIKSGNYAFVVINFANPDMVGHTGNMDATIKAIETVDKCIGQIVNATGEMG

SEQ ID NO: 182609 - protein, 264 aa, Unknown
  Bacterial polypetide isolated from the Sargasso Sea
CKGLIEKGDYVIFFNFRTDRGRQLTKVLTQFDFEEFKMNKLDLNLLTMTNYDKNFVGVKSVYNSDYILDTLGETLEKNNKKQLRIAETEKYPHVTFFFNGGKEQPFKNEKRILCPSPKVATYDMKPEMSAFEIRDKTIKELNSKIYDFICLNFANPDMVGHTGNIKAAVKACETVDECCKDIINTALQNNYSIVVISDHGNCDVMKNQDGTPNTAHTKNLVPIIVIDDDVKSVENGILGDIAPTILDLMLIEKPKLMTQKSLIK

SEQ ID NO: 182610 - protein, 273 aa, Unknown
  Bacterial polypetide isolated from the Sargasso Sea
MLCILDGWGARDDAVNNAIALAVTPNWDRYVREAPMAHLKSCALHVGLPEGQMGNSEVGHMNLGAGRIVMQDLPRINAAVADGSLAAHPTLSCHIDTLRETGGTCHLLGLLSPGGVHCHQDHMATLAAAVSSSGVPVCIHAFLDGRDTPPKAGHGFMSSFLSDIAALKDVRVATVSGRYYAMDRDNRWDRISQAYNVMVGADGAKAVDPLSAIDASYAGNLGDEFMLPTVIGDYVGMADGDGLLMANFRADRAREILAALADPEFDGFARDEV

SEQ ID NO: 182611 - protein, 156 aa, Unknown
  Bacterial polypetide isolated from the Sargasso Sea
MSKISSKNINRLNVPQSPVVLAILDGWGDREDMSDNAIKSASTPIMDSLWHAYPHTLISASGSDVGLPDGQMGNSEVGHLTIGSGRIIQQELVRISNIVKNNQLGLVNELKGLADLLKKKNSTLHITGLCSDGGVHSHIDHLLGLIKWASENGIKK

SEQ ID NO: 182612 - protein, 223 aa, Unknown
  Bacterial polypetide isolated from the Sargasso Sea
SLNNFIGQVVSENGLKQYRTAETEKYPHVTYFFNGGVEIPLPGEERHLIPSPRVATYDMEPEMSAEELTISCSKAIKSGNYAFVVINFANPDMVGHTGNMDATIKAIEKVDKCVGQIVNATGEMGGSIVITADHGNAELMKGSEGEPWTAHTINKVPLILIEGEKRKIPNMGNEINLRENAGLADIAPTLLQLLKLPIPREMTGKSLIQEIELKGYNKVVQHV

SEQ ID NO: 182613 - protein, 225 aa, Unknown
  Bacterial polypetide isolated from the Sargasso Sea
GRRNRFTGWVDVDLSEKGIIEAENSGDLIKKLNIKIDISYTSFLKRAIKTLTTILKKNNLDLKFNTAWQLNERHYGSLTGLNKDETKKKIGEEQFKRYRRSWDISPPPISEDSKYLINFSPLNGSIPAGMTPFTESLKNTYDRVVPYYNNEIKKNLSKDKNILISAHGNSLRALCKFLFKISDEKINELEIPTGNPLVIEFENNLEVKKYFYLDKKRAKNIIFNQ

SEQ ID NO: 182614 - protein, 226 aa, Unknown
  Bacterial polypetide isolated from the Sargasso Sea
MSHLILVRHGQSEWNLENRFTGWVDVDLAAKGKLEACKAGELIKDLKLNIDFFYSSYQLRAINTLNLILNTIRKKDVNVIKAWQLNERHYGSLTGLNKDEMKKKLGEDKVHEFRRSWDIAPEPMNKNNPYHPINIDAYKNIPKDKIPDTESLKNTYERVLPYFKQEILKKLEDDKNILISAHGNSIRAICKFLFKLNEKEIPKLEIPTGNPLLIEVINGKIKKCFY

SEQ ID NO: 182615 - protein, 230 aa, Unknown
  Bacterial polypetide isolated from the Sargasso Sea
MSKLILTRHGQSTWNAENRFTGWVDVDLSEKGKEEAKKSGELIRELNIKINISYTSYLKRAIETLTIILKTLNLPMKFNTSWELNERHYGSLTGLNKEETRKKIGEEQFKKYRRSWDVAPPLLAKDSNYLENFSPLNSGIPKNKIPLTESLKNTYERVIPFYDMEINKNLKNGKNILISAHGNSLRALCKYLFKISDTKINELEIPTGNPLIIEFDNQLNIQKYFYLGCF

SEQ ID NO: 182616 - protein, 238 aa, Unknown
  Bacterial polypetide isolated from the Sargasso Sea
MSHLILVRHGQSEWNLQNRFTGWVDVDLAPNGKLEACKAGELIKKLELDINYFFTSYQKRAIETLNLILNTLRIKNDKVVKAWELNERHYGSLTGLNKNEMKKIYGEKKIHEFRRSWDNQPEALNKNSPYHPINIETYKDIPKDKIPDTESLKDTYERVIPFFEKNIKNKMNKNILISAHGNSIRALCKYLFEIDNNKISKLEIPTGNPLILKFSENKKLISGNYLDENRAKDLLIFN

SEQ ID NO: 182617 - protein, 256 aa, Unknown
  Bacterial polypetide isolated from the Sargasso Sea
FSDFERKNFPNLDFVTFTQYDPNFPVKVAFPPESLNNFIGQIVSENGLKQYRTAETEKYPHVTYFFNGGVEIPLPGEERHLIPSPRVATYDMEPEMSAEELTISCSKAIKSGNYAFIVINFANPDMVGHTGNMDATIKAIEKVDKCVGQIVNATGEMGGSMVITADHGNAEVMKGSEGEPWTAHTINKVPLILIEGEKRKIPNMGNEINLRENAGLADIAPTLLQLLNLPIPREMTGKSLIQEIELKGYNKVVQHV

SEQ ID NO: 182618 - protein, 164 aa, Unknown
  Bacterial polypetide isolated from the Sargasso Sea
MHKLVLLRHGESQWNLENRFTGWHDVNLTEQGEREGREAGRLLKAEGFAFDVAYTSVLTRAIRTLWLALTEMEQVWIPVHREWRLNERHYGALQGLNKAETAEKHGDEQVLVWRRSYDIPPPPMTKQDDGYAGKDRRYDNLDEENLPLTECLKDTVARFLPLWE

SEQ ID NO: 182619 - protein, 155 aa, Unknown
  Bacterial polypetide isolated from the Sargasso Sea
LVPSPNVATYDLQPEMNSTELTNKLVDAIHSGDFDVIICNYPNGDMVGHTGILSAAIKAVEAVDHCIGRVVEALQQVGGECLITADHGNAEQMMDPESGQAHTAHTSDPVPLIYVGRPATVTAGGILSDIAPTMLHLMGMPVPAEMTGKILMKTH

SEQ ID NO: 182620 - protein, 222 aa, Unknown
  Bacterial polypetide isolated from the Sargasso Sea
NLYYVTLTNYDETFTGINVVFNKENLTDTLGEILEKHNKTQIRIAETEKYPHVTFFFSGGRETPFEGEKRILKNSPKVATYDLKPEMSAYELTDALVPELENETTDFVCLNFANGDMVGHTGVMEAAIKACEAVDKCVEKVVTTALNHGYTTLLIADHGNCETMINPDGSPNTAHTTNPVPVILIDNELKHIENGILGDMAPTILKLMGVEQPEAMTQKPLV

SEQ ID NO: 182621 - protein, 274 aa, Unknown
  Bacterial polypetide isolated from the Sargasso Sea
KHKKNKTVHLLGLCSDGGVHSHSNHIIAMSKLLHENNIRTVIHIFSDGRDSSPKQLGQLIKKIESSLPDDIQIVTLIGRYYAMDRDNRWDRVKKSFDLIAYAKHKRKAANILIAIKEAYENNETDEFISPTLTADYRGIQEGDSLLMINFRADRVRELLTAFLDPNFKKFKKDAKTPKLLNCLGMSEYSKEISNYMSSIFIKEKIEDTLGEVIAKANLKQLRLAETEKYPHVTYFFNGGNETVNKGETRIMIPSPKVSTYDLKPRDVCKRSEKN

SEQ ID NO: 182622 - protein, 292 aa, Unknown
  Bacterial polypetide isolated from the Sargasso Sea
DVGLPDGQMGNSEVGHLTIGSGRIIQQELVRISNIVKNNQLGLVNELKEMAASLKKNNSTLHITGLCSDGGVHSHIDHLLGLIKWASDNKLKKVAIHIITDGRDTPAKSASKYLNQIESCIKKYNVGEIASICGRYWIMDRNLLWDRTEKAYSNLTDPDIQVTNFSPKDYIEKSYAKNITDEFIEPIRMSENYLKDGDSLICFNFRPDRARQIVKSLSDNEFSDFERKNYPNLDFVTFTQYDPNFPVKVAFPPESLNNFIGQIVSENGLKQYRTAETEKYPHVTYFFNGGVE

SEQ ID NO: 182623 - protein, 311 aa, Unknown
  Bacterial polypetide isolated from the Sargasso Sea
DRQMGNSEVGHVNLGAGRIVYQDLTRLDVEIKERTFFANPVLTDAVDQAKNAGKAVHIMGLLSAGGVHSHEDHIMAMVEMAAERGAEKIYLHAFLDGRDTPPRSAEHSLQKFEEKFAALGKGRVASIIGRYYAMDRDNRWDRVEQAYDLMTLAKGEFQFATAVEGLQAAYARDENDEFVKATVIRAEGQADAAMEDGDTLIFMNFRADRAREITRAFVNADFDGFARKKVVNLNFVMLTEYAADIKTAVAYPPASLANTFGEWMAKNEKTQLRISETEKYAHVTFFFNGGVEEPFKGEDRILINSPKSCDL

SEQ ID NO: 182624 - protein, 239 aa, Unknown
  Bacterial polypetide isolated from the Sargasso Sea
MSKLILTRHGQSIWNAENRFTGWVDVDLSEKGIEEAEKSGELIKKLNIKIDIFYTSFLKRAIKTLTTILKKNNLELKFNTAWQLNERHYGSLTGLNKDETKKKIGEEQFKKYRRSWDIPPPPMPEDSKYLSNFSPLNGSIPVGMTPFAESLKNTYERVIPFYENEIKKNLSEGKNILISAHGNSLRALCKFLFKISDTKINELEIPTGNPLVIEFEKNLKVKKYFYLDEARAKNIIFNQ

SEQ ID NO: 182625 - protein, 283 aa, Unknown
  Bacterial polypetide isolated from the Sargasso Sea
IEKSYAKNITDEFIEPIRMSENYLKDGDSLICFNFRPDRARQIVKSLSIKEFSDFDRKNFPNLDFVTFTQYDPNFPVKVAFPPESLNNFIGQIVSENGLKQYRTAETEKYPHVTYFFNGGVEIPLPGEERHLIPSPRVATYDMEPEMSAEELTISCSKAIKSGNYAFVVINFANPDMVGHTGNMDATIKAIEKVDKCVGQIVNATGEMGGSIVITADHGNAELMKGSEGEPWTAHTINKVPLILIEGEKRKIPNMGNEINLRENAGLADIAPTLLQLLNLPNT

SEQ ID NO: 182626 - protein, 238 aa, Unknown
  Bacterial polypetide isolated from the Sargasso Sea
MSHLILVRHGQSEWNLENRFTGWVDVDLAPKGKLEACKAGELIKELNININHTFTSFQKRAIDTLKLILNTMRIKDDNIIKAWELNERHYGSLTGLNKDDMKKKLGEDKVQIFRRSWDIPPEPLSKNNPYHPLNIEIYKDIPKEQIPDTESLKNTYERVIPYFKKNIKDKIKDNVIVSAHGNSIRSLCKFLFDIDDKSISKLEIPTGNPLVLKFDNNANVLEAKYLDQERAKNLIKFV

SEQ ID NO: 182627 - protein, 270 aa, Unknown
  Bacterial polypetide isolated from the Sargasso Sea
SDGRDTSPYGSLDYLKVINKGINDVGIGEIATLIGRYYAMDRDKRWDRTELAYRLFVNGEGENVNSIENAIRQSHNDGITDEFIKPFVIDGVNGMISSDDAILCFNYRADRMRQICSALGGKTFTDFNRGNTPFHLTSMTSYHEDYNFPILFQDKNIDMKLGQVIEKLGLRQLRVAETEKYAHVTYFLNGGDEDPYDAEERLLIPSPKVATYDLQPEMSAFGIRDAVLKAMDEEQSDAIVVNIANTDMVGHTGNLNATIRAAEVADEVLG

SEQ ID NO: 182628 - protein, 176 aa, Unknown
  Bacterial polypetide isolated from the Sargasso Sea
MSKISSKNIKRLSVPQSPVVLAILDGWGYRKEKSDNAIRSANTPIMDSLWHAYPHTLISASGSDVGLPDGQMGNSEVGHLTIGSGRIIQQELVRISNIVKNNQLGLVNELKDMADSLKKNNSTLHITGLCSDGGVHSHIDHLLGLIKWASENEIKKVAIHIITDGRDTPAKSASKY

SEQ ID NO: 182629 - protein, 219 aa, Unknown
  Bacterial polypetide isolated from the Sargasso Sea
YSTELDAFITPLYPPVDLADTLGAVVAAAGRSQLRLAETEKYPHVTFFFNGGNEARCKGEERTLVPSPNVATYDQLPQMSANGVLAKAVASLKSKAHDLLVINFANPDMVGHTGDLAAAITAVETVDSCIGELVAAIEAADGQMLLTADHGNCEMMWDSDAESPHTAHTTNLVPLILINGNDGTSLTDGRLADLAPSLLAIMGIDQPSSMTGKSLLTRK

SEQ ID NO: 182630 - protein, 171 aa, Unknown
  Bacterial polypetide isolated from the Sargasso Sea
MTSRKKPLVLLILDGWGYREEKDNNAIAQASTPVMDRLWRDYPHTLISGSGLDVGLPDGQMGNSEVGHVNLGSGRIVYQDFTRITKAIDDGDFFTNPVLVTAVDKAKQQHKAVHIMGLLSPGGVHSHEDHILAMIKLAEQQGASPIYLHAFLDGRDTPPSSAKNSLEKIQA

SEQ ID NO: 182631 - protein, 175 aa, Unknown
  Bacterial polypetide isolated from the Sargasso Sea
AGGPYDLSPAMSADQLTDSCIAAIDQGTYSLIVINYANPDMVGHTGVMDAATEAIATVDRCIGRLLDAVGRHGGTILITADHGNAELMQGPDGQAWTAHTTNPVPCILVEGEQRKLPGHCNDISLREDGGLADIAPTLLQILKLEQPAAMTGRSLIEPVSNVDPSPLSARLPLPV

SEQ ID NO: 182632 - protein, 256 aa, Unknown
  Bacterial polypetide isolated from the Sargasso Sea
ALVDDTFDVFSRPRTVAWSDAVGMVEYSDALNRFMRTIFPAKKINNVMGGVVAAAGLKQLRIAETEKYAHVTFFFNGGEERNFDGEDRILVESPKVETYDLQPEMSAAEVTDKLVAAIESEKYDFILVNYANTDMVGHTGILEAAITAVEAVDHCLGRLETAIKSVGGGLLVTADHGNAEIMLDPDIGGPHTAHTCNLVPLILVGDGLAGVSLEDGNLADVSPTVLALMGLDLPAEMTGRPLLRFTESTDTHAATG

SEQ ID NO: 182633 - protein, 312 aa, Unknown
  Bacterial polypetide isolated from the Sargasso Sea
MSANSVSRPVVLCVLDGWGWRLEQTENAIALAETPVFNRMIKECPNALLKTSGIDVGLPVGQMGNSEVGHMNLGAGRVVNQDIQRINQALKEGKLRYNPIVEKLISHRSTCHLMGLLSPGGVHSHQDQILELANILNEAGVKVSIHAFLDGRDTPPKSALQFLTDFCEKISQFDSVSIATVTGRFYAMDRDNRWNRVKKAYDAIVSGEGEKAKTPIDAIRKGYNDNLSDEFILPTIIDHYDGMMDGDTLLMANFRSDRAREILTALLEPDFIHFKRSKTVSISCATGLVQYSETLDHLMSSIFLPEQLDNLF

SEQ ID NO: 182634 - protein, 238 aa, Unknown
  Bacterial polypetide isolated from the Sargasso Sea
MKNKLILLRHGESIWNLENRFTGWTDVDLTENGINEAKNAGILLSSHNIKIDLVYVSFLKRAIKTYKICLKQLEIDNIDLLSHWRLNERHYGNLQGLNKQQTAKKFGDDLVLKWRRSYDTPPPPMSPDDRRHPRHDILYKDIDPKKLPNAESLRDTLERVKPLLINQIIPLFKKGQNIMIVAHGNSLRAIIKILKDISNKDIINLNIPTGFPYIFEFDNNLDVKKENFLGNQEKILKK

SEQ ID NO: 182635 - protein, 222 aa, Unknown
  Bacterial polypetide isolated from the Sargasso Sea
MPPVVLCILDGWGLSEDKISNAPVLAETPNFDHLWKTCPKTTLLTHGLDVGLPKGQMGNSEVGHMNIGAGRIISMDLGQINLEIENKNFLRNEALLNHIQDIKRNNGRAHLMGLFSNGGVHGHINHLITSIRLFQSHDIPIILHLITDGRDVAPQSAIEFVNEINPLINEKVQVGTVIGRYYAMDRDNRWERVELAYNAIVFGNSNQETSNMKWLLREHTRL

SEQ ID NO: 182636 - protein, 161 aa, Unknown
  Bacterial polypetide isolated from the Sargasso Sea
MSAEELTIICSKAIKSGKYAFVVINFANPDMVGHTGNMNATIKAIETVDKCVGQIVNATGEMGGSILITADHGNAEVMKGSAGEPWTAHTTNKVPLIFIEGEKRKIPNMGNEIYLRDNAGLADIAPTLLQLLNLPIPKEMTGKSLIKEIELKGYNKVVQHV

SEQ ID NO: 182637 - protein, 205 aa, Unknown
  Bacterial polypetide isolated from the Sargasso Sea
RTAETEKYPHVTYFFNGGVEIPLPGEERHLIPSPRVATYDMEPEMSAEELTRSCSKAIKSGNYAFIVINFANPDMVGHTGNMDATIKAIEKVDKCVGQIVNATGEMGGSILITADHGNAEVMKGPEGEPWTAHTINKVPLILIEGEKRKIPNMGNEINLRDNAGLADIAPTLLQLLNLPIPREMTGKSLIQEIELKGYNKVVQHV

SEQ ID NO: 182638 - protein, 272 aa, Unknown
  Bacterial polypetide isolated from the Sargasso Sea
MTIPYVLIVLDGWGHRDGGQDNAIAVAKTPTWDHVWQNRPHSLISASGFDVGLPDGQMGNSEVGHMNLGTGRVVDQDFTRINKSIEDGRFNNNETLLGLVSQLQRSRKSLHIFGLLSPGGVHSHELQIKAAIDLAFDHGVSKVYLHAFLDGRDVPPSSAKASLVAAEKWIRDRGTGGIATIMGRFYAMDRDQRWDRTEQAFNAVTEAHAVFNGTNALSALQAAYDRGETDEFVQPTTINVDGASVRMDSGDAVLFMNFRADRARQLTRSFVS

SEQ ID NO: 182639 - protein, 209 aa, Unknown
  Bacterial polypetide isolated from the Sargasso Sea
MSTCYPKPKIKNTLGEWVSMAKKKQFRLAETEKYPHVTFFLNGGYEKPLTGEARNMPHSPKVATYDLKPEMSSKAVTEALVDAIESNYDLIVTNYANPDMVGHTGNLSAAIQACEAVDKGIGRLVGALKKVDGTLFLTADHGNCEVMTDPFTGNPHTSHTLNPVPAILFNGPKNKSLSSGGRLSDIAPTILELMDLKPPPEMTGNSLLV

SEQ ID NO: 182640 - protein, 185 aa, Unknown
  Bacterial polypetide isolated from the Sargasso Sea
QFRLAETEKYPHVTFFLNGGDEKPRAGETRNMPHSPKVATYDLKPEMSSEAVTEALVDAIESNYDLIVANYANPDMVGHTGNLNAAIEACEAVDKGLGHLVGALKKVDGTLLLTADHGNCEVMTDPSTGNPHTSHTLNPVPAILFNGPKNKSLSDGGRLSDIAPTILELMNLRPPPEMTGNSLLL

SEQ ID NO: 182641 - protein, 190 aa, Unknown
  Bacterial polypetide isolated from the Sargasso Sea
SGLLLKGQNFRFDVVFTSVLKRAIKTMEICLSEIGAIDIPTIHDWRLNEQHYGALEGLSKTKTAEKYGEEQVFIWRRSYQVSPLAMDLNDKRHPRFDQRYQELGQHQLPSTESLKDTLHRLLPLWNESIEPSIKSGKKVLIVAHGNSLRALVKHLNGISDDEIKDLNIPTGAPYVFELDSQLKSQKNYYL

SEQ ID NO: 182642 - protein, 249 aa, Unknown
  Bacterial polypetide isolated from the Sargasso Sea
NYPNLDFVTFTQYDPNFPVKVAFPPESLNNFLGQIVSENGLKQYRTAETEKYPHVTYFFNGGVEIPLPGEERHLIPSPRVATYDMEPEMSAEELTISCSKAIKSGNYAFVVINFANPDMVGHTGNMGATVKAIEKVDKCLGQIVNATGEMGGSILITADHGNAEVMKGAEGEPWTAHTTNKVPLILIEGEKRKIPNMGNEINLRDNAGLADIAPTLLQLLNLPIPREMTGKSLIQEIELKGYNKVVQHV

SEQ ID NO: 182643 - protein, 105 aa, Unknown
  Bacterial polypetide isolated from the Sargasso Sea
MSKISSKNIKRLSVPQSPVVLAILDGWGYRKEKSHNAIKSASTPIMDSLWHAYPHTLISASGSDVGLPDGQMGNSEVGHLTIGSGRIIQQELVRISNVVKNKSIR

SEQ ID NO: 182644 - protein, 170 aa, Unknown
  Bacterial polypetide isolated from the Sargasso Sea
MSKTSSKNIKSLSVPESPVVLAILDGWGHREEELDNAIKTANTPVMDALWHAYPHTLISASGADVGLPNGQMGNSEVGHLTIGSGRIIQQELVRITNIVNNNKLNEVEELKKIAFSLRKNDSTLHLTGLCSDGGVHSHIDHLLGLIKWASEAGIEKVAIHVITDGRDTPA

SEQ ID NO: 182645 - protein, 203 aa, Unknown
  Bacterial polypetide isolated from the Sargasso Sea
MFKLVLLRHGESEWNLENRFSGWADIGLTEKGMSEAKRSGLLLKGQNFRFDVVFTSVLKRTIKTMEICLSEMGSVDIPTIHDWRLNEQQYGALEGLSKTKTAEKYGEEQVFIWRRSYQVSPPDLDLNDKRHPRFDQRYRELVQHQLPSTESLKDTLHRLLPLWNESIEPFIKSGKKVLIVAHGNSLRALVKHLNGISDDEIKD

SEQ ID NO: 182646 - protein, 222 aa, Unknown
  Bacterial polypetide isolated from the Sargasso Sea
MYKLILLRHGESQWNLENKFTGWTDVNLSKNGLAEAKNAGILLKDNNYLFDLAYTSCLKRANLTMDICLNEMNCSNIEAIYDWRLNERHYGALQGLNKSETAKKFGDEQVFIWRRSYDVPPPPLQLDDDRHPANDSKYNNISDLLPNSESLKDTYNRLFPLLTKKILGNVKSGRKILIVAHGNSLRAIIKYLDKISDDEIINLNIPTGQPLVYELDANLSPN

SEQ ID NO: 182647 - protein, 194 aa, Unknown
  Bacterial polypetide isolated from the Sargasso Sea
MFKLVLLRHGESEWNLENRFSGWADIGLTEKGRSEAKRSGFLLKEQYFRFDVVFTSVLKRAIKTMEICLSEMGPIEIPTIHDWRLNEKHYGALEGLRKTKTEEKYGEEQVFIWRRSYQISPPALDLNDKRHPRFDQRYQDLGQHQLPSTESLKDTFHRLLPLWNESIEPSIKSGKKVLIVAHGNSLRALVKHLN

SEQ ID NO: 182648 - protein, 230 aa, Unknown
  Bacterial polypetide isolated from the Sargasso Sea
KVAFPPESLDNFIGQIVSENGLKQYRTAETEKYPHVTYFFNGGVEIPLPGEERHLIPSPRVATYDMEPEMSAEELTSSCSKAIKSGNYAFIVINFANPDMVGHTGNMNATIKAIEKVDKCVGQIVNATGEMGGSILITADHGNAEVMKGPEGEPWTAHTINKVPLILIEGEKRKIPNMGNEINLRDNAGLADIAPTLLQLLNLPIPREMTGKSLIQEIELKGYNKVVQHV

SEQ ID NO: 182649 - protein, 239 aa, Unknown
  Bacterial polypetide isolated from the Sargasso Sea
MSHLFLVRHGQSEWNAENRFTGWVDVDLAPQGKLEAVKSGELIKLTKINLDFFYTSFQKRAIETLKLILNTLRIKDEKVIRAWQLNERHYGALTGLNKDKMKKTFGEKKILEFRRSWDISPEPLNRNNPYHPININVYNSIPRNEIPDTESLKNTYERVIPYFKKNILPSLKQKKNILISAHGNSLRSLCKFLFEIDDKNISKLEIPTGNPLIIEFNNDFKIKNVEYLDKTRMKDLIVF

SEQ ID NO: 182650 - protein, 282 aa, Unknown
  Bacterial polypetide isolated from the Sargasso Sea
KAPKPVVLCILDGWGDGPDTSTNAIARAETPNWDAMFASYPRARLDASEHHVGLPDGQMGNSEVGHMNLGAGRIVLQDLPRIDAAIDDGSLANHDGLIAFIDKLKSSGGTAHIAGLMSPGGVHSHQNQIAALARYLTASGVPIAVHAFLDGRDTPPTSAAEYLEAFNRASEGAPIATICGRYFAMDRDNRWDRVERAYRLLVDADGARADDPVEAIRGAYKADVTDEFVEPTVIGGFAGMRDGDGLLMANFRADRVREILSVLLVSDFDDFDRGEGVKFAGT

SEQ ID NO: 182651 - protein, 251 aa, Unknown
  Bacterial polypetide isolated from the Sargasso Sea
MTDFEAPKPVVLCILDGWGDGPDTSTNAIARAETPNWDAMLASNPSARLYASEYHVGLPDGQMGNSEVGHMNLGAGRIVLQDLPRIDAAINNGSLAHHDGLISFIDKLKSSGGTAHIAGLMSSGGVHSHQDQITALARYLTASGVPIAVHAFLDGRDTPPTSAAEYLEAFIAASESAPIATICGRYFAMDRDKRWDRVERAYRLLVDADGARADNPVEAIRAAYEAAITDEFVEPTVIGEYAGMRDGDGLL

SEQ ID NO: 182652 - protein, 239 aa, Unknown
  Bacterial polypetide isolated from the Sargasso Sea
MTKLILIRHGQSIWNAENRFTGWVDVDLSDKGVLEAEKSGQIIEDLNIKIDISYTSYLKRAIKTLTTILKKNNLELKFNTAWQLNERHYGSLTGLNKEETKNKIGEEQFKKYRRSWDIAPPPMEEKSEYQNLFSPLNASIPVGMTPFTESLKSTYDRVVPFYENEIKKNLLENKNILISAHGNSLRALCKYLFNISDTKINELEIPTGNPLLIEFGENLKIEKYYYLDKSRAKDIIFNQ

SEQ ID NO: 182653 - protein, 252 aa, Unknown
  Bacterial polypetide isolated from the Sargasso Sea
LNFRTDRGRELTQALSQKAFPNHDMEPLSLRYVTLTNYDESFIGIDVIFDKHNLSDTLGEVLSKAGKSQVRIAETEKYPHVTFFFNGGREAPFEGEDRILCPSPKVATYDLKPEMSAYEIRDAITSKIKSDVPDFICLNFANPDMVGHTGNLNAAIRACEVIDECTATVVKTALAKNYAILIIADHGNCETMVNSDGTPNTAHTTNPVPVILVDSEKKKIKEGILGDIAPTILDLLDIDVPDKMTQKSLILK

SEQ ID NO: 182654 - protein, 235 aa, Unknown
  Bacterial polypetide isolated from the Sargasso Sea
MKNKLILLRHGESVWNLENRFTGWTDVDLTKNGENEAKKAGFLLSDNNIHFDLVYVSYLKRAIKTLKICLKQLKVIDNESVYHWRLNERHYGNLQGLNKSDTAKKYGDDQVLLWRRSYDVPPPKMDSNDKRHPKYDNLYKNVERQKLPDSESLEDTLNRVKPLWLSQIVPELKHGKNIMIVAHGNSLRAIVKILKKISAKDIIGINIPTGIPYIFEFNDNFSVKKDYFLGSQEDI

SEQ ID NO: 182655 - protein, 221 aa, Unknown
  Bacterial polypetide isolated from the Sargasso Sea
AENKFTGWVDVDLSSKGVEEAEKSGDLINKIGIQIDISYTSYLKRAIRTLTTILKKNNLKLEFNTAWQLNERHYGSLTGLNKEETMKKIGEKLFKKYRRSWDIAPPPMQNDNQHQKNFSPLNNSIPVGMIPYTESLKDTYNRVVPFFENEIRKNLLNKKNILISAHGNSLRALCKYLFKISDLKINELEIPTGNPLLIDFDEKLEIKKYFYLDNSRSKNII

SEQ ID NO: 182656 - protein, 161 aa, Unknown
  Bacterial polypetide isolated from the Sargasso Sea
MNKLVLLRHGQSTWNLENRFTGWTDVSLTEKGKKEAKEAGRLLKSEKFTFDIVHTSLLKRANRTMQICLKELGQEQIPIHYSWRLNERHYGALQGLNKAETAKKYGDEQVHIWRRSYSTPPPELSYDDERHPRFDNRYSDLDPEKLPVAECLKDTVGRFLP

SEQ ID NO: 182657 - protein, 204 aa, Unknown
  Bacterial polypetide isolated from the Sargasso Sea
MNLILIRHGQSEWNALNQFTGWKDPDLTATGIQEAKNAAKIINNLKINFDLVFTSALIRAQNTAEIILKEINQPLSTIKNMALNERNYGDLAGLNKDDARKRWGDEQVHIWRRSYDIPPPGGESLKDTGERVLPFFMKEIHPHVCNGKNVLVAAHGNSLRSLIKFLDNISDEDIVKLEIPTGAPIHYVINEDGSVVSKKDFFNE

SEQ ID NO: 182658 - protein, 252 aa, Unknown
  Bacterial polypetide isolated from the Sargasso Sea
MPPVVLCILDGWGLSEDKISNAPVLAKTPNFDHLWQTCPKTTLLTHGLDVGLPEGQMGNSEVGHMNIGAGRIISMDLGQIDLEIENKNFFTNEILLNHIQEIKKNNGRAHLMGLFSNGGVHGHINHLFASIRLFQSHDVPVILHLITDGRDVAPHSAIKFVNEINPIMNEKVQVGTVIGRYYAMDRDNRWERIELAYNAIVFGNSDQETSNIEKAITTSYESNISDEFIRPTIINQYSGIRKHDGFFCLNFR

SEQ ID NO: 182659 - protein, 300 aa, Unknown
  Bacterial polypetide isolated from the Sargasso Sea
HRWWHVCHHGPIHTAHTIRRHHFHMTWTHTAHTMRWHHFHMTWTHTARTIMWHHFHMPWSHTAHTIMWHHFHVAWAHTAHTIMWHICHMPWPHSAHTIMWHHFHVTWAHTAHTMSWHHFHVTWAHTAHTIMWHHFHVTWAHTAHTIMWHHFHVTWSHTAHAIMWHICHVTWAHTAHTIMWHHFHVTWAHTAHTMRRHHFHVTWSHTAHTIMWHHFHMTWSHTAHTMRRHHFHVTWAHTAHTIMWHHVHMPWSHTTHTLRWHLFHHAGIHTLHRMGRHHFHHRSVHTLHCFWRHLFHHISR

SEQ ID NO: 182660 - protein, 157 aa, Unknown
  Bacterial polypetide isolated from the Sargasso Sea
MKPEMSAEELTISCSKAIKSGNYAFVVINFANPDMVGHTGNMDATIKAIEKVDKCIGQIVNATGEMGGSIVITADHGNAEVMKGSEGEPWTAHTINKVPLILIEGEKRKIPNMGNEINLRENAGLADIAPTLLQLLNLPVPREMTGKSLIQEIELKG

SEQ ID NO: 182661 - protein, 506 aa, Unknown
  Bacterial polypetide isolated from the Sargasso Sea
MINKALLLILDGWGITEDKSSSAPDIANTPNYDNLLDTYTNAQLITHEENVGLPSGQMGNSEVGHINIGAGRIVKQDLLKINDSIESGEFNNNKNFVTIINHIKNTKSRLHLIGLLSDGGVHSHISHLKEILNTLSPIKDHIYIHAFTDGRDVDPKSGINFINEIQEYTKTSGGSIASVIGRYYAMDRDERWDRTKKAYDLLVNNKGLKTQNLIETINDFYNNGITDEFIEPIVITDKENNPISKVTDNDVIVFFNYRSDRGRQLTSLICEKKKNQFSLKPLDIKFYTLTNYDNSFDNVTPIFYNENLKNTIGEVLSKNNKSQLRIAETEKYPHVTFFLNGGREDPFDKEKRILCPSPKVATYDLKPEMSAFEVSEKAISEIINNSPDFICLNFANPDMVGHTGDMDAAIKACETIDKLLLPLINAANKLNYVSMIIADHGNCEKMKNKDGSPNTSHTTNPVPVILVDKSKRNIRNGVLADIAPTVLEILGIKKPIEMTGKSLIVK

SEQ ID NO: 182662 - protein, 460 aa, Unknown
  Bacterial polypetide isolated from the Sargasso Sea
MSNKVILLIMDGWGLGKESDESAIYKANTPFYDKAIKVFPNSKLSASGKDVGLPEGQMGNSEVGHMNIGAGRIVDQDLVRLNKSLSNDGIKNNKDFISSVQSAIKNNSTFHLMGLFSDGGVHSHSDHLYYILDYLKKTELSKISLHLFTDGRDCSPKESYNHLSQLIDYTKGSKISISTVSGRYYSMDRDNRWERIKLAYDAMVKGMGDLSHDILTSIKKLYDESITDEFIKPIVCVDDKGNPKSRIMDNDIVFCFNYRSDRMRQITSVLTQIDMVDYGMSKINLNYLTLTQYDQSFHNVSVLFGKENIKNTLGEVLSKKNKRQLRIAETEKYPHVTFFFSGGREKEFDLEKRILCPSPKVATYDLKPEMSATEVSNKFIFEVENKSFDFACLNFANPDMVGHTGNFDAAVRACEVVDKEVSRIVDAATKNGYTILLTADHGNAEKMINDNGSPHTYHTT

SEQ ID NO: 182663 - protein, 200 aa, Unknown
  Bacterial polypetide isolated from the Sargasso Sea
MNSNYLVLVRHGQSEWNAKNLFTGWRDPGLTAKGVDEAHAAGKALKKKNLNFDLMFTSDLIRAQLTGEIILKEMDQVKTETIKDKSLNERAYGDLTGMNKDEARAKFGNDQVHIWRRSYDISPPGGESLQDTHNRVVPFFKEHIEPEISSKNILIAAHGNSLRALVKHLEDISEQEIVQLEIATGVPIIYKFSDGSYAKQ

SEQ ID NO: 182664 - protein, 306 aa, Unknown
  Bacterial polypetide isolated from the Sargasso Sea
MTEHKKPLVLMILDGWGYREDEQSNAILAANTPVLDNLWASRPRTLISASGFDVGLPDGQMGNSEVGHVNLGAGRVVYQDFTRITKAINDGEFDSTPALVENIDKAVNAGKAVHVMGLLSPGGVHSHEDHIVASIELAAKRGAKEVYFHAFLDGRDTPPRSAKESIERIEALFAKLECGRLATLVGRYYAMDRDNRWNRVEKAYDVMTSGIGEFNYSDGVTALNAAYERDENDEFVAPTTITPAGREAAQINDGDTVIFANFRADRAREITRAFVEPEFDGFTKKKSPAISAFVMMTEYAADIRRT

SEQ ID NO: 182665 - protein, 204 aa, Unknown
  Bacterial polypetide isolated from the Sargasso Sea
MNLILIRHGQSEWNALNQFTGWKDPDLTAKGIEEAHNAGRIINNLKINFDLVFTSALIRAQNTAEIILKEINQPLSTIKNQALNERNYGDLAGLNKDDARKRWGDEQVHIWRRSYDIPPPGGESLKDTGERVLPFFMKEILPYVCEGKNVLVAAHGNSLRSLIKFLDNISDEDIVKLEIPTGAPIHYVINEDGSVKSKQDFFNE

SEQ ID NO: 182666 - protein, 239 aa, Unknown
  Bacterial polypetide isolated from the Sargasso Sea
MKHLILIRHGQSEWNQQKRFTGWVDIGLTDKGRAEAKKAGELIKEKKIKLDSFYSSYQKRANDTLKIVMKELNEDENLITKKWQLNERHYGELTGLNKEDMKKKYGEEKIHQFRRSWDVKPGALDRKSPYHPLNIETYKDIPVSDIPDTESLKDTHKRVVDCYNELILKDLQNGKGVCISAHGNSLRALCKYLFKINESEISKMEIPTGNPLLIIFEDKLQISSVTYLDQGRAKNLVAF

SEQ ID NO: 182667 - protein, 482 aa, Unknown
  Bacterial polypetide isolated from the Sargasso Sea
MSKISSKNIKRLSVPQSPVVLAILDGWGYRKEKANNAINSAKTPIMDSLWHAYPHTLISASGSDVGLPDGQMGNSEVGHLTIGSGRIIQQELVRISNIVKNNQLGLVNELKEMADSLKKNNSTLHITGLCSDGGVHSHIDHLLGLIKWASDNEIKKVSIHIITDGRDTPAKSASKYLNQIESCIKKFNTGEIASICGRYWIMDRNLLWDRTQKAYSNLTDPDIPISNISPLDYIKKSYAKNITDEFIEPIRMSENYLKDGDSLIFFNFRPDRARQIVKSLSNKKFSDFERKNYPNLDFVTFTQYDPNFPVKVAFPPESLNNFIGQIVSENGLKQYRTAETEKYPHVTYFFNGGVEIPLPGEERHLIPSPRVATYDMEPEMSAEELTISCSKAIKSGNYAFVVINFANPDMVGHTGNMDATVKAIEKVDKCVGQIVNATGEMGGSILITADHGNAEVMKGAEGEPWTAHTTNKVPLILIEGEK

SEQ ID NO: 182668 - protein, 514 aa, Unknown
  Bacterial polypetide isolated from the Sargasso Sea
MTTTKRPIALLILDGWGYRENTHMNAIYHANTPVLDRLNAQYAHGLISGSGLDVGLPDGQMGNSEVGHINLGSGRIVYQELTRISKAIADHEFEQNPALCDAVDAAIKAGGAVHIMGLLSPGGVHSHEEHIEAMCRMAVARGATKVYLHAFLDGRDTPPRSAKGSLSHFDDLFTTLGHGRIASIIGRYFAMDRDNRWDRVSQAYDLITQGKAKFQYDNAVTALEAAYERNENDEFVSSSAITDSEGKVASLNDGDALIFMNFRADRARQITRSFINADFDGFERAVTPKVNFVTLTEYAADIKAPIAYPSENLVNTLGEVLQNRGRTQLRISETEKYAHVTFFFNGGKEEPFNGEDRILINSPKVATYDLQPEMSSTELTDKLVAAIESAKYDVIICNYPNGDMVGHTGNFDAAVKACEAVDACIGRVVDALAKVDGECIITADHGNAEQMTDETTGQAHTAHTSELVPFVFVGRDATIDEGGKLSDVAPTILHLMGETIPAEMTGKPLIHVKE

SEQ ID NO: 182669 - protein, 321 aa, Unknown
  Bacterial polypetide isolated from the Sargasso Sea
MPKKVCLLILDGWGIAPKPDFSAIEIAKTPFIDNLLKEHPNARLDTHGENVGLPKGQMGNSEVGHMNIGAGRIVHQDLMKIDKAIKEKSIIKNKILNNAIDYSIQNNKKIHFLGLLSDGGIHSHIEHLFALLELAKSKKASNVFIHGFTDGRDTDPKSGIKFVEMLENKIRYSNIELASIIGRYYSMDRDKRWDRTKIAYDLLINGKGTKTKDFKNSIKKNYDKGITDEFINPLIKVDENNSPIGKISSEDVVIFYNFRNDRVRQLTEVLSQSKNIEPNMNPLNLLYITMTKYDEKFKNISVLFDKDNLVDTLGEVISKET

SEQ ID NO: 182670 - protein, 240 aa, Unknown
  Bacterial polypetide isolated from the Sargasso Sea
MVHLVLIRHGQSEWNSQNKFTGWVDIDLSDKGKKEAKTSGELIINENLKFDYYFSSFQKRAINTLKLIQETIGIKNLKFEEAWQLNERHYGALTGLNKEEMKKKLGEKKIHEFRRSWSLKPENLDKNNVYHPLNIDKYKNIPKKNIPDTESLEDTYNRVIPYFESKILKLLKLEKSILVAAHGNSIRALCKYLFKISNEDISNLEIPTGNPLVINFDKSLNVIKARYLDEARAKKLLFGN

SEQ ID NO: 182671 - protein, 214 aa, Unknown
  Bacterial polypetide isolated from the Sargasso Sea
MSHLILVRHGQSEWNLQNRFTGWVDVDLTPNGKLEACKAGELIKELKIDISYYFTSYQKRAIETLNLILNTLRIKNDKVVKAWELNERHYGSLTGLNKNEMKKVYGEEKIHEFRRSWDNQPEALNKNSPYHPINIEIYKDIPKNKIPDTESLKNTYERVIPFFEKNIKSKMDKNILIAAHGNSIRALCKYLFKIDNNKISKLEIPTGNPLILKF

SEQ ID NO: 182672 - protein, 203 aa, Unknown
  Bacterial polypetide isolated from the Sargasso Sea
MSKLILTRHGQSIWNAENRFTGWVDVELSEKGKEEAKKSGELISELNIKIDISYTSYLKRAIETLTIILKTLSLSMKFNTAWELNERHYGSLTGLNKDETKKKIGEEQFKKYRRSWDVAPPLMSNDSNYFKNFSPLNSGIPENKIPLTESLKNTYDRVVPFYDSEIKKNLENGKNILISAHGNSLRALCKYLFRISDKEINEL

SEQ ID NO: 182673 - protein, 272 aa, Unknown
  Bacterial polypetide isolated from the Sargasso Sea
MSKISSKNINRLNVPQSPVVLAILDGWGYREDISDNAIKSASTPVMDSLWHAYPNTLISASGSDVGLPDGQMGNSEVGHLTIGSGRIIQQELVRISNIVRKNKLGLVNELKEIADSLKKNNSTLHITGLCSDGGVHSHIDHLLGLIKWASENSIKKVAIHIITDGRDTPAKSATKYLNQIESCIKKYNTGEIASICGRYWIMDRNLLWDRTEKAYVNLTDKDIKITNISPQDYIQKSYDQNITDEFIEPIRLSDNYLKDGDSMICFNFRPDR

SEQ ID NO: 182674 - protein, 204 aa, Unknown
  Bacterial polypetide isolated from the Sargasso Sea
MNLILIRHGQSEWNALNQFTGWKDPDLTTKGIEEAHNAGKIIKNLKINFDLVFTSALVRAQNTAEIILKEINQPLSTIKNQALNERNYGDLAGLNKDDARKRWGNEQVHIWRRSYDIPPPGGESLKDTGERVLPFFIKEILPHVCDGKNILVAAHGNSLRSLIKFLDDISDEDIVKLEIPTGAPIHYVINEDGSVKSKKDFFNE

SEQ ID NO: 182675 - protein, 207 aa, Unknown
  Bacterial polypetide isolated from the Sargasso Sea
MKNTSLILVRHGQSEWNEKNLFTGWENPGLTKKGTDEAKHAGLLINDLDIEFDHLFTSVLDRAKLTGEIILENINQKDLDSIENKALNERFYGDLQGLNKDECRQKWGAEQVQIWRRSYDVGPPGGESLKETGERVLPYYLNEIYPLILQGKNILVAAHGNSLRSLIMHLDKLSSDEIVKLEIPTGAPIQYIFDDQGKVLIKKNLIE

SEQ ID NO: 182676 - protein, 185 aa, Unknown
  Bacterial polypetide isolated from the Sargasso Sea
MNVMKPTVLCIMDGWGIDAAGNFNAITQANTPNYDYLIENYCSAKLSAHGAAVGLPQKQMGNSEVGHTTIGSGRISLMNLPKIDLAVSDGSFGKNLELQAFIKKLKSLNGTAHLAGLVSDGGVHSHQSHLAEAANFIHKCGVPVKLHCFLDGRDVPPQSALNFVSGLQRNLSKRCGYCNSNRTFL

SEQ ID NO: 182677 - protein, 273 aa, Unknown
  Bacterial polypetide isolated from the Sargasso Sea
MTRWRRSFRGPSQRFTASSLPTGNLMYKLVLIRHGESTWNKENRFTGWVDVDLTEQGNREAQQAGVLLKESGYTFDIAYTSVLKRAIRTLWHVQDQMDLMYLPVVHSWRLNERHYGALSGLNKAETAAKFGDEQVLVWRRSYDTPPPALEPTDERAPYNDPRYAKVPREQLPLTECLKDTVARVLPLWNESIAPAIKSGRKVVIAAHGNSIRAMVKYLDNISDEDIVGLNIPNGVPLVYELDENLKPIKHYYLGDQDAIAKAQAAVAKQGKAG

SEQ ID NO: 182678 - protein, 238 aa, Unknown
  Bacterial polypetide isolated from the Sargasso Sea
MKHLILIRHGQSEWNQQKRFTGWVDVGLTDKGRAEAKKAGELIKEKKIKLDSFYSSYQKRANDTLKIVMKELNEDENLITKKWQLNERHYGELTGLNKEDMKKKYGEEKIHQFRRSWDVKPGALDRKSPYHPLNIEAYKDIPVSDIPDTESLKDTHKRVVDCYNELILKDLQNGKSVCISAHGNSLRALCKFLFKINEREISKMEIPTGKSLLIIFEDKLQISSVTYLDQGRAKNLVA

SEQ ID NO: 182679 - protein, 251 aa, Unknown
  Bacterial polypetide isolated from the Sargasso Sea
MEIPVAGKLVLCRHGQSKWNLENKFTGWEDVDLTQLGEEEAQKAGMELKSTGIAFDIAFTSLLKRANKTLFIILEKMDLTWIPITHAWELNERHYGALQGKNKAEVAKEFGDEQVHIWRRSYDIPPPSIDNEDPSHPKFDSKYDGIDELPSGESLKDTLSRVKPYWENQILPELLGNKNVLVVAHGNSLRSMIKIIEKIDDESIVGLNLPTGIPIVYEFNENLEPVSKDFLADSKSLQAAQDAVANQGKSK

SEQ ID NO: 182680 - protein, 319 aa, Unknown
  Bacterial polypetide isolated from the Sargasso Sea
MGKKTDISPEDYLNKSYKANITDEFLEPIRISKNFLKDEDGLICFNFRPDRARQIIKALSEKDFDNFKRKSIPNVDILTFTQYEANLPVKIAFPPESLNNFIGQIVSENGLKQYRTAETEKYPHVTYFFNGGVEVPSPGEQRHLIPSPRVATYDMAPEMSAEELTISCSNAIKTGQYSFVVINFANPDMVGHTGNMAAAIKAIETVDRCIGKIVNATGEMGGSILITADHGNAEVMKGPDGEPWTAHTINKVPLIFIEGEKRKIPNMGNEIYLRENAGLADIAPTLLQLLNLPIPKEMTGKSLIKEIELKGFNKVVQHV

SEQ ID NO: 182681 - protein, 507 aa, Unknown
  Bacterial polypetide isolated from the Sargasso Sea
MESNKKLILLILDGWGISSDKDKSAVDQAKTPFYDSLINNYPNAQLLTHGESVGLPKGQMGNSEVGHMNIGAGRIVFQELAKINKEIETGSFRNNKKLNELLDNAISNQKNIHLIGLLSDGGVHSHVSHLYELIDLIESKNSNSTFIHAFTDGRDVDPKSGINHVKKLITYLKHKNTELASICGRYFAMDRDKRWDRVKIAYDLLVKGIGSISNDPLKSIKISYEQGVTDEFIKPIVISENNKTPNAKIMDGDLVVFFNFRTDRGRQLTEVLTQYNLDEFGMRKMDLSFLTMTSYNDDYENVSTIYENENLKDTLGEVLANNNKKQIRIAETEKYPHVTFFFNGGLEEKFNGEKRILCQSPKVATYDLKPEMSANEIANSIIHEIKNDYADFICLNFANPDMVGHTGNFNAAVQACEAVDKCTKQVVEEALKKNYSIIIIADHGNSDLMVNYDGTPNTAHTTNPVPIIILDKDFDNVKNGILADVAPTILKIMGIEKPSKMTGKYLV

SEQ ID NO: 182682 - protein, 201 aa, Unknown
  Bacterial polypetide isolated from the Sargasso Sea
MNSKLVLVRHGQSEWNAKNLFTGWKDPKLTDLGIQEAIRAGELLETRNLNFDLMFTSDLFRAQETGRLILEQINQKDIEIIQDQSLNERNYGDLAGLNKDEAREKWGEEQVHIWRRSFDVPPPGGESLKNTAERVLPYFEREIMPKVKKSLNILVAAHGNSLRALVMHLENISSEEIVKLEIATGDPLIYEYSNGDFVRVD

SEQ ID NO: 182683 - protein, 127 aa, Unknown
  Bacterial polypetide isolated from the Sargasso Sea
MSKSVKTTLLLILDGWGHTTKTDHNAIAAAETPTWDGIWNDQPATLISTSGHSVGLPEDQMGNSEVGHMNMGAGRVVYQSLTRIDKDIAEEKFAENAILKEALDKAVLENSTVHLLGLLSPGGNPLS

SEQ ID NO: 182684 - protein, 248 aa, Unknown
  Bacterial polypetide isolated from the Sargasso Sea
MKLILLRHGESQWNLENRFTGWTDVSLTKNGEHEAKKAGILLNNNNIQIDLAYISYLQRAVKTYKICQKQLKMTNSRVSYDWRLNERHYGSLQGLNKSETAKKYGDEQVLIWRRSYDIAPPSLDQDDNRHPKFDILYKDINSEDLPSSESLKETLNRVKPLLDNSIIPQIKNGKNILIVAHGNSLRAIVKILKKITDKDIVNLNIPTGVPYIFDINKNLDVLKDYYLGNKNKILKQINKLSAQGESKN

SEQ ID NO: 182685 - protein, 199 aa, Unknown
  Bacterial polypetide isolated from the Sargasso Sea
VLKNTLGEVISKNNFNQLRISETEKYPHVTFFFNGGNEEKFKNEERILCPSPKVATYDLKPEMSSDEVTKNVIREIKKGKFEFICLNFANPDMVGHTGNFTAAVKACEAVDNHLGSIINEATKEEYTSIVISDHGNCERMINDDGSVNTSHTINPVPIILVNCENKEINNGVLADIAPTILDILGIETPIEMEGESLLI

SEQ ID NO: 182686 - protein, 202 aa, Unknown
  Bacterial polypetide isolated from the Sargasso Sea
MKTCYLVLVRHGQSEWNEKNLFTGWKDPKLTQKGVDEARKAGDELRQAGYSFDKMFTSDLFRAQETGRIILEQMGTPYIITIKDQCLNERNYGDLAGLNKDEARKKWGNDQVHEWRRSFDIQPPGGESLKDTAERVLPYFKENVIPELEKGSNILIAAHGNSLRALVMDLEKIHSEEIVKLEIATGIPLIYKFDKKRIERLS

SEQ ID NO: 182687 - protein, 246 aa, Unknown
  Bacterial polypetide isolated from the Sargasso Sea
MKLILLRHGESKWNLENRFTGWTDITLTSLGMEEASFSGKQLLKKNIKIVSVYTSLLKRAIETANIVSETIKFPKQNIKFDWRLNERHYGSLQGLNKSETAAKFGEQQVLLWRRSYDIPPPSLDENDERHPRFDKKFQDIGENLPTGESLKDVIDRLNPFLKDYFNFIKNRPGNHLLVAHSNSLRAIVKLLDNLSEEEIISVNIPTGVPLVYSLDNNLNVIKKEYLIDEAKLKEKQNIVANQGKAK

SEQ ID NO: 182688 - protein, 251 aa, Unknown
  Bacterial polypetide isolated from the Sargasso Sea
MEIPVAGKLVLCRHGQSKWNLENKFTGWEDVDLTQLGEEEAQKAGMELKSTGIAFDIAFTSLLKRANKTLFIILEKMDLTWIPITHAWELNERHYGALQGKNKAEVAKEFGDEQVHIWRRSYDIPPPSIDNEDPSHPRFDSKYDGIDELPSGESLKDTLSRVKPYWENQILPELLGNKNVLVVAHGNSLRSMIKIIEKIDDESIVGLNLPTGIPIVYEFNENLEPVSKDFLADSKSLQAAQDAVANQGKSK

SEQ ID NO: 182689 - protein, 319 aa, Unknown
  Bacterial polypetide isolated from the Sargasso Sea
MLIILDGVGLGETKENSGLSLANTPNLDALLNDYPMSKIDASGKSVGLPPGQMGNSEVGHMVIGCGQVFKQDLVVINESIKDKTFFSNDCLTSAIKKAKDSKNNLHLLGLASPGGVHSHIEHLYALIELCNQYGVEPKLHLFTDGRDCAPEASLEYFNELNKKLMNFGGEIYTISGRYFAMDRDLRWDRTEKCWNVIVNNKGNYAENFEEALKNSYANGITDEFLIPTFLKNAKPLKKNDSLIFFNFRNDRTRQIARALNVERFDNFKRTNNNTAYSIVTMTEYDPFLSCPVAFRLKPPQETIGSIVSNLGFKQFHCAE

SEQ ID NO: 182690 - protein, 208 aa, Unknown
  Bacterial polypetide isolated from the Sargasso Sea
MKNRNFLVLVRHGQSEWNAKNLFTGWKDPGLTSDGKKEAINAGSLIKQRNIQFSMMFTSALKRAQITGQIILDSINQADIKVEKNQALNERNYGDLSGLNKDDARKEWGEEQVHIWRRSYDVPPPGGESLKDTAERVLPYFNSSILPKITQGGNILVTAHGNSLRSLVMQLDNLSKEQVVALEIPTGAPIIYSFQENEKPIFKENLFE

SEQ ID NO: 182691 - protein, 251 aa, Unknown
  Bacterial polypetide isolated from the Sargasso Sea
MEIPVAGKLVLCRHGQSKWNLENKFTGWEDVDLTQLGEEEAQKAGMELKSTGIAFDIAFTSLLKRANKTLFIILEKMDLTWIPITHAWELNERHYGALQGKNKAEVAKEFGDEQVHIWRRSYDIPPPSIDNEDPSHPKFDSKYDGIDELPSGESLKDTLSRVKTYWENQILPELLGNKNVLVVAHGNSLRSMIKIIEKIDDESIVGLNLPTGIPIVYEFNENLEPISKDFLADSKSLQAAQDAVANQGKSE

SEQ ID NO: 182692 - protein, 247 aa, Unknown
  Bacterial polypetide isolated from the Sargasso Sea
MKKLVLMRHGESQWNLENRFTGWTDVDLTEKGAAEAKNCGLLLREAGFQFDIVHTSLLKRANRTMEICLHEMGLSGISIKYNWRLNERHYGALQGLNKAETAAEYGEEQVHIWRRSYTVPPPKLDSDDERHPRFDDKYSSIQSAILPDSECLKDTVERFMPYWLDSIKPDIESGQNVLIVAHGNSLRALVKYLDKVSDADIVELNIPTGVPLIYELDDEMNSVKSYYLGDQEEISKRTAEVAAQGKK

SEQ ID NO: 182693 - protein, 239 aa, Unknown
  Bacterial polypetide isolated from the Sargasso Sea
MSNTLILIRHGKSVWNVKNIFTGWVDVELDDLGKKEALKSALLLKEAEIVPSFAFTSFLKRAQNTLQIILEELNIYNLHTETAWELNERHYGALQGLNKDEVKKKYGEDQFLKWRRGYSTPPPALPIDSEMNPNKDDLYKGINNLPLTECLEDTYARVIPYWENSIKPLVLKNTTIISAHGNSLRALCKYLFDVSDEDITSLEIPTANPLVISLNNSCKIHSASYLDASRAQKLPIIGE

SEQ ID NO: 182694 - protein, 208 aa, Unknown
  Bacterial polypetide isolated from the Sargasso Sea
MSHSKKISTLVLVRHGQSQWNKENLFTGWKDPDLTEKGIEEAINAGKKIKQTNINFDLHFTSKLKRAQRTGNLIMQELGEDIPTSENKALNERDYGDLSGLNKDDARKKWGDEQVHIWRRSYDTPPPGGESLKNTAERVLPYFENIIYPELRNQKNILISAHGNSLRALIMYLEKISEDKIVKLEIATGQPIVYKLDEDLQVISKEIL

SEQ ID NO: 182695 - protein, 514 aa, Unknown
  Bacterial polypetide isolated from the Sargasso Sea
MTTTKRPIALLILDGWGYRENTHMNAIYHANTPVLDRLNAQYAHGLISGSGLDVGLPDGQMGNSEVGHINLGSGRIVYQELTRISKAIADHEFEQNPALCDAVDAAVKAGGAVHIMGLLSPGGVHSHEEHIEAMCRMAVARGATKVYLHAFLDGRDTPPRSAKGSLSHFDDLFTTLGHGRIASIIGRYFAMDRDNRWDRVSQAYSLITQGKAKFQYDNAVTALEAAYSRDENDEFVSSSAITDSEGKVASLHDGDALIFMNFRADRARQITRSFINADFDGFERAVTPKVNFVTLTEYAADIKAPIAYPSENLVNTLGEVLQNRGRTQLRISETEKYAHVTFFFNGGKEEPFNGEDRILINSPKVATYDLQPEMSSTELTDKLVAAIESAKYDVIICNYPNGDMVGHTGNFDAAVKACEAVDACIGRVVDALAKVGGECIITADHGNAEQMTDETTGQAHTAHTSELVPFVFVGRDATIDEGGKLSDVAPTILHLMGETIPAEMTGKPLIHVKE

SEQ ID NO: 182696 - protein, 90 aa, Unknown
  Bacterial polypetide isolated from the Sargasso Sea
WRRSYDTPPPGGESLKDTYNRVIPYFESEILPLMKDKNVLISAHGNSLRALVKYLDSISEKDIVKLEIATGEPIFYKFTDGKFIKELHRE

SEQ ID NO: 182697 - protein, 204 aa, Unknown
  Bacterial polypetide isolated from the Sargasso Sea
MNSNYLVLVRHGQSEWNEKNLFTGWKDPGLTQKGIEEAKKAGHQLNKLGLNFDIMHTSALIRAQLTGQIILDVLKQDNLETIKNQALNERDYGELTGLNKDEARENFGVDQVQIWRRSYDTPPPGGESLKDTYNRVIPYFESEILPLMKDKNVLISAHGNSLRALVKYLDSISEEDIVKLEIATGEPIFYKFTDGKFIKELHRE

SEQ ID NO: 182698 - protein, 209 aa, Unknown
  Bacterial polypetide isolated from the Sargasso Sea
MNSLILLRHGQSQWNLENRFTGWKDVPLTEKGIEEANKACLLIKESKIKIDIIFSSILQRANRTAELALKEKDFAHLWKDNQLIMTKSQNLNERDYGDLVGLNKEETSQKFGKDQVHIWRRSYDVSPPGGESLKNVVDRVGPYFEKFIQPHLFSEKNVIIVAHGNSLRATMIKIGLYKPEEISKIELPTGSPFVINFSSGKLQDANYLN

SEQ ID NO: 182699 - protein, 202 aa, Unknown
  Bacterial polypetide isolated from the Sargasso Sea
MKSCYLVLVRHGQSEWNEKNLFTGWKDPQLTQKGIEEAIKAGNELKKMGYRFDKMFTSDLFRAQETGRIILEQMGTPLIPTISDQCLNERNYGDLAGLNKDEARKKWGNDQVHEWRRSFDIPPPGGESLKDTAERVLPYFENNIIPDLQKGLNVLIAAHGNSLRALVMNLEKIHSEEIVKLEIATGIPLIYKFDKDRIERVS

SEQ ID NO: 182700 - protein, 209 aa, Unknown
  Bacterial polypetide isolated from the Sargasso Sea
MSKFSSKNINKIKVPESPVVLAILDGWGHREENLDNAIKNANTPVMDSLWHAYPHTLINASGADVGLPNGQMGNSEVGHLTIGSGRIIQQELVRITNIVKNNQLTQVHELKEMANSIKKKKGTLHITGLCSDGGVHSHIDHLLGLIKWASEEHIEKVAIHVITDGRDTPAKSAHKYIRQIEDCIKKFKVGEIASICGRYWIMDRNLIGE

SEQ ID NO: 182701 - protein, 248 aa, Unknown
  Bacterial polypetide isolated from the Sargasso Sea
MYKLVLIRHGESQWNLENRFTGWHDVDLTDTGVAQAKTAGQLLKDAGFTFDQAYTSVLLRAIKTLNIALEEMGQHYLPVERHWRLNERHYGALTGLDKAETAAKHGEEQVKIWRRSFDIPPPAVEDDSEHFPGHDPRYNNVDADILPRGESLKLTIERVLPYWHDVIRPDIQAGKRVIIAAHGNSLRALVKYLDGMSDEEVLGLNIPTGVPLVYELDENLKPISKEYLGDADAIKAMMDAVAKQGKAK

SEQ ID NO: 182702 - protein, 249 aa, Unknown
  Bacterial polypetide isolated from the Sargasso Sea
MKTLVLIRHGQSAWNLENRFTGWVDVDLSDRGVREARDAGRTLLEKGYRFDVAMTSLLKRSIRTLWLILDEMDQMYLPVQTDWRLNERHYGALQGLDKKETALKHGDDQVLKWRRGYAIRPPALDAADPQHPSQDPRYAGIAGLPDTESLADTLERVTQWWSERLVPELNNDKRVLVAAHGNSLRAMVKFLLGMSEDEIMQYNIPTGIPLVFRLSDELQVVDHEYLADEAALNAAVNEVKHQASSETAP

SEQ ID NO: 182703 - protein, 256 aa, Unknown
  Bacterial polypetide isolated from the Sargasso Sea
SQTFERKNYPNLEFVTFTQYDPNFPVKVAFPPESLNNFIGQIVSENGLKQYRTAETEKYPHVTYFFNGGVEIPLPGEERHLIPSPRVATYDMKPEMSAEELTISCSKAIKSGNYAFVVINFANPDMVGHTGNMDATIKAIEKVDKCIGQIVNATGEMGGSIVITADHGNAEVMKGSEGEPWTAHTINKVPLILIEGEKRKIPNMGNEINLRENAGLADIAPTLLQLLNLPVPREMTGKSLIQEIELKGYNKVVQHV

SEQ ID NO: 182704 - protein, 267 aa, Unknown
  Bacterial polypetide isolated from the Sargasso Sea
MNKVLLMILDGWGKTTNSSVSAITNANTPFIDELYEKYSYSELLTHGKHVGLPDNQMGNSEVGHMNLGAGRIVYQDLAKINNAIKRNQLKEERELINTYNYAKKNNKKIHFIGLLSDGGVHSHIDHLIELLKIAKDKGLNKLYIHGFTDGRDVDPKSANKFINYIEPVLKETGAKISSIIGRYYAMDRDQRWERTEKAYNLLLKNQGNLTKNISKEIISNYKKGITDEFMPPIVNTENNFPISKIEKNDVIIFFNFRTDRGRQLTES

SEQ ID NO: 182705 - protein, 353 aa, Unknown
  Bacterial polypetide isolated from the Sargasso Sea
NTGEIASICGRYWIMDRNLLWDRTEKAYSNLTDPNIRITNISPKDYIEKSYSNNITDEFIEPIRISENYLKDGDSLICFNFRPDRARQIVKSLSLKEFSDFKRKNYLNLDFVTFTQYDPSFPVKVAFPPEPLNNFIGQIVSENGLKQYRTAETEKYPHVTYFFNGGVEIPLPGEERHLIPSPRVATYDMEPEMSAEELTISCSKAIKSGNYAFIVINFANPDMVGHTGNMDATVKAIEKVDKCVGQIVNATGEMGGSILITADHGNAEVMKGSQGEPWTAHTINKVPLILIEGEKRKIPNMGNAINLRDNAGLADIAPTLLQLLNLPIPKEMTGKSLIQEIELKGYNKVVQHV

SEQ ID NO: 182706 - protein, 333 aa, Unknown
  Bacterial polypetide isolated from the Sargasso Sea
MINKTLLLILDGWGITEDKSSSAPDIANTPNYDNLLDTYTNAQLITHEENVGLPTGQMGNSEVGHINIGAGRIVKQDLLKINDSIESGEFNNNKNFVTIINHIKKTKSNLHLIGLLSDGGVHSHISHLKEILNTLSQIKDHIYIHAFTDGRDVDPKSGINFINEIQEYTKTSGGSIASVIGRYYSMDRDGRWDRTKKAYDLLINNNGLKTQNLTETIYDFYSNGITDEFIEPIVITDKENNPISKVTDNDVIVFFNYRSDRGRQLTSLICEKNNNQFGLKPLDIKFYTLTNYDNSFDNVTPIFYNENLKNTIGEILSKNNKSQLRIAETEKYP

SEQ ID NO: 182707 - protein, 204 aa, Unknown
  Bacterial polypetide isolated from the Sargasso Sea
MNLILIRHGQSEWNALNQFTGWKDPDLTAKGIEEAHNAGKIINSLEINFDLVFTSALIRAQNTAEIILKEINQSLPTIKDQALNERNYGDLAGLNKDDARKRWGDEQVHIWRRSYDVSPPGGESLKDTSERVLPFFMKEIHPHVCKGKNVLVAAHGNSLRSLIKFLDNISDEDIVKLEIPTGAPIHYVINEDGSVKSKTDFFNE

SEQ ID NO: 182708 - protein, 174 aa, Unknown
  Bacterial polypetide isolated from the Sargasso Sea
MNKKVLLLILDGWGIADSKDASAPDKANTPNFNSLIENYPNNFLITHGEKVGLPKGQMGNSEVGHMNIGSGRIVLQDLLKINNSIKEGEFRKQSHFNDIINYTKKNSSNVHLMGLVSDGGVHSHIDHLKEIILSLSEIKDKIYIHAFTDGRDVDPKSGIDFIKSIETFSKKNGR

SEQ ID NO: 182709 - protein, 163 aa, Unknown
  Bacterial polypetide isolated from the Sargasso Sea
MKHLILIRHGQSEWNQQKRFTGWVDVGLTDKGRAEAKKAGELIKEKKIKLDSFYSSYQKRANDTLKIVMKELNEDENLITKKWQLNERHYGELTGLNKEDMKKKYGEEKIHQFRRSWDVKPGALDKKSPYHPLNIETYKDIPATDIPDTESLKDTHKRGSGLL

SEQ ID NO: 182710 - protein, 248 aa, Unknown
  Bacterial polypetide isolated from the Sargasso Sea
MIKLVLLRHGESQWNLENRFTGWTDVDLTKKGESEAKSAGKVLKNNFFEFDLIYTSVLKRAIRTMKICLTEMKIKNVPIEYSWRLNERHYGALQGLNKAETAKKYGDEQVLLWRRSYDTPPPQLQISDTRWSGNDSNYSHMDKNDIPLSECLKDTVNRFLPYWREKIEPSLQDGKKIMIVAHGNSLRALVKHLDNISDKDIVSFNIPTGIPLIYELNNKLKPVKSYYLGNQEEIEKAISSVKNQAKTK

SEQ ID NO: 182711 - protein, 221 aa, Unknown
  Bacterial polypetide isolated from the Sargasso Sea
MSKVSSKNINKMKVPETPVVLAILDGWGNREETSDNAIKKANTPVMDSLWHAYPHTLVSASGADVGLPDGQMGNSEVGHLTIGSGRIIQQELVRITNIVKNNQLDQIIELKEIANSIKRKKGTLHITGLCSDGGVHSHIDHLLGLIKWASKVGIENLAIHVITDGRDTPAKSASNYIKQIENCIEKFKVGEIASICGRYWIMDRNLLWGRTEKAFTNLTDP

SEQ ID NO: 182712 - protein, 203 aa, Unknown
  Bacterial polypetide isolated from the Sargasso Sea
MNSNYLVLVRHGQSEWNAKNLFTGWKDPGLTEKGTAEAIRAGKHLKSLGLSFDVLYTSALVRAQLTGKIMLDELGQSDLETIEDKALNERDYGELTGLNKDEARENFGIEQVQVWRRSYDIAPPGGESLKDTYNRVIPYFENKIQPLMKDKNVLISAHGNSLRALVKYLDDISEADIIKLEIGTGEPIVYKFTDGKFIKESHR

SEQ ID NO: 182713 - protein, 232 aa, Unknown
  Bacterial polypetide isolated from the Sargasso Sea
MTTTPKPLVLIILDGFGHSESHHDNAVYSANKPVLDRLTATVPNGLISGSGMDVGLPDGQMGNSEVGHMNLGAGRVVYQDFTRVTKAIRDGEFFENPTICAAVDKAVAAGKAVHFMGLLSDGGVHSHQDHLVAMAELAFKRGADKIYLHAFLDGRDTPPKSAQSSIELLDTTFAALGKGRIASLVGRYFAMDRDNRWDRVAQAYNLIVDGQAEFNAATAQEGLEAAYARGES

SEQ ID NO: 182714 - protein, 484 aa, Unknown
  Bacterial polypetide isolated from the Sargasso Sea
MNKEIKNKPVVLCIMDGWGLRKNKNNNAIALANTPNYDNFIKNFSSSTLDASGKDVGLPSGQIGNSEVGHINLGCGRIILQSLPKINLGFKNKEIENNKSLNSFIKKHNKNAVVHLMGLCSSGGVHSHKNHLIEMSKILIRNKIKVRLHLFSDGRDTSPKEFGKIINNFVKALPEEIKISSLIGRYFSMDRDQRWERIKKSFDLIVHGKSEYKYNNIHDAIRSGYERGETDEFIKSSLIGNYNGIQKGDSLLMLNFRSDRVRQLLLSLLSPSFNNFHRGKEYNSFKNAIGIMEYSEQLNKLMDTIFISNPVKDTLGELISRAKLKQLRIAETEKYPHVTFFFNGGIEKKYPNEDRILIPSPKVSTYDMKPEMSAKLIEKKLINVIKKNFYDVIIVNFANPDMVGHTGKLDAVVKSVEIVDEAIGNIKKAIDKTEGLILLTADHGNCELMWDSKKNAPHTAHTTNKVPLILINSKKNLFIKSLKL

SEQ ID NO: 182715 - protein, 397 aa, Unknown
  Bacterial polypetide isolated from the Sargasso Sea
LLSAGGVHAHQDHILAVVNGLAKAGSTVVIHGFTDGRDVLPRDAGINLQNFVADLPDNASIGSLTGRYFGMDRDHRWDRTQKAYDVIARGRAEHHADYAIQALQTGYVRGESDEFLSATIIGDYAGMRDGDGLVMMNFRADRARQLLDCLYRPEVTSCDTRPIALCPGLGMTSYSAALDGFVTPLYPPVEIADTLGDVVAAAGLSQLRLAETEKYPHVTFFFNGGDETMRDGEERAMVPSPNVATYDQLPEMSAAGVLAKAVASLQAKAHDLLVINFANPDMVGHTGDLDAAIAAVEIVDSCIGELVAAVQAAEGQMLLTADHGNCEVMWDKNADSPHTAHTTNPVPLILVNGPPGVQLTDGRLADLAPSLLAMLGIDQPASMTGHAVFAGLATAAK

SEQ ID NO: 182716 - protein, 118 aa, Unknown
  Bacterial polypetide isolated from the Sargasso Sea
MGNSEVGHLTIGSGRIIQQELVRISNIVKNNQLGLVNELKEIAASLKKNNSTLHITGLCSDGGVHSHIDHLLGLIKWASDNKLKKVAIHIITDGRDTPAKSASKYLKQIESCIKKFNV

SEQ ID NO: 182717 - protein, 509 aa, Unknown
  Bacterial polypetide isolated from the Sargasso Sea
MSTAKKPLVLVIMDGWGYSTKQEHNAVAAAKTPNLDRLARDYTSTLISGSGLDVGLPDGQMGNSEVGHVNIGAGRIVYQELTRISKDIQDGDFFQNLELAKAVDAAVTKGKAVHIMGLMSPGGVHSHEEHIMGMIEMAAKRGAEQIYFHAFLDGRDVPPRSAQSSIEQFDALFARLGKGRFASMIGRYYAMDRDNRWDRVQQAYDLMTQGKGEFTADSASEALAAAYARDENDEFVKATRIGAAAPMQDGDALIFMNFRADRAREITRAFVDSDFTGFARTATPALNFVMLTEYAADIKTACAYPPTALVNTLGEWLAKQGKTQLRISETEKYAHVTFFFNGGEEACFTGEDREIVASPKVATYDLQPEMSSEELTDKLVGAIKSGKYDVIICNYPNGDMVGHTGVFDAAVKACEAVDHCIGRVTDALAEVGGECLITADHGNAEKMMDEETGQAHTAHTNLPVPLIYFGRKAEVAEGGKLSDLAPTMLTLMGLPVPPEMTGKPLMILK

SEQ ID NO: 182718 - protein, 286 aa, Unknown
  Bacterial polypetide isolated from the Sargasso Sea
MTKLGHKRTILIILDGWGHTDNTEYNAIYSANKPIWDNIWEKYPHTLINASGLDVGLPASQMGNSEVGHMNIGAGRVVDQEFTRISRAIKDGTFNQNNTLKNAFNHAKKNNKAIHLLGLLSPGGVHSHEDHIFALIKLAKKCGVKKLFLHAFLDGRDTTPKCAIESIHKAQLKMKELELGSFASIVGRYYAMDRNKNWDRTKFAYDVISQGKANYRSSDPFIAIDMAYARNETDEFISPTAITKSSEAPIIIEDEDIVIFANYRADRARQLARAFTKPSFKAFHRE

SEQ ID NO: 182719 - protein, 203 aa, Unknown
  Bacterial polypetide isolated from the Sargasso Sea
MNSNYLVLVRHGQSEWNAKNLFTGWKDPGLTENGTAEAIRAGKHLKSLGLSFDVLYTSALVRAQLTGKIMLDELRQSDLEIIEDKALNERDYGELTGLNKDEARENFGIEQVQVWRRSYDIAPPGGESLKDTYNRVIPYFENKIQPLMKDKNVLISAHGNSLRALVKYLDDISETDIIKLEIGTGEPIVYKFTDGKFIKESHR

SEQ ID NO: 182720 - protein, 163 aa, Unknown
  Bacterial polypetide isolated from the Sargasso Sea
RHYGALQGLNKAETAAEYGEEQVHIWRRSYSIPPPQLKLDDKRHPRFDPLYSNLSLDDLPVAECLKDTVNRFMPYWFDSIKPDVESGKNVLIVAHGNSLRALVKYLEKISDNDIINLNIPTGVPLVYELDQDMNSKKSYYLGDQDEISKKTAAVADQGKNKAT

SEQ ID NO: 182721 - protein, 207 aa, Unknown
  Bacterial polypetide isolated from the Sargasso Sea
MKNSSLILVRHGQSEWNEKNLFTGWENPGLTKKGTNEAKHAGVLINDLDIQFDHLFTSVLDRAKLTGAIILENINQKDLDSIENKALNERFYGDLQGLNKDECRQKWGAEQVQIWRRSYDVGPPGGESLKETGERVLPYYLNEIYPLILQGKNILVSAHGNSLRALIMHLDKLSSDEIVKLEIPTGAPIQYIFDDQGKVLIKKNLIE

SEQ ID NO: 182722 - protein, 257 aa, Unknown
  Bacterial polypetide isolated from the Sargasso Sea
MPTTKKIDKTYMKKNLILVRHGQSEWNLKNLFTGWTDVDLTEQGIKEAEKAGQIISSLNFKVDIAFTSELIRAIRTLDIIKTKLEDPDLSIKRDWRLNERSYGALQGLNKFETAQKYGDDQVHIWRRSYDIPPPPLEKDDQRHPCNDPKYENIDNLPDSESLATTLIRVKKCWNEIIHPQLEENKNVLITAHGNSLRALVKMLDNVSEEEITQFNIPTGVPILYELDEKCKSQSRRFLGDKDEIASAIDEVANQAKN

SEQ ID NO: 182723 - protein, 209 aa, Unknown
  Bacterial polypetide isolated from the Sargasso Sea
MNKLVLLRHGQSQWNLENRFTGWKDVPLTEKGINEANNAGQLLKKHKIKIDKVFSSVLERANKTAEIAIKASEIENLHKDGKLIYEKDQKLNERDYGDLVGLNKAETADKFGKEQVHIWRRSYDTPPPNGESLKDVVARVSPYFTETIQPHILNKKNVLIAAHGNSLRAIMIKVGMYKPEEISSIELPTGSPLCLDYQNGKLIKHYYLD

SEQ ID NO: 182724 - protein, 238 aa, Unknown
  Bacterial polypetide isolated from the Sargasso Sea
MSHLILVRHGQSEWNLQKKFTGWVDVDLTPQGKLEACKSGEVIKNQNIKIDYFFSSFQLRAINTLKLIQNTLRNNDQSIKAWQLNERHYGALTGLNKDEMKKKFGEKKILEFRRSWNIKPDPLNKNSPYHPSNIGVYKNLPKENIPDTESLEDTYNRVVNYFIKNIEKKLHDKNNILISAHGNSLRALCKFLFKLDEIQITKLEIPTGNPLMITFNEKNKISKCRYLDQERAQDLLVF

SEQ ID NO: 182725 - protein, 248 aa, Unknown
  Bacterial polypetide isolated from the Sargasso Sea
MNLIFLRHGQSIWNLENRFTGWVDVGLSDGGVDEALKAGNTLLNKEYVPDICFTSYLKRSKETANILLSQYADKVKQDIEIVNDWTLNERHYGSLQGLDKSETANKYGEEQVQLWRRSYDTPPPLAAKNSDFDPNNDKLYKNISQDLPLGESLKDVVSRVKKTISMILNLSETKNVLVVAHGNSIRAILKIIEDISDNDIIGINIPTGIPLAFNYQDDKLTKIGYLGDQEQIIKLQKEVEQQSRIKKG

SEQ ID NO: 182726 - protein, 125 aa, Unknown
  Bacterial polypetide isolated from the Sargasso Sea
ICNFANADMVGHTGNFNATILAIETIDKCLGKIIEAAKKAGSEILITADHGNAEQIKSYTTEKIKSQPHTAHTSNLVPLVYIGREARFIPEIGSLSDVTPTLLDIMDIPQPMEMTGKSLIDILKK

SEQ ID NO: 182727 - protein, 247 aa, Unknown
  Bacterial polypetide isolated from the Sargasso Sea
MYKLVLIRHGESTWNLENRFTGWTDVDLTPTGVSQAMSAGKLLKAEGYEFDLAFTSVLKRAIHTLWYTLDEMDCTWLPVVKDWRLNERHYGALQGLNKADMAKQYGDEQVLVWRRSYDTPPPALEATDPRSERGDRRYAGVAAENVPLTECLKDTVARVLPFWNEAMAPAIRSGKRVVVAAHGNSIRALVKYLDNISETDIVGLNIPNGIPLVYELDADLKPIRHYYLGDAEAAAKAAAAVASQGKA

SEQ ID NO: 182728 - protein, 220 aa, Unknown
  Bacterial polypetide isolated from the Sargasso Sea
FTGWVDVDLSEKGKEEAKKSGELISELNIKIDISYTSYLKRAIETLTIILKTLNLSMKFNTAWELNERHYGSLTGLNKEETRKKIGEEQFKKYRRSWDVAPPLMAKDSNYLENFSPLNDGIPKNKIPFTESLKHTYERVVPFYNFEIKKNLENKKNILISAHGNSLRALCKYLFKISDIKITELEIPTGNPLIIDFDNQLKIQKYYYLDKSRSKDIIFNQ

SEQ ID NO: 182729 - protein, 328 aa, Unknown
  Bacterial polypetide isolated from the Sargasso Sea
TIVGRYFSMDRDNRWERIKKAYDLIYNGVGKKTNNICDEIRESYKNNITDEFINPIIKTDINGENIHRFNNDDIVIFFNYRSDRGRQLTSAMCEKDLIDFGMKSVTKNFYTLTNYDDTFKVVKPIFKKNILKNTLGEILSKNQILQLRIAETEKYPHVTYFFNGGIEESFLGEERILCPSPKVATYDLKPEMSAKEVTQNVITEIKKNKFGFICLNFANPDMVGHTGNLKAAVEACESVDKSLGKIVDVANLNDYVTIIIADHGNCEIMINSDGTENTSHTVNPVPIIIVNSNSNKINNGILADIAPTVLDIMGVQKPDEMTGKSLIN

SEQ ID NO: 182730 - protein, 277 aa, Unknown
  Bacterial polypetide isolated from the Sargasso Sea
MTKKYFGTDGIRGRVGEFPITPDFMLKLGWAAGMAFRSMGACRILVGKDTRISGYMFESALEAGLSAAGADVMLLGPMPTPAIAYLTRTFHAEAGIVISASHNPHDDNGIKFFSGQGTKLPDEIELMIEELLDAPMTVVESSKLGKVSRINDASGRYIEFCKSSVPSSTNFAGLKIVVDCAHGATYKVAPSVFKELGAQVTVLSAQPNGLNINDNCGSTHMEQLQAAVLAEHADLGIAFDGDGDRVLMVDHTGMIVDGDDLLFIIARDLHERNKVQG

SEQ ID NO: 182731 - protein, 253 aa, Unknown
  Bacterial polypetide isolated from the Sargasso Sea
MITASHNPYFDNGLKLFGPDGLKLSDTIEKRIEKLIDSKITKNLSKPNLLGRVKRLENANDRYIEILKSNFPNSFSLKGIKIAIDCANGAGYKSGPKLLTSLGAKVYNTGTSPNGLNINQNCGSTFPKKIKSLVKKYKVDLGISLDGDADRIILCDEKGTIVDGDQIIAMLADRWKRKKILRGGVIGTLMSNYGLQNYFKEKKINFIRAKVGDRYVKEKMKKNRFNLGGEQSGHIILGKFATTGDGLLVALEV

SEQ ID NO: 182732 - protein, 323 aa, Unknown
  Bacterial polypetide isolated from the Sargasso Sea
RIYTRASSCIRFGISWNAYITLAPLPTNGLAMLTKKMRANLGIMITASHNPFHDNGLKLFGPDGMKLSDKIEKKIENLIDTKTVNQLSEPKSLGRVKRLEDGNERYINILKNNFPADFSLRGMRIVLDCANGAGYKSAPKILTELGAKVFSIGTKPNGLNINYNCGSTFPEIVKRYVKKFKADLGISLDGDADRVIMCDEKAQIVDGDQIIAMIAKRWKRKKILKGGVIGTLMTNYGLEKFFSREKIKFKRSKVGDRYVKEMMKKYNFNLGGEQSGHIILGKFATTGDGLLVALETLFALKKGKLASEIFKVYKSVPQKLLTS

SEQ ID NO: 182733 - protein, 443 aa, Unknown
  Bacterial polypetide isolated from the Sargasso Sea
MTKKYFGTDGIRGAINSKNINGDMFFKFGLASGTYFKSQKKRKQTAIIAKDTRLSGYTLEPALVSGLASSGMHVYTLGPLPTNGLAMLTKVMKANMGIMITASHNPHHDNGLKLFGPDGMKLSDKIEKKIESLIDKKIKKNLSKPEKLGRVKRLETGTKDYIKILKKNFTKEFNLSGLKIVIDCANGAGYKAGPELLRSLGAKVIAIGINPNGLNINKNCGSTFPEKIRSMVKKYKADIGISLDGDADRIIMCDEKSNIIDGDQIIAALASRWKKKKMLKGGVVGTLMSNYGLERYLKKERIKFIRANVGDRYVKEKMQKNRFNLGGEQSGHIILGKFATTGDGLLVALECLFALRKGKKASVFFEKFKKTPQILKNIEVKDKTIINRSEIKNSIKLATKLIKGNGRILVRKSGTESKIRIMAESENENLLSKCLNIVSKKIK

SEQ ID NO: 182734 - protein, 445 aa, Unknown
  Bacterial polypetide isolated from the Sargasso Sea
MSERKFFGTDGIRGKVGSGQMTPELALKLGWAAGRVLSRSGTKKVIIGKDTRISGYMFESALEAGLSAAGLNVMLMGPMPTPAVAYLTRTFRAEAGVVISASHNPYYDNGIKFFSTDGSKLDDNLELEIEAELEKPLECVESHLLGKVSRIEDARGRYIEYCKGNFPADQTLTGLKIVVDCAHGATYHIAPAVFRELGAEVITIGDKPNGVNINDKVGATSMAKICETVLTEGADLGIALDGDGDRIMMVNSRGEVIDGDQILYILACDAKARGVLRGGVVGTLMSNLGLDLALQALDIPFARSKVGDRYVMELLKELDWRIGGENSGHILNLDHGTTGDGIVAGILVLAAMRRQNATLEQLTAPMEMLPQVLVNVRFEGEHDPLSSDKVKAAQAQVESQLGARGRVLLRKSGTEPLIRVMVEGDDHNTVLAHANLIADAVKSAS

SEQ ID NO: 182735 - protein, 443 aa, Unknown
  Bacterial polypetide isolated from the Sargasso Sea
MTKKYFGTDGIRGAINSKNINGDMFFKFGLASGTYFKSQKKKKQIAIIAKDTRLSGYSLEPALVSGLASAGMHVYTLGPLPTNGLAMLTKAMRANMGIMITASHNPHNDNGLKLFGPDGMKLSDKIEKKIESLIDKKIIKNLSKPEKLGRVKRLETGTNDYIKILKKNFTKEFNLRGLRIVIDCANGAGYKAGPELLKSLGAKVIAIGVNPNGLNINKNCGSTFPEKIKSAVKKHKAHLGISLDGDADRIIMCDEKSNIIDGDQIIAALATRWKNKKMLKGGVVGTLMSNYGLEKYFKKKGIKFIRANVGDRYVKEVMQKNKFNLGGEQSGHIILGKFATTGDGLLVALESLFALRKGKRASEFFENFNKTPQLLKNIEVKDKNIINKPEIKKAIKLASKLITGSGRILVRKSGTESKIRIMGESENKRLLVKCVNIISKKIR

SEQ ID NO: 182736 - protein, 348 aa, Unknown
  Bacterial polypetide isolated from the Sargasso Sea
MGKKYFGTDGIRGRVNQEKINGEMFFKFGLAAGIYFKNQKKSKQIAIIAKDTRLSGYILEPALVSGLASAGMHVFTFGPLPTNGLAMLTKKMKANMGIMITASHNPYHDNGLKLFGPDGLKLSDRIEKKIEKLIDSKIADKLSNPKILGRVKRLEDGSKKYIEILKTNFPNQFNLRGLKIAIDCANGAAYKVGPQLLRSLGAIVYEIGTSPNGFNINNKCGSTFPNKIRNLTKKNRAHIGISLDGDADRIIVCDERGNIVDGDKIIAMLAERWKRKKILRGGVVGTLMSNYGLEKFFKKNKIKFLRSNVGDRYVKELMQKNKFNLGGEQSGHIILGNFATTGDGLLVA

SEQ ID NO: 182737 - protein, 444 aa, Unknown
  Bacterial polypetide isolated from the Sargasso Sea
MRNKYFGTDGIRGTVNQGNITGEKFFKFGLASGTYFKNQKKNKQIAVIAKDTRLSGYTLEPALVSGLVSGGMHVFTLGPLPTNGLAMLTKSMKANMGIMITASHNPYHDNGLKLFGPDGMKLSDKIEKKIEKLIDAKNTKQLTNPKLLGRVKRLEDGNDKYIKILKSNFPNNFNLKGTKIVLDCANGACYKAAPKLLSELGAKVITIGVKPNGLNINYKCGSTHPSKIKFFVKKYKANVGISFDGDADRIIMCDEKGKIINGDQIIAMLARRWKSKKILRGGVIGTLMSNYGLEQFLKKENIKFFRAKVGDRYVKEKMKKLNFNLGGEQSGHIILGKFATTGDGLLVALEVLFSLRKGIKASKLLNVFKPLPQILENIDVKNKNILNSYKCRIAIRLANKAMEKNGRILVRKSGTEPKIRIMAESYNKNLISKCIKIIKKSILN

SEQ ID NO: 182738 - protein, 341 aa, Unknown
  Bacterial polypetide isolated from the Sargasso Sea
MKNKYFGTDGIRGTVNQGNITGEKFFKFGLASGTYFKNQKKSKQIAIIAKDTRLSGYTLEPALVSGLVSGGMHVFTLGPLPTNGLAMLTKSMKANMGIMITASHNPYYDNGLKLFGPDGMKLSDKIEKKIEKLIDAKNTKQLTNPNLLGRVKRLEDGNDRYINILKNNFPSNFHLKGTKIVLDCANGACYKAAPKLLKELGAKVISMGVNPNGLNINEKCGSTYPSKIKAAVKKNKANVGIAFDGDADRVIMCDEKGKIIDGDQIIAMLARRWKLKKILKGGVIGTLMSNYGLEKFLNNEKIRFSRSKVGDRYVKEKMKKLNYNLGGEQSGHIILGKLPTT

SEQ ID NO: 182739 - protein, 440 aa, Unknown
  Bacterial polypetide isolated from the Sargasso Sea
MSKKYFGTDGIRGRVNSKNINGDMFFKFGLAAGTYFKNLKKSKQTAIIAKDTRLSGYTLEPALVSGLASAGMHVFTLGPLPTNGLAMLTKKMKANMGIMITASHNPYFDNGLKLFGPDGMKLSDKIEKKIEKLIDSRIIGYLSKPESLGRVKRLENANEKYIKILKRNFPKNFSLKGIKIAIDCANGAGYKSGPKLFKSLGAKVYEIGTSPNGLNINDKCGSTFPNKIRSFVKKYRVNLGISLDGDADRIILCDEKGNIIDGDQIIAMLATRWKRKKILRGGVIGTLMSNYGLQNYLSEKKIRFIRANVGDRYVKEKMQKNKYNLGGEQSGHIILGKFATTGDGLLVALEVLFSMRKGRKASELFKIFKTTPQILENVAVNDKSIINSTKCRRAINQANKLIKDKGRMLVRKSGTEPKIRIMCESENRTLLLKCINIVKK

SEQ ID NO: 182740 - protein, 443 aa, Unknown
  Bacterial polypetide isolated from the Sargasso Sea
MTKKYFGTDGIRGKVNQNKINGEMFFKFGLAAGTYFKNQKKFKQTAIIAKDTRLSGYSLEPALVSGLASAGMHVYTLGPLPTNGLAMLTKKMKANLGIMITASHNPYYDNGLKLFGPDGLKLSDKIEKKIEKLIDIKIVKNLSEPKILGRVKRLEDANDRYIKILKKNFPSNFSLKGMKIVIDCANGAAYKSGPKLFRTLGAKVFEYGASPNGFNINQNCGSTFPNKIKRLVKKHNAHIGISLDGDADRIIISDEKGNIIDGDQIIAMLATRWKRKKILKGGVIGTLMSNYGLQNYFKSKKIRFIRANVGDRYVKEKMQINNFNLGGEQSGHIILGKFATTGDGLLVALEVLFSMRKGVKASQLFNLFKLTPQILENIKVKDKSIINSNKCKIAIMKAEKLIKNNGRMLIRKSGTEPKIRIMGESNNINLLRNCINIVKKSIN

SEQ ID NO: 182741 - protein, 443 aa, Unknown
  Bacterial polypetide isolated from the Sargasso Sea
MPKKYFGTDGIRGAINSKNINGDMFFKFGLASGTFFRSQKKNKQVAVIAKDTRLSGYMLEPALVSGLTSAGMHVYTLGPLPTNGLAMLTKTMKANMGIMITASHNPHYDNGLKLFGPDGMKLSNKIEKKIEHLIDQHIEKNLSEPEKLGRVKRLETGTRDYIKILKKNFSEEFNLRGLRIVIDCANGAGYKAGPELLKSLGAKVIAIGVEPNGMNINKNCGSVYPQNIKRAVKKYKAHIGISLDGDADRVIMCDEKSNIIDGDQIIAALASRWKNKKMLKGGVVGTLMSNYGLEQYFKTLNINFIRANVGDRYVKEKMQKHKFNLGGEQSGHIILGKFATTGDGLLVALEALFALRKGKKASVFFSKFKKIPQILKNIDVKDKNIINKSEIKNSIKIAEKLIKGHGRILVRKSGTESKIRVMGESENVDLLEKCLNIIVKKIK

SEQ ID NO: 182742 - protein, 298 aa, Unknown
  Bacterial polypetide isolated from the Sargasso Sea
MARKYFGTDGVRGKVGEYPITPDFVMKLGWAAGKVLSKKGTRKVLIGKDTRISGYMLESALEAGLSAAGLKAILMGPMPTPAVAYLTRTFRAEAGIVISASHNPYYDNGIKFFSADGTKLPDEVEMAIEAELDHELKCVESAELGKALRIDDAAGRYIEFCKSTFPSNLSLEGLKMVVDCGHGATYHIAPSVFRELGAEVIAIGCSPDGLNINDGVGSTAPEALAAKVLECKADLGVAFDGDGDRLVMVDNTGYIIDGDEILYIIARDALRNGRLKGGVVGTLMANMGLELALQTLGI

SEQ ID NO: 182743 - protein, 445 aa, Unknown
  Bacterial polypetide isolated from the Sargasso Sea
MTKKYFGTDGIRGAVNSKYINGDMFFKFGLASGTYFKSQKKRKQTAIIAKDTRLSGYTLEPALVSGLASAGMHVYTLGPLPTNGLAMLTKEMKANMGIMITASHNPHFDNGLKLFGPDGMKLSDKIEKKIEGLIDKKISKNLSHSEKLGRVKRLETGTKKYIKILKKNFTKEFNLRGLRIVIDCANGAGYKAGPELLKSLGAKVIAIGIKPNGLNINKKCGSTFPRNIRSAVKKYKAHIGISLDGDADRIIMCDEKSNIIDGDQIIAALATRWKNKKMLKGGVVGTLMSNYGLEKYFKSKGIKFLRANVGDRYVKEKMQKYNFNLGGEQSGHIILGKFATTGDGLLVALEALFALRKGKKASEFFDQFKKTPQLLENIEVKDKNIINKPEIKKIIKNADKLIKGNGRILVRKSGTESKIRVMGESENKALLYKCVNMITKKIKKN

SEQ ID NO: 182744 - protein, 450 aa, Unknown
  Bacterial polypetide isolated from the Sargasso Sea
MSRKYFGTDGVRGKVGKFPITPDFAMKLGWAAGTVLASTGTKEVLIGKDTRSSGYMLESAMEAGFSAAGVNVALIGPMPTPAVAYLASTFRADAGVVLSASHNPFYDNGIKFFSNTGTKLNDAQELEIEALLEQALERNALQCVASEKLGKVRRIDDAAGRYIEFCKGTFPNHLSLAGLKIVVDSAHGAAYHIAPNVYRELGAEVISINDKPNGVNINDHCGATHLDSLQSAVMIHEADLGIALDGDADRVMFVDHNGHVVDGDEILFILAQAVYQKGEMQGGVVGTLMSNLGLELALKQMDIPFVRAKVGDRYVVEQLKQTGWKLGGEGSGHILSLQHASTDDGIVASLQVLKAVLESGKRLAELKAGMTKLPQLLINVRLTSGSADSILAKDSVKQAVLTAEEVLGDKGRVLLRKSGTEPLIRVMVESTDIALTQQQAEYIAEAVRAA

SEQ ID NO: 182745 - protein, 394 aa, Unknown
  Bacterial polypetide isolated from the Sargasso Sea
MSKKYFGTDGIRGKVNQGNINGEMFFKFGLAAGTYFKNLKKTKQTAIIAKDTRLSGYTLEPALVSGLASAGMHVYTLGPLPTNGLAMLTKIMKANMGIMITASHNPYYDNGLKLFGPDGLKLSDTIEKKIEKLIDSNITKNLSNPKILGRVKRLEDANDRYIEILKSNFPRNFKLKGIKIAIDCANGAGYKSGPKLLKSLGAKVYQVGISPNGLNINQNCGSTFPKKIKSLVKKYKVNLGISLDGDADRIILCDEKGNIVDGDQIIAMLAKRWKRKKILKGGVIGTLMSNYGLQNYFREQKIRFVRANVGDRYVKEKMRKNKFNLGGEQSGHIILGKFATTGDGLLVALEVLFSMRKGKKASELLNIFKPMPQILENITVGDKNIINKFKCKRA

SEQ ID NO: 182746 - protein, 449 aa, Unknown
  Bacterial polypetide isolated from the Sargasso Sea
MESSVQKRYFGTDGIRGRVNEFPMTAENALKIGMAAGQFFKNNKKKVHRVVIGKDTRLSGYMFENALTAGLTSMGMNVLLLGPVPTPAVGILTPSMRADLGIMISASHNPHEDNGIKFFGPDGFKLSDEAEQNIEELIGKELSNVGLIDIGRAKRIEDGLFRYVERVKSSFPSGMRLDGMKVVIDCANGAGYRAAPEVLWELGADVIPIGVNPNGLNINKNCGSTNTQRAAEAVVSHGADVGICLDGDADRIILIDSDGNIADGDQIMGVIASRWSQDGLLAGSGIATTVMSNLGLERFLNQRGISMERTQVGDRYVVERMRKSGFNLGGEQSGHIILSDFSTTGDGLIAGLQFLAEIIRSERSSKELAHVFEPVPQLLKNASFRVGSDPLAKPNVIKAIKAAEAKLKNNGRLLIRKSGTEPLIRVMAESEDEEKMTRAVDSVVAEITA

SEQ ID NO: 182747 - protein, 443 aa, Unknown
  Bacterial polypetide isolated from the Sargasso Sea
MTKKYFGTDGIRGKVNQTKINGEMFFKFGLAAGTYFKNQKKSKQTAIIAKDTRLSGYTLEPALVSGLASAGMHVYTLGPLPTNGLAMLTKKMKANMGIMITASHNPYYDNGLKLFGPDGLKLSDKIEKKIEKLIDSKIAKNLSEPKILGRVKRLEDANDKYIKILKDNFPRGFKLKGMKIAIDCANGAGYKSGPKLLRSLGAKVIEYGTSPNGLNINDNCGSTFPQKIKSLVRKNKAHIGISLDGDADRIIVSDEMGNIVDGDKIIAMLATRWKRKKILKGGVIGTLMSNYGLQNFFRDQKIKFIRANVGDRYVKEKMQKENFNLGGEQSGHIILGKFATTGDGLLVALEILFSMRKGKKASELFDLFKLTPQILENVKVKDKSIINSTKCKVAIKKSERIIKNYGRMLVRKSGTEPKIRIMGESNNIHLLKKCINIVKRSIK

SEQ ID NO: 182748 - protein, 338 aa, Unknown
  Bacterial polypetide isolated from the Sargasso Sea
MSKKYFGTDGIRGEVNKGNINGEMFFRFGLAVGTYFKNIRKTKQTAIIAKDTRLSGYALEPALVSGLASAGMHVYTLGPLPTNGLAMLTKKMRANMGIMITASHNPYYDNGLKLFGPDGLKLSDNIERKIEKLIDSKIIKNLSIPSALGRVKRLENANEKYIQILKKNFPKNFSLSGTKIAIDCANGASYKSGPKLFKSLGAKVYDIGTSPNGININDNCGSTFPDRIKFLVKKHRVNLGIALDGDADRIILCDERGKIIDGDQIIAMLANRWKRKKILKGGVIGTLMSNYGLQNYLKNQRIKFLRAKVGDRYVKEKMQKKKYNLGGEQSGHIILVNC

SEQ ID NO: 182749 - protein, 389 aa, Unknown
  Bacterial polypetide isolated from the Sargasso Sea
KYFGTDGIRGAINSKNINGDMFFKFGLASGTYFKSQKKRKQTAIIAKDTRLSGYTLEPALVSGLASAGMHVYTLGPLPTNGLAMLTKAMRANMGIMITASHNPHNDNGLKLFGPDGMKLSDKIEKKIESLIDKNIIKNLSKPEKLGRVKRLETGTDDYIKILKKNFTKEFNLRGLRIVIDCANGAGYKAGPELLKSLGAKVIAIGVDPNGLNINKNCGSTFPGKIKSAVKKYKAHIGISLDGDADRIIMCDEKSNIIDGDQIIAALATRWKNKKMLKGGVVGTLMSNYGLEKYFRKKGIKFIRANVGDRYVKEIMQKNKFNLGGEQSGHIILGKFATTGDGLLVALESLFALRKGKRASEFFEKFKKTPQLLKNIEVKNKNIINKPEIK

SEQ ID NO: 182750 - protein, 445 aa, Unknown
  Bacterial polypetide isolated from the Sargasso Sea
MSERKFFGTDGIRGKVGSGQMTPELALKLGWAAGRVLSRSGTKKVIIGKDTRISGYMFESALEAGLSAAGLNVMLMGPMPTPAVAYLTRTFRAEAGVVISASHNPYYDNGIKFFSTDGSKLDDNLELEIEAELEKPLECVESHLLGKVSRIEDARGRYIEYCKGNFPADHTLTGLKIVVDCAHGATYHIAPAVFRELGAEVIAIGDKPNGVNINDKVGATSMAKICETVLAESADLGIALDGDGDRIMMVNSKGEVIDGDQILYILACDAKARGVLRGGVVGTLMSNLGLDLALQALDIPFARSKVGDRYVMELLKELDWRIGGENSGHILNLDHGTTGDGIVAGILVLAAMRRQNATLEQLTAPMEMLPQVLVNVRFEGEHDPLSSDKVKAAQAQVESQLGARGRVLLRKSGTEPLIRVMVEGDDHNAVLAHANLIADAVKSAS

SEQ ID NO: 182751 - protein, 311 aa, Unknown
  Bacterial polypetide isolated from the Sargasso Sea
MKAILQSLEDLKGSTLVVGGDGRYGNIEAIEKIVQICIAHKVQKVIVPKFGLLSTPATSHLIRKENAIGGIILSASHNPGGIDGDFGVKLNISNGGPAPEIITNKIFKASQLLTSYKICKIQLPDFCEYGTYFYDETTLEIIDGLTDYSNLMEKIFDFDKISDFLKKDFSLIFDAMNAVTGPYAKNIFVEKMGLAPDCVMNGTPLKDFGGLHPDPNLTYASHLADLLLNKKSYSFGAACDGDGDRNMILGSGCFVNPSDSLAVITANTKCVPGYKDGITGVARSMPTSSAVDNVARALNIPCFETPTGWKF

SEQ ID NO: 182752 - protein, 311 aa, Unknown
  Bacterial polypetide isolated from the Sargasso Sea
ASHNPGGIDGDFGVKLNISNGGPAPEIITNKIFKVSKLLTSYKICKIQLPDFSKYGTYSYGETTLEIIDGLKDYSNLMEKIFDFDQISDFLKTDFSLIFDAMNAVTGPYAKNIFVEKMGLAHDCVMNGNPLRDFGGLHPDPNLTYASHLADLLLNKKVYSFGAACDGDGDRNMILGSACFVNPSDSLAVITANTKCVPGYKDGITGVARSMPTSSAVDNVARALNIPCFETPTGWKFFGNLLDSNLITLCGEESFGTGSNHVREKDGLWAVLYWLQVLAEKKCSVSDLMQNHWKQFGRNYYSRHDYEAIPS

SEQ ID NO: 182753 - protein, 279 aa, Unknown
  Bacterial polypetide isolated from the Sargasso Sea
KNIFVEKMGLAPDCVMNGNPLKDFGGLHPDPNLTYASHLADLLLNKKSYSFGAACDGDGDRNMILGSGCFVNPSDSLAVITANTKCVPGYKDGITGVARSMPTSSAVDNVARALNIPCFETPTGWKFFGNLLDSNLITLCGEESFGTGSNHVREKDGLWAVLYWLQVLAEKKCSVSDLMQNHWNQFGRNYYSRHDYEAIPSNIANQIFGNLTSMLENLKGNIFAGHLVKVADNFSYLDPVDNSISENQGLRLVLDDNSRIIVRLSGTGTKGATLRLYFE

SEQ ID NO: 182754 - protein, 285 aa, Unknown
  Bacterial polypetide isolated from the Sargasso Sea
RLGNTQVEVIDSVADYANLMESIFDFPKIAALLGNARFHMRFDAMHAVTGPYAVEILEKRLGAEAGTVINGTPSENFGGGHPDPNQVHAAELVSMMNSDEALAFGAASDGDGDRNMVMGSGFYINPCDSLAVMAANAKLIPGYRDGLAGVARSMPTSRALDRVAARLEIPCYETPTGWKFFGSLMDAGKMTICGEESFGTGSNHVREKDGLWAVLFWLNLIAVRGQPARSIVRDHWESFGRDFFSRHDYEGVDSQAAQALVDKLREKLPELSGQVFAGLQIEQAE

SEQ ID NO: 182755 - protein, 304 aa, Unknown
  Bacterial polypetide isolated from the Sargasso Sea
GTSGLRKSTLSFQEEHYLEVFIEAILQSLEDLKGSTLVVGGDGRYGNIEAIEKIVQICIAHKVQKVIVPKYGLLSTPATSHLIRKENAIGGIILSASHNPGGIDGDFGVKLNISNGGPAPEIITNKIFKASQLLTSYKICKFQLPDFSEYGIYTYDETTLEIIDGLTDYSNLMEKIFDFDQISDFLKNDFSLIFDAMNAVTGPYAKNIFVEKMGLPPDCVMNGNPLKDFGGLHPDPNLTYASHLADLLLNKKSYSFGAACDGDGDRNMILGSGCFVNPSDSLAVITANTKCVPGYKDVLQVGTI

SEQ ID NO: 182756 - protein, 266 aa, Unknown
  Bacterial polypetide isolated from the Sargasso Sea
MTKVNVININSPFLDQKPGTSGLRKSTLKFQEEHYLEIFIEAILQSLEDIHFSTLVVGGDGRYGNIEAIEKIIQICIAHKVQKVIVPKHGLLSTPATSHLIRKEKAIGGIILSASHNPGGIDGDFGVKLNISNGGPAPEIITNKIFKASQLLTKYKICKIQLPDFSSYGTYSYGETTLEIIDGLKDYSNLMEKIFDFDQISDFLKKDFSLIFDAMNAVTGPYAKNIFVEKMGLAPDCVMNGTPLKDFGGLHPDPNLTYASHLADLL

SEQ ID NO: 182757 - protein, 301 aa, Unknown
  Bacterial polypetide isolated from the Sargasso Sea
ASFTDAVFECTKTLEQYTIVEAPEIPLDAPGLHSIGAMQVEVIDGVDDFVDLMQELFNFDQIRDLLRSDFPLAFDAMHAVTGPYATRLFEGLLGAPAGSVRNGTPLEDFGNGHPDPNLTYAHDLAELLLEGDEYRFGAACDGDGDRNMILGQRCFVNPSDSLAVLTANATVAPAYADGLAGVARSMPTSAAVDVVAKELGIDCFETPTGWKFFGNLLDAGKITLCGEESFGTGSNHVREKDGLWAVLFWLQILAVRRCSVAEIMAEHWKRFGRHYYSRHDYEAVASDAAHGLYDRLESMLP

SEQ ID NO: 182758 - protein, 301 aa, Unknown
  Bacterial polypetide isolated from the Sargasso Sea
PSTLRALLGAPSGTVRNGGCLEDFGGGHPDPNLTYAKDLAALLLDGDNYRFGAACDGDGDRNMILGQRCFVNPSDSLAVLTANATLAKGYASGLAGVARSMPTSAAVDVVAKQLGINCFETPTGWKFFCNLLDAGRITLCGEESFGTGSDHIREKDGLWAVLFWLSILAKRQCSVAEVMQQHWSTYGRHYYSRHDYEGVDTDKAHGLYDSLRDRLGNLAGTSFADSNIASADDFAYSDPVDGSLTQKQGLRLLLEDGSRVILRLSGTGTKGATLRLYLERYVATGGNLAQNPQQALAGMIA

SEQ ID NO: 182759 - protein, 267 aa, Unknown
  Bacterial polypetide isolated from the Sargasso Sea
GAAHGLSKVIVTTGGILSTPAASNLIRKRQAIGGIILSASHNPGGPEGDFGVKVNGSNGGPTPATFTDAVFECTKTLEQYSIVDAATIPLDSTGLHSIGAMQVEVIDGVDDFVALMQELFNFEQIRDLIRSDFPLAFDAMHAVTGPYATRLFEGLLGAPAGSVRNGVPLENFGGGHPDPNLTYAHELAELLLEGDAYRFGAACDGDGDRNMILGQRCFVNPSDSLAVLTANATLAPAYASGLAGVARSMPTSAAVDVVAKELGIACF

SEQ ID NO: 182760 - protein, 230 aa, Unknown
  Bacterial polypetide isolated from the Sargasso Sea
MTTSAPAEPTLRLVRLDAPFTDQKPGTSGLRKSSQQFEQANYLESFVEAVFRTLPGVQGGTLVLGGDGRYGNRRAIDVILRMGAAHGLSKVIVTTGGILSTPAASNLIRQRQAIGGIILSASHNPGGPDGDFGVKVNGANGGPTPASFTDAVFECTKTLEQYTIVDAAAITIDTPGSHSIGAMQVEVIDGVDDFVALMQQLFDFDRIRELIRSDFPLAFDAMHAVTGPYA

SEQ ID NO: 182761 - protein, 286 aa, Unknown
  Bacterial polypetide isolated from the Sargasso Sea
MEYATFRIPRTGIMSTPAVSAAIRTRAGGICQGGIILTASHNPGGPGEDFGIKYNLEFGQPAGEDFTDDLYDRTLKITSFQTLTESPSLDLNASVGTTYQLTSTSTVTIIDPFEEYVQVLKSCFDFEALQKFAQRDDFSLIFDGMHGAGGPFAQRVLVEELGLPDSCLMRCNPLPDFGKGHPDPNLSYAADLVQKMGLLPDGSANPKVDLSTLPTLGAANDGDGDRNLIAGAGCFVTPSDSLAMICDNWAAIPHFAKAGGPKGVARSMPSSAALDVVAAARGHSVL

SEQ ID NO: 182762 - protein, 263 aa, Unknown
  Bacterial polypetide isolated from the Sargasso Sea
GGILSTPAASNLIRKRQAIGGIILSASHNPGGPDGDFGVKVNGANGGPTPASFTDAVFECTKTLEQYTIVEAAAVPLEAPGLHSIGAMQVEVIDGVDDFVALMQELFDFERISDLIRSDFPLAFDAMHAVTGPYASRLLEEMLGAPAGSVRNGVPLEDFGGGHPDPNLTYAAELADLLLNGDAYSFGAACDGDGDRNMILGKRCFVNPSDSLAVLTANATVVPAYASGLAGVARSMPTSSAVDVVAKELGIDCYETPTGWKFF

SEQ ID NO: 182763 - protein, 231 aa, Unknown
  Bacterial polypetide isolated from the Sargasso Sea
SGLAGVARSMPTSAAVDVVAKELGIDCFETPTGWKFFGNLLDAGRITLCGEESFGTGSNHIREKDGLWAVLFWLQILAERRCSIAEIMAEHWKRFGRHYYSRHDYEAVPSDAAHGLYNRLEGMLPGLIGQSLAGRSISGADNFSYTDPVDGSVTKGQGLRILLEDGSRVVVRLSGTGTKGATIRVYLESYVPSTGDLNQDPQIALADMISGINALAEIQERTGMDRPTVIT

SEQ ID NO: 182764 - protein, 276 aa, Unknown
  Bacterial polypetide isolated from the Sargasso Sea
MIQVSEININSPFLDQKPGTSGLRKSTLKFQEENYLEVFIEAILQSLDDLKGSTLVVGGDGRYGNIEAIEKIVQICIAHKVQKVIVPKDGLLSTPATSHLIRKENAIGGIILSASHNPGGIDGDFGVKLNISNGGPAPEIITNKIFKASQLLTSYKICKIQLPDFSEYGTYSYGETTLEIINGLTDYSNLMEKIFDFDQISDFLKKDFSLIYDAMNAVTGPYAKNIFVEKMGLAHDCVMNGNPLKDFGGLHPDPNLTYASHLADLLLNKKSYSFGA

SEQ ID NO: 182765 - protein, 264 aa, Unknown
  Bacterial polypetide isolated from the Sargasso Sea
MTQVNVININSPFLDQKPGTSGLRKSTLKFQEEHYLEIFIEAILQSLEDLKGSTLVVGGDGRYGNIEAIEKIVQICIAHKVQKVIVPKYGLLSTPATSHLIRKEKAIGGIILSASHNPGGIDGDFGVKLNISNGGPAPEIITNKIFKASQLLTSYKISKIQLPEFSKYGKYSYGETTLEVIDGLKDYSNLMEKIFDFDQISDFLKKDFSLIFDAMNAVTGPYAKNIFVEKMGLAHDCVMNGNPLKDFGGIHPDPNLTYASHLAD

SEQ ID NO: 182766 - protein, 432 aa, Unknown
  Bacterial polypetide isolated from the Sargasso Sea
MTQVNVININSPFLDQKPGTSGLRKSTLKFQEEHYLEIFIEAILQSLEDLKGSTLIIGGDGRYGNIEAIEKIVQICIAHKVQKVIVPKYGLLSTPATSHLIRKEKAIGGIILSASHNPGGIDGDFGVKLNISNGGPAPELITNKIFKASQLLTNYKICKIQLPEFSEYGTHSYGETTLEIIDGLKDYSNLMEKIFDFDQISDFLKKDFSLIFDAMNAVTGPYAKNIFVEKMGLAHDCVMNGNPLKDFGGLHPDPNLTYASHLADLLLNKKSYSFGAACDGDGDRNMILGSACFVNPSDSLAVITANTKCVPGYKDGITGVARSMPTSSAVDNVARALNIPCFETPTGWKFFGNLLDSNLITICGEESFGTGSNHVREKDGLWAVLYWLQVLAEKKCSVSDLMQNHWQQFGRNYYSRHDYEAIPLNIANQIFW

SEQ ID NO: 182767 - protein, 398 aa, Unknown
  Bacterial polypetide isolated from the Sargasso Sea
MATVTVKEVATTPIEGQKTGTSGLRKKAAVFSEGNYLANWVQSLFSALPRDDVEGSSMVLGGDGRWFNKEASQIILKLAAGNGVKKMYVGRDGYLCTPAASAVIRAREAFGGFIMSASHNPGGPTEDWGIKFNYSSGEPAPEKITDAIYGFTQTVDTLKMADIPDVDLSVCGVTKFGDFEVEVIDPVDDYLKLLKQVFDFDLIKSLLTRPDFKMQFDAMHAITGAYAKPIFVDVLGADANSVVNGVPKEDFAGGHPDPNLTYAEELVKVMYSADAPDFGAASDGDGDRNMILGNNFFVTPSDSVAIIAANAVDCIPYFKSGLKGLARSMPTAAALDRVAAGLGVECFETPTGWKFFGNLMDAGRLSVCGEESFGTGADHVREKDGPWAVLAWLSILAY

SEQ ID NO: 182768 - protein, 545 aa, Unknown
  Bacterial polypetide isolated from the Sargasso Sea
MNQVSVININSPFLDQKPGTSGLRKSTLKFQEDHYLEVFIEAILQSLEDLQGSTLVVGGDGRYGNIEAIEKIVQICIAHKVQKVIVPKYGLLSTPATSHLIRKENAIGGIILSASHNPGGIDGDFGVKLNISNGGPAPEIITNKIFKASQLLTSYKICKIQLPDFSEYGTYPYDETTLEIIDGLTDYSNLMEKIFDFDQISDFLKKDFSLIFDAMNAVTGPYAKNIFVEKMGLSPDCVMNGYPLKDFGGLHPDPNLTYASHLADLLLNKKSYSFGAACDGDGDRNMILGSGCFVNPSDSLAVITANTKCVPGYKDGITGVARSMPTSSAVDNVARALNIPCFETPTGWKFFGNLLDSNLITLCGEESFGTGSNHVREKDGLWAVLYWLQVLAEKKSSVSDLMQNHWKQFGRNYYSRHDYEAIPANIANQIFGNLTSMLENLKGNSFAGHLVKVADNFSYLDPVDNSISENQGLRLVLDDNSRVIVRLSGTGTKGATLRLYFEKFFNPQQNLSLNPQIALKPLIDDLDALLNISKLTQMKTPTVIT

SEQ ID NO: 182769 - protein, 432 aa, Unknown
  Bacterial polypetide isolated from the Sargasso Sea
LQGSTLVVGGDGRYGNIEAIEKIVQICIAHKVQKVIVPNCGLLSTPATSHLIRKENAIGGIILSASHNPGGIDGDFGVKLNISNGGPAPEMITNKIFKSSQLLTSYKICKIQLPDFSEYGTYIYGETTLEVIDGLEDYSNLMEKIFDFDQISDFLKKDFSLIFDAMNAVTGPYAKNIFVEKMGLANDCVMNGNPLKDFGGLHPDPNLTYASHLADLLLNKKSYSFGAACDGDGDRNMILGSGCFVNPSDSLAVITANTKCVPGYKDGITGVARSMPTSSAVDNVARALNIPCFETPTGWKFFGNLLDSNLITLCGEESFGTGSNHVREKDGLWAVLYWLQVLAEKKCSVSDLMQNHWKQYGRNYYSRHDYEAIPSNIANQIFGNLTSLLENLKGSNFAGHLVQVADNFSYLDPVDDSISDNQGLRLILDDNS

SEQ ID NO: 182770 - protein, 183 aa, Unknown
  Bacterial polypetide isolated from the Sargasso Sea
MKRTVIMMLDSFGVGAAGDAAKFGDLGSDTFGHIAKACAEGKADIGREGPLTLPNLARLGLAHAAMESTGTFAPGFADNVELIGAYGHAQELSSGKDTPSGHWEMAGVPVLFDWGYFSEHQNSFPKELTDKILARAGLDGFLGNCHASGTTILEELGEEHMRSGKPIFYTSADSVFQIACHEG

SEQ ID NO: 182771 - protein, 264 aa, Unknown
  Bacterial polypetide isolated from the Sargasso Sea
MSKAVILVMDSFGIGSAPDAAKFGDVGANTFASISKAFFQAKGRQLQLPHLASLGLVKAGFAASGEMALVEDSPTLLGSYGHARELSSGKDTPSGHWEIAGVPVLFDWGYFHDKQNSFPAELIDELVRRTGVPGILGNCHASGTDILVKLGDEHIKTGKPICYTSADSVFQVAAHEEHFGLDKLLQFCETARELLDSYNIGRVIARPFLGTDISNYARTGNRKDYSVLPPAPTVLDTLTQSGGTVVSIGKIADIYAHQGISKEV

SEQ ID NO: 182772 - protein, 188 aa, Unknown
  Bacterial polypetide isolated from the Sargasso Sea
GGYRSPICWIKDEGWKRTKNRRDYAMLPPGSVLIDWVKASGGKTYAIGKIGDIFSMRNIDFNFTGTDLDLMDQLQKQIGSAEDGSLIFANFVEFDSLFGHRRDPTGYAKALEWFDNEIASLVRNLLEDDLLIITADHGNDPTWSGTDHTREQVPVLIKGKVDLIQSGIEFRDVAELASKHLGVAIPEP

SEQ ID NO: 182773 - protein, 222 aa, Unknown
  Bacterial polypetide isolated from the Sargasso Sea
GLDKLYELCEIAREELTEGGYNIGRVIARPFIGDKAGNFQRTGNRHDLAVEPPAPTVLQKLVDEKDGHVVSVGKIADIYANCGITKKVKATGLDALFDATIKEMKEAGDKTIVFTNFVDFDSSWGHRRDVAGYAAGLELFDRRLPELMELVGEDDILILTADHGCDPTWTGTDHTREHIPVLVYGPKVKPGSLGHRETFADIGQTLAKYFGTSDMEYGKAMF

SEQ ID NO: 182774 - protein, 251 aa, Unknown
  Bacterial polypetide isolated from the Sargasso Sea
LGDEHVKTGKPICYTSADSVFQVAAHEEHFGLDKLLQFCETARELLDSYNIGRVIARPFLGTDASNYARTGNRKDYSVLPPAPTVLDTLTQSGGTVISIGKIADIYAHQGISKEVKATGLAALVDTTLAEMAIAPERSLVFTNLVDFDQNYGHRRDPIGYGEALEYFDTRLPEIMAALDEDAVLLLTADHGCDPTWVGTEHTREYVPVLFYGKNRAAKDLGERASFADMGQTLADYFDLAAMPYGQSFLAS

SEQ ID NO: 182775 - protein, 294 aa, Unknown
  Bacterial polypetide isolated from the Sargasso Sea
MAGVPVLFDWGYFPNTQPCFPQEFVDELIARAEIPGILGNCYASGTTILEKLGEEHMQTGMPICYTSVDSVFQIAAHEESFGLEKLYQVCEIARALLDEMNIGRVIARPFLGSSRDDFARTGNRRDYSVLPPSPTLLDKLSQDGGEVISIGKIADIYAHQGITQKHKAPGLMNLLEKTSEVIASAPDHSLIFTNLVDFDEKYGHRRNAVGYAKALKEFDDYLPTILNQLNSDDVLIITADHGCDPTAAGTDHTREYVPVLAYQPGMTNTPLGERASFADIGQTLAQWFNLPALE

SEQ ID NO: 182776 - protein, 305 aa, Unknown
  Bacterial polypetide isolated from the Sargasso Sea
WSWELAGLPLKWNWKYFENKFRSFSEDQIKPIINKFLLTGILGNCHSSGTEIIKKYGEEHILSLKPIFYTSKDSVVQIACHENIFGLKKLYELCEFSAKVFHPLKVGRVIARPFLGDNSGTFFRTKNRKDYTFPPPNKTLCDLVVENNRSCHAIGKIADIFSNRGISTSVSGLSDDALFYKMIDVIKKAKNGDLIFANFVEFDSLYGHRRDVAGFAAALERFDLKLVKLLEIINPNDFLIITADHGNDPTFKGTDHTREKVPVLMVGNYAQKGNNGNIVFSDVGATMAAFLNLSGKLKGTNIFND

SEQ ID NO: 182777 - protein, 307 aa, Unknown
  Bacterial polypetide isolated from the Sargasso Sea
MAGVPVLFDWGYFPKTQPSFPQEFVDEFIARTGIPGILGNCHASGTTILEQLGEEHVKTGKPICYTSADSVFQIAAHEESFGLEKLYQVCEIARALLDEMNIGRVIARPFLGSNSQDFARTGNRRDYSVLPPAPTLLDVLAKDGGEVISIGKISDIYAHQGITQKHKAPGLMNLLEKTSEVISTAPDRSLIFTNLVDFDEKFGHRRNPVGYAKALKEFDDYLPTILNQLNADDVLMITADHGCDPTFPGSEHTREYVPVIAYKPGMDNTPLGERNSFADIGQTLAQWFNLSELEYGDSFLTQLNAPK

SEQ ID NO: 182778 - protein, 404 aa, Unknown
  Bacterial polypetide isolated from the Sargasso Sea
MKRTVIMMLDSFGVGAAGDAAKFGDLGSDTFGHIAKACAEGKADIGREGPLTLPNLARLGLAHAAMESTGAFAPGFADNVELIGAYGHAQELSSGKDTPSGHWEMAGVPVLFDWGYFSEHKNSFPKELTDKILARAGLDGFLGNCHASGTTILEELGEEHMRSGKPIFYTSADSVFQIACHEGTFGLENLYRLCEIAREELEPYNIGRVIARPFDGTGPSDFARTGNRKDYSLEPPAKTVLDKLKAAGGEVVSVGKIADIYAYCGITKKVKANGLEALFDATLAEVKSAGENTIVFTNFVDFDSHYGHRRDVAGYAKGLEYFDSRLPEMLALLDEDDLLILTADHGCDPTWQGTDHTREYVPVLAYGAGLKAGSLGRRNSFADIGQSIASYFKLEPMEYGESFI

SEQ ID NO: 182779 - protein, 253 aa, Unknown
  Bacterial polypetide isolated from the Sargasso Sea
QLGEEHMKTGKPIFYTSADSVFQIACHEETFGLDKLYELCEIAREELTEGGYNIGRVIARPFIGDKAGNFQRTGNRHDLAVEPPAPTVLQKLVDEKDGHVVSVGKIADIYANCGITKKVKATGLDALFDATIKEMKEAGDKTIVFTNFVDFDSSWGHRRDIAGYAAGLELFDRRLPELMELVGEDDILILTADHGCDPSWTGTDHTREHIPVLVYGPKVKPGSLGHRETFADIGQTLASYFGTSPMDYGKNML

SEQ ID NO: 182780 - protein, 404 aa, Unknown
  Bacterial polypetide isolated from the Sargasso Sea
MKRTVIMMLDSFGVGAAGDAAKFGDLGSDTFGHIAKACAEGKADTGRKGPLALPNLARLGLAHAAMESTGAFAPGFADNVDLIGAYGHAQELSSGKDTPSGHWEMAGVPVLFEWGYFSEHQNSFPKELTDKILARAGLDGFLGNCHASGTTILEELGEEHMRSGKPIFYTSADSVFQIACHEGTFGLENLYRLCEIAREELEPYNIGRVIARPFDGTGPSDFARTGNRKDYSLEPPAKTVLDKLKAAGGEVVSVGKIADIYAYCGITKKVKANGLEALFDATLAEVKSAGENTIVFTNFVDFDSHYGHRRDVAGYAKGLEYFDSRLPEMLALLDEDDLLILTADHGCDPTWQGTDHTREYVPVLAYGAGLKAGSLGRRNSFADIGQSIASYFKLEPMEYGESFI

SEQ ID NO: 182781 - protein, 384 aa, Unknown
  Bacterial polypetide isolated from the Sargasso Sea
MDSVGIGGAPDADKYFNGDVSDFGSNTVLHIAEHMQKKGCPLSLPQLNALGLGSAIYHSVGIEHPNLPVEKAANWAVGIERSLGKDTPSGHWELAGLPVTWDWHYFKDKTNSFPKEILSAICRIAQVDGVLGNKHASGLEIIKEFGQSHVETLRPICYTSADSVFQIAAHETAFGLERLYALCEKLAPVIHNLNVGRVIARPFVGSTDEGWKRTKNRRDYAMMPPRSVLIDWVKASGGKTYAIGKIGDIFSMRNIDHKFTGSDLDLMAQLQKQIKSAEDGSLTFANFVEFDSLFGHRRDPTGYAKALEWFDKEIVTVVKNLLEDDLLIITADHGNDPTWSGTDHTREQVPILIKGKADFIQSAIEFRDVARLASKHLGVAIPDP

SEQ ID NO: 182782 - protein, 236 aa, Unknown
  Bacterial polypetide isolated from the Sargasso Sea
MSKTNKSKSLFNKAKSVMPGGVNSPVRAFGNVNSTPIFIESASGAYLHDVDGNDYVDFIGSWGPMILGHSNPKIIKAIKDQADLGTSYGAPTEAETSIGELIRTVMPSIEKIRMVNSGTEATMSCIRLARGYTGRNKIIKFTGCYHGHVDSLLIKAGSGVSTFGLPDSPGIPEELARHTISVPYNDINAFLEVFESIKSELAAVIIEPIAGNMGFIPGDKDFLETLRTKHMKAVQY

SEQ ID NO: 182783 - protein, 332 aa, Unknown
  Bacterial polypetide isolated from the Sargasso Sea
PVRAFKNVDAKPIFFKSAKGPILIDEDDNQYIDFIGSWGPMILGHSNPVVLNAIRAQLELGTSYGAPTSLESMLASLIKSQVPTMEKLRMVNSGTEATMSCIRLARGYTGKDKIIKFTGCYHGHVDSLLVKAGSGVSTFGLPDSPGIPSKLAALTYSCPYNDIEAVSEVVNEIGGDLAAIIVEPIAGNMGFIPGEHKFLSTLRELCNKSESLLIFDEVMSGFRVALGGAQSIYSIKPDLTALGKVIGAGLPVGSFGGKQSIMDQLAPIGPIYQAGTLSGNPLAMSAGVALLEAVINLNPFDKLQIASSEIMLHIKNLMSEKGMPFSTSSIGG

SEQ ID NO: 182784 - protein, 229 aa, Unknown
  Bacterial polypetide isolated from the Sargasso Sea
SGVILEPIVGNAGFITPEPGFLEGLRELTTENGSLLVFDEVMTGFRISYGGAQEKFGVTPDLTTLGKVIGGGLPVGAYGGKKEIMSMVAPSGPVYQAGTLSGNPLAMTAGIKTLELLKQDGTYDKLDSTTSRLIEGIIQSAENNGFAINGGSVSAMFGFFLCDGPVRNFDEAKTNDAELFGKLHREMLRRGIYLAPSPFEAGFTSLAHSEEEIDKTIEAFDESFNAIKK

SEQ ID NO: 182785 - protein, 308 aa, Unknown
  Bacterial polypetide isolated from the Sargasso Sea
GPYLIDADNNKYIDYIGSWGPMILGHSNPKIIKAVSRQLELGTSYGAPTSIESDTAKLIKKCFPSIQKIRMVNSGTEATMSAIRLARGYTNKTKIIKFDGCYHGHVDSLLIKAGSGVSTFGLPDSPGIPNELAKKTLSCEFNNKDSFLKIFNKVKNDLAAVIVEPIAGNMGFVPGDKSFLKLLRKKTSENNSLLIFDEVMTGFRVSLGGAQELYGIKPDLTTLGKVIGGGLPVGAFGGKKKVMDCLAPNGPVYQAGTLSGNPLAMAAGSTLIKLLVDKNPYKDLERKAKNLLEGMKEIFDRYDIPFST

SEQ ID NO: 182786 - protein, 280 aa, Unknown
  Bacterial polypetide isolated from the Sargasso Sea
MFLVKAGSGVATLGLPDSPGVPRTTTANTLTAPYNDLEAVKKLFSENPDAISGVILEPIVGNAGFITPEPGFLEGLRELTTENGSLLVFDEVMTGFRISYGGAQEKFGVTPDLTTLGKVIGGGLPVGAYGGKKEIMSMVAPSGPVYQAGTLSGNPLAMTAGIKTLELLKQDGTYDKLDSTTSRLIEGIIQSAENNGIAINGGSVSAMFGFFLCDGPVRNFDEAKTNNAELFGKLHREMLRRGIYLAPSPFEAGFTSLAHSEEEIDKTIEAFDESFNAIKK

SEQ ID NO: 182787 - protein, 200 aa, Unknown
  Bacterial polypetide isolated from the Sargasso Sea
CDEYNSLLIFDEVMTGFRLSLGGAQELLNVKSDIVTFGKVIGGGLPVGAFGARNEIMSHLAPDGPIYQAGTLSGNPLAMIAGLTTLKILKNNSSIYESLNAKTITLHKEMKKRLEKKGISYWINSIGSMISLHFTENEVIDFKTASMADNEIFKKYFHGMLNNGIYLPPSQFESYFLNDSLSYRDIDFTLNAFDKVLRSL

SEQ ID NO: 182788 - protein, 280 aa, Unknown
  Bacterial polypetide isolated from the Sargasso Sea
PCVLENKLAEMVIEAVPSVEMVRFVNSGTEACMAVLRLMRAFTGRDKVIKFDGCYHGHADMFLVKAGSGVATLGLPDSPGVPRTTTANTLTAPYNDLEAVKKLFSENPDAISGVILEPIVGNAGFITPEPGFLEGLRELTTENGSLLVFDEVMTGFRISYGGAQEKFGVTPDLTTLGKVIGGGLPVGAYGGKKEIMSMIAPSGPVYQAGTLSGNPLAMTAGIKTLELLKQEGAYEKLEATTSRLIEGIIQSAENNGIAINGGSISAMFGFFLCEGPVRNF

SEQ ID NO: 182789 - protein, 263 aa, Unknown
  Bacterial polypetide isolated from the Sargasso Sea
MKFKRSIEAFDKAKSFIPGGVNSPVRAFKSVNMNPVFFKSGKGSKMIDIDDNEYIDCVSSWGPLIFGHANREIIDSVINASKNGTTYGASTEIETLVAKKIIDMVPSIDKVRMVNSGTEATMSAIRLARGYTKREKIIKFAGNYHGHGDSFLIKAGSGAVTLGLPDSPGVTKNIAKDTLIANFNDINSVEKLFSENQDEIAAIIVEPIAGNMGLVKPIDNFLQGLRDLCDKNQSVLIFDEVMTGFRVSKGGAQQIFGSLSRYY

SEQ ID NO: 182790 - protein, 207 aa, Unknown
  Bacterial polypetide isolated from the Sargasso Sea
LEGLREVTQENGALLVFDEVMTGFRISYGGAQERFGVTPDLTTMGKVIGGGLPVGAYGGRKEIMSMVSPAGPMYQAGTLSGNPLAMTAGIKTLELLKQEGTYERLEAMTKKLLDGIMAAAKESNISIHGQSISAMFGFYLCEGPVRNFEEAKSADTDSFSKLHRLMLQKGIYLAPSAFEAGFTSLAHSEDDITSTIKAFQESFSEIS

SEQ ID NO: 182791 - protein, 272 aa, Unknown
  Bacterial polypetide isolated from the Sargasso Sea
MKLSKSQNLYERARKFIPGGVNSPVRAFKGVGGNPLFFREGTGPYLIDADDNRYIDYVGAFGPLILGHSHEHILSAIENQLKRGISFGASTEAEIDIAEKICKHVHSMDEVRLVTSGTEATMSAIRLARGFTNRDKVVKFEGCYHGHVDGLLVKAGSGALTIGEPDSLGVPNAYTDLTHVLPYNDTEAIEQYFYKHGKETACVIVEPIAGNMNCVLPDVGFLEALREQCTLNESVLIFDEVMTGFRVALGGAQSIFGVVPDITTLGKVIGGG

SEQ ID NO: 182792 - protein, 195 aa, Unknown
  Bacterial polypetide isolated from the Sargasso Sea
MQIKQSTKLFSLAQKRLPGGVNSPVRAFKSVNMTPLFIKRGQGSKLFDKDGNEYIDYVGSWGPMILGHANPKVVSKLKETLDNGTSFGAPTEGEILLAEMICEAVPSVEMIRLVNSGSEAAMAVLRLARGYTERDKIVKFDGCYHGSIDPLLVKAGSGAMTLGIPDSPGVPLSFVEHTLQAKFNDLDSVIRITEE

SEQ ID NO: 182793 - protein, 188 aa, Unknown
  Bacterial polypetide isolated from the Sargasso Sea
MTGFRISYGGAQEKFGVTPDLTTLGKVIGGGLPVGAYGGKKEIMSMVAPSGPVYQAGTLSGNPLAMTAGIKTLELLKQDGTYDKLDLTTSRLIEGIIQSAENNGIAINGGSVSAMFGFFLCDGPVRNFDEAKTNDAELFGKLHREMLQRGIYLAPSPFEAGFTSLAHSEEEIDKTIEAFDESFNAIKK

SEQ ID NO: 182794 - protein, 176 aa, Unknown
  Bacterial polypetide isolated from the Sargasso Sea
MAALVVELAPNVDKVRFVNSGTEACMSAVRLARGYTGRDKIIKFSGCYHGHADPFLIQAGSGASTFGMPNSPGVTPSSAKDTLIADYNNIEQVSSLFELNKNEIAAVILEPIAGNMGCVLPQENFIKELKEQCHDNGALLIFDEVMTGFRLALGGAQEVLSIDADLVTYGKVIGGG

SEQ ID NO: 182795 - protein, 231 aa, Unknown
  Bacterial polypetide isolated from the Sargasso Sea
MKTKNSDKLFEKSKNHIAGGVNSPVRAFKSVGGSPIFFRKSRGCYLYDEDGNKYLDFVGSWGPMILGHSNKQITEAIKKQSSKGISFGAPTKNELEIAKLIKSYVPSIEKLRMVNSGTEATMSCIRLARGTTNRNIIIKFVGCYHGHVDSLLVKAGSGLATLGVPDSPGIPEELSKLTITIPYNDNNAVKEAFNKHAKDIAAVIVEPIAGNMGFIEPNEDFLQNLRQIVRK

SEQ ID NO: 182796 - protein, 287 aa, Unknown
  Bacterial polypetide isolated from the Sargasso Sea
MTDIFNTTHSEEVFSSALELMPGGVSSPVRAFKSVGGQPIVFDRVKGPYAWDIDGNRYIDYIGSWGPAICGHAHPEVITALQEAIEKGTSFGAPCILENKLAEMVIDAVPSVEMVRFVNSGTEACMAVLRLMRAFTGRDKVIKFDGCYHGHADMFLVKAGSGVATLGLPDSPGVPRTTTANTLTAPYNDLEAVKKLFSENPDAISGVILEPIVGNAGFITPEPGFLEGLRELTTENGSLLVFDEVMTGFRISYGGAQEKFGVTPDLTTLGKVIGGGLPVGAYGGRKK

SEQ ID NO: 182797 - protein, 308 aa, Unknown
  Bacterial polypetide isolated from the Sargasso Sea
CMSAVRLAEGYTNREKVLKFSGCYHGHADSFLIQAGSGASTLGTPNSPGVTKASASNTILVEYNNKEQLIETFKNIGKELAAVILEPIAGNMGCVIPSEGFVELIRELCDEYGVLLIFDEVMTGFRLAPGGAQEVLGIKADIITFGKVIGGGLPVGAFAGKDEIMNFLAPLGPVYQAGTLSGNPIAMSAGLSMLTYLNEHNEVYSSLSDKTSYLREGMQKVLDKTKIPYQINSLGSMISLHFSDEPVVDFKTAQKGDNDRFKKYFHGMLDEGVYLPPSAYESYFLNDAISYEDLDFTIKAFEKVVYKI

SEQ ID NO: 182798 - protein, 310 aa, Unknown
  Bacterial polypetide isolated from the Sargasso Sea
IKLLNLLGCYHGHVDSLLVKAGSGVSTFGLPDSPGIPKELAALTYSCPYNDIEAVSEVTNEIGDDLAAIIVEPIAGNMGFIPGEHKFLSCLRELCNKCGALLIFDEVMSGFRVALGGAQSIYAIKPDLTALGKVIGGGLPVGSFGGRQSIMDRLAPTGPIYQAGTLSGNPLAMSAGIALLDTLINVNPFNKLQLASSEIMLHTKNIMNDRGIPFSTSFIGGMFGFFFSENLPRNFQDVLETDDEMFKKFFYAALNQGIYFAPSKFEAGFISLTHDQDIIDKTKSKIEKSNQGIIKNEKMILAAIGKWLSF

SEQ ID NO: 182799 - protein, 251 aa, Unknown
  Bacterial polypetide isolated from the Sargasso Sea
YIDYVGSWGPMILGHANPKIVSKLKETLDNGTSFGAPTEGETFLAEKICEAVKSVEMIRLVNSGTEAAMAVLRLARGYTKRDKIIKFEGCYHGSVDPLLVKAGSGALTLGIPDSPGVPVSFVEHTLQAKFNDLDSVISITEENSQSIAAIILEPVAGNMGMIPPEHGFLKGLRDLCDREGILLIFDEVMSGFRIDYGGAQSLFGIVPDLSIFGKVIGGGLPMGAYGGRPRYYASDRTFRTNISGWNFVWKS

SEQ ID NO: 182800 - protein, 271 aa, Unknown
  Bacterial polypetide isolated from the Sargasso Sea
RAFTGRDKVIKFDGCYHGHADMFLVKAGSGVATLGLPDSPGVPRTTTSNTLTAPYNDLEAVKKLFSENPDAISGVILEPIVGNAGFITPEPGFLEGLRELTTENGSLLVFDEVMTGFRISYGGAQEKFGVTPDLTTLGKVIGGGLPVGAYGGKKEIMSMVAPSGPVYQAGTLSGNPLAMTAGIKTLELLKQEGTYEKLDAITSRLIEGIIQSADNNGIAINGGSVSAMFGFFLCDGPVSNFDEAKLNDAEQFGKLHREMLQRGVYLAPKSF

SEQ ID NO: 182801 - protein, 209 aa, Unknown
  Bacterial polypetide isolated from the Sargasso Sea
MNTSRSQAIFGAAQGLMPGGVSSPVRAFKSVGGQPIVFDRVKGPYAWDVDGNKYIDYIGSWGPAICGHAHPEVISALQEAIEKGTSFGAPCALENTLAEMVIDAVPSVEMVRFVNSGTEACMAVLRLMRAFTGRDKVIKFEGCYHGHADMFLVKAGSGVATLGLPDSPGVPRSTTANTLTAPYNDLEAVKALFAENPDAIAGRDSRADR

SEQ ID NO: 182802 - protein, 292 aa, Unknown
  Bacterial polypetide isolated from the Sargasso Sea
HADNRILKNISKTIKKGITFGAPCKNEILLAKEIIEIFPAIEKIRMVNSGTEATMSAIRLARGYTNRDKIIKFNGCYHGHGDSFLIKAGSGSATFGKPDSKGVTKSLAKDTISLPYNNIDKVKSIIKNNNIACVIIEPIAGNMNFVRSNPSFLKELRALCSRYKTVLIFDEVMTGLRVAKAGAQNIYNIKPDLVTLGKVLGGGFPVGAFGGKKIIMDKLAPDGDVYQAGTLSGNPVAMAAGLKTIELISAPRYFTKLHNKTMYLVNGMNNIAKKFNKDFYADGEGGMFGIFF

SEQ ID NO: 182803 - protein, 222 aa, Unknown
  Bacterial polypetide isolated from the Sargasso Sea
MQITQSKKLFSQAQQRLPGGVNSPVRAFKSVNMTPLFIASGKGSKLFDKDGNEYIDYVGSWGPMILGHANSKVVSKLKETLDNGTSFGAPTEGETFLAEMICEAVKSVEMLRLVNSGTEAAMAVLRLARGYTKRDKIIKFEGCYHGSVDPLLVKAGSGALTLGIPDSPGVPVSFIEHTLQAKFNDLDSVISITEENSQSIAAIILEPVAGNMGMIPPEHGFL

SEQ ID NO: 182804 - protein, 197 aa, Unknown
  Bacterial polypetide isolated from the Sargasso Sea
LIIDEVMTGFRVSRSGAQGHYGVTPDLTTLGKVIGGGMPVGAFGGRKEVMQFIAPTGPVYQAGTLSGNPIAMSAGLAQMEALCEEGLYETLSAKTKRIAEGFKAAADKHGIPMAINYVGGMFGFFFTEQEQITRFDQVTKCNIEHFRTFYHGMLDEGVYLAPSAYEAGFLSMAHGEEELRLTLEAADRVLGRMKAAM

SEQ ID NO: 182805 - protein, 262 aa, Unknown
  Bacterial polypetide isolated from the Sargasso Sea
MEVTMAKLVTELVPTMDMVRMVNSGTEATMSAIRLARGFTGRDKIIKFEGCYHGHADCLLVKAGSGALTLGQPNSPGVPADFAKHTLTCTYNDLASVRAAFEQFPQEIACIIVEPVAGNMNCIPPQADFLPGLRALCDEFGALLIIDEVMTGFRVALAGAQSYYDVVPDLTCLGKIIGGGMPVGAFGGRRDVMDALAPTGPVYQAGTLSGNPIAMAAGFACLTEVAQPGVHETLTDLTNQLAQGLLDAAQETGIPLVVNNVY

SEQ ID NO: 182806 - protein, 183 aa, Unknown
  Bacterial polypetide isolated from the Sargasso Sea
IVKNDLAAVIVEPIAGNMGFVPGDKSFLKLLRKKTSENNSLLIFDEVMTGFRVSLGGAQELYGIKPDLTTLGKVIGGGLPVGAFGGKKKVMDCLAPNGPVYQAGTLSGNPLAMAAGSTLIKLLIDKNPYKDLESKAKNLLEGMKEIFDRYDIPFSTNQIGGMFGFFFSEELPSNLVDVENTND

SEQ ID NO: 182807 - protein, 204 aa, Unknown
  Bacterial polypetide isolated from the Sargasso Sea
MPGGVNSPVRAFKNVNSSPIFIKSAKGPYLYDVDDNQYVDFIGSWGPMILGHSNPRIIKAVEEQLQLGTSYGAPTEGESKMGQLITSVMPSIEMMRMVNSGTEATMSCIRLARGVTGKDKIIKFTGCYHGHVDSLLIKAGSGVSTFGLPDSPGIPKDLAQHTVTVPFNDIDAFENTYKSIKDDLAAVIIEPVAGNMGFIPGEIE

SEQ ID NO: 182808 - protein, 262 aa, Unknown
  Bacterial polypetide isolated from the Sargasso Sea
CVRLALLESPWAETICELVPSMEMVRMVSSGTEATMSAIRLARGFTGRNSILKFEGCYHGHADSLLVKAGSGALTLGVPNSPGVPADFAKYTLTAEFNNLEQVKGIFAEQGADLACIIVEPVAGNMNCIPPAPGFLEGLRALCDQYGAVLIFDEVMTGFRVALGGAQAYYNIKPDLTTLGKIIGGGMPVGAFGGRRDIMQHIAPLGGVYQAGTLSGNPIAMAAGLAALTEIRKPGVYDVLTAKTTQLIEGLAAAAKEVGIPL

SEQ ID NO: 182809 - protein, 302 aa, Unknown
  Bacterial polypetide isolated from the Sargasso Sea
MRAFTERDRLFKFDGCYHGHADMFLVKAGSGVATLGLPDSPGVPRTTTANTLTAPYNDLEAVKKLFSENPDAISGVILEPIVGNAGFIKPEPGFLEGLRELTTENGSLLVFDEVMTGFRISYGGAQEKFGVTPDLTTLGKVIGGGLPVGAYGGKKEIMSMVAPSGPVYQAGTLSGNPLAMTAGIKTLELLKQEGTYDKLEATTSRLIEGIIQSAENNGISINGGSVSAMFGFFLCDGPVRNFDEAKTNNAELFGKLHREMLQRGIYLAPSPFEAGFTSLAHSEEEIDKTIEAFDQSFNSIKK

SEQ ID NO: 182810 - protein, 272 aa, Unknown
  Bacterial polypetide isolated from the Sargasso Sea
RRDGALRHSGTEACMAVLRLMRAFTGREKVIKFEGCYHGHADMFLVKAGSGVATLGLPDSPGVPSSTTANTLTAPYNDLEAVKALFAENPDSISGVILEPVVGNAGFIPPDFGFLEGLREITREHGALLVFDEVMTGFRIAYGGAQARFGITPDLTTMGKVIGGGLPVGAYGGRADIMSMVAPAGPMYQAGTLSGNPLAMTAGIKTLELLKRPGAYEQLETTTKRLSDGIQEAAKAAGLPICGSSISAMFGFFLCDGPVRNFEEAKATDSER

SEQ ID NO: 182811 - protein, 232 aa, Unknown
  Bacterial polypetide isolated from the Sargasso Sea
HEGQIAGIIVEPIAGNMGVVPPDPGFLTGLRNITKEKEALLIFDEVITGFRVHFGGAQTLLGVTPDITCLGKIIGGGLPVGAYGSSAKIMECVAPLGPMYQAGTLSGNPLAVTAGLTALRLLSQKGVYDTLEDLGAYVENGITGIMKEFEIESKFNRVGSMFTAFFSSKEISNVSDLEMVNTDRYSTYFHGLLKQGIYFAPSQFECGFVSLSHTKSDIDLTMEKIRDVVKGL

SEQ ID NO: 182812 - protein, 183 aa, Unknown
  Bacterial polypetide isolated from the Sargasso Sea
SGAQGHYGVTPDLTTLGKVIGGGMPVGAFGGRKEVMQFIAPTGPVYQAGTLSGNPIAMSAGLAQMEALCEEGLYETLSAKTKRIAEGFKAAADKHGIPMAINYVGGMFGFFFTEQEQITRFDQVTKCNIEHFRTFYHGMLDEGVYLAPSAYEAGFLSMAHGEEELRLTLEAADRVLGRMKAAM

SEQ ID NO: 182813 - protein, 270 aa, Unknown
  Bacterial polypetide isolated from the Sargasso Sea
GQGSKLFDKDGNEYIDYVGSWGPMILGHANPKVVRKLKETLDNGTSFGAPTEGETLLAEMICEAVKSVEMIRLVNSGTEAAMAVLRLARGYTKRDKIIKFEGCYHGSVDPLLVKAGSGALTLGVPDSPGVPVSFVEHTLQAKFNDLDSVISITEENSQSIAAIILEPVAGNMGMIPPEHGFLQGLRDLCDREGILLIFDEVMSGFRIDYGGAQSLFGIVPDLSIFGKVIGGGLPMGAYGGRQDIMLQIAPSGPIYQAGTLSGNPIAVTAG

SEQ ID NO: 182814 - protein, 151 aa, Unknown
  Bacterial polypetide isolated from the Sargasso Sea
MPGGVNSPVRAFGNVNSTPIFIKSASGAYLHDVDGNDYVDFIGSWGPMILGHSNPKIIKAITDQAELGTSYGAPTEAETSIGELIRTAMPSIEKIRMVNSGTEATMSCIRLARGYTGRNKIIKFTGCYHGHVDSLLIKAGSGVSTFGLPDS

SEQ ID NO: 182815 - protein, 219 aa, Unknown
  Bacterial polypetide isolated from the Sargasso Sea
MFKLINERSKKLFEEANKVIPGGVNSPVRAFKSVGGTPIFIKDANGAYLFDEDGNQYIDFISSWGPMILGHAHPKIIEAINYQSVKGTSYGIPTELETKIASLVVSLAPNVDKIRFVNSGTEACMSAVRLARGYTNRDKIIKFSGCYHGHSDSFLIEAGSGASNIGLPNSPGVTKSTASDTLLADFNNISMVESLFRKYKNQKAAIIIEPIAGNMGWFA

SEQ ID NO: 182816 - protein, 169 aa, Unknown
  Bacterial polypetide isolated from the Sargasso Sea
MPGGVNSPVRAFKNVDGKPVFFKSAKGPILIDEDDNQYIDFIGSWGPMILGHSNPAVLDAIKAQLELGTSFGAPTSLESELARIIKSQVPSMEKIRMVNSGTEATMSCIRLARGFTGRNKIIKFTGCYHGHVDSLLVKAGSGVSTFGLPDSPGIPKELAALTYSCPYND

SEQ ID NO: 182817 - protein, 270 aa, Unknown
  Bacterial polypetide isolated from the Sargasso Sea
MKLSKSQNLYERARKFIPGGVNSPVRAFKGVGGNPLFFREGTGPHLIDADDNRYIDYVGAFGPLILGHSHEHILSAIENQLKRGISFGASTEAEIDIAEKICKHVHSMDEVRLVTSGTEATMSAIRLARGFTNRDKVVKFEGCYHGHVDGLLVKAGSGALTIGEPDSLGVPNAYTDLTHVLPYNDAEAVEQYFDKHGKDTACVIVEPIAGNMNCVLPDVGFLEALREQCTLNESVLIFDEVMTGFRVALGGAQSIFGVVPDITTLGKVIG

SEQ ID NO: 182818 - protein, 189 aa, Unknown
  Bacterial polypetide isolated from the Sargasso Sea
MKTKNSDKLFEKSKNHIAGGVNSPVRAFKSVGGSPIFFRKSRGCYLYDEDGNKYLDFVGSWGPMILGHSNKQITEAIKKQSSKGISFGAPTKNELEIAKLIKSYVPSIEKLRMVNSGTEATMSCIRLARGTTNRNIIIKFVGCYHGHVDSLLVKAGSGLATLGVPDSPGIPEELSKLTITIPYNDNNAV

SEQ ID NO: 182819 - protein, 313 aa, Unknown
  Bacterial polypetide isolated from the Sargasso Sea
HADPRITSKIEKAVQKGTSFGTPTEGEIELAEMINDAVPSVEMVRLVNSGSEAAMGALRVARGFTGRDKIIKFEGCYHGSVDALLVKAGSGATTLGIPDSPGVPQSFTEHTLSAPFNDLDAVIELTENFPYEIAAIVLEPVAGNMGMIPPEHGFLQGLRELCDREGILLIFDEVMTGFRVDFSGAQALFQVMPDLSIFGKVIGGGLPVGAYGGRREIMLQVAPAGPVYQAGTLSGNPIAVSAGKTMLKILKKEDPYADLGRKTATLNEALSNAAKKKGIPLETCSMGGMFGFFFSEKKVRNYEDALKCNREYF

SEQ ID NO: 182820 - protein, 273 aa, Unknown
  Bacterial polypetide isolated from the Sargasso Sea
MFYNSQLAYKQAIKSIPGGVNSPVRAFRSVDSTPIFFKSGNGSKMIDIDDNEYIDCVGSWGPLIFGHADNHTIEAIVNCSKNGTTFGAPTELETKMASKIIEMVPSIEKVRMVSSGTEATMSAIRLARGYTRKNLIIKFSGNYHGHFDGFLIKAGSGAMTLGTPDSQGVTENIAKDTLVAEFNDIDSVNKLFNENKDKIAAVIVEPIAGNMGLVIPENNFLNELRAICTENNSLLIFDEVMSGFRVSKGGAQELYDVIPDITTLGKIIGGGLP

SEQ ID NO: 182821 - protein, 165 aa, Unknown
  Bacterial polypetide isolated from the Sargasso Sea
KIIGGGMPVGCFGGKRAIMQCIAPLGPVYQAGTLSGNPLAMAAGLTTLKLISRPGFHTELSDYTTRMLDGLQQRADAAGIPFVTTQAGAMFGLYFSGADDIVTFADVMASDSARFNRFFHLMLDGGVYLAPSAFEAGFTSIAHGDKELDITFAAAERAFAELKKA

SEQ ID NO: 182822 - protein, 167 aa, Unknown
  Bacterial polypetide isolated from the Sargasso Sea
MPGGVNSPVRAFGNVNSTPIFIKSASGAYLHDVDGNDYVDFIGSWGPMILGHSNPKIIKAIKDQADLGTSYGAPTEAETSIGELIRSAMPSIEKIRMVNSGTEATMSCIRLARGYTGRNKIIKFTGCYHGHVDSLLIKAGSGVSTFGLPDSPGIPEELARHTISVPF

SEQ ID NO: 182823 - protein, 270 aa, Unknown
  Bacterial polypetide isolated from the Sargasso Sea
GPAICGHAHPEVTTALQEAIEKGTSFGAPCVLENKLAEMVIDAVPSVEMVRFVNSGTEACMAVLRLMRAFTGRDKVIKFDGCYHGHADMFLVKAGSGVATLGLPDSPGVPRTTTANTLTAPYNDLEAVKKLFSENPDAISGVILEPIVGNAGFITPEPGFLEGLRELTTENGSLLVFDEVMTGFRISYGGAQEKFGVTPDLTTLGKVIGGGLPVGAYGGKKEIMSMVAPSGPVYQAGTLSGNPLAMTAGIKTLELLKQEGTYDKLDAITS

SEQ ID NO: 182824 - protein, 339 aa, Unknown
  Bacterial polypetide isolated from the Sargasso Sea
CVLENKLAEMVIDAVPSVEMVRFVNNGTEACMAVLRLMRAFTGRDKVIKFDGCYHGHADMYLVKAGSGVATLGLPDSPGVPRTTTANTLTAPYNDLEAVKKLFSENPDAISGVILEPIVGNAGFITPEPGFLEGLRELTTENGSLLVFDEVMTGFRISYGGAQEKFGVTPDLTTLGKVIGGGLPVGAYGGKKEIMSMVAPSGPVYQAGTLSGNPLAMTAGIKTLELLKQEGTYDKLESSTSRLIEGIIQSAENNGIAINGGSVSAMFGFFLCDGPVRNFDEAKTNDSELFGKLHREMLKRGIYLAPSPFEAGFTSLAHSEEEIDKTIEAFNQSFKAIKN

SEQ ID NO: 182825 - protein, 230 aa, Unknown
  Bacterial polypetide isolated from the Sargasso Sea
MKKINLSQSKDLFKRALKSISGGVNSPVRSFKNVGGEPIFFDHAKGCHLYDVDGNRFIDYVGSWGPMILGHSANVTQKSILTQLEKATSFGAPTLIEIELAEKIIELVPSIEKVRMMNSGTEATMTAIRLARGFTGRDIVIKFEGCYHGHADVLLAKAGSGVLTLGIPDTPGIPESVTSNTIVLPFNDIEAVKETFSSHANQIAAVIVEPVAGNMGCIPPAPGYLETLRE

SEQ ID NO: 182826 - protein, 119 aa, Unknown
  Bacterial polypetide isolated from the Sargasso Sea
MPGGVNSPVRAFGNVNSTPIFIKSASGAYLHDVDGNDYVDFIGSWGPMILGHSNPKIIKAIKDQADLGTSYGAPTEAETSIGELIRSVMPSIEKIRMVNSGTEATMSCIRLARGYTGRN

SEQ ID NO: 182827 - protein, 136 aa, Unknown
  Bacterial polypetide isolated from the Sargasso Sea
GSWGPMIVGHNHPAVRQAVKKAIDNGLSFGAPCAAEVTMAETITRLVPSCEMVRMVNSGTEATLSAIRLARGATGRNRIVKFEGCYHGHGDSFLVKAGSGMLTLGVPTSPGVPAGLSELTLTLPYNDFEAATALFE

SEQ ID NO: 182828 - protein, 182 aa, Unknown
  Bacterial polypetide isolated from the Sargasso Sea
VIGGAQEKFGVTPDLTTLGKVIGGGLPVGAYGGKKEIMSMVAPAGPVYQAGTLSGNPLAMTAGIKTLELLKQDGTYDKLDSLTSRLIEGIIQSAENNGISINGGSVSAMFGFFLCDGPVRNFNEAKTNDAELFGKLHREMLRRGIYLAPSPFEAGFTSLAHSEEEIDKTIEAFDESFSEIKK

SEQ ID NO: 182829 - protein, 223 aa, Unknown
  Bacterial polypetide isolated from the Sargasso Sea
RMVNSGTEATMSAIRLARGYTGRNKIIKFEGCYHGHVDSLLVKAGSGAIAIPGSPGVPEAVTADTLVLDYNDAASVTQAFKEHGDDIAAVIVEPVAGNMNCVPATENFLQTLRQQCDDNGAVLIFDEVMSGFRVALGGAQGHYGITPDMTTLGKIVGGGMPVGAFGGKQAIMEHLAPLGPVYQAGTLSGNPVAMAAGLATLNLISEPGFHQALAEKTTRLRKG

SEQ ID NO: 182830 - protein, 259 aa, Unknown
  Bacterial polypetide isolated from the Sargasso Sea
MISNSELFLRAKQVIPGGVNSPVRAFGSVGGTPYFVTHAQGPYIYDIEGNSYIDYVQSYGPGILGHAHPAVIEAITKAAASGTTFGAPTEAEVELAEMVIERIQGLELIRFVSSGTEATMSAVRLARGATGRNRILKFAGCYHGHSDALLAAGGSGVANQGLSGCEGVTPGAVADTVVAPYNVVPEIDETFAAVIVEPVAANMGLISPNSGFLEALRNVCDETGALLIFDEVITGFRLSYGGAAEYFGVTPDIWCFGKV

SEQ ID NO: 182831 - protein, 279 aa, Unknown
  Bacterial polypetide isolated from the Sargasso Sea
YHGHADSLLVKAGSGALTLGVPSSPGVPANVAEHTLTVEYNNLDSVKEIFEAHGDDIACIIVEPVAGNMNCIPPVEGFLEGLRAICDQYGSVLIFDEVMTGFRVSRGGAQERYNIKPDLTCLGKVIGGGMPVGCFGGRRDIITHIAPTGPIYQAGTLSGNPVAMAAGLAALTQIKQPGLYDSIFENTQTLVDGFQALADKHNISLTTNIAGSMFGIFFTDVEKVTNYKQAINCNTQQFNKFYHGMLEQGVYLAPASYEAGFVSKAHDAAVIEQTLAAAD

SEQ ID NO: 182832 - protein, 292 aa, Unknown
  Bacterial polypetide isolated from the Sargasso Sea
VRFVNSGTEACMAVLRLMRAFTGRDKVIKFDGCYHGHADMFLVKAGSGVATLGLPDSPGVPRTTTANTLTAPYNDLEAVKKLFSENPDAISGVILEPIVGNAGFITPEPGFLEGLRELTTENGSLLVFDEVMTGFRISYGGAQEKFGVTPDLTTLGKVIGGGLPVGAYGGKKEIMSMVAPSGPVYQAGTLSGNPLAMTAGIKTLELLKQDGTYDKLDSITSRLIEGIIQSAENNGIDINGGSVSAMFGFFLCDGPVRNFDEAKTNDAELFGKLHREMLRRGIYLAPSPFEAG

SEQ ID NO: 182833 - protein, 250 aa, Unknown
  Bacterial polypetide isolated from the Sargasso Sea
TAPYNDLEAVKKLFSENPDAISGVILEPIVGNAGFITPEPGFLEGLRELTTENGSLLVFDEVMTGFRISYGGAQEKFGVTPDLTTLGKVIGGGLPVGAYGGKKEIMSMVAPSGPVYQAGTLSGNPLAMTAGIKTLELLKQDGTYDKLDLTTSRLIEGIIQSAENNGIAINGGSVSAMFGFFLCDGPVRNFDEAKTNDAELFGKLHREMLGRGIYLAPSPFEAGFTSLAHSEEEIDKTIEAFDESFNAIKK

SEQ ID NO: 182834 - protein, 297 aa, Unknown
  Bacterial polypetide isolated from the Sargasso Sea
RHSGTEAVMTALRLARGKTGRDKILKFNGCYHGHVDSMLIKAGSGLAGTSTASSKGIPKNVAEDTLILDLNDEEALQKCFDLHGKSIAGVIVEPLPANNGLLIQNPSFLQKIKALCEANGSLLIFDEVISGFRVNFSGMAHDLDITPDIVTYGKVIGGGLPVGAIAATKTVMEALAPIGDVYQAGTLSANPLAMVGGLSTLKQLDESSYEQVDVNASKIEKLFTDWFKNYEDGKFSHYKIVRYKSLFWFVPNNSDLKAISDIPQNLSEEFLPLFETLLEKGIYLSPNAYEIGFVSLA

SEQ ID NO: 182835 - protein, 300 aa, Unknown
  Bacterial polypetide isolated from the Sargasso Sea
ENKLAEMVIDAVPSVEMVRFVNSGTEACMAVLRLMRAFTGRDKVIKFDGCYHGHADMFLVKAGSGVATLGLPDSPGVPRTTTANTLTAPYNDLEAVKKLFSENPDAISGVILEPIVGNAGFITPEPGFLEGLRELTTENGSLLVFDEVMTGFRISYGGAQEKFGVTPDLTTLGKVIGGGLPVGAYGGKKEIMSMVAPSGPVYQAGTLSGNPLAMTAGIKTLELLKQEGTYDKLNTTTSRLIEGIIQSAENNGIAINGGSVSAMFGFFLCEGPVRNFDEAKANNAELFGKLHREMLQRGIY

SEQ ID NO: 182836 - protein, 227 aa, Unknown
  Bacterial polypetide isolated from the Sargasso Sea
MRYKRSSDLFRLAKKKIPGGVNSPVRAFKSVGGSPIFIKKAKGAYLYDEDNNKFIDYISSWGPMIIGHSNDYVIDAIANTAKKGTSFGIPTSLETEIAELVVSSVPNIDKIRFVNSGTEACMSAIRLARGFTKREKIIKFSGCYHGHSDSFLIQAGSGAATLNSPSSPGVTKGTVIDTLISDYNNIDSVVSHFKNYPNEIAAIIIEPVAGNMGCIPPKNGFLEAIRK

SEQ ID NO: 182837 - protein, 208 aa, Unknown
  Bacterial polypetide isolated from the Sargasso Sea
LEGLRELTTENGSLLVFDEVMTGFRISYGGAQEKFGVTPDLTTLGKVIGGGLPVGAYGGKKEIMSMVAPAGPVYQAGTLSGNPLAMTAGIKTLELLKQEGTYEKLEATTSRLIEGIIHSAENNGIAINGGNVSAMFGFFLCDGPVRNFDEAKTNDAELFGKLHREMLQRGIYLAPSPFEAGFTSLAHSEEEIDKTIEAFDQSFNAIKK

SEQ ID NO: 182838 - protein, 297 aa, Unknown
  Bacterial polypetide isolated from the Sargasso Sea
VFCCCIFTPFIVKKSKGSLITDVDNNSYVDFIGSWGAMILGHSDRRILKKLNSVSRNGLTYGAPNEAETEMAEFIVKHIPSIEKVRMVSSGTEATMSAARLARGYTKKDIIIKFNGCYHGHGDAFLVEAGSGATTFGKPSSSGVTKGSSKDTISLMYNDKNQIKKIFSKYKNKIACVIIEPIAGNMNFVRADRSFLSLVRKLCTQNNSLLIFDEVMTGFRVNFKGAQHCYNIKPDLTTFGKVIGGGLPVGAFGGKSKIMNMLAPEGPIYQAGTLSGNPLAMHCGLETLKIISKKTFF

SEQ ID NO: 182839 - protein, 310 aa, Unknown
  Bacterial polypetide isolated from the Sargasso Sea
RPANCFDRVKGPFAWDIDGNRYIDYIGSWGPAICGHAHPEVTNALQEAIEKGTSFGAPCVLENKLAEMVIDAVPSVEMVRFVNSGTEACMAVLRLMRAFTGRDKVIKFDGCYHGHADMFLVKAGSGVATLGLPDSPGVPRTTTVNTLTAPYNDLEAVKKLFSENPDAISGVILEPIVGNAGFITPEPGFLEGLRELTTENGSLLVFDEVMTGFRISYGGAQEKFGVTPDLTTLGKVIGGGLPVGAYGGKKEIMSMVAPAGPVYQAGTLSGNPLAMTAGIKTLELLKQDGTYDKLDSLTSRLIEGIIQSAE

SEQ ID NO: 182840 - protein, 288 aa, Unknown
  Bacterial polypetide isolated from the Sargasso Sea
EGCYHGHSDSLLIKAGSGALTFGVPSSPGVPEVLAQHTVTLPFNDLAALETAMDELGDQVACVITEPVAGNMNCIPSVEGYLEGMRDLCTRHGALLIFDEVMTGFRFGTGGVQGFLGITPDLTCLGKVIGGGMPVGAFGGRRDIMEQISPLGPVYQAGTLSGNPVAMAAGLATMSIISEPGFYDDLFRRTGDLCTGMREAAAAAGVSFTTNHLGSMFGGFFTEDETVTQYHQVIDSNVEAFNQFFHLMLDRGVYLAPASFEAGFMSSAHSDDDIAATVDAARAAFAAL

SEQ ID NO: 182841 - protein, 271 aa, Unknown
  Bacterial polypetide isolated from the Sargasso Sea
RAFKNVDGKPIFFKSAKGPILIDEDENQYIDFIGSWGPMILGHSNPIILDAIKAQLELGTSYGAPTSLENSLARMIKGQVPSMEKLRMVNSGTEATMSCIRLARGFTGKNKIIKFTGCYHGHVDSLLVKAGSGVSTFGLPDSPGIPNELAALTYSCPYNDFEALLKITSEIGDDLAAIIVEPIAGNMGFIPGEPKFINALRELCDKHNSLLIFDEVMSGFRVGLGGAQAIYKIQPDLTALGKVIGGGLPVGAFGGKQSVMDQLAPLGPIYQ

SEQ ID NO: 182842 - protein, 297 aa, Unknown
  Bacterial polypetide isolated from the Sargasso Sea
ADGKRYIDYVLSWGPMIMGHNHPRVREAVVEAAQSGLSFGCPTEIEIELAETISKLVPSMPLVRMTSSGTEATMSAIRLARGFTGRDKIIKFEGCYHGHSDSLLIKAGSGALTFGVPSSPGVPDVLAQHTVTLPFNDLAALEAAMDELGDQVACVITEPVAGNMNCIPSIEGYLEGMRELCTRHGAVLIFDEVMTGFRFGTGGVQGFLGITPDLTCLGKVIGGGMPVGAFGGRRDIMEQISPLGPVYQAGTLSGNPVAMAAGLATMSIISEPGFYDDLFRHTSELCAGMRQAAASAG

SEQ ID NO: 182843 - protein, 230 aa, Unknown
  Bacterial polypetide isolated from the Sargasso Sea
DHERHPAGPRLHRSRQDRQNSKAATTGTPDSPAGQGRLRRADPGSAQQPRASRPTLPSTPSPCVFNDLDSVREAFSQYGSEIACIIVEPVAGNMNCIPPVPGFLEGLRAICDEFGALLILDEVMTGFRVSLRGAQGHYNIDPDLTTLGKIIGAGMPVGAFGGKKKVMQHIAPTGPVYQAGTLSGNPVAMAAGLTMLDLLLEPGLYEQLSAKTARVAEGLKAAAAKHGSRL

SEQ ID NO: 182844 - protein, 210 aa, Unknown
  Bacterial polypetide isolated from the Sargasso Sea
MKISESKKLFSRAQEVMPGGVNSPVRAFKSVQSEPLFITHAKGSRLFDADGNSFIDYIGSWGPMILGHADPRITSEIEKAVQKGTSFGTPTEGEIELAEMISDAVPSVEMVRLVNSGSEAAMGVLRVARGFTGRDKIIKFEGCYHGSVDALLVKAGSGATTLGIPDSPGVPQSFTEHTLSAPFNDLDAVIELTENFPDEIAAIVLEPVAG

SEQ ID NO: 182845 - protein, 218 aa, Unknown
  Bacterial polypetide isolated from the Sargasso Sea
MGFIEPSKEFIKSLFNLKDQHESLLIFDEVMTGFRVAQGGAQELFKVKPDLTALGKIVGGGLPVGVYGGKTEIMNMIAPDGPVYQAGTLSGNPVAVSAGTALLKQLKDANIYLELDRVSKLFLKGVAAAAKKNLIPFSYSVRGGMFGFFFTNDLPQNFEDVKNSNLELFKRFFQGMLEEKVYLPPSAFESCFISTKHSEEVILKAVKSAEKVFSKIKL

SEQ ID NO: 182846 - protein, 178 aa, Unknown
  Bacterial polypetide isolated from the Sargasso Sea
AQEKFGVTPDLTTLGKVIGGGLPVGAYGGKKEIMSMVAPSGPVYQAGTLSGNPLAMTAGIKTLELLKQDGTYDKLDSTTSRLIEGIIQSAENNGIAINGGSVSAMFGFFLCDGPVRNFDEAKTNDSKLFGKLHREMLQRGIYLAPSPFEAGFTSLAHSEEEIDKTIEAFDESFNAIKK

SEQ ID NO: 182847 - protein, 411 aa, Unknown
  Bacterial polypetide isolated from the Sargasso Sea
MPGGVNSPVRAFKNVNSKPVFFKSANGPYLIDEDENQYIDFIGSWGPMILGHSNPIIVKAINEQLKNGTSFGAPTKLENQMASLIKESIGSIERIRMVNSGTEATMSCIRLARGYTNRNTIIKFDGCYHGHVDSLLVKAGSGVSTFGLPDSPGIPEELAKFTISIPYNDTEAFIKTFDEVKDDLAAVIVEPIAGNMGFIKGHAEFLNDLREKTHQNNSVLIFDEVMSGFRVNLGGAQSMYNIQPDLTALGKIIGGGLPVGAFGGNADIMKCLAPEGPVYQAGTLSGNPLAMSAGIALISELQKTNPYEQLELTIKNFLNPISKSLETKGIDFSYNASGGMFGFFFSKKLPENFEDVCATDSKVFQKFFIKSLSKGIYFAPSKFEAGFLSTTHVDEVMQSASQKVLDAIEEL

SEQ ID NO: 182848 - protein, 428 aa, Unknown
  Bacterial polypetide isolated from the Sargasso Sea
MSKSEQLFQQAQNTIPGGVNSPVRAFKSVGGTPVFIDSANGAYLYDVDGKKYIDYIGSWGPMLLGHNHPAIREAVVKAAEKGLSFGAPCPAEITMAETICELVPSMEMVRMVSSGTEATMSAIRLARGFTGRNSILKFEGCYHGHADSLLVKAGSGALTLGVPNSPGVPADFAKYTLTAEFNNLEQVKQIFAEQGADLACIIVEPVAGNMNCIPPAPGFLEGLRALCDEYGAVLIFDEVMTGFRVALGGAQAYYNIKPDLTTLGKIIGGGMPVGAFGGRRDIMQHIAPLGGVYQAGTLSGNPIAMAAGLAALTEIRKPGVYDVLTAKTTQLIEGLAAVAKEVGIPLATTQVGGMFGVFFSKEAQITNYQQATQCDIAAFKRFFHLMLEQGVYLAPSAYEAGFLSIAHSDDDLEYTIAAAKKAFLQLKA

SEQ ID NO: 182849 - protein, 428 aa, Unknown
  Bacterial polypetide isolated from the Sargasso Sea
MRYQRSSRLFKVAKEVIPGGVNSPVRAFKAVGGNPVFVKKAKGAYLFDEDNNKYIDYISSWGPMILGHAHPKVTESIIKTTKNGTSFGTPTELETKIAKLAIKMVPNIDQIRFVNSGTEACMSAIRLARGFTRKEKIIKFSGCYHGHSDSFLIQAGSGGATFGNPSSPGVTQGSAKDTLIAEFNNLDNVSNIFDKNKNKIAALIIEPVAGNMGCIPPKKDFLKGLRSLCDDHKALLIFDEVMTGFRLSKGGAQELYGIKADIVTFGKVLGGGLPVGAFASNLEIMSFLAPKGEVYQAGTLSGNPLAMIAGYNTLKILDEDPEIYSRLEKKTKKLEEQLRYISIKNKIKHQINRIGSMISIHFTDHPVVNFETSKKGDNIYYKKYFHGMLDQNIYLPPSAYESYFLNDAISDKDIDLTSEAYNLVSLDF

SEQ ID NO: 182850 - protein, 427 aa, Unknown
  Bacterial polypetide isolated from the Sargasso Sea
MSNNETLFERAQRTIPGGVNSPVRAFRSVGGTPRFIERAQGPYFWDADGQRYIDYIGSWGPMILGHVHPEVLEAVQRVLANGFSFGAPTESEVEIAEEICKLVPSIEQVRMVSSGTEATMSALRLARGFTNRSRIVKFEGCYHGHADSLLVKAGSGLLTFGNPTSAGVPVDIAKHTTVLEYNNVAELEEAFKAFGNEIASVIVEPVAGNMNLVRATPEFLQALRRLCTEYGSVLIFDEVMCGFRVALGGAQQVYGITPDLTCLGKVIGGGMPAAAFGGRRDIMAHLAPLGGVYQAGTLSGNPIAVAAGLKTLQLIQAPGFYDTLAARTTRLAQGLANVAREAKVPFSADSLGGMFGLYFTGSVPTSFAEVTKSDVPRFNAFFHKMLDAGVYFAPSAYEAGFVSIAHDNAIIDATIDAARSAFASLAV

SEQ ID NO: 182851 - protein, 371 aa, Unknown
  Bacterial polypetide isolated from the Sargasso Sea
SWWRNSPVRAFKAVGGTPRFITKADGAYMWDADGKQYIDYIQSWGPMVLGHNNAQIREAVIEASYNGLSFGAPTEAEVIMAELVSELVPSMEMVRMVNSGTEATMSAIRLARGYTSRNKIVKFEGCYHGHADSLLVKAGSGALTLGVPSSPGVPANVAEHTLTVEYNNLDSVREIFEAHGDDIACIIVEPVAGNMNCIPPVEGFLEGLRAICDQYGSVLIFDEVMTGFRVSRGGAQERYNIKPDLTCLGKVIGGGMPVGCFGGRRDIITHIAPTGPIYQAGTLSGNPVAMAAGLAALTQIKQPGLYDSIFENTQKLVDGFQALADKHNISLTTNIAGSMFGIFFTDVEKVTNYKQAINCNTEQFNSFITVC

SEQ ID NO: 182852 - protein, 309 aa, Unknown
  Bacterial polypetide isolated from the Sargasso Sea
MKLFKEAKLHIPGGVNSPVRAFKNINGNPIFFKKAKGSKLFDEDNNEYIDYIGSWGPMIMGHSHPKIIKAISKQVKLGTSYGAPTSIESKTAELIKKCIPSIEKIRMVNSGTEATMSAIRLARGFTKKNKIIKFDGCYHGHADSLLIKAGSGVSTFGLPDSPGVPPQLAKETLSCEFNNSKDFLKIFEKIKNDLAAVIIEPIAGNMGFIPSDPSFLKLIRKKTAQNKSLLIFDEVMSGFRVSLGGAQEIYKIKPDLTTLGKIIGGGLPVGAFGGRKDIMDYLAPNGPVYQAGTLSGNPLAMAAGSALIK

SEQ ID NO: 182853 - protein, 347 aa, Unknown
  Bacterial polypetide isolated from the Sargasso Sea
GKRHFSFGTPTEGEIELAEMISDAVPSVEMVRLVNSGSEAAMGALRVARGFTGRDKIIKFEGCYHGSVDALLVKAGSGATTLGIPDSPGVPQSFTEHTLSAPFNDLDAVIELTENFPDEISAIVLEPVAGNMGMIPPEHGFLKGLRELCDREGILLIFDEVMTGFRVDFSGAQALFQVMPDLSIFGKVIGGGLPVGAYGGRREIMLQVAPAGPVYQAGTLSGNPIAVSAGKTMLKILKEEDPYADLGQKTATLNEALSDAAKNKGIPLETCSMGGMFGFFFSEKKVRNYEDALKCNRDYFITFFREVLSRGIYLAPSPFESLFLSSSHSEADLDQTIEAFQHGLAAI

SEQ ID NO: 182854 - protein, 292 aa, Unknown
  Bacterial polypetide isolated from the Sargasso Sea
MTKKLFNEAKKYIPGGVNSPVRAFKAVSGTPLFIDRASGSYLYDTENKKYIDYVGSWGPMVVGHCHPEVIKAVHDSVDNGLSFGAPTEIETQMANKICELMPSIEKIRMVNSGTEAAMSAIRLARGYTKRDMIIKFEGCYHGHTDSLLVKAGSGALTFGVPSSPGVPEDLAKQTVTLTYNDIDQLKDTFKSIGEKIAAVIIEPIAGNMSLVPANKKFLELLRKLCSENETILIFDEVMTGFRVALGGAQSIYNITPDLTILGKIIGGGMPVGAFGGKENIMSHISPDGTYIP

SEQ ID NO: 182855 - protein, 428 aa, Unknown
  Bacterial polypetide isolated from the Sargasso Sea
MQRAKSRKLFNKTKKMIPGGVNSPVRSFSAVSGTPFIVKKSIGSRIIDIDNNSYVDFIGSWGAMILGHSDKRILKKLNTVSKNGLTYGAPNTTETEIAEFIISNIPSIEKIRMVNSGTEATMSAARLARGYTGKDIIIKFNGCYHGHGDAFLVKAGSGAATFGKPSSSGVTKGSSKDTISLPYNDYLALEKIFKKNKNKIACVIVEPIAGNMNFVRSTKKFLQTARKLCTQHKSLLIFDEVMTGFRVNFRGAQAIYGIRPDLTTFGKVIGGGLPVGAFGGKAKIMNELAPEGPIYQAGTLSGNPLAMHCGLETLKIISNKIFFKRLSNKTREFVNGMINIASKHKFPFTADSEGGMFGLYFTSKIPKNITDIEKSNLHTFNDFFNYMLDNGVFFAPSAYEAGFISDSHTQKDFEKVYKLFDKFIKLTT

SEQ ID NO: 182856 - protein, 234 aa, Unknown
  Bacterial polypetide isolated from the Sargasso Sea
MPGGVNSPVRAFKNINGNPIFFKKAKGPYLIDADNNKYIDYIGSWGPMILGHSNPKIIKAVSRQLELGTSYGAPTSIESDTAKLIKKCFPSIQKIRMVNSGTEATMSAVRLARGYTNKTKIIKFDGCYHGHVDSLLIKAGSGVSTFGLPDSPGIPNELAKKTLSCEFNNKGSFLKIFNKVKNDLAAVIVEPIAGNMGFVPGDKSFLKLLRKKTSENNSLLIFDEVMTGFRVSLG

SEQ ID NO: 182857 - protein, 469 aa, Unknown
  Bacterial polypetide isolated from the Sargasso Sea
MTFRASARAPIANQTERRHNAKGLSRRVSRVSIVAQAVSAPELNTKKSEAIFKAAQDILPGGVNSPVRAFKSVGGQPIVFDKVKDAYAFDVDGNKYVDYVGSWGPAICGHANERVNEKLKAQIDKGTSFGAPCELENVLGEMVIERVPSVEMVRFCNSGTEACLSALRVMRAYTGRDMIIKFEGCYHGHADPFLVKAGSGVITLGLPDSPGVPAAATSTTLCATYNDLDEVKALFAEHKDKIAGVILEPVVGNSGFIVPDKEFLQGLREVCTAEGAVLCFDEVMTGFRIAKGCAQEYWGVTPDLTTMGKVIGGGMPVGAYGGKREIMDMVAPAGPMYQAGTLSGNPLAMVAGIETLSILGEPGQYEKLDKMTKRLIEGILKAGRDNGHAVCGGSISGMFGFFFQEGPVKNFADAAKSDTDKFGRWHRAMLEEGVYLAPSSYEAGFTSLAHTEEDIDFTIAAAQRAMARI

SEQ ID NO: 182858 - protein, 427 aa, Unknown
  Bacterial polypetide isolated from the Sargasso Sea
MKISESKKLFSRAQEVMPGGVNSPVRAFKSVQSEPLFITHAKGSRLFDADGNSFIDYIGSWGPMILGHADPRITSEIEKAVQKGTSFGTPTEGEIELAEMISDAVPSVEMVRLVNSGSEAAMGALRVARGFTGRDKIIKFEGCYHGSVDALLVKAGSGATTLGIPDSPGVPQSFTEHTLSAPFNDLEAVIELTGNFPDEIAAIVLEPVAGNMGMIPPEHGFLQGLRELCDREGILLIFDEVMTGFRVDFSGAQALFQVMPDLSIFGKVIGGGLPVGAYGGRREIMLQVAPAGPVYQAGTLSGNPIAVSAGKTMLKILKEEEPYADLGRKTATLNEALSDAAKKKGIPLKTCSMGGMFGFFFSEKKVRNYEDALKCNRDYFITFFREVLSRGIYLAPSPFESLFLSSSHSEEDLDQTVEAFQHGLAAI

SEQ ID NO: 182859 - protein, 241 aa, Unknown
  Bacterial polypetide isolated from the Sargasso Sea
AVKALFAETPDAIAGVILEPIVGNAGFIQPEPGFLEGLRELTKEHGALLVFDEVMTGFRISYGGAQAHFGVTPDLTTMGKVIGGGLPVGAYGGRADIMGMVAPAGPMYQAGTLSGNPLAMTAGIKTLELLKQPGSYEKLTATTAKLIAGIKQAATAAGLPFTGGSVSAMFGFFLCEGPVRNFEDAKATDSERFGKLHRAMLERGVYLAPSAFEAGFTSLAHSDTDIEATINAFRDSFAEVA

SEQ ID NO: 182860 - protein, 241 aa, Unknown
  Bacterial polypetide isolated from the Sargasso Sea
MNTSRSQAIFGEAQGLMPGGVSSPVRAFKSVGGQPIVFDRVKGPYAWDVDGNKYIDYIGSWGPAICGHAHPEVISALQEAIEKGTSFGAPCALENTLAEMVIDAVPSVEMVRFVNSGTEACMAVLRLMRAFTGRDKVIKFEGCYHGHADMFLVKAGSGVATLGLPDSPGVPRSTTANTLTAPYNDLEAVKALFAENPDAIAGVILEPIVGNAGFIQPEPGFLEGLRELTKEHGALLVFDEV

SEQ ID NO: 182861 - protein, 410 aa, Unknown
  Bacterial polypetide isolated from the Sargasso Sea
MPGGVNSPVRAFGNVNSTPIFIKSSSGAYLHDVDGNDYVDFIGSWGPMILGHSNPKIIKAIKDQADLGTSYGAPTEAETSIGELIRTVMPSIEKIRMVNSGTEATMSCIRLARGYTGRNKIIKFTGCYHGHVDSLLIKAGSGVSTFGLPDSPGIPEELARHTLSVPYNDINAFLEVFESIKNELAAVIIEPIAGNMGFIPGNKDFLETLRAKTHENGSVLIFDEVMTGFRVSLGGAQELYEITPDLTALGKVIGGGLPVGAFGGKAEIMNFLAPEGPVYQAGTLSGNPLAVAAGKCLINELIKTNPYHELEANSNYLLTNIKNEMFKKEIPFSFNQIGGMFGFFFTEEFPKNFDDVSSSNDKYFESFFKDCLNQGIYFAPSKYEAGFISTKHNKKILDEVINKVKEIYGT

SEQ ID NO: 182862 - protein, 480 aa, Unknown
  Bacterial polypetide isolated from the Sargasso Sea
MFLPDPRDPSRADTPQTAPRACRARLRYNRTIVPPRRRGPCTGPRALLSQVSSMSNNQILFERAQKTIPGGVNSPVRAFRSVGGTPRFVARAQGPYFWDADGKQYIDYIGSWGPMIVGHVHPEVLSAVQDVLADGFSFGAPTEAEIEIAEEICKLVPSIEQVRMVSSGTEATMSALRLARGFTGRSRIVKFEGCYHGHADSLLVKAGSGLLTFGNPTSAGVPADIAKHTTVLEYNNVAALEEAFGAFGDEIAAVIVEPVAGNMNLVRGTPEFLNALRALCTKHGAVLIFDEVMCGFRVALGGAQAYYGITADLTCLGKVIGGGMPAAAFGGRRDIMAHLAPLGGVYQAGTLSGNPIAVAAGLKTLQLIQAPGFYDALTAQTKRLADGLAAEARAAGVPFAADSIGAMFGLYFAERVPASFAEVTKSDTERFNRFFHLMLDEGVYFAPSAYEAGFVSSTHDDAVIDATLAAARRAFAALAA

SEQ ID NO: 182863 - protein, 429 aa, Unknown
  Bacterial polypetide isolated from the Sargasso Sea
MKSINKSIKLFKEAKLHMPGGVNSPVRAFKNIDGNPIFFKKAKGPYVYDEDGNKYIDYIGSWGPMIMGHSHPIIIKAIAKQMNLGTSYGAPTSIESDTAKLIKECVPSIEKIRMVNSGTEATMSAIRLARGYTNRDKIIKFDGCYHGHVDSLLIKAGSGVSTFGLPDSPGIPSELAKKTLSCEFNNKEEFLKVFNKNKKDIAAVIIEPIAGNMGFIPADKSFLELLRKTTKANNSLLIFDEVMSGFRVALGGAQELYKIKPDLTTLGKVIGGGLPVGAFGGNKKIMDYLAPNGPVYQAGTLSGNPLAMAAGSSLIKLLIKNNPYKNLESKASALLTNMKDIFQKYDIPLSVNQKGGMFGFFFSKKLPKNLNDVINTDDILFKSFLNKSIENGIYFAPSKFEAGFISTKHTNKEINNTIRIIQNILKKGI

SEQ ID NO: 182864 - protein, 276 aa, Unknown
  Bacterial polypetide isolated from the Sargasso Sea
MNLFSEAKKVIAGGVNSPARSFSGVGGEPLFFKSAKGAYIRTESGRELIDYVGSWGPMILGHSFPPVLNSIKKAIENGLSFGAPTKIETKLAKKVKDFIPSIEKLRMVSTGTEATMSAIRLARGYTGRDLIVKFEGCYHGHVDSLLIKAGSGALTHGAPSSPGIPKSLAKNTLIIPFNDRDALKKIYESYGDQIACSIVEPIAGNMNMIKPIPGFLEDLQDISKRHGSLLIFDEVMTGFRVAKGGAQSIYNIEPDMTALGKLLEEDYLQLLLVEEI

SEQ ID NO: 182865 - protein, 132 aa, Unknown
  Bacterial polypetide isolated from the Sargasso Sea
MQISQSKKLFSLAQQRLPGGVNSPVRAFKSVNMTPLFIASGQGSKLFDKDGNEYIDYVGSWGPMILGHANQKVVSKLKETLDNGTSFGAPTEGETLLAEMICDAVKSIEMIRLVKFRYRSSNGCSAIGTWLY

SEQ ID NO: 182866 - protein, 312 aa, Unknown
  Bacterial polypetide isolated from the Sargasso Sea
GTEATMSAIRLARGFTNKNKIIKFDGCYHGHTDSLLIKAGSGVSTFGLPDSPGIPPQLAKETLSCEFNNTEAFLEIFNKVKDDLAAVIIEPIAGNMGFVPGELSFLKMIREKTSKNKSLLIFDEVMTGFRVSLGGAQEIYKIKPDLTTLGKIIGGGLPVGAFGGRKDVMDCLAPNGPVYQAGTLSGNPLAMAAGSSLIKILMKDNPYKKLEDKAKKMLDKMKCLFIENNIDLSTNQIGGMFGFFFSKELPKNLNDVINTNDKQFITFINECIKNGIYFAPSKFEAGFISTKHTNAEINNTIGTIKKILKKGI

SEQ ID NO: 182867 - protein, 153 aa, Unknown
  Bacterial polypetide isolated from the Sargasso Sea
MPGGVNSPVRAFGNVNSTPIFIKSASGAYLHDVDGNDYVDFIGSWGPMILGHGNPKIIKAIKDQADLGTSYGAPTEAETSIGELIRTAMPSIEKIRMVNSGTEATMSCIRLARGYTGRNKIIKFTGCYHGHVDSLLIKAGSGVSTFGLPDSPG

SEQ ID NO: 182868 - protein, 431 aa, Unknown
  Bacterial polypetide isolated from the Sargasso Sea
MKTKNSEKLFEKSKNHIAGGVNSPVRAFKSVGGSPIFFRKSRGCYLYDEDGNKYLDFVGSWGPMILGHSNKKIADAIKKQSSKGISFGAPTKNELEIAKLIKSYVPSIEKLRMVNSGTEATMSCIRLARGTTKRNIIIKFIGCYHGHVDSLLVKAGSGLATLGVPDSPGIPEELSKLTITIPYNDINALKEAFNSHSQDIAAVIVEPIAGNMGFIEPSEDFLKELRQICTENNSILIFDEVMTGFRVARGGAQELFNINPDLTALGKIVGGGLPVGVYGGKKEIMDNIAPDGPIYQAGTLSGNPIAVSAGTALLKQLNDQNIYRKLEENAHVFLQIVKDYCDQNKIPFSFNVRGGMFGFFFSKNLPMNFSDVENSNIELFKKFFRGMLEENIYLPPSAYESCFISTEHNEDKLVKAAKTAIKVLDKINNEV

SEQ ID NO: 182869 - protein, 383 aa, Unknown
  Bacterial polypetide isolated from the Sargasso Sea
MWDADGKQYIDYIQSWGPMVLGHNNAQIREAVIEASYNGLSFGAPTEAEVIMAELVSELVPSMEMVRMVNSGTEATMSAIRLARGYTSRNKIVKFEGCYHGHADSLLVKAGSGALTLGVPSSPGVPANVAEHTLTVEYNNLDSVKEIFEAHGDDIACIIVEPVAGNMNCIPPVEGFLEGLRAICDQYGSVLIFDEVMTGFRVSRGGAQERYNIKPDLTCLGKVIGGGMPVGCFGGRRDIITHIAPTGPIYQAGTLSGNPVAMAAGLAALTQIKQPGLYDSIFENTQTLVDGFQALADKHNISLTTNIAGSMFGIFFTDVEKVTNYKQAINCNTEQFNKFYHGMLEQGVYLAPASYEAGFVSKAHDAAVIEQTLAAADKVFSTL

SEQ ID NO: 182870 - protein, 429 aa, Unknown
  Bacterial polypetide isolated from the Sargasso Sea
MKTKNSDKLFEKSKNHIAGGVNSPVRAFKSVGGSPIFFRKSRGCYLYDEDGNKYLDFVGSWGPMILGHSNKQITEAIKKQSSKGISFGAPTKNELEIAKLIKSYVPSIEKLRMVNSGTEATMSCIRLARGTTNRNIIIKFVGCYHGHVDSLLVKAGSGLATLGVPDSPGIPEELSKLTITIPYNDNNAVKEAFNKHAKDIAAVIVEPIAGNMGFIQPNEDFLQNLRQVCTENKSILIFDEVMTGFRVARGGAQELFNIDPDLTALGKIVGGGLPVGVYGGKKEIMDNIAPDGPIYQAGTLSGNPIAVSAGTALLKQLKNQKIYEKLEKNAKNFLKIIKDYCDQNKIPFSFSARGGMFGFFFSKNLPKNFDEVENTDIEFFKKFFRGMLEENIYLPPSAYESCFISTEHNEDKLVKAAKTAIKVLDKIKK

SEQ ID NO: 182871 - protein, 412 aa, Unknown
  Bacterial polypetide isolated from the Sargasso Sea
MPGGVNSPVRAFKNINGNPIFFKKAKGPYIFDADNNKYIDYIGSWGPMIMGHSHPEIVKSVSKQLQLGTSYGAPTSIESTTAKLIKKCIPSIKKIRMVNSGTEATMSAVRLARGYTKRNKIIKFDGCYHGHVDSLLIKAGSGVTTFGLPDSPGIPKELAKQTLSCEFNNKDEFLKIFNKVKGDLAAVIIEPIAGNMGFIPADKSFLKLIREKTSQNKSILIFDEVMSGFRVSLGGAQEIYKIKPDLTTLGKVIGGGLPVGAFGGRKDIMDYLAPNGPVYQAGTLSGNPLAMAAGSKLIKLLIKNNPYNALEKKANNLLIKMKQLFLENDIPLSVNAKGGMFGFFFSKSLPKNLNDVVATNDKFFSSFLNKCISEGIYFAPSKFEAGFISTKHTKLEINHTINVIEKILKKGI

SEQ ID NO: 182872 - protein, 330 aa, Unknown
  Bacterial polypetide isolated from the Sargasso Sea
ITEMVPSIEKVRMVNSGTEATMSAIRLARGYTKKEKIIKFAGNYHGHGDSFLIKAGSGAVTLGLPDSPGVTKNIAKDTLIANFNNLSSVEQLFKENKSEIAAVIVEPIAGNMGLVKPRENFLEGLRKLCDSHNSLLIFDEVMTGFRVAKGGAQEIFGVSPDLTTLGKIIGGGLPVGAYGGKQEIMDMLAPNGPVYQAGTLSGNPLAMTAGLTVLNMLNQNVYDKLEIISKKIEDGWNKNIVETNTNAHIARQGSMLTLFFSDKNEVINYDDALNLDVEKYAIYFKKMLEMGVYLPPSQYECLFLSSVIDEDDIEKLIISNRIALENIKDE

SEQ ID NO: 182873 - protein, 333 aa, Unknown
  Bacterial polypetide isolated from the Sargasso Sea
ETAKLIKQCVLSIEKIRMVNSGTEATMSAIRLARGYTKRDKIIKFDGCYHGHVDSLLIKAGSGVSTFGLPDSPGIPNELAKKTLSCEFNNKEEFLKIFNKVKNDLAAVIVEPVAGNMGFIPGDKSFLKLLRKKTSENKSLLIFDEVMSGFRVSLGGAQELYKIKPDLTTLGKVIGGGLPVGAFGGKKKIMNCLAPNGPVYQAGTLSGNPLAMAAGSMLIKLLIKTNPYKKLEDKAADLLQGMKNVFDANDIPFSVNQLGGMFGFFFSEKLPKNYKDVVKTNDKHFKNFLNQCIENGIYFAPSKFEAGFISTKHTKTEINNTIMITKNIISKGI

SEQ ID NO: 182874 - protein, 136 aa, Unknown
  Bacterial polypetide isolated from the Sargasso Sea
MPGGVNSPVRAFGNVNSTPIFIESASGAYLHDVDGNDYVDFIGSWGPMILGHSNPKIIKAIKDQADLGTSYGAPTEAETSIGELIRTVMPSIEKIRMVNSGTEATMSCIRLARGYTGRNKIIKFTGCYHGHVDSLL

SEQ ID NO: 182875 - protein, 272 aa, Unknown
  Bacterial polypetide isolated from the Sargasso Sea
MSTPSRSAALFERAQKTIPGGVNSPVRAFRSVGGTPRFIAKAAGPYLWDADGTRYIDYVGSWGPMIVGHAHPEVVRAVQDVAADSFSFGAPTEAEVVMAEEICKLVPSIEQVRLVSSGTEATMSALRLARGFTGRDLIVKFEGCYHGHADSLLVKAGSGLLTFADTTQNAPSSAGVPEDVVKHTMVLPYNDVAALREAFARHGKEIAAVIVEPVAGNMNLVRGSHEFHQAMRALCTEHGAVLIFDEVMTGFRVALGCAQALYGIKPDLTCLG

SEQ ID NO: 182876 - protein, 385 aa, Unknown
  Bacterial polypetide isolated from the Sargasso Sea
MRAYLHDVDGNDYVDFIGSWGPMILGHGNPKIIKAIKDQADLGTSYGAPTEAETSIGELIRTAMPSIEKIRMVNSGTEATMSCIRLARGYTGRNKIIKFTGCYHGHVDSLLIKAGSGVSTFGLPDSPGVPEELARHTISVPFNDINAFLEVFESIKSELAAVIIEPIAGNMGFIPGDKDFLETLRTKTHENGSVLIFDEVMTGFRVSLGGAQELYGITPDLTALGKVIGGGLPVGAFGGKAEIMNFLAPEGPVYQAGTLSGNPLAVAAGKCLINELIKTNPYDELEANANYLLTNIKNEMFKKEIPFSFNQIGGMFGFFFTDEFPNNFDDVSASSDKYFESFFKDCLNQGIYFAPSKYEAGFISTKHTKKILDEVINKVKVIYGS

SEQ ID NO: 182877 - protein, 171 aa, Unknown
  Bacterial polypetide isolated from the Sargasso Sea
IKPDLTTLGKIIGAGLPVGAFGGKKNIMDYLAPNGPVYQAGTLSGNPLAMAAGATLISLLIKSNPYKSLELKAKTLLDKMKEIFEEYEIPISTNQIGGMFGFFFSDALPENLNDVMKTNDIHFKNFLNACMNNGIYFAPSKFEAGFISTKHTKTEINNTIRAIKKILKEGI

SEQ ID NO: 182878 - protein, 323 aa, Unknown
  Bacterial polypetide isolated from the Sargasso Sea
MKRTNSESLFKQAQSLMPGGVNSPVRAFKNVDGKPIFFKSAKGPILIDEDENQYIDFIGSWGPMILGHSNPIILDAIKAQLELGTSYGAPTSLENTLARMIKGQVPSMEKLRMVNSGTEATMSCIRLARGFTGKNKILKFTGCYHGHVDSLLVKAGSGVSTFGLPDSPGIPNELAALTYSCSYNDIEALLKITSEISDDLAAIIVEPIAGNMGFIPGEPEFLNALRKLCDKYNSLLIFDEVMSGFRVGLGGAQAIYEIQPDLTALGKVIGGGLPVGAFGGKQSVMDQLAPLGPIYQAGTLSGNPLAMSAGIALIDALIKENPF

SEQ ID NO: 182879 - protein, 326 aa, Unknown
  Bacterial polypetide isolated from the Sargasso Sea
DMVPSIEKVRMVSSGTEATMSAIRLARGYKRKDLIIKFSGNYHGHFDSFLIRAGSGAMTLGKPDSQGVTDNIARDTLVADFNNIDSVNELFKKNKNKIAAVIIEPIAGNMGLVKPNKNFLNELRVLCDENDTLLIFDEVMSGFRVSKGGAQELYGVKPDLTTLGKIIGGGLPAGAYGGSQEVMDHVAPDGPVYQAGTLSGNPLAMAAGLSVLNRLDDQVYKDLEIISSKIENGINKNIDKTGVSANIARVGSMMTLFFSKKQKIENFSDAQDCNTELYSKYFHYMLKRGIYLPPSQYECMFLSNKIDQKDIDNIIESNLDSLKKLN

SEQ ID NO: 182880 - protein, 430 aa, Unknown
  Bacterial polypetide isolated from the Sargasso Sea
MTRSEALFEQAKKTIPGGVNSPVRAFNGVGGSPLFIEKADGAYIYDADGKAYIDYVGSWGPMILGHNHPKIREAVLAAVHNGLSFGAPTELEVQMAEKVIAMVPSIEQVRMVSSGTEATMSAIRLARGFTNRDKILKFEGCYHGHADCLLVKAGSGALTLGQPSSPGIPEDFAKHTLTAVYNDLDSVRSLFEQYPTEISCIIIEPVAGNMNCIPPIPGFLEGLRSLCDEFGALLIIDEVMTGFRVSRSGAQGHYGVTPDLTTLGKVIGGGMPVGAFGGRKDVMQFIAPTGPVYQAGTLSGNPIAMSAGLAQMEALCEEGLYEALSAKTKRIAEGFKAAADKHGIPMAINYVGGMFGFFFTEQEQITRFDQVTKCNIEHFRTFYHGMLDEGVYLAPSAYEAGFLSMAHGEEELRLTLEAADRVLARMRAAM

SEQ ID NO: 182881 - protein, 430 aa, Unknown
  Bacterial polypetide isolated from the Sargasso Sea
MKTKNSKELFKKSKEHIAGGVNSPVRAFKSVGGTPIFFKKSRGCYLYDEDGNKYLDFVGSWGPMVLGHSNKAIVNAIKKQASKAISFGAPTKNELEIAKIIKSYIPSIEKLRMVNSGTEATMSCIRLARGTTGRKKIIKFIGCYHGHVDSLLVKAGSGAATLGVPDSPGIPDELSKLTITLEYNNGSELKKAFTKFGEDIAAVIVEPIAGNMGFIEPEENFLKTLRSLCTKNKSILIFDEVMTGFRVARGGVQELFNIKPDLTALGKIVGGGLPVGVYGGKAKIMNNISPDGPVYQAGTLSGNPVAVSAGTALLKQLKNKKMFSELEKNGEIFLKGLKEEAEKNNIPFSYNIRGGMFGFFFSSKLPKNFQEVSDTNISMFNKFFRLMLEQNVYLPPSAFESCFLSTEHTKEQLMKTVKLSSNVFKNLNNG

SEQ ID NO: 182882 - protein, 215 aa, Unknown
  Bacterial polypetide isolated from the Sargasso Sea
PEPGFLEGLRTICDDYGALLVFDEVMTGFRVALGGAQERYNVRPDLTTLGKIIGGGLPVGAYGGREDLMRMIAPDGQVYQAGTLSGNPLAVAAGRTTLGILESNPDIFSELEGTGKTLGLGLEALGHEYGVPIRWQSSGGMGCPFFSETPVTDWQSSAATDSQAFNRFFHGMLQRDIHLPPSRFEAWFWSTAHSTTDIDRTLTSAKDILAGGLDA

SEQ ID NO: 182883 - protein, 429 aa, Unknown
  Bacterial polypetide isolated from the Sargasso Sea
MNKIDKSLKLFKEAKLHIPGGVNSPVRAFKNINGNPIFFKKAKGSKLFDEDNNEYIDYIGSWGPMIMGHSHPKIIKAISKQVKLGTSYGAPTSIESKTAELIKKCIPSIEKIRMVNSGTEATMSAIRLARGFTKKNKIIKFDGCYHGHADSLLIKAGSGVSTFGLPDSPGVPPQLAKETLSCEFNNSKDFLKIFEKVKNDLAAVIIEPIAGNMGFIPSEPSFLKLIRKKTAQNKSLLIFDEVMSGFRVSLGGAQEIYKIKPDLTTLGKIIGGGLPVGAFGGRKDIMDYLAPNGPVYQAGTLSGNPLAMAAGSALIKLLIKDNPYQSLEAKSKLMLERMKGLFLEKKIHLSTNQIGGMFGFFFSEELPKNLNEVINTNDQQFKSFINECIKNGIYFAPSKFEAGFISTKHTNKEINNTISVIKEILNKGI

SEQ ID NO: 182884 - protein, 412 aa, Unknown
  Bacterial polypetide isolated from the Sargasso Sea
MPGGVNSPVRAFKNIDGNPIFFSKAKGPYVFDADDNKYIDYIGSWGPMILGHSNPNIIRAISKQLQLGTSYGAPTNLESKTAQIIKDCVPSIEKIRMVNSGTEATMSAIRLARGFTKRNKIIKFDGCYHGHVDSLLIKAGSGVSTFGLPDSPGIPKQLAKQTISCEFNNKDAFLETFENVKNDLAAVIIEPIAGNMGFIPGTKSFLNLLRKKTKENNSILIFDEVMTGFRVSLGGAQEIYKIKPDITTLGKVIGGGLPVGAFGGKKEIMDYLAPNGPVYQAGTLSGNPLAMAAGYALIKLLAKENPYKSLEANAKKLLTEMHREFERKKIPFSSNQIGGMFGFFFSKKLPKNFNDVVNSSDEHFKKFLNASIRNGVYFAPSKFEAGFISTKHTKKEISNTIKIVKNILNEEI

SEQ ID NO: 182885 - protein, 397 aa, Unknown
  Bacterial polypetide isolated from the Sargasso Sea
MEILFFFKKARGPYLIDADNNKYIDYIGSWGPMILGHSNPNIIKAVSRQLELGTSYGAPTSIESDTAKLIKKCFPSIQKIRMVNSGTEATMSAVRLARGYTNKTKIIKFDGCYHGHVDSLLIKAGSGVSTFGLPDSPGIPNELAKKTLSCEFNNKDSFLKIFNKVKNDLAAVIVEPIAGNMGFVPGDKSFLKLLRKKTSENNSLLIFDEVMTGFRVSLGGAQELYGIKPDLTTLGKVIGGGLPVGAFGGKKKVMDCLAPNGPVYQAGTLSGNPLAMAAGSTLIKLLIDQNPYKDLESKAKNLLEGMKEIFDRYDIPFSTNQIGGMFGFFFSEELPSNLVDVENTNDKQFKKFLNKCIDNGIYFAPSKFEAGFISTKHTKTEISNTIKIVEKILKEGI

SEQ ID NO: 182886 - protein, 218 aa, Unknown
  Bacterial polypetide isolated from the Sargasso Sea
GNMNFIRSQKKFLQELRKICTKNKIVLIFDEVMTGFRVSISGAQGLYGISPDLTTLGKVLGGGLPVGAFGGKREIMDCVAPNGEIYQAGTLSGNPLAMAAGLKTLTIISEKGYFEQLSKKTSYLVSKFNQVSIKYGLDMSADSEGGMFGIYFTKSKLSNINDINKTSKDTFIDFFNHMLKNGVFFAPSMYEAGFLSSSHLKKDIDYTIEVFEDWAKKR

SEQ ID NO: 182887 - protein, 430 aa, Unknown
  Bacterial polypetide isolated from the Sargasso Sea
MTRSEALFEQAKKTIPGGVNSPVRAFNGVGGSPLFIEKADGAYIYDADGKAYIDYVGSWGPMILGHNHPKIREAVLAAVHNGLSFGAPTELEVQMAEKVIAMVPSIEQVRMVSSGTEATMSAIRLARGFTNREKILKFEGCYHGHADCLLVKAGSGALTLGQPSSPGIPEDFAKHTLTAVYNDLDSVRSLFEQYPTEISCIIIEPVAGNMNCIPPIPGFLEGLRAMCDEFGALLIIDEVMTGFRVSRSGAQGHYGVTPDLTTLGKVIGGGMPVGAFGGRKEVMQFIAPTGPVYQAGTLSGNPIAMSAGLAQMEALCEEGLYEALSAKTKRIAEGFKAAADKHGIPMAINYVGGMFGFFFTEQEQITRFDQVTKCNIEHFRTFYHGMLDEGVYLAPSAYEAGFLSMAHGEEELRLTLEAADRVLGRMKAAM

SEQ ID NO: 182888 - protein, 423 aa, Unknown
  Bacterial polypetide isolated from the Sargasso Sea
MNKKSLKLYARAKKVIPGGVNSPVRAFLSVNQKPFFVKKAHGQYLVDEDNNKIIDYIGSWGAQILGHGHSKIKNTLTASLRKGITYGAPCSREVELAEKITKIYPSINKVRMVSSGTEATMSAIRLARGYTGRNKILKFNGCYHGHGDSFLIKAGSGAATFGVPNSLGVPPGLAKETISTNFNDIESVKKVVKKYKLACIIIEPIAGNMNFIRSDENFLHELRTICSENDIVLIFDEVMTGFRVALGGAQSLYSIKPDLTTLGKVLGGGLPVGAFGGKSKIMNQLSPDGGVYQAGTLSGNPLAMDAGLKTLDLISKKNYFKNLEKITRQLTDGINELSRKYNKKIYADSQGGMFGIYFTDKKVVNYESISKSDIKKFIQFFKFMLKNKIYFAPSAYEAGFVSSAHTANNINYTLDIFEKWIKN

SEQ ID NO: 182889 - protein, 426 aa, Unknown
  Bacterial polypetide isolated from the Sargasso Sea
MNNSKKAFVKAKNLFPGGVNSPVRAFKNVNSEPFFVKRAKGPYLYDVDNKKYIDFIGSWGPMILGHANKEILKAISISLKNGTSYGAPTLIESKMAELIKKNFPSIEKMRMTSSGTEATMSAIRLARGFSKRELIIKFEGCYHGHSDSLLSEAGSGLSTFGNPSSPGIPKGLEKLTINLRYNDIKQLENCFKKYSNKIACVIIEPIAGNMNMILPNLHFLKKIRTLCNKNKSILIFDEVMTGFRVSIGGAQKLYGVKPDLTTLGKIVGGGLPVGVFGGKKQIMDSLSPVGPIYHAGTLSGNPIAMSAGIKTIELLNKKNIHKKLENKCQHLLEGMSFYAKKNNIPFKYNYAGGMFGYFFTNLNEVTNYDEVKKCNKKTFIKFFNMMLSKGVYFAPSMFEAGFISYEHSEKDINKVINASKSIFKNL

SEQ ID NO: 182890 - protein, 150 aa, Unknown
  Bacterial polypetide isolated from the Sargasso Sea
MKTKNSDKLFEKSKNHIAGGVNSPVRAFKSVGGSPIFFRKSRGCYLYDEDGNKYLDFVGSWGPMILGHSNKQITEAIKKQSSKGISFGAPTKNELEIAKLIKSYVPSIEKLRMVNSGTEATMSCIRLARGTTNRNIIIKFVGCYHGHVDL

SEQ ID NO: 182891 - protein, 402 aa, Unknown
  Bacterial polypetide isolated from the Sargasso Sea
MKISESKKLFSRAQEVMPGGVNSPVRAFKSVQSEPLFITHAKGSRLFDADGNSFIDYIGSWGPMILGHADPRITSEIEKALQKGTSFGTPTEGEIELAEMISDAVSSVEMVRLVNSGSEAAMAALRVARGFTGRDKIIKFEGCYHGSVDALLVKAGSGATTLGIPDSPGVPQSFTEHTLSAPFNDLDAVIELTENFPDEIAAIVLEPVAGNMGMIPPEHGFLQGLRELCDREGILLIFDEVMTGFRVDFSGAQALFQVMPDLSIFGKVIGGGLPVGAYGGRREIMLQVAPAGPVYQAGTLSGNPMAVSAGKTMLKILKEEDPYADLGRKTATLNEALSDAAKKKGIPLETCSMGGMFGFFFSEKKVRNYEDALKCNREYFITFFREVLSRGIYLAPSPFESL

SEQ ID NO: 182892 - protein, 279 aa, Unknown
  Bacterial polypetide isolated from the Sargasso Sea
FLVKAGSGVATLGLPDSPGVPRTTTANTLTAPYNDLEAVKKLFSENPDAISGVILEPIVGNAGFITPEPGFLEGLRELTTENGSLLVFDEVMTGFRISYGGAQEKFGVIPDLTTLGKVIGGGLPVGAYGGKKEIMSMVAPSGPVYQAGTLSGNPLAMTAGIKTLELLKQDGTYDKLNSTTSRLIEGIIQSAENNGIAINGGSVSAMFGFFLCDGPVRNFDEAKSNDAELFGKLHREMLRRGIYLAPSPFEAGFTSLAHSEEEIDKTIEAFDESFNAIKK

SEQ ID NO: 182893 - protein, 393 aa, Unknown
  Bacterial polypetide isolated from the Sargasso Sea
FFRKSRGCYLYDEDGNKYLDFVGSWGPMILGHSNKQITEAIKKQSSKGISFGAPTKNELEIAKLIKSYVPSIEKLRMVNSGTEATMSCIRLARGTTNRNIIIKFVGCYHGHVDSLLVKAGSGLATLGVPDSPGIPEELSKLTITIPYNDNNAVKEAFNKHAKDIAAVIVEPIAGNMGFIEPNEDFLQNLRQICTENKSILIFDEVMTGFRVARGGAQELFNIDPDLTALGKIVGGGLPVGVYGGKKEIMNNIAPDGPIYQAGTLSGNPIAVSAGTALLKQLKDQKIYEKLEKNAKNFLKIIKDYCDQNKIPFSFSARGGMFGFFFSKNLPKNFDEVENTDIEFFKKFFRGMLEENIYLPPSAYESCFISTEHNEDKIVKAAKTAIKVLDKIKK

SEQ ID NO: 182894 - protein, 80 aa, Unknown
  Bacterial polypetide isolated from the Sargasso Sea
VVDIKANAFVHHMVRNIVGSLMEVGAGNQPESWIAELLAAKDRKLAAATAKAEGLYLVSVDYPARYDLPVMPMGPLFLAD

SEQ ID NO: 182895 - protein, 192 aa, Unknown
  Bacterial polypetide isolated from the Sargasso Sea
CDLDKEWEPFRLSEALNFHLRPLPVAVIDCALVDKDWHARFSALERKYLFRLLVRRAPSTHEAGLVWQIGHSLDLSKMVEASKYLLGKHDFTTFRSSICQAKSPIKTLDEIKIDRIEGWSGDEFRFQLRARSFLQNQVRSFVGTLERVGAGSWDPVDVKKALEAKDRSACGPVSPPHGLYLTDVMYKPDPFK

SEQ ID NO: 182896 - protein, 250 aa, Unknown
  Bacterial polypetide isolated from the Sargasso Sea
MYTDVQRQREVPSVQEHLEKALSTVANQPIEVQCAGRTDAGVHATGQVVHFNCDAPRSERAWTLGVNANLPNSVAVTWAKNVSDDFHARFSATHRRYRYVIHNAKMRPAILHSGVTHIHRELDEKKMHVAAQALLGEQDFTSFRAALCQSKTPFRNVTDVSVYRQGRYVIIDIRANAFLHHMVRNITGALVEIGAGEQDVNWIAHLLSLKDRSKSAATAKPNGLYLVDVTYPDEYGLPKPPLGPLFLPEA

SEQ ID NO: 182897 - protein, 254 aa, Unknown
  Bacterial polypetide isolated from the Sargasso Sea
MPRYKITIEYDGKNYNGWQAQKGLRTVQKAIEQSIEKFCGKKISIYGAGRTDTGVHASGQVAHFDLDMDSIQDQKDKVGKLTMGVNYYLSRNFDSEISIISSEQVNENFHARFSAKYRRYKYSILNKRTSSPLNKNNSWRVPLPLDMKSMISASKLLIGKHDFSSFRSAECQSNSSIKTIDDISLIQNKDFIYIKVKAKSFLMNQVRIISGTLVEIGLNKKSEEDILVALKKYSKKHVGPTAPAHGLVLEKIIY

SEQ ID NO: 182898 - protein, 244 aa, Unknown
  Bacterial polypetide isolated from the Sargasso Sea
REVPSVQGHLEAALSKVANATIELSCAGRTDAGVHATGQVVHFDTDANRDMRAWIMGANSNLPDGIAVRWAKEVSDDFHARFSATARRYRYVIYNNKFRPAILGAGLSHYHQELNIELMQQAAVHLLGENDFTSFRAIQCQSHSPFRNLMHLHLSRVGQFIVLDIKANAFLHHMVRNITGSLLQVGMGLKEPEWIAELLAAKDRTLAAATAKAEGLYLVDVDYPEHFGIPKMPLGPLFLPDSFC

SEQ ID NO: 182899 - protein, 212 aa, Unknown
  Bacterial polypetide isolated from the Sargasso Sea
ACGQVVHFDTQAERSMKAWVMGANINLPHDVSVSWAKVMPAHFHARFKAIARRYRYVIYNDQIRPAHLNEEITWNHRPLDAERMAEAAQHLVGVHDFSAFRAGQCQAKSPIKEVHHLRVTRHGKMIVLDIRAGAFLHHMVRNIAGVLMTIGTGERPVEWAKEVLDSRIRRTGGVTAHPFGLYLVDVEYRDEFELPERFIGPHFLTGFSELGG

SEQ ID NO: 182900 - protein, 193 aa, Unknown
  Bacterial polypetide isolated from the Sargasso Sea
FLPPTVAVRWAQEMPEGFHARFSAHRRTYYYALTFGPTRAPLLEDKAGYVMLPPGQSLDVEAMNEAAQVLVGEHDFSSFRAAECQAKSPVKTMYSVEVRGEGEWVFVRIRGSAFLHHMVRNIMGCLVAIGRGRQPVSWMGDVLAARSRVAAAPTFMPDGLYLAEVGYPDAFSLPASPASSSLFRGVFDEHAGL

SEQ ID NO: 182901 - protein, 93 aa, Unknown
  Bacterial polypetide isolated from the Sargasso Sea
MSDQLQPPVYKIALGIEYDGSKYYGWQRQNEVRSVQEKLEKALSQVANEPINVFCAGRTDAGVHGTGQVVHFETTALRKDAAWTLGVNANLPG

SEQ ID NO: 182902 - protein, 224 aa, Unknown
  Bacterial polypetide isolated from the Sargasso Sea
GNSIQHELEVAAAKLTTHTTRIQGAGRTDAGVHATGQAAHLDVPSNYTTRSVMMGLNSYLEASSISVLSAEKVDGAFNARFDAIERRYLYRIFTRNARPSLDKFRVWHITKPLDIDAMTRAAQHLIGTHDFTSFRASQCQAKSPIRTMQSIEIEKIGDEIHITTIARSFLHKQIRNITGSLVEVGKGRWHSDKIKEIREAKDRRAAGPAAPPYGLYLTDVIYPR

SEQ ID NO: 182903 - protein, 214 aa, Unknown
  Bacterial polypetide isolated from the Sargasso Sea
CTCDQQVVHFDTSASRPSKAWVMGGNVHLPKDISIEWAAEVADDFDARRSALARRYVYMIQNSKVRSALMQDFLSHERRPLDADAMNVAAQSLLGENDFSSFRSANCQSQSPMRKLMSISVKRLGEMVIIDVVANAFLHHMVRNIVGSLLEVGAGQKPIIWIGELLYLADRSAAAKTAAPEGLSLVNVLYPEKYDVPPKACLPHVYRILDIAGL

SEQ ID NO: 182904 - protein, 239 aa, Unknown
  Bacterial polypetide isolated from the Sargasso Sea
DGTPFVGWQRQVSGLSVQQVLEEAAAKLTGGNILVQGAGRTDSGVHATGQVAHLDVPDKFNANRVMEALNALTGDHPVTILDAREVDAEAHARFSATGRRYLYRLLPRRQPPALDHDRVWHYRSALDPGAMQAAAAQLVGRHDFTSFRASHCQADSPVRTLDQLQIEPQDEEIHIHAGARSFLHHQVRNIVGTLVLVGAGKWTEDDVATALAAKHRSAAGPTAPPEGLYLTGVTYPTGI

SEQ ID NO: 182905 - protein, 246 aa, Unknown
  Bacterial polypetide isolated from the Sargasso Sea
MLTYQIKIEYLGTNFVGWQIQKKGLTVQGVLEKAISKYLKEKVKVIGSGRTDAGVHASEQSAHFKTNKKITDKNIFINSTNFFLSKHPVAILSIKKRPKEFHARFSANQRVYKYIIVNRRSSLVMERNKAWHIKKKLDLKIMQKGAKILTGTHNFSTFRASSCQAKSPIKTLKQAIVKKKKNKIILTFVSISFLQQQVRSMVGSLKYLGEGKWKLKDLKKAFYSKKRSMCAPPAPAHGLYLHKVKY

SEQ ID NO: 182906 - protein, 133 aa, Unknown
  Bacterial polypetide isolated from the Sargasso Sea
MRIALGIEYNGVGLFGWQRQREVPSVQGHLEAALSKVANTTIELSCAGRTDAGVHATGQVVHFDTDATRDMRAWIMGANSNLPDGIAVRWAKEVSDDFHARFSATARRYRYVIYNNKFKAAILGAGLVIIIRN

SEQ ID NO: 182907 - protein, 203 aa, Unknown
  Bacterial polypetide isolated from the Sargasso Sea
MSKTHRIALGIEYIGTSFNGFQKQKGTRNTIQQNIESALSKVADYRVKTVCSGRTDAGVHALGQVIHFDSPVHRANDSWIKGTNSNLPPEIRVIWSKEVSEDFHARFSAKSRHYKYLIRNSDLPSAFYKDRSYWINGNLKITKMRTASRYLIGEHDFNAFRNSGCQSKSSQRNMTKIKIEKNNGLISIDLEANAFLLNMGKNY

SEQ ID NO: 182908 - protein, 264 aa, Unknown
  Bacterial polypetide isolated from the Sargasso Sea
MRVALGVEYNGARYSGWQRQSHVNSVQQEVEKALSSICNHPVEIVCAGRTDAGVHGTGQVVHFETNASREMVAFTMGMNTLLPKDIAIRFAQPVAEDFHARFSATARRYRYVIYNYPYRGAVMNEGVTHFHHKLDEKVMQEACQHLIGEHDFTSFRALHCQANTAKRTIHHLSVQRQGDYVVIDIKANAFLHHMVRNITGCLMDIGLHKHQPVWLKELLDLKERAKASATAKAAGLYLVDVDYPEQFNIPKTPLGPLFLPDVDI

SEQ ID NO: 182909 - protein, 217 aa, Unknown
  Bacterial polypetide isolated from the Sargasso Sea
MVRYCLTIEYDGTNYVGWQRQITGSSIQQELEDAVKAFCGENSLVQGAGRTDAGVHALGQVAHVDIKRKTDGNTVRNALNAHLWPQPISILKAEVVPNGFHARFSAQARSYVYVIINRRAPIAIERHRAWHISRPLKSASMHEAAQRLIGKHDFSTFRASHCQAKSPIKTLTSIDVRQVGERIEIVTKAPSFLYHQVRNFVGTLKLVGEGKWDADDV

SEQ ID NO: 182910 - protein, 261 aa, Unknown
  Bacterial polypetide isolated from the Sargasso Sea
MRIALGIEYDGSGYFGWQRQAEVDSVQGQLEQALSKVANEPISLFCAGRTDAGVHATGQVVHFDTNAVRNEGAWTLGVNANLPDNIAVRWVKEVDESFHARFSATARRYRYVIYNHNLRPGILRHGVSHYHGDIDVDKMHIAAQALLGEQDFTSFRAIQCQSKTPFRNVHSVKVTRQGMYVIVDISANAFLHHMVRNIVGSLLEIGLGNQPLTWMADLLSLKDRNQAAATAKPNGLYLVDVTYPEQYQLPKLALGPLFMLD

SEQ ID NO: 182911 - protein, 241 aa, Unknown
  Bacterial polypetide isolated from the Sargasso Sea
MKRFFLKIEYDGTLYHGWQKQKNCKTIQGEIEYAFNQLTGKNVNLTGSGRTDAGVHAYCQIAHVDLEKDWLPEKLQGALNFFLKKIPISILEVKKVDNNFHARFSAIHRVYQYKIFIRRAPLVLHNKRYWHIWKNLDTENMIKASNFLLGTHDFTTFRSSICQSNSPIKTLDKIRIKHKIKNHKKIVVLQFKARSFLHNQVRSIVGSLVNVGLKKWEPHYLKTILDKKDRRKCGPIAPPEG

SEQ ID NO: 182912 - protein, 244 aa, Unknown
  Bacterial polypetide isolated from the Sargasso Sea
MHKYKLKIEYDGSNFVGWQKQNNGISIQESIEQAIFELTGEKTIVFGAGRTDAGVHALGQVAHFDLKKNFNIDKVRDGLNHHLRPNPIAILKVENASDSFHARFSAKQRTYEYLITNRRAPLTIKKNKSWSIFKTIELEKMRYEANFFIGKHDLQAFRSIDCQSNTSIKTIDEIKISKNNENLNISISAKSFLHSQVRIMVGTLVEIGKGKITESITQIIKSKDRTRAGVTAPAHGLYLVKVNY

SEQ ID NO: 182913 - protein, 255 aa, Unknown
  Bacterial polypetide isolated from the Sargasso Sea
MPRYALKIEYDGAPFVGWQRQQSQVSVQGSIEKALSNLENKEHTIAGAGRTDAGVHAKCQVAHCDLDKEWEPFRLSEALNFHLKPLPVAVIDCALVDKDWHARFSALERKYLFRLLVRRAPSTHEAGLVWQIGHSLDLSKMVEASKYLLGKHDFTTFRSSMCQAKSPIKTLDEIKIDRIEGWSGDEFRFQLRARSFLHNQVRSFVGTLERVGAGSWNPVDVKKALEAKDRSACGPVSPPHGLYLTDVVYEPNPFT

SEQ ID NO: 182914 - protein, 243 aa, Unknown
  Bacterial polypetide isolated from the Sargasso Sea
MKRYKLVCQYDGANFSGWQLQNDNRTVQGELEKVLTKLNKGELVRVIGSGRTDAGVHALGQVAHFDISTKLKINDLKKAINGNLHEDCYVNFIELVDEEFHARFSASQRSYIYSCRQNRYLLDRNKVWNTGELDILKLNNAAKILIGEHDFLSFSKKNPKMNDTISIIYQSEWKENGQIVNYHISGNRFLHHMVRYLVGSMVAISQGKYSIEQLIKELDNPKSDSKQFKAPAYGLVLNYVSYE

SEQ ID NO: 182915 - protein, 251 aa, Unknown
  Bacterial polypetide isolated from the Sargasso Sea
MRFFLTIEYDGSEYIGWQRQNSGLSVQEVVENSIYKIIQINLNIYGSGRTDAGVHATGQVAHVDIITKEFEENRLMDAINAYLLDHKIKVTDVRKTIDDAHARFSALSRQYEYVILNRSAPPAIEEGKVWHQRRILNIKKMQEAASYFVGTHDFTSFRATQCQSKSPIKTLDELAVVQKENKIFIRAKAKSFLHHQVRNIVGTLQLVGSEKYKPEDIKLIFEKKDRTSAGPTAPACGLTLVKIEFPQEIYL

SEQ ID NO: 182916 - protein, 261 aa, Unknown
  Bacterial polypetide isolated from the Sargasso Sea
MRIALGIEYDGSGYFGWQRQAEVDSVQGQLEQALSKVANEPISLFCAGRTDAGVHATGQVVHFETNAIRNEGAWTLGVNANLPDNIAVRWAKEVDDSFHARFSATARRYRYVIYNHNFRPGILRHGVSHYHGDIDADKMHVAAQALLGEQDFTSFRAIQCQSKTPFRNVHSVKVTRQGMYVIVDISANAFLHHMVRNIVGSLLEIGLGNQPLTWMADLLALKDRNQAAATAKPNGLYLVDVTYPEQYQLPKLALGPLFMLD

SEQ ID NO: 182917 - protein, 270 aa, Unknown
  Bacterial polypetide isolated from the Sargasso Sea
MRIALGIQYDGAAFCGWQAQPHGKTVQDRLEHALAEFARVPLHTTVAGRTDTGVHGLGQVVHFDTDLDREVFSWVRGTNAFLPPTVAVQWAKPMPDTFHARFSAFERTYYYTLYVHPVRSPMLAGRAGWIHTPLDDDAMRAAAAHLIGEHDFSSFRSSECQSKTPVKHLYQIDVRRVGHFIHFRFRANAFLHHMVRNLMGCLVAVGRGRYPADWLADVLAGRDRKLAAPTFMADGLYLAHVGYPAEFAVPPAQLGSVPWSSVWADLDPQS

SEQ ID NO: 182918 - protein, 269 aa, Unknown
  Bacterial polypetide isolated from the Sargasso Sea
MRIALGIEYDGSRYFGWQRQREVISVQEELEKALSRIANHPVSIQCAGRTDAGVHATGQVIHFDTDANRAEGAWTLGLNSNLPPDIAVRWVKQVDEGFHARFSATARRYRYVIYNHNFRPAILGSGVSHYYETIDADLMHQAGQSLLGEHDFSTFRAVACQSNTPWRNVTHLCVSRSGPYIVLDIKANAFLHHMVRNITGSLLLVGQGLQPVEWIAEVLAARDRNLAGPTAKAGGLYLVDVDYPAELGLPRMPLGPLWLPDSAPGTTSF

SEQ ID NO: 182919 - protein, 222 aa, Unknown
  Bacterial polypetide isolated from the Sargasso Sea
QSIQGAIEDSIKNIFEETVTIFGAGRTDAGVHAMGQVAHFDINNKELEPFVIKNALNDHLRPFPIAILEVDEVDNKFHARFNARQRKYLYRIVNRKSPLTIEKGRAWHVHKEIDVDLMRKCISSIEGKHDFTTFRSAHCQSDSPIKTIDSLQITKSEENIYFGFSAKSFLHHQVRSIVGSLKLVGEQSWLVSDFHDALNSKERSKCGAVAPPDGLYFMEVKY

SEQ ID NO: 182920 - protein, 245 aa, Unknown
  Bacterial polypetide isolated from the Sargasso Sea
MQRWKIIIEYKGCQFNGWQSQKDLTGVQDAIQSAIFKFSGELIKVYGAGRTDSGVHALGQVAHFDIDRATNEDEIREALNNYLRPDLISIIKVEKVDDDFHARFSAKLRHYEYKIVNRRQPLTLEKDLFWRVGRPLKEEDMQKGANYLIGTHDFTTFRSINCQSKSPLKSLDSIKIKRKKDKIFLFFSAKSYLHNQLRSIVGSLKLVGEGKWHPDKINQILNSKERKECGPIAPPEGLYFKSVDY

SEQ ID NO: 182921 - protein, 263 aa, Unknown
  Bacterial polypetide isolated from the Sargasso Sea
MGRIALGIEYDGAAVYGWQRQREVPSVQEHLEKALSTVANEPIEVQCAGRTDAGVHATGQVVHFNCDAPRSERAWTLGVNANLPNSVAVTWAKNVSDDFHARFSATHRRYRYVIHNAKMRPAILHSGVTHIHRELDEKKMHVAAQALLGEQDFTSFRAALCQSKTPFRNVTDVSVYRQGRYVIIDIRANAFLHHMVRNITGALVEIGAGEQDVNWIAHLLSLKDRSKSAATAKPNGLYLVDVTYPDEHGLPKPPLGPLFLPEA

SEQ ID NO: 182922 - protein, 264 aa, Unknown
  Bacterial polypetide isolated from the Sargasso Sea
MRIALGIEYNGVGLFGWQRQREVPSVQGHLEAALSKVANATIELSCAGRTDAGVHATGQVVHFDTDANRDMRAWIMGANSNLPDGIAVRWAKQVSDDFHARFSATARRYRYVIYNNKFRPAILGAGLSHYHQELNIELMQQAAVHLLGENDFTSFRAIQCQSHSPFRNLMHLHLSRVGQFIVLDIKANAFLHHMVRNITGSLLQVGMGLKDPDWIADLLAAKDRTLAAATAKAEGLYLVDVDYPEHFGIPKMPLGPLFLPDSFC

SEQ ID NO: 182923 - protein, 322 aa, Unknown
  Bacterial polypetide isolated from the Sargasso Sea
DGLEYVRMALNRGMDIDSFAPRLSFFFGIGMNYFMEIAKLRAARRLWAEMISEFKPENPKSMMLRTHCQTSGWSLTEQDPFNNIVRTTIEAMAAVQGGTQSLHTNAYDEALGLPTRTSARVARNTQLIMQEETGMTRVIDPWGGSYFMESLTESLVVESRKLLDEVEELGGMTRAVEQGFPKQRIEEAAAIRQAKIDQGEEVIVGVNKYQTDESEQIEVREVDNTEVRNNQIQRLEQIRKSRDNTKVQDALKILEDRALTGKGNLLEASIEAVRARATVGEISDALEKHWGRYHAPNSAVSGVYAKSYSSHDEIEEVRRKVQ

SEQ ID NO: 182924 - protein, 244 aa, Unknown
  Bacterial polypetide isolated from the Sargasso Sea
KLNKEDLFIDPDGISIKHIYSKSDLDNIKHLDFFPGIPPYIRGPYASMYTQRPWTIRQYAGFSTAKESNLFYKKNLAAGQKGLSVAFDLATHRGYDSDHERVVGDVGKAGVAIDSVEDMKQLFNGIPLNEMSVSMTMNGAVIPIMAFFIVAAEEQGVHPELLSGTIQNDILKEFMVRNTYIYPPKPSMRIIADIFKYTSEKMPKFNSISISGYHMHEAGATPAIELAYTLADGLEYVRTGINAG

SEQ ID NO: 182925 - protein, 230 aa, Unknown
  Bacterial polypetide isolated from the Sargasso Sea
ETKKDFSDSNSETDEGIDIKPVYTKDDLENFSFVENNSLPGQWPYTRGPKASMYTNRPWTIRQYAGFSTAEESNEFYKKNLESGQKGLSVAFDLPTHRGYDSDDDLVMGDVGKAGVAIDTVEDMKILFNNIPLDQMSVSMTMNGAVLPVLASFIVAGEEQGVDRSLLSGTIQNDILKEFMVRNTYIYPPEPSMKIVADIIEFTSKEMPKFNSISISGYHMQEAGADNVLE

SEQ ID NO: 182926 - protein, 311 aa, Unknown
  Bacterial polypetide isolated from the Sargasso Sea
FTKVSLAELGTNGGTSAARTLETPEGISLATAYSAEDTKALDTLDDFPGLAPFGRGPYPTMYTQRPWTVRQYAGFSTAEDSNAFYRRNLAAGQKGLSVAFDLATHRGYDSDHVRVSGDVGMAGVAIDSIYDMRTLFSGIPLDQMSVSMTMNGAVLPIMALYIVAAEEQGVPPEQLAGTIQNDILKEFMVRNTYIYPPKPSMRIISDIFAYTSEKMPRFNSISISGYHMQEAGATADLELAYTLADGIEYIRAGVGAGLDVDKFAPRLSFFWAIGMNTFMEVAKMRAARLLWANLVKAEFNPKNAKSLSLRT

SEQ ID NO: 182927 - protein, 235 aa, Unknown
  Bacterial polypetide isolated from the Sargasso Sea
MTDNYKSDLEGWKAQVKKDLKGGSHEQLIRHTPEGISLKPLYTVQDLENIQHLNTLPGLPPFVRGPRATMYAGRPWTVRQYAGFSTAEESNQFYRENLKAGQRALSVAFDLATHRGYDSDHPRVVGDVGKAGVAIDTVEDMKILFADIPLSQMSVSMTMNGAVLPVLAAYIVAAEEQGVEKAALTGTIQNDILKEFMVRNTYIYPPDPSMRIVADIIQYASQNMPRFYSISISGY

SEQ ID NO: 182928 - protein, 331 aa, Unknown
  Bacterial polypetide isolated from the Sargasso Sea
FNIDEFAPRLSFFWSIGMNFFMEIAKMRAARYMWSKIVKEFKPKNDRSLALRTHCQTSGVSLMEQDAYNNIIRTTIEAMAAVMGGTQSLHTNSFDEALALPTKFSARIARNTQLIISEETGICNVIDPMAGSYYVESLTSSIVEESQKLISEIDEVGGMVKAIEMGIPKMRIEESSAKRQARVDSNEETIVGVNKYKPTEKQEINILSIDNEEVRKRQVSRLQKLKNSRDNKVVESFIEKIKNAASSDENLLEICIEASKNRCTVGEMTSAMESVFGRHNLSTKTISGVYKNTVKNDGKIDIIDSELSKFVDEKGRRTRMLVVKWARMDMI

SEQ ID NO: 182929 - protein, 258 aa, Unknown
  Bacterial polypetide isolated from the Sargasso Sea
DGLEYVRMALNLGMNIDSFSPRLSFFFGIGMNYFMEIAKLRAARRLWAEMISEFKPENPKSMMLRTHCQTSGWSLTEQDPFNNIVRTTIEAMAAVQGGTQSLHTNAYDEALGLPTRTSARVARNTQLIMQEETGMTRVIDPWGGSYFMESLTESLVVESRKLLDKVEELGGMTRAVEQGFPKQRIEEAAAIRQAKIDQGEEVIVGVNKYQTDESEQIEVREVDNTEVRNNQIQRLEQIRKSRDNTKVQDALKTLEDRA

SEQ ID NO: 182930 - protein, 277 aa, Unknown
  Bacterial polypetide isolated from the Sargasso Sea
ISGYHMQEAGASAALELAYTLCDGKEYIRTAIAAGLNIDEFAPRLSFFWGIGMNFYMEIAKMRAARLLWAEIVDEFSPENPKSSMLRTHCQTSGWSLTEQDPYNNIVRTTIEAMAAVFGGTQSLHTNALDEAIALPSDFAARIARNTQLVLQEETGISQVVDPWGGSYMMESLTNEIAEKARVLIAEIEDAGGMAQAIETGLPKLRIEEAAAKKQARIDRGEDVIVGVNRYQISEQDSVDILEVDNDAVRDSQIERLDRIRSSRDAASVEACLTALS

SEQ ID NO: 182931 - protein, 277 aa, Unknown
  Bacterial polypetide isolated from the Sargasso Sea
MKTKNSENYTKWQKSFERETKIDLDEASSETDEGIKIKPVYTKADIENLSFVDSDSLPGQFPYTRGPRASMYTNRPWTIRQYAGFSTAEESNEFFKKNLKSGQKGLSVAFDLPTHRGYDSDDDLVMGDVGKAGVAIDTVEDMKILFNDIPLNQMSVSMTMNGAVLPVLSSFVVAGEEQNVNKNLLSGTIQNDILKEFMVRNTYIYPPDPSMKIVADIIEFTSKEMPKFNSISISGYHMQEAGADNVLELAYTLADGIEYVRTALSKGLDIDDFAPRL

SEQ ID NO: 182932 - protein, 312 aa, Unknown
  Bacterial polypetide isolated from the Sargasso Sea
YVEGPKASMYKGRPWTIRQYAGFSTAKESNAFYKKNLSAGQKGLSVAFDLATHRGYDSDHVRVQGDVGKAGVAIDTVEDMKILFDDIPLDEISVSMTMNGAVLPILSSYIVAAEEQGVSLEKLSGTIQNDILKEFMVRNTFIYPPEPSMRIVSDIISFTSKKMPKFNSISISGYHMQEAGANLVQELAFTIADGLEYVRAAKNRGLNVDDFAPRLSFFFAIGMNFFMEAAKLRAARYLWSNWMKKLFDCKKSQSQILRTHCQTSGASLQEQDPYNNIIRTTIEALAAVLGGTQSLHTNSFDEAIALPTDFHQ

SEQ ID NO: 182933 - protein, 291 aa, Unknown
  Bacterial polypetide isolated from the Sargasso Sea
FIVAGEEQGVDRSLLSGTIQNDILKEFMVRNTYIYPPEPSMKIVADIIEFTSKEMPKFNSISISGYHMQEAGADNVLELAYTLADGMEYVRAAMSKGLDVDDFAPRLSFFFAIGTDFFMEIAKLRAARTLWAKIMKDFGAKNERSLILRTHCQTSGVSLTEKDPYNNIIRTSYEALSAILGGTQSLHTNSFDEAIALPTDESARIARNTQLILQNETGVTKTVDPLAGSYFVENLTEELSKKAWDIITEIEELGGMTKAVKAGIPKLKIEESATKKQAKVDSGSRVVVGVN

SEQ ID NO: 182934 - protein, 289 aa, Unknown
  Bacterial polypetide isolated from the Sargasso Sea
MQHIKLSEWKHLAEKELRGKKLESLNVETAEGIDIKPLYTKTDLEGLEHLNSIPGKEPFMRGPRATMYAGRPWTIRQYAGFSTAAESNKFYRKNLASGQKGISVAFDLATHRGYDSDHPRVEGDVGKAGVAIDTVEDMKILFEDIPLDQMSVSMTMNGAVIPIMASFIVAGEEQGVPREKLTGTIQNDILKEFMVRNTYIYPPEPSMKLIADIIEFTSKEMPKFNSISISGYHMQEAGANLVQELAFTLADGKEYVRAALSKGLNIDEFAGRLSFFFAIGMNFFMEVSK

SEQ ID NO: 182935 - protein, 298 aa, Unknown
  Bacterial polypetide isolated from the Sargasso Sea
KMPSFNSISISGYHMQEAGANQVQELAFTIADGIEYVRAALDKGLKVDDFAPRLSFFFAIGMNFFMEIAKLRAARWLWAHLMKKYFNPKDAKSMMLRTHCQTSGVSLTEQDPYNNIVRTTIEAMASVLGGTQSLHTNAFDEAVALPTDFSAKIARNTQLIIQEETGIAKTVDPLGGSYYLEALTGRLIASADKLINQIEELGGMTKAVEKGIPKSMIEESAALKQANIDSAESVVVGVNRYQSKTDSKFDVLKVDNKEVKELQIRNLEKLKSKRNNNRLEDSLLNLTNAAKNKNANLL

SEQ ID NO: 182936 - protein, 304 aa, Unknown
  Bacterial polypetide isolated from the Sargasso Sea
SPFIRGPRATMYSGRPWTIRQYAGFSTAEESNKFFRDNLAAGQMGLSVAFDLATHRGYDSDHQRVLGDVGKAGVAIDSVEDMKILFDQIPLDQMSVSMTMNGAVLPILASYVVAAEEQGIKQEQLSGTIQNDILKEFMVRNTYIYPPSPSIRIAGDVIEYVSTHMPRYNSVSISGYHLQEAGATAVQELAFSLGNGLEYVRTAINRGMGIDSFAPRLSFFFGIGMNFYMEIAKLRAARFLWNKLIQEFNPQKAESAMLRTHCQTSGWSLTEQDPYNNIVRTTIEALAAVLGGTQSLHTNAFDEA

SEQ ID NO: 182937 - protein, 277 aa, Unknown
  Bacterial polypetide isolated from the Sargasso Sea
QGVSQDKLSGTIQNDILKEFMVRNTYIYPPKPSMKIIGDIIEYTAKNMPKFNSISISGYHMQEAGANQALELAFTLADGKEYVKTAIAKGMDVDEFAGRLSFFWAIGMNFYLEVAKMRAARLLWCRIMKATGAKNPKSLMLRTHCQTSGWSLTEQDPYNNVVRTTIEAMAAVFGGTQSLHTNSFDEAIALPTEFSARIARNTQLIIQEETHITNVIDPWAGSYMMEKLTQDMADAAWKIIEEVEAMGGMTQAVDSGWAKLKIEAAAAEKQARIDSGK

SEQ ID NO: 182938 - protein, 305 aa, Unknown
  Bacterial polypetide isolated from the Sargasso Sea
MKISTFKKNSDFREWEEKVCSELKTSNHSGLNWQTPEGIELKALYTASDLEKLEWDDSLPGLFPFIRGPMASMYSGRPWTIRQYAGFSTAEESNRFYQENLKAGQKGLSVAFDLATHRGYDSDHPRVRGDVGKAGVAIDTVEDVKMLFDGIPLDQISVSMTMNGAVLPVLASYIVAAEEQGVQRSQMSGTIQNDILKEFMVRNTYIYPPEQSMRIVGDIIEFTSQEMPRYNSVSISGYHIQEAGATTVQELAFTLGDGLEYVRMALNRGMNIDSFAPRLSFFFGIGMKYFMEIAKLRAARRLWAE

SEQ ID NO: 182939 - protein, 259 aa, Unknown
  Bacterial polypetide isolated from the Sargasso Sea
MSVSMTMNGAVLPILAGYIVAAEEQGVSREKLSGTIQNDILKEFMVRNTYIYPPKESMRIVSDIISYTSKNMPLFNSISISGYHMQEAGATLTQELAYTLADGLEYVRAALAAGLKIDDFAPRLSFFFCTGMNFFMEVAKLRAARFIWANLIKQFNPKNPRSLSLRTHCQTSGVSLTSQDPHNNIIRTAYEALAAALGGTQSLHTNAFDEALALPSKLSSRIARNTQLILSEETGVTEVIDPLAGSYYVESLTNEVINK

SEQ ID NO: 182940 - protein, 301 aa, Unknown
  Bacterial polypetide isolated from the Sargasso Sea
ILYLGSSPFTRGPKASMYTNRPWTIRQYAGFSTAEESNTFYKKNLESGQKGLSVAFDLPTHRGYDSDDELVKGDVGKAGVAIDTVEDMKILFKDIPLDQMSVSMTMNGAVLPILASFIVAGEEQHVGRELLSGTIQNDILKEFMVRNTYIYPPEPSMKIVADIIEFTSREMPKFNSISISGYHMQEAGADNVLELAYTLADGIEYVRAALSKGLDIDEFAPRLSFFFAIGTDFFMEIAKLRAARTLWSKIMKDFGAKKEKSLILRTHCQTSGVSLTEKDPYNNIVRTSYKALSAILGGTQS

SEQ ID NO: 182941 - protein, 285 aa, Unknown
  Bacterial polypetide isolated from the Sargasso Sea
AGQKGLSVAFDLATHRGYDSDHSRVRGDVGKAGVAIDTVEDMKMLFEGIPLDQMSVSMTMNGAVLPVLASYIVAAEEQGVQRSQMSGTIQNDILKEFMVRNTYIYPPEQSMRIVGDIIEFTSQEMPRYNSVSISGYHIQEAGATTVQELAFTLGDGLEYVRMALNRGMNIDLFAPRLSFFFGIGMNYFMEIAKLRAARRLWAEMISEFKPENPKSMMLRTHCQTSGWSLTEQDPFNNIVRTTIEAMAAVQGGTQSLHTNAYDEALGLPTRTSARVARNTQLIMQE

SEQ ID NO: 182942 - protein, 306 aa, Unknown
  Bacterial polypetide isolated from the Sargasso Sea
MGEEQGCPKSKLTGTIQNDILKEFMVRNTFIFPPKPSMRIVADIIEYTSKEMPKFNSISISGYHMQEAGANQVQELAYTLADGKEYIKIALERGLKIDEFAPRLSFFWSIGMNFFMEIAKMRAARFMWSEIVKKFNPELDKSLALRTHCQTSGVSLTEQDAYNNIVRTTIEAMAAVLGGTQSLHTNSFDEALALPTPFSARIARNTQLIISEETGITKVVDPLAGSYYVESLTSSIIEESLKLINEIDDAGGMVKAIELGIPKMRIEESSAKRQARVDSLDDTIVGVNKYKPQEKQDINILAVDNE

SEQ ID NO: 182943 - protein, 241 aa, Unknown
  Bacterial polypetide isolated from the Sargasso Sea
ETKIKLNEAFSETDEGIEIKPVYTKADIENLSFVDNDSLPGQLPYTRGPKASMYTNRPWTIRQYAGFSTAEESNEFYKKNLKSGQKGLSVAFDLPTHRGYDSDDDLVMGDVGKAGVAIDTVEDMKILFNDIPLDQMSVSMTMNGAVLPVLSSFVVAGEEQNVNKNLLSGTIQNDILKEFMVRNTYIYPPDPSMKIVADIIEFTSKEMPKFNSISISGYHMQEAGADNVLELAYTLADGMEY

SEQ ID NO: 182944 - protein, 258 aa, Unknown
  Bacterial polypetide isolated from the Sargasso Sea
TIRQYAGFSTAEESNNFYKKNLESGQKGLSVAFDLPTHRGYDSDDELVKGDVGKAGVAIDTVEDMKILFNQIPLDQMSVSMTMNGAVLPILASFIVAGEEQKVGRELLSGTIQNDILKEFMVRNTYIYPPEPSMKIVADIIEFTSREMPKFNSISISGYHMQEAGADNVLELAYTLADGMEYVRAALSKGLDIDEFAPRLSFFFAIGTDFFMEIAKLRAARTLWAKIMKDFGAKKDKSLTLRTHCQTSGVSLTEKDPY

SEQ ID NO: 182945 - protein, 138 aa, Unknown
  Bacterial polypetide isolated from the Sargasso Sea
QNDILKEFMVRNTYIYPPQPSMRVISDIFAYTAAEMPRFNSISISGYHMQEAGATADLELAYTIADGIEYVRAGMEAGLSIDSFAPRLSFFWGIGMNFFMEVAKMRAARLIWAKLIKKYEPQDNRSLSLRTHCQTSGW

SEQ ID NO: 182946 - protein, 299 aa, Unknown
  Bacterial polypetide isolated from the Sargasso Sea
ATMYAGRPWTIRQYAGFSTAKESNEFYKRNLAAGQMGLSVAFDLATHRGYDSDHPRVSGDVGMSGVAIDSVEDMKLLFDQIPLNKMSVSMTMNGAVLPVLANFVVAAEEQGVKEEELRGTIQNDILKEFMVRNTYIYPPAHSMRIVSDIISYTAKKMPLFNSISISGYHMQEAGANQVQELAFTIADGLEYVRAAINKGLKVDDFAPRLSFFFAIGMNFFMEIAKLRAARWLWASLMKKHFNPQNSKSLMLRTHCQTSGVSLTEQDPYNNVVRTTVEAMAAVLGGTQSLHTNAFDEAVA

SEQ ID NO: 182947 - protein, 272 aa, Unknown
  Bacterial polypetide isolated from the Sargasso Sea
MKNKFKEIENIDLNYENESSPNNFKAKENIFTTPEGISLKSFYTKDDLTGFDHQNTYPGIDPFVRGPYPTMYANKPWTIRQYAGFSTAEESNAFYRRNLEAGQMGLSIAFDLATHRGYDSDNPLVSDDVGMAGVAIDSILDMRILFKDIPLDKMSVSMTMNGAVIPIMALYIVAAEEQGVEPDQLKGTIQNDVLKEFMVRNTYIYPPKPSMRIISDIFEYTSKNMPKFNSISISGYHMQEAGASADLELAYTLADGLEYIKAGINAGLHIDA

SEQ ID NO: 182948 - protein, 528 aa, Unknown
  Bacterial polypetide isolated from the Sargasso Sea
INSSSVNWETLENIEIKPLYTSEDLEKLGYSETLPGFAPFIRGPRATMYSGRPWTIRQYAGFSTAEESNKFYRENLEAGQMGLSVAFDLATHRGYDSDHQRVLGDVGKAGVAIDSVEDMKILFDQIPLNKMSVSMTMNGAVLPILASYIVAAEEQGVKQEQLSGTIQNDILKEFMVRNTYIYPPSPSIRIAGDVIEYVSTNMPRYNSVSISGYHLQEAGATAVQELAFSLGNGLEYVRTAINRGMSIDNFAPRLSFFFGIGMNFFMEIAKLRAARFLWNKLIQEFHPKKVESAMLRTHCQTSGWSLTEQDPYNNIVRTTIEALAAVLGGTQSLHTNAFDEALGLPTETSARVARNTQLILQEEAGIPKVIDPFGGSYFMESLTESLIRESTKLLNKIENLGGMAKAVESGMPKEQIETSAARRQAMIDQGQEVIVGINKYRAENIEPLEVREIDNTAVREAQLKRLKQTKKNRDQQKVDSILSALTEAAKTGEENLLELSINAMRARATVGEVSSALEKVWGRYNAPV

SEQ ID NO: 182949 - protein, 374 aa, Unknown
  Bacterial polypetide isolated from the Sargasso Sea
MKISTSKKNSDFREWEDKVYSELKASNHSGFNLQTPEGIELKALYTASDLEKLEWIDSLPGLFPFIRGPMASMYAGRPWTIRQYAGFSTAEESNHFYRENLKAGQKGLSVAFDLATHRGYDSDHPRVRGDVGKAGVAIDTVEDMKMLFDGIPLDQMTVSMTMNGAVLPVLASYIVAADEQGVQRSKMSGTIQNDILKEFMVRNTYIYPPEQSMRIVGDIIEFISQEMPRYNSVSISGYHIQEAGATTVQELAFTLGDGLEYVRMALNRGMNIDSFAPRLSFFFGIGMNYFMEIAKLRAARRLWAEMISEFKPENPKSMMLRTHCQTSGWSLTEQDPYNNIVRTTIEAMAAVQGGTQSLHTNAYDEALGTSHPRT

SEQ ID NO: 182950 - protein, 444 aa, Unknown
  Bacterial polypetide isolated from the Sargasso Sea
MTNKSNNGFNTWQKSFEKETKKNFSDAISETDEGINIKPVYTKEDLENFSFVKKQSLPGQWPYTRGPKASMYTNRPWTIRQYAGFSTAEESNEFYKKNLESGQKGLSVAFDLPTHRGYDSDDDLVMGDVGKAGVAIDTVEDMKILFNNIPLDQMSVSMTMNGAVLPVLASFIVAGEEQGVDRSLLSGTIQNDILKEFMVRNTYIYPPEPSMKIVADIIEFTSREMPKFNSISISGYHMQEAGADNVLELAYTLADGMEYVRAAMSKGLDVDDFAPRLSFFFAIGTDFFMEIAKLRAARTLWAKIMKDFGAKNERSLILRTHCQTSGVSLTEKDPYNNIIRTSYEALSAILGGTQSLHTNSFDEAIALPTDESARIARNTQLILQNETGVTKTVDPLAGSYFVENLTEELSKKAWDIITEIEELGGMTKAVKAGIPKLKIEESAT

SEQ ID NO: 182951 - protein, 718 aa, Unknown
  Bacterial polypetide isolated from the Sargasso Sea
MKTKNSENYTKWQKSFEQETKIDLKEASSETDEGIEIKPVYTKADIENLSFVDNDSLPGQFPYTRGPKASMYTNRPWTIRQYAGFSTAEESNDFYKKNLKSGQKGLSVAFDLPTHRGYDSDDDLVMGDVGKAGVAIDTVEDMKILFNDIPLDQMSVSMTMNGAVLPVLSSFIVAGEEQNVNKNLLSGTIQNDILKEFMVRNTYIYPPDPSMKIVADIIEFTSKEMPKFNSISISGYHMQEAGADNVLELAYTLADGMEYVRAALSKGLDIDDFAPRLSFFFAIGTDFFMEIAKLRAARTLWYKIMKDFGAKNEKSLILRTHCQTSGVSLTEKDPYNNIIRTSYEALSAILGGTQSLHTNSFDEAIALPTDESARIARNTQLILQNETGVTNTVDPLAGSYFIESLTDELSKKAWEVIEEIESLGGMTKAVKAGVPKLKIEESATKKQAKVDSGSRVVVGVNKFKNPKEPKVDVRVIDNNRVRDDQIKKINDVKASRDQKAVDESLAKLVTAAKEDSNLLARSIDAIKNRATVGEVSKALEQVYGRHFATSLSVSGVYGKHFEGDEDFMNVTKKVNIFEEENGRRPRVLVVKMGQDGHDRGAKIVATSFADMGFDVDMGPLFQSPKDVAKDAIENDVHAIGVSTLAAGHKTLVPELMKSLKEIDPKSKIIVFVGGVIPEQDYNFLYENNISAIFGPGSNIIESAEKVIDLISDKIHEHN

SEQ ID NO: 182952 - protein, 706 aa, Unknown
  Bacterial polypetide isolated from the Sargasso Sea
MSELKEKWKKRAQSELKTDEIESLDWHTLEGIEVKPVYSSEDLMELEHLDTMPGIEPFLRGPRATMYTKRPWTVRQYSGFSTAEESNAFYRENISAGQTGLSVAFDLATHRGYDSDHPRVAGDVGKAGVAIDTVEDMKMLFDQIPLEKMSVSMTMNGAVIPIMAMFVVAAEEQGVDQSNLNGTLQNDILKEFMVRNTYIYPPKHSMRIVADIIEYCSHNLPQFNTVSISGYHMLEAGATCTQELAYTLADGLEYVRSAMKKGLDIDDFAPRLSFFFGIGMNFFMEIAKLRAARFLWSEMIKEEFSPKNPKSLMLRTHCQTSGVSLTSQDPYNNIVRTTIEAMAAVLGGTQSLHTNSFDEALALPTPFSAQIARNTQLILREESGLTKVVDPLAGSYYLESLTDSMIRETKKLIDEVEDLGGMTKAIQAGVPKLRVEESAAIRQARVDKKEDVIVGVNAYKNKDQKEVDILSIDNEGVRDQQIKKLESIRKERNEEACQNALAELEKCAAEDGNLMALAIEAAKHRATVGEISLAMENVFGRHKAVSQSISGVYRKEYEGDEDFMNVESKVKDFEESHGRRPRILVVKLGQDGHDRGAKVIATAFADMGFDVDIGPLFQTPEEAARDAIENDVHIIGVSSQAAGHKTLVPILMNSLAEQGSENILVVCGGIIPEQDIEALKDCGVATVFGPGTNITKAALEVIDMIQ

SEQ ID NO: 182953 - protein, 440 aa, Unknown
  Bacterial polypetide isolated from the Sargasso Sea
MSKLKEKWITTAKSELKTDEIESLDWHTLEGIDVKPVYSSEDLLELEHLDTMPGIEPFLRGPRATMYTKRPWTVRQYSGFSTAEESNKFYRENIAAGQTGLSVAFDLATHRGYDSDHPRVTGDVGKAGVAIDTVEDMKMLFDQIPLEKMSVSMTMNGAVIPIMAMFVVAAEEQGVEQSKLKGTLQNDILKEFMVRNTYIYPPNDSMRIVADIIEYCSHNLPQFNTVSISGYHMLEAGATCTQELAYTLADGLEYVRSAMNKGLDIDDFAPRLSFFFGIGMNFFMEIAKLRAARFLWSEMIEKEFSPKNPKSLMLRTHCQTSGVSLTSQDPYNNIVRTTIEAMAAVLGGTQSLHTNSFDEALALPTPFSAQIARNTQLVLREESGLTKVVDPLAGSYYLESLTGSMINETKKLIQEVEDLGGMTKAIQAGVPKLRIEESAA

SEQ ID NO: 182954 - protein, 660 aa, Unknown
  Bacterial polypetide isolated from the Sargasso Sea
MKNKFKEIENIDLDYEDESSPNNFEAKENIFTTPEGINLKSFYTKDDIKAFDHQNTYPGIDPFVRGPYPTMYANKPWTIRQYAGFSTAEESNAFYRRNLEAGQMGLSIAFDLATHRGYDSDNPIVSDDVGMAGVAIDSILDMRILFKDIPLDKMSVSMTMNGAVIPIMALYIVAAEEQGVEPDQLKGTIQNDVLKEFMVRNTYIYPPKPSMRIISDIFEYTSKNMPKFNSISISGYHMQEAGASADLELAYTLADGLEYIKAGINAGLDIDAFAPRLSFFWAIGMDYFMEIAKLRAARLLWANIVRDFNPSDSRSLALRTHCQTSGYSLTSQDPFNNITRTCIEALSAVHGHTQSLHTNSFDEAIALPTDFSAQIARNTQLFIQHETGTSDVIDPWGGSFFVEKLTHELAKKALKHMEEIESYGGMTEALEKGIPKMRIEESATKAQSKIDSGENTVVGVNKFTLSANEEEKIEYLKVDNSMVKKNQLDRLAEIKKSRNNSKVKKMLNELTDGASKNGNVLELAINAAREGATVGEISSAMEKVWKRHKAKINLVKDIYGENFESETINVVRKKVKDFEIRENRKPSVYIVKLGQDGHDRGQKVVGSALTDMGFDVNVGPLFQTPSEAAEEAIKLNVDIIAASSLAAGHLTLVPKLRDEL

SEQ ID NO: 182955 - protein, 425 aa, Unknown
  Bacterial polypetide isolated from the Sargasso Sea
MSKLKEKWITTAKSELKTDEIESLDWHTLEGIDVKPVYSSEDLLELEHLDTMPGIEPFLRGPRATMYTKRPWTVRQYSGFSTAEESNKFYRENIAAGQTGLSVAFDLATHRGYDSDHPRVTGDVGKAGVAIDTVEDMKMLFDQIPLEKMSVSMTMNGAVIPIMAMFVVAAEEQGVEQSKLKGTLQNDILKEFMVRNTYIYPPNDSMRIVADIIEYCSHNLPQFNTVSISGYHMLEAGATCTQELAYTLADGLEYVRSAMNKGLDIDDFAPRLSFFFGIGMNFFMEIAKLRAARFLWSEMIEKEFSPKNPKSLMLRTHCQTSGVSLTSQDPYNNIVRTTIEAMAAVLGGTQSLHTNSFDEALALPTPFSAQIARNTQLVLREESGLTKVVDPLAGSYYLESLTGSMINETKKLIQEVEDLGGMTKA

SEQ ID NO: 182956 - protein, 506 aa, Unknown
  Bacterial polypetide isolated from the Sargasso Sea
NVCINDYEWRCITSTCIIYVAGEEQGVDRSLLSGTIQNDILKEFMVRNTYIYPPEPSMKIVADIIEFTSKEMPKFNSISISGYHMQEAGADNVLELAYTLADGMEYVRAAMSKGLDVDDFAPRLSFFFAIGTDFFMEIAKLRAARTLWAKIMKDFGAKNERSLILRTHCQTSGVSLTEKDPYNNIIRTSYEALSAILGGTQSLHTNSFDEAIALPTDESARIARNTQLILQNETGVTKTVDPLAGSYFVENLTEELSKKAWDIITEIEELGGMTKAVKAGIPKLKIEESATKKQAKVDSGSRVVVGVNKYKNPKEPSVDVRVIDNNRVREDQINKIQAIKESRDTKAVEKALTNLTNAAKDKTNLLIPCIEAIKSRSTVGEVSKALEQVYGRHFAKSLSVSGVYGKHFEGDKEFMKVESKIKEFENINGRRPRVLVVKMGQDGHDRGAKIVATSFADMGFDVDMGPLFQSPKDVAKDAVENDVHAIGVSTLAAGHKTLVPELMKGL

SEQ ID NO: 182957 - protein, 509 aa, Unknown
  Bacterial polypetide isolated from the Sargasso Sea
PKPSMRIISDIFEYTSKNMPKFNSISISGYHMQEAGASADLELAYTLADGLEYIKAGINAGLDIDAFAPRLSFFWAIGMDYFMEIAKLRAARLLWANIVRDFNPSDSRSLALRTHCQTSGYSLTSQDPFNNITRTCIEALSAVHGHTQSLHTNSFDEAIALPTDFSAQIARNTQLFIQHETGTSDVIDPWGGSFFVEKLTHELAKKALKHMEEIESYGGMTEALEKGIPKMRIEESATKVQSKIDSGENTVVGVNKFTLSANEEEKIEYLKVDNSMVKKNQLDRLAEIKKSRNNSKVKKMLNELTDGASKNGNVLELAINAAREGATVGEISSAMEKVWKRHKAKINLVKDIYGENFESETINVVRKKVKDFEIRENRKPSVYIVKLGQDGHDRGQKVVGSALTDMGFDVNVGPLFQTPSEAAEEAIKLNVDIIAASSLAAGHLTLVPKLRDELDNRGHDEIHVIVGGVIPKEDFSTLIDIGASAIFATGTNIINSAMEMLQIIESSNS

SEQ ID NO: 182958 - protein, 425 aa, Unknown
  Bacterial polypetide isolated from the Sargasso Sea
EIAKLRAARTLWSKIMKDFGAKNEKSLTLRTHCQTSGVSLTEKDPYNNIVRTSYEALSAILGGTQSLHTNSFDEAIALPTDESARIARNTQLILQNETGVTKTVDPLAGSFFIEKLTDDISKKSWELIQEIESLGGMTKAVKAGIPKLKIEESATKKQAKVDSGDRVVVGVNKFKNPREPRVDVRVIDNDKVREDQIKKINKVKKMRDNKLVSESLLQLTNAAKDNKNLLEFTIQAIKHRATIGEVSKALEEVFGRHFATNLSVSGVYGKHFDKNEDFKNVSKRVDSFEKKHGRRPRVLVVKMGQDGHDRGAKIVATSFADLGFDVDMGPLFQTPKDVAKDAIENDVHAIGVSTLAAGHKTLIPELMENLKNIDSKSNIVVFVGGIIPEQDYEFLYNNNISAIFGPGSNIIESAEKVIELIMKKI

SEQ ID NO: 182959 - protein, 709 aa, Unknown
  Bacterial polypetide isolated from the Sargasso Sea
MRGERSFADESRDSVRHPPHAAPLKALYTESDLEGVSHLGSRPGEAPFVRGPHASMYTQKPWTIRQYAGYADAADSNLAFRTALAEGAQGLSVAFDLPTHRGYDSDDPAATADVGMAGVAIDSVEDMKRLFRQIPLERVSVSMTMNGAVLPVLAAFIVAAQESGVRTEALTGTIQNDILKEYMVRNTWIFAPEPSLRIVADVFEYLAERAPRFNAMSISGYHFQEAGADAVLELALTLSNARTYVEALVKRGMNVERIGERLSFFFGVGTEFFVEIAKLRAARVLWAGIMSELGAREARAQALRMHCQTSGCSLTAQHPQNNIVRTTIEAMAAVFGGTQSLHTNAYDEALALPGADASRLARDTQLIMQHEMGLCDVIDPWAGSYMMESLTGDIVRRVRDLMAQIAAHGGVVEAIRSGWVQQRIHEAATRTQARIDAGQHVVVGVNRFRSPDADTPSNCLEIDGRRVRARQVRQLAELKAQRDDVLVSRSLAALAKGARDGTGNLLALTIECVRARATIGECTRALEAVWPRYSTPSRFSSGIYGEARIADAAWRDACHRASALAARLGRLPRVLIAKVGQDGHDRGAKTVAAALADAGFYVSLGALFRSPGEVVDDAIAAKADVIGVSSLSGAHLDLVGEVVRTLRVRRPRAAVVVGGIIPDEHVRLLKRNGVFAVLGPGTAMESIVASLVEAVELASASASASAVAT

SEQ ID NO: 182960 - protein, 474 aa, Unknown
  Bacterial polypetide isolated from the Sargasso Sea
MDKKNDNNDQLTDWKKKFEAETKTSSTDDIIINTDEGIGIKPLYIEEDIKNLNFVDVESLPGYEPYTRGPKASMYVNRPWTIRQYAGFSTAEESNNFYRKNLEAGQKGLSVAFDLPTHRGYDSDDEIVMGDVGKAGVAIDSVEDMKILFDGIPLDQMSVSMTMNGAVLPILASFIVAGEEQGVAVKDLSGTIQNDILKEFMVRNTYIYPPDPSMRIVADIIEYTSKEMPKFNSISISGYHMQEAGADNVLELAYTLADGIEYVRAALSKGLDIDDFAPRLSFFFAIGTDFFMEIAKLRAARTLWYKIMRDFGAKNEKSLTLRTHCQTSGVSLTEKDPYNNIVRTSYEALSAVLGGTQSLHTNSFDEAIALPTEFSARIARNTQLILQNETGVTNTVDPLAGSYFIEKITDEVASKAWEIIQEVEELGGMTKAVNAGIPKLKIEESATKKQAKIDSGDRVVVGVNKFQNPKEPKI

SEQ ID NO: 182961 - protein, 507 aa, Unknown
  Bacterial polypetide isolated from the Sargasso Sea
MTNKSNNGFNTWQKSFEKETKKNFSDAKSETDEGIDIKPVYTKDDLENFSFVENNSLPGQWPYTRGPKASMYTNRPWTIRQYAGFSTAEESNEFYKKNLESGQKGLSVAFDLPTHRGYDSDDDLVMGDVGKAGVAIDTVEDMKILFNNIPLDQMSVSMTMNGAVLPVLASFIVAGEEQGVDKSLLSGTIQNDILKEFMVRNTYIYPPEPSMKIVADIIEFTSKEMPKFNSISISGYHMQEAGADNVLELAYTLADGMEYVRAAMSKGLDVDDFAPRLSFFFAIGTDFFMEIAKLRAARTLWAKIMKDFGAKNERSLILRTHCQTSGVSLTEKDPYNNIIRTSYEALSAILGGTQSLHTNSFDEAIALPTDESARIARNTQLILQNETGVTKTVDPLAGSYFVENLTEELSKKAWDIITEIEELGGMTKAVKAGIPKLKIEESATKKQAKVDSGSRVVVGVNKYKNPKEPSVDVRVIDNNRVRDDQIKKIHAIKSHVTQKLLKKHLLI

SEQ ID NO: 182962 - protein, 293 aa, Unknown
  Bacterial polypetide isolated from the Sargasso Sea
MGQDKSKWSELADKELRDKSAADLTWKTLEGIEVNPIYTQEDLNNLRHLGTLPGQEPFTRGVKATMYAGRPWTIRQYAGFSTAEESNKFYRKALEAGQQGVSVAFDLATHRGYDSDHPRVLGDVGKAGVAIDSVEDMKILFEGIPLEKVSVSMTMNGAVIPVLANFIVTGEEQGVDKSLLSGTIQNDILKEFMVRNTYIYPPEPSMRIVADIIEYTSAEMPKFNSISISGYHMQEAGANLVQELAYTLADGKEYVKTAIQRGMDVDKFAGRLSFFFAIGMNFFMEAAKLRAAR

SEQ ID NO: 182963 - protein, 619 aa, Unknown
  Bacterial polypetide isolated from the Sargasso Sea
MDGKPISSVNWNTLEDIEIKPLYTSEDLEKLSYSETLPGFSPFIRGPRATMYSGRPWTIRQYAGFSTAEESNKFYRENLASGQKGLSVAFDLATHRGYDSDHQRVLGDVGKAGVAIDSVEDMKILFDQIPLDQMSVSMTMNGAVLPILASYIVAAEEQGVQQEQLKGTIQNDILKEFIVRNTYIYPPSPSIRILGDIIEYTSTHMPRYNSVSISGYHLQEAGATAVQELAFSLGNGLEYVRTAINRGMRIDSFAPRLSFFFGIGMNFFMEIAKLRAARFLWNKLIQDFNPEKAASAMLRTHCQTSGWSLTEQDPYNNIVRTTIEALAAVLGGTQSLHTNAFDEALGLPTETSARVARNTQLILQEEAGIPNVIDPFGGSYFMESLTESLIQESTKLLNKIEKLGGMTKAVESGMPKQQIEASSARRQAMIDQGEEVIVGINKYKAGNAEPIEVREIDNTAVRDAQIKRLEQTRKNRDQQKVDTVLSAITKAADTGQENLLGLSINAMRARATVGEVSSALEKVWGRYNAPIQSISGVYAGAFPDQQEISDVRNEIKEFAKKAGRRPRIMVAKIGQDGHDRGAKVIATAFADMGFDVDIAPLFQTPEEVVKQAIENDVHV

SEQ ID NO: 182964 - protein, 428 aa, Unknown
  Bacterial polypetide isolated from the Sargasso Sea
GLKIDDFAPRLSFFWGIGMNFYMEIAKMRAARLLWAEIVDAFSPTNPKSGMLRTHCQTSGWSLTEQDPYNNIVRTTIEAMAAVFGGTQSLHTNALDEAIALPSDFAARIARNTQLILQEETGIGQVVDPWGGSYMMETLTNDMAAKARELIAEIDELGGMAKAIESGIPKLRIEEAAAKKQARIDRGENVIVGVNKFQIDEQDAVDILEIDNEQVRDSQLARLASIRETRDDAAVEAALNALTQAAEAGEGNLLGLAVEATRCRATVGEISDALETVYGRFVANAQTVSGVYGAAYAEDANWEGISMDIESFVEQHGRRPRMLVAKMGQDGHDRGAKVVATAFADVGFDVDLSPMFSTPEEVARQAIENDVHVVGASSLAAGHKTLVPQLIEALREQGADDVIVIAGGVIPQQDYGFLEEKGVALIFG

SEQ ID NO: 182965 - protein, 449 aa, Unknown
  Bacterial polypetide isolated from the Sargasso Sea
MGNIIKKEENLKLNTSLSDGITFNSLYTLADLEDFKYVESFPGLFPFTRGTYGSMYVGRPWTIRQYAGFSTAEESNRFYRENLKAGQKGLSVAFDLATHRGYDSDHPRVRGDVGKAGVAIDTVEDMKMLFDGIPLDQMSVSMTMNGAVLPVLASYIVAAEEQGVQRSQMSGTIQNDILKEFMVRNTYIYPPEQSMRIVGDIIEFTSQEMPRYNSVSISGYHIQEAGATTVQEMAFTLGDGLEYVRMALNRGMDIDSFAPRLSFFFGIGMNYFVEIAKLRAARRLWAEMISEFKPENPKSMMLRTHCQTSGWSLTEQDPFNNIVRTTLEAMAAVQGGTQSLHTNAYDEALGLPTRTSARVARNTQLIMQEETGMNRVIDPWGGSYFMESLTESLVVESRKLLEEVEELGGMTSAVEQGFPKQRIEEAAAIRQAKIDQGEEVIVGVNNYQT

SEQ ID NO: 182966 - protein, 707 aa, Unknown
  Bacterial polypetide isolated from the Sargasso Sea
DKSKWSELANKELRDKSAADLTWKTLEGLNINPLYTQEDLNDLGHLDSLPGEEPFTRGVKATMYAGRPWTVRQYAGFSTAEESNKFYRKALDAGQQGVSVAFDLATHRGYDSDHPRVLGDVGKAGVAIDSVEDMKILFDGIPLDKVSVSMTMNGAVIPVLANFIVTGEEQGHDKSLLSGTIQNDILKEFMVRNTYIYPPEPSMRLVADIIEYTSDEMPKFNSISISGYHMQEAGANLVQELAYTLADGKEYVKTAIDRGMDVDKFAGRLSFFFAIGMNFFMEAAKLRAARLLWHRIMDDLGAKNPRSKMLRTHCQTSGVSLQEQDPFNNVVRTAYEAMSAVLGGTQSLHTNALDEAIALPTEFSARIARNTQLILQEETGITNVVDPLAGSYYVEKLTADLADAAWELIEEVDQMGGMTKAVASGMPKLRIEETAAQRQAEIDRGEQVIVGTNKYRLSQEEEIEILDVDNLAVRAAQINRLGVIRKNRDEGACLAALEEITRRAEHGGNLLEAAVDAARCRATVGEISTAMEKIFGRHSAEVKTLAGIYGAAYEGDKDFIAIQKSVEKFAKEEGRRPRMLVVKMGQDGHDRGAKVIATAFADIGFDVDVGPLFQTPEEAAQDAIDNDVHVIGISSQAAGHKTLAPKLIEILKSREAEDILVICGGVIPQQDYVFLKDAGVKAIFGPGTNIPHAAQEILDLIKAASKT

SEQ ID NO: 182967 - protein, 248 aa, Unknown
  Bacterial polypetide isolated from the Sargasso Sea
MAKSLVIVESPAKAKTINKYLGNDFIVKSSVGHIRDLPTSSSKDKVKEDKTKLSKEQKEYQALVERMGIDPNNNWQARYEILPGKEKVVKELKALAEKADTVYLATDLDREGEAIAWHLQEIIGGEHQKFKRVVFNEITQNAIKNAFVEPGEVNQHRVNAQQARRFLDRVVGFMVSPLLWKKVARGLSAGRVQSVAVRLVVEREREIKAFVPEEYWTVAADTQTKTGVALQLEVAKQAGKAFKPENKA

SEQ ID NO: 182968 - protein, 296 aa, Unknown
  Bacterial polypetide isolated from the Sargasso Sea
KIILATDPDREGEAIAGHVKEFLNEKKLLKDKKVERVVFNEITKKAVTNGIENPRNIENELVDAYMARRALDYLVGFNISPILWTKLPGSKSAGRVQSVALRLLTEREHEIEIFKPEEFWTLNLNFLTKENLDVNTSIAQLDGKKIDKFSFKNKEDINNALDFIKNKKYNITDIISKIYTRNPSGPFTTSTLQQTSSSKLGFGASRTMQIAQRLYQGIDIDGETVGLITYMRTDGTNISKDAVASFRNFISHNYGETYLPHSPLNYSGKKVKNAQEAHEAIRPTEISRVPEDMKKY

SEQ ID NO: 182969 - protein, 333 aa, Unknown
  Bacterial polypetide isolated from the Sargasso Sea
SVAKSDDFGKFDVGLKDDNIIQVDQKLAKQIKEECNANDWLVNNIESKPTSSSPAPPFTTSTLQQDASRRFGFSPKRTMVVAQKLYEQGFITYMRTDSTHLSSEALNASKKFVENSFGYDFLSEKTNIYKNKVANAQEAHEAIRPAGTAFRKVEDVQKIGADEAKLYELILNRTVASQMKPAQYIRTNVEIHNGTSIFKASGNVTVFKGYTLAYEQALTRKDKGRPDSLPALDKQSKIQSKEVLLEEKTTSPPRRFSEAMLVKEMETRGIGRPSTYSAIIEKLSQKEYVVKKNKTLIPTFVGIAVSQLLENHYNALFNERFTADMENRLDAIS

SEQ ID NO: 182970 - protein, 318 aa, Unknown
  Bacterial polypetide isolated from the Sargasso Sea
VIVESPAKAKTINKYLGDNYTVLASYGHIRDLPSKNGSVDPDQNFKMEWEVDNFSKKYLKDITDAAKESSKIILATDPDREGEAIAWHVKEYLNEKKLLKDKEVERVVFNEITKKAVTFGIENPRQIEPLLVDAYMARRALDYLVGFNISPILWTKLPGSKSAGRVQSVALKLITEREHEIELFNPEEFWTLSLKFQDEKKNSITASIYQLDSEKIEKFTFRKKEDIEKAISGLKNKKFNISDISSKIVNRNPSGPFTTSTLQQVASSRLGFGASRTMQIAQKLYQGIEIEGDTVGLITYMRTDGTNLSADAISDFRN

SEQ ID NO: 182971 - protein, 288 aa, Unknown
  Bacterial polypetide isolated from the Sargasso Sea
MNLVIVESPAKAKTINKYLGSDYTVLASYGHIRDLPSKNGSVDPENSFKMIWEVDSFSKKYLKEITDTVKNSEKIILATDPDREGEAIAWHVKEFLNEKKLLKDKKVERVVFNEITKKAVTNGIDNPRNIENELVDAYMARRALDYLVGFNISPILWTKLPGSKSAGRVQSVALRLLTEREHEIEIFKPEEFWTLNLNFLTKENLNINTSISQLDGKKIEKFSFKNKDDINNALDLIKNKKYNITDITSKIYTRNPSGPFTTSTLQQTSSSKLGFGASRTMQIAQRFI

SEQ ID NO: 182972 - protein, 285 aa, Unknown
  Bacterial polypetide isolated from the Sargasso Sea
MELVQAQETRRILDRLFGYELSPLLWKKVAPRLSAGRVQSVSVRLLVRRERERRSFKKASYWGIKASLVKDNITFETKLFSFKGQRISNGSDFDEQTGKLKEGNKSLIIGEEKVKNLLKDFSSEDWIVSKIEKKPSIRKPVPPFTTSTLQQEANRKLRLSARETMRCAQGLYERGFITYMRTDSVHLSEQAIRAARECVSSKYGKEYLSNSPRQFNSTARNAQEAHEAIRPAGEAFKTPKETNLTGRDLTLYDLIWKRTVASQMAEAKLTMINAEISVGEGLFKS

SEQ ID NO: 182973 - protein, 205 aa, Unknown
  Bacterial polypetide isolated from the Sargasso Sea
MNLVIVESPAKAKTINKYLGKDYLVLASYGHIRDLPSKNGSVDPNNKFQMEWEIDSFSKKYLKEITNAAEDSDKIILATDPDREGEAIAWHVKEVLEKKKLLKDKNLERVVFNEITKKAILDAIKNPREIHLPLVEAYLARRALDYLVGFNISPILWTKLPGSKSAGRVQSVALKLITEREKEIELFKPEEYWTLTSDFTNKDNK

SEQ ID NO: 182974 - protein, 116 aa, Unknown
  Bacterial polypetide isolated from the Sargasso Sea
MNLVIVESPAKAKTINKYLGDNYTVLASYGHIRDLPSKNGSVDPDQNFKMEWEIDSFSKKYLKEITDAAKDSSKIILATDPDREGEAIAWHVKEYLDEKKLLKDKEIERVVFNEIT

SEQ ID NO: 182975 - protein, 356 aa, Unknown
  Bacterial polypetide isolated from the Sargasso Sea
NPRQMKPLLVDAYMARRALDYLVGFNISPILWTKLPGSKSAGRVQSVALKLITEREHEIESFKPEEFWTLSVKFKDEKNQNILASISQLDNNKVEKFSFRDKDEINKAISSISQKKFNITDISSKVVNRNPSGPFTTSTLQQTASSRLGFGASRTMQIAQKLYQGIEIEGETIGLITYMRTDGTNLSKDAVVAFREYIKKEIGNEYLPESALNYSGKKAKNAQEAHEAIRPTDVIRTPQSVKKYLSTDQNKLYDLIWSRALSSQMQSAKFDRNTITITSNNNDTVCKASGSVLKFDGFLKIYNNQSTDDDENILPSVSKGLVNIESLIDEQHFTQPPPRYSEASLVKKLEELGIGR

SEQ ID NO: 182976 - protein, 238 aa, Unknown
  Bacterial polypetide isolated from the Sargasso Sea
MNLVIVESPAKAKTINKYLGDDYKVLASYGHIRDLPSKNGSVDPDQNFKMEWEIDSFSKKYLKEITDAAKDSSKIILATDPDREGEAIAWHVKEYLNEKKLLKDKEIERVVFNEITKKAVIQGIENPRQIEPLLVDAYMARRALDYLVGFNISPILWTKLPGSKSAGRVQSVALKLITEREHEIESFKPEEFWTLDIKFKDQNNQKITASINMLDNNKIEKFSFKNKDEINKATEAIN

SEQ ID NO: 182977 - protein, 298 aa, Unknown
  Bacterial polypetide isolated from the Sargasso Sea
PDDGWSANYEIIPDKEKVIKDLRKASKEVEKVYLATDLDREGEAIAWHLKEALGKNKFEYHRVRFNEITKSSILESFSDPKEIDQDLVNAQQARRFLDRVVGFELSPLLWKKIARGLSAGRVQSVALRLLCEREKLISQFQPEEFWEVSATLKDFNHEEILFKLNRKKSDPLLKEDEAKKIEELVGSSSLEISEITKKPTTVKPKAPFITSTLQQAASSKLGFGVSRTMRVAQKLYEAGRITYMRTDAPSLSNDSIEDARLFIKDTLADEYLTEKPRIYSGKENAQEAHEAIRPTSAS

SEQ ID NO: 182978 - protein, 297 aa, Unknown
  Bacterial polypetide isolated from the Sargasso Sea
DPDREGEAITWHLVKSLEKKVDKNKFERITFNEITKNAVIKSFDEARKVDDNLVSAYLARRSLDYLAGYSLSPVLWRKMPGSRSAGRVQSVAVRLIYEKEIEIEQFEPEKFYKINVNGEINGAKLDTSITSLEGEKVDKLFFRDEALANKAKNYLKSNSFFIRKIDERTISRKPKAPFNTSTLQQTANSQLNFSASQTMTIAQGLYMGIDINKETIALITYMRTDSITLSKNSIDTIRENISKDYGDEYLPNKPIEYKSRKKNAQEAHEAIRPTDISIKPEDIKNFLNEEQFKLYDL

SEQ ID NO: 182979 - protein, 311 aa, Unknown
  Bacterial polypetide isolated from the Sargasso Sea
SGSASASKEPAAKRGKAAAGEGPVLTPKEKARKQLVSRMGVDPDHGWKAKYEILPGKEKVIEELRRLAKDADTIYLATDLDREGEAIAWHLREAIGGDDSRYKRVVFNEITKKAIQEAFSKPGELDIDRVNAQQARRFLDRVVGYMVSPLLWAKIARGLSAGRVQSVAVKLVVEREREIRAFIPEEYWEVHADLGTAKGANVRFEVAREKGEAFKPLNEAQAMAALEKLKASSYSIVKREDKPTSSKPSAPFITSTLQQAASNRLGFGVKKTMMMAQRLYEAGYITYMRTDSTNLSQDAVAMARTYIESEF

SEQ ID NO: 182980 - protein, 352 aa, Unknown
  Bacterial polypetide isolated from the Sargasso Sea
KFSFKNKEDINNAIELIKKSKFKISDISSKIFTRNPLGPFTTSTLQQTSSSKLGFGASRTMQIAQRLYQGIDIEGDTVGLITYMRTDGTNISKDTVADFRDFIKNSYGDIYLPNEPNNYSGKKAKNAQEAHEAIRPTDITRTPESIKKFLSTDQNKLYDLIWSRALSSQMESAKFDRKTITITSDDNLNQFKCSGSTIRFDGYLKLTRIDENEDEKILPDVNKEEVLTNDFVDEQHFTQPPPRYSEASLVKKLEELGIGRPSTYASIISVISNRGYADVINKRFFPTDRGKLLSAFLEKLFSKYVDYGFTAGLEDQLDDITTGKEEWIKVLDEFWKDFNTNVSTVKEKRTRE

SEQ ID NO: 182981 - protein, 320 aa, Unknown
  Bacterial polypetide isolated from the Sargasso Sea
MSKSLVIVESPAKAKTISKYLGNEYIVKSSVGHIRDLPKGKSKAKRQNPIPKDASPEEKARLKKEQERRRIIRRMGVNPDDGWTANYEIIPDKEKVIKDLRKASKEVEKVYLATDLDREGEAIAWHLKEALGKNKFEYHRVRFNEITKSSILESFSDPKEIDQDLVNAQQARRFLDRVVGFELSPLLWKKIARGLSAGRVQSVALRLLCEREKLISQFQPEEFWEVSPTLKDFNNEEILFKLNRKKSDPLLKEDEAKKIEELVGSSSLEISEITKKPTTVKPKAPFITSTLQQAASSKLGFGVSRTMRVAQKLYEAEESP

SEQ ID NO: 182982 - protein, 346 aa, Unknown
  Bacterial polypetide isolated from the Sargasso Sea
KLPGSKSAGRVQSVALRLLTEREHEIEQFKPEEFWTLNVNFKTSKEDILNSNIILLNNIKVEKFSFKKKADISNAIEIIKKNKYKISDISSKIYTRNPLGPFTTSTLQQTASSKLGFGASRTMQIAQRLYQGIDIEGDTVGLITYMRTDGTNISNDAISDFRNFIQKSYGENYLPENPNNYSGKKAKNAQEAHEAIRPTDIIRTPESMKKYLSTDQNKLYNLIWSRALSSQMQSAKFDRKTITIISDNNLNQFKCSGSTIKFDGFLKLTKIEEDEKEKILPDVNKEEVSINDFIDEQHFTQPPPRYSEASLVKKLEELGIGRPSTYASIISVISNRGYADIVNKRF

SEQ ID NO: 182983 - protein, 290 aa, Unknown
  Bacterial polypetide isolated from the Sargasso Sea
YKVLASYGHIRDLPSKNGSVDPDKNFEMQWELDSFSKKYLKEITDAAKESDKIILATDPDREGEAIAWHVKQVLDDKKLLKGKKLERVVFNEITKNAVLNGINNPREIEDTLVKAYLARRALDYLVGFNISPILWTKLPGSKSAGRVQSVALKLITEREHEIESFKPEEYWTINANFKNSKDKNIFSKLNFINDKKVERFSFRNKNDINTTTENINKYEYFVKDVNSKIVKRNPSAPFTTSTLQQTSSGKFGFGASRTMQIAQRLYQGIEIDGETIGLITYMRTDGTNIS

SEQ ID NO: 182984 - protein, 289 aa, Unknown
  Bacterial polypetide isolated from the Sargasso Sea
MSKSLVIVESPAKAKTISKYLGNEYIVKSSVGHIRDLPKGKSKAKRQNSIPKDASPEEKARLKKEQERRRIIRRMGVNPDDGWSANYEIIPDKEKVIKDLRKASKEVEKIYLATDLDREGEAIAWHLKEALGKNKFEYHRVRFNEITKSSILESFSDPKEIDQDLVNAQQARRFLDRVVGFELSPLLWKKIARGLSAGRVQSVALRLLCEREKLISQFQPEEFWEVSVTLKDFNQEEILFKLNRKKSDPLLKEDEAKKIEELVSSSSLEISEITKKPTTVKPRAPFITS

SEQ ID NO: 182985 - protein, 287 aa, Unknown
  Bacterial polypetide isolated from the Sargasso Sea
MATDPDREGEAIAWHVKEYLNEKKLLKDKEIERVVFNEITKKAVIHGIENPRQIEPLLVDAYMARRALDYLVGFNISPILWTKLPGSKSAGRVQSVALKLITEREHEIESFKPEEFWTLSIKFTDQNNQNITASINQLDNNKIEKFSFRNKEEINKAKSSIEKKKFSITDISSKVVNRNPSGPFTTSTLQQTASSRLGFGASRTMQIAQKLYQGIEIEGETIGLITYMRTDGTNLSKDAVLNFRDYIQKEIGSEYLPKDALNYSGKKAKNAQEAHEAIRPTDIIRTP

SEQ ID NO: 182986 - protein, 298 aa, Unknown
  Bacterial polypetide isolated from the Sargasso Sea
NINKKKFSINDISSKVINRNPSGPFTTSTLQQTASSRLGFGASRTMQIAQKLYQGIEIEGETIGLITYMRTDGTNLSKDAVSAFRDYIKKEIGNEYLPENALNYSGKKAKNAQEAHEAIRPTDIIRSPQSVKKYLSTDQNKLYHLIWSRALSSQMESAKFDRNTITIMSDNEDTICKATGSVLKFDGFLKIYNNPNKDDDENILPPMSKGPVNIEALLDEQHFTQPPPRYSEASLVKKLEELGIGRPSTYASIISTIANRGYAEILNKRFFPTDRGKLISAFLEKLFSKYVDYNFTAG

SEQ ID NO: 182987 - protein, 313 aa, Unknown
  Bacterial polypetide isolated from the Sargasso Sea
YIVESSVGHIRDLPKKGGTARTRLVVPKDLSPEEKARQKEINARKSLVRRMGVDPDNGWDADWQIIPEKEKVLKALKKAAKNVDNIYLATDLDREGEAIAWHLKEALGPQKYNYSRVRFNQITKDAIIKSFSDPKEIDLNLVKAYRARRFLDKVIGFELSPLLWKKIARGLSAGRVQSVALRLLDERERSIQEFIPEEYWEISFSATTNNDETITFNLATKKTDPLLSKEKVETIKQQIESCNLSINEISKKPVKVKPKAPFITSTLQQSSSTRLGFNVKRTMRVAQKLYEAGLITYMRTDAPSLSKRIYKRC

SEQ ID NO: 182988 - protein, 293 aa, Unknown
  Bacterial polypetide isolated from the Sargasso Sea
EGATQLLLATDEDREGESISWHLLQILKPKIPTKRMVFHEITKKAINKALDQTREIDMELVQAQETRRILDRLFGYELSPLLWKKVAPRLSAGRVQSVSVRLLVRRERERRSFKKASYWGIKASLVKDNITFETKLFSLKGQRISNGSDFDEQTGKLKQGNKSLIIGEDKVDDLLQTFSSEDWLVSKIEKKPSTRKPVPPFTTSTLQQEANRKLRLSARETMRCAQGLYERGFITYMRTDSVHLSEQATRAARECVSSMYGKEYLSNSPRQFNSTARNAQEAHEAIRPAGEVF

SEQ ID NO: 182989 - protein, 250 aa, Unknown
  Bacterial polypetide isolated from the Sargasso Sea
ETVGLITYMRTDSVSLSEDAVRDLRAFVQEKYGEDQVPETVRAFKTKSKNAQEAHEAIRPTSFFRSPEKLKPYLNEEQSKLYELIWKRATASQMIHATIDSVTAEFDCGGVGVFRATGSTVKNPGFMKVYSNDEETTLDSERLPSLVEGEKVEFESIVADQHFTDPPPRYGEASLVKTLEEYGIGRPSTYATIIATLINREYVELENKRFFPTDVGKLVSGFLTNHFSVYVDYEFTAQIEDALDAVSRGE

SEQ ID NO: 182990 - protein, 241 aa, Unknown
  Bacterial polypetide isolated from the Sargasso Sea
LQQEAGRKLRSSARKTMSTAQRLYEKGFITYMRTDSTNLSDEGINAARNEIKSRFGKDYLPDQAKIYSSKVKNAQEAHEAIRPAGVEFVKTEKVRTEIDEDAANLYDLIRKRTLASQMTSAKVKQISVTIENQKSEFRANGKVILFPGYMAAYVESTDKRSGITEDQETILPNLAKDQSLQCNQLDSNEHSTKPPARFTEASLVKELENKGIGRPSTWASIIETIITRTYVNRKQAKLTPT

SEQ ID NO: 182991 - protein, 210 aa, Unknown
  Bacterial polypetide isolated from the Sargasso Sea
MKLVIVESPAKAKTINKYLGSDYNVLASYGHIRDLPAKKGSVNPEQDFMMTWEQSPSSTKPFREIKEALKKSDELILATDPDREGEAISWHVWRMLDEQKVLKDKTVHRVVFNEITKKAILEAMSNPRDVDQDLVDAYFARRALDYLVGFNLSPVLWRKLPGSRSAGRVQSVALRLITEREAEIEIFIPQEFWTIDTKLITNKAESLQQG

SEQ ID NO: 182992 - protein, 299 aa, Unknown
  Bacterial polypetide isolated from the Sargasso Sea
MIRKLKNFPFKNKEDINNAIEIIKKSNYKISDINSKIYTRNPSGPFTTSTLQQTASSKLGFGASRTMQIAQRLYQGIDIDGDTVGLITYMRTDGTNISKDAINDFRNFIEKTYGNNYLPSEPNNYSGKKAKNAQEAHEAIRPTDITRTPELMKKFLSTDQVKLYDLIWCRSLSSQMEAAKFDRKTITIVSENNLNQFKCSGSTIKFDGFLKLTRIDDEDEKIIPEVNKDEVSIEDFIDEQHYTQPPPRFSEASLVKKLEELGIGRPSTYASIISVISNRGYADIVNKRFFSTDRGKLLS

SEQ ID NO: 182993 - protein, 314 aa, Unknown
  Bacterial polypetide isolated from the Sargasso Sea
SELNGKKNEKFSFRNKEDINSAISKIEEKKYLIKDITSKIYTRNPSGPFTTSTLQQSASSKLGFGASRTMQIAQRLYQGIEIDGDTKGLITYMRTDGTNISKEAIPLFRKYIEKNYGSDYLPEQANNYSGKKAKNAQEAHEAIRPTEIKNSPESIKKYLSTDQYKLYDLIWSRALSSQMQPAKFDRKTILIASDDGKNILKSSGSTIKFDGFLKLQKIDENNDEKILPEVFKGPIEIKEFVDEQHFTQPPPRFSEASLVKKLEELGIGRPSTYASIISVISNRGYADIVNKRFFPTDRGKLLSAFLEKLFSRIC

SEQ ID NO: 182994 - protein, 285 aa, Unknown
  Bacterial polypetide isolated from the Sargasso Sea
MNLVIVESPAKAKTINKYLGSEFNVLASFGHVRDLPSKNGSVDPENNFAFEWEVSSTSKKHMKEIYDASADASTLYLATDPDREGEAIAWHIVELLNKKKLLKDKTVKRVVFSEITKNAVKNGIANPRDIDTDLVDAYLARRALDYLFGFNLSPVLWRKLPGAKSAGRVQSVALRLICERELAIESFEPDEYWKIRGNVKFEDGFNIDANLLSVEGKKVEKFSFKSEDDAKKIVNLFSDNKFEILDITKKPASRNPEPPFSTSTLQQTSSSIYGFGASRTMQMHK

SEQ ID NO: 182995 - protein, 180 aa, Unknown
  Bacterial polypetide isolated from the Sargasso Sea
MNLVIVESPAKAKTINKYLGDNYTVLASYGHIRDLPSKNGSVDPDQNFKMEWEIDSFSKKYLKEITDAARDSSKIILATDPDREGEAIAWHVKEYLDEKKLLKDKEIERVVFNEITKKAVTHGIENPRQIEPLLVDAYMARRALDYLVGFNISPILWTKLPGSKSAGRVQSVALKLITER

SEQ ID NO: 182996 - protein, 307 aa, Unknown
  Bacterial polypetide isolated from the Sargasso Sea
MACKGIFLNEKKLLKDKEVERVVFNEITKKAVTFGIENPRQIEPLLVDAYMARRALDYLVGFNISPILWTKLPGSKSAGRVQSVALKLITEREHEIELFNPEEFWTLSLKFQDEKRNSITASIYQLDGQKIEKFTFKKKENIEKAISGLKNKKFNISDISSKIVNRNPSGPFTTSTLQQVASSRLGFGASRTMQIAQKLYQGIEIQGDTVGLITYMRTDGTNLSADAISDFRNFIKKSYGYEYIPEKANNYSGKKAKNAQEAHEAIRPTDINRSPEDVKKYLSTDQNKLYNLIWSRALSSQMFSAKF

SEQ ID NO: 182997 - protein, 296 aa, Unknown
  Bacterial polypetide isolated from the Sargasso Sea
AYRARRFLDKVIGFELSPLLWKKIARGLSAGRVQSVALRVLDERERLIQEFIPEEFWEVSMTLIKDKLIIPFSLNRKKSQPLLKEEEARNIYELIQNSDLTINEIIQKPVKVKPRAPFITSTLQQAASTKLSFTVKRTMRVAQKLYEAGHITYMRTDAPSLSKESIQDARNFIGERVGEKYLTNAPRIYSSTENAQEAHEAIRPTNAYMTADDLMNQTEEEKRLYQLIWQQYIASQMPDAEYLSTSAKINIEEYTFSAKGREVVFDGYTKISQSIKSDDEDILPPLNEGESLNLNE

SEQ ID NO: 182998 - protein, 198 aa, Unknown
  Bacterial polypetide isolated from the Sargasso Sea
MNLVIVESPAKAKTINKYLGDNYTVLASYGHIRDLPSKNGSVDPDQNFKMKWEVDSFSKKYLKEIIDAAKESSKIILATDPDREGEAIAWHVKEYLDEKKLLKDKEIERVVFNEITKKAVTHGIENPRQIEPLLVDAYMARRALDYLVGFNISPILWTKLPGSKSAGRVQSVALKLITEREHEIELFNPEEFWTLSVK

SEQ ID NO: 182999 - protein, 299 aa, Unknown
  Bacterial polypetide isolated from the Sargasso Sea
GEAIAWHVKEFLNEKKLLKDKEVERVVFNEITKKAVTNGIDNPRKIEPHLVDAYMARRALDYLVGFNISPILWTKLPGSKSAGRVQSVALRLLTEREHEIEVFQPEEFWTLNIIFTNNKNEKINTNISQLDSSKIEKFSFKKKEDINNALLQIKNKKYIITDISSKIYSRNPSGPFTTSTLQQTASSKLGFGASRTMQIAQRLYQGIDIEGETVGLITYMRTDGTNISKDAISSFRDFITKNYGDKYLPNQPLNYSGKKAKNAQEAHEAIRPTEIIRKPDEIKKYLSNDQYKLYNLIWS

SEQ ID NO: 183000 - protein, 311 aa, Unknown
  Bacterial polypetide isolated from the Sargasso Sea
LVIVESATKAKTIEKILGEDYKVVSCVGHISDLPVSEIGVDVDNDFKPKYIIPDEKKQVIKDLKKHVKQSEKVWLASDEDREGEAIAWHLYENLNLSDKESDRIVFHEITKNAILKALDNPRSIDYNLVNAQQARRVLDRLVGYELSPVLWKKVKTGLSAGRVQSVCVRVIVEREREIQKHESKSTFKTQGIFNNLEGKSIKSELDTRFNTDEDIRNFLIKNENATFHINSLSKKPSKRSPTPPFTTSTLQQEASRKLGFGVSRTMSTAQKLYEAGLITYMRTDSVTISNEAKESIINKIKSKFGDKLFTQ

SEQ ID NO: 183001 - protein, 173 aa, Unknown
  Bacterial polypetide isolated from the Sargasso Sea
MNLVIVESPAKAKTINKYLGDDYKVLASYGHIRDLPSKNGSVDPDQDFKMEWEVDSFSKKYLKEITDAAKDSSKIILATDPDREGEAIAWHVKEYLNEKKLLKDKEIERVVFNEITKKAVIQGIENPRQIEPHLVDAYMARRALDYLVGFNISPILWTKLPGSNLQVEFSLLL

SEQ ID NO: 183002 - protein, 319 aa, Unknown
  Bacterial polypetide isolated from the Sargasso Sea
QTDAKSNKHVKDITDALSQADKLILATDPDREGEAISWHVQELVKSKKSLRDIPSERVVFNEITKSAILSAMEQPREIDYDLVNAYLARRALDYLVGFNLSPVLWRKLPGAKSAGRVQSVALRLICSREAEIEAFDSKEYWSIDTKFKTEDNKHLSARLVGLNSKKVGKLDITSEEQAKQIEQQIKASSFLLSSVDTKRTKRQPSAPFTTSTLQQEASRKLGFSASRTMQIAQRLYEGVQVGRETTGLITYMRTDGVQMSNEAISALRDEIGNIYGGQYLPEKPRFYKTKAANAQEAHEAVRPTSFARHPNDIRSYLDY

SEQ ID NO: 183003 - protein, 270 aa, Unknown
  Bacterial polypetide isolated from the Sargasso Sea
TGGDFDESTGAIKAGTKVKLLSEADAQGLLKAIDGKTWSVADVEEKPTTRRPAPPFTTSTLQQEANRKLRLSAREAMRTAQGLYERGYITYMRTDSVHLSEQAITAARSCVSDKYGADHLSPQPRQYTTKSRNAQEAHEAIRPAGSSFRTPAESGLKGLDLSLYELIWKRTVASQMADARLTMVSAQIEVENARFRASGKRIDFAGFFRAYVEGSDDPDAALEGQEVLLPTLRSGDYPSCQSCEPHGHQTQPPARFSEAALVKMLEKEGI

SEQ ID NO: 183004 - protein, 267 aa, Unknown
  Bacterial polypetide isolated from the Sargasso Sea
MNLVIVESPAKAKTINKYLGKDYLVLASYGHIRDLPSKNGSVDPDNKFQMEWEIDSFSKKYLKEITNAAEDSDKIILATDPDREGEAIAWHVKEVLEKKKLLKDKNLERVVFNEITKKAILDAIKNPRQIHLPLVEAYLARRALDYLVGFNISPILWTKLPGSKSAGRVQSVALKLITEREKEIELFKPEEYWTLTSDFTNKDNKNIFSKLSLFNGEKIEKFSFKNKEEIQKAVDLINKTKFKIADVNTKIFRRNPLAPFTTSTLQQ

SEQ ID NO: 183005 - protein, 204 aa, Unknown
  Bacterial polypetide isolated from the Sargasso Sea
MNLVIVESPAKAKTINKYLGDNYTVLASYGHIRDLPSKNGSVDPDQNFKMEWEVDNFSKKYLKDITDAAKESSKIILATDPDREGEAIAWHVKEYLNEKKLLKDKEVERVVFNEITKKAVTFGIENPRQIEPLLVNAYMARRALDYLVGFNISPILWTKLPGSKSAGRVQSVALKLITEREHEIELFNPEEFWTLSLKFQDEKK

SEQ ID NO: 183006 - protein, 279 aa, Unknown
  Bacterial polypetide isolated from the Sargasso Sea
MRVAQKLYEGGLITYMRTDAPSLSKESINEARNFVNDNLGENYLTNSPRIYSGSENAQEAHEAIRPTNSFLTPKDVMNLSEEESRLYTLIWERFIASQLPDAEYLSTSAKVYVGEKIFVARGRELVFDGFTRVLKTSSKEEDILPSLQEGQLISMDRVELEQKFTKPPARYSEAALVRELEKKGIGRPSTYANIISTIQDRGYVQIENKRFFVKKIGHIVAERLIESFHDIMDYDFTANLENSLDEVANGEADWRNVLDNFYKSFQNDLISASDEDSGM

SEQ ID NO: 183007 - protein, 266 aa, Unknown
  Bacterial polypetide isolated from the Sargasso Sea
ALKEDNELILATDPDREGEAISWHLEETLRKKRVINSDTPVSRVVFNAITKSAVSDAMANPREIDAPLVHAYLARRALDYLVGFNLSPVLWRKLPGARSAGRVQSVCLRLIVEREIEIEAFKPKEYWSVKASLKTPRGQVFKGKLINFAGTKLDKYDLKSSSEAELAAEAITTRDLVVASVESKPTSRNPFAPFMTSTLQQEAGRKYGMGARQTMQAAQRLYEAGHITYMRTDGIDMAPEAVTSTREAIKERYGDKFLPASPRFYK

SEQ ID NO: 183008 - protein, 299 aa, Unknown
  Bacterial polypetide isolated from the Sargasso Sea
KGDILNSNIVLINSSKVEKFSFKNKEDINSAIELIKKSKYKISDISSKVYTRNPLGPFTTSTLQQTSSSKLGFGASRTMQIAQRLYQGIDIEGDTVGLITYMRTDGTNISNDAVNDFRKFIKNLYGNNYLPNEPNNYSGKKAKNAQEAHEAIRPTDINRTPESLKKFLSTDQIKLYDLIWSRSLSSQMESAKFDRKTITIVSDDNLNQFKSSGSTIKFDGFLKLTRIDESEEEKILPDVNKEQVSINEFIDDQHFTQPPPRYSEASLVKKLEELGIGRPSTYASIISVISNRGYADIIN

SEQ ID NO: 183009 - protein, 294 aa, Unknown
  Bacterial polypetide isolated from the Sargasso Sea
CPGKEKVVSELKRLAKNADHIYLATDLDREGEAIAWHLQETIGGEPEKYRRVVFNEITKRAIQEAFKDPGELDTNRVNAQQARRFLDRVVGYMVSPLLWAKIARGLSAGRVQSVAVRLIVEREREIRKFVPEEFWQLHADLTAEGTRDPVRFEVTRYNDKPYRPVNDVQSKEHVDRLKAGSFKVAKREDKPTRSRPSAPFITSTLQQAASNRMGFSVKKTMMLAQRLYEAGYITYMRTDSTNLSQDAVTGCREFIQKQFGDRYLPEKPRVYGSKEGAQEAHEAIRPTDVSRRPT

SEQ ID NO: 183010 - protein, 294 aa, Unknown
  Bacterial polypetide isolated from the Sargasso Sea
GNKSIIIGENKVNDLLKTFSSEDWLVSKIEKKPSTRKPVPPFTTSTLQQEANRKLRLSARETMRCAQGLYERGFITYMRTDSVHLSEQATRAARECVSSMYGKEYLSKSPRQFNSTARNAQEAHEAIRPAGEVFKTPKETNLTGRDLSLYDLIWKRTVASQMAEARLTMINAEISVGDGIFKSSGKSIDFAGFFRAYVEGSDDPSSSLEQQEIILPNLSTGTSLEVTNKQSTFHETKPPARYTEAALVKVLEKEGIGRPSTYASIIGTIVDRGYANISSNTLAPTFTAFAVTAL

SEQ ID NO: 183011 - protein, 323 aa, Unknown
  Bacterial polypetide isolated from the Sargasso Sea
RAPFITSTLQQAASSKLGFGVSRTMRVAQKLYEAGRITYMRTDAPSLSNDSIEDARLFIKATLADEYLTEKPRIYSGKENAQEAHEAIRPTSASLTPEKLTGHSEEEVKLYDLIWRQFIACQMPDAKYLSINAKVALEDYVFSARGREVIFDGYTKISSQNVKKADEENLPSLEEGQVLKLVEVKNEKKFTKPPARFSEAALVKELESKGIGRPSTYAAIISTIQARGYVKLENKRFFVNKIGLIVSDRLIESFNEIMDYDFTANLENELDEIASGNLEWKSVLNKFYQTFQDDLKNARSAEDGMKPNEPTETNIICPSCNKS

SEQ ID NO: 183012 - protein, 265 aa, Unknown
  Bacterial polypetide isolated from the Sargasso Sea
CWFYISPILWTKLPGSKSAGRVQSVALRLVTEREHEIELFKPQEFWTISCNFKNEENKIIKSKLSFFNKDKIEKFSFKKKVESENALKEIYSKSYQITDVSSKVYKRNPLAPFTTSTLQQTASGKFGFGASRTMQIAQRLYQGIDIDGDTIGLITYMRTDGTQISKDAIDDFRKFINNTHGREYLPENPNSYTGKKAKNAQEAHEAIRPTDVSKKPSDMKKYLSTDQSKLYELIWNRALSSQMTPAEFDRKSIIIESSDKKVGFK

SEQ ID NO: 183013 - protein, 319 aa, Unknown
  Bacterial polypetide isolated from the Sargasso Sea
ITYMRTDAPSLSKESIQDARNYIGERIGEKYLTNAPRIYSSTENAQEAHEAIRPTNAYLTADDLMNHTEEEKRLYLLIWQQYIASQMPDAEYLSTSAKINIGEYTFSAKGREIVFDGYTKISQPSKSDDEDILPPLREGEELKLNEVHLDQKFTKPPARYSEAALVKELEKKGIGRPSTYANIISTIQDRGYVEIQNRRFFVKKIGHIVAERLIESFDDIMDYEFTANLENNLDSVARGELDWRNVLDDFYNAFQKDLVSASEENGMRGNQPTPTNITCPCGKTNMVIRNSSNGVFLGCMGYQNVGDDKCKETLNLVSG

SEQ ID NO: 183014 - protein, 287 aa, Unknown
  Bacterial polypetide isolated from the Sargasso Sea
QAQETRRILDRLFGYELSPLLWKKVAPRLSAGRVQSVSVRLLVRRERERRSFKKGCYWGIKASLVKDNITFETKLFSLKGQRISNGSDFDEQTGKLKQGNKSLIIGEEKVNDLMKAFSSEDWLVSKIEKKPSIRKPVPPFTTSTLQQEANRKLRLSARETMRCAQGLYERGFITYMRTDSVHLSEQAIRAARECVSSKYGKEYLSNSPRQFNSTARNAQEAHEAIRPAGEVFKTPKETNLIGRDLSLYDLIWKRTVASQMAEAKLTMINAEISVGDGLFKSSGKSID

SEQ ID NO: 183015 - protein, 259 aa, Unknown
  Bacterial polypetide isolated from the Sargasso Sea
KADFESSNGKIIKAQSLKSFLDSNEVKSFLQKNKQSKFIISEKNINPVKKSPTAPFITSTLQQEASRKLYFSVSKTMNIAQRLYESGLITYMRTDSVNISKEAQLSILELIKNKYGEKYANPRNYKSKSKVAQEAHEAIRPTDFSKSSLDGDYDQKRLYELIWRRTVSSQMTDSQIERTNLKINSVDDENIFSAKGEVLIFDGFLKIYIEGVDNIEEESEGIIPDVKVGDEIKLNKIVSTEKFSRPPYRYTEASLVKKL

SEQ ID NO: 183016 - protein, 272 aa, Unknown
  Bacterial polypetide isolated from the Sargasso Sea
MNLVIVESPAKAKTINKYLGDNYTVLASYGHIRDLPSKNGSVDPDQNFKMEWEVDSFSKKYLKEITDAAKDSSKIILATDPDREGEAIAWHVKEYLDEKKLLKDKEIERVVFNEITKKAVTHGIENPRQIEPLLVDAYMARRALDYLVGFNISPILWTKLPGSKSAGRVQSVALKLITEREHEIELFKPEEFWTLSINFQDINKSKITASISQLDGEKIEKFSFKNKEKIEKAISNIKTKKFNITDISSKVVSRNPSGAFTTSTLQQVASSR

SEQ ID NO: 183017 - protein, 290 aa, Unknown
  Bacterial polypetide isolated from the Sargasso Sea
EKKLLKDKKIERVVFNEITKKAVTNGIENPRSIEPQLVDAYMARRALDYLVGFNISPILWTKLPGSKSAGRVQSVALRLLTEREHEIENFKPEEFWKLFVDFKNDDGNIINTYPFQVNNKKIEKFSFRNKNDINDIVVDIKKKEYELTDITSKIYNRNPSGPFTTSTLQQSSSSKLGFGASRTMQIAQRLYQGIDIEGETVGLITYMRTDGTNISNEAISVFRNYIEKNYGKNYLPNHALNYSGKKAKNAQEAHEAIRPTDIERNPESLKKYLSTDQFKLYNLIWSRALS

SEQ ID NO: 183018 - protein, 320 aa, Unknown
  Bacterial polypetide isolated from the Sargasso Sea
DKKVERVVFNEITKKAVTNGIDNPRKIESNLVDAYMARRALDYLVGFNISPILWTKLPGSKSAGRVQSVALRLLTEREHEIEQFNPEEFWTLNVNFKTLKGYILNSNLVLLNNKKVEKFSFINKDDINKAIEIIKNSKYKISDITSKIFTRNPLGPFTTSTLQQTSSSKLGFGASRTMQIAQRLYQGIDIDGDTVGLITYMRTDGTNISTDAISEFRSFIQKSYGEQYVPKEPNNYSGKKAKNAQEAHEAIRPTDISRTPDNMKKFLSSDQIKLYDLIWSRALSSQMEAAKFDRKTITIISDDNLNHLKCSGSTIKFDGF

SEQ ID NO: 183019 - protein, 220 aa, Unknown
  Bacterial polypetide isolated from the Sargasso Sea
MAKSLVIVESPAKAKTINKYLGKDFIVKSSVGHVRDLPTKALGKVEPKKPAKELKTLSEEERQEYLRRHEYLKLVDRMGVDPEKDWKAHYQVLQGKEKVVNELKKLAKDADTIYLATDLDREGEAIAWHLQELLGKKDKTYQRVVFNEITKNAIQDAFSAPGELNISRVNAQQARRFLDRVVGFMVSPLLWKKIARGLSAGRVQSVAVRLVVEREREIKA

SEQ ID NO: 183020 - protein, 321 aa, Unknown
  Bacterial polypetide isolated from the Sargasso Sea
VFFNEITKKAILDAIKNPREIHLPLVEAYLARRALDYLVGFNISPILWTKLPGSKSAGRVQSVALKLITEREKEIELFKPEEYWTLSSDFTNKNNQNIFSKLSLFNGEKIEKFSFKNKEEIQKAVDVINKTKFKIADVNTKIFRRNPLAPFTTSTLQQTASGRFGFGASRTMQIAQRLYQGVDIEGETTGLITYMRTDGTNISKEAIDDFRKFITKDYGDKYLPEAPNSYTGKKAKNAQEAHEAIRPTNISRKPSDIKKYVNVDQFKLYELIWSRALSSQMTPAEFDRNTIIISSDDNKINFRASGSVVKFDGFLKVYQVK

SEQ ID NO: 183021 - protein, 317 aa, Unknown
  Bacterial polypetide isolated from the Sargasso Sea
KNFLKDKEVQRVVFNEITKKAVINGIDNPRKIEPHLVDAYMARRALDYLVGFNISPILWTKLPGSKSAGRVQSVALRLLTEREHEIEIFKPKEFWTLNVIFTNRKNEKINTAISHLDANKIEKFSFKNKEDINNALSQIKNKKYNITDISSKTYSRNPSGPFTTSTLQQTASSKLGFGASRTMQIAQRLYQGIDIEGETVGLITYMRTDGTNISKDAVISFRDFITKNYSDKYLPEQPLNYSGKKAKNAQEAHEAIRPTEIIRKPEDIKKYLSTDQYKLYNLIWARSLSSQMQSAKFDRKTITINSSDNKNIFKASG

SEQ ID NO: 183022 - protein, 177 aa, Unknown
  Bacterial polypetide isolated from the Sargasso Sea
MARSLVIVESPAKAKTINRYLGSDYVVKSSVGHVRDLPTRSKPVDPKARAEEAKKTKALDPEKRAAYKAKRSRDQLIRKMGINPDKDWQAYYEILPGKEKVIDELKKFADKADKVYLATDLDREGEAIAWHLKEIIGGDSDKFRRVVFNEITKKAIEEAFMEPGEIDMDMVQAQQAR

SEQ ID NO: 183023 - protein, 211 aa, Unknown
  Bacterial polypetide isolated from the Sargasso Sea
MNLVIVESPAKAKTINKYLGKDYLVLASYGHIRDLPSKNGSVDPENKFEMQWEIDSFSKKYLKEITNAAEDSDKIILATDPDREGEAIAWHVKKVLESKKLLKGKNLERVVFNEITKNAILEAIKNPREIHLPLVEAYLARRALDYLVGFNISPILWTKLPGSKSAGRVQSVALKLITEREKEIELFKPEEYWTLTSDFTNKNNKNILSKL

SEQ ID NO: 183024 - protein, 307 aa, Unknown
  Bacterial polypetide isolated from the Sargasso Sea
ALKNINKHEYFVKDVNSKIVKRNPSAPFTTSTLQQTSSGKFGFGASRTMQIAQRLYQGIEIDGETIGLITYMRTDGTNISNEAVKEFRSFVEDDLGKNYLPDTPNNYKGKKAKNAQEAHEAIRPTDIKKKPDEMKKYLSTDQFKLYDLIWSRALASQMKAAEFDRNTIQIHSKDNSVQFTSSGSVIKFDGFLKIYSFQNDDEEKNILPEVKVGEKLSLGELIDEQHFTSPPPRYSEASLVKKMEELGIGRPSTYASIISVLSTRNYTELLNKRFHPTDRGKLLSAFLEKLFSKYVDYNFTARFRKST

SEQ ID NO: 183025 - protein, 287 aa, Unknown
  Bacterial polypetide isolated from the Sargasso Sea
NGSVDPENDFKMIWELDNFSKKYLKEITDSAKDSTKIILATDPDREGEAIAWHVKEFLDEKKLLKDKKIERVVFNEITKKAVKNGIDNPREIEPQLVNAYMARRALDYLVGFNISPILWTKLPGSKSAGRVQSVALRLLTEREHEIEVFKPEEFWTLNVIFKTTDGNEINSNIIQLDENKIEKFSFKNKNDIKNAIDSLKNKKYNITNISSKIFSRNPSGPFTTSTLQQTASSKLGFGASRTMQIAQRLYQGIDIEGDTVGLITYMRTDGTNISKDAVETFRKYISK

SEQ ID NO: 183026 - protein, 272 aa, Unknown
  Bacterial polypetide isolated from the Sargasso Sea
KEVEKVYLATDLDREGEAIAWHLKEALGKNKFEYHRVRFNEITKSSILESFADPKEIDQDLVNAQQARRFLDRVVGFELSPLLWKKIARGLSAGRVQSVALKLLCEREKLISQFQPEEFWEVSTTLKDFNNEEILFKLNRKKSDPLLKEDEAKKIEELVNSSSLEISEVTKKPTSVKPRAPFITSTLQQAASSKLGFGVSRTMRVAQKLYEAGRITYMRTDAPSLSNDSIDDARLFIKDTLADEYLTDKPRIYSGKENAQEAHEAIRPTRQA

SEQ ID NO: 183027 - protein, 304 aa, Unknown
  Bacterial polypetide isolated from the Sargasso Sea
NFVPREYWSIEALMASPSGATFEARLTHLNGEKLDKMDLGDNSAAMAAVTAIEARTFSVQKIERKKTRRHPAPPFTTSTLQQEASRKLRFGARRTMQVAQRLYEGMQLDGETVGLITYMRTDGVQIANEAVASSRALIGRDYGEAYVPGSPRVYKSKAKNAQEAHEAVRPTDLKRRPADVASYLDDDQRRLYELIWKRTIASQMESAVLDQVAVEIGASDNKVGLRATGSVIAFDGFLRLYQEGRDDSDKETTSDTASVSEDRILPPLNEGDAVEHRQVTPEQHFTQPPPRYSEASLVKTLEEL

SEQ ID NO: 183028 - protein, 290 aa, Unknown
  Bacterial polypetide isolated from the Sargasso Sea
SNIKTKKFNITDISSKVVSRNPSGPFTTSTLQQVASSKLGFGASRTMQIAQKLYQGIEIDGDTVGLITYMRTDGTNLSADAVSDFRNFIKKEYGNEYLPENPNNYSGKKAKNAQEAHEAIRPTDINRNPDSVKKYLSSDQQKLYSLIWSRALSSQMETAKFDRNTITIESEDGKTICKSSGSVLKFDGFLKVYSNQSKDDDEQILPEMSKGPINIEALIDEQHFTQPPPRYSEASLVKKLEELGIGRPSTYASIISTIANRGYAEIVNKRFFPTDRGKLISAFLEKLFSK

SEQ ID NO: 183029 - protein, 318 aa, Unknown
  Bacterial polypetide isolated from the Sargasso Sea
SKDGSVNPDNGFDMKWEIGADSKKHVKAIADALKHDNELILATDPDREGEAISWHLEETLRNKRVITSDTPVSRVVFNAITKSAVSEAMENPREIDAPLVHAYLARRALDYLVGFNLSPVLWRKLPGAKSAGRVQSVCLRLIVEREIEIEAFKPKEYWSVKASLKTPRGQLFEGKLINLAGTKLDKYDLKSGSEAELAAQAIATRELLVSSVESKPVSRNPYAPFMTSTLQQEASRKYGMGARQTMQAAQRLYEAGHITYMRTDGIDMAPEAVTSTREAIKERYGEKFLPSSPRFYKNKAKNAQEAHECIRPTSISKD

SEQ ID NO: 183030 - protein, 275 aa, Unknown
  Bacterial polypetide isolated from the Sargasso Sea
MTKSLVIVESPAKARTINKYLGSEFIVESSRGHIRDLPQKPVSSGKRLAIPKGTSPEDKIKLKEINARKALIRRMGIDPDNEWETEWETIPGKEKQIKALKKAAKSVDHIYLATDLDREGEAIAWHLKEALGPKHSYSRVRFNQITKTAILDSFSNANEIDLDLVKAYRARRILDRVIGFELSPLLWKKIARGLSAGRVQSVALRLLDERERSIQAFIPEEFWEIKLDVKSSTEEIIKFDLFRKKSDPLLKKADAEEIQNQINLAELSINEISKK

SEQ ID NO: 183031 - protein, 301 aa, Unknown
  Bacterial polypetide isolated from the Sargasso Sea
MNLVIVESPAKAKTINKYLGGNYTVLASYGHIRDLPSKNGSVNPDDKFKMIWEVDSFSKKYLKEITDAAKKSEKIILATDPDREGEAIAWHVKEYLEEKKILKDKKVERVVFNEITKKAVTNGIDNPRNIESNLVNAYMARRALDYLVGFNISPILWTKLPGSKSAGRVQSVALRLLTEREHEIEQFNPVEFWTLNVNFKTSKGDLLNSNLVLLNDKKIEKFSFKNKEDINNAIELIKNSKYKISDTTSKIYSRNPLGPFTTSTLQQTASSKLGFGASRTMQIAQRLYQGIDIEGDTVGLI

SEQ ID NO: 183032 - protein, 253 aa, Unknown
  Bacterial polypetide isolated from the Sargasso Sea
MNLVIVESPAKAKTINKYLGSDYKVLASYGHIRDLPSKNGSVDPENKFKMIWEIDSFSKKYLKEIVDVVKDSKKIILATDPDREGEAIAWHVKEYLDEKKLLKDKKIERVVFNEITKKAVANGIENPRSIENHLVDAYMARRALDYLVGFNISPILWTKLPGSKSAGRVQSVALRLLTEREHEIEVFKPEEFWTLNIVFETKENNLITTNINQLDGNKIEKFSFKNKNEINIAIEDIKKSKYEITDITSKNLF

SEQ ID NO: 183033 - protein, 147 aa, Unknown
  Bacterial polypetide isolated from the Sargasso Sea
MAKSLVIVESPAKAKTINRYLGKDYVVKSSVGHIRDLPTGGATVDPKARAEEAKKTRALSPQKREIYKRERARRRLIRRMGVNPDNNWDAAYSTLPGKEKVVDELKRLAADAPFIFLATDMDREGEAIAWHLKETIGGEDSRFQRVV

SEQ ID NO: 183034 - protein, 304 aa, Unknown
  Bacterial polypetide isolated from the Sargasso Sea
VSTQGNFVVSEIKERMTNRNPGAPFTTSTIQQEASLKLGFSVKRTMVVAQQLYEGNFDIPDYSGGLITYMRTDSVALADQALKQAKEVINSEYGKKYILKEPRKYKSRTVNAQEAHEAIRPVDFSQKPATVQKHLSHDQFRLYSLIWKRALASQMTAAEIARTTINIEAGQEKEYLFEAQGQRVIFPGFLKVYAESNDEQLDTLSEKDVILPNVEQGKMLALKDPEEPVDMEKLFTKPPPRYTEASLVKKLESEGIGRPSTYAPTISTIQDRGYVELTDEKKLKPTSIGEVVTDFLADHFTKIV

SEQ ID NO: 183035 - protein, 333 aa, Unknown
  Bacterial polypetide isolated from the Sargasso Sea
LFKLNRKKSDPLLKEGEAKKIEELVGSSSLEISEITKKPTTVKPKAPFITSTLQQAASSKLGFGVSRTMRVAQKLYEAGRITYMRTDAPSLSNDSIEDARLFIKDTLAEEYLTEKPRIYSGKENAQEAHEAIRPTSASLTPEKLSGHSEEEVKLYDLIWRQFIACQMPDAKYLSINAKVVLDDYVFSARGREVIFDGYTKISSQNAKKSDEENLPSLEEGQVLKLVEVKNEKKFTKPPARFSEAALVKELESKGIGRPSTYAAIISTIQARGYVKLENKRFFVNKIGLIVSDRLIESFNEIMDYDFTANLENELDEIASGNLEWKSVLNKFYQ

SEQ ID NO: 183036 - protein, 265 aa, Unknown
  Bacterial polypetide isolated from the Sargasso Sea
MFNGEKIERFSFKSKEEIEKVVDIINKTRFKIADVNSKLYRRNPLAPFTTSTLQQTASGRFGFGASRTMQIAQRLYQGVDIEGETTGLITYMRTDGTNISKEAIEDFRKYITEDYGNKYLPNEPNSYTGKKAKNAQEAHEAIRPTNIKRKPSDIKKYVNADQFKLYELIWSRALSSQMTPAEFDRNTIIISSDDKKINFRASGSVIKFDGFLKVYQVQETDEDAKNILPEVKVGEEISVLKLNDEQHFTDPPPRYSEASLVKKME

SEQ ID NO: 183037 - protein, 196 aa, Unknown
  Bacterial polypetide isolated from the Sargasso Sea
MNLVIVESPAKAKTINKYLGSEYKVLASYGHIRDLPSKNGSVDPEKNFEMQWELDSFSKKYLKEITDAAKESDKIILATDPDREGEAIAWHVKQVLDDKKLLKGKKLERVVFNEITKNAVLKGINNPREIEDTLVKAYLARRALDYLVGFNISPILWTKLPGSKSAGRVQSVALKLITQREHEIESFKPEEYWSLN

SEQ ID NO: 183038 - protein, 158 aa, Unknown
  Bacterial polypetide isolated from the Sargasso Sea
MNLVIVESPAKAKTINKYLGSDYTVLASYGHIRDLPSKNGSVDPENNFKMVWEIDSFSQRYLKEITDSAKDSSKIILATDPDREGEAIAWHVKEFLKEKKLLKDKKVERVVFNEITKKAVTKGIDNPRQIETELVDAYMARRALDYLVGFNISPNIMD

SEQ ID NO: 183039 - protein, 290 aa, Unknown
  Bacterial polypetide isolated from the Sargasso Sea
TAIESKKIILATDPDREGEAIAWHVKEFLNEKKILKDKQIERVVFNEITKKAVTKGIDNPRQIEPLLVDAYMARRALDYLVGFNISPILWTKLPGSKSAGRVQSVALKLITEREHEIESFNPKEYWSLNINFVDKNKNKISSNISQIDSKKIEKFSFNNKDEINKAINELKSKKFFITDLSTKVVNRNPLGPFTTSTLQQTSSGRLGFGASRTMQIAQKLYQGIEIEGDTVGLITYMRTDGTNISQDAVTSFRKYINDQFGQNYLPKEPPSYSGKKAKNAQEAHEAIRPT

SEQ ID NO: 183040 - protein, 295 aa, Unknown
  Bacterial polypetide isolated from the Sargasso Sea
MVIVESPAKAKTINKYLGDNYTVLASYGHIRDLPSKNGSVDPDQNFKMEWEVDSFSKKYLKEITDAAKESSKIILATDPDREGEAIAWHVKEYLDEKKLLKDKEIERVVFNEITKKAVTYGIENPRQIEPLLVDAYMARRALDYLVGFNISPILWTKLPGSKSAGRVQSVALKLITEREHEIELFKPEEFWTLSINFQDKNKSKITASISQLDGEKIEKFSFKNKEEIEKAISNIKTKKFNITDISSKVVSRNPSGPFTTSTLQQVASSRLGFGASRTMQIAQKLYQGIEIEGDT

SEQ ID NO: 183041 - protein, 311 aa, Unknown
  Bacterial polypetide isolated from the Sargasso Sea
VGYTLSPLLWKKVSWGLSAGRVQSVAVRLLVQRERARRAFKSGSYWDLKAKLEKEGSEFEVKMTSIGGQRIASGSDFDESTGLLKTGRNVKLLKEEESRELAKQLTTDTWKVINVEEKPSIRKPVPPFTTSTLQQEANRKLRLSARETMRCAQGLYERGFITYMRTDSVHLSDQAINASRNCVESKYGVEYLSKKPRQFSNKTRNAQEAHEAIRPSGESFKTPKESKLQGRDLSLYELIWKRTVASQMADARLTMLGVELQVSDVIFRASGKRIDFPGFFRAYVEGTDDPDSALEGQEVLLPKLLVGDTLE

SEQ ID NO: 183042 - protein, 241 aa, Unknown
  Bacterial polypetide isolated from the Sargasso Sea
AQKRKDEEELELPDVKPGETLKLEQLAPAQHFTKPPARFSEASLVKELEKRGIGRPSTYAAIISTIQERGYVKVDNRRFYAEKMGEIVTDRLVENFGDLMSYDFTANMEVRLDDIAHGELQWRKVLDQFYGDFSQQLKTAESDPEQGGMRTNQFVLTDIACPTCGRQMGIRTASTGVFLGCSGYNLPPKERCTTTMNLTPGDDAVEVADEDELETEILRHKKRCAKCGTAMDHYLIDEQRK

SEQ ID NO: 183043 - protein, 235 aa, Unknown
  Bacterial polypetide isolated from the Sargasso Sea
MNVVVVESPAKAKTINKYLGTDFTVIASYGHIRDLPSKNGSVNPEENFAMTYEIDPNSQKHIKAIANALKKSEKLYLATDPDREGEAIAWHVIKALSEIKGCENKEIKRVVFNEITKNAVTSAIKNPREIDMDLVNAQQARRALDYLVGFNLSPVLWRKLPGARSAGRVQSVALRLICERELEISKFKPEEFWSINAIFTRANESDIKINAKLIKLNNDKLEKFSIKNETDANLA

SEQ ID NO: 183044 - protein, 316 aa, Unknown
  Bacterial polypetide isolated from the Sargasso Sea
IIEKIKVNDLLKTFSSEDWRVSKIEKKPSTRKPVPPFTTSTLQQEANRKLRLSARETMRCAQGLYERGFITYMRTDSVHLSEQATKAARECVSSMYGKEYLSNSPREFNSTARNAQEAHEAIRPAGEVFKTPKETNLTGRDLSLYDLIWKRTVASQMAEARLTMINAEISVGDGLFKSSGKSIDFAGFFRAYVEGSDDPSSSLEQQEIILPNLTTGTCLEVTNKESTFHETKPPARYTEAALVKVLEKEGIGRPSTYASIIGTIVDRGYANISSNTLSPTFTAFAVTALLEEHFPDLVDTTFTAKMESSLDEISSG

SEQ ID NO: 183045 - protein, 227 aa, Unknown
  Bacterial polypetide isolated from the Sargasso Sea
MNLVIVESPAKAKTINKYLGKDYTVLASYGHIRDLPSKNGSVDPENKFKMIWEVDSFSKKYLKEITDVAKDSDKIILATDPDREGEAIAWHVKEFLDEKKILKDKKIERVVFNEITKKAVINGIENPRSLEGQLVDAYMARRALDYLVGFNISPILWTKLPGSKSAGRVQSVALRLLTEREHEIEVFNPEEFWTINVNFITSSKNILTSSISELNGEKIEKFSFETK

SEQ ID NO: 183046 - protein, 125 aa, Unknown
  Bacterial polypetide isolated from the Sargasso Sea
MSKSLVIVESPAKAKTISKYLGSEYIVKSSVGHIRDLPKKASPNSKRASIPKDVSPEEKLRLKSINDRNRLIRRMGIDPDNGWIADWQIIPEKEKVIKSLKKAAKGVDHIYLATDLDREGEAIAW

SEQ ID NO: 183047 - protein, 154 aa, Unknown
  Bacterial polypetide isolated from the Sargasso Sea
MGKSLVIVESPAKAKTINKYLGKDFIVKSSVGHIRDLPTSGGATKSDPKERARQAALTRKMSPDEKAEYRKKKAHDQLINRMGIDPDNDWKASYEVLPGKEKVVEELQRLAKNADQIYLATDLDREGEAIAWHLREVIGSESKPYRRVVFNEIT

SEQ ID NO: 183048 - protein, 265 aa, Unknown
  Bacterial polypetide isolated from the Sargasso Sea
EITDAAKDSSKIILATDPDREGEAIAWHVKEYLDEKKLLKDKEIERVVFNEITKKAVIQGIENPRQIEPLLVDAYMARRALDYLVGFNISPILWTKLPGSKSAGRVQSVALKLITEREHEIESFKPEEFWTLSIKFADNKNQNVTASITQLDNNKIEKFSFRNKDEINKAVSSINKKKFGITDISSKIVNRNPSGPFTTSTLQQTASSRLGFGASRTMQIAQKLYQGIEIEGETIGLITYMRTDGTNLSKDAVAAFRNYIQKKMA

SEQ ID NO: 183049 - protein, 333 aa, Unknown
  Bacterial polypetide isolated from the Sargasso Sea
NVSISAASLGDMERDAQRLYELIWRQFVPCQMTPAKYDATTIKVAAGDYELTAKGRVLKFDGWTRVQPQLRKKGEEELMLPDVQKGDVLDLKALDPKQHFTKPVARFNEASLVKELEKRGIGRPSTYASIISTIQDRGYVRLENKRFYAEKMGEIVNDRLMENFDDLMSYDFTANMEQHLDDIAEGNKDWKDVLNEFYSGFYDKLLNAEKDPEEGGMRLNQAVPAGIDCDKCGREMNVRTASTGVFLGCSGYNLPPKERCTNTMNLTPGDEVVKVDDEEELETEALRSKKRCPKCGTAMDSYLVDETRKLHVCGNTPTCDGTLVEAGTFKIKG

SEQ ID NO: 183050 - protein, 313 aa, Unknown
  Bacterial polypetide isolated from the Sargasso Sea
VGNEKEAFAIESSVKEGNFVVSEIKERLANRNPSAPFTTSTIQQEASLKLGFSVKRTMVVAQQLYEGNFDIPDYSGGLITYMRTDSVAIAEQALRQMNDVIESEYGQKYGLKEPRKFKSRAVNAQEAHEAIRPVDFSQKPSMVQAHLSHDQFRLYSLVWKRALGSQMTAAEIARTTINIESGKENEFLFEAQGQRVVFSGFLQIYAETNDEQGDTLSEKDVILPKVEKGQILALKNPQEPVELEKLFTKPPPRYTEASLVKKLESEGIGRPSTYAPTISTIQDRGYVELTDEKKLKPTSIGEVVTDFLAEHFT

SEQ ID NO: 183051 - protein, 293 aa, Unknown
  Bacterial polypetide isolated from the Sargasso Sea
MNLVIVESPAKAKTINKYLGSEFNVLASFGHVRDLPSKNGSVDPENNFAFEWEVSSTSKKHMKEIYNASADASTLYLATDPDREGEAIAWHIVELLNKKKLLKDKTVKRVVFSEITKNAVKKGIANPRDIDTDLVDAYLARRALDYLFGFNLSPVLWRKLPGAKSAGRVQSVALRLICERELDIESFKPEEYWKIKGNVKLEDGFNIEANLLSVEGKKVEKFSFKSEDDAKKIVNLFSDNKFEIIDITKKPASRNPEPPFSTSTLQQTASSIYGFGASRTMQIAQKLFQGMKL

SEQ ID NO: 183052 - protein, 274 aa, Unknown
  Bacterial polypetide isolated from the Sargasso Sea
KSKYKISDISSKIYTRNPLGPFTTSTLQQTSSSKLGFGASRTMQIAQRLYQGIDIEGDTVGLITYMRTDGTNISSDAVTDFRYFIKNSYGDNYLPEEPNNYSGKKAKNAQEAHEAIRPTDITRTPESIKKFLSTDQNKLYDLIWSRALSSQMEAAKFDRKTITINSDNNLNQFKCSGSTVKFDGFLKLSKIVENEDEKILPDVNKEEVLANDFTDEQHFTQPPPRYSEASLVKKLEELGIGRPSTYASIISVISNRGYADLVNKRFFPTDRGKL

SEQ ID NO: 183053 - protein, 305 aa, Unknown
  Bacterial polypetide isolated from the Sargasso Sea
EDFVHLVVVESPAKAKTIEGYLGSDYKVIASLGHIRDLPSSEGSVKPDEDFKMIWELGDKGKKQAKTLNEAVKNSESLILATDPDREGEAIAWHVLEVLQEKGSLADKKISRVTFNAITKKEINEAINNPREIDTEMVQAYLARRALDYLVGFTLSPVLWRKLPGARSAGRVQSVALRLICEREIEIESFIPQEYWSINGHFSYEDNDPFEAKLTHFDNKKLEQFDINNEDRSEEIKIAIQEANFKITDIQEKNVSRKPSPPFITSTLQMEASRKLNMTAKVTMMTAQKLYEAGLITYMRTDGVQ

SEQ ID NO: 183054 - protein, 224 aa, Unknown
  Bacterial polypetide isolated from the Sargasso Sea
MSKNLVIVESPAKAKTISKYLGSDFIVESSVGHIRDLPKKAPANSKRASIPKDVSPEEKIRLKSINDRNRLIRRMGIDPDNGWKAEWQIIPEKEKVIKSLRKAAKGVERIYLATDLDREGEAIAWHLKEALGPEKYEYSRVRFNQITKTSIVDSFNDPKEIDLDLVKAYRARRFLDKVIGFELSPLLWKKIARGLSAGRVQSVALRILDERERLIQEFIPEEFW

SEQ ID NO: 183055 - protein, 208 aa, Unknown
  Bacterial polypetide isolated from the Sargasso Sea
MSKSLVIVESPAKAKTINKYLGAEFVVKSSVGHIRDLPTSGNGKPVDAKARAAAAALTRKMKPEEKVIHKKKKAKQQLVARMGVDPDKGWKANYQILPGKEKVVSELKKVAKNAETIYLATDLDREGEAIAWHLREAIGGDQTRYKRVVFNEITKRAVAEAFSEPGDVDMRYVEAQQARRFLDRVVGFMVSPLLWEKVARGLSAGRVQ

SEQ ID NO: 183056 - protein, 273 aa, Unknown
  Bacterial polypetide isolated from the Sargasso Sea
GPFTTSTLQQTASSRIGFGASRTMQIAQKLYQGIDIEGETIGLITYMRTDGTNLSADAVTAFRNYIKKDFGNEYLPENALNYSGKKAKNAQEAHEAIRPTDITRTPQLVKKYLSPDQNKLYDLIWTRALSSQMESAKFDRNTITISTKDDDTICKASGSVLKFDGFLKIYKNLSKDDDENILPEMSKGPINIESLLDEQHFTQPPPRYSEASLVKKLEELGIGRPSTYASIISTIANRGYAEIINKRFFPTDRGKLISAFLEKLFSKYVDYNF

SEQ ID NO: 183057 - protein, 321 aa, Unknown
  Bacterial polypetide isolated from the Sargasso Sea
MNIFVKDVNSKIVKRNPSAPFTTSTLQQTSSGKFGFGASRTMQIAQRLYQGIEIDGETIGLITYMRTDGTNISNEAVKEFRSFVEGDLGKNYLPDNPNSYKGKKAKNAQEAHEAIRPTDIKKKPDEMKKYLSTDQFKLYNLIWSRALASQMKAAEFNRNTIQINSKDESVQFSSSGSVIKFDGFLKVYSFQTDDEENNILPEVKIGEKLSIGELIDEQHFTSPPPRYSEASLVKKMEELGIGRPSTYASIISVLSTRNYTELLNKRFHPTDRGKLLSAFLEKLFSKYVDYNFTADLENQLDEITSGKTNYLSVLETFWKDF

SEQ ID NO: 183058 - protein, 291 aa, Unknown
  Bacterial polypetide isolated from the Sargasso Sea
MGKNYTVLASYGHIRDLPSKNGSVDPDQNFKMIWEIDSFSKKYLKEITEVAKDSSKIILATDPDREGEAIAWHVKEFLNEKKLLKDKIIERVVFNEITKKAVTKGIENPRSIEPQLVDAYMARRALDYLVGFNISPILWTKLPGSKSAGRVQSVALRLLTEREHEIENFKPEEFWKLFVNFKIKDGNNINTYPFQINNEKIEKFSFKNKNDINNIINDIKKKEYEITDIISKIYNRNPSGPFTTSTLQQSSSSKLGFGASRTMQIAQRLYQGIDIEGETIGLITYMRTDGT

SEQ ID NO: 183059 - protein, 291 aa, Unknown
  Bacterial polypetide isolated from the Sargasso Sea
YHRVVFNEITKKAVQEAFAHPGKLDEDRVQAQQARRFLDRVVGFMLSPLLWAKIARGLSAGRVQSVAVSLLVEREREIRAFVPEEYWEIFADTHGPQGSLRLEVVKQAGEAFRPVNEEEAQAAVALLQANAYQVSDRSDKKTQSRPNPPLITSTLQQAASTRLGFSVKKTMTLAQRLYEAGFITYMRTDSTHLSADAVSAARNLVAQAFGDEYLPASPNVYASKADAQEAHEAIRPTDANRAGQQLSLERDQERLYDLIRNYFLASQMTNARFLSSTITVRCGEFELRARG

SEQ ID NO: 183060 - protein, 280 aa, Unknown
  Bacterial polypetide isolated from the Sargasso Sea
IDSFSKKYLKEITNAAEDSNKIILATDPDREGEAIAWHVKKVLESKKLLKGKDLERVVFNEITKKAILEAIKNPREIHLPLVEAYLARRALDYLVGFNISPILWTKLPGSKSAGRVQSVALKLITEREKEIELFKPEEYWTLTSNFTNKDNKNILSKLSLYDGKKIERFTFKNKNEIDQAINIINKSKFTIKDVNTKIFKRNPLAPFTTSTLQQTASGKFGFGASRTMQIAQRLYQGIDIEGETTGLITYMRTDGTNISQEAIDEFRNVIKKDLEMNFYL

SEQ ID NO: 183061 - protein, 293 aa, Unknown
  Bacterial polypetide isolated from the Sargasso Sea
KPRKINSELVEAYLARRALDHLIGFSISPILWRKLPGSKSAGRVQSVALKLICEREIEIEKFNIEEYWSISSIFLNNNNENFLARLFIFDSKKLAKMNIKNEDEANKALDKINKSSFNITKIVSKRVKRNPLAPFTTSTLQQEASNKLGFGASRTMRIAQKLYEGINIGSETTGLITYMRTDGVQLSSQAIRELQEEIINRHGKDYIPQIPRVYKSKAANAQEAHEAIRPTSISRDPDDMSQYLDTEQFKLYELIWKRTISSQMQSAELDETSADISNKDMSIVFRANGSQVS

SEQ ID NO: 183062 - protein, 290 aa, Unknown
  Bacterial polypetide isolated from the Sargasso Sea
ADKFNYSRVRFNQITKDAILESFEDPKDIDSSLVEAQQARRFLDRVVGFELSPLLWAKIARNLSAGRVQSVALRLLVEREHSIQKFKPEEFWEISFKVNAVNEESTSIEFNLNRKKSDLLLQVEEAKKIEELINSSDLLVNEVTQKPVKSKPKPPFITSTLQQAASTKLGFNVKRTMRTAQKLYENGLITYMRTDAPALSPESIKDARMYIEINLGEKYLTNAPRIYSSNENAQEAHEAIRPTNASTKSDSLLSSTDEEKRLYELIWQQFIGSQLPDAEYLATQCKNSVR

SEQ ID NO: 183063 - protein, 130 aa, Unknown
  Bacterial polypetide isolated from the Sargasso Sea
MNLVIVESPAKAKTINKYLGKDYLVLASYGHIRDLPSKNGSVDPDNKFQMEWEIDSFSKKYLKEITNAAEDSDKIILATDPDREGEAIAWHVKEVLEKKNLLKDKNLERVVFNEITKKAILDAIKNPRQI

SEQ ID NO: 183064 - protein, 322 aa, Unknown
  Bacterial polypetide isolated from the Sargasso Sea
VLASYGHVCDLPSKDGSVLPDEDFAMKWHVSGGSEKRIGEISSALKSADRLILATDPDREGEAISWHVLELLQDRGLVKDKPVERVVFNEVTKNAILAAMAQPRELDTELIDAYRARRALDYLVGFSISPVLWRKLPGARSAGRVQSVALRLICEREAAIEAFVTQEYWTVEAELGKADGRNFNARLTHLNGKKLGKLDINLETEAFAAATAIEAEGLSVVDIQTKRIRENPKPPFTTSTLQQEASRKLGFSASRTMQIAQKLYEGVNIGSETTGLITYMRTDGVQLGSEALASVRGEIGQRFGTGTCRTARGSIAQRPPTR

SEQ ID NO: 183065 - protein, 263 aa, Unknown
  Bacterial polypetide isolated from the Sargasso Sea
KETREINMCEVNAQQSRRIIDRLIGFKLSPCLWKHIQTKETGLSAGRVQSALLNLLAEREQHILNYEPEISLDITASFTNLDNDCDFIFSGEYEIDDEFIQLLFTIISRDRKFLVSNSTKTKDKSYPKKPFITSTLQQSAQNELGFPVGMTMDIAQKLYEAGHITYMRTDSTFISEEFQTDLKRKIDKDYGDKIYQKSKEKKVKGAQEAHEAIRPTNIFNMPLIDGNQMKLYQFILKRTITSHMKPAEYDVYKIQLHNELTSK

SEQ ID NO: 183066 - protein, 323 aa, Unknown
  Bacterial polypetide isolated from the Sargasso Sea
GKLIVFQKKYLKENTDAARKSEKIILATDPDREGEAIAWHVREYLEEKKLLKDKKIERVVFNEITKKAVTNGIDNPRNIENNLVDAYMARRALDYLVGFNISPILWTKLPGSKSAGRVQSVALRLLTEREHEIEQFTPEEFWTLNVNFKTSNGDILNSNLLLLNNAKIEKFSFKNKEDINIAIELIKKSKYKISDISSKIYTRNPLGPFTTSTLQQTSSSKLGFGASRTMQIAQRLYQGIDIEGDTVGLITYMRTDGTNISNDAVTEFRSFIKSSYGDNYLPKEANNYSGKKAKNAQEAHEAIRPTDITRTPESIKKFLSTDQ

SEQ ID NO: 183067 - protein, 309 aa, Unknown
  Bacterial polypetide isolated from the Sargasso Sea
TKSLVIVESPAKAKTISKYLGPEYIVESSVGHIRDLPKKGGTARTRLVVPKDLSPEEKARQKEINARKSLVRRMGVDPDNGWDADWQIIPEKEKVLKALKKAAKNVDNIYLATDLDREGEAIAWHLKEALGPQKYNYSRVRFNQITKDAIIESFSDPKEIDLNLVKAYRARRFLDKVIGFELSPLLWKKIARGLSAGRVQSVALRLLDERERSIQEFIPEEYWEISFSATTNNDETITFNLATKKTDPLLSKEKVETIKQQIESCNLSINEISKKPVKVKPKAPFITSTLQQSSSTRLGFYVKKTHASC

SEQ ID NO: 183068 - protein, 285 aa, Unknown
  Bacterial polypetide isolated from the Sargasso Sea
MNLVIVESPAKAKTINKYLGDNYTVLASYGHIRDLPSKNGSVDPDQNFKMEWEVDSFSKKYLKEITDAAKDSSKIILATDPDREGEAIAWHVKEYLDEKKLLKDKEIERVVFNEITKKAVTYGIENPRQIEPLLVDAYMARRALDYLVGFNISPILWTKLPGSKSAGRVQSVALKLITEREHEIELFKPEEFWTLSINFQDKNKSNITASISLLDGKKIEKFSFKNKEEIEKAINNIKNKKFNITDISSKVVSRNPSGPFTTSTLQQVASSRLGFGASRTMQIAQ

SEQ ID NO: 183069 - protein, 311 aa, Unknown
  Bacterial polypetide isolated from the Sargasso Sea
MTTSLVIVESPAKAKTISKYLGNEYIVKSSVGHIRDLPKGKSKNVAKRITLPKNISLEEKKELKVKQERDRLIRRMGVDPDNAWSVEYQIIPEKEKVIKDLKKAAKNVDHIYLATDLDREGEAIAWHLKEALGNKHSYSRVRFNQITKTAILDSFSDPQEIDLDLVKAQQARRFLDRVVGFELSPLLWKKIARGLSAGRVQSVALRLLAEREGLIQEFIPEEFWEISMILENDSKQVINFKLSRKKSDPLLKEKEALEIESLIKESSLKIDEIVKKPTRTKPRPPFITSTLQQSASTRLGFYVKRTMRVAQ

SEQ ID NO: 183070 - protein, 295 aa, Unknown
  Bacterial polypetide isolated from the Sargasso Sea
AGHITYMRTDAPSLSKESIQDARNYISERVGEKYLTNAPRIYSSTENAQEAHEAIRPTNAYLTADDLMNHTEEEKRLYLLIWQQYISSQMPDAEYLSTSAKINIGEYTFYAKGREIVFDGHTKISQPSKSDDEDILPPLREGEELKLNEVHLDQKFTKPPARYSEAALVKELEKKGIGRPSTYANIISTIQDRGYVEIQNRRFFVKKIGHIVAERLIESFDDIMDYEFTANLENNLDSVARGELDWRNVLDDFYNTFQKDLVSASDENGMRGNQPTPTNITCPCGKTNMVIRNSS

SEQ ID NO: 183071 - protein, 289 aa, Unknown
  Bacterial polypetide isolated from the Sargasso Sea
KLPGSKSAGRVQSVALRIICERENEIEHFKPEEYWSIDVLLKSKDNQIFKSTLKQINDKKLKKLDIGTEALTKEYIDIINSKTYKVDELKSKEVKRNPYAPFTTSTLQQDAGNKFGYSAASTMGKAQKLYQNGFITYMRTDSIVLSNDAISQSREYIKSNFGDNYLPNEARVYKSKAKNAQEAHEAIRPTNISNSPEKIKNEIGPDEFELYKLIWKRTVASQMSSAIFKQITLTIKANDNSVLLQSTGSSPVFDGMLKVYNYEKKSTGKEDETNIIPNINTGDEVEIEK

SEQ ID NO: 183072 - protein, 312 aa, Unknown
  Bacterial polypetide isolated from the Sargasso Sea
HRVRFNEITKSSILESFSDPKEIDQDLVNAQQARRFLDRVVGFELSPLLWKKIARGLSAGRVQSVALRLLCEREKLISQFQPEEFWEVSATLENFNHEEILFKLNRKKSDPLLKEDEAKKIEELVGSSSLEISEITKKPTTVKPKAPFITSTLQQAASSKLSFGVSRTMRVAQKLYEAGRITYMRTDAPSLSNDSIEDARLFIKDTLADEYLTEKPRIYSGKENAQEAHEAIRPTSASLTPEKLTGHSEEEVKLYDLIWRQFIACQMPDAKYLSINAKVILDDYVFSARGREVIFDGYTKNIFTKMLKKQTK

SEQ ID NO: 183073 - protein, 304 aa, Unknown
  Bacterial polypetide isolated from the Sargasso Sea
FSFKNKEDINDVAERIKKLKFNISDISSKVVSRNPSGPFTTSTLQQVSSGRLGLGASRTMQLAQKLYQGIEIDGETIGLITYMRTDGTNISEEAVSNFRNYIEKIYGDKYLPKDPLNYSGKKAKNAQEAHEAIRPTDIERSPDKVKKYLSPEQHKLYDLIWSRALSSQMQSAQFDRNTITISSDNKETILKTTGSVIKFDGYLKIYKDPKKEDGESILPKMSIGPINIESLIDEQHFTQPPPRYSEASLVKKLEELGIGRPSTYASIISVISTRGYVETLNKRFHPTDRGKLITAFWKSYFRNM

SEQ ID NO: 183074 - protein, 301 aa, Unknown
  Bacterial polypetide isolated from the Sargasso Sea
ISEREKEILNFNPESSYKTSAEFVNSNGIKFKSKYSINTNDDDNFSSFIEGFKDAKFSVSTIKKSPLTKKPAPPFTTSTMQQEAARKLGFNVSRTMQTAQRLYEAGHITYMRTDSVTLSETAQNSIKNAIEVKFGSNYHQSRNFSNKSKNAQQAHEAVRPTNFLNNIQNLDADQSKLYDLIWRRTVASQMSDAKVDKTTVKIKSNNHEGLFQSDGEVIKFDGFLKLYIESKDNQNNEDSQNNVLPNFIEGEIVIKEKVLVTQFFTKPPYRFTEASLVKKLEELGIGRPSTYAPTITTVRTE

SEQ ID NO: 183075 - protein, 297 aa, Unknown
  Bacterial polypetide isolated from the Sargasso Sea
YLATDLDREGEAIAWHLKEVLGPKYNYSRIRFNQITKAAILDSFSNPKEIDLGLVKAYRARRFLDKVIGFELSPLLWKKIARGLSAGRVQSVALRLLDERERSIQEFIPEEFWDIKLDIKLNTEEVIQFSLVRKKSDPLLTKVESEEIQNQVNNAELFINEISKKPVKVKPKPPFITSTLQQSASTRLSFNVKRTMRVAQKLYEAGYITYMRTDAPSLSETSINDARNFIKENLSDKYLTSNPRVYSSKENAQDAHEAIRPTNAHLRAIDLINLSDEETRLYQLIWERFIASQLPDA

SEQ ID NO: 183076 - protein, 197 aa, Unknown
  Bacterial polypetide isolated from the Sargasso Sea
MNLVIVESPAKAKTINKYLGGDYTVLASYGHIRDLPSKNGSVDPEDKFKMIWEVDSFSKKYLKEITDAAKKSEKIILATDPDREGEAIAWHVREYLEEKKLLKDKKIERVVFNEITKKAVTNGIDNPRNIETNLVDAYMARRALDYLVGFNISPILWTKLPGSKSAGRVQSVALRLLTEREHEIEQFKPEEFWSLNV

SEQ ID NO: 183077 - protein, 226 aa, Unknown
  Bacterial polypetide isolated from the Sargasso Sea
MGKSLVIVESPAKAKTINKYLGNDFIVKSSIGHVRDLPTSGSSKAKVPATKTPAEVRKMPPDEKAAYKQQRDYTNLVARMGIDPEKGWQPHYEILPGKEKVVQELQKLAEKADQIYLATDLDREGEAIAWHLQEIIGGEPEKYKRVVFNEITKNAIQQAFETPGELNTDMVFAQQTRRFLDRVVGFMVSPLLWAKVARGLSAGRVQSVAVRLLVEREREIKAFISE

SEQ ID NO: 183078 - protein, 268 aa, Unknown
  Bacterial polypetide isolated from the Sargasso Sea
LVIVESPAKAKTINKYLGDDYTVLASYGHIRDLPSKNGSVDPDHNFKMEWEVDSFSRKYLKEITDVAKESTKIILATDPDREGEAIAWHVKEYLDEKKLLKDKEIERVVFNEITKKAVIHGIENPRQIEPLLVDAYMARRALDYLVGFNISPILWTKLPGSKSAGRVQSVALKLITEREHEIELFNPEEFWTLAIKFGDSNKNTITASITQLNGKKIEKFTFRDKNSIENAIKEIKEKKFQITDISSKVVKRNPSGPFTTSTLQQVAS

SEQ ID NO: 183079 - protein, 311 aa, Unknown
  Bacterial polypetide isolated from the Sargasso Sea
FNEIQGDAILRAFQNPRDLDDELVEAYFARRALDYLVGFNLSPVLWRKLPGSKSAGRVQSVALRLICERETEIENFKTQEYWTINFTFLTKENQKVAANLTHLKGEKIGKLYFKNETSAQKAIDFIKGKNFKVLNINQKEIRNHPRPPFTTSTLQQEASRKLRFSATRTMSVAQKLYEGVQVDGEAVGLITYMRTDGVQMAKTAIGEVRDLIKNEFGANYVPKSPRIYKTKAKNAQEAHEAIRPTDVSRYPKHLIPYLDGDQEKLYKLIWDRTIASQMESATLEQVAVSIGCQDDIAMLRANGSVITFDGF

SEQ ID NO: 183080 - protein, 137 aa, Unknown
  Bacterial polypetide isolated from the Sargasso Sea
MNLVIVESPAKAKTINKYLGGNYKVLASYGHIRDLPSKNGSVDPDQDFKMEWEIDSFSKKYLKEITDAAKDSSKIILATDPDREGEAIAWHVKEYLNEKKLLKDKEIERVVFNEITKKAVIQGIENPRQIEPHLVDA

SEQ ID NO: 183081 - protein, 291 aa, Unknown
  Bacterial polypetide isolated from the Sargasso Sea
SRACSSVAVRLLVEREREIRAFLTESSFKTKALFKTKNDKSISSQLEKILKNKDEAYKFLETNISSNFHVSDIKKRPAKKAPAPPFTTSTLQQEASRKLYFSVSKTMNVAQRLYEAGYITYMRTDSVNLSEEAKNNINNQIKLSYGDKYLQIRQFKTKNKGAQEAHEAIRPTDFSKKKLNIDYDQARLYELIWRRALASQMRDAELEKSQILIKTDDYNESFTARGEIITFDGFLKLYLEGVDDEVDDDSTILPQVKIGEELQLDSITATERFSRPPFRYSEASLVKKWKS

SEQ ID NO: 183082 - protein, 309 aa, Unknown
  Bacterial polypetide isolated from the Sargasso Sea
MNLVIVKSPAKAKTINKYLGSDYTVLASYGHIRDLPSKNGSVDTDNKFKMIWEIDSFSKKYLKEITDTAKESKKIILATDPDREGEAIAWHVKEYLNEKKLLKDKPIERVVFNEITKKAVINGIENPRNIEPLLVDAYMARRALDYLVGFNISPILWTKLPGSKSAGRVQSVALKLLTEREHEIEVFVPEEFWTLNILFKTKENALINSNINILDGKKVDKFTFKNKNDVNSAIEKIKKIKYQISDISSKIFSRNPQGPFTTSTLQQTSSTKLGFGASRTMQIAQRLYQGIDIDGETIGLITYMRTDGT

SEQ ID NO: 183083 - protein, 243 aa, Unknown
  Bacterial polypetide isolated from the Sargasso Sea
MNLVIVESPAKAKTINKYLGDNFTVLASYGHIRDLPSKNGSVNPEEKFKMIWEVDTFSKKYLKEITDAAKNSNKIILATDPDREGEAIAWHVKEYLDEKKLLKDKKIERVVFNEITKKAVTKGIDNPRNIEPNLVDAYMARRALDYLVGFNISPILWTKLPGSKSAGRVQSVALRLLTEREHEIELFKPEEFWTLNVIFKTKNGDVLNSNTVLINNKKIEKFSFKNKDEINKSISLIKENKYK

SEQ ID NO: 183084 - protein, 294 aa, Unknown
  Bacterial polypetide isolated from the Sargasso Sea
KEYLDEKKILKDLKIERVVFNEITKKAVTNGIDNPRNIEPNLVDAYMARRALDYLVGFNISPILWTKLPGSKSAGRVQSVALRLLTEREHEIEQFNPEEFWTLNVNFKTSKADVLNSNIVILNGNKVEKFSFRNKEDTNKATELIKKSKYKISDINSKIYTRNPLGPFTTSTLQQTASSKLGFGASRTMQIAQRLYQGIDIEGDSVGLITYMRTDGTNISKDALSDFRNFIKSSYGDNYLPKEPNNYSGKKAKNAQEAHEAIRPTDISRAPGSMKKFLSTDQLKLYDLIWCRAL

SEQ ID NO: 183085 - protein, 117 aa, Unknown
  Bacterial polypetide isolated from the Sargasso Sea
MNLVIVESPAKAKTINKYLGDNYTVLASYGHIRDLPSKNGSVDPDQNFKMEWEVDNFSKKYLKDITDAAKESSKIILATDPDREGEAIAWHVKEYLNEKKLLKDKEVERVVFNEITK

SEQ ID NO: 183086 - protein, 292 aa, Unknown
  Bacterial polypetide isolated from the Sargasso Sea
MGSKSAGRVQSVALKLITEREKEIELFKPDEYWTLTSDFTNKNNKNIFSKLSLFNGEKIEKFSFKNKEEIQKAVDVINKTKFKITDVNTKVFRRNPLAPFTTSTLQQTASGRFGFGASRTMQIAQRLYQGVDIEGETTGLITYMRTDGTNISKEAIEDFRKFITDDYGDKYLPEAPNSYTGKKAKNAQEAHEAIRPTNISRKPSDIKKYVNADQFKLYELIWSRALSSQMTPAEFDRNTIIISSIDNKINFRASGSVVKFDGFLKVLSVQETDEDAKNILPEVKVGEEISIL

SEQ ID NO: 183087 - protein, 237 aa, Unknown
  Bacterial polypetide isolated from the Sargasso Sea
MNLVIVESPAKAKTINKYLGDNYTVLASYGHIRDLPSKNGSVDPDQNFKMEWEVDSFSKKYLKEITDAAKDSSKIILATDPDREGEAIAWHMKEYLGEKKLLKNKEIERVVFNEITKKAVTHGIENPRQIEPLLVDAYMARRALDYLVGFNISPILWTKLPGSKSAGRVQSVALKLITEREHEIELFKPEEFWTLSINFQDKDKSKITASISQLDGEKIEKFSFKNKEEIEKAISNI

SEQ ID NO: 183088 - protein, 291 aa, Unknown
  Bacterial polypetide isolated from the Sargasso Sea
TKDKTLISSNIVQLDGNKVEKFTFNNKDEVNIAIEKIKKNKYQINDINSKTISRNPLGPFTTSTLQQTSSSKLGFGASRTMQIAQRLYQGIDIEGETIGLITYMRTDGTNISKDTIEHFRNYILDNYGKQYLPQNALNYSGKKAKNAQEAHEAIRPTEISRTPDSIKKYLSTDQFKLYNLIWSRALSSQMESAKFDRKTINISSFDGKNVFKASGSSIKFDGFLKILKIEDIKDEEKILPDVVEGDVEINEFKDEQHFTQPPPRYSEASLVKKLEELGIGRPSTYASIISV

SEQ ID NO: 183089 - protein, 238 aa, Unknown
  Bacterial polypetide isolated from the Sargasso Sea
MNLVIVESPAKAKTINKYLGSDYTVLASYGHIRDLPSKNGSVDTDNKFKMIWEIDSFSKKYLKEITDIAKDSKKIILATDPDREGEAIAWHVKEYLNEKKLLKDKPVERVVFNEITKKAVINGIENPRNIEPLLVDAYMARRALDYLVGFNISPILWTKLPGSKSAGRVQSVALKLLTEREHEIEVFVPEEFWTLNILFKTKENALINSNINILDGKKVDKFTFKNKNDIKSAIDKIK

SEQ ID NO: 183090 - protein, 314 aa, Unknown
  Bacterial polypetide isolated from the Sargasso Sea
KKYNYSRVRFNQITKDAILNSFSDPKEIDLNLVKAYRARRFLDKVIGFELSPLLWKKIARGLSAGRVQSVALRLLDEKERSIQEFVPEEFWEISFTGASKNEELIKFKLNIKKTDPLLTEEKVKSIEKQIESCNLEINEITKKPVKIKPKAPFITSTLQQSASTRLGFNVKRTMRVAQKLYEAGLITYMRTDAPSLSKESINDARGFINENLGDKYLTNAPKIYSSTENAQEAHEAVRPTNAFLKPQDVLQLSEEESKLYKLIWERFVASQLPDAEYLSTSAKIVIEDNTFIARGRELVFDGFTKSTLKVLEKK

SEQ ID NO: 183091 - protein, 298 aa, Unknown
  Bacterial polypetide isolated from the Sargasso Sea
KKYLKEITDAAKDSSKIILATDPDREGEAIAWHVKEYLNEKKLLKDKEIERVVFNEITKKAVLHGIDNPRQIEPLLVDAYMARRALDYLVGFNISPILWTKLPGSKSAGRVQSVALKLITEREHEIESFNPEEFWTLSVKFKDKKNQIITASISQLENNKIEKFSFKNKEEINKAISIINKKKFSITDISSKIINRNPSGPFTTSTLQQTASSRLGFGASRTMQIAQKLYQGIEIDGETIGLITYMRTDGTNLSKDAVSTFRDYIKKEIGNEYLPESSLNYSGKKAKNAQEAHEAIRP

SEQ ID NO: 183092 - protein, 270 aa, Unknown
  Bacterial polypetide isolated from the Sargasso Sea
MNCLHYWWKKIARGLSAGRVQSVALRLLCEREKLISQFQPEEFWEVSATLKDFNHEEILFKLNRKKSDPLLKEDEAKKIEELVGSSSLEISEITKKPTTVKPKAPFITSTLQQAASSKLGFGVSRTMRVAQKLYEAGRITYMRTDAPSLSNDSIEDARLFIKDTLADEYLTEKPRIYSGKENAQEAHEAIRPTSASLTPEKLTGHSEEEVKLYDLIWRQFIACQMPDAKYLSINAKVILDDYVFSARGREVIFDGYTKISSQNAKKADEE

SEQ ID NO: 183093 - protein, 249 aa, Unknown
  Bacterial polypetide isolated from the Sargasso Sea
MNLVIVESPAKAKTINKYLGDNYTVLASYGHIRDLPSKNGSVDPDQNFKMEWEVDSFSKKYLKEITDAAKDSSKIILATDPDREGEAIAWHVKEYLDEKKLLKDKEIERVVFNEITKKAVTHGIENPRQIEPLLVDAYMARRALDYLVGFNISPILWTKLPGSKSAGRVQSVALKLITEREHEIELFKPEEFWTLSINFQDKNKSKITANISQLDGEKIEKFSFKNKEEIEKTISNIKTKKFNITDISS

SEQ ID NO: 183094 - protein, 294 aa, Unknown
  Bacterial polypetide isolated from the Sargasso Sea
RFNQITKDAIIKSFSDPKEIDLNLVKAYRARRFLDKVIGFELSPLLWKKIARGLSAGRVQSVALRLLDERERSIQEFIPEEYWEISFSATTNNDETITFNLATKKTDPLLSKEKVETIKQQIESCNLSINEISKKPVKVKPKAPFITSTLQQSSSTRLGFNVKRTMRVAQKLYEAGLITYMRTDAPSLSKESIKDARSYINENIGERYLTNAPKIYSSTENAQEAHEAVRPTNAYLKPQDVMYLSDEESKLYTLIWERFIASQMPDAEYLSTSAKVFVEENVFIGRGREVVFDG

SEQ ID NO: 183095 - protein, 260 aa, Unknown
  Bacterial polypetide isolated from the Sargasso Sea
MDYDFTARMEGELDEIAEGEVDWKKVLNDFYGNFRQQLENAESSGEKGMRANTPTETDIPCPSCGRNMQIRVASTGVFLGCSGYSLPPKERCKQTINLVSGDEVVSADEDVEGEGETRLLRKKRRCPKCGTAMDSYLVDEKRKLHVCGNNPDCSGYEVEEGTFRIKGYDGPTLECDKCGAEMQLKTGRFGKYFGCTNTECKNTRKLLKSGEPAPPKMDPVPMPELQCQKVDDTYVLRDGASGLFLAASKFPKNRETRPPL
